United States Patent Application Publication US 2005/0244851 A1 - sequence listing, part 116

SEQ ID NO: 4525015 - DNA, 25 bp, Homo sapien
tcctccatctgcaaagccaggctcc

SEQ ID NO: 4525016 - DNA, 25 bp, Homo sapien
gggatggggcaggtggttggactca

SEQ ID NO: 4525017 - DNA, 25 bp, Homo sapien
ttctgtgtggccatgacattagaga

SEQ ID NO: 4525018 - DNA, 25 bp, Homo sapien
ccatgacattagagagaacactctc

SEQ ID NO: 4525019 - DNA, 25 bp, Homo sapien
ctgtgtggccatgacattagagaga

SEQ ID NO: 4525020 - DNA, 25 bp, Homo sapien
tggccatgacattagagagaacact

SEQ ID NO: 4525021 - DNA, 25 bp, Homo sapien
tcatgtggtacaggtccgtatttag

SEQ ID NO: 4525022 - DNA, 25 bp, Homo sapien
cctctttctgtatgttcaatgtctg

SEQ ID NO: 4525023 - DNA, 25 bp, Homo sapien
tcaaagtatctgagagaacgtttca

SEQ ID NO: 4525024 - DNA, 25 bp, Homo sapien
gtatctgagagaacgtttcatgtgg

SEQ ID NO: 4525025 - DNA, 25 bp, Homo sapien
tctgtttcttgttgtttgctttctt

SEQ ID NO: 4525026 - DNA, 25 bp, Homo sapien
ttctgtttcttgttgtttgctttct

SEQ ID NO: 4525027 - DNA, 25 bp, Homo sapien
ctagcacccttttggctttctgttt

SEQ ID NO: 4525028 - DNA, 25 bp, Homo sapien
ctttctgtttcttgttgtttgcttt

SEQ ID NO: 4525029 - DNA, 25 bp, Homo sapien
taggaagaggaagacagagctctta

SEQ ID NO: 4525030 - DNA, 25 bp, Homo sapien
ctgtaggaagaggaagacagagctc

SEQ ID NO: 4525031 - DNA, 25 bp, Homo sapien
aggaagaggaagacagagctcttac

SEQ ID NO: 4525032 - DNA, 25 bp, Homo sapien
tgtaggaagaggaagacagagctct

SEQ ID NO: 4525033 - DNA, 25 bp, Homo sapien
agaatgccaccaatgccccaggaca

SEQ ID NO: 4525034 - DNA, 25 bp, Homo sapien
cagaatgccaccaatgccccaggac

SEQ ID NO: 4525035 - DNA, 25 bp, Homo sapien
aatgccaccaatgccccaggacagg

SEQ ID NO: 4525036 - DNA, 25 bp, Homo sapien
gaatgccaccaatgccccaggacag

SEQ ID NO: 4525037 - DNA, 25 bp, Homo sapien
gtggaatctgaagggtgagccttca

SEQ ID NO: 4525038 - DNA, 25 bp, Homo sapien
ggaatctgaagggtgagccttcatc

SEQ ID NO: 4525039 - DNA, 25 bp, Homo sapien
tctgaagggtgagccttcatcccca

SEQ ID NO: 4525040 - DNA, 25 bp, Homo sapien
aatctgaagggtgagccttcatccc

SEQ ID NO: 4525041 - DNA, 25 bp, Homo sapien
tcatgttgcgaggaaacgaaatcac

SEQ ID NO: 4525042 - DNA, 25 bp, Homo sapien
ccagcagtcatgttgcgaggaaacg

SEQ ID NO: 4525043 - DNA, 25 bp, Homo sapien
cagtcatgttgcgaggaaacgaaat

SEQ ID NO: 4525044 - DNA, 25 bp, Homo sapien
agcagtcatgttgcgaggaaacgaa

SEQ ID NO: 4525045 - DNA, 25 bp, Homo sapien
ttccagctgatgttccacttgtttc

SEQ ID NO: 4525046 - DNA, 25 bp, Homo sapien
ttcttccagctgatgttccacttgt

SEQ ID NO: 4525047 - DNA, 25 bp, Homo sapien
cttccagctgatgttccacttgttt

SEQ ID NO: 4525048 - DNA, 25 bp, Homo sapien
tcttccagctgatgttccacttgtt

SEQ ID NO: 4525049 - DNA, 25 bp, Homo sapien
tgactgatttctacggaccttgaat

SEQ ID NO: 4525050 - DNA, 25 bp, Homo sapien
ttgactgatttctacggaccttgaa

SEQ ID NO: 4525051 - DNA, 25 bp, Homo sapien
agttgactgatttctacggaccttg

SEQ ID NO: 4525052 - DNA, 25 bp, Homo sapien
gttgactgatttctacggaccttga

SEQ ID NO: 4525053 - DNA, 25 bp, Homo sapien
ctggcagaggggcacccagtcccac

SEQ ID NO: 4525054 - DNA, 25 bp, Homo sapien
gagcaggagtggggggagaggtaga

SEQ ID NO: 4525055 - DNA, 25 bp, Homo sapien
ggtgtgtaggctgtctcagctggca

SEQ ID NO: 4525056 - DNA, 25 bp, Homo sapien
aatcattagggctggggtgtgtagg

SEQ ID NO: 4525057 - DNA, 25 bp, Homo sapien
agggttgacccgaagggtcactgca

SEQ ID NO: 4525058 - DNA, 25 bp, Homo sapien
gagggttgacccgaagggtcactgc

SEQ ID NO: 4525059 - DNA, 25 bp, Homo sapien
gggttgacccgaagggtcactgcac

SEQ ID NO: 4525060 - DNA, 25 bp, Homo sapien
ggttgacccgaagggtcactgcacc

SEQ ID NO: 4525061 - DNA, 25 bp, Homo sapien
atgatgtagggccttccctgtggaa

SEQ ID NO: 4525062 - DNA, 25 bp, Homo sapien
ggccttccctgtggaaacctgttgc

SEQ ID NO: 4525063 - DNA, 25 bp, Homo sapien
agatgatgtagggccttccctgtgg

SEQ ID NO: 4525064 - DNA, 25 bp, Homo sapien
gatgtagggccttccctgtggaaac

SEQ ID NO: 4525065 - DNA, 25 bp, Homo sapien
accagaagtggctttctcagggata

SEQ ID NO: 4525066 - DNA, 25 bp, Homo sapien
tccctaggtggctggcaaccaccag

SEQ ID NO: 4525067 - DNA, 25 bp, Homo sapien
tcctgttcgctcctgctggaactct

SEQ ID NO: 4525068 - DNA, 25 bp, Homo sapien
cctgctggaactctagggctgtttt

SEQ ID NO: 4525069 - DNA, 25 bp, Homo sapien
aatgagaaccgatcaaggcctccag

SEQ ID NO: 4525070 - DNA, 25 bp, Homo sapien
gagaaccgatcaaggcctccagtca

SEQ ID NO: 4525071 - DNA, 25 bp, Homo sapien
tgagaaccgatcaaggcctccagtc

SEQ ID NO: 4525072 - DNA, 25 bp, Homo sapien
caatgagaaccgatcaaggcctcca

SEQ ID NO: 4525073 - DNA, 25 bp, Homo sapien
taacagctcagtctataatggaggg

SEQ ID NO: 4525074 - DNA, 25 bp, Homo sapien
tattagccagtgaatccatgtgagc

SEQ ID NO: 4525075 - DNA, 25 bp, Homo sapien
acttgtaggtcacaaaggtattgac

SEQ ID NO: 4525076 - DNA, 25 bp, Homo sapien
taatggagggcaaataaagagactt

SEQ ID NO: 4525077 - DNA, 25 bp, Homo sapien
tccggctccatgcattcttatggcc

SEQ ID NO: 4525078 - DNA, 25 bp, Homo sapien
gacgcggtttcctcgtgttagccaa

SEQ ID NO: 4525079 - DNA, 25 bp, Homo sapien
acgcggtttcctcgtgttagccaag

SEQ ID NO: 4525080 - DNA, 25 bp, Homo sapien
cgcgtccggctccatgcattcttat

SEQ ID NO: 4525081 - DNA, 25 bp, Homo sapien
cagcccattgggattccagttattt

SEQ ID NO: 4525082 - DNA, 25 bp, Homo sapien
gcccattgggattccagttatttac

SEQ ID NO: 4525083 - DNA, 25 bp, Homo sapien
acacagcccattgggattccagtta

SEQ ID NO: 4525084 - DNA, 25 bp, Homo sapien
cacacacagcccattgggattccag

SEQ ID NO: 4525085 - DNA, 25 bp, Homo sapien
tcgagatggatgcttgctgatgttc

SEQ ID NO: 4525086 - DNA, 25 bp, Homo sapien
cttaaggcaaagggccttttgaatg

SEQ ID NO: 4525087 - DNA, 25 bp, Homo sapien
gctgatgttccaaaacctctttagg

SEQ ID NO: 4525088 - DNA, 25 bp, Homo sapien
ggcaaagggccttttgaatgcaaaa

SEQ ID NO: 4525089 - DNA, 25 bp, Homo sapien
taatcccgttcagacaaatgagaat

SEQ ID NO: 4525090 - DNA, 25 bp, Homo sapien
tattgagtagttcccatgctagaca

SEQ ID NO: 4525091 - DNA, 25 bp, Homo sapien
agaagaggccatcgccttaagggaa

SEQ ID NO: 4525092 - DNA, 25 bp, Homo sapien
tctcatagagcagtaaccagagttt

SEQ ID NO: 4525093 - DNA, 25 bp, Homo sapien
gctttgaaggtcttttatccatatt

SEQ ID NO: 4525094 - DNA, 25 bp, Homo sapien
catgtcttatccatggacacgccat

SEQ ID NO: 4525095 - DNA, 25 bp, Homo sapien
gtcttgaaagaaggacttcatgtct

SEQ ID NO: 4525096 - DNA, 25 bp, Homo sapien
accaagtcttgaaagaaggacttca

SEQ ID NO: 4525097 - DNA, 25 bp, Homo sapien
gttgtcagttgataagataggcttg

SEQ ID NO: 4525098 - DNA, 25 bp, Homo sapien
gataggcttgatttgttactggtct

SEQ ID NO: 4525099 - DNA, 25 bp, Homo sapien
ttaggtcagcacaccaggcaatgta

SEQ ID NO: 4525100 - DNA, 25 bp, Homo sapien
tactggtcttaatgagggctttagg

SEQ ID NO: 4525101 - DNA, 25 bp, Homo sapien
cctaaaggtctgttgaggtgataag

SEQ ID NO: 4525102 - DNA, 25 bp, Homo sapien
gagccttgttaactctgctgtgcca

SEQ ID NO: 4525103 - DNA, 25 bp, Homo sapien
gatgagtagggttcacgagccttgt

SEQ ID NO: 4525104 - DNA, 25 bp, Homo sapien
gaaaagtcaagtgaaggtcaaggaa

SEQ ID NO: 4525105 - DNA, 25 bp, Homo sapien
agtaaaccaatcacccgagcaacct

SEQ ID NO: 4525106 - DNA, 25 bp, Homo sapien
agccagtaaaccaatcacccgagca

SEQ ID NO: 4525107 - DNA, 25 bp, Homo sapien
agatcagttttgtgcgaagccagta

SEQ ID NO: 4525108 - DNA, 25 bp, Homo sapien
cctggagatcagttttgtgcgaagc

SEQ ID NO: 4525109 - DNA, 25 bp, Homo sapien
aattgaatgtgacaggtcaggccca

SEQ ID NO: 4525110 - DNA, 25 bp, Homo sapien
ccccagctagttacattatgcaatg

SEQ ID NO: 4525111 - DNA, 25 bp, Homo sapien
tctgaagagaagagtcagggactga

SEQ ID NO: 4525112 - DNA, 25 bp, Homo sapien
gactgaggaaactaaccccagctag

SEQ ID NO: 4525113 - DNA, 25 bp, Homo sapien
atatcgcagtttgcagctatccaca

SEQ ID NO: 4525114 - DNA, 25 bp, Homo sapien
tcgcagtttgcagctatccacaaat

SEQ ID NO: 4525115 - DNA, 25 bp, Homo sapien
tatcgcagtttgcagctatccacaa

SEQ ID NO: 4525116 - DNA, 25 bp, Homo sapien
cgcagtttgcagctatccacaaatg

SEQ ID NO: 4525117 - DNA, 25 bp, Homo sapien
tctgccaatcgatgctaaacatgag

SEQ ID NO: 4525118 - DNA, 25 bp, Homo sapien
ggatgactccaaacactctgccaat

SEQ ID NO: 4525119 - DNA, 25 bp, Homo sapien
gacaaattcccatgagcttaccaat

SEQ ID NO: 4525120 - DNA, 25 bp, Homo sapien
tgtcttagagggttgatgtctgcct

SEQ ID NO: 4525121 - DNA, 25 bp, Homo sapien
tgcatcaaatttaaccgatggtggt

SEQ ID NO: 4525122 - DNA, 25 bp, Homo sapien
atgctggtagatgcaatatttttgc

SEQ ID NO: 4525123 - DNA, 25 bp, Homo sapien
ctgaaaatgctggtagatgcaatat

SEQ ID NO: 4525124 - DNA, 25 bp, Homo sapien
ttaaccgatggtggttgtttcatta

SEQ ID NO: 4525125 - DNA, 25 bp, Homo sapien
gagcagtcagggtattgcatgccat

SEQ ID NO: 4525126 - DNA, 25 bp, Homo sapien
agcagtcagggtattgcatgccatc

SEQ ID NO: 4525127 - DNA, 25 bp, Homo sapien
cagtcagggtattgcatgccatcat

SEQ ID NO: 4525128 - DNA, 25 bp, Homo sapien
gcagtcagggtattgcatgccatca

SEQ ID NO: 4525129 - DNA, 25 bp, Homo sapien
tgggattccaggtcctgctgactca

SEQ ID NO: 4525130 - DNA, 25 bp, Homo sapien
ggtcctgctgactcaggtgtccact

SEQ ID NO: 4525131 - DNA, 25 bp, Homo sapien
tccaggtcctgctgactcaggtgtc

SEQ ID NO: 4525132 - DNA, 25 bp, Homo sapien
gggattccaggtcctgctgactcag

SEQ ID NO: 4525133 - DNA, 25 bp, Homo sapien
cttaatgttgcggtggggcgtgagc

SEQ ID NO: 4525134 - DNA, 25 bp, Homo sapien
taatgttgcggtggggcgtgagccg

SEQ ID NO: 4525135 - DNA, 25 bp, Homo sapien
ttaatgttgcggtggggcgtgagcc

SEQ ID NO: 4525136 - DNA, 25 bp, Homo sapien
ggagcctgtcccgagccgctgtcat

SEQ ID NO: 4525137 - DNA, 25 bp, Homo sapien
gaggggcgcggaaaaggagcctgtc

SEQ ID NO: 4525138 - DNA, 25 bp, Homo sapien
aaaggagcctgtcccgagccgctgt

SEQ ID NO: 4525139 - DNA, 25 bp, Homo sapien
cgcggaaaaggagcctgtcccgagc

SEQ ID NO: 4525140 - DNA, 25 bp, Homo sapien
agctctcgcggctccacctctcccc

SEQ ID NO: 4525141 - DNA, 25 bp, Homo sapien
ccggccgagctctcgcggctccacc

SEQ ID NO: 4525142 - DNA, 25 bp, Homo sapien
ctctccccgccgccgtgaccctcgt

SEQ ID NO: 4525143 - DNA, 25 bp, Homo sapien
ctccccgccgccgtgaccctcgtgg

SEQ ID NO: 4525144 - DNA, 25 bp, Homo sapien
cttcctcacactcgcgactgggcgg

SEQ ID NO: 4525145 - DNA, 25 bp, Homo sapien
gactgggcggcacaaccaccaactc

SEQ ID NO: 4525146 - DNA, 25 bp, Homo sapien
cgaccgatctggtcccttcctcaca

SEQ ID NO: 4525147 - DNA, 25 bp, Homo sapien
ctttctgcccgaccgatctggtccc

SEQ ID NO: 4525148 - DNA, 25 bp, Homo sapien
tcaacaagaccgtgtgggacctcat

SEQ ID NO: 4525149 - DNA, 25 bp, Homo sapien
tccatggacccatagctggagcggc

SEQ ID NO: 4525150 - DNA, 25 bp, Homo sapien
gaatggctccgacagcttcatgcac

SEQ ID NO: 4525151 - DNA, 25 bp, Homo sapien
gacctcatggttggtgtcatgccca

SEQ ID NO: 4525152 - DNA, 25 bp, Homo sapien
cgtgcccacgctggtagacatgggt

SEQ ID NO: 4525153 - DNA, 25 bp, Homo sapien
gtgcagagcgtccttgccggatgca

SEQ ID NO: 4525154 - DNA, 25 bp, Homo sapien
tgctccctggagccgtcacagagct

SEQ ID NO: 4525155 - DNA, 25 bp, Homo sapien
ggatgcaggtaccaaggctggctcc

SEQ ID NO: 4525156 - DNA, 25 bp, Homo sapien
cacaatgtgtacaccggggaacggg

SEQ ID NO: 4525157 - DNA, 25 bp, Homo sapien
aagaatctccgtgaacagagaggaa

SEQ ID NO: 4525158 - DNA, 25 bp, Homo sapien
ctcaaagaatctccgtgaacagaga

SEQ ID NO: 4525159 - DNA, 25 bp, Homo sapien
gaataggtattagccaaagaggtct

SEQ ID NO: 4525160 - DNA, 25 bp, Homo sapien
cgtaaaggatttcttatgatcttca

SEQ ID NO: 4525161 - DNA, 25 bp, Homo sapien
tgtctgaatgctgtagtgaatatac

SEQ ID NO: 4525162 - DNA, 25 bp, Homo sapien
caaagagaacagttttgggcaaaga

SEQ ID NO: 4525163 - DNA, 25 bp, Homo sapien
taataaacagtgcacacttgggggc

SEQ ID NO: 4525164 - DNA, 25 bp, Homo sapien
tcaaacaacagcagaacataggcaa

SEQ ID NO: 4525165 - DNA, 25 bp, Homo sapien
tgtaggagattaaccccataacttg

SEQ ID NO: 4525166 - DNA, 25 bp, Homo sapien
ttgagcagctgtttgatgatggtga

SEQ ID NO: 4525167 - DNA, 25 bp, Homo sapien
tcttgagcagctgtttgatgatggt

SEQ ID NO: 4525168 - DNA, 25 bp, Homo sapien
aaatttcttgagcagctgtttgatg

SEQ ID NO: 4525169 - DNA, 25 bp, Homo sapien
ggcagccaagcccaacaaaataatg

SEQ ID NO: 4525170 - DNA, 25 bp, Homo sapien
aagcccaacaaaataatggcacaca

SEQ ID NO: 4525171 - DNA, 25 bp, Homo sapien
tggcagccaagcccaacaaaataat

SEQ ID NO: 4525172 - DNA, 25 bp, Homo sapien
gccaagcccaacaaaataatggcac

SEQ ID NO: 4525173 - DNA, 25 bp, Homo sapien
tgtcaaggagaggatcctccctggc

SEQ ID NO: 4525174 - DNA, 25 bp, Homo sapien
gaggtgagggtcacctcacgaagat

SEQ ID NO: 4525175 - DNA, 25 bp, Homo sapien
cttgtcaaggagaggatcctccctg

SEQ ID NO: 4525176 - DNA, 25 bp, Homo sapien
tcaaggagaggatcctccctggcct

SEQ ID NO: 4525177 - DNA, 25 bp, Homo sapien
ccatgcttgtctgcagccccaagct

SEQ ID NO: 4525178 - DNA, 25 bp, Homo sapien
catgcttgtctgcagccccaagctc

SEQ ID NO: 4525179 - DNA, 25 bp, Homo sapien
accatgcttgtctgcagccccaagc

SEQ ID NO: 4525180 - DNA, 25 bp, Homo sapien
caccatgcttgtctgcagccccaag

SEQ ID NO: 4525181 - DNA, 25 bp, Homo sapien
accgggctcatcagcagagttgtgg

SEQ ID NO: 4525182 - DNA, 25 bp, Homo sapien
gaccgggctcatcagcagagttgtg

SEQ ID NO: 4525183 - DNA, 25 bp, Homo sapien
tggaccgggctcatcagcagagttg

SEQ ID NO: 4525184 - DNA, 25 bp, Homo sapien
tcctggaccgggctcatcagcagag

SEQ ID NO: 4525185 - DNA, 25 bp, Homo sapien
atctgctgcagctccagcagcttca

SEQ ID NO: 4525186 - DNA, 25 bp, Homo sapien
catctgctgcagctccagcagcttc

SEQ ID NO: 4525187 - DNA, 25 bp, Homo sapien
tctgctgcagctccagcagcttcac

SEQ ID NO: 4525188 - DNA, 25 bp, Homo sapien
cctggttctgataaaaggtgatgga

SEQ ID NO: 4525189 - DNA, 25 bp, Homo sapien
atctttggcacggccccctggttct

SEQ ID NO: 4525190 - DNA, 25 bp, Homo sapien
ggttctgataaaaggtgatggattt

SEQ ID NO: 4525191 - DNA, 25 bp, Homo sapien
cccctggttctgataaaaggtgatg

SEQ ID NO: 4525192 - DNA, 25 bp, Homo sapien
tctctcttgccagtattgaatgaag

SEQ ID NO: 4525193 - DNA, 25 bp, Homo sapien
ctcttgccagtattgaatgaagcga

SEQ ID NO: 4525194 - DNA, 25 bp, Homo sapien
catctctcttgccagtattgaatga

SEQ ID NO: 4525195 - DNA, 25 bp, Homo sapien
attgaatgaagcgaagttcttgttt

SEQ ID NO: 4525196 - DNA, 25 bp, Homo sapien
ctgccttctccttcaggtggtccat

SEQ ID NO: 4525197 - DNA, 25 bp, Homo sapien
gtctgccttctccttcaggtggtcc

SEQ ID NO: 4525198 - DNA, 25 bp, Homo sapien
ccttcaggtggtccataaagctgct

SEQ ID NO: 4525199 - DNA, 25 bp, Homo sapien
ctccttcaggtggtccataaagctg

SEQ ID NO: 4525200 - DNA, 25 bp, Homo sapien
ctgccctcaggtggcattttcaagt

SEQ ID NO: 4525201 - DNA, 25 bp, Homo sapien
acactagctccagcggacttgaaaa

SEQ ID NO: 4525202 - DNA, 25 bp, Homo sapien
tgcttctcctggacactagctccag

SEQ ID NO: 4525203 - DNA, 25 bp, Homo sapien
cctggacactagctccagcggactt

SEQ ID NO: 4525204 - DNA, 25 bp, Homo sapien
ggacactagctccagcggacttgaa

SEQ ID NO: 4525205 - DNA, 25 bp, Homo sapien
ctgagggcaagatgtgagcattctt

SEQ ID NO: 4525206 - DNA, 25 bp, Homo sapien
cgggtcctctgggacactcggcatg

SEQ ID NO: 4525207 - DNA, 25 bp, Homo sapien
ctctgggacactcggcatgggccga

SEQ ID NO: 4525208 - DNA, 25 bp, Homo sapien
tctccgggtcctctgggacactcgg

SEQ ID NO: 4525209 - DNA, 25 bp, Homo sapien
cctgctctccgggtcctctgggaca

SEQ ID NO: 4525210 - DNA, 25 bp, Homo sapien
cttgctattccgcccaggcacactc

SEQ ID NO: 4525211 - DNA, 25 bp, Homo sapien
cactcccactactggtcgatgtggg

SEQ ID NO: 4525212 - DNA, 25 bp, Homo sapien
gctattccgcccaggcacactccca

SEQ ID NO: 4525213 - DNA, 25 bp, Homo sapien
gtgaccgcccgctcacaggaggtca

SEQ ID NO: 4525214 - DNA, 25 bp, Homo sapien
ctcagctgggccgttagctgctggt

SEQ ID NO: 4525215 - DNA, 25 bp, Homo sapien
agctgggccgttagctgctggttct

SEQ ID NO: 4525216 - DNA, 25 bp, Homo sapien
tgctggctggccgcttccaggtgct

SEQ ID NO: 4525217 - DNA, 25 bp, Homo sapien
gctggctggccgcttccaggtgctc

SEQ ID NO: 4525218 - DNA, 25 bp, Homo sapien
actgcctgtacagcgcctccttctc

SEQ ID NO: 4525219 - DNA, 25 bp, Homo sapien
tcactgcctgtacagcgcctccttc

SEQ ID NO: 4525220 - DNA, 25 bp, Homo sapien
cactgcctgtacagcgcctccttct

SEQ ID NO: 4525221 - DNA, 25 bp, Homo sapien
tgcctgtacagcgcctccttctcac

SEQ ID NO: 4525222 - DNA, 25 bp, Homo sapien
ctgctgctgataggtggccacgtac

SEQ ID NO: 4525223 - DNA, 25 bp, Homo sapien
tgacccaggtaatggtctggctgct

SEQ ID NO: 4525224 - DNA, 25 bp, Homo sapien
tgcaggtgacccaggtaatggtctg

SEQ ID NO: 4525225 - DNA, 25 bp, Homo sapien
gtgacccaggtaatggtctggctgc

SEQ ID NO: 4525226 - DNA, 25 bp, Homo sapien
caggtgacccaggtaatggtctggc

SEQ ID NO: 4525227 - DNA, 25 bp, Homo sapien
ggaagaccctgggtgtgagggcacg

SEQ ID NO: 4525228 - DNA, 25 bp, Homo sapien
aagaccctgggtgtgagggcacgtg

SEQ ID NO: 4525229 - DNA, 25 bp, Homo sapien
tgcaggaagaccctgggtgtgaggg

SEQ ID NO: 4525230 - DNA, 25 bp, Homo sapien
gcacgtggtggctggtttccagatt

SEQ ID NO: 4525231 - DNA, 25 bp, Homo sapien
aacagtcgcaggactgccctgcggg

SEQ ID NO: 4525232 - DNA, 25 bp, Homo sapien
aggcaggaagcgagaaacagtcgca

SEQ ID NO: 4525233 - DNA, 25 bp, Homo sapien
ataaggagcctgttatagcactgtc

SEQ ID NO: 4525234 - DNA, 25 bp, Homo sapien
cactgcacctggtataaggagcctg

SEQ ID NO: 4525235 - DNA, 25 bp, Homo sapien
tggatggggtggaggtttccgtctc

SEQ ID NO: 4525236 - DNA, 25 bp, Homo sapien
cctcccagcccttcttggatggggt

SEQ ID NO: 4525237 - DNA, 25 bp, Homo sapien
tcccctcccaagaggctgctgcccg

SEQ ID NO: 4525238 - DNA, 25 bp, Homo sapien
cccagcccttcttggatggggtgga

SEQ ID NO: 4525239 - DNA, 25 bp, Homo sapien
ctgctccaactgcagtgtgctcttg

SEQ ID NO: 4525240 - DNA, 25 bp, Homo sapien
ctcgccaagcttctcctgtagctcc

SEQ ID NO: 4525241 - DNA, 25 bp, Homo sapien
caactgcagtgtgctcttgttctca

SEQ ID NO: 4525242 - DNA, 25 bp, Homo sapien
actgcagtgtgctcttgttctcatt

SEQ ID NO: 4525243 - DNA, 25 bp, Homo sapien
cagctgccgaagcttctcgtgctgc

SEQ ID NO: 4525244 - DNA, 25 bp, Homo sapien
gccagctgccgaagcttctcgtgct

SEQ ID NO: 4525245 - DNA, 25 bp, Homo sapien
gctgccgaagcttctcgtgctgctc

SEQ ID NO: 4525246 - DNA, 25 bp, Homo sapien
tgccgaagcttctcgtgctgctcct

SEQ ID NO: 4525247 - DNA, 25 bp, Homo sapien
gggactggagctctcctgccactct

SEQ ID NO: 4525248 - DNA, 25 bp, Homo sapien
tctctctagttccttcctcaggtgc

SEQ ID NO: 4525249 - DNA, 25 bp, Homo sapien
ctctagttccttcctcaggtgctgc

SEQ ID NO: 4525250 - DNA, 25 bp, Homo sapien
ctgggactggagctctcctgccact

SEQ ID NO: 4525251 - DNA, 25 bp, Homo sapien
ctctacccgacgcatatcttgctgc

SEQ ID NO: 4525252 - DNA, 25 bp, Homo sapien
ctacccgacgcatatcttgctgctt

SEQ ID NO: 4525253 - DNA, 25 bp, Homo sapien
tctacccgacgcatatcttgctgct

SEQ ID NO: 4525254 - DNA, 25 bp, Homo sapien
tccttctatatgttcagcacactca

SEQ ID NO: 4525255 - DNA, 25 bp, Homo sapien
tctccttctatatgttcagcacact

SEQ ID NO: 4525256 - DNA, 25 bp, Homo sapien
ctctctccttctatatgttcagcac

SEQ ID NO: 4525257 - DNA, 25 bp, Homo sapien
cttctatatgttcagcacactcatc

SEQ ID NO: 4525258 - DNA, 25 bp, Homo sapien
cagtgcctggtcctgtagggactgc

SEQ ID NO: 4525259 - DNA, 25 bp, Homo sapien
ctgtggcgatgacagcagacagagc

SEQ ID NO: 4525260 - DNA, 25 bp, Homo sapien
tggcgatgacagcagacagagcgct

SEQ ID NO: 4525261 - DNA, 25 bp, Homo sapien
gcagacagagcgctctctaactctc

SEQ ID NO: 4525262 - DNA, 25 bp, Homo sapien
gatgacagcagacagagcgctctct

SEQ ID NO: 4525263 - DNA, 25 bp, Homo sapien
ggcccaaaggactcctcctgaagac

SEQ ID NO: 4525264 - DNA, 25 bp, Homo sapien
tgagatggggcccaaaggactcctc

SEQ ID NO: 4525265 - DNA, 25 bp, Homo sapien
gggcccaaaggactcctcctgaaga

SEQ ID NO: 4525266 - DNA, 25 bp, Homo sapien
gatggggcccaaaggactcctcctg

SEQ ID NO: 4525267 - DNA, 25 bp, Homo sapien
tagttcctctttctgtatgatcaat

SEQ ID NO: 4525268 - DNA, 25 bp, Homo sapien
gtatttagttcctctttctgtatga

SEQ ID NO: 4525269 - DNA, 25 bp, Homo sapien
gttcctctttctgtatgatcaatgt

SEQ ID NO: 4525270 - DNA, 25 bp, Homo sapien
cctctttctgtatgatcaatgtctg

SEQ ID NO: 4525271 - DNA, 25 bp, Homo sapien
ctttgggagaaaagccaagcaagtg

SEQ ID NO: 4525272 - DNA, 25 bp, Homo sapien
tctagctccctttcggctttctgtc

SEQ ID NO: 4525273 - DNA, 25 bp, Homo sapien
tttcggctttctgtctctcgttgtt

SEQ ID NO: 4525274 - DNA, 25 bp, Homo sapien
cggctttctgtctctcgttgtttgc

SEQ ID NO: 4525275 - DNA, 25 bp, Homo sapien
ctctagctccctttcggctttctgt

SEQ ID NO: 4525276 - DNA, 25 bp, Homo sapien
taggaagaggaagacagagctctta

SEQ ID NO: 4525277 - DNA, 25 bp, Homo sapien
ctgtaggaagaggaagacagagctc

SEQ ID NO: 4525278 - DNA, 25 bp, Homo sapien
aggaagaggaagacagagctcttac

SEQ ID NO: 4525279 - DNA, 25 bp, Homo sapien
tgtaggaagaggaagacagagctct

SEQ ID NO: 4525280 - DNA, 25 bp, Homo sapien
agaatgccaccaatgccccaggaca

SEQ ID NO: 4525281 - DNA, 25 bp, Homo sapien
cagaatgccaccaatgccccaggac

SEQ ID NO: 4525282 - DNA, 25 bp, Homo sapien
aatgccaccaatgccccaggacagg

SEQ ID NO: 4525283 - DNA, 25 bp, Homo sapien
gaatgccaccaatgccccaggacag

SEQ ID NO: 4525284 - DNA, 25 bp, Homo sapien
cttccagctgatgttccacttgttt

SEQ ID NO: 4525285 - DNA, 25 bp, Homo sapien
tcttccagctgatgttccacttgtt

SEQ ID NO: 4525286 - DNA, 25 bp, Homo sapien
ttcttccagctgatgttccacttgt

SEQ ID NO: 4525287 - DNA, 25 bp, Homo sapien
ttccagctgatgttccacttgtttc

SEQ ID NO: 4525288 - DNA, 25 bp, Homo sapien
cagtcgactgatttttacggacgtt

SEQ ID NO: 4525289 - DNA, 25 bp, Homo sapien
gtcgactgatttttacggacgttga

SEQ ID NO: 4525290 - DNA, 25 bp, Homo sapien
ttcagtcgactgatttttacggacg

SEQ ID NO: 4525291 - DNA, 25 bp, Homo sapien
cgactgatttttacggacgttgaat

SEQ ID NO: 4525292 - DNA, 25 bp, Homo sapien
aggtagagagaatgatcgttagggc

SEQ ID NO: 4525293 - DNA, 25 bp, Homo sapien
gagaggtagagagaatgatcgttag

SEQ ID NO: 4525294 - DNA, 25 bp, Homo sapien
agaatgatcgttagggctggggtgt

SEQ ID NO: 4525295 - DNA, 25 bp, Homo sapien
tagagagaatgatcgttagggctgg

SEQ ID NO: 4525296 - DNA, 25 bp, Homo sapien
agggttgacccgaagggtcactgca

SEQ ID NO: 4525297 - DNA, 25 bp, Homo sapien
gggttgacccgaagggtcactgcac

SEQ ID NO: 4525298 - DNA, 25 bp, Homo sapien
ggttgacccgaagggtcactgcacc

SEQ ID NO: 4525299 - DNA, 25 bp, Homo sapien
gagggttgacccgaagggtcactgc

SEQ ID NO: 4525300 - DNA, 25 bp, Homo sapien
gatgtagggccttccctgtggaaac

SEQ ID NO: 4525301 - DNA, 25 bp, Homo sapien
atgatgtagggccttccctgtggaa

SEQ ID NO: 4525302 - DNA, 25 bp, Homo sapien
ggccttccctgtggaaacctgttgc

SEQ ID NO: 4525303 - DNA, 25 bp, Homo sapien
agatgatgtagggccttccctgtgg

SEQ ID NO: 4525304 - DNA, 25 bp, Homo sapien
cagcagtccatccacaatcttaaga

SEQ ID NO: 4525305 - DNA, 25 bp, Homo sapien
ttcttaaccagtacccagcagtcca

SEQ ID NO: 4525306 - DNA, 25 bp, Homo sapien
agaagcctggtcagccaagactcac

SEQ ID NO: 4525307 - DNA, 25 bp, Homo sapien
cacccggctaaagccagaattctta

SEQ ID NO: 4525308 - DNA, 25 bp, Homo sapien
caggtggctggcaaccaccggaagt

SEQ ID NO: 4525309 - DNA, 25 bp, Homo sapien
ctcctgctggaactctaggtctgtt

SEQ ID NO: 4525310 - DNA, 25 bp, Homo sapien
ggaactctaggtctgtttttctgcc

SEQ ID NO: 4525311 - DNA, 25 bp, Homo sapien
gttttcctgttcctgttcactcctg

SEQ ID NO: 4525312 - DNA, 25 bp, Homo sapien
atattcatgagaaccgtcagcccct

SEQ ID NO: 4525313 - DNA, 25 bp, Homo sapien
gaagagcagtaatattcatgagaac

SEQ ID NO: 4525314 - DNA, 25 bp, Homo sapien
ttggaaagaagagcagtaatattca

SEQ ID NO: 4525315 - DNA, 25 bp, Homo sapien
ggaaagaagagcagtaatattcatg

SEQ ID NO: 4525316 - DNA, 25 bp, Homo sapien
tgcagccaatttgttgtgttgagtt

SEQ ID NO: 4525317 - DNA, 25 bp, Homo sapien
gcagccaatttgttgtgttgagttt

SEQ ID NO: 4525318 - DNA, 25 bp, Homo sapien
cattgcagggtggggagggaggaag

SEQ ID NO: 4525319 - DNA, 25 bp, Homo sapien
attgcagggtggggagggaggaagg

SEQ ID NO: 4525320 - DNA, 25 bp, Homo sapien
ccattgcagggtggggagggaggaa

SEQ ID NO: 4525321 - DNA, 25 bp, Homo sapien
gccattgcagggtggggagggagga

SEQ ID NO: 4525322 - DNA, 25 bp, Homo sapien
gaaggcacaatcatgaaaaacaaag

SEQ ID NO: 4525323 - DNA, 25 bp, Homo sapien
tcatcaggcaattcacaaattatat

SEQ ID NO: 4525324 - DNA, 25 bp, Homo sapien
atttctacatataattgaaggcaca

SEQ ID NO: 4525325 - DNA, 25 bp, Homo sapien
gctctatatgcattaagtccatgat

SEQ ID NO: 4525326 - DNA, 25 bp, Homo sapien
cagcgagggcacaatgcgcctttcc

SEQ ID NO: 4525327 - DNA, 25 bp, Homo sapien
acagcgagggcacaatgcgcctttc

SEQ ID NO: 4525328 - DNA, 25 bp, Homo sapien
aaacggcatttgagtattcttcaca

SEQ ID NO: 4525329 - DNA, 25 bp, Homo sapien
gagaacatgcaagcgtgaacatact

SEQ ID NO: 4525330 - DNA, 25 bp, Homo sapien
aacatacttgttagggatataggac

SEQ ID NO: 4525331 - DNA, 25 bp, Homo sapien
gtttttcctctgacgacggcactga

SEQ ID NO: 4525332 - DNA, 25 bp, Homo sapien
gcaagttctagaaactcgttactca

SEQ ID NO: 4525333 - DNA, 25 bp, Homo sapien
tatagtggctatagtttcagttctc

SEQ ID NO: 4525334 - DNA, 25 bp, Homo sapien
tgtttcccttcgttgtgatcaccca

SEQ ID NO: 4525335 - DNA, 25 bp, Homo sapien
aatagagcggttgtttccataagcc

SEQ ID NO: 4525336 - DNA, 25 bp, Homo sapien
taaagtgacatggagacatgccact

SEQ ID NO: 4525337 - DNA, 25 bp, Homo sapien
ccttgtaaccttgtaggcagacact

SEQ ID NO: 4525338 - DNA, 25 bp, Homo sapien
tcttattgggctccgtgtgcttgat

SEQ ID NO: 4525339 - DNA, 25 bp, Homo sapien
tgcttgatgcttaaagtgacatgga

SEQ ID NO: 4525340 - DNA, 25 bp, Homo sapien
tttcctggcatcgatgaaggcagag

SEQ ID NO: 4525341 - DNA, 25 bp, Homo sapien
gctttcctggcatcgatgaaggcag

SEQ ID NO: 4525342 - DNA, 25 bp, Homo sapien
tgctttcctggcatcgatgaaggca

SEQ ID NO: 4525343 - DNA, 25 bp, Homo sapien
ctttcctggcatcgatgaaggcaga

SEQ ID NO: 4525344 - DNA, 25 bp, Homo sapien
catctacaggttctaggagttccag

SEQ ID NO: 4525345 - DNA, 25 bp, Homo sapien
ccaggatttaatgcccacggagaca

SEQ ID NO: 4525346 - DNA, 25 bp, Homo sapien
tgatcccagtactgtggacggccga

SEQ ID NO: 4525347 - DNA, 25 bp, Homo sapien
cgagcgcggcgatcgattgagccta

SEQ ID NO: 4525348 - DNA, 25 bp, Homo sapien
gcttcaccccggcttctaggtggca

SEQ ID NO: 4525349 - DNA, 25 bp, Homo sapien
ctgcgcccgacggaaacccagaacg

SEQ ID NO: 4525350 - DNA, 25 bp, Homo sapien
aggctggtctccgacctcgggtgat

SEQ ID NO: 4525351 - DNA, 25 bp, Homo sapien
ccgggtgtggtgggccgcgcaggta

SEQ ID NO: 4525352 - DNA, 25 bp, Homo sapien
ggcagaacggattgcagatttgcat

SEQ ID NO: 4525353 - DNA, 25 bp, Homo sapien
ctggcagaacggattgcagatttgc

SEQ ID NO: 4525354 - DNA, 25 bp, Homo sapien
tggcagaacggattgcagatttgca

SEQ ID NO: 4525355 - DNA, 25 bp, Homo sapien
tcttcactagccgatgcatctgtgc

SEQ ID NO: 4525356 - DNA, 25 bp, Homo sapien
cctcagtcctgctcaactgggtcat

SEQ ID NO: 4525357 - DNA, 25 bp, Homo sapien
cacctcagtcctgctcaactgggtc

SEQ ID NO: 4525358 - DNA, 25 bp, Homo sapien
tgagtccacctcagtcctgctcaac

SEQ ID NO: 4525359 - DNA, 25 bp, Homo sapien
tccacctcagtcctgctcaactggg

SEQ ID NO: 4525360 - DNA, 25 bp, Homo sapien
tgtcactgtccagctattggcttct

SEQ ID NO: 4525361 - DNA, 25 bp, Homo sapien
ggtgaaccggcaggcgagttgcatt

SEQ ID NO: 4525362 - DNA, 25 bp, Homo sapien
ctgccgccctagttagggtgaaccg

SEQ ID NO: 4525363 - DNA, 25 bp, Homo sapien
gcagctgccgccctagttagggtga

SEQ ID NO: 4525364 - DNA, 25 bp, Homo sapien
atctgcttggtagatggcagcttcc

SEQ ID NO: 4525365 - DNA, 25 bp, Homo sapien
gtttattatatttgtgttcttgtca

SEQ ID NO: 4525366 - DNA, 25 bp, Homo sapien
tgtcatctgcttggtagatggcagc

SEQ ID NO: 4525367 - DNA, 25 bp, Homo sapien
tatttgtgttcttgtcatctgcttg

SEQ ID NO: 4525368 - DNA, 25 bp, Homo sapien
gtctcctgcaactattggtgggcca

SEQ ID NO: 4525369 - DNA, 25 bp, Homo sapien
tgcaactattggtgggccatctcag

SEQ ID NO: 4525370 - DNA, 25 bp, Homo sapien
tcctgcaactattggtgggccatct

SEQ ID NO: 4525371 - DNA, 25 bp, Homo sapien
gggtctcctgcaactattggtgggc

SEQ ID NO: 4525372 - DNA, 25 bp, Homo sapien
gcagctgggcagtgcctccttccca

SEQ ID NO: 4525373 - DNA, 25 bp, Homo sapien
cgcttcgccctgagcttcctgctgc

SEQ ID NO: 4525374 - DNA, 25 bp, Homo sapien
tgggcagtgcctccttcccagaggc

SEQ ID NO: 4525375 - DNA, 25 bp, Homo sapien
gctgctgcagctgggcagtgcctcc

SEQ ID NO: 4525376 - DNA, 25 bp, Homo sapien
aggtgaccccggtagtggtcttgct

SEQ ID NO: 4525377 - DNA, 25 bp, Homo sapien
tgcaggtgaccccggtagtggtctt

SEQ ID NO: 4525378 - DNA, 25 bp, Homo sapien
caggtgaccccggtagtggtcttgc

SEQ ID NO: 4525379 - DNA, 25 bp, Homo sapien
gtgaccccggtagtggtcttgctgc

SEQ ID NO: 4525380 - DNA, 25 bp, Homo sapien
cgtcagggtaggtagtcgctggctt

SEQ ID NO: 4525381 - DNA, 25 bp, Homo sapien
tgcaggataggcgtcagggtaggta

SEQ ID NO: 4525382 - DNA, 25 bp, Homo sapien
cagggtaggtagtcgctggcttcca

SEQ ID NO: 4525383 - DNA, 25 bp, Homo sapien
ataggcgtcagggtaggtagtcgct

SEQ ID NO: 4525384 - DNA, 25 bp, Homo sapien
tgctgacacactctgtagctcctta

SEQ ID NO: 4525385 - DNA, 25 bp, Homo sapien
ctctgtagctccttacccaggcggt

SEQ ID NO: 4525386 - DNA, 25 bp, Homo sapien
tgtagctccttacccaggcggtcag

SEQ ID NO: 4525387 - DNA, 25 bp, Homo sapien
tggagctttgctgacacactctgta

SEQ ID NO: 4525388 - DNA, 25 bp, Homo sapien
ggagctgggccctttccagcttcct

SEQ ID NO: 4525389 - DNA, 25 bp, Homo sapien
atccctagaccatggccccagccgg

SEQ ID NO: 4525390 - DNA, 25 bp, Homo sapien
atgatccctagaccatggccccagc

SEQ ID NO: 4525391 - DNA, 25 bp, Homo sapien
gctgcagctgctcgcctgtggcagc

SEQ ID NO: 4525392 - DNA, 25 bp, Homo sapien
cagattctacaagtcgaagtttttc

SEQ ID NO: 4525393 - DNA, 25 bp, Homo sapien
ttttcagattctacaagtcgaagtt

SEQ ID NO: 4525394 - DNA, 25 bp, Homo sapien
ctccttcaactcctcatcggttatg

SEQ ID NO: 4525395 - DNA, 25 bp, Homo sapien
cagacttttcagattctacaagtcg

SEQ ID NO: 4525396 - DNA, 25 bp, Homo sapien
cccatcctacgtgttcctgtacagt

SEQ ID NO: 4525397 - DNA, 25 bp, Homo sapien
ttcccccatcctacgtgttcctgta

SEQ ID NO: 4525398 - DNA, 25 bp, Homo sapien
ccttcccccatcctacgtgttcctg

SEQ ID NO: 4525399 - DNA, 25 bp, Homo sapien
cctctcctttgttaatttctcgatg

SEQ ID NO: 4525400 - DNA, 25 bp, Homo sapien
tgacaaatggtaaaagctgctagtt

SEQ ID NO: 4525401 - DNA, 25 bp, Homo sapien
ctggaatgtgatactggtagaggcc

SEQ ID NO: 4525402 - DNA, 25 bp, Homo sapien
gccatttgcaatggacccagcattt

SEQ ID NO: 4525403 - DNA, 25 bp, Homo sapien
cccatggtggtagggccttagatgt

SEQ ID NO: 4525404 - DNA, 25 bp, Homo sapien
ttttcctgtgtttaatgatatcttc

SEQ ID NO: 4525405 - DNA, 25 bp, Homo sapien
aaggtatttcctctgtaatcacagg

SEQ ID NO: 4525406 - DNA, 25 bp, Homo sapien
ttcctgtgtttaatgatatcttcca

SEQ ID NO: 4525407 - DNA, 25 bp, Homo sapien
gttgaaaggtatttcctctgtaatc

SEQ ID NO: 4525408 - DNA, 25 bp, Homo sapien
cctagaagatatctgcgaaagtact

SEQ ID NO: 4525409 - DNA, 25 bp, Homo sapien
tataggagaacgtcctggttcctag

SEQ ID NO: 4525410 - DNA, 25 bp, Homo sapien
gatggtgacagggtgcaagccttct

SEQ ID NO: 4525411 - DNA, 25 bp, Homo sapien
ttaacactgaaatgctgatactggc

SEQ ID NO: 4525412 - DNA, 25 bp, Homo sapien
agggtctcctccagcaggctattct

SEQ ID NO: 4525413 - DNA, 25 bp, Homo sapien
acagcatggtcaaagtgcagggtct

SEQ ID NO: 4525414 - DNA, 25 bp, Homo sapien
catggtcaaagtgcagggtctcctc

SEQ ID NO: 4525415 - DNA, 25 bp, Homo sapien
gtctcctccagcaggctattctctg

SEQ ID NO: 4525416 - DNA, 25 bp, Homo sapien
ccagacgcaaccaaggcttttttat

SEQ ID NO: 4525417 - DNA, 25 bp, Homo sapien
cttcccccagacgcaaccaaggctt

SEQ ID NO: 4525418 - DNA, 25 bp, Homo sapien
cagacgcaaccaaggcttttttata

SEQ ID NO: 4525419 - DNA, 25 bp, Homo sapien
gcggcatcctccggagcagtcaaaa

SEQ ID NO: 4525420 - DNA, 25 bp, Homo sapien
ggcatcctccggagcagtcaaaaca

SEQ ID NO: 4525421 - DNA, 25 bp, Homo sapien
gcatcctccggagcagtcaaaacag

SEQ ID NO: 4525422 - DNA, 25 bp, Homo sapien
taggcggcatcctccggagcagtca

SEQ ID NO: 4525423 - DNA, 25 bp, Homo sapien
ggacagctttgtcagaagagacatg

SEQ ID NO: 4525424 - DNA, 25 bp, Homo sapien
cgggacagctttgtcagaagagaca

SEQ ID NO: 4525425 - DNA, 25 bp, Homo sapien
ctgtcgggacagctttgtcagaaga

SEQ ID NO: 4525426 - DNA, 25 bp, Homo sapien
gtcgggacagctttgtcagaagaga

SEQ ID NO: 4525427 - DNA, 25 bp, Homo sapien
tcatcatctggcaaagtgaaggtca

SEQ ID NO: 4525428 - DNA, 25 bp, Homo sapien
tggcaaagtgaaggtcactcttttc

SEQ ID NO: 4525429 - DNA, 25 bp, Homo sapien
aaacacctgcatcttcaattgcctc

SEQ ID NO: 4525430 - DNA, 25 bp, Homo sapien
caattgcctcatcatctggcaaagt

SEQ ID NO: 4525431 - DNA, 25 bp, Homo sapien
ctggatcaaaaaaagtctttgtcct

SEQ ID NO: 4525432 - DNA, 25 bp, Homo sapien
caatttcatcagcttgtttgaaccc

SEQ ID NO: 4525433 - DNA, 25 bp, Homo sapien
catcatcacttgctatgtcttcatc

SEQ ID NO: 4525434 - DNA, 25 bp, Homo sapien
cagcttgtttgaacccagatcatca

SEQ ID NO: 4525435 - DNA, 25 bp, Homo sapien
tacttctaaacagtgccccttcatc

SEQ ID NO: 4525436 - DNA, 25 bp, Homo sapien
tcatcagaatcaatatcttaaaaaa

SEQ ID NO: 4525437 - DNA, 25 bp, Homo sapien
cttctaaacagtgccccttcatctt

SEQ ID NO: 4525438 - DNA, 25 bp, Homo sapien
tttacttctaaacagtgccccttca

SEQ ID NO: 4525439 - DNA, 25 bp, Homo sapien
aagaatttctcgtctgctatggact

SEQ ID NO: 4525440 - DNA, 25 bp, Homo sapien
cagagagttggaagaatttctcgtc

SEQ ID NO: 4525441 - DNA, 25 bp, Homo sapien
ttctcgtctgctatggacttttctc

SEQ ID NO: 4525442 - DNA, 25 bp, Homo sapien
gagttggaagaatttctcgtctgct

SEQ ID NO: 4525443 - DNA, 25 bp, Homo sapien
ggcttttcgtcggatcgaatttgct

SEQ ID NO: 4525444 - DNA, 25 bp, Homo sapien
tcgtcggatcgaatttgcttgagtt

SEQ ID NO: 4525445 - DNA, 25 bp, Homo sapien
agaactgggcttttcgtcggatcga

SEQ ID NO: 4525446 - DNA, 25 bp, Homo sapien
aactgggcttttcgtcggatcgaat

SEQ ID NO: 4525447 - DNA, 25 bp, Homo sapien
tcctcctctaaatcttctaggtcct

SEQ ID NO: 4525448 - DNA, 25 bp, Homo sapien
ctcctcctcctctaaatcttctagg

SEQ ID NO: 4525449 - DNA, 25 bp, Homo sapien
cctcctctaaatcttctaggtcctc

SEQ ID NO: 4525450 - DNA, 25 bp, Homo sapien
cctcctcctctaaatcttctaggtc

SEQ ID NO: 4525451 - DNA, 25 bp, Homo sapien
ttcttcactctctgggatactgata

SEQ ID NO: 4525452 - DNA, 25 bp, Homo sapien
tgaaccatcctcttcatgctcctgt

SEQ ID NO: 4525453 - DNA, 25 bp, Homo sapien
actctctgggatactgatatcttca

SEQ ID NO: 4525454 - DNA, 25 bp, Homo sapien
cctgttcttcactctctgggatact

SEQ ID NO: 4525455 - DNA, 25 bp, Homo sapien
ctttgatgccaatccatcttgaatc

SEQ ID NO: 4525456 - DNA, 25 bp, Homo sapien
tgtaaagggcttccatggatcctac

SEQ ID NO: 4525457 - DNA, 25 bp, Homo sapien
ctggaagctttgtaaaattgggtca

SEQ ID NO: 4525458 - DNA, 25 bp, Homo sapien
catggatcctaccattctctaatat

SEQ ID NO: 4525459 - DNA, 25 bp, Homo sapien
gctcctttccctggctgccgagctc

SEQ ID NO: 4525460 - DNA, 25 bp, Homo sapien
tgccgagctcccagtatatctccat

SEQ ID NO: 4525461 - DNA, 25 bp, Homo sapien
ctggctgccgagctcccagtatatc

SEQ ID NO: 4525462 - DNA, 25 bp, Homo sapien
ctttccctggctgccgagctcccag

SEQ ID NO: 4525463 - DNA, 25 bp, Homo sapien
taattcactgtccacatagactaac

SEQ ID NO: 4525464 - DNA, 25 bp, Homo sapien
agtttataattcactgtccacatag

SEQ ID NO: 4525465 - DNA, 25 bp, Homo sapien
ttataattcactgtccacatagact

SEQ ID NO: 4525466 - DNA, 25 bp, Homo sapien
aagtttataattcactgtccacata

SEQ ID NO: 4525467 - DNA, 25 bp, Homo sapien
ggttgcttagtgtccttgaccatca

SEQ ID NO: 4525468 - DNA, 25 bp, Homo sapien
tccttcgttgtgtaagattgatcca

SEQ ID NO: 4525469 - DNA, 25 bp, Homo sapien
tttctcaacagggtaccattggcat

SEQ ID NO: 4525470 - DNA, 25 bp, Homo sapien
gatccacacattgcaggttgcttag

SEQ ID NO: 4525471 - DNA, 25 bp, Homo sapien
cacaggtgagcaagataatcagtga

SEQ ID NO: 4525472 - DNA, 25 bp, Homo sapien
ctcgggatggaaagttatgaagtct

SEQ ID NO: 4525473 - DNA, 25 bp, Homo sapien
agagagaagtaaaagcatgctagga

SEQ ID NO: 4525474 - DNA, 25 bp, Homo sapien
taaaatctgaaataactcgggatgg

SEQ ID NO: 4525475 - DNA, 25 bp, Homo sapien
agatgaaatttatgactatacagca

SEQ ID NO: 4525476 - DNA, 25 bp, Homo sapien
tcctagttactataaaccagagaaa

SEQ ID NO: 4525477 - DNA, 25 bp, Homo sapien
catttattttgtgatcttgcctaat

SEQ ID NO: 4525478 - DNA, 25 bp, Homo sapien
tgttgaagaatcataccacaaaata

SEQ ID NO: 4525479 - DNA, 25 bp, Homo sapien
tcctgccgagtactgtaacaaatct

SEQ ID NO: 4525480 - DNA, 25 bp, Homo sapien
taaacttaacattacttctctgggc

SEQ ID NO: 4525481 - DNA, 25 bp, Homo sapien
gtcgattagacacactcctgccgag

SEQ ID NO: 4525482 - DNA, 25 bp, Homo sapien
gcccttaagcgaacatacacaaatg

SEQ ID NO: 4525483 - DNA, 25 bp, Homo sapien
tgaacctattccctgtcatggtggg

SEQ ID NO: 4525484 - DNA, 25 bp, Homo sapien
tacagggttctgtgcatgatcctgc

SEQ ID NO: 4525485 - DNA, 25 bp, Homo sapien
atgatcctgcatccgtaaaactgag

SEQ ID NO: 4525486 - DNA, 25 bp, Homo sapien
gaattccagccatgcattaattgtg

SEQ ID NO: 4525487 - DNA, 25 bp, Homo sapien
tgcataattaaaagtctcggccggg

SEQ ID NO: 4525488 - DNA, 25 bp, Homo sapien
atgtggtggtgggcgccagtagttc

SEQ ID NO: 4525489 - DNA, 25 bp, Homo sapien
caggagaatggcgtgaacccgggag

SEQ ID NO: 4525490 - DNA, 25 bp, Homo sapien
ggggagcttgcggtgagccaagatc

SEQ ID NO: 4525491 - DNA, 25 bp, Homo sapien
tagttccagctactcgcgaggcaga

SEQ ID NO: 4525492 - DNA, 25 bp, Homo sapien
gaggaagagtgcacgccaaatgttc

SEQ ID NO: 4525493 - DNA, 25 bp, Homo sapien
ggctctaatactgcccagaggttat

SEQ ID NO: 4525494 - DNA, 25 bp, Homo sapien
tacactgccaatataagaactccct

SEQ ID NO: 4525495 - DNA, 25 bp, Homo sapien
tacattagacctcgcaggagagttc

SEQ ID NO: 4525496 - DNA, 25 bp, Homo sapien
ggcactggtaatttactgctgagaa

SEQ ID NO: 4525497 - DNA, 25 bp, Homo sapien
tatcatggcaagtaagggcactggt

SEQ ID NO: 4525498 - DNA, 25 bp, Homo sapien
gtggcctggattgcctcaggaaact

SEQ ID NO: 4525499 - DNA, 25 bp, Homo sapien
gttatttaacatgccaaaagcctgc

SEQ ID NO: 4525500 - DNA, 25 bp, Homo sapien
tgaaacgaacctgtactaccaagag

SEQ ID NO: 4525501 - DNA, 25 bp, Homo sapien
cacctggctcagtcagaaggaacag

SEQ ID NO: 4525502 - DNA, 25 bp, Homo sapien
tctacacggactgtgggaatcagca

SEQ ID NO: 4525503 - DNA, 25 bp, Homo sapien
cgcctggctggattttagacaattc

SEQ ID NO: 4525504 - DNA, 25 bp, Homo sapien
tccgaattcttatcgtcctgcagcc

SEQ ID NO: 4525505 - DNA, 25 bp, Homo sapien
cttttgacacagactgccccgttta

SEQ ID NO: 4525506 - DNA, 25 bp, Homo sapien
acagactgccccgtttaacagactc

SEQ ID NO: 4525507 - DNA, 25 bp, Homo sapien
gacacagactgccccgtttaacaga

SEQ ID NO: 4525508 - DNA, 25 bp, Homo sapien
aatgactaagttcctctggactttc

SEQ ID NO: 4525509 - DNA, 25 bp, Homo sapien
caatgactaagttcctctggacttt

SEQ ID NO: 4525510 - DNA, 25 bp, Homo sapien
tgactaagttcctctggactttcac

SEQ ID NO: 4525511 - DNA, 25 bp, Homo sapien
tcaatgactaagttcctctggactt

SEQ ID NO: 4525512 - DNA, 25 bp, Homo sapien
atggatcgtaatagacaacttcatc

SEQ ID NO: 4525513 - DNA, 25 bp, Homo sapien
aaattgcaaagaccactattctccc

SEQ ID NO: 4525514 - DNA, 25 bp, Homo sapien
tgcaaagaccactattctccccaaa

SEQ ID NO: 4525515 - DNA, 25 bp, Homo sapien
caaagaccactattctccccaaagt

SEQ ID NO: 4525516 - DNA, 25 bp, Homo sapien
gttttgaacttgattctaaatttca

SEQ ID NO: 4525517 - DNA, 25 bp, Homo sapien
gataatatggtctgtatttccttaa

SEQ ID NO: 4525518 - DNA, 25 bp, Homo sapien
tttcagatgttacagtttacaaaaa

SEQ ID NO: 4525519 - DNA, 25 bp, Homo sapien
aattgataatatggtctgtatttcc

SEQ ID NO: 4525520 - DNA, 25 bp, Homo sapien
cagatgttacagtttacaaaaagta

SEQ ID NO: 4525521 - DNA, 25 bp, Homo sapien
ccaactgtgtagtaagcagtatttc

SEQ ID NO: 4525522 - DNA, 25 bp, Homo sapien
caactgtgtagtaagcagtatttct

SEQ ID NO: 4525523 - DNA, 25 bp, Homo sapien
aactgtgtagtaagcagtatttctt

SEQ ID NO: 4525524 - DNA, 25 bp, Homo sapien
tgcatttctaattcatctacaacat

SEQ ID NO: 4525525 - DNA, 25 bp, Homo sapien
aattgcatttctaattcatctacaa

SEQ ID NO: 4525526 - DNA, 25 bp, Homo sapien
ttgcatttctaattcatctacaaca

SEQ ID NO: 4525527 - DNA, 25 bp, Homo sapien
taaaattgcatttctaattcatcta

SEQ ID NO: 4525528 - DNA, 25 bp, Homo sapien
tgtactgaaaacattgctggattga

SEQ ID NO: 4525529 - DNA, 25 bp, Homo sapien
taaagctgtactgaaaacattgctg

SEQ ID NO: 4525530 - DNA, 25 bp, Homo sapien
aagctgtactgaaaacattgctgga

SEQ ID NO: 4525531 - DNA, 25 bp, Homo sapien
gctgtactgaaaacattgctggatt

SEQ ID NO: 4525532 - DNA, 25 bp, Homo sapien
tccaacctgggaattgctgtggccc

SEQ ID NO: 4525533 - DNA, 25 bp, Homo sapien
ccaacctgggaattgctgtggccca

SEQ ID NO: 4525534 - DNA, 25 bp, Homo sapien
tgttggattatgaaaataaaatata

SEQ ID NO: 4525535 - DNA, 25 bp, Homo sapien
ctgttggattatgaaaataaaatat

SEQ ID NO: 4525536 - DNA, 25 bp, Homo sapien
agcattctccctcgtgccacactgt

SEQ ID NO: 4525537 - DNA, 25 bp, Homo sapien
gatccctgcctgtcttgccagcatt

SEQ ID NO: 4525538 - DNA, 25 bp, Homo sapien
taagctcctatttgccaacttccct

SEQ ID NO: 4525539 - DNA, 25 bp, Homo sapien
tctgcccggaacactcctcactttt

SEQ ID NO: 4525540 - DNA, 25 bp, Homo sapien
gggcaactatcctggagacgtagga

SEQ ID NO: 4525541 - DNA, 25 bp, Homo sapien
gacgtaggacctacgtcatcctcat

SEQ ID NO: 4525542 - DNA, 25 bp, Homo sapien
caactatcctggagacgtaggacct

SEQ ID NO: 4525543 - DNA, 25 bp, Homo sapien
tatcctggagacgtaggacctacgt

SEQ ID NO: 4525544 - DNA, 25 bp, Homo sapien
tcattcagcagtcccttactgcata

SEQ ID NO: 4525545 - DNA, 25 bp, Homo sapien
cagcagtcccttactgcatatgaat

SEQ ID NO: 4525546 - DNA, 25 bp, Homo sapien
cagtcccttactgcatatgaataag

SEQ ID NO: 4525547 - DNA, 25 bp, Homo sapien
ttcagcagtcccttactgcatatga

SEQ ID NO: 4525548 - DNA, 25 bp, Homo sapien
ataaagttgcaacttctcgcatagc

SEQ ID NO: 4525549 - DNA, 25 bp, Homo sapien
aacttctcgcatagccctaaatggc

SEQ ID NO: 4525550 - DNA, 25 bp, Homo sapien
gcaacttctcgcatagccctaaatg

SEQ ID NO: 4525551 - DNA, 25 bp, Homo sapien
gttgcaacttctcgcatagccctaa

SEQ ID NO: 4525552 - DNA, 25 bp, Homo sapien
tcattaatgctaccatggtgttggc

SEQ ID NO: 4525553 - DNA, 25 bp, Homo sapien
cattaatgctaccatggtgttggct

SEQ ID NO: 4525554 - DNA, 25 bp, Homo sapien
aatgctaccatggtgttggcttttc

SEQ ID NO: 4525555 - DNA, 25 bp, Homo sapien
ttaatgctaccatggtgttggcttt

SEQ ID NO: 4525556 - DNA, 25 bp, Homo sapien
taataatatggagacttttggccag

SEQ ID NO: 4525557 - DNA, 25 bp, Homo sapien
tgtttaataatatggagacttttgg

SEQ ID NO: 4525558 - DNA, 25 bp, Homo sapien
aataatatggagacttttggccagg

SEQ ID NO: 4525559 - DNA, 25 bp, Homo sapien
tttaataatatggagacttttggcc

SEQ ID NO: 4525560 - DNA, 25 bp, Homo sapien
tccgcctcgacccatcaggcgcgca

SEQ ID NO: 4525561 - DNA, 25 bp, Homo sapien
cgcctcgacccatcaggcgcgcagg

SEQ ID NO: 4525562 - DNA, 25 bp, Homo sapien
cctcgacccatcaggcgcgcagggc

SEQ ID NO: 4525563 - DNA, 25 bp, Homo sapien
gtccgcctcgacccatcaggcgcgc

SEQ ID NO: 4525564 - DNA, 25 bp, Homo sapien
cctttagccgcgaaaacagcgtggc

SEQ ID NO: 4525565 - DNA, 25 bp, Homo sapien
ggcctttagccgcgaaaacagcgtg

SEQ ID NO: 4525566 - DNA, 25 bp, Homo sapien
agccgcgcggcctttagccgcgaaa

SEQ ID NO: 4525567 - DNA, 25 bp, Homo sapien
gcgcggcctttagccgcgaaaacag

SEQ ID NO: 4525568 - DNA, 25 bp, Homo sapien
ccgcgcgcgcctgccagagcagcgc

SEQ ID NO: 4525569 - DNA, 25 bp, Homo sapien
tgcccgcatagctcctgcagcgcca

SEQ ID NO: 4525570 - DNA, 25 bp, Homo sapien
ggtagcgctccagctgcccgcatag

SEQ ID NO: 4525571 - DNA, 25 bp, Homo sapien
cccacagcccgagccccagactcca

SEQ ID NO: 4525572 - DNA, 25 bp, Homo sapien
cgttccagaggcggccacagcgccg

SEQ ID NO: 4525573 - DNA, 25 bp, Homo sapien
ttccagaggcggccacagcgccgct

SEQ ID NO: 4525574 - DNA, 25 bp, Homo sapien
ctgcggggagcagcgttccagaggc

SEQ ID NO: 4525575 - DNA, 25 bp, Homo sapien
ccagaggcggccacagcgccgctag

SEQ ID NO: 4525576 - DNA, 25 bp, Homo sapien
gcccagttgggcgggaacacggcag

SEQ ID NO: 4525577 - DNA, 25 bp, Homo sapien
cagttgggcgggaacacggcagctg

SEQ ID NO: 4525578 - DNA, 25 bp, Homo sapien
ccagttgggcgggaacacggcagct

SEQ ID NO: 4525579 - DNA, 25 bp, Homo sapien
ggcccagttgggcgggaacacggca

SEQ ID NO: 4525580 - DNA, 25 bp, Homo sapien
agctaacttgccctccgcgccattc

SEQ ID NO: 4525581 - DNA, 25 bp, Homo sapien
taacttgccctccgcgccattccac

SEQ ID NO: 4525582 - DNA, 25 bp, Homo sapien
acttgccctccgcgccattccacgc

SEQ ID NO: 4525583 - DNA, 25 bp, Homo sapien
ctaacttgccctccgcgccattcca

SEQ ID NO: 4525584 - DNA, 25 bp, Homo sapien
agaggccttgccggaccggcgccca

SEQ ID NO: 4525585 - DNA, 25 bp, Homo sapien
tcggcatcggcgaagaggccttgcc

SEQ ID NO: 4525586 - DNA, 25 bp, Homo sapien
tctcggcatcggcgaagaggccttg

SEQ ID NO: 4525587 - DNA, 25 bp, Homo sapien
aggccttgccggaccggcgcccagc

SEQ ID NO: 4525588 - DNA, 25 bp, Homo sapien
cggccctaggactcggcgggcgcgg

SEQ ID NO: 4525589 - DNA, 25 bp, Homo sapien
ggcgcgggcctgacctcgtcgcact

SEQ ID NO: 4525590 - DNA, 25 bp, Homo sapien
gcgcgggcctgacctcgtcgcactg

SEQ ID NO: 4525591 - DNA, 25 bp, Homo sapien
gccgtcggcggcagcggccctagga

SEQ ID NO: 4525592 - DNA, 25 bp, Homo sapien
ggcagccgttcaatttctgcacttt

SEQ ID NO: 4525593 - DNA, 25 bp, Homo sapien
caggcagccgttcaatttctgcact

SEQ ID NO: 4525594 - DNA, 25 bp, Homo sapien
aggcagccgttcaatttctgcactt

SEQ ID NO: 4525595 - DNA, 25 bp, Homo sapien
tatacttgaatgaggcccagagcag

SEQ ID NO: 4525596 - DNA, 25 bp, Homo sapien
acttttggaggccagataatggcat

SEQ ID NO: 4525597 - DNA, 25 bp, Homo sapien
aactgcacgcttcgcctctcaggtt

SEQ ID NO: 4525598 - DNA, 25 bp, Homo sapien
aattgctaaacattaggtggcagta

SEQ ID NO: 4525599 - DNA, 25 bp, Homo sapien
tgagctgagatagccccgctgcact

SEQ ID NO: 4525600 - DNA, 25 bp, Homo sapien
tgcagtgagctgagatagccccgct

SEQ ID NO: 4525601 - DNA, 25 bp, Homo sapien
agtgagctgagatagccccgctgca

SEQ ID NO: 4525602 - DNA, 25 bp, Homo sapien
gcagtgagctgagatagccccgctg

SEQ ID NO: 4525603 - DNA, 25 bp, Homo sapien
agatcccttgttgtagctattcata

SEQ ID NO: 4525604 - DNA, 25 bp, Homo sapien
ttcctgaagcttggcacttctgaag

SEQ ID NO: 4525605 - DNA, 25 bp, Homo sapien
tctgaagtcacctttctgaaaacat

SEQ ID NO: 4525606 - DNA, 25 bp, Homo sapien
tgctttcctaaagttgtctgatccc

SEQ ID NO: 4525607 - DNA, 25 bp, Homo sapien
tccatgtgttcgttgtaaattagga

SEQ ID NO: 4525608 - DNA, 25 bp, Homo sapien
ccatgtgttcgttgtaaattaggaa

SEQ ID NO: 4525609 - DNA, 25 bp, Homo sapien
ttccatgtgttcgttgtaaattagg

SEQ ID NO: 4525610 - DNA, 25 bp, Homo sapien
tgggtttccatgtgttcgttgtaaa

SEQ ID NO: 4525611 - DNA, 25 bp, Homo sapien
tgtggggaatggtgagtaatctaat

SEQ ID NO: 4525612 - DNA, 25 bp, Homo sapien
ggaatggtgagtaatctaatttggt

SEQ ID NO: 4525613 - DNA, 25 bp, Homo sapien
tggggaatggtgagtaatctaattt

SEQ ID NO: 4525614 - DNA, 25 bp, Homo sapien
aatggtgagtaatctaatttggttg

SEQ ID NO: 4525615 - DNA, 25 bp, Homo sapien
gcccaatgcatagaaaagatacact

SEQ ID NO: 4525616 - DNA, 25 bp, Homo sapien
taaatccgtccagctcacaaatggg

SEQ ID NO: 4525617 - DNA, 25 bp, Homo sapien
tgcaagttgatgctcgcctggacag

SEQ ID NO: 4525618 - DNA, 25 bp, Homo sapien
gatgacaacacgtcgtctcccagtg

SEQ ID NO: 4525619 - DNA, 25 bp, Homo sapien
gccaggcagatctattcctttctgg

SEQ ID NO: 4525620 - DNA, 25 bp, Homo sapien
accacgccaggcagatctattcctt

SEQ ID NO: 4525621 - DNA, 25 bp, Homo sapien
gatctattcctttctggttactaaa

SEQ ID NO: 4525622 - DNA, 25 bp, Homo sapien
gaggcaccacgccaggcagatctat

SEQ ID NO: 4525623 - DNA, 25 bp, Homo sapien
tgaagaaacggtcttagaataaatc

SEQ ID NO: 4525624 - DNA, 25 bp, Homo sapien
taacagtgaagaaacggtcttagaa

SEQ ID NO: 4525625 - DNA, 25 bp, Homo sapien
tgagaaacaggggagtaacagtgaa

SEQ ID NO: 4525626 - DNA, 25 bp, Homo sapien
aagaaacggtcttagaataaatctg

SEQ ID NO: 4525627 - DNA, 25 bp, Homo sapien
ttatattactttgcgagccttcttc

SEQ ID NO: 4525628 - DNA, 25 bp, Homo sapien
atattttatattactttgcgagcct

SEQ ID NO: 4525629 - DNA, 25 bp, Homo sapien
tattactttgcgagccttcttcctg

SEQ ID NO: 4525630 - DNA, 25 bp, Homo sapien
tactttgcgagccttcttcctgtct

SEQ ID NO: 4525631 - DNA, 25 bp, Homo sapien
gttgtacgtactttgaagttttgca

SEQ ID NO: 4525632 - DNA, 25 bp, Homo sapien
tctaccgttgtgaatttattactgg

SEQ ID NO: 4525633 - DNA, 25 bp, Homo sapien
ctggtatgtataccctagtaagtta

SEQ ID NO: 4525634 - DNA, 25 bp, Homo sapien
tgatttagtatctgcttgtttagtc

SEQ ID NO: 4525635 - DNA, 25 bp, Homo sapien
tgattacgtatttctaggttgagga

SEQ ID NO: 4525636 - DNA, 25 bp, Homo sapien
gctacttggctgtttcatcgtaaaa

SEQ ID NO: 4525637 - DNA, 25 bp, Homo sapien
cccatcagtattcacgtctctcata

SEQ ID NO: 4525638 - DNA, 25 bp, Homo sapien
tgctgcatatcacatccccatcagt

SEQ ID NO: 4525639 - DNA, 25 bp, Homo sapien
gtgctgttgtcttctaaccagtcgt

SEQ ID NO: 4525640 - DNA, 25 bp, Homo sapien
ctaaccagtcgtggtggcgaagcct

SEQ ID NO: 4525641 - DNA, 25 bp, Homo sapien
gtttcacttgtttatgcatgacttt

SEQ ID NO: 4525642 - DNA, 25 bp, Homo sapien
atgccatcctgagtttcacttgttt

SEQ ID NO: 4525643 - DNA, 25 bp, Homo sapien
gccaggagttcttaaggcttagacc

SEQ ID NO: 4525644 - DNA, 25 bp, Homo sapien
tgagacggcttctttacccacaggt

SEQ ID NO: 4525645 - DNA, 25 bp, Homo sapien
ccagattgactatgggatgggcctg

SEQ ID NO: 4525646 - DNA, 25 bp, Homo sapien
ctgcagtggaatgtctgagacggct

SEQ ID NO: 4525647 - DNA, 25 bp, Homo sapien
caccgtgcctgacctgtagtctttt

SEQ ID NO: 4525648 - DNA, 25 bp, Homo sapien
ttcattcatatttgagagaggtact

SEQ ID NO: 4525649 - DNA, 25 bp, Homo sapien
gcctgacctgtagtcttttttccat

SEQ ID NO: 4525650 - DNA, 25 bp, Homo sapien
gttcattcatatttgagagaggtac

SEQ ID NO: 4525651 - DNA, 25 bp, Homo sapien
tatctggcccaatatatcaatattg

SEQ ID NO: 4525652 - DNA, 25 bp, Homo sapien
caatattgctgaggatgacaaattc

SEQ ID NO: 4525653 - DNA, 25 bp, Homo sapien
ccttcttctgcatattggtctccag

SEQ ID NO: 4525654 - DNA, 25 bp, Homo sapien
gacaaattctggtttaaatatccaa

SEQ ID NO: 4525655 - DNA, 25 bp, Homo sapien
gaggcagacaccaagttctggggtc

SEQ ID NO: 4525656 - DNA, 25 bp, Homo sapien
ggaggcagacaccaagttctggggt

SEQ ID NO: 4525657 - DNA, 25 bp, Homo sapien
aggcagacaccaagttctggggtct

SEQ ID NO: 4525658 - DNA, 25 bp, Homo sapien
ttctccatgacttgaaaatgccacc

SEQ ID NO: 4525659 - DNA, 25 bp, Homo sapien
ccacctgagggcaggtcgctgccga

SEQ ID NO: 4525660 - DNA, 25 bp, Homo sapien
cgctgccgagatgtgactgcaatat

SEQ ID NO: 4525661 - DNA, 25 bp, Homo sapien
gctccagagcagctttatggaccac

SEQ ID NO: 4525662 - DNA, 25 bp, Homo sapien
gaggatcctctccttgacaagccta

SEQ ID NO: 4525663 - DNA, 25 bp, Homo sapien
gtgttcatgaggtgcctatggatta

SEQ ID NO: 4525664 - DNA, 25 bp, Homo sapien
tttaccctgataaatatcagtgact

SEQ ID NO: 4525665 - DNA, 25 bp, Homo sapien
caataatgtgttcatgaggtgccta

SEQ ID NO: 4525666 - DNA, 25 bp, Homo sapien
acttttatcgttgaaatcacttcac

SEQ ID NO: 4525667 - DNA, 25 bp, Homo sapien
cactgtgtcacccaggctgaagtgc

SEQ ID NO: 4525668 - DNA, 25 bp, Homo sapien
attattattttgtttagatggagtc

SEQ ID NO: 4525669 - DNA, 25 bp, Homo sapien
ttattattttgtttagatggagtct

SEQ ID NO: 4525670 - DNA, 25 bp, Homo sapien
acatttcccacatatcgatttagca

SEQ ID NO: 4525671 - DNA, 25 bp, Homo sapien
gaaatctatgctaaagacccactgg

SEQ ID NO: 4525672 - DNA, 25 bp, Homo sapien
tatcgatttagcaaacatctaggag

SEQ ID NO: 4525673 - DNA, 25 bp, Homo sapien
catctaggagtttgacaattcattc

SEQ ID NO: 4525674 - DNA, 25 bp, Homo sapien
agcaattttttaaagttatgtctga

SEQ ID NO: 4525675 - DNA, 25 bp, Homo sapien
aagcaattttttaaagttatgtctg

SEQ ID NO: 4525676 - DNA, 25 bp, Homo sapien
agacagcgtaagcaattttttaaag

SEQ ID NO: 4525677 - DNA, 25 bp, Homo sapien
ttctctcaactgataagtgccgcca

SEQ ID NO: 4525678 - DNA, 25 bp, Homo sapien
gaatcatattcctttccttagcgca

SEQ ID NO: 4525679 - DNA, 25 bp, Homo sapien
gcttcctgaatgatggtcccactca

SEQ ID NO: 4525680 - DNA, 25 bp, Homo sapien
tctatagcacgagttcaataaacag

SEQ ID NO: 4525681 - DNA, 25 bp, Homo sapien
gagtgcatatggcagataaagttct

SEQ ID NO: 4525682 - DNA, 25 bp, Homo sapien
caaaatgattctatgcaaacgtttc

SEQ ID NO: 4525683 - DNA, 25 bp, Homo sapien
taaaatatccgaagatttgaactcc

SEQ ID NO: 4525684 - DNA, 25 bp, Homo sapien
gaagatttgaactccaaaagaaaca

SEQ ID NO: 4525685 - DNA, 25 bp, Homo sapien
caagataaccgtctggaccggaagc

SEQ ID NO: 4525686 - DNA, 25 bp, Homo sapien
tctacagcccgccttgggatgtttc

SEQ ID NO: 4525687 - DNA, 25 bp, Homo sapien
ggatcgctgatgtttcagactgcaa

SEQ ID NO: 4525688 - DNA, 25 bp, Homo sapien
agctcagggcgtttgcagtcgtgca

SEQ ID NO: 4525689 - DNA, 25 bp, Homo sapien
aagactaattcccacagagccgaag

SEQ ID NO: 4525690 - DNA, 25 bp, Homo sapien
gactaattcccacagagccgaagtt

SEQ ID NO: 4525691 - DNA, 25 bp, Homo sapien
aattcccacagagccgaagttccca

SEQ ID NO: 4525692 - DNA, 25 bp, Homo sapien
ccaaagactaattcccacagagccg

SEQ ID NO: 4525693 - DNA, 25 bp, Homo sapien
ttctatcaacaattgggaaatgctt

SEQ ID NO: 4525694 - DNA, 25 bp, Homo sapien
ggttggcgacttgcaaatcaacaaa

SEQ ID NO: 4525695 - DNA, 25 bp, Homo sapien
catactactgttagagttttaccta

SEQ ID NO: 4525696 - DNA, 25 bp, Homo sapien
gatgttctggtgtcaatagatatga

SEQ ID NO: 4525697 - DNA, 25 bp, Homo sapien
ttttgtgtgatagaaagaatggagc

SEQ ID NO: 4525698 - DNA, 25 bp, Homo sapien
tttgtgtgatagaaagaatggagca

SEQ ID NO: 4525699 - DNA, 25 bp, Homo sapien
agttgtgcctatttcctccaagtca

SEQ ID NO: 4525700 - DNA, 25 bp, Homo sapien
aagaatggagcaagttgtgcctatt

SEQ ID NO: 4525701 - DNA, 25 bp, Homo sapien
ggtgacgcactagctctccagttcg

SEQ ID NO: 4525702 - DNA, 25 bp, Homo sapien
tacagttttgatgtcggctcggccg

SEQ ID NO: 4525703 - DNA, 25 bp, Homo sapien
cctggtgagaggcacacttatctgg

SEQ ID NO: 4525704 - DNA, 25 bp, Homo sapien
gagggcgtcctgctaaaatccttga

SEQ ID NO: 4525705 - DNA, 25 bp, Homo sapien
aacctttccattgaccactaaggca

SEQ ID NO: 4525706 - DNA, 25 bp, Homo sapien
caactttctgtaggattcacatggg

SEQ ID NO: 4525707 - DNA, 25 bp, Homo sapien
aaagctaagcactgggaaccatagg

SEQ ID NO: 4525708 - DNA, 25 bp, Homo sapien
gcactgggaaccataggttctaaaa

SEQ ID NO: 4525709 - DNA, 25 bp, Homo sapien
cttctggcagatgtcctctcagaca

SEQ ID NO: 4525710 - DNA, 25 bp, Homo sapien
cctcatgcaaataggcttctggcag

SEQ ID NO: 4525711 - DNA, 25 bp, Homo sapien
ggaggtttctaagttcctcatgcaa

SEQ ID NO: 4525712 - DNA, 25 bp, Homo sapien
tgcagttggcaagccgactcctctt

SEQ ID NO: 4525713 - DNA, 25 bp, Homo sapien
taaagagaactgtcgaaggcggctg

SEQ ID NO: 4525714 - DNA, 25 bp, Homo sapien
cggctggaagggtttagcagaccac

SEQ ID NO: 4525715 - DNA, 25 bp, Homo sapien
tttcgcaccgcaaatataactgagc

SEQ ID NO: 4525716 - DNA, 25 bp, Homo sapien
tgggcaccacagttcgtaaagagaa

SEQ ID NO: 4525717 - DNA, 25 bp, Homo sapien
gaaagatgcaacatggagataggcc

SEQ ID NO: 4525718 - DNA, 25 bp, Homo sapien
gatgtcacctgccactcatgtgtcc

SEQ ID NO: 4525719 - DNA, 25 bp, Homo sapien
gctgtgaataagtcataagtcccta

SEQ ID NO: 4525720 - DNA, 25 bp, Homo sapien
taaagcacgagaagcatgaacacct

SEQ ID NO: 4525721 - DNA, 25 bp, Homo sapien
ctggctgaggtaggttggaaccatc

SEQ ID NO: 4525722 - DNA, 25 bp, Homo sapien
aacctcgtgactatccagttttcca

SEQ ID NO: 4525723 - DNA, 25 bp, Homo sapien
gaggtaggttggaaccatctggatt

SEQ ID NO: 4525724 - DNA, 25 bp, Homo sapien
tgcctgtggcatagttaacctcgtg

SEQ ID NO: 4525725 - DNA, 25 bp, Homo sapien
actcagcgagccctttggctatttc

SEQ ID NO: 4525726 - DNA, 25 bp, Homo sapien
ctgctcccactcagcgagccctttg

SEQ ID NO: 4525727 - DNA, 25 bp, Homo sapien
tcagcgagccctttggctatttctc

SEQ ID NO: 4525728 - DNA, 25 bp, Homo sapien
tcccactcagcgagccctttggcta

SEQ ID NO: 4525729 - DNA, 25 bp, Homo sapien
tttaagagaattatcccagaaatcc

SEQ ID NO: 4525730 - DNA, 25 bp, Homo sapien
tggtgaagtcactactttaagagaa

SEQ ID NO: 4525731 - DNA, 25 bp, Homo sapien
ctgggaacccgacatactctgctta

SEQ ID NO: 4525732 - DNA, 25 bp, Homo sapien
ttatcccttgagctggcacaccagg

SEQ ID NO: 4525733 - DNA, 25 bp, Homo sapien
aaaactgcttccactagccccagcc

SEQ ID NO: 4525734 - DNA, 25 bp, Homo sapien
ttaacttccatcaaaactgcttcca

SEQ ID NO: 4525735 - DNA, 25 bp, Homo sapien
actagccccagccaggagagccgtt

SEQ ID NO: 4525736 - DNA, 25 bp, Homo sapien
cccagccaggagagccgttgcatcg

SEQ ID NO: 4525737 - DNA, 25 bp, Homo sapien
gaatcctcccttgtgtagtcctgag

SEQ ID NO: 4525738 - DNA, 25 bp, Homo sapien
gaaacactggtccatgtgacaaggg

SEQ ID NO: 4525739 - DNA, 25 bp, Homo sapien
ggctgaaaccctcgcttgttgggaa

SEQ ID NO: 4525740 - DNA, 25 bp, Homo sapien
cagatgatttttagtggaacgcgca

SEQ ID NO: 4525741 - DNA, 25 bp, Homo sapien
gagaagatgctagacgaaaacccac

SEQ ID NO: 4525742 - DNA, 25 bp, Homo sapien
gtgcacgtgtaaatggagtccctgt

SEQ ID NO: 4525743 - DNA, 25 bp, Homo sapien
tgtactcaagaggaggagctgacac

SEQ ID NO: 4525744 - DNA, 25 bp, Homo sapien
cagcccttgggcattgttatacacc

SEQ ID NO: 4525745 - DNA, 25 bp, Homo sapien
ctggaggtcctgaagggagcaattc

SEQ ID NO: 4525746 - DNA, 25 bp, Homo sapien
tgagtcatccactcgatccacagtt

SEQ ID NO: 4525747 - DNA, 25 bp, Homo sapien
tgatatgagcttggaaaactgagtc

SEQ ID NO: 4525748 - DNA, 25 bp, Homo sapien
gcagctacctggaggtgatatgagc

SEQ ID NO: 4525749 - DNA, 25 bp, Homo sapien
tggcgacgtggaaaggcagatatgt

SEQ ID NO: 4525750 - DNA, 25 bp, Homo sapien
aaaatcgtggcgacgtggaaaggca

SEQ ID NO: 4525751 - DNA, 25 bp, Homo sapien
ctacaaaatcgtggcgacgtggaaa

SEQ ID NO: 4525752 - DNA, 25 bp, Homo sapien
tcgtggcgacgtggaaaggcagata

SEQ ID NO: 4525753 - DNA, 25 bp, Homo sapien
gggagacccaagagagatcatctgg

SEQ ID NO: 4525754 - DNA, 25 bp, Homo sapien
ccagtccaaagtccatcagctttgt

SEQ ID NO: 4525755 - DNA, 25 bp, Homo sapien
tctgctctggctgatgcagtgacca

SEQ ID NO: 4525756 - DNA, 25 bp, Homo sapien
cactgctacattgtccagtccaaag

SEQ ID NO: 4525757 - DNA, 25 bp, Homo sapien
tgtcatgttggcgacaggctcctgc

SEQ ID NO: 4525758 - DNA, 25 bp, Homo sapien
gaatctggcacgatcccacggagat

SEQ ID NO: 4525759 - DNA, 25 bp, Homo sapien
gcagtctccgctactgagcgcggga

SEQ ID NO: 4525760 - DNA, 25 bp, Homo sapien
tctgggctgaaagaacccttggcgg

SEQ ID NO: 4525761 - DNA, 25 bp, Homo sapien
gggggcggatagcgggtctggcggc

SEQ ID NO: 4525762 - DNA, 25 bp, Homo sapien
aagggggcggatagcgggtctggcg

SEQ ID NO: 4525763 - DNA, 25 bp, Homo sapien
ggggcggatagcgggtctggcggcg

SEQ ID NO: 4525764 - DNA, 25 bp, Homo sapien
agggggcggatagcgggtctggcgg

SEQ ID NO: 4525765 - DNA, 25 bp, Homo sapien
ccgccgcactgacaggtgagcgcgg

SEQ ID NO: 4525766 - DNA, 25 bp, Homo sapien
cactgacaggtgagcgcggacgcac

SEQ ID NO: 4525767 - DNA, 25 bp, Homo sapien
gtcgaaagcgcaggccccgaggacc

SEQ ID NO: 4525768 - DNA, 25 bp, Homo sapien
gcgtcgaaagcgcaggccccgagga

SEQ ID NO: 4525769 - DNA, 25 bp, Homo sapien
acaccgtgacctcgctgctctgggt

SEQ ID NO: 4525770 - DNA, 25 bp, Homo sapien
gtgaattgtgaagaaccatcgcggg

SEQ ID NO: 4525771 - DNA, 25 bp, Homo sapien
gcaggctcgggtgcgttgttcgcgg

SEQ ID NO: 4525772 - DNA, 25 bp, Homo sapien
gcggagggaagagggccgcaaacca

SEQ ID NO: 4525773 - DNA, 25 bp, Homo sapien
caggagcgggcaggatgacccccac

SEQ ID NO: 4525774 - DNA, 25 bp, Homo sapien
tcaggagcgggcaggatgaccccca

SEQ ID NO: 4525775 - DNA, 25 bp, Homo sapien
tagcgagggcgcgaagtccaggccg

SEQ ID NO: 4525776 - DNA, 25 bp, Homo sapien
gaggcccccgaacacgctcctggtg

SEQ ID NO: 4525777 - DNA, 25 bp, Homo sapien
cagcgcctggcagacgcgcccgctt

SEQ ID NO: 4525778 - DNA, 25 bp, Homo sapien
ctggcagacgcgcccgcttagcgag

SEQ ID NO: 4525779 - DNA, 25 bp, Homo sapien
gatgtgtgcatttgccgatccccga

SEQ ID NO: 4525780 - DNA, 25 bp, Homo sapien
tgttcagccacagcggaaaaccgaa

SEQ ID NO: 4525781 - DNA, 25 bp, Homo sapien
tggagcatccggagaatccatgatg

SEQ ID NO: 4525782 - DNA, 25 bp, Homo sapien
gggcagagccgctgtgttcagccac

SEQ ID NO: 4525783 - DNA, 25 bp, Homo sapien
cagcgaacccgcagtgctcacaagg

SEQ ID NO: 4525784 - DNA, 25 bp, Homo sapien
gggtccagcgaacccgcagtgctca

SEQ ID NO: 4525785 - DNA, 25 bp, Homo sapien
ccgcggggtccagcgaacccgcagt

SEQ ID NO: 4525786 - DNA, 25 bp, Homo sapien
agcgaacccgcagtgctcacaaggc

SEQ ID NO: 4525787 - DNA, 25 bp, Homo sapien
ttgcagcgcctcactagctcctgag

SEQ ID NO: 4525788 - DNA, 25 bp, Homo sapien
gagctgggcgtctttcgttctctct

SEQ ID NO: 4525789 - DNA, 25 bp, Homo sapien
gctgaggcgggttggcggctgcaac

SEQ ID NO: 4525790 - DNA, 25 bp, Homo sapien
aggactagggactggcggctgaggc

SEQ ID NO: 4525791 - DNA, 25 bp, Homo sapien
agtgggaggtatattggggctgtca

SEQ ID NO: 4525792 - DNA, 25 bp, Homo sapien
gcaggggagtgggaggtatattggg

SEQ ID NO: 4525793 - DNA, 25 bp, Homo sapien
tgggaggtatattggggctgtcacc

SEQ ID NO: 4525794 - DNA, 25 bp, Homo sapien
ggagtgggaggtatattggggctgt

SEQ ID NO: 4525795 - DNA, 25 bp, Homo sapien
tactcttgatccctaagggaaactg

SEQ ID NO: 4525796 - DNA, 25 bp, Homo sapien
tagatgtttactcttgatccctaag

SEQ ID NO: 4525797 - DNA, 25 bp, Homo sapien
tgtttactcttgatccctaagggaa

SEQ ID NO: 4525798 - DNA, 25 bp, Homo sapien
cttgatccctaagggaaactggaag

SEQ ID NO: 4525799 - DNA, 25 bp, Homo sapien
gcatgtgacggagcgcaaatacctg

SEQ ID NO: 4525800 - DNA, 25 bp, Homo sapien
caaatacctgaagcgagactggtgc

SEQ ID NO: 4525801 - DNA, 25 bp, Homo sapien
cacatccggaaggaggaaggttcct

SEQ ID NO: 4525802 - DNA, 25 bp, Homo sapien
taagcagaccatccacgaggaaggc

SEQ ID NO: 4525803 - DNA, 25 bp, Homo sapien
gaacccttgcaactcgagaagctgt

SEQ ID NO: 4525804 - DNA, 25 bp, Homo sapien
tttgttttgatccagtgctctccca

SEQ ID NO: 4525805 - DNA, 25 bp, Homo sapien
cagacttgagattcagttgccgatc

SEQ ID NO: 4525806 - DNA, 25 bp, Homo sapien
tactgatgattctcacgctaggcga

SEQ ID NO: 4525807 - DNA, 25 bp, Homo sapien
tatagagtgttataagggaggccct

SEQ ID NO: 4525808 - DNA, 25 bp, Homo sapien
gtagagtaagtcactgcccttggtg

SEQ ID NO: 4525809 - DNA, 25 bp, Homo sapien
tctgcaatcggaagtaccagcctct

SEQ ID NO: 4525810 - DNA, 25 bp, Homo sapien
cagaccctgcttgatttccgtagga

SEQ ID NO: 4525811 - DNA, 25 bp, Homo sapien
aaatagttgaatctggatctgggcc

SEQ ID NO: 4525812 - DNA, 25 bp, Homo sapien
tgtctcccaggcatactacaaagga

SEQ ID NO: 4525813 - DNA, 25 bp, Homo sapien
tctgggccaggataactcgactctt

SEQ ID NO: 4525814 - DNA, 25 bp, Homo sapien
gatggaagaagtgggtcccctcagc

SEQ ID NO: 4525815 - DNA, 25 bp, Homo sapien
gaatagtagtaagaatggagcggca

SEQ ID NO: 4525816 - DNA, 25 bp, Homo sapien
tatcccaagagcgtgtaaggtttca

SEQ ID NO: 4525817 - DNA, 25 bp, Homo sapien
tctgcatcatagctggtgacccggt

SEQ ID NO: 4525818 - DNA, 25 bp, Homo sapien
ccagcaccacagaaagttacttgag

SEQ ID NO: 4525819 - DNA, 25 bp, Homo sapien
tccttggtgacagcggagctccctg

SEQ ID NO: 4525820 - DNA, 25 bp, Homo sapien
cttggtgacagcggagctccctgtc

SEQ ID NO: 4525821 - DNA, 25 bp, Homo sapien
ccttggtgacagcggagctccctgt

SEQ ID NO: 4525822 - DNA, 25 bp, Homo sapien
gcagccccatggatctgaaattgtt

SEQ ID NO: 4525823 - DNA, 25 bp, Homo sapien
taaacagggtctatggtcaagcagc

SEQ ID NO: 4525824 - DNA, 25 bp, Homo sapien
gctgttaaaccaagcacagaccagt

SEQ ID NO: 4525825 - DNA, 25 bp, Homo sapien
ttgaacaggcatggagtaaacaggg

SEQ ID NO: 4525826 - DNA, 25 bp, Homo sapien
gaaaagctgtccacgatacgaccat

SEQ ID NO: 4525827 - DNA, 25 bp, Homo sapien
atttgcctaatacagatgccttgaa

SEQ ID NO: 4525828 - DNA, 25 bp, Homo sapien
gaatttccacggaaaagctgtccac

SEQ ID NO: 4525829 - DNA, 25 bp, Homo sapien
agatgccttgaatttccacggaaaa

SEQ ID NO: 4525830 - DNA, 25 bp, Homo sapien
taagagtttccagagtgttcatccc

SEQ ID NO: 4525831 - DNA, 25 bp, Homo sapien
gataagacatctagctgacagtagg

SEQ ID NO: 4525832 - DNA, 25 bp, Homo sapien
aaacctatttgtgtcattgcgagca

SEQ ID NO: 4525833 - DNA, 25 bp, Homo sapien
cactcaggttctaggcatgcaggcc

SEQ ID NO: 4525834 - DNA, 25 bp, Homo sapien
ggaaaatgttcagcctatgtgagag

SEQ ID NO: 4525835 - DNA, 25 bp, Homo sapien
gcagctcacactatacatggagaga

SEQ ID NO: 4525836 - DNA, 25 bp, Homo sapien
caattgctaatgtgtgcctgaaatc

SEQ ID NO: 4525837 - DNA, 25 bp, Homo sapien
aagcaggtacacgtttgccaaggac

SEQ ID NO: 4525838 - DNA, 25 bp, Homo sapien
gctggcccaatgtcatcaagtttca

SEQ ID NO: 4525839 - DNA, 25 bp, Homo sapien
agcccacaagtgtagttggatcagc

SEQ ID NO: 4525840 - DNA, 25 bp, Homo sapien
ttctttgcattttgctggcccaatg

SEQ ID NO: 4525841 - DNA, 25 bp, Homo sapien
ctttggacgtgattttctgcctgaa

SEQ ID NO: 4525842 - DNA, 25 bp, Homo sapien
ttatcaccatagttaggagaagggc

SEQ ID NO: 4525843 - DNA, 25 bp, Homo sapien
gagttccgtaagttccaccagacag

SEQ ID NO: 4525844 - DNA, 25 bp, Homo sapien
ctcttgactgaaggacacgatccta

SEQ ID NO: 4525845 - DNA, 25 bp, Homo sapien
cttaagagacagttagccagctgcc

SEQ ID NO: 4525846 - DNA, 25 bp, Homo sapien
aactgagcccggttatgcctggatt

SEQ ID NO: 4525847 - DNA, 25 bp, Homo sapien
gcctggattcaattgctaatggaga

SEQ ID NO: 4525848 - DNA, 25 bp, Homo sapien
ggagagatgaatatcattatgtaag

SEQ ID NO: 4525849 - DNA, 25 bp, Homo sapien
tctatactaataacagtttccaggc

SEQ ID NO: 4525850 - DNA, 25 bp, Homo sapien
aatataactgatgcttgttagcaat

SEQ ID NO: 4525851 - DNA, 25 bp, Homo sapien
caaatataactgatgcttgttagca

SEQ ID NO: 4525852 - DNA, 25 bp, Homo sapien
actgatgcttgttagcaatttaaaa

SEQ ID NO: 4525853 - DNA, 25 bp, Homo sapien
gtttttattaggacagacaggataa

SEQ ID NO: 4525854 - DNA, 25 bp, Homo sapien
gaaaatgtgcaatcccaggccaata

SEQ ID NO: 4525855 - DNA, 25 bp, Homo sapien
aagagcctgcaagcgtgcattgcta

SEQ ID NO: 4525856 - DNA, 25 bp, Homo sapien
gaggttccccggtcaatgttacagc

SEQ ID NO: 4525857 - DNA, 25 bp, Homo sapien
cacacactgacttggcgcaatttgc

SEQ ID NO: 4525858 - DNA, 25 bp, Homo sapien
ctttctagttcagggagggctatgc

SEQ ID NO: 4525859 - DNA, 25 bp, Homo sapien
gatgctttttacctaacgtgtctgt

SEQ ID NO: 4525860 - DNA, 25 bp, Homo sapien
tagagttactactaagtcaggtgtg

SEQ ID NO: 4525861 - DNA, 25 bp, Homo sapien
tcaggtgtgtctggttagatgcagc

SEQ ID NO: 4525862 - DNA, 25 bp, Homo sapien
gatgtgcttaagctgccaaatggca

SEQ ID NO: 4525863 - DNA, 25 bp, Homo sapien
ctggcaggatgtgcttaagctgcca

SEQ ID NO: 4525864 - DNA, 25 bp, Homo sapien
gccacttaaagcctgctggcaggat

SEQ ID NO: 4525865 - DNA, 25 bp, Homo sapien
tcctctccaggaaaagttcagatcc

SEQ ID NO: 4525866 - DNA, 25 bp, Homo sapien
gattctgccatggtgtcttacaaca

SEQ ID NO: 4525867 - DNA, 25 bp, Homo sapien
gttcctgaagggttacgtggccaca

SEQ ID NO: 4525868 - DNA, 25 bp, Homo sapien
ccagatacatgatgcagggttcaga

SEQ ID NO: 4525869 - DNA, 25 bp, Homo sapien
cagcaacgtggtacattggtggact

SEQ ID NO: 4525870 - DNA, 25 bp, Homo sapien
catcaagcctataaggattgagact

SEQ ID NO: 4525871 - DNA, 25 bp, Homo sapien
tcaccatcaagcctataaggattga

SEQ ID NO: 4525872 - DNA, 25 bp, Homo sapien
tacttacagaccaaagtggactgca

SEQ ID NO: 4525873 - DNA, 25 bp, Homo sapien
tgcaatgagtacacctcaaacctcc

SEQ ID NO: 4525874 - DNA, 25 bp, Homo sapien
tttcttgtgcatgataacactagaa

SEQ ID NO: 4525875 - DNA, 25 bp, Homo sapien
catgataacactagaaggagcatac

SEQ ID NO: 4525876 - DNA, 25 bp, Homo sapien
cactagaaggagcatacaatggtta

SEQ ID NO: 4525877 - DNA, 25 bp, Homo sapien
tgtgcatgataacactagaaggagc

SEQ ID NO: 4525878 - DNA, 25 bp, Homo sapien
tcagttgcaccagtagaaaaggcgg

SEQ ID NO: 4525879 - DNA, 25 bp, Homo sapien
tatcagccaaggtcatgagcaggtg

SEQ ID NO: 4525880 - DNA, 25 bp, Homo sapien
cacaaagagtatgcgtgcaaggtcc

SEQ ID NO: 4525881 - DNA, 25 bp, Homo sapien
tagaactcggctgcgtatcaacaca

SEQ ID NO: 4525882 - DNA, 25 bp, Homo sapien
gcttccttctgacgcagtctttctt

SEQ ID NO: 4525883 - DNA, 25 bp, Homo sapien
ggcttccttctgacgcagtctttct

SEQ ID NO: 4525884 - DNA, 25 bp, Homo sapien
ttagttagtggtcacactggcttcc

SEQ ID NO: 4525885 - DNA, 25 bp, Homo sapien
gcagaagttcccgatttgccatgga

SEQ ID NO: 4525886 - DNA, 25 bp, Homo sapien
gatgttatgctcttcattctccgag

SEQ ID NO: 4525887 - DNA, 25 bp, Homo sapien
tcattctccgagcttcctcctcaga

SEQ ID NO: 4525888 - DNA, 25 bp, Homo sapien
cccgatttgccatggatgttatgct

SEQ ID NO: 4525889 - DNA, 25 bp, Homo sapien
ctagcagtgggattgattttctttg

SEQ ID NO: 4525890 - DNA, 25 bp, Homo sapien
ggctagcagtgggattgattttctt

SEQ ID NO: 4525891 - DNA, 25 bp, Homo sapien
ctgaagtcaacttgctgactgattc

SEQ ID NO: 4525892 - DNA, 25 bp, Homo sapien
ttctctgaagtcaacttgctgactg

SEQ ID NO: 4525893 - DNA, 25 bp, Homo sapien
attctttgtacatggctttttctca

SEQ ID NO: 4525894 - DNA, 25 bp, Homo sapien
ttctttgtacatggctttttctcac

SEQ ID NO: 4525895 - DNA, 25 bp, Homo sapien
ttttactgttccctcaatgacggtc

SEQ ID NO: 4525896 - DNA, 25 bp, Homo sapien
gcttttactgttccctcaatgacgg

SEQ ID NO: 4525897 - DNA, 25 bp, Homo sapien
gttccctcaatgacggtctgagtca

SEQ ID NO: 4525898 - DNA, 25 bp, Homo sapien
tactgttccctcaatgacggtctga

SEQ ID NO: 4525899 - DNA, 25 bp, Homo sapien
ttgacaacagtcactcacgaggcat

SEQ ID NO: 4525900 - DNA, 25 bp, Homo sapien
taagtgagatcgtagagacctgacc

SEQ ID NO: 4525901 - DNA, 25 bp, Homo sapien
tccaggcgaaaacgggctaatgtcc

SEQ ID NO: 4525902 - DNA, 25 bp, Homo sapien
gagcgaaattgtttctccaggcgaa

SEQ ID NO: 4525903 - DNA, 25 bp, Homo sapien
gctggagaatgcaccatacaagaca

SEQ ID NO: 4525904 - DNA, 25 bp, Homo sapien
gatcttcaatgctctttcaatatcc

SEQ ID NO: 4525905 - DNA, 25 bp, Homo sapien
caatatccagctgtgcgctggagaa

SEQ ID NO: 4525906 - DNA, 25 bp, Homo sapien
ctcttacaccagccaagatcttcaa

SEQ ID NO: 4525907 - DNA, 25 bp, Homo sapien
caagtccttgcttgaaatatcttcc

SEQ ID NO: 4525908 - DNA, 25 bp, Homo sapien
cttgaaatatcttccaatatagtac

SEQ ID NO: 4525909 - DNA, 25 bp, Homo sapien
ctgcaagtccttgcttgaaatatct

SEQ ID NO: 4525910 - DNA, 25 bp, Homo sapien
gcttgaaatatcttccaatatagta

SEQ ID NO: 4525911 - DNA, 25 bp, Homo sapien
ctgagcggcacgcagtttgatgtcc

SEQ ID NO: 4525912 - DNA, 25 bp, Homo sapien
tgtccgcagcaggatacagggagtc

SEQ ID NO: 4525913 - DNA, 25 bp, Homo sapien
aagtggcgctgtaaatccaatgcgg

SEQ ID NO: 4525914 - DNA, 25 bp, Homo sapien
gatgcaagttcagtatattaatggg

SEQ ID NO: 4525915 - DNA, 25 bp, Homo sapien
gagcatatctgcctgtgtggacagc

SEQ ID NO: 4525916 - DNA, 25 bp, Homo sapien
ggtttaagagtgcagtttcctaggc

SEQ ID NO: 4525917 - DNA, 25 bp, Homo sapien
tgtggacagcaagctttccccgaat

SEQ ID NO: 4525918 - DNA, 25 bp, Homo sapien
gaatttccctacgatccctgaggca

SEQ ID NO: 4525919 - DNA, 25 bp, Homo sapien
actgcagaactcataccacaccata

SEQ ID NO: 4525920 - DNA, 25 bp, Homo sapien
ttcatcccaaaatatcgtactgttg

SEQ ID NO: 4525921 - DNA, 25 bp, Homo sapien
ccataaacacgtagctgggtgtgat

SEQ ID NO: 4525922 - DNA, 25 bp, Homo sapien
caaaatatcgtactgttgtttcaaa

SEQ ID NO: 4525923 - DNA, 25 bp, Homo sapien
cctggggatttgtgaggtactgctt

SEQ ID NO: 4525924 - DNA, 25 bp, Homo sapien
tgtgaggtactgcttgcttactctc

SEQ ID NO: 4525925 - DNA, 25 bp, Homo sapien
gatttgtgaggtactgcttgcttac

SEQ ID NO: 4525926 - DNA, 25 bp, Homo sapien
gggatttgtgaggtactgcttgctt

SEQ ID NO: 4525927 - DNA, 25 bp, Homo sapien
gaatttatgactcccctccacagag

SEQ ID NO: 4525928 - DNA, 25 bp, Homo sapien
taatgcacggcagcagtttcggccc

SEQ ID NO: 4525929 - DNA, 25 bp, Homo sapien
cacaaagccacggaaaacgctgaca

SEQ ID NO: 4525930 - DNA, 25 bp, Homo sapien
cgctgacaaccagaatttatgactc

SEQ ID NO: 4525931 - DNA, 25 bp, Homo sapien
gcattctccaagtgactttcttcca

SEQ ID NO: 4525932 - DNA, 25 bp, Homo sapien
tctgtgcattctccaagtgactttc

SEQ ID NO: 4525933 - DNA, 25 bp, Homo sapien
cttttctgtgcattctccaagtgac

SEQ ID NO: 4525934 - DNA, 25 bp, Homo sapien
tgtgcattctccaagtgactttctt

SEQ ID NO: 4525935 - DNA, 25 bp, Homo sapien
tgggctccctcactgcattgaggtc

SEQ ID NO: 4525936 - DNA, 25 bp, Homo sapien
tccagcttccgtaaataaaagacca

SEQ ID NO: 4525937 - DNA, 25 bp, Homo sapien
caactgaatgtaagctctaggaggg

SEQ ID NO: 4525938 - DNA, 25 bp, Homo sapien
tgctgtagccttaattgtagaaaac

SEQ ID NO: 4525939 - DNA, 25 bp, Homo sapien
taagtgcatcattttaggcagacgg

SEQ ID NO: 4525940 - DNA, 25 bp, Homo sapien
tctgaggcccgagtgatcttcttgg

SEQ ID NO: 4525941 - DNA, 25 bp, Homo sapien
gacttggaagctctaacagcatgaa

SEQ ID NO: 4525942 - DNA, 25 bp, Homo sapien
tgtgggccaagtataagaatcccgg

SEQ ID NO: 4525943 - DNA, 25 bp, Homo sapien
gataagggttggagtatcttcctag

SEQ ID NO: 4525944 - DNA, 25 bp, Homo sapien
gggcttttatgccaaacgcaattaa

SEQ ID NO: 4525945 - DNA, 25 bp, Homo sapien
tggatgcccatctgggaggcagtaa

SEQ ID NO: 4525946 - DNA, 25 bp, Homo sapien
tctcaagagggtggcattcatacaa

SEQ ID NO: 4525947 - DNA, 25 bp, Homo sapien
gacctgacatggttggtataaacca

SEQ ID NO: 4525948 - DNA, 25 bp, Homo sapien
tggttggtataaaccaacaggacgc

SEQ ID NO: 4525949 - DNA, 25 bp, Homo sapien
tataaaccaacaggacgcacagtta

SEQ ID NO: 4525950 - DNA, 25 bp, Homo sapien
ggacctgacatggttggtataaacc

SEQ ID NO: 4525951 - DNA, 25 bp, Homo sapien
aaatccccgttgtgcactttccagg

SEQ ID NO: 4525952 - DNA, 25 bp, Homo sapien
ggaaacaaagggactgcgctctgct

SEQ ID NO: 4525953 - DNA, 25 bp, Homo sapien
ccgggtgatgctaacgaggaaacaa

SEQ ID NO: 4525954 - DNA, 25 bp, Homo sapien
acagcacgctgacatcggaaaggga

SEQ ID NO: 4525955 - DNA, 25 bp, Homo sapien
gaaaaaactgtctattgtgctcctg

SEQ ID NO: 4525956 - DNA, 25 bp, Homo sapien
gcctgaggccagaattgtttccaat

SEQ ID NO: 4525957 - DNA, 25 bp, Homo sapien
gtatcacctaacttgggcacctggg

SEQ ID NO: 4525958 - DNA, 25 bp, Homo sapien
gcagagatagggcagtacgacttaa

SEQ ID NO: 4525959 - DNA, 25 bp, Homo sapien
gatgctttgccccaaggtaagtctt

SEQ ID NO: 4525960 - DNA, 25 bp, Homo sapien
tgtagtccagtgaagtccctcaatg

SEQ ID NO: 4525961 - DNA, 25 bp, Homo sapien
tcaacgtggagaaaatggataccca

SEQ ID NO: 4525962 - DNA, 25 bp, Homo sapien
aacatcttggcttcgagtgatacag

SEQ ID NO: 4525963 - DNA, 25 bp, Homo sapien
tctagatctatttacacgaaacctc

SEQ ID NO: 4525964 - DNA, 25 bp, Homo sapien
cttgttctagatctatttacacgaa

SEQ ID NO: 4525965 - DNA, 25 bp, Homo sapien
ttgttaaatagctgaagctctccct

SEQ ID NO: 4525966 - DNA, 25 bp, Homo sapien
ctatttacacgaaacctctgacatc

SEQ ID NO: 4525967 - DNA, 25 bp, Homo sapien
ccacgatgacttgtaccgtttcaaa

SEQ ID NO: 4525968 - DNA, 25 bp, Homo sapien
tttattctggcatatggtggttggc

SEQ ID NO: 4525969 - DNA, 25 bp, Homo sapien
cgatgacttgtaccgtttcaaaggt

SEQ ID NO: 4525970 - DNA, 25 bp, Homo sapien
tgacttgtaccgtttcaaaggtgct

SEQ ID NO: 4525971 - DNA, 25 bp, Homo sapien
tttgtgggacaagatttattgcata

SEQ ID NO: 4525972 - DNA, 25 bp, Homo sapien
gaatttgtgggacaagatttattgc

SEQ ID NO: 4525973 - DNA, 25 bp, Homo sapien
catattttatatgggacacatctgt

SEQ ID NO: 4525974 - DNA, 25 bp, Homo sapien
gaaagttcagagcaaagaatttgtg

SEQ ID NO: 4525975 - DNA, 25 bp, Homo sapien
tcaacttgaagaagtacaacttcaa

SEQ ID NO: 4525976 - DNA, 25 bp, Homo sapien
catcccattttgatatcacctgcaa

SEQ ID NO: 4525977 - DNA, 25 bp, Homo sapien
taaattctacggtcacatccaatgc

SEQ ID NO: 4525978 - DNA, 25 bp, Homo sapien
caatataagggaggcttgcttttcc

SEQ ID NO: 4525979 - DNA, 25 bp, Homo sapien
atttctatattctctactggattct

SEQ ID NO: 4525980 - DNA, 25 bp, Homo sapien
tttttatgaaggtgtctgtatctta

SEQ ID NO: 4525981 - DNA, 25 bp, Homo sapien
tcattgcctctgttggctctttcaa

SEQ ID NO: 4525982 - DNA, 25 bp, Homo sapien
tcattataaagaattaagggtgcac

SEQ ID NO: 4525983 - DNA, 25 bp, Homo sapien
tgtcccacagcccatagagaagcag

SEQ ID NO: 4525984 - DNA, 25 bp, Homo sapien
ccagggagagtggaagactctccag

SEQ ID NO: 4525985 - DNA, 25 bp, Homo sapien
gagacacgtgaggtcaagtgtccca

SEQ ID NO: 4525986 - DNA, 25 bp, Homo sapien
cagggccctgcttagcgcagcctga

SEQ ID NO: 4525987 - DNA, 25 bp, Homo sapien
aagacactgagatcgaattccctgg

SEQ ID NO: 4525988 - DNA, 25 bp, Homo sapien
ctacaggccaacagtgaaggtgttg

SEQ ID NO: 4525989 - DNA, 25 bp, Homo sapien
gaaggtgttgaaagacactgagatc

SEQ ID NO: 4525990 - DNA, 25 bp, Homo sapien
caggccaacagtgaaggtgttgaaa

SEQ ID NO: 4525991 - DNA, 25 bp, Homo sapien
tgatctcacactatcattacaatat

SEQ ID NO: 4525992 - DNA, 25 bp, Homo sapien
tattagaacactacatgatctcaca

SEQ ID NO: 4525993 - DNA, 25 bp, Homo sapien
cttctattagaacactacatgatct

SEQ ID NO: 4525994 - DNA, 25 bp, Homo sapien
gaacactacatgatctcacactatc

SEQ ID NO: 4525995 - DNA, 25 bp, Homo sapien
aattaggatgcagaatggtaagccc

SEQ ID NO: 4525996 - DNA, 25 bp, Homo sapien
gaatagactctagcttggctgtaag

SEQ ID NO: 4525997 - DNA, 25 bp, Homo sapien
tgattactccaagtcgtacaaaggg

SEQ ID NO: 4525998 - DNA, 25 bp, Homo sapien
aagaggctactcatctcccctgagg

SEQ ID NO: 4525999 - DNA, 25 bp, Homo sapien
tattaagggctctatatgtggctgc

SEQ ID NO: 4526000 - DNA, 25 bp, Homo sapien
tatggactgggcatattgtctcagc

SEQ ID NO: 4526001 - DNA, 25 bp, Homo sapien
catgagctgaaagcatatggatgca

SEQ ID NO: 4526002 - DNA, 25 bp, Homo sapien
ggaatctaatcaagagcccgtgcct

SEQ ID NO: 4526003 - DNA, 25 bp, Homo sapien
caaatggactagtgaagggaaattc

SEQ ID NO: 4526004 - DNA, 25 bp, Homo sapien
caggatcatcccacattcaggctat

SEQ ID NO: 4526005 - DNA, 25 bp, Homo sapien
gatctggaaggccaaagaccaaaaa

SEQ ID NO: 4526006 - DNA, 25 bp, Homo sapien
tccttatgtagagaccttatgctgg

SEQ ID NO: 4526007 - DNA, 25 bp, Homo sapien
tagttgaggctggaccctagcatgc

SEQ ID NO: 4526008 - DNA, 25 bp, Homo sapien
gactctgttctgtaggtcagcacca

SEQ ID NO: 4526009 - DNA, 25 bp, Homo sapien
tgtacctgcctagaaatacagggct

SEQ ID NO: 4526010 - DNA, 25 bp, Homo sapien
tccaagcacagaggaagtgagcctt

SEQ ID NO: 4526011 - DNA, 25 bp, Homo sapien
tccccagaaccgaggccttcatatt

SEQ ID NO: 4526012 - DNA, 25 bp, Homo sapien
tgctcacttggagcccagttttctg

SEQ ID NO: 4526013 - DNA, 25 bp, Homo sapien
caagaggatacacccattgcttgag

SEQ ID NO: 4526014 - DNA, 25 bp, Homo sapien
tctcagtactacaaatgcccgcatg

SEQ ID NO: 4526015 - DNA, 25 bp, Homo sapien
ttaaaaattctaaaatagatgcatt

SEQ ID NO: 4526016 - DNA, 25 bp, Homo sapien
gtttaaaaattctaaaatagatgca

SEQ ID NO: 4526017 - DNA, 25 bp, Homo sapien
tttaaaaattctaaaatagatgcat

SEQ ID NO: 4526018 - DNA, 25 bp, Homo sapien
taaaaattctaaaatagatgcattt

SEQ ID NO: 4526019 - DNA, 25 bp, Homo sapien
cactgacaatttcattccaattgtc

SEQ ID NO: 4526020 - DNA, 25 bp, Homo sapien
ggagacacagaccatgtacaggaat

SEQ ID NO: 4526021 - DNA, 25 bp, Homo sapien
tccaattgtctcctgggagacacag

SEQ ID NO: 4526022 - DNA, 25 bp, Homo sapien
tcattccaattgtctcctgggagac

SEQ ID NO: 4526023 - DNA, 25 bp, Homo sapien
ctgctacaatgctgtgtctgttcac

SEQ ID NO: 4526024 - DNA, 25 bp, Homo sapien
tgtggtccagtacaaggaacattgc

SEQ ID NO: 4526025 - DNA, 25 bp, Homo sapien
tctgttactaccaagattttgggtg

SEQ ID NO: 4526026 - DNA, 25 bp, Homo sapien
gaacattgctttatccaggacggga

SEQ ID NO: 4526027 - DNA, 25 bp, Homo sapien
gaaggaccttctaatgatcttgatg

SEQ ID NO: 4526028 - DNA, 25 bp, Homo sapien
cgacataagggttctggcggctcct

SEQ ID NO: 4526029 - DNA, 25 bp, Homo sapien
cagcttaggagattgaggaatgccc

SEQ ID NO: 4526030 - DNA, 25 bp, Homo sapien
aaaggccggcacgttcacaacaatg

SEQ ID NO: 4526031 - DNA, 25 bp, Homo sapien
taaatggcagattgaagggaccctc

SEQ ID NO: 4526032 - DNA, 25 bp, Homo sapien
aaagcccactagttaagagtccaga

SEQ ID NO: 4526033 - DNA, 25 bp, Homo sapien
tttcctagggcaagcacaaatggtc

SEQ ID NO: 4526034 - DNA, 25 bp, Homo sapien
tgaacggtggcgtctattcactccc

SEQ ID NO: 4526035 - DNA, 25 bp, Homo sapien
cgatcaattaggacaccgtggtagc

SEQ ID NO: 4526036 - DNA, 25 bp, Homo sapien
aaagccagtaactatgtaagaaggc

SEQ ID NO: 4526037 - DNA, 25 bp, Homo sapien
aaggctaactactgcgagaccacca

SEQ ID NO: 4526038 - DNA, 25 bp, Homo sapien
tactgcgagaccaccatgctatgag

SEQ ID NO: 4526039 - DNA, 25 bp, Homo sapien
gccagtaactatgtaagaaggctaa

SEQ ID NO: 4526040 - DNA, 25 bp, Homo sapien
gatctttggaaccacgcctgtcggt

SEQ ID NO: 4526041 - DNA, 25 bp, Homo sapien
catggatgccaagcgaaattaacgg

SEQ ID NO: 4526042 - DNA, 25 bp, Homo sapien
gaatatctctaatctagccaggcgt

SEQ ID NO: 4526043 - DNA, 25 bp, Homo sapien
agaacccattttggctcaggcagag

SEQ ID NO: 4526044 - DNA, 25 bp, Homo sapien
tctagtagccacactcaagaagtag

SEQ ID NO: 4526045 - DNA, 25 bp, Homo sapien
tacacagtagagaggagatactcca

SEQ ID NO: 4526046 - DNA, 25 bp, Homo sapien
gaaagcctacggaacatgcctctag

SEQ ID NO: 4526047 - DNA, 25 bp, Homo sapien
cacttgagagccaaacaagggccag

SEQ ID NO: 4526048 - DNA, 25 bp, Homo sapien
atggaaagatgggctaatgaaatca

SEQ ID NO: 4526049 - DNA, 25 bp, Homo sapien
ggaaagatgggctaatgaaatcacc

SEQ ID NO: 4526050 - DNA, 25 bp, Homo sapien
aaagatgggctaatgaaatcaccag

SEQ ID NO: 4526051 - DNA, 25 bp, Homo sapien
gaaagatgggctaatgaaatcacca

SEQ ID NO: 4526052 - DNA, 25 bp, Homo sapien
gtatgtgcggctgacaaagcttcct

SEQ ID NO: 4526053 - DNA, 25 bp, Homo sapien
ggcctcagagaaagattcatggaat

SEQ ID NO: 4526054 - DNA, 25 bp, Homo sapien
ggccacgtgtatgtgcggctgacaa

SEQ ID NO: 4526055 - DNA, 25 bp, Homo sapien
cctcagagaaagattcatggaatga

SEQ ID NO: 4526056 - DNA, 25 bp, Homo sapien
ttggaagaactcctctagtttgtcc

SEQ ID NO: 4526057 - DNA, 25 bp, Homo sapien
tttggaagaactcctctagtttgtc

SEQ ID NO: 4526058 - DNA, 25 bp, Homo sapien
cagatattaggctgttaaggtcaga

SEQ ID NO: 4526059 - DNA, 25 bp, Homo sapien
tgaaaggaaagatatggcctagact

SEQ ID NO: 4526060 - DNA, 25 bp, Homo sapien
caggagctccagttaaaagccaaag

SEQ ID NO: 4526061 - DNA, 25 bp, Homo sapien
cacttacaggttaaacactggtgga

SEQ ID NO: 4526062 - DNA, 25 bp, Homo sapien
ccacagtcctgcgccagttctgcct

SEQ ID NO: 4526063 - DNA, 25 bp, Homo sapien
cacagtcctgcgccagttctgcctc

SEQ ID NO: 4526064 - DNA, 25 bp, Homo sapien
acagtcctgcgccagttctgcctct

SEQ ID NO: 4526065 - DNA, 25 bp, Homo sapien
caatgctggtcttaggactagtccc

SEQ ID NO: 4526066 - DNA, 25 bp, Homo sapien
caaagttgttagctagaacgcctca

SEQ ID NO: 4526067 - DNA, 25 bp, Homo sapien
catacacgtcttgaaggccacaggc

SEQ ID NO: 4526068 - DNA, 25 bp, Homo sapien
taaatctgtcgggagaattgtggcc

SEQ ID NO: 4526069 - DNA, 25 bp, Homo sapien
cgttaagatgaaacggaccgccacg

SEQ ID NO: 4526070 - DNA, 25 bp, Homo sapien
gattttgccagcagctacgacactt

SEQ ID NO: 4526071 - DNA, 25 bp, Homo sapien
tcacaccaaggccttatggaaaagg

SEQ ID NO: 4526072 - DNA, 25 bp, Homo sapien
gaaattcattagagaacctacggtg

SEQ ID NO: 4526073 - DNA, 25 bp, Homo sapien
tccgcagagctcttcaattggagtt

SEQ ID NO: 4526074 - DNA, 25 bp, Homo sapien
taacgaccgcaagttcacatatcgc

SEQ ID NO: 4526075 - DNA, 25 bp, Homo sapien
gagttatacaagctccaaggcaagt

SEQ ID NO: 4526076 - DNA, 25 bp, Homo sapien
ggatacaaccgccaattcttcagga

SEQ ID NO: 4526077 - DNA, 25 bp, Homo sapien
tcctgcccaagtgagacatattttc

SEQ ID NO: 4526078 - DNA, 25 bp, Homo sapien
gagatgtctccacagtaaaaacacg

SEQ ID NO: 4526079 - DNA, 25 bp, Homo sapien
cacagtaaaaacacgagactctaga

SEQ ID NO: 4526080 - DNA, 25 bp, Homo sapien
cacgagactctagaaatgccaaagg

SEQ ID NO: 4526081 - DNA, 25 bp, Homo sapien
gaggtcttcaaacttgacttgggag

SEQ ID NO: 4526082 - DNA, 25 bp, Homo sapien
agaaatcctgtggttccggcaaggg

SEQ ID NO: 4526083 - DNA, 25 bp, Homo sapien
aggtcttcaaacttgacttgggagg

SEQ ID NO: 4526084 - DNA, 25 bp, Homo sapien
tctcaaatcttttatgaggtcttca

SEQ ID NO: 4526085 - DNA, 25 bp, Homo sapien
agtacattatacttcccaattgtca

SEQ ID NO: 4526086 - DNA, 25 bp, Homo sapien
gagatatggtaaacaaaagtacatt

SEQ ID NO: 4526087 - DNA, 25 bp, Homo sapien
acttcccaattgtcactttcagttg

SEQ ID NO: 4526088 - DNA, 25 bp, Homo sapien
ctttcagttgaaattccaaagcatc

SEQ ID NO: 4526089 - DNA, 25 bp, Homo sapien
ccttctagttcagcctattagctgg

SEQ ID NO: 4526090 - DNA, 25 bp, Homo sapien
tccttctagttcagcctattagctg

SEQ ID NO: 4526091 - DNA, 25 bp, Homo sapien
gttgtctggcttatcttaggagacc

SEQ ID NO: 4526092 - DNA, 25 bp, Homo sapien
aatgttgtctggcttatcttaggag

SEQ ID NO: 4526093 - DNA, 25 bp, Homo sapien
catcaggtcttgagttggatcacag

SEQ ID NO: 4526094 - DNA, 25 bp, Homo sapien
cctcgaaatagagagctgagctgga

SEQ ID NO: 4526095 - DNA, 25 bp, Homo sapien
ccactgatggtgctaactggttcca

SEQ ID NO: 4526096 - DNA, 25 bp, Homo sapien
cattagtaagaaagcacagggtgtg

SEQ ID NO: 4526097 - DNA, 25 bp, Homo sapien
cgcaggtaatacttaacaacgtagt

SEQ ID NO: 4526098 - DNA, 25 bp, Homo sapien
ctgatcatagtaacgcaggtaatac

SEQ ID NO: 4526099 - DNA, 25 bp, Homo sapien
aacaacgtagtccaccagattaatc

SEQ ID NO: 4526100 - DNA, 25 bp, Homo sapien
gtagtccaccagattaatcccatta

SEQ ID NO: 4526101 - DNA, 25 bp, Homo sapien
gggaggatagagataaatggaacaa

SEQ ID NO: 4526102 - DNA, 25 bp, Homo sapien
tgcatgctctaatataaatgttgtt

SEQ ID NO: 4526103 - DNA, 25 bp, Homo sapien
ggcagatcatgggaacttattatga

SEQ ID NO: 4526104 - DNA, 25 bp, Homo sapien
aatggaacaatctggaatacgtttt

SEQ ID NO: 4526105 - DNA, 25 bp, Homo sapien
ttcacgctcttcacgtgcagcaagt

SEQ ID NO: 4526106 - DNA, 25 bp, Homo sapien
atccttgagtttgggcagaatttct

SEQ ID NO: 4526107 - DNA, 25 bp, Homo sapien
gccaagatgagagctaaaatatcct

SEQ ID NO: 4526108 - DNA, 25 bp, Homo sapien
gaatttctaagctatatccatcggc

SEQ ID NO: 4526109 - DNA, 25 bp, Homo sapien
aacaccagttattacggagctgaac

SEQ ID NO: 4526110 - DNA, 25 bp, Homo sapien
acaccagttattacggagctgaact

SEQ ID NO: 4526111 - DNA, 25 bp, Homo sapien
ggcaaacaccagttattacggagct

SEQ ID NO: 4526112 - DNA, 25 bp, Homo sapien
caaacaccagttattacggagctga

SEQ ID NO: 4526113 - DNA, 25 bp, Homo sapien
tatcgactgtgtactcaataggctg

SEQ ID NO: 4526114 - DNA, 25 bp, Homo sapien
tcagtaacaaatatcgactgtgtac

SEQ ID NO: 4526115 - DNA, 25 bp, Homo sapien
gaggcttggtaccaacagaattaac

SEQ ID NO: 4526116 - DNA, 25 bp, Homo sapien
tactcaataggctgtcgggaggctt

SEQ ID NO: 4526117 - DNA, 25 bp, Homo sapien
ttagaagctcgcgtgatgatctcta

SEQ ID NO: 4526118 - DNA, 25 bp, Homo sapien
tagaagctcgcgtgatgatctctac

SEQ ID NO: 4526119 - DNA, 25 bp, Homo sapien
cttagaagctcgcgtgatgatctct

SEQ ID NO: 4526120 - DNA, 25 bp, Homo sapien
tttctgtgcaaggaggtgataccct

SEQ ID NO: 4526121 - DNA, 25 bp, Homo sapien
agattatgcactgggcacgttcagc

SEQ ID NO: 4526122 - DNA, 25 bp, Homo sapien
aaagacagatctgaagattatgcac

SEQ ID NO: 4526123 - DNA, 25 bp, Homo sapien
taggaatctgggctaactcatgtaa

SEQ ID NO: 4526124 - DNA, 25 bp, Homo sapien
aaggtgtcacataggtagactcaag

SEQ ID NO: 4526125 - DNA, 25 bp, Homo sapien
taaaaggtgtcacataggtagactc

SEQ ID NO: 4526126 - DNA, 25 bp, Homo sapien
gtcacataggtagactcaaggaatt

SEQ ID NO: 4526127 - DNA, 25 bp, Homo sapien
attataaaaggtgtcacataggtag

SEQ ID NO: 4526128 - DNA, 25 bp, Homo sapien
agacgtatttattcagatgctgagc

SEQ ID NO: 4526129 - DNA, 25 bp, Homo sapien
cctatcacagtgagcgaagcagtta

SEQ ID NO: 4526130 - DNA, 25 bp, Homo sapien
ccatgaggcgtcattcaggacccaa

SEQ ID NO: 4526131 - DNA, 25 bp, Homo sapien
cccaagttcccagagcatgtacact

SEQ ID NO: 4526132 - DNA, 25 bp, Homo sapien
aatgagtgctctcggtgatggatcc

SEQ ID NO: 4526133 - DNA, 25 bp, Homo sapien
taggaaagcaaatgcaggacactca

SEQ ID NO: 4526134 - DNA, 25 bp, Homo sapien
ggaacattgtcagctagggtccccg

SEQ ID NO: 4526135 - DNA, 25 bp, Homo sapien
gtgatgctcacgcacaacatgtgag

SEQ ID NO: 4526136 - DNA, 25 bp, Homo sapien
gcatggaactccagtgcaagccgga

SEQ ID NO: 4526137 - DNA, 25 bp, Homo sapien
tctagaggacccaagggacaaggca

SEQ ID NO: 4526138 - DNA, 25 bp, Homo sapien
tcaggtggtaatgccggcttgtctc

SEQ ID NO: 4526139 - DNA, 25 bp, Homo sapien
gactggtaaccctgatctgatagct

SEQ ID NO: 4526140 - DNA, 25 bp, Homo sapien
aatctcagcgctgcttttcccggca

SEQ ID NO: 4526141 - DNA, 25 bp, Homo sapien
gtctaggaggaattaacaagttgct

SEQ ID NO: 4526142 - DNA, 25 bp, Homo sapien
gtatccaacagcacaaatctcagcg

SEQ ID NO: 4526143 - DNA, 25 bp, Homo sapien
catgcaacaggtcacaggaatgacg

SEQ ID NO: 4526144 - DNA, 25 bp, Homo sapien
cttctttggatgtctcgtaatactt

SEQ ID NO: 4526145 - DNA, 25 bp, Homo sapien
ttttaaccagctcatcctcttgggc

SEQ ID NO: 4526146 - DNA, 25 bp, Homo sapien
ttcttattttaaccagctcatcctc

SEQ ID NO: 4526147 - DNA, 25 bp, Homo sapien
ggatgtctcgtaatactttcttatt

SEQ ID NO: 4526148 - DNA, 25 bp, Homo sapien
acggagtcatccacattgaaaatgg

SEQ ID NO: 4526149 - DNA, 25 bp, Homo sapien
aaccacggagtcatccacattgaaa

SEQ ID NO: 4526150 - DNA, 25 bp, Homo sapien
cacggagtcatccacattgaaaatg

SEQ ID NO: 4526151 - DNA, 25 bp, Homo sapien
ccacggagtcatccacattgaaaat

SEQ ID NO: 4526152 - DNA, 25 bp, Homo sapien
tgtatgtcagcaggtcagggtcaca

SEQ ID NO: 4526153 - DNA, 25 bp, Homo sapien
aactctttcagacgtggcatgctca

SEQ ID NO: 4526154 - DNA, 25 bp, Homo sapien
caataggaaaatggtagagcagaca

SEQ ID NO: 4526155 - DNA, 25 bp, Homo sapien
tggcacccgccaagaagttgatccc

SEQ ID NO: 4526156 - DNA, 25 bp, Homo sapien
ttactgttaataatgagactcattg

SEQ ID NO: 4526157 - DNA, 25 bp, Homo sapien
actgttaataatgagactcattgta

SEQ ID NO: 4526158 - DNA, 25 bp, Homo sapien
tactgttaataatgagactcattgt

SEQ ID NO: 4526159 - DNA, 25 bp, Homo sapien
gacactcttctaggctagactgaga

SEQ ID NO: 4526160 - DNA, 25 bp, Homo sapien
aaatagaccttgagaaacatgcact

SEQ ID NO: 4526161 - DNA, 25 bp, Homo sapien
cagatgcctggtcaaattcattacg

SEQ ID NO: 4526162 - DNA, 25 bp, Homo sapien
gattgttcctcaggaaagtcctaga

SEQ ID NO: 4526163 - DNA, 25 bp, Homo sapien
gaggaactcactaacatggaatgaa

SEQ ID NO: 4526164 - DNA, 25 bp, Homo sapien
ggtccagcgggcattctcagacctg

SEQ ID NO: 4526165 - DNA, 25 bp, Homo sapien
gctgatctctcaaactgacgttctg

SEQ ID NO: 4526166 - DNA, 25 bp, Homo sapien
cctgggacaagaataagaggaactc

SEQ ID NO: 4526167 - DNA, 25 bp, Homo sapien
tgtaaactagatatcaagattccca

SEQ ID NO: 4526168 - DNA, 25 bp, Homo sapien
cctgttggatatccttcatttctaa

SEQ ID NO: 4526169 - DNA, 25 bp, Homo sapien
caagattcccacagtttgagatcgt

SEQ ID NO: 4526170 - DNA, 25 bp, Homo sapien
gatcgttttccatccaacaatttga

SEQ ID NO: 4526171 - DNA, 25 bp, Homo sapien
ctaaaaccttactcttagtactgct

SEQ ID NO: 4526172 - DNA, 25 bp, Homo sapien
caactcggttgtgttgactattttc

SEQ ID NO: 4526173 - DNA, 25 bp, Homo sapien
ttttctccttaatttagctaatgat

SEQ ID NO: 4526174 - DNA, 25 bp, Homo sapien
aaaccaactcggttgtgttgactat

SEQ ID NO: 4526175 - DNA, 25 bp, Homo sapien
cagcctgtgtccttgagtctaaaat

SEQ ID NO: 4526176 - DNA, 25 bp, Homo sapien
taagtctagtggtcatgaacaccct

SEQ ID NO: 4526177 - DNA, 25 bp, Homo sapien
gcttttgtgttgctatgtcatgccc

SEQ ID NO: 4526178 - DNA, 25 bp, Homo sapien
gattataggcgtcccctgccatgct

SEQ ID NO: 4526179 - DNA, 25 bp, Homo sapien
catatggacatgttggtagtgagag

SEQ ID NO: 4526180 - DNA, 25 bp, Homo sapien
gagcagactgatctgagactgagtc

SEQ ID NO: 4526181 - DNA, 25 bp, Homo sapien
actgagtcaggcttcgctgaaaggg

SEQ ID NO: 4526182 - DNA, 25 bp, Homo sapien
ccttcataattggaggacagtacca

SEQ ID NO: 4526183 - DNA, 25 bp, Homo sapien
gacatctcttatactgtgcttgaaa

SEQ ID NO: 4526184 - DNA, 25 bp, Homo sapien
tactgaacgctgtggactggtgatc

SEQ ID NO: 4526185 - DNA, 25 bp, Homo sapien
gaaatcaaattcaacgaatcacacc

SEQ ID NO: 4526186 - DNA, 25 bp, Homo sapien
ctggtgatcatagtgataatctggg

SEQ ID NO: 4526187 - DNA, 25 bp, Homo sapien
catccgacgtggtgcaaaacagctc

SEQ ID NO: 4526188 - DNA, 25 bp, Homo sapien
ggctggctgtgtagtgccatattat

SEQ ID NO: 4526189 - DNA, 25 bp, Homo sapien
tcttgctgctaatggccagtatggc

SEQ ID NO: 4526190 - DNA, 25 bp, Homo sapien
ctgggaagaagcctctgtcaactgg

SEQ ID NO: 4526191 - DNA, 25 bp, Homo sapien
gagaacctattcactgccaccaata

SEQ ID NO: 4526192 - DNA, 25 bp, Homo sapien
atagagaaagaattccctattcaat

SEQ ID NO: 4526193 - DNA, 25 bp, Homo sapien
aatagagaaagaattccctattcaa

SEQ ID NO: 4526194 - DNA, 25 bp, Homo sapien
tcccttgcagtgagaagctaaaggc

SEQ ID NO: 4526195 - DNA, 25 bp, Homo sapien
caggctctcccactcacatgtaagg

SEQ ID NO: 4526196 - DNA, 25 bp, Homo sapien
tgtactggggaactcccaggctctc

SEQ ID NO: 4526197 - DNA, 25 bp, Homo sapien
actgtactggggaactcccaggctc

SEQ ID NO: 4526198 - DNA, 25 bp, Homo sapien
tgtaaggtccgtgtttacagccatg

SEQ ID NO: 4526199 - DNA, 25 bp, Homo sapien
ggtccagccagactatcctaggaag

SEQ ID NO: 4526200 - DNA, 25 bp, Homo sapien
aaaattggaagtgtggccatagcac

SEQ ID NO: 4526201 - DNA, 25 bp, Homo sapien
ccatgcaaattagcctcagctggag

SEQ ID NO: 4526202 - DNA, 25 bp, Homo sapien
cttgcaaccgaagtatacatatatg

SEQ ID NO: 4526203 - DNA, 25 bp, Homo sapien
tcttgttacatcttcacatacttct

SEQ ID NO: 4526204 - DNA, 25 bp, Homo sapien
cctggacttgcaaccgaagtataca

SEQ ID NO: 4526205 - DNA, 25 bp, Homo sapien
caaccgaagtatacatatatgatct

SEQ ID NO: 4526206 - DNA, 25 bp, Homo sapien
gaccaagggatccatcttgatgttg

SEQ ID NO: 4526207 - DNA, 25 bp, Homo sapien
accaagggatccatcttgatgttgg

SEQ ID NO: 4526208 - DNA, 25 bp, Homo sapien
gagaccaagggatccatcttgatgt

SEQ ID NO: 4526209 - DNA, 25 bp, Homo sapien
agaccaagggatccatcttgatgtt

SEQ ID NO: 4526210 - DNA, 25 bp, Homo sapien
gctggggtgcaatgcggcaatctca

SEQ ID NO: 4526211 - DNA, 25 bp, Homo sapien
agctcactgcaacctctgcctcctg

SEQ ID NO: 4526212 - DNA, 25 bp, Homo sapien
tttcccgaaattggccaggctggtg

SEQ ID NO: 4526213 - DNA, 25 bp, Homo sapien
ctgcctcctgggttaaagcgattct

SEQ ID NO: 4526214 - DNA, 25 bp, Homo sapien
ataatatataattacagctttgcca

SEQ ID NO: 4526215 - DNA, 25 bp, Homo sapien
cagctttgccataatcactcagtac

SEQ ID NO: 4526216 - DNA, 25 bp, Homo sapien
tatataattacagctttgccataat

SEQ ID NO: 4526217 - DNA, 25 bp, Homo sapien
catttccctgtataatatataatta

SEQ ID NO: 4526218 - DNA, 25 bp, Homo sapien
aaattcactggggtcccgaatgtca

SEQ ID NO: 4526219 - DNA, 25 bp, Homo sapien
tcttctgttgagttgtgtctttgga

SEQ ID NO: 4526220 - DNA, 25 bp, Homo sapien
cccataaggttggtgtagcattttg

SEQ ID NO: 4526221 - DNA, 25 bp, Homo sapien
tggggtcccgaatgtcaggttcttc

SEQ ID NO: 4526222 - DNA, 25 bp, Homo sapien
tggaagaagagccaagtccaaagaa

SEQ ID NO: 4526223 - DNA, 25 bp, Homo sapien
ctggttttcgaggacattgactgga

SEQ ID NO: 4526224 - DNA, 25 bp, Homo sapien
tgtatcctagtccaatataaaggct

SEQ ID NO: 4526225 - DNA, 25 bp, Homo sapien
tcatgggacaactgggctcgatggc

SEQ ID NO: 4526226 - DNA, 25 bp, Homo sapien
gggggtggtggagcaggaggaggcc

SEQ ID NO: 4526227 - DNA, 25 bp, Homo sapien
tgggggtggtggagcaggaggaggc

SEQ ID NO: 4526228 - DNA, 25 bp, Homo sapien
ctgggggtggtggagcaggaggagg

SEQ ID NO: 4526229 - DNA, 25 bp, Homo sapien
tggaggtccagcacttgaaggtgga

SEQ ID NO: 4526230 - DNA, 25 bp, Homo sapien
gaggtccagcacttgaaggtggagg

SEQ ID NO: 4526231 - DNA, 25 bp, Homo sapien
aggcggaggtggtagcggtggccca

SEQ ID NO: 4526232 - DNA, 25 bp, Homo sapien
gcggaggtggtagcggtggcccagc

SEQ ID NO: 4526233 - DNA, 25 bp, Homo sapien
tggagtgctgcatggatgtctttgt

SEQ ID NO: 4526234 - DNA, 25 bp, Homo sapien
gatttgatgccatgccctccattgg

SEQ ID NO: 4526235 - DNA, 25 bp, Homo sapien
aggtgcgggagacaaagatccaagt

SEQ ID NO: 4526236 - DNA, 25 bp, Homo sapien
ggcggaggcaatgccttctgctgat

SEQ ID NO: 4526237 - DNA, 25 bp, Homo sapien
tcgccatctgtgttctagctcgtgt

SEQ ID NO: 4526238 - DNA, 25 bp, Homo sapien
tgttatcattgcatgctcgccccgg

SEQ ID NO: 4526239 - DNA, 25 bp, Homo sapien
tcatcggtggaaatgcacacatctt

SEQ ID NO: 4526240 - DNA, 25 bp, Homo sapien
ctttggagggcagtcatcatcggtg

SEQ ID NO: 4526241 - DNA, 25 bp, Homo sapien
ggctatagtcaggagaactgaaagg

SEQ ID NO: 4526242 - DNA, 25 bp, Homo sapien
aaggcgaagtttttcgaaggctcat

SEQ ID NO: 4526243 - DNA, 25 bp, Homo sapien
gcaatagtctgttataatatatgtc

SEQ ID NO: 4526244 - DNA, 25 bp, Homo sapien
aatagtctgttataatatatgtcca

SEQ ID NO: 4526245 - DNA, 25 bp, Homo sapien
ctgcaatagtctgttataatatatg

SEQ ID NO: 4526246 - DNA, 25 bp, Homo sapien
caatagtctgttataatatatgtcc

SEQ ID NO: 4526247 - DNA, 25 bp, Homo sapien
tatgagttgagtgatggtttttctg

SEQ ID NO: 4526248 - DNA, 25 bp, Homo sapien
attatgagttgagtgatggtttttc

SEQ ID NO: 4526249 - DNA, 25 bp, Homo sapien
ttatgagttgagtgatggtttttct

SEQ ID NO: 4526250 - DNA, 25 bp, Homo sapien
cattatgagttgagtgatggttttt

SEQ ID NO: 4526251 - DNA, 25 bp, Homo sapien
caagcaaagggagaagccccttaca

SEQ ID NO: 4526252 - DNA, 25 bp, Homo sapien
aagaatgagagtcaagcaaagggag

SEQ ID NO: 4526253 - DNA, 25 bp, Homo sapien
ggagaagaatgagagtcaagcaaag

SEQ ID NO: 4526254 - DNA, 25 bp, Homo sapien
agagtcaagcaaagggagaagcccc

SEQ ID NO: 4526255 - DNA, 25 bp, Homo sapien
ggatcattttgcagtgggagttacc

SEQ ID NO: 4526256 - DNA, 25 bp, Homo sapien
cagtttggcattgatccctggatca

SEQ ID NO: 4526257 - DNA, 25 bp, Homo sapien
tctacaagtcttaatggaggccagc

SEQ ID NO: 4526258 - DNA, 25 bp, Homo sapien
tgccagaggccatcgctcagtgaag

SEQ ID NO: 4526259 - DNA, 25 bp, Homo sapien
tattgatgccaaaccagttgtctca

SEQ ID NO: 4526260 - DNA, 25 bp, Homo sapien
cactcaacgaatgctggctgcagag

SEQ ID NO: 4526261 - DNA, 25 bp, Homo sapien
gatagctgccaatggaaatcacatg

SEQ ID NO: 4526262 - DNA, 25 bp, Homo sapien
cttactgcccatggaactacagggt

SEQ ID NO: 4526263 - DNA, 25 bp, Homo sapien
gccacaggcactacaagcaaatgcc

SEQ ID NO: 4526264 - DNA, 25 bp, Homo sapien
cagtgcctgattcagtatccagtta

SEQ ID NO: 4526265 - DNA, 25 bp, Homo sapien
tacagggaaagtcaactagatggca

SEQ ID NO: 4526266 - DNA, 25 bp, Homo sapien
gcagccatcagtaaacaagtctcag

SEQ ID NO: 4526267 - DNA, 25 bp, Homo sapien
tcaggtcaacaatttcccagcactc

SEQ ID NO: 4526268 - DNA, 25 bp, Homo sapien
aggatcaggtcaacaatttcccagc

SEQ ID NO: 4526269 - DNA, 25 bp, Homo sapien
ggatcaggtcaacaatttcccagca

SEQ ID NO: 4526270 - DNA, 25 bp, Homo sapien
gatcaggtcaacaatttcccagcac

SEQ ID NO: 4526271 - DNA, 25 bp, Homo sapien
tgaacacccgaacaagaggaagctg

SEQ ID NO: 4526272 - DNA, 25 bp, Homo sapien
tactggcagctgcaagatgcgatgc

SEQ ID NO: 4526273 - DNA, 25 bp, Homo sapien
gatgcgatgctgtctagtttaacac

SEQ ID NO: 4526274 - DNA, 25 bp, Homo sapien
cattccctgtatagacacagtgcct

SEQ ID NO: 4526275 - DNA, 25 bp, Homo sapien
cagttctatagaacccgttcagtag

SEQ ID NO: 4526276 - DNA, 25 bp, Homo sapien
atagaacccgttcagtagcatcaaa

SEQ ID NO: 4526277 - DNA, 25 bp, Homo sapien
agtatcagttctatagaacccgttc

SEQ ID NO: 4526278 - DNA, 25 bp, Homo sapien
tctatagaacccgttcagtagcatc

SEQ ID NO: 4526279 - DNA, 25 bp, Homo sapien
tcttcaagtgtaaaatagcagcttg

SEQ ID NO: 4526280 - DNA, 25 bp, Homo sapien
tgctccctcttcaagtgtaaaatag

SEQ ID NO: 4526281 - DNA, 25 bp, Homo sapien
tctttgtgctccctcttcaagtgta

SEQ ID NO: 4526282 - DNA, 25 bp, Homo sapien
ctccctcttcaagtgtaaaatagca

SEQ ID NO: 4526283 - DNA, 25 bp, Homo sapien
tgttccagataaacactaggtcagg

SEQ ID NO: 4526284 - DNA, 25 bp, Homo sapien
caaacgctgaattacgaaaagacac

SEQ ID NO: 4526285 - DNA, 25 bp, Homo sapien
cagacatcttaagagcagacagggc

SEQ ID NO: 4526286 - DNA, 25 bp, Homo sapien
tggaaattaagtccccacagaggac

SEQ ID NO: 4526287 - DNA, 25 bp, Homo sapien
taaaggcgcacataagtaaaatcag

SEQ ID NO: 4526288 - DNA, 25 bp, Homo sapien
gctaatactaactgctggtgagaat

SEQ ID NO: 4526289 - DNA, 25 bp, Homo sapien
gggagcattaactgcaacaatcact

SEQ ID NO: 4526290 - DNA, 25 bp, Homo sapien
ccacacattgttgatgggagcatta

SEQ ID NO: 4526291 - DNA, 25 bp, Homo sapien
tagtgagaactgtatgcaatgggcc

SEQ ID NO: 4526292 - DNA, 25 bp, Homo sapien
gaaacagagccaactagaatcacgg

SEQ ID NO: 4526293 - DNA, 25 bp, Homo sapien
ggactacatttgcacacaggtggaa

SEQ ID NO: 4526294 - DNA, 25 bp, Homo sapien
tctggcaactctaggaactcttaag

SEQ ID NO: 4526295 - DNA, 25 bp, Homo sapien
ggcaactcctggagccgcgttcaca

SEQ ID NO: 4526296 - DNA, 25 bp, Homo sapien
ccacagctgaataagcagccagatg

SEQ ID NO: 4526297 - DNA, 25 bp, Homo sapien
tggagccgcgttcacagctgtccca

SEQ ID NO: 4526298 - DNA, 25 bp, Homo sapien
agctgaataagcagccagatgcatc

SEQ ID NO: 4526299 - DNA, 25 bp, Homo sapien
acactggacggttttccaggtacat

SEQ ID NO: 4526300 - DNA, 25 bp, Homo sapien
tgctaggacctcagacaaacacact

SEQ ID NO: 4526301 - DNA, 25 bp, Homo sapien
gacaaacacactggacggttttcca

SEQ ID NO: 4526302 - DNA, 25 bp, Homo sapien
gtttgagatgatctgctaggacctc

SEQ ID NO: 4526303 - DNA, 25 bp, Homo sapien
tgtagctaattgaatctaagaacac

SEQ ID NO: 4526304 - DNA, 25 bp, Homo sapien
aataagttgttaaaatgtcctgtca

SEQ ID NO: 4526305 - DNA, 25 bp, Homo sapien
tctaagaacactgatttgccgccct

SEQ ID NO: 4526306 - DNA, 25 bp, Homo sapien
gatttgccgccctgcatcttctgtg

SEQ ID NO: 4526307 - DNA, 25 bp, Homo sapien
tcaggtagcccttcataatacaaca

SEQ ID NO: 4526308 - DNA, 25 bp, Homo sapien
aatacaacataggagatggaggcga

SEQ ID NO: 4526309 - DNA, 25 bp, Homo sapien
tggaggcgaaacgaagcccagcttt

SEQ ID NO: 4526310 - DNA, 25 bp, Homo sapien
gttgagtgttcggaacaggttctcc

SEQ ID NO: 4526311 - DNA, 25 bp, Homo sapien
tgtgcccttgtactaaactcccgtg

SEQ ID NO: 4526312 - DNA, 25 bp, Homo sapien
gaagagattcattcccgggtcccta

SEQ ID NO: 4526313 - DNA, 25 bp, Homo sapien
aagagatcaggttgtgtgccctcag

SEQ ID NO: 4526314 - DNA, 25 bp, Homo sapien
aattgtatgaggaccaaccaccggc

SEQ ID NO: 4526315 - DNA, 25 bp, Homo sapien
tggccagacagcttgaagtctgcca

SEQ ID NO: 4526316 - DNA, 25 bp, Homo sapien
ggtggccagacagcttgaagtctgc

SEQ ID NO: 4526317 - DNA, 25 bp, Homo sapien
gtggccagacagcttgaagtctgcc

SEQ ID NO: 4526318 - DNA, 25 bp, Homo sapien
ggggtggccagacagcttgaagtct

SEQ ID NO: 4526319 - DNA, 25 bp, Homo sapien
ggaatgtagtcagagccgattaatt

SEQ ID NO: 4526320 - DNA, 25 bp, Homo sapien
gaatgtagtcagagccgattaattc

SEQ ID NO: 4526321 - DNA, 25 bp, Homo sapien
aaatgcaaaacccaattctacatac

SEQ ID NO: 4526322 - DNA, 25 bp, Homo sapien
taaaatgcaaaacccaattctacat

SEQ ID NO: 4526323 - DNA, 25 bp, Homo sapien
tgttaaaatgcaaaacccaattcta

SEQ ID NO: 4526324 - DNA, 25 bp, Homo sapien
tatgttaaaatgcaaaacccaattc

SEQ ID NO: 4526325 - DNA, 25 bp, Homo sapien
tcatcttgcgcttgagagcttccag

SEQ ID NO: 4526326 - DNA, 25 bp, Homo sapien
tagaattggaccgttcaaacacagc

SEQ ID NO: 4526327 - DNA, 25 bp, Homo sapien
gcacaggctgcgtcaatttgagcaa

SEQ ID NO: 4526328 - DNA, 25 bp, Homo sapien
tctggcgactttggcttgacctcac

SEQ ID NO: 4526329 - DNA, 25 bp, Homo sapien
catcatttccgaggtcaggtgaaac

SEQ ID NO: 4526330 - DNA, 25 bp, Homo sapien
ttactgcaggtaggtcttgggaccc

SEQ ID NO: 4526331 - DNA, 25 bp, Homo sapien
tcttgagcaaggagagatgtccctg

SEQ ID NO: 4526332 - DNA, 25 bp, Homo sapien
tctgtctgaagaccaccgttgccag

SEQ ID NO: 4526333 - DNA, 25 bp, Homo sapien
taaacccaaatagggatttcataga

SEQ ID NO: 4526334 - DNA, 25 bp, Homo sapien
tagagaacttactcaggatcgactg

SEQ ID NO: 4526335 - DNA, 25 bp, Homo sapien
tcaagtccggcttctggttttgctg

SEQ ID NO: 4526336 - DNA, 25 bp, Homo sapien
gatcgactgagccacttcaagtccg

SEQ ID NO: 4526337 - DNA, 25 bp, Homo sapien
cacacttggtctctttcgggtcaca

SEQ ID NO: 4526338 - DNA, 25 bp, Homo sapien
tccagggcaactgtgaaaaatctgt

SEQ ID NO: 4526339 - DNA, 25 bp, Homo sapien
agtgccctccttccggtttgtgcga

SEQ ID NO: 4526340 - DNA, 25 bp, Homo sapien
tttgtgcgatgatgtgttccagggc

SEQ ID NO: 4526341 - DNA, 25 bp, Homo sapien
taaagcccgtgagggataacccaca

SEQ ID NO: 4526342 - DNA, 25 bp, Homo sapien
ggaatgcagattttagctcctaaag

SEQ ID NO: 4526343 - DNA, 25 bp, Homo sapien
cagatgactgctgttttagctctgc

SEQ ID NO: 4526344 - DNA, 25 bp, Homo sapien
taacccacacgactggtttcagatg

SEQ ID NO: 4526345 - DNA, 25 bp, Homo sapien
catctaagatttgagggttgaccat

SEQ ID NO: 4526346 - DNA, 25 bp, Homo sapien
caccatggcatggagcagaattata

SEQ ID NO: 4526347 - DNA, 25 bp, Homo sapien
catagctgagagaaggtaacttgcc

SEQ ID NO: 4526348 - DNA, 25 bp, Homo sapien
ttaaaggtaagcaaccatagctgag

SEQ ID NO: 4526349 - DNA, 25 bp, Homo sapien
actgggatgtgaagtatactttatc

SEQ ID NO: 4526350 - DNA, 25 bp, Homo sapien
tgggatgtgaagtatactttatcct

SEQ ID NO: 4526351 - DNA, 25 bp, Homo sapien
ttaactgggatgtgaagtatacttt

SEQ ID NO: 4526352 - DNA, 25 bp, Homo sapien
taactgggatgtgaagtatacttta

SEQ ID NO: 4526353 - DNA, 25 bp, Homo sapien
tgaaggtggagccaattgtacccca

SEQ ID NO: 4526354 - DNA, 25 bp, Homo sapien
tacctagtgagataagaacaattgc

SEQ ID NO: 4526355 - DNA, 25 bp, Homo sapien
tgtcctctcagctgtacacagattg

SEQ ID NO: 4526356 - DNA, 25 bp, Homo sapien
gcaaaaagaacatcagtctaggctg

SEQ ID NO: 4526357 - DNA, 25 bp, Homo sapien
ggaaaaaggcatcccatctcctgtt

SEQ ID NO: 4526358 - DNA, 25 bp, Homo sapien
tcctgttcacccacatcacatcacc

SEQ ID NO: 4526359 - DNA, 25 bp, Homo sapien
ctgctgctatgctgtgggatcttac

SEQ ID NO: 4526360 - DNA, 25 bp, Homo sapien
acatcaccctgctgctatgctgtgg

SEQ ID NO: 4526361 - DNA, 25 bp, Homo sapien
ttgaaatggagacaacaccttgctt

SEQ ID NO: 4526362 - DNA, 25 bp, Homo sapien
aatggagacaacaccttgcttctac

SEQ ID NO: 4526363 - DNA, 25 bp, Homo sapien
gaaatggagacaacaccttgcttct

SEQ ID NO: 4526364 - DNA, 25 bp, Homo sapien
ctttgaaatggagacaacaccttgc

SEQ ID NO: 4526365 - DNA, 25 bp, Homo sapien
tgtgcatagttaagaacaggacctc

SEQ ID NO: 4526366 - DNA, 25 bp, Homo sapien
ttgtgatgaccaaggaacacgggca

SEQ ID NO: 4526367 - DNA, 25 bp, Homo sapien
atttataagactggttccactgggc

SEQ ID NO: 4526368 - DNA, 25 bp, Homo sapien
tccactgggcagtatcaaagcttct

SEQ ID NO: 4526369 - DNA, 25 bp, Homo sapien
gctgtagccttaacaccagtgtcca

SEQ ID NO: 4526370 - DNA, 25 bp, Homo sapien
gagtcttcctagtgcttgtcctaca

SEQ ID NO: 4526371 - DNA, 25 bp, Homo sapien
gtaactaaaagatgaatgcccagct

SEQ ID NO: 4526372 - DNA, 25 bp, Homo sapien
taacatcctgattgtgacgctgcaa

SEQ ID NO: 4526373 - DNA, 25 bp, Homo sapien
taatatctggaatgttgaatgctgt

SEQ ID NO: 4526374 - DNA, 25 bp, Homo sapien
aatatctggaatgttgaatgctgtt

SEQ ID NO: 4526375 - DNA, 25 bp, Homo sapien
gtaatatctggaatgttgaatgctg

SEQ ID NO: 4526376 - DNA, 25 bp, Homo sapien
cacaatcaccaagatttctacttac

SEQ ID NO: 4526377 - DNA, 25 bp, Homo sapien
gcacaatcaccaagatttctactta

SEQ ID NO: 4526378 - DNA, 25 bp, Homo sapien
gagatccaagtacaattcgctcctg

SEQ ID NO: 4526379 - DNA, 25 bp, Homo sapien
ccaagtacaattcgctcctgtttga

SEQ ID NO: 4526380 - DNA, 25 bp, Homo sapien
acaattcgctcctgtttgacttctc

SEQ ID NO: 4526381 - DNA, 25 bp, Homo sapien
atggagatccaagtacaattcgctc

SEQ ID NO: 4526382 - DNA, 25 bp, Homo sapien
cctccatctctgttgggaaggtctt

SEQ ID NO: 4526383 - DNA, 25 bp, Homo sapien
gcgcctccatctctgttgggaaggt

SEQ ID NO: 4526384 - DNA, 25 bp, Homo sapien
gcctccatctctgttgggaaggtct

SEQ ID NO: 4526385 - DNA, 25 bp, Homo sapien
tccatctctgttgggaaggtcttta

SEQ ID NO: 4526386 - DNA, 25 bp, Homo sapien
aaagcattttgatgactaacagtct

SEQ ID NO: 4526387 - DNA, 25 bp, Homo sapien
aaaatgcaatattaaatcccaatta

SEQ ID NO: 4526388 - DNA, 25 bp, Homo sapien
aactattttgctattcctttagcca

SEQ ID NO: 4526389 - DNA, 25 bp, Homo sapien
gaacaacttgtcagtatttttagtc

SEQ ID NO: 4526390 - DNA, 25 bp, Homo sapien
tgaagaagttgggactctcacaaga

SEQ ID NO: 4526391 - DNA, 25 bp, Homo sapien
acacaaatgttcgtagcattacgca

SEQ ID NO: 4526392 - DNA, 25 bp, Homo sapien
tgtgctatatccatatgaaggagta

SEQ ID NO: 4526393 - DNA, 25 bp, Homo sapien
ggtgggagcctaaaatggtacagca

SEQ ID NO: 4526394 - DNA, 25 bp, Homo sapien
tgaacactgtgcattggattcctgg

SEQ ID NO: 4526395 - DNA, 25 bp, Homo sapien
actgtgcattggattcctggtgctc

SEQ ID NO: 4526396 - DNA, 25 bp, Homo sapien
cccacgttgaacactgtgcattgga

SEQ ID NO: 4526397 - DNA, 25 bp, Homo sapien
agacaggggccccacgttgaacact

SEQ ID NO: 4526398 - DNA, 25 bp, Homo sapien
gccacgtcagttctttcatctgtga

SEQ ID NO: 4526399 - DNA, 25 bp, Homo sapien
ggccacgtcagttctttcatctgtg

SEQ ID NO: 4526400 - DNA, 25 bp, Homo sapien
ccacgtcagttctttcatctgtgac

SEQ ID NO: 4526401 - DNA, 25 bp, Homo sapien
acgtcagttctttcatctgtgactc

SEQ ID NO: 4526402 - DNA, 25 bp, Homo sapien
cctctgagcctgttctgccgtcaag

SEQ ID NO: 4526403 - DNA, 25 bp, Homo sapien
ttcagaattgtcagcccggtttccc

SEQ ID NO: 4526404 - DNA, 25 bp, Homo sapien
cactactgctagtgcctgcccttta

SEQ ID NO: 4526405 - DNA, 25 bp, Homo sapien
ggtcctataggacactactgctagt

SEQ ID NO: 4526406 - DNA, 25 bp, Homo sapien
tgtggccagtggattccggaagcct

SEQ ID NO: 4526407 - DNA, 25 bp, Homo sapien
ggctgcctgaacatttagacctaaa

SEQ ID NO: 4526408 - DNA, 25 bp, Homo sapien
gagtctctcctcgtctcatgacaaa

SEQ ID NO: 4526409 - DNA, 25 bp, Homo sapien
tgtttgtgtacccaagaacaccacg

SEQ ID NO: 4526410 - DNA, 25 bp, Homo sapien
tatagtttaacatccagtccatttg

SEQ ID NO: 4526411 - DNA, 25 bp, Homo sapien
catttggtacccttggaacagttga

SEQ ID NO: 4526412 - DNA, 25 bp, Homo sapien
tctcaggggcatactaagaagtcca

SEQ ID NO: 4526413 - DNA, 25 bp, Homo sapien
ttggaacagttgatgattgtccaaa

SEQ ID NO: 4526414 - DNA, 25 bp, Homo sapien
ccatatcttgggctacagtggtagc

SEQ ID NO: 4526415 - DNA, 25 bp, Homo sapien
aaatggactgtccatatcttgggct

SEQ ID NO: 4526416 - DNA, 25 bp, Homo sapien
tggactgtccatatcttgggctaca

SEQ ID NO: 4526417 - DNA, 25 bp, Homo sapien
cttgggctacagtggtagcaggcac

SEQ ID NO: 4526418 - DNA, 25 bp, Homo sapien
aatgccagtgtcaatattgtttaca

SEQ ID NO: 4526419 - DNA, 25 bp, Homo sapien
gctccctcagaccacatggcggatt

SEQ ID NO: 4526420 - DNA, 25 bp, Homo sapien
tcagggtcacattcaatgccagtgt

SEQ ID NO: 4526421 - DNA, 25 bp, Homo sapien
tattgtttacaatgttctggactgt

SEQ ID NO: 4526422 - DNA, 25 bp, Homo sapien
ttcaagatgtctccacaataatcca

SEQ ID NO: 4526423 - DNA, 25 bp, Homo sapien
acttgaactcttccatcactgtctc

SEQ ID NO: 4526424 - DNA, 25 bp, Homo sapien
cctgcctggacctgtacctctttga

SEQ ID NO: 4526425 - DNA, 25 bp, Homo sapien
gtctctagctcctcccatgcacatg

SEQ ID NO: 4526426 - DNA, 25 bp, Homo sapien
gttcttcatgaagtaatgatgagta

SEQ ID NO: 4526427 - DNA, 25 bp, Homo sapien
ctcaaaatctccttgtatttcaaga

SEQ ID NO: 4526428 - DNA, 25 bp, Homo sapien
taggttcgtctaatctcttctggtg

SEQ ID NO: 4526429 - DNA, 25 bp, Homo sapien
caaaatctccttgtatttcaagacc

SEQ ID NO: 4526430 - DNA, 25 bp, Homo sapien
ctcacttgcttagcgtgaaacccag

SEQ ID NO: 4526431 - DNA, 25 bp, Homo sapien
ctcactcacttgcttagcgtgaaac

SEQ ID NO: 4526432 - DNA, 25 bp, Homo sapien
tcagcgtttgaagtcctcactcact

SEQ ID NO: 4526433 - DNA, 25 bp, Homo sapien
gcgtttgaagtcctcactcacttgc

SEQ ID NO: 4526434 - DNA, 25 bp, Homo sapien
caggacccctcaaatccgtctgtat

SEQ ID NO: 4526435 - DNA, 25 bp, Homo sapien
tattatccaacatcgttccaggacc

SEQ ID NO: 4526436 - DNA, 25 bp, Homo sapien
gaaatgtttgtccaagacattctgg

SEQ ID NO: 4526437 - DNA, 25 bp, Homo sapien
cattctggcccagaagtgttctctc

SEQ ID NO: 4526438 - DNA, 25 bp, Homo sapien
caccaaccgaggttggcctgctctg

SEQ ID NO: 4526439 - DNA, 25 bp, Homo sapien
ggtctccgtgacctttgcagaggat

SEQ ID NO: 4526440 - DNA, 25 bp, Homo sapien
tctttctacaaggagagtcattaag

SEQ ID NO: 4526441 - DNA, 25 bp, Homo sapien
cacccagagaagacacggctctttc

SEQ ID NO: 4526442 - DNA, 25 bp, Homo sapien
tgaggagtcaggacctactttgtgg

SEQ ID NO: 4526443 - DNA, 25 bp, Homo sapien
aacaaggacttgtggccaccaaggg

SEQ ID NO: 4526444 - DNA, 25 bp, Homo sapien
gaattattaaacaccttgccaagag

SEQ ID NO: 4526445 - DNA, 25 bp, Homo sapien
ctttgggtacaaactcagcgtgggc

SEQ ID NO: 4526446 - DNA, 25 bp, Homo sapien
ggcaatcgtctccttacccttagaa

SEQ ID NO: 4526447 - DNA, 25 bp, Homo sapien
gccccattcgggagcagatttcctt

SEQ ID NO: 4526448 - DNA, 25 bp, Homo sapien
aaagctcccaaagccaaggtctgtg

SEQ ID NO: 4526449 - DNA, 25 bp, Homo sapien
tctgcttgcaagtccgcttagccgg

SEQ ID NO: 4526450 - DNA, 25 bp, Homo sapien
aatatgtcgcctggatgttcgtccg

SEQ ID NO: 4526451 - DNA, 25 bp, Homo sapien
tagaatgtctttcgtgggagtctgc

SEQ ID NO: 4526452 - DNA, 25 bp, Homo sapien
caattggagggtacaatgagtgcct

SEQ ID NO: 4526453 - DNA, 25 bp, Homo sapien
cagagttccgtaatgggcttatgca

SEQ ID NO: 4526454 - DNA, 25 bp, Homo sapien
tacctaattattcatgccttggaga

SEQ ID NO: 4526455 - DNA, 25 bp, Homo sapien
tatgcctacctaattattcatgcct

SEQ ID NO: 4526456 - DNA, 25 bp, Homo sapien
ttggagatgccggtttgtggtcagg

SEQ ID NO: 4526457 - DNA, 25 bp, Homo sapien
gagatgccggtttgtggtcaggctt

SEQ ID NO: 4526458 - DNA, 25 bp, Homo sapien
tagtccaccttcttacctagatcag

SEQ ID NO: 4526459 - DNA, 25 bp, Homo sapien
ccagatgcggagatgtgaaaaacgt

SEQ ID NO: 4526460 - DNA, 25 bp, Homo sapien
cttcttacctagatcagccttcgct

SEQ ID NO: 4526461 - DNA, 25 bp, Homo sapien
tgtgaaaaacgtgatgccaccaggc

SEQ ID NO: 4526462 - DNA, 25 bp, Homo sapien
ccagtcagcattctggcggtccctg

SEQ ID NO: 4526463 - DNA, 25 bp, Homo sapien
agtcagcattctggcggtccctgct

SEQ ID NO: 4526464 - DNA, 25 bp, Homo sapien
ccttgtctatcctcccagtcagcat

SEQ ID NO: 4526465 - DNA, 25 bp, Homo sapien
tgtctatcctcccagtcagcattct

SEQ ID NO: 4526466 - DNA, 25 bp, Homo sapien
tcacatcaagttccagtctgtcccc

SEQ ID NO: 4526467 - DNA, 25 bp, Homo sapien
ttcctctgggaacagctccaccaat

SEQ ID NO: 4526468 - DNA, 25 bp, Homo sapien
acatcaagttccagtctgtccccat

SEQ ID NO: 4526469 - DNA, 25 bp, Homo sapien
gggaacagctccaccaattttatgt

SEQ ID NO: 4526470 - DNA, 25 bp, Homo sapien
tgagagtcaacgacaggagttctgt

SEQ ID NO: 4526471 - DNA, 25 bp, Homo sapien
gccaagctgggaatgagactgcact

SEQ ID NO: 4526472 - DNA, 25 bp, Homo sapien
gaatgagactgcactggcgggtcaa

SEQ ID NO: 4526473 - DNA, 25 bp, Homo sapien
caccaacgtacttgggagcagcttg

SEQ ID NO: 4526474 - DNA, 25 bp, Homo sapien
gcaacagccgtggcggctgcagcct

SEQ ID NO: 4526475 - DNA, 25 bp, Homo sapien
aacagccgtggcggctgcagcctcg

SEQ ID NO: 4526476 - DNA, 25 bp, Homo sapien
agccgtggcggctgcagcctcgaag

SEQ ID NO: 4526477 - DNA, 25 bp, Homo sapien
cagccgtggcggctgcagcctcgaa

SEQ ID NO: 4526478 - DNA, 25 bp, Homo sapien
attgaaggcggtggtcgctaagcta

SEQ ID NO: 4526479 - DNA, 25 bp, Homo sapien
cgacaaccagtctctcgctacgtgt

SEQ ID NO: 4526480 - DNA, 25 bp, Homo sapien
gtttccgagcgcctctcaaggcgca

SEQ ID NO: 4526481 - DNA, 25 bp, Homo sapien
ctaagacggacagccagggcgacaa

SEQ ID NO: 4526482 - DNA, 25 bp, Homo sapien
tactgacttcttgaaaccgcagcct

SEQ ID NO: 4526483 - DNA, 25 bp, Homo sapien
tcaactttgctcatagaagggagct

SEQ ID NO: 4526484 - DNA, 25 bp, Homo sapien
tatagggatccagttttcacactac

SEQ ID NO: 4526485 - DNA, 25 bp, Homo sapien
cacctctgacatgtgttaggagcaa

SEQ ID NO: 4526486 - DNA, 25 bp, Homo sapien
tggggcttaaggtactatttacaca

SEQ ID NO: 4526487 - DNA, 25 bp, Homo sapien
agtgtttgatgctgctacattgtca

SEQ ID NO: 4526488 - DNA, 25 bp, Homo sapien
tacattgtcactcaacatgggttca

SEQ ID NO: 4526489 - DNA, 25 bp, Homo sapien
agatccagggatctcagatacagaa

SEQ ID NO: 4526490 - DNA, 25 bp, Homo sapien
aatggcatcaaaatggcgatctctg

SEQ ID NO: 4526491 - DNA, 25 bp, Homo sapien
tccacgggtcatttgctgagtcaca

SEQ ID NO: 4526492 - DNA, 25 bp, Homo sapien
cactagctggcaagacgggcttggt

SEQ ID NO: 4526493 - DNA, 25 bp, Homo sapien
cgggcttggtgtgccgctttgtcca

SEQ ID NO: 4526494 - DNA, 25 bp, Homo sapien
ttgtcactagctggcaagacgggct

SEQ ID NO: 4526495 - DNA, 25 bp, Homo sapien
ttggccttgaggattcaataccacc

SEQ ID NO: 4526496 - DNA, 25 bp, Homo sapien
ttgaggattcaataccaccaagaat

SEQ ID NO: 4526497 - DNA, 25 bp, Homo sapien
tcttggccttgaggattcaatacca

SEQ ID NO: 4526498 - DNA, 25 bp, Homo sapien
ggccttgaggattcaataccaccaa

SEQ ID NO: 4526499 - DNA, 25 bp, Homo sapien
atcatttgcaaacatagtttctttg

SEQ ID NO: 4526500 - DNA, 25 bp, Homo sapien
tcatttgcaaacatagtttctttga

SEQ ID NO: 4526501 - DNA, 25 bp, Homo sapien
tccgcagtcgtgtcaatacctaatc

SEQ ID NO: 4526502 - DNA, 25 bp, Homo sapien
cgcagtcgtgtcaatacctaatcca

SEQ ID NO: 4526503 - DNA, 25 bp, Homo sapien
tcttccgcagtcgtgtcaataccta

SEQ ID NO: 4526504 - DNA, 25 bp, Homo sapien
tctcttcttccgcagtcgtgtcaat

SEQ ID NO: 4526505 - DNA, 25 bp, Homo sapien
gacagccaactcagacaaggctgct

SEQ ID NO: 4526506 - DNA, 25 bp, Homo sapien
cccgacagccaactcagacaaggct

SEQ ID NO: 4526507 - DNA, 25 bp, Homo sapien
atgcctaccccgacagccaactcag

SEQ ID NO: 4526508 - DNA, 25 bp, Homo sapien
taccccgacagccaactcagacaag

SEQ ID NO: 4526509 - DNA, 25 bp, Homo sapien
gtcaagtagcggctctgagtcaaag

SEQ ID NO: 4526510 - DNA, 25 bp, Homo sapien
agtagcggctctgagtcaaaggctt

SEQ ID NO: 4526511 - DNA, 25 bp, Homo sapien
cagatgtcaagtagcggctctgagt

SEQ ID NO: 4526512 - DNA, 25 bp, Homo sapien
ctcagatgtcaagtagcggctctga

SEQ ID NO: 4526513 - DNA, 25 bp, Homo sapien
tcaggtgtggggtgatgcccccagg

SEQ ID NO: 4526514 - DNA, 25 bp, Homo sapien
agaagatctgggtttatgtactgca

SEQ ID NO: 4526515 - DNA, 25 bp, Homo sapien
ggcaggacatccacgagaagatctg

SEQ ID NO: 4526516 - DNA, 25 bp, Homo sapien
agtgaggaagggatgtgagaccttc

SEQ ID NO: 4526517 - DNA, 25 bp, Homo sapien
ttccactgctagagtgaggaaggga

SEQ ID NO: 4526518 - DNA, 25 bp, Homo sapien
actaagaccatgaaggtgagatact

SEQ ID NO: 4526519 - DNA, 25 bp, Homo sapien
gacagcccgaggtcaagcagtgaaa

SEQ ID NO: 4526520 - DNA, 25 bp, Homo sapien
ggaaaggtgctatacctaggatcat

SEQ ID NO: 4526521 - DNA, 25 bp, Homo sapien
cagaggtaatcaagctcaggacttg

SEQ ID NO: 4526522 - DNA, 25 bp, Homo sapien
acctcacagtcataaatggctggtg

SEQ ID NO: 4526523 - DNA, 25 bp, Homo sapien
ttgtaccaacaccttctctcctgtt

SEQ ID NO: 4526524 - DNA, 25 bp, Homo sapien
cctgtttcttaatggtggtcctctc

SEQ ID NO: 4526525 - DNA, 25 bp, Homo sapien
ctctcctgtttcttaatggtggtcc

SEQ ID NO: 4526526 - DNA, 25 bp, Homo sapien
tcctgtttcttaatggtggtcctct

SEQ ID NO: 4526527 - DNA, 25 bp, Homo sapien
tgtgggaagcaatgaaaaatcacag

SEQ ID NO: 4526528 - DNA, 25 bp, Homo sapien
ctgtgggaagcaatgaaaaatcaca

SEQ ID NO: 4526529 - DNA, 25 bp, Homo sapien
aacctcattatttcctaattatagg

SEQ ID NO: 4526530 - DNA, 25 bp, Homo sapien
ctatggcttttcgtgtgttcacaga

SEQ ID NO: 4526531 - DNA, 25 bp, Homo sapien
ttcacagagaggcagaatagcagag

SEQ ID NO: 4526532 - DNA, 25 bp, Homo sapien
aattataggattattaaagaggagg

SEQ ID NO: 4526533 - DNA, 25 bp, Homo sapien
aattgatcccggtttcactgtttga

SEQ ID NO: 4526534 - DNA, 25 bp, Homo sapien
actgtttgagaggagtcatcctggg

SEQ ID NO: 4526535 - DNA, 25 bp, Homo sapien
ctgccaaaattgatcccggtttcac

SEQ ID NO: 4526536 - DNA, 25 bp, Homo sapien
cactgtttgagaggagtcatcctgg

SEQ ID NO: 4526537 - DNA, 25 bp, Homo sapien
tggcacaaggataggaacagagact

SEQ ID NO: 4526538 - DNA, 25 bp, Homo sapien
tgtaactccaatcaacatctcagca

SEQ ID NO: 4526539 - DNA, 25 bp, Homo sapien
tatggtcaccagacataaaataaga

SEQ ID NO: 4526540 - DNA, 25 bp, Homo sapien
taatcgtgcagaatttaagctacca

SEQ ID NO: 4526541 - DNA, 25 bp, Homo sapien
tttcatcttcctcagaacttcctgg

SEQ ID NO: 4526542 - DNA, 25 bp, Homo sapien
atttgtttttcaagaagcagcgtct

SEQ ID NO: 4526543 - DNA, 25 bp, Homo sapien
catcttcctcagaacttcctggtat

SEQ ID NO: 4526544 - DNA, 25 bp, Homo sapien
tgtttttcaagaagcagcgtctcct

SEQ ID NO: 4526545 - DNA, 25 bp, Homo sapien
gtagacctggtccttacagaggtca

SEQ ID NO: 4526546 - DNA, 25 bp, Homo sapien
accaagcccagtctcctccctgggg

SEQ ID NO: 4526547 - DNA, 25 bp, Homo sapien
ttgctttgcacaggactctgttgac

SEQ ID NO: 4526548 - DNA, 25 bp, Homo sapien
gctttgcacaggactctgttgactt

SEQ ID NO: 4526549 - DNA, 25 bp, Homo sapien
tgcacaggactctgttgacttctgt

SEQ ID NO: 4526550 - DNA, 25 bp, Homo sapien
tttgcacaggactctgttgacttct

SEQ ID NO: 4526551 - DNA, 25 bp, Homo sapien
tgtggaagacaatgagtgacggcag

SEQ ID NO: 4526552 - DNA, 25 bp, Homo sapien
ggaagacaatgagtgacggcagaaa

SEQ ID NO: 4526553 - DNA, 25 bp, Homo sapien
gaagacaatgagtgacggcagaaag

SEQ ID NO: 4526554 - DNA, 25 bp, Homo sapien
tggaagacaatgagtgacggcagaa

SEQ ID NO: 4526555 - DNA, 25 bp, Homo sapien
tcaaggccaatatttgtaaataacc

SEQ ID NO: 4526556 - DNA, 25 bp, Homo sapien
cttcttcaaggccaatatttgtaaa

SEQ ID NO: 4526557 - DNA, 25 bp, Homo sapien
caatatttgtaaataaccctgaaat

SEQ ID NO: 4526558 - DNA, 25 bp, Homo sapien
ccaggatctgctttgtggtttcttc

SEQ ID NO: 4526559 - DNA, 25 bp, Homo sapien
ctgcttaggattgcgttacttttct

SEQ ID NO: 4526560 - DNA, 25 bp, Homo sapien
cctgcttaggattgcgttacttttc

SEQ ID NO: 4526561 - DNA, 25 bp, Homo sapien
acattcctgcttaggattgcgttac

SEQ ID NO: 4526562 - DNA, 25 bp, Homo sapien
ttcctgcttaggattgcgttacttt

SEQ ID NO: 4526563 - DNA, 25 bp, Homo sapien
tcctcctgttcatctatgacatagt

SEQ ID NO: 4526564 - DNA, 25 bp, Homo sapien
tcatctatgacatagttcaactcct

SEQ ID NO: 4526565 - DNA, 25 bp, Homo sapien
tatgacatagttcaactcctcctcc

SEQ ID NO: 4526566 - DNA, 25 bp, Homo sapien
cctgttcatctatgacatagttcaa

SEQ ID NO: 4526567 - DNA, 25 bp, Homo sapien
ggcagtcaaggttctgttttacagc

SEQ ID NO: 4526568 - DNA, 25 bp, Homo sapien
tttcaaggtctgaattcaggcagtc

SEQ ID NO: 4526569 - DNA, 25 bp, Homo sapien
tctttctaaggagaacctgattctc

SEQ ID NO: 4526570 - DNA, 25 bp, Homo sapien
ggagaacctgattctccatatccag

SEQ ID NO: 4526571 - DNA, 25 bp, Homo sapien
gtggattctgtccaacgtcttccat

SEQ ID NO: 4526572 - DNA, 25 bp, Homo sapien
ccagtggattctgtccaacgtcttc

SEQ ID NO: 4526573 - DNA, 25 bp, Homo sapien
atcatccagtggattctgtccaacg

SEQ ID NO: 4526574 - DNA, 25 bp, Homo sapien
acatcatccagtggattctgtccaa

SEQ ID NO: 4526575 - DNA, 25 bp, Homo sapien
gatttcttctgatcccaacagagat

SEQ ID NO: 4526576 - DNA, 25 bp, Homo sapien
ttctcttccatgatctctgtgtggc

SEQ ID NO: 4526577 - DNA, 25 bp, Homo sapien
tctcttccatgatctctgtgtggca

SEQ ID NO: 4526578 - DNA, 25 bp, Homo sapien
ctcttccatgatctctgtgtggcat

SEQ ID NO: 4526579 - DNA, 25 bp, Homo sapien
cacatttgaagccccaaatttttat

SEQ ID NO: 4526580 - DNA, 25 bp, Homo sapien
catttgaagccccaaatttttatga

SEQ ID NO: 4526581 - DNA, 25 bp, Homo sapien
ttgaagccccaaatttttatgattg

SEQ ID NO: 4526582 - DNA, 25 bp, Homo sapien
agccacatttgaagccccaaatttt

SEQ ID NO: 4526583 - DNA, 25 bp, Homo sapien
aagctcatgtaacctgtatttccta

SEQ ID NO: 4526584 - DNA, 25 bp, Homo sapien
aagcattcaagaaggatatatagct

SEQ ID NO: 4526585 - DNA, 25 bp, Homo sapien
tatagctgatcaaaaagctcatgta

SEQ ID NO: 4526586 - DNA, 25 bp, Homo sapien
caagaaggatatatagctgatcaaa

SEQ ID NO: 4526587 - DNA, 25 bp, Homo sapien
ctttggttctcttgtccttttcaca

SEQ ID NO: 4526588 - DNA, 25 bp, Homo sapien
tggttctcttgtccttttcacaaac

SEQ ID NO: 4526589 - DNA, 25 bp, Homo sapien
ttttcacaaacttgacagtgttgaa

SEQ ID NO: 4526590 - DNA, 25 bp, Homo sapien
tgtccttttcacaaacttgacagtg

SEQ ID NO: 4526591 - DNA, 25 bp, Homo sapien
cagctagaccacaattatgtttaat

SEQ ID NO: 4526592 - DNA, 25 bp, Homo sapien
gctagaccacaattatgtttaattg

SEQ ID NO: 4526593 - DNA, 25 bp, Homo sapien
tagaccacaattatgtttaattgaa

SEQ ID NO: 4526594 - DNA, 25 bp, Homo sapien
gaccacaattatgtttaattgaata

SEQ ID NO: 4526595 - DNA, 25 bp, Homo sapien
cgcattcatccctaagaatatctca

SEQ ID NO: 4526596 - DNA, 25 bp, Homo sapien
attcatccctaagaatatctcatgg

SEQ ID NO: 4526597 - DNA, 25 bp, Homo sapien
tccctaagaatatctcatggagaca

SEQ ID NO: 4526598 - DNA, 25 bp, Homo sapien
gaatatctcatggagacaatctttc

SEQ ID NO: 4526599 - DNA, 25 bp, Homo sapien
cagcagttgctgtgtagccttagaa

SEQ ID NO: 4526600 - DNA, 25 bp, Homo sapien
gctgtgtagccttagaagtagtatc

SEQ ID NO: 4526601 - DNA, 25 bp, Homo sapien
actgctctccataagcttgcagcag

SEQ ID NO: 4526602 - DNA, 25 bp, Homo sapien
gtagccttagaagtagtatccatag

SEQ ID NO: 4526603 - DNA, 25 bp, Homo sapien
caggggagctctcgggcccaatcat

SEQ ID NO: 4526604 - DNA, 25 bp, Homo sapien
ggagctctcgggcccaatcattgta

SEQ ID NO: 4526605 - DNA, 25 bp, Homo sapien
tctcgggcccaatcattgtatcttt

SEQ ID NO: 4526606 - DNA, 25 bp, Homo sapien
ggcccaatcattgtatctttgcctc

SEQ ID NO: 4526607 - DNA, 25 bp, Homo sapien
atgtcttgactgagtgactcattat

SEQ ID NO: 4526608 - DNA, 25 bp, Homo sapien
agtagaggggcaatgcggcagggag

SEQ ID NO: 4526609 - DNA, 25 bp, Homo sapien
ttgtggaagccagtagaggggcaat

SEQ ID NO: 4526610 - DNA, 25 bp, Homo sapien
gactgagtgactcattatttctgct

SEQ ID NO: 4526611 - DNA, 25 bp, Homo sapien
tggtgattcccaaatccgtgctggt

SEQ ID NO: 4526612 - DNA, 25 bp, Homo sapien
tctacgtctgcgtcattacactgaa

SEQ ID NO: 4526613 - DNA, 25 bp, Homo sapien
gataaataccagacaaggagcccag

SEQ ID NO: 4526614 - DNA, 25 bp, Homo sapien
tatttgatgattaagaagacactcc

SEQ ID NO: 4526615 - DNA, 25 bp, Homo sapien
agcaacagaatacatctctcattaa

SEQ ID NO: 4526616 - DNA, 25 bp, Homo sapien
cttccagaggaagtcacaaatttca

SEQ ID NO: 4526617 - DNA, 25 bp, Homo sapien
caacagaatacatctctcattaaag

SEQ ID NO: 4526618 - DNA, 25 bp, Homo sapien
aatttcaatatgccatagcaacaga

SEQ ID NO: 4526619 - DNA, 25 bp, Homo sapien
agcaggtgtagtctcaggagctctt

SEQ ID NO: 4526620 - DNA, 25 bp, Homo sapien
gcaggtgtagtctcaggagctcttt

SEQ ID NO: 4526621 - DNA, 25 bp, Homo sapien
catcgttcctactgacaccaaatta

SEQ ID NO: 4526622 - DNA, 25 bp, Homo sapien
agctctttctgttcacaggcttccc

SEQ ID NO: 4526623 - DNA, 25 bp, Homo sapien
gagatagatgtcgtccacaaggagg

SEQ ID NO: 4526624 - DNA, 25 bp, Homo sapien
gaagggagcctcctgtaactactct

SEQ ID NO: 4526625 - DNA, 25 bp, Homo sapien
ggatgtaggagccttccaggacctg

SEQ ID NO: 4526626 - DNA, 25 bp, Homo sapien
cctgcaccgtcagtcaaggcaagga

SEQ ID NO: 4526627 - DNA, 25 bp, Homo sapien
tagaaaggactatccagggagttgc

SEQ ID NO: 4526628 - DNA, 25 bp, Homo sapien
taaggtgtagaaaggactatccagg

SEQ ID NO: 4526629 - DNA, 25 bp, Homo sapien
ttctcttaaggtgtagaaaggacta

SEQ ID NO: 4526630 - DNA, 25 bp, Homo sapien
ccagggagttgcaaactttgttgta

SEQ ID NO: 4526631 - DNA, 25 bp, Homo sapien
aggggacatcctccggtcgccgcgg

SEQ ID NO: 4526632 - DNA, 25 bp, Homo sapien
ggacatcctccggtcgccgcggggc

SEQ ID NO: 4526633 - DNA, 25 bp, Homo sapien
ttaggggacatcctccggtcgccgc

SEQ ID NO: 4526634 - DNA, 25 bp, Homo sapien
acatcctccggtcgccgcggggcgc

SEQ ID NO: 4526635 - DNA, 25 bp, Homo sapien
cttggctggggcgagaggcgagagg

SEQ ID NO: 4526636 - DNA, 25 bp, Homo sapien
gcgcccagcgttgcgctctccacgg

SEQ ID NO: 4526637 - DNA, 25 bp, Homo sapien
gctctccacggagcgggcggccgca

SEQ ID NO: 4526638 - DNA, 25 bp, Homo sapien
ggcggactgcttggttggcgttggc

SEQ ID NO: 4526639 - DNA, 25 bp, Homo sapien
ggaccgctcgctctccaggcaactt

SEQ ID NO: 4526640 - DNA, 25 bp, Homo sapien
gctcgctctccaggcaacttgctac

SEQ ID NO: 4526641 - DNA, 25 bp, Homo sapien
taggaccgctcgctctccaggcaac

SEQ ID NO: 4526642 - DNA, 25 bp, Homo sapien
accgctcgctctccaggcaacttgc

SEQ ID NO: 4526643 - DNA, 25 bp, Homo sapien
gttgtcctgacccataagatcggcg

SEQ ID NO: 4526644 - DNA, 25 bp, Homo sapien
ggcgaagtctgttgcagccacacca

SEQ ID NO: 4526645 - DNA, 25 bp, Homo sapien
tcgtgtgttcgagagctgtggcttc

SEQ ID NO: 4526646 - DNA, 25 bp, Homo sapien
gagcctgacttgactgactgcctgt

SEQ ID NO: 4526647 - DNA, 25 bp, Homo sapien
cctgttgaagcgcttccttccaatt

SEQ ID NO: 4526648 - DNA, 25 bp, Homo sapien
tgaaccactctcctcctgttgaagc

SEQ ID NO: 4526649 - DNA, 25 bp, Homo sapien
tgaagcgcttccttccaatttactt

SEQ ID NO: 4526650 - DNA, 25 bp, Homo sapien
tcttgtccatcttttgaaccactct

SEQ ID NO: 4526651 - DNA, 25 bp, Homo sapien
acgtagccagtgtcattgacgtggc

SEQ ID NO: 4526652 - DNA, 25 bp, Homo sapien
tcatgtatgccagttagaatcaggc

SEQ ID NO: 4526653 - DNA, 25 bp, Homo sapien
cttgctgacgtagccagtgtcattg

SEQ ID NO: 4526654 - DNA, 25 bp, Homo sapien
ggcagatagacagaatctttaaggc

SEQ ID NO: 4526655 - DNA, 25 bp, Homo sapien
gaaagcaagaagttatggtgagaag

SEQ ID NO: 4526656 - DNA, 25 bp, Homo sapien
aagttatggtgagaagagtggcaat

SEQ ID NO: 4526657 - DNA, 25 bp, Homo sapien
tcttcagacagtcggtggagcagct

SEQ ID NO: 4526658 - DNA, 25 bp, Homo sapien
tggcaattaccccatcttcagacag

SEQ ID NO: 4526659 - DNA, 25 bp, Homo sapien
ggtggtttatggatgcctgctttct

SEQ ID NO: 4526660 - DNA, 25 bp, Homo sapien
tggtttatggatgcctgctttcttc

SEQ ID NO: 4526661 - DNA, 25 bp, Homo sapien
tgcggcagggcccatttacataaca

SEQ ID NO: 4526662 - DNA, 25 bp, Homo sapien
atttacataacagctgcatgaagcc

SEQ ID NO: 4526663 - DNA, 25 bp, Homo sapien
gctcttcctttcatagctatccttc

SEQ ID NO: 4526664 - DNA, 25 bp, Homo sapien
tattgaatcccgtagctcttccttt

SEQ ID NO: 4526665 - DNA, 25 bp, Homo sapien
ccataggaccgccttttcttattga

SEQ ID NO: 4526666 - DNA, 25 bp, Homo sapien
tttcatagctatccttcctattccc

SEQ ID NO: 4526667 - DNA, 25 bp, Homo sapien
cagagcgggtttttctcccagggat

SEQ ID NO: 4526668 - DNA, 25 bp, Homo sapien
gttctccttggggagccacactggg

SEQ ID NO: 4526669 - DNA, 25 bp, Homo sapien
gagcagagcctattactgaaggaac

SEQ ID NO: 4526670 - DNA, 25 bp, Homo sapien
caggaatctaggttctggagatggc

SEQ ID NO: 4526671 - DNA, 25 bp, Homo sapien
gcaagcctgagtagggcaccgcatt

SEQ ID NO: 4526672 - DNA, 25 bp, Homo sapien
taacatcattaacagctgagcagag

SEQ ID NO: 4526673 - DNA, 25 bp, Homo sapien
tgttagcccataacccctgtgggaa

SEQ ID NO: 4526674 - DNA, 25 bp, Homo sapien
tatcacatggattattctggccttc

SEQ ID NO: 4526675 - DNA, 25 bp, Homo sapien
catgcagttcctatagcctgtagtc

SEQ ID NO: 4526676 - DNA, 25 bp, Homo sapien
tactcccgcagtgagaaacctgtct

SEQ ID NO: 4526677 - DNA, 25 bp, Homo sapien
gcctcctgtcttgactgggataaca

SEQ ID NO: 4526678 - DNA, 25 bp, Homo sapien
aactcattggcgtttcattccttgc

SEQ ID NO: 4526679 - DNA, 25 bp, Homo sapien
gctggtgcactcaaatcaaattgga

SEQ ID NO: 4526680 - DNA, 25 bp, Homo sapien
cactgagcccatatcttggagaaga

SEQ ID NO: 4526681 - DNA, 25 bp, Homo sapien
tacagttgtgggcttgtggattcag

SEQ ID NO: 4526682 - DNA, 25 bp, Homo sapien
tagtaacccctttggcttgaggctg

SEQ ID NO: 4526683 - DNA, 25 bp, Homo sapien
ccaagtgccaaaggtatgttctcaa

SEQ ID NO: 4526684 - DNA, 25 bp, Homo sapien
tgggagacaaactgacagcggaaac

SEQ ID NO: 4526685 - DNA, 25 bp, Homo sapien
caggcccagaaatatgggactcagg

SEQ ID NO: 4526686 - DNA, 25 bp, Homo sapien
gctaaatcaagctcccattccactg

SEQ ID NO: 4526687 - DNA, 25 bp, Homo sapien
tcagaactgtcctccggtttgcctg

SEQ ID NO: 4526688 - DNA, 25 bp, Homo sapien
tctctgaagctgagtactgtggcta

SEQ ID NO: 4526689 - DNA, 25 bp, Homo sapien
agaaaaccaagtttgtatgcatttg

SEQ ID NO: 4526690 - DNA, 25 bp, Homo sapien
gaaaaccaagtttgtatgcatttgt

SEQ ID NO: 4526691 - DNA, 25 bp, Homo sapien
gagaaaaccaagtttgtatgcattt

SEQ ID NO: 4526692 - DNA, 25 bp, Homo sapien
tgttcccccccgctcagctctgcgc

SEQ ID NO: 4526693 - DNA, 25 bp, Homo sapien
gctctgcgctgtttctgggcccctg

SEQ ID NO: 4526694 - DNA, 25 bp, Homo sapien
ctgtggtcctgttcccccccgctca

SEQ ID NO: 4526695 - DNA, 25 bp, Homo sapien
tcagctctgcgctgtttctgggccc

SEQ ID NO: 4526696 - DNA, 25 bp, Homo sapien
acaaggacattttgcctgcataagc

SEQ ID NO: 4526697 - DNA, 25 bp, Homo sapien
gcagcgtatgcttcagctcagaata

SEQ ID NO: 4526698 - DNA, 25 bp, Homo sapien
gagaactttcgtattttgcagctga

SEQ ID NO: 4526699 - DNA, 25 bp, Homo sapien
cacagctggcctcctaaatgattta

SEQ ID NO: 4526700 - DNA, 25 bp, Homo sapien
gttattgtgaattggcctgtaagca

SEQ ID NO: 4526701 - DNA, 25 bp, Homo sapien
tccaccttaggttattgtgaattgg

SEQ ID NO: 4526702 - DNA, 25 bp, Homo sapien
cagcaatgtacgaggattctgattt

SEQ ID NO: 4526703 - DNA, 25 bp, Homo sapien
ggcctgtaagcatctgtttgagttc

SEQ ID NO: 4526704 - DNA, 25 bp, Homo sapien
cccagaggacttaggattttgtctc

SEQ ID NO: 4526705 - DNA, 25 bp, Homo sapien
gattttgtctccactcggttatgag

SEQ ID NO: 4526706 - DNA, 25 bp, Homo sapien
caactgtgtctgagcaattttaaga

SEQ ID NO: 4526707 - DNA, 25 bp, Homo sapien
tcgtggaaacatgatgcaggaggcc

SEQ ID NO: 4526708 - DNA, 25 bp, Homo sapien
tagccaagtataggtgtcactaagg

SEQ ID NO: 4526709 - DNA, 25 bp, Homo sapien
gaacacaaagctgaaggattcctct

SEQ ID NO: 4526710 - DNA, 25 bp, Homo sapien
aaatctgagataacagcgggaacac

SEQ ID NO: 4526711 - DNA, 25 bp, Homo sapien
cactaaggattgtcacgcagctcaa

SEQ ID NO: 4526712 - DNA, 25 bp, Homo sapien
agccagccagtcgtctagggcccac

SEQ ID NO: 4526713 - DNA, 25 bp, Homo sapien
gccagtcgtctagggcccacagggc

SEQ ID NO: 4526714 - DNA, 25 bp, Homo sapien
cagccagtcgtctagggcccacagg

SEQ ID NO: 4526715 - DNA, 25 bp, Homo sapien
ccagtcgtctagggcccacagggcc

SEQ ID NO: 4526716 - DNA, 25 bp, Homo sapien
ctccaaaatcctaggataatagttt

SEQ ID NO: 4526717 - DNA, 25 bp, Homo sapien
tcttcaagtgcaacaatttgaactt

SEQ ID NO: 4526718 - DNA, 25 bp, Homo sapien
aatcctaggataatagtttgcacct

SEQ ID NO: 4526719 - DNA, 25 bp, Homo sapien
gcattccaactgtggaagcaccctc

SEQ ID NO: 4526720 - DNA, 25 bp, Homo sapien
taaaatagagcattgagttgagtag

SEQ ID NO: 4526721 - DNA, 25 bp, Homo sapien
aatagagcattgagttgagtagttt

SEQ ID NO: 4526722 - DNA, 25 bp, Homo sapien
attaaaatagagcattgagttgagt

SEQ ID NO: 4526723 - DNA, 25 bp, Homo sapien
aaaatagagcattgagttgagtagt

SEQ ID NO: 4526724 - DNA, 25 bp, Homo sapien
tgtattggatttcatgagagcctct

SEQ ID NO: 4526725 - DNA, 25 bp, Homo sapien
ttcagcaagttatcactttttggat

SEQ ID NO: 4526726 - DNA, 25 bp, Homo sapien
taatttttcagacatatcattggaa

SEQ ID NO: 4526727 - DNA, 25 bp, Homo sapien
agagaagacacaggataagaagaga

SEQ ID NO: 4526728 - DNA, 25 bp, Homo sapien
cccttttccagatcagagtcatgtt

SEQ ID NO: 4526729 - DNA, 25 bp, Homo sapien
cagctgctggcctcgagaatatgga

SEQ ID NO: 4526730 - DNA, 25 bp, Homo sapien
tgggactaagagcaggataatacct

SEQ ID NO: 4526731 - DNA, 25 bp, Homo sapien
tcatgtttcagtgggactaagagca

SEQ ID NO: 4526732 - DNA, 25 bp, Homo sapien
tctgtctcggttgccccttgcagct

SEQ ID NO: 4526733 - DNA, 25 bp, Homo sapien
caatggctctgtctcggttgcccct

SEQ ID NO: 4526734 - DNA, 25 bp, Homo sapien
atggctctgtctcggttgccccttg

SEQ ID NO: 4526735 - DNA, 25 bp, Homo sapien
ggctctgtctcggttgccccttgca

SEQ ID NO: 4526736 - DNA, 25 bp, Homo sapien
cttgcagagtactgagtcctggctt

SEQ ID NO: 4526737 - DNA, 25 bp, Homo sapien
gcagagtactgagtcctggcttcat

SEQ ID NO: 4526738 - DNA, 25 bp, Homo sapien
gagtactgagtcctggcttcatgaa

SEQ ID NO: 4526739 - DNA, 25 bp, Homo sapien
tgagtcctggcttcatgaatttcat

SEQ ID NO: 4526740 - DNA, 25 bp, Homo sapien
catttaactgagctttatccaaagc

SEQ ID NO: 4526741 - DNA, 25 bp, Homo sapien
ttcttccatttaactgagctttatc

SEQ ID NO: 4526742 - DNA, 25 bp, Homo sapien
acaattggtacaagaaagctgtttg

SEQ ID NO: 4526743 - DNA, 25 bp, Homo sapien
gaacaattggtacaagaaagctgtt

SEQ ID NO: 4526744 - DNA, 25 bp, Homo sapien
tatagtaatagatagacttgcttcc

SEQ ID NO: 4526745 - DNA, 25 bp, Homo sapien
gtttaataggcagccaaacatggct

SEQ ID NO: 4526746 - DNA, 25 bp, Homo sapien
ccacattctgtcctaggtttccggt

SEQ ID NO: 4526747 - DNA, 25 bp, Homo sapien
aatatacaagtttaataggcagcca

SEQ ID NO: 4526748 - DNA, 25 bp, Homo sapien
gagaatacgcgttaattccccagat

SEQ ID NO: 4526749 - DNA, 25 bp, Homo sapien
ctgcatggctaatacgggaaaggac

SEQ ID NO: 4526750 - DNA, 25 bp, Homo sapien
acagtgaggttaattgggctgactc

SEQ ID NO: 4526751 - DNA, 25 bp, Homo sapien
gctggtacaggaacgaatgtacatt

SEQ ID NO: 4526752 - DNA, 25 bp, Homo sapien
atcacctggtgccatcctattaagg

SEQ ID NO: 4526753 - DNA, 25 bp, Homo sapien
gagagaaacatgcattggcaccggc

SEQ ID NO: 4526754 - DNA, 25 bp, Homo sapien
catcctattaaggatgtgcagctgg

SEQ ID NO: 4526755 - DNA, 25 bp, Homo sapien
tccagaccccgtttctctgctgctc

SEQ ID NO: 4526756 - DNA, 25 bp, Homo sapien
tggcacaattttctagggtttctaa

SEQ ID NO: 4526757 - DNA, 25 bp, Homo sapien
tcaaggtcactctacaagagcacag

SEQ ID NO: 4526758 - DNA, 25 bp, Homo sapien
gacagagtgactgccataggtcctt

SEQ ID NO: 4526759 - DNA, 25 bp, Homo sapien
caaaggagtgcctttctgtgcactg

SEQ ID NO: 4526760 - DNA, 25 bp, Homo sapien
caactgctagctgaccaagtaagac

SEQ ID NO: 4526761 - DNA, 25 bp, Homo sapien
tcagagccatctctcgttggtgaga

SEQ ID NO: 4526762 - DNA, 25 bp, Homo sapien
gacaccagtggctttatgtcgggcc

SEQ ID NO: 4526763 - DNA, 25 bp, Homo sapien
aaatagccaaagtggaactgcctgg

SEQ ID NO: 4526764 - DNA, 25 bp, Homo sapien
gatacctagatggtctctcaactga

SEQ ID NO: 4526765 - DNA, 25 bp, Homo sapien
ctgtgtataaaggacccatttaagg

SEQ ID NO: 4526766 - DNA, 25 bp, Homo sapien
tctctggtagaacagctctgggttt

SEQ ID NO: 4526767 - DNA, 25 bp, Homo sapien
ctctggtagaacagctctgggtttc

SEQ ID NO: 4526768 - DNA, 25 bp, Homo sapien
tctggtagaacagctctgggtttct

SEQ ID NO: 4526769 - DNA, 25 bp, Homo sapien
tgtaaacaagtaaactgcccagtag

SEQ ID NO: 4526770 - DNA, 25 bp, Homo sapien
tgagaagctacctgtggcggaagac

SEQ ID NO: 4526771 - DNA, 25 bp, Homo sapien
tcacacggaatccaacagaagggtc

SEQ ID NO: 4526772 - DNA, 25 bp, Homo sapien
taaagggaaacaacagcggcaacat

SEQ ID NO: 4526773 - DNA, 25 bp, Homo sapien
tggaaagtcgtcatggtaccacggg

SEQ ID NO: 4526774 - DNA, 25 bp, Homo sapien
atggagaagcaagcagcgcatgggt

SEQ ID NO: 4526775 - DNA, 25 bp, Homo sapien
caagttcctccatttccacgtatgg

SEQ ID NO: 4526776 - DNA, 25 bp, Homo sapien
ccacgggggccatcggcatagcaga

SEQ ID NO: 4526777 - DNA, 25 bp, Homo sapien
tcattccgcatcaatgggcagcccg

SEQ ID NO: 4526778 - DNA, 25 bp, Homo sapien
tgttctttcctcaccaggccggata

SEQ ID NO: 4526779 - DNA, 25 bp, Homo sapien
tgacgtggtaagctgctgcctggac

SEQ ID NO: 4526780 - DNA, 25 bp, Homo sapien
cacctcctgagatcggatgacgtgg

SEQ ID NO: 4526781 - DNA, 25 bp, Homo sapien
cattaatactgctcccacttttact

SEQ ID NO: 4526782 - DNA, 25 bp, Homo sapien
taatactgctcccacttttacttat

SEQ ID NO: 4526783 - DNA, 25 bp, Homo sapien
aatactgctcccacttttacttatt

SEQ ID NO: 4526784 - DNA, 25 bp, Homo sapien
attaatactgctcccacttttactt

SEQ ID NO: 4526785 - DNA, 25 bp, Homo sapien
ataaagcttacaagtccgttgtatt

SEQ ID NO: 4526786 - DNA, 25 bp, Homo sapien
gagaggatttctgtgggtggacatc

SEQ ID NO: 4526787 - DNA, 25 bp, Homo sapien
gttgccagaagaaggaatggcctgt

SEQ ID NO: 4526788 - DNA, 25 bp, Homo sapien
tcagggcagtgtacaaggacaacca

SEQ ID NO: 4526789 - DNA, 25 bp, Homo sapien
gacaggtgagaatgatgttgccaga

SEQ ID NO: 4526790 - DNA, 25 bp, Homo sapien
gggtttaacagatccctcatttctg

SEQ ID NO: 4526791 - DNA, 25 bp, Homo sapien
cctgcccattgacctgtcgggttta

SEQ ID NO: 4526792 - DNA, 25 bp, Homo sapien
ggcagcttttcaataggcacaaaat

SEQ ID NO: 4526793 - DNA, 25 bp, Homo sapien
ttttcaataggcacaaaatgaaact

SEQ ID NO: 4526794 - DNA, 25 bp, Homo sapien
catgctgtaaacagagcagttcttc

SEQ ID NO: 4526795 - DNA, 25 bp, Homo sapien
aatgctccgggttatcttcacaggt

SEQ ID NO: 4526796 - DNA, 25 bp, Homo sapien
ttcttcttatcacccaagaacaatg

SEQ ID NO: 4526797 - DNA, 25 bp, Homo sapien
cctgtgccctgataacatgctgtaa

SEQ ID NO: 4526798 - DNA, 25 bp, Homo sapien
aggccatcaagttgccacagctcat

SEQ ID NO: 4526799 - DNA, 25 bp, Homo sapien
caacctccactcttcgatcataatg

SEQ ID NO: 4526800 - DNA, 25 bp, Homo sapien
gatacaacaccagcgtaggtttgag

SEQ ID NO: 4526801 - DNA, 25 bp, Homo sapien
tgagatctgtaagctgcagggattt

SEQ ID NO: 4526802 - DNA, 25 bp, Homo sapien
tcattgcgtgatggccacttggact

SEQ ID NO: 4526803 - DNA, 25 bp, Homo sapien
cttccgcatggtggcagaagtcttc

SEQ ID NO: 4526804 - DNA, 25 bp, Homo sapien
acttttggacccagatctaactggc

SEQ ID NO: 4526805 - DNA, 25 bp, Homo sapien
gatctaactggctgaaaagtcctga

SEQ ID NO: 4526806 - DNA, 25 bp, Homo sapien
agtcctgatgctgattctgaccagc

SEQ ID NO: 4526807 - DNA, 25 bp, Homo sapien
ggttagtctgtagaagcaaagtctt

SEQ ID NO: 4526808 - DNA, 25 bp, Homo sapien
catttctgttgttgtcatatgccaa

SEQ ID NO: 4526809 - DNA, 25 bp, Homo sapien
ctgaatgaggaaaagcgggtgtttg

SEQ ID NO: 4526810 - DNA, 25 bp, Homo sapien
ttcttccttgctggtccggttagtc

SEQ ID NO: 4526811 - DNA, 25 bp, Homo sapien
ctgtgctgtccccttgtgatgtgtc

SEQ ID NO: 4526812 - DNA, 25 bp, Homo sapien
gggacaagagcttcccatggcccgg

SEQ ID NO: 4526813 - DNA, 25 bp, Homo sapien
gcccgggcttgcctttgtccagaag

SEQ ID NO: 4526814 - DNA, 25 bp, Homo sapien
cccttgtgatgtgtcctcaaagtca

SEQ ID NO: 4526815 - DNA, 25 bp, Homo sapien
tattttttattagtggtctcagccc

SEQ ID NO: 4526816 - DNA, 25 bp, Homo sapien
taggtgtcctgcatcctgtataagg

SEQ ID NO: 4526817 - DNA, 25 bp, Homo sapien
actactcctcgtggtgctacccagg

SEQ ID NO: 4526818 - DNA, 25 bp, Homo sapien
gcagccaccacactaacagagatag

SEQ ID NO: 4526819 - DNA, 25 bp, Homo sapien
tcagttaactgtatgtcatgggagc

SEQ ID NO: 4526820 - DNA, 25 bp, Homo sapien
tgattatatcttcccaacccacagc

SEQ ID NO: 4526821 - DNA, 25 bp, Homo sapien
tgtttgggaactcacctatgttgat

SEQ ID NO: 4526822 - DNA, 25 bp, Homo sapien
cacaatggcatcatagtacatgttc

SEQ ID NO: 4526823 - DNA, 25 bp, Homo sapien
ccacactttaaggactcgtaacaag

SEQ ID NO: 4526824 - DNA, 25 bp, Homo sapien
tgttctctatgccacactttaagga

SEQ ID NO: 4526825 - DNA, 25 bp, Homo sapien
tatgccacactttaaggactcgtaa

SEQ ID NO: 4526826 - DNA, 25 bp, Homo sapien
ccttctgaaggtctgttctctatgc

SEQ ID NO: 4526827 - DNA, 25 bp, Homo sapien
gtttactctgtaacaccagcatttg

SEQ ID NO: 4526828 - DNA, 25 bp, Homo sapien
tcagtgaatagtaggaggtctccat

SEQ ID NO: 4526829 - DNA, 25 bp, Homo sapien
taaatactgccaccctgttggggga

SEQ ID NO: 4526830 - DNA, 25 bp, Homo sapien
cttatcaccaacttgggtggtctct

SEQ ID NO: 4526831 - DNA, 25 bp, Homo sapien
tcctaggctgcaatccagtcttaca

SEQ ID NO: 4526832 - DNA, 25 bp, Homo sapien
ccctgtggcattacgtgggaataga

SEQ ID NO: 4526833 - DNA, 25 bp, Homo sapien
aaatatttgcagtggagctggtaca

SEQ ID NO: 4526834 - DNA, 25 bp, Homo sapien
tttgcaagcattcctgaagatgaca

SEQ ID NO: 4526835 - DNA, 25 bp, Homo sapien
tctgtaactcacaatggcaaacagg

SEQ ID NO: 4526836 - DNA, 25 bp, Homo sapien
tggacatcgcaatgggcttcaagac

SEQ ID NO: 4526837 - DNA, 25 bp, Homo sapien
tctgtcatctgtaactcacaatggc

SEQ ID NO: 4526838 - DNA, 25 bp, Homo sapien
caagacactgaggaccattctgtca

SEQ ID NO: 4526839 - DNA, 25 bp, Homo sapien
ctgctgaatacatttcctctggtgc

SEQ ID NO: 4526840 - DNA, 25 bp, Homo sapien
taagcgtgccctaggacactgcaaa

SEQ ID NO: 4526841 - DNA, 25 bp, Homo sapien
tccttgaaggcaaagctctgatcct

SEQ ID NO: 4526842 - DNA, 25 bp, Homo sapien
caaggtttgagtcactattcttccc

SEQ ID NO: 4526843 - DNA, 25 bp, Homo sapien
tcagggagcccgtgcctagattggc

SEQ ID NO: 4526844 - DNA, 25 bp, Homo sapien
cagtgaaatgcccagtctgtgagca

SEQ ID NO: 4526845 - DNA, 25 bp, Homo sapien
tcttgacgaaaaactctccatgtgc

SEQ ID NO: 4526846 - DNA, 25 bp, Homo sapien
tcccgtcaggccagatcttcgtgag

SEQ ID NO: 4526847 - DNA, 25 bp, Homo sapien
cacaataggagggagcagtatcctc

SEQ ID NO: 4526848 - DNA, 25 bp, Homo sapien
gaccagcaggaacaagtacgagaag

SEQ ID NO: 4526849 - DNA, 25 bp, Homo sapien
tagggccagtactaagcaagaacgc

SEQ ID NO: 4526850 - DNA, 25 bp, Homo sapien
ctttcggagagctaagagaccagca

SEQ ID NO: 4526851 - DNA, 25 bp, Homo sapien
cactactgagtgaatgactaatagc

SEQ ID NO: 4526852 - DNA, 25 bp, Homo sapien
gtatggcactactgagtgaatgact

SEQ ID NO: 4526853 - DNA, 25 bp, Homo sapien
ggcactactgagtgaatgactaata

SEQ ID NO: 4526854 - DNA, 25 bp, Homo sapien
ctactgagtgaatgactaatagcca

SEQ ID NO: 4526855 - DNA, 25 bp, Homo sapien
ctcctgcctatattatgccaacaaa

SEQ ID NO: 4526856 - DNA, 25 bp, Homo sapien
ttcaattcgatagaatcatgacagt

SEQ ID NO: 4526857 - DNA, 25 bp, Homo sapien
aatgactactttgacacaacccctc

SEQ ID NO: 4526858 - DNA, 25 bp, Homo sapien
gacacaacccctcatggttttgaaa

SEQ ID NO: 4526859 - DNA, 25 bp, Homo sapien
tagctaagccccatgacctgggata

SEQ ID NO: 4526860 - DNA, 25 bp, Homo sapien
caagttacttgaacctattgggtgc

SEQ ID NO: 4526861 - DNA, 25 bp, Homo sapien
tgtgaacctcctactggcaggcttt

SEQ ID NO: 4526862 - DNA, 25 bp, Homo sapien
gggcctgtaacctgcatgttgctaa

SEQ ID NO: 4526863 - DNA, 25 bp, Homo sapien
tacatggccccattaatcccgtgaa

SEQ ID NO: 4526864 - DNA, 25 bp, Homo sapien
gcacacgggtcaggtgagaaattaa

SEQ ID NO: 4526865 - DNA, 25 bp, Homo sapien
gaaagataacgacctcatgtgtggg

SEQ ID NO: 4526866 - DNA, 25 bp, Homo sapien
cagagtacaacggagtgagagacag

SEQ ID NO: 4526867 - DNA, 25 bp, Homo sapien
cagccggtgactgctttcgtaaaca

SEQ ID NO: 4526868 - DNA, 25 bp, Homo sapien
cacatcagtcttcctaaagggagcc

SEQ ID NO: 4526869 - DNA, 25 bp, Homo sapien
tgtgcctaatggacatacactgtgg

SEQ ID NO: 4526870 - DNA, 25 bp, Homo sapien
ggacatgagacgaattgcccagggc

SEQ ID NO: 4526871 - DNA, 25 bp, Homo sapien
gaaacaagggccagagtctatctcc

SEQ ID NO: 4526872 - DNA, 25 bp, Homo sapien
tctttcagatgtcaaacacagaggt

SEQ ID NO: 4526873 - DNA, 25 bp, Homo sapien
cttatgcccacctgccgttagaagg

SEQ ID NO: 4526874 - DNA, 25 bp, Homo sapien
tggaacacactagcttgagacatgc

SEQ ID NO: 4526875 - DNA, 25 bp, Homo sapien
acatttttggaggtacttggttgct

SEQ ID NO: 4526876 - DNA, 25 bp, Homo sapien
agctcttcctcggtaacatttttgg

SEQ ID NO: 4526877 - DNA, 25 bp, Homo sapien
gaggtacttggttgctcaggttcca

SEQ ID NO: 4526878 - DNA, 25 bp, Homo sapien
ttaggaaatcatgctgtccaaccag

SEQ ID NO: 4526879 - DNA, 25 bp, Homo sapien
tgaaaaaacaccagaatcaagattc

SEQ ID NO: 4526880 - DNA, 25 bp, Homo sapien
ctggatcaatgtcagacacccagag

SEQ ID NO: 4526881 - DNA, 25 bp, Homo sapien
ggaagcagagacgtgagcacagaaa

SEQ ID NO: 4526882 - DNA, 25 bp, Homo sapien
tagatgtcagtggacaacactggat

SEQ ID NO: 4526883 - DNA, 25 bp, Homo sapien
gagacgtctgatctggtaagatgtt

SEQ ID NO: 4526884 - DNA, 25 bp, Homo sapien
tggatttcaggtcctgagacgtctg

SEQ ID NO: 4526885 - DNA, 25 bp, Homo sapien
gacgtctgatctggtaagatgttat

SEQ ID NO: 4526886 - DNA, 25 bp, Homo sapien
aattaagcaacagatctagttcttc

SEQ ID NO: 4526887 - DNA, 25 bp, Homo sapien
ctttaactgcatccctaatcccttg

SEQ ID NO: 4526888 - DNA, 25 bp, Homo sapien
tgaggaacctctaaaggaactgtac

SEQ ID NO: 4526889 - DNA, 25 bp, Homo sapien
gatttcagctcaaagatgggccccc

SEQ ID NO: 4526890 - DNA, 25 bp, Homo sapien
taatcccttgccatcatcagttctc

SEQ ID NO: 4526891 - DNA, 25 bp, Homo sapien
gatttagccaggatttcaatgtcac

SEQ ID NO: 4526892 - DNA, 25 bp, Homo sapien
tccagcagagtcagtcagttgtaca

SEQ ID NO: 4526893 - DNA, 25 bp, Homo sapien
tatacctttaatgcctgccactgac

SEQ ID NO: 4526894 - DNA, 25 bp, Homo sapien
gaatactgctctacagcatgggtgg

SEQ ID NO: 4526895 - DNA, 25 bp, Homo sapien
acgttgagtcggaggcagagaggca

SEQ ID NO: 4526896 - DNA, 25 bp, Homo sapien
ggaccagttcggcagcaacgttgag

SEQ ID NO: 4526897 - DNA, 25 bp, Homo sapien
gctcttgaagggctcgaaccaataa

SEQ ID NO: 4526898 - DNA, 25 bp, Homo sapien
gaagggctcgaaccaataactcact

SEQ ID NO: 4526899 - DNA, 25 bp, Homo sapien
taagatacaggttcacaggcctcac

SEQ ID NO: 4526900 - DNA, 25 bp, Homo sapien
gggcccagagaccatgtgtacatgg

SEQ ID NO: 4526901 - DNA, 25 bp, Homo sapien
caattactgtccatatgagcctggg

SEQ ID NO: 4526902 - DNA, 25 bp, Homo sapien
aggaacggccgcatatcactcagca

SEQ ID NO: 4526903 - DNA, 25 bp, Homo sapien
catgttgtttcctcagacaggacct

SEQ ID NO: 4526904 - DNA, 25 bp, Homo sapien
ttcatgttgtttcctcagacaggac

SEQ ID NO: 4526905 - DNA, 25 bp, Homo sapien
tgttgtttcctcagacaggacctac

SEQ ID NO: 4526906 - DNA, 25 bp, Homo sapien
attttcatgttgtttcctcagacag

SEQ ID NO: 4526907 - DNA, 25 bp, Homo sapien
acacttgtccaccaagacccgttca

SEQ ID NO: 4526908 - DNA, 25 bp, Homo sapien
cccgttcaaatgatcttttccccat

SEQ ID NO: 4526909 - DNA, 25 bp, Homo sapien
tgtccaccaagacccgttcaaatga

SEQ ID NO: 4526910 - DNA, 25 bp, Homo sapien
caagacccgttcaaatgatcttttc

SEQ ID NO: 4526911 - DNA, 25 bp, Homo sapien
gaagcttcactatcccattctttct

SEQ ID NO: 4526912 - DNA, 25 bp, Homo sapien
ctcagcaaaccggaactgtgagaat

SEQ ID NO: 4526913 - DNA, 25 bp, Homo sapien
agcaaaccggaactgtgagaatgag

SEQ ID NO: 4526914 - DNA, 25 bp, Homo sapien
tttggacaagaagcttcactatccc

SEQ ID NO: 4526915 - DNA, 25 bp, Homo sapien
ggcagtgaggacttggatgaaattc

SEQ ID NO: 4526916 - DNA, 25 bp, Homo sapien
agacctgaaaagtcttatctgaaga

SEQ ID NO: 4526917 - DNA, 25 bp, Homo sapien
gacatgagagttcccaaggcagtga

SEQ ID NO: 4526918 - DNA, 25 bp, Homo sapien
tgaagacatgagagttcccaaggca

SEQ ID NO: 4526919 - DNA, 25 bp, Homo sapien
atgtggcctagaggctacttttatt

SEQ ID NO: 4526920 - DNA, 25 bp, Homo sapien
aaacttggtaaaatgactactatag

SEQ ID NO: 4526921 - DNA, 25 bp, Homo sapien
ggcctagaggctacttttattatta

SEQ ID NO: 4526922 - DNA, 25 bp, Homo sapien
aaatgactactatagaataccaacc

SEQ ID NO: 4526923 - DNA, 25 bp, Homo sapien
taatatcctcaaacaagatggaaga

SEQ ID NO: 4526924 - DNA, 25 bp, Homo sapien
tacagaatattgtagaacggccttg

SEQ ID NO: 4526925 - DNA, 25 bp, Homo sapien
agagcagctagtgcctattacatag

SEQ ID NO: 4526926 - DNA, 25 bp, Homo sapien
aacggccttgttgtgtacttatata

SEQ ID NO: 4526927 - DNA, 25 bp, Homo sapien
ctgagcatcgaacatccacactgag

SEQ ID NO: 4526928 - DNA, 25 bp, Homo sapien
tgagcactacataataggttgtgcc

SEQ ID NO: 4526929 - DNA, 25 bp, Homo sapien
caaaaagcccctgagcatcgaacat

SEQ ID NO: 4526930 - DNA, 25 bp, Homo sapien
tgtgcctatcttcccaatgccatta

SEQ ID NO: 4526931 - DNA, 25 bp, Homo sapien
ttagaggggagactcgaagcttggt

SEQ ID NO: 4526932 - DNA, 25 bp, Homo sapien
cattagaggggagactcgaagcttg

SEQ ID NO: 4526933 - DNA, 25 bp, Homo sapien
tagaggggagactcgaagcttggtc

SEQ ID NO: 4526934 - DNA, 25 bp, Homo sapien
attagaggggagactcgaagcttgg

SEQ ID NO: 4526935 - DNA, 25 bp, Homo sapien
tgcaggcactgtcaacacaatgttc

SEQ ID NO: 4526936 - DNA, 25 bp, Homo sapien
ctgtcataacacaaaggtgatggct

SEQ ID NO: 4526937 - DNA, 25 bp, Homo sapien
taaaagaatcctggttagatgctaa

SEQ ID NO: 4526938 - DNA, 25 bp, Homo sapien
tgatggcttcttaattgcaggcact

SEQ ID NO: 4526939 - DNA, 25 bp, Homo sapien
gaataacaggaacattctgcagatg

SEQ ID NO: 4526940 - DNA, 25 bp, Homo sapien
gtctaatgggacacattggtgaggc

SEQ ID NO: 4526941 - DNA, 25 bp, Homo sapien
tgatgctagaaggagatctgtctaa

SEQ ID NO: 4526942 - DNA, 25 bp, Homo sapien
aacggacactctggtagggactgac

SEQ ID NO: 4526943 - DNA, 25 bp, Homo sapien
tgctagagtcaaccatgcaatgcag

SEQ ID NO: 4526944 - DNA, 25 bp, Homo sapien
tcttcttctatatgcaacagggtgc

SEQ ID NO: 4526945 - DNA, 25 bp, Homo sapien
caagccaaaggcattttctgtaggg

SEQ ID NO: 4526946 - DNA, 25 bp, Homo sapien
tacagcaaagggaaatctagcaagg

SEQ ID NO: 4526947 - DNA, 25 bp, Homo sapien
aattttactgctaaagagaagcagc

SEQ ID NO: 4526948 - DNA, 25 bp, Homo sapien
tttaattttactgctaaagagaagc

SEQ ID NO: 4526949 - DNA, 25 bp, Homo sapien
attttactgctaaagagaagcagca

SEQ ID NO: 4526950 - DNA, 25 bp, Homo sapien
taattttactgctaaagagaagcag

SEQ ID NO: 4526951 - DNA, 25 bp, Homo sapien
agggacacctgaaagaatgtccctc

SEQ ID NO: 4526952 - DNA, 25 bp, Homo sapien
acacctgaaagaatgtccctcctca

SEQ ID NO: 4526953 - DNA, 25 bp, Homo sapien
ggacacctgaaagaatgtccctcct

SEQ ID NO: 4526954 - DNA, 25 bp, Homo sapien
acctgaaagaatgtccctcctcaca

SEQ ID NO: 4526955 - DNA, 25 bp, Homo sapien
tagataagagtggaatatattcaaa

SEQ ID NO: 4526956 - DNA, 25 bp, Homo sapien
ctctgtgtcgttagataagagtgga

SEQ ID NO: 4526957 - DNA, 25 bp, Homo sapien
cgttagataagagtggaatatattc

SEQ ID NO: 4526958 - DNA, 25 bp, Homo sapien
tgtcgttagataagagtggaatata

SEQ ID NO: 4526959 - DNA, 25 bp, Homo sapien
gatctgttcagctccatatggagat

SEQ ID NO: 4526960 - DNA, 25 bp, Homo sapien
taaactggactagatggtatctccc

SEQ ID NO: 4526961 - DNA, 25 bp, Homo sapien
ccaattgaattaggctcaggaagta

SEQ ID NO: 4526962 - DNA, 25 bp, Homo sapien
aatgaatgtggatgctaaactggac

SEQ ID NO: 4526963 - DNA, 25 bp, Homo sapien
ttttctctcatacccacgcaccatg

SEQ ID NO: 4526964 - DNA, 25 bp, Homo sapien
tacccacgcaccatgctagggcctg

SEQ ID NO: 4526965 - DNA, 25 bp, Homo sapien
tcatacccacgcaccatgctagggc

SEQ ID NO: 4526966 - DNA, 25 bp, Homo sapien
ctctcatacccacgcaccatgctag

SEQ ID NO: 4526967 - DNA, 25 bp, Homo sapien
catatgcccaaaacaccaagttgga

SEQ ID NO: 4526968 - DNA, 25 bp, Homo sapien
gccatacacccttgtccataagagg

SEQ ID NO: 4526969 - DNA, 25 bp, Homo sapien
tatacgaagacatctacatatgccc

SEQ ID NO: 4526970 - DNA, 25 bp, Homo sapien
agttggacaggccatacacccttgt

SEQ ID NO: 4526971 - DNA, 25 bp, Homo sapien
ttataaggagtaaagcatggtgtct

SEQ ID NO: 4526972 - DNA, 25 bp, Homo sapien
ataaggagtaaagcatggtgtctac

SEQ ID NO: 4526973 - DNA, 25 bp, Homo sapien
tataaggagtaaagcatggtgtcta

SEQ ID NO: 4526974 - DNA, 25 bp, Homo sapien
atggaatgtgacaacagaatgaatc

SEQ ID NO: 4526975 - DNA, 25 bp, Homo sapien
gaaacgtttagtggagatcagaaag

SEQ ID NO: 4526976 - DNA, 25 bp, Homo sapien
acaacatggaatgtgacaacagaat

SEQ ID NO: 4526977 - DNA, 25 bp, Homo sapien
cctggagaaacgtttagtggagatc

SEQ ID NO: 4526978 - DNA, 25 bp, Homo sapien
ctgtgcagtagtgtataactactgg

SEQ ID NO: 4526979 - DNA, 25 bp, Homo sapien
aactactggattcgtgtcggatgac

SEQ ID NO: 4526980 - DNA, 25 bp, Homo sapien
tagtgtataactactggattcgtgt

SEQ ID NO: 4526981 - DNA, 25 bp, Homo sapien
actggattcgtgtcggatgacttgc

SEQ ID NO: 4526982 - DNA, 25 bp, Homo sapien
gctgttcaaacagagaacacctatc

SEQ ID NO: 4526983 - DNA, 25 bp, Homo sapien
tctcttctcaatgacaagctgttca

SEQ ID NO: 4526984 - DNA, 25 bp, Homo sapien
caaaacgaatatcatcatctgctcc

SEQ ID NO: 4526985 - DNA, 25 bp, Homo sapien
tttcaggatatactgctgtccagca

SEQ ID NO: 4526986 - DNA, 25 bp, Homo sapien
ggtttgaatagctcctatcagctct

SEQ ID NO: 4526987 - DNA, 25 bp, Homo sapien
gaatagctcctatcagctcttcatt

SEQ ID NO: 4526988 - DNA, 25 bp, Homo sapien
gctgtctggtttgaatagctcctat

SEQ ID NO: 4526989 - DNA, 25 bp, Homo sapien
tagctcctatcagctcttcattcat

SEQ ID NO: 4526990 - DNA, 25 bp, Homo sapien
tcaaaagcgggagtaaacatcatgt

SEQ ID NO: 4526991 - DNA, 25 bp, Homo sapien
aaataccagtaagcaagcagacagt

SEQ ID NO: 4526992 - DNA, 25 bp, Homo sapien
cagaccatgataaaacgggagtaag

SEQ ID NO: 4526993 - DNA, 25 bp, Homo sapien
gcagacagtcatgaaagaggcccct

SEQ ID NO: 4526994 - DNA, 25 bp, Homo sapien
gcagtggaatcagaaaagcctcctt

SEQ ID NO: 4526995 - DNA, 25 bp, Homo sapien
cgttagtagcaaacatagggacctt

SEQ ID NO: 4526996 - DNA, 25 bp, Homo sapien
tgaaaagatctaccctcaagagatg

SEQ ID NO: 4526997 - DNA, 25 bp, Homo sapien
gaccttgaccagctgaacctttcct

SEQ ID NO: 4526998 - DNA, 25 bp, Homo sapien
gtaatgacgaatcctgtgctcctga

SEQ ID NO: 4526999 - DNA, 25 bp, Homo sapien
tacggtaatgacgaatcctgtgctc

SEQ ID NO: 4527000 - DNA, 25 bp, Homo sapien
tctacggtaatgacgaatcctgtgc

SEQ ID NO: 4527001 - DNA, 25 bp, Homo sapien
tcatctacggtaatgacgaatcctg

SEQ ID NO: 4527002 - DNA, 25 bp, Homo sapien
gagctaaggaggacactgaaatctg

SEQ ID NO: 4527003 - DNA, 25 bp, Homo sapien
tatcttgatatcgatcccagttaga

SEQ ID NO: 4527004 - DNA, 25 bp, Homo sapien
cataggtctctgcatcgctgtcatc

SEQ ID NO: 4527005 - DNA, 25 bp, Homo sapien
tctccactttcattattgacctctt

SEQ ID NO: 4527006 - DNA, 25 bp, Homo sapien
tatgaccagaaccatccagataggt

SEQ ID NO: 4527007 - DNA, 25 bp, Homo sapien
cccttgatagccttctgtgagtgcc

SEQ ID NO: 4527008 - DNA, 25 bp, Homo sapien
caactagttgtatacatgtggacac

SEQ ID NO: 4527009 - DNA, 25 bp, Homo sapien
tcaggtagcgtctgtgtgagcaact

SEQ ID NO: 4527010 - DNA, 25 bp, Homo sapien
taaggcttacaaaatcaggttggtc

SEQ ID NO: 4527011 - DNA, 25 bp, Homo sapien
tatgggcggtaggaaacagcatcct

SEQ ID NO: 4527012 - DNA, 25 bp, Homo sapien
gcactgccccatgacacctttgtag

SEQ ID NO: 4527013 - DNA, 25 bp, Homo sapien
aatccagtgccgtaataagttagtc

SEQ ID NO: 4527014 - DNA, 25 bp, Homo sapien
ctccgcgagcgccgcggaagccccg

SEQ ID NO: 4527015 - DNA, 25 bp, Homo sapien
gccgctcgctgtggcgatctccgcc

SEQ ID NO: 4527016 - DNA, 25 bp, Homo sapien
ggcctccccgagctcctcgctccgc

SEQ ID NO: 4527017 - DNA, 25 bp, Homo sapien
cgggccgctcgctgtggcgatctcc

SEQ ID NO: 4527018 - DNA, 25 bp, Homo sapien
gctcgctgtggcgatctccgccagg

SEQ ID NO: 4527019 - DNA, 25 bp, Homo sapien
ctggccccaccggaagcgggccgca

SEQ ID NO: 4527020 - DNA, 25 bp, Homo sapien
tggccccaccggaagcgggccgcac

SEQ ID NO: 4527021 - DNA, 25 bp, Homo sapien
tctggcatgagctattctttcagcc

SEQ ID NO: 4527022 - DNA, 25 bp, Homo sapien
gcatgagctattctttcagcctgga

SEQ ID NO: 4527023 - DNA, 25 bp, Homo sapien
gagactctggcatgagctattcttt

SEQ ID NO: 4527024 - DNA, 25 bp, Homo sapien
gctattctttcagcctggaatccac

SEQ ID NO: 4527025 - DNA, 25 bp, Homo sapien
cttgaagggctggagtcatgattag

SEQ ID NO: 4527026 - DNA, 25 bp, Homo sapien
caggtcataagtcataagggtactt

SEQ ID NO: 4527027 - DNA, 25 bp, Homo sapien
atgattagagaactcctgaaaatgc

SEQ ID NO: 4527028 - DNA, 25 bp, Homo sapien
tcataagggtactttgacttgaagg

SEQ ID NO: 4527029 - DNA, 25 bp, Homo sapien
ctccagattctcacataactttgtt

SEQ ID NO: 4527030 - DNA, 25 bp, Homo sapien
ttatgacagtacttcccagacttct

SEQ ID NO: 4527031 - DNA, 25 bp, Homo sapien
tcacccacagaacttactctaaaac

SEQ ID NO: 4527032 - DNA, 25 bp, Homo sapien
ccaccgactatattagacagatcac

SEQ ID NO: 4527033 - DNA, 25 bp, Homo sapien
taacaccccaccgactatattagac

SEQ ID NO: 4527034 - DNA, 25 bp, Homo sapien
taatagtctgtcagaccacagcgca

SEQ ID NO: 4527035 - DNA, 25 bp, Homo sapien
ggaatgtattactctataaccagaa

SEQ ID NO: 4527036 - DNA, 25 bp, Homo sapien
cacttggagtttgtgcattagggca

SEQ ID NO: 4527037 - DNA, 25 bp, Homo sapien
ttacctctgcaaggtggaattagag

SEQ ID NO: 4527038 - DNA, 25 bp, Homo sapien
gatgaaaaccagatatgcacttgga

SEQ ID NO: 4527039 - DNA, 25 bp, Homo sapien
taccagcgccagataaacagttgag

SEQ ID NO: 4527040 - DNA, 25 bp, Homo sapien
tccgtgatgccaactgggtgtgact

SEQ ID NO: 4527041 - DNA, 25 bp, Homo sapien
catctgctgagcctttgtaaagggc

SEQ ID NO: 4527042 - DNA, 25 bp, Homo sapien
gtgtgacttcatgagcaaacctgct

SEQ ID NO: 4527043 - DNA, 25 bp, Homo sapien
catgagaataggcttttaagcccat

SEQ ID NO: 4527044 - DNA, 25 bp, Homo sapien
cttcatgagaataggcttttaagcc

SEQ ID NO: 4527045 - DNA, 25 bp, Homo sapien
gaaaaccccttcatgagaataggct

SEQ ID NO: 4527046 - DNA, 25 bp, Homo sapien
tgataaagatgaaaaccccttcatg

SEQ ID NO: 4527047 - DNA, 25 bp, Homo sapien
ggcaatcacatctattttaggtgca

SEQ ID NO: 4527048 - DNA, 25 bp, Homo sapien
tcaggtctccataagagggagtccc

SEQ ID NO: 4527049 - DNA, 25 bp, Homo sapien
ccctccagaattgtgtgatttgcct

SEQ ID NO: 4527050 - DNA, 25 bp, Homo sapien
tgtgaaggacgcttctagtgaatcc

SEQ ID NO: 4527051 - DNA, 25 bp, Homo sapien
cagtggaattaaacgccttgtcaac

SEQ ID NO: 4527052 - DNA, 25 bp, Homo sapien
ccctagtgctcataataagatcgtt

SEQ ID NO: 4527053 - DNA, 25 bp, Homo sapien
ggaaagcttcagttcccctagtgct

SEQ ID NO: 4527054 - DNA, 25 bp, Homo sapien
gttggaaatgctgcgtatagctagt

SEQ ID NO: 4527055 - DNA, 25 bp, Homo sapien
tactagttgaatgaacgacatttag

SEQ ID NO: 4527056 - DNA, 25 bp, Homo sapien
cacatgtcacaaggtaaattatgaa

SEQ ID NO: 4527057 - DNA, 25 bp, Homo sapien
ggtttctggtcatatgactcttact

SEQ ID NO: 4527058 - DNA, 25 bp, Homo sapien
tcagtcattaggtgttgtgcaaatg

SEQ ID NO: 4527059 - DNA, 25 bp, Homo sapien
gatgttttaattaatatacataatg

SEQ ID NO: 4527060 - DNA, 25 bp, Homo sapien
gattaagatgttttaattaatatac

SEQ ID NO: 4527061 - DNA, 25 bp, Homo sapien
taagagatcaacgtcgggatgactc

SEQ ID NO: 4527062 - DNA, 25 bp, Homo sapien
taatggcattttctataggacactg

SEQ ID NO: 4527063 - DNA, 25 bp, Homo sapien
tccaagacttggatgccacccagtg

SEQ ID NO: 4527064 - DNA, 25 bp, Homo sapien
aagctgggttttctcgtgtaccaag

SEQ ID NO: 4527065 - DNA, 25 bp, Homo sapien
tcatggttggaattcagcatattca

SEQ ID NO: 4527066 - DNA, 25 bp, Homo sapien
gagaagagtcttgtcatgaactcag

SEQ ID NO: 4527067 - DNA, 25 bp, Homo sapien
gagtcttgtcatgaactcagaaaca

SEQ ID NO: 4527068 - DNA, 25 bp, Homo sapien
ctcagaaacatcaggcaactcatgg

SEQ ID NO: 4527069 - DNA, 25 bp, Homo sapien
gagcctggcattgggactagtgact

SEQ ID NO: 4527070 - DNA, 25 bp, Homo sapien
tggcattgggactagtgactgtgat

SEQ ID NO: 4527071 - DNA, 25 bp, Homo sapien
gcctggcattgggactagtgactgt

SEQ ID NO: 4527072 - DNA, 25 bp, Homo sapien
ttgggactagtgactgtgatggcca

SEQ ID NO: 4527073 - DNA, 25 bp, Homo sapien
tctacgaacactgttgtcaacacct

SEQ ID NO: 4527074 - DNA, 25 bp, Homo sapien
agaagccactgggtagtaagtactt

SEQ ID NO: 4527075 - DNA, 25 bp, Homo sapien
catttgttgcagatcagcagtactt

SEQ ID NO: 4527076 - DNA, 25 bp, Homo sapien
taacatttgttgcagatcagcagta

SEQ ID NO: 4527077 - DNA, 25 bp, Homo sapien
tcacaaaggatctgagggcagccat

SEQ ID NO: 4527078 - DNA, 25 bp, Homo sapien
cctcttagttgtctttttgatgatc

SEQ ID NO: 4527079 - DNA, 25 bp, Homo sapien
gggcttcacaaaggatctgagggca

SEQ ID NO: 4527080 - DNA, 25 bp, Homo sapien
tgactggtgccagataaacctctta

SEQ ID NO: 4527081 - DNA, 25 bp, Homo sapien
catgtcaggatcacttgtgttgacc

SEQ ID NO: 4527082 - DNA, 25 bp, Homo sapien
tctcatgtcaggatcacttgtgttg

SEQ ID NO: 4527083 - DNA, 25 bp, Homo sapien
ccgtctcatgtcaggatcacttgtg

SEQ ID NO: 4527084 - DNA, 25 bp, Homo sapien
tgtcaggatcacttgtgttgaccac

SEQ ID NO: 4527085 - DNA, 25 bp, Homo sapien
tctggcaatgggattggtgatctga

SEQ ID NO: 4527086 - DNA, 25 bp, Homo sapien
ggcaagctaactgctcttttcaggt

SEQ ID NO: 4527087 - DNA, 25 bp, Homo sapien
gaagcatcaagcactggagcactag

SEQ ID NO: 4527088 - DNA, 25 bp, Homo sapien
gagcactagatacacttccacggaa

SEQ ID NO: 4527089 - DNA, 25 bp, Homo sapien
ggttcattagaaagtctgtccagcc

SEQ ID NO: 4527090 - DNA, 25 bp, Homo sapien
gggttcattagaaagtctgtccagc

SEQ ID NO: 4527091 - DNA, 25 bp, Homo sapien
ttcattagaaagtctgtccagcccc

SEQ ID NO: 4527092 - DNA, 25 bp, Homo sapien
ttgggttcattagaaagtctgtcca

SEQ ID NO: 4527093 - DNA, 25 bp, Homo sapien
caaatctgtaagctggagatacaac

SEQ ID NO: 4527094 - DNA, 25 bp, Homo sapien
gatccagaaggtatatcatgaacca

SEQ ID NO: 4527095 - DNA, 25 bp, Homo sapien
cgaagtgatatccactcgaacggga

SEQ ID NO: 4527096 - DNA, 25 bp, Homo sapien
ggagatacaacttccactacataag

SEQ ID NO: 4527097 - DNA, 25 bp, Homo sapien
tcaagggcacttagatgatctgaac

SEQ ID NO: 4527098 - DNA, 25 bp, Homo sapien
gaggttgaataaccactcaagggca

SEQ ID NO: 4527099 - DNA, 25 bp, Homo sapien
gataccatttgctggtgtacgaacc

SEQ ID NO: 4527100 - DNA, 25 bp, Homo sapien
tacgcgtgcctagacatttcaaaag

SEQ ID NO: 4527101 - DNA, 25 bp, Homo sapien
taaggaaaccgacgtgctcttctcc

SEQ ID NO: 4527102 - DNA, 25 bp, Homo sapien
ttgaagcgatctcctatgccgaccc

SEQ ID NO: 4527103 - DNA, 25 bp, Homo sapien
gaggcttcacccctggaacaactgc

SEQ ID NO: 4527104 - DNA, 25 bp, Homo sapien
gccgagatccagtcctgaggcttca

SEQ ID NO: 4527105 - DNA, 25 bp, Homo sapien
agctctggacatcccccgatagcag

SEQ ID NO: 4527106 - DNA, 25 bp, Homo sapien
tccgagctctggacatcccccgata

SEQ ID NO: 4527107 - DNA, 25 bp, Homo sapien
cgagctctggacatcccccgatagc

SEQ ID NO: 4527108 - DNA, 25 bp, Homo sapien
ctctggacatcccccgatagcagca

SEQ ID NO: 4527109 - DNA, 25 bp, Homo sapien
cgccgctggcggcttgatgttgtca

SEQ ID NO: 4527110 - DNA, 25 bp, Homo sapien
gccgccgctggcggcttgatgttgt

SEQ ID NO: 4527111 - DNA, 25 bp, Homo sapien
ccgccgccgctggcggcttgatgtt

SEQ ID NO: 4527112 - DNA, 25 bp, Homo sapien
gccgctggcggcttgatgttgtcat

SEQ ID NO: 4527113 - DNA, 25 bp, Homo sapien
gaatgcttgggaaacttcagccgct

SEQ ID NO: 4527114 - DNA, 25 bp, Homo sapien
gcttgtcagcactgatataatggtg

SEQ ID NO: 4527115 - DNA, 25 bp, Homo sapien
ttcagccgctctaatctccaaatac

SEQ ID NO: 4527116 - DNA, 25 bp, Homo sapien
taacgaggattatacctttagccac

SEQ ID NO: 4527117 - DNA, 25 bp, Homo sapien
cactaggactgtggatttggctttc

SEQ ID NO: 4527118 - DNA, 25 bp, Homo sapien
tccctatgaagtcctctgaaatcgg

SEQ ID NO: 4527119 - DNA, 25 bp, Homo sapien
tgggtcatccgtcattctcagaggg

SEQ ID NO: 4527120 - DNA, 25 bp, Homo sapien
taaatgcttgtcatccactaggact

SEQ ID NO: 4527121 - DNA, 25 bp, Homo sapien
tctctgcttcttgtgggatctggac

SEQ ID NO: 4527122 - DNA, 25 bp, Homo sapien
cttttctgcatttgttgggagattt

SEQ ID NO: 4527123 - DNA, 25 bp, Homo sapien
ttcttgtgggatctggactactcat

SEQ ID NO: 4527124 - DNA, 25 bp, Homo sapien
tgcatttgttgggagatttctctgc

SEQ ID NO: 4527125 - DNA, 25 bp, Homo sapien
catagtttgaagtcttaggtttaag

SEQ ID NO: 4527126 - DNA, 25 bp, Homo sapien
tgcacctggcctccccagtgttttc

SEQ ID NO: 4527127 - DNA, 25 bp, Homo sapien
atttttgtgtatggttgagagaaga

SEQ ID NO: 4527128 - DNA, 25 bp, Homo sapien
gagagacagaccctctcatattgtt

SEQ ID NO: 4527129 - DNA, 25 bp, Homo sapien
gtcattagcgactttccagaagcag

SEQ ID NO: 4527130 - DNA, 25 bp, Homo sapien
tgtgatgtcattccgatgtgccgca

SEQ ID NO: 4527131 - DNA, 25 bp, Homo sapien
gcagttccatgtttacaagcttgtg

SEQ ID NO: 4527132 - DNA, 25 bp, Homo sapien
tctaactcggttggtctggaatggg

SEQ ID NO: 4527133 - DNA, 25 bp, Homo sapien
caattaatgatccatgtgtgaggga

SEQ ID NO: 4527134 - DNA, 25 bp, Homo sapien
tatgcagtcttacaattaatgatcc

SEQ ID NO: 4527135 - DNA, 25 bp, Homo sapien
tacattaattctgcgacaaaatatg

SEQ ID NO: 4527136 - DNA, 25 bp, Homo sapien
gcgacaaaatatgcagtcttacaat

SEQ ID NO: 4527137 - DNA, 25 bp, Homo sapien
catgtagatgtttgattgttccagc

SEQ ID NO: 4527138 - DNA, 25 bp, Homo sapien
tgttgtgacaccattgaggaaaatc

SEQ ID NO: 4527139 - DNA, 25 bp, Homo sapien
taggtcaattttgggagtactacca

SEQ ID NO: 4527140 - DNA, 25 bp, Homo sapien
caaagtcagctgtaattccgatagg

SEQ ID NO: 4527141 - DNA, 25 bp, Homo sapien
tatcctcatagacttctaacagagc

SEQ ID NO: 4527142 - DNA, 25 bp, Homo sapien
gataactggaacaccaatcattgac

SEQ ID NO: 4527143 - DNA, 25 bp, Homo sapien
tgcaatcttgcgtatatgccaatgt

SEQ ID NO: 4527144 - DNA, 25 bp, Homo sapien
acctactggccaggacttatcctca

SEQ ID NO: 4527145 - DNA, 25 bp, Homo sapien
gctcacaaaacgtttactaactggc

SEQ ID NO: 4527146 - DNA, 25 bp, Homo sapien
cttcatttaacttgggatacctctg

SEQ ID NO: 4527147 - DNA, 25 bp, Homo sapien
gggagctcagaaagtcctacattcc

SEQ ID NO: 4527148 - DNA, 25 bp, Homo sapien
cagacacactggttactttattggg

SEQ ID NO: 4527149 - DNA, 25 bp, Homo sapien
tgtcaagggtgacagtaatgcctac

SEQ ID NO: 4527150 - DNA, 25 bp, Homo sapien
taagcctcagattagatttttgcca

SEQ ID NO: 4527151 - DNA, 25 bp, Homo sapien
tgctttagtagccaagatacacagt

SEQ ID NO: 4527152 - DNA, 25 bp, Homo sapien
taaggttaggaaggaagccagtatc

SEQ ID NO: 4527153 - DNA, 25 bp, Homo sapien
aatgctgaaagagctcatgagtagg

SEQ ID NO: 4527154 - DNA, 25 bp, Homo sapien
tgaaagtgttgaatggatcacaaac

SEQ ID NO: 4527155 - DNA, 25 bp, Homo sapien
cacaaactagatcaagtgattcagc

SEQ ID NO: 4527156 - DNA, 25 bp, Homo sapien
gtaaagctctgacttaggcaagttg

SEQ ID NO: 4527157 - DNA, 25 bp, Homo sapien
tagctgttgtacgtttactgagatc

SEQ ID NO: 4527158 - DNA, 25 bp, Homo sapien
attaactagctgttgtacgtttact

SEQ ID NO: 4527159 - DNA, 25 bp, Homo sapien
gctgttgtacgtttactgagatctt

SEQ ID NO: 4527160 - DNA, 25 bp, Homo sapien
taactagctgttgtacgtttactga

SEQ ID NO: 4527161 - DNA, 25 bp, Homo sapien
gactttattatcgtggagcagagcc

SEQ ID NO: 4527162 - DNA, 25 bp, Homo sapien
aaggatttagctcggcttctaggcc

SEQ ID NO: 4527163 - DNA, 25 bp, Homo sapien
taggccagccttcaggaatataaaa

SEQ ID NO: 4527164 - DNA, 25 bp, Homo sapien
tcagagtcccctaatcctataccag

SEQ ID NO: 4527165 - DNA, 25 bp, Homo sapien
tggatgctacgtcctcaaaagacat

SEQ ID NO: 4527166 - DNA, 25 bp, Homo sapien
taatcagaatttttccacgtcaagt

SEQ ID NO: 4527167 - DNA, 25 bp, Homo sapien
tctggcttcaaaggtattaatggct

SEQ ID NO: 4527168 - DNA, 25 bp, Homo sapien
gcagctacccattctacaagtcaaa

SEQ ID NO: 4527169 - DNA, 25 bp, Homo sapien
agtacctggcagctcaatgcctgtg

SEQ ID NO: 4527170 - DNA, 25 bp, Homo sapien
cacttaacattaacgagcatatagc

SEQ ID NO: 4527171 - DNA, 25 bp, Homo sapien
ttttattacacaccaagtacctggc

SEQ ID NO: 4527172 - DNA, 25 bp, Homo sapien
caagtaatctgtttattatggagag

SEQ ID NO: 4527173 - DNA, 25 bp, Homo sapien
gttttatgaccaattacagtctata

SEQ ID NO: 4527174 - DNA, 25 bp, Homo sapien
gcgccttggcccctttcatgaaatt

SEQ ID NO: 4527175 - DNA, 25 bp, Homo sapien
catgaaattaccagtacacagcagc

SEQ ID NO: 4527176 - DNA, 25 bp, Homo sapien
ttatagttgtactgagattttattg

SEQ ID NO: 4527177 - DNA, 25 bp, Homo sapien
cctttgctcagatgcctgtcaggca

SEQ ID NO: 4527178 - DNA, 25 bp, Homo sapien
caagtgcttgaaggactactgcaga

SEQ ID NO: 4527179 - DNA, 25 bp, Homo sapien
tacctgacggaaggtgcaatcgaca

SEQ ID NO: 4527180 - DNA, 25 bp, Homo sapien
ccattagaggaggtagtgacacaaa

SEQ ID NO: 4527181 - DNA, 25 bp, Homo sapien
caacataagaaaatagctgcacaca

SEQ ID NO: 4527182 - DNA, 25 bp, Homo sapien
tcaacataagaaaatagctgcacac

SEQ ID NO: 4527183 - DNA, 25 bp, Homo sapien
tttcagtcttttcaacataagaaaa

SEQ ID NO: 4527184 - DNA, 25 bp, Homo sapien
taaactttcagtcttttcaacataa

SEQ ID NO: 4527185 - DNA, 25 bp, Homo sapien
gatgattggtcttggtggttcctag

SEQ ID NO: 4527186 - DNA, 25 bp, Homo sapien
tatgcaggattgcattaaaatccag

SEQ ID NO: 4527187 - DNA, 25 bp, Homo sapien
catagtgcactttcacctcaatgaa

SEQ ID NO: 4527188 - DNA, 25 bp, Homo sapien
tccagtagttcttaatgttaccaaa

SEQ ID NO: 4527189 - DNA, 25 bp, Homo sapien
actgtaataaataagcatctacatc

SEQ ID NO: 4527190 - DNA, 25 bp, Homo sapien
taactgtaataaataagcatctaca

SEQ ID NO: 4527191 - DNA, 25 bp, Homo sapien
tcaatgtaactgtaataaataagca

SEQ ID NO: 4527192 - DNA, 25 bp, Homo sapien
tgtaactgtaataaataagcatcta

SEQ ID NO: 4527193 - DNA, 25 bp, Homo sapien
tgagcccagcttgacaatagcctct

SEQ ID NO: 4527194 - DNA, 25 bp, Homo sapien
tatctgcatttgttcagcacagggc

SEQ ID NO: 4527195 - DNA, 25 bp, Homo sapien
cagtgctatattcacttgagcccag

SEQ ID NO: 4527196 - DNA, 25 bp, Homo sapien
gaatgtgttggttcctatgctcaaa

SEQ ID NO: 4527197 - DNA, 25 bp, Homo sapien
tacagaatgcaacaaccctttagag

SEQ ID NO: 4527198 - DNA, 25 bp, Homo sapien
catcattaagaattctataggccag

SEQ ID NO: 4527199 - DNA, 25 bp, Homo sapien
cgtcatgtatgctctaaaaacctaa

SEQ ID NO: 4527200 - DNA, 25 bp, Homo sapien
gaaagcaaatttcagtcataaggaa

SEQ ID NO: 4527201 - DNA, 25 bp, Homo sapien
ctgaacttatcttggagtagaagcc

SEQ ID NO: 4527202 - DNA, 25 bp, Homo sapien
gattatccctcaaggctacctaggt

SEQ ID NO: 4527203 - DNA, 25 bp, Homo sapien
ccatttatgatagcagtatgcccgg

SEQ ID NO: 4527204 - DNA, 25 bp, Homo sapien
taagcttctggttggtcactgttgg

SEQ ID NO: 4527205 - DNA, 25 bp, Homo sapien
gatgctgtccttattggattctcaa

SEQ ID NO: 4527206 - DNA, 25 bp, Homo sapien
ttgctgccaaggtcacagttacacg

SEQ ID NO: 4527207 - DNA, 25 bp, Homo sapien
gcctaactaccaatgttttctggag

SEQ ID NO: 4527208 - DNA, 25 bp, Homo sapien
tatcctctagcatagcatttcaggg

SEQ ID NO: 4527209 - DNA, 25 bp, Homo sapien
agtatatcctggaaccaaagtaaga

SEQ ID NO: 4527210 - DNA, 25 bp, Homo sapien
cctgttcccataatccacttaattg

SEQ ID NO: 4527211 - DNA, 25 bp, Homo sapien
cccataatccacttaattgttgttt

SEQ ID NO: 4527212 - DNA, 25 bp, Homo sapien
agtaagatggttttcctgttcccat

SEQ ID NO: 4527213 - DNA, 25 bp, Homo sapien
taaacatcaacaccggactctcagg

SEQ ID NO: 4527214 - DNA, 25 bp, Homo sapien
taatgtctaggtaaaggaccccgca

SEQ ID NO: 4527215 - DNA, 25 bp, Homo sapien
gaccaggcgtttggaacatttggac

SEQ ID NO: 4527216 - DNA, 25 bp, Homo sapien
taaaacatttgggaacgtggagaga

SEQ ID NO: 4527217 - DNA, 25 bp, Homo sapien
tagttctgaccaccaccttttaatg

SEQ ID NO: 4527218 - DNA, 25 bp, Homo sapien
tctgaccaccaccttttaatgactg

SEQ ID NO: 4527219 - DNA, 25 bp, Homo sapien
atagttctgaccaccaccttttaat

SEQ ID NO: 4527220 - DNA, 25 bp, Homo sapien
gttctgaccaccaccttttaatgac

SEQ ID NO: 4527221 - DNA, 25 bp, Homo sapien
gaatcaagattcagattagcactta

SEQ ID NO: 4527222 - DNA, 25 bp, Homo sapien
catggagcccaatctactatgtact

SEQ ID NO: 4527223 - DNA, 25 bp, Homo sapien
cagaaaccttgcatgtctcatggag

SEQ ID NO: 4527224 - DNA, 25 bp, Homo sapien
taaaagatgatactttccctcccaa

SEQ ID NO: 4527225 - DNA, 25 bp, Homo sapien
acacagcagccaagtgagatatatt

SEQ ID NO: 4527226 - DNA, 25 bp, Homo sapien
tggatgggccataatttgacctcct

SEQ ID NO: 4527227 - DNA, 25 bp, Homo sapien
atatggatgggccataatttgacct

SEQ ID NO: 4527228 - DNA, 25 bp, Homo sapien
ataaaaatatggatgggccataatt

SEQ ID NO: 4527229 - DNA, 25 bp, Homo sapien
ggatgggccataatttgacctcctt

SEQ ID NO: 4527230 - DNA, 25 bp, Homo sapien
gaaggcaatctaccacaacgccaag

SEQ ID NO: 4527231 - DNA, 25 bp, Homo sapien
caggaaggcaatctaccacaacgcc

SEQ ID NO: 4527232 - DNA, 25 bp, Homo sapien
cacaggaaggcaatctaccacaacg

SEQ ID NO: 4527233 - DNA, 25 bp, Homo sapien
caatctaccacaacgccaagatctt

SEQ ID NO: 4527234 - DNA, 25 bp, Homo sapien
tagcattgccttagagagctgattt

SEQ ID NO: 4527235 - DNA, 25 bp, Homo sapien
gaatagcattgccttagagagctga

SEQ ID NO: 4527236 - DNA, 25 bp, Homo sapien
aaaagaatagcattgccttagagag

SEQ ID NO: 4527237 - DNA, 25 bp, Homo sapien
aagaatagcattgccttagagagct

SEQ ID NO: 4527238 - DNA, 25 bp, Homo sapien
gaataatgaagaaggttcacctgag

SEQ ID NO: 4527239 - DNA, 25 bp, Homo sapien
tctctactgaagctacatataggca

SEQ ID NO: 4527240 - DNA, 25 bp, Homo sapien
aatttaagccatactgtctctactg

SEQ ID NO: 4527241 - DNA, 25 bp, Homo sapien
taggtaagaatgacagtcaggaaag

SEQ ID NO: 4527242 - DNA, 25 bp, Homo sapien
aataagctacaagttcacttatact

SEQ ID NO: 4527243 - DNA, 25 bp, Homo sapien
tgtctcagggagttactatgactca

SEQ ID NO: 4527244 - DNA, 25 bp, Homo sapien
tctactggctaacttgtcattctgg

SEQ ID NO: 4527245 - DNA, 25 bp, Homo sapien
tcaagattataacaggaacaaagtt

SEQ ID NO: 4527246 - DNA, 25 bp, Homo sapien
tctgctagtggaatatggcaaagaa

SEQ ID NO: 4527247 - DNA, 25 bp, Homo sapien
tctttctgcgatagatcactttacg

SEQ ID NO: 4527248 - DNA, 25 bp, Homo sapien
cgaagtttatctgggcttttcacag

SEQ ID NO: 4527249 - DNA, 25 bp, Homo sapien
aacccactatattttgatgatgggc

SEQ ID NO: 4527250 - DNA, 25 bp, Homo sapien
gaatcactggagttaaccaaatatg

SEQ ID NO: 4527251 - DNA, 25 bp, Homo sapien
tgtaagcagccaactgttttggaga

SEQ ID NO: 4527252 - DNA, 25 bp, Homo sapien
taagcagccaactgttttggagatt

SEQ ID NO: 4527253 - DNA, 25 bp, Homo sapien
tatgtaagcagccaactgttttgga

SEQ ID NO: 4527254 - DNA, 25 bp, Homo sapien
tatttatgtaagcagccaactgttt

SEQ ID NO: 4527255 - DNA, 25 bp, Homo sapien
gtagatagttgatgttagaaacaaa

SEQ ID NO: 4527256 - DNA, 25 bp, Homo sapien
tcagcactccggcaaaaagctttct

SEQ ID NO: 4527257 - DNA, 25 bp, Homo sapien
cttggtgccgcaaagaagaatcagc

SEQ ID NO: 4527258 - DNA, 25 bp, Homo sapien
aaaaatgaaagtagatagttgatgt

SEQ ID NO: 4527259 - DNA, 25 bp, Homo sapien
tactcctgagttttttgctaactca

SEQ ID NO: 4527260 - DNA, 25 bp, Homo sapien
ctcctgagttttttgctaactcatt

SEQ ID NO: 4527261 - DNA, 25 bp, Homo sapien
actcctgagttttttgctaactcat

SEQ ID NO: 4527262 - DNA, 25 bp, Homo sapien
tgggtggtttggactatctgattaa

SEQ ID NO: 4527263 - DNA, 25 bp, Homo sapien
cactaactggtatgacctgtctggc

SEQ ID NO: 4527264 - DNA, 25 bp, Homo sapien
tgagtgagtactcctaaggctactg

SEQ ID NO: 4527265 - DNA, 25 bp, Homo sapien
cagttactagtaacaacagggtggg

SEQ ID NO: 4527266 - DNA, 25 bp, Homo sapien
gagattaagcagaattattatcctc

SEQ ID NO: 4527267 - DNA, 25 bp, Homo sapien
ttcaaccagagatatctagagacct

SEQ ID NO: 4527268 - DNA, 25 bp, Homo sapien
tattatcctcccattgtttaaacaa

SEQ ID NO: 4527269 - DNA, 25 bp, Homo sapien
tcaacttaattctgggagattaagc

SEQ ID NO: 4527270 - DNA, 25 bp, Homo sapien
cttattagtgaaattagagatcttt

SEQ ID NO: 4527271 - DNA, 25 bp, Homo sapien
tattagtgaaattagagatcttttt

SEQ ID NO: 4527272 - DNA, 25 bp, Homo sapien
gttcttattagtgaaattagagatc

SEQ ID NO: 4527273 - DNA, 25 bp, Homo sapien
tcttattagtgaaattagagatctt

SEQ ID NO: 4527274 - DNA, 25 bp, Homo sapien
atcaatgaaatgatcctcaatctta

SEQ ID NO: 4527275 - DNA, 25 bp, Homo sapien
atgaaatgatcctcaatcttattac

SEQ ID NO: 4527276 - DNA, 25 bp, Homo sapien
caatgaaatgatcctcaatcttatt

SEQ ID NO: 4527277 - DNA, 25 bp, Homo sapien
gaaatgatcctcaatcttattacaa

SEQ ID NO: 4527278 - DNA, 25 bp, Homo sapien
cattctttaattggaaccagtgaca

SEQ ID NO: 4527279 - DNA, 25 bp, Homo sapien
gacttgtcctatgcctaatccttaa

SEQ ID NO: 4527280 - DNA, 25 bp, Homo sapien
caatgagaggaaccaaaattggact

SEQ ID NO: 4527281 - DNA, 25 bp, Homo sapien
aaaactgtgcaactaaatcactggg

SEQ ID NO: 4527282 - DNA, 25 bp, Homo sapien
ttccaagatggccattataatagga

SEQ ID NO: 4527283 - DNA, 25 bp, Homo sapien
tagagatggcaagtccattccaaga

SEQ ID NO: 4527284 - DNA, 25 bp, Homo sapien
caagaagtagagatggcaagtccat

SEQ ID NO: 4527285 - DNA, 25 bp, Homo sapien
gacatcaagaagtagagatggcaag

SEQ ID NO: 4527286 - DNA, 25 bp, Homo sapien
ggaagaagttcaattgctgaataga

SEQ ID NO: 4527287 - DNA, 25 bp, Homo sapien
gatagacttaagctctgacatactg

SEQ ID NO: 4527288 - DNA, 25 bp, Homo sapien
tagttaattaaaagccagagattga

SEQ ID NO: 4527289 - DNA, 25 bp, Homo sapien
gacctaattatacgttgtccacaag

SEQ ID NO: 4527290 - DNA, 25 bp, Homo sapien
tgatgtaggcatgcagaaagtaaaa

SEQ ID NO: 4527291 - DNA, 25 bp, Homo sapien
gaatcttgaaggtgaaaacagttta

SEQ ID NO: 4527292 - DNA, 25 bp, Homo sapien
caaagggtatgtgtagttatctctc

SEQ ID NO: 4527293 - DNA, 25 bp, Homo sapien
cagtcattcccactatggcaaaggg

SEQ ID NO: 4527294 - DNA, 25 bp, Homo sapien
tagttgtgtacaaagaaactttctc

SEQ ID NO: 4527295 - DNA, 25 bp, Homo sapien
tggaactgatttgctacaccaagac

SEQ ID NO: 4527296 - DNA, 25 bp, Homo sapien
taatggatgctgtatggtgttcaag

SEQ ID NO: 4527297 - DNA, 25 bp, Homo sapien
tccactgtcagaactatagccccat

SEQ ID NO: 4527298 - DNA, 25 bp, Homo sapien
tgctgcacgttaaactatttcctgg

SEQ ID NO: 4527299 - DNA, 25 bp, Homo sapien
ttcctgctgtgaaattctcaccatc

SEQ ID NO: 4527300 - DNA, 25 bp, Homo sapien
tcctgctgtgaaattctcaccatca

SEQ ID NO: 4527301 - DNA, 25 bp, Homo sapien
cagatccttaaacttcccaatcttt

SEQ ID NO: 4527302 - DNA, 25 bp, Homo sapien
cctgttcagatccttaaacttccca

SEQ ID NO: 4527303 - DNA, 25 bp, Homo sapien
tctactatacttgttaggtttattc

SEQ ID NO: 4527304 - DNA, 25 bp, Homo sapien
ttgtctactatacttgttaggttta

SEQ ID NO: 4527305 - DNA, 25 bp, Homo sapien
tgtctactatacttgttaggtttat

SEQ ID NO: 4527306 - DNA, 25 bp, Homo sapien
tagtctggccgaattcaagaatgaa

SEQ ID NO: 4527307 - DNA, 25 bp, Homo sapien
cactagggctaggtggccagctttt

SEQ ID NO: 4527308 - DNA, 25 bp, Homo sapien
tgggttcgtggtccagagtttgttc

SEQ ID NO: 4527309 - DNA, 25 bp, Homo sapien
aatgaagtcgtggaccttcacgctg

SEQ ID NO: 4527310 - DNA, 25 bp, Homo sapien
ttgtgatatcattgggaggtcctgg

SEQ ID NO: 4527311 - DNA, 25 bp, Homo sapien
accaatcgcccatagataatgaggg

SEQ ID NO: 4527312 - DNA, 25 bp, Homo sapien
ggttatgtggaaatactacaccact

SEQ ID NO: 4527313 - DNA, 25 bp, Homo sapien
catctgtggattcaatcaattccca

SEQ ID NO: 4527314 - DNA, 25 bp, Homo sapien
agttctgtggctgcactgaagtgca

SEQ ID NO: 4527315 - DNA, 25 bp, Homo sapien
gtgtgagccacaccagttctgtggc

SEQ ID NO: 4527316 - DNA, 25 bp, Homo sapien
aggcatgacccactggccctaattt

SEQ ID NO: 4527317 - DNA, 25 bp, Homo sapien
tcaagctttcctcctaccgttggcc

SEQ ID NO: 4527318 - DNA, 25 bp, Homo sapien
tacgcccagcgcatagaaagcacaa

SEQ ID NO: 4527319 - DNA, 25 bp, Homo sapien
gcgaaacaaaagctcatccgtcagg

SEQ ID NO: 4527320 - DNA, 25 bp, Homo sapien
taagtgacaacaggttcggtccacg

SEQ ID NO: 4527321 - DNA, 25 bp, Homo sapien
caacagagttaaaagcgtggagcca

SEQ ID NO: 4527322 - DNA, 25 bp, Homo sapien
cgcctcatggtaccgcggcgcctca

SEQ ID NO: 4527323 - DNA, 25 bp, Homo sapien
cttctgggccgagtcccactcaggg

SEQ ID NO: 4527324 - DNA, 25 bp, Homo sapien
ggcttctgggccgagtcccactcag

SEQ ID NO: 4527325 - DNA, 25 bp, Homo sapien
cggcgcctcatggtaccgcggcgcc

SEQ ID NO: 4527326 - DNA, 25 bp, Homo sapien
ctgctgtgttaacacagaagaatct

SEQ ID NO: 4527327 - DNA, 25 bp, Homo sapien
ctggaactcagggaatctgctgtgt

SEQ ID NO: 4527328 - DNA, 25 bp, Homo sapien
agggaggctaaagaattaagacaag

SEQ ID NO: 4527329 - DNA, 25 bp, Homo sapien
ttaagacaagtaatggagtcctgga

SEQ ID NO: 4527330 - DNA, 25 bp, Homo sapien
cctaggtggagttaacgtagatagc

SEQ ID NO: 4527331 - DNA, 25 bp, Homo sapien
agatttctgcagtagcccggctaat

SEQ ID NO: 4527332 - DNA, 25 bp, Homo sapien
ggatactctgttggctttacctact

SEQ ID NO: 4527333 - DNA, 25 bp, Homo sapien
ttggaaactaaactgcttgaggctg

SEQ ID NO: 4527334 - DNA, 25 bp, Homo sapien
gatactggatcctggttgggcacag

SEQ ID NO: 4527335 - DNA, 25 bp, Homo sapien
gaaggaacctggcacctgtcaagca

SEQ ID NO: 4527336 - DNA, 25 bp, Homo sapien
cacaggaatctgaggcaacggaaga

SEQ ID NO: 4527337 - DNA, 25 bp, Homo sapien
tcataggtaagactcaaaagcggga

SEQ ID NO: 4527338 - DNA, 25 bp, Homo sapien
gaccaacatcagtttcagtagagaa

SEQ ID NO: 4527339 - DNA, 25 bp, Homo sapien
agcctgaccaacatcagtttcagta

SEQ ID NO: 4527340 - DNA, 25 bp, Homo sapien
tcagtttcagtagagaaaccccgtc

SEQ ID NO: 4527341 - DNA, 25 bp, Homo sapien
caagagcgaaactacgtctcggaaa

SEQ ID NO: 4527342 - DNA, 25 bp, Homo sapien
actcaactaagcaatggagtgttgc

SEQ ID NO: 4527343 - DNA, 25 bp, Homo sapien
ttgcagtgggagttgtaaataatgc

SEQ ID NO: 4527344 - DNA, 25 bp, Homo sapien
aataatgcttctaccatctgtagga

SEQ ID NO: 4527345 - DNA, 25 bp, Homo sapien
ttaagatcctatccgctttgccatc

SEQ ID NO: 4527346 - DNA, 25 bp, Homo sapien
gctcagccagccacataagtagttt

SEQ ID NO: 4527347 - DNA, 25 bp, Homo sapien
ttagccttccgtgttgctgggatca

SEQ ID NO: 4527348 - DNA, 25 bp, Homo sapien
tagtttccctatgcttgtaagccag

SEQ ID NO: 4527349 - DNA, 25 bp, Homo sapien
tttgtgacacctaggtcagcttgct

SEQ ID NO: 4527350 - DNA, 25 bp, Homo sapien
taatttgcctttgactgctcagacg

SEQ ID NO: 4527351 - DNA, 25 bp, Homo sapien
ggtcaagcacggtcattcagagtag

SEQ ID NO: 4527352 - DNA, 25 bp, Homo sapien
gagtagccgctcagtaacgttggca

SEQ ID NO: 4527353 - DNA, 25 bp, Homo sapien
cacttccatggaggacgtaggcctt

SEQ ID NO: 4527354 - DNA, 25 bp, Homo sapien
tccctcggtaagcacctctaggaac

SEQ ID NO: 4527355 - DNA, 25 bp, Homo sapien
gactcgctctagtccctcggtaagc

SEQ ID NO: 4527356 - DNA, 25 bp, Homo sapien
agtaggactcgctctagtccctcgg

SEQ ID NO: 4527357 - DNA, 25 bp, Homo sapien
accccggacaagtaggactcgctct

SEQ ID NO: 4527358 - DNA, 25 bp, Homo sapien
aggtatgaggaagaatccctatctc

SEQ ID NO: 4527359 - DNA, 25 bp, Homo sapien
ccctcagttaaaggaggttctatct

SEQ ID NO: 4527360 - DNA, 25 bp, Homo sapien
ggttctatctcagcttctcccctaa

SEQ ID NO: 4527361 - DNA, 25 bp, Homo sapien
tctcccctaactctatccaaaagaa

SEQ ID NO: 4527362 - DNA, 25 bp, Homo sapien
aaaaaggcgaaaggatgtgggtatg

SEQ ID NO: 4527363 - DNA, 25 bp, Homo sapien
aaaaggcgaaaggatgtgggtatgc

SEQ ID NO: 4527364 - DNA, 25 bp, Homo sapien
aaaggcgaaaggatgtgggtatgct

SEQ ID NO: 4527365 - DNA, 25 bp, Homo sapien
aggcgaaaggatgtgggtatgctgt

SEQ ID NO: 4527366 - DNA, 25 bp, Homo sapien
tatctcagaaagaggttaaggagat

SEQ ID NO: 4527367 - DNA, 25 bp, Homo sapien
tctcagaaagaggttaaggagattt

SEQ ID NO: 4527368 - DNA, 25 bp, Homo sapien
tcagaaagaggttaaggagattttc

SEQ ID NO: 4527369 - DNA, 25 bp, Homo sapien
ttatctcagaaagaggttaaggaga

SEQ ID NO: 4527370 - DNA, 25 bp, Homo sapien
tatgcatccgcctcacattggactg

SEQ ID NO: 4527371 - DNA, 25 bp, Homo sapien
aaaccagctttgcttcatgggactt

SEQ ID NO: 4527372 - DNA, 25 bp, Homo sapien
gacttgttaactataacctcgttga

SEQ ID NO: 4527373 - DNA, 25 bp, Homo sapien
tgctgtatgcatccgcctcacattg

SEQ ID NO: 4527374 - DNA, 25 bp, Homo sapien
tagcattgagtttcggtctttcacc

SEQ ID NO: 4527375 - DNA, 25 bp, Homo sapien
cattgacttcgctttttgtccccgg

SEQ ID NO: 4527376 - DNA, 25 bp, Homo sapien
gacgcatgttaagcaggtcctggaa

SEQ ID NO: 4527377 - DNA, 25 bp, Homo sapien
gagccaatgctggtcaatcgtagca

SEQ ID NO: 4527378 - DNA, 25 bp, Homo sapien
tttggatagccgcatgtgccggagc

SEQ ID NO: 4527379 - DNA, 25 bp, Homo sapien
aagtgcgctcgtaagtatatgctga

SEQ ID NO: 4527380 - DNA, 25 bp, Homo sapien
gttccatcatcaaagtgcgctcgta

SEQ ID NO: 4527381 - DNA, 25 bp, Homo sapien
gccggagcatctgggacctttgttc

SEQ ID NO: 4527382 - DNA, 25 bp, Homo sapien
tatacattctacttagggcaacaaa

SEQ ID NO: 4527383 - DNA, 25 bp, Homo sapien
ggcagaaatataagggctgtgtaat

SEQ ID NO: 4527384 - DNA, 25 bp, Homo sapien
actatattaagcagatgagaatctg

SEQ ID NO: 4527385 - DNA, 25 bp, Homo sapien
tcaaacatgcatcacatatacattc

SEQ ID NO: 4527386 - DNA, 25 bp, Homo sapien
ttgtatctcaaactcagctttctca

SEQ ID NO: 4527387 - DNA, 25 bp, Homo sapien
tcttgtatctcaaactcagctttct

SEQ ID NO: 4527388 - DNA, 25 bp, Homo sapien
tgtatctcaaactcagctttctcac

SEQ ID NO: 4527389 - DNA, 25 bp, Homo sapien
ctcttgtatctcaaactcagctttc

SEQ ID NO: 4527390 - DNA, 25 bp, Homo sapien
tacctccgcctcaatgcgtaagtga

SEQ ID NO: 4527391 - DNA, 25 bp, Homo sapien
gctactgtgaagatccgtatgctgc

SEQ ID NO: 4527392 - DNA, 25 bp, Homo sapien
cgtaagtgatataggaaggtggcta

SEQ ID NO: 4527393 - DNA, 25 bp, Homo sapien
tcatttggatactgttgtcttctaa

SEQ ID NO: 4527394 - DNA, 25 bp, Homo sapien
ggaatggtagtagcataagcatccc

SEQ ID NO: 4527395 - DNA, 25 bp, Homo sapien
caccacacatcaatgttgccctcag

SEQ ID NO: 4527396 - DNA, 25 bp, Homo sapien
catcatgcacaatccaccacacatc

SEQ ID NO: 4527397 - DNA, 25 bp, Homo sapien
gtagcataagcatccccccatcatg

SEQ ID NO: 4527398 - DNA, 25 bp, Homo sapien
cagtgcaagatgggcagcagttgtc

SEQ ID NO: 4527399 - DNA, 25 bp, Homo sapien
gagatgtttttagccaccagcagtg

SEQ ID NO: 4527400 - DNA, 25 bp, Homo sapien
agcagtgcaagatgggcagcagttg

SEQ ID NO: 4527401 - DNA, 25 bp, Homo sapien
tgcaagatgggcagcagttgtcact

SEQ ID NO: 4527402 - DNA, 25 bp, Homo sapien
ggtttgtatgagaaatggttagtac

SEQ ID NO: 4527403 - DNA, 25 bp, Homo sapien
cgacttgggcctttaggtttgtatg

SEQ ID NO: 4527404 - DNA, 25 bp, Homo sapien
tgggcctttaggtttgtatgagaaa

SEQ ID NO: 4527405 - DNA, 25 bp, Homo sapien
gcctttaggtttgtatgagaaatgg

SEQ ID NO: 4527406 - DNA, 25 bp, Homo sapien
tccaagcgcgggcatcttcgctttg

SEQ ID NO: 4527407 - DNA, 25 bp, Homo sapien
tcgctttgacgccagccattaggcc

SEQ ID NO: 4527408 - DNA, 25 bp, Homo sapien
actggatgaggtgggaaatgccctc

SEQ ID NO: 4527409 - DNA, 25 bp, Homo sapien
gatgaggtgggaaatgccctctctc

SEQ ID NO: 4527410 - DNA, 25 bp, Homo sapien
ccacgatgacagagcccacaatagt

SEQ ID NO: 4527411 - DNA, 25 bp, Homo sapien
gcagctaaagcttcaccgtagttct

SEQ ID NO: 4527412 - DNA, 25 bp, Homo sapien
gtcttcatctagtttcagtaataca

SEQ ID NO: 4527413 - DNA, 25 bp, Homo sapien
tcaccgtagttctctaggaagttcc

SEQ ID NO: 4527414 - DNA, 25 bp, Homo sapien
gaatgctcccagtactatctcaagt

SEQ ID NO: 4527415 - DNA, 25 bp, Homo sapien
caagttgatcagtcttcaaggaaga

SEQ ID NO: 4527416 - DNA, 25 bp, Homo sapien
tccttgagccacatatggtttcctt

SEQ ID NO: 4527417 - DNA, 25 bp, Homo sapien
cagaatgacagactccaccctttaa

SEQ ID NO: 4527418 - DNA, 25 bp, Homo sapien
tcctccaatcgaagcaaagcaaacc

SEQ ID NO: 4527419 - DNA, 25 bp, Homo sapien
gaagcaaagcaaaccgggctgcact

SEQ ID NO: 4527420 - DNA, 25 bp, Homo sapien
ggtccttcctccaatcgaagcaaag

SEQ ID NO: 4527421 - DNA, 25 bp, Homo sapien
agggacagcccacggataccatcac

SEQ ID NO: 4527422 - DNA, 25 bp, Homo sapien
aatgtacttgtagatcataccagct

SEQ ID NO: 4527423 - DNA, 25 bp, Homo sapien
gatcataccagctattaccatggct

SEQ ID NO: 4527424 - DNA, 25 bp, Homo sapien
gaagaaatgaacatcagagccagac

SEQ ID NO: 4527425 - DNA, 25 bp, Homo sapien
cagctattaccatggctacaatggc

SEQ ID NO: 4527426 - DNA, 25 bp, Homo sapien
ctccagttgggtgttcgaagtaatg

SEQ ID NO: 4527427 - DNA, 25 bp, Homo sapien
caaagaggtaacacatgagaaaaaa

SEQ ID NO: 4527428 - DNA, 25 bp, Homo sapien
tagtagcggaatcggggtctccagt

SEQ ID NO: 4527429 - DNA, 25 bp, Homo sapien
tgggtgttcgaagtaatgtttgcaa

SEQ ID NO: 4527430 - DNA, 25 bp, Homo sapien
ccaggtaggttccccattggctttg

SEQ ID NO: 4527431 - DNA, 25 bp, Homo sapien
atggaaagaattggggccacaagat

SEQ ID NO: 4527432 - DNA, 25 bp, Homo sapien
ggtaggttccccattggctttgctg

SEQ ID NO: 4527433 - DNA, 25 bp, Homo sapien
atggcagcagttagaagtaaagccc

SEQ ID NO: 4527434 - DNA, 25 bp, Homo sapien
tatgatgttatccttggcaatagct

SEQ ID NO: 4527435 - DNA, 25 bp, Homo sapien
cttgtagcagcctcggtgcacctgt

SEQ ID NO: 4527436 - DNA, 25 bp, Homo sapien
cctcagaaacggtatgatgttatcc

SEQ ID NO: 4527437 - DNA, 25 bp, Homo sapien
ggagccaataacaatcacccatggg

SEQ ID NO: 4527438 - DNA, 25 bp, Homo sapien
ttgtctctgagaacaaccccttcaa

SEQ ID NO: 4527439 - DNA, 25 bp, Homo sapien
catgcaccaaaaaggacaacattgc

SEQ ID NO: 4527440 - DNA, 25 bp, Homo sapien
ccttcaatacatgcaccaaaaagga

SEQ ID NO: 4527441 - DNA, 25 bp, Homo sapien
tgtctctgagaacaaccccttcaat

SEQ ID NO: 4527442 - DNA, 25 bp, Homo sapien
tcagactggatccataaaaaggata

SEQ ID NO: 4527443 - DNA, 25 bp, Homo sapien
cagactggatccataaaaaggatac

SEQ ID NO: 4527444 - DNA, 25 bp, Homo sapien
aaacaaaggaggtggtcaggatggc

SEQ ID NO: 4527445 - DNA, 25 bp, Homo sapien
gaggtggtcaggatggcaaggatag

SEQ ID NO: 4527446 - DNA, 25 bp, Homo sapien
ggtggtcaggatggcaaggatagta

SEQ ID NO: 4527447 - DNA, 25 bp, Homo sapien
aaaggaggtggtcaggatggcaagg

SEQ ID NO: 4527448 - DNA, 25 bp, Homo sapien
ctccagatctgtttgatccagccat

SEQ ID NO: 4527449 - DNA, 25 bp, Homo sapien
caatcggaatagacttctgagcatc

SEQ ID NO: 4527450 - DNA, 25 bp, Homo sapien
gatctccagatctgtttgatccagc

SEQ ID NO: 4527451 - DNA, 25 bp, Homo sapien
gagcatctttcagatctccagatct

SEQ ID NO: 4527452 - DNA, 25 bp, Homo sapien
gaagattcccaccagaagcgtgaag

SEQ ID NO: 4527453 - DNA, 25 bp, Homo sapien
tgaaggcttttcgatgatctctccc

SEQ ID NO: 4527454 - DNA, 25 bp, Homo sapien
taagctgcctaagacatcagaagat

SEQ ID NO: 4527455 - DNA, 25 bp, Homo sapien
tattcatggtttaagctgcctaaga

SEQ ID NO: 4527456 - DNA, 25 bp, Homo sapien
ggtcttagagcaaacgtcaatgtgt

SEQ ID NO: 4527457 - DNA, 25 bp, Homo sapien
aaagggtgcggttacccagcatgca

SEQ ID NO: 4527458 - DNA, 25 bp, Homo sapien
caatgtgtcttgatgaaagggtgcg

SEQ ID NO: 4527459 - DNA, 25 bp, Homo sapien
tgactcgagttacagaagaatcccc

SEQ ID NO: 4527460 - DNA, 25 bp, Homo sapien
caagaaagctgtgccgtagacacgc

SEQ ID NO: 4527461 - DNA, 25 bp, Homo sapien
caaaagaagacttgatggctccagc

SEQ ID NO: 4527462 - DNA, 25 bp, Homo sapien
ggccaagatggacacaatgacacag

SEQ ID NO: 4527463 - DNA, 25 bp, Homo sapien
aacttgttcacatagcgtacgccga

SEQ ID NO: 4527464 - DNA, 25 bp, Homo sapien
gctgcaaatgtggtaccaagataaa

SEQ ID NO: 4527465 - DNA, 25 bp, Homo sapien
aaagatttcaatggcaccaaggatg

SEQ ID NO: 4527466 - DNA, 25 bp, Homo sapien
cagaaagatttcaatggcaccaagg

SEQ ID NO: 4527467 - DNA, 25 bp, Homo sapien
cccagtgcccgggaaatcataaagt

SEQ ID NO: 4527468 - DNA, 25 bp, Homo sapien
tggcaccactccattagtggcaatg

SEQ ID NO: 4527469 - DNA, 25 bp, Homo sapien
cactccattagtggcaatggcactc

SEQ ID NO: 4527470 - DNA, 25 bp, Homo sapien
tccattagtggcaatggcactcatg

SEQ ID NO: 4527471 - DNA, 25 bp, Homo sapien
caccactccattagtggcaatggca

SEQ ID NO: 4527472 - DNA, 25 bp, Homo sapien
catgtaaggcgtaaaaaaaggatca

SEQ ID NO: 4527473 - DNA, 25 bp, Homo sapien
ttgtagacatgggaggtagacaccc

SEQ ID NO: 4527474 - DNA, 25 bp, Homo sapien
gcccaccacccatgtaaggcgtaaa

SEQ ID NO: 4527475 - DNA, 25 bp, Homo sapien
gcagcagcagataaggacaattgca

SEQ ID NO: 4527476 - DNA, 25 bp, Homo sapien
tagtgtaattggccatgcggttgag

SEQ ID NO: 4527477 - DNA, 25 bp, Homo sapien
ttgagtcagattagtgtaattggcc

SEQ ID NO: 4527478 - DNA, 25 bp, Homo sapien
ttggccatgcggttgaggagggaag

SEQ ID NO: 4527479 - DNA, 25 bp, Homo sapien
tccttgagtcagattagtgtaattg

SEQ ID NO: 4527480 - DNA, 25 bp, Homo sapien
taagcatttcgagctttcttatgtc

SEQ ID NO: 4527481 - DNA, 25 bp, Homo sapien
gagataagcatttcgagctttctta

SEQ ID NO: 4527482 - DNA, 25 bp, Homo sapien
catttcgagctttcttatgtccgtc

SEQ ID NO: 4527483 - DNA, 25 bp, Homo sapien
tttcgagctttcttatgtccgtcgt

SEQ ID NO: 4527484 - DNA, 25 bp, Homo sapien
gcaagtaagctgtgactgatccact

SEQ ID NO: 4527485 - DNA, 25 bp, Homo sapien
gagaccaggcccataagacagcaaa

SEQ ID NO: 4527486 - DNA, 25 bp, Homo sapien
tctgacaaaaattcggtgaaagagc

SEQ ID NO: 4527487 - DNA, 25 bp, Homo sapien
tgcttcctacttgggtgaaaggatt

SEQ ID NO: 4527488 - DNA, 25 bp, Homo sapien
cctgcctttactgtgcatatactga

SEQ ID NO: 4527489 - DNA, 25 bp, Homo sapien
gatatagcagtggacatggcagtta

SEQ ID NO: 4527490 - DNA, 25 bp, Homo sapien
ttcctaggatgtactggatactgtt

SEQ ID NO: 4527491 - DNA, 25 bp, Homo sapien
gttctgggtcctagagatatagcag

SEQ ID NO: 4527492 - DNA, 25 bp, Homo sapien
agacaaagattgacagactggatta

SEQ ID NO: 4527493 - DNA, 25 bp, Homo sapien
tccaagcatatcaataaaaccagta

SEQ ID NO: 4527494 - DNA, 25 bp, Homo sapien
cattaaggaaagagatatatcaggc

SEQ ID NO: 4527495 - DNA, 25 bp, Homo sapien
caaataatttaggatggcacaatgg

SEQ ID NO: 4527496 - DNA, 25 bp, Homo sapien
ttacctactactaagctactgttta

SEQ ID NO: 4527497 - DNA, 25 bp, Homo sapien
cgctatttacctactactaagctac

SEQ ID NO: 4527498 - DNA, 25 bp, Homo sapien
tatttacctactactaagctactgt

SEQ ID NO: 4527499 - DNA, 25 bp, Homo sapien
tgtttacgctatttacctactacta

SEQ ID NO: 4527500 - DNA, 25 bp, Homo sapien
tcctgaggagtttgctcatcttcct

SEQ ID NO: 4527501 - DNA, 25 bp, Homo sapien
agaattttgtatcccagactcagga

SEQ ID NO: 4527502 - DNA, 25 bp, Homo sapien
aatctggcatgagacaatcctgtcc

SEQ ID NO: 4527503 - DNA, 25 bp, Homo sapien
tatcatcagacagtctggatcctgg

SEQ ID NO: 4527504 - DNA, 25 bp, Homo sapien
ctccaaccaataatgtcctactcat

SEQ ID NO: 4527505 - DNA, 25 bp, Homo sapien
ttttatgagaccaatgatgcctcca

SEQ ID NO: 4527506 - DNA, 25 bp, Homo sapien
ccctggagatttttgtctacatttt

SEQ ID NO: 4527507 - DNA, 25 bp, Homo sapien
tagaaaggtagaagaatatccctgg

SEQ ID NO: 4527508 - DNA, 25 bp, Homo sapien
gcattcatcaagtgtggttatacca

SEQ ID NO: 4527509 - DNA, 25 bp, Homo sapien
cagtcatgaaaggtcaaggctttcc

SEQ ID NO: 4527510 - DNA, 25 bp, Homo sapien
tcaatcatggcttgtggacagtcat

SEQ ID NO: 4527511 - DNA, 25 bp, Homo sapien
ggcttgaatatcttggtgggaaacc

SEQ ID NO: 4527512 - DNA, 25 bp, Homo sapien
aaacttactggtgtttcactgcata

SEQ ID NO: 4527513 - DNA, 25 bp, Homo sapien
actgcgcccagacactattatgttt

SEQ ID NO: 4527514 - DNA, 25 bp, Homo sapien
tcattttactatctaaataatgctg

SEQ ID NO: 4527515 - DNA, 25 bp, Homo sapien
ttttactatctaaataatgctgaca

SEQ ID NO: 4527516 - DNA, 25 bp, Homo sapien
cacagtggtattatgaactgccagg

SEQ ID NO: 4527517 - DNA, 25 bp, Homo sapien
tagggaggaaaactacttcacagtg

SEQ ID NO: 4527518 - DNA, 25 bp, Homo sapien
cattcagtacttctaggagggtagg

SEQ ID NO: 4527519 - DNA, 25 bp, Homo sapien
tgccaggaggtacatgtcattgtca

SEQ ID NO: 4527520 - DNA, 25 bp, Homo sapien
cataaatcacaggtgtacagcttga

SEQ ID NO: 4527521 - DNA, 25 bp, Homo sapien
ccttggatgcctgataaaactttta

SEQ ID NO: 4527522 - DNA, 25 bp, Homo sapien
acttttaataatgccaggacccatg

SEQ ID NO: 4527523 - DNA, 25 bp, Homo sapien
gagttttgcaagagacccgatgagt

SEQ ID NO: 4527524 - DNA, 25 bp, Homo sapien
taaatgagttaagggtgactttgga

SEQ ID NO: 4527525 - DNA, 25 bp, Homo sapien
caagttgggaatagaaacagcagga

SEQ ID NO: 4527526 - DNA, 25 bp, Homo sapien
gaaaatagaatcagagaagggagta

SEQ ID NO: 4527527 - DNA, 25 bp, Homo sapien
tggataaagtcaatccccacagtaa

SEQ ID NO: 4527528 - DNA, 25 bp, Homo sapien
cctgtgatggagttctgactcaggt

SEQ ID NO: 4527529 - DNA, 25 bp, Homo sapien
ctaacagttggctgtgttcccctgt

SEQ ID NO: 4527530 - DNA, 25 bp, Homo sapien
gttggctgtgttcccctgtgatgga

SEQ ID NO: 4527531 - DNA, 25 bp, Homo sapien
ccctgtgatggagttctgactcagg

SEQ ID NO: 4527532 - DNA, 25 bp, Homo sapien
tattgcttaaagagtacagcgtttc

SEQ ID NO: 4527533 - DNA, 25 bp, Homo sapien
tgaactagtgtaaagaatgatcaca

SEQ ID NO: 4527534 - DNA, 25 bp, Homo sapien
ggtaatgggtgtacaacactgtaaa

SEQ ID NO: 4527535 - DNA, 25 bp, Homo sapien
caaaagtcaaccaaggaaataagca

SEQ ID NO: 4527536 - DNA, 25 bp, Homo sapien
gctaaaacaagttattcgaaattgc

SEQ ID NO: 4527537 - DNA, 25 bp, Homo sapien
ttattcgaaattgccagggaataca

SEQ ID NO: 4527538 - DNA, 25 bp, Homo sapien
caagttattcgaaattgccagggaa

SEQ ID NO: 4527539 - DNA, 25 bp, Homo sapien
aaacaaggtatgataggctaaaaca

SEQ ID NO: 4527540 - DNA, 25 bp, Homo sapien
tgctcgtctcggtctcaaactctgg

SEQ ID NO: 4527541 - DNA, 25 bp, Homo sapien
gctcacgggctagtcttcaaaagta

SEQ ID NO: 4527542 - DNA, 25 bp, Homo sapien
ggcaggttgatgatatcttacggaa

SEQ ID NO: 4527543 - DNA, 25 bp, Homo sapien
tcttacggaaagagagctcacgggc

SEQ ID NO: 4527544 - DNA, 25 bp, Homo sapien
gcaatacactaaatcaaataagcta

SEQ ID NO: 4527545 - DNA, 25 bp, Homo sapien
ggatgaatcttgacagcaatacact

SEQ ID NO: 4527546 - DNA, 25 bp, Homo sapien
gtcatacaaaggcaaataccatatg

SEQ ID NO: 4527547 - DNA, 25 bp, Homo sapien
gagttctccatgtacccaccaaatg

SEQ ID NO: 4527548 - DNA, 25 bp, Homo sapien
acctcagcctcccaaagtgttggga

SEQ ID NO: 4527549 - DNA, 25 bp, Homo sapien
cacgtgccaccatgctcaactaatt

SEQ ID NO: 4527550 - DNA, 25 bp, Homo sapien
cacctcagcctcccaaagtgttggg

SEQ ID NO: 4527551 - DNA, 25 bp, Homo sapien
gcacgtgccaccatgctcaactaat

SEQ ID NO: 4527552 - DNA, 25 bp, Homo sapien
agctgcttgggaggctgaggcagga

SEQ ID NO: 4527553 - DNA, 25 bp, Homo sapien
gaatcgcttgaacctggcaggcgga

SEQ ID NO: 4527554 - DNA, 25 bp, Homo sapien
cctggcaggcggaggttgcagtgag

SEQ ID NO: 4527555 - DNA, 25 bp, Homo sapien
tgtggtgacaggtgcctgtaacccc

SEQ ID NO: 4527556 - DNA, 25 bp, Homo sapien
tcacagggaccattaaggaagaagt

SEQ ID NO: 4527557 - DNA, 25 bp, Homo sapien
gagctcagtcttaacatgaagattg

SEQ ID NO: 4527558 - DNA, 25 bp, Homo sapien
ttcctggagtgatcacagggaccat

SEQ ID NO: 4527559 - DNA, 25 bp, Homo sapien
ggtatttgagctcagtcttaacatg

SEQ ID NO: 4527560 - DNA, 25 bp, Homo sapien
tctcctgcgaattgttaagtctctt

SEQ ID NO: 4527561 - DNA, 25 bp, Homo sapien
taagtctcttatttctatctcgctg

SEQ ID NO: 4527562 - DNA, 25 bp, Homo sapien
taagcatgcagatctaaatttccat

SEQ ID NO: 4527563 - DNA, 25 bp, Homo sapien
tccattagttagactggtacaagtc

SEQ ID NO: 4527564 - DNA, 25 bp, Homo sapien
atgataacggattactgcagcctcc

SEQ ID NO: 4527565 - DNA, 25 bp, Homo sapien
tgataacggattactgcagcctcca

SEQ ID NO: 4527566 - DNA, 25 bp, Homo sapien
tctgctactcaccatgtggcctgag

SEQ ID NO: 4527567 - DNA, 25 bp, Homo sapien
tagtaaaaagctaggatttggcatc

SEQ ID NO: 4527568 - DNA, 25 bp, Homo sapien
tataagttgaacattggctctgcta

SEQ ID NO: 4527569 - DNA, 25 bp, Homo sapien
cacagtttcgataatgctcacatca

SEQ ID NO: 4527570 - DNA, 25 bp, Homo sapien
accaaggaattgcaatgtgttacat

SEQ ID NO: 4527571 - DNA, 25 bp, Homo sapien
ccaaggaattgcaatgtgttacatg

SEQ ID NO: 4527572 - DNA, 25 bp, Homo sapien
aattccacataaattgacttctgtg

SEQ ID NO: 4527573 - DNA, 25 bp, Homo sapien
ctaaattccacataaattgacttct

SEQ ID NO: 4527574 - DNA, 25 bp, Homo sapien
attccacataaattgacttctgtgt

SEQ ID NO: 4527575 - DNA, 25 bp, Homo sapien
aaactcttcaaacattgccactgat

SEQ ID NO: 4527576 - DNA, 25 bp, Homo sapien
ctcttgagagatcgaagccgctgcc

SEQ ID NO: 4527577 - DNA, 25 bp, Homo sapien
tatgtctgctaaactaggctcttga

SEQ ID NO: 4527578 - DNA, 25 bp, Homo sapien
cctgaatccgggcttttatgtctgc

SEQ ID NO: 4527579 - DNA, 25 bp, Homo sapien
gctaaactaggctcttgagagatcg

SEQ ID NO: 4527580 - DNA, 25 bp, Homo sapien
tgttatagttagataatactttgct

SEQ ID NO: 4527581 - DNA, 25 bp, Homo sapien
atagttagataatactttgctcttt

SEQ ID NO: 4527582 - DNA, 25 bp, Homo sapien
tatagttagataatactttgctctt

SEQ ID NO: 4527583 - DNA, 25 bp, Homo sapien
gttatagttagataatactttgctc

SEQ ID NO: 4527584 - DNA, 25 bp, Homo sapien
tggacacatatgtaaaaagacaagt

SEQ ID NO: 4527585 - DNA, 25 bp, Homo sapien
ttcaagctcctgtatgcttgaaaat

SEQ ID NO: 4527586 - DNA, 25 bp, Homo sapien
ggtgttcacgatgaaagtttttcaa

SEQ ID NO: 4527587 - DNA, 25 bp, Homo sapien
atggacacatatgtaaaaagacaag

SEQ ID NO: 4527588 - DNA, 25 bp, Homo sapien
ttagggctactactatagcagagcc

SEQ ID NO: 4527589 - DNA, 25 bp, Homo sapien
catgggccagcactgtctcgtacta

SEQ ID NO: 4527590 - DNA, 25 bp, Homo sapien
tatcatgggatggtaaggacttaca

SEQ ID NO: 4527591 - DNA, 25 bp, Homo sapien
gcagagcctgaaaggtatagtctca

SEQ ID NO: 4527592 - DNA, 25 bp, Homo sapien
aaacaaacaactttagccaggcaca

SEQ ID NO: 4527593 - DNA, 25 bp, Homo sapien
gaactgacctcatctaatagggaag

SEQ ID NO: 4527594 - DNA, 25 bp, Homo sapien
catttgaaatgtagcatgctgctga

SEQ ID NO: 4527595 - DNA, 25 bp, Homo sapien
aattacatgtgcctaggttcaatca

SEQ ID NO: 4527596 - DNA, 25 bp, Homo sapien
gtacacaccttagagctgagcaaat

SEQ ID NO: 4527597 - DNA, 25 bp, Homo sapien
gtactgaactaccattaaggcaagg

SEQ ID NO: 4527598 - DNA, 25 bp, Homo sapien
caaggccacgacaaatataatgagg

SEQ ID NO: 4527599 - DNA, 25 bp, Homo sapien
gaaaactggagactgaaacccagct

SEQ ID NO: 4527600 - DNA, 25 bp, Homo sapien
ggagctggagtacatttcatttaac

SEQ ID NO: 4527601 - DNA, 25 bp, Homo sapien
gaagagaccaccgaagatcaaagac

SEQ ID NO: 4527602 - DNA, 25 bp, Homo sapien
tacagcattctaggacacactcaaa

SEQ ID NO: 4527603 - DNA, 25 bp, Homo sapien
tcataaggttcccaggtttgcagga

SEQ ID NO: 4527604 - DNA, 25 bp, Homo sapien
cacctcctgtttgtgtgatgtaatg

SEQ ID NO: 4527605 - DNA, 25 bp, Homo sapien
tatgacaagaaacttcgggtgggaa

SEQ ID NO: 4527606 - DNA, 25 bp, Homo sapien
cctgtttgtgtgatgtaatgtgagt

SEQ ID NO: 4527607 - DNA, 25 bp, Homo sapien
acatatgacaagaaacttcgggtgg

SEQ ID NO: 4527608 - DNA, 25 bp, Homo sapien
ttgtctccagatactaaaaacacaa

SEQ ID NO: 4527609 - DNA, 25 bp, Homo sapien
cagaattagggaactaaaatcattc

SEQ ID NO: 4527610 - DNA, 25 bp, Homo sapien
cattctggtttcctgaaccctttag

SEQ ID NO: 4527611 - DNA, 25 bp, Homo sapien
aattagggaactaaaatcattctgg

SEQ ID NO: 4527612 - DNA, 25 bp, Homo sapien
ttgccagcgaagtggtggccccaga

SEQ ID NO: 4527613 - DNA, 25 bp, Homo sapien
gaagtccggtcactgggtggatcca

SEQ ID NO: 4527614 - DNA, 25 bp, Homo sapien
agaagtccggtcactgggtggatcc

SEQ ID NO: 4527615 - DNA, 25 bp, Homo sapien
ccagtgcaacagttgccagcgaagt

SEQ ID NO: 4527616 - DNA, 25 bp, Homo sapien
ttgtttcaggcacgctttcccggga

SEQ ID NO: 4527617 - DNA, 25 bp, Homo sapien
gagctaaatcttactcgggaactag

SEQ ID NO: 4527618 - DNA, 25 bp, Homo sapien
gaactagatcgagagctgaggtccg

SEQ ID NO: 4527619 - DNA, 25 bp, Homo sapien
gaggtccggactggtgtctgacaaa

SEQ ID NO: 4527620 - DNA, 25 bp, Homo sapien
tctttgtcggtgtcaccatgaaccg

SEQ ID NO: 4527621 - DNA, 25 bp, Homo sapien
tgtcaccatgaaccgaactgaagcc

SEQ ID NO: 4527622 - DNA, 25 bp, Homo sapien
ggaatgtcatcgatctttgtcggtg

SEQ ID NO: 4527623 - DNA, 25 bp, Homo sapien
ctggaatgtcatcgatctttgtcgg

SEQ ID NO: 4527624 - DNA, 25 bp, Homo sapien
tcgcaaaatcttcctcttacgctag

SEQ ID NO: 4527625 - DNA, 25 bp, Homo sapien
ttcctcttacgctagctacttttga

SEQ ID NO: 4527626 - DNA, 25 bp, Homo sapien
ggaacctcgcaaaatcttcctctta

SEQ ID NO: 4527627 - DNA, 25 bp, Homo sapien
aaaatcttcctcttacgctagctac

SEQ ID NO: 4527628 - DNA, 25 bp, Homo sapien
tcaagccgactgtcctagaaagtgc

SEQ ID NO: 4527629 - DNA, 25 bp, Homo sapien
tcagattgctaaaaggtgtacaccc

SEQ ID NO: 4527630 - DNA, 25 bp, Homo sapien
cacccggtgtttttgatgtcgacaa

SEQ ID NO: 4527631 - DNA, 25 bp, Homo sapien
tcaggcgactatagcgtggatcaga

SEQ ID NO: 4527632 - DNA, 25 bp, Homo sapien
ggattcctgtctccgagaggtcggt

SEQ ID NO: 4527633 - DNA, 25 bp, Homo sapien
gcagagcggattcctgtctccgaga

SEQ ID NO: 4527634 - DNA, 25 bp, Homo sapien
ttagcggatcaagacacctcggact

SEQ ID NO: 4527635 - DNA, 25 bp, Homo sapien
cttctcctagcagaaaggtcctcgg

SEQ ID NO: 4527636 - DNA, 25 bp, Homo sapien
tcagagtcgtggcaagtcgtagcta

SEQ ID NO: 4527637 - DNA, 25 bp, Homo sapien
gtagctagtccactgagccacggtc

SEQ ID NO: 4527638 - DNA, 25 bp, Homo sapien
tttgccggaggcgcgttctccccta

SEQ ID NO: 4527639 - DNA, 25 bp, Homo sapien
tccgctcgctaggtttctcctgcgt

SEQ ID NO: 4527640 - DNA, 25 bp, Homo sapien
tatcccggcgccagctgatgcgggt

SEQ ID NO: 4527641 - DNA, 25 bp, Homo sapien
ctgttgtttactagccggtaactgt

SEQ ID NO: 4527642 - DNA, 25 bp, Homo sapien
gtaactgtttcagagccgcggcgcg

SEQ ID NO: 4527643 - DNA, 25 bp, Homo sapien
aaggaggtcgcaggtgcagtatccc

SEQ ID NO: 4527644 - DNA, 25 bp, Homo sapien
ccgcgccgccgcagcccttcccttc

SEQ ID NO: 4527645 - DNA, 25 bp, Homo sapien
gcccgacggggtgcgcccgcgccgc

SEQ ID NO: 4527646 - DNA, 25 bp, Homo sapien
gccgccgcagcccttcccttccctc

SEQ ID NO: 4527647 - DNA, 25 bp, Homo sapien
cgcgccgccgcagcccttcccttcc

SEQ ID NO: 4527648 - DNA, 25 bp, Homo sapien
gggtgcagtgagagggcggaaccgt

SEQ ID NO: 4527649 - DNA, 25 bp, Homo sapien
gcagtgagagggcggaaccgtcccg

SEQ ID NO: 4527650 - DNA, 25 bp, Homo sapien
cttgcgaagagaagcccgggggtgc

SEQ ID NO: 4527651 - DNA, 25 bp, Homo sapien
agtgagagggcggaaccgtcccgcg

SEQ ID NO: 4527652 - DNA, 25 bp, Homo sapien
ctcagaacccggggagccatttctc

SEQ ID NO: 4527653 - DNA, 25 bp, Homo sapien
cactcttgcaacagcaggactgaag

SEQ ID NO: 4527654 - DNA, 25 bp, Homo sapien
tcctccaacaactcacaaaataaga

SEQ ID NO: 4527655 - DNA, 25 bp, Homo sapien
cgttaagtgacaacagaggtatttt

SEQ ID NO: 4527656 - DNA, 25 bp, Homo sapien
catgaacagcacatgaccactcttg

SEQ ID NO: 4527657 - DNA, 25 bp, Homo sapien
agcataatcaatcgccacgagagac

SEQ ID NO: 4527658 - DNA, 25 bp, Homo sapien
agggctcacagtccgaagagtttgg

SEQ ID NO: 4527659 - DNA, 25 bp, Homo sapien
ctcacagtccgaagagtttggttac

SEQ ID NO: 4527660 - DNA, 25 bp, Homo sapien
ctcacacaagcataatcaatcgcca

SEQ ID NO: 4527661 - DNA, 25 bp, Homo sapien
ccttgaagcgtttcttgatggtgat

SEQ ID NO: 4527662 - DNA, 25 bp, Homo sapien
gattcggtgtcgagagtatttgtca

SEQ ID NO: 4527663 - DNA, 25 bp, Homo sapien
tcttgatggtgattcggtgtcgaga

SEQ ID NO: 4527664 - DNA, 25 bp, Homo sapien
tgctgggtcatgagcaccttgaagc

SEQ ID NO: 4527665 - DNA, 25 bp, Homo sapien
tctgttgtcccatcgggtcaaattt

SEQ ID NO: 4527666 - DNA, 25 bp, Homo sapien
tgagcaggtctgttgtcccatcggg

SEQ ID NO: 4527667 - DNA, 25 bp, Homo sapien
atgggctgagcaggtctgttgtccc

SEQ ID NO: 4527668 - DNA, 25 bp, Homo sapien
gggagaaccgagcaggatgggctga

SEQ ID NO: 4527669 - DNA, 25 bp, Homo sapien
gaacacagaatgtatgtcagtacag

SEQ ID NO: 4527670 - DNA, 25 bp, Homo sapien
catgaaaatagaagatgcaatggtc

SEQ ID NO: 4527671 - DNA, 25 bp, Homo sapien
tatgtcagtacaggagtgatgaaat

SEQ ID NO: 4527672 - DNA, 25 bp, Homo sapien
ggccagcgcgaaaaagggcaaacat

SEQ ID NO: 4527673 - DNA, 25 bp, Homo sapien
gcacccagctaggtaactccacgta

SEQ ID NO: 4527674 - DNA, 25 bp, Homo sapien
cccacctcggttctggactttctgg

SEQ ID NO: 4527675 - DNA, 25 bp, Homo sapien
tcgccatgcctatttacaccctgtt

SEQ ID NO: 4527676 - DNA, 25 bp, Homo sapien
atgagtcgcgcggtcccggttcttc

SEQ ID NO: 4527677 - DNA, 25 bp, Homo sapien
tcgatctccctgctcgttgaggtaa

SEQ ID NO: 4527678 - DNA, 25 bp, Homo sapien
tatagactcgatctccctgctcgtt

SEQ ID NO: 4527679 - DNA, 25 bp, Homo sapien
cgttgaggtaatactggagaaacat

SEQ ID NO: 4527680 - DNA, 25 bp, Homo sapien
ccctgctcgttgaggtaatactgga

SEQ ID NO: 4527681 - DNA, 25 bp, Homo sapien
ataagccagcggtcccaattcggtc

SEQ ID NO: 4527682 - DNA, 25 bp, Homo sapien
gatcgcttataagccagcggtccca

SEQ ID NO: 4527683 - DNA, 25 bp, Homo sapien
ctcagtctgcagtggtccgcccgac

SEQ ID NO: 4527684 - DNA, 25 bp, Homo sapien
ccgaccgcgtcacgtgttcgtcaat

SEQ ID NO: 4527685 - DNA, 25 bp, Homo sapien
tccttcccaagtaatggtaacatca

SEQ ID NO: 4527686 - DNA, 25 bp, Homo sapien
ttccttcccaagtaatggtaacatc

SEQ ID NO: 4527687 - DNA, 25 bp, Homo sapien
ggctgaggcataggggaggccccta

SEQ ID NO: 4527688 - DNA, 25 bp, Homo sapien
gcccctagcgctgccctgaggagga

SEQ ID NO: 4527689 - DNA, 25 bp, Homo sapien
gctgaggcataggggaggcccctag

SEQ ID NO: 4527690 - DNA, 25 bp, Homo sapien
ggggctgaggcataggggaggcccc

SEQ ID NO: 4527691 - DNA, 25 bp, Homo sapien
gggcgcaggtaggtgctgaagagtt

SEQ ID NO: 4527692 - DNA, 25 bp, Homo sapien
gcaggtaggtgctgaagagtttccc

SEQ ID NO: 4527693 - DNA, 25 bp, Homo sapien
tggtgtctgggaggtgcctcgagag

SEQ ID NO: 4527694 - DNA, 25 bp, Homo sapien
ccttctgcttgggtgcttgcacagt

SEQ ID NO: 4527695 - DNA, 25 bp, Homo sapien
ctctgtttaacttctcaaatccagg

SEQ ID NO: 4527696 - DNA, 25 bp, Homo sapien
cttgtgcctctactctgtttaactt

SEQ ID NO: 4527697 - DNA, 25 bp, Homo sapien
aacttctcaaatccaggttcaggtc

SEQ ID NO: 4527698 - DNA, 25 bp, Homo sapien
tgaaaagatctaagaacgagaagag

SEQ ID NO: 4527699 - DNA, 25 bp, Homo sapien
tgatggtgccccaagtgcccgtgtg

SEQ ID NO: 4527700 - DNA, 25 bp, Homo sapien
ctgatggtgccccaagtgcccgtgt

SEQ ID NO: 4527701 - DNA, 25 bp, Homo sapien
gatgctgatggtgccccaagtgccc

SEQ ID NO: 4527702 - DNA, 25 bp, Homo sapien
ctggatgctgatggtgccccaagtg

SEQ ID NO: 4527703 - DNA, 25 bp, Homo sapien
gtctttgtacagcaggcggttggga

SEQ ID NO: 4527704 - DNA, 25 bp, Homo sapien
gtacagcaggcggttgggaccctct

SEQ ID NO: 4527705 - DNA, 25 bp, Homo sapien
ctttgtacagcaggcggttgggacc

SEQ ID NO: 4527706 - DNA, 25 bp, Homo sapien
ttgtacagcaggcggttgggaccct

SEQ ID NO: 4527707 - DNA, 25 bp, Homo sapien
gcctagtatctagaagctactggaa

SEQ ID NO: 4527708 - DNA, 25 bp, Homo sapien
gctaggtctcaacatagaggccggg

SEQ ID NO: 4527709 - DNA, 25 bp, Homo sapien
aaagggtggtgcacaagccttccct

SEQ ID NO: 4527710 - DNA, 25 bp, Homo sapien
tgtggcactaggttggataccaaat

SEQ ID NO: 4527711 - DNA, 25 bp, Homo sapien
ctcaaaggccagacgagttagctct

SEQ ID NO: 4527712 - DNA, 25 bp, Homo sapien
cagacgagttagctcttccaggctc

SEQ ID NO: 4527713 - DNA, 25 bp, Homo sapien
gctgctagtgcaagggccacatctc

SEQ ID NO: 4527714 - DNA, 25 bp, Homo sapien
atctcggaagtccaccaaacccttg

SEQ ID NO: 4527715 - DNA, 25 bp, Homo sapien
tctcaggtcataggctttctcaagc

SEQ ID NO: 4527716 - DNA, 25 bp, Homo sapien
tctcaagctatatcaggtcacctgg

SEQ ID NO: 4527717 - DNA, 25 bp, Homo sapien
agtctctgacatgccagcggagggc

SEQ ID NO: 4527718 - DNA, 25 bp, Homo sapien
tcctaggaatgtaagggaatccctc

SEQ ID NO: 4527719 - DNA, 25 bp, Homo sapien
gactcagcctatgtagaagaactgg

SEQ ID NO: 4527720 - DNA, 25 bp, Homo sapien
gaccactgttggttgttcataagca

SEQ ID NO: 4527721 - DNA, 25 bp, Homo sapien
gggacagtccgcctcaatctaagga

SEQ ID NO: 4527722 - DNA, 25 bp, Homo sapien
taaggaatctagatacctggtcact

SEQ ID NO: 4527723 - DNA, 25 bp, Homo sapien
gatatagctgggtctcaagctctca

SEQ ID NO: 4527724 - DNA, 25 bp, Homo sapien
caaaaggtcttatgattccccacct

SEQ ID NO: 4527725 - DNA, 25 bp, Homo sapien
agctctcaaccatctaactgtccgg

SEQ ID NO: 4527726 - DNA, 25 bp, Homo sapien
gaaaattcctctagagaagctatag

SEQ ID NO: 4527727 - DNA, 25 bp, Homo sapien
ctgctctttgttccagctcctttac

SEQ ID NO: 4527728 - DNA, 25 bp, Homo sapien
gctctgctctttgttccagctcctt

SEQ ID NO: 4527729 - DNA, 25 bp, Homo sapien
ctctgctctttgttccagctccttt

SEQ ID NO: 4527730 - DNA, 25 bp, Homo sapien
tctgctctttgttccagctccttta

SEQ ID NO: 4527731 - DNA, 25 bp, Homo sapien
cttcctggctgatcattcgactccg

SEQ ID NO: 4527732 - DNA, 25 bp, Homo sapien
gatcattcgactccggcctggctct

SEQ ID NO: 4527733 - DNA, 25 bp, Homo sapien
gcaccagccaccgtctgaggatcag

SEQ ID NO: 4527734 - DNA, 25 bp, Homo sapien
accagccaccgtctgaggatcagag

SEQ ID NO: 4527735 - DNA, 25 bp, Homo sapien
tgtgacactgctcataccctcattt

SEQ ID NO: 4527736 - DNA, 25 bp, Homo sapien
acactgctcataccctcatttccaa

SEQ ID NO: 4527737 - DNA, 25 bp, Homo sapien
gtgacactgctcataccctcatttc

SEQ ID NO: 4527738 - DNA, 25 bp, Homo sapien
ggcccaccacaatcacaggtaagct

SEQ ID NO: 4527739 - DNA, 25 bp, Homo sapien
agccttccgaagcacttttcccagt

SEQ ID NO: 4527740 - DNA, 25 bp, Homo sapien
tcccagttcccagagctgtggttcc

SEQ ID NO: 4527741 - DNA, 25 bp, Homo sapien
gctgtggttccaacgccaccttcag

SEQ ID NO: 4527742 - DNA, 25 bp, Homo sapien
ttcggtggctggaatgcccagagcc

SEQ ID NO: 4527743 - DNA, 25 bp, Homo sapien
caaactcacattcggtggctggaat

SEQ ID NO: 4527744 - DNA, 25 bp, Homo sapien
ctacaaactcacattcggtggctgg

SEQ ID NO: 4527745 - DNA, 25 bp, Homo sapien
cacattcggtggctggaatgcccag

SEQ ID NO: 4527746 - DNA, 25 bp, Homo sapien
ggctggggtgatacacaggaaggaa

SEQ ID NO: 4527747 - DNA, 25 bp, Homo sapien
ctgaacattgttggcatagagggtg

SEQ ID NO: 4527748 - DNA, 25 bp, Homo sapien
gaccctctgaacattgttggcatag

SEQ ID NO: 4527749 - DNA, 25 bp, Homo sapien
ctcagggctggggtgatacacagga

SEQ ID NO: 4527750 - DNA, 25 bp, Homo sapien
ggctgtgagccagaggactttgagt

SEQ ID NO: 4527751 - DNA, 25 bp, Homo sapien
gaggctgtgagccagaggactttga

SEQ ID NO: 4527752 - DNA, 25 bp, Homo sapien
ctccacatccacaatgctgcagggc

SEQ ID NO: 4527753 - DNA, 25 bp, Homo sapien
ccacatccacaatgctgcagggctg

SEQ ID NO: 4527754 - DNA, 25 bp, Homo sapien
cttgtcgggagattggaagatgggc

SEQ ID NO: 4527755 - DNA, 25 bp, Homo sapien
tcacccccaggaataccagaactca

SEQ ID NO: 4527756 - DNA, 25 bp, Homo sapien
gaagatgggccaggaattctctgat

SEQ ID NO: 4527757 - DNA, 25 bp, Homo sapien
attctctgatggaccctgctcccca

SEQ ID NO: 4527758 - DNA, 25 bp, Homo sapien
ggacccctccatgcccagctggtgg

SEQ ID NO: 4527759 - DNA, 25 bp, Homo sapien
acccctccatgcccagctggtggtg

SEQ ID NO: 4527760 - DNA, 25 bp, Homo sapien
actccaggacccctccatgcccagc

SEQ ID NO: 4527761 - DNA, 25 bp, Homo sapien
ccctccatgcccagctggtggtgtc

SEQ ID NO: 4527762 - DNA, 25 bp, Homo sapien
ttggggtagcggatgaggacaggct

SEQ ID NO: 4527763 - DNA, 25 bp, Homo sapien
gttggggtagcggatgaggacaggc

SEQ ID NO: 4527764 - DNA, 25 bp, Homo sapien
actgttggggtagcggatgaggaca

SEQ ID NO: 4527765 - DNA, 25 bp, Homo sapien
cagactgttggggtagcggatgagg

SEQ ID NO: 4527766 - DNA, 25 bp, Homo sapien
cacaaggcagaggttagtacacaga

SEQ ID NO: 4527767 - DNA, 25 bp, Homo sapien
ggcagaggttagtacacagaagtag

SEQ ID NO: 4527768 - DNA, 25 bp, Homo sapien
ccacccccacaaggcagaggttagt

SEQ ID NO: 4527769 - DNA, 25 bp, Homo sapien
caaggcagaggttagtacacagaag

SEQ ID NO: 4527770 - DNA, 25 bp, Homo sapien
cttgttggaacaggtgccctcagga

SEQ ID NO: 4527771 - DNA, 25 bp, Homo sapien
aaagccttcttgttggaacaggtgc

SEQ ID NO: 4527772 - DNA, 25 bp, Homo sapien
gaacaggtgccctcaggaaagaata

SEQ ID NO: 4527773 - DNA, 25 bp, Homo sapien
cttcttgttggaacaggtgccctca

SEQ ID NO: 4527774 - DNA, 25 bp, Homo sapien
ctggggtaaaaaagagcagaatgag

SEQ ID NO: 4527775 - DNA, 25 bp, Homo sapien
gggtaaaaaagagcagaatgaggtg

SEQ ID NO: 4527776 - DNA, 25 bp, Homo sapien
aaaaaagagcagaatgaggtgaaga

SEQ ID NO: 4527777 - DNA, 25 bp, Homo sapien
taaaaaagagcagaatgaggtgaag

SEQ ID NO: 4527778 - DNA, 25 bp, Homo sapien
tcttcaggagcacatggaaagtgag

SEQ ID NO: 4527779 - DNA, 25 bp, Homo sapien
ggaagcctcttcaggagcacatgga

SEQ ID NO: 4527780 - DNA, 25 bp, Homo sapien
catggaaagtgagaagatggtcttg

SEQ ID NO: 4527781 - DNA, 25 bp, Homo sapien
gagaagatggtcttgagacccttac

SEQ ID NO: 4527782 - DNA, 25 bp, Homo sapien
cctccaccactctgcgtcgagaagc

SEQ ID NO: 4527783 - DNA, 25 bp, Homo sapien
tcatgccgggataccaggatggctt

SEQ ID NO: 4527784 - DNA, 25 bp, Homo sapien
ccaggatggcttggttgaatcgaag

SEQ ID NO: 4527785 - DNA, 25 bp, Homo sapien
gtggcccgccttcggacctcctcca

SEQ ID NO: 4527786 - DNA, 25 bp, Homo sapien
tctaagactggttgactaatggtgt

SEQ ID NO: 4527787 - DNA, 25 bp, Homo sapien
ttttttgcccagagttgtcaccctg

SEQ ID NO: 4527788 - DNA, 25 bp, Homo sapien
cactttgaggccagttcttcactcc

SEQ ID NO: 4527789 - DNA, 25 bp, Homo sapien
gttgtccttttagagaactgaccag

SEQ ID NO: 4527790 - DNA, 25 bp, Homo sapien
tgacaggaacggaaaggttctcagc

SEQ ID NO: 4527791 - DNA, 25 bp, Homo sapien
tcgggacacaactttgggcaggtca

SEQ ID NO: 4527792 - DNA, 25 bp, Homo sapien
cacgaacgcgaatccggaggaagcc

SEQ ID NO: 4527793 - DNA, 25 bp, Homo sapien
gcaggaaaaacagcaggcggctcag

SEQ ID NO: 4527794 - DNA, 25 bp, Homo sapien
tcttctcaaagagggagccgaatag

SEQ ID NO: 4527795 - DNA, 25 bp, Homo sapien
tgaggtctgggaaccacgtctgagc

SEQ ID NO: 4527796 - DNA, 25 bp, Homo sapien
ccaggttcagacaccgggaaagtag

SEQ ID NO: 4527797 - DNA, 25 bp, Homo sapien
cactttgggacctatcagggcacat

SEQ ID NO: 4527798 - DNA, 25 bp, Homo sapien
ttcctccatcctgtaattggctcct

SEQ ID NO: 4527799 - DNA, 25 bp, Homo sapien
tcctccatcctgtaattggctcctg

SEQ ID NO: 4527800 - DNA, 25 bp, Homo sapien
aagcactcggatgggggccagcaat

SEQ ID NO: 4527801 - DNA, 25 bp, Homo sapien
ccacttgaagccaggcaaagggcca

SEQ ID NO: 4527802 - DNA, 25 bp, Homo sapien
tcctcactaagaccggccacttgaa

SEQ ID NO: 4527803 - DNA, 25 bp, Homo sapien
gagaaagaggacgataaaggccaga

SEQ ID NO: 4527804 - DNA, 25 bp, Homo sapien
taaaagattaatggcatcaagggcc

SEQ ID NO: 4527805 - DNA, 25 bp, Homo sapien
aatgcatgcgaaagtgcagggcgct

SEQ ID NO: 4527806 - DNA, 25 bp, Homo sapien
catcccttgcatgtgacaggtggtg

SEQ ID NO: 4527807 - DNA, 25 bp, Homo sapien
tacagtaggttagagacaggtcctc

SEQ ID NO: 4527808 - DNA, 25 bp, Homo sapien
gcaatcttagagtaccgggggatat

SEQ ID NO: 4527809 - DNA, 25 bp, Homo sapien
gagggctgtaaacagccagaggtcc

SEQ ID NO: 4527810 - DNA, 25 bp, Homo sapien
gatatgggagacaagagctcggccc

SEQ ID NO: 4527811 - DNA, 25 bp, Homo sapien
gacccgaggtcattttctgacactg

SEQ ID NO: 4527812 - DNA, 25 bp, Homo sapien
aggtaagcaaacctagcccctggag

SEQ ID NO: 4527813 - DNA, 25 bp, Homo sapien
gactccataggctgccttggggaag

SEQ ID NO: 4527814 - DNA, 25 bp, Homo sapien
acttcctgtagccaacctccctctc

SEQ ID NO: 4527815 - DNA, 25 bp, Homo sapien
aagcaggtaagcaaacctagcccct

SEQ ID NO: 4527816 - DNA, 25 bp, Homo sapien
catcttcgagcttgtctatcgccca

SEQ ID NO: 4527817 - DNA, 25 bp, Homo sapien
cgcagcgtcctctccaggactcctt

SEQ ID NO: 4527818 - DNA, 25 bp, Homo sapien
ttttccacatcttcgagcttgtcta

SEQ ID NO: 4527819 - DNA, 25 bp, Homo sapien
ttcgagcttgtctatcgcccaagcc

SEQ ID NO: 4527820 - DNA, 25 bp, Homo sapien
tttgccagggctcaaatggccccat

SEQ ID NO: 4527821 - DNA, 25 bp, Homo sapien
ttccgacgcccgctccccacacatt

SEQ ID NO: 4527822 - DNA, 25 bp, Homo sapien
ccgacgcccgctccccacacattac

SEQ ID NO: 4527823 - DNA, 25 bp, Homo sapien
ccttccgacgcccgctccccacaca

SEQ ID NO: 4527824 - DNA, 25 bp, Homo sapien
gtccttccgacgcccgctccccaca

SEQ ID NO: 4527825 - DNA, 25 bp, Homo sapien
tctggaggcgagagagatgtaactc

SEQ ID NO: 4527826 - DNA, 25 bp, Homo sapien
cttaaccctctggaggcgagagaga

SEQ ID NO: 4527827 - DNA, 25 bp, Homo sapien
agagatgtaactcatgcacgaaggg

SEQ ID NO: 4527828 - DNA, 25 bp, Homo sapien
gcgagagagatgtaactcatgcacg

SEQ ID NO: 4527829 - DNA, 25 bp, Homo sapien
ggccccggccaccactctgcagagc

SEQ ID NO: 4527830 - DNA, 25 bp, Homo sapien
ccccggccaccactctgcagagcag

SEQ ID NO: 4527831 - DNA, 25 bp, Homo sapien
ccggccaccactctgcagagcagct

SEQ ID NO: 4527832 - DNA, 25 bp, Homo sapien
cggccaccactctgcagagcagctg

SEQ ID NO: 4527833 - DNA, 25 bp, Homo sapien
gggcggggcttccagcgccctggcg

SEQ ID NO: 4527834 - DNA, 25 bp, Homo sapien
ggcggggcttccagcgccctggcgc

SEQ ID NO: 4527835 - DNA, 25 bp, Homo sapien
aggggcggggcttccagcgccctgg

SEQ ID NO: 4527836 - DNA, 25 bp, Homo sapien
ggggcggggcttccagcgccctggc

SEQ ID NO: 4527837 - DNA, 25 bp, Homo sapien
gtgcttcccatgagcccgacaaggt

SEQ ID NO: 4527838 - DNA, 25 bp, Homo sapien
ttgaacccttgaggcgccaggaatc

SEQ ID NO: 4527839 - DNA, 25 bp, Homo sapien
tgaggcacttgcgtcctctggcggc

SEQ ID NO: 4527840 - DNA, 25 bp, Homo sapien
gccaggaatccctagtacactgacg

SEQ ID NO: 4527841 - DNA, 25 bp, Homo sapien
gatgtcacgggttccatgcccagga

SEQ ID NO: 4527842 - DNA, 25 bp, Homo sapien
cactgcattggcgtacaggccttta

SEQ ID NO: 4527843 - DNA, 25 bp, Homo sapien
tagtttcatggatgtcacgggttcc

SEQ ID NO: 4527844 - DNA, 25 bp, Homo sapien
cttttgcatcctgttgggcgatgcc

SEQ ID NO: 4527845 - DNA, 25 bp, Homo sapien
gtggtacaaccagaggcatacagca

SEQ ID NO: 4527846 - DNA, 25 bp, Homo sapien
tacaaccagaggcatacagcaacag

SEQ ID NO: 4527847 - DNA, 25 bp, Homo sapien
catggatggcacatatatggcaggg

SEQ ID NO: 4527848 - DNA, 25 bp, Homo sapien
ggcaatgtagcgcagcttcttcttg

SEQ ID NO: 4527849 - DNA, 25 bp, Homo sapien
ttgtcacccacataagagtccttct

SEQ ID NO: 4527850 - DNA, 25 bp, Homo sapien
cttgtcacccacataagagtccttc

SEQ ID NO: 4527851 - DNA, 25 bp, Homo sapien
tacacattctgttaacaagaactca

SEQ ID NO: 4527852 - DNA, 25 bp, Homo sapien
tatttccgttacacattctgttaac

SEQ ID NO: 4527853 - DNA, 25 bp, Homo sapien
taacaagaactcatacattggtaaa

SEQ ID NO: 4527854 - DNA, 25 bp, Homo sapien
aacaagaactcatacattggtaaaa

SEQ ID NO: 4527855 - DNA, 25 bp, Homo sapien
ttttatttcagaacattaagatagc

SEQ ID NO: 4527856 - DNA, 25 bp, Homo sapien
tatttcagaacattaagatagcagt

SEQ ID NO: 4527857 - DNA, 25 bp, Homo sapien
tttcagaacattaagatagcagtta

SEQ ID NO: 4527858 - DNA, 25 bp, Homo sapien
ttatttcagaacattaagatagcag

SEQ ID NO: 4527859 - DNA, 25 bp, Homo sapien
gatacagttttaaacccatgggcta

SEQ ID NO: 4527860 - DNA, 25 bp, Homo sapien
catacgactgttaattagccgcatt

SEQ ID NO: 4527861 - DNA, 25 bp, Homo sapien
catgggctagaaatcatacgactgt

SEQ ID NO: 4527862 - DNA, 25 bp, Homo sapien
aaatcatacgactgttaattagccg

SEQ ID NO: 4527863 - DNA, 25 bp, Homo sapien
cctgtttcagagacatttaaactct

SEQ ID NO: 4527864 - DNA, 25 bp, Homo sapien
tatgcctgtttcagagacatttaaa

SEQ ID NO: 4527865 - DNA, 25 bp, Homo sapien
tgtatgcctgtttcagagacattta

SEQ ID NO: 4527866 - DNA, 25 bp, Homo sapien
tgcctgtttcagagacatttaaact

SEQ ID NO: 4527867 - DNA, 25 bp, Homo sapien
aaaccgcatattgagctatagaaga

SEQ ID NO: 4527868 - DNA, 25 bp, Homo sapien
gcaaaccgcatattgagctatagaa

SEQ ID NO: 4527869 - DNA, 25 bp, Homo sapien
tccaaagggaactgccacagtacac

SEQ ID NO: 4527870 - DNA, 25 bp, Homo sapien
ggaactgccacagtacactgctcat

SEQ ID NO: 4527871 - DNA, 25 bp, Homo sapien
attagaaaagcacgggagcctattc

SEQ ID NO: 4527872 - DNA, 25 bp, Homo sapien
ccagcgagaacagttttgtgcaaag

SEQ ID NO: 4527873 - DNA, 25 bp, Homo sapien
gaaaagcacgggagcctattccaaa

SEQ ID NO: 4527874 - DNA, 25 bp, Homo sapien
aacattagaaaagcacgggagccta

SEQ ID NO: 4527875 - DNA, 25 bp, Homo sapien
tgagcagctctttgatgatggtggt

SEQ ID NO: 4527876 - DNA, 25 bp, Homo sapien
taaaaatttcttgagcagctctttg

SEQ ID NO: 4527877 - DNA, 25 bp, Homo sapien
ttcttgagcagctctttgatgatgg

SEQ ID NO: 4527878 - DNA, 25 bp, Homo sapien
aatttcttgagcagctctttgatga

SEQ ID NO: 4527879 - DNA, 25 bp, Homo sapien
caagcccagcaaaagcatggcacac

SEQ ID NO: 4527880 - DNA, 25 bp, Homo sapien
ctcggcagccaagcccagcaaaagc

SEQ ID NO: 4527881 - DNA, 25 bp, Homo sapien
ggcagccaagcccagcaaaagcatg

SEQ ID NO: 4527882 - DNA, 25 bp, Homo sapien
cagccaagcccagcaaaagcatggc

SEQ ID NO: 4527883 - DNA, 25 bp, Homo sapien
cccaagcctgggtgctcctggtggt

SEQ ID NO: 4527884 - DNA, 25 bp, Homo sapien
agcagttgctgcccaagcctgggtg

SEQ ID NO: 4527885 - DNA, 25 bp, Homo sapien
ccaagcctgggtgctcctggtggtc

SEQ ID NO: 4527886 - DNA, 25 bp, Homo sapien
ctgcccaagcctgggtgctcctggt

SEQ ID NO: 4527887 - DNA, 25 bp, Homo sapien
gttggtgaggctcgcctcacaaaga

SEQ ID NO: 4527888 - DNA, 25 bp, Homo sapien
cacgctgttggtgaggctcgcctca

SEQ ID NO: 4527889 - DNA, 25 bp, Homo sapien
cgctgttggtgaggctcgcctcaca

SEQ ID NO: 4527890 - DNA, 25 bp, Homo sapien
ctccacgctgttggtgaggctcgcc

SEQ ID NO: 4527891 - DNA, 25 bp, Homo sapien
ccatgcttgtcggcagccccgagct

SEQ ID NO: 4527892 - DNA, 25 bp, Homo sapien
accatgcttgtcggcagccccgagc

SEQ ID NO: 4527893 - DNA, 25 bp, Homo sapien
catgcttgtcggcagccccgagctc

SEQ ID NO: 4527894 - DNA, 25 bp, Homo sapien
caccatgcttgtcggcagccccgag

SEQ ID NO: 4527895 - DNA, 25 bp, Homo sapien
tttgccgtgcccctcgctgtagctg

SEQ ID NO: 4527896 - DNA, 25 bp, Homo sapien
atttgccgtgcccctcgctgtagct

SEQ ID NO: 4527897 - DNA, 25 bp, Homo sapien
ggaatttgccgtgcccctcgctgta

SEQ ID NO: 4527898 - DNA, 25 bp, Homo sapien
gaatttgccgtgcccctcgctgtag

SEQ ID NO: 4527899 - DNA, 25 bp, Homo sapien
agccgcaacaccatctcctgcagct

SEQ ID NO: 4527900 - DNA, 25 bp, Homo sapien
tctcctgcagctccagcagcttcac

SEQ ID NO: 4527901 - DNA, 25 bp, Homo sapien
ccatctcctgcagctccagcagctt

SEQ ID NO: 4527902 - DNA, 25 bp, Homo sapien
aagccgcaacaccatctcctgcagc

SEQ ID NO: 4527903 - DNA, 25 bp, Homo sapien
atgatggcctcctcccggtgacgca

SEQ ID NO: 4527904 - DNA, 25 bp, Homo sapien
tgatggcctcctcccggtgacgcat

SEQ ID NO: 4527905 - DNA, 25 bp, Homo sapien
tggctctgttagaaggcgatgtact

SEQ ID NO: 4527906 - DNA, 25 bp, Homo sapien
ggctctgttagaaggcgatgtactt

SEQ ID NO: 4527907 - DNA, 25 bp, Homo sapien
gctctgttagaaggcgatgtacttt

SEQ ID NO: 4527908 - DNA, 25 bp, Homo sapien
ctctctctccggtactggatgaatc

SEQ ID NO: 4527909 - DNA, 25 bp, Homo sapien
tctctctccggtactggatgaatcc

SEQ ID NO: 4527910 - DNA, 25 bp, Homo sapien
cttcttggcccatgctaggactcac

SEQ ID NO: 4527911 - DNA, 25 bp, Homo sapien
gcccttcttggcccatgctaggact

SEQ ID NO: 4527912 - DNA, 25 bp, Homo sapien
acatctcagcagcgacctgccccag

SEQ ID NO: 4527913 - DNA, 25 bp, Homo sapien
atctcagcagcgacctgccccagcc

SEQ ID NO: 4527914 - DNA, 25 bp, Homo sapien
acttcctgcagggcccggagggtct

SEQ ID NO: 4527915 - DNA, 25 bp, Homo sapien
cttcctgcagggcccggagggtctc

SEQ ID NO: 4527916 - DNA, 25 bp, Homo sapien
ctccagcttctccatgacttcctgc

SEQ ID NO: 4527917 - DNA, 25 bp, Homo sapien
tcccctccagcttctccatgacttc

SEQ ID NO: 4527918 - DNA, 25 bp, Homo sapien
tggctccttctcggccgaggtgagc

SEQ ID NO: 4527919 - DNA, 25 bp, Homo sapien
ggtgcctttggaagtaatatttcat

SEQ ID NO: 4527920 - DNA, 25 bp, Homo sapien
atgtgagggctacactgccccattt

SEQ ID NO: 4527921 - DNA, 25 bp, Homo sapien
gtgagggctacactgccccatttta

SEQ ID NO: 4527922 - DNA, 25 bp, Homo sapien
agtaatatttcatgtgagggctaca

SEQ ID NO: 4527923 - DNA, 25 bp, Homo sapien
ctccaagtcgctctgtggctcggcc

SEQ ID NO: 4527924 - DNA, 25 bp, Homo sapien
ctctccttttgcccacggttcagga

SEQ ID NO: 4527925 - DNA, 25 bp, Homo sapien
tcttctcccgttcccgaagcctctc

SEQ ID NO: 4527926 - DNA, 25 bp, Homo sapien
cctctccttttgcccacggttcagg

SEQ ID NO: 4527927 - DNA, 25 bp, Homo sapien
tcagaggacactgctggggcatccg

SEQ ID NO: 4527928 - DNA, 25 bp, Homo sapien
agctccttcctcaggtcttgcagct

SEQ ID NO: 4527929 - DNA, 25 bp, Homo sapien
gacactgctggggcatccgggggca

SEQ ID NO: 4527930 - DNA, 25 bp, Homo sapien
gctggggcatccgggggcagtggct

SEQ ID NO: 4527931 - DNA, 25 bp, Homo sapien
tcctctacccgatgcgtatcatgct

SEQ ID NO: 4527932 - DNA, 25 bp, Homo sapien
gctcctctacccgatgcgtatcatg

SEQ ID NO: 4527933 - DNA, 25 bp, Homo sapien
agctcctctacccgatgcgtatcat

SEQ ID NO: 4527934 - DNA, 25 bp, Homo sapien
cctctacccgatgcgtatcatgctt

SEQ ID NO: 4527935 - DNA, 25 bp, Homo sapien
agtgacctatcttaagttgttggtg

SEQ ID NO: 4527936 - DNA, 25 bp, Homo sapien
tgacctatcttaagttgttggtggg

SEQ ID NO: 4527937 - DNA, 25 bp, Homo sapien
gtgacctatcttaagttgttggtgg

SEQ ID NO: 4527938 - DNA, 25 bp, Homo sapien
tttgttcagcatattgatctctctc

SEQ ID NO: 4527939 - DNA, 25 bp, Homo sapien
atttgttcagcatattgatctctct

SEQ ID NO: 4527940 - DNA, 25 bp, Homo sapien
ggaagggccgtcactggtcctcacc

SEQ ID NO: 4527941 - DNA, 25 bp, Homo sapien
tggccacacaagttaggaagggccg

SEQ ID NO: 4527942 - DNA, 25 bp, Homo sapien
ctctaactgccgcttgagaagtgct

SEQ ID NO: 4527943 - DNA, 25 bp, Homo sapien
gtgtcacgtgtcctttcagcagtat

SEQ ID NO: 4527944 - DNA, 25 bp, Homo sapien
tctaactgccgcttgagaagtgctt

SEQ ID NO: 4527945 - DNA, 25 bp, Homo sapien
agcagtatctgctcccgtatggact

SEQ ID NO: 4527946 - DNA, 25 bp, Homo sapien
tttcgatctggggagcctgggccat

SEQ ID NO: 4527947 - DNA, 25 bp, Homo sapien
tgagaagtttcgatctggggagcct

SEQ ID NO: 4527948 - DNA, 25 bp, Homo sapien
aagtttcgatctggggagcctgggc

SEQ ID NO: 4527949 - DNA, 25 bp, Homo sapien
tcgatctggggagcctgggccattc

SEQ ID NO: 4527950 - DNA, 25 bp, Homo sapien
gggacagggcaggtgactggactca

SEQ ID NO: 4527951 - DNA, 25 bp, Homo sapien
ggacagggcaggtgactggactcac

SEQ ID NO: 4527952 - DNA, 25 bp, Homo sapien
tcctccatctgtgaagccgggctcc

SEQ ID NO: 4527953 - DNA, 25 bp, Homo sapien
tgtgaagccgggctcccaggggaca

SEQ ID NO: 4527954 - DNA, 25 bp, Homo sapien
cggcttcttcttctgtgtggcggcg

SEQ ID NO: 4527955 - DNA, 25 bp, Homo sapien
cccatccggcttcttcttctgtgtg

SEQ ID NO: 4527956 - DNA, 25 bp, Homo sapien
gcttcttcttctgtgtggcggcgac

SEQ ID NO: 4527957 - DNA, 25 bp, Homo sapien
tccggcttcttcttctgtgtggcgg

SEQ ID NO: 4527958 - DNA, 25 bp, Homo sapien
tgcgatgaacgttgcaggcggccgg

SEQ ID NO: 4527959 - DNA, 25 bp, Homo sapien
cctatacgctgcgatgaacgttgca

SEQ ID NO: 4527960 - DNA, 25 bp, Homo sapien
aactctcctatacgctgcgatgaac

SEQ ID NO: 4527961 - DNA, 25 bp, Homo sapien
ctcctatacgctgcgatgaacgttg

SEQ ID NO: 4527962 - DNA, 25 bp, Homo sapien
cttcaaagtatctgagagaatgttt

SEQ ID NO: 4527963 - DNA, 25 bp, Homo sapien
tcaaagtatctgagagaatgtttca

SEQ ID NO: 4527964 - DNA, 25 bp, Homo sapien
caaagtatctgagagaatgtttcat

SEQ ID NO: 4527965 - DNA, 25 bp, Homo sapien
ttcaaagtatctgagagaatgtttc

SEQ ID NO: 4527966 - DNA, 25 bp, Homo sapien
ttctttttctctgtgttcaatctct

SEQ ID NO: 4527967 - DNA, 25 bp, Homo sapien
cgtatttagtttctttttctctgtg

SEQ ID NO: 4527968 - DNA, 25 bp, Homo sapien
tttttctctgtgttcaatctctgga

SEQ ID NO: 4527969 - DNA, 25 bp, Homo sapien
tgatacaggtccgtatttagtttct

SEQ ID NO: 4527970 - DNA, 25 bp, Homo sapien
gtttctcattgtttgctttcttttc

SEQ ID NO: 4527971 - DNA, 25 bp, Homo sapien
tctagctccctttcagctttctgtt

SEQ ID NO: 4527972 - DNA, 25 bp, Homo sapien
ctctagctccctttcagctttctgt

SEQ ID NO: 4527973 - DNA, 25 bp, Homo sapien
tcagctttctgtttctcattgtttg

SEQ ID NO: 4527974 - DNA, 25 bp, Homo sapien
cagaatgccaccaatgccccaggac

SEQ ID NO: 4527975 - DNA, 25 bp, Homo sapien
agaatgccaccaatgccccaggaca

SEQ ID NO: 4527976 - DNA, 25 bp, Homo sapien
aatgccaccaatgccccaggacagg

SEQ ID NO: 4527977 - DNA, 25 bp, Homo sapien
gaatgccaccaatgccccaggacag

SEQ ID NO: 4527978 - DNA, 25 bp, Homo sapien
gcagtcatgtcgccagcaaacaaag

SEQ ID NO: 4527979 - DNA, 25 bp, Homo sapien
acccagcagtcatgtcgccagcaaa

SEQ ID NO: 4527980 - DNA, 25 bp, Homo sapien
cagcagtcatgtcgccagcaaacaa

SEQ ID NO: 4527981 - DNA, 25 bp, Homo sapien
agtcatgtcgccagcaaacaaagaa

SEQ ID NO: 4527982 - DNA, 25 bp, Homo sapien
ttccagctgatgttccacttgtttc

SEQ ID NO: 4527983 - DNA, 25 bp, Homo sapien
ttcttccagctgatgttccacttgt

SEQ ID NO: 4527984 - DNA, 25 bp, Homo sapien
tcttccagctgatgttccacttgtt

SEQ ID NO: 4527985 - DNA, 25 bp, Homo sapien
cttccagctgatgttccacttgttt

SEQ ID NO: 4527986 - DNA, 25 bp, Homo sapien
acaggaactgttcccaagctcccaa

SEQ ID NO: 4527987 - DNA, 25 bp, Homo sapien
attccccagacaggaagcggcaggc

SEQ ID NO: 4527988 - DNA, 25 bp, Homo sapien
aggaactgttcccaagctcccaagg

SEQ ID NO: 4527989 - DNA, 25 bp, Homo sapien
tgggaacaggaactgttcccaagct

SEQ ID NO: 4527990 - DNA, 25 bp, Homo sapien
tatggacctcgagttcaggactgct

SEQ ID NO: 4527991 - DNA, 25 bp, Homo sapien
tggacctcgagttcaggactgctgc

SEQ ID NO: 4527992 - DNA, 25 bp, Homo sapien
ggacctcgagttcaggactgctgct

SEQ ID NO: 4527993 - DNA, 25 bp, Homo sapien
tttatggacctcgagttcaggactg

SEQ ID NO: 4527994 - DNA, 25 bp, Homo sapien
agaacgatcattagggctgggttgt

SEQ ID NO: 4527995 - DNA, 25 bp, Homo sapien
gagagaacgatcattagggctgggt

SEQ ID NO: 4527996 - DNA, 25 bp, Homo sapien
cgatcattagggctgggttgtgtgt

SEQ ID NO: 4527997 - DNA, 25 bp, Homo sapien
aggtagagagaacgatcattagggc

SEQ ID NO: 4527998 - DNA, 25 bp, Homo sapien
ctggcctgcggggtcactgcacctc

SEQ ID NO: 4527999 - DNA, 25 bp, Homo sapien
aggaggttggagggctggcctgcgg

SEQ ID NO: 4528000 - DNA, 25 bp, Homo sapien
gcctgcggggtcactgcacctccgc

SEQ ID NO: 4528001 - DNA, 25 bp, Homo sapien
ggctggcctgcggggtcactgcacc

SEQ ID NO: 4528002 - DNA, 25 bp, Homo sapien
atgatgtagggccctccccgtggat

SEQ ID NO: 4528003 - DNA, 25 bp, Homo sapien
tgatgtagggccctccccgtggata

SEQ ID NO: 4528004 - DNA, 25 bp, Homo sapien
gatgtagggccctccccgtggatac

SEQ ID NO: 4528005 - DNA, 25 bp, Homo sapien
tcagtgtctgagccctccgacttcc

SEQ ID NO: 4528006 - DNA, 25 bp, Homo sapien
agtgtctgagccctccgacttcctt

SEQ ID NO: 4528007 - DNA, 25 bp, Homo sapien
cctcagtgtctgagccctccgactt

SEQ ID NO: 4528008 - DNA, 25 bp, Homo sapien
ggagatgttctgtccccctcagtgt

SEQ ID NO: 4528009 - DNA, 25 bp, Homo sapien
tgtcctgggtgttgacagcaggcca

SEQ ID NO: 4528010 - DNA, 25 bp, Homo sapien
cagtgactcctgatgggaagtggct

SEQ ID NO: 4528011 - DNA, 25 bp, Homo sapien
tcaaacagcaaagaccatatcctgg

SEQ ID NO: 4528012 - DNA, 25 bp, Homo sapien
gcaaagaccatatcctgggtgtcct

SEQ ID NO: 4528013 - DNA, 25 bp, Homo sapien
gattgccctctactgctccttgggc

SEQ ID NO: 4528014 - DNA, 25 bp, Homo sapien
tccacaatcttaacgattgccctct

SEQ ID NO: 4528015 - DNA, 25 bp, Homo sapien
ctagggattaacataaaatcgacaa

SEQ ID NO: 4528016 - DNA, 25 bp, Homo sapien
caataccacctctatcatacagacg

SEQ ID NO: 4528017 - DNA, 25 bp, Homo sapien
ccagaagcggccgtctcagggctac

SEQ ID NO: 4528018 - DNA, 25 bp, Homo sapien
agaagcggccgtctcagggctactg

SEQ ID NO: 4528019 - DNA, 25 bp, Homo sapien
catttgctttcgtgttcctcttcgc

SEQ ID NO: 4528020 - DNA, 25 bp, Homo sapien
ccaccagaagcggccgtctcagggc

SEQ ID NO: 4528021 - DNA, 25 bp, Homo sapien
ccagtaatgacagttagtaggcaga

SEQ ID NO: 4528022 - DNA, 25 bp, Homo sapien
agtctccactccacaacgcgggagg

SEQ ID NO: 4528023 - DNA, 25 bp, Homo sapien
acatcagcgcgatgtccgagtctcc

SEQ ID NO: 4528024 - DNA, 25 bp, Homo sapien
ccaggtccttggatatgcgagccca

SEQ ID NO: 4528025 - DNA, 25 bp, Homo sapien
ggtgatcggcgagggcagggactga

SEQ ID NO: 4528026 - DNA, 25 bp, Homo sapien
ggcaaagtccggtgtgcgtcaggag

SEQ ID NO: 4528027 - DNA, 25 bp, Homo sapien
caacgtcaccccggggtgatcggcg

SEQ ID NO: 4528028 - DNA, 25 bp, Homo sapien
tggggggcaaagtccggtgtgcgtc

SEQ ID NO: 4528029 - DNA, 25 bp, Homo sapien
gcagctaatttactctgtccagttt

SEQ ID NO: 4528030 - DNA, 25 bp, Homo sapien
ctgcagctaatttactctgtccagt

SEQ ID NO: 4528031 - DNA, 25 bp, Homo sapien
tgcagctaatttactctgtccagtt

SEQ ID NO: 4528032 - DNA, 25 bp, Homo sapien
agctaatttactctgtccagtttct

SEQ ID NO: 4528033 - DNA, 25 bp, Homo sapien
gagcgctgatcaacacatccagtca

SEQ ID NO: 4528034 - DNA, 25 bp, Homo sapien
tggggccacgtcagccaaatcccag

SEQ ID NO: 4528035 - DNA, 25 bp, Homo sapien
tcagccaaatcccagcgagcgctga

SEQ ID NO: 4528036 - DNA, 25 bp, Homo sapien
tcccagcgagcgctgatcaacacat

SEQ ID NO: 4528037 - DNA, 25 bp, Homo sapien
ctggaagacagctgcgtaactgacc

SEQ ID NO: 4528038 - DNA, 25 bp, Homo sapien
tggccaacgagaaagatgacaggga

SEQ ID NO: 4528039 - DNA, 25 bp, Homo sapien
tgcttcaagcccattggccaacgag

SEQ ID NO: 4528040 - DNA, 25 bp, Homo sapien
acagctgcgtaactgacccagaggc

SEQ ID NO: 4528041 - DNA, 25 bp, Homo sapien
tatccccgtgtctctgccccgctgg

SEQ ID NO: 4528042 - DNA, 25 bp, Homo sapien
tatatccccgtgtctctgccccgct

SEQ ID NO: 4528043 - DNA, 25 bp, Homo sapien
tctatatccccgtgtctctgccccg

SEQ ID NO: 4528044 - DNA, 25 bp, Homo sapien
atctctatatccccgtgtctctgcc

SEQ ID NO: 4528045 - DNA, 25 bp, Homo sapien
cttaaagaatcagaaataaataggc

SEQ ID NO: 4528046 - DNA, 25 bp, Homo sapien
aaagaatcagaaataaataggctgg

SEQ ID NO: 4528047 - DNA, 25 bp, Homo sapien
tagttccaagactagcctgcccaac

SEQ ID NO: 4528048 - DNA, 25 bp, Homo sapien
gtcagtagttccaagactagcctgc

SEQ ID NO: 4528049 - DNA, 25 bp, Homo sapien
gctgaggcaggataattgcttgaac

SEQ ID NO: 4528050 - DNA, 25 bp, Homo sapien
gctgagcatggtggcagaggcctgt

SEQ ID NO: 4528051 - DNA, 25 bp, Homo sapien
tggctgaggcaggataattgcttga

SEQ ID NO: 4528052 - DNA, 25 bp, Homo sapien
atctcagctactcgggtggctgagg

SEQ ID NO: 4528053 - DNA, 25 bp, Homo sapien
cagatagaacgctgtgattgtccac

SEQ ID NO: 4528054 - DNA, 25 bp, Homo sapien
tccaagtttctagacagcctgatag

SEQ ID NO: 4528055 - DNA, 25 bp, Homo sapien
cctgatagaaggtagtcgaaagcaa

SEQ ID NO: 4528056 - DNA, 25 bp, Homo sapien
tacgctacccttctacgagtctctg

SEQ ID NO: 4528057 - DNA, 25 bp, Homo sapien
gagaaacgagttctcaccatgctgc

SEQ ID NO: 4528058 - DNA, 25 bp, Homo sapien
ttaatctttgggaatcctacaggct

SEQ ID NO: 4528059 - DNA, 25 bp, Homo sapien
tatattgggttcactacttgaatgc

SEQ ID NO: 4528060 - DNA, 25 bp, Homo sapien
tcctagaaaaagtatctgtgcgtgc

SEQ ID NO: 4528061 - DNA, 25 bp, Homo sapien
tttgtacgatgaccggttctgtcga

SEQ ID NO: 4528062 - DNA, 25 bp, Homo sapien
accggttctgtcgagtaggcactgc

SEQ ID NO: 4528063 - DNA, 25 bp, Homo sapien
cgatgaccggttctgtcgagtaggc

SEQ ID NO: 4528064 - DNA, 25 bp, Homo sapien
tttctttgtacgatgaccggttctg

SEQ ID NO: 4528065 - DNA, 25 bp, Homo sapien
agttcaatacgtaatgctcctccac

SEQ ID NO: 4528066 - DNA, 25 bp, Homo sapien
ctgttttgtgagaagttcaatacgt

SEQ ID NO: 4528067 - DNA, 25 bp, Homo sapien
gttttgtgagaagttcaatacgtaa

SEQ ID NO: 4528068 - DNA, 25 bp, Homo sapien
tcaatacgtaatgctcctccacaca

SEQ ID NO: 4528069 - DNA, 25 bp, Homo sapien
tcaggaagacaacccagttgacaac

SEQ ID NO: 4528070 - DNA, 25 bp, Homo sapien
acccagttgacaacgacaacagttt

SEQ ID NO: 4528071 - DNA, 25 bp, Homo sapien
acttcaggaagacaacccagttgac

SEQ ID NO: 4528072 - DNA, 25 bp, Homo sapien
gaagacaacccagttgacaacgaca

SEQ ID NO: 4528073 - DNA, 25 bp, Homo sapien
gggctctgctttcatctcgtagtga

SEQ ID NO: 4528074 - DNA, 25 bp, Homo sapien
ttttcccactaatgggctctgcttt

SEQ ID NO: 4528075 - DNA, 25 bp, Homo sapien
gcagttaaatgctcttgtctttcag

SEQ ID NO: 4528076 - DNA, 25 bp, Homo sapien
cccactaatgggctctgctttcatc

SEQ ID NO: 4528077 - DNA, 25 bp, Homo sapien
aatgaaaagtgctcagtgattggtg

SEQ ID NO: 4528078 - DNA, 25 bp, Homo sapien
gtgggatagtggtgtctagcacaat

SEQ ID NO: 4528079 - DNA, 25 bp, Homo sapien
ggcagcttgccgtaaggtatccaac

SEQ ID NO: 4528080 - DNA, 25 bp, Homo sapien
tccaacagcaccagcggcaggaaat

SEQ ID NO: 4528081 - DNA, 25 bp, Homo sapien
tctgcgtcacactgcgtgagttagc

SEQ ID NO: 4528082 - DNA, 25 bp, Homo sapien
tcacactgcgtgagttagctgggaa

SEQ ID NO: 4528083 - DNA, 25 bp, Homo sapien
gcgtcacactgcgtgagttagctgg

SEQ ID NO: 4528084 - DNA, 25 bp, Homo sapien
cacactgcgtgagttagctgggaaa

SEQ ID NO: 4528085 - DNA, 25 bp, Homo sapien
tttgggttctgctggccgcctttcc

SEQ ID NO: 4528086 - DNA, 25 bp, Homo sapien
aacgcggctaccaaccctggaccat

SEQ ID NO: 4528087 - DNA, 25 bp, Homo sapien
cagcagttaggtcttgttgggaaaa

SEQ ID NO: 4528088 - DNA, 25 bp, Homo sapien
ctttccctctattcacggagtctgg

SEQ ID NO: 4528089 - DNA, 25 bp, Homo sapien
ttttggggacggtgcctgtgctttg

SEQ ID NO: 4528090 - DNA, 25 bp, Homo sapien
tggggacggtgcctgtgctttgcac

SEQ ID NO: 4528091 - DNA, 25 bp, Homo sapien
tttggggacggtgcctgtgctttgc

SEQ ID NO: 4528092 - DNA, 25 bp, Homo sapien
gggtcgtggaaggaattaatgcact

SEQ ID NO: 4528093 - DNA, 25 bp, Homo sapien
cgtggaaggaattaatgcacttcct

SEQ ID NO: 4528094 - DNA, 25 bp, Homo sapien
gtccctttacgtgtctctggagctg

SEQ ID NO: 4528095 - DNA, 25 bp, Homo sapien
tctctgtccctttacgtgtctctgg

SEQ ID NO: 4528096 - DNA, 25 bp, Homo sapien
tttttctgcaggtacttttgcaagt

SEQ ID NO: 4528097 - DNA, 25 bp, Homo sapien
tagggagagatgagaagttccaagg

SEQ ID NO: 4528098 - DNA, 25 bp, Homo sapien
agagatgagaagttccaaggaaaag

SEQ ID NO: 4528099 - DNA, 25 bp, Homo sapien
acttttgcaagtgtgtagggagaga

SEQ ID NO: 4528100 - DNA, 25 bp, Homo sapien
tggcacctggagtcgtcaaattcag

SEQ ID NO: 4528101 - DNA, 25 bp, Homo sapien
acaggtgggccttgagaacgtcacg

SEQ ID NO: 4528102 - DNA, 25 bp, Homo sapien
tgccacagaatcatacacgtagaag

SEQ ID NO: 4528103 - DNA, 25 bp, Homo sapien
ccttgagaacgtcacgctaagtcaa

SEQ ID NO: 4528104 - DNA, 25 bp, Homo sapien
taggctgtgacacgctggccgagct

SEQ ID NO: 4528105 - DNA, 25 bp, Homo sapien
ctaggctgtgacacgctggccgagc

SEQ ID NO: 4528106 - DNA, 25 bp, Homo sapien
ttccacttccactgagcagaggaac

SEQ ID NO: 4528107 - DNA, 25 bp, Homo sapien
ggggaccgcaacagagaacggatgc

SEQ ID NO: 4528108 - DNA, 25 bp, Homo sapien
gcatttggggaccgcaacagagaac

SEQ ID NO: 4528109 - DNA, 25 bp, Homo sapien
atttggggaccgcaacagagaacgg

SEQ ID NO: 4528110 - DNA, 25 bp, Homo sapien
ttggggaccgcaacagagaacggat

SEQ ID NO: 4528111 - DNA, 25 bp, Homo sapien
tcctgcagggcggacactgcaaggt

SEQ ID NO: 4528112 - DNA, 25 bp, Homo sapien
cctgcagggcggacactgcaaggtc

SEQ ID NO: 4528113 - DNA, 25 bp, Homo sapien
gctgccagcttgctggcatgggtcc

SEQ ID NO: 4528114 - DNA, 25 bp, Homo sapien
tgccagcttgctggcatgggtccca

SEQ ID NO: 4528115 - DNA, 25 bp, Homo sapien
gcatgggtcccagacattgccacca

SEQ ID NO: 4528116 - DNA, 25 bp, Homo sapien
ggcatgggtcccagacattgccacc

SEQ ID NO: 4528117 - DNA, 25 bp, Homo sapien
ttaaactgtccaccggcctgcttcc

SEQ ID NO: 4528118 - DNA, 25 bp, Homo sapien
ccccagtcaaagagccaacccactg

SEQ ID NO: 4528119 - DNA, 25 bp, Homo sapien
tcaaagagccaacccactgaccatg

SEQ ID NO: 4528120 - DNA, 25 bp, Homo sapien
agtcaaagagccaacccactgacca

SEQ ID NO: 4528121 - DNA, 25 bp, Homo sapien
gacgcttcacattatcacgtaagaa

SEQ ID NO: 4528122 - DNA, 25 bp, Homo sapien
tgacgcttcacattatcacgtaaga

SEQ ID NO: 4528123 - DNA, 25 bp, Homo sapien
tctgacgcttcacattatcacgtaa

SEQ ID NO: 4528124 - DNA, 25 bp, Homo sapien
ctgacgcttcacattatcacgtaag

SEQ ID NO: 4528125 - DNA, 25 bp, Homo sapien
ggaggcacccgaatgtctccccaga

SEQ ID NO: 4528126 - DNA, 25 bp, Homo sapien
gggcaatttaatctacaaatcctgt

SEQ ID NO: 4528127 - DNA, 25 bp, Homo sapien
ccgtggacaggaggcacccgaatgt

SEQ ID NO: 4528128 - DNA, 25 bp, Homo sapien
cgccctggcctatcgaggccgtgga

SEQ ID NO: 4528129 - DNA, 25 bp, Homo sapien
aacacgcccctgaccgcgtcttcct

SEQ ID NO: 4528130 - DNA, 25 bp, Homo sapien
tctggatgcacctctcaacacgccc

SEQ ID NO: 4528131 - DNA, 25 bp, Homo sapien
tcaacacgcccctgaccgcgtcttc

SEQ ID NO: 4528132 - DNA, 25 bp, Homo sapien
tctcaacacgcccctgaccgcgtct

SEQ ID NO: 4528133 - DNA, 25 bp, Homo sapien
ctctctaggagggccttggacccag

SEQ ID NO: 4528134 - DNA, 25 bp, Homo sapien
tctaggagggccttggacccagagc

SEQ ID NO: 4528135 - DNA, 25 bp, Homo sapien
caaaacaaaggcacttctagtagga

SEQ ID NO: 4528136 - DNA, 25 bp, Homo sapien
tgcaaaacgatgacacgctcctctc

SEQ ID NO: 4528137 - DNA, 25 bp, Homo sapien
agttcacaggcagaatcttcacaat

SEQ ID NO: 4528138 - DNA, 25 bp, Homo sapien
tgaaccttaggactcaaagggtaga

SEQ ID NO: 4528139 - DNA, 25 bp, Homo sapien
caaacgtctctctgcacagttgatt

SEQ ID NO: 4528140 - DNA, 25 bp, Homo sapien
gcctgagagtttcacgaccaaacgt

SEQ ID NO: 4528141 - DNA, 25 bp, Homo sapien
gagtttcctcagaactgtctttgcc

SEQ ID NO: 4528142 - DNA, 25 bp, Homo sapien
gaccaaacgtctctctgcacagttg

SEQ ID NO: 4528143 - DNA, 25 bp, Homo sapien
gaattgcccgatgatgtgtgtttca

SEQ ID NO: 4528144 - DNA, 25 bp, Homo sapien
gttggagtgtttccgtttccagaca

SEQ ID NO: 4528145 - DNA, 25 bp, Homo sapien
aatgttggagtgtttccgtttccag

SEQ ID NO: 4528146 - DNA, 25 bp, Homo sapien
ttcattccagtggtttcgccatcaa

SEQ ID NO: 4528147 - DNA, 25 bp, Homo sapien
tgaaaccgacgttgcactgtacaac

SEQ ID NO: 4528148 - DNA, 25 bp, Homo sapien
tctcctctggcctatgtgaaaccga

SEQ ID NO: 4528149 - DNA, 25 bp, Homo sapien
tggcctatgtgaaaccgacgttgca

SEQ ID NO: 4528150 - DNA, 25 bp, Homo sapien
caaacacgttctcctctggcctatg

SEQ ID NO: 4528151 - DNA, 25 bp, Homo sapien
tggcaagggtgaggaactgagactg

SEQ ID NO: 4528152 - DNA, 25 bp, Homo sapien
aggctgcaaggcagggcatgtgatc

SEQ ID NO: 4528153 - DNA, 25 bp, Homo sapien
ggctgcaaggcagggcatgtgatct

SEQ ID NO: 4528154 - DNA, 25 bp, Homo sapien
gatccccaccgaccgccagtcctct

SEQ ID NO: 4528155 - DNA, 25 bp, Homo sapien
gacattcaagccacccagtgatgtg

SEQ ID NO: 4528156 - DNA, 25 bp, Homo sapien
gccacccagtgatgtgtgctgggcc

SEQ ID NO: 4528157 - DNA, 25 bp, Homo sapien
tgccgaagacattcaagccacccag

SEQ ID NO: 4528158 - DNA, 25 bp, Homo sapien
gttaaccagcaagccacaacttggg

SEQ ID NO: 4528159 - DNA, 25 bp, Homo sapien
gggaggagcacagaccacacttcct

SEQ ID NO: 4528160 - DNA, 25 bp, Homo sapien
acaacttgggtctgcggtgtcagag

SEQ ID NO: 4528161 - DNA, 25 bp, Homo sapien
aagacttcgtgccccattgctactg

SEQ ID NO: 4528162 - DNA, 25 bp, Homo sapien
gccgcccgacccatggagccctgct

SEQ ID NO: 4528163 - DNA, 25 bp, Homo sapien
cccgacccatggagccctgcttggg

SEQ ID NO: 4528164 - DNA, 25 bp, Homo sapien
catctgcggccagatctccctccag

SEQ ID NO: 4528165 - DNA, 25 bp, Homo sapien
accatctgcggccagatctccctcc

SEQ ID NO: 4528166 - DNA, 25 bp, Homo sapien
ggccccgccagacagcgccacttgc

SEQ ID NO: 4528167 - DNA, 25 bp, Homo sapien
accagcccggcgagacgcgagcggg

SEQ ID NO: 4528168 - DNA, 25 bp, Homo sapien
gatgcgaaagccatcgcctagtccc

SEQ ID NO: 4528169 - DNA, 25 bp, Homo sapien
gagagtggcccctcgccgcggtgag

SEQ ID NO: 4528170 - DNA, 25 bp, Homo sapien
gactgctgattagcccgacagctga

SEQ ID NO: 4528171 - DNA, 25 bp, Homo sapien
acagctgaatagcggcgggagccta

SEQ ID NO: 4528172 - DNA, 25 bp, Homo sapien
ggcgggagcctaccgcgagcggagt

SEQ ID NO: 4528173 - DNA, 25 bp, Homo sapien
agcggagtacggaaagcccgcaggg

SEQ ID NO: 4528174 - DNA, 25 bp, Homo sapien
tggtcacagccgtcacaattcttcg

SEQ ID NO: 4528175 - DNA, 25 bp, Homo sapien
gagccttggagccaacctttctctt

SEQ ID NO: 4528176 - DNA, 25 bp, Homo sapien
tcttcgtctggaatgtaatatctcc

SEQ ID NO: 4528177 - DNA, 25 bp, Homo sapien
tcaaccaattacctaggccaagagc

SEQ ID NO: 4528178 - DNA, 25 bp, Homo sapien
ctaatgagtgtcaaaagtctcttct

SEQ ID NO: 4528179 - DNA, 25 bp, Homo sapien
gttcatccttaccagaacatggttt

SEQ ID NO: 4528180 - DNA, 25 bp, Homo sapien
tttaccaattaatggacactacagt

SEQ ID NO: 4528181 - DNA, 25 bp, Homo sapien
cattttatggatatgccccagtgag

SEQ ID NO: 4528182 - DNA, 25 bp, Homo sapien
catatgagcgttgggttgttcatcc

SEQ ID NO: 4528183 - DNA, 25 bp, Homo sapien
tgctctggcagtattgtggaggact

SEQ ID NO: 4528184 - DNA, 25 bp, Homo sapien
ctggcagtattgtggaggactgcat

SEQ ID NO: 4528185 - DNA, 25 bp, Homo sapien
cagtattgtggaggactgcatgtgg

SEQ ID NO: 4528186 - DNA, 25 bp, Homo sapien
ctattgctctggcagtattgtggag

SEQ ID NO: 4528187 - DNA, 25 bp, Homo sapien
tttatcaagatagcagcattttcct

SEQ ID NO: 4528188 - DNA, 25 bp, Homo sapien
tatcaagatagcagcattttccttc

SEQ ID NO: 4528189 - DNA, 25 bp, Homo sapien
tgattgttttgctaacttttgtacg

SEQ ID NO: 4528190 - DNA, 25 bp, Homo sapien
tcttcagcttcctgtttgattgttt

SEQ ID NO: 4528191 - DNA, 25 bp, Homo sapien
tgtaagtgtcaaaccaacgactagg

SEQ ID NO: 4528192 - DNA, 25 bp, Homo sapien
tgtccatgggacactaaagttccac

SEQ ID NO: 4528193 - DNA, 25 bp, Homo sapien
tgtcttctccgaatatacgggactg

SEQ ID NO: 4528194 - DNA, 25 bp, Homo sapien
cacttacagataggaacatagacgc

SEQ ID NO: 4528195 - DNA, 25 bp, Homo sapien
ggaaaccatcattcttcgcaaactt

SEQ ID NO: 4528196 - DNA, 25 bp, Homo sapien
atcattcttcgcaaactttctcaag

SEQ ID NO: 4528197 - DNA, 25 bp, Homo sapien
catcattcttcgcaaactttctcaa

SEQ ID NO: 4528198 - DNA, 25 bp, Homo sapien
aaccatcattcttcgcaaactttct

SEQ ID NO: 4528199 - DNA, 25 bp, Homo sapien
ttctttttttcccagcaagtgctgt

SEQ ID NO: 4528200 - DNA, 25 bp, Homo sapien
tctttttttcccagcaagtgctgtg

SEQ ID NO: 4528201 - DNA, 25 bp, Homo sapien
tttctttttttcccagcaagtgctg

SEQ ID NO: 4528202 - DNA, 25 bp, Homo sapien
ttttattgaaatgtcccaggagtag

SEQ ID NO: 4528203 - DNA, 25 bp, Homo sapien
tttattgaaatgtcccaggagtaga

SEQ ID NO: 4528204 - DNA, 25 bp, Homo sapien
ttattgaaatgtcccaggagtagat

SEQ ID NO: 4528205 - DNA, 25 bp, Homo sapien
ctgctcagatgggactcttcctagg

SEQ ID NO: 4528206 - DNA, 25 bp, Homo sapien
tgctcagatgggactcttcctaggc

SEQ ID NO: 4528207 - DNA, 25 bp, Homo sapien
tcagatgggactcttcctaggcacc

SEQ ID NO: 4528208 - DNA, 25 bp, Homo sapien
gaggagctgcgctcgctttcgcctg

SEQ ID NO: 4528209 - DNA, 25 bp, Homo sapien
agaggagctgcgctcgctttcgcct

SEQ ID NO: 4528210 - DNA, 25 bp, Homo sapien
gattgttccgggattcactgaagtc

SEQ ID NO: 4528211 - DNA, 25 bp, Homo sapien
tgctggatgcggttcttggctgcct

SEQ ID NO: 4528212 - DNA, 25 bp, Homo sapien
tctggggtggagaaccgattgttcc

SEQ ID NO: 4528213 - DNA, 25 bp, Homo sapien
tcttccaacccgtatgactgaccgg

SEQ ID NO: 4528214 - DNA, 25 bp, Homo sapien
cttctgcccaaacatgaagttgttg

SEQ ID NO: 4528215 - DNA, 25 bp, Homo sapien
gcttctgcccaaacatgaagttgtt

SEQ ID NO: 4528216 - DNA, 25 bp, Homo sapien
agcttctgcccaaacatgaagttgt

SEQ ID NO: 4528217 - DNA, 25 bp, Homo sapien
ccggcttgcttttcaggaatttcac

SEQ ID NO: 4528218 - DNA, 25 bp, Homo sapien
cccggcttgcttttcaggaatttca

SEQ ID NO: 4528219 - DNA, 25 bp, Homo sapien
cgcccccggcttgcttttcaggaat

SEQ ID NO: 4528220 - DNA, 25 bp, Homo sapien
ggcgcccccggcttgcttttcagga

SEQ ID NO: 4528221 - DNA, 25 bp, Homo sapien
gccatacaagcagaagacattgaag

SEQ ID NO: 4528222 - DNA, 25 bp, Homo sapien
cttctccacattgccatacaagcag

SEQ ID NO: 4528223 - DNA, 25 bp, Homo sapien
ccatacaagcagaagacattgaaga

SEQ ID NO: 4528224 - DNA, 25 bp, Homo sapien
ctccacattgccatacaagcagaag

SEQ ID NO: 4528225 - DNA, 25 bp, Homo sapien
cgagcacagggctgtcggcgtgagg

SEQ ID NO: 4528226 - DNA, 25 bp, Homo sapien
cttagaccacgagcacagggctgtc

SEQ ID NO: 4528227 - DNA, 25 bp, Homo sapien
accacgagcacagggctgtcggcgt

SEQ ID NO: 4528228 - DNA, 25 bp, Homo sapien
agaccacgagcacagggctgtcggc

SEQ ID NO: 4528229 - DNA, 25 bp, Homo sapien
gcccatactggggggccgtagcgac

SEQ ID NO: 4528230 - DNA, 25 bp, Homo sapien
ggtgcccatactggggggccgtagc

SEQ ID NO: 4528231 - DNA, 25 bp, Homo sapien
tgcccatactggggggccgtagcga

SEQ ID NO: 4528232 - DNA, 25 bp, Homo sapien
gtgcccatactggggggccgtagcg

SEQ ID NO: 4528233 - DNA, 25 bp, Homo sapien
ccttctcccttcgtagtgaggtcgg

SEQ ID NO: 4528234 - DNA, 25 bp, Homo sapien
gggcccgtggccctcatcatggtaa

SEQ ID NO: 4528235 - DNA, 25 bp, Homo sapien
agtgacccccgactggtggacccat

SEQ ID NO: 4528236 - DNA, 25 bp, Homo sapien
ccccgactggtggacccatccttct

SEQ ID NO: 4528237 - DNA, 25 bp, Homo sapien
tcttgaacacattcaagcgtgtagg

SEQ ID NO: 4528238 - DNA, 25 bp, Homo sapien
ctgagattggggtttgtgtagtccc

SEQ ID NO: 4528239 - DNA, 25 bp, Homo sapien
gtagtcccaagtatcctgatcattc

SEQ ID NO: 4528240 - DNA, 25 bp, Homo sapien
ggtttgtgtagtcccaagtatcctg

SEQ ID NO: 4528241 - DNA, 25 bp, Homo sapien
aggcattaccaccgcatagctgatg

SEQ ID NO: 4528242 - DNA, 25 bp, Homo sapien
taggcattaccaccgcatagctgat

SEQ ID NO: 4528243 - DNA, 25 bp, Homo sapien
gttgccagtcttgagccgcttaggg

SEQ ID NO: 4528244 - DNA, 25 bp, Homo sapien
tggtcgccggcgttgccagtcttga

SEQ ID NO: 4528245 - DNA, 25 bp, Homo sapien
ggttttgtgcaggtcatggtagttc

SEQ ID NO: 4528246 - DNA, 25 bp, Homo sapien
gtcatggtagttctccccgccgccg

SEQ ID NO: 4528247 - DNA, 25 bp, Homo sapien
cttggccttttagcttagagactga

SEQ ID NO: 4528248 - DNA, 25 bp, Homo sapien
gtacagtgtccgttcattcaacaag

SEQ ID NO: 4528249 - DNA, 25 bp, Homo sapien
agaaaatctggtgccccacagtgag

SEQ ID NO: 4528250 - DNA, 25 bp, Homo sapien
caaaagtagccatggtctgcgtcct

SEQ ID NO: 4528251 - DNA, 25 bp, Homo sapien
gaacattccatcgaggacttgaagg

SEQ ID NO: 4528252 - DNA, 25 bp, Homo sapien
gacggtgcataaagagtgctggaca

SEQ ID NO: 4528253 - DNA, 25 bp, Homo sapien
ggacagcaaataggtctccctgcta

SEQ ID NO: 4528254 - DNA, 25 bp, Homo sapien
aaatatggttgccagggaagtcctc

SEQ ID NO: 4528255 - DNA, 25 bp, Homo sapien
atccactgagatcaatgtatggctc

SEQ ID NO: 4528256 - DNA, 25 bp, Homo sapien
aactacctgccagaatgtgcagttt

SEQ ID NO: 4528257 - DNA, 25 bp, Homo sapien
aagcaaaactacctgccagaatgtg

SEQ ID NO: 4528258 - DNA, 25 bp, Homo sapien
ccactgagatcaatgtatggctcta

SEQ ID NO: 4528259 - DNA, 25 bp, Homo sapien
ttgtgaaaatgaaacagattatctc

SEQ ID NO: 4528260 - DNA, 25 bp, Homo sapien
aaatgaaacagattatctcatgcca

SEQ ID NO: 4528261 - DNA, 25 bp, Homo sapien
gttatactacaattttgtgaaaatg

SEQ ID NO: 4528262 - DNA, 25 bp, Homo sapien
aacacttgcatagttatactacaat

SEQ ID NO: 4528263 - DNA, 25 bp, Homo sapien
tataattttcaagatgcgcaaaata

SEQ ID NO: 4528264 - DNA, 25 bp, Homo sapien
ctataattttcaagatgcgcaaaat

SEQ ID NO: 4528265 - DNA, 25 bp, Homo sapien
cataaagatagcagttacactttta

SEQ ID NO: 4528266 - DNA, 25 bp, Homo sapien
gggctagaaatcataccactattag

SEQ ID NO: 4528267 - DNA, 25 bp, Homo sapien
gaacccatacattggtaaaattcat

SEQ ID NO: 4528268 - DNA, 25 bp, Homo sapien
tacacattctgttaacaagaaccca

SEQ ID NO: 4528269 - DNA, 25 bp, Homo sapien
tatgtccctgactgaaactgagagg

SEQ ID NO: 4528270 - DNA, 25 bp, Homo sapien
cctgtttcagagacatttaaactct

SEQ ID NO: 4528271 - DNA, 25 bp, Homo sapien
tatgcctgtttcagagacatttaaa

SEQ ID NO: 4528272 - DNA, 25 bp, Homo sapien
tgtatgcctgtttcagagacattta

SEQ ID NO: 4528273 - DNA, 25 bp, Homo sapien
tgcctgtttcagagacatttaaact

SEQ ID NO: 4528274 - DNA, 25 bp, Homo sapien
tccaaagggaactgccacagtacag

SEQ ID NO: 4528275 - DNA, 25 bp, Homo sapien
ggaactgccacagtacagtgctcat

SEQ ID NO: 4528276 - DNA, 25 bp, Homo sapien
aaccgcatattgagctatggaagag

SEQ ID NO: 4528277 - DNA, 25 bp, Homo sapien
gcaaaccgcatattgagctatggaa

SEQ ID NO: 4528278 - DNA, 25 bp, Homo sapien
cattaaaaaagcacgggagcctatt

SEQ ID NO: 4528279 - DNA, 25 bp, Homo sapien
gaggcacagagacccactctctttt

SEQ ID NO: 4528280 - DNA, 25 bp, Homo sapien
agtgaacatcagtgagaggcacaga

SEQ ID NO: 4528281 - DNA, 25 bp, Homo sapien
aaccagcgagaacagttttgtgcaa

SEQ ID NO: 4528282 - DNA, 25 bp, Homo sapien
tgagcagctctttgatgatggtggt

SEQ ID NO: 4528283 - DNA, 25 bp, Homo sapien
aatttcttgagcagctctttgatga

SEQ ID NO: 4528284 - DNA, 25 bp, Homo sapien
taaaaatttcttgagcagctctttg

SEQ ID NO: 4528285 - DNA, 25 bp, Homo sapien
ttcttgagcagctctttgatgatgg

SEQ ID NO: 4528286 - DNA, 25 bp, Homo sapien
ctcggcagccaagcccagcaaaagc

SEQ ID NO: 4528287 - DNA, 25 bp, Homo sapien
caagcccagcaaaagcatggcacac

SEQ ID NO: 4528288 - DNA, 25 bp, Homo sapien
ggcagccaagcccagcaaaagcatg

SEQ ID NO: 4528289 - DNA, 25 bp, Homo sapien
cagccaagcccagcaaaagcatggc

SEQ ID NO: 4528290 - DNA, 25 bp, Homo sapien
cccaagcctgggtgctcctggtggt

SEQ ID NO: 4528291 - DNA, 25 bp, Homo sapien
agcagttgctgcccaagcctgggtg

SEQ ID NO: 4528292 - DNA, 25 bp, Homo sapien
ccaagcctgggtgctcctggtggtc

SEQ ID NO: 4528293 - DNA, 25 bp, Homo sapien
ctgcccaagcctgggtgctcctggt

SEQ ID NO: 4528294 - DNA, 25 bp, Homo sapien
gttggtgaggctcgcctcacaaaga

SEQ ID NO: 4528295 - DNA, 25 bp, Homo sapien
cacgctgttggtgaggctcgcctca

SEQ ID NO: 4528296 - DNA, 25 bp, Homo sapien
cgctgttggtgaggctcgcctcaca

SEQ ID NO: 4528297 - DNA, 25 bp, Homo sapien
ctccacgctgttggtgaggctcgcc

SEQ ID NO: 4528298 - DNA, 25 bp, Homo sapien
ccatgcttgtcggcagccccgagct

SEQ ID NO: 4528299 - DNA, 25 bp, Homo sapien
caccatgcttgtcggcagccccgag

SEQ ID NO: 4528300 - DNA, 25 bp, Homo sapien
accatgcttgtcggcagccccgagc

SEQ ID NO: 4528301 - DNA, 25 bp, Homo sapien
catgcttgtcggcagccccgagctc

SEQ ID NO: 4528302 - DNA, 25 bp, Homo sapien
tttgccgtgcccctcgctgtagctg

SEQ ID NO: 4528303 - DNA, 25 bp, Homo sapien
atttgccgtgcccctcgctgtagct

SEQ ID NO: 4528304 - DNA, 25 bp, Homo sapien
ggaatttgccgtgcccctcgctgta

SEQ ID NO: 4528305 - DNA, 25 bp, Homo sapien
gaatttgccgtgcccctcgctgtag

SEQ ID NO: 4528306 - DNA, 25 bp, Homo sapien
ccatctcctgcagctccagcagctt

SEQ ID NO: 4528307 - DNA, 25 bp, Homo sapien
tctcctgcagctccagcagcttcac

SEQ ID NO: 4528308 - DNA, 25 bp, Homo sapien
agccgcaacaccatctcctgcagct

SEQ ID NO: 4528309 - DNA, 25 bp, Homo sapien
aagccgcaacaccatctcctgcagc

SEQ ID NO: 4528310 - DNA, 25 bp, Homo sapien
atgatggcctcctcccggtgacgca

SEQ ID NO: 4528311 - DNA, 25 bp, Homo sapien
tgatggcctcctcccggtgacgcat

SEQ ID NO: 4528312 - DNA, 25 bp, Homo sapien
tggctctgttagaaggcgatgtact

SEQ ID NO: 4528313 - DNA, 25 bp, Homo sapien
ggctctgttagaaggcgatgtactt

SEQ ID NO: 4528314 - DNA, 25 bp, Homo sapien
gctctgttagaaggcgatgtacttt

SEQ ID NO: 4528315 - DNA, 25 bp, Homo sapien
ctctctctccggtactggatgaatc

SEQ ID NO: 4528316 - DNA, 25 bp, Homo sapien
tctctctccggtactggatgaatcc

SEQ ID NO: 4528317 - DNA, 25 bp, Homo sapien
acatctcagcagcgacctgccccag

SEQ ID NO: 4528318 - DNA, 25 bp, Homo sapien
cttcttggcccatgctaggactcac

SEQ ID NO: 4528319 - DNA, 25 bp, Homo sapien
gcccttcttggcccatgctaggact

SEQ ID NO: 4528320 - DNA, 25 bp, Homo sapien
atctcagcagcgacctgccccagcc

SEQ ID NO: 4528321 - DNA, 25 bp, Homo sapien
cttcctgcagggcccggagggtctc

SEQ ID NO: 4528322 - DNA, 25 bp, Homo sapien
acttcctgcagggcccggagggtct

SEQ ID NO: 4528323 - DNA, 25 bp, Homo sapien
ctccagcttctccatgacttcctgc

SEQ ID NO: 4528324 - DNA, 25 bp, Homo sapien
tcccctccagcttctccatgacttc

SEQ ID NO: 4528325 - DNA, 25 bp, Homo sapien
tggctccttctcggccgaggtgagc

SEQ ID NO: 4528326 - DNA, 25 bp, Homo sapien
ctccaagtcgctctgtggctcggcc

SEQ ID NO: 4528327 - DNA, 25 bp, Homo sapien
ctctccttttgcccacggttcagga

SEQ ID NO: 4528328 - DNA, 25 bp, Homo sapien
cctctccttttgcccacggttcagg

SEQ ID NO: 4528329 - DNA, 25 bp, Homo sapien
tcttctcccgttcccgaagcctctc

SEQ ID NO: 4528330 - DNA, 25 bp, Homo sapien
tcagaggacactgctggggcatccg

SEQ ID NO: 4528331 - DNA, 25 bp, Homo sapien
gctggggcatccgggggcagtggct

SEQ ID NO: 4528332 - DNA, 25 bp, Homo sapien
agctccttcctcaggtcttgcagct

SEQ ID NO: 4528333 - DNA, 25 bp, Homo sapien
gacactgctggggcatccgggggca

SEQ ID NO: 4528334 - DNA, 25 bp, Homo sapien
tcctctacccgatgcgtatcatgct

SEQ ID NO: 4528335 - DNA, 25 bp, Homo sapien
gctcctctacccgatgcgtatcatg

SEQ ID NO: 4528336 - DNA, 25 bp, Homo sapien
cctctacccgatgcgtatcatgctt

SEQ ID NO: 4528337 - DNA, 25 bp, Homo sapien
agctcctctacccgatgcgtatcat

SEQ ID NO: 4528338 - DNA, 25 bp, Homo sapien
tgacctatcttaagttgttggtggg

SEQ ID NO: 4528339 - DNA, 25 bp, Homo sapien
gtgacctatcttaagttgttggtgg

SEQ ID NO: 4528340 - DNA, 25 bp, Homo sapien
agtgacctatcttaagttgttggtg

SEQ ID NO: 4528341 - DNA, 25 bp, Homo sapien
tttgttcagcatattgatctctctc

SEQ ID NO: 4528342 - DNA, 25 bp, Homo sapien
atttgttcagcatattgatctctct

SEQ ID NO: 4528343 - DNA, 25 bp, Homo sapien
ggaagggccgtcactggtcctcacc

SEQ ID NO: 4528344 - DNA, 25 bp, Homo sapien
tggccacacaagttaggaagggccg

SEQ ID NO: 4528345 - DNA, 25 bp, Homo sapien
gtgtcacgtgtcctttcagcagtat

SEQ ID NO: 4528346 - DNA, 25 bp, Homo sapien
tctaactgccgcttgagaagtgctt

SEQ ID NO: 4528347 - DNA, 25 bp, Homo sapien
agcagtatctgctcccgtatggact

SEQ ID NO: 4528348 - DNA, 25 bp, Homo sapien
ctctaactgccgcttgagaagtgct

SEQ ID NO: 4528349 - DNA, 25 bp, Homo sapien
tttcgatctggggagcctgggccat

SEQ ID NO: 4528350 - DNA, 25 bp, Homo sapien
tgagaagtttcgatctggggagcct

SEQ ID NO: 4528351 - DNA, 25 bp, Homo sapien
aagtttcgatctggggagcctgggc

SEQ ID NO: 4528352 - DNA, 25 bp, Homo sapien
tcgatctggggagcctgggccattc

SEQ ID NO: 4528353 - DNA, 25 bp, Homo sapien
gggacagggcaggtgactggactca

SEQ ID NO: 4528354 - DNA, 25 bp, Homo sapien
ggacagggcaggtgactggactcac

SEQ ID NO: 4528355 - DNA, 25 bp, Homo sapien
tcctccatctgtgaagccgggctcc

SEQ ID NO: 4528356 - DNA, 25 bp, Homo sapien
tgtgaagccgggctcccaggggaca

SEQ ID NO: 4528357 - DNA, 25 bp, Homo sapien
gcttcttcttctgtgtggcggcgac

SEQ ID NO: 4528358 - DNA, 25 bp, Homo sapien
cggcttcttcttctgtgtggcggcg

SEQ ID NO: 4528359 - DNA, 25 bp, Homo sapien
cccatccggcttcttcttctgtgtg

SEQ ID NO: 4528360 - DNA, 25 bp, Homo sapien
tccggcttcttcttctgtgtggcgg

SEQ ID NO: 4528361 - DNA, 25 bp, Homo sapien
tgcgatgaacgttgcaggcggccgg

SEQ ID NO: 4528362 - DNA, 25 bp, Homo sapien
cctatacgctgcgatgaacgttgca

SEQ ID NO: 4528363 - DNA, 25 bp, Homo sapien
aactctcctatacgctgcgatgaac

SEQ ID NO: 4528364 - DNA, 25 bp, Homo sapien
ctcctatacgctgcgatgaacgttg

SEQ ID NO: 4528365 - DNA, 25 bp, Homo sapien
tcaaagtatctgagagaatgtttca

SEQ ID NO: 4528366 - DNA, 25 bp, Homo sapien
cttcaaagtatctgagagaatgttt

SEQ ID NO: 4528367 - DNA, 25 bp, Homo sapien
caaagtatctgagagaatgtttcat

SEQ ID NO: 4528368 - DNA, 25 bp, Homo sapien
ttcaaagtatctgagagaatgtttc

SEQ ID NO: 4528369 - DNA, 25 bp, Homo sapien
ttctttttctctgtgttcaatctct

SEQ ID NO: 4528370 - DNA, 25 bp, Homo sapien
cgtatttagtttctttttctctgtg

SEQ ID NO: 4528371 - DNA, 25 bp, Homo sapien
tgatacaggtccgtatttagtttct

SEQ ID NO: 4528372 - DNA, 25 bp, Homo sapien
tttttctctgtgttcaatctctgga

SEQ ID NO: 4528373 - DNA, 25 bp, Homo sapien
tctagctccctttcagctttctgtt

SEQ ID NO: 4528374 - DNA, 25 bp, Homo sapien
gtttctcattgtttgctttcttttc

SEQ ID NO: 4528375 - DNA, 25 bp, Homo sapien
ctctagctccctttcagctttctgt

SEQ ID NO: 4528376 - DNA, 25 bp, Homo sapien
tcagctttctgtttctcattgtttg

SEQ ID NO: 4528377 - DNA, 25 bp, Homo sapien
aatgccaccaatgccccaggacagg

SEQ ID NO: 4528378 - DNA, 25 bp, Homo sapien
agaatgccaccaatgccccaggaca

SEQ ID NO: 4528379 - DNA, 25 bp, Homo sapien
cagaatgccaccaatgccccaggac

SEQ ID NO: 4528380 - DNA, 25 bp, Homo sapien
gaatgccaccaatgccccaggacag

SEQ ID NO: 4528381 - DNA, 25 bp, Homo sapien
ttcttccagctgatgttccacttgt

SEQ ID NO: 4528382 - DNA, 25 bp, Homo sapien
ttccagctgatgttccacttgtttc

SEQ ID NO: 4528383 - DNA, 25 bp, Homo sapien
cttccagctgatgttccacttgttt

SEQ ID NO: 4528384 - DNA, 25 bp, Homo sapien
tcttccagctgatgttccacttgtt

SEQ ID NO: 4528385 - DNA, 25 bp, Homo sapien
attccccagacaggaagcggcaggc

SEQ ID NO: 4528386 - DNA, 25 bp, Homo sapien
acaggaactgttcccaagctcccaa

SEQ ID NO: 4528387 - DNA, 25 bp, Homo sapien
aggaactgttcccaagctcccaagg

SEQ ID NO: 4528388 - DNA, 25 bp, Homo sapien
tgggaacaggaactgttcccaagct

SEQ ID NO: 4528389 - DNA, 25 bp, Homo sapien
tatggacctcgagttcaggactgct

SEQ ID NO: 4528390 - DNA, 25 bp, Homo sapien
ggacctcgagttcaggactgctgct

SEQ ID NO: 4528391 - DNA, 25 bp, Homo sapien
tttatggacctcgagttcaggactg

SEQ ID NO: 4528392 - DNA, 25 bp, Homo sapien
tggacctcgagttcaggactgctgc

SEQ ID NO: 4528393 - DNA, 25 bp, Homo sapien
agaacgatcattagggctgggttgt

SEQ ID NO: 4528394 - DNA, 25 bp, Homo sapien
gagagaacgatcattagggctgggt

SEQ ID NO: 4528395 - DNA, 25 bp, Homo sapien
aggtagagagaacgatcattagggc

SEQ ID NO: 4528396 - DNA, 25 bp, Homo sapien
cgatcattagggctgggttgtgtgt

SEQ ID NO: 4528397 - DNA, 25 bp, Homo sapien
ctggcctgcggggtcactgcacctc

SEQ ID NO: 4528398 - DNA, 25 bp, Homo sapien
aggaggttggagggctggcctgcgg

SEQ ID NO: 4528399 - DNA, 25 bp, Homo sapien
ggctggcctgcggggtcactgcacc

SEQ ID NO: 4528400 - DNA, 25 bp, Homo sapien
gcctgcggggtcactgcacctccac

SEQ ID NO: 4528401 - DNA, 25 bp, Homo sapien
atgatgtagggccctccccgtggat

SEQ ID NO: 4528402 - DNA, 25 bp, Homo sapien
agatgatgtagggccctccccgtgg

SEQ ID NO: 4528403 - DNA, 25 bp, Homo sapien
cagatgatgtagggccctccccgtg

SEQ ID NO: 4528404 - DNA, 25 bp, Homo sapien
gatgtagggccctccccgtggatac

SEQ ID NO: 4528405 - DNA, 25 bp, Homo sapien
tactagggattaacataaaatcgac

SEQ ID NO: 4528406 - DNA, 25 bp, Homo sapien
gattgccctctactgctccttgggc

SEQ ID NO: 4528407 - DNA, 25 bp, Homo sapien
tccacaatcttaacgattgccctct

SEQ ID NO: 4528408 - DNA, 25 bp, Homo sapien
caataccacctctatcatacagacg

SEQ ID NO: 4528409 - DNA, 25 bp, Homo sapien
ccaccagaagcggccgtctcagggc

SEQ ID NO: 4528410 - DNA, 25 bp, Homo sapien
agaagcggccgtctcagggctactg

SEQ ID NO: 4528411 - DNA, 25 bp, Homo sapien
ccagaagcggccgtctcagggctac

SEQ ID NO: 4528412 - DNA, 25 bp, Homo sapien
catttgctttcgtgttcctcttcgc

SEQ ID NO: 4528413 - DNA, 25 bp, Homo sapien
ccagtaatgacagttagtaggcaga

SEQ ID NO: 4528414 - DNA, 25 bp, Homo sapien
agtctccactccacaacgcgggagg

SEQ ID NO: 4528415 - DNA, 25 bp, Homo sapien
ccaggtccttggatatgcgagccca

SEQ ID NO: 4528416 - DNA, 25 bp, Homo sapien
acatcagcgcgatgtccgagtctcc

SEQ ID NO: 4528417 - DNA, 25 bp, Homo sapien
ggtgatcggcgagggcagggactga

SEQ ID NO: 4528418 - DNA, 25 bp, Homo sapien
ggcaaagtccggtgtgcgtcaggag

SEQ ID NO: 4528419 - DNA, 25 bp, Homo sapien
caacgtcaccccggggtgatcggcg

SEQ ID NO: 4528420 - DNA, 25 bp, Homo sapien
tggggggcaaagtccggtgtgcgtc

SEQ ID NO: 4528421 - DNA, 25 bp, Homo sapien
gcagctaatttactctgtccagttt

SEQ ID NO: 4528422 - DNA, 25 bp, Homo sapien
gagcgctgatcaacacatccagtca

SEQ ID NO: 4528423 - DNA, 25 bp, Homo sapien
tcagccaaatcccagcgagcgctga

SEQ ID NO: 4528424 - DNA, 25 bp, Homo sapien
tggggccacgtcagccaaatcccag

SEQ ID NO: 4528425 - DNA, 25 bp, Homo sapien
tggccaacgagaaagatgacaggga

SEQ ID NO: 4528426 - DNA, 25 bp, Homo sapien
ctggaagacagctgcgtaactgacc

SEQ ID NO: 4528427 - DNA, 25 bp, Homo sapien
tgcttcaagcccattggccaacgag

SEQ ID NO: 4528428 - DNA, 25 bp, Homo sapien
acagctgcgtaactgacccagaggc

SEQ ID NO: 4528429 - DNA, 25 bp, Homo sapien
tatatccccgtgtctctgccccgct

SEQ ID NO: 4528430 - DNA, 25 bp, Homo sapien
tctatatccccgtgtctctgccccg

SEQ ID NO: 4528431 - DNA, 25 bp, Homo sapien
atctctatatccccgtgtctctgcc

SEQ ID NO: 4528432 - DNA, 25 bp, Homo sapien
tatccccgtgtctctgccccgctgg

SEQ ID NO: 4528433 - DNA, 25 bp, Homo sapien
cttaaagaatcagaaataaataggc

SEQ ID NO: 4528434 - DNA, 25 bp, Homo sapien
aaagaatcagaaataaataggctgg

SEQ ID NO: 4528435 - DNA, 25 bp, Homo sapien
tagttccaagactagcctgcccaac

SEQ ID NO: 4528436 - DNA, 25 bp, Homo sapien
gtcagtagttccaagactagcctgc

SEQ ID NO: 4528437 - DNA, 25 bp, Homo sapien
gctgaggcaggataattgcttgaac

SEQ ID NO: 4528438 - DNA, 25 bp, Homo sapien
tggctgaggcaggataattgcttga

SEQ ID NO: 4528439 - DNA, 25 bp, Homo sapien
gctgagcatggtggcagaggcctgt

SEQ ID NO: 4528440 - DNA, 25 bp, Homo sapien
atctcagctactcgggtggctgagg

SEQ ID NO: 4528441 - DNA, 25 bp, Homo sapien
cagatagaacgctgtgattgtccac

SEQ ID NO: 4528442 - DNA, 25 bp, Homo sapien
tccaagtttctagacagcctgatag

SEQ ID NO: 4528443 - DNA, 25 bp, Homo sapien
cctgatagaaggtagtcgaaagcaa

SEQ ID NO: 4528444 - DNA, 25 bp, Homo sapien
tacgctacccttctacgagtctctg

SEQ ID NO: 4528445 - DNA, 25 bp, Homo sapien
accggttctgtcgagtaggcactgc

SEQ ID NO: 4528446 - DNA, 25 bp, Homo sapien
cgatgaccggttctgtcgagtaggc

SEQ ID NO: 4528447 - DNA, 25 bp, Homo sapien
tttgtacgatgaccggttctgtcga

SEQ ID NO: 4528448 - DNA, 25 bp, Homo sapien
tttctttgtacgatgaccggttctg

SEQ ID NO: 4528449 - DNA, 25 bp, Homo sapien
ttgtgagaagttcagtacgtaatgc

SEQ ID NO: 4528450 - DNA, 25 bp, Homo sapien
ctgttttgtgagaagttcagtacgt

SEQ ID NO: 4528451 - DNA, 25 bp, Homo sapien
gaagttcagtacgtaatgctcctcc

SEQ ID NO: 4528452 - DNA, 25 bp, Homo sapien
tcagtacgtaatgctcctccacaca

SEQ ID NO: 4528453 - DNA, 25 bp, Homo sapien
tcaggaagacaacccagttgacaac

SEQ ID NO: 4528454 - DNA, 25 bp, Homo sapien
acttcaggaagacaacccagttgac

SEQ ID NO: 4528455 - DNA, 25 bp, Homo sapien
acccagttgacaacgacaacagttt

SEQ ID NO: 4528456 - DNA, 25 bp, Homo sapien
gaagacaacccagttgacaacgaca

SEQ ID NO: 4528457 - DNA, 25 bp, Homo sapien
ttttcccactaatgggctctgcttt

SEQ ID NO: 4528458 - DNA, 25 bp, Homo sapien
cccactaatgggctctgctttcatc

SEQ ID NO: 4528459 - DNA, 25 bp, Homo sapien
gcagttaaatgctcttgtctttcag

SEQ ID NO: 4528460 - DNA, 25 bp, Homo sapien
gggctctgctttcatctcgtagtga

SEQ ID NO: 4528461 - DNA, 25 bp, Homo sapien
tccaacagcaccagcggcaggaaat

SEQ ID NO: 4528462 - DNA, 25 bp, Homo sapien
aatgaaaagtgctcagtgattggtg

SEQ ID NO: 4528463 - DNA, 25 bp, Homo sapien
gtgggatagtggtgtctagcacaat

SEQ ID NO: 4528464 - DNA, 25 bp, Homo sapien
ggcagcttgccgtaaggtatccaac

SEQ ID NO: 4528465 - DNA, 25 bp, Homo sapien
tcacactgcgtgagttagttgggaa

SEQ ID NO: 4528466 - DNA, 25 bp, Homo sapien
gcgtcacactgcgtgagttagttgg

SEQ ID NO: 4528467 - DNA, 25 bp, Homo sapien
tctgcgtcacactgcgtgagttagt

SEQ ID NO: 4528468 - DNA, 25 bp, Homo sapien
cacactgcgtgagttagttgggaaa

SEQ ID NO: 4528469 - DNA, 25 bp, Homo sapien
tttgggttctgctggccgcctttcc

SEQ ID NO: 4528470 - DNA, 25 bp, Homo sapien
cagcagttaggtcttgttgggaaaa

SEQ ID NO: 4528471 - DNA, 25 bp, Homo sapien
aacgcggctaccaaccctggaccat

SEQ ID NO: 4528472 - DNA, 25 bp, Homo sapien
ctttccctctattcacggagtctgg

SEQ ID NO: 4528473 - DNA, 25 bp, Homo sapien
ttttggggacggtgcctgtgctttg

SEQ ID NO: 4528474 - DNA, 25 bp, Homo sapien
ctttgcacaggacgaggtggcagct

SEQ ID NO: 4528475 - DNA, 25 bp, Homo sapien
cctgtgctttgcacaggacgaggtg

SEQ ID NO: 4528476 - DNA, 25 bp, Homo sapien
gacggtgcctgtgctttgcacagga

SEQ ID NO: 4528477 - DNA, 25 bp, Homo sapien
gggtcgtggaaggaattaatgcact

SEQ ID NO: 4528478 - DNA, 25 bp, Homo sapien
cgtggaaggaattaatgcacttcct

SEQ ID NO: 4528479 - DNA, 25 bp, Homo sapien
gtccctttacgtgtctctggagctg

SEQ ID NO: 4528480 - DNA, 25 bp, Homo sapien
tctctgtccctttacgtgtctctgg

SEQ ID NO: 4528481 - DNA, 25 bp, Homo sapien
agctgatcaccgctgcatgtcccag

SEQ ID NO: 4528482 - DNA, 25 bp, Homo sapien
gatcaccgctgcatgtcccaggctg

SEQ ID NO: 4528483 - DNA, 25 bp, Homo sapien
gctgagctgatcaccgctgcatgtc

SEQ ID NO: 4528484 - DNA, 25 bp, Homo sapien
gccctggctgagctgatcaccgctg

SEQ ID NO: 4528485 - DNA, 25 bp, Homo sapien
ggagagatgagaagttccaacgaaa

SEQ ID NO: 4528486 - DNA, 25 bp, Homo sapien
tttttctgcaggtacttttgcaagc

SEQ ID NO: 4528487 - DNA, 25 bp, Homo sapien
gcaggtacttttgcaagcgtgtagg

SEQ ID NO: 4528488 - DNA, 25 bp, Homo sapien
gagatgagaagttccaacgaaaagg

SEQ ID NO: 4528489 - DNA, 25 bp, Homo sapien
tcttgatgtctgagggatgaacggc

SEQ ID NO: 4528490 - DNA, 25 bp, Homo sapien
tccttgatgtcagacgccaggagag

SEQ ID NO: 4528491 - DNA, 25 bp, Homo sapien
gatgaacggcaaacaaagtgtggcc

SEQ ID NO: 4528492 - DNA, 25 bp, Homo sapien
aagtgtggcctacccatacaatggg

SEQ ID NO: 4528493 - DNA, 25 bp, Homo sapien
tttcctccatcgggtaaccacgagc

SEQ ID NO: 4528494 - DNA, 25 bp, Homo sapien
tacaaatttcagaacccatcccaaa

SEQ ID NO: 4528495 - DNA, 25 bp, Homo sapien
tttttcatcacttgcaatacaaatt

SEQ ID NO: 4528496 - DNA, 25 bp, Homo sapien
ccctttttcatcacttgcaatacaa

SEQ ID NO: 4528497 - DNA, 25 bp, Homo sapien
tcatcacttgcaatacaaatttcag

SEQ ID NO: 4528498 - DNA, 25 bp, Homo sapien
taggctgtgacacgctggccgagct

SEQ ID NO: 4528499 - DNA, 25 bp, Homo sapien
ctaggctgtgacacgctggccgagc

SEQ ID NO: 4528500 - DNA, 25 bp, Homo sapien
ttccacttccactgagcagaggaac

SEQ ID NO: 4528501 - DNA, 25 bp, Homo sapien
gcatttggggaccgcaacagagaat

SEQ ID NO: 4528502 - DNA, 25 bp, Homo sapien
ggggaccgcaacagagaatggatgc

SEQ ID NO: 4528503 - DNA, 25 bp, Homo sapien
atttggggaccgcaacagagaatgg

SEQ ID NO: 4528504 - DNA, 25 bp, Homo sapien
ttggggaccgcaacagagaatggat

SEQ ID NO: 4528505 - DNA, 25 bp, Homo sapien
tcctgcagggcggacactccaaggt

SEQ ID NO: 4528506 - DNA, 25 bp, Homo sapien
cctgcagggcggacactccaaggtc

SEQ ID NO: 4528507 - DNA, 25 bp, Homo sapien
gctgccagcttgctggcatgggtcc

SEQ ID NO: 4528508 - DNA, 25 bp, Homo sapien
tgccagcttgctggcatgggtccca

SEQ ID NO: 4528509 - DNA, 25 bp, Homo sapien
gcatgggtcccagacattgccacca

SEQ ID NO: 4528510 - DNA, 25 bp, Homo sapien
ggcatgggtcccagacattgccacc

SEQ ID NO: 4528511 - DNA, 25 bp, Homo sapien
tcaaagagccaacccactgaccatg

SEQ ID NO: 4528512 - DNA, 25 bp, Homo sapien
agtcaaagagccaacccactgacca

SEQ ID NO: 4528513 - DNA, 25 bp, Homo sapien
ttaaactgtccaccggcctgcttcc

SEQ ID NO: 4528514 - DNA, 25 bp, Homo sapien
ccccagtcaaagagccaacccactg

SEQ ID NO: 4528515 - DNA, 25 bp, Homo sapien
cctatttgccaaatcaccagcaaaa

SEQ ID NO: 4528516 - DNA, 25 bp, Homo sapien
accagcaaaacaagacatgttcaaa

SEQ ID NO: 4528517 - DNA, 25 bp, Homo sapien
gagggcttggtttcaacctatttgc

SEQ ID NO: 4528518 - DNA, 25 bp, Homo sapien
agtgcacataaataagccagggctc

SEQ ID NO: 4528519 - DNA, 25 bp, Homo sapien
gacgcttcacattatcaggtaagaa

SEQ ID NO: 4528520 - DNA, 25 bp, Homo sapien
tctgacgcttcacattatcaggtaa

SEQ ID NO: 4528521 - DNA, 25 bp, Homo sapien
cataaaacagggacctctgacgctt

SEQ ID NO: 4528522 - DNA, 25 bp, Homo sapien
gacctctgacgcttcacattatcag

SEQ ID NO: 4528523 - DNA, 25 bp, Homo sapien
ctctctaggagggccttggacccag

SEQ ID NO: 4528524 - DNA, 25 bp, Homo sapien
tctaggagggccttggacccagagc

SEQ ID NO: 4528525 - DNA, 25 bp, Homo sapien
ctccctcctgatcccacccagctct

SEQ ID NO: 4528526 - DNA, 25 bp, Homo sapien
cctcctgatcccacccagctctaaa

SEQ ID NO: 4528527 - DNA, 25 bp, Homo sapien
ccctcctgatcccacccagctctaa

SEQ ID NO: 4528528 - DNA, 25 bp, Homo sapien
gccctccctcctgatcccacccagc

SEQ ID NO: 4528529 - DNA, 25 bp, Homo sapien
gacagtgcccatgacagctgactca

SEQ ID NO: 4528530 - DNA, 25 bp, Homo sapien
ggctgctctgagacatgagctggac

SEQ ID NO: 4528531 - DNA, 25 bp, Homo sapien
aggcgagaagcgacagtgcccatga

SEQ ID NO: 4528532 - DNA, 25 bp, Homo sapien
agacatgagctggacccaacccagg

SEQ ID NO: 4528533 - DNA, 25 bp, Homo sapien
ccgtttctctaaggaccaggctgaa

SEQ ID NO: 4528534 - DNA, 25 bp, Homo sapien
caagggtgaggaactgagactgggt

SEQ ID NO: 4528535 - DNA, 25 bp, Homo sapien
tctctgccgaagacattgaagccac

SEQ ID NO: 4528536 - DNA, 25 bp, Homo sapien
ccaagacttcagaccatggtgtcac

SEQ ID NO: 4528537 - DNA, 25 bp, Homo sapien
gccgcccgacccatggagccctgct

SEQ ID NO: 4528538 - DNA, 25 bp, Homo sapien
cccgacccatggagccctgcttggg

SEQ ID NO: 4528539 - DNA, 25 bp, Homo sapien
accatctgcggccagatctccctcc

SEQ ID NO: 4528540 - DNA, 25 bp, Homo sapien
catctgcggccagatctccctccag

SEQ ID NO: 4528541 - DNA, 25 bp, Homo sapien
gcggcacaccgcgactgctaattag

SEQ ID NO: 4528542 - DNA, 25 bp, Homo sapien
agctccttgagagcccgcacgtagc

SEQ ID NO: 4528543 - DNA, 25 bp, Homo sapien
tacataccgcaagcggagtacggaa

SEQ ID NO: 4528544 - DNA, 25 bp, Homo sapien
gaatagcggcgggtacataccgcaa

SEQ ID NO: 4528545 - DNA, 25 bp, Homo sapien
gccgctttacctcacccgctcttgg

SEQ ID NO: 4528546 - DNA, 25 bp, Homo sapien
cgctttacctcacccgctcttggat

SEQ ID NO: 4528547 - DNA, 25 bp, Homo sapien
ctgccgctttacctcacccgctctt

SEQ ID NO: 4528548 - DNA, 25 bp, Homo sapien
gtccctgccgctttacctcacccgc

SEQ ID NO: 4528549 - DNA, 25 bp, Homo sapien
gaggatctacgggaccggggctgga

SEQ ID NO: 4528550 - DNA, 25 bp, Homo sapien
ccagccgggaggatctacgggaccg

SEQ ID NO: 4528551 - DNA, 25 bp, Homo sapien
cagccgggaggatctacgggaccgg

SEQ ID NO: 4528552 - DNA, 25 bp, Homo sapien
gagcacacagatgcccgaagcacgt

SEQ ID NO: 4528553 - DNA, 25 bp, Homo sapien
ctctgcccggtgcagctgtaagcgg

SEQ ID NO: 4528554 - DNA, 25 bp, Homo sapien
gtaaagccggtgaacgcgaggctcc

SEQ ID NO: 4528555 - DNA, 25 bp, Homo sapien
ttggacggctcagcgccccgaacgt

SEQ ID NO: 4528556 - DNA, 25 bp, Homo sapien
gcaaggaccttcttcgcatggcgtc

SEQ ID NO: 4528557 - DNA, 25 bp, Homo sapien
gagcgggggagaccgctacttataa

SEQ ID NO: 4528558 - DNA, 25 bp, Homo sapien
ggaccttcttcgcatggcgtcagga

SEQ ID NO: 4528559 - DNA, 25 bp, Homo sapien
cttcgcatggcgtcaggaatgagag

SEQ ID NO: 4528560 - DNA, 25 bp, Homo sapien
tggcaataaccagatcagaaaatgt

SEQ ID NO: 4528561 - DNA, 25 bp, Homo sapien
tctgcattgctaagcccagtggtgg

SEQ ID NO: 4528562 - DNA, 25 bp, Homo sapien
cgaacattcggaagttgctttcacc

SEQ ID NO: 4528563 - DNA, 25 bp, Homo sapien
tatctttttatttggcctagcagca

SEQ ID NO: 4528564 - DNA, 25 bp, Homo sapien
agttactctaaaggtgtttcctgtg

SEQ ID NO: 4528565 - DNA, 25 bp, Homo sapien
cacagagttactctaaaggtgtttc

SEQ ID NO: 4528566 - DNA, 25 bp, Homo sapien
actctaaaggtgtttcctgtgatgg

SEQ ID NO: 4528567 - DNA, 25 bp, Homo sapien
cagagttactctaaaggtgtttcct

SEQ ID NO: 4528568 - DNA, 25 bp, Homo sapien
ggtgagcatcccgaaacacaaggaa

SEQ ID NO: 4528569 - DNA, 25 bp, Homo sapien
gaatgagtttcagccacagttgacg

SEQ ID NO: 4528570 - DNA, 25 bp, Homo sapien
tagacggagtgctttttctgctagg

SEQ ID NO: 4528571 - DNA, 25 bp, Homo sapien
cagccacagttgacgtagacggagt

SEQ ID NO: 4528572 - DNA, 25 bp, Homo sapien
aagtgacaaatggagcagagagccc

SEQ ID NO: 4528573 - DNA, 25 bp, Homo sapien
tgaaaatggagagaacaacgttcca

SEQ ID NO: 4528574 - DNA, 25 bp, Homo sapien
gaccttcgaatcactgaagcagagc

SEQ ID NO: 4528575 - DNA, 25 bp, Homo sapien
tccaaagggatagaatgcattcgac

SEQ ID NO: 4528576 - DNA, 25 bp, Homo sapien
ttaattattgaagagttgccagtta

SEQ ID NO: 4528577 - DNA, 25 bp, Homo sapien
tattgaagagttgccagttattgtt

SEQ ID NO: 4528578 - DNA, 25 bp, Homo sapien
gagctggagtcttaggattatgatt

SEQ ID NO: 4528579 - DNA, 25 bp, Homo sapien
ctggagtcttaggattatgattggg

SEQ ID NO: 4528580 - DNA, 25 bp, Homo sapien
ggaatttgccaactctttattgcat

SEQ ID NO: 4528581 - DNA, 25 bp, Homo sapien
ccgcgcccagctgggaatttgccaa

SEQ ID NO: 4528582 - DNA, 25 bp, Homo sapien
gcccagctgggaatttgccaactct

SEQ ID NO: 4528583 - DNA, 25 bp, Homo sapien
cagctgggaatttgccaactcttta

SEQ ID NO: 4528584 - DNA, 25 bp, Homo sapien
tgttggcattcctatggggcctttc

SEQ ID NO: 4528585 - DNA, 25 bp, Homo sapien
cagatactcccttttatcagaagtt

SEQ ID NO: 4528586 - DNA, 25 bp, Homo sapien
gttttcagatactcccttttatcag

SEQ ID NO: 4528587 - DNA, 25 bp, Homo sapien
tggcattcctatggggcctttcagt

SEQ ID NO: 4528588 - DNA, 25 bp, Homo sapien
tcccagctgcgcacccacacactca

SEQ ID NO: 4528589 - DNA, 25 bp, Homo sapien
ctcccagctgcgcacccacacactc

SEQ ID NO: 4528590 - DNA, 25 bp, Homo sapien
gctgctcccagctgcgcacccacac

SEQ ID NO: 4528591 - DNA, 25 bp, Homo sapien
tgctcccagctgcgcacccacacac

SEQ ID NO: 4528592 - DNA, 25 bp, Homo sapien
tccactggcactaccctagtagctg

SEQ ID NO: 4528593 - DNA, 25 bp, Homo sapien
atatacatccactggcactacccta

SEQ ID NO: 4528594 - DNA, 25 bp, Homo sapien
actggcactaccctagtagctgcta

SEQ ID NO: 4528595 - DNA, 25 bp, Homo sapien
acatccactggcactaccctagtag

SEQ ID NO: 4528596 - DNA, 25 bp, Homo sapien
tagtggctgcaacactcagtaccaa

SEQ ID NO: 4528597 - DNA, 25 bp, Homo sapien
ggttagtggctgcaacactcagtac

SEQ ID NO: 4528598 - DNA, 25 bp, Homo sapien
tggttagtggctgcaacactcagta

SEQ ID NO: 4528599 - DNA, 25 bp, Homo sapien
ttagtggctgcaacactcagtacca

SEQ ID NO: 4528600 - DNA, 25 bp, Homo sapien
acaagactggcaactctcctgctga

SEQ ID NO: 4528601 - DNA, 25 bp, Homo sapien
ggtcacagcagtctatggcccagtg

SEQ ID NO: 4528602 - DNA, 25 bp, Homo sapien
tggatatgttcctgcacaagactgg

SEQ ID NO: 4528603 - DNA, 25 bp, Homo sapien
tataaagcaagtgtgtacctggtca

SEQ ID NO: 4528604 - DNA, 25 bp, Homo sapien
aggagagtttcctggtggagccgga

SEQ ID NO: 4528605 - DNA, 25 bp, Homo sapien
cacttgtaacatcaaagtagagaaa

SEQ ID NO: 4528606 - DNA, 25 bp, Homo sapien
aagaggagagtttcctggtggagcc

SEQ ID NO: 4528607 - DNA, 25 bp, Homo sapien
aagctgtagacccttccacttgtaa

SEQ ID NO: 4528608 - DNA, 25 bp, Homo sapien
tgtatcaggacacttcttgcaatgg

SEQ ID NO: 4528609 - DNA, 25 bp, Homo sapien
gcagtcctcccagaggtgtggcttc

SEQ ID NO: 4528610 - DNA, 25 bp, Homo sapien
gggattagcttgaagagcagtcctc

SEQ ID NO: 4528611 - DNA, 25 bp, Homo sapien
gtttaacaccagctgtgtacttgct

SEQ ID NO: 4528612 - DNA, 25 bp, Homo sapien
tgtcatcgaccatgtattcagtgtc

SEQ ID NO: 4528613 - DNA, 25 bp, Homo sapien
caatgcagttaacaacaggctctga

SEQ ID NO: 4528614 - DNA, 25 bp, Homo sapien
tgtcaggtaggttgaaatagaacag

SEQ ID NO: 4528615 - DNA, 25 bp, Homo sapien
aaggataatgcaatgccaatgcagt

SEQ ID NO: 4528616 - DNA, 25 bp, Homo sapien
tcagccccagttccataagagagct

SEQ ID NO: 4528617 - DNA, 25 bp, Homo sapien
gaaatggggccgtggatagcatgac

SEQ ID NO: 4528618 - DNA, 25 bp, Homo sapien
gccccagttccataagagagctctg

SEQ ID NO: 4528619 - DNA, 25 bp, Homo sapien
tctgggtatttgaaatggggccgtg

SEQ ID NO: 4528620 - DNA, 25 bp, Homo sapien
tcgatcagtcagaaggttaagggct

SEQ ID NO: 4528621 - DNA, 25 bp, Homo sapien
atccactgatggagggcactgtctc

SEQ ID NO: 4528622 - DNA, 25 bp, Homo sapien
caagaagaaaatcatagagccagca

SEQ ID NO: 4528623 - DNA, 25 bp, Homo sapien
gatcgttcctaagcttcagagccaa

SEQ ID NO: 4528624 - DNA, 25 bp, Homo sapien
tatcctgaagctcgtaaccgtgtgc

SEQ ID NO: 4528625 - DNA, 25 bp, Homo sapien
tgttaaccaaagtccacaagctgga

SEQ ID NO: 4528626 - DNA, 25 bp, Homo sapien
ggttttcatcacgactaagggccag

SEQ ID NO: 4528627 - DNA, 25 bp, Homo sapien
tgttatcaggatcaggctaggccat

SEQ ID NO: 4528628 - DNA, 25 bp, Homo sapien
tcatagcaggcctggttacagccgg

SEQ ID NO: 4528629 - DNA, 25 bp, Homo sapien
ggcatttcggaacaccacttggata

SEQ ID NO: 4528630 - DNA, 25 bp, Homo sapien
gataatgtagaagcgggagatgcct

SEQ ID NO: 4528631 - DNA, 25 bp, Homo sapien
gttggccgggacacataacattcca

SEQ ID NO: 4528632 - DNA, 25 bp, Homo sapien
agtggagtgctgctgcaccgcggct

SEQ ID NO: 4528633 - DNA, 25 bp, Homo sapien
ctcccgatcatagtggagtgctgct

SEQ ID NO: 4528634 - DNA, 25 bp, Homo sapien
tggagtgctgctgcaccgcggcttc

SEQ ID NO: 4528635 - DNA, 25 bp, Homo sapien
agtgctgctgcaccgcggcttctag

SEQ ID NO: 4528636 - DNA, 25 bp, Homo sapien
tgcatccggaggcagcagacaaaga

SEQ ID NO: 4528637 - DNA, 25 bp, Homo sapien
tccggaggcagcagacaaagactgg

SEQ ID NO: 4528638 - DNA, 25 bp, Homo sapien
catccggaggcagcagacaaagact

SEQ ID NO: 4528639 - DNA, 25 bp, Homo sapien
ggaggcagcagacaaagactgggca

SEQ ID NO: 4528640 - DNA, 25 bp, Homo sapien
gaattgcctcccaattaaagaagca

SEQ ID NO: 4528641 - DNA, 25 bp, Homo sapien
gcagttggcgcggtctagagagagg

SEQ ID NO: 4528642 - DNA, 25 bp, Homo sapien
ggaaagaaatccaagcgcgtcccga

SEQ ID NO: 4528643 - DNA, 25 bp, Homo sapien
cgggccgcacttccagaatgggagt

SEQ ID NO: 4528644 - DNA, 25 bp, Homo sapien
gagggtccgaacaccggctctgttc

SEQ ID NO: 4528645 - DNA, 25 bp, Homo sapien
aggagaagtctcagcgccgctctcc

SEQ ID NO: 4528646 - DNA, 25 bp, Homo sapien
ccaggagaagtctcagcgccgctct

SEQ ID NO: 4528647 - DNA, 25 bp, Homo sapien
ttcctgctacttcagcgggcacctg

SEQ ID NO: 4528648 - DNA, 25 bp, Homo sapien
ctggctccgcgctagacactttgtg

SEQ ID NO: 4528649 - DNA, 25 bp, Homo sapien
taaaagagtgggacccctgtcatga

SEQ ID NO: 4528650 - DNA, 25 bp, Homo sapien
gaaggcagacataagaggttcctgt

SEQ ID NO: 4528651 - DNA, 25 bp, Homo sapien
tttaaaacgacgacacattgtgccc

SEQ ID NO: 4528652 - DNA, 25 bp, Homo sapien
tccatccctaccaagctacagtttt

SEQ ID NO: 4528653 - DNA, 25 bp, Homo sapien
ctatatttcaatgatggagctccct

SEQ ID NO: 4528654 - DNA, 25 bp, Homo sapien
taaaaaggaatctggctactcttta

SEQ ID NO: 4528655 - DNA, 25 bp, Homo sapien
cacaatggaattgacactctagggt

SEQ ID NO: 4528656 - DNA, 25 bp, Homo sapien
caacaagaatctgggtgcttacctc

SEQ ID NO: 4528657 - DNA, 25 bp, Homo sapien
ttaaccaaagacgtaggcactatcc

SEQ ID NO: 4528658 - DNA, 25 bp, Homo sapien
ccagttcaactgtgctataggatac

SEQ ID NO: 4528659 - DNA, 25 bp, Homo sapien
tgaaatcatacctccccatgcatgg

SEQ ID NO: 4528660 - DNA, 25 bp, Homo sapien
ccatcagagtaggtgtcagaaaatc

SEQ ID NO: 4528661 - DNA, 25 bp, Homo sapien
gattatgtgtaggtgtgtgaactcc

SEQ ID NO: 4528662 - DNA, 25 bp, Homo sapien
gaaggcttctgtctcgcaagttagt

SEQ ID NO: 4528663 - DNA, 25 bp, Homo sapien
tgtgaactcctcgaggatggaacac

SEQ ID NO: 4528664 - DNA, 25 bp, Homo sapien
tattagaagcacaaacaaattgcac

SEQ ID NO: 4528665 - DNA, 25 bp, Homo sapien
catcctgactggaaggtagatggag

SEQ ID NO: 4528666 - DNA, 25 bp, Homo sapien
gcacgtgtgtaaacaaactgtacaa

SEQ ID NO: 4528667 - DNA, 25 bp, Homo sapien
tccaagaagcataataccgtcatcc

SEQ ID NO: 4528668 - DNA, 25 bp, Homo sapien
tatttacgctcagggggagcaataa

SEQ ID NO: 4528669 - DNA, 25 bp, Homo sapien
gcctcatcgtactcttgcttgctaa

SEQ ID NO: 4528670 - DNA, 25 bp, Homo sapien
cctcatcgtactcttgcttgctaat

SEQ ID NO: 4528671 - DNA, 25 bp, Homo sapien
gacagagtatttacgctcaggggga

SEQ ID NO: 4528672 - DNA, 25 bp, Homo sapien
tgcagaaagaaaacaaaaacttcca

SEQ ID NO: 4528673 - DNA, 25 bp, Homo sapien
caagctaaatgtgtagtggagccta

SEQ ID NO: 4528674 - DNA, 25 bp, Homo sapien
taatttggcaacaagctaaatgtgt

SEQ ID NO: 4528675 - DNA, 25 bp, Homo sapien
tagtggagcctagcccaaaagttgg

SEQ ID NO: 4528676 - DNA, 25 bp, Homo sapien
tttctccacttacctagagtgtaat

SEQ ID NO: 4528677 - DNA, 25 bp, Homo sapien
ccagataagacattgttggcataca

SEQ ID NO: 4528678 - DNA, 25 bp, Homo sapien
tattgtaagttgtttcatggatgcc

SEQ ID NO: 4528679 - DNA, 25 bp, Homo sapien
caggtccttgcggatatcaatgtca

SEQ ID NO: 4528680 - DNA, 25 bp, Homo sapien
tgcatacgatcagcaataccagggt

SEQ ID NO: 4528681 - DNA, 25 bp, Homo sapien
tagattttactctgggagaccctaa

SEQ ID NO: 4528682 - DNA, 25 bp, Homo sapien
ttaatgagccatcaggacttgaggt

SEQ ID NO: 4528683 - DNA, 25 bp, Homo sapien
tcactagagcagaacatagacttcc

SEQ ID NO: 4528684 - DNA, 25 bp, Homo sapien
tagcccttttcctgcagatacgtgc

SEQ ID NO: 4528685 - DNA, 25 bp, Homo sapien
caatagtgatgacttggccatcagg

SEQ ID NO: 4528686 - DNA, 25 bp, Homo sapien
tctcaaaatccagggcgacatagca

SEQ ID NO: 4528687 - DNA, 25 bp, Homo sapien
atgtcacggacaatttcacgttcag

SEQ ID NO: 4528688 - DNA, 25 bp, Homo sapien
agcttctctttaatgtcacggacaa

SEQ ID NO: 4528689 - DNA, 25 bp, Homo sapien
tcaattatagggaggtaggcggatt

SEQ ID NO: 4528690 - DNA, 25 bp, Homo sapien
gaggtaggcggattcagtgagagag

SEQ ID NO: 4528691 - DNA, 25 bp, Homo sapien
agaaataaagagtatcacagtcatg

SEQ ID NO: 4528692 - DNA, 25 bp, Homo sapien
cacactgtggcagatgagacacaca

SEQ ID NO: 4528693 - DNA, 25 bp, Homo sapien
agtggtgacaaaggagtagccacgc

SEQ ID NO: 4528694 - DNA, 25 bp, Homo sapien
gggacattgtgagttacaccatccc

SEQ ID NO: 4528695 - DNA, 25 bp, Homo sapien
gacattgtgagttacaccatcccca

SEQ ID NO: 4528696 - DNA, 25 bp, Homo sapien
ggacattgtgagttacaccatcccc

SEQ ID NO: 4528697 - DNA, 25 bp, Homo sapien
taaaaatgcgcatcaggaatactaa

SEQ ID NO: 4528698 - DNA, 25 bp, Homo sapien
ggaatactaaatctgaagcaaactg

SEQ ID NO: 4528699 - DNA, 25 bp, Homo sapien
cccgaggacactttcaaatgaccat

SEQ ID NO: 4528700 - DNA, 25 bp, Homo sapien
acaaagaataaaaatgcgcatcagg

SEQ ID NO: 4528701 - DNA, 25 bp, Homo sapien
aagcatacagggatagcactgcctg

SEQ ID NO: 4528702 - DNA, 25 bp, Homo sapien
ctgtggtacggccagaagcatacag

SEQ ID NO: 4528703 - DNA, 25 bp, Homo sapien
gccagaagcatacagggatagcact

SEQ ID NO: 4528704 - DNA, 25 bp, Homo sapien
tgtggtacggccagaagcatacagg

SEQ ID NO: 4528705 - DNA, 25 bp, Homo sapien
gtgatgataccatgctcgatgggat

SEQ ID NO: 4528706 - DNA, 25 bp, Homo sapien
ggtgatgataccatgctcgatggga

SEQ ID NO: 4528707 - DNA, 25 bp, Homo sapien
ctgggcttcatcacctacgtaggag

SEQ ID NO: 4528708 - DNA, 25 bp, Homo sapien
tgtcaactggaatatagatgactgc

SEQ ID NO: 4528709 - DNA, 25 bp, Homo sapien
ccatgtcaactggaatatagatgac

SEQ ID NO: 4528710 - DNA, 25 bp, Homo sapien
tatagatgactgcattttggaatga

SEQ ID NO: 4528711 - DNA, 25 bp, Homo sapien
catcacccatgtcaactggaatata

SEQ ID NO: 4528712 - DNA, 25 bp, Homo sapien
gcccacgatggacgggaagacagcg

SEQ ID NO: 4528713 - DNA, 25 bp, Homo sapien
gggcgcgtcatcgcccgcaaagccg

SEQ ID NO: 4528714 - DNA, 25 bp, Homo sapien
accagggcggtggtctcctcgtcgt

SEQ ID NO: 4528715 - DNA, 25 bp, Homo sapien
cagagccgttgtcgcacaccagggc

SEQ ID NO: 4528716 - DNA, 25 bp, Homo sapien
gactgccgaggccattcatggagcc

SEQ ID NO: 4528717 - DNA, 25 bp, Homo sapien
cttgccttatttggtccccttcgca

SEQ ID NO: 4528718 - DNA, 25 bp, Homo sapien
ggagcccccagaccatgtaaggaag

SEQ ID NO: 4528719 - DNA, 25 bp, Homo sapien
tatagaacgctgatggacagggtca

SEQ ID NO: 4528720 - DNA, 25 bp, Homo sapien
ggtctgtggattcggtcctccgcag

SEQ ID NO: 4528721 - DNA, 25 bp, Homo sapien
gggacaataagccacatgcagtggg

SEQ ID NO: 4528722 - DNA, 25 bp, Homo sapien
gggaagactaagtgacgccagccca

SEQ ID NO: 4528723 - DNA, 25 bp, Homo sapien
gagcaacagcggcttctcatcttcc

SEQ ID NO: 4528724 - DNA, 25 bp, Homo sapien
tgattagatacttgtcccgactggg

SEQ ID NO: 4528725 - DNA, 25 bp, Homo sapien
cccctctgaactccccaaccatgtt

SEQ ID NO: 4528726 - DNA, 25 bp, Homo sapien
tggtcttgggctgatatgctgagga

SEQ ID NO: 4528727 - DNA, 25 bp, Homo sapien
gctgatatgctgaggaggcctgctg

SEQ ID NO: 4528728 - DNA, 25 bp, Homo sapien
gccagtgaagcccttttcggcgtgg

SEQ ID NO: 4528729 - DNA, 25 bp, Homo sapien
ccttttcggcgtggactggccatga

SEQ ID NO: 4528730 - DNA, 25 bp, Homo sapien
tgaagcccttttcggcgtggactgg

SEQ ID NO: 4528731 - DNA, 25 bp, Homo sapien
tgagggccagtgaagcccttttcgg

SEQ ID NO: 4528732 - DNA, 25 bp, Homo sapien
tgcccttgcctcgggggaagtctgt

SEQ ID NO: 4528733 - DNA, 25 bp, Homo sapien
cttgcctcgggggaagtctgtttca

SEQ ID NO: 4528734 - DNA, 25 bp, Homo sapien
gcctcgggggaagtctgtttcatcc

SEQ ID NO: 4528735 - DNA, 25 bp, Homo sapien
cgggggaagtctgtttcatccacca

SEQ ID NO: 4528736 - DNA, 25 bp, Homo sapien
tgacaatgtctgatctaagcctgac

SEQ ID NO: 4528737 - DNA, 25 bp, Homo sapien
gcccaaccatgacaatgtctgatct

SEQ ID NO: 4528738 - DNA, 25 bp, Homo sapien
catgacaatgtctgatctaagcctg

SEQ ID NO: 4528739 - DNA, 25 bp, Homo sapien
caaccatgacaatgtctgatctaag

SEQ ID NO: 4528740 - DNA, 25 bp, Homo sapien
cttcagccaggtgtctttaatatct

SEQ ID NO: 4528741 - DNA, 25 bp, Homo sapien
agcttcagccaggtgtctttaatat

SEQ ID NO: 4528742 - DNA, 25 bp, Homo sapien
ttcagacttccaaaggccaagaacc

SEQ ID NO: 4528743 - DNA, 25 bp, Homo sapien
cagccaggtgtctttaatatcttct

SEQ ID NO: 4528744 - DNA, 25 bp, Homo sapien
caaagtaagttgctggcttgagcta

SEQ ID NO: 4528745 - DNA, 25 bp, Homo sapien
catagttagaagactgccagggaac

SEQ ID NO: 4528746 - DNA, 25 bp, Homo sapien
tagctgccacgatgaaaggagggcc

SEQ ID NO: 4528747 - DNA, 25 bp, Homo sapien
aaggagggccacaggtgccattgca

SEQ ID NO: 4528748 - DNA, 25 bp, Homo sapien
ccaggcggatagctgagcagatgag

SEQ ID NO: 4528749 - DNA, 25 bp, Homo sapien
cttctccaggcggatagctgagcag

SEQ ID NO: 4528750 - DNA, 25 bp, Homo sapien
ctccaggcggatagctgagcagatg

SEQ ID NO: 4528751 - DNA, 25 bp, Homo sapien
ttctccaggcggatagctgagcaga

SEQ ID NO: 4528752 - DNA, 25 bp, Homo sapien
ctgtgctgcattgtgcaatcttctc

SEQ ID NO: 4528753 - DNA, 25 bp, Homo sapien
gtgctgcattgtgcaatcttctcat

SEQ ID NO: 4528754 - DNA, 25 bp, Homo sapien
tgtgctgcattgtgcaatcttctca

SEQ ID NO: 4528755 - DNA, 25 bp, Homo sapien
tccttgactccagatgctgtgacac

SEQ ID NO: 4528756 - DNA, 25 bp, Homo sapien
tcttttgcagctggtagggcatacg

SEQ ID NO: 4528757 - DNA, 25 bp, Homo sapien
tgccttgacccattacattttccaa

SEQ ID NO: 4528758 - DNA, 25 bp, Homo sapien
ggttgactattgtgtcccagcaccg

SEQ ID NO: 4528759 - DNA, 25 bp, Homo sapien
taggaggctcacatgaaggaatgtc

SEQ ID NO: 4528760 - DNA, 25 bp, Homo sapien
taaagggcgattcacagttctagcc

SEQ ID NO: 4528761 - DNA, 25 bp, Homo sapien
tcaggatgttgcgattaataccaca

SEQ ID NO: 4528762 - DNA, 25 bp, Homo sapien
cggctgttacttcaccctctggtta

SEQ ID NO: 4528763 - DNA, 25 bp, Homo sapien
ctgcacccggctcgtgttctaagga

SEQ ID NO: 4528764 - DNA, 25 bp, Homo sapien
actgcacccggctcgtgttctaagg

SEQ ID NO: 4528765 - DNA, 25 bp, Homo sapien
cactgcacccggctcgtgttctaag

SEQ ID NO: 4528766 - DNA, 25 bp, Homo sapien
aaattaggtacaactctgagccagg

SEQ ID NO: 4528767 - DNA, 25 bp, Homo sapien
tcaaaggtcaactgccactaggtgt

SEQ ID NO: 4528768 - DNA, 25 bp, Homo sapien
tgagccaggtctcgatgagtccaaa

SEQ ID NO: 4528769 - DNA, 25 bp, Homo sapien
gcacactgtcagtccggagtaccat

SEQ ID NO: 4528770 - DNA, 25 bp, Homo sapien
tgcttctcaaactacaaagtgcctg

SEQ ID NO: 4528771 - DNA, 25 bp, Homo sapien
cattagtggtgtggagaacctccta

SEQ ID NO: 4528772 - DNA, 25 bp, Homo sapien
tgccagcaacccaaacattagtggt

SEQ ID NO: 4528773 - DNA, 25 bp, Homo sapien
tcaagggtattcgtggttaagtcca

SEQ ID NO: 4528774 - DNA, 25 bp, Homo sapien
gacacactcagtgatcaaaacatga

SEQ ID NO: 4528775 - DNA, 25 bp, Homo sapien
gaaactagaattgttcatacacata

SEQ ID NO: 4528776 - DNA, 25 bp, Homo sapien
caagacaccgaaatcagttaacaaa

SEQ ID NO: 4528777 - DNA, 25 bp, Homo sapien
gactttttgactgccatgtcctcct

SEQ ID NO: 4528778 - DNA, 25 bp, Homo sapien
gaaaggctggagtttcttgacggca

SEQ ID NO: 4528779 - DNA, 25 bp, Homo sapien
ggtgcagatacagctcctaccacag

SEQ ID NO: 4528780 - DNA, 25 bp, Homo sapien
cctgaggtgtgttagcttctgccgg

SEQ ID NO: 4528781 - DNA, 25 bp, Homo sapien
tggtctcagataaagcagggatggc

SEQ ID NO: 4528782 - DNA, 25 bp, Homo sapien
cacattaccattctagagttctcca

SEQ ID NO: 4528783 - DNA, 25 bp, Homo sapien
tgtaacacctctgatgacaatggtc

SEQ ID NO: 4528784 - DNA, 25 bp, Homo sapien
cagcttataaagctaagctctcaca

SEQ ID NO: 4528785 - DNA, 25 bp, Homo sapien
aagacaataccaatatgaaaaacag

SEQ ID NO: 4528786 - DNA, 25 bp, Homo sapien
gataatgatgtgtagtctgtatcaa

SEQ ID NO: 4528787 - DNA, 25 bp, Homo sapien
tgtacttcatgagatggtctctctc

SEQ ID NO: 4528788 - DNA, 25 bp, Homo sapien
catgttgtatacaaagtttgccatc

SEQ ID NO: 4528789 - DNA, 25 bp, Homo sapien
tatttgtacttcatgagatggtctc

SEQ ID NO: 4528790 - DNA, 25 bp, Homo sapien
cccccctaggacaattcattaaatg

SEQ ID NO: 4528791 - DNA, 25 bp, Homo sapien
aaaagcaaagcccaaaagtctatag

SEQ ID NO: 4528792 - DNA, 25 bp, Homo sapien
caatggacccccctaggacaattca

SEQ ID NO: 4528793 - DNA, 25 bp, Homo sapien
ctcttctcctttatacaaaaggaat

SEQ ID NO: 4528794 - DNA, 25 bp, Homo sapien
ggctctagacatggccactaccaag

SEQ ID NO: 4528795 - DNA, 25 bp, Homo sapien
tactctggcgaagatataaagtcca

SEQ ID NO: 4528796 - DNA, 25 bp, Homo sapien
agttttggaagagggatactctggc

SEQ ID NO: 4528797 - DNA, 25 bp, Homo sapien
gaaagctggagtcagttcaaaacag

SEQ ID NO: 4528798 - DNA, 25 bp, Homo sapien
tagagttcaattgtcagttactaac

SEQ ID NO: 4528799 - DNA, 25 bp, Homo sapien
tatattagtattacagtagagttca

SEQ ID NO: 4528800 - DNA, 25 bp, Homo sapien
ataaccaatgcacttattaaaaagg

SEQ ID NO: 4528801 - DNA, 25 bp, Homo sapien
tagaagttaatcaatgttacgtgac

SEQ ID NO: 4528802 - DNA, 25 bp, Homo sapien
gagtcaattcgaactagctcttctt

SEQ ID NO: 4528803 - DNA, 25 bp, Homo sapien
tcaattcgaactagctcttcttcca

SEQ ID NO: 4528804 - DNA, 25 bp, Homo sapien
tcattgagtcaattcgaactagctc

SEQ ID NO: 4528805 - DNA, 25 bp, Homo sapien
actgtcattgagtcaattcgaacta

SEQ ID NO: 4528806 - DNA, 25 bp, Homo sapien
ttgagcatccctaatgtgaaagttc

SEQ ID NO: 4528807 - DNA, 25 bp, Homo sapien
gagcatccctaatgtgaaagttcaa

SEQ ID NO: 4528808 - DNA, 25 bp, Homo sapien
agcatccctaatgtgaaagttcaaa

SEQ ID NO: 4528809 - DNA, 25 bp, Homo sapien
tgagcatccctaatgtgaaagttca

SEQ ID NO: 4528810 - DNA, 25 bp, Homo sapien
gaagagggctaatgtaatttcacct

SEQ ID NO: 4528811 - DNA, 25 bp, Homo sapien
gttacagagatctaatgttacagag

SEQ ID NO: 4528812 - DNA, 25 bp, Homo sapien
aataataaagcctgggagaatcacc

SEQ ID NO: 4528813 - DNA, 25 bp, Homo sapien
tgcagaggacagattttttacctga

SEQ ID NO: 4528814 - DNA, 25 bp, Homo sapien
ccctggttcgtaccagagaaagaag

SEQ ID NO: 4528815 - DNA, 25 bp, Homo sapien
ccactgccctggttcgtaccagaga

SEQ ID NO: 4528816 - DNA, 25 bp, Homo sapien
tcagatggcccactgccctggttcg

SEQ ID NO: 4528817 - DNA, 25 bp, Homo sapien
agatggcccactgccctggttcgta

SEQ ID NO: 4528818 - DNA, 25 bp, Homo sapien
tattatacctgggaattctgttgcc

SEQ ID NO: 4528819 - DNA, 25 bp, Homo sapien
cattagcagggcagaataacatcgt

SEQ ID NO: 4528820 - DNA, 25 bp, Homo sapien
ggtatcccagtttgatgctcagcaa

SEQ ID NO: 4528821 - DNA, 25 bp, Homo sapien
aaatatatgtacatgggaggccaac

SEQ ID NO: 4528822 - DNA, 25 bp, Homo sapien
tataaacctttccatcttgccaaaa

SEQ ID NO: 4528823 - DNA, 25 bp, Homo sapien
gtcagagagttatttatagttccca

SEQ ID NO: 4528824 - DNA, 25 bp, Homo sapien
tagaaagtcacatcaaaccagcaag

SEQ ID NO: 4528825 - DNA, 25 bp, Homo sapien
aaatatcttttatgtggtagctgag

SEQ ID NO: 4528826 - DNA, 25 bp, Homo sapien
tgtcagcagggtaaccaagtaaaca

SEQ ID NO: 4528827 - DNA, 25 bp, Homo sapien
tgatgtcgcgaataagatgcttttg

SEQ ID NO: 4528828 - DNA, 25 bp, Homo sapien
tactacatattctgcctctccaaga

SEQ ID NO: 4528829 - DNA, 25 bp, Homo sapien
caatggattgtttccacatcgtcta

SEQ ID NO: 4528830 - DNA, 25 bp, Homo sapien
cataatcagactgtgcattcatttg

SEQ ID NO: 4528831 - DNA, 25 bp, Homo sapien
gcaaacataatcagactgtgcattc

SEQ ID NO: 4528832 - DNA, 25 bp, Homo sapien
tgtaatgcaaacataatcagactgt

SEQ ID NO: 4528833 - DNA, 25 bp, Homo sapien
ctgtaatgcaaacataatcagactg

SEQ ID NO: 4528834 - DNA, 25 bp, Homo sapien
tccaaatgagtcaagtccccttcaa

SEQ ID NO: 4528835 - DNA, 25 bp, Homo sapien
agttctttaacactgcccaatttgg

SEQ ID NO: 4528836 - DNA, 25 bp, Homo sapien
cattttagaactcgctccaaatgag

SEQ ID NO: 4528837 - DNA, 25 bp, Homo sapien
ggttctttgtgacgcacagcttgag

SEQ ID NO: 4528838 - DNA, 25 bp, Homo sapien
taaggattaggttcagattctccca

SEQ ID NO: 4528839 - DNA, 25 bp, Homo sapien
gcatttgctgtactaaactctggca

SEQ ID NO: 4528840 - DNA, 25 bp, Homo sapien
tggaagtcatacagtaagccagcat

SEQ ID NO: 4528841 - DNA, 25 bp, Homo sapien
tatcgccagttgtagaggttgcaca

SEQ ID NO: 4528842 - DNA, 25 bp, Homo sapien
tcttgcagaagtcgacaaaagtgct

SEQ ID NO: 4528843 - DNA, 25 bp, Homo sapien
gatttatggatagccaagttcctgg

SEQ ID NO: 4528844 - DNA, 25 bp, Homo sapien
caagggtcagaagactgaaggtact

SEQ ID NO: 4528845 - DNA, 25 bp, Homo sapien
cctacttcaagtaaccaagggtcag

SEQ ID NO: 4528846 - DNA, 25 bp, Homo sapien
gagcatcaaggtcaacagtcggaac

SEQ ID NO: 4528847 - DNA, 25 bp, Homo sapien
tagtcggctaaatccatcctgagga

SEQ ID NO: 4528848 - DNA, 25 bp, Homo sapien
gagagactgctccatgtttgagtac

SEQ ID NO: 4528849 - DNA, 25 bp, Homo sapien
tcggaactccaacgcgaacaaagcg

SEQ ID NO: 4528850 - DNA, 25 bp, Homo sapien
taaaagtttctatctccagaatctg

SEQ ID NO: 4528851 - DNA, 25 bp, Homo sapien
ctgtagaagaagagggataaaagtt

SEQ ID NO: 4528852 - DNA, 25 bp, Homo sapien
cctcttccatcaaaatgttgtcata

SEQ ID NO: 4528853 - DNA, 25 bp, Homo sapien
tccagaatctgagcagcctcttcca

SEQ ID NO: 4528854 - DNA, 25 bp, Homo sapien
aaaggtatttagatctgtccagtcc

SEQ ID NO: 4528855 - DNA, 25 bp, Homo sapien
gcagcatgagtacaggtcatagcaa

SEQ ID NO: 4528856 - DNA, 25 bp, Homo sapien
ccaagtcatgtcgttttaaggcagc

SEQ ID NO: 4528857 - DNA, 25 bp, Homo sapien
acttcgaagcaattcagaggctctg

SEQ ID NO: 4528858 - DNA, 25 bp, Homo sapien
tatactcttcccagcgagacattac

SEQ ID NO: 4528859 - DNA, 25 bp, Homo sapien
tggagacttccgtaacatctggcaa

SEQ ID NO: 4528860 - DNA, 25 bp, Homo sapien
ctcaagctgcgtaaagattttctta

SEQ ID NO: 4528861 - DNA, 25 bp, Homo sapien
catctggcaatgtactacctttatt

SEQ ID NO: 4528862 - DNA, 25 bp, Homo sapien
tcctggaacccctagactcttttgc

SEQ ID NO: 4528863 - DNA, 25 bp, Homo sapien
cacaggtatatgaggcatctcctgg

SEQ ID NO: 4528864 - DNA, 25 bp, Homo sapien
ttgcaatcgtttgacttcttctaaa

SEQ ID NO: 4528865 - DNA, 25 bp, Homo sapien
taaaagttctattcttcgagccaga

SEQ ID NO: 4528866 - DNA, 25 bp, Homo sapien
atttcaattaggcaaaatgacaaaa

SEQ ID NO: 4528867 - DNA, 25 bp, Homo sapien
ctagacatttcaattaggcaaaatg

SEQ ID NO: 4528868 - DNA, 25 bp, Homo sapien
gacatttcaattaggcaaaatgaca

SEQ ID NO: 4528869 - DNA, 25 bp, Homo sapien
caattaggcaaaatgacaaaactgt

SEQ ID NO: 4528870 - DNA, 25 bp, Homo sapien
aactggcagcatgaaaaattacctc

SEQ ID NO: 4528871 - DNA, 25 bp, Homo sapien
cctaattggcacctaaaatatatgc

SEQ ID NO: 4528872 - DNA, 25 bp, Homo sapien
taaataaatcaacctcctaattggc

SEQ ID NO: 4528873 - DNA, 25 bp, Homo sapien
aaaagattaacaagatcattctctt

SEQ ID NO: 4528874 - DNA, 25 bp, Homo sapien
gcgctcatcaatgtctaatgccatg

SEQ ID NO: 4528875 - DNA, 25 bp, Homo sapien
tgccatgattttctcaaacaactgg

SEQ ID NO: 4528876 - DNA, 25 bp, Homo sapien
tccatgaccaagacgcagtaggtgg

SEQ ID NO: 4528877 - DNA, 25 bp, Homo sapien
agtaggtggcgctcatcaatgtcta

SEQ ID NO: 4528878 - DNA, 25 bp, Homo sapien
tctgttttgcctgtaccaggtgggc

SEQ ID NO: 4528879 - DNA, 25 bp, Homo sapien
gtaacaattagagtcctctgttctg

SEQ ID NO: 4528880 - DNA, 25 bp, Homo sapien
ttggaatgagtaacaattagagtcc

SEQ ID NO: 4528881 - DNA, 25 bp, Homo sapien
tgttggatatgatctgaactgccac

SEQ ID NO: 4528882 - DNA, 25 bp, Homo sapien
ggctgcattccagcacggatggctt

SEQ ID NO: 4528883 - DNA, 25 bp, Homo sapien
tgtgtatgagtgaactgaatcgtat

SEQ ID NO: 4528884 - DNA, 25 bp, Homo sapien
ttccagcacggatggcttctatctg

SEQ ID NO: 4528885 - DNA, 25 bp, Homo sapien
tgtatgagtgaactgaatcgtatta

SEQ ID NO: 4528886 - DNA, 25 bp, Homo sapien
tgattataaggataaggacccctat

SEQ ID NO: 4528887 - DNA, 25 bp, Homo sapien
tcatcttccacatccgcatctttcc

SEQ ID NO: 4528888 - DNA, 25 bp, Homo sapien
cctattaggaataacatggggctca

SEQ ID NO: 4528889 - DNA, 25 bp, Homo sapien
tccacttcttactggaaaagttatc

SEQ ID NO: 4528890 - DNA, 25 bp, Homo sapien
tcaggttccgaatagtctccagcac

SEQ ID NO: 4528891 - DNA, 25 bp, Homo sapien
taaaatgatatcgtgcagccagtca

SEQ ID NO: 4528892 - DNA, 25 bp, Homo sapien
agccagtcaggtaccacacaatcag

SEQ ID NO: 4528893 - DNA, 25 bp, Homo sapien
aataatgtgcactacttgggtcccc

SEQ ID NO: 4528894 - DNA, 25 bp, Homo sapien
caaaaacactctaaatgtccttgat

SEQ ID NO: 4528895 - DNA, 25 bp, Homo sapien
tactggtttggatccaaaaacactc

SEQ ID NO: 4528896 - DNA, 25 bp, Homo sapien
tagtattggtcatatcttgttgata

SEQ ID NO: 4528897 - DNA, 25 bp, Homo sapien
taaaagtttcatacacatcctctgc

SEQ ID NO: 4528898 - DNA, 25 bp, Homo sapien
ctttcaaaaatataggtcaccatac

SEQ ID NO: 4528899 - DNA, 25 bp, Homo sapien
tctttcaaaaatataggtcaccata

SEQ ID NO: 4528900 - DNA, 25 bp, Homo sapien
tccggtcaaacttagtgccataagg

SEQ ID NO: 4528901 - DNA, 25 bp, Homo sapien
tcaataaaaggtctcctccggtcaa

SEQ ID NO: 4528902 - DNA, 25 bp, Homo sapien
gacacgtcctttatcatccagcatg

SEQ ID NO: 4528903 - DNA, 25 bp, Homo sapien
tgccataaggttttgtgggacgtac

SEQ ID NO: 4528904 - DNA, 25 bp, Homo sapien
acctatgttgggtttggccacttca

SEQ ID NO: 4528905 - DNA, 25 bp, Homo sapien
tcgggttggccagttttcacctatg

SEQ ID NO: 4528906 - DNA, 25 bp, Homo sapien
tatggtaacatctgcacgaactcgg

SEQ ID NO: 4528907 - DNA, 25 bp, Homo sapien
tctgacattgagatttatggtaaca

SEQ ID NO: 4528908 - DNA, 25 bp, Homo sapien
acactacaccgccatattcagattg

SEQ ID NO: 4528909 - DNA, 25 bp, Homo sapien
cactacaccgccatattcagattgc

SEQ ID NO: 4528910 - DNA, 25 bp, Homo sapien
aaccaccaaacactacaccgccata

SEQ ID NO: 4528911 - DNA, 25 bp, Homo sapien
aacactacaccgccatattcagatt

SEQ ID NO: 4528912 - DNA, 25 bp, Homo sapien
gtagtcatgaagagtcaaaaactgc

SEQ ID NO: 4528913 - DNA, 25 bp, Homo sapien
atcttcaatgtcctgacgaatttca

SEQ ID NO: 4528914 - DNA, 25 bp, Homo sapien
taaagttccttagcaggtagtcatg

SEQ ID NO: 4528915 - DNA, 25 bp, Homo sapien
tgattctaagcggaagaggttaaag

SEQ ID NO: 4528916 - DNA, 25 bp, Homo sapien
tctgagaaattcgacgttcatgacg

SEQ ID NO: 4528917 - DNA, 25 bp, Homo sapien
ttttctcagttggatacaaaggcat

SEQ ID NO: 4528918 - DNA, 25 bp, Homo sapien
aaattcgacgttcatgacgagatac

SEQ ID NO: 4528919 - DNA, 25 bp, Homo sapien
tgaatctgagaaattcgacgttcat

SEQ ID NO: 4528920 - DNA, 25 bp, Homo sapien
cagaggtatgatgccacctggtgga

SEQ ID NO: 4528921 - DNA, 25 bp, Homo sapien
atgccacctggtggagtgtgtttga

SEQ ID NO: 4528922 - DNA, 25 bp, Homo sapien
gagttggcaacaagcagaggtatga

SEQ ID NO: 4528923 - DNA, 25 bp, Homo sapien
tttaggaagagttggcaacaagcag

SEQ ID NO: 4528924 - DNA, 25 bp, Homo sapien
ccaaggactcccgagtatctacttc

SEQ ID NO: 4528925 - DNA, 25 bp, Homo sapien
agagggcaaaatcatagagttcagg

SEQ ID NO: 4528926 - DNA, 25 bp, Homo sapien
ggcaaaatcatagagttcaggaaaa

SEQ ID NO: 4528927 - DNA, 25 bp, Homo sapien
aacttgaccaaggactcccgagtat

SEQ ID NO: 4528928 - DNA, 25 bp, Homo sapien
gctaacttgattacaaaagagtttg

SEQ ID NO: 4528929 - DNA, 25 bp, Homo sapien
caaaagagtttgaactgaatcttta

SEQ ID NO: 4528930 - DNA, 25 bp, Homo sapien
cttaagagatagctaacttgattac

SEQ ID NO: 4528931 - DNA, 25 bp, Homo sapien
gaagagagatctcttaagagatagc

SEQ ID NO: 4528932 - DNA, 25 bp, Homo sapien
gaattgtggtcatctcattctctgt

SEQ ID NO: 4528933 - DNA, 25 bp, Homo sapien
tatagaatttaagcatgtccaaaag

SEQ ID NO: 4528934 - DNA, 25 bp, Homo sapien
tcatagtgaattgtggtcatctcat

SEQ ID NO: 4528935 - DNA, 25 bp, Homo sapien
ttcaaaaccagtatagaatttaagc

SEQ ID NO: 4528936 - DNA, 25 bp, Homo sapien
tcctcttctctacgaacaagattgg

SEQ ID NO: 4528937 - DNA, 25 bp, Homo sapien
aaaccagcgccttgtgggtagcagg

SEQ ID NO: 4528938 - DNA, 25 bp, Homo sapien
aggtaacagtgaaccagaaggtggg

SEQ ID NO: 4528939 - DNA, 25 bp, Homo sapien
tccaggatggtattaaaccagcgcc

SEQ ID NO: 4528940 - DNA, 25 bp, Homo sapien
tctagatcaatcataagttcaatga

SEQ ID NO: 4528941 - DNA, 25 bp, Homo sapien
ctctagatcaatcataagttcaatg

SEQ ID NO: 4528942 - DNA, 25 bp, Homo sapien
taagttcaatgaatctttcacagta

SEQ ID NO: 4528943 - DNA, 25 bp, Homo sapien
gaatctttcacagtaatgaactttg

SEQ ID NO: 4528944 - DNA, 25 bp, Homo sapien
tttatgagagctggtcctactgggc

SEQ ID NO: 4528945 - DNA, 25 bp, Homo sapien
cacccagtgccagatctatagaagg

SEQ ID NO: 4528946 - DNA, 25 bp, Homo sapien
tacagcagtgactaacacccagtgc

SEQ ID NO: 4528947 - DNA, 25 bp, Homo sapien
tggaaccctggttttctgagacata

SEQ ID NO: 4528948 - DNA, 25 bp, Homo sapien
ttagagatgagtaaataccataggg

SEQ ID NO: 4528949 - DNA, 25 bp, Homo sapien
tgataatttcacaaatgcactgagt

SEQ ID NO: 4528950 - DNA, 25 bp, Homo sapien
gaggacatacactttgccaatacaa

SEQ ID NO: 4528951 - DNA, 25 bp, Homo sapien
ggcagtcccaatactcacactggta

SEQ ID NO: 4528952 - DNA, 25 bp, Homo sapien
cagagataaacttctggatgagttg

SEQ ID NO: 4528953 - DNA, 25 bp, Homo sapien
cagaaagtgggactgatttcagcac

SEQ ID NO: 4528954 - DNA, 25 bp, Homo sapien
agaaagtgggactgatttcagcaca

SEQ ID NO: 4528955 - DNA, 25 bp, Homo sapien
ttcagcacagagataaacttctgga

SEQ ID NO: 4528956 - DNA, 25 bp, Homo sapien
caagtcagaccgagaaagaagtttc

SEQ ID NO: 4528957 - DNA, 25 bp, Homo sapien
gtcctcggaaatgggtactactgtc

SEQ ID NO: 4528958 - DNA, 25 bp, Homo sapien
taaatgcttgtaacagtcctgctgg

SEQ ID NO: 4528959 - DNA, 25 bp, Homo sapien
gccaggatctgagctatgctaaaca

SEQ ID NO: 4528960 - DNA, 25 bp, Homo sapien
ttccagaattttcttagcttaggtg

SEQ ID NO: 4528961 - DNA, 25 bp, Homo sapien
cagaattttcttagcttaggtgtct

SEQ ID NO: 4528962 - DNA, 25 bp, Homo sapien
cattctttttaatcaagttccagaa

SEQ ID NO: 4528963 - DNA, 25 bp, Homo sapien
tgttctcttgcttctggatccatct

SEQ ID NO: 4528964 - DNA, 25 bp, Homo sapien
tgggagggagataagctgctgtact

SEQ ID NO: 4528965 - DNA, 25 bp, Homo sapien
cttgacttcgtatcaagtctacttc

SEQ ID NO: 4528966 - DNA, 25 bp, Homo sapien
ggagataagctgctgtacttgactt

SEQ ID NO: 4528967 - DNA, 25 bp, Homo sapien
agctgctgtacttgacttcgtatca

SEQ ID NO: 4528968 - DNA, 25 bp, Homo sapien
tgcctgctattatggatgaatggag

SEQ ID NO: 4528969 - DNA, 25 bp, Homo sapien
tttcatctaaactcaacctaaaaga

SEQ ID NO: 4528970 - DNA, 25 bp, Homo sapien
tgataagtggctgaaatcaagcttt

SEQ ID NO: 4528971 - DNA, 25 bp, Homo sapien
ttggctacagaggtaatttcatcta

SEQ ID NO: 4528972 - DNA, 25 bp, Homo sapien
gtagtaagactgtctgttcatgaag

SEQ ID NO: 4528973 - DNA, 25 bp, Homo sapien
gctaatgccgccttcaagatgtgtt

SEQ ID NO: 4528974 - DNA, 25 bp, Homo sapien
agctaatgccgccttcaagatgtgt

SEQ ID NO: 4528975 - DNA, 25 bp, Homo sapien
gtttcagctaatgccgccttcaaga

SEQ ID NO: 4528976 - DNA, 25 bp, Homo sapien
catcagtttcagctaatgccgcctt

SEQ ID NO: 4528977 - DNA, 25 bp, Homo sapien
ggtcagtatgaaagctatgaagtac

SEQ ID NO: 4528978 - DNA, 25 bp, Homo sapien
ttgtaatggcttatgtgggtcagta

SEQ ID NO: 4528979 - DNA, 25 bp, Homo sapien
taaagttctgctctaaaagcaccac

SEQ ID NO: 4528980 - DNA, 25 bp, Homo sapien
tatcagtaaaagttctgccactttg

SEQ ID NO: 4528981 - DNA, 25 bp, Homo sapien
gctagatacctcaggagaataattc

SEQ ID NO: 4528982 - DNA, 25 bp, Homo sapien
cccatgcaggcacgttttctctaaa

SEQ ID NO: 4528983 - DNA, 25 bp, Homo sapien
gcagattgacattaaataggccttg

SEQ ID NO: 4528984 - DNA, 25 bp, Homo sapien
cattaaataggccttgctagatacc

SEQ ID NO: 4528985 - DNA, 25 bp, Homo sapien
aagagcattatctttctaatagcaa

SEQ ID NO: 4528986 - DNA, 25 bp, Homo sapien
caagagcattatctttctaatagca

SEQ ID NO: 4528987 - DNA, 25 bp, Homo sapien
ccaagagcattatctttctaatagc

SEQ ID NO: 4528988 - DNA, 25 bp, Homo sapien
gagcattatctttctaatagcaaac

SEQ ID NO: 4528989 - DNA, 25 bp, Homo sapien
gatttgacaatctctttttcatata

SEQ ID NO: 4528990 - DNA, 25 bp, Homo sapien
ctttttcatatatatcttcaataac

SEQ ID NO: 4528991 - DNA, 25 bp, Homo sapien
tctttttcatatatatcttcaataa

SEQ ID NO: 4528992 - DNA, 25 bp, Homo sapien
cttgatttgacaatctctttttcat

SEQ ID NO: 4528993 - DNA, 25 bp, Homo sapien
tataaatgttatgagactccatttg

SEQ ID NO: 4528994 - DNA, 25 bp, Homo sapien
tgagactccatttgagagtcataac

SEQ ID NO: 4528995 - DNA, 25 bp, Homo sapien
aatgttatgagactccatttgagag

SEQ ID NO: 4528996 - DNA, 25 bp, Homo sapien
agactccatttgagagtcataactg

SEQ ID NO: 4528997 - DNA, 25 bp, Homo sapien
tcttcttgatgtggggagcccagta

SEQ ID NO: 4528998 - DNA, 25 bp, Homo sapien
ggggagcccagtatttacatgctaa

SEQ ID NO: 4528999 - DNA, 25 bp, Homo sapien
cttcttgatgtggggagcccagtat

SEQ ID NO: 4529000 - DNA, 25 bp, Homo sapien
ttcttcttgatgtggggagcccagt

SEQ ID NO: 4529001 - DNA, 25 bp, Homo sapien
cagtataaacagtaagtcccagatt

SEQ ID NO: 4529002 - DNA, 25 bp, Homo sapien
gatcatttagtgataagcggtttct

SEQ ID NO: 4529003 - DNA, 25 bp, Homo sapien
gctggaagacagatcatttagtgat

SEQ ID NO: 4529004 - DNA, 25 bp, Homo sapien
gtcccagattcttgccattgtagag

SEQ ID NO: 4529005 - DNA, 25 bp, Homo sapien
agcaagactccgtctctaaaataaa

SEQ ID NO: 4529006 - DNA, 25 bp, Homo sapien
taacaccttcccaaattaccaatca

SEQ ID NO: 4529007 - DNA, 25 bp, Homo sapien
tccagcctgggcgacagagcaagac

SEQ ID NO: 4529008 - DNA, 25 bp, Homo sapien
gtgagccaacaccaagccactgcac

SEQ ID NO: 4529009 - DNA, 25 bp, Homo sapien
ctgggtcacgaactccgcattgatt

SEQ ID NO: 4529010 - DNA, 25 bp, Homo sapien
gacaccgtaggggccacgatcttct

SEQ ID NO: 4529011 - DNA, 25 bp, Homo sapien
cacgaactccgcattgatttgggac

SEQ ID NO: 4529012 - DNA, 25 bp, Homo sapien
aactccgcattgatttgggacaccg

SEQ ID NO: 4529013 - DNA, 25 bp, Homo sapien
gggcgcttaactccgcgccgcacaa

SEQ ID NO: 4529014 - DNA, 25 bp, Homo sapien
cgcacaaacgctccgggccggatat

SEQ ID NO: 4529015 - DNA, 25 bp, Homo sapien
ggaaactaaaggaccgctctgggca

SEQ ID NO: 4529016 - DNA, 25 bp, Homo sapien
tccactccagtggaaactaaaggac

SEQ ID NO: 4529017 - DNA, 25 bp, Homo sapien
gaatggcgtgtagccggaagttcat

SEQ ID NO: 4529018 - DNA, 25 bp, Homo sapien
aagcggaatggcgtgtagccggaag

SEQ ID NO: 4529019 - DNA, 25 bp, Homo sapien
ctcgggaagcggaatggcgtgtagc

SEQ ID NO: 4529020 - DNA, 25 bp, Homo sapien
tcgggaagcggaatggcgtgtagcc

SEQ ID NO: 4529021 - DNA, 25 bp, Homo sapien
tagccagccaatcaaactacttcag

SEQ ID NO: 4529022 - DNA, 25 bp, Homo sapien
cttacaattataacccctattgcag

SEQ ID NO: 4529023 - DNA, 25 bp, Homo sapien
tcagtaaatgatcatactacagcct

SEQ ID NO: 4529024 - DNA, 25 bp, Homo sapien
cctattgcagtacaaaacaagaaac

SEQ ID NO: 4529025 - DNA, 25 bp, Homo sapien
tgtatataaccaacgcacatccgcc

SEQ ID NO: 4529026 - DNA, 25 bp, Homo sapien
taacagttctagcatgcaacaaacc

SEQ ID NO: 4529027 - DNA, 25 bp, Homo sapien
catccgcctgtatactttatcccta

SEQ ID NO: 4529028 - DNA, 25 bp, Homo sapien
tatccctagactaatacctaatgca

SEQ ID NO: 4529029 - DNA, 25 bp, Homo sapien
caggtacttcaaatagcactacagt

SEQ ID NO: 4529030 - DNA, 25 bp, Homo sapien
ttttgttacaggtacttcaaatagc

SEQ ID NO: 4529031 - DNA, 25 bp, Homo sapien
tgttacaggtacttcaaatagcact

SEQ ID NO: 4529032 - DNA, 25 bp, Homo sapien
caactgttttgttacaggtacttca

SEQ ID NO: 4529033 - DNA, 25 bp, Homo sapien
taagatcaccagagaccacaattgt

SEQ ID NO: 4529034 - DNA, 25 bp, Homo sapien
tcacctgtggtaaaagaagcaagca

SEQ ID NO: 4529035 - DNA, 25 bp, Homo sapien
taagtatggcaggataattacccac

SEQ ID NO: 4529036 - DNA, 25 bp, Homo sapien
tagctttgaaaagaccgtcgggtgc

SEQ ID NO: 4529037 - DNA, 25 bp, Homo sapien
tggagatcggaaacttttagcacaa

SEQ ID NO: 4529038 - DNA, 25 bp, Homo sapien
gatcggaaacttttagcacaaacac

SEQ ID NO: 4529039 - DNA, 25 bp, Homo sapien
tagcacaaacactgcatcggtacag

SEQ ID NO: 4529040 - DNA, 25 bp, Homo sapien
ctgcatcggtacaggaagacatcat

SEQ ID NO: 4529041 - DNA, 25 bp, Homo sapien
ggttgcccggtgctaccaggaataa

SEQ ID NO: 4529042 - DNA, 25 bp, Homo sapien
tttgaacaccaggagcctgacattg

SEQ ID NO: 4529043 - DNA, 25 bp, Homo sapien
tagcacgcttaagcttggccaagat

SEQ ID NO: 4529044 - DNA, 25 bp, Homo sapien
cacaaatattacagccaaagggcct

SEQ ID NO: 4529045 - DNA, 25 bp, Homo sapien
catgggatcagacttagagcacggg

SEQ ID NO: 4529046 - DNA, 25 bp, Homo sapien
gcttggcctccagcaatcttctgac

SEQ ID NO: 4529047 - DNA, 25 bp, Homo sapien
cgaaaagatttagtacacaagacac

SEQ ID NO: 4529048 - DNA, 25 bp, Homo sapien
taaagtgacgctgacaaatactaca

SEQ ID NO: 4529049 - DNA, 25 bp, Homo sapien
taccacacactgttgaatctttagc

SEQ ID NO: 4529050 - DNA, 25 bp, Homo sapien
ccacacactgttgaatctttagcat

SEQ ID NO: 4529051 - DNA, 25 bp, Homo sapien
accacacactgttgaatctttagca

SEQ ID NO: 4529052 - DNA, 25 bp, Homo sapien
ttcttcaatgatatactctgatgag

SEQ ID NO: 4529053 - DNA, 25 bp, Homo sapien
taatagtagaaagtatcagactgca

SEQ ID NO: 4529054 - DNA, 25 bp, Homo sapien
atttaaaataagagcggaggctggc

SEQ ID NO: 4529055 - DNA, 25 bp, Homo sapien
catactatatagcaaggataaatat

SEQ ID NO: 4529056 - DNA, 25 bp, Homo sapien
catgcctcttcatactagacaaagg

SEQ ID NO: 4529057 - DNA, 25 bp, Homo sapien
gatgcagtgcatatgaggtaatcct

SEQ ID NO: 4529058 - DNA, 25 bp, Homo sapien
agtggtaaaaagaggcactggctcc

SEQ ID NO: 4529059 - DNA, 25 bp, Homo sapien
tactgtgacagtgcaagcaagtggt

SEQ ID NO: 4529060 - DNA, 25 bp, Homo sapien
taggtgccaaggtagtcaatcagga

SEQ ID NO: 4529061 - DNA, 25 bp, Homo sapien
tcacgaaagtaagcgaacaagaaat

SEQ ID NO: 4529062 - DNA, 25 bp, Homo sapien
tttcttgtcttgactagtaccatta

SEQ ID NO: 4529063 - DNA, 25 bp, Homo sapien
aatatccaatgttgcctcaaggctg

SEQ ID NO: 4529064 - DNA, 25 bp, Homo sapien
cattaaaacgatgtgaggatttcac

SEQ ID NO: 4529065 - DNA, 25 bp, Homo sapien
tctcagtcgggtttctgaagtcctc

SEQ ID NO: 4529066 - DNA, 25 bp, Homo sapien
tgaagtcctcctcacgcatctggag

SEQ ID NO: 4529067 - DNA, 25 bp, Homo sapien
gcggtattgaggcaggtccgaccct

SEQ ID NO: 4529068 - DNA, 25 bp, Homo sapien
gaggcacgcacctcaggcccaggtg

SEQ ID NO: 4529069 - DNA, 25 bp, Homo sapien
tcatcagccacatcagccttaggag

SEQ ID NO: 4529070 - DNA, 25 bp, Homo sapien
gaaagacttctggtgtcctaaatgc

SEQ ID NO: 4529071 - DNA, 25 bp, Homo sapien
tcagccaaataatgcaaacaattgc

SEQ ID NO: 4529072 - DNA, 25 bp, Homo sapien
gctgtttgtccggataacccttgta

SEQ ID NO: 4529073 - DNA, 25 bp, Homo sapien
attccggacctgaggttatctgccc

SEQ ID NO: 4529074 - DNA, 25 bp, Homo sapien
ttccggacctgaggttatctgccca

SEQ ID NO: 4529075 - DNA, 25 bp, Homo sapien
gcaggcagaaatcccccatagggtt

SEQ ID NO: 4529076 - DNA, 25 bp, Homo sapien
caggcagaaatcccccatagggttt

SEQ ID NO: 4529077 - DNA, 25 bp, Homo sapien
gcagaaatcccccatagggttttga

SEQ ID NO: 4529078 - DNA, 25 bp, Homo sapien
attgtatcagcttggctaaaccgaa

SEQ ID NO: 4529079 - DNA, 25 bp, Homo sapien
ttaaatgaaccctactgctgccatg

SEQ ID NO: 4529080 - DNA, 25 bp, Homo sapien
ccatgttggagttagttgaaggagt

SEQ ID NO: 4529081 - DNA, 25 bp, Homo sapien
tatcagcttggctaaaccgaaattt

SEQ ID NO: 4529082 - DNA, 25 bp, Homo sapien
ggaggctaagaaggctcaagagctg

SEQ ID NO: 4529083 - DNA, 25 bp, Homo sapien
gaggctaagaaggctcaagagctgc

SEQ ID NO: 4529084 - DNA, 25 bp, Homo sapien
tggaggctaagaaggctcaagagct

SEQ ID NO: 4529085 - DNA, 25 bp, Homo sapien
gacttcaagtgatccgctcacctcg

SEQ ID NO: 4529086 - DNA, 25 bp, Homo sapien
ggcgtgagccaccatgcctggcctt

SEQ ID NO: 4529087 - DNA, 25 bp, Homo sapien
caggcgtgagccaccatgcctggcc

SEQ ID NO: 4529088 - DNA, 25 bp, Homo sapien
cgtgagccaccatgcctggcctttc

SEQ ID NO: 4529089 - DNA, 25 bp, Homo sapien
tggaggctctcatcaacgccactca

SEQ ID NO: 4529090 - DNA, 25 bp, Homo sapien
ggagggtaagcacagtcagtacagt

SEQ ID NO: 4529091 - DNA, 25 bp, Homo sapien
tgggagggtaagcacagtcagtaca

SEQ ID NO: 4529092 - DNA, 25 bp, Homo sapien
ctctgggagggtaagcacagtcagt

SEQ ID NO: 4529093 - DNA, 25 bp, Homo sapien
cttttggtgatttgggctatagatt

SEQ ID NO: 4529094 - DNA, 25 bp, Homo sapien
ttttggtgatttgggctatagattt

SEQ ID NO: 4529095 - DNA, 25 bp, Homo sapien
tggtgatttgggctatagatttttc

SEQ ID NO: 4529096 - DNA, 25 bp, Homo sapien
tttggtgatttgggctatagatttt

SEQ ID NO: 4529097 - DNA, 25 bp, Homo sapien
ggtaatctcaattccatctgctact

SEQ ID NO: 4529098 - DNA, 25 bp, Homo sapien
atctgttacacaaaattcacggcca

SEQ ID NO: 4529099 - DNA, 25 bp, Homo sapien
cagaaatgtaatagtggtaatctca

SEQ ID NO: 4529100 - DNA, 25 bp, Homo sapien
catctgctacttccgttgtttttgg

SEQ ID NO: 4529101 - DNA, 25 bp, Homo sapien
cattttcaagggcaagtaatcatat

SEQ ID NO: 4529102 - DNA, 25 bp, Homo sapien
caaagggcttacaagctttgcttcg

SEQ ID NO: 4529103 - DNA, 25 bp, Homo sapien
ctgacagtcagaggcctgaaagtaa

SEQ ID NO: 4529104 - DNA, 25 bp, Homo sapien
gtaagatactcttctacaaagggct

SEQ ID NO: 4529105 - DNA, 25 bp, Homo sapien
ggtcataatgccagaaaaggagtgc

SEQ ID NO: 4529106 - DNA, 25 bp, Homo sapien
tacagcactactttagcaagacagc

SEQ ID NO: 4529107 - DNA, 25 bp, Homo sapien
tatctccattctagccccttgtagg

SEQ ID NO: 4529108 - DNA, 25 bp, Homo sapien
gagttacccacaaacaatccctgat

SEQ ID NO: 4529109 - DNA, 25 bp, Homo sapien
cataggcttagtatataccgtcaca

SEQ ID NO: 4529110 - DNA, 25 bp, Homo sapien
tacagccactaggagcattcatgtt

SEQ ID NO: 4529111 - DNA, 25 bp, Homo sapien
catggtatgtatgcgccacagttta

SEQ ID NO: 4529112 - DNA, 25 bp, Homo sapien
tttgggctcacaaagagtgacatgg

SEQ ID NO: 4529113 - DNA, 25 bp, Homo sapien
cacacccagataattttttgtattt

SEQ ID NO: 4529114 - DNA, 25 bp, Homo sapien
gggactacagatgcgagtcaccaca

SEQ ID NO: 4529115 - DNA, 25 bp, Homo sapien
ctacagatgcgagtcaccacaccca

SEQ ID NO: 4529116 - DNA, 25 bp, Homo sapien
tgggactacagatgcgagtcaccac

SEQ ID NO: 4529117 - DNA, 25 bp, Homo sapien
tctaaaatggttctgcgactaagtc

SEQ ID NO: 4529118 - DNA, 25 bp, Homo sapien
tctaagtaggctatcaaaccaggtc

SEQ ID NO: 4529119 - DNA, 25 bp, Homo sapien
gagaatggtaaaggaagcccactgg

SEQ ID NO: 4529120 - DNA, 25 bp, Homo sapien
taacatggctttaaccagaagagct

SEQ ID NO: 4529121 - DNA, 25 bp, Homo sapien
ttggttccgctggtagcacaccgtg

SEQ ID NO: 4529122 - DNA, 25 bp, Homo sapien
tagaacatagactcctagagctgga

SEQ ID NO: 4529123 - DNA, 25 bp, Homo sapien
tgctcccagtccaggtttgggaaaa

SEQ ID NO: 4529124 - DNA, 25 bp, Homo sapien
tgtcccatacaaagccaattagagt

SEQ ID NO: 4529125 - DNA, 25 bp, Homo sapien
gccagagacggcagccaaggttatt

SEQ ID NO: 4529126 - DNA, 25 bp, Homo sapien
tagtactcatgtcattacgatgcag

SEQ ID NO: 4529127 - DNA, 25 bp, Homo sapien
tagcaaaacagagccaaaaacggta

SEQ ID NO: 4529128 - DNA, 25 bp, Homo sapien
aaaatgtcttttctaggcagggcgc

SEQ ID NO: 4529129 - DNA, 25 bp, Homo sapien
gcatgttcatggagtagtttaggaa

SEQ ID NO: 4529130 - DNA, 25 bp, Homo sapien
aataaatccatggtttgtggagtac

SEQ ID NO: 4529131 - DNA, 25 bp, Homo sapien
aatccatggtttgtggagtactaaa

SEQ ID NO: 4529132 - DNA, 25 bp, Homo sapien
tcacacgtcttcaggttgcatgttc

SEQ ID NO: 4529133 - DNA, 25 bp, Homo sapien
agtggtctgctgtattacattaagg

SEQ ID NO: 4529134 - DNA, 25 bp, Homo sapien
ctgtattacattaaggccttcccca

SEQ ID NO: 4529135 - DNA, 25 bp, Homo sapien
gcttccaaggcagcctccaagtcac

SEQ ID NO: 4529136 - DNA, 25 bp, Homo sapien
ctagtggtctgctgtattacattaa

SEQ ID NO: 4529137 - DNA, 25 bp, Homo sapien
gaagtgcatgcaggactgcagagat

SEQ ID NO: 4529138 - DNA, 25 bp, Homo sapien
atttggctggaagtgcatgcaggac

SEQ ID NO: 4529139 - DNA, 25 bp, Homo sapien
ggactgcagagattcctctccacag

SEQ ID NO: 4529140 - DNA, 25 bp, Homo sapien
gcaggagaatttggctggaagtgca

SEQ ID NO: 4529141 - DNA, 25 bp, Homo sapien
ttcccagtcgggttcaccaggcatc

SEQ ID NO: 4529142 - DNA, 25 bp, Homo sapien
actggatgttctgggtctggttgct

SEQ ID NO: 4529143 - DNA, 25 bp, Homo sapien
caggagtggttgctccaggactgga

SEQ ID NO: 4529144 - DNA, 25 bp, Homo sapien
tggttgctccaggttgaattgttcc

SEQ ID NO: 4529145 - DNA, 25 bp, Homo sapien
tagaggctggggtaggtaggtgctg

SEQ ID NO: 4529146 - DNA, 25 bp, Homo sapien
ggtgctgaggccttctgcgtcacac

SEQ ID NO: 4529147 - DNA, 25 bp, Homo sapien
gggtaggtaggtgctgaggccttct

SEQ ID NO: 4529148 - DNA, 25 bp, Homo sapien
ctggtggtaggaagagtagaggctg

SEQ ID NO: 4529149 - DNA, 25 bp, Homo sapien
cattgctattcttcggccagttgtt

SEQ ID NO: 4529150 - DNA, 25 bp, Homo sapien
tgtttttctgccacctcttagattt

SEQ ID NO: 4529151 - DNA, 25 bp, Homo sapien
ttcttcggccagttgtttttctgcc

SEQ ID NO: 4529152 - DNA, 25 bp, Homo sapien
ttcggccagttgtttttctgccacc

SEQ ID NO: 4529153 - DNA, 25 bp, Homo sapien
gctgaggttcaggatgttggagagt

SEQ ID NO: 4529154 - DNA, 25 bp, Homo sapien
gagagttcttgcatctgctggaggc

SEQ ID NO: 4529155 - DNA, 25 bp, Homo sapien
gtagctgaggttcaggatgttggag

SEQ ID NO: 4529156 - DNA, 25 bp, Homo sapien
tgaggttcaggatgttggagagttc

SEQ ID NO: 4529157 - DNA, 25 bp, Homo sapien
caagctttggggacaagctggatcc

SEQ ID NO: 4529158 - DNA, 25 bp, Homo sapien
gattctttacagtcggattcttcaa

SEQ ID NO: 4529159 - DNA, 25 bp, Homo sapien
tcttccttttttgcgacactattct

SEQ ID NO: 4529160 - DNA, 25 bp, Homo sapien
tgcgacactattctctgcagaagtg

SEQ ID NO: 4529161 - DNA, 25 bp, Homo sapien
gggataaagtgagttgcctgcataa

SEQ ID NO: 4529162 - DNA, 25 bp, Homo sapien
gagttgcctgcataataacatgagg

SEQ ID NO: 4529163 - DNA, 25 bp, Homo sapien
agaaattgggataaagtgagttgcc

SEQ ID NO: 4529164 - DNA, 25 bp, Homo sapien
aggaaaagtatcaagaaattgggat

SEQ ID NO: 4529165 - DNA, 25 bp, Homo sapien
gaaagtatatctttgccaatgcagc

SEQ ID NO: 4529166 - DNA, 25 bp, Homo sapien
tcagtgctacagattgactccgtgt

SEQ ID NO: 4529167 - DNA, 25 bp, Homo sapien
tatgcaacccatcctttgaggcact

SEQ ID NO: 4529168 - DNA, 25 bp, Homo sapien
gcctgaagccctaggaccactcttt

SEQ ID NO: 4529169 - DNA, 25 bp, Homo sapien
ttggcaccgagaaagtcaactgttc

SEQ ID NO: 4529170 - DNA, 25 bp, Homo sapien
tctttcaaggtgttctgctagctgc

SEQ ID NO: 4529171 - DNA, 25 bp, Homo sapien
tgctgtcaactgaaatagggccatt

SEQ ID NO: 4529172 - DNA, 25 bp, Homo sapien
cgacgtttagccagaccattgccct

SEQ ID NO: 4529173 - DNA, 25 bp, Homo sapien
gtggggaacgtgtacttcaagcttc

SEQ ID NO: 4529174 - DNA, 25 bp, Homo sapien
tgtcacctgtgacggacttcagggg

SEQ ID NO: 4529175 - DNA, 25 bp, Homo sapien
tgtacttcaagcttccccgtgagga

SEQ ID NO: 4529176 - DNA, 25 bp, Homo sapien
aacgtgtacttcaagcttccccgtg

SEQ ID NO: 4529177 - DNA, 25 bp, Homo sapien
gcatgctgcatggataatttctcct

SEQ ID NO: 4529178 - DNA, 25 bp, Homo sapien
taaaccagcatgctgcatggataat

SEQ ID NO: 4529179 - DNA, 25 bp, Homo sapien
gataccagaagcagcgcagatgcca

SEQ ID NO: 4529180 - DNA, 25 bp, Homo sapien
cctctgggtaaatgggtcacagata

SEQ ID NO: 4529181 - DNA, 25 bp, Homo sapien
tcttaagaactcaaactggaccatg

SEQ ID NO: 4529182 - DNA, 25 bp, Homo sapien
gacaattttgcgactagatggcagg

SEQ ID NO: 4529183 - DNA, 25 bp, Homo sapien
tgatggaactagagaaggcttaacc

SEQ ID NO: 4529184 - DNA, 25 bp, Homo sapien
aaaaagatttgaggcagggtgacca

SEQ ID NO: 4529185 - DNA, 25 bp, Homo sapien
gggacatacattgctgacctctggt

SEQ ID NO: 4529186 - DNA, 25 bp, Homo sapien
tgttgctactactcgactctgtcgt

SEQ ID NO: 4529187 - DNA, 25 bp, Homo sapien
aaacaggtggctgactagcattggc

SEQ ID NO: 4529188 - DNA, 25 bp, Homo sapien
tctgtcgtaaggcaaaagaagccac

SEQ ID NO: 4529189 - DNA, 25 bp, Homo sapien
ttcatgttgaagtatggtggttcca

SEQ ID NO: 4529190 - DNA, 25 bp, Homo sapien
tatcatatgatctagcagtccgact

SEQ ID NO: 4529191 - DNA, 25 bp, Homo sapien
ctgaaagtagagacttcaacagata

SEQ ID NO: 4529192 - DNA, 25 bp, Homo sapien
ccatgcctggctgcgaataagttat

SEQ ID NO: 4529193 - DNA, 25 bp, Homo sapien
tccctggctgtcttaataagtgttt

SEQ ID NO: 4529194 - DNA, 25 bp, Homo sapien
gtcttaataagtgttttggaagcag

SEQ ID NO: 4529195 - DNA, 25 bp, Homo sapien
ccttggcttccctggctgtcttaat

SEQ ID NO: 4529196 - DNA, 25 bp, Homo sapien
tggcttccctggctgtcttaataag

SEQ ID NO: 4529197 - DNA, 25 bp, Homo sapien
ggatttcggtccagccactgttgtc

SEQ ID NO: 4529198 - DNA, 25 bp, Homo sapien
tggagacaccgcataagctagagga

SEQ ID NO: 4529199 - DNA, 25 bp, Homo sapien
tagaggagacccacgcttcccggcg

SEQ ID NO: 4529200 - DNA, 25 bp, Homo sapien
aggagacccacgcttcccggcggat

SEQ ID NO: 4529201 - DNA, 25 bp, Homo sapien
catcggccgggcgtggttgatgttc

SEQ ID NO: 4529202 - DNA, 25 bp, Homo sapien
aggtgaaggtggtcatggtctgatt

SEQ ID NO: 4529203 - DNA, 25 bp, Homo sapien
tcggccgggcgtggttgatgttcca

SEQ ID NO: 4529204 - DNA, 25 bp, Homo sapien
ggccgggcgtggttgatgttccagg

SEQ ID NO: 4529205 - DNA, 25 bp, Homo sapien
gcaggaaacagtcgctcggcccagc

SEQ ID NO: 4529206 - DNA, 25 bp, Homo sapien
ttggtcatgagtcgccgggacagca

SEQ ID NO: 4529207 - DNA, 25 bp, Homo sapien
cccagcggggcatcctgtcggtctt

SEQ ID NO: 4529208 - DNA, 25 bp, Homo sapien
gggcatcctgtcggtcttggtcatg

SEQ ID NO: 4529209 - DNA, 25 bp, Homo sapien
ttccgtcaagatacgtttgccacag

SEQ ID NO: 4529210 - DNA, 25 bp, Homo sapien
tgtcttccgtcaagatacgtttgcc

SEQ ID NO: 4529211 - DNA, 25 bp, Homo sapien
tacgtttgccacagggattcgggta

SEQ ID NO: 4529212 - DNA, 25 bp, Homo sapien
caagatacgtttgccacagggattc

SEQ ID NO: 4529213 - DNA, 25 bp, Homo sapien
tgcttgagaaatccttccagaaggg

SEQ ID NO: 4529214 - DNA, 25 bp, Homo sapien
taatctcagtggagaatccacaacc

SEQ ID NO: 4529215 - DNA, 25 bp, Homo sapien
aaatgatatcatggatggtgccggg

SEQ ID NO: 4529216 - DNA, 25 bp, Homo sapien
tccagaagggtgttcgaggatcaat

SEQ ID NO: 4529217 - DNA, 25 bp, Homo sapien
ggaagcaagcagtctcccgagtgta

SEQ ID NO: 4529218 - DNA, 25 bp, Homo sapien
gtttaccagagacatgtgcattcag

SEQ ID NO: 4529219 - DNA, 25 bp, Homo sapien
taacatgtgccaaaagtagtgccac

SEQ ID NO: 4529220 - DNA, 25 bp, Homo sapien
taggtttcccataacacaaaggcag

SEQ ID NO: 4529221 - DNA, 25 bp, Homo sapien
tcagtgaatgtagaaagccactcag

SEQ ID NO: 4529222 - DNA, 25 bp, Homo sapien
gattaacccaggacaaaagcactcg

SEQ ID NO: 4529223 - DNA, 25 bp, Homo sapien
cagcaaatctggtcaaactaggtat

SEQ ID NO: 4529224 - DNA, 25 bp, Homo sapien
tagaaaagtgaaaagtgggacctgc

SEQ ID NO: 4529225 - DNA, 25 bp, Homo sapien
ccaagaagatattaggatcagttga

SEQ ID NO: 4529226 - DNA, 25 bp, Homo sapien
caaaattttaactatcaggctgttt

SEQ ID NO: 4529227 - DNA, 25 bp, Homo sapien
gatcagttgactgacaacaggaaaa

SEQ ID NO: 4529228 - DNA, 25 bp, Homo sapien
gaggagattcacatgcagacaaaat

SEQ ID NO: 4529229 - DNA, 25 bp, Homo sapien
tggttggccttgaacagcaaaaggc

SEQ ID NO: 4529230 - DNA, 25 bp, Homo sapien
tgtaatgacatgctaggacaaatgc

SEQ ID NO: 4529231 - DNA, 25 bp, Homo sapien
gcagtagctcagtgggaacataaac

SEQ ID NO: 4529232 - DNA, 25 bp, Homo sapien
tgctcagagcaacaaattctttcca

SEQ ID NO: 4529233 - DNA, 25 bp, Homo sapien
tttaaaaggatccaaggatgaatga

SEQ ID NO: 4529234 - DNA, 25 bp, Homo sapien
tgataatgatgatggtcattagggc

SEQ ID NO: 4529235 - DNA, 25 bp, Homo sapien
cttttaaaaggatccaaggatgaat

SEQ ID NO: 4529236 - DNA, 25 bp, Homo sapien
tgatggtcattagggccttggagac

SEQ ID NO: 4529237 - DNA, 25 bp, Homo sapien
agggttgatgcactggaagcagaac

SEQ ID NO: 4529238 - DNA, 25 bp, Homo sapien
taaatggttcgtctgccactgcagt

SEQ ID NO: 4529239 - DNA, 25 bp, Homo sapien
cagtgacatgccacttggttgcagc

SEQ ID NO: 4529240 - DNA, 25 bp, Homo sapien
aaagagatgagggttgatgcactgg

SEQ ID NO: 4529241 - DNA, 25 bp, Homo sapien
tttgtagagatcacaagtccacttg

SEQ ID NO: 4529242 - DNA, 25 bp, Homo sapien
gtataccaatttgcttacactgcag

SEQ ID NO: 4529243 - DNA, 25 bp, Homo sapien
cattttacctgaagtcgataaggcc

SEQ ID NO: 4529244 - DNA, 25 bp, Homo sapien
aatactgtacattgcctgacctctg

SEQ ID NO: 4529245 - DNA, 25 bp, Homo sapien
ttgtctgaggttgttaaatcagtta

SEQ ID NO: 4529246 - DNA, 25 bp, Homo sapien
tggtgccaacatatgtaaacgcagg

SEQ ID NO: 4529247 - DNA, 25 bp, Homo sapien
taaacgcaggcactaaatatagcag

SEQ ID NO: 4529248 - DNA, 25 bp, Homo sapien
tgtcccaagtacaggccaaatgtta

SEQ ID NO: 4529249 - DNA, 25 bp, Homo sapien
tacatttgtgttagtgccagcaagc

SEQ ID NO: 4529250 - DNA, 25 bp, Homo sapien
acttcttgacaaacagaggcttcaa

SEQ ID NO: 4529251 - DNA, 25 bp, Homo sapien
taatagtgtctaaaaggaccctgca

SEQ ID NO: 4529252 - DNA, 25 bp, Homo sapien
gaccctgcagagctaaacggtaaca

SEQ ID NO: 4529253 - DNA, 25 bp, Homo sapien
tgtttcagcaattgcgcctctactg

SEQ ID NO: 4529254 - DNA, 25 bp, Homo sapien
tagggtcagcattttaccacgcaat

SEQ ID NO: 4529255 - DNA, 25 bp, Homo sapien
tcccaactgcgtatcaagtgacaag

SEQ ID NO: 4529256 - DNA, 25 bp, Homo sapien
tagagcatgcccttagaagcctggg

SEQ ID NO: 4529257 - DNA, 25 bp, Homo sapien
cagtgggtcattttgtagggtcagc

SEQ ID NO: 4529258 - DNA, 25 bp, Homo sapien
tatctacgggaatttcagcttccat

SEQ ID NO: 4529259 - DNA, 25 bp, Homo sapien
actggttgatccttgtcccttctgt

SEQ ID NO: 4529260 - DNA, 25 bp, Homo sapien
tctgtagctatctacgggaatttca

SEQ ID NO: 4529261 - DNA, 25 bp, Homo sapien
ggttgatccttgtcccttctgtagc

SEQ ID NO: 4529262 - DNA, 25 bp, Homo sapien
cagttattaagtccctaggaatagc

SEQ ID NO: 4529263 - DNA, 25 bp, Homo sapien
ccaaatgtgactaggacataagacc

SEQ ID NO: 4529264 - DNA, 25 bp, Homo sapien
cttctactgagcagccagtttgttt

SEQ ID NO: 4529265 - DNA, 25 bp, Homo sapien
gcatagacgactagaatgctcagag

SEQ ID NO: 4529266 - DNA, 25 bp, Homo sapien
tctcagtgcctgaagacaaggaaat

SEQ ID NO: 4529267 - DNA, 25 bp, Homo sapien
aatctgtcctcataactgtctgtag

SEQ ID NO: 4529268 - DNA, 25 bp, Homo sapien
tgtgacagtcccatatgcaactcca

SEQ ID NO: 4529269 - DNA, 25 bp, Homo sapien
gagtcacacatgtagctattggaag

SEQ ID NO: 4529270 - DNA, 25 bp, Homo sapien
cagtctgcgtttcatgtatagctag

SEQ ID NO: 4529271 - DNA, 25 bp, Homo sapien
gaattaaagttagccacagtctgcg

SEQ ID NO: 4529272 - DNA, 25 bp, Homo sapien
tatagctagtccttatctgtctgag

SEQ ID NO: 4529273 - DNA, 25 bp, Homo sapien
tgaggtaaggcctggaattctcaca

SEQ ID NO: 4529274 - DNA, 25 bp, Homo sapien
tagtgccttttatggcatgtttaag

SEQ ID NO: 4529275 - DNA, 25 bp, Homo sapien
gccttttatggcatgtttaagaagc

SEQ ID NO: 4529276 - DNA, 25 bp, Homo sapien
tgccttttatggcatgtttaagaag

SEQ ID NO: 4529277 - DNA, 25 bp, Homo sapien
cattagtgccttttatggcatgttt

SEQ ID NO: 4529278 - DNA, 25 bp, Homo sapien
taaatcagggtccttttctggcaac

SEQ ID NO: 4529279 - DNA, 25 bp, Homo sapien
gcataatatctgacttggcaaagga

SEQ ID NO: 4529280 - DNA, 25 bp, Homo sapien
gccataatttgtaggagcttccaga

SEQ ID NO: 4529281 - DNA, 25 bp, Homo sapien
ggattaatgctacaaagtggccaac

SEQ ID NO: 4529282 - DNA, 25 bp, Homo sapien
tacaactgatgagtgtcttagcctg

SEQ ID NO: 4529283 - DNA, 25 bp, Homo sapien
aatacaccattttcacgcagcctag

SEQ ID NO: 4529284 - DNA, 25 bp, Homo sapien
tcataacatgttggtaggcatcaca

SEQ ID NO: 4529285 - DNA, 25 bp, Homo sapien
tgagtgggaaataccaagaggtccc

SEQ ID NO: 4529286 - DNA, 25 bp, Homo sapien
gggtctggcactatgtcctctctga

SEQ ID NO: 4529287 - DNA, 25 bp, Homo sapien
tcccttatagacaagcacaaaggtc

SEQ ID NO: 4529288 - DNA, 25 bp, Homo sapien
tgaagttcacctcaagccaaacact

SEQ ID NO: 4529289 - DNA, 25 bp, Homo sapien
tgctccagtggcctaaagaaccctg

SEQ ID NO: 4529290 - DNA, 25 bp, Homo sapien
gaagaacatacatcctgacctaaag

SEQ ID NO: 4529291 - DNA, 25 bp, Homo sapien
gcaacaatctgcaaaagaggctgtg

SEQ ID NO: 4529292 - DNA, 25 bp, Homo sapien
gatgacattagcatagcataccagg

SEQ ID NO: 4529293 - DNA, 25 bp, Homo sapien
tcagtagtgacatgggcaggcatca

SEQ ID NO: 4529294 - DNA, 25 bp, Homo sapien
tatagtgtcactgattcaatgtaac

SEQ ID NO: 4529295 - DNA, 25 bp, Homo sapien
ggcgtagcagtattgtgaagtaaca

SEQ ID NO: 4529296 - DNA, 25 bp, Homo sapien
gatattgaagtttgtagagggctac

SEQ ID NO: 4529297 - DNA, 25 bp, Homo sapien
tatcgctgtcatatgatagtcatgg

SEQ ID NO: 4529298 - DNA, 25 bp, Homo sapien
ccacttgttcactataaagaatcct

SEQ ID NO: 4529299 - DNA, 25 bp, Homo sapien
gacaagctagtgaaagcagaatgga

SEQ ID NO: 4529300 - DNA, 25 bp, Homo sapien
gataataagagctcatagaggcagc

SEQ ID NO: 4529301 - DNA, 25 bp, Homo sapien
atatagtttgcttcatgaattcacc

SEQ ID NO: 4529302 - DNA, 25 bp, Homo sapien
aaatcattgattgggccttctctgc

SEQ ID NO: 4529303 - DNA, 25 bp, Homo sapien
aataggcaacataagcagtaggagc

SEQ ID NO: 4529304 - DNA, 25 bp, Homo sapien
gatgaggtgcttcgcccaatgaata

SEQ ID NO: 4529305 - DNA, 25 bp, Homo sapien
tctgagactcattcgcagagtggca

SEQ ID NO: 4529306 - DNA, 25 bp, Homo sapien
taaatgatacctagcaccgaagagc

SEQ ID NO: 4529307 - DNA, 25 bp, Homo sapien
agcttaaggtttccgtgctattcca

SEQ ID NO: 4529308 - DNA, 25 bp, Homo sapien
catgattatgctgttagtggcccaa

SEQ ID NO: 4529309 - DNA, 25 bp, Homo sapien
tgatcatgggtagaacttgcatgct

SEQ ID NO: 4529310 - DNA, 25 bp, Homo sapien
tagttgcaagaggtgagtcattgaa

SEQ ID NO: 4529311 - DNA, 25 bp, Homo sapien
tcctccaaaacgctgaccagtgccc

SEQ ID NO: 4529312 - DNA, 25 bp, Homo sapien
gaaagagttagtgtagttgcaagag

SEQ ID NO: 4529313 - DNA, 25 bp, Homo sapien
ttggcctgaaagagttagtgtagtt

SEQ ID NO: 4529314 - DNA, 25 bp, Homo sapien
acatattatgtatgcattgtgcata

SEQ ID NO: 4529315 - DNA, 25 bp, Homo sapien
ctttattgaatgaagtcaggtaaat

SEQ ID NO: 4529316 - DNA, 25 bp, Homo sapien
tgccttgaacatcatattacttact

SEQ ID NO: 4529317 - DNA, 25 bp, Homo sapien
gcatattgagttgccttgaacatca

SEQ ID NO: 4529318 - DNA, 25 bp, Homo sapien
accattttttatctcatattctcta

SEQ ID NO: 4529319 - DNA, 25 bp, Homo sapien
ctcctgacaaccattttttatctca

SEQ ID NO: 4529320 - DNA, 25 bp, Homo sapien
caaccattttttatctcatattctc

SEQ ID NO: 4529321 - DNA, 25 bp, Homo sapien
cattttttatctcatattctctaac

SEQ ID NO: 4529322 - DNA, 25 bp, Homo sapien
atagcctgatgagcccatatgctgc

SEQ ID NO: 4529323 - DNA, 25 bp, Homo sapien
gccaacacacagatttagattctgg

SEQ ID NO: 4529324 - DNA, 25 bp, Homo sapien
tcccaataccaagtccatagcctga

SEQ ID NO: 4529325 - DNA, 25 bp, Homo sapien
gaattatccctgctcctatctaaga

SEQ ID NO: 4529326 - DNA, 25 bp, Homo sapien
atgcatttgccacctgtccaccaaa

SEQ ID NO: 4529327 - DNA, 25 bp, Homo sapien
ctcccattcgagtcaataaccgctt

SEQ ID NO: 4529328 - DNA, 25 bp, Homo sapien
tcgagtcaataaccgcttgaattgc

SEQ ID NO: 4529329 - DNA, 25 bp, Homo sapien
gcatttgccacctgtccaccaaaat

SEQ ID NO: 4529330 - DNA, 25 bp, Homo sapien
caggggcaccagaatttcaaacaac

SEQ ID NO: 4529331 - DNA, 25 bp, Homo sapien
catcatcaggggcaccagaatttca

SEQ ID NO: 4529332 - DNA, 25 bp, Homo sapien
ggggcaccagaatttcaaacaacac

SEQ ID NO: 4529333 - DNA, 25 bp, Homo sapien
ggcaccagaatttcaaacaacacac

SEQ ID NO: 4529334 - DNA, 25 bp, Homo sapien
ttgagatatttttcacgttcttcct

SEQ ID NO: 4529335 - DNA, 25 bp, Homo sapien
tggttttaacttccaagtcttcatc

SEQ ID NO: 4529336 - DNA, 25 bp, Homo sapien
agatatttttcacgttcttccttgg

SEQ ID NO: 4529337 - DNA, 25 bp, Homo sapien
ccccaactttgagatatttttcacg

SEQ ID NO: 4529338 - DNA, 25 bp, Homo sapien
ctggtcttctccaccgaaaaggcgg

SEQ ID NO: 4529339 - DNA, 25 bp, Homo sapien
gtcttctccaccgaaaaggcggtgc

SEQ ID NO: 4529340 - DNA, 25 bp, Homo sapien
gctggtcttctccaccgaaaaggcg

SEQ ID NO: 4529341 - DNA, 25 bp, Homo sapien
gatctcggtctgtcttgttcctcgt

SEQ ID NO: 4529342 - DNA, 25 bp, Homo sapien
ctcggtctgtcttgttcctcgtaca

SEQ ID NO: 4529343 - DNA, 25 bp, Homo sapien
ggttggagatctcggtctgtcttgt

SEQ ID NO: 4529344 - DNA, 25 bp, Homo sapien
agatctcggtctgtcttgttcctcg

SEQ ID NO: 4529345 - DNA, 25 bp, Homo sapien
ggggaggaatggcagttttggaaga

SEQ ID NO: 4529346 - DNA, 25 bp, Homo sapien
tgggggaggaatggcagttttggaa

SEQ ID NO: 4529347 - DNA, 25 bp, Homo sapien
ctgggggaggaatggcagttttgga

SEQ ID NO: 4529348 - DNA, 25 bp, Homo sapien
catcagaatccggatctgaactcct

SEQ ID NO: 4529349 - DNA, 25 bp, Homo sapien
atcttcatcagaatccggatctgaa

SEQ ID NO: 4529350 - DNA, 25 bp, Homo sapien
tcatcagaatccggatctgaactcc

SEQ ID NO: 4529351 - DNA, 25 bp, Homo sapien
cttcatcagaatccggatctgaact

SEQ ID NO: 4529352 - DNA, 25 bp, Homo sapien
cactactttcttacaatcgttagga

SEQ ID NO: 4529353 - DNA, 25 bp, Homo sapien
ttcttacaatcgttaggaaacatag

SEQ ID NO: 4529354 - DNA, 25 bp, Homo sapien
tggcgtttcactactttcttacaat

SEQ ID NO: 4529355 - DNA, 25 bp, Homo sapien
ttacaatcgttaggaaacataggat

SEQ ID NO: 4529356 - DNA, 25 bp, Homo sapien
gagccacctcgttgtaggtcaatga

SEQ ID NO: 4529357 - DNA, 25 bp, Homo sapien
acctcgttgtaggtcaatgactggg

SEQ ID NO: 4529358 - DNA, 25 bp, Homo sapien
tgaggagccacctcgttgtaggtca

SEQ ID NO: 4529359 - DNA, 25 bp, Homo sapien
gcacatgcggtggtgtgtccacaat

SEQ ID NO: 4529360 - DNA, 25 bp, Homo sapien
ttggctctttgcctgagtgagagct

SEQ ID NO: 4529361 - DNA, 25 bp, Homo sapien
ctctttgcctgagtgagagctgcct

SEQ ID NO: 4529362 - DNA, 25 bp, Homo sapien
ctttgcctgagtgagagctgccttc

SEQ ID NO: 4529363 - DNA, 25 bp, Homo sapien
ttgtttcgtcctttggctctttgcc

SEQ ID NO: 4529364 - DNA, 25 bp, Homo sapien
tgaagtttttggaccagccttctgt

SEQ ID NO: 4529365 - DNA, 25 bp, Homo sapien
ttttggaccagccttctgtttttga

SEQ ID NO: 4529366 - DNA, 25 bp, Homo sapien
ttgaagtttttggaccagccttctg

SEQ ID NO: 4529367 - DNA, 25 bp, Homo sapien
catcttttcttcggtttaatgccgg

SEQ ID NO: 4529368 - DNA, 25 bp, Homo sapien
ctctgatcgtacagggacatctttt

SEQ ID NO: 4529369 - DNA, 25 bp, Homo sapien
ggacatcttttcttcggtttaatgc

SEQ ID NO: 4529370 - DNA, 25 bp, Homo sapien
tctgatcgtacagggacatcttttc

SEQ ID NO: 4529371 - DNA, 25 bp, Homo sapien
catgggccgcggtggcggcagcgcg

SEQ ID NO: 4529372 - DNA, 25 bp, Homo sapien
ctgcccatgggccgcggtggcggca

SEQ ID NO: 4529373 - DNA, 25 bp, Homo sapien
tgcccatgggccgcggtggcggcag

SEQ ID NO: 4529374 - DNA, 25 bp, Homo sapien
gggccgcggtggcggcagcgcggag

SEQ ID NO: 4529375 - DNA, 25 bp, Homo sapien
ttgataattacaggaaaacaccagg

SEQ ID NO: 4529376 - DNA, 25 bp, Homo sapien
tattctatcaccatctatcaaggca

SEQ ID NO: 4529377 - DNA, 25 bp, Homo sapien
caggactgtgcagacatactgagct

SEQ ID NO: 4529378 - DNA, 25 bp, Homo sapien
gatgccttaagaatgaaagctcaga

SEQ ID NO: 4529379 - DNA, 25 bp, Homo sapien
ttattgggagcctgctctaccctct

SEQ ID NO: 4529380 - DNA, 25 bp, Homo sapien
tcttattgggagcctgctctaccct

SEQ ID NO: 4529381 - DNA, 25 bp, Homo sapien
cttattgggagcctgctctaccctc

SEQ ID NO: 4529382 - DNA, 25 bp, Homo sapien
cattcttgaccatatttggacttta

SEQ ID NO: 4529383 - DNA, 25 bp, Homo sapien
tcttgaccatatttggactttatct

SEQ ID NO: 4529384 - DNA, 25 bp, Homo sapien
ttcttgaccatatttggactttatc

SEQ ID NO: 4529385 - DNA, 25 bp, Homo sapien
ttcattcttgaccatatttggactt

SEQ ID NO: 4529386 - DNA, 25 bp, Homo sapien
gaaactgggcactactctgactagg

SEQ ID NO: 4529387 - DNA, 25 bp, Homo sapien
aagttcaggtcactatggtttccag

SEQ ID NO: 4529388 - DNA, 25 bp, Homo sapien
gatgttgtcacgtggcccttaagaa

SEQ ID NO: 4529389 - DNA, 25 bp, Homo sapien
cccgttgagggcagatggatatagt

SEQ ID NO: 4529390 - DNA, 25 bp, Homo sapien
taaaattcatagtccgcaactgcag

SEQ ID NO: 4529391 - DNA, 25 bp, Homo sapien
gaagtgaaagacatgcgggcaaaga

SEQ ID NO: 4529392 - DNA, 25 bp, Homo sapien
ggtctgggaactgctaacaaatgtc

SEQ ID NO: 4529393 - DNA, 25 bp, Homo sapien
gaaagggcccagttcttcacgacaa

SEQ ID NO: 4529394 - DNA, 25 bp, Homo sapien
caagggtgtagatgattacatgggc

SEQ ID NO: 4529395 - DNA, 25 bp, Homo sapien
cagctggcttatatggttggatatc

SEQ ID NO: 4529396 - DNA, 25 bp, Homo sapien
caaaggctcctttgggaatctccca

SEQ ID NO: 4529397 - DNA, 25 bp, Homo sapien
ggagactctacgcaatcaaaggctc

SEQ ID NO: 4529398 - DNA, 25 bp, Homo sapien
gagacgtgttccagtcccatctttg

SEQ ID NO: 4529399 - DNA, 25 bp, Homo sapien
cgtgcctggcctctagaaaaggttc

SEQ ID NO: 4529400 - DNA, 25 bp, Homo sapien
gattcagaggttttaagcccatgct

SEQ ID NO: 4529401 - DNA, 25 bp, Homo sapien
cctcagctaggaaataagacagttg

SEQ ID NO: 4529402 - DNA, 25 bp, Homo sapien
gaaaaggtagagtctatcatagcct

SEQ ID NO: 4529403 - DNA, 25 bp, Homo sapien
catagcctctaccactattttcagg

SEQ ID NO: 4529404 - DNA, 25 bp, Homo sapien
catgtacttggacgaagtcaggcaa

SEQ ID NO: 4529405 - DNA, 25 bp, Homo sapien
gcataatgctatgactgtaccttgt

SEQ ID NO: 4529406 - DNA, 25 bp, Homo sapien
atggaaagactggatatggctgacc

SEQ ID NO: 4529407 - DNA, 25 bp, Homo sapien
catgctgctgataagttgccagaga

SEQ ID NO: 4529408 - DNA, 25 bp, Homo sapien
cagactcatggtgattgaggtacac

SEQ ID NO: 4529409 - DNA, 25 bp, Homo sapien
ctgcaagaacagtacgcgggaaact

SEQ ID NO: 4529410 - DNA, 25 bp, Homo sapien
caaaaccccataggaaatgtgagca

SEQ ID NO: 4529411 - DNA, 25 bp, Homo sapien
aaaaccccataggaaatgtgagcac

SEQ ID NO: 4529412 - DNA, 25 bp, Homo sapien
aggccaaaaccccataggaaatgtg

SEQ ID NO: 4529413 - DNA, 25 bp, Homo sapien
gccaaaaccccataggaaatgtgag

SEQ ID NO: 4529414 - DNA, 25 bp, Homo sapien
tgagagaaacgtggctcagatgctg

SEQ ID NO: 4529415 - DNA, 25 bp, Homo sapien
catgtaacatgctttctccactgaa

SEQ ID NO: 4529416 - DNA, 25 bp, Homo sapien
cagatgctgctagtccactggtaag

SEQ ID NO: 4529417 - DNA, 25 bp, Homo sapien
gaaaaggcttaagcagctgcatgta

SEQ ID NO: 4529418 - DNA, 25 bp, Homo sapien
tatagagtcataaccgcaaataatg

SEQ ID NO: 4529419 - DNA, 25 bp, Homo sapien
tatctattgcacatgattatgcgtg

SEQ ID NO: 4529420 - DNA, 25 bp, Homo sapien
ggttgaatacaagcagtcatttcca

SEQ ID NO: 4529421 - DNA, 25 bp, Homo sapien
aacctcgtatccagaaaccttatcg

SEQ ID NO: 4529422 - DNA, 25 bp, Homo sapien
gtctttcaacccatgatcacgggat

SEQ ID NO: 4529423 - DNA, 25 bp, Homo sapien
tcctcctggagcaactatatctata

SEQ ID NO: 4529424 - DNA, 25 bp, Homo sapien
ggaatctgtagattacagtacaaat

SEQ ID NO: 4529425 - DNA, 25 bp, Homo sapien
cacgggatgtcttcccctttatttg

SEQ ID NO: 4529426 - DNA, 25 bp, Homo sapien
aattggtgtaactcttaatgtgttg

SEQ ID NO: 4529427 - DNA, 25 bp, Homo sapien
tgaattaagcatgctagtgttttgc

SEQ ID NO: 4529428 - DNA, 25 bp, Homo sapien
ttgttaatgtgatgtcttaatttga

SEQ ID NO: 4529429 - DNA, 25 bp, Homo sapien
catatattgaaccatcttcttgcat

SEQ ID NO: 4529430 - DNA, 25 bp, Homo sapien
tatttgtggatacagttattctgac

SEQ ID NO: 4529431 - DNA, 25 bp, Homo sapien
taaatgttaaggtgcatgattacag

SEQ ID NO: 4529432 - DNA, 25 bp, Homo sapien
cattatagctgtgagtcacctcaca

SEQ ID NO: 4529433 - DNA, 25 bp, Homo sapien
gatcctctctacttagcttcctgag

SEQ ID NO: 4529434 - DNA, 25 bp, Homo sapien
gaggatttcctaacttattcctgga

SEQ ID NO: 4529435 - DNA, 25 bp, Homo sapien
aggatttcctaacttattcctggat

SEQ ID NO: 4529436 - DNA, 25 bp, Homo sapien
aacagtgtgtctaaagttttctgaa

SEQ ID NO: 4529437 - DNA, 25 bp, Homo sapien
ttttggaggcattgaagagccttgt

SEQ ID NO: 4529438 - DNA, 25 bp, Homo sapien
tcccttcatttcttgtaccatattc

SEQ ID NO: 4529439 - DNA, 25 bp, Homo sapien
catttcttgtaccatattctggatt

SEQ ID NO: 4529440 - DNA, 25 bp, Homo sapien
tggagtctgcacaccagattcgcgc

SEQ ID NO: 4529441 - DNA, 25 bp, Homo sapien
tctctgtgtagttttactccctgct

SEQ ID NO: 4529442 - DNA, 25 bp, Homo sapien
ttctggacagaaggcttctcactct

SEQ ID NO: 4529443 - DNA, 25 bp, Homo sapien
caatacaggcttgaaaatctactgc

SEQ ID NO: 4529444 - DNA, 25 bp, Homo sapien
tgttttcttacagcacattgagctt

SEQ ID NO: 4529445 - DNA, 25 bp, Homo sapien
acctgacttcaagtttcctgattcc

SEQ ID NO: 4529446 - DNA, 25 bp, Homo sapien
agtttctgaagatctattttgggcc

SEQ ID NO: 4529447 - DNA, 25 bp, Homo sapien
tccgattgggtcatgtttccctgtt

SEQ ID NO: 4529448 - DNA, 25 bp, Homo sapien
tccacttctctaacacccttagtta

SEQ ID NO: 4529449 - DNA, 25 bp, Homo sapien
gtagattttaaactcggagacatca

SEQ ID NO: 4529450 - DNA, 25 bp, Homo sapien
cccttagttatgtgcactgcttttt

SEQ ID NO: 4529451 - DNA, 25 bp, Homo sapien
taaactcggagacatcatgttattc

SEQ ID NO: 4529452 - DNA, 25 bp, Homo sapien
caaatgatatcatcacggtatggcg

SEQ ID NO: 4529453 - DNA, 25 bp, Homo sapien
tctgccaatgtgaccaaaaggactg

SEQ ID NO: 4529454 - DNA, 25 bp, Homo sapien
ggtaatatgaccctcaacctgggct

SEQ ID NO: 4529455 - DNA, 25 bp, Homo sapien
ccatggtcagtgaggcaactttctc

SEQ ID NO: 4529456 - DNA, 25 bp, Homo sapien
ccatgcacaacatactcaagaggcc

SEQ ID NO: 4529457 - DNA, 25 bp, Homo sapien
taggaaagttgtgctgaaccaaatg

SEQ ID NO: 4529458 - DNA, 25 bp, Homo sapien
tacctccatggatgggatccttgag

SEQ ID NO: 4529459 - DNA, 25 bp, Homo sapien
tacacgttgctatgagtgatgacag

SEQ ID NO: 4529460 - DNA, 25 bp, Homo sapien
tggccattggttcagtatcactaga

SEQ ID NO: 4529461 - DNA, 25 bp, Homo sapien
tatggccatatgtcagatagccttc

SEQ ID NO: 4529462 - DNA, 25 bp, Homo sapien
tataatgtgaaatggagacacacct

SEQ ID NO: 4529463 - DNA, 25 bp, Homo sapien
tatcactagagcaaagtggacaggc

SEQ ID NO: 4529464 - DNA, 25 bp, Homo sapien
tgttcttcaataggtgcatggacaa

SEQ ID NO: 4529465 - DNA, 25 bp, Homo sapien
catggaagcaactgagatgttcttc

SEQ ID NO: 4529466 - DNA, 25 bp, Homo sapien
acatggaagcaactgagatgttctt

SEQ ID NO: 4529467 - DNA, 25 bp, Homo sapien
cttcaataggtgcatggacaaatga

SEQ ID NO: 4529468 - DNA, 25 bp, Homo sapien
gataaatcgctttggcgacacccag

SEQ ID NO: 4529469 - DNA, 25 bp, Homo sapien
cactattaatgaacatgccgtcgac

SEQ ID NO: 4529470 - DNA, 25 bp, Homo sapien
gacattattggtagggattggagca

SEQ ID NO: 4529471 - DNA, 25 bp, Homo sapien
ctattataagacattgacggtaggg

SEQ ID NO: 4529472 - DNA, 25 bp, Homo sapien
aatggtggtttaatgaacaatgttc

SEQ ID NO: 4529473 - DNA, 25 bp, Homo sapien
agaaatggtggtttaatgaacaatg

SEQ ID NO: 4529474 - DNA, 25 bp, Homo sapien
taatgaacaatgttccaaaacactt

SEQ ID NO: 4529475 - DNA, 25 bp, Homo sapien
atggtggtttaatgaacaatgttcc

SEQ ID NO: 4529476 - DNA, 25 bp, Homo sapien
atataattagatgttctgtagttgt

SEQ ID NO: 4529477 - DNA, 25 bp, Homo sapien
atatataattagatgttctgtagtt

SEQ ID NO: 4529478 - DNA, 25 bp, Homo sapien
tatataattagatgttctgtagttg

SEQ ID NO: 4529479 - DNA, 25 bp, Homo sapien
tatatataattagatgttctgtagt

SEQ ID NO: 4529480 - DNA, 25 bp, Homo sapien
aagccacaggtgcaaatgcatcagc

SEQ ID NO: 4529481 - DNA, 25 bp, Homo sapien
tctaaaaagcgtagataagccacag

SEQ ID NO: 4529482 - DNA, 25 bp, Homo sapien
cagctgaatgtatgactacttctga

SEQ ID NO: 4529483 - DNA, 25 bp, Homo sapien
tgtcctccaagtgcaattctaaaaa

SEQ ID NO: 4529484 - DNA, 25 bp, Homo sapien
tctatgaaggcctcgtcttgtcagg

SEQ ID NO: 4529485 - DNA, 25 bp, Homo sapien
taaaagtgtcggtgtgtaggtacca

SEQ ID NO: 4529486 - DNA, 25 bp, Homo sapien
tccatgatgcatacaggcttaagaa

SEQ ID NO: 4529487 - DNA, 25 bp, Homo sapien
cacaggctactgatgtggcagttta

SEQ ID NO: 4529488 - DNA, 25 bp, Homo sapien
aatagagggcaatccaaagtgaaag

SEQ ID NO: 4529489 - DNA, 25 bp, Homo sapien
aagtgaaagtttcatactctccacc

SEQ ID NO: 4529490 - DNA, 25 bp, Homo sapien
ttcttcttaaatagagggcaatcca

SEQ ID NO: 4529491 - DNA, 25 bp, Homo sapien
ttaaatagagggcaatccaaagtga

SEQ ID NO: 4529492 - DNA, 25 bp, Homo sapien
gaagtggttctcttagtccctagta

SEQ ID NO: 4529493 - DNA, 25 bp, Homo sapien
gagactttaaaatctggatgtaccc

SEQ ID NO: 4529494 - DNA, 25 bp, Homo sapien
ctatctggttggcatatgtctggca

SEQ ID NO: 4529495 - DNA, 25 bp, Homo sapien
taatgacgcaacagcgatattgcct

SEQ ID NO: 4529496 - DNA, 25 bp, Homo sapien
ctagttatcgatttgtctaattttt

SEQ ID NO: 4529497 - DNA, 25 bp, Homo sapien
cagtggatattggagagccacaaat

SEQ ID NO: 4529498 - DNA, 25 bp, Homo sapien
tggatattggagagccacaaatgct

SEQ ID NO: 4529499 - DNA, 25 bp, Homo sapien
aacagtggatattggagagccacaa

SEQ ID NO: 4529500 - DNA, 25 bp, Homo sapien
agtcagagtctccaaaagggcctga

SEQ ID NO: 4529501 - DNA, 25 bp, Homo sapien
aagtcagagtctccaaaagggcctg

SEQ ID NO: 4529502 - DNA, 25 bp, Homo sapien
tattttcaacagtacagaaaaattg

SEQ ID NO: 4529503 - DNA, 25 bp, Homo sapien
ttcaacagtacagaaaaattgaaga

SEQ ID NO: 4529504 - DNA, 25 bp, Homo sapien
ttttcaacagtacagaaaaattgaa

SEQ ID NO: 4529505 - DNA, 25 bp, Homo sapien
agagattattttcaacagtacagaa

SEQ ID NO: 4529506 - DNA, 25 bp, Homo sapien
ctttgatgaccatgactttgtggat

SEQ ID NO: 4529507 - DNA, 25 bp, Homo sapien
gatgaccatgactttgtggataaga

SEQ ID NO: 4529508 - DNA, 25 bp, Homo sapien
tgatgaccatgactttgtggataag

SEQ ID NO: 4529509 - DNA, 25 bp, Homo sapien
gaaacaccatactgtgaatggccac

SEQ ID NO: 4529510 - DNA, 25 bp, Homo sapien
tccatttgatccagggttttcccaa

SEQ ID NO: 4529511 - DNA, 25 bp, Homo sapien
tcccaagatgcttatcaggatctaa

SEQ ID NO: 4529512 - DNA, 25 bp, Homo sapien
tttgatccagggttttcccaagatg

SEQ ID NO: 4529513 - DNA, 25 bp, Homo sapien
ctctatgagataaggctccatttga

SEQ ID NO: 4529514 - DNA, 25 bp, Homo sapien
gctggatcctagaagattgtggata

SEQ ID NO: 4529515 - DNA, 25 bp, Homo sapien
aatcaaaacactgattgaacagaag

SEQ ID NO: 4529516 - DNA, 25 bp, Homo sapien
taatatttacgagttagagttgcaa

SEQ ID NO: 4529517 - DNA, 25 bp, Homo sapien
tgtggatagaagaccgaaatccagt

SEQ ID NO: 4529518 - DNA, 25 bp, Homo sapien
tcttttcaataagggaggtctctct

SEQ ID NO: 4529519 - DNA, 25 bp, Homo sapien
tgagatgccaaagacaaatcagctc

SEQ ID NO: 4529520 - DNA, 25 bp, Homo sapien
ccagtcttttatctatcgggcagta

SEQ ID NO: 4529521 - DNA, 25 bp, Homo sapien
tctctaatccctacagagaggcaca

SEQ ID NO: 4529522 - DNA, 25 bp, Homo sapien
aggctggagattaagccttttacac

SEQ ID NO: 4529523 - DNA, 25 bp, Homo sapien
atgttagatgatatcatctctctga

SEQ ID NO: 4529524 - DNA, 25 bp, Homo sapien
actttgatgatcattgcttgaatgt

SEQ ID NO: 4529525 - DNA, 25 bp, Homo sapien
caaagataagctaaaggctggagat

SEQ ID NO: 4529526 - DNA, 25 bp, Homo sapien
tctcagagaggactataattgttta

SEQ ID NO: 4529527 - DNA, 25 bp, Homo sapien
gatctcaccctgtttagttcctgca

SEQ ID NO: 4529528 - DNA, 25 bp, Homo sapien
tattacactagtttcgtgcctttgc

SEQ ID NO: 4529529 - DNA, 25 bp, Homo sapien
taaaatagatcataggattcctctg

SEQ ID NO: 4529530 - DNA, 25 bp, Homo sapien
tatagcacctactgatatcccctct

SEQ ID NO: 4529531 - DNA, 25 bp, Homo sapien
tacgctgatagtcagaaagtatagc

SEQ ID NO: 4529532 - DNA, 25 bp, Homo sapien
tcagaaagtatagcacctactgata

SEQ ID NO: 4529533 - DNA, 25 bp, Homo sapien
cattttccactcgaatacgctgata

SEQ ID NO: 4529534 - DNA, 25 bp, Homo sapien
cagctgtctgacctatgtcgacaat

SEQ ID NO: 4529535 - DNA, 25 bp, Homo sapien
tgacctatgtcgacaattttaacaa

SEQ ID NO: 4529536 - DNA, 25 bp, Homo sapien
ttttaacaatagagacggcacttcc

SEQ ID NO: 4529537 - DNA, 25 bp, Homo sapien
ttcctaaagcaaagagatactcaca

SEQ ID NO: 4529538 - DNA, 25 bp, Homo sapien
ctacagacagaatttgataggccat

SEQ ID NO: 4529539 - DNA, 25 bp, Homo sapien
ttggcagcaccactacagacagaat

SEQ ID NO: 4529540 - DNA, 25 bp, Homo sapien
acaggttcacaaaacgcgttggcag

SEQ ID NO: 4529541 - DNA, 25 bp, Homo sapien
acaaaacgcgttggcagcaccacta

SEQ ID NO: 4529542 - DNA, 25 bp, Homo sapien
ttccactttgttgggaaagcctcag

SEQ ID NO: 4529543 - DNA, 25 bp, Homo sapien
aaggtttaactgattcacaggtctg

SEQ ID NO: 4529544 - DNA, 25 bp, Homo sapien
tatcactgggtgatttatgaagaaa

SEQ ID NO: 4529545 - DNA, 25 bp, Homo sapien
tcaagagaactcatgtactatcatg

SEQ ID NO: 4529546 - DNA, 25 bp, Homo sapien
gctaaaatggacacttcaacagaga

SEQ ID NO: 4529547 - DNA, 25 bp, Homo sapien
ggtgccccaagctggttcaatagtg

SEQ ID NO: 4529548 - DNA, 25 bp, Homo sapien
taattggttcaatactgggtgcccc

SEQ ID NO: 4529549 - DNA, 25 bp, Homo sapien
gcgagtgagcaagaagtgccaaact

SEQ ID NO: 4529550 - DNA, 25 bp, Homo sapien
ggataagcaaagagaagcagtgatg

SEQ ID NO: 4529551 - DNA, 25 bp, Homo sapien
aaaggataagcaaagagaagcagtg

SEQ ID NO: 4529552 - DNA, 25 bp, Homo sapien
ggaaaggataagcaaagagaagcag

SEQ ID NO: 4529553 - DNA, 25 bp, Homo sapien
gataagcaaagagaagcagtgatga

SEQ ID NO: 4529554 - DNA, 25 bp, Homo sapien
actgcaacctcctagagtagtgagt

SEQ ID NO: 4529555 - DNA, 25 bp, Homo sapien
gagttccagtagctgttactccttg

SEQ ID NO: 4529556 - DNA, 25 bp, Homo sapien
cctagagtagtgagttccagtagct

SEQ ID NO: 4529557 - DNA, 25 bp, Homo sapien
gagtagtgagttccagtagctgtta

SEQ ID NO: 4529558 - DNA, 25 bp, Homo sapien
caggcctgccagttgggaataggta

SEQ ID NO: 4529559 - DNA, 25 bp, Homo sapien
ggttcctggcagtaccattcccgta

SEQ ID NO: 4529560 - DNA, 25 bp, Homo sapien
atttaactcaggaagtaacttgcta

SEQ ID NO: 4529561 - DNA, 25 bp, Homo sapien
taacttgctaatagcgcagccaggc

SEQ ID NO: 4529562 - DNA, 25 bp, Homo sapien
cttccaggtgtcgacacagactgtg

SEQ ID NO: 4529563 - DNA, 25 bp, Homo sapien
aaaggaggtgtcatatttttctaag

SEQ ID NO: 4529564 - DNA, 25 bp, Homo sapien
aagaggtgcagcttatgatcttaaa

SEQ ID NO: 4529565 - DNA, 25 bp, Homo sapien
gcagcttatgatcttaaaggaggtg

SEQ ID NO: 4529566 - DNA, 25 bp, Homo sapien
tcctcagcaaggcacacaaggctct

SEQ ID NO: 4529567 - DNA, 25 bp, Homo sapien
aaactcctcagcaaggcacacaagg

SEQ ID NO: 4529568 - DNA, 25 bp, Homo sapien
cagcaaggcacacaaggctcttcac

SEQ ID NO: 4529569 - DNA, 25 bp, Homo sapien
agaatggggtctccaaactcctcag

SEQ ID NO: 4529570 - DNA, 25 bp, Homo sapien
tgtgctggaatctccaatttacacg

SEQ ID NO: 4529571 - DNA, 25 bp, Homo sapien
taggtcacgacctgaactcactgta

SEQ ID NO: 4529572 - DNA, 25 bp, Homo sapien
ttctacagcccacgctaggtcacga

SEQ ID NO: 4529573 - DNA, 25 bp, Homo sapien
tactcttcggcatgggacagtgtaa

SEQ ID NO: 4529574 - DNA, 25 bp, Homo sapien
aatgtaggctgactaaagaaagggc

SEQ ID NO: 4529575 - DNA, 25 bp, Homo sapien
gcactgcacatttcttaatgcttgc

SEQ ID NO: 4529576 - DNA, 25 bp, Homo sapien
aattctactgtattatggcaaaaca

SEQ ID NO: 4529577 - DNA, 25 bp, Homo sapien
aatgttcatgcagtttagagacttg

SEQ ID NO: 4529578 - DNA, 25 bp, Homo sapien
caaggcagttctagtcacaggtaca

SEQ ID NO: 4529579 - DNA, 25 bp, Homo sapien
aagtggctagtactgactctgaggc

SEQ ID NO: 4529580 - DNA, 25 bp, Homo sapien
taaactaagccgtcaactaccagca

SEQ ID NO: 4529581 - DNA, 25 bp, Homo sapien
gctgaacctctgtagaaacatggac

SEQ ID NO: 4529582 - DNA, 25 bp, Homo sapien
gagattcagagcatcatattcagca

SEQ ID NO: 4529583 - DNA, 25 bp, Homo sapien
ttgcaatctcactgataaaaggagg

SEQ ID NO: 4529584 - DNA, 25 bp, Homo sapien
tcctgtaaacaatcgcctggctgcc

SEQ ID NO: 4529585 - DNA, 25 bp, Homo sapien
tgagtgcacagttcatttggagtcc

SEQ ID NO: 4529586 - DNA, 25 bp, Homo sapien
aatttagggcctcttctcacagaac

SEQ ID NO: 4529587 - DNA, 25 bp, Homo sapien
tgatactaagctggcatcatcagca

SEQ ID NO: 4529588 - DNA, 25 bp, Homo sapien
gaatactaatcccaccaataagaga

SEQ ID NO: 4529589 - DNA, 25 bp, Homo sapien
actatggatgacagacaagttcctc

SEQ ID NO: 4529590 - DNA, 25 bp, Homo sapien
gagatacatacctctagctgtcaga

SEQ ID NO: 4529591 - DNA, 25 bp, Homo sapien
taaactctttgcaaaaaggaacatc

SEQ ID NO: 4529592 - DNA, 25 bp, Homo sapien
aaaaatctttcgcaaacagcttgag

SEQ ID NO: 4529593 - DNA, 25 bp, Homo sapien
cactgctcacgtgacttaaaaagaa

SEQ ID NO: 4529594 - DNA, 25 bp, Homo sapien
cccaattactttagtgtgagtctca

SEQ ID NO: 4529595 - DNA, 25 bp, Homo sapien
gaactatttagtcccagacaacttg

SEQ ID NO: 4529596 - DNA, 25 bp, Homo sapien
gacctccactggaatctttgcacca

SEQ ID NO: 4529597 - DNA, 25 bp, Homo sapien
cttggagggctgttattatcatgga

SEQ ID NO: 4529598 - DNA, 25 bp, Homo sapien
ggctgccaaactcttacattctgtg

SEQ ID NO: 4529599 - DNA, 25 bp, Homo sapien
taatcagtgcaaaatggctgccaaa

SEQ ID NO: 4529600 - DNA, 25 bp, Homo sapien
gaaatgcaatgtacctttgtagagg

SEQ ID NO: 4529601 - DNA, 25 bp, Homo sapien
ttgacaaccatacgtagcaccacct

SEQ ID NO: 4529602 - DNA, 25 bp, Homo sapien
aaagagattaaatggccatcagctc

SEQ ID NO: 4529603 - DNA, 25 bp, Homo sapien
aagagattaaatggccatcagctct

SEQ ID NO: 4529604 - DNA, 25 bp, Homo sapien
agagattaaatggccatcagctcta

SEQ ID NO: 4529605 - DNA, 25 bp, Homo sapien
taaaggcatactaatcatttgcagt

SEQ ID NO: 4529606 - DNA, 25 bp, Homo sapien
tggatgccaaactatacaaaacgtc

SEQ ID NO: 4529607 - DNA, 25 bp, Homo sapien
caattgcaaattacggattactaaa

SEQ ID NO: 4529608 - DNA, 25 bp, Homo sapien
gaatagttgggctactaacaattgc

SEQ ID NO: 4529609 - DNA, 25 bp, Homo sapien
aagtcaatggcatggtgccccactg

SEQ ID NO: 4529610 - DNA, 25 bp, Homo sapien
aagagccattgcttctgcatacaag

SEQ ID NO: 4529611 - DNA, 25 bp, Homo sapien
ccttcctcttatggttcggcgatag

SEQ ID NO: 4529612 - DNA, 25 bp, Homo sapien
gccccactgtctgatacatgtagct

SEQ ID NO: 4529613 - DNA, 25 bp, Homo sapien
cagctggtcttagatttgctaaagc

SEQ ID NO: 4529614 - DNA, 25 bp, Homo sapien
ttttcagctggtcttagatttgcta

SEQ ID NO: 4529615 - DNA, 25 bp, Homo sapien
aaagcaacgatctgatgcccagcag

SEQ ID NO: 4529616 - DNA, 25 bp, Homo sapien
tagatttgctaaagcaacgatctga

SEQ ID NO: 4529617 - DNA, 25 bp, Homo sapien
attatagcagctgtccttcccacca

SEQ ID NO: 4529618 - DNA, 25 bp, Homo sapien
caagtttaagggctagaagaccaga

SEQ ID NO: 4529619 - DNA, 25 bp, Homo sapien
ggcaacagcgaaggctccgcctctt

SEQ ID NO: 4529620 - DNA, 25 bp, Homo sapien
ggagacacccactctttcggcgcta

SEQ ID NO: 4529621 - DNA, 25 bp, Homo sapien
aacgcgcgactcagacggagacacc

SEQ ID NO: 4529622 - DNA, 25 bp, Homo sapien
cgggcgggagccaggaggtcgcgcc

SEQ ID NO: 4529623 - DNA, 25 bp, Homo sapien
cgcgggcgggagccaggaggtcgcg

SEQ ID NO: 4529624 - DNA, 25 bp, Homo sapien
tgggcgcagtgcgcgtgcgtgcggc

SEQ ID NO: 4529625 - DNA, 25 bp, Homo sapien
gccgcagctcgcgtgacgcaccgcg

SEQ ID NO: 4529626 - DNA, 25 bp, Homo sapien
tgatggatagcacaactgaggcatc

SEQ ID NO: 4529627 - DNA, 25 bp, Homo sapien
tggtgatggatagcacaactgaggc

SEQ ID NO: 4529628 - DNA, 25 bp, Homo sapien
taaaagtggtgatggatagcacaac

SEQ ID NO: 4529629 - DNA, 25 bp, Homo sapien
ggataaaagtggtgatggatagcac

SEQ ID NO: 4529630 - DNA, 25 bp, Homo sapien
agcttgtcgcttcttagaatacttc

SEQ ID NO: 4529631 - DNA, 25 bp, Homo sapien
gatggttacatcttttgcaagcttg

SEQ ID NO: 4529632 - DNA, 25 bp, Homo sapien
agatggttacatcttttgcaagctt

SEQ ID NO: 4529633 - DNA, 25 bp, Homo sapien
cttttgcaagcttgtcgcttcttag

SEQ ID NO: 4529634 - DNA, 25 bp, Homo sapien
cctggtaatgccctctccataatct

SEQ ID NO: 4529635 - DNA, 25 bp, Homo sapien
gggcctggtaatgccctctccataa

SEQ ID NO: 4529636 - DNA, 25 bp, Homo sapien
tgctttcttggagggcctggtaatg

SEQ ID NO: 4529637 - DNA, 25 bp, Homo sapien
gctttcttggagggcctggtaatgc

SEQ ID NO: 4529638 - DNA, 25 bp, Homo sapien
ctttgctgaacttgtggcacttaga

SEQ ID NO: 4529639 - DNA, 25 bp, Homo sapien
catgtcgtcttggacacttttctcc

SEQ ID NO: 4529640 - DNA, 25 bp, Homo sapien
tgctgaacttgtggcacttagacat

SEQ ID NO: 4529641 - DNA, 25 bp, Homo sapien
cttgaattccatgtcgtcttggaca

SEQ ID NO: 4529642 - DNA, 25 bp, Homo sapien
gatgttaaactttggtgtccgatat

SEQ ID NO: 4529643 - DNA, 25 bp, Homo sapien
ccccgtggactgttcttggcctctg

SEQ ID NO: 4529644 - DNA, 25 bp, Homo sapien
gataccagcttgttctaaggctcca

SEQ ID NO: 4529645 - DNA, 25 bp, Homo sapien
aaggctccaagccattccccgtgga

SEQ ID NO: 4529646 - DNA, 25 bp, Homo sapien
aattatgaattcaccgccgaagtct

SEQ ID NO: 4529647 - DNA, 25 bp, Homo sapien
tgcaattatgaattcaccgccgaag

SEQ ID NO: 4529648 - DNA, 25 bp, Homo sapien
gaattcaccgccgaagtctgtattc

SEQ ID NO: 4529649 - DNA, 25 bp, Homo sapien
attcaccgccgaagtctgtattcat

SEQ ID NO: 4529650 - DNA, 25 bp, Homo sapien
gccaggtagtcacagatgccgtctg

SEQ ID NO: 4529651 - DNA, 25 bp, Homo sapien
acagatgccgtctgtctgctcgagt

SEQ ID NO: 4529652 - DNA, 25 bp, Homo sapien
tctgtctgctcgagtttcattcttt

SEQ ID NO: 4529653 - DNA, 25 bp, Homo sapien
aggccaggtagtcacagatgccgtc

SEQ ID NO: 4529654 - DNA, 25 bp, Homo sapien
agagttgatactgggtgcctttctc

SEQ ID NO: 4529655 - DNA, 25 bp, Homo sapien
cttttagctttctttttacagtcat

SEQ ID NO: 4529656 - DNA, 25 bp, Homo sapien
cttcagagttgatactgggtgcctt

SEQ ID NO: 4529657 - DNA, 25 bp, Homo sapien
tcagagttgatactgggtgcctttc

SEQ ID NO: 4529658 - DNA, 25 bp, Homo sapien
gcatcctcccatgttatggaccttt

SEQ ID NO: 4529659 - DNA, 25 bp, Homo sapien
tggttccctgaagacccatccagga

SEQ ID NO: 4529660 - DNA, 25 bp, Homo sapien
ggctctaccaatcactactatcgac

SEQ ID NO: 4529661 - DNA, 25 bp, Homo sapien
aacagagacttcgagggcttcttga

SEQ ID NO: 4529662 - DNA, 25 bp, Homo sapien
tggggccgtgagaaatccaccagca

SEQ ID NO: 4529663 - DNA, 25 bp, Homo sapien
gataactaaagatgtttagcctggg

SEQ ID NO: 4529664 - DNA, 25 bp, Homo sapien
caggcccagttttggttcttagcca

SEQ ID NO: 4529665 - DNA, 25 bp, Homo sapien
tattgattgtcagataactaaagat

SEQ ID NO: 4529666 - DNA, 25 bp, Homo sapien
tcctcttcatcttgattaaggatgg

SEQ ID NO: 4529667 - DNA, 25 bp, Homo sapien
ttattttgtagtaggtggcgctgga

SEQ ID NO: 4529668 - DNA, 25 bp, Homo sapien
tcatcttgattaaggatggtagatt

SEQ ID NO: 4529669 - DNA, 25 bp, Homo sapien
ggcgctggaggcttcttatcttccc

SEQ ID NO: 4529670 - DNA, 25 bp, Homo sapien
cttctgtcaccagaatggtaaattt

SEQ ID NO: 4529671 - DNA, 25 bp, Homo sapien
tcacaacccaagagccagaatcatt

SEQ ID NO: 4529672 - DNA, 25 bp, Homo sapien
aaaacgaagtagtcattttgatgtt

SEQ ID NO: 4529673 - DNA, 25 bp, Homo sapien
tcattagaggaaaaacgaagtagtc

SEQ ID NO: 4529674 - DNA, 25 bp, Homo sapien
tgctcaggtatgcattccagacttc

SEQ ID NO: 4529675 - DNA, 25 bp, Homo sapien
ctctgctcaggtatgcattccagac

SEQ ID NO: 4529676 - DNA, 25 bp, Homo sapien
aatgctctgctcaggtatgcattcc

SEQ ID NO: 4529677 - DNA, 25 bp, Homo sapien
gctcaggtatgcattccagacttcc

SEQ ID NO: 4529678 - DNA, 25 bp, Homo sapien
caggccatggcttaggtacttgtcc

SEQ ID NO: 4529679 - DNA, 25 bp, Homo sapien
ggtcactgatattctcaggccatgg

SEQ ID NO: 4529680 - DNA, 25 bp, Homo sapien
gagtgccaagatatgccccagtgga

SEQ ID NO: 4529681 - DNA, 25 bp, Homo sapien
gaagggtcaccaaactctcaactat

SEQ ID NO: 4529682 - DNA, 25 bp, Homo sapien
aaatcccattttagattctgcccca

SEQ ID NO: 4529683 - DNA, 25 bp, Homo sapien
caaaatcccattttagattctgccc

SEQ ID NO: 4529684 - DNA, 25 bp, Homo sapien
acttaaagtttaatgggtcgctcag

SEQ ID NO: 4529685 - DNA, 25 bp, Homo sapien
cagtgggtcccaagagtcaaaatcc

SEQ ID NO: 4529686 - DNA, 25 bp, Homo sapien
tggcttttgcagacccgacattctt

SEQ ID NO: 4529687 - DNA, 25 bp, Homo sapien
tcttgggtgctgtggatcacttggc

SEQ ID NO: 4529688 - DNA, 25 bp, Homo sapien
gatagcagcacaggacttgtttggg

SEQ ID NO: 4529689 - DNA, 25 bp, Homo sapien
tagcctcatgggtgaggaaagcctg

SEQ ID NO: 4529690 - DNA, 25 bp, Homo sapien
agcagtttagcattctggaaggttt

SEQ ID NO: 4529691 - DNA, 25 bp, Homo sapien
taagcagtttagcattctggaaggt

SEQ ID NO: 4529692 - DNA, 25 bp, Homo sapien
aataagcagtttagcattctggaag

SEQ ID NO: 4529693 - DNA, 25 bp, Homo sapien
ctaataagcagtttagcattctgga

SEQ ID NO: 4529694 - DNA, 25 bp, Homo sapien
tatagaggacaatataacttaatga

SEQ ID NO: 4529695 - DNA, 25 bp, Homo sapien
caaagtcaaattgctctaagccctt

SEQ ID NO: 4529696 - DNA, 25 bp, Homo sapien
cctggtagtgcaccagtcctcataa

SEQ ID NO: 4529697 - DNA, 25 bp, Homo sapien
cagtcctcataatcacaaagtcaaa

SEQ ID NO: 4529698 - DNA, 25 bp, Homo sapien
actgatgatcttggccctccttaac

SEQ ID NO: 4529699 - DNA, 25 bp, Homo sapien
gactgatgatcttggccctccttaa

SEQ ID NO: 4529700 - DNA, 25 bp, Homo sapien
ataactctgatctctcctggcctac

SEQ ID NO: 4529701 - DNA, 25 bp, Homo sapien
tcataactctgatctctcctggcct

SEQ ID NO: 4529702 - DNA, 25 bp, Homo sapien
cataactctgatctctcctggccta

SEQ ID NO: 4529703 - DNA, 25 bp, Homo sapien
tcttctaattctgcacctaaaatct

SEQ ID NO: 4529704 - DNA, 25 bp, Homo sapien
caattactacttgcatgctgataat

SEQ ID NO: 4529705 - DNA, 25 bp, Homo sapien
tctccccaagtcacatcatctattg

SEQ ID NO: 4529706 - DNA, 25 bp, Homo sapien
cccaagtcacatcatctattgccaa

SEQ ID NO: 4529707 - DNA, 25 bp, Homo sapien
caagccttcccggagaccagataaa

SEQ ID NO: 4529708 - DNA, 25 bp, Homo sapien
tgctgttccctatcaccttcccatt

SEQ ID NO: 4529709 - DNA, 25 bp, Homo sapien
ctctcttgtcattccataaaatatc

SEQ ID NO: 4529710 - DNA, 25 bp, Homo sapien
cctgtgcacacctacttcttggaca

SEQ ID NO: 4529711 - DNA, 25 bp, Homo sapien
gatgtgaactttcagctaactgtgc

SEQ ID NO: 4529712 - DNA, 25 bp, Homo sapien
cattggatgtgaactttcagctaac

SEQ ID NO: 4529713 - DNA, 25 bp, Homo sapien
gccagcattggatgtgaactttcag

SEQ ID NO: 4529714 - DNA, 25 bp, Homo sapien
ccagcattggatgtgaactttcagc

SEQ ID NO: 4529715 - DNA, 25 bp, Homo sapien
tatcgagtgcagttttctctggcct

SEQ ID NO: 4529716 - DNA, 25 bp, Homo sapien
tatatcgagtgcagttttctctggc

SEQ ID NO: 4529717 - DNA, 25 bp, Homo sapien
gtcaaactactatatcgagtgcagt

SEQ ID NO: 4529718 - DNA, 25 bp, Homo sapien
ctactatatcgagtgcagttttctc

SEQ ID NO: 4529719 - DNA, 25 bp, Homo sapien
aatgctgcaatgctcacagtttgtg

SEQ ID NO: 4529720 - DNA, 25 bp, Homo sapien
ccttcattccttaaagctaatgctg

SEQ ID NO: 4529721 - DNA, 25 bp, Homo sapien
tcacagtttgtgaatcatcttggaa

SEQ ID NO: 4529722 - DNA, 25 bp, Homo sapien
tttgtgaatcatcttggaataccat

SEQ ID NO: 4529723 - DNA, 25 bp, Homo sapien
aatctggtcactgcctcaagataga

SEQ ID NO: 4529724 - DNA, 25 bp, Homo sapien
tggaaatggatctcttcattgttgt

SEQ ID NO: 4529725 - DNA, 25 bp, Homo sapien
taaagaggcccacaagttctgggaa

SEQ ID NO: 4529726 - DNA, 25 bp, Homo sapien
tgtgacgaatgtaggcaccagcttc

SEQ ID NO: 4529727 - DNA, 25 bp, Homo sapien
ctgcagagagggcaaatacgttaca

SEQ ID NO: 4529728 - DNA, 25 bp, Homo sapien
tggggatttggctcactactgcaga

SEQ ID NO: 4529729 - DNA, 25 bp, Homo sapien
gctgacagtctcttacagatgggat

SEQ ID NO: 4529730 - DNA, 25 bp, Homo sapien
cagatgggatattaagttccatggg

SEQ ID NO: 4529731 - DNA, 25 bp, Homo sapien
aaggtaatatatcagacttgctttg

SEQ ID NO: 4529732 - DNA, 25 bp, Homo sapien
tctgtgtttctgttagctataaaat

SEQ ID NO: 4529733 - DNA, 25 bp, Homo sapien
aactttaccagggatatgctgtgta

SEQ ID NO: 4529734 - DNA, 25 bp, Homo sapien
taccagggatatgctgtgtatttgg

SEQ ID NO: 4529735 - DNA, 25 bp, Homo sapien
tgtcaacactaagtagacaggtgct

SEQ ID NO: 4529736 - DNA, 25 bp, Homo sapien
ttctgtcaacactaagtagacaggt

SEQ ID NO: 4529737 - DNA, 25 bp, Homo sapien
tctgtcaacactaagtagacaggtg

SEQ ID NO: 4529738 - DNA, 25 bp, Homo sapien
ctgtcaacactaagtagacaggtgc

SEQ ID NO: 4529739 - DNA, 25 bp, Homo sapien
ttgaacagcattctaatatgtctct

SEQ ID NO: 4529740 - DNA, 25 bp, Homo sapien
aacagcattctaatatgtctctgaa

SEQ ID NO: 4529741 - DNA, 25 bp, Homo sapien
cagcattctaatatgtctctgaata

SEQ ID NO: 4529742 - DNA, 25 bp, Homo sapien
gaacagcattctaatatgtctctga

SEQ ID NO: 4529743 - DNA, 25 bp, Homo sapien
ccatgaatgtcacagctgtcaaaaa

SEQ ID NO: 4529744 - DNA, 25 bp, Homo sapien
tcaaatgcattgcccatgaatgtca

SEQ ID NO: 4529745 - DNA, 25 bp, Homo sapien
caaatgcattgcccatgaatgtcac

SEQ ID NO: 4529746 - DNA, 25 bp, Homo sapien
tttagctgtgcagagttagtgccaa

SEQ ID NO: 4529747 - DNA, 25 bp, Homo sapien
cttaaatcttttggcttctgtagcc

SEQ ID NO: 4529748 - DNA, 25 bp, Homo sapien
aactcaagtttgtgaggtgagaggc

SEQ ID NO: 4529749 - DNA, 25 bp, Homo sapien
tgcagagttagtgccaaaacaagcc

SEQ ID NO: 4529750 - DNA, 25 bp, Homo sapien
agcactcctcatgggtttactcaga

SEQ ID NO: 4529751 - DNA, 25 bp, Homo sapien
ttcagcattgggcttgacaaaccag

SEQ ID NO: 4529752 - DNA, 25 bp, Homo sapien
ggtcctgaggactgcgatgtacatc

SEQ ID NO: 4529753 - DNA, 25 bp, Homo sapien
gaggactgcgatgtacatccagcag

SEQ ID NO: 4529754 - DNA, 25 bp, Homo sapien
ctgacaccagaatagatgctgctgg

SEQ ID NO: 4529755 - DNA, 25 bp, Homo sapien
actgacaccagaatagatgctgctg

SEQ ID NO: 4529756 - DNA, 25 bp, Homo sapien
ggtggccaatcgcaagggtggcctg

SEQ ID NO: 4529757 - DNA, 25 bp, Homo sapien
caatcgcaagggtggcctgaagctg

SEQ ID NO: 4529758 - DNA, 25 bp, Homo sapien
tggccaatcgcaagggtggcctgaa

SEQ ID NO: 4529759 - DNA, 25 bp, Homo sapien
cgccatggtggccaatcgcaagggt

SEQ ID NO: 4529760 - DNA, 25 bp, Homo sapien
cctttccggaagatctgtagtggta

SEQ ID NO: 4529761 - DNA, 25 bp, Homo sapien
taatgtgccaagctatatgatactg

SEQ ID NO: 4529762 - DNA, 25 bp, Homo sapien
ttttcacagaatgctgccagccact

SEQ ID NO: 4529763 - DNA, 25 bp, Homo sapien
taaagtatggaaacccagatatacc

SEQ ID NO: 4529764 - DNA, 25 bp, Homo sapien
tctgttctttacatcaggaacttta

SEQ ID NO: 4529765 - DNA, 25 bp, Homo sapien
tggtctgacttaatccatctaatag

SEQ ID NO: 4529766 - DNA, 25 bp, Homo sapien
tctttacatcaggaactttatcgcc

SEQ ID NO: 4529767 - DNA, 25 bp, Homo sapien
catctaataggaaaaacatctggtc

SEQ ID NO: 4529768 - DNA, 25 bp, Homo sapien
gacttgcccttgttggttctgtctg

SEQ ID NO: 4529769 - DNA, 25 bp, Homo sapien
gctgcccatgttctttgcctcttat

SEQ ID NO: 4529770 - DNA, 25 bp, Homo sapien
gcatctcttgaaaatgctgcccatg

SEQ ID NO: 4529771 - DNA, 25 bp, Homo sapien
catttttttatgtcggaaatattga

SEQ ID NO: 4529772 - DNA, 25 bp, Homo sapien
gagcagatgtactgcatctctggag

SEQ ID NO: 4529773 - DNA, 25 bp, Homo sapien
gagtttgaaacttgttattttcaca

SEQ ID NO: 4529774 - DNA, 25 bp, Homo sapien
tggtactgtacatatgtctccagag

SEQ ID NO: 4529775 - DNA, 25 bp, Homo sapien
tattttcacattggtactgtacata

SEQ ID NO: 4529776 - DNA, 25 bp, Homo sapien
tagctgcttgccattaaaattgatc

SEQ ID NO: 4529777 - DNA, 25 bp, Homo sapien
tgtactatccttccgattgacgtca

SEQ ID NO: 4529778 - DNA, 25 bp, Homo sapien
gccgccagatcaataagcgtgctta

SEQ ID NO: 4529779 - DNA, 25 bp, Homo sapien
tttgtagagtagcaagccgccagat

SEQ ID NO: 4529780 - DNA, 25 bp, Homo sapien
ttacagacaaaatacggccagggta

SEQ ID NO: 4529781 - DNA, 25 bp, Homo sapien
tacagacaaaatacggccagggtaa

SEQ ID NO: 4529782 - DNA, 25 bp, Homo sapien
aataagctgcaagtgtgggatgtgt

SEQ ID NO: 4529783 - DNA, 25 bp, Homo sapien
ctgttgaactaacatcgcctaacat

SEQ ID NO: 4529784 - DNA, 25 bp, Homo sapien
tgtgtaactgttgaactaacatcgc

SEQ ID NO: 4529785 - DNA, 25 bp, Homo sapien
caagtgtgggatgtgtaactgttga

SEQ ID NO: 4529786 - DNA, 25 bp, Homo sapien
ggccattaaccccagctggtcatca

SEQ ID NO: 4529787 - DNA, 25 bp, Homo sapien
ctgggccctgtgttatagtcattat

SEQ ID NO: 4529788 - DNA, 25 bp, Homo sapien
taagtaataacgatcaaggtatggg

SEQ ID NO: 4529789 - DNA, 25 bp, Homo sapien
cacagtgcagccaagggccattaac

SEQ ID NO: 4529790 - DNA, 25 bp, Homo sapien
tggaacaattatccaagaatatttc

SEQ ID NO: 4529791 - DNA, 25 bp, Homo sapien
gtcagtgagatctatggcagcttgc

SEQ ID NO: 4529792 - DNA, 25 bp, Homo sapien
tataacccttgagttgctgccaaag

SEQ ID NO: 4529793 - DNA, 25 bp, Homo sapien
tgccaaagtcagtgagatctatggc

SEQ ID NO: 4529794 - DNA, 25 bp, Homo sapien
cagcagggcgctaacgtttcttttg

SEQ ID NO: 4529795 - DNA, 25 bp, Homo sapien
gaagcagattgactccattttgatc

SEQ ID NO: 4529796 - DNA, 25 bp, Homo sapien
tgttcccgtcagcagggcgctaacg

SEQ ID NO: 4529797 - DNA, 25 bp, Homo sapien
gcttggcaagtgcagtgtgatgtcc

SEQ ID NO: 4529798 - DNA, 25 bp, Homo sapien
ttcagaggcgactgcctggaactgg

SEQ ID NO: 4529799 - DNA, 25 bp, Homo sapien
gcagccaaacggaatttattagcgg

SEQ ID NO: 4529800 - DNA, 25 bp, Homo sapien
acttcagaggcgactgcctggaact

SEQ ID NO: 4529801 - DNA, 25 bp, Homo sapien
agcgggatctatagaatgtgtttga

SEQ ID NO: 4529802 - DNA, 25 bp, Homo sapien
gtgctgactgtggagcttgcccctg

SEQ ID NO: 4529803 - DNA, 25 bp, Homo sapien
gattccagctgtaccactagatgtg

SEQ ID NO: 4529804 - DNA, 25 bp, Homo sapien
aactggatgccaccttccaacgacg

SEQ ID NO: 4529805 - DNA, 25 bp, Homo sapien
caacgacgatactctcatactgctg

SEQ ID NO: 4529806 - DNA, 25 bp, Homo sapien
gtggccacctcccttggtctcactc

SEQ ID NO: 4529807 - DNA, 25 bp, Homo sapien
agagaagcagcaggctcgtaaggca

SEQ ID NO: 4529808 - DNA, 25 bp, Homo sapien
ctggctccctcagatgagtaaggca

SEQ ID NO: 4529809 - DNA, 25 bp, Homo sapien
aggctcgtaaggcagcaaaatgaga

SEQ ID NO: 4529810 - DNA, 25 bp, Homo sapien
catgaagtggcgctgaaagatcacg

SEQ ID NO: 4529811 - DNA, 25 bp, Homo sapien
gaaagatcacgatagcacagttcca

SEQ ID NO: 4529812 - DNA, 25 bp, Homo sapien
ataccacaagtctgcaatttttcgg

SEQ ID NO: 4529813 - DNA, 25 bp, Homo sapien
ttttcggtcttgagagtgtcgctgg

SEQ ID NO: 4529814 - DNA, 25 bp, Homo sapien
aaatacaaatccgatccactctttc

SEQ ID NO: 4529815 - DNA, 25 bp, Homo sapien
tctttcagtaattataccagtttgt

SEQ ID NO: 4529816 - DNA, 25 bp, Homo sapien
tattcgtctcacatttgggaccaaa

SEQ ID NO: 4529817 - DNA, 25 bp, Homo sapien
gggaccaaatacaaatccgatccac

SEQ ID NO: 4529818 - DNA, 25 bp, Homo sapien
tgcaagatggttgaaagtcctgggt

SEQ ID NO: 4529819 - DNA, 25 bp, Homo sapien
ttttgactgtcattggaatttgcaa

SEQ ID NO: 4529820 - DNA, 25 bp, Homo sapien
aaggaaagggtgatttccccatgag

SEQ ID NO: 4529821 - DNA, 25 bp, Homo sapien
ggattatcccaaggaaatggagaga

SEQ ID NO: 4529822 - DNA, 25 bp, Homo sapien
caaagcagcagtggttagggtacct

SEQ ID NO: 4529823 - DNA, 25 bp, Homo sapien
ttttccaaggccacctagctggagg

SEQ ID NO: 4529824 - DNA, 25 bp, Homo sapien
tgggctacagctaccaaggtaccaa

SEQ ID NO: 4529825 - DNA, 25 bp, Homo sapien
tgctgaagaagatagacacaagcct

SEQ ID NO: 4529826 - DNA, 25 bp, Homo sapien
cagtggtggtaatcacagaccagaa

SEQ ID NO: 4529827 - DNA, 25 bp, Homo sapien
cagggaccacatgggcttgaagata

SEQ ID NO: 4529828 - DNA, 25 bp, Homo sapien
ctgctttgcatgaaatcacagaata

SEQ ID NO: 4529829 - DNA, 25 bp, Homo sapien
gcatgaaatcacagaatactgatgt

SEQ ID NO: 4529830 - DNA, 25 bp, Homo sapien
gctttgcatgaaatcacagaatact

SEQ ID NO: 4529831 - DNA, 25 bp, Homo sapien
gaaatcacagaatactgatgtcatc

SEQ ID NO: 4529832 - DNA, 25 bp, Homo sapien
cagtctgtaagattggcgttctgtc

SEQ ID NO: 4529833 - DNA, 25 bp, Homo sapien
tgtcctggctgtcttcggccaaagg

SEQ ID NO: 4529834 - DNA, 25 bp, Homo sapien
gtcgtttggagttctcctccaacat

SEQ ID NO: 4529835 - DNA, 25 bp, Homo sapien
tgtaagattggcgttctgtcctggc

SEQ ID NO: 4529836 - DNA, 25 bp, Homo sapien
tgaggctccaaacaattactgttcc

SEQ ID NO: 4529837 - DNA, 25 bp, Homo sapien
cctgatgtgtgtatttccaaccatg

SEQ ID NO: 4529838 - DNA, 25 bp, Homo sapien
aggctccaaacaattactgttcctg

SEQ ID NO: 4529839 - DNA, 25 bp, Homo sapien
atttttcctgatgtgtgtatttcca

SEQ ID NO: 4529840 - DNA, 25 bp, Homo sapien
cattttgtgctaaatcagatgccat

SEQ ID NO: 4529841 - DNA, 25 bp, Homo sapien
cgaacatcataaattgttgacatat

SEQ ID NO: 4529842 - DNA, 25 bp, Homo sapien
ttatgtaatgtaccattttgtgcta

SEQ ID NO: 4529843 - DNA, 25 bp, Homo sapien
aagcttaaaattatgtaatgtacca

SEQ ID NO: 4529844 - DNA, 25 bp, Homo sapien
cagtttgaattaccaggggatgaga

SEQ ID NO: 4529845 - DNA, 25 bp, Homo sapien
ctcagtttgaattaccaggggatga

SEQ ID NO: 4529846 - DNA, 25 bp, Homo sapien
cctcagtttgaattaccaggggatg

SEQ ID NO: 4529847 - DNA, 25 bp, Homo sapien
tcctcagtttgaattaccaggggat

SEQ ID NO: 4529848 - DNA, 25 bp, Homo sapien
tgatatccatgcacagctggagggt

SEQ ID NO: 4529849 - DNA, 25 bp, Homo sapien
gactgaagttggcattggatctgaa

SEQ ID NO: 4529850 - DNA, 25 bp, Homo sapien
gagggcactggccaattgcctggtc

SEQ ID NO: 4529851 - DNA, 25 bp, Homo sapien
tctcttggcaatgcttgccagccaa

SEQ ID NO: 4529852 - DNA, 25 bp, Homo sapien
tcagatgattcccagagcttggcag

SEQ ID NO: 4529853 - DNA, 25 bp, Homo sapien
acagagaactctacctgacacagag

SEQ ID NO: 4529854 - DNA, 25 bp, Homo sapien
tctccatgaactaaagagctgcctt

SEQ ID NO: 4529855 - DNA, 25 bp, Homo sapien
gggtttccagactgtgctcagccaa

SEQ ID NO: 4529856 - DNA, 25 bp, Homo sapien
ttttctgtcctttgatcaatgggga

SEQ ID NO: 4529857 - DNA, 25 bp, Homo sapien
ttctgtcctttgatcaatggggaaa

SEQ ID NO: 4529858 - DNA, 25 bp, Homo sapien
tcaattgaaaatgagtctggagaca

SEQ ID NO: 4529859 - DNA, 25 bp, Homo sapien
tctgtcctttgatcaatggggaaat

SEQ ID NO: 4529860 - DNA, 25 bp, Homo sapien
tagagcagtgttacatacaccattg

SEQ ID NO: 4529861 - DNA, 25 bp, Homo sapien
tgctcatctcgcctttcttgctgct

SEQ ID NO: 4529862 - DNA, 25 bp, Homo sapien
caggagttgcaatgggacatctgtc

SEQ ID NO: 4529863 - DNA, 25 bp, Homo sapien
cattgtgctcatctcgcctttcttg

SEQ ID NO: 4529864 - DNA, 25 bp, Homo sapien
gattttactccaattttggagagga

SEQ ID NO: 4529865 - DNA, 25 bp, Homo sapien
cagagattttactccaattttggag

SEQ ID NO: 4529866 - DNA, 25 bp, Homo sapien
tggagaggaacttgatattctctgg

SEQ ID NO: 4529867 - DNA, 25 bp, Homo sapien
tctctggcaggaatacactcagctt

SEQ ID NO: 4529868 - DNA, 25 bp, Homo sapien
tctgtccatcacgaaactcagttgt

SEQ ID NO: 4529869 - DNA, 25 bp, Homo sapien
aggatttcagatggccccatgagga

SEQ ID NO: 4529870 - DNA, 25 bp, Homo sapien
catgaggaatgtcctacagtgaatt

SEQ ID NO: 4529871 - DNA, 25 bp, Homo sapien
tagtgtggatcgaagaacaaatgct

SEQ ID NO: 4529872 - DNA, 25 bp, Homo sapien
cagtacagtgttttgttggcgctgc

SEQ ID NO: 4529873 - DNA, 25 bp, Homo sapien
gaccagggccgagatgttttaataa

SEQ ID NO: 4529874 - DNA, 25 bp, Homo sapien
tggcgctgcttaatttccctgtaga

SEQ ID NO: 4529875 - DNA, 25 bp, Homo sapien
catatgctgaaacctgaccagggcc

SEQ ID NO: 4529876 - DNA, 25 bp, Homo sapien
tatagggtgagcacatgtagagcac

SEQ ID NO: 4529877 - DNA, 25 bp, Homo sapien
gaaatcagtgaactgctgtttctgt

SEQ ID NO: 4529878 - DNA, 25 bp, Homo sapien
ggtggatgacataggtcttcggcct

SEQ ID NO: 4529879 - DNA, 25 bp, Homo sapien
tcttcggcctttgtggaaatcagtg

SEQ ID NO: 4529880 - DNA, 25 bp, Homo sapien
agtcgcagtacttggttgaccccct

SEQ ID NO: 4529881 - DNA, 25 bp, Homo sapien
tgtgaaagtcgcagtacttggttga

SEQ ID NO: 4529882 - DNA, 25 bp, Homo sapien
gaaagtcgcagtacttggttgaccc

SEQ ID NO: 4529883 - DNA, 25 bp, Homo sapien
tgacccccttttcaggccctattga

SEQ ID NO: 4529884 - DNA, 25 bp, Homo sapien
tcttcacccttttctgaatgacaac

SEQ ID NO: 4529885 - DNA, 25 bp, Homo sapien
tcatagaaggtcatgtcctagttcc

SEQ ID NO: 4529886 - DNA, 25 bp, Homo sapien
gttccagcgccccactgtccttttc

SEQ ID NO: 4529887 - DNA, 25 bp, Homo sapien
tgtcctagttccagcgccccactgt

SEQ ID NO: 4529888 - DNA, 25 bp, Homo sapien
acttctatcagagtccagattggat

SEQ ID NO: 4529889 - DNA, 25 bp, Homo sapien
cctcagttccctcaaagacttctat

SEQ ID NO: 4529890 - DNA, 25 bp, Homo sapien
tctatcagagtccagattggattta

SEQ ID NO: 4529891 - DNA, 25 bp, Homo sapien
tcagagtccagattggatttatctt

SEQ ID NO: 4529892 - DNA, 25 bp, Homo sapien
taattgcaatgaggtgacaacatac

SEQ ID NO: 4529893 - DNA, 25 bp, Homo sapien
caacatactgggtaatgagttgttt

SEQ ID NO: 4529894 - DNA, 25 bp, Homo sapien
tggataaagtgttcttccaaagttg

SEQ ID NO: 4529895 - DNA, 25 bp, Homo sapien
tagatgtgtttacaatgagttgaca

SEQ ID NO: 4529896 - DNA, 25 bp, Homo sapien
tggaatgaccagatacagaagtcgt

SEQ ID NO: 4529897 - DNA, 25 bp, Homo sapien
gggaacctcgcaaatggtgtttatc

SEQ ID NO: 4529898 - DNA, 25 bp, Homo sapien
gagtacggacatgtaagagtggaca

SEQ ID NO: 4529899 - DNA, 25 bp, Homo sapien
gtggtaggcactggccagatagatc

SEQ ID NO: 4529900 - DNA, 25 bp, Homo sapien
cctccataacatatccaaaacaaac

SEQ ID NO: 4529901 - DNA, 25 bp, Homo sapien
taatttgtagaaacacctccataac

SEQ ID NO: 4529902 - DNA, 25 bp, Homo sapien
aacctggataactgccaattaccca

SEQ ID NO: 4529903 - DNA, 25 bp, Homo sapien
aaacaaacctggataactgccaatt

SEQ ID NO: 4529904 - DNA, 25 bp, Homo sapien
ttatcttggcatacagctcagtaga

SEQ ID NO: 4529905 - DNA, 25 bp, Homo sapien
tatactgtccagaagttatcttggc

SEQ ID NO: 4529906 - DNA, 25 bp, Homo sapien
tactgtccagaagttatcttggcat

SEQ ID NO: 4529907 - DNA, 25 bp, Homo sapien
atcttggcatacagctcagtagaaa

SEQ ID NO: 4529908 - DNA, 25 bp, Homo sapien
tcccttgaagtatgcttccaaaatc

SEQ ID NO: 4529909 - DNA, 25 bp, Homo sapien
cccttgaagtatgcttccaaaatct

SEQ ID NO: 4529910 - DNA, 25 bp, Homo sapien
tttcccttgaagtatgcttccaaaa

SEQ ID NO: 4529911 - DNA, 25 bp, Homo sapien
ctttcccttgaagtatgcttccaaa

SEQ ID NO: 4529912 - DNA, 25 bp, Homo sapien
ttttgttggcctgttgtgaataaca

SEQ ID NO: 4529913 - DNA, 25 bp, Homo sapien
tgttgtgaataacaccttgtccagc

SEQ ID NO: 4529914 - DNA, 25 bp, Homo sapien
ggccctgagcttgtgctgctgattt

SEQ ID NO: 4529915 - DNA, 25 bp, Homo sapien
tccttcagtgccagctttggccctg

SEQ ID NO: 4529916 - DNA, 25 bp, Homo sapien
gctttggccctgagcttgtgctgct

SEQ ID NO: 4529917 - DNA, 25 bp, Homo sapien
ccagctttggccctgagcttgtgct

SEQ ID NO: 4529918 - DNA, 25 bp, Homo sapien
tcaaaccgggaatggacaagctgcc

SEQ ID NO: 4529919 - DNA, 25 bp, Homo sapien
gctgtcctgcagtgactgaatgaaa

SEQ ID NO: 4529920 - DNA, 25 bp, Homo sapien
gctgcccttgcttcaaactctctag

SEQ ID NO: 4529921 - DNA, 25 bp, Homo sapien
cactggaatgagattacgggcccta

SEQ ID NO: 4529922 - DNA, 25 bp, Homo sapien
gtctcctactggtactttatactca

SEQ ID NO: 4529923 - DNA, 25 bp, Homo sapien
aggcctcgatgctcccaggggaatt

SEQ ID NO: 4529924 - DNA, 25 bp, Homo sapien
tggtactttatactcattggcttta

SEQ ID NO: 4529925 - DNA, 25 bp, Homo sapien
aatgctcatttacaaaccgtttctc

SEQ ID NO: 4529926 - DNA, 25 bp, Homo sapien
tcagtgatgtaattgtgaaagcatt

SEQ ID NO: 4529927 - DNA, 25 bp, Homo sapien
tttcagtgatgtaattgtgaaagca

SEQ ID NO: 4529928 - DNA, 25 bp, Homo sapien
gttatttcagtgatgtaattgtgaa

SEQ ID NO: 4529929 - DNA, 25 bp, Homo sapien
tatttcagtgatgtaattgtgaaag

SEQ ID NO: 4529930 - DNA, 25 bp, Homo sapien
tagctgcacatcactacagattatg

SEQ ID NO: 4529931 - DNA, 25 bp, Homo sapien
tcacaatttgggttcccagaacacc

SEQ ID NO: 4529932 - DNA, 25 bp, Homo sapien
gcaaccatcaaaccagcagcctaag

SEQ ID NO: 4529933 - DNA, 25 bp, Homo sapien
tgtgcatctcagcattcaccccatg

SEQ ID NO: 4529934 - DNA, 25 bp, Homo sapien
gggaaacattccaatgggatagatt

SEQ ID NO: 4529935 - DNA, 25 bp, Homo sapien
tgggatagattaatctatgtaaacc

SEQ ID NO: 4529936 - DNA, 25 bp, Homo sapien
ttctaaattgccagctctgtcgcct

SEQ ID NO: 4529937 - DNA, 25 bp, Homo sapien
ctgaaactgctgttcggcattctaa

SEQ ID NO: 4529938 - DNA, 25 bp, Homo sapien
tgagataatcgtaccctagagggat

SEQ ID NO: 4529939 - DNA, 25 bp, Homo sapien
cattgctaacaatcacaggaggaca

SEQ ID NO: 4529940 - DNA, 25 bp, Homo sapien
gacacttggctgtgcttcataacac

SEQ ID NO: 4529941 - DNA, 25 bp, Homo sapien
tctgaaacaatacgtgcaaggatgc

SEQ ID NO: 4529942 - DNA, 25 bp, Homo sapien
caagggtgatttaatgccaggaaac

SEQ ID NO: 4529943 - DNA, 25 bp, Homo sapien
tatagaaatattcaagggtgattta

SEQ ID NO: 4529944 - DNA, 25 bp, Homo sapien
aaatattcaagggtgatttaatgcc

SEQ ID NO: 4529945 - DNA, 25 bp, Homo sapien
gtgatttaatgccaggaaacataac

SEQ ID NO: 4529946 - DNA, 25 bp, Homo sapien
ccatttgggttgaaacactggactg

SEQ ID NO: 4529947 - DNA, 25 bp, Homo sapien
gacggtcattatcgaaggatttcca

SEQ ID NO: 4529948 - DNA, 25 bp, Homo sapien
tcagctagaggatgaaggtccttcc

SEQ ID NO: 4529949 - DNA, 25 bp, Homo sapien
ggttgaaacactggactgagtgatc

SEQ ID NO: 4529950 - DNA, 25 bp, Homo sapien
gatttcgctacccatcacaaaccag

SEQ ID NO: 4529951 - DNA, 25 bp, Homo sapien
cctgaatgatgaattgggctctatg

SEQ ID NO: 4529952 - DNA, 25 bp, Homo sapien
gaagactgggatttcgctacccatc

SEQ ID NO: 4529953 - DNA, 25 bp, Homo sapien
ttatcacctcattaagctccccaag

SEQ ID NO: 4529954 - DNA, 25 bp, Homo sapien
ggaagggcaaacatgagcaaggagc

SEQ ID NO: 4529955 - DNA, 25 bp, Homo sapien
ctgtgtgcactccactgaaaggaag

SEQ ID NO: 4529956 - DNA, 25 bp, Homo sapien
gaagggcaaacatgagcaaggagct

SEQ ID NO: 4529957 - DNA, 25 bp, Homo sapien
ctacctagtattgaggcttcccaca

SEQ ID NO: 4529958 - DNA, 25 bp, Homo sapien
cctcaccttaagttctttgctacct

SEQ ID NO: 4529959 - DNA, 25 bp, Homo sapien
taaggtagaagtttctgcacactcc

SEQ ID NO: 4529960 - DNA, 25 bp, Homo sapien
agaggtgtataaataagtgttaagg

SEQ ID NO: 4529961 - DNA, 25 bp, Homo sapien
ctgtgacagccccagtaagctagct

SEQ ID NO: 4529962 - DNA, 25 bp, Homo sapien
agccaggggctttcgattgtacaga

SEQ ID NO: 4529963 - DNA, 25 bp, Homo sapien
gccccagtaagctagcttgtctcat

SEQ ID NO: 4529964 - DNA, 25 bp, Homo sapien
tcgattgtacagagaggtaagtttc

SEQ ID NO: 4529965 - DNA, 25 bp, Homo sapien
tggctactggtagtaagtggccaca

SEQ ID NO: 4529966 - DNA, 25 bp, Homo sapien
ggctactggtagtaagtggccacaa

SEQ ID NO: 4529967 - DNA, 25 bp, Homo sapien
ttggctactggtagtaagtggccac

SEQ ID NO: 4529968 - DNA, 25 bp, Homo sapien
ttttggctactggtagtaagtggcc

SEQ ID NO: 4529969 - DNA, 25 bp, Homo sapien
ctaaggatgtcagttttgtgaggac

SEQ ID NO: 4529970 - DNA, 25 bp, Homo sapien
tgtatctacatgcacgaatactctg

SEQ ID NO: 4529971 - DNA, 25 bp, Homo sapien
tgtaggtctgcatgcctgtgtggcc

SEQ ID NO: 4529972 - DNA, 25 bp, Homo sapien
catgtcctctcatcactaaggatgt

SEQ ID NO: 4529973 - DNA, 25 bp, Homo sapien
caacccttcctaactgatggtggtc

SEQ ID NO: 4529974 - DNA, 25 bp, Homo sapien
aaattgcccctactctttgagatga

SEQ ID NO: 4529975 - DNA, 25 bp, Homo sapien
tgagatgactggtattgaatggagc

SEQ ID NO: 4529976 - DNA, 25 bp, Homo sapien
tgttcacaagcatctatgcaaagga

SEQ ID NO: 4529977 - DNA, 25 bp, Homo sapien
ccttgttcatcagcaaggcaaggaa

SEQ ID NO: 4529978 - DNA, 25 bp, Homo sapien
gcaaggcaaggaaatactctgtctg

SEQ ID NO: 4529979 - DNA, 25 bp, Homo sapien
gttcatcagcaaggcaaggaaatac

SEQ ID NO: 4529980 - DNA, 25 bp, Homo sapien
catcagcaaggcaaggaaatactct

SEQ ID NO: 4529981 - DNA, 25 bp, Homo sapien
cctgatagctctgtatcaggctgcc

SEQ ID NO: 4529982 - DNA, 25 bp, Homo sapien
ttcggcaagatcactcctgatagct

SEQ ID NO: 4529983 - DNA, 25 bp, Homo sapien
gatcactcctgatagctctgtatca

SEQ ID NO: 4529984 - DNA, 25 bp, Homo sapien
gtgggccttcggcaagatcactcct

SEQ ID NO: 4529985 - DNA, 25 bp, Homo sapien
ttgctcatacctgcaaacttcacca

SEQ ID NO: 4529986 - DNA, 25 bp, Homo sapien
tgctcatacctgcaaacttcaccat

SEQ ID NO: 4529987 - DNA, 25 bp, Homo sapien
tgctcctacgtgaatgccatcattt

SEQ ID NO: 4529988 - DNA, 25 bp, Homo sapien
gggcatccaggtgatgaaccctgtt

SEQ ID NO: 4529989 - DNA, 25 bp, Homo sapien
ttacaagtgaattctggagcaccat

SEQ ID NO: 4529990 - DNA, 25 bp, Homo sapien
gggctttacaagtgaattctggagc

SEQ ID NO: 4529991 - DNA, 25 bp, Homo sapien
gatcaggatgccaacatggtcagcg

SEQ ID NO: 4529992 - DNA, 25 bp, Homo sapien
cacagtacacaattagcaagcagca

SEQ ID NO: 4529993 - DNA, 25 bp, Homo sapien
ggtcagcgtcttcatgagggcccta

SEQ ID NO: 4529994 - DNA, 25 bp, Homo sapien
ggttctcgaccccagctatatagga

SEQ ID NO: 4529995 - DNA, 25 bp, Homo sapien
taaaaatctcatgttgcattttgtc

SEQ ID NO: 4529996 - DNA, 25 bp, Homo sapien
cagatgggccttggaatgtttaaaa

SEQ ID NO: 4529997 - DNA, 25 bp, Homo sapien
aagaaaggaattatggcttttctct

SEQ ID NO: 4529998 - DNA, 25 bp, Homo sapien
cagccacaaagataagtgggttaca

SEQ ID NO: 4529999 - DNA, 25 bp, Homo sapien
tctaatttgtaacacccctgcagtt

SEQ ID NO: 4530000 - DNA, 25 bp, Homo sapien
ccactgctatgtcaatgcacataaa

SEQ ID NO: 4530001 - DNA, 25 bp, Homo sapien
cactgctatgtcaatgcacataaat

SEQ ID NO: 4530002 - DNA, 25 bp, Homo sapien
atttgtaacacccctgcagttccat

SEQ ID NO: 4530003 - DNA, 25 bp, Homo sapien
ccctcacctgtcttccatcactcct

SEQ ID NO: 4530004 - DNA, 25 bp, Homo sapien
cacaccctcacctgtcttccatcac

SEQ ID NO: 4530005 - DNA, 25 bp, Homo sapien
ccatcactccttttattccagcagc

SEQ ID NO: 4530006 - DNA, 25 bp, Homo sapien
ctcacctgtcttccatcactccttt

SEQ ID NO: 4530007 - DNA, 25 bp, Homo sapien
actttctatgcataacagctgcttg

SEQ ID NO: 4530008 - DNA, 25 bp, Homo sapien
cagctgcttgcagaaccgtaatatc

SEQ ID NO: 4530009 - DNA, 25 bp, Homo sapien
tgttaaatatacgtttatgaagagc

SEQ ID NO: 4530010 - DNA, 25 bp, Homo sapien
tttcttcggattgggtgtgggacaa

SEQ ID NO: 4530011 - DNA, 25 bp, Homo sapien
gcaaacttgtccttcttcacatcgt

SEQ ID NO: 4530012 - DNA, 25 bp, Homo sapien
aaacttgtccttcttcacatcgttg

SEQ ID NO: 4530013 - DNA, 25 bp, Homo sapien
agcaaacttgtccttcttcacatcg

SEQ ID NO: 4530014 - DNA, 25 bp, Homo sapien
caaacttgtccttcttcacatcgtt

SEQ ID NO: 4530015 - DNA, 25 bp, Homo sapien
ttttcaccatgaaccagtcctagtc

SEQ ID NO: 4530016 - DNA, 25 bp, Homo sapien
taccttctactttttcaccatgaac

SEQ ID NO: 4530017 - DNA, 25 bp, Homo sapien
cttctactttttcaccatgaaccag

SEQ ID NO: 4530018 - DNA, 25 bp, Homo sapien
tactttttcaccatgaaccagtcct

SEQ ID NO: 4530019 - DNA, 25 bp, Homo sapien
agcccaattattactctagccagag

SEQ ID NO: 4530020 - DNA, 25 bp, Homo sapien
gccagagaccttatttctagattca

SEQ ID NO: 4530021 - DNA, 25 bp, Homo sapien
accaccggagctcattgatttttag

SEQ ID NO: 4530022 - DNA, 25 bp, Homo sapien
ttctcttggtgtacaactgtaaacc

SEQ ID NO: 4530023 - DNA, 25 bp, Homo sapien
gggcatctaatcctattcttggaac

SEQ ID NO: 4530024 - DNA, 25 bp, Homo sapien
gaaatgaattcactggggcatctaa

SEQ ID NO: 4530025 - DNA, 25 bp, Homo sapien
catagtattgggaaaccactgctgg

SEQ ID NO: 4530026 - DNA, 25 bp, Homo sapien
tttaaatgcactgacgagcaaacaa

SEQ ID NO: 4530027 - DNA, 25 bp, Homo sapien
catcaggtgcccgtttagagggtga

SEQ ID NO: 4530028 - DNA, 25 bp, Homo sapien
cagcggagtcattccatcatcaggt

SEQ ID NO: 4530029 - DNA, 25 bp, Homo sapien
catgagattcgttctaattgctgga

SEQ ID NO: 4530030 - DNA, 25 bp, Homo sapien
gaggcaaggcggacaaatctgagga

SEQ ID NO: 4530031 - DNA, 25 bp, Homo sapien
gtgtgtgttcctcagcactaaattt

SEQ ID NO: 4530032 - DNA, 25 bp, Homo sapien
ctgctgtcttcgggtgatatttaat

SEQ ID NO: 4530033 - DNA, 25 bp, Homo sapien
gtgtgttcctcagcactaaattttt

SEQ ID NO: 4530034 - DNA, 25 bp, Homo sapien
atagtgtgtgttcctcagcactaaa

SEQ ID NO: 4530035 - DNA, 25 bp, Homo sapien
actgctcactctcacggaagatggc

SEQ ID NO: 4530036 - DNA, 25 bp, Homo sapien
ctctcacggaagatggcatttacct

SEQ ID NO: 4530037 - DNA, 25 bp, Homo sapien
cactctcacggaagatggcatttac

SEQ ID NO: 4530038 - DNA, 25 bp, Homo sapien
acaaaatggttctagtgcagggcct

SEQ ID NO: 4530039 - DNA, 25 bp, Homo sapien
ttagagacatctggttaattaattc

SEQ ID NO: 4530040 - DNA, 25 bp, Homo sapien
tcacttgtttattacttctatcaac

SEQ ID NO: 4530041 - DNA, 25 bp, Homo sapien
tctatcaacttcaatcatgaaagct

SEQ ID NO: 4530042 - DNA, 25 bp, Homo sapien
ttattcttgcccaatcacttgttta

SEQ ID NO: 4530043 - DNA, 25 bp, Homo sapien
acttctatcaacttcaatcatgaaa

SEQ ID NO: 4530044 - DNA, 25 bp, Homo sapien
ccaggatgctgaaatcaccagtaac

SEQ ID NO: 4530045 - DNA, 25 bp, Homo sapien
tatgtctaaagtatcgtaatgccat

SEQ ID NO: 4530046 - DNA, 25 bp, Homo sapien
ctccaggatgctgaaatcaccagta

SEQ ID NO: 4530047 - DNA, 25 bp, Homo sapien
ctatgtctaaagtatcgtaatgcca

SEQ ID NO: 4530048 - DNA, 25 bp, Homo sapien
tcacattaaatgccggggatatctg

SEQ ID NO: 4530049 - DNA, 25 bp, Homo sapien
cacattaaatgccggggatatctgc

SEQ ID NO: 4530050 - DNA, 25 bp, Homo sapien
ttttcatgttcatttgatgcacaca

SEQ ID NO: 4530051 - DNA, 25 bp, Homo sapien
tgttcactgttggtaaatgccaaac

SEQ ID NO: 4530052 - DNA, 25 bp, Homo sapien
ttccactgctcgtgcttgttcactg

SEQ ID NO: 4530053 - DNA, 25 bp, Homo sapien
cactgttggtaaatgccaaacgcat

SEQ ID NO: 4530054 - DNA, 25 bp, Homo sapien
cacaagcctctccttctaaaatgca

SEQ ID NO: 4530055 - DNA, 25 bp, Homo sapien
tgttctaactggtacccacaagcct

SEQ ID NO: 4530056 - DNA, 25 bp, Homo sapien
tgctgttctaactggtacccacaag

SEQ ID NO: 4530057 - DNA, 25 bp, Homo sapien
ctaaaatgcagctcgctgttaccat

SEQ ID NO: 4530058 - DNA, 25 bp, Homo sapien
taagctgggccctggatatacaaac

SEQ ID NO: 4530059 - DNA, 25 bp, Homo sapien
gagaagcctagcaaggaaacccatt

SEQ ID NO: 4530060 - DNA, 25 bp, Homo sapien
cagagaagctgtcgaaacctgagag

SEQ ID NO: 4530061 - DNA, 25 bp, Homo sapien
caaacaggtggaagattcagtgccc

SEQ ID NO: 4530062 - DNA, 25 bp, Homo sapien
caaacctcatttcggccattagttt

SEQ ID NO: 4530063 - DNA, 25 bp, Homo sapien
tcaaacctcatttcggccattagtt

SEQ ID NO: 4530064 - DNA, 25 bp, Homo sapien
tcatttcggccattagtttcaatct

SEQ ID NO: 4530065 - DNA, 25 bp, Homo sapien
acctcatttcggccattagtttcaa

SEQ ID NO: 4530066 - DNA, 25 bp, Homo sapien
aatgccagcttaatctccacttctg

SEQ ID NO: 4530067 - DNA, 25 bp, Homo sapien
gcaagggagtgaggtaatcctccag

SEQ ID NO: 4530068 - DNA, 25 bp, Homo sapien
cccaacgtagcgaagaggcaaggga

SEQ ID NO: 4530069 - DNA, 25 bp, Homo sapien
acaaggcagcatacccaacgtagcg

SEQ ID NO: 4530070 - DNA, 25 bp, Homo sapien
taaaccgagaggttttcagcgtgaa

SEQ ID NO: 4530071 - DNA, 25 bp, Homo sapien
ctagactaaaccgagaggttttcag

SEQ ID NO: 4530072 - DNA, 25 bp, Homo sapien
ccctgaattcctagattctagacta

SEQ ID NO: 4530073 - DNA, 25 bp, Homo sapien
actaaaccgagaggttttcagcgtg

SEQ ID NO: 4530074 - DNA, 25 bp, Homo sapien
tctttggtggtatgccttcaaatcc

SEQ ID NO: 4530075 - DNA, 25 bp, Homo sapien
aaattgtcttcttaggtttgagaca

SEQ ID NO: 4530076 - DNA, 25 bp, Homo sapien
tcacttccagcgtactgcagaggaa

SEQ ID NO: 4530077 - DNA, 25 bp, Homo sapien
ccctgctgagaagcctggggcaatt

SEQ ID NO: 4530078 - DNA, 25 bp, Homo sapien
tgctgatgtgcttaattctcccctt

SEQ ID NO: 4530079 - DNA, 25 bp, Homo sapien
ctgctgatgtgcttaattctcccct

SEQ ID NO: 4530080 - DNA, 25 bp, Homo sapien
caggcttagtataggacagagagca

SEQ ID NO: 4530081 - DNA, 25 bp, Homo sapien
tctgctgttaactacctgggtcctg

SEQ ID NO: 4530082 - DNA, 25 bp, Homo sapien
gtttgtgacagagcaaccccgtcgt

SEQ ID NO: 4530083 - DNA, 25 bp, Homo sapien
aatgacctcagctgtattcaaaggc

SEQ ID NO: 4530084 - DNA, 25 bp, Homo sapien
tcctggcatccacttccttgagaca

SEQ ID NO: 4530085 - DNA, 25 bp, Homo sapien
gcttcagtgattcatcattcctggc

SEQ ID NO: 4530086 - DNA, 25 bp, Homo sapien
ctcgagtgtggatcccccaacaggc

SEQ ID NO: 4530087 - DNA, 25 bp, Homo sapien
cccaacaggcttcagtgattcatca

SEQ ID NO: 4530088 - DNA, 25 bp, Homo sapien
ccaaaagaattctctgaccttgtgc

SEQ ID NO: 4530089 - DNA, 25 bp, Homo sapien
tgtgctgataaattgtgctgaagga

SEQ ID NO: 4530090 - DNA, 25 bp, Homo sapien
tcactgctcatgagaaacaggccca

SEQ ID NO: 4530091 - DNA, 25 bp, Homo sapien
gaattctctgaccttgtgctgataa

SEQ ID NO: 4530092 - DNA, 25 bp, Homo sapien
aacatgcttgtaatttccaacctgg

SEQ ID NO: 4530093 - DNA, 25 bp, Homo sapien
tcattcccagcactaaacaacatgc

SEQ ID NO: 4530094 - DNA, 25 bp, Homo sapien
atgcttgtaatttccaacctggctg

SEQ ID NO: 4530095 - DNA, 25 bp, Homo sapien
gcacatcattcccagcactaaacaa

SEQ ID NO: 4530096 - DNA, 25 bp, Homo sapien
cattccacagccagcatccgatgtt

SEQ ID NO: 4530097 - DNA, 25 bp, Homo sapien
ttgacttatgattcttgacaaattc

SEQ ID NO: 4530098 - DNA, 25 bp, Homo sapien
cagatgtaccagacaggtggcctga

SEQ ID NO: 4530099 - DNA, 25 bp, Homo sapien
tcttgacaaattctcagagcccatt

SEQ ID NO: 4530100 - DNA, 25 bp, Homo sapien
ctcagtaaagcaggacgtgtacttc

SEQ ID NO: 4530101 - DNA, 25 bp, Homo sapien
cagtaaagcaggacgtgtacttcag

SEQ ID NO: 4530102 - DNA, 25 bp, Homo sapien
aagcaggacgtgtacttcagctctt

SEQ ID NO: 4530103 - DNA, 25 bp, Homo sapien
taaagcaggacgtgtacttcagctc

SEQ ID NO: 4530104 - DNA, 25 bp, Homo sapien
aataaaatgcttctcggattttact

SEQ ID NO: 4530105 - DNA, 25 bp, Homo sapien
gaatcgagcaccacatcatcccgat

SEQ ID NO: 4530106 - DNA, 25 bp, Homo sapien
aacctgaatcgagcaccacatcatc

SEQ ID NO: 4530107 - DNA, 25 bp, Homo sapien
ctgaatcgagcaccacatcatcccg

SEQ ID NO: 4530108 - DNA, 25 bp, Homo sapien
tgaacctgaatcgagcaccacatca

SEQ ID NO: 4530109 - DNA, 25 bp, Homo sapien
cgtgattggcccgactgaagagaaa

SEQ ID NO: 4530110 - DNA, 25 bp, Homo sapien
acgctgcctcccaatcgtgattggc

SEQ ID NO: 4530111 - DNA, 25 bp, Homo sapien
tccatgagtcactggactaatccag

SEQ ID NO: 4530112 - DNA, 25 bp, Homo sapien
tattccaccgttcaagacgctgcct

SEQ ID NO: 4530113 - DNA, 25 bp, Homo sapien
ggtcattctcgaacattctgtatgt

SEQ ID NO: 4530114 - DNA, 25 bp, Homo sapien
tttggtcattctcgaacattctgta

SEQ ID NO: 4530115 - DNA, 25 bp, Homo sapien
cattctcgaacattctgtatgtcat

SEQ ID NO: 4530116 - DNA, 25 bp, Homo sapien
cttttggtcattctcgaacattctg

SEQ ID NO: 4530117 - DNA, 25 bp, Homo sapien
tgctgttcaacctttctttactcat

SEQ ID NO: 4530118 - DNA, 25 bp, Homo sapien
ttgatgctgttcaacctttctttac

SEQ ID NO: 4530119 - DNA, 25 bp, Homo sapien
gatgctgttcaacctttctttactc

SEQ ID NO: 4530120 - DNA, 25 bp, Homo sapien
tcattgatgctgttcaacctttctt

SEQ ID NO: 4530121 - DNA, 25 bp, Homo sapien
tccttatctggtacaagtctctcca

SEQ ID NO: 4530122 - DNA, 25 bp, Homo sapien
tcaccccatgtttgttaaggtctaa

SEQ ID NO: 4530123 - DNA, 25 bp, Homo sapien
tccagtgaacttagctcacccaaga

SEQ ID NO: 4530124 - DNA, 25 bp, Homo sapien
gagtgcagttttgtacatcacccca

SEQ ID NO: 4530125 - DNA, 25 bp, Homo sapien
tctggatcctccaaggttgggggct

SEQ ID NO: 4530126 - DNA, 25 bp, Homo sapien
tctgtttctggatcctccaaggttg

SEQ ID NO: 4530127 - DNA, 25 bp, Homo sapien
tgtttctggatcctccaaggttggg

SEQ ID NO: 4530128 - DNA, 25 bp, Homo sapien
cttctgtttctggatcctccaaggt

SEQ ID NO: 4530129 - DNA, 25 bp, Homo sapien
aagagtatacaagccgctttcactg

SEQ ID NO: 4530130 - DNA, 25 bp, Homo sapien
tcaaactctaagagtatacaagccg

SEQ ID NO: 4530131 - DNA, 25 bp, Homo sapien
tctaagagtatacaagccgctttca

SEQ ID NO: 4530132 - DNA, 25 bp, Homo sapien
caatgcccctcaaactctaagagta

SEQ ID NO: 4530133 - DNA, 25 bp, Homo sapien
aattccatgcctagacagggacccc

SEQ ID NO: 4530134 - DNA, 25 bp, Homo sapien
cagggtgtagaacatgggaatcttc

SEQ ID NO: 4530135 - DNA, 25 bp, Homo sapien
tagtcttacgcagatgtcttgcacc

SEQ ID NO: 4530136 - DNA, 25 bp, Homo sapien
cctttccttagaatgtgcagcactt

SEQ ID NO: 4530137 - DNA, 25 bp, Homo sapien
aggggtttagcaatttcaggttcat

SEQ ID NO: 4530138 - DNA, 25 bp, Homo sapien
ttaattatataatggaatgtaaatg

SEQ ID NO: 4530139 - DNA, 25 bp, Homo sapien
tcttctgtggatctatttacactat

SEQ ID NO: 4530140 - DNA, 25 bp, Homo sapien
tcttcttctgtggatctatttacac

SEQ ID NO: 4530141 - DNA, 25 bp, Homo sapien
aaagtggagccaaatagagaccagc

SEQ ID NO: 4530142 - DNA, 25 bp, Homo sapien
catgattgactttatgattctttca

SEQ ID NO: 4530143 - DNA, 25 bp, Homo sapien
cagctggctggataactcagtaatt

SEQ ID NO: 4530144 - DNA, 25 bp, Homo sapien
ccaaagtggagccaaatagagacca

SEQ ID NO: 4530145 - DNA, 25 bp, Homo sapien
caggtccaaatataattctggccct

SEQ ID NO: 4530146 - DNA, 25 bp, Homo sapien
gcatacacaggtccaaatataattc

SEQ ID NO: 4530147 - DNA, 25 bp, Homo sapien
atacacaggtccaaatataattctg

SEQ ID NO: 4530148 - DNA, 25 bp, Homo sapien
aggtccaaatataattctggccctt

SEQ ID NO: 4530149 - DNA, 25 bp, Homo sapien
tcaccactgcttgggtccaaatgag

SEQ ID NO: 4530150 - DNA, 25 bp, Homo sapien
atttcaccactgcttgggtccaaat

SEQ ID NO: 4530151 - DNA, 25 bp, Homo sapien
agtcagcaatttcaccactgcttgg

SEQ ID NO: 4530152 - DNA, 25 bp, Homo sapien
cagtcagcaatttcaccactgcttg

SEQ ID NO: 4530153 - DNA, 25 bp, Homo sapien
ggaaacgaatgcctttagcaacgga

SEQ ID NO: 4530154 - DNA, 25 bp, Homo sapien
gatcctatcctgtttattagaagaa

SEQ ID NO: 4530155 - DNA, 25 bp, Homo sapien
taagtaccactttccttgcataata

SEQ ID NO: 4530156 - DNA, 25 bp, Homo sapien
tagcaacggattatggctttttaag

SEQ ID NO: 4530157 - DNA, 25 bp, Homo sapien
cccagaccaagcctttgagacacca

SEQ ID NO: 4530158 - DNA, 25 bp, Homo sapien
accaagcctttgagacaccaactgc

SEQ ID NO: 4530159 - DNA, 25 bp, Homo sapien
cagaccaagcctttgagacaccaac

SEQ ID NO: 4530160 - DNA, 25 bp, Homo sapien
gaccaagcctttgagacaccaactg

SEQ ID NO: 4530161 - DNA, 25 bp, Homo sapien
atttgatttctttggacaacatcca

SEQ ID NO: 4530162 - DNA, 25 bp, Homo sapien
tttgatttctttggacaacatccat

SEQ ID NO: 4530163 - DNA, 25 bp, Homo sapien
tatttgatttctttggacaacatcc

SEQ ID NO: 4530164 - DNA, 25 bp, Homo sapien
tttggaaatagcctccttatccagc

SEQ ID NO: 4530165 - DNA, 25 bp, Homo sapien
tctgatatttggaaatagcctcctt

SEQ ID NO: 4530166 - DNA, 25 bp, Homo sapien
ctttctgatatttggaaatagcctc

SEQ ID NO: 4530167 - DNA, 25 bp, Homo sapien
tgatatttggaaatagcctccttat

SEQ ID NO: 4530168 - DNA, 25 bp, Homo sapien
caatggaccattactgctactagac

SEQ ID NO: 4530169 - DNA, 25 bp, Homo sapien
gaatttcccaaatacggtcaatgga

SEQ ID NO: 4530170 - DNA, 25 bp, Homo sapien
tgtgggctcatggtcccctctagct

SEQ ID NO: 4530171 - DNA, 25 bp, Homo sapien
cttttatggagtggatcagtccgca

SEQ ID NO: 4530172 - DNA, 25 bp, Homo sapien
ctcgtaaaaagctgtagaagagcat

SEQ ID NO: 4530173 - DNA, 25 bp, Homo sapien
aacctcgtaaaaagctgtagaagag

SEQ ID NO: 4530174 - DNA, 25 bp, Homo sapien
cctcgtaaaaagctgtagaagagca

SEQ ID NO: 4530175 - DNA, 25 bp, Homo sapien
acctcgtaaaaagctgtagaagagc

SEQ ID NO: 4530176 - DNA, 25 bp, Homo sapien
tctcactctcctccaatccattttc

SEQ ID NO: 4530177 - DNA, 25 bp, Homo sapien
ctctcactctcctccaatccatttt

SEQ ID NO: 4530178 - DNA, 25 bp, Homo sapien
cgttccataattcactctcactctc

SEQ ID NO: 4530179 - DNA, 25 bp, Homo sapien
cactctcctccaatccattttccat

SEQ ID NO: 4530180 - DNA, 25 bp, Homo sapien
tcctcacaaacgcataattaatggt

SEQ ID NO: 4530181 - DNA, 25 bp, Homo sapien
taatgtaatgcagatcccaaaaggc

SEQ ID NO: 4530182 - DNA, 25 bp, Homo sapien
tttgtttgcaccatcaccaagatta

SEQ ID NO: 4530183 - DNA, 25 bp, Homo sapien
gcactttgaccccagacatacattt

SEQ ID NO: 4530184 - DNA, 25 bp, Homo sapien
agatgagacaaaactctggccactg

SEQ ID NO: 4530185 - DNA, 25 bp, Homo sapien
tgagacaaaactctggccactggca

SEQ ID NO: 4530186 - DNA, 25 bp, Homo sapien
tctggatgaagatgagacaaaactc

SEQ ID NO: 4530187 - DNA, 25 bp, Homo sapien
tgaagatgagacaaaactctggcca

SEQ ID NO: 4530188 - DNA, 25 bp, Homo sapien
aactgcttgtcatagcagtttaatt

SEQ ID NO: 4530189 - DNA, 25 bp, Homo sapien
ccattttcaaagaggtagagtgact

SEQ ID NO: 4530190 - DNA, 25 bp, Homo sapien
tccattttcaaagaggtagagtgac

SEQ ID NO: 4530191 - DNA, 25 bp, Homo sapien
cattttcaaagaggtagagtgactg

SEQ ID NO: 4530192 - DNA, 25 bp, Homo sapien
attttcaaagaggtagagtgactgt

SEQ ID NO: 4530193 - DNA, 25 bp, Homo sapien
ggacctgagatttacgattttcctc

SEQ ID NO: 4530194 - DNA, 25 bp, Homo sapien
ctcggaaaggacctgagatttacga

SEQ ID NO: 4530195 - DNA, 25 bp, Homo sapien
cctgagatttacgattttcctcaca

SEQ ID NO: 4530196 - DNA, 25 bp, Homo sapien
cggaaaggacctgagatttacgatt

SEQ ID NO: 4530197 - DNA, 25 bp, Homo sapien
tacaaataccagcaacaacgtgcag

SEQ ID NO: 4530198 - DNA, 25 bp, Homo sapien
cgtgcagggcaaagtataacctttc

SEQ ID NO: 4530199 - DNA, 25 bp, Homo sapien
cagtttcctgacaaccttctacagt

SEQ ID NO: 4530200 - DNA, 25 bp, Homo sapien
cagttattgacattacaaataccag

SEQ ID NO: 4530201 - DNA, 25 bp, Homo sapien
tatgcgtcccaataaggctcttttc

SEQ ID NO: 4530202 - DNA, 25 bp, Homo sapien
gaactatttacaccatatgcgtccc

SEQ ID NO: 4530203 - DNA, 25 bp, Homo sapien
gacccttgaatctttacacagcttt

SEQ ID NO: 4530204 - DNA, 25 bp, Homo sapien
caagtaagtggaaccaaagatggct

SEQ ID NO: 4530205 - DNA, 25 bp, Homo sapien
tcccacaaatttgttcacacgatgc

SEQ ID NO: 4530206 - DNA, 25 bp, Homo sapien
tcctcgattaatcccacaaatttgt

SEQ ID NO: 4530207 - DNA, 25 bp, Homo sapien
tgttcacacgatgcacattgtttag

SEQ ID NO: 4530208 - DNA, 25 bp, Homo sapien
gcacattgtttagggcaatttacaa

SEQ ID NO: 4530209 - DNA, 25 bp, Homo sapien
gcaacaatggggccacattattcat

SEQ ID NO: 4530210 - DNA, 25 bp, Homo sapien
aagaagtgaatgattcccatctgtc

SEQ ID NO: 4530211 - DNA, 25 bp, Homo sapien
aagtgaatgattcccatctgtcagc

SEQ ID NO: 4530212 - DNA, 25 bp, Homo sapien
actaagaagtgaatgattcccatct

SEQ ID NO: 4530213 - DNA, 25 bp, Homo sapien
caccacactgatgcctaatttaggg

SEQ ID NO: 4530214 - DNA, 25 bp, Homo sapien
accacactgatgcctaatttaggga

SEQ ID NO: 4530215 - DNA, 25 bp, Homo sapien
cacactgatgcctaatttagggaag

SEQ ID NO: 4530216 - DNA, 25 bp, Homo sapien
ccacactgatgcctaatttagggaa

SEQ ID NO: 4530217 - DNA, 25 bp, Homo sapien
tgtcagccatgcctctcctatggag

SEQ ID NO: 4530218 - DNA, 25 bp, Homo sapien
cctcagctgtgcagtgtacataaca

SEQ ID NO: 4530219 - DNA, 25 bp, Homo sapien
tccacgatgttctgacagtgatcca

SEQ ID NO: 4530220 - DNA, 25 bp, Homo sapien
tctgacagtgatccagggctcctca

SEQ ID NO: 4530221 - DNA, 25 bp, Homo sapien
atgtcttatgtattctagcaggatt

SEQ ID NO: 4530222 - DNA, 25 bp, Homo sapien
ttgcatagagttagtaggatgtctt

SEQ ID NO: 4530223 - DNA, 25 bp, Homo sapien
gcatagagttagtaggatgtcttat

SEQ ID NO: 4530224 - DNA, 25 bp, Homo sapien
gagttagtaggatgtcttatgtatt

SEQ ID NO: 4530225 - DNA, 25 bp, Homo sapien
gggtcatggctaagctgagccagca

SEQ ID NO: 4530226 - DNA, 25 bp, Homo sapien
gacaatctgggccatgtctggcacc

SEQ ID NO: 4530227 - DNA, 25 bp, Homo sapien
tagtcccttacttggtgtgcgttac

SEQ ID NO: 4530228 - DNA, 25 bp, Homo sapien
acttggtgtgcgttactgatgatga

SEQ ID NO: 4530229 - DNA, 25 bp, Homo sapien
tgtagtacacgagcaggcacttgtc

SEQ ID NO: 4530230 - DNA, 25 bp, Homo sapien
tagtacacgagcaggcacttgtcct

SEQ ID NO: 4530231 - DNA, 25 bp, Homo sapien
ttgtagtacacgagcaggcacttgt

SEQ ID NO: 4530232 - DNA, 25 bp, Homo sapien
ccttgtagtacacgagcaggcactt

SEQ ID NO: 4530233 - DNA, 25 bp, Homo sapien
ctggctccctttgcttagagatcac

SEQ ID NO: 4530234 - DNA, 25 bp, Homo sapien
gagtctgaagtggtccttgttggag

SEQ ID NO: 4530235 - DNA, 25 bp, Homo sapien
agtctgaagtggtccttgttggaga

SEQ ID NO: 4530236 - DNA, 25 bp, Homo sapien
ggctggctccctttgcttagagatc

SEQ ID NO: 4530237 - DNA, 25 bp, Homo sapien
catactgctcatgaagatgagtggc

SEQ ID NO: 4530238 - DNA, 25 bp, Homo sapien
cagtgagtatcagcatggtgccgct

SEQ ID NO: 4530239 - DNA, 25 bp, Homo sapien
tgcggtgcacctcaaggtgggcatc

SEQ ID NO: 4530240 - DNA, 25 bp, Homo sapien
cacacaagggatgatgtgcgtctcc

SEQ ID NO: 4530241 - DNA, 25 bp, Homo sapien
tgctgtagtggtactccacgtggtc

SEQ ID NO: 4530242 - DNA, 25 bp, Homo sapien
ccttgctgtagtggtactccacgtg

SEQ ID NO: 4530243 - DNA, 25 bp, Homo sapien
tgtagtggtactccacgtggtccat

SEQ ID NO: 4530244 - DNA, 25 bp, Homo sapien
ggccttgctgtagtggtactccacg

SEQ ID NO: 4530245 - DNA, 25 bp, Homo sapien
cttggacagggctttacctagccat

SEQ ID NO: 4530246 - DNA, 25 bp, Homo sapien
tgtcctcaaggacccaagctctttc

SEQ ID NO: 4530247 - DNA, 25 bp, Homo sapien
gctttacctagccattctttgggtc

SEQ ID NO: 4530248 - DNA, 25 bp, Homo sapien
tacccagacagctgtagggtgcgga

SEQ ID NO: 4530249 - DNA, 25 bp, Homo sapien
gactgtgatgtttaaggtagacctt

SEQ ID NO: 4530250 - DNA, 25 bp, Homo sapien
tgtagatgcactgtggtactgttga

SEQ ID NO: 4530251 - DNA, 25 bp, Homo sapien
gtagacctttcagttgcacagaatc

SEQ ID NO: 4530252 - DNA, 25 bp, Homo sapien
tctcctctttagctggcaaccacat

SEQ ID NO: 4530253 - DNA, 25 bp, Homo sapien
gggcagcaggcctacctttgaagct

SEQ ID NO: 4530254 - DNA, 25 bp, Homo sapien
tttgttccagtcaatcgcaggccac

SEQ ID NO: 4530255 - DNA, 25 bp, Homo sapien
ttctgttagattacagggcagcagg

SEQ ID NO: 4530256 - DNA, 25 bp, Homo sapien
tagttgctttgagccctatccatat

SEQ ID NO: 4530257 - DNA, 25 bp, Homo sapien
ttgctgacagagatgatgataaatg

SEQ ID NO: 4530258 - DNA, 25 bp, Homo sapien
cattgctgacagagatgatgataaa

SEQ ID NO: 4530259 - DNA, 25 bp, Homo sapien
ctttccattgctgacagagatgatg

SEQ ID NO: 4530260 - DNA, 25 bp, Homo sapien
tccattgctgacagagatgatgata

SEQ ID NO: 4530261 - DNA, 25 bp, Homo sapien
cgttaggtactcttgaattgtgaat

SEQ ID NO: 4530262 - DNA, 25 bp, Homo sapien
ccttcttcttcgttaggtactcttg

SEQ ID NO: 4530263 - DNA, 25 bp, Homo sapien
agagatccttttcggaaacctcttg

SEQ ID NO: 4530264 - DNA, 25 bp, Homo sapien
gtactcttgaattgtgaattctctg

SEQ ID NO: 4530265 - DNA, 25 bp, Homo sapien
ctgaggtatttagcaacagattgtc

SEQ ID NO: 4530266 - DNA, 25 bp, Homo sapien
cacacagggaagaggccgttctgtc

SEQ ID NO: 4530267 - DNA, 25 bp, Homo sapien
tctgttgcgtgttctttgagtcagc

SEQ ID NO: 4530268 - DNA, 25 bp, Homo sapien
tagctgcaccagtcacgaaaccatt

SEQ ID NO: 4530269 - DNA, 25 bp, Homo sapien
taaaggctccttaataagcgtatgc

SEQ ID NO: 4530270 - DNA, 25 bp, Homo sapien
gaatacgctgtctaataaaggctcc

SEQ ID NO: 4530271 - DNA, 25 bp, Homo sapien
catgatctggcctgttaggtgagaa

SEQ ID NO: 4530272 - DNA, 25 bp, Homo sapien
ccttaataagcgtatgcttgtggtg

SEQ ID NO: 4530273 - DNA, 25 bp, Homo sapien
gtcatgaggcgtcctaactcaaggg

SEQ ID NO: 4530274 - DNA, 25 bp, Homo sapien
aaataaagcaatgagtgtgccttcc

SEQ ID NO: 4530275 - DNA, 25 bp, Homo sapien
tcttgctgaacggtagtgctgtata

SEQ ID NO: 4530276 - DNA, 25 bp, Homo sapien
tatccattatcgtttgtcatgaggc

SEQ ID NO: 4530277 - DNA, 25 bp, Homo sapien
ccagctgttcagttgcagagtctgt

SEQ ID NO: 4530278 - DNA, 25 bp, Homo sapien
agcagcagtttccatatccatccag

SEQ ID NO: 4530279 - DNA, 25 bp, Homo sapien
gagaactaggctctcacaacacagc

SEQ ID NO: 4530280 - DNA, 25 bp, Homo sapien
gagagaactaggctctcacaacaca

SEQ ID NO: 4530281 - DNA, 25 bp, Homo sapien
ctttatccctatgtctgtccttcct

SEQ ID NO: 4530282 - DNA, 25 bp, Homo sapien
tccctatgtctgtccttccttcaca

SEQ ID NO: 4530283 - DNA, 25 bp, Homo sapien
tttatccctatgtctgtccttcctt

SEQ ID NO: 4530284 - DNA, 25 bp, Homo sapien
ctatgtctgtccttccttcacacat

SEQ ID NO: 4530285 - DNA, 25 bp, Homo sapien
gctgttggaggaatcaggataacaa

SEQ ID NO: 4530286 - DNA, 25 bp, Homo sapien
ccaagcttgatgattagcacagtgc

SEQ ID NO: 4530287 - DNA, 25 bp, Homo sapien
agctgttggaggaatcaggataaca

SEQ ID NO: 4530288 - DNA, 25 bp, Homo sapien
ttctttcccaagcttgatgattagc

SEQ ID NO: 4530289 - DNA, 25 bp, Homo sapien
tccttgttacttggtcgggccatta

SEQ ID NO: 4530290 - DNA, 25 bp, Homo sapien
ttcataactgtgaaggccactgtgc

SEQ ID NO: 4530291 - DNA, 25 bp, Homo sapien
ccaaaatctaatggagaactcccca

SEQ ID NO: 4530292 - DNA, 25 bp, Homo sapien
gacaatgtcaacagcccagtaggtg

SEQ ID NO: 4530293 - DNA, 25 bp, Homo sapien
caccacgcctacctgcatgaccagt

SEQ ID NO: 4530294 - DNA, 25 bp, Homo sapien
aagcaaagcctcatttggtgatgaa

SEQ ID NO: 4530295 - DNA, 25 bp, Homo sapien
gtgatgaatgtagccaccacgccta

SEQ ID NO: 4530296 - DNA, 25 bp, Homo sapien
gcatgaccagttctggagctactgg

SEQ ID NO: 4530297 - DNA, 25 bp, Homo sapien
aggccagtggacctcgcctgtggca

SEQ ID NO: 4530298 - DNA, 25 bp, Homo sapien
aattgtgcgtggcatccgagcttta

SEQ ID NO: 4530299 - DNA, 25 bp, Homo sapien
gcagctgtgctaaactaagcccact

SEQ ID NO: 4530300 - DNA, 25 bp, Homo sapien
gccatggtaacaatgatcatgacaa

SEQ ID NO: 4530301 - DNA, 25 bp, Homo sapien
tcagttgggatgtttagagatgtcc

SEQ ID NO: 4530302 - DNA, 25 bp, Homo sapien
gttgggatgtttagagatgtccaaa

SEQ ID NO: 4530303 - DNA, 25 bp, Homo sapien
cagttgggatgtttagagatgtcca

SEQ ID NO: 4530304 - DNA, 25 bp, Homo sapien
ttgggatgtttagagatgtccaaag

SEQ ID NO: 4530305 - DNA, 25 bp, Homo sapien
cataaagaactgaaaggtcattctt

SEQ ID NO: 4530306 - DNA, 25 bp, Homo sapien
atccaaagctccatcggcagcccaa

SEQ ID NO: 4530307 - DNA, 25 bp, Homo sapien
tattttgacacaacggtacaatgct

SEQ ID NO: 4530308 - DNA, 25 bp, Homo sapien
gcaatgtgatggcttgttgacgtat

SEQ ID NO: 4530309 - DNA, 25 bp, Homo sapien
tgtagatgtacttctcattgtagaa

SEQ ID NO: 4530310 - DNA, 25 bp, Homo sapien
ttatgtctgacattgtagatgtact

SEQ ID NO: 4530311 - DNA, 25 bp, Homo sapien
attgtagatgtacttctcattgtag

SEQ ID NO: 4530312 - DNA, 25 bp, Homo sapien
aattgacatttatgtctgacattgt

SEQ ID NO: 4530313 - DNA, 25 bp, Homo sapien
tccacttgtctcaaatgaaggtggc

SEQ ID NO: 4530314 - DNA, 25 bp, Homo sapien
gatttacactctacagctactgact

SEQ ID NO: 4530315 - DNA, 25 bp, Homo sapien
ccctagaattgcatggtttgccctg

SEQ ID NO: 4530316 - DNA, 25 bp, Homo sapien
gtagagaactcccacatagaactgc

SEQ ID NO: 4530317 - DNA, 25 bp, Homo sapien
gttgtccagtaccttgatattcttt

SEQ ID NO: 4530318 - DNA, 25 bp, Homo sapien
gtccagtaccttgatattctttcat

SEQ ID NO: 4530319 - DNA, 25 bp, Homo sapien
ttgtccagtaccttgatattctttc

SEQ ID NO: 4530320 - DNA, 25 bp, Homo sapien
tgtccagtaccttgatattctttca

SEQ ID NO: 4530321 - DNA, 25 bp, Homo sapien
ggatctaggtctccctcagcgtggt

SEQ ID NO: 4530322 - DNA, 25 bp, Homo sapien
tggagacagcaacagactactgagt

SEQ ID NO: 4530323 - DNA, 25 bp, Homo sapien
tgaatatctctctagctgcatcctg

SEQ ID NO: 4530324 - DNA, 25 bp, Homo sapien
attaagttggtacctcttgagcgcc

SEQ ID NO: 4530325 - DNA, 25 bp, Homo sapien
tgtctagctttctacatcccagaag

SEQ ID NO: 4530326 - DNA, 25 bp, Homo sapien
cccagccagggttatacatacagtt

SEQ ID NO: 4530327 - DNA, 25 bp, Homo sapien
ttggctgtaggacatctctgtggca

SEQ ID NO: 4530328 - DNA, 25 bp, Homo sapien
gaagcagctgagtacctgtaatatc

SEQ ID NO: 4530329 - DNA, 25 bp, Homo sapien
catataatgtattagccttggcaca

SEQ ID NO: 4530330 - DNA, 25 bp, Homo sapien
gaaacagttgctacaggtcttaata

SEQ ID NO: 4530331 - DNA, 25 bp, Homo sapien
tagtaagactcgaaacatataatgt

SEQ ID NO: 4530332 - DNA, 25 bp, Homo sapien
tcttccaaacttgagatattccagt

SEQ ID NO: 4530333 - DNA, 25 bp, Homo sapien
gacagccaaggaatggagcagtaat

SEQ ID NO: 4530334 - DNA, 25 bp, Homo sapien
catagcaatattgacagtgttcaca

SEQ ID NO: 4530335 - DNA, 25 bp, Homo sapien
tcacatttgcatgatgacagccaag

SEQ ID NO: 4530336 - DNA, 25 bp, Homo sapien
gaaattgcagaagtatttagaacac

SEQ ID NO: 4530337 - DNA, 25 bp, Homo sapien
tcattaaagtcccaattaatgtcac

SEQ ID NO: 4530338 - DNA, 25 bp, Homo sapien
agctcctctgcatagtcattaaagt

SEQ ID NO: 4530339 - DNA, 25 bp, Homo sapien
tcattgaatcgctgttttgttcata

SEQ ID NO: 4530340 - DNA, 25 bp, Homo sapien
tgaatcgctgttttgttcatatttg

SEQ ID NO: 4530341 - DNA, 25 bp, Homo sapien
ctttagctgaagagtactcattttt

SEQ ID NO: 4530342 - DNA, 25 bp, Homo sapien
tttagctgaagagtactcattttta

SEQ ID NO: 4530343 - DNA, 25 bp, Homo sapien
tagctgaagagtactcatttttatt

SEQ ID NO: 4530344 - DNA, 25 bp, Homo sapien
gctgaagagtactcatttttattga

SEQ ID NO: 4530345 - DNA, 25 bp, Homo sapien
tgacaactgagggaccccgtagcat

SEQ ID NO: 4530346 - DNA, 25 bp, Homo sapien
taatttgacatggacagccttcaca

SEQ ID NO: 4530347 - DNA, 25 bp, Homo sapien
gcattactcatgatggcttttcgag

SEQ ID NO: 4530348 - DNA, 25 bp, Homo sapien
gcttttcgagtggtaataaggacaa

SEQ ID NO: 4530349 - DNA, 25 bp, Homo sapien
cagtatacagctattcaagttttca

SEQ ID NO: 4530350 - DNA, 25 bp, Homo sapien
ttacatatagcatcccaaggctttc

SEQ ID NO: 4530351 - DNA, 25 bp, Homo sapien
ttttcctccaaatgatctggtgaca

SEQ ID NO: 4530352 - DNA, 25 bp, Homo sapien
gccagcagatgatacggtctttctt

SEQ ID NO: 4530353 - DNA, 25 bp, Homo sapien
tccaggaaaaagtctgagcaatttt

SEQ ID NO: 4530354 - DNA, 25 bp, Homo sapien
taggacattaactattactgttgca

SEQ ID NO: 4530355 - DNA, 25 bp, Homo sapien
taaaatagagattgccaccaattgc

SEQ ID NO: 4530356 - DNA, 25 bp, Homo sapien
tgttatactttcttgaaaaggccca

SEQ ID NO: 4530357 - DNA, 25 bp, Homo sapien
catccagaggcttatagatttcacg

SEQ ID NO: 4530358 - DNA, 25 bp, Homo sapien
tccagaggcttatagatttcacgga

SEQ ID NO: 4530359 - DNA, 25 bp, Homo sapien
ccagaggcttatagatttcacggac

SEQ ID NO: 4530360 - DNA, 25 bp, Homo sapien
tgcatccagaggcttatagatttca

SEQ ID NO: 4530361 - DNA, 25 bp, Homo sapien
gctgtaaactgctgcgagaatattt

SEQ ID NO: 4530362 - DNA, 25 bp, Homo sapien
tagccaggctctggcgaagcaaatc

SEQ ID NO: 4530363 - DNA, 25 bp, Homo sapien
tagtggcctcaactggtggtcagag

SEQ ID NO: 4530364 - DNA, 25 bp, Homo sapien
ccctgttgacttccatggaggaggt

SEQ ID NO: 4530365 - DNA, 25 bp, Homo sapien
ctctttttgctctattgggccctta

SEQ ID NO: 4530366 - DNA, 25 bp, Homo sapien
tgatgttacagtcagctgatacagc

SEQ ID NO: 4530367 - DNA, 25 bp, Homo sapien
tcagctgatacagcagggtacccac

SEQ ID NO: 4530368 - DNA, 25 bp, Homo sapien
tctattgggcccttatgaaatgaac

SEQ ID NO: 4530369 - DNA, 25 bp, Homo sapien
gctaagaactctgacaaggagttat

SEQ ID NO: 4530370 - DNA, 25 bp, Homo sapien
aactctgacaaggagttatctgtgc

SEQ ID NO: 4530371 - DNA, 25 bp, Homo sapien
ggagttatctgtgccacttggcaaa

SEQ ID NO: 4530372 - DNA, 25 bp, Homo sapien
gacaaggagttatctgtgccacttg

SEQ ID NO: 4530373 - DNA, 25 bp, Homo sapien
atgtcctcctgaagttgaactgcga

SEQ ID NO: 4530374 - DNA, 25 bp, Homo sapien
tcagggacctgagtttagggccgcc

SEQ ID NO: 4530375 - DNA, 25 bp, Homo sapien
catagtttggcatggaatgtcctcc

SEQ ID NO: 4530376 - DNA, 25 bp, Homo sapien
tgaactgcgaagagatttcttgtgg

SEQ ID NO: 4530377 - DNA, 25 bp, Homo sapien
tgccggcaagtaactgacaggggtg

SEQ ID NO: 4530378 - DNA, 25 bp, Homo sapien
ctgccggcaagtaactgacaggggt

SEQ ID NO: 4530379 - DNA, 25 bp, Homo sapien
ccggcaagtaactgacaggggtgtg

SEQ ID NO: 4530380 - DNA, 25 bp, Homo sapien
ggcaagtaactgacaggggtgtgtg

SEQ ID NO: 4530381 - DNA, 25 bp, Homo sapien
gacacatgtcgcagagaaaccttac

SEQ ID NO: 4530382 - DNA, 25 bp, Homo sapien
acatgaatgagcaaaagtgacctga

SEQ ID NO: 4530383 - DNA, 25 bp, Homo sapien
ttgttaaaatatcccgaagcactcg

SEQ ID NO: 4530384 - DNA, 25 bp, Homo sapien
tgtctagtccaaagaaacgggaaga

SEQ ID NO: 4530385 - DNA, 25 bp, Homo sapien
cctgagcggctgattggacttggga

SEQ ID NO: 4530386 - DNA, 25 bp, Homo sapien
gagcggctgattggacttgggactt

SEQ ID NO: 4530387 - DNA, 25 bp, Homo sapien
actgatcagtgcctgagcggctgat

SEQ ID NO: 4530388 - DNA, 25 bp, Homo sapien
atcagtgcctgagcggctgattgga

SEQ ID NO: 4530389 - DNA, 25 bp, Homo sapien
gataagatgcaaattgtaaggactc

SEQ ID NO: 4530390 - DNA, 25 bp, Homo sapien
gttccttagtaaactctgaacaaga

SEQ ID NO: 4530391 - DNA, 25 bp, Homo sapien
caggaagtcacttagtttctctgaa

SEQ ID NO: 4530392 - DNA, 25 bp, Homo sapien
tcttgccaataagtctccaggaagt

SEQ ID NO: 4530393 - DNA, 25 bp, Homo sapien
gagcagcaactgactatctaaaggc

SEQ ID NO: 4530394 - DNA, 25 bp, Homo sapien
gacatcacaccgtgagtctcaaagg

SEQ ID NO: 4530395 - DNA, 25 bp, Homo sapien
gagaggcttaagacaaagtccagac

SEQ ID NO: 4530396 - DNA, 25 bp, Homo sapien
cacattagggagacagtggttaaca

SEQ ID NO: 4530397 - DNA, 25 bp, Homo sapien
tttccagagttgttactgttcagaa

SEQ ID NO: 4530398 - DNA, 25 bp, Homo sapien
tggctagaactggatttgtgttaac

SEQ ID NO: 4530399 - DNA, 25 bp, Homo sapien
tgttcagaagtctggctagaactgg

SEQ ID NO: 4530400 - DNA, 25 bp, Homo sapien
tccagagttgttactgttcagaagt

SEQ ID NO: 4530401 - DNA, 25 bp, Homo sapien
gcctctaaaagaaagaccgtcacaa

SEQ ID NO: 4530402 - DNA, 25 bp, Homo sapien
tgacagattgctttcaactcagtga

SEQ ID NO: 4530403 - DNA, 25 bp, Homo sapien
aactcagtgaaatcaaaccgcagcc

SEQ ID NO: 4530404 - DNA, 25 bp, Homo sapien
gtttgcagccaggaacgcctctaaa

SEQ ID NO: 4530405 - DNA, 25 bp, Homo sapien
tacagtcagatagaggagtaagttc

SEQ ID NO: 4530406 - DNA, 25 bp, Homo sapien
gctcctagtctaaaatcagcatatc

SEQ ID NO: 4530407 - DNA, 25 bp, Homo sapien
cacatgttttcgttcatatatcggg

SEQ ID NO: 4530408 - DNA, 25 bp, Homo sapien
aagatatctgcacctctatgcagca

SEQ ID NO: 4530409 - DNA, 25 bp, Homo sapien
tacccctcagttctgcgttacaaat

SEQ ID NO: 4530410 - DNA, 25 bp, Homo sapien
cccctcagttctgcgttacaaattt

SEQ ID NO: 4530411 - DNA, 25 bp, Homo sapien
ctacccctcagttctgcgttacaaa

SEQ ID NO: 4530412 - DNA, 25 bp, Homo sapien
ctcagttctgcgttacaaattttca

SEQ ID NO: 4530413 - DNA, 25 bp, Homo sapien
tggcatcaaacactaaatcagctga

SEQ ID NO: 4530414 - DNA, 25 bp, Homo sapien
ggccttgccaactccatgatcacta

SEQ ID NO: 4530415 - DNA, 25 bp, Homo sapien
gaaatgatgggtttgcctttggcgt

SEQ ID NO: 4530416 - DNA, 25 bp, Homo sapien
aaaatggactgcaccactgtcagcc

SEQ ID NO: 4530417 - DNA, 25 bp, Homo sapien
tgcacccagtgtccacatgaagtgt

SEQ ID NO: 4530418 - DNA, 25 bp, Homo sapien
gggctgacccaatccaggagtaaac

SEQ ID NO: 4530419 - DNA, 25 bp, Homo sapien
gatcgatggacatgatttgcaccca

SEQ ID NO: 4530420 - DNA, 25 bp, Homo sapien
tgacttgtgctctatgcaggatgga

SEQ ID NO: 4530421 - DNA, 25 bp, Homo sapien
agctttagttccatcgtctctgatt

SEQ ID NO: 4530422 - DNA, 25 bp, Homo sapien
gttccatcgtctctgattgaatttc

SEQ ID NO: 4530423 - DNA, 25 bp, Homo sapien
gtatgcacagaagggccagctttag

SEQ ID NO: 4530424 - DNA, 25 bp, Homo sapien
taggaaacaggtatgcacagaaggg

SEQ ID NO: 4530425 - DNA, 25 bp, Homo sapien
tcgcagcccatcctgtattgttagt

SEQ ID NO: 4530426 - DNA, 25 bp, Homo sapien
gatccccaaataaaccaggccgtga

SEQ ID NO: 4530427 - DNA, 25 bp, Homo sapien
tgtgcatacagtatctcgcagccca

SEQ ID NO: 4530428 - DNA, 25 bp, Homo sapien
caattgaacttgtccctgtgcatac

SEQ ID NO: 4530429 - DNA, 25 bp, Homo sapien
ccacgaacattgtcaccttatgcca

SEQ ID NO: 4530430 - DNA, 25 bp, Homo sapien
ggtatggatttatccaggagctgga

SEQ ID NO: 4530431 - DNA, 25 bp, Homo sapien
cacagcatagcttgaccctgaagat

SEQ ID NO: 4530432 - DNA, 25 bp, Homo sapien
tatggatttatccaggagctggact

SEQ ID NO: 4530433 - DNA, 25 bp, Homo sapien
taagatcctggcaacatctgccctg

SEQ ID NO: 4530434 - DNA, 25 bp, Homo sapien
gatggtttatccttgtatgctgaac

SEQ ID NO: 4530435 - DNA, 25 bp, Homo sapien
ttactttcctgcactgtaagatcct

SEQ ID NO: 4530436 - DNA, 25 bp, Homo sapien
cagttaccgaatcaccctcttattt

SEQ ID NO: 4530437 - DNA, 25 bp, Homo sapien
cattatctgcaaggcttgattcccc

SEQ ID NO: 4530438 - DNA, 25 bp, Homo sapien
tgttcattatctgcaaggcttgatt

SEQ ID NO: 4530439 - DNA, 25 bp, Homo sapien
tcattatctgcaaggcttgattccc

SEQ ID NO: 4530440 - DNA, 25 bp, Homo sapien
gttcattatctgcaaggcttgattc

SEQ ID NO: 4530441 - DNA, 25 bp, Homo sapien
ctcattactcttgggctctttttct

SEQ ID NO: 4530442 - DNA, 25 bp, Homo sapien
ttcccctgcgttggcctttgccagt

SEQ ID NO: 4530443 - DNA, 25 bp, Homo sapien
ttccctccacatggacatgtaccct

SEQ ID NO: 4530444 - DNA, 25 bp, Homo sapien
catggacatgtaccctgcattttct

SEQ ID NO: 4530445 - DNA, 25 bp, Homo sapien
ccatgaccactggctaatgtacaca

SEQ ID NO: 4530446 - DNA, 25 bp, Homo sapien
gaccactggctaatgtacacatgaa

SEQ ID NO: 4530447 - DNA, 25 bp, Homo sapien
tgaccactggctaatgtacacatga

SEQ ID NO: 4530448 - DNA, 25 bp, Homo sapien
catgaccactggctaatgtacacat

SEQ ID NO: 4530449 - DNA, 25 bp, Homo sapien
gtccaatcaaatgtgtagtcatatt

SEQ ID NO: 4530450 - DNA, 25 bp, Homo sapien
tccaatcaaatgtgtagtcatattg

SEQ ID NO: 4530451 - DNA, 25 bp, Homo sapien
caggctggttggctggttctattaa

SEQ ID NO: 4530452 - DNA, 25 bp, Homo sapien
atggcaggctggttggctggttcta

SEQ ID NO: 4530453 - DNA, 25 bp, Homo sapien
ggcaggctggttggctggttctatt

SEQ ID NO: 4530454 - DNA, 25 bp, Homo sapien
aaaatacatcaaaacatattctaac

SEQ ID NO: 4530455 - DNA, 25 bp, Homo sapien
catggctagcatacagggcagtgcc

SEQ ID NO: 4530456 - DNA, 25 bp, Homo sapien
tgcatggctagcatacagggcagtg

SEQ ID NO: 4530457 - DNA, 25 bp, Homo sapien
gatgtgcatggctagcatacagggc

SEQ ID NO: 4530458 - DNA, 25 bp, Homo sapien
ctaagatgtgcatggctagcataca

SEQ ID NO: 4530459 - DNA, 25 bp, Homo sapien
tctactgatcatctggtcagctaat

SEQ ID NO: 4530460 - DNA, 25 bp, Homo sapien
catgttcaattctactgatcatctg

SEQ ID NO: 4530461 - DNA, 25 bp, Homo sapien
actgatcatctggtcagctaatata

SEQ ID NO: 4530462 - DNA, 25 bp, Homo sapien
ctggtttaatggctctgtgtataaa

SEQ ID NO: 4530463 - DNA, 25 bp, Homo sapien
tcgaggctaggtcccagaaaaatcc

SEQ ID NO: 4530464 - DNA, 25 bp, Homo sapien
acattatagtcttcttcctgaccac

SEQ ID NO: 4530465 - DNA, 25 bp, Homo sapien
tcctgaccacaccaccgtatgtggg

SEQ ID NO: 4530466 - DNA, 25 bp, Homo sapien
gaaattggtcttcgaggctaggtcc

SEQ ID NO: 4530467 - DNA, 25 bp, Homo sapien
tctccgaaggagctacaccagatct

SEQ ID NO: 4530468 - DNA, 25 bp, Homo sapien
actaccacttcttcaccgttggtga

SEQ ID NO: 4530469 - DNA, 25 bp, Homo sapien
gacaatgaattctgctgctagccgt

SEQ ID NO: 4530470 - DNA, 25 bp, Homo sapien
cgttggtgatgctgatcgccagaca

SEQ ID NO: 4530471 - DNA, 25 bp, Homo sapien
aagcctaccgtggaaggcggcagga

SEQ ID NO: 4530472 - DNA, 25 bp, Homo sapien
cccgctgctcggtcaggattctttg

SEQ ID NO: 4530473 - DNA, 25 bp, Homo sapien
cagatgccggcgaagggaacttgat

SEQ ID NO: 4530474 - DNA, 25 bp, Homo sapien
ttttggttggttgcctgccaggccg

SEQ ID NO: 4530475 - DNA, 25 bp, Homo sapien
cctcgctttcgcggcgacgtccggg

SEQ ID NO: 4530476 - DNA, 25 bp, Homo sapien
agccgccgctgcctcgctttcgcgg

SEQ ID NO: 4530477 - DNA, 25 bp, Homo sapien
cgctgcctcgctttcgcggcgacgt

SEQ ID NO: 4530478 - DNA, 25 bp, Homo sapien
gccgctgcctcgctttcgcggcgac

SEQ ID NO: 4530479 - DNA, 25 bp, Homo sapien
agtgagctggggagcggtaccgctg

SEQ ID NO: 4530480 - DNA, 25 bp, Homo sapien
tggggagcggtaccgctgccaccac

SEQ ID NO: 4530481 - DNA, 25 bp, Homo sapien
agctggggagcggtaccgctgccac

SEQ ID NO: 4530482 - DNA, 25 bp, Homo sapien
gtgagctggggagcggtaccgctgc

SEQ ID NO: 4530483 - DNA, 25 bp, Homo sapien
gacgacgccatcttgttactccagc

SEQ ID NO: 4530484 - DNA, 25 bp, Homo sapien
gggagtcgcttcttcacggcgcaga

SEQ ID NO: 4530485 - DNA, 25 bp, Homo sapien
cacggcgcagagcattctgggaaag

SEQ ID NO: 4530486 - DNA, 25 bp, Homo sapien
ttcttcacggcgcagagcattctgg

SEQ ID NO: 4530487 - DNA, 25 bp, Homo sapien
ttcacggcgcagagcattctgggaa

SEQ ID NO: 4530488 - DNA, 25 bp, Homo sapien
ttttggtcctgcccagttctcttca

SEQ ID NO: 4530489 - DNA, 25 bp, Homo sapien
tgttttggtcctgcccagttctctt

SEQ ID NO: 4530490 - DNA, 25 bp, Homo sapien
gttttggtcctgcccagttctcttc

SEQ ID NO: 4530491 - DNA, 25 bp, Homo sapien
tttggtcctgcccagttctcttcat

SEQ ID NO: 4530492 - DNA, 25 bp, Homo sapien
tcaccactgccacactttctttctg

SEQ ID NO: 4530493 - DNA, 25 bp, Homo sapien
ttctttctgccccaaggtcactttc

SEQ ID NO: 4530494 - DNA, 25 bp, Homo sapien
ccagcagccactcatcaccactgcc

SEQ ID NO: 4530495 - DNA, 25 bp, Homo sapien
catcaccactgccacactttctttc

SEQ ID NO: 4530496 - DNA, 25 bp, Homo sapien
caatgtttatcccagtgggatatga

SEQ ID NO: 4530497 - DNA, 25 bp, Homo sapien
tgggatatgatacactctgtgcaat

SEQ ID NO: 4530498 - DNA, 25 bp, Homo sapien
aatctttctcgtgtaaagaaagcag

SEQ ID NO: 4530499 - DNA, 25 bp, Homo sapien
gagttagttttgtgaatgccatcag

SEQ ID NO: 4530500 - DNA, 25 bp, Homo sapien
taagaccccttgtcataaatatagc

SEQ ID NO: 4530501 - DNA, 25 bp, Homo sapien
actgggtttcatcaatggcttaggt

SEQ ID NO: 4530502 - DNA, 25 bp, Homo sapien
ggtccaagatattcaatgtaagcat

SEQ ID NO: 4530503 - DNA, 25 bp, Homo sapien
atgagccctgttgtttaagcctaat

SEQ ID NO: 4530504 - DNA, 25 bp, Homo sapien
ttctgcatgccagtttgagcactgg

SEQ ID NO: 4530505 - DNA, 25 bp, Homo sapien
tccacacataattgggctcccagag

SEQ ID NO: 4530506 - DNA, 25 bp, Homo sapien
taatgtttccacacataattgggct

SEQ ID NO: 4530507 - DNA, 25 bp, Homo sapien
cggaatctttgtccgtgtcttctgc

SEQ ID NO: 4530508 - DNA, 25 bp, Homo sapien
ccttctggttttccgggagctagag

SEQ ID NO: 4530509 - DNA, 25 bp, Homo sapien
ggagctagagcctcaccaaaggaga

SEQ ID NO: 4530510 - DNA, 25 bp, Homo sapien
cttctggttttccgggagctagagc

SEQ ID NO: 4530511 - DNA, 25 bp, Homo sapien
cgggagctagagcctcaccaaagga

SEQ ID NO: 4530512 - DNA, 25 bp, Homo sapien
catcttaaagatcctgctcacaggg

SEQ ID NO: 4530513 - DNA, 25 bp, Homo sapien
tttgttgaccacgagtagatagacc

SEQ ID NO: 4530514 - DNA, 25 bp, Homo sapien
tcagtggtggaccaagacattcctt

SEQ ID NO: 4530515 - DNA, 25 bp, Homo sapien
tgtctgtccctaaagacggagttga

SEQ ID NO: 4530516 - DNA, 25 bp, Homo sapien
catctgggatgcccattctgggatt

SEQ ID NO: 4530517 - DNA, 25 bp, Homo sapien
tctgggatgcccattctgggattca

SEQ ID NO: 4530518 - DNA, 25 bp, Homo sapien
tcatctgggatgcccattctgggat

SEQ ID NO: 4530519 - DNA, 25 bp, Homo sapien
atctgggatgcccattctgggattc

SEQ ID NO: 4530520 - DNA, 25 bp, Homo sapien
gctcctcctccttcttgttctctcc

SEQ ID NO: 4530521 - DNA, 25 bp, Homo sapien
tgacagttcccactgctttttcttt

SEQ ID NO: 4530522 - DNA, 25 bp, Homo sapien
ttctttttctagctcctcctccttc

SEQ ID NO: 4530523 - DNA, 25 bp, Homo sapien
ccatgacagttcccactgctttttc

SEQ ID NO: 4530524 - DNA, 25 bp, Homo sapien
tttgggagcacttcctcactttcag

SEQ ID NO: 4530525 - DNA, 25 bp, Homo sapien
catatttttgggagcacttcctcac

SEQ ID NO: 4530526 - DNA, 25 bp, Homo sapien
ccttcatatttttgggagcacttcc

SEQ ID NO: 4530527 - DNA, 25 bp, Homo sapien
ggccttcatatttttgggagcactt

SEQ ID NO: 4530528 - DNA, 25 bp, Homo sapien
gtagcatgccaatatccagagaatt

SEQ ID NO: 4530529 - DNA, 25 bp, Homo sapien
ccaatatccagagaattggattctg

SEQ ID NO: 4530530 - DNA, 25 bp, Homo sapien
atggacacttaatgtagctggacat

SEQ ID NO: 4530531 - DNA, 25 bp, Homo sapien
tagctggacattgaatgtagcatgc

SEQ ID NO: 4530532 - DNA, 25 bp, Homo sapien
ggctttctttgcatcgatttgggtt

SEQ ID NO: 4530533 - DNA, 25 bp, Homo sapien
gtccaggtgagaatgaagggctttc

SEQ ID NO: 4530534 - DNA, 25 bp, Homo sapien
tctttcgtccaggtgagaatgaagg

SEQ ID NO: 4530535 - DNA, 25 bp, Homo sapien
tgtctccaactctttcgtccaggtg

SEQ ID NO: 4530536 - DNA, 25 bp, Homo sapien
caattctcttgggtttcaaaaggtg

SEQ ID NO: 4530537 - DNA, 25 bp, Homo sapien
gagcctacttctgtgtgtgtttcag

SEQ ID NO: 4530538 - DNA, 25 bp, Homo sapien
aaggtgattgggctgacacagtcca

SEQ ID NO: 4530539 - DNA, 25 bp, Homo sapien
tgtacacagtgtcctcagtatcttc

SEQ ID NO: 4530540 - DNA, 25 bp, Homo sapien
ccttaattcactcctgccctctctg

SEQ ID NO: 4530541 - DNA, 25 bp, Homo sapien
gccctctctgcacaatgactttcga

SEQ ID NO: 4530542 - DNA, 25 bp, Homo sapien
aaacaggttcggctcatatttcagg

SEQ ID NO: 4530543 - DNA, 25 bp, Homo sapien
tatttcaggcggtctcctggccagg

SEQ ID NO: 4530544 - DNA, 25 bp, Homo sapien
tgtcccgggatttgggtagcaggtg

SEQ ID NO: 4530545 - DNA, 25 bp, Homo sapien
cacctgtccgggcgtgtcccgggat

SEQ ID NO: 4530546 - DNA, 25 bp, Homo sapien
tggcgtggctcttttcccgggagct

SEQ ID NO: 4530547 - DNA, 25 bp, Homo sapien
gcctcctttcctggcgtggctcttt

SEQ ID NO: 4530548 - DNA, 25 bp, Homo sapien
ggcgaggagactgtccccctccatt

SEQ ID NO: 4530549 - DNA, 25 bp, Homo sapien
ttcacagcggctccgggaccagtgt

SEQ ID NO: 4530550 - DNA, 25 bp, Homo sapien
tccattgcgtttcacagcggctccg

SEQ ID NO: 4530551 - DNA, 25 bp, Homo sapien
tgtgagccttttgtccatccgggcg

SEQ ID NO: 4530552 - DNA, 25 bp, Homo sapien
ggcatctggaaatttgcggtgtttc

SEQ ID NO: 4530553 - DNA, 25 bp, Homo sapien
gaaatttgcggtgtttcaggaataa

SEQ ID NO: 4530554 - DNA, 25 bp, Homo sapien
ggtaacgtctcccattgctctagcg

SEQ ID NO: 4530555 - DNA, 25 bp, Homo sapien
gcggagttcagatctccaattccag

SEQ ID NO: 4530556 - DNA, 25 bp, Homo sapien
acactgctgttgctcgtgttttctt

SEQ ID NO: 4530557 - DNA, 25 bp, Homo sapien
cactgctgttgctcgtgttttcttc

SEQ ID NO: 4530558 - DNA, 25 bp, Homo sapien
tacactgctgttgctcgtgttttct

SEQ ID NO: 4530559 - DNA, 25 bp, Homo sapien
ctacactgctgttgctcgtgttttc

SEQ ID NO: 4530560 - DNA, 25 bp, Homo sapien
gaaccgcagccttttaacagtagca

SEQ ID NO: 4530561 - DNA, 25 bp, Homo sapien
cttttaacagtagcaattccaagac

SEQ ID NO: 4530562 - DNA, 25 bp, Homo sapien
gaggaaatcagaaatgaaccgcagc

SEQ ID NO: 4530563 - DNA, 25 bp, Homo sapien
gaaatgaaccgcagccttttaacag

SEQ ID NO: 4530564 - DNA, 25 bp, Homo sapien
ttatccgagtcagggctgcattgcc

SEQ ID NO: 4530565 - DNA, 25 bp, Homo sapien
gattgttccggctctcgttacctgt

SEQ ID NO: 4530566 - DNA, 25 bp, Homo sapien
catggtgctcataaatcccgcggca

SEQ ID NO: 4530567 - DNA, 25 bp, Homo sapien
cagaaacaaaagtcgttccgcggtg

SEQ ID NO: 4530568 - DNA, 25 bp, Homo sapien
ggtggggtgcgcagaaaaacaagat

SEQ ID NO: 4530569 - DNA, 25 bp, Homo sapien
tgaaaggtggggtgcgcagaaaaac

SEQ ID NO: 4530570 - DNA, 25 bp, Homo sapien
gaaaaacaagattcgcttcgcaggg

SEQ ID NO: 4530571 - DNA, 25 bp, Homo sapien
gtgggggcggtggaaggagtcagtg

SEQ ID NO: 4530572 - DNA, 25 bp, Homo sapien
agctctggactagacagcagagcca

SEQ ID NO: 4530573 - DNA, 25 bp, Homo sapien
cagcgttctgctctaattgccagca

SEQ ID NO: 4530574 - DNA, 25 bp, Homo sapien
ctctgtgcttgcaagacaggcttgg

SEQ ID NO: 4530575 - DNA, 25 bp, Homo sapien
tctggactagacagcagagccactc

SEQ ID NO: 4530576 - DNA, 25 bp, Homo sapien
ccgcttatagtgcatcccgttcccc

SEQ ID NO: 4530577 - DNA, 25 bp, Homo sapien
tcccgcttatagtgcatcccgttcc

SEQ ID NO: 4530578 - DNA, 25 bp, Homo sapien
ccatcccgcttatagtgcatcccgt

SEQ ID NO: 4530579 - DNA, 25 bp, Homo sapien
catcccgcttatagtgcatcccgtt

SEQ ID NO: 4530580 - DNA, 25 bp, Homo sapien
gcagcctcattatatctaggtgccc

SEQ ID NO: 4530581 - DNA, 25 bp, Homo sapien
ttggtacaccacacacatcgccttt

SEQ ID NO: 4530582 - DNA, 25 bp, Homo sapien
tgttcttaaacggatattggcctca

SEQ ID NO: 4530583 - DNA, 25 bp, Homo sapien
tgagtagttccatttggaaacccag

SEQ ID NO: 4530584 - DNA, 25 bp, Homo sapien
gctcccagcattaattcaatgccat

SEQ ID NO: 4530585 - DNA, 25 bp, Homo sapien
tagaattctcaagtctttgggcttc

SEQ ID NO: 4530586 - DNA, 25 bp, Homo sapien
tcaatgccatattcctggttaccag

SEQ ID NO: 4530587 - DNA, 25 bp, Homo sapien
atcaagtctctgggccttagaattc

SEQ ID NO: 4530588 - DNA, 25 bp, Homo sapien
ggaaggtccctcctttgacagctgc

SEQ ID NO: 4530589 - DNA, 25 bp, Homo sapien
gggtggacggaagacacagactttc

SEQ ID NO: 4530590 - DNA, 25 bp, Homo sapien
ggcctgctagctaatggagaacttg

SEQ ID NO: 4530591 - DNA, 25 bp, Homo sapien
aatctgctccgggttaacaggcccg

SEQ ID NO: 4530592 - DNA, 25 bp, Homo sapien
tcctaaacacgagccaattgccaag

SEQ ID NO: 4530593 - DNA, 25 bp, Homo sapien
taaacccgagataggagcaagtgcc

SEQ ID NO: 4530594 - DNA, 25 bp, Homo sapien
gaaaagtcctttattctggcagagg

SEQ ID NO: 4530595 - DNA, 25 bp, Homo sapien
gaataatttccttagccggttgaca

SEQ ID NO: 4530596 - DNA, 25 bp, Homo sapien
tttaacataacgtcacagtcctcat

SEQ ID NO: 4530597 - DNA, 25 bp, Homo sapien
tttttaacataacgtcacagtcctc

SEQ ID NO: 4530598 - DNA, 25 bp, Homo sapien
atatttattaccgctttttgtgact

SEQ ID NO: 4530599 - DNA, 25 bp, Homo sapien
taacataacgtcacagtcctcatac

SEQ ID NO: 4530600 - DNA, 25 bp, Homo sapien
catttatggaggaacaaaggccggg

SEQ ID NO: 4530601 - DNA, 25 bp, Homo sapien
ttcttctagtgaggaacacgtgctg

SEQ ID NO: 4530602 - DNA, 25 bp, Homo sapien
tttgaggcaacataacggcgtgatc

SEQ ID NO: 4530603 - DNA, 25 bp, Homo sapien
tttttgtgttgaggaaagctgccca

SEQ ID NO: 4530604 - DNA, 25 bp, Homo sapien
ggacagaattgtctcagtcagccca

SEQ ID NO: 4530605 - DNA, 25 bp, Homo sapien
tacatggacagaattgtctcagtca

SEQ ID NO: 4530606 - DNA, 25 bp, Homo sapien
cttgttgcattggtcctctgttgct

SEQ ID NO: 4530607 - DNA, 25 bp, Homo sapien
tgttgcattggtcctctgttgcttg

SEQ ID NO: 4530608 - DNA, 25 bp, Homo sapien
tctgtgctgacatagtcattccagg

SEQ ID NO: 4530609 - DNA, 25 bp, Homo sapien
taggaccaccctgagaaacgtagtc

SEQ ID NO: 4530610 - DNA, 25 bp, Homo sapien
gggtccatgtcttaattgagtaggg

SEQ ID NO: 4530611 - DNA, 25 bp, Homo sapien
aaacgtagtcccctggcatgctctg

SEQ ID NO: 4530612 - DNA, 25 bp, Homo sapien
cagacattcaaattgtagtttgcat

SEQ ID NO: 4530613 - DNA, 25 bp, Homo sapien
gtttgcagacattcaaattgtagtt

SEQ ID NO: 4530614 - DNA, 25 bp, Homo sapien
atgtttgcagacattcaaattgtag

SEQ ID NO: 4530615 - DNA, 25 bp, Homo sapien
tgcagacattcaaattgtagtttgc

SEQ ID NO: 4530616 - DNA, 25 bp, Homo sapien
gaacagatgtttttgacactgtaag

SEQ ID NO: 4530617 - DNA, 25 bp, Homo sapien
gacactgtaagctggtaatctaaag

SEQ ID NO: 4530618 - DNA, 25 bp, Homo sapien
tgtttttgacactgtaagctggtaa

SEQ ID NO: 4530619 - DNA, 25 bp, Homo sapien
ttttgacactgtaagctggtaatct

SEQ ID NO: 4530620 - DNA, 25 bp, Homo sapien
catcaatggtgtgccgtggtgaccc

SEQ ID NO: 4530621 - DNA, 25 bp, Homo sapien
tgtttattctaccacagcagcctgc

SEQ ID NO: 4530622 - DNA, 25 bp, Homo sapien
tctcatgtcggaagtcagtaggcac

SEQ ID NO: 4530623 - DNA, 25 bp, Homo sapien
gggtttcttaatccaactgcagcca

SEQ ID NO: 4530624 - DNA, 25 bp, Homo sapien
tgcttaaaacacacgcaggcttgtc

SEQ ID NO: 4530625 - DNA, 25 bp, Homo sapien
tgatagtgaagacagatcgcacccg

SEQ ID NO: 4530626 - DNA, 25 bp, Homo sapien
taatttctctcagtcaactggtgcc

SEQ ID NO: 4530627 - DNA, 25 bp, Homo sapien
taaataggctaaaaggcagtcccac

SEQ ID NO: 4530628 - DNA, 25 bp, Homo sapien
tgctttgcgattgctttacatgatg

SEQ ID NO: 4530629 - DNA, 25 bp, Homo sapien
ttgcgattgctttacatgatgaagg

SEQ ID NO: 4530630 - DNA, 25 bp, Homo sapien
ctttgcgattgctttacatgatgaa

SEQ ID NO: 4530631 - DNA, 25 bp, Homo sapien
cttgctttgcgattgctttacatga

SEQ ID NO: 4530632 - DNA, 25 bp, Homo sapien
ttcatgcccattccactcataggtc

SEQ ID NO: 4530633 - DNA, 25 bp, Homo sapien
tgtagtgccattgcccatccatgcc

SEQ ID NO: 4530634 - DNA, 25 bp, Homo sapien
atccatgcccatattcatgcccatt

SEQ ID NO: 4530635 - DNA, 25 bp, Homo sapien
tacatgtagtgccattgcccatcca

SEQ ID NO: 4530636 - DNA, 25 bp, Homo sapien
cacccaatgtaaagaaagcaggcag

SEQ ID NO: 4530637 - DNA, 25 bp, Homo sapien
caccatgacagtgggatagtagagt

SEQ ID NO: 4530638 - DNA, 25 bp, Homo sapien
ggcaaatgttaaacccaccatgaca

SEQ ID NO: 4530639 - DNA, 25 bp, Homo sapien
gaagaggccggaaaatcagcaataa

SEQ ID NO: 4530640 - DNA, 25 bp, Homo sapien
ctctggactatatgctgctccttgg

SEQ ID NO: 4530641 - DNA, 25 bp, Homo sapien
accatccaacacaaagctccccatg

SEQ ID NO: 4530642 - DNA, 25 bp, Homo sapien
tgcaggccggatccccatgtgttgc

SEQ ID NO: 4530643 - DNA, 25 bp, Homo sapien
ggctgaccctctggactatatgctg

SEQ ID NO: 4530644 - DNA, 25 bp, Homo sapien
gaggatttgtgcctgtgggacataa

SEQ ID NO: 4530645 - DNA, 25 bp, Homo sapien
tgtgcctgtgggacataaatataga

SEQ ID NO: 4530646 - DNA, 25 bp, Homo sapien
cataaatatagatactacttggaac

SEQ ID NO: 4530647 - DNA, 25 bp, Homo sapien
gatttgtgcctgtgggacataaata

SEQ ID NO: 4530648 - DNA, 25 bp, Homo sapien
ttgactggtcaatcatgggctgtac

SEQ ID NO: 4530649 - DNA, 25 bp, Homo sapien
tttgactggtcaatcatgggctgta

SEQ ID NO: 4530650 - DNA, 25 bp, Homo sapien
tgactggtcaatcatgggctgtact

SEQ ID NO: 4530651 - DNA, 25 bp, Homo sapien
aagtccagtcatcatactccgtttc

SEQ ID NO: 4530652 - DNA, 25 bp, Homo sapien
ccagtcatcatactccgtttctgta

SEQ ID NO: 4530653 - DNA, 25 bp, Homo sapien
tttctgtactctgcgaacacctttg

SEQ ID NO: 4530654 - DNA, 25 bp, Homo sapien
actccgtttctgtactctgcgaaca

SEQ ID NO: 4530655 - DNA, 25 bp, Homo sapien
gttcacaggctggaagactttcccc

SEQ ID NO: 4530656 - DNA, 25 bp, Homo sapien
caacttgctagaagagctcagggac

SEQ ID NO: 4530657 - DNA, 25 bp, Homo sapien
gactgggtaatctccgtcgtcactg

SEQ ID NO: 4530658 - DNA, 25 bp, Homo sapien
gtcgtcactgcgtagtcaactccaa

SEQ ID NO: 4530659 - DNA, 25 bp, Homo sapien
tattgttaggtcagcaaagccatca

SEQ ID NO: 4530660 - DNA, 25 bp, Homo sapien
tctgaagttttatcaccaacacagc

SEQ ID NO: 4530661 - DNA, 25 bp, Homo sapien
cagcagtaataagtgctggccagaa

SEQ ID NO: 4530662 - DNA, 25 bp, Homo sapien
agaaagacttctgctcttcggcaac

SEQ ID NO: 4530663 - DNA, 25 bp, Homo sapien
gcacagggggacttcatgattaatg

SEQ ID NO: 4530664 - DNA, 25 bp, Homo sapien
ttcagatcttaagcacagggggact

SEQ ID NO: 4530665 - DNA, 25 bp, Homo sapien
aaaatatacccattgataacatctg

SEQ ID NO: 4530666 - DNA, 25 bp, Homo sapien
tatacccattgataacatctgtcaa

SEQ ID NO: 4530667 - DNA, 25 bp, Homo sapien
tgtgttccgaggaagctgaagtccc

SEQ ID NO: 4530668 - DNA, 25 bp, Homo sapien
gcagctctgtgttccgaggaagctg

SEQ ID NO: 4530669 - DNA, 25 bp, Homo sapien
acagtcaggccccactcggtcgggc

SEQ ID NO: 4530670 - DNA, 25 bp, Homo sapien
ttccgaggaagctgaagtccctttg

SEQ ID NO: 4530671 - DNA, 25 bp, Homo sapien
ccaaaggagtcttttgcatatggtg

SEQ ID NO: 4530672 - DNA, 25 bp, Homo sapien
cttaagaaagtgtagctcagttgtc

SEQ ID NO: 4530673 - DNA, 25 bp, Homo sapien
ccaggaaccgtttttatcagctcac

SEQ ID NO: 4530674 - DNA, 25 bp, Homo sapien
gcaaccaaggaggactgacctgata

SEQ ID NO: 4530675 - DNA, 25 bp, Homo sapien
agatgctcaggagggtcagagaagg

SEQ ID NO: 4530676 - DNA, 25 bp, Homo sapien
aaagcattctgtgagctagcaggtc

SEQ ID NO: 4530677 - DNA, 25 bp, Homo sapien
tcactagcagttatggcaatggcct

SEQ ID NO: 4530678 - DNA, 25 bp, Homo sapien
cattagtaaaaacgaggtccgctca

SEQ ID NO: 4530679 - DNA, 25 bp, Homo sapien
taatagaggacaacactcggcaggg

SEQ ID NO: 4530680 - DNA, 25 bp, Homo sapien
gatgttccaagaatcacgaggcctt

SEQ ID NO: 4530681 - DNA, 25 bp, Homo sapien
ccttgctgaagagctatttcccaga

SEQ ID NO: 4530682 - DNA, 25 bp, Homo sapien
ttttgttagaaagtgcaggcctcca

SEQ ID NO: 4530683 - DNA, 25 bp, Homo sapien
tggtaaccaactccttttggaggca

SEQ ID NO: 4530684 - DNA, 25 bp, Homo sapien
gaatcaagaatagctggaattgaag

SEQ ID NO: 4530685 - DNA, 25 bp, Homo sapien
ggaattgaagattctgcatggattg

SEQ ID NO: 4530686 - DNA, 25 bp, Homo sapien
ctgaggaggaatcaagaatagctgg

SEQ ID NO: 4530687 - DNA, 25 bp, Homo sapien
gaattgaagattctgcatggattgc

SEQ ID NO: 4530688 - DNA, 25 bp, Homo sapien
ctttgaagatgaacttgggcacgca

SEQ ID NO: 4530689 - DNA, 25 bp, Homo sapien
cagacaaccgtgagcaaagtaaggt

SEQ ID NO: 4530690 - DNA, 25 bp, Homo sapien
caaatgatggagtcatgtcgcagac

SEQ ID NO: 4530691 - DNA, 25 bp, Homo sapien
aaaggcgtaggtagctcagtgaccg

SEQ ID NO: 4530692 - DNA, 25 bp, Homo sapien
cccagcaggttacgattttgaagca

SEQ ID NO: 4530693 - DNA, 25 bp, Homo sapien
cacacttgatggcatgtaacaaaac

SEQ ID NO: 4530694 - DNA, 25 bp, Homo sapien
tatctctcaggcatggataggagaa

SEQ ID NO: 4530695 - DNA, 25 bp, Homo sapien
tgcagatggaagtcaactagaaact

SEQ ID NO: 4530696 - DNA, 25 bp, Homo sapien
gaagatgtaggctgattctcccata

SEQ ID NO: 4530697 - DNA, 25 bp, Homo sapien
aatgtcactcctttgatctggcaag

SEQ ID NO: 4530698 - DNA, 25 bp, Homo sapien
tcaagccctcaagtggacaagtagt

SEQ ID NO: 4530699 - DNA, 25 bp, Homo sapien
tgtttgaagagatcaaggtgcactc

SEQ ID NO: 4530700 - DNA, 25 bp, Homo sapien
tcttggccctaacaaagctctcagg

SEQ ID NO: 4530701 - DNA, 25 bp, Homo sapien
ggcagaaccacaaaatccaggagaa

SEQ ID NO: 4530702 - DNA, 25 bp, Homo sapien
ggcatctcctttgacgctcaccttt

SEQ ID NO: 4530703 - DNA, 25 bp, Homo sapien
gctctgacaactgcaacagggtttt

SEQ ID NO: 4530704 - DNA, 25 bp, Homo sapien
gatgaccacatttgaactgcttcct

SEQ ID NO: 4530705 - DNA, 25 bp, Homo sapien
caccaacctatgatgaccacatttg

SEQ ID NO: 4530706 - DNA, 25 bp, Homo sapien
tttggtgccaccaacctatgatgac

SEQ ID NO: 4530707 - DNA, 25 bp, Homo sapien
agtgagtttctatttttggtgccac

SEQ ID NO: 4530708 - DNA, 25 bp, Homo sapien
tagagatgccctatcaaccaagtgg

SEQ ID NO: 4530709 - DNA, 25 bp, Homo sapien
gatacactgtgagaagtcatcagcc

SEQ ID NO: 4530710 - DNA, 25 bp, Homo sapien
tcattgagagctgggtaaacgtcca

SEQ ID NO: 4530711 - DNA, 25 bp, Homo sapien
ttatattgacatgactttccccgag

SEQ ID NO: 4530712 - DNA, 25 bp, Homo sapien
gtgtgtgtttcccaatgagagactg

SEQ ID NO: 4530713 - DNA, 25 bp, Homo sapien
gtattcatagatgctttctctaggg

SEQ ID NO: 4530714 - DNA, 25 bp, Homo sapien
gtttcccaatgagagactgggtttg

SEQ ID NO: 4530715 - DNA, 25 bp, Homo sapien
ctcctccacgttcacagaattgtat

SEQ ID NO: 4530716 - DNA, 25 bp, Homo sapien
gctgtaaagcaccagtccagaccgg

SEQ ID NO: 4530717 - DNA, 25 bp, Homo sapien
cagcttcgatctggaaaacatggct

SEQ ID NO: 4530718 - DNA, 25 bp, Homo sapien
ttaacacgcaatctggtagaggttc

SEQ ID NO: 4530719 - DNA, 25 bp, Homo sapien
tatctgaccatgactggccaagtcg

SEQ ID NO: 4530720 - DNA, 25 bp, Homo sapien
gggaaggtgctgtgcatgtgaatgt

SEQ ID NO: 4530721 - DNA, 25 bp, Homo sapien
atacttcagaagaccagattggcat

SEQ ID NO: 4530722 - DNA, 25 bp, Homo sapien
atttgtctggggatctcttttttct

SEQ ID NO: 4530723 - DNA, 25 bp, Homo sapien
tttgtctggggatctcttttttcta

SEQ ID NO: 4530724 - DNA, 25 bp, Homo sapien
tatgataaccatggctgaaccaaaa

SEQ ID NO: 4530725 - DNA, 25 bp, Homo sapien
atgataaccatggctgaaccaaaat

SEQ ID NO: 4530726 - DNA, 25 bp, Homo sapien
ggatccttaaatgcagactgtaact

SEQ ID NO: 4530727 - DNA, 25 bp, Homo sapien
tgcagactgtaactgtcctaaaaat

SEQ ID NO: 4530728 - DNA, 25 bp, Homo sapien
tgtcctaaaaattccgacttcttga

SEQ ID NO: 4530729 - DNA, 25 bp, Homo sapien
cagcctgtccatcaggatccttaaa

SEQ ID NO: 4530730 - DNA, 25 bp, Homo sapien
catcaaggaccttatcaggaagtaa

SEQ ID NO: 4530731 - DNA, 25 bp, Homo sapien
gagtaggaattctttacacacagag

SEQ ID NO: 4530732 - DNA, 25 bp, Homo sapien
ttcagggtcaatgacagagggaagc

SEQ ID NO: 4530733 - DNA, 25 bp, Homo sapien
gagaagtccataccagagacatgag

SEQ ID NO: 4530734 - DNA, 25 bp, Homo sapien
cgcttaatttctggagggcacaaaa

SEQ ID NO: 4530735 - DNA, 25 bp, Homo sapien
gtcacaattttgtctgctgcaacag

SEQ ID NO: 4530736 - DNA, 25 bp, Homo sapien
tgaaccaaggaggaagcaatgcaag

SEQ ID NO: 4530737 - DNA, 25 bp, Homo sapien
gcaagtatagcagttttccaatgat

SEQ ID NO: 4530738 - DNA, 25 bp, Homo sapien
ctagctgagattctttagtatgacc

SEQ ID NO: 4530739 - DNA, 25 bp, Homo sapien
gaaactggtagatcaccactagctg

SEQ ID NO: 4530740 - DNA, 25 bp, Homo sapien
aagcatgttgatatagatcatgcgc

SEQ ID NO: 4530741 - DNA, 25 bp, Homo sapien
accaggaagcatgttgatatagatc

SEQ ID NO: 4530742 - DNA, 25 bp, Homo sapien
gggaagcacaaaataccgtagctgt

SEQ ID NO: 4530743 - DNA, 25 bp, Homo sapien
tcccatgcgttctagaggctctcct

SEQ ID NO: 4530744 - DNA, 25 bp, Homo sapien
tccctccatacaggtttggctgaaa

SEQ ID NO: 4530745 - DNA, 25 bp, Homo sapien
gttttaaacagcaagccatgccatg

SEQ ID NO: 4530746 - DNA, 25 bp, Homo sapien
gcaagagtagatatacagtgggcta

SEQ ID NO: 4530747 - DNA, 25 bp, Homo sapien
cagtgggctataaataatggcggga

SEQ ID NO: 4530748 - DNA, 25 bp, Homo sapien
tgaatggctgccaactaccacagag

SEQ ID NO: 4530749 - DNA, 25 bp, Homo sapien
tactcctggcacaagaccagtcttg

SEQ ID NO: 4530750 - DNA, 25 bp, Homo sapien
tacaaggcttactgtgggtgccaag

SEQ ID NO: 4530751 - DNA, 25 bp, Homo sapien
catgggcaacgtccttacgaagaga

SEQ ID NO: 4530752 - DNA, 25 bp, Homo sapien
tgacatcttcgctcgtttgccgctg

SEQ ID NO: 4530753 - DNA, 25 bp, Homo sapien
gatgcacgtttatggctcagagacc

SEQ ID NO: 4530754 - DNA, 25 bp, Homo sapien
tggacagaacacctactgcatacaa

SEQ ID NO: 4530755 - DNA, 25 bp, Homo sapien
ttatgtaagtcagagccagggtcgt

SEQ ID NO: 4530756 - DNA, 25 bp, Homo sapien
tgaaaacaacccacacgactctggt

SEQ ID NO: 4530757 - DNA, 25 bp, Homo sapien
tactacaaggttgtccctggacaga

SEQ ID NO: 4530758 - DNA, 25 bp, Homo sapien
cactgtgcaactgatgtaaataaac

SEQ ID NO: 4530759 - DNA, 25 bp, Homo sapien
cccaattgcggtttgacaggtgggc

SEQ ID NO: 4530760 - DNA, 25 bp, Homo sapien
gcaggtcttgataattatggccaga

SEQ ID NO: 4530761 - DNA, 25 bp, Homo sapien
tatggccagacatcttaacactgtg

SEQ ID NO: 4530762 - DNA, 25 bp, Homo sapien
tatctcaagagctccaaaaagcatc

SEQ ID NO: 4530763 - DNA, 25 bp, Homo sapien
gaatacctgcaatacctggatgata

SEQ ID NO: 4530764 - DNA, 25 bp, Homo sapien
taattatgtaaacggatatctcaag

SEQ ID NO: 4530765 - DNA, 25 bp, Homo sapien
aaaagcatctgaattggccatttga

SEQ ID NO: 4530766 - DNA, 25 bp, Homo sapien
tcatgaactgtaggtgcttcctctt

SEQ ID NO: 4530767 - DNA, 25 bp, Homo sapien
tgaactgtaggtgcttcctcttcta

SEQ ID NO: 4530768 - DNA, 25 bp, Homo sapien
tctttacaatttcatgaactgtagg

SEQ ID NO: 4530769 - DNA, 25 bp, Homo sapien
caatttcatgaactgtaggtgcttc

SEQ ID NO: 4530770 - DNA, 25 bp, Homo sapien
aaccgatagttaatagtgaggccag

SEQ ID NO: 4530771 - DNA, 25 bp, Homo sapien
gagttactttttggagctcctacca

SEQ ID NO: 4530772 - DNA, 25 bp, Homo sapien
gatgtgacccatatttgagaagagt

SEQ ID NO: 4530773 - DNA, 25 bp, Homo sapien
ccaagttcaggtccaaaccgatagt

SEQ ID NO: 4530774 - DNA, 25 bp, Homo sapien
cactagttttgatagattccctgac

SEQ ID NO: 4530775 - DNA, 25 bp, Homo sapien
caccactctgaaataaaccacgtag

SEQ ID NO: 4530776 - DNA, 25 bp, Homo sapien
aaaaagcctatagcagcaaactcag

SEQ ID NO: 4530777 - DNA, 25 bp, Homo sapien
gaaagttgcctgagttacctgcctg

SEQ ID NO: 4530778 - DNA, 25 bp, Homo sapien
tcaaagctgtaatcctgctgggcat

SEQ ID NO: 4530779 - DNA, 25 bp, Homo sapien
gagaagtccatgacccagcaaaggt

SEQ ID NO: 4530780 - DNA, 25 bp, Homo sapien
agatcagaccttgactgagggccca

SEQ ID NO: 4530781 - DNA, 25 bp, Homo sapien
tcagcatcagagcagtgcggctttc

SEQ ID NO: 4530782 - DNA, 25 bp, Homo sapien
gccatccagtaatatattcagccca

SEQ ID NO: 4530783 - DNA, 25 bp, Homo sapien
taaaaccaaggttacaacagcaata

SEQ ID NO: 4530784 - DNA, 25 bp, Homo sapien
ctatgatgtttttgttcagcctccc

SEQ ID NO: 4530785 - DNA, 25 bp, Homo sapien
aaaacatctcaattcagtgtcttag

SEQ ID NO: 4530786 - DNA, 25 bp, Homo sapien
ggcttgtccaaaagtgagtgcaatt

SEQ ID NO: 4530787 - DNA, 25 bp, Homo sapien
caaacggtgaacaagcaacccatga

SEQ ID NO: 4530788 - DNA, 25 bp, Homo sapien
cctgagggaggtgcattttcttaat

SEQ ID NO: 4530789 - DNA, 25 bp, Homo sapien
tagtcaggactggatggataacaag

SEQ ID NO: 4530790 - DNA, 25 bp, Homo sapien
cattccacctaacacaaacacggaa

SEQ ID NO: 4530791 - DNA, 25 bp, Homo sapien
cacaaacacggaaacacagaatcca

SEQ ID NO: 4530792 - DNA, 25 bp, Homo sapien
gggaacatcacaggataacaggaaa

SEQ ID NO: 4530793 - DNA, 25 bp, Homo sapien
agaatccatgggaacatcacaggat

SEQ ID NO: 4530794 - DNA, 25 bp, Homo sapien
tatgcttatccatcagactactgga

SEQ ID NO: 4530795 - DNA, 25 bp, Homo sapien
tgagtatgcttatccatcagactac

SEQ ID NO: 4530796 - DNA, 25 bp, Homo sapien
cattgtgttgcatgcaggttgagta

SEQ ID NO: 4530797 - DNA, 25 bp, Homo sapien
aggttgagtatgcttatccatcaga

SEQ ID NO: 4530798 - DNA, 25 bp, Homo sapien
ttgcatttacaagccccctttctat

SEQ ID NO: 4530799 - DNA, 25 bp, Homo sapien
tgtttaaattttgcatttacaagcc

SEQ ID NO: 4530800 - DNA, 25 bp, Homo sapien
cctttcaatagcttctaatttaggg

SEQ ID NO: 4530801 - DNA, 25 bp, Homo sapien
cttcctttcaatagcttctaattta

SEQ ID NO: 4530802 - DNA, 25 bp, Homo sapien
tgaatcagttgctatgggataattg

SEQ ID NO: 4530803 - DNA, 25 bp, Homo sapien
tgtgtaatatttgcaatgagttatc

SEQ ID NO: 4530804 - DNA, 25 bp, Homo sapien
gaatcagttgctatgggataattgt

SEQ ID NO: 4530805 - DNA, 25 bp, Homo sapien
taacaaatggccgcggtggaaattg

SEQ ID NO: 4530806 - DNA, 25 bp, Homo sapien
gatggcagctatgcgtttaacaaat

SEQ ID NO: 4530807 - DNA, 25 bp, Homo sapien
ctggcaaatctgacttgagattcaa

SEQ ID NO: 4530808 - DNA, 25 bp, Homo sapien
ctgaagatggcagctatgcgtttaa

SEQ ID NO: 4530809 - DNA, 25 bp, Homo sapien
tgtaagtcctgtgtcttgcgctaac

SEQ ID NO: 4530810 - DNA, 25 bp, Homo sapien
tgtcttgcgctaactgtttcttctg

SEQ ID NO: 4530811 - DNA, 25 bp, Homo sapien
tctgctcttcggaagggtacggatg

SEQ ID NO: 4530812 - DNA, 25 bp, Homo sapien
cagttgtttacttggagaattgtaa

SEQ ID NO: 4530813 - DNA, 25 bp, Homo sapien
taaaagatggatcagaagttaagaa

SEQ ID NO: 4530814 - DNA, 25 bp, Homo sapien
tctttagtctatggcttgattttcc

SEQ ID NO: 4530815 - DNA, 25 bp, Homo sapien
ttctttagtctatggcttgattttc

SEQ ID NO: 4530816 - DNA, 25 bp, Homo sapien
atttctttagtctatggcttgattt

SEQ ID NO: 4530817 - DNA, 25 bp, Homo sapien
tttctttagtctatggcttgatttt

SEQ ID NO: 4530818 - DNA, 25 bp, Homo sapien
gaaaataaggatgcatcacaagagt

SEQ ID NO: 4530819 - DNA, 25 bp, Homo sapien
agattactggagagccaattccttc

SEQ ID NO: 4530820 - DNA, 25 bp, Homo sapien
tagaaatttagtcaaatggccacag

SEQ ID NO: 4530821 - DNA, 25 bp, Homo sapien
tgcattttatcttgggaatccctga

SEQ ID NO: 4530822 - DNA, 25 bp, Homo sapien
agtatatttcaaatggtgtgggatc

SEQ ID NO: 4530823 - DNA, 25 bp, Homo sapien
ggagagtatatttcaaatggtgtgg

SEQ ID NO: 4530824 - DNA, 25 bp, Homo sapien
tatatttcaaatggtgtgggatcaa

SEQ ID NO: 4530825 - DNA, 25 bp, Homo sapien
agagtatatttcaaatggtgtggga

SEQ ID NO: 4530826 - DNA, 25 bp, Homo sapien
tcaactgattagtaaatggagcacc

SEQ ID NO: 4530827 - DNA, 25 bp, Homo sapien
aacattgtctatctttgggccccat

SEQ ID NO: 4530828 - DNA, 25 bp, Homo sapien
gacagagcaaggtactgccacaaca

SEQ ID NO: 4530829 - DNA, 25 bp, Homo sapien
cctctgcagtgaaagttaaactaaa

SEQ ID NO: 4530830 - DNA, 25 bp, Homo sapien
gatgcctggtatgttgtggctttcg

SEQ ID NO: 4530831 - DNA, 25 bp, Homo sapien
ttgacccatatccagcataatgtga

SEQ ID NO: 4530832 - DNA, 25 bp, Homo sapien
tcgcagaagaacttaagtttgaccc

SEQ ID NO: 4530833 - DNA, 25 bp, Homo sapien
gaatgatggtcaaaactctctagca

SEQ ID NO: 4530834 - DNA, 25 bp, Homo sapien
tagattccaagttttgaacagttcc

SEQ ID NO: 4530835 - DNA, 25 bp, Homo sapien
ctttgggaagcagcccactctgcag

SEQ ID NO: 4530836 - DNA, 25 bp, Homo sapien
tcattttgaggagggctaattcttt

SEQ ID NO: 4530837 - DNA, 25 bp, Homo sapien
taggctatccaagtgggaatttggc

SEQ ID NO: 4530838 - DNA, 25 bp, Homo sapien
tatttggatgctgctgcctctttaa

SEQ ID NO: 4530839 - DNA, 25 bp, Homo sapien
gatgctgctgcctctttaaagctta

SEQ ID NO: 4530840 - DNA, 25 bp, Homo sapien
ctttaaagcttagatctgcattctt

SEQ ID NO: 4530841 - DNA, 25 bp, Homo sapien
tgcctctttaaagcttagatctgca

SEQ ID NO: 4530842 - DNA, 25 bp, Homo sapien
atccagtatcagatggatatggcat

SEQ ID NO: 4530843 - DNA, 25 bp, Homo sapien
aatccagtatcagatggatatggca

SEQ ID NO: 4530844 - DNA, 25 bp, Homo sapien
ggttccttatccgatatgatactag

SEQ ID NO: 4530845 - DNA, 25 bp, Homo sapien
gctccttatttatagggagactagg

SEQ ID NO: 4530846 - DNA, 25 bp, Homo sapien
cagtgtgaggctttgatatgtgagt

SEQ ID NO: 4530847 - DNA, 25 bp, Homo sapien
tcaactgagtaaaggaattccaccc

SEQ ID NO: 4530848 - DNA, 25 bp, Homo sapien
tagatctccaaacttactcattcag

SEQ ID NO: 4530849 - DNA, 25 bp, Homo sapien
gagtttaactcttttagtatccaca

SEQ ID NO: 4530850 - DNA, 25 bp, Homo sapien
ggattactaactacagttaccatgc

SEQ ID NO: 4530851 - DNA, 25 bp, Homo sapien
ttagtatccacatatgagaccatgc

SEQ ID NO: 4530852 - DNA, 25 bp, Homo sapien
tacctcttcatggttcactcttggt

SEQ ID NO: 4530853 - DNA, 25 bp, Homo sapien
taagaatacctatctgttggtcctc

SEQ ID NO: 4530854 - DNA, 25 bp, Homo sapien
agtgaagcccttaggtcctagactt

SEQ ID NO: 4530855 - DNA, 25 bp, Homo sapien
ttattggcacaaaattgctcatagc

SEQ ID NO: 4530856 - DNA, 25 bp, Homo sapien
tcacacagggtcagctcggactaca

SEQ ID NO: 4530857 - DNA, 25 bp, Homo sapien
taggcccagatatggtctctgccca

SEQ ID NO: 4530858 - DNA, 25 bp, Homo sapien
tctctgcccaaggttcctttacttc

SEQ ID NO: 4530859 - DNA, 25 bp, Homo sapien
cggactacaactgccttaggcccag

SEQ ID NO: 4530860 - DNA, 25 bp, Homo sapien
ggtctgccagattaactctgcttgg

SEQ ID NO: 4530861 - DNA, 25 bp, Homo sapien
tagtgacaagtgttacaaattcaga

SEQ ID NO: 4530862 - DNA, 25 bp, Homo sapien
tagtcactgaattgctagtcggctt

SEQ ID NO: 4530863 - DNA, 25 bp, Homo sapien
tatagttttaccagaggctccttaa

SEQ ID NO: 4530864 - DNA, 25 bp, Homo sapien
tcaatgaataggtagtaggaggagt

SEQ ID NO: 4530865 - DNA, 25 bp, Homo sapien
aacaggaaacaagggtgatcctatc

SEQ ID NO: 4530866 - DNA, 25 bp, Homo sapien
aagccattacgttcttttctttcat

SEQ ID NO: 4530867 - DNA, 25 bp, Homo sapien
tggcaaagccattacgttcttttct

SEQ ID NO: 4530868 - DNA, 25 bp, Homo sapien
ctgaacaggaaacaagggtgatcct

SEQ ID NO: 4530869 - DNA, 25 bp, Homo sapien
ctgtttctttcttagtaggtcaaat

SEQ ID NO: 4530870 - DNA, 25 bp, Homo sapien
tttcttcagagtaaagtcaaggaat

SEQ ID NO: 4530871 - DNA, 25 bp, Homo sapien
ttctttcttagtaggtcaaatatca

SEQ ID NO: 4530872 - DNA, 25 bp, Homo sapien
cagagtaaagtcaaggaatttaaag

SEQ ID NO: 4530873 - DNA, 25 bp, Homo sapien
cagtttcatctggttaggttggccc

SEQ ID NO: 4530874 - DNA, 25 bp, Homo sapien
ccataagaaagacgctaaggacttc

SEQ ID NO: 4530875 - DNA, 25 bp, Homo sapien
cttgaagcgtactgctctgagggct

SEQ ID NO: 4530876 - DNA, 25 bp, Homo sapien
tgagggcttccgtattacgccaaac

SEQ ID NO: 4530877 - DNA, 25 bp, Homo sapien
ggtagcaacttgacccatcctgcag

SEQ ID NO: 4530878 - DNA, 25 bp, Homo sapien
tcagacactgggcatacagcaagga

SEQ ID NO: 4530879 - DNA, 25 bp, Homo sapien
taggcctcagtgtctcaattggttg

SEQ ID NO: 4530880 - DNA, 25 bp, Homo sapien
caaatctggcgtgatagctaaggca

SEQ ID NO: 4530881 - DNA, 25 bp, Homo sapien
catattctcccatcccttgaatttt

SEQ ID NO: 4530882 - DNA, 25 bp, Homo sapien
ttcacttctaccagatcctttcttc

SEQ ID NO: 4530883 - DNA, 25 bp, Homo sapien
tcaatctcttcacttctaccagatc

SEQ ID NO: 4530884 - DNA, 25 bp, Homo sapien
gtttacaaacgtgcatgagcatacc

SEQ ID NO: 4530885 - DNA, 25 bp, Homo sapien
tatctcagccttgatggaagcaatg

SEQ ID NO: 4530886 - DNA, 25 bp, Homo sapien
tagtgaagtacttgcccgcagaagg

SEQ ID NO: 4530887 - DNA, 25 bp, Homo sapien
tagtcaggcccaaaaccctagcagt

SEQ ID NO: 4530888 - DNA, 25 bp, Homo sapien
cagctactaccttggacccttgaga

SEQ ID NO: 4530889 - DNA, 25 bp, Homo sapien
ccacaaagatttttccttgaatgac

SEQ ID NO: 4530890 - DNA, 25 bp, Homo sapien
tttccttgaatgactgaccacagct

SEQ ID NO: 4530891 - DNA, 25 bp, Homo sapien
tttttccttgaatgactgaccacag

SEQ ID NO: 4530892 - DNA, 25 bp, Homo sapien
gatttttccttgaatgactgaccac

SEQ ID NO: 4530893 - DNA, 25 bp, Homo sapien
tagtttggcacccacagagggagcc

SEQ ID NO: 4530894 - DNA, 25 bp, Homo sapien
ttagtttggcacccacagagggagc

SEQ ID NO: 4530895 - DNA, 25 bp, Homo sapien
agggagcccagagcaaaccaacctg

SEQ ID NO: 4530896 - DNA, 25 bp, Homo sapien
cagagggagcccagagcaaaccaac

SEQ ID NO: 4530897 - DNA, 25 bp, Homo sapien
tcacttagatacgaacatgttggac

SEQ ID NO: 4530898 - DNA, 25 bp, Homo sapien
tattgttccccatgatacagtgtgc

SEQ ID NO: 4530899 - DNA, 25 bp, Homo sapien
tggactccatatgacacttgctgta

SEQ ID NO: 4530900 - DNA, 25 bp, Homo sapien
gagaccctccctctagcctaaatgg

SEQ ID NO: 4530901 - DNA, 25 bp, Homo sapien
gaagtaagccgtcaccagacactga

SEQ ID NO: 4530902 - DNA, 25 bp, Homo sapien
tctacaccgggaagtaagccgtcac

SEQ ID NO: 4530903 - DNA, 25 bp, Homo sapien
tattgagacggctgtctctacaccg

SEQ ID NO: 4530904 - DNA, 25 bp, Homo sapien
tatgaggacatattgagacggctgt

SEQ ID NO: 4530905 - DNA, 25 bp, Homo sapien
tagaagaggaatttaacggcatgac

SEQ ID NO: 4530906 - DNA, 25 bp, Homo sapien
gtaacttttgacaatgagttcccaa

SEQ ID NO: 4530907 - DNA, 25 bp, Homo sapien
cggcatgacaagttatttctacgta

SEQ ID NO: 4530908 - DNA, 25 bp, Homo sapien
agaggaggcgttgtcatgttgccca

SEQ ID NO: 4530909 - DNA, 25 bp, Homo sapien
gaaacgacattttgtgctgcacata

SEQ ID NO: 4530910 - DNA, 25 bp, Homo sapien
ttcgctctaggacaatgaacttggc

SEQ ID NO: 4530911 - DNA, 25 bp, Homo sapien
tgagtgtaggtgagtaaaagccagc

SEQ ID NO: 4530912 - DNA, 25 bp, Homo sapien
gaagcatcacataagtgccagaacg

SEQ ID NO: 4530913 - DNA, 25 bp, Homo sapien
gcactgcgcccggtggtggttttac

SEQ ID NO: 4530914 - DNA, 25 bp, Homo sapien
agatagttgtggcttgattcattgc

SEQ ID NO: 4530915 - DNA, 25 bp, Homo sapien
tagatccctatgtgaataaagatag

SEQ ID NO: 4530916 - DNA, 25 bp, Homo sapien
ggttttacagtccatagatccctat

SEQ ID NO: 4530917 - DNA, 25 bp, Homo sapien
ctaggaaaggaggagcaatggcact

SEQ ID NO: 4530918 - DNA, 25 bp, Homo sapien
tctcctgtgacgaatgagtcccgct

SEQ ID NO: 4530919 - DNA, 25 bp, Homo sapien
tgagaagaagtaacgtgcagcccca

SEQ ID NO: 4530920 - DNA, 25 bp, Homo sapien
tatgtaaatcagagcctgtcacggc

SEQ ID NO: 4530921 - DNA, 25 bp, Homo sapien
taacttgtgcaagacagctcagcta

SEQ ID NO: 4530922 - DNA, 25 bp, Homo sapien
gcaatgtggtaagtgcctggcccat

SEQ ID NO: 4530923 - DNA, 25 bp, Homo sapien
ccaacatagtgattaagagccaacc

SEQ ID NO: 4530924 - DNA, 25 bp, Homo sapien
acaattactggaccttgccggcatc

SEQ ID NO: 4530925 - DNA, 25 bp, Homo sapien
cccaggagggagcaattcaagcaat

SEQ ID NO: 4530926 - DNA, 25 bp, Homo sapien
caaacagagatgttgcacctccaag

SEQ ID NO: 4530927 - DNA, 25 bp, Homo sapien
tatcataaatactgccttacccggt

SEQ ID NO: 4530928 - DNA, 25 bp, Homo sapien
cctggacttgcaaccccttggtggg

SEQ ID NO: 4530929 - DNA, 25 bp, Homo sapien
aaactgtggtcatgtggaacgaaga

SEQ ID NO: 4530930 - DNA, 25 bp, Homo sapien
catggaatacacttgcaaactgtgg

SEQ ID NO: 4530931 - DNA, 25 bp, Homo sapien
gtaattcccaatcactccacttctc

SEQ ID NO: 4530932 - DNA, 25 bp, Homo sapien
tggtcatgtggaacgaagaaatgga

SEQ ID NO: 4530933 - DNA, 25 bp, Homo sapien
gaatacctaacatctgtgcagcacg

SEQ ID NO: 4530934 - DNA, 25 bp, Homo sapien
gaaattatcacagtgtctccaggga

SEQ ID NO: 4530935 - DNA, 25 bp, Homo sapien
tattataagaatcaggcacagggct

SEQ ID NO: 4530936 - DNA, 25 bp, Homo sapien
tggtgatacataagctctgagcggc

SEQ ID NO: 4530937 - DNA, 25 bp, Homo sapien
cccctgaagttggtggtgcaaagga

SEQ ID NO: 4530938 - DNA, 25 bp, Homo sapien
catatgtagaaagacccctgtggct

SEQ ID NO: 4530939 - DNA, 25 bp, Homo sapien
tgcttaattctgactatggaaacgg

SEQ ID NO: 4530940 - DNA, 25 bp, Homo sapien
tagccccagattaagcaaattcaga

SEQ ID NO: 4530941 - DNA, 25 bp, Homo sapien
tgttctgctagttaatgaatgcatg

SEQ ID NO: 4530942 - DNA, 25 bp, Homo sapien
cttttatgttctgctagttaatgaa

SEQ ID NO: 4530943 - DNA, 25 bp, Homo sapien
tatgttctgctagttaatgaatgca

SEQ ID NO: 4530944 - DNA, 25 bp, Homo sapien
tttatgttctgctagttaatgaatg

SEQ ID NO: 4530945 - DNA, 25 bp, Homo sapien
gcagcccccttctttaagaacacat

SEQ ID NO: 4530946 - DNA, 25 bp, Homo sapien
ttcagggggcaaagccttggcagcc

SEQ ID NO: 4530947 - DNA, 25 bp, Homo sapien
atggcccattcagggggcaaagcct

SEQ ID NO: 4530948 - DNA, 25 bp, Homo sapien
ggcagcccccttctttaagaacaca

SEQ ID NO: 4530949 - DNA, 25 bp, Homo sapien
gaacaggtcacactgcacaaaaggg

SEQ ID NO: 4530950 - DNA, 25 bp, Homo sapien
caactctaatcggtggccatggtgc

SEQ ID NO: 4530951 - DNA, 25 bp, Homo sapien
tttcctaaagctacaagggaggtgc

SEQ ID NO: 4530952 - DNA, 25 bp, Homo sapien
tgttagttcgtagcacagcagaggt

SEQ ID NO: 4530953 - DNA, 25 bp, Homo sapien
taatcagtccagagaccgcatgttc

SEQ ID NO: 4530954 - DNA, 25 bp, Homo sapien
tattttcgaccaagaaagaccaagc

SEQ ID NO: 4530955 - DNA, 25 bp, Homo sapien
ttctgtctaattcctctgagccgag

SEQ ID NO: 4530956 - DNA, 25 bp, Homo sapien
ttcagcatggcaacacacaagttgg

SEQ ID NO: 4530957 - DNA, 25 bp, Homo sapien
gaggagacagctttcgttaacagtg

SEQ ID NO: 4530958 - DNA, 25 bp, Homo sapien
caaaaacctgctactttctagaggg

SEQ ID NO: 4530959 - DNA, 25 bp, Homo sapien
taaagctgcacctgatattgtgagc

SEQ ID NO: 4530960 - DNA, 25 bp, Homo sapien
tatgagaccgtataacttgctagca

SEQ ID NO: 4530961 - DNA, 25 bp, Homo sapien
gcgttttttgtccttatccggatca

SEQ ID NO: 4530962 - DNA, 25 bp, Homo sapien
tcatcgtcacctgtaccaggtgaag

SEQ ID NO: 4530963 - DNA, 25 bp, Homo sapien
tgctggaagagccatgctctcatga

SEQ ID NO: 4530964 - DNA, 25 bp, Homo sapien
catgctctcatgatatttgttgcta

SEQ ID NO: 4530965 - DNA, 25 bp, Homo sapien
tggaatccaatgtgggaaaaccgcc

SEQ ID NO: 4530966 - DNA, 25 bp, Homo sapien
gctctttgtcaattatggaatccaa

SEQ ID NO: 4530967 - DNA, 25 bp, Homo sapien
cagaaaacctattcagtggaaacgc

SEQ ID NO: 4530968 - DNA, 25 bp, Homo sapien
tcaattataactgtgcacttgacac

SEQ ID NO: 4530969 - DNA, 25 bp, Homo sapien
cttgcacatcattagcctggagcca

SEQ ID NO: 4530970 - DNA, 25 bp, Homo sapien
ctggagccacacgaaagaggaaaac

SEQ ID NO: 4530971 - DNA, 25 bp, Homo sapien
caaggcattgcaggacccctacttt

SEQ ID NO: 4530972 - DNA, 25 bp, Homo sapien
ttgggaaggcatcaatcaagagcag

SEQ ID NO: 4530973 - DNA, 25 bp, Homo sapien
atcacatggaagagatgaccctcac

SEQ ID NO: 4530974 - DNA, 25 bp, Homo sapien
tccatcacatggaagagatgaccct

SEQ ID NO: 4530975 - DNA, 25 bp, Homo sapien
cctccatcacatggaagagatgacc

SEQ ID NO: 4530976 - DNA, 25 bp, Homo sapien
catcacatggaagagatgaccctca

SEQ ID NO: 4530977 - DNA, 25 bp, Homo sapien
gcatgaccccgaagttgctgttctc

SEQ ID NO: 4530978 - DNA, 25 bp, Homo sapien
cactagagcatgaccccgaagttgc

SEQ ID NO: 4530979 - DNA, 25 bp, Homo sapien
caaacactagagcatgaccccgaag

SEQ ID NO: 4530980 - DNA, 25 bp, Homo sapien
tgacaggccacttcattacaaccac

SEQ ID NO: 4530981 - DNA, 25 bp, Homo sapien
ggatgtgctctccaaaatacagaca

SEQ ID NO: 4530982 - DNA, 25 bp, Homo sapien
aagcagtacccggagatgaggaaaa

SEQ ID NO: 4530983 - DNA, 25 bp, Homo sapien
gctgttcatgtgacacagatggaga

SEQ ID NO: 4530984 - DNA, 25 bp, Homo sapien
tacagacactggagcgatctcatca

SEQ ID NO: 4530985 - DNA, 25 bp, Homo sapien
aatgcacgtgccaaatgaggtaagg

SEQ ID NO: 4530986 - DNA, 25 bp, Homo sapien
tgtggaatccttgcgggcagttaac

SEQ ID NO: 4530987 - DNA, 25 bp, Homo sapien
atacctccatgcctgactcagaaca

SEQ ID NO: 4530988 - DNA, 25 bp, Homo sapien
taagatagttggcaatccttggcac

SEQ ID NO: 4530989 - DNA, 25 bp, Homo sapien
tgcagagctaaaccaaaggccattc

SEQ ID NO: 4530990 - DNA, 25 bp, Homo sapien
tcctctggaacagctgagtgggtta

SEQ ID NO: 4530991 - DNA, 25 bp, Homo sapien
taacttctaaacatgccaggaacag

SEQ ID NO: 4530992 - DNA, 25 bp, Homo sapien
gagtgggttacgtatgtgcacacag

SEQ ID NO: 4530993 - DNA, 25 bp, Homo sapien
ttgggaagccactgactagattatc

SEQ ID NO: 4530994 - DNA, 25 bp, Homo sapien
tcccatgaatgaggttagcagccac

SEQ ID NO: 4530995 - DNA, 25 bp, Homo sapien
gattcaaaatgtcctagggcgggaa

SEQ ID NO: 4530996 - DNA, 25 bp, Homo sapien
aaggttgctaatcccttgaccaagg

SEQ ID NO: 4530997 - DNA, 25 bp, Homo sapien
taaatcctgggataccatcggcatc

SEQ ID NO: 4530998 - DNA, 25 bp, Homo sapien
gggtgtaggcaaatatccatatcca

SEQ ID NO: 4530999 - DNA, 25 bp, Homo sapien
gagagtgtctaactgcaggaagcta

SEQ ID NO: 4531000 - DNA, 25 bp, Homo sapien
aaaagagcaataatgagagtgtcta

SEQ ID NO: 4531001 - DNA, 25 bp, Homo sapien
tcaaatggctccaaatgctcggagc

SEQ ID NO: 4531002 - DNA, 25 bp, Homo sapien
tatttacacaggatttacgcaggct

SEQ ID NO: 4531003 - DNA, 25 bp, Homo sapien
caggctctccactgaagagaccgaa

SEQ ID NO: 4531004 - DNA, 25 bp, Homo sapien
gaccgaaagcacttccattctcact

SEQ ID NO: 4531005 - DNA, 25 bp, Homo sapien
aaatgaagaaacctgtgactggttt

SEQ ID NO: 4531006 - DNA, 25 bp, Homo sapien
gtcaaagtgaaagagtgtgagtgaa

SEQ ID NO: 4531007 - DNA, 25 bp, Homo sapien
caaagtgaaagagtgtgagtgaaga

SEQ ID NO: 4531008 - DNA, 25 bp, Homo sapien
gaaatgaagaaacctgtgactggtt

SEQ ID NO: 4531009 - DNA, 25 bp, Homo sapien
ggaatttcgtgggttccacagtaca

SEQ ID NO: 4531010 - DNA, 25 bp, Homo sapien
gcagcttccagaataaagaggccga

SEQ ID NO: 4531011 - DNA, 25 bp, Homo sapien
gaggccgagctaggttaagactctt

SEQ ID NO: 4531012 - DNA, 25 bp, Homo sapien
tgacaatgatttccgccttaacgcc

SEQ ID NO: 4531013 - DNA, 25 bp, Homo sapien
ctgaatataggactccagctctaga

SEQ ID NO: 4531014 - DNA, 25 bp, Homo sapien
agctctagatatcccatctataaag

SEQ ID NO: 4531015 - DNA, 25 bp, Homo sapien
aaccttctcactgggtgcacacaaa

SEQ ID NO: 4531016 - DNA, 25 bp, Homo sapien
aaataaaccttctcactgggtgcac

SEQ ID NO: 4531017 - DNA, 25 bp, Homo sapien
tggcttcatgcttttgacactacta

SEQ ID NO: 4531018 - DNA, 25 bp, Homo sapien
gacactactataggcactgagatac

SEQ ID NO: 4531019 - DNA, 25 bp, Homo sapien
ttgacactactataggcactgagat

SEQ ID NO: 4531020 - DNA, 25 bp, Homo sapien
ttttgacactactataggcactgag

SEQ ID NO: 4531021 - DNA, 25 bp, Homo sapien
tgcaaagagcaaatgctaaaacaca

SEQ ID NO: 4531022 - DNA, 25 bp, Homo sapien
taaaatattcactaactcttcagtt

SEQ ID NO: 4531023 - DNA, 25 bp, Homo sapien
ttactaatggaattggcagactttc

SEQ ID NO: 4531024 - DNA, 25 bp, Homo sapien
taagttgatgactatgacataggag

SEQ ID NO: 4531025 - DNA, 25 bp, Homo sapien
tcctctttctatcgtgacagtcaag

SEQ ID NO: 4531026 - DNA, 25 bp, Homo sapien
gaggcttatgatggctcaggctcca

SEQ ID NO: 4531027 - DNA, 25 bp, Homo sapien
taatagaagcgtggcagccttttga

SEQ ID NO: 4531028 - DNA, 25 bp, Homo sapien
tcaaagtgaccctatggatctaacc

SEQ ID NO: 4531029 - DNA, 25 bp, Homo sapien
tgtgagtgctctatgccccaaaaag

SEQ ID NO: 4531030 - DNA, 25 bp, Homo sapien
gagatttgcccatgataagtgacag

SEQ ID NO: 4531031 - DNA, 25 bp, Homo sapien
tctgaggatataaaggcacgtaggc

SEQ ID NO: 4531032 - DNA, 25 bp, Homo sapien
gagagacctgcatgttactgtggac

SEQ ID NO: 4531033 - DNA, 25 bp, Homo sapien
actgcatctaacacgccaccagagc

SEQ ID NO: 4531034 - DNA, 25 bp, Homo sapien
tattgagagcgctgcaaacagagag

SEQ ID NO: 4531035 - DNA, 25 bp, Homo sapien
ggtctctattgagagcgctgcaaac

SEQ ID NO: 4531036 - DNA, 25 bp, Homo sapien
ctttcccgtaaatgtctgagaactg

SEQ ID NO: 4531037 - DNA, 25 bp, Homo sapien
tatttaggttaactgggtctggcaa

SEQ ID NO: 4531038 - DNA, 25 bp, Homo sapien
tcctgaaagattagagcaatataga

SEQ ID NO: 4531039 - DNA, 25 bp, Homo sapien
gctggcttgtacagccctgtgtcct

SEQ ID NO: 4531040 - DNA, 25 bp, Homo sapien
cagagttagggagaactatgctggc

SEQ ID NO: 4531041 - DNA, 25 bp, Homo sapien
tgactcagcaggtacagaattaggg

SEQ ID NO: 4531042 - DNA, 25 bp, Homo sapien
catcagcgttaatgggagctacaca

SEQ ID NO: 4531043 - DNA, 25 bp, Homo sapien
cattgcggctgaacccataccattg

SEQ ID NO: 4531044 - DNA, 25 bp, Homo sapien
ggctgcttcctagtcgttactctgg

SEQ ID NO: 4531045 - DNA, 25 bp, Homo sapien
actaacccaacagaaccagtcagtt

SEQ ID NO: 4531046 - DNA, 25 bp, Homo sapien
tgctatctcccttgccataactcaa

SEQ ID NO: 4531047 - DNA, 25 bp, Homo sapien
gtttttacctatatatcagtctcag

SEQ ID NO: 4531048 - DNA, 25 bp, Homo sapien
tattacaagtaatccccactccaaa

SEQ ID NO: 4531049 - DNA, 25 bp, Homo sapien
tcagttgggaccttggtgacctgtt

SEQ ID NO: 4531050 - DNA, 25 bp, Homo sapien
ggaccttggtgacctgttaatgaat

SEQ ID NO: 4531051 - DNA, 25 bp, Homo sapien
cagttgggaccttggtgacctgtta

SEQ ID NO: 4531052 - DNA, 25 bp, Homo sapien
ttgggaccttggtgacctgttaatg

SEQ ID NO: 4531053 - DNA, 25 bp, Homo sapien
tggagtcagaaatgcttgaagcgtt

SEQ ID NO: 4531054 - DNA, 25 bp, Homo sapien
ggtgttgctagctgacttggagtca

SEQ ID NO: 4531055 - DNA, 25 bp, Homo sapien
agtgttgagttatgcctggtgttgc

SEQ ID NO: 4531056 - DNA, 25 bp, Homo sapien
gcgttaacgtaattgcaagaatgtg

SEQ ID NO: 4531057 - DNA, 25 bp, Homo sapien
caagaagtctctggaagatagcctc

SEQ ID NO: 4531058 - DNA, 25 bp, Homo sapien
cattgcttgcagatccattgaccct

SEQ ID NO: 4531059 - DNA, 25 bp, Homo sapien
tagcctcattagaccattaagtcgg

SEQ ID NO: 4531060 - DNA, 25 bp, Homo sapien
gcaaagcgaaaggtcaaagtgagcc

SEQ ID NO: 4531061 - DNA, 25 bp, Homo sapien
aaagtcaccatgtcagctgaatgga

SEQ ID NO: 4531062 - DNA, 25 bp, Homo sapien
aatggggacaaataatcctctaaga

SEQ ID NO: 4531063 - DNA, 25 bp, Homo sapien
ggacaaataatcctctaagaatttc

SEQ ID NO: 4531064 - DNA, 25 bp, Homo sapien
accatgtcagctgaatggaaatggg

SEQ ID NO: 4531065 - DNA, 25 bp, Homo sapien
gcagctgattctactccctaacctg

SEQ ID NO: 4531066 - DNA, 25 bp, Homo sapien
tagtcatgcctactttgcacgagga

SEQ ID NO: 4531067 - DNA, 25 bp, Homo sapien
gcctacttaaagattagacagctca

SEQ ID NO: 4531068 - DNA, 25 bp, Homo sapien
catggcggcagatgtactgatatca

SEQ ID NO: 4531069 - DNA, 25 bp, Homo sapien
tcgtggtctcgccaagaagaagggt

SEQ ID NO: 4531070 - DNA, 25 bp, Homo sapien
ttgcatcatcgtggtctcgccaaga

SEQ ID NO: 4531071 - DNA, 25 bp, Homo sapien
tgtctccgctctgggaagcatggcc

SEQ ID NO: 4531072 - DNA, 25 bp, Homo sapien
gctgagtgggttgaggttgcatcat

SEQ ID NO: 4531073 - DNA, 25 bp, Homo sapien
gcaaaccaagagttatagctcatgc

SEQ ID NO: 4531074 - DNA, 25 bp, Homo sapien
gctcatgctacttggctgagtatat

SEQ ID NO: 4531075 - DNA, 25 bp, Homo sapien
gagttatagctcatgctacttggct

SEQ ID NO: 4531076 - DNA, 25 bp, Homo sapien
gctacttggctgagtatattcttct

SEQ ID NO: 4531077 - DNA, 25 bp, Homo sapien
tcttcgtgtcagctgtttgccgggc

SEQ ID NO: 4531078 - DNA, 25 bp, Homo sapien
tttgccgggcggtaatgagataaag

SEQ ID NO: 4531079 - DNA, 25 bp, Homo sapien
tgtcagctgtttgccgggcggtaat

SEQ ID NO: 4531080 - DNA, 25 bp, Homo sapien
agctttgaagcctcttcgtgtcagc

SEQ ID NO: 4531081 - DNA, 25 bp, Homo sapien
aagcaggagacaatatgggcagagc

SEQ ID NO: 4531082 - DNA, 25 bp, Homo sapien
acaggagagcgctctgctgctctac

SEQ ID NO: 4531083 - DNA, 25 bp, Homo sapien
gactcacagctgataatgcaagttg

SEQ ID NO: 4531084 - DNA, 25 bp, Homo sapien
ctatttgctgggctacagactcaca

SEQ ID NO: 4531085 - DNA, 25 bp, Homo sapien
ggccccagaggctttgaatagcata

SEQ ID NO: 4531086 - DNA, 25 bp, Homo sapien
gaagtagaactttatcggaataggc

SEQ ID NO: 4531087 - DNA, 25 bp, Homo sapien
ggtggacagagctcagaagtagaac

SEQ ID NO: 4531088 - DNA, 25 bp, Homo sapien
catgcttccttgagttggtggacag

SEQ ID NO: 4531089 - DNA, 25 bp, Homo sapien
ttgtcatatttacttgactgggggc

SEQ ID NO: 4531090 - DNA, 25 bp, Homo sapien
gaatttgcgaacacccaagtcacca

SEQ ID NO: 4531091 - DNA, 25 bp, Homo sapien
taaaataatgctttgcccagtggcc

SEQ ID NO: 4531092 - DNA, 25 bp, Homo sapien
cagactcactagattggttccaaaa

SEQ ID NO: 4531093 - DNA, 25 bp, Homo sapien
aagtttctatagcaaaagccctgag

SEQ ID NO: 4531094 - DNA, 25 bp, Homo sapien
tgacgaggtcgatgggcattttccc

SEQ ID NO: 4531095 - DNA, 25 bp, Homo sapien
acagctaatgtatcggtggcagaag

SEQ ID NO: 4531096 - DNA, 25 bp, Homo sapien
gagctgccgtctctttcatcaatga

SEQ ID NO: 4531097 - DNA, 25 bp, Homo sapien
ggcagaagttatcgcacagttcgtg

SEQ ID NO: 4531098 - DNA, 25 bp, Homo sapien
taccaggttgcaaggttacatttgc

SEQ ID NO: 4531099 - DNA, 25 bp, Homo sapien
tctctgagcaacaagttacaataga

SEQ ID NO: 4531100 - DNA, 25 bp, Homo sapien
acaggactggaaataactgggttca

SEQ ID NO: 4531101 - DNA, 25 bp, Homo sapien
gagcaacagtgtgatgtcttccaaa

SEQ ID NO: 4531102 - DNA, 25 bp, Homo sapien
ccttagtacttgtattgcttgtatc

SEQ ID NO: 4531103 - DNA, 25 bp, Homo sapien
ttagtacttgtattgcttgtatcat

SEQ ID NO: 4531104 - DNA, 25 bp, Homo sapien
aaaccttagtacttgtattgcttgt

SEQ ID NO: 4531105 - DNA, 25 bp, Homo sapien
aaccttagtacttgtattgcttgta

SEQ ID NO: 4531106 - DNA, 25 bp, Homo sapien
ctgaggtcctgtcttggggttggga

SEQ ID NO: 4531107 - DNA, 25 bp, Homo sapien
tcagggaatggagttagagctctgt

SEQ ID NO: 4531108 - DNA, 25 bp, Homo sapien
ctctgaggtcctgtcttggggttgg

SEQ ID NO: 4531109 - DNA, 25 bp, Homo sapien
agttcagggaatggagttagagctc

SEQ ID NO: 4531110 - DNA, 25 bp, Homo sapien
tctctccctagagctccaaaagagg

SEQ ID NO: 4531111 - DNA, 25 bp, Homo sapien
tgcgggggctctaagctgctccctt

SEQ ID NO: 4531112 - DNA, 25 bp, Homo sapien
tcctcgctcgccagctcccgtgcgg

SEQ ID NO: 4531113 - DNA, 25 bp, Homo sapien
ttcatcctgctcctcgctcgccagc

SEQ ID NO: 4531114 - DNA, 25 bp, Homo sapien
cagctctggatttgaggaaaaaagt

SEQ ID NO: 4531115 - DNA, 25 bp, Homo sapien
gtccagctctggatttgaggaaaaa

SEQ ID NO: 4531116 - DNA, 25 bp, Homo sapien
tgtccagctctggatttgaggaaaa

SEQ ID NO: 4531117 - DNA, 25 bp, Homo sapien
ggagaggcgcccagcttccttgcct

SEQ ID NO: 4531118 - DNA, 25 bp, Homo sapien
gagttccatatccagcagtccaaga

SEQ ID NO: 4531119 - DNA, 25 bp, Homo sapien
gactaagctgtagccaggaactcag

SEQ ID NO: 4531120 - DNA, 25 bp, Homo sapien
gaactcagggtcgttctcagggcct

SEQ ID NO: 4531121 - DNA, 25 bp, Homo sapien
ctgcttggcgaagaccgcgatgtcc

SEQ ID NO: 4531122 - DNA, 25 bp, Homo sapien
cagctcgcacttctcaaagaccaga

SEQ ID NO: 4531123 - DNA, 25 bp, Homo sapien
ggcgaagaccgcgatgtcctcgttg

SEQ ID NO: 4531124 - DNA, 25 bp, Homo sapien
gtcggaggagcagacgtctccgcca

SEQ ID NO: 4531125 - DNA, 25 bp, Homo sapien
cacacagagacggggtgcagagggg

SEQ ID NO: 4531126 - DNA, 25 bp, Homo sapien
cacacacacagagacggggtgcaga

SEQ ID NO: 4531127 - DNA, 25 bp, Homo sapien
ggagcccgagtcgattctgatccac

SEQ ID NO: 4531128 - DNA, 25 bp, Homo sapien
tgaaacatccgagacgctcaggcag

SEQ ID NO: 4531129 - DNA, 25 bp, Homo sapien
agaggtccctcagatctggccagag

SEQ ID NO: 4531130 - DNA, 25 bp, Homo sapien
tcagttggaacgtaatgaaacatcc

SEQ ID NO: 4531131 - DNA, 25 bp, Homo sapien
ggcggcttagccacacttcgggatg

SEQ ID NO: 4531132 - DNA, 25 bp, Homo sapien
tttaagtgtgcgtgcgcgtatgccc

SEQ ID NO: 4531133 - DNA, 25 bp, Homo sapien
ttaatgggcatttcagacgaggcca

SEQ ID NO: 4531134 - DNA, 25 bp, Homo sapien
ggcttcacctacatacacaccggag

SEQ ID NO: 4531135 - DNA, 25 bp, Homo sapien
tacacgttaggatcgtgcatctcac

SEQ ID NO: 4531136 - DNA, 25 bp, Homo sapien
ttaggatcgtgcatctcacccctcg

SEQ ID NO: 4531137 - DNA, 25 bp, Homo sapien
cccctcgccaagtgctctcagaata

SEQ ID NO: 4531138 - DNA, 25 bp, Homo sapien
agctcgtgtggtacacgttaggatc

SEQ ID NO: 4531139 - DNA, 25 bp, Homo sapien
tgtgtggcgtggagcggcggcccgt

SEQ ID NO: 4531140 - DNA, 25 bp, Homo sapien
cgtgcgcgccgtagtgctgtgtggc

SEQ ID NO: 4531141 - DNA, 25 bp, Homo sapien
atactggccggcatgacattggggt

SEQ ID NO: 4531142 - DNA, 25 bp, Homo sapien
tcaaggcgtcgttgacagcggatcc

SEQ ID NO: 4531143 - DNA, 25 bp, Homo sapien
ccgccgtaatggggcagctcatcgt

SEQ ID NO: 4531144 - DNA, 25 bp, Homo sapien
cgccgtaatggggcagctcatcgta

SEQ ID NO: 4531145 - DNA, 25 bp, Homo sapien
cccgccgtaatggggcagctcatcg

SEQ ID NO: 4531146 - DNA, 25 bp, Homo sapien
tggaaagggaaaaagagcagggaga

SEQ ID NO: 4531147 - DNA, 25 bp, Homo sapien
ggagggggcgcaggaggtgagggag

SEQ ID NO: 4531148 - DNA, 25 bp, Homo sapien
ggaggtgagggagaacagaggaggg

SEQ ID NO: 4531149 - DNA, 25 bp, Homo sapien
ggggcgcaggaggtgagggagaaca

SEQ ID NO: 4531150 - DNA, 25 bp, Homo sapien
agcgaggcgaaagcgtgtaacgatt

SEQ ID NO: 4531151 - DNA, 25 bp, Homo sapien
cctgcgtccttgtcaatttcagaga

SEQ ID NO: 4531152 - DNA, 25 bp, Homo sapien
agcccaggctagtagtctaggcggc

SEQ ID NO: 4531153 - DNA, 25 bp, Homo sapien
cagaaacattatttagcagcggatt

SEQ ID NO: 4531154 - DNA, 25 bp, Homo sapien
acacgcgcgcccagacacgcacaca

SEQ ID NO: 4531155 - DNA, 25 bp, Homo sapien
cccgcccgctcgcacagcgctggaa

SEQ ID NO: 4531156 - DNA, 25 bp, Homo sapien
agcgctggaacacgcgcgcccagac

SEQ ID NO: 4531157 - DNA, 25 bp, Homo sapien
tcgcacagcgctggaacacgcgcgc

SEQ ID NO: 4531158 - DNA, 25 bp, Homo sapien
cagaagcgttgaagggagaggaggc

SEQ ID NO: 4531159 - DNA, 25 bp, Homo sapien
cgtatatttaatatcccagtccgga

SEQ ID NO: 4531160 - DNA, 25 bp, Homo sapien
tccaaaccaaagagacttctcccaa

SEQ ID NO: 4531161 - DNA, 25 bp, Homo sapien
agtctgcgctccaataaactcctgg

SEQ ID NO: 4531162 - DNA, 25 bp, Homo sapien
ccggataagaaagtgatctaggctg

SEQ ID NO: 4531163 - DNA, 25 bp, Homo sapien
tcaaagcccggaatgtcaaggtagt

SEQ ID NO: 4531164 - DNA, 25 bp, Homo sapien
gcccacatgtaaccgaactgtcgtg

SEQ ID NO: 4531165 - DNA, 25 bp, Homo sapien
cgaactgaaggttacgagcggcccg

SEQ ID NO: 4531166 - DNA, 25 bp, Homo sapien
tattgaagagcctcagtttggcggc

SEQ ID NO: 4531167 - DNA, 25 bp, Homo sapien
gaagagaccagcttaactcagagca

SEQ ID NO: 4531168 - DNA, 25 bp, Homo sapien
agcaagctctgcagacggtaccact

SEQ ID NO: 4531169 - DNA, 25 bp, Homo sapien
ggcttcctgctaacgtccaagggca

SEQ ID NO: 4531170 - DNA, 25 bp, Homo sapien
tcctgcctaactgggtcttgccggg

SEQ ID NO: 4531171 - DNA, 25 bp, Homo sapien
gacaggcgctggaagcgcgtcctct

SEQ ID NO: 4531172 - DNA, 25 bp, Homo sapien
tggagagtagtgtcttccgcgagcc

SEQ ID NO: 4531173 - DNA, 25 bp, Homo sapien
ggaaagcggactgttgttctccaac

SEQ ID NO: 4531174 - DNA, 25 bp, Homo sapien
tcaatcactacgagcccggagttgg

SEQ ID NO: 4531175 - DNA, 25 bp, Homo sapien
taaaattctcatgtggcgcgcgctg

SEQ ID NO: 4531176 - DNA, 25 bp, Homo sapien
tacttaaaattgaccagccccagag

SEQ ID NO: 4531177 - DNA, 25 bp, Homo sapien
tatgatcaaccagacaaagacccct

SEQ ID NO: 4531178 - DNA, 25 bp, Homo sapien
cacccgtggcaaacatggaatacaa

SEQ ID NO: 4531179 - DNA, 25 bp, Homo sapien
gacgttctcataccgtaagggtcca

SEQ ID NO: 4531180 - DNA, 25 bp, Homo sapien
gcactcgggtaaaccaggcttcacc

SEQ ID NO: 4531181 - DNA, 25 bp, Homo sapien
tacccaagtctgatagggaagacag

SEQ ID NO: 4531182 - DNA, 25 bp, Homo sapien
gccacttctggactagctgtgagga

SEQ ID NO: 4531183 - DNA, 25 bp, Homo sapien
tccctttgctgacgggtgactggaa

SEQ ID NO: 4531184 - DNA, 25 bp, Homo sapien
ctgacaaactcaatctcagggcggg

SEQ ID NO: 4531185 - DNA, 25 bp, Homo sapien
ccctaatcaatggtggctggaataa

SEQ ID NO: 4531186 - DNA, 25 bp, Homo sapien
gggactccaccaattccagtgcgat

SEQ ID NO: 4531187 - DNA, 25 bp, Homo sapien
tgtaaactccggcactggactgctc

SEQ ID NO: 4531188 - DNA, 25 bp, Homo sapien
tagcctgcctccctgaatcagttag

SEQ ID NO: 4531189 - DNA, 25 bp, Homo sapien
atgtgtatcagctttatcctcaggc

SEQ ID NO: 4531190 - DNA, 25 bp, Homo sapien
ggaataaagttatgccattggcaag

SEQ ID NO: 4531191 - DNA, 25 bp, Homo sapien
gcaccatcatgcctataaagataat

SEQ ID NO: 4531192 - DNA, 25 bp, Homo sapien
ggtcacttcgtattccccatgatgg

SEQ ID NO: 4531193 - DNA, 25 bp, Homo sapien
aaatttaagctacggttgccacctg

SEQ ID NO: 4531194 - DNA, 25 bp, Homo sapien
ccagtgaacctgagttgtgaaagag

SEQ ID NO: 4531195 - DNA, 25 bp, Homo sapien
gaaatactgttaccagggtctatgg

SEQ ID NO: 4531196 - DNA, 25 bp, Homo sapien
cattaagtcgacaagcgacagagaa

SEQ ID NO: 4531197 - DNA, 25 bp, Homo sapien
cacatcagagtgacaaacagtataa

SEQ ID NO: 4531198 - DNA, 25 bp, Homo sapien
tctttactgtgccagaactacttag

SEQ ID NO: 4531199 - DNA, 25 bp, Homo sapien
ttttatagccctcacacacattaag

SEQ ID NO: 4531200 - DNA, 25 bp, Homo sapien
ggcttgtaagccaaatccagtttac

SEQ ID NO: 4531201 - DNA, 25 bp, Homo sapien
tcataggagagccaagcctactggg

SEQ ID NO: 4531202 - DNA, 25 bp, Homo sapien
tgttcattgtaagacattattaggg

SEQ ID NO: 4531203 - DNA, 25 bp, Homo sapien
aaaagtttgccaatatctgatacag

SEQ ID NO: 4531204 - DNA, 25 bp, Homo sapien
tatctacttttattgccaggctttc

SEQ ID NO: 4531205 - DNA, 25 bp, Homo sapien
actgtatatctacttttattgccag

SEQ ID NO: 4531206 - DNA, 25 bp, Homo sapien
tatatctacttttattgccaggctt

SEQ ID NO: 4531207 - DNA, 25 bp, Homo sapien
tgtatatctacttttattgccaggc

SEQ ID NO: 4531208 - DNA, 25 bp, Homo sapien
gaaaagagtgtgatcatactaaaga

SEQ ID NO: 4531209 - DNA, 25 bp, Homo sapien
tgtcctgcagcattatctgatagct

SEQ ID NO: 4531210 - DNA, 25 bp, Homo sapien
gataatataatttgaaaagagtgtg

SEQ ID NO: 4531211 - DNA, 25 bp, Homo sapien
gcattatctgatagctcgtaaagtg

SEQ ID NO: 4531212 - DNA, 25 bp, Homo sapien
tcagcgcagggagataggagtggga

SEQ ID NO: 4531213 - DNA, 25 bp, Homo sapien
ggattgttctctggcggacaggaat

SEQ ID NO: 4531214 - DNA, 25 bp, Homo sapien
gcagggagataggagtgggaccgtt

SEQ ID NO: 4531215 - DNA, 25 bp, Homo sapien
gcgcagggagataggagtgggaccg

SEQ ID NO: 4531216 - DNA, 25 bp, Homo sapien
agagtcctcacaagattgatttttg

SEQ ID NO: 4531217 - DNA, 25 bp, Homo sapien
cattttgaatctgctgacaagaaac

SEQ ID NO: 4531218 - DNA, 25 bp, Homo sapien
gcagcagaagtaatcagagtcctca

SEQ ID NO: 4531219 - DNA, 25 bp, Homo sapien
cttgtggaagattcattgccctgca

SEQ ID NO: 4531220 - DNA, 25 bp, Homo sapien
tacatctatatgatgaaacttgact

SEQ ID NO: 4531221 - DNA, 25 bp, Homo sapien
tcttgcacaatcctattttctgtgg

SEQ ID NO: 4531222 - DNA, 25 bp, Homo sapien
cttctggtttacttcttgcacaatc

SEQ ID NO: 4531223 - DNA, 25 bp, Homo sapien
tctcttctagtacatctatatgatg

SEQ ID NO: 4531224 - DNA, 25 bp, Homo sapien
tagataacacgtaggccttccagag

SEQ ID NO: 4531225 - DNA, 25 bp, Homo sapien
tattgtggactgataaataacggca

SEQ ID NO: 4531226 - DNA, 25 bp, Homo sapien
ggagaattccattaggaccctgaca

SEQ ID NO: 4531227 - DNA, 25 bp, Homo sapien
taacggcaaatcctgaaggaacatc

SEQ ID NO: 4531228 - DNA, 25 bp, Homo sapien
cttaggacaagaaataaagagctcg

SEQ ID NO: 4531229 - DNA, 25 bp, Homo sapien
gctaattaagggacaaaggttgctc

SEQ ID NO: 4531230 - DNA, 25 bp, Homo sapien
gctcaaatgaactcgtgagaggtaa

SEQ ID NO: 4531231 - DNA, 25 bp, Homo sapien
cacctgtaaggtccctgtagaaaca

SEQ ID NO: 4531232 - DNA, 25 bp, Homo sapien
tggagtctcctttgctgaaatgcct

SEQ ID NO: 4531233 - DNA, 25 bp, Homo sapien
catggagtctcctttgctgaaatgc

SEQ ID NO: 4531234 - DNA, 25 bp, Homo sapien
ttgctcatggagtctcctttgctga

SEQ ID NO: 4531235 - DNA, 25 bp, Homo sapien
gttttttgctcatggagtctccttt

SEQ ID NO: 4531236 - DNA, 25 bp, Homo sapien
cattgggcaaatgttgcactgtctt

SEQ ID NO: 4531237 - DNA, 25 bp, Homo sapien
caggaatacgttataacattgggca

SEQ ID NO: 4531238 - DNA, 25 bp, Homo sapien
ctgtcttttgaatttggtaaccttg

SEQ ID NO: 4531239 - DNA, 25 bp, Homo sapien
tttgctacagcaaatttgccccagg

SEQ ID NO: 4531240 - DNA, 25 bp, Homo sapien
gcaacaggggaaaagtgtcagaaca

SEQ ID NO: 4531241 - DNA, 25 bp, Homo sapien
ggctgcctggtatcacccactttgg

SEQ ID NO: 4531242 - DNA, 25 bp, Homo sapien
ctcttgttgaagtgatgaaattctg

SEQ ID NO: 4531243 - DNA, 25 bp, Homo sapien
ttctggaagcattgttctgggctgc

SEQ ID NO: 4531244 - DNA, 25 bp, Homo sapien
tctgccacacacatctcatgtgcag

SEQ ID NO: 4531245 - DNA, 25 bp, Homo sapien
tctggctgcctgaggcctcatgcat

SEQ ID NO: 4531246 - DNA, 25 bp, Homo sapien
ccacacacatctcatgtgcagcagg

SEQ ID NO: 4531247 - DNA, 25 bp, Homo sapien
catctcatgtgcagcaggactctgg

SEQ ID NO: 4531248 - DNA, 25 bp, Homo sapien
tatcttgccaatggtgcatgcagta

SEQ ID NO: 4531249 - DNA, 25 bp, Homo sapien
agcttcctttcgagtggcactgagt

SEQ ID NO: 4531250 - DNA, 25 bp, Homo sapien
ggagttatccgtgtaaatcccctca

SEQ ID NO: 4531251 - DNA, 25 bp, Homo sapien
ctcacatcgattagagaataggccc

SEQ ID NO: 4531252 - DNA, 25 bp, Homo sapien
ggtcaacactgtgggtaggatttct

SEQ ID NO: 4531253 - DNA, 25 bp, Homo sapien
gatcggtcaacactgtgggtaggat

SEQ ID NO: 4531254 - DNA, 25 bp, Homo sapien
tcggtcaacactgtgggtaggattt

SEQ ID NO: 4531255 - DNA, 25 bp, Homo sapien
tggatcggtcaacactgtgggtagg

SEQ ID NO: 4531256 - DNA, 25 bp, Homo sapien
ttattcagtttctacccaatgccca

SEQ ID NO: 4531257 - DNA, 25 bp, Homo sapien
caatcctattgggttgatatcttgc

SEQ ID NO: 4531258 - DNA, 25 bp, Homo sapien
tcctttggcgtctcttggctatgac

SEQ ID NO: 4531259 - DNA, 25 bp, Homo sapien
catattagacttgggtgcctcattt

SEQ ID NO: 4531260 - DNA, 25 bp, Homo sapien
gatggagctcctgatttgacaaagg

SEQ ID NO: 4531261 - DNA, 25 bp, Homo sapien
tgcaatgttatttccactgacaaac

SEQ ID NO: 4531262 - DNA, 25 bp, Homo sapien
gttcctgattggctgatggagctcc

SEQ ID NO: 4531263 - DNA, 25 bp, Homo sapien
cagacttggaagtcatgcaatgtta

SEQ ID NO: 4531264 - DNA, 25 bp, Homo sapien
tccagagactcccattgtgaggcag

SEQ ID NO: 4531265 - DNA, 25 bp, Homo sapien
gctcaactgcccaattaggtcatgg

SEQ ID NO: 4531266 - DNA, 25 bp, Homo sapien
gaaggaattgggtgtttccagagac

SEQ ID NO: 4531267 - DNA, 25 bp, Homo sapien
gcaatcgaatgtctttccactcagg

SEQ ID NO: 4531268 - DNA, 25 bp, Homo sapien
gggaatgaagaaataagggtgtcag

SEQ ID NO: 4531269 - DNA, 25 bp, Homo sapien
caggtgacctggagatcgggtaatc

SEQ ID NO: 4531270 - DNA, 25 bp, Homo sapien
gtgacctggagatcgggtaatcagt

SEQ ID NO: 4531271 - DNA, 25 bp, Homo sapien
aagaaataagggtgtcaggtgacct

SEQ ID NO: 4531272 - DNA, 25 bp, Homo sapien
ctggattgcagaggatagagcaggt

SEQ ID NO: 4531273 - DNA, 25 bp, Homo sapien
acgctattggagaaggctgttcaga

SEQ ID NO: 4531274 - DNA, 25 bp, Homo sapien
ttgcagaggatagagcaggtgtctt

SEQ ID NO: 4531275 - DNA, 25 bp, Homo sapien
ctgttcagaggtggactggattgca

SEQ ID NO: 4531276 - DNA, 25 bp, Homo sapien
tccgtatcagtggagttcttcctca

SEQ ID NO: 4531277 - DNA, 25 bp, Homo sapien
cgttgctatagttgcacccctcaaa

SEQ ID NO: 4531278 - DNA, 25 bp, Homo sapien
aggaaaattcctttgccgttgctca

SEQ ID NO: 4531279 - DNA, 25 bp, Homo sapien
tataatcacaatttcccacgttgct

SEQ ID NO: 4531280 - DNA, 25 bp, Homo sapien
ttagtcgataaggtttttgatgtgc

SEQ ID NO: 4531281 - DNA, 25 bp, Homo sapien
tgatcttagtcgataaggtttttga

SEQ ID NO: 4531282 - DNA, 25 bp, Homo sapien
caacttgatcttagtcgataaggtt

SEQ ID NO: 4531283 - DNA, 25 bp, Homo sapien
gccaacttgatcttagtcgataagg

SEQ ID NO: 4531284 - DNA, 25 bp, Homo sapien
cttcaccaggtctaatctggtcctt

SEQ ID NO: 4531285 - DNA, 25 bp, Homo sapien
ggtctaatctggtccttaacttcca

SEQ ID NO: 4531286 - DNA, 25 bp, Homo sapien
caggtctaatctggtccttaacttc

SEQ ID NO: 4531287 - DNA, 25 bp, Homo sapien
caccaggtctaatctggtccttaac

SEQ ID NO: 4531288 - DNA, 25 bp, Homo sapien
aaagaaaacagcaggcacaccatca

SEQ ID NO: 4531289 - DNA, 25 bp, Homo sapien
ggcattcagcctctccagttttaca

SEQ ID NO: 4531290 - DNA, 25 bp, Homo sapien
ttacatggctatgggaacagattcc

SEQ ID NO: 4531291 - DNA, 25 bp, Homo sapien
ctgtttctttgctcttggaacaagt

SEQ ID NO: 4531292 - DNA, 25 bp, Homo sapien
gggcccaaagaatttgtcggatatc

SEQ ID NO: 4531293 - DNA, 25 bp, Homo sapien
gcaatgggcccaaagaatttgtcgg

SEQ ID NO: 4531294 - DNA, 25 bp, Homo sapien
gaatttgtcggatatctgattattg

SEQ ID NO: 4531295 - DNA, 25 bp, Homo sapien
tctgattattgcaaagacaataaat

SEQ ID NO: 4531296 - DNA, 25 bp, Homo sapien
aagtgaatgagtttgctggttcccc

SEQ ID NO: 4531297 - DNA, 25 bp, Homo sapien
caatttaatcggtttgttcttgatt

SEQ ID NO: 4531298 - DNA, 25 bp, Homo sapien
ccttgagccactgtggtaaaccttt

SEQ ID NO: 4531299 - DNA, 25 bp, Homo sapien
tactctggttccgttttccttgagc

SEQ ID NO: 4531300 - DNA, 25 bp, Homo sapien
cctccttcctgtactcttaggacca

SEQ ID NO: 4531301 - DNA, 25 bp, Homo sapien
ccaaagcattgcttgaagttgagca

SEQ ID NO: 4531302 - DNA, 25 bp, Homo sapien
taggaccacttaataccacactctt

SEQ ID NO: 4531303 - DNA, 25 bp, Homo sapien
tgagcatgttctaatagcattttcc

SEQ ID NO: 4531304 - DNA, 25 bp, Homo sapien
ccagtatatctttggaaggccatca

SEQ ID NO: 4531305 - DNA, 25 bp, Homo sapien
tgcgctcccctgttattactaggat

SEQ ID NO: 4531306 - DNA, 25 bp, Homo sapien
tctttcactccaagcagggtattgc

SEQ ID NO: 4531307 - DNA, 25 bp, Homo sapien
tactgtgaacctcaggaaagcttct

SEQ ID NO: 4531308 - DNA, 25 bp, Homo sapien
agatgctggacgtgccctacgagca

SEQ ID NO: 4531309 - DNA, 25 bp, Homo sapien
ggaccagatgctggacgtgccctac

SEQ ID NO: 4531310 - DNA, 25 bp, Homo sapien
tggacgtgccctacgagcagcttat

SEQ ID NO: 4531311 - DNA, 25 bp, Homo sapien
gctggacgtgccctacgagcagctt

SEQ ID NO: 4531312 - DNA, 25 bp, Homo sapien
gccgatggaccagtgcgaggtacct

SEQ ID NO: 4531313 - DNA, 25 bp, Homo sapien
ttagacaatgtagccgatggaccag

SEQ ID NO: 4531314 - DNA, 25 bp, Homo sapien
tgtggatgattagacaatgtagccg

SEQ ID NO: 4531315 - DNA, 25 bp, Homo sapien
aaattagcctcctgtggatgattag

SEQ ID NO: 4531316 - DNA, 25 bp, Homo sapien
gaaatatatggcaagctatcaacat

SEQ ID NO: 4531317 - DNA, 25 bp, Homo sapien
ggcaagctatcaacatccataatgt

SEQ ID NO: 4531318 - DNA, 25 bp, Homo sapien
tatatggcaagctatcaacatccat

SEQ ID NO: 4531319 - DNA, 25 bp, Homo sapien
tcaacatccataatgtaaattcctt

SEQ ID NO: 4531320 - DNA, 25 bp, Homo sapien
ggactgattaggatgacaacgatct

SEQ ID NO: 4531321 - DNA, 25 bp, Homo sapien
gccttcacagcatgaaagtgggaaa

SEQ ID NO: 4531322 - DNA, 25 bp, Homo sapien
cagccttcacagcatgaaagtggga

SEQ ID NO: 4531323 - DNA, 25 bp, Homo sapien
ataatcattctcaacaactcacagc

SEQ ID NO: 4531324 - DNA, 25 bp, Homo sapien
cagagtagaggtcattaactgctgg

SEQ ID NO: 4531325 - DNA, 25 bp, Homo sapien
tgttaatttgcccaggacacgatta

SEQ ID NO: 4531326 - DNA, 25 bp, Homo sapien
actggaagcaagtttaccactgggt

SEQ ID NO: 4531327 - DNA, 25 bp, Homo sapien
tggacttaatgtatcagagtagagg

SEQ ID NO: 4531328 - DNA, 25 bp, Homo sapien
gctttcctccggagagtccatccaa

SEQ ID NO: 4531329 - DNA, 25 bp, Homo sapien
aaaaggttgcacctcagcggcaggg

SEQ ID NO: 4531330 - DNA, 25 bp, Homo sapien
cagtgctttggtcggcaagtcgaga

SEQ ID NO: 4531331 - DNA, 25 bp, Homo sapien
tataattatctggaggagagtctgc

SEQ ID NO: 4531332 - DNA, 25 bp, Homo sapien
tgacagaaacaaacggcctaatgaa

SEQ ID NO: 4531333 - DNA, 25 bp, Homo sapien
ggctgtaagccacaccgtctttgca

SEQ ID NO: 4531334 - DNA, 25 bp, Homo sapien
gaatctcgcttattgtctgtccctt

SEQ ID NO: 4531335 - DNA, 25 bp, Homo sapien
tactctttttgcgagtccatgaaac

SEQ ID NO: 4531336 - DNA, 25 bp, Homo sapien
atcttctatagtcatctttgggaca

SEQ ID NO: 4531337 - DNA, 25 bp, Homo sapien
cttctatagtcatctttgggacaat

SEQ ID NO: 4531338 - DNA, 25 bp, Homo sapien
tatagtcatctttgggacaatatgc

SEQ ID NO: 4531339 - DNA, 25 bp, Homo sapien
agtcatctttgggacaatatgcatt

SEQ ID NO: 4531340 - DNA, 25 bp, Homo sapien
ttttgtggcctctcctcgtcagtct

SEQ ID NO: 4531341 - DNA, 25 bp, Homo sapien
tgttcttctgcattacccaatgcct

SEQ ID NO: 4531342 - DNA, 25 bp, Homo sapien
tgcattacccaatgccttttgtggc

SEQ ID NO: 4531343 - DNA, 25 bp, Homo sapien
tggcctctcctcgtcagtctctgag

SEQ ID NO: 4531344 - DNA, 25 bp, Homo sapien
attcagcccctcagcatactcacta

SEQ ID NO: 4531345 - DNA, 25 bp, Homo sapien
ctcagcatactcactaagatgatgt

SEQ ID NO: 4531346 - DNA, 25 bp, Homo sapien
tgatgtttttcgtacctactgcttt

SEQ ID NO: 4531347 - DNA, 25 bp, Homo sapien
gatgtttttcgtacctactgctttg

SEQ ID NO: 4531348 - DNA, 25 bp, Homo sapien
agctctccaacacagggtctggtag

SEQ ID NO: 4531349 - DNA, 25 bp, Homo sapien
ccaagtcactagcaaggctgtgcaa

SEQ ID NO: 4531350 - DNA, 25 bp, Homo sapien
cacagggtctggtagctgaccacag

SEQ ID NO: 4531351 - DNA, 25 bp, Homo sapien
ggtcagaggacaacagatatgcatc

SEQ ID NO: 4531352 - DNA, 25 bp, Homo sapien
agtggtacaatctgtgaagttgcca

SEQ ID NO: 4531353 - DNA, 25 bp, Homo sapien
gaagttgccacagatagctactttg

SEQ ID NO: 4531354 - DNA, 25 bp, Homo sapien
tagctactttgttcagtgagttttc

SEQ ID NO: 4531355 - DNA, 25 bp, Homo sapien
gagagtaactcctggtaatattcta

SEQ ID NO: 4531356 - DNA, 25 bp, Homo sapien
tcatatgtgtgttggctgcatgtat

SEQ ID NO: 4531357 - DNA, 25 bp, Homo sapien
ccagttcctatatccagaatgattt

SEQ ID NO: 4531358 - DNA, 25 bp, Homo sapien
agttcctatatccagaatgattttt

SEQ ID NO: 4531359 - DNA, 25 bp, Homo sapien
cagttcctatatccagaatgatttt

SEQ ID NO: 4531360 - DNA, 25 bp, Homo sapien
tcaatgatacttgcagggacatcaa

SEQ ID NO: 4531361 - DNA, 25 bp, Homo sapien
ggcaacatgtcaagaatagttgaag

SEQ ID NO: 4531362 - DNA, 25 bp, Homo sapien
cagtatactgatggaatttaagaac

SEQ ID NO: 4531363 - DNA, 25 bp, Homo sapien
ttggagaagtggtaagcggcaggga

SEQ ID NO: 4531364 - DNA, 25 bp, Homo sapien
agtatacgtgtagtgcacctcaggg

SEQ ID NO: 4531365 - DNA, 25 bp, Homo sapien
tgtagtgcacctcagggatgcggcc

SEQ ID NO: 4531366 - DNA, 25 bp, Homo sapien
ctggaaagcgggatctagtatacgt

SEQ ID NO: 4531367 - DNA, 25 bp, Homo sapien
ggatctagtatacgtgtagtgcacc

SEQ ID NO: 4531368 - DNA, 25 bp, Homo sapien
caggatttctaagagtgtgaattac

SEQ ID NO: 4531369 - DNA, 25 bp, Homo sapien
tcagctgttggatgatgatttgact

SEQ ID NO: 4531370 - DNA, 25 bp, Homo sapien
gatttgacttggagcaaaggcaatg

SEQ ID NO: 4531371 - DNA, 25 bp, Homo sapien
tggagctgaaagatccattgcagga

SEQ ID NO: 4531372 - DNA, 25 bp, Homo sapien
cagtattccctgtctaaagctttga

SEQ ID NO: 4531373 - DNA, 25 bp, Homo sapien
tatgactcacatggcccctctgtag

SEQ ID NO: 4531374 - DNA, 25 bp, Homo sapien
cacaacagctaaggttgaggaaagg

SEQ ID NO: 4531375 - DNA, 25 bp, Homo sapien
gttgaaacgatttcacaaggcttgt

SEQ ID NO: 4531376 - DNA, 25 bp, Homo sapien
gctgtcacccaaataacctgacctt

SEQ ID NO: 4531377 - DNA, 25 bp, Homo sapien
gaggctgctacttcccggttctgac

SEQ ID NO: 4531378 - DNA, 25 bp, Homo sapien
cttcctcaaatagcaccagtgctgt

SEQ ID NO: 4531379 - DNA, 25 bp, Homo sapien
aagtcactggaggctgctacttccc

SEQ ID NO: 4531380 - DNA, 25 bp, Homo sapien
aggactcagcttgtatccccagtcc

SEQ ID NO: 4531381 - DNA, 25 bp, Homo sapien
caggactcagcttgtatccccagtc

SEQ ID NO: 4531382 - DNA, 25 bp, Homo sapien
ggactcagcttgtatccccagtcct

SEQ ID NO: 4531383 - DNA, 25 bp, Homo sapien
aggatctagtgcaggactcagcttg

SEQ ID NO: 4531384 - DNA, 25 bp, Homo sapien
caagctggcttgcctggtcaccagt

SEQ ID NO: 4531385 - DNA, 25 bp, Homo sapien
ttgcctggtcaccagtagcagaagc

SEQ ID NO: 4531386 - DNA, 25 bp, Homo sapien
agtagcagaagcaggccttctatgc

SEQ ID NO: 4531387 - DNA, 25 bp, Homo sapien
gcagaagcaggccttctatgctttc

SEQ ID NO: 4531388 - DNA, 25 bp, Homo sapien
tgcttgacaagtgatgtggataatt

SEQ ID NO: 4531389 - DNA, 25 bp, Homo sapien
gacaagtgatgtggataattttatc

SEQ ID NO: 4531390 - DNA, 25 bp, Homo sapien
caagtgatgtggataattttatccc

SEQ ID NO: 4531391 - DNA, 25 bp, Homo sapien
catgttgcttgacaagtgatgtgga

SEQ ID NO: 4531392 - DNA, 25 bp, Homo sapien
ccaagaacgccaggcaaaatctgcc

SEQ ID NO: 4531393 - DNA, 25 bp, Homo sapien
ccctaccaagaacgccaggcaaaat

SEQ ID NO: 4531394 - DNA, 25 bp, Homo sapien
caaacacaagtgcatccttcagctg

SEQ ID NO: 4531395 - DNA, 25 bp, Homo sapien
gaatttgaattggataccacagctg

SEQ ID NO: 4531396 - DNA, 25 bp, Homo sapien
gtcttgtcacccaggaaattcctca

SEQ ID NO: 4531397 - DNA, 25 bp, Homo sapien
gaaagtatcgaccattaatgacagg

SEQ ID NO: 4531398 - DNA, 25 bp, Homo sapien
gattgacagcctaatccagttttga

SEQ ID NO: 4531399 - DNA, 25 bp, Homo sapien
tacatcggaagacgtgattgacagc

SEQ ID NO: 4531400 - DNA, 25 bp, Homo sapien
aagtgccactcatagaacgggtaat

SEQ ID NO: 4531401 - DNA, 25 bp, Homo sapien
ttgaatcttccaggaaattagcagc

SEQ ID NO: 4531402 - DNA, 25 bp, Homo sapien
taatatccccgataacgggctcttg

SEQ ID NO: 4531403 - DNA, 25 bp, Homo sapien
gcagccaagtgtatttcgataatga

SEQ ID NO: 4531404 - DNA, 25 bp, Homo sapien
gaccttattatagctctcagctgac

SEQ ID NO: 4531405 - DNA, 25 bp, Homo sapien
tagctttgggtatgtgctccattca

SEQ ID NO: 4531406 - DNA, 25 bp, Homo sapien
tacaccttacatcagaagcaccatg

SEQ ID NO: 4531407 - DNA, 25 bp, Homo sapien
gagacctgagctcgaattctggtac

SEQ ID NO: 4531408 - DNA, 25 bp, Homo sapien
cttggtcctgtttacctctgtaagc

SEQ ID NO: 4531409 - DNA, 25 bp, Homo sapien
tttcatgagcttaagggagacaatt

SEQ ID NO: 4531410 - DNA, 25 bp, Homo sapien
tagaaatcacggtactaaatttata

SEQ ID NO: 4531411 - DNA, 25 bp, Homo sapien
ctatcatagaaatcacggtactaaa

SEQ ID NO: 4531412 - DNA, 25 bp, Homo sapien
gagcttaagggagacaattctccta

SEQ ID NO: 4531413 - DNA, 25 bp, Homo sapien
cagccagggttgagctagtgcttgc

SEQ ID NO: 4531414 - DNA, 25 bp, Homo sapien
acaccgacatttggattgctggctc

SEQ ID NO: 4531415 - DNA, 25 bp, Homo sapien
tgctggctcctcactatattttgaa

SEQ ID NO: 4531416 - DNA, 25 bp, Homo sapien
gaacaattctgccatagatcaaggg

SEQ ID NO: 4531417 - DNA, 25 bp, Homo sapien
ccttcttccatagcagtaataacca

SEQ ID NO: 4531418 - DNA, 25 bp, Homo sapien
ctccaacaggtttctttctctctct

SEQ ID NO: 4531419 - DNA, 25 bp, Homo sapien
cactgcattctccaacaggtttctt

SEQ ID NO: 4531420 - DNA, 25 bp, Homo sapien
tcccttcttccatagcagtaataac

SEQ ID NO: 4531421 - DNA, 25 bp, Homo sapien
tgtggtgatagaagaagaataagca

SEQ ID NO: 4531422 - DNA, 25 bp, Homo sapien
ggtaaacacgaacacagtgggaatc

SEQ ID NO: 4531423 - DNA, 25 bp, Homo sapien
gactttacatgaagccagaatacca

SEQ ID NO: 4531424 - DNA, 25 bp, Homo sapien
tccaaagctctagaaaataggtgcc

SEQ ID NO: 4531425 - DNA, 25 bp, Homo sapien
gatataaattcgtcatctgcctgct

SEQ ID NO: 4531426 - DNA, 25 bp, Homo sapien
agaagtcaggtagaagatccactgc

SEQ ID NO: 4531427 - DNA, 25 bp, Homo sapien
agatccactgcttggtaccagagaa

SEQ ID NO: 4531428 - DNA, 25 bp, Homo sapien
gagtttgccaactctaggcccagaa

SEQ ID NO: 4531429 - DNA, 25 bp, Homo sapien
gaatcaggtatagactcttggaacc

SEQ ID NO: 4531430 - DNA, 25 bp, Homo sapien
tctcagctgaagaaatcgccaagtt

SEQ ID NO: 4531431 - DNA, 25 bp, Homo sapien
gaaccactgagaatgatgctcaact

SEQ ID NO: 4531432 - DNA, 25 bp, Homo sapien
tgtgatgggtgactaaataagcacc

SEQ ID NO: 4531433 - DNA, 25 bp, Homo sapien
caaagcctgggtaacaaatctgatc

SEQ ID NO: 4531434 - DNA, 25 bp, Homo sapien
gtgctctccgtacaagccctagatg

SEQ ID NO: 4531435 - DNA, 25 bp, Homo sapien
agcagccagtcctgattactagaag

SEQ ID NO: 4531436 - DNA, 25 bp, Homo sapien
caattcttgtgcagctcaggagcag

SEQ ID NO: 4531437 - DNA, 25 bp, Homo sapien
ggtgatagatactaggccatagtgg

SEQ ID NO: 4531438 - DNA, 25 bp, Homo sapien
ccccataggtgatagatactaggcc

SEQ ID NO: 4531439 - DNA, 25 bp, Homo sapien
tgaataaagcattaggcatgaatgg

SEQ ID NO: 4531440 - DNA, 25 bp, Homo sapien
taggcatgaatggagccccataggt

SEQ ID NO: 4531441 - DNA, 25 bp, Homo sapien
gaacatcgtgttgccatctgggaag

SEQ ID NO: 4531442 - DNA, 25 bp, Homo sapien
caaataaacattggcaggcgcctgc

SEQ ID NO: 4531443 - DNA, 25 bp, Homo sapien
tgtaagctgcgaacttggcgggctc

SEQ ID NO: 4531444 - DNA, 25 bp, Homo sapien
gtcagttttatcgtggaacatcgtg

SEQ ID NO: 4531445 - DNA, 25 bp, Homo sapien
gacaccaagtgttcactgtggctat

SEQ ID NO: 4531446 - DNA, 25 bp, Homo sapien
tcttactactttcctgaattttcca

SEQ ID NO: 4531447 - DNA, 25 bp, Homo sapien
ccaagtgttcactgtggctatcact

SEQ ID NO: 4531448 - DNA, 25 bp, Homo sapien
tgtgttgttgtgtagcatttctttt

SEQ ID NO: 4531449 - DNA, 25 bp, Homo sapien
tcggtagcctctcaaggagaaaagc

SEQ ID NO: 4531450 - DNA, 25 bp, Homo sapien
tcccagtgatagcaatctgttgtcc

SEQ ID NO: 4531451 - DNA, 25 bp, Homo sapien
ccccaggaaggagatcgagctttat

SEQ ID NO: 4531452 - DNA, 25 bp, Homo sapien
aacagcttcgataaccttggtccag

SEQ ID NO: 4531453 - DNA, 25 bp, Homo sapien
ctcctatcttaaagtgacctgccca

SEQ ID NO: 4531454 - DNA, 25 bp, Homo sapien
gatacgctcttgcttagccacgtgg

SEQ ID NO: 4531455 - DNA, 25 bp, Homo sapien
ggactcctctcccactcaagtgttg

SEQ ID NO: 4531456 - DNA, 25 bp, Homo sapien
gtgtaatagccagtagatacgctct

SEQ ID NO: 4531457 - DNA, 25 bp, Homo sapien
tgtgcctgagtggtggctctgccca

SEQ ID NO: 4531458 - DNA, 25 bp, Homo sapien
cagagctgcaatagctggtgccagg

SEQ ID NO: 4531459 - DNA, 25 bp, Homo sapien
tctagaggcccatttcccggcagtg

SEQ ID NO: 4531460 - DNA, 25 bp, Homo sapien
ggtctaagatcctcaggaagccacg

SEQ ID NO: 4531461 - DNA, 25 bp, Homo sapien
caaagagtgggtggcttcttctgac

SEQ ID NO: 4531462 - DNA, 25 bp, Homo sapien
gaagtattccacaaatactagaaga

SEQ ID NO: 4531463 - DNA, 25 bp, Homo sapien
caatgctggattggagataaacaaa

SEQ ID NO: 4531464 - DNA, 25 bp, Homo sapien
agtcaataaaagctccctctcactt

SEQ ID NO: 4531465 - DNA, 25 bp, Homo sapien
cattctgatgcaagtagatggacgt

SEQ ID NO: 4531466 - DNA, 25 bp, Homo sapien
tctagacacttctcagagaaccatg

SEQ ID NO: 4531467 - DNA, 25 bp, Homo sapien
aatttcttaaagtactgtggatagc

SEQ ID NO: 4531468 - DNA, 25 bp, Homo sapien
gccttggtcattcctgttaattgaa

SEQ ID NO: 4531469 - DNA, 25 bp, Homo sapien
tccagtgaaggaagtaatgtgccat

SEQ ID NO: 4531470 - DNA, 25 bp, Homo sapien
tggagttaatatcttggttggaacc

SEQ ID NO: 4531471 - DNA, 25 bp, Homo sapien
agttctagagaagttgggttacaca

SEQ ID NO: 4531472 - DNA, 25 bp, Homo sapien
caactgagacaattgagttctagag

SEQ ID NO: 4531473 - DNA, 25 bp, Homo sapien
tattgtctgtcatttgaataactgg

SEQ ID NO: 4531474 - DNA, 25 bp, Homo sapien
ccaacagtgtaccatggttcttttt

SEQ ID NO: 4531475 - DNA, 25 bp, Homo sapien
tagtggatgtactaatacacattca

SEQ ID NO: 4531476 - DNA, 25 bp, Homo sapien
tctccatataatcgccagcatttgt

SEQ ID NO: 4531477 - DNA, 25 bp, Homo sapien
tgtacagttaccaacattcctcttg

SEQ ID NO: 4531478 - DNA, 25 bp, Homo sapien
catactgtttaccagtgtttgtaca

SEQ ID NO: 4531479 - DNA, 25 bp, Homo sapien
tgattatggcttcgatcttgtaact

SEQ ID NO: 4531480 - DNA, 25 bp, Homo sapien
taaagttgctcatggtagcctgtaa

SEQ ID NO: 4531481 - DNA, 25 bp, Homo sapien
tctactgttaagaggctctgatgtg

SEQ ID NO: 4531482 - DNA, 25 bp, Homo sapien
actgttaagaggctctgatgtgttc

SEQ ID NO: 4531483 - DNA, 25 bp, Homo sapien
tgcttgtagatgtttgtgggtgtct

SEQ ID NO: 4531484 - DNA, 25 bp, Homo sapien
caagtctactgttaagaggctctga

SEQ ID NO: 4531485 - DNA, 25 bp, Homo sapien
agcaatcgaaaacctgtcagtgtag

SEQ ID NO: 4531486 - DNA, 25 bp, Homo sapien
gaccagcaagaatatttgtgccact

SEQ ID NO: 4531487 - DNA, 25 bp, Homo sapien
gaaaagtgaagattaagaccagcaa

SEQ ID NO: 4531488 - DNA, 25 bp, Homo sapien
acagtgaaaagtgaagattaagacc

SEQ ID NO: 4531489 - DNA, 25 bp, Homo sapien
tcagttgaggggctcctattctgtc

SEQ ID NO: 4531490 - DNA, 25 bp, Homo sapien
ttcctgcttcctcagttgaggggct

SEQ ID NO: 4531491 - DNA, 25 bp, Homo sapien
gcttcctcagttgaggggctcctat

SEQ ID NO: 4531492 - DNA, 25 bp, Homo sapien
ttcctcagttgaggggctcctattc

SEQ ID NO: 4531493 - DNA, 25 bp, Homo sapien
cctaatgtacagcttttctgctttc

SEQ ID NO: 4531494 - DNA, 25 bp, Homo sapien
cttgggcctgatcagctggagagaa

SEQ ID NO: 4531495 - DNA, 25 bp, Homo sapien
atcctaatgtacagcttttctgctt

SEQ ID NO: 4531496 - DNA, 25 bp, Homo sapien
tttccaagcttgggcctgatcagct

SEQ ID NO: 4531497 - DNA, 25 bp, Homo sapien
gggtcaatgcctcgatgttcccatg

SEQ ID NO: 4531498 - DNA, 25 bp, Homo sapien
catgagtgtcccagtgggtagccag

SEQ ID NO: 4531499 - DNA, 25 bp, Homo sapien
cattcagagacaggctacagcagag

SEQ ID NO: 4531500 - DNA, 25 bp, Homo sapien
gcagaggccatgtccataattctca

SEQ ID NO: 4531501 - DNA, 25 bp, Homo sapien
ctgttgcagaactagagatgtgggc

SEQ ID NO: 4531502 - DNA, 25 bp, Homo sapien
cacagactgaactgcaataggtggg

SEQ ID NO: 4531503 - DNA, 25 bp, Homo sapien
gccaagaggagtaagtgcagaccaa

SEQ ID NO: 4531504 - DNA, 25 bp, Homo sapien
cacaatgtcccacatcatagagagg

SEQ ID NO: 4531505 - DNA, 25 bp, Homo sapien
caattttaaattgcttcattctccc

SEQ ID NO: 4531506 - DNA, 25 bp, Homo sapien
ttgcttcattctcccaactaggaaa

SEQ ID NO: 4531507 - DNA, 25 bp, Homo sapien
aattttaaattgcttcattctccca

SEQ ID NO: 4531508 - DNA, 25 bp, Homo sapien
taaattgcttcattctcccaactag

SEQ ID NO: 4531509 - DNA, 25 bp, Homo sapien
tgcttacaaaattgtttgttctccc

SEQ ID NO: 4531510 - DNA, 25 bp, Homo sapien
ccctgtctgcagttctgctttattg

SEQ ID NO: 4531511 - DNA, 25 bp, Homo sapien
caggctggctgcttacaaaattgtt

SEQ ID NO: 4531512 - DNA, 25 bp, Homo sapien
tcaagcccaacaccctgtctgcagt

SEQ ID NO: 4531513 - DNA, 25 bp, Homo sapien
cccattcgcccccaccagggtgagg

SEQ ID NO: 4531514 - DNA, 25 bp, Homo sapien
gcagaacatttaagccaggaggctt

SEQ ID NO: 4531515 - DNA, 25 bp, Homo sapien
gacctttagcataacagtcctggcc

SEQ ID NO: 4531516 - DNA, 25 bp, Homo sapien
aaagacctttagcataacagtcctg

SEQ ID NO: 4531517 - DNA, 25 bp, Homo sapien
acctttagcataacagtcctggccc

SEQ ID NO: 4531518 - DNA, 25 bp, Homo sapien
aagacctttagcataacagtcctgg

SEQ ID NO: 4531519 - DNA, 25 bp, Homo sapien
ccttgacatgactccttattctcca

SEQ ID NO: 4531520 - DNA, 25 bp, Homo sapien
gacatgactccttattctccaattc

SEQ ID NO: 4531521 - DNA, 25 bp, Homo sapien
caaccttgacatgactccttattct

SEQ ID NO: 4531522 - DNA, 25 bp, Homo sapien
tctcaaccttgacatgactccttat

SEQ ID NO: 4531523 - DNA, 25 bp, Homo sapien
aataattaaactgtttgggcacatc

SEQ ID NO: 4531524 - DNA, 25 bp, Homo sapien
ggcaaataattaaactgtttgggca

SEQ ID NO: 4531525 - DNA, 25 bp, Homo sapien
ctcccgagggcaaataattaaactg

SEQ ID NO: 4531526 - DNA, 25 bp, Homo sapien
tttcaagtactcccgagggcaaata

SEQ ID NO: 4531527 - DNA, 25 bp, Homo sapien
agtctatggaaaaacaggagggcct

SEQ ID NO: 4531528 - DNA, 25 bp, Homo sapien
gcaaacttacaccagtccacagagg

SEQ ID NO: 4531529 - DNA, 25 bp, Homo sapien
gcactgtaattaccctgcagggcac

SEQ ID NO: 4531530 - DNA, 25 bp, Homo sapien
tagttgtggacctgaatggcttgcc

SEQ ID NO: 4531531 - DNA, 25 bp, Homo sapien
tagcccaggtctgagtaaatagcct

SEQ ID NO: 4531532 - DNA, 25 bp, Homo sapien
atttaagtcaacatgggccacccca

SEQ ID NO: 4531533 - DNA, 25 bp, Homo sapien
cataagacattaagttgccctggca

SEQ ID NO: 4531534 - DNA, 25 bp, Homo sapien
tcatctggcaaatcaaggcgaggtc

SEQ ID NO: 4531535 - DNA, 25 bp, Homo sapien
tgatgcccacatcaagacaaaaagc

SEQ ID NO: 4531536 - DNA, 25 bp, Homo sapien
ggttaaatagacacgaatgggacag

SEQ ID NO: 4531537 - DNA, 25 bp, Homo sapien
caagaaacaatgttgtgggcagccg

SEQ ID NO: 4531538 - DNA, 25 bp, Homo sapien
tctccactctcagggttgatgccca

SEQ ID NO: 4531539 - DNA, 25 bp, Homo sapien
attgcacgattgcacgctgcactct

SEQ ID NO: 4531540 - DNA, 25 bp, Homo sapien
gagagcagacaggactttgtcttcg

SEQ ID NO: 4531541 - DNA, 25 bp, Homo sapien
ttgaacccttatcagggccagggac

SEQ ID NO: 4531542 - DNA, 25 bp, Homo sapien
aattctaccttactgtaggctgcga

SEQ ID NO: 4531543 - DNA, 25 bp, Homo sapien
ttagccctagtaaaaagtgacacaa

SEQ ID NO: 4531544 - DNA, 25 bp, Homo sapien
gtcaaccaaatagaggtcccaatag

SEQ ID NO: 4531545 - DNA, 25 bp, Homo sapien
tagaggtcccaataggatctttttg

SEQ ID NO: 4531546 - DNA, 25 bp, Homo sapien
ggaaagagacattagacaattagcc

SEQ ID NO: 4531547 - DNA, 25 bp, Homo sapien
catacagcctctgttgtgcgggccg

SEQ ID NO: 4531548 - DNA, 25 bp, Homo sapien
caaattgagttccacccctggtgaa

SEQ ID NO: 4531549 - DNA, 25 bp, Homo sapien
caaaggtgcatacacacgtccgaga

SEQ ID NO: 4531550 - DNA, 25 bp, Homo sapien
tcacttctggatatgcgacacggcc

SEQ ID NO: 4531551 - DNA, 25 bp, Homo sapien
gaacaatgtcagttgccatttcttg

SEQ ID NO: 4531552 - DNA, 25 bp, Homo sapien
taaattgatctatgaacaatgtcag

SEQ ID NO: 4531553 - DNA, 25 bp, Homo sapien
gatctatgaacaatgtcagttgcca

SEQ ID NO: 4531554 - DNA, 25 bp, Homo sapien
tatgaacaatgtcagttgccatttc

SEQ ID NO: 4531555 - DNA, 25 bp, Homo sapien
cggatgtccagtccactaacgagaa

SEQ ID NO: 4531556 - DNA, 25 bp, Homo sapien
gagaacacacttctaggcattgtgg

SEQ ID NO: 4531557 - DNA, 25 bp, Homo sapien
tttgctgggcatattcagagccaac

SEQ ID NO: 4531558 - DNA, 25 bp, Homo sapien
tccagagacagatgcgtaggcggat

SEQ ID NO: 4531559 - DNA, 25 bp, Homo sapien
ttaagttgaatattggcgcccactc

SEQ ID NO: 4531560 - DNA, 25 bp, Homo sapien
tttaagttgaatattggcgcccact

SEQ ID NO: 4531561 - DNA, 25 bp, Homo sapien
atggtcataggaccctccgatccag

SEQ ID NO: 4531562 - DNA, 25 bp, Homo sapien
gatcagaagtgtgttcccgagggtt

SEQ ID NO: 4531563 - DNA, 25 bp, Homo sapien
ttggtcgcccgtgcacaaaagggca

SEQ ID NO: 4531564 - DNA, 25 bp, Homo sapien
gacagacaatacttccggtgcctct

SEQ ID NO: 4531565 - DNA, 25 bp, Homo sapien
tgctctcccctgtgttgatcagaag

SEQ ID NO: 4531566 - DNA, 25 bp, Homo sapien
ggggctctagagttattcaccagtg

SEQ ID NO: 4531567 - DNA, 25 bp, Homo sapien
caggggctctagagttattcaccag

SEQ ID NO: 4531568 - DNA, 25 bp, Homo sapien
tcaggggctctagagttattcacca

SEQ ID NO: 4531569 - DNA, 25 bp, Homo sapien
tctcaggggctctagagttattcac

SEQ ID NO: 4531570 - DNA, 25 bp, Homo sapien
ccatctgggaagtggaatgaaacac

SEQ ID NO: 4531571 - DNA, 25 bp, Homo sapien
taaagagctctattaaaggagtcca

SEQ ID NO: 4531572 - DNA, 25 bp, Homo sapien
ccagatgccaggtgtttaagaggga

SEQ ID NO: 4531573 - DNA, 25 bp, Homo sapien
ctatgggctgtctataaagagctct

SEQ ID NO: 4531574 - DNA, 25 bp, Homo sapien
ggagcaagcagctgatatctgctcc

SEQ ID NO: 4531575 - DNA, 25 bp, Homo sapien
ccactggagcaggtttgtacgcaga

SEQ ID NO: 4531576 - DNA, 25 bp, Homo sapien
ttaagatgcgttatagaaaaggaag

SEQ ID NO: 4531577 - DNA, 25 bp, Homo sapien
gagagagaagtcattagctgagatc

SEQ ID NO: 4531578 - DNA, 25 bp, Homo sapien
gaaggtgccacggagagttcagtac

SEQ ID NO: 4531579 - DNA, 25 bp, Homo sapien
aaaagaataactgagctacagaaaa

SEQ ID NO: 4531580 - DNA, 25 bp, Homo sapien
aaatgcaggctccaaatttgacagt

SEQ ID NO: 4531581 - DNA, 25 bp, Homo sapien
ataactgagctacagaaaatgcagg

SEQ ID NO: 4531582 - DNA, 25 bp, Homo sapien
ggctccaaatttgacagtggttctg

SEQ ID NO: 4531583 - DNA, 25 bp, Homo sapien
gcttgttctcaaatcggagtctcgg

SEQ ID NO: 4531584 - DNA, 25 bp, Homo sapien
aaatcggagtctcggatccactgaa

SEQ ID NO: 4531585 - DNA, 25 bp, Homo sapien
cacttcttgcttatgcttgttctca

SEQ ID NO: 4531586 - DNA, 25 bp, Homo sapien
gtctcggatccactgaacaatgtgc

SEQ ID NO: 4531587 - DNA, 25 bp, Homo sapien
gagtacttaaaacctcactgagtgt

SEQ ID NO: 4531588 - DNA, 25 bp, Homo sapien
tgctcccatactgcaaccacaggta

SEQ ID NO: 4531589 - DNA, 25 bp, Homo sapien
ctagactagaatgagaacccaggac

SEQ ID NO: 4531590 - DNA, 25 bp, Homo sapien
cctatggtcgaaagatgacaaacga

SEQ ID NO: 4531591 - DNA, 25 bp, Homo sapien
ttctctagtagagaaatggccaaat

SEQ ID NO: 4531592 - DNA, 25 bp, Homo sapien
caggttgctgaagaagagacggatc

SEQ ID NO: 4531593 - DNA, 25 bp, Homo sapien
tggaactggcagatacaggttgctg

SEQ ID NO: 4531594 - DNA, 25 bp, Homo sapien
taaggaccacactgcttcaagagga

SEQ ID NO: 4531595 - DNA, 25 bp, Homo sapien
atgtgttttgacttccaaatattcc

SEQ ID NO: 4531596 - DNA, 25 bp, Homo sapien
gtgttttgacttccaaatattccca

SEQ ID NO: 4531597 - DNA, 25 bp, Homo sapien
tgtgttttgacttccaaatattccc

SEQ ID NO: 4531598 - DNA, 25 bp, Homo sapien
ccccataggccccacattccagagt

SEQ ID NO: 4531599 - DNA, 25 bp, Homo sapien
acaggccccataggccccacattcc

SEQ ID NO: 4531600 - DNA, 25 bp, Homo sapien
ccataggccccacattccagagtgg

SEQ ID NO: 4531601 - DNA, 25 bp, Homo sapien
ggccccataggccccacattccaga

SEQ ID NO: 4531602 - DNA, 25 bp, Homo sapien
aaggctgaagggtggccagaatgac

SEQ ID NO: 4531603 - DNA, 25 bp, Homo sapien
tagaactcaggggtacagaacgaag

SEQ ID NO: 4531604 - DNA, 25 bp, Homo sapien
tgtaagagtgtagtgagagaaccct

SEQ ID NO: 4531605 - DNA, 25 bp, Homo sapien
aacccttgggtgagcttgacctttg

SEQ ID NO: 4531606 - DNA, 25 bp, Homo sapien
gtggacagacaagccaaattccacc

SEQ ID NO: 4531607 - DNA, 25 bp, Homo sapien
agcccggtcctggagtagccaggtt

SEQ ID NO: 4531608 - DNA, 25 bp, Homo sapien
tggacagacaagccaaattccacct

SEQ ID NO: 4531609 - DNA, 25 bp, Homo sapien
tcagcccggtcctggagtagccagg

SEQ ID NO: 4531610 - DNA, 25 bp, Homo sapien
aggctaagctcaaaggactccatca

SEQ ID NO: 4531611 - DNA, 25 bp, Homo sapien
gggctgctgacctgatagctccgtc

SEQ ID NO: 4531612 - DNA, 25 bp, Homo sapien
aaggaatccaagaaaggctaagctc

SEQ ID NO: 4531613 - DNA, 25 bp, Homo sapien
tagctccgtcaaaaggttagaagga

SEQ ID NO: 4531614 - DNA, 25 bp, Homo sapien
gcagggcctgaatctctgaaatcca

SEQ ID NO: 4531615 - DNA, 25 bp, Homo sapien
caaggtgagaaccaaggaaaaggag

SEQ ID NO: 4531616 - DNA, 25 bp, Homo sapien
ccaggttgactctgagcagctgtca

SEQ ID NO: 4531617 - DNA, 25 bp, Homo sapien
catccagtcctgtgtgttgcagggc

SEQ ID NO: 4531618 - DNA, 25 bp, Homo sapien
ggatcttatccaggagaaaatcaag

SEQ ID NO: 4531619 - DNA, 25 bp, Homo sapien
aagataagaaatatttcacagtatc

SEQ ID NO: 4531620 - DNA, 25 bp, Homo sapien
atccaggagaaaatcaagataagaa

SEQ ID NO: 4531621 - DNA, 25 bp, Homo sapien
caggatcttatccaggagaaaatca

SEQ ID NO: 4531622 - DNA, 25 bp, Homo sapien
ctttctctcgttttcagttttcgca

SEQ ID NO: 4531623 - DNA, 25 bp, Homo sapien
tttctctcgttttcagttttcgcac

SEQ ID NO: 4531624 - DNA, 25 bp, Homo sapien
ctggccacagcgtttcctttctctc

SEQ ID NO: 4531625 - DNA, 25 bp, Homo sapien
cacagcgtttcctttctctcgtttt

SEQ ID NO: 4531626 - DNA, 25 bp, Homo sapien
tagaatatttggagctttctcttga

SEQ ID NO: 4531627 - DNA, 25 bp, Homo sapien
gctgaatggttgttagaatatttgg

SEQ ID NO: 4531628 - DNA, 25 bp, Homo sapien
caagcgtggatctaagatcattgga

SEQ ID NO: 4531629 - DNA, 25 bp, Homo sapien
tagtgttgaacagagtattaccaga

SEQ ID NO: 4531630 - DNA, 25 bp, Homo sapien
tcaaccacattcctcaaaagcacaa

SEQ ID NO: 4531631 - DNA, 25 bp, Homo sapien
catgagctcaaccacattcctcaaa

SEQ ID NO: 4531632 - DNA, 25 bp, Homo sapien
cttataaaaagcacccatgagctca

SEQ ID NO: 4531633 - DNA, 25 bp, Homo sapien
cctagtcttataaaaagcacccatg

SEQ ID NO: 4531634 - DNA, 25 bp, Homo sapien
tactgccaaaccaacaattgccgtc

SEQ ID NO: 4531635 - DNA, 25 bp, Homo sapien
gatactgccaaaccaacaattgccg

SEQ ID NO: 4531636 - DNA, 25 bp, Homo sapien
cggatactgccaaaccaacaattgc

SEQ ID NO: 4531637 - DNA, 25 bp, Homo sapien
ggatactgccaaaccaacaattgcc

SEQ ID NO: 4531638 - DNA, 25 bp, Homo sapien
cctggagagggatggtagaagagga

SEQ ID NO: 4531639 - DNA, 25 bp, Homo sapien
tgttaacagtgcactactgtgcacg

SEQ ID NO: 4531640 - DNA, 25 bp, Homo sapien
aacaacaatcctgcgattcctggag

SEQ ID NO: 4531641 - DNA, 25 bp, Homo sapien
tgtgcacgctcattctcagaacaac

SEQ ID NO: 4531642 - DNA, 25 bp, Homo sapien
ggcaccagcggcaaccttcattctt

SEQ ID NO: 4531643 - DNA, 25 bp, Homo sapien
accagcggcaaccttcattcttagg

SEQ ID NO: 4531644 - DNA, 25 bp, Homo sapien
tttaatgtggcaccagcggcaacct

SEQ ID NO: 4531645 - DNA, 25 bp, Homo sapien
tgttctctttaatgtggcaccagcg

SEQ ID NO: 4531646 - DNA, 25 bp, Homo sapien
aagagaaaaacattgcacgcagggc

SEQ ID NO: 4531647 - DNA, 25 bp, Homo sapien
gacagctgtctatccaatcggtccg

SEQ ID NO: 4531648 - DNA, 25 bp, Homo sapien
cacgcagggcgagacttatatctgg

SEQ ID NO: 4531649 - DNA, 25 bp, Homo sapien
tcagagcagttcgtgccacagaagc

SEQ ID NO: 4531650 - DNA, 25 bp, Homo sapien
cacgcctaccctgggcttcaatgga

SEQ ID NO: 4531651 - DNA, 25 bp, Homo sapien
gagttatttcctccgttctggctgc

SEQ ID NO: 4531652 - DNA, 25 bp, Homo sapien
tggaagtcgttctccattaacaatc

SEQ ID NO: 4531653 - DNA, 25 bp, Homo sapien
ttctggctgcgccagattcatgtaa

SEQ ID NO: 4531654 - DNA, 25 bp, Homo sapien
gcgggcggccgggagaagtcgcgag

SEQ ID NO: 4531655 - DNA, 25 bp, Homo sapien
gcgagggactacttcgcctccttct

SEQ ID NO: 4531656 - DNA, 25 bp, Homo sapien
gtcgcgagggactacttcgcctcct

SEQ ID NO: 4531657 - DNA, 25 bp, Homo sapien
gagaagtcgcgagggactacttcgc

SEQ ID NO: 4531658 - DNA, 25 bp, Homo sapien
cccctgaggaggagtcccggctgga

SEQ ID NO: 4531659 - DNA, 25 bp, Homo sapien
agcgtgtctggaggaatccgccgcc

SEQ ID NO: 4531660 - DNA, 25 bp, Homo sapien
tgctctgccggcgcctgaggaccga

SEQ ID NO: 4531661 - DNA, 25 bp, Homo sapien
tgggaacgatcggtttgcctgcccc

SEQ ID NO: 4531662 - DNA, 25 bp, Homo sapien
ggtaccgttctgggtgaggcatcca

SEQ ID NO: 4531663 - DNA, 25 bp, Homo sapien
atccctgagggaagcgccgcctctg

SEQ ID NO: 4531664 - DNA, 25 bp, Homo sapien
gggcctcctcggatcccttggctgg

SEQ ID NO: 4531665 - DNA, 25 bp, Homo sapien
tcgccacggcggaggttgctgccgc

SEQ ID NO: 4531666 - DNA, 25 bp, Homo sapien
cagtggcatttgaatgagtgcttac

SEQ ID NO: 4531667 - DNA, 25 bp, Homo sapien
tgacttttgccttagctttggagat

SEQ ID NO: 4531668 - DNA, 25 bp, Homo sapien
tcttcaaggctcaaggagaaagtga

SEQ ID NO: 4531669 - DNA, 25 bp, Homo sapien
tccacaagggaaatagatacttctg

SEQ ID NO: 4531670 - DNA, 25 bp, Homo sapien
tttcctaatagcgatgggaaatgtc

SEQ ID NO: 4531671 - DNA, 25 bp, Homo sapien
cctaatagcgatgggaaatgtctcc

SEQ ID NO: 4531672 - DNA, 25 bp, Homo sapien
ctatgcccatttcctaatagcgatg

SEQ ID NO: 4531673 - DNA, 25 bp, Homo sapien
gcccatttcctaatagcgatgggaa

SEQ ID NO: 4531674 - DNA, 25 bp, Homo sapien
ttcacctctctatcattaagagttg

SEQ ID NO: 4531675 - DNA, 25 bp, Homo sapien
cacctctctatcattaagagttgct

SEQ ID NO: 4531676 - DNA, 25 bp, Homo sapien
cctctctatcattaagagttgcttc

SEQ ID NO: 4531677 - DNA, 25 bp, Homo sapien
gttttcacctctctatcattaagag

SEQ ID NO: 4531678 - DNA, 25 bp, Homo sapien
gttattcttgttgattgagtcctac

SEQ ID NO: 4531679 - DNA, 25 bp, Homo sapien
tgtttttaatagcttctggcaatgg

SEQ ID NO: 4531680 - DNA, 25 bp, Homo sapien
gaattagggatatattccaatagac

SEQ ID NO: 4531681 - DNA, 25 bp, Homo sapien
cccacaactaattaatactagcaag

SEQ ID NO: 4531682 - DNA, 25 bp, Homo sapien
caaagatgttgggtgattgtgccaa

SEQ ID NO: 4531683 - DNA, 25 bp, Homo sapien
gagcaatagactgttctaggaggca

SEQ ID NO: 4531684 - DNA, 25 bp, Homo sapien
gtcaaagagctagttcattggcctc

SEQ ID NO: 4531685 - DNA, 25 bp, Homo sapien
aatattgtacattgcatagggaacc

SEQ ID NO: 4531686 - DNA, 25 bp, Homo sapien
agggactcacttctaccacacggaa

SEQ ID NO: 4531687 - DNA, 25 bp, Homo sapien
gacttctgagggtagatcctaagaa

SEQ ID NO: 4531688 - DNA, 25 bp, Homo sapien
agtctaattcccctcttcctgagtg

SEQ ID NO: 4531689 - DNA, 25 bp, Homo sapien
gagtgtaggctgttcctagggactc

SEQ ID NO: 4531690 - DNA, 25 bp, Homo sapien
ccaaacccttgccaacattgagtat

SEQ ID NO: 4531691 - DNA, 25 bp, Homo sapien
gtacgtgcccagtcttccaacaaag

SEQ ID NO: 4531692 - DNA, 25 bp, Homo sapien
tcaccaacagcgcaaaaaagtattt

SEQ ID NO: 4531693 - DNA, 25 bp, Homo sapien
attatgtaccttgcaaaagagttcc

SEQ ID NO: 4531694 - DNA, 25 bp, Homo sapien
cccagtgtcataaaatagcatcggt

SEQ ID NO: 4531695 - DNA, 25 bp, Homo sapien
tcagcaactgtcacaacacattggg

SEQ ID NO: 4531696 - DNA, 25 bp, Homo sapien
gctgggtatcaatgtttagccaaca

SEQ ID NO: 4531697 - DNA, 25 bp, Homo sapien
aaatagcagccagttttgacatagt

SEQ ID NO: 4531698 - DNA, 25 bp, Homo sapien
gaggtacagatccaaaacagggtag

SEQ ID NO: 4531699 - DNA, 25 bp, Homo sapien
gtgtgggtaagtggctcatgcaata

SEQ ID NO: 4531700 - DNA, 25 bp, Homo sapien
tttgaagaggacataagtcagacca

SEQ ID NO: 4531701 - DNA, 25 bp, Homo sapien
caaatacagtcgcattactggaggt

SEQ ID NO: 4531702 - DNA, 25 bp, Homo sapien
taagattttgccgtcccattcccat

SEQ ID NO: 4531703 - DNA, 25 bp, Homo sapien
atcagtatagtgcaactcctggttc

SEQ ID NO: 4531704 - DNA, 25 bp, Homo sapien
tttgtttaaccactttgctgctaag

SEQ ID NO: 4531705 - DNA, 25 bp, Homo sapien
aaaataacttgctggctatatagga

SEQ ID NO: 4531706 - DNA, 25 bp, Homo sapien
taagaggaagcactagaaactggca

SEQ ID NO: 4531707 - DNA, 25 bp, Homo sapien
tagcccaaaggtgcattaagcaagt

SEQ ID NO: 4531708 - DNA, 25 bp, Homo sapien
ttaatatgcacgtgagtctccagag

SEQ ID NO: 4531709 - DNA, 25 bp, Homo sapien
gcccagccgtgtgtatgtttctgaa

SEQ ID NO: 4531710 - DNA, 25 bp, Homo sapien
tcccgctaagaccacgtaagaaggc

SEQ ID NO: 4531711 - DNA, 25 bp, Homo sapien
tgctgactttgggtcccacagaacc

SEQ ID NO: 4531712 - DNA, 25 bp, Homo sapien
cattagacaccactgactgcagtaa

SEQ ID NO: 4531713 - DNA, 25 bp, Homo sapien
tgtctgttacatctctccagcctgc

SEQ ID NO: 4531714 - DNA, 25 bp, Homo sapien
cccaaccgacgatggagggagacgt

SEQ ID NO: 4531715 - DNA, 25 bp, Homo sapien
tgctctcaggcagttaccggccaga

SEQ ID NO: 4531716 - DNA, 25 bp, Homo sapien
tacacgcagcggttttaggcactat

SEQ ID NO: 4531717 - DNA, 25 bp, Homo sapien
gggctacttagagcgccgaacagct

SEQ ID NO: 4531718 - DNA, 25 bp, Homo sapien
tgtcatcaaaccaggactgcacagg

SEQ ID NO: 4531719 - DNA, 25 bp, Homo sapien
tgggaacaggttcagcaactcagta

SEQ ID NO: 4531720 - DNA, 25 bp, Homo sapien
caggatgagggttttcctcaggttc

SEQ ID NO: 4531721 - DNA, 25 bp, Homo sapien
caactcagtatctgccatgtcatca

SEQ ID NO: 4531722 - DNA, 25 bp, Homo sapien
tggccaggttggcagtgaagggaac

SEQ ID NO: 4531723 - DNA, 25 bp, Homo sapien
ccaggttggcagtgaagggaacaca

SEQ ID NO: 4531724 - DNA, 25 bp, Homo sapien
atacttggccaggttggcagtgaag

SEQ ID NO: 4531725 - DNA, 25 bp, Homo sapien
gggaacacattcaaagagttctctc

SEQ ID NO: 4531726 - DNA, 25 bp, Homo sapien
cagcgtgatcaacatagcgagtcac

SEQ ID NO: 4531727 - DNA, 25 bp, Homo sapien
cactataaagcctattgggaactac

SEQ ID NO: 4531728 - DNA, 25 bp, Homo sapien
tcccatgtcggtggcttcctcagct

SEQ ID NO: 4531729 - DNA, 25 bp, Homo sapien
gtctctaatgataaaggcagttggg

SEQ ID NO: 4531730 - DNA, 25 bp, Homo sapien
gaaatactctctcagattgtttaaa

SEQ ID NO: 4531731 - DNA, 25 bp, Homo sapien
taagtttcagaaatactctctcaga

SEQ ID NO: 4531732 - DNA, 25 bp, Homo sapien
cactaaggaatttgtcatgtatcac

SEQ ID NO: 4531733 - DNA, 25 bp, Homo sapien
tttcttcagacttggtaaacaggaa

SEQ ID NO: 4531734 - DNA, 25 bp, Homo sapien
tagaaagctgaattgttcccagtgg

SEQ ID NO: 4531735 - DNA, 25 bp, Homo sapien
tgagacatataaaagaccccacctg

SEQ ID NO: 4531736 - DNA, 25 bp, Homo sapien
tgcttcagtagatcaagggtagggc

SEQ ID NO: 4531737 - DNA, 25 bp, Homo sapien
tacatgacggtgtgagaaatagtcc

SEQ ID NO: 4531738 - DNA, 25 bp, Homo sapien
tataggcatggaagctaagtacccc

SEQ ID NO: 4531739 - DNA, 25 bp, Homo sapien
gaatttgtgaataggtgcccaggca

SEQ ID NO: 4531740 - DNA, 25 bp, Homo sapien
aatacctggccaaactaaagtcgtg

SEQ ID NO: 4531741 - DNA, 25 bp, Homo sapien
tgctggactgtaaaaacctgtgact

SEQ ID NO: 4531742 - DNA, 25 bp, Homo sapien
gaacatcagtggtatgaatagcaaa

SEQ ID NO: 4531743 - DNA, 25 bp, Homo sapien
caggtctgtgcattacagtttagga

SEQ ID NO: 4531744 - DNA, 25 bp, Homo sapien
aagctggtcagtgtaaagttcctca

SEQ ID NO: 4531745 - DNA, 25 bp, Homo sapien
gatcgcatacttttgatgaacatca

SEQ ID NO: 4531746 - DNA, 25 bp, Homo sapien
tgcatatttcagttggatctttagg

SEQ ID NO: 4531747 - DNA, 25 bp, Homo sapien
cagttggatctttagggcatcatta

SEQ ID NO: 4531748 - DNA, 25 bp, Homo sapien
ccatttgagctaagacatgattgct

SEQ ID NO: 4531749 - DNA, 25 bp, Homo sapien
tcattatctgctttcagagtattta

SEQ ID NO: 4531750 - DNA, 25 bp, Homo sapien
tcaaacgagcatttgtaagcagcag

SEQ ID NO: 4531751 - DNA, 25 bp, Homo sapien
aaagtttgtgagtggttagcaggca

SEQ ID NO: 4531752 - DNA, 25 bp, Homo sapien
gaataaaccatttccgagcaatagg

SEQ ID NO: 4531753 - DNA, 25 bp, Homo sapien
tctcgcgggagatctcaacttggca

SEQ ID NO: 4531754 - DNA, 25 bp, Homo sapien
taatggactgccttaacctacacaa

SEQ ID NO: 4531755 - DNA, 25 bp, Homo sapien
tatcctatactgattactccaagag

SEQ ID NO: 4531756 - DNA, 25 bp, Homo sapien
cagtgtctgggtaatttgggataca

SEQ ID NO: 4531757 - DNA, 25 bp, Homo sapien
cctgcgctgtgtgacataatggact

SEQ ID NO: 4531758 - DNA, 25 bp, Homo sapien
ccttctctcaaaccttggcaccatg

SEQ ID NO: 4531759 - DNA, 25 bp, Homo sapien
ttctctcaaaccttggcaccatgtt

SEQ ID NO: 4531760 - DNA, 25 bp, Homo sapien
ctctcaaaccttggcaccatgtttc

SEQ ID NO: 4531761 - DNA, 25 bp, Homo sapien
ctcaaaccttggcaccatgtttcca

SEQ ID NO: 4531762 - DNA, 25 bp, Homo sapien
tgtgagcctaacattgaaaagcagc

SEQ ID NO: 4531763 - DNA, 25 bp, Homo sapien
gaggcgttttctatggtgagccaca

SEQ ID NO: 4531764 - DNA, 25 bp, Homo sapien
gatagggagccctgtatagcctgtg

SEQ ID NO: 4531765 - DNA, 25 bp, Homo sapien
taaacagggctttgggcactggcac

SEQ ID NO: 4531766 - DNA, 25 bp, Homo sapien
taggtaggcagtctgaggtgacgga

SEQ ID NO: 4531767 - DNA, 25 bp, Homo sapien
ttttatgagggagtctttattctcc

SEQ ID NO: 4531768 - DNA, 25 bp, Homo sapien
tctcccacttgacaaaagcccgctt

SEQ ID NO: 4531769 - DNA, 25 bp, Homo sapien
gagctcctcctttgattttatgagg

SEQ ID NO: 4531770 - DNA, 25 bp, Homo sapien
agaaatcttctgtgaggacactccc

SEQ ID NO: 4531771 - DNA, 25 bp, Homo sapien
tcagcatgatggtccgatccttact

SEQ ID NO: 4531772 - DNA, 25 bp, Homo sapien
gccttgtgggcaacagccctcttca

SEQ ID NO: 4531773 - DNA, 25 bp, Homo sapien
gaagcacatatagagtatcctgggc

SEQ ID NO: 4531774 - DNA, 25 bp, Homo sapien
gaagtgttgttctctgtgggagcta

SEQ ID NO: 4531775 - DNA, 25 bp, Homo sapien
gagcagatctttggctcccaatgag

SEQ ID NO: 4531776 - DNA, 25 bp, Homo sapien
tgtttgtgacagttcatcccgcagt

SEQ ID NO: 4531777 - DNA, 25 bp, Homo sapien
caatgagcaaaggttggacactggc

SEQ ID NO: 4531778 - DNA, 25 bp, Homo sapien
acaagacatcctgggtcaagaagtc

SEQ ID NO: 4531779 - DNA, 25 bp, Homo sapien
cagtgaatctcagcatcagaagcag

SEQ ID NO: 4531780 - DNA, 25 bp, Homo sapien
gtgtctcacaaccaaattcatgcag

SEQ ID NO: 4531781 - DNA, 25 bp, Homo sapien
tctatcttctggagctaagacactt

SEQ ID NO: 4531782 - DNA, 25 bp, Homo sapien
atatccttgtttgatcactccccag

SEQ ID NO: 4531783 - DNA, 25 bp, Homo sapien
tcgatatccttgtttgatcactccc

SEQ ID NO: 4531784 - DNA, 25 bp, Homo sapien
tacatcgatatccttgtttgatcac

SEQ ID NO: 4531785 - DNA, 25 bp, Homo sapien
ctttacatcgatatccttgtttgat

SEQ ID NO: 4531786 - DNA, 25 bp, Homo sapien
caggcccagcttggaatagattgag

SEQ ID NO: 4531787 - DNA, 25 bp, Homo sapien
tcttggaagttgtgaggaaagccca

SEQ ID NO: 4531788 - DNA, 25 bp, Homo sapien
cagttgtcacaaaaagtgggcttca

SEQ ID NO: 4531789 - DNA, 25 bp, Homo sapien
gagctggctctcatgaagtaggctg

SEQ ID NO: 4531790 - DNA, 25 bp, Homo sapien
gtcgtgatcatagttcttgaagaca

SEQ ID NO: 4531791 - DNA, 25 bp, Homo sapien
aaactcgcagcaatcttttcaaatt

SEQ ID NO: 4531792 - DNA, 25 bp, Homo sapien
aactcgcagcaatcttttcaaattc

SEQ ID NO: 4531793 - DNA, 25 bp, Homo sapien
agaaatgtatccatcctggtcgtga

SEQ ID NO: 4531794 - DNA, 25 bp, Homo sapien
tcctctggacgtgtttgctaatggt

SEQ ID NO: 4531795 - DNA, 25 bp, Homo sapien
catcctctggacgtgtttgctaatg

SEQ ID NO: 4531796 - DNA, 25 bp, Homo sapien
cagaagcccagtccactactactgg

SEQ ID NO: 4531797 - DNA, 25 bp, Homo sapien
ccagtccactactactggtggcttt

SEQ ID NO: 4531798 - DNA, 25 bp, Homo sapien
tgtggttccttggttcccgggcata

SEQ ID NO: 4531799 - DNA, 25 bp, Homo sapien
cttggttcccgggcataggaaagct

SEQ ID NO: 4531800 - DNA, 25 bp, Homo sapien
ttggttcccgggcataggaaagctc

SEQ ID NO: 4531801 - DNA, 25 bp, Homo sapien
tggttcccgggcataggaaagctca

SEQ ID NO: 4531802 - DNA, 25 bp, Homo sapien
taggctcgccggtaattgtcgtagt

SEQ ID NO: 4531803 - DNA, 25 bp, Homo sapien
tcctccagatagtcaggcatggctt

SEQ ID NO: 4531804 - DNA, 25 bp, Homo sapien
tgaagtcggtgcactctccataggc

SEQ ID NO: 4531805 - DNA, 25 bp, Homo sapien
gaggtccttgagatgcacacccaga

SEQ ID NO: 4531806 - DNA, 25 bp, Homo sapien
tcataaacctctaccaatggtgcag

SEQ ID NO: 4531807 - DNA, 25 bp, Homo sapien
aaatcactgggagatggcaagagag

SEQ ID NO: 4531808 - DNA, 25 bp, Homo sapien
gagtcagaccccttcaaatcactgg

SEQ ID NO: 4531809 - DNA, 25 bp, Homo sapien
caagagagcttcttcttcataaacc

SEQ ID NO: 4531810 - DNA, 25 bp, Homo sapien
attgaagttctgtagttggtggagc

SEQ ID NO: 4531811 - DNA, 25 bp, Homo sapien
tcatgtgggacatgcgaacttgtct

SEQ ID NO: 4531812 - DNA, 25 bp, Homo sapien
tatcacagccatcagtgtattgaag

SEQ ID NO: 4531813 - DNA, 25 bp, Homo sapien
cctcgagattgagctgtgacacagc

SEQ ID NO: 4531814 - DNA, 25 bp, Homo sapien
caagccaaatgtcttaaaccagtta

SEQ ID NO: 4531815 - DNA, 25 bp, Homo sapien
cttatagcccaagccaaatgtctta

SEQ ID NO: 4531816 - DNA, 25 bp, Homo sapien
caaatgtcttaaaccagttattcac

SEQ ID NO: 4531817 - DNA, 25 bp, Homo sapien
gcccaagccaaatgtcttaaaccag

SEQ ID NO: 4531818 - DNA, 25 bp, Homo sapien
tgccgttgcacagagcaatagatcg

SEQ ID NO: 4531819 - DNA, 25 bp, Homo sapien
ttgatgaagacttctgctcggagct

SEQ ID NO: 4531820 - DNA, 25 bp, Homo sapien
gtacccactgggagatgccgttgca

SEQ ID NO: 4531821 - DNA, 25 bp, Homo sapien
tacaaggtaattctgataatcagag

SEQ ID NO: 4531822 - DNA, 25 bp, Homo sapien
cagagctcagatttcctgtgtgata

SEQ ID NO: 4531823 - DNA, 25 bp, Homo sapien
ccagtttgacccctgcagagctcag

SEQ ID NO: 4531824 - DNA, 25 bp, Homo sapien
tgaccaagcagcctgccagtttgac

SEQ ID NO: 4531825 - DNA, 25 bp, Homo sapien
cctccactgatgtgagcattggcat

SEQ ID NO: 4531826 - DNA, 25 bp, Homo sapien
tgttgaagcctaatgattatcaggg

SEQ ID NO: 4531827 - DNA, 25 bp, Homo sapien
atgaggattatcaggggtatgaggg

SEQ ID NO: 4531828 - DNA, 25 bp, Homo sapien
aaaagagttgttgaagcctaatgat

SEQ ID NO: 4531829 - DNA, 25 bp, Homo sapien
tcaggggtatgaggattatcagggg

SEQ ID NO: 4531830 - DNA, 25 bp, Homo sapien
gaagcacaggagtcacaatcaaagg

SEQ ID NO: 4531831 - DNA, 25 bp, Homo sapien
ccacagtatggtaacttgagtgagt

SEQ ID NO: 4531832 - DNA, 25 bp, Homo sapien
caatcaaaggaattcagatggtact

SEQ ID NO: 4531833 - DNA, 25 bp, Homo sapien
tctaaggttatgaagcggatgggct

SEQ ID NO: 4531834 - DNA, 25 bp, Homo sapien
taggtgaggtgctcggatagctctt

SEQ ID NO: 4531835 - DNA, 25 bp, Homo sapien
cgatatcctccggaaagacttgaac

SEQ ID NO: 4531836 - DNA, 25 bp, Homo sapien
gctcttctggttccagatggtcaaa

SEQ ID NO: 4531837 - DNA, 25 bp, Homo sapien
tcctccggaaagacttgaactcaag

SEQ ID NO: 4531838 - DNA, 25 bp, Homo sapien
tcaatcaggcggcaatgtaactcct

SEQ ID NO: 4531839 - DNA, 25 bp, Homo sapien
tagctttcaccagttcctgaaactc

SEQ ID NO: 4531840 - DNA, 25 bp, Homo sapien
tgtaactcctcacccttagctttca

SEQ ID NO: 4531841 - DNA, 25 bp, Homo sapien
catagtgtctgtcaagctggcgtcc

SEQ ID NO: 4531842 - DNA, 25 bp, Homo sapien
tcaggcaaagtcctggtgaattctt

SEQ ID NO: 4531843 - DNA, 25 bp, Homo sapien
cttcaggcaaagtcctggtgaattc

SEQ ID NO: 4531844 - DNA, 25 bp, Homo sapien
caggcaaagtcctggtgaattcttt

SEQ ID NO: 4531845 - DNA, 25 bp, Homo sapien
atcttcaggcaaagtcctggtgaat

SEQ ID NO: 4531846 - DNA, 25 bp, Homo sapien
tggttaagggaaatggagacctctg

SEQ ID NO: 4531847 - DNA, 25 bp, Homo sapien
ctgtggttaagggaaatggagacct

SEQ ID NO: 4531848 - DNA, 25 bp, Homo sapien
tgtggttaagggaaatggagacctc

SEQ ID NO: 4531849 - DNA, 25 bp, Homo sapien
gcagaggagatgacaattcggtgca

SEQ ID NO: 4531850 - DNA, 25 bp, Homo sapien
gacaattcggtgcatggtcagcatg

SEQ ID NO: 4531851 - DNA, 25 bp, Homo sapien
cagttggttacttcgacacaggttt

SEQ ID NO: 4531852 - DNA, 25 bp, Homo sapien
cttgcaacagttggttacttcgaca

SEQ ID NO: 4531853 - DNA, 25 bp, Homo sapien
gaaaatataaagagcagcacctgag

SEQ ID NO: 4531854 - DNA, 25 bp, Homo sapien
aatataaagagcagcacctgagtta

SEQ ID NO: 4531855 - DNA, 25 bp, Homo sapien
tataaagagcagcacctgagttagg

SEQ ID NO: 4531856 - DNA, 25 bp, Homo sapien
taaagagcagcacctgagttaggcc

SEQ ID NO: 4531857 - DNA, 25 bp, Homo sapien
cttactttacttacatctattcatc

SEQ ID NO: 4531858 - DNA, 25 bp, Homo sapien
ttactttacttacatctattcatct

SEQ ID NO: 4531859 - DNA, 25 bp, Homo sapien
aattctctatctactaattccaaca

SEQ ID NO: 4531860 - DNA, 25 bp, Homo sapien
aaattctctatctactaattccaac

SEQ ID NO: 4531861 - DNA, 25 bp, Homo sapien
ccactatggtcagatatgaaagttc

SEQ ID NO: 4531862 - DNA, 25 bp, Homo sapien
gatactccgcaaggcaagatgctgc

SEQ ID NO: 4531863 - DNA, 25 bp, Homo sapien
tattttatccacaatcacatgtctg

SEQ ID NO: 4531864 - DNA, 25 bp, Homo sapien
agaggagttttgagttaacctcaca

SEQ ID NO: 4531865 - DNA, 25 bp, Homo sapien
ggaatgcgctgtgacacgagatgtc

SEQ ID NO: 4531866 - DNA, 25 bp, Homo sapien
catttccctgctcaaaactgtgtgt

SEQ ID NO: 4531867 - DNA, 25 bp, Homo sapien
gcaaacaagccccacatgtggtaaa

SEQ ID NO: 4531868 - DNA, 25 bp, Homo sapien
attccaaagactgccatgtgacgtg

SEQ ID NO: 4531869 - DNA, 25 bp, Homo sapien
tccttctaagtacatctccatccta

SEQ ID NO: 4531870 - DNA, 25 bp, Homo sapien
tctaagtacatctccatcctaggaa

SEQ ID NO: 4531871 - DNA, 25 bp, Homo sapien
tggtgtccttctaagtacatctcca

SEQ ID NO: 4531872 - DNA, 25 bp, Homo sapien
taagtacatctccatcctaggaagc

SEQ ID NO: 4531873 - DNA, 25 bp, Homo sapien
cattgcctctgttctctacagcggg

SEQ ID NO: 4531874 - DNA, 25 bp, Homo sapien
cctcataaagtctgctgctgattcc

SEQ ID NO: 4531875 - DNA, 25 bp, Homo sapien
ggcttttctccctcataaagtctgc

SEQ ID NO: 4531876 - DNA, 25 bp, Homo sapien
tctccctcataaagtctgctgctga

SEQ ID NO: 4531877 - DNA, 25 bp, Homo sapien
tctgtagcccaatttccatgtccca

SEQ ID NO: 4531878 - DNA, 25 bp, Homo sapien
gtctccaccatcctctagtttatct

SEQ ID NO: 4531879 - DNA, 25 bp, Homo sapien
tgagagtggagtacatgatgaacaa

SEQ ID NO: 4531880 - DNA, 25 bp, Homo sapien
ggagtacatgatgaacaatggcccc

SEQ ID NO: 4531881 - DNA, 25 bp, Homo sapien
tctagtttatctcctcgcagtatat

SEQ ID NO: 4531882 - DNA, 25 bp, Homo sapien
tgcacttctcatcacgacctattac

SEQ ID NO: 4531883 - DNA, 25 bp, Homo sapien
tcacgacctattacacccacatagt

SEQ ID NO: 4531884 - DNA, 25 bp, Homo sapien
tattacacccacatagtcatgtgcc

SEQ ID NO: 4531885 - DNA, 25 bp, Homo sapien
ctgcagactgtctccaacatttcaa

SEQ ID NO: 4531886 - DNA, 25 bp, Homo sapien
catcattcggaactgggtgatgtgg

SEQ ID NO: 4531887 - DNA, 25 bp, Homo sapien
tgtcccagagacaccatcattcgga

SEQ ID NO: 4531888 - DNA, 25 bp, Homo sapien
tgcagctgtcaatgagatcgtccag

SEQ ID NO: 4531889 - DNA, 25 bp, Homo sapien
gctggctttgcctctagtcttgctt

SEQ ID NO: 4531890 - DNA, 25 bp, Homo sapien
aaagtttcctagtgtcaccagtaag

SEQ ID NO: 4531891 - DNA, 25 bp, Homo sapien
agagaaaccgctttgtttcataagt

SEQ ID NO: 4531892 - DNA, 25 bp, Homo sapien
agtaagagaaaccgctttgtttcat

SEQ ID NO: 4531893 - DNA, 25 bp, Homo sapien
ttgaaggttgatgcttttaccagaa

SEQ ID NO: 4531894 - DNA, 25 bp, Homo sapien
gagcctctctcgccttgcccagggt

SEQ ID NO: 4531895 - DNA, 25 bp, Homo sapien
gcggcccgcgctcccggtgccggct

SEQ ID NO: 4531896 - DNA, 25 bp, Homo sapien
gcccgcgctcccggtgccggctcac

SEQ ID NO: 4531897 - DNA, 25 bp, Homo sapien
ggcccgcgctcccggtgccggctca

SEQ ID NO: 4531898 - DNA, 25 bp, Homo sapien
ccgcggcccgcgctcccggtgccgg

SEQ ID NO: 4531899 - DNA, 25 bp, Homo sapien
ctcgagcccggcgagcccgaccgag

SEQ ID NO: 4531900 - DNA, 25 bp, Homo sapien
gagcccgaccgaggtgcaccgcagg

SEQ ID NO: 4531901 - DNA, 25 bp, Homo sapien
aggtgcaccgcaggcacaaactttg

SEQ ID NO: 4531902 - DNA, 25 bp, Homo sapien
gcacaaactttgtgcgagcgcgccc

SEQ ID NO: 4531903 - DNA, 25 bp, Homo sapien
tcacccctgcccgccttcgacctct

SEQ ID NO: 4531904 - DNA, 25 bp, Homo sapien
gctgcaggaaacgtgcggcgccccg

SEQ ID NO: 4531905 - DNA, 25 bp, Homo sapien
gcgcctcgcgcggttctctcacccc

SEQ ID NO: 4531906 - DNA, 25 bp, Homo sapien
tggcggctgcaggaaacgtgcggcg

SEQ ID NO: 4531907 - DNA, 25 bp, Homo sapien
ccacctcagctcgggaaacgggctg

SEQ ID NO: 4531908 - DNA, 25 bp, Homo sapien
acctcagctcgggaaacgggctgcg

SEQ ID NO: 4531909 - DNA, 25 bp, Homo sapien
ctgtgcccgtcgacctccacctcag

SEQ ID NO: 4531910 - DNA, 25 bp, Homo sapien
gtgcccgtcgacctccacctcagct

SEQ ID NO: 4531911 - DNA, 25 bp, Homo sapien
ccgacccgcagcttccacgcctctt

SEQ ID NO: 4531912 - DNA, 25 bp, Homo sapien
ctgcagtgaggacgccttctcccct

SEQ ID NO: 4531913 - DNA, 25 bp, Homo sapien
cccgcagcttccacgcctcttcctg

SEQ ID NO: 4531914 - DNA, 25 bp, Homo sapien
gcagccgacccgcagcttccacgcc

SEQ ID NO: 4531915 - DNA, 25 bp, Homo sapien
ctgcgccctgcaccttggacgaggg

SEQ ID NO: 4531916 - DNA, 25 bp, Homo sapien
cctggggtctctaggtagccgtctg

SEQ ID NO: 4531917 - DNA, 25 bp, Homo sapien
gccgtagacatgtgccctgtgccct

SEQ ID NO: 4531918 - DNA, 25 bp, Homo sapien
tagccgtctgcaggactgggccgta

SEQ ID NO: 4531919 - DNA, 25 bp, Homo sapien
acaactttcatacaacgtcagtgcg

SEQ ID NO: 4531920 - DNA, 25 bp, Homo sapien
acgtcagtgcgcacagaagacctgg

SEQ ID NO: 4531921 - DNA, 25 bp, Homo sapien
cacaggcgtgatccatatctggccc

SEQ ID NO: 4531922 - DNA, 25 bp, Homo sapien
ggccgcctggcgtcggtgggtgtag

SEQ ID NO: 4531923 - DNA, 25 bp, Homo sapien
ccacagctgccaacttgaggcagta

SEQ ID NO: 4531924 - DNA, 25 bp, Homo sapien
ttagcttccacagctgccaacttga

SEQ ID NO: 4531925 - DNA, 25 bp, Homo sapien
cacagctgccaacttgaggcagtac

SEQ ID NO: 4531926 - DNA, 25 bp, Homo sapien
gcttccacagctgccaacttgaggc

SEQ ID NO: 4531927 - DNA, 25 bp, Homo sapien
gacattactaatgaactgctgtgga

SEQ ID NO: 4531928 - DNA, 25 bp, Homo sapien
tactaatgaactgctgtggatttga

SEQ ID NO: 4531929 - DNA, 25 bp, Homo sapien
ctgtgggacattactaatgaactgc

SEQ ID NO: 4531930 - DNA, 25 bp, Homo sapien
tgggacattactaatgaactgctgt

SEQ ID NO: 4531931 - DNA, 25 bp, Homo sapien
ttgcttcacccttgaaaatagagcc

SEQ ID NO: 4531932 - DNA, 25 bp, Homo sapien
gataagcttactggcactgtccccg

SEQ ID NO: 4531933 - DNA, 25 bp, Homo sapien
tgaagtccgctgtctatggcaggag

SEQ ID NO: 4531934 - DNA, 25 bp, Homo sapien
gatccccatcacaggttatccgagg

SEQ ID NO: 4531935 - DNA, 25 bp, Homo sapien
tgggccccctcgagctcttttttga

SEQ ID NO: 4531936 - DNA, 25 bp, Homo sapien
ggttttctggctactcctacctgag

SEQ ID NO: 4531937 - DNA, 25 bp, Homo sapien
tatgcccagcgagtgtttttctctt

SEQ ID NO: 4531938 - DNA, 25 bp, Homo sapien
tctgagtactctgcacttcacttgc

SEQ ID NO: 4531939 - DNA, 25 bp, Homo sapien
ggctataaaggctcttttttgcttc

SEQ ID NO: 4531940 - DNA, 25 bp, Homo sapien
tgaaatttatagcaggtttttctaa

SEQ ID NO: 4531941 - DNA, 25 bp, Homo sapien
catatgaaatttatagcaggttttt

SEQ ID NO: 4531942 - DNA, 25 bp, Homo sapien
tccatatgaaatttatagcaggttt

SEQ ID NO: 4531943 - DNA, 25 bp, Homo sapien
ccctaatctcttggggccaccatga

SEQ ID NO: 4531944 - DNA, 25 bp, Homo sapien
gccctagttgaagcctccacatgga

SEQ ID NO: 4531945 - DNA, 25 bp, Homo sapien
gccaccatgagatgccctagttgaa

SEQ ID NO: 4531946 - DNA, 25 bp, Homo sapien
ggagctgctacccctaatctcttgg

SEQ ID NO: 4531947 - DNA, 25 bp, Homo sapien
tctgcttcgtgcttggtcctgggca

SEQ ID NO: 4531948 - DNA, 25 bp, Homo sapien
gtccaagcctgtgaggaactgccca

SEQ ID NO: 4531949 - DNA, 25 bp, Homo sapien
gctggtggttagacttctgcttcgt

SEQ ID NO: 4531950 - DNA, 25 bp, Homo sapien
tcctgggcatattctggaatgggca

SEQ ID NO: 4531951 - DNA, 25 bp, Homo sapien
cttggggctggtatacccagaggcc

SEQ ID NO: 4531952 - DNA, 25 bp, Homo sapien
accagaaaggactcggcaagcccca

SEQ ID NO: 4531953 - DNA, 25 bp, Homo sapien
cccagaggcccaaccagaaaggact

SEQ ID NO: 4531954 - DNA, 25 bp, Homo sapien
gcccaaccagaaaggactcggcaag

SEQ ID NO: 4531955 - DNA, 25 bp, Homo sapien
ggttcttgctacaatctcttctcca

SEQ ID NO: 4531956 - DNA, 25 bp, Homo sapien
tgtgtgcgtgtttatatatgcgagt

SEQ ID NO: 4531957 - DNA, 25 bp, Homo sapien
tatatgcgagtgttttgggacggaa

SEQ ID NO: 4531958 - DNA, 25 bp, Homo sapien
ggacggaagtgtggttcttgctaca

SEQ ID NO: 4531959 - DNA, 25 bp, Homo sapien
aaaaccccagcagaattctgatgta

SEQ ID NO: 4531960 - DNA, 25 bp, Homo sapien
ctgatgtactaggaatggaagcact

SEQ ID NO: 4531961 - DNA, 25 bp, Homo sapien
cgtggcagcgtagcatggatgtctt

SEQ ID NO: 4531962 - DNA, 25 bp, Homo sapien
gcatccagacgtggcagcgtagcat

SEQ ID NO: 4531963 - DNA, 25 bp, Homo sapien
aggccttgtccaccaagattaaact

SEQ ID NO: 4531964 - DNA, 25 bp, Homo sapien
ttgagttcgaactctagcaccaaac

SEQ ID NO: 4531965 - DNA, 25 bp, Homo sapien
ctgcagaaggaggttttgacatgat

SEQ ID NO: 4531966 - DNA, 25 bp, Homo sapien
gttcgaactctagcaccaaacttca

SEQ ID NO: 4531967 - DNA, 25 bp, Homo sapien
cgaacgaacgggcagtaggtataag

SEQ ID NO: 4531968 - DNA, 25 bp, Homo sapien
tacagaccgaacgaacgggcagtag

SEQ ID NO: 4531969 - DNA, 25 bp, Homo sapien
ctacagaccgaacgaacgggcagta

SEQ ID NO: 4531970 - DNA, 25 bp, Homo sapien
cagaccgaacgaacgggcagtaggt

SEQ ID NO: 4531971 - DNA, 25 bp, Homo sapien
tgtgttgtctttccctatgctcagt

SEQ ID NO: 4531972 - DNA, 25 bp, Homo sapien
cattgagagtgtcactagctgctct

SEQ ID NO: 4531973 - DNA, 25 bp, Homo sapien
gtcggtggccttcctgatgtcccct

SEQ ID NO: 4531974 - DNA, 25 bp, Homo sapien
cctcctctgtgatgccattgagagt

SEQ ID NO: 4531975 - DNA, 25 bp, Homo sapien
tgcaaggtgcgctgaaaaatgccat

SEQ ID NO: 4531976 - DNA, 25 bp, Homo sapien
caagctgtgttaccccagggcagtg

SEQ ID NO: 4531977 - DNA, 25 bp, Homo sapien
taatagctgtgctgcaaggtgcgct

SEQ ID NO: 4531978 - DNA, 25 bp, Homo sapien
gcagtgtaatagctgtgctgcaagg

SEQ ID NO: 4531979 - DNA, 25 bp, Homo sapien
tatgcgtggtgagtctcatgaattc

SEQ ID NO: 4531980 - DNA, 25 bp, Homo sapien
gactttccaactcctcgatatgcgt

SEQ ID NO: 4531981 - DNA, 25 bp, Homo sapien
ccaactcctcgatatgcgtggtgag

SEQ ID NO: 4531982 - DNA, 25 bp, Homo sapien
tcctcgatatgcgtggtgagtctca

SEQ ID NO: 4531983 - DNA, 25 bp, Homo sapien
acagtgctcagtgttagccacattg

SEQ ID NO: 4531984 - DNA, 25 bp, Homo sapien
actaaaacaatggagtgggtggtct

SEQ ID NO: 4531985 - DNA, 25 bp, Homo sapien
aagagatgactgaatgccgatttcc

SEQ ID NO: 4531986 - DNA, 25 bp, Homo sapien
ccaagaggtgactcaacagtgctca

SEQ ID NO: 4531987 - DNA, 25 bp, Homo sapien
ctttcttgtttggataatgcttcat

SEQ ID NO: 4531988 - DNA, 25 bp, Homo sapien
tcccatccaataggacaggtcccgt

SEQ ID NO: 4531989 - DNA, 25 bp, Homo sapien
gccagatcaaggactttgcagggca

SEQ ID NO: 4531990 - DNA, 25 bp, Homo sapien
tgaaggcccctcacaagagatgagg

SEQ ID NO: 4531991 - DNA, 25 bp, Homo sapien
gaagaaacagcttcgaggacctctt

SEQ ID NO: 4531992 - DNA, 25 bp, Homo sapien
gctgcagtagatgcagaccagacct

SEQ ID NO: 4531993 - DNA, 25 bp, Homo sapien
tgctgcagtagatgcagaccagacc

SEQ ID NO: 4531994 - DNA, 25 bp, Homo sapien
tgcagaccagacctaattcagacca

SEQ ID NO: 4531995 - DNA, 25 bp, Homo sapien
cagacctaattcagaccaatctgga

SEQ ID NO: 4531996 - DNA, 25 bp, Homo sapien
agcagcgtggatgttgacaaggctc

SEQ ID NO: 4531997 - DNA, 25 bp, Homo sapien
tctaagcagcgtggatgttgacaag

SEQ ID NO: 4531998 - DNA, 25 bp, Homo sapien
ctatctaagcagcgtggatgttgac

SEQ ID NO: 4531999 - DNA, 25 bp, Homo sapien
taagcagcgtggatgttgacaaggc

SEQ ID NO: 4532000 - DNA, 25 bp, Homo sapien
ggttgcttgcccctgttaggatgtc

SEQ ID NO: 4532001 - DNA, 25 bp, Homo sapien
tgcagcccgtgtcctatcctggctt

SEQ ID NO: 4532002 - DNA, 25 bp, Homo sapien
cctgttaggatgtcgcctccttgtc

SEQ ID NO: 4532003 - DNA, 25 bp, Homo sapien
tgtcgcctccttgtcatcagagctg

SEQ ID NO: 4532004 - DNA, 25 bp, Homo sapien
gagctggactttgctgctgggctat

SEQ ID NO: 4532005 - DNA, 25 bp, Homo sapien
gggagctggactttgctgctgggct

SEQ ID NO: 4532006 - DNA, 25 bp, Homo sapien
agctggactttgctgctgggctatg

SEQ ID NO: 4532007 - DNA, 25 bp, Homo sapien
ttgctgctgggctatgcttgcctgc

SEQ ID NO: 4532008 - DNA, 25 bp, Homo sapien
tttcccaggtgcaggttctggagcc

SEQ ID NO: 4532009 - DNA, 25 bp, Homo sapien
agagagagtgctccaaggctttccc

SEQ ID NO: 4532010 - DNA, 25 bp, Homo sapien
tgctccaaggctttcccaggtgcag

SEQ ID NO: 4532011 - DNA, 25 bp, Homo sapien
cctcttagatgagagagagtgctcc

SEQ ID NO: 4532012 - DNA, 25 bp, Homo sapien
ctggatgaactttgcgtaagaggca

SEQ ID NO: 4532013 - DNA, 25 bp, Homo sapien
tctgtatagagaatgaattgcctct

SEQ ID NO: 4532014 - DNA, 25 bp, Homo sapien
tgtgtcggcctgtgtgaacacgtat

SEQ ID NO: 4532015 - DNA, 25 bp, Homo sapien
tgcaaatgtacaagggatgatcact

SEQ ID NO: 4532016 - DNA, 25 bp, Homo sapien
gaacaggtacaaaagctctcagctg

SEQ ID NO: 4532017 - DNA, 25 bp, Homo sapien
tacgagcagaggaagcgcctttaca

SEQ ID NO: 4532018 - DNA, 25 bp, Homo sapien
gagtcttcaagcttctaacaggagt

SEQ ID NO: 4532019 - DNA, 25 bp, Homo sapien
taggagcaagcccaaatttaacacg

SEQ ID NO: 4532020 - DNA, 25 bp, Homo sapien
ggagcaaccgtagaagaattgtttg

SEQ ID NO: 4532021 - DNA, 25 bp, Homo sapien
gggtagtttttctgcggctgtcgga

SEQ ID NO: 4532022 - DNA, 25 bp, Homo sapien
gtttttctgcggctgtcggagcaac

SEQ ID NO: 4532023 - DNA, 25 bp, Homo sapien
tgcggctgtcggagcaaccgtagaa

SEQ ID NO: 4532024 - DNA, 25 bp, Homo sapien
ggcaaatagtaatggtgagtgtcca

SEQ ID NO: 4532025 - DNA, 25 bp, Homo sapien
cggatggtcccaattctaacttcca

SEQ ID NO: 4532026 - DNA, 25 bp, Homo sapien
cactacttttgatggcgctgttggg

SEQ ID NO: 4532027 - DNA, 25 bp, Homo sapien
cacagttgtgatggaattcagagtc

SEQ ID NO: 4532028 - DNA, 25 bp, Homo sapien
tcatggtcactcacacagagaatgc

SEQ ID NO: 4532029 - DNA, 25 bp, Homo sapien
aatgccaccatgagttaccatttca

SEQ ID NO: 4532030 - DNA, 25 bp, Homo sapien
atttaaagttcaggtgttcatggtc

SEQ ID NO: 4532031 - DNA, 25 bp, Homo sapien
cactcacacagagaatgccaccatg

SEQ ID NO: 4532032 - DNA, 25 bp, Homo sapien
tggtcctccacgctgtcctcctggc

SEQ ID NO: 4532033 - DNA, 25 bp, Homo sapien
gtcctccacgctgtcctcctggccc

SEQ ID NO: 4532034 - DNA, 25 bp, Homo sapien
acgctgtcctcctggccctctgccc

SEQ ID NO: 4532035 - DNA, 25 bp, Homo sapien
ccacgctgtcctcctggccctctgc

SEQ ID NO: 4532036 - DNA, 25 bp, Homo sapien
caccccaagcctataggcgtcatga

SEQ ID NO: 4532037 - DNA, 25 bp, Homo sapien
cctataggcgtcatgacaatggaga

SEQ ID NO: 4532038 - DNA, 25 bp, Homo sapien
aagcctataggcgtcatgacaatgg

SEQ ID NO: 4532039 - DNA, 25 bp, Homo sapien
ctttccaccccaagcctataggcgt

SEQ ID NO: 4532040 - DNA, 25 bp, Homo sapien
ctggctgtctggtcctctgtcagcc

SEQ ID NO: 4532041 - DNA, 25 bp, Homo sapien
gctggctgtctggtcctctgtcagc

SEQ ID NO: 4532042 - DNA, 25 bp, Homo sapien
cgctggctgtctggtcctctgtcag

SEQ ID NO: 4532043 - DNA, 25 bp, Homo sapien
tggctgtctggtcctctgtcagcca

SEQ ID NO: 4532044 - DNA, 25 bp, Homo sapien
tatgtcaactctcaatggcctccca

SEQ ID NO: 4532045 - DNA, 25 bp, Homo sapien
tgaaaaatctcttaagggtcagcct

SEQ ID NO: 4532046 - DNA, 25 bp, Homo sapien
tggagagggctctactaggcagtca

SEQ ID NO: 4532047 - DNA, 25 bp, Homo sapien
ggccatctttatggcaccacacgga

SEQ ID NO: 4532048 - DNA, 25 bp, Homo sapien
tagcagggtgattgtgatcatctct

SEQ ID NO: 4532049 - DNA, 25 bp, Homo sapien
gacctacgaagaagaggcatcactg

SEQ ID NO: 4532050 - DNA, 25 bp, Homo sapien
ctgtccatctattttgcccctaggc

SEQ ID NO: 4532051 - DNA, 25 bp, Homo sapien
tgctttttagtgatgctggtgtgcc

SEQ ID NO: 4532052 - DNA, 25 bp, Homo sapien
gttttgtggtgtgaagcaaaggctt

SEQ ID NO: 4532053 - DNA, 25 bp, Homo sapien
taggagcagtggttgtcaccacagc

SEQ ID NO: 4532054 - DNA, 25 bp, Homo sapien
cctggttggccagaatgtgatgctg

SEQ ID NO: 4532055 - DNA, 25 bp, Homo sapien
gcaaaggctttttaactgagagagg

SEQ ID NO: 4532056 - DNA, 25 bp, Homo sapien
gaacccatcagcaaattggtggctc

SEQ ID NO: 4532057 - DNA, 25 bp, Homo sapien
tctggtctcaagtgcttcttggcac

SEQ ID NO: 4532058 - DNA, 25 bp, Homo sapien
tgcttcttggcacccctgggtttac

SEQ ID NO: 4532059 - DNA, 25 bp, Homo sapien
tggtctcaagtgcttcttggcaccc

SEQ ID NO: 4532060 - DNA, 25 bp, Homo sapien
caagtgcttcttggcacccctgggt

SEQ ID NO: 4532061 - DNA, 25 bp, Homo sapien
tggcgtttttaggaagcacgtagaa

SEQ ID NO: 4532062 - DNA, 25 bp, Homo sapien
ctagaagctggcgtttttaggaagc

SEQ ID NO: 4532063 - DNA, 25 bp, Homo sapien
tgtcccctggcataggtgttgctag

SEQ ID NO: 4532064 - DNA, 25 bp, Homo sapien
cataggtgttgctagaagctggcgt

SEQ ID NO: 4532065 - DNA, 25 bp, Homo sapien
gaagtaaaggagcttatcccgttca

SEQ ID NO: 4532066 - DNA, 25 bp, Homo sapien
tatcccgttcacagatcctgtaacc

SEQ ID NO: 4532067 - DNA, 25 bp, Homo sapien
taaaggagcttatcccgttcacaga

SEQ ID NO: 4532068 - DNA, 25 bp, Homo sapien
gagcttatcccgttcacagatcctg

SEQ ID NO: 4532069 - DNA, 25 bp, Homo sapien
ccccagacttcttggatggacattg

SEQ ID NO: 4532070 - DNA, 25 bp, Homo sapien
ggtgtgcctgccttttcatgagctc

SEQ ID NO: 4532071 - DNA, 25 bp, Homo sapien
aatctggtcatattgagagtgaaac

SEQ ID NO: 4532072 - DNA, 25 bp, Homo sapien
ctgccacctagtggtcactggaggt

SEQ ID NO: 4532073 - DNA, 25 bp, Homo sapien
ccagtctgattcaatcattatctca

SEQ ID NO: 4532074 - DNA, 25 bp, Homo sapien
gtctgattcaatcattatctcatac

SEQ ID NO: 4532075 - DNA, 25 bp, Homo sapien
catccagtctgattcaatcattatc

SEQ ID NO: 4532076 - DNA, 25 bp, Homo sapien
catccatccagtctgattcaatcat

SEQ ID NO: 4532077 - DNA, 25 bp, Homo sapien
tgggaagaagctggcatctaatcag

SEQ ID NO: 4532078 - DNA, 25 bp, Homo sapien
cctttttctagctggctagaattga

SEQ ID NO: 4532079 - DNA, 25 bp, Homo sapien
gctggcatctaatcagaactgtgat

SEQ ID NO: 4532080 - DNA, 25 bp, Homo sapien
atttccttgctgtggattccttttt

SEQ ID NO: 4532081 - DNA, 25 bp, Homo sapien
ccttgaggaagattggagagcagtc

SEQ ID NO: 4532082 - DNA, 25 bp, Homo sapien
ggcaactttctgctcttagtaaaga

SEQ ID NO: 4532083 - DNA, 25 bp, Homo sapien
ttagtaaagaggtcagagaaagccc

SEQ ID NO: 4532084 - DNA, 25 bp, Homo sapien
tgaatatttactggcaactttctgc

SEQ ID NO: 4532085 - DNA, 25 bp, Homo sapien
tgagctttaacccaaacttggactg

SEQ ID NO: 4532086 - DNA, 25 bp, Homo sapien
ctgagctttaacccaaacttggact

SEQ ID NO: 4532087 - DNA, 25 bp, Homo sapien
caaacttggactgggctttagggag

SEQ ID NO: 4532088 - DNA, 25 bp, Homo sapien
cttggactgggctttagggagatta

SEQ ID NO: 4532089 - DNA, 25 bp, Homo sapien
tccaggttcagcagatcgttaagtg

SEQ ID NO: 4532090 - DNA, 25 bp, Homo sapien
tcgttaagtggtggcagcgtgtccc

SEQ ID NO: 4532091 - DNA, 25 bp, Homo sapien
tctgataaggtcatctccaggttca

SEQ ID NO: 4532092 - DNA, 25 bp, Homo sapien
gcgtgtcccgatctttcctgaggtg

SEQ ID NO: 4532093 - DNA, 25 bp, Homo sapien
gaagctcgttcctagctctgctctc

SEQ ID NO: 4532094 - DNA, 25 bp, Homo sapien
catcgctcctctctcaacagagagt

SEQ ID NO: 4532095 - DNA, 25 bp, Homo sapien
gactgggagtacaggacttgtggcc

SEQ ID NO: 4532096 - DNA, 25 bp, Homo sapien
acagcaaaggaagctcgttcctagc

SEQ ID NO: 4532097 - DNA, 25 bp, Homo sapien
tcaccataaagaaggacaggcggtc

SEQ ID NO: 4532098 - DNA, 25 bp, Homo sapien
gctgcatctgtgggcataggctctg

SEQ ID NO: 4532099 - DNA, 25 bp, Homo sapien
atgctgcatctgtgggcataggctc

SEQ ID NO: 4532100 - DNA, 25 bp, Homo sapien
ggacaggcggtccctttgatgctgc

SEQ ID NO: 4532101 - DNA, 25 bp, Homo sapien
gagtatcttgaagggaagattgctt

SEQ ID NO: 4532102 - DNA, 25 bp, Homo sapien
cctggggagtatcttgaagggaaga

SEQ ID NO: 4532103 - DNA, 25 bp, Homo sapien
tggggagtatcttgaagggaagatt

SEQ ID NO: 4532104 - DNA, 25 bp, Homo sapien
gggagtatcttgaagggaagattgc

SEQ ID NO: 4532105 - DNA, 25 bp, Homo sapien
caaagtgtcctgaagcgtggcataa

SEQ ID NO: 4532106 - DNA, 25 bp, Homo sapien
gaagctggcctgtcgtagcaactca

SEQ ID NO: 4532107 - DNA, 25 bp, Homo sapien
catcatgtggatggaaaaatcttct

SEQ ID NO: 4532108 - DNA, 25 bp, Homo sapien
tgccagcgtaaaaacagacaggaac

SEQ ID NO: 4532109 - DNA, 25 bp, Homo sapien
acagatgattctgaatggagaaatg

SEQ ID NO: 4532110 - DNA, 25 bp, Homo sapien
gagaaagggcttgaagatgaaattc

SEQ ID NO: 4532111 - DNA, 25 bp, Homo sapien
agggcttgaagatgaaattcacaga

SEQ ID NO: 4532112 - DNA, 25 bp, Homo sapien
gagaaatgtggcaaacaccagcaga

SEQ ID NO: 4532113 - DNA, 25 bp, Homo sapien
tttctctgcacctaatgcttgcacg

SEQ ID NO: 4532114 - DNA, 25 bp, Homo sapien
taggtgtgaagtgacctcattacgg

SEQ ID NO: 4532115 - DNA, 25 bp, Homo sapien
cacggcgcattctgatatcccaggg

SEQ ID NO: 4532116 - DNA, 25 bp, Homo sapien
tcataggtgtgaagtgacctcatta

SEQ ID NO: 4532117 - DNA, 25 bp, Homo sapien
ttctactcccgtgattaaaggctct

SEQ ID NO: 4532118 - DNA, 25 bp, Homo sapien
ggcccttgacagatttacatgtgtt

SEQ ID NO: 4532119 - DNA, 25 bp, Homo sapien
attaaaggctctatggcccttgaca

SEQ ID NO: 4532120 - DNA, 25 bp, Homo sapien
ctcagtgtttctactcccgtgatta

SEQ ID NO: 4532121 - DNA, 25 bp, Homo sapien
cttctttcttactgcatgaaggaaa

SEQ ID NO: 4532122 - DNA, 25 bp, Homo sapien
gaagagcccctggagatttgtccct

SEQ ID NO: 4532123 - DNA, 25 bp, Homo sapien
ggaattcactatatttaaccataga

SEQ ID NO: 4532124 - DNA, 25 bp, Homo sapien
ggaaaaatgaatctaaggcttcgag

SEQ ID NO: 4532125 - DNA, 25 bp, Homo sapien
aattggctgccagtcaaattcacaa

SEQ ID NO: 4532126 - DNA, 25 bp, Homo sapien
aatccacctcgtgcacaagcagctt

SEQ ID NO: 4532127 - DNA, 25 bp, Homo sapien
gcatcaccttgaaagagaaatgtac

SEQ ID NO: 4532128 - DNA, 25 bp, Homo sapien
gaacagctttgtacatactgcatca

SEQ ID NO: 4532129 - DNA, 25 bp, Homo sapien
tcttggcagtttagggccgttttca

SEQ ID NO: 4532130 - DNA, 25 bp, Homo sapien
ttttcattggagacaggtaacatgc

SEQ ID NO: 4532131 - DNA, 25 bp, Homo sapien
tgtggccgttagaagaagtctgctt

SEQ ID NO: 4532132 - DNA, 25 bp, Homo sapien
taacatgcggctgtggccgttagaa

SEQ ID NO: 4532133 - DNA, 25 bp, Homo sapien
tctctctgcttctccctgtacccac

SEQ ID NO: 4532134 - DNA, 25 bp, Homo sapien
caagtctctctgcttctccctgtac

SEQ ID NO: 4532135 - DNA, 25 bp, Homo sapien
agtctctctgcttctccctgtaccc

SEQ ID NO: 4532136 - DNA, 25 bp, Homo sapien
ctgaaggcaagtctctctgcttctc

SEQ ID NO: 4532137 - DNA, 25 bp, Homo sapien
ccagtctcaatggatcacagaggat

SEQ ID NO: 4532138 - DNA, 25 bp, Homo sapien
ccttaggtttgatgcagtcgtcttg

SEQ ID NO: 4532139 - DNA, 25 bp, Homo sapien
cagggcagtattctctgctgtttga

SEQ ID NO: 4532140 - DNA, 25 bp, Homo sapien
gatctgctgctatgatgctcccagg

SEQ ID NO: 4532141 - DNA, 25 bp, Homo sapien
gggtgatgaatacgccataaatccc

SEQ ID NO: 4532142 - DNA, 25 bp, Homo sapien
cataaatccccagtctgcctagagc

SEQ ID NO: 4532143 - DNA, 25 bp, Homo sapien
tacaagttccgaggcaaggaaattg

SEQ ID NO: 4532144 - DNA, 25 bp, Homo sapien
taaatctgagggctgtacaagttcc

SEQ ID NO: 4532145 - DNA, 25 bp, Homo sapien
gtgttgtagccctgccgtccacagc

SEQ ID NO: 4532146 - DNA, 25 bp, Homo sapien
agtgttgtagccctgccgtccacag

SEQ ID NO: 4532147 - DNA, 25 bp, Homo sapien
gcaaagaaataagtgttgtagccct

SEQ ID NO: 4532148 - DNA, 25 bp, Homo sapien
cctgctccttcaccgcgtttggttg

SEQ ID NO: 4532149 - DNA, 25 bp, Homo sapien
gaggtatgcttctctgcgagtcttt

SEQ ID NO: 4532150 - DNA, 25 bp, Homo sapien
ccttcaccgcgtttggttgatctag

SEQ ID NO: 4532151 - DNA, 25 bp, Homo sapien
agaggtatgcttctctgcgagtctt

SEQ ID NO: 4532152 - DNA, 25 bp, Homo sapien
tgggtgagagttctgctccagagct

SEQ ID NO: 4532153 - DNA, 25 bp, Homo sapien
ctcttgaggcaatcttctggtgggt

SEQ ID NO: 4532154 - DNA, 25 bp, Homo sapien
ccaaagctagtttaggagaagaaga

SEQ ID NO: 4532155 - DNA, 25 bp, Homo sapien
tgtattgggcagtcaagttggcatc

SEQ ID NO: 4532156 - DNA, 25 bp, Homo sapien
cagttgtggatgcacggagacgggc

SEQ ID NO: 4532157 - DNA, 25 bp, Homo sapien
tgatggacaacacccagatttaagg

SEQ ID NO: 4532158 - DNA, 25 bp, Homo sapien
ccagatttaagggatcactggcatt

SEQ ID NO: 4532159 - DNA, 25 bp, Homo sapien
caacacccagatttaagggatcact

SEQ ID NO: 4532160 - DNA, 25 bp, Homo sapien
gctcagacgtccactagctgtgcag

SEQ ID NO: 4532161 - DNA, 25 bp, Homo sapien
gaaatgtaaacccatgcagcaggtg

SEQ ID NO: 4532162 - DNA, 25 bp, Homo sapien
attacacgctgaggccctggagtca

SEQ ID NO: 4532163 - DNA, 25 bp, Homo sapien
ggaaaaagagctgttcagacatcca

SEQ ID NO: 4532164 - DNA, 25 bp, Homo sapien
tctgggaaatcctattctttatatc

SEQ ID NO: 4532165 - DNA, 25 bp, Homo sapien
aaatgtctcttcttctgggaaatcc

SEQ ID NO: 4532166 - DNA, 25 bp, Homo sapien
ttcttctgggaaatcctattcttta

SEQ ID NO: 4532167 - DNA, 25 bp, Homo sapien
ggattactgggataaaaatgtctct

SEQ ID NO: 4532168 - DNA, 25 bp, Homo sapien
tgaatttctcagtgcacctcatcac

SEQ ID NO: 4532169 - DNA, 25 bp, Homo sapien
tacagacccgagtttattgcttggc

SEQ ID NO: 4532170 - DNA, 25 bp, Homo sapien
tgcttggctgtgacacttgttatgc

SEQ ID NO: 4532171 - DNA, 25 bp, Homo sapien
tgcagctttggagtattccctgaat

SEQ ID NO: 4532172 - DNA, 25 bp, Homo sapien
caagcgcttattgatccaggttaac

SEQ ID NO: 4532173 - DNA, 25 bp, Homo sapien
gccagtaaggctgtcaggatttgaa

SEQ ID NO: 4532174 - DNA, 25 bp, Homo sapien
tcaatgagcaagacagcctgaagtg

SEQ ID NO: 4532175 - DNA, 25 bp, Homo sapien
tctaagatcacatggcttgtagcca

SEQ ID NO: 4532176 - DNA, 25 bp, Homo sapien
tctctgatcttgaaaataagcgtac

SEQ ID NO: 4532177 - DNA, 25 bp, Homo sapien
tcttctctgatcttgaaaataagcg

SEQ ID NO: 4532178 - DNA, 25 bp, Homo sapien
tcttgaaaataagcgtactcattca

SEQ ID NO: 4532179 - DNA, 25 bp, Homo sapien
tctgatcttgaaaataagcgtactc

SEQ ID NO: 4532180 - DNA, 25 bp, Homo sapien
cattttttcggcatagactctgagt

SEQ ID NO: 4532181 - DNA, 25 bp, Homo sapien
tgtggcctatttaaaacagacagag

SEQ ID NO: 4532182 - DNA, 25 bp, Homo sapien
tctccaaggcggctttgtcaaaggc

SEQ ID NO: 4532183 - DNA, 25 bp, Homo sapien
gcagagggcactggtttccgggctc

SEQ ID NO: 4532184 - DNA, 25 bp, Homo sapien
gttgggagcagattcagggagacca

SEQ ID NO: 4532185 - DNA, 25 bp, Homo sapien
atggttgggagcagattcagggaga

SEQ ID NO: 4532186 - DNA, 25 bp, Homo sapien
caaacccgaagtttagcaaactctg

SEQ ID NO: 4532187 - DNA, 25 bp, Homo sapien
ttgggagcagattcagggagaccat

SEQ ID NO: 4532188 - DNA, 25 bp, Homo sapien
ttttatcttcttttttggcagccat

SEQ ID NO: 4532189 - DNA, 25 bp, Homo sapien
tttttatcttcttttttggcagcca

SEQ ID NO: 4532190 - DNA, 25 bp, Homo sapien
gctttttatcttcttttttggcagc

SEQ ID NO: 4532191 - DNA, 25 bp, Homo sapien
cagctttttatcttcttttttggca

SEQ ID NO: 4532192 - DNA, 25 bp, Homo sapien
ggagaaaatcccgtctcttgttcca

SEQ ID NO: 4532193 - DNA, 25 bp, Homo sapien
cagttgtaggtcaaatatccaaaac

SEQ ID NO: 4532194 - DNA, 25 bp, Homo sapien
tcagttgtaggtcaaatatccaaaa

SEQ ID NO: 4532195 - DNA, 25 bp, Homo sapien
aaatcccgtctcttgttccacttct

SEQ ID NO: 4532196 - DNA, 25 bp, Homo sapien
tcctctaagcttccctctagattct

SEQ ID NO: 4532197 - DNA, 25 bp, Homo sapien
gcccaccaggattcccttcctctaa

SEQ ID NO: 4532198 - DNA, 25 bp, Homo sapien
aaccttaactctccacttcttagat

SEQ ID NO: 4532199 - DNA, 25 bp, Homo sapien
taaccttaactctccacttcttaga

SEQ ID NO: 4532200 - DNA, 25 bp, Homo sapien
tgttgaatggctgatgtgtggtcag

SEQ ID NO: 4532201 - DNA, 25 bp, Homo sapien
gcttatccagatcaatggaacaagg

SEQ ID NO: 4532202 - DNA, 25 bp, Homo sapien
agtgagagagtccttcttgcttatc

SEQ ID NO: 4532203 - DNA, 25 bp, Homo sapien
gatcaatggaacaaggagacaaggc

SEQ ID NO: 4532204 - DNA, 25 bp, Homo sapien
gagagagtccttcttgcttatccag

SEQ ID NO: 4532205 - DNA, 25 bp, Homo sapien
tgcccttcagtccaagaaatgtatg

SEQ ID NO: 4532206 - DNA, 25 bp, Homo sapien
taaaataacgaatgtggagtcactc

SEQ ID NO: 4532207 - DNA, 25 bp, Homo sapien
tgtcaagttcactcaccgtaaggga

SEQ ID NO: 4532208 - DNA, 25 bp, Homo sapien
ggagtcactctacggaaacatacca

SEQ ID NO: 4532209 - DNA, 25 bp, Homo sapien
caggaaagatgaaactattccatgg

SEQ ID NO: 4532210 - DNA, 25 bp, Homo sapien
tcagtcaatttcatcggcacattct

SEQ ID NO: 4532211 - DNA, 25 bp, Homo sapien
agtcaatttcatcggcacattcttc

SEQ ID NO: 4532212 - DNA, 25 bp, Homo sapien
gatgaaactattccatggaaatggc

SEQ ID NO: 4532213 - DNA, 25 bp, Homo sapien
aacgcagcagggttgacatcagtac

SEQ ID NO: 4532214 - DNA, 25 bp, Homo sapien
ttaattgaaggttggaaatgcccca

SEQ ID NO: 4532215 - DNA, 25 bp, Homo sapien
ttatggctgcctctaatgactgtgt

SEQ ID NO: 4532216 - DNA, 25 bp, Homo sapien
cacagcaggccatggattatggctg

SEQ ID NO: 4532217 - DNA, 25 bp, Homo sapien
ctgctccctgatggatcttgataaa

SEQ ID NO: 4532218 - DNA, 25 bp, Homo sapien
tctggatgagcttggatgccctgga

SEQ ID NO: 4532219 - DNA, 25 bp, Homo sapien
gatggatcttgataaactctggatg

SEQ ID NO: 4532220 - DNA, 25 bp, Homo sapien
taaactctggatgagcttggatgcc

SEQ ID NO: 4532221 - DNA, 25 bp, Homo sapien
gagtgccatcattttgcatacagat

SEQ ID NO: 4532222 - DNA, 25 bp, Homo sapien
tgccatcattttgcatacagatata

SEQ ID NO: 4532223 - DNA, 25 bp, Homo sapien
tgcatacagatataactcttattgt

SEQ ID NO: 4532224 - DNA, 25 bp, Homo sapien
gcatacagatataactcttattgtc

SEQ ID NO: 4532225 - DNA, 25 bp, Homo sapien
aaggaaaggcgttgtgggagcagtc

SEQ ID NO: 4532226 - DNA, 25 bp, Homo sapien
ttttccttgtgatgccctcaaggaa

SEQ ID NO: 4532227 - DNA, 25 bp, Homo sapien
cttttcctggtgttagaataatgag

SEQ ID NO: 4532228 - DNA, 25 bp, Homo sapien
gcagaaccgtacaaagtggcacatt

SEQ ID NO: 4532229 - DNA, 25 bp, Homo sapien
tgaggctttgtaggatattctaaaa

SEQ ID NO: 4532230 - DNA, 25 bp, Homo sapien
atgaggctttgtaggatattctaaa

SEQ ID NO: 4532231 - DNA, 25 bp, Homo sapien
gatgaggctttgtaggatattctaa

SEQ ID NO: 4532232 - DNA, 25 bp, Homo sapien
aggttcccacacagatgcatgttac

SEQ ID NO: 4532233 - DNA, 25 bp, Homo sapien
tttagaaatgaatcaaccgttgtac

SEQ ID NO: 4532234 - DNA, 25 bp, Homo sapien
cccatctcttgctatgcaggccagt

SEQ ID NO: 4532235 - DNA, 25 bp, Homo sapien
ctgcagctttggatgtagattttag

SEQ ID NO: 4532236 - DNA, 25 bp, Homo sapien
ctatgcaggccagtgttataagttt

SEQ ID NO: 4532237 - DNA, 25 bp, Homo sapien
ggtggcccttcagagataattctta

SEQ ID NO: 4532238 - DNA, 25 bp, Homo sapien
agttggtggcccttcagagataatt

SEQ ID NO: 4532239 - DNA, 25 bp, Homo sapien
gaagatggtagtgttagttggtggc

SEQ ID NO: 4532240 - DNA, 25 bp, Homo sapien
gagataattcttatgtcccatccca

SEQ ID NO: 4532241 - DNA, 25 bp, Homo sapien
agactgggcgttgtaatagactcat

SEQ ID NO: 4532242 - DNA, 25 bp, Homo sapien
ttgctgaagactgggcgttgtaata

SEQ ID NO: 4532243 - DNA, 25 bp, Homo sapien
ctttgctgaagactgggcgttgtaa

SEQ ID NO: 4532244 - DNA, 25 bp, Homo sapien
tgaagactgggcgttgtaatagact

SEQ ID NO: 4532245 - DNA, 25 bp, Homo sapien
gaatgtctgtgctctcccttaagta

SEQ ID NO: 4532246 - DNA, 25 bp, Homo sapien
tggaggctaccggagtcacgtttag

SEQ ID NO: 4532247 - DNA, 25 bp, Homo sapien
ccggctgccagaatacactggtgga

SEQ ID NO: 4532248 - DNA, 25 bp, Homo sapien
cactggtggagttatgttacgaacc

SEQ ID NO: 4532249 - DNA, 25 bp, Homo sapien
cacacactgtggtctgtctgagttg

SEQ ID NO: 4532250 - DNA, 25 bp, Homo sapien
aggacctgctgagaacacgctgaaa

SEQ ID NO: 4532251 - DNA, 25 bp, Homo sapien
cagaaagtaggctcacagtgggcgt

SEQ ID NO: 4532252 - DNA, 25 bp, Homo sapien
agcagccacgtatgctgtgcacaca

SEQ ID NO: 4532253 - DNA, 25 bp, Homo sapien
gaccaggctttgaggttaacattca

SEQ ID NO: 4532254 - DNA, 25 bp, Homo sapien
cagcatgctcagagccttggtcaag

SEQ ID NO: 4532255 - DNA, 25 bp, Homo sapien
taccacaagatgagcactgtgactc

SEQ ID NO: 4532256 - DNA, 25 bp, Homo sapien
tttagggaaatcacgttctgcagtc

SEQ ID NO: 4532257 - DNA, 25 bp, Homo sapien
tgttggtaaggatattgcccttcaa

SEQ ID NO: 4532258 - DNA, 25 bp, Homo sapien
gttggtaaggatattgcccttcaag

SEQ ID NO: 4532259 - DNA, 25 bp, Homo sapien
atgttggtaaggatattgcccttca

SEQ ID NO: 4532260 - DNA, 25 bp, Homo sapien
ttggtaaggatattgcccttcaagg

SEQ ID NO: 4532261 - DNA, 25 bp, Homo sapien
gccatcacctgaaacggttaccatt

SEQ ID NO: 4532262 - DNA, 25 bp, Homo sapien
catttaacatcatatcctccagtta

SEQ ID NO: 4532263 - DNA, 25 bp, Homo sapien
taattatgtttgttctactgtgaac

SEQ ID NO: 4532264 - DNA, 25 bp, Homo sapien
gacttcaacacttcccaacctctgg

SEQ ID NO: 4532265 - DNA, 25 bp, Homo sapien
gtcctccctgaataccatgtaagtg

SEQ ID NO: 4532266 - DNA, 25 bp, Homo sapien
tgagcagcactaattaacccttttg

SEQ ID NO: 4532267 - DNA, 25 bp, Homo sapien
agtagaactattttgtgagcagcac

SEQ ID NO: 4532268 - DNA, 25 bp, Homo sapien
taagccacatggcaaccctgacttc

SEQ ID NO: 4532269 - DNA, 25 bp, Homo sapien
aacttcccttgtcaaatgttggcac

SEQ ID NO: 4532270 - DNA, 25 bp, Homo sapien
gaatatttggcagatcttgccagta

SEQ ID NO: 4532271 - DNA, 25 bp, Homo sapien
tcatgggagagattagtcggtgatt

SEQ ID NO: 4532272 - DNA, 25 bp, Homo sapien
aaatgaggaacaaccctcttcccat

SEQ ID NO: 4532273 - DNA, 25 bp, Homo sapien
gacaattagatgtgcctgcatgcag

SEQ ID NO: 4532274 - DNA, 25 bp, Homo sapien
gagaactcaaaaccacatcctggtg

SEQ ID NO: 4532275 - DNA, 25 bp, Homo sapien
caggtatcactcacaagcaattgca

SEQ ID NO: 4532276 - DNA, 25 bp, Homo sapien
tcatgccatcggagaatgggaccaa

SEQ ID NO: 4532277 - DNA, 25 bp, Homo sapien
tccaagaatcttgggtcccctgtga

SEQ ID NO: 4532278 - DNA, 25 bp, Homo sapien
gagatgccagcagatcaggctgagt

SEQ ID NO: 4532279 - DNA, 25 bp, Homo sapien
ttctgtccaagaatcttgggtcccc

SEQ ID NO: 4532280 - DNA, 25 bp, Homo sapien
ggctcccggcgagaattctgtccaa

SEQ ID NO: 4532281 - DNA, 25 bp, Homo sapien
gggacctcttctacatccatagaat

SEQ ID NO: 4532282 - DNA, 25 bp, Homo sapien
aagcacactcatgtcaatggccaga

SEQ ID NO: 4532283 - DNA, 25 bp, Homo sapien
tgtgtatttgatagaggcaatccag

SEQ ID NO: 4532284 - DNA, 25 bp, Homo sapien
taggctcactgatgtattgcacaac

SEQ ID NO: 4532285 - DNA, 25 bp, Homo sapien
tgcaagtaatgctcccaagcttcgt

SEQ ID NO: 4532286 - DNA, 25 bp, Homo sapien
tacacaaggtgtaatctcaggttga

SEQ ID NO: 4532287 - DNA, 25 bp, Homo sapien
cactagttaccgtcacttgcaagta

SEQ ID NO: 4532288 - DNA, 25 bp, Homo sapien
tttccatgggtgctgtgggaccagt

SEQ ID NO: 4532289 - DNA, 25 bp, Homo sapien
ggcaggggacaaatcccaggataac

SEQ ID NO: 4532290 - DNA, 25 bp, Homo sapien
tcttagatgtcctgctaatagccat

SEQ ID NO: 4532291 - DNA, 25 bp, Homo sapien
ttccagcttcttagatgtcctgcta

SEQ ID NO: 4532292 - DNA, 25 bp, Homo sapien
cccaggataactctctgttccagct

SEQ ID NO: 4532293 - DNA, 25 bp, Homo sapien
tcaagccacgtgacacattgccatg

SEQ ID NO: 4532294 - DNA, 25 bp, Homo sapien
tttcaagccacgtgacacattgcca

SEQ ID NO: 4532295 - DNA, 25 bp, Homo sapien
tgccatgccaagcacagagagtctg

SEQ ID NO: 4532296 - DNA, 25 bp, Homo sapien
agccacgtgacacattgccatgcca

SEQ ID NO: 4532297 - DNA, 25 bp, Homo sapien
gctaatgtccttggcttcattattc

SEQ ID NO: 4532298 - DNA, 25 bp, Homo sapien
cctccaaaacaatgctttaagccaa

SEQ ID NO: 4532299 - DNA, 25 bp, Homo sapien
tccttggcttcattattcacacctc

SEQ ID NO: 4532300 - DNA, 25 bp, Homo sapien
ctgctttcatgatgttgctaatgtc

SEQ ID NO: 4532301 - DNA, 25 bp, Homo sapien
agtggagggtcagagctttcctcat

SEQ ID NO: 4532302 - DNA, 25 bp, Homo sapien
cagcgtagcaacttcttgagtggag

SEQ ID NO: 4532303 - DNA, 25 bp, Homo sapien
tagcaacttcttgagtggagggtca

SEQ ID NO: 4532304 - DNA, 25 bp, Homo sapien
cttgagtggagggtcagagctttcc

SEQ ID NO: 4532305 - DNA, 25 bp, Homo sapien
ttctgctttttgttagagctatttc

SEQ ID NO: 4532306 - DNA, 25 bp, Homo sapien
cagtatccatccacatttgcaaaat

SEQ ID NO: 4532307 - DNA, 25 bp, Homo sapien
ctttttgttagagctatttctgcac

SEQ ID NO: 4532308 - DNA, 25 bp, Homo sapien
tcagtatccatccacatttgcaaaa

SEQ ID NO: 4532309 - DNA, 25 bp, Homo sapien
caggtacaggtggaacagtaagctc

SEQ ID NO: 4532310 - DNA, 25 bp, Homo sapien
cacggaaagggaatgctcgctagtc

SEQ ID NO: 4532311 - DNA, 25 bp, Homo sapien
catttgacggcgctgatcatacagg

SEQ ID NO: 4532312 - DNA, 25 bp, Homo sapien
tcaagcagtcccctaaggtaaggct

SEQ ID NO: 4532313 - DNA, 25 bp, Homo sapien
ctggtaaatccacacgggcttcctg

SEQ ID NO: 4532314 - DNA, 25 bp, Homo sapien
ggtaaatccacacgggcttcctgaa

SEQ ID NO: 4532315 - DNA, 25 bp, Homo sapien
gaggaaggctagagttacttttgag

SEQ ID NO: 4532316 - DNA, 25 bp, Homo sapien
cctgaaagaggaaggctagagttac

SEQ ID NO: 4532317 - DNA, 25 bp, Homo sapien
aggaaatgaaagactcgagagagta

SEQ ID NO: 4532318 - DNA, 25 bp, Homo sapien
caggaaatgaaagactcgagagagt

SEQ ID NO: 4532319 - DNA, 25 bp, Homo sapien
tcctcctacggaatgtgaattgtgg

SEQ ID NO: 4532320 - DNA, 25 bp, Homo sapien
tccagagcattttgccaccagaaaa

SEQ ID NO: 4532321 - DNA, 25 bp, Homo sapien
tttgcgcaacaacacagctcatgat

SEQ ID NO: 4532322 - DNA, 25 bp, Homo sapien
tagactgtctgtttgcctttcaagg

SEQ ID NO: 4532323 - DNA, 25 bp, Homo sapien
cctgccaatgggcttgagcccgtgg

SEQ ID NO: 4532324 - DNA, 25 bp, Homo sapien
ccgtggggatctgtgactgtaccat

SEQ ID NO: 4532325 - DNA, 25 bp, Homo sapien
gcccgtggggatctgtgactgtacc

SEQ ID NO: 4532326 - DNA, 25 bp, Homo sapien
cagctggcctgccaatgggcttgag

SEQ ID NO: 4532327 - DNA, 25 bp, Homo sapien
actggctccgttgtctttgtccaga

SEQ ID NO: 4532328 - DNA, 25 bp, Homo sapien
tgcaaaagccaaactggctccgttg

SEQ ID NO: 4532329 - DNA, 25 bp, Homo sapien
agccaaactggctccgttgtctttg

SEQ ID NO: 4532330 - DNA, 25 bp, Homo sapien
caaactggctccgttgtctttgtcc

SEQ ID NO: 4532331 - DNA, 25 bp, Homo sapien
ttctggaagtggtaaaatggaaaga

SEQ ID NO: 4532332 - DNA, 25 bp, Homo sapien
ctgttgttgtctctctgagactggg

SEQ ID NO: 4532333 - DNA, 25 bp, Homo sapien
attatctgagccctggtgacagtcc

SEQ ID NO: 4532334 - DNA, 25 bp, Homo sapien
ggaaagaagaagtttctctccagaa

SEQ ID NO: 4532335 - DNA, 25 bp, Homo sapien
tgattaaactgctcgccaagcttct

SEQ ID NO: 4532336 - DNA, 25 bp, Homo sapien
taaactgctcgccaagcttcttctt

SEQ ID NO: 4532337 - DNA, 25 bp, Homo sapien
agatgagagctgattaaactgctcg

SEQ ID NO: 4532338 - DNA, 25 bp, Homo sapien
gagctgattaaactgctcgccaagc

SEQ ID NO: 4532339 - DNA, 25 bp, Homo sapien
atatggtcaccaatagtattttgaa

SEQ ID NO: 4532340 - DNA, 25 bp, Homo sapien
actgcacctgaaaaggatcatatgg

SEQ ID NO: 4532341 - DNA, 25 bp, Homo sapien
tactaacaaaatgaatgcaactgca

SEQ ID NO: 4532342 - DNA, 25 bp, Homo sapien
cagagttgagcaacattgctccaag

SEQ ID NO: 4532343 - DNA, 25 bp, Homo sapien
gtatgggtcagacgaggacttcccc

SEQ ID NO: 4532344 - DNA, 25 bp, Homo sapien
tgtttgaactgatcatttggctgtc

SEQ ID NO: 4532345 - DNA, 25 bp, Homo sapien
ccttagctgggtaagtgtgtgcacc

SEQ ID NO: 4532346 - DNA, 25 bp, Homo sapien
tgtcctcccacctactttgtttgaa

SEQ ID NO: 4532347 - DNA, 25 bp, Homo sapien
tcaagggctctcaattacccaaagg

SEQ ID NO: 4532348 - DNA, 25 bp, Homo sapien
tgccaatgtcttagcaagccctgtt

SEQ ID NO: 4532349 - DNA, 25 bp, Homo sapien
aactttgtcttacctgcttggcgtg

SEQ ID NO: 4532350 - DNA, 25 bp, Homo sapien
tcccataacgctgcaattgtcaccg

SEQ ID NO: 4532351 - DNA, 25 bp, Homo sapien
tgtagttgttaagtccatgaatgaa

SEQ ID NO: 4532352 - DNA, 25 bp, Homo sapien
gacaggctggtatgatctaatgtag

SEQ ID NO: 4532353 - DNA, 25 bp, Homo sapien
aagtgacaggctggtatgatctaat

SEQ ID NO: 4532354 - DNA, 25 bp, Homo sapien
gctggtatgatctaatgtagttgtt

SEQ ID NO: 4532355 - DNA, 25 bp, Homo sapien
tcaatgtgccagtctctgccgacag

SEQ ID NO: 4532356 - DNA, 25 bp, Homo sapien
tcctcccagtcaagctgggagaggg

SEQ ID NO: 4532357 - DNA, 25 bp, Homo sapien
gttgcaaggatttgccattcctccc

SEQ ID NO: 4532358 - DNA, 25 bp, Homo sapien
tgccgacagttgtgtagtctgccac

SEQ ID NO: 4532359 - DNA, 25 bp, Homo sapien
aaggctgttgagaagattctggaga

SEQ ID NO: 4532360 - DNA, 25 bp, Homo sapien
cactgtgcccaatgtctctctgcat

SEQ ID NO: 4532361 - DNA, 25 bp, Homo sapien
gtgcccaatgtctctctgcatattc

SEQ ID NO: 4532362 - DNA, 25 bp, Homo sapien
tgtttactcataacttctcgctcat

SEQ ID NO: 4532363 - DNA, 25 bp, Homo sapien
cataacttctcgctcattttttggc

SEQ ID NO: 4532364 - DNA, 25 bp, Homo sapien
cagatccggtgaattcacagccaaa

SEQ ID NO: 4532365 - DNA, 25 bp, Homo sapien
ccagatccggtgaattcacagccaa

SEQ ID NO: 4532366 - DNA, 25 bp, Homo sapien
attttgccatgaatttctcccaaac

SEQ ID NO: 4532367 - DNA, 25 bp, Homo sapien
ttttgccatgaatttctcccaaacc

SEQ ID NO: 4532368 - DNA, 25 bp, Homo sapien
ccatagctctctcggtcatctctta

SEQ ID NO: 4532369 - DNA, 25 bp, Homo sapien
tttccatagctctctcggtcatctc

SEQ ID NO: 4532370 - DNA, 25 bp, Homo sapien
aaggcttcaagggcaacaggaagtc

SEQ ID NO: 4532371 - DNA, 25 bp, Homo sapien
ggcttcaagggcaacaggaagtccc

SEQ ID NO: 4532372 - DNA, 25 bp, Homo sapien
ttcaagggcaacaggaagtccccag

SEQ ID NO: 4532373 - DNA, 25 bp, Homo sapien
gcttcaagggcaacaggaagtcccc

SEQ ID NO: 4532374 - DNA, 25 bp, Homo sapien
gagcagaggcaagtagcagggctat

SEQ ID NO: 4532375 - DNA, 25 bp, Homo sapien
cagagtgcggtgccgcgatcccacc

SEQ ID NO: 4532376 - DNA, 25 bp, Homo sapien
cagaggcaagtagcagggctatgtg

SEQ ID NO: 4532377 - DNA, 25 bp, Homo sapien
gatcccaccccgtgcagcagttgag

SEQ ID NO: 4532378 - DNA, 25 bp, Homo sapien
ggcaccactgccacggcctatggta

SEQ ID NO: 4532379 - DNA, 25 bp, Homo sapien
tgccacggcctatggtagacaccac

SEQ ID NO: 4532380 - DNA, 25 bp, Homo sapien
tgattagaatgctgtccctggcacc

SEQ ID NO: 4532381 - DNA, 25 bp, Homo sapien
gattagaatgctgtccctggcacca

SEQ ID NO: 4532382 - DNA, 25 bp, Homo sapien
tcctctgtgtgagcatagccagcca

SEQ ID NO: 4532383 - DNA, 25 bp, Homo sapien
tccctctgtagcaggagcctcatga

SEQ ID NO: 4532384 - DNA, 25 bp, Homo sapien
taactttgagcacatcgatggactc

SEQ ID NO: 4532385 - DNA, 25 bp, Homo sapien
tagccagccaacaccctacagttaa

SEQ ID NO: 4532386 - DNA, 25 bp, Homo sapien
tattgccaaagtgtacccttctggg

SEQ ID NO: 4532387 - DNA, 25 bp, Homo sapien
tctcattcacattagagttagggtg

SEQ ID NO: 4532388 - DNA, 25 bp, Homo sapien
ggttctgtggagctttcgtttctca

SEQ ID NO: 4532389 - DNA, 25 bp, Homo sapien
tcgtttctcaagtgggctttgccaa

SEQ ID NO: 4532390 - DNA, 25 bp, Homo sapien
tcctgcaggttggcatgctttgaca

SEQ ID NO: 4532391 - DNA, 25 bp, Homo sapien
tgtgcaaggtgctccaacagagact

SEQ ID NO: 4532392 - DNA, 25 bp, Homo sapien
cacgggtctcagaagatcagctaca

SEQ ID NO: 4532393 - DNA, 25 bp, Homo sapien
caattagcactgagaccttggacca

SEQ ID NO: 4532394 - DNA, 25 bp, Homo sapien
tctaggacacgccttttggtgaaca

SEQ ID NO: 4532395 - DNA, 25 bp, Homo sapien
cactggagagcagcgttttcatgag

SEQ ID NO: 4532396 - DNA, 25 bp, Homo sapien
ttcatgagctctgggaacatccagg

SEQ ID NO: 4532397 - DNA, 25 bp, Homo sapien
agcttggacttagccttcatcagag

SEQ ID NO: 4532398 - DNA, 25 bp, Homo sapien
tcagagctgctagcaccactggaga

SEQ ID NO: 4532399 - DNA, 25 bp, Homo sapien
tactgccagaactagtcatgtagcc

SEQ ID NO: 4532400 - DNA, 25 bp, Homo sapien
gaactagtcatgtagcccgaaaaaa

SEQ ID NO: 4532401 - DNA, 25 bp, Homo sapien
tcatttactgccagaactagtcatg

SEQ ID NO: 4532402 - DNA, 25 bp, Homo sapien
ccagaactagtcatgtagcccgaaa

SEQ ID NO: 4532403 - DNA, 25 bp, Homo sapien
taaaagaaatgctcctatcaaggca

SEQ ID NO: 4532404 - DNA, 25 bp, Homo sapien
agaagagatgtccaattcctgcagg

SEQ ID NO: 4532405 - DNA, 25 bp, Homo sapien
cctgtgatgggtacaggaatcccaa

SEQ ID NO: 4532406 - DNA, 25 bp, Homo sapien
aatgaactgctttgccgctattgcc

SEQ ID NO: 4532407 - DNA, 25 bp, Homo sapien
tgtccctggctgaaaggttccttac

SEQ ID NO: 4532408 - DNA, 25 bp, Homo sapien
gccaacatgtccctggctgaaaggt

SEQ ID NO: 4532409 - DNA, 25 bp, Homo sapien
ctgtctttagccaacatgtccctgg

SEQ ID NO: 4532410 - DNA, 25 bp, Homo sapien
tgtctttagccaacatgtccctggc

SEQ ID NO: 4532411 - DNA, 25 bp, Homo sapien
gttttggtccaacaggacaaatgac

SEQ ID NO: 4532412 - DNA, 25 bp, Homo sapien
ggcgatgttttggtccaacaggaca

SEQ ID NO: 4532413 - DNA, 25 bp, Homo sapien
catggcgatgttttggtccaacagg

SEQ ID NO: 4532414 - DNA, 25 bp, Homo sapien
tgttttggtccaacaggacaaatga

SEQ ID NO: 4532415 - DNA, 25 bp, Homo sapien
ctcagcctgagagttttattcactt

SEQ ID NO: 4532416 - DNA, 25 bp, Homo sapien
gttttattcacttcttctgcaggga

SEQ ID NO: 4532417 - DNA, 25 bp, Homo sapien
tcagcctgagagttttattcacttc

SEQ ID NO: 4532418 - DNA, 25 bp, Homo sapien
tgagagttttattcacttcttctgc

SEQ ID NO: 4532419 - DNA, 25 bp, Homo sapien
ggaacccacagacccagaatgatag

SEQ ID NO: 4532420 - DNA, 25 bp, Homo sapien
caggttcagggttggaacccacaga

SEQ ID NO: 4532421 - DNA, 25 bp, Homo sapien
ttggattcaggttcagggttggaac

SEQ ID NO: 4532422 - DNA, 25 bp, Homo sapien
ttcctgttggattcaggttcagggt

SEQ ID NO: 4532423 - DNA, 25 bp, Homo sapien
tggcactgcttacccattgttctgc

SEQ ID NO: 4532424 - DNA, 25 bp, Homo sapien
cattgctctcaaatatggcactgct

SEQ ID NO: 4532425 - DNA, 25 bp, Homo sapien
tacaagtcgtataccagggaagggc

SEQ ID NO: 4532426 - DNA, 25 bp, Homo sapien
tgtatctcatcaattccaacctgct

SEQ ID NO: 4532427 - DNA, 25 bp, Homo sapien
atgggtttattgtgtatcatagggt

SEQ ID NO: 4532428 - DNA, 25 bp, Homo sapien
tcatagggttgctggggttttccaa

SEQ ID NO: 4532429 - DNA, 25 bp, Homo sapien
ccctctgagtgtgggttggcctttc

SEQ ID NO: 4532430 - DNA, 25 bp, Homo sapien
gttttccaacttcaccctctgagtg

SEQ ID NO: 4532431 - DNA, 25 bp, Homo sapien
aaaatactctgcgtgtccagaactc

SEQ ID NO: 4532432 - DNA, 25 bp, Homo sapien
cgtgtataagaatataatcttccac

SEQ ID NO: 4532433 - DNA, 25 bp, Homo sapien
tcaatcgtcgtgtataagaatataa

SEQ ID NO: 4532434 - DNA, 25 bp, Homo sapien
tttaaaatactctgcgtgtccagaa

SEQ ID NO: 4532435 - DNA, 25 bp, Homo sapien
caacttgccattgatggggagaaaa

SEQ ID NO: 4532436 - DNA, 25 bp, Homo sapien
cttccaacttgccattgatggggag

SEQ ID NO: 4532437 - DNA, 25 bp, Homo sapien
tccaacttgccattgatggggagaa

SEQ ID NO: 4532438 - DNA, 25 bp, Homo sapien
acttgccattgatggggagaaaagg

SEQ ID NO: 4532439 - DNA, 25 bp, Homo sapien
ggaaaggcatgatcttcttgagact

SEQ ID NO: 4532440 - DNA, 25 bp, Homo sapien
cccgggcttcttatgggaaaggcat

SEQ ID NO: 4532441 - DNA, 25 bp, Homo sapien
agtcataagcttcttccccgggctt

SEQ ID NO: 4532442 - DNA, 25 bp, Homo sapien
tgagcattcagcttgccgctgcctt

SEQ ID NO: 4532443 - DNA, 25 bp, Homo sapien
tctctggtatgcaagggtggtgccc

SEQ ID NO: 4532444 - DNA, 25 bp, Homo sapien
gacagccatttcgtgtgggaagacc

SEQ ID NO: 4532445 - DNA, 25 bp, Homo sapien
gaatatgtggtaaatcaggatcccc

SEQ ID NO: 4532446 - DNA, 25 bp, Homo sapien
catgggacttgagtggatcaccacc

SEQ ID NO: 4532447 - DNA, 25 bp, Homo sapien
acctctctggttagctgtagcccta

SEQ ID NO: 4532448 - DNA, 25 bp, Homo sapien
tctctggttagctgtagccctagat

SEQ ID NO: 4532449 - DNA, 25 bp, Homo sapien
cctctctggttagctgtagccctag

SEQ ID NO: 4532450 - DNA, 25 bp, Homo sapien
ctctctggttagctgtagccctaga

SEQ ID NO: 4532451 - DNA, 25 bp, Homo sapien
tgcatctttgttcatgatgagcata

SEQ ID NO: 4532452 - DNA, 25 bp, Homo sapien
gaagcctttaatttaccactgtaca

SEQ ID NO: 4532453 - DNA, 25 bp, Homo sapien
gagcttctcgaagcctttaatttac

SEQ ID NO: 4532454 - DNA, 25 bp, Homo sapien
tgtacattatggatccaggagaaaa

SEQ ID NO: 4532455 - DNA, 25 bp, Homo sapien
cagatttggtctggctgggtcttcc

SEQ ID NO: 4532456 - DNA, 25 bp, Homo sapien
cagttttctgagcacaacttagcaa

SEQ ID NO: 4532457 - DNA, 25 bp, Homo sapien
gttttctgagcacaacttagcaaag

SEQ ID NO: 4532458 - DNA, 25 bp, Homo sapien
ccagttttctgagcacaacttagca

SEQ ID NO: 4532459 - DNA, 25 bp, Homo sapien
atccagttttctgagcacaacttag

SEQ ID NO: 4532460 - DNA, 25 bp, Homo sapien
tatgggtttgcagtatatgggcttc

SEQ ID NO: 4532461 - DNA, 25 bp, Homo sapien
cagtgaagtcagcaggtccttggac

SEQ ID NO: 4532462 - DNA, 25 bp, Homo sapien
tgagccatccttgcaccctagggtt

SEQ ID NO: 4532463 - DNA, 25 bp, Homo sapien
ggttaaatcccatgtaatcacggtg

SEQ ID NO: 4532464 - DNA, 25 bp, Homo sapien
ataggcaacccgattccatagccca

SEQ ID NO: 4532465 - DNA, 25 bp, Homo sapien
gcaacaggatccctgacagctaaag

SEQ ID NO: 4532466 - DNA, 25 bp, Homo sapien
tgctccatggccctggtgctccatg

SEQ ID NO: 4532467 - DNA, 25 bp, Homo sapien
cagagctgcaacaggatccctgaca

SEQ ID NO: 4532468 - DNA, 25 bp, Homo sapien
tcgaaagtgtgaaaaggtcattgcc

SEQ ID NO: 4532469 - DNA, 25 bp, Homo sapien
attgcaaaatgtccaacgtgactcg

SEQ ID NO: 4532470 - DNA, 25 bp, Homo sapien
tcagaagaacagctctttgtccaaa

SEQ ID NO: 4532471 - DNA, 25 bp, Homo sapien
caaagctgattttgacgcacatgtt

SEQ ID NO: 4532472 - DNA, 25 bp, Homo sapien
ctttctggaggccggactgcactcc

SEQ ID NO: 4532473 - DNA, 25 bp, Homo sapien
ttctggaggccggactgcactccgg

SEQ ID NO: 4532474 - DNA, 25 bp, Homo sapien
tggaggccggactgcactccggctt

SEQ ID NO: 4532475 - DNA, 25 bp, Homo sapien
cggactgcactccggcttcctggga

SEQ ID NO: 4532476 - DNA, 25 bp, Homo sapien
caccacctttccaggccttcagttg

SEQ ID NO: 4532477 - DNA, 25 bp, Homo sapien
agacaattctcttgctgaccaccac

SEQ ID NO: 4532478 - DNA, 25 bp, Homo sapien
ttccagaggctgtgaacagacaatt

SEQ ID NO: 4532479 - DNA, 25 bp, Homo sapien
acctttccaggccttcagttgccat

SEQ ID NO: 4532480 - DNA, 25 bp, Homo sapien
tgagaagtccatcacacgtgttctg

SEQ ID NO: 4532481 - DNA, 25 bp, Homo sapien
ccagccaaagctcatagtgtcacat

SEQ ID NO: 4532482 - DNA, 25 bp, Homo sapien
gatgtagtgtcttattcccagccaa

SEQ ID NO: 4532483 - DNA, 25 bp, Homo sapien
ggtttgtgtccccaagccaagatgt

SEQ ID NO: 4532484 - DNA, 25 bp, Homo sapien
aaggcaaaggttcactattactaca

SEQ ID NO: 4532485 - DNA, 25 bp, Homo sapien
aatgtcccagtaagtagtaaagcaa

SEQ ID NO: 4532486 - DNA, 25 bp, Homo sapien
tactacatttatgctacttttatgc

SEQ ID NO: 4532487 - DNA, 25 bp, Homo sapien
gatgatgtaattgtttgcatcgaaa

SEQ ID NO: 4532488 - DNA, 25 bp, Homo sapien
caatctgggttacatgcatctgcag

SEQ ID NO: 4532489 - DNA, 25 bp, Homo sapien
tctgcaagataacccccaatctggg

SEQ ID NO: 4532490 - DNA, 25 bp, Homo sapien
ccccaatctgggttataagcacaga

SEQ ID NO: 4532491 - DNA, 25 bp, Homo sapien
tctcgtctgtgagataacctacaat

SEQ ID NO: 4532492 - DNA, 25 bp, Homo sapien
tcagttaggtcctagttatttatct

SEQ ID NO: 4532493 - DNA, 25 bp, Homo sapien
gaaatacttatctaagtcaatgtct

SEQ ID NO: 4532494 - DNA, 25 bp, Homo sapien
ggtcatgaaatacttatctaagtca

SEQ ID NO: 4532495 - DNA, 25 bp, Homo sapien
tttgctgcacaaaagctcttagttc

SEQ ID NO: 4532496 - DNA, 25 bp, Homo sapien
aatgccgaatccagacccaagatgg

SEQ ID NO: 4532497 - DNA, 25 bp, Homo sapien
ccgttaagacatgtaatgccgaatc

SEQ ID NO: 4532498 - DNA, 25 bp, Homo sapien
catgtaatgccgaatccagacccaa

SEQ ID NO: 4532499 - DNA, 25 bp, Homo sapien
tgtgtgcactgtgtgcgagccgaag

SEQ ID NO: 4532500 - DNA, 25 bp, Homo sapien
cttccagtcctctgggctctaagtc

SEQ ID NO: 4532501 - DNA, 25 bp, Homo sapien
tgtagcatcaggctagagtgcgtgc

SEQ ID NO: 4532502 - DNA, 25 bp, Homo sapien
tcctctgggctctaagtctctgctc

SEQ ID NO: 4532503 - DNA, 25 bp, Homo sapien
tgcggctgtggcagcgtcttccagt

SEQ ID NO: 4532504 - DNA, 25 bp, Homo sapien
ttgatcagggtcatgaaagaggctg

SEQ ID NO: 4532505 - DNA, 25 bp, Homo sapien
tgttgatcagggtcatgaaagaggc

SEQ ID NO: 4532506 - DNA, 25 bp, Homo sapien
acacgtaggcccttttgtgtaactg

SEQ ID NO: 4532507 - DNA, 25 bp, Homo sapien
cacgtaggcccttttgtgtaactga

SEQ ID NO: 4532508 - DNA, 25 bp, Homo sapien
catggttctccgttttgctaaattc

SEQ ID NO: 4532509 - DNA, 25 bp, Homo sapien
cttagaagcacgtacataaatcctc

SEQ ID NO: 4532510 - DNA, 25 bp, Homo sapien
cagtatatgacatggttctccgttt

SEQ ID NO: 4532511 - DNA, 25 bp, Homo sapien
ttagaagcacgtacataaatcctcc

SEQ ID NO: 4532512 - DNA, 25 bp, Homo sapien
gctccaaatgcgagcctcgaagacg

SEQ ID NO: 4532513 - DNA, 25 bp, Homo sapien
gacaccagttgtactcctttcctag

SEQ ID NO: 4532514 - DNA, 25 bp, Homo sapien
ccgggccaaggctacaacttctggg

SEQ ID NO: 4532515 - DNA, 25 bp, Homo sapien
ctcgaagacggcatgaacacggcca

SEQ ID NO: 4532516 - DNA, 25 bp, Homo sapien
gctggggtcccagagactggtgagg

SEQ ID NO: 4532517 - DNA, 25 bp, Homo sapien
gaatacagtctatagacaatcggac

SEQ ID NO: 4532518 - DNA, 25 bp, Homo sapien
tcaagaatacagtctatagacaatc

SEQ ID NO: 4532519 - DNA, 25 bp, Homo sapien
aagaatacagtctatagacaatcgg

SEQ ID NO: 4532520 - DNA, 25 bp, Homo sapien
agaatacagtctatagacaatcgga

SEQ ID NO: 4532521 - DNA, 25 bp, Homo sapien
gattttgaaagtgaagttatatgaa

SEQ ID NO: 4532522 - DNA, 25 bp, Homo sapien
gcaagcatgcactttcgagttttgt

SEQ ID NO: 4532523 - DNA, 25 bp, Homo sapien
tatatgaaggcgtttcttcttattt

SEQ ID NO: 4532524 - DNA, 25 bp, Homo sapien
gcagcaatagagcaagcatgcactt

SEQ ID NO: 4532525 - DNA, 25 bp, Homo sapien
ttcaccacatttagtccaaggctcc

SEQ ID NO: 4532526 - DNA, 25 bp, Homo sapien
gttgatcacgttcacaggagcactg

SEQ ID NO: 4532527 - DNA, 25 bp, Homo sapien
tgcagtagaggagctaatgagacgc

SEQ ID NO: 4532528 - DNA, 25 bp, Homo sapien
caacgtatgcttgagaaatggatta

SEQ ID NO: 4532529 - DNA, 25 bp, Homo sapien
gcattgaccactagtccttgagcct

SEQ ID NO: 4532530 - DNA, 25 bp, Homo sapien
gaggaatttcctccagatcccgttg

SEQ ID NO: 4532531 - DNA, 25 bp, Homo sapien
gatgctgctgcattgaccactagtc

SEQ ID NO: 4532532 - DNA, 25 bp, Homo sapien
tcccgttggctggatcctacacttc

SEQ ID NO: 4532533 - DNA, 25 bp, Homo sapien
cctggctcaactaggagtagaatga

SEQ ID NO: 4532534 - DNA, 25 bp, Homo sapien
ctgcctggctcaactaggagtagaa

SEQ ID NO: 4532535 - DNA, 25 bp, Homo sapien
actaggagtagaatgagatagttct

SEQ ID NO: 4532536 - DNA, 25 bp, Homo sapien
caactaggagtagaatgagatagtt

SEQ ID NO: 4532537 - DNA, 25 bp, Homo sapien
cctgggccttcctccaaccccatat

SEQ ID NO: 4532538 - DNA, 25 bp, Homo sapien
cctccaaccccatattccagatacc

SEQ ID NO: 4532539 - DNA, 25 bp, Homo sapien
ggccttcctccaaccccatattcca

SEQ ID NO: 4532540 - DNA, 25 bp, Homo sapien
tcctccaaccccatattccagatac

SEQ ID NO: 4532541 - DNA, 25 bp, Homo sapien
ctcacacaaattggtgtggacagcc

SEQ ID NO: 4532542 - DNA, 25 bp, Homo sapien
aggcctcatgatcagcactggactt

SEQ ID NO: 4532543 - DNA, 25 bp, Homo sapien
caggcctcatgatcagcactggact

SEQ ID NO: 4532544 - DNA, 25 bp, Homo sapien
ggcctcatgatcagcactggacttg

SEQ ID NO: 4532545 - DNA, 25 bp, Homo sapien
aagtcagtgacattttggtcatgaa

SEQ ID NO: 4532546 - DNA, 25 bp, Homo sapien
tgatgaataccgctttcttcctgca

SEQ ID NO: 4532547 - DNA, 25 bp, Homo sapien
gctctaaactgcagcgcctctctgg

SEQ ID NO: 4532548 - DNA, 25 bp, Homo sapien
tttggtcatgaaacccacatgcact

SEQ ID NO: 4532549 - DNA, 25 bp, Homo sapien
agctggccgtgggtgttcagaccat

SEQ ID NO: 4532550 - DNA, 25 bp, Homo sapien
cactccaaggtcgttctctttagga

SEQ ID NO: 4532551 - DNA, 25 bp, Homo sapien
ttcaggaagttcgttcactccaagg

SEQ ID NO: 4532552 - DNA, 25 bp, Homo sapien
tgaagccccaaacaatatgccagcc

SEQ ID NO: 4532553 - DNA, 25 bp, Homo sapien
agagtgacctcgtcgtgaaggttcc

SEQ ID NO: 4532554 - DNA, 25 bp, Homo sapien
gaaaagagtgacctcgtcgtgaagg

SEQ ID NO: 4532555 - DNA, 25 bp, Homo sapien
ctgcagaaaagagtgacctcgtcgt

SEQ ID NO: 4532556 - DNA, 25 bp, Homo sapien
gtgacctcgtcgtgaaggttcctgc

SEQ ID NO: 4532557 - DNA, 25 bp, Homo sapien
tgtttagcacatagacgactgcaat

SEQ ID NO: 4532558 - DNA, 25 bp, Homo sapien
ttagcacatagacgactgcaatgaa

SEQ ID NO: 4532559 - DNA, 25 bp, Homo sapien
gtttagcacatagacgactgcaatg

SEQ ID NO: 4532560 - DNA, 25 bp, Homo sapien
tttagcacatagacgactgcaatga

SEQ ID NO: 4532561 - DNA, 25 bp, Homo sapien
tcccatggaggagcttattttgacc

SEQ ID NO: 4532562 - DNA, 25 bp, Homo sapien
gatcttcatgaaggagccatctgca

SEQ ID NO: 4532563 - DNA, 25 bp, Homo sapien
gcctctctcaatgcttcccatggag

SEQ ID NO: 4532564 - DNA, 25 bp, Homo sapien
gaaacagatgttgtgttccaaatgg

SEQ ID NO: 4532565 - DNA, 25 bp, Homo sapien
catggactctgcttcaatctagtta

SEQ ID NO: 4532566 - DNA, 25 bp, Homo sapien
gcatggttagttcttcatggactct

SEQ ID NO: 4532567 - DNA, 25 bp, Homo sapien
tctgcttcaatctagttacctggcc

SEQ ID NO: 4532568 - DNA, 25 bp, Homo sapien
agtgaggcatggttagttcttcatg

SEQ ID NO: 4532569 - DNA, 25 bp, Homo sapien
agattgtacttttaaccaccagacg

SEQ ID NO: 4532570 - DNA, 25 bp, Homo sapien
tgaaaatcaagcagtctaactccag

SEQ ID NO: 4532571 - DNA, 25 bp, Homo sapien
ttaaccaccagacgattctgcctct

SEQ ID NO: 4532572 - DNA, 25 bp, Homo sapien
ggaagagctgggattgaaaatcaag

SEQ ID NO: 4532573 - DNA, 25 bp, Homo sapien
tgctctcagttatattaaatcctac

SEQ ID NO: 4532574 - DNA, 25 bp, Homo sapien
taaatcctactttttgataagccat

SEQ ID NO: 4532575 - DNA, 25 bp, Homo sapien
gataattgcatttcataatcacatc

SEQ ID NO: 4532576 - DNA, 25 bp, Homo sapien
gtgttgaatttgtgttgctctcagt

SEQ ID NO: 4532577 - DNA, 25 bp, Homo sapien
gattgtattggacttatcaggaaaa

SEQ ID NO: 4532578 - DNA, 25 bp, Homo sapien
ggactcttaacaattcatgaggata

SEQ ID NO: 4532579 - DNA, 25 bp, Homo sapien
gaatgttcatctcctacatggactc

SEQ ID NO: 4532580 - DNA, 25 bp, Homo sapien
tactatacttgattatcatcatagg

SEQ ID NO: 4532581 - DNA, 25 bp, Homo sapien
gttttcagaatagccccataaggtg

SEQ ID NO: 4532582 - DNA, 25 bp, Homo sapien
ggcctcagggagattgtgacttgct

SEQ ID NO: 4532583 - DNA, 25 bp, Homo sapien
gcttccagaagaacggacacagata

SEQ ID NO: 4532584 - DNA, 25 bp, Homo sapien
caatggaagccaaaactgctgctaa

SEQ ID NO: 4532585 - DNA, 25 bp, Homo sapien
ccctgggcagttaggaggcatacac

SEQ ID NO: 4532586 - DNA, 25 bp, Homo sapien
gctgaagggttaacctaagctgcca

SEQ ID NO: 4532587 - DNA, 25 bp, Homo sapien
gagtacatatctaaaccaccgtgag

SEQ ID NO: 4532588 - DNA, 25 bp, Homo sapien
caagggctgggagatttcaactaaa

SEQ ID NO: 4532589 - DNA, 25 bp, Homo sapien
aaactcagttgcagcacagaggaag

SEQ ID NO: 4532590 - DNA, 25 bp, Homo sapien
cactaaactcagttgcagcacagag

SEQ ID NO: 4532591 - DNA, 25 bp, Homo sapien
tctctcactaaactcagttgcagca

SEQ ID NO: 4532592 - DNA, 25 bp, Homo sapien
ctcactaaactcagttgcagcacag

SEQ ID NO: 4532593 - DNA, 25 bp, Homo sapien
ttcagagtgagaagcgaagcccaat

SEQ ID NO: 4532594 - DNA, 25 bp, Homo sapien
tcatccaataggcaccagctggagg

SEQ ID NO: 4532595 - DNA, 25 bp, Homo sapien
gctcctgccgagatcactagcttta

SEQ ID NO: 4532596 - DNA, 25 bp, Homo sapien
taaaagtgctcttcgggcctgagtt

SEQ ID NO: 4532597 - DNA, 25 bp, Homo sapien
cattataccctagttaggagttgac

SEQ ID NO: 4532598 - DNA, 25 bp, Homo sapien
cctcctgggtatagaagagccgctg

SEQ ID NO: 4532599 - DNA, 25 bp, Homo sapien
tcaactggtgaatgtggcagtcagg

SEQ ID NO: 4532600 - DNA, 25 bp, Homo sapien
tctgaactagatggactcgccactg

SEQ ID NO: 4532601 - DNA, 25 bp, Homo sapien
aactgtgtggccatgaccatactgg

SEQ ID NO: 4532602 - DNA, 25 bp, Homo sapien
tgtgtggccatgaccatactggcca

SEQ ID NO: 4532603 - DNA, 25 bp, Homo sapien
taaagtctcaactgtgtggccatga

SEQ ID NO: 4532604 - DNA, 25 bp, Homo sapien
cttacgtaaagtctcaactgtgtgg

SEQ ID NO: 4532605 - DNA, 25 bp, Homo sapien
agcccagcccgagcagaaatcccag

SEQ ID NO: 4532606 - DNA, 25 bp, Homo sapien
agcccgagcagaaatcccagaagag

SEQ ID NO: 4532607 - DNA, 25 bp, Homo sapien
ccagaagaggtcccggccttgctcg

SEQ ID NO: 4532608 - DNA, 25 bp, Homo sapien
gaagaggtcccggccttgctcgcat

SEQ ID NO: 4532609 - DNA, 25 bp, Homo sapien
tctgatgcaccacggtgaaggcatt

SEQ ID NO: 4532610 - DNA, 25 bp, Homo sapien
taagcgtaggtgctgcaaggaagcc

SEQ ID NO: 4532611 - DNA, 25 bp, Homo sapien
tctacatctattattccagcaaaga

SEQ ID NO: 4532612 - DNA, 25 bp, Homo sapien
cttgcctcaacagaaactatggtaa

SEQ ID NO: 4532613 - DNA, 25 bp, Homo sapien
gaagccatacttcaattgctctaca

SEQ ID NO: 4532614 - DNA, 25 bp, Homo sapien
taaagacgacacagctctgttgtca

SEQ ID NO: 4532615 - DNA, 25 bp, Homo sapien
acgacacagctctgttgtcaaagag

SEQ ID NO: 4532616 - DNA, 25 bp, Homo sapien
ctaaagacgacacagctctgttgtc

SEQ ID NO: 4532617 - DNA, 25 bp, Homo sapien
aagacgacacagctctgttgtcaaa

SEQ ID NO: 4532618 - DNA, 25 bp, Homo sapien
tcacattcagcttcttgccctgttc

SEQ ID NO: 4532619 - DNA, 25 bp, Homo sapien
gggactcacattcagcttcttgccc

SEQ ID NO: 4532620 - DNA, 25 bp, Homo sapien
agcttctgggactcacattcagctt

SEQ ID NO: 4532621 - DNA, 25 bp, Homo sapien
ttctgggactcacattcagcttctt

SEQ ID NO: 4532622 - DNA, 25 bp, Homo sapien
tggcaccttgtacctccatgggcag

SEQ ID NO: 4532623 - DNA, 25 bp, Homo sapien
ggtatggcaccttgtacctccatgg

SEQ ID NO: 4532624 - DNA, 25 bp, Homo sapien
catccttgtaccttggtatggcacc

SEQ ID NO: 4532625 - DNA, 25 bp, Homo sapien
ctttgcatccttgtaccttggtatg

SEQ ID NO: 4532626 - DNA, 25 bp, Homo sapien
gaaagctcatgtggctacggccctg

SEQ ID NO: 4532627 - DNA, 25 bp, Homo sapien
tgcacgaggataagaggtttcaaga

SEQ ID NO: 4532628 - DNA, 25 bp, Homo sapien
gaagtctggctgaaaaccttgtggg

SEQ ID NO: 4532629 - DNA, 25 bp, Homo sapien
tcattgtcattggatggcagcagag

SEQ ID NO: 4532630 - DNA, 25 bp, Homo sapien
cttgagcttcaaagatgaccagcat

SEQ ID NO: 4532631 - DNA, 25 bp, Homo sapien
ggcctggggcatgaaatcacataaa

SEQ ID NO: 4532632 - DNA, 25 bp, Homo sapien
tctatcaggcccttgtcggcaggcc

SEQ ID NO: 4532633 - DNA, 25 bp, Homo sapien
ggaaccagtgcaccggtctgcagtg

SEQ ID NO: 4532634 - DNA, 25 bp, Homo sapien
tctgcagtgtgcaataacctcactc

SEQ ID NO: 4532635 - DNA, 25 bp, Homo sapien
taaaataagcataccatggcaactg

SEQ ID NO: 4532636 - DNA, 25 bp, Homo sapien
ggcaactgggttatccgtcccctca

SEQ ID NO: 4532637 - DNA, 25 bp, Homo sapien
tcaagcgtttatccgttgagtgcaa

SEQ ID NO: 4532638 - DNA, 25 bp, Homo sapien
gaaaaatgatctgtggtcacgtgag

SEQ ID NO: 4532639 - DNA, 25 bp, Homo sapien
tacattggccacaagacaaaggact

SEQ ID NO: 4532640 - DNA, 25 bp, Homo sapien
gacaacaacgtggtgaatggttcca

SEQ ID NO: 4532641 - DNA, 25 bp, Homo sapien
gcgcaccattgtgaccacgctgcag

SEQ ID NO: 4532642 - DNA, 25 bp, Homo sapien
tgcaagccatctgcggcatctcctg

SEQ ID NO: 4532643 - DNA, 25 bp, Homo sapien
gactgttgatagctgcactgagtgt

SEQ ID NO: 4532644 - DNA, 25 bp, Homo sapien
tcccctatgctatcacaacggagtt

SEQ ID NO: 4532645 - DNA, 25 bp, Homo sapien
tcagtacagaaataacgaggaatgg

SEQ ID NO: 4532646 - DNA, 25 bp, Homo sapien
aatggactgttgatagctgcactga

SEQ ID NO: 4532647 - DNA, 25 bp, Homo sapien
cagttcctgatggagaatgctgtcc

SEQ ID NO: 4532648 - DNA, 25 bp, Homo sapien
tgatggagaatgctgtcctcgctgt

SEQ ID NO: 4532649 - DNA, 25 bp, Homo sapien
tctgcaaaaaggtgtcctgccccat

SEQ ID NO: 4532650 - DNA, 25 bp, Homo sapien
taccatctgcaaaaaggtgtcctgc

SEQ ID NO: 4532651 - DNA, 25 bp, Homo sapien
gactctgcggacgatggctggtctc

SEQ ID NO: 4532652 - DNA, 25 bp, Homo sapien
tcaacaaccgatgtgagggctcctc

SEQ ID NO: 4532653 - DNA, 25 bp, Homo sapien
tctacgagctgtggcaatggaattc

SEQ ID NO: 4532654 - DNA, 25 bp, Homo sapien
tgtaagcatcttagcctctcaggga

SEQ ID NO: 4532655 - DNA, 25 bp, Homo sapien
catcttgttctgtgacatgtggtga

SEQ ID NO: 4532656 - DNA, 25 bp, Homo sapien
aaagcctgcaagaaagacgcctgcc

SEQ ID NO: 4532657 - DNA, 25 bp, Homo sapien
tgtgatcacaaggatccggctctgc

SEQ ID NO: 4532658 - DNA, 25 bp, Homo sapien
ccagatgaacgggaaaccctgtgaa

SEQ ID NO: 4532659 - DNA, 25 bp, Homo sapien
caaggactgcgttggtgatgtaaca

SEQ ID NO: 4532660 - DNA, 25 bp, Homo sapien
gatgcaggtggacaacataatccca

SEQ ID NO: 4532661 - DNA, 25 bp, Homo sapien
gactgtccaattggtgagccacgca

SEQ ID NO: 4532662 - DNA, 25 bp, Homo sapien
cagtcagcattcgaggagattccag

SEQ ID NO: 4532663 - DNA, 25 bp, Homo sapien
tgctttgccggcgtgaagtgtacta

SEQ ID NO: 4532664 - DNA, 25 bp, Homo sapien
ggaaatgtggtgcttgtccccctgg

SEQ ID NO: 4532665 - DNA, 25 bp, Homo sapien
tggatgcctgtccaatccctgcttt

SEQ ID NO: 4532666 - DNA, 25 bp, Homo sapien
agtgtactagctaccctgatggcag

SEQ ID NO: 4532667 - DNA, 25 bp, Homo sapien
tgtcgaacatgccacggccaacaaa

SEQ ID NO: 4532668 - DNA, 25 bp, Homo sapien
agcccttcggccagggtgtcgaaca

SEQ ID NO: 4532669 - DNA, 25 bp, Homo sapien
gatgcctgcttcaaccacaatggag

SEQ ID NO: 4532670 - DNA, 25 bp, Homo sapien
agagcaccggtgtgagaacacggac

SEQ ID NO: 4532671 - DNA, 25 bp, Homo sapien
caagcctggctacgctggcaatggc

SEQ ID NO: 4532672 - DNA, 25 bp, Homo sapien
aacctggtgtgcgtggccaatgcga

SEQ ID NO: 4532673 - DNA, 25 bp, Homo sapien
tggctggcccaatgagaacctggtg

SEQ ID NO: 4532674 - DNA, 25 bp, Homo sapien
aagaacgccaagtgcaactacctgg

SEQ ID NO: 4532675 - DNA, 25 bp, Homo sapien
caaggatggaattggtgatgcctgt

SEQ ID NO: 4532676 - DNA, 25 bp, Homo sapien
ccaactcagggcaggaagactatga

SEQ ID NO: 4532677 - DNA, 25 bp, Homo sapien
aaccttcccaactcagggcaggaag

SEQ ID NO: 4532678 - DNA, 25 bp, Homo sapien
ggaagactatgacaaggatggaatt

SEQ ID NO: 4532679 - DNA, 25 bp, Homo sapien
ggagaccgctgtgacaactgtccct

SEQ ID NO: 4532680 - DNA, 25 bp, Homo sapien
gctcagtatgactatgacagagatg

SEQ ID NO: 4532681 - DNA, 25 bp, Homo sapien
gacagagatgatgtgggagaccgct

SEQ ID NO: 4532682 - DNA, 25 bp, Homo sapien
cattacaacccagctcagtatgact

SEQ ID NO: 4532683 - DNA, 25 bp, Homo sapien
gacaactgccagtacgtctacaatg

SEQ ID NO: 4532684 - DNA, 25 bp, Homo sapien
tatcctcaatgaacgggacaactgc

SEQ ID NO: 4532685 - DNA, 25 bp, Homo sapien
gagatcagtgtgacaattgcccctt

SEQ ID NO: 4532686 - DNA, 25 bp, Homo sapien
gtacgtctacaatgtggaccagaga

SEQ ID NO: 4532687 - DNA, 25 bp, Homo sapien
tatccctgtcataaacattacccag

SEQ ID NO: 4532688 - DNA, 25 bp, Homo sapien
ttacccagacagtatacaacacagg

SEQ ID NO: 4532689 - DNA, 25 bp, Homo sapien
gaagtcgacgtgtcaacagttttac

SEQ ID NO: 4532690 - DNA, 25 bp, Homo sapien
tcaggacttttcagagaagtcgacg

SEQ ID NO: 4532691 - DNA, 25 bp, Homo sapien
caggctgaccatgacaaagatggca

SEQ ID NO: 4532692 - DNA, 25 bp, Homo sapien
gaccgcattggagatacctgtgaca

SEQ ID NO: 4532693 - DNA, 25 bp, Homo sapien
caggatattgatgaagatggccacc

SEQ ID NO: 4532694 - DNA, 25 bp, Homo sapien
gacaactgtccctatgtgcccaatg

SEQ ID NO: 4532695 - DNA, 25 bp, Homo sapien
ccatcagggtaaagaactcgtccag

SEQ ID NO: 4532696 - DNA, 25 bp, Homo sapien
gacatcagtgagaccgatttccgcc

SEQ ID NO: 4532697 - DNA, 25 bp, Homo sapien
gattttgaccatgacagtgtgccag

SEQ ID NO: 4532698 - DNA, 25 bp, Homo sapien
gatgattcctctggaccccaaaggg

SEQ ID NO: 4532699 - DNA, 25 bp, Homo sapien
ggatactcgggcctttctgtgaaag

SEQ ID NO: 4532700 - DNA, 25 bp, Homo sapien
ttcttcatcaacaccgaaagggacg

SEQ ID NO: 4532701 - DNA, 25 bp, Homo sapien
tgaaagttgtaaactccaccacagg

SEQ ID NO: 4532702 - DNA, 25 bp, Homo sapien
tctttggctaccagtccagcagccg

SEQ ID NO: 4532703 - DNA, 25 bp, Homo sapien
ttcaggtgcgcaccctgtggcatga

SEQ ID NO: 4532704 - DNA, 25 bp, Homo sapien
gctggaaagatttcaccgcctacag

SEQ ID NO: 4532705 - DNA, 25 bp, Homo sapien
tgtggcatgaccctcgtcacatagg

SEQ ID NO: 4532706 - DNA, 25 bp, Homo sapien
acaggccaaagacgggtttcattag

SEQ ID NO: 4532707 - DNA, 25 bp, Homo sapien
gggaagaaaatcatggctgactcag

SEQ ID NO: 4532708 - DNA, 25 bp, Homo sapien
tctcaagaaatggtgttcttctctg

SEQ ID NO: 4532709 - DNA, 25 bp, Homo sapien
tctatgataaaacctatgctggtgg

SEQ ID NO: 4532710 - DNA, 25 bp, Homo sapien
tggtagactagggttgtttgtcttc

SEQ ID NO: 4532711 - DNA, 25 bp, Homo sapien
tgtggactcctagaacgtgcgacct

SEQ ID NO: 4532712 - DNA, 25 bp, Homo sapien
cctgcagtggccagaattagggaat

SEQ ID NO: 4532713 - DNA, 25 bp, Homo sapien
tggaactatgggcttgagaaaaccc

SEQ ID NO: 4532714 - DNA, 25 bp, Homo sapien
gactgatcataaaccaatgctggta

SEQ ID NO: 4532715 - DNA, 25 bp, Homo sapien
cagtaagtcatagcaacattcacag

SEQ ID NO: 4532716 - DNA, 25 bp, Homo sapien
gaaagactgagttgctcaggcctag

SEQ ID NO: 4532717 - DNA, 25 bp, Homo sapien
ggcctaggcttagaatttgctgcgt

SEQ ID NO: 4532718 - DNA, 25 bp, Homo sapien
taaagaatttttggatcaagcggaa

SEQ ID NO: 4532719 - DNA, 25 bp, Homo sapien
tattaaacactagaaaggactggct

SEQ ID NO: 4532720 - DNA, 25 bp, Homo sapien
ttctgacccacgaatgatgccttgg

SEQ ID NO: 4532721 - DNA, 25 bp, Homo sapien
ggcccaagtgtaccaataagcagac

SEQ ID NO: 4532722 - DNA, 25 bp, Homo sapien
ccttgggtgggcaacacgattgcat

SEQ ID NO: 4532723 - DNA, 25 bp, Homo sapien
tacatacaataaaggtggtgccagc

SEQ ID NO: 4532724 - DNA, 25 bp, Homo sapien
aactccaggtcttataagaatgtac

SEQ ID NO: 4532725 - DNA, 25 bp, Homo sapien
tgtagaaaagcctccagtattaagc

SEQ ID NO: 4532726 - DNA, 25 bp, Homo sapien
gtcatcgagatgatagcttttttcc

SEQ ID NO: 4532727 - DNA, 25 bp, Homo sapien
tactgacttgtaactaaaccatctc

SEQ ID NO: 4532728 - DNA, 25 bp, Homo sapien
ggacttccaattctaatgccaactc

SEQ ID NO: 4532729 - DNA, 25 bp, Homo sapien
aactcatcttatggaatgtcaacac

SEQ ID NO: 4532730 - DNA, 25 bp, Homo sapien
tcttcaaatagtaccgcagactgtc

SEQ ID NO: 4532731 - DNA, 25 bp, Homo sapien
tatttgatgcaatctaaaaggccca

SEQ ID NO: 4532732 - DNA, 25 bp, Homo sapien
tcctacttaagaaacgtgtcatcac

SEQ ID NO: 4532733 - DNA, 25 bp, Homo sapien
gcaggttgtaccagtttcacagaca

SEQ ID NO: 4532734 - DNA, 25 bp, Homo sapien
caataaagaatagtctctgcagtgc

SEQ ID NO: 4532735 - DNA, 25 bp, Homo sapien
tagggttctttacattcttctgctg

SEQ ID NO: 4532736 - DNA, 25 bp, Homo sapien
ctgctgcatctttagtctcctgctc

SEQ ID NO: 4532737 - DNA, 25 bp, Homo sapien
acattcttctgctgcatctttagtc

SEQ ID NO: 4532738 - DNA, 25 bp, Homo sapien
cttctgctgcatctttagtctcctg

SEQ ID NO: 4532739 - DNA, 25 bp, Homo sapien
caaataccattgaaggggtacctga

SEQ ID NO: 4532740 - DNA, 25 bp, Homo sapien
gaagaagagggcctgaacaacagca

SEQ ID NO: 4532741 - DNA, 25 bp, Homo sapien
agaagagggcctgaacaacagcaga

SEQ ID NO: 4532742 - DNA, 25 bp, Homo sapien
ggaagaagagggcctgaacaacagc

SEQ ID NO: 4532743 - DNA, 25 bp, Homo sapien
aagagggcctgaacaacagcagaag

SEQ ID NO: 4532744 - DNA, 25 bp, Homo sapien
tgatgaaaggctcacactgatacca

SEQ ID NO: 4532745 - DNA, 25 bp, Homo sapien
tctgcttcagtgacaagagcttctg

SEQ ID NO: 4532746 - DNA, 25 bp, Homo sapien
gaacacaggtgttacgtcctcaatg

SEQ ID NO: 4532747 - DNA, 25 bp, Homo sapien
tggatcatctaagaaggagggcctt

SEQ ID NO: 4532748 - DNA, 25 bp, Homo sapien
ttcatccagaagacactttaactgt

SEQ ID NO: 4532749 - DNA, 25 bp, Homo sapien
ttcagagagacatgatgtggactct

SEQ ID NO: 4532750 - DNA, 25 bp, Homo sapien
cagagagacatgatgtggactctaa

SEQ ID NO: 4532751 - DNA, 25 bp, Homo sapien
tgatggatttttgtttaagtatgca

SEQ ID NO: 4532752 - DNA, 25 bp, Homo sapien
tctggggattcagcactcccatgtc

SEQ ID NO: 4532753 - DNA, 25 bp, Homo sapien
ggattcagcactcccatgtctgtcc

SEQ ID NO: 4532754 - DNA, 25 bp, Homo sapien
tgtctgtccacaactatcagtggac

SEQ ID NO: 4532755 - DNA, 25 bp, Homo sapien
tcccatgtctgtccacaactatcag

SEQ ID NO: 4532756 - DNA, 25 bp, Homo sapien
tttactgaattctcttggttcccaa

SEQ ID NO: 4532757 - DNA, 25 bp, Homo sapien
tgaattctcttggttcccaactaac

SEQ ID NO: 4532758 - DNA, 25 bp, Homo sapien
tctcttggttcccaactaacaccaa

SEQ ID NO: 4532759 - DNA, 25 bp, Homo sapien
atttactgaattctcttggttccca

SEQ ID NO: 4532760 - DNA, 25 bp, Homo sapien
ggctacagagatagtggtcattgcc

SEQ ID NO: 4532761 - DNA, 25 bp, Homo sapien
gctacagagatagtggtcattgcca

SEQ ID NO: 4532762 - DNA, 25 bp, Homo sapien
gaggctacagagatagtggtcattg

SEQ ID NO: 4532763 - DNA, 25 bp, Homo sapien
ctacagagatagtggtcattgccaa

SEQ ID NO: 4532764 - DNA, 25 bp, Homo sapien
agtccagaggaatttaagagaaatg

SEQ ID NO: 4532765 - DNA, 25 bp, Homo sapien
gtccagaggaatttaagagaaatga

SEQ ID NO: 4532766 - DNA, 25 bp, Homo sapien
atttcatgctcatcacagctgaatg

SEQ ID NO: 4532767 - DNA, 25 bp, Homo sapien
acttcccctcgctacaggaaaatgc

SEQ ID NO: 4532768 - DNA, 25 bp, Homo sapien
cacttcccctcgctacaggaaaatg

SEQ ID NO: 4532769 - DNA, 25 bp, Homo sapien
acagctgaatgcctgcgactgtccc

SEQ ID NO: 4532770 - DNA, 25 bp, Homo sapien
tcagatataacacgtatattcgttt

SEQ ID NO: 4532771 - DNA, 25 bp, Homo sapien
gtatattcgtttttcagcagttgca

SEQ ID NO: 4532772 - DNA, 25 bp, Homo sapien
aacacgtatattcgtttttcagcag

SEQ ID NO: 4532773 - DNA, 25 bp, Homo sapien
tataacacgtatattcgtttttcag

SEQ ID NO: 4532774 - DNA, 25 bp, Homo sapien
tatttttctggacagtacgagtgga

SEQ ID NO: 4532775 - DNA, 25 bp, Homo sapien
atttttctggacagtacgagtggaa

SEQ ID NO: 4532776 - DNA, 25 bp, Homo sapien
ttctggacagtacgagtggaaattc

SEQ ID NO: 4532777 - DNA, 25 bp, Homo sapien
ttttctggacagtacgagtggaaat

SEQ ID NO: 4532778 - DNA, 25 bp, Homo sapien
ctgtcaactcatatcttaatatgtc

SEQ ID NO: 4532779 - DNA, 25 bp, Homo sapien
aaaatctgtcaactcatatcttaat

SEQ ID NO: 4532780 - DNA, 25 bp, Homo sapien
caactcatatcttaatatgtcgaca

SEQ ID NO: 4532781 - DNA, 25 bp, Homo sapien
aaatctgtcaactcatatcttaata

SEQ ID NO: 4532782 - DNA, 25 bp, Homo sapien
gaatagaaagcctgatgagtccaag

SEQ ID NO: 4532783 - DNA, 25 bp, Homo sapien
gatgagtccacatttctagctgctg

SEQ ID NO: 4532784 - DNA, 25 bp, Homo sapien
ttgttacttttgtccattgctgcca

SEQ ID NO: 4532785 - DNA, 25 bp, Homo sapien
caaataccaggtcgaaacagaatag

SEQ ID NO: 4532786 - DNA, 25 bp, Homo sapien
tacaataagtctctgcgaaggaatc

SEQ ID NO: 4532787 - DNA, 25 bp, Homo sapien
tattcgctgtgtttgactgctacaa

SEQ ID NO: 4532788 - DNA, 25 bp, Homo sapien
caattaaaagatttgtctgcccacc

SEQ ID NO: 4532789 - DNA, 25 bp, Homo sapien
ttatttaatgactgaggcacactcc

SEQ ID NO: 4532790 - DNA, 25 bp, Homo sapien
tgtaaccatcatagccatggagacc

SEQ ID NO: 4532791 - DNA, 25 bp, Homo sapien
ggattttagtatgtaaccatcatag

SEQ ID NO: 4532792 - DNA, 25 bp, Homo sapien
actttgcaaactatgatgcactata

SEQ ID NO: 4532793 - DNA, 25 bp, Homo sapien
ctatgagttatcactaggaattccc

SEQ ID NO: 4532794 - DNA, 25 bp, Homo sapien
gtcgacatcaagctcagcagcatat

SEQ ID NO: 4532795 - DNA, 25 bp, Homo sapien
catgtattagatactggttggccaa

SEQ ID NO: 4532796 - DNA, 25 bp, Homo sapien
cttcccagtgggaagcgcctcagtg

SEQ ID NO: 4532797 - DNA, 25 bp, Homo sapien
tagttgggtacaagagaacctttca

SEQ ID NO: 4532798 - DNA, 25 bp, Homo sapien
gcttttatctgactggccagaacta

SEQ ID NO: 4532799 - DNA, 25 bp, Homo sapien
gagatacgaataaatgcctagggat

SEQ ID NO: 4532800 - DNA, 25 bp, Homo sapien
tgctattcaacatggcctcactcta

SEQ ID NO: 4532801 - DNA, 25 bp, Homo sapien
gatgaaagcagacctccaatgtgaa

SEQ ID NO: 4532802 - DNA, 25 bp, Homo sapien
ctcctgtaggctctgtgtcagtgct

SEQ ID NO: 4532803 - DNA, 25 bp, Homo sapien
atattaagtggaataatgagagaag

SEQ ID NO: 4532804 - DNA, 25 bp, Homo sapien
ccatggtgcagcatattaagtggaa

SEQ ID NO: 4532805 - DNA, 25 bp, Homo sapien
ctgatgtttactccatggtgcagca

SEQ ID NO: 4532806 - DNA, 25 bp, Homo sapien
tgtttactccatggtgcagcatatt

SEQ ID NO: 4532807 - DNA, 25 bp, Homo sapien
ttctttcaccatcacggtcaggttt

SEQ ID NO: 4532808 - DNA, 25 bp, Homo sapien
cttttcatcaatctctctcagccga

SEQ ID NO: 4532809 - DNA, 25 bp, Homo sapien
gccgattatgcagatcgcgttgctc

SEQ ID NO: 4532810 - DNA, 25 bp, Homo sapien
ttggtgttcctaagtatcttttctc

SEQ ID NO: 4532811 - DNA, 25 bp, Homo sapien
ggagttttatatcaatttcagcaag

SEQ ID NO: 4532812 - DNA, 25 bp, Homo sapien
gattattccgattttcaagtcttgg

SEQ ID NO: 4532813 - DNA, 25 bp, Homo sapien
catatccttttactgggaccaccca

SEQ ID NO: 4532814 - DNA, 25 bp, Homo sapien
ctgatgctgggtgactgcaagttca

SEQ ID NO: 4532815 - DNA, 25 bp, Homo sapien
ccaagtccttcaaaagctcaaccag

SEQ ID NO: 4532816 - DNA, 25 bp, Homo sapien
cagaactggagagcccggaatcttt

SEQ ID NO: 4532817 - DNA, 25 bp, Homo sapien
catccaagtccttcaaaagctcaac

SEQ ID NO: 4532818 - DNA, 25 bp, Homo sapien
ctcagaactggagagcccggaatct

SEQ ID NO: 4532819 - DNA, 25 bp, Homo sapien
ctgggtttcttgattccttggccaa

SEQ ID NO: 4532820 - DNA, 25 bp, Homo sapien
aaccactgggtttcttgattccttg

SEQ ID NO: 4532821 - DNA, 25 bp, Homo sapien
ccactgggtttcttgattccttggc

SEQ ID NO: 4532822 - DNA, 25 bp, Homo sapien
cactgggtttcttgattccttggcc

SEQ ID NO: 4532823 - DNA, 25 bp, Homo sapien
tggttgtgtttacccctgagctcaa

SEQ ID NO: 4532824 - DNA, 25 bp, Homo sapien
tctcttaataaaatcctggttgtgt

SEQ ID NO: 4532825 - DNA, 25 bp, Homo sapien
atcttttctgtattcgagaaaggtt

SEQ ID NO: 4532826 - DNA, 25 bp, Homo sapien
gtttacccctgagctcaatcttttc

SEQ ID NO: 4532827 - DNA, 25 bp, Homo sapien
agggatttgagtatgaaacactgag

SEQ ID NO: 4532828 - DNA, 25 bp, Homo sapien
catattcttctggagggatttgagt

SEQ ID NO: 4532829 - DNA, 25 bp, Homo sapien
ggatttgagtatgaaacactgagga

SEQ ID NO: 4532830 - DNA, 25 bp, Homo sapien
ttcttctggagggatttgagtatga

SEQ ID NO: 4532831 - DNA, 25 bp, Homo sapien
cctattagctaattcggacactgta

SEQ ID NO: 4532832 - DNA, 25 bp, Homo sapien
tgtgtctctgtaccctaatgtgagg

SEQ ID NO: 4532833 - DNA, 25 bp, Homo sapien
actgtatatttgcaagacgccgtta

SEQ ID NO: 4532834 - DNA, 25 bp, Homo sapien
gagaacttgggagactcttagcagt

SEQ ID NO: 4532835 - DNA, 25 bp, Homo sapien
agtgatacaggtattaagctgctcc

SEQ ID NO: 4532836 - DNA, 25 bp, Homo sapien
tacaggtattaagctgctccccggc

SEQ ID NO: 4532837 - DNA, 25 bp, Homo sapien
tagagtagacacaagtgatacaggt

SEQ ID NO: 4532838 - DNA, 25 bp, Homo sapien
gggatgagtttagagtagacacaag

SEQ ID NO: 4532839 - DNA, 25 bp, Homo sapien
ctggcagatgacaaaggctaaatgg

SEQ ID NO: 4532840 - DNA, 25 bp, Homo sapien
aaaggctaaatgggaccagctacaa

SEQ ID NO: 4532841 - DNA, 25 bp, Homo sapien
tctgctggcagatgacaaaggctaa

SEQ ID NO: 4532842 - DNA, 25 bp, Homo sapien
agggggtggcatagagccttccacc

SEQ ID NO: 4532843 - DNA, 25 bp, Homo sapien
aatggaagttgaccaggtagcacca

SEQ ID NO: 4532844 - DNA, 25 bp, Homo sapien
ggtagcaccaagagatgtggactat

SEQ ID NO: 4532845 - DNA, 25 bp, Homo sapien
gcttccacagcgtgacagtagaaaa

SEQ ID NO: 4532846 - DNA, 25 bp, Homo sapien
taagaagtaaatggaagttgaccag

SEQ ID NO: 4532847 - DNA, 25 bp, Homo sapien
tcctctttactttgccaagcttcac

SEQ ID NO: 4532848 - DNA, 25 bp, Homo sapien
tactttgccaagcttcactatattt

SEQ ID NO: 4532849 - DNA, 25 bp, Homo sapien
tctttactttgccaagcttcactat

SEQ ID NO: 4532850 - DNA, 25 bp, Homo sapien
atctcctctttactttgccaagctt

SEQ ID NO: 4532851 - DNA, 25 bp, Homo sapien
ttcttcccacagctttattctcatt

SEQ ID NO: 4532852 - DNA, 25 bp, Homo sapien
ttattctcatttctagaccttgctt

SEQ ID NO: 4532853 - DNA, 25 bp, Homo sapien
tcatttctagaccttgcttcttaat

SEQ ID NO: 4532854 - DNA, 25 bp, Homo sapien
gctttattctcatttctagaccttg

SEQ ID NO: 4532855 - DNA, 25 bp, Homo sapien
gcatcttgaagttgagaatctaatt

SEQ ID NO: 4532856 - DNA, 25 bp, Homo sapien
ttttatcaagttttttcatcttctg

SEQ ID NO: 4532857 - DNA, 25 bp, Homo sapien
gttttttcatcttctgaatagcatc

SEQ ID NO: 4532858 - DNA, 25 bp, Homo sapien
tctgaatagcatcttgaagttgaga

SEQ ID NO: 4532859 - DNA, 25 bp, Homo sapien
tcatctgatccctcttcagccaatt

SEQ ID NO: 4532860 - DNA, 25 bp, Homo sapien
tatctgatgttgaaccaaatccaga

SEQ ID NO: 4532861 - DNA, 25 bp, Homo sapien
tattactgctttcggagtggtcctc

SEQ ID NO: 4532862 - DNA, 25 bp, Homo sapien
tcctgcttatcatcattactagttc

SEQ ID NO: 4532863 - DNA, 25 bp, Homo sapien
ggcgtattcttgaatttgaagctgg

SEQ ID NO: 4532864 - DNA, 25 bp, Homo sapien
gcacctccaaagaagcatttgaact

SEQ ID NO: 4532865 - DNA, 25 bp, Homo sapien
tgctcccagggcgtattcttgaatt

SEQ ID NO: 4532866 - DNA, 25 bp, Homo sapien
tcctggttctgttgagagcacctcc

SEQ ID NO: 4532867 - DNA, 25 bp, Homo sapien
acaaaatgactcatctttcttttgc

SEQ ID NO: 4532868 - DNA, 25 bp, Homo sapien
tgcttttttgaacagcagaggcagg

SEQ ID NO: 4532869 - DNA, 25 bp, Homo sapien
ttgaacagcagaggcagggtccaga

SEQ ID NO: 4532870 - DNA, 25 bp, Homo sapien
tttttgaacagcagaggcagggtcc

SEQ ID NO: 4532871 - DNA, 25 bp, Homo sapien
ccgccctcatctgcgcggcccctca

SEQ ID NO: 4532872 - DNA, 25 bp, Homo sapien
cgccctcatctgcgcggcccctcac

SEQ ID NO: 4532873 - DNA, 25 bp, Homo sapien
tccgccctcatctgcgcggcccctc

SEQ ID NO: 4532874 - DNA, 25 bp, Homo sapien
ctccgccctcatctgcgcggcccct

SEQ ID NO: 4532875 - DNA, 25 bp, Homo sapien
cagatggccgcagaagcgcgccgca

SEQ ID NO: 4532876 - DNA, 25 bp, Homo sapien
atggccgcagaagcgcgccgcagac

SEQ ID NO: 4532877 - DNA, 25 bp, Homo sapien
gggcctcctcgaggaactggccgcc

SEQ ID NO: 4532878 - DNA, 25 bp, Homo sapien
cgccgtcagtcagggcgcagatggc

SEQ ID NO: 4532879 - DNA, 25 bp, Homo sapien
tgtgggaccgctgtttccctggcaa

SEQ ID NO: 4532880 - DNA, 25 bp, Homo sapien
agcctctctggtagtggaagaagcc

SEQ ID NO: 4532881 - DNA, 25 bp, Homo sapien
gtagtggaagaagccgccggtccag

SEQ ID NO: 4532882 - DNA, 25 bp, Homo sapien
aagccgccggtccagatccctcctg

SEQ ID NO: 4532883 - DNA, 25 bp, Homo sapien
tgcttggccacaatgccatccatgc

SEQ ID NO: 4532884 - DNA, 25 bp, Homo sapien
ccatccatgccagcaagggtcatga

SEQ ID NO: 4532885 - DNA, 25 bp, Homo sapien
agcaagggtcatgaacagggaagta

SEQ ID NO: 4532886 - DNA, 25 bp, Homo sapien
agcatctcccaatcctgcttggcca

SEQ ID NO: 4532887 - DNA, 25 bp, Homo sapien
gatgtgacactgcttgcgcataatg

SEQ ID NO: 4532888 - DNA, 25 bp, Homo sapien
ccaaggccagctgcagtttcagttg

SEQ ID NO: 4532889 - DNA, 25 bp, Homo sapien
gcgcataatggctgaaattgcactg

SEQ ID NO: 4532890 - DNA, 25 bp, Homo sapien
gagattagtgtctcgcccctgtcag

SEQ ID NO: 4532891 - DNA, 25 bp, Homo sapien
tgacagggataggaacaagatggtc

SEQ ID NO: 4532892 - DNA, 25 bp, Homo sapien
acagggataggaacaagatggtcac

SEQ ID NO: 4532893 - DNA, 25 bp, Homo sapien
gacagggataggaacaagatggtca

SEQ ID NO: 4532894 - DNA, 25 bp, Homo sapien
tccctgaggagattaagaatgggtt

SEQ ID NO: 4532895 - DNA, 25 bp, Homo sapien
gaatgtccttttaaggccatataac

SEQ ID NO: 4532896 - DNA, 25 bp, Homo sapien
tataacatcttcttatatctccctg

SEQ ID NO: 4532897 - DNA, 25 bp, Homo sapien
gagtgaggccctctgaaggaccctt

SEQ ID NO: 4532898 - DNA, 25 bp, Homo sapien
tagcttgatgtttcctctcgcgggt

SEQ ID NO: 4532899 - DNA, 25 bp, Homo sapien
cagggagatcctagtactctacggt

SEQ ID NO: 4532900 - DNA, 25 bp, Homo sapien
tgtagcccaaggaactcaccatgag

SEQ ID NO: 4532901 - DNA, 25 bp, Homo sapien
ggctggctcccctaactgtcgtcat

SEQ ID NO: 4532902 - DNA, 25 bp, Homo sapien
ccaaattcagagggccgatcagcaa

SEQ ID NO: 4532903 - DNA, 25 bp, Homo sapien
gggtgtgcaggatgccctctctgtt

SEQ ID NO: 4532904 - DNA, 25 bp, Homo sapien
agagggccgatcagcaagcccatcc

SEQ ID NO: 4532905 - DNA, 25 bp, Homo sapien
atgggtgtgcaggatgccctctctg

SEQ ID NO: 4532906 - DNA, 25 bp, Homo sapien
ggtgcttgagctccagatgttcatt

SEQ ID NO: 4532907 - DNA, 25 bp, Homo sapien
agatgttcatttagcccaccaacta

SEQ ID NO: 4532908 - DNA, 25 bp, Homo sapien
gcttgagctccagatgttcatttag

SEQ ID NO: 4532909 - DNA, 25 bp, Homo sapien
tttagcccaccaactaacttgcagt

SEQ ID NO: 4532910 - DNA, 25 bp, Homo sapien
tgttagtagtcagccatctgcttca

SEQ ID NO: 4532911 - DNA, 25 bp, Homo sapien
tacacctggcaatgacctgttagta

SEQ ID NO: 4532912 - DNA, 25 bp, Homo sapien
tatataagaaacatacccaaccaga

SEQ ID NO: 4532913 - DNA, 25 bp, Homo sapien
caaagagtatagaaatacacctggc

SEQ ID NO: 4532914 - DNA, 25 bp, Homo sapien
cattgactatcagggcaaggagcta

SEQ ID NO: 4532915 - DNA, 25 bp, Homo sapien
cagtctggctctacaacgacaggga

SEQ ID NO: 4532916 - DNA, 25 bp, Homo sapien
tccaaaattaagagagaaccgcagc

SEQ ID NO: 4532917 - DNA, 25 bp, Homo sapien
gctgatgagttgaggacactgccct

SEQ ID NO: 4532918 - DNA, 25 bp, Homo sapien
ctaggaatccacctttggaaaaatg

SEQ ID NO: 4532919 - DNA, 25 bp, Homo sapien
aatccacctttggaaaaatgctcac

SEQ ID NO: 4532920 - DNA, 25 bp, Homo sapien
ggaatccacctttggaaaaatgctc

SEQ ID NO: 4532921 - DNA, 25 bp, Homo sapien
taggaatccacctttggaaaaatgc

SEQ ID NO: 4532922 - DNA, 25 bp, Homo sapien
tcatcttccgctccaccctgcctac

SEQ ID NO: 4532923 - DNA, 25 bp, Homo sapien
tattgtttctgctcatcttccgctc

SEQ ID NO: 4532924 - DNA, 25 bp, Homo sapien
ctgctcatcttccgctccaccctgc

SEQ ID NO: 4532925 - DNA, 25 bp, Homo sapien
ttctgctcatcttccgctccaccct

SEQ ID NO: 4532926 - DNA, 25 bp, Homo sapien
gctgccggtgccacctgggatacag

SEQ ID NO: 4532927 - DNA, 25 bp, Homo sapien
gggatacagagtccactgtgctcag

SEQ ID NO: 4532928 - DNA, 25 bp, Homo sapien
ttatcagggaatgtttcaggttcca

SEQ ID NO: 4532929 - DNA, 25 bp, Homo sapien
ctgaggaggcaactcaaaaggccca

SEQ ID NO: 4532930 - DNA, 25 bp, Homo sapien
ctggaagtcagctgagccaatgtac

SEQ ID NO: 4532931 - DNA, 25 bp, Homo sapien
cctggaagtcagctgagccaatgta

SEQ ID NO: 4532932 - DNA, 25 bp, Homo sapien
caggtgctaaatatctccttggcct

SEQ ID NO: 4532933 - DNA, 25 bp, Homo sapien
caggcaggtgctaaatatctccttg

SEQ ID NO: 4532934 - DNA, 25 bp, Homo sapien
tttgggcagccaaacagcagtgagc

SEQ ID NO: 4532935 - DNA, 25 bp, Homo sapien
cagggtccctatcaagcacttgcgg

SEQ ID NO: 4532936 - DNA, 25 bp, Homo sapien
tggttactgcaaacacagggacact

SEQ ID NO: 4532937 - DNA, 25 bp, Homo sapien
cagttcacgggacttggcatcagat

SEQ ID NO: 4532938 - DNA, 25 bp, Homo sapien
ctcctgtaacaggtacttctgagca

SEQ ID NO: 4532939 - DNA, 25 bp, Homo sapien
ccagcctcctgtaacaggtacttct

SEQ ID NO: 4532940 - DNA, 25 bp, Homo sapien
gcaccacctatgcaccaggtcctgt

SEQ ID NO: 4532941 - DNA, 25 bp, Homo sapien
aggtacttctgagcaccacctatgc

SEQ ID NO: 4532942 - DNA, 25 bp, Homo sapien
gagatgggatgcaaacacaatagcg

SEQ ID NO: 4532943 - DNA, 25 bp, Homo sapien
caatagcgaccatggacaatcaggg

SEQ ID NO: 4532944 - DNA, 25 bp, Homo sapien
tacaggtagcgcctaaagccacctg

SEQ ID NO: 4532945 - DNA, 25 bp, Homo sapien
ggagcatggtaagatatgttctaga

SEQ ID NO: 4532946 - DNA, 25 bp, Homo sapien
gagagtagattcatagttgtttatg

SEQ ID NO: 4532947 - DNA, 25 bp, Homo sapien
agtagattcatagttgtttatggtc

SEQ ID NO: 4532948 - DNA, 25 bp, Homo sapien
aaaagagagtagattcatagttgtt

SEQ ID NO: 4532949 - DNA, 25 bp, Homo sapien
aagagagtagattcatagttgttta

SEQ ID NO: 4532950 - DNA, 25 bp, Homo sapien
acaaatccccgagcaggccaggttt

SEQ ID NO: 4532951 - DNA, 25 bp, Homo sapien
gcagaagagcatggtgtagatccac

SEQ ID NO: 4532952 - DNA, 25 bp, Homo sapien
ggatgatgtcgaagggcacacagac

SEQ ID NO: 4532953 - DNA, 25 bp, Homo sapien
tttgtgcaaaaatttgacgaccttg

SEQ ID NO: 4532954 - DNA, 25 bp, Homo sapien
acagatttgaacacggttgtgcggc

SEQ ID NO: 4532955 - DNA, 25 bp, Homo sapien
tgtgcggcaagttgaccataacacc

SEQ ID NO: 4532956 - DNA, 25 bp, Homo sapien
ttgaacacggttgtgcggcaagttg

SEQ ID NO: 4532957 - DNA, 25 bp, Homo sapien
cggttgtgcggcaagttgaccataa

SEQ ID NO: 4532958 - DNA, 25 bp, Homo sapien
gctcttatcaagttttctagtgacc

SEQ ID NO: 4532959 - DNA, 25 bp, Homo sapien
caagttttctagtgacctccatgtt

SEQ ID NO: 4532960 - DNA, 25 bp, Homo sapien
ttctagtgacctccatgttgccaaa

SEQ ID NO: 4532961 - DNA, 25 bp, Homo sapien
agtctgctcttatcaagttttctag

SEQ ID NO: 4532962 - DNA, 25 bp, Homo sapien
ctgctcattgaagctgcttcttcag

SEQ ID NO: 4532963 - DNA, 25 bp, Homo sapien
cattgaagctgcttcttcagctctt

SEQ ID NO: 4532964 - DNA, 25 bp, Homo sapien
ttgaagctgcttcttcagctcttgc

SEQ ID NO: 4532965 - DNA, 25 bp, Homo sapien
gctcattgaagctgcttcttcagct

SEQ ID NO: 4532966 - DNA, 25 bp, Homo sapien
catggatatggcaatagcaaggagt

SEQ ID NO: 4532967 - DNA, 25 bp, Homo sapien
gcaggcaagttgcacagcatggata

SEQ ID NO: 4532968 - DNA, 25 bp, Homo sapien
ggaggtggaacaccacaagaggata

SEQ ID NO: 4532969 - DNA, 25 bp, Homo sapien
gagagtcagcagatgagttgccaat

SEQ ID NO: 4532970 - DNA, 25 bp, Homo sapien
taacttagacctgcttgccgatgag

SEQ ID NO: 4532971 - DNA, 25 bp, Homo sapien
tactccgagtcatgaagagcctgat

SEQ ID NO: 4532972 - DNA, 25 bp, Homo sapien
caactttcccgatactgatacctac

SEQ ID NO: 4532973 - DNA, 25 bp, Homo sapien
gattttaggctgacgctactccgag

SEQ ID NO: 4532974 - DNA, 25 bp, Homo sapien
tcaattaatatggtgctgggcgcct

SEQ ID NO: 4532975 - DNA, 25 bp, Homo sapien
ttctcaattaatatggtgctgggcg

SEQ ID NO: 4532976 - DNA, 25 bp, Homo sapien
gcgccttggaatgcccactcactgg

SEQ ID NO: 4532977 - DNA, 25 bp, Homo sapien
gctccatttgggaaggtggtaccag

SEQ ID NO: 4532978 - DNA, 25 bp, Homo sapien
ctggttccactctcagtgtttggtt

SEQ ID NO: 4532979 - DNA, 25 bp, Homo sapien
atgaaataagtgatgatagtctccc

SEQ ID NO: 4532980 - DNA, 25 bp, Homo sapien
ggcatgtgagctggttcatgtaaat

SEQ ID NO: 4532981 - DNA, 25 bp, Homo sapien
tggcatgtgagctggttcatgtaaa

SEQ ID NO: 4532982 - DNA, 25 bp, Homo sapien
aaataagtgatgatagtctccccat

SEQ ID NO: 4532983 - DNA, 25 bp, Homo sapien
gtcttgatctcctgtatgtcttagt

SEQ ID NO: 4532984 - DNA, 25 bp, Homo sapien
tcttgatctcctgtatgtcttagtt

SEQ ID NO: 4532985 - DNA, 25 bp, Homo sapien
agtcttgatctcctgtatgtcttag

SEQ ID NO: 4532986 - DNA, 25 bp, Homo sapien
tgaggtataatcaacatgtggcaca

SEQ ID NO: 4532987 - DNA, 25 bp, Homo sapien
aacttttgaacaccgtacatccttg

SEQ ID NO: 4532988 - DNA, 25 bp, Homo sapien
agcaggatcaagcaagggacagaga

SEQ ID NO: 4532989 - DNA, 25 bp, Homo sapien
ctgcatgtgtatccccgaatctaaa

SEQ ID NO: 4532990 - DNA, 25 bp, Homo sapien
aactataaactatcaaagcctttct

SEQ ID NO: 4532991 - DNA, 25 bp, Homo sapien
tataaactatcaaagcctttctgaa

SEQ ID NO: 4532992 - DNA, 25 bp, Homo sapien
tccacaattattggtaaaactataa

SEQ ID NO: 4532993 - DNA, 25 bp, Homo sapien
tactcttccacaattattggtaaaa

SEQ ID NO: 4532994 - DNA, 25 bp, Homo sapien
tacctgaaaggcaaatagaactccc

SEQ ID NO: 4532995 - DNA, 25 bp, Homo sapien
tttgacccaccattccagaagaagg

SEQ ID NO: 4532996 - DNA, 25 bp, Homo sapien
cctgaagagaatgggaagcggtcac

SEQ ID NO: 4532997 - DNA, 25 bp, Homo sapien
gatgagttccctgacatggtgcaca

SEQ ID NO: 4532998 - DNA, 25 bp, Homo sapien
tagagcccattgatttgttattaac

SEQ ID NO: 4532999 - DNA, 25 bp, Homo sapien
ctgctagagcccattgatttgttat

SEQ ID NO: 4533000 - DNA, 25 bp, Homo sapien
gcccattgatttgttattaacaaga

SEQ ID NO: 4533001 - DNA, 25 bp, Homo sapien
ccatccaatcttaagaataatagca

SEQ ID NO: 4533002 - DNA, 25 bp, Homo sapien
ttaggggttttcaacaagcccatgc

SEQ ID NO: 4533003 - DNA, 25 bp, Homo sapien
ttgtgtcccctgcaattggggttca

SEQ ID NO: 4533004 - DNA, 25 bp, Homo sapien
aggggttttcaacaagcccatgcag

SEQ ID NO: 4533005 - DNA, 25 bp, Homo sapien
cctgcaattggggttcactgtgaat

SEQ ID NO: 4533006 - DNA, 25 bp, Homo sapien
actggcaggctttatgatcctcctc

SEQ ID NO: 4533007 - DNA, 25 bp, Homo sapien
ctggcaggctttatgatcctcctca

SEQ ID NO: 4533008 - DNA, 25 bp, Homo sapien
cactggcaggctttatgatcctcct

SEQ ID NO: 4533009 - DNA, 25 bp, Homo sapien
ccactggcaggctttatgatcctcc

SEQ ID NO: 4533010 - DNA, 25 bp, Homo sapien
aactaaatgagtggtgattgcctag

SEQ ID NO: 4533011 - DNA, 25 bp, Homo sapien
tgacagatctatggaacaggtaaat

SEQ ID NO: 4533012 - DNA, 25 bp, Homo sapien
gattgcctagggctcaaggtattga

SEQ ID NO: 4533013 - DNA, 25 bp, Homo sapien
gcagtgctactaccgaaggatacat

SEQ ID NO: 4533014 - DNA, 25 bp, Homo sapien
ggtaataggctagatcatagccacc

SEQ ID NO: 4533015 - DNA, 25 bp, Homo sapien
gaggtaataggctagatcatagcca

SEQ ID NO: 4533016 - DNA, 25 bp, Homo sapien
agaggtaataggctagatcatagcc

SEQ ID NO: 4533017 - DNA, 25 bp, Homo sapien
tcagaggtaataggctagatcatag

SEQ ID NO: 4533018 - DNA, 25 bp, Homo sapien
cagttctcttggtacttagactgtg

SEQ ID NO: 4533019 - DNA, 25 bp, Homo sapien
ttttcaagtcaaagcaccagagagg

SEQ ID NO: 4533020 - DNA, 25 bp, Homo sapien
gcccagttctcttggtacttagact

SEQ ID NO: 4533021 - DNA, 25 bp, Homo sapien
gttctcttggtacttagactgtgaa

SEQ ID NO: 4533022 - DNA, 25 bp, Homo sapien
gacaagtccttagaaaacaatgaat

SEQ ID NO: 4533023 - DNA, 25 bp, Homo sapien
cttgcttctgactgcacatggcttt

SEQ ID NO: 4533024 - DNA, 25 bp, Homo sapien
aggctttatgaaatgtgcttcccaa

SEQ ID NO: 4533025 - DNA, 25 bp, Homo sapien
tacacagatgtgtttgaatgggaca

SEQ ID NO: 4533026 - DNA, 25 bp, Homo sapien
cctatgaagatgacgacctgcacgg

SEQ ID NO: 4533027 - DNA, 25 bp, Homo sapien
tggcggtacagctgcgcctcgccga

SEQ ID NO: 4533028 - DNA, 25 bp, Homo sapien
cgcgttgtgcggctcgctggcattt

SEQ ID NO: 4533029 - DNA, 25 bp, Homo sapien
gagagatccagctcccgttatgtcc

SEQ ID NO: 4533030 - DNA, 25 bp, Homo sapien
ccagcccactcgacaggaatggaaa

SEQ ID NO: 4533031 - DNA, 25 bp, Homo sapien
tcgacccctctccttagcgggagga

SEQ ID NO: 4533032 - DNA, 25 bp, Homo sapien
gcgatgtgaagccaacgtaatgccc

SEQ ID NO: 4533033 - DNA, 25 bp, Homo sapien
gaggagaacgtttggccgaagctat

SEQ ID NO: 4533034 - DNA, 25 bp, Homo sapien
gttgtaaacaccactgcactcagac

SEQ ID NO: 4533035 - DNA, 25 bp, Homo sapien
caaagaaatctgtaaagtagttgtg

SEQ ID NO: 4533036 - DNA, 25 bp, Homo sapien
agttgtaaacaccactgcactcaga

SEQ ID NO: 4533037 - DNA, 25 bp, Homo sapien
tctgtaaagtagttgtgatcaatta

SEQ ID NO: 4533038 - DNA, 25 bp, Homo sapien
taattagcacatccgtcactgcaaa

SEQ ID NO: 4533039 - DNA, 25 bp, Homo sapien
ccaagatcatacctctaagaaggac

SEQ ID NO: 4533040 - DNA, 25 bp, Homo sapien
tgttctaggaacgtttggaaattgc

SEQ ID NO: 4533041 - DNA, 25 bp, Homo sapien
ggaggacacagaacggctgccattc

SEQ ID NO: 4533042 - DNA, 25 bp, Homo sapien
tactacaacgcctggatcgagcggc

SEQ ID NO: 4533043 - DNA, 25 bp, Homo sapien
taaatatatctagagtcgggtgggc

SEQ ID NO: 4533044 - DNA, 25 bp, Homo sapien
gcagttccgcaggatcaagggcgaa

SEQ ID NO: 4533045 - DNA, 25 bp, Homo sapien
gaacaagttggacggctgctgctac

SEQ ID NO: 4533046 - DNA, 25 bp, Homo sapien
tgcagacagcattaggacgaaagtg

SEQ ID NO: 4533047 - DNA, 25 bp, Homo sapien
gcgtcaggtttcaagaaggtatcac

SEQ ID NO: 4533048 - DNA, 25 bp, Homo sapien
tatgtgaggtcaaaggtgcagacag

SEQ ID NO: 4533049 - DNA, 25 bp, Homo sapien
tgcctgagctaaaagggaccaatgt

SEQ ID NO: 4533050 - DNA, 25 bp, Homo sapien
aagtccctaagctacatagaggagg

SEQ ID NO: 4533051 - DNA, 25 bp, Homo sapien
taataaagatatatccgagagtggg

SEQ ID NO: 4533052 - DNA, 25 bp, Homo sapien
gcttccatggactagcatttagtag

SEQ ID NO: 4533053 - DNA, 25 bp, Homo sapien
tttttatagcgggatagcaggcgtg

SEQ ID NO: 4533054 - DNA, 25 bp, Homo sapien
cagcctggatttcattgaccacatc

SEQ ID NO: 4533055 - DNA, 25 bp, Homo sapien
gcctggatttcattgaccacatcat

SEQ ID NO: 4533056 - DNA, 25 bp, Homo sapien
ctcagcctggatttcattgaccaca

SEQ ID NO: 4533057 - DNA, 25 bp, Homo sapien
cctcagcctggatttcattgaccac

SEQ ID NO: 4533058 - DNA, 25 bp, Homo sapien
tgggtatctttacagcccaactcta

SEQ ID NO: 4533059 - DNA, 25 bp, Homo sapien
actagcctaggccaaggttgggtgc

SEQ ID NO: 4533060 - DNA, 25 bp, Homo sapien
tgaacagaaggagacatcaaagttg

SEQ ID NO: 4533061 - DNA, 25 bp, Homo sapien
cagatgccataaaagtgggatgaca

SEQ ID NO: 4533062 - DNA, 25 bp, Homo sapien
gaaaccgaggacagtgatagcagta

SEQ ID NO: 4533063 - DNA, 25 bp, Homo sapien
tctgaataactcaatcaggagttta

SEQ ID NO: 4533064 - DNA, 25 bp, Homo sapien
aaagcctcaggagccaaaatctatc

SEQ ID NO: 4533065 - DNA, 25 bp, Homo sapien
catcttgtatgagactaatcatagc

SEQ ID NO: 4533066 - DNA, 25 bp, Homo sapien
tcaggagtttaattgtatgaccatc

SEQ ID NO: 4533067 - DNA, 25 bp, Homo sapien
tcacttgggcatagcagggttcaca

SEQ ID NO: 4533068 - DNA, 25 bp, Homo sapien
taaagtcacatcagcacactagggc

SEQ ID NO: 4533069 - DNA, 25 bp, Homo sapien
tactatgtgtcagggtctggcaggc

SEQ ID NO: 4533070 - DNA, 25 bp, Homo sapien
taagagctgctatcaccgttgtaca

SEQ ID NO: 4533071 - DNA, 25 bp, Homo sapien
ctttggtttggatattttcatgtgc

SEQ ID NO: 4533072 - DNA, 25 bp, Homo sapien
gccctttggtttggatattttcatg

SEQ ID NO: 4533073 - DNA, 25 bp, Homo sapien
tatgccctttggtttggatattttc

SEQ ID NO: 4533074 - DNA, 25 bp, Homo sapien
ttctttatgccctttggtttggata

SEQ ID NO: 4533075 - DNA, 25 bp, Homo sapien
tctttatgccctttggtttggatat

SEQ ID NO: 4533076 - DNA, 25 bp, Homo sapien
tatgatttttggtttctttatgccc

SEQ ID NO: 4533077 - DNA, 25 bp, Homo sapien
gcacatgaaaatatccaaaccaaag

SEQ ID NO: 4533078 - DNA, 25 bp, Homo sapien
gggcataaagaaaccaaaaatcata

SEQ ID NO: 4533079 - DNA, 25 bp, Homo sapien
aatatccaaaccaaagggcataaag

SEQ ID NO: 4533080 - DNA, 25 bp, Homo sapien
catgaaaatatccaaaccaaagggc

SEQ ID NO: 4533081 - DNA, 25 bp, Homo sapien
tgaaaatatccaaaccaaagggcat

SEQ ID NO: 4533082 - DNA, 25 bp, Homo sapien
tatccaaaccaaagggcataaagaa

SEQ ID NO: 4533083 - DNA, 25 bp, Homo sapien
catggttccccagtttcgatgagtt

SEQ ID NO: 4533084 - DNA, 25 bp, Homo sapien
tgattaatgaataggctttagctct

SEQ ID NO: 4533085 - DNA, 25 bp, Homo sapien
tgagttctcacagtcaaatgagagt

SEQ ID NO: 4533086 - DNA, 25 bp, Homo sapien
tccccagtttcgatgagttctcaca

SEQ ID NO: 4533087 - DNA, 25 bp, Homo sapien
caaatgagagtttgtttaaccacct

SEQ ID NO: 4533088 - DNA, 25 bp, Homo sapien
catgttatctcatgagctgcttccc

SEQ ID NO: 4533089 - DNA, 25 bp, Homo sapien
ggtggttaaacaaactctcatttga

SEQ ID NO: 4533090 - DNA, 25 bp, Homo sapien
gactgtgagaactcatcgaaactgg

SEQ ID NO: 4533091 - DNA, 25 bp, Homo sapien
aactctcatttgactgtgagaactc

SEQ ID NO: 4533092 - DNA, 25 bp, Homo sapien
agtagttattgccagaactattaaa

SEQ ID NO: 4533093 - DNA, 25 bp, Homo sapien
gagctaaagcctattcattaatcac

SEQ ID NO: 4533094 - DNA, 25 bp, Homo sapien
gggaagcagctcatgagataacatg

SEQ ID NO: 4533095 - DNA, 25 bp, Homo sapien
ggttatatactcctggattatagat

SEQ ID NO: 4533096 - DNA, 25 bp, Homo sapien
atggttatatactcctggattatag

SEQ ID NO: 4533097 - DNA, 25 bp, Homo sapien
tggttatatactcctggattataga

SEQ ID NO: 4533098 - DNA, 25 bp, Homo sapien
catggttatatactcctggattata

SEQ ID NO: 4533099 - DNA, 25 bp, Homo sapien
gcatggttatatactcctggattat

SEQ ID NO: 4533100 - DNA, 25 bp, Homo sapien
tataatccaggagtatataaccatg

SEQ ID NO: 4533101 - DNA, 25 bp, Homo sapien
ctataatccaggagtatataaccat

SEQ ID NO: 4533102 - DNA, 25 bp, Homo sapien
atctataatccaggagtatataacc

SEQ ID NO: 4533103 - DNA, 25 bp, Homo sapien
tctataatccaggagtatataacca

SEQ ID NO: 4533104 - DNA, 25 bp, Homo sapien
ataatccaggagtatataaccatgc

SEQ ID NO: 4533105 - DNA, 25 bp, Homo sapien
ccttttggaaagaatagttgcagtg

SEQ ID NO: 4533106 - DNA, 25 bp, Homo sapien
ttttttccttttggccagatagcta

SEQ ID NO: 4533107 - DNA, 25 bp, Homo sapien
cacataagattagggtccttttgga

SEQ ID NO: 4533108 - DNA, 25 bp, Homo sapien
gggcatacatttcctgctttcacca

SEQ ID NO: 4533109 - DNA, 25 bp, Homo sapien
tgttttcacataagattagggtcct

SEQ ID NO: 4533110 - DNA, 25 bp, Homo sapien
cagtgtttataggatagttgtggta

SEQ ID NO: 4533111 - DNA, 25 bp, Homo sapien
taccacaactatcctataaacactg

SEQ ID NO: 4533112 - DNA, 25 bp, Homo sapien
tggtgaaagcaggaaatgtatgccc

SEQ ID NO: 4533113 - DNA, 25 bp, Homo sapien
tccaaaaggaccctaatcttatgtg

SEQ ID NO: 4533114 - DNA, 25 bp, Homo sapien
tagctatctggccaaaaggaaaaaa

SEQ ID NO: 4533115 - DNA, 25 bp, Homo sapien
aggaccctaatcttatgtgaaaaca

SEQ ID NO: 4533116 - DNA, 25 bp, Homo sapien
cactgcaactattctttccaaaagg

SEQ ID NO: 4533117 - DNA, 25 bp, Homo sapien
cctccttagagctaacatggatggg

SEQ ID NO: 4533118 - DNA, 25 bp, Homo sapien
tagagctaacatggatgggctgaag

SEQ ID NO: 4533119 - DNA, 25 bp, Homo sapien
gcttattcaaacctccttagagcta

SEQ ID NO: 4533120 - DNA, 25 bp, Homo sapien
taagaagaccaaagcagcagcagca

SEQ ID NO: 4533121 - DNA, 25 bp, Homo sapien
gaacaaaactaagaagaccaaagca

SEQ ID NO: 4533122 - DNA, 25 bp, Homo sapien
tcaaacctccttagagctaacatgg

SEQ ID NO: 4533123 - DNA, 25 bp, Homo sapien
cccatccatgttagctctaaggagg

SEQ ID NO: 4533124 - DNA, 25 bp, Homo sapien
tagctctaaggaggtttgaataagc

SEQ ID NO: 4533125 - DNA, 25 bp, Homo sapien
gctgctgctgctttggtcttcttag

SEQ ID NO: 4533126 - DNA, 25 bp, Homo sapien
tcttcttcagcccatccatgttagc

SEQ ID NO: 4533127 - DNA, 25 bp, Homo sapien
gctgttgctgctgcggcaggtgctg

SEQ ID NO: 4533128 - DNA, 25 bp, Homo sapien
catccatgttagctctaaggaggtt

SEQ ID NO: 4533129 - DNA, 25 bp, Homo sapien
gatacttgggttcactgctctccgg

SEQ ID NO: 4533130 - DNA, 25 bp, Homo sapien
atacttgggttcactgctctccgga

SEQ ID NO: 4533131 - DNA, 25 bp, Homo sapien
tgatacttgggttcactgctctccg

SEQ ID NO: 4533132 - DNA, 25 bp, Homo sapien
tgctctccggagataagttttacca

SEQ ID NO: 4533133 - DNA, 25 bp, Homo sapien
attgatacttgggttcactgctctc

SEQ ID NO: 4533134 - DNA, 25 bp, Homo sapien
tacttgggttcactgctctccggag

SEQ ID NO: 4533135 - DNA, 25 bp, Homo sapien
tcaatgctaataccgtcttcctttc

SEQ ID NO: 4533136 - DNA, 25 bp, Homo sapien
gtgaatttcaatgctaataccgtct

SEQ ID NO: 4533137 - DNA, 25 bp, Homo sapien
tttcaatgctaataccgtcttcctt

SEQ ID NO: 4533138 - DNA, 25 bp, Homo sapien
aatttcaatgctaataccgtcttcc

SEQ ID NO: 4533139 - DNA, 25 bp, Homo sapien
gaatttcaatgctaataccgtcttc

SEQ ID NO: 4533140 - DNA, 25 bp, Homo sapien
atgctaataccgtcttcctttctag

SEQ ID NO: 4533141 - DNA, 25 bp, Homo sapien
ctagaaaggaagacggtattagcat

SEQ ID NO: 4533142 - DNA, 25 bp, Homo sapien
gaagacggtattagcattgaaattc

SEQ ID NO: 4533143 - DNA, 25 bp, Homo sapien
ggaagacggtattagcattgaaatt

SEQ ID NO: 4533144 - DNA, 25 bp, Homo sapien
agacggtattagcattgaaattcac

SEQ ID NO: 4533145 - DNA, 25 bp, Homo sapien
aaggaagacggtattagcattgaaa

SEQ ID NO: 4533146 - DNA, 25 bp, Homo sapien
gaaaggaagacggtattagcattga

SEQ ID NO: 4533147 - DNA, 25 bp, Homo sapien
tggtaaaacttatctccggagagca

SEQ ID NO: 4533148 - DNA, 25 bp, Homo sapien
gtaaaacttatctccggagagcagt

SEQ ID NO: 4533149 - DNA, 25 bp, Homo sapien
ctccggagagcagtgaacccaagta

SEQ ID NO: 4533150 - DNA, 25 bp, Homo sapien
tccggagagcagtgaacccaagtat

SEQ ID NO: 4533151 - DNA, 25 bp, Homo sapien
cggagagcagtgaacccaagtatca

SEQ ID NO: 4533152 - DNA, 25 bp, Homo sapien
gagagcagtgaacccaagtatcaat

SEQ ID NO: 4533153 - DNA, 25 bp, Homo sapien
gagtcagtatgatagtgaacactgg

SEQ ID NO: 4533154 - DNA, 25 bp, Homo sapien
ggcaagagtcagtatgatagtgaac

SEQ ID NO: 4533155 - DNA, 25 bp, Homo sapien
gcaagagtcagtatgatagtgaaca

SEQ ID NO: 4533156 - DNA, 25 bp, Homo sapien
agagtcagtatgatagtgaacactg

SEQ ID NO: 4533157 - DNA, 25 bp, Homo sapien
aagagtcagtatgatagtgaacact

SEQ ID NO: 4533158 - DNA, 25 bp, Homo sapien
caagagtcagtatgatagtgaacac

SEQ ID NO: 4533159 - DNA, 25 bp, Homo sapien
tgttcactatcatactgactcttgc

SEQ ID NO: 4533160 - DNA, 25 bp, Homo sapien
agtgttcactatcatactgactctt

SEQ ID NO: 4533161 - DNA, 25 bp, Homo sapien
gttcactatcatactgactcttgcc

SEQ ID NO: 4533162 - DNA, 25 bp, Homo sapien
cagtgttcactatcatactgactct

SEQ ID NO: 4533163 - DNA, 25 bp, Homo sapien
gtgttcactatcatactgactcttg

SEQ ID NO: 4533164 - DNA, 25 bp, Homo sapien
ccagtgttcactatcatactgactc

SEQ ID NO: 4533165 - DNA, 25 bp, Homo sapien
ggtgttccttatgtttcccttctca

SEQ ID NO: 4533166 - DNA, 25 bp, Homo sapien
gtgttccttatgtttcccttctcag

SEQ ID NO: 4533167 - DNA, 25 bp, Homo sapien
ctgagaagggaaacataaggaacac

SEQ ID NO: 4533168 - DNA, 25 bp, Homo sapien
tgagaagggaaacataaggaacacc

SEQ ID NO: 4533169 - DNA, 25 bp, Homo sapien
tgagctccaaggaagtgaataagtt

SEQ ID NO: 4533170 - DNA, 25 bp, Homo sapien
tccaaggaagtgaataagtttcaga

SEQ ID NO: 4533171 - DNA, 25 bp, Homo sapien
gagctccaaggaagtgaataagttt

SEQ ID NO: 4533172 - DNA, 25 bp, Homo sapien
caaggaagtgaataagtttcagatg

SEQ ID NO: 4533173 - DNA, 25 bp, Homo sapien
ctccaaggaagtgaataagtttcag

SEQ ID NO: 4533174 - DNA, 25 bp, Homo sapien
gtgagctccaaggaagtgaataagt

SEQ ID NO: 4533175 - DNA, 25 bp, Homo sapien
gaaacttattcacttccttggagct

SEQ ID NO: 4533176 - DNA, 25 bp, Homo sapien
tctgaaacttattcacttccttgga

SEQ ID NO: 4533177 - DNA, 25 bp, Homo sapien
aaacttattcacttccttggagctc

SEQ ID NO: 4533178 - DNA, 25 bp, Homo sapien
ctgaaacttattcacttccttggag

SEQ ID NO: 4533179 - DNA, 25 bp, Homo sapien
acttattcacttccttggagctcac

SEQ ID NO: 4533180 - DNA, 25 bp, Homo sapien
catctgaaacttattcacttccttg

SEQ ID NO: 4533181 - DNA, 25 bp, Homo sapien
gagaaaacccaatgccacctttcta

SEQ ID NO: 4533182 - DNA, 25 bp, Homo sapien
acccaatgccacctttctaagggat

SEQ ID NO: 4533183 - DNA, 25 bp, Homo sapien
tgccacctttctaagggatttcaag

SEQ ID NO: 4533184 - DNA, 25 bp, Homo sapien
caatgccacctttctaagggatttc

SEQ ID NO: 4533185 - DNA, 25 bp, Homo sapien
ccacctttctaagggatttcaagag

SEQ ID NO: 4533186 - DNA, 25 bp, Homo sapien
atgccacctttctaagggatttcaa

SEQ ID NO: 4533187 - DNA, 25 bp, Homo sapien
tagaaaggtggcattgggttttctc

SEQ ID NO: 4533188 - DNA, 25 bp, Homo sapien
gaaatcccttagaaaggtggcattg

SEQ ID NO: 4533189 - DNA, 25 bp, Homo sapien
ctcttgaaatcccttagaaaggtgg

SEQ ID NO: 4533190 - DNA, 25 bp, Homo sapien
cttgaaatcccttagaaaggtggca

SEQ ID NO: 4533191 - DNA, 25 bp, Homo sapien
ttgaaatcccttagaaaggtggcat

SEQ ID NO: 4533192 - DNA, 25 bp, Homo sapien
aatcccttagaaaggtggcattggg

SEQ ID NO: 4533193 - DNA, 25 bp, Homo sapien
agctaccgatgggaagaagaagatc

SEQ ID NO: 4533194 - DNA, 25 bp, Homo sapien
tgacggtcgaaccaaacccattcca

SEQ ID NO: 4533195 - DNA, 25 bp, Homo sapien
gctttgagcccgcagacaacaagtg

SEQ ID NO: 4533196 - DNA, 25 bp, Homo sapien
cccattccaaagaagggtactgtgg

SEQ ID NO: 4533197 - DNA, 25 bp, Homo sapien
ccgatgggaagaagaagatcagcac

SEQ ID NO: 4533198 - DNA, 25 bp, Homo sapien
tgagcccgcagacaacaagtgtctg

SEQ ID NO: 4533199 - DNA, 25 bp, Homo sapien
ccacagtacccttctttggaatggg

SEQ ID NO: 4533200 - DNA, 25 bp, Homo sapien
taacagacacttgttgtctgcgggc

SEQ ID NO: 4533201 - DNA, 25 bp, Homo sapien
gtgctgatcttcttcttcccatcgg

SEQ ID NO: 4533202 - DNA, 25 bp, Homo sapien
tggaatgggtttggttcgaccgtca

SEQ ID NO: 4533203 - DNA, 25 bp, Homo sapien
gatcttcttcttcccatcggtagct

SEQ ID NO: 4533204 - DNA, 25 bp, Homo sapien
cacttgttgtctgcgggctcaaagc

SEQ ID NO: 4533205 - DNA, 25 bp, Homo sapien
cgggcagcgtctatatcaccttgaa

SEQ ID NO: 4533206 - DNA, 25 bp, Homo sapien
tgaccagacttttccagaagtgccg

SEQ ID NO: 4533207 - DNA, 25 bp, Homo sapien
ccggacgtcgggcagcgtctatatc

SEQ ID NO: 4533208 - DNA, 25 bp, Homo sapien
cggacgtcgggcagcgtctatatca

SEQ ID NO: 4533209 - DNA, 25 bp, Homo sapien
ttcctgacggagctgaccagacttt

SEQ ID NO: 4533210 - DNA, 25 bp, Homo sapien
cttttccagaagtgccggacgtcgg

SEQ ID NO: 4533211 - DNA, 25 bp, Homo sapien
tgatatagacgctgcccgacgtccg

SEQ ID NO: 4533212 - DNA, 25 bp, Homo sapien
ttcaaggtgatatagacgctgcccg

SEQ ID NO: 4533213 - DNA, 25 bp, Homo sapien
aaggtgatatagacgctgcccgacg

SEQ ID NO: 4533214 - DNA, 25 bp, Homo sapien
gatatagacgctgcccgacgtccgg

SEQ ID NO: 4533215 - DNA, 25 bp, Homo sapien
aaagtctggtcagctccgtcaggaa

SEQ ID NO: 4533216 - DNA, 25 bp, Homo sapien
ccgacgtccggcacttctggaaaag

SEQ ID NO: 4533217 - DNA, 25 bp, Homo sapien
gaggaccagggccttgacgcggcag

SEQ ID NO: 4533218 - DNA, 25 bp, Homo sapien
tggggctggctaacggggctgggcc

SEQ ID NO: 4533219 - DNA, 25 bp, Homo sapien
tgacgcggcaggacgaggatttggg

SEQ ID NO: 4533220 - DNA, 25 bp, Homo sapien
ttgacgcggcaggacgaggatttgg

SEQ ID NO: 4533221 - DNA, 25 bp, Homo sapien
cttgacgcggcaggacgaggatttg

SEQ ID NO: 4533222 - DNA, 25 bp, Homo sapien
ccttgacgcggcaggacgaggattt

SEQ ID NO: 4533223 - DNA, 25 bp, Homo sapien
ccagccccgttagccagccccaaat

SEQ ID NO: 4533224 - DNA, 25 bp, Homo sapien
ccaaatcctcgtcctgccgcgtcaa

SEQ ID NO: 4533225 - DNA, 25 bp, Homo sapien
gccagccccaaatcctcgtcctgcc

SEQ ID NO: 4533226 - DNA, 25 bp, Homo sapien
ctgccgcgtcaaggccctggtcctc

SEQ ID NO: 4533227 - DNA, 25 bp, Homo sapien
aaatcctcgtcctgccgcgtcaagg

SEQ ID NO: 4533228 - DNA, 25 bp, Homo sapien
agccccaaatcctcgtcctgccgcg

SEQ ID NO: 4533229 - DNA, 25 bp, Homo sapien
ccagccccgttagccagccccaaat

SEQ ID NO: 4533230 - DNA, 25 bp, Homo sapien
ctggaaaacaacaggcccagccccg

SEQ ID NO: 4533231 - DNA, 25 bp, Homo sapien
gttagccagccccaaatcctcgtcc

SEQ ID NO: 4533232 - DNA, 25 bp, Homo sapien
ctgccgcgtcaaggccctggtcctc

SEQ ID NO: 4533233 - DNA, 25 bp, Homo sapien
aaatcctcgtcctgccgcgtcaagg

SEQ ID NO: 4533234 - DNA, 25 bp, Homo sapien
agccccaaatcctcgtcctgccgcg

SEQ ID NO: 4533235 - DNA, 25 bp, Homo sapien
ttactcgagacctgtgcctcctgca

SEQ ID NO: 4533236 - DNA, 25 bp, Homo sapien
gcggctcaggcgttactcgagacct

SEQ ID NO: 4533237 - DNA, 25 bp, Homo sapien
tcaggcgttactcgagacctgtgcc

SEQ ID NO: 4533238 - DNA, 25 bp, Homo sapien
ggcgttactcgagacctgtgcctcc

SEQ ID NO: 4533239 - DNA, 25 bp, Homo sapien
cgttactcgagacctgtgcctcctg

SEQ ID NO: 4533240 - DNA, 25 bp, Homo sapien
ggctcaggcgttactcgagacctgt

SEQ ID NO: 4533241 - DNA, 25 bp, Homo sapien
aggtctcgagtaacgcctgagccgc

SEQ ID NO: 4533242 - DNA, 25 bp, Homo sapien
tgcaggaggcacaggtctcgagtaa

SEQ ID NO: 4533243 - DNA, 25 bp, Homo sapien
ggaggcacaggtctcgagtaacgcc

SEQ ID NO: 4533244 - DNA, 25 bp, Homo sapien
cacaggtctcgagtaacgcctgagc

SEQ ID NO: 4533245 - DNA, 25 bp, Homo sapien
ggcacaggtctcgagtaacgcctga

SEQ ID NO: 4533246 - DNA, 25 bp, Homo sapien
caggaggcacaggtctcgagtaacg

SEQ ID NO: 4533247 - DNA, 25 bp, Homo sapien
ttccggctctcactgctaggggctt

SEQ ID NO: 4533248 - DNA, 25 bp, Homo sapien
cgaacttccggctctcactgctagg

SEQ ID NO: 4533249 - DNA, 25 bp, Homo sapien
ctctcactgctaggggcttaagcgg

SEQ ID NO: 4533250 - DNA, 25 bp, Homo sapien
gaacttccggctctcactgctaggg

SEQ ID NO: 4533251 - DNA, 25 bp, Homo sapien
taggccgaacttccggctctcactg

SEQ ID NO: 4533252 - DNA, 25 bp, Homo sapien
cggctctcactgctaggggcttaag

SEQ ID NO: 4533253 - DNA, 25 bp, Homo sapien
cccctagcagtgagagccggaagtt

SEQ ID NO: 4533254 - DNA, 25 bp, Homo sapien
cttaagcccctagcagtgagagccg

SEQ ID NO: 4533255 - DNA, 25 bp, Homo sapien
cagtgagagccggaagttcggccta

SEQ ID NO: 4533256 - DNA, 25 bp, Homo sapien
gcttaagcccctagcagtgagagcc

SEQ ID NO: 4533257 - DNA, 25 bp, Homo sapien
ccgcttaagcccctagcagtgagag

SEQ ID NO: 4533258 - DNA, 25 bp, Homo sapien
cctagcagtgagagccggaagttcg

SEQ ID NO: 4533259 - DNA, 25 bp, Homo sapien
tccagtgtgctgatttaagggtcag

SEQ ID NO: 4533260 - DNA, 25 bp, Homo sapien
gctgcctcaccgtagctccagtgtg

SEQ ID NO: 4533261 - DNA, 25 bp, Homo sapien
tctgagctgcctcaccgtagctcca

SEQ ID NO: 4533262 - DNA, 25 bp, Homo sapien
cagtgtgctgatttaagggtcagtt

SEQ ID NO: 4533263 - DNA, 25 bp, Homo sapien
tagaagattgcccaacacttggtgg

SEQ ID NO: 4533264 - DNA, 25 bp, Homo sapien
tcttgggagatttggactcagaata

SEQ ID NO: 4533265 - DNA, 25 bp, Homo sapien
tcacagtaataccaggaaagacaca

SEQ ID NO: 4533266 - DNA, 25 bp, Homo sapien
gatcctcaccataaagagatttggg

SEQ ID NO: 4533267 - DNA, 25 bp, Homo sapien
agaaagttgggggtgaagcaggact

SEQ ID NO: 4533268 - DNA, 25 bp, Homo sapien
tctcgtagaagaatgggaagagtga

SEQ ID NO: 4533269 - DNA, 25 bp, Homo sapien
tattctcgtagaagaatgggaagag

SEQ ID NO: 4533270 - DNA, 25 bp, Homo sapien
ttattctcgtagaagaatgggaaga

SEQ ID NO: 4533271 - DNA, 25 bp, Homo sapien
gacgcaggtaactggcaagatgaga

SEQ ID NO: 4533272 - DNA, 25 bp, Homo sapien
ctggcaagatgagagatcagaccaa

SEQ ID NO: 4533273 - DNA, 25 bp, Homo sapien
caagatgagagatcagaccaacctg

SEQ ID NO: 4533274 - DNA, 25 bp, Homo sapien
ggtgctccaccaagacgcaggtaac

SEQ ID NO: 4533275 - DNA, 25 bp, Homo sapien
cctggggacaggtggatggcacaca

SEQ ID NO: 4533276 - DNA, 25 bp, Homo sapien
ccctggggacaggtggatggcacac

SEQ ID NO: 4533277 - DNA, 25 bp, Homo sapien
tagatggtcactgctaagagctggg

SEQ ID NO: 4533278 - DNA, 25 bp, Homo sapien
aacctatgaggcgagagctgtagct

SEQ ID NO: 4533279 - DNA, 25 bp, Homo sapien
ttttgaacatgacaggcctccgagg

SEQ ID NO: 4533280 - DNA, 25 bp, Homo sapien
tcggccaggcaaggagcaatagtga

SEQ ID NO: 4533281 - DNA, 25 bp, Homo sapien
ccccggcaagcttctctactcgctt

SEQ ID NO: 4533282 - DNA, 25 bp, Homo sapien
acaccccggcaagcttctctactcg

SEQ ID NO: 4533283 - DNA, 25 bp, Homo sapien
caggggttcacaccccggcaagctt

SEQ ID NO: 4533284 - DNA, 25 bp, Homo sapien
ttcacaccccggcaagcttctctac

SEQ ID NO: 4533285 - DNA, 25 bp, Homo sapien
cacgggccatggaccacagtgaggc

SEQ ID NO: 4533286 - DNA, 25 bp, Homo sapien
atattggcgttggaggggccttgcc

SEQ ID NO: 4533287 - DNA, 25 bp, Homo sapien
acagtgaggcagtgatattggcgtt

SEQ ID NO: 4533288 - DNA, 25 bp, Homo sapien
cagacactgagtgttcggggtggga

SEQ ID NO: 4533289 - DNA, 25 bp, Homo sapien
cagaggaagcggattttctgacgca

SEQ ID NO: 4533290 - DNA, 25 bp, Homo sapien
cagctgagcggctatttacattcca

SEQ ID NO: 4533291 - DNA, 25 bp, Homo sapien
gtgagaactgtctacatctaagtct

SEQ ID NO: 4533292 - DNA, 25 bp, Homo sapien
tttctgacgcatatgaagagtgaga

SEQ ID NO: 4533293 - DNA, 25 bp, Homo sapien
taagaatagggaatacaggccgggc

SEQ ID NO: 4533294 - DNA, 25 bp, Homo sapien
cactatgccacaacctccttaaggg

SEQ ID NO: 4533295 - DNA, 25 bp, Homo sapien
gaggttcagtgccatccattaccac

SEQ ID NO: 4533296 - DNA, 25 bp, Homo sapien
gaatgaaagctgttgagtctagaga

SEQ ID NO: 4533297 - DNA, 25 bp, Homo sapien
tcttggagagaacgaaataatgtaa

SEQ ID NO: 4533298 - DNA, 25 bp, Homo sapien
tggcatttagattccattggacatt

SEQ ID NO: 4533299 - DNA, 25 bp, Homo sapien
tggataatgttggacacagaattgc

SEQ ID NO: 4533300 - DNA, 25 bp, Homo sapien
agcataaaatctgtaacaggagtga

SEQ ID NO: 4533301 - DNA, 25 bp, Homo sapien
agtgggcccggagccaacaggaact

SEQ ID NO: 4533302 - DNA, 25 bp, Homo sapien
gtaggaccgtaagcaagccagaagc

SEQ ID NO: 4533303 - DNA, 25 bp, Homo sapien
cataaaggccgcaaagtaaaccttg

SEQ ID NO: 4533304 - DNA, 25 bp, Homo sapien
aacaggaactcgctctgaaactcca

SEQ ID NO: 4533305 - DNA, 25 bp, Homo sapien
aagaaagactggcaagatcctgggt

SEQ ID NO: 4533306 - DNA, 25 bp, Homo sapien
gtaagaaagactggcaagatcctgg

SEQ ID NO: 4533307 - DNA, 25 bp, Homo sapien
aaagactggcaagatcctgggtaaa

SEQ ID NO: 4533308 - DNA, 25 bp, Homo sapien
gaaagactggcaagatcctgggtaa

SEQ ID NO: 4533309 - DNA, 25 bp, Homo sapien
tgactgacgatccacactctgggtc

SEQ ID NO: 4533310 - DNA, 25 bp, Homo sapien
ccaggagagtggtgaacggcctcac

SEQ ID NO: 4533311 - DNA, 25 bp, Homo sapien
tggttcccctgcagtctagtgatag

SEQ ID NO: 4533312 - DNA, 25 bp, Homo sapien
aatcgcgtggcactacagcactggg

SEQ ID NO: 4533313 - DNA, 25 bp, Homo sapien
tatgtgtgaatcgactatgttatca

SEQ ID NO: 4533314 - DNA, 25 bp, Homo sapien
cacacacaatatgtgtgaatcgact

SEQ ID NO: 4533315 - DNA, 25 bp, Homo sapien
cactacggcttttgtcaacagtaag

SEQ ID NO: 4533316 - DNA, 25 bp, Homo sapien
gaatgaagattttgatgacgatcca

SEQ ID NO: 4533317 - DNA, 25 bp, Homo sapien
cttgtatccagagatggttagcagt

SEQ ID NO: 4533318 - DNA, 25 bp, Homo sapien
ttgtatccagagatggttagcagtc

SEQ ID NO: 4533319 - DNA, 25 bp, Homo sapien
ccttgtatccagagatggttagcag

SEQ ID NO: 4533320 - DNA, 25 bp, Homo sapien
agggacatggttccacatagtcact

SEQ ID NO: 4533321 - DNA, 25 bp, Homo sapien
ccacatagtcacttaaggacacagg

SEQ ID NO: 4533322 - DNA, 25 bp, Homo sapien
gctgcagtaataaagcaacccccaa

SEQ ID NO: 4533323 - DNA, 25 bp, Homo sapien
ttattcaggataggccagggtatgc

SEQ ID NO: 4533324 - DNA, 25 bp, Homo sapien
tacaccagtagttgagaagtctctc

SEQ ID NO: 4533325 - DNA, 25 bp, Homo sapien
gctcagcagacgtaaacagggtcat

SEQ ID NO: 4533326 - DNA, 25 bp, Homo sapien
taaagtcctcgcattatacaaagtg

SEQ ID NO: 4533327 - DNA, 25 bp, Homo sapien
tcactactgttgctgtttggaattg

SEQ ID NO: 4533328 - DNA, 25 bp, Homo sapien
cagggttggcgctcgaatgagcatt

SEQ ID NO: 4533329 - DNA, 25 bp, Homo sapien
attcgaatgctggtgacagatcccc

SEQ ID NO: 4533330 - DNA, 25 bp, Homo sapien
gaatgagcattcgaatgctggtgac

SEQ ID NO: 4533331 - DNA, 25 bp, Homo sapien
cttcttaggagcagggttggcgctc

SEQ ID NO: 4533332 - DNA, 25 bp, Homo sapien
tgatggggggaaagatatacacaca

SEQ ID NO: 4533333 - DNA, 25 bp, Homo sapien
ccctggggatgaacaaaatgctaca

SEQ ID NO: 4533334 - DNA, 25 bp, Homo sapien
agaggcagagtgcccagaccccagg

SEQ ID NO: 4533335 - DNA, 25 bp, Homo sapien
attgtaccaattgatggggggaaag

SEQ ID NO: 4533336 - DNA, 25 bp, Homo sapien
tgggtctcctcgatagcccctgtgg

SEQ ID NO: 4533337 - DNA, 25 bp, Homo sapien
tcccagagcagggaggggcactggc

SEQ ID NO: 4533338 - DNA, 25 bp, Homo sapien
cagagcagggaggggcactggccac

SEQ ID NO: 4533339 - DNA, 25 bp, Homo sapien
gctagcaatgctcccagagcaggga

SEQ ID NO: 4533340 - DNA, 25 bp, Homo sapien
ctcccagagcagggaggggcactgg

SEQ ID NO: 4533341 - DNA, 25 bp, Homo sapien
agccctcaggctgcctaagggtgac

SEQ ID NO: 4533342 - DNA, 25 bp, Homo sapien
gggctctgagcacctttagctggga

SEQ ID NO: 4533343 - DNA, 25 bp, Homo sapien
tatgagctcagctttttccgctatc

SEQ ID NO: 4533344 - DNA, 25 bp, Homo sapien
ggctggctgggcacctatgagctca

SEQ ID NO: 4533345 - DNA, 25 bp, Homo sapien
ccagcactgatttgcagaaggcctg

SEQ ID NO: 4533346 - DNA, 25 bp, Homo sapien
gccacgtcccttctgcctaccccac

SEQ ID NO: 4533347 - DNA, 25 bp, Homo sapien
tcttcccgcttctgccacgtccctt

SEQ ID NO: 4533348 - DNA, 25 bp, Homo sapien
aaagtcttcccgcttctgccacgtc

SEQ ID NO: 4533349 - DNA, 25 bp, Homo sapien
ggtgaccaaagtcttcccgcttctg

SEQ ID NO: 4533350 - DNA, 25 bp, Homo sapien
tggctgaaccatcccgaataacccc

SEQ ID NO: 4533351 - DNA, 25 bp, Homo sapien
gtcaccgtggctccacagcactctt

SEQ ID NO: 4533352 - DNA, 25 bp, Homo sapien
cctggctgaaccatcccgaataacc

SEQ ID NO: 4533353 - DNA, 25 bp, Homo sapien
caggggccacctgccgatggggctg

SEQ ID NO: 4533354 - DNA, 25 bp, Homo sapien
tagctttggacacagacctactccc

SEQ ID NO: 4533355 - DNA, 25 bp, Homo sapien
ggagcagtgagacaggtcagctggg

SEQ ID NO: 4533356 - DNA, 25 bp, Homo sapien
tccacctcggattgagcaagagaag

SEQ ID NO: 4533357 - DNA, 25 bp, Homo sapien
cactgggaggtgatctttttccacc

SEQ ID NO: 4533358 - DNA, 25 bp, Homo sapien
tgtttaggccaactcaccaggcaga

SEQ ID NO: 4533359 - DNA, 25 bp, Homo sapien
tagatcctctccataagtgccgcag

SEQ ID NO: 4533360 - DNA, 25 bp, Homo sapien
taaaagtcacttagctggcaaagcc

SEQ ID NO: 4533361 - DNA, 25 bp, Homo sapien
tacatgcacagtttgaggcccttct

SEQ ID NO: 4533362 - DNA, 25 bp, Homo sapien
gggtggaatgcggtctgtcggtggg

SEQ ID NO: 4533363 - DNA, 25 bp, Homo sapien
cactgcaaacttgcccccgatgtcc

SEQ ID NO: 4533364 - DNA, 25 bp, Homo sapien
gccaccatattttccggccccactg

SEQ ID NO: 4533365 - DNA, 25 bp, Homo sapien
atgtccctcagtgccgatgttgggg

SEQ ID NO: 4533366 - DNA, 25 bp, Homo sapien
aagtcagttttgaggcctagccaga

SEQ ID NO: 4533367 - DNA, 25 bp, Homo sapien
gcctccaagtgggaccaagtcagtt

SEQ ID NO: 4533368 - DNA, 25 bp, Homo sapien
tagagaaactcaaccctccctgagg

SEQ ID NO: 4533369 - DNA, 25 bp, Homo sapien
taacggatcatcttcgacaactggt

SEQ ID NO: 4533370 - DNA, 25 bp, Homo sapien
caccacacacgattttggttctgct

SEQ ID NO: 4533371 - DNA, 25 bp, Homo sapien
acaggtaccatttcccaggagaggc

SEQ ID NO: 4533372 - DNA, 25 bp, Homo sapien
ggaagaggcggtctttgttctctct

SEQ ID NO: 4533373 - DNA, 25 bp, Homo sapien
tgcccacacaggtaccatttcccag

SEQ ID NO: 4533374 - DNA, 25 bp, Homo sapien
ctccacagggttctcactggacagg

SEQ ID NO: 4533375 - DNA, 25 bp, Homo sapien
aggttgctggcttccccttcacgct

SEQ ID NO: 4533376 - DNA, 25 bp, Homo sapien
tttcccagggccaccatgcaggttg

SEQ ID NO: 4533377 - DNA, 25 bp, Homo sapien
cccagggccaccatgcaggttgctg

SEQ ID NO: 4533378 - DNA, 25 bp, Homo sapien
ctttcccagggccaccatgcaggtt

SEQ ID NO: 4533379 - DNA, 25 bp, Homo sapien
tagagtaaaacagcgtgaaaatgga

SEQ ID NO: 4533380 - DNA, 25 bp, Homo sapien
ccggcttaacaaaatctggttagag

SEQ ID NO: 4533381 - DNA, 25 bp, Homo sapien
ctggttagagtaaaacagcgtgaaa

SEQ ID NO: 4533382 - DNA, 25 bp, Homo sapien
agctgctgaccgagacaggtgcaga

SEQ ID NO: 4533383 - DNA, 25 bp, Homo sapien
taagcacaaagcgtgttccctacgc

SEQ ID NO: 4533384 - DNA, 25 bp, Homo sapien
tcagatccaattcataccctctggg

SEQ ID NO: 4533385 - DNA, 25 bp, Homo sapien
ctacgctccctggataagaatctcc

SEQ ID NO: 4533386 - DNA, 25 bp, Homo sapien
ctgacaaggttggattacataaatc

SEQ ID NO: 4533387 - DNA, 25 bp, Homo sapien
cagcaaattacggtgtgacttggac

SEQ ID NO: 4533388 - DNA, 25 bp, Homo sapien
tgtacccttgttttccggaatgtga

SEQ ID NO: 4533389 - DNA, 25 bp, Homo sapien
tccggaatgtgattgctgggcagca

SEQ ID NO: 4533390 - DNA, 25 bp, Homo sapien
cagaatccatcaaatctgtatgacg

SEQ ID NO: 4533391 - DNA, 25 bp, Homo sapien
cactgaagctttcgggcaatctgta

SEQ ID NO: 4533392 - DNA, 25 bp, Homo sapien
tgcactgaagctttcgggcaatctg

SEQ ID NO: 4533393 - DNA, 25 bp, Homo sapien
gcaatgcactgaagctttcgggcaa

SEQ ID NO: 4533394 - DNA, 25 bp, Homo sapien
ttgctgcacatgaagccggtggaac

SEQ ID NO: 4533395 - DNA, 25 bp, Homo sapien
ctgctccccaatgggcaagactgct

SEQ ID NO: 4533396 - DNA, 25 bp, Homo sapien
gggctgctccccaatgggcaagact

SEQ ID NO: 4533397 - DNA, 25 bp, Homo sapien
agaggaagccgatagccagcattgc

SEQ ID NO: 4533398 - DNA, 25 bp, Homo sapien
gagaggaagccgatagccagcattg

SEQ ID NO: 4533399 - DNA, 25 bp, Homo sapien
ggaaaagcactggaggtagctctcc

SEQ ID NO: 4533400 - DNA, 25 bp, Homo sapien
ccttaaccacagttggttattcacg

SEQ ID NO: 4533401 - DNA, 25 bp, Homo sapien
tggttattcacgtagtagcaggttg

SEQ ID NO: 4533402 - DNA, 25 bp, Homo sapien
tcacgtagtagcaggttgaagctct

SEQ ID NO: 4533403 - DNA, 25 bp, Homo sapien
tcaccggctccccatcctctggttg

SEQ ID NO: 4533404 - DNA, 25 bp, Homo sapien
taaaagagtcgctggggttcctcag

SEQ ID NO: 4533405 - DNA, 25 bp, Homo sapien
tcctctggttggaacacatcatcct

SEQ ID NO: 4533406 - DNA, 25 bp, Homo sapien
aaggcagcatgacaccttggctggg

SEQ ID NO: 4533407 - DNA, 25 bp, Homo sapien
tgtgagggggcaacgcaggcatctg

SEQ ID NO: 4533408 - DNA, 25 bp, Homo sapien
ctgtgagggggcaacgcaggcatct

SEQ ID NO: 4533409 - DNA, 25 bp, Homo sapien
tgagggggcaacgcaggcatctggg

SEQ ID NO: 4533410 - DNA, 25 bp, Homo sapien
gtgagggggcaacgcaggcatctgg

SEQ ID NO: 4533411 - DNA, 25 bp, Homo sapien
tggaaccaccctttttcttgatcac

SEQ ID NO: 4533412 - DNA, 25 bp, Homo sapien
ctaggccggtcacaaagtttgactc

SEQ ID NO: 4533413 - DNA, 25 bp, Homo sapien
ggagtagaatcagcagctatatgca

SEQ ID NO: 4533414 - DNA, 25 bp, Homo sapien
caatagcaggagtagaatcagcagc

SEQ ID NO: 4533415 - DNA, 25 bp, Homo sapien
gtttgactctgagggttgtgagcaa

SEQ ID NO: 4533416 - DNA, 25 bp, Homo sapien
taagttgctgtcaagggtgctgtga

SEQ ID NO: 4533417 - DNA, 25 bp, Homo sapien
caagactagcctctgtaagttgctg

SEQ ID NO: 4533418 - DNA, 25 bp, Homo sapien
ggctatacatacagtgctcacaaca

SEQ ID NO: 4533419 - DNA, 25 bp, Homo sapien
tcttatctcagtctgagctgagctc

SEQ ID NO: 4533420 - DNA, 25 bp, Homo sapien
tcggcctccgagtcgtgatgccagg

SEQ ID NO: 4533421 - DNA, 25 bp, Homo sapien
ggctccgcgccagggtccagcgtga

SEQ ID NO: 4533422 - DNA, 25 bp, Homo sapien
ctccaggagagagtctcggcctccg

SEQ ID NO: 4533423 - DNA, 25 bp, Homo sapien
tgatgccagggctccgcgccagggt

SEQ ID NO: 4533424 - DNA, 25 bp, Homo sapien
gggctggacgcccagactcgattgg

SEQ ID NO: 4533425 - DNA, 25 bp, Homo sapien
gctggacgcccagactcgattggga

SEQ ID NO: 4533426 - DNA, 25 bp, Homo sapien
ctcgggggctggacgcccagactcg

SEQ ID NO: 4533427 - DNA, 25 bp, Homo sapien
gacgcccagactcgattgggaagga

SEQ ID NO: 4533428 - DNA, 25 bp, Homo sapien
agaggctgggccgttctcgggcgcc

SEQ ID NO: 4533429 - DNA, 25 bp, Homo sapien
acccaactccttcgagtcccaaatg

SEQ ID NO: 4533430 - DNA, 25 bp, Homo sapien
ttctcgggcgcccaggtctgctcag

SEQ ID NO: 4533431 - DNA, 25 bp, Homo sapien
tgcctacctggacccaactccttcg

SEQ ID NO: 4533432 - DNA, 25 bp, Homo sapien
accccagcgccccagttcttcatgg

SEQ ID NO: 4533433 - DNA, 25 bp, Homo sapien
atggtcaccccagacgtccgcagcc

SEQ ID NO: 4533434 - DNA, 25 bp, Homo sapien
cagacgtccgcagcccaaacccttc

SEQ ID NO: 4533435 - DNA, 25 bp, Homo sapien
gtgcgcagcgcgactccgctcccca

SEQ ID NO: 4533436 - DNA, 25 bp, Homo sapien
tgtttccaaaatacgcctgctcggg

SEQ ID NO: 4533437 - DNA, 25 bp, Homo sapien
gcacggtgcggtattgtttccaaaa

SEQ ID NO: 4533438 - DNA, 25 bp, Homo sapien
gaggccactccgcacggtgcggtat

SEQ ID NO: 4533439 - DNA, 25 bp, Homo sapien
tgctcggggcatcccgcaaacagct

SEQ ID NO: 4533440 - DNA, 25 bp, Homo sapien
gtgaagcgccaagtcccgggctggg

SEQ ID NO: 4533441 - DNA, 25 bp, Homo sapien
atggcgagtgaagcgccaagtcccg

SEQ ID NO: 4533442 - DNA, 25 bp, Homo sapien
cgagtgaagcgccaagtcccgggct

SEQ ID NO: 4533443 - DNA, 25 bp, Homo sapien
caatggcgagtgaagcgccaagtcc

SEQ ID NO: 4533444 - DNA, 25 bp, Homo sapien
cagtgcggattctgtccctaacaca

SEQ ID NO: 4533445 - DNA, 25 bp, Homo sapien
tggaaacattgcaaggggccgagca

SEQ ID NO: 4533446 - DNA, 25 bp, Homo sapien
ccagaagcgcagtcggagcgccgtc

SEQ ID NO: 4533447 - DNA, 25 bp, Homo sapien
aaaattccgaccgtcgccagaagcg

SEQ ID NO: 4533448 - DNA, 25 bp, Homo sapien
aagcgccagagagtccctgaatcct

SEQ ID NO: 4533449 - DNA, 25 bp, Homo sapien
ctggaagcgccagagagtccctgaa

SEQ ID NO: 4533450 - DNA, 25 bp, Homo sapien
ggaagcgccagagagtccctgaatc

SEQ ID NO: 4533451 - DNA, 25 bp, Homo sapien
tggaagcgccagagagtccctgaat

SEQ ID NO: 4533452 - DNA, 25 bp, Homo sapien
tgcacactgagatttacgaacggta

SEQ ID NO: 4533453 - DNA, 25 bp, Homo sapien
cattgggtgcacactgagatttacg

SEQ ID NO: 4533454 - DNA, 25 bp, Homo sapien
cactgagatttacgaacggtaggca

SEQ ID NO: 4533455 - DNA, 25 bp, Homo sapien
tgactggatcattgggtgcacactg

SEQ ID NO: 4533456 - DNA, 25 bp, Homo sapien
ttagatttaagttcagtggagctgg

SEQ ID NO: 4533457 - DNA, 25 bp, Homo sapien
gagctgggaccttcagcccaataga

SEQ ID NO: 4533458 - DNA, 25 bp, Homo sapien
tcagcagtgctctgaccaccgagct

SEQ ID NO: 4533459 - DNA, 25 bp, Homo sapien
gagcctgaagtctccttgtaccttt

SEQ ID NO: 4533460 - DNA, 25 bp, Homo sapien
aagctctgtgtgcttcatcacagcc

SEQ ID NO: 4533461 - DNA, 25 bp, Homo sapien
ctaaagctctgtgtgcttcatcaca

SEQ ID NO: 4533462 - DNA, 25 bp, Homo sapien
taaagctctgtgtgcttcatcacag

SEQ ID NO: 4533463 - DNA, 25 bp, Homo sapien
aaagctctgtgtgcttcatcacagc

SEQ ID NO: 4533464 - DNA, 25 bp, Homo sapien
tgtggcagaagcgattgcatcaccc

SEQ ID NO: 4533465 - DNA, 25 bp, Homo sapien
atcacccgcaggaagcggtccagcg

SEQ ID NO: 4533466 - DNA, 25 bp, Homo sapien
ttgcatcacccgcaggaagcggtcc

SEQ ID NO: 4533467 - DNA, 25 bp, Homo sapien
aagcgattgcatcacccgcaggaag

SEQ ID NO: 4533468 - DNA, 25 bp, Homo sapien
ccaatggataactctcatcctctaa

SEQ ID NO: 4533469 - DNA, 25 bp, Homo sapien
gaccaatggataactctcatcctct

SEQ ID NO: 4533470 - DNA, 25 bp, Homo sapien
ggaattgcacaaatatttttggttc

SEQ ID NO: 4533471 - DNA, 25 bp, Homo sapien
aatggataactctcatcctctaaaa

SEQ ID NO: 4533472 - DNA, 25 bp, Homo sapien
ctgagttagtagttcttacgtactt

SEQ ID NO: 4533473 - DNA, 25 bp, Homo sapien
agccgtgttgttaggcatgggggcc

SEQ ID NO: 4533474 - DNA, 25 bp, Homo sapien
ggcctgagttagtagttcttacgta

SEQ ID NO: 4533475 - DNA, 25 bp, Homo sapien
tgggggcctgagttagtagttctta

SEQ ID NO: 4533476 - DNA, 25 bp, Homo sapien
tagacccacaatctaacgttttgat

SEQ ID NO: 4533477 - DNA, 25 bp, Homo sapien
attattagacccacaatctaacgtt

SEQ ID NO: 4533478 - DNA, 25 bp, Homo sapien
tgggaaataagaagttgaaggcttc

SEQ ID NO: 4533479 - DNA, 25 bp, Homo sapien
tgaaggcttctattattagacccac

SEQ ID NO: 4533480 - DNA, 25 bp, Homo sapien
aagtcaagtttgaagtcctcgagag

SEQ ID NO: 4533481 - DNA, 25 bp, Homo sapien
atatgattcggctgtggttttgctc

SEQ ID NO: 4533482 - DNA, 25 bp, Homo sapien
tggttttgctcgtagtttgaatttg

SEQ ID NO: 4533483 - DNA, 25 bp, Homo sapien
gattcggctgtggttttgctcgtag

SEQ ID NO: 4533484 - DNA, 25 bp, Homo sapien
ccacagcagtggggcagacgtgcag

SEQ ID NO: 4533485 - DNA, 25 bp, Homo sapien
atcttcggtcatagcccccctccgc

SEQ ID NO: 4533486 - DNA, 25 bp, Homo sapien
acagcagtggggcagacgtgcagga

SEQ ID NO: 4533487 - DNA, 25 bp, Homo sapien
cacagcagtggggcagacgtgcagg

SEQ ID NO: 4533488 - DNA, 25 bp, Homo sapien
ctcaattccactgtccgaggagtcc

SEQ ID NO: 4533489 - DNA, 25 bp, Homo sapien
tccttattatccgtgcgggtggtga

SEQ ID NO: 4533490 - DNA, 25 bp, Homo sapien
actccttattatccgtgcgggtggt

SEQ ID NO: 4533491 - DNA, 25 bp, Homo sapien
gactccttattatccgtgcgggtgg

SEQ ID NO: 4533492 - DNA, 25 bp, Homo sapien
agactccttattatccgtgcgggtg

SEQ ID NO: 4533493 - DNA, 25 bp, Homo sapien
tagttgaatttagcagtggagggtt

SEQ ID NO: 4533494 - DNA, 25 bp, Homo sapien
ctagttgaatttagcagtggagggt

SEQ ID NO: 4533495 - DNA, 25 bp, Homo sapien
gtgacacttatgttaattagcttct

SEQ ID NO: 4533496 - DNA, 25 bp, Homo sapien
ttagtgacacttatgttaattagct

SEQ ID NO: 4533497 - DNA, 25 bp, Homo sapien
agcccaagaatttgaagctacagta

SEQ ID NO: 4533498 - DNA, 25 bp, Homo sapien
agtcctaactactcgagtggctgaa

SEQ ID NO: 4533499 - DNA, 25 bp, Homo sapien
tcctaactactcgagtggctgaagc

SEQ ID NO: 4533500 - DNA, 25 bp, Homo sapien
ctaactactcgagtggctgaagcag

SEQ ID NO: 4533501 - DNA, 25 bp, Homo sapien
ctatcttttgacttaatgtgcacag

SEQ ID NO: 4533502 - DNA, 25 bp, Homo sapien
cagctggttgatcggagccttacta

SEQ ID NO: 4533503 - DNA, 25 bp, Homo sapien
gatcggagccttactatcttttgac

SEQ ID NO: 4533504 - DNA, 25 bp, Homo sapien
tcaagtaatttgagatctcagctgg

SEQ ID NO: 4533505 - DNA, 25 bp, Homo sapien
aatttccgcctgcttctcataaact

SEQ ID NO: 4533506 - DNA, 25 bp, Homo sapien
tgatgtttcttcaggaatttccgcc

SEQ ID NO: 4533507 - DNA, 25 bp, Homo sapien
tcttcaggaatttccgcctgcttct

SEQ ID NO: 4533508 - DNA, 25 bp, Homo sapien
tcttaaagagagtcattgtaattat

SEQ ID NO: 4533509 - DNA, 25 bp, Homo sapien
gccactctcagccttcgaagcaaaa

SEQ ID NO: 4533510 - DNA, 25 bp, Homo sapien
actctcagccttcgaagcaaaacca

SEQ ID NO: 4533511 - DNA, 25 bp, Homo sapien
tctcagccttcgaagcaaaaccagc

SEQ ID NO: 4533512 - DNA, 25 bp, Homo sapien
tcagccttcgaagcaaaaccagctg

SEQ ID NO: 4533513 - DNA, 25 bp, Homo sapien
agatctgaatgcgcagctccaagtt

SEQ ID NO: 4533514 - DNA, 25 bp, Homo sapien
ccagatctgaatgcgcagctccaag

SEQ ID NO: 4533515 - DNA, 25 bp, Homo sapien
ctgccagatctgaatgcgcagctcc

SEQ ID NO: 4533516 - DNA, 25 bp, Homo sapien
gccagatctgaatgcgcagctccaa

SEQ ID NO: 4533517 - DNA, 25 bp, Homo sapien
tgggacttgctgtgagtctgctgcc

SEQ ID NO: 4533518 - DNA, 25 bp, Homo sapien
gctccaggaagatgggacttgctgt

SEQ ID NO: 4533519 - DNA, 25 bp, Homo sapien
acttgctgtgagtctgctgccaccc

SEQ ID NO: 4533520 - DNA, 25 bp, Homo sapien
ccaggaagatgggacttgctgtgag

SEQ ID NO: 4533521 - DNA, 25 bp, Homo sapien
ctgtgggggccagaagtgcccgggg

SEQ ID NO: 4533522 - DNA, 25 bp, Homo sapien
ctttccctggcattgtacaccaaga

SEQ ID NO: 4533523 - DNA, 25 bp, Homo sapien
ttgtggtctccagttatcctttccc

SEQ ID NO: 4533524 - DNA, 25 bp, Homo sapien
agcaaggctaacgtcttgtggtctc

SEQ ID NO: 4533525 - DNA, 25 bp, Homo sapien
caagaggtttgtgccgttctgcctg

SEQ ID NO: 4533526 - DNA, 25 bp, Homo sapien
agatgcgctcgtcgccctgagcagg

SEQ ID NO: 4533527 - DNA, 25 bp, Homo sapien
ccgtaagatgcgctcgtcgccctga

SEQ ID NO: 4533528 - DNA, 25 bp, Homo sapien
gtaagatgcgctcgtcgccctgagc

SEQ ID NO: 4533529 - DNA, 25 bp, Homo sapien
ccttcccgtaagatgcgctcgtcgc

SEQ ID NO: 4533530 - DNA, 25 bp, Homo sapien
cttgttctggcgcacaggctgccaa

SEQ ID NO: 4533531 - DNA, 25 bp, Homo sapien
ctggcgcacaggctgccaagcagat

SEQ ID NO: 4533532 - DNA, 25 bp, Homo sapien
gttctggcgcacaggctgccaagca

SEQ ID NO: 4533533 - DNA, 25 bp, Homo sapien
ggcgcacaggctgccaagcagatga

SEQ ID NO: 4533534 - DNA, 25 bp, Homo sapien
agaaacaagcggagccacaaagcca

SEQ ID NO: 4533535 - DNA, 25 bp, Homo sapien
ccagaaacaagcggagccacaaagc

SEQ ID NO: 4533536 - DNA, 25 bp, Homo sapien
cgccagaaacaagcggagccacaaa

SEQ ID NO: 4533537 - DNA, 25 bp, Homo sapien
cgcgccagaaacaagcggagccaca

SEQ ID NO: 4533538 - DNA, 25 bp, Homo sapien
cccaggtggcttcgtccttttgcca

SEQ ID NO: 4533539 - DNA, 25 bp, Homo sapien
tgggtccaactcatcgctgaagttg

SEQ ID NO: 4533540 - DNA, 25 bp, Homo sapien
caactcatcgctgaagttggcagcc

SEQ ID NO: 4533541 - DNA, 25 bp, Homo sapien
ggcttcgtccttttgccaactctgg

SEQ ID NO: 4533542 - DNA, 25 bp, Homo sapien
tgcagccagcattcgaccagtgtac

SEQ ID NO: 4533543 - DNA, 25 bp, Homo sapien
tgaacgaggtgattacacacagccg

SEQ ID NO: 4533544 - DNA, 25 bp, Homo sapien
tctaagcgggtcaggcctacagtat

SEQ ID NO: 4533545 - DNA, 25 bp, Homo sapien
aaataagtggccatagtgacctcag

SEQ ID NO: 4533546 - DNA, 25 bp, Homo sapien
gagaggacgggcctcccaacacgcg

SEQ ID NO: 4533547 - DNA, 25 bp, Homo sapien
gccttgggcgcaggcatctggagct

SEQ ID NO: 4533548 - DNA, 25 bp, Homo sapien
tcttcgagcgttcctgggcttcccg

SEQ ID NO: 4533549 - DNA, 25 bp, Homo sapien
ggtgcccatgccccgaagttcggga

SEQ ID NO: 4533550 - DNA, 25 bp, Homo sapien
tctgctccctagtgacctacctggg

SEQ ID NO: 4533551 - DNA, 25 bp, Homo sapien
ggtttccatcatgtcaaggtcacag

SEQ ID NO: 4533552 - DNA, 25 bp, Homo sapien
cctgtactgtgcatcgtgagggcca

SEQ ID NO: 4533553 - DNA, 25 bp, Homo sapien
tctacctggccagtggagtggtcca

SEQ ID NO: 4533554 - DNA, 25 bp, Homo sapien
gacacacgatgcagttcagacagga

SEQ ID NO: 4533555 - DNA, 25 bp, Homo sapien
tgcataatcggcaggtcccaaggga

SEQ ID NO: 4533556 - DNA, 25 bp, Homo sapien
cccaagggaagggttggcagctcca

SEQ ID NO: 4533557 - DNA, 25 bp, Homo sapien
gatcttagggtaccaagtgccagca

SEQ ID NO: 4533558 - DNA, 25 bp, Homo sapien
agttgctggcgagaaaccttccgta

SEQ ID NO: 4533559 - DNA, 25 bp, Homo sapien
aatgcatctgagctgaagagcgggc

SEQ ID NO: 4533560 - DNA, 25 bp, Homo sapien
tataatttaaacctggacccgcagc

SEQ ID NO: 4533561 - DNA, 25 bp, Homo sapien
tgtagcctacggaaccagtcaatcg

SEQ ID NO: 4533562 - DNA, 25 bp, Homo sapien
gctgtggagcgtcggcgcaaaccca

SEQ ID NO: 4533563 - DNA, 25 bp, Homo sapien
ctcggttaccgcacctagagccagg

SEQ ID NO: 4533564 - DNA, 25 bp, Homo sapien
ttcggcccaggcaccgagacagaca

SEQ ID NO: 4533565 - DNA, 25 bp, Homo sapien
agagcgttggcctctaactccgggc

SEQ ID NO: 4533566 - DNA, 25 bp, Homo sapien
attcttgcccgctgagccagcctcg

SEQ ID NO: 4533567 - DNA, 25 bp, Homo sapien
cggtgccggcccgaattcttgcccg

SEQ ID NO: 4533568 - DNA, 25 bp, Homo sapien
tgcgcccggtgccggcccgaattct

SEQ ID NO: 4533569 - DNA, 25 bp, Homo sapien
ggcccgaattcttgcccgctgagcc

SEQ ID NO: 4533570 - DNA, 25 bp, Homo sapien
tatcggagttggagccccgggccgc

SEQ ID NO: 4533571 - DNA, 25 bp, Homo sapien
gcgggggctgggtcgtcgatgctcg

SEQ ID NO: 4533572 - DNA, 25 bp, Homo sapien
gcggccagggggactatcggagttg

SEQ ID NO: 4533573 - DNA, 25 bp, Homo sapien
tcgcgcaaagcgcgccaggagaggc

SEQ ID NO: 4533574 - DNA, 25 bp, Homo sapien
agttgcagcgcggtgagccccgcac

SEQ ID NO: 4533575 - DNA, 25 bp, Homo sapien
gccagttgcagcgcggtgagccccg

SEQ ID NO: 4533576 - DNA, 25 bp, Homo sapien
gcggcggccagttgcagcgcggtga

SEQ ID NO: 4533577 - DNA, 25 bp, Homo sapien
cggcggccagttgcagcgcggtgag

SEQ ID NO: 4533578 - DNA, 25 bp, Homo sapien
tggtgcggtcgaggcgcaggcctag

SEQ ID NO: 4533579 - DNA, 25 bp, Homo sapien
cggtcgaggcgcaggcctaggcggc

SEQ ID NO: 4533580 - DNA, 25 bp, Homo sapien
ggttggtgcggtcgaggcgcaggcc

SEQ ID NO: 4533581 - DNA, 25 bp, Homo sapien
ggcgcaggcctaggcggcggaagga

SEQ ID NO: 4533582 - DNA, 25 bp, Homo sapien
tccgcgcggcagtcgatgatgctgc

SEQ ID NO: 4533583 - DNA, 25 bp, Homo sapien
acgaagcgggccaagtgcactttgc

SEQ ID NO: 4533584 - DNA, 25 bp, Homo sapien
acatcaccgggctgttgcccgcaga

SEQ ID NO: 4533585 - DNA, 25 bp, Homo sapien
cgctcgtctcgcaggttcactgcag

SEQ ID NO: 4533586 - DNA, 25 bp, Homo sapien
gcgcccctgttctcgcgccccgcgg

SEQ ID NO: 4533587 - DNA, 25 bp, Homo sapien
cgcacgggggcgcccctgttctcgc

SEQ ID NO: 4533588 - DNA, 25 bp, Homo sapien
cgggcagcctggcagttccgcacgg

SEQ ID NO: 4533589 - DNA, 25 bp, Homo sapien
gggcgcccctgttctcgcgccccgc

SEQ ID NO: 4533590 - DNA, 25 bp, Homo sapien
taggccttcaaggatgtgcgggatc

SEQ ID NO: 4533591 - DNA, 25 bp, Homo sapien
tcggttctgggtgcgagacgttcca

SEQ ID NO: 4533592 - DNA, 25 bp, Homo sapien
gcacattttgttgccggcagcgggt

SEQ ID NO: 4533593 - DNA, 25 bp, Homo sapien
aaaatggacgttgtcacctgagggc

SEQ ID NO: 4533594 - DNA, 25 bp, Homo sapien
gtaactgggcaggaatgctctcctt

SEQ ID NO: 4533595 - DNA, 25 bp, Homo sapien
ggaatggatagagactctccacccc

SEQ ID NO: 4533596 - DNA, 25 bp, Homo sapien
tcagaggagggtgtacccctggaac

SEQ ID NO: 4533597 - DNA, 25 bp, Homo sapien
catagttatttagagtgcagccctc

SEQ ID NO: 4533598 - DNA, 25 bp, Homo sapien
aaatgatgctgaccttgtcaggcag

SEQ ID NO: 4533599 - DNA, 25 bp, Homo sapien
cactgggacgaggttctttaatagg

SEQ ID NO: 4533600 - DNA, 25 bp, Homo sapien
tctttaataggagtaggaaagagaa

SEQ ID NO: 4533601 - DNA, 25 bp, Homo sapien
gcaaatgatgctgaccttgtcaggc

SEQ ID NO: 4533602 - DNA, 25 bp, Homo sapien
ttgtgactcagccaagcagggccaa

SEQ ID NO: 4533603 - DNA, 25 bp, Homo sapien
cctcccgttccggacaggcagaggg

SEQ ID NO: 4533604 - DNA, 25 bp, Homo sapien
acatggtaggaactgcctgccccca

SEQ ID NO: 4533605 - DNA, 25 bp, Homo sapien
ctgagaggggtacatggtaggaact

SEQ ID NO: 4533606 - DNA, 25 bp, Homo sapien
tcaaggagtggacaaggccaactca

SEQ ID NO: 4533607 - DNA, 25 bp, Homo sapien
tgggtccaaccctccaggtgaggaa

SEQ ID NO: 4533608 - DNA, 25 bp, Homo sapien
gcccagagctggttgctcaatagga

SEQ ID NO: 4533609 - DNA, 25 bp, Homo sapien
cactttctgccttccagtccatagt

SEQ ID NO: 4533610 - DNA, 25 bp, Homo sapien
cctgccgtgagggtgcctgggtcct

SEQ ID NO: 4533611 - DNA, 25 bp, Homo sapien
agactctggcctggccgttgaggag

SEQ ID NO: 4533612 - DNA, 25 bp, Homo sapien
aatatatgacacttatctagagatg

SEQ ID NO: 4533613 - DNA, 25 bp, Homo sapien
agaagacttctaggccccagagagg

SEQ ID NO: 4533614 - DNA, 25 bp, Homo sapien
ggttcccacagcctcagaaggctgg

SEQ ID NO: 4533615 - DNA, 25 bp, Homo sapien
gcctcagaaggctggggctcctttt

SEQ ID NO: 4533616 - DNA, 25 bp, Homo sapien
cacaggttcccacagcctcagaagg

SEQ ID NO: 4533617 - DNA, 25 bp, Homo sapien
cctcagaaggctggggctccttttt

SEQ ID NO: 4533618 - DNA, 25 bp, Homo sapien
gaacctccttgctaaatgtcccagt

SEQ ID NO: 4533619 - DNA, 25 bp, Homo sapien
ctgggggaatagaaccacatcccag

SEQ ID NO: 4533620 - DNA, 25 bp, Homo sapien
gaaggggctgaacctccttgctaaa

SEQ ID NO: 4533621 - DNA, 25 bp, Homo sapien
ccttgctaaatgtcccagtgggatg

SEQ ID NO: 4533622 - DNA, 25 bp, Homo sapien
ttcatcctggcctcgtactctgcca

SEQ ID NO: 4533623 - DNA, 25 bp, Homo sapien
tctggggggcactcgcaggccctct

SEQ ID NO: 4533624 - DNA, 25 bp, Homo sapien
tgtccttggcctcggagggaaagca

SEQ ID NO: 4533625 - DNA, 25 bp, Homo sapien
tatgagtgggtcctgctcacacagc

SEQ ID NO: 4533626 - DNA, 25 bp, Homo sapien
cccggaacccattcagttctgctgg

SEQ ID NO: 4533627 - DNA, 25 bp, Homo sapien
acccggaacccattcagttctgctg

SEQ ID NO: 4533628 - DNA, 25 bp, Homo sapien
aacccggaacccattcagttctgct

SEQ ID NO: 4533629 - DNA, 25 bp, Homo sapien
acaacccggaacccattcagttctg

SEQ ID NO: 4533630 - DNA, 25 bp, Homo sapien
gcttttccatctcccgtatctgttc

SEQ ID NO: 4533631 - DNA, 25 bp, Homo sapien
ttttccatctcccgtatctgttcca

SEQ ID NO: 4533632 - DNA, 25 bp, Homo sapien
ctgttccaggcaagccgcctgcttc

SEQ ID NO: 4533633 - DNA, 25 bp, Homo sapien
gttccaggcaagccgcctgcttctc

SEQ ID NO: 4533634 - DNA, 25 bp, Homo sapien
tcacctgcactacttcctggatgtg

SEQ ID NO: 4533635 - DNA, 25 bp, Homo sapien
gtgggagttgttaatctctctcttc

SEQ ID NO: 4533636 - DNA, 25 bp, Homo sapien
cctggatgtgggagttgttaatctc

SEQ ID NO: 4533637 - DNA, 25 bp, Homo sapien
tgcttgatcacctgcactacttcct

SEQ ID NO: 4533638 - DNA, 25 bp, Homo sapien
aaatccaacatagggcaggaaccag

SEQ ID NO: 4533639 - DNA, 25 bp, Homo sapien
tccatttgtagagaggcccctttcc

SEQ ID NO: 4533640 - DNA, 25 bp, Homo sapien
tggacaggctacaatcccaaggcct

SEQ ID NO: 4533641 - DNA, 25 bp, Homo sapien
tgcccatgtagtgttggcctccgtg

SEQ ID NO: 4533642 - DNA, 25 bp, Homo sapien
ggtcatgccctggatccgctccagt

SEQ ID NO: 4533643 - DNA, 25 bp, Homo sapien
cctggatccgctccagtctctttgt

SEQ ID NO: 4533644 - DNA, 25 bp, Homo sapien
ccctggatccgctccagtctctttg

SEQ ID NO: 4533645 - DNA, 25 bp, Homo sapien
tttggtcatgccctggatccgctcc

SEQ ID NO: 4533646 - DNA, 25 bp, Homo sapien
gaaggagctgttttgtgcggctgag

SEQ ID NO: 4533647 - DNA, 25 bp, Homo sapien
agctgttttgtgcggctgagccctt

SEQ ID NO: 4533648 - DNA, 25 bp, Homo sapien
aggagctgttttgtgcggctgagcc

SEQ ID NO: 4533649 - DNA, 25 bp, Homo sapien
gagctgttttgtgcggctgagccct

SEQ ID NO: 4533650 - DNA, 25 bp, Homo sapien
ctggccagctccatcattttggaga

SEQ ID NO: 4533651 - DNA, 25 bp, Homo sapien
agctctgccgcctgtttctctctgg

SEQ ID NO: 4533652 - DNA, 25 bp, Homo sapien
gggccttcagctctgccgcctgttt

SEQ ID NO: 4533653 - DNA, 25 bp, Homo sapien
ttctccgacgtctccttcagggcct

SEQ ID NO: 4533654 - DNA, 25 bp, Homo sapien
gcttggcgagaagccctttgttgtt

SEQ ID NO: 4533655 - DNA, 25 bp, Homo sapien
aggaagtaagcttggcgagaagccc

SEQ ID NO: 4533656 - DNA, 25 bp, Homo sapien
cagggagaggaagtaagcttggcga

SEQ ID NO: 4533657 - DNA, 25 bp, Homo sapien
cctttgttgttcagagggagtacgg

SEQ ID NO: 4533658 - DNA, 25 bp, Homo sapien
ccacgtgctgctccttgcgcttcag

SEQ ID NO: 4533659 - DNA, 25 bp, Homo sapien
gctgctccttgcgcttcagaacgca

SEQ ID NO: 4533660 - DNA, 25 bp, Homo sapien
acgtgctgctccttgcgcttcagaa

SEQ ID NO: 4533661 - DNA, 25 bp, Homo sapien
gtgctgctccttgcgcttcagaacg

SEQ ID NO: 4533662 - DNA, 25 bp, Homo sapien
actgctcctcgccctgccgcagcag

SEQ ID NO: 4533663 - DNA, 25 bp, Homo sapien
cgtactgctcctcgccctgccgcag

SEQ ID NO: 4533664 - DNA, 25 bp, Homo sapien
gtactgctcctcgccctgccgcagc

SEQ ID NO: 4533665 - DNA, 25 bp, Homo sapien
tcgtactgctcctcgccctgccgca

SEQ ID NO: 4533666 - DNA, 25 bp, Homo sapien
cggcgctctcctcgcggggcaggct

SEQ ID NO: 4533667 - DNA, 25 bp, Homo sapien
cccgtccacgccctcagggccctcg

SEQ ID NO: 4533668 - DNA, 25 bp, Homo sapien
tccacgccctcagggccctcgcccg

SEQ ID NO: 4533669 - DNA, 25 bp, Homo sapien
cgcacgcgcccgtccacgccctcag

SEQ ID NO: 4533670 - DNA, 25 bp, Homo sapien
ccctgagatcctgcgccacccgcgc

SEQ ID NO: 4533671 - DNA, 25 bp, Homo sapien
tgcgccacccgcgctgcagagggca

SEQ ID NO: 4533672 - DNA, 25 bp, Homo sapien
gatcctgcgccacccgcgctgcaga

SEQ ID NO: 4533673 - DNA, 25 bp, Homo sapien
gggcagggcaccgccacgagcctta

SEQ ID NO: 4533674 - DNA, 25 bp, Homo sapien
gccgctccaactctcgcagctcctt

SEQ ID NO: 4533675 - DNA, 25 bp, Homo sapien
cttgccgggaccgagcttgcaggcc

SEQ ID NO: 4533676 - DNA, 25 bp, Homo sapien
agctccttctcgtgccgccgctgca

SEQ ID NO: 4533677 - DNA, 25 bp, Homo sapien
tgcagcttcaccacgccctttagct

SEQ ID NO: 4533678 - DNA, 25 bp, Homo sapien
gcagcttctttcatagcctcttccc

SEQ ID NO: 4533679 - DNA, 25 bp, Homo sapien
tcttccctggccccggccctggctg

SEQ ID NO: 4533680 - DNA, 25 bp, Homo sapien
agcttctttcatagcctcttccctg

SEQ ID NO: 4533681 - DNA, 25 bp, Homo sapien
ccgcagcttctttcatagcctcttc

SEQ ID NO: 4533682 - DNA, 25 bp, Homo sapien
ttggctccgttcgcctcctccacac

SEQ ID NO: 4533683 - DNA, 25 bp, Homo sapien
cttggctccgttcgcctcctccaca

SEQ ID NO: 4533684 - DNA, 25 bp, Homo sapien
cccttggctccgttcgcctcctcca

SEQ ID NO: 4533685 - DNA, 25 bp, Homo sapien
ggctccgttcgcctcctccacaccg

SEQ ID NO: 4533686 - DNA, 25 bp, Homo sapien
tggcaactggactcgccagtgggaa

SEQ ID NO: 4533687 - DNA, 25 bp, Homo sapien
gacccattgctcgttggggccaacg

SEQ ID NO: 4533688 - DNA, 25 bp, Homo sapien
ctggtgacccattgctcgttggggc

SEQ ID NO: 4533689 - DNA, 25 bp, Homo sapien
ggccaacgccccattgacctggctg

SEQ ID NO: 4533690 - DNA, 25 bp, Homo sapien
gagcttcacagacttcgtgtcatgg

SEQ ID NO: 4533691 - DNA, 25 bp, Homo sapien
cactgaagaacttaatggggttggc

SEQ ID NO: 4533692 - DNA, 25 bp, Homo sapien
cttgagcttcacagacttcgtgtca

SEQ ID NO: 4533693 - DNA, 25 bp, Homo sapien
ttcacagacttcgtgtcatgggcac

SEQ ID NO: 4533694 - DNA, 25 bp, Homo sapien
caggtatgtagtccttcatctccag

SEQ ID NO: 4533695 - DNA, 25 bp, Homo sapien
gatgaagagcgcaggcatggtgagg

SEQ ID NO: 4533696 - DNA, 25 bp, Homo sapien
accaggtatgtagtccttcatctcc

SEQ ID NO: 4533697 - DNA, 25 bp, Homo sapien
ggaagatgaagagcgcaggcatggt

SEQ ID NO: 4533698 - DNA, 25 bp, Homo sapien
atcacagccactctgagggaggcca

SEQ ID NO: 4533699 - DNA, 25 bp, Homo sapien
aatttagggcattgatggggatgat

SEQ ID NO: 4533700 - DNA, 25 bp, Homo sapien
ccaagaaacttgttgccttcctcca

SEQ ID NO: 4533701 - DNA, 25 bp, Homo sapien
gggatgatgcggtgtccaagaaact

SEQ ID NO: 4533702 - DNA, 25 bp, Homo sapien
cttctgtaaacttgggttttgcact

SEQ ID NO: 4533703 - DNA, 25 bp, Homo sapien
gcttagttcgatagcgcctcttggg

SEQ ID NO: 4533704 - DNA, 25 bp, Homo sapien
cttctcaaagacaaagggctcctcc

SEQ ID NO: 4533705 - DNA, 25 bp, Homo sapien
cacgctgcgttctgacaggaactgc

SEQ ID NO: 4533706 - DNA, 25 bp, Homo sapien
cacttctacataggtgcgcacgctg

SEQ ID NO: 4533707 - DNA, 25 bp, Homo sapien
caggaaaaccagcatcaaatcccca

SEQ ID NO: 4533708 - DNA, 25 bp, Homo sapien
cctggctgcctagagctgaagcatt

SEQ ID NO: 4533709 - DNA, 25 bp, Homo sapien
tgttatgaagaacctcactcagctc

SEQ ID NO: 4533710 - DNA, 25 bp, Homo sapien
agcattcgttcttgggtgttatgaa

SEQ ID NO: 4533711 - DNA, 25 bp, Homo sapien
cctccctagccaaagagggaacaat

SEQ ID NO: 4533712 - DNA, 25 bp, Homo sapien
tcagcccttcccgttggtttccatg

SEQ ID NO: 4533713 - DNA, 25 bp, Homo sapien
tggcagcctccagtgctgaggagga

SEQ ID NO: 4533714 - DNA, 25 bp, Homo sapien
caacttgctactgcaggaactggct

SEQ ID NO: 4533715 - DNA, 25 bp, Homo sapien
gttgaactgcttgtccggccggcgc

SEQ ID NO: 4533716 - DNA, 25 bp, Homo sapien
acgtcgatgcggtccactgagaagg

SEQ ID NO: 4533717 - DNA, 25 bp, Homo sapien
gccgctctgcccgttgaactcaaat

SEQ ID NO: 4533718 - DNA, 25 bp, Homo sapien
gcatgaactcatgcttgaggaggta

SEQ ID NO: 4533719 - DNA, 25 bp, Homo sapien
gggtaaatgcggctcatctggcgct

SEQ ID NO: 4533720 - DNA, 25 bp, Homo sapien
tgcggctcatctggcgcttgttgta

SEQ ID NO: 4533721 - DNA, 25 bp, Homo sapien
ctggcatccagcattccagaacatc

SEQ ID NO: 4533722 - DNA, 25 bp, Homo sapien
agttgagggcaaccatctggcatcc

SEQ ID NO: 4533723 - DNA, 25 bp, Homo sapien
tgagctctgtgaaggacgagatgac

SEQ ID NO: 4533724 - DNA, 25 bp, Homo sapien
agagcaggtcatatgccttgagctc

SEQ ID NO: 4533725 - DNA, 25 bp, Homo sapien
caggtcatatgccttgagctctgtg

SEQ ID NO: 4533726 - DNA, 25 bp, Homo sapien
cgagatgacataacttcggttcttt

SEQ ID NO: 4533727 - DNA, 25 bp, Homo sapien
ctggatgtaattgactaggctggac

SEQ ID NO: 4533728 - DNA, 25 bp, Homo sapien
gagaactcaaaggagacgaacttgg

SEQ ID NO: 4533729 - DNA, 25 bp, Homo sapien
atctcctcataagccgtcacttcca

SEQ ID NO: 4533730 - DNA, 25 bp, Homo sapien
tcataagccgtcacttccaggcccg

SEQ ID NO: 4533731 - DNA, 25 bp, Homo sapien
cttaatctcttcttcatccaggttt

SEQ ID NO: 4533732 - DNA, 25 bp, Homo sapien
ttaatctcttcttcatccaggtttc

SEQ ID NO: 4533733 - DNA, 25 bp, Homo sapien
ctcatccgactgcatcttcttaatc

SEQ ID NO: 4533734 - DNA, 25 bp, Homo sapien
atccgactgcatcttcttaatctct

SEQ ID NO: 4533735 - DNA, 25 bp, Homo sapien
ctcagtcccttcctcgccagcccac

SEQ ID NO: 4533736 - DNA, 25 bp, Homo sapien
tcagtcccttcctcgccagcccaca

SEQ ID NO: 4533737 - DNA, 25 bp, Homo sapien
aggatcttgcccctgagatcctcag

SEQ ID NO: 4533738 - DNA, 25 bp, Homo sapien
gatcttgcccctgagatcctcaggg

SEQ ID NO: 4533739 - DNA, 25 bp, Homo sapien
caccagtatccttactggaggaggt

SEQ ID NO: 4533740 - DNA, 25 bp, Homo sapien
tccccaccagtatccttactggagg

SEQ ID NO: 4533741 - DNA, 25 bp, Homo sapien
aggcccaaggctcaaatgtcccaca

SEQ ID NO: 4533742 - DNA, 25 bp, Homo sapien
caggcccaaggctcaaatgtcccac

SEQ ID NO: 4533743 - DNA, 25 bp, Homo sapien
cgtccggcaatactcagccatctta

SEQ ID NO: 4533744 - DNA, 25 bp, Homo sapien
tccccaaagatcgtccggcaatact

SEQ ID NO: 4533745 - DNA, 25 bp, Homo sapien
gctctgtgagcagcatatccccaaa

SEQ ID NO: 4533746 - DNA, 25 bp, Homo sapien
gcagcatatccccaaagatcgtccg

SEQ ID NO: 4533747 - DNA, 25 bp, Homo sapien
agcaccaaccctattatgcatcctt

SEQ ID NO: 4533748 - DNA, 25 bp, Homo sapien
ggatggggttcagccgctcagcacc

SEQ ID NO: 4533749 - DNA, 25 bp, Homo sapien
ggggatggggttcagccgctcagca

SEQ ID NO: 4533750 - DNA, 25 bp, Homo sapien
ctgcggggagcaaaagcggggatgg

SEQ ID NO: 4533751 - DNA, 25 bp, Homo sapien
ttctcaaacgacaggatgatgggat

SEQ ID NO: 4533752 - DNA, 25 bp, Homo sapien
tcaaacgacaggatgatgggatagg

SEQ ID NO: 4533753 - DNA, 25 bp, Homo sapien
ggttctcaaacgacaggatgatggg

SEQ ID NO: 4533754 - DNA, 25 bp, Homo sapien
tctcaaacgacaggatgatgggata

SEQ ID NO: 4533755 - DNA, 25 bp, Homo sapien
gcagtctagctccacgcaacggcag

SEQ ID NO: 4533756 - DNA, 25 bp, Homo sapien
cggtacatctcagccgaggagaggc

SEQ ID NO: 4533757 - DNA, 25 bp, Homo sapien
catgggtgataatgggctcctcgtc

SEQ ID NO: 4533758 - DNA, 25 bp, Homo sapien
gagagcagcacctggcggtacatct

SEQ ID NO: 4533759 - DNA, 25 bp, Homo sapien
tggcccacagagaaaccagaccatg

SEQ ID NO: 4533760 - DNA, 25 bp, Homo sapien
tgggacgagttgatgaagtaatgat

SEQ ID NO: 4533761 - DNA, 25 bp, Homo sapien
gaaaccagaccatgccttcaggtga

SEQ ID NO: 4533762 - DNA, 25 bp, Homo sapien
tgcgtcatgtcgtggtggagcagca

SEQ ID NO: 4533763 - DNA, 25 bp, Homo sapien
cctgcacctggtcaggccgtgctgg

SEQ ID NO: 4533764 - DNA, 25 bp, Homo sapien
tggtcaggtgctccttcgtcatgta

SEQ ID NO: 4533765 - DNA, 25 bp, Homo sapien
ccctctgtgcattgatgccactggg

SEQ ID NO: 4533766 - DNA, 25 bp, Homo sapien
tcatacttgtcgatgaggccctgca

SEQ ID NO: 4533767 - DNA, 25 bp, Homo sapien
ctatttctggccgaggacagaggct

SEQ ID NO: 4533768 - DNA, 25 bp, Homo sapien
tcatctatttctggccgaggacaga

SEQ ID NO: 4533769 - DNA, 25 bp, Homo sapien
tttctggccgaggacagaggctcat

SEQ ID NO: 4533770 - DNA, 25 bp, Homo sapien
tctggccgaggacagaggctcatga

SEQ ID NO: 4533771 - DNA, 25 bp, Homo sapien
tcagagctaagaaccacaaactcgg

SEQ ID NO: 4533772 - DNA, 25 bp, Homo sapien
cttctcagagctaagaaccacaaac

SEQ ID NO: 4533773 - DNA, 25 bp, Homo sapien
agagctaagaaccacaaactcggcc

SEQ ID NO: 4533774 - DNA, 25 bp, Homo sapien
gctaagaaccacaaactcggcccag

SEQ ID NO: 4533775 - DNA, 25 bp, Homo sapien
tccaagcaaagttgggtcagtagcc

SEQ ID NO: 4533776 - DNA, 25 bp, Homo sapien
agtagcctctactgagacacaagga

SEQ ID NO: 4533777 - DNA, 25 bp, Homo sapien
tcagaatcacactggaaggccaaca

SEQ ID NO: 4533778 - DNA, 25 bp, Homo sapien
cagtcttagtttggagcagagggtc

SEQ ID NO: 4533779 - DNA, 25 bp, Homo sapien
tggctgtggggtaaatgctcctcct

SEQ ID NO: 4533780 - DNA, 25 bp, Homo sapien
gctgaccacaggtaagtgttgctgg

SEQ ID NO: 4533781 - DNA, 25 bp, Homo sapien
gccgcaggagcccattcctacctct

SEQ ID NO: 4533782 - DNA, 25 bp, Homo sapien
cccaacgccacatttggatccctgt

SEQ ID NO: 4533783 - DNA, 25 bp, Homo sapien
cagggccatatcagcccagagggct

SEQ ID NO: 4533784 - DNA, 25 bp, Homo sapien
catcttggcagcttccgcctttggt

SEQ ID NO: 4533785 - DNA, 25 bp, Homo sapien
gggtgaccctgcttacaacttgtaa

SEQ ID NO: 4533786 - DNA, 25 bp, Homo sapien
gctgagattcgctccattggccagg

SEQ ID NO: 4533787 - DNA, 25 bp, Homo sapien
ccaacactagactgggaatgcatgc

SEQ ID NO: 4533788 - DNA, 25 bp, Homo sapien
aatgcatgccgtttctgctgcctgc

SEQ ID NO: 4533789 - DNA, 25 bp, Homo sapien
ggtaggggatacagacaaacctgct

SEQ ID NO: 4533790 - DNA, 25 bp, Homo sapien
tgaaaacattcacgctcagctccca

SEQ ID NO: 4533791 - DNA, 25 bp, Homo sapien
tttgcctttggggaggtggcaggca

SEQ ID NO: 4533792 - DNA, 25 bp, Homo sapien
ttgcctttggggaggtggcaggcac

SEQ ID NO: 4533793 - DNA, 25 bp, Homo sapien
agcttccacccgcttgcggtcagca

SEQ ID NO: 4533794 - DNA, 25 bp, Homo sapien
ttccacccgcttgcggtcagcagga

SEQ ID NO: 4533795 - DNA, 25 bp, Homo sapien
cacccgcttgcggtcagcaggaaac

SEQ ID NO: 4533796 - DNA, 25 bp, Homo sapien
acccgcttgcggtcagcaggaaaca

SEQ ID NO: 4533797 - DNA, 25 bp, Homo sapien
atcttcccttcagagttgagctgca

SEQ ID NO: 4533798 - DNA, 25 bp, Homo sapien
ccttcagagttgagctgcatcttga

SEQ ID NO: 4533799 - DNA, 25 bp, Homo sapien
ttcttcaccggaatcttcccttcag

SEQ ID NO: 4533800 - DNA, 25 bp, Homo sapien
ttcccttcagagttgagctgcatct

SEQ ID NO: 4533801 - DNA, 25 bp, Homo sapien
cgttggccgtcagcggatgtttgac

SEQ ID NO: 4533802 - DNA, 25 bp, Homo sapien
gatgtttgactagggccagtacgtc

SEQ ID NO: 4533803 - DNA, 25 bp, Homo sapien
cgtcagcggatgtttgactagggcc

SEQ ID NO: 4533804 - DNA, 25 bp, Homo sapien
gcggatgtttgactagggccagtac

SEQ ID NO: 4533805 - DNA, 25 bp, Homo sapien
taggagacgaagttgtggaaggtga

SEQ ID NO: 4533806 - DNA, 25 bp, Homo sapien
caccaccgtgagtgtcttcagcagg

SEQ ID NO: 4533807 - DNA, 25 bp, Homo sapien
ctgttatcaggaaagtccatgttga

SEQ ID NO: 4533808 - DNA, 25 bp, Homo sapien
tgttgaagacgtcccggagcttctg

SEQ ID NO: 4533809 - DNA, 25 bp, Homo sapien
cccaaagcgagtatcccggatgctg

SEQ ID NO: 4533810 - DNA, 25 bp, Homo sapien
ttcccaaagcgagtatcccggatgc

SEQ ID NO: 4533811 - DNA, 25 bp, Homo sapien
ctggtgatatccagaaactccatct

SEQ ID NO: 4533812 - DNA, 25 bp, Homo sapien
acttcccaaagcgagtatcccggat

SEQ ID NO: 4533813 - DNA, 25 bp, Homo sapien
gtataagtagtagcccttaggatcc

SEQ ID NO: 4533814 - DNA, 25 bp, Homo sapien
cttactttgatacgtccagtataag

SEQ ID NO: 4533815 - DNA, 25 bp, Homo sapien
gatccacacggaggataactggaga

SEQ ID NO: 4533816 - DNA, 25 bp, Homo sapien
gcccttaggatccacacggaggata

SEQ ID NO: 4533817 - DNA, 25 bp, Homo sapien
ggtggacaagtcagcactaagggct

SEQ ID NO: 4533818 - DNA, 25 bp, Homo sapien
tctaactctcagactgggcgagccc

SEQ ID NO: 4533819 - DNA, 25 bp, Homo sapien
catagtcatgggcagcgagatcccc

SEQ ID NO: 4533820 - DNA, 25 bp, Homo sapien
cagccccgtgtaggaaggaacagac

SEQ ID NO: 4533821 - DNA, 25 bp, Homo sapien
tgatgaagcgctccccttggctcag

SEQ ID NO: 4533822 - DNA, 25 bp, Homo sapien
tttgatgaagcgctccccttggctc

SEQ ID NO: 4533823 - DNA, 25 bp, Homo sapien
cccatttgatgaagcgctccccttg

SEQ ID NO: 4533824 - DNA, 25 bp, Homo sapien
ccatttgatgaagcgctccccttgg

SEQ ID NO: 4533825 - DNA, 25 bp, Homo sapien
cccgagctgctccagaaatctagtt

SEQ ID NO: 4533826 - DNA, 25 bp, Homo sapien
tcaaatggcacccatccccgagctg

SEQ ID NO: 4533827 - DNA, 25 bp, Homo sapien
tctagttgctcttatagcccctggg

SEQ ID NO: 4533828 - DNA, 25 bp, Homo sapien
ggtgccaagcgttcctctttgcaga

SEQ ID NO: 4533829 - DNA, 25 bp, Homo sapien
cacagaggcaatagccacaaatgca

SEQ ID NO: 4533830 - DNA, 25 bp, Homo sapien
cagccacagaggcaatagccacaaa

SEQ ID NO: 4533831 - DNA, 25 bp, Homo sapien
gccacagaggcaatagccacaaatg

SEQ ID NO: 4533832 - DNA, 25 bp, Homo sapien
agaggcaatagccacaaatgcagat

SEQ ID NO: 4533833 - DNA, 25 bp, Homo sapien
caacatcgcggacaaccttcaggaa

SEQ ID NO: 4533834 - DNA, 25 bp, Homo sapien
cactggcaacatcgcggacaacctt

SEQ ID NO: 4533835 - DNA, 25 bp, Homo sapien
ggaagcaagaaggaagtttcctctg

SEQ ID NO: 4533836 - DNA, 25 bp, Homo sapien
tcgcggacaaccttcaggaagcaag

SEQ ID NO: 4533837 - DNA, 25 bp, Homo sapien
ttgtcagatgcctgctggatgacca

SEQ ID NO: 4533838 - DNA, 25 bp, Homo sapien
gagggagaaatgctcggcgtgttca

SEQ ID NO: 4533839 - DNA, 25 bp, Homo sapien
ggagggagaaatgctcggcgtgttc

SEQ ID NO: 4533840 - DNA, 25 bp, Homo sapien
gattttagtggtgattcctaaagcc

SEQ ID NO: 4533841 - DNA, 25 bp, Homo sapien
ttagtggtgattcctaaagcctgga

SEQ ID NO: 4533842 - DNA, 25 bp, Homo sapien
ggagattttagtggtgattcctaaa

SEQ ID NO: 4533843 - DNA, 25 bp, Homo sapien
tgattcctaaagcctggaaaaagga

SEQ ID NO: 4533844 - DNA, 25 bp, Homo sapien
gggcaatgggaccagcacaggtggc

SEQ ID NO: 4533845 - DNA, 25 bp, Homo sapien
acatggggcaatgggaccagcacag

SEQ ID NO: 4533846 - DNA, 25 bp, Homo sapien
tggggcaatgggaccagcacaggtg

SEQ ID NO: 4533847 - DNA, 25 bp, Homo sapien
gcaatgggaccagcacaggtggcag

SEQ ID NO: 4533848 - DNA, 25 bp, Homo sapien
tggtgaatgcaaagcccacattccc

SEQ ID NO: 4533849 - DNA, 25 bp, Homo sapien
ccacattcccccagatatgaggcag

SEQ ID NO: 4533850 - DNA, 25 bp, Homo sapien
attcccccagatatgaggcagcagt

SEQ ID NO: 4533851 - DNA, 25 bp, Homo sapien
aagcccacattcccccagatatgag

SEQ ID NO: 4533852 - DNA, 25 bp, Homo sapien
atgcagatctgctgcgtctgcttgg

SEQ ID NO: 4533853 - DNA, 25 bp, Homo sapien
cagatctgctgcgtctgcttggagc

SEQ ID NO: 4533854 - DNA, 25 bp, Homo sapien
cgtctgcttggagcccacattgctg

SEQ ID NO: 4533855 - DNA, 25 bp, Homo sapien
agatctgctgcgtctgcttggagcc

SEQ ID NO: 4533856 - DNA, 25 bp, Homo sapien
caaaagctggatgatcttgaagtag

SEQ ID NO: 4533857 - DNA, 25 bp, Homo sapien
tccaaaagctggatgatcttgaagt

SEQ ID NO: 4533858 - DNA, 25 bp, Homo sapien
catccaaaagctggatgatcttgaa

SEQ ID NO: 4533859 - DNA, 25 bp, Homo sapien
tttggataatcatccaaaagctgga

SEQ ID NO: 4533860 - DNA, 25 bp, Homo sapien
tagagaggccactcataggtccagc

SEQ ID NO: 4533861 - DNA, 25 bp, Homo sapien
tgagcctgtagtgacaaagcccggc

SEQ ID NO: 4533862 - DNA, 25 bp, Homo sapien
gaaccagctaatagaccagccgagg

SEQ ID NO: 4533863 - DNA, 25 bp, Homo sapien
caaagccttcactggaattgggaca

SEQ ID NO: 4533864 - DNA, 25 bp, Homo sapien
gggtggcaaccatccggactgatag

SEQ ID NO: 4533865 - DNA, 25 bp, Homo sapien
gaagaccctccacctttgaagagca

SEQ ID NO: 4533866 - DNA, 25 bp, Homo sapien
tgtgccacgctactgttaagacaga

SEQ ID NO: 4533867 - DNA, 25 bp, Homo sapien
tagcttacgagattaggcacgttca

SEQ ID NO: 4533868 - DNA, 25 bp, Homo sapien
gacatccttctggacgtcatccatg

SEQ ID NO: 4533869 - DNA, 25 bp, Homo sapien
caatgaagaggtcctgtgccagtct

SEQ ID NO: 4533870 - DNA, 25 bp, Homo sapien
gaaaagagctcaatgttacctgcct

SEQ ID NO: 4533871 - DNA, 25 bp, Homo sapien
tctgttccctccaatgtctataact

SEQ ID NO: 4533872 - DNA, 25 bp, Homo sapien
tagccccgtcctttgggagtcatgg

SEQ ID NO: 4533873 - DNA, 25 bp, Homo sapien
cagtgtcacactccaaagccatgtt

SEQ ID NO: 4533874 - DNA, 25 bp, Homo sapien
cattgtgagggctgaacccgagctc

SEQ ID NO: 4533875 - DNA, 25 bp, Homo sapien
gcatatgccccttcgtggaggcgca

SEQ ID NO: 4533876 - DNA, 25 bp, Homo sapien
ccctggcataggtgtgtctcacata

SEQ ID NO: 4533877 - DNA, 25 bp, Homo sapien
tgagcttggagtctttgccctggca

SEQ ID NO: 4533878 - DNA, 25 bp, Homo sapien
tagaaatacgaattctcggccaggt

SEQ ID NO: 4533879 - DNA, 25 bp, Homo sapien
tctggtctgctaaagagatgcccct

SEQ ID NO: 4533880 - DNA, 25 bp, Homo sapien
gcgcatggttactgggattcccctg

SEQ ID NO: 4533881 - DNA, 25 bp, Homo sapien
tccggataattcagcagacgtgggc

SEQ ID NO: 4533882 - DNA, 25 bp, Homo sapien
tgcccgtgcgtgaaaacacacatgt

SEQ ID NO: 4533883 - DNA, 25 bp, Homo sapien
gccacagcttgtgcggagtccggat

SEQ ID NO: 4533884 - DNA, 25 bp, Homo sapien
acactgctcagtgacaatggcgcaa

SEQ ID NO: 4533885 - DNA, 25 bp, Homo sapien
tgacaatggcgcaagccaccggcaa

SEQ ID NO: 4533886 - DNA, 25 bp, Homo sapien
aaccacatggccatcacgcggaggg

SEQ ID NO: 4533887 - DNA, 25 bp, Homo sapien
gagggcctttaacagagtgattccc

SEQ ID NO: 4533888 - DNA, 25 bp, Homo sapien
cagacctgtcttctccgggctctgg

SEQ ID NO: 4533889 - DNA, 25 bp, Homo sapien
tcctctcgtgggccggcttctcggg

SEQ ID NO: 4533890 - DNA, 25 bp, Homo sapien
tgtcctgcgcctcacacctgctgtg

SEQ ID NO: 4533891 - DNA, 25 bp, Homo sapien
gcctggtgattgctccaccccaggg

SEQ ID NO: 4533892 - DNA, 25 bp, Homo sapien
caagtcaggctcctgtggagagcag

SEQ ID NO: 4533893 - DNA, 25 bp, Homo sapien
gcccctcctagggagaggtcaagag

SEQ ID NO: 4533894 - DNA, 25 bp, Homo sapien
ccctcctagggagaggtcaagagga

SEQ ID NO: 4533895 - DNA, 25 bp, Homo sapien
aggtcaagaggagccaagtcaggct

SEQ ID NO: 4533896 - DNA, 25 bp, Homo sapien
gggcgctccccagtcggccctgctc

SEQ ID NO: 4533897 - DNA, 25 bp, Homo sapien
ggagtctctctggtgctttggcttc

SEQ ID NO: 4533898 - DNA, 25 bp, Homo sapien
atcccgctctgcttctgggcttgct

SEQ ID NO: 4533899 - DNA, 25 bp, Homo sapien
cttcggcccctctggggatgccagg

SEQ ID NO: 4533900 - DNA, 25 bp, Homo sapien
agctcctccttgtcttccttcatat

SEQ ID NO: 4533901 - DNA, 25 bp, Homo sapien
ctccttgtcttccttcatatcccac

SEQ ID NO: 4533902 - DNA, 25 bp, Homo sapien
ctcctgaccttccagctcctccttg

SEQ ID NO: 4533903 - DNA, 25 bp, Homo sapien
ctcctccttgtcttccttcatatcc

SEQ ID NO: 4533904 - DNA, 25 bp, Homo sapien
ctgtagaaacacagctcatggcacg

SEQ ID NO: 4533905 - DNA, 25 bp, Homo sapien
aacacagctcatggcacgccccacc

SEQ ID NO: 4533906 - DNA, 25 bp, Homo sapien
aaacacagctcatggcacgccccac

SEQ ID NO: 4533907 - DNA, 25 bp, Homo sapien
tagaaacacagctcatggcacgccc

SEQ ID NO: 4533908 - DNA, 25 bp, Homo sapien
gcctctgctaatggcctctcccagc

SEQ ID NO: 4533909 - DNA, 25 bp, Homo sapien
gagctgctgtaattaccaccagcct

SEQ ID NO: 4533910 - DNA, 25 bp, Homo sapien
gggaagggagctgctgtaattacca

SEQ ID NO: 4533911 - DNA, 25 bp, Homo sapien
ctccccgggcaccaggctctcgctg

SEQ ID NO: 4533912 - DNA, 25 bp, Homo sapien
tggtgccaccgagggtctgctggct

SEQ ID NO: 4533913 - DNA, 25 bp, Homo sapien
gccaccgagggtctgctggcttgcc

SEQ ID NO: 4533914 - DNA, 25 bp, Homo sapien
ctggtgccaccgagggtctgctggc

SEQ ID NO: 4533915 - DNA, 25 bp, Homo sapien
gtgccaccgagggtctgctggcttg

SEQ ID NO: 4533916 - DNA, 25 bp, Homo sapien
agagaagaggcccatagcagccggc

SEQ ID NO: 4533917 - DNA, 25 bp, Homo sapien
tgcaagagatggtcggccaaggaga

SEQ ID NO: 4533918 - DNA, 25 bp, Homo sapien
catagcagccggctccatctttagc

SEQ ID NO: 4533919 - DNA, 25 bp, Homo sapien
atctttagctgacgagacctggccc

SEQ ID NO: 4533920 - DNA, 25 bp, Homo sapien
gtgggggctgtagtttctggtggct

SEQ ID NO: 4533921 - DNA, 25 bp, Homo sapien
cttttccatcagggagcaatggtgg

SEQ ID NO: 4533922 - DNA, 25 bp, Homo sapien
gggggctgtagtttctggtggctcc

SEQ ID NO: 4533923 - DNA, 25 bp, Homo sapien
ggctgtagtttctggtggctcctgg

SEQ ID NO: 4533924 - DNA, 25 bp, Homo sapien
gaatagggtcctgtgctagctttgc

SEQ ID NO: 4533925 - DNA, 25 bp, Homo sapien
tgaaagatgaacaaagccaaggagg

SEQ ID NO: 4533926 - DNA, 25 bp, Homo sapien
cacagagctgtttctacagtaggtc

SEQ ID NO: 4533927 - DNA, 25 bp, Homo sapien
tagctttgccactccatggctaggt

SEQ ID NO: 4533928 - DNA, 25 bp, Homo sapien
gccgggccttctcccctcagctggc

SEQ ID NO: 4533929 - DNA, 25 bp, Homo sapien
cccctcagctggctgcagtcctgta

SEQ ID NO: 4533930 - DNA, 25 bp, Homo sapien
ccttctcccctcagctggctgcagt

SEQ ID NO: 4533931 - DNA, 25 bp, Homo sapien
tctcccctcagctggctgcagtcct

SEQ ID NO: 4533932 - DNA, 25 bp, Homo sapien
acaggcaacctgcccaacccagcca

SEQ ID NO: 4533933 - DNA, 25 bp, Homo sapien
cacaggcaacctgcccaacccagcc

SEQ ID NO: 4533934 - DNA, 25 bp, Homo sapien
caggcaacctgcccaacccagccac

SEQ ID NO: 4533935 - DNA, 25 bp, Homo sapien
aggcgggctaggtcgatctgctccc

SEQ ID NO: 4533936 - DNA, 25 bp, Homo sapien
gccagtcaccctgtgcgtctctgtg

SEQ ID NO: 4533937 - DNA, 25 bp, Homo sapien
ggacttggccttgtccaggtcccac

SEQ ID NO: 4533938 - DNA, 25 bp, Homo sapien
ccctgtgcgtctctgtgccgggcga

SEQ ID NO: 4533939 - DNA, 25 bp, Homo sapien
gccggctccagggctcccaagaacc

SEQ ID NO: 4533940 - DNA, 25 bp, Homo sapien
ccaccggccggctccagggctccca

SEQ ID NO: 4533941 - DNA, 25 bp, Homo sapien
accggccggctccagggctcccaag

SEQ ID NO: 4533942 - DNA, 25 bp, Homo sapien
cggccggctccagggctcccaagaa

SEQ ID NO: 4533943 - DNA, 25 bp, Homo sapien
ttcctcgtgtaaaatggggaggatc

SEQ ID NO: 4533944 - DNA, 25 bp, Homo sapien
tcctcgtgtaaaatggggaggatct

SEQ ID NO: 4533945 - DNA, 25 bp, Homo sapien
cgtgcagaatctgagctgatggcca

SEQ ID NO: 4533946 - DNA, 25 bp, Homo sapien
tccgtgcagaatctgagctgatggc

SEQ ID NO: 4533947 - DNA, 25 bp, Homo sapien
gtgcagaatctgagctgatggccac

SEQ ID NO: 4533948 - DNA, 25 bp, Homo sapien
cttccgtgcagaatctgagctgatg

SEQ ID NO: 4533949 - DNA, 25 bp, Homo sapien
ctctggtaggcttttcacttacaat

SEQ ID NO: 4533950 - DNA, 25 bp, Homo sapien
ccttgctctggtaggcttttcactt

SEQ ID NO: 4533951 - DNA, 25 bp, Homo sapien
tgctctggtaggcttttcacttaca

SEQ ID NO: 4533952 - DNA, 25 bp, Homo sapien
ctctatgccttggttccttgctctg

SEQ ID NO: 4533953 - DNA, 25 bp, Homo sapien
gaggatgaagatgggcagtgcagca

SEQ ID NO: 4533954 - DNA, 25 bp, Homo sapien
gaagaggctgcctgccgatgcctgc

SEQ ID NO: 4533955 - DNA, 25 bp, Homo sapien
aagatgggcagtgcagcagagccag

SEQ ID NO: 4533956 - DNA, 25 bp, Homo sapien
gcctgccgatgcctgcactccccac

SEQ ID NO: 4533957 - DNA, 25 bp, Homo sapien
aaagtacccccgtggtcctcagcat

SEQ ID NO: 4533958 - DNA, 25 bp, Homo sapien
cagttcctgctaaccacccgctttt

SEQ ID NO: 4533959 - DNA, 25 bp, Homo sapien
agcatctcgttggtcactctgggtc

SEQ ID NO: 4533960 - DNA, 25 bp, Homo sapien
cacaggtaccccttgcccagttcct

SEQ ID NO: 4533961 - DNA, 25 bp, Homo sapien
cacagggtgttcacatgccaatggc

SEQ ID NO: 4533962 - DNA, 25 bp, Homo sapien
tgcaccccagaatagttagtaggag

SEQ ID NO: 4533963 - DNA, 25 bp, Homo sapien
caatggcatgaggttatccagggcc

SEQ ID NO: 4533964 - DNA, 25 bp, Homo sapien
cagtggcccgtcatctctgagctgg

SEQ ID NO: 4533965 - DNA, 25 bp, Homo sapien
ctccttgctacgagccctgtctccc

SEQ ID NO: 4533966 - DNA, 25 bp, Homo sapien
tccttgctacgagccctgtctccca

SEQ ID NO: 4533967 - DNA, 25 bp, Homo sapien
ccttgctacgagccctgtctcccag

SEQ ID NO: 4533968 - DNA, 25 bp, Homo sapien
cttgctacgagccctgtctcccagg

SEQ ID NO: 4533969 - DNA, 25 bp, Homo sapien
gctctgcctgccgacggtcctcctg

SEQ ID NO: 4533970 - DNA, 25 bp, Homo sapien
gaggagtgctggtgtggtcacagcc

SEQ ID NO: 4533971 - DNA, 25 bp, Homo sapien
gcctgccgacggtcctcctggatct

SEQ ID NO: 4533972 - DNA, 25 bp, Homo sapien
ctgatggtaacggtgaggccatcag

SEQ ID NO: 4533973 - DNA, 25 bp, Homo sapien
cacagagacatagatgctgataggc

SEQ ID NO: 4533974 - DNA, 25 bp, Homo sapien
ctgggggtcagcacacgccatggcc

SEQ ID NO: 4533975 - DNA, 25 bp, Homo sapien
aggtgcacagagacatagatgctga

SEQ ID NO: 4533976 - DNA, 25 bp, Homo sapien
tgcacagagacatagatgctgatag

SEQ ID NO: 4533977 - DNA, 25 bp, Homo sapien
tcttgcgcagggcaactatcctccg

SEQ ID NO: 4533978 - DNA, 25 bp, Homo sapien
tgctcatgggggactcggctctggg

SEQ ID NO: 4533979 - DNA, 25 bp, Homo sapien
agggcaactatcctccgatccagct

SEQ ID NO: 4533980 - DNA, 25 bp, Homo sapien
tgcgcagggcaactatcctccgatc

SEQ ID NO: 4533981 - DNA, 25 bp, Homo sapien
ggattgcttagggagatggcccaaa

SEQ ID NO: 4533982 - DNA, 25 bp, Homo sapien
cacattttcaccacccaaggaagag

SEQ ID NO: 4533983 - DNA, 25 bp, Homo sapien
tccaggccgaaagctgctggtagtc

SEQ ID NO: 4533984 - DNA, 25 bp, Homo sapien
cagagcctggaatgggagttataaa

SEQ ID NO: 4533985 - DNA, 25 bp, Homo sapien
agtgcatggcaacggcgggcaccga

SEQ ID NO: 4533986 - DNA, 25 bp, Homo sapien
cgagtgcatggcaacggcgggcacc

SEQ ID NO: 4533987 - DNA, 25 bp, Homo sapien
gaaagctggagccaccggagccggg

SEQ ID NO: 4533988 - DNA, 25 bp, Homo sapien
gccgagtgcatggcaacggcgggca

SEQ ID NO: 4533989 - DNA, 25 bp, Homo sapien
tagagctgtatagcctgcagcacag

SEQ ID NO: 4533990 - DNA, 25 bp, Homo sapien
actagccgtctagagctgtatagcc

SEQ ID NO: 4533991 - DNA, 25 bp, Homo sapien
ggttggttcactagccgtctagagc

SEQ ID NO: 4533992 - DNA, 25 bp, Homo sapien
gccgtctagagctgtatagcctgca

SEQ ID NO: 4533993 - DNA, 25 bp, Homo sapien
aatgcgtcagttgtggctttgccag

SEQ ID NO: 4533994 - DNA, 25 bp, Homo sapien
tcctcatgatggtcaaatgcgtcag

SEQ ID NO: 4533995 - DNA, 25 bp, Homo sapien
tctatcgcaagctgggcatcatcct

SEQ ID NO: 4533996 - DNA, 25 bp, Homo sapien
tcttcgggccagagaagaactgtgg

SEQ ID NO: 4533997 - DNA, 25 bp, Homo sapien
cattacagtggagcacaaatgttcc

SEQ ID NO: 4533998 - DNA, 25 bp, Homo sapien
cacattctttcccatcctggttggg

SEQ ID NO: 4533999 - DNA, 25 bp, Homo sapien
cattgaggagccatgctgtcccctt

SEQ ID NO: 4534000 - DNA, 25 bp, Homo sapien
tatgaacctgaagttgcttgaagtg

SEQ ID NO: 4534001 - DNA, 25 bp, Homo sapien
tgcccgtggacgatgcaatcaatgg

SEQ ID NO: 4534002 - DNA, 25 bp, Homo sapien
gatttgagaccgtgggacagtactg

SEQ ID NO: 4534003 - DNA, 25 bp, Homo sapien
caatcaatgggctaagcgaggagca

SEQ ID NO: 4534004 - DNA, 25 bp, Homo sapien
ggctacctaccgcttgtggcacaag

SEQ ID NO: 4534005 - DNA, 25 bp, Homo sapien
tcagtggccccagattgcaagagta

SEQ ID NO: 4534006 - DNA, 25 bp, Homo sapien
tatctatgctatgtgggctacctgc

SEQ ID NO: 4534007 - DNA, 25 bp, Homo sapien
catgggccgctttcttcgagatgcc

SEQ ID NO: 4534008 - DNA, 25 bp, Homo sapien
aagtagagatgtggcggctttccca

SEQ ID NO: 4534009 - DNA, 25 bp, Homo sapien
ggtaggcacctgggggcatgcaggt

SEQ ID NO: 4534010 - DNA, 25 bp, Homo sapien
ctcccagggtaggcacctgggggca

SEQ ID NO: 4534011 - DNA, 25 bp, Homo sapien
ccagggtaggcacctgggggcatgc

SEQ ID NO: 4534012 - DNA, 25 bp, Homo sapien
gtaggcacctgggggcatgcaggtg

SEQ ID NO: 4534013 - DNA, 25 bp, Homo sapien
catgtggaaacctcgcctcaactaa

SEQ ID NO: 4534014 - DNA, 25 bp, Homo sapien
tgagccaatatgacaccgctgcagt

SEQ ID NO: 4534015 - DNA, 25 bp, Homo sapien
aataaacctagcctagccaggcgtg

SEQ ID NO: 4534016 - DNA, 25 bp, Homo sapien
tagaggtatcagctcctagcagctt

SEQ ID NO: 4534017 - DNA, 25 bp, Homo sapien
ctcaaaaaataataggccaggcatg

SEQ ID NO: 4534018 - DNA, 25 bp, Homo sapien
taatcccagcactttgggaggccga

SEQ ID NO: 4534019 - DNA, 25 bp, Homo sapien
ggcgggcagatcacaaggtcaggag

SEQ ID NO: 4534020 - DNA, 25 bp, Homo sapien
aggcatggtggctcaacgtctgtaa

SEQ ID NO: 4534021 - DNA, 25 bp, Homo sapien
aattttgttataactgcacagtggc

SEQ ID NO: 4534022 - DNA, 25 bp, Homo sapien
ttggctcgcatgactccagctgagg

SEQ ID NO: 4534023 - DNA, 25 bp, Homo sapien
gagaagcaatctacttgccgctgct

SEQ ID NO: 4534024 - DNA, 25 bp, Homo sapien
gggcaccatccagtcctggccgtgt

SEQ ID NO: 4534025 - DNA, 25 bp, Homo sapien
caaaatggggcgcttcatccagtct

SEQ ID NO: 4534026 - DNA, 25 bp, Homo sapien
tgctccctgctatgttggagatgaa

SEQ ID NO: 4534027 - DNA, 25 bp, Homo sapien
gatgaatgtgactaaaagggccatc

SEQ ID NO: 4534028 - DNA, 25 bp, Homo sapien
tctgtctaagccctgtcgacttggg

SEQ ID NO: 4534029 - DNA, 25 bp, Homo sapien
tgcccgtccaggagcaaacatgggt

SEQ ID NO: 4534030 - DNA, 25 bp, Homo sapien
ccagtggatcagtggcggaagtaca

SEQ ID NO: 4534031 - DNA, 25 bp, Homo sapien
gagagagacacagctccagatccag

SEQ ID NO: 4534032 - DNA, 25 bp, Homo sapien
agatccagatccattcagacacagc

SEQ ID NO: 4534033 - DNA, 25 bp, Homo sapien
catagtggatgcacccctggtcttc

SEQ ID NO: 4534034 - DNA, 25 bp, Homo sapien
gttgatatctgagcggacaagtgtt

SEQ ID NO: 4534035 - DNA, 25 bp, Homo sapien
tacactgcccattccagatctggat

SEQ ID NO: 4534036 - DNA, 25 bp, Homo sapien
tctgtacgtctggaataaaggaacc

SEQ ID NO: 4534037 - DNA, 25 bp, Homo sapien
caaaggctattagtttgggagccct

SEQ ID NO: 4534038 - DNA, 25 bp, Homo sapien
aggctattagtttgggagccctaag

SEQ ID NO: 4534039 - DNA, 25 bp, Homo sapien
tttgctcaaaggctattagtttggg

SEQ ID NO: 4534040 - DNA, 25 bp, Homo sapien
attagtttgggagccctaagtgtgc

SEQ ID NO: 4534041 - DNA, 25 bp, Homo sapien
gagtttcacctgagcttcgggagac

SEQ ID NO: 4534042 - DNA, 25 bp, Homo sapien
gcagcagggagcaaggtggaattga

SEQ ID NO: 4534043 - DNA, 25 bp, Homo sapien
cttggagtgcatagagttcagggca

SEQ ID NO: 4534044 - DNA, 25 bp, Homo sapien
caaggtggaattgagcttcaggaga

SEQ ID NO: 4534045 - DNA, 25 bp, Homo sapien
tgctgctccggaaatgacacggatt

SEQ ID NO: 4534046 - DNA, 25 bp, Homo sapien
gaagctcgtccccatgtttgtcttt

SEQ ID NO: 4534047 - DNA, 25 bp, Homo sapien
cacggattctgggagggctgcctat

SEQ ID NO: 4534048 - DNA, 25 bp, Homo sapien
gagggtgaagcgaagctcgtcccca

SEQ ID NO: 4534049 - DNA, 25 bp, Homo sapien
gggacactccgattaggtctggaga

SEQ ID NO: 4534050 - DNA, 25 bp, Homo sapien
aaatagggtgtagcccgcagttgtt

SEQ ID NO: 4534051 - DNA, 25 bp, Homo sapien
cagcctgaaatagggtgtagcccgc

SEQ ID NO: 4534052 - DNA, 25 bp, Homo sapien
ctccgattaggtctggagacagcct

SEQ ID NO: 4534053 - DNA, 25 bp, Homo sapien
tccagctcaagagtcaggaggagca

SEQ ID NO: 4534054 - DNA, 25 bp, Homo sapien
aaagaccagacttctgcactaggat

SEQ ID NO: 4534055 - DNA, 25 bp, Homo sapien
accagacttctgcactaggatttgc

SEQ ID NO: 4534056 - DNA, 25 bp, Homo sapien
cctccagctcaagagtcaggaggag

SEQ ID NO: 4534057 - DNA, 25 bp, Homo sapien
ttcctcggctgaacgtgggcttcct

SEQ ID NO: 4534058 - DNA, 25 bp, Homo sapien
tgctgccatttcctcggctgaacgt

SEQ ID NO: 4534059 - DNA, 25 bp, Homo sapien
ccatttcctcggctgaacgtgggct

SEQ ID NO: 4534060 - DNA, 25 bp, Homo sapien
tcggctgaacgtgggcttcctgcca

SEQ ID NO: 4534061 - DNA, 25 bp, Homo sapien
cgagggccggattggctggcggagc

SEQ ID NO: 4534062 - DNA, 25 bp, Homo sapien
acccacggttctgattggtcagaga

SEQ ID NO: 4534063 - DNA, 25 bp, Homo sapien
ctgcgttgggacgaccgacccacgg

SEQ ID NO: 4534064 - DNA, 25 bp, Homo sapien
gctgattggcggagctggccgaggg

SEQ ID NO: 4534065 - DNA, 25 bp, Homo sapien
aggaggaggcgctgacgcagcagcg

SEQ ID NO: 4534066 - DNA, 25 bp, Homo sapien
gtggagcccgggaattgagcgcccc

SEQ ID NO: 4534067 - DNA, 25 bp, Homo sapien
ttccagccgccggattccagcccgg

SEQ ID NO: 4534068 - DNA, 25 bp, Homo sapien
gcgagcggcgtagcggatcccggag

SEQ ID NO: 4534069 - DNA, 25 bp, Homo sapien
cagacccagtgagccgctgtagagc

SEQ ID NO: 4534070 - DNA, 25 bp, Homo sapien
cgaggcgacagacccagtgagccgc

SEQ ID NO: 4534071 - DNA, 25 bp, Homo sapien
gcgacagacccagtgagccgctgta

SEQ ID NO: 4534072 - DNA, 25 bp, Homo sapien
gacagacccagtgagccgctgtaga

SEQ ID NO: 4534073 - DNA, 25 bp, Homo sapien
tttccttgttgttcatgctaaatga

SEQ ID NO: 4534074 - DNA, 25 bp, Homo sapien
ttgctgctcttatgcagttttcctt

SEQ ID NO: 4534075 - DNA, 25 bp, Homo sapien
gctgctcttatgcagttttccttgt

SEQ ID NO: 4534076 - DNA, 25 bp, Homo sapien
ttccttgttgttcatgctaaatgaa

SEQ ID NO: 4534077 - DNA, 25 bp, Homo sapien
cagcatccaggaggacttgtgtgtt

SEQ ID NO: 4534078 - DNA, 25 bp, Homo sapien
gtcgcaaggtgagtcattaaggaga

SEQ ID NO: 4534079 - DNA, 25 bp, Homo sapien
tcagcaccctgtcgcaaggtgagtc

SEQ ID NO: 4534080 - DNA, 25 bp, Homo sapien
tcttggccttgctccggcaacatct

SEQ ID NO: 4534081 - DNA, 25 bp, Homo sapien
caaggagagtgtgcttcggttctga

SEQ ID NO: 4534082 - DNA, 25 bp, Homo sapien
ttcctggcgttgacttgatgggcca

SEQ ID NO: 4534083 - DNA, 25 bp, Homo sapien
ctttgtgaacttgccattgtgctgg

SEQ ID NO: 4534084 - DNA, 25 bp, Homo sapien
tgcaggtttcctggcgttgacttga

SEQ ID NO: 4534085 - DNA, 25 bp, Homo sapien
ctgccactaatgatcagtaaaatgg

SEQ ID NO: 4534086 - DNA, 25 bp, Homo sapien
ctggtactgccactaatgatcagta

SEQ ID NO: 4534087 - DNA, 25 bp, Homo sapien
ggtactgccactaatgatcagtaaa

SEQ ID NO: 4534088 - DNA, 25 bp, Homo sapien
tcctggtactgccactaatgatcag

SEQ ID NO: 4534089 - DNA, 25 bp, Homo sapien
agttttgtgctcttgccacatttct

SEQ ID NO: 4534090 - DNA, 25 bp, Homo sapien
ggggttattccaagagagaatgcag

SEQ ID NO: 4534091 - DNA, 25 bp, Homo sapien
tttcatggatgggaggggttattcc

SEQ ID NO: 4534092 - DNA, 25 bp, Homo sapien
tgcagaggaggacaatgcttaactc

SEQ ID NO: 4534093 - DNA, 25 bp, Homo sapien
gctcatgacaagtgttttattcctt

SEQ ID NO: 4534094 - DNA, 25 bp, Homo sapien
catggtgtcacgcgcttatagtctc

SEQ ID NO: 4534095 - DNA, 25 bp, Homo sapien
gggagttcgaggctaccatgatcca

SEQ ID NO: 4534096 - DNA, 25 bp, Homo sapien
cacgcgcttatagtctcagttactg

SEQ ID NO: 4534097 - DNA, 25 bp, Homo sapien
ggtgtcacgcgcttatagtctcagt

SEQ ID NO: 4534098 - DNA, 25 bp, Homo sapien
tctgcttctgtggagatgactacac

SEQ ID NO: 4534099 - DNA, 25 bp, Homo sapien
tctgtggagatgactacactcagac

SEQ ID NO: 4534100 - DNA, 25 bp, Homo sapien
gactacactcagaccctactatgac

SEQ ID NO: 4534101 - DNA, 25 bp, Homo sapien
tcagaccctactatgacagtttagc

SEQ ID NO: 4534102 - DNA, 25 bp, Homo sapien
gattttgagatcctgatgcccctga

SEQ ID NO: 4534103 - DNA, 25 bp, Homo sapien
tttctccagtgagagctttcttgac

SEQ ID NO: 4534104 - DNA, 25 bp, Homo sapien
tgtctttagagtacacttctgagga

SEQ ID NO: 4534105 - DNA, 25 bp, Homo sapien
tgggattcaacctgtggttctctgg

SEQ ID NO: 4534106 - DNA, 25 bp, Homo sapien
agttcaagccataaccactgtgttg

SEQ ID NO: 4534107 - DNA, 25 bp, Homo sapien
tacagacctgagcacttacagggag

SEQ ID NO: 4534108 - DNA, 25 bp, Homo sapien
cctgcaggattgaggttggatgaac

SEQ ID NO: 4534109 - DNA, 25 bp, Homo sapien
agtcccagcatgcacgaggtgagct

SEQ ID NO: 4534110 - DNA, 25 bp, Homo sapien
gtctccctttgagcccttgcagaat

SEQ ID NO: 4534111 - DNA, 25 bp, Homo sapien
cagaatgaagtgtttgcatcgcgac

SEQ ID NO: 4534112 - DNA, 25 bp, Homo sapien
ttgcatcgcgacatcaggaccagaa

SEQ ID NO: 4534113 - DNA, 25 bp, Homo sapien
tggagtcatctcaggtcagcaggcc

SEQ ID NO: 4534114 - DNA, 25 bp, Homo sapien
ttgttcctttgaggcatagagagcc

SEQ ID NO: 4534115 - DNA, 25 bp, Homo sapien
caggctttcctagatcccagcacag

SEQ ID NO: 4534116 - DNA, 25 bp, Homo sapien
gggaccaggctttcctagatcccag

SEQ ID NO: 4534117 - DNA, 25 bp, Homo sapien
gcttgttcctttgaggcatagagag

SEQ ID NO: 4534118 - DNA, 25 bp, Homo sapien
cacccacctgaaatcaaaccaaagg

SEQ ID NO: 4534119 - DNA, 25 bp, Homo sapien
ttccaggaaacctcttgcagaactt

SEQ ID NO: 4534120 - DNA, 25 bp, Homo sapien
gggcaaggaaaattgctacctgatt

SEQ ID NO: 4534121 - DNA, 25 bp, Homo sapien
tttcctcttgccttacacatggagg

SEQ ID NO: 4534122 - DNA, 25 bp, Homo sapien
gaggtgaatttatgcttgggaagcc

SEQ ID NO: 4534123 - DNA, 25 bp, Homo sapien
tagggtcttggctgccccgaactta

SEQ ID NO: 4534124 - DNA, 25 bp, Homo sapien
gggacttggatctccttatattgaa

SEQ ID NO: 4534125 - DNA, 25 bp, Homo sapien
atattttttcgaacctgaaaatgca

SEQ ID NO: 4534126 - DNA, 25 bp, Homo sapien
agttaacttctctcacagctgaggc

SEQ ID NO: 4534127 - DNA, 25 bp, Homo sapien
gagctttccgggatatcatccagtc

SEQ ID NO: 4534128 - DNA, 25 bp, Homo sapien
ctgaatctagatgctagtgtcacgg

SEQ ID NO: 4534129 - DNA, 25 bp, Homo sapien
caatgtggttatctggctggactta

SEQ ID NO: 4534130 - DNA, 25 bp, Homo sapien
tcctctcaatgtggttatctggctg

SEQ ID NO: 4534131 - DNA, 25 bp, Homo sapien
tcttgaagtgtctagaaagctcagt

SEQ ID NO: 4534132 - DNA, 25 bp, Homo sapien
tgaagtgtctagaaagctcagtttt

SEQ ID NO: 4534133 - DNA, 25 bp, Homo sapien
ctgactccttgatatcgggtggttt

SEQ ID NO: 4534134 - DNA, 25 bp, Homo sapien
ccttgatatcgggtggtttctcttc

SEQ ID NO: 4534135 - DNA, 25 bp, Homo sapien
gacatatatgccatccaaaaatttc

SEQ ID NO: 4534136 - DNA, 25 bp, Homo sapien
tatatgccatccaaaaatttcctga

SEQ ID NO: 4534137 - DNA, 25 bp, Homo sapien
agagacatatatgccatccaaaaat

SEQ ID NO: 4534138 - DNA, 25 bp, Homo sapien
catatatgccatccaaaaatttcct

SEQ ID NO: 4534139 - DNA, 25 bp, Homo sapien
cttcaaggattaatccatctttctg

SEQ ID NO: 4534140 - DNA, 25 bp, Homo sapien
aactgttgtggcttgctgaatttga

SEQ ID NO: 4534141 - DNA, 25 bp, Homo sapien
tccttcaaggattaatccatctttc

SEQ ID NO: 4534142 - DNA, 25 bp, Homo sapien
caaggattaatccatctttctgggc

SEQ ID NO: 4534143 - DNA, 25 bp, Homo sapien
cttgtaacagaagcccagtgtcaca

SEQ ID NO: 4534144 - DNA, 25 bp, Homo sapien
cattctcctggataatgatgttgat

SEQ ID NO: 4534145 - DNA, 25 bp, Homo sapien
ggtctcatctgaaccctgcggatgt

SEQ ID NO: 4534146 - DNA, 25 bp, Homo sapien
caacaagagaaccattctcctggat

SEQ ID NO: 4534147 - DNA, 25 bp, Homo sapien
acaaatagtccaaatggtaaccagt

SEQ ID NO: 4534148 - DNA, 25 bp, Homo sapien
gtcgatagtctgattgctgaaaatg

SEQ ID NO: 4534149 - DNA, 25 bp, Homo sapien
tactgcaccatttgtcaaccaggag

SEQ ID NO: 4534150 - DNA, 25 bp, Homo sapien
ctgttactgcaccatttgtcaacca

SEQ ID NO: 4534151 - DNA, 25 bp, Homo sapien
gcctttcacgataactgtgtgtcct

SEQ ID NO: 4534152 - DNA, 25 bp, Homo sapien
cattcacacagtagatgcggcaaag

SEQ ID NO: 4534153 - DNA, 25 bp, Homo sapien
tagatgcggcaaagaaagaaaggat

SEQ ID NO: 4534154 - DNA, 25 bp, Homo sapien
cacagtagatgcggcaaagaaagaa

SEQ ID NO: 4534155 - DNA, 25 bp, Homo sapien
cttcattcacacagtagatgcggca

SEQ ID NO: 4534156 - DNA, 25 bp, Homo sapien
tacttttcataattgaaggcattcc

SEQ ID NO: 4534157 - DNA, 25 bp, Homo sapien
ataattgaaggcattcctttcctcc

SEQ ID NO: 4534158 - DNA, 25 bp, Homo sapien
tttcataattgaaggcattcctttc

SEQ ID NO: 4534159 - DNA, 25 bp, Homo sapien
aattgaaggcattcctttcctcctg

SEQ ID NO: 4534160 - DNA, 25 bp, Homo sapien
gatgatgcctccttgtacccacaaa

SEQ ID NO: 4534161 - DNA, 25 bp, Homo sapien
tagtgagtgcctaccttgagccagg

SEQ ID NO: 4534162 - DNA, 25 bp, Homo sapien
cattgccagggtcattagtgagtgc

SEQ ID NO: 4534163 - DNA, 25 bp, Homo sapien
cattcagagtgtgctgtcacgagca

SEQ ID NO: 4534164 - DNA, 25 bp, Homo sapien
attctgctgacatgtatttcaactt

SEQ ID NO: 4534165 - DNA, 25 bp, Homo sapien
ttctgctgacatgtatttcaacttt

SEQ ID NO: 4534166 - DNA, 25 bp, Homo sapien
ctattctgctgacatgtatttcaac

SEQ ID NO: 4534167 - DNA, 25 bp, Homo sapien
tattctgctgacatgtatttcaact

SEQ ID NO: 4534168 - DNA, 25 bp, Homo sapien
tggtctccgtgctgtttgaagtgcc

SEQ ID NO: 4534169 - DNA, 25 bp, Homo sapien
cacaggcaatggtggcaagaactgg

SEQ ID NO: 4534170 - DNA, 25 bp, Homo sapien
aactgggtgctgatacatgctgtga

SEQ ID NO: 4534171 - DNA, 25 bp, Homo sapien
gccttgtggttttgaagtggtctcc

SEQ ID NO: 4534172 - DNA, 25 bp, Homo sapien
ttagtctctttttctgccacttcct

SEQ ID NO: 4534173 - DNA, 25 bp, Homo sapien
agtctctttttctgccacttcctgt

SEQ ID NO: 4534174 - DNA, 25 bp, Homo sapien
cactgtgattagtctctttttctgc

SEQ ID NO: 4534175 - DNA, 25 bp, Homo sapien
tctctttttctgccacttcctgttc

SEQ ID NO: 4534176 - DNA, 25 bp, Homo sapien
cagaatcagtgctccacagattcat

SEQ ID NO: 4534177 - DNA, 25 bp, Homo sapien
aaaagagacagggccactaccctgg

SEQ ID NO: 4534178 - DNA, 25 bp, Homo sapien
aaagagacagggccactaccctggc

SEQ ID NO: 4534179 - DNA, 25 bp, Homo sapien
aagagacagggccactaccctggcc

SEQ ID NO: 4534180 - DNA, 25 bp, Homo sapien
tgcccacccagcttgcttctctcag

SEQ ID NO: 4534181 - DNA, 25 bp, Homo sapien
ccacccagcttgcttctctcagaag

SEQ ID NO: 4534182 - DNA, 25 bp, Homo sapien
ttaggacgagttcctgcccacccag

SEQ ID NO: 4534183 - DNA, 25 bp, Homo sapien
acccagcttgcttctctcagaagtt

SEQ ID NO: 4534184 - DNA, 25 bp, Homo sapien
gaacagtggcttctttgcatagtac

SEQ ID NO: 4534185 - DNA, 25 bp, Homo sapien
gatacataccacagcataaacgaat

SEQ ID NO: 4534186 - DNA, 25 bp, Homo sapien
tctgtatgaaggtctgaaaacacta

SEQ ID NO: 4534187 - DNA, 25 bp, Homo sapien
gaaaacactaagctaatctgtcgta

SEQ ID NO: 4534188 - DNA, 25 bp, Homo sapien
cccacgagcagtcttggagaggcag

SEQ ID NO: 4534189 - DNA, 25 bp, Homo sapien
ggtgacagtgtgtattcccacgagc

SEQ ID NO: 4534190 - DNA, 25 bp, Homo sapien
tggatgctggcgatgcaagtactcg

SEQ ID NO: 4534191 - DNA, 25 bp, Homo sapien
tactcgttgagcaggctgtcttgtg

SEQ ID NO: 4534192 - DNA, 25 bp, Homo sapien
tcgtacgcagcaccgccccttggcg

SEQ ID NO: 4534193 - DNA, 25 bp, Homo sapien
tctagccgccgcgtaagagccgagg

SEQ ID NO: 4534194 - DNA, 25 bp, Homo sapien
cagagcctgcgggaatgtgcgggcc

SEQ ID NO: 4534195 - DNA, 25 bp, Homo sapien
cagggtcaaggtctcggctctgctc

SEQ ID NO: 4534196 - DNA, 25 bp, Homo sapien
ctttatcactcgctgtggtcttctc

SEQ ID NO: 4534197 - DNA, 25 bp, Homo sapien
tatcactcgctgtggtcttctctgt

SEQ ID NO: 4534198 - DNA, 25 bp, Homo sapien
tcactcgctgtggtcttctctgtca

SEQ ID NO: 4534199 - DNA, 25 bp, Homo sapien
cactcgctgtggtcttctctgtcat

SEQ ID NO: 4534200 - DNA, 25 bp, Homo sapien
gatctgggcagaagatgtagcctct

SEQ ID NO: 4534201 - DNA, 25 bp, Homo sapien
tcaactctatggatacagcaaggct

SEQ ID NO: 4534202 - DNA, 25 bp, Homo sapien
tcaaatccttgagtactgcatgtgc

SEQ ID NO: 4534203 - DNA, 25 bp, Homo sapien
tacccacagtgtaacaaggagacct

SEQ ID NO: 4534204 - DNA, 25 bp, Homo sapien
aaaagtggacatttgcacaatcttt

SEQ ID NO: 4534205 - DNA, 25 bp, Homo sapien
gcctccctgcagctaaaaatccatg

SEQ ID NO: 4534206 - DNA, 25 bp, Homo sapien
aatcttgaacaacgtggaggttagg

SEQ ID NO: 4534207 - DNA, 25 bp, Homo sapien
tgcaacatcaccagaataaatttta

SEQ ID NO: 4534208 - DNA, 25 bp, Homo sapien
aagaaactttgtctatcagtggacc

SEQ ID NO: 4534209 - DNA, 25 bp, Homo sapien
ctatcagtggaccagtgcagttcaa

SEQ ID NO: 4534210 - DNA, 25 bp, Homo sapien
atccttgtcatcttcgcgtcgagta

SEQ ID NO: 4534211 - DNA, 25 bp, Homo sapien
catcttcgcgtcgagtaggctgagg

SEQ ID NO: 4534212 - DNA, 25 bp, Homo sapien
ctcaggttttctacagcctcgacct

SEQ ID NO: 4534213 - DNA, 25 bp, Homo sapien
tgttgctcaggttttctacagcctc

SEQ ID NO: 4534214 - DNA, 25 bp, Homo sapien
gggctcaagcattcccctcactcag

SEQ ID NO: 4534215 - DNA, 25 bp, Homo sapien
gttctgttgctcaggttttctacag

SEQ ID NO: 4534216 - DNA, 25 bp, Homo sapien
tgctcagggaatactgggtggcctc

SEQ ID NO: 4534217 - DNA, 25 bp, Homo sapien
tgctcatgcactagggataaacaca

SEQ ID NO: 4534218 - DNA, 25 bp, Homo sapien
tgagagtgcagacgaaagacctctg

SEQ ID NO: 4534219 - DNA, 25 bp, Homo sapien
cacaatgtgggctgtgtagaccaga

SEQ ID NO: 4534220 - DNA, 25 bp, Homo sapien
gccggttgggatgctttgtcccttc

SEQ ID NO: 4534221 - DNA, 25 bp, Homo sapien
ccagccggttgggatgctttgtccc

SEQ ID NO: 4534222 - DNA, 25 bp, Homo sapien
cagccggttgggatgctttgtccct

SEQ ID NO: 4534223 - DNA, 25 bp, Homo sapien
cgcccagccggttgggatgctttgt

SEQ ID NO: 4534224 - DNA, 25 bp, Homo sapien
taatgtccacgaagatgccaaccgt

SEQ ID NO: 4534225 - DNA, 25 bp, Homo sapien
tatgggttctcgctcaaggtgttca

SEQ ID NO: 4534226 - DNA, 25 bp, Homo sapien
cagattgcactgtctccaatggcaa

SEQ ID NO: 4534227 - DNA, 25 bp, Homo sapien
tcccacaagactagcgcaagattgg

SEQ ID NO: 4534228 - DNA, 25 bp, Homo sapien
cctggcatcaggtgtcaaagcaaat

SEQ ID NO: 4534229 - DNA, 25 bp, Homo sapien
ctggcatcaggtgtcaaagcaaatt

SEQ ID NO: 4534230 - DNA, 25 bp, Homo sapien
atggtaacatactattgtcctggca

SEQ ID NO: 4534231 - DNA, 25 bp, Homo sapien
tgtctatagaaggatggtaacatac

SEQ ID NO: 4534232 - DNA, 25 bp, Homo sapien
tgatatcacccgtcttactgctgct

SEQ ID NO: 4534233 - DNA, 25 bp, Homo sapien
gaatctgcttctgggcacattaatt

SEQ ID NO: 4534234 - DNA, 25 bp, Homo sapien
gcaagacacttatcaggtagtatga

SEQ ID NO: 4534235 - DNA, 25 bp, Homo sapien
tacccagttgtaatcatggacaaat

SEQ ID NO: 4534236 - DNA, 25 bp, Homo sapien
tacattctagttggtgtcagggtcg

SEQ ID NO: 4534237 - DNA, 25 bp, Homo sapien
tgtttgaccctcatgatcctgctat

SEQ ID NO: 4534238 - DNA, 25 bp, Homo sapien
gttcatcatgagctctgtaccaggt

SEQ ID NO: 4534239 - DNA, 25 bp, Homo sapien
caccacaggctacatacaggcatta

SEQ ID NO: 4534240 - DNA, 25 bp, Homo sapien
ggaggccacttaggagacttctgca

SEQ ID NO: 4534241 - DNA, 25 bp, Homo sapien
tcaggaagattaacgtgacggtggc

SEQ ID NO: 4534242 - DNA, 25 bp, Homo sapien
ttagtgacttgatcttcccgagccc

SEQ ID NO: 4534243 - DNA, 25 bp, Homo sapien
ccatgcctgccgtgatggaaggaaa

SEQ ID NO: 4534244 - DNA, 25 bp, Homo sapien
cactggttcgaattagcgggaagcc

SEQ ID NO: 4534245 - DNA, 25 bp, Homo sapien
cataggtatttgatcagagctgccc

SEQ ID NO: 4534246 - DNA, 25 bp, Homo sapien
gaatgatgcagtgcctgtgtcccaa

SEQ ID NO: 4534247 - DNA, 25 bp, Homo sapien
tcacctagggtcgactgaggacagc

SEQ ID NO: 4534248 - DNA, 25 bp, Homo sapien
tcgccacctctgctcagcacactgg

SEQ ID NO: 4534249 - DNA, 25 bp, Homo sapien
tgtcccacgctccatcctcagaaaa

SEQ ID NO: 4534250 - DNA, 25 bp, Homo sapien
ctggaaatgtccttcgccacctctg

SEQ ID NO: 4534251 - DNA, 25 bp, Homo sapien
cgccacctctgctcagcacactggt

SEQ ID NO: 4534252 - DNA, 25 bp, Homo sapien
gaagtgaggtgtcgacacagcctca

SEQ ID NO: 4534253 - DNA, 25 bp, Homo sapien
gcgaaggtgcgaggaagtgaggtgt

SEQ ID NO: 4534254 - DNA, 25 bp, Homo sapien
tacataggagcaccgagagtgcgaa

SEQ ID NO: 4534255 - DNA, 25 bp, Homo sapien
aagagagacaggcatacataggagc

SEQ ID NO: 4534256 - DNA, 25 bp, Homo sapien
aaaccaaaggtcccgcacagccctg

SEQ ID NO: 4534257 - DNA, 25 bp, Homo sapien
gtcaaaaccaaaggtcccgcacagc

SEQ ID NO: 4534258 - DNA, 25 bp, Homo sapien
cccgcacagccctggaaggcggatc

SEQ ID NO: 4534259 - DNA, 25 bp, Homo sapien
cgcacagccctggaaggcggatcct

SEQ ID NO: 4534260 - DNA, 25 bp, Homo sapien
gaaagagactgtgccagatgctcac

SEQ ID NO: 4534261 - DNA, 25 bp, Homo sapien
tgggcgggaaagagactgtgccaga

SEQ ID NO: 4534262 - DNA, 25 bp, Homo sapien
gcgggaaagagactgtgccagatgc

SEQ ID NO: 4534263 - DNA, 25 bp, Homo sapien
ggaaagagactgtgccagatgctca

SEQ ID NO: 4534264 - DNA, 25 bp, Homo sapien
tttctgtgaccagccgcagctgcag

SEQ ID NO: 4534265 - DNA, 25 bp, Homo sapien
cagcccatttctgtgaccagccgca

SEQ ID NO: 4534266 - DNA, 25 bp, Homo sapien
agcccatttctgtgaccagccgcag

SEQ ID NO: 4534267 - DNA, 25 bp, Homo sapien
ccatttctgtgaccagccgcagctg

SEQ ID NO: 4534268 - DNA, 25 bp, Homo sapien
gaaaagaccctgttgcaagaatggc

SEQ ID NO: 4534269 - DNA, 25 bp, Homo sapien
gagaccagggctgacttaacagcag

SEQ ID NO: 4534270 - DNA, 25 bp, Homo sapien
gatccaactttctacacaatgcagg

SEQ ID NO: 4534271 - DNA, 25 bp, Homo sapien
caaggccaccctattgttgaacagc

SEQ ID NO: 4534272 - DNA, 25 bp, Homo sapien
tgtgacacaacacttgggacagagg

SEQ ID NO: 4534273 - DNA, 25 bp, Homo sapien
tctctgccacacattgactaatagg

SEQ ID NO: 4534274 - DNA, 25 bp, Homo sapien
gagcaaaggcccactactgttccac

SEQ ID NO: 4534275 - DNA, 25 bp, Homo sapien
ggttctccttgcaaatgctcccata

SEQ ID NO: 4534276 - DNA, 25 bp, Homo sapien
accacgtccagccccatttcacttt

SEQ ID NO: 4534277 - DNA, 25 bp, Homo sapien
tttggtgagatgaggtctcatgttg

SEQ ID NO: 4534278 - DNA, 25 bp, Homo sapien
ttttggtgagatgaggtctcatgtt

SEQ ID NO: 4534279 - DNA, 25 bp, Homo sapien
agccccatttcactttctcttagtt

SEQ ID NO: 4534280 - DNA, 25 bp, Homo sapien
gaatgcccatggtgtataaaacagc

SEQ ID NO: 4534281 - DNA, 25 bp, Homo sapien
tggcccggcttcagtcttaaatagg

SEQ ID NO: 4534282 - DNA, 25 bp, Homo sapien
taaataggtcctaggcacccgagct

SEQ ID NO: 4534283 - DNA, 25 bp, Homo sapien
gcttgaatcttcagcccaggacagt

SEQ ID NO: 4534284 - DNA, 25 bp, Homo sapien
tgtggccgacttcttacatgccggc

SEQ ID NO: 4534285 - DNA, 25 bp, Homo sapien
ggatgaaatcatttgaattacttac

SEQ ID NO: 4534286 - DNA, 25 bp, Homo sapien
tgtctctgtaccacttggtgtcacc

SEQ ID NO: 4534287 - DNA, 25 bp, Homo sapien
attacttacttatatgtctgatgcc

SEQ ID NO: 4534288 - DNA, 25 bp, Homo sapien
tatgctgtactctattagcaaggca

SEQ ID NO: 4534289 - DNA, 25 bp, Homo sapien
agtgctttcatgaccttgcctcaga

SEQ ID NO: 4534290 - DNA, 25 bp, Homo sapien
tagcaaggcagttacataggtctgc

SEQ ID NO: 4534291 - DNA, 25 bp, Homo sapien
gggatacactgatttggccatcttt

SEQ ID NO: 4534292 - DNA, 25 bp, Homo sapien
tataactgacgtagggccaaagctg

SEQ ID NO: 4534293 - DNA, 25 bp, Homo sapien
tccacagaattaatgaggtaggctc

SEQ ID NO: 4534294 - DNA, 25 bp, Homo sapien
cacagctggcgggacgtttgtttac

SEQ ID NO: 4534295 - DNA, 25 bp, Homo sapien
cattctatgtgggaagatgccgttc

SEQ ID NO: 4534296 - DNA, 25 bp, Homo sapien
tctgggtgtaccaagtcattacggc

SEQ ID NO: 4534297 - DNA, 25 bp, Homo sapien
caaatcttactaggttgaggaagcc

SEQ ID NO: 4534298 - DNA, 25 bp, Homo sapien
gaagccctaactggagttccttgga

SEQ ID NO: 4534299 - DNA, 25 bp, Homo sapien
tgttggtgattaccctcccctggct

SEQ ID NO: 4534300 - DNA, 25 bp, Homo sapien
taaaatgcagtaggaataaagcgac

SEQ ID NO: 4534301 - DNA, 25 bp, Homo sapien
tgtgtcacacgtatcctgccaataa

SEQ ID NO: 4534302 - DNA, 25 bp, Homo sapien
gatgaccgtcaatattctggcttcc

SEQ ID NO: 4534303 - DNA, 25 bp, Homo sapien
taaaggtgttaacccagtccagaca

SEQ ID NO: 4534304 - DNA, 25 bp, Homo sapien
ttccaggagcaatcgagtcaacagc

SEQ ID NO: 4534305 - DNA, 25 bp, Homo sapien
tggaacctggccctttttaagtgca

SEQ ID NO: 4534306 - DNA, 25 bp, Homo sapien
ccatggagctaaggcctcagaacac

SEQ ID NO: 4534307 - DNA, 25 bp, Homo sapien
tggactgtctgagggcacatgctaa

SEQ ID NO: 4534308 - DNA, 25 bp, Homo sapien
tactggccccactcacgtgacaatt

SEQ ID NO: 4534309 - DNA, 25 bp, Homo sapien
aaggagcagacttcactcttactgg

SEQ ID NO: 4534310 - DNA, 25 bp, Homo sapien
ccaagggaatgcttgggacacaagc

SEQ ID NO: 4534311 - DNA, 25 bp, Homo sapien
ggacacaagcatgaatgtccggaag

SEQ ID NO: 4534312 - DNA, 25 bp, Homo sapien
gcagcattttgatccagtgtgcact

SEQ ID NO: 4534313 - DNA, 25 bp, Homo sapien
gcagacttctaacctgcagagacag

SEQ ID NO: 4534314 - DNA, 25 bp, Homo sapien
ttcatccgagacagtcacacatgcc

SEQ ID NO: 4534315 - DNA, 25 bp, Homo sapien
tgagctccacgctgctcgctctgga

SEQ ID NO: 4534316 - DNA, 25 bp, Homo sapien
cctctgtgctgacggctactttatc

SEQ ID NO: 4534317 - DNA, 25 bp, Homo sapien
ggaggaatcagatactggacctcct

SEQ ID NO: 4534318 - DNA, 25 bp, Homo sapien
ctcctctgtgctgacggctacttta

SEQ ID NO: 4534319 - DNA, 25 bp, Homo sapien
gaatcagatactggacctcctctgt

SEQ ID NO: 4534320 - DNA, 25 bp, Homo sapien
gagtttacgcctcagtcctaaagac

SEQ ID NO: 4534321 - DNA, 25 bp, Homo sapien
agagcctctgaaggcttgatgagaa

SEQ ID NO: 4534322 - DNA, 25 bp, Homo sapien
tgagaaccgctgaagagtttacgcc

SEQ ID NO: 4534323 - DNA, 25 bp, Homo sapien
catagtgggcactttgactacaggc

SEQ ID NO: 4534324 - DNA, 25 bp, Homo sapien
tgtaattgtcaagctcaaggtcccc

SEQ ID NO: 4534325 - DNA, 25 bp, Homo sapien
gatagtcggatttctcagcccatta

SEQ ID NO: 4534326 - DNA, 25 bp, Homo sapien
taccacaaggaggatcacctacctg

SEQ ID NO: 4534327 - DNA, 25 bp, Homo sapien
tgaccactatgccagagggctgtct

SEQ ID NO: 4534328 - DNA, 25 bp, Homo sapien
catactgtcctgatttcggcagcag

SEQ ID NO: 4534329 - DNA, 25 bp, Homo sapien
ggcacacataggttacttacccaag

SEQ ID NO: 4534330 - DNA, 25 bp, Homo sapien
ggcagcagtacttcttctgatatga

SEQ ID NO: 4534331 - DNA, 25 bp, Homo sapien
tgatatgatgggattctcaacacca

SEQ ID NO: 4534332 - DNA, 25 bp, Homo sapien
gaattcaagaacatgagagactgat

SEQ ID NO: 4534333 - DNA, 25 bp, Homo sapien
taacatggtttccaaacctcatgag

SEQ ID NO: 4534334 - DNA, 25 bp, Homo sapien
caacacgtagctgcagtatttgcct

SEQ ID NO: 4534335 - DNA, 25 bp, Homo sapien
tattcaatctgtgaccaacacgtag

SEQ ID NO: 4534336 - DNA, 25 bp, Homo sapien
ttctcctggaggaaccgatcccagc

SEQ ID NO: 4534337 - DNA, 25 bp, Homo sapien
cacaaagaactctgaagctaacttc

SEQ ID NO: 4534338 - DNA, 25 bp, Homo sapien
tcagaatcaagtccatccacaaaga

SEQ ID NO: 4534339 - DNA, 25 bp, Homo sapien
cttgggccagagttcgaagcatgtc

SEQ ID NO: 4534340 - DNA, 25 bp, Homo sapien
tgcaggatggcataaggtttaacac

SEQ ID NO: 4534341 - DNA, 25 bp, Homo sapien
aatatacgggcaaccaacagtaggc

SEQ ID NO: 4534342 - DNA, 25 bp, Homo sapien
aatgaatcttatgtcaatatgctcc

SEQ ID NO: 4534343 - DNA, 25 bp, Homo sapien
tcagaaatccacatgtagccctggg

SEQ ID NO: 4534344 - DNA, 25 bp, Homo sapien
ttcttgttcaggatttggcagacag

SEQ ID NO: 4534345 - DNA, 25 bp, Homo sapien
gcccaaggctttacagctggctgga

SEQ ID NO: 4534346 - DNA, 25 bp, Homo sapien
ctagagatgctaaatacacttctga

SEQ ID NO: 4534347 - DNA, 25 bp, Homo sapien
gagtcagcgctctcaaacattttca

SEQ ID NO: 4534348 - DNA, 25 bp, Homo sapien
accagagccccgcatggccccttac

SEQ ID NO: 4534349 - DNA, 25 bp, Homo sapien
gcctcagtcgctcaggtctctaggg

SEQ ID NO: 4534350 - DNA, 25 bp, Homo sapien
tccagaaccacgcaggaaattccgg

SEQ ID NO: 4534351 - DNA, 25 bp, Homo sapien
tgaatcaggtcccaaggcctctatg

SEQ ID NO: 4534352 - DNA, 25 bp, Homo sapien
tgggagatccaaaacgctgggcacc

SEQ ID NO: 4534353 - DNA, 25 bp, Homo sapien
gctgcccagtaaacgcttggctcag

SEQ ID NO: 4534354 - DNA, 25 bp, Homo sapien
taacagctgcccagtaaacgcttgg

SEQ ID NO: 4534355 - DNA, 25 bp, Homo sapien
cttggctcagctctgtcgcctgtag

SEQ ID NO: 4534356 - DNA, 25 bp, Homo sapien
ctgtcgcctgtagcccggaggaaat

SEQ ID NO: 4534357 - DNA, 25 bp, Homo sapien
gaagttgactgattacaggctgcgg

SEQ ID NO: 4534358 - DNA, 25 bp, Homo sapien
ggctgcggtccctaggctgacttat

SEQ ID NO: 4534359 - DNA, 25 bp, Homo sapien
gatttcttgcggaacacagtgcaca

SEQ ID NO: 4534360 - DNA, 25 bp, Homo sapien
gagcccattcgcctgctagctgaga

SEQ ID NO: 4534361 - DNA, 25 bp, Homo sapien
aatggagatctctgtagacgagagc

SEQ ID NO: 4534362 - DNA, 25 bp, Homo sapien
gacgcattgcctaacactccaatag

SEQ ID NO: 4534363 - DNA, 25 bp, Homo sapien
gagagcatccatctcggtagacgag

SEQ ID NO: 4534364 - DNA, 25 bp, Homo sapien
gctggccccagataatgaagacgca

SEQ ID NO: 4534365 - DNA, 25 bp, Homo sapien
agcacaatggattagcagtccatcg

SEQ ID NO: 4534366 - DNA, 25 bp, Homo sapien
cacaatggattagcagtccatcgcc

SEQ ID NO: 4534367 - DNA, 25 bp, Homo sapien
gcacaatggattagcagtccatcgc

SEQ ID NO: 4534368 - DNA, 25 bp, Homo sapien
atggattagcagtccatcgccttaa

SEQ ID NO: 4534369 - DNA, 25 bp, Homo sapien
aatcacacttatgaactacgaaaag

SEQ ID NO: 4534370 - DNA, 25 bp, Homo sapien
agtttgaagaaagcacatctcacac

SEQ ID NO: 4534371 - DNA, 25 bp, Homo sapien
gtcagatgtataatgtgccaacatc

SEQ ID NO: 4534372 - DNA, 25 bp, Homo sapien
tgccaacatcgtaacaaagtttgaa

SEQ ID NO: 4534373 - DNA, 25 bp, Homo sapien
tggtgtgatcctagcctatgacagc

SEQ ID NO: 4534374 - DNA, 25 bp, Homo sapien
tcttactttgttactcctggcttca

SEQ ID NO: 4534375 - DNA, 25 bp, Homo sapien
ttactttgttactcctggcttcagg

SEQ ID NO: 4534376 - DNA, 25 bp, Homo sapien
ctagcctatgacagctcaaactcct

SEQ ID NO: 4534377 - DNA, 25 bp, Homo sapien
agtgtattagttcccaaggactgcc

SEQ ID NO: 4534378 - DNA, 25 bp, Homo sapien
tggtagtgcaccattgcagactcct

SEQ ID NO: 4534379 - DNA, 25 bp, Homo sapien
catgacagagtactacaaattgggt

SEQ ID NO: 4534380 - DNA, 25 bp, Homo sapien
tgagggctgttagaatctgtccatg

SEQ ID NO: 4534381 - DNA, 25 bp, Homo sapien
ttttaacaagtacttatgatatatt

SEQ ID NO: 4534382 - DNA, 25 bp, Homo sapien
cccacagctgcgaccataaaagaca

SEQ ID NO: 4534383 - DNA, 25 bp, Homo sapien
ggtgatgcagaaatctcaagtgttc

SEQ ID NO: 4534384 - DNA, 25 bp, Homo sapien
caaaatgagccgcttgaatggactg

SEQ ID NO: 4534385 - DNA, 25 bp, Homo sapien
tgtgatgctcgagactcactacctg

SEQ ID NO: 4534386 - DNA, 25 bp, Homo sapien
gatttgccaattttcgatcgatgcc

SEQ ID NO: 4534387 - DNA, 25 bp, Homo sapien
tatctcactaacagcatgcaaggag

SEQ ID NO: 4534388 - DNA, 25 bp, Homo sapien
gatgattctcgttctcctgataaga

SEQ ID NO: 4534389 - DNA, 25 bp, Homo sapien
taacctccgatgcaaagtagtatga

SEQ ID NO: 4534390 - DNA, 25 bp, Homo sapien
gagtatcatatgaggcctcggagag

SEQ ID NO: 4534391 - DNA, 25 bp, Homo sapien
tgaacactgctggtacaactggtgg

SEQ ID NO: 4534392 - DNA, 25 bp, Homo sapien
acattagatcaaccctagccagagg

SEQ ID NO: 4534393 - DNA, 25 bp, Homo sapien
aaatgtcccggttcctctgtagctg

SEQ ID NO: 4534394 - DNA, 25 bp, Homo sapien
ccccgagccctgtggaaaattgtct

SEQ ID NO: 4534395 - DNA, 25 bp, Homo sapien
tgttgttgtcgcttgtcttttgaga

SEQ ID NO: 4534396 - DNA, 25 bp, Homo sapien
tttgttgttgtcgcttgtcttttga

SEQ ID NO: 4534397 - DNA, 25 bp, Homo sapien
tgttgtcgcttgtcttttgagacaa

SEQ ID NO: 4534398 - DNA, 25 bp, Homo sapien
gttgttgtcgcttgtcttttgagac

SEQ ID NO: 4534399 - DNA, 25 bp, Homo sapien
cagtttcggcacttgctctggcact

SEQ ID NO: 4534400 - DNA, 25 bp, Homo sapien
tcctccctcgccagataatactaat

SEQ ID NO: 4534401 - DNA, 25 bp, Homo sapien
tatcctgaactaaatgtaaccttcc

SEQ ID NO: 4534402 - DNA, 25 bp, Homo sapien
tctttaatcatgtagttcgtttcca

SEQ ID NO: 4534403 - DNA, 25 bp, Homo sapien
tccagtaaagcaccacagattgacg

SEQ ID NO: 4534404 - DNA, 25 bp, Homo sapien
tacagcggcgagatctcggttggct

SEQ ID NO: 4534405 - DNA, 25 bp, Homo sapien
gaatccctactcagctagcttgtgg

SEQ ID NO: 4534406 - DNA, 25 bp, Homo sapien
cggaatcacgggtcaaaactttctg

SEQ ID NO: 4534407 - DNA, 25 bp, Homo sapien
gcgaccagaagtgccaaaagctgac

SEQ ID NO: 4534408 - DNA, 25 bp, Homo sapien
aacaaaccacaagagcgctagggcc

SEQ ID NO: 4534409 - DNA, 25 bp, Homo sapien
taggaggctcagagcgaccagaagt

SEQ ID NO: 4534410 - DNA, 25 bp, Homo sapien
tcagatactgccgaaacaaaccaca

SEQ ID NO: 4534411 - DNA, 25 bp, Homo sapien
cgggccgacgcattacctcttggga

SEQ ID NO: 4534412 - DNA, 25 bp, Homo sapien
tgcgatggtgagaactcgcggaccc

SEQ ID NO: 4534413 - DNA, 25 bp, Homo sapien
ctaatagtccagctgcgatggtgag

SEQ ID NO: 4534414 - DNA, 25 bp, Homo sapien
ccggcgatgcatgccgggagatgta

SEQ ID NO: 4534415 - DNA, 25 bp, Homo sapien
ctcccgtcttgggttagcgcgcagg

SEQ ID NO: 4534416 - DNA, 25 bp, Homo sapien
aagctctcgagctcccgtcttgggt

SEQ ID NO: 4534417 - DNA, 25 bp, Homo sapien
gcagtctgtaaactcgcgcaggatc

SEQ ID NO: 4534418 - DNA, 25 bp, Homo sapien
tcgcgcaggatcaagctctcgagct

SEQ ID NO: 4534419 - DNA, 25 bp, Homo sapien
agccctaaggagagtgcggcgcttc

SEQ ID NO: 4534420 - DNA, 25 bp, Homo sapien
ggaattctgaaagccgctggcggac

SEQ ID NO: 4534421 - DNA, 25 bp, Homo sapien
ggccagagaccgagccctaaggaga

SEQ ID NO: 4534422 - DNA, 25 bp, Homo sapien
tgaccctgggcgagagggtttggcg

SEQ ID NO: 4534423 - DNA, 25 bp, Homo sapien
caagctagcatgtcagtatcgagta

SEQ ID NO: 4534424 - DNA, 25 bp, Homo sapien
tcttcagagtgtaccgtgctaaacg

SEQ ID NO: 4534425 - DNA, 25 bp, Homo sapien
gaaaagaatcccctgtcatgttagc

SEQ ID NO: 4534426 - DNA, 25 bp, Homo sapien
gcatagcatgctgacactccaaagt

SEQ ID NO: 4534427 - DNA, 25 bp, Homo sapien
ctcctaggcctttaacataaaatgt

SEQ ID NO: 4534428 - DNA, 25 bp, Homo sapien
tctcctaggcctttaacataaaatg

SEQ ID NO: 4534429 - DNA, 25 bp, Homo sapien
attgaagatttacataaagagaagc

SEQ ID NO: 4534430 - DNA, 25 bp, Homo sapien
cttggccaggtactgtggtgcacac

SEQ ID NO: 4534431 - DNA, 25 bp, Homo sapien
gagaagcattccacatcatggatgg

SEQ ID NO: 4534432 - DNA, 25 bp, Homo sapien
aagagaagcattccacatcatggat

SEQ ID NO: 4534433 - DNA, 25 bp, Homo sapien
cctgcagataaaaaggtaggaaatt

SEQ ID NO: 4534434 - DNA, 25 bp, Homo sapien
ttttcttagacctagtcctgcagat

SEQ ID NO: 4534435 - DNA, 25 bp, Homo sapien
tattaacatccactaaccttcaggg

SEQ ID NO: 4534436 - DNA, 25 bp, Homo sapien
cagatacttggacagcgatgttcat

SEQ ID NO: 4534437 - DNA, 25 bp, Homo sapien
gttgttgtttaatggtacagtttca

SEQ ID NO: 4534438 - DNA, 25 bp, Homo sapien
tgaaaaagctctggagatgaatagt

SEQ ID NO: 4534439 - DNA, 25 bp, Homo sapien
gagactggggagttgttgtttaatg

SEQ ID NO: 4534440 - DNA, 25 bp, Homo sapien
ggtgatggttgcacagcagcatgaa

SEQ ID NO: 4534441 - DNA, 25 bp, Homo sapien
tcttgcaggctctacccatgtgtaa

SEQ ID NO: 4534442 - DNA, 25 bp, Homo sapien
ggaagccatgagtactgccccaatt

SEQ ID NO: 4534443 - DNA, 25 bp, Homo sapien
gaagttatcaagtggtccagcccag

SEQ ID NO: 4534444 - DNA, 25 bp, Homo sapien
tccagcccaggaatacaggtagaat

SEQ ID NO: 4534445 - DNA, 25 bp, Homo sapien
ttagtctcgtaaaatgacttccagt

SEQ ID NO: 4534446 - DNA, 25 bp, Homo sapien
ccaggtccttctggatagccaaatc

SEQ ID NO: 4534447 - DNA, 25 bp, Homo sapien
ccaccatctagcttcagagtttttc

SEQ ID NO: 4534448 - DNA, 25 bp, Homo sapien
gacaacagtgaaacctgatactgtg

SEQ ID NO: 4534449 - DNA, 25 bp, Homo sapien
tactgtgtactttcaggagttccca

SEQ ID NO: 4534450 - DNA, 25 bp, Homo sapien
cccagatctatgttgaagtagacaa

SEQ ID NO: 4534451 - DNA, 25 bp, Homo sapien
tcaggagttcccagatctatgttga

SEQ ID NO: 4534452 - DNA, 25 bp, Homo sapien
cttggaaatatatacccttcctgct

SEQ ID NO: 4534453 - DNA, 25 bp, Homo sapien
tggaaatatatacccttcctgcttt

SEQ ID NO: 4534454 - DNA, 25 bp, Homo sapien
ggaaatatatacccttcctgctttg

SEQ ID NO: 4534455 - DNA, 25 bp, Homo sapien
ttggaaatatatacccttcctgctt

SEQ ID NO: 4534456 - DNA, 25 bp, Homo sapien
tcctatattctaatcaggctgaagt

SEQ ID NO: 4534457 - DNA, 25 bp, Homo sapien
tattaaactagatttctagtcccca

SEQ ID NO: 4534458 - DNA, 25 bp, Homo sapien
ccaaccatgtggctgattcagtggg

SEQ ID NO: 4534459 - DNA, 25 bp, Homo sapien
gttaccctggtgtttttgcctgcca

SEQ ID NO: 4534460 - DNA, 25 bp, Homo sapien
gagggctttcaagcaaggctgtagc

SEQ ID NO: 4534461 - DNA, 25 bp, Homo sapien
gctttcaagcaaggctgtagcagtt

SEQ ID NO: 4534462 - DNA, 25 bp, Homo sapien
actgagagggctttcaagcaaggct

SEQ ID NO: 4534463 - DNA, 25 bp, Homo sapien
tgagagggctttcaagcaaggctgt

SEQ ID NO: 4534464 - DNA, 25 bp, Homo sapien
gatcaaggtgtgtataagaggtttt

SEQ ID NO: 4534465 - DNA, 25 bp, Homo sapien
caaaaagatcaaggtgtgtataaga

SEQ ID NO: 4534466 - DNA, 25 bp, Homo sapien
ctgccacaaaaagatcaaggtgtgt

SEQ ID NO: 4534467 - DNA, 25 bp, Homo sapien
ccacaaaaagatcaaggtgtgtata

SEQ ID NO: 4534468 - DNA, 25 bp, Homo sapien
agcaccacctgccaagaagaaagtg

SEQ ID NO: 4534469 - DNA, 25 bp, Homo sapien
atagcaccacctgccaagaagaaag

SEQ ID NO: 4534470 - DNA, 25 bp, Homo sapien
caccacctgccaagaagaaagtgag

SEQ ID NO: 4534471 - DNA, 25 bp, Homo sapien
gcaccacctgccaagaagaaagtga

SEQ ID NO: 4534472 - DNA, 25 bp, Homo sapien
ctgaggctgtagaaaagtttttggc

SEQ ID NO: 4534473 - DNA, 25 bp, Homo sapien
gctgtagaaaagtttttggcaggga

SEQ ID NO: 4534474 - DNA, 25 bp, Homo sapien
tgtagaaaagtttttggcagggagc

SEQ ID NO: 4534475 - DNA, 25 bp, Homo sapien
gaggctgtagaaaagtttttggcag

SEQ ID NO: 4534476 - DNA, 25 bp, Homo sapien
tctggatgctctcatgctcagccag

SEQ ID NO: 4534477 - DNA, 25 bp, Homo sapien
tgaagctaaagccactctggatgcg

SEQ ID NO: 4534478 - DNA, 25 bp, Homo sapien
ctctggatgcgcctctggatgctct

SEQ ID NO: 4534479 - DNA, 25 bp, Homo sapien
aagccactctggatgcgcctctgga

SEQ ID NO: 4534480 - DNA, 25 bp, Homo sapien
ctcataaggagtacagccacaggca

SEQ ID NO: 4534481 - DNA, 25 bp, Homo sapien
tcgatgagtaaccagcccaagttgc

SEQ ID NO: 4534482 - DNA, 25 bp, Homo sapien
ggacaagggctgagtaccatcactg

SEQ ID NO: 4534483 - DNA, 25 bp, Homo sapien
tcactgcaaggaatggatgccccaa

SEQ ID NO: 4534484 - DNA, 25 bp, Homo sapien
ctcacatgagaccacaaaaagggct

SEQ ID NO: 4534485 - DNA, 25 bp, Homo sapien
caggatatgagttagccgtggccca

SEQ ID NO: 4534486 - DNA, 25 bp, Homo sapien
gcctctcacttagctcacagtctga

SEQ ID NO: 4534487 - DNA, 25 bp, Homo sapien
ttttcactaaaactcaggtgctgga

SEQ ID NO: 4534488 - DNA, 25 bp, Homo sapien
gacagtcagcactctcatccccctt

SEQ ID NO: 4534489 - DNA, 25 bp, Homo sapien
acagtcagcactctcatcccccttc

SEQ ID NO: 4534490 - DNA, 25 bp, Homo sapien
cacaggtgacagtcagcactctcat

SEQ ID NO: 4534491 - DNA, 25 bp, Homo sapien
aggtgacagtcagcactctcatccc

SEQ ID NO: 4534492 - DNA, 25 bp, Homo sapien
gaggggcagtgtccatgaatctcaa

SEQ ID NO: 4534493 - DNA, 25 bp, Homo sapien
caacaacaacggatccaacacaatc

SEQ ID NO: 4534494 - DNA, 25 bp, Homo sapien
tttataatgcccacctgatgtgctt

SEQ ID NO: 4534495 - DNA, 25 bp, Homo sapien
aatcagaaattgtccccaacagacc

SEQ ID NO: 4534496 - DNA, 25 bp, Homo sapien
agacagttttgccttgttggccagg

SEQ ID NO: 4534497 - DNA, 25 bp, Homo sapien
agtagagacagttttgccttgttgg

SEQ ID NO: 4534498 - DNA, 25 bp, Homo sapien
gctgtgattacaggtgcgaaccacc

SEQ ID NO: 4534499 - DNA, 25 bp, Homo sapien
tgtgattacaggtgcgaaccaccgt

SEQ ID NO: 4534500 - DNA, 25 bp, Homo sapien
gagacaactagttcctgccaagcta

SEQ ID NO: 4534501 - DNA, 25 bp, Homo sapien
ggtggtccagctcctagagatacaa

SEQ ID NO: 4534502 - DNA, 25 bp, Homo sapien
tagacaagacattgcctgagacccc

SEQ ID NO: 4534503 - DNA, 25 bp, Homo sapien
tgccaagctagacagacagtgttgt

SEQ ID NO: 4534504 - DNA, 25 bp, Homo sapien
tttctgagggtctacagagacatcc

SEQ ID NO: 4534505 - DNA, 25 bp, Homo sapien
gagacatcctactcaattggtctgt

SEQ ID NO: 4534506 - DNA, 25 bp, Homo sapien
ttttagacagttaactggccaggca

SEQ ID NO: 4534507 - DNA, 25 bp, Homo sapien
taaggctgtacttacaatagaaagg

SEQ ID NO: 4534508 - DNA, 25 bp, Homo sapien
catgtcactgtaggctcgggccagg

SEQ ID NO: 4534509 - DNA, 25 bp, Homo sapien
tcttctcgctcacctcctcagtgag

SEQ ID NO: 4534510 - DNA, 25 bp, Homo sapien
ctcagtgagctcacacatgtcactg

SEQ ID NO: 4534511 - DNA, 25 bp, Homo sapien
agagaaagtcctgccggcttccata

SEQ ID NO: 4534512 - DNA, 25 bp, Homo sapien
ctgcagaccagacagaaacgggtga

SEQ ID NO: 4534513 - DNA, 25 bp, Homo sapien
cagaccagacagaaacgggtgaggc

SEQ ID NO: 4534514 - DNA, 25 bp, Homo sapien
gaccagacagaaacgggtgaggccc

SEQ ID NO: 4534515 - DNA, 25 bp, Homo sapien
tgcagaccagacagaaacgggtgag

SEQ ID NO: 4534516 - DNA, 25 bp, Homo sapien
tggagaatgggggccttggccttcc

SEQ ID NO: 4534517 - DNA, 25 bp, Homo sapien
ctgtggagaatgggggccttggcct

SEQ ID NO: 4534518 - DNA, 25 bp, Homo sapien
gtggagaatgggggccttggccttc

SEQ ID NO: 4534519 - DNA, 25 bp, Homo sapien
tgtggagaatgggggccttggcctt

SEQ ID NO: 4534520 - DNA, 25 bp, Homo sapien
tcatcacccctgtgcagctcgtcgg

SEQ ID NO: 4534521 - DNA, 25 bp, Homo sapien
tcagagtcccgctcattgtcagact

SEQ ID NO: 4534522 - DNA, 25 bp, Homo sapien
agcacatcctccaagcctgaggaac

SEQ ID NO: 4534523 - DNA, 25 bp, Homo sapien
tcagactccgcattggctgttgtgt

SEQ ID NO: 4534524 - DNA, 25 bp, Homo sapien
taaggcaaatgtgagaagtccctgc

SEQ ID NO: 4534525 - DNA, 25 bp, Homo sapien
gagtagcccatagtaaccttgagaa

SEQ ID NO: 4534526 - DNA, 25 bp, Homo sapien
gagacacttgccacaaccaacatgg

SEQ ID NO: 4534527 - DNA, 25 bp, Homo sapien
gatgcacccactaaagaggaagctg

SEQ ID NO: 4534528 - DNA, 25 bp, Homo sapien
attaccggtgcctgccaacatgcct

SEQ ID NO: 4534529 - DNA, 25 bp, Homo sapien
ctccacctcctgggttcaagtgatt

SEQ ID NO: 4534530 - DNA, 25 bp, Homo sapien
gattcttctgcctccgcctcctagg

SEQ ID NO: 4534531 - DNA, 25 bp, Homo sapien
tggtgccatcttggcacactacagc

SEQ ID NO: 4534532 - DNA, 25 bp, Homo sapien
gctggacaaggagaaatcggcctct

SEQ ID NO: 4534533 - DNA, 25 bp, Homo sapien
tacctgaataactggagctagcagc

SEQ ID NO: 4534534 - DNA, 25 bp, Homo sapien
tcccagggaggagcatgcttcgtgc

SEQ ID NO: 4534535 - DNA, 25 bp, Homo sapien
tgacatcacactctatccttgggac

SEQ ID NO: 4534536 - DNA, 25 bp, Homo sapien
tttgcagcagcttggtttgaatttt

SEQ ID NO: 4534537 - DNA, 25 bp, Homo sapien
ctggctgtagccataactgcctcca

SEQ ID NO: 4534538 - DNA, 25 bp, Homo sapien
cacaacctggctgtagccataactg

SEQ ID NO: 4534539 - DNA, 25 bp, Homo sapien
taactgcctccaagagagacaactc

SEQ ID NO: 4534540 - DNA, 25 bp, Homo sapien
gctggagccagtggagtcactcctc

SEQ ID NO: 4534541 - DNA, 25 bp, Homo sapien
agtcactcctctcccggacaaacgg

SEQ ID NO: 4534542 - DNA, 25 bp, Homo sapien
ccgaggaggccgtgaagtagacaga

SEQ ID NO: 4534543 - DNA, 25 bp, Homo sapien
atctgtgaacgtggctcccgaggag

SEQ ID NO: 4534544 - DNA, 25 bp, Homo sapien
agcttgtctttctgctcaccatggg

SEQ ID NO: 4534545 - DNA, 25 bp, Homo sapien
ggtaccattaggtcccatccagctt

SEQ ID NO: 4534546 - DNA, 25 bp, Homo sapien
cttactactgctcctcattaaaggg

SEQ ID NO: 4534547 - DNA, 25 bp, Homo sapien
tggaaagcaggccccatcccgaagg

SEQ ID NO: 4534548 - DNA, 25 bp, Homo sapien
gcgccacaaggctggtcagcacaaa

SEQ ID NO: 4534549 - DNA, 25 bp, Homo sapien
gccacaaggctggtcagcacaaagt

SEQ ID NO: 4534550 - DNA, 25 bp, Homo sapien
caaggctggtcagcacaaagtccag

SEQ ID NO: 4534551 - DNA, 25 bp, Homo sapien
cacaaggctggtcagcacaaagtcc

SEQ ID NO: 4534552 - DNA, 25 bp, Homo sapien
ttctcctgtccttcccgtggaaggc

SEQ ID NO: 4534553 - DNA, 25 bp, Homo sapien
cctgtccttcccgtggaaggctggg

SEQ ID NO: 4534554 - DNA, 25 bp, Homo sapien
cttcccgtggaaggctgggcagcac

SEQ ID NO: 4534555 - DNA, 25 bp, Homo sapien
tccttcccgtggaaggctgggcagc

SEQ ID NO: 4534556 - DNA, 25 bp, Homo sapien
tccgggatctgaagtctgcgtatag

SEQ ID NO: 4534557 - DNA, 25 bp, Homo sapien
cgtggcgtccgggatctgaagtctg

SEQ ID NO: 4534558 - DNA, 25 bp, Homo sapien
gcgtccgggatctgaagtctgcgta

SEQ ID NO: 4534559 - DNA, 25 bp, Homo sapien
cgggatctgaagtctgcgtatagtc

SEQ ID NO: 4534560 - DNA, 25 bp, Homo sapien
ttccatcgctggctgtaaaggaggc

SEQ ID NO: 4534561 - DNA, 25 bp, Homo sapien
ggcacaggaatccaaggccggcggc

SEQ ID NO: 4534562 - DNA, 25 bp, Homo sapien
gacgctgggtccgtttccatcgctg

SEQ ID NO: 4534563 - DNA, 25 bp, Homo sapien
ctgcggccatgacgctgggtccgtt

SEQ ID NO: 4534564 - DNA, 25 bp, Homo sapien
ccagcaacagtcccagcccggcacg

SEQ ID NO: 4534565 - DNA, 25 bp, Homo sapien
cagcaacagtcccagcccggcacgg

SEQ ID NO: 4534566 - DNA, 25 bp, Homo sapien
cacagagtccggcttctgggccttc

SEQ ID NO: 4534567 - DNA, 25 bp, Homo sapien
gtgcaccccagtctgaaccctaagg

SEQ ID NO: 4534568 - DNA, 25 bp, Homo sapien
gagagagattcgtgaacccggtaaa

SEQ ID NO: 4534569 - DNA, 25 bp, Homo sapien
aaaccctgagctctcgactacgtgc

SEQ ID NO: 4534570 - DNA, 25 bp, Homo sapien
ctcagcctcacgacactgcagacca

SEQ ID NO: 4534571 - DNA, 25 bp, Homo sapien
cctcacgacactgcagaccacaaac

SEQ ID NO: 4534572 - DNA, 25 bp, Homo sapien
agcctcacgacactgcagaccacaa

SEQ ID NO: 4534573 - DNA, 25 bp, Homo sapien
tcagcctcacgacactgcagaccac

SEQ ID NO: 4534574 - DNA, 25 bp, Homo sapien
ctggcaggagatccactcagaccct

SEQ ID NO: 4534575 - DNA, 25 bp, Homo sapien
ggcctggcaggagatccactcagac

SEQ ID NO: 4534576 - DNA, 25 bp, Homo sapien
ccccgaaggcgctctggcctggcag

SEQ ID NO: 4534577 - DNA, 25 bp, Homo sapien
gcaggagatccactcagacccttac

SEQ ID NO: 4534578 - DNA, 25 bp, Homo sapien
cacgctgtcagtgaccgtgacgtca

SEQ ID NO: 4534579 - DNA, 25 bp, Homo sapien
tgtcagtgaccgtgacgtcaggcag

SEQ ID NO: 4534580 - DNA, 25 bp, Homo sapien
cgggctcacgctgtcagtgaccgtg

SEQ ID NO: 4534581 - DNA, 25 bp, Homo sapien
tcagtgaccgtgacgtcaggcaggc

SEQ ID NO: 4534582 - DNA, 25 bp, Homo sapien
taacttgctgctcccggaatacgct

SEQ ID NO: 4534583 - DNA, 25 bp, Homo sapien
tgtacctggaaaacgtcacgctctc

SEQ ID NO: 4534584 - DNA, 25 bp, Homo sapien
taattgtggcaactaaaaagaccga

SEQ ID NO: 4534585 - DNA, 25 bp, Homo sapien
tttctacctgcgcttctgcctggac

SEQ ID NO: 4534586 - DNA, 25 bp, Homo sapien
agcagcagctgcagagattctggtg

SEQ ID NO: 4534587 - DNA, 25 bp, Homo sapien
cagctgcagagattctggtgcttgc

SEQ ID NO: 4534588 - DNA, 25 bp, Homo sapien
gctgcagagattctggtgcttgcca

SEQ ID NO: 4534589 - DNA, 25 bp, Homo sapien
agcagctgcagagattctggtgctt

SEQ ID NO: 4534590 - DNA, 25 bp, Homo sapien
gttctgtggcgcagtttaagaggca

SEQ ID NO: 4534591 - DNA, 25 bp, Homo sapien
tggcaggatagttctgtggcgcagt

SEQ ID NO: 4534592 - DNA, 25 bp, Homo sapien
gcaggatagttctgtggcgcagttt

SEQ ID NO: 4534593 - DNA, 25 bp, Homo sapien
ggatagttctgtggcgcagtttaag

SEQ ID NO: 4534594 - DNA, 25 bp, Homo sapien
aaatccttctaatcagtggatgatt

SEQ ID NO: 4534595 - DNA, 25 bp, Homo sapien
tgtacatagctttcacatgtagggt

SEQ ID NO: 4534596 - DNA, 25 bp, Homo sapien
tgaagggcctattcaagtcagttac

SEQ ID NO: 4534597 - DNA, 25 bp, Homo sapien
atttctaatgatatactaggcatca

SEQ ID NO: 4534598 - DNA, 25 bp, Homo sapien
gcaaggatccgcctctgtgctggaa

SEQ ID NO: 4534599 - DNA, 25 bp, Homo sapien
cgtggacacacggttgggaactcgc

SEQ ID NO: 4534600 - DNA, 25 bp, Homo sapien
tattttagttgtcgccttcagggct

SEQ ID NO: 4534601 - DNA, 25 bp, Homo sapien
caagcgcgcggttcctttacagact

SEQ ID NO: 4534602 - DNA, 25 bp, Homo sapien
ccacggcggtcacgggcaaggtgcc

SEQ ID NO: 4534603 - DNA, 25 bp, Homo sapien
ccgctcctgattggcggccacggcg

SEQ ID NO: 4534604 - DNA, 25 bp, Homo sapien
caaggtgccccgggattgacgccgc

SEQ ID NO: 4534605 - DNA, 25 bp, Homo sapien
tgattggcggccacggcggtcacgg

SEQ ID NO: 4534606 - DNA, 25 bp, Homo sapien
agagccggagtaacgggactcccag

SEQ ID NO: 4534607 - DNA, 25 bp, Homo sapien
ggccagagccggagtaacgggactc

SEQ ID NO: 4534608 - DNA, 25 bp, Homo sapien
gccagagccggagtaacgggactcc

SEQ ID NO: 4534609 - DNA, 25 bp, Homo sapien
cagagccggagtaacgggactccca

SEQ ID NO: 4534610 - DNA, 25 bp, Homo sapien
tgctcatcagcacccagatccgcat

SEQ ID NO: 4534611 - DNA, 25 bp, Homo sapien
ctgctcatcagcacccagatccgca

SEQ ID NO: 4534612 - DNA, 25 bp, Homo sapien
ccctagggggctgcgactgcacctt

SEQ ID NO: 4534613 - DNA, 25 bp, Homo sapien
gaccaggccctagggggctgcgact

SEQ ID NO: 4534614 - DNA, 25 bp, Homo sapien
ggccgcctggcgacttggagccggg

SEQ ID NO: 4534615 - DNA, 25 bp, Homo sapien
cctggcgacttggagccgggaccag

SEQ ID NO: 4534616 - DNA, 25 bp, Homo sapien
tgtacccactggcagacactcttga

SEQ ID NO: 4534617 - DNA, 25 bp, Homo sapien
gatgaacagtcggatccagagctga

SEQ ID NO: 4534618 - DNA, 25 bp, Homo sapien
ctttaaggcactagggagggcgcct

SEQ ID NO: 4534619 - DNA, 25 bp, Homo sapien
gaaccttactcagggctagcaggca

SEQ ID NO: 4534620 - DNA, 25 bp, Homo sapien
gagtcactacaagagtggccaggct

SEQ ID NO: 4534621 - DNA, 25 bp, Homo sapien
gacactagctttgtaccaggagctt

SEQ ID NO: 4534622 - DNA, 25 bp, Homo sapien
gatagctcgtgaagtacctagaagg

SEQ ID NO: 4534623 - DNA, 25 bp, Homo sapien
gcaccttcactagcttgttgggaag

SEQ ID NO: 4534624 - DNA, 25 bp, Homo sapien
gtgacgttgaagaaaagggctgagg

SEQ ID NO: 4534625 - DNA, 25 bp, Homo sapien
tattggtgacgttgaagaaaagggc

SEQ ID NO: 4534626 - DNA, 25 bp, Homo sapien
tggtgacgttgaagaaaagggctga

SEQ ID NO: 4534627 - DNA, 25 bp, Homo sapien
atttattggtgacgttgaagaaaag

SEQ ID NO: 4534628 - DNA, 25 bp, Homo sapien
cctgctgcatccgtgcgatcagctg

SEQ ID NO: 4534629 - DNA, 25 bp, Homo sapien
ggtcttcctgctgcatccgtgcgat

SEQ ID NO: 4534630 - DNA, 25 bp, Homo sapien
tcttcctgctgcatccgtgcgatca

SEQ ID NO: 4534631 - DNA, 25 bp, Homo sapien
gcatccgtgcgatcagctgttgccg

SEQ ID NO: 4534632 - DNA, 25 bp, Homo sapien
cgcatgcgcatcatgacgaggctct

SEQ ID NO: 4534633 - DNA, 25 bp, Homo sapien
tggcgcatgcgcatcatgacgaggc

SEQ ID NO: 4534634 - DNA, 25 bp, Homo sapien
tcatgacgaggctctcgtagtccct

SEQ ID NO: 4534635 - DNA, 25 bp, Homo sapien
tgcgcatcatgacgaggctctcgta

SEQ ID NO: 4534636 - DNA, 25 bp, Homo sapien
tgccgaggcagtgctgcgttctaag

SEQ ID NO: 4534637 - DNA, 25 bp, Homo sapien
agactccgagtacggtgccgaggca

SEQ ID NO: 4534638 - DNA, 25 bp, Homo sapien
ctgcgttctaagagtctcggaggga

SEQ ID NO: 4534639 - DNA, 25 bp, Homo sapien
acagcctcacagactccgagtacgg

SEQ ID NO: 4534640 - DNA, 25 bp, Homo sapien
ggcatggcgctgctccccattaaca

SEQ ID NO: 4534641 - DNA, 25 bp, Homo sapien
gttcctgctcgtgagggcctgacag

SEQ ID NO: 4534642 - DNA, 25 bp, Homo sapien
tgagtcacccataccagctacaggt

SEQ ID NO: 4534643 - DNA, 25 bp, Homo sapien
actcttcctacccagacactgtggg

SEQ ID NO: 4534644 - DNA, 25 bp, Homo sapien
ctgtgatcagaaaggaagccgcgtg

SEQ ID NO: 4534645 - DNA, 25 bp, Homo sapien
ctggggtgttggtcccagctgcccc

SEQ ID NO: 4534646 - DNA, 25 bp, Homo sapien
aagccgcgtggtgacacataaagca

SEQ ID NO: 4534647 - DNA, 25 bp, Homo sapien
tccccattgccctggggtgttggtc

SEQ ID NO: 4534648 - DNA, 25 bp, Homo sapien
gagtgagctcgggccatctgctgcc

SEQ ID NO: 4534649 - DNA, 25 bp, Homo sapien
aggcaaacaccagggcgagtgagct

SEQ ID NO: 4534650 - DNA, 25 bp, Homo sapien
ccacactgccccagagacatatagg

SEQ ID NO: 4534651 - DNA, 25 bp, Homo sapien
ccccagagacatataggagccaggc

SEQ ID NO: 4534652 - DNA, 25 bp, Homo sapien
accctattcagtaaccaggccactc

SEQ ID NO: 4534653 - DNA, 25 bp, Homo sapien
tattcagtaaccaggccactcctgt

SEQ ID NO: 4534654 - DNA, 25 bp, Homo sapien
cctattcagtaaccaggccactcct

SEQ ID NO: 4534655 - DNA, 25 bp, Homo sapien
ctattcagtaaccaggccactcctg

SEQ ID NO: 4534656 - DNA, 25 bp, Homo sapien
ttagacagttctgccgcctgaaccc

SEQ ID NO: 4534657 - DNA, 25 bp, Homo sapien
ccgggattagacagttctgccgcct

SEQ ID NO: 4534658 - DNA, 25 bp, Homo sapien
tccagaaccgtctcccgggattaga

SEQ ID NO: 4534659 - DNA, 25 bp, Homo sapien
cgtctcccgggattagacagttctg

SEQ ID NO: 4534660 - DNA, 25 bp, Homo sapien
aggagatattgcctcttgacagtcg

SEQ ID NO: 4534661 - DNA, 25 bp, Homo sapien
gatattgcctcttgacagtcggtcc

SEQ ID NO: 4534662 - DNA, 25 bp, Homo sapien
gcctcttgacagtcggtccctttct

SEQ ID NO: 4534663 - DNA, 25 bp, Homo sapien
caagaggagatattgcctcttgaca

SEQ ID NO: 4534664 - DNA, 25 bp, Homo sapien
agcccctcttgcctgggttggtgga

SEQ ID NO: 4534665 - DNA, 25 bp, Homo sapien
ccaagctcactctaggccccaagat

SEQ ID NO: 4534666 - DNA, 25 bp, Homo sapien
ggttggtggacctgccaagctcact

SEQ ID NO: 4534667 - DNA, 25 bp, Homo sapien
aacgtgaaatcacagcccctcttgc

SEQ ID NO: 4534668 - DNA, 25 bp, Homo sapien
aatcttcagagggttatccaccagg

SEQ ID NO: 4534669 - DNA, 25 bp, Homo sapien
tggggctgtccctccaaccaggaaa

SEQ ID NO: 4534670 - DNA, 25 bp, Homo sapien
gccttgacggttgcaaactccacca

SEQ ID NO: 4534671 - DNA, 25 bp, Homo sapien
tgccttgacggttgcaaactccacc

SEQ ID NO: 4534672 - DNA, 25 bp, Homo sapien
gctgccttgacggttgcaaactcca

SEQ ID NO: 4534673 - DNA, 25 bp, Homo sapien
cgctgccttgacggttgcaaactcc

SEQ ID NO: 4534674 - DNA, 25 bp, Homo sapien
gtagatatgttaagggaagttcagg

SEQ ID NO: 4534675 - DNA, 25 bp, Homo sapien
tagatatgttaagggaagttcaggc

SEQ ID NO: 4534676 - DNA, 25 bp, Homo sapien
gatatgttaagggaagttcaggcat

SEQ ID NO: 4534677 - DNA, 25 bp, Homo sapien
atatgttaagggaagttcaggcatt

SEQ ID NO: 4534678 - DNA, 25 bp, Homo sapien
ctagggtgtggactgagacgtggac

SEQ ID NO: 4534679 - DNA, 25 bp, Homo sapien
agatgataggaaagagtggacgtca

SEQ ID NO: 4534680 - DNA, 25 bp, Homo sapien
agacgtggactgagatgataggaaa

SEQ ID NO: 4534681 - DNA, 25 bp, Homo sapien
aagagtggacgtcaacagggccgac

SEQ ID NO: 4534682 - DNA, 25 bp, Homo sapien
gaggacgtctttggagtagccacct

SEQ ID NO: 4534683 - DNA, 25 bp, Homo sapien
tctgcaaaagccgtaggaggacgtc

SEQ ID NO: 4534684 - DNA, 25 bp, Homo sapien
tcctccttcttgcacttccatttta

SEQ ID NO: 4534685 - DNA, 25 bp, Homo sapien
caccttttgactcatcctccttctt

SEQ ID NO: 4534686 - DNA, 25 bp, Homo sapien
tagagaatcctctgccctgtgatca

SEQ ID NO: 4534687 - DNA, 25 bp, Homo sapien
gaaaagagagcctcatgaaacactg

SEQ ID NO: 4534688 - DNA, 25 bp, Homo sapien
ttcgtggcaagctctgatctccggg

SEQ ID NO: 4534689 - DNA, 25 bp, Homo sapien
tcctgagagggcttctagagaatcc

SEQ ID NO: 4534690 - DNA, 25 bp, Homo sapien
tccttggccttcagtattttctgcc

SEQ ID NO: 4534691 - DNA, 25 bp, Homo sapien
tgtggccgctctgagcaatctggag

SEQ ID NO: 4534692 - DNA, 25 bp, Homo sapien
gccgctctgagcaatctggagctac

SEQ ID NO: 4534693 - DNA, 25 bp, Homo sapien
ccagtgtggccgctctgagcaatct

SEQ ID NO: 4534694 - DNA, 25 bp, Homo sapien
cagctccaccgaacagccagtgtgg

SEQ ID NO: 4534695 - DNA, 25 bp, Homo sapien
ggcgtatctgctcccggatgagcct

SEQ ID NO: 4534696 - DNA, 25 bp, Homo sapien
ctcctggcgtatctgctcccggatg

SEQ ID NO: 4534697 - DNA, 25 bp, Homo sapien
tggcgtatctgctcccggatgagcc

SEQ ID NO: 4534698 - DNA, 25 bp, Homo sapien
cctggcgtatctgctcccggatgag

SEQ ID NO: 4534699 - DNA, 25 bp, Homo sapien
agctagggctcagcaacctgtgggt

SEQ ID NO: 4534700 - DNA, 25 bp, Homo sapien
tgtaaaaagtccttgggagcttcca

SEQ ID NO: 4534701 - DNA, 25 bp, Homo sapien
caacctgtgggtgggacaaatcacc

SEQ ID NO: 4534702 - DNA, 25 bp, Homo sapien
ccactgaaggtgcaaagagcatgcc

SEQ ID NO: 4534703 - DNA, 25 bp, Homo sapien
caggtggccttctggccagtgtgcc

SEQ ID NO: 4534704 - DNA, 25 bp, Homo sapien
ctggccagtgtgcctgagtgctcac

SEQ ID NO: 4534705 - DNA, 25 bp, Homo sapien
ccttctggccagtgtgcctgagtgc

SEQ ID NO: 4534706 - DNA, 25 bp, Homo sapien
ttctggccagtgtgcctgagtgctc

SEQ ID NO: 4534707 - DNA, 25 bp, Homo sapien
tgtcctggtgctccggctctcctct

SEQ ID NO: 4534708 - DNA, 25 bp, Homo sapien
ctcttgctctagtgtcctggtgctc

SEQ ID NO: 4534709 - DNA, 25 bp, Homo sapien
tctagtgtcctggtgctccggctct

SEQ ID NO: 4534710 - DNA, 25 bp, Homo sapien
tcttgctctagtgtcctggtgctcc

SEQ ID NO: 4534711 - DNA, 25 bp, Homo sapien
gtttctgggtcctctctgctgcttg

SEQ ID NO: 4534712 - DNA, 25 bp, Homo sapien
gctttcctgaccttgtcatatgcag

SEQ ID NO: 4534713 - DNA, 25 bp, Homo sapien
ccttttctcatcaagtttctgggtc

SEQ ID NO: 4534714 - DNA, 25 bp, Homo sapien
cttggctttcctgaccttgtcatat

SEQ ID NO: 4534715 - DNA, 25 bp, Homo sapien
ggtcagcacctccaaggcctgagaa

SEQ ID NO: 4534716 - DNA, 25 bp, Homo sapien
ctggctgcagcatcggtcagcacct

SEQ ID NO: 4534717 - DNA, 25 bp, Homo sapien
tggctgcagcatcggtcagcacctc

SEQ ID NO: 4534718 - DNA, 25 bp, Homo sapien
cagcacctccaaggcctgagaaagc

SEQ ID NO: 4534719 - DNA, 25 bp, Homo sapien
ctgctctgggattatctggattttt

SEQ ID NO: 4534720 - DNA, 25 bp, Homo sapien
aggagagggccttctgcctatacgc

SEQ ID NO: 4534721 - DNA, 25 bp, Homo sapien
ctctgggattatctggatttttgtc

SEQ ID NO: 4534722 - DNA, 25 bp, Homo sapien
gccttctgcctatacgccttcttta

SEQ ID NO: 4534723 - DNA, 25 bp, Homo sapien
tacaaggatgctctctacaacactg

SEQ ID NO: 4534724 - DNA, 25 bp, Homo sapien
cactgttgatactagccagccaaga

SEQ ID NO: 4534725 - DNA, 25 bp, Homo sapien
taaaagattatgattggccggtgcg

SEQ ID NO: 4534726 - DNA, 25 bp, Homo sapien
gacagccactcgaagacaggtactc

SEQ ID NO: 4534727 - DNA, 25 bp, Homo sapien
gggccatagccagggcacctgccat

SEQ ID NO: 4534728 - DNA, 25 bp, Homo sapien
tgggccatagccagggcacctgcca

SEQ ID NO: 4534729 - DNA, 25 bp, Homo sapien
ctgctgggccatagccagggcacct

SEQ ID NO: 4534730 - DNA, 25 bp, Homo sapien
gctgggccatagccagggcacctgc

SEQ ID NO: 4534731 - DNA, 25 bp, Homo sapien
caaggtgtggcttttcacttgcagc

SEQ ID NO: 4534732 - DNA, 25 bp, Homo sapien
aaatcccctggtctctctagcgctt

SEQ ID NO: 4534733 - DNA, 25 bp, Homo sapien
tctgagacttcacaaaggatccagg

SEQ ID NO: 4534734 - DNA, 25 bp, Homo sapien
tagcgcttagaaacacttgcatttc

SEQ ID NO: 4534735 - DNA, 25 bp, Homo sapien
aaacccattcttagcacataagcca

SEQ ID NO: 4534736 - DNA, 25 bp, Homo sapien
cattcttagcacataagccattaaa

SEQ ID NO: 4534737 - DNA, 25 bp, Homo sapien
cccattcttagcacataagccatta

SEQ ID NO: 4534738 - DNA, 25 bp, Homo sapien
tgtaaaacccattcttagcacataa

SEQ ID NO: 4534739 - DNA, 25 bp, Homo sapien
gagggtgccacctacttatgctcca

SEQ ID NO: 4534740 - DNA, 25 bp, Homo sapien
gaagctagccagtgtatccaaagtg

SEQ ID NO: 4534741 - DNA, 25 bp, Homo sapien
tctgtagagggcaaattgagaactc

SEQ ID NO: 4534742 - DNA, 25 bp, Homo sapien
gaactcctaggctatttggacaacc

SEQ ID NO: 4534743 - DNA, 25 bp, Homo sapien
agaaactctagatttcagccgggcg

SEQ ID NO: 4534744 - DNA, 25 bp, Homo sapien
tcctcaggagttctcaacttcaggg

SEQ ID NO: 4534745 - DNA, 25 bp, Homo sapien
tctctaattaatagagaatgacttc

SEQ ID NO: 4534746 - DNA, 25 bp, Homo sapien
tatgtaacttctctaattaatagag

SEQ ID NO: 4534747 - DNA, 25 bp, Homo sapien
aatattgaaacacgagagaggtgga

SEQ ID NO: 4534748 - DNA, 25 bp, Homo sapien
aaaatattgaaacacgagagaggtg

SEQ ID NO: 4534749 - DNA, 25 bp, Homo sapien
aaatattgaaacacgagagaggtgg

SEQ ID NO: 4534750 - DNA, 25 bp, Homo sapien
tagacatcccatggccatttctgat

SEQ ID NO: 4534751 - DNA, 25 bp, Homo sapien
atagacatcccatggccatttctga

SEQ ID NO: 4534752 - DNA, 25 bp, Homo sapien
catagacatcccatggccatttctg

SEQ ID NO: 4534753 - DNA, 25 bp, Homo sapien
tcatagacatcccatggccatttct

SEQ ID NO: 4534754 - DNA, 25 bp, Homo sapien
cctcggaccgtccaggaaatgtctg

SEQ ID NO: 4534755 - DNA, 25 bp, Homo sapien
gaaatgtctgggagcccgcctgcgg

SEQ ID NO: 4534756 - DNA, 25 bp, Homo sapien
ttgaggccctcggaccgtccaggaa

SEQ ID NO: 4534757 - DNA, 25 bp, Homo sapien
tgcggagggcatagcgccgaccctc

SEQ ID NO: 4534758 - DNA, 25 bp, Homo sapien
agcggatgccagcagtggccgaggc

SEQ ID NO: 4534759 - DNA, 25 bp, Homo sapien
agagcggatgccagcagtggccgag

SEQ ID NO: 4534760 - DNA, 25 bp, Homo sapien
gagcggatgccagcagtggccgagg

SEQ ID NO: 4534761 - DNA, 25 bp, Homo sapien
gcggatgccagcagtggccgaggcg

SEQ ID NO: 4534762 - DNA, 25 bp, Homo sapien
ggacaggaaggaccgccagacctct

SEQ ID NO: 4534763 - DNA, 25 bp, Homo sapien
ggaccgccagacctctcaagatcag

SEQ ID NO: 4534764 - DNA, 25 bp, Homo sapien
ctaggacaggaaggaccgccagacc

SEQ ID NO: 4534765 - DNA, 25 bp, Homo sapien
aggaaggaccgccagacctctcaag

SEQ ID NO: 4534766 - DNA, 25 bp, Homo sapien
tcaatgcctagcagcgcgtacaggt

SEQ ID NO: 4534767 - DNA, 25 bp, Homo sapien
cctcaatgcctagcagcgcgtacag

SEQ ID NO: 4534768 - DNA, 25 bp, Homo sapien
ggtccatctgtaagagctccttggt

SEQ ID NO: 4534769 - DNA, 25 bp, Homo sapien
cctagcagcgcgtacaggtccatct

SEQ ID NO: 4534770 - DNA, 25 bp, Homo sapien
cacacagacagtaggagtatgcaaa

SEQ ID NO: 4534771 - DNA, 25 bp, Homo sapien
ggaaggcattggacaacagccagct

SEQ ID NO: 4534772 - DNA, 25 bp, Homo sapien
tgacagaaactagctgtgaccacac

SEQ ID NO: 4534773 - DNA, 25 bp, Homo sapien
ggagctatttccctcttagccagga

SEQ ID NO: 4534774 - DNA, 25 bp, Homo sapien
gaggccggctgagtctccggagttt

SEQ ID NO: 4534775 - DNA, 25 bp, Homo sapien
ttctgaggccggctgagtctccgga

SEQ ID NO: 4534776 - DNA, 25 bp, Homo sapien
ccggctgagtctccggagtttcttg

SEQ ID NO: 4534777 - DNA, 25 bp, Homo sapien
ggccggctgagtctccggagtttct

SEQ ID NO: 4534778 - DNA, 25 bp, Homo sapien
tgtggggcgggggcagttcccaaga

SEQ ID NO: 4534779 - DNA, 25 bp, Homo sapien
tctgtggggcgggggcagttcccaa

SEQ ID NO: 4534780 - DNA, 25 bp, Homo sapien
ctctgtggggcgggggcagttccca

SEQ ID NO: 4534781 - DNA, 25 bp, Homo sapien
ggcgggggcagttcccaagaatggc

SEQ ID NO: 4534782 - DNA, 25 bp, Homo sapien
ctgtggatagatccatgagagcttc

SEQ ID NO: 4534783 - DNA, 25 bp, Homo sapien
cctctgtggatagatccatgagagc

SEQ ID NO: 4534784 - DNA, 25 bp, Homo sapien
ttctgctcctctgtggatagatcca

SEQ ID NO: 4534785 - DNA, 25 bp, Homo sapien
gctcctctgtggatagatccatgag

SEQ ID NO: 4534786 - DNA, 25 bp, Homo sapien
gaagttgcagagaatggatcacacc

SEQ ID NO: 4534787 - DNA, 25 bp, Homo sapien
cagaagttgcagagaatggatcaca

SEQ ID NO: 4534788 - DNA, 25 bp, Homo sapien
agttgcagagaatggatcacaccac

SEQ ID NO: 4534789 - DNA, 25 bp, Homo sapien
gcagaagttgcagagaatggatcac

SEQ ID NO: 4534790 - DNA, 25 bp, Homo sapien
tctggaaggatttgccccggaatgt

SEQ ID NO: 4534791 - DNA, 25 bp, Homo sapien
tccgggtgggacttggactctgagt

SEQ ID NO: 4534792 - DNA, 25 bp, Homo sapien
gaagagctcctgaacttgagcatcc

SEQ ID NO: 4534793 - DNA, 25 bp, Homo sapien
cctgggtatcttggaggagtccggg

SEQ ID NO: 4534794 - DNA, 25 bp, Homo sapien
cggtcatacttcactgtcaggcggc

SEQ ID NO: 4534795 - DNA, 25 bp, Homo sapien
aagcccagtggaccttcttacatgg

SEQ ID NO: 4534796 - DNA, 25 bp, Homo sapien
tggaccttcttacatgggttctccc

SEQ ID NO: 4534797 - DNA, 25 bp, Homo sapien
cagaagcccagtggaccttcttaca

SEQ ID NO: 4534798 - DNA, 25 bp, Homo sapien
ccagtggaccttcttacatgggttc

SEQ ID NO: 4534799 - DNA, 25 bp, Homo sapien
caaggagctgggaaaaaccgccagt

SEQ ID NO: 4534800 - DNA, 25 bp, Homo sapien
ggcaaggagctgggaaaaaccgcca

SEQ ID NO: 4534801 - DNA, 25 bp, Homo sapien
gcaaggagctgggaaaaaccgccag

SEQ ID NO: 4534802 - DNA, 25 bp, Homo sapien
ctgagcagagccacagagggaagtg

SEQ ID NO: 4534803 - DNA, 25 bp, Homo sapien
ggctttcatcagtgtggctctcttc

SEQ ID NO: 4534804 - DNA, 25 bp, Homo sapien
ctgggctttcatcagtgtggctctc

SEQ ID NO: 4534805 - DNA, 25 bp, Homo sapien
gggctttcatcagtgtggctctctt

SEQ ID NO: 4534806 - DNA, 25 bp, Homo sapien
tgggctttcatcagtgtggctctct

SEQ ID NO: 4534807 - DNA, 25 bp, Homo sapien
tagatgtagaactacaaagtcaaag

SEQ ID NO: 4534808 - DNA, 25 bp, Homo sapien
gaatgtgcaaaattgtaggaggttt

SEQ ID NO: 4534809 - DNA, 25 bp, Homo sapien
gatatttatggccatattagttccc

SEQ ID NO: 4534810 - DNA, 25 bp, Homo sapien
tttttcagtgaatgcattccaaaag

SEQ ID NO: 4534811 - DNA, 25 bp, Homo sapien
aaggtgtcagccagcactatagtca

SEQ ID NO: 4534812 - DNA, 25 bp, Homo sapien
tccaggctcactcacaagggtgttg

SEQ ID NO: 4534813 - DNA, 25 bp, Homo sapien
agtcacctcaaggttcaagagcagg

SEQ ID NO: 4534814 - DNA, 25 bp, Homo sapien
gttggctaaagacattggatcctgc

SEQ ID NO: 4534815 - DNA, 25 bp, Homo sapien
aagtcgctaggtccaactacactca

SEQ ID NO: 4534816 - DNA, 25 bp, Homo sapien
tccaggaagtgacatcctatgactt

SEQ ID NO: 4534817 - DNA, 25 bp, Homo sapien
gattctatccattagaagcaagtcg

SEQ ID NO: 4534818 - DNA, 25 bp, Homo sapien
ttgtaaccaaatccaggaagtgaca

SEQ ID NO: 4534819 - DNA, 25 bp, Homo sapien
cagtgagctatggttgtgccacagc

SEQ ID NO: 4534820 - DNA, 25 bp, Homo sapien
tgcagtgagctatggttgtgccaca

SEQ ID NO: 4534821 - DNA, 25 bp, Homo sapien
ctgcagtgagctatggttgtgccac

SEQ ID NO: 4534822 - DNA, 25 bp, Homo sapien
gtgagctatggttgtgccacagcac

SEQ ID NO: 4534823 - DNA, 25 bp, Homo sapien
tctgtatatattatctgtttcagtt

SEQ ID NO: 4534824 - DNA, 25 bp, Homo sapien
ctgaggtaacttgactggggctaaa

SEQ ID NO: 4534825 - DNA, 25 bp, Homo sapien
ggctaaagatgcaagatggcttcac

SEQ ID NO: 4534826 - DNA, 25 bp, Homo sapien
gcagggtcagctagtctttgctgag

SEQ ID NO: 4534827 - DNA, 25 bp, Homo sapien
ttggcagggtcagctagtctttgct

SEQ ID NO: 4534828 - DNA, 25 bp, Homo sapien
aggtgctatctctctcatgcagcac

SEQ ID NO: 4534829 - DNA, 25 bp, Homo sapien
cagcttctcagttgggggctggcgt

SEQ ID NO: 4534830 - DNA, 25 bp, Homo sapien
tgctatctctctcatgcagcacaaa

SEQ ID NO: 4534831 - DNA, 25 bp, Homo sapien
tctctctcatgcagcacaaacttct

SEQ ID NO: 4534832 - DNA, 25 bp, Homo sapien
aacaagttccagatgcaaagagaag

SEQ ID NO: 4534833 - DNA, 25 bp, Homo sapien
agggccccacttctgctaggtccaa

SEQ ID NO: 4534834 - DNA, 25 bp, Homo sapien
acttctgctaggtccaactggtcaa

SEQ ID NO: 4534835 - DNA, 25 bp, Homo sapien
atgctacaagatttcataaggcctg

SEQ ID NO: 4534836 - DNA, 25 bp, Homo sapien
ctcttcattatggaagcatcccatg

SEQ ID NO: 4534837 - DNA, 25 bp, Homo sapien
cattatggaagcatcccatgttcac

SEQ ID NO: 4534838 - DNA, 25 bp, Homo sapien
ggtcatcacggtgtgtctctctctt

SEQ ID NO: 4534839 - DNA, 25 bp, Homo sapien
ctgtcatcaaatatggtatgtggag

SEQ ID NO: 4534840 - DNA, 25 bp, Homo sapien
ttgagctccctagcggtccgcctgt

SEQ ID NO: 4534841 - DNA, 25 bp, Homo sapien
cgctcgtgcgtgtgtccgggtactt

SEQ ID NO: 4534842 - DNA, 25 bp, Homo sapien
ggctggagcatgtccggccctttgt

SEQ ID NO: 4534843 - DNA, 25 bp, Homo sapien
gccctttgttctgcgctcgtgcgtg

SEQ ID NO: 4534844 - DNA, 25 bp, Homo sapien
taggcagtacagccgaatcaagcct

SEQ ID NO: 4534845 - DNA, 25 bp, Homo sapien
cagtacagccgaatcaagcctggtg

SEQ ID NO: 4534846 - DNA, 25 bp, Homo sapien
ggcagtacagccgaatcaagcctgg

SEQ ID NO: 4534847 - DNA, 25 bp, Homo sapien
gcagtacagccgaatcaagcctggt

SEQ ID NO: 4534848 - DNA, 25 bp, Homo sapien
cccttgggccagaagtaccagacta

SEQ ID NO: 4534849 - DNA, 25 bp, Homo sapien
taccccatggtgctaggaagaggag

SEQ ID NO: 4534850 - DNA, 25 bp, Homo sapien
tcagctaagctcacgtcctgagaaa

SEQ ID NO: 4534851 - DNA, 25 bp, Homo sapien
tggacctgcctgcataggagtttgg

SEQ ID NO: 4534852 - DNA, 25 bp, Homo sapien
tggcctagaccagcagacagagcca

SEQ ID NO: 4534853 - DNA, 25 bp, Homo sapien
tcttcccccaagattgagctctctg

SEQ ID NO: 4534854 - DNA, 25 bp, Homo sapien
cccaccctggcctagaccagcagac

SEQ ID NO: 4534855 - DNA, 25 bp, Homo sapien
accctggcctagaccagcagacaga

SEQ ID NO: 4534856 - DNA, 25 bp, Homo sapien
gtgccaaggctgaagactgggtcca

SEQ ID NO: 4534857 - DNA, 25 bp, Homo sapien
taaattgttcacaagcagcaccctg

SEQ ID NO: 4534858 - DNA, 25 bp, Homo sapien
tgaggtttaggctgtatgggttccc

SEQ ID NO: 4534859 - DNA, 25 bp, Homo sapien
aggtgaggtcatgggaaaccagctc

SEQ ID NO: 4534860 - DNA, 25 bp, Homo sapien
taggctcacccaggcatatcagagt

SEQ ID NO: 4534861 - DNA, 25 bp, Homo sapien
tgagtcctatgaggtggccaggccc

SEQ ID NO: 4534862 - DNA, 25 bp, Homo sapien
gaccttgaggaaagggatgatcccc

SEQ ID NO: 4534863 - DNA, 25 bp, Homo sapien
aactgggttcccaaactgctcggag

SEQ ID NO: 4534864 - DNA, 25 bp, Homo sapien
gggtgcgcacacctttggcattcag

SEQ ID NO: 4534865 - DNA, 25 bp, Homo sapien
cccctggtccagctgaattagtacg

SEQ ID NO: 4534866 - DNA, 25 bp, Homo sapien
caatggcactgagaatagccgagtc

SEQ ID NO: 4534867 - DNA, 25 bp, Homo sapien
cagccgggctttgtgctcaatggca

SEQ ID NO: 4534868 - DNA, 25 bp, Homo sapien
accacgctgaagcacgccaggaaga

SEQ ID NO: 4534869 - DNA, 25 bp, Homo sapien
tctctgtgatgttttgaaaggagct

SEQ ID NO: 4534870 - DNA, 25 bp, Homo sapien
gaagacatcggtatccgggtagcaa

SEQ ID NO: 4534871 - DNA, 25 bp, Homo sapien
gcgtgcggatctcgggcagccattt

SEQ ID NO: 4534872 - DNA, 25 bp, Homo sapien
accggagctccatccaccaggactt

SEQ ID NO: 4534873 - DNA, 25 bp, Homo sapien
tcccagagctcaatgcgcaccggag

SEQ ID NO: 4534874 - DNA, 25 bp, Homo sapien
caccggagctccatccaccaggact

SEQ ID NO: 4534875 - DNA, 25 bp, Homo sapien
agctcaatgcgcaccggagctccat

SEQ ID NO: 4534876 - DNA, 25 bp, Homo sapien
tgtccagcgcagtgggccggtagcg

SEQ ID NO: 4534877 - DNA, 25 bp, Homo sapien
agaaggtgtccagcgcagtgggccg

SEQ ID NO: 4534878 - DNA, 25 bp, Homo sapien
tgcaggtgtagctgacgatgaggct

SEQ ID NO: 4534879 - DNA, 25 bp, Homo sapien
ctgacgatgaggctgctcttgccca

SEQ ID NO: 4534880 - DNA, 25 bp, Homo sapien
ctgggggcgcgctacgccgccgcgg

SEQ ID NO: 4534881 - DNA, 25 bp, Homo sapien
ggcgcgctacgccgccgcgggggag

SEQ ID NO: 4534882 - DNA, 25 bp, Homo sapien
gagcgggggcggctcggcctcgctc

SEQ ID NO: 4534883 - DNA, 25 bp, Homo sapien
cctcgctcagctcccgcggcggcat

SEQ ID NO: 4534884 - DNA, 25 bp, Homo sapien
cctctgactgaatgggtccaggctg

SEQ ID NO: 4534885 - DNA, 25 bp, Homo sapien
gtctcggcttcgctgcgctcggtga

SEQ ID NO: 4534886 - DNA, 25 bp, Homo sapien
ggctgggcgagtcggcccagcgcta

SEQ ID NO: 4534887 - DNA, 25 bp, Homo sapien
ctcggtgaagcaggtcccgctggct

SEQ ID NO: 4534888 - DNA, 25 bp, Homo sapien
tcatctacatgtttcaggcggcccc

SEQ ID NO: 4534889 - DNA, 25 bp, Homo sapien
gtttgtgtagggccccgcccatctc

SEQ ID NO: 4534890 - DNA, 25 bp, Homo sapien
ctacatgtttcaggcggccccggac

SEQ ID NO: 4534891 - DNA, 25 bp, Homo sapien
gcccatctcatctacatgtttcagg

SEQ ID NO: 4534892 - DNA, 25 bp, Homo sapien
ggcccagaatcctttctctgatctc

SEQ ID NO: 4534893 - DNA, 25 bp, Homo sapien
ctagaaagcccaaaagctgttgtat

SEQ ID NO: 4534894 - DNA, 25 bp, Homo sapien
caacgcataagggagactgtactga

SEQ ID NO: 4534895 - DNA, 25 bp, Homo sapien
tatcccatacatcccggagagccat

SEQ ID NO: 4534896 - DNA, 25 bp, Homo sapien
tgtactgagtctgccacaaacaggg

SEQ ID NO: 4534897 - DNA, 25 bp, Homo sapien
gaatccaaagtccagcctaagaact

SEQ ID NO: 4534898 - DNA, 25 bp, Homo sapien
gggaacagctcaaggctgacctgga

SEQ ID NO: 4534899 - DNA, 25 bp, Homo sapien
gcatgcttttgtgcacactctctgg

SEQ ID NO: 4534900 - DNA, 25 bp, Homo sapien
agaaggcagccttcgaagtcctggg

SEQ ID NO: 4534901 - DNA, 25 bp, Homo sapien
tgatgatccgctctatcgaccggcc

SEQ ID NO: 4534902 - DNA, 25 bp, Homo sapien
gagggggctcgaggccatcaggctc

SEQ ID NO: 4534903 - DNA, 25 bp, Homo sapien
agggggctcgaggccatcaggctcc

SEQ ID NO: 4534904 - DNA, 25 bp, Homo sapien
ggagggggctcgaggccatcaggct

SEQ ID NO: 4534905 - DNA, 25 bp, Homo sapien
caggccaaccgcggcctgggaaaga

SEQ ID NO: 4534906 - DNA, 25 bp, Homo sapien
ccccgctggcgagtggcagttgaac

SEQ ID NO: 4534907 - DNA, 25 bp, Homo sapien
ttgccggagggccaggccaaccgcg

SEQ ID NO: 4534908 - DNA, 25 bp, Homo sapien
cagttgaaccgggaaacagcaaact

SEQ ID NO: 4534909 - DNA, 25 bp, Homo sapien
agggtgccagacatcttctgctcaa

SEQ ID NO: 4534910 - DNA, 25 bp, Homo sapien
gctgtcctcagggtgccagacatct

SEQ ID NO: 4534911 - DNA, 25 bp, Homo sapien
tcctcagggtgccagacatcttctg

SEQ ID NO: 4534912 - DNA, 25 bp, Homo sapien
tccaccaccaggctgggcatcccga

SEQ ID NO: 4534913 - DNA, 25 bp, Homo sapien
cttgctaggttgccaaggctggtct

SEQ ID NO: 4534914 - DNA, 25 bp, Homo sapien
tgctaggttgccaaggctggtcttg

SEQ ID NO: 4534915 - DNA, 25 bp, Homo sapien
ctaggttgccaaggctggtcttgaa

SEQ ID NO: 4534916 - DNA, 25 bp, Homo sapien
tgacgggggtcttgctaggttgcca

SEQ ID NO: 4534917 - DNA, 25 bp, Homo sapien
tctgtaaagagcaagtgcaagtctc

SEQ ID NO: 4534918 - DNA, 25 bp, Homo sapien
ccctgtccgtgagattcagccttga

SEQ ID NO: 4534919 - DNA, 25 bp, Homo sapien
gagcagggcaccatcctaggtcctt

SEQ ID NO: 4534920 - DNA, 25 bp, Homo sapien
tgttcccatgctggtcgtgagcagg

SEQ ID NO: 4534921 - DNA, 25 bp, Homo sapien
tctttgactaacaccagaagcctgg

SEQ ID NO: 4534922 - DNA, 25 bp, Homo sapien
ggaagagtctacactccacactggg

SEQ ID NO: 4534923 - DNA, 25 bp, Homo sapien
gatgggttctgttcccggcaatctc

SEQ ID NO: 4534924 - DNA, 25 bp, Homo sapien
ggcctccgcagggataaccgtgtta

SEQ ID NO: 4534925 - DNA, 25 bp, Homo sapien
tctcctggggatgacatggaatgca

SEQ ID NO: 4534926 - DNA, 25 bp, Homo sapien
agggcagctacaaggaccctagcct

SEQ ID NO: 4534927 - DNA, 25 bp, Homo sapien
agagggccgcctcccgccagggact

SEQ ID NO: 4534928 - DNA, 25 bp, Homo sapien
tacaaggaccctagcctcactgagc

SEQ ID NO: 4534929 - DNA, 25 bp, Homo sapien
ctcgccggacgttgccaacaaacag

SEQ ID NO: 4534930 - DNA, 25 bp, Homo sapien
cctcgccggacgttgccaacaaaca

SEQ ID NO: 4534931 - DNA, 25 bp, Homo sapien
cagccggccagagcagtgaactcag

SEQ ID NO: 4534932 - DNA, 25 bp, Homo sapien
cccagccggccagagcagtgaactc

SEQ ID NO: 4534933 - DNA, 25 bp, Homo sapien
ctggactccctttttgctttccagg

SEQ ID NO: 4534934 - DNA, 25 bp, Homo sapien
ttccaggcaagtctgggctgccagg

SEQ ID NO: 4534935 - DNA, 25 bp, Homo sapien
ctttttgctttccaggcccgatcca

SEQ ID NO: 4534936 - DNA, 25 bp, Homo sapien
ccaggcccgatccaacctttctcct

SEQ ID NO: 4534937 - DNA, 25 bp, Homo sapien
tagggccatgccccagatagaatgc

SEQ ID NO: 4534938 - DNA, 25 bp, Homo sapien
gggccatgccccagatagaatgcac

SEQ ID NO: 4534939 - DNA, 25 bp, Homo sapien
agggccatgccccagatagaatgca

SEQ ID NO: 4534940 - DNA, 25 bp, Homo sapien
tgatggttttgatagacttgtccca

SEQ ID NO: 4534941 - DNA, 25 bp, Homo sapien
atggttttgatagacttgtcccagg

SEQ ID NO: 4534942 - DNA, 25 bp, Homo sapien
gtgatggttttgatagacttgtccc

SEQ ID NO: 4534943 - DNA, 25 bp, Homo sapien
gatggttttgatagacttgtcccag

SEQ ID NO: 4534944 - DNA, 25 bp, Homo sapien
agatgcttctcatgtggcgaaccct

SEQ ID NO: 4534945 - DNA, 25 bp, Homo sapien
cctggagagaatgtctgccggccat

SEQ ID NO: 4534946 - DNA, 25 bp, Homo sapien
catggtctccgcagacccaagctgt

SEQ ID NO: 4534947 - DNA, 25 bp, Homo sapien
agagggcccagtccataccagttac

SEQ ID NO: 4534948 - DNA, 25 bp, Homo sapien
ccttatgagcatttgtctgcggttc

SEQ ID NO: 4534949 - DNA, 25 bp, Homo sapien
catttgtctgcggttctcctttttc

SEQ ID NO: 4534950 - DNA, 25 bp, Homo sapien
tatgagcatttgtctgcggttctcc

SEQ ID NO: 4534951 - DNA, 25 bp, Homo sapien
tcatcccttatgagcatttgtctgc

SEQ ID NO: 4534952 - DNA, 25 bp, Homo sapien
gaagcccccagatgagttctcaagg

SEQ ID NO: 4534953 - DNA, 25 bp, Homo sapien
ccagatgagttctcaaggccaccac

SEQ ID NO: 4534954 - DNA, 25 bp, Homo sapien
aagcccccagatgagttctcaaggc

SEQ ID NO: 4534955 - DNA, 25 bp, Homo sapien
cagatgagttctcaaggccaccacc

SEQ ID NO: 4534956 - DNA, 25 bp, Homo sapien
gtgtagcgttcttccgcccgcaagt

SEQ ID NO: 4534957 - DNA, 25 bp, Homo sapien
gcaagtccgaaagtcccgagtggga

SEQ ID NO: 4534958 - DNA, 25 bp, Homo sapien
aacacttgcggccttcgcactgggc

SEQ ID NO: 4534959 - DNA, 25 bp, Homo sapien
atcccaggaccacgcgtgtagcgtt

SEQ ID NO: 4534960 - DNA, 25 bp, Homo sapien
ccggtctgcggtctccggggatcac

SEQ ID NO: 4534961 - DNA, 25 bp, Homo sapien
ctcggcgtcgcaaagagagagctcc

SEQ ID NO: 4534962 - DNA, 25 bp, Homo sapien
ggatcacgccgggttccgagaaagc

SEQ ID NO: 4534963 - DNA, 25 bp, Homo sapien
acgccgggttccgagaaagcagctg

SEQ ID NO: 4534964 - DNA, 25 bp, Homo sapien
gcctgagccaactctggcgtcagga

SEQ ID NO: 4534965 - DNA, 25 bp, Homo sapien
ggcctgagccaactctggcgtcagg

SEQ ID NO: 4534966 - DNA, 25 bp, Homo sapien
tggcctgagccaactctggcgtcag

SEQ ID NO: 4534967 - DNA, 25 bp, Homo sapien
tggagtctagtatttcaataattta

SEQ ID NO: 4534968 - DNA, 25 bp, Homo sapien
tctggtccactactgccccagacca

SEQ ID NO: 4534969 - DNA, 25 bp, Homo sapien
gaccaccctcaaagctggtcttcag

SEQ ID NO: 4534970 - DNA, 25 bp, Homo sapien
tttaagaatcagaagcactgacctt

SEQ ID NO: 4534971 - DNA, 25 bp, Homo sapien
cccctaagccgagcgggcaaaatgg

SEQ ID NO: 4534972 - DNA, 25 bp, Homo sapien
cccaaatatcctcccagtgtcctgg

SEQ ID NO: 4534973 - DNA, 25 bp, Homo sapien
gctctgggacaagtccatctacttc

SEQ ID NO: 4534974 - DNA, 25 bp, Homo sapien
gccggacaccggtgtgagttatggg

SEQ ID NO: 4534975 - DNA, 25 bp, Homo sapien
cgggtggccctcgtgggctgtagct

SEQ ID NO: 4534976 - DNA, 25 bp, Homo sapien
tccaggtgcttcaggccggagctcg

SEQ ID NO: 4534977 - DNA, 25 bp, Homo sapien
cagtccggacagtcctccggactaa

SEQ ID NO: 4534978 - DNA, 25 bp, Homo sapien
taaggaagccgacctctttgtcgtc

SEQ ID NO: 4534979 - DNA, 25 bp, Homo sapien
tgtcctggattggtctgggtgtctc

SEQ ID NO: 4534980 - DNA, 25 bp, Homo sapien
ctgttcttgcggctggtgtcctgga

SEQ ID NO: 4534981 - DNA, 25 bp, Homo sapien
cctgggccgtgtgctcatgtcttgg

SEQ ID NO: 4534982 - DNA, 25 bp, Homo sapien
cagcagggtcaactccgatcaggtt

SEQ ID NO: 4534983 - DNA, 25 bp, Homo sapien
caggcccggaggcttgtacttgtag

SEQ ID NO: 4534984 - DNA, 25 bp, Homo sapien
gaaagatgggttgctggcgcaagac

SEQ ID NO: 4534985 - DNA, 25 bp, Homo sapien
ggagtctgctgagatgttccgggca

SEQ ID NO: 4534986 - DNA, 25 bp, Homo sapien
gactagtgtcttgttcaggcccgga

SEQ ID NO: 4534987 - DNA, 25 bp, Homo sapien
tcattggcaataaagctggggttgt

SEQ ID NO: 4534988 - DNA, 25 bp, Homo sapien
cgtgccgatcattgaggggttcatt

SEQ ID NO: 4534989 - DNA, 25 bp, Homo sapien
tgaggtcaactttgaggtctggatg

SEQ ID NO: 4534990 - DNA, 25 bp, Homo sapien
ccagatcattctccttgaggtcaac

SEQ ID NO: 4534991 - DNA, 25 bp, Homo sapien
ggctgttgccaagtcagacccagag

SEQ ID NO: 4534992 - DNA, 25 bp, Homo sapien
gtaactggcaccatctcttcaaggg

SEQ ID NO: 4534993 - DNA, 25 bp, Homo sapien
gaaacagtagtacgtcccagtgggc

SEQ ID NO: 4534994 - DNA, 25 bp, Homo sapien
tcttcaagggtgcaaggcatggagc

SEQ ID NO: 4534995 - DNA, 25 bp, Homo sapien
ctgtgaggactgtgaagtatctcaa

SEQ ID NO: 4534996 - DNA, 25 bp, Homo sapien
ctctgtatacagtattgtttttgcc

SEQ ID NO: 4534997 - DNA, 25 bp, Homo sapien
acagtattgtttttgcctggtgtcc

SEQ ID NO: 4534998 - DNA, 25 bp, Homo sapien
gaagtatctcaagctttgtaattct

SEQ ID NO: 4534999 - DNA, 25 bp, Homo sapien
tgagtcataaagagcccaccatgga

SEQ ID NO: 4535000 - DNA, 25 bp, Homo sapien
taaagtatttcctgcaccgggcttc

SEQ ID NO: 4535001 - DNA, 25 bp, Homo sapien
catattgcatcttggtggaggccac

SEQ ID NO: 4535002 - DNA, 25 bp, Homo sapien
tagctctgcttaatggcgcctaggc

SEQ ID NO: 4535003 - DNA, 25 bp, Homo sapien
cctctaaatagcatctgtacacagg

SEQ ID NO: 4535004 - DNA, 25 bp, Homo sapien
catatgtacaagttcagttataaaa

SEQ ID NO: 4535005 - DNA, 25 bp, Homo sapien
caattccgcgattttcaggtgtgca

SEQ ID NO: 4535006 - DNA, 25 bp, Homo sapien
caaatcagaggcttgcccgcccgga

SEQ ID NO: 4535007 - DNA, 25 bp, Homo sapien
cctctctcagtgcaatatagacagt

SEQ ID NO: 4535008 - DNA, 25 bp, Homo sapien
tgcaatatagacagtgcatacagcc

SEQ ID NO: 4535009 - DNA, 25 bp, Homo sapien
agacagtgcatacagccaagcaggg

SEQ ID NO: 4535010 - DNA, 25 bp, Homo sapien
tcagtgcaatatagacagtgcatac

SEQ ID NO: 4535011 - DNA, 25 bp, Homo sapien
gcaaaggggactctgcaagaggggc

SEQ ID NO: 4535012 - DNA, 25 bp, Homo sapien
caaaggggactctgcaagaggggca

SEQ ID NO: 4535013 - DNA, 25 bp, Homo sapien
tactagccctatgagaaatcacact

SEQ ID NO: 4535014 - DNA, 25 bp, Homo sapien
tgctctctccaatgatgacactctg

SEQ ID NO: 4535015 - DNA, 25 bp, Homo sapien
tggacaacaggtatacaatctccct

SEQ ID NO: 4535016 - DNA, 25 bp, Homo sapien
gctgcctgaagactgtggacaacag

SEQ ID NO: 4535017 - DNA, 25 bp, Homo sapien
gaatcgggatggaaacagtatgcct

SEQ ID NO: 4535018 - DNA, 25 bp, Homo sapien
ggactctagccctggtttggttgaa

SEQ ID NO: 4535019 - DNA, 25 bp, Homo sapien
cctgcggagactttgcaagggacgt

SEQ ID NO: 4535020 - DNA, 25 bp, Homo sapien
caggcttgccccgtgagaggtttaa

SEQ ID NO: 4535021 - DNA, 25 bp, Homo sapien
ctttgccctgtttccggaccagaga

SEQ ID NO: 4535022 - DNA, 25 bp, Homo sapien
ctgtttccggaccagagagtctggg

SEQ ID NO: 4535023 - DNA, 25 bp, Homo sapien
tttgccctgtttccggaccagagag

SEQ ID NO: 4535024 - DNA, 25 bp, Homo sapien
gccctgtttccggaccagagagtct

SEQ ID NO: 4535025 - DNA, 25 bp, Homo sapien
gagaagaggcgcttgaaggtccaaa

SEQ ID NO: 4535026 - DNA, 25 bp, Homo sapien
ttcccaggaacattatttcccttgc

SEQ ID NO: 4535027 - DNA, 25 bp, Homo sapien
catgtggaggttcttgggattccca

SEQ ID NO: 4535028 - DNA, 25 bp, Homo sapien
ccagcaggccgaacaagggatgtct

SEQ ID NO: 4535029 - DNA, 25 bp, Homo sapien
acggcagcctggactactggcatga

SEQ ID NO: 4535030 - DNA, 25 bp, Homo sapien
catcttgagtgatgactccctgggc

SEQ ID NO: 4535031 - DNA, 25 bp, Homo sapien
gctaagaaacactgggcgaggctat

SEQ ID NO: 4535032 - DNA, 25 bp, Homo sapien
gagtatatgcaatgccccagccatg

SEQ ID NO: 4535033 - DNA, 25 bp, Homo sapien
tatacgcctatgcatgcagcaggtg

SEQ ID NO: 4535034 - DNA, 25 bp, Homo sapien
catatctaggtgataaatcacacag

SEQ ID NO: 4535035 - DNA, 25 bp, Homo sapien
ctggcccatgtggtatacgcctatg

SEQ ID NO: 4535036 - DNA, 25 bp, Homo sapien
cagcaggtgcctcatatctaggtga

SEQ ID NO: 4535037 - DNA, 25 bp, Homo sapien
gcctgccgtggactttcggctccgg

SEQ ID NO: 4535038 - DNA, 25 bp, Homo sapien
agccccggctttggctcctgccatt

SEQ ID NO: 4535039 - DNA, 25 bp, Homo sapien
ctgaacctttggggcggcctcggct

SEQ ID NO: 4535040 - DNA, 25 bp, Homo sapien
gggctgagtgaccacgtcctgcagc

SEQ ID NO: 4535041 - DNA, 25 bp, Homo sapien
cttctcctgacagggaaagcgagct

SEQ ID NO: 4535042 - DNA, 25 bp, Homo sapien
gaaagcgagctcttagggcatttgt

SEQ ID NO: 4535043 - DNA, 25 bp, Homo sapien
gatgttaacatcaccttctcctgac

SEQ ID NO: 4535044 - DNA, 25 bp, Homo sapien
tcctgacagggaaagcgagctctta

SEQ ID NO: 4535045 - DNA, 25 bp, Homo sapien
agctgtacaagacagcagcaattac

SEQ ID NO: 4535046 - DNA, 25 bp, Homo sapien
ttatggatgcgggagagttggtagc

SEQ ID NO: 4535047 - DNA, 25 bp, Homo sapien
gtatctgagacggagcctgttatgg

SEQ ID NO: 4535048 - DNA, 25 bp, Homo sapien
gagagttggtagctcgagactgagg

SEQ ID NO: 4535049 - DNA, 25 bp, Homo sapien
ctgagacggagcctgttatggatgc

SEQ ID NO: 4535050 - DNA, 25 bp, Homo sapien
ctgctgctctcgtccaggggaatgg

SEQ ID NO: 4535051 - DNA, 25 bp, Homo sapien
ggggaatggagccagtgtgcagctc

SEQ ID NO: 4535052 - DNA, 25 bp, Homo sapien
tgctgctctcgtccaggggaatgga

SEQ ID NO: 4535053 - DNA, 25 bp, Homo sapien
ggaatggagccagtgtgcagctcac

SEQ ID NO: 4535054 - DNA, 25 bp, Homo sapien
tgcaggcatctaaaaggagcctcac

SEQ ID NO: 4535055 - DNA, 25 bp, Homo sapien
gtgatgcaggcatctaaaaggagcc

SEQ ID NO: 4535056 - DNA, 25 bp, Homo sapien
gatgcaggcatctaaaaggagcctc

SEQ ID NO: 4535057 - DNA, 25 bp, Homo sapien
tgatgcaggcatctaaaaggagcct

SEQ ID NO: 4535058 - DNA, 25 bp, Homo sapien
gaaggagtcatctccgtcagcagag

SEQ ID NO: 4535059 - DNA, 25 bp, Homo sapien
ttggagttatcagccgagggaacaa

SEQ ID NO: 4535060 - DNA, 25 bp, Homo sapien
cagagaggttggagttatcagccga

SEQ ID NO: 4535061 - DNA, 25 bp, Homo sapien
gctgagtccacgctaatgaaggagt

SEQ ID NO: 4535062 - DNA, 25 bp, Homo sapien
ttccgcttgcgctctttcactcggt

SEQ ID NO: 4535063 - DNA, 25 bp, Homo sapien
cactcggttggtttcctcctgttgc

SEQ ID NO: 4535064 - DNA, 25 bp, Homo sapien
tttcctcctgttgccgtttctcttc

SEQ ID NO: 4535065 - DNA, 25 bp, Homo sapien
tgcatacttttcccgcttccgcttg

SEQ ID NO: 4535066 - DNA, 25 bp, Homo sapien
ttgggtttcaaggtatctggtttga

SEQ ID NO: 4535067 - DNA, 25 bp, Homo sapien
cctctttgggtttcaaggtatctgg

SEQ ID NO: 4535068 - DNA, 25 bp, Homo sapien
cttctccaactcttcgtcgtctaga

SEQ ID NO: 4535069 - DNA, 25 bp, Homo sapien
cgtctagaagaagactaaccacctc

SEQ ID NO: 4535070 - DNA, 25 bp, Homo sapien
cggtgtcagtctccacatgaacaac

SEQ ID NO: 4535071 - DNA, 25 bp, Homo sapien
gtcagtctccacatgaacaacagct

SEQ ID NO: 4535072 - DNA, 25 bp, Homo sapien
gtctccacatgaacaacagctggat

SEQ ID NO: 4535073 - DNA, 25 bp, Homo sapien
gctggatccaggctatggaaaccat

SEQ ID NO: 4535074 - DNA, 25 bp, Homo sapien
gggttccagtcgctatcatagaaaa

SEQ ID NO: 4535075 - DNA, 25 bp, Homo sapien
tgtctgccctaagcggtgggccctg

SEQ ID NO: 4535076 - DNA, 25 bp, Homo sapien
gcagaatgcgttcttcaatggtgcc

SEQ ID NO: 4535077 - DNA, 25 bp, Homo sapien
tgcctttacagatgagccggtacac

SEQ ID NO: 4535078 - DNA, 25 bp, Homo sapien
tttctcccaagagaataagcggagg

SEQ ID NO: 4535079 - DNA, 25 bp, Homo sapien
ccaccgggccctgctgaaacaggaa

SEQ ID NO: 4535080 - DNA, 25 bp, Homo sapien
tctgcagagggctaaaagctgtcct

SEQ ID NO: 4535081 - DNA, 25 bp, Homo sapien
taagcggaggttcggcctctgcaga

SEQ ID NO: 4535082 - DNA, 25 bp, Homo sapien
ggcctaggcctactttgcttctttg

SEQ ID NO: 4535083 - DNA, 25 bp, Homo sapien
gggcaaactatgtgaaccttggaag

SEQ ID NO: 4535084 - DNA, 25 bp, Homo sapien
tttactcctacagggcaaactatgt

SEQ ID NO: 4535085 - DNA, 25 bp, Homo sapien
gctggcaggacgctctttactccta

SEQ ID NO: 4535086 - DNA, 25 bp, Homo sapien
taagaaaccatagactaaacctgag

SEQ ID NO: 4535087 - DNA, 25 bp, Homo sapien
catctacaacctgatgatttgaaaa

SEQ ID NO: 4535088 - DNA, 25 bp, Homo sapien
gaaattgtgctagaccttcccaggt

SEQ ID NO: 4535089 - DNA, 25 bp, Homo sapien
tgagataggcaagctgagaagaaga

SEQ ID NO: 4535090 - DNA, 25 bp, Homo sapien
gaagcattcctgcaagaagactggg

SEQ ID NO: 4535091 - DNA, 25 bp, Homo sapien
tgaagttcaggatacaaaaaatggg

SEQ ID NO: 4535092 - DNA, 25 bp, Homo sapien
tcattgctctccaaccaccttttga

SEQ ID NO: 4535093 - DNA, 25 bp, Homo sapien
gaataatgcataagagtaacaaaac

SEQ ID NO: 4535094 - DNA, 25 bp, Homo sapien
agttgattgtgctctcattacttac

SEQ ID NO: 4535095 - DNA, 25 bp, Homo sapien
tactctagttccagtcaaagagcaa

SEQ ID NO: 4535096 - DNA, 25 bp, Homo sapien
actagagtcttttaacacaagaggc

SEQ ID NO: 4535097 - DNA, 25 bp, Homo sapien
gtttcatagtagaaaacctgcatat

SEQ ID NO: 4535098 - DNA, 25 bp, Homo sapien
ccagctcgtgtgcttaacaggaaca

SEQ ID NO: 4535099 - DNA, 25 bp, Homo sapien
gctcgtgtgcttaacaggaacacaa

SEQ ID NO: 4535100 - DNA, 25 bp, Homo sapien
ccagtcctccagctcgtgtgcttaa

SEQ ID NO: 4535101 - DNA, 25 bp, Homo sapien
tcctccagctcgtgtgcttaacagg

SEQ ID NO: 4535102 - DNA, 25 bp, Homo sapien
caaccaaacatggaggtcatcttcc

SEQ ID NO: 4535103 - DNA, 25 bp, Homo sapien
gcatgtatcaatagagagagatctc

SEQ ID NO: 4535104 - DNA, 25 bp, Homo sapien
ggtggttacctaggcctgactgtat

SEQ ID NO: 4535105 - DNA, 25 bp, Homo sapien
tttgctgcccactaatagatgactg

SEQ ID NO: 4535106 - DNA, 25 bp, Homo sapien
caatgtcaaacataagtatcggtga

SEQ ID NO: 4535107 - DNA, 25 bp, Homo sapien
taaacatcctggttaatcactaagg

SEQ ID NO: 4535108 - DNA, 25 bp, Homo sapien
cactaaggtaggtatgtcctgtaca

SEQ ID NO: 4535109 - DNA, 25 bp, Homo sapien
cacgggtggcggtctctcagttagt

SEQ ID NO: 4535110 - DNA, 25 bp, Homo sapien
caacatacccaaatagtgctaggca

SEQ ID NO: 4535111 - DNA, 25 bp, Homo sapien
ggccaaagcaccacagagcaaagac

SEQ ID NO: 4535112 - DNA, 25 bp, Homo sapien
caaagacatgtgtaggtctcgctct

SEQ ID NO: 4535113 - DNA, 25 bp, Homo sapien
gactaggcatctggctggtctgtaa

SEQ ID NO: 4535114 - DNA, 25 bp, Homo sapien
tgaaaatcagcaaccatgtctcgcc

SEQ ID NO: 4535115 - DNA, 25 bp, Homo sapien
gaaaatcagcaaccatgtctcgcct

SEQ ID NO: 4535116 - DNA, 25 bp, Homo sapien
cgagatcttggatgagccatcaagc

SEQ ID NO: 4535117 - DNA, 25 bp, Homo sapien
tctcgcctctccgagatcttggatg

SEQ ID NO: 4535118 - DNA, 25 bp, Homo sapien
taggtatgcttcctgtaaaccatgt

SEQ ID NO: 4535119 - DNA, 25 bp, Homo sapien
gtaggtatgcttcctgtaaaccatg

SEQ ID NO: 4535120 - DNA, 25 bp, Homo sapien
ggtatgcttcctgtaaaccatgtat

SEQ ID NO: 4535121 - DNA, 25 bp, Homo sapien
tatgcttcctgtaaaccatgtattc

SEQ ID NO: 4535122 - DNA, 25 bp, Homo sapien
aggacacagtaaatctgatgcaaat

SEQ ID NO: 4535123 - DNA, 25 bp, Homo sapien
gccaaccaggataaaaggacacagt

SEQ ID NO: 4535124 - DNA, 25 bp, Homo sapien
ctgccaaccaggataaaaggacaca

SEQ ID NO: 4535125 - DNA, 25 bp, Homo sapien
caaccaggataaaaggacacagtaa

SEQ ID NO: 4535126 - DNA, 25 bp, Homo sapien
tttcacagctatgaaaatacctact

SEQ ID NO: 4535127 - DNA, 25 bp, Homo sapien
tctttcacagctatgaaaataccta

SEQ ID NO: 4535128 - DNA, 25 bp, Homo sapien
tcacagctatgaaaatacctacttt

SEQ ID NO: 4535129 - DNA, 25 bp, Homo sapien
cagctatgaaaatacctactttttt

SEQ ID NO: 4535130 - DNA, 25 bp, Homo sapien
ttttagacactgtcttgctcgtcac

SEQ ID NO: 4535131 - DNA, 25 bp, Homo sapien
agcctcataaaagcattgatgaatg

SEQ ID NO: 4535132 - DNA, 25 bp, Homo sapien
tttagacactgtcttgctcgtcacc

SEQ ID NO: 4535133 - DNA, 25 bp, Homo sapien
cagagctttgatacccgcaatgtga

SEQ ID NO: 4535134 - DNA, 25 bp, Homo sapien
gagcaagttacacaacccagggtct

SEQ ID NO: 4535135 - DNA, 25 bp, Homo sapien
caagatcctataggtggccaggcgt

SEQ ID NO: 4535136 - DNA, 25 bp, Homo sapien
cactgcgcttggatagatgactgag

SEQ ID NO: 4535137 - DNA, 25 bp, Homo sapien
tgaagagggtatacgatttcaagag

SEQ ID NO: 4535138 - DNA, 25 bp, Homo sapien
gagggtatacgatttcaagagaaaa

SEQ ID NO: 4535139 - DNA, 25 bp, Homo sapien
tttgaagagggtatacgatttcaag

SEQ ID NO: 4535140 - DNA, 25 bp, Homo sapien
aagagggtatacgatttcaagagaa

SEQ ID NO: 4535141 - DNA, 25 bp, Homo sapien
gcgatacaccgagggaaggactata

SEQ ID NO: 4535142 - DNA, 25 bp, Homo sapien
taaaaagagccccactgcaggaaaa

SEQ ID NO: 4535143 - DNA, 25 bp, Homo sapien
tgaaaaccctccttaatgctagcct

SEQ ID NO: 4535144 - DNA, 25 bp, Homo sapien
cagggcgagggtatgaagccttaca

SEQ ID NO: 4535145 - DNA, 25 bp, Homo sapien
taggtccccaagattccctctccta

SEQ ID NO: 4535146 - DNA, 25 bp, Homo sapien
ctaggtccccaagattccctctcct

SEQ ID NO: 4535147 - DNA, 25 bp, Homo sapien
tagataaggaccctatgcccttgag

SEQ ID NO: 4535148 - DNA, 25 bp, Homo sapien
cactgtcagtgatgaggctctcctt

SEQ ID NO: 4535149 - DNA, 25 bp, Homo sapien
acttgagccgagtcagcaggacatc

SEQ ID NO: 4535150 - DNA, 25 bp, Homo sapien
tcctggtcatctgggagtagataag

SEQ ID NO: 4535151 - DNA, 25 bp, Homo sapien
agaaccacagtctgaccgttgacag

SEQ ID NO: 4535152 - DNA, 25 bp, Homo sapien
tacaaggaacaagaacggatgtgct

SEQ ID NO: 4535153 - DNA, 25 bp, Homo sapien
gacagaattgactgctaagccctct

SEQ ID NO: 4535154 - DNA, 25 bp, Homo sapien
ccctggcaccagacaaggagtactg

SEQ ID NO: 4535155 - DNA, 25 bp, Homo sapien
tctccccttgccaaagcgaggaaca

SEQ ID NO: 4535156 - DNA, 25 bp, Homo sapien
ccacatgaagataaccctggttctc

SEQ ID NO: 4535157 - DNA, 25 bp, Homo sapien
cattccaagaggattgagaactcac

SEQ ID NO: 4535158 - DNA, 25 bp, Homo sapien
tccaaatatctgaaaggaccacatg

SEQ ID NO: 4535159 - DNA, 25 bp, Homo sapien
gatgaaagaccagccattctgaggt

SEQ ID NO: 4535160 - DNA, 25 bp, Homo sapien
attctgaggtctgatgctccacaga

SEQ ID NO: 4535161 - DNA, 25 bp, Homo sapien
ttctgaggtctgatgctccacagac

SEQ ID NO: 4535162 - DNA, 25 bp, Homo sapien
atgaaagaccagccattctgaggtc

SEQ ID NO: 4535163 - DNA, 25 bp, Homo sapien
tcattgcagtaagaatccaatggca

SEQ ID NO: 4535164 - DNA, 25 bp, Homo sapien
gaactcgcctttcatattctgcact

SEQ ID NO: 4535165 - DNA, 25 bp, Homo sapien
ctctgggaagaactgtgatcgtcta

SEQ ID NO: 4535166 - DNA, 25 bp, Homo sapien
gatcgtctatttagccagtctgcag

SEQ ID NO: 4535167 - DNA, 25 bp, Homo sapien
catatgcatgatggtgatgccagaa

SEQ ID NO: 4535168 - DNA, 25 bp, Homo sapien
tgccagaaagggagctgcagctagt

SEQ ID NO: 4535169 - DNA, 25 bp, Homo sapien
tcctggcttggccaaaggctataca

SEQ ID NO: 4535170 - DNA, 25 bp, Homo sapien
gccagagagtagcagatttgtttcc

SEQ ID NO: 4535171 - DNA, 25 bp, Homo sapien
gagatgaagcatgacgtaccgttct

SEQ ID NO: 4535172 - DNA, 25 bp, Homo sapien
catagtctcgagatgaaaagccaaa

SEQ ID NO: 4535173 - DNA, 25 bp, Homo sapien
tacttatgaggtccaaaagagggca

SEQ ID NO: 4535174 - DNA, 25 bp, Homo sapien
agtgacctcccgatttgatcagaag

SEQ ID NO: 4535175 - DNA, 25 bp, Homo sapien
gaatccctaggactgatctgaaagg

SEQ ID NO: 4535176 - DNA, 25 bp, Homo sapien
tctagctgaaggaagcgtaaccgct

SEQ ID NO: 4535177 - DNA, 25 bp, Homo sapien
ggagcaccctttcagccaaacgata

SEQ ID NO: 4535178 - DNA, 25 bp, Homo sapien
aatacaattacaggccaagagagct

SEQ ID NO: 4535179 - DNA, 25 bp, Homo sapien
tccgctgatggacaacctggtctga

SEQ ID NO: 4535180 - DNA, 25 bp, Homo sapien
cagcgacgcagcgaggaggtagctg

SEQ ID NO: 4535181 - DNA, 25 bp, Homo sapien
gaggtagctgatctccgctgatgga

SEQ ID NO: 4535182 - DNA, 25 bp, Homo sapien
ctggtctgagtagccactcactgct

SEQ ID NO: 4535183 - DNA, 25 bp, Homo sapien
aacatttgatatactgctaggccca

SEQ ID NO: 4535184 - DNA, 25 bp, Homo sapien
gcaacctggatcctctgtaagagaa

SEQ ID NO: 4535185 - DNA, 25 bp, Homo sapien
gctaagtagtagttcagggctgcca

SEQ ID NO: 4535186 - DNA, 25 bp, Homo sapien
tcgttacaaagattagcaggctagg

SEQ ID NO: 4535187 - DNA, 25 bp, Homo sapien
agatgtgtgcgtcttgccgccagga

SEQ ID NO: 4535188 - DNA, 25 bp, Homo sapien
aatgtctcattaccccggaagcact

SEQ ID NO: 4535189 - DNA, 25 bp, Homo sapien
tgtccctttctcatgctcttgaatg

SEQ ID NO: 4535190 - DNA, 25 bp, Homo sapien
gcactggcagatgtgtgcgtcttgc

SEQ ID NO: 4535191 - DNA, 25 bp, Homo sapien
tagaatacagggagccatgctagtt

SEQ ID NO: 4535192 - DNA, 25 bp, Homo sapien
ggaaggtgtgcgaaagttctgaccc

SEQ ID NO: 4535193 - DNA, 25 bp, Homo sapien
aaatcacactctttatccactgcaa

SEQ ID NO: 4535194 - DNA, 25 bp, Homo sapien
tctggccagaggtaccacagtgtgc

SEQ ID NO: 4535195 - DNA, 25 bp, Homo sapien
tgaacctgctaccagaatactactt

SEQ ID NO: 4535196 - DNA, 25 bp, Homo sapien
ctaccaacacttgaccccgaggaat

SEQ ID NO: 4535197 - DNA, 25 bp, Homo sapien
catggcttcacattggctaccaaca

SEQ ID NO: 4535198 - DNA, 25 bp, Homo sapien
ccccgaggaatacaactttaagcat

SEQ ID NO: 4535199 - DNA, 25 bp, Homo sapien
caaagtcagaggatctgtgcaccag

SEQ ID NO: 4535200 - DNA, 25 bp, Homo sapien
tatatagacacctgcttgacaagtg

SEQ ID NO: 4535201 - DNA, 25 bp, Homo sapien
tatcttcgcgaatttgttggaggca

SEQ ID NO: 4535202 - DNA, 25 bp, Homo sapien
caagtgatgctacagtccagtaaga

SEQ ID NO: 4535203 - DNA, 25 bp, Homo sapien
ctaacctttaagagtggataatatc

SEQ ID NO: 4535204 - DNA, 25 bp, Homo sapien
tacccagccggcttctagttcttta

SEQ ID NO: 4535205 - DNA, 25 bp, Homo sapien
atatctaacgatcattttgcttggc

SEQ ID NO: 4535206 - DNA, 25 bp, Homo sapien
tagttctttattcagaacctaggct

SEQ ID NO: 4535207 - DNA, 25 bp, Homo sapien
gacataccagtgttcccagtagaca

SEQ ID NO: 4535208 - DNA, 25 bp, Homo sapien
aaatgcaggtgtccatataacaggg

SEQ ID NO: 4535209 - DNA, 25 bp, Homo sapien
tctctagcgttaagaaaaatgcagg

SEQ ID NO: 4535210 - DNA, 25 bp, Homo sapien
tataaggacctcactaagcagacgc

SEQ ID NO: 4535211 - DNA, 25 bp, Homo sapien
tcctcaggtatctctggtggctctc

SEQ ID NO: 4535212 - DNA, 25 bp, Homo sapien
caagaaggaaatccttgttcctcag

SEQ ID NO: 4535213 - DNA, 25 bp, Homo sapien
gcctgtaggaggctttcagagacag

SEQ ID NO: 4535214 - DNA, 25 bp, Homo sapien
cccaggagcgtagctgatggagcct

SEQ ID NO: 4535215 - DNA, 25 bp, Homo sapien
ctgaagcataaggtttgccatttct

SEQ ID NO: 4535216 - DNA, 25 bp, Homo sapien
ccatttctgctggagatatatcaat

SEQ ID NO: 4535217 - DNA, 25 bp, Homo sapien
gaagcataaggtttgccatttctgc

SEQ ID NO: 4535218 - DNA, 25 bp, Homo sapien
tttctgctggagatatatcaataaa

SEQ ID NO: 4535219 - DNA, 25 bp, Homo sapien
gatttttggatgcttgcctaaatgc

SEQ ID NO: 4535220 - DNA, 25 bp, Homo sapien
tttttggatgcttgcctaaatgcct

SEQ ID NO: 4535221 - DNA, 25 bp, Homo sapien
ggatgcttgcctaaatgccttctct

SEQ ID NO: 4535222 - DNA, 25 bp, Homo sapien
ttggatgcttgcctaaatgccttct

SEQ ID NO: 4535223 - DNA, 25 bp, Homo sapien
gaaagagagaccgttggatatagtc

SEQ ID NO: 4535224 - DNA, 25 bp, Homo sapien
tctgtgaaagagagaccgttggata

SEQ ID NO: 4535225 - DNA, 25 bp, Homo sapien
tagtctggtgcaaatggagaaagaa

SEQ ID NO: 4535226 - DNA, 25 bp, Homo sapien
ccgttggatatagtctggtgcaaat

SEQ ID NO: 4535227 - DNA, 25 bp, Homo sapien
gaagaccctgatctgtccatgacgg

SEQ ID NO: 4535228 - DNA, 25 bp, Homo sapien
tgccgttcaaataactccgggtgat

SEQ ID NO: 4535229 - DNA, 25 bp, Homo sapien
gaaatgtggtatggctttagggaaa

SEQ ID NO: 4535230 - DNA, 25 bp, Homo sapien
ccatgacggtagataaactttgaaa

SEQ ID NO: 4535231 - DNA, 25 bp, Homo sapien
ggtagagcccatagaagactgcaat

SEQ ID NO: 4535232 - DNA, 25 bp, Homo sapien
tgaccagattcatgaggctgctggt

SEQ ID NO: 4535233 - DNA, 25 bp, Homo sapien
gttctgtgcttgttgggtagagccc

SEQ ID NO: 4535234 - DNA, 25 bp, Homo sapien
gttctttagtgcctgatatagcagc

SEQ ID NO: 4535235 - DNA, 25 bp, Homo sapien
tctcctcagcataaatggcttcaaa

SEQ ID NO: 4535236 - DNA, 25 bp, Homo sapien
gcataaatggcttcaaaatcatgtg

SEQ ID NO: 4535237 - DNA, 25 bp, Homo sapien
ggcttcaaaatcatgtgtaagcgag

SEQ ID NO: 4535238 - DNA, 25 bp, Homo sapien
aatcatgtgtaagcgagaaagttga

SEQ ID NO: 4535239 - DNA, 25 bp, Homo sapien
tgagactctcagtgttccccaaaaa

SEQ ID NO: 4535240 - DNA, 25 bp, Homo sapien
ggatgtcagcaaattaacaactcat

SEQ ID NO: 4535241 - DNA, 25 bp, Homo sapien
tcagaatgctcttaaaatcagagag

SEQ ID NO: 4535242 - DNA, 25 bp, Homo sapien
ccatcttgctatagtcaacaggata

SEQ ID NO: 4535243 - DNA, 25 bp, Homo sapien
gataggtagatagaaagccagctca

SEQ ID NO: 4535244 - DNA, 25 bp, Homo sapien
cactgataggtagatagaaagccag

SEQ ID NO: 4535245 - DNA, 25 bp, Homo sapien
ctgataggtagatagaaagccagct

SEQ ID NO: 4535246 - DNA, 25 bp, Homo sapien
taggtagatagaaagccagctcata

SEQ ID NO: 4535247 - DNA, 25 bp, Homo sapien
cctcatgtgaatcaaataatgttgg

SEQ ID NO: 4535248 - DNA, 25 bp, Homo sapien
ctcatcaatagcagatttgttttcg

SEQ ID NO: 4535249 - DNA, 25 bp, Homo sapien
caatagcagatttgttttcggcatg

SEQ ID NO: 4535250 - DNA, 25 bp, Homo sapien
taatgttggcataatgaaatgcagc

SEQ ID NO: 4535251 - DNA, 25 bp, Homo sapien
aaaacacgtctctgcattaaatgtt

SEQ ID NO: 4535252 - DNA, 25 bp, Homo sapien
gctgcacgcagcctctataaggatt

SEQ ID NO: 4535253 - DNA, 25 bp, Homo sapien
gctcattgtaactttgacctcagga

SEQ ID NO: 4535254 - DNA, 25 bp, Homo sapien
cattttctaatgtggtcagtattcc

SEQ ID NO: 4535255 - DNA, 25 bp, Homo sapien
cggttagcaaaagccgattccgaca

SEQ ID NO: 4535256 - DNA, 25 bp, Homo sapien
catggtgttctgaattggggtcccg

SEQ ID NO: 4535257 - DNA, 25 bp, Homo sapien
gattccgacactggaactgtaagag

SEQ ID NO: 4535258 - DNA, 25 bp, Homo sapien
ctggaactgtaagaggatcttccaa

SEQ ID NO: 4535259 - DNA, 25 bp, Homo sapien
gtaccatgtattgccacttgacccg

SEQ ID NO: 4535260 - DNA, 25 bp, Homo sapien
gaaatactttacatcctgcaccacc

SEQ ID NO: 4535261 - DNA, 25 bp, Homo sapien
ctggaactactcttgagcgcctgag

SEQ ID NO: 4535262 - DNA, 25 bp, Homo sapien
gcctgagcctcatccagtaccatgt

SEQ ID NO: 4535263 - DNA, 25 bp, Homo sapien
gaaattatccacatcaattagagaa

SEQ ID NO: 4535264 - DNA, 25 bp, Homo sapien
tgtacggtacgtatgtatgcagttt

SEQ ID NO: 4535265 - DNA, 25 bp, Homo sapien
tcaagtccagctgattgcctacaac

SEQ ID NO: 4535266 - DNA, 25 bp, Homo sapien
tagagaaataatgactgcatgtacg

SEQ ID NO: 4535267 - DNA, 25 bp, Homo sapien
tgatgacttttctatcatgaggatt

SEQ ID NO: 4535268 - DNA, 25 bp, Homo sapien
tatcatgaggatttccccaatatgg

SEQ ID NO: 4535269 - DNA, 25 bp, Homo sapien
ccttctgatgacttttctatcatga

SEQ ID NO: 4535270 - DNA, 25 bp, Homo sapien
ctatcatgaggatttccccaatatg

SEQ ID NO: 4535271 - DNA, 25 bp, Homo sapien
aagggccaatatatacattactttc

SEQ ID NO: 4535272 - DNA, 25 bp, Homo sapien
tatacattactttctatagatgatc

SEQ ID NO: 4535273 - DNA, 25 bp, Homo sapien
tatatacattactttctatagatga

SEQ ID NO: 4535274 - DNA, 25 bp, Homo sapien
tagaaaaagggccaatatatacatt

SEQ ID NO: 4535275 - DNA, 25 bp, Homo sapien
cccagattatctactagagaataaa

SEQ ID NO: 4535276 - DNA, 25 bp, Homo sapien
tcccccagattatctactagagaat

SEQ ID NO: 4535277 - DNA, 25 bp, Homo sapien
ccagattatctactagagaataaaa

SEQ ID NO: 4535278 - DNA, 25 bp, Homo sapien
ccccagattatctactagagaataa

SEQ ID NO: 4535279 - DNA, 25 bp, Homo sapien
aattaagcaaagacgccctcacatt

SEQ ID NO: 4535280 - DNA, 25 bp, Homo sapien
aaattaagcaaagacgccctcacat

SEQ ID NO: 4535281 - DNA, 25 bp, Homo sapien
agagaaatgcaccataaatgatgta

SEQ ID NO: 4535282 - DNA, 25 bp, Homo sapien
gaaatgcaccataaatgatgtaaaa

SEQ ID NO: 4535283 - DNA, 25 bp, Homo sapien
ttttaaagagcaatagatgttttgg

SEQ ID NO: 4535284 - DNA, 25 bp, Homo sapien
cctggtgccaattgttaagtgtaga

SEQ ID NO: 4535285 - DNA, 25 bp, Homo sapien
tagacgcaggtgaaattattaagaa

SEQ ID NO: 4535286 - DNA, 25 bp, Homo sapien
taggaacaaatctagtaaactcctg

SEQ ID NO: 4535287 - DNA, 25 bp, Homo sapien
caaatctagtaaactcctggtgcca

SEQ ID NO: 4535288 - DNA, 25 bp, Homo sapien
tgcaacagaaaaacccagtcagcca

SEQ ID NO: 4535289 - DNA, 25 bp, Homo sapien
ctgcaacagaaaaacccagtcagcc

SEQ ID NO: 4535290 - DNA, 25 bp, Homo sapien
gcaacagaaaaacccagtcagccaa

SEQ ID NO: 4535291 - DNA, 25 bp, Homo sapien
ggccagaagggcaatgctctgtact

SEQ ID NO: 4535292 - DNA, 25 bp, Homo sapien
ctctgtactgttttaccaaggccca

SEQ ID NO: 4535293 - DNA, 25 bp, Homo sapien
tgggccagaagggcaatgctctgta

SEQ ID NO: 4535294 - DNA, 25 bp, Homo sapien
catcagcaagaatgccattaatacc

SEQ ID NO: 4535295 - DNA, 25 bp, Homo sapien
tccgcctcccagattcaaatgattc

SEQ ID NO: 4535296 - DNA, 25 bp, Homo sapien
accatgccaggctaattttgtattt

SEQ ID NO: 4535297 - DNA, 25 bp, Homo sapien
tggcgccatcttagctcaccgcaat

SEQ ID NO: 4535298 - DNA, 25 bp, Homo sapien
agattcaaatgattctcctgcctca

SEQ ID NO: 4535299 - DNA, 25 bp, Homo sapien
agacttgtttgctgcccgtagggca

SEQ ID NO: 4535300 - DNA, 25 bp, Homo sapien
ccgtagggcagctgctcgactttct

SEQ ID NO: 4535301 - DNA, 25 bp, Homo sapien
aattgtgggctgtggaatatcctca

SEQ ID NO: 4535302 - DNA, 25 bp, Homo sapien
tcaccagcccggatagatgggttag

SEQ ID NO: 4535303 - DNA, 25 bp, Homo sapien
tataacgtagtatcatatgacatca

SEQ ID NO: 4535304 - DNA, 25 bp, Homo sapien
cataacaaagagcttgggccaggcg

SEQ ID NO: 4535305 - DNA, 25 bp, Homo sapien
tacactctgtcaatgttaaataggg

SEQ ID NO: 4535306 - DNA, 25 bp, Homo sapien
gataacaatatatctaccctgtgct

SEQ ID NO: 4535307 - DNA, 25 bp, Homo sapien
ccgagcttggtgaatatggtaagca

SEQ ID NO: 4535308 - DNA, 25 bp, Homo sapien
gagcttggtgaatatggtaagcatt

SEQ ID NO: 4535309 - DNA, 25 bp, Homo sapien
cgagcttggtgaatatggtaagcat

SEQ ID NO: 4535310 - DNA, 25 bp, Homo sapien
attttcagcattcttcagggcctgg

SEQ ID NO: 4535311 - DNA, 25 bp, Homo sapien
gaagttgagttttcgctgttgcctc

SEQ ID NO: 4535312 - DNA, 25 bp, Homo sapien
tcgtttgcgactcatgaaatgggca

SEQ ID NO: 4535313 - DNA, 25 bp, Homo sapien
ttgtctctgggtagaactgtcttcc

SEQ ID NO: 4535314 - DNA, 25 bp, Homo sapien
gaaatgggcatacaactctgtctgg

SEQ ID NO: 4535315 - DNA, 25 bp, Homo sapien
gctttatagcacttgagccagatcc

SEQ ID NO: 4535316 - DNA, 25 bp, Homo sapien
catgtttcaaacctaaagtgctatc

SEQ ID NO: 4535317 - DNA, 25 bp, Homo sapien
cagtaacctacgtaaaactatcctg

SEQ ID NO: 4535318 - DNA, 25 bp, Homo sapien
gatttatccttgatccactctccca

SEQ ID NO: 4535319 - DNA, 25 bp, Homo sapien
gggcctgcaaggcagctcgacgcac

SEQ ID NO: 4535320 - DNA, 25 bp, Homo sapien
cggcgggcacgaggcaaggtttcct

SEQ ID NO: 4535321 - DNA, 25 bp, Homo sapien
tctctgctctcttgcggtgctcctt

SEQ ID NO: 4535322 - DNA, 25 bp, Homo sapien
gcatttcctcatccaacttccgctg

SEQ ID NO: 4535323 - DNA, 25 bp, Homo sapien
caggttacgagctgaagctttctgc

SEQ ID NO: 4535324 - DNA, 25 bp, Homo sapien
tgagaaacaggttacgagctgaagc

SEQ ID NO: 4535325 - DNA, 25 bp, Homo sapien
tacgagctgaagctttctgcttatt

SEQ ID NO: 4535326 - DNA, 25 bp, Homo sapien
tggtgagaaacaggttacgagctga

SEQ ID NO: 4535327 - DNA, 25 bp, Homo sapien
gatcaaaggtaatatcctcaaaaca

SEQ ID NO: 4535328 - DNA, 25 bp, Homo sapien
caactatgtctccagaaatacttat

SEQ ID NO: 4535329 - DNA, 25 bp, Homo sapien
aaagaatgctcaagcatcaactatg

SEQ ID NO: 4535330 - DNA, 25 bp, Homo sapien
accaccataccaagggatcaaaggt

SEQ ID NO: 4535331 - DNA, 25 bp, Homo sapien
gaggtgcatcgtgagaaaacttggc

SEQ ID NO: 4535332 - DNA, 25 bp, Homo sapien
gctgctcaatggataagtgcttttt

SEQ ID NO: 4535333 - DNA, 25 bp, Homo sapien
tttcctgcgacgagcattcagctgc

SEQ ID NO: 4535334 - DNA, 25 bp, Homo sapien
ctttttcacaatgctgagccatact

SEQ ID NO: 4535335 - DNA, 25 bp, Homo sapien
aagggtcatatgtggagagcaggcc

SEQ ID NO: 4535336 - DNA, 25 bp, Homo sapien
caggcctgcactgtagtactgatat

SEQ ID NO: 4535337 - DNA, 25 bp, Homo sapien
agagcaggcctgcactgtagtactg

SEQ ID NO: 4535338 - DNA, 25 bp, Homo sapien
tgttgctcatagaaagggtcatatg

SEQ ID NO: 4535339 - DNA, 25 bp, Homo sapien
tgctaatcatagttcatgaactgga

SEQ ID NO: 4535340 - DNA, 25 bp, Homo sapien
gtatataatgaagagaaacgaaaac

SEQ ID NO: 4535341 - DNA, 25 bp, Homo sapien
tcaatcttgaaaatatgacattaag

SEQ ID NO: 4535342 - DNA, 25 bp, Homo sapien
ggtataaatacaacgaatatttgca

SEQ ID NO: 4535343 - DNA, 25 bp, Homo sapien
agctcccacttacactcactactga

SEQ ID NO: 4535344 - DNA, 25 bp, Homo sapien
tttgctacacgggtaaacatgtgcc

SEQ ID NO: 4535345 - DNA, 25 bp, Homo sapien
ttacactcactactgaggataatga

SEQ ID NO: 4535346 - DNA, 25 bp, Homo sapien
ttgctacacgggtaaacatgtgcca

SEQ ID NO: 4535347 - DNA, 25 bp, Homo sapien
tttgtgtagtcgaagcatgttgtga

SEQ ID NO: 4535348 - DNA, 25 bp, Homo sapien
cttcatcatcgtcttcactctgaga

SEQ ID NO: 4535349 - DNA, 25 bp, Homo sapien
gagaatcagcctcgctggattcatc

SEQ ID NO: 4535350 - DNA, 25 bp, Homo sapien
cactctgagaatcagcctcgctgga

SEQ ID NO: 4535351 - DNA, 25 bp, Homo sapien
aatattatgctcaattaaagaagtc

SEQ ID NO: 4535352 - DNA, 25 bp, Homo sapien
cttgggcaacctaataagatctctt

SEQ ID NO: 4535353 - DNA, 25 bp, Homo sapien
tcagcaacaaggctaaaaattcctc

SEQ ID NO: 4535354 - DNA, 25 bp, Homo sapien
cataaaaggtcacattatgatagga

SEQ ID NO: 4535355 - DNA, 25 bp, Homo sapien
taaattccccttatcacattttgat

SEQ ID NO: 4535356 - DNA, 25 bp, Homo sapien
aaattccccttatcacattttgatt

SEQ ID NO: 4535357 - DNA, 25 bp, Homo sapien
tgtataaagaaacacaaagaataaa

SEQ ID NO: 4535358 - DNA, 25 bp, Homo sapien
ctgtataaagaaacacaaagaataa

SEQ ID NO: 4535359 - DNA, 25 bp, Homo sapien
ttcaccaagcaatgaatttggaggt

SEQ ID NO: 4535360 - DNA, 25 bp, Homo sapien
taacttgtattaagggatccccaga

SEQ ID NO: 4535361 - DNA, 25 bp, Homo sapien
cccagactggggcaataatggatta

SEQ ID NO: 4535362 - DNA, 25 bp, Homo sapien
gattactgtcatccagtccatcttc

SEQ ID NO: 4535363 - DNA, 25 bp, Homo sapien
aattgaagaatgagtccacaattac

SEQ ID NO: 4535364 - DNA, 25 bp, Homo sapien
ttgaagaatgagtccacaattacag

SEQ ID NO: 4535365 - DNA, 25 bp, Homo sapien
attgaagaatgagtccacaattaca

SEQ ID NO: 4535366 - DNA, 25 bp, Homo sapien
agatagctgacgtttgtcgcagaaa

SEQ ID NO: 4535367 - DNA, 25 bp, Homo sapien
gaaatattcctattgaagatagctg

SEQ ID NO: 4535368 - DNA, 25 bp, Homo sapien
gcagaaaatggtccaaccggagggc

SEQ ID NO: 4535369 - DNA, 25 bp, Homo sapien
accggagggccctctccaagtactg

SEQ ID NO: 4535370 - DNA, 25 bp, Homo sapien
atgcacaaggacctccgactgcacg

SEQ ID NO: 4535371 - DNA, 25 bp, Homo sapien
catgcacaaggacctccgactgcac

SEQ ID NO: 4535372 - DNA, 25 bp, Homo sapien
aagggcagatttgatagcttacctc

SEQ ID NO: 4535373 - DNA, 25 bp, Homo sapien
tctccacggtctctttggaaagaag

SEQ ID NO: 4535374 - DNA, 25 bp, Homo sapien
aacaagaatatgtgtgctcagaagc

SEQ ID NO: 4535375 - DNA, 25 bp, Homo sapien
aagcacgcccagtgccacatcatgg

SEQ ID NO: 4535376 - DNA, 25 bp, Homo sapien
tgttttgtgtttatttgcctcttaa

SEQ ID NO: 4535377 - DNA, 25 bp, Homo sapien
ttgtgtttatttgcctcttaaaggc

SEQ ID NO: 4535378 - DNA, 25 bp, Homo sapien
tgtttatttgcctcttaaaggcaag

SEQ ID NO: 4535379 - DNA, 25 bp, Homo sapien
ctgtgttttgtgtttatttgcctct

SEQ ID NO: 4535380 - DNA, 25 bp, Homo sapien
gccgcggttcgctctctgaggccgt

SEQ ID NO: 4535381 - DNA, 25 bp, Homo sapien
actgcgttgggcgtggacgctccta

SEQ ID NO: 4535382 - DNA, 25 bp, Homo sapien
tgaggccgtgggacggtgactgcgt

SEQ ID NO: 4535383 - DNA, 25 bp, Homo sapien
actttcactcactgagaggagcgga

SEQ ID NO: 4535384 - DNA, 25 bp, Homo sapien
gctgccacctgacgccccgtgcgaa

SEQ ID NO: 4535385 - DNA, 25 bp, Homo sapien
cgctgccacctgacgccccgtgcga

SEQ ID NO: 4535386 - DNA, 25 bp, Homo sapien
cacccgtagtgccgctgccgtcggc

SEQ ID NO: 4535387 - DNA, 25 bp, Homo sapien
tcgcgcagctcgcaccccgccgctg

SEQ ID NO: 4535388 - DNA, 25 bp, Homo sapien
gcgaagattgccgaaaggcggcggg

SEQ ID NO: 4535389 - DNA, 25 bp, Homo sapien
ctgagtacagattagtcgggactgg

SEQ ID NO: 4535390 - DNA, 25 bp, Homo sapien
actgggactggcgaagattgccgaa

SEQ ID NO: 4535391 - DNA, 25 bp, Homo sapien
gtacagattagtcgggactgggact

SEQ ID NO: 4535392 - DNA, 25 bp, Homo sapien
cgccgatgcaaggttacttttcccg

SEQ ID NO: 4535393 - DNA, 25 bp, Homo sapien
ccgcaaccgccgatgcaaggttact

SEQ ID NO: 4535394 - DNA, 25 bp, Homo sapien
caggagaaaatgtcgcgagagcttt

SEQ ID NO: 4535395 - DNA, 25 bp, Homo sapien
gagcaagcagatctcgcaggagaaa

SEQ ID NO: 4535396 - DNA, 25 bp, Homo sapien
cccttcttgttctactttgtggcca

SEQ ID NO: 4535397 - DNA, 25 bp, Homo sapien
atgacccttcttgttctactttgtg

SEQ ID NO: 4535398 - DNA, 25 bp, Homo sapien
ttgttctactttgtggccagcatct

SEQ ID NO: 4535399 - DNA, 25 bp, Homo sapien
gttctactttgtggccagcatcttt

SEQ ID NO: 4535400 - DNA, 25 bp, Homo sapien
aaataaagatattggctgggcaccg

SEQ ID NO: 4535401 - DNA, 25 bp, Homo sapien
gaaaaaagtggttactctgggcaca

SEQ ID NO: 4535402 - DNA, 25 bp, Homo sapien
gatggagtcttcctgatactaagcc

SEQ ID NO: 4535403 - DNA, 25 bp, Homo sapien
tgtatggccttaagaacaaactgcc

SEQ ID NO: 4535404 - DNA, 25 bp, Homo sapien
gagggagtgtggaaaccacagtctt

SEQ ID NO: 4535405 - DNA, 25 bp, Homo sapien
tatccaggaatcgatcttctccaag

SEQ ID NO: 4535406 - DNA, 25 bp, Homo sapien
ccacagtctttctgataggataaaa

SEQ ID NO: 4535407 - DNA, 25 bp, Homo sapien
ctagggcagatttagaaaaggactt

SEQ ID NO: 4535408 - DNA, 25 bp, Homo sapien
gcaaatgagtttgttactggaatcc

SEQ ID NO: 4535409 - DNA, 25 bp, Homo sapien
tcaaagataaacttgcctgaaactc

SEQ ID NO: 4535410 - DNA, 25 bp, Homo sapien
ctctgacccctttgactttgtgcaa

SEQ ID NO: 4535411 - DNA, 25 bp, Homo sapien
tgttttccaccatcaataactgttc

SEQ ID NO: 4535412 - DNA, 25 bp, Homo sapien
tccccgtgaaagtcttgagatgtaa

SEQ ID NO: 4535413 - DNA, 25 bp, Homo sapien
aggtagatgttgaggatttgtagct

SEQ ID NO: 4535414 - DNA, 25 bp, Homo sapien
taaaacttggagctttatctatcct

SEQ ID NO: 4535415 - DNA, 25 bp, Homo sapien
tagcactgtccttatcaggagtccc

SEQ ID NO: 4535416 - DNA, 25 bp, Homo sapien
ttgcagctttctccctgcgctgctt

SEQ ID NO: 4535417 - DNA, 25 bp, Homo sapien
cctctggcagctccatacatgtagg

SEQ ID NO: 4535418 - DNA, 25 bp, Homo sapien
tggaagtccttgagttgaagcagtt

SEQ ID NO: 4535419 - DNA, 25 bp, Homo sapien
cctatattctcttgcagctttctcc

SEQ ID NO: 4535420 - DNA, 25 bp, Homo sapien
cgtgtttaggtaaccatccaccagg

SEQ ID NO: 4535421 - DNA, 25 bp, Homo sapien
tgaaacaggtcggatgaaccatact

SEQ ID NO: 4535422 - DNA, 25 bp, Homo sapien
caccagggtggttaggtcagacatc

SEQ ID NO: 4535423 - DNA, 25 bp, Homo sapien
tcatctaggagtgccaagcgaaggg

SEQ ID NO: 4535424 - DNA, 25 bp, Homo sapien
cctctgaacagtaagcaagacttta

SEQ ID NO: 4535425 - DNA, 25 bp, Homo sapien
tttcctctgaacagtaagcaagact

SEQ ID NO: 4535426 - DNA, 25 bp, Homo sapien
ataaaacaatttcctctgaacagta

SEQ ID NO: 4535427 - DNA, 25 bp, Homo sapien
aacaatttcctctgaacagtaagca

SEQ ID NO: 4535428 - DNA, 25 bp, Homo sapien
tgatgcagtttggaagatagccacc

SEQ ID NO: 4535429 - DNA, 25 bp, Homo sapien
tctcctgcaaagtagtgatgcagtt

SEQ ID NO: 4535430 - DNA, 25 bp, Homo sapien
gatagccacccgtttccatggaaaa

SEQ ID NO: 4535431 - DNA, 25 bp, Homo sapien
ccatggaaaactgaagtacatctgc

SEQ ID NO: 4535432 - DNA, 25 bp, Homo sapien
cacggaggttctgacctgttccatg

SEQ ID NO: 4535433 - DNA, 25 bp, Homo sapien
tgtctgatctggactcgttcaccct

SEQ ID NO: 4535434 - DNA, 25 bp, Homo sapien
gatgagcacggaggttctgacctgt

SEQ ID NO: 4535435 - DNA, 25 bp, Homo sapien
gatgccaatctcagtacaggcaccc

SEQ ID NO: 4535436 - DNA, 25 bp, Homo sapien
gaaagccaacgacaatcatggataa

SEQ ID NO: 4535437 - DNA, 25 bp, Homo sapien
gagaggcaatcagaaagccaacgac

SEQ ID NO: 4535438 - DNA, 25 bp, Homo sapien
tgtcaaagacattattcagcaaaat

SEQ ID NO: 4535439 - DNA, 25 bp, Homo sapien
ggcaatcagaaagccaacgacaatc

SEQ ID NO: 4535440 - DNA, 25 bp, Homo sapien
aagtaaactcggcaatttgtggcca

SEQ ID NO: 4535441 - DNA, 25 bp, Homo sapien
agtatcatctgaagtccattgtgga

SEQ ID NO: 4535442 - DNA, 25 bp, Homo sapien
tcaaataagtaaactcggcaatttg

SEQ ID NO: 4535443 - DNA, 25 bp, Homo sapien
tggaaagctcgacttcccagaagga

SEQ ID NO: 4535444 - DNA, 25 bp, Homo sapien
gacatacattcgctccttctgctgc

SEQ ID NO: 4535445 - DNA, 25 bp, Homo sapien
tgccatggcgacatacattcgctcc

SEQ ID NO: 4535446 - DNA, 25 bp, Homo sapien
ggcgacatacattcgctccttctgc

SEQ ID NO: 4535447 - DNA, 25 bp, Homo sapien
catggcgacatacattcgctccttc

SEQ ID NO: 4535448 - DNA, 25 bp, Homo sapien
gctggaattgattaatgactgtgta

SEQ ID NO: 4535449 - DNA, 25 bp, Homo sapien
tctgctggaattgattaatgactgt

SEQ ID NO: 4535450 - DNA, 25 bp, Homo sapien
cttctgctggaattgattaatgact

SEQ ID NO: 4535451 - DNA, 25 bp, Homo sapien
ctgctggaattgattaatgactgtg

SEQ ID NO: 4535452 - DNA, 25 bp, Homo sapien
catacatttaggtcttcaactttca

SEQ ID NO: 4535453 - DNA, 25 bp, Homo sapien
ctgatgggctgtacttgaggtcatt

SEQ ID NO: 4535454 - DNA, 25 bp, Homo sapien
agcagagaggtagctggtgcttcag

SEQ ID NO: 4535455 - DNA, 25 bp, Homo sapien
tgaggtcattcagcagagaggtagc

SEQ ID NO: 4535456 - DNA, 25 bp, Homo sapien
ctatccttacaagaaacaatatttg

SEQ ID NO: 4535457 - DNA, 25 bp, Homo sapien
tacaagaaacaatatttgggtgaac

SEQ ID NO: 4535458 - DNA, 25 bp, Homo sapien
caagaaacaatatttgggtgaactt

SEQ ID NO: 4535459 - DNA, 25 bp, Homo sapien
agaaacaatatttgggtgaacttgt

SEQ ID NO: 4535460 - DNA, 25 bp, Homo sapien
agatgcttttgctctcactgagcct

SEQ ID NO: 4535461 - DNA, 25 bp, Homo sapien
cttgttccacttcatctagtagttc

SEQ ID NO: 4535462 - DNA, 25 bp, Homo sapien
aagatgcttttgctctcactgagcc

SEQ ID NO: 4535463 - DNA, 25 bp, Homo sapien
tgttccacttcatctagtagttcca

SEQ ID NO: 4535464 - DNA, 25 bp, Homo sapien
acacttcgacctgtctccacattct

SEQ ID NO: 4535465 - DNA, 25 bp, Homo sapien
ggacacttcgacctgtctccacatt

SEQ ID NO: 4535466 - DNA, 25 bp, Homo sapien
tgggacacttcgacctgtctccaca

SEQ ID NO: 4535467 - DNA, 25 bp, Homo sapien
gggacacttcgacctgtctccacat

SEQ ID NO: 4535468 - DNA, 25 bp, Homo sapien
ttcaggacaacaatcttattagggt

SEQ ID NO: 4535469 - DNA, 25 bp, Homo sapien
aatcttattagggtcaacatgctga

SEQ ID NO: 4535470 - DNA, 25 bp, Homo sapien
ctttcttcaggacaacaatcttatt

SEQ ID NO: 4535471 - DNA, 25 bp, Homo sapien
atcttattagggtcaacatgctgaa

SEQ ID NO: 4535472 - DNA, 25 bp, Homo sapien
cctcgaagacaccacagaccaatgt

SEQ ID NO: 4535473 - DNA, 25 bp, Homo sapien
gaccaatgtgagtttcaccctcttc

SEQ ID NO: 4535474 - DNA, 25 bp, Homo sapien
gaagacaccacagaccaatgtgagt

SEQ ID NO: 4535475 - DNA, 25 bp, Homo sapien
caccacagaccaatgtgagtttcac

SEQ ID NO: 4535476 - DNA, 25 bp, Homo sapien
tccaaaagccgtcttcaaataatct

SEQ ID NO: 4535477 - DNA, 25 bp, Homo sapien
attccaaaagccgtcttcaaataat

SEQ ID NO: 4535478 - DNA, 25 bp, Homo sapien
ccaaaagccgtcttcaaataatctt

SEQ ID NO: 4535479 - DNA, 25 bp, Homo sapien
caaaagccgtcttcaaataatcttc

SEQ ID NO: 4535480 - DNA, 25 bp, Homo sapien
cataagctaggaattcactgtcctc

SEQ ID NO: 4535481 - DNA, 25 bp, Homo sapien
ataagctaggaattcactgtcctcc

SEQ ID NO: 4535482 - DNA, 25 bp, Homo sapien
aatctggatcctaatttcagccaag

SEQ ID NO: 4535483 - DNA, 25 bp, Homo sapien
tcagccaagtggtgcgttcctcgaa

SEQ ID NO: 4535484 - DNA, 25 bp, Homo sapien
aatgaaggaagaagtctcgggacgc

SEQ ID NO: 4535485 - DNA, 25 bp, Homo sapien
cccggcggcggttatcaaatcacag

SEQ ID NO: 4535486 - DNA, 25 bp, Homo sapien
tccagaccagagagtagttggaggt

SEQ ID NO: 4535487 - DNA, 25 bp, Homo sapien
tgcaggtattggaactctttacccc

SEQ ID NO: 4535488 - DNA, 25 bp, Homo sapien
cattcagaagataattgaccccagc

SEQ ID NO: 4535489 - DNA, 25 bp, Homo sapien
ccagcagcagctgcgaagatataag

SEQ ID NO: 4535490 - DNA, 25 bp, Homo sapien
ttgtagtgatcagctccagtggaac

SEQ ID NO: 4535491 - DNA, 25 bp, Homo sapien
cagagtgagaggctacagtgtacag

SEQ ID NO: 4535492 - DNA, 25 bp, Homo sapien
gagactcactccgaagcatgcttta

SEQ ID NO: 4535493 - DNA, 25 bp, Homo sapien
gcagaactgtggaaggctttggtta

SEQ ID NO: 4535494 - DNA, 25 bp, Homo sapien
cattacttgattcctcagatctgac

SEQ ID NO: 4535495 - DNA, 25 bp, Homo sapien
gaaactttatgctagcaataatcat

SEQ ID NO: 4535496 - DNA, 25 bp, Homo sapien
gaccagatactggtccattagcagt

SEQ ID NO: 4535497 - DNA, 25 bp, Homo sapien
cattagcagtatagatacatcgaag

SEQ ID NO: 4535498 - DNA, 25 bp, Homo sapien
cctgtggcacaatgaaaagattttc

SEQ ID NO: 4535499 - DNA, 25 bp, Homo sapien
aaggcaggatactaatacagttatc

SEQ ID NO: 4535500 - DNA, 25 bp, Homo sapien
tcatgatgtgtccacagaattatgc

SEQ ID NO: 4535501 - DNA, 25 bp, Homo sapien
tttcttacagggttattgattagcc

SEQ ID NO: 4535502 - DNA, 25 bp, Homo sapien
ggttgattgactgatagggtctccc

SEQ ID NO: 4535503 - DNA, 25 bp, Homo sapien
tgattttcaagaattggtttattta

SEQ ID NO: 4535504 - DNA, 25 bp, Homo sapien
aatttactattgatggattggttga

SEQ ID NO: 4535505 - DNA, 25 bp, Homo sapien
agagggagtgtctttcttgtcgccc

SEQ ID NO: 4535506 - DNA, 25 bp, Homo sapien
gctctgacaatatgcctagggactt

SEQ ID NO: 4535507 - DNA, 25 bp, Homo sapien
tttatttaataaggaggctgggcac

SEQ ID NO: 4535508 - DNA, 25 bp, Homo sapien
gggacaccgttaccaccagaatggc

SEQ ID NO: 4535509 - DNA, 25 bp, Homo sapien
taaatgggcctctgggatgttgcct

SEQ ID NO: 4535510 - DNA, 25 bp, Homo sapien
caagaggtctggcactagtagcaca

SEQ ID NO: 4535511 - DNA, 25 bp, Homo sapien
tatttagccacacatctgcccttgg

SEQ ID NO: 4535512 - DNA, 25 bp, Homo sapien
gccaggctggatggctcaaatataa

SEQ ID NO: 4535513 - DNA, 25 bp, Homo sapien
tacagatctttgagcgagccacagc

SEQ ID NO: 4535514 - DNA, 25 bp, Homo sapien
gatcgttagacttgttcagcctacg

SEQ ID NO: 4535515 - DNA, 25 bp, Homo sapien
taagccgttagcttcagcagaagac

SEQ ID NO: 4535516 - DNA, 25 bp, Homo sapien
tgtgggctaatcgttccaaatactg

SEQ ID NO: 4535517 - DNA, 25 bp, Homo sapien
tacatagaagtggaacaataagccg

SEQ ID NO: 4535518 - DNA, 25 bp, Homo sapien
tagaaagactagttagcgaatcgct

SEQ ID NO: 4535519 - DNA, 25 bp, Homo sapien
tttaagcctttgacgggcatctgtg

SEQ ID NO: 4535520 - DNA, 25 bp, Homo sapien
gctcatagggttctaaaggtgtacc

SEQ ID NO: 4535521 - DNA, 25 bp, Homo sapien
taatatacgtttggctttcctaggc

SEQ ID NO: 4535522 - DNA, 25 bp, Homo sapien
gaaagaagcaactcacatgggtctt

SEQ ID NO: 4535523 - DNA, 25 bp, Homo sapien
gcacagttgagactgcagcagtaaa

SEQ ID NO: 4535524 - DNA, 25 bp, Homo sapien
tccagtttcagccactaccatgata

SEQ ID NO: 4535525 - DNA, 25 bp, Homo sapien
tagcaagtatgaatgacttcagggt

SEQ ID NO: 4535526 - DNA, 25 bp, Homo sapien
caggtactttccccagttgggactg

SEQ ID NO: 4535527 - DNA, 25 bp, Homo sapien
ctggaaatgtagctgggtggcacct

SEQ ID NO: 4535528 - DNA, 25 bp, Homo sapien
tgggtatagtaagcctcagacagct

SEQ ID NO: 4535529 - DNA, 25 bp, Homo sapien
ggcacctacctaggttgctacgtag

SEQ ID NO: 4535530 - DNA, 25 bp, Homo sapien
cagtgagtgcttttctaatctgcag

SEQ ID NO: 4535531 - DNA, 25 bp, Homo sapien
tacataactaatgtatgatagcaaa

SEQ ID NO: 4535532 - DNA, 25 bp, Homo sapien
taatgtggtgtatcttgcgcataca

SEQ ID NO: 4535533 - DNA, 25 bp, Homo sapien
tgctgacacagattctacataacta

SEQ ID NO: 4535534 - DNA, 25 bp, Homo sapien
tacacaggttagaacaagtagactc

SEQ ID NO: 4535535 - DNA, 25 bp, Homo sapien
tagcaccttgactatccctgaaaag

SEQ ID NO: 4535536 - DNA, 25 bp, Homo sapien
tagatgtgtcctatggcctgtgact

SEQ ID NO: 4535537 - DNA, 25 bp, Homo sapien
tcttgatctgaggaaccacacagct

SEQ ID NO: 4535538 - DNA, 25 bp, Homo sapien
gaacatggataagccggatttctct

SEQ ID NO: 4535539 - DNA, 25 bp, Homo sapien
tctcccagggataagaaaggtattc

SEQ ID NO: 4535540 - DNA, 25 bp, Homo sapien
tacttgatagcatgtctgtcagcca

SEQ ID NO: 4535541 - DNA, 25 bp, Homo sapien
gcaccattggtgtataacgttaaga

SEQ ID NO: 4535542 - DNA, 25 bp, Homo sapien
taagtattacaaaaggcagcttgct

SEQ ID NO: 4535543 - DNA, 25 bp, Homo sapien
gaaggagcctttccaaagacctgtg

SEQ ID NO: 4535544 - DNA, 25 bp, Homo sapien
gctcacttaccaggatgctatattg

SEQ ID NO: 4535545 - DNA, 25 bp, Homo sapien
tagtaagtacccaagccacagtttc

SEQ ID NO: 4535546 - DNA, 25 bp, Homo sapien
ggttacttgagacctagctgtagca

SEQ ID NO: 4535547 - DNA, 25 bp, Homo sapien
cagctattcaggatacagttgggag

SEQ ID NO: 4535548 - DNA, 25 bp, Homo sapien
gccagctattcaggatacagttggg

SEQ ID NO: 4535549 - DNA, 25 bp, Homo sapien
tattcaggatacagttgggaggatc

SEQ ID NO: 4535550 - DNA, 25 bp, Homo sapien
gctattcaggatacagttgggagga

SEQ ID NO: 4535551 - DNA, 25 bp, Homo sapien
tgccaaaggctctccttagtggtct

SEQ ID NO: 4535552 - DNA, 25 bp, Homo sapien
ctctccttagtggtctgcttgctgt

SEQ ID NO: 4535553 - DNA, 25 bp, Homo sapien
tagtgccaaaggctctccttagtgg

SEQ ID NO: 4535554 - DNA, 25 bp, Homo sapien
caaaggctctccttagtggtctgct

SEQ ID NO: 4535555 - DNA, 25 bp, Homo sapien
taaagcctgaacctgacactcaagc

SEQ ID NO: 4535556 - DNA, 25 bp, Homo sapien
catgcaactttagatcagaggacac

SEQ ID NO: 4535557 - DNA, 25 bp, Homo sapien
ggacacatgggactctgcatcttaa

SEQ ID NO: 4535558 - DNA, 25 bp, Homo sapien
gcagcacctgttgttgaagacagca

SEQ ID NO: 4535559 - DNA, 25 bp, Homo sapien
tctggcttggactggtcaggagtca

SEQ ID NO: 4535560 - DNA, 25 bp, Homo sapien
tcacttcactcagaatcttcattag

SEQ ID NO: 4535561 - DNA, 25 bp, Homo sapien
gattgtgcgttagcactatcttctc

SEQ ID NO: 4535562 - DNA, 25 bp, Homo sapien
cattagtgattttaagcgattgtgc

SEQ ID NO: 4535563 - DNA, 25 bp, Homo sapien
tcatcactcttatgtctgagacagt

SEQ ID NO: 4535564 - DNA, 25 bp, Homo sapien
gtttcatcactcttatgtctgagac

SEQ ID NO: 4535565 - DNA, 25 bp, Homo sapien
actcttatgtctgagacagttgagc

SEQ ID NO: 4535566 - DNA, 25 bp, Homo sapien
tcactcttatgtctgagacagttga

SEQ ID NO: 4535567 - DNA, 25 bp, Homo sapien
aagcatacaaccatcatgaaatttt

SEQ ID NO: 4535568 - DNA, 25 bp, Homo sapien
aaaaaagcatacaaccatcatgaaa

SEQ ID NO: 4535569 - DNA, 25 bp, Homo sapien
aaaagcatacaaccatcatgaaatt

SEQ ID NO: 4535570 - DNA, 25 bp, Homo sapien
ttaaaaaagcatacaaccatcatga

SEQ ID NO: 4535571 - DNA, 25 bp, Homo sapien
atctctgatgcatttactatggctt

SEQ ID NO: 4535572 - DNA, 25 bp, Homo sapien
acattttgaatatccatctctgatg

SEQ ID NO: 4535573 - DNA, 25 bp, Homo sapien
tgcatttactatggcttttgttttt

SEQ ID NO: 4535574 - DNA, 25 bp, Homo sapien
atcttttctgatagaggaacatttt

SEQ ID NO: 4535575 - DNA, 25 bp, Homo sapien
ggcgtgatctcacagtggcgtgatc

SEQ ID NO: 4535576 - DNA, 25 bp, Homo sapien
gcagaagtgacctctcaaggcagcc

SEQ ID NO: 4535577 - DNA, 25 bp, Homo sapien
tacagatggaaaccaacgggaatcc

SEQ ID NO: 4535578 - DNA, 25 bp, Homo sapien
gatggaaaccaacgggaatcccaca

SEQ ID NO: 4535579 - DNA, 25 bp, Homo sapien
gcatgggtagaatacagatggaaac

SEQ ID NO: 4535580 - DNA, 25 bp, Homo sapien
gagtgaaccttcaatgccaactagg

SEQ ID NO: 4535581 - DNA, 25 bp, Homo sapien
ccttcaatgccaactaggaagggcg

SEQ ID NO: 4535582 - DNA, 25 bp, Homo sapien
gccaactaggaagggcgcttccaaa

SEQ ID NO: 4535583 - DNA, 25 bp, Homo sapien
ctttgagtgaaccttcaatgccaac

SEQ ID NO: 4535584 - DNA, 25 bp, Homo sapien
ggaacacagcgcacctctcaggctg

SEQ ID NO: 4535585 - DNA, 25 bp, Homo sapien
gcgtgacactgtgcgcactggaaca

SEQ ID NO: 4535586 - DNA, 25 bp, Homo sapien
caccgagtcggcgagcactgcgtga

SEQ ID NO: 4535587 - DNA, 25 bp, Homo sapien
gtcccaggcgaggtgcaccgagtcg

SEQ ID NO: 4535588 - DNA, 25 bp, Homo sapien
agcttggtcaatcgccctctcagtg

SEQ ID NO: 4535589 - DNA, 25 bp, Homo sapien
ggaggtcgtaaaagaagcttggtca

SEQ ID NO: 4535590 - DNA, 25 bp, Homo sapien
gatgccgcagcggctgagccgccat

SEQ ID NO: 4535591 - DNA, 25 bp, Homo sapien
ttgcacaacgtgagcgatgccgcag

SEQ ID NO: 4535592 - DNA, 25 bp, Homo sapien
gcgccttcctttcgaatacacgcca

SEQ ID NO: 4535593 - DNA, 25 bp, Homo sapien
cccgcagccggcgccttcctttcga

SEQ ID NO: 4535594 - DNA, 25 bp, Homo sapien
agccggcgccttcctttcgaataca

SEQ ID NO: 4535595 - DNA, 25 bp, Homo sapien
cgccttcctttcgaatacacgccag

SEQ ID NO: 4535596 - DNA, 25 bp, Homo sapien
ggtgatcaccctgtacttagtcttt

SEQ ID NO: 4535597 - DNA, 25 bp, Homo sapien
taccttgtccctggcctggtgatca

SEQ ID NO: 4535598 - DNA, 25 bp, Homo sapien
cagtgtgatcacatgattagcaagg

SEQ ID NO: 4535599 - DNA, 25 bp, Homo sapien
ggcttccctcgcttgctttccgtag

SEQ ID NO: 4535600 - DNA, 25 bp, Homo sapien
caattcaggtttctaacgagaccca

SEQ ID NO: 4535601 - DNA, 25 bp, Homo sapien
catgtgctatgatctctgaaaagac

SEQ ID NO: 4535602 - DNA, 25 bp, Homo sapien
tacctgatggcagctagttatgcaa

SEQ ID NO: 4535603 - DNA, 25 bp, Homo sapien
taagctgggatagaaaggccacctc

SEQ ID NO: 4535604 - DNA, 25 bp, Homo sapien
aacgggccaggatgacaatggcggc

SEQ ID NO: 4535605 - DNA, 25 bp, Homo sapien
cgggccaggatgacaatggcggctt

SEQ ID NO: 4535606 - DNA, 25 bp, Homo sapien
ggcggctttgtggaatagaaaggcg

SEQ ID NO: 4535607 - DNA, 25 bp, Homo sapien
ggctttgtggaatagaaaggcggga

SEQ ID NO: 4535608 - DNA, 25 bp, Homo sapien
cattgtagatgctagtacccttaga

SEQ ID NO: 4535609 - DNA, 25 bp, Homo sapien
gtctatatcattgtagatgctagta

SEQ ID NO: 4535610 - DNA, 25 bp, Homo sapien
tgctagtacccttagattagtaaaa

SEQ ID NO: 4535611 - DNA, 25 bp, Homo sapien
gatgctagtacccttagattagtaa

SEQ ID NO: 4535612 - DNA, 25 bp, Homo sapien
aaaagccttgggttaagctctggag

SEQ ID NO: 4535613 - DNA, 25 bp, Homo sapien
ttcttctgtatgagctggatcagta

SEQ ID NO: 4535614 - DNA, 25 bp, Homo sapien
cagtaaacacgccaataaaatctat

SEQ ID NO: 4535615 - DNA, 25 bp, Homo sapien
catccactttatcagccaaggtgaa

SEQ ID NO: 4535616 - DNA, 25 bp, Homo sapien
tgggttttaatgctatcagccctta

SEQ ID NO: 4535617 - DNA, 25 bp, Homo sapien
gctatcagcccttagcaaatactac

SEQ ID NO: 4535618 - DNA, 25 bp, Homo sapien
tactaattctcccatagcatactgt

SEQ ID NO: 4535619 - DNA, 25 bp, Homo sapien
cagtgacgtactgagattattccag

SEQ ID NO: 4535620 - DNA, 25 bp, Homo sapien
cttatcaagcggaagctcatgctga

SEQ ID NO: 4535621 - DNA, 25 bp, Homo sapien
tcatgctgaacatcccggattcttc

SEQ ID NO: 4535622 - DNA, 25 bp, Homo sapien
ccggattcttcctcgattagagaag

SEQ ID NO: 4535623 - DNA, 25 bp, Homo sapien
caagcggaagctcatgctgaacatc

SEQ ID NO: 4535624 - DNA, 25 bp, Homo sapien
ctagcttcaaatgattcactgcctt

SEQ ID NO: 4535625 - DNA, 25 bp, Homo sapien
gaaaagtgtgactagaaaagtgtag

SEQ ID NO: 4535626 - DNA, 25 bp, Homo sapien
ctgaagtgcatgcagtagggtgatc

SEQ ID NO: 4535627 - DNA, 25 bp, Homo sapien
gcttgtcttagactcctagcttcaa

SEQ ID NO: 4535628 - DNA, 25 bp, Homo sapien
tccccacgtacacggagatacagag

SEQ ID NO: 4535629 - DNA, 25 bp, Homo sapien
gatacagagtattgaactgggacca

SEQ ID NO: 4535630 - DNA, 25 bp, Homo sapien
actgggaccaatcgtaagacatctt

SEQ ID NO: 4535631 - DNA, 25 bp, Homo sapien
tcctctggaagaaatctgtgtcctc

SEQ ID NO: 4535632 - DNA, 25 bp, Homo sapien
gtactataggcgcccaaaaccacac

SEQ ID NO: 4535633 - DNA, 25 bp, Homo sapien
cttcgggtagactccccgtcctgag

SEQ ID NO: 4535634 - DNA, 25 bp, Homo sapien
ccccggaattgccagacaaccttgg

SEQ ID NO: 4535635 - DNA, 25 bp, Homo sapien
tgcctccaatcgtcttatcagaagt

SEQ ID NO: 4535636 - DNA, 25 bp, Homo sapien
tcagagttccatatagcagtgcact

SEQ ID NO: 4535637 - DNA, 25 bp, Homo sapien
cttcaaaagcctaaaatggtatatt

SEQ ID NO: 4535638 - DNA, 25 bp, Homo sapien
aagcctaaaatggtatattgcttca

SEQ ID NO: 4535639 - DNA, 25 bp, Homo sapien
tgctttatcgaaactaacatcaggc

SEQ ID NO: 4535640 - DNA, 25 bp, Homo sapien
caaaagcctaaaatggtatattgct

SEQ ID NO: 4535641 - DNA, 25 bp, Homo sapien
ggcagaagttggcttagagaatttt

SEQ ID NO: 4535642 - DNA, 25 bp, Homo sapien
tacccaaaaatggatacaaggcaga

SEQ ID NO: 4535643 - DNA, 25 bp, Homo sapien
atacccaaaaatggatacaaggcag

SEQ ID NO: 4535644 - DNA, 25 bp, Homo sapien
aaataagtaccacgcagcaatttgt

SEQ ID NO: 4535645 - DNA, 25 bp, Homo sapien
gaaaataagtaccacgcagcaattt

SEQ ID NO: 4535646 - DNA, 25 bp, Homo sapien
ctgagaaaataagtaccacgcagca

SEQ ID NO: 4535647 - DNA, 25 bp, Homo sapien
gagaaaataagtaccacgcagcaat

SEQ ID NO: 4535648 - DNA, 25 bp, Homo sapien
gaagcttcagcaaatagcccaattc

SEQ ID NO: 4535649 - DNA, 25 bp, Homo sapien
accaagaagcttcagcaaatagccc

SEQ ID NO: 4535650 - DNA, 25 bp, Homo sapien
ttcctgggctagcaagggccaccaa

SEQ ID NO: 4535651 - DNA, 25 bp, Homo sapien
tttcttcctgggctagcaagggcca

SEQ ID NO: 4535652 - DNA, 25 bp, Homo sapien
atttcaaattcaacagaaatcaggt

SEQ ID NO: 4535653 - DNA, 25 bp, Homo sapien
agaagagacattgaagaattatcag

SEQ ID NO: 4535654 - DNA, 25 bp, Homo sapien
tatcagcatagcaatgaatgcatca

SEQ ID NO: 4535655 - DNA, 25 bp, Homo sapien
tgaagaattatcagcatagcaatga

SEQ ID NO: 4535656 - DNA, 25 bp, Homo sapien
caaggctaatttacccgaggtcaca

SEQ ID NO: 4535657 - DNA, 25 bp, Homo sapien
tcactgacggctcacaacaatcctg

SEQ ID NO: 4535658 - DNA, 25 bp, Homo sapien
gaagaaactgacgttccaaggctaa

SEQ ID NO: 4535659 - DNA, 25 bp, Homo sapien
tcaaccctcaagtgccagggctctg

SEQ ID NO: 4535660 - DNA, 25 bp, Homo sapien
tatagtgtaccttccgcccagaagc

SEQ ID NO: 4535661 - DNA, 25 bp, Homo sapien
gagcctatagtgtaccttccgccca

SEQ ID NO: 4535662 - DNA, 25 bp, Homo sapien
tccccgagcctatagtgtaccttcc

SEQ ID NO: 4535663 - DNA, 25 bp, Homo sapien
cctatagtgtaccttccgcccagaa

SEQ ID NO: 4535664 - DNA, 25 bp, Homo sapien
ttccgatgccaaacaaggcgtcaga

SEQ ID NO: 4535665 - DNA, 25 bp, Homo sapien
cggccgagtacagaagcccaggaag

SEQ ID NO: 4535666 - DNA, 25 bp, Homo sapien
tgtatcctttcaggcggcaaactcc

SEQ ID NO: 4535667 - DNA, 25 bp, Homo sapien
tcgccagttgtaaggaagcagtgag

SEQ ID NO: 4535668 - DNA, 25 bp, Homo sapien
gaatgtaccatagcggcgggaattt

SEQ ID NO: 4535669 - DNA, 25 bp, Homo sapien
gggtccagactgcgctgtttttcct

SEQ ID NO: 4535670 - DNA, 25 bp, Homo sapien
tcctttgccacgctgtgagctttct

SEQ ID NO: 4535671 - DNA, 25 bp, Homo sapien
ttccccagaatgtaccatagcggcg

SEQ ID NO: 4535672 - DNA, 25 bp, Homo sapien
ccacaacctttaatgcgggctgtct

SEQ ID NO: 4535673 - DNA, 25 bp, Homo sapien
tcttcccacaacctttaatgcgggc

SEQ ID NO: 4535674 - DNA, 25 bp, Homo sapien
tcccacaacctttaatgcgggctgt

SEQ ID NO: 4535675 - DNA, 25 bp, Homo sapien
acaacctttaatgcgggctgtctct

SEQ ID NO: 4535676 - DNA, 25 bp, Homo sapien
tgatttcagtctttcaggaagttgg

SEQ ID NO: 4535677 - DNA, 25 bp, Homo sapien
acattttatgagtgtttatcaacaa

SEQ ID NO: 4535678 - DNA, 25 bp, Homo sapien
ttttatgagtgtttatcaacaagag

SEQ ID NO: 4535679 - DNA, 25 bp, Homo sapien
aacgactgtaaacacacaagtgttg

SEQ ID NO: 4535680 - DNA, 25 bp, Homo sapien
aaatagggaatatttcacgaatttg

SEQ ID NO: 4535681 - DNA, 25 bp, Homo sapien
cttttctgtattctaattttagata

SEQ ID NO: 4535682 - DNA, 25 bp, Homo sapien
tagggaatatttcacgaatttgcat

SEQ ID NO: 4535683 - DNA, 25 bp, Homo sapien
tctgtattctaattttagatatgtg

SEQ ID NO: 4535684 - DNA, 25 bp, Homo sapien
gatctgttaatacgtcccttaaggc

SEQ ID NO: 4535685 - DNA, 25 bp, Homo sapien
caagctataggtggtagccaggtct

SEQ ID NO: 4535686 - DNA, 25 bp, Homo sapien
catgagttcagctggaattatctcc

SEQ ID NO: 4535687 - DNA, 25 bp, Homo sapien
tgtatttccatcaggagacacatga

SEQ ID NO: 4535688 - DNA, 25 bp, Homo sapien
agtagctagtgttacaggcacccgc

SEQ ID NO: 4535689 - DNA, 25 bp, Homo sapien
tcagacagagtttcgcttttgtcgc

SEQ ID NO: 4535690 - DNA, 25 bp, Homo sapien
tttcagacagagtttcgcttttgtc

SEQ ID NO: 4535691 - DNA, 25 bp, Homo sapien
caccgtgcctggctactgtttgtat

SEQ ID NO: 4535692 - DNA, 25 bp, Homo sapien
gctgctggctgagataccgaacaag

SEQ ID NO: 4535693 - DNA, 25 bp, Homo sapien
ccactagctgctgatgggtcggctg

SEQ ID NO: 4535694 - DNA, 25 bp, Homo sapien
gagcaaggcaagtgtggtaccaccc

SEQ ID NO: 4535695 - DNA, 25 bp, Homo sapien
taccaccctgttgcctgctgagtga

SEQ ID NO: 4535696 - DNA, 25 bp, Homo sapien
ggattgggcacctgcgatcctcttt

SEQ ID NO: 4535697 - DNA, 25 bp, Homo sapien
gaacattcggcacgtgaccttgtgg

SEQ ID NO: 4535698 - DNA, 25 bp, Homo sapien
ggtctcctctacagactgccttggc

SEQ ID NO: 4535699 - DNA, 25 bp, Homo sapien
tctaatttgagagcgagagtgtgta

SEQ ID NO: 4535700 - DNA, 25 bp, Homo sapien
catgggtctatagctgtttcagatt

SEQ ID NO: 4535701 - DNA, 25 bp, Homo sapien
actctttgtatcagtctgtcatggg

SEQ ID NO: 4535702 - DNA, 25 bp, Homo sapien
tcttcttactaaacaggcctgactg

SEQ ID NO: 4535703 - DNA, 25 bp, Homo sapien
tagctgtgtaacttccccattccca

SEQ ID NO: 4535704 - DNA, 25 bp, Homo sapien
atgtcttgctcttcccatgggtaca

SEQ ID NO: 4535705 - DNA, 25 bp, Homo sapien
cagtgaatgtcttgctcttcccatg

SEQ ID NO: 4535706 - DNA, 25 bp, Homo sapien
aagcccatggccaggtaccagggag

SEQ ID NO: 4535707 - DNA, 25 bp, Homo sapien
ggagggcagtgaatgtcttgctctt

SEQ ID NO: 4535708 - DNA, 25 bp, Homo sapien
gctgggacctctcctatcatgatga

SEQ ID NO: 4535709 - DNA, 25 bp, Homo sapien
tatattgtgcagctagggcgaagcc

SEQ ID NO: 4535710 - DNA, 25 bp, Homo sapien
aagatttaggttacgccgggtgcag

SEQ ID NO: 4535711 - DNA, 25 bp, Homo sapien
tgagagctccgatctccacgagaga

SEQ ID NO: 4535712 - DNA, 25 bp, Homo sapien
gatagccctgcttcgctaagcgcgt

SEQ ID NO: 4535713 - DNA, 25 bp, Homo sapien
ctgcatgcgtctccagccgtggatc

SEQ ID NO: 4535714 - DNA, 25 bp, Homo sapien
ctaagcgcgtgcgatgcagcacagc

SEQ ID NO: 4535715 - DNA, 25 bp, Homo sapien
tccatcagttttgccgggagagccc

SEQ ID NO: 4535716 - DNA, 25 bp, Homo sapien
actcggaggacgacctgctgagcga

SEQ ID NO: 4535717 - DNA, 25 bp, Homo sapien
gcgccgcctttccacctcgtcggtc

SEQ ID NO: 4535718 - DNA, 25 bp, Homo sapien
tgctcgaggactcggaggacgacct

SEQ ID NO: 4535719 - DNA, 25 bp, Homo sapien
gtgatccctcagctgaccgtgacag

SEQ ID NO: 4535720 - DNA, 25 bp, Homo sapien
agcgcccgcacgaggcgtggacgca

SEQ ID NO: 4535721 - DNA, 25 bp, Homo sapien
gttgccacggtttccctctcctgag

SEQ ID NO: 4535722 - DNA, 25 bp, Homo sapien
ccctctcctgagtgggagtggagcg

SEQ ID NO: 4535723 - DNA, 25 bp, Homo sapien
gggagcggaacgcagcccacccagt

SEQ ID NO: 4535724 - DNA, 25 bp, Homo sapien
agttccggtccctggcatccacaga

SEQ ID NO: 4535725 - DNA, 25 bp, Homo sapien
gttccggtccctggcatccacagat

SEQ ID NO: 4535726 - DNA, 25 bp, Homo sapien
tccggtccctggcatccacagatcg

SEQ ID NO: 4535727 - DNA, 25 bp, Homo sapien
tcagttccggtccctggcatccaca

SEQ ID NO: 4535728 - DNA, 25 bp, Homo sapien
gatgaaggatgctcataatgggaga

SEQ ID NO: 4535729 - DNA, 25 bp, Homo sapien
agaggccgctggcataacaggccac

SEQ ID NO: 4535730 - DNA, 25 bp, Homo sapien
ttccagcatggcaagtgcagcgctg

SEQ ID NO: 4535731 - DNA, 25 bp, Homo sapien
gggagagcaatccagtgctccccat

SEQ ID NO: 4535732 - DNA, 25 bp, Homo sapien
ggtcttaggcactccaaagatctgt

SEQ ID NO: 4535733 - DNA, 25 bp, Homo sapien
ggttctgaggttggaggcccctgga

SEQ ID NO: 4535734 - DNA, 25 bp, Homo sapien
cagccaggggccaagagggctacct

SEQ ID NO: 4535735 - DNA, 25 bp, Homo sapien
tccattggcaggagtgaattcagca

SEQ ID NO: 4535736 - DNA, 25 bp, Homo sapien
tactgcagacgctccaagatgctgg

SEQ ID NO: 4535737 - DNA, 25 bp, Homo sapien
tgagtgcagtactgcagacgctcca

SEQ ID NO: 4535738 - DNA, 25 bp, Homo sapien
tgctggcaaagctagggcggagctc

SEQ ID NO: 4535739 - DNA, 25 bp, Homo sapien
gctcaggctcgtgctgccaacactg

SEQ ID NO: 4535740 - DNA, 25 bp, Homo sapien
ccatggttgtgaaggacctcccttc

SEQ ID NO: 4535741 - DNA, 25 bp, Homo sapien
catggttgtgaaggacctcccttcc

SEQ ID NO: 4535742 - DNA, 25 bp, Homo sapien
acccatggttgtgaaggacctccct

SEQ ID NO: 4535743 - DNA, 25 bp, Homo sapien
cccatggttgtgaaggacctccctt

SEQ ID NO: 4535744 - DNA, 25 bp, Homo sapien
gcagcccctaggagggtccatccgg

SEQ ID NO: 4535745 - DNA, 25 bp, Homo sapien
ggcctcctccaacgacgaagtccag

SEQ ID NO: 4535746 - DNA, 25 bp, Homo sapien
ccaggatagggcatgtagcccagtg

SEQ ID NO: 4535747 - DNA, 25 bp, Homo sapien
cctgggcagcccctaggagggtcca

SEQ ID NO: 4535748 - DNA, 25 bp, Homo sapien
caagtgaggcccgtcaggtgtagcc

SEQ ID NO: 4535749 - DNA, 25 bp, Homo sapien
tgcatcacaagtgggggaaccaagt

SEQ ID NO: 4535750 - DNA, 25 bp, Homo sapien
gctggaaaggacaggattagcctca

SEQ ID NO: 4535751 - DNA, 25 bp, Homo sapien
ctcccctcacatgaggtggctggaa

SEQ ID NO: 4535752 - DNA, 25 bp, Homo sapien
atccacttgactgggagcaaggccc

SEQ ID NO: 4535753 - DNA, 25 bp, Homo sapien
tcttggatgtgaagatgccctccag

SEQ ID NO: 4535754 - DNA, 25 bp, Homo sapien
ttgactgggagcaaggcccggtccc

SEQ ID NO: 4535755 - DNA, 25 bp, Homo sapien
tctgtcttggatgtgaagatgccct

SEQ ID NO: 4535756 - DNA, 25 bp, Homo sapien
gtagatatctcgtgccatcccaaag

SEQ ID NO: 4535757 - DNA, 25 bp, Homo sapien
tagatatctcgtgccatcccaaagt

SEQ ID NO: 4535758 - DNA, 25 bp, Homo sapien
gatatctcgtgccatcccaaagtcc

SEQ ID NO: 4535759 - DNA, 25 bp, Homo sapien
cggtagatatctcgtgccatcccaa

SEQ ID NO: 4535760 - DNA, 25 bp, Homo sapien
cagccctgggctatgtcctgggcca

SEQ ID NO: 4535761 - DNA, 25 bp, Homo sapien
cctgggccagttgcagcaggtcccg

SEQ ID NO: 4535762 - DNA, 25 bp, Homo sapien
tgattttcctccaggtagtggcagc

SEQ ID NO: 4535763 - DNA, 25 bp, Homo sapien
ctgtggatgaagtgattttcctcca

SEQ ID NO: 4535764 - DNA, 25 bp, Homo sapien
acacaccgcacaatgttctgatggc

SEQ ID NO: 4535765 - DNA, 25 bp, Homo sapien
cctcaggaaactcttcatgtcccct

SEQ ID NO: 4535766 - DNA, 25 bp, Homo sapien
cacaatgttctgatggcgaaacttg

SEQ ID NO: 4535767 - DNA, 25 bp, Homo sapien
gtgtggccgactgtgcctcaggaaa

SEQ ID NO: 4535768 - DNA, 25 bp, Homo sapien
cgggcattcccctcccgccttccag

SEQ ID NO: 4535769 - DNA, 25 bp, Homo sapien
agcctcagggtgaagagaaactgtt

SEQ ID NO: 4535770 - DNA, 25 bp, Homo sapien
ctcagcctcagggtgaagagaaact

SEQ ID NO: 4535771 - DNA, 25 bp, Homo sapien
cctcagggtgaagagaaactgttcc

SEQ ID NO: 4535772 - DNA, 25 bp, Homo sapien
ggaaatccagctcatcctgaggcga

SEQ ID NO: 4535773 - DNA, 25 bp, Homo sapien
atcctgaggcgagcagagttctggc

SEQ ID NO: 4535774 - DNA, 25 bp, Homo sapien
tcctgaggcgagcagagttctggca

SEQ ID NO: 4535775 - DNA, 25 bp, Homo sapien
aggccaattaccagtccctcataca

SEQ ID NO: 4535776 - DNA, 25 bp, Homo sapien
ggaaggccaattaccagtccctcat

SEQ ID NO: 4535777 - DNA, 25 bp, Homo sapien
ccaggaaggccaattaccagtccct

SEQ ID NO: 4535778 - DNA, 25 bp, Homo sapien
gaaggccaattaccagtccctcata

SEQ ID NO: 4535779 - DNA, 25 bp, Homo sapien
tcaagctcagggctcggcagcctca

SEQ ID NO: 4535780 - DNA, 25 bp, Homo sapien
gctggggaaacctcggtgacacctg

SEQ ID NO: 4535781 - DNA, 25 bp, Homo sapien
gccccacctggcaataatagggatt

SEQ ID NO: 4535782 - DNA, 25 bp, Homo sapien
ctgatggcagaggttcgaagcttgc

SEQ ID NO: 4535783 - DNA, 25 bp, Homo sapien
tagaatcccagaggagtctaccacg

SEQ ID NO: 4535784 - DNA, 25 bp, Homo sapien
tgggaagaataacggcacaccctcc

SEQ ID NO: 4535785 - DNA, 25 bp, Homo sapien
ctccagatgctcattaaggtaaacg

SEQ ID NO: 4535786 - DNA, 25 bp, Homo sapien
cacggctctgctgcggtgagtggtc

SEQ ID NO: 4535787 - DNA, 25 bp, Homo sapien
actgtgcctgctagacgcttcgtac

SEQ ID NO: 4535788 - DNA, 25 bp, Homo sapien
agccttgaatcaactgtgcctgcta

SEQ ID NO: 4535789 - DNA, 25 bp, Homo sapien
aactgtgcctgctagacgcttcgta

SEQ ID NO: 4535790 - DNA, 25 bp, Homo sapien
gaccccacacaccataaggaggctc

SEQ ID NO: 4535791 - DNA, 25 bp, Homo sapien
gaggctcagtgttgaggttgccacc

SEQ ID NO: 4535792 - DNA, 25 bp, Homo sapien
ctcagtgttgaggttgccaccacag

SEQ ID NO: 4535793 - DNA, 25 bp, Homo sapien
ccacacaccataaggaggctcagtg

SEQ ID NO: 4535794 - DNA, 25 bp, Homo sapien
gacgttatccacagctagctccatg

SEQ ID NO: 4535795 - DNA, 25 bp, Homo sapien
actgcagttgaggtgccttcggatc

SEQ ID NO: 4535796 - DNA, 25 bp, Homo sapien
tctacctctccgtggttctcggtga

SEQ ID NO: 4535797 - DNA, 25 bp, Homo sapien
gagctctgcctgccattggcagtct

SEQ ID NO: 4535798 - DNA, 25 bp, Homo sapien
gagctcgctgctggggtgtatgaag

SEQ ID NO: 4535799 - DNA, 25 bp, Homo sapien
tcagcccagaggttgtcagtctctg

SEQ ID NO: 4535800 - DNA, 25 bp, Homo sapien
ggtgtatgaaggatactccatcttc

SEQ ID NO: 4535801 - DNA, 25 bp, Homo sapien
atcagcccagaggttgtcagtctct

SEQ ID NO: 4535802 - DNA, 25 bp, Homo sapien
gcggagagggagcccgcgacgtcca

SEQ ID NO: 4535803 - DNA, 25 bp, Homo sapien
agccaagggtcgcccaagcctcgga

SEQ ID NO: 4535804 - DNA, 25 bp, Homo sapien
agggtcgcccaagcctcggagcagc

SEQ ID NO: 4535805 - DNA, 25 bp, Homo sapien
gcccagccaagggtcgcccaagcct

SEQ ID NO: 4535806 - DNA, 25 bp, Homo sapien
cgccaccagcaacggttccagctcg

SEQ ID NO: 4535807 - DNA, 25 bp, Homo sapien
gcgcctccgagcggttctccagttt

SEQ ID NO: 4535808 - DNA, 25 bp, Homo sapien
tcaggtaggcccgaccgccgcctcc

SEQ ID NO: 4535809 - DNA, 25 bp, Homo sapien
ctgagtccggcctcggtcccgcggc

SEQ ID NO: 4535810 - DNA, 25 bp, Homo sapien
cagcggcgtgttccaggaagcgccc

SEQ ID NO: 4535811 - DNA, 25 bp, Homo sapien
ccagcggcgtgttccaggaagcgcc

SEQ ID NO: 4535812 - DNA, 25 bp, Homo sapien
agcggcgtgttccaggaagcgccct

SEQ ID NO: 4535813 - DNA, 25 bp, Homo sapien
gccactgggagagggctcccgccca

SEQ ID NO: 4535814 - DNA, 25 bp, Homo sapien
gtccaggggcactgccactgggaga

SEQ ID NO: 4535815 - DNA, 25 bp, Homo sapien
ccagggggcctggataagggcaggg

SEQ ID NO: 4535816 - DNA, 25 bp, Homo sapien
actgggagagggctcccgcccaggg

SEQ ID NO: 4535817 - DNA, 25 bp, Homo sapien
cttcgctcccatccatcgccgcgtg

SEQ ID NO: 4535818 - DNA, 25 bp, Homo sapien
atccatcgccgcgtgctcttcaacg

SEQ ID NO: 4535819 - DNA, 25 bp, Homo sapien
gcgtgctcttcaacggctcgagact

SEQ ID NO: 4535820 - DNA, 25 bp, Homo sapien
acggctcgagactccccgaggcaga

SEQ ID NO: 4535821 - DNA, 25 bp, Homo sapien
tccgggacaggcgtcctctccctgc

SEQ ID NO: 4535822 - DNA, 25 bp, Homo sapien
gggacaggcgtcctctccctgctgc

SEQ ID NO: 4535823 - DNA, 25 bp, Homo sapien
cgggacaggcgtcctctccctgctg

SEQ ID NO: 4535824 - DNA, 25 bp, Homo sapien
ccgggacaggcgtcctctccctgct

SEQ ID NO: 4535825 - DNA, 25 bp, Homo sapien
gattgctgagacgaagacgccatgc

SEQ ID NO: 4535826 - DNA, 25 bp, Homo sapien
aggatgtacagcgactccccgagac

SEQ ID NO: 4535827 - DNA, 25 bp, Homo sapien
ccccgagaccgagggagaagattgc

SEQ ID NO: 4535828 - DNA, 25 bp, Homo sapien
atgcgcccgcgacaggtggttcttg

SEQ ID NO: 4535829 - DNA, 25 bp, Homo sapien
ccgctggccccgcaggtagaaaaca

SEQ ID NO: 4535830 - DNA, 25 bp, Homo sapien
tctgtgtgggcccatgccggccgct

SEQ ID NO: 4535831 - DNA, 25 bp, Homo sapien
gcgtacgccccgtcacattgtgtct

SEQ ID NO: 4535832 - DNA, 25 bp, Homo sapien
cgctggccccgcaggtagaaaacag

SEQ ID NO: 4535833 - DNA, 25 bp, Homo sapien
ggggcgaggaccgcagaaaagtctc

SEQ ID NO: 4535834 - DNA, 25 bp, Homo sapien
ggaggctggctccaagatactaggc

SEQ ID NO: 4535835 - DNA, 25 bp, Homo sapien
gtctcctgggaccccgggctagagc

SEQ ID NO: 4535836 - DNA, 25 bp, Homo sapien
gctccaagatactaggcggggcgct

SEQ ID NO: 4535837 - DNA, 25 bp, Homo sapien
ctccgaaccacaccagcagctgtcc

SEQ ID NO: 4535838 - DNA, 25 bp, Homo sapien
ccgcggctccgaaccacaccagcag

SEQ ID NO: 4535839 - DNA, 25 bp, Homo sapien
gcggctccgaaccacaccagcagct

SEQ ID NO: 4535840 - DNA, 25 bp, Homo sapien
ggctccgaaccacaccagcagctgt

SEQ ID NO: 4535841 - DNA, 25 bp, Homo sapien
acaaaagcccttgcggtcgcggcca

SEQ ID NO: 4535842 - DNA, 25 bp, Homo sapien
ccggcaacaaaagcccttgcggtcg

SEQ ID NO: 4535843 - DNA, 25 bp, Homo sapien
tccacccggcaacaaaagcccttgc

SEQ ID NO: 4535844 - DNA, 25 bp, Homo sapien
caacaaaagcccttgcggtcgcggc

SEQ ID NO: 4535845 - DNA, 25 bp, Homo sapien
tgtcaacctaaagttgacagctcat

SEQ ID NO: 4535846 - DNA, 25 bp, Homo sapien
agctcattttgccacggcagccctg

SEQ ID NO: 4535847 - DNA, 25 bp, Homo sapien
cacttacaggggtgtgctgccgctg

SEQ ID NO: 4535848 - DNA, 25 bp, Homo sapien
actccccggacctaaagctggtctg

SEQ ID NO: 4535849 - DNA, 25 bp, Homo sapien
gctggatacaggacaacgtacccat

SEQ ID NO: 4535850 - DNA, 25 bp, Homo sapien
aatggtagggctcactgctctaaaa

SEQ ID NO: 4535851 - DNA, 25 bp, Homo sapien
taggacacaatgttcttcgtctggc

SEQ ID NO: 4535852 - DNA, 25 bp, Homo sapien
tgtccccaaagagcgggtaaatagc

SEQ ID NO: 4535853 - DNA, 25 bp, Homo sapien
cccattttggagcactgttgaagtc

SEQ ID NO: 4535854 - DNA, 25 bp, Homo sapien
tcaaagccctctgggagcgtggaat

SEQ ID NO: 4535855 - DNA, 25 bp, Homo sapien
cgtggaattgggaagcttatagtgc

SEQ ID NO: 4535856 - DNA, 25 bp, Homo sapien
gggcaactgagaatagagctcaaag

SEQ ID NO: 4535857 - DNA, 25 bp, Homo sapien
tctgcagcatactcctgcgggcagc

SEQ ID NO: 4535858 - DNA, 25 bp, Homo sapien
cagcatactcctgcgggcagctttg

SEQ ID NO: 4535859 - DNA, 25 bp, Homo sapien
gttttctgcagcatactcctgcggg

SEQ ID NO: 4535860 - DNA, 25 bp, Homo sapien
tcctgcgggcagctttgacctcatc

SEQ ID NO: 4535861 - DNA, 25 bp, Homo sapien
cagaggcagctcaattgctagctcc

SEQ ID NO: 4535862 - DNA, 25 bp, Homo sapien
gggctggtacccaccactggccttg

SEQ ID NO: 4535863 - DNA, 25 bp, Homo sapien
tggcactgagccgagggctggtacc

SEQ ID NO: 4535864 - DNA, 25 bp, Homo sapien
agccgagggctggtacccaccactg

SEQ ID NO: 4535865 - DNA, 25 bp, Homo sapien
accagggtccggaagtagagctgaa

SEQ ID NO: 4535866 - DNA, 25 bp, Homo sapien
gaagctattgacatgagccacagcc

SEQ ID NO: 4535867 - DNA, 25 bp, Homo sapien
ggccaggttgtcttcaggaggcact

SEQ ID NO: 4535868 - DNA, 25 bp, Homo sapien
gcggagcgcaccagtaaccagggtc

SEQ ID NO: 4535869 - DNA, 25 bp, Homo sapien
cataaggtgtgtggataacgatcac

SEQ ID NO: 4535870 - DNA, 25 bp, Homo sapien
gcagagatcaggtcctagacaaaca

SEQ ID NO: 4535871 - DNA, 25 bp, Homo sapien
gcacaaggatcagggttaaagacta

SEQ ID NO: 4535872 - DNA, 25 bp, Homo sapien
gcaggcggatcacacgaaattagga

SEQ ID NO: 4535873 - DNA, 25 bp, Homo sapien
tgccctttgtcatgctccttttgct

SEQ ID NO: 4535874 - DNA, 25 bp, Homo sapien
ccacctagcatctgaataattcaca

SEQ ID NO: 4535875 - DNA, 25 bp, Homo sapien
gataccacctagcatctgaataatt

SEQ ID NO: 4535876 - DNA, 25 bp, Homo sapien
tacccaacctacagtgcctgggtca

SEQ ID NO: 4535877 - DNA, 25 bp, Homo sapien
aattcaaattctacccaacctacag

SEQ ID NO: 4535878 - DNA, 25 bp, Homo sapien
ccagcccatgttaagcccttttcat

SEQ ID NO: 4535879 - DNA, 25 bp, Homo sapien
gcaaggagctatgccttattaatag

SEQ ID NO: 4535880 - DNA, 25 bp, Homo sapien
gcccagtgcagggtacccttgcagg

SEQ ID NO: 4535881 - DNA, 25 bp, Homo sapien
tagattgtagcactgataagcaagg

SEQ ID NO: 4535882 - DNA, 25 bp, Homo sapien
caatgagtcaggtagcagttgcgga

SEQ ID NO: 4535883 - DNA, 25 bp, Homo sapien
aggtgacactgaaccgacgctgcag

SEQ ID NO: 4535884 - DNA, 25 bp, Homo sapien
cagggttgggactcgctgtagctcc

SEQ ID NO: 4535885 - DNA, 25 bp, Homo sapien
tgcttcctaacgacagctggtcaga

SEQ ID NO: 4535886 - DNA, 25 bp, Homo sapien
gaactccagccggaatacacagctc

SEQ ID NO: 4535887 - DNA, 25 bp, Homo sapien
ggccataccatgatagagggcagca

SEQ ID NO: 4535888 - DNA, 25 bp, Homo sapien
gtgaggtactcacttccgggcagca

SEQ ID NO: 4535889 - DNA, 25 bp, Homo sapien
catgggtgaggtactcacttccggg

SEQ ID NO: 4535890 - DNA, 25 bp, Homo sapien
tactcatggcgcagggcccatgcag

SEQ ID NO: 4535891 - DNA, 25 bp, Homo sapien
aggtactgcaggtggtactcatggc

SEQ ID NO: 4535892 - DNA, 25 bp, Homo sapien
tggaggaagtaattctggagtcccg

SEQ ID NO: 4535893 - DNA, 25 bp, Homo sapien
tactgcaggtggtactcatggcgca

SEQ ID NO: 4535894 - DNA, 25 bp, Homo sapien
ctggcccctaatcaggcaccccaca

SEQ ID NO: 4535895 - DNA, 25 bp, Homo sapien
ctgattcctgccatcttggcccctt

SEQ ID NO: 4535896 - DNA, 25 bp, Homo sapien
tcccactttctttctgattcctgcc

SEQ ID NO: 4535897 - DNA, 25 bp, Homo sapien
cttgcctggcccctaatcaggcacc

SEQ ID NO: 4535898 - DNA, 25 bp, Homo sapien
tggcacacaggacagcgggttgcag

SEQ ID NO: 4535899 - DNA, 25 bp, Homo sapien
acacaggacagcgggttgcagagaa

SEQ ID NO: 4535900 - DNA, 25 bp, Homo sapien
acaggacagcgggttgcagagaagg

SEQ ID NO: 4535901 - DNA, 25 bp, Homo sapien
tgagccagccagactgagacggggg

SEQ ID NO: 4535902 - DNA, 25 bp, Homo sapien
gctcctctgacaggcgctgcatgtc

SEQ ID NO: 4535903 - DNA, 25 bp, Homo sapien
gagccaatcctccgggcatgagctt

SEQ ID NO: 4535904 - DNA, 25 bp, Homo sapien
tggagccaatcctccgggcatgagc

SEQ ID NO: 4535905 - DNA, 25 bp, Homo sapien
gccaatcctccgggcatgagcttgg

SEQ ID NO: 4535906 - DNA, 25 bp, Homo sapien
ctggagccaatcctccgggcatgag

SEQ ID NO: 4535907 - DNA, 25 bp, Homo sapien
acggctctccacatctcaggtctgg

SEQ ID NO: 4535908 - DNA, 25 bp, Homo sapien
aggaacaacaggcaggcaacgggca

SEQ ID NO: 4535909 - DNA, 25 bp, Homo sapien
tccaggcctggtagtaggctcccag

SEQ ID NO: 4535910 - DNA, 25 bp, Homo sapien
gcactgggcccacggctctccacat

SEQ ID NO: 4535911 - DNA, 25 bp, Homo sapien
tagacacggctcaacaagaggctgg

SEQ ID NO: 4535912 - DNA, 25 bp, Homo sapien
cacctgtgtccaagtgactaaggaa

SEQ ID NO: 4535913 - DNA, 25 bp, Homo sapien
cttagacacggctcaacaagaggct

SEQ ID NO: 4535914 - DNA, 25 bp, Homo sapien
agaggctggagcccagacacctgtg

SEQ ID NO: 4535915 - DNA, 25 bp, Homo sapien
tttcagcaggggtactgccggctgc

SEQ ID NO: 4535916 - DNA, 25 bp, Homo sapien
tgccggctgccagggttagctgggt

SEQ ID NO: 4535917 - DNA, 25 bp, Homo sapien
tgaggctatccgctgcatggacagg

SEQ ID NO: 4535918 - DNA, 25 bp, Homo sapien
ctgatggtttcagcaggggtactgc

SEQ ID NO: 4535919 - DNA, 25 bp, Homo sapien
ccgcatcagcactgggtagagctcc

SEQ ID NO: 4535920 - DNA, 25 bp, Homo sapien
gcccgcatcagcactgggtagagct

SEQ ID NO: 4535921 - DNA, 25 bp, Homo sapien
ctgcaaggcccgcatcagcactggg

SEQ ID NO: 4535922 - DNA, 25 bp, Homo sapien
aaggcccgcatcagcactgggtaga

SEQ ID NO: 4535923 - DNA, 25 bp, Homo sapien
agggaagaacagggactgattttca

SEQ ID NO: 4535924 - DNA, 25 bp, Homo sapien
ctagggaagaacagggactgatttt

SEQ ID NO: 4535925 - DNA, 25 bp, Homo sapien
tagggaagaacagggactgattttc

SEQ ID NO: 4535926 - DNA, 25 bp, Homo sapien
tcctccaagcttgggaccttgagca

SEQ ID NO: 4535927 - DNA, 25 bp, Homo sapien
tttgagcatagaatacggttaagcc

SEQ ID NO: 4535928 - DNA, 25 bp, Homo sapien
gactcctaagccttttcacatctgg

SEQ ID NO: 4535929 - DNA, 25 bp, Homo sapien
tgggcctgactcctaagccttttca

SEQ ID NO: 4535930 - DNA, 25 bp, Homo sapien
ctgtaaaggtaaccgccctggccat

SEQ ID NO: 4535931 - DNA, 25 bp, Homo sapien
ggcctcggtgctcagcatctcagct

SEQ ID NO: 4535932 - DNA, 25 bp, Homo sapien
ggcggctccggagatcaaagctgct

SEQ ID NO: 4535933 - DNA, 25 bp, Homo sapien
gggagcctcagctatgatgcggcac

SEQ ID NO: 4535934 - DNA, 25 bp, Homo sapien
ggcacagtctgaggatcagggtcag

SEQ ID NO: 4535935 - DNA, 25 bp, Homo sapien
gaagcccttctgatctgggtctagg

SEQ ID NO: 4535936 - DNA, 25 bp, Homo sapien
tgaatgcctatgtgcatgaagccct

SEQ ID NO: 4535937 - DNA, 25 bp, Homo sapien
taaacaggctccagtaaacaggttc

SEQ ID NO: 4535938 - DNA, 25 bp, Homo sapien
tatgatgcaccaggctccagtaaac

SEQ ID NO: 4535939 - DNA, 25 bp, Homo sapien
tatagtctctatcagccgagggcac

SEQ ID NO: 4535940 - DNA, 25 bp, Homo sapien
gagaccaactggtgggcaagaactc

SEQ ID NO: 4535941 - DNA, 25 bp, Homo sapien
tgaggccaggacacgaagtagtttc

SEQ ID NO: 4535942 - DNA, 25 bp, Homo sapien
gtttcatggcagtagcacagggtac

SEQ ID NO: 4535943 - DNA, 25 bp, Homo sapien
gatgtcaaggaccaccgcaggtcct

SEQ ID NO: 4535944 - DNA, 25 bp, Homo sapien
atgtcacctccagcacgtagcgcag

SEQ ID NO: 4535945 - DNA, 25 bp, Homo sapien
acagccaggatgtcaaggaccaccg

SEQ ID NO: 4535946 - DNA, 25 bp, Homo sapien
accgcaggtcctgggtatgtcacct

SEQ ID NO: 4535947 - DNA, 25 bp, Homo sapien
gaacgtcaaagctccatggtaccaa

SEQ ID NO: 4535948 - DNA, 25 bp, Homo sapien
gatgacatcatgtcgggccaggtca

SEQ ID NO: 4535949 - DNA, 25 bp, Homo sapien
tcctggctgggcatcagagggaacg

SEQ ID NO: 4535950 - DNA, 25 bp, Homo sapien
cttgatgacatcatgtcgggccagg

SEQ ID NO: 4535951 - DNA, 25 bp, Homo sapien
cagtaggaagaggaaaccagcatcc

SEQ ID NO: 4535952 - DNA, 25 bp, Homo sapien
acggatggcggttgcaatgacccca

SEQ ID NO: 4535953 - DNA, 25 bp, Homo sapien
tgtcatccaaggagaagcgcagtag

SEQ ID NO: 4535954 - DNA, 25 bp, Homo sapien
ccagcatccaaaaggaggcttaaga

SEQ ID NO: 4535955 - DNA, 25 bp, Homo sapien
gggaaacctggctgcgggtcaggtg

SEQ ID NO: 4535956 - DNA, 25 bp, Homo sapien
tgatgacctgggctaacacatgcag

SEQ ID NO: 4535957 - DNA, 25 bp, Homo sapien
acagctcctgtagggaataccccgc

SEQ ID NO: 4535958 - DNA, 25 bp, Homo sapien
tggctgcgggtcaggtggaacagct

SEQ ID NO: 4535959 - DNA, 25 bp, Homo sapien
caggtccacgtcaggggccagtagt

SEQ ID NO: 4535960 - DNA, 25 bp, Homo sapien
cctgaagactgaatcgagcctgcat

SEQ ID NO: 4535961 - DNA, 25 bp, Homo sapien
gaagactgaatcgagcctgcatcct

SEQ ID NO: 4535962 - DNA, 25 bp, Homo sapien
aggtccacgtcaggggccagtagtt

SEQ ID NO: 4535963 - DNA, 25 bp, Homo sapien
agctcgacagtgtccatgtgcagcc

SEQ ID NO: 4535964 - DNA, 25 bp, Homo sapien
ttctgaggggtcacgggcaatgcca

SEQ ID NO: 4535965 - DNA, 25 bp, Homo sapien
ccagctcgacagtgtccatgtgcag

SEQ ID NO: 4535966 - DNA, 25 bp, Homo sapien
cctgggtccagtggagcttctccag

SEQ ID NO: 4535967 - DNA, 25 bp, Homo sapien
gcttctggctccagcttgtctctct

SEQ ID NO: 4535968 - DNA, 25 bp, Homo sapien
gggcttctggctccagcttgtctct

SEQ ID NO: 4535969 - DNA, 25 bp, Homo sapien
tggggcttctggctccagcttgtct

SEQ ID NO: 4535970 - DNA, 25 bp, Homo sapien
ctggggcttctggctccagcttgtc

SEQ ID NO: 4535971 - DNA, 25 bp, Homo sapien
tcttgcgtgtggctgtgagatctca

SEQ ID NO: 4535972 - DNA, 25 bp, Homo sapien
cctgtttgctcttgcgtgtggctgt

SEQ ID NO: 4535973 - DNA, 25 bp, Homo sapien
gatctcaagaaagcaaccaagctgg

SEQ ID NO: 4535974 - DNA, 25 bp, Homo sapien
gctgtgagatctcaagaaagcaacc

SEQ ID NO: 4535975 - DNA, 25 bp, Homo sapien
gctgggccagcaaccgctgctgttc

SEQ ID NO: 4535976 - DNA, 25 bp, Homo sapien
agtgggtgtctcacaggtcacggca

SEQ ID NO: 4535977 - DNA, 25 bp, Homo sapien
tgtgaccagattgggtccctgaaag

SEQ ID NO: 4535978 - DNA, 25 bp, Homo sapien
tgctcagcttcttgatccctgagcc

SEQ ID NO: 4535979 - DNA, 25 bp, Homo sapien
tctggtgggcccacgttgggcacaa

SEQ ID NO: 4535980 - DNA, 25 bp, Homo sapien
ttcagctatcctccttgccgcaatt

SEQ ID NO: 4535981 - DNA, 25 bp, Homo sapien
ttgggcacaacttccccaactgatg

SEQ ID NO: 4535982 - DNA, 25 bp, Homo sapien
aatttcctgggcaaagatgcttctc

SEQ ID NO: 4535983 - DNA, 25 bp, Homo sapien
cagattcacggccactgaacttgta

SEQ ID NO: 4535984 - DNA, 25 bp, Homo sapien
tgtgtgtcccgcgagcgaaggaaca

SEQ ID NO: 4535985 - DNA, 25 bp, Homo sapien
gcacaggcagattcacggccactga

SEQ ID NO: 4535986 - DNA, 25 bp, Homo sapien
gggaaagcaacaccactgggcacag

SEQ ID NO: 4535987 - DNA, 25 bp, Homo sapien
cttagtcaagacagcagtgatgtgc

SEQ ID NO: 4535988 - DNA, 25 bp, Homo sapien
gacagcagtgatgtgctgatcatgc

SEQ ID NO: 4535989 - DNA, 25 bp, Homo sapien
tgtgctgatcatgcctcctcagcct

SEQ ID NO: 4535990 - DNA, 25 bp, Homo sapien
aataatcttagtcaagacagcagtg

SEQ ID NO: 4535991 - DNA, 25 bp, Homo sapien
acttctcagcctcacatccatggga

SEQ ID NO: 4535992 - DNA, 25 bp, Homo sapien
tgtcatcttgggtaagatatttaac

SEQ ID NO: 4535993 - DNA, 25 bp, Homo sapien
gagtatatgcacaccttcctaggaa

SEQ ID NO: 4535994 - DNA, 25 bp, Homo sapien
ctgaatccaaccacaacaggaagag

SEQ ID NO: 4535995 - DNA, 25 bp, Homo sapien
gcaccagctgcgagaaactgactct

SEQ ID NO: 4535996 - DNA, 25 bp, Homo sapien
gaggccggtctgagttggcatcacc

SEQ ID NO: 4535997 - DNA, 25 bp, Homo sapien
ggtctgagttggcatcaccaccgcc

SEQ ID NO: 4535998 - DNA, 25 bp, Homo sapien
catcccgatggtcctggagcggagg

SEQ ID NO: 4535999 - DNA, 25 bp, Homo sapien
gctgcctccccagtacgactctctc

SEQ ID NO: 4536000 - DNA, 25 bp, Homo sapien
agctgcctccccagtacgactctct

SEQ ID NO: 4536001 - DNA, 25 bp, Homo sapien
gctccagctgcctccccagtacgac

SEQ ID NO: 4536002 - DNA, 25 bp, Homo sapien
ccagctgcctccccagtacgactct

SEQ ID NO: 4536003 - DNA, 25 bp, Homo sapien
cagtgtctccgtgtgggggttccct

SEQ ID NO: 4536004 - DNA, 25 bp, Homo sapien
tcatctacttctaagcaggatcaga

SEQ ID NO: 4536005 - DNA, 25 bp, Homo sapien
gaaacaatcacatgacggtgtgacc

SEQ ID NO: 4536006 - DNA, 25 bp, Homo sapien
gatcagatctaataactaagccagc

SEQ ID NO: 4536007 - DNA, 25 bp, Homo sapien
gacagagaccatgccgaaatgctgg

SEQ ID NO: 4536008 - DNA, 25 bp, Homo sapien
gccaggatccaatcccgagtcggga

SEQ ID NO: 4536009 - DNA, 25 bp, Homo sapien
gcgtgactgcccttaccgctcaggt

SEQ ID NO: 4536010 - DNA, 25 bp, Homo sapien
atcccgagtcgggacgcgtgactgc

SEQ ID NO: 4536011 - DNA, 25 bp, Homo sapien
gcccttaccgctcaggtcaagggct

SEQ ID NO: 4536012 - DNA, 25 bp, Homo sapien
agatcacctgaaatccgtccctcca

SEQ ID NO: 4536013 - DNA, 25 bp, Homo sapien
gatcacctgaaatccgtccctccag

SEQ ID NO: 4536014 - DNA, 25 bp, Homo sapien
cacctgaaatccgtccctccagccc

SEQ ID NO: 4536015 - DNA, 25 bp, Homo sapien
ctgaaatccgtccctccagccccgc

SEQ ID NO: 4536016 - DNA, 25 bp, Homo sapien
cgccatcttgccccgcagagatcgc

SEQ ID NO: 4536017 - DNA, 25 bp, Homo sapien
gtgctccaggcctgtctgggcgccg

SEQ ID NO: 4536018 - DNA, 25 bp, Homo sapien
cgccgccatcttgccccgcagagat

SEQ ID NO: 4536019 - DNA, 25 bp, Homo sapien
ctccaggcctgtctgggcgccgcca

SEQ ID NO: 4536020 - DNA, 25 bp, Homo sapien
ggcggcgacggcagtggaaggagcg

SEQ ID NO: 4536021 - DNA, 25 bp, Homo sapien
gcgacggcagtggaaggagcgcggt

SEQ ID NO: 4536022 - DNA, 25 bp, Homo sapien
acggcagtggaaggagcgcggtggc

SEQ ID NO: 4536023 - DNA, 25 bp, Homo sapien
ggcagtggaaggagcgcggtggcgc

SEQ ID NO: 4536024 - DNA, 25 bp, Homo sapien
gtgacaagagcgttccatgcagcac

SEQ ID NO: 4536025 - DNA, 25 bp, Homo sapien
gagacagcattccttgccatatcag

SEQ ID NO: 4536026 - DNA, 25 bp, Homo sapien
ccccatcctgtgactggtcctgaga

SEQ ID NO: 4536027 - DNA, 25 bp, Homo sapien
ttgtgttcccacatagccactgagg

SEQ ID NO: 4536028 - DNA, 25 bp, Homo sapien
taaggtgatactaaaaacaagaggc

SEQ ID NO: 4536029 - DNA, 25 bp, Homo sapien
ttttcatccgtttactcaaaggcca

SEQ ID NO: 4536030 - DNA, 25 bp, Homo sapien
caaaactgttctgggcagttcccct

SEQ ID NO: 4536031 - DNA, 25 bp, Homo sapien
tcttacttaggtgaaagctcaaacc

SEQ ID NO: 4536032 - DNA, 25 bp, Homo sapien
tggagaccccagctagtctaagaaa

SEQ ID NO: 4536033 - DNA, 25 bp, Homo sapien
gtgaatacaacctttgtcctggaga

SEQ ID NO: 4536034 - DNA, 25 bp, Homo sapien
cattagctgggcatttaggcattct

SEQ ID NO: 4536035 - DNA, 25 bp, Homo sapien
taagaaaacttcctaggctgagctc

SEQ ID NO: 4536036 - DNA, 25 bp, Homo sapien
ctccggccagagaggctcgcgctag

SEQ ID NO: 4536037 - DNA, 25 bp, Homo sapien
cagcgcctttgtccgcggcgcagaa

SEQ ID NO: 4536038 - DNA, 25 bp, Homo sapien
acgcgcggtcacgagccggtttgcc

SEQ ID NO: 4536039 - DNA, 25 bp, Homo sapien
gcgggacgaatcctcacctctgcgg

SEQ ID NO: 4536040 - DNA, 25 bp, Homo sapien
caagtatgcctgtgtagtggcccat

SEQ ID NO: 4536041 - DNA, 25 bp, Homo sapien
ttcacaaggagctgatcacccaagt

SEQ ID NO: 4536042 - DNA, 25 bp, Homo sapien
tgataattcactcaacccagcaggt

SEQ ID NO: 4536043 - DNA, 25 bp, Homo sapien
ggactggacggcacttattcataga

SEQ ID NO: 4536044 - DNA, 25 bp, Homo sapien
tcagaggatgaggccaggcaagctg

SEQ ID NO: 4536045 - DNA, 25 bp, Homo sapien
cagaggatgaggccaggcaagctgc

SEQ ID NO: 4536046 - DNA, 25 bp, Homo sapien
gcttgacctccagcaagactggtaa

SEQ ID NO: 4536047 - DNA, 25 bp, Homo sapien
tcatctgctatgagaaatcctctcc

SEQ ID NO: 4536048 - DNA, 25 bp, Homo sapien
tcctctcttggcctgtatgcaagtc

SEQ ID NO: 4536049 - DNA, 25 bp, Homo sapien
tctttgtctaatgcctctagaggct

SEQ ID NO: 4536050 - DNA, 25 bp, Homo sapien
cctgtatgcaagtctgctgtgctgc

SEQ ID NO: 4536051 - DNA, 25 bp, Homo sapien
cagtctccccgatttgatgatgctt

SEQ ID NO: 4536052 - DNA, 25 bp, Homo sapien
catcccaataagagacatgagggca

SEQ ID NO: 4536053 - DNA, 25 bp, Homo sapien
tactccagtctttcacgtagtgtcc

SEQ ID NO: 4536054 - DNA, 25 bp, Homo sapien
tagtatgccacctaacacagctaag

SEQ ID NO: 4536055 - DNA, 25 bp, Homo sapien
attatggtgagacgaacatgaatca

SEQ ID NO: 4536056 - DNA, 25 bp, Homo sapien
gacgaacatgaatcagaagctgtct

SEQ ID NO: 4536057 - DNA, 25 bp, Homo sapien
cgaacatgaatcagaagctgtctct

SEQ ID NO: 4536058 - DNA, 25 bp, Homo sapien
ggtgagacgaacatgaatcagaagc

SEQ ID NO: 4536059 - DNA, 25 bp, Homo sapien
tgggctgggagctcaactagaactg

SEQ ID NO: 4536060 - DNA, 25 bp, Homo sapien
ggtttccttacaacatggtgggtga

SEQ ID NO: 4536061 - DNA, 25 bp, Homo sapien
taccagtgcttgtaaagaccagacg

SEQ ID NO: 4536062 - DNA, 25 bp, Homo sapien
gacgcaaaactggtacaacatcact

SEQ ID NO: 4536063 - DNA, 25 bp, Homo sapien
cactaaacgcttgctccgtggagaa

SEQ ID NO: 4536064 - DNA, 25 bp, Homo sapien
agcaactgtgatagacatgtccccg

SEQ ID NO: 4536065 - DNA, 25 bp, Homo sapien
tatttcgtacgaggtggaaccagca

SEQ ID NO: 4536066 - DNA, 25 bp, Homo sapien
tgaaagtgcctggtatacctcgcca

SEQ ID NO: 4536067 - DNA, 25 bp, Homo sapien
caagggcgatggttcccggctcctg

SEQ ID NO: 4536068 - DNA, 25 bp, Homo sapien
tttcccggcatgctctgcagcacac

SEQ ID NO: 4536069 - DNA, 25 bp, Homo sapien
aagttaagccggtaggtgcgagctt

SEQ ID NO: 4536070 - DNA, 25 bp, Homo sapien
cctggagaggcgtgcgaagttaagc

SEQ ID NO: 4536071 - DNA, 25 bp, Homo sapien
tagctttgagcctctggtttctcgt

SEQ ID NO: 4536072 - DNA, 25 bp, Homo sapien
ttagctttgagcctctggtttctcg

SEQ ID NO: 4536073 - DNA, 25 bp, Homo sapien
gctttgagcctctggtttctcgttt

SEQ ID NO: 4536074 - DNA, 25 bp, Homo sapien
ttgagcctctggtttctcgtttcct

SEQ ID NO: 4536075 - DNA, 25 bp, Homo sapien
tcttggcgcgaagtgttaagagtct

SEQ ID NO: 4536076 - DNA, 25 bp, Homo sapien
cagccaatgactagccgggtggtcc

SEQ ID NO: 4536077 - DNA, 25 bp, Homo sapien
gcttcgagctcggtgccaggtgatt

SEQ ID NO: 4536078 - DNA, 25 bp, Homo sapien
aacggcagaaaaggatggccctcta

SEQ ID NO: 4536079 - DNA, 25 bp, Homo sapien
ttcgaccgggccctgacggcctgag

SEQ ID NO: 4536080 - DNA, 25 bp, Homo sapien
gtgttcactgaggttcgaccgggcc

SEQ ID NO: 4536081 - DNA, 25 bp, Homo sapien
ctgagcggtctttcgaagcgcgtgt

SEQ ID NO: 4536082 - DNA, 25 bp, Homo sapien
cctgagcggtctttcgaagcgcgtg

SEQ ID NO: 4536083 - DNA, 25 bp, Homo sapien
cacagacgacaagttctcagcaaaa

SEQ ID NO: 4536084 - DNA, 25 bp, Homo sapien
tgtaaattctggccgcggcttttcg

SEQ ID NO: 4536085 - DNA, 25 bp, Homo sapien
ttttcgtggcgtcctgctccgcggt

SEQ ID NO: 4536086 - DNA, 25 bp, Homo sapien
tgctccgcggtgagcacagacgaca

SEQ ID NO: 4536087 - DNA, 25 bp, Homo sapien
ctggaaagagtcgccaagcaggggg

SEQ ID NO: 4536088 - DNA, 25 bp, Homo sapien
ggaaagagtcgccaagcagggggag

SEQ ID NO: 4536089 - DNA, 25 bp, Homo sapien
tggaaagagtcgccaagcaggggga

SEQ ID NO: 4536090 - DNA, 25 bp, Homo sapien
acatcgaagcgtggcaagcgtcggt

SEQ ID NO: 4536091 - DNA, 25 bp, Homo sapien
tctttgctgcggtcggattgcctgt

SEQ ID NO: 4536092 - DNA, 25 bp, Homo sapien
gactgcgccggcctgtggttttcca

SEQ ID NO: 4536093 - DNA, 25 bp, Homo sapien
tgtttttactcctcccacatcgaag

SEQ ID NO: 4536094 - DNA, 25 bp, Homo sapien
gagcatcacttgagcccaggaggtt

SEQ ID NO: 4536095 - DNA, 25 bp, Homo sapien
agttgtggtggcgtggcctataatc

SEQ ID NO: 4536096 - DNA, 25 bp, Homo sapien
gaagctgcagtgagccgtgatcata

SEQ ID NO: 4536097 - DNA, 25 bp, Homo sapien
ccagctactcaggaggctgaggaag

SEQ ID NO: 4536098 - DNA, 25 bp, Homo sapien
caatctaggatcaaaactgtgtaca

SEQ ID NO: 4536099 - DNA, 25 bp, Homo sapien
tagaaatcagaaccgaaaggattgg

SEQ ID NO: 4536100 - DNA, 25 bp, Homo sapien
cctatcctcagcatatagtaggcac

SEQ ID NO: 4536101 - DNA, 25 bp, Homo sapien
taggccagactgtttaattgcatgc

SEQ ID NO: 4536102 - DNA, 25 bp, Homo sapien
tgtagggaaggagtaccaaaagaga

SEQ ID NO: 4536103 - DNA, 25 bp, Homo sapien
tatatgtttgcctggtgtagggaag

SEQ ID NO: 4536104 - DNA, 25 bp, Homo sapien
tcttcccaagttgtcctcacagatc

SEQ ID NO: 4536105 - DNA, 25 bp, Homo sapien
tggttgttaaccagtcattcacacc

SEQ ID NO: 4536106 - DNA, 25 bp, Homo sapien
gtagcctacacgttttctagttcag

SEQ ID NO: 4536107 - DNA, 25 bp, Homo sapien
gagcaaagtgtagagaaatatgacc

SEQ ID NO: 4536108 - DNA, 25 bp, Homo sapien
taggatcttgaatgctcttgctgac

SEQ ID NO: 4536109 - DNA, 25 bp, Homo sapien
ggagattctgacagggcagcttgta

SEQ ID NO: 4536110 - DNA, 25 bp, Homo sapien
aaactcgaccatccgtctctcaagg

SEQ ID NO: 4536111 - DNA, 25 bp, Homo sapien
cgtcttcggttgtggatgttgtaaa

SEQ ID NO: 4536112 - DNA, 25 bp, Homo sapien
cagattcatttgacgggcttgtgga

SEQ ID NO: 4536113 - DNA, 25 bp, Homo sapien
tctctcaaggtctttggcttcaagg

SEQ ID NO: 4536114 - DNA, 25 bp, Homo sapien
gcccgccgggcattggtttcacagt

SEQ ID NO: 4536115 - DNA, 25 bp, Homo sapien
caagcctgaggagtttaggtgcctc

SEQ ID NO: 4536116 - DNA, 25 bp, Homo sapien
aggcacagttgagaaaggcccgccg

SEQ ID NO: 4536117 - DNA, 25 bp, Homo sapien
tccacgaaggcttcgtgtgcaagcc

SEQ ID NO: 4536118 - DNA, 25 bp, Homo sapien
cggcgggctccgagcgggtaggagc

SEQ ID NO: 4536119 - DNA, 25 bp, Homo sapien
tctggggccgtttggactcctggtg

SEQ ID NO: 4536120 - DNA, 25 bp, Homo sapien
ggtgctgctcgcgtctccttttgcg

SEQ ID NO: 4536121 - DNA, 25 bp, Homo sapien
cgggtaggagcgcgtgcgcggtgac

SEQ ID NO: 4536122 - DNA, 25 bp, Homo sapien
gaagctcttgtgtatttgaacggcg

SEQ ID NO: 4536123 - DNA, 25 bp, Homo sapien
tgtgcgaaccgaacagaataacccg

SEQ ID NO: 4536124 - DNA, 25 bp, Homo sapien
aacgttccgctgagagagcttcgca

SEQ ID NO: 4536125 - DNA, 25 bp, Homo sapien
tggagggcatcgcttagtactggcc

SEQ ID NO: 4536126 - DNA, 25 bp, Homo sapien
ggtgagaagcgcccatggctcggcc

SEQ ID NO: 4536127 - DNA, 25 bp, Homo sapien
gggtgagaagcgcccatggctcggc

SEQ ID NO: 4536128 - DNA, 25 bp, Homo sapien
agagagcggccacgaggcgggaggg

SEQ ID NO: 4536129 - DNA, 25 bp, Homo sapien
gccagagagagcggccacgaggcgg

SEQ ID NO: 4536130 - DNA, 25 bp, Homo sapien
taaatggtcaagtaggtctctgccc

SEQ ID NO: 4536131 - DNA, 25 bp, Homo sapien
tgtcggcgtcgcttttctgagaact

SEQ ID NO: 4536132 - DNA, 25 bp, Homo sapien
ccaaattgtttgaggcaggacgtca

SEQ ID NO: 4536133 - DNA, 25 bp, Homo sapien
gaacttggcgcagcgttttgacacc

SEQ ID NO: 4536134 - DNA, 25 bp, Homo sapien
tcgccggagcaaacacgtggatcat

SEQ ID NO: 4536135 - DNA, 25 bp, Homo sapien
gagtccctggttaacaactgcttgc

SEQ ID NO: 4536136 - DNA, 25 bp, Homo sapien
cacccgcgcgtgttgttgtagagct

SEQ ID NO: 4536137 - DNA, 25 bp, Homo sapien
gatggcagaccaacacgagaaacca

SEQ ID NO: 4536138 - DNA, 25 bp, Homo sapien
caaggtaacagaacgcggctgggtc

SEQ ID NO: 4536139 - DNA, 25 bp, Homo sapien
gcagagcgatcatcgggttccggcc

SEQ ID NO: 4536140 - DNA, 25 bp, Homo sapien
ttgcagttgaaaagcggcggtttgt

SEQ ID NO: 4536141 - DNA, 25 bp, Homo sapien
gcggcacgtgatctgtcgggactct

SEQ ID NO: 4536142 - DNA, 25 bp, Homo sapien
gtcttgcttagatttcagtttacga

SEQ ID NO: 4536143 - DNA, 25 bp, Homo sapien
gagggaagtgtctccaaaatgtttg

SEQ ID NO: 4536144 - DNA, 25 bp, Homo sapien
gtatactggcttgtaagtaactcga

SEQ ID NO: 4536145 - DNA, 25 bp, Homo sapien
tcgggtcttactggaattttcatca

SEQ ID NO: 4536146 - DNA, 25 bp, Homo sapien
ctcgaagtgagcatcaataagatgt

SEQ ID NO: 4536147 - DNA, 25 bp, Homo sapien
ttctcgaagtgagcatcaataagat

SEQ ID NO: 4536148 - DNA, 25 bp, Homo sapien
gcttctcgaagtgagcatcaataag

SEQ ID NO: 4536149 - DNA, 25 bp, Homo sapien
tctcgaagtgagcatcaataagatg

SEQ ID NO: 4536150 - DNA, 25 bp, Homo sapien
ctaatgccagttttggttgagatgg

SEQ ID NO: 4536151 - DNA, 25 bp, Homo sapien
tgattgtgccactacttgggcaaca

SEQ ID NO: 4536152 - DNA, 25 bp, Homo sapien
gaagatcactttagccaggaggcta

SEQ ID NO: 4536153 - DNA, 25 bp, Homo sapien
gagtgagacttgtactcttaaaaaa

SEQ ID NO: 4536154 - DNA, 25 bp, Homo sapien
attgtgccactacttgggcaacaga

SEQ ID NO: 4536155 - DNA, 25 bp, Homo sapien
cctcagttgggtttcattgcgtcta

SEQ ID NO: 4536156 - DNA, 25 bp, Homo sapien
tagtgacagcttggtctctggagcc

SEQ ID NO: 4536157 - DNA, 25 bp, Homo sapien
tggagccagatagacagggtttgat

SEQ ID NO: 4536158 - DNA, 25 bp, Homo sapien
caggagcctcttaacctagatcttc

SEQ ID NO: 4536159 - DNA, 25 bp, Homo sapien
ctgccaaatccccctatgcgagaaa

SEQ ID NO: 4536160 - DNA, 25 bp, Homo sapien
taaatagacctgactcaggtaactg

SEQ ID NO: 4536161 - DNA, 25 bp, Homo sapien
taactgctacttaaggaagtgtgtg

SEQ ID NO: 4536162 - DNA, 25 bp, Homo sapien
ttaccttccttttccttgcacacag

SEQ ID NO: 4536163 - DNA, 25 bp, Homo sapien
tttataaagaggatcccctgttggc

SEQ ID NO: 4536164 - DNA, 25 bp, Homo sapien
tgtggagactctctggagaaagaca

SEQ ID NO: 4536165 - DNA, 25 bp, Homo sapien
tcaggaagcaaagttatggagcagc

SEQ ID NO: 4536166 - DNA, 25 bp, Homo sapien
ccaggaaatgtgttggagcttcaca

SEQ ID NO: 4536167 - DNA, 25 bp, Homo sapien
gagcagcaatctaatctacagccag

SEQ ID NO: 4536168 - DNA, 25 bp, Homo sapien
taaaggtggacttaaaaagatctgc

SEQ ID NO: 4536169 - DNA, 25 bp, Homo sapien
ttttgagagagttgcaggactaggc

SEQ ID NO: 4536170 - DNA, 25 bp, Homo sapien
aaggaaatacagcaatcgtgggctt

SEQ ID NO: 4536171 - DNA, 25 bp, Homo sapien
gataggatgttggtcatgaagcccc

SEQ ID NO: 4536172 - DNA, 25 bp, Homo sapien
ccaaggagcaggcaagtgagtgaac

SEQ ID NO: 4536173 - DNA, 25 bp, Homo sapien
tgagctctcaccctaacactataag

SEQ ID NO: 4536174 - DNA, 25 bp, Homo sapien
ggagataccatttgactcttgatga

SEQ ID NO: 4536175 - DNA, 25 bp, Homo sapien
gaacaatcctgcagtcttgacagaa

SEQ ID NO: 4536176 - DNA, 25 bp, Homo sapien
ttaaacgcctctggcgggcgtgggc

SEQ ID NO: 4536177 - DNA, 25 bp, Homo sapien
tgtagccccagctactcaggaggct

SEQ ID NO: 4536178 - DNA, 25 bp, Homo sapien
aatcagctgggcgtggtcgcgggtg

SEQ ID NO: 4536179 - DNA, 25 bp, Homo sapien
gaggcaggagaatggcgtgaacccg

SEQ ID NO: 4536180 - DNA, 25 bp, Homo sapien
ggaggcagagcttacagtgagccga

SEQ ID NO: 4536181 - DNA, 25 bp, Homo sapien
ctgtaccattaagtgccctttctgc

SEQ ID NO: 4536182 - DNA, 25 bp, Homo sapien
cattcttgagcagagccagtgcagg

SEQ ID NO: 4536183 - DNA, 25 bp, Homo sapien
tggactaagaatagaccgccctgcc

SEQ ID NO: 4536184 - DNA, 25 bp, Homo sapien
tctctagaaactggcctggactaag

SEQ ID NO: 4536185 - DNA, 25 bp, Homo sapien
gagcaattgtacctggcccctctag

SEQ ID NO: 4536186 - DNA, 25 bp, Homo sapien
caagaacaggttgccaggagaaagc

SEQ ID NO: 4536187 - DNA, 25 bp, Homo sapien
gctgccctttgtgggtatggccaga

SEQ ID NO: 4536188 - DNA, 25 bp, Homo sapien
tatggccagagatagagctggtatt

SEQ ID NO: 4536189 - DNA, 25 bp, Homo sapien
tacagagatagttcctcttgggtgg

SEQ ID NO: 4536190 - DNA, 25 bp, Homo sapien
ggtagagttcccagctagtcccttc

SEQ ID NO: 4536191 - DNA, 25 bp, Homo sapien
gattctgccggagttgtcataagga

SEQ ID NO: 4536192 - DNA, 25 bp, Homo sapien
gtagacggttctgcaatccaatggg

SEQ ID NO: 4536193 - DNA, 25 bp, Homo sapien
gaagcctgtcccaagtgaatgaatg

SEQ ID NO: 4536194 - DNA, 25 bp, Homo sapien
gatgcttagtcagaagcctgtgttg

SEQ ID NO: 4536195 - DNA, 25 bp, Homo sapien
tctccctgcatcctgaatgatgctt

SEQ ID NO: 4536196 - DNA, 25 bp, Homo sapien
gggcccagcattgtatttccctgtg

SEQ ID NO: 4536197 - DNA, 25 bp, Homo sapien
cttgagccagctgtgggatgttgct

SEQ ID NO: 4536198 - DNA, 25 bp, Homo sapien
gagggagctacccttcgccagaagt

SEQ ID NO: 4536199 - DNA, 25 bp, Homo sapien
caggtccttcacgaggagggagcta

SEQ ID NO: 4536200 - DNA, 25 bp, Homo sapien
cctgagtgcgcttgagctgctccaa

SEQ ID NO: 4536201 - DNA, 25 bp, Homo sapien
taggtgacaaagctacacgccatct

SEQ ID NO: 4536202 - DNA, 25 bp, Homo sapien
tatactttgtgcaggtcgcggcgct

SEQ ID NO: 4536203 - DNA, 25 bp, Homo sapien
tgcccgtttgtactgatgtatgaac

SEQ ID NO: 4536204 - DNA, 25 bp, Homo sapien
cctgcctcatcctcggctgcatggg

SEQ ID NO: 4536205 - DNA, 25 bp, Homo sapien
cccgtccccttctgcatgtctgagg

SEQ ID NO: 4536206 - DNA, 25 bp, Homo sapien
aagcgggcgctgccagtcgctccac

SEQ ID NO: 4536207 - DNA, 25 bp, Homo sapien
gctgccagtcgctccaccgcttcgg

SEQ ID NO: 4536208 - DNA, 25 bp, Homo sapien
gcgggcgctgccagtcgctccaccg

SEQ ID NO: 4536209 - DNA, 25 bp, Homo sapien
ggcgctgccagtcgctccaccgctt

SEQ ID NO: 4536210 - DNA, 25 bp, Homo sapien
caagcagacctgagtcttgtagctc

SEQ ID NO: 4536211 - DNA, 25 bp, Homo sapien
aaaggtagctgtgagtcgtatgtcc

SEQ ID NO: 4536212 - DNA, 25 bp, Homo sapien
cttctgtggtctaaggagggcctga

SEQ ID NO: 4536213 - DNA, 25 bp, Homo sapien
aagtcccgctgtccatgagagtcac

SEQ ID NO: 4536214 - DNA, 25 bp, Homo sapien
gcaagggctggtacagagctcgctc

SEQ ID NO: 4536215 - DNA, 25 bp, Homo sapien
ctaggctcttggctgtacatggcaa

SEQ ID NO: 4536216 - DNA, 25 bp, Homo sapien
ggtaggacccatctaaccagaagga

SEQ ID NO: 4536217 - DNA, 25 bp, Homo sapien
gttattactgctgagaagggccatg

SEQ ID NO: 4536218 - DNA, 25 bp, Homo sapien
tcaggcttcagaggacagcgcctgc

SEQ ID NO: 4536219 - DNA, 25 bp, Homo sapien
aggacagcgcctgccagccactgaa

SEQ ID NO: 4536220 - DNA, 25 bp, Homo sapien
gcttcagaggacagcgcctgccagc

SEQ ID NO: 4536221 - DNA, 25 bp, Homo sapien
tgcttcccccacccaggtgtcccac

SEQ ID NO: 4536222 - DNA, 25 bp, Homo sapien
tggctttgagttttgggctcagact

SEQ ID NO: 4536223 - DNA, 25 bp, Homo sapien
ggcatccttggtcgtgcactcattc

SEQ ID NO: 4536224 - DNA, 25 bp, Homo sapien
ccttggtcgtgcactcattcagaga

SEQ ID NO: 4536225 - DNA, 25 bp, Homo sapien
agagagctgacaggtttggctttga

SEQ ID NO: 4536226 - DNA, 25 bp, Homo sapien
tatattcctccaagtagaacctggc

SEQ ID NO: 4536227 - DNA, 25 bp, Homo sapien
cagagctaggatcccagacacattc

SEQ ID NO: 4536228 - DNA, 25 bp, Homo sapien
gcacgctgaccacggaagaaagtcc

SEQ ID NO: 4536229 - DNA, 25 bp, Homo sapien
gactagaaggttagagaagcaccca

SEQ ID NO: 4536230 - DNA, 25 bp, Homo sapien
tcggacggtgctgcaaacaggatct

SEQ ID NO: 4536231 - DNA, 25 bp, Homo sapien
ctcagcctgctcttcggacggtgct

SEQ ID NO: 4536232 - DNA, 25 bp, Homo sapien
cggtgctgcaaacaggatctctgcc

SEQ ID NO: 4536233 - DNA, 25 bp, Homo sapien
gctcttcggacggtgctgcaaacag

SEQ ID NO: 4536234 - DNA, 25 bp, Homo sapien
tcacaccgggctcccgtgaggtcaa

SEQ ID NO: 4536235 - DNA, 25 bp, Homo sapien
atgtgtgtttcctgccgtggcggcc

SEQ ID NO: 4536236 - DNA, 25 bp, Homo sapien
ctcccgtgaggtcaaggagggctat

SEQ ID NO: 4536237 - DNA, 25 bp, Homo sapien
caaggagggctatggaagctacttt

SEQ ID NO: 4536238 - DNA, 25 bp, Homo sapien
gcagctgtcccaggagctcgagcta

SEQ ID NO: 4536239 - DNA, 25 bp, Homo sapien
ggcagctgtcccaggagctcgagct

SEQ ID NO: 4536240 - DNA, 25 bp, Homo sapien
gctgcttgaactccaaagacccctc

SEQ ID NO: 4536241 - DNA, 25 bp, Homo sapien
gcaggtgctgcttgaactccaaaga

SEQ ID NO: 4536242 - DNA, 25 bp, Homo sapien
gcagcaggtgctgcttgaactccaa

SEQ ID NO: 4536243 - DNA, 25 bp, Homo sapien
tccatggtgggggtaccctttgcat

SEQ ID NO: 4536244 - DNA, 25 bp, Homo sapien
atgttcagggtggtatggctgtaga

SEQ ID NO: 4536245 - DNA, 25 bp, Homo sapien
tgttcagggtggtatggctgtagac

SEQ ID NO: 4536246 - DNA, 25 bp, Homo sapien
tcagatgagatcgggcatgttcagg

SEQ ID NO: 4536247 - DNA, 25 bp, Homo sapien
gcttctaagatcagatgagatcggg

SEQ ID NO: 4536248 - DNA, 25 bp, Homo sapien
cagggagaccacggcgggggtgcct

SEQ ID NO: 4536249 - DNA, 25 bp, Homo sapien
agggagaccacggcgggggtgcctg

SEQ ID NO: 4536250 - DNA, 25 bp, Homo sapien
tccactgaaaggatgtcagcgagct

SEQ ID NO: 4536251 - DNA, 25 bp, Homo sapien
agggcctccactgaaaggatgtcag

SEQ ID NO: 4536252 - DNA, 25 bp, Homo sapien
ggatgtcagcgagctgccagctctc

SEQ ID NO: 4536253 - DNA, 25 bp, Homo sapien
ccagctgtgctcctagcccctggtg

SEQ ID NO: 4536254 - DNA, 25 bp, Homo sapien
cagcccctagccgaggcagtcgtca

SEQ ID NO: 4536255 - DNA, 25 bp, Homo sapien
agcccctagccgaggcagtcgtcac

SEQ ID NO: 4536256 - DNA, 25 bp, Homo sapien
tcagcccctagccgaggcagtcgtc

SEQ ID NO: 4536257 - DNA, 25 bp, Homo sapien
tgtcttttgcatttgggcaaacttc

SEQ ID NO: 4536258 - DNA, 25 bp, Homo sapien
gcttttctaagtcctggtgtctgtg

SEQ ID NO: 4536259 - DNA, 25 bp, Homo sapien
tctgtcttttgcatttgggcaaact

SEQ ID NO: 4536260 - DNA, 25 bp, Homo sapien
ctctgtcttttgcatttgggcaaac

SEQ ID NO: 4536261 - DNA, 25 bp, Homo sapien
ccagctctcggcacagcgttgccag

SEQ ID NO: 4536262 - DNA, 25 bp, Homo sapien
cccatagtcgggcttcagcaggagt

SEQ ID NO: 4536263 - DNA, 25 bp, Homo sapien
aggccccagctctcggcacagcgtt

SEQ ID NO: 4536264 - DNA, 25 bp, Homo sapien
gcctctgccgaagcttctgcaggcc

SEQ ID NO: 4536265 - DNA, 25 bp, Homo sapien
cctgggcttgaaggcggcactccct

SEQ ID NO: 4536266 - DNA, 25 bp, Homo sapien
tgaaggcggcactccctgatttctt

SEQ ID NO: 4536267 - DNA, 25 bp, Homo sapien
gcaggtcctgggcttgaaggcggca

SEQ ID NO: 4536268 - DNA, 25 bp, Homo sapien
gcttgaaggcggcactccctgattt

SEQ ID NO: 4536269 - DNA, 25 bp, Homo sapien
gcagttcctggcagcgcccgaggaa

SEQ ID NO: 4536270 - DNA, 25 bp, Homo sapien
tgtagctggcccagtcggcaggcct

SEQ ID NO: 4536271 - DNA, 25 bp, Homo sapien
cagttcctggcagcgcccgaggaag

SEQ ID NO: 4536272 - DNA, 25 bp, Homo sapien
gcaggatgtagctggcccagtcggc

SEQ ID NO: 4536273 - DNA, 25 bp, Homo sapien
ccttctccatagcttccagctctct

SEQ ID NO: 4536274 - DNA, 25 bp, Homo sapien
tccttctccatagcttccagctctc

SEQ ID NO: 4536275 - DNA, 25 bp, Homo sapien
ctgtagccgtgccacctccttctcc

SEQ ID NO: 4536276 - DNA, 25 bp, Homo sapien
acctccttctccatagcttccagct

SEQ ID NO: 4536277 - DNA, 25 bp, Homo sapien
gatgacaggctgtggcctccgtcct

SEQ ID NO: 4536278 - DNA, 25 bp, Homo sapien
tccaggcgcctgtgctgttgctgca

SEQ ID NO: 4536279 - DNA, 25 bp, Homo sapien
aaagctgtggacctcatgggctgca

SEQ ID NO: 4536280 - DNA, 25 bp, Homo sapien
ttcatcagggccgtcttctcctgca

SEQ ID NO: 4536281 - DNA, 25 bp, Homo sapien
ccctcagtgaacgtgatgatatggg

SEQ ID NO: 4536282 - DNA, 25 bp, Homo sapien
ggggcttgatgtgtccccaggtaca

SEQ ID NO: 4536283 - DNA, 25 bp, Homo sapien
tgctgcagccctcagtgaacgtgat

SEQ ID NO: 4536284 - DNA, 25 bp, Homo sapien
tgtccccaggtacagaaaccatcct

SEQ ID NO: 4536285 - DNA, 25 bp, Homo sapien
agcagcctcaatgcggctcctctgg

SEQ ID NO: 4536286 - DNA, 25 bp, Homo sapien
ggcttttattgcttggtccaacctc

SEQ ID NO: 4536287 - DNA, 25 bp, Homo sapien
tattgcttggtccaacctctcccaa

SEQ ID NO: 4536288 - DNA, 25 bp, Homo sapien
gggtgcctgccaacttcctcagggc

SEQ ID NO: 4536289 - DNA, 25 bp, Homo sapien
gtggccgccttggtggtcagccagg

SEQ ID NO: 4536290 - DNA, 25 bp, Homo sapien
tcctgcaggccgtgccccctggcct

SEQ ID NO: 4536291 - DNA, 25 bp, Homo sapien
ggccgccttggtggtcagccaggcg

SEQ ID NO: 4536292 - DNA, 25 bp, Homo sapien
gcgtcgaggagcagggtctctcgct

SEQ ID NO: 4536293 - DNA, 25 bp, Homo sapien
ctgcagctgggctagcaccttgggg

SEQ ID NO: 4536294 - DNA, 25 bp, Homo sapien
cagccgctcgatgcgtgggctgaac

SEQ ID NO: 4536295 - DNA, 25 bp, Homo sapien
actgtggcccatgtcctcgctgtcc

SEQ ID NO: 4536296 - DNA, 25 bp, Homo sapien
gaacgcttccaggtctctcttggtg

SEQ ID NO: 4536297 - DNA, 25 bp, Homo sapien
tcgatgcgtgggctgaacgcttcca

SEQ ID NO: 4536298 - DNA, 25 bp, Homo sapien
gtcagagcctcgtggctgctcatct

SEQ ID NO: 4536299 - DNA, 25 bp, Homo sapien
gagcctcgtggctgctcatctcact

SEQ ID NO: 4536300 - DNA, 25 bp, Homo sapien
cgggcggccacctcgtgggcggcaa

SEQ ID NO: 4536301 - DNA, 25 bp, Homo sapien
gcggccacctcgtgggcggcaaagt

SEQ ID NO: 4536302 - DNA, 25 bp, Homo sapien
gtgccgcaccgcactcaggctctgg

SEQ ID NO: 4536303 - DNA, 25 bp, Homo sapien
acccaggccatttcctcgtcggcgt

SEQ ID NO: 4536304 - DNA, 25 bp, Homo sapien
cctcgtcggcgtccctgaagaactt

SEQ ID NO: 4536305 - DNA, 25 bp, Homo sapien
aggctctggccatagtcctgggcag

SEQ ID NO: 4536306 - DNA, 25 bp, Homo sapien
agttcctccatgctccgccgcagac

SEQ ID NO: 4536307 - DNA, 25 bp, Homo sapien
gtgcccaggagctcgcccaccccag

SEQ ID NO: 4536308 - DNA, 25 bp, Homo sapien
gtgggggctctcagctcaacctcga

SEQ ID NO: 4536309 - DNA, 25 bp, Homo sapien
tcagctcaacctcgatgggctccag

SEQ ID NO: 4536310 - DNA, 25 bp, Homo sapien
agctcctccagtcgctcctggatgg

SEQ ID NO: 4536311 - DNA, 25 bp, Homo sapien
tgttggtgcatgctcgcgtccagct

SEQ ID NO: 4536312 - DNA, 25 bp, Homo sapien
gctgttggtgcatgctcgcgtccag

SEQ ID NO: 4536313 - DNA, 25 bp, Homo sapien
ttggtgcatgctcgcgtccagctcc

SEQ ID NO: 4536314 - DNA, 25 bp, Homo sapien
ctgctgttggtgcatgctcgcgtcc

SEQ ID NO: 4536315 - DNA, 25 bp, Homo sapien
tcctgggagtcctgcaggaaggcct

SEQ ID NO: 4536316 - DNA, 25 bp, Homo sapien
agctgccggagctcctccaggcgat

SEQ ID NO: 4536317 - DNA, 25 bp, Homo sapien
ggagctcctccaggcgatggcggcg

SEQ ID NO: 4536318 - DNA, 25 bp, Homo sapien
tcctccaggcgatggcggcgggtcc

SEQ ID NO: 4536319 - DNA, 25 bp, Homo sapien
cctccagagcactgatctttcccgc

SEQ ID NO: 4536320 - DNA, 25 bp, Homo sapien
aggccgcgggccgtggcctccagag

SEQ ID NO: 4536321 - DNA, 25 bp, Homo sapien
cctcggggtgcccaccctggtgcag

SEQ ID NO: 4536322 - DNA, 25 bp, Homo sapien
ccagggcactctgggcctcggggtg

SEQ ID NO: 4536323 - DNA, 25 bp, Homo sapien
ccacagaaggggctccatgggggcc

SEQ ID NO: 4536324 - DNA, 25 bp, Homo sapien
tccagcatcttgtgcttccacagaa

SEQ ID NO: 4536325 - DNA, 25 bp, Homo sapien
agcatcttgtgcttccacagaaggg

SEQ ID NO: 4536326 - DNA, 25 bp, Homo sapien
ccaggtcccactccagcatcttgtg

SEQ ID NO: 4536327 - DNA, 25 bp, Homo sapien
gcaaagccaacgttccatcttctcc

SEQ ID NO: 4536328 - DNA, 25 bp, Homo sapien
tgcaaagccaacgttccatcttctc

SEQ ID NO: 4536329 - DNA, 25 bp, Homo sapien
ttcgggggggcaagatgcaggctgg

SEQ ID NO: 4536330 - DNA, 25 bp, Homo sapien
ggtcagcgcaggccctgttcggggg

SEQ ID NO: 4536331 - DNA, 25 bp, Homo sapien
tcagcgcaggccctgttcggggggg

SEQ ID NO: 4536332 - DNA, 25 bp, Homo sapien
gccctgttcgggggggcaagatgca

SEQ ID NO: 4536333 - DNA, 25 bp, Homo sapien
aggctgctcagctcctgttctaagc

SEQ ID NO: 4536334 - DNA, 25 bp, Homo sapien
ctgtagctgatgctcctgccaggcc

SEQ ID NO: 4536335 - DNA, 25 bp, Homo sapien
agctcctgttctaagccagccagca

SEQ ID NO: 4536336 - DNA, 25 bp, Homo sapien
cagctgtagctgatgctcctgccag

SEQ ID NO: 4536337 - DNA, 25 bp, Homo sapien
tgcccagtgcttcgggccaggctga

SEQ ID NO: 4536338 - DNA, 25 bp, Homo sapien
tgtctgtccaggagtccagctcggc

SEQ ID NO: 4536339 - DNA, 25 bp, Homo sapien
gttgctgcccagtgcttcgggccag

SEQ ID NO: 4536340 - DNA, 25 bp, Homo sapien
ctgtctgtccaggagtccagctcgg

SEQ ID NO: 4536341 - DNA, 25 bp, Homo sapien
aacaggactgggctcagatcactgg

SEQ ID NO: 4536342 - DNA, 25 bp, Homo sapien
ctggaacaggactgggctcagatca

SEQ ID NO: 4536343 - DNA, 25 bp, Homo sapien
ggaacaggactgggctcagatcact

SEQ ID NO: 4536344 - DNA, 25 bp, Homo sapien
acaggactgggctcagatcactggg

SEQ ID NO: 4536345 - DNA, 25 bp, Homo sapien
ctggaagcagcccagcaggcaggag

SEQ ID NO: 4536346 - DNA, 25 bp, Homo sapien
gcccagcaggcaggagagaggtggg

SEQ ID NO: 4536347 - DNA, 25 bp, Homo sapien
cagcaggcaggagagaggtggggaa

SEQ ID NO: 4536348 - DNA, 25 bp, Homo sapien
aagcagcccagcaggcaggagagag

SEQ ID NO: 4536349 - DNA, 25 bp, Homo sapien
cactcctgatgctcttctaacatac

SEQ ID NO: 4536350 - DNA, 25 bp, Homo sapien
cttgcactcctgatgctcttctaac

SEQ ID NO: 4536351 - DNA, 25 bp, Homo sapien
gcactcctgatgctcttctaacata

SEQ ID NO: 4536352 - DNA, 25 bp, Homo sapien
tgcactcctgatgctcttctaacat

SEQ ID NO: 4536353 - DNA, 25 bp, Homo sapien
gagcccgcagcctctgggcgctgac

SEQ ID NO: 4536354 - DNA, 25 bp, Homo sapien
ctgcagcattgcctggagtttctga

SEQ ID NO: 4536355 - DNA, 25 bp, Homo sapien
attcctgcagcattgcctggagttt

SEQ ID NO: 4536356 - DNA, 25 bp, Homo sapien
tgagcccgcagcctctgggcgctga

SEQ ID NO: 4536357 - DNA, 25 bp, Homo sapien
agctagtcgtcaggccttcaaaccc

SEQ ID NO: 4536358 - DNA, 25 bp, Homo sapien
gggaggacagtacagttatttgaag

SEQ ID NO: 4536359 - DNA, 25 bp, Homo sapien
ggatgggtcggcgagggcaaggcct

SEQ ID NO: 4536360 - DNA, 25 bp, Homo sapien
gagaaggaatcctaggggaacacag

SEQ ID NO: 4536361 - DNA, 25 bp, Homo sapien
tgctccggagctgccaccagctctc

SEQ ID NO: 4536362 - DNA, 25 bp, Homo sapien
cagaggcggcccacttcacgctcta

SEQ ID NO: 4536363 - DNA, 25 bp, Homo sapien
cctgtgcctgaggccgtgggctgcc

SEQ ID NO: 4536364 - DNA, 25 bp, Homo sapien
gcctgaggccgtgggctgcctcggg

SEQ ID NO: 4536365 - DNA, 25 bp, Homo sapien
gcctggatggggtgcacttcccgct

SEQ ID NO: 4536366 - DNA, 25 bp, Homo sapien
ctggatggggtgcacttcccgctcc

SEQ ID NO: 4536367 - DNA, 25 bp, Homo sapien
ggatggggtgcacttcccgctccag

SEQ ID NO: 4536368 - DNA, 25 bp, Homo sapien
ggcctggatggggtgcacttcccgc

SEQ ID NO: 4536369 - DNA, 25 bp, Homo sapien
acattgtccagctctcgggacaaca

SEQ ID NO: 4536370 - DNA, 25 bp, Homo sapien
tccaaggccccttcgagctgctgct

SEQ ID NO: 4536371 - DNA, 25 bp, Homo sapien
gctggtaccggagcaagttgccatg

SEQ ID NO: 4536372 - DNA, 25 bp, Homo sapien
ggacaacacgtgtatctccaaggcc

SEQ ID NO: 4536373 - DNA, 25 bp, Homo sapien
tcatgtggagcctgaggtggccttc

SEQ ID NO: 4536374 - DNA, 25 bp, Homo sapien
atgtggagcctgaggtggccttcca

SEQ ID NO: 4536375 - DNA, 25 bp, Homo sapien
catgtggagcctgaggtggccttcc

SEQ ID NO: 4536376 - DNA, 25 bp, Homo sapien
tgtggagcctgaggtggccttccac

SEQ ID NO: 4536377 - DNA, 25 bp, Homo sapien
tggttctccccagcctgggactggc

SEQ ID NO: 4536378 - DNA, 25 bp, Homo sapien
ttggttctccccagcctgggactgg

SEQ ID NO: 4536379 - DNA, 25 bp, Homo sapien
ctttggttctccccagcctgggact

SEQ ID NO: 4536380 - DNA, 25 bp, Homo sapien
cggccctttggttctccccagcctg

SEQ ID NO: 4536381 - DNA, 25 bp, Homo sapien
cagggtcccggttcttgagctgcag

SEQ ID NO: 4536382 - DNA, 25 bp, Homo sapien
tgatgctcctgatgcaggcatcacc

SEQ ID NO: 4536383 - DNA, 25 bp, Homo sapien
tgttgttgagctggcttcgccgctg

SEQ ID NO: 4536384 - DNA, 25 bp, Homo sapien
gcagatgatcttgacttcctcaggg

SEQ ID NO: 4536385 - DNA, 25 bp, Homo sapien
tgtaccgggggacaaggttagcaca

SEQ ID NO: 4536386 - DNA, 25 bp, Homo sapien
gtctttaacacctgattgtcaatac

SEQ ID NO: 4536387 - DNA, 25 bp, Homo sapien
acacctgattgtcaatacatttgcc

SEQ ID NO: 4536388 - DNA, 25 bp, Homo sapien
ttagcacatttggtctttaacacct

SEQ ID NO: 4536389 - DNA, 25 bp, Homo sapien
ctctgaggtgggtgctacccccatt

SEQ ID NO: 4536390 - DNA, 25 bp, Homo sapien
cggccgagtttcctcggaactcgcg

SEQ ID NO: 4536391 - DNA, 25 bp, Homo sapien
agccgccgtcggagctgcaggcagt

SEQ ID NO: 4536392 - DNA, 25 bp, Homo sapien
agtttcctcggaactcgcggagccg

SEQ ID NO: 4536393 - DNA, 25 bp, Homo sapien
cgcggagccgccgtcggagctgcag

SEQ ID NO: 4536394 - DNA, 25 bp, Homo sapien
agacctctccggctcgagggtgact

SEQ ID NO: 4536395 - DNA, 25 bp, Homo sapien
cgctgggagacctctccggctcgag

SEQ ID NO: 4536396 - DNA, 25 bp, Homo sapien
aggtcctcccagtgcttccgcaggc

SEQ ID NO: 4536397 - DNA, 25 bp, Homo sapien
aactccaggaagttccgcctgtcct

SEQ ID NO: 4536398 - DNA, 25 bp, Homo sapien
caacagaggtcatgacctcctcatg

SEQ ID NO: 4536399 - DNA, 25 bp, Homo sapien
tggacttcagcctcaaaggcctggt

SEQ ID NO: 4536400 - DNA, 25 bp, Homo sapien
cttggcaacagaggtcatgacctcc

SEQ ID NO: 4536401 - DNA, 25 bp, Homo sapien
gcccacgcctggatccagtcctcag

SEQ ID NO: 4536402 - DNA, 25 bp, Homo sapien
ggaggcatgcagggcgtgtccccgg

SEQ ID NO: 4536403 - DNA, 25 bp, Homo sapien
ggcatgcagggcgtgtccccggctc

SEQ ID NO: 4536404 - DNA, 25 bp, Homo sapien
aggcatgcagggcgtgtccccggct

SEQ ID NO: 4536405 - DNA, 25 bp, Homo sapien
gcatgcagggcgtgtccccggctct

SEQ ID NO: 4536406 - DNA, 25 bp, Homo sapien
ggcgccggagcgtcttcagccgctc

SEQ ID NO: 4536407 - DNA, 25 bp, Homo sapien
ttcagccgctcacgcagggctgcct

SEQ ID NO: 4536408 - DNA, 25 bp, Homo sapien
ggagcgtcttcagccgctcacgcag

SEQ ID NO: 4536409 - DNA, 25 bp, Homo sapien
tcactctcatccggcgctgcagcag

SEQ ID NO: 4536410 - DNA, 25 bp, Homo sapien
tcgtgcttgcgaatcaactgctcta

SEQ ID NO: 4536411 - DNA, 25 bp, Homo sapien
accttcaggaagacctcgtgcttgc

SEQ ID NO: 4536412 - DNA, 25 bp, Homo sapien
tgcgaatcaactgctctacctcttc

SEQ ID NO: 4536413 - DNA, 25 bp, Homo sapien
ctcttccaccgagctccccaaggca

SEQ ID NO: 4536414 - DNA, 25 bp, Homo sapien
tggcagggccttaggagtgcccact

SEQ ID NO: 4536415 - DNA, 25 bp, Homo sapien
catgggcactctgggtatggcaggg

SEQ ID NO: 4536416 - DNA, 25 bp, Homo sapien
cacagaaaagtcagaggccaccaag

SEQ ID NO: 4536417 - DNA, 25 bp, Homo sapien
acagaaaagtcagaggccaccaagc

SEQ ID NO: 4536418 - DNA, 25 bp, Homo sapien
gcctctcttgcttccgtgcccaggt

SEQ ID NO: 4536419 - DNA, 25 bp, Homo sapien
tcctgggccgcgaggatctcctcca

SEQ ID NO: 4536420 - DNA, 25 bp, Homo sapien
gcttccgtgcccaggtctgatacac

SEQ ID NO: 4536421 - DNA, 25 bp, Homo sapien
cggccgcactctctgaggaagagct

SEQ ID NO: 4536422 - DNA, 25 bp, Homo sapien
gtcctgcagggctcgaagctcttcc

SEQ ID NO: 4536423 - DNA, 25 bp, Homo sapien
ggtcctgcagggctcgaagctcttc

SEQ ID NO: 4536424 - DNA, 25 bp, Homo sapien
cctgcagggctcgaagctcttcctg

SEQ ID NO: 4536425 - DNA, 25 bp, Homo sapien
gcactgagcttcagcgggccactgc

SEQ ID NO: 4536426 - DNA, 25 bp, Homo sapien
tgctaggctcttgcgaactctcctc

SEQ ID NO: 4536427 - DNA, 25 bp, Homo sapien
ggctgcccaggaggcatagtcacgc

SEQ ID NO: 4536428 - DNA, 25 bp, Homo sapien
agctccgcccggagccactggtggg

SEQ ID NO: 4536429 - DNA, 25 bp, Homo sapien
ggagggagagccgggtgagggctgg

SEQ ID NO: 4536430 - DNA, 25 bp, Homo sapien
gactggcggctagcaagatcagccc

SEQ ID NO: 4536431 - DNA, 25 bp, Homo sapien
tccctggtatttgacattgcactgc

SEQ ID NO: 4536432 - DNA, 25 bp, Homo sapien
gatcagccccatcaagactgcttga

SEQ ID NO: 4536433 - DNA, 25 bp, Homo sapien
ccttggccgcatttgcctggcaaag

SEQ ID NO: 4536434 - DNA, 25 bp, Homo sapien
tgctccatgcgtcgctgcagcactg

SEQ ID NO: 4536435 - DNA, 25 bp, Homo sapien
ccacgcctgcgtcacagcttgctgc

SEQ ID NO: 4536436 - DNA, 25 bp, Homo sapien
ggccaggaggcgtgcccgctccagc

SEQ ID NO: 4536437 - DNA, 25 bp, Homo sapien
gccctgcgctgctccatgcgtcgct

SEQ ID NO: 4536438 - DNA, 25 bp, Homo sapien
accctgcctgcagtctccagcagtt

SEQ ID NO: 4536439 - DNA, 25 bp, Homo sapien
ctgcctgcagtctccagcagttcct

SEQ ID NO: 4536440 - DNA, 25 bp, Homo sapien
tgcaccctgcctgcagtctccagca

SEQ ID NO: 4536441 - DNA, 25 bp, Homo sapien
ctgcaccctgcctgcagtctccagc

SEQ ID NO: 4536442 - DNA, 25 bp, Homo sapien
ctgccgctcggtgcccacgagttct

SEQ ID NO: 4536443 - DNA, 25 bp, Homo sapien
cacacaggtcccgtgccacattgtt

SEQ ID NO: 4536444 - DNA, 25 bp, Homo sapien
cacaggtcccgtgccacattgttgg

SEQ ID NO: 4536445 - DNA, 25 bp, Homo sapien
ggtgcccacgagttctcgctccagc

SEQ ID NO: 4536446 - DNA, 25 bp, Homo sapien
gaactctgagggtggtctcggtgtc

SEQ ID NO: 4536447 - DNA, 25 bp, Homo sapien
gtctcggtgtctcggagcgcgtggc

SEQ ID NO: 4536448 - DNA, 25 bp, Homo sapien
actctgagggtggtctcggtgtctc

SEQ ID NO: 4536449 - DNA, 25 bp, Homo sapien
ctcggagcgcgtggcctcgggcctg

SEQ ID NO: 4536450 - DNA, 25 bp, Homo sapien
tgcagatcctgctgcctctgacgga

SEQ ID NO: 4536451 - DNA, 25 bp, Homo sapien
gcagatcctgctgcctctgacggac

SEQ ID NO: 4536452 - DNA, 25 bp, Homo sapien
agcagccggcaggcggccacccgct

SEQ ID NO: 4536453 - DNA, 25 bp, Homo sapien
ctgtgcccacgctctagcaggctct

SEQ ID NO: 4536454 - DNA, 25 bp, Homo sapien
actgtgcccacgctctagcaggctc

SEQ ID NO: 4536455 - DNA, 25 bp, Homo sapien
cagccggcaggcggccacccgctgg

SEQ ID NO: 4536456 - DNA, 25 bp, Homo sapien
gaaactttgcaaacttggtgcagag

SEQ ID NO: 4536457 - DNA, 25 bp, Homo sapien
ctgaaactttgcaaacttggtgcag

SEQ ID NO: 4536458 - DNA, 25 bp, Homo sapien
actttgcaaacttggtgcagaggtg

SEQ ID NO: 4536459 - DNA, 25 bp, Homo sapien
aaactttgcaaacttggtgcagagg

SEQ ID NO: 4536460 - DNA, 25 bp, Homo sapien
cctttggctgcctgcttctggcttg

SEQ ID NO: 4536461 - DNA, 25 bp, Homo sapien
ggctgcctgcttctggcttgccagc

SEQ ID NO: 4536462 - DNA, 25 bp, Homo sapien
ggaactcatgcagcctcagggtccc

SEQ ID NO: 4536463 - DNA, 25 bp, Homo sapien
agcctccctcaggaactcatgcagc

SEQ ID NO: 4536464 - DNA, 25 bp, Homo sapien
tccatggagctccagtaaatggcta

SEQ ID NO: 4536465 - DNA, 25 bp, Homo sapien
ggtttgggccgtctggtcaagctcc

SEQ ID NO: 4536466 - DNA, 25 bp, Homo sapien
gcctctcctgcaccacacgctgctg

SEQ ID NO: 4536467 - DNA, 25 bp, Homo sapien
gagctccagtaaatggctagttcct

SEQ ID NO: 4536468 - DNA, 25 bp, Homo sapien
ggtcctgtcgcagaacacactggaa

SEQ ID NO: 4536469 - DNA, 25 bp, Homo sapien
tctgggagtccgaattcaggagtga

SEQ ID NO: 4536470 - DNA, 25 bp, Homo sapien
tacaggcctttagaaagaccttctc

SEQ ID NO: 4536471 - DNA, 25 bp, Homo sapien
aggaaacatgcccagacaggaggac

SEQ ID NO: 4536472 - DNA, 25 bp, Homo sapien
atagtcccgactgctcaccagcggc

SEQ ID NO: 4536473 - DNA, 25 bp, Homo sapien
gcctgagggtggctgcctcgtctct

SEQ ID NO: 4536474 - DNA, 25 bp, Homo sapien
tctctgccatagtcccgactgctca

SEQ ID NO: 4536475 - DNA, 25 bp, Homo sapien
gactgctcaccagcggccgcttctc

SEQ ID NO: 4536476 - DNA, 25 bp, Homo sapien
agacactgggcccgcgcttcacatg

SEQ ID NO: 4536477 - DNA, 25 bp, Homo sapien
actgctccacgatgtgttgggcttg

SEQ ID NO: 4536478 - DNA, 25 bp, Homo sapien
agctcctggcactgctccacgatgt

SEQ ID NO: 4536479 - DNA, 25 bp, Homo sapien
cagaactcagcacccgttgcacctg

SEQ ID NO: 4536480 - DNA, 25 bp, Homo sapien
ccacagagtggcttgagaggctgct

SEQ ID NO: 4536481 - DNA, 25 bp, Homo sapien
ccagggtcaaaatagctggggcaga

SEQ ID NO: 4536482 - DNA, 25 bp, Homo sapien
ggtgagggcttagaggccaggacac

SEQ ID NO: 4536483 - DNA, 25 bp, Homo sapien
ggctccaggccccaatcatggcaag

SEQ ID NO: 4536484 - DNA, 25 bp, Homo sapien
tgcttgcggtgaaggctctgggcac

SEQ ID NO: 4536485 - DNA, 25 bp, Homo sapien
cccaagagagctccatgttgctcag

SEQ ID NO: 4536486 - DNA, 25 bp, Homo sapien
gcatgtgctcggctacccaagagag

SEQ ID NO: 4536487 - DNA, 25 bp, Homo sapien
tcaagcactcggtatagctggtggg

SEQ ID NO: 4536488 - DNA, 25 bp, Homo sapien
tgccctgtttccgagctctgtaggg

SEQ ID NO: 4536489 - DNA, 25 bp, Homo sapien
cctgtttccgagctctgtagggccc

SEQ ID NO: 4536490 - DNA, 25 bp, Homo sapien
agcctctggctggagcgcaggtcct

SEQ ID NO: 4536491 - DNA, 25 bp, Homo sapien
ccgagctctgtagggccccttcgag

SEQ ID NO: 4536492 - DNA, 25 bp, Homo sapien
tgctggagctcgtccccacgctcag

SEQ ID NO: 4536493 - DNA, 25 bp, Homo sapien
gctcagtcatcttgcggttcaaagc

SEQ ID NO: 4536494 - DNA, 25 bp, Homo sapien
tctcaggccttgaagcctggtctgt

SEQ ID NO: 4536495 - DNA, 25 bp, Homo sapien
gcagctgcctcaggagttgctcctg

SEQ ID NO: 4536496 - DNA, 25 bp, Homo sapien
ctgctggtaccaccagtggccgcag

SEQ ID NO: 4536497 - DNA, 25 bp, Homo sapien
gcccagggagtttggctgagctgct

SEQ ID NO: 4536498 - DNA, 25 bp, Homo sapien
taaaggcccagggagtttggctgag

SEQ ID NO: 4536499 - DNA, 25 bp, Homo sapien
agctgctggtaccaccagtggccgc

SEQ ID NO: 4536500 - DNA, 25 bp, Homo sapien
gtagctcgctctcagctgcttcgtg

SEQ ID NO: 4536501 - DNA, 25 bp, Homo sapien
cgtgccgcttgagtgtctgcaggat

SEQ ID NO: 4536502 - DNA, 25 bp, Homo sapien
tctgcgggtggcgagtagctcgctc

SEQ ID NO: 4536503 - DNA, 25 bp, Homo sapien
tctgcaggatgtttctgcgcgctcc

SEQ ID NO: 4536504 - DNA, 25 bp, Homo sapien
agctggagggaagccagcaactgcc

SEQ ID NO: 4536505 - DNA, 25 bp, Homo sapien
gaagccagcaactgcctcctcctct

SEQ ID NO: 4536506 - DNA, 25 bp, Homo sapien
gggaagccagcaactgcctcctcct

SEQ ID NO: 4536507 - DNA, 25 bp, Homo sapien
gctggagggaagccagcaactgcct

SEQ ID NO: 4536508 - DNA, 25 bp, Homo sapien
gtgcagctgggtgctggctctgaac

SEQ ID NO: 4536509 - DNA, 25 bp, Homo sapien
gtgtgcagctgggtgctggctctga

SEQ ID NO: 4536510 - DNA, 25 bp, Homo sapien
tgtgcagctgggtgctggctctgaa

SEQ ID NO: 4536511 - DNA, 25 bp, Homo sapien
gtgtgtgcagctgggtgctggctct

SEQ ID NO: 4536512 - DNA, 25 bp, Homo sapien
agcttctcgccgtgtgcccgcagag

SEQ ID NO: 4536513 - DNA, 25 bp, Homo sapien
gccgcccaaactcccggtgctgctg

SEQ ID NO: 4536514 - DNA, 25 bp, Homo sapien
cagcttctcgccgtgtgcccgcaga

SEQ ID NO: 4536515 - DNA, 25 bp, Homo sapien
agggtgctcaggagccgcccaaact

SEQ ID NO: 4536516 - DNA, 25 bp, Homo sapien
tctgggcagtccaaggctgccatgg

SEQ ID NO: 4536517 - DNA, 25 bp, Homo sapien
acttctcggccaaacttctgcagct

SEQ ID NO: 4536518 - DNA, 25 bp, Homo sapien
cctcagagtgttgggcacctcttgg

SEQ ID NO: 4536519 - DNA, 25 bp, Homo sapien
agtgttgggcacctcttgggagtct

SEQ ID NO: 4536520 - DNA, 25 bp, Homo sapien
tgcagtgtctccacctgtccttgca

SEQ ID NO: 4536521 - DNA, 25 bp, Homo sapien
gtgtctccacctgtccttgcagagg

SEQ ID NO: 4536522 - DNA, 25 bp, Homo sapien
agcccctgcagtgtctccacctgtc

SEQ ID NO: 4536523 - DNA, 25 bp, Homo sapien
tccttgctgcgcagctgagcctgga

SEQ ID NO: 4536524 - DNA, 25 bp, Homo sapien
aatgccaccactgcgctggccgtac

SEQ ID NO: 4536525 - DNA, 25 bp, Homo sapien
gcctcccaatgccaccactgcgctg

SEQ ID NO: 4536526 - DNA, 25 bp, Homo sapien
tcccaatgccaccactgcgctggcc

SEQ ID NO: 4536527 - DNA, 25 bp, Homo sapien
ccaatgccaccactgcgctggccgt

SEQ ID NO: 4536528 - DNA, 25 bp, Homo sapien
gggtccacactcctgcagaaaactg

SEQ ID NO: 4536529 - DNA, 25 bp, Homo sapien
ggtccacactcctgcagaaaactgc

SEQ ID NO: 4536530 - DNA, 25 bp, Homo sapien
tgggtccacactcctgcagaaaact

SEQ ID NO: 4536531 - DNA, 25 bp, Homo sapien
tcgttggatttgtgtggagttccca

SEQ ID NO: 4536532 - DNA, 25 bp, Homo sapien
ggatttgtgtggagttcccaggata

SEQ ID NO: 4536533 - DNA, 25 bp, Homo sapien
cctcctgctgtcgttggatttgtgt

SEQ ID NO: 4536534 - DNA, 25 bp, Homo sapien
tgtggagttcccaggatatctctgc

SEQ ID NO: 4536535 - DNA, 25 bp, Homo sapien
tgcaccctttggagcagcactgtct

SEQ ID NO: 4536536 - DNA, 25 bp, Homo sapien
catatttgagctgcatgacctccag

SEQ ID NO: 4536537 - DNA, 25 bp, Homo sapien
ccacaggaactgcagaaaccgaaca

SEQ ID NO: 4536538 - DNA, 25 bp, Homo sapien
agaaaccgaacagggccatggcctc

SEQ ID NO: 4536539 - DNA, 25 bp, Homo sapien
cgcagactctcatagtcctgactca

SEQ ID NO: 4536540 - DNA, 25 bp, Homo sapien
tgccagggcccgcagactctcatag

SEQ ID NO: 4536541 - DNA, 25 bp, Homo sapien
ctctcatagtcctgactcaagtggt

SEQ ID NO: 4536542 - DNA, 25 bp, Homo sapien
gccagggcccgcagactctcatagt

SEQ ID NO: 4536543 - DNA, 25 bp, Homo sapien
ggatcaaagtcagggtcaggctcag

SEQ ID NO: 4536544 - DNA, 25 bp, Homo sapien
ctggagtatagtgttgggatcaaag

SEQ ID NO: 4536545 - DNA, 25 bp, Homo sapien
gtggcaggaagcctcactccagggc

SEQ ID NO: 4536546 - DNA, 25 bp, Homo sapien
gggagggccatcttccaggcatccc

SEQ ID NO: 4536547 - DNA, 25 bp, Homo sapien
ctggaggcgctgagctgtagctcaa

SEQ ID NO: 4536548 - DNA, 25 bp, Homo sapien
ggaggcgctgagctgtagctcaaag

SEQ ID NO: 4536549 - DNA, 25 bp, Homo sapien
aaagggtgtgtgggacatgggtctg

SEQ ID NO: 4536550 - DNA, 25 bp, Homo sapien
aggcgctgagctgtagctcaaaggg

SEQ ID NO: 4536551 - DNA, 25 bp, Homo sapien
gcaggacgctctctccagcgaggat

SEQ ID NO: 4536552 - DNA, 25 bp, Homo sapien
aggacgcgctccagccgcacgtggc

SEQ ID NO: 4536553 - DNA, 25 bp, Homo sapien
agctcggccgcgaaggcgcgcagga

SEQ ID NO: 4536554 - DNA, 25 bp, Homo sapien
cgtgaataacgacgcccgggccgag

SEQ ID NO: 4536555 - DNA, 25 bp, Homo sapien
gcgtcccctccgcacgagatctacg

SEQ ID NO: 4536556 - DNA, 25 bp, Homo sapien
gtggcggtggacctcagcttccagg

SEQ ID NO: 4536557 - DNA, 25 bp, Homo sapien
tgcgggcgctgaggtcgcgtcccct

SEQ ID NO: 4536558 - DNA, 25 bp, Homo sapien
gatctacgcacacggcctggtggcg

SEQ ID NO: 4536559 - DNA, 25 bp, Homo sapien
tgcagggcgcctgcgatctggctga

SEQ ID NO: 4536560 - DNA, 25 bp, Homo sapien
atctggctgagatcccggcccaggg

SEQ ID NO: 4536561 - DNA, 25 bp, Homo sapien
ggcgcctgcgatctggctgagatcc

SEQ ID NO: 4536562 - DNA, 25 bp, Homo sapien
tgcgatctggctgagatcccggccc

SEQ ID NO: 4536563 - DNA, 25 bp, Homo sapien
tcctcctcacagttgcgcaggaact

SEQ ID NO: 4536564 - DNA, 25 bp, Homo sapien
ttgcgcaggaactctgcccgctgca

SEQ ID NO: 4536565 - DNA, 25 bp, Homo sapien
cacagttgcgcaggaactctgcccg

SEQ ID NO: 4536566 - DNA, 25 bp, Homo sapien
ctgtccgcactccttcagccaggct

SEQ ID NO: 4536567 - DNA, 25 bp, Homo sapien
cgtgggccgagacttgagcctccag

SEQ ID NO: 4536568 - DNA, 25 bp, Homo sapien
gagacttgagcctccagcaggtcat

SEQ ID NO: 4536569 - DNA, 25 bp, Homo sapien
gctccgtgggccgagacttgagcct

SEQ ID NO: 4536570 - DNA, 25 bp, Homo sapien
gccgagacttgagcctccagcaggt

SEQ ID NO: 4536571 - DNA, 25 bp, Homo sapien
ctgctgcccacaggcggtggacctg

SEQ ID NO: 4536572 - DNA, 25 bp, Homo sapien
tgcccacaggcggtggacctggccg

SEQ ID NO: 4536573 - DNA, 25 bp, Homo sapien
cacaggcggtggacctggccggctc

SEQ ID NO: 4536574 - DNA, 25 bp, Homo sapien
ccacaggcggtggacctggccggct

SEQ ID NO: 4536575 - DNA, 25 bp, Homo sapien
tgctgggtccctctgagcactggca

SEQ ID NO: 4536576 - DNA, 25 bp, Homo sapien
caagggcctgctggtccagtgccca

SEQ ID NO: 4536577 - DNA, 25 bp, Homo sapien
ttgctgtgtttcccaagggcctgct

SEQ ID NO: 4536578 - DNA, 25 bp, Homo sapien
tttcccaagggcctgctggtccagt

SEQ ID NO: 4536579 - DNA, 25 bp, Homo sapien
tcccaagggcctgctggtccagtgc

SEQ ID NO: 4536580 - DNA, 25 bp, Homo sapien
ggagcctctgccagcgcacggtaac

SEQ ID NO: 4536581 - DNA, 25 bp, Homo sapien
ttcctctgtccctgtagatgctgaa

SEQ ID NO: 4536582 - DNA, 25 bp, Homo sapien
tctgtccctgtagatgctgaaggag

SEQ ID NO: 4536583 - DNA, 25 bp, Homo sapien
gccagcgcacggtaacttcctcctg

SEQ ID NO: 4536584 - DNA, 25 bp, Homo sapien
tcctgccggaggatgtctgcgatct

SEQ ID NO: 4536585 - DNA, 25 bp, Homo sapien
ggcagcgagtctggaaaatcccgcg

SEQ ID NO: 4536586 - DNA, 25 bp, Homo sapien
tgcaatccagcgtagaaggtcagcc

SEQ ID NO: 4536587 - DNA, 25 bp, Homo sapien
taaggaaactctcccggagggctgc

SEQ ID NO: 4536588 - DNA, 25 bp, Homo sapien
gatagagcgctcatctggctgtgcg

SEQ ID NO: 4536589 - DNA, 25 bp, Homo sapien
cagtctgcccctgatgcaggcggga

SEQ ID NO: 4536590 - DNA, 25 bp, Homo sapien
agcaaggttgtgcagtgggcggtct

SEQ ID NO: 4536591 - DNA, 25 bp, Homo sapien
ggagccgtagtccaacaggtctggc

SEQ ID NO: 4536592 - DNA, 25 bp, Homo sapien
cacgttggtgtagctggctgtcttc

SEQ ID NO: 4536593 - DNA, 25 bp, Homo sapien
gcattgaagcccagcccatcgctcc

SEQ ID NO: 4536594 - DNA, 25 bp, Homo sapien
tccagcttcgggagaaatctgtaat

SEQ ID NO: 4536595 - DNA, 25 bp, Homo sapien
ttccgctggcaccagaccagcaggg

SEQ ID NO: 4536596 - DNA, 25 bp, Homo sapien
tctggcccgatgagtggtactggca

SEQ ID NO: 4536597 - DNA, 25 bp, Homo sapien
tctggaaacgcagaatgatgaccca

SEQ ID NO: 4536598 - DNA, 25 bp, Homo sapien
caggatgagtgtctggtctccgtcc

SEQ ID NO: 4536599 - DNA, 25 bp, Homo sapien
ggtctccgtccacgatgttctctgg

SEQ ID NO: 4536600 - DNA, 25 bp, Homo sapien
cagctctgtgtacaggttccggatc

SEQ ID NO: 4536601 - DNA, 25 bp, Homo sapien
gccagctctgtgtacaggttccgga

SEQ ID NO: 4536602 - DNA, 25 bp, Homo sapien
agccagctctgtgtacaggttccgg

SEQ ID NO: 4536603 - DNA, 25 bp, Homo sapien
gctctgtgtacaggttccggatctt

SEQ ID NO: 4536604 - DNA, 25 bp, Homo sapien
cctgtagcttgcgaatgtggcccgt

SEQ ID NO: 4536605 - DNA, 25 bp, Homo sapien
catgtgccgggcctgtagcttgcga

SEQ ID NO: 4536606 - DNA, 25 bp, Homo sapien
gaatgtggcccgtctcgtactgaga

SEQ ID NO: 4536607 - DNA, 25 bp, Homo sapien
ggcccgtctcgtactgagagtccat

SEQ ID NO: 4536608 - DNA, 25 bp, Homo sapien
ctcctgctgcggtgccctgcagccc

SEQ ID NO: 4536609 - DNA, 25 bp, Homo sapien
ggcgggacccggagttctgtgctgg

SEQ ID NO: 4536610 - DNA, 25 bp, Homo sapien
tgcagccccgaggagctcccgggga

SEQ ID NO: 4536611 - DNA, 25 bp, Homo sapien
tgggcctcctgctgcggtgccctgc

SEQ ID NO: 4536612 - DNA, 25 bp, Homo sapien
cagccctgcagactttggggatgag

SEQ ID NO: 4536613 - DNA, 25 bp, Homo sapien
atggtagatagcaggggctgcttac

SEQ ID NO: 4536614 - DNA, 25 bp, Homo sapien
tggacggatggagatggtagatagc

SEQ ID NO: 4536615 - DNA, 25 bp, Homo sapien
acagagacggctctgctggacggat

SEQ ID NO: 4536616 - DNA, 25 bp, Homo sapien
tgggtcccacagagacggctctgct

SEQ ID NO: 4536617 - DNA, 25 bp, Homo sapien
cttggtgatgcctgggttccacaga

SEQ ID NO: 4536618 - DNA, 25 bp, Homo sapien
acagaggcggcccagctggacggat

SEQ ID NO: 4536619 - DNA, 25 bp, Homo sapien
tgggttccacagaggcggcccagct

SEQ ID NO: 4536620 - DNA, 25 bp, Homo sapien
ccagctggacggatggagatggcag

SEQ ID NO: 4536621 - DNA, 25 bp, Homo sapien
cgtgctggggtgacggcacacaggc

SEQ ID NO: 4536622 - DNA, 25 bp, Homo sapien
tgacggcacacaggcggcattgtcc

SEQ ID NO: 4536623 - DNA, 25 bp, Homo sapien
tgcaccacagccctccccttgagcc

SEQ ID NO: 4536624 - DNA, 25 bp, Homo sapien
ctccccttgagccagcgtgctgggg

SEQ ID NO: 4536625 - DNA, 25 bp, Homo sapien
ggttcaggaatgctccagggccatt

SEQ ID NO: 4536626 - DNA, 25 bp, Homo sapien
gccattgccagatgatgtcctcctt

SEQ ID NO: 4536627 - DNA, 25 bp, Homo sapien
ccattgccagatgatgtcctccttc

SEQ ID NO: 4536628 - DNA, 25 bp, Homo sapien
gagggggtggttcaggaatgctcca

SEQ ID NO: 4536629 - DNA, 25 bp, Homo sapien
cctagcacgactggagaaaggactc

SEQ ID NO: 4536630 - DNA, 25 bp, Homo sapien
taggcttgaacagggccacatgtcc

SEQ ID NO: 4536631 - DNA, 25 bp, Homo sapien
gaaaggactcctgtgaagcggtcac

SEQ ID NO: 4536632 - DNA, 25 bp, Homo sapien
cactggcaaggtacagcaagaggca

SEQ ID NO: 4536633 - DNA, 25 bp, Homo sapien
ctgaagcggctgcattttgggtttc

SEQ ID NO: 4536634 - DNA, 25 bp, Homo sapien
ttccttctgaagcggctgcattttg

SEQ ID NO: 4536635 - DNA, 25 bp, Homo sapien
tgatggggccgctttccttctgaag

SEQ ID NO: 4536636 - DNA, 25 bp, Homo sapien
cttctgaagcggctgcattttgggt

SEQ ID NO: 4536637 - DNA, 25 bp, Homo sapien
gcttgcctgctacatcccatggaga

SEQ ID NO: 4536638 - DNA, 25 bp, Homo sapien
gtattaggcccgcatttacctgagt

SEQ ID NO: 4536639 - DNA, 25 bp, Homo sapien
gggcagctccatgtttattgatcag

SEQ ID NO: 4536640 - DNA, 25 bp, Homo sapien
ttcaaggcaattgtctcaggcatcc

SEQ ID NO: 4536641 - DNA, 25 bp, Homo sapien
tgagggccacactaaacgatcactg

SEQ ID NO: 4536642 - DNA, 25 bp, Homo sapien
gaagtacaggtatgtgcccgaatcc

SEQ ID NO: 4536643 - DNA, 25 bp, Homo sapien
gaaaaatcagtttgcctgggcatct

SEQ ID NO: 4536644 - DNA, 25 bp, Homo sapien
tggtcctcacgcattcacagaactg

SEQ ID NO: 4536645 - DNA, 25 bp, Homo sapien
gctccagagttgttcatgaggacaa

SEQ ID NO: 4536646 - DNA, 25 bp, Homo sapien
gataatctttgctgcctccaggtgc

SEQ ID NO: 4536647 - DNA, 25 bp, Homo sapien
tgccctctgagggacagacagctgc

SEQ ID NO: 4536648 - DNA, 25 bp, Homo sapien
cccaaggtcattcggtgagtcagtg

SEQ ID NO: 4536649 - DNA, 25 bp, Homo sapien
tagaagagctcgtcgtagacgggct

SEQ ID NO: 4536650 - DNA, 25 bp, Homo sapien
tagacgggcttgtctttggccacga

SEQ ID NO: 4536651 - DNA, 25 bp, Homo sapien
tccttcttggcgttgacacctgata

SEQ ID NO: 4536652 - DNA, 25 bp, Homo sapien
cagcgagtggaatttggtgaagtca

SEQ ID NO: 4536653 - DNA, 25 bp, Homo sapien
gtggattccgactgcagagctctgg

SEQ ID NO: 4536654 - DNA, 25 bp, Homo sapien
tgcaggggccgtggattccgactgc

SEQ ID NO: 4536655 - DNA, 25 bp, Homo sapien
tggacaggaggcagcagttattcct

SEQ ID NO: 4536656 - DNA, 25 bp, Homo sapien
ggcagggggagtggccgcatatttg

SEQ ID NO: 4536657 - DNA, 25 bp, Homo sapien
tctatgctggcttcaatgctgtcac

SEQ ID NO: 4536658 - DNA, 25 bp, Homo sapien
tctgaatccaggtgtaaagagctgt

SEQ ID NO: 4536659 - DNA, 25 bp, Homo sapien
ccaggtctgtagtcccacaaggcag

SEQ ID NO: 4536660 - DNA, 25 bp, Homo sapien
caaaagatggtaactggtggtctct

SEQ ID NO: 4536661 - DNA, 25 bp, Homo sapien
cctgctgataagctctctcttcttg

SEQ ID NO: 4536662 - DNA, 25 bp, Homo sapien
cagaaatctggtattctcgctgtag

SEQ ID NO: 4536663 - DNA, 25 bp, Homo sapien
gaatgtagatttccggtagcctgct

SEQ ID NO: 4536664 - DNA, 25 bp, Homo sapien
ctcgctgtagctgaatgtagatttc

SEQ ID NO: 4536665 - DNA, 25 bp, Homo sapien
ttgctgaagttaccctccaagccca

SEQ ID NO: 4536666 - DNA, 25 bp, Homo sapien
tccaagcccagagtagatgtggcca

SEQ ID NO: 4536667 - DNA, 25 bp, Homo sapien
tattagcctagagaaaaactgtcat

SEQ ID NO: 4536668 - DNA, 25 bp, Homo sapien
gatgtggccagtatcactctttagt

SEQ ID NO: 4536669 - DNA, 25 bp, Homo sapien
tcttgggcaatacgcttctaaaggg

SEQ ID NO: 4536670 - DNA, 25 bp, Homo sapien
gagtgtgagccgtcttccaagaagg

SEQ ID NO: 4536671 - DNA, 25 bp, Homo sapien
agatctccaaatgggtgacagcctt

SEQ ID NO: 4536672 - DNA, 25 bp, Homo sapien
tcatgaaatgaaccctgattggcat

SEQ ID NO: 4536673 - DNA, 25 bp, Homo sapien
tcacacaccttgaaggttgttcagt

SEQ ID NO: 4536674 - DNA, 25 bp, Homo sapien
caccttgaaggttgttcagttgtac

SEQ ID NO: 4536675 - DNA, 25 bp, Homo sapien
cacaccttgaaggttgttcagttgt

SEQ ID NO: 4536676 - DNA, 25 bp, Homo sapien
cacacaccttgaaggttgttcagtt

SEQ ID NO: 4536677 - DNA, 25 bp, Homo sapien
tctgtattttctcttggaggaggga

SEQ ID NO: 4536678 - DNA, 25 bp, Homo sapien
gtcacttgagggatgtcagcaggtc

SEQ ID NO: 4536679 - DNA, 25 bp, Homo sapien
tggagacatgaattgactctgtcac

SEQ ID NO: 4536680 - DNA, 25 bp, Homo sapien
gggctgctgaaaggctcagctatga

SEQ ID NO: 4536681 - DNA, 25 bp, Homo sapien
tggcctctgtgcaaggcatctcctg

SEQ ID NO: 4536682 - DNA, 25 bp, Homo sapien
ctgtgcaaggcatctcctggcttac

SEQ ID NO: 4536683 - DNA, 25 bp, Homo sapien
gcctctgtgcaaggcatctcctggc

SEQ ID NO: 4536684 - DNA, 25 bp, Homo sapien
ctctgtgcaaggcatctcctggctt

SEQ ID NO: 4536685 - DNA, 25 bp, Homo sapien
ccagcctcgctcgcttgatgaggtc

SEQ ID NO: 4536686 - DNA, 25 bp, Homo sapien
agcctcgctcgcttgatgaggtcgt

SEQ ID NO: 4536687 - DNA, 25 bp, Homo sapien
cagcctcgctcgcttgatgaggtcg

SEQ ID NO: 4536688 - DNA, 25 bp, Homo sapien
gatgtctctaaagaggtcctgggcc

SEQ ID NO: 4536689 - DNA, 25 bp, Homo sapien
cacttggtcggccttgttcagcacg

SEQ ID NO: 4536690 - DNA, 25 bp, Homo sapien
tacctcgggcgtgttgatgaccttg

SEQ ID NO: 4536691 - DNA, 25 bp, Homo sapien
cagctgctgcgtgtccacttggtcg

SEQ ID NO: 4536692 - DNA, 25 bp, Homo sapien
tgatcctgtccaccctctcggcaaa

SEQ ID NO: 4536693 - DNA, 25 bp, Homo sapien
cggcaaaccactgcaggacctggca

SEQ ID NO: 4536694 - DNA, 25 bp, Homo sapien
accctctcggcaaaccactgcagga

SEQ ID NO: 4536695 - DNA, 25 bp, Homo sapien
tctcggcaaaccactgcaggacctg

SEQ ID NO: 4536696 - DNA, 25 bp, Homo sapien
gacatgaaaatcacgggctggatga

SEQ ID NO: 4536697 - DNA, 25 bp, Homo sapien
gaggcctggtgacatgaaaatcacg

SEQ ID NO: 4536698 - DNA, 25 bp, Homo sapien
gatgaatccgggtgggaaggacctg

SEQ ID NO: 4536699 - DNA, 25 bp, Homo sapien
aaatcacgggctggatgaatccggg

SEQ ID NO: 4536700 - DNA, 25 bp, Homo sapien
acctagcctaaagtgggtgtggcca

SEQ ID NO: 4536701 - DNA, 25 bp, Homo sapien
agaggaaggttccacgccagtactc

SEQ ID NO: 4536702 - DNA, 25 bp, Homo sapien
caagaactaggcgtgtccagggatg

SEQ ID NO: 4536703 - DNA, 25 bp, Homo sapien
ggtgtggccacagaacctaccaaaa

SEQ ID NO: 4536704 - DNA, 25 bp, Homo sapien
cgcccctgctttggatctctggaag

SEQ ID NO: 4536705 - DNA, 25 bp, Homo sapien
tttggatctctggaagagcaaggcc

SEQ ID NO: 4536706 - DNA, 25 bp, Homo sapien
tgtctgagtcccaggactcggccat

SEQ ID NO: 4536707 - DNA, 25 bp, Homo sapien
ctggaagagcaaggcccttgtctga

SEQ ID NO: 4536708 - DNA, 25 bp, Homo sapien
ggagataggactacgagaacacacc

SEQ ID NO: 4536709 - DNA, 25 bp, Homo sapien
aggagataggactacgagaacacac

SEQ ID NO: 4536710 - DNA, 25 bp, Homo sapien
caaggagataggactacgagaacac

SEQ ID NO: 4536711 - DNA, 25 bp, Homo sapien
ccaaggagataggactacgagaaca

SEQ ID NO: 4536712 - DNA, 25 bp, Homo sapien
atttgcagccgtgtggactccagag

SEQ ID NO: 4536713 - DNA, 25 bp, Homo sapien
gctagtcttccgagcatcatttgca

SEQ ID NO: 4536714 - DNA, 25 bp, Homo sapien
cgtgctagtcttccgagcatcattt

SEQ ID NO: 4536715 - DNA, 25 bp, Homo sapien
gcatcatttgcagccgtgtggactc

SEQ ID NO: 4536716 - DNA, 25 bp, Homo sapien
aaacagtatttcagcggccagcatg

SEQ ID NO: 4536717 - DNA, 25 bp, Homo sapien
tcatcgcagagtcaaacacctggct

SEQ ID NO: 4536718 - DNA, 25 bp, Homo sapien
tcaagtctattgaaggctacgcaaa

SEQ ID NO: 4536719 - DNA, 25 bp, Homo sapien
ctatgcgtgtggataaaggtgctct

SEQ ID NO: 4536720 - DNA, 25 bp, Homo sapien
gggcagtacacaagcggccaccttt

SEQ ID NO: 4536721 - DNA, 25 bp, Homo sapien
gacattaattcttggcaaaggtggg

SEQ ID NO: 4536722 - DNA, 25 bp, Homo sapien
aagacccgccaataaagtcagtggg

SEQ ID NO: 4536723 - DNA, 25 bp, Homo sapien
ggttaatcatcaaccgcacaaaggg

SEQ ID NO: 4536724 - DNA, 25 bp, Homo sapien
tgggagccaaaatccggaggcctta

SEQ ID NO: 4536725 - DNA, 25 bp, Homo sapien
gtgaaacacgggcagctcagaatag

SEQ ID NO: 4536726 - DNA, 25 bp, Homo sapien
aaaacaaatgcatatggtgggagcc

SEQ ID NO: 4536727 - DNA, 25 bp, Homo sapien
ttactaagcaaaggagagacgctgc

SEQ ID NO: 4536728 - DNA, 25 bp, Homo sapien
ttttgactacaaagcacaggcctag

SEQ ID NO: 4536729 - DNA, 25 bp, Homo sapien
gccttgtcataacctgcgaccgtga

SEQ ID NO: 4536730 - DNA, 25 bp, Homo sapien
ggcaagtccctgactgaaacagtga

SEQ ID NO: 4536731 - DNA, 25 bp, Homo sapien
agatagcaggcccaccggttttttg

SEQ ID NO: 4536732 - DNA, 25 bp, Homo sapien
ggaggacggatagaataatataggg

SEQ ID NO: 4536733 - DNA, 25 bp, Homo sapien
tggaggacggatagaataatatagg

SEQ ID NO: 4536734 - DNA, 25 bp, Homo sapien
ctggaggacggatagaataatatag

SEQ ID NO: 4536735 - DNA, 25 bp, Homo sapien
ctgtcgatgacgctgatgctcttca

SEQ ID NO: 4536736 - DNA, 25 bp, Homo sapien
ggatgccggggctgtcgatgacgct

SEQ ID NO: 4536737 - DNA, 25 bp, Homo sapien
tgatgctcttcaggacctgattggg

SEQ ID NO: 4536738 - DNA, 25 bp, Homo sapien
tccccagaaaggatgccggggctgt

SEQ ID NO: 4536739 - DNA, 25 bp, Homo sapien
ctgagctttctaaacggctttttgg

SEQ ID NO: 4536740 - DNA, 25 bp, Homo sapien
tttggggtccacgactaaagcattc

SEQ ID NO: 4536741 - DNA, 25 bp, Homo sapien
taaagcattccctggggtgctgccc

SEQ ID NO: 4536742 - DNA, 25 bp, Homo sapien
tctccatacatcacggcgatgaagg

SEQ ID NO: 4536743 - DNA, 25 bp, Homo sapien
tcctttagttaaatcattgacatgt

SEQ ID NO: 4536744 - DNA, 25 bp, Homo sapien
cctactaagggaatggacattaggt

SEQ ID NO: 4536745 - DNA, 25 bp, Homo sapien
ggacattaggtcattgaaccaataa

SEQ ID NO: 4536746 - DNA, 25 bp, Homo sapien
tgttatcaccaggactgtttgttca

SEQ ID NO: 4536747 - DNA, 25 bp, Homo sapien
catgagtgggccgatcacttcctga

SEQ ID NO: 4536748 - DNA, 25 bp, Homo sapien
tctttcatccatgtgtccggccaga

SEQ ID NO: 4536749 - DNA, 25 bp, Homo sapien
gttaatattgcagcaagagcccatg

SEQ ID NO: 4536750 - DNA, 25 bp, Homo sapien
gagatttcctgaacctcgcctgtgg

SEQ ID NO: 4536751 - DNA, 25 bp, Homo sapien
tgtttcaactgatacacggcttaag

SEQ ID NO: 4536752 - DNA, 25 bp, Homo sapien
ccaaaaacagtgagcctaaatatgc

SEQ ID NO: 4536753 - DNA, 25 bp, Homo sapien
gaggtcgctacttaacagaaatggc

SEQ ID NO: 4536754 - DNA, 25 bp, Homo sapien
tcattcgcagtgtatctggaggcct

SEQ ID NO: 4536755 - DNA, 25 bp, Homo sapien
ttgccggtgctgtactggcccacca

SEQ ID NO: 4536756 - DNA, 25 bp, Homo sapien
accttgcgcaggtagagcgagcgca

SEQ ID NO: 4536757 - DNA, 25 bp, Homo sapien
tccagcggcagcaccttgcgcaggt

SEQ ID NO: 4536758 - DNA, 25 bp, Homo sapien
ctcgtggaagcggtacgcctcctcc

SEQ ID NO: 4536759 - DNA, 25 bp, Homo sapien
gcgccgccagcgcgttcgcgcccgc

SEQ ID NO: 4536760 - DNA, 25 bp, Homo sapien
gccgccagcgcgttcgcgcccgccc

SEQ ID NO: 4536761 - DNA, 25 bp, Homo sapien
cgcgccgccagcgcgttcgcgcccg

SEQ ID NO: 4536762 - DNA, 25 bp, Homo sapien
acgctcggatgggaccctgctccgg

SEQ ID NO: 4536763 - DNA, 25 bp, Homo sapien
ggctcgcactgagccgccccggccg

SEQ ID NO: 4536764 - DNA, 25 bp, Homo sapien
tgccgccagtccacgctcggatggg

SEQ ID NO: 4536765 - DNA, 25 bp, Homo sapien
cctgctccgggttcgactctccccg

SEQ ID NO: 4536766 - DNA, 25 bp, Homo sapien
catacgttccaagctcatgggaggg

SEQ ID NO: 4536767 - DNA, 25 bp, Homo sapien
gaaataagtaatcccatgaggcagc

SEQ ID NO: 4536768 - DNA, 25 bp, Homo sapien
ttttccagtgaaacgccgagtgcct

SEQ ID NO: 4536769 - DNA, 25 bp, Homo sapien
agctggctgcgtagtaacctggtca

SEQ ID NO: 4536770 - DNA, 25 bp, Homo sapien
ttcttctccactgcgagccgcagag

SEQ ID NO: 4536771 - DNA, 25 bp, Homo sapien
gacactggcccttcaggcgcttctt

SEQ ID NO: 4536772 - DNA, 25 bp, Homo sapien
tcaaaggtggcctctgtgtatgtca

SEQ ID NO: 4536773 - DNA, 25 bp, Homo sapien
gcatagggagttttgggaccataaa

SEQ ID NO: 4536774 - DNA, 25 bp, Homo sapien
gggttctccatcaggtagcattcct

SEQ ID NO: 4536775 - DNA, 25 bp, Homo sapien
gtcattgatgagtgggaagaaagtc

SEQ ID NO: 4536776 - DNA, 25 bp, Homo sapien
gccttgtattttcggaaagtgtcat

SEQ ID NO: 4536777 - DNA, 25 bp, Homo sapien
cagtactcacaggtttgtttcaggg

SEQ ID NO: 4536778 - DNA, 25 bp, Homo sapien
aaagccctttcgttggtgttcgcat

SEQ ID NO: 4536779 - DNA, 25 bp, Homo sapien
aagctgcttccccaagtaaaatgga

SEQ ID NO: 4536780 - DNA, 25 bp, Homo sapien
gctgcttccccaagtaaaatggaca

SEQ ID NO: 4536781 - DNA, 25 bp, Homo sapien
tccaaacacagacttgggtggatgt

SEQ ID NO: 4536782 - DNA, 25 bp, Homo sapien
aggcccctgtgggatgtgcatgggc

SEQ ID NO: 4536783 - DNA, 25 bp, Homo sapien
ctatacacagccagagctgcccagg

SEQ ID NO: 4536784 - DNA, 25 bp, Homo sapien
ccaggcccctgtgggatgtgcatgg

SEQ ID NO: 4536785 - DNA, 25 bp, Homo sapien
cccctgtgggatgtgcatgggcttt

SEQ ID NO: 4536786 - DNA, 25 bp, Homo sapien
agcacttgagtgtaattcatggagg

SEQ ID NO: 4536787 - DNA, 25 bp, Homo sapien
gagcacttgagtgtaattcatggag

SEQ ID NO: 4536788 - DNA, 25 bp, Homo sapien
tgagagcacttgagtgtaattcatg

SEQ ID NO: 4536789 - DNA, 25 bp, Homo sapien
gagagcacttgagtgtaattcatgg

SEQ ID NO: 4536790 - DNA, 25 bp, Homo sapien
gagttgacaaagaacgcagtgtcca

SEQ ID NO: 4536791 - DNA, 25 bp, Homo sapien
ctgggacccagcacagtagttgagg

SEQ ID NO: 4536792 - DNA, 25 bp, Homo sapien
cgggtagctggagttgacaaagaac

SEQ ID NO: 4536793 - DNA, 25 bp, Homo sapien
tggatgatgaggtcggcttttcgct

SEQ ID NO: 4536794 - DNA, 25 bp, Homo sapien
cttcccgttaccaacacacctggtg

SEQ ID NO: 4536795 - DNA, 25 bp, Homo sapien
tgaaagccaagccttcccgttacca

SEQ ID NO: 4536796 - DNA, 25 bp, Homo sapien
gttaccaacacacctggtgccctga

SEQ ID NO: 4536797 - DNA, 25 bp, Homo sapien
ccgttaccaacacacctggtgccct

SEQ ID NO: 4536798 - DNA, 25 bp, Homo sapien
cacttgggggttcctgagctgggcc

SEQ ID NO: 4536799 - DNA, 25 bp, Homo sapien
cttgggggttcctgagctgggccat

SEQ ID NO: 4536800 - DNA, 25 bp, Homo sapien
acttgggggttcctgagctgggcca

SEQ ID NO: 4536801 - DNA, 25 bp, Homo sapien
tgcagtgagttaagtacccacacca

SEQ ID NO: 4536802 - DNA, 25 bp, Homo sapien
tctacctgctaggactgttgtacag

SEQ ID NO: 4536803 - DNA, 25 bp, Homo sapien
gcccagtgaacatagccagagaagt

SEQ ID NO: 4536804 - DNA, 25 bp, Homo sapien
ttcaagacgacaccaccaaatgtgg

SEQ ID NO: 4536805 - DNA, 25 bp, Homo sapien
ctcctccatatggaggcaggcctca

SEQ ID NO: 4536806 - DNA, 25 bp, Homo sapien
caggcctcaaggagtagccaggtag

SEQ ID NO: 4536807 - DNA, 25 bp, Homo sapien
aggcaggcctcaaggagtagccagg

SEQ ID NO: 4536808 - DNA, 25 bp, Homo sapien
tcaaggagtagccaggtagggttac

SEQ ID NO: 4536809 - DNA, 25 bp, Homo sapien
taccgtggtctccaggatgttagca

SEQ ID NO: 4536810 - DNA, 25 bp, Homo sapien
gaattggacagccatgaccctggga

SEQ ID NO: 4536811 - DNA, 25 bp, Homo sapien
atttcaggcaggatcggctcgtctt

SEQ ID NO: 4536812 - DNA, 25 bp, Homo sapien
tcagacacgaaggaccgatgggtaa

SEQ ID NO: 4536813 - DNA, 25 bp, Homo sapien
aggtgtgtgacaggttccaggcatc

SEQ ID NO: 4536814 - DNA, 25 bp, Homo sapien
tgtggaaaaactcctccgaggtgtg

SEQ ID NO: 4536815 - DNA, 25 bp, Homo sapien
ggtgtgtgacaggttccaggcatcc

SEQ ID NO: 4536816 - DNA, 25 bp, Homo sapien
tccacctgtggaaaaactcctccga

SEQ ID NO: 4536817 - DNA, 25 bp, Homo sapien
ctagcatgtagcagattcgagactc

SEQ ID NO: 4536818 - DNA, 25 bp, Homo sapien
tagcagattcgagactccgggatcc

SEQ ID NO: 4536819 - DNA, 25 bp, Homo sapien
ggatgaaggccccatacttctgcag

SEQ ID NO: 4536820 - DNA, 25 bp, Homo sapien
tgaaggccccatacttctgcaggcc

SEQ ID NO: 4536821 - DNA, 25 bp, Homo sapien
gcagcacgctgatctgacagtttgc

SEQ ID NO: 4536822 - DNA, 25 bp, Homo sapien
tcctggttgcttacatcatccttga

SEQ ID NO: 4536823 - DNA, 25 bp, Homo sapien
catcatccttgacattgatggtgag

SEQ ID NO: 4536824 - DNA, 25 bp, Homo sapien
gggttctggccgcagctcaaagcag

SEQ ID NO: 4536825 - DNA, 25 bp, Homo sapien
tgctgtatcggccccagctgacacc

SEQ ID NO: 4536826 - DNA, 25 bp, Homo sapien
ctgtatcggccccagctgacaccag

SEQ ID NO: 4536827 - DNA, 25 bp, Homo sapien
gctgctgtatcggccccagctgaca

SEQ ID NO: 4536828 - DNA, 25 bp, Homo sapien
cgggctgctgtatcggccccagctg

SEQ ID NO: 4536829 - DNA, 25 bp, Homo sapien
ctgaaagggcaccaatggcataggc

SEQ ID NO: 4536830 - DNA, 25 bp, Homo sapien
atggcataggcaccaccccctcggg

SEQ ID NO: 4536831 - DNA, 25 bp, Homo sapien
gggcaccaatggcataggcaccacc

SEQ ID NO: 4536832 - DNA, 25 bp, Homo sapien
aatggcataggcaccaccccctcgg

SEQ ID NO: 4536833 - DNA, 25 bp, Homo sapien
gcccaccaccagacaggggccggga

SEQ ID NO: 4536834 - DNA, 25 bp, Homo sapien
ctgcccaccaccagacaggggccgg

SEQ ID NO: 4536835 - DNA, 25 bp, Homo sapien
tgcccaccaccagacaggggccggg

SEQ ID NO: 4536836 - DNA, 25 bp, Homo sapien
ctggatccgcagtttaggacagtct

SEQ ID NO: 4536837 - DNA, 25 bp, Homo sapien
agtttaggacagtctctcagagtcc

SEQ ID NO: 4536838 - DNA, 25 bp, Homo sapien
agtctctcagagtcccagggtcttg

SEQ ID NO: 4536839 - DNA, 25 bp, Homo sapien
ggatccgcagtttaggacagtctct

SEQ ID NO: 4536840 - DNA, 25 bp, Homo sapien
aatttgcggagctggtctgggaaca

SEQ ID NO: 4536841 - DNA, 25 bp, Homo sapien
tcagggtcacggtacaaggtagcca

SEQ ID NO: 4536842 - DNA, 25 bp, Homo sapien
tccaagtttttggaggaccagtcag

SEQ ID NO: 4536843 - DNA, 25 bp, Homo sapien
ttgtcctttaccacatgtctccgag

SEQ ID NO: 4536844 - DNA, 25 bp, Homo sapien
ggggtcatgttcctgggtccatacc

SEQ ID NO: 4536845 - DNA, 25 bp, Homo sapien
tcatgttcctgggtccataccacag

SEQ ID NO: 4536846 - DNA, 25 bp, Homo sapien
cacagccccagggaaacagtaacac

SEQ ID NO: 4536847 - DNA, 25 bp, Homo sapien
agggccctgcccgttgcatgtcccc

SEQ ID NO: 4536848 - DNA, 25 bp, Homo sapien
caggtggcccctgatagaccggtga

SEQ ID NO: 4536849 - DNA, 25 bp, Homo sapien
gaggtcatggatcttgttccacccc

SEQ ID NO: 4536850 - DNA, 25 bp, Homo sapien
ctgatagaccggtgatgtagctggc

SEQ ID NO: 4536851 - DNA, 25 bp, Homo sapien
ccggtgatgtagctggcacagtcca

SEQ ID NO: 4536852 - DNA, 25 bp, Homo sapien
cagccgcacgtccagtgtctcaggg

SEQ ID NO: 4536853 - DNA, 25 bp, Homo sapien
ggctgaagcccagccgcacgtccag

SEQ ID NO: 4536854 - DNA, 25 bp, Homo sapien
tggccaccacgaccttccgcttctg

SEQ ID NO: 4536855 - DNA, 25 bp, Homo sapien
ttggccaccacgaccttccgcttct

SEQ ID NO: 4536856 - DNA, 25 bp, Homo sapien
gaggaccctgtattgggcctgcagc

SEQ ID NO: 4536857 - DNA, 25 bp, Homo sapien
ggtccattggacctaggctcaaagc

SEQ ID NO: 4536858 - DNA, 25 bp, Homo sapien
cttctgccagcgaccacttctgtga

SEQ ID NO: 4536859 - DNA, 25 bp, Homo sapien
aaagccttagctggcacaatgcgag

SEQ ID NO: 4536860 - DNA, 25 bp, Homo sapien
caagaccctgcctgatctttccaag

SEQ ID NO: 4536861 - DNA, 25 bp, Homo sapien
tgagccttggctcactgacaaagcc

SEQ ID NO: 4536862 - DNA, 25 bp, Homo sapien
gaagcagtcctgtttccgggtcttg

SEQ ID NO: 4536863 - DNA, 25 bp, Homo sapien
tccagatgaatgtaccttgaccatt

SEQ ID NO: 4536864 - DNA, 25 bp, Homo sapien
agacttcatgtgtaattcataactc

SEQ ID NO: 4536865 - DNA, 25 bp, Homo sapien
tgtagacttcatgtgtaattcataa

SEQ ID NO: 4536866 - DNA, 25 bp, Homo sapien
tcatgtgtaattcataactctcacc

SEQ ID NO: 4536867 - DNA, 25 bp, Homo sapien
cttcatgtgtaattcataactctca

SEQ ID NO: 4536868 - DNA, 25 bp, Homo sapien
ctgaccatcggaaaggcagtcgagg

SEQ ID NO: 4536869 - DNA, 25 bp, Homo sapien
tggggcccttcttgcgagagcggca

SEQ ID NO: 4536870 - DNA, 25 bp, Homo sapien
gcagtcgaggggctggctgatgggg

SEQ ID NO: 4536871 - DNA, 25 bp, Homo sapien
ggcccttcttgcgagagcggcagca

SEQ ID NO: 4536872 - DNA, 25 bp, Homo sapien
gactcttgggcacttccacgtgcac

SEQ ID NO: 4536873 - DNA, 25 bp, Homo sapien
agctccagtgactcttgggcacttc

SEQ ID NO: 4536874 - DNA, 25 bp, Homo sapien
cagtgactcttgggcacttccacgt

SEQ ID NO: 4536875 - DNA, 25 bp, Homo sapien
gctccagtgactcttgggcacttcc

SEQ ID NO: 4536876 - DNA, 25 bp, Homo sapien
tctcaaaggattcgttcaccatcac

SEQ ID NO: 4536877 - DNA, 25 bp, Homo sapien
caggcagcggtttggaagcaggcag

SEQ ID NO: 4536878 - DNA, 25 bp, Homo sapien
ggccggacacgctgggtgttctcaa

SEQ ID NO: 4536879 - DNA, 25 bp, Homo sapien
gggttccaagcagggccggacacgc

SEQ ID NO: 4536880 - DNA, 25 bp, Homo sapien
tcctggattgtgcatgaacctccag

SEQ ID NO: 4536881 - DNA, 25 bp, Homo sapien
gattgtgcatgaacctccaggcagg

SEQ ID NO: 4536882 - DNA, 25 bp, Homo sapien
ccgcctcctggattgtgcatgaacc

SEQ ID NO: 4536883 - DNA, 25 bp, Homo sapien
tggattgtgcatgaacctccaggca

SEQ ID NO: 4536884 - DNA, 25 bp, Homo sapien
tcaaagtgagggcttccgacaaaat

SEQ ID NO: 4536885 - DNA, 25 bp, Homo sapien
tcagctgcaggtcgggaatctgacc

SEQ ID NO: 4536886 - DNA, 25 bp, Homo sapien
gataggatacttgaccacgaagctg

SEQ ID NO: 4536887 - DNA, 25 bp, Homo sapien
tgaacccaatcaaggcatgccatct

SEQ ID NO: 4536888 - DNA, 25 bp, Homo sapien
ggaagggtcacttttgggatatgaa

SEQ ID NO: 4536889 - DNA, 25 bp, Homo sapien
ggaggctgcacttagtgggttgttt

SEQ ID NO: 4536890 - DNA, 25 bp, Homo sapien
atatgaagtgctcggccagggtgat

SEQ ID NO: 4536891 - DNA, 25 bp, Homo sapien
ggtacaggaccaagactgagtctga

SEQ ID NO: 4536892 - DNA, 25 bp, Homo sapien
ggctggcctcgtttagtctaactcc

SEQ ID NO: 4536893 - DNA, 25 bp, Homo sapien
tggctggcctcgtttagtctaactc

SEQ ID NO: 4536894 - DNA, 25 bp, Homo sapien
catttggctggcctcgtttagtcta

SEQ ID NO: 4536895 - DNA, 25 bp, Homo sapien
tttggctggcctcgtttagtctaac

SEQ ID NO: 4536896 - DNA, 25 bp, Homo sapien
tacaggaacccaggaagataattac

SEQ ID NO: 4536897 - DNA, 25 bp, Homo sapien
accagcacgccattggtgacgaggg

SEQ ID NO: 4536898 - DNA, 25 bp, Homo sapien
ccagcacgccattggtgacgagggt

SEQ ID NO: 4536899 - DNA, 25 bp, Homo sapien
caccagcacgccattggtgacgagg

SEQ ID NO: 4536900 - DNA, 25 bp, Homo sapien
ggaactccacctccagctcttccat

SEQ ID NO: 4536901 - DNA, 25 bp, Homo sapien
aactccacctccagctcttccatgc

SEQ ID NO: 4536902 - DNA, 25 bp, Homo sapien
cagcaggaactccacctccagctct

SEQ ID NO: 4536903 - DNA, 25 bp, Homo sapien
tctcctccagcaggaactccacctc

SEQ ID NO: 4536904 - DNA, 25 bp, Homo sapien
tcacagacactcaactctagcacgt

SEQ ID NO: 4536905 - DNA, 25 bp, Homo sapien
cacagacactcaactctagcacgtt

SEQ ID NO: 4536906 - DNA, 25 bp, Homo sapien
catcacagacactcaactctagcac

SEQ ID NO: 4536907 - DNA, 25 bp, Homo sapien
cgggttgagtggaaacttcacgtgg

SEQ ID NO: 4536908 - DNA, 25 bp, Homo sapien
gccagaggctcacaaaacagtctgt

SEQ ID NO: 4536909 - DNA, 25 bp, Homo sapien
cagcttcttctgagaggcggtgggc

SEQ ID NO: 4536910 - DNA, 25 bp, Homo sapien
agttgaagctttcattccactctgg

SEQ ID NO: 4536911 - DNA, 25 bp, Homo sapien
ggctcacaaaacagtctgtctggct

SEQ ID NO: 4536912 - DNA, 25 bp, Homo sapien
tgtcagagagtcctctcgatggtaa

SEQ ID NO: 4536913 - DNA, 25 bp, Homo sapien
tcagagagtcctctcgatggtaaag

SEQ ID NO: 4536914 - DNA, 25 bp, Homo sapien
tacataggaaatggtgaaagccagc

SEQ ID NO: 4536915 - DNA, 25 bp, Homo sapien
acacaccagatacataggaaatggt

SEQ ID NO: 4536916 - DNA, 25 bp, Homo sapien
ccttcaggtctgtctccggtacgct

SEQ ID NO: 4536917 - DNA, 25 bp, Homo sapien
tcaggtctgtctccggtacgctggg

SEQ ID NO: 4536918 - DNA, 25 bp, Homo sapien
cagccctcttgaacccttcccttgg

SEQ ID NO: 4536919 - DNA, 25 bp, Homo sapien
acacccttcaggtctgtctccggta

SEQ ID NO: 4536920 - DNA, 25 bp, Homo sapien
gggcctggatatacagctttttccc

SEQ ID NO: 4536921 - DNA, 25 bp, Homo sapien
ctgtggggcctggatatacagcttt

SEQ ID NO: 4536922 - DNA, 25 bp, Homo sapien
tgtggggcctggatatacagctttt

SEQ ID NO: 4536923 - DNA, 25 bp, Homo sapien
tggggcctggatatacagctttttc

SEQ ID NO: 4536924 - DNA, 25 bp, Homo sapien
gcatatcagcctgccggacattttt

SEQ ID NO: 4536925 - DNA, 25 bp, Homo sapien
ggatgaccctcactgtcaacaggtg

SEQ ID NO: 4536926 - DNA, 25 bp, Homo sapien
ggacatttttcatccggatgaccct

SEQ ID NO: 4536927 - DNA, 25 bp, Homo sapien
tcagcctgccggacatttttcatcc

SEQ ID NO: 4536928 - DNA, 25 bp, Homo sapien
cctcagcaaaccatcccatgaagtc

SEQ ID NO: 4536929 - DNA, 25 bp, Homo sapien
caaaccatcccatgaagtctgggga

SEQ ID NO: 4536930 - DNA, 25 bp, Homo sapien
tcagcaaaccatcccatgaagtctg

SEQ ID NO: 4536931 - DNA, 25 bp, Homo sapien
aaccatcccatgaagtctggggagc

SEQ ID NO: 4536932 - DNA, 25 bp, Homo sapien
cttcaaggcacaggtggccgagggc

SEQ ID NO: 4536933 - DNA, 25 bp, Homo sapien
tctgcttggcatgggtctggcaggg

SEQ ID NO: 4536934 - DNA, 25 bp, Homo sapien
gagaccctggcgtgcatctgcctca

SEQ ID NO: 4536935 - DNA, 25 bp, Homo sapien
gggcctgctgtcttctgcttggcat

SEQ ID NO: 4536936 - DNA, 25 bp, Homo sapien
cttactgccttggtgacatcccctg

SEQ ID NO: 4536937 - DNA, 25 bp, Homo sapien
catcccctgcatagggaaagcctct

SEQ ID NO: 4536938 - DNA, 25 bp, Homo sapien
tgccttggtgacatcccctgcatag

SEQ ID NO: 4536939 - DNA, 25 bp, Homo sapien
tggtgacatcccctgcatagggaaa

SEQ ID NO: 4536940 - DNA, 25 bp, Homo sapien
taggtggctctgacggtgggaactt

SEQ ID NO: 4536941 - DNA, 25 bp, Homo sapien
tgtgggagaggccttccggaggcca

SEQ ID NO: 4536942 - DNA, 25 bp, Homo sapien
gtaggtggctctgacggtgggaact

SEQ ID NO: 4536943 - DNA, 25 bp, Homo sapien
ggaagcatgtgggagaggccttccg

SEQ ID NO: 4536944 - DNA, 25 bp, Homo sapien
tgccttcttcatccgtttgtgggct

SEQ ID NO: 4536945 - DNA, 25 bp, Homo sapien
ggatgagtgtggaggtggtagcacg

SEQ ID NO: 4536946 - DNA, 25 bp, Homo sapien
caggatgagtgtggaggtggtagca

SEQ ID NO: 4536947 - DNA, 25 bp, Homo sapien
ctgagagccaggatgagtgtggagg

SEQ ID NO: 4536948 - DNA, 25 bp, Homo sapien
agccaggatgagtgtggaggtggta

SEQ ID NO: 4536949 - DNA, 25 bp, Homo sapien
ctggatccaggtgtatctccttcca

SEQ ID NO: 4536950 - DNA, 25 bp, Homo sapien
cctggatccaggtgtatctccttcc

SEQ ID NO: 4536951 - DNA, 25 bp, Homo sapien
tggatccaggtgtatctccttccag

SEQ ID NO: 4536952 - DNA, 25 bp, Homo sapien
caggaagacatgagaggctaggctc

SEQ ID NO: 4536953 - DNA, 25 bp, Homo sapien
aggctaggctcagtgcctctccagt

SEQ ID NO: 4536954 - DNA, 25 bp, Homo sapien
gaagacatgagaggctaggctcagt

SEQ ID NO: 4536955 - DNA, 25 bp, Homo sapien
gacatcaggaagacatgagaggcta

SEQ ID NO: 4536956 - DNA, 25 bp, Homo sapien
gggcaccaccgacgccataggcttg

SEQ ID NO: 4536957 - DNA, 25 bp, Homo sapien
gtctcagcactgacaccgtgtggcc

SEQ ID NO: 4536958 - DNA, 25 bp, Homo sapien
cgccataggcttgtcggtgtctcag

SEQ ID NO: 4536959 - DNA, 25 bp, Homo sapien
agtgctgcgtgacaggagccgggca

SEQ ID NO: 4536960 - DNA, 25 bp, Homo sapien
agaaagtcttggagacgggaggttg

SEQ ID NO: 4536961 - DNA, 25 bp, Homo sapien
aaaaagcagtgaggggtccgcagaa

SEQ ID NO: 4536962 - DNA, 25 bp, Homo sapien
tgaggggtccgcagaaagtcttgga

SEQ ID NO: 4536963 - DNA, 25 bp, Homo sapien
tcttggagacgggaggttgtcccat

SEQ ID NO: 4536964 - DNA, 25 bp, Homo sapien
gctggccgtacctgcttcagtaagt

SEQ ID NO: 4536965 - DNA, 25 bp, Homo sapien
tgacgtcgaggagcgaccgcccctt

SEQ ID NO: 4536966 - DNA, 25 bp, Homo sapien
cttcccggatgatgtggctcgcaca

SEQ ID NO: 4536967 - DNA, 25 bp, Homo sapien
gttgtgacatcctcctgacgtcgag

SEQ ID NO: 4536968 - DNA, 25 bp, Homo sapien
tgtgagtgaagcgagagagagacat

SEQ ID NO: 4536969 - DNA, 25 bp, Homo sapien
tgagtgaagcgagagagagacattt

SEQ ID NO: 4536970 - DNA, 25 bp, Homo sapien
tgtgtgtgtgagtgaagcgagagag

SEQ ID NO: 4536971 - DNA, 25 bp, Homo sapien
tgtgtgagtgaagcgagagagagac

SEQ ID NO: 4536972 - DNA, 25 bp, Homo sapien
tgtgtacacgcacccttgcatgagg

SEQ ID NO: 4536973 - DNA, 25 bp, Homo sapien
caagccagccatgaacgtaagagag

SEQ ID NO: 4536974 - DNA, 25 bp, Homo sapien
taagaaatgtgctagcagctggccg

SEQ ID NO: 4536975 - DNA, 25 bp, Homo sapien
tacagatcaggttatgcccgcaggc

SEQ ID NO: 4536976 - DNA, 25 bp, Homo sapien
ttgtagtcactgagccgcagcaggc

SEQ ID NO: 4536977 - DNA, 25 bp, Homo sapien
cctccttgtaggtcatgttggacag

SEQ ID NO: 4536978 - DNA, 25 bp, Homo sapien
tagagtccggtgcttcagcgcggtc

SEQ ID NO: 4536979 - DNA, 25 bp, Homo sapien
tggctggtctgcacgttgtagtcac

SEQ ID NO: 4536980 - DNA, 25 bp, Homo sapien
gaagtgcagcaggatcggggcctcg

SEQ ID NO: 4536981 - DNA, 25 bp, Homo sapien
gggctgagtggtccttgaaggaggc

SEQ ID NO: 4536982 - DNA, 25 bp, Homo sapien
ctgagtggtccttgaaggaggcatt

SEQ ID NO: 4536983 - DNA, 25 bp, Homo sapien
ggtccttgaaggaggcattgaccag

SEQ ID NO: 4536984 - DNA, 25 bp, Homo sapien
cattcccttggctggtgctggtcct

SEQ ID NO: 4536985 - DNA, 25 bp, Homo sapien
tggacatggagatgctagggtctcc

SEQ ID NO: 4536986 - DNA, 25 bp, Homo sapien
caattctggattgctattgctggac

SEQ ID NO: 4536987 - DNA, 25 bp, Homo sapien
ctctggtggtctgcaatgttgtttg

SEQ ID NO: 4536988 - DNA, 25 bp, Homo sapien
tcaaatcccagagccgagaggagac

SEQ ID NO: 4536989 - DNA, 25 bp, Homo sapien
tggccctgctgctcgcctctggagc

SEQ ID NO: 4536990 - DNA, 25 bp, Homo sapien
ctgctgctcgcctctggagcttggc

SEQ ID NO: 4536991 - DNA, 25 bp, Homo sapien
agtggccctgctgctcgcctctgga

SEQ ID NO: 4536992 - DNA, 25 bp, Homo sapien
ctgacacctctccttcccttcggga

SEQ ID NO: 4536993 - DNA, 25 bp, Homo sapien
ctgggcatggagtcaagctggtagt

SEQ ID NO: 4536994 - DNA, 25 bp, Homo sapien
gccggaacatggagggagagctggt

SEQ ID NO: 4536995 - DNA, 25 bp, Homo sapien
tgttgatgaagtaggcggcgtccac

SEQ ID NO: 4536996 - DNA, 25 bp, Homo sapien
tcgaagggcgcagatagggagtagt

SEQ ID NO: 4536997 - DNA, 25 bp, Homo sapien
ctttgtggctacagtagtcctggtg

SEQ ID NO: 4536998 - DNA, 25 bp, Homo sapien
gctacagtagtcctggtgcagctgg

SEQ ID NO: 4536999 - DNA, 25 bp, Homo sapien
agccgcgaggaggtccccgaggtgg

SEQ ID NO: 4537000 - DNA, 25 bp, Homo sapien
aaatgcctgggccagcgccgtgcct

SEQ ID NO: 4537001 - DNA, 25 bp, Homo sapien
agaactggtgaggtcataccaggca

SEQ ID NO: 4537002 - DNA, 25 bp, Homo sapien
tcctggtcttgtccttgatgtgctg

SEQ ID NO: 4537003 - DNA, 25 bp, Homo sapien
cccagaactggtgaggtcataccag

SEQ ID NO: 4537004 - DNA, 25 bp, Homo sapien
cctggtcttgtccttgatgtgctgt

SEQ ID NO: 4537005 - DNA, 25 bp, Homo sapien
ttccagaaagcagatccggggctcc

SEQ ID NO: 4537006 - DNA, 25 bp, Homo sapien
agaaagcagatccggggctccggga

SEQ ID NO: 4537007 - DNA, 25 bp, Homo sapien
tccagaaagcagatccggggctccg

SEQ ID NO: 4537008 - DNA, 25 bp, Homo sapien
cagaaagcagatccggggctccggg

SEQ ID NO: 4537009 - DNA, 25 bp, Homo sapien
agctcaggagggacgaaggccccgt

SEQ ID NO: 4537010 - DNA, 25 bp, Homo sapien
ccgtacttcaggaaaccgacctcat

SEQ ID NO: 4537011 - DNA, 25 bp, Homo sapien
tcatagggggagaactcaacccact

SEQ ID NO: 4537012 - DNA, 25 bp, Homo sapien
tacttcaggaaaccgacctcatagg

SEQ ID NO: 4537013 - DNA, 25 bp, Homo sapien
gtctccagattgttctctttgacat

SEQ ID NO: 4537014 - DNA, 25 bp, Homo sapien
acattgaggctcaagtagaggggca

SEQ ID NO: 4537015 - DNA, 25 bp, Homo sapien
ttctgaccccgttccagggcggctc

SEQ ID NO: 4537016 - DNA, 25 bp, Homo sapien
agggcggctctctgtcctgacagct

SEQ ID NO: 4537017 - DNA, 25 bp, Homo sapien
ccggcggtagctcgccaggcgctct

SEQ ID NO: 4537018 - DNA, 25 bp, Homo sapien
cgcccacaggtccacaaaggtcgtg

SEQ ID NO: 4537019 - DNA, 25 bp, Homo sapien
aggcgctctggggaaaagacctcca

SEQ ID NO: 4537020 - DNA, 25 bp, Homo sapien
atggactccagcactagcgcccaca

SEQ ID NO: 4537021 - DNA, 25 bp, Homo sapien
gtccccgtacaggtgggccattgtc

SEQ ID NO: 4537022 - DNA, 25 bp, Homo sapien
ccctctgcgaccactcagggtcccc

SEQ ID NO: 4537023 - DNA, 25 bp, Homo sapien
cactcagggtccccgtacaggtggg

SEQ ID NO: 4537024 - DNA, 25 bp, Homo sapien
tccctctgcgaccactcagggtccc

SEQ ID NO: 4537025 - DNA, 25 bp, Homo sapien
gtcacacagtctaggaggcccagct

SEQ ID NO: 4537026 - DNA, 25 bp, Homo sapien
aataggtggccgtagagtgaggtca

SEQ ID NO: 4537027 - DNA, 25 bp, Homo sapien
ttctgcaaggccaataggtggccgt

SEQ ID NO: 4537028 - DNA, 25 bp, Homo sapien
agtgaggtcatggcccgggcacctc

SEQ ID NO: 4537029 - DNA, 25 bp, Homo sapien
ctccacacacatgcccactctccac

SEQ ID NO: 4537030 - DNA, 25 bp, Homo sapien
acacacatgcccactctccactgac

SEQ ID NO: 4537031 - DNA, 25 bp, Homo sapien
gctcccatgtctccacacacatgcc

SEQ ID NO: 4537032 - DNA, 25 bp, Homo sapien
cacacacatgcccactctccactga

SEQ ID NO: 4537033 - DNA, 25 bp, Homo sapien
cccttatggcccgtccaggatatct

SEQ ID NO: 4537034 - DNA, 25 bp, Homo sapien
cgtccaggatatctgcacacacatc

SEQ ID NO: 4537035 - DNA, 25 bp, Homo sapien
gaatcaggtactcccttatggcccg

SEQ ID NO: 4537036 - DNA, 25 bp, Homo sapien
gaggcataggaatcaggtactccct

SEQ ID NO: 4537037 - DNA, 25 bp, Homo sapien
gctcctctgcacagagattgaagcc

SEQ ID NO: 4537038 - DNA, 25 bp, Homo sapien
cctctgcacagagattgaagcccag

SEQ ID NO: 4537039 - DNA, 25 bp, Homo sapien
gattgaagcccaggtgcacggccag

SEQ ID NO: 4537040 - DNA, 25 bp, Homo sapien
acagagattgaagcccaggtgcacg

SEQ ID NO: 4537041 - DNA, 25 bp, Homo sapien
cagccctctgccttgagctgcagcc

SEQ ID NO: 4537042 - DNA, 25 bp, Homo sapien
ctgccttgagctgcagcctcactcc

SEQ ID NO: 4537043 - DNA, 25 bp, Homo sapien
tctgccttgagctgcagcctcactc

SEQ ID NO: 4537044 - DNA, 25 bp, Homo sapien
ccctctgccttgagctgcagcctca

SEQ ID NO: 4537045 - DNA, 25 bp, Homo sapien
ttcccaatggtcaagggcctcaggg

SEQ ID NO: 4537046 - DNA, 25 bp, Homo sapien
ggtacccagctgagttgtccccatt

SEQ ID NO: 4537047 - DNA, 25 bp, Homo sapien
tcaggggcacagtgaggtacccagc

SEQ ID NO: 4537048 - DNA, 25 bp, Homo sapien
atttggagcaggaacatccatagtc

SEQ ID NO: 4537049 - DNA, 25 bp, Homo sapien
tgtgtcctcataggaccccttcagc

SEQ ID NO: 4537050 - DNA, 25 bp, Homo sapien
tagggctgccatgtagtggaagcgg

SEQ ID NO: 4537051 - DNA, 25 bp, Homo sapien
gtcctcataggaccccttcagcacc

SEQ ID NO: 4537052 - DNA, 25 bp, Homo sapien
gggctgccatgtagtggaagcggaa

SEQ ID NO: 4537053 - DNA, 25 bp, Homo sapien
caaccacagcggtgctccctgtgct

SEQ ID NO: 4537054 - DNA, 25 bp, Homo sapien
tgctgtccagatgcacatccaggca

SEQ ID NO: 4537055 - DNA, 25 bp, Homo sapien
acatccaggcatgacagctctcggg

SEQ ID NO: 4537056 - DNA, 25 bp, Homo sapien
tgcaaccacagcggtgctccctgtg

SEQ ID NO: 4537057 - DNA, 25 bp, Homo sapien
gatgaggttttctgggcgatctgac

SEQ ID NO: 4537058 - DNA, 25 bp, Homo sapien
tgatgaggttttctgggcgatctga

SEQ ID NO: 4537059 - DNA, 25 bp, Homo sapien
gtgatgaggttttctgggcgatctg

SEQ ID NO: 4537060 - DNA, 25 bp, Homo sapien
ggaactccacatccagctcctcctc

SEQ ID NO: 4537061 - DNA, 25 bp, Homo sapien
actccacatccagctcctcctctcc

SEQ ID NO: 4537062 - DNA, 25 bp, Homo sapien
gtttcttccatcaggaactccacat

SEQ ID NO: 4537063 - DNA, 25 bp, Homo sapien
tttcttccatcaggaactccacatc

SEQ ID NO: 4537064 - DNA, 25 bp, Homo sapien
gaagcagatgtcatcctccgtgact

SEQ ID NO: 4537065 - DNA, 25 bp, Homo sapien
catagatgctaagctccagaacatt

SEQ ID NO: 4537066 - DNA, 25 bp, Homo sapien
gaaggttttccggagcagcttgcca

SEQ ID NO: 4537067 - DNA, 25 bp, Homo sapien
gactgagtcctcatcatagatgcta

SEQ ID NO: 4537068 - DNA, 25 bp, Homo sapien
aaacttcattccaggtgcggtcgac

SEQ ID NO: 4537069 - DNA, 25 bp, Homo sapien
tgcggtcgacagctgtaggatcacg

SEQ ID NO: 4537070 - DNA, 25 bp, Homo sapien
atcacgtaagggtcggcctcactca

SEQ ID NO: 4537071 - DNA, 25 bp, Homo sapien
tcggtgagcgtcttggtcttaaact

SEQ ID NO: 4537072 - DNA, 25 bp, Homo sapien
acaggtcagcccagcgcaggttccg

SEQ ID NO: 4537073 - DNA, 25 bp, Homo sapien
ccagcgcaggttccgcgcctccagg

SEQ ID NO: 4537074 - DNA, 25 bp, Homo sapien
caggttccgcgcctccaggaccctc

SEQ ID NO: 4537075 - DNA, 25 bp, Homo sapien
gcccagcgcaggttccgcgcctcca

SEQ ID NO: 4537076 - DNA, 25 bp, Homo sapien
gtccacttctgttttgggggtcatg

SEQ ID NO: 4537077 - DNA, 25 bp, Homo sapien
ctgccaggcgttccggggacaccct

SEQ ID NO: 4537078 - DNA, 25 bp, Homo sapien
tctggggaccaaagagcctttgtcc

SEQ ID NO: 4537079 - DNA, 25 bp, Homo sapien
acaccctctggggaccaaagagcct

SEQ ID NO: 4537080 - DNA, 25 bp, Homo sapien
agccctgcagcacggctttttctgg

SEQ ID NO: 4537081 - DNA, 25 bp, Homo sapien
ccggcactgccacgatcaggagggc

SEQ ID NO: 4537082 - DNA, 25 bp, Homo sapien
tgcagcacggctttttctgggcatc

SEQ ID NO: 4537083 - DNA, 25 bp, Homo sapien
ttcctgagccctgcagcacggcttt

SEQ ID NO: 4537084 - DNA, 25 bp, Homo sapien
gagactgttgtgataaaaccagagg

SEQ ID NO: 4537085 - DNA, 25 bp, Homo sapien
ttctcggtgcccacaaggactcgta

SEQ ID NO: 4537086 - DNA, 25 bp, Homo sapien
catttgatatcgcatagctgggaga

SEQ ID NO: 4537087 - DNA, 25 bp, Homo sapien
gccaaaagccagtgcagtgtttgca

SEQ ID NO: 4537088 - DNA, 25 bp, Homo sapien
gcttttgttttacctgggagctaga

SEQ ID NO: 4537089 - DNA, 25 bp, Homo sapien
aggctcccaaatcgctgacacttag

SEQ ID NO: 4537090 - DNA, 25 bp, Homo sapien
gcagactcaggctcccaaatcgctg

SEQ ID NO: 4537091 - DNA, 25 bp, Homo sapien
aaatcgctgacacttaggcttttgt

SEQ ID NO: 4537092 - DNA, 25 bp, Homo sapien
cagttacctggaggcctaaccatct

SEQ ID NO: 4537093 - DNA, 25 bp, Homo sapien
gcctgacgttaggctcgcccgcagt

SEQ ID NO: 4537094 - DNA, 25 bp, Homo sapien
ctcgtggagggcctgacgttaggct

SEQ ID NO: 4537095 - DNA, 25 bp, Homo sapien
gcagttacctggaggcctaaccatc

SEQ ID NO: 4537096 - DNA, 25 bp, Homo sapien
atccttcttccggtggagaggccca

SEQ ID NO: 4537097 - DNA, 25 bp, Homo sapien
tggaggaaattcgtcagcccagtca

SEQ ID NO: 4537098 - DNA, 25 bp, Homo sapien
ggtccagagtatccttgcccgtgat

SEQ ID NO: 4537099 - DNA, 25 bp, Homo sapien
gaaccttgcgcagggaccccagagg

SEQ ID NO: 4537100 - DNA, 25 bp, Homo sapien
cctgtcgtctgctggcactggcgcc

SEQ ID NO: 4537101 - DNA, 25 bp, Homo sapien
tggccaggtggtcccccaggtgaca

SEQ ID NO: 4537102 - DNA, 25 bp, Homo sapien
caggtggtcccccaggtgacaggct

SEQ ID NO: 4537103 - DNA, 25 bp, Homo sapien
gccaggtggtcccccaggtgacagg

SEQ ID NO: 4537104 - DNA, 25 bp, Homo sapien
gtggccaggtggtcccccaggtgac

SEQ ID NO: 4537105 - DNA, 25 bp, Homo sapien
gctagcccttccagcttcactccag

SEQ ID NO: 4537106 - DNA, 25 bp, Homo sapien
cccagtgggataggaccagcatgaa

SEQ ID NO: 4537107 - DNA, 25 bp, Homo sapien
cgacggtcccagtgggataggacca

SEQ ID NO: 4537108 - DNA, 25 bp, Homo sapien
cggtcccagtgggataggaccagca

SEQ ID NO: 4537109 - DNA, 25 bp, Homo sapien
tccccaagaggctgggtcaaccagc

SEQ ID NO: 4537110 - DNA, 25 bp, Homo sapien
cagacctggagtttcaggacagaag

SEQ ID NO: 4537111 - DNA, 25 bp, Homo sapien
tgcaggcggagcacctcttccagac

SEQ ID NO: 4537112 - DNA, 25 bp, Homo sapien
aggcagacgagtcccaggagtggtg

SEQ ID NO: 4537113 - DNA, 25 bp, Homo sapien
caggggtctggacattccccaccac

SEQ ID NO: 4537114 - DNA, 25 bp, Homo sapien
cattccccaccacaagcccctcacc

SEQ ID NO: 4537115 - DNA, 25 bp, Homo sapien
acaggggtctggacattccccacca

SEQ ID NO: 4537116 - DNA, 25 bp, Homo sapien
ggcccaagttcaaagagctgactgt

SEQ ID NO: 4537117 - DNA, 25 bp, Homo sapien
gctgactgtggataattatcacgga

SEQ ID NO: 4537118 - DNA, 25 bp, Homo sapien
agagctgactgtggataattatcac

SEQ ID NO: 4537119 - DNA, 25 bp, Homo sapien
gactgtggataattatcacggaaac

SEQ ID NO: 4537120 - DNA, 25 bp, Homo sapien
catgccgggatgggtccgtcccttc

SEQ ID NO: 4537121 - DNA, 25 bp, Homo sapien
tcaagggaaaccatgcttgctcttc

SEQ ID NO: 4537122 - DNA, 25 bp, Homo sapien
agctcaagtggccaaagtgcagccc

SEQ ID NO: 4537123 - DNA, 25 bp, Homo sapien
tgtgtttctacccagcttcaaggga

SEQ ID NO: 4537124 - DNA, 25 bp, Homo sapien
tcatgggcgtagatgatcaaaggtc

SEQ ID NO: 4537125 - DNA, 25 bp, Homo sapien
taacaagttattgatgacggcaggc

SEQ ID NO: 4537126 - DNA, 25 bp, Homo sapien
tctaagttgtgaacgctgtgcagtt

SEQ ID NO: 4537127 - DNA, 25 bp, Homo sapien
gaatgactttctaggagccagagac

SEQ ID NO: 4537128 - DNA, 25 bp, Homo sapien
gacagcctgaggctctaatgggcac

SEQ ID NO: 4537129 - DNA, 25 bp, Homo sapien
cctaggaatggtgagactatatttg

SEQ ID NO: 4537130 - DNA, 25 bp, Homo sapien
gactatatttgcatgatgtggccac

SEQ ID NO: 4537131 - DNA, 25 bp, Homo sapien
ctaggaatggtgagactatatttgc

SEQ ID NO: 4537132 - DNA, 25 bp, Homo sapien
tccaggttcgaagagtgaagcctgg

SEQ ID NO: 4537133 - DNA, 25 bp, Homo sapien
gggtaactggcagggagacacgcgc

SEQ ID NO: 4537134 - DNA, 25 bp, Homo sapien
tggtccaggttcgaagagtgaagcc

SEQ ID NO: 4537135 - DNA, 25 bp, Homo sapien
agactgtggtccaggttcgaagagt

SEQ ID NO: 4537136 - DNA, 25 bp, Homo sapien
agcccctcattgttcttgatagcag

SEQ ID NO: 4537137 - DNA, 25 bp, Homo sapien
gaatgggacatcaccccacaggctt

SEQ ID NO: 4537138 - DNA, 25 bp, Homo sapien
taggatgatggagtcagcaacatag

SEQ ID NO: 4537139 - DNA, 25 bp, Homo sapien
agtgtggatggatgcatctctgctt

SEQ ID NO: 4537140 - DNA, 25 bp, Homo sapien
tctacaagccctgaccatgagcagt

SEQ ID NO: 4537141 - DNA, 25 bp, Homo sapien
cacaccccgctgtgaaatgagtgct

SEQ ID NO: 4537142 - DNA, 25 bp, Homo sapien
tgccccagtccaagctgcaattctg

SEQ ID NO: 4537143 - DNA, 25 bp, Homo sapien
aagagtccctggagcgatctactgc

SEQ ID NO: 4537144 - DNA, 25 bp, Homo sapien
tcccgagcctggtgccggtccagag

SEQ ID NO: 4537145 - DNA, 25 bp, Homo sapien
cctggtgccggtccagagccagctg

SEQ ID NO: 4537146 - DNA, 25 bp, Homo sapien
cctctcccgagcctggtgccggtcc

SEQ ID NO: 4537147 - DNA, 25 bp, Homo sapien
tctcccgagcctggtgccggtccag

SEQ ID NO: 4537148 - DNA, 25 bp, Homo sapien
aggtgaagttcatcatgccataggg

SEQ ID NO: 4537149 - DNA, 25 bp, Homo sapien
gggccaccagccgataaaagtcctg

SEQ ID NO: 4537150 - DNA, 25 bp, Homo sapien
gttgatgacaaagtccccaaaggcc

SEQ ID NO: 4537151 - DNA, 25 bp, Homo sapien
acgttgtatcgactgagggccacca

SEQ ID NO: 4537152 - DNA, 25 bp, Homo sapien
tgtgtgcggaaggtacggttaacca

SEQ ID NO: 4537153 - DNA, 25 bp, Homo sapien
ttggcaaacagatagcactcacggg

SEQ ID NO: 4537154 - DNA, 25 bp, Homo sapien
aaggggattcctcggtccaggcagt

SEQ ID NO: 4537155 - DNA, 25 bp, Homo sapien
agggcccacctcgatgctagggaag

SEQ ID NO: 4537156 - DNA, 25 bp, Homo sapien
ccaccaggtacaggcagtcccgcat

SEQ ID NO: 4537157 - DNA, 25 bp, Homo sapien
ccaaggaatagtcaaaggacagaat

SEQ ID NO: 4537158 - DNA, 25 bp, Homo sapien
aaagcctccgtccaccaggtacagg

SEQ ID NO: 4537159 - DNA, 25 bp, Homo sapien
ggaacggagagttgatggcaaagcc

SEQ ID NO: 4537160 - DNA, 25 bp, Homo sapien
ggtgaggagcctcgttcgcagcctc

SEQ ID NO: 4537161 - DNA, 25 bp, Homo sapien
ccgggtgaagttaaagctctgggcg

SEQ ID NO: 4537162 - DNA, 25 bp, Homo sapien
tctgggcggaagtgaagcgggaggt

SEQ ID NO: 4537163 - DNA, 25 bp, Homo sapien
aggagcctcgttcgcagcctcgagg

SEQ ID NO: 4537164 - DNA, 25 bp, Homo sapien
gactgagcaattactatgcccagca

SEQ ID NO: 4537165 - DNA, 25 bp, Homo sapien
cagcactgcactaggcatgagggct

SEQ ID NO: 4537166 - DNA, 25 bp, Homo sapien
ctcccaggtgcacggcctacttgtg

SEQ ID NO: 4537167 - DNA, 25 bp, Homo sapien
gaacttcgtccattaaacactgact

SEQ ID NO: 4537168 - DNA, 25 bp, Homo sapien
tgcctctgtaccactccaggaagct

SEQ ID NO: 4537169 - DNA, 25 bp, Homo sapien
actgcctctgtaccactccaggaag

SEQ ID NO: 4537170 - DNA, 25 bp, Homo sapien
ccgagccggcggtctttaggaagat

SEQ ID NO: 4537171 - DNA, 25 bp, Homo sapien
cggcggtctttaggaagatctcatc

SEQ ID NO: 4537172 - DNA, 25 bp, Homo sapien
ccccagccctccagcctcgactcac

SEQ ID NO: 4537173 - DNA, 25 bp, Homo sapien
caccccacgtcagggcctggccccg

SEQ ID NO: 4537174 - DNA, 25 bp, Homo sapien
gcaggcccccaccccacgtcagggc

SEQ ID NO: 4537175 - DNA, 25 bp, Homo sapien
ctggccccggcacctgcctgtcccc

SEQ ID NO: 4537176 - DNA, 25 bp, Homo sapien
gggaagccaacctcatagggcgtga

SEQ ID NO: 4537177 - DNA, 25 bp, Homo sapien
aagagctcggtgggaacataagccc

SEQ ID NO: 4537178 - DNA, 25 bp, Homo sapien
gctgcagcaatcgtcccatgaagag

SEQ ID NO: 4537179 - DNA, 25 bp, Homo sapien
gaagagttctgagccgaagagctcg

SEQ ID NO: 4537180 - DNA, 25 bp, Homo sapien
ctggcggaccgcctcctgttggtca

SEQ ID NO: 4537181 - DNA, 25 bp, Homo sapien
ttccccactcaagttggtgcggacg

SEQ ID NO: 4537182 - DNA, 25 bp, Homo sapien
tcctgttggtcagacagcttggcag

SEQ ID NO: 4537183 - DNA, 25 bp, Homo sapien
tgcggacgttgacactggtgtaaat

SEQ ID NO: 4537184 - DNA, 25 bp, Homo sapien
gccgagagctcaggaacagctttgt

SEQ ID NO: 4537185 - DNA, 25 bp, Homo sapien
taatatgcacccagagctgagcgct

SEQ ID NO: 4537186 - DNA, 25 bp, Homo sapien
tagggaggcaaaatggtaccagccc

SEQ ID NO: 4537187 - DNA, 25 bp, Homo sapien
tgtgtttgaaaagctgcgccggtga

SEQ ID NO: 4537188 - DNA, 25 bp, Homo sapien
tgtagtactgtagccgctccgtgga

SEQ ID NO: 4537189 - DNA, 25 bp, Homo sapien
tactgtagccgctccgtggacaaag

SEQ ID NO: 4537190 - DNA, 25 bp, Homo sapien
tcctgagtgtagtactgtagccgct

SEQ ID NO: 4537191 - DNA, 25 bp, Homo sapien
tgagtgtagtactgtagccgctccg

SEQ ID NO: 4537192 - DNA, 25 bp, Homo sapien
tgctgcagacgtgaacctgggcacg

SEQ ID NO: 4537193 - DNA, 25 bp, Homo sapien
cgtgaacctgggcacgctcaatggg

SEQ ID NO: 4537194 - DNA, 25 bp, Homo sapien
cagacgtgaacctgggcacgctcaa

SEQ ID NO: 4537195 - DNA, 25 bp, Homo sapien
cttactgctgcagacgtgaacctgg

SEQ ID NO: 4537196 - DNA, 25 bp, Homo sapien
accccactcaggtaggtcacagtgt

SEQ ID NO: 4537197 - DNA, 25 bp, Homo sapien
gagaagacatggctcgggttccacc

SEQ ID NO: 4537198 - DNA, 25 bp, Homo sapien
cctgccaggctgccgtacagagaag

SEQ ID NO: 4537199 - DNA, 25 bp, Homo sapien
tcacagtgtctagaaggccgagctc

SEQ ID NO: 4537200 - DNA, 25 bp, Homo sapien
caaagccaaggcgtaggtctaggtc

SEQ ID NO: 4537201 - DNA, 25 bp, Homo sapien
gaggtcaaagccaaggcgtaggtct

SEQ ID NO: 4537202 - DNA, 25 bp, Homo sapien
cctgctccccgtcagagaggtcaaa

SEQ ID NO: 4537203 - DNA, 25 bp, Homo sapien
tgtccagagcctcactcaatcccag

SEQ ID NO: 4537204 - DNA, 25 bp, Homo sapien
atttccaccttcatgctcagagcca

SEQ ID NO: 4537205 - DNA, 25 bp, Homo sapien
ctcatttccaccttcatgctcagag

SEQ ID NO: 4537206 - DNA, 25 bp, Homo sapien
ttcatgctcagagccacctcctggc

SEQ ID NO: 4537207 - DNA, 25 bp, Homo sapien
tcatgctcagagccacctcctggcc

SEQ ID NO: 4537208 - DNA, 25 bp, Homo sapien
tcgcccagcttgctggtctgagcct

SEQ ID NO: 4537209 - DNA, 25 bp, Homo sapien
gcccagcttgctggtctgagcctcc

SEQ ID NO: 4537210 - DNA, 25 bp, Homo sapien
tgagcctccaactctgcgctggggc

SEQ ID NO: 4537211 - DNA, 25 bp, Homo sapien
gcctccaactctgcgctggggccac

SEQ ID NO: 4537212 - DNA, 25 bp, Homo sapien
tccatcagctccacgtgtagcctgg

SEQ ID NO: 4537213 - DNA, 25 bp, Homo sapien
catcagctccacgtgtagcctggag

SEQ ID NO: 4537214 - DNA, 25 bp, Homo sapien
cagctccacgtgtagcctggagctc

SEQ ID NO: 4537215 - DNA, 25 bp, Homo sapien
agctccatcagctccacgtgtagcc

SEQ ID NO: 4537216 - DNA, 25 bp, Homo sapien
tggcttctcgtaggctccaggcact

SEQ ID NO: 4537217 - DNA, 25 bp, Homo sapien
gctgtggcttctcgtaggctccagg

SEQ ID NO: 4537218 - DNA, 25 bp, Homo sapien
agagctgtggcttctcgtaggctcc

SEQ ID NO: 4537219 - DNA, 25 bp, Homo sapien
ttctcgtaggctccaggcactgcca

SEQ ID NO: 4537220 - DNA, 25 bp, Homo sapien
ccggagcgtgccctggattctcaga

SEQ ID NO: 4537221 - DNA, 25 bp, Homo sapien
gcgtgccctggattctcagacaggg

SEQ ID NO: 4537222 - DNA, 25 bp, Homo sapien
atctccccggagcgtgccctggatt

SEQ ID NO: 4537223 - DNA, 25 bp, Homo sapien
gtactcttcccgtggggctgtccca

SEQ ID NO: 4537224 - DNA, 25 bp, Homo sapien
cagcccagaacagcgccaagcttgc

SEQ ID NO: 4537225 - DNA, 25 bp, Homo sapien
cagcgccaagcttgccttccccact

SEQ ID NO: 4537226 - DNA, 25 bp, Homo sapien
ccagaacagcgccaagcttgccttc

SEQ ID NO: 4537227 - DNA, 25 bp, Homo sapien
agaacagcgccaagcttgccttccc

SEQ ID NO: 4537228 - DNA, 25 bp, Homo sapien
gaaccccgttggtgatgacttcaga

SEQ ID NO: 4537229 - DNA, 25 bp, Homo sapien
ccagaaccccgttggtgatgacttc

SEQ ID NO: 4537230 - DNA, 25 bp, Homo sapien
cagaaccccgttggtgatgacttca

SEQ ID NO: 4537231 - DNA, 25 bp, Homo sapien
caccagaaccccgttggtgatgact

SEQ ID NO: 4537232 - DNA, 25 bp, Homo sapien
ctcttctccagaacaaattccacct

SEQ ID NO: 4537233 - DNA, 25 bp, Homo sapien
tcttctccagaacaaattccacctg

SEQ ID NO: 4537234 - DNA, 25 bp, Homo sapien
ccagaacaaattccacctgcagctc

SEQ ID NO: 4537235 - DNA, 25 bp, Homo sapien
tctccagaacaaattccacctgcag

SEQ ID NO: 4537236 - DNA, 25 bp, Homo sapien
cttgaggcttctcaggtcaaacagg

SEQ ID NO: 4537237 - DNA, 25 bp, Homo sapien
gctggtcgctgcccaggatgtcctt

SEQ ID NO: 4537238 - DNA, 25 bp, Homo sapien
tggccacacttgaggcttctcaggt

SEQ ID NO: 4537239 - DNA, 25 bp, Homo sapien
tgtttgtgaggttggccacacttga

SEQ ID NO: 4537240 - DNA, 25 bp, Homo sapien
tgcacatagcagtcggctttggaca

SEQ ID NO: 4537241 - DNA, 25 bp, Homo sapien
caccatggatctggtagtggaaggt

SEQ ID NO: 4537242 - DNA, 25 bp, Homo sapien
tctggtagtggaaggtctcattcca

SEQ ID NO: 4537243 - DNA, 25 bp, Homo sapien
tcactgcagttggccactatcctag

SEQ ID NO: 4537244 - DNA, 25 bp, Homo sapien
ggggccggggcctcaagctctcatt

SEQ ID NO: 4537245 - DNA, 25 bp, Homo sapien
cggggcctcaagctctcattgctga

SEQ ID NO: 4537246 - DNA, 25 bp, Homo sapien
gccggggcctcaagctctcattgct

SEQ ID NO: 4537247 - DNA, 25 bp, Homo sapien
gcctcaagctctcattgctgaaaag

SEQ ID NO: 4537248 - DNA, 25 bp, Homo sapien
gcaggtctgtgccccggatgtttgt

SEQ ID NO: 4537249 - DNA, 25 bp, Homo sapien
gaggtcatagtatgggtaggtttcc

SEQ ID NO: 4537250 - DNA, 25 bp, Homo sapien
gtgccccggatgtttgtggccctca

SEQ ID NO: 4537251 - DNA, 25 bp, Homo sapien
cttcacctggaggtcatagtatggg

SEQ ID NO: 4537252 - DNA, 25 bp, Homo sapien
gccaccttggccagagtgcccaaag

SEQ ID NO: 4537253 - DNA, 25 bp, Homo sapien
accttggccagagtgcccaaagcat

SEQ ID NO: 4537254 - DNA, 25 bp, Homo sapien
caccttggccagagtgcccaaagca

SEQ ID NO: 4537255 - DNA, 25 bp, Homo sapien
cagccaccttggccagagtgcccaa

SEQ ID NO: 4537256 - DNA, 25 bp, Homo sapien
tcctctggttgcacaaactgctggc

SEQ ID NO: 4537257 - DNA, 25 bp, Homo sapien
ggttgcacaaactgctggctcaggt

SEQ ID NO: 4537258 - DNA, 25 bp, Homo sapien
tctggttgcacaaactgctggctca

SEQ ID NO: 4537259 - DNA, 25 bp, Homo sapien
tggttgcacaaactgctggctcagg

SEQ ID NO: 4537260 - DNA, 25 bp, Homo sapien
tattataaggagcagtgatgagatc

SEQ ID NO: 4537261 - DNA, 25 bp, Homo sapien
attataaggagcagtgatgagatct

SEQ ID NO: 4537262 - DNA, 25 bp, Homo sapien
ttattataaggagcagtgatgagat

SEQ ID NO: 4537263 - DNA, 25 bp, Homo sapien
tttattataaggagcagtgatgaga

SEQ ID NO: 4537264 - DNA, 25 bp, Homo sapien
cactgcttctgtgtgggtatggcca

SEQ ID NO: 4537265 - DNA, 25 bp, Homo sapien
agagtctcccacatctgcgaatggg

SEQ ID NO: 4537266 - DNA, 25 bp, Homo sapien
ggtcaagttcctgctatccagggag

SEQ ID NO: 4537267 - DNA, 25 bp, Homo sapien
ctccgaactctggtgaagggctgcc

SEQ ID NO: 4537268 - DNA, 25 bp, Homo sapien
caggattcctaaggccaggtgctcc

SEQ ID NO: 4537269 - DNA, 25 bp, Homo sapien
tacacagaatgcgagccatcgggtc

SEQ ID NO: 4537270 - DNA, 25 bp, Homo sapien
ttcaggtgactggtgtgcaaaggca

SEQ ID NO: 4537271 - DNA, 25 bp, Homo sapien
catctaggcatggagtgtatggcca

SEQ ID NO: 4537272 - DNA, 25 bp, Homo sapien
agtaatggacgaccactccattggg

SEQ ID NO: 4537273 - DNA, 25 bp, Homo sapien
gaacagaagtaatggacgaccactc

SEQ ID NO: 4537274 - DNA, 25 bp, Homo sapien
tccattggggtatcttgcaaatgca

SEQ ID NO: 4537275 - DNA, 25 bp, Homo sapien
ctttggaacagaagtaatggacgac

SEQ ID NO: 4537276 - DNA, 25 bp, Homo sapien
catattaaagatgggcagtgcacca

SEQ ID NO: 4537277 - DNA, 25 bp, Homo sapien
cacaaggcatattaaagatgggcag

SEQ ID NO: 4537278 - DNA, 25 bp, Homo sapien
tctgaaaaggacggcgagtttgtct

SEQ ID NO: 4537279 - DNA, 25 bp, Homo sapien
caaaacacaaggcatattaaagatg

SEQ ID NO: 4537280 - DNA, 25 bp, Homo sapien
tcccaacagatagaacaggctgctc

SEQ ID NO: 4537281 - DNA, 25 bp, Homo sapien
ccaacagatagaacaggctgctctc

SEQ ID NO: 4537282 - DNA, 25 bp, Homo sapien
ctgaaggctcaagaactaaaagttg

SEQ ID NO: 4537283 - DNA, 25 bp, Homo sapien
ctctgaaggctcaagaactaaaagt

SEQ ID NO: 4537284 - DNA, 25 bp, Homo sapien
gctggtgtaaaatccgctcttcctg

SEQ ID NO: 4537285 - DNA, 25 bp, Homo sapien
gttcccaatcttcttcttacacacc

SEQ ID NO: 4537286 - DNA, 25 bp, Homo sapien
ctgttcccaatcttcttcttacaca

SEQ ID NO: 4537287 - DNA, 25 bp, Homo sapien
tgatgatgcacttcacctgctggtg

SEQ ID NO: 4537288 - DNA, 25 bp, Homo sapien
gagaaggttcttgagcacttgattg

SEQ ID NO: 4537289 - DNA, 25 bp, Homo sapien
tgattgaaccgtttcttttgtgcat

SEQ ID NO: 4537290 - DNA, 25 bp, Homo sapien
tgagcacttgattgaaccgtttctt

SEQ ID NO: 4537291 - DNA, 25 bp, Homo sapien
gttcttgagcacttgattgaaccgt

SEQ ID NO: 4537292 - DNA, 25 bp, Homo sapien
tgcagagcggcctggaggttggctt

SEQ ID NO: 4537293 - DNA, 25 bp, Homo sapien
gcttttggctccagtagttccagct

SEQ ID NO: 4537294 - DNA, 25 bp, Homo sapien
tccagtttgctgtggtgtagctcga

SEQ ID NO: 4537295 - DNA, 25 bp, Homo sapien
ctgtggtgtagctcgaggacctgca

SEQ ID NO: 4537296 - DNA, 25 bp, Homo sapien
tacatccgaagcagggacagataca

SEQ ID NO: 4537297 - DNA, 25 bp, Homo sapien
cgacaggtacatccgaagcagggac

SEQ ID NO: 4537298 - DNA, 25 bp, Homo sapien
acaggtacatccgaagcagggacag

SEQ ID NO: 4537299 - DNA, 25 bp, Homo sapien
gggcgacaggtacatccgaagcagg

SEQ ID NO: 4537300 - DNA, 25 bp, Homo sapien
gctccctgggtcagggtcactactc

SEQ ID NO: 4537301 - DNA, 25 bp, Homo sapien
tgctccctgggtcagggtcactact

SEQ ID NO: 4537302 - DNA, 25 bp, Homo sapien
gtgctccctgggtcagggtcactac

SEQ ID NO: 4537303 - DNA, 25 bp, Homo sapien
tccctgggtcagggtcactactcac

SEQ ID NO: 4537304 - DNA, 25 bp, Homo sapien
gccatctttgtttcggtcatagtgt

SEQ ID NO: 4537305 - DNA, 25 bp, Homo sapien
tcggtcatagtgtttgtggcagtac

SEQ ID NO: 4537306 - DNA, 25 bp, Homo sapien
tgttgccatctttgtttcggtcata

SEQ ID NO: 4537307 - DNA, 25 bp, Homo sapien
ttgtttcggtcatagtgtttgtggc

SEQ ID NO: 4537308 - DNA, 25 bp, Homo sapien
tctgcagggcctgcttttagactgc

SEQ ID NO: 4537309 - DNA, 25 bp, Homo sapien
ggcctgcttttagactgcttaggag

SEQ ID NO: 4537310 - DNA, 25 bp, Homo sapien
cagggcctgcttttagactgcttag

SEQ ID NO: 4537311 - DNA, 25 bp, Homo sapien
cctgcttttagactgcttaggaggt

SEQ ID NO: 4537312 - DNA, 25 bp, Homo sapien
tcagccatccttgtatccttcaaga

SEQ ID NO: 4537313 - DNA, 25 bp, Homo sapien
atgcgccccaacaggagagctcgtt

SEQ ID NO: 4537314 - DNA, 25 bp, Homo sapien
acaggagagctcgttcttctaagag

SEQ ID NO: 4537315 - DNA, 25 bp, Homo sapien
ttgttcatgtttccccatgcgcccc

SEQ ID NO: 4537316 - DNA, 25 bp, Homo sapien
aggaatatgaggaaccactgccgcc

SEQ ID NO: 4537317 - DNA, 25 bp, Homo sapien
gctatgctgtcagaggagtggacac

SEQ ID NO: 4537318 - DNA, 25 bp, Homo sapien
gccgccatcacgcaagcacaaggtg

SEQ ID NO: 4537319 - DNA, 25 bp, Homo sapien
ggacacgaggcaatataaagggaag

SEQ ID NO: 4537320 - DNA, 25 bp, Homo sapien
ccggcctggatcatagtagctggaa

SEQ ID NO: 4537321 - DNA, 25 bp, Homo sapien
tgaggagcttttgccggtattctcc

SEQ ID NO: 4537322 - DNA, 25 bp, Homo sapien
ctggaaatctccaagaacatgagga

SEQ ID NO: 4537323 - DNA, 25 bp, Homo sapien
ttttgccggtattctcccagctcac

SEQ ID NO: 4537324 - DNA, 25 bp, Homo sapien
gatgtcaccacatgaccagaaaggg

SEQ ID NO: 4537325 - DNA, 25 bp, Homo sapien
gaaatactctgtgggcaaacctgtt

SEQ ID NO: 4537326 - DNA, 25 bp, Homo sapien
cagagaatagggtggcctgcttacc

SEQ ID NO: 4537327 - DNA, 25 bp, Homo sapien
ttcagaacttctgcgcacctgggca

SEQ ID NO: 4537328 - DNA, 25 bp, Homo sapien
catcagaccttgcaccttctcacag

SEQ ID NO: 4537329 - DNA, 25 bp, Homo sapien
gcaccttctcacagtatagctggat

SEQ ID NO: 4537330 - DNA, 25 bp, Homo sapien
agctggatcaggcagttgtggaacc

SEQ ID NO: 4537331 - DNA, 25 bp, Homo sapien
ttgtggaaccgagagcctgtctcct

SEQ ID NO: 4537332 - DNA, 25 bp, Homo sapien
gacccagtaacgtgaggagccatct

SEQ ID NO: 4537333 - DNA, 25 bp, Homo sapien
gacagctcgtctaaagccaccagga

SEQ ID NO: 4537334 - DNA, 25 bp, Homo sapien
gataacagaaccacgcagtcctgga

SEQ ID NO: 4537335 - DNA, 25 bp, Homo sapien
gaagtttcacaatgcgacccagtaa

SEQ ID NO: 4537336 - DNA, 25 bp, Homo sapien
ccacttccgggagatcttcagtaaa

SEQ ID NO: 4537337 - DNA, 25 bp, Homo sapien
cgtggcagagactccacttccggga

SEQ ID NO: 4537338 - DNA, 25 bp, Homo sapien
taaaattctctattaagaagccgag

SEQ ID NO: 4537339 - DNA, 25 bp, Homo sapien
taagaagccgaggactcgatcacgt

SEQ ID NO: 4537340 - DNA, 25 bp, Homo sapien
ccacactgagtaggagaaaatcaaa

SEQ ID NO: 4537341 - DNA, 25 bp, Homo sapien
cacactgagtaggagaaaatcaaat

SEQ ID NO: 4537342 - DNA, 25 bp, Homo sapien
cccacactgagtaggagaaaatcaa

SEQ ID NO: 4537343 - DNA, 25 bp, Homo sapien
tgcagatactgcactgtcctctcgt

SEQ ID NO: 4537344 - DNA, 25 bp, Homo sapien
actgtcctctcgtggcctttcagag

SEQ ID NO: 4537345 - DNA, 25 bp, Homo sapien
gatgctgcagatactgcactgtcct

SEQ ID NO: 4537346 - DNA, 25 bp, Homo sapien
tactgcactgtcctctcgtggcctt

SEQ ID NO: 4537347 - DNA, 25 bp, Homo sapien
ttggactggtccacgagcacctgca

SEQ ID NO: 4537348 - DNA, 25 bp, Homo sapien
cttggactggtccacgagcacctgc

SEQ ID NO: 4537349 - DNA, 25 bp, Homo sapien
gactggtccacgagcacctgcagag

SEQ ID NO: 4537350 - DNA, 25 bp, Homo sapien
tggactggtccacgagcacctgcag

SEQ ID NO: 4537351 - DNA, 25 bp, Homo sapien
ttctttagcacgtgctcgctctcct

SEQ ID NO: 4537352 - DNA, 25 bp, Homo sapien
gctctcctcgatgtggcagtgattg

SEQ ID NO: 4537353 - DNA, 25 bp, Homo sapien
tctcatacaggatgataagctcact

SEQ ID NO: 4537354 - DNA, 25 bp, Homo sapien
ggatgataagctcactgtacttgtg

SEQ ID NO: 4537355 - DNA, 25 bp, Homo sapien
caagggggccaccagggccacattt

SEQ ID NO: 4537356 - DNA, 25 bp, Homo sapien
agcaagggggccaccagggccacat

SEQ ID NO: 4537357 - DNA, 25 bp, Homo sapien
agggggccaccagggccacatttgt

SEQ ID NO: 4537358 - DNA, 25 bp, Homo sapien
ctccaggcgtagcaagggggccacc

SEQ ID NO: 4537359 - DNA, 25 bp, Homo sapien
caggaatgtagcacaagcaagagaa

SEQ ID NO: 4537360 - DNA, 25 bp, Homo sapien
caggcctgctctaggctgaaaggcc

SEQ ID NO: 4537361 - DNA, 25 bp, Homo sapien
tttatggaccttcgcacaatgtgtt

SEQ ID NO: 4537362 - DNA, 25 bp, Homo sapien
gaaagagcaggagttcagtggaaac

SEQ ID NO: 4537363 - DNA, 25 bp, Homo sapien
cttccatgagcggtgaggtgcttga

SEQ ID NO: 4537364 - DNA, 25 bp, Homo sapien
atttgatggtgggagtgccttccat

SEQ ID NO: 4537365 - DNA, 25 bp, Homo sapien
gatcagagtcattcagcttctttac

SEQ ID NO: 4537366 - DNA, 25 bp, Homo sapien
aggtgcttgactggtgatcagagtc

SEQ ID NO: 4537367 - DNA, 25 bp, Homo sapien
ggtagtcaatcagagctaagtgagc

SEQ ID NO: 4537368 - DNA, 25 bp, Homo sapien
gtcaggtagtcaatcagagctaagt

SEQ ID NO: 4537369 - DNA, 25 bp, Homo sapien
gtcaatcagagctaagtgagccttc

SEQ ID NO: 4537370 - DNA, 25 bp, Homo sapien
atcagagctaagtgagccttctcca

SEQ ID NO: 4537371 - DNA, 25 bp, Homo sapien
caggcaatgggttgggatactgcaa

SEQ ID NO: 4537372 - DNA, 25 bp, Homo sapien
caatgggttgggatactgcaactgc

SEQ ID NO: 4537373 - DNA, 25 bp, Homo sapien
cacaggcaatgggttgggatactgc

SEQ ID NO: 4537374 - DNA, 25 bp, Homo sapien
agagcacaggcaatgggttgggata

SEQ ID NO: 4537375 - DNA, 25 bp, Homo sapien
cagggtacaggcccatcacatgggt

SEQ ID NO: 4537376 - DNA, 25 bp, Homo sapien
tacaggcccatcacatgggtgggat

SEQ ID NO: 4537377 - DNA, 25 bp, Homo sapien
agcaggtcagggtacaggcccatca

SEQ ID NO: 4537378 - DNA, 25 bp, Homo sapien
ggtacaggcccatcacatgggtggg

SEQ ID NO: 4537379 - DNA, 25 bp, Homo sapien
tatatggaaggtaaacatgattcct

SEQ ID NO: 4537380 - DNA, 25 bp, Homo sapien
ctatatggaaggtaaacatgattcc

SEQ ID NO: 4537381 - DNA, 25 bp, Homo sapien
tggtgcacgttaacaatgtcaaaga

SEQ ID NO: 4537382 - DNA, 25 bp, Homo sapien
atgaccaaaagacaagaccaactga

SEQ ID NO: 4537383 - DNA, 25 bp, Homo sapien
gacaagaccaactgacaagagaata

SEQ ID NO: 4537384 - DNA, 25 bp, Homo sapien
gaatcaaaatggtgcacgttaacaa

SEQ ID NO: 4537385 - DNA, 25 bp, Homo sapien
tccctagcagtcagggttctaagtg

SEQ ID NO: 4537386 - DNA, 25 bp, Homo sapien
gctgtaagtagccaacatatcccct

SEQ ID NO: 4537387 - DNA, 25 bp, Homo sapien
tgtggaacactatggtgtatggtca

SEQ ID NO: 4537388 - DNA, 25 bp, Homo sapien
ggtcaattggcacttcccatccatt

SEQ ID NO: 4537389 - DNA, 25 bp, Homo sapien
tatagcagcactctaaagcaagcag

SEQ ID NO: 4537390 - DNA, 25 bp, Homo sapien
cactcatgtctagaggtttcaggac

SEQ ID NO: 4537391 - DNA, 25 bp, Homo sapien
agtaactctaccagacctcaggcag

SEQ ID NO: 4537392 - DNA, 25 bp, Homo sapien
taagtgccacacactgttcaaagca

SEQ ID NO: 4537393 - DNA, 25 bp, Homo sapien
tatgaggatcaatttagctgagcct

SEQ ID NO: 4537394 - DNA, 25 bp, Homo sapien
gtatagatatgtaaccactgtggtc

SEQ ID NO: 4537395 - DNA, 25 bp, Homo sapien
tggtcaccccacaggatcttgctag

SEQ ID NO: 4537396 - DNA, 25 bp, Homo sapien
cattagtcccttatataaaggcctc

SEQ ID NO: 4537397 - DNA, 25 bp, Homo sapien
cttgatgtgatgaatttgttgctgc

SEQ ID NO: 4537398 - DNA, 25 bp, Homo sapien
atggactcatcaaaacgcttctggc

SEQ ID NO: 4537399 - DNA, 25 bp, Homo sapien
gactcatcaaaacgcttctggcaga

SEQ ID NO: 4537400 - DNA, 25 bp, Homo sapien
tcatcaaaacgcttctggcagaaga

SEQ ID NO: 4537401 - DNA, 25 bp, Homo sapien
taaacggtcaactcaagtgtccagc

SEQ ID NO: 4537402 - DNA, 25 bp, Homo sapien
gctccaaatgcgatagacacaggcc

SEQ ID NO: 4537403 - DNA, 25 bp, Homo sapien
catcatcaacatgtggctgtccctg

SEQ ID NO: 4537404 - DNA, 25 bp, Homo sapien
tgtccagccgtaggatgccttttcc

SEQ ID NO: 4537405 - DNA, 25 bp, Homo sapien
cgagctgcagagccaattcaaactg

SEQ ID NO: 4537406 - DNA, 25 bp, Homo sapien
gagaagttgttggatttgggttgcc

SEQ ID NO: 4537407 - DNA, 25 bp, Homo sapien
caacactgcaatgatgtagggaggc

SEQ ID NO: 4537408 - DNA, 25 bp, Homo sapien
ggcctttgcaattcaatgctttgga

SEQ ID NO: 4537409 - DNA, 25 bp, Homo sapien
aagcctcggttcaaatgttcggatc

SEQ ID NO: 4537410 - DNA, 25 bp, Homo sapien
tcggatctcaacatatcgaggcaac

SEQ ID NO: 4537411 - DNA, 25 bp, Homo sapien
tgatcccactcctgccttattcccc

SEQ ID NO: 4537412 - DNA, 25 bp, Homo sapien
gctcctttttcatcagtcacaaagc

SEQ ID NO: 4537413 - DNA, 25 bp, Homo sapien
aaattgctttgcttgagttatgatc

SEQ ID NO: 4537414 - DNA, 25 bp, Homo sapien
tgatcagagaaatctcttgcacaaa

SEQ ID NO: 4537415 - DNA, 25 bp, Homo sapien
tgaaagtaacccaagtatccacgaa

SEQ ID NO: 4537416 - DNA, 25 bp, Homo sapien
gttctgaagatctattgtaccacaa

SEQ ID NO: 4537417 - DNA, 25 bp, Homo sapien
caatgttaacatacgtaataccact

SEQ ID NO: 4537418 - DNA, 25 bp, Homo sapien
ttaaacaaggcagtcacagaaagac

SEQ ID NO: 4537419 - DNA, 25 bp, Homo sapien
tatatgcgtacagcacgatgcccag

SEQ ID NO: 4537420 - DNA, 25 bp, Homo sapien
catgagtcgctgcactagtttaatt

SEQ ID NO: 4537421 - DNA, 25 bp, Homo sapien
gaacgctactgctattatactgata

SEQ ID NO: 4537422 - DNA, 25 bp, Homo sapien
gctatgagggaactcagaaatgagt

SEQ ID NO: 4537423 - DNA, 25 bp, Homo sapien
gactggctggtgtacagcaggcata

SEQ ID NO: 4537424 - DNA, 25 bp, Homo sapien
ggactcaaagtggatcaagacatgc

SEQ ID NO: 4537425 - DNA, 25 bp, Homo sapien
gaacagaggagacagatcgctcacg

SEQ ID NO: 4537426 - DNA, 25 bp, Homo sapien
tcacagagctcctacaggaacagag

SEQ ID NO: 4537427 - DNA, 25 bp, Homo sapien
tgctaaagctacgaatgggactccg

SEQ ID NO: 4537428 - DNA, 25 bp, Homo sapien
gggactccgttctgcaggaatggca

SEQ ID NO: 4537429 - DNA, 25 bp, Homo sapien
gaatgacacaacgtaaaccagtctg

SEQ ID NO: 4537430 - DNA, 25 bp, Homo sapien
taaaactcagcttcttgcaagaact

SEQ ID NO: 4537431 - DNA, 25 bp, Homo sapien
cctcattgagtaccacggtgagatc

SEQ ID NO: 4537432 - DNA, 25 bp, Homo sapien
gagtaccacggtgagatcatcctgg

SEQ ID NO: 4537433 - DNA, 25 bp, Homo sapien
tgccagaggtgcaactaagggctcc

SEQ ID NO: 4537434 - DNA, 25 bp, Homo sapien
ggtatgtccgtccagttcagggcac

SEQ ID NO: 4537435 - DNA, 25 bp, Homo sapien
ggcacatctggcacactaaagtccc

SEQ ID NO: 4537436 - DNA, 25 bp, Homo sapien
tctcttgaaacccacacagatagaa

SEQ ID NO: 4537437 - DNA, 25 bp, Homo sapien
ccttattaggtagtagtctctcttg

SEQ ID NO: 4537438 - DNA, 25 bp, Homo sapien
gatagaattttcacaccacgccatg

SEQ ID NO: 4537439 - DNA, 25 bp, Homo sapien
taacacctcctcaccggtctctgtg

SEQ ID NO: 4537440 - DNA, 25 bp, Homo sapien
tccagaaatagagctgcagcttctt

SEQ ID NO: 4537441 - DNA, 25 bp, Homo sapien
ttttactgccacacacatccgtaac

SEQ ID NO: 4537442 - DNA, 25 bp, Homo sapien
tccctgtccttccagaaatagagct

SEQ ID NO: 4537443 - DNA, 25 bp, Homo sapien
cctttgcctttgaaaccgtagtgat

SEQ ID NO: 4537444 - DNA, 25 bp, Homo sapien
caataggtcatggacataaatgtta

SEQ ID NO: 4537445 - DNA, 25 bp, Homo sapien
ccgtagtgatttgttgaaatgtcaa

SEQ ID NO: 4537446 - DNA, 25 bp, Homo sapien
ctggaggtcacaagtaaacagtgat

SEQ ID NO: 4537447 - DNA, 25 bp, Homo sapien
tgaccagaatcttaaactgggaaac

SEQ ID NO: 4537448 - DNA, 25 bp, Homo sapien
cagaatcttaaactgggaaaccaca

SEQ ID NO: 4537449 - DNA, 25 bp, Homo sapien
agctgaccagaatcttaaactggga

SEQ ID NO: 4537450 - DNA, 25 bp, Homo sapien
gaatcttaaactgggaaaccacatg

SEQ ID NO: 4537451 - DNA, 25 bp, Homo sapien
gagaggatctcaggcacatgatata

SEQ ID NO: 4537452 - DNA, 25 bp, Homo sapien
caaatattcttgtaaggactgccat

SEQ ID NO: 4537453 - DNA, 25 bp, Homo sapien
cagacactcctgcataaatagaagg

SEQ ID NO: 4537454 - DNA, 25 bp, Homo sapien
tctagtctgacagggtctcatgtaa

SEQ ID NO: 4537455 - DNA, 25 bp, Homo sapien
ctagtgtcacttcaaatctgttgca

SEQ ID NO: 4537456 - DNA, 25 bp, Homo sapien
ctctagtgtcacttcaaatctgttg

SEQ ID NO: 4537457 - DNA, 25 bp, Homo sapien
agtgtcacttcaaatctgttgcaac

SEQ ID NO: 4537458 - DNA, 25 bp, Homo sapien
ttctctagtgtcacttcaaatctgt

SEQ ID NO: 4537459 - DNA, 25 bp, Homo sapien
ttcaggtgatgctacatctgctggc

SEQ ID NO: 4537460 - DNA, 25 bp, Homo sapien
ctttcaggtgatgctacatctgctg

SEQ ID NO: 4537461 - DNA, 25 bp, Homo sapien
tcaggtgatgctacatctgctggca

SEQ ID NO: 4537462 - DNA, 25 bp, Homo sapien
tttcaggtgatgctacatctgctgg

SEQ ID NO: 4537463 - DNA, 25 bp, Homo sapien
aagatgtccttgtttggttcccaca

SEQ ID NO: 4537464 - DNA, 25 bp, Homo sapien
tccgaatcctatagagaagaagatg

SEQ ID NO: 4537465 - DNA, 25 bp, Homo sapien
caacgtccttccgaatcctatagag

SEQ ID NO: 4537466 - DNA, 25 bp, Homo sapien
tcctatagagaagaagatgtccttg

SEQ ID NO: 4537467 - DNA, 25 bp, Homo sapien
ggcagcttttctaggatcggcactg

SEQ ID NO: 4537468 - DNA, 25 bp, Homo sapien
tcgatttgcagaggcagcttttcta

SEQ ID NO: 4537469 - DNA, 25 bp, Homo sapien
tctaggatcggcactggctcgaaag

SEQ ID NO: 4537470 - DNA, 25 bp, Homo sapien
aggcagccagacagtcgatttgcag

SEQ ID NO: 4537471 - DNA, 25 bp, Homo sapien
ctcgcccagagtgttccgggccggg

SEQ ID NO: 4537472 - DNA, 25 bp, Homo sapien
gggagagttgccaccgccgtctcgc

SEQ ID NO: 4537473 - DNA, 25 bp, Homo sapien
cgccgtctcgcccagagtgttccgg

SEQ ID NO: 4537474 - DNA, 25 bp, Homo sapien
ggggagagttgccaccgccgtctcg

SEQ ID NO: 4537475 - DNA, 25 bp, Homo sapien
cggctacaggcccttcaacaacaca

SEQ ID NO: 4537476 - DNA, 25 bp, Homo sapien
tctgggctaagggtagaccgggatc

SEQ ID NO: 4537477 - DNA, 25 bp, Homo sapien
ctggggtccggaacgagtctgggct

SEQ ID NO: 4537478 - DNA, 25 bp, Homo sapien
aacaacacagccatcgtcaaccccg

SEQ ID NO: 4537479 - DNA, 25 bp, Homo sapien
ccatggagccgtacagaagactgac

SEQ ID NO: 4537480 - DNA, 25 bp, Homo sapien
catcctaaagaacgagcagcagtcc

SEQ ID NO: 4537481 - DNA, 25 bp, Homo sapien
gcattacagttcctctagcacggtg

SEQ ID NO: 4537482 - DNA, 25 bp, Homo sapien
tgtttaaattaagccagcaggacct

SEQ ID NO: 4537483 - DNA, 25 bp, Homo sapien
tttcaaagtgtgtgatcattcgttc

SEQ ID NO: 4537484 - DNA, 25 bp, Homo sapien
ggaacctgcacgagagactgttttc

SEQ ID NO: 4537485 - DNA, 25 bp, Homo sapien
cagagtaagcaggtagaatccccaa

SEQ ID NO: 4537486 - DNA, 25 bp, Homo sapien
gaagtttggactagcaagcatgagc

SEQ ID NO: 4537487 - DNA, 25 bp, Homo sapien
tgcctgagtccgagagctaaaaaca

SEQ ID NO: 4537488 - DNA, 25 bp, Homo sapien
caaataattagcagaggaagacctc

SEQ ID NO: 4537489 - DNA, 25 bp, Homo sapien
gatgtgggaacagcagaatatacca

SEQ ID NO: 4537490 - DNA, 25 bp, Homo sapien
tgtgtcaaagatcatgtcagtggga

SEQ ID NO: 4537491 - DNA, 25 bp, Homo sapien
tcccatgaagggcacaatcaggttt

SEQ ID NO: 4537492 - DNA, 25 bp, Homo sapien
ggtgtatgccaccatctccggctaa

SEQ ID NO: 4537493 - DNA, 25 bp, Homo sapien
cctgacctcaactgatcctcctgcc

SEQ ID NO: 4537494 - DNA, 25 bp, Homo sapien
acctcaactgatcctcctgcctagg

SEQ ID NO: 4537495 - DNA, 25 bp, Homo sapien
tgacctcaactgatcctcctgccta

SEQ ID NO: 4537496 - DNA, 25 bp, Homo sapien
tacataatttatgcacgtgaattga

SEQ ID NO: 4537497 - DNA, 25 bp, Homo sapien
tctatttagtcaccatatacataat

SEQ ID NO: 4537498 - DNA, 25 bp, Homo sapien
gactttctatttagtcaccatatac

SEQ ID NO: 4537499 - DNA, 25 bp, Homo sapien
ttatgcacgtgaattgagtaccaac

SEQ ID NO: 4537500 - DNA, 25 bp, Homo sapien
tgaatccagaagggctggaagtgct

SEQ ID NO: 4537501 - DNA, 25 bp, Homo sapien
tcatctgaatccagaagggctggaa

SEQ ID NO: 4537502 - DNA, 25 bp, Homo sapien
ctcatctgaatccagaagggctgga

SEQ ID NO: 4537503 - DNA, 25 bp, Homo sapien
tctgaatccagaagggctggaagtg

SEQ ID NO: 4537504 - DNA, 25 bp, Homo sapien
gagaaatactaaattgaacaatgta

SEQ ID NO: 4537505 - DNA, 25 bp, Homo sapien
gctaaatctttctaagcagaaatgt

SEQ ID NO: 4537506 - DNA, 25 bp, Homo sapien
ttcaaaaggagtatcccattcattt

SEQ ID NO: 4537507 - DNA, 25 bp, Homo sapien
ttttgcaatgcaacaggaccaatgt

SEQ ID NO: 4537508 - DNA, 25 bp, Homo sapien
agaagaaggaacattctcttctacc

SEQ ID NO: 4537509 - DNA, 25 bp, Homo sapien
atctgtcacagaagaaggaacattc

SEQ ID NO: 4537510 - DNA, 25 bp, Homo sapien
tcttctacccacttcaaatcatctt

SEQ ID NO: 4537511 - DNA, 25 bp, Homo sapien
acatctgtcacagaagaaggaacat

SEQ ID NO: 4537512 - DNA, 25 bp, Homo sapien
tgggttcttgtttggtacttctcat

SEQ ID NO: 4537513 - DNA, 25 bp, Homo sapien
actatttccattgggttcttgtttg

SEQ ID NO: 4537514 - DNA, 25 bp, Homo sapien
tttcagcataggctccttttgttca

SEQ ID NO: 4537515 - DNA, 25 bp, Homo sapien
ctttcagcataggctccttttgttc

SEQ ID NO: 4537516 - DNA, 25 bp, Homo sapien
ttcagcataggctccttttgttcat

SEQ ID NO: 4537517 - DNA, 25 bp, Homo sapien
cagtttacaagtgggaagctcagaa

SEQ ID NO: 4537518 - DNA, 25 bp, Homo sapien
aaaatcgcagccttcaaattgggag

SEQ ID NO: 4537519 - DNA, 25 bp, Homo sapien
gcagctcccagacatgtaattccta

SEQ ID NO: 4537520 - DNA, 25 bp, Homo sapien
gagaagggaggcctattccaggtaa

SEQ ID NO: 4537521 - DNA, 25 bp, Homo sapien
ccatcaactgatgagaatcccttga

SEQ ID NO: 4537522 - DNA, 25 bp, Homo sapien
taaaagttgcattcgtaagagtcac

SEQ ID NO: 4537523 - DNA, 25 bp, Homo sapien
tggagagatgccatactcaaggaat

SEQ ID NO: 4537524 - DNA, 25 bp, Homo sapien
ggcaacagcattcctacatatttgg

SEQ ID NO: 4537525 - DNA, 25 bp, Homo sapien
ccatgcccagctaacctaaaacaat

SEQ ID NO: 4537526 - DNA, 25 bp, Homo sapien
catgcccagctaacctaaaacaatt

SEQ ID NO: 4537527 - DNA, 25 bp, Homo sapien
atgcccagctaacctaaaacaattt

SEQ ID NO: 4537528 - DNA, 25 bp, Homo sapien
tgtccgcttcagcctcccaaagtgc

SEQ ID NO: 4537529 - DNA, 25 bp, Homo sapien
ttttctagttggtcaaactggtctc

SEQ ID NO: 4537530 - DNA, 25 bp, Homo sapien
gtccgcttcagcctcccaaagtgct

SEQ ID NO: 4537531 - DNA, 25 bp, Homo sapien
tttctagttggtcaaactggtctcg

SEQ ID NO: 4537532 - DNA, 25 bp, Homo sapien
gctaggcagttcctaaatgactgaa

SEQ ID NO: 4537533 - DNA, 25 bp, Homo sapien
actgaaatttgcctatagttggaca

SEQ ID NO: 4537534 - DNA, 25 bp, Homo sapien
gcaaggccattttcatggagtaaaa

SEQ ID NO: 4537535 - DNA, 25 bp, Homo sapien
tcttaaccgtctaaatgcaaatggg

SEQ ID NO: 4537536 - DNA, 25 bp, Homo sapien
gcaccacccctaattgatgacatgg

SEQ ID NO: 4537537 - DNA, 25 bp, Homo sapien
catggtcatctcatgttagcagagt

SEQ ID NO: 4537538 - DNA, 25 bp, Homo sapien
gagctgagataggaacccagttctt

SEQ ID NO: 4537539 - DNA, 25 bp, Homo sapien
gctttatcgtgatggtctgaaacca

SEQ ID NO: 4537540 - DNA, 25 bp, Homo sapien
gacaaagaggatcatggagaacagc

SEQ ID NO: 4537541 - DNA, 25 bp, Homo sapien
aacagcaagcgccagatggcatcgt

SEQ ID NO: 4537542 - DNA, 25 bp, Homo sapien
ccagagaaccatgatgacaaagagg

SEQ ID NO: 4537543 - DNA, 25 bp, Homo sapien
tctggttgtttgcagatggtcgcca

SEQ ID NO: 4537544 - DNA, 25 bp, Homo sapien
cattattcataaatgtgcttataac

SEQ ID NO: 4537545 - DNA, 25 bp, Homo sapien
ttgtttataagacagtacattattc

SEQ ID NO: 4537546 - DNA, 25 bp, Homo sapien
gtttataagacagtacattattcat

SEQ ID NO: 4537547 - DNA, 25 bp, Homo sapien
attcataaatgtgcttataactcac

SEQ ID NO: 4537548 - DNA, 25 bp, Homo sapien
gaacttcatggttgtccagatgata

SEQ ID NO: 4537549 - DNA, 25 bp, Homo sapien
tgaacttcatggttgtccagatgat

SEQ ID NO: 4537550 - DNA, 25 bp, Homo sapien
catggttgtccagatgataaacaca

SEQ ID NO: 4537551 - DNA, 25 bp, Homo sapien
cttcatggttgtccagatgataaac

SEQ ID NO: 4537552 - DNA, 25 bp, Homo sapien
gtatgaatgctggtttacatcccca

SEQ ID NO: 4537553 - DNA, 25 bp, Homo sapien
tggctacatcagtaaccagtgtggt

SEQ ID NO: 4537554 - DNA, 25 bp, Homo sapien
gcaaggctcatgatacatactctgg

SEQ ID NO: 4537555 - DNA, 25 bp, Homo sapien
aaatggctgataaaacgactgtaac

SEQ ID NO: 4537556 - DNA, 25 bp, Homo sapien
cgtgttggtgaaatgccgatacaaa

SEQ ID NO: 4537557 - DNA, 25 bp, Homo sapien
gccgatacaaagagagttttacaat

SEQ ID NO: 4537558 - DNA, 25 bp, Homo sapien
caaagagagttttacaatgttcctc

SEQ ID NO: 4537559 - DNA, 25 bp, Homo sapien
actgccaaaataagcgtgttggtga

SEQ ID NO: 4537560 - DNA, 25 bp, Homo sapien
gtttgcaggtcaaggaattcaacat

SEQ ID NO: 4537561 - DNA, 25 bp, Homo sapien
tacctggccggaagtcatcattttc

SEQ ID NO: 4537562 - DNA, 25 bp, Homo sapien
acctggccggaagtcatcattttca

SEQ ID NO: 4537563 - DNA, 25 bp, Homo sapien
caccatacctggccggaagtcatca

SEQ ID NO: 4537564 - DNA, 25 bp, Homo sapien
catacctggccggaagtcatcattt

SEQ ID NO: 4537565 - DNA, 25 bp, Homo sapien
aaggccaaggaagcaagatcagtct

SEQ ID NO: 4537566 - DNA, 25 bp, Homo sapien
aaaggccaaggaagcaagatcagtc

SEQ ID NO: 4537567 - DNA, 25 bp, Homo sapien
caggcgtcaattgctgagagggcca

SEQ ID NO: 4537568 - DNA, 25 bp, Homo sapien
tactatcagagtcaagggataagaa

SEQ ID NO: 4537569 - DNA, 25 bp, Homo sapien
tgagagggccaggtttactatcaga

SEQ ID NO: 4537570 - DNA, 25 bp, Homo sapien
ccataaaataacacaggcgtcaatt

SEQ ID NO: 4537571 - DNA, 25 bp, Homo sapien
tatgaagagtgactccaaggcgtgg

SEQ ID NO: 4537572 - DNA, 25 bp, Homo sapien
tgaggaccccttccatgccagagaa

SEQ ID NO: 4537573 - DNA, 25 bp, Homo sapien
agaacaaaagatagagggctcctgc

SEQ ID NO: 4537574 - DNA, 25 bp, Homo sapien
cctgctactacaaccttatgaagag

SEQ ID NO: 4537575 - DNA, 25 bp, Homo sapien
tgacgatgccatatcccagactgac

SEQ ID NO: 4537576 - DNA, 25 bp, Homo sapien
cagggttcgagccagtgagcgtttc

SEQ ID NO: 4537577 - DNA, 25 bp, Homo sapien
actgactatgatgaccagggttcga

SEQ ID NO: 4537578 - DNA, 25 bp, Homo sapien
tgagcgtttcactgctgaaagcagc

SEQ ID NO: 4537579 - DNA, 25 bp, Homo sapien
cagattctcctttgtatcggatatt

SEQ ID NO: 4537580 - DNA, 25 bp, Homo sapien
tattctgaaattccgcatagaagac

SEQ ID NO: 4537581 - DNA, 25 bp, Homo sapien
aattccgcatagaagacagctttct

SEQ ID NO: 4537582 - DNA, 25 bp, Homo sapien
tctcctttgtatcggatattctgaa

SEQ ID NO: 4537583 - DNA, 25 bp, Homo sapien
caggagatctctccagtagcaggca

SEQ ID NO: 4537584 - DNA, 25 bp, Homo sapien
caaaactgaattctcaggagatctc

SEQ ID NO: 4537585 - DNA, 25 bp, Homo sapien
tctctccagtagcaggcagaccatg

SEQ ID NO: 4537586 - DNA, 25 bp, Homo sapien
gacagcaccaatccaaaactgaatt

SEQ ID NO: 4537587 - DNA, 25 bp, Homo sapien
cagagaagactacatatgaacttgt

SEQ ID NO: 4537588 - DNA, 25 bp, Homo sapien
tgaacttgtcctcaagagcgaatgc

SEQ ID NO: 4537589 - DNA, 25 bp, Homo sapien
gaaagcattatcttgtcttgagcag

SEQ ID NO: 4537590 - DNA, 25 bp, Homo sapien
gaatcaatatacagtcttaacaagt

SEQ ID NO: 4537591 - DNA, 25 bp, Homo sapien
tagcaagactctgtccctacaaaaa

SEQ ID NO: 4537592 - DNA, 25 bp, Homo sapien
atagcaagactctgtccctacaaaa

SEQ ID NO: 4537593 - DNA, 25 bp, Homo sapien
ttaggccaggcatggtggctcatgc

SEQ ID NO: 4537594 - DNA, 25 bp, Homo sapien
aaaaataaaaattaggccaggcatg

SEQ ID NO: 4537595 - DNA, 25 bp, Homo sapien
gatattctgagacacagacgtatgc

SEQ ID NO: 4537596 - DNA, 25 bp, Homo sapien
ttaggatacatctagaggcaaggaa

SEQ ID NO: 4537597 - DNA, 25 bp, Homo sapien
aatggcatgatgattaggatacatc

SEQ ID NO: 4537598 - DNA, 25 bp, Homo sapien
tcagctcacgatctaaaattatata

SEQ ID NO: 4537599 - DNA, 25 bp, Homo sapien
caagggtatactgactctctcaaag

SEQ ID NO: 4537600 - DNA, 25 bp, Homo sapien
ctcaaagtcccagtctaataagaaa

SEQ ID NO: 4537601 - DNA, 25 bp, Homo sapien
gaatactgccacaaaacatgggaca

SEQ ID NO: 4537602 - DNA, 25 bp, Homo sapien
gaacccaaaaccatccaatactgag

SEQ ID NO: 4537603 - DNA, 25 bp, Homo sapien
tgaggtattcatagggacccttcac

SEQ ID NO: 4537604 - DNA, 25 bp, Homo sapien
caagggatagtcttcaagtgtgagg

SEQ ID NO: 4537605 - DNA, 25 bp, Homo sapien
tcttcaagtgtgaggtattcatagg

SEQ ID NO: 4537606 - DNA, 25 bp, Homo sapien
aatcatcaagggatagtcttcaagt

SEQ ID NO: 4537607 - DNA, 25 bp, Homo sapien
gaacactggtaactgtgccttgaga

SEQ ID NO: 4537608 - DNA, 25 bp, Homo sapien
caagtagtggtatcccagaagttca

SEQ ID NO: 4537609 - DNA, 25 bp, Homo sapien
caatacagccagtaaagtcaggagc

SEQ ID NO: 4537610 - DNA, 25 bp, Homo sapien
tcatgggcctaaaaagacaggagga

SEQ ID NO: 4537611 - DNA, 25 bp, Homo sapien
gccaagtttgcaatggttcatgcat

SEQ ID NO: 4537612 - DNA, 25 bp, Homo sapien
tgaggatgaaatgccaatatgtaca

SEQ ID NO: 4537613 - DNA, 25 bp, Homo sapien
gcatcttgccaagtttgcaatggtt

SEQ ID NO: 4537614 - DNA, 25 bp, Homo sapien
taaaaagattactcagtgaattttc

SEQ ID NO: 4537615 - DNA, 25 bp, Homo sapien
tattagccctttgtcggatgggtga

SEQ ID NO: 4537616 - DNA, 25 bp, Homo sapien
gctctttaattagttctgatttatc

SEQ ID NO: 4537617 - DNA, 25 bp, Homo sapien
cctttgtcggatgggtgaattgtaa

SEQ ID NO: 4537618 - DNA, 25 bp, Homo sapien
gtttcagtcatgaagtccttcccta

SEQ ID NO: 4537619 - DNA, 25 bp, Homo sapien
tcgcatcgatgttcatcggggatag

SEQ ID NO: 4537620 - DNA, 25 bp, Homo sapien
tccaactggtcctggacttatttta

SEQ ID NO: 4537621 - DNA, 25 bp, Homo sapien
caactggtcctggacttattttagt

SEQ ID NO: 4537622 - DNA, 25 bp, Homo sapien
atcttggtggacatgctttttgatg

SEQ ID NO: 4537623 - DNA, 25 bp, Homo sapien
aatgttggcctaccttgctaggtgg

SEQ ID NO: 4537624 - DNA, 25 bp, Homo sapien
atgttggcctaccttgctaggtggg

SEQ ID NO: 4537625 - DNA, 25 bp, Homo sapien
taccaatcagatgtagatttggcct

SEQ ID NO: 4537626 - DNA, 25 bp, Homo sapien
tgtagatttggccttttcacacagt

SEQ ID NO: 4537627 - DNA, 25 bp, Homo sapien
ttgatgctgtcagacagacagccta

SEQ ID NO: 4537628 - DNA, 25 bp, Homo sapien
taagcactgcattgtcaaaaatgca

SEQ ID NO: 4537629 - DNA, 25 bp, Homo sapien
caagtgacaatccagttattgatgc

SEQ ID NO: 4537630 - DNA, 25 bp, Homo sapien
gcctacaagagtagttttgttccca

SEQ ID NO: 4537631 - DNA, 25 bp, Homo sapien
accttgggccttaaaaagtgctgag

SEQ ID NO: 4537632 - DNA, 25 bp, Homo sapien
taatgaaataggatggaggtactga

SEQ ID NO: 4537633 - DNA, 25 bp, Homo sapien
cacacccggcccataaacatatatg

SEQ ID NO: 4537634 - DNA, 25 bp, Homo sapien
ctgaatttgtgagtatcctttttgc

SEQ ID NO: 4537635 - DNA, 25 bp, Homo sapien
catgggagccaatccctaatgaatg

SEQ ID NO: 4537636 - DNA, 25 bp, Homo sapien
aaactcgtaagctctagcgatctgc

SEQ ID NO: 4537637 - DNA, 25 bp, Homo sapien
tatttaccaaactgacgacatgtcc

SEQ ID NO: 4537638 - DNA, 25 bp, Homo sapien
cagcgcctggcttaacgataacttt

SEQ ID NO: 4537639 - DNA, 25 bp, Homo sapien
tgtttcttcaagaaaggcatctgaa

SEQ ID NO: 4537640 - DNA, 25 bp, Homo sapien
aaatgtttcttcaagaaaggcatct

SEQ ID NO: 4537641 - DNA, 25 bp, Homo sapien
tcaacaatccaagaaatgtttcttc

SEQ ID NO: 4537642 - DNA, 25 bp, Homo sapien
gtttcttcaagaaaggcatctgaat

SEQ ID NO: 4537643 - DNA, 25 bp, Homo sapien
taaggtttgttccattctccttagc

SEQ ID NO: 4537644 - DNA, 25 bp, Homo sapien
aaagaggcagtcgatgcataaaatc

SEQ ID NO: 4537645 - DNA, 25 bp, Homo sapien
ctaaaagaggcagtcgatgcataaa

SEQ ID NO: 4537646 - DNA, 25 bp, Homo sapien
aaaagaggcagtcgatgcataaaat

SEQ ID NO: 4537647 - DNA, 25 bp, Homo sapien
taaaagaggcagtcgatgcataaaa

SEQ ID NO: 4537648 - DNA, 25 bp, Homo sapien
acatctaaaagtagtcagcctccag

SEQ ID NO: 4537649 - DNA, 25 bp, Homo sapien
gcaaccagatgcatcaggtagcttt

SEQ ID NO: 4537650 - DNA, 25 bp, Homo sapien
tttccataatcaaatccaagaaaag

SEQ ID NO: 4537651 - DNA, 25 bp, Homo sapien
tacagcacatctaaaagtagtcagc

SEQ ID NO: 4537652 - DNA, 25 bp, Homo sapien
ttacaggtacccgccaccatgcccg

SEQ ID NO: 4537653 - DNA, 25 bp, Homo sapien
gagtgcactgacactatctcagcct

SEQ ID NO: 4537654 - DNA, 25 bp, Homo sapien
ttctcccacttcagcctcccgagta

SEQ ID NO: 4537655 - DNA, 25 bp, Homo sapien
ctgggttcaagtgattctcccactt

SEQ ID NO: 4537656 - DNA, 25 bp, Homo sapien
aataggtatgatgtttcagtttggg

SEQ ID NO: 4537657 - DNA, 25 bp, Homo sapien
taataggtatgatgtttcagtttgg

SEQ ID NO: 4537658 - DNA, 25 bp, Homo sapien
gatgatgtttgatatttcccagaca

SEQ ID NO: 4537659 - DNA, 25 bp, Homo sapien
tttgatgatgtttgatatttcccag

SEQ ID NO: 4537660 - DNA, 25 bp, Homo sapien
atgatgtttgatatttcccagacaa

SEQ ID NO: 4537661 - DNA, 25 bp, Homo sapien
tgatgatgtttgatatttcccagac

SEQ ID NO: 4537662 - DNA, 25 bp, Homo sapien
cattgtaacaatcagcgcttttcag

SEQ ID NO: 4537663 - DNA, 25 bp, Homo sapien
caatcagcgcttttcagataccagg

SEQ ID NO: 4537664 - DNA, 25 bp, Homo sapien
gacaggtcacaaggttctccatcaa

SEQ ID NO: 4537665 - DNA, 25 bp, Homo sapien
aggttatattcaaagacaggtcaca

SEQ ID NO: 4537666 - DNA, 25 bp, Homo sapien
cactgttaggctaaagagggaaacg

SEQ ID NO: 4537667 - DNA, 25 bp, Homo sapien
tagttccactgagagcaaaattgct

SEQ ID NO: 4537668 - DNA, 25 bp, Homo sapien
caatgaacgaaaagcaaacatggct

SEQ ID NO: 4537669 - DNA, 25 bp, Homo sapien
catggctgtggaaggtagaaatagc

SEQ ID NO: 4537670 - DNA, 25 bp, Homo sapien
caggctgtcaagctattccaaaaga

SEQ ID NO: 4537671 - DNA, 25 bp, Homo sapien
accaatctcacaaggccagtgtcag

SEQ ID NO: 4537672 - DNA, 25 bp, Homo sapien
tcaaatataagtcactggtcaggag

SEQ ID NO: 4537673 - DNA, 25 bp, Homo sapien
tgtaagctcgatgagggaagaacat

SEQ ID NO: 4537674 - DNA, 25 bp, Homo sapien
tctgaagaggatctttccaaaacta

SEQ ID NO: 4537675 - DNA, 25 bp, Homo sapien
acttcaggaagatagtggtatttct

SEQ ID NO: 4537676 - DNA, 25 bp, Homo sapien
tgaagaggatctttccaaaactaaa

SEQ ID NO: 4537677 - DNA, 25 bp, Homo sapien
gaagatagtggtatttctgaagagg

SEQ ID NO: 4537678 - DNA, 25 bp, Homo sapien
gggacactggattctgtgaaacatc

SEQ ID NO: 4537679 - DNA, 25 bp, Homo sapien
gtttacatctcaagtcaggcactga

SEQ ID NO: 4537680 - DNA, 25 bp, Homo sapien
ctctccgtttgtacatcaagtttac

SEQ ID NO: 4537681 - DNA, 25 bp, Homo sapien
tcaggcactgaaagttctgtttttc

SEQ ID NO: 4537682 - DNA, 25 bp, Homo sapien
acaggcaacacctgaagccacgcag

SEQ ID NO: 4537683 - DNA, 25 bp, Homo sapien
tcggcagcagctacggttgccggtc

SEQ ID NO: 4537684 - DNA, 25 bp, Homo sapien
ttgccggtcccgcactgaaaaacga

SEQ ID NO: 4537685 - DNA, 25 bp, Homo sapien
ggtgacgggtgagctcccagaagca

SEQ ID NO: 4537686 - DNA, 25 bp, Homo sapien
gctctgctctaagggcgggattatc

SEQ ID NO: 4537687 - DNA, 25 bp, Homo sapien
ttcgtcccgccttcttccggctctg

SEQ ID NO: 4537688 - DNA, 25 bp, Homo sapien
ttccggctctgctctaagggcggga

SEQ ID NO: 4537689 - DNA, 25 bp, Homo sapien
agcatttcaccctcttccggttcgt

SEQ ID NO: 4537690 - DNA, 25 bp, Homo sapien
ggaaacgtcgcggagcttgtttgct

SEQ ID NO: 4537691 - DNA, 25 bp, Homo sapien
ctggaaacgtcgcggagcttgtttg

SEQ ID NO: 4537692 - DNA, 25 bp, Homo sapien
gaaacgtcgcggagcttgtttgctg

SEQ ID NO: 4537693 - DNA, 25 bp, Homo sapien
aacgtcgcggagcttgtttgctgtg

SEQ ID NO: 4537694 - DNA, 25 bp, Homo sapien
ttctgggaagctgacgttcgtggca

SEQ ID NO: 4537695 - DNA, 25 bp, Homo sapien
cataggtcctctaatgctgattcag

SEQ ID NO: 4537696 - DNA, 25 bp, Homo sapien
caaagctgtgaactatgtgactact

SEQ ID NO: 4537697 - DNA, 25 bp, Homo sapien
gactactatagttcctgccctgcag

SEQ ID NO: 4537698 - DNA, 25 bp, Homo sapien
aataatgttaaagccgaaactgatg

SEQ ID NO: 4537699 - DNA, 25 bp, Homo sapien
taaagccgaaactgatgtctacaca

SEQ ID NO: 4537700 - DNA, 25 bp, Homo sapien
tatatacacaagtcaaaaagttggg

SEQ ID NO: 4537701 - DNA, 25 bp, Homo sapien
aaaagttgtatatacacaagtcaaa

SEQ ID NO: 4537702 - DNA, 25 bp, Homo sapien
acgaggctagaaagacacgcagggc

SEQ ID NO: 4537703 - DNA, 25 bp, Homo sapien
gggagggtggtatgtaacgaggcta

SEQ ID NO: 4537704 - DNA, 25 bp, Homo sapien
tggtatgtaacgaggctagaaagac

SEQ ID NO: 4537705 - DNA, 25 bp, Homo sapien
gctagaaagacacgcagggcagtgc

SEQ ID NO: 4537706 - DNA, 25 bp, Homo sapien
aaatatgggactgggtgtgtggctc

SEQ ID NO: 4537707 - DNA, 25 bp, Homo sapien
gtatagtgagtcctcaagggtctag

SEQ ID NO: 4537708 - DNA, 25 bp, Homo sapien
tggaagatggtatagtgagtcctca

SEQ ID NO: 4537709 - DNA, 25 bp, Homo sapien
gatggtatagtgagtcctcaagggt

SEQ ID NO: 4537710 - DNA, 25 bp, Homo sapien
gctcaaggccagtgtccaagtggac

SEQ ID NO: 4537711 - DNA, 25 bp, Homo sapien
tagccctgagacatttatagcgttc

SEQ ID NO: 4537712 - DNA, 25 bp, Homo sapien
tgtgcactgcatacgctgcagccgt

SEQ ID NO: 4537713 - DNA, 25 bp, Homo sapien
tctgttttaacgtgggccaagccta

SEQ ID NO: 4537714 - DNA, 25 bp, Homo sapien
taaatacccatgtacccaccactgg

SEQ ID NO: 4537715 - DNA, 25 bp, Homo sapien
tcatgactgggactaggatgaggca

SEQ ID NO: 4537716 - DNA, 25 bp, Homo sapien
cataccagtcgtgtcatggtgccca

SEQ ID NO: 4537717 - DNA, 25 bp, Homo sapien
tgttttagcagcctcgactcctcag

SEQ ID NO: 4537718 - DNA, 25 bp, Homo sapien
agtgagaagcccaaagtccgaagca

SEQ ID NO: 4537719 - DNA, 25 bp, Homo sapien
taggccaatgggaggacaaatgccc

SEQ ID NO: 4537720 - DNA, 25 bp, Homo sapien
cacgtcacgtgagtagagcaggcag

SEQ ID NO: 4537721 - DNA, 25 bp, Homo sapien
gaagttgaaaataccatctccgtgg

SEQ ID NO: 4537722 - DNA, 25 bp, Homo sapien
tagggctggttactttgggctgtcc

SEQ ID NO: 4537723 - DNA, 25 bp, Homo sapien
taccttgctctaggctgtctgcaga

SEQ ID NO: 4537724 - DNA, 25 bp, Homo sapien
ccttgatcggtcatgcctagcctga

SEQ ID NO: 4537725 - DNA, 25 bp, Homo sapien
cctttgccatgtggaggaaagtgcc

SEQ ID NO: 4537726 - DNA, 25 bp, Homo sapien
taaatgggtcatgtacaacgggagg

SEQ ID NO: 4537727 - DNA, 25 bp, Homo sapien
taagccaacgtggaaagggctggcc

SEQ ID NO: 4537728 - DNA, 25 bp, Homo sapien
taactgacctgtcgcatgaccgtgg

SEQ ID NO: 4537729 - DNA, 25 bp, Homo sapien
tggacaaaaccctgaacgcagctgt

SEQ ID NO: 4537730 - DNA, 25 bp, Homo sapien
gaaatgtagtcaccaggtaacccag

SEQ ID NO: 4537731 - DNA, 25 bp, Homo sapien
gctggagcagctctagggcatatat

SEQ ID NO: 4537732 - DNA, 25 bp, Homo sapien
tataaactgagtagagacgtatgcc

SEQ ID NO: 4537733 - DNA, 25 bp, Homo sapien
tctcttaaacccgaggaacctgatg

SEQ ID NO: 4537734 - DNA, 25 bp, Homo sapien
cgatccagatgcattttcccgggaa

SEQ ID NO: 4537735 - DNA, 25 bp, Homo sapien
caggcaggtataggcacacagttcc

SEQ ID NO: 4537736 - DNA, 25 bp, Homo sapien
ttcgatacatcgtcaggcagggcag

SEQ ID NO: 4537737 - DNA, 25 bp, Homo sapien
aaagggccaggtttagtcatcgatc

SEQ ID NO: 4537738 - DNA, 25 bp, Homo sapien
caagtaagaaccactggagcctttc

SEQ ID NO: 4537739 - DNA, 25 bp, Homo sapien
gcccggcctcctagattaattcttg

SEQ ID NO: 4537740 - DNA, 25 bp, Homo sapien
tttttggatcaagtaagaaccactg

SEQ ID NO: 4537741 - DNA, 25 bp, Homo sapien
accaggcccggcctcctagattaat

SEQ ID NO: 4537742 - DNA, 25 bp, Homo sapien
ggtctgcaatcccagagagcatgag

SEQ ID NO: 4537743 - DNA, 25 bp, Homo sapien
gagtggatatatgtgcactaacagg

SEQ ID NO: 4537744 - DNA, 25 bp, Homo sapien
tcccaaagcttggtatgtggccctg

SEQ ID NO: 4537745 - DNA, 25 bp, Homo sapien
ccctgcccgatagcctgagggaaga

SEQ ID NO: 4537746 - DNA, 25 bp, Homo sapien
tctaggcacggccatacagtgggag

SEQ ID NO: 4537747 - DNA, 25 bp, Homo sapien
cctaaaagatagtcagcagagcagc

SEQ ID NO: 4537748 - DNA, 25 bp, Homo sapien
gatctgtaacaggtagtgcccaggt

SEQ ID NO: 4537749 - DNA, 25 bp, Homo sapien
caaaccaacattaggcttgcagggt

SEQ ID NO: 4537750 - DNA, 25 bp, Homo sapien
cagcatgtcgttcaatatgtcctgc

SEQ ID NO: 4537751 - DNA, 25 bp, Homo sapien
tgtcgttcaatatgtcctgcagcat

SEQ ID NO: 4537752 - DNA, 25 bp, Homo sapien
catgtcgttcaatatgtcctgcagc

SEQ ID NO: 4537753 - DNA, 25 bp, Homo sapien
cttcagcatgtcgttcaatatgtcc

SEQ ID NO: 4537754 - DNA, 25 bp, Homo sapien
gcaaacctcaagtcccactaatgta

SEQ ID NO: 4537755 - DNA, 25 bp, Homo sapien
ggcaaacctcaagtcccactaatgt

SEQ ID NO: 4537756 - DNA, 25 bp, Homo sapien
tcttccagcgacatttcagagtctg

SEQ ID NO: 4537757 - DNA, 25 bp, Homo sapien
gtttggatcctttcctagcagtgaa

SEQ ID NO: 4537758 - DNA, 25 bp, Homo sapien
tgtggtcggtcagcaagtgttgttt

SEQ ID NO: 4537759 - DNA, 25 bp, Homo sapien
tacaacgccaaatatcagagagcaa

SEQ ID NO: 4537760 - DNA, 25 bp, Homo sapien
cagtgaacgtgaatcagaacagccc

SEQ ID NO: 4537761 - DNA, 25 bp, Homo sapien
ctcggtgaaaaagggtgcagtgaac

SEQ ID NO: 4537762 - DNA, 25 bp, Homo sapien
ccagctggatcccataagcactatg

SEQ ID NO: 4537763 - DNA, 25 bp, Homo sapien
caaagccaaggcaaccaaaatatca

SEQ ID NO: 4537764 - DNA, 25 bp, Homo sapien
cagattaagcctcacggcctgaata

SEQ ID NO: 4537765 - DNA, 25 bp, Homo sapien
aagcctcacggcctgaatactgcca

SEQ ID NO: 4537766 - DNA, 25 bp, Homo sapien
cagcggtaattctgcatcagattaa

SEQ ID NO: 4537767 - DNA, 25 bp, Homo sapien
tctgcatcagattaagcctcacggc

SEQ ID NO: 4537768 - DNA, 25 bp, Homo sapien
tgtctttgtgtcctccataaacttg

SEQ ID NO: 4537769 - DNA, 25 bp, Homo sapien
catgcttttatggatggtcatacac

SEQ ID NO: 4537770 - DNA, 25 bp, Homo sapien
ggtcatacacataatcatgtctttg

SEQ ID NO: 4537771 - DNA, 25 bp, Homo sapien
catgtctttgtgtcctccataaact

SEQ ID NO: 4537772 - DNA, 25 bp, Homo sapien
cacttttcctaggatattcaccaca

SEQ ID NO: 4537773 - DNA, 25 bp, Homo sapien
tttatagatccgcacgagctcacca

SEQ ID NO: 4537774 - DNA, 25 bp, Homo sapien
cacgaacaaatttatccaggcaagc

SEQ ID NO: 4537775 - DNA, 25 bp, Homo sapien
catgattgtgacctttatagatccg

SEQ ID NO: 4537776 - DNA, 25 bp, Homo sapien
gatcactggagccactgaacacgag

SEQ ID NO: 4537777 - DNA, 25 bp, Homo sapien
tggagccactgaacacgagatcatt

SEQ ID NO: 4537778 - DNA, 25 bp, Homo sapien
tcactggagccactgaacacgagat

SEQ ID NO: 4537779 - DNA, 25 bp, Homo sapien
cactgaacacgagatcattcaccac

SEQ ID NO: 4537780 - DNA, 25 bp, Homo sapien
gaagggcattcgagtatacccacag

SEQ ID NO: 4537781 - DNA, 25 bp, Homo sapien
tgatgcatgagacaacacgggaaat

SEQ ID NO: 4537782 - DNA, 25 bp, Homo sapien
ccaaggtggtgcttctaaatgatgc

SEQ ID NO: 4537783 - DNA, 25 bp, Homo sapien
tgattatgaagcagcctagaagggc

SEQ ID NO: 4537784 - DNA, 25 bp, Homo sapien
tggttttgctatggccctccagagt

SEQ ID NO: 4537785 - DNA, 25 bp, Homo sapien
caaagaatggttttgctatggccct

SEQ ID NO: 4537786 - DNA, 25 bp, Homo sapien
gagcagtccattccgggcatcgcgt

SEQ ID NO: 4537787 - DNA, 25 bp, Homo sapien
tccagagttctgaggagcagtccat

SEQ ID NO: 4537788 - DNA, 25 bp, Homo sapien
aattgtgcagtcataagaccccacg

SEQ ID NO: 4537789 - DNA, 25 bp, Homo sapien
tcgggcaccttcctgagctgtagca

SEQ ID NO: 4537790 - DNA, 25 bp, Homo sapien
cacgaccagcagttttcgggcacct

SEQ ID NO: 4537791 - DNA, 25 bp, Homo sapien
ctgactgcccgagggccatggcatt

SEQ ID NO: 4537792 - DNA, 25 bp, Homo sapien
tattatgatgttcttctggcacctg

SEQ ID NO: 4537793 - DNA, 25 bp, Homo sapien
cttcctaggtaatttcagtaagtct

SEQ ID NO: 4537794 - DNA, 25 bp, Homo sapien
tgcatgcctggagtaaggctcctaa

SEQ ID NO: 4537795 - DNA, 25 bp, Homo sapien
tggttccatgtcatctctcacaaca

SEQ ID NO: 4537796 - DNA, 25 bp, Homo sapien
ttctaagagtatgggcaacctagga

SEQ ID NO: 4537797 - DNA, 25 bp, Homo sapien
tccagaagcactacattctaagagt

SEQ ID NO: 4537798 - DNA, 25 bp, Homo sapien
ctgtctctaggaccatcttctccag

SEQ ID NO: 4537799 - DNA, 25 bp, Homo sapien
ggcgtgtgctaccatacttagcttt

SEQ ID NO: 4537800 - DNA, 25 bp, Homo sapien
ttagtgtatgtgctgtcaaagtgag

SEQ ID NO: 4537801 - DNA, 25 bp, Homo sapien
taaaatatgtaatgcttcatgaatt

SEQ ID NO: 4537802 - DNA, 25 bp, Homo sapien
atgctaatcttctctgtatcattcc

SEQ ID NO: 4537803 - DNA, 25 bp, Homo sapien
tgcgtgtcatccttgtgcagggacc

SEQ ID NO: 4537804 - DNA, 25 bp, Homo sapien
gttgaaggtgaccacagtgccattt

SEQ ID NO: 4537805 - DNA, 25 bp, Homo sapien
ccatctactgtggaggcagaggacc

SEQ ID NO: 4537806 - DNA, 25 bp, Homo sapien
cagtcccgcatagaggattcgccat

SEQ ID NO: 4537807 - DNA, 25 bp, Homo sapien
gaggacccggtcttccagctgtaac

SEQ ID NO: 4537808 - DNA, 25 bp, Homo sapien
ttaaaatacatagaacccaagctcc

SEQ ID NO: 4537809 - DNA, 25 bp, Homo sapien
gatgcacatgcagatttaataccca

SEQ ID NO: 4537810 - DNA, 25 bp, Homo sapien
gactcttaattcagtgggctctaga

SEQ ID NO: 4537811 - DNA, 25 bp, Homo sapien
tagctgggctaaattactcaagagg

SEQ ID NO: 4537812 - DNA, 25 bp, Homo sapien
tgcccagtcacgtgtcttaaagtct

SEQ ID NO: 4537813 - DNA, 25 bp, Homo sapien
tccagctctgttactatttgcatag

SEQ ID NO: 4537814 - DNA, 25 bp, Homo sapien
tattaacataaccactccagctctg

SEQ ID NO: 4537815 - DNA, 25 bp, Homo sapien
gtctggaacttacagtctcaagtga

SEQ ID NO: 4537816 - DNA, 25 bp, Homo sapien
tatttctcaaagtgcggtccccaaa

SEQ ID NO: 4537817 - DNA, 25 bp, Homo sapien
tcttttagtaattactctagggcag

SEQ ID NO: 4537818 - DNA, 25 bp, Homo sapien
gcatcagtatcacctaataacttat

SEQ ID NO: 4537819 - DNA, 25 bp, Homo sapien
gtaattactctagggcagtatttct

SEQ ID NO: 4537820 - DNA, 25 bp, Homo sapien
tataagatccttgtcctagcacagc

SEQ ID NO: 4537821 - DNA, 25 bp, Homo sapien
taaatttgggagcttgatcacaagc

SEQ ID NO: 4537822 - DNA, 25 bp, Homo sapien
gacatgaaccatagtacctcgccta

SEQ ID NO: 4537823 - DNA, 25 bp, Homo sapien
gagccagtgcctctagggattatat

SEQ ID NO: 4537824 - DNA, 25 bp, Homo sapien
gcagttaactttggaggtatgaccc

SEQ ID NO: 4537825 - DNA, 25 bp, Homo sapien
tatagcagcggatggtatggtcact

SEQ ID NO: 4537826 - DNA, 25 bp, Homo sapien
gacccggtgtaaagggcagcattct

SEQ ID NO: 4537827 - DNA, 25 bp, Homo sapien
tcccggaggtctgagtaaccaggag

SEQ ID NO: 4537828 - DNA, 25 bp, Homo sapien
tatgttcaccaagtgcctagcaaac

SEQ ID NO: 4537829 - DNA, 25 bp, Homo sapien
tctgacatatggaccaaggacctag

SEQ ID NO: 4537830 - DNA, 25 bp, Homo sapien
tatggcaacactgtaagacagccag

SEQ ID NO: 4537831 - DNA, 25 bp, Homo sapien
tggtattcaaaaacgtcaggtgcta

SEQ ID NO: 4537832 - DNA, 25 bp, Homo sapien
caccagattataaacccgaacagtt

SEQ ID NO: 4537833 - DNA, 25 bp, Homo sapien
tctgctgaacaggtatatagcaagt

SEQ ID NO: 4537834 - DNA, 25 bp, Homo sapien
tatctgaattgcatttacggcagct

SEQ ID NO: 4537835 - DNA, 25 bp, Homo sapien
tagcaagttcccaaatatctgaatt

SEQ ID NO: 4537836 - DNA, 25 bp, Homo sapien
aggagatcacagtctgagtttctgc

SEQ ID NO: 4537837 - DNA, 25 bp, Homo sapien
ggagatcacagtctgagtttctgcc

SEQ ID NO: 4537838 - DNA, 25 bp, Homo sapien
gaggagatcacagtctgagtttctg

SEQ ID NO: 4537839 - DNA, 25 bp, Homo sapien
ggaggagatcacagtctgagtttct

SEQ ID NO: 4537840 - DNA, 25 bp, Homo sapien
caatggctactacttctaactgagg

SEQ ID NO: 4537841 - DNA, 25 bp, Homo sapien
tcatcacacccagaacgagacgttt

SEQ ID NO: 4537842 - DNA, 25 bp, Homo sapien
catgggcagcccgtagacttttctt

SEQ ID NO: 4537843 - DNA, 25 bp, Homo sapien
gatgccatctttatagcgagtgcca

SEQ ID NO: 4537844 - DNA, 25 bp, Homo sapien
gatgactggataaactggacaactg

SEQ ID NO: 4537845 - DNA, 25 bp, Homo sapien
tatgctagaaagaccagctgattgg

SEQ ID NO: 4537846 - DNA, 25 bp, Homo sapien
tgactctggtaaggacaatctagca

SEQ ID NO: 4537847 - DNA, 25 bp, Homo sapien
ggtacaggcttcagacccactattg

SEQ ID NO: 4537848 - DNA, 25 bp, Homo sapien
tagccagattatgcaactattcaaa

SEQ ID NO: 4537849 - DNA, 25 bp, Homo sapien
taatcacagatgtactcaaagacat

SEQ ID NO: 4537850 - DNA, 25 bp, Homo sapien
gactgctcctttgtacaagttctac

SEQ ID NO: 4537851 - DNA, 25 bp, Homo sapien
gacttagttacttcatgtctaggaa

SEQ ID NO: 4537852 - DNA, 25 bp, Homo sapien
tgggtgctaatacaaagtcaactct

SEQ ID NO: 4537853 - DNA, 25 bp, Homo sapien
taataaatggaaccttgtgggtgct

SEQ ID NO: 4537854 - DNA, 25 bp, Homo sapien
taaaaatgccccagtctcactactg

SEQ ID NO: 4537855 - DNA, 25 bp, Homo sapien
tcactactgggatgcccttaaccca

SEQ ID NO: 4537856 - DNA, 25 bp, Homo sapien
ttccttggacacattgcaggcagag

SEQ ID NO: 4537857 - DNA, 25 bp, Homo sapien
tattagcttccagtaattccttgga

SEQ ID NO: 4537858 - DNA, 25 bp, Homo sapien
tccttggacacattgcaggcagagc

SEQ ID NO: 4537859 - DNA, 25 bp, Homo sapien
ctgccatgggtttggaaagtaggag

SEQ ID NO: 4537860 - DNA, 25 bp, Homo sapien
gtaggagacgtggttatttgaagag

SEQ ID NO: 4537861 - DNA, 25 bp, Homo sapien
gaaagtaggagacgtggttatttga

SEQ ID NO: 4537862 - DNA, 25 bp, Homo sapien
aagtaggagacgtggttatttgaag

SEQ ID NO: 4537863 - DNA, 25 bp, Homo sapien
tggatgtttgagatctactgttcct

SEQ ID NO: 4537864 - DNA, 25 bp, Homo sapien
gatctactgttccttcgttctcgtg

SEQ ID NO: 4537865 - DNA, 25 bp, Homo sapien
ttcgttctcgtgtgaggctacaggg

SEQ ID NO: 4537866 - DNA, 25 bp, Homo sapien
cagcagtgcggcatcaatggatgtt

SEQ ID NO: 4537867 - DNA, 25 bp, Homo sapien
gggtgctcagaaggttcatatgttt

SEQ ID NO: 4537868 - DNA, 25 bp, Homo sapien
tgggtgctcagaaggttcatatgtt

SEQ ID NO: 4537869 - DNA, 25 bp, Homo sapien
ccctgtagaatctgtattctatggg

SEQ ID NO: 4537870 - DNA, 25 bp, Homo sapien
gtattctatgggtcctcagtgcact

SEQ ID NO: 4537871 - DNA, 25 bp, Homo sapien
tatgggtcctcagtgcactcatctc

SEQ ID NO: 4537872 - DNA, 25 bp, Homo sapien
tctatgggtcctcagtgcactcatc

SEQ ID NO: 4537873 - DNA, 25 bp, Homo sapien
gctgcttgagcataagtagcctctg

SEQ ID NO: 4537874 - DNA, 25 bp, Homo sapien
gattgttatccatgcactgcaatga

SEQ ID NO: 4537875 - DNA, 25 bp, Homo sapien
cttccacataagctgtctgaagggc

SEQ ID NO: 4537876 - DNA, 25 bp, Homo sapien
cttgcagaagattgttatccatgca

SEQ ID NO: 4537877 - DNA, 25 bp, Homo sapien
ttaaagaaatattcagcagctggtc

SEQ ID NO: 4537878 - DNA, 25 bp, Homo sapien
agcagctggtcaacctgagaacgtt

SEQ ID NO: 4537879 - DNA, 25 bp, Homo sapien
aagaaatattcagcagctggtcaac

SEQ ID NO: 4537880 - DNA, 25 bp, Homo sapien
tattcagcagctggtcaacctgaga

SEQ ID NO: 4537881 - DNA, 25 bp, Homo sapien
ctctcaagacttgggagttcaggag

SEQ ID NO: 4537882 - DNA, 25 bp, Homo sapien
ttgggagttcaggagaagatccatc

SEQ ID NO: 4537883 - DNA, 25 bp, Homo sapien
caagacttgggagttcaggagaaga

SEQ ID NO: 4537884 - DNA, 25 bp, Homo sapien
tttttctctcaagacttgggagttc

SEQ ID NO: 4537885 - DNA, 25 bp, Homo sapien
gctgaggatgcgcttgatgacagac

SEQ ID NO: 4537886 - DNA, 25 bp, Homo sapien
catccgctaaactggagatcgcaag

SEQ ID NO: 4537887 - DNA, 25 bp, Homo sapien
tactatctgtggctgcatccgctaa

SEQ ID NO: 4537888 - DNA, 25 bp, Homo sapien
tcagcaccagaggtacagctactat

SEQ ID NO: 4537889 - DNA, 25 bp, Homo sapien
actatgtcgcctttgggtagcaaca

SEQ ID NO: 4537890 - DNA, 25 bp, Homo sapien
gcagcccgaggtgtcacttcttgtt

SEQ ID NO: 4537891 - DNA, 25 bp, Homo sapien
tgacggtggtatagacctctcctgg

SEQ ID NO: 4537892 - DNA, 25 bp, Homo sapien
cctcaatgagttactaggtgaaacc

SEQ ID NO: 4537893 - DNA, 25 bp, Homo sapien
gacagatcaggttccccatccaaat

SEQ ID NO: 4537894 - DNA, 25 bp, Homo sapien
aatccttctagactggacagatcag

SEQ ID NO: 4537895 - DNA, 25 bp, Homo sapien
tctcagaaaggcttcgctttcttgc

SEQ ID NO: 4537896 - DNA, 25 bp, Homo sapien
gaaaggcttcgctttcttgccaagc

SEQ ID NO: 4537897 - DNA, 25 bp, Homo sapien
gaaaagtctagtacctcaacataag

SEQ ID NO: 4537898 - DNA, 25 bp, Homo sapien
gcctggagaactgtatcatcatgca

SEQ ID NO: 4537899 - DNA, 25 bp, Homo sapien
ttcaacaagtacagaaatgcccctg

SEQ ID NO: 4537900 - DNA, 25 bp, Homo sapien
caaatgctactcacaaggtgtggga

SEQ ID NO: 4537901 - DNA, 25 bp, Homo sapien
aaaagacaccgaaaagcagcacaca

SEQ ID NO: 4537902 - DNA, 25 bp, Homo sapien
cttgatcagggtcaaagggttactt

SEQ ID NO: 4537903 - DNA, 25 bp, Homo sapien
attaaatgaaacacgtagaattctc

SEQ ID NO: 4537904 - DNA, 25 bp, Homo sapien
aatgaaacacgtagaattctcttga

SEQ ID NO: 4537905 - DNA, 25 bp, Homo sapien
gaagcagcggaatcagaagaggcct

SEQ ID NO: 4537906 - DNA, 25 bp, Homo sapien
tgctcttcaaactaatgtgccgggt

SEQ ID NO: 4537907 - DNA, 25 bp, Homo sapien
catttagaatctgccgtagggttgg

SEQ ID NO: 4537908 - DNA, 25 bp, Homo sapien
cgctaatattgcgaatgcggcgggc

SEQ ID NO: 4537909 - DNA, 25 bp, Homo sapien
ccagggccactgtaattccaattat

SEQ ID NO: 4537910 - DNA, 25 bp, Homo sapien
tgtgaaaccaagtcgaggagcctcc

SEQ ID NO: 4537911 - DNA, 25 bp, Homo sapien
tttccaatcccgctgtggaggtcca

SEQ ID NO: 4537912 - DNA, 25 bp, Homo sapien
tgtactacgtacactggatttccag

SEQ ID NO: 4537913 - DNA, 25 bp, Homo sapien
ttcctttgttttattaactgaatga

SEQ ID NO: 4537914 - DNA, 25 bp, Homo sapien
cctttgttttattaactgaatgagt

SEQ ID NO: 4537915 - DNA, 25 bp, Homo sapien
tcctttgttttattaactgaatgag

SEQ ID NO: 4537916 - DNA, 25 bp, Homo sapien
tttgttttattaactgaatgagttc

SEQ ID NO: 4537917 - DNA, 25 bp, Homo sapien
taatcttcttcctcttcctctcctt

SEQ ID NO: 4537918 - DNA, 25 bp, Homo sapien
atcttcttcctcttcctctcctttt

SEQ ID NO: 4537919 - DNA, 25 bp, Homo sapien
aatcttcttcctcttcctctccttt

SEQ ID NO: 4537920 - DNA, 25 bp, Homo sapien
cttgtcaaaataatcttcttcctct

SEQ ID NO: 4537921 - DNA, 25 bp, Homo sapien
caacgttatctttgtgcaactggcc

SEQ ID NO: 4537922 - DNA, 25 bp, Homo sapien
tctttcctgggcatcaacgttatct

SEQ ID NO: 4537923 - DNA, 25 bp, Homo sapien
gctttgcatatgcagaaagacccac

SEQ ID NO: 4537924 - DNA, 25 bp, Homo sapien
ctttgtgcaactggccagaaatgtg

SEQ ID NO: 4537925 - DNA, 25 bp, Homo sapien
tctgtgaccccgcacactcggcact

SEQ ID NO: 4537926 - DNA, 25 bp, Homo sapien
ttctgtgaccccgcacactcggcac

SEQ ID NO: 4537927 - DNA, 25 bp, Homo sapien
cgcacactcggcactcatgactaat

SEQ ID NO: 4537928 - DNA, 25 bp, Homo sapien
cactcggcactcatgactaatgtcc

SEQ ID NO: 4537929 - DNA, 25 bp, Homo sapien
gagatgagggacattcaattctccc

SEQ ID NO: 4537930 - DNA, 25 bp, Homo sapien
gagggacattcaattctccccactg

SEQ ID NO: 4537931 - DNA, 25 bp, Homo sapien
ggacattcaattctccccactggca

SEQ ID NO: 4537932 - DNA, 25 bp, Homo sapien
gatgagggacattcaattctcccca

SEQ ID NO: 4537933 - DNA, 25 bp, Homo sapien
gctaattaatttcaatgctcctttc

SEQ ID NO: 4537934 - DNA, 25 bp, Homo sapien
gttgctctggagcacacccatggtg

SEQ ID NO: 4537935 - DNA, 25 bp, Homo sapien
gcaatcaagaggcaatagacttcag

SEQ ID NO: 4537936 - DNA, 25 bp, Homo sapien
cagataaatgtcgtttaggaggaga

SEQ ID NO: 4537937 - DNA, 25 bp, Homo sapien
actcagaaggcctggtgacagcgct

SEQ ID NO: 4537938 - DNA, 25 bp, Homo sapien
gaattgcaataatcctcacatctca

SEQ ID NO: 4537939 - DNA, 25 bp, Homo sapien
cttgaattgcaataatcctcacatc

SEQ ID NO: 4537940 - DNA, 25 bp, Homo sapien
cctcacatctcaagggtagggccag

SEQ ID NO: 4537941 - DNA, 25 bp, Homo sapien
ggcaggggatagagacaggtgatat

SEQ ID NO: 4537942 - DNA, 25 bp, Homo sapien
gcccttgaggttctcaagttccctg

SEQ ID NO: 4537943 - DNA, 25 bp, Homo sapien
caacatgctccgcatgtgttcgtcc

SEQ ID NO: 4537944 - DNA, 25 bp, Homo sapien
tgctccgcatgtgttcgtccatctc

SEQ ID NO: 4537945 - DNA, 25 bp, Homo sapien
ccttgaggttctcaagttccctgtg

SEQ ID NO: 4537946 - DNA, 25 bp, Homo sapien
gtaacaatcaagagcatcttaaaag

SEQ ID NO: 4537947 - DNA, 25 bp, Homo sapien
tcagtatttaaactagcagcactac

SEQ ID NO: 4537948 - DNA, 25 bp, Homo sapien
catttccagtaacaatcaagagcat

SEQ ID NO: 4537949 - DNA, 25 bp, Homo sapien
ccagtaacaatcaagagcatcttaa

SEQ ID NO: 4537950 - DNA, 25 bp, Homo sapien
aatatgcattttcgttctcgtacca

SEQ ID NO: 4537951 - DNA, 25 bp, Homo sapien
ggcataatatgcattttcgttctcg

SEQ ID NO: 4537952 - DNA, 25 bp, Homo sapien
tgtacacgatgtggcataatatgca

SEQ ID NO: 4537953 - DNA, 25 bp, Homo sapien
ttttttgagctgtacacgatgtggc

SEQ ID NO: 4537954 - DNA, 25 bp, Homo sapien
accagatctgaagcactcaacgtca

SEQ ID NO: 4537955 - DNA, 25 bp, Homo sapien
gacagtctcaagttgctaaaagcca

SEQ ID NO: 4537956 - DNA, 25 bp, Homo sapien
aaagccacggatatctcaaacttct

SEQ ID NO: 4537957 - DNA, 25 bp, Homo sapien
acctaggatgacagtctcaagttgc

SEQ ID NO: 4537958 - DNA, 25 bp, Homo sapien
gttgctaaaagccacggatatctca

SEQ ID NO: 4537959 - DNA, 25 bp, Homo sapien
gaagccagcagcaccgcctgcccat

SEQ ID NO: 4537960 - DNA, 25 bp, Homo sapien
cccgaagccagcagcaccgcctgcc

SEQ ID NO: 4537961 - DNA, 25 bp, Homo sapien
ccgaagccagcagcaccgcctgccc

SEQ ID NO: 4537962 - DNA, 25 bp, Homo sapien
cgaagccagcagcaccgcctgccca

SEQ ID NO: 4537963 - DNA, 25 bp, Homo sapien
ttgccgtccgcagttctcaataatc

SEQ ID NO: 4537964 - DNA, 25 bp, Homo sapien
tcagttttgggtccgggagcctgct

SEQ ID NO: 4537965 - DNA, 25 bp, Homo sapien
ccgaagccgtcacgctcgctttttt

SEQ ID NO: 4537966 - DNA, 25 bp, Homo sapien
ctcttactccatcaggccgccgaga

SEQ ID NO: 4537967 - DNA, 25 bp, Homo sapien
tgtccgcggcgaacgggaagtgagc

SEQ ID NO: 4537968 - DNA, 25 bp, Homo sapien
tggcctcgcccgcttggtgagtctc

SEQ ID NO: 4537969 - DNA, 25 bp, Homo sapien
taaacccccagcaccgtgattggct

SEQ ID NO: 4537970 - DNA, 25 bp, Homo sapien
agctggccgggatgaagtctgagac

SEQ ID NO: 4537971 - DNA, 25 bp, Homo sapien
cagatgggcccggagagaggacggg

SEQ ID NO: 4537972 - DNA, 25 bp, Homo sapien
gcagatgggcccggagagaggacgg

SEQ ID NO: 4537973 - DNA, 25 bp, Homo sapien
tcggcagatgggcccggagagagga

SEQ ID NO: 4537974 - DNA, 25 bp, Homo sapien
cggcagatgggcccggagagaggac

SEQ ID NO: 4537975 - DNA, 25 bp, Homo sapien
ttcgagatgagattatgaatagcca

SEQ ID NO: 4537976 - DNA, 25 bp, Homo sapien
cctctcaccagattcgagatgagat

SEQ ID NO: 4537977 - DNA, 25 bp, Homo sapien
tcgagatgagattatgaatagccaa

SEQ ID NO: 4537978 - DNA, 25 bp, Homo sapien
caccagattcgagatgagattatga

SEQ ID NO: 4537979 - DNA, 25 bp, Homo sapien
ggatccagtgcctctaacaattaga

SEQ ID NO: 4537980 - DNA, 25 bp, Homo sapien
attagaggaagtggattatggagcc

SEQ ID NO: 4537981 - DNA, 25 bp, Homo sapien
taggtagaaacttgaaacagaagga

SEQ ID NO: 4537982 - DNA, 25 bp, Homo sapien
tcatttagattcactgacattttgg

SEQ ID NO: 4537983 - DNA, 25 bp, Homo sapien
agacgtgcactactgcactcggcta

SEQ ID NO: 4537984 - DNA, 25 bp, Homo sapien
acagacgtgcactactgcactcggc

SEQ ID NO: 4537985 - DNA, 25 bp, Homo sapien
gacgtgcactactgcactcggctaa

SEQ ID NO: 4537986 - DNA, 25 bp, Homo sapien
cagacgtgcactactgcactcggct

SEQ ID NO: 4537987 - DNA, 25 bp, Homo sapien
gacctgtttacaccttggttgacca

SEQ ID NO: 4537988 - DNA, 25 bp, Homo sapien
catgaggaaaggtttgacagtgttc

SEQ ID NO: 4537989 - DNA, 25 bp, Homo sapien
tggttgaccaactgaaagttctgta

SEQ ID NO: 4537990 - DNA, 25 bp, Homo sapien
tggtcttgtaaaccaacagcggtta

SEQ ID NO: 4537991 - DNA, 25 bp, Homo sapien
aactcttagctatgttttacaaaca

SEQ ID NO: 4537992 - DNA, 25 bp, Homo sapien
ggaagatcagctctaagtcacgtgt

SEQ ID NO: 4537993 - DNA, 25 bp, Homo sapien
ctttgtgtatcccagccaagcatag

SEQ ID NO: 4537994 - DNA, 25 bp, Homo sapien
caaggtagggtatggtcctgaatca

SEQ ID NO: 4537995 - DNA, 25 bp, Homo sapien
catagaaagtgggaaatgcagctac

SEQ ID NO: 4537996 - DNA, 25 bp, Homo sapien
ggtgccacaactcattagggtataa

SEQ ID NO: 4537997 - DNA, 25 bp, Homo sapien
catgagccattaagccctgctggcc

SEQ ID NO: 4537998 - DNA, 25 bp, Homo sapien
tgtaacctgaactgaagctatgttt

SEQ ID NO: 4537999 - DNA, 25 bp, Homo sapien
gatattaattggtttcactacagaa

SEQ ID NO: 4538000 - DNA, 25 bp, Homo sapien
cctggatcgctaaatgtcccactga

SEQ ID NO: 4538001 - DNA, 25 bp, Homo sapien
actattggtccacggcctgttaaca

SEQ ID NO: 4538002 - DNA, 25 bp, Homo sapien
tagaatcttcagagtgcagcctact

SEQ ID NO: 4538003 - DNA, 25 bp, Homo sapien
cagaaactggtcctcatagcaggag

SEQ ID NO: 4538004 - DNA, 25 bp, Homo sapien
tattccttaatagaccagaacccaa

SEQ ID NO: 4538005 - DNA, 25 bp, Homo sapien
tcttgcacctgttccacaatccgaa

SEQ ID NO: 4538006 - DNA, 25 bp, Homo sapien
gcccttatatctaattgtggaaaga

SEQ ID NO: 4538007 - DNA, 25 bp, Homo sapien
cagaacccaaggtcatgtcccagtc

SEQ ID NO: 4538008 - DNA, 25 bp, Homo sapien
caggatttatgaatgaccgcttgtg

SEQ ID NO: 4538009 - DNA, 25 bp, Homo sapien
ggtcaaggtacttatttgtccgctg

SEQ ID NO: 4538010 - DNA, 25 bp, Homo sapien
tgtccgctgattgtccaatttggaa

SEQ ID NO: 4538011 - DNA, 25 bp, Homo sapien
tgaaaaactcctacactacaggatt

SEQ ID NO: 4538012 - DNA, 25 bp, Homo sapien
ccagttcagtgtttcagtaatagac

SEQ ID NO: 4538013 - DNA, 25 bp, Homo sapien
cacggtagaataagctcctgtcctc

SEQ ID NO: 4538014 - DNA, 25 bp, Homo sapien
caagaaaatgagacacccagttcag

SEQ ID NO: 4538015 - DNA, 25 bp, Homo sapien
cctccctgtcatggtagttggtgca

SEQ ID NO: 4538016 - DNA, 25 bp, Homo sapien
tacacaacgtttttgttaggcatca

SEQ ID NO: 4538017 - DNA, 25 bp, Homo sapien
gccacaacgaagatctagttggata

SEQ ID NO: 4538018 - DNA, 25 bp, Homo sapien
gtaaaaaccttcaggccacaaagca

SEQ ID NO: 4538019 - DNA, 25 bp, Homo sapien
gcaaaaagttgcatagccacaacga

SEQ ID NO: 4538020 - DNA, 25 bp, Homo sapien
ttggactcctgacgtcgtgatccac

SEQ ID NO: 4538021 - DNA, 25 bp, Homo sapien
accatgtcaagctggtcttggactc

SEQ ID NO: 4538022 - DNA, 25 bp, Homo sapien
gatgtggatcctgaaaagtgttatg

SEQ ID NO: 4538023 - DNA, 25 bp, Homo sapien
cccttgtgtattgaactatgtccat

SEQ ID NO: 4538024 - DNA, 25 bp, Homo sapien
tcttattgcaccattcaggaacact

SEQ ID NO: 4538025 - DNA, 25 bp, Homo sapien
tagtatcatggttccattacaggcc

SEQ ID NO: 4538026 - DNA, 25 bp, Homo sapien
aagcatgggctgaggcattatctga

SEQ ID NO: 4538027 - DNA, 25 bp, Homo sapien
gaagtgaggcacatgaattttggtt

SEQ ID NO: 4538028 - DNA, 25 bp, Homo sapien
cacagtatgattggttagaagcatg

SEQ ID NO: 4538029 - DNA, 25 bp, Homo sapien
agctagtattgcaatgaagtgaggc

SEQ ID NO: 4538030 - DNA, 25 bp, Homo sapien
tcatgcataagtgaggtccataaat

SEQ ID NO: 4538031 - DNA, 25 bp, Homo sapien
ttgaaagcccgtccatggaacccag

SEQ ID NO: 4538032 - DNA, 25 bp, Homo sapien
tgaggtccataaatggaggtcttga

SEQ ID NO: 4538033 - DNA, 25 bp, Homo sapien
taaatggaggtcttgaaagcccgtc

SEQ ID NO: 4538034 - DNA, 25 bp, Homo sapien
acactggaggtgtatccaaggaact

SEQ ID NO: 4538035 - DNA, 25 bp, Homo sapien
gtgacatgaatacactggaggtgta

SEQ ID NO: 4538036 - DNA, 25 bp, Homo sapien
tttgcagtgacatgaatacactgga

SEQ ID NO: 4538037 - DNA, 25 bp, Homo sapien
tattcatgatagcaaagataatgga

SEQ ID NO: 4538038 - DNA, 25 bp, Homo sapien
tgcttgatagcatagtacggtgact

SEQ ID NO: 4538039 - DNA, 25 bp, Homo sapien
aacaaagtagcttatctaagtgctg

SEQ ID NO: 4538040 - DNA, 25 bp, Homo sapien
gaaggtaggttaatgggtagataca

SEQ ID NO: 4538041 - DNA, 25 bp, Homo sapien
taggtcactcttaccaaaacttcag

SEQ ID NO: 4538042 - DNA, 25 bp, Homo sapien
aacctgggcgaaacagacagcctct

SEQ ID NO: 4538043 - DNA, 25 bp, Homo sapien
gggactatagatgcctgcctctgcc

SEQ ID NO: 4538044 - DNA, 25 bp, Homo sapien
tggtggcagataacctgtagctcca

SEQ ID NO: 4538045 - DNA, 25 bp, Homo sapien
gacggactctgtattcaaacctgga

SEQ ID NO: 4538046 - DNA, 25 bp, Homo sapien
aaatgttaattgttcagtagatcaa

SEQ ID NO: 4538047 - DNA, 25 bp, Homo sapien
cagtagatcaataagattaataaac

SEQ ID NO: 4538048 - DNA, 25 bp, Homo sapien
tgttcagtagatcaataagattaat

SEQ ID NO: 4538049 - DNA, 25 bp, Homo sapien
taattgttcagtagatcaataagat

SEQ ID NO: 4538050 - DNA, 25 bp, Homo sapien
gagagtaagcttgataaacataggt

SEQ ID NO: 4538051 - DNA, 25 bp, Homo sapien
gagtaagcttgataaacataggttg

SEQ ID NO: 4538052 - DNA, 25 bp, Homo sapien
ctcagagagtaagcttgataaacat

SEQ ID NO: 4538053 - DNA, 25 bp, Homo sapien
tcactcagagagtaagcttgataaa

SEQ ID NO: 4538054 - DNA, 25 bp, Homo sapien
tagatacccctaacaacaacaggag

SEQ ID NO: 4538055 - DNA, 25 bp, Homo sapien
gataatttgctaccgcagccttaga

SEQ ID NO: 4538056 - DNA, 25 bp, Homo sapien
aaaactgcgactgaactgatggact

SEQ ID NO: 4538057 - DNA, 25 bp, Homo sapien
ggagctattctgttaccaggcagca

SEQ ID NO: 4538058 - DNA, 25 bp, Homo sapien
tcttggtggctgtgaacctctccat

SEQ ID NO: 4538059 - DNA, 25 bp, Homo sapien
tggtggctgtgaacctctccatgta

SEQ ID NO: 4538060 - DNA, 25 bp, Homo sapien
tcacgcaaacttcttcttggtggct

SEQ ID NO: 4538061 - DNA, 25 bp, Homo sapien
tcttcttggtggctgtgaacctctc

SEQ ID NO: 4538062 - DNA, 25 bp, Homo sapien
tagccttccagttctcgaagtttct

SEQ ID NO: 4538063 - DNA, 25 bp, Homo sapien
gatctgggaatcactgaggatgctc

SEQ ID NO: 4538064 - DNA, 25 bp, Homo sapien
gacagatctgggaatcactgaggat

SEQ ID NO: 4538065 - DNA, 25 bp, Homo sapien
agcagacagatctgggaatcactga

SEQ ID NO: 4538066 - DNA, 25 bp, Homo sapien
ggcgaagaattttaaggcgtggaca

SEQ ID NO: 4538067 - DNA, 25 bp, Homo sapien
ggcgtggacagcaagatatcttcac

SEQ ID NO: 4538068 - DNA, 25 bp, Homo sapien
gaattttaaggcgtggacagcaaga

SEQ ID NO: 4538069 - DNA, 25 bp, Homo sapien
tccaggcgaagaattttaaggcgtg

SEQ ID NO: 4538070 - DNA, 25 bp, Homo sapien
aagcataagcactatactggttact

SEQ ID NO: 4538071 - DNA, 25 bp, Homo sapien
tctttacttgactatttgttctagt

SEQ ID NO: 4538072 - DNA, 25 bp, Homo sapien
cataagcactatactggttactttt

SEQ ID NO: 4538073 - DNA, 25 bp, Homo sapien
gcataagcactatactggttacttt

SEQ ID NO: 4538074 - DNA, 25 bp, Homo sapien
gtctttgactcaccccttttgccat

SEQ ID NO: 4538075 - DNA, 25 bp, Homo sapien
ttaggccctcaagctcaataccaag

SEQ ID NO: 4538076 - DNA, 25 bp, Homo sapien
ccatcacttttgttatgacctcaag

SEQ ID NO: 4538077 - DNA, 25 bp, Homo sapien
tagcactactgttcctttaggccct

SEQ ID NO: 4538078 - DNA, 25 bp, Homo sapien
gcagctctcccactgagtcaggtat

SEQ ID NO: 4538079 - DNA, 25 bp, Homo sapien
gagagatccatcacatccaggtgcc

SEQ ID NO: 4538080 - DNA, 25 bp, Homo sapien
gaggttgagttcgatgacttgcagc

SEQ ID NO: 4538081 - DNA, 25 bp, Homo sapien
tccaggtgccgtaggctacaaagtt

SEQ ID NO: 4538082 - DNA, 25 bp, Homo sapien
cagagagttgcccaaaggtagacgg

SEQ ID NO: 4538083 - DNA, 25 bp, Homo sapien
gattgttgtttaggcttagcgtctc

SEQ ID NO: 4538084 - DNA, 25 bp, Homo sapien
ttcagattgcatatctcatcaggca

SEQ ID NO: 4538085 - DNA, 25 bp, Homo sapien
tagacggcagctctctaaggtgatt

SEQ ID NO: 4538086 - DNA, 25 bp, Homo sapien
gcaaaagcctccctggcgagagcca

SEQ ID NO: 4538087 - DNA, 25 bp, Homo sapien
ggtaacagctgatcactagcaaaag

SEQ ID NO: 4538088 - DNA, 25 bp, Homo sapien
ccctggtaacagctgatcactagca

SEQ ID NO: 4538089 - DNA, 25 bp, Homo sapien
aaaagcctccctggcgagagccata

SEQ ID NO: 4538090 - DNA, 25 bp, Homo sapien
tgttgttgttcagggagaggctctt

SEQ ID NO: 4538091 - DNA, 25 bp, Homo sapien
gatggtcctgagattgctcgtcagc

SEQ ID NO: 4538092 - DNA, 25 bp, Homo sapien
tcctatcagcaaaggcggtaggctt

SEQ ID NO: 4538093 - DNA, 25 bp, Homo sapien
tcgtcagcttctgcaagtctgcggg

SEQ ID NO: 4538094 - DNA, 25 bp, Homo sapien
agccctcggtccttaagctgaaaga

SEQ ID NO: 4538095 - DNA, 25 bp, Homo sapien
acaccagttttctgcgccgtttcca

SEQ ID NO: 4538096 - DNA, 25 bp, Homo sapien
gagcgcggagcgcactgtttcccat

SEQ ID NO: 4538097 - DNA, 25 bp, Homo sapien
gccgtttccacatgagcgcggagcg

SEQ ID NO: 4538098 - DNA, 25 bp, Homo sapien
caagagcgacaaggaagaaacggaa

SEQ ID NO: 4538099 - DNA, 25 bp, Homo sapien
aggccaggcgcctctgggagcctac

SEQ ID NO: 4538100 - DNA, 25 bp, Homo sapien
aacggaagaacacacagcccgacca

SEQ ID NO: 4538101 - DNA, 25 bp, Homo sapien
gggcccgacccaagagcgacaagga

SEQ ID NO: 4538102 - DNA, 25 bp, Homo sapien
gaagatcagggagccccggactcgc

SEQ ID NO: 4538103 - DNA, 25 bp, Homo sapien
ggaagatcagggagccccggactcg

SEQ ID NO: 4538104 - DNA, 25 bp, Homo sapien
ccaggacccgcagtagccgggatgc

SEQ ID NO: 4538105 - DNA, 25 bp, Homo sapien
tcagctgccgtaaggctccgcaggt

SEQ ID NO: 4538106 - DNA, 25 bp, Homo sapien
aggctccgcaggtgaagacccagga

SEQ ID NO: 4538107 - DNA, 25 bp, Homo sapien
gggaacgccctgtgacgtcatcgag

SEQ ID NO: 4538108 - DNA, 25 bp, Homo sapien
ggcgccttcgcggaaggtgcgtccg

SEQ ID NO: 4538109 - DNA, 25 bp, Homo sapien
cttggcgccttcgcggaaggtgcgt

SEQ ID NO: 4538110 - DNA, 25 bp, Homo sapien
ttggcgccttcgcggaaggtgcgtc

SEQ ID NO: 4538111 - DNA, 25 bp, Homo sapien
tcttggcgccttcgcggaaggtgcg

SEQ ID NO: 4538112 - DNA, 25 bp, Homo sapien
cgctgccaacccgtgggacccggcg

SEQ ID NO: 4538113 - DNA, 25 bp, Homo sapien
gctgggctagtgctaggccacttca

SEQ ID NO: 4538114 - DNA, 25 bp, Homo sapien
gtccgcgcctaacggcgctgggcta

SEQ ID NO: 4538115 - DNA, 25 bp, Homo sapien
cctaacggcgctgggctagtgctag

SEQ ID NO: 4538116 - DNA, 25 bp, Homo sapien
aatataagtgaattaaccatttctc

SEQ ID NO: 4538117 - DNA, 25 bp, Homo sapien
gtgtgtttatcgtctggtgtggtgg

SEQ ID NO: 4538118 - DNA, 25 bp, Homo sapien
atgtgtgtttatcgtctggtgtggt

SEQ ID NO: 4538119 - DNA, 25 bp, Homo sapien
aaatgtgtgtttatcgtctggtgtg

SEQ ID NO: 4538120 - DNA, 25 bp, Homo sapien
cagcatctagtgagggtcttgccat

SEQ ID NO: 4538121 - DNA, 25 bp, Homo sapien
tccactcactgaaaagagtcgttca

SEQ ID NO: 4538122 - DNA, 25 bp, Homo sapien
gagtcgttcatggtagctaacctgt

SEQ ID NO: 4538123 - DNA, 25 bp, Homo sapien
aaacttagccttttatcatgagccc

SEQ ID NO: 4538124 - DNA, 25 bp, Homo sapien
taagagtgatcgtaatatctcgaac

SEQ ID NO: 4538125 - DNA, 25 bp, Homo sapien
aaaatctgttcataccccacgttgg

SEQ ID NO: 4538126 - DNA, 25 bp, Homo sapien
tttataaggaagcaggatcattacc

SEQ ID NO: 4538127 - DNA, 25 bp, Homo sapien
gcgcctggcctcattgtactcctta

SEQ ID NO: 4538128 - DNA, 25 bp, Homo sapien
ccagttgtggtgtttggcgccagaa

SEQ ID NO: 4538129 - DNA, 25 bp, Homo sapien
tgccctcagtgcacaatatccaatg

SEQ ID NO: 4538130 - DNA, 25 bp, Homo sapien
tctcgcacagggtggctccagttgt

SEQ ID NO: 4538131 - DNA, 25 bp, Homo sapien
taaatcataactctatagccgccac

SEQ ID NO: 4538132 - DNA, 25 bp, Homo sapien
cgggacgggacctcagtcgagcttt

SEQ ID NO: 4538133 - DNA, 25 bp, Homo sapien
cgcagaaatcggtgacaaagtgacc

SEQ ID NO: 4538134 - DNA, 25 bp, Homo sapien
cggccgctcagcaagaggtgagtct

SEQ ID NO: 4538135 - DNA, 25 bp, Homo sapien
cctgcagagattctggcgcgcagaa

SEQ ID NO: 4538136 - DNA, 25 bp, Homo sapien
cctctctctttctgggggcttggga

SEQ ID NO: 4538137 - DNA, 25 bp, Homo sapien
tctcctctctctttctgggggcttg

SEQ ID NO: 4538138 - DNA, 25 bp, Homo sapien
tctctttctgggggcttgggagtac

SEQ ID NO: 4538139 - DNA, 25 bp, Homo sapien
ctctctttctgggggcttgggagta

SEQ ID NO: 4538140 - DNA, 25 bp, Homo sapien
cagatactaacacttgagctgtctt

SEQ ID NO: 4538141 - DNA, 25 bp, Homo sapien
tattctcagatactaacacttgagc

SEQ ID NO: 4538142 - DNA, 25 bp, Homo sapien
ggaaattcagagtacgataggaaag

SEQ ID NO: 4538143 - DNA, 25 bp, Homo sapien
tgggtcaacactcttcagaggtcat

SEQ ID NO: 4538144 - DNA, 25 bp, Homo sapien
tttgagtttctcctggtgtggtgga

SEQ ID NO: 4538145 - DNA, 25 bp, Homo sapien
tgagccatggaagaactgcgaagat

SEQ ID NO: 4538146 - DNA, 25 bp, Homo sapien
ctggtggccgctgccagcggaggag

SEQ ID NO: 4538147 - DNA, 25 bp, Homo sapien
tctacttgtggagtcttcagttaag

SEQ ID NO: 4538148 - DNA, 25 bp, Homo sapien
ccaccgcgtggttgtgcttcttgtt

SEQ ID NO: 4538149 - DNA, 25 bp, Homo sapien
tactgaacatcaaacaacacacaga

SEQ ID NO: 4538150 - DNA, 25 bp, Homo sapien
caatatactgaacatcaaacaacac

SEQ ID NO: 4538151 - DNA, 25 bp, Homo sapien
gtgagccaccgcgtggttgtgcttc

SEQ ID NO: 4538152 - DNA, 25 bp, Homo sapien
ttccccagcctaagcagtcctctta

SEQ ID NO: 4538153 - DNA, 25 bp, Homo sapien
cctcaacttccccagcctaagcagt

SEQ ID NO: 4538154 - DNA, 25 bp, Homo sapien
tagctgggaccttaagtgtgtacta

SEQ ID NO: 4538155 - DNA, 25 bp, Homo sapien
gtactactactcttggataattttg

SEQ ID NO: 4538156 - DNA, 25 bp, Homo sapien
tgtccgaggaagattaatgcagctt

SEQ ID NO: 4538157 - DNA, 25 bp, Homo sapien
atgcgctgaattggtgtccgaggaa

SEQ ID NO: 4538158 - DNA, 25 bp, Homo sapien
tagaaaagatacagctgcgttctgg

SEQ ID NO: 4538159 - DNA, 25 bp, Homo sapien
cagcttccatgcagttggtggagat

SEQ ID NO: 4538160 - DNA, 25 bp, Homo sapien
ttgcttggaaatcgagtcagtgagg

SEQ ID NO: 4538161 - DNA, 25 bp, Homo sapien
gcttggaaatcgagtcagtgaggct

SEQ ID NO: 4538162 - DNA, 25 bp, Homo sapien
cttggaaatcgagtcagtgaggctc

SEQ ID NO: 4538163 - DNA, 25 bp, Homo sapien
tgcttggaaatcgagtcagtgaggc

SEQ ID NO: 4538164 - DNA, 25 bp, Homo sapien
tagcacaaggagtccatgcactcat

SEQ ID NO: 4538165 - DNA, 25 bp, Homo sapien
ctagcacaaggagtccatgcactca

SEQ ID NO: 4538166 - DNA, 25 bp, Homo sapien
gcactcatcccccatgctgaggatg

SEQ ID NO: 4538167 - DNA, 25 bp, Homo sapien
atcccccatgctgaggatggttcct

SEQ ID NO: 4538168 - DNA, 25 bp, Homo sapien
cttgagatgccttcacagaacaata

SEQ ID NO: 4538169 - DNA, 25 bp, Homo sapien
cagaacaatagagctcaacggtcat

SEQ ID NO: 4538170 - DNA, 25 bp, Homo sapien
tgtctagtagcccttgagatgcctt

SEQ ID NO: 4538171 - DNA, 25 bp, Homo sapien
cctggctgtctagtagcccttgaga

SEQ ID NO: 4538172 - DNA, 25 bp, Homo sapien
ttttgctaccagatcacagaggatt

SEQ ID NO: 4538173 - DNA, 25 bp, Homo sapien
cactggatctagacaaattcttgac

SEQ ID NO: 4538174 - DNA, 25 bp, Homo sapien
taaaactcttgaatcctattccagg

SEQ ID NO: 4538175 - DNA, 25 bp, Homo sapien
ggtgcagtaacaatctctgaatatg

SEQ ID NO: 4538176 - DNA, 25 bp, Homo sapien
gacatgtatgtgaaaacccgatcgt

SEQ ID NO: 4538177 - DNA, 25 bp, Homo sapien
tgagacatgtatgtgaaaacccgat

SEQ ID NO: 4538178 - DNA, 25 bp, Homo sapien
tgtatgtgaaaacccgatcgtcatg

SEQ ID NO: 4538179 - DNA, 25 bp, Homo sapien
catgtatgtgaaaacccgatcgtca

SEQ ID NO: 4538180 - DNA, 25 bp, Homo sapien
cagagtcatctacttggcccaggtg

SEQ ID NO: 4538181 - DNA, 25 bp, Homo sapien
tctttcatcaaacggcagccactgg

SEQ ID NO: 4538182 - DNA, 25 bp, Homo sapien
tgttaccgaaaacctagtgacctgc

SEQ ID NO: 4538183 - DNA, 25 bp, Homo sapien
tgttcagtgctatcacagggcctcc

SEQ ID NO: 4538184 - DNA, 25 bp, Homo sapien
tctggaacaagtcaaggagtagcca

SEQ ID NO: 4538185 - DNA, 25 bp, Homo sapien
gaacgctttcttatgccccaggatg

SEQ ID NO: 4538186 - DNA, 25 bp, Homo sapien
caggaagtttccttcatcgggaaca

SEQ ID NO: 4538187 - DNA, 25 bp, Homo sapien
tccatgtcacacacctcagctgggt

SEQ ID NO: 4538188 - DNA, 25 bp, Homo sapien
ggccgagaaagcattccttaaagct

SEQ ID NO: 4538189 - DNA, 25 bp, Homo sapien
tgtgtccggccgagaaagcattcct

SEQ ID NO: 4538190 - DNA, 25 bp, Homo sapien
cactgtgtccggccgagaaagcatt

SEQ ID NO: 4538191 - DNA, 25 bp, Homo sapien
tccggccgagaaagcattccttaaa

SEQ ID NO: 4538192 - DNA, 25 bp, Homo sapien
caggtttcagttggttgagtcctac

SEQ ID NO: 4538193 - DNA, 25 bp, Homo sapien
cctaccttatctgtttgttaggctt

SEQ ID NO: 4538194 - DNA, 25 bp, Homo sapien
ctcaagaggttactacctgcacagg

SEQ ID NO: 4538195 - DNA, 25 bp, Homo sapien
gctctaaatgccctgtgcttggtcc

SEQ ID NO: 4538196 - DNA, 25 bp, Homo sapien
cagacccggcctgtgttaggcattt

SEQ ID NO: 4538197 - DNA, 25 bp, Homo sapien
tccagggttctggtgcaatgcccaa

SEQ ID NO: 4538198 - DNA, 25 bp, Homo sapien
aagcaggagtcatttgcctctgtca

SEQ ID NO: 4538199 - DNA, 25 bp, Homo sapien
tgacacccttagagcaggaagtctg

SEQ ID NO: 4538200 - DNA, 25 bp, Homo sapien
caactcacaggctcttagctggggt

SEQ ID NO: 4538201 - DNA, 25 bp, Homo sapien
ttagacagtgttgctaattcttcag

SEQ ID NO: 4538202 - DNA, 25 bp, Homo sapien
agtgccccggtttggctgcaccaac

SEQ ID NO: 4538203 - DNA, 25 bp, Homo sapien
gggctcggctagaaacagattagac

SEQ ID NO: 4538204 - DNA, 25 bp, Homo sapien
ggcacaggcttgaccagtttttgag

SEQ ID NO: 4538205 - DNA, 25 bp, Homo sapien
ctgaagttatggcagggagcgaact

SEQ ID NO: 4538206 - DNA, 25 bp, Homo sapien
gttctctctccacctaaaagacagg

SEQ ID NO: 4538207 - DNA, 25 bp, Homo sapien
tactcaaatcgggacaatttcaggg

SEQ ID NO: 4538208 - DNA, 25 bp, Homo sapien
cagctcccgtagcaagaatagcagc

SEQ ID NO: 4538209 - DNA, 25 bp, Homo sapien
aggcctctatctccatccgtcccat

SEQ ID NO: 4538210 - DNA, 25 bp, Homo sapien
ccaccagctcccgtagcaagaatag

SEQ ID NO: 4538211 - DNA, 25 bp, Homo sapien
tccatccgtcccatcagacccttct

SEQ ID NO: 4538212 - DNA, 25 bp, Homo sapien
ggttgctaggaggacgacagagtga

SEQ ID NO: 4538213 - DNA, 25 bp, Homo sapien
ttgctaggaggacgacagagtgacc

SEQ ID NO: 4538214 - DNA, 25 bp, Homo sapien
gggttgctaggaggacgacagagtg

SEQ ID NO: 4538215 - DNA, 25 bp, Homo sapien
gttgctaggaggacgacagagtgac

SEQ ID NO: 4538216 - DNA, 25 bp, Homo sapien
gcagagggcttcttgttccgtctga

SEQ ID NO: 4538217 - DNA, 25 bp, Homo sapien
gggcttcttgttccgtctgactcac

SEQ ID NO: 4538218 - DNA, 25 bp, Homo sapien
ggatgcagagcagctcatagtttgg

SEQ ID NO: 4538219 - DNA, 25 bp, Homo sapien
ctgatgacagagattgagatctcaa

SEQ ID NO: 4538220 - DNA, 25 bp, Homo sapien
agccccacatttcttgggctcagca

SEQ ID NO: 4538221 - DNA, 25 bp, Homo sapien
gcatgtgcagaagccttcgagcctg

SEQ ID NO: 4538222 - DNA, 25 bp, Homo sapien
cagaagccccacatttcttgggctc

SEQ ID NO: 4538223 - DNA, 25 bp, Homo sapien
gcagctgcagcggaaccggcccctg

SEQ ID NO: 4538224 - DNA, 25 bp, Homo sapien
ccacagagcactttgccagatgctg

SEQ ID NO: 4538225 - DNA, 25 bp, Homo sapien
agagcactttgccagatgctgctca

SEQ ID NO: 4538226 - DNA, 25 bp, Homo sapien
agggaagctaactccacagagcact

SEQ ID NO: 4538227 - DNA, 25 bp, Homo sapien
ggaagctaactccacagagcacttt

SEQ ID NO: 4538228 - DNA, 25 bp, Homo sapien
agactccctcgtcagggtcccgtgg

SEQ ID NO: 4538229 - DNA, 25 bp, Homo sapien
atgctctggggagactccctcgtca

SEQ ID NO: 4538230 - DNA, 25 bp, Homo sapien
tctggggagactccctcgtcagggt

SEQ ID NO: 4538231 - DNA, 25 bp, Homo sapien
tggggagactccctcgtcagggtcc

SEQ ID NO: 4538232 - DNA, 25 bp, Homo sapien
ctgtgaagagcagggggagatatca

SEQ ID NO: 4538233 - DNA, 25 bp, Homo sapien
gagcagggggagatatcaccttgcg

SEQ ID NO: 4538234 - DNA, 25 bp, Homo sapien
tgaagagcagggggagatatcacct

SEQ ID NO: 4538235 - DNA, 25 bp, Homo sapien
aagagcagggggagatatcaccttg

SEQ ID NO: 4538236 - DNA, 25 bp, Homo sapien
ctgggggccaggatgccacagagaa

SEQ ID NO: 4538237 - DNA, 25 bp, Homo sapien
ggccaggatgccacagagaatttgg

SEQ ID NO: 4538238 - DNA, 25 bp, Homo sapien
tgggggccaggatgccacagagaat

SEQ ID NO: 4538239 - DNA, 25 bp, Homo sapien
ggggccaggatgccacagagaattt

SEQ ID NO: 4538240 - DNA, 25 bp, Homo sapien
cttgggacagggatcagccagtgga

SEQ ID NO: 4538241 - DNA, 25 bp, Homo sapien
tgggacagggatcagccagtggaga

SEQ ID NO: 4538242 - DNA, 25 bp, Homo sapien
ttgggacagggatcagccagtggag

SEQ ID NO: 4538243 - DNA, 25 bp, Homo sapien
ggacagggatcagccagtggagaga

SEQ ID NO: 4538244 - DNA, 25 bp, Homo sapien
ttttatctcggagatgaggtgggag

SEQ ID NO: 4538245 - DNA, 25 bp, Homo sapien
ttatctcggagatgaggtgggaggg

SEQ ID NO: 4538246 - DNA, 25 bp, Homo sapien
tttatctcggagatgaggtgggagg

SEQ ID NO: 4538247 - DNA, 25 bp, Homo sapien
gaccctgggctcgaagtgtgcgact

SEQ ID NO: 4538248 - DNA, 25 bp, Homo sapien
ccctgggctcgaagtgtgcgactca

SEQ ID NO: 4538249 - DNA, 25 bp, Homo sapien
aggaccctgggctcgaagtgtgcga

SEQ ID NO: 4538250 - DNA, 25 bp, Homo sapien
cctgggctcgaagtgtgcgactcac

SEQ ID NO: 4538251 - DNA, 25 bp, Homo sapien
gctttcacctccctcctgatcagtg

SEQ ID NO: 4538252 - DNA, 25 bp, Homo sapien
ctgctttcacctccctcctgatcag

SEQ ID NO: 4538253 - DNA, 25 bp, Homo sapien
gctgctttcacctccctcctgatca

SEQ ID NO: 4538254 - DNA, 25 bp, Homo sapien
tgctgctttcacctccctcctgatc

SEQ ID NO: 4538255 - DNA, 25 bp, Homo sapien
tttctctgttgcaagccccacagca

SEQ ID NO: 4538256 - DNA, 25 bp, Homo sapien
atgttggctgacagccaagcacagg

SEQ ID NO: 4538257 - DNA, 25 bp, Homo sapien
aagccccacagcaatgttctctgca

SEQ ID NO: 4538258 - DNA, 25 bp, Homo sapien
acagcaatgttctctgcactgctca

SEQ ID NO: 4538259 - DNA, 25 bp, Homo sapien
agcgcccgcacagccccagggctct

SEQ ID NO: 4538260 - DNA, 25 bp, Homo sapien
gctgccggggtctcctctggaagca

SEQ ID NO: 4538261 - DNA, 25 bp, Homo sapien
cctctggaagcagcgcccgcacagc

SEQ ID NO: 4538262 - DNA, 25 bp, Homo sapien
aagcagcgcccgcacagccccaggg

SEQ ID NO: 4538263 - DNA, 25 bp, Homo sapien
ctcttggagaagtgactctgcctgg

SEQ ID NO: 4538264 - DNA, 25 bp, Homo sapien
agtgactctgcctggcgcaccagat

SEQ ID NO: 4538265 - DNA, 25 bp, Homo sapien
aatgcctgggccccgtgagggcaca

SEQ ID NO: 4538266 - DNA, 25 bp, Homo sapien
acagctgggaacacaagatctccaa

SEQ ID NO: 4538267 - DNA, 25 bp, Homo sapien
gcggctggttgtggaaaaaggcctg

SEQ ID NO: 4538268 - DNA, 25 bp, Homo sapien
tttctgccacgaactctacggtccg

SEQ ID NO: 4538269 - DNA, 25 bp, Homo sapien
ggaaaaaggcctgggcgagctgtgc

SEQ ID NO: 4538270 - DNA, 25 bp, Homo sapien
gatatgtttgacacagtttgatcca

SEQ ID NO: 4538271 - DNA, 25 bp, Homo sapien
aagcccccactccgtccactactgc

SEQ ID NO: 4538272 - DNA, 25 bp, Homo sapien
acccacgaagcgagcagtttccgga

SEQ ID NO: 4538273 - DNA, 25 bp, Homo sapien
gaagcgagcagtttccggagctctc

SEQ ID NO: 4538274 - DNA, 25 bp, Homo sapien
ctgacacccacgaagcgagcagttt

SEQ ID NO: 4538275 - DNA, 25 bp, Homo sapien
cacgaagcgagcagtttccggagct

SEQ ID NO: 4538276 - DNA, 25 bp, Homo sapien
ttctcagttccagaaccctctcccc

SEQ ID NO: 4538277 - DNA, 25 bp, Homo sapien
tctcagttccagaaccctctcccct

SEQ ID NO: 4538278 - DNA, 25 bp, Homo sapien
ctcagttccagaaccctctcccctc

SEQ ID NO: 4538279 - DNA, 25 bp, Homo sapien
gctggtccaccacaggcgcattgtc

SEQ ID NO: 4538280 - DNA, 25 bp, Homo sapien
caaaggcatatgagggaccctcttc

SEQ ID NO: 4538281 - DNA, 25 bp, Homo sapien
cctcaaaggcatatgagggaccctc

SEQ ID NO: 4538282 - DNA, 25 bp, Homo sapien
tactgtgtccacctcaaaggcatat

SEQ ID NO: 4538283 - DNA, 25 bp, Homo sapien
tatgagggaccctcttccagaaaga

SEQ ID NO: 4538284 - DNA, 25 bp, Homo sapien
ctggaaaagccagcccaggacagca

SEQ ID NO: 4538285 - DNA, 25 bp, Homo sapien
gtagcagcagcttgttcaggaaaca

SEQ ID NO: 4538286 - DNA, 25 bp, Homo sapien
tgttcaggaaacacatcttcccctc

SEQ ID NO: 4538287 - DNA, 25 bp, Homo sapien
cctcactctcctgcgacaacaccaa

SEQ ID NO: 4538288 - DNA, 25 bp, Homo sapien
aaggagagaaactccaccagccagg

SEQ ID NO: 4538289 - DNA, 25 bp, Homo sapien
caggagagtgaagatgtcccggtaa

SEQ ID NO: 4538290 - DNA, 25 bp, Homo sapien
ggcacggtgagcaccgcccggcggg

SEQ ID NO: 4538291 - DNA, 25 bp, Homo sapien
ctgcagcagagtccgcacatccagg

SEQ ID NO: 4538292 - DNA, 25 bp, Homo sapien
tctcaggctaagaagcaccacagca

SEQ ID NO: 4538293 - DNA, 25 bp, Homo sapien
aggaatttagccaaaagtctcaggc

SEQ ID NO: 4538294 - DNA, 25 bp, Homo sapien
ggagtcctgaagctcaccggtcggg

SEQ ID NO: 4538295 - DNA, 25 bp, Homo sapien
agtctcaggctaagaagcaccacag

SEQ ID NO: 4538296 - DNA, 25 bp, Homo sapien
tcttcaagctcagactgtccatgag

SEQ ID NO: 4538297 - DNA, 25 bp, Homo sapien
gtcttcatcattgggctcatgctgg

SEQ ID NO: 4538298 - DNA, 25 bp, Homo sapien
tgccagtctacgtctgactccccgt

SEQ ID NO: 4538299 - DNA, 25 bp, Homo sapien
ggcagggcaagaccattgagctcct

SEQ ID NO: 4538300 - DNA, 25 bp, Homo sapien
gctctgaggagccataagccgttcc

SEQ ID NO: 4538301 - DNA, 25 bp, Homo sapien
ccctaaagaagccttgacagcctgg

SEQ ID NO: 4538302 - DNA, 25 bp, Homo sapien
gtcagctcccagcatactcaacaca

SEQ ID NO: 4538303 - DNA, 25 bp, Homo sapien
ataagccgttcctgtaggcgccaca

SEQ ID NO: 4538304 - DNA, 25 bp, Homo sapien
tgcggagagctgacccatcatggcc

SEQ ID NO: 4538305 - DNA, 25 bp, Homo sapien
aaagccgaacaaagtggctgtggct

SEQ ID NO: 4538306 - DNA, 25 bp, Homo sapien
ctgcggagagctgacccatcatggc

SEQ ID NO: 4538307 - DNA, 25 bp, Homo sapien
ttggaaaagccgaacaaagtggctg

SEQ ID NO: 4538308 - DNA, 25 bp, Homo sapien
cagccaggctcctcatggtgatctt

SEQ ID NO: 4538309 - DNA, 25 bp, Homo sapien
ttcccactctcgcagcacctcataa

SEQ ID NO: 4538310 - DNA, 25 bp, Homo sapien
gatcttcccactctcgcagcacctc

SEQ ID NO: 4538311 - DNA, 25 bp, Homo sapien
tctcgcagcacctcataaaacacat

SEQ ID NO: 4538312 - DNA, 25 bp, Homo sapien
tggagaagttggcacgattgtcagt

SEQ ID NO: 4538313 - DNA, 25 bp, Homo sapien
ttaaaagtatgaaaggctcggtcac

SEQ ID NO: 4538314 - DNA, 25 bp, Homo sapien
tgaaaggctcggtcactggagaagt

SEQ ID NO: 4538315 - DNA, 25 bp, Homo sapien
agttggcacgattgtcagtctctgg

SEQ ID NO: 4538316 - DNA, 25 bp, Homo sapien
cttgagtagagggaggcatcaccag

SEQ ID NO: 4538317 - DNA, 25 bp, Homo sapien
agcttgagtagagggaggcatcacc

SEQ ID NO: 4538318 - DNA, 25 bp, Homo sapien
gagtagagggaggcatcaccagaga

SEQ ID NO: 4538319 - DNA, 25 bp, Homo sapien
ttgagtagagggaggcatcaccaga

SEQ ID NO: 4538320 - DNA, 25 bp, Homo sapien
taggcagctcgaaggcggccttgca

SEQ ID NO: 4538321 - DNA, 25 bp, Homo sapien
agctcgaaggcggccttgcagagct

SEQ ID NO: 4538322 - DNA, 25 bp, Homo sapien
cttcaaggtccctttgtccaggttg

SEQ ID NO: 4538323 - DNA, 25 bp, Homo sapien
agcttcaaggtccctttgtccaggt

SEQ ID NO: 4538324 - DNA, 25 bp, Homo sapien
tgaaagtgacactccaaaacctgca

SEQ ID NO: 4538325 - DNA, 25 bp, Homo sapien
caatcgtggatgctttggaacagtg

SEQ ID NO: 4538326 - DNA, 25 bp, Homo sapien
tgcaaagaagacacaatcgtggatg

SEQ ID NO: 4538327 - DNA, 25 bp, Homo sapien
gacacaatcgtggatgctttggaac

SEQ ID NO: 4538328 - DNA, 25 bp, Homo sapien
gaagacacaatcgtggatgctttgg

SEQ ID NO: 4538329 - DNA, 25 bp, Homo sapien
tcctccgggcagtgaggagctgaaa

SEQ ID NO: 4538330 - DNA, 25 bp, Homo sapien
ctggacttagttcagggtcgctgtc

SEQ ID NO: 4538331 - DNA, 25 bp, Homo sapien
tcaccatcctccgggcagtgaggag

SEQ ID NO: 4538332 - DNA, 25 bp, Homo sapien
cagctggacttagttcagggtcgct

SEQ ID NO: 4538333 - DNA, 25 bp, Homo sapien
cacgaggagtaaacaagggctacaa

SEQ ID NO: 4538334 - DNA, 25 bp, Homo sapien
cagcaatgcacgaggagtaaacaag

SEQ ID NO: 4538335 - DNA, 25 bp, Homo sapien
aaacaagggctacaagctccaggcg

SEQ ID NO: 4538336 - DNA, 25 bp, Homo sapien
ggcgctggcgggaagacactctggc

SEQ ID NO: 4538337 - DNA, 25 bp, Homo sapien
caggtgggggtaggtgactgctgca

SEQ ID NO: 4538338 - DNA, 25 bp, Homo sapien
gacaggtgggggtaggtgactgctg

SEQ ID NO: 4538339 - DNA, 25 bp, Homo sapien
ggtgggggtaggtgactgctgcagc

SEQ ID NO: 4538340 - DNA, 25 bp, Homo sapien
ggacaggtgggggtaggtgactgct

SEQ ID NO: 4538341 - DNA, 25 bp, Homo sapien
gaaatttcatgagcagtcagcttgg

SEQ ID NO: 4538342 - DNA, 25 bp, Homo sapien
tatggaataaagaaatttcatgagc

SEQ ID NO: 4538343 - DNA, 25 bp, Homo sapien
ctatggaataaagaaatttcatgag

SEQ ID NO: 4538344 - DNA, 25 bp, Homo sapien
taaagaaatttcatgagcagtcagc

SEQ ID NO: 4538345 - DNA, 25 bp, Homo sapien
aggaaaccgatatccccaggagcgg

SEQ ID NO: 4538346 - DNA, 25 bp, Homo sapien
cacagcgaggaaaccgatatcccca

SEQ ID NO: 4538347 - DNA, 25 bp, Homo sapien
ctgaagatcccccacagcgaggaaa

SEQ ID NO: 4538348 - DNA, 25 bp, Homo sapien
aaccgatatccccaggagcggccag

SEQ ID NO: 4538349 - DNA, 25 bp, Homo sapien
tcctgagcatctctcgctcctcttg

SEQ ID NO: 4538350 - DNA, 25 bp, Homo sapien
gagcatctctcgctcctcttgcaga

SEQ ID NO: 4538351 - DNA, 25 bp, Homo sapien
tcgctcctcttgcagacttctgcac

SEQ ID NO: 4538352 - DNA, 25 bp, Homo sapien
ctctcgctcctcttgcagacttctg

SEQ ID NO: 4538353 - DNA, 25 bp, Homo sapien
caaggccccaagggctagtgtccag

SEQ ID NO: 4538354 - DNA, 25 bp, Homo sapien
aggccaaggccccaagggctagtgt

SEQ ID NO: 4538355 - DNA, 25 bp, Homo sapien
cccaagggctagtgtccagggctga

SEQ ID NO: 4538356 - DNA, 25 bp, Homo sapien
gccccaagggctagtgtccagggct

SEQ ID NO: 4538357 - DNA, 25 bp, Homo sapien
gggcttggagagtgaccgctcttcg

SEQ ID NO: 4538358 - DNA, 25 bp, Homo sapien
agctgattgggggtgaggtgaagca

SEQ ID NO: 4538359 - DNA, 25 bp, Homo sapien
attgggggtgaggtgaagcaggtct

SEQ ID NO: 4538360 - DNA, 25 bp, Homo sapien
cttggagagtgaccgctcttcgctc

SEQ ID NO: 4538361 - DNA, 25 bp, Homo sapien
cggagttgggttgatcctgcgagaa

SEQ ID NO: 4538362 - DNA, 25 bp, Homo sapien
gttgatcctgcgagaaggcttcgtc

SEQ ID NO: 4538363 - DNA, 25 bp, Homo sapien
tgggttgatcctgcgagaaggcttc

SEQ ID NO: 4538364 - DNA, 25 bp, Homo sapien
agttgggttgatcctgcgagaaggc

SEQ ID NO: 4538365 - DNA, 25 bp, Homo sapien
ctccaccaccgcaacagctagacct

SEQ ID NO: 4538366 - DNA, 25 bp, Homo sapien
agagtagccacaggtttttctcaaa

SEQ ID NO: 4538367 - DNA, 25 bp, Homo sapien
caaattcctatcttcaaacatctcc

SEQ ID NO: 4538368 - DNA, 25 bp, Homo sapien
ctgagagtagccacaggtttttctc

SEQ ID NO: 4538369 - DNA, 25 bp, Homo sapien
agctcgaatgactgactccccagag

SEQ ID NO: 4538370 - DNA, 25 bp, Homo sapien
gagcgccgagctcgaatgactgact

SEQ ID NO: 4538371 - DNA, 25 bp, Homo sapien
ctgcggagcgccgagctcgaatgac

SEQ ID NO: 4538372 - DNA, 25 bp, Homo sapien
gagccttcgtggtacccatctcctg

SEQ ID NO: 4538373 - DNA, 25 bp, Homo sapien
agcctacgggagggaactcctccag

SEQ ID NO: 4538374 - DNA, 25 bp, Homo sapien
gagcctacgggagggaactcctcca

SEQ ID NO: 4538375 - DNA, 25 bp, Homo sapien
gctccgggcaggctctccccgctga

SEQ ID NO: 4538376 - DNA, 25 bp, Homo sapien
tttggcggatcagacagcgtgaggc

SEQ ID NO: 4538377 - DNA, 25 bp, Homo sapien
tgaggtttggcggatcagacagcgt

SEQ ID NO: 4538378 - DNA, 25 bp, Homo sapien
gcggatcagacagcgtgaggctggg

SEQ ID NO: 4538379 - DNA, 25 bp, Homo sapien
gctctgggcctcggtcggagggaaa

SEQ ID NO: 4538380 - DNA, 25 bp, Homo sapien
tgccgaggcgcccggggtcttggcg

SEQ ID NO: 4538381 - DNA, 25 bp, Homo sapien
caaggctgccgaggcgcccggggtc

SEQ ID NO: 4538382 - DNA, 25 bp, Homo sapien
tggcaaggctgccgaggcgcccggg

SEQ ID NO: 4538383 - DNA, 25 bp, Homo sapien
cctcccggcctccctggcaaggctg

SEQ ID NO: 4538384 - DNA, 25 bp, Homo sapien
ccgcagggcccggagtgagctcagc

SEQ ID NO: 4538385 - DNA, 25 bp, Homo sapien
agggcccggagtgagctcagcgcgg

SEQ ID NO: 4538386 - DNA, 25 bp, Homo sapien
ggcccggagtgagctcagcgcggcc

SEQ ID NO: 4538387 - DNA, 25 bp, Homo sapien
ggagtgagctcagcgcggccgcctc

SEQ ID NO: 4538388 - DNA, 25 bp, Homo sapien
gtagggcgcgcctcgggtgggcggc

SEQ ID NO: 4538389 - DNA, 25 bp, Homo sapien
tgcgggaaccggcttcgagtcagac

SEQ ID NO: 4538390 - DNA, 25 bp, Homo sapien
agggctggactccactgcgggaacc

SEQ ID NO: 4538391 - DNA, 25 bp, Homo sapien
cagttggagtgcactcggcccggct

SEQ ID NO: 4538392 - DNA, 25 bp, Homo sapien
cgaaccctgggtgctgcgcgcgatc

SEQ ID NO: 4538393 - DNA, 25 bp, Homo sapien
ctccgaaccctgggtgctgcgcgcg

SEQ ID NO: 4538394 - DNA, 25 bp, Homo sapien
tccgaaccctgggtgctgcgcgcga

SEQ ID NO: 4538395 - DNA, 25 bp, Homo sapien
aaccctgggtgctgcgcgcgatcca

SEQ ID NO: 4538396 - DNA, 25 bp, Homo sapien
cagcagcgactccaaaacggccgcc

SEQ ID NO: 4538397 - DNA, 25 bp, Homo sapien
acgacggctgcgaccgacacctctt

SEQ ID NO: 4538398 - DNA, 25 bp, Homo sapien
gcagcgactccaaaacggccgccat

SEQ ID NO: 4538399 - DNA, 25 bp, Homo sapien
cgcacgacggctgcgaccgacacct

SEQ ID NO: 4538400 - DNA, 25 bp, Homo sapien
cgcgggatggggagggacccggctg

SEQ ID NO: 4538401 - DNA, 25 bp, Homo sapien
gcggagccggctgttgcccagaccc

SEQ ID NO: 4538402 - DNA, 25 bp, Homo sapien
ggaaaacatctcctaactgcaggga

SEQ ID NO: 4538403 - DNA, 25 bp, Homo sapien
ggctgctttttctagggaacttcta

SEQ ID NO: 4538404 - DNA, 25 bp, Homo sapien
tctgctccccgttgatcttgtaaca

SEQ ID NO: 4538405 - DNA, 25 bp, Homo sapien
gggacacttaacacctagcttctat

SEQ ID NO: 4538406 - DNA, 25 bp, Homo sapien
tctgtccttggttgcctgagcaaaa

SEQ ID NO: 4538407 - DNA, 25 bp, Homo sapien
gtacaggtggcctatacaaaagcac

SEQ ID NO: 4538408 - DNA, 25 bp, Homo sapien
aagcactccatgtttctgccgatac

SEQ ID NO: 4538409 - DNA, 25 bp, Homo sapien
gcaaaattgtataaagggagctgct

SEQ ID NO: 4538410 - DNA, 25 bp, Homo sapien
tcagtccacccaatccaatgtcaaa

SEQ ID NO: 4538411 - DNA, 25 bp, Homo sapien
gtaaatggcctagtgaaatagacac

SEQ ID NO: 4538412 - DNA, 25 bp, Homo sapien
cccaggccacctaggctgtgtttat

SEQ ID NO: 4538413 - DNA, 25 bp, Homo sapien
tatcaaggagaagtaagtgaggctc

SEQ ID NO: 4538414 - DNA, 25 bp, Homo sapien
tagggatccctgtgccatgtcttgc

SEQ ID NO: 4538415 - DNA, 25 bp, Homo sapien
ctaacaagggaaggcaagggcaact

SEQ ID NO: 4538416 - DNA, 25 bp, Homo sapien
cacacatgcatcaggtttaggagga

SEQ ID NO: 4538417 - DNA, 25 bp, Homo sapien
tcagaattgaggtgtgcagcatcca

SEQ ID NO: 4538418 - DNA, 25 bp, Homo sapien
ctttcaaagagatgcagcctggctc

SEQ ID NO: 4538419 - DNA, 25 bp, Homo sapien
ggtttgcaatgctcctgttggcagg

SEQ ID NO: 4538420 - DNA, 25 bp, Homo sapien
gccgtccagccctagatggtgagga

SEQ ID NO: 4538421 - DNA, 25 bp, Homo sapien
tcctgcgagggacaactggactctt

SEQ ID NO: 4538422 - DNA, 25 bp, Homo sapien
aactagacgtgcgaggcaaggatga

SEQ ID NO: 4538423 - DNA, 25 bp, Homo sapien
gagtcggagttactactccctagga

SEQ ID NO: 4538424 - DNA, 25 bp, Homo sapien
ggtctgagtcggagttactactccc

SEQ ID NO: 4538425 - DNA, 25 bp, Homo sapien
actactccctaggactttatatctg

SEQ ID NO: 4538426 - DNA, 25 bp, Homo sapien
tactccctaggactttatatctgcg

SEQ ID NO: 4538427 - DNA, 25 bp, Homo sapien
ttacaagcatgaaccgtagtgcccc

SEQ ID NO: 4538428 - DNA, 25 bp, Homo sapien
ttataaactacaaagcagtggtccc

SEQ ID NO: 4538429 - DNA, 25 bp, Homo sapien
cacctgtagtgcatgcctggctaat

SEQ ID NO: 4538430 - DNA, 25 bp, Homo sapien
tcttagagtattcatatgaatagca

SEQ ID NO: 4538431 - DNA, 25 bp, Homo sapien
ctatggtaatggaaagtgtacagca

SEQ ID NO: 4538432 - DNA, 25 bp, Homo sapien
agcacaaaactataagggtactgga

SEQ ID NO: 4538433 - DNA, 25 bp, Homo sapien
tacgtagtgagaaggaccctagggc

SEQ ID NO: 4538434 - DNA, 25 bp, Homo sapien
tattgcaatatcactaactacttgg

SEQ ID NO: 4538435 - DNA, 25 bp, Homo sapien
tatcagaggcacttgagaggtcgcc

SEQ ID NO: 4538436 - DNA, 25 bp, Homo sapien
tgttgacccatgaaactggccttgg

SEQ ID NO: 4538437 - DNA, 25 bp, Homo sapien
tattgacctgatctgtgttgaccca

SEQ ID NO: 4538438 - DNA, 25 bp, Homo sapien
tcttgtgctaaaacagggattcggc

SEQ ID NO: 4538439 - DNA, 25 bp, Homo sapien
aactcccattcacaactgctactaa

SEQ ID NO: 4538440 - DNA, 25 bp, Homo sapien
ccattcacaactgctactaagagaa

SEQ ID NO: 4538441 - DNA, 25 bp, Homo sapien
ctcccattcacaactgctactaaga

SEQ ID NO: 4538442 - DNA, 25 bp, Homo sapien
tcccattcacaactgctactaagag

SEQ ID NO: 4538443 - DNA, 25 bp, Homo sapien
aacgcaaggcttatgcagcagagca

SEQ ID NO: 4538444 - DNA, 25 bp, Homo sapien
aaagtgctaagaccacacctgaggt

SEQ ID NO: 4538445 - DNA, 25 bp, Homo sapien
cattagacttgtgggcgtcgctgca

SEQ ID NO: 4538446 - DNA, 25 bp, Homo sapien
ccagatgtggtcagtacgggacaca

SEQ ID NO: 4538447 - DNA, 25 bp, Homo sapien
tgaattgaactcaccgtcccttgtg

SEQ ID NO: 4538448 - DNA, 25 bp, Homo sapien
taggtagattgcaaactctcgaggg

SEQ ID NO: 4538449 - DNA, 25 bp, Homo sapien
ctctcgagggcaagcatgatatact

SEQ ID NO: 4538450 - DNA, 25 bp, Homo sapien
cacagtatcttactcctagagggtc

SEQ ID NO: 4538451 - DNA, 25 bp, Homo sapien
tgacaacaataataatggtacctta

SEQ ID NO: 4538452 - DNA, 25 bp, Homo sapien
caacaataataatggtaccttagaa

SEQ ID NO: 4538453 - DNA, 25 bp, Homo sapien
gaaagactttatgtaacagaaatat

SEQ ID NO: 4538454 - DNA, 25 bp, Homo sapien
agactttatgtaacagaaatataca

SEQ ID NO: 4538455 - DNA, 25 bp, Homo sapien
gggtcagacgtttttccagctcaaa

SEQ ID NO: 4538456 - DNA, 25 bp, Homo sapien
tgagaagaccatttgcctggccatg

SEQ ID NO: 4538457 - DNA, 25 bp, Homo sapien
gctgagtaatctctgagcggacacg

SEQ ID NO: 4538458 - DNA, 25 bp, Homo sapien
ggaacgtaactttcgcaccagtgga

SEQ ID NO: 4538459 - DNA, 25 bp, Homo sapien
ctgacactgaaacctggaaaggatg

SEQ ID NO: 4538460 - DNA, 25 bp, Homo sapien
gacactgaaacctggaaaggatgtt

SEQ ID NO: 4538461 - DNA, 25 bp, Homo sapien
cactgaaacctggaaaggatgttcc

SEQ ID NO: 4538462 - DNA, 25 bp, Homo sapien
tgacactgaaacctggaaaggatgt

SEQ ID NO: 4538463 - DNA, 25 bp, Homo sapien
cttacaaattccaagctttatcttg

SEQ ID NO: 4538464 - DNA, 25 bp, Homo sapien
cccagagatccaggcaatttatctg

SEQ ID NO: 4538465 - DNA, 25 bp, Homo sapien
gatccaggcaatttatctggtgaca

SEQ ID NO: 4538466 - DNA, 25 bp, Homo sapien
gagatccaggcaatttatctggtga

SEQ ID NO: 4538467 - DNA, 25 bp, Homo sapien
ccaggcaatttatctggtgacacac

SEQ ID NO: 4538468 - DNA, 25 bp, Homo sapien
catcgctaagctgttcatctggaaa

SEQ ID NO: 4538469 - DNA, 25 bp, Homo sapien
cattttctccatcgctaagctgttc

SEQ ID NO: 4538470 - DNA, 25 bp, Homo sapien
cgctaagctgttcatctggaaatac

SEQ ID NO: 4538471 - DNA, 25 bp, Homo sapien
tctccatcgctaagctgttcatctg

SEQ ID NO: 4538472 - DNA, 25 bp, Homo sapien
tgcctggcccgtactttaatttata

SEQ ID NO: 4538473 - DNA, 25 bp, Homo sapien
ttaggaatgcttagacatgatagtc

SEQ ID NO: 4538474 - DNA, 25 bp, Homo sapien
tatgtgagtctatgaaaactcttcc

SEQ ID NO: 4538475 - DNA, 25 bp, Homo sapien
gattctgggtctagtcagggtctca

SEQ ID NO: 4538476 - DNA, 25 bp, Homo sapien
gccatagtgcactatgactgtgcct

SEQ ID NO: 4538477 - DNA, 25 bp, Homo sapien
ggttgttagggagccatcatttcca

SEQ ID NO: 4538478 - DNA, 25 bp, Homo sapien
ccagtcaaaagggtcactctcaatt

SEQ ID NO: 4538479 - DNA, 25 bp, Homo sapien
ccaattgcagcaggggtcaagcgag

SEQ ID NO: 4538480 - DNA, 25 bp, Homo sapien
ggtcaagcgagtgtgcaactgaggg

SEQ ID NO: 4538481 - DNA, 25 bp, Homo sapien
ctattgtcaaacacggatgtaagaa

SEQ ID NO: 4538482 - DNA, 25 bp, Homo sapien
tattgtcaaacacggatgtaagaag

SEQ ID NO: 4538483 - DNA, 25 bp, Homo sapien
tggggaacaaagcactttcccatca

SEQ ID NO: 4538484 - DNA, 25 bp, Homo sapien
taaggctattcccagacttcttgag

SEQ ID NO: 4538485 - DNA, 25 bp, Homo sapien
tatgcttatacttggctgccagagg

SEQ ID NO: 4538486 - DNA, 25 bp, Homo sapien
ggcaaaaatgctacacaggttgagc

SEQ ID NO: 4538487 - DNA, 25 bp, Homo sapien
tatcttcgggaaagtgaatcttctg

SEQ ID NO: 4538488 - DNA, 25 bp, Homo sapien
gacgttggaggactcagacactagc

SEQ ID NO: 4538489 - DNA, 25 bp, Homo sapien
cgttggaggactcagacactagctt

SEQ ID NO: 4538490 - DNA, 25 bp, Homo sapien
ggacgttggaggactcagacactag

SEQ ID NO: 4538491 - DNA, 25 bp, Homo sapien
aggacgttggaggactcagacacta

SEQ ID NO: 4538492 - DNA, 25 bp, Homo sapien
gccgcgccatgtcttgactggctag

SEQ ID NO: 4538493 - DNA, 25 bp, Homo sapien
ctgccgcgccatgtcttgactggct

SEQ ID NO: 4538494 - DNA, 25 bp, Homo sapien
cgccatgtcttgactggctagctgc

SEQ ID NO: 4538495 - DNA, 25 bp, Homo sapien
ccatgtcttgactggctagctgcag

SEQ ID NO: 4538496 - DNA, 25 bp, Homo sapien
ctgcgtggcagcctccagggaagcc

SEQ ID NO: 4538497 - DNA, 25 bp, Homo sapien
tggcagcctccagggaagccctctg

SEQ ID NO: 4538498 - DNA, 25 bp, Homo sapien
cgtggcagcctccagggaagccctc

SEQ ID NO: 4538499 - DNA, 25 bp, Homo sapien
gcagcctccagggaagccctctggc

SEQ ID NO: 4538500 - DNA, 25 bp, Homo sapien
ccccatgcttctgacccagcgtctg

SEQ ID NO: 4538501 - DNA, 25 bp, Homo sapien
cccatgcttctgacccagcgtctgc

SEQ ID NO: 4538502 - DNA, 25 bp, Homo sapien
tggctgcggttggcaatctcctcgt

SEQ ID NO: 4538503 - DNA, 25 bp, Homo sapien
gcggttggcaatctcctcgtactgc

SEQ ID NO: 4538504 - DNA, 25 bp, Homo sapien
agcctggctgcggttggcaatctcc

SEQ ID NO: 4538505 - DNA, 25 bp, Homo sapien
ggttggcaatctcctcgtactgcac

SEQ ID NO: 4538506 - DNA, 25 bp, Homo sapien
caggaagcggctgttgtccatgaac

SEQ ID NO: 4538507 - DNA, 25 bp, Homo sapien
atgctgtccatgtccaggaagcggc

SEQ ID NO: 4538508 - DNA, 25 bp, Homo sapien
ggaagcggctgttgtccatgaacag

SEQ ID NO: 4538509 - DNA, 25 bp, Homo sapien
tccaggaagcggctgttgtccatga

SEQ ID NO: 4538510 - DNA, 25 bp, Homo sapien
ggcagtcagctctttcagggaagac

SEQ ID NO: 4538511 - DNA, 25 bp, Homo sapien
gtaagcttcatctacatactccttg

SEQ ID NO: 4538512 - DNA, 25 bp, Homo sapien
ccactcgtgtaggagaggctgttaa

SEQ ID NO: 4538513 - DNA, 25 bp, Homo sapien
tactccttgatgagcacaaattcat

SEQ ID NO: 4538514 - DNA, 25 bp, Homo sapien
tctgtacatttactgatctcaacct

SEQ ID NO: 4538515 - DNA, 25 bp, Homo sapien
cgaaccagacggaatcccagaagga

SEQ ID NO: 4538516 - DNA, 25 bp, Homo sapien
ccgaaccagacggaatcccagaagg

SEQ ID NO: 4538517 - DNA, 25 bp, Homo sapien
cacacagtctttacttctctgctct

SEQ ID NO: 4538518 - DNA, 25 bp, Homo sapien
tcttggtctgcacacagtctttact

SEQ ID NO: 4538519 - DNA, 25 bp, Homo sapien
catgagcctgtggtcatatctctcc

SEQ ID NO: 4538520 - DNA, 25 bp, Homo sapien
tctccttaatagagcctacttgctc

SEQ ID NO: 4538521 - DNA, 25 bp, Homo sapien
ttctggagggagatgtttcaacatg

SEQ ID NO: 4538522 - DNA, 25 bp, Homo sapien
gaagagatatggtctagaaagatgc

SEQ ID NO: 4538523 - DNA, 25 bp, Homo sapien
cacaattgacatctccattcccaaa

SEQ ID NO: 4538524 - DNA, 25 bp, Homo sapien
tcttctaccacaattgacatctcca

SEQ ID NO: 4538525 - DNA, 25 bp, Homo sapien
tctaccacaattgacatctccattc

SEQ ID NO: 4538526 - DNA, 25 bp, Homo sapien
attgacatctccattcccaaaatta

SEQ ID NO: 4538527 - DNA, 25 bp, Homo sapien
tctccagggcagctgaccaaccaca

SEQ ID NO: 4538528 - DNA, 25 bp, Homo sapien
aaccacaaactccaccaacatgtag

SEQ ID NO: 4538529 - DNA, 25 bp, Homo sapien
aactccaccaacatgtagaataagg

SEQ ID NO: 4538530 - DNA, 25 bp, Homo sapien
agggcagctgaccaaccacaaactc

SEQ ID NO: 4538531 - DNA, 25 bp, Homo sapien
ttgattgatgcataacgaactgtcc

SEQ ID NO: 4538532 - DNA, 25 bp, Homo sapien
cctgttccgatgtgcgttgattgat

SEQ ID NO: 4538533 - DNA, 25 bp, Homo sapien
gatgcataacgaactgtccctcgaa

SEQ ID NO: 4538534 - DNA, 25 bp, Homo sapien
actgtccctcgaaaacctgccacag

SEQ ID NO: 4538535 - DNA, 25 bp, Homo sapien
taaagaagaggtctgtttggttcgc

SEQ ID NO: 4538536 - DNA, 25 bp, Homo sapien
gattgggcatccttgctataaagga

SEQ ID NO: 4538537 - DNA, 25 bp, Homo sapien
tctattcatgcgtgatccatcccac

SEQ ID NO: 4538538 - DNA, 25 bp, Homo sapien
agagtgagaactcacgacccctccg

SEQ ID NO: 4538539 - DNA, 25 bp, Homo sapien
ttcctacatgtactaggaaagcgac

SEQ ID NO: 4538540 - DNA, 25 bp, Homo sapien
tggtaaattgtcgagccaagccaaa

SEQ ID NO: 4538541 - DNA, 25 bp, Homo sapien
ggtctgacgtcaccacaggaattgg

SEQ ID NO: 4538542 - DNA, 25 bp, Homo sapien
gaaagcgacccatagcgaagttcga

SEQ ID NO: 4538543 - DNA, 25 bp, Homo sapien
ggctacggcgaagatctgccagatt

SEQ ID NO: 4538544 - DNA, 25 bp, Homo sapien
aatgtgcctcgggactggctacggc

SEQ ID NO: 4538545 - DNA, 25 bp, Homo sapien
gatgtctcgatgcaagaatcccaca

SEQ ID NO: 4538546 - DNA, 25 bp, Homo sapien
tctgtctacccagccggagagtggt

SEQ ID NO: 4538547 - DNA, 25 bp, Homo sapien
aataaatctacaaacatggtctttc

SEQ ID NO: 4538548 - DNA, 25 bp, Homo sapien
gaccacatagttgaatcgatcattc

SEQ ID NO: 4538549 - DNA, 25 bp, Homo sapien
cacagccaataaatctacaaacatg

SEQ ID NO: 4538550 - DNA, 25 bp, Homo sapien
gttgaatcgatcattcctcccacag

SEQ ID NO: 4538551 - DNA, 25 bp, Homo sapien
acagagtgaagtgcgcttactccat

SEQ ID NO: 4538552 - DNA, 25 bp, Homo sapien
aactacttgtataacctggatctta

SEQ ID NO: 4538553 - DNA, 25 bp, Homo sapien
tagccactccaagaattttgcccag

SEQ ID NO: 4538554 - DNA, 25 bp, Homo sapien
tttgcccaggtttttagctgcattc

SEQ ID NO: 4538555 - DNA, 25 bp, Homo sapien
gcgggagtgcagtcacgcgatctcg

SEQ ID NO: 4538556 - DNA, 25 bp, Homo sapien
ctacaggtatgcaccaccgggccca

SEQ ID NO: 4538557 - DNA, 25 bp, Homo sapien
caggtatgcaccaccgggcccagct

SEQ ID NO: 4538558 - DNA, 25 bp, Homo sapien
ggcgggagtgcagtcacgcgatctc

SEQ ID NO: 4538559 - DNA, 25 bp, Homo sapien
tcacagcaacctcaggcctctcggg

SEQ ID NO: 4538560 - DNA, 25 bp, Homo sapien
cacagcaacctcaggcctctcgggt

SEQ ID NO: 4538561 - DNA, 25 bp, Homo sapien
ctgaagtcccagcttctgaagaggc

SEQ ID NO: 4538562 - DNA, 25 bp, Homo sapien
cagcctaagcaacagaatgagaacc

SEQ ID NO: 4538563 - DNA, 25 bp, Homo sapien
cctaagcaacagaatgagaacctgt

SEQ ID NO: 4538564 - DNA, 25 bp, Homo sapien
tgaagtcccagcttctgaagaggct

SEQ ID NO: 4538565 - DNA, 25 bp, Homo sapien
tagtcataggtatgttccctgaaat

SEQ ID NO: 4538566 - DNA, 25 bp, Homo sapien
gggtacctagtcataggtatgttcc

SEQ ID NO: 4538567 - DNA, 25 bp, Homo sapien
cttcaggggtacctagtcataggta

SEQ ID NO: 4538568 - DNA, 25 bp, Homo sapien
caggagttcaactagttttttacag

SEQ ID NO: 4538569 - DNA, 25 bp, Homo sapien
aaaacagcaacttccattttcagaa

SEQ ID NO: 4538570 - DNA, 25 bp, Homo sapien
cttgcagctttttcaaaacagcaac

SEQ ID NO: 4538571 - DNA, 25 bp, Homo sapien
gttttggttgttgagctgattccac

SEQ ID NO: 4538572 - DNA, 25 bp, Homo sapien
tttcagaacttgttttggttgttga

SEQ ID NO: 4538573 - DNA, 25 bp, Homo sapien
ctggtgagcatgtccaaggcatcgt

SEQ ID NO: 4538574 - DNA, 25 bp, Homo sapien
ggtgagcatgtccaaggcatcgtaa

SEQ ID NO: 4538575 - DNA, 25 bp, Homo sapien
tggtgagcatgtccaaggcatcgta

SEQ ID NO: 4538576 - DNA, 25 bp, Homo sapien
attccaacactcaggatatccagct

SEQ ID NO: 4538577 - DNA, 25 bp, Homo sapien
ctttctttcactaggattccaacac

SEQ ID NO: 4538578 - DNA, 25 bp, Homo sapien
ctttcactaggattccaacactcag

SEQ ID NO: 4538579 - DNA, 25 bp, Homo sapien
caacactcaggatatccagctgctc

SEQ ID NO: 4538580 - DNA, 25 bp, Homo sapien
agctacacaggcatccagttcccaa

SEQ ID NO: 4538581 - DNA, 25 bp, Homo sapien
tacactgatatggtagaacagctac

SEQ ID NO: 4538582 - DNA, 25 bp, Homo sapien
gcaatacactgatatggtagaacag

SEQ ID NO: 4538583 - DNA, 25 bp, Homo sapien
ctgatatggtagaacagctacacag

SEQ ID NO: 4538584 - DNA, 25 bp, Homo sapien
taatgaattcggacaaagatgctaa

SEQ ID NO: 4538585 - DNA, 25 bp, Homo sapien
taaatcgcatgctaatgaattcgga

SEQ ID NO: 4538586 - DNA, 25 bp, Homo sapien
gatgctaactctggaggtgttgcca

SEQ ID NO: 4538587 - DNA, 25 bp, Homo sapien
ctaacataggaagtaaatcgcatgc

SEQ ID NO: 4538588 - DNA, 25 bp, Homo sapien
caaaatcattcctcgggtaaaatct

SEQ ID NO: 4538589 - DNA, 25 bp, Homo sapien
cattcctcgggtaaaatctactata

SEQ ID NO: 4538590 - DNA, 25 bp, Homo sapien
ataaccaaatcaaccgagcaaagca

SEQ ID NO: 4538591 - DNA, 25 bp, Homo sapien
gagcaaagcattatgtctatgatct

SEQ ID NO: 4538592 - DNA, 25 bp, Homo sapien
tgttaacaaaacacactgagtggat

SEQ ID NO: 4538593 - DNA, 25 bp, Homo sapien
agtggatcctccctctgcgtgtgtg

SEQ ID NO: 4538594 - DNA, 25 bp, Homo sapien
caactattatcaatggctcagaacc

SEQ ID NO: 4538595 - DNA, 25 bp, Homo sapien
tcagggtttagataccaatgcaact

SEQ ID NO: 4538596 - DNA, 25 bp, Homo sapien
aagcaaagtacaactcaatgtcatt

SEQ ID NO: 4538597 - DNA, 25 bp, Homo sapien
caaagtacaactcaatgtcattttt

SEQ ID NO: 4538598 - DNA, 25 bp, Homo sapien
aagtacaactcaatgtcatttttac

SEQ ID NO: 4538599 - DNA, 25 bp, Homo sapien
gcaaagtacaactcaatgtcatttt

SEQ ID NO: 4538600 - DNA, 25 bp, Homo sapien
tcgctgtagaataaagtatcctggc

SEQ ID NO: 4538601 - DNA, 25 bp, Homo sapien
gcaccctaagtacaagaaagtcgcg

SEQ ID NO: 4538602 - DNA, 25 bp, Homo sapien
gaaagtcgcggccttcactgtcgtt

SEQ ID NO: 4538603 - DNA, 25 bp, Homo sapien
gaatccttcgtgttcggtgctggta

SEQ ID NO: 4538604 - DNA, 25 bp, Homo sapien
gccgtggcggacgcaggggtttctg

SEQ ID NO: 4538605 - DNA, 25 bp, Homo sapien
cgtggcggacgcaggggtttctgga

SEQ ID NO: 4538606 - DNA, 25 bp, Homo sapien
ctgggccgtggcggacgcaggggtt

SEQ ID NO: 4538607 - DNA, 25 bp, Homo sapien
gtggcggacgcaggggtttctggag

SEQ ID NO: 4538608 - DNA, 25 bp, Homo sapien
accctcggcaggcgggaccgccact

SEQ ID NO: 4538609 - DNA, 25 bp, Homo sapien
gagcgcggcttccagggccggccgg

SEQ ID NO: 4538610 - DNA, 25 bp, Homo sapien
ccaccgccgactgcggcgggacccg

SEQ ID NO: 4538611 - DNA, 25 bp, Homo sapien
tcggcaggcgggaccgccactgcct

SEQ ID NO: 4538612 - DNA, 25 bp, Homo sapien
gctcccccaagccgctgctcttgtg

SEQ ID NO: 4538613 - DNA, 25 bp, Homo sapien
ccccaagccgctgctcttgtgccag

SEQ ID NO: 4538614 - DNA, 25 bp, Homo sapien
ctgccggctcccccaagccgctgct

SEQ ID NO: 4538615 - DNA, 25 bp, Homo sapien
tcccccaagccgctgctcttgtgcc

SEQ ID NO: 4538616 - DNA, 25 bp, Homo sapien
tcgtccccaccgctcccatcgccgc

SEQ ID NO: 4538617 - DNA, 25 bp, Homo sapien
gtccccaccgctcccatcgccgctg

SEQ ID NO: 4538618 - DNA, 25 bp, Homo sapien
cctcgtccccaccgctcccatcgcc

SEQ ID NO: 4538619 - DNA, 25 bp, Homo sapien
tccccaccgctcccatcgccgctgc

SEQ ID NO: 4538620 - DNA, 25 bp, Homo sapien
cgctgacccgacccgacgttattct

SEQ ID NO: 4538621 - DNA, 25 bp, Homo sapien
agagcccgctgacccgacccgacgt

SEQ ID NO: 4538622 - DNA, 25 bp, Homo sapien
cagagcccgctgacccgacccgacg

SEQ ID NO: 4538623 - DNA, 25 bp, Homo sapien
tgctgattggagagtgcgttccgaa

SEQ ID NO: 4538624 - DNA, 25 bp, Homo sapien
cggagagtcgggcagaaaccgtctc

SEQ ID NO: 4538625 - DNA, 25 bp, Homo sapien
tagtcccattgcctatcacgaaggg

SEQ ID NO: 4538626 - DNA, 25 bp, Homo sapien
gcagcgtcggttggctagtcccatt

SEQ ID NO: 4538627 - DNA, 25 bp, Homo sapien
gcatcacaatggcagcgcgcatgcg

SEQ ID NO: 4538628 - DNA, 25 bp, Homo sapien
ggagcatcacaatggcagcgcgcat

SEQ ID NO: 4538629 - DNA, 25 bp, Homo sapien
catgcgcctaggaattctgggcctc

SEQ ID NO: 4538630 - DNA, 25 bp, Homo sapien
gcgcgcatgcgcctaggaattctgg

SEQ ID NO: 4538631 - DNA, 25 bp, Homo sapien
aggcagtcgcgatgaagggcccaaa

SEQ ID NO: 4538632 - DNA, 25 bp, Homo sapien
tcctcagcatcagcgctgacagcat

SEQ ID NO: 4538633 - DNA, 25 bp, Homo sapien
cagaaccgcctaacgtgaagctaat

SEQ ID NO: 4538634 - DNA, 25 bp, Homo sapien
tcgtgaggccctgcaagccttaagg

SEQ ID NO: 4538635 - DNA, 25 bp, Homo sapien
taatccctcatagaccataaaactg

SEQ ID NO: 4538636 - DNA, 25 bp, Homo sapien
tggatgaaatccacaaggaagtaca

SEQ ID NO: 4538637 - DNA, 25 bp, Homo sapien
caagattggaacctggataaaagcc

SEQ ID NO: 4538638 - DNA, 25 bp, Homo sapien
ttcaaccatgttaactcacctaagc

SEQ ID NO: 4538639 - DNA, 25 bp, Homo sapien
taagtttacacaataatttattgag

SEQ ID NO: 4538640 - DNA, 25 bp, Homo sapien
ttaagtttacacaataatttattga

SEQ ID NO: 4538641 - DNA, 25 bp, Homo sapien
gtttacacaataatttattgagagc

SEQ ID NO: 4538642 - DNA, 25 bp, Homo sapien
agtttacacaataatttattgagag

SEQ ID NO: 4538643 - DNA, 25 bp, Homo sapien
tgtcagccctagaaagatggctggg

SEQ ID NO: 4538644 - DNA, 25 bp, Homo sapien
ttgcatgtcagccctagaaagatgg

SEQ ID NO: 4538645 - DNA, 25 bp, Homo sapien
tgcatgtcagccctagaaagatggc

SEQ ID NO: 4538646 - DNA, 25 bp, Homo sapien
catgtcagccctagaaagatggctg

SEQ ID NO: 4538647 - DNA, 25 bp, Homo sapien
tgccttgtacttgacagtagatttg

SEQ ID NO: 4538648 - DNA, 25 bp, Homo sapien
cttgtacttgacagtagatttgtac

SEQ ID NO: 4538649 - DNA, 25 bp, Homo sapien
ctgccttgtacttgacagtagattt

SEQ ID NO: 4538650 - DNA, 25 bp, Homo sapien
gccttgtacttgacagtagatttgt

SEQ ID NO: 4538651 - DNA, 25 bp, Homo sapien
aactctgccggaagagctggatcag

SEQ ID NO: 4538652 - DNA, 25 bp, Homo sapien
gaaactctgccggaagagctggatc

SEQ ID NO: 4538653 - DNA, 25 bp, Homo sapien
gatagaaactctgccggaagagctg

SEQ ID NO: 4538654 - DNA, 25 bp, Homo sapien
ctctgccggaagagctggatcaggt

SEQ ID NO: 4538655 - DNA, 25 bp, Homo sapien
tgttaccagcggtgagcaatgaatc

SEQ ID NO: 4538656 - DNA, 25 bp, Homo sapien
cagaacgctactagcactgtcaaac

SEQ ID NO: 4538657 - DNA, 25 bp, Homo sapien
gctcccagaacgctactagcactgt

SEQ ID NO: 4538658 - DNA, 25 bp, Homo sapien
ctgttaccagcggtgagcaatgaat

SEQ ID NO: 4538659 - DNA, 25 bp, Homo sapien
catctcatccccaatgatctgggag

SEQ ID NO: 4538660 - DNA, 25 bp, Homo sapien
tcatctcatccccaatgatctggga

SEQ ID NO: 4538661 - DNA, 25 bp, Homo sapien
atctcatccccaatgatctgggaga

SEQ ID NO: 4538662 - DNA, 25 bp, Homo sapien
tctcatccccaatgatctgggagaa

SEQ ID NO: 4538663 - DNA, 25 bp, Homo sapien
tgtgcattccattggtaacttttca

SEQ ID NO: 4538664 - DNA, 25 bp, Homo sapien
gtgcattccattggtaacttttcat

SEQ ID NO: 4538665 - DNA, 25 bp, Homo sapien
ttcatttttgtcttccttcttagtc

SEQ ID NO: 4538666 - DNA, 25 bp, Homo sapien
ttttgtcttccttcttagtcttcat

SEQ ID NO: 4538667 - DNA, 25 bp, Homo sapien
gacgtgacttcatctaccaagtgga

SEQ ID NO: 4538668 - DNA, 25 bp, Homo sapien
tgattgtgattctgacgcctgctca

SEQ ID NO: 4538669 - DNA, 25 bp, Homo sapien
tatgtgagacactaatagccaaggg

SEQ ID NO: 4538670 - DNA, 25 bp, Homo sapien
tgcaagctctttgtaccgtcaggaa

SEQ ID NO: 4538671 - DNA, 25 bp, Homo sapien
gagcaaaagaccctccaatactttc

SEQ ID NO: 4538672 - DNA, 25 bp, Homo sapien
tccataattttgaatcagcctttac

SEQ ID NO: 4538673 - DNA, 25 bp, Homo sapien
tttattgatgtaagtgaacctggac

SEQ ID NO: 4538674 - DNA, 25 bp, Homo sapien
gcctttactactgtcgtcatttgtg

SEQ ID NO: 4538675 - DNA, 25 bp, Homo sapien
tgttgttgccagaccaaatggagct

SEQ ID NO: 4538676 - DNA, 25 bp, Homo sapien
tcttctataatgcagtgttgttgcc

SEQ ID NO: 4538677 - DNA, 25 bp, Homo sapien
aacatctgattagtctcttggctcc

SEQ ID NO: 4538678 - DNA, 25 bp, Homo sapien
taccgctcacgagataaatgaaggg

SEQ ID NO: 4538679 - DNA, 25 bp, Homo sapien
ggagctggataggcacagcctctgg

SEQ ID NO: 4538680 - DNA, 25 bp, Homo sapien
gagctggataggcacagcctctggc

SEQ ID NO: 4538681 - DNA, 25 bp, Homo sapien
ccacagtgaagtgcgtgaaaaatgc

SEQ ID NO: 4538682 - DNA, 25 bp, Homo sapien
gaggacaggatgctttcgctcatca

SEQ ID NO: 4538683 - DNA, 25 bp, Homo sapien
tgagaacatagtatagccccacaga

SEQ ID NO: 4538684 - DNA, 25 bp, Homo sapien
ttccccgttcacaatttcctggcag

SEQ ID NO: 4538685 - DNA, 25 bp, Homo sapien
gaatctccaatagggtactgacagc

SEQ ID NO: 4538686 - DNA, 25 bp, Homo sapien
cgaaggagagatccaactaggccca

SEQ ID NO: 4538687 - DNA, 25 bp, Homo sapien
tatgctggaggcgtgctataatgcc

SEQ ID NO: 4538688 - DNA, 25 bp, Homo sapien
tgtagcctttgagttggcccagcct

SEQ ID NO: 4538689 - DNA, 25 bp, Homo sapien
tcaccaggcttttgtggtagcaatg

SEQ ID NO: 4538690 - DNA, 25 bp, Homo sapien
aagtccagtgtcacagtcacggctc

SEQ ID NO: 4538691 - DNA, 25 bp, Homo sapien
ggtagcaatgtagccccaagattag

SEQ ID NO: 4538692 - DNA, 25 bp, Homo sapien
ccactgtactcagccaacctggtat

SEQ ID NO: 4538693 - DNA, 25 bp, Homo sapien
ttcagtgacatctcactggtggtgg

SEQ ID NO: 4538694 - DNA, 25 bp, Homo sapien
gtgacatctcactggtggtggtcat

SEQ ID NO: 4538695 - DNA, 25 bp, Homo sapien
agcagatgtgaatataattcctcca

SEQ ID NO: 4538696 - DNA, 25 bp, Homo sapien
gaaagcagatgtgaatataattcct

SEQ ID NO: 4538697 - DNA, 25 bp, Homo sapien
ttcaggaggcagctatagtcatcag

SEQ ID NO: 4538698 - DNA, 25 bp, Homo sapien
cagctatagtcatcaggaagctcta

SEQ ID NO: 4538699 - DNA, 25 bp, Homo sapien
ggaggcagctatagtcatcaggaag

SEQ ID NO: 4538700 - DNA, 25 bp, Homo sapien
aggaagctctatcaaactatttctt

SEQ ID NO: 4538701 - DNA, 25 bp, Homo sapien
acagtttagtaaggcaggatctgca

SEQ ID NO: 4538702 - DNA, 25 bp, Homo sapien
tcaaacagtttagtaaggcaggatc

SEQ ID NO: 4538703 - DNA, 25 bp, Homo sapien
caaacagtttagtaaggcaggatct

SEQ ID NO: 4538704 - DNA, 25 bp, Homo sapien
cttcaaacagtttagtaaggcagga

SEQ ID NO: 4538705 - DNA, 25 bp, Homo sapien
tgtgttcctctttctatacttatct

SEQ ID NO: 4538706 - DNA, 25 bp, Homo sapien
ctgtgttcctctttctatacttatc

SEQ ID NO: 4538707 - DNA, 25 bp, Homo sapien
gagtggagtccaatggtgtggtctt

SEQ ID NO: 4538708 - DNA, 25 bp, Homo sapien
cccagagtggagtccaatggtgtgg

SEQ ID NO: 4538709 - DNA, 25 bp, Homo sapien
aggaaacagcggtatcatggagccc

SEQ ID NO: 4538710 - DNA, 25 bp, Homo sapien
gaggctagggacaccagcagatact

SEQ ID NO: 4538711 - DNA, 25 bp, Homo sapien
gacagacagagctagcctgaactgg

SEQ ID NO: 4538712 - DNA, 25 bp, Homo sapien
tgacaaggtagactgggaaattccc

SEQ ID NO: 4538713 - DNA, 25 bp, Homo sapien
gagcaagggccttacagtatcccaa

SEQ ID NO: 4538714 - DNA, 25 bp, Homo sapien
aagagcaggaacaaatttgtaggta

SEQ ID NO: 4538715 - DNA, 25 bp, Homo sapien
tttgtaggtaaagatagatagctac

SEQ ID NO: 4538716 - DNA, 25 bp, Homo sapien
tatcccaatattcctggaagagcag

SEQ ID NO: 4538717 - DNA, 25 bp, Homo sapien
caatgcagcacagcgaagataaggg

SEQ ID NO: 4538718 - DNA, 25 bp, Homo sapien
gccaggaatatcacacccaatggag

SEQ ID NO: 4538719 - DNA, 25 bp, Homo sapien
tgagacccacaaataccagccagga

SEQ ID NO: 4538720 - DNA, 25 bp, Homo sapien
tggtatgcagttcctcaggcggagt

SEQ ID NO: 4538721 - DNA, 25 bp, Homo sapien
cccactttctgatagagttgtttgc

SEQ ID NO: 4538722 - DNA, 25 bp, Homo sapien
cgcccactttctgatagagttgttt

SEQ ID NO: 4538723 - DNA, 25 bp, Homo sapien
gaattattacaatagactgaactaa

SEQ ID NO: 4538724 - DNA, 25 bp, Homo sapien
actgaactaatggattgttactcac

SEQ ID NO: 4538725 - DNA, 25 bp, Homo sapien
taaatgattcaaatgttacgttgcc

SEQ ID NO: 4538726 - DNA, 25 bp, Homo sapien
gttacgttgccaaacaactgaacaa

SEQ ID NO: 4538727 - DNA, 25 bp, Homo sapien
gaagatgcggaatgagcctcttcac

SEQ ID NO: 4538728 - DNA, 25 bp, Homo sapien
tgcggaatgagcctcttcactgtct

SEQ ID NO: 4538729 - DNA, 25 bp, Homo sapien
caaagaaagaagatgcggaatgagc

SEQ ID NO: 4538730 - DNA, 25 bp, Homo sapien
aaagaagatgcggaatgagcctctt

SEQ ID NO: 4538731 - DNA, 25 bp, Homo sapien
gattcattcaactgaggttctttcc

SEQ ID NO: 4538732 - DNA, 25 bp, Homo sapien
aagacaataaacaacgtagattcat

SEQ ID NO: 4538733 - DNA, 25 bp, Homo sapien
aataaacaacgtagattcattcaac

SEQ ID NO: 4538734 - DNA, 25 bp, Homo sapien
caagatgaattatgtatttgctatt

SEQ ID NO: 4538735 - DNA, 25 bp, Homo sapien
ggtctccctgcatatctgtagagca

SEQ ID NO: 4538736 - DNA, 25 bp, Homo sapien
gaaaagcaggtccaagtggtctccc

SEQ ID NO: 4538737 - DNA, 25 bp, Homo sapien
gccatggcgtaaaggcactctgcat

SEQ ID NO: 4538738 - DNA, 25 bp, Homo sapien
catgtagggacagacctcgaggatg

SEQ ID NO: 4538739 - DNA, 25 bp, Homo sapien
tcaacagggtcatcccaatacaagg

SEQ ID NO: 4538740 - DNA, 25 bp, Homo sapien
tgccatggtgatcaaatggaagaga

SEQ ID NO: 4538741 - DNA, 25 bp, Homo sapien
caatacaaggatgggaatgctaaca

SEQ ID NO: 4538742 - DNA, 25 bp, Homo sapien
tagtatctgaagcatgtgtgccatg

SEQ ID NO: 4538743 - DNA, 25 bp, Homo sapien
gatctatagacagaaggcatggtgt

SEQ ID NO: 4538744 - DNA, 25 bp, Homo sapien
tcttctgattttatgttaggaagaa

SEQ ID NO: 4538745 - DNA, 25 bp, Homo sapien
caaaacatgaaacagatctatagac

SEQ ID NO: 4538746 - DNA, 25 bp, Homo sapien
gaaggcatggtgtatcttctgattt

SEQ ID NO: 4538747 - DNA, 25 bp, Homo sapien
ggaaaagctgtaattccaaaagtga

SEQ ID NO: 4538748 - DNA, 25 bp, Homo sapien
taagtcaggacaagaggaatggttt

SEQ ID NO: 4538749 - DNA, 25 bp, Homo sapien
aaaagtgagagcaagagtggcaaag

SEQ ID NO: 4538750 - DNA, 25 bp, Homo sapien
aatctttctaatctggtccgtgcct

SEQ ID NO: 4538751 - DNA, 25 bp, Homo sapien
gggttaagccaaccctttatgcaca

SEQ ID NO: 4538752 - DNA, 25 bp, Homo sapien
tgggcaagtcatgcaacttccctgt

SEQ ID NO: 4538753 - DNA, 25 bp, Homo sapien
tttatgcacaattaaacacctcggc

SEQ ID NO: 4538754 - DNA, 25 bp, Homo sapien
cctcggcaaagtttacatgatatag

SEQ ID NO: 4538755 - DNA, 25 bp, Homo sapien
gcaactgcaaactgcattaatgctt

SEQ ID NO: 4538756 - DNA, 25 bp, Homo sapien
aagacgaaccagatgtttctgtatc

SEQ ID NO: 4538757 - DNA, 25 bp, Homo sapien
ctgatagaagacgaaccagatgttt

SEQ ID NO: 4538758 - DNA, 25 bp, Homo sapien
cctgaggacaggtaatcctctgtgc

SEQ ID NO: 4538759 - DNA, 25 bp, Homo sapien
ctgcctattttgaagtgctccaaac

SEQ ID NO: 4538760 - DNA, 25 bp, Homo sapien
tattttgaagtgctccaaacagagg

SEQ ID NO: 4538761 - DNA, 25 bp, Homo sapien
agtgctccaaacagaggttttcctt

SEQ ID NO: 4538762 - DNA, 25 bp, Homo sapien
ttttgaagtgctccaaacagaggtt

SEQ ID NO: 4538763 - DNA, 25 bp, Homo sapien
gggctcggcccaagatgtccaaccg

SEQ ID NO: 4538764 - DNA, 25 bp, Homo sapien
atgcccctgcatggtgctgggctcg

SEQ ID NO: 4538765 - DNA, 25 bp, Homo sapien
gaaggcacacggtggagtggtgact

SEQ ID NO: 4538766 - DNA, 25 bp, Homo sapien
cccctgggtatccttggaaggcaca

SEQ ID NO: 4538767 - DNA, 25 bp, Homo sapien
tggccacaatcatagttaaaaagag

SEQ ID NO: 4538768 - DNA, 25 bp, Homo sapien
caagtcaaattattctgggccatca

SEQ ID NO: 4538769 - DNA, 25 bp, Homo sapien
ggcatgagccacactaatacactga

SEQ ID NO: 4538770 - DNA, 25 bp, Homo sapien
attaccagaccaaatggcatgagcc

SEQ ID NO: 4538771 - DNA, 25 bp, Homo sapien
acctccaaaccagttttcttatgag

SEQ ID NO: 4538772 - DNA, 25 bp, Homo sapien
caaaccagttttcttatgagcttta

SEQ ID NO: 4538773 - DNA, 25 bp, Homo sapien
tccaaaccagttttcttatgagctt

SEQ ID NO: 4538774 - DNA, 25 bp, Homo sapien
cctccaaaccagttttcttatgagc

SEQ ID NO: 4538775 - DNA, 25 bp, Homo sapien
aattgttgtggcaaagagaataacc

SEQ ID NO: 4538776 - DNA, 25 bp, Homo sapien
aaccatttccttgatgctatttgaa

SEQ ID NO: 4538777 - DNA, 25 bp, Homo sapien
tagtgaaagcgcaggtgctccaggt

SEQ ID NO: 4538778 - DNA, 25 bp, Homo sapien
cgaggatccctttcatcaggtggca

SEQ ID NO: 4538779 - DNA, 25 bp, Homo sapien
tggaactccaaagtagaatctccca

SEQ ID NO: 4538780 - DNA, 25 bp, Homo sapien
gaatggaactccaaagtagaatctc

SEQ ID NO: 4538781 - DNA, 25 bp, Homo sapien
ggaactccaaagtagaatctcccat

SEQ ID NO: 4538782 - DNA, 25 bp, Homo sapien
ggaatggaactccaaagtagaatct

SEQ ID NO: 4538783 - DNA, 25 bp, Homo sapien
cttgattaaagaaaataggaattgg

SEQ ID NO: 4538784 - DNA, 25 bp, Homo sapien
agttacaatgacaagccaggtgttg

SEQ ID NO: 4538785 - DNA, 25 bp, Homo sapien
acaatgacaagccaggtgttggtgg

SEQ ID NO: 4538786 - DNA, 25 bp, Homo sapien
aaagttacaatgacaagccaggtgt

SEQ ID NO: 4538787 - DNA, 25 bp, Homo sapien
gttggtggcgggcaaccaactactc

SEQ ID NO: 4538788 - DNA, 25 bp, Homo sapien
aagtacgtaactgaaaggacataat

SEQ ID NO: 4538789 - DNA, 25 bp, Homo sapien
aataaaaccatcaccgctatttctt

SEQ ID NO: 4538790 - DNA, 25 bp, Homo sapien
taacttagactatggtgatgagaaa

SEQ ID NO: 4538791 - DNA, 25 bp, Homo sapien
tgaaaggacataattaaatcacaac

SEQ ID NO: 4538792 - DNA, 25 bp, Homo sapien
ataacctgatattctggccagaaca

SEQ ID NO: 4538793 - DNA, 25 bp, Homo sapien
ctgtatccaccgtgccagggtcaaa

SEQ ID NO: 4538794 - DNA, 25 bp, Homo sapien
tggccagaacagtctgtatccaccg

SEQ ID NO: 4538795 - DNA, 25 bp, Homo sapien
gccagggtcaaaagttgagcaagag

SEQ ID NO: 4538796 - DNA, 25 bp, Homo sapien
ggttgcaaaggaataatggggatca

SEQ ID NO: 4538797 - DNA, 25 bp, Homo sapien
agagggcaaagatattctccacttt

SEQ ID NO: 4538798 - DNA, 25 bp, Homo sapien
gggatcacagtattgcacagagatt

SEQ ID NO: 4538799 - DNA, 25 bp, Homo sapien
gtcaacatgaatgcgctgctgagag

SEQ ID NO: 4538800 - DNA, 25 bp, Homo sapien
gatgtttcgctcttgtctcccaagc

SEQ ID NO: 4538801 - DNA, 25 bp, Homo sapien
cgatgtttcgctcttgtctcccaag

SEQ ID NO: 4538802 - DNA, 25 bp, Homo sapien
gaacctctgcctcctgggttcaagc

SEQ ID NO: 4538803 - DNA, 25 bp, Homo sapien
ggaacctctgcctcctgggttcaag

SEQ ID NO: 4538804 - DNA, 25 bp, Homo sapien
actgcgtgcattacatgaccacagc

SEQ ID NO: 4538805 - DNA, 25 bp, Homo sapien
cacagcttcctgtataagttccata

SEQ ID NO: 4538806 - DNA, 25 bp, Homo sapien
tgccagcacactgcgtgcattacat

SEQ ID NO: 4538807 - DNA, 25 bp, Homo sapien
catatgccaagtctggatccatgaa

SEQ ID NO: 4538808 - DNA, 25 bp, Homo sapien
tggacacaggccgataataccatgg

SEQ ID NO: 4538809 - DNA, 25 bp, Homo sapien
ccttttcagtaacagatggaccccg

SEQ ID NO: 4538810 - DNA, 25 bp, Homo sapien
ctgagagttctatgggttttcccct

SEQ ID NO: 4538811 - DNA, 25 bp, Homo sapien
tcttggcaaaggatgcacgtcagca

SEQ ID NO: 4538812 - DNA, 25 bp, Homo sapien
gcttcacagtttctggcatctctga

SEQ ID NO: 4538813 - DNA, 25 bp, Homo sapien
cacagcagctggcgtgcctggctgt

SEQ ID NO: 4538814 - DNA, 25 bp, Homo sapien
gctgaaatgcccacacccaaagctt

SEQ ID NO: 4538815 - DNA, 25 bp, Homo sapien
cagcggaacctgctggtgcatatga

SEQ ID NO: 4538816 - DNA, 25 bp, Homo sapien
gtattgtcatacatgagtttatgag

SEQ ID NO: 4538817 - DNA, 25 bp, Homo sapien
aggcatttctgatgtattgtcatac

SEQ ID NO: 4538818 - DNA, 25 bp, Homo sapien
tcttcctccataatggaatcttctt

SEQ ID NO: 4538819 - DNA, 25 bp, Homo sapien
catgagtttatgagtttcaatgaag

SEQ ID NO: 4538820 - DNA, 25 bp, Homo sapien
tgatcttctggcgatgtagcctagc

SEQ ID NO: 4538821 - DNA, 25 bp, Homo sapien
gatcttctggcgatgtagcctagca

SEQ ID NO: 4538822 - DNA, 25 bp, Homo sapien
catgatcttctggcgatgtagccta

SEQ ID NO: 4538823 - DNA, 25 bp, Homo sapien
tcttctggcgatgtagcctagcagc

SEQ ID NO: 4538824 - DNA, 25 bp, Homo sapien
tcttaatagattccgatcctgatgt

SEQ ID NO: 4538825 - DNA, 25 bp, Homo sapien
gatcctgatgtggttgctacaatta

SEQ ID NO: 4538826 - DNA, 25 bp, Homo sapien
catcattcttaatagattccgatcc

SEQ ID NO: 4538827 - DNA, 25 bp, Homo sapien
ccgatcctgatgtggttgctacaat

SEQ ID NO: 4538828 - DNA, 25 bp, Homo sapien
ttatgaaaaccagtagtaaatgtct

SEQ ID NO: 4538829 - DNA, 25 bp, Homo sapien
gtaaatgtctacaatggtacagtgg

SEQ ID NO: 4538830 - DNA, 25 bp, Homo sapien
taaaccaagatatgatcactttact

SEQ ID NO: 4538831 - DNA, 25 bp, Homo sapien
taacactggaggcaagcagagaatt

SEQ ID NO: 4538832 - DNA, 25 bp, Homo sapien
ctgaagtatccacgttatcatgtcc

SEQ ID NO: 4538833 - DNA, 25 bp, Homo sapien
tatccacgttatcatgtccttctgg

SEQ ID NO: 4538834 - DNA, 25 bp, Homo sapien
tatcatgtccttctggccttctaac

SEQ ID NO: 4538835 - DNA, 25 bp, Homo sapien
cttctaactggggaattcctttgag

SEQ ID NO: 4538836 - DNA, 25 bp, Homo sapien
cagatatggagggtcaattatgtct

SEQ ID NO: 4538837 - DNA, 25 bp, Homo sapien
tcaaactgcgatgggatgaatccct

SEQ ID NO: 4538838 - DNA, 25 bp, Homo sapien
gaatccctagatatggaacccacag

SEQ ID NO: 4538839 - DNA, 25 bp, Homo sapien
tctcttggtatcctcagggaattgg

SEQ ID NO: 4538840 - DNA, 25 bp, Homo sapien
tagtaaacccaatgccagaatatga

SEQ ID NO: 4538841 - DNA, 25 bp, Homo sapien
ttcaggagctttttgaagctgttgc

SEQ ID NO: 4538842 - DNA, 25 bp, Homo sapien
ctcttctagtaaacccaatgccaga

SEQ ID NO: 4538843 - DNA, 25 bp, Homo sapien
gataaaagtcaaatgttacttcttc

SEQ ID NO: 4538844 - DNA, 25 bp, Homo sapien
tatatagcatactgggactcaggga

SEQ ID NO: 4538845 - DNA, 25 bp, Homo sapien
tacaatggactacgcagctatcaag

SEQ ID NO: 4538846 - DNA, 25 bp, Homo sapien
ggtgttacaactaccatgacgtggc

SEQ ID NO: 4538847 - DNA, 25 bp, Homo sapien
gaggcacacatatggcaatgacagc

SEQ ID NO: 4538848 - DNA, 25 bp, Homo sapien
tcaaatacggtcctgagaatgtaca

SEQ ID NO: 4538849 - DNA, 25 bp, Homo sapien
gagaatgtacatcatgatatcacag

SEQ ID NO: 4538850 - DNA, 25 bp, Homo sapien
catttggagcatcccttcggtccac

SEQ ID NO: 4538851 - DNA, 25 bp, Homo sapien
gaatctgtgtctattgcccgctcaa

SEQ ID NO: 4538852 - DNA, 25 bp, Homo sapien
agcagggcagaattcaggaggtggt

SEQ ID NO: 4538853 - DNA, 25 bp, Homo sapien
ctgaaagcagggcagaattcaggag

SEQ ID NO: 4538854 - DNA, 25 bp, Homo sapien
aaagcagggcagaattcaggaggtg

SEQ ID NO: 4538855 - DNA, 25 bp, Homo sapien
gaaagcagggcagaattcaggaggt

SEQ ID NO: 4538856 - DNA, 25 bp, Homo sapien
ttctccttttcttctgcatatgttc

SEQ ID NO: 4538857 - DNA, 25 bp, Homo sapien
tctccttttcttctgcatatgttca

SEQ ID NO: 4538858 - DNA, 25 bp, Homo sapien
tccttttcttctgcatatgttcagc

SEQ ID NO: 4538859 - DNA, 25 bp, Homo sapien
ttttctccttttcttctgcatatgt

SEQ ID NO: 4538860 - DNA, 25 bp, Homo sapien
gctatgctgggttttggagtaatga

SEQ ID NO: 4538861 - DNA, 25 bp, Homo sapien
tgctgggttttggagtaatgataaa

SEQ ID NO: 4538862 - DNA, 25 bp, Homo sapien
ttgctatgctgggttttggagtaat

SEQ ID NO: 4538863 - DNA, 25 bp, Homo sapien
tatgctgggttttggagtaatgata

SEQ ID NO: 4538864 - DNA, 25 bp, Homo sapien
tattgaagtctttcagtgattcatc

SEQ ID NO: 4538865 - DNA, 25 bp, Homo sapien
tttagttcataaactccatggcctg

SEQ ID NO: 4538866 - DNA, 25 bp, Homo sapien
tagttcataaactccatggcctgat

SEQ ID NO: 4538867 - DNA, 25 bp, Homo sapien
tccatggcctgatacacctggtttc

SEQ ID NO: 4538868 - DNA, 25 bp, Homo sapien
tgtttatgacattctctaagccagt

SEQ ID NO: 4538869 - DNA, 25 bp, Homo sapien
attctctaagccagtttcattattt

SEQ ID NO: 4538870 - DNA, 25 bp, Homo sapien
gacattctctaagccagtttcatta

SEQ ID NO: 4538871 - DNA, 25 bp, Homo sapien
aaatgtggccactttgtttatgaca

SEQ ID NO: 4538872 - DNA, 25 bp, Homo sapien
tgtcatttttaccttcatataatga

SEQ ID NO: 4538873 - DNA, 25 bp, Homo sapien
tcatttttaccttcatataatgact

SEQ ID NO: 4538874 - DNA, 25 bp, Homo sapien
ctgttgaaacaatatttttgtcatt

SEQ ID NO: 4538875 - DNA, 25 bp, Homo sapien
tttgtcatttttaccttcatataat

SEQ ID NO: 4538876 - DNA, 25 bp, Homo sapien
tgtgtggcatgggttcaatgcaaag

SEQ ID NO: 4538877 - DNA, 25 bp, Homo sapien
ttttggcaatggcactgtgtggcat

SEQ ID NO: 4538878 - DNA, 25 bp, Homo sapien
gggttcaatgcaaagcaagtgaatg

SEQ ID NO: 4538879 - DNA, 25 bp, Homo sapien
tttcccactccaggtacataacgct

SEQ ID NO: 4538880 - DNA, 25 bp, Homo sapien
tctattagtgtattatattgtttaa

SEQ ID NO: 4538881 - DNA, 25 bp, Homo sapien
agcatttcttctattagtgtattat

SEQ ID NO: 4538882 - DNA, 25 bp, Homo sapien
atagatgaggacctgaagcatttct

SEQ ID NO: 4538883 - DNA, 25 bp, Homo sapien
ccacaatatagatgaggacctgaag

SEQ ID NO: 4538884 - DNA, 25 bp, Homo sapien
acttattgggatccattaaagatgc

SEQ ID NO: 4538885 - DNA, 25 bp, Homo sapien
acaagaacttattgggatccattaa

SEQ ID NO: 4538886 - DNA, 25 bp, Homo sapien
catacctctgaagtaccagtaacaa

SEQ ID NO: 4538887 - DNA, 25 bp, Homo sapien
tggtcttgttaaaagcctcggcaag

SEQ ID NO: 4538888 - DNA, 25 bp, Homo sapien
aaagaaatccagcatcatatttctt

SEQ ID NO: 4538889 - DNA, 25 bp, Homo sapien
ctgtgaaagaaatccagcatcatat

SEQ ID NO: 4538890 - DNA, 25 bp, Homo sapien
tgtgaaagaaatccagcatcatatt

SEQ ID NO: 4538891 - DNA, 25 bp, Homo sapien
tgaaagaaatccagcatcatatttc

SEQ ID NO: 4538892 - DNA, 25 bp, Homo sapien
tctctgcacttaacatcttggtaat

SEQ ID NO: 4538893 - DNA, 25 bp, Homo sapien
ttctctgcacttaacatcttggtaa

SEQ ID NO: 4538894 - DNA, 25 bp, Homo sapien
tcttctctgcacttaacatcttggt

SEQ ID NO: 4538895 - DNA, 25 bp, Homo sapien
cttctctgcacttaacatcttggta

SEQ ID NO: 4538896 - DNA, 25 bp, Homo sapien
cagacaacgtaaaggatattccact

SEQ ID NO: 4538897 - DNA, 25 bp, Homo sapien
cactagtacctctacttgaaagtcc

SEQ ID NO: 4538898 - DNA, 25 bp, Homo sapien
atttcttcgccacatctcagcaaca

SEQ ID NO: 4538899 - DNA, 25 bp, Homo sapien
ctggctaataagagacagtccattt

SEQ ID NO: 4538900 - DNA, 25 bp, Homo sapien
acccagcctgcttaaacgtacatga

SEQ ID NO: 4538901 - DNA, 25 bp, Homo sapien
ttcatgcagtcttgaaacagcaccc

SEQ ID NO: 4538902 - DNA, 25 bp, Homo sapien
agcctgcttaaacgtacatgaagac

SEQ ID NO: 4538903 - DNA, 25 bp, Homo sapien
tgcagtcttgaaacagcacccagcc

SEQ ID NO: 4538904 - DNA, 25 bp, Homo sapien
cctagagagtggcagatgtatgctt

SEQ ID NO: 4538905 - DNA, 25 bp, Homo sapien
ctagagagtggcagatgtatgctta

SEQ ID NO: 4538906 - DNA, 25 bp, Homo sapien
agcaagggtcctagagagtggcaga

SEQ ID NO: 4538907 - DNA, 25 bp, Homo sapien
tagagagtggcagatgtatgcttac

SEQ ID NO: 4538908 - DNA, 25 bp, Homo sapien
caaactatgtccacacgattgtact

SEQ ID NO: 4538909 - DNA, 25 bp, Homo sapien
tactgcacctcatcacagctttgtg

SEQ ID NO: 4538910 - DNA, 25 bp, Homo sapien
tataagccacaagtaagagttcttc

SEQ ID NO: 4538911 - DNA, 25 bp, Homo sapien
actagatatgaaactggtactgcac

SEQ ID NO: 4538912 - DNA, 25 bp, Homo sapien
tgttgcccaacctgtcttcggattt

SEQ ID NO: 4538913 - DNA, 25 bp, Homo sapien
acttcaatgtgttgcccaacctgtc

SEQ ID NO: 4538914 - DNA, 25 bp, Homo sapien
gcaatggcagcctcccaatcaggat

SEQ ID NO: 4538915 - DNA, 25 bp, Homo sapien
tattcttcaattgcatctgtatagc

SEQ ID NO: 4538916 - DNA, 25 bp, Homo sapien
tgtgggtttgctgatcaggatatac

SEQ ID NO: 4538917 - DNA, 25 bp, Homo sapien
ttgtgggtttgctgatcaggatata

SEQ ID NO: 4538918 - DNA, 25 bp, Homo sapien
tattgtgggtttgctgatcaggata

SEQ ID NO: 4538919 - DNA, 25 bp, Homo sapien
ctgcatacaggtaagaatcttcaaa

SEQ ID NO: 4538920 - DNA, 25 bp, Homo sapien
tgttcctgtccaagtactcaggtaa

SEQ ID NO: 4538921 - DNA, 25 bp, Homo sapien
gacagagataacattctgctcttca

SEQ ID NO: 4538922 - DNA, 25 bp, Homo sapien
aatttgtcctggctataaccctgga

SEQ ID NO: 4538923 - DNA, 25 bp, Homo sapien
atattactgcatatactcttcccaa

SEQ ID NO: 4538924 - DNA, 25 bp, Homo sapien
ctgaaagtgcagttatagagatact

SEQ ID NO: 4538925 - DNA, 25 bp, Homo sapien
cagagtaggaacagtaaacatctga

SEQ ID NO: 4538926 - DNA, 25 bp, Homo sapien
gaacagtaaacatctgaactgaaag

SEQ ID NO: 4538927 - DNA, 25 bp, Homo sapien
tatagagatacttctgtcatgatca

SEQ ID NO: 4538928 - DNA, 25 bp, Homo sapien
gctgaagatcaattcatgaaggatc

SEQ ID NO: 4538929 - DNA, 25 bp, Homo sapien
cacaaattccatagcaaagagtttt

SEQ ID NO: 4538930 - DNA, 25 bp, Homo sapien
aaaaactgctgaagatcaattcatg

SEQ ID NO: 4538931 - DNA, 25 bp, Homo sapien
cttcacaaattccatagcaaagagt

SEQ ID NO: 4538932 - DNA, 25 bp, Homo sapien
tccgagtcaggttcttctctaaggc

SEQ ID NO: 4538933 - DNA, 25 bp, Homo sapien
ttataaagctttgcatcccaaagca

SEQ ID NO: 4538934 - DNA, 25 bp, Homo sapien
ccaaagcattaacctgcttatgaga

SEQ ID NO: 4538935 - DNA, 25 bp, Homo sapien
gacagggattctccgagtcaggttc

SEQ ID NO: 4538936 - DNA, 25 bp, Homo sapien
taatctctgagtgtaatacttctac

SEQ ID NO: 4538937 - DNA, 25 bp, Homo sapien
atgaagtggatgttgagagacattt

SEQ ID NO: 4538938 - DNA, 25 bp, Homo sapien
ccaggaaccaagacgcaaagcaaat

SEQ ID NO: 4538939 - DNA, 25 bp, Homo sapien
tgaatagctcataattttgttcatc

SEQ ID NO: 4538940 - DNA, 25 bp, Homo sapien
cttcctggcaagcagcataagctcc

SEQ ID NO: 4538941 - DNA, 25 bp, Homo sapien
ataagctcccgctttaacagcccga

SEQ ID NO: 4538942 - DNA, 25 bp, Homo sapien
ggcaagcagcataagctcccgcttt

SEQ ID NO: 4538943 - DNA, 25 bp, Homo sapien
gcagcataagctcccgctttaacag

SEQ ID NO: 4538944 - DNA, 25 bp, Homo sapien
tgtgttgttccccacgaagtggcca

SEQ ID NO: 4538945 - DNA, 25 bp, Homo sapien
tccccacgaagtggccatgtgttct

SEQ ID NO: 4538946 - DNA, 25 bp, Homo sapien
tcttcctctgattcgttctcctttc

SEQ ID NO: 4538947 - DNA, 25 bp, Homo sapien
ttcttcctgatactctctctacccc

SEQ ID NO: 4538948 - DNA, 25 bp, Homo sapien
taatttgcgatcacataagctatac

SEQ ID NO: 4538949 - DNA, 25 bp, Homo sapien
taagctatacatacgaaacacagag

SEQ ID NO: 4538950 - DNA, 25 bp, Homo sapien
tctagattatactgcacccaagggc

SEQ ID NO: 4538951 - DNA, 25 bp, Homo sapien
tctaattctatattaaaccatgcgg

SEQ ID NO: 4538952 - DNA, 25 bp, Homo sapien
tgtaggctgtatatgacgtggtcat

SEQ ID NO: 4538953 - DNA, 25 bp, Homo sapien
aatggcagtggtatgcaactgggcc

SEQ ID NO: 4538954 - DNA, 25 bp, Homo sapien
gacgtggtcatatgaatggtgttca

SEQ ID NO: 4538955 - DNA, 25 bp, Homo sapien
ggcctctgcgagctcacagtcaaga

SEQ ID NO: 4538956 - DNA, 25 bp, Homo sapien
catatagtcatttctacgacatatt

SEQ ID NO: 4538957 - DNA, 25 bp, Homo sapien
tcccatatagtcatttctacgacat

SEQ ID NO: 4538958 - DNA, 25 bp, Homo sapien
ttttcctcttcccatatagtcattt

SEQ ID NO: 4538959 - DNA, 25 bp, Homo sapien
tcttcccatatagtcatttctacga

SEQ ID NO: 4538960 - DNA, 25 bp, Homo sapien
tcttcattcaacggacagcgtgaat

SEQ ID NO: 4538961 - DNA, 25 bp, Homo sapien
ctcttcattcaacggacagcgtgaa

SEQ ID NO: 4538962 - DNA, 25 bp, Homo sapien
cttcattcaacggacagcgtgaatt

SEQ ID NO: 4538963 - DNA, 25 bp, Homo sapien
gaattcattacaacatcgtccagga

SEQ ID NO: 4538964 - DNA, 25 bp, Homo sapien
gaaaagaaatagaacccagccagtc

SEQ ID NO: 4538965 - DNA, 25 bp, Homo sapien
tcagtttagcttaaccccttgtggc

SEQ ID NO: 4538966 - DNA, 25 bp, Homo sapien
ccaagttggtgttactgatgacaga

SEQ ID NO: 4538967 - DNA, 25 bp, Homo sapien
tgtgtctccacagtcacagaaccct

SEQ ID NO: 4538968 - DNA, 25 bp, Homo sapien
gggccagttttccatgcctctgtgt

SEQ ID NO: 4538969 - DNA, 25 bp, Homo sapien
agaaccctcctccagtagaagtatg

SEQ ID NO: 4538970 - DNA, 25 bp, Homo sapien
tcatgatttacacaaaaagggccag

SEQ ID NO: 4538971 - DNA, 25 bp, Homo sapien
tggatgtaacaaaaaccattttcga

SEQ ID NO: 4538972 - DNA, 25 bp, Homo sapien
tactccaaccttaattgagttcaat

SEQ ID NO: 4538973 - DNA, 25 bp, Homo sapien
attaactggatgtaacaaaaaccat

SEQ ID NO: 4538974 - DNA, 25 bp, Homo sapien
caatactccaaccttaattgagttc

SEQ ID NO: 4538975 - DNA, 25 bp, Homo sapien
cactgtcctggaagcagtccataca

SEQ ID NO: 4538976 - DNA, 25 bp, Homo sapien
ggaagcagtccatacagagtacaca

SEQ ID NO: 4538977 - DNA, 25 bp, Homo sapien
gatgatttttatgaacactgtcctg

SEQ ID NO: 4538978 - DNA, 25 bp, Homo sapien
cacatgttggatcaattgcacaatc

SEQ ID NO: 4538979 - DNA, 25 bp, Homo sapien
atataaattagtgcaaagtgcagga

SEQ ID NO: 4538980 - DNA, 25 bp, Homo sapien
tataaattagtgcaaagtgcaggat

SEQ ID NO: 4538981 - DNA, 25 bp, Homo sapien
gatggaacgcagtggaaggcagtgg

SEQ ID NO: 4538982 - DNA, 25 bp, Homo sapien
ctgcaagaataggttgtctctccac

SEQ ID NO: 4538983 - DNA, 25 bp, Homo sapien
tctctaagcaaatatctggatcttc

SEQ ID NO: 4538984 - DNA, 25 bp, Homo sapien
taagcaaatatctggatcttctcca

SEQ ID NO: 4538985 - DNA, 25 bp, Homo sapien
tgtctctccacttttgaaaaccctc

SEQ ID NO: 4538986 - DNA, 25 bp, Homo sapien
taaaaatcaacttgctgatcccacc

SEQ ID NO: 4538987 - DNA, 25 bp, Homo sapien
aagtaaatttctggcaccaattgtg

SEQ ID NO: 4538988 - DNA, 25 bp, Homo sapien
cattccagtggagtgaatattgaca

SEQ ID NO: 4538989 - DNA, 25 bp, Homo sapien
tattgacatttgtacactttcctcc

SEQ ID NO: 4538990 - DNA, 25 bp, Homo sapien
actacatgagataatacgcccattt

SEQ ID NO: 4538991 - DNA, 25 bp, Homo sapien
tacatgagataatacgcccatttaa

SEQ ID NO: 4538992 - DNA, 25 bp, Homo sapien
agataatacgcccatttaaaaatga

SEQ ID NO: 4538993 - DNA, 25 bp, Homo sapien
catgagataatacgcccatttaaaa

SEQ ID NO: 4538994 - DNA, 25 bp, Homo sapien
tcctagctcctgcaagcaaagcatt

SEQ ID NO: 4538995 - DNA, 25 bp, Homo sapien
gacctagtcctataccaaatgaacc

SEQ ID NO: 4538996 - DNA, 25 bp, Homo sapien
tggctgctacatcacatgacttggt

SEQ ID NO: 4538997 - DNA, 25 bp, Homo sapien
caatcacatgtaagagacctagtcc

SEQ ID NO: 4538998 - DNA, 25 bp, Homo sapien
tgataaattaacagactttccctcc

SEQ ID NO: 4538999 - DNA, 25 bp, Homo sapien
gctttcataaactctgaggtatcta

SEQ ID NO: 4539000 - DNA, 25 bp, Homo sapien
tctgctgtatggaatatatatctgc

SEQ ID NO: 4539001 - DNA, 25 bp, Homo sapien
taaagtcatttctggcttacccata

SEQ ID NO: 4539002 - DNA, 25 bp, Homo sapien
taggcggtcatagtaaatcacctgg

SEQ ID NO: 4539003 - DNA, 25 bp, Homo sapien
tattcaagaggaggcatgttaactg

SEQ ID NO: 4539004 - DNA, 25 bp, Homo sapien
tattttgtgttaggtcatctgaggc

SEQ ID NO: 4539005 - DNA, 25 bp, Homo sapien
ggaaagtgcactaactctactggag

SEQ ID NO: 4539006 - DNA, 25 bp, Homo sapien
tctccgcctgccggattgaagcaat

SEQ ID NO: 4539007 - DNA, 25 bp, Homo sapien
tgcaatctccgcctgccggattgaa

SEQ ID NO: 4539008 - DNA, 25 bp, Homo sapien
caatctccgcctgccggattgaagc

SEQ ID NO: 4539009 - DNA, 25 bp, Homo sapien
ctgcaatctccgcctgccggattga

SEQ ID NO: 4539010 - DNA, 25 bp, Homo sapien
gacagggttgccatagactttcaat

SEQ ID NO: 4539011 - DNA, 25 bp, Homo sapien
cacgaagtgagcacacaatgttgaa

SEQ ID NO: 4539012 - DNA, 25 bp, Homo sapien
gaagtcagtttccagcactagcaca

SEQ ID NO: 4539013 - DNA, 25 bp, Homo sapien
cactgaaaggcttccttgagacagg

SEQ ID NO: 4539014 - DNA, 25 bp, Homo sapien
tgcaataaaataccaggtgctgcgt

SEQ ID NO: 4539015 - DNA, 25 bp, Homo sapien
tacttcagaatagagacatgcacac

SEQ ID NO: 4539016 - DNA, 25 bp, Homo sapien
gacatgacttgacagtagcagcact

SEQ ID NO: 4539017 - DNA, 25 bp, Homo sapien
caaaagagacttgcctatagggact

SEQ ID NO: 4539018 - DNA, 25 bp, Homo sapien
cgctgaggggtctggggtaactccg

SEQ ID NO: 4539019 - DNA, 25 bp, Homo sapien
gtaactccgcgctgatttccatcct

SEQ ID NO: 4539020 - DNA, 25 bp, Homo sapien
gggtaactccgcgctgatttccatc

SEQ ID NO: 4539021 - DNA, 25 bp, Homo sapien
ggtctggggtaactccgcgctgatt

SEQ ID NO: 4539022 - DNA, 25 bp, Homo sapien
ggaaactgacgcctgcagttgccga

SEQ ID NO: 4539023 - DNA, 25 bp, Homo sapien
aaactgacgcctgcagttgccgacc

SEQ ID NO: 4539024 - DNA, 25 bp, Homo sapien
ttgagggaaactgacgcctgcagtt

SEQ ID NO: 4539025 - DNA, 25 bp, Homo sapien
gacccccggccagaggcaagcggaa

SEQ ID NO: 4539026 - DNA, 25 bp, Homo sapien
cagactcgaggagtggcttccggcc

SEQ ID NO: 4539027 - DNA, 25 bp, Homo sapien
gtcggagagacagggacgacacttt

SEQ ID NO: 4539028 - DNA, 25 bp, Homo sapien
ccctgaagtcgggtttgacgcagac

SEQ ID NO: 4539029 - DNA, 25 bp, Homo sapien
agacagggacgacacttttacgacg

SEQ ID NO: 4539030 - DNA, 25 bp, Homo sapien
ccggaagcaagcgtcacgacgtgaa

SEQ ID NO: 4539031 - DNA, 25 bp, Homo sapien
cttcccggaagcaagcgtcacgacg

SEQ ID NO: 4539032 - DNA, 25 bp, Homo sapien
aagcaagcgtcacgacgtgaaggga

SEQ ID NO: 4539033 - DNA, 25 bp, Homo sapien
caagcgtcacgacgtgaagggactg

SEQ ID NO: 4539034 - DNA, 25 bp, Homo sapien
ggtagctgaatggttgtatatctgg

SEQ ID NO: 4539035 - DNA, 25 bp, Homo sapien
agctgaatggttgtatatctgggtt

SEQ ID NO: 4539036 - DNA, 25 bp, Homo sapien
tagctgaatggttgtatatctgggt

SEQ ID NO: 4539037 - DNA, 25 bp, Homo sapien
ttggtagctgaatggttgtatatct

SEQ ID NO: 4539038 - DNA, 25 bp, Homo sapien
taggattctaccccgtgggcacttg

SEQ ID NO: 4539039 - DNA, 25 bp, Homo sapien
tgtacaaaaaaagctcgggatccag

SEQ ID NO: 4539040 - DNA, 25 bp, Homo sapien
cccgtgggcacttgcacatgtgtac

SEQ ID NO: 4539041 - DNA, 25 bp, Homo sapien
cacatgtgtacaaaaaaagctcggg

SEQ ID NO: 4539042 - DNA, 25 bp, Homo sapien
gacacagaaagtagaatggtggttt

SEQ ID NO: 4539043 - DNA, 25 bp, Homo sapien
atagacacagaaagtagaatggtgg

SEQ ID NO: 4539044 - DNA, 25 bp, Homo sapien
cagaaagtagaatggtggtttccag

SEQ ID NO: 4539045 - DNA, 25 bp, Homo sapien
agagtagtcaaattcatagacacag

SEQ ID NO: 4539046 - DNA, 25 bp, Homo sapien
tcacaaatagcactttttatttgcc

SEQ ID NO: 4539047 - DNA, 25 bp, Homo sapien
ttttatttgccactatttgaagtct

SEQ ID NO: 4539048 - DNA, 25 bp, Homo sapien
tttgccactatttgaagtctgaact

SEQ ID NO: 4539049 - DNA, 25 bp, Homo sapien
caaatagcactttttatttgccact

SEQ ID NO: 4539050 - DNA, 25 bp, Homo sapien
tatccatcagctcgtccaactttag

SEQ ID NO: 4539051 - DNA, 25 bp, Homo sapien
ccatcagctcgtccaactttagcac

SEQ ID NO: 4539052 - DNA, 25 bp, Homo sapien
tccatcagctcgtccaactttagca

SEQ ID NO: 4539053 - DNA, 25 bp, Homo sapien
tcatatccatcagctcgtccaactt

SEQ ID NO: 4539054 - DNA, 25 bp, Homo sapien
gacatcacggagaggataaatagat

SEQ ID NO: 4539055 - DNA, 25 bp, Homo sapien
gctccatgagccttcccaattcaaa

SEQ ID NO: 4539056 - DNA, 25 bp, Homo sapien
aacgaagacatcacggagaggataa

SEQ ID NO: 4539057 - DNA, 25 bp, Homo sapien
tgaagctccatgagccttcccaatt

SEQ ID NO: 4539058 - DNA, 25 bp, Homo sapien
ctcgggtcgtgatttccatcatctt

SEQ ID NO: 4539059 - DNA, 25 bp, Homo sapien
tcatcttcttccggatttggcggac

SEQ ID NO: 4539060 - DNA, 25 bp, Homo sapien
catcatcttcttccggatttggcgg

SEQ ID NO: 4539061 - DNA, 25 bp, Homo sapien
tccatcatcttcttccggatttggc

SEQ ID NO: 4539062 - DNA, 25 bp, Homo sapien
tgaccatggaacacgttttgtcacg

SEQ ID NO: 4539063 - DNA, 25 bp, Homo sapien
catggaacacgttttgtcacgggta

SEQ ID NO: 4539064 - DNA, 25 bp, Homo sapien
cacgttttgtcacgggtaagatcca

SEQ ID NO: 4539065 - DNA, 25 bp, Homo sapien
agaacagatgaagcaagtaaccatc

SEQ ID NO: 4539066 - DNA, 25 bp, Homo sapien
gaacatagcaggtgctttcgtatca

SEQ ID NO: 4539067 - DNA, 25 bp, Homo sapien
acatagcaggtgctttcgtatcata

SEQ ID NO: 4539068 - DNA, 25 bp, Homo sapien
catagcaggtgctttcgtatcatac

SEQ ID NO: 4539069 - DNA, 25 bp, Homo sapien
ttgaacatagcaggtgctttcgtat

SEQ ID NO: 4539070 - DNA, 25 bp, Homo sapien
aacggatcaaccactttcttcttgg

SEQ ID NO: 4539071 - DNA, 25 bp, Homo sapien
gccgcctttcgtaaggctcttgttc

SEQ ID NO: 4539072 - DNA, 25 bp, Homo sapien
tttgccgcctttcgtaaggctcttg

SEQ ID NO: 4539073 - DNA, 25 bp, Homo sapien
ggctcttgttcttgccaaccgccat

SEQ ID NO: 4539074 - DNA, 25 bp, Homo sapien
ttgtccaaatactttaacagcatga

SEQ ID NO: 4539075 - DNA, 25 bp, Homo sapien
gcatgattcttcctcttgttgtgcc

SEQ ID NO: 4539076 - DNA, 25 bp, Homo sapien
aacagcatgattcttcctcttgttg

SEQ ID NO: 4539077 - DNA, 25 bp, Homo sapien
tttaacagcatgattcttcctcttg

SEQ ID NO: 4539078 - DNA, 25 bp, Homo sapien
caggcagaagcggataagatggcag

SEQ ID NO: 4539079 - DNA, 25 bp, Homo sapien
agaacaggcagaagcggataagatg

SEQ ID NO: 4539080 - DNA, 25 bp, Homo sapien
gaagcggataagatggcagcagcaa

SEQ ID NO: 4539081 - DNA, 25 bp, Homo sapien
cagaagcggataagatggcagcagc

SEQ ID NO: 4539082 - DNA, 25 bp, Homo sapien
gcagcttgttggataagtggaagac

SEQ ID NO: 4539083 - DNA, 25 bp, Homo sapien
tggcggtggttccaggtgcggcaca

SEQ ID NO: 4539084 - DNA, 25 bp, Homo sapien
gtgcggcacaggcagtggccatagc

SEQ ID NO: 4539085 - DNA, 25 bp, Homo sapien
gaaccagtggtagtggaggcagtag

SEQ ID NO: 4539086 - DNA, 25 bp, Homo sapien
tgtacaatctcctgtttctttgcca

SEQ ID NO: 4539087 - DNA, 25 bp, Homo sapien
tctgtacaatctcctgtttctttgc

SEQ ID NO: 4539088 - DNA, 25 bp, Homo sapien
gtacaatctcctgtttctttgccat

SEQ ID NO: 4539089 - DNA, 25 bp, Homo sapien
catctgtacaatctcctgtttcttt

SEQ ID NO: 4539090 - DNA, 25 bp, Homo sapien
ggaaagatcctataggaatggatcc

SEQ ID NO: 4539091 - DNA, 25 bp, Homo sapien
tcctgatgatatttggcaactgtcc

SEQ ID NO: 4539092 - DNA, 25 bp, Homo sapien
gcaactgtcctccagtcttaaaagg

SEQ ID NO: 4539093 - DNA, 25 bp, Homo sapien
gatgacaaatacacctctaagctga

SEQ ID NO: 4539094 - DNA, 25 bp, Homo sapien
cagtgggacactggtcatggatgca

SEQ ID NO: 4539095 - DNA, 25 bp, Homo sapien
tggatgcacatgagcctgaaatatc

SEQ ID NO: 4539096 - DNA, 25 bp, Homo sapien
tcaccaagtccattgctaagttttt

SEQ ID NO: 4539097 - DNA, 25 bp, Homo sapien
aagcagcagcgggaagccgaattca

SEQ ID NO: 4539098 - DNA, 25 bp, Homo sapien
cttctccaaaagagtcctgatggta

SEQ ID NO: 4539099 - DNA, 25 bp, Homo sapien
ttggtaaggaaatgaactcttctcc

SEQ ID NO: 4539100 - DNA, 25 bp, Homo sapien
gtcactgcacctagcttaaaaagtt

SEQ ID NO: 4539101 - DNA, 25 bp, Homo sapien
cctgatggtagtgtatttgtttgat

SEQ ID NO: 4539102 - DNA, 25 bp, Homo sapien
tctccccacccttgcagtctctagg

SEQ ID NO: 4539103 - DNA, 25 bp, Homo sapien
cctctccccacccttgcagtctcta

SEQ ID NO: 4539104 - DNA, 25 bp, Homo sapien
ctcctctccccacccttgcagtctc

SEQ ID NO: 4539105 - DNA, 25 bp, Homo sapien
ctctccccacccttgcagtctctag

SEQ ID NO: 4539106 - DNA, 25 bp, Homo sapien
cgccaaccccagaaagatgactggg

SEQ ID NO: 4539107 - DNA, 25 bp, Homo sapien
gcgccaaccccagaaagatgactgg

SEQ ID NO: 4539108 - DNA, 25 bp, Homo sapien
catatactgccttcaccggggccac

SEQ ID NO: 4539109 - DNA, 25 bp, Homo sapien
tcatatactgccttcaccggggcca

SEQ ID NO: 4539110 - DNA, 25 bp, Homo sapien
ctattattgcaagaacatggccggc

SEQ ID NO: 4539111 - DNA, 25 bp, Homo sapien
aactctgccggaagagctggatcag

SEQ ID NO: 4539112 - DNA, 25 bp, Homo sapien
gaaactctgccggaagagctggatc

SEQ ID NO: 4539113 - DNA, 25 bp, Homo sapien
gatagaaactctgccggaagagctg

SEQ ID NO: 4539114 - DNA, 25 bp, Homo sapien
ctctgccggaagagctggatcaggt

SEQ ID NO: 4539115 - DNA, 25 bp, Homo sapien
gcgcccggcttctgatatcagcaga

SEQ ID NO: 4539116 - DNA, 25 bp, Homo sapien
acccgcgcccggcttctgatatcag

SEQ ID NO: 4539117 - DNA, 25 bp, Homo sapien
caaacccgcgcccggcttctgatat

SEQ ID NO: 4539118 - DNA, 25 bp, Homo sapien
aacattgatggcatccaaacccgcg

SEQ ID NO: 4539119 - DNA, 25 bp, Homo sapien
tccgtgagctgggtgatagcatctc

SEQ ID NO: 4539120 - DNA, 25 bp, Homo sapien
caatctgggagaagcactgaatgaa

SEQ ID NO: 4539121 - DNA, 25 bp, Homo sapien
gagaagcactgaatgaaatcctgct

SEQ ID NO: 4539122 - DNA, 25 bp, Homo sapien
gcttttcttggacagaaatgtctga

SEQ ID NO: 4539123 - DNA, 25 bp, Homo sapien
gaatgccaaattcacaatactctta

SEQ ID NO: 4539124 - DNA, 25 bp, Homo sapien
gctaatttatcatattaccaagcaa

SEQ ID NO: 4539125 - DNA, 25 bp, Homo sapien
taccaagcaatatgaatgccaaatt

SEQ ID NO: 4539126 - DNA, 25 bp, Homo sapien
ttcaacaacagatgctaatttatca

SEQ ID NO: 4539127 - DNA, 25 bp, Homo sapien
gattctgtgtaagctatggcagatc

SEQ ID NO: 4539128 - DNA, 25 bp, Homo sapien
tgattctgtgtaagctatggcagat

SEQ ID NO: 4539129 - DNA, 25 bp, Homo sapien
tatgattctgtgtaagctatggcag

SEQ ID NO: 4539130 - DNA, 25 bp, Homo sapien
ttctgtgtaagctatggcagatcac

SEQ ID NO: 4539131 - DNA, 25 bp, Homo sapien
caatgaggtaaagcaagtaatttgg

SEQ ID NO: 4539132 - DNA, 25 bp, Homo sapien
tgaagctgtttttgacgcttgtctt

SEQ ID NO: 4539133 - DNA, 25 bp, Homo sapien
tgtttttgacgcttgtcttacacaa

SEQ ID NO: 4539134 - DNA, 25 bp, Homo sapien
tcttgttcaagataggttgaagctg

SEQ ID NO: 4539135 - DNA, 25 bp, Homo sapien
tgcctgctacataatgggtgctcaa

SEQ ID NO: 4539136 - DNA, 25 bp, Homo sapien
aaaatactgatagccaagtcctccc

SEQ ID NO: 4539137 - DNA, 25 bp, Homo sapien
gaatcatacagcagctcaacttgga

SEQ ID NO: 4539138 - DNA, 25 bp, Homo sapien
tacacaactagccacaagtcagctg

SEQ ID NO: 4539139 - DNA, 25 bp, Homo sapien
ggaacctttgaggatctgggcccga

SEQ ID NO: 4539140 - DNA, 25 bp, Homo sapien
agctgctcgtttggagtcctggacg

SEQ ID NO: 4539141 - DNA, 25 bp, Homo sapien
ggattacccactactgatacctgca

SEQ ID NO: 4539142 - DNA, 25 bp, Homo sapien
taccgctgtgcttggaattcagcag

SEQ ID NO: 4539143 - DNA, 25 bp, Homo sapien
gtagggctcagggtgaataacttct

SEQ ID NO: 4539144 - DNA, 25 bp, Homo sapien
aatatttgaactcacctttttatgg

SEQ ID NO: 4539145 - DNA, 25 bp, Homo sapien
taaaggaaccttagtcatttctgct

SEQ ID NO: 4539146 - DNA, 25 bp, Homo sapien
tagaaaagaacccgtaatcctgcca

SEQ ID NO: 4539147 - DNA, 25 bp, Homo sapien
gcaagagacactattaccaaagatt

SEQ ID NO: 4539148 - DNA, 25 bp, Homo sapien
tgttggttaggccagattgacacct

SEQ ID NO: 4539149 - DNA, 25 bp, Homo sapien
cttgctggattgaaagggagtgcct

SEQ ID NO: 4539150 - DNA, 25 bp, Homo sapien
cctatttataaaccatatgcgtata

SEQ ID NO: 4539151 - DNA, 25 bp, Homo sapien
gcctttctgctgtctttaggtataa

SEQ ID NO: 4539152 - DNA, 25 bp, Homo sapien
taggtgtaattcataacatatgcct

SEQ ID NO: 4539153 - DNA, 25 bp, Homo sapien
aatcagcaacagcagtcattctttg

SEQ ID NO: 4539154 - DNA, 25 bp, Homo sapien
tttgagtgactaatgtatacttggg

SEQ ID NO: 4539155 - DNA, 25 bp, Homo sapien
ttcctgcataagtggaagcagcctg

SEQ ID NO: 4539156 - DNA, 25 bp, Homo sapien
gatattcaaccctgcaaacctcatg

SEQ ID NO: 4539157 - DNA, 25 bp, Homo sapien
gctgttaaaacgaggctggcacctg

SEQ ID NO: 4539158 - DNA, 25 bp, Homo sapien
tactccttaaaggtatctgagcacc

SEQ ID NO: 4539159 - DNA, 25 bp, Homo sapien
ttatagttggttaggttctggaaca

SEQ ID NO: 4539160 - DNA, 25 bp, Homo sapien
taggttctggaacatgttgcagtcc

SEQ ID NO: 4539161 - DNA, 25 bp, Homo sapien
gctgatagttcaggggctaccacgg

SEQ ID NO: 4539162 - DNA, 25 bp, Homo sapien
gggctaccacggtgacgcttttata

SEQ ID NO: 4539163 - DNA, 25 bp, Homo sapien
tggcacacatggtgttttcaggcca

SEQ ID NO: 4539164 - DNA, 25 bp, Homo sapien
cttggcacacatggtgttttcaggc

SEQ ID NO: 4539165 - DNA, 25 bp, Homo sapien
ttggcacacatggtgttttcaggcc

SEQ ID NO: 4539166 - DNA, 25 bp, Homo sapien
gaggatgtgcactgcaacattattt

SEQ ID NO: 4539167 - DNA, 25 bp, Homo sapien
tataaggagacttgtgtgaggatgt

SEQ ID NO: 4539168 - DNA, 25 bp, Homo sapien
ttttcaaacaagtatataaggagac

SEQ ID NO: 4539169 - DNA, 25 bp, Homo sapien
ttatttgcagtgtcagagagttgga

SEQ ID NO: 4539170 - DNA, 25 bp, Homo sapien
ctgaccacaatgaaagatagcctgt

SEQ ID NO: 4539171 - DNA, 25 bp, Homo sapien
tggtgactaccagaatgtagccctc

SEQ ID NO: 4539172 - DNA, 25 bp, Homo sapien
gatgagggaagccacttggtagccc

SEQ ID NO: 4539173 - DNA, 25 bp, Homo sapien
taatgccctcgcctatattcacagc

SEQ ID NO: 4539174 - DNA, 25 bp, Homo sapien
tgaggggttgatactgctctgcttt

SEQ ID NO: 4539175 - DNA, 25 bp, Homo sapien
tgtgaggggttgatactgctctgct

SEQ ID NO: 4539176 - DNA, 25 bp, Homo sapien
aggggttgatactgctctgctttct

SEQ ID NO: 4539177 - DNA, 25 bp, Homo sapien
ctgtgaggggttgatactgctctgc

SEQ ID NO: 4539178 - DNA, 25 bp, Homo sapien
ggtgtggtctacaaatggcaatgtc

SEQ ID NO: 4539179 - DNA, 25 bp, Homo sapien
gtgttctcgggtgggtttcgctcaa

SEQ ID NO: 4539180 - DNA, 25 bp, Homo sapien
aaggttggattcagagtgtgttgcc

SEQ ID NO: 4539181 - DNA, 25 bp, Homo sapien
cgctcaaaattggagaagaacaggc

SEQ ID NO: 4539182 - DNA, 25 bp, Homo sapien
taaagcacttaacaccattttgggc

SEQ ID NO: 4539183 - DNA, 25 bp, Homo sapien
gagtaaattaacgaccctctctgtg

SEQ ID NO: 4539184 - DNA, 25 bp, Homo sapien
ggttcttgccacagaacgtggttgt

SEQ ID NO: 4539185 - DNA, 25 bp, Homo sapien
taagtgcctgataaatgtgagctac

SEQ ID NO: 4539186 - DNA, 25 bp, Homo sapien
caaagccatctctagagactgcagg

SEQ ID NO: 4539187 - DNA, 25 bp, Homo sapien
cacactgctacgaagggtctgttta

SEQ ID NO: 4539188 - DNA, 25 bp, Homo sapien
tatctgactgcagttggcatcgtgt

SEQ ID NO: 4539189 - DNA, 25 bp, Homo sapien
cactgtactctgttaaactcagcaa

SEQ ID NO: 4539190 - DNA, 25 bp, Homo sapien
tgagcgtgaggtgcagcttcttcct

SEQ ID NO: 4539191 - DNA, 25 bp, Homo sapien
gacggatgccgttgtctttctcacg

SEQ ID NO: 4539192 - DNA, 25 bp, Homo sapien
caccgttgtagtgtacagcctggac

SEQ ID NO: 4539193 - DNA, 25 bp, Homo sapien
tgtgattaaccagcgtcactgagat

SEQ ID NO: 4539194 - DNA, 25 bp, Homo sapien
tggcagcaaaaaggtctgacactgc

SEQ ID NO: 4539195 - DNA, 25 bp, Homo sapien
acacatgaggcatttatggcagcaa

SEQ ID NO: 4539196 - DNA, 25 bp, Homo sapien
ttgactgctctgaccggcaccagat

SEQ ID NO: 4539197 - DNA, 25 bp, Homo sapien
tctgagtgatgtcctcgcagcggtc

SEQ ID NO: 4539198 - DNA, 25 bp, Homo sapien
aaggcaggccgcgtcatccagcact

SEQ ID NO: 4539199 - DNA, 25 bp, Homo sapien
ccattaggagcacttgggtgcagaa

SEQ ID NO: 4539200 - DNA, 25 bp, Homo sapien
cacttgggtgcagaatctgccatcc

SEQ ID NO: 4539201 - DNA, 25 bp, Homo sapien
tccacctccattaggagcacttggg

SEQ ID NO: 4539202 - DNA, 25 bp, Homo sapien
cctgtgctgaggcaaacgtggtcac

SEQ ID NO: 4539203 - DNA, 25 bp, Homo sapien
gttctgaagtccctcctcattatag

SEQ ID NO: 4539204 - DNA, 25 bp, Homo sapien
ggcagggattcccaggcatcgcagc

SEQ ID NO: 4539205 - DNA, 25 bp, Homo sapien
ttcatctatgagaagacgcccaccg

SEQ ID NO: 4539206 - DNA, 25 bp, Homo sapien
aggcagggcactctacaggagacaa

SEQ ID NO: 4539207 - DNA, 25 bp, Homo sapien
gaggcagggcactctacaggagaca

SEQ ID NO: 4539208 - DNA, 25 bp, Homo sapien
gccatcatacacaggtcggcctcgg

SEQ ID NO: 4539209 - DNA, 25 bp, Homo sapien
gcctggccatcatacacaggtcggc

SEQ ID NO: 4539210 - DNA, 25 bp, Homo sapien
atgggcacgctgccccggcgcttgt

SEQ ID NO: 4539211 - DNA, 25 bp, Homo sapien
tcatacacaggtcggcctcggccgg

SEQ ID NO: 4539212 - DNA, 25 bp, Homo sapien
caggaccctctgctccttgagaaaa

SEQ ID NO: 4539213 - DNA, 25 bp, Homo sapien
ccctctgctccttgagaaaatgcag

SEQ ID NO: 4539214 - DNA, 25 bp, Homo sapien
ggaccctctgctccttgagaaaatg

SEQ ID NO: 4539215 - DNA, 25 bp, Homo sapien
gaccctctgctccttgagaaaatgc

SEQ ID NO: 4539216 - DNA, 25 bp, Homo sapien
taggcccctgggtcatagctctagg

SEQ ID NO: 4539217 - DNA, 25 bp, Homo sapien
ggttaaacctgcatgcttctgggct

SEQ ID NO: 4539218 - DNA, 25 bp, Homo sapien
gatccccagcattagagccacctgg

SEQ ID NO: 4539219 - DNA, 25 bp, Homo sapien
tgtgtggatgtcagtatgagtccct

SEQ ID NO: 4539220 - DNA, 25 bp, Homo sapien
aaagaagtcccttcgatcactgcag

SEQ ID NO: 4539221 - DNA, 25 bp, Homo sapien
aaaagaggcttagtcttctgcgggc

SEQ ID NO: 4539222 - DNA, 25 bp, Homo sapien
gaaaagcaccgagttaccatcatgg

SEQ ID NO: 4539223 - DNA, 25 bp, Homo sapien
ggtgaacacatgactcctctgagag

SEQ ID NO: 4539224 - DNA, 25 bp, Homo sapien
ccttgctcagcaagcgcaggctgag

SEQ ID NO: 4539225 - DNA, 25 bp, Homo sapien
cacgtgcaccggctggctccacttc

SEQ ID NO: 4539226 - DNA, 25 bp, Homo sapien
tgaggtcaatgacatccccctcgaa

SEQ ID NO: 4539227 - DNA, 25 bp, Homo sapien
gggccacgtgcaccggctggctcca

SEQ ID NO: 4539228 - DNA, 25 bp, Homo sapien
gatgcagtcagctgtacccaggtag

SEQ ID NO: 4539229 - DNA, 25 bp, Homo sapien
tgcgctgagcctcattcttcaggaa

SEQ ID NO: 4539230 - DNA, 25 bp, Homo sapien
gatgagaccattctggttcaacaag

SEQ ID NO: 4539231 - DNA, 25 bp, Homo sapien
tcaacaagtactccatgcgctgagc

SEQ ID NO: 4539232 - DNA, 25 bp, Homo sapien
gggtcctaggtccaccctccacatc

SEQ ID NO: 4539233 - DNA, 25 bp, Homo sapien
gtgagaggtgggtagggatgagggc

SEQ ID NO: 4539234 - DNA, 25 bp, Homo sapien
gtgggtagggatgagggcctgtggg

SEQ ID NO: 4539235 - DNA, 25 bp, Homo sapien
ccctccacatccaggcctctgtcct

SEQ ID NO: 4539236 - DNA, 25 bp, Homo sapien
tctctgcttgggtgtatgtagcccc

SEQ ID NO: 4539237 - DNA, 25 bp, Homo sapien
ccagatgagcggagccaatgactct

SEQ ID NO: 4539238 - DNA, 25 bp, Homo sapien
ccaggatctacagggctctaggaag

SEQ ID NO: 4539239 - DNA, 25 bp, Homo sapien
tctttatggcggtcaccagggcctg

SEQ ID NO: 4539240 - DNA, 25 bp, Homo sapien
gccacctgaagtcggggagaacgct

SEQ ID NO: 4539241 - DNA, 25 bp, Homo sapien
ggccacctgaagtcggggagaacgc

SEQ ID NO: 4539242 - DNA, 25 bp, Homo sapien
acctgcctgcgcccttggagcagga

SEQ ID NO: 4539243 - DNA, 25 bp, Homo sapien
tgcctgcgcccttggagcaggaaat

SEQ ID NO: 4539244 - DNA, 25 bp, Homo sapien
tgttgtaaagacaggaaagccggga

SEQ ID NO: 4539245 - DNA, 25 bp, Homo sapien
atttctagacgacacagctccagcc

SEQ ID NO: 4539246 - DNA, 25 bp, Homo sapien
agctttgctagaggtggccacggtt

SEQ ID NO: 4539247 - DNA, 25 bp, Homo sapien
cccactgggatttaggtaccacaga

SEQ ID NO: 4539248 - DNA, 25 bp, Homo sapien
tctggtgaaccgtagggtcctgtca

SEQ ID NO: 4539249 - DNA, 25 bp, Homo sapien
tagggtcctgtcagacccttgggta

SEQ ID NO: 4539250 - DNA, 25 bp, Homo sapien
gggaagccgctcatagtctggtgaa

SEQ ID NO: 4539251 - DNA, 25 bp, Homo sapien
catagtctggtgaaccgtagggtcc

SEQ ID NO: 4539252 - DNA, 25 bp, Homo sapien
ccagattgcatcagcttcaggtcct

SEQ ID NO: 4539253 - DNA, 25 bp, Homo sapien
tctggtggtgagacaagcttttgct

SEQ ID NO: 4539254 - DNA, 25 bp, Homo sapien
tgtgaccaaaatagcctgagccagc

SEQ ID NO: 4539255 - DNA, 25 bp, Homo sapien
tgtggaataacacagacctcttggg

SEQ ID NO: 4539256 - DNA, 25 bp, Homo sapien
gacccaagaggagttgcttcctgcc

SEQ ID NO: 4539257 - DNA, 25 bp, Homo sapien
gaagcgagtagtggccaatgacagc

SEQ ID NO: 4539258 - DNA, 25 bp, Homo sapien
acctgcagcagaagcgagtagtggc

SEQ ID NO: 4539259 - DNA, 25 bp, Homo sapien
gtgaactgacccaagaggagttgct

SEQ ID NO: 4539260 - DNA, 25 bp, Homo sapien
tcctgttgatcttggaaggctgctc

SEQ ID NO: 4539261 - DNA, 25 bp, Homo sapien
ctgttgatcttggaaggctgctctc

SEQ ID NO: 4539262 - DNA, 25 bp, Homo sapien
gtcctgttgatcttggaaggctgct

SEQ ID NO: 4539263 - DNA, 25 bp, Homo sapien
gggtcctgttgatcttggaaggctg

SEQ ID NO: 4539264 - DNA, 25 bp, Homo sapien
tcagggcaggcagaaatgcacggac

SEQ ID NO: 4539265 - DNA, 25 bp, Homo sapien
gcctgaaagtcacagctcttgatac

SEQ ID NO: 4539266 - DNA, 25 bp, Homo sapien
tggtgtggtgctcctcattgtttct

SEQ ID NO: 4539267 - DNA, 25 bp, Homo sapien
tcctcacaaagaggcgccgggagct

SEQ ID NO: 4539268 - DNA, 25 bp, Homo sapien
caaaatctttctcgcacctactcat

SEQ ID NO: 4539269 - DNA, 25 bp, Homo sapien
caatccacaagcaatgaataaaacc

SEQ ID NO: 4539270 - DNA, 25 bp, Homo sapien
gtcccaatccacaagcaatgaataa

SEQ ID NO: 4539271 - DNA, 25 bp, Homo sapien
tccacaagcaatgaataaaacccaa

SEQ ID NO: 4539272 - DNA, 25 bp, Homo sapien
cctttaatagcagaaggccattggg

SEQ ID NO: 4539273 - DNA, 25 bp, Homo sapien
aatgaggtctaacccacttcaggga

SEQ ID NO: 4539274 - DNA, 25 bp, Homo sapien
caaggtcctttagactacaagacgg

SEQ ID NO: 4539275 - DNA, 25 bp, Homo sapien
agtttttgcactggctcaactgcca

SEQ ID NO: 4539276 - DNA, 25 bp, Homo sapien
tgtatccgaacccacgtaatgacca

SEQ ID NO: 4539277 - DNA, 25 bp, Homo sapien
taatgaccatagtgttacggcaaga

SEQ ID NO: 4539278 - DNA, 25 bp, Homo sapien
tgcttagcacaaagctcgtgctggg

SEQ ID NO: 4539279 - DNA, 25 bp, Homo sapien
tgacttgagcctccgtgtatccgaa

SEQ ID NO: 4539280 - DNA, 25 bp, Homo sapien
cctctgccccttttaggtggattca

SEQ ID NO: 4539281 - DNA, 25 bp, Homo sapien
ctctgccccttttaggtggattcat

SEQ ID NO: 4539282 - DNA, 25 bp, Homo sapien
gcctctgccccttttaggtggattc

SEQ ID NO: 4539283 - DNA, 25 bp, Homo sapien
tgcctctgccccttttaggtggatt

SEQ ID NO: 4539284 - DNA, 25 bp, Homo sapien
cctgtcgagcgctggcttggctcac

SEQ ID NO: 4539285 - DNA, 25 bp, Homo sapien
cagcaagccctgtcgagcgctggct

SEQ ID NO: 4539286 - DNA, 25 bp, Homo sapien
atgctgcgggggctgcatacagtcc

SEQ ID NO: 4539287 - DNA, 25 bp, Homo sapien
gctgcatacagtccagcaagccctg

SEQ ID NO: 4539288 - DNA, 25 bp, Homo sapien
tatctcctggaccagttactgggag

SEQ ID NO: 4539289 - DNA, 25 bp, Homo sapien
gaagacctgccaactagagaagcct

SEQ ID NO: 4539290 - DNA, 25 bp, Homo sapien
gaggccacaaacaggagtcccatat

SEQ ID NO: 4539291 - DNA, 25 bp, Homo sapien
gatgttatctggactgcactggaag

SEQ ID NO: 4539292 - DNA, 25 bp, Homo sapien
agaagcaagagttactgcaaagagg

SEQ ID NO: 4539293 - DNA, 25 bp, Homo sapien
tctctgtcaagtgtgccaaatgctg

SEQ ID NO: 4539294 - DNA, 25 bp, Homo sapien
gacggtcagggtaggcttctctcag

SEQ ID NO: 4539295 - DNA, 25 bp, Homo sapien
tcttggacccaggtgtggacggtca

SEQ ID NO: 4539296 - DNA, 25 bp, Homo sapien
ccttttctaacccacttcactctgc

SEQ ID NO: 4539297 - DNA, 25 bp, Homo sapien
tcttcactggcagatcgaccaaggc

SEQ ID NO: 4539298 - DNA, 25 bp, Homo sapien
tcctgggagaagtgtctgattgtcc

SEQ ID NO: 4539299 - DNA, 25 bp, Homo sapien
tcgaccaaggctacacacaataagg

SEQ ID NO: 4539300 - DNA, 25 bp, Homo sapien
gtgcagtgccacaagaggagataat

SEQ ID NO: 4539301 - DNA, 25 bp, Homo sapien
tttgcatgaccataaacacaggctg

SEQ ID NO: 4539302 - DNA, 25 bp, Homo sapien
ttttttgtgttcagtaggacccaga

SEQ ID NO: 4539303 - DNA, 25 bp, Homo sapien
tacctcattgtgttattcagccagc

SEQ ID NO: 4539304 - DNA, 25 bp, Homo sapien
tactagggaattagctttcgcaaca

SEQ ID NO: 4539305 - DNA, 25 bp, Homo sapien
cacgcttctggataggagactggaa

SEQ ID NO: 4539306 - DNA, 25 bp, Homo sapien
tctggatgggacacagtggaatccc

SEQ ID NO: 4539307 - DNA, 25 bp, Homo sapien
gttgagtgcctagcatatgccagaa

SEQ ID NO: 4539308 - DNA, 25 bp, Homo sapien
acacgtctggcgcgttgttccagaa

SEQ ID NO: 4539309 - DNA, 25 bp, Homo sapien
attcacacgtctggcgcgttgttcc

SEQ ID NO: 4539310 - DNA, 25 bp, Homo sapien
gaaattcacacgtctggcgcgttgt

SEQ ID NO: 4539311 - DNA, 25 bp, Homo sapien
cacgtctggcgcgttgttccagaat

SEQ ID NO: 4539312 - DNA, 25 bp, Homo sapien
ttataatgcaaagtctacataaaca

SEQ ID NO: 4539313 - DNA, 25 bp, Homo sapien
tataatgcaaagtctacataaacat

SEQ ID NO: 4539314 - DNA, 25 bp, Homo sapien
gacggtctccagaatgatgcttgct

SEQ ID NO: 4539315 - DNA, 25 bp, Homo sapien
gcttggatctgcctttgtccactct

SEQ ID NO: 4539316 - DNA, 25 bp, Homo sapien
ttgttgcttctcatattagcttgga

SEQ ID NO: 4539317 - DNA, 25 bp, Homo sapien
taatgtccttaaacttgttgcttct

SEQ ID NO: 4539318 - DNA, 25 bp, Homo sapien
aaatatcacctgtatggagagtggc

SEQ ID NO: 4539319 - DNA, 25 bp, Homo sapien
gagagtggctggttcacaacggctg

SEQ ID NO: 4539320 - DNA, 25 bp, Homo sapien
acagtcctcaacctgctccgagagg

SEQ ID NO: 4539321 - DNA, 25 bp, Homo sapien
cagtcctcaacctgctccgagaggg

SEQ ID NO: 4539322 - DNA, 25 bp, Homo sapien
gaaggacaaaggctgatcaccagag

SEQ ID NO: 4539323 - DNA, 25 bp, Homo sapien
tcccacttggaagaccgcagaatgt

SEQ ID NO: 4539324 - DNA, 25 bp, Homo sapien
tcagacctttacgagcctggagagg

SEQ ID NO: 4539325 - DNA, 25 bp, Homo sapien
gggctccatgggcttacttaacagg

SEQ ID NO: 4539326 - DNA, 25 bp, Homo sapien
taatcgtgatgcttggataagataa

SEQ ID NO: 4539327 - DNA, 25 bp, Homo sapien
ctgtactgggaataggagattttgc

SEQ ID NO: 4539328 - DNA, 25 bp, Homo sapien
acccagggcactgatgcggatcagc

SEQ ID NO: 4539329 - DNA, 25 bp, Homo sapien
gataaggtgatgatcttgttcacca

SEQ ID NO: 4539330 - DNA, 25 bp, Homo sapien
gtgatgaacgctgtgtcctgccaga

SEQ ID NO: 4539331 - DNA, 25 bp, Homo sapien
gactgggcactcaggttcactttga

SEQ ID NO: 4539332 - DNA, 25 bp, Homo sapien
atgttgagggccagcaggacaaagc

SEQ ID NO: 4539333 - DNA, 25 bp, Homo sapien
gaatttcagggagacttgcaccaca

SEQ ID NO: 4539334 - DNA, 25 bp, Homo sapien
gcctggaaggttgcaactctgctcc

SEQ ID NO: 4539335 - DNA, 25 bp, Homo sapien
ggcctggaaggttgcaactctgctc

SEQ ID NO: 4539336 - DNA, 25 bp, Homo sapien
gaaggtgtatgcaggctccgagggc

SEQ ID NO: 4539337 - DNA, 25 bp, Homo sapien
gggcctggaaggttgcaactctgct

SEQ ID NO: 4539338 - DNA, 25 bp, Homo sapien
tgaagttggggagagcacagcacca

SEQ ID NO: 4539339 - DNA, 25 bp, Homo sapien
ctgaagttggggagagcacagcacc

SEQ ID NO: 4539340 - DNA, 25 bp, Homo sapien
gagagcacagcaccagctgtgagcc

SEQ ID NO: 4539341 - DNA, 25 bp, Homo sapien
agcacagcaccagctgtgagccagg

SEQ ID NO: 4539342 - DNA, 25 bp, Homo sapien
gaccggggtagactgaggctgagcg

SEQ ID NO: 4539343 - DNA, 25 bp, Homo sapien
cggggtagactgaggctgagcgcca

SEQ ID NO: 4539344 - DNA, 25 bp, Homo sapien
ctgaccggggtagactgaggctgag

SEQ ID NO: 4539345 - DNA, 25 bp, Homo sapien
ccggggtagactgaggctgagcgcc

SEQ ID NO: 4539346 - DNA, 25 bp, Homo sapien
tgaagtattcatattctgtttgggc

SEQ ID NO: 4539347 - DNA, 25 bp, Homo sapien
aagtgaggctgtgaggccaccccaa

SEQ ID NO: 4539348 - DNA, 25 bp, Homo sapien
caactggggcctcaaaactgaacag

SEQ ID NO: 4539349 - DNA, 25 bp, Homo sapien
cggtccatgtcagcgccttgtggcg

SEQ ID NO: 4539350 - DNA, 25 bp, Homo sapien
aattgccaacagaactcgtgtcctg

SEQ ID NO: 4539351 - DNA, 25 bp, Homo sapien
ttcaccatcgaaaacacaaagggcg

SEQ ID NO: 4539352 - DNA, 25 bp, Homo sapien
tccttctttgatggctctgacagag

SEQ ID NO: 4539353 - DNA, 25 bp, Homo sapien
atgtcatcccgctcgtcactctgga

SEQ ID NO: 4539354 - DNA, 25 bp, Homo sapien
tgccagcctccatatgcagggggca

SEQ ID NO: 4539355 - DNA, 25 bp, Homo sapien
ccagcctccatatgcagggggcaga

SEQ ID NO: 4539356 - DNA, 25 bp, Homo sapien
cagcctccatatgcagggggcagat

SEQ ID NO: 4539357 - DNA, 25 bp, Homo sapien
cctgaggtgtggcgtccagcacctg

SEQ ID NO: 4539358 - DNA, 25 bp, Homo sapien
aacctctgtggatagccaggcacga

SEQ ID NO: 4539359 - DNA, 25 bp, Homo sapien
aaagacagacttagcacacacaggg

SEQ ID NO: 4539360 - DNA, 25 bp, Homo sapien
tgtgtcaaacagagccaagggagac

SEQ ID NO: 4539361 - DNA, 25 bp, Homo sapien
gcttgaccttgatcataccactgtg

SEQ ID NO: 4539362 - DNA, 25 bp, Homo sapien
tcatctatgatcaggtttccatctg

SEQ ID NO: 4539363 - DNA, 25 bp, Homo sapien
tgatcacacgggtagggatccccag

SEQ ID NO: 4539364 - DNA, 25 bp, Homo sapien
cagagtcgaagttggtgatcacacg

SEQ ID NO: 4539365 - DNA, 25 bp, Homo sapien
catctgtatcgtggccagagtcgaa

SEQ ID NO: 4539366 - DNA, 25 bp, Homo sapien
tgtagattccggacccgtatattcc

SEQ ID NO: 4539367 - DNA, 25 bp, Homo sapien
gtgagctgtagattccggacccgta

SEQ ID NO: 4539368 - DNA, 25 bp, Homo sapien
gacctggggaaatcttccatttgcc

SEQ ID NO: 4539369 - DNA, 25 bp, Homo sapien
cggacccgtatattcctggactttg

SEQ ID NO: 4539370 - DNA, 25 bp, Homo sapien
ttccactgcttcaggatggccacgc

SEQ ID NO: 4539371 - DNA, 25 bp, Homo sapien
cagcattgcccgtagcgcacgggct

SEQ ID NO: 4539372 - DNA, 25 bp, Homo sapien
agggttggcgccgtctgtgtaattc

SEQ ID NO: 4539373 - DNA, 25 bp, Homo sapien
agtttccattgagcaccccattatc

SEQ ID NO: 4539374 - DNA, 25 bp, Homo sapien
tgtgggctgccttggaagacccatg

SEQ ID NO: 4539375 - DNA, 25 bp, Homo sapien
gtgtgggctgccttggaagacccat

SEQ ID NO: 4539376 - DNA, 25 bp, Homo sapien
gtgggctgccttggaagacccatgg

SEQ ID NO: 4539377 - DNA, 25 bp, Homo sapien
gtctcatccaagatggctttgccag

SEQ ID NO: 4539378 - DNA, 25 bp, Homo sapien
attctggcgtcagtctcatccaaga

SEQ ID NO: 4539379 - DNA, 25 bp, Homo sapien
tggcgtcagtctcatccaagatggc

SEQ ID NO: 4539380 - DNA, 25 bp, Homo sapien
caagatggctttgccagagggtccc

SEQ ID NO: 4539381 - DNA, 25 bp, Homo sapien
gctgggtcagtctggaagtgcaggc

SEQ ID NO: 4539382 - DNA, 25 bp, Homo sapien
tagacggggcttccccgcagagcac

SEQ ID NO: 4539383 - DNA, 25 bp, Homo sapien
tggaagtgcaggctcttgtctagca

SEQ ID NO: 4539384 - DNA, 25 bp, Homo sapien
cactctgctgacgtagacggggctt

SEQ ID NO: 4539385 - DNA, 25 bp, Homo sapien
gcttagcattggcagctactgctga

SEQ ID NO: 4539386 - DNA, 25 bp, Homo sapien
ctactgctgaagtgagggtgccaac

SEQ ID NO: 4539387 - DNA, 25 bp, Homo sapien
cctcatgctcactggaattcctggg

SEQ ID NO: 4539388 - DNA, 25 bp, Homo sapien
tgagagagtggaaaatgggacccca

SEQ ID NO: 4539389 - DNA, 25 bp, Homo sapien
tcctcgtgccatttagttagcgttg

SEQ ID NO: 4539390 - DNA, 25 bp, Homo sapien
cctgggtgaggtgcctttaactgcc

SEQ ID NO: 4539391 - DNA, 25 bp, Homo sapien
ttggtagatgaagccataatcattc

SEQ ID NO: 4539392 - DNA, 25 bp, Homo sapien
tcactgtccaagtagacagcatcct

SEQ ID NO: 4539393 - DNA, 25 bp, Homo sapien
ttccagggacatgggcggatccagt

SEQ ID NO: 4539394 - DNA, 25 bp, Homo sapien
gcggatccagttcttgctgccttgg

SEQ ID NO: 4539395 - DNA, 25 bp, Homo sapien
ttagaggcgttagaacccatccagg

SEQ ID NO: 4539396 - DNA, 25 bp, Homo sapien
tgagcattctcagccattcggggac

SEQ ID NO: 4539397 - DNA, 25 bp, Homo sapien
gtggttagaggcgttagaacccatc

SEQ ID NO: 4539398 - DNA, 25 bp, Homo sapien
cagggaagcgggtagtggttagagg

SEQ ID NO: 4539399 - DNA, 25 bp, Homo sapien
tgaactcccctagctggtaggccgt

SEQ ID NO: 4539400 - DNA, 25 bp, Homo sapien
gtgggaggagcgcacaagctcacct

SEQ ID NO: 4539401 - DNA, 25 bp, Homo sapien
cccctggaaggagtcgatgtggatt

SEQ ID NO: 4539402 - DNA, 25 bp, Homo sapien
tggattttcaagaggtaccgaccca

SEQ ID NO: 4539403 - DNA, 25 bp, Homo sapien
gtgatggcgtgccaggctgaacaca

SEQ ID NO: 4539404 - DNA, 25 bp, Homo sapien
ctgtgatggcgtgccaggctgaaca

SEQ ID NO: 4539405 - DNA, 25 bp, Homo sapien
agcccgagtccccaaggccaggtct

SEQ ID NO: 4539406 - DNA, 25 bp, Homo sapien
cgagtccccaaggccaggtctggca

SEQ ID NO: 4539407 - DNA, 25 bp, Homo sapien
cacagtgatctcctccgtgtggtgc

SEQ ID NO: 4539408 - DNA, 25 bp, Homo sapien
gcgaacaagcaggtggtccacagtg

SEQ ID NO: 4539409 - DNA, 25 bp, Homo sapien
caaccacgaagatgatgttgtccag

SEQ ID NO: 4539410 - DNA, 25 bp, Homo sapien
gaagtacagggtgaggttgaaggcc

SEQ ID NO: 4539411 - DNA, 25 bp, Homo sapien
ttcagcaaactggtgccagagtgtc

SEQ ID NO: 4539412 - DNA, 25 bp, Homo sapien
ggtgccagagtgtctacttcccctt

SEQ ID NO: 4539413 - DNA, 25 bp, Homo sapien
cattggaagcctccaggagaaccga

SEQ ID NO: 4539414 - DNA, 25 bp, Homo sapien
aacagctgggcggtctggagcttca

SEQ ID NO: 4539415 - DNA, 25 bp, Homo sapien
gccctcaggtttttcttggcagtgt

SEQ ID NO: 4539416 - DNA, 25 bp, Homo sapien
cctcaggtttttcttggcagtgttg

SEQ ID NO: 4539417 - DNA, 25 bp, Homo sapien
ttgccctcaggtttttcttggcagt

SEQ ID NO: 4539418 - DNA, 25 bp, Homo sapien
tgccctcaggtttttcttggcagtg

SEQ ID NO: 4539419 - DNA, 25 bp, Homo sapien
gattggttggtgagaccaatagcga

SEQ ID NO: 4539420 - DNA, 25 bp, Homo sapien
tgattggttggtgagaccaatagcg

SEQ ID NO: 4539421 - DNA, 25 bp, Homo sapien
tcagcacaagttttcccatcttctt

SEQ ID NO: 4539422 - DNA, 25 bp, Homo sapien
agcacaagttttcccatcttctttt

SEQ ID NO: 4539423 - DNA, 25 bp, Homo sapien
cccatcttctttttcttcagcatcc

SEQ ID NO: 4539424 - DNA, 25 bp, Homo sapien
catcttctttttcttcagcatccac

SEQ ID NO: 4539425 - DNA, 25 bp, Homo sapien
aagtccagtcaatagctggtggatt

SEQ ID NO: 4539426 - DNA, 25 bp, Homo sapien
gcctgccttggccacattggccttg

SEQ ID NO: 4539427 - DNA, 25 bp, Homo sapien
atttatcctctggtacaggaagctt

SEQ ID NO: 4539428 - DNA, 25 bp, Homo sapien
agcttcaggacattaaacttcttct

SEQ ID NO: 4539429 - DNA, 25 bp, Homo sapien
tccaggatttcagataattagcaat

SEQ ID NO: 4539430 - DNA, 25 bp, Homo sapien
tcaggtaaagtagccagcctggagg

SEQ ID NO: 4539431 - DNA, 25 bp, Homo sapien
ttcagataattagcaatggcctttt

SEQ ID NO: 4539432 - DNA, 25 bp, Homo sapien
ggatttcagataattagcaatggcc

SEQ ID NO: 4539433 - DNA, 25 bp, Homo sapien
ctgcaaaagctacccagtcaatggt

SEQ ID NO: 4539434 - DNA, 25 bp, Homo sapien
caaaagctacccagtcaatggtttt

SEQ ID NO: 4539435 - DNA, 25 bp, Homo sapien
ctctgcaaaagctacccagtcaatg

SEQ ID NO: 4539436 - DNA, 25 bp, Homo sapien
gcaaaagctacccagtcaatggttt

SEQ ID NO: 4539437 - DNA, 25 bp, Homo sapien
aagcacacggtgtttctaacagagc

SEQ ID NO: 4539438 - DNA, 25 bp, Homo sapien
catagccaggagtagaaaggagcca

SEQ ID NO: 4539439 - DNA, 25 bp, Homo sapien
ttcattcattcccaggcaggctaga

SEQ ID NO: 4539440 - DNA, 25 bp, Homo sapien
gaggtggagccaagacgacatagcc

SEQ ID NO: 4539441 - DNA, 25 bp, Homo sapien
ggtccagttgaatttggagggtgtg

SEQ ID NO: 4539442 - DNA, 25 bp, Homo sapien
ccagccacagtgacgaagatgtcct

SEQ ID NO: 4539443 - DNA, 25 bp, Homo sapien
gacctcgttgctgctgatgagaacc

SEQ ID NO: 4539444 - DNA, 25 bp, Homo sapien
tccagctttggtcgggtagaggtcc

SEQ ID NO: 4539445 - DNA, 25 bp, Homo sapien
tgagggtgacatggactctcagcgc

SEQ ID NO: 4539446 - DNA, 25 bp, Homo sapien
tgcccattgatgaggccgcttcctt

SEQ ID NO: 4539447 - DNA, 25 bp, Homo sapien
gtgacatggactctcagcgccttgc

SEQ ID NO: 4539448 - DNA, 25 bp, Homo sapien
ctcagagccaccattaaggtgttgg

SEQ ID NO: 4539449 - DNA, 25 bp, Homo sapien
tcttttaggaccagcatggacctcc

SEQ ID NO: 4539450 - DNA, 25 bp, Homo sapien
ctgtaattgctgtagggcaggagga

SEQ ID NO: 4539451 - DNA, 25 bp, Homo sapien
ttcgtccgttagcttgtttctgtaa

SEQ ID NO: 4539452 - DNA, 25 bp, Homo sapien
cgatgccagacacgcggatgagctt

SEQ ID NO: 4539453 - DNA, 25 bp, Homo sapien
aagtccaggttcatccgcactgtgt

SEQ ID NO: 4539454 - DNA, 25 bp, Homo sapien
ctgtgtgcctccagaagggcttctg

SEQ ID NO: 4539455 - DNA, 25 bp, Homo sapien
agggcttctgggtaccacccccatg

SEQ ID NO: 4539456 - DNA, 25 bp, Homo sapien
agggcctgtgcacagaagcgcacca

SEQ ID NO: 4539457 - DNA, 25 bp, Homo sapien
ccactcgggtatcctggccaggtga

SEQ ID NO: 4539458 - DNA, 25 bp, Homo sapien
gggcccagcattttccgagaagcct

SEQ ID NO: 4539459 - DNA, 25 bp, Homo sapien
accctctggatacgcagcagcagct

SEQ ID NO: 4539460 - DNA, 25 bp, Homo sapien
gcaaagaagctctttgggggcccag

SEQ ID NO: 4539461 - DNA, 25 bp, Homo sapien
agctaggaagcatcacaaagaagct

SEQ ID NO: 4539462 - DNA, 25 bp, Homo sapien
tgaggaagaggtgattcgatggtga

SEQ ID NO: 4539463 - DNA, 25 bp, Homo sapien
tcgatggtgatggtttcaacttgga

SEQ ID NO: 4539464 - DNA, 25 bp, Homo sapien
tcacaaagaagcttaaagcagccct

SEQ ID NO: 4539465 - DNA, 25 bp, Homo sapien
tggtctgaccccaccatcttagtgc

SEQ ID NO: 4539466 - DNA, 25 bp, Homo sapien
tagtgctgatctccttcccgatgga

SEQ ID NO: 4539467 - DNA, 25 bp, Homo sapien
gttcacctcggcatacacaaaaggg

SEQ ID NO: 4539468 - DNA, 25 bp, Homo sapien
aaatgacttcatcggcgttcacctc

SEQ ID NO: 4539469 - DNA, 25 bp, Homo sapien
tccagaacctgccacccgttgtatc

SEQ ID NO: 4539470 - DNA, 25 bp, Homo sapien
tggtgggagatctttccggatcatc

SEQ ID NO: 4539471 - DNA, 25 bp, Homo sapien
tctttccggatcatccagcactcat

SEQ ID NO: 4539472 - DNA, 25 bp, Homo sapien
aacctgccacccgttgtatcctggt

SEQ ID NO: 4539473 - DNA, 25 bp, Homo sapien
cggcatttcggtcatagtacgtatc

SEQ ID NO: 4539474 - DNA, 25 bp, Homo sapien
gtgcgcggaacggaaattggaaaca

SEQ ID NO: 4539475 - DNA, 25 bp, Homo sapien
gatggtcaagttcctatccacgttg

SEQ ID NO: 4539476 - DNA, 25 bp, Homo sapien
gagttgacagcatctcggcatttcg

SEQ ID NO: 4539477 - DNA, 25 bp, Homo sapien
gaccactgctgtaggatggccacac

SEQ ID NO: 4539478 - DNA, 25 bp, Homo sapien
tttggagtagtcctcgccccagttc

SEQ ID NO: 4539479 - DNA, 25 bp, Homo sapien
gcacataacagaggcgaagacccag

SEQ ID NO: 4539480 - DNA, 25 bp, Homo sapien
tccagaggactgacccctttggagt

SEQ ID NO: 4539481 - DNA, 25 bp, Homo sapien
ttccgctgggaacagtctttggccg

SEQ ID NO: 4539482 - DNA, 25 bp, Homo sapien
aggatctcaaagcagatgtctatga

SEQ ID NO: 4539483 - DNA, 25 bp, Homo sapien
accctgcacacatacaccacgtcgt

SEQ ID NO: 4539484 - DNA, 25 bp, Homo sapien
tctcaaagcagatgtctatgatgtc

SEQ ID NO: 4539485 - DNA, 25 bp, Homo sapien
gagaagagcaaatgtctagacttct

SEQ ID NO: 4539486 - DNA, 25 bp, Homo sapien
gaagagcaaatgtctagacttctga

SEQ ID NO: 4539487 - DNA, 25 bp, Homo sapien
agagaagagcaaatgtctagacttc

SEQ ID NO: 4539488 - DNA, 25 bp, Homo sapien
agaagagcaaatgtctagacttctg

SEQ ID NO: 4539489 - DNA, 25 bp, Homo sapien
aacaaagccataatctcgcatgata

SEQ ID NO: 4539490 - DNA, 25 bp, Homo sapien
cgcatgatatactcctgcagcagta

SEQ ID NO: 4539491 - DNA, 25 bp, Homo sapien
tgatgaatctttcatgacccttgta

SEQ ID NO: 4539492 - DNA, 25 bp, Homo sapien
ttcacttggcaggtagacgtcgtcc

SEQ ID NO: 4539493 - DNA, 25 bp, Homo sapien
cccagcgggtaagtcacactgtgac

SEQ ID NO: 4539494 - DNA, 25 bp, Homo sapien
gatgaaagttcccagcgggtaagtc

SEQ ID NO: 4539495 - DNA, 25 bp, Homo sapien
agttcccagcgggtaagtcacactg

SEQ ID NO: 4539496 - DNA, 25 bp, Homo sapien
tgaaagttcccagcgggtaagtcac

SEQ ID NO: 4539497 - DNA, 25 bp, Homo sapien
ggtgaaatcagaagcgctccagaca

SEQ ID NO: 4539498 - DNA, 25 bp, Homo sapien
tcagagtgtaatggccaataactgc

SEQ ID NO: 4539499 - DNA, 25 bp, Homo sapien
gaaacttggagagagttggagtcaa

SEQ ID NO: 4539500 - DNA, 25 bp, Homo sapien
gagagttggagtcaatggtgaaatc

SEQ ID NO: 4539501 - DNA, 25 bp, Homo sapien
gactggaagggtcggctgaagctca

SEQ ID NO: 4539502 - DNA, 25 bp, Homo sapien
gaagctcagccggaggtagaagggc

SEQ ID NO: 4539503 - DNA, 25 bp, Homo sapien
ctgcgtgtggtgctccttgttgttc

SEQ ID NO: 4539504 - DNA, 25 bp, Homo sapien
acagtgagccgcttgacgcccatct

SEQ ID NO: 4539505 - DNA, 25 bp, Homo sapien
ggagctctgcaggtcgacagactca

SEQ ID NO: 4539506 - DNA, 25 bp, Homo sapien
tctgcaggtcgacagactcaagccg

SEQ ID NO: 4539507 - DNA, 25 bp, Homo sapien
aggtcgacagactcaagccgcaagg

SEQ ID NO: 4539508 - DNA, 25 bp, Homo sapien
cgacagactcaagccgcaaggttgc

SEQ ID NO: 4539509 - DNA, 25 bp, Homo sapien
taagccagttcggtctggcttcccc

SEQ ID NO: 4539510 - DNA, 25 bp, Homo sapien
ggacccgattcgatctaagccagtt

SEQ ID NO: 4539511 - DNA, 25 bp, Homo sapien
cctgaccatatgggtgttgggtaag

SEQ ID NO: 4539512 - DNA, 25 bp, Homo sapien
gcttgaagctgttcccttgtgcctc

SEQ ID NO: 4539513 - DNA, 25 bp, Homo sapien
cagaatgttctgaagccacatctcc

SEQ ID NO: 4539514 - DNA, 25 bp, Homo sapien
ggagagaaacgagcatggttccctt

SEQ ID NO: 4539515 - DNA, 25 bp, Homo sapien
taacacttctgagagaaggtcaggg

SEQ ID NO: 4539516 - DNA, 25 bp, Homo sapien
gagggaaatctgtactaattctcca

SEQ ID NO: 4539517 - DNA, 25 bp, Homo sapien
ttccaaggttcaaaatagcagctat

SEQ ID NO: 4539518 - DNA, 25 bp, Homo sapien
tccactcaacaataagccagagatt

SEQ ID NO: 4539519 - DNA, 25 bp, Homo sapien
gaggtgctgagtgtaaccattaagc

SEQ ID NO: 4539520 - DNA, 25 bp, Homo sapien
cagattatcctgtggtttcggcaac

SEQ ID NO: 4539521 - DNA, 25 bp, Homo sapien
ttagtgctcactcttaacttttgac

SEQ ID NO: 4539522 - DNA, 25 bp, Homo sapien
gcagggtctaatgtcaggacagatg

SEQ ID NO: 4539523 - DNA, 25 bp, Homo sapien
ggatctaaaagttagtgctcactct

SEQ ID NO: 4539524 - DNA, 25 bp, Homo sapien
tggttatcccaggatctaaaagtta

SEQ ID NO: 4539525 - DNA, 25 bp, Homo sapien
tgtgattagccaagttacatgacct

SEQ ID NO: 4539526 - DNA, 25 bp, Homo sapien
gcttacttacatgtgggatgacaga

SEQ ID NO: 4539527 - DNA, 25 bp, Homo sapien
catgacctaacttgccggcttaatg

SEQ ID NO: 4539528 - DNA, 25 bp, Homo sapien
ttatttgagtacaagagtggacctc

SEQ ID NO: 4539529 - DNA, 25 bp, Homo sapien
aaactcttcaaagagcttctcttca

SEQ ID NO: 4539530 - DNA, 25 bp, Homo sapien
caaagagcttctcttcaaaggcttc

SEQ ID NO: 4539531 - DNA, 25 bp, Homo sapien
tcaaagagcttctcttcaaaggctt

SEQ ID NO: 4539532 - DNA, 25 bp, Homo sapien
tcttcaaagagcttctcttcaaagg

SEQ ID NO: 4539533 - DNA, 25 bp, Homo sapien
tgcacagggagaaagcggttggttc

SEQ ID NO: 4539534 - DNA, 25 bp, Homo sapien
cacagggagaaagcggttggttcca

SEQ ID NO: 4539535 - DNA, 25 bp, Homo sapien
gcacagggagaaagcggttggttcc

SEQ ID NO: 4539536 - DNA, 25 bp, Homo sapien
atttaggcacttgtagaatgaaaac

SEQ ID NO: 4539537 - DNA, 25 bp, Homo sapien
taatagaaataaaggatgcaatttg

SEQ ID NO: 4539538 - DNA, 25 bp, Homo sapien
agactgtcctctccatacacttagg

SEQ ID NO: 4539539 - DNA, 25 bp, Homo sapien
gggaggcttcatctaacagagccaa

SEQ ID NO: 4539540 - DNA, 25 bp, Homo sapien
aatatattcaaccacggaactgcgt

SEQ ID NO: 4539541 - DNA, 25 bp, Homo sapien
ccaaggatctgcgtgaaactttttc

SEQ ID NO: 4539542 - DNA, 25 bp, Homo sapien
gaattgtcaatactacgctccctca

SEQ ID NO: 4539543 - DNA, 25 bp, Homo sapien
ggtttcctacatgaagaattgtcaa

SEQ ID NO: 4539544 - DNA, 25 bp, Homo sapien
tcctctcggactgcatggccactgt

SEQ ID NO: 4539545 - DNA, 25 bp, Homo sapien
cactactcctctcggactgcatggc

SEQ ID NO: 4539546 - DNA, 25 bp, Homo sapien
gctgttttctgtagtgattgtttct

SEQ ID NO: 4539547 - DNA, 25 bp, Homo sapien
tgttttctgtagtgattgtttctag

SEQ ID NO: 4539548 - DNA, 25 bp, Homo sapien
acctttttcactttttgcactgaat

SEQ ID NO: 4539549 - DNA, 25 bp, Homo sapien
ccaacctttttcactttttgcactg

SEQ ID NO: 4539550 - DNA, 25 bp, Homo sapien
tttttcactttttgcactgaatagt

SEQ ID NO: 4539551 - DNA, 25 bp, Homo sapien
caacctttttcactttttgcactga

SEQ ID NO: 4539552 - DNA, 25 bp, Homo sapien
tgggtcctgaatattagtccagtcc

SEQ ID NO: 4539553 - DNA, 25 bp, Homo sapien
tatctatagctagagggtcatccta

SEQ ID NO: 4539554 - DNA, 25 bp, Homo sapien
tattgtctactttagtgggtcctga

SEQ ID NO: 4539555 - DNA, 25 bp, Homo sapien
aaggaggagtggcagtatctatagc

SEQ ID NO: 4539556 - DNA, 25 bp, Homo sapien
tgtatgggggttgaagtaggtacca

SEQ ID NO: 4539557 - DNA, 25 bp, Homo sapien
tgaagtaggtaccaaaggaaaagca

SEQ ID NO: 4539558 - DNA, 25 bp, Homo sapien
gactgtatgggggttgaagtaggta

SEQ ID NO: 4539559 - DNA, 25 bp, Homo sapien
cgagacctccagcaataagggctcc

SEQ ID NO: 4539560 - DNA, 25 bp, Homo sapien
gcactgtgagaatgccgggcttcag

SEQ ID NO: 4539561 - DNA, 25 bp, Homo sapien
gatccctccaaccagtaacagcttt

SEQ ID NO: 4539562 - DNA, 25 bp, Homo sapien
gagattggtctcagaaagagcacag

SEQ ID NO: 4539563 - DNA, 25 bp, Homo sapien
gaatgccgccaacaacacaaagtgg

SEQ ID NO: 4539564 - DNA, 25 bp, Homo sapien
gaatcatcctttcggccagcctttg

SEQ ID NO: 4539565 - DNA, 25 bp, Homo sapien
cagtcacttagtacaggttccacca

SEQ ID NO: 4539566 - DNA, 25 bp, Homo sapien
gttattgtcactttcaggtcctcag

SEQ ID NO: 4539567 - DNA, 25 bp, Homo sapien
tggagaacccccaaggctggactta

SEQ ID NO: 4539568 - DNA, 25 bp, Homo sapien
gctggagaacccccaaggctggact

SEQ ID NO: 4539569 - DNA, 25 bp, Homo sapien
aaaatgaagctggagaacccccaag

SEQ ID NO: 4539570 - DNA, 25 bp, Homo sapien
aatgaagctggagaacccccaaggc

SEQ ID NO: 4539571 - DNA, 25 bp, Homo sapien
tcagagtcacaatctcttgagagca

SEQ ID NO: 4539572 - DNA, 25 bp, Homo sapien
ataaaggcgtccatcccactgaact

SEQ ID NO: 4539573 - DNA, 25 bp, Homo sapien
tctgagagtcttgtcatggtgtgat

SEQ ID NO: 4539574 - DNA, 25 bp, Homo sapien
tccagtcccacaactgcctatttgg

SEQ ID NO: 4539575 - DNA, 25 bp, Homo sapien
cgctactgactacgctggcagggaa

SEQ ID NO: 4539576 - DNA, 25 bp, Homo sapien
tctgctcatagaccacgaaaagggc

SEQ ID NO: 4539577 - DNA, 25 bp, Homo sapien
gaatacccctgaaggcgaagcagga

SEQ ID NO: 4539578 - DNA, 25 bp, Homo sapien
aaatagagcgagtcgaagccagcgc

SEQ ID NO: 4539579 - DNA, 25 bp, Homo sapien
tcacttccgggaagagcgcatctcg

SEQ ID NO: 4539580 - DNA, 25 bp, Homo sapien
cagtctgtcacggttgtgagccgcc

SEQ ID NO: 4539581 - DNA, 25 bp, Homo sapien
gagactcaggaatggcagtctgtca

SEQ ID NO: 4539582 - DNA, 25 bp, Homo sapien
gcatctcgccaaccagaattgagga

SEQ ID NO: 4539583 - DNA, 25 bp, Homo sapien
tgttaagtagagttcattgggtctc

SEQ ID NO: 4539584 - DNA, 25 bp, Homo sapien
tacataatggaccactggtgcaggc

SEQ ID NO: 4539585 - DNA, 25 bp, Homo sapien
gaaagatacctctagtagtggcaac

SEQ ID NO: 4539586 - DNA, 25 bp, Homo sapien
tcattgggtctcttgtaaccctacc

SEQ ID NO: 4539587 - DNA, 25 bp, Homo sapien
taaagggcctgttcgcacacagtag

SEQ ID NO: 4539588 - DNA, 25 bp, Homo sapien
taaatcatctgagatcctgaggcac

SEQ ID NO: 4539589 - DNA, 25 bp, Homo sapien
tatgtctagattggcagctccactg

SEQ ID NO: 4539590 - DNA, 25 bp, Homo sapien
catgcagctgcgttgctctgtggaa

SEQ ID NO: 4539591 - DNA, 25 bp, Homo sapien
agagacagacgaaattcagatgaga

SEQ ID NO: 4539592 - DNA, 25 bp, Homo sapien
caagagacagacgaaattcagatga

SEQ ID NO: 4539593 - DNA, 25 bp, Homo sapien
caagatgattcatagggcagaacca

SEQ ID NO: 4539594 - DNA, 25 bp, Homo sapien
agagctagacccacctaatgggcaa

SEQ ID NO: 4539595 - DNA, 25 bp, Homo sapien
gaatttcctaagctaactggacaca

SEQ ID NO: 4539596 - DNA, 25 bp, Homo sapien
taaatgaagagggtgcctgacaaat

SEQ ID NO: 4539597 - DNA, 25 bp, Homo sapien
cctctttccgttatatatcctcagg

SEQ ID NO: 4539598 - DNA, 25 bp, Homo sapien
gagcctctttccgttatatatcctc

SEQ ID NO: 4539599 - DNA, 25 bp, Homo sapien
tattgagcctctttccgttatatat

SEQ ID NO: 4539600 - DNA, 25 bp, Homo sapien
atttattgagcctctttccgttata

SEQ ID NO: 4539601 - DNA, 25 bp, Homo sapien
gaagcttttcccgtgcatggatttc

SEQ ID NO: 4539602 - DNA, 25 bp, Homo sapien
ggatttctccgtgcttattaagggc

SEQ ID NO: 4539603 - DNA, 25 bp, Homo sapien
ccgtgcatggatttctccgtgctta

SEQ ID NO: 4539604 - DNA, 25 bp, Homo sapien
cgtgcttattaagggcagagctttt

SEQ ID NO: 4539605 - DNA, 25 bp, Homo sapien
tgtgcactaaaatgagaactgttat

SEQ ID NO: 4539606 - DNA, 25 bp, Homo sapien
gatgtgcacgtaagtcagaactctt

SEQ ID NO: 4539607 - DNA, 25 bp, Homo sapien
tgtgtgtatcctccgatgtgcacta

SEQ ID NO: 4539608 - DNA, 25 bp, Homo sapien
tctggtgaatgataaggcttgagct

SEQ ID NO: 4539609 - DNA, 25 bp, Homo sapien
tgtgtggattctcctatgggtgatg

SEQ ID NO: 4539610 - DNA, 25 bp, Homo sapien
ggattctccggtgtctaatgagtcg

SEQ ID NO: 4539611 - DNA, 25 bp, Homo sapien
tccacctggtgggatacctgatgca

SEQ ID NO: 4539612 - DNA, 25 bp, Homo sapien
tgaaatttgaactgtcacggaaact

SEQ ID NO: 4539613 - DNA, 25 bp, Homo sapien
tgatctacagtcactctcattgcct

SEQ ID NO: 4539614 - DNA, 25 bp, Homo sapien
gcctttaccctgatgaagataccgg

SEQ ID NO: 4539615 - DNA, 25 bp, Homo sapien
caagtaatgtcctatgcagttgtac

SEQ ID NO: 4539616 - DNA, 25 bp, Homo sapien
tcttctccgggagtgtcagttttcc

SEQ ID NO: 4539617 - DNA, 25 bp, Homo sapien
atgcccagccttaagtaaccttctc

SEQ ID NO: 4539618 - DNA, 25 bp, Homo sapien
tgcccagccttaagtaaccttctct

SEQ ID NO: 4539619 - DNA, 25 bp, Homo sapien
tccatgaaagctgggtgtagaggcc

SEQ ID NO: 4539620 - DNA, 25 bp, Homo sapien
ggtcacaagaagaatccatgaaagc

SEQ ID NO: 4539621 - DNA, 25 bp, Homo sapien
tgttatttataccataatagtgaaa

SEQ ID NO: 4539622 - DNA, 25 bp, Homo sapien
taatagacaagaaatatgggtggtc

SEQ ID NO: 4539623 - DNA, 25 bp, Homo sapien
agcacgggttatgacagcccctggg

SEQ ID NO: 4539624 - DNA, 25 bp, Homo sapien
gggctttggaataacactggagcac

SEQ ID NO: 4539625 - DNA, 25 bp, Homo sapien
tctgtggcctcgtctgcttcctcag

SEQ ID NO: 4539626 - DNA, 25 bp, Homo sapien
ccctgggggtatctcagtatcctct

SEQ ID NO: 4539627 - DNA, 25 bp, Homo sapien
gtggggcagcaacccggacactcac

SEQ ID NO: 4539628 - DNA, 25 bp, Homo sapien
tgggtctcactaagaattgcaaggt

SEQ ID NO: 4539629 - DNA, 25 bp, Homo sapien
taactttccgatagctggtttgcag

SEQ ID NO: 4539630 - DNA, 25 bp, Homo sapien
gacagttccggagggcttcataaaa

SEQ ID NO: 4539631 - DNA, 25 bp, Homo sapien
aaagaagggacaggtctctggtgcc

SEQ ID NO: 4539632 - DNA, 25 bp, Homo sapien
gccaccagaagagaaatttcagcac

SEQ ID NO: 4539633 - DNA, 25 bp, Homo sapien
ccaccagaagagaaatttcagcacc

SEQ ID NO: 4539634 - DNA, 25 bp, Homo sapien
caccagaagagaaatttcagcacca

SEQ ID NO: 4539635 - DNA, 25 bp, Homo sapien
ctgccaccagaagagaaatttcagc

SEQ ID NO: 4539636 - DNA, 25 bp, Homo sapien
tgagaattcacctaagctcaggctc

SEQ ID NO: 4539637 - DNA, 25 bp, Homo sapien
ctgcatcatgagaattcacctaagc

SEQ ID NO: 4539638 - DNA, 25 bp, Homo sapien
ttcctcagtcctatcatctgcatca

SEQ ID NO: 4539639 - DNA, 25 bp, Homo sapien
agagcctgaattcctcagtcctatc

SEQ ID NO: 4539640 - DNA, 25 bp, Homo sapien
gaatggagaagcacttctttgttcc

SEQ ID NO: 4539641 - DNA, 25 bp, Homo sapien
aaagctggcatgtgacattaagcct

SEQ ID NO: 4539642 - DNA, 25 bp, Homo sapien
ctttgttccctaagtggcaaagctg

SEQ ID NO: 4539643 - DNA, 25 bp, Homo sapien
tctgactccacatccagtctctttg

SEQ ID NO: 4539644 - DNA, 25 bp, Homo sapien
ggcagggcaatgacctgagcactca

SEQ ID NO: 4539645 - DNA, 25 bp, Homo sapien
ccatgtcatcactgtcagactcctg

SEQ ID NO: 4539646 - DNA, 25 bp, Homo sapien
catcgctgcctaccaggccagagtg

SEQ ID NO: 4539647 - DNA, 25 bp, Homo sapien
gggtcgcctctagatccatgtcatc

SEQ ID NO: 4539648 - DNA, 25 bp, Homo sapien
aagccatattccctgagccgctcag

SEQ ID NO: 4539649 - DNA, 25 bp, Homo sapien
gaattgcgaggagcgttctggtctc

SEQ ID NO: 4539650 - DNA, 25 bp, Homo sapien
tcctatggcagtttctgagagcctc

SEQ ID NO: 4539651 - DNA, 25 bp, Homo sapien
tccagggtccggaggaagccatatt

SEQ ID NO: 4539652 - DNA, 25 bp, Homo sapien
gagaccacaccggatttaggaaatg

SEQ ID NO: 4539653 - DNA, 25 bp, Homo sapien
ctggagaccacaccggatttaggaa

SEQ ID NO: 4539654 - DNA, 25 bp, Homo sapien
acaccggatttaggaaatggcaatc

SEQ ID NO: 4539655 - DNA, 25 bp, Homo sapien
ccacaccggatttaggaaatggcaa

SEQ ID NO: 4539656 - DNA, 25 bp, Homo sapien
ccaagaggattataaacaaagtgtc

SEQ ID NO: 4539657 - DNA, 25 bp, Homo sapien
ggctacagaattaaactcggcgtga

SEQ ID NO: 4539658 - DNA, 25 bp, Homo sapien
tccaagctctcctatttgtaggcag

SEQ ID NO: 4539659 - DNA, 25 bp, Homo sapien
tgtaggcaggtcctagtactgctgg

SEQ ID NO: 4539660 - DNA, 25 bp, Homo sapien
gaataccagaggctaaactacatgt

SEQ ID NO: 4539661 - DNA, 25 bp, Homo sapien
ggcagtctatcttcccatatgaatc

SEQ ID NO: 4539662 - DNA, 25 bp, Homo sapien
tccgataaaaactagggagccattc

SEQ ID NO: 4539663 - DNA, 25 bp, Homo sapien
cctacttcccaacttggaatggcag

SEQ ID NO: 4539664 - DNA, 25 bp, Homo sapien
gactcctgccgaacacttaataact

SEQ ID NO: 4539665 - DNA, 25 bp, Homo sapien
ttctccaagcgcacttcctgcccct

SEQ ID NO: 4539666 - DNA, 25 bp, Homo sapien
gaacacttaataactcttgtgatga

SEQ ID NO: 4539667 - DNA, 25 bp, Homo sapien
ctctctttcttgggtacacccctgg

SEQ ID NO: 4539668 - DNA, 25 bp, Homo sapien
ttcctgtacccaattctggatctcc

SEQ ID NO: 4539669 - DNA, 25 bp, Homo sapien
taaatcttccacgagagtcactgcc

SEQ ID NO: 4539670 - DNA, 25 bp, Homo sapien
gatctccccaggtaagacggtcagg

SEQ ID NO: 4539671 - DNA, 25 bp, Homo sapien
cattgttcctgtacccaattctgga

SEQ ID NO: 4539672 - DNA, 25 bp, Homo sapien
atggaatctcctgaaacgctgtcgg

SEQ ID NO: 4539673 - DNA, 25 bp, Homo sapien
agagttggctgaaagcctcccgcgg

SEQ ID NO: 4539674 - DNA, 25 bp, Homo sapien
gtctcagagttagtgccattctctc

SEQ ID NO: 4539675 - DNA, 25 bp, Homo sapien
ttggtgcgcacctccggccttagcc

SEQ ID NO: 4539676 - DNA, 25 bp, Homo sapien
ttggagaatcccctgcagatgactg

SEQ ID NO: 4539677 - DNA, 25 bp, Homo sapien
aagaggtgtttcttcctagggcaga

SEQ ID NO: 4539678 - DNA, 25 bp, Homo sapien
tgtctaaagtcttgccagagctggc

SEQ ID NO: 4539679 - DNA, 25 bp, Homo sapien
tgttgcacagtgagtccgaaccata

SEQ ID NO: 4539680 - DNA, 25 bp, Homo sapien
cacattgggcaggagagacggaatc

SEQ ID NO: 4539681 - DNA, 25 bp, Homo sapien
ttttggctccaaagcgaggaccatg

SEQ ID NO: 4539682 - DNA, 25 bp, Homo sapien
caaaaatcacgtccagaatctcggg

SEQ ID NO: 4539683 - DNA, 25 bp, Homo sapien
tgtcggaaaacctcgcgcaaggaga

SEQ ID NO: 4539684 - DNA, 25 bp, Homo sapien
tgagccacaacacctcagcactgca

SEQ ID NO: 4539685 - DNA, 25 bp, Homo sapien
cacaacacctcagcactgcagtttt

SEQ ID NO: 4539686 - DNA, 25 bp, Homo sapien
aacacctcagcactgcagttttgac

SEQ ID NO: 4539687 - DNA, 25 bp, Homo sapien
cgtattgatgccgaatttattgtgg

SEQ ID NO: 4539688 - DNA, 25 bp, Homo sapien
gtcttgaacccctgagcttaagtaa

SEQ ID NO: 4539689 - DNA, 25 bp, Homo sapien
tcttgaacccctgagcttaagtaat

SEQ ID NO: 4539690 - DNA, 25 bp, Homo sapien
gaacccctgagcttaagtaattctc

SEQ ID NO: 4539691 - DNA, 25 bp, Homo sapien
ttgaacccctgagcttaagtaattc

SEQ ID NO: 4539692 - DNA, 25 bp, Homo sapien
gaaaaggctatatgtaatcttttgt

SEQ ID NO: 4539693 - DNA, 25 bp, Homo sapien
tatgagaagcaacacgagtcaacca

SEQ ID NO: 4539694 - DNA, 25 bp, Homo sapien
tcccaagttatctaaaaaatgcaga

SEQ ID NO: 4539695 - DNA, 25 bp, Homo sapien
ctttaagaattatagaaaaggctat

SEQ ID NO: 4539696 - DNA, 25 bp, Homo sapien
gactgatgcaatcaagtggcgccta

SEQ ID NO: 4539697 - DNA, 25 bp, Homo sapien
acttactgagtgtgcgccgggtgca

SEQ ID NO: 4539698 - DNA, 25 bp, Homo sapien
aatgcagcgcaagcacctcaagtcg

SEQ ID NO: 4539699 - DNA, 25 bp, Homo sapien
gtggcgcctaagaaatcacatggca

SEQ ID NO: 4539700 - DNA, 25 bp, Homo sapien
tgatatgaactagctgtgcagccgt

SEQ ID NO: 4539701 - DNA, 25 bp, Homo sapien
tactcgcttagccaggaaaggatgc

SEQ ID NO: 4539702 - DNA, 25 bp, Homo sapien
gcatctgtgaaaggaggcgaccacc

SEQ ID NO: 4539703 - DNA, 25 bp, Homo sapien
gcattctcgtgaaggtgcgtctgcc

SEQ ID NO: 4539704 - DNA, 25 bp, Homo sapien
ggaaacagagctgtgcccaattcca

SEQ ID NO: 4539705 - DNA, 25 bp, Homo sapien
tgtcctccgtaagtgaataagcctg

SEQ ID NO: 4539706 - DNA, 25 bp, Homo sapien
gcatagcattttagacaccctggaa

SEQ ID NO: 4539707 - DNA, 25 bp, Homo sapien
tgggccttcacctaccttaaactga

SEQ ID NO: 4539708 - DNA, 25 bp, Homo sapien
aatctccacgatagcagggaataaa

SEQ ID NO: 4539709 - DNA, 25 bp, Homo sapien
ataaaaccagtaagaccaagtatct

SEQ ID NO: 4539710 - DNA, 25 bp, Homo sapien
ccatgcaaggaatccagttacacac

SEQ ID NO: 4539711 - DNA, 25 bp, Homo sapien
tatacaagatccatgcaaggaatcc

SEQ ID NO: 4539712 - DNA, 25 bp, Homo sapien
tccccaacaatgaggcactggatca

SEQ ID NO: 4539713 - DNA, 25 bp, Homo sapien
tggatcacccactcttgtgacacca

SEQ ID NO: 4539714 - DNA, 25 bp, Homo sapien
tgggcatgaggggtccgtcaccacc

SEQ ID NO: 4539715 - DNA, 25 bp, Homo sapien
tcgtgtttatattttggatgctgct

SEQ ID NO: 4539716 - DNA, 25 bp, Homo sapien
tatgtcaaacacactgctactgatc

SEQ ID NO: 4539717 - DNA, 25 bp, Homo sapien
cttagccctccattagaaagagaga

SEQ ID NO: 4539718 - DNA, 25 bp, Homo sapien
caaaccaaagccctattatgtcaaa

SEQ ID NO: 4539719 - DNA, 25 bp, Homo sapien
gaaggaaaggacactcaacttagcc

SEQ ID NO: 4539720 - DNA, 25 bp, Homo sapien
agttctgctgttggtctgataccaa

SEQ ID NO: 4539721 - DNA, 25 bp, Homo sapien
gttggtctgataccaagagtacctt

SEQ ID NO: 4539722 - DNA, 25 bp, Homo sapien
ggcacttgaatggtgctgcttcaca

SEQ ID NO: 4539723 - DNA, 25 bp, Homo sapien
gtcatgaggatctcagaccagagct

SEQ ID NO: 4539724 - DNA, 25 bp, Homo sapien
tgcaaaaggttcctagccaatgtaa

SEQ ID NO: 4539725 - DNA, 25 bp, Homo sapien
tagttctctgactttacaggttgag

SEQ ID NO: 4539726 - DNA, 25 bp, Homo sapien
tcctgcctatacaattctggatggg

SEQ ID NO: 4539727 - DNA, 25 bp, Homo sapien
taaactagataaactcctgaagtca

SEQ ID NO: 4539728 - DNA, 25 bp, Homo sapien
taattacggtagttctggagctggt

SEQ ID NO: 4539729 - DNA, 25 bp, Homo sapien
tacttccgggttcgacaatgctgat

SEQ ID NO: 4539730 - DNA, 25 bp, Homo sapien
gctgatccgcaattagaagacactg

SEQ ID NO: 4539731 - DNA, 25 bp, Homo sapien
tgagacacacaaggaatcccactgg

SEQ ID NO: 4539732 - DNA, 25 bp, Homo sapien
cctgctcgaagctgggattctgtat

SEQ ID NO: 4539733 - DNA, 25 bp, Homo sapien
tactgcttgttgaaaggaggaattt

SEQ ID NO: 4539734 - DNA, 25 bp, Homo sapien
gaaatcttcaaggatatagccagct

SEQ ID NO: 4539735 - DNA, 25 bp, Homo sapien
attctgtatactgcttgttgaaagg

SEQ ID NO: 4539736 - DNA, 25 bp, Homo sapien
gggcattcagacctgattgacttgg

SEQ ID NO: 4539737 - DNA, 25 bp, Homo sapien
gacctgattgacttggatggttgca

SEQ ID NO: 4539738 - DNA, 25 bp, Homo sapien
tgattgacttggatggttgcagtag

SEQ ID NO: 4539739 - DNA, 25 bp, Homo sapien
gatgcccatagaacgcaaatgggga

SEQ ID NO: 4539740 - DNA, 25 bp, Homo sapien
aagatcccagttgctacttgccttg

SEQ ID NO: 4539741 - DNA, 25 bp, Homo sapien
cactgagaggaattttgtgaaaaca

SEQ ID NO: 4539742 - DNA, 25 bp, Homo sapien
ttttcaggaaccactcactgagagg

SEQ ID NO: 4539743 - DNA, 25 bp, Homo sapien
agagtaatttctgtgaccaagatcc

SEQ ID NO: 4539744 - DNA, 25 bp, Homo sapien
ttgtggccatggtaaggagaaatgc

SEQ ID NO: 4539745 - DNA, 25 bp, Homo sapien
aatgcgtagcccagaaacaaggtct

SEQ ID NO: 4539746 - DNA, 25 bp, Homo sapien
tttggagcggctggccaacttgtca

SEQ ID NO: 4539747 - DNA, 25 bp, Homo sapien
ttgagaggcaaaggccctctctgct

SEQ ID NO: 4539748 - DNA, 25 bp, Homo sapien
tgcattctgccatggtctgaaggaa

SEQ ID NO: 4539749 - DNA, 25 bp, Homo sapien
taattctggccttgctatctacccg

SEQ ID NO: 4539750 - DNA, 25 bp, Homo sapien
ggcaggaccccgactttatagcagg

SEQ ID NO: 4539751 - DNA, 25 bp, Homo sapien
tgagctgtccctgaatatcacctgt

SEQ ID NO: 4539752 - DNA, 25 bp, Homo sapien
gactttctgtgatctttcgggtagg

SEQ ID NO: 4539753 - DNA, 25 bp, Homo sapien
caggttttactgtggcagacttgcg

SEQ ID NO: 4539754 - DNA, 25 bp, Homo sapien
cagacttgcgacctcgcttggcagg

SEQ ID NO: 4539755 - DNA, 25 bp, Homo sapien
gagagaactcccatggaggcacgag

SEQ ID NO: 4539756 - DNA, 25 bp, Homo sapien
gggccaagcccatactgctctctca

SEQ ID NO: 4539757 - DNA, 25 bp, Homo sapien
gtaagaggtgttactgcttcatagg

SEQ ID NO: 4539758 - DNA, 25 bp, Homo sapien
ggatgacagccattcgcttatacca

SEQ ID NO: 4539759 - DNA, 25 bp, Homo sapien
gctgtagtacagttccccagactcc

SEQ ID NO: 4539760 - DNA, 25 bp, Homo sapien
tcattctaagagagacagcatgtgt

SEQ ID NO: 4539761 - DNA, 25 bp, Homo sapien
ggacccattactaagcctgtgaaaa

SEQ ID NO: 4539762 - DNA, 25 bp, Homo sapien
caggagaactgagcctaggcctaat

SEQ ID NO: 4539763 - DNA, 25 bp, Homo sapien
gaagcttgctgttgtcttaggctcc

SEQ ID NO: 4539764 - DNA, 25 bp, Homo sapien
cacaaatcagagcagaccaaagggt

SEQ ID NO: 4539765 - DNA, 25 bp, Homo sapien
gatgtcaacaatagggaaagctgga

SEQ ID NO: 4539766 - DNA, 25 bp, Homo sapien
gacaaacgtcccatactaacaccag

SEQ ID NO: 4539767 - DNA, 25 bp, Homo sapien
acagagtattattgccccaaggcac

SEQ ID NO: 4539768 - DNA, 25 bp, Homo sapien
taaaagtagccattggatgaccact

SEQ ID NO: 4539769 - DNA, 25 bp, Homo sapien
gagagggccgtcacttcagtgtcca

SEQ ID NO: 4539770 - DNA, 25 bp, Homo sapien
ggcatctaagccatcagaagggcca

SEQ ID NO: 4539771 - DNA, 25 bp, Homo sapien
gaatttctggagagtcactacgacg

SEQ ID NO: 4539772 - DNA, 25 bp, Homo sapien
ggcacgacacggctgaaggatttat

SEQ ID NO: 4539773 - DNA, 25 bp, Homo sapien
catctggtgacaagttaggtgaaat

SEQ ID NO: 4539774 - DNA, 25 bp, Homo sapien
tgaaatgtcctctatgcccaagggg

SEQ ID NO: 4539775 - DNA, 25 bp, Homo sapien
atctgttcgtctggtggagtctggc

SEQ ID NO: 4539776 - DNA, 25 bp, Homo sapien
gcccacgaggcgtgactggagcctt

SEQ ID NO: 4539777 - DNA, 25 bp, Homo sapien
acactggcgtccctgtctgactgac

SEQ ID NO: 4539778 - DNA, 25 bp, Homo sapien
cagtggtccgagaaggtgggcggcc

SEQ ID NO: 4539779 - DNA, 25 bp, Homo sapien
ctggttccagtggtccgagaaggtg

SEQ ID NO: 4539780 - DNA, 25 bp, Homo sapien
tgaagacaagttagtctgatagcac

SEQ ID NO: 4539781 - DNA, 25 bp, Homo sapien
aatgaagacaagttagtctgatagc

SEQ ID NO: 4539782 - DNA, 25 bp, Homo sapien
tagagaatgaagacaagttagtctg

SEQ ID NO: 4539783 - DNA, 25 bp, Homo sapien
agaatgaagacaagttagtctgata

SEQ ID NO: 4539784 - DNA, 25 bp, Homo sapien
catgacaggcctacatgtgctgagc

SEQ ID NO: 4539785 - DNA, 25 bp, Homo sapien
gctgtggtagaagcagtgcccacca

SEQ ID NO: 4539786 - DNA, 25 bp, Homo sapien
ttggccctcagactacatgacaggc

SEQ ID NO: 4539787 - DNA, 25 bp, Homo sapien
caccaaaatctcatgcagggagtgg

SEQ ID NO: 4539788 - DNA, 25 bp, Homo sapien
tcctgtgatattaaaatgtcagcaa

SEQ ID NO: 4539789 - DNA, 25 bp, Homo sapien
cctgtgatattaaaatgtcagcaac

SEQ ID NO: 4539790 - DNA, 25 bp, Homo sapien
ttcctgtgatattaaaatgtcagca

SEQ ID NO: 4539791 - DNA, 25 bp, Homo sapien
tttcctgtgatattaaaatgtcagc

SEQ ID NO: 4539792 - DNA, 25 bp, Homo sapien
caaaatctgcgggttctgtcccgct

SEQ ID NO: 4539793 - DNA, 25 bp, Homo sapien
tccctctgagtggtccggctccttt

SEQ ID NO: 4539794 - DNA, 25 bp, Homo sapien
ttctgtcccgctggttttccctctg

SEQ ID NO: 4539795 - DNA, 25 bp, Homo sapien
cactgctgtgcatagctgagagact

SEQ ID NO: 4539796 - DNA, 25 bp, Homo sapien
acactcctgacactctacaattggc

SEQ ID NO: 4539797 - DNA, 25 bp, Homo sapien
aggagaaggagctgatatcccccag

SEQ ID NO: 4539798 - DNA, 25 bp, Homo sapien
cactctacaattggctcttcagtct

SEQ ID NO: 4539799 - DNA, 25 bp, Homo sapien
gaaggagctgatatcccccaggtca

SEQ ID NO: 4539800 - DNA, 25 bp, Homo sapien
catctgtaatgacacgagtgacaag

SEQ ID NO: 4539801 - DNA, 25 bp, Homo sapien
tgacaagtgtgcgtacttcccggat

SEQ ID NO: 4539802 - DNA, 25 bp, Homo sapien
tcatgtgacgatgtaagacatggcc

SEQ ID NO: 4539803 - DNA, 25 bp, Homo sapien
tctgttccatccacataatacacat

SEQ ID NO: 4539804 - DNA, 25 bp, Homo sapien
gcatattcagattgccggcatcact

SEQ ID NO: 4539805 - DNA, 25 bp, Homo sapien
catatcctagccaggactaagaggg

SEQ ID NO: 4539806 - DNA, 25 bp, Homo sapien
taagtcattaacaggcagggagcat

SEQ ID NO: 4539807 - DNA, 25 bp, Homo sapien
gcaagcaatgcaataccatgagagt

SEQ ID NO: 4539808 - DNA, 25 bp, Homo sapien
taggtcaaatggaagcaatgaacta

SEQ ID NO: 4539809 - DNA, 25 bp, Homo sapien
tggaattttagacctggaaatgatc

SEQ ID NO: 4539810 - DNA, 25 bp, Homo sapien
ttcaaatgaccaagatcaaagttat

SEQ ID NO: 4539811 - DNA, 25 bp, Homo sapien
caaatggccaatcttaggtcaaatg

SEQ ID NO: 4539812 - DNA, 25 bp, Homo sapien
atgaatgaaaaattagcaatgagct

SEQ ID NO: 4539813 - DNA, 25 bp, Homo sapien
ttttcatcaaacgagacctgcattc

SEQ ID NO: 4539814 - DNA, 25 bp, Homo sapien
agttcataaagacacaaaaccgtcc

SEQ ID NO: 4539815 - DNA, 25 bp, Homo sapien
aaaagttcaaggagaattcagcaca

SEQ ID NO: 4539816 - DNA, 25 bp, Homo sapien
ataacaacgaacatgtgattcattc

SEQ ID NO: 4539817 - DNA, 25 bp, Homo sapien
gtctccaatggagtacttaagtaac

SEQ ID NO: 4539818 - DNA, 25 bp, Homo sapien
aggaaagttaaaattcagtggagaa

SEQ ID NO: 4539819 - DNA, 25 bp, Homo sapien
ttttggctgggcctttcaatcaagg

SEQ ID NO: 4539820 - DNA, 25 bp, Homo sapien
gggaccctcaaggaacactccatgg

SEQ ID NO: 4539821 - DNA, 25 bp, Homo sapien
tctggtcttctagcacatctgtcac

SEQ ID NO: 4539822 - DNA, 25 bp, Homo sapien
gagcgactctgtatcatccccagga

SEQ ID NO: 4539823 - DNA, 25 bp, Homo sapien
gactctgcctgattgtatggtcacc

SEQ ID NO: 4539824 - DNA, 25 bp, Homo sapien
ccttgagaacttggaaagtggagca

SEQ ID NO: 4539825 - DNA, 25 bp, Homo sapien
gactaatgggcttcataggctgttg

SEQ ID NO: 4539826 - DNA, 25 bp, Homo sapien
gactggatggcccttgtatgaccat

SEQ ID NO: 4539827 - DNA, 25 bp, Homo sapien
cagaatacactatagtccctcaagg

SEQ ID NO: 4539828 - DNA, 25 bp, Homo sapien
taagctcaagctcacaaaacagtag

SEQ ID NO: 4539829 - DNA, 25 bp, Homo sapien
ccaccagactgggaaattgataaag

SEQ ID NO: 4539830 - DNA, 25 bp, Homo sapien
tgtccaaggacatggcactagcatc

SEQ ID NO: 4539831 - DNA, 25 bp, Homo sapien
cctggcttcacagatacagctcaac

SEQ ID NO: 4539832 - DNA, 25 bp, Homo sapien
tcgagcctcattctcttgcctggct

SEQ ID NO: 4539833 - DNA, 25 bp, Homo sapien
gtggggggatcctcacttcgagcct

SEQ ID NO: 4539834 - DNA, 25 bp, Homo sapien
ttcacagatacagctcaacacagac

SEQ ID NO: 4539835 - DNA, 25 bp, Homo sapien
tattaaactctaaatagcatccagc

SEQ ID NO: 4539836 - DNA, 25 bp, Homo sapien
gtattaactaaaaagtctatgatcc

SEQ ID NO: 4539837 - DNA, 25 bp, Homo sapien
tgttgataaaccatctaccctcatc

SEQ ID NO: 4539838 - DNA, 25 bp, Homo sapien
tctatgatccattcaaaacattgct

SEQ ID NO: 4539839 - DNA, 25 bp, Homo sapien
agcaacagcagtagatccatttttt

SEQ ID NO: 4539840 - DNA, 25 bp, Homo sapien
actcagcaacagcagtagatccatt

SEQ ID NO: 4539841 - DNA, 25 bp, Homo sapien
ctcagcaacagcagtagatccattt

SEQ ID NO: 4539842 - DNA, 25 bp, Homo sapien
tcagcaacagcagtagatccatttt

SEQ ID NO: 4539843 - DNA, 25 bp, Homo sapien
cccagcagctgaaactacaggtgcc

SEQ ID NO: 4539844 - DNA, 25 bp, Homo sapien
ccccagcagctgaaactacaggtgc

SEQ ID NO: 4539845 - DNA, 25 bp, Homo sapien
ccagcagctgaaactacaggtgccc

SEQ ID NO: 4539846 - DNA, 25 bp, Homo sapien
tggcaccatcgttctgcctactcgc

SEQ ID NO: 4539847 - DNA, 25 bp, Homo sapien
tattcacctggcaccatcgttctgc

SEQ ID NO: 4539848 - DNA, 25 bp, Homo sapien
ttccatattcacctggcaccatcgt

SEQ ID NO: 4539849 - DNA, 25 bp, Homo sapien
ggcaccatcgttctgcctactcgct

SEQ ID NO: 4539850 - DNA, 25 bp, Homo sapien
agtatgggatcatgggtctccacca

SEQ ID NO: 4539851 - DNA, 25 bp, Homo sapien
tcaggactaaccagtttcattctta

SEQ ID NO: 4539852 - DNA, 25 bp, Homo sapien
gctatggtgctttctggatagttgc

SEQ ID NO: 4539853 - DNA, 25 bp, Homo sapien
tcagacatgacatcactggttgcta

SEQ ID NO: 4539854 - DNA, 25 bp, Homo sapien
acaaaggatgctgcatgagccctca

SEQ ID NO: 4539855 - DNA, 25 bp, Homo sapien
gagcaacaggattcagttccacttc

SEQ ID NO: 4539856 - DNA, 25 bp, Homo sapien
tgcatctggacaaaggatgctgcat

SEQ ID NO: 4539857 - DNA, 25 bp, Homo sapien
ctggtcttaagaggagcaacaggat

SEQ ID NO: 4539858 - DNA, 25 bp, Homo sapien
cccagcactgactagagaaaacaaa

SEQ ID NO: 4539859 - DNA, 25 bp, Homo sapien
tgtagaagactactggctgcttcag

SEQ ID NO: 4539860 - DNA, 25 bp, Homo sapien
tcaggcataggtagcaggagactcc

SEQ ID NO: 4539861 - DNA, 25 bp, Homo sapien
gacggcatgattgttacctcccagc

SEQ ID NO: 4539862 - DNA, 25 bp, Homo sapien
tcacttgtgtagagaatgatatctc

SEQ ID NO: 4539863 - DNA, 25 bp, Homo sapien
gacccaactcctcagatctaaaata

SEQ ID NO: 4539864 - DNA, 25 bp, Homo sapien
tagtagtaaaatcacagaaccagac

SEQ ID NO: 4539865 - DNA, 25 bp, Homo sapien
ctttacccctcatctcctagtagta

SEQ ID NO: 4539866 - DNA, 25 bp, Homo sapien
ccagtcaatggtgggatgatatcac

SEQ ID NO: 4539867 - DNA, 25 bp, Homo sapien
ccaattttaggtgcccaataagagg

SEQ ID NO: 4539868 - DNA, 25 bp, Homo sapien
taggagtactgtgtctcttgggctc

SEQ ID NO: 4539869 - DNA, 25 bp, Homo sapien
cttgggctccaattttaggtgccca

SEQ ID NO: 4539870 - DNA, 25 bp, Homo sapien
tttaggcaaagtgaaatgaaatggg

SEQ ID NO: 4539871 - DNA, 25 bp, Homo sapien
ctttaggcaaagtgaaatgaaatgg

SEQ ID NO: 4539872 - DNA, 25 bp, Homo sapien
tcccatgactgggaatctgagcact

SEQ ID NO: 4539873 - DNA, 25 bp, Homo sapien
tctcactaaaggtaaggaaggctgt

SEQ ID NO: 4539874 - DNA, 25 bp, Homo sapien
gaaacatcaactctgggagatggct

SEQ ID NO: 4539875 - DNA, 25 bp, Homo sapien
gggctgctgcaactcctggtcaagt

SEQ ID NO: 4539876 - DNA, 25 bp, Homo sapien
tgactttcacaaggtgtctcaggga

SEQ ID NO: 4539877 - DNA, 25 bp, Homo sapien
tagaaagtgcctcagatcgagtagc

SEQ ID NO: 4539878 - DNA, 25 bp, Homo sapien
tagctggtgacggaactgcctgact

SEQ ID NO: 4539879 - DNA, 25 bp, Homo sapien
tcagagaaaggtgcaacggaacact

SEQ ID NO: 4539880 - DNA, 25 bp, Homo sapien
tgcaagaatcccctgtcaaagatag

SEQ ID NO: 4539881 - DNA, 25 bp, Homo sapien
gggaattctttggttcaatctctga

SEQ ID NO: 4539882 - DNA, 25 bp, Homo sapien
tcaaagatagcccaagatcctcagg

SEQ ID NO: 4539883 - DNA, 25 bp, Homo sapien
tgtagaaagcatcaacttgcaagaa

SEQ ID NO: 4539884 - DNA, 25 bp, Homo sapien
tttttagggtgagggaactgctctc

SEQ ID NO: 4539885 - DNA, 25 bp, Homo sapien
ctgggcagcagggagatcaaccaca

SEQ ID NO: 4539886 - DNA, 25 bp, Homo sapien
aagctgatgtgtgattgcctagggc

SEQ ID NO: 4539887 - DNA, 25 bp, Homo sapien
tactgaaataccaaaactatactga

SEQ ID NO: 4539888 - DNA, 25 bp, Homo sapien
tctgagatattggtgttgaggcttg

SEQ ID NO: 4539889 - DNA, 25 bp, Homo sapien
tcttcagataacactgacgtgtcca

SEQ ID NO: 4539890 - DNA, 25 bp, Homo sapien
ggaagactggtgtgctctgagatat

SEQ ID NO: 4539891 - DNA, 25 bp, Homo sapien
gcttgtggtgatacagtggactcag

SEQ ID NO: 4539892 - DNA, 25 bp, Homo sapien
tctcccttcttgctctgtgggactg

SEQ ID NO: 4539893 - DNA, 25 bp, Homo sapien
tgtctcccttcttgctctgtgggac

SEQ ID NO: 4539894 - DNA, 25 bp, Homo sapien
cttgtctcccttcttgctctgtggg

SEQ ID NO: 4539895 - DNA, 25 bp, Homo sapien
ttgtctcccttcttgctctgtggga

SEQ ID NO: 4539896 - DNA, 25 bp, Homo sapien
ctaggaacgataaaaggagtagatc

SEQ ID NO: 4539897 - DNA, 25 bp, Homo sapien
taaaaggagtagatcggaaagcatc

SEQ ID NO: 4539898 - DNA, 25 bp, Homo sapien
agtagatcggaaagcatcaggagaa

SEQ ID NO: 4539899 - DNA, 25 bp, Homo sapien
cgataaaaggagtagatcggaaagc

SEQ ID NO: 4539900 - DNA, 25 bp, Homo sapien
cacatactgccttggcataagctat

SEQ ID NO: 4539901 - DNA, 25 bp, Homo sapien
tcaggcacatactgccttggcataa

SEQ ID NO: 4539902 - DNA, 25 bp, Homo sapien
caggcacatactgccttggcataag

SEQ ID NO: 4539903 - DNA, 25 bp, Homo sapien
ggcacatactgccttggcataagct

SEQ ID NO: 4539904 - DNA, 25 bp, Homo sapien
actgtcctgaacaagggacctctga

SEQ ID NO: 4539905 - DNA, 25 bp, Homo sapien
ctgtcctgaacaagggacctctgac

SEQ ID NO: 4539906 - DNA, 25 bp, Homo sapien
tgtcctgaacaagggacctctgacc

SEQ ID NO: 4539907 - DNA, 25 bp, Homo sapien
tgcaggagatgcagagtggtggcag

SEQ ID NO: 4539908 - DNA, 25 bp, Homo sapien
gcaggagtggaagccaaagaacacc

SEQ ID NO: 4539909 - DNA, 25 bp, Homo sapien
gtggtggcaggagtggaagccaaag

SEQ ID NO: 4539910 - DNA, 25 bp, Homo sapien
tggaagccaaagaacacccaccttc

SEQ ID NO: 4539911 - DNA, 25 bp, Homo sapien
aaggagtagagcaaccatcagaaga

SEQ ID NO: 4539912 - DNA, 25 bp, Homo sapien
ggagtagagcaaccatcagaagata

SEQ ID NO: 4539913 - DNA, 25 bp, Homo sapien
cttgaaggagtagagcaaccatcag

SEQ ID NO: 4539914 - DNA, 25 bp, Homo sapien
tgaaggagtagagcaaccatcagaa

SEQ ID NO: 4539915 - DNA, 25 bp, Homo sapien
aagctcatgccatgatacagatggg

SEQ ID NO: 4539916 - DNA, 25 bp, Homo sapien
gatacagatgggagaagtcaaaaaa

SEQ ID NO: 4539917 - DNA, 25 bp, Homo sapien
gacacttgatgttataaatgcagca

SEQ ID NO: 4539918 - DNA, 25 bp, Homo sapien
cttaggtgaagtcaagctcatgcca

SEQ ID NO: 4539919 - DNA, 25 bp, Homo sapien
ccataagttcttgtgcagacaactg

SEQ ID NO: 4539920 - DNA, 25 bp, Homo sapien
tattgctctggtcaaacaagtcttc

SEQ ID NO: 4539921 - DNA, 25 bp, Homo sapien
aacagatgctttggggctaaaaggc

SEQ ID NO: 4539922 - DNA, 25 bp, Homo sapien
gaatctgcagtccactttccataag

SEQ ID NO: 4539923 - DNA, 25 bp, Homo sapien
cagaccccaatgatgccagtaagga

SEQ ID NO: 4539924 - DNA, 25 bp, Homo sapien
tccccagggtaaacagaatagcata

SEQ ID NO: 4539925 - DNA, 25 bp, Homo sapien
tttccagagacttatgaggttcacc

SEQ ID NO: 4539926 - DNA, 25 bp, Homo sapien
gaatagcataactagatggaaggca

SEQ ID NO: 4539927 - DNA, 25 bp, Homo sapien
tggactgttctgctatggggatatc

SEQ ID NO: 4539928 - DNA, 25 bp, Homo sapien
cacagggatgtccttgctggactgt

SEQ ID NO: 4539929 - DNA, 25 bp, Homo sapien
acatgtacatccttactgggctgtg

SEQ ID NO: 4539930 - DNA, 25 bp, Homo sapien
ggatatcttcgttggactgttcttc

SEQ ID NO: 4539931 - DNA, 25 bp, Homo sapien
agaaccccaaaacccaactgtgatg

SEQ ID NO: 4539932 - DNA, 25 bp, Homo sapien
gctctgggagagttccagaacccca

SEQ ID NO: 4539933 - DNA, 25 bp, Homo sapien
tccacatcagacagcctggtataac

SEQ ID NO: 4539934 - DNA, 25 bp, Homo sapien
tggtggttactgattgtagctgctc

SEQ ID NO: 4539935 - DNA, 25 bp, Homo sapien
cagcaggagcagattccactgacat

SEQ ID NO: 4539936 - DNA, 25 bp, Homo sapien
cttcagcaccaagggaatgtgtagt

SEQ ID NO: 4539937 - DNA, 25 bp, Homo sapien
ggagcagattccactgacattccca

SEQ ID NO: 4539938 - DNA, 25 bp, Homo sapien
gaatgtgtagtattgcctgaagtat

SEQ ID NO: 4539939 - DNA, 25 bp, Homo sapien
gaagcaatgaaggacgacagcacaa

SEQ ID NO: 4539940 - DNA, 25 bp, Homo sapien
ttacagcaattagcctctgggtggc

SEQ ID NO: 4539941 - DNA, 25 bp, Homo sapien
taaatgctggtaggctccgtgagtc

SEQ ID NO: 4539942 - DNA, 25 bp, Homo sapien
gaaccgtgacccaagcaagtgaaag

SEQ ID NO: 4539943 - DNA, 25 bp, Homo sapien
acctcagtggttgaaaccttaggag

SEQ ID NO: 4539944 - DNA, 25 bp, Homo sapien
ctcctaaggtttcaaccactgaggt

SEQ ID NO: 4539945 - DNA, 25 bp, Homo sapien
gagtcattaggaccaggttcaaagc

SEQ ID NO: 4539946 - DNA, 25 bp, Homo sapien
cccaaaactcctgaagttctctaca

SEQ ID NO: 4539947 - DNA, 25 bp, Homo sapien
tgagaagcactgattagttagaatg

SEQ ID NO: 4539948 - DNA, 25 bp, Homo sapien
cttagaaatattggggcggaagact

SEQ ID NO: 4539949 - DNA, 25 bp, Homo sapien
tgcttgtcctgtttggctgaggtaa

SEQ ID NO: 4539950 - DNA, 25 bp, Homo sapien
ctgactgatggaaccacatgtgtcc

SEQ ID NO: 4539951 - DNA, 25 bp, Homo sapien
gctgaggtaactgctcaatgacctg

SEQ ID NO: 4539952 - DNA, 25 bp, Homo sapien
catgtgtccaagttagaagaatcca

SEQ ID NO: 4539953 - DNA, 25 bp, Homo sapien
ttctccagctgtttgttcaggattg

SEQ ID NO: 4539954 - DNA, 25 bp, Homo sapien
gttcattgaacccactattaccgtc

SEQ ID NO: 4539955 - DNA, 25 bp, Homo sapien
gtttgttcaggattggacacaacat

SEQ ID NO: 4539956 - DNA, 25 bp, Homo sapien
actattaccgtctcctcgttcttct

SEQ ID NO: 4539957 - DNA, 25 bp, Homo sapien
cttcaattatcaggcaaggagtatc

SEQ ID NO: 4539958 - DNA, 25 bp, Homo sapien
ccaactgacttccagtagggtccat

SEQ ID NO: 4539959 - DNA, 25 bp, Homo sapien
gaatcatcctctagaacctggcttt

SEQ ID NO: 4539960 - DNA, 25 bp, Homo sapien
ttaggaaggtgtcgagatagcatac

SEQ ID NO: 4539961 - DNA, 25 bp, Homo sapien
actcccatttctctccaaacagtac

SEQ ID NO: 4539962 - DNA, 25 bp, Homo sapien
gcactcccatttctctccaaacagt

SEQ ID NO: 4539963 - DNA, 25 bp, Homo sapien
tgcactcccatttctctccaaacag

SEQ ID NO: 4539964 - DNA, 25 bp, Homo sapien
cactcccatttctctccaaacagta

SEQ ID NO: 4539965 - DNA, 25 bp, Homo sapien
agatcgatccctaggtcgccgctgt

SEQ ID NO: 4539966 - DNA, 25 bp, Homo sapien
agaggtctctgcacgctccccaagt

SEQ ID NO: 4539967 - DNA, 25 bp, Homo sapien
cgggaggtccctcgcgctcgagcta

SEQ ID NO: 4539968 - DNA, 25 bp, Homo sapien
aagtccctccagatcgatccctagg

SEQ ID NO: 4539969 - DNA, 25 bp, Homo sapien
cggcggcgcgtttccatggcagcat

SEQ ID NO: 4539970 - DNA, 25 bp, Homo sapien
aatcccgtggatgataggtagctgc

SEQ ID NO: 4539971 - DNA, 25 bp, Homo sapien
tatcggatcgtccattcgctgccgc

SEQ ID NO: 4539972 - DNA, 25 bp, Homo sapien
cgtcacgtcacacaatatcggatcg

SEQ ID NO: 4539973 - DNA, 25 bp, Homo sapien
gctgggtcataggatgtgtgctcct

SEQ ID NO: 4539974 - DNA, 25 bp, Homo sapien
gggcaatacagggaggccttatctc

SEQ ID NO: 4539975 - DNA, 25 bp, Homo sapien
acaacatattagtttcaggtgctcc

SEQ ID NO: 4539976 - DNA, 25 bp, Homo sapien
tttttgaaaatgactgtaggccacc

SEQ ID NO: 4539977 - DNA, 25 bp, Homo sapien
tgtagagtttgatgagttcaataaa

SEQ ID NO: 4539978 - DNA, 25 bp, Homo sapien
agtgtagagtttgatgagttcaata

SEQ ID NO: 4539979 - DNA, 25 bp, Homo sapien
gtgtagagtttgatgagttcaataa

SEQ ID NO: 4539980 - DNA, 25 bp, Homo sapien
tccaatactgcgcagccttccagag

SEQ ID NO: 4539981 - DNA, 25 bp, Homo sapien
gcaacgatacaaactcggaggcaga

SEQ ID NO: 4539982 - DNA, 25 bp, Homo sapien
cacagacacagatggaggcaacgat

SEQ ID NO: 4539983 - DNA, 25 bp, Homo sapien
acagggaaaccgaggatggagacct

SEQ ID NO: 4539984 - DNA, 25 bp, Homo sapien
taattcataactaatattctaagac

SEQ ID NO: 4539985 - DNA, 25 bp, Homo sapien
tggatacctataggaaatagaaggg

SEQ ID NO: 4539986 - DNA, 25 bp, Homo sapien
tttactattggatacctataggaaa

SEQ ID NO: 4539987 - DNA, 25 bp, Homo sapien
tagaagggggcttataattcataac

SEQ ID NO: 4539988 - DNA, 25 bp, Homo sapien
tagaccttactcagcagtatccaag

SEQ ID NO: 4539989 - DNA, 25 bp, Homo sapien
ggataccttctctttcgtctaagcc

SEQ ID NO: 4539990 - DNA, 25 bp, Homo sapien
ggatgagccagttcctagaccttac

SEQ ID NO: 4539991 - DNA, 25 bp, Homo sapien
ggtggcagggcctaaggataccttc

SEQ ID NO: 4539992 - DNA, 25 bp, Homo sapien
gacacaggactaggagataagccat

SEQ ID NO: 4539993 - DNA, 25 bp, Homo sapien
gaaagataccaaacctgagctcaag

SEQ ID NO: 4539994 - DNA, 25 bp, Homo sapien
gagaaagagcttgtcccagaggtcc

SEQ ID NO: 4539995 - DNA, 25 bp, Homo sapien
tagacaggagccgtgctatccgtgg

SEQ ID NO: 4539996 - DNA, 25 bp, Homo sapien
gtcaacattgatgaggggcttacag

SEQ ID NO: 4539997 - DNA, 25 bp, Homo sapien
tgaggagacagtcaagccagggcct

SEQ ID NO: 4539998 - DNA, 25 bp, Homo sapien
caggtgtgggcaaagaagatgctgc

SEQ ID NO: 4539999 - DNA, 25 bp, Homo sapien
gacactaagcgcacaccaggtgtgg

SEQ ID NO: 4540000 - DNA, 25 bp, Homo sapien
cgacccagtctggacttccctgctt

SEQ ID NO: 4540001 - DNA, 25 bp, Homo sapien
gatgaatacctggaagtgaccaagg

SEQ ID NO: 4540002 - DNA, 25 bp, Homo sapien
tcggcaccctgtggctcccttgcct

SEQ ID NO: 4540003 - DNA, 25 bp, Homo sapien
accagaacccggcatgatgaatacc

SEQ ID NO: 4540004 - DNA, 25 bp, Homo sapien
gataccgtcagtgaggtgcccagag

SEQ ID NO: 4540005 - DNA, 25 bp, Homo sapien
gatgggtctcagagagcaacctcct

SEQ ID NO: 4540006 - DNA, 25 bp, Homo sapien
atctatttatttggcatcctgggag

SEQ ID NO: 4540007 - DNA, 25 bp, Homo sapien
ccctcgtagagggagattatatccc

SEQ ID NO: 4540008 - DNA, 25 bp, Homo sapien
cagtctgtccctggcacaactacag

SEQ ID NO: 4540009 - DNA, 25 bp, Homo sapien
gccctcagacacaatgatataagga

SEQ ID NO: 4540010 - DNA, 25 bp, Homo sapien
tgagcactcataatgttccagcccc

SEQ ID NO: 4540011 - DNA, 25 bp, Homo sapien
tccaatgaccgcattacccctccta

SEQ ID NO: 4540012 - DNA, 25 bp, Homo sapien
gacatttcagatagccatcccgggc

SEQ ID NO: 4540013 - DNA, 25 bp, Homo sapien
gagctattgcccagaggaacaggac

SEQ ID NO: 4540014 - DNA, 25 bp, Homo sapien
gagtgctggcaaagacaagagtccc

SEQ ID NO: 4540015 - DNA, 25 bp, Homo sapien
gaatgcacatatggtctaagcgtac

SEQ ID NO: 4540016 - DNA, 25 bp, Homo sapien
gggatggtttatcaatctcagggat

SEQ ID NO: 4540017 - DNA, 25 bp, Homo sapien
tgccctgagataacagattgatcgc

SEQ ID NO: 4540018 - DNA, 25 bp, Homo sapien
tgatcgcagaagtctcctgggccag

SEQ ID NO: 4540019 - DNA, 25 bp, Homo sapien
cagggaactcttgggatggtttatc

SEQ ID NO: 4540020 - DNA, 25 bp, Homo sapien
ggctgacctcctcgtatggctggct

SEQ ID NO: 4540021 - DNA, 25 bp, Homo sapien
gaacttatggaccagcttgccaacc

SEQ ID NO: 4540022 - DNA, 25 bp, Homo sapien
tcggagttctccagacatagctggc

SEQ ID NO: 4540023 - DNA, 25 bp, Homo sapien
ttctgacatggctggctgagcgcct

SEQ ID NO: 4540024 - DNA, 25 bp, Homo sapien
tcttcagccacgtgtgaatttaggg

SEQ ID NO: 4540025 - DNA, 25 bp, Homo sapien
gctcttgtgctccactcccaggggt

SEQ ID NO: 4540026 - DNA, 25 bp, Homo sapien
tggttcaaaaagctcttgctcccct

SEQ ID NO: 4540027 - DNA, 25 bp, Homo sapien
tgtgaatttagggagggttgatcac

SEQ ID NO: 4540028 - DNA, 25 bp, Homo sapien
cacagtgctagaagggccactgctg

SEQ ID NO: 4540029 - DNA, 25 bp, Homo sapien
aagccaaattgggagttaccatcta

SEQ ID NO: 4540030 - DNA, 25 bp, Homo sapien
taccatctactgtagtaggggaaga

SEQ ID NO: 4540031 - DNA, 25 bp, Homo sapien
aagaaggaccagcactggacacagt

SEQ ID NO: 4540032 - DNA, 25 bp, Homo sapien
cttgaggtcaggagctctaaaccag

SEQ ID NO: 4540033 - DNA, 25 bp, Homo sapien
acttgaggtcaggagctctaaacca

SEQ ID NO: 4540034 - DNA, 25 bp, Homo sapien
ccaacatggcaaaaccttgtctcta

SEQ ID NO: 4540035 - DNA, 25 bp, Homo sapien
cctggccaacatggcaaaaccttgt

SEQ ID NO: 4540036 - DNA, 25 bp, Homo sapien
tcagagcgctgctggagttgcaggg

SEQ ID NO: 4540037 - DNA, 25 bp, Homo sapien
ggctgctgtgcatggaatcaaagag

SEQ ID NO: 4540038 - DNA, 25 bp, Homo sapien
aatgaagagtacgtggtggagaaaa

SEQ ID NO: 4540039 - DNA, 25 bp, Homo sapien
aaaatgggttatctgaggcctggct

SEQ ID NO: 4540040 - DNA, 25 bp, Homo sapien
taaactactgaataaggattacaat

SEQ ID NO: 4540041 - DNA, 25 bp, Homo sapien
tacccatgtggttatgttactattt

SEQ ID NO: 4540042 - DNA, 25 bp, Homo sapien
tatcactgtagtatcaatatcacta

SEQ ID NO: 4540043 - DNA, 25 bp, Homo sapien
tgatatacagttagggtcatttctt

SEQ ID NO: 4540044 - DNA, 25 bp, Homo sapien
agtcttgaccttccaggttcaggtg

SEQ ID NO: 4540045 - DNA, 25 bp, Homo sapien
ttgaacttgtgagcttaagcaatct

SEQ ID NO: 4540046 - DNA, 25 bp, Homo sapien
tgcagtcttgaccttccaggttcag

SEQ ID NO: 4540047 - DNA, 25 bp, Homo sapien
tgaacttgtgagcttaagcaatctg

SEQ ID NO: 4540048 - DNA, 25 bp, Homo sapien
aattatttgtagaccccgggtgcag

SEQ ID NO: 4540049 - DNA, 25 bp, Homo sapien
tatttgtagaccccgggtgcagtgg

SEQ ID NO: 4540050 - DNA, 25 bp, Homo sapien
ctaggaataagaggcacatgcgacc

SEQ ID NO: 4540051 - DNA, 25 bp, Homo sapien
taggaataagaggcacatgcgacca

SEQ ID NO: 4540052 - DNA, 25 bp, Homo sapien
tctcccttccaggcataagctctcc

SEQ ID NO: 4540053 - DNA, 25 bp, Homo sapien
ctcccttccaggcataagctctcct

SEQ ID NO: 4540054 - DNA, 25 bp, Homo sapien
caggagtgatatttctatgatgttt

SEQ ID NO: 4540055 - DNA, 25 bp, Homo sapien
tagttggcctatgcaattatccttt

SEQ ID NO: 4540056 - DNA, 25 bp, Homo sapien
tatttctatgatgtttagttggcct

SEQ ID NO: 4540057 - DNA, 25 bp, Homo sapien
ctatgatgtttagttggcctatgca

SEQ ID NO: 4540058 - DNA, 25 bp, Homo sapien
gtgtggcgctggcagactctactca

SEQ ID NO: 4540059 - DNA, 25 bp, Homo sapien
ggcgctggcagactctactcaagaa

SEQ ID NO: 4540060 - DNA, 25 bp, Homo sapien
cctgggcatcagtgtggcgctggca

SEQ ID NO: 4540061 - DNA, 25 bp, Homo sapien
cagactctactcaagaattcactca

SEQ ID NO: 4540062 - DNA, 25 bp, Homo sapien
ttgacgtagggaaagggcattatgc

SEQ ID NO: 4540063 - DNA, 25 bp, Homo sapien
cagtgtttccagagggtagatggta

SEQ ID NO: 4540064 - DNA, 25 bp, Homo sapien
gatggtaggcaccatggaacaccct

SEQ ID NO: 4540065 - DNA, 25 bp, Homo sapien
gtagatggtaggcaccatggaacac

SEQ ID NO: 4540066 - DNA, 25 bp, Homo sapien
ttttggagtgttgggtatccaagac

SEQ ID NO: 4540067 - DNA, 25 bp, Homo sapien
ccatcaggagagtccgtggcttttg

SEQ ID NO: 4540068 - DNA, 25 bp, Homo sapien
tataccccaactggccaaggaagca

SEQ ID NO: 4540069 - DNA, 25 bp, Homo sapien
tgggcaaagtcaatgttactcctgc

SEQ ID NO: 4540070 - DNA, 25 bp, Homo sapien
caatacacatgaagctcagcccagg

SEQ ID NO: 4540071 - DNA, 25 bp, Homo sapien
cctaatactagggactggtgatgga

SEQ ID NO: 4540072 - DNA, 25 bp, Homo sapien
aaatttaggatgtcggcagaaaggc

SEQ ID NO: 4540073 - DNA, 25 bp, Homo sapien
tctgggtagggtcaaggataaacat

SEQ ID NO: 4540074 - DNA, 25 bp, Homo sapien
gactaaggatacacgggacaacgaa

SEQ ID NO: 4540075 - DNA, 25 bp, Homo sapien
aaggatacacgggacaacgaagtct

SEQ ID NO: 4540076 - DNA, 25 bp, Homo sapien
ggactaaggatacacgggacaacga

SEQ ID NO: 4540077 - DNA, 25 bp, Homo sapien
tacacgggacaacgaagtctatgca

SEQ ID NO: 4540078 - DNA, 25 bp, Homo sapien
tcagacccagccagggtagtggcag

SEQ ID NO: 4540079 - DNA, 25 bp, Homo sapien
ccagggtagtggcagcagccagttt

SEQ ID NO: 4540080 - DNA, 25 bp, Homo sapien
agcagccagtttggtggcagggggt

SEQ ID NO: 4540081 - DNA, 25 bp, Homo sapien
cagccagtttggtggcagggggtac

SEQ ID NO: 4540082 - DNA, 25 bp, Homo sapien
cagcgtggcatccaaggagactggc

SEQ ID NO: 4540083 - DNA, 25 bp, Homo sapien
tcagaggaaaaactgcgcagcaacc

SEQ ID NO: 4540084 - DNA, 25 bp, Homo sapien
tcatcctggcctgagcgcagccagt

SEQ ID NO: 4540085 - DNA, 25 bp, Homo sapien
cggaccacagggtgctggtcatcca

SEQ ID NO: 4540086 - DNA, 25 bp, Homo sapien
tcggatgctttgcaaacgacacaga

SEQ ID NO: 4540087 - DNA, 25 bp, Homo sapien
tagtcggatgctttgcaaacgacac

SEQ ID NO: 4540088 - DNA, 25 bp, Homo sapien
cgttagtcggatgctttgcaaacga

SEQ ID NO: 4540089 - DNA, 25 bp, Homo sapien
gatgctttgcaaacgacacagaaaa

SEQ ID NO: 4540090 - DNA, 25 bp, Homo sapien
agccacccagcactgtggtgctgaa

SEQ ID NO: 4540091 - DNA, 25 bp, Homo sapien
gcaggtggtagctttttgccatggc

SEQ ID NO: 4540092 - DNA, 25 bp, Homo sapien
ctgcgggcgtagtcctgaagattcg

SEQ ID NO: 4540093 - DNA, 25 bp, Homo sapien
catctcggtgcttcagactggcagg

SEQ ID NO: 4540094 - DNA, 25 bp, Homo sapien
acagccccctgcctcattgaatttt

SEQ ID NO: 4540095 - DNA, 25 bp, Homo sapien
tttttaagctagaagggactcatag

SEQ ID NO: 4540096 - DNA, 25 bp, Homo sapien
agaaactgagatccaaaagggacct

SEQ ID NO: 4540097 - DNA, 25 bp, Homo sapien
ctagaagggactcatagatcatcca

SEQ ID NO: 4540098 - DNA, 25 bp, Homo sapien
caggcctcgaggatgaagtctcaga

SEQ ID NO: 4540099 - DNA, 25 bp, Homo sapien
cggtagccaccaggcctcgaggatg

SEQ ID NO: 4540100 - DNA, 25 bp, Homo sapien
gccgtgaagatgaaaagagccggta

SEQ ID NO: 4540101 - DNA, 25 bp, Homo sapien
aagatgaaaagagccggtagccacc

SEQ ID NO: 4540102 - DNA, 25 bp, Homo sapien
aaggcaaagacagaaggcaagacag

SEQ ID NO: 4540103 - DNA, 25 bp, Homo sapien
acccagatagtgtctgagcccctag

SEQ ID NO: 4540104 - DNA, 25 bp, Homo sapien
gatagtgtctgagcccctagatccc

SEQ ID NO: 4540105 - DNA, 25 bp, Homo sapien
cccacaagggcccaatcacacaacc

SEQ ID NO: 4540106 - DNA, 25 bp, Homo sapien
taggccaatggctagggaaggctgg

SEQ ID NO: 4540107 - DNA, 25 bp, Homo sapien
aggatgccaggtgagtggtggacac

SEQ ID NO: 4540108 - DNA, 25 bp, Homo sapien
ccaggtgagtggtggacacagcccg

SEQ ID NO: 4540109 - DNA, 25 bp, Homo sapien
gggctgtaggccaatggctagggaa

SEQ ID NO: 4540110 - DNA, 25 bp, Homo sapien
aggtccaggttccccgtgcactgca

SEQ ID NO: 4540111 - DNA, 25 bp, Homo sapien
tcctgcagcgccgtccccgcaaggg

SEQ ID NO: 4540112 - DNA, 25 bp, Homo sapien
tgcagcgccgtccccgcaaggggat

SEQ ID NO: 4540113 - DNA, 25 bp, Homo sapien
ctcctgcagcgccgtccccgcaagg

SEQ ID NO: 4540114 - DNA, 25 bp, Homo sapien
atcagaccgggtggaaagccggtca

SEQ ID NO: 4540115 - DNA, 25 bp, Homo sapien
tcagaccgggtggaaagccggtcac

SEQ ID NO: 4540116 - DNA, 25 bp, Homo sapien
ctgcaatcagaccgggtggaaagcc

SEQ ID NO: 4540117 - DNA, 25 bp, Homo sapien
caatcagaccgggtggaaagccggt

SEQ ID NO: 4540118 - DNA, 25 bp, Homo sapien
ccccaaggggatctagtggatctgt

SEQ ID NO: 4540119 - DNA, 25 bp, Homo sapien
gatatagtcctatgagcactgccac

SEQ ID NO: 4540120 - DNA, 25 bp, Homo sapien
taaaacatatcaatcagagcaggag

SEQ ID NO: 4540121 - DNA, 25 bp, Homo sapien
taaagaagcactactgggagaccag

SEQ ID NO: 4540122 - DNA, 25 bp, Homo sapien
tcggttacgaatgaggggtgatctc

SEQ ID NO: 4540123 - DNA, 25 bp, Homo sapien
gaaccagcttttcggttacgaatga

SEQ ID NO: 4540124 - DNA, 25 bp, Homo sapien
ggttacgaatgaggggtgatctcct

SEQ ID NO: 4540125 - DNA, 25 bp, Homo sapien
ccagcttttcggttacgaatgaggg

SEQ ID NO: 4540126 - DNA, 25 bp, Homo sapien
acaggttctccatactgccttggtt

SEQ ID NO: 4540127 - DNA, 25 bp, Homo sapien
gttctccatactgccttggttggtt

SEQ ID NO: 4540128 - DNA, 25 bp, Homo sapien
ctggacacaggttctccatactgcc

SEQ ID NO: 4540129 - DNA, 25 bp, Homo sapien
actgccttggttggttttcatctcc

SEQ ID NO: 4540130 - DNA, 25 bp, Homo sapien
tggaaccgttcctctgataagggat

SEQ ID NO: 4540131 - DNA, 25 bp, Homo sapien
ctcagaagaggctggacggaatcca

SEQ ID NO: 4540132 - DNA, 25 bp, Homo sapien
acacctttcactccggggctgaagt

SEQ ID NO: 4540133 - DNA, 25 bp, Homo sapien
gctgaagtgtagctccacatggaac

SEQ ID NO: 4540134 - DNA, 25 bp, Homo sapien
aatctgggtcatgtagttaagctct

SEQ ID NO: 4540135 - DNA, 25 bp, Homo sapien
tcatgtagttaagctctgagatggc

SEQ ID NO: 4540136 - DNA, 25 bp, Homo sapien
agttaagctctgagatggcactaag

SEQ ID NO: 4540137 - DNA, 25 bp, Homo sapien
ctgtgtgttgtcctcataaagcatg

SEQ ID NO: 4540138 - DNA, 25 bp, Homo sapien
gaagtcctccataacggaagacact

SEQ ID NO: 4540139 - DNA, 25 bp, Homo sapien
atcaagaagtcctccataacggaag

SEQ ID NO: 4540140 - DNA, 25 bp, Homo sapien
tcctccataacggaagacactgagc

SEQ ID NO: 4540141 - DNA, 25 bp, Homo sapien
aagaagtcctccataacggaagaca

SEQ ID NO: 4540142 - DNA, 25 bp, Homo sapien
agacgcgttcgaacgtggcgacctg

SEQ ID NO: 4540143 - DNA, 25 bp, Homo sapien
tagagacgcgttcgaacgtggcgac

SEQ ID NO: 4540144 - DNA, 25 bp, Homo sapien
aaatagagacgcgttcgaacgtggc

SEQ ID NO: 4540145 - DNA, 25 bp, Homo sapien
ctggtgaaatagagacgcgttcgaa

SEQ ID NO: 4540146 - DNA, 25 bp, Homo sapien
actcacacagtcagttaaccctgtt

SEQ ID NO: 4540147 - DNA, 25 bp, Homo sapien
tcacacagtcagttaaccctgttcc

SEQ ID NO: 4540148 - DNA, 25 bp, Homo sapien
catcccaaaatcttgtctattcttg

SEQ ID NO: 4540149 - DNA, 25 bp, Homo sapien
ctttccatcccaaaatcttgtctat

SEQ ID NO: 4540150 - DNA, 25 bp, Homo sapien
aagtagtatcttccgcaacagtgga

SEQ ID NO: 4540151 - DNA, 25 bp, Homo sapien
tctgcaggtcaagtagtatcttccg

SEQ ID NO: 4540152 - DNA, 25 bp, Homo sapien
ggtcaagtagtatcttccgcaacag

SEQ ID NO: 4540153 - DNA, 25 bp, Homo sapien
ggttctctgcaggtcaagtagtatc

SEQ ID NO: 4540154 - DNA, 25 bp, Homo sapien
tcagccagtgccttagagagacgga

SEQ ID NO: 4540155 - DNA, 25 bp, Homo sapien
gatcttactgatatcatagcgccca

SEQ ID NO: 4540156 - DNA, 25 bp, Homo sapien
tccaacgctgtagcattagctctag

SEQ ID NO: 4540157 - DNA, 25 bp, Homo sapien
tgtcgaaagtcacgctccagcttgc

SEQ ID NO: 4540158 - DNA, 25 bp, Homo sapien
caggaatcagataagaatcaaagat

SEQ ID NO: 4540159 - DNA, 25 bp, Homo sapien
ggcaggaatcagataagaatcaaag

SEQ ID NO: 4540160 - DNA, 25 bp, Homo sapien
aaggcaggaatcagataagaatcaa

SEQ ID NO: 4540161 - DNA, 25 bp, Homo sapien
gaaaggcaggaatcagataagaatc

SEQ ID NO: 4540162 - DNA, 25 bp, Homo sapien
agggaagatagtagtattcataccc

SEQ ID NO: 4540163 - DNA, 25 bp, Homo sapien
ggaagatagtagtattcatacccac

SEQ ID NO: 4540164 - DNA, 25 bp, Homo sapien
gggaagatagtagtattcataccca

SEQ ID NO: 4540165 - DNA, 25 bp, Homo sapien
gggcaaatacctgatcacagacctt

SEQ ID NO: 4540166 - DNA, 25 bp, Homo sapien
ctggatgatagtcatggagttgagc

SEQ ID NO: 4540167 - DNA, 25 bp, Homo sapien
agttgagcagggaagtacttctggt

SEQ ID NO: 4540168 - DNA, 25 bp, Homo sapien
tcctgcattcgttcccggatctggt

SEQ ID NO: 4540169 - DNA, 25 bp, Homo sapien
gacaggctcggcactaattgcccag

SEQ ID NO: 4540170 - DNA, 25 bp, Homo sapien
gagcattcttaggttactgggcata

SEQ ID NO: 4540171 - DNA, 25 bp, Homo sapien
cagctctgtatgttggttcactcca

SEQ ID NO: 4540172 - DNA, 25 bp, Homo sapien
gccttcaggtaagggcactgctcta

SEQ ID NO: 4540173 - DNA, 25 bp, Homo sapien
gcaatgtgcttagctacttaactca

SEQ ID NO: 4540174 - DNA, 25 bp, Homo sapien
tgcaggaaaaagaacgaccatattg

SEQ ID NO: 4540175 - DNA, 25 bp, Homo sapien
cactgcctggtcatttgtggcctag

SEQ ID NO: 4540176 - DNA, 25 bp, Homo sapien
tcctatgggctcacagcaatgtgct

SEQ ID NO: 4540177 - DNA, 25 bp, Homo sapien
gtatataatacctccatcagggccc

SEQ ID NO: 4540178 - DNA, 25 bp, Homo sapien
aattatgcataagagattgtggacc

SEQ ID NO: 4540179 - DNA, 25 bp, Homo sapien
gtggacctgtacttatctcaaaggg

SEQ ID NO: 4540180 - DNA, 25 bp, Homo sapien
cagttcgtgtcaggtttagctgcca

SEQ ID NO: 4540181 - DNA, 25 bp, Homo sapien
tgtagaatatggtgcagccgagcct

SEQ ID NO: 4540182 - DNA, 25 bp, Homo sapien
gcaccaaaatgggtgtcagctcccc

SEQ ID NO: 4540183 - DNA, 25 bp, Homo sapien
gctgctcaaggaatccccatcgctg

SEQ ID NO: 4540184 - DNA, 25 bp, Homo sapien
gccaaagggcgcatcctgctgtaga

SEQ ID NO: 4540185 - DNA, 25 bp, Homo sapien
tcttgagatcgtggcggaaagtgct

SEQ ID NO: 4540186 - DNA, 25 bp, Homo sapien
atctgaacacgaccctcatcagagg

SEQ ID NO: 4540187 - DNA, 25 bp, Homo sapien
tatggagacgaagcagcccacaacc

SEQ ID NO: 4540188 - DNA, 25 bp, Homo sapien
aggcagcagcagtcatctgaacacg

SEQ ID NO: 4540189 - DNA, 25 bp, Homo sapien
acatgcagcgaaaagctcgccccag

SEQ ID NO: 4540190 - DNA, 25 bp, Homo sapien
ccagggtacatgcagcgaaaagctc

SEQ ID NO: 4540191 - DNA, 25 bp, Homo sapien
ggtacatgcagcgaaaagctcgccc

SEQ ID NO: 4540192 - DNA, 25 bp, Homo sapien
gttctccaccccacttcagtaccag

SEQ ID NO: 4540193 - DNA, 25 bp, Homo sapien
cttgcccctcattagaagcttttac

SEQ ID NO: 4540194 - DNA, 25 bp, Homo sapien
cggtttatacctgagaagtgaccat

SEQ ID NO: 4540195 - DNA, 25 bp, Homo sapien
tagaagcttttactccatgagggta

SEQ ID NO: 4540196 - DNA, 25 bp, Homo sapien
catgagggtagtaagtcaattgtac

SEQ ID NO: 4540197 - DNA, 25 bp, Homo sapien
gctgctctagttttccagtcttctc

SEQ ID NO: 4540198 - DNA, 25 bp, Homo sapien
tccagtcttctcctcgatctcacca

SEQ ID NO: 4540199 - DNA, 25 bp, Homo sapien
cttcagctgctctagttttccagtc

SEQ ID NO: 4540200 - DNA, 25 bp, Homo sapien
agtcttctcctcgatctcaccacct

SEQ ID NO: 4540201 - DNA, 25 bp, Homo sapien
tttccctgtcttgtagccaccatgt

SEQ ID NO: 4540202 - DNA, 25 bp, Homo sapien
tgcaatgacacaacgaagttccatc

SEQ ID NO: 4540203 - DNA, 25 bp, Homo sapien
gaataattgcaatgacacaacgaag

SEQ ID NO: 4540204 - DNA, 25 bp, Homo sapien
tacgatccccatgacgaataattgc

SEQ ID NO: 4540205 - DNA, 25 bp, Homo sapien
tcatcttctgcttgggagtacgatc

SEQ ID NO: 4540206 - DNA, 25 bp, Homo sapien
gccagatgtggtgggaacaatggga

SEQ ID NO: 4540207 - DNA, 25 bp, Homo sapien
ggcaagctcccgcattatggtgttc

SEQ ID NO: 4540208 - DNA, 25 bp, Homo sapien
gggaacaatgggaatgtcctcagcc

SEQ ID NO: 4540209 - DNA, 25 bp, Homo sapien
tccgtggggatggaccatggaatct

SEQ ID NO: 4540210 - DNA, 25 bp, Homo sapien
tagtatttcatcgagttcttgacaa

SEQ ID NO: 4540211 - DNA, 25 bp, Homo sapien
gaaggtcaaatccacaaactgtttg

SEQ ID NO: 4540212 - DNA, 25 bp, Homo sapien
ccagaatcttggcacagtcatcgta

SEQ ID NO: 4540213 - DNA, 25 bp, Homo sapien
aaaggaatgaccattggcacgaaga

SEQ ID NO: 4540214 - DNA, 25 bp, Homo sapien
tctttcccctcactgtctcgttcaa

SEQ ID NO: 4540215 - DNA, 25 bp, Homo sapien
cttcccatccaaagctggagatttt

SEQ ID NO: 4540216 - DNA, 25 bp, Homo sapien
ttcctggccaccagcttttccatgg

SEQ ID NO: 4540217 - DNA, 25 bp, Homo sapien
aaagctacgcagactttcctggcca

SEQ ID NO: 4540218 - DNA, 25 bp, Homo sapien
cattatgaatttctcctcgggactc

SEQ ID NO: 4540219 - DNA, 25 bp, Homo sapien
tactgtcaggtagtccttattaaaa

SEQ ID NO: 4540220 - DNA, 25 bp, Homo sapien
tgtatcctccactcattatcttcac

SEQ ID NO: 4540221 - DNA, 25 bp, Homo sapien
cccttgctctgatagtgaaaatgtg

SEQ ID NO: 4540222 - DNA, 25 bp, Homo sapien
tgaatatgaaagccaatcacattca

SEQ ID NO: 4540223 - DNA, 25 bp, Homo sapien
caatcacattcacatcatgttattt

SEQ ID NO: 4540224 - DNA, 25 bp, Homo sapien
cccatatacttccacctgcttccca

SEQ ID NO: 4540225 - DNA, 25 bp, Homo sapien
catttgtaacctcttaaatccctat

SEQ ID NO: 4540226 - DNA, 25 bp, Homo sapien
ccgtctttcggacgctgctctcagg

SEQ ID NO: 4540227 - DNA, 25 bp, Homo sapien
aactcctcatagatgtacgaccccg

SEQ ID NO: 4540228 - DNA, 25 bp, Homo sapien
atagatgtacgaccccgtctttcgg

SEQ ID NO: 4540229 - DNA, 25 bp, Homo sapien
tcctcatagatgtacgaccccgtct

SEQ ID NO: 4540230 - DNA, 25 bp, Homo sapien
ggtcttcaccttctatcaggttgca

SEQ ID NO: 4540231 - DNA, 25 bp, Homo sapien
aaagggcttgggaaagacagctcca

SEQ ID NO: 4540232 - DNA, 25 bp, Homo sapien
ttacgaaagagacgctggcttcctc

SEQ ID NO: 4540233 - DNA, 25 bp, Homo sapien
ggtagtagatgtaaacattgtggtc

SEQ ID NO: 4540234 - DNA, 25 bp, Homo sapien
ggttgagcacagcatatcgaggcag

SEQ ID NO: 4540235 - DNA, 25 bp, Homo sapien
ccgggcaggatcacggttgagcaca

SEQ ID NO: 4540236 - DNA, 25 bp, Homo sapien
agatcaataccctcttcctgcagga

SEQ ID NO: 4540237 - DNA, 25 bp, Homo sapien
tcttcctgcaggatccggtacacct

SEQ ID NO: 4540238 - DNA, 25 bp, Homo sapien
gttggtttgactctgcccctctcac

SEQ ID NO: 4540239 - DNA, 25 bp, Homo sapien
atgttggtttgactctgcccctctc

SEQ ID NO: 4540240 - DNA, 25 bp, Homo sapien
tgttggtttgactctgcccctctca

SEQ ID NO: 4540241 - DNA, 25 bp, Homo sapien
tgggttccccgaacacgcatgatcc

SEQ ID NO: 4540242 - DNA, 25 bp, Homo sapien
gaacacgcatgatcccaaagccacc

SEQ ID NO: 4540243 - DNA, 25 bp, Homo sapien
ccgaacacgcatgatcccaaagcca

SEQ ID NO: 4540244 - DNA, 25 bp, Homo sapien
agtgggttccccgaacacgcatgat

SEQ ID NO: 4540245 - DNA, 25 bp, Homo sapien
cttggagtaagcaacagctttgtcc

SEQ ID NO: 4540246 - DNA, 25 bp, Homo sapien
aagcttggagtaagcaacagctttg

SEQ ID NO: 4540247 - DNA, 25 bp, Homo sapien
tggccagatcattgataagaaaggg

SEQ ID NO: 4540248 - DNA, 25 bp, Homo sapien
tatcttggatgtaatactgcatggc

SEQ ID NO: 4540249 - DNA, 25 bp, Homo sapien
tgtgtcacaagtagctgacggctct

SEQ ID NO: 4540250 - DNA, 25 bp, Homo sapien
tcacaagtagctgacggctctttac

SEQ ID NO: 4540251 - DNA, 25 bp, Homo sapien
cattctctagtgtgtcacaagtagc

SEQ ID NO: 4540252 - DNA, 25 bp, Homo sapien
tagtgtgtcacaagtagctgacggc

SEQ ID NO: 4540253 - DNA, 25 bp, Homo sapien
accagtattcccaccaccattccct

SEQ ID NO: 4540254 - DNA, 25 bp, Homo sapien
tcatttcccgaaccagtattcccac

SEQ ID NO: 4540255 - DNA, 25 bp, Homo sapien
ctcatttcccgaaccagtattccca

SEQ ID NO: 4540256 - DNA, 25 bp, Homo sapien
tcccgaaccagtattcccaccacca

SEQ ID NO: 4540257 - DNA, 25 bp, Homo sapien
tctgcagagtcgctctaggatttga

SEQ ID NO: 4540258 - DNA, 25 bp, Homo sapien
tgacaacagtcaggtagtcaaatct

SEQ ID NO: 4540259 - DNA, 25 bp, Homo sapien
tcaggtagtcaaatctgcagagtcg

SEQ ID NO: 4540260 - DNA, 25 bp, Homo sapien
tcaaatctgcagagtcgctctagga

SEQ ID NO: 4540261 - DNA, 25 bp, Homo sapien
tggtcatggcacagatgccaacaat

SEQ ID NO: 4540262 - DNA, 25 bp, Homo sapien
cacagatgccaacaatgatctgagg

SEQ ID NO: 4540263 - DNA, 25 bp, Homo sapien
tggcacagatgccaacaatgatctg

SEQ ID NO: 4540264 - DNA, 25 bp, Homo sapien
catggcacagatgccaacaatgatc

SEQ ID NO: 4540265 - DNA, 25 bp, Homo sapien
tcctcaaggagctcgctgtcactct

SEQ ID NO: 4540266 - DNA, 25 bp, Homo sapien
aagaagtgggccgtggtactctcgc

SEQ ID NO: 4540267 - DNA, 25 bp, Homo sapien
cctcactggccgtcaatgaccacat

SEQ ID NO: 4540268 - DNA, 25 bp, Homo sapien
atgcctattccacgggtgcccagcc

SEQ ID NO: 4540269 - DNA, 25 bp, Homo sapien
tgccggaacacccactcatcccgct

SEQ ID NO: 4540270 - DNA, 25 bp, Homo sapien
cctgccggaacacccactcatcccg

SEQ ID NO: 4540271 - DNA, 25 bp, Homo sapien
ccctgccggaacacccactcatccc

SEQ ID NO: 4540272 - DNA, 25 bp, Homo sapien
ctgccggaacacccactcatcccgc

SEQ ID NO: 4540273 - DNA, 25 bp, Homo sapien
ggggatggagatgaaaagcataaga

SEQ ID NO: 4540274 - DNA, 25 bp, Homo sapien
gggatggagatgaaaagcataagag

SEQ ID NO: 4540275 - DNA, 25 bp, Homo sapien
aaaggcaggtcctcgaggaaggcta

SEQ ID NO: 4540276 - DNA, 25 bp, Homo sapien
tgggaaaggcaggtcctcgaggaag

SEQ ID NO: 4540277 - DNA, 25 bp, Homo sapien
ggcaggtcctcgaggaaggctactc

SEQ ID NO: 4540278 - DNA, 25 bp, Homo sapien
ggtcctcgaggaaggctactcttga

SEQ ID NO: 4540279 - DNA, 25 bp, Homo sapien
ccaaggtccctgtatagtttgagca

SEQ ID NO: 4540280 - DNA, 25 bp, Homo sapien
gagtccttcctcgttttccactgaa

SEQ ID NO: 4540281 - DNA, 25 bp, Homo sapien
tttatcttcgctctgaagccgggac

SEQ ID NO: 4540282 - DNA, 25 bp, Homo sapien
ggatttatttagatgcacctctggg

SEQ ID NO: 4540283 - DNA, 25 bp, Homo sapien
ccctcctcggtactctcctcgcaca

SEQ ID NO: 4540284 - DNA, 25 bp, Homo sapien
cccctcctcggtactctcctcgcac

SEQ ID NO: 4540285 - DNA, 25 bp, Homo sapien
cctcctcggtactctcctcgcacag

SEQ ID NO: 4540286 - DNA, 25 bp, Homo sapien
gcccccagccccagccactccccca

SEQ ID NO: 4540287 - DNA, 25 bp, Homo sapien
cccagccccagccactcccccaccg

SEQ ID NO: 4540288 - DNA, 25 bp, Homo sapien
cagccccagccactcccccaccgcc

SEQ ID NO: 4540289 - DNA, 25 bp, Homo sapien
ccagccccagccactcccccaccgc

SEQ ID NO: 4540290 - DNA, 25 bp, Homo sapien
cctccctccgctcgcgcagccgaac

SEQ ID NO: 4540291 - DNA, 25 bp, Homo sapien
cgcctccctccgctcgcgcagccga

SEQ ID NO: 4540292 - DNA, 25 bp, Homo sapien
ccgcctccctccgctcgcgcagccg

SEQ ID NO: 4540293 - DNA, 25 bp, Homo sapien
gcctccctccgctcgcgcagccgaa

SEQ ID NO: 4540294 - DNA, 25 bp, Homo sapien
tatgacttaagatttctctccccac

SEQ ID NO: 4540295 - DNA, 25 bp, Homo sapien
ggcagtgggattatttatgatggaa

SEQ ID NO: 4540296 - DNA, 25 bp, Homo sapien
caggaacactgattctcaggtgggt

SEQ ID NO: 4540297 - DNA, 25 bp, Homo sapien
gagactccagatatggcaacccagg

SEQ ID NO: 4540298 - DNA, 25 bp, Homo sapien
caggaaggtcgtgaccagtcctgga

SEQ ID NO: 4540299 - DNA, 25 bp, Homo sapien
ggaccaggaaggtcgtgaccagtcc

SEQ ID NO: 4540300 - DNA, 25 bp, Homo sapien
tggccaaggaagctgatagtcaata

SEQ ID NO: 4540301 - DNA, 25 bp, Homo sapien
gatagtcaataccagggaccaggaa

SEQ ID NO: 4540302 - DNA, 25 bp, Homo sapien
gggtcaggagatggaggatcaagct

SEQ ID NO: 4540303 - DNA, 25 bp, Homo sapien
aggagatggaggatcaagctgtgca

SEQ ID NO: 4540304 - DNA, 25 bp, Homo sapien
ctgggtcaggagatggaggatcaag

SEQ ID NO: 4540305 - DNA, 25 bp, Homo sapien
agatggaggatcaagctgtgcagct

SEQ ID NO: 4540306 - DNA, 25 bp, Homo sapien
tgttgggcccatgcaactgctcgtc

SEQ ID NO: 4540307 - DNA, 25 bp, Homo sapien
actgctcgtcgctgctcaggactca

SEQ ID NO: 4540308 - DNA, 25 bp, Homo sapien
gactagatagttggatgggactaaa

SEQ ID NO: 4540309 - DNA, 25 bp, Homo sapien
atagttggatgggactaaacaccac

SEQ ID NO: 4540310 - DNA, 25 bp, Homo sapien
ctggatctgtccccgcagcagtgct

SEQ ID NO: 4540311 - DNA, 25 bp, Homo sapien
aatggcaagaggagtaacgccctgg

SEQ ID NO: 4540312 - DNA, 25 bp, Homo sapien
caagaggagtaacgccctggatctg

SEQ ID NO: 4540313 - DNA, 25 bp, Homo sapien
tggcaagaggagtaacgccctggat

SEQ ID NO: 4540314 - DNA, 25 bp, Homo sapien
tgctatggtgccaatttcagtgaag

SEQ ID NO: 4540315 - DNA, 25 bp, Homo sapien
gtgaagatctcaggcccccagttac

SEQ ID NO: 4540316 - DNA, 25 bp, Homo sapien
ctgctatggtgccaatttcagtgaa

SEQ ID NO: 4540317 - DNA, 25 bp, Homo sapien
cagtgaagatctcaggcccccagtt

SEQ ID NO: 4540318 - DNA, 25 bp, Homo sapien
caccaccctcagccccttcacaaat

SEQ ID NO: 4540319 - DNA, 25 bp, Homo sapien
agcaccaccaccctcagccccttca

SEQ ID NO: 4540320 - DNA, 25 bp, Homo sapien
tcagcaccaccaccctcagcccctt

SEQ ID NO: 4540321 - DNA, 25 bp, Homo sapien
caccctcagccccttcacaaatgac

SEQ ID NO: 4540322 - DNA, 25 bp, Homo sapien
ggccgcagtccacagagagtataac

SEQ ID NO: 4540323 - DNA, 25 bp, Homo sapien
aggtggctcacatgccgaccactct

SEQ ID NO: 4540324 - DNA, 25 bp, Homo sapien
atgccgaccactctgccgtaggaaa

SEQ ID NO: 4540325 - DNA, 25 bp, Homo sapien
taacccagcgctgtcagatgaacga

SEQ ID NO: 4540326 - DNA, 25 bp, Homo sapien
ccgatctcctagacctattaagagc

SEQ ID NO: 4540327 - DNA, 25 bp, Homo sapien
cgatctcctagacctattaagagcc

SEQ ID NO: 4540328 - DNA, 25 bp, Homo sapien
gcccttagctgtataactctaggta

SEQ ID NO: 4540329 - DNA, 25 bp, Homo sapien
caggaacaatgtgagtggaaaagca

SEQ ID NO: 4540330 - DNA, 25 bp, Homo sapien
catactgctgggttttaagtcttgc

SEQ ID NO: 4540331 - DNA, 25 bp, Homo sapien
gaaaagcagtggattgggagtcata

SEQ ID NO: 4540332 - DNA, 25 bp, Homo sapien
tgggaatgtccctcgtacatctgca

SEQ ID NO: 4540333 - DNA, 25 bp, Homo sapien
tgctgggaatgtccctcgtacatct

SEQ ID NO: 4540334 - DNA, 25 bp, Homo sapien
gggaatgtccctcgtacatctgcac

SEQ ID NO: 4540335 - DNA, 25 bp, Homo sapien
ctgggaatgtccctcgtacatctgc

SEQ ID NO: 4540336 - DNA, 25 bp, Homo sapien
gcttttctagaagccgctccagggt

SEQ ID NO: 4540337 - DNA, 25 bp, Homo sapien
gcagctggtcgcaccacccctgcta

SEQ ID NO: 4540338 - DNA, 25 bp, Homo sapien
tgctaccagggctgctttcttggca

SEQ ID NO: 4540339 - DNA, 25 bp, Homo sapien
ccctacacagctgtccaactctgct

SEQ ID NO: 4540340 - DNA, 25 bp, Homo sapien
gggatcaaggaaattgcctcagtag

SEQ ID NO: 4540341 - DNA, 25 bp, Homo sapien
gagtgaatactaggcgtccagcttg

SEQ ID NO: 4540342 - DNA, 25 bp, Homo sapien
cagcttgctctacttcatcctggct

SEQ ID NO: 4540343 - DNA, 25 bp, Homo sapien
gaaattgcctcagtagacagagtga

SEQ ID NO: 4540344 - DNA, 25 bp, Homo sapien
aagaaaatcgggggctggggagctg

SEQ ID NO: 4540345 - DNA, 25 bp, Homo sapien
aaatcgggggctggggagctgaggg

SEQ ID NO: 4540346 - DNA, 25 bp, Homo sapien
atcgggggctggggagctgagggaa

SEQ ID NO: 4540347 - DNA, 25 bp, Homo sapien
gaaaatcgggggctggggagctgag

SEQ ID NO: 4540348 - DNA, 25 bp, Homo sapien
caatagcagccatcccagctctgtg

SEQ ID NO: 4540349 - DNA, 25 bp, Homo sapien
caagaacagactcctgcaatagcag

SEQ ID NO: 4540350 - DNA, 25 bp, Homo sapien
aatgtctctcctaggcagaagcctt

SEQ ID NO: 4540351 - DNA, 25 bp, Homo sapien
gcaaatgtctctcctaggcagaagc

SEQ ID NO: 4540352 - DNA, 25 bp, Homo sapien
tctcggactccaagaggtatggaca

SEQ ID NO: 4540353 - DNA, 25 bp, Homo sapien
cacttccttaagcaatgagcccaga

SEQ ID NO: 4540354 - DNA, 25 bp, Homo sapien
attatcaaggaacagaacccagagg

SEQ ID NO: 4540355 - DNA, 25 bp, Homo sapien
ccagataggagcaggcagaaagact

SEQ ID NO: 4540356 - DNA, 25 bp, Homo sapien
cagctccaccaccaacataatggat

SEQ ID NO: 4540357 - DNA, 25 bp, Homo sapien
taatggattcattggatagtctgtc

SEQ ID NO: 4540358 - DNA, 25 bp, Homo sapien
aggttttgtagtgccctctctgcca

SEQ ID NO: 4540359 - DNA, 25 bp, Homo sapien
tggatagtctgtccatcaactggat

SEQ ID NO: 4540360 - DNA, 25 bp, Homo sapien
tcagttctggccctacagttgtcca

SEQ ID NO: 4540361 - DNA, 25 bp, Homo sapien
gctatccagcccgttcagttctggc

SEQ ID NO: 4540362 - DNA, 25 bp, Homo sapien
aggagtagcttgctatccagcccgt

SEQ ID NO: 4540363 - DNA, 25 bp, Homo sapien
ggccctacagttgtccattctggtt

SEQ ID NO: 4540364 - DNA, 25 bp, Homo sapien
gtagctctgcccagatacaggccct

SEQ ID NO: 4540365 - DNA, 25 bp, Homo sapien
ctgtagctctgcccagatacaggcc

SEQ ID NO: 4540366 - DNA, 25 bp, Homo sapien
tgtagctctgcccagatacaggccc

SEQ ID NO: 4540367 - DNA, 25 bp, Homo sapien
aaggaagtctaccatggagttgatc

SEQ ID NO: 4540368 - DNA, 25 bp, Homo sapien
cctcgaactctagtgggcagctgat

SEQ ID NO: 4540369 - DNA, 25 bp, Homo sapien
gctgatagatcatgtgcaccacttc

SEQ ID NO: 4540370 - DNA, 25 bp, Homo sapien
ctccctcgaactctagtgggcagct

SEQ ID NO: 4540371 - DNA, 25 bp, Homo sapien
gttggtgggtacttgcatcttcttc

SEQ ID NO: 4540372 - DNA, 25 bp, Homo sapien
gaggttacagcgaactctgatcatg

SEQ ID NO: 4540373 - DNA, 25 bp, Homo sapien
ggtggtaaccacctgtcgtcctagc

SEQ ID NO: 4540374 - DNA, 25 bp, Homo sapien
taagctggccaaatagggctaaggg

SEQ ID NO: 4540375 - DNA, 25 bp, Homo sapien
taaaggatagtagggataagctggc

SEQ ID NO: 4540376 - DNA, 25 bp, Homo sapien
tgctgctcagaccagggcagctccc

SEQ ID NO: 4540377 - DNA, 25 bp, Homo sapien
cccagtagcgtcttcgatttgccag

SEQ ID NO: 4540378 - DNA, 25 bp, Homo sapien
tagcgtcttcgatttgccagaagag

SEQ ID NO: 4540379 - DNA, 25 bp, Homo sapien
gaagagccaaggaatccagttgtag

SEQ ID NO: 4540380 - DNA, 25 bp, Homo sapien
cagtctggccaggtggtgggaatag

SEQ ID NO: 4540381 - DNA, 25 bp, Homo sapien
gcagtctggccaggtggtgggaata

SEQ ID NO: 4540382 - DNA, 25 bp, Homo sapien
agtctggccaggtggtgggaatagg

SEQ ID NO: 4540383 - DNA, 25 bp, Homo sapien
taatgggcacagagctaaccagaac

SEQ ID NO: 4540384 - DNA, 25 bp, Homo sapien
tgtagcaataaacgcctaagagcct

SEQ ID NO: 4540385 - DNA, 25 bp, Homo sapien
caagtgttgctgctagttaggcacc

SEQ ID NO: 4540386 - DNA, 25 bp, Homo sapien
taggcaccaggcaaacaaagtccct

SEQ ID NO: 4540387 - DNA, 25 bp, Homo sapien
gaccagcacctgttgtacccatatt

SEQ ID NO: 4540388 - DNA, 25 bp, Homo sapien
cagcacctgttgtacccatattttt

SEQ ID NO: 4540389 - DNA, 25 bp, Homo sapien
tggaccagcacctgttgtacccata

SEQ ID NO: 4540390 - DNA, 25 bp, Homo sapien
agctggaccagcacctgttgtaccc

SEQ ID NO: 4540391 - DNA, 25 bp, Homo sapien
gaagatgccttcctcccaaccagaa

SEQ ID NO: 4540392 - DNA, 25 bp, Homo sapien
gggaagatgccttcctcccaaccag

SEQ ID NO: 4540393 - DNA, 25 bp, Homo sapien
caaccagaaagagccggtatccctg

SEQ ID NO: 4540394 - DNA, 25 bp, Homo sapien
ggtatccctgattatctcatcctcc

SEQ ID NO: 4540395 - DNA, 25 bp, Homo sapien
caggcaggaacaagccccgaccagg

SEQ ID NO: 4540396 - DNA, 25 bp, Homo sapien
ggcaggctgagaggcgtgacagttc

SEQ ID NO: 4540397 - DNA, 25 bp, Homo sapien
gcagtgctgcggtctggcaggctga

SEQ ID NO: 4540398 - DNA, 25 bp, Homo sapien
tcgcctagggatggcctggagtgtc

SEQ ID NO: 4540399 - DNA, 25 bp, Homo sapien
atcgtgcctaggaaggagccgtcca

SEQ ID NO: 4540400 - DNA, 25 bp, Homo sapien
taggaaggagccgtccaagcagcag

SEQ ID NO: 4540401 - DNA, 25 bp, Homo sapien
gtgcctaggaaggagccgtccaagc

SEQ ID NO: 4540402 - DNA, 25 bp, Homo sapien
gcctaggaaggagccgtccaagcag

SEQ ID NO: 4540403 - DNA, 25 bp, Homo sapien
tggctctaagctggggctctgacag

SEQ ID NO: 4540404 - DNA, 25 bp, Homo sapien
catggctctaagctggggctctgac

SEQ ID NO: 4540405 - DNA, 25 bp, Homo sapien
gaagcatggctctaagctggggctc

SEQ ID NO: 4540406 - DNA, 25 bp, Homo sapien
aggaagcatggctctaagctggggc

SEQ ID NO: 4540407 - DNA, 25 bp, Homo sapien
gagcgcaacacacccagaagttcat

SEQ ID NO: 4540408 - DNA, 25 bp, Homo sapien
tccagatgagcgcaacacacccaga

SEQ ID NO: 4540409 - DNA, 25 bp, Homo sapien
gctcctccagatgagcgcaacacac

SEQ ID NO: 4540410 - DNA, 25 bp, Homo sapien
agatgagcgcaacacacccagaagt

SEQ ID NO: 4540411 - DNA, 25 bp, Homo sapien
ccgttctactggccccgttggatca

SEQ ID NO: 4540412 - DNA, 25 bp, Homo sapien
ttggatcactcaggggcactaggct

SEQ ID NO: 4540413 - DNA, 25 bp, Homo sapien
gagggtcccattggctgcacattcc

SEQ ID NO: 4540414 - DNA, 25 bp, Homo sapien
ctcagggctcaggaaacaggcgagg

SEQ ID NO: 4540415 - DNA, 25 bp, Homo sapien
caccatcctggacactctggtttac

SEQ ID NO: 4540416 - DNA, 25 bp, Homo sapien
ctcaccatcctggacactctggttt

SEQ ID NO: 4540417 - DNA, 25 bp, Homo sapien
catcctggacactctggtttaccag

SEQ ID NO: 4540418 - DNA, 25 bp, Homo sapien
ccatcctggacactctggtttacca

SEQ ID NO: 4540419 - DNA, 25 bp, Homo sapien
tgctgctggccagctatcctccagg

SEQ ID NO: 4540420 - DNA, 25 bp, Homo sapien
tgcgcagcacatggcgggcatgccc

SEQ ID NO: 4540421 - DNA, 25 bp, Homo sapien
tgcaaaaagttctccagagggaggt

SEQ ID NO: 4540422 - DNA, 25 bp, Homo sapien
ctgggctgtaatcccggatggcagc

SEQ ID NO: 4540423 - DNA, 25 bp, Homo sapien
gagtcatgggtcttaaccctttgtc

SEQ ID NO: 4540424 - DNA, 25 bp, Homo sapien
ctgcgaggagtcatgggtcttaacc

SEQ ID NO: 4540425 - DNA, 25 bp, Homo sapien
tcatgggtcttaaccctttgtcttc

SEQ ID NO: 4540426 - DNA, 25 bp, Homo sapien
gcgaggagtcatgggtcttaaccct

SEQ ID NO: 4540427 - DNA, 25 bp, Homo sapien
cgtgggtaccgctggagcagcaggg

SEQ ID NO: 4540428 - DNA, 25 bp, Homo sapien
cactgtcgttggctaacagggatgg

SEQ ID NO: 4540429 - DNA, 25 bp, Homo sapien
tgggaagcgcatcaggtcagagaca

SEQ ID NO: 4540430 - DNA, 25 bp, Homo sapien
atgagtggtgacaggtcaatgaaga

SEQ ID NO: 4540431 - DNA, 25 bp, Homo sapien
ctgcagcatgagtgtcaggaagccc

SEQ ID NO: 4540432 - DNA, 25 bp, Homo sapien
tgagtgtcaggaagccctgtgcagc

SEQ ID NO: 4540433 - DNA, 25 bp, Homo sapien
cccctgcagcatgagtgtcaggaag

SEQ ID NO: 4540434 - DNA, 25 bp, Homo sapien
ttcccctgcagcatgagtgtcagga

SEQ ID NO: 4540435 - DNA, 25 bp, Homo sapien
ggaggttttctgggggcatatgcag

SEQ ID NO: 4540436 - DNA, 25 bp, Homo sapien
gttttctgggggcatatgcaggtac

SEQ ID NO: 4540437 - DNA, 25 bp, Homo sapien
gaggttttctgggggcatatgcagg

SEQ ID NO: 4540438 - DNA, 25 bp, Homo sapien
tttctgggggcatatgcaggtacgc

SEQ ID NO: 4540439 - DNA, 25 bp, Homo sapien
ttttccctctggagcagatcccaca

SEQ ID NO: 4540440 - DNA, 25 bp, Homo sapien
tctgcagggcccaaacactcttttc

SEQ ID NO: 4540441 - DNA, 25 bp, Homo sapien
tttccctctggagcagatcccacag

SEQ ID NO: 4540442 - DNA, 25 bp, Homo sapien
actcattcaaggctggtcacagaac

SEQ ID NO: 4540443 - DNA, 25 bp, Homo sapien
gatatgaatccaagcctgtctgact

SEQ ID NO: 4540444 - DNA, 25 bp, Homo sapien
cacagcatgtattatctcatatacc

SEQ ID NO: 4540445 - DNA, 25 bp, Homo sapien
gagacgagaaaaatattgctcagag

SEQ ID NO: 4540446 - DNA, 25 bp, Homo sapien
tcaggaaactggtcgtggcaggcct

SEQ ID NO: 4540447 - DNA, 25 bp, Homo sapien
tggcacagaccatcaccaggaagct

SEQ ID NO: 4540448 - DNA, 25 bp, Homo sapien
aggtattccccaatcgtccgtagca

SEQ ID NO: 4540449 - DNA, 25 bp, Homo sapien
gactgacagcgtggcaactgggata

SEQ ID NO: 4540450 - DNA, 25 bp, Homo sapien
ggtgctgggcctaagtggttctcac

SEQ ID NO: 4540451 - DNA, 25 bp, Homo sapien
gagtggcaggcttggtgtgctggca

SEQ ID NO: 4540452 - DNA, 25 bp, Homo sapien
gtgctgggcctaagtggttctcaca

SEQ ID NO: 4540453 - DNA, 25 bp, Homo sapien
tggtgctgggcctaagtggttctca

SEQ ID NO: 4540454 - DNA, 25 bp, Homo sapien
tcgccgttggcgtgggctgatgtgg

SEQ ID NO: 4540455 - DNA, 25 bp, Homo sapien
tgatggctcgccgttggcgtgggct

SEQ ID NO: 4540456 - DNA, 25 bp, Homo sapien
gatgtgggctgacggctgagaagct

SEQ ID NO: 4540457 - DNA, 25 bp, Homo sapien
gctgatgtgggctgacggctgagaa

SEQ ID NO: 4540458 - DNA, 25 bp, Homo sapien
aggcacgcccgtgctcaggcagtga

SEQ ID NO: 4540459 - DNA, 25 bp, Homo sapien
ctgggcagaggcacgcccgtgctca

SEQ ID NO: 4540460 - DNA, 25 bp, Homo sapien
ccctcaaggggcatggcaagcatag

SEQ ID NO: 4540461 - DNA, 25 bp, Homo sapien
gagagtttaggcgttactggttgaa

SEQ ID NO: 4540462 - DNA, 25 bp, Homo sapien
caagcgaggtccctgagagtttagg

SEQ ID NO: 4540463 - DNA, 25 bp, Homo sapien
taggcttttctacaagcgaggtccc

SEQ ID NO: 4540464 - DNA, 25 bp, Homo sapien
cataagagcagctgttgaaggttac

SEQ ID NO: 4540465 - DNA, 25 bp, Homo sapien
cagtgtcactagaaaatcatggagc

SEQ ID NO: 4540466 - DNA, 25 bp, Homo sapien
ggaatgtaaagaaccgtgagcggct

SEQ ID NO: 4540467 - DNA, 25 bp, Homo sapien
caacagaccctgcaaaaagtgagga

SEQ ID NO: 4540468 - DNA, 25 bp, Homo sapien
actgcccattggtatcaggctctgg

SEQ ID NO: 4540469 - DNA, 25 bp, Homo sapien
ggagcctggtccagagtggagagca

SEQ ID NO: 4540470 - DNA, 25 bp, Homo sapien
cctggtccagagtggagagcaatga

SEQ ID NO: 4540471 - DNA, 25 bp, Homo sapien
gagagaccagggtccagggaatgag

SEQ ID NO: 4540472 - DNA, 25 bp, Homo sapien
gagaccagggtccagggaatgaggc

SEQ ID NO: 4540473 - DNA, 25 bp, Homo sapien
agcaggggccagaggctgagagcca

SEQ ID NO: 4540474 - DNA, 25 bp, Homo sapien
gcaggggccagaggctgagagccat

SEQ ID NO: 4540475 - DNA, 25 bp, Homo sapien
gcagcaggggccagaggctgagagc

SEQ ID NO: 4540476 - DNA, 25 bp, Homo sapien
cagcagcaggggccagaggctgaga

SEQ ID NO: 4540477 - DNA, 25 bp, Homo sapien
ccaagtgaacactggtaccggaggt

SEQ ID NO: 4540478 - DNA, 25 bp, Homo sapien
ctgtgtgggatagccaggtgagggc

SEQ ID NO: 4540479 - DNA, 25 bp, Homo sapien
aacctgaggctccactgacactgta

SEQ ID NO: 4540480 - DNA, 25 bp, Homo sapien
aggcaacctgaggctccactgacac

SEQ ID NO: 4540481 - DNA, 25 bp, Homo sapien
gcaacctgaggctccactgacactg

SEQ ID NO: 4540482 - DNA, 25 bp, Homo sapien
tatgtgtaacctgacagcaggtttg

SEQ ID NO: 4540483 - DNA, 25 bp, Homo sapien
caatatgtgtaacctgacagcaggt

SEQ ID NO: 4540484 - DNA, 25 bp, Homo sapien
aaacaatatgtgtaacctgacagca

SEQ ID NO: 4540485 - DNA, 25 bp, Homo sapien
tgtaacctgacagcaggtttgttac

SEQ ID NO: 4540486 - DNA, 25 bp, Homo sapien
ctgagccgctgaatatctgatcctt

SEQ ID NO: 4540487 - DNA, 25 bp, Homo sapien
gaatatctgatcctttagctctgga

SEQ ID NO: 4540488 - DNA, 25 bp, Homo sapien
cgctgaatatctgatcctttagctc

SEQ ID NO: 4540489 - DNA, 25 bp, Homo sapien
gagccgctgaatatctgatccttta

SEQ ID NO: 4540490 - DNA, 25 bp, Homo sapien
ctaatgataggggatcccaggggcc

SEQ ID NO: 4540491 - DNA, 25 bp, Homo sapien
gagattgcttgagttaggagccagt

SEQ ID NO: 4540492 - DNA, 25 bp, Homo sapien
gagggactaatgataggggatccca

SEQ ID NO: 4540493 - DNA, 25 bp, Homo sapien
caaggagattgcttgagttaggagc

SEQ ID NO: 4540494 - DNA, 25 bp, Homo sapien
caaaggccttcactttataccaact

SEQ ID NO: 4540495 - DNA, 25 bp, Homo sapien
tgccccagtccaggattagaagtct

SEQ ID NO: 4540496 - DNA, 25 bp, Homo sapien
attctccatctatatctccccaaag

SEQ ID NO: 4540497 - DNA, 25 bp, Homo sapien
tctatatctccccaaaggccttcac

SEQ ID NO: 4540498 - DNA, 25 bp, Homo sapien
tgcccatcaaggataccacacctag

SEQ ID NO: 4540499 - DNA, 25 bp, Homo sapien
tgaggaatcctctggtaagaacttc

SEQ ID NO: 4540500 - DNA, 25 bp, Homo sapien
tgagggagaatacgacctgagttcc

SEQ ID NO: 4540501 - DNA, 25 bp, Homo sapien
gagatggtctaggttcaaaccctgg

SEQ ID NO: 4540502 - DNA, 25 bp, Homo sapien
tagaaagctaaggagcacagactcc

SEQ ID NO: 4540503 - DNA, 25 bp, Homo sapien
cagggtcacactactgagcagctat

SEQ ID NO: 4540504 - DNA, 25 bp, Homo sapien
gagacttccggtccagaaacaggta

SEQ ID NO: 4540505 - DNA, 25 bp, Homo sapien
tcttctaacgatggaatgggatccc

SEQ ID NO: 4540506 - DNA, 25 bp, Homo sapien
atcttttgctgggcccaaggatatt

SEQ ID NO: 4540507 - DNA, 25 bp, Homo sapien
gctgggcccaaggatattgaagcca

SEQ ID NO: 4540508 - DNA, 25 bp, Homo sapien
ttttgctgggcccaaggatattgaa

SEQ ID NO: 4540509 - DNA, 25 bp, Homo sapien
ttgctgggcccaaggatattgaagc

SEQ ID NO: 4540510 - DNA, 25 bp, Homo sapien
tcttccaagttcatcagtgcctgca

SEQ ID NO: 4540511 - DNA, 25 bp, Homo sapien
ttgtcttccaagttcatcagtgcct

SEQ ID NO: 4540512 - DNA, 25 bp, Homo sapien
gtcttccaagttcatcagtgcctgc

SEQ ID NO: 4540513 - DNA, 25 bp, Homo sapien
tgtcttccaagttcatcagtgcctg

SEQ ID NO: 4540514 - DNA, 25 bp, Homo sapien
cggaagagtgagtctctgggccaaa

SEQ ID NO: 4540515 - DNA, 25 bp, Homo sapien
tcaaaatatcggaagagtgagtctc

SEQ ID NO: 4540516 - DNA, 25 bp, Homo sapien
tctagcaactcaaaatatcggaaga

SEQ ID NO: 4540517 - DNA, 25 bp, Homo sapien
actgaagcttttctagcaactcaaa

SEQ ID NO: 4540518 - DNA, 25 bp, Homo sapien
cctgatccatttccattagcccggg

SEQ ID NO: 4540519 - DNA, 25 bp, Homo sapien
cccgggcagattttcgtgcacaaga

SEQ ID NO: 4540520 - DNA, 25 bp, Homo sapien
tttcgtgcacaagagtctcccagtc

SEQ ID NO: 4540521 - DNA, 25 bp, Homo sapien
cattagcccgggcagattttcgtgc

SEQ ID NO: 4540522 - DNA, 25 bp, Homo sapien
cacagccacacttacccgaagtgaa

SEQ ID NO: 4540523 - DNA, 25 bp, Homo sapien
ttttacaacgagcaaagagggccac

SEQ ID NO: 4540524 - DNA, 25 bp, Homo sapien
ggagagctcctgttaagactaagat

SEQ ID NO: 4540525 - DNA, 25 bp, Homo sapien
tcattattatagttcttcggctcac

SEQ ID NO: 4540526 - DNA, 25 bp, Homo sapien
cctcttcagtggcaccataattaga

SEQ ID NO: 4540527 - DNA, 25 bp, Homo sapien
acacaggaggaagactggtactctc

SEQ ID NO: 4540528 - DNA, 25 bp, Homo sapien
caggaggaagactggtactctctct

SEQ ID NO: 4540529 - DNA, 25 bp, Homo sapien
aattagactctacttcagacacttc

SEQ ID NO: 4540530 - DNA, 25 bp, Homo sapien
gacaatgagggccaaactactccca

SEQ ID NO: 4540531 - DNA, 25 bp, Homo sapien
gggcataagacaatgagggccaaac

SEQ ID NO: 4540532 - DNA, 25 bp, Homo sapien
tttatggcttcacaaacatttacaa

SEQ ID NO: 4540533 - DNA, 25 bp, Homo sapien
gatatgactagtccactcattattc

SEQ ID NO: 4540534 - DNA, 25 bp, Homo sapien
caagcatgcttccagcttcggagct

SEQ ID NO: 4540535 - DNA, 25 bp, Homo sapien
aaactacaacccatctgcagctggg

SEQ ID NO: 4540536 - DNA, 25 bp, Homo sapien
taccttttcaatgaggtcaccgtga

SEQ ID NO: 4540537 - DNA, 25 bp, Homo sapien
gatatccacatggtaatccccttac

SEQ ID NO: 4540538 - DNA, 25 bp, Homo sapien
tcagcttcccttggcttgcggtggc

SEQ ID NO: 4540539 - DNA, 25 bp, Homo sapien
catattgcctagtttagtctcgaac

SEQ ID NO: 4540540 - DNA, 25 bp, Homo sapien
ttttgtccactgctaaacacttggg

SEQ ID NO: 4540541 - DNA, 25 bp, Homo sapien
gaatgagtttacttccgcttctgct

SEQ ID NO: 4540542 - DNA, 25 bp, Homo sapien
atctaggatgatctcatctcaagat

SEQ ID NO: 4540543 - DNA, 25 bp, Homo sapien
ataatctaggatgatctcatctcaa

SEQ ID NO: 4540544 - DNA, 25 bp, Homo sapien
taatctaggatgatctcatctcaag

SEQ ID NO: 4540545 - DNA, 25 bp, Homo sapien
tgaattatctctcaaagccaatctt

SEQ ID NO: 4540546 - DNA, 25 bp, Homo sapien
tatttcgggtgccactagtcaacct

SEQ ID NO: 4540547 - DNA, 25 bp, Homo sapien
tagtcaacctactacaatatgcagt

SEQ ID NO: 4540548 - DNA, 25 bp, Homo sapien
gtgtttctatcccagttcacataca

SEQ ID NO: 4540549 - DNA, 25 bp, Homo sapien
tctattttgctatggcttgacgtca

SEQ ID NO: 4540550 - DNA, 25 bp, Homo sapien
gtcctctattttgctatggcttgac

SEQ ID NO: 4540551 - DNA, 25 bp, Homo sapien
gacgtcagtgcttcatgtgacatgt

SEQ ID NO: 4540552 - DNA, 25 bp, Homo sapien
attttgctatggcttgacgtcagtg

SEQ ID NO: 4540553 - DNA, 25 bp, Homo sapien
cagttatattcaagcaaaagtgtgg

SEQ ID NO: 4540554 - DNA, 25 bp, Homo sapien
gacagttatattcaagcaaaagtgt

SEQ ID NO: 4540555 - DNA, 25 bp, Homo sapien
gttatattcaagcaaaagtgtggta

SEQ ID NO: 4540556 - DNA, 25 bp, Homo sapien
tatattcaagcaaaagtgtggtaag

SEQ ID NO: 4540557 - DNA, 25 bp, Homo sapien
cattcagctctttcctgatattctg

SEQ ID NO: 4540558 - DNA, 25 bp, Homo sapien
gacgcgccatctcctcattcagctc

SEQ ID NO: 4540559 - DNA, 25 bp, Homo sapien
agctttgagctgaacctcccgacgc

SEQ ID NO: 4540560 - DNA, 25 bp, Homo sapien
tgatctgccgcttgaacatgtcagc

SEQ ID NO: 4540561 - DNA, 25 bp, Homo sapien
agctgggagatggtaatgactagac

SEQ ID NO: 4540562 - DNA, 25 bp, Homo sapien
tggtaatgactagacttgggaagag

SEQ ID NO: 4540563 - DNA, 25 bp, Homo sapien
ggagaatccaagtgaaatatccaat

SEQ ID NO: 4540564 - DNA, 25 bp, Homo sapien
aagtgaaatatccaatccagaaccc

SEQ ID NO: 4540565 - DNA, 25 bp, Homo sapien
gaagcagtgcataccaatgatccaa

SEQ ID NO: 4540566 - DNA, 25 bp, Homo sapien
catggctactatgatacttcgaaag

SEQ ID NO: 4540567 - DNA, 25 bp, Homo sapien
gaagatgcgactgacttcaggcacc

SEQ ID NO: 4540568 - DNA, 25 bp, Homo sapien
tcgaaagataatggagccaagcaac

SEQ ID NO: 4540569 - DNA, 25 bp, Homo sapien
accatactcagtttttagctaatca

SEQ ID NO: 4540570 - DNA, 25 bp, Homo sapien
aagacatgtgaatagacagaagcag

SEQ ID NO: 4540571 - DNA, 25 bp, Homo sapien
gaagcagagacctaaacctttcaaa

SEQ ID NO: 4540572 - DNA, 25 bp, Homo sapien
gattttggctccttttctaccatac

SEQ ID NO: 4540573 - DNA, 25 bp, Homo sapien
tattctctactgctctatggactcc

SEQ ID NO: 4540574 - DNA, 25 bp, Homo sapien
gaagatcactcgcaaatttagcaaa

SEQ ID NO: 4540575 - DNA, 25 bp, Homo sapien
tgggactttcctaactcaatactct

SEQ ID NO: 4540576 - DNA, 25 bp, Homo sapien
tatggactccacttaatagaagatc

SEQ ID NO: 4540577 - DNA, 25 bp, Homo sapien
aaaaaatatgtaacacttcataaat

SEQ ID NO: 4540578 - DNA, 25 bp, Homo sapien
ttgtgtttcatccttgcacaagggc

SEQ ID NO: 4540579 - DNA, 25 bp, Homo sapien
taacacttcataaatttgtgtttca

SEQ ID NO: 4540580 - DNA, 25 bp, Homo sapien
catgctaatcttctctatatcgttc

SEQ ID NO: 4540581 - DNA, 25 bp, Homo sapien
agatcaggaataggcgtgtgcatgt

SEQ ID NO: 4540582 - DNA, 25 bp, Homo sapien
catgtgtaatatgtagagattggga

SEQ ID NO: 4540583 - DNA, 25 bp, Homo sapien
tcaggaataggcgtgtgcatgtgta

SEQ ID NO: 4540584 - DNA, 25 bp, Homo sapien
aataggcgtgtgcatgtgtaatatg

SEQ ID NO: 4540585 - DNA, 25 bp, Homo sapien
tttaaagatgcctgatgacagtgtg

SEQ ID NO: 4540586 - DNA, 25 bp, Homo sapien
gaataaacatggaactagctgccct

SEQ ID NO: 4540587 - DNA, 25 bp, Homo sapien
tggagtgtactgctatttaaagatg

SEQ ID NO: 4540588 - DNA, 25 bp, Homo sapien
cagaaaccaagcttaaccactggag

SEQ ID NO: 4540589 - DNA, 25 bp, Homo sapien
tctgagaagacgtagacaccagtca

SEQ ID NO: 4540590 - DNA, 25 bp, Homo sapien
tgtactctgagaagacgtagacacc

SEQ ID NO: 4540591 - DNA, 25 bp, Homo sapien
tactctgagaagacgtagacaccag

SEQ ID NO: 4540592 - DNA, 25 bp, Homo sapien
tgagaagacgtagacaccagtcaca

SEQ ID NO: 4540593 - DNA, 25 bp, Homo sapien
acatttcacaggacgtttcattgcc

SEQ ID NO: 4540594 - DNA, 25 bp, Homo sapien
cttgcactgctgaacccagtcatct

SEQ ID NO: 4540595 - DNA, 25 bp, Homo sapien
cagtcatctttgaaccatggcacct

SEQ ID NO: 4540596 - DNA, 25 bp, Homo sapien
gatgtgggccaaactaggctgatct

SEQ ID NO: 4540597 - DNA, 25 bp, Homo sapien
tttatctaccttgccccctgcttta

SEQ ID NO: 4540598 - DNA, 25 bp, Homo sapien
ccctgctttagcttgcaacagtcaa

SEQ ID NO: 4540599 - DNA, 25 bp, Homo sapien
tgtttcatattctatgttaagccct

SEQ ID NO: 4540600 - DNA, 25 bp, Homo sapien
tatgttaagccctcacatttatcta

SEQ ID NO: 4540601 - DNA, 25 bp, Homo sapien
gaatttgacggaattgtgcaaggag

SEQ ID NO: 4540602 - DNA, 25 bp, Homo sapien
ggccctgaccaggaccaaaataata

SEQ ID NO: 4540603 - DNA, 25 bp, Homo sapien
aataccacaacctcgggaagcaggg

SEQ ID NO: 4540604 - DNA, 25 bp, Homo sapien
gctgaagccacaccgattggcctgt

SEQ ID NO: 4540605 - DNA, 25 bp, Homo sapien
tataagtaaaatacaccccaaggca

SEQ ID NO: 4540606 - DNA, 25 bp, Homo sapien
ctattcagcctttctatattaagtt

SEQ ID NO: 4540607 - DNA, 25 bp, Homo sapien
ctctgagaagtgcttactattcagc

SEQ ID NO: 4540608 - DNA, 25 bp, Homo sapien
tctatattaagttgcttaaacacta

SEQ ID NO: 4540609 - DNA, 25 bp, Homo sapien
gcattgatgttgtagttagtctact

SEQ ID NO: 4540610 - DNA, 25 bp, Homo sapien
aacttgttctttcgattcacctagg

SEQ ID NO: 4540611 - DNA, 25 bp, Homo sapien
taagtgctcagtaaccggcagatgc

SEQ ID NO: 4540612 - DNA, 25 bp, Homo sapien
tagtctactttgctcctaataccaa

SEQ ID NO: 4540613 - DNA, 25 bp, Homo sapien
cccactaaacgaaccctcaggatct

SEQ ID NO: 4540614 - DNA, 25 bp, Homo sapien
tcatcccactaaacgaaccctcagg

SEQ ID NO: 4540615 - DNA, 25 bp, Homo sapien
ccactaaacgaaccctcaggatctc

SEQ ID NO: 4540616 - DNA, 25 bp, Homo sapien
atcccactaaacgaaccctcaggat

SEQ ID NO: 4540617 - DNA, 25 bp, Homo sapien
aacagaaaagttggatagccactta

SEQ ID NO: 4540618 - DNA, 25 bp, Homo sapien
tagccacttaagaaggatctccagg

SEQ ID NO: 4540619 - DNA, 25 bp, Homo sapien
aataagcaagataaaccaagctgcc

SEQ ID NO: 4540620 - DNA, 25 bp, Homo sapien
ggtcagcttcaatggccatagtttg

SEQ ID NO: 4540621 - DNA, 25 bp, Homo sapien
gtgaagtagcagtgaacatctatgc

SEQ ID NO: 4540622 - DNA, 25 bp, Homo sapien
aagtagcagtgaacatctatgcttc

SEQ ID NO: 4540623 - DNA, 25 bp, Homo sapien
gaagtagcagtgaacatctatgctt

SEQ ID NO: 4540624 - DNA, 25 bp, Homo sapien
tgaagtagcagtgaacatctatgct

SEQ ID NO: 4540625 - DNA, 25 bp, Homo sapien
gaaactgggaccatagatgcgcatc

SEQ ID NO: 4540626 - DNA, 25 bp, Homo sapien
taggtgaggagaatagtacactgca

SEQ ID NO: 4540627 - DNA, 25 bp, Homo sapien
gtaggtcacctcacagaataccagg

SEQ ID NO: 4540628 - DNA, 25 bp, Homo sapien
ctgttttacagggtagagttcacca

SEQ ID NO: 4540629 - DNA, 25 bp, Homo sapien
gggaccactgatctaggaaatcctg

SEQ ID NO: 4540630 - DNA, 25 bp, Homo sapien
aactgcatgtgcgtgacccttagga

SEQ ID NO: 4540631 - DNA, 25 bp, Homo sapien
ggactataattctagccatgcaagg

SEQ ID NO: 4540632 - DNA, 25 bp, Homo sapien
caaggcaaatacatggcagcaatca

SEQ ID NO: 4540633 - DNA, 25 bp, Homo sapien
atgtcacatttcaaatgacattcaa

SEQ ID NO: 4540634 - DNA, 25 bp, Homo sapien
tgtcacatttcaaatgacattcaaa

SEQ ID NO: 4540635 - DNA, 25 bp, Homo sapien
tcaatatgatcgtattcaaaaagac

SEQ ID NO: 4540636 - DNA, 25 bp, Homo sapien
atgatcgtattcaaaaagaccagga

SEQ ID NO: 4540637 - DNA, 25 bp, Homo sapien
atatgatcgtattcaaaaagaccag

SEQ ID NO: 4540638 - DNA, 25 bp, Homo sapien
ctatttcaaccatcaatatgatcgt

SEQ ID NO: 4540639 - DNA, 25 bp, Homo sapien
tccggcccacaaagaaagaggtggc

SEQ ID NO: 4540640 - DNA, 25 bp, Homo sapien
ccacaaagaaagaggtggcctctga

SEQ ID NO: 4540641 - DNA, 25 bp, Homo sapien
ccatccggcccacaaagaaagaggt

SEQ ID NO: 4540642 - DNA, 25 bp, Homo sapien
cacaaagaaagaggtggcctctgac

SEQ ID NO: 4540643 - DNA, 25 bp, Homo sapien
tttatagagaaacgcactagctggt

SEQ ID NO: 4540644 - DNA, 25 bp, Homo sapien
ctttatagagaaacgcactagctgg

SEQ ID NO: 4540645 - DNA, 25 bp, Homo sapien
tagagaaacgcactagctggtgttg

SEQ ID NO: 4540646 - DNA, 25 bp, Homo sapien
gaggctttatagagaaacgcactag

SEQ ID NO: 4540647 - DNA, 25 bp, Homo sapien
tgtggataggagtcttaaatttaaa

SEQ ID NO: 4540648 - DNA, 25 bp, Homo sapien
caagcccttgatttatcaagtttgg

SEQ ID NO: 4540649 - DNA, 25 bp, Homo sapien
ccagaattttccactcttaaatgta

SEQ ID NO: 4540650 - DNA, 25 bp, Homo sapien
tagaggatgtggataggagtcttaa

SEQ ID NO: 4540651 - DNA, 25 bp, Homo sapien
taactccctgatagtgtgccgcggc

SEQ ID NO: 4540652 - DNA, 25 bp, Homo sapien
aactccctgatagtgtgccgcggca

SEQ ID NO: 4540653 - DNA, 25 bp, Homo sapien
ccctgatagtgtgccgcggcacagc

SEQ ID NO: 4540654 - DNA, 25 bp, Homo sapien
ctccctgatagtgtgccgcggcaca

SEQ ID NO: 4540655 - DNA, 25 bp, Homo sapien
tgctcttcttgttggtaagcggcca

SEQ ID NO: 4540656 - DNA, 25 bp, Homo sapien
gcatctgctcttcttgttggtaagc

SEQ ID NO: 4540657 - DNA, 25 bp, Homo sapien
gctcttcttgttggtaagcggccat

SEQ ID NO: 4540658 - DNA, 25 bp, Homo sapien
tctgctcttcttgttggtaagcggc

SEQ ID NO: 4540659 - DNA, 25 bp, Homo sapien
cattctactaggactcagggtgttt

SEQ ID NO: 4540660 - DNA, 25 bp, Homo sapien
gacattgcacagtcgaccaagcggc

SEQ ID NO: 4540661 - DNA, 25 bp, Homo sapien
tgtacccacatctacgaactaggag

SEQ ID NO: 4540662 - DNA, 25 bp, Homo sapien
cagttgggaagaacaaacattctac

SEQ ID NO: 4540663 - DNA, 25 bp, Homo sapien
ccttatttcacgcttccgcctccag

SEQ ID NO: 4540664 - DNA, 25 bp, Homo sapien
gtccttatttcacgcttccgcctcc

SEQ ID NO: 4540665 - DNA, 25 bp, Homo sapien
cagtccttatttcacgcttccgcct

SEQ ID NO: 4540666 - DNA, 25 bp, Homo sapien
cttatttcacgcttccgcctccagc

SEQ ID NO: 4540667 - DNA, 25 bp, Homo sapien
ctatgcaagacgagctcagggccgg

SEQ ID NO: 4540668 - DNA, 25 bp, Homo sapien
tgcaagacgagctcagggccggctc

SEQ ID NO: 4540669 - DNA, 25 bp, Homo sapien
aagacgagctcagggccggctccca

SEQ ID NO: 4540670 - DNA, 25 bp, Homo sapien
gctcgacccccaggtttcggctcac

SEQ ID NO: 4540671 - DNA, 25 bp, Homo sapien
cccaggaccatgcggagcaacgctc

SEQ ID NO: 4540672 - DNA, 25 bp, Homo sapien
aggaccatgcggagcaacgctcgcc

SEQ ID NO: 4540673 - DNA, 25 bp, Homo sapien
tgcggagcaacgctcgcccagccac

SEQ ID NO: 4540674 - DNA, 25 bp, Homo sapien
gcggagcaacgctcgcccagccact

SEQ ID NO: 4540675 - DNA, 25 bp, Homo sapien
acgacaacttcgagagtcgcatctc

SEQ ID NO: 4540676 - DNA, 25 bp, Homo sapien
gacgacaacttcgagagtcgcatct

SEQ ID NO: 4540677 - DNA, 25 bp, Homo sapien
cgacaacttcgagagtcgcatctcc

SEQ ID NO: 4540678 - DNA, 25 bp, Homo sapien
ggacgacaacttcgagagtcgcatc

SEQ ID NO: 4540679 - DNA, 25 bp, Homo sapien
gaagcggacgtttcaccaaatgcag

SEQ ID NO: 4540680 - DNA, 25 bp, Homo sapien
caaagccttgtagtggaagcggacg

SEQ ID NO: 4540681 - DNA, 25 bp, Homo sapien
aatatgtagctatattgtttctgca

SEQ ID NO: 4540682 - DNA, 25 bp, Homo sapien
agaagtcctggatccctagggtatt

SEQ ID NO: 4540683 - DNA, 25 bp, Homo sapien
tacatctcagtaccggcagatacct

SEQ ID NO: 4540684 - DNA, 25 bp, Homo sapien
tgaggcaggcaatttgtccgtcaca

SEQ ID NO: 4540685 - DNA, 25 bp, Homo sapien
ggtttctagccaaggtcactgagtg

SEQ ID NO: 4540686 - DNA, 25 bp, Homo sapien
tcacgccgcacagccattggtttct

SEQ ID NO: 4540687 - DNA, 25 bp, Homo sapien
tcagacccagccagggtagtggcag

SEQ ID NO: 4540688 - DNA, 25 bp, Homo sapien
agcagccagtttggtggcagggggt

SEQ ID NO: 4540689 - DNA, 25 bp, Homo sapien
ccagggtagtggcagcagccagttt

SEQ ID NO: 4540690 - DNA, 25 bp, Homo sapien
cagccagtttggtggcagggggtac

SEQ ID NO: 4540691 - DNA, 25 bp, Homo sapien
cagcgtggcatccaaggagactggc

SEQ ID NO: 4540692 - DNA, 25 bp, Homo sapien
tcagaggaaaaactgcgcagcaacc

SEQ ID NO: 4540693 - DNA, 25 bp, Homo sapien
cggaccacagggtgctggtcatcca

SEQ ID NO: 4540694 - DNA, 25 bp, Homo sapien
tcatcctggcctgagcgcagccagt

SEQ ID NO: 4540695 - DNA, 25 bp, Homo sapien
tcggatgctttgcaaacgacacaga

SEQ ID NO: 4540696 - DNA, 25 bp, Homo sapien
tagtcggatgctttgcaaacgacac

SEQ ID NO: 4540697 - DNA, 25 bp, Homo sapien
gatgctttgcaaacgacacagaaaa

SEQ ID NO: 4540698 - DNA, 25 bp, Homo sapien
cgttagtcggatgctttgcaaacga

SEQ ID NO: 4540699 - DNA, 25 bp, Homo sapien
gcaggtggtagctttttgccatggc

SEQ ID NO: 4540700 - DNA, 25 bp, Homo sapien
ctgcgggcgtagtcctgaagattcg

SEQ ID NO: 4540701 - DNA, 25 bp, Homo sapien
catctcggtgcttcagactggcagg

SEQ ID NO: 4540702 - DNA, 25 bp, Homo sapien
agccacccagcactgtggtgctgaa

SEQ ID NO: 4540703 - DNA, 25 bp, Homo sapien
ctagaagggactcatagatcatcca

SEQ ID NO: 4540704 - DNA, 25 bp, Homo sapien
acagccccctgcctcattgaatttt

SEQ ID NO: 4540705 - DNA, 25 bp, Homo sapien
agaaactgagatccaaaagggacct

SEQ ID NO: 4540706 - DNA, 25 bp, Homo sapien
tttttaagctagaagggactcatag

SEQ ID NO: 4540707 - DNA, 25 bp, Homo sapien
cggtagccaccaggcctcgaggatg

SEQ ID NO: 4540708 - DNA, 25 bp, Homo sapien
gccgtgaagatgaaaagagccggta

SEQ ID NO: 4540709 - DNA, 25 bp, Homo sapien
caggcctcgaggatgaagtctcaga

SEQ ID NO: 4540710 - DNA, 25 bp, Homo sapien
aagatgaaaagagccggtagccacc

SEQ ID NO: 4540711 - DNA, 25 bp, Homo sapien
taggccaatggctagggaaggctgg

SEQ ID NO: 4540712 - DNA, 25 bp, Homo sapien
ccaggtgagtggtggacacagcccg

SEQ ID NO: 4540713 - DNA, 25 bp, Homo sapien
aggatgccaggtgagtggtggacac

SEQ ID NO: 4540714 - DNA, 25 bp, Homo sapien
gggctgtaggccaatggctagggaa

SEQ ID NO: 4540715 - DNA, 25 bp, Homo sapien
aggtccaggttccccgtgcactgca

SEQ ID NO: 4540716 - DNA, 25 bp, Homo sapien
tgcagcgccgtccccgcaaggggat

SEQ ID NO: 4540717 - DNA, 25 bp, Homo sapien
tcctgcagcgccgtccccgcaaggg

SEQ ID NO: 4540718 - DNA, 25 bp, Homo sapien
ctcctgcagcgccgtccccgcaagg

SEQ ID NO: 4540719 - DNA, 25 bp, Homo sapien
atcagaccgggtggaaagccggtca

SEQ ID NO: 4540720 - DNA, 25 bp, Homo sapien
tcagaccgggtggaaagccggtcac

SEQ ID NO: 4540721 - DNA, 25 bp, Homo sapien
ctgcaatcagaccgggtggaaagcc

SEQ ID NO: 4540722 - DNA, 25 bp, Homo sapien
caatcagaccgggtggaaagccggt

SEQ ID NO: 4540723 - DNA, 25 bp, Homo sapien
tgcaatgcccggtctggttcatctg

SEQ ID NO: 4540724 - DNA, 25 bp, Homo sapien
gaaccagcttttcggttacgaatga

SEQ ID NO: 4540725 - DNA, 25 bp, Homo sapien
ggttacgaatgaggggtgatctcct

SEQ ID NO: 4540726 - DNA, 25 bp, Homo sapien
aagtctgcaatgcccggtctggttc

SEQ ID NO: 4540727 - DNA, 25 bp, Homo sapien
acacctttcactccggggctgaagt

SEQ ID NO: 4540728 - DNA, 25 bp, Homo sapien
ctcagaagaggctggacggaatcca

SEQ ID NO: 4540729 - DNA, 25 bp, Homo sapien
tggaaccgttcctctgataagggat

SEQ ID NO: 4540730 - DNA, 25 bp, Homo sapien
gctgaagtgtagctccacatggaac

SEQ ID NO: 4540731 - DNA, 25 bp, Homo sapien
aatctgggtcatgtagttaagctct

SEQ ID NO: 4540732 - DNA, 25 bp, Homo sapien
tcatgtagttaagctctgagatggc

SEQ ID NO: 4540733 - DNA, 25 bp, Homo sapien
agttaagctctgagatggcactaag

SEQ ID NO: 4540734 - DNA, 25 bp, Homo sapien
ctgtgtgttgtcctcataaagcatg

SEQ ID NO: 4540735 - DNA, 25 bp, Homo sapien
atcaagaagtcctccataacggaag

SEQ ID NO: 4540736 - DNA, 25 bp, Homo sapien
tcctccataacggaagacactgagc

SEQ ID NO: 4540737 - DNA, 25 bp, Homo sapien
aagaagtcctccataacggaagaca

SEQ ID NO: 4540738 - DNA, 25 bp, Homo sapien
gaagtcctccataacggaagacact

SEQ ID NO: 4540739 - DNA, 25 bp, Homo sapien
tagagacgcgttcgaacgtggcgac

SEQ ID NO: 4540740 - DNA, 25 bp, Homo sapien
agacgcgttcgaacgtggcgacctg

SEQ ID NO: 4540741 - DNA, 25 bp, Homo sapien
aaatagagacgcgttcgaacgtggc

SEQ ID NO: 4540742 - DNA, 25 bp, Homo sapien
ctggtgaaatagagacgcgttcgaa

SEQ ID NO: 4540743 - DNA, 25 bp, Homo sapien
aagtagtatcttccgcaacagtgga

SEQ ID NO: 4540744 - DNA, 25 bp, Homo sapien
ggtcaagtagtatcttccgcaacag

SEQ ID NO: 4540745 - DNA, 25 bp, Homo sapien
ggttctctgcaggtcaagtagtatc

SEQ ID NO: 4540746 - DNA, 25 bp, Homo sapien
tctgcaggtcaagtagtatcttccg

SEQ ID NO: 4540747 - DNA, 25 bp, Homo sapien
tcagccagtgccttagagagacgga

SEQ ID NO: 4540748 - DNA, 25 bp, Homo sapien
gatcttactgatatcatagcgccca

SEQ ID NO: 4540749 - DNA, 25 bp, Homo sapien
tccaacgctgtagcattagctctag

SEQ ID NO: 4540750 - DNA, 25 bp, Homo sapien
tgtcgaaagtcacgctccagcttgc

SEQ ID NO: 4540751 - DNA, 25 bp, Homo sapien
aaggcaggaatcagataagaatcaa

SEQ ID NO: 4540752 - DNA, 25 bp, Homo sapien
caggaatcagataagaatcaaagat

SEQ ID NO: 4540753 - DNA, 25 bp, Homo sapien
gaaaggcaggaatcagataagaatc

SEQ ID NO: 4540754 - DNA, 25 bp, Homo sapien
ggcaggaatcagataagaatcaaag

SEQ ID NO: 4540755 - DNA, 25 bp, Homo sapien
agggaagatagtagtattcataccc

SEQ ID NO: 4540756 - DNA, 25 bp, Homo sapien
ggaagatagtagtattcatacccac

SEQ ID NO: 4540757 - DNA, 25 bp, Homo sapien
gggaagatagtagtattcataccca

SEQ ID NO: 4540758 - DNA, 25 bp, Homo sapien
ctggatgatagtcatggagttgagc

SEQ ID NO: 4540759 - DNA, 25 bp, Homo sapien
agttgagcagggaagtacttctggt

SEQ ID NO: 4540760 - DNA, 25 bp, Homo sapien
tcctgcattcgttcccggatctggt

SEQ ID NO: 4540761 - DNA, 25 bp, Homo sapien
gggcaaatacctgatcacagacctt

SEQ ID NO: 4540762 - DNA, 25 bp, Homo sapien
gagcattcttaggttactgggcata

SEQ ID NO: 4540763 - DNA, 25 bp, Homo sapien
cagctctgtatgttggttcactcca

SEQ ID NO: 4540764 - DNA, 25 bp, Homo sapien
gacaggctcggcactaattgcccag

SEQ ID NO: 4540765 - DNA, 25 bp, Homo sapien
gccttcaggtaagggcactgctcta

SEQ ID NO: 4540766 - DNA, 25 bp, Homo sapien
tcctatgggctcacagcaatgtgct

SEQ ID NO: 4540767 - DNA, 25 bp, Homo sapien
tgcaggaaaaagaacgaccatattg

SEQ ID NO: 4540768 - DNA, 25 bp, Homo sapien
cactgcctggtcatttgtggcctag

SEQ ID NO: 4540769 - DNA, 25 bp, Homo sapien
gcaatgtgcttagctacttaactca

SEQ ID NO: 4540770 - DNA, 25 bp, Homo sapien
gcaccaaaatgggtgtcagctcccc

SEQ ID NO: 4540771 - DNA, 25 bp, Homo sapien
tgtagaatatggtgcagccgagcct

SEQ ID NO: 4540772 - DNA, 25 bp, Homo sapien
gctgctcaaggaatccccatcgctg

SEQ ID NO: 4540773 - DNA, 25 bp, Homo sapien
gccaaagggcgcatcctgctgtaga

SEQ ID NO: 4540774 - DNA, 25 bp, Homo sapien
tcttgagatcgtggcggaaagtgct

SEQ ID NO: 4540775 - DNA, 25 bp, Homo sapien
atctgaacacgaccctcatcagagg

SEQ ID NO: 4540776 - DNA, 25 bp, Homo sapien
tatggagacgaagcagcccacaacc

SEQ ID NO: 4540777 - DNA, 25 bp, Homo sapien
aggcagcagcagtcatctgaacacg

SEQ ID NO: 4540778 - DNA, 25 bp, Homo sapien
acatgcagcgaaaagctcgccccag

SEQ ID NO: 4540779 - DNA, 25 bp, Homo sapien
ccagggtacatgcagcgaaaagctc

SEQ ID NO: 4540780 - DNA, 25 bp, Homo sapien
ggtacatgcagcgaaaagctcgccc

SEQ ID NO: 4540781 - DNA, 25 bp, Homo sapien
gttctccaccccacttcagtaccag

SEQ ID NO: 4540782 - DNA, 25 bp, Homo sapien
cggtttatacctgagaagtgaccat

SEQ ID NO: 4540783 - DNA, 25 bp, Homo sapien
tagaagcttttactccatgagggta

SEQ ID NO: 4540784 - DNA, 25 bp, Homo sapien
catgagggtagtaagtcaattgtac

SEQ ID NO: 4540785 - DNA, 25 bp, Homo sapien
cttgcccctcattagaagcttttac

SEQ ID NO: 4540786 - DNA, 25 bp, Homo sapien
tccagtcttctcctcgatctcacca

SEQ ID NO: 4540787 - DNA, 25 bp, Homo sapien
cttcagctgctctagttttccagtc

SEQ ID NO: 4540788 - DNA, 25 bp, Homo sapien
gctgctctagttttccagtcttctc

SEQ ID NO: 4540789 - DNA, 25 bp, Homo sapien
agtcttctcctcgatctcaccacct

SEQ ID NO: 4540790 - DNA, 25 bp, Homo sapien
tttccctgtcttgtagccaccatgt

SEQ ID NO: 4540791 - DNA, 25 bp, Homo sapien
tgcaatgacacaacgaagttccatc

SEQ ID NO: 4540792 - DNA, 25 bp, Homo sapien
gaataattgcaatgacacaacgaag

SEQ ID NO: 4540793 - DNA, 25 bp, Homo sapien
tacgatccccatgacgaataattgc

SEQ ID NO: 4540794 - DNA, 25 bp, Homo sapien
tcatcttctgcttgggagtacgatc

SEQ ID NO: 4540795 - DNA, 25 bp, Homo sapien
gccagatgtggtgggaacaatggga

SEQ ID NO: 4540796 - DNA, 25 bp, Homo sapien
ggcaagctcccgcattatggtgttc

SEQ ID NO: 4540797 - DNA, 25 bp, Homo sapien
tccgtggggatggaccatggaatct

SEQ ID NO: 4540798 - DNA, 25 bp, Homo sapien
gggaacaatgggaatgtcctcagcc

SEQ ID NO: 4540799 - DNA, 25 bp, Homo sapien
tagtatttcatcgagttcttgacaa

SEQ ID NO: 4540800 - DNA, 25 bp, Homo sapien
gaaggtcaaatccacaaactgtttg

SEQ ID NO: 4540801 - DNA, 25 bp, Homo sapien
ccagaatcttggcacagtcatcgta

SEQ ID NO: 4540802 - DNA, 25 bp, Homo sapien
aaaggaatgaccattggcacgaaga

SEQ ID NO: 4540803 - DNA, 25 bp, Homo sapien
tctttcccctcactgtctcgttcaa

SEQ ID NO: 4540804 - DNA, 25 bp, Homo sapien
ttcctggccaccagcttttccatgg

SEQ ID NO: 4540805 - DNA, 25 bp, Homo sapien
aaagctacgcagactttcctggcca

SEQ ID NO: 4540806 - DNA, 25 bp, Homo sapien
cttcccatccaaagctggagatttt

SEQ ID NO: 4540807 - DNA, 25 bp, Homo sapien
cattatgaatttctcctcgggactc

SEQ ID NO: 4540808 - DNA, 25 bp, Homo sapien
tactgtcaggtagtccttattaaaa

SEQ ID NO: 4540809 - DNA, 25 bp, Homo sapien
tgtatcctccactcattatcttcac

SEQ ID NO: 4540810 - DNA, 25 bp, Homo sapien
cccttgctctgatagtgaaaatgtg

SEQ ID NO: 4540811 - DNA, 25 bp, Homo sapien
tgaatatgaaagccaatcacattca

SEQ ID NO: 4540812 - DNA, 25 bp, Homo sapien
cccatatacttccacctgcttccca

SEQ ID NO: 4540813 - DNA, 25 bp, Homo sapien
catttgtaacctcttaaatccctat

SEQ ID NO: 4540814 - DNA, 25 bp, Homo sapien
caatcacattcacatcatgttattt

SEQ ID NO: 4540815 - DNA, 25 bp, Homo sapien
aactcctcatagatgtacgaccccg

SEQ ID NO: 4540816 - DNA, 25 bp, Homo sapien
atagatgtacgaccccgtctttcgg

SEQ ID NO: 4540817 - DNA, 25 bp, Homo sapien
tcctcatagatgtacgaccccgtct

SEQ ID NO: 4540818 - DNA, 25 bp, Homo sapien
ccgtctttcggacgctgctctcagg

SEQ ID NO: 4540819 - DNA, 25 bp, Homo sapien
ggtcttcaccttctatcaggttgca

SEQ ID NO: 4540820 - DNA, 25 bp, Homo sapien
aaagggcttgggaaagacagctcca

SEQ ID NO: 4540821 - DNA, 25 bp, Homo sapien
ttacgaaagagacgctggcttcctc

SEQ ID NO: 4540822 - DNA, 25 bp, Homo sapien
ggtagtagatgtaaacattgtggtc

SEQ ID NO: 4540823 - DNA, 25 bp, Homo sapien
ggttgagcacagcatatcgaggcag

SEQ ID NO: 4540824 - DNA, 25 bp, Homo sapien
ccgggcaggatcacggttgagcaca

SEQ ID NO: 4540825 - DNA, 25 bp, Homo sapien
tcttcctgcaggatccggtacacct

SEQ ID NO: 4540826 - DNA, 25 bp, Homo sapien
agatcaataccctcttcctgcagga

SEQ ID NO: 4540827 - DNA, 25 bp, Homo sapien
gttggtttgactctgcccctctcac

SEQ ID NO: 4540828 - DNA, 25 bp, Homo sapien
tgttggtttgactctgcccctctca

SEQ ID NO: 4540829 - DNA, 25 bp, Homo sapien
atgttggtttgactctgcccctctc

SEQ ID NO: 4540830 - DNA, 25 bp, Homo sapien
gaacacgcatgatcccaaagccacc

SEQ ID NO: 4540831 - DNA, 25 bp, Homo sapien
ccgaacacgcatgatcccaaagcca

SEQ ID NO: 4540832 - DNA, 25 bp, Homo sapien
agtgggttccccgaacacgcatgat

SEQ ID NO: 4540833 - DNA, 25 bp, Homo sapien
tgggttccccgaacacgcatgatcc

SEQ ID NO: 4540834 - DNA, 25 bp, Homo sapien
cttggagtaagcaacagctttgtcc

SEQ ID NO: 4540835 - DNA, 25 bp, Homo sapien
aagcttggagtaagcaacagctttg

SEQ ID NO: 4540836 - DNA, 25 bp, Homo sapien
tatcttggatgtaatactgcatggc

SEQ ID NO: 4540837 - DNA, 25 bp, Homo sapien
tggccagatcattgataagaaaggg

SEQ ID NO: 4540838 - DNA, 25 bp, Homo sapien
tgtgtcacaagtagctgacggctct

SEQ ID NO: 4540839 - DNA, 25 bp, Homo sapien
tcacaagtagctgacggctctttac

SEQ ID NO: 4540840 - DNA, 25 bp, Homo sapien
cattctctagtgtgtcacaagtagc

SEQ ID NO: 4540841 - DNA, 25 bp, Homo sapien
tagtgtgtcacaagtagctgacggc

SEQ ID NO: 4540842 - DNA, 25 bp, Homo sapien
accagtattcccaccaccattccct

SEQ ID NO: 4540843 - DNA, 25 bp, Homo sapien
tcatttcccgaaccagtattcccac

SEQ ID NO: 4540844 - DNA, 25 bp, Homo sapien
ctcatttcccgaaccagtattccca

SEQ ID NO: 4540845 - DNA, 25 bp, Homo sapien
tcccgaaccagtattcccaccacca

SEQ ID NO: 4540846 - DNA, 25 bp, Homo sapien
tctgcagagtcgctctaggatttga

SEQ ID NO: 4540847 - DNA, 25 bp, Homo sapien
tgacaacagtcaggtagtcaaatct

SEQ ID NO: 4540848 - DNA, 25 bp, Homo sapien
tcaggtagtcaaatctgcagagtcg

SEQ ID NO: 4540849 - DNA, 25 bp, Homo sapien
tcaaatctgcagagtcgctctagga

SEQ ID NO: 4540850 - DNA, 25 bp, Homo sapien
tggtcatggcacagatgccaacaat

SEQ ID NO: 4540851 - DNA, 25 bp, Homo sapien
tggcacagatgccaacaatgatctg

SEQ ID NO: 4540852 - DNA, 25 bp, Homo sapien
catggcacagatgccaacaatgatc

SEQ ID NO: 4540853 - DNA, 25 bp, Homo sapien
cacagatgccaacaatgatctgagg

SEQ ID NO: 4540854 - DNA, 25 bp, Homo sapien
tcctcaaggagctcgctgtcactct

SEQ ID NO: 4540855 - DNA, 25 bp, Homo sapien
aagaagtgggccgtggtactctcgc

SEQ ID NO: 4540856 - DNA, 25 bp, Homo sapien
cctcactggccgtcaatgaccacat

SEQ ID NO: 4540857 - DNA, 25 bp, Homo sapien
atgcctattccacgggtgcccagcc

SEQ ID NO: 4540858 - DNA, 25 bp, Homo sapien
tgccggaacacccactcatcccgct

SEQ ID NO: 4540859 - DNA, 25 bp, Homo sapien
cctgccggaacacccactcatcccg

SEQ ID NO: 4540860 - DNA, 25 bp, Homo sapien
ccctgccggaacacccactcatccc

SEQ ID NO: 4540861 - DNA, 25 bp, Homo sapien
ctgccggaacacccactcatcccgc

SEQ ID NO: 4540862 - DNA, 25 bp, Homo sapien
atgccggcatgtccctgatttggcc

SEQ ID NO: 4540863 - DNA, 25 bp, Homo sapien
aatgccggcatgtccctgatttggc

SEQ ID NO: 4540864 - DNA, 25 bp, Homo sapien
ccaaggtccctgtatagtttgagca

SEQ ID NO: 4540865 - DNA, 25 bp, Homo sapien
gagtccttcctcgttttccactgaa

SEQ ID NO: 4540866 - DNA, 25 bp, Homo sapien
tttatcttcgctctgaagccgggac

SEQ ID NO: 4540867 - DNA, 25 bp, Homo sapien
ggatttatttagatgcacctctggg

SEQ ID NO: 4540868 - DNA, 25 bp, Homo sapien
cggccttcactcacccgcctccctc

SEQ ID NO: 4540869 - DNA, 25 bp, Homo sapien
ggccttcactcacccgcctccctcc

SEQ ID NO: 4540870 - DNA, 25 bp, Homo sapien
ccggccttcactcacccgcctccct

SEQ ID NO: 4540871 - DNA, 25 bp, Homo sapien
ggaccaggaaggtcgtgaccagtcc

SEQ ID NO: 4540872 - DNA, 25 bp, Homo sapien
tggccaaggaagctgatagtcaata

SEQ ID NO: 4540873 - DNA, 25 bp, Homo sapien
gatagtcaataccagggaccaggaa

SEQ ID NO: 4540874 - DNA, 25 bp, Homo sapien
caggaaggtcgtgaccagtcctgga

SEQ ID NO: 4540875 - DNA, 25 bp, Homo sapien
aattagcgctctgcctgtagactcc

SEQ ID NO: 4540876 - DNA, 25 bp, Homo sapien
gctctccaggagcattgatacttgg

SEQ ID NO: 4540877 - DNA, 25 bp, Homo sapien
tgatacttggaaattagcgctctgc

SEQ ID NO: 4540878 - DNA, 25 bp, Homo sapien
cactccagggatctccctgggtgca

SEQ ID NO: 4540879 - DNA, 25 bp, Homo sapien
aggagatggaggatcaagctgtgca

SEQ ID NO: 4540880 - DNA, 25 bp, Homo sapien
ctgggtcaggagatggaggatcaag

SEQ ID NO: 4540881 - DNA, 25 bp, Homo sapien
agatggaggatcaagctgtgcagct

SEQ ID NO: 4540882 - DNA, 25 bp, Homo sapien
gggtcaggagatggaggatcaagct

SEQ ID NO: 4540883 - DNA, 25 bp, Homo sapien
actgctcgtcgctgctcaggactca

SEQ ID NO: 4540884 - DNA, 25 bp, Homo sapien
atagttggatgggactaaacaccac

SEQ ID NO: 4540885 - DNA, 25 bp, Homo sapien
tgttgggcccatgcaactgctcgtc

SEQ ID NO: 4540886 - DNA, 25 bp, Homo sapien
gactagatagttggatgggactaaa

SEQ ID NO: 4540887 - DNA, 25 bp, Homo sapien
tggcaagaggagtaacgccctggat

SEQ ID NO: 4540888 - DNA, 25 bp, Homo sapien
ctggatctgtccccgcagcagtgct

SEQ ID NO: 4540889 - DNA, 25 bp, Homo sapien
aatggcaagaggagtaacgccctgg

SEQ ID NO: 4540890 - DNA, 25 bp, Homo sapien
caagaggagtaacgccctggatctg

SEQ ID NO: 4540891 - DNA, 25 bp, Homo sapien
tgctatggtgccaatttcagtgaag

SEQ ID NO: 4540892 - DNA, 25 bp, Homo sapien
gtgaagatctcaggcccccagttac

SEQ ID NO: 4540893 - DNA, 25 bp, Homo sapien
ctgctatggtgccaatttcagtgaa

SEQ ID NO: 4540894 - DNA, 25 bp, Homo sapien
cagtgaagatctcaggcccccagtt

SEQ ID NO: 4540895 - DNA, 25 bp, Homo sapien
gaccaccctcagccccttcacaaat

SEQ ID NO: 4540896 - DNA, 25 bp, Homo sapien
caccctcagccccttcacaaatgac

SEQ ID NO: 4540897 - DNA, 25 bp, Homo sapien
tgaacacgaccaccctcagcccctt

SEQ ID NO: 4540898 - DNA, 25 bp, Homo sapien
ctgaacacgaccaccctcagcccct

SEQ ID NO: 4540899 - DNA, 25 bp, Homo sapien
atgccgaccactctgccgtaggaaa

SEQ ID NO: 4540900 - DNA, 25 bp, Homo sapien
ggccgcagtccacagagagtataac

SEQ ID NO: 4540901 - DNA, 25 bp, Homo sapien
aggtggctcacatgccgaccactct

SEQ ID NO: 4540902 - DNA, 25 bp, Homo sapien
taacccagcgctgtcagatgaacga

SEQ ID NO: 4540903 - DNA, 25 bp, Homo sapien
ccagccatctatctgccccagggtg

SEQ ID NO: 4540904 - DNA, 25 bp, Homo sapien
ccccagtccactaggatcagctcct

SEQ ID NO: 4540905 - DNA, 25 bp, Homo sapien
agtccactaggatcagctcctgtag

SEQ ID NO: 4540906 - DNA, 25 bp, Homo sapien
ccactaggatcagctcctgtagttc

SEQ ID NO: 4540907 - DNA, 25 bp, Homo sapien
tggccaacctcagttggctctccgt

SEQ ID NO: 4540908 - DNA, 25 bp, Homo sapien
cctcagttggctctccgtccctgac

SEQ ID NO: 4540909 - DNA, 25 bp, Homo sapien
aacctcagttggctctccgtccctg

SEQ ID NO: 4540910 - DNA, 25 bp, Homo sapien
catggccaacctcagttggctctcc

SEQ ID NO: 4540911 - DNA, 25 bp, Homo sapien
tgggaatgtccctcgtacatctgca

SEQ ID NO: 4540912 - DNA, 25 bp, Homo sapien
tgctgggaatgtccctcgtacatct

SEQ ID NO: 4540913 - DNA, 25 bp, Homo sapien
gggaatgtccctcgtacatctgcac

SEQ ID NO: 4540914 - DNA, 25 bp, Homo sapien
ctgggaatgtccctcgtacatctgc

SEQ ID NO: 4540915 - DNA, 25 bp, Homo sapien
cagggccaggaggtatctgtagatg

SEQ ID NO: 4540916 - DNA, 25 bp, Homo sapien
gaggtatctgtagatggaatgactc

SEQ ID NO: 4540917 - DNA, 25 bp, Homo sapien
tggaatgactcttccaacctttgga

SEQ ID NO: 4540918 - DNA, 25 bp, Homo sapien
gaatgactcttccaacctttggagg

SEQ ID NO: 4540919 - DNA, 25 bp, Homo sapien
gcagctggtcgcaccacccctgcta

SEQ ID NO: 4540920 - DNA, 25 bp, Homo sapien
gcttttctagaagccgctccagggt

SEQ ID NO: 4540921 - DNA, 25 bp, Homo sapien
tgctaccagggctgctttcttggca

SEQ ID NO: 4540922 - DNA, 25 bp, Homo sapien
ccctacacagctgtccaactctgct

SEQ ID NO: 4540923 - DNA, 25 bp, Homo sapien
cagcttgctctacttcatcctggct

SEQ ID NO: 4540924 - DNA, 25 bp, Homo sapien
gggatcaaggaaattgcctcagtag

SEQ ID NO: 4540925 - DNA, 25 bp, Homo sapien
gaaattgcctcagtagacagagtga

SEQ ID NO: 4540926 - DNA, 25 bp, Homo sapien
gagtgaatactaggcgtccagcttg

SEQ ID NO: 4540927 - DNA, 25 bp, Homo sapien
aagaaaatcgggggctggggagctg

SEQ ID NO: 4540928 - DNA, 25 bp, Homo sapien
aaatcgggggctggggagctgaggg

SEQ ID NO: 4540929 - DNA, 25 bp, Homo sapien
atcgggggctggggagctgagggaa

SEQ ID NO: 4540930 - DNA, 25 bp, Homo sapien
gaaaatcgggggctggggagctgag

SEQ ID NO: 4540931 - DNA, 25 bp, Homo sapien
gggatctgtcgtgtgctctctgtcc

SEQ ID NO: 4540932 - DNA, 25 bp, Homo sapien
ctgtagggggatctgtcgtgtgctc

SEQ ID NO: 4540933 - DNA, 25 bp, Homo sapien
caggaatccaaccaaagggcctaag

SEQ ID NO: 4540934 - DNA, 25 bp, Homo sapien
tgagatgggacagcaggatctgtag

SEQ ID NO: 4540935 - DNA, 25 bp, Homo sapien
attgtctgaggagcaagaattgccc

SEQ ID NO: 4540936 - DNA, 25 bp, Homo sapien
aaatctgagtctggtagggtggact

SEQ ID NO: 4540937 - DNA, 25 bp, Homo sapien
ctgagtctggtagggtggactctta

SEQ ID NO: 4540938 - DNA, 25 bp, Homo sapien
gaagtagagggttggaggacagtca

SEQ ID NO: 4540939 - DNA, 25 bp, Homo sapien
cagctccaccaccaacataatggat

SEQ ID NO: 4540940 - DNA, 25 bp, Homo sapien
taatggattcattggatagtctgtc

SEQ ID NO: 4540941 - DNA, 25 bp, Homo sapien
aggttttgtagtgccctctctgcca

SEQ ID NO: 4540942 - DNA, 25 bp, Homo sapien
tggatagtctgtccatcaactggat

SEQ ID NO: 4540943 - DNA, 25 bp, Homo sapien
tattatagcaatttgacaacaatat

SEQ ID NO: 4540944 - DNA, 25 bp, Homo sapien
ctattatagcaatttgacaacaata

SEQ ID NO: 4540945 - DNA, 25 bp, Homo sapien
tcagttctggccctacagttgtcca

SEQ ID NO: 4540946 - DNA, 25 bp, Homo sapien
gctatccagcccgttcagttctggc

SEQ ID NO: 4540947 - DNA, 25 bp, Homo sapien
aggagtagcttgctatccagcccgt

SEQ ID NO: 4540948 - DNA, 25 bp, Homo sapien
ggccctacagttgtccattctggtt

SEQ ID NO: 4540949 - DNA, 25 bp, Homo sapien
ctgtagctctgcccagatacaggcc

SEQ ID NO: 4540950 - DNA, 25 bp, Homo sapien
gtagctctgcccagatacaggccct

SEQ ID NO: 4540951 - DNA, 25 bp, Homo sapien
tgtagctctgcccagatacaggccc

SEQ ID NO: 4540952 - DNA, 25 bp, Homo sapien
cctcgaactctagtgggcagctgat

SEQ ID NO: 4540953 - DNA, 25 bp, Homo sapien
gctgatagatcatgtgcaccacttc

SEQ ID NO: 4540954 - DNA, 25 bp, Homo sapien
aaggaagtctaccatggagttgatc

SEQ ID NO: 4540955 - DNA, 25 bp, Homo sapien
ctccctcgaactctagtgggcagct

SEQ ID NO: 4540956 - DNA, 25 bp, Homo sapien
gttggtgggtacttgcatcttcttc

SEQ ID NO: 4540957 - DNA, 25 bp, Homo sapien
cagaagagacactgtccaaggatac

SEQ ID NO: 4540958 - DNA, 25 bp, Homo sapien
aagagacactgtccaaggatacccc

SEQ ID NO: 4540959 - DNA, 25 bp, Homo sapien
gaagagacactgtccaaggataccc

SEQ ID NO: 4540960 - DNA, 25 bp, Homo sapien
agaagagacactgtccaaggatacc

SEQ ID NO: 4540961 - DNA, 25 bp, Homo sapien
gaagagccaaggaatccagttgtag

SEQ ID NO: 4540962 - DNA, 25 bp, Homo sapien
cccagtagcgtcttcgatttgccag

SEQ ID NO: 4540963 - DNA, 25 bp, Homo sapien
tagcgtcttcgatttgccagaagag

SEQ ID NO: 4540964 - DNA, 25 bp, Homo sapien
tgctgctcagaccagggcagctccc

SEQ ID NO: 4540965 - DNA, 25 bp, Homo sapien
cagtctggccaggtggtgggaatag

SEQ ID NO: 4540966 - DNA, 25 bp, Homo sapien
gcagtctggccaggtggtgggaata

SEQ ID NO: 4540967 - DNA, 25 bp, Homo sapien
agtctggccaggtggtgggaatagg

SEQ ID NO: 4540968 - DNA, 25 bp, Homo sapien
gaccagcacctgttgtacccatatt

SEQ ID NO: 4540969 - DNA, 25 bp, Homo sapien
cagcacctgttgtacccatattttt

SEQ ID NO: 4540970 - DNA, 25 bp, Homo sapien
tggaccagcacctgttgtacccata

SEQ ID NO: 4540971 - DNA, 25 bp, Homo sapien
agctggaccagcacctgttgtaccc

SEQ ID NO: 4540972 - DNA, 25 bp, Homo sapien
caggcaggaacaagccccgaccagg

SEQ ID NO: 4540973 - DNA, 25 bp, Homo sapien
ggcaggctgagaggcgtgacagttc

SEQ ID NO: 4540974 - DNA, 25 bp, Homo sapien
gcagtgctgcggtctggcaggctga

SEQ ID NO: 4540975 - DNA, 25 bp, Homo sapien
tcgcctagggatggcctggagtgtc

SEQ ID NO: 4540976 - DNA, 25 bp, Homo sapien
catggctctaagctggggctctgac

SEQ ID NO: 4540977 - DNA, 25 bp, Homo sapien
gaagcatggctctaagctggggctc

SEQ ID NO: 4540978 - DNA, 25 bp, Homo sapien
gctcctccagatgagcgcaacacac

SEQ ID NO: 4540979 - DNA, 25 bp, Homo sapien
gagcgcaacacacccagaagttcat

SEQ ID NO: 4540980 - DNA, 25 bp, Homo sapien
ccgttctactggccccgttggatca

SEQ ID NO: 4540981 - DNA, 25 bp, Homo sapien
gagggtcccattggctgcacattcc

SEQ ID NO: 4540982 - DNA, 25 bp, Homo sapien
ttggatcactcaggggcactaggct

SEQ ID NO: 4540983 - DNA, 25 bp, Homo sapien
ctcagggctcaggaaacaggcgagg

SEQ ID NO: 4540984 - DNA, 25 bp, Homo sapien
caccatcctggacactctggtttac

SEQ ID NO: 4540985 - DNA, 25 bp, Homo sapien
ccatcctggacactctggtttacca

SEQ ID NO: 4540986 - DNA, 25 bp, Homo sapien
ctcaccatcctggacactctggttt

SEQ ID NO: 4540987 - DNA, 25 bp, Homo sapien
catcctggacactctggtttaccag

SEQ ID NO: 4540988 - DNA, 25 bp, Homo sapien
tgcgcagcacatggcgggcatgccc

SEQ ID NO: 4540989 - DNA, 25 bp, Homo sapien
tgctgctggccagctatcctccagg

SEQ ID NO: 4540990 - DNA, 25 bp, Homo sapien
ctgggctgtaatcccggatggcagc

SEQ ID NO: 4540991 - DNA, 25 bp, Homo sapien
tgcaaaaagttctccagagggaggt

SEQ ID NO: 4540992 - DNA, 25 bp, Homo sapien
gagtcatgggtcttaaccctttgtc

SEQ ID NO: 4540993 - DNA, 25 bp, Homo sapien
tcatgggtcttaaccctttgtcttc

SEQ ID NO: 4540994 - DNA, 25 bp, Homo sapien
ctgcgaggagtcatgggtcttaacc

SEQ ID NO: 4540995 - DNA, 25 bp, Homo sapien
gcgaggagtcatgggtcttaaccct

SEQ ID NO: 4540996 - DNA, 25 bp, Homo sapien
cgtgggtaccgctggagcagcaggg

SEQ ID NO: 4540997 - DNA, 25 bp, Homo sapien
cactgtcgttggctaacagggatgg

SEQ ID NO: 4540998 - DNA, 25 bp, Homo sapien
tgggaagcgcatcaggtcagagaca

SEQ ID NO: 4540999 - DNA, 25 bp, Homo sapien
atgagtggtgacaggtcaatgaaga

SEQ ID NO: 4541000 - DNA, 25 bp, Homo sapien
ggaggttttctgggggcatatgcag

SEQ ID NO: 4541001 - DNA, 25 bp, Homo sapien
gttttctgggggcatatgcaggtac

SEQ ID NO: 4541002 - DNA, 25 bp, Homo sapien
gaggttttctgggggcatatgcagg

SEQ ID NO: 4541003 - DNA, 25 bp, Homo sapien
tttctgggggcatatgcaggtacgc

SEQ ID NO: 4541004 - DNA, 25 bp, Homo sapien
tccagccatggctgtcacccagccc

SEQ ID NO: 4541005 - DNA, 25 bp, Homo sapien
ccagccatggctgtcacccagccca

SEQ ID NO: 4541006 - DNA, 25 bp, Homo sapien
tctgcagggcccaaacactcttttc

SEQ ID NO: 4541007 - DNA, 25 bp, Homo sapien
tttccctctggagcagatcccacag

SEQ ID NO: 4541008 - DNA, 25 bp, Homo sapien
ttttccctctggagcagatcccaca

SEQ ID NO: 4541009 - DNA, 25 bp, Homo sapien
gatatgaatccaagcctgtctgact

SEQ ID NO: 4541010 - DNA, 25 bp, Homo sapien
cacagcatgtattatctcatatacc

SEQ ID NO: 4541011 - DNA, 25 bp, Homo sapien
actcattcaaggctggtcacagaac

SEQ ID NO: 4541012 - DNA, 25 bp, Homo sapien
gagacgagaaaaatattgctcagag

SEQ ID NO: 4541013 - DNA, 25 bp, Homo sapien
actgttctaggagctttccctctgg

SEQ ID NO: 4541014 - DNA, 25 bp, Homo sapien
gttctaggagctttccctctggcag

SEQ ID NO: 4541015 - DNA, 25 bp, Homo sapien
tctaggagctttccctctggcagag

SEQ ID NO: 4541016 - DNA, 25 bp, Homo sapien
tcactgttctaggagctttccctct

SEQ ID NO: 4541017 - DNA, 25 bp, Homo sapien
tcaggaaactggtcgtggcaggcct

SEQ ID NO: 4541018 - DNA, 25 bp, Homo sapien
tggcacagaccatcaccaggaagct

SEQ ID NO: 4541019 - DNA, 25 bp, Homo sapien
aggtattccccaatcgtccgtagca

SEQ ID NO: 4541020 - DNA, 25 bp, Homo sapien
gactgacagcgtggcaactgggata

SEQ ID NO: 4541021 - DNA, 25 bp, Homo sapien
gagtggcaggcttggtgtgctggca

SEQ ID NO: 4541022 - DNA, 25 bp, Homo sapien
gtgctgggcctaagtggttctcaca

SEQ ID NO: 4541023 - DNA, 25 bp, Homo sapien
tggtgctgggcctaagtggttctca

SEQ ID NO: 4541024 - DNA, 25 bp, Homo sapien
ggtgctgggcctaagtggttctcac

SEQ ID NO: 4541025 - DNA, 25 bp, Homo sapien
tcgccgttggcgtgggctgatgtgg

SEQ ID NO: 4541026 - DNA, 25 bp, Homo sapien
tgatggctcgccgttggcgtgggct

SEQ ID NO: 4541027 - DNA, 25 bp, Homo sapien
gatgtgggctgacggctgagaagct

SEQ ID NO: 4541028 - DNA, 25 bp, Homo sapien
gctgatgtgggctgacggctgagaa

SEQ ID NO: 4541029 - DNA, 25 bp, Homo sapien
aggcacgcccgtgctcaggcagtga

SEQ ID NO: 4541030 - DNA, 25 bp, Homo sapien
ctgggcagaggcacgcccgtgctca

SEQ ID NO: 4541031 - DNA, 25 bp, Homo sapien
ccctcaaggggcatggcaagcatag

SEQ ID NO: 4541032 - DNA, 25 bp, Homo sapien
caagcgaggtccctgagagtttagg

SEQ ID NO: 4541033 - DNA, 25 bp, Homo sapien
taggcttttctacaagcgaggtccc

SEQ ID NO: 4541034 - DNA, 25 bp, Homo sapien
gagagtttaggcgttactggttgaa

SEQ ID NO: 4541035 - DNA, 25 bp, Homo sapien
cataagagcagctgttgaaggttac

SEQ ID NO: 4541036 - DNA, 25 bp, Homo sapien
ggaatgtaaagaaccgtgagcggct

SEQ ID NO: 4541037 - DNA, 25 bp, Homo sapien
caacagaccctgcaaaaagtgagga

SEQ ID NO: 4541038 - DNA, 25 bp, Homo sapien
actgcccattggtatcaggctctgg

SEQ ID NO: 4541039 - DNA, 25 bp, Homo sapien
cagtgtcactagaaaatcatggagc

SEQ ID NO: 4541040 - DNA, 25 bp, Homo sapien
ggagcctggtccagagtggagagca

SEQ ID NO: 4541041 - DNA, 25 bp, Homo sapien
cctggtccagagtggagagcaatga

SEQ ID NO: 4541042 - DNA, 25 bp, Homo sapien
gagagaccagggtccagggaatgag

SEQ ID NO: 4541043 - DNA, 25 bp, Homo sapien
gagaccagggtccagggaatgaggc

SEQ ID NO: 4541044 - DNA, 25 bp, Homo sapien
agcaggggccagaggctgagagcca

SEQ ID NO: 4541045 - DNA, 25 bp, Homo sapien
gcaggggccagaggctgagagccat

SEQ ID NO: 4541046 - DNA, 25 bp, Homo sapien
gcagcaggggccagaggctgagagc

SEQ ID NO: 4541047 - DNA, 25 bp, Homo sapien
cagcagcaggggccagaggctgaga

SEQ ID NO: 4541048 - DNA, 25 bp, Homo sapien
aacctgaggctccactgacactgta

SEQ ID NO: 4541049 - DNA, 25 bp, Homo sapien
ctgtgtgggatagccaggtgagggc

SEQ ID NO: 4541050 - DNA, 25 bp, Homo sapien
aggcaacctgaggctccactgacac

SEQ ID NO: 4541051 - DNA, 25 bp, Homo sapien
gcaacctgaggctccactgacactg

SEQ ID NO: 4541052 - DNA, 25 bp, Homo sapien
tatgtgtaacctgacagcaggtttg

SEQ ID NO: 4541053 - DNA, 25 bp, Homo sapien
tgtaacctgacagcaggtttgttac

SEQ ID NO: 4541054 - DNA, 25 bp, Homo sapien
aaacaatatgtgtaacctgacagca

SEQ ID NO: 4541055 - DNA, 25 bp, Homo sapien
caatatgtgtaacctgacagcaggt

SEQ ID NO: 4541056 - DNA, 25 bp, Homo sapien
ctgagccgctgaatatctgatcctt

SEQ ID NO: 4541057 - DNA, 25 bp, Homo sapien
gaatatctgatcctttagctctgga

SEQ ID NO: 4541058 - DNA, 25 bp, Homo sapien
cgctgaatatctgatcctttagctc

SEQ ID NO: 4541059 - DNA, 25 bp, Homo sapien
gagccgctgaatatctgatccttta

SEQ ID NO: 4541060 - DNA, 25 bp, Homo sapien
ctaatgataggggatcccaggggcc

SEQ ID NO: 4541061 - DNA, 25 bp, Homo sapien
gagggactaatgataggggatccca

SEQ ID NO: 4541062 - DNA, 25 bp, Homo sapien
gagattgcttgagttaggagccagt

SEQ ID NO: 4541063 - DNA, 25 bp, Homo sapien
caaggagattgcttgagttaggagc

SEQ ID NO: 4541064 - DNA, 25 bp, Homo sapien
gcatatgacctaacttcttggtgca

SEQ ID NO: 4541065 - DNA, 25 bp, Homo sapien
ccacttgggtagcagcccttacgta

SEQ ID NO: 4541066 - DNA, 25 bp, Homo sapien
tcttggtgcaatcagagtggtggtc

SEQ ID NO: 4541067 - DNA, 25 bp, Homo sapien
ttgccagacatactcttaggtgagg

SEQ ID NO: 4541068 - DNA, 25 bp, Homo sapien
cctttacctatgcatcagggaggga

SEQ ID NO: 4541069 - DNA, 25 bp, Homo sapien
taatggttcacaagagaagcaacat

SEQ ID NO: 4541070 - DNA, 25 bp, Homo sapien
aattaggactctaatcaggcagtag

SEQ ID NO: 4541071 - DNA, 25 bp, Homo sapien
tagttacactaacagctctgaagat

SEQ ID NO: 4541072 - DNA, 25 bp, Homo sapien
gctgggcccaaggatattgaagcca

SEQ ID NO: 4541073 - DNA, 25 bp, Homo sapien
ttttgctgggcccaaggatattgaa

SEQ ID NO: 4541074 - DNA, 25 bp, Homo sapien
ttgctgggcccaaggatattgaagc

SEQ ID NO: 4541075 - DNA, 25 bp, Homo sapien
atcttttgctgggcccaaggatatt

SEQ ID NO: 4541076 - DNA, 25 bp, Homo sapien
gtcttccaagttcatcagtgcctgc

SEQ ID NO: 4541077 - DNA, 25 bp, Homo sapien
ttgtcttccaagttcatcagtgcct

SEQ ID NO: 4541078 - DNA, 25 bp, Homo sapien
tcttccaagttcatcagtgcctgca

SEQ ID NO: 4541079 - DNA, 25 bp, Homo sapien
tgtcttccaagttcatcagtgcctg

SEQ ID NO: 4541080 - DNA, 25 bp, Homo sapien
cggaagagtgagtctctgggccaaa

SEQ ID NO: 4541081 - DNA, 25 bp, Homo sapien
tcaaaatatcggaagagtgagtctc

SEQ ID NO: 4541082 - DNA, 25 bp, Homo sapien
tctagcaactcaaaatatcggaaga

SEQ ID NO: 4541083 - DNA, 25 bp, Homo sapien
actgaagcttttctagcaactcaaa

SEQ ID NO: 4541084 - DNA, 25 bp, Homo sapien
gaggccacggccacacttacccaaa

SEQ ID NO: 4541085 - DNA, 25 bp, Homo sapien
ctttttacaatgagcaaagaggcca

SEQ ID NO: 4541086 - DNA, 25 bp, Homo sapien
agaggccacggccacacttacccaa

SEQ ID NO: 4541087 - DNA, 25 bp, Homo sapien
tttacaatgagcaaagaggccacgg

SEQ ID NO: 4541088 - DNA, 25 bp, Homo sapien
atagattcagaaaatctggattcag

SEQ ID NO: 4541089 - DNA, 25 bp, Homo sapien
ggaagaataggaagaggatgtggat

SEQ ID NO: 4541090 - DNA, 25 bp, Homo sapien
aagaataggaagaggatgtggatga

SEQ ID NO: 4541091 - DNA, 25 bp, Homo sapien
cagaaaatctggattcagaagagga

SEQ ID NO: 4541092 - DNA, 25 bp, Homo sapien
tttcaaagtccctacaatggcaccc

SEQ ID NO: 4541093 - DNA, 25 bp, Homo sapien
gacaatgagggccaaactactccca

SEQ ID NO: 4541094 - DNA, 25 bp, Homo sapien
aatggcacccataaccctacaggat

SEQ ID NO: 4541095 - DNA, 25 bp, Homo sapien
cactctggcctaagctgtcatcatt

SEQ ID NO: 4541096 - DNA, 25 bp, Homo sapien
catggctactatgatacttcgaaag

SEQ ID NO: 4541097 - DNA, 25 bp, Homo sapien
gaagcagtgcataccaatgatccaa

SEQ ID NO: 4541098 - DNA, 25 bp, Homo sapien
tcgaaagataatggagccaagcaac

SEQ ID NO: 4541099 - DNA, 25 bp, Homo sapien
gaagatgcgactgacttcaggcacc

SEQ ID NO: 4541100 - DNA, 25 bp, Homo sapien
aaaaaatatgtaacacttcataaat

SEQ ID NO: 4541101 - DNA, 25 bp, Homo sapien
taacacttcataaatttgtgtttca

SEQ ID NO: 4541102 - DNA, 25 bp, Homo sapien
catgctaatcttctctatatcgttc

SEQ ID NO: 4541103 - DNA, 25 bp, Homo sapien
ttgtgtttcatccttgcacaagggc

SEQ ID NO: 4541104 - DNA, 25 bp, Homo sapien
gagaatacatgatactccaggtcct

SEQ ID NO: 4541105 - DNA, 25 bp, Homo sapien
tttatctaccttgccccctgcttta

SEQ ID NO: 4541106 - DNA, 25 bp, Homo sapien
ccctgctttagcttgcaacagtcaa

SEQ ID NO: 4541107 - DNA, 25 bp, Homo sapien
tgtttcatattctatgttaagccct

SEQ ID NO: 4541108 - DNA, 25 bp, Homo sapien
tatgttaagccctcacatttatcta

SEQ ID NO: 4541109 - DNA, 25 bp, Homo sapien
gaatttgacggaattgtgcaaggag

SEQ ID NO: 4541110 - DNA, 25 bp, Homo sapien
agctgaagccacaccgattggcctg

SEQ ID NO: 4541111 - DNA, 25 bp, Homo sapien
aataccacaacctcgggaagcaggg

SEQ ID NO: 4541112 - DNA, 25 bp, Homo sapien
acggaattgtgcaaggagtttgaga

SEQ ID NO: 4541113 - DNA, 25 bp, Homo sapien
tataagtaaaatacaccccaaggca

SEQ ID NO: 4541114 - DNA, 25 bp, Homo sapien
tctgagaagtgcttactattcagcc

SEQ ID NO: 4541115 - DNA, 25 bp, Homo sapien
tgttctttcgattcacctaggcaca

SEQ ID NO: 4541116 - DNA, 25 bp, Homo sapien
taagtgctcagtaaccggcagatgc

SEQ ID NO: 4541117 - DNA, 25 bp, Homo sapien
tagccacttaagaaggatctccagg

SEQ ID NO: 4541118 - DNA, 25 bp, Homo sapien
aacagaaaagttggatagccactta

SEQ ID NO: 4541119 - DNA, 25 bp, Homo sapien
aataagcaagataaaccaagctgcc

SEQ ID NO: 4541120 - DNA, 25 bp, Homo sapien
ggtcagcttcaatggccatagtttg

SEQ ID NO: 4541121 - DNA, 25 bp, Homo sapien
caagtcacttgcgatccactctggg

SEQ ID NO: 4541122 - DNA, 25 bp, Homo sapien
gaaatcaacattgtggtgctctggc

SEQ ID NO: 4541123 - DNA, 25 bp, Homo sapien
ttatctcagtcccaaagttcacaag

SEQ ID NO: 4541124 - DNA, 25 bp, Homo sapien
tataacgaatgtagaaacaagccac

SEQ ID NO: 4541125 - DNA, 25 bp, Homo sapien
ggaacgaatagcagaaattgcctca

SEQ ID NO: 4541126 - DNA, 25 bp, Homo sapien
ttaatggaaatagagaccaggagcc

SEQ ID NO: 4541127 - DNA, 25 bp, Homo sapien
ccaggaatcttagccagtgaagtga

SEQ ID NO: 4541128 - DNA, 25 bp, Homo sapien
cccagtgaagtctacccaggaatct

SEQ ID NO: 4541129 - DNA, 25 bp, Homo sapien
gtatttcaaccatcagtacgatcgt

SEQ ID NO: 4541130 - DNA, 25 bp, Homo sapien
gacaatggagtttgggaagcaaaaa

SEQ ID NO: 4541131 - DNA, 25 bp, Homo sapien
taagcagtgagaatgagacaatgga

SEQ ID NO: 4541132 - DNA, 25 bp, Homo sapien
aaacatacagagtggagttctttct

SEQ ID NO: 4541133 - DNA, 25 bp, Homo sapien
tccggcccacaaagaaagaggtggc

SEQ ID NO: 4541134 - DNA, 25 bp, Homo sapien
ccacaaagaaagaggtggcctctga

SEQ ID NO: 4541135 - DNA, 25 bp, Homo sapien
ccatccggcccacaaagaaagaggt

SEQ ID NO: 4541136 - DNA, 25 bp, Homo sapien
cacaaagaaagaggtggcctctgac

SEQ ID NO: 4541137 - DNA, 25 bp, Homo sapien
cagcgcacatgaagcctgctcaaca

SEQ ID NO: 4541138 - DNA, 25 bp, Homo sapien
cgttgaggctttatagagacgccca

SEQ ID NO: 4541139 - DNA, 25 bp, Homo sapien
tgaaatctgttctatacgttgaggc

SEQ ID NO: 4541140 - DNA, 25 bp, Homo sapien
gcctctgggcatgtgaaatctgttc

SEQ ID NO: 4541141 - DNA, 25 bp, Homo sapien
ctggtgttgatctcccaacataagt

SEQ ID NO: 4541142 - DNA, 25 bp, Homo sapien
tgttgatctcccaacataagtttct

SEQ ID NO: 4541143 - DNA, 25 bp, Homo sapien
cataagtttcttctggcgggaagga

SEQ ID NO: 4541144 - DNA, 25 bp, Homo sapien
ataagtttcttctggcgggaaggat

SEQ ID NO: 4541145 - DNA, 25 bp, Homo sapien
tatcgatgagacgtgaacgaatggc

SEQ ID NO: 4541146 - DNA, 25 bp, Homo sapien
cttggctcaagccttgcaaatgctc

SEQ ID NO: 4541147 - DNA, 25 bp, Homo sapien
gagagagaaagtatcgatgagacgt

SEQ ID NO: 4541148 - DNA, 25 bp, Homo sapien
acgtgaacgaatggcatcagctcgg

SEQ ID NO: 4541149 - DNA, 25 bp, Homo sapien
gcccttcttgttggtaagcggccat

SEQ ID NO: 4541150 - DNA, 25 bp, Homo sapien
ctgcatctgcccttcttgttggtaa

SEQ ID NO: 4541151 - DNA, 25 bp, Homo sapien
ctgcccttcttgttggtaagcggcc

SEQ ID NO: 4541152 - DNA, 25 bp, Homo sapien
catctgcccttcttgttggtaagcg

SEQ ID NO: 4541153 - DNA, 25 bp, Homo sapien
cggctacccctacgcaggacgagct

SEQ ID NO: 4541154 - DNA, 25 bp, Homo sapien
ccctgagcccggctacccctacgca

SEQ ID NO: 4541155 - DNA, 25 bp, Homo sapien
cctgacttcacgcttccacctccag

SEQ ID NO: 4541156 - DNA, 25 bp, Homo sapien
actcagtcctgacttcacgcttcca

SEQ ID NO: 4541157 - DNA, 25 bp, Homo sapien
cagccacgctcgcccagacactcgc

SEQ ID NO: 4541158 - DNA, 25 bp, Homo sapien
tgtagctatatcttttctgcgtgag

SEQ ID NO: 4541159 - DNA, 25 bp, Homo sapien
gcacatttctcattcccgggagctg

SEQ ID NO: 4541160 - DNA, 25 bp, Homo sapien
gctgatcggcccaaggaaaacccga

SEQ ID NO: 4541161 - DNA, 25 bp, Homo sapien
tagaactcacggacgacaacttcga

SEQ ID NO: 4541162 - DNA, 25 bp, Homo sapien
tctactaaagatacaggcaggcttc

SEQ ID NO: 4541163 - DNA, 25 bp, Homo sapien
agtgactagacactgcacactacta

SEQ ID NO: 4541164 - DNA, 25 bp, Homo sapien
ctagacactgcacactactagactc

SEQ ID NO: 4541165 - DNA, 25 bp, Homo sapien
gactagacactgcacactactagac

SEQ ID NO: 4541166 - DNA, 25 bp, Homo sapien
gcctggccaacatggtgaaacccca

SEQ ID NO: 4541167 - DNA, 25 bp, Homo sapien
acctgaggtcaagagttcgagaccc

SEQ ID NO: 4541168 - DNA, 25 bp, Homo sapien
ttggaaggctgagacaggacaatcg

SEQ ID NO: 4541169 - DNA, 25 bp, Homo sapien
tttgacaggctgaggagggcggatc

SEQ ID NO: 4541170 - DNA, 25 bp, Homo sapien
ggcaatataagtttgtccccatctc

SEQ ID NO: 4541171 - DNA, 25 bp, Homo sapien
tactaggtcgttggcatttattgat

SEQ ID NO: 4541172 - DNA, 25 bp, Homo sapien
tattctaaatatactaggtcgttgg

SEQ ID NO: 4541173 - DNA, 25 bp, Homo sapien
ggtccctactcttgtgaagcttaca

SEQ ID NO: 4541174 - DNA, 25 bp, Homo sapien
tatatggataaccatctcataccca

SEQ ID NO: 4541175 - DNA, 25 bp, Homo sapien
cacacaaaggtatgtgtgttatctc

SEQ ID NO: 4541176 - DNA, 25 bp, Homo sapien
atgtatatatggataaccatctcat

SEQ ID NO: 4541177 - DNA, 25 bp, Homo sapien
acacaaaggtatgtgtgttatctcc

SEQ ID NO: 4541178 - DNA, 25 bp, Homo sapien
caagtttgaggacaagactgtggca

SEQ ID NO: 4541179 - DNA, 25 bp, Homo sapien
tattttggcgtaaacagtctatttg

SEQ ID NO: 4541180 - DNA, 25 bp, Homo sapien
tgtttacctcagttattaagccgag

SEQ ID NO: 4541181 - DNA, 25 bp, Homo sapien
gaaaacatgtgagtacttctttgta

SEQ ID NO: 4541182 - DNA, 25 bp, Homo sapien
aaaaggactcttccatcagagatgg

SEQ ID NO: 4541183 - DNA, 25 bp, Homo sapien
gggaattattacctctcagggccga

SEQ ID NO: 4541184 - DNA, 25 bp, Homo sapien
ggccgagaggacagaatggatataa

SEQ ID NO: 4541185 - DNA, 25 bp, Homo sapien
ggactaggacccatatgggaattat

SEQ ID NO: 4541186 - DNA, 25 bp, Homo sapien
taggctgtccatgccctaaggatgg

SEQ ID NO: 4541187 - DNA, 25 bp, Homo sapien
tcagtacaggtagctacggagcatc

SEQ ID NO: 4541188 - DNA, 25 bp, Homo sapien
tcacggcagctgtagactgactggg

SEQ ID NO: 4541189 - DNA, 25 bp, Homo sapien
cctgtcaagggtgtggcatcacgca

SEQ ID NO: 4541190 - DNA, 25 bp, Homo sapien
tgtttccttagagaggctaccaggc

SEQ ID NO: 4541191 - DNA, 25 bp, Homo sapien
tgtgtttcactaagcagaggctcaa

SEQ ID NO: 4541192 - DNA, 25 bp, Homo sapien
cattttcagtacatgggtaacaccc

SEQ ID NO: 4541193 - DNA, 25 bp, Homo sapien
ccagtggtcagcataagaaaagcag

SEQ ID NO: 4541194 - DNA, 25 bp, Homo sapien
tcacagcgacgcttttcttctctgt

SEQ ID NO: 4541195 - DNA, 25 bp, Homo sapien
tccaggatgagacctttaatgtggg

SEQ ID NO: 4541196 - DNA, 25 bp, Homo sapien
ggatgagacctttaatgtgggacaa

SEQ ID NO: 4541197 - DNA, 25 bp, Homo sapien
tttctggtgaaggtactcacagcga

SEQ ID NO: 4541198 - DNA, 25 bp, Homo sapien
tcctgaactttttatattcctggat

SEQ ID NO: 4541199 - DNA, 25 bp, Homo sapien
attcctggattatcttgtcttccag

SEQ ID NO: 4541200 - DNA, 25 bp, Homo sapien
cctggattatcttgtcttccaggac

SEQ ID NO: 4541201 - DNA, 25 bp, Homo sapien
cttcctgaactttttatattcctgg

SEQ ID NO: 4541202 - DNA, 25 bp, Homo sapien
aggcgcttgtagtctcagctgctcg

SEQ ID NO: 4541203 - DNA, 25 bp, Homo sapien
aaaaaagagagaggggccaggcgca

SEQ ID NO: 4541204 - DNA, 25 bp, Homo sapien
cggcaggagaatggggcaggagaat

SEQ ID NO: 4541205 - DNA, 25 bp, Homo sapien
ctgcggcaggagaatggggcaggag

SEQ ID NO: 4541206 - DNA, 25 bp, Homo sapien
gtttccttgtcactttgcttagtca

SEQ ID NO: 4541207 - DNA, 25 bp, Homo sapien
gtcactttgcttagtcactttataa

SEQ ID NO: 4541208 - DNA, 25 bp, Homo sapien
acaggtttccttgtcactttgctta

SEQ ID NO: 4541209 - DNA, 25 bp, Homo sapien
ttgcttagtcactttataaacacag

SEQ ID NO: 4541210 - DNA, 25 bp, Homo sapien
gatgcggtattcagcataatctgtc

SEQ ID NO: 4541211 - DNA, 25 bp, Homo sapien
ctgctcccagctctatgaacctttg

SEQ ID NO: 4541212 - DNA, 25 bp, Homo sapien
caacacgggcatgcaggatgcggta

SEQ ID NO: 4541213 - DNA, 25 bp, Homo sapien
tttggcttgcagtcccaacacgggc

SEQ ID NO: 4541214 - DNA, 25 bp, Homo sapien
gcttccaggaagtgtatcttaatat

SEQ ID NO: 4541215 - DNA, 25 bp, Homo sapien
taatatatgaacaagtcttgatgaa

SEQ ID NO: 4541216 - DNA, 25 bp, Homo sapien
ttcaatttcattgcccctgaaaagc

SEQ ID NO: 4541217 - DNA, 25 bp, Homo sapien
aggagcagagagttgtcaccttcaa

SEQ ID NO: 4541218 - DNA, 25 bp, Homo sapien
tagtctggtatatcttcaggacttg

SEQ ID NO: 4541219 - DNA, 25 bp, Homo sapien
aggaggtagtctggtatatcttcag

SEQ ID NO: 4541220 - DNA, 25 bp, Homo sapien
gtctggtatatcttcaggacttggg

SEQ ID NO: 4541221 - DNA, 25 bp, Homo sapien
aggtagtctggtatatcttcaggac

SEQ ID NO: 4541222 - DNA, 25 bp, Homo sapien
cttctccctcttgtaaatcctgatt

SEQ ID NO: 4541223 - DNA, 25 bp, Homo sapien
ttgtaaatcctgattggtcaggcct

SEQ ID NO: 4541224 - DNA, 25 bp, Homo sapien
gaactgtgttctaatctggggtcca

SEQ ID NO: 4541225 - DNA, 25 bp, Homo sapien
actaaaggcagagttctgaacctct

SEQ ID NO: 4541226 - DNA, 25 bp, Homo sapien
tgaacaggttctctgtttggaacat

SEQ ID NO: 4541227 - DNA, 25 bp, Homo sapien
gaacaggttctctgtttggaacatg

SEQ ID NO: 4541228 - DNA, 25 bp, Homo sapien
aagggaatgggacagatgaagacca

SEQ ID NO: 4541229 - DNA, 25 bp, Homo sapien
agcttcccatgttagtcccacccca

SEQ ID NO: 4541230 - DNA, 25 bp, Homo sapien
tttaagggaatgggacagatgaaga

SEQ ID NO: 4541231 - DNA, 25 bp, Homo sapien
gcttcccatgttagtcccaccccat

SEQ ID NO: 4541232 - DNA, 25 bp, Homo sapien
gagtgactgtccttggttgcttgcc

SEQ ID NO: 4541233 - DNA, 25 bp, Homo sapien
catgtgctcccttgaggatcctggg

SEQ ID NO: 4541234 - DNA, 25 bp, Homo sapien
tgaggatcctgggagtgactgtcct

SEQ ID NO: 4541235 - DNA, 25 bp, Homo sapien
ccactgtgccatgtgctcccttgag

SEQ ID NO: 4541236 - DNA, 25 bp, Homo sapien
gcatctccttcagaatagcctcctg

SEQ ID NO: 4541237 - DNA, 25 bp, Homo sapien
catggctgcccaaataatgaggcgc

SEQ ID NO: 4541238 - DNA, 25 bp, Homo sapien
tctggcatcttcagtcaggttgtgt

SEQ ID NO: 4541239 - DNA, 25 bp, Homo sapien
tctgccaactctcaggatgtctggc

SEQ ID NO: 4541240 - DNA, 25 bp, Homo sapien
cccaggcagtggaggctgttaggcc

SEQ ID NO: 4541241 - DNA, 25 bp, Homo sapien
ctgagtgagcccaggcagtggaggc

SEQ ID NO: 4541242 - DNA, 25 bp, Homo sapien
gcagtggaggctgttaggcccagac

SEQ ID NO: 4541243 - DNA, 25 bp, Homo sapien
aggcagtggaggctgttaggcccag

SEQ ID NO: 4541244 - DNA, 25 bp, Homo sapien
cttgccggctacctgttccccctca

SEQ ID NO: 4541245 - DNA, 25 bp, Homo sapien
tcttgccggctacctgttccccctc

SEQ ID NO: 4541246 - DNA, 25 bp, Homo sapien
ttgccggctacctgttccccctcac

SEQ ID NO: 4541247 - DNA, 25 bp, Homo sapien
ctgaggaagcgttggcacacaaggt

SEQ ID NO: 4541248 - DNA, 25 bp, Homo sapien
acacaaggtccaagctaccaccagc

SEQ ID NO: 4541249 - DNA, 25 bp, Homo sapien
aggaagcgttggcacacaaggtcca

SEQ ID NO: 4541250 - DNA, 25 bp, Homo sapien
caagctaccaccagcgccctcctga

SEQ ID NO: 4541251 - DNA, 25 bp, Homo sapien
caaccagggcctgggagtctcagat

SEQ ID NO: 4541252 - DNA, 25 bp, Homo sapien
agaagaggcaggaccaaccagggcc

SEQ ID NO: 4541253 - DNA, 25 bp, Homo sapien
ctatgaaggagaagaggcaggacca

SEQ ID NO: 4541254 - DNA, 25 bp, Homo sapien
aagaggcaggaccaaccagggcctg

SEQ ID NO: 4541255 - DNA, 25 bp, Homo sapien
gggagccagtccgtaagtaagacta

SEQ ID NO: 4541256 - DNA, 25 bp, Homo sapien
tggaaggagacggtaagccccatga

SEQ ID NO: 4541257 - DNA, 25 bp, Homo sapien
agtaagactaagacgggtcccacag

SEQ ID NO: 4541258 - DNA, 25 bp, Homo sapien
gacggtaagccccatgaagtcagcc

SEQ ID NO: 4541259 - DNA, 25 bp, Homo sapien
ggaggccgaaacagcacagtcccct

SEQ ID NO: 4541260 - DNA, 25 bp, Homo sapien
cctcctcgccccacttggagttcag

SEQ ID NO: 4541261 - DNA, 25 bp, Homo sapien
gcctgagttccccaggaggccgaaa

SEQ ID NO: 4541262 - DNA, 25 bp, Homo sapien
agttccccaggaggccgaaacagca

SEQ ID NO: 4541263 - DNA, 25 bp, Homo sapien
cctcggtggccttggaaagcaatca

SEQ ID NO: 4541264 - DNA, 25 bp, Homo sapien
ctcggtggccttggaaagcaatcac

SEQ ID NO: 4541265 - DNA, 25 bp, Homo sapien
ccctcggtggccttggaaagcaatc

SEQ ID NO: 4541266 - DNA, 25 bp, Homo sapien
aggccagagcttgcggaagccgctc

SEQ ID NO: 4541267 - DNA, 25 bp, Homo sapien
accttctccagggtcgccggctgag

SEQ ID NO: 4541268 - DNA, 25 bp, Homo sapien
gggatcacctgcctagcgggcttca

SEQ ID NO: 4541269 - DNA, 25 bp, Homo sapien
agcgaagatgtgaccgttgagcgca

SEQ ID NO: 4541270 - DNA, 25 bp, Homo sapien
tgttgccgctgacactcttgcagcg

SEQ ID NO: 4541271 - DNA, 25 bp, Homo sapien
gcagcgtcgttgagcctgagcagta

SEQ ID NO: 4541272 - DNA, 25 bp, Homo sapien
tagtccgggcagcttgcgtgaagca

SEQ ID NO: 4541273 - DNA, 25 bp, Homo sapien
aagcagagccggagctgtcctctca

SEQ ID NO: 4541274 - DNA, 25 bp, Homo sapien
ggcgacgagttcgagtgcaagcagc

SEQ ID NO: 4541275 - DNA, 25 bp, Homo sapien
ggccacaggcgagggccaccaccgc

SEQ ID NO: 4541276 - DNA, 25 bp, Homo sapien
acgagttcgagtgcaagcagcacgg

SEQ ID NO: 4541277 - DNA, 25 bp, Homo sapien
cgacgagttcgagtgcaagcagcac

SEQ ID NO: 4541278 - DNA, 25 bp, Homo sapien
taggatccgcatgaatcgctttggg

SEQ ID NO: 4541279 - DNA, 25 bp, Homo sapien
tctctaagtgaaagctgaacctgca

SEQ ID NO: 4541280 - DNA, 25 bp, Homo sapien
accccttgagggtttcagccgcaga

SEQ ID NO: 4541281 - DNA, 25 bp, Homo sapien
gggctatcggaagagctatccccag

SEQ ID NO: 4541282 - DNA, 25 bp, Homo sapien
taaacacgcgtcagagtggtgagac

SEQ ID NO: 4541283 - DNA, 25 bp, Homo sapien
gcctaaacacgcgtcagagtggtga

SEQ ID NO: 4541284 - DNA, 25 bp, Homo sapien
ctcgtggcctaaacacgcgtcagag

SEQ ID NO: 4541285 - DNA, 25 bp, Homo sapien
cgcgtcagagtggtgagaccgctcc

SEQ ID NO: 4541286 - DNA, 25 bp, Homo sapien
catccttccacctcacaccctcgag

SEQ ID NO: 4541287 - DNA, 25 bp, Homo sapien
gggattacaaggtatgtgcaccatg

SEQ ID NO: 4541288 - DNA, 25 bp, Homo sapien
gattacaaggtatgtgcaccatgcc

SEQ ID NO: 4541289 - DNA, 25 bp, Homo sapien
cttccacctcacaccctcgagtagc

SEQ ID NO: 4541290 - DNA, 25 bp, Homo sapien
tccaactccatagtctgtgactttt

SEQ ID NO: 4541291 - DNA, 25 bp, Homo sapien
caatacttccaagctgcatgttcac

SEQ ID NO: 4541292 - DNA, 25 bp, Homo sapien
tgtgacttttggagtcctccaatac

SEQ ID NO: 4541293 - DNA, 25 bp, Homo sapien
ttatctaatctcagccactgatcca

SEQ ID NO: 4541294 - DNA, 25 bp, Homo sapien
tctacgggcgttctttcagggcgac

SEQ ID NO: 4541295 - DNA, 25 bp, Homo sapien
caaataagtggctgagaggtggtcc

SEQ ID NO: 4541296 - DNA, 25 bp, Homo sapien
catgaggtcactctgcacggtcacg

SEQ ID NO: 4541297 - DNA, 25 bp, Homo sapien
tagagtactcgtaacacagaactgg

SEQ ID NO: 4541298 - DNA, 25 bp, Homo sapien
caaggcgtttctctgggcgcgctct

SEQ ID NO: 4541299 - DNA, 25 bp, Homo sapien
aaatcgagccctttgcccacggcta

SEQ ID NO: 4541300 - DNA, 25 bp, Homo sapien
gttggagccgctgccgtcgccatga

SEQ ID NO: 4541301 - DNA, 25 bp, Homo sapien
gtcgccatgacccgtgagcaccgag

SEQ ID NO: 4541302 - DNA, 25 bp, Homo sapien
ttccgcggtgtaaggagaaggccag

SEQ ID NO: 4541303 - DNA, 25 bp, Homo sapien
cttccgcggtgtaaggagaaggcca

SEQ ID NO: 4541304 - DNA, 25 bp, Homo sapien
tccgcggtgtaaggagaaggccagc

SEQ ID NO: 4541305 - DNA, 25 bp, Homo sapien
cgcggtgtaaggagaaggccagcgc

SEQ ID NO: 4541306 - DNA, 25 bp, Homo sapien
cctcccttctctagtccgtattttg

SEQ ID NO: 4541307 - DNA, 25 bp, Homo sapien
tcccttctctagtccgtattttgac

SEQ ID NO: 4541308 - DNA, 25 bp, Homo sapien
ctcccttctctagtccgtattttga

SEQ ID NO: 4541309 - DNA, 25 bp, Homo sapien
tggcagattcgccactcccccctac

SEQ ID NO: 4541310 - DNA, 25 bp, Homo sapien
ctggcccgtggcagattcgccactc

SEQ ID NO: 4541311 - DNA, 25 bp, Homo sapien
gcccgtggcagattcgccactcccc

SEQ ID NO: 4541312 - DNA, 25 bp, Homo sapien
gtggcagattcgccactccccccta

SEQ ID NO: 4541313 - DNA, 25 bp, Homo sapien
gggcccggagattgaagtggtgttg

SEQ ID NO: 4541314 - DNA, 25 bp, Homo sapien
caagcagcctgggcctcgatgggcc

SEQ ID NO: 4541315 - DNA, 25 bp, Homo sapien
tgaagtggtgttggatcctgctgct

SEQ ID NO: 4541316 - DNA, 25 bp, Homo sapien
agattgaagtggtgttggatcctgc

SEQ ID NO: 4541317 - DNA, 25 bp, Homo sapien
ctggggtagaagggtcgccggtgtg

SEQ ID NO: 4541318 - DNA, 25 bp, Homo sapien
ggcagagcggcccccgcgtctcacc

SEQ ID NO: 4541319 - DNA, 25 bp, Homo sapien
gagcggcccccgcgtctcaccttta

SEQ ID NO: 4541320 - DNA, 25 bp, Homo sapien
cagagcggcccccgcgtctcacctt

SEQ ID NO: 4541321 - DNA, 25 bp, Homo sapien
ttaggcggtaaccagcgtgagctcg

SEQ ID NO: 4541322 - DNA, 25 bp, Homo sapien
agatgacgggctttctgctgccgcc

SEQ ID NO: 4541323 - DNA, 25 bp, Homo sapien
cagagcgactcggttaagggaaagc

SEQ ID NO: 4541324 - DNA, 25 bp, Homo sapien
gctcgcccgccagaagaatatgaaa

SEQ ID NO: 4541325 - DNA, 25 bp, Homo sapien
gaggaacccaagtagctttgtggct

SEQ ID NO: 4541326 - DNA, 25 bp, Homo sapien
gtggcttcgtgtccaaccctcttgc

SEQ ID NO: 4541327 - DNA, 25 bp, Homo sapien
ctcggagatcatgcagcagaagcag

SEQ ID NO: 4541328 - DNA, 25 bp, Homo sapien
ccagggactcggagatcatgcagca

SEQ ID NO: 4541329 - DNA, 25 bp, Homo sapien
tttgccctgagtctgcagcgggtcc

SEQ ID NO: 4541330 - DNA, 25 bp, Homo sapien
tgtggggctcaccccaaagtattaa

SEQ ID NO: 4541331 - DNA, 25 bp, Homo sapien
accgatggcattccctttgccctga

SEQ ID NO: 4541332 - DNA, 25 bp, Homo sapien
tccttgagcgcctggtttgactggg

SEQ ID NO: 4541333 - DNA, 25 bp, Homo sapien
gggatggggttggaagaatgactgc

SEQ ID NO: 4541334 - DNA, 25 bp, Homo sapien
ggatggggttggaagaatgactgcc

SEQ ID NO: 4541335 - DNA, 25 bp, Homo sapien
ggggatggggttggaagaatgactg

SEQ ID NO: 4541336 - DNA, 25 bp, Homo sapien
caccatctctaggatggagttggcc

SEQ ID NO: 4541337 - DNA, 25 bp, Homo sapien
agttggcctaagagtgaatgctgca

SEQ ID NO: 4541338 - DNA, 25 bp, Homo sapien
tccggatatgcagtagaggaatcct

SEQ ID NO: 4541339 - DNA, 25 bp, Homo sapien
aatgacaaccaaacaagtactccgg

SEQ ID NO: 4541340 - DNA, 25 bp, Homo sapien
tgctgtcaagcgttcactttctctt

SEQ ID NO: 4541341 - DNA, 25 bp, Homo sapien
ctcatggaatgagggtggttttgtc

SEQ ID NO: 4541342 - DNA, 25 bp, Homo sapien
tggtcagctgctgtcaagcgttcac

SEQ ID NO: 4541343 - DNA, 25 bp, Homo sapien
ctcttctgtcattcctcatggaatg

SEQ ID NO: 4541344 - DNA, 25 bp, Homo sapien
tagctccagtgagtcagacactctg

SEQ ID NO: 4541345 - DNA, 25 bp, Homo sapien
gtattgacttcagcccaaacggaga

SEQ ID NO: 4541346 - DNA, 25 bp, Homo sapien
agccccagatagaggagtacgcagg

SEQ ID NO: 4541347 - DNA, 25 bp, Homo sapien
gatgcagatgtaacagtagctccag

SEQ ID NO: 4541348 - DNA, 25 bp, Homo sapien
gtcttttccagttctgctccctcat

SEQ ID NO: 4541349 - DNA, 25 bp, Homo sapien
cttttccagttctgctccctcatag

SEQ ID NO: 4541350 - DNA, 25 bp, Homo sapien
aggtcttttccagttctgctccctc

SEQ ID NO: 4541351 - DNA, 25 bp, Homo sapien
ccttgatgaaggtcttttccagttc

SEQ ID NO: 4541352 - DNA, 25 bp, Homo sapien
cagttggtaagggtaaccatgacat

SEQ ID NO: 4541353 - DNA, 25 bp, Homo sapien
aagacgaagtggaaggcagaatagt

SEQ ID NO: 4541354 - DNA, 25 bp, Homo sapien
gcagaatagttgtaggaaagatgct

SEQ ID NO: 4541355 - DNA, 25 bp, Homo sapien
gatgctggacttggactggaggagc

SEQ ID NO: 4541356 - DNA, 25 bp, Homo sapien
gagaggaaatggctgctgggagcag

SEQ ID NO: 4541357 - DNA, 25 bp, Homo sapien
ctgggagcagagctgctgaaacacc

SEQ ID NO: 4541358 - DNA, 25 bp, Homo sapien
gcagagctgctgaaacacctcttcc

SEQ ID NO: 4541359 - DNA, 25 bp, Homo sapien
gggagcagagctgctgaaacacctc

SEQ ID NO: 4541360 - DNA, 25 bp, Homo sapien
tcagggcagcagaaacacagtgagg

SEQ ID NO: 4541361 - DNA, 25 bp, Homo sapien
ctttgtctgcctccactgtttcagg

SEQ ID NO: 4541362 - DNA, 25 bp, Homo sapien
tccactgtttcagggcagcagaaac

SEQ ID NO: 4541363 - DNA, 25 bp, Homo sapien
gcctccactgtttcagggcagcaga

SEQ ID NO: 4541364 - DNA, 25 bp, Homo sapien
ctgaaactcatagctgtaaaccttg

SEQ ID NO: 4541365 - DNA, 25 bp, Homo sapien
tgacaatccacaggggtccaaatac

SEQ ID NO: 4541366 - DNA, 25 bp, Homo sapien
tcatagctgtaaaccttgacaatcc

SEQ ID NO: 4541367 - DNA, 25 bp, Homo sapien
tccacaggggtccaaatacctcagc

SEQ ID NO: 4541368 - DNA, 25 bp, Homo sapien
ctccacccttgacacctttacgcac

SEQ ID NO: 4541369 - DNA, 25 bp, Homo sapien
tcagcattgctagagagatatctgg

SEQ ID NO: 4541370 - DNA, 25 bp, Homo sapien
acacaagcatacatgatgctagcac

SEQ ID NO: 4541371 - DNA, 25 bp, Homo sapien
caggcaggcacagggtgtgattctg

SEQ ID NO: 4541372 - DNA, 25 bp, Homo sapien
catgatgctagcactcagcattgct

SEQ ID NO: 4541373 - DNA, 25 bp, Homo sapien
aaaggtcttagcatggagaatccag

SEQ ID NO: 4541374 - DNA, 25 bp, Homo sapien
ggtcttagcatggagaatccaggtc

SEQ ID NO: 4541375 - DNA, 25 bp, Homo sapien
aaaaaggtcttagcatggagaatcc

SEQ ID NO: 4541376 - DNA, 25 bp, Homo sapien
tcttagcatggagaatccaggtcct

SEQ ID NO: 4541377 - DNA, 25 bp, Homo sapien
ctctctggaggacggctggacagtg

SEQ ID NO: 4541378 - DNA, 25 bp, Homo sapien
gatacatgatatagcagctgatgac

SEQ ID NO: 4541379 - DNA, 25 bp, Homo sapien
tcagatacatgatatagcagctgat

SEQ ID NO: 4541380 - DNA, 25 bp, Homo sapien
gctgatgacagaagcttgtaggagg

SEQ ID NO: 4541381 - DNA, 25 bp, Homo sapien
agtataattgctttagtctacaggc

SEQ ID NO: 4541382 - DNA, 25 bp, Homo sapien
gaaacttgctatgcttttaaggccc

SEQ ID NO: 4541383 - DNA, 25 bp, Homo sapien
aataattgagattagggaggtaatg

SEQ ID NO: 4541384 - DNA, 25 bp, Homo sapien
caaaacctggaatgctgtaggacat

SEQ ID NO: 4541385 - DNA, 25 bp, Homo sapien
ggagcatcttgttaagcaggcagcc

SEQ ID NO: 4541386 - DNA, 25 bp, Homo sapien
tgaggcggatgcaaggagcgatgga

SEQ ID NO: 4541387 - DNA, 25 bp, Homo sapien
tataatagtggaataggagcacagc

SEQ ID NO: 4541388 - DNA, 25 bp, Homo sapien
cagctgggtgtgtataatagtggaa

SEQ ID NO: 4541389 - DNA, 25 bp, Homo sapien
gaaccagctacagtcttgagctgca

SEQ ID NO: 4541390 - DNA, 25 bp, Homo sapien
aggaaccagctacagtcttgagctg

SEQ ID NO: 4541391 - DNA, 25 bp, Homo sapien
ccagctacagtcttgagctgcacct

SEQ ID NO: 4541392 - DNA, 25 bp, Homo sapien
ctacagtcttgagctgcacctgtct

SEQ ID NO: 4541393 - DNA, 25 bp, Homo sapien
cctccacagatgccaatgtaatgcc

SEQ ID NO: 4541394 - DNA, 25 bp, Homo sapien
aataagcaccaactgcagtaggatg

SEQ ID NO: 4541395 - DNA, 25 bp, Homo sapien
gtaataagcaccaactgcagtagga

SEQ ID NO: 4541396 - DNA, 25 bp, Homo sapien
taagcaccaactgcagtaggatgaa

SEQ ID NO: 4541397 - DNA, 25 bp, Homo sapien
cacccggccattactcctcttctta

SEQ ID NO: 4541398 - DNA, 25 bp, Homo sapien
cctcttcttacccacttgttatctt

SEQ ID NO: 4541399 - DNA, 25 bp, Homo sapien
tcttacccacttgttatcttagaaa

SEQ ID NO: 4541400 - DNA, 25 bp, Homo sapien
gcacccggccattactcctcttctt

SEQ ID NO: 4541401 - DNA, 25 bp, Homo sapien
gcacagagacctaacaggaacagca

SEQ ID NO: 4541402 - DNA, 25 bp, Homo sapien
ggaatgcagaaggcaatagcacaga

SEQ ID NO: 4541403 - DNA, 25 bp, Homo sapien
tagcacagagacctaacaggaacag

SEQ ID NO: 4541404 - DNA, 25 bp, Homo sapien
aatagcacagagacctaacaggaac

SEQ ID NO: 4541405 - DNA, 25 bp, Homo sapien
aaggcaaaggacagtgaagagtgcc

SEQ ID NO: 4541406 - DNA, 25 bp, Homo sapien
acagtgaagagtgcctatggggaaa

SEQ ID NO: 4541407 - DNA, 25 bp, Homo sapien
aaaaggcaaaggacagtgaagagtg

SEQ ID NO: 4541408 - DNA, 25 bp, Homo sapien
gcaaaggacagtgaagagtgcctat

SEQ ID NO: 4541409 - DNA, 25 bp, Homo sapien
ggtggcggttcctgcacatactcgg

SEQ ID NO: 4541410 - DNA, 25 bp, Homo sapien
attatgcagctgtgcccgcgggctg

SEQ ID NO: 4541411 - DNA, 25 bp, Homo sapien
catactcggtacacagccccagagc

SEQ ID NO: 4541412 - DNA, 25 bp, Homo sapien
agtggaggtggaccagcaacacagc

SEQ ID NO: 4541413 - DNA, 25 bp, Homo sapien
ggtgggcacacaaccccgagggcat

SEQ ID NO: 4541414 - DNA, 25 bp, Homo sapien
acaggtgggcacacaaccccgaggg

SEQ ID NO: 4541415 - DNA, 25 bp, Homo sapien
aggccaaacaggtgggcacacaacc

SEQ ID NO: 4541416 - DNA, 25 bp, Homo sapien
ctggacagtcagagaggccaaacag

SEQ ID NO: 4541417 - DNA, 25 bp, Homo sapien
atggaggaggatgtagaacaggcgg

SEQ ID NO: 4541418 - DNA, 25 bp, Homo sapien
agcaggaggcagcagattgctgagg

SEQ ID NO: 4541419 - DNA, 25 bp, Homo sapien
ctttccactactgtccttgacagca

SEQ ID NO: 4541420 - DNA, 25 bp, Homo sapien
aggcagcagattgctgaggccccca

SEQ ID NO: 4541421 - DNA, 25 bp, Homo sapien
caagtggatgcggtgagagagggcc

SEQ ID NO: 4541422 - DNA, 25 bp, Homo sapien
tgcaagtggatgcggtgagagaggg

SEQ ID NO: 4541423 - DNA, 25 bp, Homo sapien
aagtggatgcggtgagagagggcca

SEQ ID NO: 4541424 - DNA, 25 bp, Homo sapien
gcaagtggatgcggtgagagagggc

SEQ ID NO: 4541425 - DNA, 25 bp, Homo sapien
ggcagcagctggcacaaggagcagg

SEQ ID NO: 4541426 - DNA, 25 bp, Homo sapien
cagcagctggcacaaggagcaggcc

SEQ ID NO: 4541427 - DNA, 25 bp, Homo sapien
gcagctggcacaaggagcaggccca

SEQ ID NO: 4541428 - DNA, 25 bp, Homo sapien
agctggcacaaggagcaggcccaca

SEQ ID NO: 4541429 - DNA, 25 bp, Homo sapien
gagcagatgcaaggcagcgaggtgg

SEQ ID NO: 4541430 - DNA, 25 bp, Homo sapien
ctttctctcgacctaaacacctggg

SEQ ID NO: 4541431 - DNA, 25 bp, Homo sapien
ctggaaacatggcgggagagattta

SEQ ID NO: 4541432 - DNA, 25 bp, Homo sapien
tctgacctttctctcgacctaaaca

SEQ ID NO: 4541433 - DNA, 25 bp, Homo sapien
acatggcgggagagatttacagatt

SEQ ID NO: 4541434 - DNA, 25 bp, Homo sapien
ggccactctccccttcgcaccctct

SEQ ID NO: 4541435 - DNA, 25 bp, Homo sapien
aagaggcctgtcgtttttattggct

SEQ ID NO: 4541436 - DNA, 25 bp, Homo sapien
gaggcctgtcgtttttattggcttc

SEQ ID NO: 4541437 - DNA, 25 bp, Homo sapien
cagcttcggccactctccccttcgc

SEQ ID NO: 4541438 - DNA, 25 bp, Homo sapien
tgcctccgctgtgctgctgtgccag

SEQ ID NO: 4541439 - DNA, 25 bp, Homo sapien
tggagacgtccggaagagaacactg

SEQ ID NO: 4541440 - DNA, 25 bp, Homo sapien
tgcggtaaatgcaaatgccctgtga

SEQ ID NO: 4541441 - DNA, 25 bp, Homo sapien
ggagctttgtccttagggcctcaac

SEQ ID NO: 4541442 - DNA, 25 bp, Homo sapien
tgtcccagggattaggcttaggtcc

SEQ ID NO: 4541443 - DNA, 25 bp, Homo sapien
tttatgaggtggttaaggatatcgg

SEQ ID NO: 4541444 - DNA, 25 bp, Homo sapien
tgtacaaacccgaaaggaagtctga

SEQ ID NO: 4541445 - DNA, 25 bp, Homo sapien
tagacgtcattcaggttgaacggag

SEQ ID NO: 4541446 - DNA, 25 bp, Homo sapien
aagtctgagagacgaaccgccttcc

SEQ ID NO: 4541447 - DNA, 25 bp, Homo sapien
ttgttatcttttactttaataggca

SEQ ID NO: 4541448 - DNA, 25 bp, Homo sapien
tatcttttactttaataggcaatta

SEQ ID NO: 4541449 - DNA, 25 bp, Homo sapien
tgttatcttttactttaataggcaa

SEQ ID NO: 4541450 - DNA, 25 bp, Homo sapien
acattttatttccagtatcatgcta

SEQ ID NO: 4541451 - DNA, 25 bp, Homo sapien
tcagcttggacattttatttccagt

SEQ ID NO: 4541452 - DNA, 25 bp, Homo sapien
attttatttccagtatcatgctaaa

SEQ ID NO: 4541453 - DNA, 25 bp, Homo sapien
tttatttccagtatcatgctaaaaa

SEQ ID NO: 4541454 - DNA, 25 bp, Homo sapien
gtttccatgagcttagatttccggg

SEQ ID NO: 4541455 - DNA, 25 bp, Homo sapien
tatgtacaactagaaaaacggactc

SEQ ID NO: 4541456 - DNA, 25 bp, Homo sapien
agaaagtcagaacagtcccaagtaa

SEQ ID NO: 4541457 - DNA, 25 bp, Homo sapien
tctaacccaagctaagggctggaaa

SEQ ID NO: 4541458 - DNA, 25 bp, Homo sapien
tccaatatctggatacaggggccaa

SEQ ID NO: 4541459 - DNA, 25 bp, Homo sapien
cagttggaagaataagcagttggac

SEQ ID NO: 4541460 - DNA, 25 bp, Homo sapien
ggaccagatgctgagactccccttg

SEQ ID NO: 4541461 - DNA, 25 bp, Homo sapien
tgggctacccagtatcacaagtata

SEQ ID NO: 4541462 - DNA, 25 bp, Homo sapien
tcttggcagatggccgctcaaatac

SEQ ID NO: 4541463 - DNA, 25 bp, Homo sapien
ggcagatggccgctcaaatacatct

SEQ ID NO: 4541464 - DNA, 25 bp, Homo sapien
gatggccgctcaaatacatctcgta

SEQ ID NO: 4541465 - DNA, 25 bp, Homo sapien
tggccgctcaaatacatctcgtacc

SEQ ID NO: 4541466 - DNA, 25 bp, Homo sapien
gaagaactttgtgttctgggcactc

SEQ ID NO: 4541467 - DNA, 25 bp, Homo sapien
gtgttctgggcactctcttggcccc

SEQ ID NO: 4541468 - DNA, 25 bp, Homo sapien
gtttgaagaactttgtgttctgggc

SEQ ID NO: 4541469 - DNA, 25 bp, Homo sapien
ttctgggcactctcttggccccaag

SEQ ID NO: 4541470 - DNA, 25 bp, Homo sapien
ggtggtatcttgatccacaaggtga

SEQ ID NO: 4541471 - DNA, 25 bp, Homo sapien
agtcaaaggaggtggtatcttgatc

SEQ ID NO: 4541472 - DNA, 25 bp, Homo sapien
acaaggtgagtgtatttggtgcgac

SEQ ID NO: 4541473 - DNA, 25 bp, Homo sapien
tatcttgatccacaaggtgagtgta

SEQ ID NO: 4541474 - DNA, 25 bp, Homo sapien
ggaaggatggatgatgagttatacc

SEQ ID NO: 4541475 - DNA, 25 bp, Homo sapien
tgatgagttataccaccaaacaaac

SEQ ID NO: 4541476 - DNA, 25 bp, Homo sapien
caaacaaaccatgcctcagctatca

SEQ ID NO: 4541477 - DNA, 25 bp, Homo sapien
tctgtcatgttattaaggttcccca

SEQ ID NO: 4541478 - DNA, 25 bp, Homo sapien
ctccagggtaggagcgctgaaatct

SEQ ID NO: 4541479 - DNA, 25 bp, Homo sapien
gagcgctgaaatctctcttgtatac

SEQ ID NO: 4541480 - DNA, 25 bp, Homo sapien
taggagcgctgaaatctctcttgta

SEQ ID NO: 4541481 - DNA, 25 bp, Homo sapien
gggtaggagcgctgaaatctctctt

SEQ ID NO: 4541482 - DNA, 25 bp, Homo sapien
ttaaactctacaataagggatacag

SEQ ID NO: 4541483 - DNA, 25 bp, Homo sapien
tttcctatatattcaaaccacaaat

SEQ ID NO: 4541484 - DNA, 25 bp, Homo sapien
aaatcttatcaatcttgtggcttta

SEQ ID NO: 4541485 - DNA, 25 bp, Homo sapien
agcagagggtattgagcctttcttc

SEQ ID NO: 4541486 - DNA, 25 bp, Homo sapien
tctgttagtaggaccagcgtactct

SEQ ID NO: 4541487 - DNA, 25 bp, Homo sapien
tccatatcaacctcttctctttaac

SEQ ID NO: 4541488 - DNA, 25 bp, Homo sapien
aacttttctgttagtaggaccagcg

SEQ ID NO: 4541489 - DNA, 25 bp, Homo sapien
taggaccagcgtactcttcgattac

SEQ ID NO: 4541490 - DNA, 25 bp, Homo sapien
ttagttttcctctactatcagtctc

SEQ ID NO: 4541491 - DNA, 25 bp, Homo sapien
tattagttttcctctactatcagtc

SEQ ID NO: 4541492 - DNA, 25 bp, Homo sapien
ggttattagttttcctctactatca

SEQ ID NO: 4541493 - DNA, 25 bp, Homo sapien
agttttcctctactatcagtctcac

SEQ ID NO: 4541494 - DNA, 25 bp, Homo sapien
tctttgccttgctcaaaaacttcaa

SEQ ID NO: 4541495 - DNA, 25 bp, Homo sapien
tttgccttgctcaaaaacttcaatg

SEQ ID NO: 4541496 - DNA, 25 bp, Homo sapien
ctgtaactcattataatctttgcct

SEQ ID NO: 4541497 - DNA, 25 bp, Homo sapien
catggcactgatgtttctagactgt

SEQ ID NO: 4541498 - DNA, 25 bp, Homo sapien
catgaagaaggcaccccggtgataa

SEQ ID NO: 4541499 - DNA, 25 bp, Homo sapien
ggtaatgactttgccgtttgcccga

SEQ ID NO: 4541500 - DNA, 25 bp, Homo sapien
tatttgcccttaacagctttgttgg

SEQ ID NO: 4541501 - DNA, 25 bp, Homo sapien
ctcagtcaggtttcgcatgcgttca

SEQ ID NO: 4541502 - DNA, 25 bp, Homo sapien
ggagtgatatcccttgtctccaaat

SEQ ID NO: 4541503 - DNA, 25 bp, Homo sapien
ggagagggagtgatatcccttgtct

SEQ ID NO: 4541504 - DNA, 25 bp, Homo sapien
ccagccagattgcagtaacttttta

SEQ ID NO: 4541505 - DNA, 25 bp, Homo sapien
cagtaactttttagccagtgttggg

SEQ ID NO: 4541506 - DNA, 25 bp, Homo sapien
gcagccagggatcgcttgttctctt

SEQ ID NO: 4541507 - DNA, 25 bp, Homo sapien
tttagctctcgaactttccatgcct

SEQ ID NO: 4541508 - DNA, 25 bp, Homo sapien
tctttttagctctcgaactttccat

SEQ ID NO: 4541509 - DNA, 25 bp, Homo sapien
cagtattgagtgcatccaatgcagc

SEQ ID NO: 4541510 - DNA, 25 bp, Homo sapien
gcttcggcttcacgttcttgaactg

SEQ ID NO: 4541511 - DNA, 25 bp, Homo sapien
ttcacgttcttgaactgtcactcgg

SEQ ID NO: 4541512 - DNA, 25 bp, Homo sapien
ttcttgaactgtcactcggtccttc

SEQ ID NO: 4541513 - DNA, 25 bp, Homo sapien
tcggcttcacgttcttgaactgtca

SEQ ID NO: 4541514 - DNA, 25 bp, Homo sapien
aatgaagactggcttaaggcgaggc

SEQ ID NO: 4541515 - DNA, 25 bp, Homo sapien
tctgactcctctccagaacgaccct

SEQ ID NO: 4541516 - DNA, 25 bp, Homo sapien
gtgctcgctgacgcatcatgccacg

SEQ ID NO: 4541517 - DNA, 25 bp, Homo sapien
actcttcatactcagactctgattc

SEQ ID NO: 4541518 - DNA, 25 bp, Homo sapien
catcaatttcctcctcctcttcttc

SEQ ID NO: 4541519 - DNA, 25 bp, Homo sapien
tcaatttcctcctcctcttcttcac

SEQ ID NO: 4541520 - DNA, 25 bp, Homo sapien
ctcatcatcaatttcctcctcctct

SEQ ID NO: 4541521 - DNA, 25 bp, Homo sapien
atcatcaatttcctcctcctcttct

SEQ ID NO: 4541522 - DNA, 25 bp, Homo sapien
tgtcttctcgttccatgcgccaagc

SEQ ID NO: 4541523 - DNA, 25 bp, Homo sapien
tcttctcgttccatgcgccaagcat

SEQ ID NO: 4541524 - DNA, 25 bp, Homo sapien
ttctcgttccatgcgccaagcatct

SEQ ID NO: 4541525 - DNA, 25 bp, Homo sapien
tgctgtcttctcgttccatgcgcca

SEQ ID NO: 4541526 - DNA, 25 bp, Homo sapien
ttcaggttccactatttttcgatgt

SEQ ID NO: 4541527 - DNA, 25 bp, Homo sapien
cttcaggttccactatttttcgatg

SEQ ID NO: 4541528 - DNA, 25 bp, Homo sapien
tcagagcgaatagtcaagttgggcc

SEQ ID NO: 4541529 - DNA, 25 bp, Homo sapien
caaactcatagggatgcattgggat

SEQ ID NO: 4541530 - DNA, 25 bp, Homo sapien
cgagaatatcgtgtctttgtgaaac

SEQ ID NO: 4541531 - DNA, 25 bp, Homo sapien
tgagcctggcctgcattggaatatt

SEQ ID NO: 4541532 - DNA, 25 bp, Homo sapien
gaacggtgaaagttcaggactcctg

SEQ ID NO: 4541533 - DNA, 25 bp, Homo sapien
tcctttaggccagaagtaacctgct

SEQ ID NO: 4541534 - DNA, 25 bp, Homo sapien
aaactcctgggacaattatgaacgg

SEQ ID NO: 4541535 - DNA, 25 bp, Homo sapien
ggccatgggcactgttaatcttcaa

SEQ ID NO: 4541536 - DNA, 25 bp, Homo sapien
tctttggctttcttaatgaactgaa

SEQ ID NO: 4541537 - DNA, 25 bp, Homo sapien
tcatctgaggactccataggggcat

SEQ ID NO: 4541538 - DNA, 25 bp, Homo sapien
gtctggcctttttccggacacataa

SEQ ID NO: 4541539 - DNA, 25 bp, Homo sapien
cactaatacggttctgtaaacgccg

SEQ ID NO: 4541540 - DNA, 25 bp, Homo sapien
tgggtttatgggcataagacaccgt

SEQ ID NO: 4541541 - DNA, 25 bp, Homo sapien
tttctcattgcgaactgggacggcc

SEQ ID NO: 4541542 - DNA, 25 bp, Homo sapien
ctgaatgggcggttgcttcatgaga

SEQ ID NO: 4541543 - DNA, 25 bp, Homo sapien
tcatgagagcgcttgggaccgacat

SEQ ID NO: 4541544 - DNA, 25 bp, Homo sapien
tgggacggccccagccgtagactga

SEQ ID NO: 4541545 - DNA, 25 bp, Homo sapien
tgatggcagcgacggtgattcccga

SEQ ID NO: 4541546 - DNA, 25 bp, Homo sapien
gttgatggcagcgacggtgattccc

SEQ ID NO: 4541547 - DNA, 25 bp, Homo sapien
agcgacggtgattcccgaaacttga

SEQ ID NO: 4541548 - DNA, 25 bp, Homo sapien
tggcagcgacggtgattcccgaaac

SEQ ID NO: 4541549 - DNA, 25 bp, Homo sapien
gcgaacacagctgcgcgactgatag

SEQ ID NO: 4541550 - DNA, 25 bp, Homo sapien
agtgaacaccagcaacgtcaacgaa

SEQ ID NO: 4541551 - DNA, 25 bp, Homo sapien
gcgcgactgatagagaaactactta

SEQ ID NO: 4541552 - DNA, 25 bp, Homo sapien
cttccacctgagtccgcgaacacag

SEQ ID NO: 4541553 - DNA, 25 bp, Homo sapien
ggctgagctagataaaccggaaata

SEQ ID NO: 4541554 - DNA, 25 bp, Homo sapien
ccggaaatacgtgacgagaggattg

SEQ ID NO: 4541555 - DNA, 25 bp, Homo sapien
tggacgacgtttgggcgcccacagc

SEQ ID NO: 4541556 - DNA, 25 bp, Homo sapien
ccacagctaggaagtcgagtcggtt

SEQ ID NO: 4541557 - DNA, 25 bp, Homo sapien
tcttactggtaacagagtggtgacc

SEQ ID NO: 4541558 - DNA, 25 bp, Homo sapien
gattgaattccaggagaagtcagcc

SEQ ID NO: 4541559 - DNA, 25 bp, Homo sapien
tacaaagagcattgcttccgcctat

SEQ ID NO: 4541560 - DNA, 25 bp, Homo sapien
tagccctgttgtagaggttcattac

SEQ ID NO: 4541561 - DNA, 25 bp, Homo sapien
aatcaattaagataagttactacct

SEQ ID NO: 4541562 - DNA, 25 bp, Homo sapien
agataagttactacctttgaaccag

SEQ ID NO: 4541563 - DNA, 25 bp, Homo sapien
gaacaatcaattaagataagttact

SEQ ID NO: 4541564 - DNA, 25 bp, Homo sapien
caattaagataagttactacctttg

SEQ ID NO: 4541565 - DNA, 25 bp, Homo sapien
tagactgggtttcgccgtgttggac

SEQ ID NO: 4541566 - DNA, 25 bp, Homo sapien
ctgaccttgaatgatccaccctctt

SEQ ID NO: 4541567 - DNA, 25 bp, Homo sapien
accttgaatgatccaccctcttggc

SEQ ID NO: 4541568 - DNA, 25 bp, Homo sapien
gtagactgggtttcgccgtgttgga

SEQ ID NO: 4541569 - DNA, 25 bp, Homo sapien
tagtgcctccactgggaagaggtcc

SEQ ID NO: 4541570 - DNA, 25 bp, Homo sapien
cacagtatggcgtgctaaaccaaaa

SEQ ID NO: 4541571 - DNA, 25 bp, Homo sapien
tacaaactgaggtaggagcactaca

SEQ ID NO: 4541572 - DNA, 25 bp, Homo sapien
taagacagtagataccaggtggaca

SEQ ID NO: 4541573 - DNA, 25 bp, Homo sapien
tatgcctgtgctgcgtgcttcgagg

SEQ ID NO: 4541574 - DNA, 25 bp, Homo sapien
gttgaagagcttgggcctaggatcc

SEQ ID NO: 4541575 - DNA, 25 bp, Homo sapien
tctctccctgagatgaaaacaggat

SEQ ID NO: 4541576 - DNA, 25 bp, Homo sapien
gcttcgaggacttccctctgcaagg

SEQ ID NO: 4541577 - DNA, 25 bp, Homo sapien
gaacttatgcagaggatgaccctag

SEQ ID NO: 4541578 - DNA, 25 bp, Homo sapien
gtgttttgtaggcatctcttagaaa

SEQ ID NO: 4541579 - DNA, 25 bp, Homo sapien
atttctacatctaagtgttggtctc

SEQ ID NO: 4541580 - DNA, 25 bp, Homo sapien
agtgttggtctctgccacggtcaca

SEQ ID NO: 4541581 - DNA, 25 bp, Homo sapien
gaattcgtttaacgcccctggagca

SEQ ID NO: 4541582 - DNA, 25 bp, Homo sapien
aaaactatggtgatgcccactaggc

SEQ ID NO: 4541583 - DNA, 25 bp, Homo sapien
tgtagcggtggtcccttcagatgcc

SEQ ID NO: 4541584 - DNA, 25 bp, Homo sapien
ccctggagcactataaaagtcttga

SEQ ID NO: 4541585 - DNA, 25 bp, Homo sapien
tgcagtgatgagtctactggaaccc

SEQ ID NO: 4541586 - DNA, 25 bp, Homo sapien
tgagtctactggaacccagtggcac

SEQ ID NO: 4541587 - DNA, 25 bp, Homo sapien
cctctgctaggtgatactactgcaa

SEQ ID NO: 4541588 - DNA, 25 bp, Homo sapien
ggacagcagctctctagttttcaac

SEQ ID NO: 4541589 - DNA, 25 bp, Homo sapien
gatgagaaacagagtcgctgagcct

SEQ ID NO: 4541590 - DNA, 25 bp, Homo sapien
tatatgtgccgatggttccgcgatg

SEQ ID NO: 4541591 - DNA, 25 bp, Homo sapien
ctggctagtttttgggaggagtcat

SEQ ID NO: 4541592 - DNA, 25 bp, Homo sapien
tttagacagggcatgagcctatccc

SEQ ID NO: 4541593 - DNA, 25 bp, Homo sapien
cactgagcggattttgcaggcaaac

SEQ ID NO: 4541594 - DNA, 25 bp, Homo sapien
actgagcggattttgcaggcaaacc

SEQ ID NO: 4541595 - DNA, 25 bp, Homo sapien
gcggattttgcaggcaaaccatcgc

SEQ ID NO: 4541596 - DNA, 25 bp, Homo sapien
tgagcggattttgcaggcaaaccat

SEQ ID NO: 4541597 - DNA, 25 bp, Homo sapien
ggagcaaacggaggacacttagaac

SEQ ID NO: 4541598 - DNA, 25 bp, Homo sapien
tcaaggtcagactcggtaaggatga

SEQ ID NO: 4541599 - DNA, 25 bp, Homo sapien
gatagtggaattgttcaaactcggg

SEQ ID NO: 4541600 - DNA, 25 bp, Homo sapien
gggtctggcggatatcacggaaaaa

SEQ ID NO: 4541601 - DNA, 25 bp, Homo sapien
tctgtccggctgcttctcacgtgag

SEQ ID NO: 4541602 - DNA, 25 bp, Homo sapien
tgtccccatgggaagtggaacgcac

SEQ ID NO: 4541603 - DNA, 25 bp, Homo sapien
gaatgggcactgtcccgtaaggact

SEQ ID NO: 4541604 - DNA, 25 bp, Homo sapien
tctgccgggaaagcaacatcagctc

SEQ ID NO: 4541605 - DNA, 25 bp, Homo sapien
caaattttgtcttaactgctgggtc

SEQ ID NO: 4541606 - DNA, 25 bp, Homo sapien
gtcttaactgctgggtctgtaaaca

SEQ ID NO: 4541607 - DNA, 25 bp, Homo sapien
tcaaccataataatatgatatccaa

SEQ ID NO: 4541608 - DNA, 25 bp, Homo sapien
tgatatccaaattttgtcttaactg

SEQ ID NO: 4541609 - DNA, 25 bp, Homo sapien
tcttgaaatggtcccaccatggacc

SEQ ID NO: 4541610 - DNA, 25 bp, Homo sapien
ttcttgaaatggtcccaccatggac

SEQ ID NO: 4541611 - DNA, 25 bp, Homo sapien
gcttcttgaaatggtcccaccatgg

SEQ ID NO: 4541612 - DNA, 25 bp, Homo sapien
ttgaaatggtcccaccatggaccct

SEQ ID NO: 4541613 - DNA, 25 bp, Homo sapien
cttggaagcttgttgttgaactctg

SEQ ID NO: 4541614 - DNA, 25 bp, Homo sapien
agcttgttgttgaactctgaactct

SEQ ID NO: 4541615 - DNA, 25 bp, Homo sapien
ttgttgttgaactctgaactctggg

SEQ ID NO: 4541616 - DNA, 25 bp, Homo sapien
tgttgttgaactctgaactctgggc

SEQ ID NO: 4541617 - DNA, 25 bp, Homo sapien
gatctgcgctaactggcacagcaaa

SEQ ID NO: 4541618 - DNA, 25 bp, Homo sapien
tgccgtgggaaggatctgcgctaac

SEQ ID NO: 4541619 - DNA, 25 bp, Homo sapien
attttgggatagatgggatgggtgc

SEQ ID NO: 4541620 - DNA, 25 bp, Homo sapien
cagcaaaacaggagagcctttttta

SEQ ID NO: 4541621 - DNA, 25 bp, Homo sapien
aatgctccagctgattcccttgccc

SEQ ID NO: 4541622 - DNA, 25 bp, Homo sapien
ctccagctgattcccttgcccgggg

SEQ ID NO: 4541623 - DNA, 25 bp, Homo sapien
tgctccagctgattcccttgcccgg

SEQ ID NO: 4541624 - DNA, 25 bp, Homo sapien
atgctccagctgattcccttgcccg

SEQ ID NO: 4541625 - DNA, 25 bp, Homo sapien
catcctcaggatgcgcacacttagg

SEQ ID NO: 4541626 - DNA, 25 bp, Homo sapien
gggccgaaagcagtgattagtcagc

SEQ ID NO: 4541627 - DNA, 25 bp, Homo sapien
attagtcagccggagctggacccgg

SEQ ID NO: 4541628 - DNA, 25 bp, Homo sapien
tggacccggactctggtgtgaatct

SEQ ID NO: 4541629 - DNA, 25 bp, Homo sapien
ccaggaaggcaaatacttcttcagt

SEQ ID NO: 4541630 - DNA, 25 bp, Homo sapien
ttcttcagtggaaaccagctgatct

SEQ ID NO: 4541631 - DNA, 25 bp, Homo sapien
aatacttcttcagtggaaaccagct

SEQ ID NO: 4541632 - DNA, 25 bp, Homo sapien
ggcccaggaaggcaaatacttcttc

SEQ ID NO: 4541633 - DNA, 25 bp, Homo sapien
agggagatgggtcgtattgaatttc

SEQ ID NO: 4541634 - DNA, 25 bp, Homo sapien
ctagttcagtggagatacgtagaat

SEQ ID NO: 4541635 - DNA, 25 bp, Homo sapien
cctgctccaaaggaagggagtctgg

SEQ ID NO: 4541636 - DNA, 25 bp, Homo sapien
ttcagtggagatacgtagaatttct

SEQ ID NO: 4541637 - DNA, 25 bp, Homo sapien
aaggtcccagatcacaacttggagg

SEQ ID NO: 4541638 - DNA, 25 bp, Homo sapien
gataaaacctcctacttgccactgg

SEQ ID NO: 4541639 - DNA, 25 bp, Homo sapien
aattagcctcttttcaaggtcccag

SEQ ID NO: 4541640 - DNA, 25 bp, Homo sapien
gagacatgctgccatcactaatgca

SEQ ID NO: 4541641 - DNA, 25 bp, Homo sapien
gccatgggttatggagggacagctc

SEQ ID NO: 4541642 - DNA, 25 bp, Homo sapien
agccttgggccatgggttatggagg

SEQ ID NO: 4541643 - DNA, 25 bp, Homo sapien
cttgggccatgggttatggagggac

SEQ ID NO: 4541644 - DNA, 25 bp, Homo sapien
gggccatgggttatggagggacagc

SEQ ID NO: 4541645 - DNA, 25 bp, Homo sapien
ttgtgtgacacatctatgatcagtg

SEQ ID NO: 4541646 - DNA, 25 bp, Homo sapien
ccttggcttcatatgatcgactggt

SEQ ID NO: 4541647 - DNA, 25 bp, Homo sapien
cagggctgtgggactatccttggct

SEQ ID NO: 4541648 - DNA, 25 bp, Homo sapien
ccagaaccactgaaattgtgtgaca

SEQ ID NO: 4541649 - DNA, 25 bp, Homo sapien
cagaagagaattgccaagtgaagtg

SEQ ID NO: 4541650 - DNA, 25 bp, Homo sapien
agagaattgccaagtgaagtggcac

SEQ ID NO: 4541651 - DNA, 25 bp, Homo sapien
ggcagaagagaattgccaagtgaag

SEQ ID NO: 4541652 - DNA, 25 bp, Homo sapien
gaagagaattgccaagtgaagtggc

SEQ ID NO: 4541653 - DNA, 25 bp, Homo sapien
taagggtcaaagacttctccccatc

SEQ ID NO: 4541654 - DNA, 25 bp, Homo sapien
ctggatctgatgtactatctgcagt

SEQ ID NO: 4541655 - DNA, 25 bp, Homo sapien
tgatgtactatctgcagtagccctt

SEQ ID NO: 4541656 - DNA, 25 bp, Homo sapien
tccccagctctcttattaagggtca

SEQ ID NO: 4541657 - DNA, 25 bp, Homo sapien
tggggggaagcccctggcagcctac

SEQ ID NO: 4541658 - DNA, 25 bp, Homo sapien
ctgtttggggggaagcccctggcag

SEQ ID NO: 4541659 - DNA, 25 bp, Homo sapien
tgtttggggggaagcccctggcagc

SEQ ID NO: 4541660 - DNA, 25 bp, Homo sapien
ttggggggaagcccctggcagccta

SEQ ID NO: 4541661 - DNA, 25 bp, Homo sapien
ctgtgtatttccggtggctcccgtt

SEQ ID NO: 4541662 - DNA, 25 bp, Homo sapien
ctcccgtttgatcttagcacttgat

SEQ ID NO: 4541663 - DNA, 25 bp, Homo sapien
cgtttgatcttagcacttgattcca

SEQ ID NO: 4541664 - DNA, 25 bp, Homo sapien
tatttccggtggctcccgtttgatc

SEQ ID NO: 4541665 - DNA, 25 bp, Homo sapien
aagtagtgtaataaaaacaagcagc

SEQ ID NO: 4541666 - DNA, 25 bp, Homo sapien
ctgtaagtagtgtaataaaaacaag

SEQ ID NO: 4541667 - DNA, 25 bp, Homo sapien
taagtagtgtaataaaaacaagcag

SEQ ID NO: 4541668 - DNA, 25 bp, Homo sapien
taaaaacaagcagcaagaaatgaga

SEQ ID NO: 4541669 - DNA, 25 bp, Homo sapien
tgttgtaggacagctcctctccaag

SEQ ID NO: 4541670 - DNA, 25 bp, Homo sapien
cctctccaagatcttaggtgctttc

SEQ ID NO: 4541671 - DNA, 25 bp, Homo sapien
ctgtgttgtaggacagctcctctcc

SEQ ID NO: 4541672 - DNA, 25 bp, Homo sapien
ctctccaagatcttaggtgctttcc

SEQ ID NO: 4541673 - DNA, 25 bp, Homo sapien
agacaaattgctgtagggaaggaag

SEQ ID NO: 4541674 - DNA, 25 bp, Homo sapien
tatggccggccaatatacatttaaa

SEQ ID NO: 4541675 - DNA, 25 bp, Homo sapien
aagatgggagaattagatggagacc

SEQ ID NO: 4541676 - DNA, 25 bp, Homo sapien
aatagtaaaagggtcataagatggg

SEQ ID NO: 4541677 - DNA, 25 bp, Homo sapien
taaagaataaattgctgctggacac

SEQ ID NO: 4541678 - DNA, 25 bp, Homo sapien
ctgtgcggacttggcttgacttctc

SEQ ID NO: 4541679 - DNA, 25 bp, Homo sapien
tgctggacactgtgcggacttggct

SEQ ID NO: 4541680 - DNA, 25 bp, Homo sapien
aagaataaattgctgctggacactg

SEQ ID NO: 4541681 - DNA, 25 bp, Homo sapien
acacaggttaaggcagcacatcccc

SEQ ID NO: 4541682 - DNA, 25 bp, Homo sapien
agtgtgatagacagcctgaactgcc

SEQ ID NO: 4541683 - DNA, 25 bp, Homo sapien
aaagtccagtgtgatagacagcctg

SEQ ID NO: 4541684 - DNA, 25 bp, Homo sapien
cagcttcttccaaaggctacttgaa

SEQ ID NO: 4541685 - DNA, 25 bp, Homo sapien
tgtagaaggcttggttctcgattcc

SEQ ID NO: 4541686 - DNA, 25 bp, Homo sapien
caggagttggagcaaaatatgtaag

SEQ ID NO: 4541687 - DNA, 25 bp, Homo sapien
ggtgcttacacgcttcaggagttgg

SEQ ID NO: 4541688 - DNA, 25 bp, Homo sapien
cgattccacatttccagaggtgctt

SEQ ID NO: 4541689 - DNA, 25 bp, Homo sapien
gtggatggagaagcaaagggtgaag

SEQ ID NO: 4541690 - DNA, 25 bp, Homo sapien
acattgatatggctgagtgtggatg

SEQ ID NO: 4541691 - DNA, 25 bp, Homo sapien
gtgtggatggagaagcaaagggtga

SEQ ID NO: 4541692 - DNA, 25 bp, Homo sapien
aagggtgaagtaggcgaggaccctg

SEQ ID NO: 4541693 - DNA, 25 bp, Homo sapien
aaatttcagcttggtcacctcattc

SEQ ID NO: 4541694 - DNA, 25 bp, Homo sapien
tccttcaaatttcagcttggtcacc

SEQ ID NO: 4541695 - DNA, 25 bp, Homo sapien
ttcaaatttcagcttggtcacctca

SEQ ID NO: 4541696 - DNA, 25 bp, Homo sapien
tcaaatttcagcttggtcacctcat

SEQ ID NO: 4541697 - DNA, 25 bp, Homo sapien
agcactctggctgacgatcgtaatg

SEQ ID NO: 4541698 - DNA, 25 bp, Homo sapien
gatagatggtctgcagtgtccccag

SEQ ID NO: 4541699 - DNA, 25 bp, Homo sapien
tattctggtaactccagggcagcag

SEQ ID NO: 4541700 - DNA, 25 bp, Homo sapien
gaaaggcggtatctgtcctcaagct

SEQ ID NO: 4541701 - DNA, 25 bp, Homo sapien
accaaacagacttccccccactgag

SEQ ID NO: 4541702 - DNA, 25 bp, Homo sapien
gctggaccaagggaagccacttatc

SEQ ID NO: 4541703 - DNA, 25 bp, Homo sapien
tctgctggaccaagggaagccactt

SEQ ID NO: 4541704 - DNA, 25 bp, Homo sapien
ccaaacagacttccccccactgagc

SEQ ID NO: 4541705 - DNA, 25 bp, Homo sapien
agctggccagcttagacttggcagt

SEQ ID NO: 4541706 - DNA, 25 bp, Homo sapien
ctagaaggagctggccagcttagac

SEQ ID NO: 4541707 - DNA, 25 bp, Homo sapien
aaggagctggccagcttagacttgg

SEQ ID NO: 4541708 - DNA, 25 bp, Homo sapien
ggagctggccagcttagacttggca

SEQ ID NO: 4541709 - DNA, 25 bp, Homo sapien
agaaatcaaacctctgtatcccttt

SEQ ID NO: 4541710 - DNA, 25 bp, Homo sapien
cagaaatcaaacctctgtatccctt

SEQ ID NO: 4541711 - DNA, 25 bp, Homo sapien
atcaaacctctgtatcccttttcct

SEQ ID NO: 4541712 - DNA, 25 bp, Homo sapien
gaaatgcagcatttcctgacacgtc

SEQ ID NO: 4541713 - DNA, 25 bp, Homo sapien
catttaatgaagtggaccctcttgt

SEQ ID NO: 4541714 - DNA, 25 bp, Homo sapien
aaaaggagtgaaggccagaaatgca

SEQ ID NO: 4541715 - DNA, 25 bp, Homo sapien
caaacccaaaaggagtgaaggccag

SEQ ID NO: 4541716 - DNA, 25 bp, Homo sapien
cagccaagatgggcccacccaaggg

SEQ ID NO: 4541717 - DNA, 25 bp, Homo sapien
gcccacccaagggtgggacagccat

SEQ ID NO: 4541718 - DNA, 25 bp, Homo sapien
agccaagatgggcccacccaagggt

SEQ ID NO: 4541719 - DNA, 25 bp, Homo sapien
cacagccaagatgggcccacccaag

SEQ ID NO: 4541720 - DNA, 25 bp, Homo sapien
aaaattatgtagcatgtgatccaga

SEQ ID NO: 4541721 - DNA, 25 bp, Homo sapien
tgttatttagattgactttgcctcg

SEQ ID NO: 4541722 - DNA, 25 bp, Homo sapien
tagcatgtgatccagaggagttttc

SEQ ID NO: 4541723 - DNA, 25 bp, Homo sapien
gactttgcctcggttcctctgacat

SEQ ID NO: 4541724 - DNA, 25 bp, Homo sapien
tgtaaacgttgaagggggcctctga

SEQ ID NO: 4541725 - DNA, 25 bp, Homo sapien
gcatgggggctcttgctcctgatgc

SEQ ID NO: 4541726 - DNA, 25 bp, Homo sapien
gaaagtgccagccatgtaaacgttg

SEQ ID NO: 4541727 - DNA, 25 bp, Homo sapien
tgccagccatgtaaacgttgaaggg

SEQ ID NO: 4541728 - DNA, 25 bp, Homo sapien
gaaaggtcatgcagtctccaaccag

SEQ ID NO: 4541729 - DNA, 25 bp, Homo sapien
aggaaaggtcatgcagtctccaacc

SEQ ID NO: 4541730 - DNA, 25 bp, Homo sapien
ggtcatgcagtctccaaccaggggg

SEQ ID NO: 4541731 - DNA, 25 bp, Homo sapien
ctagaggaggaaaggtcatgcagtc

SEQ ID NO: 4541732 - DNA, 25 bp, Homo sapien
atccactccatatgtttccaatgtc

SEQ ID NO: 4541733 - DNA, 25 bp, Homo sapien
ccactccatatgtttccaatgtctg

SEQ ID NO: 4541734 - DNA, 25 bp, Homo sapien
gatccactccatatgtttccaatgt

SEQ ID NO: 4541735 - DNA, 25 bp, Homo sapien
tccactccatatgtttccaatgtct

SEQ ID NO: 4541736 - DNA, 25 bp, Homo sapien
cagtaaacagtctgcgagaacagag

SEQ ID NO: 4541737 - DNA, 25 bp, Homo sapien
ttctgggcctgattaagtgccacgt

SEQ ID NO: 4541738 - DNA, 25 bp, Homo sapien
tctgcgagaacagaggacacggcgt

SEQ ID NO: 4541739 - DNA, 25 bp, Homo sapien
acacggcgtggagcctgcgtgctca

SEQ ID NO: 4541740 - DNA, 25 bp, Homo sapien
gtcttgtgaatctcagcaattttcc

SEQ ID NO: 4541741 - DNA, 25 bp, Homo sapien
tccgtcttgtgaatctcagcaattt

SEQ ID NO: 4541742 - DNA, 25 bp, Homo sapien
ctcagttccgtcttgtgaatctcag

SEQ ID NO: 4541743 - DNA, 25 bp, Homo sapien
ttccctgagtcataatccccaatct

SEQ ID NO: 4541744 - DNA, 25 bp, Homo sapien
gaagaaaacaattgtggagacaggt

SEQ ID NO: 4541745 - DNA, 25 bp, Homo sapien
gaaaacaattgtggagacaggtaaa

SEQ ID NO: 4541746 - DNA, 25 bp, Homo sapien
aacaattgtggagacaggtaaatca

SEQ ID NO: 4541747 - DNA, 25 bp, Homo sapien
aattgtggagacaggtaaatcatca

SEQ ID NO: 4541748 - DNA, 25 bp, Homo sapien
tcggccatggtagagatcccttttg

SEQ ID NO: 4541749 - DNA, 25 bp, Homo sapien
agctgctaacaaggcagcatccgat

SEQ ID NO: 4541750 - DNA, 25 bp, Homo sapien
ggtagagatcccttttgatctgcag

SEQ ID NO: 4541751 - DNA, 25 bp, Homo sapien
tgttttacagaggagtcggccatgg

SEQ ID NO: 4541752 - DNA, 25 bp, Homo sapien
ggcctcaggtgaactggaatagaaa

SEQ ID NO: 4541753 - DNA, 25 bp, Homo sapien
ctgtctttccaaggcatcattattg

SEQ ID NO: 4541754 - DNA, 25 bp, Homo sapien
atggcaggtaatggcctcaggtgaa

SEQ ID NO: 4541755 - DNA, 25 bp, Homo sapien
ccttttgatttctggtgataaaaca

SEQ ID NO: 4541756 - DNA, 25 bp, Homo sapien
gatgaagagactgagtgcttagaga

SEQ ID NO: 4541757 - DNA, 25 bp, Homo sapien
gagatactgttcttgccttgtcaca

SEQ ID NO: 4541758 - DNA, 25 bp, Homo sapien
cagcctgtgactaccattttaatcc

SEQ ID NO: 4541759 - DNA, 25 bp, Homo sapien
cccagcctgtgactaccattttaat

SEQ ID NO: 4541760 - DNA, 25 bp, Homo sapien
tattaagaagtgtaagaggccggga

SEQ ID NO: 4541761 - DNA, 25 bp, Homo sapien
tactaactgtacttgtgcatgatgc

SEQ ID NO: 4541762 - DNA, 25 bp, Homo sapien
taatgctgtgcttaccaggacttgg

SEQ ID NO: 4541763 - DNA, 25 bp, Homo sapien
gacttggatgactacctgggatagc

SEQ ID NO: 4541764 - DNA, 25 bp, Homo sapien
ttccacatagatgagcagagcctgg

SEQ ID NO: 4541765 - DNA, 25 bp, Homo sapien
ccttagggtgtctatgatttggatg

SEQ ID NO: 4541766 - DNA, 25 bp, Homo sapien
taaagccttagggtgtctatgattt

SEQ ID NO: 4541767 - DNA, 25 bp, Homo sapien
tgtctatgatttggatggatttggt

SEQ ID NO: 4541768 - DNA, 25 bp, Homo sapien
cctcaagtggcgctggatgagacag

SEQ ID NO: 4541769 - DNA, 25 bp, Homo sapien
atgagacaggatgcattccacgcag

SEQ ID NO: 4541770 - DNA, 25 bp, Homo sapien
ggatgcattccacgcagctgtcggc

SEQ ID NO: 4541771 - DNA, 25 bp, Homo sapien
gaccctcttttaggatggctgtggg

SEQ ID NO: 4541772 - DNA, 25 bp, Homo sapien
aagacgcttctgattagttactcca

SEQ ID NO: 4541773 - DNA, 25 bp, Homo sapien
cttgaaggaaagaagtccactctgt

SEQ ID NO: 4541774 - DNA, 25 bp, Homo sapien
tgcaacctccgaaataagcagcaac

SEQ ID NO: 4541775 - DNA, 25 bp, Homo sapien
tccagagccctttgagagtgaccag

SEQ ID NO: 4541776 - DNA, 25 bp, Homo sapien
gcagggtctgcaggataaaacttca

SEQ ID NO: 4541777 - DNA, 25 bp, Homo sapien
agcagggtctgcaggataaaacttc

SEQ ID NO: 4541778 - DNA, 25 bp, Homo sapien
cagggtctgcaggataaaacttcac

SEQ ID NO: 4541779 - DNA, 25 bp, Homo sapien
cggaagcacatggtgaatggaggct

SEQ ID NO: 4541780 - DNA, 25 bp, Homo sapien
acggaagcacatggtgaatggaggc

SEQ ID NO: 4541781 - DNA, 25 bp, Homo sapien
aagcacatggtgaatggaggctggg

SEQ ID NO: 4541782 - DNA, 25 bp, Homo sapien
gaagcacatggtgaatggaggctgg

SEQ ID NO: 4541783 - DNA, 25 bp, Homo sapien
acagactttgtaaattccagccaat

SEQ ID NO: 4541784 - DNA, 25 bp, Homo sapien
cagactttgtaaattccagccaatg

SEQ ID NO: 4541785 - DNA, 25 bp, Homo sapien
cacagactttgtaaattccagccaa

SEQ ID NO: 4541786 - DNA, 25 bp, Homo sapien
tgtcagctccacatggataatctgg

SEQ ID NO: 4541787 - DNA, 25 bp, Homo sapien
taatggacccactaagagccagttc

SEQ ID NO: 4541788 - DNA, 25 bp, Homo sapien
gataatctggactgacattctgctc

SEQ ID NO: 4541789 - DNA, 25 bp, Homo sapien
ctgatctgagttcccacgaggctgg

SEQ ID NO: 4541790 - DNA, 25 bp, Homo sapien
tacaaagcggataccaaaatagtct

SEQ ID NO: 4541791 - DNA, 25 bp, Homo sapien
ttctcaagtaggttcagatggtggc

SEQ ID NO: 4541792 - DNA, 25 bp, Homo sapien
ctgcttatctgggtctacaaagcgg

SEQ ID NO: 4541793 - DNA, 25 bp, Homo sapien
aatagtctttctcaagtaggttcag

SEQ ID NO: 4541794 - DNA, 25 bp, Homo sapien
ctggaatccagaggcttttagcacc

SEQ ID NO: 4541795 - DNA, 25 bp, Homo sapien
tgtctggaatccagaggcttttagc

SEQ ID NO: 4541796 - DNA, 25 bp, Homo sapien
agcacctggaaggagcccaagaacc

SEQ ID NO: 4541797 - DNA, 25 bp, Homo sapien
aatccagaggcttttagcacctgga

SEQ ID NO: 4541798 - DNA, 25 bp, Homo sapien
caggaacctgtcaaaacatctggag

SEQ ID NO: 4541799 - DNA, 25 bp, Homo sapien
ggaacctgtcaaaacatctggagcc

SEQ ID NO: 4541800 - DNA, 25 bp, Homo sapien
tgcaggaacctgtcaaaacatctgg

SEQ ID NO: 4541801 - DNA, 25 bp, Homo sapien
acttgcaggaacctgtcaaaacatc

SEQ ID NO: 4541802 - DNA, 25 bp, Homo sapien
tgaaaaagtgacttgggaaaagcca

SEQ ID NO: 4541803 - DNA, 25 bp, Homo sapien
cctcttccagtcctatccaggtcct

SEQ ID NO: 4541804 - DNA, 25 bp, Homo sapien
aatctgcagctgtatctatttctct

SEQ ID NO: 4541805 - DNA, 25 bp, Homo sapien
ccctcttccagtcctatccaggtcc

SEQ ID NO: 4541806 - DNA, 25 bp, Homo sapien
gcgtgtatagcatgactgtaaatac

SEQ ID NO: 4541807 - DNA, 25 bp, Homo sapien
cttataagttaatagttttctcctg

SEQ ID NO: 4541808 - DNA, 25 bp, Homo sapien
ttctcctgtttatatacgcatgtac

SEQ ID NO: 4541809 - DNA, 25 bp, Homo sapien
tacgcatgtacacgaggaaataaca

SEQ ID NO: 4541810 - DNA, 25 bp, Homo sapien
tagatgtgataggagccttgagctg

SEQ ID NO: 4541811 - DNA, 25 bp, Homo sapien
tctctactggtaattccgctttaga

SEQ ID NO: 4541812 - DNA, 25 bp, Homo sapien
tttgtcctgtggtcctaagaatgac

SEQ ID NO: 4541813 - DNA, 25 bp, Homo sapien
tcgagcagttccactaaggctttgt

SEQ ID NO: 4541814 - DNA, 25 bp, Homo sapien
gggaggtggccttcctctggtgatg

SEQ ID NO: 4541815 - DNA, 25 bp, Homo sapien
gggggaggtggccttcctctggtga

SEQ ID NO: 4541816 - DNA, 25 bp, Homo sapien
gcatgggggaggtggccttcctctg

SEQ ID NO: 4541817 - DNA, 25 bp, Homo sapien
ttcctctggtgatgaggtcattcat

SEQ ID NO: 4541818 - DNA, 25 bp, Homo sapien
agcatctgcggtggatgatggaggt

SEQ ID NO: 4541819 - DNA, 25 bp, Homo sapien
gatggaggtgcctgactcatcatat

SEQ ID NO: 4541820 - DNA, 25 bp, Homo sapien
gatgatggaggtgcctgactcatca

SEQ ID NO: 4541821 - DNA, 25 bp, Homo sapien
tggatgatggaggtgcctgactcat

SEQ ID NO: 4541822 - DNA, 25 bp, Homo sapien
gatcttctgcatcctatcggcgatg

SEQ ID NO: 4541823 - DNA, 25 bp, Homo sapien
cgcttgggaggagcagtgatcttga

SEQ ID NO: 4541824 - DNA, 25 bp, Homo sapien
gtgatcttctgcatcctatcggcga

SEQ ID NO: 4541825 - DNA, 25 bp, Homo sapien
ctgggcgccagggtggtgatcttct

SEQ ID NO: 4541826 - DNA, 25 bp, Homo sapien
tgttggcatacgggtctttgaggat

SEQ ID NO: 4541827 - DNA, 25 bp, Homo sapien
atacgggtctttgaggatgtccaca

SEQ ID NO: 4541828 - DNA, 25 bp, Homo sapien
cagcagaactgcttttgccgatgat

SEQ ID NO: 4541829 - DNA, 25 bp, Homo sapien
cagaactgcttttgccgatgatgat

SEQ ID NO: 4541830 - DNA, 25 bp, Homo sapien
actgcttttgccgatgatgatgacc

SEQ ID NO: 4541831 - DNA, 25 bp, Homo sapien
gcttttgccgatgatgatgacctgg

SEQ ID NO: 4541832 - DNA, 25 bp, Homo sapien
tatctccagggaggagctggaggcc

SEQ ID NO: 4541833 - DNA, 25 bp, Homo sapien
ctatctccagggaggagctggaggc

SEQ ID NO: 4541834 - DNA, 25 bp, Homo sapien
tctccagggaggagctggaggccac

SEQ ID NO: 4541835 - DNA, 25 bp, Homo sapien
atctccagggaggagctggaggcca

SEQ ID NO: 4541836 - DNA, 25 bp, Homo sapien
gatgtcatgcacaatttcccgcttg

SEQ ID NO: 4541837 - DNA, 25 bp, Homo sapien
ccgcttggctgtggcggtgaagatg

SEQ ID NO: 4541838 - DNA, 25 bp, Homo sapien
tgtcatgcacaatttcccgcttggc

SEQ ID NO: 4541839 - DNA, 25 bp, Homo sapien
catgcacaatttcccgcttggctgt

SEQ ID NO: 4541840 - DNA, 25 bp, Homo sapien
cagtcaggtcctgaccagccaggca

SEQ ID NO: 4541841 - DNA, 25 bp, Homo sapien
tcaggtcctgaccagccaggcacac

SEQ ID NO: 4541842 - DNA, 25 bp, Homo sapien
gaggtagtcagtcaggtcctgacca

SEQ ID NO: 4541843 - DNA, 25 bp, Homo sapien
tagtcagtcaggtcctgaccagcca

SEQ ID NO: 4541844 - DNA, 25 bp, Homo sapien
tgggggagggcatactcttcataga

SEQ ID NO: 4541845 - DNA, 25 bp, Homo sapien
atgtcagtggtaggccagaggtgta

SEQ ID NO: 4541846 - DNA, 25 bp, Homo sapien
gatgtcagtggtaggccagaggtgt

SEQ ID NO: 4541847 - DNA, 25 bp, Homo sapien
tgtcagtggtaggccagaggtgtac

SEQ ID NO: 4541848 - DNA, 25 bp, Homo sapien
ggacagcacggcctggatggccacg

SEQ ID NO: 4541849 - DNA, 25 bp, Homo sapien
cagcacggcctggatggccacgtac

SEQ ID NO: 4541850 - DNA, 25 bp, Homo sapien
agggacagcacggcctggatggcca

SEQ ID NO: 4541851 - DNA, 25 bp, Homo sapien
acagcacggcctggatggccacgta

SEQ ID NO: 4541852 - DNA, 25 bp, Homo sapien
tggcctgtcgaagatctccaacatg

SEQ ID NO: 4541853 - DNA, 25 bp, Homo sapien
gctggcctgtcgaagatctccaaca

SEQ ID NO: 4541854 - DNA, 25 bp, Homo sapien
tggctggcctgtcgaagatctccaa

SEQ ID NO: 4541855 - DNA, 25 bp, Homo sapien
atggctggcctgtcgaagatctcca

SEQ ID NO: 4541856 - DNA, 25 bp, Homo sapien
tcttgctctggacctcgttgcccac

SEQ ID NO: 4541857 - DNA, 25 bp, Homo sapien
tctggacctcgttgcccacatagga

SEQ ID NO: 4541858 - DNA, 25 bp, Homo sapien
ctggacctcgttgcccacataggag

SEQ ID NO: 4541859 - DNA, 25 bp, Homo sapien
ctctcttgctctggacctcgttgcc

SEQ ID NO: 4541860 - DNA, 25 bp, Homo sapien
ggcgccccacaatgaaggggaagat

SEQ ID NO: 4541861 - DNA, 25 bp, Homo sapien
ctggggcgccccacaatgaagggga

SEQ ID NO: 4541862 - DNA, 25 bp, Homo sapien
gaagatggcccggggtgggcatcgt

SEQ ID NO: 4541863 - DNA, 25 bp, Homo sapien
agatggcccggggtgggcatcgtca

SEQ ID NO: 4541864 - DNA, 25 bp, Homo sapien
tgtcgacgacaagcatggtgatatc

SEQ ID NO: 4541865 - DNA, 25 bp, Homo sapien
cgacgacaagcatggtgatatcatc

SEQ ID NO: 4541866 - DNA, 25 bp, Homo sapien
gacgacaagcatggtgatatcatca

SEQ ID NO: 4541867 - DNA, 25 bp, Homo sapien
gtcgacgacaagcatggtgatatca

SEQ ID NO: 4541868 - DNA, 25 bp, Homo sapien
gaatttgctgctcaaagtgttctgc

SEQ ID NO: 4541869 - DNA, 25 bp, Homo sapien
tcttttaacgagatccccagatgat

SEQ ID NO: 4541870 - DNA, 25 bp, Homo sapien
tatctgctcaggtatactctagtca

SEQ ID NO: 4541871 - DNA, 25 bp, Homo sapien
tatcctggatctactgaaagcagaa

SEQ ID NO: 4541872 - DNA, 25 bp, Homo sapien
tactctttttatgcgtttgactttc

SEQ ID NO: 4541873 - DNA, 25 bp, Homo sapien
tacacacatacatgatataccattt

SEQ ID NO: 4541874 - DNA, 25 bp, Homo sapien
cagcatttcactctgctctgccacc

SEQ ID NO: 4541875 - DNA, 25 bp, Homo sapien
ttacaggctgggtagtatttcattg

SEQ ID NO: 4541876 - DNA, 25 bp, Homo sapien
ctggctaattaataactggctaatt

SEQ ID NO: 4541877 - DNA, 25 bp, Homo sapien
gtagctggctaattaataactggct

SEQ ID NO: 4541878 - DNA, 25 bp, Homo sapien
agctggctaattaataactggctaa

SEQ ID NO: 4541879 - DNA, 25 bp, Homo sapien
agtagctggctaattaataactggc

SEQ ID NO: 4541880 - DNA, 25 bp, Homo sapien
tcagcaacttcagctaattttagat

SEQ ID NO: 4541881 - DNA, 25 bp, Homo sapien
ctttgggcagtctgaaacttgggag

SEQ ID NO: 4541882 - DNA, 25 bp, Homo sapien
aaggcttgtctaagtctgtgcccca

SEQ ID NO: 4541883 - DNA, 25 bp, Homo sapien
caacctccaagttgcatcctcagca

SEQ ID NO: 4541884 - DNA, 25 bp, Homo sapien
ttaaatgtccttgcctgacagctct

SEQ ID NO: 4541885 - DNA, 25 bp, Homo sapien
aatgtccttgcctgacagctcttaa

SEQ ID NO: 4541886 - DNA, 25 bp, Homo sapien
gggcagctgcaagtgcagcttcagc

SEQ ID NO: 4541887 - DNA, 25 bp, Homo sapien
caacagcctcagtcagggacttaca

SEQ ID NO: 4541888 - DNA, 25 bp, Homo sapien
gcacaagaagtgcatgaagcatata

SEQ ID NO: 4541889 - DNA, 25 bp, Homo sapien
caagaagtgcatgaagcatatacaa

SEQ ID NO: 4541890 - DNA, 25 bp, Homo sapien
agcacaagaagtgcatgaagcatat

SEQ ID NO: 4541891 - DNA, 25 bp, Homo sapien
cacaagaagtgcatgaagcatatac

SEQ ID NO: 4541892 - DNA, 25 bp, Homo sapien
aacacaagagagatcaacgagacag

SEQ ID NO: 4541893 - DNA, 25 bp, Homo sapien
tggaccaaggagacatctacagaac

SEQ ID NO: 4541894 - DNA, 25 bp, Homo sapien
cagctctggaccaaggagacatcta

SEQ ID NO: 4541895 - DNA, 25 bp, Homo sapien
aacacccactgtcaacacaagagag

SEQ ID NO: 4541896 - DNA, 25 bp, Homo sapien
gtacttcttggcggaaaggcagcat

SEQ ID NO: 4541897 - DNA, 25 bp, Homo sapien
ctagaaatccactgctaagccactt

SEQ ID NO: 4541898 - DNA, 25 bp, Homo sapien
tgtacttcttggcggaaaggcagca

SEQ ID NO: 4541899 - DNA, 25 bp, Homo sapien
tttgtacttcttggcggaaaggcag

SEQ ID NO: 4541900 - DNA, 25 bp, Homo sapien
tatttggactccagaaaaacactgg

SEQ ID NO: 4541901 - DNA, 25 bp, Homo sapien
caggattaatgactctggcacctta

SEQ ID NO: 4541902 - DNA, 25 bp, Homo sapien
tctgtggtacaaggtagatgtggca

SEQ ID NO: 4541903 - DNA, 25 bp, Homo sapien
tagtagcactgtagaagcatcaaac

SEQ ID NO: 4541904 - DNA, 25 bp, Homo sapien
cccaggaggaaaactagcatacaaa

SEQ ID NO: 4541905 - DNA, 25 bp, Homo sapien
aatataggctagtcagttcatctgc

SEQ ID NO: 4541906 - DNA, 25 bp, Homo sapien
taaactctaaatagccagagcagca

SEQ ID NO: 4541907 - DNA, 25 bp, Homo sapien
ggcctagaacaaatactccagctta

SEQ ID NO: 4541908 - DNA, 25 bp, Homo sapien
tctaaagtccaccaatgtataaaac

SEQ ID NO: 4541909 - DNA, 25 bp, Homo sapien
tataaaacagtctaaagtccaccaa

SEQ ID NO: 4541910 - DNA, 25 bp, Homo sapien
tgcacccctgggacaccatggtgaa

SEQ ID NO: 4541911 - DNA, 25 bp, Homo sapien
tatgtctctcaagaaatgtcatttc

SEQ ID NO: 4541912 - DNA, 25 bp, Homo sapien
cgtttacgatgtgatagggattcaa

SEQ ID NO: 4541913 - DNA, 25 bp, Homo sapien
gtaagggccacacagtcgtttacga

SEQ ID NO: 4541914 - DNA, 25 bp, Homo sapien
ggattcaaagattggagagcgccct

SEQ ID NO: 4541915 - DNA, 25 bp, Homo sapien
tcaaatagtaagggccacacagtcg

SEQ ID NO: 4541916 - DNA, 25 bp, Homo sapien
gcttttgtaggacaccagaacatac

SEQ ID NO: 4541917 - DNA, 25 bp, Homo sapien
tttgtaggacaccagaacataccat

SEQ ID NO: 4541918 - DNA, 25 bp, Homo sapien
ttttgtaggacaccagaacatacca

SEQ ID NO: 4541919 - DNA, 25 bp, Homo sapien
cttttgtaggacaccagaacatacc

SEQ ID NO: 4541920 - DNA, 25 bp, Homo sapien
gatgaggtaccttctagctgctatg

SEQ ID NO: 4541921 - DNA, 25 bp, Homo sapien
tacagggatatcattgagaagtcca

SEQ ID NO: 4541922 - DNA, 25 bp, Homo sapien
cactaggtcttagggttacagggat

SEQ ID NO: 4541923 - DNA, 25 bp, Homo sapien
tagtgacgtcagctttagtgccatc

SEQ ID NO: 4541924 - DNA, 25 bp, Homo sapien
ccttgattgaaagggtctctgcctc

SEQ ID NO: 4541925 - DNA, 25 bp, Homo sapien
tctagctcagctcaaaggtcttcat

SEQ ID NO: 4541926 - DNA, 25 bp, Homo sapien
ggtgctgccaaattaacgttgctaa

SEQ ID NO: 4541927 - DNA, 25 bp, Homo sapien
gatatgagctaagtgatcctttcca

SEQ ID NO: 4541928 - DNA, 25 bp, Homo sapien
tctttaatcagaccaagttcatcca

SEQ ID NO: 4541929 - DNA, 25 bp, Homo sapien
tcatctctttaatcagaccaagttc

SEQ ID NO: 4541930 - DNA, 25 bp, Homo sapien
tctctttaatcagaccaagttcatc

SEQ ID NO: 4541931 - DNA, 25 bp, Homo sapien
ttaatcagaccaagttcatccacaa

SEQ ID NO: 4541932 - DNA, 25 bp, Homo sapien
ggcatgcctgactggatatggcctg

SEQ ID NO: 4541933 - DNA, 25 bp, Homo sapien
tggccaactggaaacccactaagat

SEQ ID NO: 4541934 - DNA, 25 bp, Homo sapien
tatgctgcactcaaaggcatgcctg

SEQ ID NO: 4541935 - DNA, 25 bp, Homo sapien
aaagagagcccctgtcagatgttgc

SEQ ID NO: 4541936 - DNA, 25 bp, Homo sapien
gcctctgcaaaactgtgctcttggg

SEQ ID NO: 4541937 - DNA, 25 bp, Homo sapien
ggagacttcagacaagcagtctggg

SEQ ID NO: 4541938 - DNA, 25 bp, Homo sapien
ccttagggcttatctgggtcagacc

SEQ ID NO: 4541939 - DNA, 25 bp, Homo sapien
gaagtgcctttagcaaagcctcact

SEQ ID NO: 4541940 - DNA, 25 bp, Homo sapien
tcagcaagagccaaatgcctaaagc

SEQ ID NO: 4541941 - DNA, 25 bp, Homo sapien
cctgtgttatgtgcatcagcaagag

SEQ ID NO: 4541942 - DNA, 25 bp, Homo sapien
tggcctgaccctgtgttatgtgcat

SEQ ID NO: 4541943 - DNA, 25 bp, Homo sapien
atcagcaagagccaaatgcctaaag

SEQ ID NO: 4541944 - DNA, 25 bp, Homo sapien
tcgggaaattagtatgcacatgacc

SEQ ID NO: 4541945 - DNA, 25 bp, Homo sapien
tttaacatgcatgcaaaccacctga

SEQ ID NO: 4541946 - DNA, 25 bp, Homo sapien
tggtttctgcatggaagccaatcac

SEQ ID NO: 4541947 - DNA, 25 bp, Homo sapien
ttttaataatcaagagaggtcggga

SEQ ID NO: 4541948 - DNA, 25 bp, Homo sapien
gtatttcttgttgctaattcccttg

SEQ ID NO: 4541949 - DNA, 25 bp, Homo sapien
attccaggcctcttacagatgattc

SEQ ID NO: 4541950 - DNA, 25 bp, Homo sapien
tcagccgaaaaatgctgctcaaagg

SEQ ID NO: 4541951 - DNA, 25 bp, Homo sapien
aaagcaacagctctcatgaagctgc

SEQ ID NO: 4541952 - DNA, 25 bp, Homo sapien
tcttgatttgtagttatcagccgaa

SEQ ID NO: 4541953 - DNA, 25 bp, Homo sapien
cagtcctcatatgctctttattaca

SEQ ID NO: 4541954 - DNA, 25 bp, Homo sapien
aagcagatcacagattttgaggatt

SEQ ID NO: 4541955 - DNA, 25 bp, Homo sapien
gcaaggaagagtgctaagcagatca

SEQ ID NO: 4541956 - DNA, 25 bp, Homo sapien
caaggaagagtgctaagcagatcac

SEQ ID NO: 4541957 - DNA, 25 bp, Homo sapien
aaggaagagtgctaagcagatcaca

SEQ ID NO: 4541958 - DNA, 25 bp, Homo sapien
tgttggttaccaatcttttctgtct

SEQ ID NO: 4541959 - DNA, 25 bp, Homo sapien
tattaaagtgtgactgcacgggctg

SEQ ID NO: 4541960 - DNA, 25 bp, Homo sapien
tggatcctcaaagaaacttcatgta

SEQ ID NO: 4541961 - DNA, 25 bp, Homo sapien
ctccccagtgttggttaccaatctt

SEQ ID NO: 4541962 - DNA, 25 bp, Homo sapien
taaattccttctggatgctggactg

SEQ ID NO: 4541963 - DNA, 25 bp, Homo sapien
cacctgggccttagcatttatgaag

SEQ ID NO: 4541964 - DNA, 25 bp, Homo sapien
aattctgcagagatggcccacctgg

SEQ ID NO: 4541965 - DNA, 25 bp, Homo sapien
taagtctgcccatctaataaagagt

SEQ ID NO: 4541966 - DNA, 25 bp, Homo sapien
caggtaactccatggtaaggcctac

SEQ ID NO: 4541967 - DNA, 25 bp, Homo sapien
tccataagggctataaagtgttttc

SEQ ID NO: 4541968 - DNA, 25 bp, Homo sapien
ttcaaagcagaccaagttagtccat

SEQ ID NO: 4541969 - DNA, 25 bp, Homo sapien
tctgaccactacaaggccaacttta

SEQ ID NO: 4541970 - DNA, 25 bp, Homo sapien
cttcccaagatccatgtaaagggag

SEQ ID NO: 4541971 - DNA, 25 bp, Homo sapien
taccaatcttcccaagatccatgta

SEQ ID NO: 4541972 - DNA, 25 bp, Homo sapien
ctttcctctaaaatggcttaccaat

SEQ ID NO: 4541973 - DNA, 25 bp, Homo sapien
tctaaaatggcttaccaatcttccc

SEQ ID NO: 4541974 - DNA, 25 bp, Homo sapien
tggtcccagagatgtacagatagtt

SEQ ID NO: 4541975 - DNA, 25 bp, Homo sapien
taggaaagaactgtctagaggcagg

SEQ ID NO: 4541976 - DNA, 25 bp, Homo sapien
gcaggaagattaggtaagaggccac

SEQ ID NO: 4541977 - DNA, 25 bp, Homo sapien
taatgagggcctgaaataagacaga

SEQ ID NO: 4541978 - DNA, 25 bp, Homo sapien
tagataagactaagttttgaaaaga

SEQ ID NO: 4541979 - DNA, 25 bp, Homo sapien
caggcaagtcctactttgaaagaga

SEQ ID NO: 4541980 - DNA, 25 bp, Homo sapien
tacgaagtccctaagcatgagtggg

SEQ ID NO: 4541981 - DNA, 25 bp, Homo sapien
caaacagcagctaggagtacaacat

SEQ ID NO: 4541982 - DNA, 25 bp, Homo sapien
tacaacattagtggaggtctgaagc

SEQ ID NO: 4541983 - DNA, 25 bp, Homo sapien
ttctatctggccatcaaaaccctta

SEQ ID NO: 4541984 - DNA, 25 bp, Homo sapien
tataagacaaggtaaaatgtcctgc

SEQ ID NO: 4541985 - DNA, 25 bp, Homo sapien
tctatctggccatcaaaacccttat

SEQ ID NO: 4541986 - DNA, 25 bp, Homo sapien
cttataagacaaggtaaaatgtcct

SEQ ID NO: 4541987 - DNA, 25 bp, Homo sapien
gatagtgggtagagccaaggacaca

SEQ ID NO: 4541988 - DNA, 25 bp, Homo sapien
ttaatctatagagggtcttgggccc

SEQ ID NO: 4541989 - DNA, 25 bp, Homo sapien
cagttaaaggctcatccggaaaagg

SEQ ID NO: 4541990 - DNA, 25 bp, Homo sapien
actgcaacggagtgagtcaagtcct

SEQ ID NO: 4541991 - DNA, 25 bp, Homo sapien
taaatgcagtgttcttgtaccagtg

SEQ ID NO: 4541992 - DNA, 25 bp, Homo sapien
ttgacagccctacctataaaagcct

SEQ ID NO: 4541993 - DNA, 25 bp, Homo sapien
catcaacttagtgtgcctgttaaca

SEQ ID NO: 4541994 - DNA, 25 bp, Homo sapien
taaaactcattttgaacaggactcc

SEQ ID NO: 4541995 - DNA, 25 bp, Homo sapien
tgtgtagtattactccaatgtgcaa

SEQ ID NO: 4541996 - DNA, 25 bp, Homo sapien
aaatctaggttgttatatgtatcaa

SEQ ID NO: 4541997 - DNA, 25 bp, Homo sapien
aagataaatctaggttgttatatgt

SEQ ID NO: 4541998 - DNA, 25 bp, Homo sapien
tattgtgtagtattactccaatgtg

SEQ ID NO: 4541999 - DNA, 25 bp, Homo sapien
acagtgtcacaaaagttgaaccact

SEQ ID NO: 4542000 - DNA, 25 bp, Homo sapien
taatatttagtctcagtgaactgag

SEQ ID NO: 4542001 - DNA, 25 bp, Homo sapien
caaagccttaagtgtattgaaaaag

SEQ ID NO: 4542002 - DNA, 25 bp, Homo sapien
ggtcagtcaactacttgcccaatag

SEQ ID NO: 4542003 - DNA, 25 bp, Homo sapien
aagaattgttcccatctattttctg

SEQ ID NO: 4542004 - DNA, 25 bp, Homo sapien
agaattgttcccatctattttctgt

SEQ ID NO: 4542005 - DNA, 25 bp, Homo sapien
ttaagaattgttcccatctattttc

SEQ ID NO: 4542006 - DNA, 25 bp, Homo sapien
gaattgttcccatctattttctgtt

SEQ ID NO: 4542007 - DNA, 25 bp, Homo sapien
tctgcagttactgaggactggcaaa

SEQ ID NO: 4542008 - DNA, 25 bp, Homo sapien
gttactgaggactggcaaataactt

SEQ ID NO: 4542009 - DNA, 25 bp, Homo sapien
cagttactgaggactggcaaataac

SEQ ID NO: 4542010 - DNA, 25 bp, Homo sapien
tgtgtctgcagttactgaggactgg

SEQ ID NO: 4542011 - DNA, 25 bp, Homo sapien
gagaagactaccagccattagtaac

SEQ ID NO: 4542012 - DNA, 25 bp, Homo sapien
cagatcatagatggaagcagtcacc

SEQ ID NO: 4542013 - DNA, 25 bp, Homo sapien
ggttagcatgaatcaattcccgaga

SEQ ID NO: 4542014 - DNA, 25 bp, Homo sapien
tctctgatcctaaaagaagtgccta

SEQ ID NO: 4542015 - DNA, 25 bp, Homo sapien
ccttggtgacaccttagttactagc

SEQ ID NO: 4542016 - DNA, 25 bp, Homo sapien
tagctgtacaaagatatctctgctc

SEQ ID NO: 4542017 - DNA, 25 bp, Homo sapien
ccgcatcaggcccatttgcattatt

SEQ ID NO: 4542018 - DNA, 25 bp, Homo sapien
aacatatattaagccccttggtgac

SEQ ID NO: 4542019 - DNA, 25 bp, Homo sapien
tttactggccatggaaagtccacct

SEQ ID NO: 4542020 - DNA, 25 bp, Homo sapien
gccatcatgtctacccattcctgaa

SEQ ID NO: 4542021 - DNA, 25 bp, Homo sapien
ctaaagtaaggctttactggccatg

SEQ ID NO: 4542022 - DNA, 25 bp, Homo sapien
gccatggaaagtccacctcctgcca

SEQ ID NO: 4542023 - DNA, 25 bp, Homo sapien
gattgcccaaatgccgaacagtgct

SEQ ID NO: 4542024 - DNA, 25 bp, Homo sapien
gcaaaataacctattagcattggca

SEQ ID NO: 4542025 - DNA, 25 bp, Homo sapien
cattctgccgaacactgattgccca

SEQ ID NO: 4542026 - DNA, 25 bp, Homo sapien
gctttcttggaggttcccatcccca

SEQ ID NO: 4542027 - DNA, 25 bp, Homo sapien
caccatgtctagccaaaagtccaaa

SEQ ID NO: 4542028 - DNA, 25 bp, Homo sapien
ccatgtctagccaaaagtccaaaga

SEQ ID NO: 4542029 - DNA, 25 bp, Homo sapien
accatgtctagccaaaagtccaaag

SEQ ID NO: 4542030 - DNA, 25 bp, Homo sapien
gaagttaacatagcaatcatgtagc

SEQ ID NO: 4542031 - DNA, 25 bp, Homo sapien
tagaactgtttattgttttcaggaa

SEQ ID NO: 4542032 - DNA, 25 bp, Homo sapien
tcatgtagcacaaacaaattagaac

SEQ ID NO: 4542033 - DNA, 25 bp, Homo sapien
taaaactatgtaaggcatcgaacta

SEQ ID NO: 4542034 - DNA, 25 bp, Homo sapien
cacgggagcattgtcaatgttttca

SEQ ID NO: 4542035 - DNA, 25 bp, Homo sapien
aaagagcagcttccggcgatgagcg

SEQ ID NO: 4542036 - DNA, 25 bp, Homo sapien
gcgatgagcgcaggatcctcctggc

SEQ ID NO: 4542037 - DNA, 25 bp, Homo sapien
ctcctggctgatgaactaaacacgg

SEQ ID NO: 4542038 - DNA, 25 bp, Homo sapien
agggctgtgactgcattcccgggaa

SEQ ID NO: 4542039 - DNA, 25 bp, Homo sapien
gagagagggctgtgactgcattccc

SEQ ID NO: 4542040 - DNA, 25 bp, Homo sapien
gcattcccgggaaagactactactc

SEQ ID NO: 4542041 - DNA, 25 bp, Homo sapien
tgtgactgcattcccgggaaagact

SEQ ID NO: 4542042 - DNA, 25 bp, Homo sapien
ttcaataggccactccgcatgggct

SEQ ID NO: 4542043 - DNA, 25 bp, Homo sapien
gaggactgggcttccttcaataggc

SEQ ID NO: 4542044 - DNA, 25 bp, Homo sapien
caagccccaaatcgctgggacttgt

SEQ ID NO: 4542045 - DNA, 25 bp, Homo sapien
taagtcgccgattcttcctggccac

SEQ ID NO: 4542046 - DNA, 25 bp, Homo sapien
agcagggtaggacttaggggtgtgg

SEQ ID NO: 4542047 - DNA, 25 bp, Homo sapien
caggggctccggtgaagacgccctg

SEQ ID NO: 4542048 - DNA, 25 bp, Homo sapien
gcggtccgccgcaaccaggaacgga

SEQ ID NO: 4542049 - DNA, 25 bp, Homo sapien
caggaacggacaaagcacggcgctg

SEQ ID NO: 4542050 - DNA, 25 bp, Homo sapien
gccgcaaccaggaacggacaaagca

SEQ ID NO: 4542051 - DNA, 25 bp, Homo sapien
ctagggcggtccgccgcaaccagga

SEQ ID NO: 4542052 - DNA, 25 bp, Homo sapien
cggggcggggcggcgcggcgctgac

SEQ ID NO: 4542053 - DNA, 25 bp, Homo sapien
ggcggggcggggcggcgcggcgctg

SEQ ID NO: 4542054 - DNA, 25 bp, Homo sapien
gcggggcggggcggcgcggcgctga

SEQ ID NO: 4542055 - DNA, 25 bp, Homo sapien
tgtcgtccagcagccgcacggtgca

SEQ ID NO: 4542056 - DNA, 25 bp, Homo sapien
ctgctgccgctcatcaacctgctca

SEQ ID NO: 4542057 - DNA, 25 bp, Homo sapien
gcacggtgcagctgtactcgcgctc

SEQ ID NO: 4542058 - DNA, 25 bp, Homo sapien
tgcagctgtactcgcgctccaggct

SEQ ID NO: 4542059 - DNA, 25 bp, Homo sapien
gaccaggcgtccctcagcccggcag

SEQ ID NO: 4542060 - DNA, 25 bp, Homo sapien
tggaccaggcgtccctcagcccggc

SEQ ID NO: 4542061 - DNA, 25 bp, Homo sapien
cctggaccaggcgtccctcagcccg

SEQ ID NO: 4542062 - DNA, 25 bp, Homo sapien
gaccctggaccaggcgtccctcagc

SEQ ID NO: 4542063 - DNA, 25 bp, Homo sapien
caccccggccccgtcgctgccgttg

SEQ ID NO: 4542064 - DNA, 25 bp, Homo sapien
ccggccccgtcgctgccgttgcctc

SEQ ID NO: 4542065 - DNA, 25 bp, Homo sapien
cggccccgtcgctgccgttgcctcc

SEQ ID NO: 4542066 - DNA, 25 bp, Homo sapien
atcaccccggccccgtcgctgccgt

SEQ ID NO: 4542067 - DNA, 25 bp, Homo sapien
cacacagagtgctacaatcatcata

SEQ ID NO: 4542068 - DNA, 25 bp, Homo sapien
tcagaactacatatgggagggcact

SEQ ID NO: 4542069 - DNA, 25 bp, Homo sapien
ctagggttatgagtctttgtgaaga

SEQ ID NO: 4542070 - DNA, 25 bp, Homo sapien
gaatgtccttccactgagatttgtc

SEQ ID NO: 4542071 - DNA, 25 bp, Homo sapien
taacctaggaaacgagactggcacc

SEQ ID NO: 4542072 - DNA, 25 bp, Homo sapien
tctaacccggaatgtgttcgctggc

SEQ ID NO: 4542073 - DNA, 25 bp, Homo sapien
tacgattcatcgagggcagcttctg

SEQ ID NO: 4542074 - DNA, 25 bp, Homo sapien
gacaaatattttcgcgagggccagt

SEQ ID NO: 4542075 - DNA, 25 bp, Homo sapien
ctgctggtggtgatcgtcgtcctcg

SEQ ID NO: 4542076 - DNA, 25 bp, Homo sapien
gctggaaaagcgcaattcggacctc

SEQ ID NO: 4542077 - DNA, 25 bp, Homo sapien
tggacacgcacaagaaacagatcga

SEQ ID NO: 4542078 - DNA, 25 bp, Homo sapien
acctcttgctgttggtggacacgca

SEQ ID NO: 4542079 - DNA, 25 bp, Homo sapien
ttaattcattcaggtctagggatgc

SEQ ID NO: 4542080 - DNA, 25 bp, Homo sapien
gatagagcctccaagcttaaggttt

SEQ ID NO: 4542081 - DNA, 25 bp, Homo sapien
tagggatgctttggatagagcctcc

SEQ ID NO: 4542082 - DNA, 25 bp, Homo sapien
cattcaggtctagggatgctttgga

SEQ ID NO: 4542083 - DNA, 25 bp, Homo sapien
tttcctattatccatgatttagaac

SEQ ID NO: 4542084 - DNA, 25 bp, Homo sapien
tcctattatccatgatttagaacag

SEQ ID NO: 4542085 - DNA, 25 bp, Homo sapien
aataagttgttgatttcctattatc

SEQ ID NO: 4542086 - DNA, 25 bp, Homo sapien
ttcctattatccatgatttagaaca

SEQ ID NO: 4542087 - DNA, 25 bp, Homo sapien
taatgtagacatttccccatagccc

SEQ ID NO: 4542088 - DNA, 25 bp, Homo sapien
acagcatagatgaaaggttgctttc

SEQ ID NO: 4542089 - DNA, 25 bp, Homo sapien
atatacatataggaagttggtgggt

SEQ ID NO: 4542090 - DNA, 25 bp, Homo sapien
cctccccttgttatttcagtagtat

SEQ ID NO: 4542091 - DNA, 25 bp, Homo sapien
cagaaaagtgaagagtagccaggtg

SEQ ID NO: 4542092 - DNA, 25 bp, Homo sapien
aaaagctctgcacaacagaggaaac

SEQ ID NO: 4542093 - DNA, 25 bp, Homo sapien
gaaaagtgaagagtagccaggtgca

SEQ ID NO: 4542094 - DNA, 25 bp, Homo sapien
agaaaagtgaagagtagccaggtgc

SEQ ID NO: 4542095 - DNA, 25 bp, Homo sapien
gaacaccaagttgtcccctgtgact

SEQ ID NO: 4542096 - DNA, 25 bp, Homo sapien
tgctgtctggagtaacctgccaaat

SEQ ID NO: 4542097 - DNA, 25 bp, Homo sapien
cctgtgactttaacggtgacactcc

SEQ ID NO: 4542098 - DNA, 25 bp, Homo sapien
aagcaggcatcggaaggcccttcga

SEQ ID NO: 4542099 - DNA, 25 bp, Homo sapien
ctctcgggagaaactcgataagcca

SEQ ID NO: 4542100 - DNA, 25 bp, Homo sapien
tctctcgggagaaactcgataagcc

SEQ ID NO: 4542101 - DNA, 25 bp, Homo sapien
ggatctctcgggagaaactcgataa

SEQ ID NO: 4542102 - DNA, 25 bp, Homo sapien
gaagagagtgggggccaatattcaa

SEQ ID NO: 4542103 - DNA, 25 bp, Homo sapien
cacaggccgattctttgatgaaaat

SEQ ID NO: 4542104 - DNA, 25 bp, Homo sapien
tgtcttggataaccttcacaaaatg

SEQ ID NO: 4542105 - DNA, 25 bp, Homo sapien
aaatgaatcccctgttgatccgcag

SEQ ID NO: 4542106 - DNA, 25 bp, Homo sapien
tctggtctgccttccgtatagattc

SEQ ID NO: 4542107 - DNA, 25 bp, Homo sapien
ttctctagatgatagtggcaggata

SEQ ID NO: 4542108 - DNA, 25 bp, Homo sapien
ggcattctctagatgatagtggcag

SEQ ID NO: 4542109 - DNA, 25 bp, Homo sapien
ctctagatgatagtggcaggatagg

SEQ ID NO: 4542110 - DNA, 25 bp, Homo sapien
cattctctagatgatagtggcagga

SEQ ID NO: 4542111 - DNA, 25 bp, Homo sapien
gaaaattatccactgctacatgatg

SEQ ID NO: 4542112 - DNA, 25 bp, Homo sapien
gatcctaaggagagctttctggaga

SEQ ID NO: 4542113 - DNA, 25 bp, Homo sapien
tctggagaggtacccgtgattattt

SEQ ID NO: 4542114 - DNA, 25 bp, Homo sapien
tgtttatagccataaggtgaggttc

SEQ ID NO: 4542115 - DNA, 25 bp, Homo sapien
ctacaggtacacacaaccatgcctg

SEQ ID NO: 4542116 - DNA, 25 bp, Homo sapien
gcaacctccacctcccaggctcaag

SEQ ID NO: 4542117 - DNA, 25 bp, Homo sapien
tgcagtggtgtgatctctgcttact

SEQ ID NO: 4542118 - DNA, 25 bp, Homo sapien
tgcctggctaaattttgtattttta

SEQ ID NO: 4542119 - DNA, 25 bp, Homo sapien
gcaacatttcaatgatgtcctttaa

SEQ ID NO: 4542120 - DNA, 25 bp, Homo sapien
gaacgagagcttcaaatggatcctg

SEQ ID NO: 4542121 - DNA, 25 bp, Homo sapien
tggatcctgcagactatggaaagca

SEQ ID NO: 4542122 - DNA, 25 bp, Homo sapien
caatgatgtcctttaagtcctaaag

SEQ ID NO: 4542123 - DNA, 25 bp, Homo sapien
tgcgcccagtctacacactaattct

SEQ ID NO: 4542124 - DNA, 25 bp, Homo sapien
tacccctcatttcacgctcaaggag

SEQ ID NO: 4542125 - DNA, 25 bp, Homo sapien
taaccacagtaagaacagaacagat

SEQ ID NO: 4542126 - DNA, 25 bp, Homo sapien
tatatgtggcatagcataaccacag

SEQ ID NO: 4542127 - DNA, 25 bp, Homo sapien
tacatgagtgctgatgtgttttggc

SEQ ID NO: 4542128 - DNA, 25 bp, Homo sapien
tgtgtagaaagtcacctccctactc

SEQ ID NO: 4542129 - DNA, 25 bp, Homo sapien
tgtacagtattgtgtagaaagtcac

SEQ ID NO: 4542130 - DNA, 25 bp, Homo sapien
cacacaagagggaaactggaagcca

SEQ ID NO: 4542131 - DNA, 25 bp, Homo sapien
gaaacaggttgttcacttgctgagg

SEQ ID NO: 4542132 - DNA, 25 bp, Homo sapien
cagaagggctactgttaattgcaca

SEQ ID NO: 4542133 - DNA, 25 bp, Homo sapien
tattcagtggaatgtgtaagctagc

SEQ ID NO: 4542134 - DNA, 25 bp, Homo sapien
gaacccgtcaagcttatatttgcta

SEQ ID NO: 4542135 - DNA, 25 bp, Homo sapien
tgtagctattacttatacagcaaca

SEQ ID NO: 4542136 - DNA, 25 bp, Homo sapien
catttcttcaattagcagtctagac

SEQ ID NO: 4542137 - DNA, 25 bp, Homo sapien
aaaatcatcatttactgggttctaa

SEQ ID NO: 4542138 - DNA, 25 bp, Homo sapien
tttacagtctgtattagacatactg

SEQ ID NO: 4542139 - DNA, 25 bp, Homo sapien
gaccgtcctttgacctagggtcgca

SEQ ID NO: 4542140 - DNA, 25 bp, Homo sapien
tatgatccaaaagcgactgctacgc

SEQ ID NO: 4542141 - DNA, 25 bp, Homo sapien
ccactggcctgaaagatccgagttt

SEQ ID NO: 4542142 - DNA, 25 bp, Homo sapien
caacatagggttgagtcgaagggca

SEQ ID NO: 4542143 - DNA, 25 bp, Homo sapien
tgttgttgccgttgtggctgcccgc

SEQ ID NO: 4542144 - DNA, 25 bp, Homo sapien
taaggaacttcaacgctcttcacgg

SEQ ID NO: 4542145 - DNA, 25 bp, Homo sapien
tagagagtttcttccggcgtaagga

SEQ ID NO: 4542146 - DNA, 25 bp, Homo sapien
taatcgacccagtactaaggccttg

SEQ ID NO: 4542147 - DNA, 25 bp, Homo sapien
gaggaggaagtcagggcgcctgcgc

SEQ ID NO: 4542148 - DNA, 25 bp, Homo sapien
agggcgcctgcgcggagaggccgct

SEQ ID NO: 4542149 - DNA, 25 bp, Homo sapien
aggaggaagtcagggcgcctgcgcg

SEQ ID NO: 4542150 - DNA, 25 bp, Homo sapien
ggcgcctgcgcggagaggccgcttt

SEQ ID NO: 4542151 - DNA, 25 bp, Homo sapien
catccgggtccctgtccgtgcggtg

SEQ ID NO: 4542152 - DNA, 25 bp, Homo sapien
tccgggtccctgtccgtgcggtgca

SEQ ID NO: 4542153 - DNA, 25 bp, Homo sapien
cgggaaatggcgactggctgaagga

SEQ ID NO: 4542154 - DNA, 25 bp, Homo sapien
agcaggtcggtaggcgggaaatggc

SEQ ID NO: 4542155 - DNA, 25 bp, Homo sapien
ggaccatcgccggagcctgaggaca

SEQ ID NO: 4542156 - DNA, 25 bp, Homo sapien
ttgcgcagtcgggaccatcgccgga

SEQ ID NO: 4542157 - DNA, 25 bp, Homo sapien
gacaccacacattgcgcagtcggga

SEQ ID NO: 4542158 - DNA, 25 bp, Homo sapien
gggtaagcgggaaagacaccacaca

SEQ ID NO: 4542159 - DNA, 25 bp, Homo sapien
tttggcgcctcgtacgtccactgtg

SEQ ID NO: 4542160 - DNA, 25 bp, Homo sapien
tgtgcggagccgctcctgtctggac

SEQ ID NO: 4542161 - DNA, 25 bp, Homo sapien
tgtcgtcacagttaggtaatcccct

SEQ ID NO: 4542162 - DNA, 25 bp, Homo sapien
gctctggcgccttggtaggcatgca

SEQ ID NO: 4542163 - DNA, 25 bp, Homo sapien
aagggagctcacttcccgccagctt

SEQ ID NO: 4542164 - DNA, 25 bp, Homo sapien
gaacagaaagggagctcacttcccg

SEQ ID NO: 4542165 - DNA, 25 bp, Homo sapien
ctgggaacagaaagggagctcactt

SEQ ID NO: 4542166 - DNA, 25 bp, Homo sapien
agaaagggagctcacttcccgccag

SEQ ID NO: 4542167 - DNA, 25 bp, Homo sapien
cttttcagaatctggaagaagggat

SEQ ID NO: 4542168 - DNA, 25 bp, Homo sapien
gcacctatgtgctccaggccagtgg

SEQ ID NO: 4542169 - DNA, 25 bp, Homo sapien
cggatgttccaggttgttggcacct

SEQ ID NO: 4542170 - DNA, 25 bp, Homo sapien
cccagttccatccggatgttccagg

SEQ ID NO: 4542171 - DNA, 25 bp, Homo sapien
tcctctccagactgttggcacccgt

SEQ ID NO: 4542172 - DNA, 25 bp, Homo sapien
ttgtgctccacaaagcccatgcggt

SEQ ID NO: 4542173 - DNA, 25 bp, Homo sapien
tgcgctccgtgaccttgcctgtgtg

SEQ ID NO: 4542174 - DNA, 25 bp, Homo sapien
cagacccatgtgctgcatcttggaa

SEQ ID NO: 4542175 - DNA, 25 bp, Homo sapien
gaggccatttggtcaaggcccagca

SEQ ID NO: 4542176 - DNA, 25 bp, Homo sapien
gattggcatcgatagtctgccctcc

SEQ ID NO: 4542177 - DNA, 25 bp, Homo sapien
tcctggtcctaaccctgttccaata

SEQ ID NO: 4542178 - DNA, 25 bp, Homo sapien
gcatcgatagtctgccctcctggtc

SEQ ID NO: 4542179 - DNA, 25 bp, Homo sapien
caggtgattggcatcgatagtctgc

SEQ ID NO: 4542180 - DNA, 25 bp, Homo sapien
aaatcctttggtaaggcggtctcat

SEQ ID NO: 4542181 - DNA, 25 bp, Homo sapien
atcctttggtaaggcggtctcatcc

SEQ ID NO: 4542182 - DNA, 25 bp, Homo sapien
gtaaggcggtctcatccgtctttac

SEQ ID NO: 4542183 - DNA, 25 bp, Homo sapien
tttggtaaggcggtctcatccgtct

SEQ ID NO: 4542184 - DNA, 25 bp, Homo sapien
ctgcgttggtctatcacacagcagt

SEQ ID NO: 4542185 - DNA, 25 bp, Homo sapien
ttggccattgaatgtagatatagct

SEQ ID NO: 4542186 - DNA, 25 bp, Homo sapien
cagcagttggccattgaatgtagat

SEQ ID NO: 4542187 - DNA, 25 bp, Homo sapien
gcgttggtctatcacacagcagttg

SEQ ID NO: 4542188 - DNA, 25 bp, Homo sapien
tccaccagtggtagccatcacgttt

SEQ ID NO: 4542189 - DNA, 25 bp, Homo sapien
tccagccaactttgtaatcctgatt

SEQ ID NO: 4542190 - DNA, 25 bp, Homo sapien
gggccacttggtctcatatctgttc

SEQ ID NO: 4542191 - DNA, 25 bp, Homo sapien
tatgcttgtctagcacctgaatagc

SEQ ID NO: 4542192 - DNA, 25 bp, Homo sapien
catcaaggccatcaacgtatctgtc

SEQ ID NO: 4542193 - DNA, 25 bp, Homo sapien
ctctctagccctaagcagtcactaa

SEQ ID NO: 4542194 - DNA, 25 bp, Homo sapien
tagtatagttaagtataggcacagc

SEQ ID NO: 4542195 - DNA, 25 bp, Homo sapien
taggcacagcactatgttgtatagt

SEQ ID NO: 4542196 - DNA, 25 bp, Homo sapien
tgtgcctgccctactcacatttgat

SEQ ID NO: 4542197 - DNA, 25 bp, Homo sapien
gttatgtagttcagggtatctcttt

SEQ ID NO: 4542198 - DNA, 25 bp, Homo sapien
ttctgacacgtgttctttatctata

SEQ ID NO: 4542199 - DNA, 25 bp, Homo sapien
gctccacgtgtgtttcattatagta

SEQ ID NO: 4542200 - DNA, 25 bp, Homo sapien
tgcaatttaacccacctttgaccca

SEQ ID NO: 4542201 - DNA, 25 bp, Homo sapien
ggctttggcttcctgttcgatgttt

SEQ ID NO: 4542202 - DNA, 25 bp, Homo sapien
cagtcaaatcaatacaattacgttc

SEQ ID NO: 4542203 - DNA, 25 bp, Homo sapien
tgcccagtggtataagactaataaa

SEQ ID NO: 4542204 - DNA, 25 bp, Homo sapien
agatttttaaatgggctgagcttag

SEQ ID NO: 4542205 - DNA, 25 bp, Homo sapien
ttacagtgacctgtgatagagtgag

SEQ ID NO: 4542206 - DNA, 25 bp, Homo sapien
gatgagagtacgttatatatgtgga

SEQ ID NO: 4542207 - DNA, 25 bp, Homo sapien
tattgccaagatatgtgacctgtag

SEQ ID NO: 4542208 - DNA, 25 bp, Homo sapien
aaatccatctcgtggtgttactcag

SEQ ID NO: 4542209 - DNA, 25 bp, Homo sapien
gatgacttctatccacaagcaggag

SEQ ID NO: 4542210 - DNA, 25 bp, Homo sapien
tgttactcagttaagaggtctccac

SEQ ID NO: 4542211 - DNA, 25 bp, Homo sapien
gatccaccaattcaagactctaggt

SEQ ID NO: 4542212 - DNA, 25 bp, Homo sapien
tctaatgcagctaccacaagaggtt

SEQ ID NO: 4542213 - DNA, 25 bp, Homo sapien
ggtaatatcttgcaatggcacacag

SEQ ID NO: 4542214 - DNA, 25 bp, Homo sapien
cagtagctatgcataatcctgtggc

SEQ ID NO: 4542215 - DNA, 25 bp, Homo sapien
tagtggcgtgtaatctccttttcgg

SEQ ID NO: 4542216 - DNA, 25 bp, Homo sapien
aagcatttgcaattcagaatactga

SEQ ID NO: 4542217 - DNA, 25 bp, Homo sapien
aaagaaaggtattttgcttgcagga

SEQ ID NO: 4542218 - DNA, 25 bp, Homo sapien
tagcatgtagagcaagcctgttttg

SEQ ID NO: 4542219 - DNA, 25 bp, Homo sapien
tagttagcatattgtgtcactgaac

SEQ ID NO: 4542220 - DNA, 25 bp, Homo sapien
tccttgtgtcctaagagaattgatg

SEQ ID NO: 4542221 - DNA, 25 bp, Homo sapien
tgtaatatatgtagccctcatcaga

SEQ ID NO: 4542222 - DNA, 25 bp, Homo sapien
aaagtcgtgctatttccagtggtaa

SEQ ID NO: 4542223 - DNA, 25 bp, Homo sapien
tacctgatgagacacagcgaaagtg

SEQ ID NO: 4542224 - DNA, 25 bp, Homo sapien
ttcttcataaggaccagatctcttc

SEQ ID NO: 4542225 - DNA, 25 bp, Homo sapien
cataaggaccagatctcttccatgt

SEQ ID NO: 4542226 - DNA, 25 bp, Homo sapien
tctttcctgcgagcacagaattctt

SEQ ID NO: 4542227 - DNA, 25 bp, Homo sapien
tttcattattcctacagatctttcc

SEQ ID NO: 4542228 - DNA, 25 bp, Homo sapien
tgtcactcaatatccaaaggcatcg

SEQ ID NO: 4542229 - DNA, 25 bp, Homo sapien
cactatattagtacgggttctccag

SEQ ID NO: 4542230 - DNA, 25 bp, Homo sapien
taggcgtgcctaaccagttttcagg

SEQ ID NO: 4542231 - DNA, 25 bp, Homo sapien
taagcaactagataagtgtcactca

SEQ ID NO: 4542232 - DNA, 25 bp, Homo sapien
taacatgggtagcatcgcctagcca

SEQ ID NO: 4542233 - DNA, 25 bp, Homo sapien
tcacattattctgggagctggcaag

SEQ ID NO: 4542234 - DNA, 25 bp, Homo sapien
gacccagggagatttgacgctgcag

SEQ ID NO: 4542235 - DNA, 25 bp, Homo sapien
taatttgaactgaccggatgcggcc

SEQ ID NO: 4542236 - DNA, 25 bp, Homo sapien
aaatggctgtctgtagatcatggcc

SEQ ID NO: 4542237 - DNA, 25 bp, Homo sapien
cgtgtccggccctgatccaccttta

SEQ ID NO: 4542238 - DNA, 25 bp, Homo sapien
gatcatggcctctcacattttaact

SEQ ID NO: 4542239 - DNA, 25 bp, Homo sapien
actgggctgtagaatatgtattgaa

SEQ ID NO: 4542240 - DNA, 25 bp, Homo sapien
tttgagacgggtctaactgtcgccc

SEQ ID NO: 4542241 - DNA, 25 bp, Homo sapien
catgaatgttgtaccaagttcgcgt

SEQ ID NO: 4542242 - DNA, 25 bp, Homo sapien
ccagtggcccaacggcgaagtttag

SEQ ID NO: 4542243 - DNA, 25 bp, Homo sapien
ctgacagcaaatgatccgcccatct

SEQ ID NO: 4542244 - DNA, 25 bp, Homo sapien
ggctagctctttaaaatcctgcggg

SEQ ID NO: 4542245 - DNA, 25 bp, Homo sapien
taccggaaatgcacttcagcaaatg

SEQ ID NO: 4542246 - DNA, 25 bp, Homo sapien
caacttcagtttcaaccagcgccta

SEQ ID NO: 4542247 - DNA, 25 bp, Homo sapien
gggcaaagatacacctcatacctag

SEQ ID NO: 4542248 - DNA, 25 bp, Homo sapien
gttccatttatctctgactgcgcca

SEQ ID NO: 4542249 - DNA, 25 bp, Homo sapien
gaaaaaaaaatcaatgtgctggcct

SEQ ID NO: 4542250 - DNA, 25 bp, Homo sapien
aaaaatcaatgtgctggcctcaaag

SEQ ID NO: 4542251 - DNA, 25 bp, Homo sapien
aaaaaatcaatgtgctggcctcaaa

SEQ ID NO: 4542252 - DNA, 25 bp, Homo sapien
aaaaaaaatcaatgtgctggcctca

SEQ ID NO: 4542253 - DNA, 25 bp, Homo sapien
gaaaagcctcgaagactaaggctct

SEQ ID NO: 4542254 - DNA, 25 bp, Homo sapien
gtgactaactcgaggcaaacatgcc

SEQ ID NO: 4542255 - DNA, 25 bp, Homo sapien
aggcaaacatgccaggaacgcggct

SEQ ID NO: 4542256 - DNA, 25 bp, Homo sapien
tctcttcgattccttcgtgactaac

SEQ ID NO: 4542257 - DNA, 25 bp, Homo sapien
agcgcgcgacgactccctctggggt

SEQ ID NO: 4542258 - DNA, 25 bp, Homo sapien
ctagcgcgcgacgactccctctggg

SEQ ID NO: 4542259 - DNA, 25 bp, Homo sapien
tagcgcgcgacgactccctctgggg

SEQ ID NO: 4542260 - DNA, 25 bp, Homo sapien
cgcgcgacgactccctctggggtcc

SEQ ID NO: 4542261 - DNA, 25 bp, Homo sapien
catggacggtgatcacagtgaccag

SEQ ID NO: 4542262 - DNA, 25 bp, Homo sapien
cagcaccacgaactccagtactggt

SEQ ID NO: 4542263 - DNA, 25 bp, Homo sapien
aagaaccactctgctaacttcctgg

SEQ ID NO: 4542264 - DNA, 25 bp, Homo sapien
ccctcttctgagcacggcgtgggta

SEQ ID NO: 4542265 - DNA, 25 bp, Homo sapien
ggaagcccgacccagcactcctcag

SEQ ID NO: 4542266 - DNA, 25 bp, Homo sapien
ctggaagcccgacccagcactcctc

SEQ ID NO: 4542267 - DNA, 25 bp, Homo sapien
aagcccgacccagcactcctcagcc

SEQ ID NO: 4542268 - DNA, 25 bp, Homo sapien
gcccgacccagcactcctcagcccc

SEQ ID NO: 4542269 - DNA, 25 bp, Homo sapien
cgccgacgctttctccgtggaagac

SEQ ID NO: 4542270 - DNA, 25 bp, Homo sapien
gctttcttccgtagacgccgacgct

SEQ ID NO: 4542271 - DNA, 25 bp, Homo sapien
gctggcgctgttgccggccgactct

SEQ ID NO: 4542272 - DNA, 25 bp, Homo sapien
agagtctgctctccggcgtggatcc

SEQ ID NO: 4542273 - DNA, 25 bp, Homo sapien
ggaagagtcagacctcgaattagca

SEQ ID NO: 4542274 - DNA, 25 bp, Homo sapien
taaactgttacaggtgaagacccag

SEQ ID NO: 4542275 - DNA, 25 bp, Homo sapien
tcttaaaagaaacatactggctaat

SEQ ID NO: 4542276 - DNA, 25 bp, Homo sapien
taagacgggattatgattgcaatac

SEQ ID NO: 4542277 - DNA, 25 bp, Homo sapien
ggcttccctaagagatacctgggct

SEQ ID NO: 4542278 - DNA, 25 bp, Homo sapien
tgggcttgtcagcaaagcagctaat

SEQ ID NO: 4542279 - DNA, 25 bp, Homo sapien
tttatctgattatcacttgagaggg

SEQ ID NO: 4542280 - DNA, 25 bp, Homo sapien
ctaataaaacactggcctattcttt

SEQ ID NO: 4542281 - DNA, 25 bp, Homo sapien
tgtagttcccgtgcaagaaaatgga

SEQ ID NO: 4542282 - DNA, 25 bp, Homo sapien
tttctggtagctaaaaactggtgtc

SEQ ID NO: 4542283 - DNA, 25 bp, Homo sapien
agaattgtcattctggccgggcgtg

SEQ ID NO: 4542284 - DNA, 25 bp, Homo sapien
ggaggtgttctctaaccaaaactga

SEQ ID NO: 4542285 - DNA, 25 bp, Homo sapien
tgccaaatgctacaatcagaagtgc

SEQ ID NO: 4542286 - DNA, 25 bp, Homo sapien
ggattaaaagccaccatgaaagatg

SEQ ID NO: 4542287 - DNA, 25 bp, Homo sapien
tagcagcagtcactaaattggaaac

SEQ ID NO: 4542288 - DNA, 25 bp, Homo sapien
ggaaacaaaaggttgcaacgtgaca

SEQ ID NO: 4542289 - DNA, 25 bp, Homo sapien
catgctcagcaaactgcaccagtta

SEQ ID NO: 4542290 - DNA, 25 bp, Homo sapien
tctcttaggctgcaatggaacaact

SEQ ID NO: 4542291 - DNA, 25 bp, Homo sapien
catgttgtggaatctctcgagtgca

SEQ ID NO: 4542292 - DNA, 25 bp, Homo sapien
tttgtgttacctcccaagagatact

SEQ ID NO: 4542293 - DNA, 25 bp, Homo sapien
ggaaaacaagaccatcatctaagtg

SEQ ID NO: 4542294 - DNA, 25 bp, Homo sapien
ggaacgtcaaagctctgtataccta

SEQ ID NO: 4542295 - DNA, 25 bp, Homo sapien
cctaagcagtttaaccaaatgtgtg

SEQ ID NO: 4542296 - DNA, 25 bp, Homo sapien
ttaaggcagacaagggctaagattt

SEQ ID NO: 4542297 - DNA, 25 bp, Homo sapien
tctttaatcattattggatcatcta

SEQ ID NO: 4542298 - DNA, 25 bp, Homo sapien
gaaagatcagtttctaacaaatgaa

SEQ ID NO: 4542299 - DNA, 25 bp, Homo sapien
ttggatcatctaaagtagaagctgt

SEQ ID NO: 4542300 - DNA, 25 bp, Homo sapien
taaaatggtgtggatgaacaatcat

SEQ ID NO: 4542301 - DNA, 25 bp, Homo sapien
ctacccacaaaggactgatatggta

SEQ ID NO: 4542302 - DNA, 25 bp, Homo sapien
gcaaagatctccaatgcattcttct

SEQ ID NO: 4542303 - DNA, 25 bp, Homo sapien
tcaactttagcaaagatctccaatg

SEQ ID NO: 4542304 - DNA, 25 bp, Homo sapien
tatggtacagtaccgggattgttca

SEQ ID NO: 4542305 - DNA, 25 bp, Homo sapien
ctaacagtacaagaaaacagacacc

SEQ ID NO: 4542306 - DNA, 25 bp, Homo sapien
taacagtacaagaaaacagacacct

SEQ ID NO: 4542307 - DNA, 25 bp, Homo sapien
ggtaaacatcttcacaatatgtgag

SEQ ID NO: 4542308 - DNA, 25 bp, Homo sapien
tgccaacttgtaatacaggtaaaca

SEQ ID NO: 4542309 - DNA, 25 bp, Homo sapien
taaaacttgtgttcgtatgccaact

SEQ ID NO: 4542310 - DNA, 25 bp, Homo sapien
accatgtcagtaggctgatgttgtt

SEQ ID NO: 4542311 - DNA, 25 bp, Homo sapien
atctcttcaaatatactggacttta

SEQ ID NO: 4542312 - DNA, 25 bp, Homo sapien
taattaaagtctcctttaagaatca

SEQ ID NO: 4542313 - DNA, 25 bp, Homo sapien
caaatatactggactttaataacct

SEQ ID NO: 4542314 - DNA, 25 bp, Homo sapien
tactggactttaataacctttgctg

SEQ ID NO: 4542315 - DNA, 25 bp, Homo sapien
ggtataaaatttcagcccaatctgg

SEQ ID NO: 4542316 - DNA, 25 bp, Homo sapien
ttcagcccaatctggaacaaaatcg

SEQ ID NO: 4542317 - DNA, 25 bp, Homo sapien
gctggtataaaatttcagcccaatc

SEQ ID NO: 4542318 - DNA, 25 bp, Homo sapien
tggaacaaaatcgtaggcctcagcc

SEQ ID NO: 4542319 - DNA, 25 bp, Homo sapien
gtgaatctgcagagttatcaacttg

SEQ ID NO: 4542320 - DNA, 25 bp, Homo sapien
cttggtgagccgctgacagtgctgg

SEQ ID NO: 4542321 - DNA, 25 bp, Homo sapien
tagaaccgaggtagggccagaatac

SEQ ID NO: 4542322 - DNA, 25 bp, Homo sapien
tgagcattgtgttctggccagtgtt

SEQ ID NO: 4542323 - DNA, 25 bp, Homo sapien
cctgtgtgaaccctcacaacggtat

SEQ ID NO: 4542324 - DNA, 25 bp, Homo sapien
tcacaacggtattcaccccttctgt

SEQ ID NO: 4542325 - DNA, 25 bp, Homo sapien
gaaagacctagttgtcacctcctgt

SEQ ID NO: 4542326 - DNA, 25 bp, Homo sapien
tggagaggcacagtagagaaagacc

SEQ ID NO: 4542327 - DNA, 25 bp, Homo sapien
gcagcagttgtttcagctggtgccc

SEQ ID NO: 4542328 - DNA, 25 bp, Homo sapien
cagcagcagttgtttcagctggtgc

SEQ ID NO: 4542329 - DNA, 25 bp, Homo sapien
cagcagttgtttcagctggtgccca

SEQ ID NO: 4542330 - DNA, 25 bp, Homo sapien
agcagcagttgtttcagctggtgcc

SEQ ID NO: 4542331 - DNA, 25 bp, Homo sapien
cggcagcgtttgatgtagtccagca

SEQ ID NO: 4542332 - DNA, 25 bp, Homo sapien
caatttcagttggatgcgggcagct

SEQ ID NO: 4542333 - DNA, 25 bp, Homo sapien
cagggctgagactcaatcaatttca

SEQ ID NO: 4542334 - DNA, 25 bp, Homo sapien
caatctcccggcacatgctgaagca

SEQ ID NO: 4542335 - DNA, 25 bp, Homo sapien
gaaaaagcaaggtgtcagtcaggga

SEQ ID NO: 4542336 - DNA, 25 bp, Homo sapien
agggaaaaagcaaggtgtcagtcag

SEQ ID NO: 4542337 - DNA, 25 bp, Homo sapien
aagggaaaaagcaaggtgtcagtca

SEQ ID NO: 4542338 - DNA, 25 bp, Homo sapien
tgcccagaataaaagggaaaaagca

SEQ ID NO: 4542339 - DNA, 25 bp, Homo sapien
gacaggactagctgagtcaccttgt

SEQ ID NO: 4542340 - DNA, 25 bp, Homo sapien
gaatctgtccctaaagagataagca

SEQ ID NO: 4542341 - DNA, 25 bp, Homo sapien
cgcataagctgatctaacaattcca

SEQ ID NO: 4542342 - DNA, 25 bp, Homo sapien
tatgctgtcccaagtatgaggaaac

SEQ ID NO: 4542343 - DNA, 25 bp, Homo sapien
ttccaatgccagtgaggagccgtac

SEQ ID NO: 4542344 - DNA, 25 bp, Homo sapien
cttcctcattagcacttcaaagtag

SEQ ID NO: 4542345 - DNA, 25 bp, Homo sapien
tatgcagcaaatcaaatatgtatgt

SEQ ID NO: 4542346 - DNA, 25 bp, Homo sapien
tatgtcatctcgttgtaccttccaa

SEQ ID NO: 4542347 - DNA, 25 bp, Homo sapien
ctcaagtgctaaagtgccattctcc

SEQ ID NO: 4542348 - DNA, 25 bp, Homo sapien
gagccaccatgaacggctttgctgt

SEQ ID NO: 4542349 - DNA, 25 bp, Homo sapien
gactctcaagtgctaaagtgccatt

SEQ ID NO: 4542350 - DNA, 25 bp, Homo sapien
ctctcaagtgctaaagtgccattct

SEQ ID NO: 4542351 - DNA, 25 bp, Homo sapien
cggcctgtaggactcggatgatgcc

SEQ ID NO: 4542352 - DNA, 25 bp, Homo sapien
cgtcagggtgaagcaatgatgggcc

SEQ ID NO: 4542353 - DNA, 25 bp, Homo sapien
ttatctgtgagcatgtgggcggcct

SEQ ID NO: 4542354 - DNA, 25 bp, Homo sapien
tcggatgatgccctccatgtggcac

SEQ ID NO: 4542355 - DNA, 25 bp, Homo sapien
ccattagaagttatatagaagaata

SEQ ID NO: 4542356 - DNA, 25 bp, Homo sapien
tataagaaatctgtgtaaccattag

SEQ ID NO: 4542357 - DNA, 25 bp, Homo sapien
gaaatctgtgtaaccattagaagtt

SEQ ID NO: 4542358 - DNA, 25 bp, Homo sapien
gtaaccattagaagttatatagaag

SEQ ID NO: 4542359 - DNA, 25 bp, Homo sapien
gcggtcttgacacagagtggtcagc

SEQ ID NO: 4542360 - DNA, 25 bp, Homo sapien
caacttcatgcctaccaatgtgcgg

SEQ ID NO: 4542361 - DNA, 25 bp, Homo sapien
ggaacggaggaaatcttatccaaca

SEQ ID NO: 4542362 - DNA, 25 bp, Homo sapien
cagctgaagaaatgtctggctttcc

SEQ ID NO: 4542363 - DNA, 25 bp, Homo sapien
gttgggttgaacatctgcttatgtc

SEQ ID NO: 4542364 - DNA, 25 bp, Homo sapien
ctgttgggttgaacatctgcttatg

SEQ ID NO: 4542365 - DNA, 25 bp, Homo sapien
tgttgggttgaacatctgcttatgt

SEQ ID NO: 4542366 - DNA, 25 bp, Homo sapien
tgctgtcagagaggttgggaatccc

SEQ ID NO: 4542367 - DNA, 25 bp, Homo sapien
gaaacttgagagaaccacatacagg

SEQ ID NO: 4542368 - DNA, 25 bp, Homo sapien
cactgggaactagagaatgctgtca

SEQ ID NO: 4542369 - DNA, 25 bp, Homo sapien
catccaaatccttaacactgggaac

SEQ ID NO: 4542370 - DNA, 25 bp, Homo sapien
ggcctgggctcgtttgcatcggtca

SEQ ID NO: 4542371 - DNA, 25 bp, Homo sapien
tgtgatgaagtaagcagctcccgtg

SEQ ID NO: 4542372 - DNA, 25 bp, Homo sapien
tgagaggccaagattttccggagca

SEQ ID NO: 4542373 - DNA, 25 bp, Homo sapien
catcggtcaggctgctgagaggcca

SEQ ID NO: 4542374 - DNA, 25 bp, Homo sapien
aacatctgtgtaggaacagcccaac

SEQ ID NO: 4542375 - DNA, 25 bp, Homo sapien
catctgtgtaggaacagcccaactc

SEQ ID NO: 4542376 - DNA, 25 bp, Homo sapien
caacatctgtgtaggaacagcccaa

SEQ ID NO: 4542377 - DNA, 25 bp, Homo sapien
gcaacatctgtgtaggaacagccca

SEQ ID NO: 4542378 - DNA, 25 bp, Homo sapien
caagcagcgcaaaggtacagacgat

SEQ ID NO: 4542379 - DNA, 25 bp, Homo sapien
caccgactaaaatacgagagccttt

SEQ ID NO: 4542380 - DNA, 25 bp, Homo sapien
gcctttattattcccagagcagcag

SEQ ID NO: 4542381 - DNA, 25 bp, Homo sapien
gtcttctccaagacgagggctttag

SEQ ID NO: 4542382 - DNA, 25 bp, Homo sapien
cgacagtagttcttcccatggaggc

SEQ ID NO: 4542383 - DNA, 25 bp, Homo sapien
ggagggcactgtcacaaacttctga

SEQ ID NO: 4542384 - DNA, 25 bp, Homo sapien
tcagcacttccaggttagttaccac

SEQ ID NO: 4542385 - DNA, 25 bp, Homo sapien
tagttaccacttcattactggaggg

SEQ ID NO: 4542386 - DNA, 25 bp, Homo sapien
actgcactcccattactctgactgg

SEQ ID NO: 4542387 - DNA, 25 bp, Homo sapien
gggataggaccactgctgacagggc

SEQ ID NO: 4542388 - DNA, 25 bp, Homo sapien
agctctctatggctctacctctctg

SEQ ID NO: 4542389 - DNA, 25 bp, Homo sapien
tctctgcttgaagctccctgcactg

SEQ ID NO: 4542390 - DNA, 25 bp, Homo sapien
aagtagaaaatgcataccaagcaag

SEQ ID NO: 4542391 - DNA, 25 bp, Homo sapien
ccaagcaagtaaaagatagttattc

SEQ ID NO: 4542392 - DNA, 25 bp, Homo sapien
tttgtgggagtagtgttgaattggc

SEQ ID NO: 4542393 - DNA, 25 bp, Homo sapien
tgcataccaagcaagtaaaagatag

SEQ ID NO: 4542394 - DNA, 25 bp, Homo sapien
gaaagataacctgaatagtcctgta

SEQ ID NO: 4542395 - DNA, 25 bp, Homo sapien
caaaaagaataacgcaccaggccca

SEQ ID NO: 4542396 - DNA, 25 bp, Homo sapien
ccatggaggcgaaaaggaagtgaac

SEQ ID NO: 4542397 - DNA, 25 bp, Homo sapien
ctaaaatggtggtaagattcctcct

SEQ ID NO: 4542398 - DNA, 25 bp, Homo sapien
cactttgtaggagagcatggatctc

SEQ ID NO: 4542399 - DNA, 25 bp, Homo sapien
ccacatgggcctgggttgagaaaaa

SEQ ID NO: 4542400 - DNA, 25 bp, Homo sapien
cagtaggcgcccaatcaaaaagttt

SEQ ID NO: 4542401 - DNA, 25 bp, Homo sapien
caccactagttgagatctgtcgaga

SEQ ID NO: 4542402 - DNA, 25 bp, Homo sapien
aaatagatctacattcatgctgaag

SEQ ID NO: 4542403 - DNA, 25 bp, Homo sapien
gaagattctcaatgctgtagctggt

SEQ ID NO: 4542404 - DNA, 25 bp, Homo sapien
cctcctggccaaagcgaattgtcca

SEQ ID NO: 4542405 - DNA, 25 bp, Homo sapien
caggtaactcagctaattctgctac

SEQ ID NO: 4542406 - DNA, 25 bp, Homo sapien
aaggctgggccgtttgcatagcttc

SEQ ID NO: 4542407 - DNA, 25 bp, Homo sapien
gtttgcatagcttcagtgacagatt

SEQ ID NO: 4542408 - DNA, 25 bp, Homo sapien
tctcagaaggctgggccgtttgcat

SEQ ID NO: 4542409 - DNA, 25 bp, Homo sapien
cttctcagaaggctgggccgtttgc

SEQ ID NO: 4542410 - DNA, 25 bp, Homo sapien
agctcatactgggtcttacactgct

SEQ ID NO: 4542411 - DNA, 25 bp, Homo sapien
aaagagctgtaaaagcttccccagc

SEQ ID NO: 4542412 - DNA, 25 bp, Homo sapien
cactgctgtagcataagcttcaaaa

SEQ ID NO: 4542413 - DNA, 25 bp, Homo sapien
gaaacacacctgatcctccagccac

SEQ ID NO: 4542414 - DNA, 25 bp, Homo sapien
tggaaagttctggtatagagctgca

SEQ ID NO: 4542415 - DNA, 25 bp, Homo sapien
ggaaagcagtttcatgagaatagca

SEQ ID NO: 4542416 - DNA, 25 bp, Homo sapien
aaattccctcaaaagccatcgcctg

SEQ ID NO: 4542417 - DNA, 25 bp, Homo sapien
tccaaatggcaggaactggtaatgg

SEQ ID NO: 4542418 - DNA, 25 bp, Homo sapien
tagccaactggccatagggagtaat

SEQ ID NO: 4542419 - DNA, 25 bp, Homo sapien
cagtacctctgtgcctagtgctgag

SEQ ID NO: 4542420 - DNA, 25 bp, Homo sapien
gatgatagcgcccaacagatgcttc

SEQ ID NO: 4542421 - DNA, 25 bp, Homo sapien
gaacactggtagtcagctcactaaa

SEQ ID NO: 4542422 - DNA, 25 bp, Homo sapien
tcttctgaaactccagaagtttagc

SEQ ID NO: 4542423 - DNA, 25 bp, Homo sapien
attcctgaagaacatacacagttca

SEQ ID NO: 4542424 - DNA, 25 bp, Homo sapien
tctccatcaccagtagtaacgggga

SEQ ID NO: 4542425 - DNA, 25 bp, Homo sapien
tcagcttctttataattcctgaaga

SEQ ID NO: 4542426 - DNA, 25 bp, Homo sapien
gttaataatgttctccagatgactg

SEQ ID NO: 4542427 - DNA, 25 bp, Homo sapien
tcctcaaggttccaggtatggtcct

SEQ ID NO: 4542428 - DNA, 25 bp, Homo sapien
tctgttgagtcctgaatgtgtccca

SEQ ID NO: 4542429 - DNA, 25 bp, Homo sapien
cagatgactgaaagatcctcaaggt

SEQ ID NO: 4542430 - DNA, 25 bp, Homo sapien
gccagccttaagtggtcttgaatga

SEQ ID NO: 4542431 - DNA, 25 bp, Homo sapien
tcttgaatgactgggctgaagtact

SEQ ID NO: 4542432 - DNA, 25 bp, Homo sapien
ggcacttattgcagacttgatcgct

SEQ ID NO: 4542433 - DNA, 25 bp, Homo sapien
tcactgcttcaaccagaagccagtg

SEQ ID NO: 4542434 - DNA, 25 bp, Homo sapien
tagtttcatattgtgtagcctgcag

SEQ ID NO: 4542435 - DNA, 25 bp, Homo sapien
gcctgcagaactgcaccactaatgc

SEQ ID NO: 4542436 - DNA, 25 bp, Homo sapien
cattggctgctagattcactggata

SEQ ID NO: 4542437 - DNA, 25 bp, Homo sapien
ggcacattctctaaggtaagatatg

SEQ ID NO: 4542438 - DNA, 25 bp, Homo sapien
ctataatcagaattagaggtggggg

SEQ ID NO: 4542439 - DNA, 25 bp, Homo sapien
tataatcagaattagaggtgggggt

SEQ ID NO: 4542440 - DNA, 25 bp, Homo sapien
aaggaggtgcttttacatacggtca

SEQ ID NO: 4542441 - DNA, 25 bp, Homo sapien
cacccataaggcagaatagctagct

SEQ ID NO: 4542442 - DNA, 25 bp, Homo sapien
aaaaagggtgcgttctcagggtctg

SEQ ID NO: 4542443 - DNA, 25 bp, Homo sapien
tggctgtgtagcatccttaggagaa

SEQ ID NO: 4542444 - DNA, 25 bp, Homo sapien
cacaggttggcacaataagcttgtt

SEQ ID NO: 4542445 - DNA, 25 bp, Homo sapien
caggttggcacaataagcttgttag

SEQ ID NO: 4542446 - DNA, 25 bp, Homo sapien
aggttggcacaataagcttgttaga

SEQ ID NO: 4542447 - DNA, 25 bp, Homo sapien
aacacaggttggcacaataagcttg

SEQ ID NO: 4542448 - DNA, 25 bp, Homo sapien
tgctgaatgctgttccatgtacctt

SEQ ID NO: 4542449 - DNA, 25 bp, Homo sapien
gaatgctgttccatgtaccttcttc

SEQ ID NO: 4542450 - DNA, 25 bp, Homo sapien
gttgctgaatgctgttccatgtacc

SEQ ID NO: 4542451 - DNA, 25 bp, Homo sapien
gctgaatgctgttccatgtaccttc

SEQ ID NO: 4542452 - DNA, 25 bp, Homo sapien
gtttgaatagtgtggctcagggcca

SEQ ID NO: 4542453 - DNA, 25 bp, Homo sapien
cccaattaaagtgcccaagaaagtg

SEQ ID NO: 4542454 - DNA, 25 bp, Homo sapien
tgcccaagaaagtgagacaaagaac

SEQ ID NO: 4542455 - DNA, 25 bp, Homo sapien
gtcaaaacctgagcatttctgtttg

SEQ ID NO: 4542456 - DNA, 25 bp, Homo sapien
ttcaatgccttagacctcgtcacac

SEQ ID NO: 4542457 - DNA, 25 bp, Homo sapien
aattcaatgccttagacctcgtcac

SEQ ID NO: 4542458 - DNA, 25 bp, Homo sapien
attcaatgccttagacctcgtcaca

SEQ ID NO: 4542459 - DNA, 25 bp, Homo sapien
caaagcaggccagataaaaggtgct

SEQ ID NO: 4542460 - DNA, 25 bp, Homo sapien
gcaggccagataaaaggtgctgtac

SEQ ID NO: 4542461 - DNA, 25 bp, Homo sapien
ctaaacaaagcaggccagataaaag

SEQ ID NO: 4542462 - DNA, 25 bp, Homo sapien
tctctaaacaaagcaggccagataa

SEQ ID NO: 4542463 - DNA, 25 bp, Homo sapien
cacatgcagctcctattgaaggtat

SEQ ID NO: 4542464 - DNA, 25 bp, Homo sapien
ggaggagagccctataacataggct

SEQ ID NO: 4542465 - DNA, 25 bp, Homo sapien
tgtcaaggccaagcaattctaagaa

SEQ ID NO: 4542466 - DNA, 25 bp, Homo sapien
tcaactctgagcttgaggctgtcaa

SEQ ID NO: 4542467 - DNA, 25 bp, Homo sapien
cagtgacagagggagtgccagccat

SEQ ID NO: 4542468 - DNA, 25 bp, Homo sapien
aaaattatgtctcaccaggaaaagc

SEQ ID NO: 4542469 - DNA, 25 bp, Homo sapien
attatgtctcaccaggaaaagcaaa

SEQ ID NO: 4542470 - DNA, 25 bp, Homo sapien
cagagggagtgccagccatgtgatt

SEQ ID NO: 4542471 - DNA, 25 bp, Homo sapien
ttagtggcagagcctcactgtcacc

SEQ ID NO: 4542472 - DNA, 25 bp, Homo sapien
tttagtggcagagcctcactgtcac

SEQ ID NO: 4542473 - DNA, 25 bp, Homo sapien
gtaccaaatgcaaatgatggccgcc

SEQ ID NO: 4542474 - DNA, 25 bp, Homo sapien
ttgattaattcctggaccagaaaag

SEQ ID NO: 4542475 - DNA, 25 bp, Homo sapien
gattaattcctggaccagaaaagta

SEQ ID NO: 4542476 - DNA, 25 bp, Homo sapien
gatggccgcccattatgtaaataat

SEQ ID NO: 4542477 - DNA, 25 bp, Homo sapien
aaatgtgggagatgactccatgcat

SEQ ID NO: 4542478 - DNA, 25 bp, Homo sapien
caggtcagggctagagaaatgtggg

SEQ ID NO: 4542479 - DNA, 25 bp, Homo sapien
ggtcagggctagagaaatgtgggag

SEQ ID NO: 4542480 - DNA, 25 bp, Homo sapien
gagaaatgtgggagatgactccatg

SEQ ID NO: 4542481 - DNA, 25 bp, Homo sapien
acttcagtgtatagaggtagccttc

SEQ ID NO: 4542482 - DNA, 25 bp, Homo sapien
cagatttgcacatggaactctctaa

SEQ ID NO: 4542483 - DNA, 25 bp, Homo sapien
tacctgagaagttgcataaaaactc

SEQ ID NO: 4542484 - DNA, 25 bp, Homo sapien
actctctaatgataaaactggttgc

SEQ ID NO: 4542485 - DNA, 25 bp, Homo sapien
agaatcttgctcggctgtctaggct

SEQ ID NO: 4542486 - DNA, 25 bp, Homo sapien
tgttgagatgcattccttctatgcc

SEQ ID NO: 4542487 - DNA, 25 bp, Homo sapien
ggacttcaactactatgttgaacag

SEQ ID NO: 4542488 - DNA, 25 bp, Homo sapien
actgtcatacatggcctttataatg

SEQ ID NO: 4542489 - DNA, 25 bp, Homo sapien
ctgctgagtatattagctgtgagac

SEQ ID NO: 4542490 - DNA, 25 bp, Homo sapien
taatgtggtgtatcatttattaatt

SEQ ID NO: 4542491 - DNA, 25 bp, Homo sapien
atgtggtgtatcatttattaatttg

SEQ ID NO: 4542492 - DNA, 25 bp, Homo sapien
ggcctggtttttgtctttcattctg

SEQ ID NO: 4542493 - DNA, 25 bp, Homo sapien
cctggcctggtttttgtctttcatt

SEQ ID NO: 4542494 - DNA, 25 bp, Homo sapien
tcagcctcctgtagcactgtaggca

SEQ ID NO: 4542495 - DNA, 25 bp, Homo sapien
taataagaccagcagaatagctcag

SEQ ID NO: 4542496 - DNA, 25 bp, Homo sapien
gaaagaaatagtcactcctgtcacg

SEQ ID NO: 4542497 - DNA, 25 bp, Homo sapien
cctggcctccaacaggtaattttag

SEQ ID NO: 4542498 - DNA, 25 bp, Homo sapien
gacttttcacattgtgacctgattc

SEQ ID NO: 4542499 - DNA, 25 bp, Homo sapien
tccaaggacttttcacattgtgacc

SEQ ID NO: 4542500 - DNA, 25 bp, Homo sapien
aaggacttttcacattgtgacctga

SEQ ID NO: 4542501 - DNA, 25 bp, Homo sapien
attccaaggacttttcacattgtga

SEQ ID NO: 4542502 - DNA, 25 bp, Homo sapien
agtacattccctctttgagattaaa

SEQ ID NO: 4542503 - DNA, 25 bp, Homo sapien
tacctgaaagtacattccctctttg

SEQ ID NO: 4542504 - DNA, 25 bp, Homo sapien
ggcttgaagaccctggaggtatctg

SEQ ID NO: 4542505 - DNA, 25 bp, Homo sapien
aaaggcttgaagaccctggaggtat

SEQ ID NO: 4542506 - DNA, 25 bp, Homo sapien
ccacctaagtgatggagttggagcc

SEQ ID NO: 4542507 - DNA, 25 bp, Homo sapien
gttagaatgccaggtcaagatgcca

SEQ ID NO: 4542508 - DNA, 25 bp, Homo sapien
agttggagccatcacaagaggagag

SEQ ID NO: 4542509 - DNA, 25 bp, Homo sapien
tctactctctagtaacttcactgag

SEQ ID NO: 4542510 - DNA, 25 bp, Homo sapien
ctatagctagtgtgttagcagactg

SEQ ID NO: 4542511 - DNA, 25 bp, Homo sapien
actgccagccaaacaatctgctagg

SEQ ID NO: 4542512 - DNA, 25 bp, Homo sapien
ctcctatagctagtgtgttagcaga

SEQ ID NO: 4542513 - DNA, 25 bp, Homo sapien
ccaaacaatctgctaggatcaaagg

SEQ ID NO: 4542514 - DNA, 25 bp, Homo sapien
aaacagaattagaagttcactgatt

SEQ ID NO: 4542515 - DNA, 25 bp, Homo sapien
taaacagaattagaagttcactgat

SEQ ID NO: 4542516 - DNA, 25 bp, Homo sapien
agttaaacagaattagaagttcact

SEQ ID NO: 4542517 - DNA, 25 bp, Homo sapien
gttaaacagaattagaagttcactg

SEQ ID NO: 4542518 - DNA, 25 bp, Homo sapien
catcttcaatagctggggatccact

SEQ ID NO: 4542519 - DNA, 25 bp, Homo sapien
gggaagagagcagtttttagcttgg

SEQ ID NO: 4542520 - DNA, 25 bp, Homo sapien
gggtaaggagttaatgccatcttca

SEQ ID NO: 4542521 - DNA, 25 bp, Homo sapien
caggacactaggaggagtgcactgt

SEQ ID NO: 4542522 - DNA, 25 bp, Homo sapien
ggagggtatgtccttccaatagcat

SEQ ID NO: 4542523 - DNA, 25 bp, Homo sapien
tacattgtagtagcaagggccagga

SEQ ID NO: 4542524 - DNA, 25 bp, Homo sapien
caatagcatactgcttacactggcc

SEQ ID NO: 4542525 - DNA, 25 bp, Homo sapien
tacactggcctgattggtgggaatc

SEQ ID NO: 4542526 - DNA, 25 bp, Homo sapien
agagtaagcctctacatcagcagct

SEQ ID NO: 4542527 - DNA, 25 bp, Homo sapien
gaaaaagggtgtcagtctaccagag

SEQ ID NO: 4542528 - DNA, 25 bp, Homo sapien
cataacaccagctaagtcctcaggg

SEQ ID NO: 4542529 - DNA, 25 bp, Homo sapien
gaaactggacattacatgcaactga

SEQ ID NO: 4542530 - DNA, 25 bp, Homo sapien
ggcaacttgtcgacactgaactaaa

SEQ ID NO: 4542531 - DNA, 25 bp, Homo sapien
gggtgtgcttcatgtaactcttttt

SEQ ID NO: 4542532 - DNA, 25 bp, Homo sapien
ctgttaagttactggcaacttgtcg

SEQ ID NO: 4542533 - DNA, 25 bp, Homo sapien
aattcaaaccaagggtgtgcttcat

SEQ ID NO: 4542534 - DNA, 25 bp, Homo sapien
gaatgaattgagaatggaaatccca

SEQ ID NO: 4542535 - DNA, 25 bp, Homo sapien
tgtaacagtcaaggtagacataaag

SEQ ID NO: 4542536 - DNA, 25 bp, Homo sapien
agaagatgctgcagactgtgctcca

SEQ ID NO: 4542537 - DNA, 25 bp, Homo sapien
gactgtgctccaaacaatagagaat

SEQ ID NO: 4542538 - DNA, 25 bp, Homo sapien
agggagggtatcctgtattacacct

SEQ ID NO: 4542539 - DNA, 25 bp, Homo sapien
tggtcttgtagttttgaacagggag

SEQ ID NO: 4542540 - DNA, 25 bp, Homo sapien
tattacacctccaatacggctcagt

SEQ ID NO: 4542541 - DNA, 25 bp, Homo sapien
tccagttcagatgccaaaaaaaccc

SEQ ID NO: 4542542 - DNA, 25 bp, Homo sapien
ccattgggtattagttcaacagtta

SEQ ID NO: 4542543 - DNA, 25 bp, Homo sapien
tcccattgggtattagttcaacagt

SEQ ID NO: 4542544 - DNA, 25 bp, Homo sapien
tcttcccattgggtattagttcaac

SEQ ID NO: 4542545 - DNA, 25 bp, Homo sapien
ttcccattgggtattagttcaacag

SEQ ID NO: 4542546 - DNA, 25 bp, Homo sapien
ccatttgttctgctgaagtgaagca

SEQ ID NO: 4542547 - DNA, 25 bp, Homo sapien
ggtttgaaattctccaatccataag

SEQ ID NO: 4542548 - DNA, 25 bp, Homo sapien
gtttaaccaatcatggcgagctgtg

SEQ ID NO: 4542549 - DNA, 25 bp, Homo sapien
ggttaataacatcaacagtcagaag

SEQ ID NO: 4542550 - DNA, 25 bp, Homo sapien
ggcttcaggggaatatgatttgtat

SEQ ID NO: 4542551 - DNA, 25 bp, Homo sapien
gcttcaggggaatatgatttgtatt

SEQ ID NO: 4542552 - DNA, 25 bp, Homo sapien
aagtggtactcctacttcagctgcc

SEQ ID NO: 4542553 - DNA, 25 bp, Homo sapien
gatgtgccatcatgaccaggtaaat

SEQ ID NO: 4542554 - DNA, 25 bp, Homo sapien
gctggaatgaaaactcagccttgaa

SEQ ID NO: 4542555 - DNA, 25 bp, Homo sapien
catatcagatggcatagatccccaa

SEQ ID NO: 4542556 - DNA, 25 bp, Homo sapien
gggagaaggatggattcttgtgtta

SEQ ID NO: 4542557 - DNA, 25 bp, Homo sapien
gagaaggatggattcttgtgttagt

SEQ ID NO: 4542558 - DNA, 25 bp, Homo sapien
aggatggattcttgtgttagttgat

SEQ ID NO: 4542559 - DNA, 25 bp, Homo sapien
gaaggatggattcttgtgttagttg

SEQ ID NO: 4542560 - DNA, 25 bp, Homo sapien
caattctatggtcctgtttgttaaa

SEQ ID NO: 4542561 - DNA, 25 bp, Homo sapien
tacaatcatatttcaggaatgagtc

SEQ ID NO: 4542562 - DNA, 25 bp, Homo sapien
tttacaatcatatttcaggaatgag

SEQ ID NO: 4542563 - DNA, 25 bp, Homo sapien
tgaaaaaatcttgttcctttatcca

SEQ ID NO: 4542564 - DNA, 25 bp, Homo sapien
atcaaaagaggactaatgagactac

SEQ ID NO: 4542565 - DNA, 25 bp, Homo sapien
gaaatactatctaacggtattctaa

SEQ ID NO: 4542566 - DNA, 25 bp, Homo sapien
tcagttccacataagaaacttgtgt

SEQ ID NO: 4542567 - DNA, 25 bp, Homo sapien
aaatgacagaaaactctcgagtccc

SEQ ID NO: 4542568 - DNA, 25 bp, Homo sapien
aatgtcccaaataaagcttctcaac

SEQ ID NO: 4542569 - DNA, 25 bp, Homo sapien
gtcccaaataaagcttctcaacttg

SEQ ID NO: 4542570 - DNA, 25 bp, Homo sapien
atgtcccaaataaagcttctcaact

SEQ ID NO: 4542571 - DNA, 25 bp, Homo sapien
tgtcccaaataaagcttctcaactt

SEQ ID NO: 4542572 - DNA, 25 bp, Homo sapien
tatagttcttttctctttttcagaa

SEQ ID NO: 4542573 - DNA, 25 bp, Homo sapien
ctatagttcttttctctttttcaga

SEQ ID NO: 4542574 - DNA, 25 bp, Homo sapien
gatgaaggggttgtcacacttttac

SEQ ID NO: 4542575 - DNA, 25 bp, Homo sapien
tcaaataaggtagtgctgggaatta

SEQ ID NO: 4542576 - DNA, 25 bp, Homo sapien
catgagataatatgccattcaagaa

SEQ ID NO: 4542577 - DNA, 25 bp, Homo sapien
catttgagttaatgtatgttaacac

SEQ ID NO: 4542578 - DNA, 25 bp, Homo sapien
tttattagttgtatagaagcagatc

SEQ ID NO: 4542579 - DNA, 25 bp, Homo sapien
gaagcagatcttgagcaattggcct

SEQ ID NO: 4542580 - DNA, 25 bp, Homo sapien
tattagttgtatagaagcagatctt

SEQ ID NO: 4542581 - DNA, 25 bp, Homo sapien
gatcttgagcaattggccttttaca

SEQ ID NO: 4542582 - DNA, 25 bp, Homo sapien
caaagaccaaatttaggcctatgcc

SEQ ID NO: 4542583 - DNA, 25 bp, Homo sapien
aatcctgaagaaagtctgtgcctct

SEQ ID NO: 4542584 - DNA, 25 bp, Homo sapien
gttgtttaaaatggcgctggcaata

SEQ ID NO: 4542585 - DNA, 25 bp, Homo sapien
ggcctatgccaataagctcctcaag

SEQ ID NO: 4542586 - DNA, 25 bp, Homo sapien
aataagagatacagaaaatgcagtc

SEQ ID NO: 4542587 - DNA, 25 bp, Homo sapien
gcagtcacaccacgtactttaatcc

SEQ ID NO: 4542588 - DNA, 25 bp, Homo sapien
gaacagcaatcttaacaacctagca

SEQ ID NO: 4542589 - DNA, 25 bp, Homo sapien
ggttacagaatgaataagagataca

SEQ ID NO: 4542590 - DNA, 25 bp, Homo sapien
gatctagcattaagagggagcctac

SEQ ID NO: 4542591 - DNA, 25 bp, Homo sapien
ccaggcttgagccaatgagggagta

SEQ ID NO: 4542592 - DNA, 25 bp, Homo sapien
gggagcctacccttatagcgaatta

SEQ ID NO: 4542593 - DNA, 25 bp, Homo sapien
tgtttgttactgaacccaagtgggc

SEQ ID NO: 4542594 - DNA, 25 bp, Homo sapien
atatagagtctgaattctgtttctt

SEQ ID NO: 4542595 - DNA, 25 bp, Homo sapien
ctggcaaataaaagaagtgatgatt

SEQ ID NO: 4542596 - DNA, 25 bp, Homo sapien
ggcaaataaaagaagtgatgattat

SEQ ID NO: 4542597 - DNA, 25 bp, Homo sapien
tcagaccttctgaatctggcaaata

SEQ ID NO: 4542598 - DNA, 25 bp, Homo sapien
attcatctatagcatctgttagctt

SEQ ID NO: 4542599 - DNA, 25 bp, Homo sapien
tgaaggttcgaagttcattaatgta

SEQ ID NO: 4542600 - DNA, 25 bp, Homo sapien
gctagtcaaaatgttcactcctttt

SEQ ID NO: 4542601 - DNA, 25 bp, Homo sapien
gttcattaatgtagctagtcaaaat

SEQ ID NO: 4542602 - DNA, 25 bp, Homo sapien
aaactttatcatgaaggttcgaagt

SEQ ID NO: 4542603 - DNA, 25 bp, Homo sapien
ccatgagctgttataaagaattcta

SEQ ID NO: 4542604 - DNA, 25 bp, Homo sapien
ataaaccatgagctgttataaagaa

SEQ ID NO: 4542605 - DNA, 25 bp, Homo sapien
ttcaaacaatatgtctgaggatttt

SEQ ID NO: 4542606 - DNA, 25 bp, Homo sapien
ttggttgttaaggaaagacagtgta

SEQ ID NO: 4542607 - DNA, 25 bp, Homo sapien
aatgaaaagctcctttatttggttg

SEQ ID NO: 4542608 - DNA, 25 bp, Homo sapien
cagtgtaagattaagcaattgttct

SEQ ID NO: 4542609 - DNA, 25 bp, Homo sapien
tctaattgccgagcaaagtaaatcc

SEQ ID NO: 4542610 - DNA, 25 bp, Homo sapien
gccacactgtcaatacacatctcag

SEQ ID NO: 4542611 - DNA, 25 bp, Homo sapien
aatcctaatccacaactcagaaagc

SEQ ID NO: 4542612 - DNA, 25 bp, Homo sapien
tatggatgcgtcatcatgcccaact

SEQ ID NO: 4542613 - DNA, 25 bp, Homo sapien
cacatctcagatggttgcaagggca

SEQ ID NO: 4542614 - DNA, 25 bp, Homo sapien
atataaatgggatgacaagtgatca

SEQ ID NO: 4542615 - DNA, 25 bp, Homo sapien
tataaatgggatgacaagtgatcaa

SEQ ID NO: 4542616 - DNA, 25 bp, Homo sapien
actgtgtccagctgacgattttcta

SEQ ID NO: 4542617 - DNA, 25 bp, Homo sapien
agaaatttactgtgtccagctgacg

SEQ ID NO: 4542618 - DNA, 25 bp, Homo sapien
gattacaagtctgaaccactacact

SEQ ID NO: 4542619 - DNA, 25 bp, Homo sapien
actcagctaatttaacagaaacggg

SEQ ID NO: 4542620 - DNA, 25 bp, Homo sapien
ttcactgcgtttggctaggctagtc

SEQ ID NO: 4542621 - DNA, 25 bp, Homo sapien
tcctggcctagaacaatgcacccaa

SEQ ID NO: 4542622 - DNA, 25 bp, Homo sapien
tctagtgcatgtatgggaattgagc

SEQ ID NO: 4542623 - DNA, 25 bp, Homo sapien
cattgagatgacaaagagtgtccac

SEQ ID NO: 4542624 - DNA, 25 bp, Homo sapien
accttccccagccattgagatgaca

SEQ ID NO: 4542625 - DNA, 25 bp, Homo sapien
gtatgggaattgagcaccttcccca

SEQ ID NO: 4542626 - DNA, 25 bp, Homo sapien
gcatacatctcagcaatggatttca

SEQ ID NO: 4542627 - DNA, 25 bp, Homo sapien
tcaatctaatacaagacagtctcac

SEQ ID NO: 4542628 - DNA, 25 bp, Homo sapien
agtaaaatacagtaggaaagcatac

SEQ ID NO: 4542629 - DNA, 25 bp, Homo sapien
cagtaggaaagcatacatctcagca

SEQ ID NO: 4542630 - DNA, 25 bp, Homo sapien
tgctggtctccactactgtctacag

SEQ ID NO: 4542631 - DNA, 25 bp, Homo sapien
agtgcagtgaatcctgtcacagaca

SEQ ID NO: 4542632 - DNA, 25 bp, Homo sapien
aatggtatagcccatcctttccact

SEQ ID NO: 4542633 - DNA, 25 bp, Homo sapien
tccaaatcccagagggtaatggtat

SEQ ID NO: 4542634 - DNA, 25 bp, Homo sapien
gattcaggtgactccaaatgcaaaa

SEQ ID NO: 4542635 - DNA, 25 bp, Homo sapien
atgtcctgtggaatgaaggcccagc

SEQ ID NO: 4542636 - DNA, 25 bp, Homo sapien
tattgcccatgcattatgtcctgtg

SEQ ID NO: 4542637 - DNA, 25 bp, Homo sapien
tggaaccatggagcacaacaggaaa

SEQ ID NO: 4542638 - DNA, 25 bp, Homo sapien
tcatctacgcccttaggtccttgaa

SEQ ID NO: 4542639 - DNA, 25 bp, Homo sapien
cagtttcatgttgtaggcagagtta

SEQ ID NO: 4542640 - DNA, 25 bp, Homo sapien
aggatcatcttcatctacgccctta

SEQ ID NO: 4542641 - DNA, 25 bp, Homo sapien
ggtccttgaataggaagatcttcta

SEQ ID NO: 4542642 - DNA, 25 bp, Homo sapien
tttcacacagtaggtgtcctgggtg

SEQ ID NO: 4542643 - DNA, 25 bp, Homo sapien
acacagtaggtgtcctgggtgttgc

SEQ ID NO: 4542644 - DNA, 25 bp, Homo sapien
ctttcacacagtaggtgtcctgggt

SEQ ID NO: 4542645 - DNA, 25 bp, Homo sapien
tcacacagtaggtgtcctgggtgtt

SEQ ID NO: 4542646 - DNA, 25 bp, Homo sapien
tgcgaccagaggaatgcataagaac

SEQ ID NO: 4542647 - DNA, 25 bp, Homo sapien
caaagaaggctagggtggctaatgt

SEQ ID NO: 4542648 - DNA, 25 bp, Homo sapien
aaagtaagatttaggctgcgaccag

SEQ ID NO: 4542649 - DNA, 25 bp, Homo sapien
gctagaaagatggttcagggcccca

SEQ ID NO: 4542650 - DNA, 25 bp, Homo sapien
catcgaggtcttgagaaactttcag

SEQ ID NO: 4542651 - DNA, 25 bp, Homo sapien
gctgacaatcactgcaacatcgagg

SEQ ID NO: 4542652 - DNA, 25 bp, Homo sapien
taagttaagagcaactgcggagttg

SEQ ID NO: 4542653 - DNA, 25 bp, Homo sapien
tcctgttgctgctcattacacatgt

SEQ ID NO: 4542654 - DNA, 25 bp, Homo sapien
acatatgtaccatccacaacatcaa

SEQ ID NO: 4542655 - DNA, 25 bp, Homo sapien
tatgtaccatccacaacatcaaaaa

SEQ ID NO: 4542656 - DNA, 25 bp, Homo sapien
tacatatgtaccatccacaacatca

SEQ ID NO: 4542657 - DNA, 25 bp, Homo sapien
catatgtaccatccacaacatcaaa

SEQ ID NO: 4542658 - DNA, 25 bp, Homo sapien
cactgcctgtgcaggcaagggaagt

SEQ ID NO: 4542659 - DNA, 25 bp, Homo sapien
gaaatgacaggattctcaaagacaa

SEQ ID NO: 4542660 - DNA, 25 bp, Homo sapien
tctaattgcagcatctctttcagga

SEQ ID NO: 4542661 - DNA, 25 bp, Homo sapien
gcagagctgcgtgtcaataatcatg

SEQ ID NO: 4542662 - DNA, 25 bp, Homo sapien
tgatatcttgatcgtcaatgagctt

SEQ ID NO: 4542663 - DNA, 25 bp, Homo sapien
caatgagcttttgcaatgcctccct

SEQ ID NO: 4542664 - DNA, 25 bp, Homo sapien
ctacagctatacaaaatggttgcat

SEQ ID NO: 4542665 - DNA, 25 bp, Homo sapien
caagagcgagcagtttgggcttttc

SEQ ID NO: 4542666 - DNA, 25 bp, Homo sapien
cggctgccaggcgtcaaagaaagca

SEQ ID NO: 4542667 - DNA, 25 bp, Homo sapien
cgggagccgagctgccccatcgcct

SEQ ID NO: 4542668 - DNA, 25 bp, Homo sapien
gccccggctgccaggcgtcaaagaa

SEQ ID NO: 4542669 - DNA, 25 bp, Homo sapien
gcaccaacagcatcggtagaacccg

SEQ ID NO: 4542670 - DNA, 25 bp, Homo sapien
gtgccccagctaccgccggcggaag

SEQ ID NO: 4542671 - DNA, 25 bp, Homo sapien
gccgcggtgccccagctaccgccgg

SEQ ID NO: 4542672 - DNA, 25 bp, Homo sapien
cactcgcgaccccttcctctgcagc

SEQ ID NO: 4542673 - DNA, 25 bp, Homo sapien
gcggaagcagcactcgcgacccctt

SEQ ID NO: 4542674 - DNA, 25 bp, Homo sapien
aacctgactgcgtcgtgggcatgcg

SEQ ID NO: 4542675 - DNA, 25 bp, Homo sapien
atgcgcggtgtacgtagcggctccc

SEQ ID NO: 4542676 - DNA, 25 bp, Homo sapien
ggctgtctccggtcgattccattcg

SEQ ID NO: 4542677 - DNA, 25 bp, Homo sapien
tccggtcactttcgccggaacctga

SEQ ID NO: 4542678 - DNA, 25 bp, Homo sapien
tacacttgtgttagctacaacaaag

SEQ ID NO: 4542679 - DNA, 25 bp, Homo sapien
ggttacacttgtgttagctacaaca

SEQ ID NO: 4542680 - DNA, 25 bp, Homo sapien
cacttgtgttagctacaacaaagcc

SEQ ID NO: 4542681 - DNA, 25 bp, Homo sapien
cttgtgttagctacaacaaagcctt

SEQ ID NO: 4542682 - DNA, 25 bp, Homo sapien
gcactcacacataggatagccttca

SEQ ID NO: 4542683 - DNA, 25 bp, Homo sapien
cataggatagccttcattacaggtt

SEQ ID NO: 4542684 - DNA, 25 bp, Homo sapien
cacacataggatagccttcattaca

SEQ ID NO: 4542685 - DNA, 25 bp, Homo sapien
ggagcactcacacataggatagcct

SEQ ID NO: 4542686 - DNA, 25 bp, Homo sapien
ccacatacacgtattccagaacaaa

SEQ ID NO: 4542687 - DNA, 25 bp, Homo sapien
tataccttattatgccatgtcttat

SEQ ID NO: 4542688 - DNA, 25 bp, Homo sapien
ctagtgtctgatgattcaacttccc

SEQ ID NO: 4542689 - DNA, 25 bp, Homo sapien
tggggaagggttctccaatatataa

SEQ ID NO: 4542690 - DNA, 25 bp, Homo sapien
ctgaaccaattgtttgtccacgtgg

SEQ ID NO: 4542691 - DNA, 25 bp, Homo sapien
aggctgtaggcatttgggctatctc

SEQ ID NO: 4542692 - DNA, 25 bp, Homo sapien
ttgtccacgtggtgacagaacaggg

SEQ ID NO: 4542693 - DNA, 25 bp, Homo sapien
catttgggctatctcccaggcaatc

SEQ ID NO: 4542694 - DNA, 25 bp, Homo sapien
ttggtacgtgccaagcaatgcttag

SEQ ID NO: 4542695 - DNA, 25 bp, Homo sapien
cagactcagggccaaggtttcttat

SEQ ID NO: 4542696 - DNA, 25 bp, Homo sapien
gaaaccgaaactctagggcactata

SEQ ID NO: 4542697 - DNA, 25 bp, Homo sapien
gatttgcttaagaaacagactcagg

SEQ ID NO: 4542698 - DNA, 25 bp, Homo sapien
tgggttcctctagggaagaatgcag

SEQ ID NO: 4542699 - DNA, 25 bp, Homo sapien
ttcctctagggaagaatgcagcgat

SEQ ID NO: 4542700 - DNA, 25 bp, Homo sapien
cctctagggaagaatgcagcgatac

SEQ ID NO: 4542701 - DNA, 25 bp, Homo sapien
cactgttgggttcctctagggaaga

SEQ ID NO: 4542702 - DNA, 25 bp, Homo sapien
gggcatagagcaaagatattccaaa

SEQ ID NO: 4542703 - DNA, 25 bp, Homo sapien
agggcatagagcaaagatattccaa

SEQ ID NO: 4542704 - DNA, 25 bp, Homo sapien
aaatgagttcacactcggcatttgg

SEQ ID NO: 4542705 - DNA, 25 bp, Homo sapien
caacctgaaagccatctatggaaaa

SEQ ID NO: 4542706 - DNA, 25 bp, Homo sapien
gaaagccatctatggaaaaaagcct

SEQ ID NO: 4542707 - DNA, 25 bp, Homo sapien
cagtgataccaacctgaaagccatc

SEQ ID NO: 4542708 - DNA, 25 bp, Homo sapien
cccttatcagtgataccaacctgaa

SEQ ID NO: 4542709 - DNA, 25 bp, Homo sapien
gcaccacggtgactggccgctctga

SEQ ID NO: 4542710 - DNA, 25 bp, Homo sapien
gaggagttcgtggagggtcaagtga

SEQ ID NO: 4542711 - DNA, 25 bp, Homo sapien
ggtggcaacagcgttaatccctgaa

SEQ ID NO: 4542712 - DNA, 25 bp, Homo sapien
tctgaagcaccacggtgactggccg

SEQ ID NO: 4542713 - DNA, 25 bp, Homo sapien
cccagaggtttgaataacatttgta

SEQ ID NO: 4542714 - DNA, 25 bp, Homo sapien
gaggtttgaataacatttgtagggc

SEQ ID NO: 4542715 - DNA, 25 bp, Homo sapien
aatacatttgcccagaggtttgaat

SEQ ID NO: 4542716 - DNA, 25 bp, Homo sapien
atttgcccagaggtttgaataacat

SEQ ID NO: 4542717 - DNA, 25 bp, Homo sapien
ctgtctttggcacgtcctggtgagg

SEQ ID NO: 4542718 - DNA, 25 bp, Homo sapien
cactgacaccttcggtacctacttg

SEQ ID NO: 4542719 - DNA, 25 bp, Homo sapien
gaggttacttaccaggcttatcacc

SEQ ID NO: 4542720 - DNA, 25 bp, Homo sapien
tacctacttgtcctaggaatccttc

SEQ ID NO: 4542721 - DNA, 25 bp, Homo sapien
taacttccttgcctgagggtggcaa

SEQ ID NO: 4542722 - DNA, 25 bp, Homo sapien
tgaagatgatccactgttcctataa

SEQ ID NO: 4542723 - DNA, 25 bp, Homo sapien
gatccactgttcctataatagttct

SEQ ID NO: 4542724 - DNA, 25 bp, Homo sapien
taatagttctgtaacttccttgcct

SEQ ID NO: 4542725 - DNA, 25 bp, Homo sapien
agccacatccctccggaccaggagg

SEQ ID NO: 4542726 - DNA, 25 bp, Homo sapien
cagatggtgggtgatagccaaaaga

SEQ ID NO: 4542727 - DNA, 25 bp, Homo sapien
tgatcagccacatccctccggacca

SEQ ID NO: 4542728 - DNA, 25 bp, Homo sapien
gggtgatagccaaaagaatggtaac

SEQ ID NO: 4542729 - DNA, 25 bp, Homo sapien
tcctgggtctttaaggtctggaaga

SEQ ID NO: 4542730 - DNA, 25 bp, Homo sapien
tgctcctgggtctttaaggtctgga

SEQ ID NO: 4542731 - DNA, 25 bp, Homo sapien
ctttaaggtctggaagagcttctca

SEQ ID NO: 4542732 - DNA, 25 bp, Homo sapien
ctgggtctttaaggtctggaagagc

SEQ ID NO: 4542733 - DNA, 25 bp, Homo sapien
ggtggaggcctatacttccagcctt

SEQ ID NO: 4542734 - DNA, 25 bp, Homo sapien
cagggcggtggaggcctatacttcc

SEQ ID NO: 4542735 - DNA, 25 bp, Homo sapien
aaaagcagggcggtggaggcctata

SEQ ID NO: 4542736 - DNA, 25 bp, Homo sapien
ggaggcctatacttccagccttcct

SEQ ID NO: 4542737 - DNA, 25 bp, Homo sapien
caatccggtataatacccgaagcct

SEQ ID NO: 4542738 - DNA, 25 bp, Homo sapien
tataatacccgaagcctctgactgc

SEQ ID NO: 4542739 - DNA, 25 bp, Homo sapien
tccggtataatacccgaagcctctg

SEQ ID NO: 4542740 - DNA, 25 bp, Homo sapien
cttctcaatccggtataatacccga

SEQ ID NO: 4542741 - DNA, 25 bp, Homo sapien
caatagctcggcgagggctgaagca

SEQ ID NO: 4542742 - DNA, 25 bp, Homo sapien
gcgagggctgaagcatgtcgacaca

SEQ ID NO: 4542743 - DNA, 25 bp, Homo sapien
agcatgtcgacacagctacctggcc

SEQ ID NO: 4542744 - DNA, 25 bp, Homo sapien
gggtaccgcatcaatagctcggcga

SEQ ID NO: 4542745 - DNA, 25 bp, Homo sapien
tgccttcggaatgtaaggcgttacc

SEQ ID NO: 4542746 - DNA, 25 bp, Homo sapien
taaggcgttaccagcttgagggact

SEQ ID NO: 4542747 - DNA, 25 bp, Homo sapien
aagtagctcttcgtctgcctgcttc

SEQ ID NO: 4542748 - DNA, 25 bp, Homo sapien
ccggtttcttcgtccaagtagctct

SEQ ID NO: 4542749 - DNA, 25 bp, Homo sapien
ttctggtcatgaggttagcataggg

SEQ ID NO: 4542750 - DNA, 25 bp, Homo sapien
tgcacttttatcacccagtccttct

SEQ ID NO: 4542751 - DNA, 25 bp, Homo sapien
tggtaatagtagtcatccaggcggg

SEQ ID NO: 4542752 - DNA, 25 bp, Homo sapien
cttttatcacccagtccttctcttt

SEQ ID NO: 4542753 - DNA, 25 bp, Homo sapien
cacttcctaaggagtgtggtgagca

SEQ ID NO: 4542754 - DNA, 25 bp, Homo sapien
gcacttcctaaggagtgtggtgagc

SEQ ID NO: 4542755 - DNA, 25 bp, Homo sapien
tggcacttcctaaggagtgtggtga

SEQ ID NO: 4542756 - DNA, 25 bp, Homo sapien
ggcacttcctaaggagtgtggtgag

SEQ ID NO: 4542757 - DNA, 25 bp, Homo sapien
gcaagattcgttggtgccgagggtg

SEQ ID NO: 4542758 - DNA, 25 bp, Homo sapien
tgctgcaagattcgttggtgccgag

SEQ ID NO: 4542759 - DNA, 25 bp, Homo sapien
gctgctgcaagattcgttggtgccg

SEQ ID NO: 4542760 - DNA, 25 bp, Homo sapien
aagattcgttggtgccgagggtgga

SEQ ID NO: 4542761 - DNA, 25 bp, Homo sapien
ctgaacctagggggccacgaggtca

SEQ ID NO: 4542762 - DNA, 25 bp, Homo sapien
ctagggggccacgaggtcagcaggc

SEQ ID NO: 4542763 - DNA, 25 bp, Homo sapien
ttgggtctggtgagggcagccgagg

SEQ ID NO: 4542764 - DNA, 25 bp, Homo sapien
tgggtctggtgagggcagccgaggt

SEQ ID NO: 4542765 - DNA, 25 bp, Homo sapien
cagaaagggatgggcgacaggtagt

SEQ ID NO: 4542766 - DNA, 25 bp, Homo sapien
ggatgggcgacaggtagtccaaggt

SEQ ID NO: 4542767 - DNA, 25 bp, Homo sapien
aaagggatgggcgacaggtagtcca

SEQ ID NO: 4542768 - DNA, 25 bp, Homo sapien
agggatgggcgacaggtagtccaag

SEQ ID NO: 4542769 - DNA, 25 bp, Homo sapien
ttcccctcaagaacttcacccaaca

SEQ ID NO: 4542770 - DNA, 25 bp, Homo sapien
tcccctcaagaacttcacccaacat

SEQ ID NO: 4542771 - DNA, 25 bp, Homo sapien
catgttcccattacacagttaactg

SEQ ID NO: 4542772 - DNA, 25 bp, Homo sapien
gcaggtgctctttccagctaagcgc

SEQ ID NO: 4542773 - DNA, 25 bp, Homo sapien
ttcctctaccccaggccatgttccc

SEQ ID NO: 4542774 - DNA, 25 bp, Homo sapien
gctctttccagctaagcgctggcca

SEQ ID NO: 4542775 - DNA, 25 bp, Homo sapien
gaggcaagtgacattcccagcatac

SEQ ID NO: 4542776 - DNA, 25 bp, Homo sapien
ttgactccaggggagctaagcagag

SEQ ID NO: 4542777 - DNA, 25 bp, Homo sapien
gccttgactccaggggagctaagca

SEQ ID NO: 4542778 - DNA, 25 bp, Homo sapien
caggggccttgactccaggggagct

SEQ ID NO: 4542779 - DNA, 25 bp, Homo sapien
gggccttgactccaggggagctaag

SEQ ID NO: 4542780 - DNA, 25 bp, Homo sapien
caggtgttccaacatccagggcagt

SEQ ID NO: 4542781 - DNA, 25 bp, Homo sapien
ggcagcttggccctccctcagattc

SEQ ID NO: 4542782 - DNA, 25 bp, Homo sapien
ttcaaagtcagctgggccaggatcc

SEQ ID NO: 4542783 - DNA, 25 bp, Homo sapien
accaggtgttccaacatccagggca

SEQ ID NO: 4542784 - DNA, 25 bp, Homo sapien
gaaaccatggactactgtaccttag

SEQ ID NO: 4542785 - DNA, 25 bp, Homo sapien
cccaggatcaggcaaacgtgactca

SEQ ID NO: 4542786 - DNA, 25 bp, Homo sapien
tgaaggaagttctgaaatcacctca

SEQ ID NO: 4542787 - DNA, 25 bp, Homo sapien
cagactatagttgaccaagggtaac

SEQ ID NO: 4542788 - DNA, 25 bp, Homo sapien
ggccaccgcctgtgggcgatgcaca

SEQ ID NO: 4542789 - DNA, 25 bp, Homo sapien
tttaacgctagtagcagggccaccg

SEQ ID NO: 4542790 - DNA, 25 bp, Homo sapien
ctttaacgctagtagcagggccacc

SEQ ID NO: 4542791 - DNA, 25 bp, Homo sapien
cgcctgtgggcgatgcacagctctg

SEQ ID NO: 4542792 - DNA, 25 bp, Homo sapien
gagagtccctaactcaagttcaagg

SEQ ID NO: 4542793 - DNA, 25 bp, Homo sapien
ttttaaggcgagaacagcatcagaa

SEQ ID NO: 4542794 - DNA, 25 bp, Homo sapien
agggaaggagagagtccctaactca

SEQ ID NO: 4542795 - DNA, 25 bp, Homo sapien
ggttttaaggcgagaacagcatcag

SEQ ID NO: 4542796 - DNA, 25 bp, Homo sapien
taacagtaatatgaggctgtcctgg

SEQ ID NO: 4542797 - DNA, 25 bp, Homo sapien
gaacataacgcctcctgttctgtgg

SEQ ID NO: 4542798 - DNA, 25 bp, Homo sapien
gcaaacaaaaggaacccggcagata

SEQ ID NO: 4542799 - DNA, 25 bp, Homo sapien
gagtcttgtctagagaggctgctac

SEQ ID NO: 4542800 - DNA, 25 bp, Homo sapien
tatataacatcacggcccacttgtt

SEQ ID NO: 4542801 - DNA, 25 bp, Homo sapien
aacatcacggcccacttgttgatac

SEQ ID NO: 4542802 - DNA, 25 bp, Homo sapien
tttatataacatcacggcccacttg

SEQ ID NO: 4542803 - DNA, 25 bp, Homo sapien
tataacatcacggcccacttgttga

SEQ ID NO: 4542804 - DNA, 25 bp, Homo sapien
tggtggacttccttcttagccgtgt

SEQ ID NO: 4542805 - DNA, 25 bp, Homo sapien
ggcaattcatcttggcaggctggtg

SEQ ID NO: 4542806 - DNA, 25 bp, Homo sapien
ttcaaggcaattcatcttggcaggc

SEQ ID NO: 4542807 - DNA, 25 bp, Homo sapien
gccgtgtcctccagtgaaacagcat

SEQ ID NO: 4542808 - DNA, 25 bp, Homo sapien
gaattcttggccatggtcttgagga

SEQ ID NO: 4542809 - DNA, 25 bp, Homo sapien
aaagaggccaagaggcaccatcctc

SEQ ID NO: 4542810 - DNA, 25 bp, Homo sapien
tcggctctagggagctgtcccacaa

SEQ ID NO: 4542811 - DNA, 25 bp, Homo sapien
cctcagtcagtaaggatgacatggc

SEQ ID NO: 4542812 - DNA, 25 bp, Homo sapien
ccattaaagggctagcatcctccat

SEQ ID NO: 4542813 - DNA, 25 bp, Homo sapien
gcctgatggaaatatgagaacatag

SEQ ID NO: 4542814 - DNA, 25 bp, Homo sapien
tccattggggcctgatggaaatatg

SEQ ID NO: 4542815 - DNA, 25 bp, Homo sapien
agggctagcatcctccatccattgg

SEQ ID NO: 4542816 - DNA, 25 bp, Homo sapien
tcagttacaccacttgaatgtgcca

SEQ ID NO: 4542817 - DNA, 25 bp, Homo sapien
cagggtgcttcactggcctttatga

SEQ ID NO: 4542818 - DNA, 25 bp, Homo sapien
tgctgtatgagttccagtgtggcag

SEQ ID NO: 4542819 - DNA, 25 bp, Homo sapien
gtaatagcagaatcccctgggactg

SEQ ID NO: 4542820 - DNA, 25 bp, Homo sapien
gtggagtccactgcagctccgcaaa

SEQ ID NO: 4542821 - DNA, 25 bp, Homo sapien
gttacccagaaaggtaagtccatca

SEQ ID NO: 4542822 - DNA, 25 bp, Homo sapien
gaaaggtaagtccatcagactaaca

SEQ ID NO: 4542823 - DNA, 25 bp, Homo sapien
cctacaatccagaagagagttggga

SEQ ID NO: 4542824 - DNA, 25 bp, Homo sapien
gaccaatatttaacattcttcaagg

SEQ ID NO: 4542825 - DNA, 25 bp, Homo sapien
ttgacactaagtcttctgcaggctc

SEQ ID NO: 4542826 - DNA, 25 bp, Homo sapien
cctggtatcataatctatatattgc

SEQ ID NO: 4542827 - DNA, 25 bp, Homo sapien
cttgacactaagtcttctgcaggct

SEQ ID NO: 4542828 - DNA, 25 bp, Homo sapien
ggctcctcctgatggggctaatttc

SEQ ID NO: 4542829 - DNA, 25 bp, Homo sapien
gcctatgagctcaccagaggaggaa

SEQ ID NO: 4542830 - DNA, 25 bp, Homo sapien
agcctatgagctcaccagaggagga

SEQ ID NO: 4542831 - DNA, 25 bp, Homo sapien
agagcctatgagctcaccagaggag

SEQ ID NO: 4542832 - DNA, 25 bp, Homo sapien
gagcctatgagctcaccagaggagg

SEQ ID NO: 4542833 - DNA, 25 bp, Homo sapien
caacactggcaacagcaggtagagc

SEQ ID NO: 4542834 - DNA, 25 bp, Homo sapien
cttgttcctcttcaacactggcaac

SEQ ID NO: 4542835 - DNA, 25 bp, Homo sapien
gtagagcaggagtggtctggcccat

SEQ ID NO: 4542836 - DNA, 25 bp, Homo sapien
agcaggtagagcaggagtggtctgg

SEQ ID NO: 4542837 - DNA, 25 bp, Homo sapien
aatctgtgactgtgatgaattagtt

SEQ ID NO: 4542838 - DNA, 25 bp, Homo sapien
ctgtgactgtgatgaattagttgta

SEQ ID NO: 4542839 - DNA, 25 bp, Homo sapien
gaaatctgtgactgtgatgaattag

SEQ ID NO: 4542840 - DNA, 25 bp, Homo sapien
taaacaccactgtacttgaaccaac

SEQ ID NO: 4542841 - DNA, 25 bp, Homo sapien
tatctcatttcattaggtccatgga

SEQ ID NO: 4542842 - DNA, 25 bp, Homo sapien
gtgggaggctctctcttgtgcatta

SEQ ID NO: 4542843 - DNA, 25 bp, Homo sapien
ggagcaagagtgtcttaactcatac

SEQ ID NO: 4542844 - DNA, 25 bp, Homo sapien
caggcctttagtgccttatatgagt

SEQ ID NO: 4542845 - DNA, 25 bp, Homo sapien
tagaaaagatctgtggactccacca

SEQ ID NO: 4542846 - DNA, 25 bp, Homo sapien
gacatagggaggaacttcttggcac

SEQ ID NO: 4542847 - DNA, 25 bp, Homo sapien
agagaatgatgtacctagagggcgc

SEQ ID NO: 4542848 - DNA, 25 bp, Homo sapien
catgtttaacgtccttggctgggtc

SEQ ID NO: 4542849 - DNA, 25 bp, Homo sapien
agggcgccgatgtacagacagcaaa

SEQ ID NO: 4542850 - DNA, 25 bp, Homo sapien
tgaagtcctagaatgagcgcccggt

SEQ ID NO: 4542851 - DNA, 25 bp, Homo sapien
gaagttctccttctgctaggtagca

SEQ ID NO: 4542852 - DNA, 25 bp, Homo sapien
tgcaggtccgagcagttaactggct

SEQ ID NO: 4542853 - DNA, 25 bp, Homo sapien
tagtagcctttccttaatgataggg

SEQ ID NO: 4542854 - DNA, 25 bp, Homo sapien
gccttttagtgatcatgtaccctga

SEQ ID NO: 4542855 - DNA, 25 bp, Homo sapien
gaaaagattacagtgatgctctcac

SEQ ID NO: 4542856 - DNA, 25 bp, Homo sapien
gagatatatctggtcaaggtggcct

SEQ ID NO: 4542857 - DNA, 25 bp, Homo sapien
catgataaccctcactatgtggaga

SEQ ID NO: 4542858 - DNA, 25 bp, Homo sapien
tgaagaaggtgtatggccccaggta

SEQ ID NO: 4542859 - DNA, 25 bp, Homo sapien
gaaagaagaatcctacagggtcatg

SEQ ID NO: 4542860 - DNA, 25 bp, Homo sapien
tcatagatcgagacatgtaagcagc

SEQ ID NO: 4542861 - DNA, 25 bp, Homo sapien
tatccaacatcaacatcttggtcag

SEQ ID NO: 4542862 - DNA, 25 bp, Homo sapien
taaggcatggttgtggttaatctgg

SEQ ID NO: 4542863 - DNA, 25 bp, Homo sapien
gcttgttaagatagttaagcgtgca

SEQ ID NO: 4542864 - DNA, 25 bp, Homo sapien
taagcgtgcataagttaacttccaa

SEQ ID NO: 4542865 - DNA, 25 bp, Homo sapien
tgctcaggtctctgtccgggactgg

SEQ ID NO: 4542866 - DNA, 25 bp, Homo sapien
gactgggtggaacagacagcatatt

SEQ ID NO: 4542867 - DNA, 25 bp, Homo sapien
agggccgggaaagtggcacactcct

SEQ ID NO: 4542868 - DNA, 25 bp, Homo sapien
gctgaataactaccgggcaggactg

SEQ ID NO: 4542869 - DNA, 25 bp, Homo sapien
ctcactaggttctacggtttgccga

SEQ ID NO: 4542870 - DNA, 25 bp, Homo sapien
taccatctcggtaagtaggccggtg

SEQ ID NO: 4542871 - DNA, 25 bp, Homo sapien
caaatagtcgagaatagcgatccgg

SEQ ID NO: 4542872 - DNA, 25 bp, Homo sapien
gccggtcgcgaaacgcaaatagtcg

SEQ ID NO: 4542873 - DNA, 25 bp, Homo sapien
gctcaagacagatcctgtggctgga

SEQ ID NO: 4542874 - DNA, 25 bp, Homo sapien
gacttcagttgccagagtgtgccag

SEQ ID NO: 4542875 - DNA, 25 bp, Homo sapien
caggaactatgggttgttggcatcc

SEQ ID NO: 4542876 - DNA, 25 bp, Homo sapien
gatgtatgccttattgctcaagaca

SEQ ID NO: 4542877 - DNA, 25 bp, Homo sapien
taaacaagcaccagctgagataagc

SEQ ID NO: 4542878 - DNA, 25 bp, Homo sapien
gtttagcagctaaacaagcaccagc

SEQ ID NO: 4542879 - DNA, 25 bp, Homo sapien
agcaccagctgagataagcaatttt

SEQ ID NO: 4542880 - DNA, 25 bp, Homo sapien
cagctaaacaagcaccagctgagat

SEQ ID NO: 4542881 - DNA, 25 bp, Homo sapien
tcttctgggttcatgccattctcct

SEQ ID NO: 4542882 - DNA, 25 bp, Homo sapien
tcggctcactgtgagctctgtcttc

SEQ ID NO: 4542883 - DNA, 25 bp, Homo sapien
ctcactgtgagctctgtcttctggg

SEQ ID NO: 4542884 - DNA, 25 bp, Homo sapien
tcactgtgagctctgtcttctgggt

SEQ ID NO: 4542885 - DNA, 25 bp, Homo sapien
agtgcctgtctctggtctttgccag

SEQ ID NO: 4542886 - DNA, 25 bp, Homo sapien
attcagcatcaagttcctacccctg

SEQ ID NO: 4542887 - DNA, 25 bp, Homo sapien
gaccttcataattattcatagctcc

SEQ ID NO: 4542888 - DNA, 25 bp, Homo sapien
tcaataagcatgagtcaggatgacc

SEQ ID NO: 4542889 - DNA, 25 bp, Homo sapien
gatttcactggaggctttcaaggta

SEQ ID NO: 4542890 - DNA, 25 bp, Homo sapien
tactggagcaaactgcaacttgagt

SEQ ID NO: 4542891 - DNA, 25 bp, Homo sapien
caggagccactctcatgagagtgat

SEQ ID NO: 4542892 - DNA, 25 bp, Homo sapien
attctttcagtatcctaaatggatt

SEQ ID NO: 4542893 - DNA, 25 bp, Homo sapien
tacaaaaagaatccaactaagcaaa

SEQ ID NO: 4542894 - DNA, 25 bp, Homo sapien
ctgctgaattcagggcaaatatatt

SEQ ID NO: 4542895 - DNA, 25 bp, Homo sapien
taaatatccacaaatatgcatcagt

SEQ ID NO: 4542896 - DNA, 25 bp, Homo sapien
taaactgaaagctacaattgagtaa

SEQ ID NO: 4542897 - DNA, 25 bp, Homo sapien
cctccggaatcttgtcgtggagtat

SEQ ID NO: 4542898 - DNA, 25 bp, Homo sapien
ttacctccggaatcttgtcgtggag

SEQ ID NO: 4542899 - DNA, 25 bp, Homo sapien
tacctccggaatcttgtcgtggagt

SEQ ID NO: 4542900 - DNA, 25 bp, Homo sapien
ctccggaatcttgtcgtggagtatt

SEQ ID NO: 4542901 - DNA, 25 bp, Homo sapien
agtgccttcgggagggctgcctttc

SEQ ID NO: 4542902 - DNA, 25 bp, Homo sapien
gctgcctttcttatcctagcatggc

SEQ ID NO: 4542903 - DNA, 25 bp, Homo sapien
gggctgcctttcttatcctagcatg

SEQ ID NO: 4542904 - DNA, 25 bp, Homo sapien
aagccccttcttcagtgccttcggg

SEQ ID NO: 4542905 - DNA, 25 bp, Homo sapien
tgtgaggttggtaaatccattttcc

SEQ ID NO: 4542906 - DNA, 25 bp, Homo sapien
tgtttctgtgaggttggtaaatcca

SEQ ID NO: 4542907 - DNA, 25 bp, Homo sapien
tctgtgaggttggtaaatccatttt

SEQ ID NO: 4542908 - DNA, 25 bp, Homo sapien
tttctgtgaggttggtaaatccatt

SEQ ID NO: 4542909 - DNA, 25 bp, Homo sapien
gccattggacggtcagagtgcccct

SEQ ID NO: 4542910 - DNA, 25 bp, Homo sapien
taccccccctcaggagacagggcca

SEQ ID NO: 4542911 - DNA, 25 bp, Homo sapien
ccccccctcaggagacagggccatt

SEQ ID NO: 4542912 - DNA, 25 bp, Homo sapien
cattggacggtcagagtgccccttt

SEQ ID NO: 4542913 - DNA, 25 bp, Homo sapien
tcagtgaatcagtcccggaaccaag

SEQ ID NO: 4542914 - DNA, 25 bp, Homo sapien
tgattcacgctttcagtcaacactg

SEQ ID NO: 4542915 - DNA, 25 bp, Homo sapien
ggactgctccatggaccctaaagga

SEQ ID NO: 4542916 - DNA, 25 bp, Homo sapien
cagtcagctccacgagtgctaggga

SEQ ID NO: 4542917 - DNA, 25 bp, Homo sapien
ggtgaggtccacaagtagcagtttc

SEQ ID NO: 4542918 - DNA, 25 bp, Homo sapien
caatctgaaagaatcgggcacaagg

SEQ ID NO: 4542919 - DNA, 25 bp, Homo sapien
ggaagtcctgtgagctaaccaaacc

SEQ ID NO: 4542920 - DNA, 25 bp, Homo sapien
tctaaactggaagtgctgacaagcc

SEQ ID NO: 4542921 - DNA, 25 bp, Homo sapien
aagcatcgaaatcgccactggccac

SEQ ID NO: 4542922 - DNA, 25 bp, Homo sapien
gggttttacattcacagacttggac

SEQ ID NO: 4542923 - DNA, 25 bp, Homo sapien
cttggacgcaagcatcgaaatcgcc

SEQ ID NO: 4542924 - DNA, 25 bp, Homo sapien
tacattcacagacttggacgcaagc

SEQ ID NO: 4542925 - DNA, 25 bp, Homo sapien
gttacagcctctaaagccaggagta

SEQ ID NO: 4542926 - DNA, 25 bp, Homo sapien
agccaggagtaagggacactgctgg

SEQ ID NO: 4542927 - DNA, 25 bp, Homo sapien
ggagttacagcctctaaagccagga

SEQ ID NO: 4542928 - DNA, 25 bp, Homo sapien
gaaaactggcgccctgatgagggca

SEQ ID NO: 4542929 - DNA, 25 bp, Homo sapien
acgcccttgatatccacctcccgga

SEQ ID NO: 4542930 - DNA, 25 bp, Homo sapien
cagtaggggtacggtggtcatctca

SEQ ID NO: 4542931 - DNA, 25 bp, Homo sapien
gaaacacgcccttgatatccacctc

SEQ ID NO: 4542932 - DNA, 25 bp, Homo sapien
gcagtatcgaaacacgcccttgata

SEQ ID NO: 4542933 - DNA, 25 bp, Homo sapien
gtttatctgccttatcagttcccca

SEQ ID NO: 4542934 - DNA, 25 bp, Homo sapien
tcaacagtatgagccataatgggtt

SEQ ID NO: 4542935 - DNA, 25 bp, Homo sapien
gttccccacttggagtgggtcacag

SEQ ID NO: 4542936 - DNA, 25 bp, Homo sapien
cttccttgaatgtttatctgcctta

SEQ ID NO: 4542937 - DNA, 25 bp, Homo sapien
ggaaatgccaactgttccaaatgct

SEQ ID NO: 4542938 - DNA, 25 bp, Homo sapien
aggcccccaccatcaacagtggaaa

SEQ ID NO: 4542939 - DNA, 25 bp, Homo sapien
catgcctgcctcaggtagcctggca

SEQ ID NO: 4542940 - DNA, 25 bp, Homo sapien
ctgcctcaggtagcctggcaaccag

SEQ ID NO: 4542941 - DNA, 25 bp, Homo sapien
agctgaaactcacgacactgccaag

SEQ ID NO: 4542942 - DNA, 25 bp, Homo sapien
acagatccattgttcctctctgagc

SEQ ID NO: 4542943 - DNA, 25 bp, Homo sapien
cacatggcgaccactgcctatgaca

SEQ ID NO: 4542944 - DNA, 25 bp, Homo sapien
tgagcttcggcttctttttgcccct

SEQ ID NO: 4542945 - DNA, 25 bp, Homo sapien
gggcgaatcaggcattggcagctta

SEQ ID NO: 4542946 - DNA, 25 bp, Homo sapien
gaatcaggcattggcagcttatctg

SEQ ID NO: 4542947 - DNA, 25 bp, Homo sapien
gcgaatcaggcattggcagcttatc

SEQ ID NO: 4542948 - DNA, 25 bp, Homo sapien
gctgaggggcgaatcaggcattggc

SEQ ID NO: 4542949 - DNA, 25 bp, Homo sapien
ggcctctgccccgtgcactcgatgg

SEQ ID NO: 4542950 - DNA, 25 bp, Homo sapien
cctctgccccgtgcactcgatggtg

SEQ ID NO: 4542951 - DNA, 25 bp, Homo sapien
gaggcctctgccccgtgcactcgat

SEQ ID NO: 4542952 - DNA, 25 bp, Homo sapien
tctgccccgtgcactcgatggtgac

SEQ ID NO: 4542953 - DNA, 25 bp, Homo sapien
ccttggctttggacaatcgggtagc

SEQ ID NO: 4542954 - DNA, 25 bp, Homo sapien
tcctggcgatttcctgagggctctc

SEQ ID NO: 4542955 - DNA, 25 bp, Homo sapien
gaggactaaatcagccccaatctcc

SEQ ID NO: 4542956 - DNA, 25 bp, Homo sapien
ttggacaatcgggtagcagacagat

SEQ ID NO: 4542957 - DNA, 25 bp, Homo sapien
agcaaagtgactaccccgattgccc

SEQ ID NO: 4542958 - DNA, 25 bp, Homo sapien
aatgaacccgcaacagggtggcttc

SEQ ID NO: 4542959 - DNA, 25 bp, Homo sapien
ttcccagtcaatgaacccgcaacag

SEQ ID NO: 4542960 - DNA, 25 bp, Homo sapien
atctcaagccttggagggggaatga

SEQ ID NO: 4542961 - DNA, 25 bp, Homo sapien
gttccctgaattcccagtcaatgaa

SEQ ID NO: 4542962 - DNA, 25 bp, Homo sapien
ttgtgtcccagggtaactccgcctc

SEQ ID NO: 4542963 - DNA, 25 bp, Homo sapien
gcaggcatggatccccacagaaagt

SEQ ID NO: 4542964 - DNA, 25 bp, Homo sapien
cacacacaaggaccttgtgtcccag

SEQ ID NO: 4542965 - DNA, 25 bp, Homo sapien
ctcaaaggtgacattgtcaggaagc

SEQ ID NO: 4542966 - DNA, 25 bp, Homo sapien
tcatcattttctcggggagcaccag

SEQ ID NO: 4542967 - DNA, 25 bp, Homo sapien
tcggcccatcttgcagaattcatca

SEQ ID NO: 4542968 - DNA, 25 bp, Homo sapien
tgtaacaaaaggctgcattgtgctt

SEQ ID NO: 4542969 - DNA, 25 bp, Homo sapien
ggtgacagattgtatcggcccatct

SEQ ID NO: 4542970 - DNA, 25 bp, Homo sapien
aacaagccaagccaccctctatctc

SEQ ID NO: 4542971 - DNA, 25 bp, Homo sapien
tgcaacaagccaagccaccctctat

SEQ ID NO: 4542972 - DNA, 25 bp, Homo sapien
cctgcaacaagccaagccaccctct

SEQ ID NO: 4542973 - DNA, 25 bp, Homo sapien
agtgtggcctgccctttttccagct

SEQ ID NO: 4542974 - DNA, 25 bp, Homo sapien
tcagtatcaccattctcttactgat

SEQ ID NO: 4542975 - DNA, 25 bp, Homo sapien
taagagtataccacagtcagtatca

SEQ ID NO: 4542976 - DNA, 25 bp, Homo sapien
tctcttactgatggaaaaaacctgg

SEQ ID NO: 4542977 - DNA, 25 bp, Homo sapien
ccccgtgcttgcctaatgtaagagt

SEQ ID NO: 4542978 - DNA, 25 bp, Homo sapien
tgatcccactttttcgactgttccc

SEQ ID NO: 4542979 - DNA, 25 bp, Homo sapien
ttaggtgctttaccgatgatcccac

SEQ ID NO: 4542980 - DNA, 25 bp, Homo sapien
aattcgaccatactcccagtagtgg

SEQ ID NO: 4542981 - DNA, 25 bp, Homo sapien
tgttcccgaagcttcatgtcccagc

SEQ ID NO: 4542982 - DNA, 25 bp, Homo sapien
cagattccaacagaatgcatcctca

SEQ ID NO: 4542983 - DNA, 25 bp, Homo sapien
caacagaatgcatcctcagcaagac

SEQ ID NO: 4542984 - DNA, 25 bp, Homo sapien
gattccaacagaatgcatcctcagc

SEQ ID NO: 4542985 - DNA, 25 bp, Homo sapien
tccaacagaatgcatcctcagcaag

SEQ ID NO: 4542986 - DNA, 25 bp, Homo sapien
acttacaagtcgataacacaactga

SEQ ID NO: 4542987 - DNA, 25 bp, Homo sapien
cacttacaagtcgataacacaactg

SEQ ID NO: 4542988 - DNA, 25 bp, Homo sapien
cttacaagtcgataacacaactgac

SEQ ID NO: 4542989 - DNA, 25 bp, Homo sapien
gcctttgatctgatgttcacccaga

SEQ ID NO: 4542990 - DNA, 25 bp, Homo sapien
ctttcagtagcaaagctgtggatct

SEQ ID NO: 4542991 - DNA, 25 bp, Homo sapien
tcagtagcaaagctgtggatctacc

SEQ ID NO: 4542992 - DNA, 25 bp, Homo sapien
tgatgttcacccagaagctgcggtt

SEQ ID NO: 4542993 - DNA, 25 bp, Homo sapien
tgtgaggtaggacaaagtgggaaag

SEQ ID NO: 4542994 - DNA, 25 bp, Homo sapien
gacctgactgtctaggtgtgagagg

SEQ ID NO: 4542995 - DNA, 25 bp, Homo sapien
gagggtgagtatctacagacactct

SEQ ID NO: 4542996 - DNA, 25 bp, Homo sapien
aaaggggacctgactgtctaggtgt

SEQ ID NO: 4542997 - DNA, 25 bp, Homo sapien
ttctgtgcttggttgattagggcag

SEQ ID NO: 4542998 - DNA, 25 bp, Homo sapien
tttctgtgcttggttgattagggca

SEQ ID NO: 4542999 - DNA, 25 bp, Homo sapien
ctggttcagggataggatagttctc

SEQ ID NO: 4543000 - DNA, 25 bp, Homo sapien
ctaaacttcccatgtggcatttgag

SEQ ID NO: 4543001 - DNA, 25 bp, Homo sapien
ccttgggaacacataagacctgcat

SEQ ID NO: 4543002 - DNA, 25 bp, Homo sapien
tcctaaacttcccatgtggcatttg

SEQ ID NO: 4543003 - DNA, 25 bp, Homo sapien
tgaggggccccttgggaacacataa

SEQ ID NO: 4543004 - DNA, 25 bp, Homo sapien
ctactgtagccccaaggtggaatat

SEQ ID NO: 4543005 - DNA, 25 bp, Homo sapien
actgtagccccaaggtggaatatga

SEQ ID NO: 4543006 - DNA, 25 bp, Homo sapien
aggtggaatatgacttttctccttc

SEQ ID NO: 4543007 - DNA, 25 bp, Homo sapien
ttttctccttcaggggtggtgcaaa

SEQ ID NO: 4543008 - DNA, 25 bp, Homo sapien
ctatgtcatcattggtcccttttcc

SEQ ID NO: 4543009 - DNA, 25 bp, Homo sapien
tgtcatcattggtcccttttcctct

SEQ ID NO: 4543010 - DNA, 25 bp, Homo sapien
atgtcatcattggtcccttttcctc

SEQ ID NO: 4543011 - DNA, 25 bp, Homo sapien
tatgtcatcattggtcccttttcct

SEQ ID NO: 4543012 - DNA, 25 bp, Homo sapien
gggttgtagcaacagcctcaacaca

SEQ ID NO: 4543013 - DNA, 25 bp, Homo sapien
tgcataactgagttgattccctcaa

SEQ ID NO: 4543014 - DNA, 25 bp, Homo sapien
tggaaggaagatgccttttccctcc

SEQ ID NO: 4543015 - DNA, 25 bp, Homo sapien
aacacgtcttgcttgggttgtagca

SEQ ID NO: 4543016 - DNA, 25 bp, Homo sapien
aaggagtggcgagggcccagaaggt

SEQ ID NO: 4543017 - DNA, 25 bp, Homo sapien
ctctgctgacaactctttctgccct

SEQ ID NO: 4543018 - DNA, 25 bp, Homo sapien
cctctgctgacaactctttctgccc

SEQ ID NO: 4543019 - DNA, 25 bp, Homo sapien
gaaggagtggcgagggcccagaagg

SEQ ID NO: 4543020 - DNA, 25 bp, Homo sapien
tccaggcttatcaggcgcaagtcac

SEQ ID NO: 4543021 - DNA, 25 bp, Homo sapien
ctggtccatgcaccaccagggagag

SEQ ID NO: 4543022 - DNA, 25 bp, Homo sapien
ccatgcaccaccagggagaggttct

SEQ ID NO: 4543023 - DNA, 25 bp, Homo sapien
atgcaccaccagggagaggttcttg

SEQ ID NO: 4543024 - DNA, 25 bp, Homo sapien
caccagggagaggttcttgggcttg

SEQ ID NO: 4543025 - DNA, 25 bp, Homo sapien
gatgtatggttgctctggtggtgct

SEQ ID NO: 4543026 - DNA, 25 bp, Homo sapien
tttgcctctcgagtgaggcctggaa

SEQ ID NO: 4543027 - DNA, 25 bp, Homo sapien
ggaacatgcaggatgtatggttgct

SEQ ID NO: 4543028 - DNA, 25 bp, Homo sapien
tgctgcccagctgagggtccaagac

SEQ ID NO: 4543029 - DNA, 25 bp, Homo sapien
cttttgatgaatctgcttactgtgc

SEQ ID NO: 4543030 - DNA, 25 bp, Homo sapien
ttttgatgaatctgcttactgtgcc

SEQ ID NO: 4543031 - DNA, 25 bp, Homo sapien
ggcaggggagatgccatgatcatga

SEQ ID NO: 4543032 - DNA, 25 bp, Homo sapien
ggagatgccatgatcatgaaggtgg

SEQ ID NO: 4543033 - DNA, 25 bp, Homo sapien
ctggcaggggagatgccatgatcat

SEQ ID NO: 4543034 - DNA, 25 bp, Homo sapien
gccatgatcatgaaggtggttttcc

SEQ ID NO: 4543035 - DNA, 25 bp, Homo sapien
cctggaaggcttatgttatcactga

SEQ ID NO: 4543036 - DNA, 25 bp, Homo sapien
gatagtcagaggcattatccatcag

SEQ ID NO: 4543037 - DNA, 25 bp, Homo sapien
agatcatattgcttttcacttccca

SEQ ID NO: 4543038 - DNA, 25 bp, Homo sapien
tatccatcagctacattaaagcaag

SEQ ID NO: 4543039 - DNA, 25 bp, Homo sapien
cgaatttgcttgtcgtctttgcaca

SEQ ID NO: 4543040 - DNA, 25 bp, Homo sapien
cacgaatttgcttgtcgtctttgca

SEQ ID NO: 4543041 - DNA, 25 bp, Homo sapien
ttcacgaatttgcttgtcgtctttg

SEQ ID NO: 4543042 - DNA, 25 bp, Homo sapien
gcttcacgaatttgcttgtcgtctt

SEQ ID NO: 4543043 - DNA, 25 bp, Homo sapien
ttatttcggcattagctactgcagg

SEQ ID NO: 4543044 - DNA, 25 bp, Homo sapien
tttcggcattagctactgcagggag

SEQ ID NO: 4543045 - DNA, 25 bp, Homo sapien
cctgtggcattatcctctatgtaat

SEQ ID NO: 4543046 - DNA, 25 bp, Homo sapien
ggcatgaaaacctgtggcattatcc

SEQ ID NO: 4543047 - DNA, 25 bp, Homo sapien
tgtttcaagggcagcgcggttggtt

SEQ ID NO: 4543048 - DNA, 25 bp, Homo sapien
cttggcgacgccatgtttcaagggc

SEQ ID NO: 4543049 - DNA, 25 bp, Homo sapien
atctccacaggcttggcgacgccat

SEQ ID NO: 4543050 - DNA, 25 bp, Homo sapien
ttggttttgcggcagcgttagccag

SEQ ID NO: 4543051 - DNA, 25 bp, Homo sapien
gggaacgatcagtgacccgcgagcc

SEQ ID NO: 4543052 - DNA, 25 bp, Homo sapien
gcgagccgccgacttcttgttcagc

SEQ ID NO: 4543053 - DNA, 25 bp, Homo sapien
tcgcacccagacacgctgaggtact

SEQ ID NO: 4543054 - DNA, 25 bp, Homo sapien
tactgagggcgacctggcagtgcct

SEQ ID NO: 4543055 - DNA, 25 bp, Homo sapien
ttggatgatgacattgtcctttgac

SEQ ID NO: 4543056 - DNA, 25 bp, Homo sapien
gaccattgtagaattcctgtactac

SEQ ID NO: 4543057 - DNA, 25 bp, Homo sapien
ttttgtccttttgactactgtgaaa

SEQ ID NO: 4543058 - DNA, 25 bp, Homo sapien
gtcctttgacatactgaccattgta

SEQ ID NO: 4543059 - DNA, 25 bp, Homo sapien
ctttaatttccctaaatgctgtctc

SEQ ID NO: 4543060 - DNA, 25 bp, Homo sapien
tactttaatttccctaaatgctgtc

SEQ ID NO: 4543061 - DNA, 25 bp, Homo sapien
ttaatttccctaaatgctgtctcac

SEQ ID NO: 4543062 - DNA, 25 bp, Homo sapien
tttaatttccctaaatgctgtctca

SEQ ID NO: 4543063 - DNA, 25 bp, Homo sapien
atttctgccataagagtgtgtgccc

SEQ ID NO: 4543064 - DNA, 25 bp, Homo sapien
agtcaggagggattgggaatactca

SEQ ID NO: 4543065 - DNA, 25 bp, Homo sapien
gaatggctctctcattatctgtccg

SEQ ID NO: 4543066 - DNA, 25 bp, Homo sapien
tatctgtccgtgattggaggactgc

SEQ ID NO: 4543067 - DNA, 25 bp, Homo sapien
ttcctcatcaactcttgttccaaac

SEQ ID NO: 4543068 - DNA, 25 bp, Homo sapien
tttcctcatcaactcttgttccaaa

SEQ ID NO: 4543069 - DNA, 25 bp, Homo sapien
tctttcctcatcaactcttgttcca

SEQ ID NO: 4543070 - DNA, 25 bp, Homo sapien
cttctttcctcatcaactcttgttc

SEQ ID NO: 4543071 - DNA, 25 bp, Homo sapien
tctttagattgcatctgtttattca

SEQ ID NO: 4543072 - DNA, 25 bp, Homo sapien
tgttctgaagtaaaactgctcaggg

SEQ ID NO: 4543073 - DNA, 25 bp, Homo sapien
tgtgcaggctctgaaaggtaaaggg

SEQ ID NO: 4543074 - DNA, 25 bp, Homo sapien
ctatggtgtatcactgagtgcagaa

SEQ ID NO: 4543075 - DNA, 25 bp, Homo sapien
taaaactgctcagggcattaggtgg

SEQ ID NO: 4543076 - DNA, 25 bp, Homo sapien
tgcagacacttggattttggctcag

SEQ ID NO: 4543077 - DNA, 25 bp, Homo sapien
gaaacaagatgctatgctgccagct

SEQ ID NO: 4543078 - DNA, 25 bp, Homo sapien
ctttcaagatggaggaaggtcccca

SEQ ID NO: 4543079 - DNA, 25 bp, Homo sapien
aggtccccaagaatgcagctctaga

SEQ ID NO: 4543080 - DNA, 25 bp, Homo sapien
gtcatttctactggtgtctaacctc

SEQ ID NO: 4543081 - DNA, 25 bp, Homo sapien
aaataatccaataatctctttggct

SEQ ID NO: 4543082 - DNA, 25 bp, Homo sapien
aatccaataatctctttggctgtgt

SEQ ID NO: 4543083 - DNA, 25 bp, Homo sapien
tgtcatttctactggtgtctaacct

SEQ ID NO: 4543084 - DNA, 25 bp, Homo sapien
gggaaagcacgaatgcagttcctca

SEQ ID NO: 4543085 - DNA, 25 bp, Homo sapien
aggggaaagcacgaatgcagttcct

SEQ ID NO: 4543086 - DNA, 25 bp, Homo sapien
ggggaaagcacgaatgcagttcctc

SEQ ID NO: 4543087 - DNA, 25 bp, Homo sapien
aattaagatgatgcactaccttcag

SEQ ID NO: 4543088 - DNA, 25 bp, Homo sapien
attaagatgatgcactaccttcaga

SEQ ID NO: 4543089 - DNA, 25 bp, Homo sapien
caattaagatgatgcactaccttca

SEQ ID NO: 4543090 - DNA, 25 bp, Homo sapien
gaaattgtggcaataatcaatagct

SEQ ID NO: 4543091 - DNA, 25 bp, Homo sapien
ttgtggcaataatcaatagcttacc

SEQ ID NO: 4543092 - DNA, 25 bp, Homo sapien
ctctgaaattgtggcaataatcaat

SEQ ID NO: 4543093 - DNA, 25 bp, Homo sapien
attgtggcaataatcaatagcttac

SEQ ID NO: 4543094 - DNA, 25 bp, Homo sapien
tggaggctatgatcgtggtgtatcc

SEQ ID NO: 4543095 - DNA, 25 bp, Homo sapien
gatgaggaagtagtttccctagaaa

SEQ ID NO: 4543096 - DNA, 25 bp, Homo sapien
gtctccatggtgtatccatctcaga

SEQ ID NO: 4543097 - DNA, 25 bp, Homo sapien
cagctctgaagcagcagcgctggga

SEQ ID NO: 4543098 - DNA, 25 bp, Homo sapien
atacaatctgggatagtttggggga

SEQ ID NO: 4543099 - DNA, 25 bp, Homo sapien
ccttaagcagaggaattggtgtgcc

SEQ ID NO: 4543100 - DNA, 25 bp, Homo sapien
tgtgaacagaagtccttaagcagag

SEQ ID NO: 4543101 - DNA, 25 bp, Homo sapien
aggaattggtgtgccttaaagatac

SEQ ID NO: 4543102 - DNA, 25 bp, Homo sapien
ggtttggttagctcacaggacttcc

SEQ ID NO: 4543103 - DNA, 25 bp, Homo sapien
gactcatactcaactcaactaggct

SEQ ID NO: 4543104 - DNA, 25 bp, Homo sapien
aactgctacttgtggacctcaccag

SEQ ID NO: 4543105 - DNA, 25 bp, Homo sapien
tatagtagccatgacatagcttgag

SEQ ID NO: 4543106 - DNA, 25 bp, Homo sapien
gagatcctgactggttgcgcacttg

SEQ ID NO: 4543107 - DNA, 25 bp, Homo sapien
tcttgcgtaaggtgaccagctgtcc

SEQ ID NO: 4543108 - DNA, 25 bp, Homo sapien
cagggctgggcaacttaggtgcaca

SEQ ID NO: 4543109 - DNA, 25 bp, Homo sapien
gagattctcagccagaggatcccag

SEQ ID NO: 4543110 - DNA, 25 bp, Homo sapien
ttctcatagtggtgcatgaagtggg

SEQ ID NO: 4543111 - DNA, 25 bp, Homo sapien
ggagggccgcagctgaacaccccga

SEQ ID NO: 4543112 - DNA, 25 bp, Homo sapien
gagggccgcagctgaacaccccgat

SEQ ID NO: 4543113 - DNA, 25 bp, Homo sapien
tcagaagttctcatagtggtgcatg

SEQ ID NO: 4543114 - DNA, 25 bp, Homo sapien
cagactccggttcagcactttctgg

SEQ ID NO: 4543115 - DNA, 25 bp, Homo sapien
cgtgaacagactccggttcagcact

SEQ ID NO: 4543116 - DNA, 25 bp, Homo sapien
ccgtgaacagactccggttcagcac

SEQ ID NO: 4543117 - DNA, 25 bp, Homo sapien
gaacagactccggttcagcactttc

SEQ ID NO: 4543118 - DNA, 25 bp, Homo sapien
gccagctgggtgacataaatgtgca

SEQ ID NO: 4543119 - DNA, 25 bp, Homo sapien
ggtgacataaatgtgcacagacacc

SEQ ID NO: 4543120 - DNA, 25 bp, Homo sapien
tgggtgacataaatgtgcacagaca

SEQ ID NO: 4543121 - DNA, 25 bp, Homo sapien
cagctgggtgacataaatgtgcaca

SEQ ID NO: 4543122 - DNA, 25 bp, Homo sapien
ctatgccccatttgatgaatgaggg

SEQ ID NO: 4543123 - DNA, 25 bp, Homo sapien
gccccatttgatgaatgagggaggg

SEQ ID NO: 4543124 - DNA, 25 bp, Homo sapien
tgatgaatgagggagggatgctcac

SEQ ID NO: 4543125 - DNA, 25 bp, Homo sapien
tatgccccatttgatgaatgaggga

SEQ ID NO: 4543126 - DNA, 25 bp, Homo sapien
gacttgaagaccaggtctttgagga

SEQ ID NO: 4543127 - DNA, 25 bp, Homo sapien
cttgaagaccaggtctttgaggatg

SEQ ID NO: 4543128 - DNA, 25 bp, Homo sapien
acttgaagaccaggtctttgaggat

SEQ ID NO: 4543129 - DNA, 25 bp, Homo sapien
cctttggggatgagtagatctccct

SEQ ID NO: 4543130 - DNA, 25 bp, Homo sapien
tgccctttggggatgagtagatctc

SEQ ID NO: 4543131 - DNA, 25 bp, Homo sapien
tccagcacagccattgccctttggg

SEQ ID NO: 4543132 - DNA, 25 bp, Homo sapien
gtatccagcacagccattgcccttt

SEQ ID NO: 4543133 - DNA, 25 bp, Homo sapien
acctgtcctcttcacacccctgagg

SEQ ID NO: 4543134 - DNA, 25 bp, Homo sapien
ctgaggactgataggcacctgtcct

SEQ ID NO: 4543135 - DNA, 25 bp, Homo sapien
gcacctgtcctcttcacacccctga

SEQ ID NO: 4543136 - DNA, 25 bp, Homo sapien
aggactgataggcacctgtcctctt

SEQ ID NO: 4543137 - DNA, 25 bp, Homo sapien
gagcatagctgccatggatgatgag

SEQ ID NO: 4543138 - DNA, 25 bp, Homo sapien
acctccatagatgattgccgggacc

SEQ ID NO: 4543139 - DNA, 25 bp, Homo sapien
gtgggcagctggatcagagcatagc

SEQ ID NO: 4543140 - DNA, 25 bp, Homo sapien
ttgtcacctccatagatgattgccg

SEQ ID NO: 4543141 - DNA, 25 bp, Homo sapien
tgagctccctgctccatgggctggc

SEQ ID NO: 4543142 - DNA, 25 bp, Homo sapien
ctgctccatgggctggcccagggaa

SEQ ID NO: 4543143 - DNA, 25 bp, Homo sapien
catgggctggcccagggaagtccct

SEQ ID NO: 4543144 - DNA, 25 bp, Homo sapien
cttcctgtcccatcctgagctccct

SEQ ID NO: 4543145 - DNA, 25 bp, Homo sapien
gcatagagcaggatgtagaggtggt

SEQ ID NO: 4543146 - DNA, 25 bp, Homo sapien
cggaagtggtgggaggcgaagacat

SEQ ID NO: 4543147 - DNA, 25 bp, Homo sapien
agacatacatgatggccaggaccag

SEQ ID NO: 4543148 - DNA, 25 bp, Homo sapien
gggtcagccagaagccccggaagct

SEQ ID NO: 4543149 - DNA, 25 bp, Homo sapien
ctggaagaaccaccaatagaacttc

SEQ ID NO: 4543150 - DNA, 25 bp, Homo sapien
aatagaacttctggggaagcttgga

SEQ ID NO: 4543151 - DNA, 25 bp, Homo sapien
aagaaccaccaatagaacttctggg

SEQ ID NO: 4543152 - DNA, 25 bp, Homo sapien
caatagaacttctggggaagcttgg

SEQ ID NO: 4543153 - DNA, 25 bp, Homo sapien
tggggggcaaaggcaccttgagcct

SEQ ID NO: 4543154 - DNA, 25 bp, Homo sapien
gggggcaaaggcaccttgagcctct

SEQ ID NO: 4543155 - DNA, 25 bp, Homo sapien
ggggggcaaaggcaccttgagcctc

SEQ ID NO: 4543156 - DNA, 25 bp, Homo sapien
ctggggggcaaaggcaccttgagcc

SEQ ID NO: 4543157 - DNA, 25 bp, Homo sapien
tgggctgactgagaagatgtagaca

SEQ ID NO: 4543158 - DNA, 25 bp, Homo sapien
acgttggggaatatgcaggccagca

SEQ ID NO: 4543159 - DNA, 25 bp, Homo sapien
gatgtagacattgactgcgtggcca

SEQ ID NO: 4543160 - DNA, 25 bp, Homo sapien
tcacaaagacgttggggaatatgca

SEQ ID NO: 4543161 - DNA, 25 bp, Homo sapien
ccatggcgatccagcggtggaagtc

SEQ ID NO: 4543162 - DNA, 25 bp, Homo sapien
catagcggttgaggaaagtctctcg

SEQ ID NO: 4543163 - DNA, 25 bp, Homo sapien
tgcctcgtgacaggatgatgcccac

SEQ ID NO: 4543164 - DNA, 25 bp, Homo sapien
cacgagggtggtctgtgcaatgtcc

SEQ ID NO: 4543165 - DNA, 25 bp, Homo sapien
ggccggagtgaggttacatcagctt

SEQ ID NO: 4543166 - DNA, 25 bp, Homo sapien
aggttacatcagcttggcacaggtg

SEQ ID NO: 4543167 - DNA, 25 bp, Homo sapien
aggtggccaaggtcccgagccctgg

SEQ ID NO: 4543168 - DNA, 25 bp, Homo sapien
gagtgaggttacatcagcttggcac

SEQ ID NO: 4543169 - DNA, 25 bp, Homo sapien
gaagattgccacacacacgatgtgc

SEQ ID NO: 4543170 - DNA, 25 bp, Homo sapien
tccacgaagcgcttgtactgctgca

SEQ ID NO: 4543171 - DNA, 25 bp, Homo sapien
agtaagcacgatctgcaaacacgcc

SEQ ID NO: 4543172 - DNA, 25 bp, Homo sapien
gatgtgcctccggtagttctccacg

SEQ ID NO: 4543173 - DNA, 25 bp, Homo sapien
gggcctcccagctctggggcttctg

SEQ ID NO: 4543174 - DNA, 25 bp, Homo sapien
tcttcagtccagggcctcccagctc

SEQ ID NO: 4543175 - DNA, 25 bp, Homo sapien
gcttctggggcagggggccccagtc

SEQ ID NO: 4543176 - DNA, 25 bp, Homo sapien
ttttgccaaacctcttcttcagtcc

SEQ ID NO: 4543177 - DNA, 25 bp, Homo sapien
taccatgagctactttcaaagggca

SEQ ID NO: 4543178 - DNA, 25 bp, Homo sapien
gaacaactccctgggcagagcatgg

SEQ ID NO: 4543179 - DNA, 25 bp, Homo sapien
catccgagcagcatagggtgagaga

SEQ ID NO: 4543180 - DNA, 25 bp, Homo sapien
aagggcaaatgcctgattttaccag

SEQ ID NO: 4543181 - DNA, 25 bp, Homo sapien
cgagactcgacagctgatgttttgt

SEQ ID NO: 4543182 - DNA, 25 bp, Homo sapien
cgctccccaggtgtccgagtgatga

SEQ ID NO: 4543183 - DNA, 25 bp, Homo sapien
caggtgtccgagtgatgaacgagac

SEQ ID NO: 4543184 - DNA, 25 bp, Homo sapien
gagtgatgaacgagactcgacagct

SEQ ID NO: 4543185 - DNA, 25 bp, Homo sapien
ctcgctgtcatggtcccgcagcatg

SEQ ID NO: 4543186 - DNA, 25 bp, Homo sapien
cggagctcgctgtcatggtcccgca

SEQ ID NO: 4543187 - DNA, 25 bp, Homo sapien
gctcgctgtcatggtcccgcagcat

SEQ ID NO: 4543188 - DNA, 25 bp, Homo sapien
ggagctcgctgtcatggtcccgcag

SEQ ID NO: 4543189 - DNA, 25 bp, Homo sapien
ctggaggaggaccagagacacagca

SEQ ID NO: 4543190 - DNA, 25 bp, Homo sapien
ggaggaggaccagagacacagcagc

SEQ ID NO: 4543191 - DNA, 25 bp, Homo sapien
tggaggaggaccagagacacagcag

SEQ ID NO: 4543192 - DNA, 25 bp, Homo sapien
aggattagaaaggcacaccccatac

SEQ ID NO: 4543193 - DNA, 25 bp, Homo sapien
ctcaggattagaaaggcacacccca

SEQ ID NO: 4543194 - DNA, 25 bp, Homo sapien
tcaggattagaaaggcacaccccat

SEQ ID NO: 4543195 - DNA, 25 bp, Homo sapien
caggattagaaaggcacaccccata

SEQ ID NO: 4543196 - DNA, 25 bp, Homo sapien
ttagacgggacttatcctctgggga

SEQ ID NO: 4543197 - DNA, 25 bp, Homo sapien
gtcatacatggtaaacattagacgg

SEQ ID NO: 4543198 - DNA, 25 bp, Homo sapien
catacatggtaaacattagacggga

SEQ ID NO: 4543199 - DNA, 25 bp, Homo sapien
acattagacgggacttatcctctgg

SEQ ID NO: 4543200 - DNA, 25 bp, Homo sapien
catggactccacaaacatgtcctgg

SEQ ID NO: 4543201 - DNA, 25 bp, Homo sapien
gaaggacaggtagccattgccatcc

SEQ ID NO: 4543202 - DNA, 25 bp, Homo sapien
gccagagagaacatggactccacaa

SEQ ID NO: 4543203 - DNA, 25 bp, Homo sapien
gggactcggcaaactcggccctgct

SEQ ID NO: 4543204 - DNA, 25 bp, Homo sapien
tccctgcgtcggcctggttgatgtc

SEQ ID NO: 4543205 - DNA, 25 bp, Homo sapien
ccctgcgtcggcctggttgatgtcc

SEQ ID NO: 4543206 - DNA, 25 bp, Homo sapien
gtccctgcgtcggcctggttgatgt

SEQ ID NO: 4543207 - DNA, 25 bp, Homo sapien
tgcgcctggccacaaccgtttgtta

SEQ ID NO: 4543208 - DNA, 25 bp, Homo sapien
tcgcatgtaacaaccatttattgtt

SEQ ID NO: 4543209 - DNA, 25 bp, Homo sapien
atacctggcacttgggccaataagc

SEQ ID NO: 4543210 - DNA, 25 bp, Homo sapien
gttaaatgcctgcaacatacctggc

SEQ ID NO: 4543211 - DNA, 25 bp, Homo sapien
tcctcacaacaatgcaatgggatgg

SEQ ID NO: 4543212 - DNA, 25 bp, Homo sapien
taactgggtaggtgcatttctaaca

SEQ ID NO: 4543213 - DNA, 25 bp, Homo sapien
catgtagacgatctcaccgaatcct

SEQ ID NO: 4543214 - DNA, 25 bp, Homo sapien
gagttcctggttcagtctaactggg

SEQ ID NO: 4543215 - DNA, 25 bp, Homo sapien
agctgctgcacaaaggcgccccgtt

SEQ ID NO: 4543216 - DNA, 25 bp, Homo sapien
agcgcacgcagaagtcccatagctg

SEQ ID NO: 4543217 - DNA, 25 bp, Homo sapien
agatctccaggatgcgttcccgctg

SEQ ID NO: 4543218 - DNA, 25 bp, Homo sapien
ttcctaaatagctccttctcgctca

SEQ ID NO: 4543219 - DNA, 25 bp, Homo sapien
ttgagcagcagggtgcggcatcctc

SEQ ID NO: 4543220 - DNA, 25 bp, Homo sapien
cggcatcctcggttgttggacagga

SEQ ID NO: 4543221 - DNA, 25 bp, Homo sapien
cacggagcacagtgagatgcctgtt

SEQ ID NO: 4543222 - DNA, 25 bp, Homo sapien
ggatgatgatgggactgctcctctc

SEQ ID NO: 4543223 - DNA, 25 bp, Homo sapien
tgttctcggccccggaaataggcca

SEQ ID NO: 4543224 - DNA, 25 bp, Homo sapien
agcttcttgtgttctcggccccgga

SEQ ID NO: 4543225 - DNA, 25 bp, Homo sapien
ccttcttcacgctctctttgagttt

SEQ ID NO: 4543226 - DNA, 25 bp, Homo sapien
cacgctctctttgagtttcttttgt

SEQ ID NO: 4543227 - DNA, 25 bp, Homo sapien
atggtgatggcaaaaccagggctgc

SEQ ID NO: 4543228 - DNA, 25 bp, Homo sapien
gcaggccgtcagttgtgagctgctt

SEQ ID NO: 4543229 - DNA, 25 bp, Homo sapien
tcagttgtgagctgcttaggttgag

SEQ ID NO: 4543230 - DNA, 25 bp, Homo sapien
caagcacagtcaggggtgcacactg

SEQ ID NO: 4543231 - DNA, 25 bp, Homo sapien
ccactgtcactcacttgtgttctcc

SEQ ID NO: 4543232 - DNA, 25 bp, Homo sapien
atcttgatccttctctggccactgt

SEQ ID NO: 4543233 - DNA, 25 bp, Homo sapien
tcttgatccttctctggccactgtc

SEQ ID NO: 4543234 - DNA, 25 bp, Homo sapien
gggtcaatgttgataacagcgacca

SEQ ID NO: 4543235 - DNA, 25 bp, Homo sapien
gttgataacagcgaccagcacgtcc

SEQ ID NO: 4543236 - DNA, 25 bp, Homo sapien
aatgttgataacagcgaccagcacg

SEQ ID NO: 4543237 - DNA, 25 bp, Homo sapien
cactggggtcaatgttgataacagc

SEQ ID NO: 4543238 - DNA, 25 bp, Homo sapien
gccgtacaaactggtcgaggacaat

SEQ ID NO: 4543239 - DNA, 25 bp, Homo sapien
tggtcgaggacaatggcactgaaca

SEQ ID NO: 4543240 - DNA, 25 bp, Homo sapien
gagcagctctagctgggataggtcc

SEQ ID NO: 4543241 - DNA, 25 bp, Homo sapien
atcccgcagccgtacaaactggtcg

SEQ ID NO: 4543242 - DNA, 25 bp, Homo sapien
gagataaggggtgagcgtatgtttg

SEQ ID NO: 4543243 - DNA, 25 bp, Homo sapien
acaggagataaggggtgagcgtatg

SEQ ID NO: 4543244 - DNA, 25 bp, Homo sapien
caggagataaggggtgagcgtatgt

SEQ ID NO: 4543245 - DNA, 25 bp, Homo sapien
ggagataaggggtgagcgtatgttt

SEQ ID NO: 4543246 - DNA, 25 bp, Homo sapien
tccacattagggttgagatcactcc

SEQ ID NO: 4543247 - DNA, 25 bp, Homo sapien
ggcctggctatagctgggcagcccc

SEQ ID NO: 4543248 - DNA, 25 bp, Homo sapien
gttccttgggatgtccagcccaaag

SEQ ID NO: 4543249 - DNA, 25 bp, Homo sapien
tctcggccacgttggatgctgctgg

SEQ ID NO: 4543250 - DNA, 25 bp, Homo sapien
tgtacgggagaatttgccagggcca

SEQ ID NO: 4543251 - DNA, 25 bp, Homo sapien
ctgtacgggagaatttgccagggcc

SEQ ID NO: 4543252 - DNA, 25 bp, Homo sapien
caactccgaaatctgggaggccatt

SEQ ID NO: 4543253 - DNA, 25 bp, Homo sapien
ccctcagatcttcaaccactatgtt

SEQ ID NO: 4543254 - DNA, 25 bp, Homo sapien
gatcttcaaccactatgttgtcctc

SEQ ID NO: 4543255 - DNA, 25 bp, Homo sapien
ttgtcctccaactccgaaatctggg

SEQ ID NO: 4543256 - DNA, 25 bp, Homo sapien
ctcccgaatccagtagttgttgcag

SEQ ID NO: 4543257 - DNA, 25 bp, Homo sapien
cccgaatccagtagttgttgcagac

SEQ ID NO: 4543258 - DNA, 25 bp, Homo sapien
ccgaatccagtagttgttgcagacc

SEQ ID NO: 4543259 - DNA, 25 bp, Homo sapien
tcccgaatccagtagttgttgcaga

SEQ ID NO: 4543260 - DNA, 25 bp, Homo sapien
ccttgttcaggaccttccggaaatg

SEQ ID NO: 4543261 - DNA, 25 bp, Homo sapien
caggaccttccggaaatgacagctg

SEQ ID NO: 4543262 - DNA, 25 bp, Homo sapien
gttcaggaccttccggaaatgacag

SEQ ID NO: 4543263 - DNA, 25 bp, Homo sapien
gaccttccggaaatgacagctggca

SEQ ID NO: 4543264 - DNA, 25 bp, Homo sapien
ctcatgtagacaccagggggcacca

SEQ ID NO: 4543265 - DNA, 25 bp, Homo sapien
tcatgtagacaccagggggcaccat

SEQ ID NO: 4543266 - DNA, 25 bp, Homo sapien
agaggccaccacaaattccggggag

SEQ ID NO: 4543267 - DNA, 25 bp, Homo sapien
tgctggggtctaggaaaggacggta

SEQ ID NO: 4543268 - DNA, 25 bp, Homo sapien
ccaccacaaattccggggagatgct

SEQ ID NO: 4543269 - DNA, 25 bp, Homo sapien
ctcagaggccaccacaaattccggg

SEQ ID NO: 4543270 - DNA, 25 bp, Homo sapien
ggattctccgcacaggtgtcctcct

SEQ ID NO: 4543271 - DNA, 25 bp, Homo sapien
tccttcccctcaggattctccgcac

SEQ ID NO: 4543272 - DNA, 25 bp, Homo sapien
ccctcaggattctccgcacaggtgt

SEQ ID NO: 4543273 - DNA, 25 bp, Homo sapien
caggattctccgcacaggtgtcctc

SEQ ID NO: 4543274 - DNA, 25 bp, Homo sapien
gtatactccgggagtgttttctgca

SEQ ID NO: 4543275 - DNA, 25 bp, Homo sapien
gcagccactcatacacagcgatgtt

SEQ ID NO: 4543276 - DNA, 25 bp, Homo sapien
ctgggcagccactcatacacagcga

SEQ ID NO: 4543277 - DNA, 25 bp, Homo sapien
tgtatactccgggagtgttttctgc

SEQ ID NO: 4543278 - DNA, 25 bp, Homo sapien
cagcggagtctcccgtgggcttgca

SEQ ID NO: 4543279 - DNA, 25 bp, Homo sapien
tctcccgtgggcttgcacgcggaag

SEQ ID NO: 4543280 - DNA, 25 bp, Homo sapien
tgggtggcggttgtccacagatggg

SEQ ID NO: 4543281 - DNA, 25 bp, Homo sapien
cacgcggaagggaggacgtcgcggg

SEQ ID NO: 4543282 - DNA, 25 bp, Homo sapien
tggtagcggaaccagagcaggccca

SEQ ID NO: 4543283 - DNA, 25 bp, Homo sapien
tcgtcctcccagtctgggtgctggc

SEQ ID NO: 4543284 - DNA, 25 bp, Homo sapien
tcttgcgtgcgtgctggaacagctc

SEQ ID NO: 4543285 - DNA, 25 bp, Homo sapien
gtaggtggcgatgaccctcttgcgt

SEQ ID NO: 4543286 - DNA, 25 bp, Homo sapien
atcgggggagcccacactcgcagac

SEQ ID NO: 4543287 - DNA, 25 bp, Homo sapien
ggcgcaggggaggagacgagcggta

SEQ ID NO: 4543288 - DNA, 25 bp, Homo sapien
ggagacgagcggtagcgtgatcggg

SEQ ID NO: 4543289 - DNA, 25 bp, Homo sapien
ctgcatccgacgtgggggcgcaggg

SEQ ID NO: 4543290 - DNA, 25 bp, Homo sapien
cccacatgagcagggggttctgcga

SEQ ID NO: 4543291 - DNA, 25 bp, Homo sapien
gggtcgggcgccgcccacatgagca

SEQ ID NO: 4543292 - DNA, 25 bp, Homo sapien
atagatggcgctgccgtccagccag

SEQ ID NO: 4543293 - DNA, 25 bp, Homo sapien
agaagctccgcagcgcgtcgctcca

SEQ ID NO: 4543294 - DNA, 25 bp, Homo sapien
tcaccacgtcggaaagaacatggta

SEQ ID NO: 4543295 - DNA, 25 bp, Homo sapien
accacgtcggaaagaacatggtagc

SEQ ID NO: 4543296 - DNA, 25 bp, Homo sapien
gctcaccacgtcggaaagaacatgg

SEQ ID NO: 4543297 - DNA, 25 bp, Homo sapien
tctccaggtgggatgcggatgttga

SEQ ID NO: 4543298 - DNA, 25 bp, Homo sapien
ccactggtctccccctttgccctca

SEQ ID NO: 4543299 - DNA, 25 bp, Homo sapien
cactggtctccccctttgccctcac

SEQ ID NO: 4543300 - DNA, 25 bp, Homo sapien
cagtacggtgcggttgtggagcgac

SEQ ID NO: 4543301 - DNA, 25 bp, Homo sapien
aattggctggtacgcggcgctgcaa

SEQ ID NO: 4543302 - DNA, 25 bp, Homo sapien
agagcctgatacacaccgtcggcgt

SEQ ID NO: 4543303 - DNA, 25 bp, Homo sapien
gtggctgcgttgctgagccggcgcg

SEQ ID NO: 4543304 - DNA, 25 bp, Homo sapien
ggagcggggctctgtctaagcactc

SEQ ID NO: 4543305 - DNA, 25 bp, Homo sapien
gcggggctctgtctaagcactccat

SEQ ID NO: 4543306 - DNA, 25 bp, Homo sapien
agggagcggggctctgtctaagcac

SEQ ID NO: 4543307 - DNA, 25 bp, Homo sapien
gagcggggctctgtctaagcactcc

SEQ ID NO: 4543308 - DNA, 25 bp, Homo sapien
ctcaggttgttaaaccagccgtcat

SEQ ID NO: 4543309 - DNA, 25 bp, Homo sapien
gttgttaaaccagccgtcatagcgc

SEQ ID NO: 4543310 - DNA, 25 bp, Homo sapien
acagcaccacgctcgtggtgcctca

SEQ ID NO: 4543311 - DNA, 25 bp, Homo sapien
taaaccagccgtcatagcgctgcac

SEQ ID NO: 4543312 - DNA, 25 bp, Homo sapien
cccgagcaacgaaggccttggccag

SEQ ID NO: 4543313 - DNA, 25 bp, Homo sapien
ccagctcgcggagcgcccctaaccg

SEQ ID NO: 4543314 - DNA, 25 bp, Homo sapien
ccctcccgagcaacgaaggccttgg

SEQ ID NO: 4543315 - DNA, 25 bp, Homo sapien
ctcccgagcaacgaaggccttggcc

SEQ ID NO: 4543316 - DNA, 25 bp, Homo sapien
ctggggaacaccccgccgctagagg

SEQ ID NO: 4543317 - DNA, 25 bp, Homo sapien
gatcctggggaacaccccgccgcta

SEQ ID NO: 4543318 - DNA, 25 bp, Homo sapien
aacaccccgccgctagaggagcctg

SEQ ID NO: 4543319 - DNA, 25 bp, Homo sapien
accccgccgctagaggagcctgata

SEQ ID NO: 4543320 - DNA, 25 bp, Homo sapien
atcagtgcctctggtcttgcacgga

SEQ ID NO: 4543321 - DNA, 25 bp, Homo sapien
agtcagaagagctcccaggagcatc

SEQ ID NO: 4543322 - DNA, 25 bp, Homo sapien
ccgatggacccagggatccagtcag

SEQ ID NO: 4543323 - DNA, 25 bp, Homo sapien
caggagcatcagtgcctctggtctt

SEQ ID NO: 4543324 - DNA, 25 bp, Homo sapien
ggaaggtagctgttagaagcatcac

SEQ ID NO: 4543325 - DNA, 25 bp, Homo sapien
ttctggaaggtagctgttagaagca

SEQ ID NO: 4543326 - DNA, 25 bp, Homo sapien
ctggaaggtagctgttagaagcatc

SEQ ID NO: 4543327 - DNA, 25 bp, Homo sapien
acttctggaaggtagctgttagaag

SEQ ID NO: 4543328 - DNA, 25 bp, Homo sapien
tcatccaaacgccactctttccagg

SEQ ID NO: 4543329 - DNA, 25 bp, Homo sapien
caaacgccactctttccaggacaat

SEQ ID NO: 4543330 - DNA, 25 bp, Homo sapien
tccaaacgccactctttccaggaca

SEQ ID NO: 4543331 - DNA, 25 bp, Homo sapien
ttccaggacaattggcagctctgga

SEQ ID NO: 4543332 - DNA, 25 bp, Homo sapien
ttccagctccgccgatcctcagcct

SEQ ID NO: 4543333 - DNA, 25 bp, Homo sapien
ttgcttctgtgctctacttcttgcc

SEQ ID NO: 4543334 - DNA, 25 bp, Homo sapien
gcttctgtgctctacttcttgcctt

SEQ ID NO: 4543335 - DNA, 25 bp, Homo sapien
tgcttctgtgctctacttcttgcct

SEQ ID NO: 4543336 - DNA, 25 bp, Homo sapien
gctcaggacagacctgcgccagtgt

SEQ ID NO: 4543337 - DNA, 25 bp, Homo sapien
actgtgcaggtgtcggctcaggaca

SEQ ID NO: 4543338 - DNA, 25 bp, Homo sapien
tcaggacagacctgcgccagtgtga

SEQ ID NO: 4543339 - DNA, 25 bp, Homo sapien
ggtccttggtctcgccactgtgcag

SEQ ID NO: 4543340 - DNA, 25 bp, Homo sapien
tggcacgtcgcccacgctgctataa

SEQ ID NO: 4543341 - DNA, 25 bp, Homo sapien
gctgctataaaaggggtcccgcgcg

SEQ ID NO: 4543342 - DNA, 25 bp, Homo sapien
ctgggacacccgtgtggcacgtcgc

SEQ ID NO: 4543343 - DNA, 25 bp, Homo sapien
gaggtggggcccttatttgcacaac

SEQ ID NO: 4543344 - DNA, 25 bp, Homo sapien
ccagtttacagaatgaattcacatc

SEQ ID NO: 4543345 - DNA, 25 bp, Homo sapien
caatagttcgcagaaacaggcactg

SEQ ID NO: 4543346 - DNA, 25 bp, Homo sapien
tattaccctatttgcccctctcaat

SEQ ID NO: 4543347 - DNA, 25 bp, Homo sapien
tggtgtcttgccgtgtttcatgtaa

SEQ ID NO: 4543348 - DNA, 25 bp, Homo sapien
tgtgtggcgggaggtaacacaaggg

SEQ ID NO: 4543349 - DNA, 25 bp, Homo sapien
tatgttcggcccagcgctcttcgca

SEQ ID NO: 4543350 - DNA, 25 bp, Homo sapien
caaaagatggaagaaggcccgggca

SEQ ID NO: 4543351 - DNA, 25 bp, Homo sapien
ggccgtggtgagtctccagtatgtt

SEQ ID NO: 4543352 - DNA, 25 bp, Homo sapien
ttatcctcggcgacccactgcacaa

SEQ ID NO: 4543353 - DNA, 25 bp, Homo sapien
gccgctctcccagacttaaaatgta

SEQ ID NO: 4543354 - DNA, 25 bp, Homo sapien
gagagggggctcacctcttatcctc

SEQ ID NO: 4543355 - DNA, 25 bp, Homo sapien
acccactgcacaagcaggccgctct

SEQ ID NO: 4543356 - DNA, 25 bp, Homo sapien
tcggacatccgcaggcaccagggaa

SEQ ID NO: 4543357 - DNA, 25 bp, Homo sapien
acatcgcaggccgggaagcagtgcc

SEQ ID NO: 4543358 - DNA, 25 bp, Homo sapien
cttccccgccttgggacatcgcagg

SEQ ID NO: 4543359 - DNA, 25 bp, Homo sapien
ggcactgagcgctgctggcgcgagg

SEQ ID NO: 4543360 - DNA, 25 bp, Homo sapien
atcttgaagaggcaaggcagcacgg

SEQ ID NO: 4543361 - DNA, 25 bp, Homo sapien
acaggctttatggacaggcccagca

SEQ ID NO: 4543362 - DNA, 25 bp, Homo sapien
tctccgcagtgctgtgaaacctgat

SEQ ID NO: 4543363 - DNA, 25 bp, Homo sapien
taattttcatggcttctccgcgccg

SEQ ID NO: 4543364 - DNA, 25 bp, Homo sapien
ggatctttggggtgtgcctccttac

SEQ ID NO: 4543365 - DNA, 25 bp, Homo sapien
agtatgccttggtggaggaagcctc

SEQ ID NO: 4543366 - DNA, 25 bp, Homo sapien
gtatgccttggtggaggaagcctct

SEQ ID NO: 4543367 - DNA, 25 bp, Homo sapien
tgccttggtggaggaagcctctgac

SEQ ID NO: 4543368 - DNA, 25 bp, Homo sapien
tatgccttggtggaggaagcctctg

SEQ ID NO: 4543369 - DNA, 25 bp, Homo sapien
ggactgtcagccatggaccggtagc

SEQ ID NO: 4543370 - DNA, 25 bp, Homo sapien
tgcatcctgtgggccaccgccatag

SEQ ID NO: 4543371 - DNA, 25 bp, Homo sapien
ttcatccacactctggttgaagaaa

SEQ ID NO: 4543372 - DNA, 25 bp, Homo sapien
agcgggggctcaggagtccaccttc

SEQ ID NO: 4543373 - DNA, 25 bp, Homo sapien
tagtgctagtaacacctgccgagga

SEQ ID NO: 4543374 - DNA, 25 bp, Homo sapien
caactctaagggaagcctagagccc

SEQ ID NO: 4543375 - DNA, 25 bp, Homo sapien
gagatgagggcaacaattgtcccac

SEQ ID NO: 4543376 - DNA, 25 bp, Homo sapien
ttcccctgggagtgtcagaacaact

SEQ ID NO: 4543377 - DNA, 25 bp, Homo sapien
gaagatacaagggagtgggcatctc

SEQ ID NO: 4543378 - DNA, 25 bp, Homo sapien
tagtgcttgtctttagggctgggtc

SEQ ID NO: 4543379 - DNA, 25 bp, Homo sapien
gagaggagaataagactgcaggaca

SEQ ID NO: 4543380 - DNA, 25 bp, Homo sapien
caatttagggatgtgtaaggcagga

SEQ ID NO: 4543381 - DNA, 25 bp, Homo sapien
tgatccagaaggcaggcccatggtg

SEQ ID NO: 4543382 - DNA, 25 bp, Homo sapien
gaagatgcccgtggccaatagcatg

SEQ ID NO: 4543383 - DNA, 25 bp, Homo sapien
caatagcatgtagccaccatatacc

SEQ ID NO: 4543384 - DNA, 25 bp, Homo sapien
gtgagtatgcagcacagaagcgccc

SEQ ID NO: 4543385 - DNA, 25 bp, Homo sapien
caggtacttctacctgctggtgaat

SEQ ID NO: 4543386 - DNA, 25 bp, Homo sapien
ttggatgggcccaggcggaggttca

SEQ ID NO: 4543387 - DNA, 25 bp, Homo sapien
ggacccaagagtgacccaaagatat

SEQ ID NO: 4543388 - DNA, 25 bp, Homo sapien
caggacccagtgaggactggcccag

SEQ ID NO: 4543389 - DNA, 25 bp, Homo sapien
gcctccaccccgtctccttcccatc

SEQ ID NO: 4543390 - DNA, 25 bp, Homo sapien
tcctgaatctaggctaccagggcct

SEQ ID NO: 4543391 - DNA, 25 bp, Homo sapien
ctgaatctaggctaccagggcctcc

SEQ ID NO: 4543392 - DNA, 25 bp, Homo sapien
tgttcctgaatctaggctaccaggg

SEQ ID NO: 4543393 - DNA, 25 bp, Homo sapien
tagttctcacccaggcgccaggtga

SEQ ID NO: 4543394 - DNA, 25 bp, Homo sapien
tagcatggctgaggtgtagtgtccc

SEQ ID NO: 4543395 - DNA, 25 bp, Homo sapien
taggtacaacacagggtctggcagc

SEQ ID NO: 4543396 - DNA, 25 bp, Homo sapien
gcggtactggcggtataggccacat

SEQ ID NO: 4543397 - DNA, 25 bp, Homo sapien
gctgatccactcagaactgaaggcc

SEQ ID NO: 4543398 - DNA, 25 bp, Homo sapien
gatgtgttggtgctgacctggccca

SEQ ID NO: 4543399 - DNA, 25 bp, Homo sapien
gagtgtgatgttgactccacccagc

SEQ ID NO: 4543400 - DNA, 25 bp, Homo sapien
tggcccacagaccactcagaactga

SEQ ID NO: 4543401 - DNA, 25 bp, Homo sapien
agttggacatatgggaactcagaga

SEQ ID NO: 4543402 - DNA, 25 bp, Homo sapien
tgaataagctggtcaccacccgaag

SEQ ID NO: 4543403 - DNA, 25 bp, Homo sapien
gattgcagccccgatgaataagctg

SEQ ID NO: 4543404 - DNA, 25 bp, Homo sapien
tggtcaccacccgaagcagccagaa

SEQ ID NO: 4543405 - DNA, 25 bp, Homo sapien
gccccgatgaataagctggtcacca

SEQ ID NO: 4543406 - DNA, 25 bp, Homo sapien
cagtcagaaagatcatgatgatgct

SEQ ID NO: 4543407 - DNA, 25 bp, Homo sapien
gatgatgctggccaaagtggtgtcc

SEQ ID NO: 4543408 - DNA, 25 bp, Homo sapien
gacgatgaacgtggccagtgcagtc

SEQ ID NO: 4543409 - DNA, 25 bp, Homo sapien
caggatgacgatgaacgtggccagt

SEQ ID NO: 4543410 - DNA, 25 bp, Homo sapien
gaaggggaatgtgtgtcccaaagta

SEQ ID NO: 4543411 - DNA, 25 bp, Homo sapien
aggggaatgtgtgtcccaaagtagc

SEQ ID NO: 4543412 - DNA, 25 bp, Homo sapien
aaggggaatgtgtgtcccaaagtag

SEQ ID NO: 4543413 - DNA, 25 bp, Homo sapien
tggtgaggtggtgcagggggggcaa

SEQ ID NO: 4543414 - DNA, 25 bp, Homo sapien
cttggtgaggtggtgcagggggggc

SEQ ID NO: 4543415 - DNA, 25 bp, Homo sapien
ttggtgaggtggtgcagggggggca

SEQ ID NO: 4543416 - DNA, 25 bp, Homo sapien
ttacttgacctttacagacatccag

SEQ ID NO: 4543417 - DNA, 25 bp, Homo sapien
tgacctttacagacatccagtttta

SEQ ID NO: 4543418 - DNA, 25 bp, Homo sapien
agttacttgacctttacagacatcc

SEQ ID NO: 4543419 - DNA, 25 bp, Homo sapien
cttgacctttacagacatccagttt

SEQ ID NO: 4543420 - DNA, 25 bp, Homo sapien
ctttagggtcctcctttctcacctg

SEQ ID NO: 4543421 - DNA, 25 bp, Homo sapien
ttagggtcctcctttctcacctggc

SEQ ID NO: 4543422 - DNA, 25 bp, Homo sapien
cacactttagggtcctcctttctca

SEQ ID NO: 4543423 - DNA, 25 bp, Homo sapien
ctctctttgaagaactcccacttga

SEQ ID NO: 4543424 - DNA, 25 bp, Homo sapien
cacttgatccgaacttggtctggat

SEQ ID NO: 4543425 - DNA, 25 bp, Homo sapien
aactcccacttgatccgaacttggt

SEQ ID NO: 4543426 - DNA, 25 bp, Homo sapien
cccacttgatccgaacttggtctgg

SEQ ID NO: 4543427 - DNA, 25 bp, Homo sapien
caaacagtgcgtgtgtggcagcctg

SEQ ID NO: 4543428 - DNA, 25 bp, Homo sapien
cgtggaacctcacacgaagcgcccc

SEQ ID NO: 4543429 - DNA, 25 bp, Homo sapien
cccctcttccaaacagtgcgtgtgt

SEQ ID NO: 4543430 - DNA, 25 bp, Homo sapien
tgtgattaaagagggaaccaggtcc

SEQ ID NO: 4543431 - DNA, 25 bp, Homo sapien
ctgtgaacaaacgcgcgcccttact

SEQ ID NO: 4543432 - DNA, 25 bp, Homo sapien
ccactcctctcctaactcacgtaag

SEQ ID NO: 4543433 - DNA, 25 bp, Homo sapien
actcctctcctaactcacgtaagga

SEQ ID NO: 4543434 - DNA, 25 bp, Homo sapien
aacgcgcgcccttactctcagtggg

SEQ ID NO: 4543435 - DNA, 25 bp, Homo sapien
aacttctcagactgcacccgaggct

SEQ ID NO: 4543436 - DNA, 25 bp, Homo sapien
ctgcacccgaggctctgcggcgccg

SEQ ID NO: 4543437 - DNA, 25 bp, Homo sapien
gggtctggggtgcttccagtcactc

SEQ ID NO: 4543438 - DNA, 25 bp, Homo sapien
gtcactcttcaagtcactcccaaac

SEQ ID NO: 4543439 - DNA, 25 bp, Homo sapien
tttaggtcggatgggtgacttgctt

SEQ ID NO: 4543440 - DNA, 25 bp, Homo sapien
gatccccggagggagacgtgactcc

SEQ ID NO: 4543441 - DNA, 25 bp, Homo sapien
gacttgctttgacgcctggcctggt

SEQ ID NO: 4543442 - DNA, 25 bp, Homo sapien
aagacctcacgaggatccccggagg

SEQ ID NO: 4543443 - DNA, 25 bp, Homo sapien
ccgtccacacaaccgcactagccgg

SEQ ID NO: 4543444 - DNA, 25 bp, Homo sapien
acaaccgcactagccgggccttcgg

SEQ ID NO: 4543445 - DNA, 25 bp, Homo sapien
cttcggcaccgacggaacatctcta

SEQ ID NO: 4543446 - DNA, 25 bp, Homo sapien
tagccgggccttcggcaccgacgga

SEQ ID NO: 4543447 - DNA, 25 bp, Homo sapien
gcgccccgggagccctcgccgtctc

SEQ ID NO: 4543448 - DNA, 25 bp, Homo sapien
ctgcgccccgggagccctcgccgtc

SEQ ID NO: 4543449 - DNA, 25 bp, Homo sapien
cgccccgggagccctcgccgtctca

SEQ ID NO: 4543450 - DNA, 25 bp, Homo sapien
tgcgccccgggagccctcgccgtct

SEQ ID NO: 4543451 - DNA, 25 bp, Homo sapien
tccgcgcctccccaggcgccagact

SEQ ID NO: 4543452 - DNA, 25 bp, Homo sapien
gcgcgctgccgtccgctggaagcac

SEQ ID NO: 4543453 - DNA, 25 bp, Homo sapien
tgccgtccgctggaagcacctccgc

SEQ ID NO: 4543454 - DNA, 25 bp, Homo sapien
gtccgctggaagcacctccgcgcct

SEQ ID NO: 4543455 - DNA, 25 bp, Homo sapien
actctcccggagcaatgacactgtg

SEQ ID NO: 4543456 - DNA, 25 bp, Homo sapien
tatagacctctgtcaggcagcactg

SEQ ID NO: 4543457 - DNA, 25 bp, Homo sapien
ggatgaagattaccagaccagcaag

SEQ ID NO: 4543458 - DNA, 25 bp, Homo sapien
caagagacaagcacctaatgggagg

SEQ ID NO: 4543459 - DNA, 25 bp, Homo sapien
cacagccgcacaaattggtcaagga

SEQ ID NO: 4543460 - DNA, 25 bp, Homo sapien
cagccgcacaaattggtcaaggatg

SEQ ID NO: 4543461 - DNA, 25 bp, Homo sapien
acagccgcacaaattggtcaaggat

SEQ ID NO: 4543462 - DNA, 25 bp, Homo sapien
ccacagccgcacaaattggtcaagg

SEQ ID NO: 4543463 - DNA, 25 bp, Homo sapien
catcgtccttgaacaatttgtgcgg

SEQ ID NO: 4543464 - DNA, 25 bp, Homo sapien
aggacttatcctggctagagctgct

SEQ ID NO: 4543465 - DNA, 25 bp, Homo sapien
cagctgaatgtgtgagagggttccc

SEQ ID NO: 4543466 - DNA, 25 bp, Homo sapien
gagggttcccataaatggagttcac

SEQ ID NO: 4543467 - DNA, 25 bp, Homo sapien
agactgtctccctgttacagcccta

SEQ ID NO: 4543468 - DNA, 25 bp, Homo sapien
ttgccactatatctcctggctgagt

SEQ ID NO: 4543469 - DNA, 25 bp, Homo sapien
tgccaaagccccctgtgcgtggtgc

SEQ ID NO: 4543470 - DNA, 25 bp, Homo sapien
aaatggtgattggaactctgcttcc

SEQ ID NO: 4543471 - DNA, 25 bp, Homo sapien
catcgcctcattgcctccaccgcca

SEQ ID NO: 4543472 - DNA, 25 bp, Homo sapien
atcgcctcattgcctccaccgccat

SEQ ID NO: 4543473 - DNA, 25 bp, Homo sapien
ccatcgcctcattgcctccaccgcc

SEQ ID NO: 4543474 - DNA, 25 bp, Homo sapien
aaatctcagaagacaagctgacctg

SEQ ID NO: 4543475 - DNA, 25 bp, Homo sapien
tcctgcaacaggtccggaagatcgg

SEQ ID NO: 4543476 - DNA, 25 bp, Homo sapien
ccagttgagcagaggtttgagccca

SEQ ID NO: 4543477 - DNA, 25 bp, Homo sapien
gttccaggtggccatagtcagtcac

SEQ ID NO: 4543478 - DNA, 25 bp, Homo sapien
tgtcagccactagtgtgaggcctgg

SEQ ID NO: 4543479 - DNA, 25 bp, Homo sapien
tggcttgttaccaggacctcagtca

SEQ ID NO: 4543480 - DNA, 25 bp, Homo sapien
tatgtatgcaatgctcctcagccct

SEQ ID NO: 4543481 - DNA, 25 bp, Homo sapien
ctttattctgccctaggaccggaag

SEQ ID NO: 4543482 - DNA, 25 bp, Homo sapien
tctgccctaaggtcggaaaggagcc

SEQ ID NO: 4543483 - DNA, 25 bp, Homo sapien
gctgggtacaggtctatcacagtgc

SEQ ID NO: 4543484 - DNA, 25 bp, Homo sapien
cgaattctgcactacctcgcacgga

SEQ ID NO: 4543485 - DNA, 25 bp, Homo sapien
tttgaaagatcacgtccctggcaag

SEQ ID NO: 4543486 - DNA, 25 bp, Homo sapien
tcccttaatgggtagcttgcggctg

SEQ ID NO: 4543487 - DNA, 25 bp, Homo sapien
tagagcagggacatgtgttcggctc

SEQ ID NO: 4543488 - DNA, 25 bp, Homo sapien
tgcacaatttcagggacgctgctga

SEQ ID NO: 4543489 - DNA, 25 bp, Homo sapien
ttggttcgggacagcttcatgtgca

SEQ ID NO: 4543490 - DNA, 25 bp, Homo sapien
gattttacaattcagactcctagag

SEQ ID NO: 4543491 - DNA, 25 bp, Homo sapien
tagaaatggtatacaggctgcttgg

SEQ ID NO: 4543492 - DNA, 25 bp, Homo sapien
cttggtatgctccatgaactttata

SEQ ID NO: 4543493 - DNA, 25 bp, Homo sapien
aaagagatctatcttgcaggggagt

SEQ ID NO: 4543494 - DNA, 25 bp, Homo sapien
gccaggccacacaactagaacagaa

SEQ ID NO: 4543495 - DNA, 25 bp, Homo sapien
caggttacctgactatagtccggca

SEQ ID NO: 4543496 - DNA, 25 bp, Homo sapien
tagaaagtggtgcaggtgtcctact

SEQ ID NO: 4543497 - DNA, 25 bp, Homo sapien
caaatatgtcttgtttagcagcccc

SEQ ID NO: 4543498 - DNA, 25 bp, Homo sapien
gagggagaagtcattcttgctggtc

SEQ ID NO: 4543499 - DNA, 25 bp, Homo sapien
agagggagaagtcattcttgctggt

SEQ ID NO: 4543500 - DNA, 25 bp, Homo sapien
agggagagggagaagtcattcttgc

SEQ ID NO: 4543501 - DNA, 25 bp, Homo sapien
ggagagggagaagtcattcttgctg

SEQ ID NO: 4543502 - DNA, 25 bp, Homo sapien
tgcacagccggagcaggttctcggc

SEQ ID NO: 4543503 - DNA, 25 bp, Homo sapien
ggttctcggcgtcggttcggctgat

SEQ ID NO: 4543504 - DNA, 25 bp, Homo sapien
ggttcggctgatggccccgtgatac

SEQ ID NO: 4543505 - DNA, 25 bp, Homo sapien
cctctttgcacagccggagcaggtt

SEQ ID NO: 4543506 - DNA, 25 bp, Homo sapien
gctgtccaggcccacccattgtggg

SEQ ID NO: 4543507 - DNA, 25 bp, Homo sapien
tccaggcccacccattgtgggtgtc

SEQ ID NO: 4543508 - DNA, 25 bp, Homo sapien
ggcatctctgctgggtccctcgctg

SEQ ID NO: 4543509 - DNA, 25 bp, Homo sapien
cctcgctgtccaggcccacccattg

SEQ ID NO: 4543510 - DNA, 25 bp, Homo sapien
gggagggagtccccagctggacaca

SEQ ID NO: 4543511 - DNA, 25 bp, Homo sapien
ggagtggggagggagtccccagctg

SEQ ID NO: 4543512 - DNA, 25 bp, Homo sapien
tggggagggagtccccagctggaca

SEQ ID NO: 4543513 - DNA, 25 bp, Homo sapien
gagggagtccccagctggacacaga

SEQ ID NO: 4543514 - DNA, 25 bp, Homo sapien
gggctccatgcttaggggtttggct

SEQ ID NO: 4543515 - DNA, 25 bp, Homo sapien
ccatgcttaggggtttggctgactt

SEQ ID NO: 4543516 - DNA, 25 bp, Homo sapien
tccatgcttaggggtttggctgact

SEQ ID NO: 4543517 - DNA, 25 bp, Homo sapien
gctccatgcttaggggtttggctga

SEQ ID NO: 4543518 - DNA, 25 bp, Homo sapien
aggcagctcttctccggtccttcaa

SEQ ID NO: 4543519 - DNA, 25 bp, Homo sapien
gctcttctccggtccttcaaactgg

SEQ ID NO: 4543520 - DNA, 25 bp, Homo sapien
ctcttctccggtccttcaaactggg

SEQ ID NO: 4543521 - DNA, 25 bp, Homo sapien
cagctcttctccggtccttcaaact

SEQ ID NO: 4543522 - DNA, 25 bp, Homo sapien
tatcaatcatggactctaaggaccc

SEQ ID NO: 4543523 - DNA, 25 bp, Homo sapien
gggtgttgcagtccccacattgtgg

SEQ ID NO: 4543524 - DNA, 25 bp, Homo sapien
gaggagcaacctgagaaaccatgca

SEQ ID NO: 4543525 - DNA, 25 bp, Homo sapien
aatcctggatctatcccctggtggg

SEQ ID NO: 4543526 - DNA, 25 bp, Homo sapien
ctgtccagctgtcccacaggtggag

SEQ ID NO: 4543527 - DNA, 25 bp, Homo sapien
gaggccaaggtaggtctttgatgac

SEQ ID NO: 4543528 - DNA, 25 bp, Homo sapien
gctggaccggagatgtccctgtccc

SEQ ID NO: 4543529 - DNA, 25 bp, Homo sapien
ggcgaggctggaccggagatgtccc

SEQ ID NO: 4543530 - DNA, 25 bp, Homo sapien
cctgagaagagtgatgccactggcg

SEQ ID NO: 4543531 - DNA, 25 bp, Homo sapien
taacgaggtttcctaatgacgagca

SEQ ID NO: 4543532 - DNA, 25 bp, Homo sapien
taaacggcccatcctcaatggtgtg

SEQ ID NO: 4543533 - DNA, 25 bp, Homo sapien
cggctgctggactgctaacgaggtt

SEQ ID NO: 4543534 - DNA, 25 bp, Homo sapien
tagtctaagcctcttagcttccaag

SEQ ID NO: 4543535 - DNA, 25 bp, Homo sapien
aatatacccagtccccaaaagagag

SEQ ID NO: 4543536 - DNA, 25 bp, Homo sapien
cagaactcaactacatttccctgga

SEQ ID NO: 4543537 - DNA, 25 bp, Homo sapien
aaagagagaagtagtctaagcctct

SEQ ID NO: 4543538 - DNA, 25 bp, Homo sapien
tcatcatcctctggcaggcgggact

SEQ ID NO: 4543539 - DNA, 25 bp, Homo sapien
atagggtgtgtcatacagaggcaag

SEQ ID NO: 4543540 - DNA, 25 bp, Homo sapien
catacagaggcaagggctgagttgc

SEQ ID NO: 4543541 - DNA, 25 bp, Homo sapien
ggctttggaaatccgctccttcttc

SEQ ID NO: 4543542 - DNA, 25 bp, Homo sapien
ggccctccttcattcttcaaatccc

SEQ ID NO: 4543543 - DNA, 25 bp, Homo sapien
ctgttctttgccaatacccagtgac

SEQ ID NO: 4543544 - DNA, 25 bp, Homo sapien
tccttcattcttcaaatcccatctg

SEQ ID NO: 4543545 - DNA, 25 bp, Homo sapien
catctgttctttgccaatacccagt

SEQ ID NO: 4543546 - DNA, 25 bp, Homo sapien
tcaccctcatctttccgtatataga

SEQ ID NO: 4543547 - DNA, 25 bp, Homo sapien
tactgctagggtgaacctccattct

SEQ ID NO: 4543548 - DNA, 25 bp, Homo sapien
ggaataatagtcctgggatattctt

SEQ ID NO: 4543549 - DNA, 25 bp, Homo sapien
gggatattcttgaccactctctgcc

SEQ ID NO: 4543550 - DNA, 25 bp, Homo sapien
tattggtcagtgaatgcacactctc

SEQ ID NO: 4543551 - DNA, 25 bp, Homo sapien
tttattgtattggtcagtgaatgca

SEQ ID NO: 4543552 - DNA, 25 bp, Homo sapien
gcagtttattgtattggtcagtgaa

SEQ ID NO: 4543553 - DNA, 25 bp, Homo sapien
tgtattggtcagtgaatgcacactc

SEQ ID NO: 4543554 - DNA, 25 bp, Homo sapien
ggcaatgaccatcctccctaaggac

SEQ ID NO: 4543555 - DNA, 25 bp, Homo sapien
gaatcagtccttagacttgtgagtc

SEQ ID NO: 4543556 - DNA, 25 bp, Homo sapien
agacttgtgagtcgcaaagcctgtt

SEQ ID NO: 4543557 - DNA, 25 bp, Homo sapien
ttccagggaccaaagaatcagtcct

SEQ ID NO: 4543558 - DNA, 25 bp, Homo sapien
catcatcttttgagcctcatagggc

SEQ ID NO: 4543559 - DNA, 25 bp, Homo sapien
gccatcatcttttgagcctcatagg

SEQ ID NO: 4543560 - DNA, 25 bp, Homo sapien
ggccatcatcttttgagcctcatag

SEQ ID NO: 4543561 - DNA, 25 bp, Homo sapien
catcttttgagcctcatagggctcc

SEQ ID NO: 4543562 - DNA, 25 bp, Homo sapien
tgagccttcgccagtctcctgaaca

SEQ ID NO: 4543563 - DNA, 25 bp, Homo sapien
gtctcctgaacatcaaacgggtccg

SEQ ID NO: 4543564 - DNA, 25 bp, Homo sapien
ggtccgcatagtcttctaggatagc

SEQ ID NO: 4543565 - DNA, 25 bp, Homo sapien
catcaaacgggtccgcatagtcttc

SEQ ID NO: 4543566 - DNA, 25 bp, Homo sapien
aacacgttatccataaaccttgcga

SEQ ID NO: 4543567 - DNA, 25 bp, Homo sapien
taaaccttgcgatggctctccagtg

SEQ ID NO: 4543568 - DNA, 25 bp, Homo sapien
gattctgtcagtcggcagccagcat

SEQ ID NO: 4543569 - DNA, 25 bp, Homo sapien
ttaacagtgtctgactcaaccaaca

SEQ ID NO: 4543570 - DNA, 25 bp, Homo sapien
ttcaccttgacctctaatggctgca

SEQ ID NO: 4543571 - DNA, 25 bp, Homo sapien
cccattcaccttgacctctaatggc

SEQ ID NO: 4543572 - DNA, 25 bp, Homo sapien
gatcaggctctcagcagatctacat

SEQ ID NO: 4543573 - DNA, 25 bp, Homo sapien
cattcaccttgacctctaatggctg

SEQ ID NO: 4543574 - DNA, 25 bp, Homo sapien
ctcgagatcaaactttttataccca

SEQ ID NO: 4543575 - DNA, 25 bp, Homo sapien
cttcctcgagatcaaactttttata

SEQ ID NO: 4543576 - DNA, 25 bp, Homo sapien
tcctcgagatcaaactttttatacc

SEQ ID NO: 4543577 - DNA, 25 bp, Homo sapien
tcgagatcaaactttttatacccat

SEQ ID NO: 4543578 - DNA, 25 bp, Homo sapien
tagcaaccctcataagacccttggg

SEQ ID NO: 4543579 - DNA, 25 bp, Homo sapien
gacatgcagtagatcctagcaaccc

SEQ ID NO: 4543580 - DNA, 25 bp, Homo sapien
taaactcagtacagaacacacccct

SEQ ID NO: 4543581 - DNA, 25 bp, Homo sapien
gggtccaggcattgggctcactcta

SEQ ID NO: 4543582 - DNA, 25 bp, Homo sapien
gccatcctcaaagcagcaacggcag

SEQ ID NO: 4543583 - DNA, 25 bp, Homo sapien
actgggtagagtggacaggcctgcc

SEQ ID NO: 4543584 - DNA, 25 bp, Homo sapien
tcactcactggccaaggtaagaagc

SEQ ID NO: 4543585 - DNA, 25 bp, Homo sapien
cagagctgagttgtcattgagtcac

SEQ ID NO: 4543586 - DNA, 25 bp, Homo sapien
tgctctctctaaatggtgggaggcc

SEQ ID NO: 4543587 - DNA, 25 bp, Homo sapien
gggaagactcagaccccaaactctg

SEQ ID NO: 4543588 - DNA, 25 bp, Homo sapien
caaactctgctcctaaaggggtggg

SEQ ID NO: 4543589 - DNA, 25 bp, Homo sapien
tgagcttttcctaggggaagactca

SEQ ID NO: 4543590 - DNA, 25 bp, Homo sapien
gcccccttggcaagagctgtaagct

SEQ ID NO: 4543591 - DNA, 25 bp, Homo sapien
agctgcctgtcttcgcctcctgaga

SEQ ID NO: 4543592 - DNA, 25 bp, Homo sapien
gtcttcgcctcctgagaacaacagc

SEQ ID NO: 4543593 - DNA, 25 bp, Homo sapien
tggaccccacgaagcccccttggca

SEQ ID NO: 4543594 - DNA, 25 bp, Homo sapien
gggtcttcgaagtcgcgctcccgct

SEQ ID NO: 4543595 - DNA, 25 bp, Homo sapien
tcccgctgcagcctgtaggcggcca

SEQ ID NO: 4543596 - DNA, 25 bp, Homo sapien
gagatccgctcatcagcaggcggcg

SEQ ID NO: 4543597 - DNA, 25 bp, Homo sapien
tctcgacccgaataaggcggtgtgg

SEQ ID NO: 4543598 - DNA, 25 bp, Homo sapien
gcggcgcggggggcgcggccggaga

SEQ ID NO: 4543599 - DNA, 25 bp, Homo sapien
cggcgcggggggcgcggccggagag

SEQ ID NO: 4543600 - DNA, 25 bp, Homo sapien
ggggggcgcggccggagagggcgca

SEQ ID NO: 4543601 - DNA, 25 bp, Homo sapien
gggcgcggccggagagggcgcaggg

SEQ ID NO: 4543602 - DNA, 25 bp, Homo sapien
cccagcgctcccctgcgttcgcggc

SEQ ID NO: 4543603 - DNA, 25 bp, Homo sapien
ccacttggctactccgccgctgccg

SEQ ID NO: 4543604 - DNA, 25 bp, Homo sapien
cgccggcttgctgccccctccgccg

SEQ ID NO: 4543605 - DNA, 25 bp, Homo sapien
cccgcggaagcccaggtgctcccgg

SEQ ID NO: 4543606 - DNA, 25 bp, Homo sapien
gaatcctttacgtgtcgccacgcgg

SEQ ID NO: 4543607 - DNA, 25 bp, Homo sapien
ggcttccagccggtatgcacaggca

SEQ ID NO: 4543608 - DNA, 25 bp, Homo sapien
tcccgtagctcggaagagtgtacgc

SEQ ID NO: 4543609 - DNA, 25 bp, Homo sapien
cagaggatgcgactactggactgag

SEQ ID NO: 4543610 - DNA, 25 bp, Homo sapien
gttacttcccgatccaggcaaacac

SEQ ID NO: 4543611 - DNA, 25 bp, Homo sapien
gtgtcgttttcacacacgcccttct

SEQ ID NO: 4543612 - DNA, 25 bp, Homo sapien
ggagcacctgctccaaacgggccca

SEQ ID NO: 4543613 - DNA, 25 bp, Homo sapien
aacaactccctagagacgcccactt

SEQ ID NO: 4543614 - DNA, 25 bp, Homo sapien
tgcgcacgcacgcagaaatcccttc

SEQ ID NO: 4543615 - DNA, 25 bp, Homo sapien
catgcgcacgcacgcagaaatccct

SEQ ID NO: 4543616 - DNA, 25 bp, Homo sapien
gcacgcacgcagaaatcccttccag

SEQ ID NO: 4543617 - DNA, 25 bp, Homo sapien
gcacgcagaaatcccttccagccac

SEQ ID NO: 4543618 - DNA, 25 bp, Homo sapien
ccaattgtcatgtaggatgtcccac

SEQ ID NO: 4543619 - DNA, 25 bp, Homo sapien
tctagtgcgttacaccagaaggccc

SEQ ID NO: 4543620 - DNA, 25 bp, Homo sapien
acttggttaagctggagtccaccgg

SEQ ID NO: 4543621 - DNA, 25 bp, Homo sapien
catttctgaaaggagcactacatag

SEQ ID NO: 4543622 - DNA, 25 bp, Homo sapien
agttttgctgtccaagtctggtcct

SEQ ID NO: 4543623 - DNA, 25 bp, Homo sapien
cttgtcttgggtccatctctgtcca

SEQ ID NO: 4543624 - DNA, 25 bp, Homo sapien
tgggtactgagtacagcatcttcac

SEQ ID NO: 4543625 - DNA, 25 bp, Homo sapien
tgtcctgaactctgattcttcctaa

SEQ ID NO: 4543626 - DNA, 25 bp, Homo sapien
gagccccttgccgtgccattgttcc

SEQ ID NO: 4543627 - DNA, 25 bp, Homo sapien
agccccttgccgtgccattgttccc

SEQ ID NO: 4543628 - DNA, 25 bp, Homo sapien
gccccttgccgtgccattgttccca

SEQ ID NO: 4543629 - DNA, 25 bp, Homo sapien
ttcgaaccgaggttgctgcggccac

SEQ ID NO: 4543630 - DNA, 25 bp, Homo sapien
tgactcggattcgaaccgaggttgc

SEQ ID NO: 4543631 - DNA, 25 bp, Homo sapien
tgccgtgactcggattcgaaccgag

SEQ ID NO: 4543632 - DNA, 25 bp, Homo sapien
ctcggattcgaaccgaggttgctgc

SEQ ID NO: 4543633 - DNA, 25 bp, Homo sapien
gcgcgtcattaaatggcctacttac

SEQ ID NO: 4543634 - DNA, 25 bp, Homo sapien
taggccttcccagtttgcgcgtcat

SEQ ID NO: 4543635 - DNA, 25 bp, Homo sapien
cagtttgcgcgtcattaaatggcct

SEQ ID NO: 4543636 - DNA, 25 bp, Homo sapien
ccttcccagtttgcgcgtcattaaa

SEQ ID NO: 4543637 - DNA, 25 bp, Homo sapien
cagcctgtccctgagtctgataatg

SEQ ID NO: 4543638 - DNA, 25 bp, Homo sapien
tctgttttggcccattagccacggg

SEQ ID NO: 4543639 - DNA, 25 bp, Homo sapien
aggcgcgttgtactccgccagttgc

SEQ ID NO: 4543640 - DNA, 25 bp, Homo sapien
cctgagtctgataatgcgcaggcgc

SEQ ID NO: 4543641 - DNA, 25 bp, Homo sapien
atgcccgtttcctatgccccggaga

SEQ ID NO: 4543642 - DNA, 25 bp, Homo sapien
tgggcggaactcagactacccttgg

SEQ ID NO: 4543643 - DNA, 25 bp, Homo sapien
tgcatcctccagcggtgacccaatg

SEQ ID NO: 4543644 - DNA, 25 bp, Homo sapien
tgatgatgagatgggctcccggtga

SEQ ID NO: 4543645 - DNA, 25 bp, Homo sapien
ccgggccgagtacacagcaggcagt

SEQ ID NO: 4543646 - DNA, 25 bp, Homo sapien
agcaggcagtggctatttgctaaaa

SEQ ID NO: 4543647 - DNA, 25 bp, Homo sapien
gccgcagcagggactaagtccgatt

SEQ ID NO: 4543648 - DNA, 25 bp, Homo sapien
ttattgtccatcagtgctctcgccc

SEQ ID NO: 4543649 - DNA, 25 bp, Homo sapien
tccccttgccgtgccattgtcctca

SEQ ID NO: 4543650 - DNA, 25 bp, Homo sapien
aaacaaactccccttgccgtgccat

SEQ ID NO: 4543651 - DNA, 25 bp, Homo sapien
tcaggattaaaaacggattggtaca

SEQ ID NO: 4543652 - DNA, 25 bp, Homo sapien
aaactccccttgccgtgccattgtc

SEQ ID NO: 4543653 - DNA, 25 bp, Homo sapien
ttcgaaccgaggttgctgcggccac

SEQ ID NO: 4543654 - DNA, 25 bp, Homo sapien
tgactcggattcgaaccgaggttgc

SEQ ID NO: 4543655 - DNA, 25 bp, Homo sapien
tgccgtgactcggattcgaaccgag

SEQ ID NO: 4543656 - DNA, 25 bp, Homo sapien
ctcggattcgaaccgaggttgctgc

SEQ ID NO: 4543657 - DNA, 25 bp, Homo sapien
ccgcccccttgcaatgtcattgatt

SEQ ID NO: 4543658 - DNA, 25 bp, Homo sapien
gcctgaactcttctctgttgaaagc

SEQ ID NO: 4543659 - DNA, 25 bp, Homo sapien
cattgtttgttctagcctatctcca

SEQ ID NO: 4543660 - DNA, 25 bp, Homo sapien
ggacacaggacctcggcttgtcgcc

SEQ ID NO: 4543661 - DNA, 25 bp, Homo sapien
tcgcgcctcaaggaagttgtatggt

SEQ ID NO: 4543662 - DNA, 25 bp, Homo sapien
tcagatagcatgatagtcagggcat

SEQ ID NO: 4543663 - DNA, 25 bp, Homo sapien
cccagccaaagtcgttcagatagca

SEQ ID NO: 4543664 - DNA, 25 bp, Homo sapien
cgtcagagagactttgggccaccat

SEQ ID NO: 4543665 - DNA, 25 bp, Homo sapien
tcaggggcttcacatcattgcaggc

SEQ ID NO: 4543666 - DNA, 25 bp, Homo sapien
cccggcctcataggaatcctttggt

SEQ ID NO: 4543667 - DNA, 25 bp, Homo sapien
caggcccggcctcataggaatcctt

SEQ ID NO: 4543668 - DNA, 25 bp, Homo sapien
ggcttcacatcattgcaggcccggc

SEQ ID NO: 4543669 - DNA, 25 bp, Homo sapien
gaggaacctggtagataatggacgc

SEQ ID NO: 4543670 - DNA, 25 bp, Homo sapien
gcttaggaaagctggaatggccgcc

SEQ ID NO: 4543671 - DNA, 25 bp, Homo sapien
gagacttcgggctagggagtccaca

SEQ ID NO: 4543672 - DNA, 25 bp, Homo sapien
ttttgcggtccgtgcgtacagccaa

SEQ ID NO: 4543673 - DNA, 25 bp, Homo sapien
agctgctcgtcgtggcgtcccggta

SEQ ID NO: 4543674 - DNA, 25 bp, Homo sapien
cgccgtgatcgtatagtggttagta

SEQ ID NO: 4543675 - DNA, 25 bp, Homo sapien
aacactgggtcagctgctcgtcgtg

SEQ ID NO: 4543676 - DNA, 25 bp, Homo sapien
tggcgtcccggtagctcgccgtgat

SEQ ID NO: 4543677 - DNA, 25 bp, Homo sapien
ttgagtcaggcctttttcctggagg

SEQ ID NO: 4543678 - DNA, 25 bp, Homo sapien
tcctggaggctggtgtttcttcaca

SEQ ID NO: 4543679 - DNA, 25 bp, Homo sapien
cagccttgttctccaaagtaataca

SEQ ID NO: 4543680 - DNA, 25 bp, Homo sapien
cattttgtggtaacattgctttggg

SEQ ID NO: 4543681 - DNA, 25 bp, Homo sapien
cttggctcgtacaaagccaagtgcc

SEQ ID NO: 4543682 - DNA, 25 bp, Homo sapien
gtacaaagccaagtgcccgcaaact

SEQ ID NO: 4543683 - DNA, 25 bp, Homo sapien
caagtgcccgcaaactggacggtgg

SEQ ID NO: 4543684 - DNA, 25 bp, Homo sapien
ccgcaaactggacggtggtaaagca

SEQ ID NO: 4543685 - DNA, 25 bp, Homo sapien
taccaaacaggccttgtgtcccatt

SEQ ID NO: 4543686 - DNA, 25 bp, Homo sapien
gggagaccatgagcaattaggcaat

SEQ ID NO: 4543687 - DNA, 25 bp, Homo sapien
taaccataaccatactgtctggcat

SEQ ID NO: 4543688 - DNA, 25 bp, Homo sapien
ggatgcctgcagctcaaaccattga

SEQ ID NO: 4543689 - DNA, 25 bp, Homo sapien
tcaaatctattacttccaagctcag

SEQ ID NO: 4543690 - DNA, 25 bp, Homo sapien
atgggctaagcctcgactcacggaa

SEQ ID NO: 4543691 - DNA, 25 bp, Homo sapien
acagtcaaatctattacttccaagc

SEQ ID NO: 4543692 - DNA, 25 bp, Homo sapien
ccaagctcagaaagcttagttgttg

SEQ ID NO: 4543693 - DNA, 25 bp, Homo sapien
tttgccaaggcttgtgctgtatcag

SEQ ID NO: 4543694 - DNA, 25 bp, Homo sapien
tgccaaggcttgtgctgtatcagca

SEQ ID NO: 4543695 - DNA, 25 bp, Homo sapien
agtatttcattgtcgttttctatct

SEQ ID NO: 4543696 - DNA, 25 bp, Homo sapien
gctgtatcagcatcaagtatttcat

SEQ ID NO: 4543697 - DNA, 25 bp, Homo sapien
aaagaaaaaactgtcaagtcagcca

SEQ ID NO: 4543698 - DNA, 25 bp, Homo sapien
gaaaagaaaaaactgtcaagtcagc

SEQ ID NO: 4543699 - DNA, 25 bp, Homo sapien
aagaaaaaactgtcaagtcagccat

SEQ ID NO: 4543700 - DNA, 25 bp, Homo sapien
cgaaaagaaaaaactgtcaagtcag

SEQ ID NO: 4543701 - DNA, 25 bp, Homo sapien
ctttatgatgagaccctgagaccaa

SEQ ID NO: 4543702 - DNA, 25 bp, Homo sapien
ctcctttatgatgagaccctgagac

SEQ ID NO: 4543703 - DNA, 25 bp, Homo sapien
accctgagaccaagacaggtcacaa

SEQ ID NO: 4543704 - DNA, 25 bp, Homo sapien
gacaggtcacaaaagaagattgtct

SEQ ID NO: 4543705 - DNA, 25 bp, Homo sapien
ttgggcaccattccctccttcactc

SEQ ID NO: 4543706 - DNA, 25 bp, Homo sapien
aggttgggcaccattccctccttca

SEQ ID NO: 4543707 - DNA, 25 bp, Homo sapien
ggttgggcaccattccctccttcac

SEQ ID NO: 4543708 - DNA, 25 bp, Homo sapien
ccttcactctggacagtgatttctc

SEQ ID NO: 4543709 - DNA, 25 bp, Homo sapien
tcttggctgggctccatggtgccat

SEQ ID NO: 4543710 - DNA, 25 bp, Homo sapien
cttctcactgatgcatcagcattct

SEQ ID NO: 4543711 - DNA, 25 bp, Homo sapien
agcattcttggctgggctccatggt

SEQ ID NO: 4543712 - DNA, 25 bp, Homo sapien
tctcactgatgcatcagcattcttg

SEQ ID NO: 4543713 - DNA, 25 bp, Homo sapien
ctgggtgtcctctccatgaagtggg

SEQ ID NO: 4543714 - DNA, 25 bp, Homo sapien
tacggaatgctttactctgcctgga

SEQ ID NO: 4543715 - DNA, 25 bp, Homo sapien
agatatcagtggatcctccaggcag

SEQ ID NO: 4543716 - DNA, 25 bp, Homo sapien
gcatgacaagcaaagcagagggtcc

SEQ ID NO: 4543717 - DNA, 25 bp, Homo sapien
gagcgattatactctcagggcataa

SEQ ID NO: 4543718 - DNA, 25 bp, Homo sapien
gcagtggtggtttccgtgaatgccc

SEQ ID NO: 4543719 - DNA, 25 bp, Homo sapien
catggctcatttacggtgtctgacg

SEQ ID NO: 4543720 - DNA, 25 bp, Homo sapien
cacccaatggtgttcagtggtatta

SEQ ID NO: 4543721 - DNA, 25 bp, Homo sapien
aatgggaccaactgattagaggtca

SEQ ID NO: 4543722 - DNA, 25 bp, Homo sapien
taaaaggaggtctaacacaactctg

SEQ ID NO: 4543723 - DNA, 25 bp, Homo sapien
tctaacacaactctgcaatgggacc

SEQ ID NO: 4543724 - DNA, 25 bp, Homo sapien
gccaacataaaaggaggtctaacac

SEQ ID NO: 4543725 - DNA, 25 bp, Homo sapien
ttggtccattatgtgcagggacata

SEQ ID NO: 4543726 - DNA, 25 bp, Homo sapien
tttggtccattatgtgcagggacat

SEQ ID NO: 4543727 - DNA, 25 bp, Homo sapien
agtataagtcccactgtgacatttg

SEQ ID NO: 4543728 - DNA, 25 bp, Homo sapien
tatatcaagatccagggaacactcg

SEQ ID NO: 4543729 - DNA, 25 bp, Homo sapien
catttgtacagggataggctgggcc

SEQ ID NO: 4543730 - DNA, 25 bp, Homo sapien
tgacattgattagaccagtgttttc

SEQ ID NO: 4543731 - DNA, 25 bp, Homo sapien
cagctaggcgtgtgctttctttagc

SEQ ID NO: 4543732 - DNA, 25 bp, Homo sapien
ccatgctcagctaggcgtgtgcttt

SEQ ID NO: 4543733 - DNA, 25 bp, Homo sapien
tgccctcgagtgatactactgcctc

SEQ ID NO: 4543734 - DNA, 25 bp, Homo sapien
aaactcctgccctcgagtgatacta

SEQ ID NO: 4543735 - DNA, 25 bp, Homo sapien
gggcgccacctctgcataagtctta

SEQ ID NO: 4543736 - DNA, 25 bp, Homo sapien
ctgtattttacaggctacccagtgc

SEQ ID NO: 4543737 - DNA, 25 bp, Homo sapien
cagagacggctcttactgtatttta

SEQ ID NO: 4543738 - DNA, 25 bp, Homo sapien
ttttctagggcatgtctttccagca

SEQ ID NO: 4543739 - DNA, 25 bp, Homo sapien
cctgtagggtatttggctgctctca

SEQ ID NO: 4543740 - DNA, 25 bp, Homo sapien
tgtgcttgtaggaaaaagaagtaga

SEQ ID NO: 4543741 - DNA, 25 bp, Homo sapien
atgactgatcccaatgctctctgtg

SEQ ID NO: 4543742 - DNA, 25 bp, Homo sapien
tccatgactgatcccaatgctctct

SEQ ID NO: 4543743 - DNA, 25 bp, Homo sapien
gtattatcacaaccgctccacctta

SEQ ID NO: 4543744 - DNA, 25 bp, Homo sapien
ccccttcaggcagcttgtggtatta

SEQ ID NO: 4543745 - DNA, 25 bp, Homo sapien
tgttcagttaggaaaggatctaggg

SEQ ID NO: 4543746 - DNA, 25 bp, Homo sapien
cagaggtactggtgttttggaatct

SEQ ID NO: 4543747 - DNA, 25 bp, Homo sapien
aaaaaaacagtagctcttctggaat

SEQ ID NO: 4543748 - DNA, 25 bp, Homo sapien
gaaattaatttaccatatcattaaa

SEQ ID NO: 4543749 - DNA, 25 bp, Homo sapien
taaaaaaacagtagctcttctggaa

SEQ ID NO: 4543750 - DNA, 25 bp, Homo sapien
taatgaggagtaagaccaggggttg

SEQ ID NO: 4543751 - DNA, 25 bp, Homo sapien
cttaatgaggagtaagaccaggggt

SEQ ID NO: 4543752 - DNA, 25 bp, Homo sapien
gaggagtaagaccaggggttggcaa

SEQ ID NO: 4543753 - DNA, 25 bp, Homo sapien
atgaggagtaagaccaggggttggc

SEQ ID NO: 4543754 - DNA, 25 bp, Homo sapien
tgctcagctaacacagggttgggct

SEQ ID NO: 4543755 - DNA, 25 bp, Homo sapien
tctgctcagctaacacagggttggg

SEQ ID NO: 4543756 - DNA, 25 bp, Homo sapien
ctcagctaacacagggttgggcttc

SEQ ID NO: 4543757 - DNA, 25 bp, Homo sapien
actctgctcagctaacacagggttg

SEQ ID NO: 4543758 - DNA, 25 bp, Homo sapien
ggtgtttgatcctcattctggtttc

SEQ ID NO: 4543759 - DNA, 25 bp, Homo sapien
taggaatgtagggaatgtcctcgtc

SEQ ID NO: 4543760 - DNA, 25 bp, Homo sapien
tatcccctttcggaggctatgaagg

SEQ ID NO: 4543761 - DNA, 25 bp, Homo sapien
tcgtccaattcatatcccctttcgg

SEQ ID NO: 4543762 - DNA, 25 bp, Homo sapien
ataggaatcacacttggaggcttga

SEQ ID NO: 4543763 - DNA, 25 bp, Homo sapien
gatttgccaatcttagttccatagg

SEQ ID NO: 4543764 - DNA, 25 bp, Homo sapien
agctccccagtaagacagccagatc

SEQ ID NO: 4543765 - DNA, 25 bp, Homo sapien
tttgttttccctaggtgagagctga

SEQ ID NO: 4543766 - DNA, 25 bp, Homo sapien
tatgtacctctctggtttttcactg

SEQ ID NO: 4543767 - DNA, 25 bp, Homo sapien
cttctctgaatggcaccaaccctcc

SEQ ID NO: 4543768 - DNA, 25 bp, Homo sapien
tgtctgaccccttatgtacctctct

SEQ ID NO: 4543769 - DNA, 25 bp, Homo sapien
gtttttcactgcagtacttctctga

SEQ ID NO: 4543770 - DNA, 25 bp, Homo sapien
atgcgggaagcatgccaatctcaac

SEQ ID NO: 4543771 - DNA, 25 bp, Homo sapien
actctccctcttagagggcttcgct

SEQ ID NO: 4543772 - DNA, 25 bp, Homo sapien
ttcgctgtaaatgcgggaagcatgc

SEQ ID NO: 4543773 - DNA, 25 bp, Homo sapien
cttagagggcttcgctgtaaatgcg

SEQ ID NO: 4543774 - DNA, 25 bp, Homo sapien
tgcagaacactgtcaaatgcaggag

SEQ ID NO: 4543775 - DNA, 25 bp, Homo sapien
aacactgtcaaatgcaggagggaac

SEQ ID NO: 4543776 - DNA, 25 bp, Homo sapien
cagaacactgtcaaatgcaggaggg

SEQ ID NO: 4543777 - DNA, 25 bp, Homo sapien
cactgtcaaatgcaggagggaacag

SEQ ID NO: 4543778 - DNA, 25 bp, Homo sapien
gccagtcaatcctgggaggcccaaa

SEQ ID NO: 4543779 - DNA, 25 bp, Homo sapien
gggaccaatcgctcttgggctccgc

SEQ ID NO: 4543780 - DNA, 25 bp, Homo sapien
tgatgtgagagggtgtagaccgccc

SEQ ID NO: 4543781 - DNA, 25 bp, Homo sapien
caccacgcgttgtgggcggtgccac

SEQ ID NO: 4543782 - DNA, 25 bp, Homo sapien
acggaaaatcgtggaaaggcgctgt

SEQ ID NO: 4543783 - DNA, 25 bp, Homo sapien
tcctgatccgggactctgagatgaa

SEQ ID NO: 4543784 - DNA, 25 bp, Homo sapien
cacagctagtctatccgggtcctga

SEQ ID NO: 4543785 - DNA, 25 bp, Homo sapien
agtagtgtggaaaggagaccgcggg

SEQ ID NO: 4543786 - DNA, 25 bp, Homo sapien
tcagtccttggtgatacagttgacc

SEQ ID NO: 4543787 - DNA, 25 bp, Homo sapien
ggtgtgcttgccttaccaggtcaag

SEQ ID NO: 4543788 - DNA, 25 bp, Homo sapien
gcaatgtggtctgggttaaatttag

SEQ ID NO: 4543789 - DNA, 25 bp, Homo sapien
gaaggctggaatggaggtcatctct

SEQ ID NO: 4543790 - DNA, 25 bp, Homo sapien
gagaacacagcaccaaaacaaaaaa

SEQ ID NO: 4543791 - DNA, 25 bp, Homo sapien
aaaaccctttgatcctcttcctcat

SEQ ID NO: 4543792 - DNA, 25 bp, Homo sapien
caagctcagagaacacagcaccaaa

SEQ ID NO: 4543793 - DNA, 25 bp, Homo sapien
ctcagagaacacagcaccaaaacaa

SEQ ID NO: 4543794 - DNA, 25 bp, Homo sapien
gatgaaatcaaaggagacccacacc

SEQ ID NO: 4543795 - DNA, 25 bp, Homo sapien
gcagggattccacaaagcattcgtt

SEQ ID NO: 4543796 - DNA, 25 bp, Homo sapien
gaaaagtgcttggttgcctgcagat

SEQ ID NO: 4543797 - DNA, 25 bp, Homo sapien
cactgtataatcagcctggaggagt

SEQ ID NO: 4543798 - DNA, 25 bp, Homo sapien
aaagatactcttcataaacaattat

SEQ ID NO: 4543799 - DNA, 25 bp, Homo sapien
tatgatagtccaggcaggacatggg

SEQ ID NO: 4543800 - DNA, 25 bp, Homo sapien
taaacaattatgatagtccaggcag

SEQ ID NO: 4543801 - DNA, 25 bp, Homo sapien
acaattatgatagtccaggcaggac

SEQ ID NO: 4543802 - DNA, 25 bp, Homo sapien
tatcttggccttatcttctttagca

SEQ ID NO: 4543803 - DNA, 25 bp, Homo sapien
tgtggatcttccctgtagtttgtcc

SEQ ID NO: 4543804 - DNA, 25 bp, Homo sapien
tttattcacctctttgtcagagttg

SEQ ID NO: 4543805 - DNA, 25 bp, Homo sapien
tctttgtcagagttggctcttcctt

SEQ ID NO: 4543806 - DNA, 25 bp, Homo sapien
caatggtggctgcacacaggtgctg

SEQ ID NO: 4543807 - DNA, 25 bp, Homo sapien
tcagcatttgcgagctatgagaccc

SEQ ID NO: 4543808 - DNA, 25 bp, Homo sapien
taatgcgctgcactgttggaacaca

SEQ ID NO: 4543809 - DNA, 25 bp, Homo sapien
cagagattccttatagtaactctca

SEQ ID NO: 4543810 - DNA, 25 bp, Homo sapien
tagttgagattctaggttaccttgc

SEQ ID NO: 4543811 - DNA, 25 bp, Homo sapien
acatcctgaccctgataatctttct

SEQ ID NO: 4543812 - DNA, 25 bp, Homo sapien
caatctgtggttgcccacatcctga

SEQ ID NO: 4543813 - DNA, 25 bp, Homo sapien
ttcttgttagcagacagagatgcct

SEQ ID NO: 4543814 - DNA, 25 bp, Homo sapien
gcagccagtgttcttcaatctgtgg

SEQ ID NO: 4543815 - DNA, 25 bp, Homo sapien
caagcttgaggttggctcagggatc

SEQ ID NO: 4543816 - DNA, 25 bp, Homo sapien
gaacgttgcctgagtatgaccagct

SEQ ID NO: 4543817 - DNA, 25 bp, Homo sapien
cagcttctgcttccccaagtattgg

SEQ ID NO: 4543818 - DNA, 25 bp, Homo sapien
gagtgctagtctgtccgcaagcttg

SEQ ID NO: 4543819 - DNA, 25 bp, Homo sapien
caaattaaggataaaaagtcagcca

SEQ ID NO: 4543820 - DNA, 25 bp, Homo sapien
tcacatttgcatcccattataataa

SEQ ID NO: 4543821 - DNA, 25 bp, Homo sapien
tgacgtattcttctttgggtagagt

SEQ ID NO: 4543822 - DNA, 25 bp, Homo sapien
gacacagcccctctgacattttgac

SEQ ID NO: 4543823 - DNA, 25 bp, Homo sapien
ggaggcttcaggaatttgcgtgtca

SEQ ID NO: 4543824 - DNA, 25 bp, Homo sapien
aatgtgggaggcttcaggaatttgc

SEQ ID NO: 4543825 - DNA, 25 bp, Homo sapien
taaaaatgtgggaggcttcaggaat

SEQ ID NO: 4543826 - DNA, 25 bp, Homo sapien
gaggcttcaggaatttgcgtgtcat

SEQ ID NO: 4543827 - DNA, 25 bp, Homo sapien
tattagtggccaagttactcaggtg

SEQ ID NO: 4543828 - DNA, 25 bp, Homo sapien
ggagaatgaaccttgcccctaagct

SEQ ID NO: 4543829 - DNA, 25 bp, Homo sapien
ttcttaggtgtatctgaggccagcc

SEQ ID NO: 4543830 - DNA, 25 bp, Homo sapien
gattaggaccaacatttcaagctgc

SEQ ID NO: 4543831 - DNA, 25 bp, Homo sapien
ctcccagggaattggcattacgaat

SEQ ID NO: 4543832 - DNA, 25 bp, Homo sapien
tccaagtaggactgtaaggtgcctc

SEQ ID NO: 4543833 - DNA, 25 bp, Homo sapien
caggtccagcaatggaagcctcctc

SEQ ID NO: 4543834 - DNA, 25 bp, Homo sapien
gcattacgaatgttaactttaatgg

SEQ ID NO: 4543835 - DNA, 25 bp, Homo sapien
tgacaaggctatgatgtgcatggcc

SEQ ID NO: 4543836 - DNA, 25 bp, Homo sapien
gaaagactttcctagtcgcgcatgg

SEQ ID NO: 4543837 - DNA, 25 bp, Homo sapien
gctacaaagtcactaaagggtccat

SEQ ID NO: 4543838 - DNA, 25 bp, Homo sapien
gatacagattaacttcaccaggcca

SEQ ID NO: 4543839 - DNA, 25 bp, Homo sapien
ctatgcttatcacacataaaagtca

SEQ ID NO: 4543840 - DNA, 25 bp, Homo sapien
actatgcttatcacacataaaagtc

SEQ ID NO: 4543841 - DNA, 25 bp, Homo sapien
tatgcttatcacacataaaagtcac

SEQ ID NO: 4543842 - DNA, 25 bp, Homo sapien
caaaccatttatcaaacctagcatg

SEQ ID NO: 4543843 - DNA, 25 bp, Homo sapien
ggcaccaaaacgttggctaagtcat

SEQ ID NO: 4543844 - DNA, 25 bp, Homo sapien
gaacaagctatctgctcacctgcaa

SEQ ID NO: 4543845 - DNA, 25 bp, Homo sapien
taacttggtgcctctaaaaggaatc

SEQ ID NO: 4543846 - DNA, 25 bp, Homo sapien
cattggcatccaccataacacgttt

SEQ ID NO: 4543847 - DNA, 25 bp, Homo sapien
tcttttgaattggaacttcattggc

SEQ ID NO: 4543848 - DNA, 25 bp, Homo sapien
ttttcatctagcattaagacattca

SEQ ID NO: 4543849 - DNA, 25 bp, Homo sapien
ggaaagccatttggatgacatccag

SEQ ID NO: 4543850 - DNA, 25 bp, Homo sapien
tagtccatcctgctttcttgaaaag

SEQ ID NO: 4543851 - DNA, 25 bp, Homo sapien
cgtctgggatgattggtgttggagg

SEQ ID NO: 4543852 - DNA, 25 bp, Homo sapien
aggagtaatgatagtccatcctgct

SEQ ID NO: 4543853 - DNA, 25 bp, Homo sapien
aatgatagtccatcctgctttcttg

SEQ ID NO: 4543854 - DNA, 25 bp, Homo sapien
gtctggagcaagatgcctacgcatc

SEQ ID NO: 4543855 - DNA, 25 bp, Homo sapien
caataccaggtccaatgatgttgaa

SEQ ID NO: 4543856 - DNA, 25 bp, Homo sapien
catgggattgggatctttaaaggag

SEQ ID NO: 4543857 - DNA, 25 bp, Homo sapien
gatgttgaaggtagcatcaatatgc

SEQ ID NO: 4543858 - DNA, 25 bp, Homo sapien
gcatcaaagcatggctcaaactcag

SEQ ID NO: 4543859 - DNA, 25 bp, Homo sapien
actcagttgtcacaaattttccctg

SEQ ID NO: 4543860 - DNA, 25 bp, Homo sapien
cttctacagagtggatgggataatc

SEQ ID NO: 4543861 - DNA, 25 bp, Homo sapien
tcttccagctcgaatgaagtcagca

SEQ ID NO: 4543862 - DNA, 25 bp, Homo sapien
caactatcaggatgtctcgaggcat

SEQ ID NO: 4543863 - DNA, 25 bp, Homo sapien
gataattgacctgtacgctcggtac

SEQ ID NO: 4543864 - DNA, 25 bp, Homo sapien
tataaagctcatcagccattgtggg

SEQ ID NO: 4543865 - DNA, 25 bp, Homo sapien
tcggtactcaaagaagcgtgaacgc

SEQ ID NO: 4543866 - DNA, 25 bp, Homo sapien
gcctccttactgtcactccttccgt

SEQ ID NO: 4543867 - DNA, 25 bp, Homo sapien
cctccttgcttctggtaaaatggcc

SEQ ID NO: 4543868 - DNA, 25 bp, Homo sapien
tatacttcaatgaccagtcaatggg

SEQ ID NO: 4543869 - DNA, 25 bp, Homo sapien
ggggtcaggcctccttactgtcact

SEQ ID NO: 4543870 - DNA, 25 bp, Homo sapien
cattgagcacataagccctctgggc

SEQ ID NO: 4543871 - DNA, 25 bp, Homo sapien
gaattgagactccaaccactccatg

SEQ ID NO: 4543872 - DNA, 25 bp, Homo sapien
ccatgttcagtgctgatccctagca

SEQ ID NO: 4543873 - DNA, 25 bp, Homo sapien
catgataggttcataggcagtaaac

SEQ ID NO: 4543874 - DNA, 25 bp, Homo sapien
ttccgggaggaagccgtagctgcct

SEQ ID NO: 4543875 - DNA, 25 bp, Homo sapien
cctcgatggtgaacggtggaacaca

SEQ ID NO: 4543876 - DNA, 25 bp, Homo sapien
tcgtcagctgcacaggagttccggg

SEQ ID NO: 4543877 - DNA, 25 bp, Homo sapien
tgctctggaaagttcgctgcaccca

SEQ ID NO: 4543878 - DNA, 25 bp, Homo sapien
gatgggtcagtcctcctctcagaaa

SEQ ID NO: 4543879 - DNA, 25 bp, Homo sapien
taaaactcctcagaagaccgtgtcc

SEQ ID NO: 4543880 - DNA, 25 bp, Homo sapien
caattctgagagtgagcaactgcca

SEQ ID NO: 4543881 - DNA, 25 bp, Homo sapien
tatacttggagtgaatctggtcgct

SEQ ID NO: 4543882 - DNA, 25 bp, Homo sapien
gcttcccagggataccagaagggac

SEQ ID NO: 4543883 - DNA, 25 bp, Homo sapien
cttttactaagaggagcctccgtcg

SEQ ID NO: 4543884 - DNA, 25 bp, Homo sapien
gtgcagcgcaccaaggtccggtaga

SEQ ID NO: 4543885 - DNA, 25 bp, Homo sapien
gaagggacactctcgtgcaattccg

SEQ ID NO: 4543886 - DNA, 25 bp, Homo sapien
cagacgaggccggtggcgcacgcac

SEQ ID NO: 4543887 - DNA, 25 bp, Homo sapien
ggagcgagcgagtgctccacgccgc

SEQ ID NO: 4543888 - DNA, 25 bp, Homo sapien
cacgccgcccgcaggatcgagtgag

SEQ ID NO: 4543889 - DNA, 25 bp, Homo sapien
cccgcaggatcgagtgagtcacgcg

SEQ ID NO: 4543890 - DNA, 25 bp, Homo sapien
agatccgatgtagtgcaccgcctcg

SEQ ID NO: 4543891 - DNA, 25 bp, Homo sapien
tccgatgtagtgcaccgcctcggcg

SEQ ID NO: 4543892 - DNA, 25 bp, Homo sapien
cgagatccgatgtagtgcaccgcct

SEQ ID NO: 4543893 - DNA, 25 bp, Homo sapien
ccgagatccgatgtagtgcaccgcc

SEQ ID NO: 4543894 - DNA, 25 bp, Homo sapien
gcccgaggccttttgtagccgcgct

SEQ ID NO: 4543895 - DNA, 25 bp, Homo sapien
gacggcttctgttgcacgtccggac

SEQ ID NO: 4543896 - DNA, 25 bp, Homo sapien
cgcggaatgttcctggcctctgggc

SEQ ID NO: 4543897 - DNA, 25 bp, Homo sapien
aattaggaactgtcgggaagcgccg

SEQ ID NO: 4543898 - DNA, 25 bp, Homo sapien
cctccgagagggaattaggataact

SEQ ID NO: 4543899 - DNA, 25 bp, Homo sapien
tccctcacagtgcagtcttaattgc

SEQ ID NO: 4543900 - DNA, 25 bp, Homo sapien
gcaccagacgagcagatggcatggt

SEQ ID NO: 4543901 - DNA, 25 bp, Homo sapien
tttgtacagagctagagaactcagg

SEQ ID NO: 4543902 - DNA, 25 bp, Homo sapien
tctgaggtctgattctcttagtgta

SEQ ID NO: 4543903 - DNA, 25 bp, Homo sapien
gaggtctgattctcttagtgtactg

SEQ ID NO: 4543904 - DNA, 25 bp, Homo sapien
aggtctgattctcttagtgtactga

SEQ ID NO: 4543905 - DNA, 25 bp, Homo sapien
ctgaggtctgattctcttagtgtac

SEQ ID NO: 4543906 - DNA, 25 bp, Homo sapien
gaacagctgtgttattactgctcaa

SEQ ID NO: 4543907 - DNA, 25 bp, Homo sapien
tacaaaatcttgtgaaggcagcctc

SEQ ID NO: 4543908 - DNA, 25 bp, Homo sapien
tgctcaacatctcccaatgaggtag

SEQ ID NO: 4543909 - DNA, 25 bp, Homo sapien
gcactgtcccttacgagtcatttta

SEQ ID NO: 4543910 - DNA, 25 bp, Homo sapien
tagtcagacagtgcgtatctagaca

SEQ ID NO: 4543911 - DNA, 25 bp, Homo sapien
taacccaacagcctctagcactggt

SEQ ID NO: 4543912 - DNA, 25 bp, Homo sapien
tagcactggttgtgctagtcagaca

SEQ ID NO: 4543913 - DNA, 25 bp, Homo sapien
actacagatatgcatcactgcctgg

SEQ ID NO: 4543914 - DNA, 25 bp, Homo sapien
tacagctcctgttgtacttagcaca

SEQ ID NO: 4543915 - DNA, 25 bp, Homo sapien
tatagttgggataacctcatggccc

SEQ ID NO: 4543916 - DNA, 25 bp, Homo sapien
tatctctttcgccagacctctggag

SEQ ID NO: 4543917 - DNA, 25 bp, Homo sapien
cctctggagagcaagggctacagct

SEQ ID NO: 4543918 - DNA, 25 bp, Homo sapien
tacttatccttcacgtctcagctgg

SEQ ID NO: 4543919 - DNA, 25 bp, Homo sapien
agcatattccaatctcagggcattg

SEQ ID NO: 4543920 - DNA, 25 bp, Homo sapien
ggcattggcacaggcttttccctct

SEQ ID NO: 4543921 - DNA, 25 bp, Homo sapien
tatccttcacgtctcagctggaatg

SEQ ID NO: 4543922 - DNA, 25 bp, Homo sapien
tatatggtctctgcctctagtctct

SEQ ID NO: 4543923 - DNA, 25 bp, Homo sapien
cttaaatcccgtggactttcctgag

SEQ ID NO: 4543924 - DNA, 25 bp, Homo sapien
taccaaggcaattcttgcccggctc

SEQ ID NO: 4543925 - DNA, 25 bp, Homo sapien
ttcactctcgttcctgacatggagc

SEQ ID NO: 4543926 - DNA, 25 bp, Homo sapien
tctgccagtgccttgtctttgactt

SEQ ID NO: 4543927 - DNA, 25 bp, Homo sapien
cagtcatggaatctgccagtgcctt

SEQ ID NO: 4543928 - DNA, 25 bp, Homo sapien
cagtgccttgtctttgacttcccag

SEQ ID NO: 4543929 - DNA, 25 bp, Homo sapien
atggaatctgccagtgccttgtctt

SEQ ID NO: 4543930 - DNA, 25 bp, Homo sapien
caacggcggtagtactgatgctcca

SEQ ID NO: 4543931 - DNA, 25 bp, Homo sapien
tgatgctccagttcgaaggccagga

SEQ ID NO: 4543932 - DNA, 25 bp, Homo sapien
tagtgaagtgagcttaagccgcctc

SEQ ID NO: 4543933 - DNA, 25 bp, Homo sapien
ccaaaattctgtgcccatgcggata

SEQ ID NO: 4543934 - DNA, 25 bp, Homo sapien
gagctgctgagaaaccgaccgatct

SEQ ID NO: 4543935 - DNA, 25 bp, Homo sapien
tgggctcggcagtgaagatctcgct

SEQ ID NO: 4543936 - DNA, 25 bp, Homo sapien
tcttcctggacgagatggacgcctt

SEQ ID NO: 4543937 - DNA, 25 bp, Homo sapien
gctacccttagacgctagagaccgg

SEQ ID NO: 4543938 - DNA, 25 bp, Homo sapien
tggctatgttggtgccgacctgaca

SEQ ID NO: 4543939 - DNA, 25 bp, Homo sapien
cttgcagaaatgacagttggctatg

SEQ ID NO: 4543940 - DNA, 25 bp, Homo sapien
agatgcccatctccagtcatgttga

SEQ ID NO: 4543941 - DNA, 25 bp, Homo sapien
tctgcaagtgattacctcgaagatg

SEQ ID NO: 4543942 - DNA, 25 bp, Homo sapien
gactcttccctacttaacgatcagg

SEQ ID NO: 4543943 - DNA, 25 bp, Homo sapien
tagctacaaggagaattgctgggtc

SEQ ID NO: 4543944 - DNA, 25 bp, Homo sapien
ttgtacatgtctcttagttcccgtg

SEQ ID NO: 4543945 - DNA, 25 bp, Homo sapien
taacgatcaggaagatattctctca

SEQ ID NO: 4543946 - DNA, 25 bp, Homo sapien
agacgcaactacagtgaaacaagag

SEQ ID NO: 4543947 - DNA, 25 bp, Homo sapien
gaaaatggactagacgcaactacag

SEQ ID NO: 4543948 - DNA, 25 bp, Homo sapien
gcctgtcgtttgcaacttcacactt

SEQ ID NO: 4543949 - DNA, 25 bp, Homo sapien
attgaaatgtgaacttgcctgtcgt

SEQ ID NO: 4543950 - DNA, 25 bp, Homo sapien
ggcaccagacagacctgcgttctga

SEQ ID NO: 4543951 - DNA, 25 bp, Homo sapien
tttcagggaacgttaagatgttgcc

SEQ ID NO: 4543952 - DNA, 25 bp, Homo sapien
cacagcagggtctagccaatttcag

SEQ ID NO: 4543953 - DNA, 25 bp, Homo sapien
cagacagaaccatggtgttgggcac

SEQ ID NO: 4543954 - DNA, 25 bp, Homo sapien
gtttggcgcccaccaggcgatcaat

SEQ ID NO: 4543955 - DNA, 25 bp, Homo sapien
ttggcaattcttcgctgaagtcatc

SEQ ID NO: 4543956 - DNA, 25 bp, Homo sapien
agtcatcatgagctttttccaactc

SEQ ID NO: 4543957 - DNA, 25 bp, Homo sapien
agttggcctgcggagcgcggtggac

SEQ ID NO: 4543958 - DNA, 25 bp, Homo sapien
cgatgaacctaatctcaactttggg

SEQ ID NO: 4543959 - DNA, 25 bp, Homo sapien
taaacttgaaactgttggaggctgg

SEQ ID NO: 4543960 - DNA, 25 bp, Homo sapien
tagattcagttgtctacgatgaacc

SEQ ID NO: 4543961 - DNA, 25 bp, Homo sapien
ggcagtcctctaaccgctggcagag

SEQ ID NO: 4543962 - DNA, 25 bp, Homo sapien
gttggagactcgcatgaggactgac

SEQ ID NO: 4543963 - DNA, 25 bp, Homo sapien
caaagccaaaatttggtgggatacg

SEQ ID NO: 4543964 - DNA, 25 bp, Homo sapien
tggtgggatacgaataaaagatggt

SEQ ID NO: 4543965 - DNA, 25 bp, Homo sapien
tttgcagtatagctaacaaagccaa

SEQ ID NO: 4543966 - DNA, 25 bp, Homo sapien
ccagcgctcttcagagtttggggcc

SEQ ID NO: 4543967 - DNA, 25 bp, Homo sapien
gatacattcatatccagcatgccgc

SEQ ID NO: 4543968 - DNA, 25 bp, Homo sapien
gccatactgtgatgttcctgtggag

SEQ ID NO: 4543969 - DNA, 25 bp, Homo sapien
ttccctctggccaatggtaacttga

SEQ ID NO: 4543970 - DNA, 25 bp, Homo sapien
tggaggacttgcagggtacagcacc

SEQ ID NO: 4543971 - DNA, 25 bp, Homo sapien
gaggtgaagtaagagacagagttcc

SEQ ID NO: 4543972 - DNA, 25 bp, Homo sapien
ttagatcttggaggacttgcagggt

SEQ ID NO: 4543973 - DNA, 25 bp, Homo sapien
gtgggtcagactgtcccccaagagg

SEQ ID NO: 4543974 - DNA, 25 bp, Homo sapien
ctttttcagtgaatgccgagaggca

SEQ ID NO: 4543975 - DNA, 25 bp, Homo sapien
ttttcagtgaatgccgagaggcagg

SEQ ID NO: 4543976 - DNA, 25 bp, Homo sapien
tcagtgaatgccgagaggcaggtgc

SEQ ID NO: 4543977 - DNA, 25 bp, Homo sapien
ggctttttcagtgaatgccgagagg

SEQ ID NO: 4543978 - DNA, 25 bp, Homo sapien
aattctaaaagagctgtaacacttc

SEQ ID NO: 4543979 - DNA, 25 bp, Homo sapien
cagaaagcctgctggacaaattcta

SEQ ID NO: 4543980 - DNA, 25 bp, Homo sapien
ggctttccagcaaaaaccagaaagc

SEQ ID NO: 4543981 - DNA, 25 bp, Homo sapien
ttccagcaaaaaccagaaagcctgc

SEQ ID NO: 4543982 - DNA, 25 bp, Homo sapien
cctgggaaaagtgctagggtacagc

SEQ ID NO: 4543983 - DNA, 25 bp, Homo sapien
gacaggacaaagtctcttctggagg

SEQ ID NO: 4543984 - DNA, 25 bp, Homo sapien
tttgctgctcctaagcctgacacag

SEQ ID NO: 4543985 - DNA, 25 bp, Homo sapien
tatagcccacaggagctaaatccag

SEQ ID NO: 4543986 - DNA, 25 bp, Homo sapien
gcagaagcagctccaaccataggct

SEQ ID NO: 4543987 - DNA, 25 bp, Homo sapien
tctgcagaagcagctccaaccatag

SEQ ID NO: 4543988 - DNA, 25 bp, Homo sapien
cagaagcagctccaaccataggctt

SEQ ID NO: 4543989 - DNA, 25 bp, Homo sapien
tgcagaagcagctccaaccataggc

SEQ ID NO: 4543990 - DNA, 25 bp, Homo sapien
gtgataggatgtcactcctgcgctg

SEQ ID NO: 4543991 - DNA, 25 bp, Homo sapien
tcactcctgcgctgatgacatgttc

SEQ ID NO: 4543992 - DNA, 25 bp, Homo sapien
aaggggctgtgataggatgtcactc

SEQ ID NO: 4543993 - DNA, 25 bp, Homo sapien
tcctgcgctgatgacatgttcggag

SEQ ID NO: 4543994 - DNA, 25 bp, Homo sapien
catataagagggcattataaaatga

SEQ ID NO: 4543995 - DNA, 25 bp, Homo sapien
taagagggcattataaaatgacatt

SEQ ID NO: 4543996 - DNA, 25 bp, Homo sapien
ttcttaaacatataagagggcatta

SEQ ID NO: 4543997 - DNA, 25 bp, Homo sapien
acaatgtttttaggcctactaatat

SEQ ID NO: 4543998 - DNA, 25 bp, Homo sapien
gagaagctcacgtgtctgatcttga

SEQ ID NO: 4543999 - DNA, 25 bp, Homo sapien
cagtaaaataagaaacccggtgatg

SEQ ID NO: 4544000 - DNA, 25 bp, Homo sapien
gcatctggccatagttgtgaaacac

SEQ ID NO: 4544001 - DNA, 25 bp, Homo sapien
catacgacacatctggagttagggt

SEQ ID NO: 4544002 - DNA, 25 bp, Homo sapien
gtttgcagtgtttctgtattttaca

SEQ ID NO: 4544003 - DNA, 25 bp, Homo sapien
gcagtgtttctgtattttacaaaag

SEQ ID NO: 4544004 - DNA, 25 bp, Homo sapien
aaggtttgcagtgtttctgtatttt

SEQ ID NO: 4544005 - DNA, 25 bp, Homo sapien
tgcagtgtttctgtattttacaaaa

SEQ ID NO: 4544006 - DNA, 25 bp, Homo sapien
tttaatgtccatccctatctagtgc

SEQ ID NO: 4544007 - DNA, 25 bp, Homo sapien
tcattagagggaccatcaatccttt

SEQ ID NO: 4544008 - DNA, 25 bp, Homo sapien
taaggaacaggtcgatacaaaagcg

SEQ ID NO: 4544009 - DNA, 25 bp, Homo sapien
tcttggcctcgagggatacttccac

SEQ ID NO: 4544010 - DNA, 25 bp, Homo sapien
gaggcaggaaccaacgtaccacatt

SEQ ID NO: 4544011 - DNA, 25 bp, Homo sapien
ctctagagtttaccctgaaaggcta

SEQ ID NO: 4544012 - DNA, 25 bp, Homo sapien
tgtcgggaagacataaacctgaaac

SEQ ID NO: 4544013 - DNA, 25 bp, Homo sapien
caaattgttggcagttcttaaaggg

SEQ ID NO: 4544014 - DNA, 25 bp, Homo sapien
gaaagcagcaattccagaagctggg

SEQ ID NO: 4544015 - DNA, 25 bp, Homo sapien
gagactgatgcttgatacggacaca

SEQ ID NO: 4544016 - DNA, 25 bp, Homo sapien
tctgtgactgcaggataaataaggc

SEQ ID NO: 4544017 - DNA, 25 bp, Homo sapien
tctgaaaattatggcaaagtctcct

SEQ ID NO: 4544018 - DNA, 25 bp, Homo sapien
ggactagaactctgacaatttgcac

SEQ ID NO: 4544019 - DNA, 25 bp, Homo sapien
gctttggactgtacttcctcccatt

SEQ ID NO: 4544020 - DNA, 25 bp, Homo sapien
ctgaagctgaatagtacatctatac

SEQ ID NO: 4544021 - DNA, 25 bp, Homo sapien
tgaatagtacatctatacatgccaa

SEQ ID NO: 4544022 - DNA, 25 bp, Homo sapien
aaaggcagaagtccaccaaccccag

SEQ ID NO: 4544023 - DNA, 25 bp, Homo sapien
aaggcagaagtccaccaaccccagg

SEQ ID NO: 4544024 - DNA, 25 bp, Homo sapien
accccaggcccacatttactaccag

SEQ ID NO: 4544025 - DNA, 25 bp, Homo sapien
ccaggcccacatttactaccagcaa

SEQ ID NO: 4544026 - DNA, 25 bp, Homo sapien
ttgatatagtctacattcaaatggc

SEQ ID NO: 4544027 - DNA, 25 bp, Homo sapien
gaactatggcagtagattttcctga

SEQ ID NO: 4544028 - DNA, 25 bp, Homo sapien
tttcctgaagtgagagaccagatat

SEQ ID NO: 4544029 - DNA, 25 bp, Homo sapien
tcttcgactgaatatacatcttcta

SEQ ID NO: 4544030 - DNA, 25 bp, Homo sapien
tgtaaaagccacaagtaatgaaaat

SEQ ID NO: 4544031 - DNA, 25 bp, Homo sapien
tatgattcgaaatgttgtaaaagcc

SEQ ID NO: 4544032 - DNA, 25 bp, Homo sapien
tataactactgtatcccatatgatt

SEQ ID NO: 4544033 - DNA, 25 bp, Homo sapien
atgaaaatacgtatgtacagatggg

SEQ ID NO: 4544034 - DNA, 25 bp, Homo sapien
tatcctgcccatggttacgttcaca

SEQ ID NO: 4544035 - DNA, 25 bp, Homo sapien
tcccaaagcatgtacaaatgcagct

SEQ ID NO: 4544036 - DNA, 25 bp, Homo sapien
tgcagctattagcacaccaacactc

SEQ ID NO: 4544037 - DNA, 25 bp, Homo sapien
cttgaatcgtatgatgtatgcagct

SEQ ID NO: 4544038 - DNA, 25 bp, Homo sapien
gggaatgggagtgacggtgaccaga

SEQ ID NO: 4544039 - DNA, 25 bp, Homo sapien
gtgacggtgaccagactggttcaac

SEQ ID NO: 4544040 - DNA, 25 bp, Homo sapien
tgggagtgacggtgaccagactggt

SEQ ID NO: 4544041 - DNA, 25 bp, Homo sapien
gagtgacggtgaccagactggttca

SEQ ID NO: 4544042 - DNA, 25 bp, Homo sapien
cagctgcggtgatgagcattatatc

SEQ ID NO: 4544043 - DNA, 25 bp, Homo sapien
tgcaactccaacagctgcggtgatg

SEQ ID NO: 4544044 - DNA, 25 bp, Homo sapien
ccaacagctgcggtgatgagcatta

SEQ ID NO: 4544045 - DNA, 25 bp, Homo sapien
actccaacagctgcggtgatgagca

SEQ ID NO: 4544046 - DNA, 25 bp, Homo sapien
gcttcatataagaggaatcccataa

SEQ ID NO: 4544047 - DNA, 25 bp, Homo sapien
ctttgcacagcttcatataagagga

SEQ ID NO: 4544048 - DNA, 25 bp, Homo sapien
taagaggaatcccataagtatatac

SEQ ID NO: 4544049 - DNA, 25 bp, Homo sapien
atggatagttctttgcacagcttca

SEQ ID NO: 4544050 - DNA, 25 bp, Homo sapien
ctagagggaaaaacacatataacaa

SEQ ID NO: 4544051 - DNA, 25 bp, Homo sapien
catataacaaatacattttcagcat

SEQ ID NO: 4544052 - DNA, 25 bp, Homo sapien
cacatataacaaatacattttcagc

SEQ ID NO: 4544053 - DNA, 25 bp, Homo sapien
aacacatataacaaatacattttca

SEQ ID NO: 4544054 - DNA, 25 bp, Homo sapien
aacacctaattatcaagctcatgaa

SEQ ID NO: 4544055 - DNA, 25 bp, Homo sapien
atgtgaacacctaattatcaagctc

SEQ ID NO: 4544056 - DNA, 25 bp, Homo sapien
taattatcaagctcatgaactacaa

SEQ ID NO: 4544057 - DNA, 25 bp, Homo sapien
cacctaattatcaagctcatgaact

SEQ ID NO: 4544058 - DNA, 25 bp, Homo sapien
ggcaccatctcagctctgcttcctg

SEQ ID NO: 4544059 - DNA, 25 bp, Homo sapien
ccaccaccatgcttggctaattttt

SEQ ID NO: 4544060 - DNA, 25 bp, Homo sapien
cccaccaccatgcttggctaatttt

SEQ ID NO: 4544061 - DNA, 25 bp, Homo sapien
accatctcagctctgcttcctgagt

SEQ ID NO: 4544062 - DNA, 25 bp, Homo sapien
tttaagtcaggtgtacaaccagtac

SEQ ID NO: 4544063 - DNA, 25 bp, Homo sapien
caaaaggtcatatagatggatctca

SEQ ID NO: 4544064 - DNA, 25 bp, Homo sapien
caaaagatgatttagccacgaagtt

SEQ ID NO: 4544065 - DNA, 25 bp, Homo sapien
cagtactatccagctatgttaaggg

SEQ ID NO: 4544066 - DNA, 25 bp, Homo sapien
tggacccaagcaatcttcctatctt

SEQ ID NO: 4544067 - DNA, 25 bp, Homo sapien
gacccaagcaatcttcctatcttag

SEQ ID NO: 4544068 - DNA, 25 bp, Homo sapien
gattataagcatgtgccacatgtat

SEQ ID NO: 4544069 - DNA, 25 bp, Homo sapien
taagcatgtgccacatgtattttta

SEQ ID NO: 4544070 - DNA, 25 bp, Homo sapien
tatggtggtatatgcatgcagtcct

SEQ ID NO: 4544071 - DNA, 25 bp, Homo sapien
ggtaagatttctagagctcaggagt

SEQ ID NO: 4544072 - DNA, 25 bp, Homo sapien
aggctgcgagggtaagatttctaga

SEQ ID NO: 4544073 - DNA, 25 bp, Homo sapien
actctggaggctgcgagggtaagat

SEQ ID NO: 4544074 - DNA, 25 bp, Homo sapien
tattctgagcatattaataagataa

SEQ ID NO: 4544075 - DNA, 25 bp, Homo sapien
tctgagcatattaataagataattt

SEQ ID NO: 4544076 - DNA, 25 bp, Homo sapien
ttattctgagcatattaataagata

SEQ ID NO: 4544077 - DNA, 25 bp, Homo sapien
tactgttttattattctgagcatat

SEQ ID NO: 4544078 - DNA, 25 bp, Homo sapien
tctattcatacttagggcagaagga

SEQ ID NO: 4544079 - DNA, 25 bp, Homo sapien
cttggttgtctattcatacttaggg

SEQ ID NO: 4544080 - DNA, 25 bp, Homo sapien
gaaatgctggaaggataagccagaa

SEQ ID NO: 4544081 - DNA, 25 bp, Homo sapien
aggaaatgctggaaggataagccag

SEQ ID NO: 4544082 - DNA, 25 bp, Homo sapien
gtgcctggccaggaacacattcaca

SEQ ID NO: 4544083 - DNA, 25 bp, Homo sapien
acattcacatgcattatgcagtagc

SEQ ID NO: 4544084 - DNA, 25 bp, Homo sapien
acacattcacatgcattatgcagta

SEQ ID NO: 4544085 - DNA, 25 bp, Homo sapien
gccaggaacacattcacatgcatta

SEQ ID NO: 4544086 - DNA, 25 bp, Homo sapien
taagctatggtagctttggctgaaa

SEQ ID NO: 4544087 - DNA, 25 bp, Homo sapien
gctatggtagctttggctgaaatac

SEQ ID NO: 4544088 - DNA, 25 bp, Homo sapien
ctaagctatggtagctttggctgaa

SEQ ID NO: 4544089 - DNA, 25 bp, Homo sapien
agctatggtagctttggctgaaata

SEQ ID NO: 4544090 - DNA, 25 bp, Homo sapien
gctaggctatttgcaatgtatccac

SEQ ID NO: 4544091 - DNA, 25 bp, Homo sapien
ggcgcttaggtcagttaacatatga

SEQ ID NO: 4544092 - DNA, 25 bp, Homo sapien
caagcagggtgagtatgatggcgct

SEQ ID NO: 4544093 - DNA, 25 bp, Homo sapien
taacatatgaagtgcatctgtcatg

SEQ ID NO: 4544094 - DNA, 25 bp, Homo sapien
agtcacatccatttaccccagagtg

SEQ ID NO: 4544095 - DNA, 25 bp, Homo sapien
catttttatgtattccccggcatga

SEQ ID NO: 4544096 - DNA, 25 bp, Homo sapien
caaatagcatttttatgtattcccc

SEQ ID NO: 4544097 - DNA, 25 bp, Homo sapien
cccagagtgctctatacaaatagca

SEQ ID NO: 4544098 - DNA, 25 bp, Homo sapien
ccaacaggccacaatcacagtgaaa

SEQ ID NO: 4544099 - DNA, 25 bp, Homo sapien
agctacatgttggtgacatcagcca

SEQ ID NO: 4544100 - DNA, 25 bp, Homo sapien
tgtcctccagctgtatggtagcctt

SEQ ID NO: 4544101 - DNA, 25 bp, Homo sapien
gtgttttaatttgcgctgtacccat

SEQ ID NO: 4544102 - DNA, 25 bp, Homo sapien
agcgctttggacacactttaataaa

SEQ ID NO: 4544103 - DNA, 25 bp, Homo sapien
tatttataagcgctttggacacact

SEQ ID NO: 4544104 - DNA, 25 bp, Homo sapien
gatgctttatttataagcgctttgg

SEQ ID NO: 4544105 - DNA, 25 bp, Homo sapien
gaataatattgttaatgcttaccct

SEQ ID NO: 4544106 - DNA, 25 bp, Homo sapien
tcatagaactttggcggagtcctct

SEQ ID NO: 4544107 - DNA, 25 bp, Homo sapien
catttcaggcccttcttacgaggca

SEQ ID NO: 4544108 - DNA, 25 bp, Homo sapien
tacggtagatgacagtggttgaaca

SEQ ID NO: 4544109 - DNA, 25 bp, Homo sapien
tgagctgcactttggaaccgtgtgg

SEQ ID NO: 4544110 - DNA, 25 bp, Homo sapien
gatgggttaaacctcaaagcctgtg

SEQ ID NO: 4544111 - DNA, 25 bp, Homo sapien
ttgacaaagactctcgaggaaaggt

SEQ ID NO: 4544112 - DNA, 25 bp, Homo sapien
gcctgtgtaactacagcttgacaaa

SEQ ID NO: 4544113 - DNA, 25 bp, Homo sapien
taaacggaaagtgagttggcaacac

SEQ ID NO: 4544114 - DNA, 25 bp, Homo sapien
taaggaatcatcgtcggcctggagg

SEQ ID NO: 4544115 - DNA, 25 bp, Homo sapien
gcatagatttgaggcgcttccacgc

SEQ ID NO: 4544116 - DNA, 25 bp, Homo sapien
tgttgaaccgagaaagcccctcgtc

SEQ ID NO: 4544117 - DNA, 25 bp, Homo sapien
tacagaacggcagcaatggtcaacc

SEQ ID NO: 4544118 - DNA, 25 bp, Homo sapien
ggccggcggcgcctacttcaccgga

SEQ ID NO: 4544119 - DNA, 25 bp, Homo sapien
tgagcggccgcggtgcggaacggct

SEQ ID NO: 4544120 - DNA, 25 bp, Homo sapien
ctacttcaccggagcgccagttctc

SEQ ID NO: 4544121 - DNA, 25 bp, Homo sapien
tctcgagggcagtgccgcgcgtccc

SEQ ID NO: 4544122 - DNA, 25 bp, Homo sapien
tcaagttccgaagccgctggcggcg

SEQ ID NO: 4544123 - DNA, 25 bp, Homo sapien
ctgtcctcaagttccgaagccgctg

SEQ ID NO: 4544124 - DNA, 25 bp, Homo sapien
ggtcgcagggccgaccccgacgctc

SEQ ID NO: 4544125 - DNA, 25 bp, Homo sapien
tcctcaagttccgaagccgctggcg

SEQ ID NO: 4544126 - DNA, 25 bp, Homo sapien
gccggctcagcgaggcgggctcgcg

SEQ ID NO: 4544127 - DNA, 25 bp, Homo sapien
cgcccgctgctggaggccggctccc

SEQ ID NO: 4544128 - DNA, 25 bp, Homo sapien
gctcgcgctgctccacccgcggccg

SEQ ID NO: 4544129 - DNA, 25 bp, Homo sapien
gagtggggtcgtgctcgcgcccgcc

SEQ ID NO: 4544130 - DNA, 25 bp, Homo sapien
ctttgctagttggagggtctttgct

SEQ ID NO: 4544131 - DNA, 25 bp, Homo sapien
aaaaaagctatcaatcatctaggcc

SEQ ID NO: 4544132 - DNA, 25 bp, Homo sapien
cagaggaatcaatggcagctatagc

SEQ ID NO: 4544133 - DNA, 25 bp, Homo sapien
aagagttcttgatggcgtgtgatgc

SEQ ID NO: 4544134 - DNA, 25 bp, Homo sapien
tccatgttccctagaccaggaaggg

SEQ ID NO: 4544135 - DNA, 25 bp, Homo sapien
tgcagccacgggaatcaaggtagga

SEQ ID NO: 4544136 - DNA, 25 bp, Homo sapien
gcctcagatgcaagaaatcaactcc

SEQ ID NO: 4544137 - DNA, 25 bp, Homo sapien
gaaacctagatcagagattccatgt

SEQ ID NO: 4544138 - DNA, 25 bp, Homo sapien
cactgggtacctggagaaagtgatg

SEQ ID NO: 4544139 - DNA, 25 bp, Homo sapien
tttgggtacttacagcaagctttgt

SEQ ID NO: 4544140 - DNA, 25 bp, Homo sapien
caagctttgttgaatagggctgcag

SEQ ID NO: 4544141 - DNA, 25 bp, Homo sapien
tactctacttatcaagaggtggagc

SEQ ID NO: 4544142 - DNA, 25 bp, Homo sapien
cccatgctgtcctctacccttccca

SEQ ID NO: 4544143 - DNA, 25 bp, Homo sapien
tctacccttcccaagaaggagcagc

SEQ ID NO: 4544144 - DNA, 25 bp, Homo sapien
ctgaatattctgagtgctgggcttg

SEQ ID NO: 4544145 - DNA, 25 bp, Homo sapien
caagaaggagcagctctgaatattc

SEQ ID NO: 4544146 - DNA, 25 bp, Homo sapien
tctcagggaactccggatgtgactc

SEQ ID NO: 4544147 - DNA, 25 bp, Homo sapien
gagaatcttatttgggaaagacacc

SEQ ID NO: 4544148 - DNA, 25 bp, Homo sapien
gcattagactaggttctgggaccct

SEQ ID NO: 4544149 - DNA, 25 bp, Homo sapien
cactggtctgggttatgtcttctca

SEQ ID NO: 4544150 - DNA, 25 bp, Homo sapien
gtgcctcaattgctaccaccaatgg

SEQ ID NO: 4544151 - DNA, 25 bp, Homo sapien
caagccaaaggagtggtgcctcaat

SEQ ID NO: 4544152 - DNA, 25 bp, Homo sapien
aaggagtggtgcctcaattgctacc

SEQ ID NO: 4544153 - DNA, 25 bp, Homo sapien
gtggtgcctcaattgctaccaccaa

SEQ ID NO: 4544154 - DNA, 25 bp, Homo sapien
gatttgtagtgaggaaattcactgg

SEQ ID NO: 4544155 - DNA, 25 bp, Homo sapien
atttgtagtgaggaaattcactggt

SEQ ID NO: 4544156 - DNA, 25 bp, Homo sapien
tgatttgtagtgaggaaattcactg

SEQ ID NO: 4544157 - DNA, 25 bp, Homo sapien
cactcagtattccaagagatctccc

SEQ ID NO: 4544158 - DNA, 25 bp, Homo sapien
agcactcagtattccaagagatctc

SEQ ID NO: 4544159 - DNA, 25 bp, Homo sapien
gcactcagtattccaagagatctcc

SEQ ID NO: 4544160 - DNA, 25 bp, Homo sapien
actcagtattccaagagatctccca

SEQ ID NO: 4544161 - DNA, 25 bp, Homo sapien
gaaattatctttaataaagctggat

SEQ ID NO: 4544162 - DNA, 25 bp, Homo sapien
tggaaattatctttaataaagctgg

SEQ ID NO: 4544163 - DNA, 25 bp, Homo sapien
aaataccatgattctttatggaaat

SEQ ID NO: 4544164 - DNA, 25 bp, Homo sapien
ataccatgattctttatggaaatta

SEQ ID NO: 4544165 - DNA, 25 bp, Homo sapien
tacacttatagttatttcctgatta

SEQ ID NO: 4544166 - DNA, 25 bp, Homo sapien
aaagaatggctactcatgggcagag

SEQ ID NO: 4544167 - DNA, 25 bp, Homo sapien
agcagcggcttaggctgctcactga

SEQ ID NO: 4544168 - DNA, 25 bp, Homo sapien
aatggctactcatgggcagagcagc

SEQ ID NO: 4544169 - DNA, 25 bp, Homo sapien
caaggtgtcatcagagcattagaga

SEQ ID NO: 4544170 - DNA, 25 bp, Homo sapien
gaagtccaacattgatcacatgagg

SEQ ID NO: 4544171 - DNA, 25 bp, Homo sapien
ttcaggttgaagcataggcaagagc

SEQ ID NO: 4544172 - DNA, 25 bp, Homo sapien
gaatgtcttgaagggtataccgtac

SEQ ID NO: 4544173 - DNA, 25 bp, Homo sapien
taattgccctgagcctgttcgttgt

SEQ ID NO: 4544174 - DNA, 25 bp, Homo sapien
gatagtagagatgttgtaattgccc

SEQ ID NO: 4544175 - DNA, 25 bp, Homo sapien
gatttaggccagagaaataaactga

SEQ ID NO: 4544176 - DNA, 25 bp, Homo sapien
tgtagggtatgccagactcagtgct

SEQ ID NO: 4544177 - DNA, 25 bp, Homo sapien
tctaagtggttaaaaattagtatga

SEQ ID NO: 4544178 - DNA, 25 bp, Homo sapien
tagcttcttaatgaatatggattta

SEQ ID NO: 4544179 - DNA, 25 bp, Homo sapien
tgaatatggatttaaaactctccag

SEQ ID NO: 4544180 - DNA, 25 bp, Homo sapien
ctggaaagtggtttgattattgtga

SEQ ID NO: 4544181 - DNA, 25 bp, Homo sapien
tacatagggactgtacagagcctgt

SEQ ID NO: 4544182 - DNA, 25 bp, Homo sapien
ggtaagatggaatcactacctctga

SEQ ID NO: 4544183 - DNA, 25 bp, Homo sapien
ggtctccaatctccattacataggg

SEQ ID NO: 4544184 - DNA, 25 bp, Homo sapien
cacaaaagaggcagcgtgatacctt

SEQ ID NO: 4544185 - DNA, 25 bp, Homo sapien
cagtgcacctgaaaagttgagaacc

SEQ ID NO: 4544186 - DNA, 25 bp, Homo sapien
gggtttcccacgctaggctgcatag

SEQ ID NO: 4544187 - DNA, 25 bp, Homo sapien
tgaaccccagtagacaggcaataga

SEQ ID NO: 4544188 - DNA, 25 bp, Homo sapien
cataccttactagactgtgatggct

SEQ ID NO: 4544189 - DNA, 25 bp, Homo sapien
gacttgggcgctagacttttcttgg

SEQ ID NO: 4544190 - DNA, 25 bp, Homo sapien
tcaaaatgccttggatcctgagcca

SEQ ID NO: 4544191 - DNA, 25 bp, Homo sapien
ggacaaagtaatcagctccctcaaa

SEQ ID NO: 4544192 - DNA, 25 bp, Homo sapien
cctgagccaatttgcctgtatgggc

SEQ ID NO: 4544193 - DNA, 25 bp, Homo sapien
tttgctgcgtgtttccttcatgtcg

SEQ ID NO: 4544194 - DNA, 25 bp, Homo sapien
ttgctgcgtgtttccttcatgtcgt

SEQ ID NO: 4544195 - DNA, 25 bp, Homo sapien
tgctgcgtgtttccttcatgtcgtc

SEQ ID NO: 4544196 - DNA, 25 bp, Homo sapien
gctgcgtgtttccttcatgtcgtcc

SEQ ID NO: 4544197 - DNA, 25 bp, Homo sapien
taagggctccattgctgtactgaga

SEQ ID NO: 4544198 - DNA, 25 bp, Homo sapien
ttaaggccggcagggatactaagac

SEQ ID NO: 4544199 - DNA, 25 bp, Homo sapien
tgttattaaagacgcagactggcat

SEQ ID NO: 4544200 - DNA, 25 bp, Homo sapien
gctcctagcaaatagttaaggccgg

SEQ ID NO: 4544201 - DNA, 25 bp, Homo sapien
ttctcccagccatcgaaatgcactg

SEQ ID NO: 4544202 - DNA, 25 bp, Homo sapien
taggagtggcggttacaatctgagc

SEQ ID NO: 4544203 - DNA, 25 bp, Homo sapien
gagaatatgtcctatgagaaggcac

SEQ ID NO: 4544204 - DNA, 25 bp, Homo sapien
gaagggcaccatcactaagaagttc

SEQ ID NO: 4544205 - DNA, 25 bp, Homo sapien
cacgtgtctgcaaatcttcccagag

SEQ ID NO: 4544206 - DNA, 25 bp, Homo sapien
caggaaagacagtactggaggatca

SEQ ID NO: 4544207 - DNA, 25 bp, Homo sapien
gggtgtgttcctcttagtgctagct

SEQ ID NO: 4544208 - DNA, 25 bp, Homo sapien
ccctttcttgtgataaggatccctt

SEQ ID NO: 4544209 - DNA, 25 bp, Homo sapien
tctgtgaaatgagcgcgggaatacc

SEQ ID NO: 4544210 - DNA, 25 bp, Homo sapien
agcgcacaccaaagctgaacctcgg

SEQ ID NO: 4544211 - DNA, 25 bp, Homo sapien
ttgaaggaagggctccagcgcacac

SEQ ID NO: 4544212 - DNA, 25 bp, Homo sapien
tgtgtgaacccggtgagaagcccag

SEQ ID NO: 4544213 - DNA, 25 bp, Homo sapien
ttgacacagtcatccaccgacactg

SEQ ID NO: 4544214 - DNA, 25 bp, Homo sapien
ctgttgactgtcactcggcaccgtc

SEQ ID NO: 4544215 - DNA, 25 bp, Homo sapien
gagcgggagtgggtgctcggcgtcc

SEQ ID NO: 4544216 - DNA, 25 bp, Homo sapien
tccaccgacactgcgcgtgggacag

SEQ ID NO: 4544217 - DNA, 25 bp, Homo sapien
ggcttctgggcttgacacttccatt

SEQ ID NO: 4544218 - DNA, 25 bp, Homo sapien
gcttctgggcttgacacttccattg

SEQ ID NO: 4544219 - DNA, 25 bp, Homo sapien
taatccgatgtgttgtaacacagga

SEQ ID NO: 4544220 - DNA, 25 bp, Homo sapien
gcctgtgtctagctttgttaatccg

SEQ ID NO: 4544221 - DNA, 25 bp, Homo sapien
gaaaccggattcctttgcagaacag

SEQ ID NO: 4544222 - DNA, 25 bp, Homo sapien
ctggtgttctgccagtgaaaatgaa

SEQ ID NO: 4544223 - DNA, 25 bp, Homo sapien
ttctcgttaagattgtgtggctggc

SEQ ID NO: 4544224 - DNA, 25 bp, Homo sapien
tttttgccttctcgttaagattgtg

SEQ ID NO: 4544225 - DNA, 25 bp, Homo sapien
ccttctcgttaagattgtgtggctg

SEQ ID NO: 4544226 - DNA, 25 bp, Homo sapien
tgccttctcgttaagattgtgtggc

SEQ ID NO: 4544227 - DNA, 25 bp, Homo sapien
tgctgacagcactcgacggggagtc

SEQ ID NO: 4544228 - DNA, 25 bp, Homo sapien
aggaaatcttgggtgtcattccatg

SEQ ID NO: 4544229 - DNA, 25 bp, Homo sapien
tcttgggtgtcattccatgtaaaca

SEQ ID NO: 4544230 - DNA, 25 bp, Homo sapien
gacagcactcgacggggagtcagca

SEQ ID NO: 4544231 - DNA, 25 bp, Homo sapien
tcatatcattccttctatttggcat

SEQ ID NO: 4544232 - DNA, 25 bp, Homo sapien
ttttccagtcctcatgacgtcttct

SEQ ID NO: 4544233 - DNA, 25 bp, Homo sapien
tttcttccttgttgatacttgagct

SEQ ID NO: 4544234 - DNA, 25 bp, Homo sapien
ctctgattgccccagacccagtgat

SEQ ID NO: 4544235 - DNA, 25 bp, Homo sapien
gcaccaataatgctgtaggtggcgc

SEQ ID NO: 4544236 - DNA, 25 bp, Homo sapien
tgtggccagcgtgtctcgaagattt

SEQ ID NO: 4544237 - DNA, 25 bp, Homo sapien
gagggcgatggtgaattgcaccaat

SEQ ID NO: 4544238 - DNA, 25 bp, Homo sapien
tgtgtacttgatgcatgtggccagc

SEQ ID NO: 4544239 - DNA, 25 bp, Homo sapien
aagcagaattaagtggcggttgatc

SEQ ID NO: 4544240 - DNA, 25 bp, Homo sapien
caagagcaatttggatcctgggtta

SEQ ID NO: 4544241 - DNA, 25 bp, Homo sapien
tcttacaaagtagggtctcagtggg

SEQ ID NO: 4544242 - DNA, 25 bp, Homo sapien
cggttgatcagaagtggttgatctt

SEQ ID NO: 4544243 - DNA, 25 bp, Homo sapien
ggctcatgctcacacaatacatgag

SEQ ID NO: 4544244 - DNA, 25 bp, Homo sapien
caatacatgagggtgtttgaaggca

SEQ ID NO: 4544245 - DNA, 25 bp, Homo sapien
gaaggaagggtatattggctacaat

SEQ ID NO: 4544246 - DNA, 25 bp, Homo sapien
tacaatgatgggagcaaagtttgga

SEQ ID NO: 4544247 - DNA, 25 bp, Homo sapien
ccatttccgtgaaggataaggaatc

SEQ ID NO: 4544248 - DNA, 25 bp, Homo sapien
cgtgaaggataaggaatctgggcca

SEQ ID NO: 4544249 - DNA, 25 bp, Homo sapien
caggatatctcagcatcctgtgcac

SEQ ID NO: 4544250 - DNA, 25 bp, Homo sapien
tgtgcaccatccagcatccatttcc

SEQ ID NO: 4544251 - DNA, 25 bp, Homo sapien
actatgatagccaacaaccttcaca

SEQ ID NO: 4544252 - DNA, 25 bp, Homo sapien
caacaaccttcacagcatcagtcat

SEQ ID NO: 4544253 - DNA, 25 bp, Homo sapien
tatgatagccaacaaccttcacagc

SEQ ID NO: 4544254 - DNA, 25 bp, Homo sapien
tagccaacaaccttcacagcatcag

SEQ ID NO: 4544255 - DNA, 25 bp, Homo sapien
cctaagggcagtctgggctgactgg

SEQ ID NO: 4544256 - DNA, 25 bp, Homo sapien
tctgggctgactggggatgcaccgc

SEQ ID NO: 4544257 - DNA, 25 bp, Homo sapien
cagtctgggctgactggggatgcac

SEQ ID NO: 4544258 - DNA, 25 bp, Homo sapien
ggcagtctgggctgactggggatgc

SEQ ID NO: 4544259 - DNA, 25 bp, Homo sapien
ttaaaggataggacgccagtttctg

SEQ ID NO: 4544260 - DNA, 25 bp, Homo sapien
gactttattattggcagtaggttta

SEQ ID NO: 4544261 - DNA, 25 bp, Homo sapien
gagcctcaggacgatcttggcagac

SEQ ID NO: 4544262 - DNA, 25 bp, Homo sapien
gaatcacagagtgtgactttattat

SEQ ID NO: 4544263 - DNA, 25 bp, Homo sapien
ccccagctggcgatttagaaagaca

SEQ ID NO: 4544264 - DNA, 25 bp, Homo sapien
gtaaggcaagtaggagtcccagcac

SEQ ID NO: 4544265 - DNA, 25 bp, Homo sapien
tcaacggatgtgagttcctgagcac

SEQ ID NO: 4544266 - DNA, 25 bp, Homo sapien
cagacaacatggacgctggtagacc

SEQ ID NO: 4544267 - DNA, 25 bp, Homo sapien
ttaatcaaagcttcgcagaccatca

SEQ ID NO: 4544268 - DNA, 25 bp, Homo sapien
tcaaagcttcgcagaccatcagtgt

SEQ ID NO: 4544269 - DNA, 25 bp, Homo sapien
tcgcagaccatcagtgtctgaagaa

SEQ ID NO: 4544270 - DNA, 25 bp, Homo sapien
aagcttcgcagaccatcagtgtctg

SEQ ID NO: 4544271 - DNA, 25 bp, Homo sapien
tctgccatctaattgtgggtgctct

SEQ ID NO: 4544272 - DNA, 25 bp, Homo sapien
ccatctaattgtgggtgctctgctt

SEQ ID NO: 4544273 - DNA, 25 bp, Homo sapien
tgccatctaattgtgggtgctctgc

SEQ ID NO: 4544274 - DNA, 25 bp, Homo sapien
tctaattgtgggtgctctgcttctc

SEQ ID NO: 4544275 - DNA, 25 bp, Homo sapien
cagggtcttgcatggcagaatggct

SEQ ID NO: 4544276 - DNA, 25 bp, Homo sapien
ataaagccaatgaaacaaatgccat

SEQ ID NO: 4544277 - DNA, 25 bp, Homo sapien
cttcccatggagatggtccatttga

SEQ ID NO: 4544278 - DNA, 25 bp, Homo sapien
tggtccatttgagccctcagggtct

SEQ ID NO: 4544279 - DNA, 25 bp, Homo sapien
ctggtaaacggatttacatgcagca

SEQ ID NO: 4544280 - DNA, 25 bp, Homo sapien
caaattccacccatatgactgcact

SEQ ID NO: 4544281 - DNA, 25 bp, Homo sapien
aattccacccatatgactgcacttg

SEQ ID NO: 4544282 - DNA, 25 bp, Homo sapien
tcctcttctctgtctaaccaaattc

SEQ ID NO: 4544283 - DNA, 25 bp, Homo sapien
tccacccatatgactgcacttgagt

SEQ ID NO: 4544284 - DNA, 25 bp, Homo sapien
gattcatgtgtctgatacttggtac

SEQ ID NO: 4544285 - DNA, 25 bp, Homo sapien
cattagagatggttgagctggcgcc

SEQ ID NO: 4544286 - DNA, 25 bp, Homo sapien
gccacatggacagctgctagtgatc

SEQ ID NO: 4544287 - DNA, 25 bp, Homo sapien
tcccagtaggactgctcagtagttg

SEQ ID NO: 4544288 - DNA, 25 bp, Homo sapien
taatctgtgggcctagtggatccac

SEQ ID NO: 4544289 - DNA, 25 bp, Homo sapien
tctccaggtatcagctcaggtcttc

SEQ ID NO: 4544290 - DNA, 25 bp, Homo sapien
gggttcgtggtaacactccagatct

SEQ ID NO: 4544291 - DNA, 25 bp, Homo sapien
tggatccactataggccagactttg

SEQ ID NO: 4544292 - DNA, 25 bp, Homo sapien
taaaacactcaaactgcaaatccgt

SEQ ID NO: 4544293 - DNA, 25 bp, Homo sapien
gcaggcttggtgtcagatttaataa

SEQ ID NO: 4544294 - DNA, 25 bp, Homo sapien
gcaaatccgttaaagataccgctag

SEQ ID NO: 4544295 - DNA, 25 bp, Homo sapien
accgctagttcctctctttcacaag

SEQ ID NO: 4544296 - DNA, 25 bp, Homo sapien
tcatggttaactgctctgcacttgg

SEQ ID NO: 4544297 - DNA, 25 bp, Homo sapien
gacactgaagagtccctcatggtta

SEQ ID NO: 4544298 - DNA, 25 bp, Homo sapien
tctgcatgtgaaacgcgtcctctct

SEQ ID NO: 4544299 - DNA, 25 bp, Homo sapien
tcaggagtttgcattgagacacagt

SEQ ID NO: 4544300 - DNA, 25 bp, Homo sapien
tgtctgattgggtgtctggttccca

SEQ ID NO: 4544301 - DNA, 25 bp, Homo sapien
tctggagatgtactggcagcggtca

SEQ ID NO: 4544302 - DNA, 25 bp, Homo sapien
cacattgcacattgatgggtgactc

SEQ ID NO: 4544303 - DNA, 25 bp, Homo sapien
cccagaactgccacattgcacattg

SEQ ID NO: 4544304 - DNA, 25 bp, Homo sapien
gctgtgagaaataatactcccatca

SEQ ID NO: 4544305 - DNA, 25 bp, Homo sapien
ccagcttttccagccggggaaggtg

SEQ ID NO: 4544306 - DNA, 25 bp, Homo sapien
tccgcttattaagtgtggcagggcc

SEQ ID NO: 4544307 - DNA, 25 bp, Homo sapien
tcccatcaggtgcactggaaaacca

SEQ ID NO: 4544308 - DNA, 25 bp, Homo sapien
ttccttggcggttgacaccagcatt

SEQ ID NO: 4544309 - DNA, 25 bp, Homo sapien
ttccatttccttggcggttgacacc

SEQ ID NO: 4544310 - DNA, 25 bp, Homo sapien
tgagcatcctcatacaaatcccatt

SEQ ID NO: 4544311 - DNA, 25 bp, Homo sapien
agtctgcccttccttatctattcca

SEQ ID NO: 4544312 - DNA, 25 bp, Homo sapien
cgcctcgctcaacaaacaaaaaggt

SEQ ID NO: 4544313 - DNA, 25 bp, Homo sapien
aaggaggccattttgtgtgagctgt

SEQ ID NO: 4544314 - DNA, 25 bp, Homo sapien
aggaggaaggaggccattttgtgtg

SEQ ID NO: 4544315 - DNA, 25 bp, Homo sapien
ggaaggaggccattttgtgtgagct

SEQ ID NO: 4544316 - DNA, 25 bp, Homo sapien
tgagctgtgttgctggtggtggacc

SEQ ID NO: 4544317 - DNA, 25 bp, Homo sapien
gtctgtatgaaccacagtatagctc

SEQ ID NO: 4544318 - DNA, 25 bp, Homo sapien
tcagtagcagcaccacatgtactct

SEQ ID NO: 4544319 - DNA, 25 bp, Homo sapien
catgactgagcctctggtcagtagc

SEQ ID NO: 4544320 - DNA, 25 bp, Homo sapien
tcccacgtctgtatgaaccacagta

SEQ ID NO: 4544321 - DNA, 25 bp, Homo sapien
gaagaaatgtgctatcttcgcaact

SEQ ID NO: 4544322 - DNA, 25 bp, Homo sapien
gtgctatcttcgcaactggagggtc

SEQ ID NO: 4544323 - DNA, 25 bp, Homo sapien
ctatcttcgcaactggagggtctgg

SEQ ID NO: 4544324 - DNA, 25 bp, Homo sapien
gaaatgtgctatcttcgcaactgga

SEQ ID NO: 4544325 - DNA, 25 bp, Homo sapien
ttttatcatcttttgtataggacac

SEQ ID NO: 4544326 - DNA, 25 bp, Homo sapien
tgtggaggccttatctctggatgct

SEQ ID NO: 4544327 - DNA, 25 bp, Homo sapien
gctggagacttgaggagacttattg

SEQ ID NO: 4544328 - DNA, 25 bp, Homo sapien
ctggatgctggagacttgaggagac

SEQ ID NO: 4544329 - DNA, 25 bp, Homo sapien
gaggagacttattggttctgagtga

SEQ ID NO: 4544330 - DNA, 25 bp, Homo sapien
tctagatcatgggtgagtagtttaa

SEQ ID NO: 4544331 - DNA, 25 bp, Homo sapien
catgttgggcatctatattgctgtc

SEQ ID NO: 4544332 - DNA, 25 bp, Homo sapien
gaagtgggcatgttgggcatctata

SEQ ID NO: 4544333 - DNA, 25 bp, Homo sapien
tttgcaaagaaaggtctagatcatg

SEQ ID NO: 4544334 - DNA, 25 bp, Homo sapien
caaggaaccaaagcagataaagggc

SEQ ID NO: 4544335 - DNA, 25 bp, Homo sapien
aaagcagataaagggcctactttgg

SEQ ID NO: 4544336 - DNA, 25 bp, Homo sapien
aaattccaaggaaccaaagcagata

SEQ ID NO: 4544337 - DNA, 25 bp, Homo sapien
ggaaccaaagcagataaagggccta

SEQ ID NO: 4544338 - DNA, 25 bp, Homo sapien
tgcctctatcctcacatttatcctt

SEQ ID NO: 4544339 - DNA, 25 bp, Homo sapien
tcttctctgtggtcgcttgtttcct

SEQ ID NO: 4544340 - DNA, 25 bp, Homo sapien
tctgtggtcgcttgtttcctctgtt

SEQ ID NO: 4544341 - DNA, 25 bp, Homo sapien
cactgcctctatcctcacatttatc

SEQ ID NO: 4544342 - DNA, 25 bp, Homo sapien
ctagatgcactactggcaaggccat

SEQ ID NO: 4544343 - DNA, 25 bp, Homo sapien
gctttagctagatgcactactggca

SEQ ID NO: 4544344 - DNA, 25 bp, Homo sapien
tcctggtgctttagctagatgcact

SEQ ID NO: 4544345 - DNA, 25 bp, Homo sapien
tagctagatgcactactggcaaggc

SEQ ID NO: 4544346 - DNA, 25 bp, Homo sapien
tagctgatgctacatgagtgagtgc

SEQ ID NO: 4544347 - DNA, 25 bp, Homo sapien
tgtcccaacattctgacgccatgct

SEQ ID NO: 4544348 - DNA, 25 bp, Homo sapien
ggcacgattgtgctagctaggccat

SEQ ID NO: 4544349 - DNA, 25 bp, Homo sapien
gctaggccatccactggtctcagag

SEQ ID NO: 4544350 - DNA, 25 bp, Homo sapien
tcataacctggttcagcttgtccca

SEQ ID NO: 4544351 - DNA, 25 bp, Homo sapien
cataacctggttcagcttgtcccag

SEQ ID NO: 4544352 - DNA, 25 bp, Homo sapien
aacctggttcagcttgtcccaggct

SEQ ID NO: 4544353 - DNA, 25 bp, Homo sapien
tctgtcataacctggttcagcttgt

SEQ ID NO: 4544354 - DNA, 25 bp, Homo sapien
cagggatcaccacacctttcttcat

SEQ ID NO: 4544355 - DNA, 25 bp, Homo sapien
ttctgagcttaagaggcactgcatt

SEQ ID NO: 4544356 - DNA, 25 bp, Homo sapien
gggccacacgacatccctaaatgtg

SEQ ID NO: 4544357 - DNA, 25 bp, Homo sapien
ggcactgcatttagccaattcctga

SEQ ID NO: 4544358 - DNA, 25 bp, Homo sapien
gctcaataaccttcttattttttga

SEQ ID NO: 4544359 - DNA, 25 bp, Homo sapien
ggaaggaaagtagatcctacacaat

SEQ ID NO: 4544360 - DNA, 25 bp, Homo sapien
ttccagctcaataaccttcttattt

SEQ ID NO: 4544361 - DNA, 25 bp, Homo sapien
tcctacacaataaagttaattatca

SEQ ID NO: 4544362 - DNA, 25 bp, Homo sapien
tgaagagcagatgagggtcacactc

SEQ ID NO: 4544363 - DNA, 25 bp, Homo sapien
tctgggtactgacaccatgggctaa

SEQ ID NO: 4544364 - DNA, 25 bp, Homo sapien
ggagctatgaagcacggaccagcat

SEQ ID NO: 4544365 - DNA, 25 bp, Homo sapien
taactgggagctagacctctgggta

SEQ ID NO: 4544366 - DNA, 25 bp, Homo sapien
ctggtttgggtcctgtgggatatcc

SEQ ID NO: 4544367 - DNA, 25 bp, Homo sapien
ggatatcctcaatcagccctcctgt

SEQ ID NO: 4544368 - DNA, 25 bp, Homo sapien
tcttcaggtacttttaccacagggc

SEQ ID NO: 4544369 - DNA, 25 bp, Homo sapien
cctgttcctgtttcagggtcctcgt

SEQ ID NO: 4544370 - DNA, 25 bp, Homo sapien
accaatagctgctcagggagtcaga

SEQ ID NO: 4544371 - DNA, 25 bp, Homo sapien
cctctggtccttaaggagagtgtta

SEQ ID NO: 4544372 - DNA, 25 bp, Homo sapien
ctgaatccaggagttgaaacgcaac

SEQ ID NO: 4544373 - DNA, 25 bp, Homo sapien
tcatgttctgcactatggcagttca

SEQ ID NO: 4544374 - DNA, 25 bp, Homo sapien
ctgtctgccatgtgtgatatgattt

SEQ ID NO: 4544375 - DNA, 25 bp, Homo sapien
ctcttagatcctgtctgccatgtgt

SEQ ID NO: 4544376 - DNA, 25 bp, Homo sapien
tcttagatcctgtctgccatgtgtg

SEQ ID NO: 4544377 - DNA, 25 bp, Homo sapien
catgtgtgatatgatttccttctca

SEQ ID NO: 4544378 - DNA, 25 bp, Homo sapien
ggttgaatgattcacaaaacattat

SEQ ID NO: 4544379 - DNA, 25 bp, Homo sapien
aggttgaatgattcacaaaacatta

SEQ ID NO: 4544380 - DNA, 25 bp, Homo sapien
caaggttgaatgattcacaaaacat

SEQ ID NO: 4544381 - DNA, 25 bp, Homo sapien
ttcaaggttgaatgattcacaaaac

SEQ ID NO: 4544382 - DNA, 25 bp, Homo sapien
ggattgaacaactcctcttcagtca

SEQ ID NO: 4544383 - DNA, 25 bp, Homo sapien
gaaggccgctaaggaagactcactg

SEQ ID NO: 4544384 - DNA, 25 bp, Homo sapien
cttctggaatacttggagagctgtg

SEQ ID NO: 4544385 - DNA, 25 bp, Homo sapien
tgacttggatttgagagtgtgaaac

SEQ ID NO: 4544386 - DNA, 25 bp, Homo sapien
gtgttgtttatctcctggcccttct

SEQ ID NO: 4544387 - DNA, 25 bp, Homo sapien
tgtgtgttgtttatctcctggccct

SEQ ID NO: 4544388 - DNA, 25 bp, Homo sapien
ttcttcctcaagctgcgctgcctcc

SEQ ID NO: 4544389 - DNA, 25 bp, Homo sapien
cttcttcctcaagctgcgctgcctc

SEQ ID NO: 4544390 - DNA, 25 bp, Homo sapien
gaggacagcagtggcatgcaggatg

SEQ ID NO: 4544391 - DNA, 25 bp, Homo sapien
caaggaggacagcagtggcatgcag

SEQ ID NO: 4544392 - DNA, 25 bp, Homo sapien
aaggaggacagcagtggcatgcagg

SEQ ID NO: 4544393 - DNA, 25 bp, Homo sapien
gtggcatgcaggatgtctgcagcat

SEQ ID NO: 4544394 - DNA, 25 bp, Homo sapien
gggtcaatcactttcctagaaattg

SEQ ID NO: 4544395 - DNA, 25 bp, Homo sapien
gcagggaaaaatgggtcaatcactt

SEQ ID NO: 4544396 - DNA, 25 bp, Homo sapien
ttgccctagcagattgtgggcctgg

SEQ ID NO: 4544397 - DNA, 25 bp, Homo sapien
caagggcagtatagtagtatttgaa

SEQ ID NO: 4544398 - DNA, 25 bp, Homo sapien
ggcattgctggtgacataccactta

SEQ ID NO: 4544399 - DNA, 25 bp, Homo sapien
gcttcatacaactgaaattctacat

SEQ ID NO: 4544400 - DNA, 25 bp, Homo sapien
tccagagcagttgatggcattgctg

SEQ ID NO: 4544401 - DNA, 25 bp, Homo sapien
taggcccacttctttgcttcataca

SEQ ID NO: 4544402 - DNA, 25 bp, Homo sapien
tacgcccaatgattcagaaacatcc

SEQ ID NO: 4544403 - DNA, 25 bp, Homo sapien
aacttgttctgctctggtacgccca

SEQ ID NO: 4544404 - DNA, 25 bp, Homo sapien
tgttctgctctggtacgcccaatga

SEQ ID NO: 4544405 - DNA, 25 bp, Homo sapien
ctctggtacgcccaatgattcagaa

SEQ ID NO: 4544406 - DNA, 25 bp, Homo sapien
ttccgtaactttttgcattatattg

SEQ ID NO: 4544407 - DNA, 25 bp, Homo sapien
ccgtaactttttgcattatattgtc

SEQ ID NO: 4544408 - DNA, 25 bp, Homo sapien
gtaactttttgcattatattgtcca

SEQ ID NO: 4544409 - DNA, 25 bp, Homo sapien
cgtaactttttgcattatattgtcc

SEQ ID NO: 4544410 - DNA, 25 bp, Homo sapien
caaacatttgcttcgactatggcag

SEQ ID NO: 4544411 - DNA, 25 bp, Homo sapien
ccagtgcgtcaaacatttgcttcga

SEQ ID NO: 4544412 - DNA, 25 bp, Homo sapien
gcagttgttaatgttgtaaagcagc

SEQ ID NO: 4544413 - DNA, 25 bp, Homo sapien
gtaaagcagcttataagctcctaat

SEQ ID NO: 4544414 - DNA, 25 bp, Homo sapien
tggcagccagcattgtatcacacat

SEQ ID NO: 4544415 - DNA, 25 bp, Homo sapien
cctctgccattacattcaaatctat

SEQ ID NO: 4544416 - DNA, 25 bp, Homo sapien
tctatacttggcagccagcattgta

SEQ ID NO: 4544417 - DNA, 25 bp, Homo sapien
tctgccattacattcaaatctatac

SEQ ID NO: 4544418 - DNA, 25 bp, Homo sapien
cttggaaaattaggatgatgtagtg

SEQ ID NO: 4544419 - DNA, 25 bp, Homo sapien
cacaatctgaacaggcaactctgcc

SEQ ID NO: 4544420 - DNA, 25 bp, Homo sapien
gttttggcacaacatcacaatctga

SEQ ID NO: 4544421 - DNA, 25 bp, Homo sapien
aatgtcaaggttgtatcgttttggc

SEQ ID NO: 4544422 - DNA, 25 bp, Homo sapien
gaaccctgagtactcattgactgct

SEQ ID NO: 4544423 - DNA, 25 bp, Homo sapien
gcaacaggtagagagctgtggacat

SEQ ID NO: 4544424 - DNA, 25 bp, Homo sapien
atgggcaacaggtagagagctgtgg

SEQ ID NO: 4544425 - DNA, 25 bp, Homo sapien
tactcattgactgctattttaggat

SEQ ID NO: 4544426 - DNA, 25 bp, Homo sapien
aagttttctgattcttccaggctga

SEQ ID NO: 4544427 - DNA, 25 bp, Homo sapien
catcatgtggccaggatgtacttct

SEQ ID NO: 4544428 - DNA, 25 bp, Homo sapien
aataattgactccacagctgaagaa

SEQ ID NO: 4544429 - DNA, 25 bp, Homo sapien
tgtacttctcaaaataattgactcc

SEQ ID NO: 4544430 - DNA, 25 bp, Homo sapien
ccttgttcaccatcatgatggtcat

SEQ ID NO: 4544431 - DNA, 25 bp, Homo sapien
ttccttgttcaccatcatgatggtc

SEQ ID NO: 4544432 - DNA, 25 bp, Homo sapien
ttttccttgttcaccatcatgatgg

SEQ ID NO: 4544433 - DNA, 25 bp, Homo sapien
ccattttccttgttcaccatcatga

SEQ ID NO: 4544434 - DNA, 25 bp, Homo sapien
taatatgacggggtaacattcagcc

SEQ ID NO: 4544435 - DNA, 25 bp, Homo sapien
aactagcagaactaggtaatatgac

SEQ ID NO: 4544436 - DNA, 25 bp, Homo sapien
aaaggatgaacaagcctagaactag

SEQ ID NO: 4544437 - DNA, 25 bp, Homo sapien
gtccttcagttcataaaggatgaac

SEQ ID NO: 4544438 - DNA, 25 bp, Homo sapien
tctggtatcagtccagcttcacagc

SEQ ID NO: 4544439 - DNA, 25 bp, Homo sapien
tctttgagcttctggtatcagtcca

SEQ ID NO: 4544440 - DNA, 25 bp, Homo sapien
tgagcttctggtatcagtccagctt

SEQ ID NO: 4544441 - DNA, 25 bp, Homo sapien
tgtctttgagcttctggtatcagtc

SEQ ID NO: 4544442 - DNA, 25 bp, Homo sapien
gaatctgaaggctcctacgcacttt

SEQ ID NO: 4544443 - DNA, 25 bp, Homo sapien
tccactttgcggtataatattgcaa

SEQ ID NO: 4544444 - DNA, 25 bp, Homo sapien
tacagtgttcttcatgtcatattcc

SEQ ID NO: 4544445 - DNA, 25 bp, Homo sapien
tgagcttcataaccagccagaaggg

SEQ ID NO: 4544446 - DNA, 25 bp, Homo sapien
cctgaaagctaaatgtgcaccttca

SEQ ID NO: 4544447 - DNA, 25 bp, Homo sapien
taaatgtgcaccttcagaaaactgc

SEQ ID NO: 4544448 - DNA, 25 bp, Homo sapien
gaaagctaaatgtgcaccttcagaa

SEQ ID NO: 4544449 - DNA, 25 bp, Homo sapien
gctaaatgtgcaccttcagaaaact

SEQ ID NO: 4544450 - DNA, 25 bp, Homo sapien
ccttgcagtcgccttctcttccttt

SEQ ID NO: 4544451 - DNA, 25 bp, Homo sapien
catccttgcagtcgccttctcttcc

SEQ ID NO: 4544452 - DNA, 25 bp, Homo sapien
tcatccttgcagtcgccttctcttc

SEQ ID NO: 4544453 - DNA, 25 bp, Homo sapien
tctcatccttgcagtcgccttctct

SEQ ID NO: 4544454 - DNA, 25 bp, Homo sapien
gcagacaatctctctgttactagct

SEQ ID NO: 4544455 - DNA, 25 bp, Homo sapien
taatgcctagtgatgaagtaggaca

SEQ ID NO: 4544456 - DNA, 25 bp, Homo sapien
cccaagatattgtagtaatgcctag

SEQ ID NO: 4544457 - DNA, 25 bp, Homo sapien
tatcctgatgcaggcttcaggcaga

SEQ ID NO: 4544458 - DNA, 25 bp, Homo sapien
aatggcattagagtgaaagtgtatc

SEQ ID NO: 4544459 - DNA, 25 bp, Homo sapien
gcaatatcacctttcaggactaaca

SEQ ID NO: 4544460 - DNA, 25 bp, Homo sapien
ggactaacagcactgaatgattacg

SEQ ID NO: 4544461 - DNA, 25 bp, Homo sapien
gaatgattacgcatatcatttggta

SEQ ID NO: 4544462 - DNA, 25 bp, Homo sapien
gagtggccttcacaaagcgagagct

SEQ ID NO: 4544463 - DNA, 25 bp, Homo sapien
ggaaagtgactgagaaactcgaaac

SEQ ID NO: 4544464 - DNA, 25 bp, Homo sapien
gaaactcgaaactcagagagagtgg

SEQ ID NO: 4544465 - DNA, 25 bp, Homo sapien
gagcttcgctggctgttggatataa

SEQ ID NO: 4544466 - DNA, 25 bp, Homo sapien
taggatgtagagagctctttgagtt

SEQ ID NO: 4544467 - DNA, 25 bp, Homo sapien
cggttgtaggatgtagagagctctt

SEQ ID NO: 4544468 - DNA, 25 bp, Homo sapien
caaagttgcggttgtaggatgtaga

SEQ ID NO: 4544469 - DNA, 25 bp, Homo sapien
ctacacaaagttgcggttgtaggat

SEQ ID NO: 4544470 - DNA, 25 bp, Homo sapien
ctgccttcaaagtggtccctttgct

SEQ ID NO: 4544471 - DNA, 25 bp, Homo sapien
tctgccttcaaagtggtccctttgc

SEQ ID NO: 4544472 - DNA, 25 bp, Homo sapien
catggaatagtcacacaggcacatc

SEQ ID NO: 4544473 - DNA, 25 bp, Homo sapien
gccctagaagcttgtctcttttgaa

SEQ ID NO: 4544474 - DNA, 25 bp, Homo sapien
tagtcacacaggcacatcaatttca

SEQ ID NO: 4544475 - DNA, 25 bp, Homo sapien
caatttcagccctagaagcttgtct

SEQ ID NO: 4544476 - DNA, 25 bp, Homo sapien
taatgtattcatagcagctgtagtc

SEQ ID NO: 4544477 - DNA, 25 bp, Homo sapien
tggcccttggtcacaataatgtatt

SEQ ID NO: 4544478 - DNA, 25 bp, Homo sapien
tattcatagcagctgtagtcaaata

SEQ ID NO: 4544479 - DNA, 25 bp, Homo sapien
catccatcgcccacactgagagctt

SEQ ID NO: 4544480 - DNA, 25 bp, Homo sapien
actcacactctgttaagctgaggca

SEQ ID NO: 4544481 - DNA, 25 bp, Homo sapien
caatacaacttttggagccgtgcat

SEQ ID NO: 4544482 - DNA, 25 bp, Homo sapien
attttatcaaagagccactggtagc

SEQ ID NO: 4544483 - DNA, 25 bp, Homo sapien
ttgaagggagagtcgctcacagctg

SEQ ID NO: 4544484 - DNA, 25 bp, Homo sapien
cagctccaggtggtttcagatgcat

SEQ ID NO: 4544485 - DNA, 25 bp, Homo sapien
gacagctccaggtggtttcagatgc

SEQ ID NO: 4544486 - DNA, 25 bp, Homo sapien
gatggagagctgctggcttgacagc

SEQ ID NO: 4544487 - DNA, 25 bp, Homo sapien
gcttgacagctccaggtggtttcag

SEQ ID NO: 4544488 - DNA, 25 bp, Homo sapien
tgccaatcctggaaggacagaagtg

SEQ ID NO: 4544489 - DNA, 25 bp, Homo sapien
gccagtaagaaaagcacggcacagc

SEQ ID NO: 4544490 - DNA, 25 bp, Homo sapien
taagccaagctgttttcagggttag

SEQ ID NO: 4544491 - DNA, 25 bp, Homo sapien
tgtgcatgtatttggaatcagtgaa

SEQ ID NO: 4544492 - DNA, 25 bp, Homo sapien
ggacgacgttcatccaaacaatatt

SEQ ID NO: 4544493 - DNA, 25 bp, Homo sapien
gatttctgaagtaggacgacgttca

SEQ ID NO: 4544494 - DNA, 25 bp, Homo sapien
gagctatgggctgccaactctggag

SEQ ID NO: 4544495 - DNA, 25 bp, Homo sapien
aagagctatgggctgccaactctgg

SEQ ID NO: 4544496 - DNA, 25 bp, Homo sapien
gacgtgagttagaggcaatgattcc

SEQ ID NO: 4544497 - DNA, 25 bp, Homo sapien
gaagttccagccaaaatataggacg

SEQ ID NO: 4544498 - DNA, 25 bp, Homo sapien
caggatcgtcctccattctggatag

SEQ ID NO: 4544499 - DNA, 25 bp, Homo sapien
gaactatggccagaggaaggtcact

SEQ ID NO: 4544500 - DNA, 25 bp, Homo sapien
caagtcctccttctctgtccctgtt

SEQ ID NO: 4544501 - DNA, 25 bp, Homo sapien
cttcaagtcctccttctctgtccct

SEQ ID NO: 4544502 - DNA, 25 bp, Homo sapien
caagaaggcttcaagtcctccttct

SEQ ID NO: 4544503 - DNA, 25 bp, Homo sapien
tcaagaaggcttcaagtcctccttc

SEQ ID NO: 4544504 - DNA, 25 bp, Homo sapien
cagacagatggtcctcatccagggt

SEQ ID NO: 4544505 - DNA, 25 bp, Homo sapien
gcaactgctgattattgactctcat

SEQ ID NO: 4544506 - DNA, 25 bp, Homo sapien
gggtcatgcactgttgcaactgctg

SEQ ID NO: 4544507 - DNA, 25 bp, Homo sapien
atccagggtcatgcactgttgcaac

SEQ ID NO: 4544508 - DNA, 25 bp, Homo sapien
ctgttattagctgtttggcaccttc

SEQ ID NO: 4544509 - DNA, 25 bp, Homo sapien
gcaatacctgctgttattagctgtt

SEQ ID NO: 4544510 - DNA, 25 bp, Homo sapien
cctgctgttattagctgtttggcac

SEQ ID NO: 4544511 - DNA, 25 bp, Homo sapien
agtggcaatacctgctgttattagc

SEQ ID NO: 4544512 - DNA, 25 bp, Homo sapien
tggcaaggcaagaaggacccaggca

SEQ ID NO: 4544513 - DNA, 25 bp, Homo sapien
ggcaaggcaagaaggacccaggcat

SEQ ID NO: 4544514 - DNA, 25 bp, Homo sapien
ctggcaaggcaagaaggacccaggc

SEQ ID NO: 4544515 - DNA, 25 bp, Homo sapien
tttctttacacttctcaaaggtatc

SEQ ID NO: 4544516 - DNA, 25 bp, Homo sapien
tttacacttctcaaaggtatcttgc

SEQ ID NO: 4544517 - DNA, 25 bp, Homo sapien
tctttacacttctcaaaggtatctt

SEQ ID NO: 4544518 - DNA, 25 bp, Homo sapien
ttacacttctcaaaggtatcttgct

SEQ ID NO: 4544519 - DNA, 25 bp, Homo sapien
gattctctttcagcacgatgctgaa

SEQ ID NO: 4544520 - DNA, 25 bp, Homo sapien
agattctctttcagcacgatgctga

SEQ ID NO: 4544521 - DNA, 25 bp, Homo sapien
ggctcataagtttatctttaataac

SEQ ID NO: 4544522 - DNA, 25 bp, Homo sapien
ttcacagcagacaatttattagcag

SEQ ID NO: 4544523 - DNA, 25 bp, Homo sapien
ggtttaatggttgaataatcatggc

SEQ ID NO: 4544524 - DNA, 25 bp, Homo sapien
taggctacgtggcaccaaaaacatc

SEQ ID NO: 4544525 - DNA, 25 bp, Homo sapien
ggtgtcctcatattcacagcatgac

SEQ ID NO: 4544526 - DNA, 25 bp, Homo sapien
ctggtgtcctcatattcacagcatg

SEQ ID NO: 4544527 - DNA, 25 bp, Homo sapien
actggtgtcctcatattcacagcat

SEQ ID NO: 4544528 - DNA, 25 bp, Homo sapien
tggtgtcctcatattcacagcatga

SEQ ID NO: 4544529 - DNA, 25 bp, Homo sapien
tctactaatacgattaattttggac

SEQ ID NO: 4544530 - DNA, 25 bp, Homo sapien
catctaggtctactaatacgattaa

SEQ ID NO: 4544531 - DNA, 25 bp, Homo sapien
tcatctaggtctactaatacgatta

SEQ ID NO: 4544532 - DNA, 25 bp, Homo sapien
ctaatacgattaattttggacatct

SEQ ID NO: 4544533 - DNA, 25 bp, Homo sapien
ttattgtcgccttgtgatgaatttt

SEQ ID NO: 4544534 - DNA, 25 bp, Homo sapien
gcttcattattgtcgccttgtgatg

SEQ ID NO: 4544535 - DNA, 25 bp, Homo sapien
aagcttcattattgtcgccttgtga

SEQ ID NO: 4544536 - DNA, 25 bp, Homo sapien
ttgtgatgaatttttgtgaatctct

SEQ ID NO: 4544537 - DNA, 25 bp, Homo sapien
agacaatgaatgttctcctttttgc

SEQ ID NO: 4544538 - DNA, 25 bp, Homo sapien
aaagggcaggaatgataattcaagg

SEQ ID NO: 4544539 - DNA, 25 bp, Homo sapien
tgagaaacatgagaagggtgtattt

SEQ ID NO: 4544540 - DNA, 25 bp, Homo sapien
catgagaagggtgtatttcagctcc

SEQ ID NO: 4544541 - DNA, 25 bp, Homo sapien
gcaggaatgataattcaaggaaatc

SEQ ID NO: 4544542 - DNA, 25 bp, Homo sapien
ctggccgataatcccaacaccaatt

SEQ ID NO: 4544543 - DNA, 25 bp, Homo sapien
tcccaacaccaatttagcagccaaa

SEQ ID NO: 4544544 - DNA, 25 bp, Homo sapien
tttagcagccaaacatggacataag

SEQ ID NO: 4544545 - DNA, 25 bp, Homo sapien
ccaaacatggacataagttatctcc

SEQ ID NO: 4544546 - DNA, 25 bp, Homo sapien
taacatcataaacagaagatgcagt

SEQ ID NO: 4544547 - DNA, 25 bp, Homo sapien
gatgcagtatttgcaaaagctttga

SEQ ID NO: 4544548 - DNA, 25 bp, Homo sapien
aagatgcagtatttgcaaaagcttt

SEQ ID NO: 4544549 - DNA, 25 bp, Homo sapien
ttgcaaaagctttgattgtgcaagg

SEQ ID NO: 4544550 - DNA, 25 bp, Homo sapien
ttctgcaatgtctggaaatttatat

SEQ ID NO: 4544551 - DNA, 25 bp, Homo sapien
caatgtctggaaatttatattgtgg

SEQ ID NO: 4544552 - DNA, 25 bp, Homo sapien
ctgcaatgtctggaaatttatattg

SEQ ID NO: 4544553 - DNA, 25 bp, Homo sapien
tgtctggaaatttatattgtggatt

SEQ ID NO: 4544554 - DNA, 25 bp, Homo sapien
tgacgagatgacttagggaagttcc

SEQ ID NO: 4544555 - DNA, 25 bp, Homo sapien
gggaagttcctaatgcctggccttg

SEQ ID NO: 4544556 - DNA, 25 bp, Homo sapien
tagacttgtcggcattgacgagatg

SEQ ID NO: 4544557 - DNA, 25 bp, Homo sapien
cctggccttgtccaatgttgtgaaa

SEQ ID NO: 4544558 - DNA, 25 bp, Homo sapien
tctgatatagattgatgagatgaca

SEQ ID NO: 4544559 - DNA, 25 bp, Homo sapien
ggcttcaacttatattcatctgata

SEQ ID NO: 4544560 - DNA, 25 bp, Homo sapien
tgaaaacttatttggcttcaactta

SEQ ID NO: 4544561 - DNA, 25 bp, Homo sapien
caatttcatactgaagattaacatc

SEQ ID NO: 4544562 - DNA, 25 bp, Homo sapien
aagtgagggaaaaaatccatgcaca

SEQ ID NO: 4544563 - DNA, 25 bp, Homo sapien
tcagagtcagttgggttcagctaaa

SEQ ID NO: 4544564 - DNA, 25 bp, Homo sapien
ggtcacagatatacctaccacgatg

SEQ ID NO: 4544565 - DNA, 25 bp, Homo sapien
catgcacaataggtgcaataccttt

SEQ ID NO: 4544566 - DNA, 25 bp, Homo sapien
tagaaatgatggggagccatgaggt

SEQ ID NO: 4544567 - DNA, 25 bp, Homo sapien
cattttggggtgtttctgatttgaa

SEQ ID NO: 4544568 - DNA, 25 bp, Homo sapien
gatgagatctttgtgggtcccattt

SEQ ID NO: 4544569 - DNA, 25 bp, Homo sapien
agatctttgtgggtcccattttggg

SEQ ID NO: 4544570 - DNA, 25 bp, Homo sapien
gtaaaagttgaggttcagggtcatg

SEQ ID NO: 4544571 - DNA, 25 bp, Homo sapien
gctgctgattgtccctgagtaactc

SEQ ID NO: 4544572 - DNA, 25 bp, Homo sapien
tcttaaagggagtggcaatttgcca

SEQ ID NO: 4544573 - DNA, 25 bp, Homo sapien
ttcagggtcatgtacaaaggctgct

SEQ ID NO: 4544574 - DNA, 25 bp, Homo sapien
tctgaatttcaggtagatctttgaa

SEQ ID NO: 4544575 - DNA, 25 bp, Homo sapien
tcaggtagatctttgaaggaatctc

SEQ ID NO: 4544576 - DNA, 25 bp, Homo sapien
gaatttcaggtagatctttgaagga

SEQ ID NO: 4544577 - DNA, 25 bp, Homo sapien
catatctgaatttcaggtagatctt

SEQ ID NO: 4544578 - DNA, 25 bp, Homo sapien
tcatggtcagttcaacataagctcc

SEQ ID NO: 4544579 - DNA, 25 bp, Homo sapien
ggtgtgccctaggagtaacgaatta

SEQ ID NO: 4544580 - DNA, 25 bp, Homo sapien
tactaacggcacttaggcaggtagc

SEQ ID NO: 4544581 - DNA, 25 bp, Homo sapien
ggccccaactccattgtaaaactga

SEQ ID NO: 4544582 - DNA, 25 bp, Homo sapien
caaggatgcagacagggccagagct

SEQ ID NO: 4544583 - DNA, 25 bp, Homo sapien
agtacaacagcgtagtgctcataga

SEQ ID NO: 4544584 - DNA, 25 bp, Homo sapien
aggatgcagacagggccagagctat

SEQ ID NO: 4544585 - DNA, 25 bp, Homo sapien
ttttatccatcagtacaacagcgta

SEQ ID NO: 4544586 - DNA, 25 bp, Homo sapien
tgtaagattttcaatagccaatgaa

SEQ ID NO: 4544587 - DNA, 25 bp, Homo sapien
taagattttcaatagccaatgaaag

SEQ ID NO: 4544588 - DNA, 25 bp, Homo sapien
aagattttcaatagccaatgaaagt

SEQ ID NO: 4544589 - DNA, 25 bp, Homo sapien
ctgtaagattttcaatagccaatga

SEQ ID NO: 4544590 - DNA, 25 bp, Homo sapien
tttaactttatgtctgccaaatgta

SEQ ID NO: 4544591 - DNA, 25 bp, Homo sapien
attttaactttatgtctgccaaatg

SEQ ID NO: 4544592 - DNA, 25 bp, Homo sapien
ttttaactttatgtctgccaaatgt

SEQ ID NO: 4544593 - DNA, 25 bp, Homo sapien
actctgacaaggtgtggaatgcaaa

SEQ ID NO: 4544594 - DNA, 25 bp, Homo sapien
tgttaactctgacaaggtgtggaat

SEQ ID NO: 4544595 - DNA, 25 bp, Homo sapien
ttaactctgacaaggtgtggaatgc

SEQ ID NO: 4544596 - DNA, 25 bp, Homo sapien
taactctgacaaggtgtggaatgca

SEQ ID NO: 4544597 - DNA, 25 bp, Homo sapien
attggcttagatgggcacttctcca

SEQ ID NO: 4544598 - DNA, 25 bp, Homo sapien
cctgctattggcttagatgggcact

SEQ ID NO: 4544599 - DNA, 25 bp, Homo sapien
tgggcaattcctgctattggcttag

SEQ ID NO: 4544600 - DNA, 25 bp, Homo sapien
aattcctgctattggcttagatggg

SEQ ID NO: 4544601 - DNA, 25 bp, Homo sapien
gctgctttggagattctagctggga

SEQ ID NO: 4544602 - DNA, 25 bp, Homo sapien
gggaacacctacctaaccagctctg

SEQ ID NO: 4544603 - DNA, 25 bp, Homo sapien
gctgggagttctgctacttgtatac

SEQ ID NO: 4544604 - DNA, 25 bp, Homo sapien
ccttggccatcaattaggtgacaga

SEQ ID NO: 4544605 - DNA, 25 bp, Homo sapien
tgcactaggattcagtttgaaaaat

SEQ ID NO: 4544606 - DNA, 25 bp, Homo sapien
gctgatgcactaggattcagtttga

SEQ ID NO: 4544607 - DNA, 25 bp, Homo sapien
gatgcactaggattcagtttgaaaa

SEQ ID NO: 4544608 - DNA, 25 bp, Homo sapien
tgatgcactaggattcagtttgaaa

SEQ ID NO: 4544609 - DNA, 25 bp, Homo sapien
tgctgtccaggggcaatggaagaac

SEQ ID NO: 4544610 - DNA, 25 bp, Homo sapien
gctgtccaggggcaatggaagaact

SEQ ID NO: 4544611 - DNA, 25 bp, Homo sapien
gtatgtcagcattctgagtctccag

SEQ ID NO: 4544612 - DNA, 25 bp, Homo sapien
tctttttcaataagtatgtcagcat

SEQ ID NO: 4544613 - DNA, 25 bp, Homo sapien
tatgtcagcattctgagtctccagc

SEQ ID NO: 4544614 - DNA, 25 bp, Homo sapien
tcgcctaagactacctcctccatct

SEQ ID NO: 4544615 - DNA, 25 bp, Homo sapien
gttcctcgcctaagactacctcctc

SEQ ID NO: 4544616 - DNA, 25 bp, Homo sapien
tcttgttcctcgcctaagactacct

SEQ ID NO: 4544617 - DNA, 25 bp, Homo sapien
ttgttcctcgcctaagactacctcc

SEQ ID NO: 4544618 - DNA, 25 bp, Homo sapien
tgcttgtgagctttgtgtagactcg

SEQ ID NO: 4544619 - DNA, 25 bp, Homo sapien
tctcagtgggtaggtcacaggtgct

SEQ ID NO: 4544620 - DNA, 25 bp, Homo sapien
tcttgactaagtaaaaggcttgagg

SEQ ID NO: 4544621 - DNA, 25 bp, Homo sapien
gtagactcgtacagaatctttacag

SEQ ID NO: 4544622 - DNA, 25 bp, Homo sapien
tcaagtaggccacagttgcctgtcc

SEQ ID NO: 4544623 - DNA, 25 bp, Homo sapien
aggtactaagcctaatacacaatat

SEQ ID NO: 4544624 - DNA, 25 bp, Homo sapien
tcttccattgatggctacttaggtt

SEQ ID NO: 4544625 - DNA, 25 bp, Homo sapien
atataagtaaacttaggttatgagg

SEQ ID NO: 4544626 - DNA, 25 bp, Homo sapien
gtgctgccagtagcaaatgatgtag

SEQ ID NO: 4544627 - DNA, 25 bp, Homo sapien
gtagcaaatgatgtagtaaatccat

SEQ ID NO: 4544628 - DNA, 25 bp, Homo sapien
ttcctctcagtgctgccagtagcaa

SEQ ID NO: 4544629 - DNA, 25 bp, Homo sapien
tctcagtgctgccagtagcaaatga

SEQ ID NO: 4544630 - DNA, 25 bp, Homo sapien
tataggaagaatttccagacaattt

SEQ ID NO: 4544631 - DNA, 25 bp, Homo sapien
agacaatttgataaaactgatcctc

SEQ ID NO: 4544632 - DNA, 25 bp, Homo sapien
tttttataggaagaatttccagaca

SEQ ID NO: 4544633 - DNA, 25 bp, Homo sapien
tccagacaatttgataaaactgatc

SEQ ID NO: 4544634 - DNA, 25 bp, Homo sapien
tgtaatgatgtctcttgtggctcaa

SEQ ID NO: 4544635 - DNA, 25 bp, Homo sapien
aatgatgtctcttgtggctcaacca

SEQ ID NO: 4544636 - DNA, 25 bp, Homo sapien
tctgtaatgatgtctcttgtggctc

SEQ ID NO: 4544637 - DNA, 25 bp, Homo sapien
tgtctcttgtggctcaaccatccat

SEQ ID NO: 4544638 - DNA, 25 bp, Homo sapien
ccatggagtaatccaacagcacata

SEQ ID NO: 4544639 - DNA, 25 bp, Homo sapien
tcctcagacaatcttgattgatgag

SEQ ID NO: 4544640 - DNA, 25 bp, Homo sapien
ttgatgagcatccatggagtaatcc

SEQ ID NO: 4544641 - DNA, 25 bp, Homo sapien
taatccaacagcacataattgcatg

SEQ ID NO: 4544642 - DNA, 25 bp, Homo sapien
tgagtcagtgttctcaaatgctgcc

SEQ ID NO: 4544643 - DNA, 25 bp, Homo sapien
cttcaagtctgagtcagtgttctca

SEQ ID NO: 4544644 - DNA, 25 bp, Homo sapien
aagtctgagtcagtgttctcaaatg

SEQ ID NO: 4544645 - DNA, 25 bp, Homo sapien
tgttctcaaatgctgccagtttcat

SEQ ID NO: 4544646 - DNA, 25 bp, Homo sapien
tgtgcccagcggctcattggggatg

SEQ ID NO: 4544647 - DNA, 25 bp, Homo sapien
gatggttgccgggtctgtgtggata

SEQ ID NO: 4544648 - DNA, 25 bp, Homo sapien
ccgggtctgtgtggatagaagtaga

SEQ ID NO: 4544649 - DNA, 25 bp, Homo sapien
cagcggctcattggggatgggccat

SEQ ID NO: 4544650 - DNA, 25 bp, Homo sapien
ctcagagcaacaagactaaacacag

SEQ ID NO: 4544651 - DNA, 25 bp, Homo sapien
gctaacaggactcagagcaacaaga

SEQ ID NO: 4544652 - DNA, 25 bp, Homo sapien
agttaccagaactgctaacaggact

SEQ ID NO: 4544653 - DNA, 25 bp, Homo sapien
tggtctctgattggagcagttacca

SEQ ID NO: 4544654 - DNA, 25 bp, Homo sapien
gcttgaaactcatgtcctgtctcct

SEQ ID NO: 4544655 - DNA, 25 bp, Homo sapien
ttcttgcttgaaactcatgtcctgt

SEQ ID NO: 4544656 - DNA, 25 bp, Homo sapien
tccttcctccaatgctcaggcccaa

SEQ ID NO: 4544657 - DNA, 25 bp, Homo sapien
gctcaggcccaagttctgcatccat

SEQ ID NO: 4544658 - DNA, 25 bp, Homo sapien
gtgtgtgacaactgacaccaaagat

SEQ ID NO: 4544659 - DNA, 25 bp, Homo sapien
catgaggataggaatgtcagaatct

SEQ ID NO: 4544660 - DNA, 25 bp, Homo sapien
aaggagatgtgtgcccctgaatcca

SEQ ID NO: 4544661 - DNA, 25 bp, Homo sapien
ggcacaggcaacatgaggataggaa

SEQ ID NO: 4544662 - DNA, 25 bp, Homo sapien
ttcctgggatgatagcattgtaagt

SEQ ID NO: 4544663 - DNA, 25 bp, Homo sapien
ctgggatgatagcattgtaagtcca

SEQ ID NO: 4544664 - DNA, 25 bp, Homo sapien
tgggatgatagcattgtaagtccat

SEQ ID NO: 4544665 - DNA, 25 bp, Homo sapien
tcctgggatgatagcattgtaagtc

SEQ ID NO: 4544666 - DNA, 25 bp, Homo sapien
gcggagtaaccggtggaagtgtcaa

SEQ ID NO: 4544667 - DNA, 25 bp, Homo sapien
ggtgggaggacgcagacggcggagt

SEQ ID NO: 4544668 - DNA, 25 bp, Homo sapien
ttagagccgagggagcggcaggagc

SEQ ID NO: 4544669 - DNA, 25 bp, Homo sapien
agtaaccggtggaagtgtcaaagag

SEQ ID NO: 4544670 - DNA, 25 bp, Homo sapien
ctgtgagggagcggacgaacccgga

SEQ ID NO: 4544671 - DNA, 25 bp, Homo sapien
gcggacgaacccggagaagagagca

SEQ ID NO: 4544672 - DNA, 25 bp, Homo sapien
ggagcggacgaacccggagaagaga

SEQ ID NO: 4544673 - DNA, 25 bp, Homo sapien
tgagggagcggacgaacccggagaa

SEQ ID NO: 4544674 - DNA, 25 bp, Homo sapien
tgctgacggaggttctgcgcgaaaa

SEQ ID NO: 4544675 - DNA, 25 bp, Homo sapien
tatctgcgaagcgaggagctgctga

SEQ ID NO: 4544676 - DNA, 25 bp, Homo sapien
gtgctagacacctgccgagtccgaa

SEQ ID NO: 4544677 - DNA, 25 bp, Homo sapien
cagtcctcgataagtggagtccctg

SEQ ID NO: 4544678 - DNA, 25 bp, Homo sapien
tggacatccctaatgctgccagact

SEQ ID NO: 4544679 - DNA, 25 bp, Homo sapien
ccactaggactggagggaagtaact

SEQ ID NO: 4544680 - DNA, 25 bp, Homo sapien
aactgttctcaaggcgtttagtgcc

SEQ ID NO: 4544681 - DNA, 25 bp, Homo sapien
tccagcatagcccacacgttgtagg

SEQ ID NO: 4544682 - DNA, 25 bp, Homo sapien
cactggactgctggaactcagagca

SEQ ID NO: 4544683 - DNA, 25 bp, Homo sapien
gaagagagtggtggacactggactg

SEQ ID NO: 4544684 - DNA, 25 bp, Homo sapien
ctcctttgacttgagaagagagtgg

SEQ ID NO: 4544685 - DNA, 25 bp, Homo sapien
acttgagaagagagtggtggacact

SEQ ID NO: 4544686 - DNA, 25 bp, Homo sapien
tcagtatctttaaaggctcttcatt

SEQ ID NO: 4544687 - DNA, 25 bp, Homo sapien
agtatctttaaaggctcttcattag

SEQ ID NO: 4544688 - DNA, 25 bp, Homo sapien
cagtatctttaaaggctcttcatta

SEQ ID NO: 4544689 - DNA, 25 bp, Homo sapien
tgtgtagaattcaaagggctctgtg

SEQ ID NO: 4544690 - DNA, 25 bp, Homo sapien
tctgtataggtaggactctacaccc

SEQ ID NO: 4544691 - DNA, 25 bp, Homo sapien
aattggcttggtagtctgggtcctc

SEQ ID NO: 4544692 - DNA, 25 bp, Homo sapien
gctctgtgaagttgctttgggctgc

SEQ ID NO: 4544693 - DNA, 25 bp, Homo sapien
gagatggtccctcaacaccatccat

SEQ ID NO: 4544694 - DNA, 25 bp, Homo sapien
agatggtccctcaacaccatccatt

SEQ ID NO: 4544695 - DNA, 25 bp, Homo sapien
gatggtccctcaacaccatccattc

SEQ ID NO: 4544696 - DNA, 25 bp, Homo sapien
ggagatggtccctcaacaccatcca

SEQ ID NO: 4544697 - DNA, 25 bp, Homo sapien
cagcacatgctgagcagcccacaaa

SEQ ID NO: 4544698 - DNA, 25 bp, Homo sapien
ggtatggacctaaaggcttcagaga

SEQ ID NO: 4544699 - DNA, 25 bp, Homo sapien
acagcacatgctgagcagcccacaa

SEQ ID NO: 4544700 - DNA, 25 bp, Homo sapien
ctctttgtagagcttgggggtatgg

SEQ ID NO: 4544701 - DNA, 25 bp, Homo sapien
cttactcggataggaagtcctgggt

SEQ ID NO: 4544702 - DNA, 25 bp, Homo sapien
ttactcggataggaagtcctgggtg

SEQ ID NO: 4544703 - DNA, 25 bp, Homo sapien
taatgcaccgtcaacatttctctca

SEQ ID NO: 4544704 - DNA, 25 bp, Homo sapien
ggcttgctgcttgaaatatggcccc

SEQ ID NO: 4544705 - DNA, 25 bp, Homo sapien
gcttgctgcttgaaatatggcccca

SEQ ID NO: 4544706 - DNA, 25 bp, Homo sapien
ccatgtcccaaactagttaatgcac

SEQ ID NO: 4544707 - DNA, 25 bp, Homo sapien
ctgcagatggcatctaggatctgac

SEQ ID NO: 4544708 - DNA, 25 bp, Homo sapien
cagaggttcaaagccgaatttgagc

SEQ ID NO: 4544709 - DNA, 25 bp, Homo sapien
ccactggagagagcatcctgctcca

SEQ ID NO: 4544710 - DNA, 25 bp, Homo sapien
agaggagatgccttgcggcccacct

SEQ ID NO: 4544711 - DNA, 25 bp, Homo sapien
tctaatttgggactctggtggttga

SEQ ID NO: 4544712 - DNA, 25 bp, Homo sapien
tgagtccaggactagcacagctgtc

SEQ ID NO: 4544713 - DNA, 25 bp, Homo sapien
ttcccataagagatgcaccaagcag

SEQ ID NO: 4544714 - DNA, 25 bp, Homo sapien
tttattatgtgtaagggcctttgcc

SEQ ID NO: 4544715 - DNA, 25 bp, Homo sapien
tcttccttggtgtcgagaggtggct

SEQ ID NO: 4544716 - DNA, 25 bp, Homo sapien
tgaaaggcctgtgtttattatctgc

SEQ ID NO: 4544717 - DNA, 25 bp, Homo sapien
ttattatctgcagcacatttgtcag

SEQ ID NO: 4544718 - DNA, 25 bp, Homo sapien
gctgaaaggcctgtgtttattatct

SEQ ID NO: 4544719 - DNA, 25 bp, Homo sapien
tgtttattatctgcagcacatttgt

SEQ ID NO: 4544720 - DNA, 25 bp, Homo sapien
ggcagcatagactgtgggtatagaa

SEQ ID NO: 4544721 - DNA, 25 bp, Homo sapien
aattatatcttgagatacaaggaca

SEQ ID NO: 4544722 - DNA, 25 bp, Homo sapien
tagactgtgggtatagaatgtggct

SEQ ID NO: 4544723 - DNA, 25 bp, Homo sapien
gatacaaggacaggcagcatagact

SEQ ID NO: 4544724 - DNA, 25 bp, Homo sapien
cctgaaggtccctaggcagatgtcc

SEQ ID NO: 4544725 - DNA, 25 bp, Homo sapien
tgctgccactctctgccaggtgatt

SEQ ID NO: 4544726 - DNA, 25 bp, Homo sapien
tctctgccaggtgattttccctctt

SEQ ID NO: 4544727 - DNA, 25 bp, Homo sapien
cagcctttctctgcactgacagctg

SEQ ID NO: 4544728 - DNA, 25 bp, Homo sapien
gctcattgctgcctttagcaggaag

SEQ ID NO: 4544729 - DNA, 25 bp, Homo sapien
ctgtgagagggaggaaacgagacgg

SEQ ID NO: 4544730 - DNA, 25 bp, Homo sapien
cagcatactgatttggcctttgggt

SEQ ID NO: 4544731 - DNA, 25 bp, Homo sapien
tttgcatggcgagttcaagagtccc

SEQ ID NO: 4544732 - DNA, 25 bp, Homo sapien
ctccagggtttgtgccacagcatac

SEQ ID NO: 4544733 - DNA, 25 bp, Homo sapien
ctggacttgggcctatgctggttgt

SEQ ID NO: 4544734 - DNA, 25 bp, Homo sapien
cttacttctccagatacatgtgaga

SEQ ID NO: 4544735 - DNA, 25 bp, Homo sapien
actctgctaactgagctggacttgg

SEQ ID NO: 4544736 - DNA, 25 bp, Homo sapien
acttgggcctatgctggttgtttca

SEQ ID NO: 4544737 - DNA, 25 bp, Homo sapien
gcagccaagataagttcttcaccca

SEQ ID NO: 4544738 - DNA, 25 bp, Homo sapien
tgaaggttgagatgccagcaaggca

SEQ ID NO: 4544739 - DNA, 25 bp, Homo sapien
catggcagttctggcttttggacca

SEQ ID NO: 4544740 - DNA, 25 bp, Homo sapien
ggccagagcctcctttgatccaggc

SEQ ID NO: 4544741 - DNA, 25 bp, Homo sapien
tttggtaatggccagatttcagaac

SEQ ID NO: 4544742 - DNA, 25 bp, Homo sapien
ctttggtaatggccagatttcagaa

SEQ ID NO: 4544743 - DNA, 25 bp, Homo sapien
ataaagtggggaattcagtgaccat

SEQ ID NO: 4544744 - DNA, 25 bp, Homo sapien
cagaacataaagtggggaattcagt

SEQ ID NO: 4544745 - DNA, 25 bp, Homo sapien
ttgacaatgccgtgaagagttgtgt

SEQ ID NO: 4544746 - DNA, 25 bp, Homo sapien
agaacaaggttgacaatgccgtgaa

SEQ ID NO: 4544747 - DNA, 25 bp, Homo sapien
aatgccgtgaagagttgtgttgagc

SEQ ID NO: 4544748 - DNA, 25 bp, Homo sapien
caaggttgacaatgccgtgaagagt

SEQ ID NO: 4544749 - DNA, 25 bp, Homo sapien
agtgtgccggtgttggatatttccc

SEQ ID NO: 4544750 - DNA, 25 bp, Homo sapien
taaatggacagctgtaagtaggctt

SEQ ID NO: 4544751 - DNA, 25 bp, Homo sapien
gggcacaccttattaagaagaacag

SEQ ID NO: 4544752 - DNA, 25 bp, Homo sapien
cccagcaggttagcttcgggttaat

SEQ ID NO: 4544753 - DNA, 25 bp, Homo sapien
tgtgactcacgaaaaggaggaagga

SEQ ID NO: 4544754 - DNA, 25 bp, Homo sapien
gcttctgtgactcacgaaaaggagg

SEQ ID NO: 4544755 - DNA, 25 bp, Homo sapien
aaatggcccaccaaagagagatggt

SEQ ID NO: 4544756 - DNA, 25 bp, Homo sapien
agcttgcttctgtgactcacgaaaa

SEQ ID NO: 4544757 - DNA, 25 bp, Homo sapien
tctgaacagtgagtccgtgaaagaa

SEQ ID NO: 4544758 - DNA, 25 bp, Homo sapien
ccttgcacatgtcggccaaggcagg

SEQ ID NO: 4544759 - DNA, 25 bp, Homo sapien
tgtccctgacagcttatctttaagt

SEQ ID NO: 4544760 - DNA, 25 bp, Homo sapien
tgttgttgctctggttatacataac

SEQ ID NO: 4544761 - DNA, 25 bp, Homo sapien
ctgtatcttccctgttgatttcctt

SEQ ID NO: 4544762 - DNA, 25 bp, Homo sapien
tgtatcttccctgttgatttccttt

SEQ ID NO: 4544763 - DNA, 25 bp, Homo sapien
tatcttccctgttgatttcctttta

SEQ ID NO: 4544764 - DNA, 25 bp, Homo sapien
tcatcatcagagaatgctccttgag

SEQ ID NO: 4544765 - DNA, 25 bp, Homo sapien
gttcattaggagcaatacagccagg

SEQ ID NO: 4544766 - DNA, 25 bp, Homo sapien
gctccttgagattttgcaggtgcag

SEQ ID NO: 4544767 - DNA, 25 bp, Homo sapien
ccatgcagaagggaatcatgttcat

SEQ ID NO: 4544768 - DNA, 25 bp, Homo sapien
aatgacatcgggttgtccagccaac

SEQ ID NO: 4544769 - DNA, 25 bp, Homo sapien
tactatgacttatggaagacccgct

SEQ ID NO: 4544770 - DNA, 25 bp, Homo sapien
gagtttattctagaccagggctctg

SEQ ID NO: 4544771 - DNA, 25 bp, Homo sapien
tttctgaaatgcataggcgaccacc

SEQ ID NO: 4544772 - DNA, 25 bp, Homo sapien
acagaagtagtaatgtgctaatggg

SEQ ID NO: 4544773 - DNA, 25 bp, Homo sapien
tatttcatgggacagaagtagtaat

SEQ ID NO: 4544774 - DNA, 25 bp, Homo sapien
acatcatcagtgccagcggaaagct

SEQ ID NO: 4544775 - DNA, 25 bp, Homo sapien
tgtgcatggagatctggacatcatc

SEQ ID NO: 4544776 - DNA, 25 bp, Homo sapien
ccctgagttgggcatcatggctaca

SEQ ID NO: 4544777 - DNA, 25 bp, Homo sapien
gctgtttcatgcacaggaagattca

SEQ ID NO: 4544778 - DNA, 25 bp, Homo sapien
agagaaggcttttcacgctcatact

SEQ ID NO: 4544779 - DNA, 25 bp, Homo sapien
catctctagggaatggagcctcaat

SEQ ID NO: 4544780 - DNA, 25 bp, Homo sapien
gatgcaggtattcccgcacaggact

SEQ ID NO: 4544781 - DNA, 25 bp, Homo sapien
gcacaggactagacatgttttaagg

SEQ ID NO: 4544782 - DNA, 25 bp, Homo sapien
gacacccagttagtacttattgaat

SEQ ID NO: 4544783 - DNA, 25 bp, Homo sapien
ggtgagaactatgccttatagtacc

SEQ ID NO: 4544784 - DNA, 25 bp, Homo sapien
tgcgtgtaaaaacttaaggttctga

SEQ ID NO: 4544785 - DNA, 25 bp, Homo sapien
aaggttctgagaccaagattctacg

SEQ ID NO: 4544786 - DNA, 25 bp, Homo sapien
gacatagttatgatagatttcaagc

SEQ ID NO: 4544787 - DNA, 25 bp, Homo sapien
gggcgacagagtagggattcctctt

SEQ ID NO: 4544788 - DNA, 25 bp, Homo sapien
taatctctccagggattaatatcta

SEQ ID NO: 4544789 - DNA, 25 bp, Homo sapien
tgctgaaagatggtagggcaatact

SEQ ID NO: 4544790 - DNA, 25 bp, Homo sapien
ttttctagccttctacacaaggaca

SEQ ID NO: 4544791 - DNA, 25 bp, Homo sapien
tgtgttttacgtaggccttcaggct

SEQ ID NO: 4544792 - DNA, 25 bp, Homo sapien
gaattagctccaatcttacggaagg

SEQ ID NO: 4544793 - DNA, 25 bp, Homo sapien
agcccagagcctgtcagttccacac

SEQ ID NO: 4544794 - DNA, 25 bp, Homo sapien
cattttaggggtccagctatgtgga

SEQ ID NO: 4544795 - DNA, 25 bp, Homo sapien
ttcttgcatcctaggagcccagagc

SEQ ID NO: 4544796 - DNA, 25 bp, Homo sapien
gttccacactcaccactctgcattt

SEQ ID NO: 4544797 - DNA, 25 bp, Homo sapien
gaaccttcattaggaatggacctga

SEQ ID NO: 4544798 - DNA, 25 bp, Homo sapien
taaaaggctccgagaggatatccca

SEQ ID NO: 4544799 - DNA, 25 bp, Homo sapien
ggatatcccacagacagaaccttca

SEQ ID NO: 4544800 - DNA, 25 bp, Homo sapien
tggacctgagcaaaagagacgacct

SEQ ID NO: 4544801 - DNA, 25 bp, Homo sapien
gaatcgtttgactccctaaggtgga

SEQ ID NO: 4544802 - DNA, 25 bp, Homo sapien
tgatacagaaggtaagacgtcccgc

SEQ ID NO: 4544803 - DNA, 25 bp, Homo sapien
tgacctttttaatgagtccagtgcc

SEQ ID NO: 4544804 - DNA, 25 bp, Homo sapien
agtcagttcctagatgctgggcatg

SEQ ID NO: 4544805 - DNA, 25 bp, Homo sapien
gctgaatcttctccattcgttaggg

SEQ ID NO: 4544806 - DNA, 25 bp, Homo sapien
gcagaaaattgtggccaagctcatt

SEQ ID NO: 4544807 - DNA, 25 bp, Homo sapien
gctcattgtcaaggtgagggctgaa

SEQ ID NO: 4544808 - DNA, 25 bp, Homo sapien
gaagaaatcccattggagttgcagg

SEQ ID NO: 4544809 - DNA, 25 bp, Homo sapien
ttgttggcaggttctttagggacat

SEQ ID NO: 4544810 - DNA, 25 bp, Homo sapien
gcaggttctttagggacatgccttc

SEQ ID NO: 4544811 - DNA, 25 bp, Homo sapien
ctttagggacatgccttcagaagaa

SEQ ID NO: 4544812 - DNA, 25 bp, Homo sapien
gaagaatccacatcaatgcaatttc

SEQ ID NO: 4544813 - DNA, 25 bp, Homo sapien
ggagtgacgcctatagcatagttcc

SEQ ID NO: 4544814 - DNA, 25 bp, Homo sapien
gagtgacgcctatagcatagttcct

SEQ ID NO: 4544815 - DNA, 25 bp, Homo sapien
tggagtgacgcctatagcatagttc

SEQ ID NO: 4544816 - DNA, 25 bp, Homo sapien
cctgcatgcttgcacatgctgtgac

SEQ ID NO: 4544817 - DNA, 25 bp, Homo sapien
gccctgcatgcttgcacatgctgtg

SEQ ID NO: 4544818 - DNA, 25 bp, Homo sapien
tgcatgcttgcacatgctgtgactc

SEQ ID NO: 4544819 - DNA, 25 bp, Homo sapien
catgcttgcacatgctgtgactcat

SEQ ID NO: 4544820 - DNA, 25 bp, Homo sapien
gcagaatccatatctcctaggcatg

SEQ ID NO: 4544821 - DNA, 25 bp, Homo sapien
ttcagagggcaatagctggaggcct

SEQ ID NO: 4544822 - DNA, 25 bp, Homo sapien
atgaaagttccgcaaggccatcggg

SEQ ID NO: 4544823 - DNA, 25 bp, Homo sapien
tacctatgggaagtgtgacctctgg

SEQ ID NO: 4544824 - DNA, 25 bp, Homo sapien
ttgggctcagctaaagatgcagact

SEQ ID NO: 4544825 - DNA, 25 bp, Homo sapien
tatttagtcctgttcgggcacctgc

SEQ ID NO: 4544826 - DNA, 25 bp, Homo sapien
tggcttcgccagtcccaaagaattg

SEQ ID NO: 4544827 - DNA, 25 bp, Homo sapien
gaagtcttcagttggcctctacaaa

SEQ ID NO: 4544828 - DNA, 25 bp, Homo sapien
gccagcagtacaacctgaggtattt

SEQ ID NO: 4544829 - DNA, 25 bp, Homo sapien
ggaaaccaaatatgccagcagtaca

SEQ ID NO: 4544830 - DNA, 25 bp, Homo sapien
gccaagtgcctaaaagcctcattcc

SEQ ID NO: 4544831 - DNA, 25 bp, Homo sapien
agcccaggtgcaaggagatgagatc

SEQ ID NO: 4544832 - DNA, 25 bp, Homo sapien
tggggtgacagcaacgtaggcataa

SEQ ID NO: 4544833 - DNA, 25 bp, Homo sapien
ggtgacagcaacgtaggcataattt

SEQ ID NO: 4544834 - DNA, 25 bp, Homo sapien
gggtgacagcaacgtaggcataatt

SEQ ID NO: 4544835 - DNA, 25 bp, Homo sapien
tgacagcaacgtaggcataatttcc

SEQ ID NO: 4544836 - DNA, 25 bp, Homo sapien
tcaagagaggacctgtccagcaggc

SEQ ID NO: 4544837 - DNA, 25 bp, Homo sapien
tctctggagaatacacatagtcaag

SEQ ID NO: 4544838 - DNA, 25 bp, Homo sapien
gctatcatgtggagaaatgccctga

SEQ ID NO: 4544839 - DNA, 25 bp, Homo sapien
gccctgatgcaatggtatcctccaa

SEQ ID NO: 4544840 - DNA, 25 bp, Homo sapien
gaagccagtacgtgtcccaaaatct

SEQ ID NO: 4544841 - DNA, 25 bp, Homo sapien
aggaagccagtacgtgtcccaaaat

SEQ ID NO: 4544842 - DNA, 25 bp, Homo sapien
agccagtacgtgtcccaaaatctca

SEQ ID NO: 4544843 - DNA, 25 bp, Homo sapien
gccagtacgtgtcccaaaatctcaa

SEQ ID NO: 4544844 - DNA, 25 bp, Homo sapien
atggatattccagagggatctgagc

SEQ ID NO: 4544845 - DNA, 25 bp, Homo sapien
aggcaaagcctccatcatagagtaa

SEQ ID NO: 4544846 - DNA, 25 bp, Homo sapien
gcctccatcatagagtaatggatat

SEQ ID NO: 4544847 - DNA, 25 bp, Homo sapien
taatggatattccagagggatctga

SEQ ID NO: 4544848 - DNA, 25 bp, Homo sapien
tacattccacaactgtgagttctta

SEQ ID NO: 4544849 - DNA, 25 bp, Homo sapien
ggtgcaaaaagctgccaaatacctc

SEQ ID NO: 4544850 - DNA, 25 bp, Homo sapien
atatgtataaggtgggtagtgtttg

SEQ ID NO: 4544851 - DNA, 25 bp, Homo sapien
tgattgtcaaggcacattggatgga

SEQ ID NO: 4544852 - DNA, 25 bp, Homo sapien
tcatcctttcgcagggggatggcgc

SEQ ID NO: 4544853 - DNA, 25 bp, Homo sapien
tttcgcagggggatggcgccctcac

SEQ ID NO: 4544854 - DNA, 25 bp, Homo sapien
tcagtttgcatcatcctttcgcagg

SEQ ID NO: 4544855 - DNA, 25 bp, Homo sapien
cagtttgcatcatcctttcgcaggg

SEQ ID NO: 4544856 - DNA, 25 bp, Homo sapien
gacctgcggtttttcatttgcgctg

SEQ ID NO: 4544857 - DNA, 25 bp, Homo sapien
catgtgaaaggacgtggtgaagact

SEQ ID NO: 4544858 - DNA, 25 bp, Homo sapien
gcgttttctcctcccatccttgtga

SEQ ID NO: 4544859 - DNA, 25 bp, Homo sapien
taaccaagttatcaaggacctgcgg

SEQ ID NO: 4544860 - DNA, 25 bp, Homo sapien
catggccttacatctgtgaatttct

SEQ ID NO: 4544861 - DNA, 25 bp, Homo sapien
cataaatcctgctttaagtgtttga

SEQ ID NO: 4544862 - DNA, 25 bp, Homo sapien
ttttagctattgacccacagccctc

SEQ ID NO: 4544863 - DNA, 25 bp, Homo sapien
ttttttttagctattgacccacagc

SEQ ID NO: 4544864 - DNA, 25 bp, Homo sapien
ttttttagctattgacccacagccc

SEQ ID NO: 4544865 - DNA, 25 bp, Homo sapien
cttggtagacatagatggagttgtg

SEQ ID NO: 4544866 - DNA, 25 bp, Homo sapien
agatagggttgactggcagaactgc

SEQ ID NO: 4544867 - DNA, 25 bp, Homo sapien
ttcactaaccacaccttcttggtag

SEQ ID NO: 4544868 - DNA, 25 bp, Homo sapien
tcctcccgcagtgattccagatttt

SEQ ID NO: 4544869 - DNA, 25 bp, Homo sapien
gctatgtgccaataagtgagtagtt

SEQ ID NO: 4544870 - DNA, 25 bp, Homo sapien
gaaacaactgatacaatttggcctg

SEQ ID NO: 4544871 - DNA, 25 bp, Homo sapien
tgtaaccaaacaatagctatgtgcc

SEQ ID NO: 4544872 - DNA, 25 bp, Homo sapien
gatcaggcccttagaagtctttaat

SEQ ID NO: 4544873 - DNA, 25 bp, Homo sapien
cctgacattccgcttgacacttaac

SEQ ID NO: 4544874 - DNA, 25 bp, Homo sapien
ctgacattccgcttgacacttaacc

SEQ ID NO: 4544875 - DNA, 25 bp, Homo sapien
tgttaccattcccctgacattccgc

SEQ ID NO: 4544876 - DNA, 25 bp, Homo sapien
gttaccattcccctgacattccgct

SEQ ID NO: 4544877 - DNA, 25 bp, Homo sapien
ctgtccttccagacaagtgttgcca

SEQ ID NO: 4544878 - DNA, 25 bp, Homo sapien
gacaagtgttgccagttcctgacca

SEQ ID NO: 4544879 - DNA, 25 bp, Homo sapien
tgttgccagttcctgaccaaacatt

SEQ ID NO: 4544880 - DNA, 25 bp, Homo sapien
tccagacaagtgttgccagttcctg

SEQ ID NO: 4544881 - DNA, 25 bp, Homo sapien
agaagagatgacgtcttcttagtca

SEQ ID NO: 4544882 - DNA, 25 bp, Homo sapien
cactcccaccctgctaggtggaaca

SEQ ID NO: 4544883 - DNA, 25 bp, Homo sapien
ggaacagggaggcaatgatcacttc

SEQ ID NO: 4544884 - DNA, 25 bp, Homo sapien
gggcaggcttgctcatctacttcct

SEQ ID NO: 4544885 - DNA, 25 bp, Homo sapien
tgaagcttgtaattttcccctagaa

SEQ ID NO: 4544886 - DNA, 25 bp, Homo sapien
ttcagcggccctagaatgttcaagc

SEQ ID NO: 4544887 - DNA, 25 bp, Homo sapien
tcaattgcaagctgggttccacagt

SEQ ID NO: 4544888 - DNA, 25 bp, Homo sapien
cagtgaactctgcatgaagcttgta

SEQ ID NO: 4544889 - DNA, 25 bp, Homo sapien
tttcttctccataaatcctttgctg

SEQ ID NO: 4544890 - DNA, 25 bp, Homo sapien
caattcaaaactttcttctccataa

SEQ ID NO: 4544891 - DNA, 25 bp, Homo sapien
tctccataaatcctttgctgatcat

SEQ ID NO: 4544892 - DNA, 25 bp, Homo sapien
tcttcacaattcaaaactttcttct

SEQ ID NO: 4544893 - DNA, 25 bp, Homo sapien
tcaattcgtatagccctgactgcat

SEQ ID NO: 4544894 - DNA, 25 bp, Homo sapien
tcttgactcaattcgtatagccctg

SEQ ID NO: 4544895 - DNA, 25 bp, Homo sapien
aagttctcttgactcaattcgtata

SEQ ID NO: 4544896 - DNA, 25 bp, Homo sapien
gactcaattcgtatagccctgactg

SEQ ID NO: 4544897 - DNA, 25 bp, Homo sapien
tagaaaggacagctccagtcacctc

SEQ ID NO: 4544898 - DNA, 25 bp, Homo sapien
tggcagctggacatgaagccctctg

SEQ ID NO: 4544899 - DNA, 25 bp, Homo sapien
gaagtccagagatggtacattgcca

SEQ ID NO: 4544900 - DNA, 25 bp, Homo sapien
gagacagagaacctggtaggaaccc

SEQ ID NO: 4544901 - DNA, 25 bp, Homo sapien
agtgctcatccaaccccatggcgag

SEQ ID NO: 4544902 - DNA, 25 bp, Homo sapien
gctctattatggttgatgctctgat

SEQ ID NO: 4544903 - DNA, 25 bp, Homo sapien
ttgatgctctgatagaaaagcagga

SEQ ID NO: 4544904 - DNA, 25 bp, Homo sapien
aaccccatggcgagggacagcaagg

SEQ ID NO: 4544905 - DNA, 25 bp, Homo sapien
caacaggcagtgtcagacagatggt

SEQ ID NO: 4544906 - DNA, 25 bp, Homo sapien
tataaagccatttcgggcccctgca

SEQ ID NO: 4544907 - DNA, 25 bp, Homo sapien
ggctacagatggcaagtgacatgct

SEQ ID NO: 4544908 - DNA, 25 bp, Homo sapien
ggttcaagtaccttcgggctacaga

SEQ ID NO: 4544909 - DNA, 25 bp, Homo sapien
tgggaatctggtaatgcttccacac

SEQ ID NO: 4544910 - DNA, 25 bp, Homo sapien
gagaatcacctcatcatgggaatct

SEQ ID NO: 4544911 - DNA, 25 bp, Homo sapien
cctcatcatgggaatctggtaatgc

SEQ ID NO: 4544912 - DNA, 25 bp, Homo sapien
gaatcacctcatcatgggaatctgg

SEQ ID NO: 4544913 - DNA, 25 bp, Homo sapien
gatgcttttccttgaacgggagcag

SEQ ID NO: 4544914 - DNA, 25 bp, Homo sapien
tcatctgtggacctcacatctcctt

SEQ ID NO: 4544915 - DNA, 25 bp, Homo sapien
tgaacgggagcagggagactcatct

SEQ ID NO: 4544916 - DNA, 25 bp, Homo sapien
gcagggagtgtcagtgggcctggaa

SEQ ID NO: 4544917 - DNA, 25 bp, Homo sapien
gatgtttgcgctggacctgtttcaa

SEQ ID NO: 4544918 - DNA, 25 bp, Homo sapien
tcgttgaccattcgcaggataatcc

SEQ ID NO: 4544919 - DNA, 25 bp, Homo sapien
tatagggactccaagtcgttgacca

SEQ ID NO: 4544920 - DNA, 25 bp, Homo sapien
gataatccttgaagagggatgcagc

SEQ ID NO: 4544921 - DNA, 25 bp, Homo sapien
cctcatgcagccgatcatccaagtt

SEQ ID NO: 4544922 - DNA, 25 bp, Homo sapien
catgcagccgatcatccaagttctt

SEQ ID NO: 4544923 - DNA, 25 bp, Homo sapien
tttcctcatgcagccgatcatccaa

SEQ ID NO: 4544924 - DNA, 25 bp, Homo sapien
atctttcctcatgcagccgatcatc

SEQ ID NO: 4544925 - DNA, 25 bp, Homo sapien
ctggctgaacacaggttgcagtgct

SEQ ID NO: 4544926 - DNA, 25 bp, Homo sapien
gctgaacacaggttgcagtgctctc

SEQ ID NO: 4544927 - DNA, 25 bp, Homo sapien
caggttgcagtgctctctgatggca

SEQ ID NO: 4544928 - DNA, 25 bp, Homo sapien
aggttgcagtgctctctgatggcac

SEQ ID NO: 4544929 - DNA, 25 bp, Homo sapien
gcagggacctgcattctatggaagc

SEQ ID NO: 4544930 - DNA, 25 bp, Homo sapien
gaagaggtgtcataagtgagttgct

SEQ ID NO: 4544931 - DNA, 25 bp, Homo sapien
tatggaagcatcaggctccacggaa

SEQ ID NO: 4544932 - DNA, 25 bp, Homo sapien
tccacggaaccttgtagagaaggca

SEQ ID NO: 4544933 - DNA, 25 bp, Homo sapien
tttcacactctataacccccagcag

SEQ ID NO: 4544934 - DNA, 25 bp, Homo sapien
taaatttatattcctccttagacgc

SEQ ID NO: 4544935 - DNA, 25 bp, Homo sapien
tccttagacgcttcctgaagaaaag

SEQ ID NO: 4544936 - DNA, 25 bp, Homo sapien
tctttagggcattttgagcagtggg

SEQ ID NO: 4544937 - DNA, 25 bp, Homo sapien
attttagctctaagtatctgtagca

SEQ ID NO: 4544938 - DNA, 25 bp, Homo sapien
cattttagctctaagtatctgtagc

SEQ ID NO: 4544939 - DNA, 25 bp, Homo sapien
ccattttagctctaagtatctgtag

SEQ ID NO: 4544940 - DNA, 25 bp, Homo sapien
ctccattttagctctaagtatctgt

SEQ ID NO: 4544941 - DNA, 25 bp, Homo sapien
gacggaagcaaaggtatcacatctc

SEQ ID NO: 4544942 - DNA, 25 bp, Homo sapien
gaggaagcagtcaccatagctccac

SEQ ID NO: 4544943 - DNA, 25 bp, Homo sapien
cagtcaggacggaagcaaaggtatc

SEQ ID NO: 4544944 - DNA, 25 bp, Homo sapien
tagctccactcagcagtcaggacgg

SEQ ID NO: 4544945 - DNA, 25 bp, Homo sapien
ttagaacagggattggttgagagtt

SEQ ID NO: 4544946 - DNA, 25 bp, Homo sapien
ttcattagaacagggattggttgag

SEQ ID NO: 4544947 - DNA, 25 bp, Homo sapien
tgtggttgttcattagaacagggat

SEQ ID NO: 4544948 - DNA, 25 bp, Homo sapien
ttgttcattagaacagggattggtt

SEQ ID NO: 4544949 - DNA, 25 bp, Homo sapien
gacacagttgtatccccattgcaaa

SEQ ID NO: 4544950 - DNA, 25 bp, Homo sapien
gtgcatcaagagctagacatcctag

SEQ ID NO: 4544951 - DNA, 25 bp, Homo sapien
cccaattctgtttagtgcttgtgca

SEQ ID NO: 4544952 - DNA, 25 bp, Homo sapien
attggaatccagcttgcaaccttgg

SEQ ID NO: 4544953 - DNA, 25 bp, Homo sapien
cctccccctggaacaagttcagctc

SEQ ID NO: 4544954 - DNA, 25 bp, Homo sapien
acacctccccctggaacaagttcag

SEQ ID NO: 4544955 - DNA, 25 bp, Homo sapien
gccagaaacacctccccctggaaca

SEQ ID NO: 4544956 - DNA, 25 bp, Homo sapien
ccccctggaacaagttcagctcttt

SEQ ID NO: 4544957 - DNA, 25 bp, Homo sapien
tgagatgagttgctggctctgatcc

SEQ ID NO: 4544958 - DNA, 25 bp, Homo sapien
cctgagtgacctatatgagatgagt

SEQ ID NO: 4544959 - DNA, 25 bp, Homo sapien
tcatcttttgattgcattgattcaa

SEQ ID NO: 4544960 - DNA, 25 bp, Homo sapien
ctctcatgattagatgaccacaact

SEQ ID NO: 4544961 - DNA, 25 bp, Homo sapien
ttctgcaagtgtaaatctgtgatca

SEQ ID NO: 4544962 - DNA, 25 bp, Homo sapien
tctgtgatcagcatctcctttgtca

SEQ ID NO: 4544963 - DNA, 25 bp, Homo sapien
gcaaaaaataagtaactgccctcac

SEQ ID NO: 4544964 - DNA, 25 bp, Homo sapien
caagtgctggcagatggaaggcttt

SEQ ID NO: 4544965 - DNA, 25 bp, Homo sapien
ctgaaacaggatcagaggatacatg

SEQ ID NO: 4544966 - DNA, 25 bp, Homo sapien
tcagaggatacatggctttctccca

SEQ ID NO: 4544967 - DNA, 25 bp, Homo sapien
caggatcagaggatacatggctttc

SEQ ID NO: 4544968 - DNA, 25 bp, Homo sapien
gaaacaggatcagaggatacatggc

SEQ ID NO: 4544969 - DNA, 25 bp, Homo sapien
ttccccagacaatcttgcctgctta

SEQ ID NO: 4544970 - DNA, 25 bp, Homo sapien
cacacttatatggagcggagggaca

SEQ ID NO: 4544971 - DNA, 25 bp, Homo sapien
gtctgagatgacctttcaaagctac

SEQ ID NO: 4544972 - DNA, 25 bp, Homo sapien
cggagggacaggagctagcattccc

SEQ ID NO: 4544973 - DNA, 25 bp, Homo sapien
ctatgctccatgtagggtttccagg

SEQ ID NO: 4544974 - DNA, 25 bp, Homo sapien
tggcatccatggtttttcacgaact

SEQ ID NO: 4544975 - DNA, 25 bp, Homo sapien
tttccacataacactatgctccatg

SEQ ID NO: 4544976 - DNA, 25 bp, Homo sapien
taatgggatgagctccaaaagcctt

SEQ ID NO: 4544977 - DNA, 25 bp, Homo sapien
gggttctgctctacactaagcaaaa

SEQ ID NO: 4544978 - DNA, 25 bp, Homo sapien
caaaagaggcagctgcctatagggt

SEQ ID NO: 4544979 - DNA, 25 bp, Homo sapien
gctgggtgtcttgtgagggtctgga

SEQ ID NO: 4544980 - DNA, 25 bp, Homo sapien
cctatagggtgtggtgtgaagaggc

SEQ ID NO: 4544981 - DNA, 25 bp, Homo sapien
tagccagaggtcaaagaggttactg

SEQ ID NO: 4544982 - DNA, 25 bp, Homo sapien
gaagcgtgacagctgtgacaacatt

SEQ ID NO: 4544983 - DNA, 25 bp, Homo sapien
tactgggagagtcgggttcttcttc

SEQ ID NO: 4544984 - DNA, 25 bp, Homo sapien
gcatcctgatctactttagactgga

SEQ ID NO: 4544985 - DNA, 25 bp, Homo sapien
tgggaaggctgccaaagggtaggct

SEQ ID NO: 4544986 - DNA, 25 bp, Homo sapien
taggctagaggctgaagtctccagg

SEQ ID NO: 4544987 - DNA, 25 bp, Homo sapien
ctccccagggtgtttccagtgggct

SEQ ID NO: 4544988 - DNA, 25 bp, Homo sapien
acaagacctgtctgtgtttgtcttc

SEQ ID NO: 4544989 - DNA, 25 bp, Homo sapien
cacgaatttgagactacagagagcc

SEQ ID NO: 4544990 - DNA, 25 bp, Homo sapien
gcaattgcagtttgaagaccagcca

SEQ ID NO: 4544991 - DNA, 25 bp, Homo sapien
cattgtggctccgtctgtgaaggaa

SEQ ID NO: 4544992 - DNA, 25 bp, Homo sapien
gccatgctcctcagactccgtaaaa

SEQ ID NO: 4544993 - DNA, 25 bp, Homo sapien
aaatgtaggtaagggggcatgtctc

SEQ ID NO: 4544994 - DNA, 25 bp, Homo sapien
aacaaatgtaggtaagggggcatgt

SEQ ID NO: 4544995 - DNA, 25 bp, Homo sapien
caaatgtaggtaagggggcatgtct

SEQ ID NO: 4544996 - DNA, 25 bp, Homo sapien
tgtaggtaagggggcatgtctccac

SEQ ID NO: 4544997 - DNA, 25 bp, Homo sapien
tgctgacaaagcaagtgtttgccct

SEQ ID NO: 4544998 - DNA, 25 bp, Homo sapien
caagtgtttgccctcccagtggtcc

SEQ ID NO: 4544999 - DNA, 25 bp, Homo sapien
tctgagtgtgagttctcccctggat

SEQ ID NO: 4545000 - DNA, 25 bp, Homo sapien
gctgactctgagtgtgagttctccc

SEQ ID NO: 4545001 - DNA, 25 bp, Homo sapien
gagggacagatgctatcaaggctta

SEQ ID NO: 4545002 - DNA, 25 bp, Homo sapien
aaagagggcggtgcagtgctacaca

SEQ ID NO: 4545003 - DNA, 25 bp, Homo sapien
caaaccgtatcaaatgtcatcacag

SEQ ID NO: 4545004 - DNA, 25 bp, Homo sapien
gatccaccctcatgagctagtcagc

SEQ ID NO: 4545005 - DNA, 25 bp, Homo sapien
caacttagtcttgaagaagtcaggc

SEQ ID NO: 4545006 - DNA, 25 bp, Homo sapien
cagttaacgagcatagaaagggccc

SEQ ID NO: 4545007 - DNA, 25 bp, Homo sapien
tcttggcaatgactaagaccatggc

SEQ ID NO: 4545008 - DNA, 25 bp, Homo sapien
cccctgagatggagtgatgtgtcga

SEQ ID NO: 4545009 - DNA, 25 bp, Homo sapien
gccacttgagtgtcctcaagacatg

SEQ ID NO: 4545010 - DNA, 25 bp, Homo sapien
tgttcgcctctccataggccacttg

SEQ ID NO: 4545011 - DNA, 25 bp, Homo sapien
atgttcgcctctccataggccactt

SEQ ID NO: 4545012 - DNA, 25 bp, Homo sapien
tcgcctctccataggccacttgagt

SEQ ID NO: 4545013 - DNA, 25 bp, Homo sapien
agagagagatctgagaataaggctg

SEQ ID NO: 4545014 - DNA, 25 bp, Homo sapien
tctcaaggcctgaaaatgggctatg

SEQ ID NO: 4545015 - DNA, 25 bp, Homo sapien
gacctgggctgcactaatactcttg

SEQ ID NO: 4545016 - DNA, 25 bp, Homo sapien
gacttctgaaggcaacctctggcaa

SEQ ID NO: 4545017 - DNA, 25 bp, Homo sapien
taaactcttggtggcccttgcacat

SEQ ID NO: 4545018 - DNA, 25 bp, Homo sapien
gccttttgcagcatccattaggtgc

SEQ ID NO: 4545019 - DNA, 25 bp, Homo sapien
ttgcagcatccattaggtgctgcat

SEQ ID NO: 4545020 - DNA, 25 bp, Homo sapien
agcagccctgctgccttttgcagca

SEQ ID NO: 4545021 - DNA, 25 bp, Homo sapien
gcagccctgctgccttttgcagcat

SEQ ID NO: 4545022 - DNA, 25 bp, Homo sapien
tctggcagaggataaggaattcatc

SEQ ID NO: 4545023 - DNA, 25 bp, Homo sapien
ttctctggcagaggataaggaattc

SEQ ID NO: 4545024 - DNA, 25 bp, Homo sapien
tggcagaggataaggaattcatcat

SEQ ID NO: 4545025 - DNA, 25 bp, Homo sapien
tctctggcagaggataaggaattca

SEQ ID NO: 4545026 - DNA, 25 bp, Homo sapien
agagtgcctgagttcatagccacac

SEQ ID NO: 4545027 - DNA, 25 bp, Homo sapien
taagcccggtgaatcaacagtgatg

SEQ ID NO: 4545028 - DNA, 25 bp, Homo sapien
tctgtgccctagagcatgaaaagtg

SEQ ID NO: 4545029 - DNA, 25 bp, Homo sapien
cttggcaaggaagtctaaacctgtg

SEQ ID NO: 4545030 - DNA, 25 bp, Homo sapien
gattggttgcctgaatacagtgagc

SEQ ID NO: 4545031 - DNA, 25 bp, Homo sapien
ggtttaattctcatggctgcattga

SEQ ID NO: 4545032 - DNA, 25 bp, Homo sapien
taagcacataagtgctgttgattgg

SEQ ID NO: 4545033 - DNA, 25 bp, Homo sapien
gagcacgttcaggtttaattctcat

SEQ ID NO: 4545034 - DNA, 25 bp, Homo sapien
ggtgagaccctcaggatagttccag

SEQ ID NO: 4545035 - DNA, 25 bp, Homo sapien
gtcacccaccctctcgggccctcca

SEQ ID NO: 4545036 - DNA, 25 bp, Homo sapien
gagaccctcaggatagttccagtat

SEQ ID NO: 4545037 - DNA, 25 bp, Homo sapien
tggtgagaccctcaggatagttcca

SEQ ID NO: 4545038 - DNA, 25 bp, Homo sapien
gaccgttttcaacaatttgctaatg

SEQ ID NO: 4545039 - DNA, 25 bp, Homo sapien
cggaacctgagatcccgaatcgctg

SEQ ID NO: 4545040 - DNA, 25 bp, Homo sapien
tttgctaatgctcttgtggcgcccg

SEQ ID NO: 4545041 - DNA, 25 bp, Homo sapien
cctgagatcccgaatcgctgtgtgt

SEQ ID NO: 4545042 - DNA, 25 bp, Homo sapien
gaagagtcaattttgctgagcccct

SEQ ID NO: 4545043 - DNA, 25 bp, Homo sapien
tatttcccgtcttgacagcggcggt

SEQ ID NO: 4545044 - DNA, 25 bp, Homo sapien
tgaagtcccggtatgaatcgcagcg

SEQ ID NO: 4545045 - DNA, 25 bp, Homo sapien
tctccggcaacgagaggcgttctgc

SEQ ID NO: 4545046 - DNA, 25 bp, Homo sapien
taagcaggcccctacatcaatgtcg

SEQ ID NO: 4545047 - DNA, 25 bp, Homo sapien
tgtcgcttgaaaggccacaagcaag

SEQ ID NO: 4545048 - DNA, 25 bp, Homo sapien
gattcacaaagatggccataattgc

SEQ ID NO: 4545049 - DNA, 25 bp, Homo sapien
tgcatgcacagaaaggctctgtcca

SEQ ID NO: 4545050 - DNA, 25 bp, Homo sapien
gtacagaaaactcaacagtgtacat

SEQ ID NO: 4545051 - DNA, 25 bp, Homo sapien
ttattttatgtacagaaaactcaac

SEQ ID NO: 4545052 - DNA, 25 bp, Homo sapien
tattttaattattttatgtacagaa

SEQ ID NO: 4545053 - DNA, 25 bp, Homo sapien
taattattttatgtacagaaaactc

SEQ ID NO: 4545054 - DNA, 25 bp, Homo sapien
aggatccaggacgttgccgccccag

SEQ ID NO: 4545055 - DNA, 25 bp, Homo sapien
ttaggatccaggacgttgccgcccc

SEQ ID NO: 4545056 - DNA, 25 bp, Homo sapien
acttaggatccaggacgttgccgcc

SEQ ID NO: 4545057 - DNA, 25 bp, Homo sapien
agacttaggatccaggacgttgccg

SEQ ID NO: 4545058 - DNA, 25 bp, Homo sapien
tatgcagctcgctgtttggcggtcc

SEQ ID NO: 4545059 - DNA, 25 bp, Homo sapien
ttatgcagctcgctgtttggcggtc

SEQ ID NO: 4545060 - DNA, 25 bp, Homo sapien
cttatgcagctcgctgtttggcggt

SEQ ID NO: 4545061 - DNA, 25 bp, Homo sapien
tcttaggcctttgctcaaacgggat

SEQ ID NO: 4545062 - DNA, 25 bp, Homo sapien
ttaggcctttgctcaaacgggattc

SEQ ID NO: 4545063 - DNA, 25 bp, Homo sapien
aggcctttgctcaaacgggattcac

SEQ ID NO: 4545064 - DNA, 25 bp, Homo sapien
ttcttaggcctttgctcaaacggga

SEQ ID NO: 4545065 - DNA, 25 bp, Homo sapien
ttagcctcctgcttcttcacgactg

SEQ ID NO: 4545066 - DNA, 25 bp, Homo sapien
ctgcttcttcacgactgcaggggcc

SEQ ID NO: 4545067 - DNA, 25 bp, Homo sapien
gcttcttcacgactgcaggggccgg

SEQ ID NO: 4545068 - DNA, 25 bp, Homo sapien
ttcttcacgactgcaggggccggag

SEQ ID NO: 4545069 - DNA, 25 bp, Homo sapien
tcccttggccttctttcctttcagc

SEQ ID NO: 4545070 - DNA, 25 bp, Homo sapien
ccttggccttctttcctttcagcat

SEQ ID NO: 4545071 - DNA, 25 bp, Homo sapien
cccttggccttctttcctttcagca

SEQ ID NO: 4545072 - DNA, 25 bp, Homo sapien
ggaggagagagcaatcttcctattt

SEQ ID NO: 4545073 - DNA, 25 bp, Homo sapien
cgggaggagagagcaatcttcctat

SEQ ID NO: 4545074 - DNA, 25 bp, Homo sapien
gggaggagagagcaatcttcctatt

SEQ ID NO: 4545075 - DNA, 25 bp, Homo sapien
gagtgtatggtagccctcattgagc

SEQ ID NO: 4545076 - DNA, 25 bp, Homo sapien
tggtagtggctgttacagcttgtgc

SEQ ID NO: 4545077 - DNA, 25 bp, Homo sapien
gccttcatagattggcaaagtgttc

SEQ ID NO: 4545078 - DNA, 25 bp, Homo sapien
tcagaaatttgtaggcctgcatcca

SEQ ID NO: 4545079 - DNA, 25 bp, Homo sapien
tagtgagtcagcagtgattccatcc

SEQ ID NO: 4545080 - DNA, 25 bp, Homo sapien
tggtgtcaaagcaggatctagttct

SEQ ID NO: 4545081 - DNA, 25 bp, Homo sapien
tgggatcacagctgagagacactct

SEQ ID NO: 4545082 - DNA, 25 bp, Homo sapien
tataggaaatgatagctcagccagc

SEQ ID NO: 4545083 - DNA, 25 bp, Homo sapien
atggactctgccgttccacccattg

SEQ ID NO: 4545084 - DNA, 25 bp, Homo sapien
ggtatatgttacgagaacgcccttc

SEQ ID NO: 4545085 - DNA, 25 bp, Homo sapien
gagattgaagcctacaaccatgcaa

SEQ ID NO: 4545086 - DNA, 25 bp, Homo sapien
tctgaagctggcatggtacttaaag

SEQ ID NO: 4545087 - DNA, 25 bp, Homo sapien
gaacgacagcgtattactggaagag

SEQ ID NO: 4545088 - DNA, 25 bp, Homo sapien
gaacattttaacagcacctctctta

SEQ ID NO: 4545089 - DNA, 25 bp, Homo sapien
ccaagatgctacatgcagcagacag

SEQ ID NO: 4545090 - DNA, 25 bp, Homo sapien
tgagaacattttaacagcacctctc

SEQ ID NO: 4545091 - DNA, 25 bp, Homo sapien
agatgctacatgcagcagacagctg

SEQ ID NO: 4545092 - DNA, 25 bp, Homo sapien
gaacagtaactctatgtgaccccag

SEQ ID NO: 4545093 - DNA, 25 bp, Homo sapien
cggcataaaaagtaaccctcaagtg

SEQ ID NO: 4545094 - DNA, 25 bp, Homo sapien
tgatctctggaagcgctaaagctaa

SEQ ID NO: 4545095 - DNA, 25 bp, Homo sapien
ccatttgtgcaaaggtaaacgcaga

SEQ ID NO: 4545096 - DNA, 25 bp, Homo sapien
gctgtcattgcttctcgtggatgtt

SEQ ID NO: 4545097 - DNA, 25 bp, Homo sapien
tcttagcacgtaatgagttggtggc

SEQ ID NO: 4545098 - DNA, 25 bp, Homo sapien
tgcttctcgtggatgttgacagtgg

SEQ ID NO: 4545099 - DNA, 25 bp, Homo sapien
gcttgctcttagcacgtaatgagtt

SEQ ID NO: 4545100 - DNA, 25 bp, Homo sapien
cgatcaatcatagatctagtttgag

SEQ ID NO: 4545101 - DNA, 25 bp, Homo sapien
aattgatcacccgatcaatcataga

SEQ ID NO: 4545102 - DNA, 25 bp, Homo sapien
tcacccgatcaatcatagatctagt

SEQ ID NO: 4545103 - DNA, 25 bp, Homo sapien
tgatcacccgatcaatcatagatct

SEQ ID NO: 4545104 - DNA, 25 bp, Homo sapien
cagggaagactctgcttggcccaga

SEQ ID NO: 4545105 - DNA, 25 bp, Homo sapien
tatcgtctgactaggcaaatggttg

SEQ ID NO: 4545106 - DNA, 25 bp, Homo sapien
tgatggctgctcttaacccaagact

SEQ ID NO: 4545107 - DNA, 25 bp, Homo sapien
cactggagccacatgaaatgagagg

SEQ ID NO: 4545108 - DNA, 25 bp, Homo sapien
taatgacaatctttgaatgaagctt

SEQ ID NO: 4545109 - DNA, 25 bp, Homo sapien
tctgtttaatgacaatctttgaatg

SEQ ID NO: 4545110 - DNA, 25 bp, Homo sapien
gtttaatgacaatctttgaatgaag

SEQ ID NO: 4545111 - DNA, 25 bp, Homo sapien
atgacaatctttgaatgaagctttc

SEQ ID NO: 4545112 - DNA, 25 bp, Homo sapien
tggcaaccactcaacatctgctctc

SEQ ID NO: 4545113 - DNA, 25 bp, Homo sapien
gtctaagcacctgctttttggtggg

SEQ ID NO: 4545114 - DNA, 25 bp, Homo sapien
catagtgcattcaaagagctggttt

SEQ ID NO: 4545115 - DNA, 25 bp, Homo sapien
aataaaatggtctaagcacctgctt

SEQ ID NO: 4545116 - DNA, 25 bp, Homo sapien
caaaagctttccattctgtgcatgg

SEQ ID NO: 4545117 - DNA, 25 bp, Homo sapien
catggtgttggccaaatgaattgat

SEQ ID NO: 4545118 - DNA, 25 bp, Homo sapien
agtcttccagtcgaagtcttccatt

SEQ ID NO: 4545119 - DNA, 25 bp, Homo sapien
cagagcagtggttacgtattcatcc

SEQ ID NO: 4545120 - DNA, 25 bp, Homo sapien
cttgatttattagcctttctcagca

SEQ ID NO: 4545121 - DNA, 25 bp, Homo sapien
tttctcagcattatatcttgtggac

SEQ ID NO: 4545122 - DNA, 25 bp, Homo sapien
tattagcctttctcagcattatatc

SEQ ID NO: 4545123 - DNA, 25 bp, Homo sapien
gcctttctcagcattatatcttgtg

SEQ ID NO: 4545124 - DNA, 25 bp, Homo sapien
taggagagctggtgtaaaagcaagc

SEQ ID NO: 4545125 - DNA, 25 bp, Homo sapien
cagccagcggtaaagtgttgaacat

SEQ ID NO: 4545126 - DNA, 25 bp, Homo sapien
gggtcatctttgtggccagaactgc

SEQ ID NO: 4545127 - DNA, 25 bp, Homo sapien
tcatgtgggatcagataggagagct

SEQ ID NO: 4545128 - DNA, 25 bp, Homo sapien
ctggaggaagcagtgacagaggcag

SEQ ID NO: 4545129 - DNA, 25 bp, Homo sapien
gaagcagtgacagaggcagacccat

SEQ ID NO: 4545130 - DNA, 25 bp, Homo sapien
ggaggaagcagtgacagaggcagac

SEQ ID NO: 4545131 - DNA, 25 bp, Homo sapien
aggaagcagtgacagaggcagaccc

SEQ ID NO: 4545132 - DNA, 25 bp, Homo sapien
tctgtattcatggtttcagcatctg

SEQ ID NO: 4545133 - DNA, 25 bp, Homo sapien
ctctgtattcatggtttcagcatct

SEQ ID NO: 4545134 - DNA, 25 bp, Homo sapien
gactctagtggtacagtagctttaa

SEQ ID NO: 4545135 - DNA, 25 bp, Homo sapien
gaaatgcatcacattgactattata

SEQ ID NO: 4545136 - DNA, 25 bp, Homo sapien
ttaggcagactctagtggtacagta

SEQ ID NO: 4545137 - DNA, 25 bp, Homo sapien
cagtagctttaagaaggacagcagt

SEQ ID NO: 4545138 - DNA, 25 bp, Homo sapien
caacttcagattgtttgaagtaatc

SEQ ID NO: 4545139 - DNA, 25 bp, Homo sapien
tggtaatatgtccacgatccagcta

SEQ ID NO: 4545140 - DNA, 25 bp, Homo sapien
tgaagtaatcacaaactattgatat

SEQ ID NO: 4545141 - DNA, 25 bp, Homo sapien
tccagctaggactagtggagcacag

SEQ ID NO: 4545142 - DNA, 25 bp, Homo sapien
cacactggtgtgcaaagactgcaaa

SEQ ID NO: 4545143 - DNA, 25 bp, Homo sapien
agcctatggccacactggtgtgcaa

SEQ ID NO: 4545144 - DNA, 25 bp, Homo sapien
ggtgtgcaaagactgcaaaatcatc

SEQ ID NO: 4545145 - DNA, 25 bp, Homo sapien
tatggccacactggtgtgcaaagac

SEQ ID NO: 4545146 - DNA, 25 bp, Homo sapien
caaagactctcactttctccaaagt

SEQ ID NO: 4545147 - DNA, 25 bp, Homo sapien
tcactttctccaaagttcccatcac

SEQ ID NO: 4545148 - DNA, 25 bp, Homo sapien
tcaaagactctcactttctccaaag

SEQ ID NO: 4545149 - DNA, 25 bp, Homo sapien
ctctcactttctccaaagttcccat

SEQ ID NO: 4545150 - DNA, 25 bp, Homo sapien
aatgatgatgattccggtaggtcag

SEQ ID NO: 4545151 - DNA, 25 bp, Homo sapien
ggaaacagacatgtgaaatatgcaa

SEQ ID NO: 4545152 - DNA, 25 bp, Homo sapien
atagaaatccacagataccctgccc

SEQ ID NO: 4545153 - DNA, 25 bp, Homo sapien
tatgcaattggtgtggaaaatagaa

SEQ ID NO: 4545154 - DNA, 25 bp, Homo sapien
gtaaaacctactggagactggtgaa

SEQ ID NO: 4545155 - DNA, 25 bp, Homo sapien
gaagcctgtgaaatccgtaatagaa

SEQ ID NO: 4545156 - DNA, 25 bp, Homo sapien
tgaaatccgtaatagaaatccttcc

SEQ ID NO: 4545157 - DNA, 25 bp, Homo sapien
tactggagactggtgaagtgccagc

SEQ ID NO: 4545158 - DNA, 25 bp, Homo sapien
cacatgagctttggcatgtttgtag

SEQ ID NO: 4545159 - DNA, 25 bp, Homo sapien
tgtttgtagaacccatattttccag

SEQ ID NO: 4545160 - DNA, 25 bp, Homo sapien
tgtagccacatgagctttggcatgt

SEQ ID NO: 4545161 - DNA, 25 bp, Homo sapien
catgtttgtagaacccatattttcc

SEQ ID NO: 4545162 - DNA, 25 bp, Homo sapien
cagctagaaactcaacacaggattt

SEQ ID NO: 4545163 - DNA, 25 bp, Homo sapien
caaatggctaacagctagaaactca

SEQ ID NO: 4545164 - DNA, 25 bp, Homo sapien
gatttctctggcttgaccacctcac

SEQ ID NO: 4545165 - DNA, 25 bp, Homo sapien
tggctaacagctagaaactcaacac

SEQ ID NO: 4545166 - DNA, 25 bp, Homo sapien
ttgtaaatgaccccggaatggtatc

SEQ ID NO: 4545167 - DNA, 25 bp, Homo sapien
aatgaccccggaatggtatcatttg

SEQ ID NO: 4545168 - DNA, 25 bp, Homo sapien
taaatgaccccggaatggtatcatt

SEQ ID NO: 4545169 - DNA, 25 bp, Homo sapien
gaccccggaatggtatcatttgaaa

SEQ ID NO: 4545170 - DNA, 25 bp, Homo sapien
aggctgttccttgggaatactcctt

SEQ ID NO: 4545171 - DNA, 25 bp, Homo sapien
ttccagaagcttcaaatctgaatat

SEQ ID NO: 4545172 - DNA, 25 bp, Homo sapien
catctgcggtcactgaaagggcttc

SEQ ID NO: 4545173 - DNA, 25 bp, Homo sapien
tggactttgacttggcatgcttgct

SEQ ID NO: 4545174 - DNA, 25 bp, Homo sapien
acgacaatgcctctatggacttggc

SEQ ID NO: 4545175 - DNA, 25 bp, Homo sapien
catctgctgtgacaagcatcttcac

SEQ ID NO: 4545176 - DNA, 25 bp, Homo sapien
gaagcaggaacttcatcgcaaataa

SEQ ID NO: 4545177 - DNA, 25 bp, Homo sapien
atcgcaaataagtccatgtagcccc

SEQ ID NO: 4545178 - DNA, 25 bp, Homo sapien
ccctgcagcaccaagtgtcttggac

SEQ ID NO: 4545179 - DNA, 25 bp, Homo sapien
ctgcagcaccaagtgtcttggactg

SEQ ID NO: 4545180 - DNA, 25 bp, Homo sapien
tgcagcaccaagtgtcttggactgt

SEQ ID NO: 4545181 - DNA, 25 bp, Homo sapien
cctgcagcaccaagtgtcttggact

SEQ ID NO: 4545182 - DNA, 25 bp, Homo sapien
tatcgtccccatgctccaacttaag

SEQ ID NO: 4545183 - DNA, 25 bp, Homo sapien
tgctgtgttatcgtccccatgctcc

SEQ ID NO: 4545184 - DNA, 25 bp, Homo sapien
gaatgctgtgttatcgtccccatgc

SEQ ID NO: 4545185 - DNA, 25 bp, Homo sapien
tgttatcgtccccatgctccaactt

SEQ ID NO: 4545186 - DNA, 25 bp, Homo sapien
atttgacttaaaggaatgcatacct

SEQ ID NO: 4545187 - DNA, 25 bp, Homo sapien
ttggttatttgacttaaaggaatgc

SEQ ID NO: 4545188 - DNA, 25 bp, Homo sapien
tggttatttgacttaaaggaatgca

SEQ ID NO: 4545189 - DNA, 25 bp, Homo sapien
gacttaaaggaatgcatacctgcat

SEQ ID NO: 4545190 - DNA, 25 bp, Homo sapien
cctggaagctctactttccctccag

SEQ ID NO: 4545191 - DNA, 25 bp, Homo sapien
tggaagctctactttccctccaggt

SEQ ID NO: 4545192 - DNA, 25 bp, Homo sapien
ttccctggaagctctactttccctc

SEQ ID NO: 4545193 - DNA, 25 bp, Homo sapien
gaagctctactttccctccaggtac

SEQ ID NO: 4545194 - DNA, 25 bp, Homo sapien
ccctcctcctttccatcgcctggcc

SEQ ID NO: 4545195 - DNA, 25 bp, Homo sapien
ctcctcctttccatcgcctggccat

SEQ ID NO: 4545196 - DNA, 25 bp, Homo sapien
cctcctcctttccatcgcctggcca

SEQ ID NO: 4545197 - DNA, 25 bp, Homo sapien
aaaaggtattcatgggtcctgaact

SEQ ID NO: 4545198 - DNA, 25 bp, Homo sapien
aaggtattcatgggtcctgaacttg

SEQ ID NO: 4545199 - DNA, 25 bp, Homo sapien
gaaaaggtattcatgggtcctgaac

SEQ ID NO: 4545200 - DNA, 25 bp, Homo sapien
tggaaaaggtattcatgggtcctga

SEQ ID NO: 4545201 - DNA, 25 bp, Homo sapien
tcagagaccatgtgttccacactct

SEQ ID NO: 4545202 - DNA, 25 bp, Homo sapien
cttcagagaccatgtgttccacact

SEQ ID NO: 4545203 - DNA, 25 bp, Homo sapien
ttcagagaccatgtgttccacactc

SEQ ID NO: 4545204 - DNA, 25 bp, Homo sapien
agagaccatgtgttccacactctgg

SEQ ID NO: 4545205 - DNA, 25 bp, Homo sapien
taggattcaaatgtctcaggagagg

SEQ ID NO: 4545206 - DNA, 25 bp, Homo sapien
cgataatttgcaagttaccacgact

SEQ ID NO: 4545207 - DNA, 25 bp, Homo sapien
tgggcaccatttgtgcagcataagc

SEQ ID NO: 4545208 - DNA, 25 bp, Homo sapien
tgggatccctacagagtctctcagt

SEQ ID NO: 4545209 - DNA, 25 bp, Homo sapien
tcaggaaagcatacatgcatcctca

SEQ ID NO: 4545210 - DNA, 25 bp, Homo sapien
tactggtgaccaatcctgaaaactg

SEQ ID NO: 4545211 - DNA, 25 bp, Homo sapien
gccctcctgacttattgagagttca

SEQ ID NO: 4545212 - DNA, 25 bp, Homo sapien
ggagagtaagctccccaaagaccga

SEQ ID NO: 4545213 - DNA, 25 bp, Homo sapien
taattctcctcctccatgctctccc

SEQ ID NO: 4545214 - DNA, 25 bp, Homo sapien
ttaattctcctcctccatgctctcc

SEQ ID NO: 4545215 - DNA, 25 bp, Homo sapien
ctcctcctccatgctctccctccat

SEQ ID NO: 4545216 - DNA, 25 bp, Homo sapien
attctcctcctccatgctctccctc

SEQ ID NO: 4545217 - DNA, 25 bp, Homo sapien
agagttgccctcgagacctgcactc

SEQ ID NO: 4545218 - DNA, 25 bp, Homo sapien
taaagaagtttgagaggcagggcca

SEQ ID NO: 4545219 - DNA, 25 bp, Homo sapien
cctgcactcctggatccctaaagaa

SEQ ID NO: 4545220 - DNA, 25 bp, Homo sapien
ctcctggatccctaaagaagtttga

SEQ ID NO: 4545221 - DNA, 25 bp, Homo sapien
tcttgagagcccagtatttcaagtg

SEQ ID NO: 4545222 - DNA, 25 bp, Homo sapien
ggagggaatctcaagttgaatcttg

SEQ ID NO: 4545223 - DNA, 25 bp, Homo sapien
gagagcccagtatttcaagtgaaat

SEQ ID NO: 4545224 - DNA, 25 bp, Homo sapien
caacggtggagggaatctcaagttg

SEQ ID NO: 4545225 - DNA, 25 bp, Homo sapien
ttaagaattcgccagttgggccgcc

SEQ ID NO: 4545226 - DNA, 25 bp, Homo sapien
cgtggtggaagagttatatacaaag

SEQ ID NO: 4545227 - DNA, 25 bp, Homo sapien
tccaacagttagcagtctgagtggt

SEQ ID NO: 4545228 - DNA, 25 bp, Homo sapien
tgtacagaaattggcagcgaggtac

SEQ ID NO: 4545229 - DNA, 25 bp, Homo sapien
ccatgtgcaattccacaccactgca

SEQ ID NO: 4545230 - DNA, 25 bp, Homo sapien
gtgttacctgcagtttaaccatctg

SEQ ID NO: 4545231 - DNA, 25 bp, Homo sapien
tggactctcactctgctttgccatc

SEQ ID NO: 4545232 - DNA, 25 bp, Homo sapien
gccatccactgtctgaacgaatgca

SEQ ID NO: 4545233 - DNA, 25 bp, Homo sapien
aacatataagagcaatggactctca

SEQ ID NO: 4545234 - DNA, 25 bp, Homo sapien
ccatccactgtctgaacgaatgcat

SEQ ID NO: 4545235 - DNA, 25 bp, Homo sapien
caaagacttttgtgaatggcaataa

SEQ ID NO: 4545236 - DNA, 25 bp, Homo sapien
cctggctataattaacctgaagtgt

SEQ ID NO: 4545237 - DNA, 25 bp, Homo sapien
tcccgcttgtatagaaaatgacccc

SEQ ID NO: 4545238 - DNA, 25 bp, Homo sapien
cacatcaagtttgtcccgcttgtat

SEQ ID NO: 4545239 - DNA, 25 bp, Homo sapien
gacagccctgtagtcacatcaagtt

SEQ ID NO: 4545240 - DNA, 25 bp, Homo sapien
cagggcagaacacagcagtcaggtt

SEQ ID NO: 4545241 - DNA, 25 bp, Homo sapien
gccagggtcagcctctgcagactca

SEQ ID NO: 4545242 - DNA, 25 bp, Homo sapien
tccaaccactttcctggccagggtc

SEQ ID NO: 4545243 - DNA, 25 bp, Homo sapien
tgcctctctgcaaaaatgcttttcc

SEQ ID NO: 4545244 - DNA, 25 bp, Homo sapien
attcaaaagaagcaagatgtttgcc

SEQ ID NO: 4545245 - DNA, 25 bp, Homo sapien
ctcctgatcggcctctctgattcaa

SEQ ID NO: 4545246 - DNA, 25 bp, Homo sapien
aaagaagcaagatgtttgcctgaac

SEQ ID NO: 4545247 - DNA, 25 bp, Homo sapien
tccttctcctgatcggcctctctga

SEQ ID NO: 4545248 - DNA, 25 bp, Homo sapien
ctgagtcgagagcaccaccatatct

SEQ ID NO: 4545249 - DNA, 25 bp, Homo sapien
tgagtcgagagcaccaccatatctt

SEQ ID NO: 4545250 - DNA, 25 bp, Homo sapien
gctccagtgcaggaatgtgattcta

SEQ ID NO: 4545251 - DNA, 25 bp, Homo sapien
tagcaaaggctgaccacccccagtt

SEQ ID NO: 4545252 - DNA, 25 bp, Homo sapien
cagttccaccttttctagccttatc

SEQ ID NO: 4545253 - DNA, 25 bp, Homo sapien
cttgtgcactggactgaggttatgg

SEQ ID NO: 4545254 - DNA, 25 bp, Homo sapien
gacacatctgggttccaaatcccca

SEQ ID NO: 4545255 - DNA, 25 bp, Homo sapien
cacaacctttctagttggctgccct

SEQ ID NO: 4545256 - DNA, 25 bp, Homo sapien
tttgaccacactataagtaagagcc

SEQ ID NO: 4545257 - DNA, 25 bp, Homo sapien
tggtttcttgaaccttttgaccaca

SEQ ID NO: 4545258 - DNA, 25 bp, Homo sapien
cataaagaataagtgggctacacaa

SEQ ID NO: 4545259 - DNA, 25 bp, Homo sapien
taaagaataagtgggctacacaaaa

SEQ ID NO: 4545260 - DNA, 25 bp, Homo sapien
gaataagtgggctacacaaaactgc

SEQ ID NO: 4545261 - DNA, 25 bp, Homo sapien
taagtgggctacacaaaactgcaga

SEQ ID NO: 4545262 - DNA, 25 bp, Homo sapien
gcagcagtagctcttaaagtatgtc

SEQ ID NO: 4545263 - DNA, 25 bp, Homo sapien
tgcagcagtagctcttaaagtatgt

SEQ ID NO: 4545264 - DNA, 25 bp, Homo sapien
ctgcagcagtagctcttaaagtatg

SEQ ID NO: 4545265 - DNA, 25 bp, Homo sapien
cagcagtagctcttaaagtatgtcc

SEQ ID NO: 4545266 - DNA, 25 bp, Homo sapien
tatgccatggcccttatggtctctt

SEQ ID NO: 4545267 - DNA, 25 bp, Homo sapien
tctgcatccagagggagtgaagatt

SEQ ID NO: 4545268 - DNA, 25 bp, Homo sapien
tatcctgcatctgggactgaggttt

SEQ ID NO: 4545269 - DNA, 25 bp, Homo sapien
gaagcttgacaagggcatactctgt

SEQ ID NO: 4545270 - DNA, 25 bp, Homo sapien
ttctggtggggtgagatagaccggg

SEQ ID NO: 4545271 - DNA, 25 bp, Homo sapien
ggtggggtgagatagaccgggctcc

SEQ ID NO: 4545272 - DNA, 25 bp, Homo sapien
tggtggggtgagatagaccgggctc

SEQ ID NO: 4545273 - DNA, 25 bp, Homo sapien
tctggtggggtgagatagaccgggc

SEQ ID NO: 4545274 - DNA, 25 bp, Homo sapien
ggtgtccatgacagcgctatcacgt

SEQ ID NO: 4545275 - DNA, 25 bp, Homo sapien
gacagcgctatcacgtgtgcctcat

SEQ ID NO: 4545276 - DNA, 25 bp, Homo sapien
tatcacgtgtgcctcattctttctt

SEQ ID NO: 4545277 - DNA, 25 bp, Homo sapien
tcttgttgctacccaataaggattt

SEQ ID NO: 4545278 - DNA, 25 bp, Homo sapien
ggtgagaagaatatggacacagtgt

SEQ ID NO: 4545279 - DNA, 25 bp, Homo sapien
acacagtgttaggaaggcgataggt

SEQ ID NO: 4545280 - DNA, 25 bp, Homo sapien
gagaagaatatggacacagtgttag

SEQ ID NO: 4545281 - DNA, 25 bp, Homo sapien
aatatggacacagtgttaggaaggc

SEQ ID NO: 4545282 - DNA, 25 bp, Homo sapien
tgtgtggcatgtaggaacaagctgc

SEQ ID NO: 4545283 - DNA, 25 bp, Homo sapien
ccagctgtggtcatcctaatgtgaa

SEQ ID NO: 4545284 - DNA, 25 bp, Homo sapien
ctaatgtgaacaggcctccggcatt

SEQ ID NO: 4545285 - DNA, 25 bp, Homo sapien
tgcatggatggtgtaccaggccctg

SEQ ID NO: 4545286 - DNA, 25 bp, Homo sapien
tcttcatgttctactcttatttcca

SEQ ID NO: 4545287 - DNA, 25 bp, Homo sapien
tgaaagcatgggctttgagtctgtt

SEQ ID NO: 4545288 - DNA, 25 bp, Homo sapien
tgggctttgagtctgtttcatcttc

SEQ ID NO: 4545289 - DNA, 25 bp, Homo sapien
gttctactcttatttccaccttctc

SEQ ID NO: 4545290 - DNA, 25 bp, Homo sapien
tggccactgtgaacggatagggcca

SEQ ID NO: 4545291 - DNA, 25 bp, Homo sapien
tgtgaacggatagggccagtaatga

SEQ ID NO: 4545292 - DNA, 25 bp, Homo sapien
gatagggccagtaatgacccatgtg

SEQ ID NO: 4545293 - DNA, 25 bp, Homo sapien
tgacccatgtgatgtgatttcagaa

SEQ ID NO: 4545294 - DNA, 25 bp, Homo sapien
tgtcctgtaatttcatatccctcag

SEQ ID NO: 4545295 - DNA, 25 bp, Homo sapien
gtaatttcatatccctcagcctttg

SEQ ID NO: 4545296 - DNA, 25 bp, Homo sapien
tgaaaataaaggaggtcttcaacca

SEQ ID NO: 4545297 - DNA, 25 bp, Homo sapien
ccccagtgtgtggtacagtgctgaa

SEQ ID NO: 4545298 - DNA, 25 bp, Homo sapien
cactgctggagtaggctgtccggca

SEQ ID NO: 4545299 - DNA, 25 bp, Homo sapien
tgtccggcacccacttttactgcat

SEQ ID NO: 4545300 - DNA, 25 bp, Homo sapien
ctttcatatttcacatcagcctttg

SEQ ID NO: 4545301 - DNA, 25 bp, Homo sapien
tgaatgcattgatcatgctttcata

SEQ ID NO: 4545302 - DNA, 25 bp, Homo sapien
ggcctcctggtttgcataccacaca

SEQ ID NO: 4545303 - DNA, 25 bp, Homo sapien
caaccctgccacgtttcatacaagg

SEQ ID NO: 4545304 - DNA, 25 bp, Homo sapien
aggcccctttcatgcaaggcccagg

SEQ ID NO: 4545305 - DNA, 25 bp, Homo sapien
tcaaatgatgtgagatgcggtccac

SEQ ID NO: 4545306 - DNA, 25 bp, Homo sapien
ccattgtgcaaacacgcagggatct

SEQ ID NO: 4545307 - DNA, 25 bp, Homo sapien
gcactttcaccatacccttacactg

SEQ ID NO: 4545308 - DNA, 25 bp, Homo sapien
ttcactcgtgctattcctcttccta

SEQ ID NO: 4545309 - DNA, 25 bp, Homo sapien
ccatacccttacactgtccattgtg

SEQ ID NO: 4545310 - DNA, 25 bp, Homo sapien
tcaatatcactcctgaagttatcaa

SEQ ID NO: 4545311 - DNA, 25 bp, Homo sapien
tctccttctaagtactggaggtgga

SEQ ID NO: 4545312 - DNA, 25 bp, Homo sapien
aggtggagtctagaattggctgtaa

SEQ ID NO: 4545313 - DNA, 25 bp, Homo sapien
accgtaacacaggatataggttcaa

SEQ ID NO: 4545314 - DNA, 25 bp, Homo sapien
taagacctggactttgctgaaactt

SEQ ID NO: 4545315 - DNA, 25 bp, Homo sapien
tgcttcagtctcctaggcgcaaaga

SEQ ID NO: 4545316 - DNA, 25 bp, Homo sapien
tctgtgagacgctaccatcatggca

SEQ ID NO: 4545317 - DNA, 25 bp, Homo sapien
caaagacctggtctctatgaagctc

SEQ ID NO: 4545318 - DNA, 25 bp, Homo sapien
tgttggcccctattcagagactgtg

SEQ ID NO: 4545319 - DNA, 25 bp, Homo sapien
tccacaaatagctcttggtcagatt

SEQ ID NO: 4545320 - DNA, 25 bp, Homo sapien
tattacaggtctcaacactatcatg

SEQ ID NO: 4545321 - DNA, 25 bp, Homo sapien
tacacaattagtgcagcagcagttc

SEQ ID NO: 4545322 - DNA, 25 bp, Homo sapien
taagcagcaggcacctactaggtcc

SEQ ID NO: 4545323 - DNA, 25 bp, Homo sapien
ggttagaagtgttcatggccacaaa

SEQ ID NO: 4545324 - DNA, 25 bp, Homo sapien
gagaaccataaccttgcagcacggc

SEQ ID NO: 4545325 - DNA, 25 bp, Homo sapien
tgccagagtacagggaaacagttct

SEQ ID NO: 4545326 - DNA, 25 bp, Homo sapien
tatatttaacgaatggcccaagaca

SEQ ID NO: 4545327 - DNA, 25 bp, Homo sapien
tgaagtggagacaactggagtagct

SEQ ID NO: 4545328 - DNA, 25 bp, Homo sapien
caatccacaggagatgtccaattga

SEQ ID NO: 4545329 - DNA, 25 bp, Homo sapien
ttatctggtacatagggcaggcaga

SEQ ID NO: 4545330 - DNA, 25 bp, Homo sapien
cagccctgatgagataatggtggac

SEQ ID NO: 4545331 - DNA, 25 bp, Homo sapien
tgtgtgccaacataacccagcttgt

SEQ ID NO: 4545332 - DNA, 25 bp, Homo sapien
tattagcagcaggaacaagcatacc

SEQ ID NO: 4545333 - DNA, 25 bp, Homo sapien
tgggttacccgaattaccagcctga

SEQ ID NO: 4545334 - DNA, 25 bp, Homo sapien
gtaagcacattttaacagtatgctt

SEQ ID NO: 4545335 - DNA, 25 bp, Homo sapien
taagcacattttaacagtatgcttt

SEQ ID NO: 4545336 - DNA, 25 bp, Homo sapien
gcacattttaacagtatgcttttct

SEQ ID NO: 4545337 - DNA, 25 bp, Homo sapien
cacattttaacagtatgcttttctt

SEQ ID NO: 4545338 - DNA, 25 bp, Homo sapien
gcatttataaatggatcagctcctg

SEQ ID NO: 4545339 - DNA, 25 bp, Homo sapien
taggaatgttccaaccatggcttga

SEQ ID NO: 4545340 - DNA, 25 bp, Homo sapien
cacttcaatggctggaaactagaca

SEQ ID NO: 4545341 - DNA, 25 bp, Homo sapien
gctatgtctaacatcgtgggatcca

SEQ ID NO: 4545342 - DNA, 25 bp, Homo sapien
cgatccaagcgaacatcaatttctc

SEQ ID NO: 4545343 - DNA, 25 bp, Homo sapien
gggagtcaaatctgactgttccaca

SEQ ID NO: 4545344 - DNA, 25 bp, Homo sapien
ctgccactgatttttatgccattca

SEQ ID NO: 4545345 - DNA, 25 bp, Homo sapien
ttatgcattacgatccaagcgaaca

SEQ ID NO: 4545346 - DNA, 25 bp, Homo sapien
ttagtttctgccaagtcaagtcaaa

SEQ ID NO: 4545347 - DNA, 25 bp, Homo sapien
cacactgactgaatttctcttttag

SEQ ID NO: 4545348 - DNA, 25 bp, Homo sapien
ctcttttagtttctgccaagtcaag

SEQ ID NO: 4545349 - DNA, 25 bp, Homo sapien
cttttagtttctgccaagtcaagtc

SEQ ID NO: 4545350 - DNA, 25 bp, Homo sapien
cattggacccgataaaaatcctcga

SEQ ID NO: 4545351 - DNA, 25 bp, Homo sapien
tctggttgcctttggagcctattct

SEQ ID NO: 4545352 - DNA, 25 bp, Homo sapien
tggtcccattctatcaaagctggaa

SEQ ID NO: 4545353 - DNA, 25 bp, Homo sapien
gatccatatcgatgctcctttccag

SEQ ID NO: 4545354 - DNA, 25 bp, Homo sapien
tattacaactctagcactcaagccg

SEQ ID NO: 4545355 - DNA, 25 bp, Homo sapien
gcttccaataacaggacagttgttc

SEQ ID NO: 4545356 - DNA, 25 bp, Homo sapien
catatacatttagttagctgagaaa

SEQ ID NO: 4545357 - DNA, 25 bp, Homo sapien
gaacagaatttgcttacatatacat

SEQ ID NO: 4545358 - DNA, 25 bp, Homo sapien
agatcctattcttcctgcaaaccct

SEQ ID NO: 4545359 - DNA, 25 bp, Homo sapien
ggacccatgttagaagatcctattc

SEQ ID NO: 4545360 - DNA, 25 bp, Homo sapien
tgcaaaccctccaatcattgcactg

SEQ ID NO: 4545361 - DNA, 25 bp, Homo sapien
tattccagatcctactggacccatg

SEQ ID NO: 4545362 - DNA, 25 bp, Homo sapien
ttattccaatatcaccacgtccaaa

SEQ ID NO: 4545363 - DNA, 25 bp, Homo sapien
acgtccaaaatctcgctccatgcta

SEQ ID NO: 4545364 - DNA, 25 bp, Homo sapien
catgctactagtcatcgcaccacgg

SEQ ID NO: 4545365 - DNA, 25 bp, Homo sapien
caagtctaccaaaggaatctccaaa

SEQ ID NO: 4545366 - DNA, 25 bp, Homo sapien
tcccatgctattcattgcttccaga

SEQ ID NO: 4545367 - DNA, 25 bp, Homo sapien
gctattcattgcttccagaccacca

SEQ ID NO: 4545368 - DNA, 25 bp, Homo sapien
catgctattcattgcttccagacca

SEQ ID NO: 4545369 - DNA, 25 bp, Homo sapien
tgctattcattgcttccagaccacc

SEQ ID NO: 4545370 - DNA, 25 bp, Homo sapien
cagtcatgtagctgaaaggtacgtt

SEQ ID NO: 4545371 - DNA, 25 bp, Homo sapien
ttcatggaattctcaacacagtttc

SEQ ID NO: 4545372 - DNA, 25 bp, Homo sapien
catgagccaacaataaaccatgact

SEQ ID NO: 4545373 - DNA, 25 bp, Homo sapien
taccaggctcaatttctgctagcag

SEQ ID NO: 4545374 - DNA, 25 bp, Homo sapien
ttcctccaaaacctggaccatccat

SEQ ID NO: 4545375 - DNA, 25 bp, Homo sapien
tattacagaccacatcaatggaggc

SEQ ID NO: 4545376 - DNA, 25 bp, Homo sapien
acaaagcattttcgggttctcaaca

SEQ ID NO: 4545377 - DNA, 25 bp, Homo sapien
tcaggccagaatgtaaggactctct

SEQ ID NO: 4545378 - DNA, 25 bp, Homo sapien
taattcacaaagtatggtccaggga

SEQ ID NO: 4545379 - DNA, 25 bp, Homo sapien
ttcccattactccacctatgttcaa

SEQ ID NO: 4545380 - DNA, 25 bp, Homo sapien
ccacctatgttcaactggctggcac

SEQ ID NO: 4545381 - DNA, 25 bp, Homo sapien
ggcactaataggctgtccacccgga

SEQ ID NO: 4545382 - DNA, 25 bp, Homo sapien
tgttcaactggctggcactaatagg

SEQ ID NO: 4545383 - DNA, 25 bp, Homo sapien
taaatactctaaaaactgacccatc

SEQ ID NO: 4545384 - DNA, 25 bp, Homo sapien
atgcccggcccataatggtaatttt

SEQ ID NO: 4545385 - DNA, 25 bp, Homo sapien
tactctaaaaactgacccatcataa

SEQ ID NO: 4545386 - DNA, 25 bp, Homo sapien
tctaaaaactgacccatcataaaaa

SEQ ID NO: 4545387 - DNA, 25 bp, Homo sapien
gctgattagtcaggaaaagttacca

SEQ ID NO: 4545388 - DNA, 25 bp, Homo sapien
tgataatactaacccatgagaactg

SEQ ID NO: 4545389 - DNA, 25 bp, Homo sapien
cacagatggtgaaattacagaggac

SEQ ID NO: 4545390 - DNA, 25 bp, Homo sapien
tataatgaggttacccacagatggt

SEQ ID NO: 4545391 - DNA, 25 bp, Homo sapien
catgtgaacggtactcttcatgagg

SEQ ID NO: 4545392 - DNA, 25 bp, Homo sapien
gaacggtactcttcatgaggaacag

SEQ ID NO: 4545393 - DNA, 25 bp, Homo sapien
tgtggtgttttaccatcatgtgaac

SEQ ID NO: 4545394 - DNA, 25 bp, Homo sapien
taccatcatgtgaacggtactcttc

SEQ ID NO: 4545395 - DNA, 25 bp, Homo sapien
cattttcacatgcataggtctatca

SEQ ID NO: 4545396 - DNA, 25 bp, Homo sapien
attttcacatgcataggtctatcaa

SEQ ID NO: 4545397 - DNA, 25 bp, Homo sapien
ttttcacatgcataggtctatcaaa

SEQ ID NO: 4545398 - DNA, 25 bp, Homo sapien
gtctaacacacatctctaagccagg

SEQ ID NO: 4545399 - DNA, 25 bp, Homo sapien
gagtgactttaatacttggacctac

SEQ ID NO: 4545400 - DNA, 25 bp, Homo sapien
taagccaggcaaccttaaattcaat

SEQ ID NO: 4545401 - DNA, 25 bp, Homo sapien
ggcttcgcttaaagtaactgcatta

SEQ ID NO: 4545402 - DNA, 25 bp, Homo sapien
tatgcttcttcaacctcataaacaa

SEQ ID NO: 4545403 - DNA, 25 bp, Homo sapien
aaaggtggtattatgcttcttcaac

SEQ ID NO: 4545404 - DNA, 25 bp, Homo sapien
aacaaaggtggtattatgcttcttc

SEQ ID NO: 4545405 - DNA, 25 bp, Homo sapien
ccaaaacaaaggtggtattatgctt

SEQ ID NO: 4545406 - DNA, 25 bp, Homo sapien
tccagctatgctgaacacttccttt

SEQ ID NO: 4545407 - DNA, 25 bp, Homo sapien
tgtcttctttaatatctgcccgctt

SEQ ID NO: 4545408 - DNA, 25 bp, Homo sapien
atatctgcccgcttcacagttccag

SEQ ID NO: 4545409 - DNA, 25 bp, Homo sapien
ccgcttcacagttccagctatgctg

SEQ ID NO: 4545410 - DNA, 25 bp, Homo sapien
tgatcccatatcagggacgtgtcct

SEQ ID NO: 4545411 - DNA, 25 bp, Homo sapien
ttgtggaaccaagtctaccggcctg

SEQ ID NO: 4545412 - DNA, 25 bp, Homo sapien
tgttcgctgcaatgccctacgagca

SEQ ID NO: 4545413 - DNA, 25 bp, Homo sapien
taccggcctgcaaattactgatgac

SEQ ID NO: 4545414 - DNA, 25 bp, Homo sapien
aattgaaggtctgtgacaaccccgt

SEQ ID NO: 4545415 - DNA, 25 bp, Homo sapien
cccgtgtccggcaagtctattagca

SEQ ID NO: 4545416 - DNA, 25 bp, Homo sapien
taactcttcgagtcctgatagcact

SEQ ID NO: 4545417 - DNA, 25 bp, Homo sapien
agtaatttgccctgagttagagagg

SEQ ID NO: 4545418 - DNA, 25 bp, Homo sapien
caaggtatgcctctattatcagtag

SEQ ID NO: 4545419 - DNA, 25 bp, Homo sapien
taaaggaacctatgaagatgagtgc

SEQ ID NO: 4545420 - DNA, 25 bp, Homo sapien
aattaagtagcatgtctagacaccc

SEQ ID NO: 4545421 - DNA, 25 bp, Homo sapien
ccatgggtgacagtactgctctaca

SEQ ID NO: 4545422 - DNA, 25 bp, Homo sapien
ggggtcttccactaagatcatattt

SEQ ID NO: 4545423 - DNA, 25 bp, Homo sapien
tattaaggggtcttccactaagatc

SEQ ID NO: 4545424 - DNA, 25 bp, Homo sapien
ggtcttccactaagatcatatttgt

SEQ ID NO: 4545425 - DNA, 25 bp, Homo sapien
taaggggtcttccactaagatcata

SEQ ID NO: 4545426 - DNA, 25 bp, Homo sapien
tcagagcactgcctctcatgtagtc

SEQ ID NO: 4545427 - DNA, 25 bp, Homo sapien
caattggtcagagcactgcctctca

SEQ ID NO: 4545428 - DNA, 25 bp, Homo sapien
ggtcagagcactgcctctcatgtag

SEQ ID NO: 4545429 - DNA, 25 bp, Homo sapien
attggtcagagcactgcctctcatg

SEQ ID NO: 4545430 - DNA, 25 bp, Homo sapien
taaagagctccacgtatgtaacctc

SEQ ID NO: 4545431 - DNA, 25 bp, Homo sapien
ccttaaagagctccacgtatgtaac

SEQ ID NO: 4545432 - DNA, 25 bp, Homo sapien
agctccacgtatgtaacctcaccaa

SEQ ID NO: 4545433 - DNA, 25 bp, Homo sapien
ttccgcatccttaaagagctccacg

SEQ ID NO: 4545434 - DNA, 25 bp, Homo sapien
tctccagcgcccgaattcttgtctt

SEQ ID NO: 4545435 - DNA, 25 bp, Homo sapien
ggatgaaatctattggccttcttac

SEQ ID NO: 4545436 - DNA, 25 bp, Homo sapien
tagcttgccatttcatgtcatatgg

SEQ ID NO: 4545437 - DNA, 25 bp, Homo sapien
actctgttacgatttggacccttct

SEQ ID NO: 4545438 - DNA, 25 bp, Homo sapien
gagtaccgcagatagaagaacaaac

SEQ ID NO: 4545439 - DNA, 25 bp, Homo sapien
gtaccgcagatagaagaacaaacct

SEQ ID NO: 4545440 - DNA, 25 bp, Homo sapien
taccgcagatagaagaacaaacctt

SEQ ID NO: 4545441 - DNA, 25 bp, Homo sapien
ctgagtaccgcagatagaagaacaa

SEQ ID NO: 4545442 - DNA, 25 bp, Homo sapien
aaaaccagactgcaatatcacttca

SEQ ID NO: 4545443 - DNA, 25 bp, Homo sapien
caaaagtaaacaactgggactacat

SEQ ID NO: 4545444 - DNA, 25 bp, Homo sapien
gcaacctaagaaatgagagataaaa

SEQ ID NO: 4545445 - DNA, 25 bp, Homo sapien
gatagcaactgttgctgaggacgtg

SEQ ID NO: 4545446 - DNA, 25 bp, Homo sapien
gcttaacttcatatcctcccacagg

SEQ ID NO: 4545447 - DNA, 25 bp, Homo sapien
ggtaggcatatgaaagtaagcgctt

SEQ ID NO: 4545448 - DNA, 25 bp, Homo sapien
acttcaggtttaaggaggtaggcat

SEQ ID NO: 4545449 - DNA, 25 bp, Homo sapien
taagcgcttaacttcatatcctccc

SEQ ID NO: 4545450 - DNA, 25 bp, Homo sapien
gaagaggggtgttcgctgtctcggg

SEQ ID NO: 4545451 - DNA, 25 bp, Homo sapien
cggtcgctgagctttgctcaaagat

SEQ ID NO: 4545452 - DNA, 25 bp, Homo sapien
caaagattctttaaccaaagtcagg

SEQ ID NO: 4545453 - DNA, 25 bp, Homo sapien
cgtggcggtcgctgagctttgctca

SEQ ID NO: 4545454 - DNA, 25 bp, Homo sapien
agtggccccgggcacctcggccttg

SEQ ID NO: 4545455 - DNA, 25 bp, Homo sapien
tctcgccgcggctcgcccggcggct

SEQ ID NO: 4545456 - DNA, 25 bp, Homo sapien
tttaacgccattggagctgctgctg

SEQ ID NO: 4545457 - DNA, 25 bp, Homo sapien
ggtgcgggctgtcgccaccagtggc

SEQ ID NO: 4545458 - DNA, 25 bp, Homo sapien
gccgcctgagctgaggggctccgag

SEQ ID NO: 4545459 - DNA, 25 bp, Homo sapien
ctcggccgcctgagctgaggggctc

SEQ ID NO: 4545460 - DNA, 25 bp, Homo sapien
tcggccgcctgagctgaggggctcc

SEQ ID NO: 4545461 - DNA, 25 bp, Homo sapien
tgagctgaggggctccgagcgcgac

SEQ ID NO: 4545462 - DNA, 25 bp, Homo sapien
gctgccggggaagcggtaacggatc

SEQ ID NO: 4545463 - DNA, 25 bp, Homo sapien
ccgatttgaaaaggccccgagcgct

SEQ ID NO: 4545464 - DNA, 25 bp, Homo sapien
gaagcggtaacggatcccgatttga

SEQ ID NO: 4545465 - DNA, 25 bp, Homo sapien
gaaaaggccccgagcgctcagtaac

SEQ ID NO: 4545466 - DNA, 25 bp, Homo sapien
tattttgccacgtatctcctcgagg

SEQ ID NO: 4545467 - DNA, 25 bp, Homo sapien
cattaatgggaaacgctagcaacct

SEQ ID NO: 4545468 - DNA, 25 bp, Homo sapien
catctagcaaagaaagtggaaccta

SEQ ID NO: 4545469 - DNA, 25 bp, Homo sapien
tgacaagtcaaagtctccaaccgtg

SEQ ID NO: 4545470 - DNA, 25 bp, Homo sapien
cgcagcagaatcatgtaacttagtt

SEQ ID NO: 4545471 - DNA, 25 bp, Homo sapien
tacatccgcagcagaatcatgtaac

SEQ ID NO: 4545472 - DNA, 25 bp, Homo sapien
ttatacatccgcagcagaatcatgt

SEQ ID NO: 4545473 - DNA, 25 bp, Homo sapien
agaatcatgtaacttagttctgctc

SEQ ID NO: 4545474 - DNA, 25 bp, Homo sapien
tgtcttctagcttgtgttggggaga

SEQ ID NO: 4545475 - DNA, 25 bp, Homo sapien
ctggcagctatctagagctttatca

SEQ ID NO: 4545476 - DNA, 25 bp, Homo sapien
atctagagctttatcagagcgtttc

SEQ ID NO: 4545477 - DNA, 25 bp, Homo sapien
gctatctagagctttatcagagcgt

SEQ ID NO: 4545478 - DNA, 25 bp, Homo sapien
tacggacagcgcctaggcgccttct

SEQ ID NO: 4545479 - DNA, 25 bp, Homo sapien
agcactacggacagcgcctaggcgc

SEQ ID NO: 4545480 - DNA, 25 bp, Homo sapien
cagcactacggacagcgcctaggcg

SEQ ID NO: 4545481 - DNA, 25 bp, Homo sapien
actacggacagcgcctaggcgcctt

SEQ ID NO: 4545482 - DNA, 25 bp, Homo sapien
ggcaacaagcatggaaggtgagaca

SEQ ID NO: 4545483 - DNA, 25 bp, Homo sapien
gagacatcgctgtctgcgaagtaac

SEQ ID NO: 4545484 - DNA, 25 bp, Homo sapien
caacacttaagtctactggctggac

SEQ ID NO: 4545485 - DNA, 25 bp, Homo sapien
taactgacagcgttccaaatgcagg

SEQ ID NO: 4545486 - DNA, 25 bp, Homo sapien
ggaaaagtgttgtgtacgtgcagat

SEQ ID NO: 4545487 - DNA, 25 bp, Homo sapien
tgatgcttctcccataatgttttgt

SEQ ID NO: 4545488 - DNA, 25 bp, Homo sapien
catgcttcttcggtttagtgcgtag

SEQ ID NO: 4545489 - DNA, 25 bp, Homo sapien
taatgctagcgccactgctgatgcg

SEQ ID NO: 4545490 - DNA, 25 bp, Homo sapien
caggtttcccagtgcgttggaagga

SEQ ID NO: 4545491 - DNA, 25 bp, Homo sapien
ttggaaggattgagtgtcagagtcc

SEQ ID NO: 4545492 - DNA, 25 bp, Homo sapien
gaaattctcttaaggttgaaatctg

SEQ ID NO: 4545493 - DNA, 25 bp, Homo sapien
gcagatcctaaggtctgggatctct

SEQ ID NO: 4545494 - DNA, 25 bp, Homo sapien
gaacatcatattccactctaatagt

SEQ ID NO: 4545495 - DNA, 25 bp, Homo sapien
ctagaacatcatattccactctaat

SEQ ID NO: 4545496 - DNA, 25 bp, Homo sapien
ttggaataccattactagagaaata

SEQ ID NO: 4545497 - DNA, 25 bp, Homo sapien
ttattgtttggaataccattactag

SEQ ID NO: 4545498 - DNA, 25 bp, Homo sapien
ttttctgccttcatatttattgtca

SEQ ID NO: 4545499 - DNA, 25 bp, Homo sapien
ttccaacgctttgtttcccatactc

SEQ ID NO: 4545500 - DNA, 25 bp, Homo sapien
catactcccccttgcctgtaccaaa

SEQ ID NO: 4545501 - DNA, 25 bp, Homo sapien
ttgctcactgtgctctgaaaaaatc

SEQ ID NO: 4545502 - DNA, 25 bp, Homo sapien
tttttcttcttcacagatttgaatc

SEQ ID NO: 4545503 - DNA, 25 bp, Homo sapien
gcttttttcttcttcacagatttga

SEQ ID NO: 4545504 - DNA, 25 bp, Homo sapien
tttcttcttcacagatttgaatcat

SEQ ID NO: 4545505 - DNA, 25 bp, Homo sapien
cttttttcttcttcacagatttgaa

SEQ ID NO: 4545506 - DNA, 25 bp, Homo sapien
gatgagtgtcaacgaagtatcagct

SEQ ID NO: 4545507 - DNA, 25 bp, Homo sapien
tatgcactcgcgtgagagttccagc

SEQ ID NO: 4545508 - DNA, 25 bp, Homo sapien
tgtgccatcgggacacattctggat

SEQ ID NO: 4545509 - DNA, 25 bp, Homo sapien
tgtgaagagccacaacaatgtgcca

SEQ ID NO: 4545510 - DNA, 25 bp, Homo sapien
gcttgtctgaaaggcctaaatcgga

SEQ ID NO: 4545511 - DNA, 25 bp, Homo sapien
gcctaaatcggattcacctttcaag

SEQ ID NO: 4545512 - DNA, 25 bp, Homo sapien
tgaaaggcctaaatcggattcacct

SEQ ID NO: 4545513 - DNA, 25 bp, Homo sapien
ctttcccgcttgtctgaaaggccta

SEQ ID NO: 4545514 - DNA, 25 bp, Homo sapien
tctccccaggtgatatggaaacagc

SEQ ID NO: 4545515 - DNA, 25 bp, Homo sapien
tcaagagattcgtagaccactggca

SEQ ID NO: 4545516 - DNA, 25 bp, Homo sapien
gaaagtgtggagacttcaggcccaa

SEQ ID NO: 4545517 - DNA, 25 bp, Homo sapien
tatctactgacctgatggctagcag

SEQ ID NO: 4545518 - DNA, 25 bp, Homo sapien
gatgaagagctcaagcctaggagac

SEQ ID NO: 4545519 - DNA, 25 bp, Homo sapien
gaatctcagtttccccactctctag

SEQ ID NO: 4545520 - DNA, 25 bp, Homo sapien
tagttggcgtccttaagaatcagtc

SEQ ID NO: 4545521 - DNA, 25 bp, Homo sapien
tgggtcaatagatgagcacagtact

SEQ ID NO: 4545522 - DNA, 25 bp, Homo sapien
ggtgctacccatgtgaagaacagtg

SEQ ID NO: 4545523 - DNA, 25 bp, Homo sapien
gaatgaacactacgggcaaaagccc

SEQ ID NO: 4545524 - DNA, 25 bp, Homo sapien
gagacaccttgatttttggcacgga

SEQ ID NO: 4545525 - DNA, 25 bp, Homo sapien
aacagtgagtagaacaggccaggca

SEQ ID NO: 4545526 - DNA, 25 bp, Homo sapien
caatagttgtataatgtcatagagg

SEQ ID NO: 4545527 - DNA, 25 bp, Homo sapien
tataaggtagtgtcttaactaggca

SEQ ID NO: 4545528 - DNA, 25 bp, Homo sapien
tagaggaaatcaggtgcaaccaatg

SEQ ID NO: 4545529 - DNA, 25 bp, Homo sapien
tttctcctggaattagccccaatag

SEQ ID NO: 4545530 - DNA, 25 bp, Homo sapien
gaatgattgccacaaccttcaccag

SEQ ID NO: 4545531 - DNA, 25 bp, Homo sapien
aagccatcttctactgcgctttggc

SEQ ID NO: 4545532 - DNA, 25 bp, Homo sapien
ttctactgcgctttggcaatcattt

SEQ ID NO: 4545533 - DNA, 25 bp, Homo sapien
cagaatgattgccacaaccttcacc

SEQ ID NO: 4545534 - DNA, 25 bp, Homo sapien
gaaatcagactgattgagatggggt

SEQ ID NO: 4545535 - DNA, 25 bp, Homo sapien
atcttgttccctggccccatttgct

SEQ ID NO: 4545536 - DNA, 25 bp, Homo sapien
catttgctccatctgggaaatcaga

SEQ ID NO: 4545537 - DNA, 25 bp, Homo sapien
ctgggaaatcagactgattgagatg

SEQ ID NO: 4545538 - DNA, 25 bp, Homo sapien
aacttgctgcgttggcgaggaagac

SEQ ID NO: 4545539 - DNA, 25 bp, Homo sapien
tattgtttaagccatcaaggctgtg

SEQ ID NO: 4545540 - DNA, 25 bp, Homo sapien
tttagtccagtgatacccatgtcgg

SEQ ID NO: 4545541 - DNA, 25 bp, Homo sapien
cacaaagcatggaatgcaggcagcc

SEQ ID NO: 4545542 - DNA, 25 bp, Homo sapien
tagaacaaggagtttcagatcaaac

SEQ ID NO: 4545543 - DNA, 25 bp, Homo sapien
tcagatcaaactcctgactgtgaac

SEQ ID NO: 4545544 - DNA, 25 bp, Homo sapien
ggagtttcagatcaaactcctgact

SEQ ID NO: 4545545 - DNA, 25 bp, Homo sapien
gaacaaggagtttcagatcaaactc

SEQ ID NO: 4545546 - DNA, 25 bp, Homo sapien
gaaacacagccagtagcaaggtcag

SEQ ID NO: 4545547 - DNA, 25 bp, Homo sapien
cacagtggctaaacgcaagggttct

SEQ ID NO: 4545548 - DNA, 25 bp, Homo sapien
tattaagttaccacaaggccaggca

SEQ ID NO: 4545549 - DNA, 25 bp, Homo sapien
gagttcaagagacccgccatgggca

SEQ ID NO: 4545550 - DNA, 25 bp, Homo sapien
caaaggaattccaactacgaagacg

SEQ ID NO: 4545551 - DNA, 25 bp, Homo sapien
ggctcggatcgtgttgctaaaggca

SEQ ID NO: 4545552 - DNA, 25 bp, Homo sapien
gctaatagttaacgtccagagaagg

SEQ ID NO: 4545553 - DNA, 25 bp, Homo sapien
aaatgaggtcgaaaagttgcagggc

SEQ ID NO: 4545554 - DNA, 25 bp, Homo sapien
tgcaaaacgcgcgaggcgcacggca

SEQ ID NO: 4545555 - DNA, 25 bp, Homo sapien
cagagggccgaagccgcggtactct

SEQ ID NO: 4545556 - DNA, 25 bp, Homo sapien
agcgctggccgcctgagccaaggct

SEQ ID NO: 4545557 - DNA, 25 bp, Homo sapien
gtctctgcttcgctcagcgatgcaa

SEQ ID NO: 4545558 - DNA, 25 bp, Homo sapien
caaacccaaaatgtgaatcccgcct

SEQ ID NO: 4545559 - DNA, 25 bp, Homo sapien
aatttcggttttggcgcgctccctg

SEQ ID NO: 4545560 - DNA, 25 bp, Homo sapien
tgctttccgagaagggcttcaaacc

SEQ ID NO: 4545561 - DNA, 25 bp, Homo sapien
ctcagccagaactgtggactcgtcc

SEQ ID NO: 4545562 - DNA, 25 bp, Homo sapien
cccttttgaaaagatgatatagcaa

SEQ ID NO: 4545563 - DNA, 25 bp, Homo sapien
gatatagcaagagtagaattctggc

SEQ ID NO: 4545564 - DNA, 25 bp, Homo sapien
tgtttttccgcaattgaaggttgta

SEQ ID NO: 4545565 - DNA, 25 bp, Homo sapien
gtaaatctgctttgtggtgacctga

SEQ ID NO: 4545566 - DNA, 25 bp, Homo sapien
tccctcagtgaagtagcaataggct

SEQ ID NO: 4545567 - DNA, 25 bp, Homo sapien
ggactgattctgtggcttaccttga

SEQ ID NO: 4545568 - DNA, 25 bp, Homo sapien
gcatttcattgcagatatgggactg

SEQ ID NO: 4545569 - DNA, 25 bp, Homo sapien
atgaaataatacttcagccaccagg

SEQ ID NO: 4545570 - DNA, 25 bp, Homo sapien
tttgcattcccatttgctagattcc

SEQ ID NO: 4545571 - DNA, 25 bp, Homo sapien
tgcattcccatttgctagattcctg

SEQ ID NO: 4545572 - DNA, 25 bp, Homo sapien
ggttcctgagctcattgagctttgc

SEQ ID NO: 4545573 - DNA, 25 bp, Homo sapien
ttatgctaatgaggcttggttcctg

SEQ ID NO: 4545574 - DNA, 25 bp, Homo sapien
agagctcaagggcttgtttgggcag

SEQ ID NO: 4545575 - DNA, 25 bp, Homo sapien
cagagctcaagggcttgtttgggca

SEQ ID NO: 4545576 - DNA, 25 bp, Homo sapien
tcagagctcaagggcttgtttgggc

SEQ ID NO: 4545577 - DNA, 25 bp, Homo sapien
gagctcaagggcttgtttgggcagg

SEQ ID NO: 4545578 - DNA, 25 bp, Homo sapien
ctccttggtaatcatgtcgtgggcc

SEQ ID NO: 4545579 - DNA, 25 bp, Homo sapien
tagcaatggctaatgagcaaggctc

SEQ ID NO: 4545580 - DNA, 25 bp, Homo sapien
tgaccttgtctgctcgacactggcc

SEQ ID NO: 4545581 - DNA, 25 bp, Homo sapien
gatgcaccctttttgtctgaccttg

SEQ ID NO: 4545582 - DNA, 25 bp, Homo sapien
cctttaggaagatctgactagtgga

SEQ ID NO: 4545583 - DNA, 25 bp, Homo sapien
gactagtggagtcaaattgccataa

SEQ ID NO: 4545584 - DNA, 25 bp, Homo sapien
tccactcctaccaggttgtgctctc

SEQ ID NO: 4545585 - DNA, 25 bp, Homo sapien
taggagtaacctttaggaagatctg

SEQ ID NO: 4545586 - DNA, 25 bp, Homo sapien
attgcctaatgtgacagtgagtttg

SEQ ID NO: 4545587 - DNA, 25 bp, Homo sapien
cacaattgcctaatgtgacagtgag

SEQ ID NO: 4545588 - DNA, 25 bp, Homo sapien
caattgcctaatgtgacagtgagtt

SEQ ID NO: 4545589 - DNA, 25 bp, Homo sapien
tgcctaatgtgacagtgagtttggg

SEQ ID NO: 4545590 - DNA, 25 bp, Homo sapien
tatgctagcaggagatttaagggag

SEQ ID NO: 4545591 - DNA, 25 bp, Homo sapien
gatgatcgccaaactcagacttttg

SEQ ID NO: 4545592 - DNA, 25 bp, Homo sapien
ccctggtgaagtgtcatagagcaga

SEQ ID NO: 4545593 - DNA, 25 bp, Homo sapien
accagcatagggtgtttgaccaagc

SEQ ID NO: 4545594 - DNA, 25 bp, Homo sapien
gtgcagctatctggacttgcgccat

SEQ ID NO: 4545595 - DNA, 25 bp, Homo sapien
cctgagaggcggtgagtcactcctc

SEQ ID NO: 4545596 - DNA, 25 bp, Homo sapien
caggggctgcgaagcaaatctgcct

SEQ ID NO: 4545597 - DNA, 25 bp, Homo sapien
ccccggtgtgcagctatctggactt

SEQ ID NO: 4545598 - DNA, 25 bp, Homo sapien
tttcggcatccagtcctcggtccac

SEQ ID NO: 4545599 - DNA, 25 bp, Homo sapien
cctttcggcatccagtcctcggtcc

SEQ ID NO: 4545600 - DNA, 25 bp, Homo sapien
gcatccagtcctcggtccacaccca

SEQ ID NO: 4545601 - DNA, 25 bp, Homo sapien
tcggcatccagtcctcggtccacac

SEQ ID NO: 4545602 - DNA, 25 bp, Homo sapien
caattttcaacctgtttaccaatgt

SEQ ID NO: 4545603 - DNA, 25 bp, Homo sapien
ttcctgacatagtactcttgtagct

SEQ ID NO: 4545604 - DNA, 25 bp, Homo sapien
tgttttcctgacatagtactcttgt

SEQ ID NO: 4545605 - DNA, 25 bp, Homo sapien
atgttttcctgacatagtactcttg

SEQ ID NO: 4545606 - DNA, 25 bp, Homo sapien
cttctgttaggactgtctcgatcca

SEQ ID NO: 4545607 - DNA, 25 bp, Homo sapien
tgtctcgatccatcagagaggcttt

SEQ ID NO: 4545608 - DNA, 25 bp, Homo sapien
gaggctttcattctgtagaactgca

SEQ ID NO: 4545609 - DNA, 25 bp, Homo sapien
tctgaacctggagtgtgtaacacac

SEQ ID NO: 4545610 - DNA, 25 bp, Homo sapien
caagtctgcataacctagaccatcc

SEQ ID NO: 4545611 - DNA, 25 bp, Homo sapien
ctagaccatccaagtgttgtaggga

SEQ ID NO: 4545612 - DNA, 25 bp, Homo sapien
gttgtagggaaacatcgagtatcat

SEQ ID NO: 4545613 - DNA, 25 bp, Homo sapien
ccaagtgttgtagggaaacatcgag

SEQ ID NO: 4545614 - DNA, 25 bp, Homo sapien
ctccggggatgttcgggtctcctgt

SEQ ID NO: 4545615 - DNA, 25 bp, Homo sapien
ctctccggggatgttcgggtctcct

SEQ ID NO: 4545616 - DNA, 25 bp, Homo sapien
gcttcccacacaaacggtcctggta

SEQ ID NO: 4545617 - DNA, 25 bp, Homo sapien
ccacacaaacggtcctggtactcct

SEQ ID NO: 4545618 - DNA, 25 bp, Homo sapien
tgggagacttgagcagtagctcctc

SEQ ID NO: 4545619 - DNA, 25 bp, Homo sapien
cttgagcagtagctcctctcctcca

SEQ ID NO: 4545620 - DNA, 25 bp, Homo sapien
gagacttgagcagtagctcctctcc

SEQ ID NO: 4545621 - DNA, 25 bp, Homo sapien
cctagttgggagacttgagcagtag

SEQ ID NO: 4545622 - DNA, 25 bp, Homo sapien
ttcccaattctgcatgtttactctg

SEQ ID NO: 4545623 - DNA, 25 bp, Homo sapien
aatggttgccattaagcctagactg

SEQ ID NO: 4545624 - DNA, 25 bp, Homo sapien
aaagcatctttgtccaatggttgcc

SEQ ID NO: 4545625 - DNA, 25 bp, Homo sapien
catggttccataggtgcagcgttag

SEQ ID NO: 4545626 - DNA, 25 bp, Homo sapien
aaactcttctatcttgtgacaggga

SEQ ID NO: 4545627 - DNA, 25 bp, Homo sapien
taagccataagtaagagacccagga

SEQ ID NO: 4545628 - DNA, 25 bp, Homo sapien
aatggaacagaacacctaaggcttg

SEQ ID NO: 4545629 - DNA, 25 bp, Homo sapien
tatcgacggattgagcctaacagct

SEQ ID NO: 4545630 - DNA, 25 bp, Homo sapien
agactttatttagcctccggaatgg

SEQ ID NO: 4545631 - DNA, 25 bp, Homo sapien
catttatgacattgaccccttgttg

SEQ ID NO: 4545632 - DNA, 25 bp, Homo sapien
cattgaccccttgttgacaggaatg

SEQ ID NO: 4545633 - DNA, 25 bp, Homo sapien
ttatgacattgaccccttgttgaca

SEQ ID NO: 4545634 - DNA, 25 bp, Homo sapien
tgacattgaccccttgttgacagga

SEQ ID NO: 4545635 - DNA, 25 bp, Homo sapien
gcacgtgtgggccagtcaccgaaat

SEQ ID NO: 4545636 - DNA, 25 bp, Homo sapien
ctcccagacctctatgcacgtgtgg

SEQ ID NO: 4545637 - DNA, 25 bp, Homo sapien
tcttggcatattgcacatgctgtga

SEQ ID NO: 4545638 - DNA, 25 bp, Homo sapien
tgcactggtgatcctctggccactg

SEQ ID NO: 4545639 - DNA, 25 bp, Homo sapien
gcatgtcagcataaatggccaaccc

SEQ ID NO: 4545640 - DNA, 25 bp, Homo sapien
ttagctacacacatgagaagcctga

SEQ ID NO: 4545641 - DNA, 25 bp, Homo sapien
tacacgtcccagttttcaagaatca

SEQ ID NO: 4545642 - DNA, 25 bp, Homo sapien
gcacattcccgtacgtttgctggaa

SEQ ID NO: 4545643 - DNA, 25 bp, Homo sapien
tcgaaccttgttactgacgtgggaa

SEQ ID NO: 4545644 - DNA, 25 bp, Homo sapien
tggaaggagttctaggattcgaacc

SEQ ID NO: 4545645 - DNA, 25 bp, Homo sapien
gaggtagctgatcccttccttttgg

SEQ ID NO: 4545646 - DNA, 25 bp, Homo sapien
taatgaataggttccagccactggc

SEQ ID NO: 4545647 - DNA, 25 bp, Homo sapien
ggagagtgaattgtcatccatttca

SEQ ID NO: 4545648 - DNA, 25 bp, Homo sapien
ttcgtttgtgcttctccgtttcctg

SEQ ID NO: 4545649 - DNA, 25 bp, Homo sapien
tattggaggcatcagtttcgtttgt

SEQ ID NO: 4545650 - DNA, 25 bp, Homo sapien
cttacactcgtaacaagcctctggg

SEQ ID NO: 4545651 - DNA, 25 bp, Homo sapien
taaccgccctcggtattggaacagc

SEQ ID NO: 4545652 - DNA, 25 bp, Homo sapien
agccggcgggacacatgcacttgta

SEQ ID NO: 4545653 - DNA, 25 bp, Homo sapien
ctatgcggaagtaaccaggtggaca

SEQ ID NO: 4545654 - DNA, 25 bp, Homo sapien
aactgttcatactggaagccggcgg

SEQ ID NO: 4545655 - DNA, 25 bp, Homo sapien
ctgcaggcaaaataagaagcggcat

SEQ ID NO: 4545656 - DNA, 25 bp, Homo sapien
aagtgcccagcgaggagacaaatct

SEQ ID NO: 4545657 - DNA, 25 bp, Homo sapien
caggatatgctgatctggcaaaggc

SEQ ID NO: 4545658 - DNA, 25 bp, Homo sapien
tattgaggacattggatctggccac

SEQ ID NO: 4545659 - DNA, 25 bp, Homo sapien
aaaggctgatatcctgccccaagtg

SEQ ID NO: 4545660 - DNA, 25 bp, Homo sapien
agggggaaaaccatgagtttctcat

SEQ ID NO: 4545661 - DNA, 25 bp, Homo sapien
ccatgagtttctcattatttctgat

SEQ ID NO: 4545662 - DNA, 25 bp, Homo sapien
aatcagctagaagggggaaaaccat

SEQ ID NO: 4545663 - DNA, 25 bp, Homo sapien
gggaaaaccatgagtttctcattat

SEQ ID NO: 4545664 - DNA, 25 bp, Homo sapien
gaaagtgaacccctgcaatgcagag

SEQ ID NO: 4545665 - DNA, 25 bp, Homo sapien
aaagtgaacccctgcaatgcagagc

SEQ ID NO: 4545666 - DNA, 25 bp, Homo sapien
gtagcccccaatgatgttctggcag

SEQ ID NO: 4545667 - DNA, 25 bp, Homo sapien
cccccaatgatgttctggcagccat

SEQ ID NO: 4545668 - DNA, 25 bp, Homo sapien
cagcggtggttaccctcacactcgt

SEQ ID NO: 4545669 - DNA, 25 bp, Homo sapien
ctggcagcggtggttaccctcacac

SEQ ID NO: 4545670 - DNA, 25 bp, Homo sapien
gactctctaagatacaggacctgtg

SEQ ID NO: 4545671 - DNA, 25 bp, Homo sapien
tgggctcagatctgctatctcatag

SEQ ID NO: 4545672 - DNA, 25 bp, Homo sapien
gaaatccctttatggctctggaccc

SEQ ID NO: 4545673 - DNA, 25 bp, Homo sapien
gatgatgaaggtgccaatagccaca

SEQ ID NO: 4545674 - DNA, 25 bp, Homo sapien
ttcacagctggagccggtctgatca

SEQ ID NO: 4545675 - DNA, 25 bp, Homo sapien
gaagcttccaggagtgttctggcaa

SEQ ID NO: 4545676 - DNA, 25 bp, Homo sapien
ggtctgatcaagtgagaatccccgc

SEQ ID NO: 4545677 - DNA, 25 bp, Homo sapien
ttagacccgcacagattgatgtcag

SEQ ID NO: 4545678 - DNA, 25 bp, Homo sapien
caaataaggccaacaacgcttcaca

SEQ ID NO: 4545679 - DNA, 25 bp, Homo sapien
tatgagaagcagtgggggcaaagag

SEQ ID NO: 4545680 - DNA, 25 bp, Homo sapien
tagaaggataactcggaaaaggcca

SEQ ID NO: 4545681 - DNA, 25 bp, Homo sapien
aaggccaaataaggccaacaacgct

SEQ ID NO: 4545682 - DNA, 25 bp, Homo sapien
taaatccgggaggacatttgcatgt

SEQ ID NO: 4545683 - DNA, 25 bp, Homo sapien
caggacgtatggtgttgggtaaatc

SEQ ID NO: 4545684 - DNA, 25 bp, Homo sapien
gtgttgcttggttgcacactcatca

SEQ ID NO: 4545685 - DNA, 25 bp, Homo sapien
tttgcatgtgaagccgccaatggtg

SEQ ID NO: 4545686 - DNA, 25 bp, Homo sapien
cacaggaaagaggtcaagagcccaa

SEQ ID NO: 4545687 - DNA, 25 bp, Homo sapien
gagttatagcttcacattgcctaga

SEQ ID NO: 4545688 - DNA, 25 bp, Homo sapien
tgcctagaactcacagtgaccccag

SEQ ID NO: 4545689 - DNA, 25 bp, Homo sapien
tgaccccagatgtaaaataagttcc

SEQ ID NO: 4545690 - DNA, 25 bp, Homo sapien
gaggtaggtcccatggaggcattaa

SEQ ID NO: 4545691 - DNA, 25 bp, Homo sapien
atctctgagacagtcatggatggcc

SEQ ID NO: 4545692 - DNA, 25 bp, Homo sapien
tggaggcattaaccccagggaagca

SEQ ID NO: 4545693 - DNA, 25 bp, Homo sapien
gagccattgaagctggccctgctat

SEQ ID NO: 4545694 - DNA, 25 bp, Homo sapien
cctgtagagcaggtctttcggcttg

SEQ ID NO: 4545695 - DNA, 25 bp, Homo sapien
tagagcaggtctttcggcttgcctg

SEQ ID NO: 4545696 - DNA, 25 bp, Homo sapien
gtagagcaggtctttcggcttgcct

SEQ ID NO: 4545697 - DNA, 25 bp, Homo sapien
tgtagagcaggtctttcggcttgcc

SEQ ID NO: 4545698 - DNA, 25 bp, Homo sapien
tgtcaggagctaggtgaggggcaat

SEQ ID NO: 4545699 - DNA, 25 bp, Homo sapien
caaaggaatgcagccatgtgtcagg

SEQ ID NO: 4545700 - DNA, 25 bp, Homo sapien
gaggggcaatggtcaattctacttt

SEQ ID NO: 4545701 - DNA, 25 bp, Homo sapien
cagccatgtgtcaggagctaggtga

SEQ ID NO: 4545702 - DNA, 25 bp, Homo sapien
ggagcctggttgcactcgttcagat

SEQ ID NO: 4545703 - DNA, 25 bp, Homo sapien
tcctcttgcagaatgtagcctttcg

SEQ ID NO: 4545704 - DNA, 25 bp, Homo sapien
gataaaattgcagggtttgggagcc

SEQ ID NO: 4545705 - DNA, 25 bp, Homo sapien
cctttcgggcatgaacactggtaac

SEQ ID NO: 4545706 - DNA, 25 bp, Homo sapien
tcaaagaaatacagcgtgactgtgc

SEQ ID NO: 4545707 - DNA, 25 bp, Homo sapien
ctatgatcaaagaaatacagcgtga

SEQ ID NO: 4545708 - DNA, 25 bp, Homo sapien
caaagaaatacagcgtgactgtgca

SEQ ID NO: 4545709 - DNA, 25 bp, Homo sapien
tgatcaaagaaatacagcgtgactg

SEQ ID NO: 4545710 - DNA, 25 bp, Homo sapien
ttacaaatgcaatgatatgatcctc

SEQ ID NO: 4545711 - DNA, 25 bp, Homo sapien
tcggcaaacatcgtgaataaccttg

SEQ ID NO: 4545712 - DNA, 25 bp, Homo sapien
cccagttatatctggagtgtaccca

SEQ ID NO: 4545713 - DNA, 25 bp, Homo sapien
gatcctctgtcattgacacattccc

SEQ ID NO: 4545714 - DNA, 25 bp, Homo sapien
aaggagcttgtgcttttccagatgc

SEQ ID NO: 4545715 - DNA, 25 bp, Homo sapien
aagttgaagactcgctggaatgcag

SEQ ID NO: 4545716 - DNA, 25 bp, Homo sapien
ggcagcatgacctcaaatgtctaaa

SEQ ID NO: 4545717 - DNA, 25 bp, Homo sapien
cagcttaatcaagtggaccaaggcc

SEQ ID NO: 4545718 - DNA, 25 bp, Homo sapien
gctccattggtcatgaatcctcggc

SEQ ID NO: 4545719 - DNA, 25 bp, Homo sapien
tgtgaagcagtacccttcccgattg

SEQ ID NO: 4545720 - DNA, 25 bp, Homo sapien
cctgttgctggagccgatctgacac

SEQ ID NO: 4545721 - DNA, 25 bp, Homo sapien
gttttgtagcacctctgtgaagcag

SEQ ID NO: 4545722 - DNA, 25 bp, Homo sapien
catacggaagtggatcctgatcacc

SEQ ID NO: 4545723 - DNA, 25 bp, Homo sapien
taggaaagtgcggtgccaactgtac

SEQ ID NO: 4545724 - DNA, 25 bp, Homo sapien
gaatagccatgcttacagacagagg

SEQ ID NO: 4545725 - DNA, 25 bp, Homo sapien
tggtgctgagcccaatggacaatca

SEQ ID NO: 4545726 - DNA, 25 bp, Homo sapien
attacactcacaggtgtagctccca

SEQ ID NO: 4545727 - DNA, 25 bp, Homo sapien
gggctggcggtaaacccatcattac

SEQ ID NO: 4545728 - DNA, 25 bp, Homo sapien
tggcttcgtctgacattcattctca

SEQ ID NO: 4545729 - DNA, 25 bp, Homo sapien
tagctcccacgggtgttgaggcagc

SEQ ID NO: 4545730 - DNA, 25 bp, Homo sapien
atatatgtgccaatgaggttcttgc

SEQ ID NO: 4545731 - DNA, 25 bp, Homo sapien
ttctccatcaggtctccgctgatac

SEQ ID NO: 4545732 - DNA, 25 bp, Homo sapien
atacccgggtccacagatgcacata

SEQ ID NO: 4545733 - DNA, 25 bp, Homo sapien
gatgcacatatatgtgccaatgagg

SEQ ID NO: 4545734 - DNA, 25 bp, Homo sapien
gatgaccttgaacacgatgactcac

SEQ ID NO: 4545735 - DNA, 25 bp, Homo sapien
agataaagcttcctggcttagatga

SEQ ID NO: 4545736 - DNA, 25 bp, Homo sapien
ataaagcttcctggcttagatgacc

SEQ ID NO: 4545737 - DNA, 25 bp, Homo sapien
ggcttagatgaccttgaacacgatg

SEQ ID NO: 4545738 - DNA, 25 bp, Homo sapien
tttgcacatcctacggtcttctctg

SEQ ID NO: 4545739 - DNA, 25 bp, Homo sapien
gtgttcacacatcggaaggcacaga

SEQ ID NO: 4545740 - DNA, 25 bp, Homo sapien
attcatatgacccataagtgttcac

SEQ ID NO: 4545741 - DNA, 25 bp, Homo sapien
gagcacatatcccacgggacatttg

SEQ ID NO: 4545742 - DNA, 25 bp, Homo sapien
tcaaatccctcctcgcaggtgcatt

SEQ ID NO: 4545743 - DNA, 25 bp, Homo sapien
tccacaaggattgccaacagaacat

SEQ ID NO: 4545744 - DNA, 25 bp, Homo sapien
gttccatttccacaaggattgccaa

SEQ ID NO: 4545745 - DNA, 25 bp, Homo sapien
catgtcatcattggaccgggctcaa

SEQ ID NO: 4545746 - DNA, 25 bp, Homo sapien
ctacacattcattccctgctagaat

SEQ ID NO: 4545747 - DNA, 25 bp, Homo sapien
gatgcactgtccatgtttacagaca

SEQ ID NO: 4545748 - DNA, 25 bp, Homo sapien
ggaaccatctgtattgatgcactgt

SEQ ID NO: 4545749 - DNA, 25 bp, Homo sapien
taaccaaagggacactcgcagcgat

SEQ ID NO: 4545750 - DNA, 25 bp, Homo sapien
atcatcaggtcccacgatgatccca

SEQ ID NO: 4545751 - DNA, 25 bp, Homo sapien
atcaggtcccacgatgatcccactt

SEQ ID NO: 4545752 - DNA, 25 bp, Homo sapien
cataaggacatatctggcggaaggc

SEQ ID NO: 4545753 - DNA, 25 bp, Homo sapien
cccacttccataaggacatatctgg

SEQ ID NO: 4545754 - DNA, 25 bp, Homo sapien
aaggcctacagtcttacttacatca

SEQ ID NO: 4545755 - DNA, 25 bp, Homo sapien
tctttaaggcctacagtcttactta

SEQ ID NO: 4545756 - DNA, 25 bp, Homo sapien
aacattctaattagacttacaatta

SEQ ID NO: 4545757 - DNA, 25 bp, Homo sapien
gtcttacttacatcatggccagtct

SEQ ID NO: 4545758 - DNA, 25 bp, Homo sapien
gcataacagtagctcattcgcaaat

SEQ ID NO: 4545759 - DNA, 25 bp, Homo sapien
catcaggttccgtggggcagagctc

SEQ ID NO: 4545760 - DNA, 25 bp, Homo sapien
ctggatttgggtgatgaacactttc

SEQ ID NO: 4545761 - DNA, 25 bp, Homo sapien
tcctccttcaaacttcgcataacag

SEQ ID NO: 4545762 - DNA, 25 bp, Homo sapien
atgtgcccagggcacaaatttctgg

SEQ ID NO: 4545763 - DNA, 25 bp, Homo sapien
tgaagctgccttcagtgttactgca

SEQ ID NO: 4545764 - DNA, 25 bp, Homo sapien
caaatttctggctcttcgacacact

SEQ ID NO: 4545765 - DNA, 25 bp, Homo sapien
acatttgaagctgccttcagtgtta

SEQ ID NO: 4545766 - DNA, 25 bp, Homo sapien
aatgcatctgtaggacccatccaag

SEQ ID NO: 4545767 - DNA, 25 bp, Homo sapien
tgaagactgtatccaggtgggcaaa

SEQ ID NO: 4545768 - DNA, 25 bp, Homo sapien
cattttgaagactgtatccaggtgg

SEQ ID NO: 4545769 - DNA, 25 bp, Homo sapien
gacaggtacctggtgcacattttct

SEQ ID NO: 4545770 - DNA, 25 bp, Homo sapien
agaccccactgtattaatgcattgg

SEQ ID NO: 4545771 - DNA, 25 bp, Homo sapien
gaaagaccccactgtattaatgcat

SEQ ID NO: 4545772 - DNA, 25 bp, Homo sapien
tcctcccatctggagccacctcata

SEQ ID NO: 4545773 - DNA, 25 bp, Homo sapien
ctggaaagaccccactgtattaatg

SEQ ID NO: 4545774 - DNA, 25 bp, Homo sapien
tatacagtcattgttgtgagaaagg

SEQ ID NO: 4545775 - DNA, 25 bp, Homo sapien
cagttgaaggaaccaattgtgttcc

SEQ ID NO: 4545776 - DNA, 25 bp, Homo sapien
ttccggcaagttccattcccacagg

SEQ ID NO: 4545777 - DNA, 25 bp, Homo sapien
ggatgaaaccatgattgcagcggca

SEQ ID NO: 4545778 - DNA, 25 bp, Homo sapien
ttttaaaaccagtgtggcaaaggca

SEQ ID NO: 4545779 - DNA, 25 bp, Homo sapien
gcttccaactgtgtcaatgcactgc

SEQ ID NO: 4545780 - DNA, 25 bp, Homo sapien
ccaagcacatggtttggtcatcatt

SEQ ID NO: 4545781 - DNA, 25 bp, Homo sapien
tatattggggatttcttgacattca

SEQ ID NO: 4545782 - DNA, 25 bp, Homo sapien
cgggcttacagtcacagcggtagct

SEQ ID NO: 4545783 - DNA, 25 bp, Homo sapien
tcctgtggaggtgaagcggtagccg

SEQ ID NO: 4545784 - DNA, 25 bp, Homo sapien
tgttgatgcattcggcgttgcgctg

SEQ ID NO: 4545785 - DNA, 25 bp, Homo sapien
actgggccgttctgacactcgtcaa

SEQ ID NO: 4545786 - DNA, 25 bp, Homo sapien
tgggtacagtcatcatcaaagccat

SEQ ID NO: 4545787 - DNA, 25 bp, Homo sapien
ctgggtacagtcatcatcaaagcca

SEQ ID NO: 4545788 - DNA, 25 bp, Homo sapien
ggtacagtcatcatcaaagccatct

SEQ ID NO: 4545789 - DNA, 25 bp, Homo sapien
gggtacagtcatcatcaaagccatc

SEQ ID NO: 4545790 - DNA, 25 bp, Homo sapien
cattatagaagaatcccactggaca

SEQ ID NO: 4545791 - DNA, 25 bp, Homo sapien
gaagctgccaaccatgttgatacac

SEQ ID NO: 4545792 - DNA, 25 bp, Homo sapien
acccctgggatctcccggcactcat

SEQ ID NO: 4545793 - DNA, 25 bp, Homo sapien
acattcacatcggaagctgccaacc

SEQ ID NO: 4545794 - DNA, 25 bp, Homo sapien
gcagggcctcagaccgaaaagattt

SEQ ID NO: 4545795 - DNA, 25 bp, Homo sapien
tttaaaccacaagggcattgcctgc

SEQ ID NO: 4545796 - DNA, 25 bp, Homo sapien
tatggatttggcactaagggagcca

SEQ ID NO: 4545797 - DNA, 25 bp, Homo sapien
caactgtgcagacttaagagggcat

SEQ ID NO: 4545798 - DNA, 25 bp, Homo sapien
cttccacagagtgtagcaaactcat

SEQ ID NO: 4545799 - DNA, 25 bp, Homo sapien
aaatgtcgatgacaaagcctggcct

SEQ ID NO: 4545800 - DNA, 25 bp, Homo sapien
ggtaaaccggtataaatgtcgatga

SEQ ID NO: 4545801 - DNA, 25 bp, Homo sapien
taaaccggtataaatgtcgatgaca

SEQ ID NO: 4545802 - DNA, 25 bp, Homo sapien
ggtcatgttgaataacaattctcca

SEQ ID NO: 4545803 - DNA, 25 bp, Homo sapien
tgtacttgggatgggacactgttca

SEQ ID NO: 4545804 - DNA, 25 bp, Homo sapien
agggcttgttccacgcccggccaat

SEQ ID NO: 4545805 - DNA, 25 bp, Homo sapien
tctggttgtcagcatagtagtttct

SEQ ID NO: 4545806 - DNA, 25 bp, Homo sapien
acggtgttgtaacatgtccctggac

SEQ ID NO: 4545807 - DNA, 25 bp, Homo sapien
catgtagtctggaggacagatacag

SEQ ID NO: 4545808 - DNA, 25 bp, Homo sapien
gatacaggtgtagttgccaacggtg

SEQ ID NO: 4545809 - DNA, 25 bp, Homo sapien
tcccccattcacttgcatgtagtct

SEQ ID NO: 4545810 - DNA, 25 bp, Homo sapien
aagagaaagtggtatgtgaatatga

SEQ ID NO: 4545811 - DNA, 25 bp, Homo sapien
gagaaagtggtatgtgaatatgaaa

SEQ ID NO: 4545812 - DNA, 25 bp, Homo sapien
caaagagaaagtggtatgtgaatat

SEQ ID NO: 4545813 - DNA, 25 bp, Homo sapien
ctataatccaaagagaaagtggtat

SEQ ID NO: 4545814 - DNA, 25 bp, Homo sapien
tcacacactcgtgtatcttcattca

SEQ ID NO: 4545815 - DNA, 25 bp, Homo sapien
acacactcgtgtatcttcattcagg

SEQ ID NO: 4545816 - DNA, 25 bp, Homo sapien
ggacagcggcactggaaactcccaa

SEQ ID NO: 4545817 - DNA, 25 bp, Homo sapien
aggtagtagccggttggacagcggc

SEQ ID NO: 4545818 - DNA, 25 bp, Homo sapien
taacggtgataggatttggtcggaa

SEQ ID NO: 4545819 - DNA, 25 bp, Homo sapien
aatataacggtgataggatttggtc

SEQ ID NO: 4545820 - DNA, 25 bp, Homo sapien
tgataggatttggtcggaaaccttc

SEQ ID NO: 4545821 - DNA, 25 bp, Homo sapien
cttccaatataacggtgataggatt

SEQ ID NO: 4545822 - DNA, 25 bp, Homo sapien
gagtaccccaggctttacccagaga

SEQ ID NO: 4545823 - DNA, 25 bp, Homo sapien
caatttcattgctgcaggctgtatc

SEQ ID NO: 4545824 - DNA, 25 bp, Homo sapien
gacacatctcacaaggagtacccca

SEQ ID NO: 4545825 - DNA, 25 bp, Homo sapien
cgaggtcgaatatccaaatagcaat

SEQ ID NO: 4545826 - DNA, 25 bp, Homo sapien
tcagttcaaaatcaggtgggcagtc

SEQ ID NO: 4545827 - DNA, 25 bp, Homo sapien
cacagatatagctgcctggagtgtt

SEQ ID NO: 4545828 - DNA, 25 bp, Homo sapien
cagttcccactgatgcacgtggttg

SEQ ID NO: 4545829 - DNA, 25 bp, Homo sapien
cacgtggttggatccaggcattcat

SEQ ID NO: 4545830 - DNA, 25 bp, Homo sapien
ccgaacagtgagtagtggagttatc

SEQ ID NO: 4545831 - DNA, 25 bp, Homo sapien
gaacagtgagtagtggagttatcac

SEQ ID NO: 4545832 - DNA, 25 bp, Homo sapien
aaaaccgaacagtgagtagtggagt

SEQ ID NO: 4545833 - DNA, 25 bp, Homo sapien
ctaaaaccgaacagtgagtagtgga

SEQ ID NO: 4545834 - DNA, 25 bp, Homo sapien
gggaggttgtggcaagttccaaaga

SEQ ID NO: 4545835 - DNA, 25 bp, Homo sapien
gtagcctatctcacactcacagcgg

SEQ ID NO: 4545836 - DNA, 25 bp, Homo sapien
aagacacagatgttcggaagggagc

SEQ ID NO: 4545837 - DNA, 25 bp, Homo sapien
gccgcttctgtccagttcgtagcct

SEQ ID NO: 4545838 - DNA, 25 bp, Homo sapien
taacattcttcgtgtgcagttgaca

SEQ ID NO: 4545839 - DNA, 25 bp, Homo sapien
ttagttgcataatctccagtgtccc

SEQ ID NO: 4545840 - DNA, 25 bp, Homo sapien
ggagattggaaaaccgcacacgctt

SEQ ID NO: 4545841 - DNA, 25 bp, Homo sapien
catgtgtttgcctttgttgacggag

SEQ ID NO: 4545842 - DNA, 25 bp, Homo sapien
caggttctcagagcactcatcaagg

SEQ ID NO: 4545843 - DNA, 25 bp, Homo sapien
tcacagcggtatcctcctggtgcat

SEQ ID NO: 4545844 - DNA, 25 bp, Homo sapien
cagcactgggcacgaagcccatgtc

SEQ ID NO: 4545845 - DNA, 25 bp, Homo sapien
cgaagcccatgtcgcattcacagcg

SEQ ID NO: 4545846 - DNA, 25 bp, Homo sapien
tgtacaagtgaagccatcacctgtg

SEQ ID NO: 4545847 - DNA, 25 bp, Homo sapien
aagatcccatggtattcttgcagtc

SEQ ID NO: 4545848 - DNA, 25 bp, Homo sapien
tcttgcagtctgcatgctggctgca

SEQ ID NO: 4545849 - DNA, 25 bp, Homo sapien
gcacatatgggttccattggaacat

SEQ ID NO: 4545850 - DNA, 25 bp, Homo sapien
tcctgctgtattggtacatacagca

SEQ ID NO: 4545851 - DNA, 25 bp, Homo sapien
ttgccacagttgtgtgctccaattt

SEQ ID NO: 4545852 - DNA, 25 bp, Homo sapien
agctacatttgaagcttcctgctgt

SEQ ID NO: 4545853 - DNA, 25 bp, Homo sapien
tgtttgccacagttgtgtgctccaa

SEQ ID NO: 4545854 - DNA, 25 bp, Homo sapien
catcaaagatgacacctagcagggc

SEQ ID NO: 4545855 - DNA, 25 bp, Homo sapien
taccatgaatggagaggccaaacgt

SEQ ID NO: 4545856 - DNA, 25 bp, Homo sapien
tcatccaagtatgggcttgtgcccg

SEQ ID NO: 4545857 - DNA, 25 bp, Homo sapien
catggagttttcacaggccgacagc

SEQ ID NO: 4545858 - DNA, 25 bp, Homo sapien
gcaccatttgtaccgagaggccgta

SEQ ID NO: 4545859 - DNA, 25 bp, Homo sapien
taagtcataagagcttgccaaactg

SEQ ID NO: 4545860 - DNA, 25 bp, Homo sapien
tatcagaatggacccctagacaggc

SEQ ID NO: 4545861 - DNA, 25 bp, Homo sapien
taaagctggtgtcacttcatgcaac

SEQ ID NO: 4545862 - DNA, 25 bp, Homo sapien
caggtcccacttaggcagatatttg

SEQ ID NO: 4545863 - DNA, 25 bp, Homo sapien
tcgtgttttcacaggtcccacttag

SEQ ID NO: 4545864 - DNA, 25 bp, Homo sapien
gtagcccatatcacagtggcagata

SEQ ID NO: 4545865 - DNA, 25 bp, Homo sapien
tttttgccggagtagcccatatcac

SEQ ID NO: 4545866 - DNA, 25 bp, Homo sapien
aagacaagatgaaaaattctgtctt

SEQ ID NO: 4545867 - DNA, 25 bp, Homo sapien
gatgaaaaattctgtcttctttgct

SEQ ID NO: 4545868 - DNA, 25 bp, Homo sapien
agacaagatgaaaaattctgtcttc

SEQ ID NO: 4545869 - DNA, 25 bp, Homo sapien
gaaaaattctgtcttctttgcttac

SEQ ID NO: 4545870 - DNA, 25 bp, Homo sapien
gaatccatcataacacaagcacctg

SEQ ID NO: 4545871 - DNA, 25 bp, Homo sapien
tgaccaccatcacagatattgggat

SEQ ID NO: 4545872 - DNA, 25 bp, Homo sapien
gatattgggattatcttcacactca

SEQ ID NO: 4545873 - DNA, 25 bp, Homo sapien
caagtcttcatgtcttcagatgcca

SEQ ID NO: 4545874 - DNA, 25 bp, Homo sapien
tgtgcagaaggtttcacaaccacca

SEQ ID NO: 4545875 - DNA, 25 bp, Homo sapien
gatctctggtcaggcattagtgcaa

SEQ ID NO: 4545876 - DNA, 25 bp, Homo sapien
tcccggctgacagctacattcatag

SEQ ID NO: 4545877 - DNA, 25 bp, Homo sapien
catagctgccttcagagtttgtgca

SEQ ID NO: 4545878 - DNA, 25 bp, Homo sapien
ggtgtgcactcagctcacattcatt

SEQ ID NO: 4545879 - DNA, 25 bp, Homo sapien
cctatcgggagttgaatggtagcca

SEQ ID NO: 4545880 - DNA, 25 bp, Homo sapien
tgaggttcacgcaacggccattggg

SEQ ID NO: 4545881 - DNA, 25 bp, Homo sapien
acactgatacttccctatgaggttc

SEQ ID NO: 4545882 - DNA, 25 bp, Homo sapien
ttcacagcggtaacttccctctgtg

SEQ ID NO: 4545883 - DNA, 25 bp, Homo sapien
tcggcataggagaggatctctctga

SEQ ID NO: 4545884 - DNA, 25 bp, Homo sapien
tgatggccaggcgggcattcacagc

SEQ ID NO: 4545885 - DNA, 25 bp, Homo sapien
cggtaacttccctctgtgttatggc

SEQ ID NO: 4545886 - DNA, 25 bp, Homo sapien
ctttcatagccttcgtcacacttgc

SEQ ID NO: 4545887 - DNA, 25 bp, Homo sapien
ggtcaggagatatgcggcattcgtc

SEQ ID NO: 4545888 - DNA, 25 bp, Homo sapien
ggagatatgcggcattcgtcaatgt

SEQ ID NO: 4545889 - DNA, 25 bp, Homo sapien
tagccttcgtcacacttgcattcaa

SEQ ID NO: 4545890 - DNA, 25 bp, Homo sapien
tgtcacacctgcacttaaagctgcc

SEQ ID NO: 4545891 - DNA, 25 bp, Homo sapien
gtttctgcacttgccgtgggtgcag

SEQ ID NO: 4545892 - DNA, 25 bp, Homo sapien
gaatcaagagcaaagccgctgtcac

SEQ ID NO: 4545893 - DNA, 25 bp, Homo sapien
gcagaggctgggtatcatcttgcac

SEQ ID NO: 4545894 - DNA, 25 bp, Homo sapien
cggccagcaataggcagggtgcact

SEQ ID NO: 4545895 - DNA, 25 bp, Homo sapien
caggaagcaggtttccaggcggata

SEQ ID NO: 4545896 - DNA, 25 bp, Homo sapien
tttgtggcaaatccgggtcctctcg

SEQ ID NO: 4545897 - DNA, 25 bp, Homo sapien
ggacacagctcctcgtactcaggag

SEQ ID NO: 4545898 - DNA, 25 bp, Homo sapien
tgatctccacaggtgtttttgcaag

SEQ ID NO: 4545899 - DNA, 25 bp, Homo sapien
cctgatctccacaggtgtttttgca

SEQ ID NO: 4545900 - DNA, 25 bp, Homo sapien
ctcctgatctccacaggtgtttttg

SEQ ID NO: 4545901 - DNA, 25 bp, Homo sapien
gatctccacaggtgtttttgcaagg

SEQ ID NO: 4545902 - DNA, 25 bp, Homo sapien
caagacagatccttcctgtggcatc

SEQ ID NO: 4545903 - DNA, 25 bp, Homo sapien
ccatttttacacactcctgggaaca

SEQ ID NO: 4545904 - DNA, 25 bp, Homo sapien
gaatgaccccctagtgttaacacac

SEQ ID NO: 4545905 - DNA, 25 bp, Homo sapien
cactgacacttgaatgaccccctag

SEQ ID NO: 4545906 - DNA, 25 bp, Homo sapien
gagtaccctttaccacatatgggat

SEQ ID NO: 4545907 - DNA, 25 bp, Homo sapien
taattcttgagtaccctttaccaca

SEQ ID NO: 4545908 - DNA, 25 bp, Homo sapien
tcttgagtaccctttaccacatatg

SEQ ID NO: 4545909 - DNA, 25 bp, Homo sapien
ttgagtaccctttaccacatatggg

SEQ ID NO: 4545910 - DNA, 25 bp, Homo sapien
ttggcatagggtgcacgggcttccc

SEQ ID NO: 4545911 - DNA, 25 bp, Homo sapien
acagtctgccagcaagtgcccttga

SEQ ID NO: 4545912 - DNA, 25 bp, Homo sapien
gcactgggactttaaggtggctcca

SEQ ID NO: 4545913 - DNA, 25 bp, Homo sapien
gatgttgatctcacatcgcccatca

SEQ ID NO: 4545914 - DNA, 25 bp, Homo sapien
tttgttggatccaaagtactttcag

SEQ ID NO: 4545915 - DNA, 25 bp, Homo sapien
ttgttggatccaaagtactttcaga

SEQ ID NO: 4545916 - DNA, 25 bp, Homo sapien
ggacttgattcgcattcatcaatgt

SEQ ID NO: 4545917 - DNA, 25 bp, Homo sapien
tgcaaggacttgattcgcattcatc

SEQ ID NO: 4545918 - DNA, 25 bp, Homo sapien
gataaatcccttggggcaggtacag

SEQ ID NO: 4545919 - DNA, 25 bp, Homo sapien
tccaggagtatttctacattgtcca

SEQ ID NO: 4545920 - DNA, 25 bp, Homo sapien
caggtacagacaaaacttccaggag

SEQ ID NO: 4545921 - DNA, 25 bp, Homo sapien
ccattgtcacaaaggagactgttca

SEQ ID NO: 4545922 - DNA, 25 bp, Homo sapien
atacatttataggtcccacgaaggt

SEQ ID NO: 4545923 - DNA, 25 bp, Homo sapien
aatatcaggatctagtgcacattca

SEQ ID NO: 4545924 - DNA, 25 bp, Homo sapien
caaatatcaggatctagtgcacatt

SEQ ID NO: 4545925 - DNA, 25 bp, Homo sapien
ggcaaatatcaggatctagtgcaca

SEQ ID NO: 4545926 - DNA, 25 bp, Homo sapien
aaaggtcaaaatcaattaagattat

SEQ ID NO: 4545927 - DNA, 25 bp, Homo sapien
ctgcaccacaaaaaaggtcaaaatc

SEQ ID NO: 4545928 - DNA, 25 bp, Homo sapien
aggtcaaaatcaattaagattataa

SEQ ID NO: 4545929 - DNA, 25 bp, Homo sapien
caccacaaaaaaggtcaaaatcaat

SEQ ID NO: 4545930 - DNA, 25 bp, Homo sapien
cactgcctgctgacgtcattcctgg

SEQ ID NO: 4545931 - DNA, 25 bp, Homo sapien
cactgctgcagagtgcctgatattc

SEQ ID NO: 4545932 - DNA, 25 bp, Homo sapien
actgcctgctgacgtcattcctggc

SEQ ID NO: 4545933 - DNA, 25 bp, Homo sapien
ctgctgcagagtgcctgatattccg

SEQ ID NO: 4545934 - DNA, 25 bp, Homo sapien
caaagacctcaatggtggcagaagg

SEQ ID NO: 4545935 - DNA, 25 bp, Homo sapien
ctggcagtacgagggcatctccatg

SEQ ID NO: 4545936 - DNA, 25 bp, Homo sapien
cagaaggctggcagtacgagggcat

SEQ ID NO: 4545937 - DNA, 25 bp, Homo sapien
agacctcaatggtggcagaaggctg

SEQ ID NO: 4545938 - DNA, 25 bp, Homo sapien
ttagtgacagcaccaaacaaaggtt

SEQ ID NO: 4545939 - DNA, 25 bp, Homo sapien
caaatgcatactcagtgctggcgca

SEQ ID NO: 4545940 - DNA, 25 bp, Homo sapien
tgtatccaccatagcatgtgctccg

SEQ ID NO: 4545941 - DNA, 25 bp, Homo sapien
ggtttgatacactggcctctcttgt

SEQ ID NO: 4545942 - DNA, 25 bp, Homo sapien
ctaaacaggaagaagcatctgtcat

SEQ ID NO: 4545943 - DNA, 25 bp, Homo sapien
taaggttagccatgatgttttctta

SEQ ID NO: 4545944 - DNA, 25 bp, Homo sapien
aaggttagccatgatgttttcttac

SEQ ID NO: 4545945 - DNA, 25 bp, Homo sapien
cagatcccaggggtttcacactcgt

SEQ ID NO: 4545946 - DNA, 25 bp, Homo sapien
ccaggggtttcacactcgttaatgt

SEQ ID NO: 4545947 - DNA, 25 bp, Homo sapien
gttgacgcaacgcccattcatgcag

SEQ ID NO: 4545948 - DNA, 25 bp, Homo sapien
ttgacgcaacgcccattcatgcaga

SEQ ID NO: 4545949 - DNA, 25 bp, Homo sapien
accttggtcaaagttagtggcttca

SEQ ID NO: 4545950 - DNA, 25 bp, Homo sapien
gcaaaacgtggagactacaacctga

SEQ ID NO: 4545951 - DNA, 25 bp, Homo sapien
tgctcagggctaggagaaaatctta

SEQ ID NO: 4545952 - DNA, 25 bp, Homo sapien
acagtcacatctttgtgggctcaga

SEQ ID NO: 4545953 - DNA, 25 bp, Homo sapien
aacaacataaggaggagaaaaggca

SEQ ID NO: 4545954 - DNA, 25 bp, Homo sapien
ctctaaacaacataaggaggagaaa

SEQ ID NO: 4545955 - DNA, 25 bp, Homo sapien
tgatctagggttttatagcacgaac

SEQ ID NO: 4545956 - DNA, 25 bp, Homo sapien
acgtgaagaacatgatctagggttt

SEQ ID NO: 4545957 - DNA, 25 bp, Homo sapien
aggcacatgttccttatgctgcatt

SEQ ID NO: 4545958 - DNA, 25 bp, Homo sapien
tcattgatacacattccattaaggc

SEQ ID NO: 4545959 - DNA, 25 bp, Homo sapien
ttgcaataacgtccatctgatgcca

SEQ ID NO: 4545960 - DNA, 25 bp, Homo sapien
gatacacattccattaaggcacatg

SEQ ID NO: 4545961 - DNA, 25 bp, Homo sapien
gcgtccattattgcagatccggcca

SEQ ID NO: 4545962 - DNA, 25 bp, Homo sapien
tcccatctcgtgtaacatgaaagcc

SEQ ID NO: 4545963 - DNA, 25 bp, Homo sapien
tgaaagcccgcattacacacgcaat

SEQ ID NO: 4545964 - DNA, 25 bp, Homo sapien
gccatctgtgttgatgcagcgtcca

SEQ ID NO: 4545965 - DNA, 25 bp, Homo sapien
ggcagatcctgcagtggtttccaca

SEQ ID NO: 4545966 - DNA, 25 bp, Homo sapien
tacccaaagtggatagcatggttcc

SEQ ID NO: 4545967 - DNA, 25 bp, Homo sapien
cacaagtcattggacgagctgaggc

SEQ ID NO: 4545968 - DNA, 25 bp, Homo sapien
tacacaacagagcttgacacggaag

SEQ ID NO: 4545969 - DNA, 25 bp, Homo sapien
tcaactcagttacgtgttcaaccta

SEQ ID NO: 4545970 - DNA, 25 bp, Homo sapien
tagtgcactaaaatacactggtggc

SEQ ID NO: 4545971 - DNA, 25 bp, Homo sapien
actggtggcaagaaatctctacgtg

SEQ ID NO: 4545972 - DNA, 25 bp, Homo sapien
tgttagtgagttcaaagtccttgct

SEQ ID NO: 4545973 - DNA, 25 bp, Homo sapien
tccacgtcaggagccaggaccatac

SEQ ID NO: 4545974 - DNA, 25 bp, Homo sapien
ttccacgtcaggagccaggaccata

SEQ ID NO: 4545975 - DNA, 25 bp, Homo sapien
attccacgtcaggagccaggaccat

SEQ ID NO: 4545976 - DNA, 25 bp, Homo sapien
tatccagctcggcactgacaggtgt

SEQ ID NO: 4545977 - DNA, 25 bp, Homo sapien
ggttgttaatacactcaccaccagc

SEQ ID NO: 4545978 - DNA, 25 bp, Homo sapien
cattctgtccgcgtgagtgtgctct

SEQ ID NO: 4545979 - DNA, 25 bp, Homo sapien
gcactgacaggtgtacgaaccctgg

SEQ ID NO: 4545980 - DNA, 25 bp, Homo sapien
tagcggaccaactggcagtaatcag

SEQ ID NO: 4545981 - DNA, 25 bp, Homo sapien
ggtccagctggaaccctttgttgca

SEQ ID NO: 4545982 - DNA, 25 bp, Homo sapien
ccattttgacagagatagcggacca

SEQ ID NO: 4545983 - DNA, 25 bp, Homo sapien
ccaggagttggaatgcagcgtccat

SEQ ID NO: 4545984 - DNA, 25 bp, Homo sapien
taatgactaaagtagcataaataaa

SEQ ID NO: 4545985 - DNA, 25 bp, Homo sapien
aaatgttaacttgaacaatgcaaga

SEQ ID NO: 4545986 - DNA, 25 bp, Homo sapien
atgttaacttgaacaatgcaagaaa

SEQ ID NO: 4545987 - DNA, 25 bp, Homo sapien
atgactaaagtagcataaataaata

SEQ ID NO: 4545988 - DNA, 25 bp, Homo sapien
ggctcccgagatggatacagatatt

SEQ ID NO: 4545989 - DNA, 25 bp, Homo sapien
gatattccactggtggtcgagggac

SEQ ID NO: 4545990 - DNA, 25 bp, Homo sapien
tggctcccgagatggatacagatat

SEQ ID NO: 4545991 - DNA, 25 bp, Homo sapien
tggtggtcgagggaccggaatttga

SEQ ID NO: 4545992 - DNA, 25 bp, Homo sapien
tctcccaggaattaccataggaaca

SEQ ID NO: 4545993 - DNA, 25 bp, Homo sapien
gtgggggaggatattctggtctccc

SEQ ID NO: 4545994 - DNA, 25 bp, Homo sapien
ccaggaattaccataggaacagagc

SEQ ID NO: 4545995 - DNA, 25 bp, Homo sapien
tcccaggaattaccataggaacaga

SEQ ID NO: 4545996 - DNA, 25 bp, Homo sapien
ctgtgtaacagtatcctgggcgaac

SEQ ID NO: 4545997 - DNA, 25 bp, Homo sapien
gcagctggttagagcagcgcccgtt

SEQ ID NO: 4545998 - DNA, 25 bp, Homo sapien
gtgacccctggagaccagcatcggc

SEQ ID NO: 4545999 - DNA, 25 bp, Homo sapien
gcgcccgtttgtcagagctgtgtaa

SEQ ID NO: 4546000 - DNA, 25 bp, Homo sapien
gctgactgtgtttgtacattcaccc

SEQ ID NO: 4546001 - DNA, 25 bp, Homo sapien
tatgcatctggtaccatctggagag

SEQ ID NO: 4546002 - DNA, 25 bp, Homo sapien
ttgcaaaagtaactgctgactgtgt

SEQ ID NO: 4546003 - DNA, 25 bp, Homo sapien
taccatctggagaggtgtaaaaacc

SEQ ID NO: 4546004 - DNA, 25 bp, Homo sapien
tggtgcccaggtacgcctcttgcat

SEQ ID NO: 4546005 - DNA, 25 bp, Homo sapien
ctctggtgcccaggtacgcctcttg

SEQ ID NO: 4546006 - DNA, 25 bp, Homo sapien
ggtacgcctcttgcattacactgag

SEQ ID NO: 4546007 - DNA, 25 bp, Homo sapien
gcccaggtacgcctcttgcattaca

SEQ ID NO: 4546008 - DNA, 25 bp, Homo sapien
tggacttgacaagagaaacctgatc

SEQ ID NO: 4546009 - DNA, 25 bp, Homo sapien
taatgatcatgaatgccactgagcc

SEQ ID NO: 4546010 - DNA, 25 bp, Homo sapien
taagagggaatttgagaacggtcac

SEQ ID NO: 4546011 - DNA, 25 bp, Homo sapien
gttaacctgatcctgactgcctaga

SEQ ID NO: 4546012 - DNA, 25 bp, Homo sapien
acgccagcttttatccatgctgcat

SEQ ID NO: 4546013 - DNA, 25 bp, Homo sapien
tacgccagcttttatccatgctgca

SEQ ID NO: 4546014 - DNA, 25 bp, Homo sapien
gtacgccagcttttatccatgctgc

SEQ ID NO: 4546015 - DNA, 25 bp, Homo sapien
agccccatctatggtagtgggttaa

SEQ ID NO: 4546016 - DNA, 25 bp, Homo sapien
ccccatctatggtagtgggttaagc

SEQ ID NO: 4546017 - DNA, 25 bp, Homo sapien
ccatctatggtagtgggttaagccg

SEQ ID NO: 4546018 - DNA, 25 bp, Homo sapien
atctatggtagtgggttaagccgcc

SEQ ID NO: 4546019 - DNA, 25 bp, Homo sapien
catggaaagcaactcgaataatggc

SEQ ID NO: 4546020 - DNA, 25 bp, Homo sapien
tctgagagcgtgagggttagcatct

SEQ ID NO: 4546021 - DNA, 25 bp, Homo sapien
tagcatcttgtgaatttgctaaagc

SEQ ID NO: 4546022 - DNA, 25 bp, Homo sapien
attctgcaagaggaagatctcatgg

SEQ ID NO: 4546023 - DNA, 25 bp, Homo sapien
taccagagtaagacaggtcaaccct

SEQ ID NO: 4546024 - DNA, 25 bp, Homo sapien
gtatagcactaacaggacattctcc

SEQ ID NO: 4546025 - DNA, 25 bp, Homo sapien
tcctgattactttcttaccagagta

SEQ ID NO: 4546026 - DNA, 25 bp, Homo sapien
agctctcagggtacttcctgattac

SEQ ID NO: 4546027 - DNA, 25 bp, Homo sapien
ccaactgcaaagcataagatttctt

SEQ ID NO: 4546028 - DNA, 25 bp, Homo sapien
cccccaactgcaaagcataagattt

SEQ ID NO: 4546029 - DNA, 25 bp, Homo sapien
aactgcaaagcataagatttcttac

SEQ ID NO: 4546030 - DNA, 25 bp, Homo sapien
cccaactgcaaagcataagatttct

SEQ ID NO: 4546031 - DNA, 25 bp, Homo sapien
ttgtgacacttcattaagtttgtgt

SEQ ID NO: 4546032 - DNA, 25 bp, Homo sapien
ccggggatggcctggcattcatcca

SEQ ID NO: 4546033 - DNA, 25 bp, Homo sapien
cacttcattaagtttgtgtccagca

SEQ ID NO: 4546034 - DNA, 25 bp, Homo sapien
atttcctccctgacagagcccgggg

SEQ ID NO: 4546035 - DNA, 25 bp, Homo sapien
tccagattggtagtaataatcagag

SEQ ID NO: 4546036 - DNA, 25 bp, Homo sapien
tagaggagagtgcattaacttttgc

SEQ ID NO: 4546037 - DNA, 25 bp, Homo sapien
taaaaggccattattcacggcctca

SEQ ID NO: 4546038 - DNA, 25 bp, Homo sapien
gcgggttttagcacatatgcagcaa

SEQ ID NO: 4546039 - DNA, 25 bp, Homo sapien
cctggagtcagaggtacatacaaac

SEQ ID NO: 4546040 - DNA, 25 bp, Homo sapien
ccataatgcactgcatcgctgtaaa

SEQ ID NO: 4546041 - DNA, 25 bp, Homo sapien
gtttctacacagcactgccataatg

SEQ ID NO: 4546042 - DNA, 25 bp, Homo sapien
tcgctgtaaacagaatcacaccacc

SEQ ID NO: 4546043 - DNA, 25 bp, Homo sapien
tttgtgcagacaatcccgctgagtt

SEQ ID NO: 4546044 - DNA, 25 bp, Homo sapien
ccgctgagttgtccctggcacatct

SEQ ID NO: 4546045 - DNA, 25 bp, Homo sapien
tgctgatcacagtaaaacatgggcc

SEQ ID NO: 4546046 - DNA, 25 bp, Homo sapien
gacaagctcccgtgcggatatttgg

SEQ ID NO: 4546047 - DNA, 25 bp, Homo sapien
gcaggaaccatcatgcagaggaaca

SEQ ID NO: 4546048 - DNA, 25 bp, Homo sapien
ccatcttgcttgactccaaattgag

SEQ ID NO: 4546049 - DNA, 25 bp, Homo sapien
atcttgcttgactccaaattgagaa

SEQ ID NO: 4546050 - DNA, 25 bp, Homo sapien
tgactccaaattgagaaatgaattt

SEQ ID NO: 4546051 - DNA, 25 bp, Homo sapien
gggaggcggcatgtacatgatgcac

SEQ ID NO: 4546052 - DNA, 25 bp, Homo sapien
cagggaggcggcatgtacatgatgc

SEQ ID NO: 4546053 - DNA, 25 bp, Homo sapien
ggcggcatgtacatgatgcacagag

SEQ ID NO: 4546054 - DNA, 25 bp, Homo sapien
gaggcggcatgtacatgatgcacag

SEQ ID NO: 4546055 - DNA, 25 bp, Homo sapien
tgctattctcctctatgcgtccatc

SEQ ID NO: 4546056 - DNA, 25 bp, Homo sapien
acttgtgtcaagggggttcgttgtg

SEQ ID NO: 4546057 - DNA, 25 bp, Homo sapien
ttgtgtcaagggggttcgttgtgca

SEQ ID NO: 4546058 - DNA, 25 bp, Homo sapien
ctattctcctctatgcgtccatctg

SEQ ID NO: 4546059 - DNA, 25 bp, Homo sapien
caccagctaccatatacctccaaat

SEQ ID NO: 4546060 - DNA, 25 bp, Homo sapien
accagctaccatatacctccaaatt

SEQ ID NO: 4546061 - DNA, 25 bp, Homo sapien
accaccagctaccatatacctccaa

SEQ ID NO: 4546062 - DNA, 25 bp, Homo sapien
cagctaccatatacctccaaattca

SEQ ID NO: 4546063 - DNA, 25 bp, Homo sapien
tcttcaacgtgagacagaataagcc

SEQ ID NO: 4546064 - DNA, 25 bp, Homo sapien
tgaaaatctgtgctcggttaaaaac

SEQ ID NO: 4546065 - DNA, 25 bp, Homo sapien
cattatcgaggactgtgcacaaccc

SEQ ID NO: 4546066 - DNA, 25 bp, Homo sapien
caagaacatgtctggttgtctcgcc

SEQ ID NO: 4546067 - DNA, 25 bp, Homo sapien
atgcccttctttgtagtgaactgtg

SEQ ID NO: 4546068 - DNA, 25 bp, Homo sapien
aatgcccttctttgtagtgaactgt

SEQ ID NO: 4546069 - DNA, 25 bp, Homo sapien
tgcccttctttgtagtgaactgtgc

SEQ ID NO: 4546070 - DNA, 25 bp, Homo sapien
gagcaagcgccattcaagccaggat

SEQ ID NO: 4546071 - DNA, 25 bp, Homo sapien
cagaagggtctgtctaaagcacagc

SEQ ID NO: 4546072 - DNA, 25 bp, Homo sapien
gatggcgtcaagaaagccaggttta

SEQ ID NO: 4546073 - DNA, 25 bp, Homo sapien
ttggaacacgctgaggatggcgtca

SEQ ID NO: 4546074 - DNA, 25 bp, Homo sapien
actgggaacaagaagtgccgattat

SEQ ID NO: 4546075 - DNA, 25 bp, Homo sapien
ttcacactgggaacaagaagtgccg

SEQ ID NO: 4546076 - DNA, 25 bp, Homo sapien
ttcagctctttggattcacactggg

SEQ ID NO: 4546077 - DNA, 25 bp, Homo sapien
caaagaaagctgtttcagctctttg

SEQ ID NO: 4546078 - DNA, 25 bp, Homo sapien
atatattatgtctaaagaattttga

SEQ ID NO: 4546079 - DNA, 25 bp, Homo sapien
tattatgtctaaagaattttgagac

SEQ ID NO: 4546080 - DNA, 25 bp, Homo sapien
atattatgtctaaagaattttgaga

SEQ ID NO: 4546081 - DNA, 25 bp, Homo sapien
tatattatgtctaaagaattttgag

SEQ ID NO: 4546082 - DNA, 25 bp, Homo sapien
tccaggaagtctggcgggtggaggc

SEQ ID NO: 4546083 - DNA, 25 bp, Homo sapien
aactctctcattagaggagtctgac

SEQ ID NO: 4546084 - DNA, 25 bp, Homo sapien
cattagaggagtctgactcaagtaa

SEQ ID NO: 4546085 - DNA, 25 bp, Homo sapien
aaagggagcttgatccaatcctcaa

SEQ ID NO: 4546086 - DNA, 25 bp, Homo sapien
acaaattcatgatggcagtcacctc

SEQ ID NO: 4546087 - DNA, 25 bp, Homo sapien
ggcagtcacctctggagagaggaat

SEQ ID NO: 4546088 - DNA, 25 bp, Homo sapien
tgatggcagtcacctctggagagag

SEQ ID NO: 4546089 - DNA, 25 bp, Homo sapien
tagcacaaattcatgatggcagtca

SEQ ID NO: 4546090 - DNA, 25 bp, Homo sapien
ttcttcttccaggtcgtatcctttc

SEQ ID NO: 4546091 - DNA, 25 bp, Homo sapien
tgccgtttccctgacaacgttgtct

SEQ ID NO: 4546092 - DNA, 25 bp, Homo sapien
tccctgacaacgttgtcttcttctt

SEQ ID NO: 4546093 - DNA, 25 bp, Homo sapien
caggtcgtatcctttcttgcaagtc

SEQ ID NO: 4546094 - DNA, 25 bp, Homo sapien
tgttggtgacgttccataatgcacg

SEQ ID NO: 4546095 - DNA, 25 bp, Homo sapien
caggtgccatatgccgctaagatta

SEQ ID NO: 4546096 - DNA, 25 bp, Homo sapien
ccttcctacaaggtctcaggtgcca

SEQ ID NO: 4546097 - DNA, 25 bp, Homo sapien
tcaaatctgcatgggaagaagcaca

SEQ ID NO: 4546098 - DNA, 25 bp, Homo sapien
caactgcaacagttgaatgtgtact

SEQ ID NO: 4546099 - DNA, 25 bp, Homo sapien
tatatccagctcaagaatgttgggt

SEQ ID NO: 4546100 - DNA, 25 bp, Homo sapien
gaaaagcacacggttgatgtgcttc

SEQ ID NO: 4546101 - DNA, 25 bp, Homo sapien
tatttgcactattgtagttttagcc

SEQ ID NO: 4546102 - DNA, 25 bp, Homo sapien
aatgtcagcaacagtcagaacacag

SEQ ID NO: 4546103 - DNA, 25 bp, Homo sapien
aactcaagaggctggaagtaccact

SEQ ID NO: 4546104 - DNA, 25 bp, Homo sapien
gatgcccagcgactgaggaagaaaa

SEQ ID NO: 4546105 - DNA, 25 bp, Homo sapien
gagcagcaaagagaactcaagaggc

SEQ ID NO: 4546106 - DNA, 25 bp, Homo sapien
gcacatggagaatgggagttagcct

SEQ ID NO: 4546107 - DNA, 25 bp, Homo sapien
aaaattcgtgtcagaaatgcagctc

SEQ ID NO: 4546108 - DNA, 25 bp, Homo sapien
tatacatagttcacagagctctgcc

SEQ ID NO: 4546109 - DNA, 25 bp, Homo sapien
gagttagcctgtggcattaccttgg

SEQ ID NO: 4546110 - DNA, 25 bp, Homo sapien
tgattacccactgtagtcactagaa

SEQ ID NO: 4546111 - DNA, 25 bp, Homo sapien
acttccaggcatgttagttcagtcc

SEQ ID NO: 4546112 - DNA, 25 bp, Homo sapien
tattgctgattctgtaaaggcacct

SEQ ID NO: 4546113 - DNA, 25 bp, Homo sapien
tttgatcccaaacagctaaaatgtg

SEQ ID NO: 4546114 - DNA, 25 bp, Homo sapien
ccaggagatacttgttcatatccga

SEQ ID NO: 4546115 - DNA, 25 bp, Homo sapien
caatatccaggactgttggcaaaca

SEQ ID NO: 4546116 - DNA, 25 bp, Homo sapien
tatgggtcgtgtactgtgcatcaca

SEQ ID NO: 4546117 - DNA, 25 bp, Homo sapien
gatatcaacattgtaatcagctctg

SEQ ID NO: 4546118 - DNA, 25 bp, Homo sapien
acaggcagtgggtagatggcactac

SEQ ID NO: 4546119 - DNA, 25 bp, Homo sapien
aacaggcagtgggtagatggcacta

SEQ ID NO: 4546120 - DNA, 25 bp, Homo sapien
aaacaggcagtgggtagatggcact

SEQ ID NO: 4546121 - DNA, 25 bp, Homo sapien
ttctgctactaacgggcaagcctgc

SEQ ID NO: 4546122 - DNA, 25 bp, Homo sapien
gctactaacgggcaagcctgccttc

SEQ ID NO: 4546123 - DNA, 25 bp, Homo sapien
ctgctactaacgggcaagcctgcct

SEQ ID NO: 4546124 - DNA, 25 bp, Homo sapien
ccttctgctactaacgggcaagcct

SEQ ID NO: 4546125 - DNA, 25 bp, Homo sapien
cacactggggtccagtaaatccgta

SEQ ID NO: 4546126 - DNA, 25 bp, Homo sapien
tcctccattgagacagccactttca

SEQ ID NO: 4546127 - DNA, 25 bp, Homo sapien
gggtccagtaaatccgtaagtgcat

SEQ ID NO: 4546128 - DNA, 25 bp, Homo sapien
gtaagtgcatgcacatcgatttggg

SEQ ID NO: 4546129 - DNA, 25 bp, Homo sapien
gtgtttgttttggacggtcactcta

SEQ ID NO: 4546130 - DNA, 25 bp, Homo sapien
tggacggtcactctacagttacaca

SEQ ID NO: 4546131 - DNA, 25 bp, Homo sapien
ggacaacaataaaatgtctaaagtc

SEQ ID NO: 4546132 - DNA, 25 bp, Homo sapien
taatgaagtaacacttgtggtcctc

SEQ ID NO: 4546133 - DNA, 25 bp, Homo sapien
ctttctggcatagacagtgatcgtc

SEQ ID NO: 4546134 - DNA, 25 bp, Homo sapien
gtgatcgtcactgcagctacctcca

SEQ ID NO: 4546135 - DNA, 25 bp, Homo sapien
gagtccctatgtatcctttctggca

SEQ ID NO: 4546136 - DNA, 25 bp, Homo sapien
tccattcatacagcgaatattgcag

SEQ ID NO: 4546137 - DNA, 25 bp, Homo sapien
ggctgacagccttagaccccagaca

SEQ ID NO: 4546138 - DNA, 25 bp, Homo sapien
ggctcatagtgagcaatgacaacag

SEQ ID NO: 4546139 - DNA, 25 bp, Homo sapien
tagaaagaccatgggctgacagcct

SEQ ID NO: 4546140 - DNA, 25 bp, Homo sapien
gaagctggagtaaaagacagccacg

SEQ ID NO: 4546141 - DNA, 25 bp, Homo sapien
cacatatttggcctcgaacaaaatc

SEQ ID NO: 4546142 - DNA, 25 bp, Homo sapien
gctatctgaccagatgggcaagtgc

SEQ ID NO: 4546143 - DNA, 25 bp, Homo sapien
gaacaaaatccatccccacaggaat

SEQ ID NO: 4546144 - DNA, 25 bp, Homo sapien
gaaggagctatctgaccagatgggc

SEQ ID NO: 4546145 - DNA, 25 bp, Homo sapien
cgccaggtaaggttttccatccagg

SEQ ID NO: 4546146 - DNA, 25 bp, Homo sapien
gcattataacgtgatccacagacat

SEQ ID NO: 4546147 - DNA, 25 bp, Homo sapien
tccatccagggcaacagtaagcatt

SEQ ID NO: 4546148 - DNA, 25 bp, Homo sapien
aatacactgatttccgccaggtaag

SEQ ID NO: 4546149 - DNA, 25 bp, Homo sapien
caaatcctggaatagtgtcagagca

SEQ ID NO: 4546150 - DNA, 25 bp, Homo sapien
tgccctgtggttgacataacaaggt

SEQ ID NO: 4546151 - DNA, 25 bp, Homo sapien
aaggtgtggcagtcaataaagcagc

SEQ ID NO: 4546152 - DNA, 25 bp, Homo sapien
gacagatgacataactcgggaaaca

SEQ ID NO: 4546153 - DNA, 25 bp, Homo sapien
tctgtaagaacccaactccaaacac

SEQ ID NO: 4546154 - DNA, 25 bp, Homo sapien
tgtgctctgtaagaacccaactcca

SEQ ID NO: 4546155 - DNA, 25 bp, Homo sapien
ttcaatattgtgctctgtaagaacc

SEQ ID NO: 4546156 - DNA, 25 bp, Homo sapien
tattgtgctctgtaagaacccaact

SEQ ID NO: 4546157 - DNA, 25 bp, Homo sapien
ctttcttttatgtcctgactctcct

SEQ ID NO: 4546158 - DNA, 25 bp, Homo sapien
tgactctcctccataagctctctgt

SEQ ID NO: 4546159 - DNA, 25 bp, Homo sapien
tgtcccctaaaagaggctgattaag

SEQ ID NO: 4546160 - DNA, 25 bp, Homo sapien
gttttcatacgaatcttttctggca

SEQ ID NO: 4546161 - DNA, 25 bp, Homo sapien
tatgactggtcgtgatttaagacac

SEQ ID NO: 4546162 - DNA, 25 bp, Homo sapien
taatacgctgtccaaagtcccactg

SEQ ID NO: 4546163 - DNA, 25 bp, Homo sapien
gacagcaagagggttctgaacaaca

SEQ ID NO: 4546164 - DNA, 25 bp, Homo sapien
tgagtttacaggcaaccaaggttaa

SEQ ID NO: 4546165 - DNA, 25 bp, Homo sapien
aacagtaagaacagtgcttagcaac

SEQ ID NO: 4546166 - DNA, 25 bp, Homo sapien
gaacttaacctctgcatacctcggc

SEQ ID NO: 4546167 - DNA, 25 bp, Homo sapien
aaagcacccagcttgtagagtggct

SEQ ID NO: 4546168 - DNA, 25 bp, Homo sapien
ctgtgaagggaagcttatgaaagca

SEQ ID NO: 4546169 - DNA, 25 bp, Homo sapien
ggacgctgtccttctgtgcactcac

SEQ ID NO: 4546170 - DNA, 25 bp, Homo sapien
tatgtatttgtttagacttaatacc

SEQ ID NO: 4546171 - DNA, 25 bp, Homo sapien
ccttctgtgcactcacggttcctga

SEQ ID NO: 4546172 - DNA, 25 bp, Homo sapien
tgcactcacggttcctgaagtaccc

SEQ ID NO: 4546173 - DNA, 25 bp, Homo sapien
taaagtatatgctacacaagacgat

SEQ ID NO: 4546174 - DNA, 25 bp, Homo sapien
taaacaacctctatgtcttcaatgt

SEQ ID NO: 4546175 - DNA, 25 bp, Homo sapien
caccataggctgatgtatgttttaa

SEQ ID NO: 4546176 - DNA, 25 bp, Homo sapien
taaatgtaaaccatacccctgcagg

SEQ ID NO: 4546177 - DNA, 25 bp, Homo sapien
tgggactgcacatccagtgagcaga

SEQ ID NO: 4546178 - DNA, 25 bp, Homo sapien
tccactgtggaacaacttttgctgc

SEQ ID NO: 4546179 - DNA, 25 bp, Homo sapien
agaaattggcaatttactctaagaa

SEQ ID NO: 4546180 - DNA, 25 bp, Homo sapien
gaggcagttttctaatctaggaaga

SEQ ID NO: 4546181 - DNA, 25 bp, Homo sapien
aaagagccatcactagggaactgtt

SEQ ID NO: 4546182 - DNA, 25 bp, Homo sapien
tataccacatataaacacgtgtatg

SEQ ID NO: 4546183 - DNA, 25 bp, Homo sapien
gactcaatgtaatctaaagagccat

SEQ ID NO: 4546184 - DNA, 25 bp, Homo sapien
gaactgttccagtgacataatgagg

SEQ ID NO: 4546185 - DNA, 25 bp, Homo sapien
tcagccacagaattaaatccccacg

SEQ ID NO: 4546186 - DNA, 25 bp, Homo sapien
caagtgtgagtaaaagtgtggcatc

SEQ ID NO: 4546187 - DNA, 25 bp, Homo sapien
gaacacactagttggtgacagccca

SEQ ID NO: 4546188 - DNA, 25 bp, Homo sapien
aatgagacaaatgtctgaccaggcc

SEQ ID NO: 4546189 - DNA, 25 bp, Homo sapien
attaagatattattatgtaggagaa

SEQ ID NO: 4546190 - DNA, 25 bp, Homo sapien
tattaagatattattatgtaggaga

SEQ ID NO: 4546191 - DNA, 25 bp, Homo sapien
ctctgactgtcatgggaatcccttc

SEQ ID NO: 4546192 - DNA, 25 bp, Homo sapien
tctaccaagatgaccccaaggaaag

SEQ ID NO: 4546193 - DNA, 25 bp, Homo sapien
agtactttcctctagaaacaaccag

SEQ ID NO: 4546194 - DNA, 25 bp, Homo sapien
ccagaattgatattgcagggaaagg

SEQ ID NO: 4546195 - DNA, 25 bp, Homo sapien
aaacaaccctagcacctctaaggtg

SEQ ID NO: 4546196 - DNA, 25 bp, Homo sapien
ccccaggaggtcttgccaaggagtc

SEQ ID NO: 4546197 - DNA, 25 bp, Homo sapien
gagtcatcctgcccgttgttctgga

SEQ ID NO: 4546198 - DNA, 25 bp, Homo sapien
cttccacagggagagtcatcctgcc

SEQ ID NO: 4546199 - DNA, 25 bp, Homo sapien
atcccagggcgatctccagcagacg

SEQ ID NO: 4546200 - DNA, 25 bp, Homo sapien
tttaagcgcgtcgtgtcctccaccg

SEQ ID NO: 4546201 - DNA, 25 bp, Homo sapien
gacgctaaaagcacggtaaatccca

SEQ ID NO: 4546202 - DNA, 25 bp, Homo sapien
ccatggctcgtgtaggacgctaaaa

SEQ ID NO: 4546203 - DNA, 25 bp, Homo sapien
cgccgcctcttgccgcgcccggggc

SEQ ID NO: 4546204 - DNA, 25 bp, Homo sapien
ctgaagcgcaccgcgccgccggggt

SEQ ID NO: 4546205 - DNA, 25 bp, Homo sapien
tcccacttcaggcggcccctgccag

SEQ ID NO: 4546206 - DNA, 25 bp, Homo sapien
cggggctcggtctgcggccgccgct

SEQ ID NO: 4546207 - DNA, 25 bp, Homo sapien
acacagagacaaatccccgaggcgg

SEQ ID NO: 4546208 - DNA, 25 bp, Homo sapien
ggaagaccgtttggtccacagctgg

SEQ ID NO: 4546209 - DNA, 25 bp, Homo sapien
agactttcagggcatcgggatgctg

SEQ ID NO: 4546210 - DNA, 25 bp, Homo sapien
cgcgtggcgcagttaatttgggtaa

SEQ ID NO: 4546211 - DNA, 25 bp, Homo sapien
aattgcgcgcgatgcgcgctctgaa

SEQ ID NO: 4546212 - DNA, 25 bp, Homo sapien
ggcgcaaacgcaaaagcctccgtgg

SEQ ID NO: 4546213 - DNA, 25 bp, Homo sapien
gcaaagtacccatatccccagcggt

SEQ ID NO: 4546214 - DNA, 25 bp, Homo sapien
ttttttagcggcacgaattgcgcgc

SEQ ID NO: 4546215 - DNA, 25 bp, Homo sapien
tccagggtgctctctctaagtcggt

SEQ ID NO: 4546216 - DNA, 25 bp, Homo sapien
tctgcggctgcgaggtttagatccg

SEQ ID NO: 4546217 - DNA, 25 bp, Homo sapien
tgcaccaagaatgcgcgctggagac

SEQ ID NO: 4546218 - DNA, 25 bp, Homo sapien
cagacgcggctcttctgaggctcaa

SEQ ID NO: 4546219 - DNA, 25 bp, Homo sapien
gagcggtgaagggatggtcctcttg

SEQ ID NO: 4546220 - DNA, 25 bp, Homo sapien
cctaggatgtaggatgggagcggtg

SEQ ID NO: 4546221 - DNA, 25 bp, Homo sapien
ccagcccagattaagactggggttc

SEQ ID NO: 4546222 - DNA, 25 bp, Homo sapien
ctggggttcatctggaggactctac

SEQ ID NO: 4546223 - DNA, 25 bp, Homo sapien
gatgcctgcaccctgtaacagttta

SEQ ID NO: 4546224 - DNA, 25 bp, Homo sapien
tgaatgagagccttggtcacacact

SEQ ID NO: 4546225 - DNA, 25 bp, Homo sapien
caagatgggacttgtagtgtccacc

SEQ ID NO: 4546226 - DNA, 25 bp, Homo sapien
taaaagctcagcacaaacaggtacc

SEQ ID NO: 4546227 - DNA, 25 bp, Homo sapien
tgaacacgactgacttcaacaattt

SEQ ID NO: 4546228 - DNA, 25 bp, Homo sapien
ttgaacacgactgacttcaacaatt

SEQ ID NO: 4546229 - DNA, 25 bp, Homo sapien
ggcagaaatgtgtctcccctcacac

SEQ ID NO: 4546230 - DNA, 25 bp, Homo sapien
cagaaatgtgtctcccctcacacag

SEQ ID NO: 4546231 - DNA, 25 bp, Homo sapien
taagtggcacatcatacaggactgg

SEQ ID NO: 4546232 - DNA, 25 bp, Homo sapien
tgggtgcaccttgctagtactacag

SEQ ID NO: 4546233 - DNA, 25 bp, Homo sapien
tggtccagcagccaatatgaaactg

SEQ ID NO: 4546234 - DNA, 25 bp, Homo sapien
gatgtgatgtatgcaatccagcagc

SEQ ID NO: 4546235 - DNA, 25 bp, Homo sapien
ctggggtccacgtgcaggatagatt

SEQ ID NO: 4546236 - DNA, 25 bp, Homo sapien
gactgatccaagaatgagctggaaa

SEQ ID NO: 4546237 - DNA, 25 bp, Homo sapien
cacgtgcaggatagattggaacagg

SEQ ID NO: 4546238 - DNA, 25 bp, Homo sapien
atggactgatccaagaatgagctgg

SEQ ID NO: 4546239 - DNA, 25 bp, Homo sapien
tagggacaccaaatgaccgtcttct

SEQ ID NO: 4546240 - DNA, 25 bp, Homo sapien
ctctgttgactttctagtatggctt

SEQ ID NO: 4546241 - DNA, 25 bp, Homo sapien
taggcacctagaccagtattcacca

SEQ ID NO: 4546242 - DNA, 25 bp, Homo sapien
gagttatgcaacaccagagaaccac

SEQ ID NO: 4546243 - DNA, 25 bp, Homo sapien
ttcttctcaacatggagtctccacc

SEQ ID NO: 4546244 - DNA, 25 bp, Homo sapien
tcaacatggagtctccaccaactgc

SEQ ID NO: 4546245 - DNA, 25 bp, Homo sapien
ctctctgtggctgcctccattcttc

SEQ ID NO: 4546246 - DNA, 25 bp, Homo sapien
ctccattcttctcaacatggagtct

SEQ ID NO: 4546247 - DNA, 25 bp, Homo sapien
cacatcttgatactgttcccacaga

SEQ ID NO: 4546248 - DNA, 25 bp, Homo sapien
cacaggagatacattaaatcagcac

SEQ ID NO: 4546249 - DNA, 25 bp, Homo sapien
tcaatcttgcttttaacacaggaga

SEQ ID NO: 4546250 - DNA, 25 bp, Homo sapien
agtttgggaagtttccactgccata

SEQ ID NO: 4546251 - DNA, 25 bp, Homo sapien
tcattctgccttagattgaacaaga

SEQ ID NO: 4546252 - DNA, 25 bp, Homo sapien
cttggccattaatgaaaaacagtgg

SEQ ID NO: 4546253 - DNA, 25 bp, Homo sapien
tttactggatgtgacacacagttca

SEQ ID NO: 4546254 - DNA, 25 bp, Homo sapien
gcagactccatggttggaggcacca

SEQ ID NO: 4546255 - DNA, 25 bp, Homo sapien
tacaatcaagttgcatcagccagtt

SEQ ID NO: 4546256 - DNA, 25 bp, Homo sapien
cctcatttagtggacagggtgatca

SEQ ID NO: 4546257 - DNA, 25 bp, Homo sapien
tgtacagccagcttgtgatccacaa

SEQ ID NO: 4546258 - DNA, 25 bp, Homo sapien
ttttatagtaagagaccagagacct

SEQ ID NO: 4546259 - DNA, 25 bp, Homo sapien
cctctgggtcctttgatatatgtaa

SEQ ID NO: 4546260 - DNA, 25 bp, Homo sapien
ggtcattctcattaaaaagcctctg

SEQ ID NO: 4546261 - DNA, 25 bp, Homo sapien
aggtcattctcattaaaaagcctct

SEQ ID NO: 4546262 - DNA, 25 bp, Homo sapien
aaaagcctctgggtcctttgatata

SEQ ID NO: 4546263 - DNA, 25 bp, Homo sapien
ccaacaatggataatacacatgctt

SEQ ID NO: 4546264 - DNA, 25 bp, Homo sapien
tttcacagaatctcaggatggaggg

SEQ ID NO: 4546265 - DNA, 25 bp, Homo sapien
aatccttgccctaaatactaactgg

SEQ ID NO: 4546266 - DNA, 25 bp, Homo sapien
tagcaattctaagcaaggcctgaag

SEQ ID NO: 4546267 - DNA, 25 bp, Homo sapien
catacacttttcttccctgataatc

SEQ ID NO: 4546268 - DNA, 25 bp, Homo sapien
ggagtttgctcgtacataccctgct

SEQ ID NO: 4546269 - DNA, 25 bp, Homo sapien
tcaactgtggaaaataaggagtttg

SEQ ID NO: 4546270 - DNA, 25 bp, Homo sapien
aataaatattgttcagggataagcc

SEQ ID NO: 4546271 - DNA, 25 bp, Homo sapien
tcaagtgatttgcccacgttagcct

SEQ ID NO: 4546272 - DNA, 25 bp, Homo sapien
ggattacaggtgtgagctattgtac

SEQ ID NO: 4546273 - DNA, 25 bp, Homo sapien
aagtgatttgcccacgttagcctcc

SEQ ID NO: 4546274 - DNA, 25 bp, Homo sapien
tgggattacaggtgtgagctattgt

SEQ ID NO: 4546275 - DNA, 25 bp, Homo sapien
tatgtgaaaggctgaaaacaattta

SEQ ID NO: 4546276 - DNA, 25 bp, Homo sapien
cagaagtgtaaaagcactgttccac

SEQ ID NO: 4546277 - DNA, 25 bp, Homo sapien
tattaaattggcaggctgagtactg

SEQ ID NO: 4546278 - DNA, 25 bp, Homo sapien
caagtgagaagtctgatccccttct

SEQ ID NO: 4546279 - DNA, 25 bp, Homo sapien
actgccatgggtatcaggtttatcc

SEQ ID NO: 4546280 - DNA, 25 bp, Homo sapien
tatctttctgagacttagcttcttc

SEQ ID NO: 4546281 - DNA, 25 bp, Homo sapien
aagtgtaggctttctactgccatgg

SEQ ID NO: 4546282 - DNA, 25 bp, Homo sapien
ttgatgagcatctgagtgggtaagt

SEQ ID NO: 4546283 - DNA, 25 bp, Homo sapien
gaaaaagctacactctccacctgag

SEQ ID NO: 4546284 - DNA, 25 bp, Homo sapien
tatggagcccatatggaggcaacca

SEQ ID NO: 4546285 - DNA, 25 bp, Homo sapien
cttggactgggtactatatggagcc

SEQ ID NO: 4546286 - DNA, 25 bp, Homo sapien
gtgactagctttagaatagccccac

SEQ ID NO: 4546287 - DNA, 25 bp, Homo sapien
atagctattggctgagcatttttca

SEQ ID NO: 4546288 - DNA, 25 bp, Homo sapien
tttcataatcgaagaaaagtggtaa

SEQ ID NO: 4546289 - DNA, 25 bp, Homo sapien
aaaagtggtaagtcctcagcttgaa

SEQ ID NO: 4546290 - DNA, 25 bp, Homo sapien
gcatttttcataatcgaagaaaagt

SEQ ID NO: 4546291 - DNA, 25 bp, Homo sapien
gaagtctcggttcagttgcagtgat

SEQ ID NO: 4546292 - DNA, 25 bp, Homo sapien
gcagtgatttgagcaactgctctcc

SEQ ID NO: 4546293 - DNA, 25 bp, Homo sapien
cagggtgtctgcaaataatcttcat

SEQ ID NO: 4546294 - DNA, 25 bp, Homo sapien
aaacaattggtaaatctaaatgcag

SEQ ID NO: 4546295 - DNA, 25 bp, Homo sapien
tgtggcctaccatgtacaaatgatg

SEQ ID NO: 4546296 - DNA, 25 bp, Homo sapien
ggagcttgttcgcacagagttctgg

SEQ ID NO: 4546297 - DNA, 25 bp, Homo sapien
tctatcagccttatgacgagatggg

SEQ ID NO: 4546298 - DNA, 25 bp, Homo sapien
aatgatgcttcacgactgtcaaagg

SEQ ID NO: 4546299 - DNA, 25 bp, Homo sapien
tgacaagttcgctcaaagaacccca

SEQ ID NO: 4546300 - DNA, 25 bp, Homo sapien
caagccctagagtccatgaaaagga

SEQ ID NO: 4546301 - DNA, 25 bp, Homo sapien
gcaatttcaagatccagccacaatg

SEQ ID NO: 4546302 - DNA, 25 bp, Homo sapien
tgtatctcagagtagcaagccctag

SEQ ID NO: 4546303 - DNA, 25 bp, Homo sapien
tgcttgatatggctagccacctgga

SEQ ID NO: 4546304 - DNA, 25 bp, Homo sapien
taattgcaatagtcatctcccggtg

SEQ ID NO: 4546305 - DNA, 25 bp, Homo sapien
aaccatttggcgactcactttgaca

SEQ ID NO: 4546306 - DNA, 25 bp, Homo sapien
gaggattaaccccacctggttgctg

SEQ ID NO: 4546307 - DNA, 25 bp, Homo sapien
tgtgtagttttgctttgggacttac

SEQ ID NO: 4546308 - DNA, 25 bp, Homo sapien
ctgactgtgtagttttgctttggga

SEQ ID NO: 4546309 - DNA, 25 bp, Homo sapien
ctgtgtagttttgctttgggactta

SEQ ID NO: 4546310 - DNA, 25 bp, Homo sapien
gactgtgtagttttgctttgggact

SEQ ID NO: 4546311 - DNA, 25 bp, Homo sapien
ttgctagcagcattcataatctttt

SEQ ID NO: 4546312 - DNA, 25 bp, Homo sapien
agtttgctagcagcattcataatct

SEQ ID NO: 4546313 - DNA, 25 bp, Homo sapien
gtttgctagcagcattcataatctt

SEQ ID NO: 4546314 - DNA, 25 bp, Homo sapien
aagtttgctagcagcattcataatc

SEQ ID NO: 4546315 - DNA, 25 bp, Homo sapien
tgccttagccccatggtttctgttt

SEQ ID NO: 4546316 - DNA, 25 bp, Homo sapien
caacatttagggtagcacagccata

SEQ ID NO: 4546317 - DNA, 25 bp, Homo sapien
taacatgttgtcctggtaatctcag

SEQ ID NO: 4546318 - DNA, 25 bp, Homo sapien
ctatggctgatcatgtagaaatagt

SEQ ID NO: 4546319 - DNA, 25 bp, Homo sapien
gcagctcgttccttactctcctgaa

SEQ ID NO: 4546320 - DNA, 25 bp, Homo sapien
tcttgacgttctcgcagtacctctg

SEQ ID NO: 4546321 - DNA, 25 bp, Homo sapien
tctcctgaatataacgaagcatgtc

SEQ ID NO: 4546322 - DNA, 25 bp, Homo sapien
taatatttgcgcatctttcgggcgg

SEQ ID NO: 4546323 - DNA, 25 bp, Homo sapien
aaaatgcccacagaatgtatgttta

SEQ ID NO: 4546324 - DNA, 25 bp, Homo sapien
agggaagtgagaaaatgcccacaga

SEQ ID NO: 4546325 - DNA, 25 bp, Homo sapien
tgagaaaatgcccacagaatgtatg

SEQ ID NO: 4546326 - DNA, 25 bp, Homo sapien
tgcccacagaatgtatgtttattag

SEQ ID NO: 4546327 - DNA, 25 bp, Homo sapien
ttttacagctttaatgtactgccca

SEQ ID NO: 4546328 - DNA, 25 bp, Homo sapien
agctttaatgtactgcccacgaagt

SEQ ID NO: 4546329 - DNA, 25 bp, Homo sapien
gctttaatgtactgcccacgaagtt

SEQ ID NO: 4546330 - DNA, 25 bp, Homo sapien
cagctttaatgtactgcccacgaag

SEQ ID NO: 4546331 - DNA, 25 bp, Homo sapien
aagcattttcaatggcccctgctga

SEQ ID NO: 4546332 - DNA, 25 bp, Homo sapien
atttaaagatacttgtacttagatt

SEQ ID NO: 4546333 - DNA, 25 bp, Homo sapien
agatacttgtacttagatttcttta

SEQ ID NO: 4546334 - DNA, 25 bp, Homo sapien
aatttaaagatacttgtacttagat

SEQ ID NO: 4546335 - DNA, 25 bp, Homo sapien
taaagatacttgtacttagatttct

SEQ ID NO: 4546336 - DNA, 25 bp, Homo sapien
atttattcttcatgtcgttgttttc

SEQ ID NO: 4546337 - DNA, 25 bp, Homo sapien
tatagaagagactgtgcaatttcca

SEQ ID NO: 4546338 - DNA, 25 bp, Homo sapien
gcaatttccagtcgcttttctgtaa

SEQ ID NO: 4546339 - DNA, 25 bp, Homo sapien
tctgtaacgttcatccccttagaaa

SEQ ID NO: 4546340 - DNA, 25 bp, Homo sapien
ccttagaaaccctactcagaccatt

SEQ ID NO: 4546341 - DNA, 25 bp, Homo sapien
gcataaatccttaatttcaaggacc

SEQ ID NO: 4546342 - DNA, 25 bp, Homo sapien
agtgtccacagcataaatccttaat

SEQ ID NO: 4546343 - DNA, 25 bp, Homo sapien
ctttcagatcttgacattcctgctt

SEQ ID NO: 4546344 - DNA, 25 bp, Homo sapien
gaagatgcctacagcatttctccag

SEQ ID NO: 4546345 - DNA, 25 bp, Homo sapien
tgttgcttgtaaggccaagggctga

SEQ ID NO: 4546346 - DNA, 25 bp, Homo sapien
ctggcagaatccttagagagctcgg

SEQ ID NO: 4546347 - DNA, 25 bp, Homo sapien
cagaatccttagagagctcggccat

SEQ ID NO: 4546348 - DNA, 25 bp, Homo sapien
tgcttctgttgcttgtaaggccaag

SEQ ID NO: 4546349 - DNA, 25 bp, Homo sapien
ttatgcatatttcatgaagtggtca

SEQ ID NO: 4546350 - DNA, 25 bp, Homo sapien
cataaatttattgagggcaataaat

SEQ ID NO: 4546351 - DNA, 25 bp, Homo sapien
ttttttgcctaaatgagacataaat

SEQ ID NO: 4546352 - DNA, 25 bp, Homo sapien
agaaactcttattatgcatatttca

SEQ ID NO: 4546353 - DNA, 25 bp, Homo sapien
aagtcttctttagctgccgcaagca

SEQ ID NO: 4546354 - DNA, 25 bp, Homo sapien
gaaccccaagtacagtcaggatgtc

SEQ ID NO: 4546355 - DNA, 25 bp, Homo sapien
agttggatccgcttggcttcctgca

SEQ ID NO: 4546356 - DNA, 25 bp, Homo sapien
gagccttagctaactcagccctgat

SEQ ID NO: 4546357 - DNA, 25 bp, Homo sapien
ctgccttcacaagtgcttgatactc

SEQ ID NO: 4546358 - DNA, 25 bp, Homo sapien
ccttttgttcacagagacctcatgc

SEQ ID NO: 4546359 - DNA, 25 bp, Homo sapien
tgccagctctggtagttctcccagc

SEQ ID NO: 4546360 - DNA, 25 bp, Homo sapien
gcttgatactctgccagctctggta

SEQ ID NO: 4546361 - DNA, 25 bp, Homo sapien
gttttgctggattgtgcacttctgc

SEQ ID NO: 4546362 - DNA, 25 bp, Homo sapien
agtttggctgccacaatctaaggtc

SEQ ID NO: 4546363 - DNA, 25 bp, Homo sapien
agtttgatccagcttagactgccac

SEQ ID NO: 4546364 - DNA, 25 bp, Homo sapien
gtttgagttccaattcaatttcgag

SEQ ID NO: 4546365 - DNA, 25 bp, Homo sapien
tccatcataagtgtatcttggtact

SEQ ID NO: 4546366 - DNA, 25 bp, Homo sapien
gtgctttggctaagatcacttcact

SEQ ID NO: 4546367 - DNA, 25 bp, Homo sapien
aatgtgctttggctaagatcacttc

SEQ ID NO: 4546368 - DNA, 25 bp, Homo sapien
tgctcttccttatcccaatgtgctt

SEQ ID NO: 4546369 - DNA, 25 bp, Homo sapien
agagtcaattctagattatccttct

SEQ ID NO: 4546370 - DNA, 25 bp, Homo sapien
caattctagattatccttctctctg

SEQ ID NO: 4546371 - DNA, 25 bp, Homo sapien
ctagattatccttctctctgcacac

SEQ ID NO: 4546372 - DNA, 25 bp, Homo sapien
tctagattatccttctctctgcaca

SEQ ID NO: 4546373 - DNA, 25 bp, Homo sapien
ttctaggtaacattcctgcacagca

SEQ ID NO: 4546374 - DNA, 25 bp, Homo sapien
cagcagtcacctccttattcaactt

SEQ ID NO: 4546375 - DNA, 25 bp, Homo sapien
tgcacagcagtcacctccttattca

SEQ ID NO: 4546376 - DNA, 25 bp, Homo sapien
cttattcaacttatccaactcagac

SEQ ID NO: 4546377 - DNA, 25 bp, Homo sapien
ttgctaataggctttcacgtatttg

SEQ ID NO: 4546378 - DNA, 25 bp, Homo sapien
tctctcataagcctcaaagagctgc

SEQ ID NO: 4546379 - DNA, 25 bp, Homo sapien
gagttctctcataagcctcaaagag

SEQ ID NO: 4546380 - DNA, 25 bp, Homo sapien
agttgcaaatgagttctctcataag

SEQ ID NO: 4546381 - DNA, 25 bp, Homo sapien
ggtcaaaatcttgtaccatttgtct

SEQ ID NO: 4546382 - DNA, 25 bp, Homo sapien
ttgattacataagtcttgatttgta

SEQ ID NO: 4546383 - DNA, 25 bp, Homo sapien
gattacataagtcttgatttgtatt

SEQ ID NO: 4546384 - DNA, 25 bp, Homo sapien
tgattacataagtcttgatttgtat

SEQ ID NO: 4546385 - DNA, 25 bp, Homo sapien
gaagactcaggccataattgattct

SEQ ID NO: 4546386 - DNA, 25 bp, Homo sapien
gcagcagaatatcatctctgacaac

SEQ ID NO: 4546387 - DNA, 25 bp, Homo sapien
atttttaagcagcagaatatcatct

SEQ ID NO: 4546388 - DNA, 25 bp, Homo sapien
ctctgacaacatcagaagtagaaga

SEQ ID NO: 4546389 - DNA, 25 bp, Homo sapien
gagttgctacccagcaaacgctgta

SEQ ID NO: 4546390 - DNA, 25 bp, Homo sapien
tgagacaccagatgacgcttcattg

SEQ ID NO: 4546391 - DNA, 25 bp, Homo sapien
gcctttaacttcagaatgaactcat

SEQ ID NO: 4546392 - DNA, 25 bp, Homo sapien
gaggtcattttgtaactgagacacc

SEQ ID NO: 4546393 - DNA, 25 bp, Homo sapien
tttcaatcactagacaacaggcagc

SEQ ID NO: 4546394 - DNA, 25 bp, Homo sapien
gaaagcaaacaaggtgagctctaag

SEQ ID NO: 4546395 - DNA, 25 bp, Homo sapien
catagcacagggaggtgaaacccaa

SEQ ID NO: 4546396 - DNA, 25 bp, Homo sapien
gctctaagattaccccagctttctg

SEQ ID NO: 4546397 - DNA, 25 bp, Homo sapien
aaacccatgagaaaaacgtaatcat

SEQ ID NO: 4546398 - DNA, 25 bp, Homo sapien
cgtaatcataagaaaaacgtcatat

SEQ ID NO: 4546399 - DNA, 25 bp, Homo sapien
ttttcataatggaggattaagttac

SEQ ID NO: 4546400 - DNA, 25 bp, Homo sapien
cagtatctgcccttaagatgaggtg

SEQ ID NO: 4546401 - DNA, 25 bp, Homo sapien
atccacatacgattcagtgagttct

SEQ ID NO: 4546402 - DNA, 25 bp, Homo sapien
aattctccttctgagtcacttggat

SEQ ID NO: 4546403 - DNA, 25 bp, Homo sapien
tctgagtcacttggatgtattccta

SEQ ID NO: 4546404 - DNA, 25 bp, Homo sapien
tacccaaatccacatacgattcagt

SEQ ID NO: 4546405 - DNA, 25 bp, Homo sapien
tccttgggcttaaatgctgatggcg

SEQ ID NO: 4546406 - DNA, 25 bp, Homo sapien
ccatggaaagtggtgtgttccttgg

SEQ ID NO: 4546407 - DNA, 25 bp, Homo sapien
ttaaatgctgatggcggcgctttct

SEQ ID NO: 4546408 - DNA, 25 bp, Homo sapien
ctgatggcggcgctttctggcttac

SEQ ID NO: 4546409 - DNA, 25 bp, Homo sapien
gaggtaataatggaactcttctccc

SEQ ID NO: 4546410 - DNA, 25 bp, Homo sapien
ctggtttgccaagaacaggttgtac

SEQ ID NO: 4546411 - DNA, 25 bp, Homo sapien
gtactttagcctgccggtggtgaaa

SEQ ID NO: 4546412 - DNA, 25 bp, Homo sapien
tagagtacaggacaaagtacgctgg

SEQ ID NO: 4546413 - DNA, 25 bp, Homo sapien
actcatagcatgtgccttctgtgct

SEQ ID NO: 4546414 - DNA, 25 bp, Homo sapien
agctgagccacctcttgtactgacc

SEQ ID NO: 4546415 - DNA, 25 bp, Homo sapien
gtagctgagccacctcttgtactga

SEQ ID NO: 4546416 - DNA, 25 bp, Homo sapien
tgtagctgagccacctcttgtactg

SEQ ID NO: 4546417 - DNA, 25 bp, Homo sapien
ccagttgtttcacgtgatctttcag

SEQ ID NO: 4546418 - DNA, 25 bp, Homo sapien
ctttcagacgagagcaaatgtcttc

SEQ ID NO: 4546419 - DNA, 25 bp, Homo sapien
tgtcaacttattaatgatctcagtc

SEQ ID NO: 4546420 - DNA, 25 bp, Homo sapien
tgcttttgactctcctctagacttc

SEQ ID NO: 4546421 - DNA, 25 bp, Homo sapien
ctttaagtgcggtgactgtggcatc

SEQ ID NO: 4546422 - DNA, 25 bp, Homo sapien
tgtggcatccaaattcttttgtaag

SEQ ID NO: 4546423 - DNA, 25 bp, Homo sapien
ctgttctttaagtgcggtgactgtg

SEQ ID NO: 4546424 - DNA, 25 bp, Homo sapien
gtgactgtggcatccaaattctttt

SEQ ID NO: 4546425 - DNA, 25 bp, Homo sapien
ttgctcttcgtacttctttgtgagg

SEQ ID NO: 4546426 - DNA, 25 bp, Homo sapien
tctctagctcgttgaagtgattcag

SEQ ID NO: 4546427 - DNA, 25 bp, Homo sapien
catgctgttctctagctcgttgaag

SEQ ID NO: 4546428 - DNA, 25 bp, Homo sapien
tttgtgaggcccataacaatgctct

SEQ ID NO: 4546429 - DNA, 25 bp, Homo sapien
gtttctgtgattctcgaaggctgag

SEQ ID NO: 4546430 - DNA, 25 bp, Homo sapien
tgtgattctcgaaggctgagagtca

SEQ ID NO: 4546431 - DNA, 25 bp, Homo sapien
tctgaaagagtttctgtgattctcg

SEQ ID NO: 4546432 - DNA, 25 bp, Homo sapien
aagagtttctgtgattctcgaaggc

SEQ ID NO: 4546433 - DNA, 25 bp, Homo sapien
attattacaagctggtgattcagat

SEQ ID NO: 4546434 - DNA, 25 bp, Homo sapien
ggtgattcagatatcgaatttgacg

SEQ ID NO: 4546435 - DNA, 25 bp, Homo sapien
tattattacaagctggtgattcaga

SEQ ID NO: 4546436 - DNA, 25 bp, Homo sapien
tggtgattcagatatcgaatttgac

SEQ ID NO: 4546437 - DNA, 25 bp, Homo sapien
gaagttgaataatctgcatattttc

SEQ ID NO: 4546438 - DNA, 25 bp, Homo sapien
tctcattagctcctaaaaattgttg

SEQ ID NO: 4546439 - DNA, 25 bp, Homo sapien
agactgataaggtttatatgtcact

SEQ ID NO: 4546440 - DNA, 25 bp, Homo sapien
atgtcactttattatacggttccaa

SEQ ID NO: 4546441 - DNA, 25 bp, Homo sapien
gactgataaggtttatatgtcactt

SEQ ID NO: 4546442 - DNA, 25 bp, Homo sapien
atacggttccaaaccttgacaactg

SEQ ID NO: 4546443 - DNA, 25 bp, Homo sapien
aaaatggttccattgaggatctgaa

SEQ ID NO: 4546444 - DNA, 25 bp, Homo sapien
ctgaaaatggttccattgaggatct

SEQ ID NO: 4546445 - DNA, 25 bp, Homo sapien
gaaaatggttccattgaggatctga

SEQ ID NO: 4546446 - DNA, 25 bp, Homo sapien
aatggttccattgaggatctgaaaa

SEQ ID NO: 4546447 - DNA, 25 bp, Homo sapien
ttcaggaaggtgatataaatcagtc

SEQ ID NO: 4546448 - DNA, 25 bp, Homo sapien
gcttctgaccattggtatatggcct

SEQ ID NO: 4546449 - DNA, 25 bp, Homo sapien
tggttgcttggttattaaattcctg

SEQ ID NO: 4546450 - DNA, 25 bp, Homo sapien
gaccattggtatatggcctaaagtt

SEQ ID NO: 4546451 - DNA, 25 bp, Homo sapien
ggatgtcggtcttcagttttacttc

SEQ ID NO: 4546452 - DNA, 25 bp, Homo sapien
aggatgtcggtcttcagttttactt

SEQ ID NO: 4546453 - DNA, 25 bp, Homo sapien
tccagcatataaactctgaatttca

SEQ ID NO: 4546454 - DNA, 25 bp, Homo sapien
ctccagcatataaactctgaatttc

SEQ ID NO: 4546455 - DNA, 25 bp, Homo sapien
agctcatctccaattgctcaggatg

SEQ ID NO: 4546456 - DNA, 25 bp, Homo sapien
cagctcatctccaattgctcaggat

SEQ ID NO: 4546457 - DNA, 25 bp, Homo sapien
ctccaattgctcaggatgatgtggt

SEQ ID NO: 4546458 - DNA, 25 bp, Homo sapien
ccagctcatctccaattgctcagga

SEQ ID NO: 4546459 - DNA, 25 bp, Homo sapien
ttaaagcgtatcatttatttgtaca

SEQ ID NO: 4546460 - DNA, 25 bp, Homo sapien
tatagaattgcaatatacaagtgaa

SEQ ID NO: 4546461 - DNA, 25 bp, Homo sapien
tagataacacaaagaaccccaagat

SEQ ID NO: 4546462 - DNA, 25 bp, Homo sapien
gaatactttcgatttaaagcgtatc

SEQ ID NO: 4546463 - DNA, 25 bp, Homo sapien
tcgctgcagtccgaatactggagct

SEQ ID NO: 4546464 - DNA, 25 bp, Homo sapien
gtccgtctgtgccatcctcgctgca

SEQ ID NO: 4546465 - DNA, 25 bp, Homo sapien
gcagtccgaatactggagctctgga

SEQ ID NO: 4546466 - DNA, 25 bp, Homo sapien
gaggtcgtcatccagcatgtcatgg

SEQ ID NO: 4546467 - DNA, 25 bp, Homo sapien
ctgagtcaaaaggtctgcatcaata

SEQ ID NO: 4546468 - DNA, 25 bp, Homo sapien
gagtcaaaaggtctgcatcaatatc

SEQ ID NO: 4546469 - DNA, 25 bp, Homo sapien
tgagtcaaaaggtctgcatcaatat

SEQ ID NO: 4546470 - DNA, 25 bp, Homo sapien
cttaaacacaagacaccaagccaaa

SEQ ID NO: 4546471 - DNA, 25 bp, Homo sapien
ttaaacacaagacaccaagccaaag

SEQ ID NO: 4546472 - DNA, 25 bp, Homo sapien
tttactgtagaggtcaaagaagttc

SEQ ID NO: 4546473 - DNA, 25 bp, Homo sapien
tactgtagaggtcaaagaagttcat

SEQ ID NO: 4546474 - DNA, 25 bp, Homo sapien
ttactgtagaggtcaaagaagttca

SEQ ID NO: 4546475 - DNA, 25 bp, Homo sapien
cacttccaaagccaaccattacctc

SEQ ID NO: 4546476 - DNA, 25 bp, Homo sapien
gccacactgccaaagtctaatgaca

SEQ ID NO: 4546477 - DNA, 25 bp, Homo sapien
gtcctcttcgtcatactcttcatct

SEQ ID NO: 4546478 - DNA, 25 bp, Homo sapien
ttcattttgcactggtagtgccaca

SEQ ID NO: 4546479 - DNA, 25 bp, Homo sapien
atagtcctcttcgtcatactcttca

SEQ ID NO: 4546480 - DNA, 25 bp, Homo sapien
gcgaggaaactctagtcctggcgga

SEQ ID NO: 4546481 - DNA, 25 bp, Homo sapien
ttaccctggctctagtccactagct

SEQ ID NO: 4546482 - DNA, 25 bp, Homo sapien
cacggaggctgttaccgcgaggaaa

SEQ ID NO: 4546483 - DNA, 25 bp, Homo sapien
gaagaccaacttctagcagatcccc

SEQ ID NO: 4546484 - DNA, 25 bp, Homo sapien
tagatgtactccatttatttgccct

SEQ ID NO: 4546485 - DNA, 25 bp, Homo sapien
cttttagaagcttgactctcttcaa

SEQ ID NO: 4546486 - DNA, 25 bp, Homo sapien
cttcaagttacttgggccactggag

SEQ ID NO: 4546487 - DNA, 25 bp, Homo sapien
aaagtcctctgtgctagatgtactc

SEQ ID NO: 4546488 - DNA, 25 bp, Homo sapien
ttttaaccagcaaatgggacagtcc

SEQ ID NO: 4546489 - DNA, 25 bp, Homo sapien
tctgataaaagtggttagactaccc

SEQ ID NO: 4546490 - DNA, 25 bp, Homo sapien
gaaactatgattcagtgtcagccaa

SEQ ID NO: 4546491 - DNA, 25 bp, Homo sapien
gacaaacgatcaagacctaaggtat

SEQ ID NO: 4546492 - DNA, 25 bp, Homo sapien
gacctggtccatgatggtcttggaa

SEQ ID NO: 4546493 - DNA, 25 bp, Homo sapien
ggtcttggaaagatgcacttcacag

SEQ ID NO: 4546494 - DNA, 25 bp, Homo sapien
tatcaagttgaaaggcacataccac

SEQ ID NO: 4546495 - DNA, 25 bp, Homo sapien
cttaaaaagtgacatccgtgcatac

SEQ ID NO: 4546496 - DNA, 25 bp, Homo sapien
aaagtgctggattattatcttttct

SEQ ID NO: 4546497 - DNA, 25 bp, Homo sapien
aagtgctggattattatcttttctc

SEQ ID NO: 4546498 - DNA, 25 bp, Homo sapien
taaggtggccgacattatcaaatac

SEQ ID NO: 4546499 - DNA, 25 bp, Homo sapien
gagatgattggcaaactgttatcca

SEQ ID NO: 4546500 - DNA, 25 bp, Homo sapien
tatcaaatacatgatccttggtcct

SEQ ID NO: 4546501 - DNA, 25 bp, Homo sapien
ccatatggtatctgataaggtggcc

SEQ ID NO: 4546502 - DNA, 25 bp, Homo sapien
tccactcagcacatattggccaggg

SEQ ID NO: 4546503 - DNA, 25 bp, Homo sapien
gctgcttaatgtgtggcaaagaatg

SEQ ID NO: 4546504 - DNA, 25 bp, Homo sapien
ccaggggatgttgcactctctcgaa

SEQ ID NO: 4546505 - DNA, 25 bp, Homo sapien
gatagcattcttcgctccacagctg

SEQ ID NO: 4546506 - DNA, 25 bp, Homo sapien
ccccaaggcgctgctgaataagtgt

SEQ ID NO: 4546507 - DNA, 25 bp, Homo sapien
gaataagtgttgtccagagttgaga

SEQ ID NO: 4546508 - DNA, 25 bp, Homo sapien
ctgcctggacaaaaacagttgatga

SEQ ID NO: 4546509 - DNA, 25 bp, Homo sapien
gacaaatcatcagggaggaacagcc

SEQ ID NO: 4546510 - DNA, 25 bp, Homo sapien
ttccgcagtgccatgggctccccag

SEQ ID NO: 4546511 - DNA, 25 bp, Homo sapien
agtgccatgggctccccagtggttg

SEQ ID NO: 4546512 - DNA, 25 bp, Homo sapien
ccatgggctccccagtggttgggct

SEQ ID NO: 4546513 - DNA, 25 bp, Homo sapien
cgcagtgccatgggctccccagtgg

SEQ ID NO: 4546514 - DNA, 25 bp, Homo sapien
agatccactcggcacgtgtgcttca

SEQ ID NO: 4546515 - DNA, 25 bp, Homo sapien
tcggcacgtgtgcttcaataatgag

SEQ ID NO: 4546516 - DNA, 25 bp, Homo sapien
gccaggtgtactttgaagagcctgt

SEQ ID NO: 4546517 - DNA, 25 bp, Homo sapien
tagcaggggtcatcaaagagatcca

SEQ ID NO: 4546518 - DNA, 25 bp, Homo sapien
tgcacccctcttggatggacattac

SEQ ID NO: 4546519 - DNA, 25 bp, Homo sapien
gggactgcacccctcttggatggac

SEQ ID NO: 4546520 - DNA, 25 bp, Homo sapien
ctgggactgcacccctcttggatgg

SEQ ID NO: 4546521 - DNA, 25 bp, Homo sapien
gactgcacccctcttggatggacat

SEQ ID NO: 4546522 - DNA, 25 bp, Homo sapien
caccaaaaacatcggtgtttatatc

SEQ ID NO: 4546523 - DNA, 25 bp, Homo sapien
gcctctcttgaaaactgccaccttt

SEQ ID NO: 4546524 - DNA, 25 bp, Homo sapien
tgccacctttaagcgcacaatagag

SEQ ID NO: 4546525 - DNA, 25 bp, Homo sapien
catcccgtaggatgacaccaaaaac

SEQ ID NO: 4546526 - DNA, 25 bp, Homo sapien
gggttgattccttccatcccaccat

SEQ ID NO: 4546527 - DNA, 25 bp, Homo sapien
ccactgggacatgggttgattcctt

SEQ ID NO: 4546528 - DNA, 25 bp, Homo sapien
ggccactgggacatgggttgattcc

SEQ ID NO: 4546529 - DNA, 25 bp, Homo sapien
actgggacatgggttgattccttcc

SEQ ID NO: 4546530 - DNA, 25 bp, Homo sapien
aactcccttgggtttcgagcagaga

SEQ ID NO: 4546531 - DNA, 25 bp, Homo sapien
actcccttgggtttcgagcagagaa

SEQ ID NO: 4546532 - DNA, 25 bp, Homo sapien
agttctcatatacactgctgcactt

SEQ ID NO: 4546533 - DNA, 25 bp, Homo sapien
ctattgccctgctttgttctaaaca

SEQ ID NO: 4546534 - DNA, 25 bp, Homo sapien
taaacagttctcatatacactgctg

SEQ ID NO: 4546535 - DNA, 25 bp, Homo sapien
gttctaaacagttctcatatacact

SEQ ID NO: 4546536 - DNA, 25 bp, Homo sapien
aaagaacttcgatcatccctgtaca

SEQ ID NO: 4546537 - DNA, 25 bp, Homo sapien
ttcgatcatccctgtacatacaact

SEQ ID NO: 4546538 - DNA, 25 bp, Homo sapien
gtacatacaactctcgtcagcaata

SEQ ID NO: 4546539 - DNA, 25 bp, Homo sapien
ttatccaaagaacttcgatcatccc

SEQ ID NO: 4546540 - DNA, 25 bp, Homo sapien
ctactggtggctgcttccctggaat

SEQ ID NO: 4546541 - DNA, 25 bp, Homo sapien
gcatatctgaaacaccacctactgg

SEQ ID NO: 4546542 - DNA, 25 bp, Homo sapien
tctctcctcggcatggctatcaata

SEQ ID NO: 4546543 - DNA, 25 bp, Homo sapien
tccgtggcttgaactttgatccgca

SEQ ID NO: 4546544 - DNA, 25 bp, Homo sapien
gggatcagaaccaagcaaatcatcc

SEQ ID NO: 4546545 - DNA, 25 bp, Homo sapien
tcctcaagaggctgggcgaaaattc

SEQ ID NO: 4546546 - DNA, 25 bp, Homo sapien
gcgaaaattcaaatactgtaaggga

SEQ ID NO: 4546547 - DNA, 25 bp, Homo sapien
gttaaacatttggatgggagcagtc

SEQ ID NO: 4546548 - DNA, 25 bp, Homo sapien
gccctatggtacttatgacgtcttg

SEQ ID NO: 4546549 - DNA, 25 bp, Homo sapien
gcctgccctatggtacttatgacgt

SEQ ID NO: 4546550 - DNA, 25 bp, Homo sapien
tggtacttatgacgtcttgggccat

SEQ ID NO: 4546551 - DNA, 25 bp, Homo sapien
caaaagcctgccctatggtacttat

SEQ ID NO: 4546552 - DNA, 25 bp, Homo sapien
cattgtggcattccaatatgtgaca

SEQ ID NO: 4546553 - DNA, 25 bp, Homo sapien
tccattgtggcattccaatatgtga

SEQ ID NO: 4546554 - DNA, 25 bp, Homo sapien
ttgtggcattccaatatgtgacagg

SEQ ID NO: 4546555 - DNA, 25 bp, Homo sapien
ccattgtggcattccaatatgtgac

SEQ ID NO: 4546556 - DNA, 25 bp, Homo sapien
tcatgcagatgttctgcccagtctc

SEQ ID NO: 4546557 - DNA, 25 bp, Homo sapien
catgcagatgttctgcccagtctca

SEQ ID NO: 4546558 - DNA, 25 bp, Homo sapien
ctcatgcagatgttctgcccagtct

SEQ ID NO: 4546559 - DNA, 25 bp, Homo sapien
ttccattgttgcctctcatagacat

SEQ ID NO: 4546560 - DNA, 25 bp, Homo sapien
gttccattgttgcctctcatagaca

SEQ ID NO: 4546561 - DNA, 25 bp, Homo sapien
ggtgggccttgaatcacatataaat

SEQ ID NO: 4546562 - DNA, 25 bp, Homo sapien
tcttttttaggttggtcatgggaca

SEQ ID NO: 4546563 - DNA, 25 bp, Homo sapien
gctatgttgctctatggaaatggtc

SEQ ID NO: 4546564 - DNA, 25 bp, Homo sapien
ttccaaaagcttggccaagaattgc

SEQ ID NO: 4546565 - DNA, 25 bp, Homo sapien
aaaatctgtaagttgctttccatac

SEQ ID NO: 4546566 - DNA, 25 bp, Homo sapien
taaaaaatctgtaagttgctttcca

SEQ ID NO: 4546567 - DNA, 25 bp, Homo sapien
aaaaaatctgtaagttgctttccat

SEQ ID NO: 4546568 - DNA, 25 bp, Homo sapien
aaaaatctgtaagttgctttccata

SEQ ID NO: 4546569 - DNA, 25 bp, Homo sapien
gattaactggatctttagctacgta

SEQ ID NO: 4546570 - DNA, 25 bp, Homo sapien
cgtaggcaacatagtctgtagtatc

SEQ ID NO: 4546571 - DNA, 25 bp, Homo sapien
ctcgttgattaactggatctttagc

SEQ ID NO: 4546572 - DNA, 25 bp, Homo sapien
gatctttagctacgtaggcaacata

SEQ ID NO: 4546573 - DNA, 25 bp, Homo sapien
gagagcacagaggtgctctcaatgc

SEQ ID NO: 4546574 - DNA, 25 bp, Homo sapien
agagagcacagaggtgctctcaatg

SEQ ID NO: 4546575 - DNA, 25 bp, Homo sapien
caatgcagcaggtacaaactttccc

SEQ ID NO: 4546576 - DNA, 25 bp, Homo sapien
aatgcagcaggtacaaactttccca

SEQ ID NO: 4546577 - DNA, 25 bp, Homo sapien
agaacttctgtgaatccatacttac

SEQ ID NO: 4546578 - DNA, 25 bp, Homo sapien
atgtcaagaagttattttaactcat

SEQ ID NO: 4546579 - DNA, 25 bp, Homo sapien
ttaactcataaaaagaacttctgtg

SEQ ID NO: 4546580 - DNA, 25 bp, Homo sapien
aaaagaacttctgtgaatccatact

SEQ ID NO: 4546581 - DNA, 25 bp, Homo sapien
gaaatagactgcatatgatgatttg

SEQ ID NO: 4546582 - DNA, 25 bp, Homo sapien
tagactgcatatgatgatttgcaat

SEQ ID NO: 4546583 - DNA, 25 bp, Homo sapien
gaggcaaatgaaatagactgcatat

SEQ ID NO: 4546584 - DNA, 25 bp, Homo sapien
caaatgaaatagactgcatatgatg

SEQ ID NO: 4546585 - DNA, 25 bp, Homo sapien
aacttgggaatccaatgttcgaggg

SEQ ID NO: 4546586 - DNA, 25 bp, Homo sapien
gagccagtccgagttctgaaactga

SEQ ID NO: 4546587 - DNA, 25 bp, Homo sapien
aactgaagaacttgggaatccaatg

SEQ ID NO: 4546588 - DNA, 25 bp, Homo sapien
ggctgtctgcaggctaaggagagag

SEQ ID NO: 4546589 - DNA, 25 bp, Homo sapien
tagaccggacataaggaacacacct

SEQ ID NO: 4546590 - DNA, 25 bp, Homo sapien
aaaagacggaatggatctgtgaccc

SEQ ID NO: 4546591 - DNA, 25 bp, Homo sapien
tccacgctagaagaggatcaactgc

SEQ ID NO: 4546592 - DNA, 25 bp, Homo sapien
gatattgcaaatgacggtggcctta

SEQ ID NO: 4546593 - DNA, 25 bp, Homo sapien
cgcattgctaatagtggaaagatac

SEQ ID NO: 4546594 - DNA, 25 bp, Homo sapien
tggaaagatacctcccaggcgaaaa

SEQ ID NO: 4546595 - DNA, 25 bp, Homo sapien
tcccaggcgaaaagaaatgggacca

SEQ ID NO: 4546596 - DNA, 25 bp, Homo sapien
caggcgaaaagaaatgggaccaagt

SEQ ID NO: 4546597 - DNA, 25 bp, Homo sapien
gagacgtggatttacaagtcatcag

SEQ ID NO: 4546598 - DNA, 25 bp, Homo sapien
gcattaaatgttacgaaggccatgt

SEQ ID NO: 4546599 - DNA, 25 bp, Homo sapien
cagtacatcggtaaattgcccaggg

SEQ ID NO: 4546600 - DNA, 25 bp, Homo sapien
taaggttattttccggtttgcagca

SEQ ID NO: 4546601 - DNA, 25 bp, Homo sapien
aacgtagctcaaaaggcgacgccaa

SEQ ID NO: 4546602 - DNA, 25 bp, Homo sapien
aacaccccggagaaaacactgagct

SEQ ID NO: 4546603 - DNA, 25 bp, Homo sapien
tacgaagttcgaatcgatggaaacg

SEQ ID NO: 4546604 - DNA, 25 bp, Homo sapien
ttgcatgcagggtccctagatacga

SEQ ID NO: 4546605 - DNA, 25 bp, Homo sapien
gacgactacgactatcccgaagagg

SEQ ID NO: 4546606 - DNA, 25 bp, Homo sapien
cagtggtgccggctacagagtatca

SEQ ID NO: 4546607 - DNA, 25 bp, Homo sapien
tcctagaggttgagcggtttgcaca

SEQ ID NO: 4546608 - DNA, 25 bp, Homo sapien
gaagaccccgtttgatcagttagct

SEQ ID NO: 4546609 - DNA, 25 bp, Homo sapien
atccaatgcaacaggacaattcaga

SEQ ID NO: 4546610 - DNA, 25 bp, Homo sapien
gaatatccaatgcaacaggacaatt

SEQ ID NO: 4546611 - DNA, 25 bp, Homo sapien
atatccaatgcaacaggacaattca

SEQ ID NO: 4546612 - DNA, 25 bp, Homo sapien
caggacaattcagagccttatttat

SEQ ID NO: 4546613 - DNA, 25 bp, Homo sapien
cacagaggccaggtagcacttgaca

SEQ ID NO: 4546614 - DNA, 25 bp, Homo sapien
cacagcttgcattacctacttggcc

SEQ ID NO: 4546615 - DNA, 25 bp, Homo sapien
gagactctgactttgcttgaggccc

SEQ ID NO: 4546616 - DNA, 25 bp, Homo sapien
acttgacatttatcattgggcctgc

SEQ ID NO: 4546617 - DNA, 25 bp, Homo sapien
tacgtatcttctacatttgcttcag

SEQ ID NO: 4546618 - DNA, 25 bp, Homo sapien
cgtatcttctacatttgcttcagca

SEQ ID NO: 4546619 - DNA, 25 bp, Homo sapien
ctacgtatcttctacatttgcttca

SEQ ID NO: 4546620 - DNA, 25 bp, Homo sapien
acgtatcttctacatttgcttcagc

SEQ ID NO: 4546621 - DNA, 25 bp, Homo sapien
tgagactgcatgttgagatggtcag

SEQ ID NO: 4546622 - DNA, 25 bp, Homo sapien
caagattcatcaatgtgagactgca

SEQ ID NO: 4546623 - DNA, 25 bp, Homo sapien
aaactgaagattacttttgccaagg

SEQ ID NO: 4546624 - DNA, 25 bp, Homo sapien
tttgccaaggactgttgataggaac

SEQ ID NO: 4546625 - DNA, 25 bp, Homo sapien
atttgccccggggacagcttcacac

SEQ ID NO: 4546626 - DNA, 25 bp, Homo sapien
cagcttcacacaggcgacttattgc

SEQ ID NO: 4546627 - DNA, 25 bp, Homo sapien
ttcacacaggcgacttattgcttcc

SEQ ID NO: 4546628 - DNA, 25 bp, Homo sapien
ttgccccggggacagcttcacacag

SEQ ID NO: 4546629 - DNA, 25 bp, Homo sapien
tccagtgatctcattgattgcagca

SEQ ID NO: 4546630 - DNA, 25 bp, Homo sapien
tccaaaatccagtgatctcattgat

SEQ ID NO: 4546631 - DNA, 25 bp, Homo sapien
gatctcattgattgcagcacttcaa

SEQ ID NO: 4546632 - DNA, 25 bp, Homo sapien
tgattgcagcacttcaacacagccc

SEQ ID NO: 4546633 - DNA, 25 bp, Homo sapien
ctagttgtaaaatcggattcttaca

SEQ ID NO: 4546634 - DNA, 25 bp, Homo sapien
tagttgtaaaatcggattcttacat

SEQ ID NO: 4546635 - DNA, 25 bp, Homo sapien
agttgtaaaatcggattcttacatt

SEQ ID NO: 4546636 - DNA, 25 bp, Homo sapien
taggcagctttagagaagaaggcag

SEQ ID NO: 4546637 - DNA, 25 bp, Homo sapien
gggactagcggataaacattaggca

SEQ ID NO: 4546638 - DNA, 25 bp, Homo sapien
aaatgcagatgcttttcgctttgct

SEQ ID NO: 4546639 - DNA, 25 bp, Homo sapien
atgcttttcgctttgctgcactgga

SEQ ID NO: 4546640 - DNA, 25 bp, Homo sapien
gtgaagccagctcagtgttagtaag

SEQ ID NO: 4546641 - DNA, 25 bp, Homo sapien
ctggtgaagccagctcagtgttagt

SEQ ID NO: 4546642 - DNA, 25 bp, Homo sapien
accctcctttctgccttactggtga

SEQ ID NO: 4546643 - DNA, 25 bp, Homo sapien
tgcctccacccatgccagtataaca

SEQ ID NO: 4546644 - DNA, 25 bp, Homo sapien
tgtagaaagtgcctgtcctgcctgc

SEQ ID NO: 4546645 - DNA, 25 bp, Homo sapien
gcccatccccaacaggtgctgtaga

SEQ ID NO: 4546646 - DNA, 25 bp, Homo sapien
tgctcctaagtgttggctccccagg

SEQ ID NO: 4546647 - DNA, 25 bp, Homo sapien
gttagggcggttgccctgtgtccca

SEQ ID NO: 4546648 - DNA, 25 bp, Homo sapien
ggcacctctttggtacccaggcaaa

SEQ ID NO: 4546649 - DNA, 25 bp, Homo sapien
caaggacgtgatcgactcgttccga

SEQ ID NO: 4546650 - DNA, 25 bp, Homo sapien
tcctgcgacggcaaggtggcatctt

SEQ ID NO: 4546651 - DNA, 25 bp, Homo sapien
gaagagtcctacatacagcacgagt

SEQ ID NO: 4546652 - DNA, 25 bp, Homo sapien
ggatactgttgcataaatcgcctcg

SEQ ID NO: 4546653 - DNA, 25 bp, Homo sapien
ctgaaacaggatactgttgcataaa

SEQ ID NO: 4546654 - DNA, 25 bp, Homo sapien
tactgttgcataaatcgcctcgtcg

SEQ ID NO: 4546655 - DNA, 25 bp, Homo sapien
aacaggatactgttgcataaatcgc

SEQ ID NO: 4546656 - DNA, 25 bp, Homo sapien
ctggtagataaacggtgcagacatc

SEQ ID NO: 4546657 - DNA, 25 bp, Homo sapien
atcagatacctcaacgcccgatgca

SEQ ID NO: 4546658 - DNA, 25 bp, Homo sapien
caccagtgttctcgccttggaatcc

SEQ ID NO: 4546659 - DNA, 25 bp, Homo sapien
aatccttgtcgggagagcctagacc

SEQ ID NO: 4546660 - DNA, 25 bp, Homo sapien
gctgcatcactagccttgcaggagc

SEQ ID NO: 4546661 - DNA, 25 bp, Homo sapien
tagaaatatttagcacccgactccc

SEQ ID NO: 4546662 - DNA, 25 bp, Homo sapien
tcggggggcccgctgcatcactagc

SEQ ID NO: 4546663 - DNA, 25 bp, Homo sapien
ggccaactcttaggcgcagaacccg

SEQ ID NO: 4546664 - DNA, 25 bp, Homo sapien
ctgagctcccttgggatccaaacac

SEQ ID NO: 4546665 - DNA, 25 bp, Homo sapien
catcctgtctgccaagcctgttcag

SEQ ID NO: 4546666 - DNA, 25 bp, Homo sapien
tagctaaatcagttggaccccacat

SEQ ID NO: 4546667 - DNA, 25 bp, Homo sapien
ttgagagtgaccagtgaaagcggca

SEQ ID NO: 4546668 - DNA, 25 bp, Homo sapien
ttgatctcacactcctagaactagg

SEQ ID NO: 4546669 - DNA, 25 bp, Homo sapien
gccctgtaggtcaacagttttctga

SEQ ID NO: 4546670 - DNA, 25 bp, Homo sapien
agtctccagccctgtaggtcaacag

SEQ ID NO: 4546671 - DNA, 25 bp, Homo sapien
gatctcacactcctagaactaggac

SEQ ID NO: 4546672 - DNA, 25 bp, Homo sapien
gactgatggagtctctaggctctga

SEQ ID NO: 4546673 - DNA, 25 bp, Homo sapien
tctgaaaggtggtcaggtgcttcca

SEQ ID NO: 4546674 - DNA, 25 bp, Homo sapien
gctagaagcaacagaaagtgcatcc

SEQ ID NO: 4546675 - DNA, 25 bp, Homo sapien
ctctgaaaggtggtcaggtgcttcc

SEQ ID NO: 4546676 - DNA, 25 bp, Homo sapien
agtgctggatactaagcggcccggg

SEQ ID NO: 4546677 - DNA, 25 bp, Homo sapien
aagaaggctaaagaaggagcctgca

SEQ ID NO: 4546678 - DNA, 25 bp, Homo sapien
ctgtgtctccgcagcactcaagttc

SEQ ID NO: 4546679 - DNA, 25 bp, Homo sapien
ttcggagtccaagtcaaagaaggct

SEQ ID NO: 4546680 - DNA, 25 bp, Homo sapien
caaattactggagccagccgtccgg

SEQ ID NO: 4546681 - DNA, 25 bp, Homo sapien
gaaggcgcctatgcacacgtgttgt

SEQ ID NO: 4546682 - DNA, 25 bp, Homo sapien
tgtttctatcgagagctgagtcctc

SEQ ID NO: 4546683 - DNA, 25 bp, Homo sapien
ctagctgggacagcggtcagtgttt

SEQ ID NO: 4546684 - DNA, 25 bp, Homo sapien
tattgaacctttcggaatgcagctc

SEQ ID NO: 4546685 - DNA, 25 bp, Homo sapien
gagcattattgaacctttcggaatg

SEQ ID NO: 4546686 - DNA, 25 bp, Homo sapien
cacccgaatgagcattattgaacct

SEQ ID NO: 4546687 - DNA, 25 bp, Homo sapien
cctttcggaatgcagctccacatgg

SEQ ID NO: 4546688 - DNA, 25 bp, Homo sapien
gaaggctgcatctttagggagctgc

SEQ ID NO: 4546689 - DNA, 25 bp, Homo sapien
ttaagaggataaaaactgtccttca

SEQ ID NO: 4546690 - DNA, 25 bp, Homo sapien
cacacatatagatgtatttccatac

SEQ ID NO: 4546691 - DNA, 25 bp, Homo sapien
catatttattgttgggatgtgcata

SEQ ID NO: 4546692 - DNA, 25 bp, Homo sapien
gcaccgggaaaccttgatccttgat

SEQ ID NO: 4546693 - DNA, 25 bp, Homo sapien
ctttgcaccgggaaaccttgatcct

SEQ ID NO: 4546694 - DNA, 25 bp, Homo sapien
ttgatccttgattctcacactgccc

SEQ ID NO: 4546695 - DNA, 25 bp, Homo sapien
gaaaccttgatccttgattctcaca

SEQ ID NO: 4546696 - DNA, 25 bp, Homo sapien
ttctgacagatgaatgcactttttc

SEQ ID NO: 4546697 - DNA, 25 bp, Homo sapien
tctgacagatgaatgcactttttca

SEQ ID NO: 4546698 - DNA, 25 bp, Homo sapien
ttttctgacagatgaatgcactttt

SEQ ID NO: 4546699 - DNA, 25 bp, Homo sapien
ctattttctgacagatgaatgcact

SEQ ID NO: 4546700 - DNA, 25 bp, Homo sapien
tgaggcccaataactttagtcccca

SEQ ID NO: 4546701 - DNA, 25 bp, Homo sapien
gggctacttagggaaagggcgatga

SEQ ID NO: 4546702 - DNA, 25 bp, Homo sapien
cactgtgacatagtgagaagtcctg

SEQ ID NO: 4546703 - DNA, 25 bp, Homo sapien
tgaggtgaggcccaataactttagt

SEQ ID NO: 4546704 - DNA, 25 bp, Homo sapien
tactcaagctggactcttttttctg

SEQ ID NO: 4546705 - DNA, 25 bp, Homo sapien
tcttctacttgtggggagtcatgaa

SEQ ID NO: 4546706 - DNA, 25 bp, Homo sapien
ttttggcaactccatatgaccacca

SEQ ID NO: 4546707 - DNA, 25 bp, Homo sapien
ccttcgtgacgattttacagccttt

SEQ ID NO: 4546708 - DNA, 25 bp, Homo sapien
attaccccccaaatgtgatataaca

SEQ ID NO: 4546709 - DNA, 25 bp, Homo sapien
atgaaaatcccttcatgttataact

SEQ ID NO: 4546710 - DNA, 25 bp, Homo sapien
tgttattaccccccaaatgtgatat

SEQ ID NO: 4546711 - DNA, 25 bp, Homo sapien
gttattaccccccaaatgtgatata

SEQ ID NO: 4546712 - DNA, 25 bp, Homo sapien
gaagcaaatatgagacagaacctgg

SEQ ID NO: 4546713 - DNA, 25 bp, Homo sapien
ctagcacagtagtcccaatgagttc

SEQ ID NO: 4546714 - DNA, 25 bp, Homo sapien
taatctaagatggtggctccactgc

SEQ ID NO: 4546715 - DNA, 25 bp, Homo sapien
gaagcatgcaagagaacacaccagt

SEQ ID NO: 4546716 - DNA, 25 bp, Homo sapien
tctccactttgctctacattgtctt

SEQ ID NO: 4546717 - DNA, 25 bp, Homo sapien
cgttgtgtaattagaatcagagtgc

SEQ ID NO: 4546718 - DNA, 25 bp, Homo sapien
tggtcagcagtccatgcctcactgt

SEQ ID NO: 4546719 - DNA, 25 bp, Homo sapien
tctttgttgagcgagctgcagttgc

SEQ ID NO: 4546720 - DNA, 25 bp, Homo sapien
aagactcaattctactattgagctg

SEQ ID NO: 4546721 - DNA, 25 bp, Homo sapien
agactcaattctactattgagctgc

SEQ ID NO: 4546722 - DNA, 25 bp, Homo sapien
ccaagactcaattctactattgagc

SEQ ID NO: 4546723 - DNA, 25 bp, Homo sapien
cccaagactcaattctactattgag

SEQ ID NO: 4546724 - DNA, 25 bp, Homo sapien
agatctcggcaactgccatccaaag

SEQ ID NO: 4546725 - DNA, 25 bp, Homo sapien
tggaggaattcaaaagatctcggca

SEQ ID NO: 4546726 - DNA, 25 bp, Homo sapien
ctacagatatgggttcatgagtata

SEQ ID NO: 4546727 - DNA, 25 bp, Homo sapien
tcttcttcaagcatgccaggtacaa

SEQ ID NO: 4546728 - DNA, 25 bp, Homo sapien
ctgtgaggcccattccaggtcatct

SEQ ID NO: 4546729 - DNA, 25 bp, Homo sapien
tctgctgtgaggcccattccaggtc

SEQ ID NO: 4546730 - DNA, 25 bp, Homo sapien
agcacttgtagctgaggtagtactg

SEQ ID NO: 4546731 - DNA, 25 bp, Homo sapien
cccagcacttgtagctgaggtagta

SEQ ID NO: 4546732 - DNA, 25 bp, Homo sapien
cattttctgatgcttccagtccatc

SEQ ID NO: 4546733 - DNA, 25 bp, Homo sapien
caattgggggtgtgtcaaatggaag

SEQ ID NO: 4546734 - DNA, 25 bp, Homo sapien
tcagaagtgctgtgcttacaggata

SEQ ID NO: 4546735 - DNA, 25 bp, Homo sapien
agtgctgtgcttacaggatacctct

SEQ ID NO: 4546736 - DNA, 25 bp, Homo sapien
agagcagaacaaagagattgatcta

SEQ ID NO: 4546737 - DNA, 25 bp, Homo sapien
cagaacaaagagattgatctataac

SEQ ID NO: 4546738 - DNA, 25 bp, Homo sapien
tgaacaaattagataactcactacc

SEQ ID NO: 4546739 - DNA, 25 bp, Homo sapien
gagcagaacaaagagattgatctat

SEQ ID NO: 4546740 - DNA, 25 bp, Homo sapien
catttacttcagagatcggttcaga

SEQ ID NO: 4546741 - DNA, 25 bp, Homo sapien
gatcggttcagaaataacactgcag

SEQ ID NO: 4546742 - DNA, 25 bp, Homo sapien
aagaaatggcacttgctgcagaggg

SEQ ID NO: 4546743 - DNA, 25 bp, Homo sapien
gattccgagaatgtcccatgtggtg

SEQ ID NO: 4546744 - DNA, 25 bp, Homo sapien
atatctttatatgctttcctggcct

SEQ ID NO: 4546745 - DNA, 25 bp, Homo sapien
ttcttcacattctttaaggcttcct

SEQ ID NO: 4546746 - DNA, 25 bp, Homo sapien
ccattgctgcaaccatatctttata

SEQ ID NO: 4546747 - DNA, 25 bp, Homo sapien
cctgttccattgctgcaaccatatc

SEQ ID NO: 4546748 - DNA, 25 bp, Homo sapien
tcacacagcgtcctagagctttcct

SEQ ID NO: 4546749 - DNA, 25 bp, Homo sapien
taacattatagagagcctcatccag

SEQ ID NO: 4546750 - DNA, 25 bp, Homo sapien
gaatttcttgttcccgtgccatggc

SEQ ID NO: 4546751 - DNA, 25 bp, Homo sapien
tgaagattcccactacgctaacagg

SEQ ID NO: 4546752 - DNA, 25 bp, Homo sapien
caggatctttttggtagatgcgttc

SEQ ID NO: 4546753 - DNA, 25 bp, Homo sapien
gaaactgacaagctcttggagaaga

SEQ ID NO: 4546754 - DNA, 25 bp, Homo sapien
tctcttagacccataacgagtcgtc

SEQ ID NO: 4546755 - DNA, 25 bp, Homo sapien
gactggattttttcacagtttggag

SEQ ID NO: 4546756 - DNA, 25 bp, Homo sapien
tgaatatgtctggttctaggctttt

SEQ ID NO: 4546757 - DNA, 25 bp, Homo sapien
tgtgaatatgtctggttctaggctt

SEQ ID NO: 4546758 - DNA, 25 bp, Homo sapien
cggctgtgaatatgtctggttctag

SEQ ID NO: 4546759 - DNA, 25 bp, Homo sapien
aatatgtctggttctaggctttttt

SEQ ID NO: 4546760 - DNA, 25 bp, Homo sapien
taatttgattgcacttgttttgaga

SEQ ID NO: 4546761 - DNA, 25 bp, Homo sapien
ttgattgcacttgttttgagagact

SEQ ID NO: 4546762 - DNA, 25 bp, Homo sapien
ttgcacttgttttgagagactgttt

SEQ ID NO: 4546763 - DNA, 25 bp, Homo sapien
gagactgtttgttacaatttccatt

SEQ ID NO: 4546764 - DNA, 25 bp, Homo sapien
attcttctaagaacgttgaatattg

SEQ ID NO: 4546765 - DNA, 25 bp, Homo sapien
actgatggccttacctttctgggta

SEQ ID NO: 4546766 - DNA, 25 bp, Homo sapien
cagagagacccgctgttagactgat

SEQ ID NO: 4546767 - DNA, 25 bp, Homo sapien
gctgaatttgaaattctggattgaa

SEQ ID NO: 4546768 - DNA, 25 bp, Homo sapien
tctgtaagcccgtgaccagggctgc

SEQ ID NO: 4546769 - DNA, 25 bp, Homo sapien
taacctaaggtaaagactatcagaa

SEQ ID NO: 4546770 - DNA, 25 bp, Homo sapien
gcagctttgccgagctcaattcaga

SEQ ID NO: 4546771 - DNA, 25 bp, Homo sapien
ggaggtatctcctattcaggaggca

SEQ ID NO: 4546772 - DNA, 25 bp, Homo sapien
caggtgtcatacagtatggagagtt

SEQ ID NO: 4546773 - DNA, 25 bp, Homo sapien
tagcaggagagccttgtgacacagg

SEQ ID NO: 4546774 - DNA, 25 bp, Homo sapien
tgcctattccagaactagcaggaga

SEQ ID NO: 4546775 - DNA, 25 bp, Homo sapien
ttggttattgttgaagatgccattg

SEQ ID NO: 4546776 - DNA, 25 bp, Homo sapien
tcactgggcatgcttagtccagtat

SEQ ID NO: 4546777 - DNA, 25 bp, Homo sapien
gagtgaagtatcactgggcatgctt

SEQ ID NO: 4546778 - DNA, 25 bp, Homo sapien
agtatcactgggcatgcttagtcca

SEQ ID NO: 4546779 - DNA, 25 bp, Homo sapien
tgaagtatcactgggcatgcttagt

SEQ ID NO: 4546780 - DNA, 25 bp, Homo sapien
ggatgaggaagaatacacattacct

SEQ ID NO: 4546781 - DNA, 25 bp, Homo sapien
ttaagcatagcccagaagtctccac

SEQ ID NO: 4546782 - DNA, 25 bp, Homo sapien
aaaaatctgcacctcttaggccggg

SEQ ID NO: 4546783 - DNA, 25 bp, Homo sapien
gaggtcagcctgagaaacgttgtga

SEQ ID NO: 4546784 - DNA, 25 bp, Homo sapien
tgctggcaatgacaaattctacctc

SEQ ID NO: 4546785 - DNA, 25 bp, Homo sapien
taattagcaaagctacacatggtgt

SEQ ID NO: 4546786 - DNA, 25 bp, Homo sapien
cagcaggacctgtctactatatatc

SEQ ID NO: 4546787 - DNA, 25 bp, Homo sapien
cctcctgccgctctagttactaaaa

SEQ ID NO: 4546788 - DNA, 25 bp, Homo sapien
ggagcacgtcttccaatcaggagca

SEQ ID NO: 4546789 - DNA, 25 bp, Homo sapien
ttaaccatctccctacaaaagcatc

SEQ ID NO: 4546790 - DNA, 25 bp, Homo sapien
tttcagaccattccatgagaagagg

SEQ ID NO: 4546791 - DNA, 25 bp, Homo sapien
tcaggagcattaactagtgatagct

SEQ ID NO: 4546792 - DNA, 25 bp, Homo sapien
gaaacaatctcctgtggcaagtcat

SEQ ID NO: 4546793 - DNA, 25 bp, Homo sapien
tctgttggttcctcggatcccaaaa

SEQ ID NO: 4546794 - DNA, 25 bp, Homo sapien
tctaagtgcatttctgttggttcct

SEQ ID NO: 4546795 - DNA, 25 bp, Homo sapien
tgtggtccacagttaagcgcccctt

SEQ ID NO: 4546796 - DNA, 25 bp, Homo sapien
gatgctttaaatcctaggtggcaaa

SEQ ID NO: 4546797 - DNA, 25 bp, Homo sapien
catgagaagtttggctaactggcaa

SEQ ID NO: 4546798 - DNA, 25 bp, Homo sapien
cagattactcttcaactgtgtacaa

SEQ ID NO: 4546799 - DNA, 25 bp, Homo sapien
cacaggtatggtagttcacttaaac

SEQ ID NO: 4546800 - DNA, 25 bp, Homo sapien
gagtctttagtgtgaaaagaagctg

SEQ ID NO: 4546801 - DNA, 25 bp, Homo sapien
ctttagaagaagcaatgtccacaga

SEQ ID NO: 4546802 - DNA, 25 bp, Homo sapien
agtgctgtgggtcgttttagttttg

SEQ ID NO: 4546803 - DNA, 25 bp, Homo sapien
ttaaaggatgtcaaacagggctgac

SEQ ID NO: 4546804 - DNA, 25 bp, Homo sapien
taggagcactatacatggctaggca

SEQ ID NO: 4546805 - DNA, 25 bp, Homo sapien
gctaggcagtgtccctcagatacag

SEQ ID NO: 4546806 - DNA, 25 bp, Homo sapien
aacattagtttcaccattagggcca

SEQ ID NO: 4546807 - DNA, 25 bp, Homo sapien
aacgacatcataacagtaggagcac

SEQ ID NO: 4546808 - DNA, 25 bp, Homo sapien
ggttgataccctcagtttccactgg

SEQ ID NO: 4546809 - DNA, 25 bp, Homo sapien
tcttcagcatttggtaccaaggact

SEQ ID NO: 4546810 - DNA, 25 bp, Homo sapien
gaggtggcagacatccttactcctg

SEQ ID NO: 4546811 - DNA, 25 bp, Homo sapien
gaaacgtactgtcaaggtcacacat

SEQ ID NO: 4546812 - DNA, 25 bp, Homo sapien
tagtaacatcgcagcccttatcacc

SEQ ID NO: 4546813 - DNA, 25 bp, Homo sapien
tccagatccatcatttccctataat

SEQ ID NO: 4546814 - DNA, 25 bp, Homo sapien
ttaaaatacaacaggcagcatctgc

SEQ ID NO: 4546815 - DNA, 25 bp, Homo sapien
tctataatccctatcttgtgtagta

SEQ ID NO: 4546816 - DNA, 25 bp, Homo sapien
cagcaaattgctcagactaatgata

SEQ ID NO: 4546817 - DNA, 25 bp, Homo sapien
acatctaacatatattagcagagac

SEQ ID NO: 4546818 - DNA, 25 bp, Homo sapien
acagcaaattgctcagactaatgat

SEQ ID NO: 4546819 - DNA, 25 bp, Homo sapien
taaaaatttcgattaacaacatcta

SEQ ID NO: 4546820 - DNA, 25 bp, Homo sapien
ctgtatatgacagaggtctggtgtt

SEQ ID NO: 4546821 - DNA, 25 bp, Homo sapien
ttgccgtgctttcattgcttgctgt

SEQ ID NO: 4546822 - DNA, 25 bp, Homo sapien
cctaaatctagctgcacaggtgttt

SEQ ID NO: 4546823 - DNA, 25 bp, Homo sapien
ggtctggtgttagtaatttgccgtg

SEQ ID NO: 4546824 - DNA, 25 bp, Homo sapien
tatttctgaatactcttgagctgtg

SEQ ID NO: 4546825 - DNA, 25 bp, Homo sapien
tggtaataggaattggagtctgaac

SEQ ID NO: 4546826 - DNA, 25 bp, Homo sapien
ggtgagttttcaggtaaatcatcca

SEQ ID NO: 4546827 - DNA, 25 bp, Homo sapien
tctgactttttgcacgtttgggaac

SEQ ID NO: 4546828 - DNA, 25 bp, Homo sapien
tctcatttagttcttgaaacccatc

SEQ ID NO: 4546829 - DNA, 25 bp, Homo sapien
aagtttttgttgaatattctcatcc

SEQ ID NO: 4546830 - DNA, 25 bp, Homo sapien
ttagttcttgaaacccatcttcatc

SEQ ID NO: 4546831 - DNA, 25 bp, Homo sapien
tgttgaatattctcatccttagcat

SEQ ID NO: 4546832 - DNA, 25 bp, Homo sapien
tactgaattattcaaagtcggtctt

SEQ ID NO: 4546833 - DNA, 25 bp, Homo sapien
caaagtcggtcttaaagaggaaatg

SEQ ID NO: 4546834 - DNA, 25 bp, Homo sapien
tattcaaagtcggtcttaaagagga

SEQ ID NO: 4546835 - DNA, 25 bp, Homo sapien
tctattactgaattattcaaagtcg

SEQ ID NO: 4546836 - DNA, 25 bp, Homo sapien
taataattctaccttcagatgggtg

SEQ ID NO: 4546837 - DNA, 25 bp, Homo sapien
gaaattcaaactgggttttatcaca

SEQ ID NO: 4546838 - DNA, 25 bp, Homo sapien
tatagaaccaatagtacagttgagt

SEQ ID NO: 4546839 - DNA, 25 bp, Homo sapien
tgtactacaattgccagacctggat

SEQ ID NO: 4546840 - DNA, 25 bp, Homo sapien
caaattaatttcttaatgggaacat

SEQ ID NO: 4546841 - DNA, 25 bp, Homo sapien
aaaagtactcacaatgttcacaatg

SEQ ID NO: 4546842 - DNA, 25 bp, Homo sapien
taacagcttacaaatagagtttgaa

SEQ ID NO: 4546843 - DNA, 25 bp, Homo sapien
ggaacatttcctataacagcttaca

SEQ ID NO: 4546844 - DNA, 25 bp, Homo sapien
gaggaagtactgtgtcctcggcatc

SEQ ID NO: 4546845 - DNA, 25 bp, Homo sapien
gactcagaatttggatcgcttctat

SEQ ID NO: 4546846 - DNA, 25 bp, Homo sapien
aatgcttattatctggtctcttttg

SEQ ID NO: 4546847 - DNA, 25 bp, Homo sapien
tctatgggattgactagagcttaaa

SEQ ID NO: 4546848 - DNA, 25 bp, Homo sapien
tactggcagaaaagtacacgcaagt

SEQ ID NO: 4546849 - DNA, 25 bp, Homo sapien
ctcaaatatataacatactggcaga

SEQ ID NO: 4546850 - DNA, 25 bp, Homo sapien
caataaattttcaccaagtgcatca

SEQ ID NO: 4546851 - DNA, 25 bp, Homo sapien
aagtacacgcaagtgtacaactcaa

SEQ ID NO: 4546852 - DNA, 25 bp, Homo sapien
gtggcatatccagatcatagtatag

SEQ ID NO: 4546853 - DNA, 25 bp, Homo sapien
ttctacagtgggtgaacagttaaac

SEQ ID NO: 4546854 - DNA, 25 bp, Homo sapien
caaaccagatgttctacagtgggtg

SEQ ID NO: 4546855 - DNA, 25 bp, Homo sapien
tagtatagaagtctgtatcaaccac

SEQ ID NO: 4546856 - DNA, 25 bp, Homo sapien
gacaaagctagaagacagccaccta

SEQ ID NO: 4546857 - DNA, 25 bp, Homo sapien
gtgacctcatataagaaaccccaga

SEQ ID NO: 4546858 - DNA, 25 bp, Homo sapien
cttaccagacatcgaatttgccagt

SEQ ID NO: 4546859 - DNA, 25 bp, Homo sapien
tccgcccacgagacggtatttgaaa

SEQ ID NO: 4546860 - DNA, 25 bp, Homo sapien
gactaactgcttaactgagacaggg

SEQ ID NO: 4546861 - DNA, 25 bp, Homo sapien
aaaaaacgattcaagccaggtgcgg

SEQ ID NO: 4546862 - DNA, 25 bp, Homo sapien
gaaattgccactaagaatatgtaca

SEQ ID NO: 4546863 - DNA, 25 bp, Homo sapien
gaaagagggtatactgaacaaaaca

SEQ ID NO: 4546864 - DNA, 25 bp, Homo sapien
aactgtaaacatgggtaggactagc

SEQ ID NO: 4546865 - DNA, 25 bp, Homo sapien
cagaaaatttcagcccgtatgtaaa

SEQ ID NO: 4546866 - DNA, 25 bp, Homo sapien
gttagactgcctcacaagcttgcca

SEQ ID NO: 4546867 - DNA, 25 bp, Homo sapien
tctctagtgagctactgataccaaa

SEQ ID NO: 4546868 - DNA, 25 bp, Homo sapien
gcaagttacattggaccaatttaca

SEQ ID NO: 4546869 - DNA, 25 bp, Homo sapien
tttctgagttgcctggcaagttaca

SEQ ID NO: 4546870 - DNA, 25 bp, Homo sapien
ctgcacacatagatgattccacatg

SEQ ID NO: 4546871 - DNA, 25 bp, Homo sapien
tcactagaagattcagcagtagggt

SEQ ID NO: 4546872 - DNA, 25 bp, Homo sapien
actgcagtaaccactatcactgtca

SEQ ID NO: 4546873 - DNA, 25 bp, Homo sapien
tcactgtcaatgtcggcttcactag

SEQ ID NO: 4546874 - DNA, 25 bp, Homo sapien
ttggacttccagagcattgttgcag

SEQ ID NO: 4546875 - DNA, 25 bp, Homo sapien
agaaatagttccctccctgcagtca

SEQ ID NO: 4546876 - DNA, 25 bp, Homo sapien
caaggacagggtgggatcattctct

SEQ ID NO: 4546877 - DNA, 25 bp, Homo sapien
tcataggaatgagatgactgcgtcc

SEQ ID NO: 4546878 - DNA, 25 bp, Homo sapien
tattcccgcaaaattgttcagcctg

SEQ ID NO: 4546879 - DNA, 25 bp, Homo sapien
ccagaagcacaatttttgatcgact

SEQ ID NO: 4546880 - DNA, 25 bp, Homo sapien
gctgtgaagcatctaccagaagcac

SEQ ID NO: 4546881 - DNA, 25 bp, Homo sapien
ttttgatcgactatcaggacctgct

SEQ ID NO: 4546882 - DNA, 25 bp, Homo sapien
tacatttttcaccagcggccttttg

SEQ ID NO: 4546883 - DNA, 25 bp, Homo sapien
agcacctcttaaataacaaagtgct

SEQ ID NO: 4546884 - DNA, 25 bp, Homo sapien
aaagcacctcttaaataacaaagtg

SEQ ID NO: 4546885 - DNA, 25 bp, Homo sapien
aagcacctcttaaataacaaagtgc

SEQ ID NO: 4546886 - DNA, 25 bp, Homo sapien
cacctggcccattgaaatatcttga

SEQ ID NO: 4546887 - DNA, 25 bp, Homo sapien
tacaaatgttagtgtcaccatgcaa

SEQ ID NO: 4546888 - DNA, 25 bp, Homo sapien
tagccattcaacacagctagcacaa

SEQ ID NO: 4546889 - DNA, 25 bp, Homo sapien
gatccacactaatcacttacaaatg

SEQ ID NO: 4546890 - DNA, 25 bp, Homo sapien
tttgggaccactgatcctctgttac

SEQ ID NO: 4546891 - DNA, 25 bp, Homo sapien
tccaagctgacttggacgctcagtg

SEQ ID NO: 4546892 - DNA, 25 bp, Homo sapien
gcattctgtggtgatagcatttaca

SEQ ID NO: 4546893 - DNA, 25 bp, Homo sapien
tggctggacaatgggaagacctgtc

SEQ ID NO: 4546894 - DNA, 25 bp, Homo sapien
cgtatatcattgttatataaaggaa

SEQ ID NO: 4546895 - DNA, 25 bp, Homo sapien
caaagtatggtccagtagggtttgg

SEQ ID NO: 4546896 - DNA, 25 bp, Homo sapien
gcggctgagcagatataatgggata

SEQ ID NO: 4546897 - DNA, 25 bp, Homo sapien
ttgttgccatcgtatatcattgtta

SEQ ID NO: 4546898 - DNA, 25 bp, Homo sapien
gcattgtctgtaactctgccttcca

SEQ ID NO: 4546899 - DNA, 25 bp, Homo sapien
gctactgtatctaccaacaatggca

SEQ ID NO: 4546900 - DNA, 25 bp, Homo sapien
tcaaggtacacaaccgtgacagcct

SEQ ID NO: 4546901 - DNA, 25 bp, Homo sapien
ggcagtccaaagttcccattcaagg

SEQ ID NO: 4546902 - DNA, 25 bp, Homo sapien
tttgggagagccatagggatcataa

SEQ ID NO: 4546903 - DNA, 25 bp, Homo sapien
tttcctgcacaaatgggtaacaagt

SEQ ID NO: 4546904 - DNA, 25 bp, Homo sapien
gggatcataaatgtatcaggactct

SEQ ID NO: 4546905 - DNA, 25 bp, Homo sapien
aattggagttggttccacaccagaa

SEQ ID NO: 4546906 - DNA, 25 bp, Homo sapien
ggatgcacatatgggcaacaaaact

SEQ ID NO: 4546907 - DNA, 25 bp, Homo sapien
aaccctgtagtatttagggatgcac

SEQ ID NO: 4546908 - DNA, 25 bp, Homo sapien
caaagttctatatcctaaccaggat

SEQ ID NO: 4546909 - DNA, 25 bp, Homo sapien
cccagtacacatgtgagtaaactaa

SEQ ID NO: 4546910 - DNA, 25 bp, Homo sapien
gcagatacctgatccacatagcaca

SEQ ID NO: 4546911 - DNA, 25 bp, Homo sapien
gagtttctacatgcttcatttctga

SEQ ID NO: 4546912 - DNA, 25 bp, Homo sapien
ggcaacctggagtttccccactcca

SEQ ID NO: 4546913 - DNA, 25 bp, Homo sapien
tacagtccagaacaccgaggtaggg

SEQ ID NO: 4546914 - DNA, 25 bp, Homo sapien
ttatataccaagcaacacatattct

SEQ ID NO: 4546915 - DNA, 25 bp, Homo sapien
aaatgcattatataccaagcaacac

SEQ ID NO: 4546916 - DNA, 25 bp, Homo sapien
gcattatataccaagcaacacatat

SEQ ID NO: 4546917 - DNA, 25 bp, Homo sapien
taccaagcaacacatattcttagaa

SEQ ID NO: 4546918 - DNA, 25 bp, Homo sapien
catctgtagttaccacacattctct

SEQ ID NO: 4546919 - DNA, 25 bp, Homo sapien
ctgtagttaccacacattctcttac

SEQ ID NO: 4546920 - DNA, 25 bp, Homo sapien
tcatctgtagttaccacacattctc

SEQ ID NO: 4546921 - DNA, 25 bp, Homo sapien
tctgtagttaccacacattctctta

SEQ ID NO: 4546922 - DNA, 25 bp, Homo sapien
gagaagcggcaacggcgagccctcc

SEQ ID NO: 4546923 - DNA, 25 bp, Homo sapien
tgggtgagaagccttcaaacgcctt

SEQ ID NO: 4546924 - DNA, 25 bp, Homo sapien
gggagactactagaagttataagcc

SEQ ID NO: 4546925 - DNA, 25 bp, Homo sapien
tactagaagttataagccctcctcc

SEQ ID NO: 4546926 - DNA, 25 bp, Homo sapien
ccacgttcggagaactgggcctggc

SEQ ID NO: 4546927 - DNA, 25 bp, Homo sapien
ccaggtgagggggtctgcggccgca

SEQ ID NO: 4546928 - DNA, 25 bp, Homo sapien
gtgagggggtctgcggccgcaggac

SEQ ID NO: 4546929 - DNA, 25 bp, Homo sapien
cagcagctggaacaatgaaggagag

SEQ ID NO: 4546930 - DNA, 25 bp, Homo sapien
tgtgaggaagcggcgaccccaaccc

SEQ ID NO: 4546931 - DNA, 25 bp, Homo sapien
ctgtgaggaagcggcgaccccaacc

SEQ ID NO: 4546932 - DNA, 25 bp, Homo sapien
gtgcctgcagccgcaacgggcccgc

SEQ ID NO: 4546933 - DNA, 25 bp, Homo sapien
tgcctgcagccgcaacgggcccgcg

SEQ ID NO: 4546934 - DNA, 25 bp, Homo sapien
gctcgggtccagactgggttccgga

SEQ ID NO: 4546935 - DNA, 25 bp, Homo sapien
gctggccgcgacaccgattcggcta

SEQ ID NO: 4546936 - DNA, 25 bp, Homo sapien
tccgcccctatctggctggccgcga

SEQ ID NO: 4546937 - DNA, 25 bp, Homo sapien
ctagtcggtgtaaacagcgcctcgg

SEQ ID NO: 4546938 - DNA, 25 bp, Homo sapien
gatcatctgggacggaagccgagga

SEQ ID NO: 4546939 - DNA, 25 bp, Homo sapien
agggcccgaatgggctggaggcgta

SEQ ID NO: 4546940 - DNA, 25 bp, Homo sapien
catctgggacggaagccgaggaggg

SEQ ID NO: 4546941 - DNA, 25 bp, Homo sapien
gagggatcatctgggacggaagccg

SEQ ID NO: 4546942 - DNA, 25 bp, Homo sapien
ttttctgccttggatgaaatctcgt

SEQ ID NO: 4546943 - DNA, 25 bp, Homo sapien
gaaatctcgtgaaggtcacacaaac

SEQ ID NO: 4546944 - DNA, 25 bp, Homo sapien
ggtcacacaaactttattccacgtc

SEQ ID NO: 4546945 - DNA, 25 bp, Homo sapien
gctcagtcctgcttcaagctggaag

SEQ ID NO: 4546946 - DNA, 25 bp, Homo sapien
tatctaggccctgtgttatctgggt

SEQ ID NO: 4546947 - DNA, 25 bp, Homo sapien
ctatctaggccctgtgttatctggg

SEQ ID NO: 4546948 - DNA, 25 bp, Homo sapien
atctaggccctgtgttatctgggtc

SEQ ID NO: 4546949 - DNA, 25 bp, Homo sapien
cacattgacttgtaacaggcaggcc

SEQ ID NO: 4546950 - DNA, 25 bp, Homo sapien
acttgtaacaggcaggccattcact

SEQ ID NO: 4546951 - DNA, 25 bp, Homo sapien
cattgacttgtaacaggcaggccat

SEQ ID NO: 4546952 - DNA, 25 bp, Homo sapien
ttgacttgtaacaggcaggccattc

SEQ ID NO: 4546953 - DNA, 25 bp, Homo sapien
cacctggctgcggagacttgaagac

SEQ ID NO: 4546954 - DNA, 25 bp, Homo sapien
gctgcggagacttgaagacaactcc

SEQ ID NO: 4546955 - DNA, 25 bp, Homo sapien
cctggctgcggagacttgaagacaa

SEQ ID NO: 4546956 - DNA, 25 bp, Homo sapien
ctccacctggctgcggagacttgaa

SEQ ID NO: 4546957 - DNA, 25 bp, Homo sapien
gtgtaatttcctacaagatccttct

SEQ ID NO: 4546958 - DNA, 25 bp, Homo sapien
ggtgtaatttcctacaagatccttc

SEQ ID NO: 4546959 - DNA, 25 bp, Homo sapien
gctggtgtaatttcctacaagatcc

SEQ ID NO: 4546960 - DNA, 25 bp, Homo sapien
ctggtgtaatttcctacaagatcct

SEQ ID NO: 4546961 - DNA, 25 bp, Homo sapien
aactcttgtgttccttccgtacata

SEQ ID NO: 4546962 - DNA, 25 bp, Homo sapien
tatgatgggccctgtcttgctgtgc

SEQ ID NO: 4546963 - DNA, 25 bp, Homo sapien
tagttggaccctacttatgcaaaaa

SEQ ID NO: 4546964 - DNA, 25 bp, Homo sapien
caagtggcagaacatttagttggac

SEQ ID NO: 4546965 - DNA, 25 bp, Homo sapien
ggttctagccacatttagtatctgg

SEQ ID NO: 4546966 - DNA, 25 bp, Homo sapien
gagaaccaggatctcttcacgggta

SEQ ID NO: 4546967 - DNA, 25 bp, Homo sapien
tagtatctggatgtatctacgctgc

SEQ ID NO: 4546968 - DNA, 25 bp, Homo sapien
gaggtaactcagtggagctcaatcc

SEQ ID NO: 4546969 - DNA, 25 bp, Homo sapien
aacacgcaagttactggtacactgg

SEQ ID NO: 4546970 - DNA, 25 bp, Homo sapien
catgggatgacgctagagattactt

SEQ ID NO: 4546971 - DNA, 25 bp, Homo sapien
tttgccaacacggaacaaagttgcc

SEQ ID NO: 4546972 - DNA, 25 bp, Homo sapien
taaacagtaagggataggcaaacat

SEQ ID NO: 4546973 - DNA, 25 bp, Homo sapien
gacaccacaaaagcatacatacctg

SEQ ID NO: 4546974 - DNA, 25 bp, Homo sapien
gaggtaaagggaatccactaggcaa

SEQ ID NO: 4546975 - DNA, 25 bp, Homo sapien
tgtcttatggactaactgcttcacc

SEQ ID NO: 4546976 - DNA, 25 bp, Homo sapien
gatttagactgacactgacaccaca

SEQ ID NO: 4546977 - DNA, 25 bp, Homo sapien
caagagtgagtaatggaaatccagc

SEQ ID NO: 4546978 - DNA, 25 bp, Homo sapien
gaactgggcactgtaagaattggag

SEQ ID NO: 4546979 - DNA, 25 bp, Homo sapien
tctctctagaaagtggaagatgcac

SEQ ID NO: 4546980 - DNA, 25 bp, Homo sapien
tagagagcatctacttgtggcagcc

SEQ ID NO: 4546981 - DNA, 25 bp, Homo sapien
tctgcattacctcaaagttaggtgg

SEQ ID NO: 4546982 - DNA, 25 bp, Homo sapien
tagttaccttggaaggccacagttc

SEQ ID NO: 4546983 - DNA, 25 bp, Homo sapien
taggaaataaccttccagcatgatc

SEQ ID NO: 4546984 - DNA, 25 bp, Homo sapien
aatgagctgagttcctttaaggtag

SEQ ID NO: 4546985 - DNA, 25 bp, Homo sapien
gcaggtacagaaatatacggacaca

SEQ ID NO: 4546986 - DNA, 25 bp, Homo sapien
gtctaaacctttactacactgcagg

SEQ ID NO: 4546987 - DNA, 25 bp, Homo sapien
gacagtatgccactataattatggg

SEQ ID NO: 4546988 - DNA, 25 bp, Homo sapien
aacctaagtgacagtatgccactat

SEQ ID NO: 4546989 - DNA, 25 bp, Homo sapien
tacgtttagggcaagatgtcaatac

SEQ ID NO: 4546990 - DNA, 25 bp, Homo sapien
tgcactgttgccttaaggacgtctg

SEQ ID NO: 4546991 - DNA, 25 bp, Homo sapien
tcaggacacatcaaccgacagtagt

SEQ ID NO: 4546992 - DNA, 25 bp, Homo sapien
taaccaacagtagcgtgtcagtgta

SEQ ID NO: 4546993 - DNA, 25 bp, Homo sapien
tacagcctggttgagagaatttagt

SEQ ID NO: 4546994 - DNA, 25 bp, Homo sapien
caaggagttggttgacttgatcaat

SEQ ID NO: 4546995 - DNA, 25 bp, Homo sapien
gatccagttcaaggagttggttgac

SEQ ID NO: 4546996 - DNA, 25 bp, Homo sapien
cacccctcttctgatgatccagttc

SEQ ID NO: 4546997 - DNA, 25 bp, Homo sapien
gtgcagtatatcgtgcaccacccct

SEQ ID NO: 4546998 - DNA, 25 bp, Homo sapien
aagcagctgcctacattaaatgagt

SEQ ID NO: 4546999 - DNA, 25 bp, Homo sapien
cactgtgttattcaaactctagata

SEQ ID NO: 4547000 - DNA, 25 bp, Homo sapien
aaaatacagtatcaacaaatgccaa

SEQ ID NO: 4547001 - DNA, 25 bp, Homo sapien
agtttctggattaatgtttcataaa

SEQ ID NO: 4547002 - DNA, 25 bp, Homo sapien
ttatccaatatgcactgcaccagca

SEQ ID NO: 4547003 - DNA, 25 bp, Homo sapien
catcagctacatctatgtttaactc

SEQ ID NO: 4547004 - DNA, 25 bp, Homo sapien
tccaatatgcactgcaccagcaagc

SEQ ID NO: 4547005 - DNA, 25 bp, Homo sapien
aatatgcactgcaccagcaagctct

SEQ ID NO: 4547006 - DNA, 25 bp, Homo sapien
aggaatatgtattcttgtgtaaggc

SEQ ID NO: 4547007 - DNA, 25 bp, Homo sapien
tttataagcacttgtgttctgatgt

SEQ ID NO: 4547008 - DNA, 25 bp, Homo sapien
tgtattcttgtgtaaggcttaatta

SEQ ID NO: 4547009 - DNA, 25 bp, Homo sapien
ttataagcacttgtgttctgatgtt

SEQ ID NO: 4547010 - DNA, 25 bp, Homo sapien
aatccagttggcagaaagaacatac

SEQ ID NO: 4547011 - DNA, 25 bp, Homo sapien
tccatgatgttgctgtgatttgttt

SEQ ID NO: 4547012 - DNA, 25 bp, Homo sapien
aaggatcatccatgatgttgctgtg

SEQ ID NO: 4547013 - DNA, 25 bp, Homo sapien
gaatcttttcaaattcagtgatgtc

SEQ ID NO: 4547014 - DNA, 25 bp, Homo sapien
cttcaatgtgttctcttatgaaagg

SEQ ID NO: 4547015 - DNA, 25 bp, Homo sapien
tccaaagaccctgcttctcaacttt

SEQ ID NO: 4547016 - DNA, 25 bp, Homo sapien
catggaaatcacagttaaacaagca

SEQ ID NO: 4547017 - DNA, 25 bp, Homo sapien
tggaaatcacagttaaacaagcaca

SEQ ID NO: 4547018 - DNA, 25 bp, Homo sapien
gtgtaaattatgtcaaacatgaaga

SEQ ID NO: 4547019 - DNA, 25 bp, Homo sapien
caaccttgtggatatggcaccattg

SEQ ID NO: 4547020 - DNA, 25 bp, Homo sapien
gacaccatgcatcacatcatgtggg

SEQ ID NO: 4547021 - DNA, 25 bp, Homo sapien
cctggcaactgactaggaagacaaa

SEQ ID NO: 4547022 - DNA, 25 bp, Homo sapien
tgttgggtcccaatgtaacctcata

SEQ ID NO: 4547023 - DNA, 25 bp, Homo sapien
agtacgacccttctgtcaccccaca

SEQ ID NO: 4547024 - DNA, 25 bp, Homo sapien
acgcccagcctatccattgtaaaca

SEQ ID NO: 4547025 - DNA, 25 bp, Homo sapien
tacgacccttctgtcaccccacact

SEQ ID NO: 4547026 - DNA, 25 bp, Homo sapien
ttcttaccagtacgacccttctgtc

SEQ ID NO: 4547027 - DNA, 25 bp, Homo sapien
ttctggatcatttttgtacggcttg

SEQ ID NO: 4547028 - DNA, 25 bp, Homo sapien
atttctggatcatttttgtacggct

SEQ ID NO: 4547029 - DNA, 25 bp, Homo sapien
ctggatcatttttgtacggcttggc

SEQ ID NO: 4547030 - DNA, 25 bp, Homo sapien
aatttctggatcatttttgtacggc

SEQ ID NO: 4547031 - DNA, 25 bp, Homo sapien
aagtggttcgtcttggacttccaga

SEQ ID NO: 4547032 - DNA, 25 bp, Homo sapien
cagattcatcataattcttgaaggc

SEQ ID NO: 4547033 - DNA, 25 bp, Homo sapien
ggatttattcccgatttcataagca

SEQ ID NO: 4547034 - DNA, 25 bp, Homo sapien
cctcaagtgcattttaccaccacat

SEQ ID NO: 4547035 - DNA, 25 bp, Homo sapien
atgccactgcccaccctctccaaac

SEQ ID NO: 4547036 - DNA, 25 bp, Homo sapien
ccatgccactgcccaccctctccaa

SEQ ID NO: 4547037 - DNA, 25 bp, Homo sapien
tttgatatctccccatgccactgcc

SEQ ID NO: 4547038 - DNA, 25 bp, Homo sapien
ccccatgccactgcccaccctctcc

SEQ ID NO: 4547039 - DNA, 25 bp, Homo sapien
cagacttgatgtgaagtgactgttc

SEQ ID NO: 4547040 - DNA, 25 bp, Homo sapien
gtgactgttcatagagtgctttaag

SEQ ID NO: 4547041 - DNA, 25 bp, Homo sapien
taactcccataatcagtggatgagg

SEQ ID NO: 4547042 - DNA, 25 bp, Homo sapien
tgtgctgtgtacatttgaatttcca

SEQ ID NO: 4547043 - DNA, 25 bp, Homo sapien
ttttcagatcatcttctccatcatc

SEQ ID NO: 4547044 - DNA, 25 bp, Homo sapien
ttcagatcatcttctccatcatcag

SEQ ID NO: 4547045 - DNA, 25 bp, Homo sapien
cttttttcagatcatcttctccatc

SEQ ID NO: 4547046 - DNA, 25 bp, Homo sapien
tcagatcatcttctccatcatcagt

SEQ ID NO: 4547047 - DNA, 25 bp, Homo sapien
catattcctctcgttctaaatataa

SEQ ID NO: 4547048 - DNA, 25 bp, Homo sapien
tgaagctttccatattcctctcgtt

SEQ ID NO: 4547049 - DNA, 25 bp, Homo sapien
ttccatattcctctcgttctaaata

SEQ ID NO: 4547050 - DNA, 25 bp, Homo sapien
tattcctctcgttctaaatataatt

SEQ ID NO: 4547051 - DNA, 25 bp, Homo sapien
accacagtctatcattcttagcatc

SEQ ID NO: 4547052 - DNA, 25 bp, Homo sapien
aaccacagtctatcattcttagcat

SEQ ID NO: 4547053 - DNA, 25 bp, Homo sapien
ccacagtctatcattcttagcatct

SEQ ID NO: 4547054 - DNA, 25 bp, Homo sapien
gtaaataccactccactcacatcag

SEQ ID NO: 4547055 - DNA, 25 bp, Homo sapien
taaataccactccactcacatcagc

SEQ ID NO: 4547056 - DNA, 25 bp, Homo sapien
aagtagagatataatcaagaataga

SEQ ID NO: 4547057 - DNA, 25 bp, Homo sapien
tttcttgtgactgcactccgaatat

SEQ ID NO: 4547058 - DNA, 25 bp, Homo sapien
caatagctgcttatatctattcatc

SEQ ID NO: 4547059 - DNA, 25 bp, Homo sapien
actccgaatataggtcaatagctgc

SEQ ID NO: 4547060 - DNA, 25 bp, Homo sapien
tgagaacaatccctgaaacctaacc

SEQ ID NO: 4547061 - DNA, 25 bp, Homo sapien
tgacaatacattctgccctgaggca

SEQ ID NO: 4547062 - DNA, 25 bp, Homo sapien
gacatcctgtcaatgagctgctaaa

SEQ ID NO: 4547063 - DNA, 25 bp, Homo sapien
aacagcagaggtggatgggacaaaa

SEQ ID NO: 4547064 - DNA, 25 bp, Homo sapien
gtttcagtgctttaaatccccattc

SEQ ID NO: 4547065 - DNA, 25 bp, Homo sapien
tttgtttcagtgctttaaatcccca

SEQ ID NO: 4547066 - DNA, 25 bp, Homo sapien
tgtttcagtgctttaaatccccatt

SEQ ID NO: 4547067 - DNA, 25 bp, Homo sapien
tttcagtgctttaaatccccattct

SEQ ID NO: 4547068 - DNA, 25 bp, Homo sapien
gccgcttttgggtcatcttctttta

SEQ ID NO: 4547069 - DNA, 25 bp, Homo sapien
gctcggagttactatcttcagagta

SEQ ID NO: 4547070 - DNA, 25 bp, Homo sapien
ttttccaaatccacatttggctcgg

SEQ ID NO: 4547071 - DNA, 25 bp, Homo sapien
tttggaaactgcttaatgccgcttt

SEQ ID NO: 4547072 - DNA, 25 bp, Homo sapien
taccgccaatagaagtcctaagaaa

SEQ ID NO: 4547073 - DNA, 25 bp, Homo sapien
caatagaagtcctaagaaatgtact

SEQ ID NO: 4547074 - DNA, 25 bp, Homo sapien
agaagtcctaagaaatgtactttag

SEQ ID NO: 4547075 - DNA, 25 bp, Homo sapien
tgtatttaccgccaatagaagtcct

SEQ ID NO: 4547076 - DNA, 25 bp, Homo sapien
tctaacagctgtaccatatgttggc

SEQ ID NO: 4547077 - DNA, 25 bp, Homo sapien
cttgtctaacagctgtaccatatgt

SEQ ID NO: 4547078 - DNA, 25 bp, Homo sapien
caatgctttctgagtcttgtctaac

SEQ ID NO: 4547079 - DNA, 25 bp, Homo sapien
aacaatgctttctgagtcttgtcta

SEQ ID NO: 4547080 - DNA, 25 bp, Homo sapien
ttctcctagcatttcgcacccgctc

SEQ ID NO: 4547081 - DNA, 25 bp, Homo sapien
tttcgcacccgctcagttccagtgt

SEQ ID NO: 4547082 - DNA, 25 bp, Homo sapien
cgctgggcccgaaagggcaaagcca

SEQ ID NO: 4547083 - DNA, 25 bp, Homo sapien
aggcctgggagcagtaaggacaccc

SEQ ID NO: 4547084 - DNA, 25 bp, Homo sapien
tcctcctcatcatcgcacatgaaat

SEQ ID NO: 4547085 - DNA, 25 bp, Homo sapien
ctcctcatcatcgcacatgaaatca

SEQ ID NO: 4547086 - DNA, 25 bp, Homo sapien
cctcatcatcgcacatgaaatcatc

SEQ ID NO: 4547087 - DNA, 25 bp, Homo sapien
tcatcatcgcacatgaaatcatcct

SEQ ID NO: 4547088 - DNA, 25 bp, Homo sapien
gccttccagtccctcttagaggagc

SEQ ID NO: 4547089 - DNA, 25 bp, Homo sapien
aatcctccgcggctcagaggcgtca

SEQ ID NO: 4547090 - DNA, 25 bp, Homo sapien
ggagaaattggagacaacctcctcc

SEQ ID NO: 4547091 - DNA, 25 bp, Homo sapien
gcggctcagaggcgtcactctcagc

SEQ ID NO: 4547092 - DNA, 25 bp, Homo sapien
tcaagcatactttagctggttaaca

SEQ ID NO: 4547093 - DNA, 25 bp, Homo sapien
caagcatactttagctggttaacac

SEQ ID NO: 4547094 - DNA, 25 bp, Homo sapien
aactgggcattttcggccaccatgg

SEQ ID NO: 4547095 - DNA, 25 bp, Homo sapien
gtggacaggcttgccataagctgca

SEQ ID NO: 4547096 - DNA, 25 bp, Homo sapien
cacagtggacaggcttgccataagc

SEQ ID NO: 4547097 - DNA, 25 bp, Homo sapien
actgggcattttcggccaccatggt

SEQ ID NO: 4547098 - DNA, 25 bp, Homo sapien
ggccttgtagccctgtcggtgcact

SEQ ID NO: 4547099 - DNA, 25 bp, Homo sapien
ctagcagggactctccgaagaaagt

SEQ ID NO: 4547100 - DNA, 25 bp, Homo sapien
gagagctgtcagtactgctagcagg

SEQ ID NO: 4547101 - DNA, 25 bp, Homo sapien
ggatgtggagccctgtggtagagca

SEQ ID NO: 4547102 - DNA, 25 bp, Homo sapien
agtagttgattcttggccaatccca

SEQ ID NO: 4547103 - DNA, 25 bp, Homo sapien
aacctaacttaagaggatgctcctg

SEQ ID NO: 4547104 - DNA, 25 bp, Homo sapien
tgttcattgctcagttaaacccctt

SEQ ID NO: 4547105 - DNA, 25 bp, Homo sapien
agaccttacttggtgttatttgcag

SEQ ID NO: 4547106 - DNA, 25 bp, Homo sapien
tgtctatctccataagaaaagctta

SEQ ID NO: 4547107 - DNA, 25 bp, Homo sapien
taactttgggagaactacatcttta

SEQ ID NO: 4547108 - DNA, 25 bp, Homo sapien
tgtatcatcttatccaaaacaggga

SEQ ID NO: 4547109 - DNA, 25 bp, Homo sapien
cgtgcctggctacatatttgttttt

SEQ ID NO: 4547110 - DNA, 25 bp, Homo sapien
taggcaacgtgataatcccttggcc

SEQ ID NO: 4547111 - DNA, 25 bp, Homo sapien
gtggctactcgcaggcaggatcttg

SEQ ID NO: 4547112 - DNA, 25 bp, Homo sapien
cacaggtcaccttattgaagcccaa

SEQ ID NO: 4547113 - DNA, 25 bp, Homo sapien
caggatcttgccgttgatcagtgcg

SEQ ID NO: 4547114 - DNA, 25 bp, Homo sapien
aaagtgtctgtaagttagagcttgt

SEQ ID NO: 4547115 - DNA, 25 bp, Homo sapien
gaaagctagacgaaactccaaagga

SEQ ID NO: 4547116 - DNA, 25 bp, Homo sapien
agaaagctagacgaaactccaaagg

SEQ ID NO: 4547117 - DNA, 25 bp, Homo sapien
catagaaagctagacgaaactccaa

SEQ ID NO: 4547118 - DNA, 25 bp, Homo sapien
tagaaagctagacgaaactccaaag

SEQ ID NO: 4547119 - DNA, 25 bp, Homo sapien
gatatgtccctattcattggttcac

SEQ ID NO: 4547120 - DNA, 25 bp, Homo sapien
gatgtgtgcgtgatatgtccctatt

SEQ ID NO: 4547121 - DNA, 25 bp, Homo sapien
atatcgcagataaccaggaaattcc

SEQ ID NO: 4547122 - DNA, 25 bp, Homo sapien
ctgatatcgcagataaccaggaaat

SEQ ID NO: 4547123 - DNA, 25 bp, Homo sapien
agtgtgactcttgtcccacaaggct

SEQ ID NO: 4547124 - DNA, 25 bp, Homo sapien
gactcttgtcccacaaggctaatgg

SEQ ID NO: 4547125 - DNA, 25 bp, Homo sapien
cttgtcccacaaggctaatggtgac

SEQ ID NO: 4547126 - DNA, 25 bp, Homo sapien
tgtgactcttgtcccacaaggctaa

SEQ ID NO: 4547127 - DNA, 25 bp, Homo sapien
tgatgacacctaaaaaccccgcatg

SEQ ID NO: 4547128 - DNA, 25 bp, Homo sapien
aaacagcccggccttaagaatgcag

SEQ ID NO: 4547129 - DNA, 25 bp, Homo sapien
tcaatggtacctgcggacaagctgc

SEQ ID NO: 4547130 - DNA, 25 bp, Homo sapien
tcaagggtcacgacttactggagca

SEQ ID NO: 4547131 - DNA, 25 bp, Homo sapien
ttgtagttgtctgttgatgatggtg

SEQ ID NO: 4547132 - DNA, 25 bp, Homo sapien
tgatgatgacgatagtgatgccaca

SEQ ID NO: 4547133 - DNA, 25 bp, Homo sapien
aagttgtagttgtctgttgatgatg

SEQ ID NO: 4547134 - DNA, 25 bp, Homo sapien
gatagtgatgccacacattctctct

SEQ ID NO: 4547135 - DNA, 25 bp, Homo sapien
ccaagaggcacttccaagaaattcc

SEQ ID NO: 4547136 - DNA, 25 bp, Homo sapien
gagatttctccagttatcaagagac

SEQ ID NO: 4547137 - DNA, 25 bp, Homo sapien
cacagatcttcttggacattgtata

SEQ ID NO: 4547138 - DNA, 25 bp, Homo sapien
tcaaatacctctctaatccaagagg

SEQ ID NO: 4547139 - DNA, 25 bp, Homo sapien
ctgtttcacttcatgaggtttcttg

SEQ ID NO: 4547140 - DNA, 25 bp, Homo sapien
cagtttatgtaggaacttctcaaag

SEQ ID NO: 4547141 - DNA, 25 bp, Homo sapien
taaatggacgatactccagtctcca

SEQ ID NO: 4547142 - DNA, 25 bp, Homo sapien
ccagctccagggaattccttccact

SEQ ID NO: 4547143 - DNA, 25 bp, Homo sapien
gaatttttctgctagtcttccaggg

SEQ ID NO: 4547144 - DNA, 25 bp, Homo sapien
agggcttatctttgtaaatggacga

SEQ ID NO: 4547145 - DNA, 25 bp, Homo sapien
catcacggtatgttggagcaggtag

SEQ ID NO: 4547146 - DNA, 25 bp, Homo sapien
ggttccttgcaaattgtctttttgc

SEQ ID NO: 4547147 - DNA, 25 bp, Homo sapien
tataacatcacggtatgttggagca

SEQ ID NO: 4547148 - DNA, 25 bp, Homo sapien
tcctttataacatcacggtatgttg

SEQ ID NO: 4547149 - DNA, 25 bp, Homo sapien
ttgcattgggtcagaacataactcc

SEQ ID NO: 4547150 - DNA, 25 bp, Homo sapien
acataactcctttagctcgcaggag

SEQ ID NO: 4547151 - DNA, 25 bp, Homo sapien
gatttatgtacctttggcctttgaa

SEQ ID NO: 4547152 - DNA, 25 bp, Homo sapien
tgtgattctttagcagagaagaggc

SEQ ID NO: 4547153 - DNA, 25 bp, Homo sapien
agtgttagtgcttcaaatgatcagc

SEQ ID NO: 4547154 - DNA, 25 bp, Homo sapien
gctattagattgcttagcaccctca

SEQ ID NO: 4547155 - DNA, 25 bp, Homo sapien
cctcatactagtatcagtgctggta

SEQ ID NO: 4547156 - DNA, 25 bp, Homo sapien
gtattcttattggtatctaggtgca

SEQ ID NO: 4547157 - DNA, 25 bp, Homo sapien
tgtgaaggcacaactttaacattaa

SEQ ID NO: 4547158 - DNA, 25 bp, Homo sapien
ttatgatgtaactgtcagtaccagc

SEQ ID NO: 4547159 - DNA, 25 bp, Homo sapien
tttgtagaaaatcaatgacacatta

SEQ ID NO: 4547160 - DNA, 25 bp, Homo sapien
tgacacattatagcagttccacata

SEQ ID NO: 4547161 - DNA, 25 bp, Homo sapien
tttcttcgttttttgcataatacag

SEQ ID NO: 4547162 - DNA, 25 bp, Homo sapien
gttttttgcataatacagatggtcc

SEQ ID NO: 4547163 - DNA, 25 bp, Homo sapien
cttcgttttttgcataatacagatg

SEQ ID NO: 4547164 - DNA, 25 bp, Homo sapien
tcgttttttgcataatacagatggt

SEQ ID NO: 4547165 - DNA, 25 bp, Homo sapien
agagcaggttgcccctttttcatca

SEQ ID NO: 4547166 - DNA, 25 bp, Homo sapien
tgtaagtatcatgccaatagcatag

SEQ ID NO: 4547167 - DNA, 25 bp, Homo sapien
agcaggttgcccctttttcatcagc

SEQ ID NO: 4547168 - DNA, 25 bp, Homo sapien
acaacaaatgtaagtatcatgccaa

SEQ ID NO: 4547169 - DNA, 25 bp, Homo sapien
aacatagtatatatacgaagaacca

SEQ ID NO: 4547170 - DNA, 25 bp, Homo sapien
ctgtagaggaaacatagtatatata

SEQ ID NO: 4547171 - DNA, 25 bp, Homo sapien
gaggaaacatagtatatatacgaag

SEQ ID NO: 4547172 - DNA, 25 bp, Homo sapien
catagtatatatacgaagaaccagt

SEQ ID NO: 4547173 - DNA, 25 bp, Homo sapien
caagcaacaggcctgtacaataatg

SEQ ID NO: 4547174 - DNA, 25 bp, Homo sapien
caactcttctacagtacgcaagcaa

SEQ ID NO: 4547175 - DNA, 25 bp, Homo sapien
tacgcaagcaacaggcctgtacaat

SEQ ID NO: 4547176 - DNA, 25 bp, Homo sapien
tacagtacgcaagcaacaggcctgt

SEQ ID NO: 4547177 - DNA, 25 bp, Homo sapien
gacactcaattgtgcattgtccata

SEQ ID NO: 4547178 - DNA, 25 bp, Homo sapien
acacatgacttgaagctggccaact

SEQ ID NO: 4547179 - DNA, 25 bp, Homo sapien
cacatgacttgaagctggccaactt

SEQ ID NO: 4547180 - DNA, 25 bp, Homo sapien
ttccatgcttttgccgcgacactca

SEQ ID NO: 4547181 - DNA, 25 bp, Homo sapien
attcaactagtccactccagtatcc

SEQ ID NO: 4547182 - DNA, 25 bp, Homo sapien
aattcaactagtccactccagtatc

SEQ ID NO: 4547183 - DNA, 25 bp, Homo sapien
ttcaactagtccactccagtatcca

SEQ ID NO: 4547184 - DNA, 25 bp, Homo sapien
tgtgccatttccagacgcatgcaag

SEQ ID NO: 4547185 - DNA, 25 bp, Homo sapien
taatcaaagttaggccacgatggag

SEQ ID NO: 4547186 - DNA, 25 bp, Homo sapien
cattttctagggtacttggaagagc

SEQ ID NO: 4547187 - DNA, 25 bp, Homo sapien
ttataaagcatgcagtagtccttgg

SEQ ID NO: 4547188 - DNA, 25 bp, Homo sapien
tatcttagtgagtttaatcttggtt

SEQ ID NO: 4547189 - DNA, 25 bp, Homo sapien
ctggaatatcttagtgagtttaatc

SEQ ID NO: 4547190 - DNA, 25 bp, Homo sapien
gaatatcttagtgagtttaatcttg

SEQ ID NO: 4547191 - DNA, 25 bp, Homo sapien
ttcctggaatatcttagtgagttta

SEQ ID NO: 4547192 - DNA, 25 bp, Homo sapien
cagccagctcatgcatcttaagata

SEQ ID NO: 4547193 - DNA, 25 bp, Homo sapien
gccagctcatgcatcttaagataat

SEQ ID NO: 4547194 - DNA, 25 bp, Homo sapien
cacgattaaactctggaccagtact

SEQ ID NO: 4547195 - DNA, 25 bp, Homo sapien
agaacacgattaaactctggaccag

SEQ ID NO: 4547196 - DNA, 25 bp, Homo sapien
tgtcaagtcaacctagcctaaattc

SEQ ID NO: 4547197 - DNA, 25 bp, Homo sapien
ttagcatgtggacaacttcggtgcc

SEQ ID NO: 4547198 - DNA, 25 bp, Homo sapien
aaatagtttggccattgctgaagca

SEQ ID NO: 4547199 - DNA, 25 bp, Homo sapien
gaatatgtgttctgccaatgctcat

SEQ ID NO: 4547200 - DNA, 25 bp, Homo sapien
tatgggcaacgtatatgctcttggg

SEQ ID NO: 4547201 - DNA, 25 bp, Homo sapien
ttgattcttccttggatatgggcaa

SEQ ID NO: 4547202 - DNA, 25 bp, Homo sapien
tttgttgctagtcttgataatcttg

SEQ ID NO: 4547203 - DNA, 25 bp, Homo sapien
acgtatatgctcttgggttgttcag

SEQ ID NO: 4547204 - DNA, 25 bp, Homo sapien
aaaactgggggcgaggagccaagat

SEQ ID NO: 4547205 - DNA, 25 bp, Homo sapien
ggccaaataggaacagctccggtct

SEQ ID NO: 4547206 - DNA, 25 bp, Homo sapien
agcgtgagcgacgcagaagatggtg

SEQ ID NO: 4547207 - DNA, 25 bp, Homo sapien
cgtgagcgacgcagaagatggtgat

SEQ ID NO: 4547208 - DNA, 25 bp, Homo sapien
cacctgaatactgtgcttttctgac

SEQ ID NO: 4547209 - DNA, 25 bp, Homo sapien
tgcttttctgacgggcttaaaaagc

SEQ ID NO: 4547210 - DNA, 25 bp, Homo sapien
ctgaatactgtgcttttctgacggg

SEQ ID NO: 4547211 - DNA, 25 bp, Homo sapien
cccacctgaatactgtgcttttctg

SEQ ID NO: 4547212 - DNA, 25 bp, Homo sapien
cagaattgtaaagcaccatagaggc

SEQ ID NO: 4547213 - DNA, 25 bp, Homo sapien
catagaggcattagaccaatacacc

SEQ ID NO: 4547214 - DNA, 25 bp, Homo sapien
tactggtcattagtggtccaacaca

SEQ ID NO: 4547215 - DNA, 25 bp, Homo sapien
gactctggaacagcaggtaacttgc

SEQ ID NO: 4547216 - DNA, 25 bp, Homo sapien
gaggccaactatataagcagacaca

SEQ ID NO: 4547217 - DNA, 25 bp, Homo sapien
tgactgccagctaatccatgcatgc

SEQ ID NO: 4547218 - DNA, 25 bp, Homo sapien
agaccaattctagaggagctgtggc

SEQ ID NO: 4547219 - DNA, 25 bp, Homo sapien
atttttgttcccacctgactgccag

SEQ ID NO: 4547220 - DNA, 25 bp, Homo sapien
caaccttcagtttattttgcttaca

SEQ ID NO: 4547221 - DNA, 25 bp, Homo sapien
tgagaaggcgtagcaaccttcagtt

SEQ ID NO: 4547222 - DNA, 25 bp, Homo sapien
gcgtagcaaccttcagtttattttg

SEQ ID NO: 4547223 - DNA, 25 bp, Homo sapien
tgtcttcccctgagaaggcgtagca

SEQ ID NO: 4547224 - DNA, 25 bp, Homo sapien
catggctcttatgcaggacagttca

SEQ ID NO: 4547225 - DNA, 25 bp, Homo sapien
tcctttacaacacaccttaattcca

SEQ ID NO: 4547226 - DNA, 25 bp, Homo sapien
ttactcagttgaccaaagtggaagc

SEQ ID NO: 4547227 - DNA, 25 bp, Homo sapien
cagcacgttcccaattgaattcagg

SEQ ID NO: 4547228 - DNA, 25 bp, Homo sapien
tcagacaggcgtaggtttgaaactc

SEQ ID NO: 4547229 - DNA, 25 bp, Homo sapien
taatggtcactagatagctctcctg

SEQ ID NO: 4547230 - DNA, 25 bp, Homo sapien
aagccaaattccactatgtcaaagc

SEQ ID NO: 4547231 - DNA, 25 bp, Homo sapien
cagagacatattagagggcaaagct

SEQ ID NO: 4547232 - DNA, 25 bp, Homo sapien
tatcaaagaagaacattgtttgttt

SEQ ID NO: 4547233 - DNA, 25 bp, Homo sapien
tgttgatagctggcatccatgtaga

SEQ ID NO: 4547234 - DNA, 25 bp, Homo sapien
tggttgtacaatcatgatgttagta

SEQ ID NO: 4547235 - DNA, 25 bp, Homo sapien
ctggttgtacaatcatgatgttagt

SEQ ID NO: 4547236 - DNA, 25 bp, Homo sapien
tttgctaccatgaatggtggttgtg

SEQ ID NO: 4547237 - DNA, 25 bp, Homo sapien
tttttgctaccatgaatggtggttg

SEQ ID NO: 4547238 - DNA, 25 bp, Homo sapien
ttttttgctaccatgaatggtggtt

SEQ ID NO: 4547239 - DNA, 25 bp, Homo sapien
ttgctaccatgaatggtggttgtgg

SEQ ID NO: 4547240 - DNA, 25 bp, Homo sapien
taaagaggtaactcgattctggaaa

SEQ ID NO: 4547241 - DNA, 25 bp, Homo sapien
aatgttattccctagatcttcttta

SEQ ID NO: 4547242 - DNA, 25 bp, Homo sapien
gaacgttgcatatatggcttgtgcc

SEQ ID NO: 4547243 - DNA, 25 bp, Homo sapien
ggcttgtgccaaacaatcaggatat

SEQ ID NO: 4547244 - DNA, 25 bp, Homo sapien
ctgcaagagctttaatgtaggcccc

SEQ ID NO: 4547245 - DNA, 25 bp, Homo sapien
gggccacaggccacaacattctgat

SEQ ID NO: 4547246 - DNA, 25 bp, Homo sapien
ttagaaggctatacagctcagctca

SEQ ID NO: 4547247 - DNA, 25 bp, Homo sapien
ctgggcagggtgctctaactctgga

SEQ ID NO: 4547248 - DNA, 25 bp, Homo sapien
ttctatcgaataagcaatcttggtt

SEQ ID NO: 4547249 - DNA, 25 bp, Homo sapien
gaaaagtgtcacataactttctgaa

SEQ ID NO: 4547250 - DNA, 25 bp, Homo sapien
gaggtatgctcatgaaaagtgtcac

SEQ ID NO: 4547251 - DNA, 25 bp, Homo sapien
aaaaatgcatcctttcgacttagag

SEQ ID NO: 4547252 - DNA, 25 bp, Homo sapien
gatttctaatgtgtggaatgctcaa

SEQ ID NO: 4547253 - DNA, 25 bp, Homo sapien
cacaccatgcggaaatacgagtcaa

SEQ ID NO: 4547254 - DNA, 25 bp, Homo sapien
taatctctgtagttgcatccagaaa

SEQ ID NO: 4547255 - DNA, 25 bp, Homo sapien
gaaagaactctagacatcatatagg

SEQ ID NO: 4547256 - DNA, 25 bp, Homo sapien
tgagagaaaatgagtcttccagatt

SEQ ID NO: 4547257 - DNA, 25 bp, Homo sapien
catgcaaaagagcaatggaggcttc

SEQ ID NO: 4547258 - DNA, 25 bp, Homo sapien
ccaccaccaaaaggagtcatgcaaa

SEQ ID NO: 4547259 - DNA, 25 bp, Homo sapien
taaatttatggagaaaccaccacca

SEQ ID NO: 4547260 - DNA, 25 bp, Homo sapien
cagtgtacgctagcaacctcagggt

SEQ ID NO: 4547261 - DNA, 25 bp, Homo sapien
aattagcggttagacacatcactgg

SEQ ID NO: 4547262 - DNA, 25 bp, Homo sapien
gttacggttacatgccaagccagtg

SEQ ID NO: 4547263 - DNA, 25 bp, Homo sapien
cctcagggtcccaaagcagtaacac

SEQ ID NO: 4547264 - DNA, 25 bp, Homo sapien
tttgctttgaatcctgtgaagctgc

SEQ ID NO: 4547265 - DNA, 25 bp, Homo sapien
tgctttgaatcctgtgaagctgcaa

SEQ ID NO: 4547266 - DNA, 25 bp, Homo sapien
ttgctttgaatcctgtgaagctgca

SEQ ID NO: 4547267 - DNA, 25 bp, Homo sapien
tctctgtctccatttcatctgaaag

SEQ ID NO: 4547268 - DNA, 25 bp, Homo sapien
ccagtaatggtgcttaaccaggttg

SEQ ID NO: 4547269 - DNA, 25 bp, Homo sapien
gagtgcccagctactaaccagcatg

SEQ ID NO: 4547270 - DNA, 25 bp, Homo sapien
aatacatgccccgataaaaccaagg

SEQ ID NO: 4547271 - DNA, 25 bp, Homo sapien
tgaaaccaactccaaagaatctaag

SEQ ID NO: 4547272 - DNA, 25 bp, Homo sapien
tttcccaaatctcgttagagaggcc

SEQ ID NO: 4547273 - DNA, 25 bp, Homo sapien
gaaccaaactgaactgacagagctg

SEQ ID NO: 4547274 - DNA, 25 bp, Homo sapien
tcagacctcaaagattgcttctcag

SEQ ID NO: 4547275 - DNA, 25 bp, Homo sapien
caagatgaggaatgaatctcagacc

SEQ ID NO: 4547276 - DNA, 25 bp, Homo sapien
ccttcagggagtgctaaatacggaa

SEQ ID NO: 4547277 - DNA, 25 bp, Homo sapien
ggaattcattaccaacagacctgct

SEQ ID NO: 4547278 - DNA, 25 bp, Homo sapien
tgtcagacctgaactacgcaaggcc

SEQ ID NO: 4547279 - DNA, 25 bp, Homo sapien
aaagaccgttactagccaccagaga

SEQ ID NO: 4547280 - DNA, 25 bp, Homo sapien
tatcgttccaattttctataagaac

SEQ ID NO: 4547281 - DNA, 25 bp, Homo sapien
agaaattccccatatcgttccaatt

SEQ ID NO: 4547282 - DNA, 25 bp, Homo sapien
cttctttagaaattccccatatcgt

SEQ ID NO: 4547283 - DNA, 25 bp, Homo sapien
tcttatggtacttctttagaaattc

SEQ ID NO: 4547284 - DNA, 25 bp, Homo sapien
attccatgatcaaaagtgcttcaaa

SEQ ID NO: 4547285 - DNA, 25 bp, Homo sapien
tttcagagtgcatgaccatttatca

SEQ ID NO: 4547286 - DNA, 25 bp, Homo sapien
caaatattcgaggaacattttccca

SEQ ID NO: 4547287 - DNA, 25 bp, Homo sapien
ttttttcagagtgcatgaccattta

SEQ ID NO: 4547288 - DNA, 25 bp, Homo sapien
ggtatttttcttgcaaggatagttg

SEQ ID NO: 4547289 - DNA, 25 bp, Homo sapien
atttttcttgcaaggatagttgttc

SEQ ID NO: 4547290 - DNA, 25 bp, Homo sapien
tttcttgcaaggatagttgttcaaa

SEQ ID NO: 4547291 - DNA, 25 bp, Homo sapien
aggtatttttcttgcaaggatagtt

SEQ ID NO: 4547292 - DNA, 25 bp, Homo sapien
tttccgtattataattgccatccct

SEQ ID NO: 4547293 - DNA, 25 bp, Homo sapien
gatgcctctaattccaattctaacc

SEQ ID NO: 4547294 - DNA, 25 bp, Homo sapien
attaaaaacctagctaccattatct

SEQ ID NO: 4547295 - DNA, 25 bp, Homo sapien
tctctctttccgtattataattgcc

SEQ ID NO: 4547296 - DNA, 25 bp, Homo sapien
tcaatgctctttggaggttcttgca

SEQ ID NO: 4547297 - DNA, 25 bp, Homo sapien
caatgctctttggaggttcttgcat

SEQ ID NO: 4547298 - DNA, 25 bp, Homo sapien
aatgctctttggaggttcttgcatt

SEQ ID NO: 4547299 - DNA, 25 bp, Homo sapien
tgctctttggaggttcttgcatttt

SEQ ID NO: 4547300 - DNA, 25 bp, Homo sapien
agtgaacataaagctgtggaagctt

SEQ ID NO: 4547301 - DNA, 25 bp, Homo sapien
agagaaatataacctttgtaagtga

SEQ ID NO: 4547302 - DNA, 25 bp, Homo sapien
caagagaaatataacctttgtaagt

SEQ ID NO: 4547303 - DNA, 25 bp, Homo sapien
gtaagtgaacataaagctgtggaag

SEQ ID NO: 4547304 - DNA, 25 bp, Homo sapien
cagctctgctgctcctcctttgaca

SEQ ID NO: 4547305 - DNA, 25 bp, Homo sapien
ggccagctctgctgctcctcctttg

SEQ ID NO: 4547306 - DNA, 25 bp, Homo sapien
cccggggccagctctgctgctcctc

SEQ ID NO: 4547307 - DNA, 25 bp, Homo sapien
agctctgctgctcctcctttgacat

SEQ ID NO: 4547308 - DNA, 25 bp, Homo sapien
ctgggtcttaggcttcaatgtgagt

SEQ ID NO: 4547309 - DNA, 25 bp, Homo sapien
cttcaatgtgagttgggcgaccaaa

SEQ ID NO: 4547310 - DNA, 25 bp, Homo sapien
tcttaggcttcaatgtgagttgggc

SEQ ID NO: 4547311 - DNA, 25 bp, Homo sapien
cagctgggtcttaggcttcaatgtg

SEQ ID NO: 4547312 - DNA, 25 bp, Homo sapien
gcaaggtcagaaaaggtcaggcaat

SEQ ID NO: 4547313 - DNA, 25 bp, Homo sapien
gctagtcctagaaggcagcagaacc

SEQ ID NO: 4547314 - DNA, 25 bp, Homo sapien
tagcaccgcgttactttttgaggca

SEQ ID NO: 4547315 - DNA, 25 bp, Homo sapien
gaaaccccggccatatagttacaga

SEQ ID NO: 4547316 - DNA, 25 bp, Homo sapien
gaagcctttattgaccactccattc

SEQ ID NO: 4547317 - DNA, 25 bp, Homo sapien
agcctttattgaccactccattctc

SEQ ID NO: 4547318 - DNA, 25 bp, Homo sapien
aagaagcctttattgaccactccat

SEQ ID NO: 4547319 - DNA, 25 bp, Homo sapien
aaagaagcctttattgaccactcca

SEQ ID NO: 4547320 - DNA, 25 bp, Homo sapien
tcttagttgttagagtgcacttccg

SEQ ID NO: 4547321 - DNA, 25 bp, Homo sapien
ggagaggcacggacaaatgttctaa

SEQ ID NO: 4547322 - DNA, 25 bp, Homo sapien
tatcgtgagcacttctagggcattg

SEQ ID NO: 4547323 - DNA, 25 bp, Homo sapien
gccacgaaagactaatgtaaccaag

SEQ ID NO: 4547324 - DNA, 25 bp, Homo sapien
atatctttgaggtgggcaaaatgca

SEQ ID NO: 4547325 - DNA, 25 bp, Homo sapien
tatctttgaggtgggcaaaatgcaa

SEQ ID NO: 4547326 - DNA, 25 bp, Homo sapien
tttgaggtgggcaaaatgcaaactt

SEQ ID NO: 4547327 - DNA, 25 bp, Homo sapien
tctttgaggtgggcaaaatgcaaac

SEQ ID NO: 4547328 - DNA, 25 bp, Homo sapien
gcgacaccgccgctgattgagaggc

SEQ ID NO: 4547329 - DNA, 25 bp, Homo sapien
gagcctctcgggagaagtgcgacac

SEQ ID NO: 4547330 - DNA, 25 bp, Homo sapien
gaggctgaggcggaacttcccgtct

SEQ ID NO: 4547331 - DNA, 25 bp, Homo sapien
cagtatgtttcgagaaccgcttccc

SEQ ID NO: 4547332 - DNA, 25 bp, Homo sapien
caacgaaaagtatgtcctggcaaag

SEQ ID NO: 4547333 - DNA, 25 bp, Homo sapien
gggatcctcggtttctgcgcggtct

SEQ ID NO: 4547334 - DNA, 25 bp, Homo sapien
tgattttcggtgcattccgccccaa

SEQ ID NO: 4547335 - DNA, 25 bp, Homo sapien
taggatcttgcgggccctttgggaa

SEQ ID NO: 4547336 - DNA, 25 bp, Homo sapien
ggcccataaaggtagtttgtcagat

SEQ ID NO: 4547337 - DNA, 25 bp, Homo sapien
gagtctgtatagtgttccattggga

SEQ ID NO: 4547338 - DNA, 25 bp, Homo sapien
tgctaggctgcagacggcccataaa

SEQ ID NO: 4547339 - DNA, 25 bp, Homo sapien
gaggtgagtcagcttacaataatgg

SEQ ID NO: 4547340 - DNA, 25 bp, Homo sapien
caaagccatttttaggcaggtgagt

SEQ ID NO: 4547341 - DNA, 25 bp, Homo sapien
gcaaatctgtgcgtaatcagtacac

SEQ ID NO: 4547342 - DNA, 25 bp, Homo sapien
aagagggcatcttaatatcctgcac

SEQ ID NO: 4547343 - DNA, 25 bp, Homo sapien
tacctgggtcgtagatggactctag

SEQ ID NO: 4547344 - DNA, 25 bp, Homo sapien
tacttcaacccctgtcctttgtggc

SEQ ID NO: 4547345 - DNA, 25 bp, Homo sapien
tcagagtgtccaaatttggcttgcc

SEQ ID NO: 4547346 - DNA, 25 bp, Homo sapien
ggcaagttttctgcatgacctactt

SEQ ID NO: 4547347 - DNA, 25 bp, Homo sapien
ccctcaggtgtattggaaattatgt

SEQ ID NO: 4547348 - DNA, 25 bp, Homo sapien
cctgaagtatatacagtgggacaca

SEQ ID NO: 4547349 - DNA, 25 bp, Homo sapien
taattgaagcctacctgctagtggc

SEQ ID NO: 4547350 - DNA, 25 bp, Homo sapien
tacaaagcaggcaatactgagcaac

SEQ ID NO: 4547351 - DNA, 25 bp, Homo sapien
gacctagctgcttgtgaatagagcc

SEQ ID NO: 4547352 - DNA, 25 bp, Homo sapien
agctttgtagggtattgttaggcat

SEQ ID NO: 4547353 - DNA, 25 bp, Homo sapien
tagctttgtagggtattgttaggca

SEQ ID NO: 4547354 - DNA, 25 bp, Homo sapien
ctctaccagcaggggcaaaaaagga

SEQ ID NO: 4547355 - DNA, 25 bp, Homo sapien
tgctttggttttctgacttcctgac

SEQ ID NO: 4547356 - DNA, 25 bp, Homo sapien
agctcgtactcggagagagatgccc

SEQ ID NO: 4547357 - DNA, 25 bp, Homo sapien
catgcttatcattctgtatgggtac

SEQ ID NO: 4547358 - DNA, 25 bp, Homo sapien
tacaaactctgccaaacacttagaa

SEQ ID NO: 4547359 - DNA, 25 bp, Homo sapien
gaaattaagggagaattcactatgc

SEQ ID NO: 4547360 - DNA, 25 bp, Homo sapien
aaattaagggagaattcactatgct

SEQ ID NO: 4547361 - DNA, 25 bp, Homo sapien
ctgtctttggacaaaatcttcctgc

SEQ ID NO: 4547362 - DNA, 25 bp, Homo sapien
tctttggacaaaatcttcctgccat

SEQ ID NO: 4547363 - DNA, 25 bp, Homo sapien
gtctttggacaaaatcttcctgcca

SEQ ID NO: 4547364 - DNA, 25 bp, Homo sapien
tgtctttggacaaaatcttcctgcc

SEQ ID NO: 4547365 - DNA, 25 bp, Homo sapien
cagctcttacctccttgagttccag

SEQ ID NO: 4547366 - DNA, 25 bp, Homo sapien
ctaggtattcaggtgctttagtgct

SEQ ID NO: 4547367 - DNA, 25 bp, Homo sapien
ccttgagttccagaaataagcagaa

SEQ ID NO: 4547368 - DNA, 25 bp, Homo sapien
gtgctttagtgcttgagtggtcaca

SEQ ID NO: 4547369 - DNA, 25 bp, Homo sapien
caagactatgttcaagaggctgcag

SEQ ID NO: 4547370 - DNA, 25 bp, Homo sapien
cagttttccagtcaagagtgcctga

SEQ ID NO: 4547371 - DNA, 25 bp, Homo sapien
aatggcttacttctttagggctgac

SEQ ID NO: 4547372 - DNA, 25 bp, Homo sapien
caaaggcatgaatacacggagtcag

SEQ ID NO: 4547373 - DNA, 25 bp, Homo sapien
ccaactcacactatctagactacag

SEQ ID NO: 4547374 - DNA, 25 bp, Homo sapien
agcctcaaggtactccttcccagat

SEQ ID NO: 4547375 - DNA, 25 bp, Homo sapien
ttaactcaaaggacagaacaactat

SEQ ID NO: 4547376 - DNA, 25 bp, Homo sapien
aggtcaggaactattccaactcaca

SEQ ID NO: 4547377 - DNA, 25 bp, Homo sapien
caagagttgtatgaagcagcctgga

SEQ ID NO: 4547378 - DNA, 25 bp, Homo sapien
tccttggagcgtataagaatttcag

SEQ ID NO: 4547379 - DNA, 25 bp, Homo sapien
tcaaattagactggctctgaacctc

SEQ ID NO: 4547380 - DNA, 25 bp, Homo sapien
cattagcactcctgctcagaatgag

SEQ ID NO: 4547381 - DNA, 25 bp, Homo sapien
cagagaaggcacattatcgtccaag

SEQ ID NO: 4547382 - DNA, 25 bp, Homo sapien
caacatctggttaagtgtaggcagg

SEQ ID NO: 4547383 - DNA, 25 bp, Homo sapien
gcatgtaagggaaagacaacgtcca

SEQ ID NO: 4547384 - DNA, 25 bp, Homo sapien
taatagggaccagattaaggactct

SEQ ID NO: 4547385 - DNA, 25 bp, Homo sapien
aaatgcacccttttatccgcctgag

SEQ ID NO: 4547386 - DNA, 25 bp, Homo sapien
gaaaggctgatcttacagatacatg

SEQ ID NO: 4547387 - DNA, 25 bp, Homo sapien
aagttcaggtcaattggtatctagg

SEQ ID NO: 4547388 - DNA, 25 bp, Homo sapien
cgcctgaggatccattcagtgaata

SEQ ID NO: 4547389 - DNA, 25 bp, Homo sapien
tccaccaaatcacaaaccagacagt

SEQ ID NO: 4547390 - DNA, 25 bp, Homo sapien
tcacaaaccagacagtgaccctctg

SEQ ID NO: 4547391 - DNA, 25 bp, Homo sapien
ctctggcctggttttccatagcgca

SEQ ID NO: 4547392 - DNA, 25 bp, Homo sapien
aacagcgagtgttttgtccaccaaa

SEQ ID NO: 4547393 - DNA, 25 bp, Homo sapien
ctccacctgaagtgaaaagataact

SEQ ID NO: 4547394 - DNA, 25 bp, Homo sapien
gataactacgtggtttaaattcata

SEQ ID NO: 4547395 - DNA, 25 bp, Homo sapien
taagttaagtgaggcaatctgcctg

SEQ ID NO: 4547396 - DNA, 25 bp, Homo sapien
atttaagttaagtgaggcaatctgc

SEQ ID NO: 4547397 - DNA, 25 bp, Homo sapien
tcttgagcttgacctgcgggtccga

SEQ ID NO: 4547398 - DNA, 25 bp, Homo sapien
tcttttgagccttctgccaccggcg

SEQ ID NO: 4547399 - DNA, 25 bp, Homo sapien
taatgtgtcttttccagccctgatg

SEQ ID NO: 4547400 - DNA, 25 bp, Homo sapien
cagatgtgataagctctccatagcc

SEQ ID NO: 4547401 - DNA, 25 bp, Homo sapien
gttaagagaattacaagccagatgc

SEQ ID NO: 4547402 - DNA, 25 bp, Homo sapien
tgggtcagggaatgtcgtgcattac

SEQ ID NO: 4547403 - DNA, 25 bp, Homo sapien
ctcagggttgggtataaatccacct

SEQ ID NO: 4547404 - DNA, 25 bp, Homo sapien
tcaaaaatctgaatgccaccactgg

SEQ ID NO: 4547405 - DNA, 25 bp, Homo sapien
gaaataaatggcaatgctcccccag

SEQ ID NO: 4547406 - DNA, 25 bp, Homo sapien
gccattactgtgcattgtaaataaa

SEQ ID NO: 4547407 - DNA, 25 bp, Homo sapien
tgattaatgaaagtccagtaactgg

SEQ ID NO: 4547408 - DNA, 25 bp, Homo sapien
cccagatgaagacgtgattaatgaa

SEQ ID NO: 4547409 - DNA, 25 bp, Homo sapien
tgtttcgcgagaactgccctgtggc

SEQ ID NO: 4547410 - DNA, 25 bp, Homo sapien
gaagtttgcacctgcctagttgcca

SEQ ID NO: 4547411 - DNA, 25 bp, Homo sapien
taaaatcaaatgcaaacgggaggtc

SEQ ID NO: 4547412 - DNA, 25 bp, Homo sapien
gccaaggtcgagtcagaatcaggag

SEQ ID NO: 4547413 - DNA, 25 bp, Homo sapien
gcataaggaaaggtttagaacaaga

SEQ ID NO: 4547414 - DNA, 25 bp, Homo sapien
tgctcttgtcgccaatggtgtgatc

SEQ ID NO: 4547415 - DNA, 25 bp, Homo sapien
ccaaaactgtttaattgaagaagca

SEQ ID NO: 4547416 - DNA, 25 bp, Homo sapien
tttcatattatctgtggagttccat

SEQ ID NO: 4547417 - DNA, 25 bp, Homo sapien
tgttaaaaagcagattcagctgtcc

SEQ ID NO: 4547418 - DNA, 25 bp, Homo sapien
ggacagtccacgctgttctggtcac

SEQ ID NO: 4547419 - DNA, 25 bp, Homo sapien
tctccagccacgttgtaaaaggccc

SEQ ID NO: 4547420 - DNA, 25 bp, Homo sapien
gtagattccatgcaacacgcaaatg

SEQ ID NO: 4547421 - DNA, 25 bp, Homo sapien
tgggccagaacaggacattatcttg

SEQ ID NO: 4547422 - DNA, 25 bp, Homo sapien
cattatcttgtttgtattcccacaa

SEQ ID NO: 4547423 - DNA, 25 bp, Homo sapien
gggccagaacaggacattatcttgt

SEQ ID NO: 4547424 - DNA, 25 bp, Homo sapien
tatcttgtttgtattcccacaataa

SEQ ID NO: 4547425 - DNA, 25 bp, Homo sapien
caatgttaaaaagggtgatgaacca

SEQ ID NO: 4547426 - DNA, 25 bp, Homo sapien
ggcagtgatgtgtaaacaatgttaa

SEQ ID NO: 4547427 - DNA, 25 bp, Homo sapien
tgatgaaccactggtcataaacagt

SEQ ID NO: 4547428 - DNA, 25 bp, Homo sapien
taaaaagggtgatgaaccactggtc

SEQ ID NO: 4547429 - DNA, 25 bp, Homo sapien
tatgagcatgcaaataaccccagcc

SEQ ID NO: 4547430 - DNA, 25 bp, Homo sapien
tagaaacacccgttagcagatggtc

SEQ ID NO: 4547431 - DNA, 25 bp, Homo sapien
gatgtcagagtaccaatcagtccag

SEQ ID NO: 4547432 - DNA, 25 bp, Homo sapien
cacagatggtcaactgggactaaca

SEQ ID NO: 4547433 - DNA, 25 bp, Homo sapien
tccatgaacaaggagaagcctttgg

SEQ ID NO: 4547434 - DNA, 25 bp, Homo sapien
tcgctggctaagactgcttgcaatc

SEQ ID NO: 4547435 - DNA, 25 bp, Homo sapien
gcacattcggaaataagaccacctt

SEQ ID NO: 4547436 - DNA, 25 bp, Homo sapien
tgtgcaaatgaatagtcgctggcta

SEQ ID NO: 4547437 - DNA, 25 bp, Homo sapien
ctgatgccaacaccaatgtgagcac

SEQ ID NO: 4547438 - DNA, 25 bp, Homo sapien
ggagtggagtgaccctgcagcaaat

SEQ ID NO: 4547439 - DNA, 25 bp, Homo sapien
caagttctaggagatcattcttgac

SEQ ID NO: 4547440 - DNA, 25 bp, Homo sapien
tcttacacatgcaagcaagttctag

SEQ ID NO: 4547441 - DNA, 25 bp, Homo sapien
tctaggagatcattcttgacatcac

SEQ ID NO: 4547442 - DNA, 25 bp, Homo sapien
gattaaggcataatctcctgttatg

SEQ ID NO: 4547443 - DNA, 25 bp, Homo sapien
ctacaatagaatccaactccagctg

SEQ ID NO: 4547444 - DNA, 25 bp, Homo sapien
caaactgtggccatttatgattaag

SEQ ID NO: 4547445 - DNA, 25 bp, Homo sapien
tcacaaactacatggccattggaaa

SEQ ID NO: 4547446 - DNA, 25 bp, Homo sapien
cttcaagaacagttgagtgcaggct

SEQ ID NO: 4547447 - DNA, 25 bp, Homo sapien
gagaactatccagcatgggtcataa

SEQ ID NO: 4547448 - DNA, 25 bp, Homo sapien
gaagcttcaaccacgaccagagaac

SEQ ID NO: 4547449 - DNA, 25 bp, Homo sapien
tgttccaaatggaaacgccctccaa

SEQ ID NO: 4547450 - DNA, 25 bp, Homo sapien
tatatacttcgacttcctcatatgt

SEQ ID NO: 4547451 - DNA, 25 bp, Homo sapien
cctctatatacttcgacttcctcat

SEQ ID NO: 4547452 - DNA, 25 bp, Homo sapien
gacttcctcatatgtccaacaggga

SEQ ID NO: 4547453 - DNA, 25 bp, Homo sapien
tacttcgacttcctcatatgtccaa

SEQ ID NO: 4547454 - DNA, 25 bp, Homo sapien
atgacagagacatatttgggaagcc

SEQ ID NO: 4547455 - DNA, 25 bp, Homo sapien
ggaaggttagctccccatctagaat

SEQ ID NO: 4547456 - DNA, 25 bp, Homo sapien
tagagaagctactacaagcagcaag

SEQ ID NO: 4547457 - DNA, 25 bp, Homo sapien
tgcttggccagtgtctaagtgagct

SEQ ID NO: 4547458 - DNA, 25 bp, Homo sapien
gctacctccaatttcagcacttacg

SEQ ID NO: 4547459 - DNA, 25 bp, Homo sapien
caaactttaatgtctgtccactgct

SEQ ID NO: 4547460 - DNA, 25 bp, Homo sapien
tatctgggttcaatagtaactacat

SEQ ID NO: 4547461 - DNA, 25 bp, Homo sapien
tctggtactgtgcagtagttacaca

SEQ ID NO: 4547462 - DNA, 25 bp, Homo sapien
caaagtcccatatcccattccgtgt

SEQ ID NO: 4547463 - DNA, 25 bp, Homo sapien
tgatcataagcttcatctaggtgct

SEQ ID NO: 4547464 - DNA, 25 bp, Homo sapien
cagaatgaagctagggcattggtat

SEQ ID NO: 4547465 - DNA, 25 bp, Homo sapien
tcatcaccacgcaagagtgagcagg

SEQ ID NO: 4547466 - DNA, 25 bp, Homo sapien
ggaaactatagcatagcttttcact

SEQ ID NO: 4547467 - DNA, 25 bp, Homo sapien
gaaactatagcatagcttttcactt

SEQ ID NO: 4547468 - DNA, 25 bp, Homo sapien
aaactatagcatagcttttcacttt

SEQ ID NO: 4547469 - DNA, 25 bp, Homo sapien
aactatagcatagcttttcactttc

SEQ ID NO: 4547470 - DNA, 25 bp, Homo sapien
cagcattattccctgctatcacaaa

SEQ ID NO: 4547471 - DNA, 25 bp, Homo sapien
tcagtcagcatgttgcaggcataac

SEQ ID NO: 4547472 - DNA, 25 bp, Homo sapien
acatcattcatgtcgtcagtcagca

SEQ ID NO: 4547473 - DNA, 25 bp, Homo sapien
gagttcttctctcacttccacagca

SEQ ID NO: 4547474 - DNA, 25 bp, Homo sapien
cctgttaggacccagatcttaatat

SEQ ID NO: 4547475 - DNA, 25 bp, Homo sapien
ttgtctcctgttaggacccagatct

SEQ ID NO: 4547476 - DNA, 25 bp, Homo sapien
cccagatcttaatattggctagtga

SEQ ID NO: 4547477 - DNA, 25 bp, Homo sapien
caataacaccctcctgtaacttatc

SEQ ID NO: 4547478 - DNA, 25 bp, Homo sapien
gccactctttaaagtacttgtcatc

SEQ ID NO: 4547479 - DNA, 25 bp, Homo sapien
tatagcccagctattcgttcatccc

SEQ ID NO: 4547480 - DNA, 25 bp, Homo sapien
catccaggtctctgtatgcgatggc

SEQ ID NO: 4547481 - DNA, 25 bp, Homo sapien
gatggccaaggtccgaaggccttcc

SEQ ID NO: 4547482 - DNA, 25 bp, Homo sapien
cattgtgctaaccttaagacggagg

SEQ ID NO: 4547483 - DNA, 25 bp, Homo sapien
gggccattgtgctaaccttaagacg

SEQ ID NO: 4547484 - DNA, 25 bp, Homo sapien
gcaaaagggccattgtgctaacctt

SEQ ID NO: 4547485 - DNA, 25 bp, Homo sapien
tgtgctaaccttaagacggaggcac

SEQ ID NO: 4547486 - DNA, 25 bp, Homo sapien
caaaaggacttcattggaaggatga

SEQ ID NO: 4547487 - DNA, 25 bp, Homo sapien
aacagaatagtatctgctcctttgg

SEQ ID NO: 4547488 - DNA, 25 bp, Homo sapien
taaagctttatctgtccttctgggt

SEQ ID NO: 4547489 - DNA, 25 bp, Homo sapien
actgaggtggtctgacgtcaaagac

SEQ ID NO: 4547490 - DNA, 25 bp, Homo sapien
cagtgcctttggttaggtcattacc

SEQ ID NO: 4547491 - DNA, 25 bp, Homo sapien
gccagtagtaagacactcagtgcct

SEQ ID NO: 4547492 - DNA, 25 bp, Homo sapien
aaattagattctcccagagctccag

SEQ ID NO: 4547493 - DNA, 25 bp, Homo sapien
gggcataatgttttagccagtagta

SEQ ID NO: 4547494 - DNA, 25 bp, Homo sapien
gaatattctagagatgttaaggcct

SEQ ID NO: 4547495 - DNA, 25 bp, Homo sapien
atattctagagatgttaaggcctga

SEQ ID NO: 4547496 - DNA, 25 bp, Homo sapien
acagggtgacaatagaatattctag

SEQ ID NO: 4547497 - DNA, 25 bp, Homo sapien
tagaatattctagagatgttaaggc

SEQ ID NO: 4547498 - DNA, 25 bp, Homo sapien
taattgataagtaactagtgttccc

SEQ ID NO: 4547499 - DNA, 25 bp, Homo sapien
tgttgttgaaatccaaaaaggcaag

SEQ ID NO: 4547500 - DNA, 25 bp, Homo sapien
ggcagtcactagagccccttcatca

SEQ ID NO: 4547501 - DNA, 25 bp, Homo sapien
cccaaaatttctagcggcagtcact

SEQ ID NO: 4547502 - DNA, 25 bp, Homo sapien
gaattcatgaactttgggatcaccc

SEQ ID NO: 4547503 - DNA, 25 bp, Homo sapien
tctatccgcttgagatttgactgag

SEQ ID NO: 4547504 - DNA, 25 bp, Homo sapien
tgacattacagtgtggcagagagca

SEQ ID NO: 4547505 - DNA, 25 bp, Homo sapien
tccatcagatggtggtcaaagaact

SEQ ID NO: 4547506 - DNA, 25 bp, Homo sapien
tataagagctttatcagctgcagag

SEQ ID NO: 4547507 - DNA, 25 bp, Homo sapien
atataagagctttatcagctgcaga

SEQ ID NO: 4547508 - DNA, 25 bp, Homo sapien
cttgattccctatccaatttcccag

SEQ ID NO: 4547509 - DNA, 25 bp, Homo sapien
gcagtctcattgatgtgtctaatac

SEQ ID NO: 4547510 - DNA, 25 bp, Homo sapien
gtagacatctactagttccacttga

SEQ ID NO: 4547511 - DNA, 25 bp, Homo sapien
gctgaatatccttggtaatttgcag

SEQ ID NO: 4547512 - DNA, 25 bp, Homo sapien
caagagaaccatcaagagagtaaac

SEQ ID NO: 4547513 - DNA, 25 bp, Homo sapien
caaaacaattgataagtaggaccta

SEQ ID NO: 4547514 - DNA, 25 bp, Homo sapien
taatatcgagaattgataaggaact

SEQ ID NO: 4547515 - DNA, 25 bp, Homo sapien
tgcacagcaagagaaccatcaagag

SEQ ID NO: 4547516 - DNA, 25 bp, Homo sapien
tatatatgacctatgatcagaacac

SEQ ID NO: 4547517 - DNA, 25 bp, Homo sapien
tcttaagggtcctgaaacattaata

SEQ ID NO: 4547518 - DNA, 25 bp, Homo sapien
ttgaatgagtcaaaaaagagtactt

SEQ ID NO: 4547519 - DNA, 25 bp, Homo sapien
gaccatcaatgtaaccaaaaactag

SEQ ID NO: 4547520 - DNA, 25 bp, Homo sapien
tcttctgatccaggtcatcatgtac

SEQ ID NO: 4547521 - DNA, 25 bp, Homo sapien
atttctgtcttctgatccaggtcat

SEQ ID NO: 4547522 - DNA, 25 bp, Homo sapien
tgtcttctgatccaggtcatcatgt

SEQ ID NO: 4547523 - DNA, 25 bp, Homo sapien
tgatccaggtcatcatgtacttcac

SEQ ID NO: 4547524 - DNA, 25 bp, Homo sapien
caatctgcaaaacggccagcgttgg

SEQ ID NO: 4547525 - DNA, 25 bp, Homo sapien
acattgggagaccagaggaatccac

SEQ ID NO: 4547526 - DNA, 25 bp, Homo sapien
tcagaatcccatgaagggacattgg

SEQ ID NO: 4547527 - DNA, 25 bp, Homo sapien
gaatccacagaaagttccgcagagc

SEQ ID NO: 4547528 - DNA, 25 bp, Homo sapien
ccagttcctcattgagcgtggtcgt

SEQ ID NO: 4547529 - DNA, 25 bp, Homo sapien
catgatgttttgagtgagggtaccc

SEQ ID NO: 4547530 - DNA, 25 bp, Homo sapien
tcgttcgagccactgcaggtattgc

SEQ ID NO: 4547531 - DNA, 25 bp, Homo sapien
gaaaatgtactcaatctgccccagt

SEQ ID NO: 4547532 - DNA, 25 bp, Homo sapien
tcccagtttataaaataactgtgtc

SEQ ID NO: 4547533 - DNA, 25 bp, Homo sapien
gttaacagattaaacagctaagctg

SEQ ID NO: 4547534 - DNA, 25 bp, Homo sapien
taagctgtcccatttgtaacagatg

SEQ ID NO: 4547535 - DNA, 25 bp, Homo sapien
caagacatctattgcactgctgaaa

SEQ ID NO: 4547536 - DNA, 25 bp, Homo sapien
taacagatgttgcagatcataagca

SEQ ID NO: 4547537 - DNA, 25 bp, Homo sapien
aaggaaatgggtacaactgtattga

SEQ ID NO: 4547538 - DNA, 25 bp, Homo sapien
gggtacaactgtattgagaataata

SEQ ID NO: 4547539 - DNA, 25 bp, Homo sapien
aatgttaagaatccggagaacacag

SEQ ID NO: 4547540 - DNA, 25 bp, Homo sapien
gaataataatatatgaccagaatgt

SEQ ID NO: 4547541 - DNA, 25 bp, Homo sapien
cagtttgactctcccagattgaatt

SEQ ID NO: 4547542 - DNA, 25 bp, Homo sapien
ccagtttgactctcccagattgaat

SEQ ID NO: 4547543 - DNA, 25 bp, Homo sapien
cccagtttgactctcccagattgaa

SEQ ID NO: 4547544 - DNA, 25 bp, Homo sapien
tcccaagcatatcagaaacccaaaa

SEQ ID NO: 4547545 - DNA, 25 bp, Homo sapien
cccaagcatatcagaaacccaaaaa

SEQ ID NO: 4547546 - DNA, 25 bp, Homo sapien
ccaagcatatcagaaacccaaaaat

SEQ ID NO: 4547547 - DNA, 25 bp, Homo sapien
tgtggttaaggttaacttgaactca

SEQ ID NO: 4547548 - DNA, 25 bp, Homo sapien
gaactcaaaattagtcatatcaaca

SEQ ID NO: 4547549 - DNA, 25 bp, Homo sapien
tctaattacgcatctaactccaaga

SEQ ID NO: 4547550 - DNA, 25 bp, Homo sapien
gcaaacctcttcttaccattaatca

SEQ ID NO: 4547551 - DNA, 25 bp, Homo sapien
gataaattctaccactggttgagaa

SEQ ID NO: 4547552 - DNA, 25 bp, Homo sapien
tcatcaatctatcaatgcttgtcct

SEQ ID NO: 4547553 - DNA, 25 bp, Homo sapien
agagtattcatcaatctatcaatgc

SEQ ID NO: 4547554 - DNA, 25 bp, Homo sapien
catagtactagagtattcatcaatc

SEQ ID NO: 4547555 - DNA, 25 bp, Homo sapien
ctatcaatgcttgtccttttaaact

SEQ ID NO: 4547556 - DNA, 25 bp, Homo sapien
tattctgcattagtttagtgtcagg

SEQ ID NO: 4547557 - DNA, 25 bp, Homo sapien
ttctgcattagtttagtgtcaggac

SEQ ID NO: 4547558 - DNA, 25 bp, Homo sapien
ctattctgcattagtttagtgtcag

SEQ ID NO: 4547559 - DNA, 25 bp, Homo sapien
cactattctgcattagtttagtgtc

SEQ ID NO: 4547560 - DNA, 25 bp, Homo sapien
gaaagcactgcgctcatcagaacac

SEQ ID NO: 4547561 - DNA, 25 bp, Homo sapien
tggtgtacgttgcaggaaaggttcc

SEQ ID NO: 4547562 - DNA, 25 bp, Homo sapien
cacgactttgcatggaatgaaagca

SEQ ID NO: 4547563 - DNA, 25 bp, Homo sapien
tacaatcttaagtcaactccagagc

SEQ ID NO: 4547564 - DNA, 25 bp, Homo sapien
attgttgagggaatgcttgctgtct

SEQ ID NO: 4547565 - DNA, 25 bp, Homo sapien
gcagcctctcaggattatcttctca

SEQ ID NO: 4547566 - DNA, 25 bp, Homo sapien
aacttgttgttaggcacctcacaga

SEQ ID NO: 4547567 - DNA, 25 bp, Homo sapien
ctaacttgttgttaggcacctcaca

SEQ ID NO: 4547568 - DNA, 25 bp, Homo sapien
ctgatagtgcatggcggacttttag

SEQ ID NO: 4547569 - DNA, 25 bp, Homo sapien
tgctccaagttctgaagtaactgat

SEQ ID NO: 4547570 - DNA, 25 bp, Homo sapien
accctgcaagtctgctgatatctgc

SEQ ID NO: 4547571 - DNA, 25 bp, Homo sapien
tgcatggcggacttttaggttcgtt

SEQ ID NO: 4547572 - DNA, 25 bp, Homo sapien
taatcttattaatcaaaacctgctg

SEQ ID NO: 4547573 - DNA, 25 bp, Homo sapien
ccaactcaaggaatacgcattgcta

SEQ ID NO: 4547574 - DNA, 25 bp, Homo sapien
taggacaatatgagtccaactcaag

SEQ ID NO: 4547575 - DNA, 25 bp, Homo sapien
ggcatccaatcttaaccttccgtaa

SEQ ID NO: 4547576 - DNA, 25 bp, Homo sapien
atgtggctcactacttgataggaga

SEQ ID NO: 4547577 - DNA, 25 bp, Homo sapien
tttcaacataacagagaccatgtgg

SEQ ID NO: 4547578 - DNA, 25 bp, Homo sapien
gctcactacttgataggagaagtaa

SEQ ID NO: 4547579 - DNA, 25 bp, Homo sapien
gtttcaacataacagagaccatgtg

SEQ ID NO: 4547580 - DNA, 25 bp, Homo sapien
catcctggtagctctctaaattggc

SEQ ID NO: 4547581 - DNA, 25 bp, Homo sapien
tcacaattcagttttagcatcctgg

SEQ ID NO: 4547582 - DNA, 25 bp, Homo sapien
tgtcatcagttaaaagcagggagca

SEQ ID NO: 4547583 - DNA, 25 bp, Homo sapien
ccaattgagctttgcatatcaccta

SEQ ID NO: 4547584 - DNA, 25 bp, Homo sapien
tagcaaggctcttacacaactctga

SEQ ID NO: 4547585 - DNA, 25 bp, Homo sapien
gaggcagaaattctctgacttgtca

SEQ ID NO: 4547586 - DNA, 25 bp, Homo sapien
agtgggtttgcattagcaaggctct

SEQ ID NO: 4547587 - DNA, 25 bp, Homo sapien
tcaaagagccacagaagcttgttga

SEQ ID NO: 4547588 - DNA, 25 bp, Homo sapien
gctgacccccataggttccgggcta

SEQ ID NO: 4547589 - DNA, 25 bp, Homo sapien
tgccatctggcggtcagattctctc

SEQ ID NO: 4547590 - DNA, 25 bp, Homo sapien
taggttccgggctaactgttcttgc

SEQ ID NO: 4547591 - DNA, 25 bp, Homo sapien
gaacatgtgactgaggcgccactgc

SEQ ID NO: 4547592 - DNA, 25 bp, Homo sapien
ctgctttcctactccttgatggcct

SEQ ID NO: 4547593 - DNA, 25 bp, Homo sapien
actccttgatggccttgctgcactc

SEQ ID NO: 4547594 - DNA, 25 bp, Homo sapien
ttcctactccttgatggccttgctg

SEQ ID NO: 4547595 - DNA, 25 bp, Homo sapien
gatggccttgctgcactcccttcat

SEQ ID NO: 4547596 - DNA, 25 bp, Homo sapien
ctgctgttcccttttgttaacctcg

SEQ ID NO: 4547597 - DNA, 25 bp, Homo sapien
ctgaggcctgctgttcccttttgtt

SEQ ID NO: 4547598 - DNA, 25 bp, Homo sapien
gaggcctgctgttcccttttgttaa

SEQ ID NO: 4547599 - DNA, 25 bp, Homo sapien
ctctgctgaggcctgctgttccctt

SEQ ID NO: 4547600 - DNA, 25 bp, Homo sapien
cacagcatggaacggatttttgaga

SEQ ID NO: 4547601 - DNA, 25 bp, Homo sapien
caccaagtgttggagaacaggcaaa

SEQ ID NO: 4547602 - DNA, 25 bp, Homo sapien
ggagctaccttgattccacgcacag

SEQ ID NO: 4547603 - DNA, 25 bp, Homo sapien
tgtcagcttagaagagaatcacagc

SEQ ID NO: 4547604 - DNA, 25 bp, Homo sapien
ggttattttctaatttaatgatgtc

SEQ ID NO: 4547605 - DNA, 25 bp, Homo sapien
tttaatgatgtctcccactttgaca

SEQ ID NO: 4547606 - DNA, 25 bp, Homo sapien
tctaatttaatgatgtctcccactt

SEQ ID NO: 4547607 - DNA, 25 bp, Homo sapien
tgtctcccactttgacattcatcca

SEQ ID NO: 4547608 - DNA, 25 bp, Homo sapien
attccctgaaatgtaaaccagcttt

SEQ ID NO: 4547609 - DNA, 25 bp, Homo sapien
gttagtcagggctgtccaaaaccag

SEQ ID NO: 4547610 - DNA, 25 bp, Homo sapien
cacctgggccagtataccatgatgc

SEQ ID NO: 4547611 - DNA, 25 bp, Homo sapien
tgtccattgaatttggcccctgatg

SEQ ID NO: 4547612 - DNA, 25 bp, Homo sapien
tgaaacatgaaagcagacactccct

SEQ ID NO: 4547613 - DNA, 25 bp, Homo sapien
tgttctcagggttcatgtttaaagc

SEQ ID NO: 4547614 - DNA, 25 bp, Homo sapien
cactccctggctctacatgtgtgat

SEQ ID NO: 4547615 - DNA, 25 bp, Homo sapien
ctctacatgtgtgatgcagctgttc

SEQ ID NO: 4547616 - DNA, 25 bp, Homo sapien
tcttctagggggacataggatggcc

SEQ ID NO: 4547617 - DNA, 25 bp, Homo sapien
actcctgtagatgaattgcagtata

SEQ ID NO: 4547618 - DNA, 25 bp, Homo sapien
gcaccttcaaactttgcttttgcca

SEQ ID NO: 4547619 - DNA, 25 bp, Homo sapien
tgaaaactcctgtagatgaattgca

SEQ ID NO: 4547620 - DNA, 25 bp, Homo sapien
tcccaccagcaacatggattcctga

SEQ ID NO: 4547621 - DNA, 25 bp, Homo sapien
caatgggttcatcaaggtcatcctt

SEQ ID NO: 4547622 - DNA, 25 bp, Homo sapien
cctttccatgttctaatgctcctga

SEQ ID NO: 4547623 - DNA, 25 bp, Homo sapien
tgcaagtgcattgctaaagcttgag

SEQ ID NO: 4547624 - DNA, 25 bp, Homo sapien
tttttctcaggaccaggataaatct

SEQ ID NO: 4547625 - DNA, 25 bp, Homo sapien
tcttccttacaattaccagagtact

SEQ ID NO: 4547626 - DNA, 25 bp, Homo sapien
aaatcttcttccttacaattaccag

SEQ ID NO: 4547627 - DNA, 25 bp, Homo sapien
tcaggaccaggataaatcttcttcc

SEQ ID NO: 4547628 - DNA, 25 bp, Homo sapien
gagctgcacattcctaatgagatga

SEQ ID NO: 4547629 - DNA, 25 bp, Homo sapien
caaggttttctaccaccaggcattg

SEQ ID NO: 4547630 - DNA, 25 bp, Homo sapien
gctcttccacaatgtcactgccaga

SEQ ID NO: 4547631 - DNA, 25 bp, Homo sapien
caacaaaatgtgagagtatcctggc

SEQ ID NO: 4547632 - DNA, 25 bp, Homo sapien
gcacttcagactgccgattattcac

SEQ ID NO: 4547633 - DNA, 25 bp, Homo sapien
gactgccgattattcacttgattat

SEQ ID NO: 4547634 - DNA, 25 bp, Homo sapien
gctgttgatgagcacttcagactgc

SEQ ID NO: 4547635 - DNA, 25 bp, Homo sapien
gatgagcacttcagactgccgatta

SEQ ID NO: 4547636 - DNA, 25 bp, Homo sapien
aatggtggtaaaccaggtcaaggag

SEQ ID NO: 4547637 - DNA, 25 bp, Homo sapien
tctttgacagctgtcatagttatca

SEQ ID NO: 4547638 - DNA, 25 bp, Homo sapien
gcacaatggtggtaaaccaggtcaa

SEQ ID NO: 4547639 - DNA, 25 bp, Homo sapien
tatcaccaggaccaaaggcacaatg

SEQ ID NO: 4547640 - DNA, 25 bp, Homo sapien
atttcgatgtgtggatacgattatc

SEQ ID NO: 4547641 - DNA, 25 bp, Homo sapien
gaaaataggcatttgccactctttg

SEQ ID NO: 4547642 - DNA, 25 bp, Homo sapien
gagaatattatatttcgatgtgtgg

SEQ ID NO: 4547643 - DNA, 25 bp, Homo sapien
taattggcaagaaggtgagaatatt

SEQ ID NO: 4547644 - DNA, 25 bp, Homo sapien
ataggggcaatggaaagacgacagt

SEQ ID NO: 4547645 - DNA, 25 bp, Homo sapien
cgacagtgctcttctacgaacgctg

SEQ ID NO: 4547646 - DNA, 25 bp, Homo sapien
acagctttccaggataggggcaatg

SEQ ID NO: 4547647 - DNA, 25 bp, Homo sapien
tgataccaggaagaacccctggtag

SEQ ID NO: 4547648 - DNA, 25 bp, Homo sapien
tgacaagacagatcacctcaagcct

SEQ ID NO: 4547649 - DNA, 25 bp, Homo sapien
ccagtactgtaaaatgagttgccta

SEQ ID NO: 4547650 - DNA, 25 bp, Homo sapien
gctaaaaggcacttgcctcggccga

SEQ ID NO: 4547651 - DNA, 25 bp, Homo sapien
tgctatcaatgagacaagggacttg

SEQ ID NO: 4547652 - DNA, 25 bp, Homo sapien
tacaatcaggactgctagagacacc

SEQ ID NO: 4547653 - DNA, 25 bp, Homo sapien
cagtacaatcaggactgctagagac

SEQ ID NO: 4547654 - DNA, 25 bp, Homo sapien
tcaggactgctagagacaccaagtc

SEQ ID NO: 4547655 - DNA, 25 bp, Homo sapien
caatcaggactgctagagacaccaa

SEQ ID NO: 4547656 - DNA, 25 bp, Homo sapien
cagccccataggtgaggatctgcat

SEQ ID NO: 4547657 - DNA, 25 bp, Homo sapien
ccagaaacccataacaaatgcaagt

SEQ ID NO: 4547658 - DNA, 25 bp, Homo sapien
taattccaacgtgtcacactgcttg

SEQ ID NO: 4547659 - DNA, 25 bp, Homo sapien
ctttagttggtgcatctggtcatca

SEQ ID NO: 4547660 - DNA, 25 bp, Homo sapien
gaagcatgttgatcagcctcctgag

SEQ ID NO: 4547661 - DNA, 25 bp, Homo sapien
catgcctttcatatggtgagcccta

SEQ ID NO: 4547662 - DNA, 25 bp, Homo sapien
tacaaggcacaaacgaaataaggct

SEQ ID NO: 4547663 - DNA, 25 bp, Homo sapien
tgttcagtacaagcctaaagcccac

SEQ ID NO: 4547664 - DNA, 25 bp, Homo sapien
cctgagttgcttagagaaaatccct

SEQ ID NO: 4547665 - DNA, 25 bp, Homo sapien
taccaactactcttagtgggagaga

SEQ ID NO: 4547666 - DNA, 25 bp, Homo sapien
taaagttctagaagacatgcatccc

SEQ ID NO: 4547667 - DNA, 25 bp, Homo sapien
tcactaagtgctaccaaaaaggtcc

SEQ ID NO: 4547668 - DNA, 25 bp, Homo sapien
tatgtgttatgtgtgtttcacttac

SEQ ID NO: 4547669 - DNA, 25 bp, Homo sapien
tttcattatattcacggtcattggc

SEQ ID NO: 4547670 - DNA, 25 bp, Homo sapien
cgcatactggaacttttcattatat

SEQ ID NO: 4547671 - DNA, 25 bp, Homo sapien
cattggctttcactatccgttccac

SEQ ID NO: 4547672 - DNA, 25 bp, Homo sapien
ttcacggtcattggctttcactatc

SEQ ID NO: 4547673 - DNA, 25 bp, Homo sapien
tgcagggtgttttgtctgtccagta

SEQ ID NO: 4547674 - DNA, 25 bp, Homo sapien
cagggtgttttgtctgtccagtaac

SEQ ID NO: 4547675 - DNA, 25 bp, Homo sapien
catttgcagggtgttttgtctgtcc

SEQ ID NO: 4547676 - DNA, 25 bp, Homo sapien
ttgtctgtccagtaaccacctgcat

SEQ ID NO: 4547677 - DNA, 25 bp, Homo sapien
taatggttgtatggaagggacttaa

SEQ ID NO: 4547678 - DNA, 25 bp, Homo sapien
caaatactggatcaaaggggtgttc

SEQ ID NO: 4547679 - DNA, 25 bp, Homo sapien
gggtgttctgtagtaatggttgtat

SEQ ID NO: 4547680 - DNA, 25 bp, Homo sapien
tctgtagtaatggttgtatggaagg

SEQ ID NO: 4547681 - DNA, 25 bp, Homo sapien
tcacatcagtcttgcaggtcatggg

SEQ ID NO: 4547682 - DNA, 25 bp, Homo sapien
caagtccaagaagaagtgactggcc

SEQ ID NO: 4547683 - DNA, 25 bp, Homo sapien
taaagatgtgtcagtcccactcatg

SEQ ID NO: 4547684 - DNA, 25 bp, Homo sapien
gcccctctggcaaagataccacttg

SEQ ID NO: 4547685 - DNA, 25 bp, Homo sapien
gatctttcaccaggtctcaacaggt

SEQ ID NO: 4547686 - DNA, 25 bp, Homo sapien
tctttcaccaggtctcaacaggtgg

SEQ ID NO: 4547687 - DNA, 25 bp, Homo sapien
acattattatacctgatctttcacc

SEQ ID NO: 4547688 - DNA, 25 bp, Homo sapien
cagaacattattatacctgatcttt

SEQ ID NO: 4547689 - DNA, 25 bp, Homo sapien
cgaaataccaccactgacactcgct

SEQ ID NO: 4547690 - DNA, 25 bp, Homo sapien
tgacactcgctccacctctaaaggt

SEQ ID NO: 4547691 - DNA, 25 bp, Homo sapien
cattgaacttttggaacagtaaaga

SEQ ID NO: 4547692 - DNA, 25 bp, Homo sapien
tccacctctaaaggttgtcagagta

SEQ ID NO: 4547693 - DNA, 25 bp, Homo sapien
cccagagatgggcgatccagatgaa

SEQ ID NO: 4547694 - DNA, 25 bp, Homo sapien
cagagatgggcgatccagatgaagc

SEQ ID NO: 4547695 - DNA, 25 bp, Homo sapien
agagatgggcgatccagatgaagca

SEQ ID NO: 4547696 - DNA, 25 bp, Homo sapien
accccagagatgggcgatccagatg

SEQ ID NO: 4547697 - DNA, 25 bp, Homo sapien
tatttgtgaaaccttagtcaccaag

SEQ ID NO: 4547698 - DNA, 25 bp, Homo sapien
taaccattgaatgctacccatctac

SEQ ID NO: 4547699 - DNA, 25 bp, Homo sapien
gaaaagaaacagatcgttccaacca

SEQ ID NO: 4547700 - DNA, 25 bp, Homo sapien
agcccacagctaaatttccacttca

SEQ ID NO: 4547701 - DNA, 25 bp, Homo sapien
gatcaaacaggtatccattccgtga

SEQ ID NO: 4547702 - DNA, 25 bp, Homo sapien
ccgtgaccatgccaaggagaaaagc

SEQ ID NO: 4547703 - DNA, 25 bp, Homo sapien
ggagaaaagcaaggctactctgaaa

SEQ ID NO: 4547704 - DNA, 25 bp, Homo sapien
tgagatcaactcctggaaaaacact

SEQ ID NO: 4547705 - DNA, 25 bp, Homo sapien
gaagaggaagaccttacaagaaagc

SEQ ID NO: 4547706 - DNA, 25 bp, Homo sapien
ctagatggcaatcagaatcagcatc

SEQ ID NO: 4547707 - DNA, 25 bp, Homo sapien
tcccctagttgcctgctcctgctga

SEQ ID NO: 4547708 - DNA, 25 bp, Homo sapien
gctcctgctgacaggacagaactgg

SEQ ID NO: 4547709 - DNA, 25 bp, Homo sapien
tagtaggcaaagcaatgacacttct

SEQ ID NO: 4547710 - DNA, 25 bp, Homo sapien
taaccagagcaagctaatcccctgc

SEQ ID NO: 4547711 - DNA, 25 bp, Homo sapien
tgaaagctaagcatactcaagtgac

SEQ ID NO: 4547712 - DNA, 25 bp, Homo sapien
ggatgcaaacattaaccctgatggt

SEQ ID NO: 4547713 - DNA, 25 bp, Homo sapien
gttaagtcatgccagagaccagcga

SEQ ID NO: 4547714 - DNA, 25 bp, Homo sapien
taagtcatgccagagaccagcgaaa

SEQ ID NO: 4547715 - DNA, 25 bp, Homo sapien
atgccagagaccagcgaaagaaggg

SEQ ID NO: 4547716 - DNA, 25 bp, Homo sapien
ttatggagttaagtcatgccagaga

SEQ ID NO: 4547717 - DNA, 25 bp, Homo sapien
catggaaaatctaggctaagcaccc

SEQ ID NO: 4547718 - DNA, 25 bp, Homo sapien
agatgcttgaggctatgttcctgcc

SEQ ID NO: 4547719 - DNA, 25 bp, Homo sapien
aaagctgggagcagtatggaacact

SEQ ID NO: 4547720 - DNA, 25 bp, Homo sapien
tccagaggacctggcatggatccaa

SEQ ID NO: 4547721 - DNA, 25 bp, Homo sapien
gagaggagagggacacccaaaggcc

SEQ ID NO: 4547722 - DNA, 25 bp, Homo sapien
agcaggagaggagagggacacccaa

SEQ ID NO: 4547723 - DNA, 25 bp, Homo sapien
ggagaggagagggacacccaaaggc

SEQ ID NO: 4547724 - DNA, 25 bp, Homo sapien
caggagaggagagggacacccaaag

SEQ ID NO: 4547725 - DNA, 25 bp, Homo sapien
ttctgtgaagttgctatctgggcat

SEQ ID NO: 4547726 - DNA, 25 bp, Homo sapien
acagccttctgtgaagttgctatct

SEQ ID NO: 4547727 - DNA, 25 bp, Homo sapien
catatacaacactgtcatataattt

SEQ ID NO: 4547728 - DNA, 25 bp, Homo sapien
tctgtgaagttgctatctgggcatg

SEQ ID NO: 4547729 - DNA, 25 bp, Homo sapien
atgttttgagagaagctgtctagat

SEQ ID NO: 4547730 - DNA, 25 bp, Homo sapien
aaggaatgttttgagagaagctgtc

SEQ ID NO: 4547731 - DNA, 25 bp, Homo sapien
ggaatgttttgagagaagctgtcta

SEQ ID NO: 4547732 - DNA, 25 bp, Homo sapien
aatgttttgagagaagctgtctaga

SEQ ID NO: 4547733 - DNA, 25 bp, Homo sapien
tccccttttcttaagtctgactcca

SEQ ID NO: 4547734 - DNA, 25 bp, Homo sapien
ccccttttcttaagtctgactccat

SEQ ID NO: 4547735 - DNA, 25 bp, Homo sapien
gaggtatcagtacaaattcgaggtc

SEQ ID NO: 4547736 - DNA, 25 bp, Homo sapien
tattttgtccattgaaagagcctag

SEQ ID NO: 4547737 - DNA, 25 bp, Homo sapien
ctagaagcaataaccctcctgcaga

SEQ ID NO: 4547738 - DNA, 25 bp, Homo sapien
tacaattacaagaattagtcgggtg

SEQ ID NO: 4547739 - DNA, 25 bp, Homo sapien
agtaatcctgtcttgcccctaaact

SEQ ID NO: 4547740 - DNA, 25 bp, Homo sapien
tcagtatgcacacccagtaatcctg

SEQ ID NO: 4547741 - DNA, 25 bp, Homo sapien
aatcctgtcttgcccctaaacttct

SEQ ID NO: 4547742 - DNA, 25 bp, Homo sapien
cagtaatcctgtcttgcccctaaac

SEQ ID NO: 4547743 - DNA, 25 bp, Homo sapien
aattctactgctttctcctcaggga

SEQ ID NO: 4547744 - DNA, 25 bp, Homo sapien
ggttaattctactgctttctcctca

SEQ ID NO: 4547745 - DNA, 25 bp, Homo sapien
tttggttaattctactgctttctcc

SEQ ID NO: 4547746 - DNA, 25 bp, Homo sapien
ttaattctactgctttctcctcagg

SEQ ID NO: 4547747 - DNA, 25 bp, Homo sapien
agctggacgtgactgccacaggcat

SEQ ID NO: 4547748 - DNA, 25 bp, Homo sapien
taaaattatgaactcgccccaagaa

SEQ ID NO: 4547749 - DNA, 25 bp, Homo sapien
ggatcatgctggcttaaactcttcg

SEQ ID NO: 4547750 - DNA, 25 bp, Homo sapien
tgtatcctattgtgggtcatgaacc

SEQ ID NO: 4547751 - DNA, 25 bp, Homo sapien
tgaagtatatcctcagactctggct

SEQ ID NO: 4547752 - DNA, 25 bp, Homo sapien
cactgttgcaactgagggagcgcac

SEQ ID NO: 4547753 - DNA, 25 bp, Homo sapien
aaagcagtcatcaactgggtccagc

SEQ ID NO: 4547754 - DNA, 25 bp, Homo sapien
tgcttgatgatcttcctggcctgga

SEQ ID NO: 4547755 - DNA, 25 bp, Homo sapien
tcccacacgctgaggctgcttgatg

SEQ ID NO: 4547756 - DNA, 25 bp, Homo sapien
gagtggcagcatctcgaatgagatt

SEQ ID NO: 4547757 - DNA, 25 bp, Homo sapien
agatgaggttcccaacccgagggct

SEQ ID NO: 4547758 - DNA, 25 bp, Homo sapien
gctctggcacccctgatttgggaga

SEQ ID NO: 4547759 - DNA, 25 bp, Homo sapien
atgaggttcccaacccgagggctgg

SEQ ID NO: 4547760 - DNA, 25 bp, Homo sapien
ggaagagacggccagctttagctat

SEQ ID NO: 4547761 - DNA, 25 bp, Homo sapien
cattttctgtgagacaattaggacc

SEQ ID NO: 4547762 - DNA, 25 bp, Homo sapien
taacttgtcctggatagtggccggg

SEQ ID NO: 4547763 - DNA, 25 bp, Homo sapien
gatgtcatccctagtggtaaactgg

SEQ ID NO: 4547764 - DNA, 25 bp, Homo sapien
gaagggtcgtttctgaccagagatt

SEQ ID NO: 4547765 - DNA, 25 bp, Homo sapien
aagggtcgtttctgaccagagattc

SEQ ID NO: 4547766 - DNA, 25 bp, Homo sapien
ggtgggagcaattgagcttcccacc

SEQ ID NO: 4547767 - DNA, 25 bp, Homo sapien
gggagcaattgagcttcccacctca

SEQ ID NO: 4547768 - DNA, 25 bp, Homo sapien
gtgggagcaattgagcttcccacct

SEQ ID NO: 4547769 - DNA, 25 bp, Homo sapien
tgggagcaattgagcttcccacctc

SEQ ID NO: 4547770 - DNA, 25 bp, Homo sapien
tcacgaaccagagtttaacagagcg

SEQ ID NO: 4547771 - DNA, 25 bp, Homo sapien
gaaggaccgaatcacgaaccagagt

SEQ ID NO: 4547772 - DNA, 25 bp, Homo sapien
taacagagcgaaaccgtcggctcag

SEQ ID NO: 4547773 - DNA, 25 bp, Homo sapien
ttcaccccgaaggaccgaatcacga

SEQ ID NO: 4547774 - DNA, 25 bp, Homo sapien
tgtgagattcctgtgatctgagagc

SEQ ID NO: 4547775 - DNA, 25 bp, Homo sapien
gagagccatcactccagctgtcaga

SEQ ID NO: 4547776 - DNA, 25 bp, Homo sapien
gctgtcagatttcaaatgagcaccc

SEQ ID NO: 4547777 - DNA, 25 bp, Homo sapien
caaatgagcacccaaatttctgccg

SEQ ID NO: 4547778 - DNA, 25 bp, Homo sapien
ccttgtaaggtccttgcagggctcc

SEQ ID NO: 4547779 - DNA, 25 bp, Homo sapien
ctaaggtaacgctccctccactggt

SEQ ID NO: 4547780 - DNA, 25 bp, Homo sapien
caaggctaaggtaacgctccctcca

SEQ ID NO: 4547781 - DNA, 25 bp, Homo sapien
ctctgtgtccttgtaaggtccttgc

SEQ ID NO: 4547782 - DNA, 25 bp, Homo sapien
cgctgcaattctaatccaaaagctt

SEQ ID NO: 4547783 - DNA, 25 bp, Homo sapien
ctgcaattctaatccaaaagcttca

SEQ ID NO: 4547784 - DNA, 25 bp, Homo sapien
gctgcaattctaatccaaaagcttc

SEQ ID NO: 4547785 - DNA, 25 bp, Homo sapien
aggctgcccgtccctggccactcac

SEQ ID NO: 4547786 - DNA, 25 bp, Homo sapien
caggctgcccgtccctggccactca

SEQ ID NO: 4547787 - DNA, 25 bp, Homo sapien
catgcctgaggtagatgggattcac

SEQ ID NO: 4547788 - DNA, 25 bp, Homo sapien
gccacgcctgagttggcatgcctga

SEQ ID NO: 4547789 - DNA, 25 bp, Homo sapien
ctgaaggtctgctgcagcttgtact

SEQ ID NO: 4547790 - DNA, 25 bp, Homo sapien
catgaagtcggtggccacgcctgag

SEQ ID NO: 4547791 - DNA, 25 bp, Homo sapien
ggcatactcaatccccttcagaaac

SEQ ID NO: 4547792 - DNA, 25 bp, Homo sapien
gaacccagtacagtcaaaatgcacc

SEQ ID NO: 4547793 - DNA, 25 bp, Homo sapien
cataagcagcatcgatgtggagcca

SEQ ID NO: 4547794 - DNA, 25 bp, Homo sapien
taaaggtgaaggagtcggcatactc

SEQ ID NO: 4547795 - DNA, 25 bp, Homo sapien
cttggcctcagcctagaacatcctg

SEQ ID NO: 4547796 - DNA, 25 bp, Homo sapien
tccgaatgggaaagtctacaaagcc

SEQ ID NO: 4547797 - DNA, 25 bp, Homo sapien
tcagtgcaccgaatacaaaagttag

SEQ ID NO: 4547798 - DNA, 25 bp, Homo sapien
tgtgctttggctaaatgagaaacgg

SEQ ID NO: 4547799 - DNA, 25 bp, Homo sapien
tctgacaggcagtcaaatgcacaga

SEQ ID NO: 4547800 - DNA, 25 bp, Homo sapien
cacagaccccagtggtccctagtgt

SEQ ID NO: 4547801 - DNA, 25 bp, Homo sapien
cagtggtccctagtgttgcacagac

SEQ ID NO: 4547802 - DNA, 25 bp, Homo sapien
gcccagctctgacaggcagtcaaat

SEQ ID NO: 4547803 - DNA, 25 bp, Homo sapien
gcttcccctcggagtgagaagttgt

SEQ ID NO: 4547804 - DNA, 25 bp, Homo sapien
gaagagcttcccctcggagtgagaa

SEQ ID NO: 4547805 - DNA, 25 bp, Homo sapien
ccctcggagtgagaagttgtcatcc

SEQ ID NO: 4547806 - DNA, 25 bp, Homo sapien
ttcccctcggagtgagaagttgtca

SEQ ID NO: 4547807 - DNA, 25 bp, Homo sapien
ggctcagacgttttcatttccagga

SEQ ID NO: 4547808 - DNA, 25 bp, Homo sapien
ccacgagtcgggcatttaggcagga

SEQ ID NO: 4547809 - DNA, 25 bp, Homo sapien
tcaaagtggattcactgaccgtgct

SEQ ID NO: 4547810 - DNA, 25 bp, Homo sapien
tggtcagaggcataggccacgagtc

SEQ ID NO: 4547811 - DNA, 25 bp, Homo sapien
ctgtattctcttgccaaatttcccc

SEQ ID NO: 4547812 - DNA, 25 bp, Homo sapien
gggaaaaggattatcatggcagcct

SEQ ID NO: 4547813 - DNA, 25 bp, Homo sapien
gtattctcttgccaaatttccccag

SEQ ID NO: 4547814 - DNA, 25 bp, Homo sapien
tcatggcagcctttctgtattctct

SEQ ID NO: 4547815 - DNA, 25 bp, Homo sapien
aaccagtccatgacgttcatctcca

SEQ ID NO: 4547816 - DNA, 25 bp, Homo sapien
ggtggtggtgcaagaagtgctctgg

SEQ ID NO: 4547817 - DNA, 25 bp, Homo sapien
tctccagctctgtacacgcagggct

SEQ ID NO: 4547818 - DNA, 25 bp, Homo sapien
agtgctctggaagtcccagcatttt

SEQ ID NO: 4547819 - DNA, 25 bp, Homo sapien
tggagaaggggtcatgttaggccac

SEQ ID NO: 4547820 - DNA, 25 bp, Homo sapien
tgaggtgcccccacgagctccagaa

SEQ ID NO: 4547821 - DNA, 25 bp, Homo sapien
cagaaacatgtctgcccctgatggt

SEQ ID NO: 4547822 - DNA, 25 bp, Homo sapien
gagaaggggtcatgttaggccacgt

SEQ ID NO: 4547823 - DNA, 25 bp, Homo sapien
gagggctgggtagtaggcgtgcata

SEQ ID NO: 4547824 - DNA, 25 bp, Homo sapien
tcccaagcagttgatggcatcagcc

SEQ ID NO: 4547825 - DNA, 25 bp, Homo sapien
ccaggtgaatcccaagcagttgatg

SEQ ID NO: 4547826 - DNA, 25 bp, Homo sapien
gccagcatgtctcctagcagggagg

SEQ ID NO: 4547827 - DNA, 25 bp, Homo sapien
cccaaagatgctgtcccagctgtcg

SEQ ID NO: 4547828 - DNA, 25 bp, Homo sapien
ctcgcaggtagccaggctgcacgtc

SEQ ID NO: 4547829 - DNA, 25 bp, Homo sapien
tgcacgtctggcgtcacacgtctct

SEQ ID NO: 4547830 - DNA, 25 bp, Homo sapien
caggcatgatgattcgttcaatgtc

SEQ ID NO: 4547831 - DNA, 25 bp, Homo sapien
agggccagggatgcccgttgctcac

SEQ ID NO: 4547832 - DNA, 25 bp, Homo sapien
agggaagagggccagggatgcccgt

SEQ ID NO: 4547833 - DNA, 25 bp, Homo sapien
gcagccgttcctgcaggagtagcag

SEQ ID NO: 4547834 - DNA, 25 bp, Homo sapien
cagcagccgttcctgcaggagtagc

SEQ ID NO: 4547835 - DNA, 25 bp, Homo sapien
ctctctctctgtactcctcaggctc

SEQ ID NO: 4547836 - DNA, 25 bp, Homo sapien
ctctgtactcctcaggctccatcat

SEQ ID NO: 4547837 - DNA, 25 bp, Homo sapien
tctctgtactcctcaggctccatca

SEQ ID NO: 4547838 - DNA, 25 bp, Homo sapien
tctctctgtactcctcaggctccat

SEQ ID NO: 4547839 - DNA, 25 bp, Homo sapien
gaaaacagcgaccacaactttgact

SEQ ID NO: 4547840 - DNA, 25 bp, Homo sapien
cttctcacagatggacacgcaggag

SEQ ID NO: 4547841 - DNA, 25 bp, Homo sapien
tccccagtccttgtagaaaacagcg

SEQ ID NO: 4547842 - DNA, 25 bp, Homo sapien
caggtggatgccgtaaaagagccct

SEQ ID NO: 4547843 - DNA, 25 bp, Homo sapien
cctaagttgatctgacataatggag

SEQ ID NO: 4547844 - DNA, 25 bp, Homo sapien
tattctgagtcagttctcaaggtct

SEQ ID NO: 4547845 - DNA, 25 bp, Homo sapien
cctgagtgctaatgccttgggaacc

SEQ ID NO: 4547846 - DNA, 25 bp, Homo sapien
tgggaacccatccatatggacatta

SEQ ID NO: 4547847 - DNA, 25 bp, Homo sapien
tgtgataaaaacataagtctacaat

SEQ ID NO: 4547848 - DNA, 25 bp, Homo sapien
tacaggagtaattccagcatcagtc

SEQ ID NO: 4547849 - DNA, 25 bp, Homo sapien
tttcaatgacctacagagtaaaggg

SEQ ID NO: 4547850 - DNA, 25 bp, Homo sapien
tgagagcaagtcatagcacagacac

SEQ ID NO: 4547851 - DNA, 25 bp, Homo sapien
cagtctgccagtgtttaatgtccat

SEQ ID NO: 4547852 - DNA, 25 bp, Homo sapien
taggagctgctgtcgatatttttgt

SEQ ID NO: 4547853 - DNA, 25 bp, Homo sapien
gaagacgagtcatagcttccaactt

SEQ ID NO: 4547854 - DNA, 25 bp, Homo sapien
aacttctgtctgtaggcctctgctt

SEQ ID NO: 4547855 - DNA, 25 bp, Homo sapien
tctttattagtctgaagacgagtca

SEQ ID NO: 4547856 - DNA, 25 bp, Homo sapien
tggatgttacttcccaggagctaga

SEQ ID NO: 4547857 - DNA, 25 bp, Homo sapien
cccacaatgggaatgaagctagatc

SEQ ID NO: 4547858 - DNA, 25 bp, Homo sapien
gagtccaaggtaagcaatcaatgcc

SEQ ID NO: 4547859 - DNA, 25 bp, Homo sapien
tactcccagtttaagcaatgcccag

SEQ ID NO: 4547860 - DNA, 25 bp, Homo sapien
gtgacttatgccagtaatctcaact

SEQ ID NO: 4547861 - DNA, 25 bp, Homo sapien
tggatatggtgacttatgccagtaa

SEQ ID NO: 4547862 - DNA, 25 bp, Homo sapien
ctggatatggtgacttatgccagta

SEQ ID NO: 4547863 - DNA, 25 bp, Homo sapien
tgccagtaatctcaactcttcagga

SEQ ID NO: 4547864 - DNA, 25 bp, Homo sapien
gatagttaaagcgaagtacatgaca

SEQ ID NO: 4547865 - DNA, 25 bp, Homo sapien
tttgtggtgtggtgaaagatgtacc

SEQ ID NO: 4547866 - DNA, 25 bp, Homo sapien
tgaatttaggaagggtattttctca

SEQ ID NO: 4547867 - DNA, 25 bp, Homo sapien
taagaacttcaacatcctacacatc

SEQ ID NO: 4547868 - DNA, 25 bp, Homo sapien
tagccaatatatactggtattttcc

SEQ ID NO: 4547869 - DNA, 25 bp, Homo sapien
agaggacccctagcccaattaggca

SEQ ID NO: 4547870 - DNA, 25 bp, Homo sapien
gaagaaccaaagacattccagtgtt

SEQ ID NO: 4547871 - DNA, 25 bp, Homo sapien
cctttagtgacgtgtaagaatggtg

SEQ ID NO: 4547872 - DNA, 25 bp, Homo sapien
tctgtatcaaaacaatactgtcagt

SEQ ID NO: 4547873 - DNA, 25 bp, Homo sapien
ttgagggcttgctatatgtataagg

SEQ ID NO: 4547874 - DNA, 25 bp, Homo sapien
caaaatgaaaatactacgcactttc

SEQ ID NO: 4547875 - DNA, 25 bp, Homo sapien
aaatactacgcactttcattctgta

SEQ ID NO: 4547876 - DNA, 25 bp, Homo sapien
ccggttttcaattatttcgatacat

SEQ ID NO: 4547877 - DNA, 25 bp, Homo sapien
tacattgtctcttagctggtggttc

SEQ ID NO: 4547878 - DNA, 25 bp, Homo sapien
tcagcaatgtctgttgctggtactg

SEQ ID NO: 4547879 - DNA, 25 bp, Homo sapien
tcacttataacagtttcttcagcaa

SEQ ID NO: 4547880 - DNA, 25 bp, Homo sapien
tagctgcataatatccactaagtgc

SEQ ID NO: 4547881 - DNA, 25 bp, Homo sapien
tgctttgcacagcactacaggaaca

SEQ ID NO: 4547882 - DNA, 25 bp, Homo sapien
aagctgaaaccatgcgaagccattt

SEQ ID NO: 4547883 - DNA, 25 bp, Homo sapien
tgcaattatatagagaggctgtcct

SEQ ID NO: 4547884 - DNA, 25 bp, Homo sapien
tggcaccatccacagattctgcagt

SEQ ID NO: 4547885 - DNA, 25 bp, Homo sapien
gatgggctgaccaattccactggtt

SEQ ID NO: 4547886 - DNA, 25 bp, Homo sapien
tctggcatggtcacaatgatgggct

SEQ ID NO: 4547887 - DNA, 25 bp, Homo sapien
actattgtgatgacttgctgacccc

SEQ ID NO: 4547888 - DNA, 25 bp, Homo sapien
taggaccatgccaaccagctagttt

SEQ ID NO: 4547889 - DNA, 25 bp, Homo sapien
cattctggctgttttgtaaccagga

SEQ ID NO: 4547890 - DNA, 25 bp, Homo sapien
cctggactatcacaattgccttctc

SEQ ID NO: 4547891 - DNA, 25 bp, Homo sapien
taaaatatagtccatctgctgctac

SEQ ID NO: 4547892 - DNA, 25 bp, Homo sapien
tcagctaaggcagctaatgtagcta

SEQ ID NO: 4547893 - DNA, 25 bp, Homo sapien
agaattggacaatggagcagatgct

SEQ ID NO: 4547894 - DNA, 25 bp, Homo sapien
ctaatactgatgtagaagagtttcc

SEQ ID NO: 4547895 - DNA, 25 bp, Homo sapien
tggacaatggagcagatgcttcagc

SEQ ID NO: 4547896 - DNA, 25 bp, Homo sapien
ctgaacagcagatacacccgtttca

SEQ ID NO: 4547897 - DNA, 25 bp, Homo sapien
tgaacagcagatacacccgtttcat

SEQ ID NO: 4547898 - DNA, 25 bp, Homo sapien
ctgttgccttggatgaattttctga

SEQ ID NO: 4547899 - DNA, 25 bp, Homo sapien
gccttggatgaattttctgaagata

SEQ ID NO: 4547900 - DNA, 25 bp, Homo sapien
gttgccttggatgaattttctgaag

SEQ ID NO: 4547901 - DNA, 25 bp, Homo sapien
ccttggatgaattttctgaagatac

SEQ ID NO: 4547902 - DNA, 25 bp, Homo sapien
ctgttaggttcaccacccctccagg

SEQ ID NO: 4547903 - DNA, 25 bp, Homo sapien
ctccaggtccaatgataaactgtgg

SEQ ID NO: 4547904 - DNA, 25 bp, Homo sapien
gtcacagtgtcaggactctctgggt

SEQ ID NO: 4547905 - DNA, 25 bp, Homo sapien
tgtggtgttgcagcatgtattgtca

SEQ ID NO: 4547906 - DNA, 25 bp, Homo sapien
ttccattgtctattgaaatatcaaa

SEQ ID NO: 4547907 - DNA, 25 bp, Homo sapien
aacatgtcctttgcattgacatcag

SEQ ID NO: 4547908 - DNA, 25 bp, Homo sapien
tcttgatgattgtgttctgtggccc

SEQ ID NO: 4547909 - DNA, 25 bp, Homo sapien
tactttgcgtgtgtacatcagcacc

SEQ ID NO: 4547910 - DNA, 25 bp, Homo sapien
ccatatgtaatggtgttcggtccac

SEQ ID NO: 4547911 - DNA, 25 bp, Homo sapien
gaccatactgtgctgctagatgaag

SEQ ID NO: 4547912 - DNA, 25 bp, Homo sapien
ggccctcagaagctgccatatgtaa

SEQ ID NO: 4547913 - DNA, 25 bp, Homo sapien
tgctcacaccagctcgcagcagtac

SEQ ID NO: 4547914 - DNA, 25 bp, Homo sapien
gtaaagggagctccatttgccatca

SEQ ID NO: 4547915 - DNA, 25 bp, Homo sapien
ttctttcccaaatctaccagggaca

SEQ ID NO: 4547916 - DNA, 25 bp, Homo sapien
ttgccatcaaaatacgaacttcatc

SEQ ID NO: 4547917 - DNA, 25 bp, Homo sapien
tgctcgtgccgcttctaaaagcttc

SEQ ID NO: 4547918 - DNA, 25 bp, Homo sapien
tcagtggttctcattggtagcagca

SEQ ID NO: 4547919 - DNA, 25 bp, Homo sapien
ccggccgccatatggtagattaatg

SEQ ID NO: 4547920 - DNA, 25 bp, Homo sapien
ggatactagaggtccagcaaaggag

SEQ ID NO: 4547921 - DNA, 25 bp, Homo sapien
cagggccctttgtatgtttatagag

SEQ ID NO: 4547922 - DNA, 25 bp, Homo sapien
tgtttctactggttcatgcctatgg

SEQ ID NO: 4547923 - DNA, 25 bp, Homo sapien
gactatgtgctgattactgtcctta

SEQ ID NO: 4547924 - DNA, 25 bp, Homo sapien
ggttccttgtctcctcgtacgtcta

SEQ ID NO: 4547925 - DNA, 25 bp, Homo sapien
ttcccacctatgctttgtaaagact

SEQ ID NO: 4547926 - DNA, 25 bp, Homo sapien
tggtaagggccagcttctagacatc

SEQ ID NO: 4547927 - DNA, 25 bp, Homo sapien
caaggctggtagtgaaccacctcac

SEQ ID NO: 4547928 - DNA, 25 bp, Homo sapien
aaggctggtagtgaaccacctcacc

SEQ ID NO: 4547929 - DNA, 25 bp, Homo sapien
attcagtatctggtaagggccagct

SEQ ID NO: 4547930 - DNA, 25 bp, Homo sapien
gaccatgaaaatcttctctgcatcg

SEQ ID NO: 4547931 - DNA, 25 bp, Homo sapien
aaatatggaacacatcataaattta

SEQ ID NO: 4547932 - DNA, 25 bp, Homo sapien
cagggaccatgaaaatcttctctgc

SEQ ID NO: 4547933 - DNA, 25 bp, Homo sapien
gggaccatgaaaatcttctctgcat

SEQ ID NO: 4547934 - DNA, 25 bp, Homo sapien
tcagtctctacatgcacagaatggg

SEQ ID NO: 4547935 - DNA, 25 bp, Homo sapien
taaagaatcactactataggctggg

SEQ ID NO: 4547936 - DNA, 25 bp, Homo sapien
gggctatacatccaaaaccgttatc

SEQ ID NO: 4547937 - DNA, 25 bp, Homo sapien
taaagacaggtatcacagtgtcatc

SEQ ID NO: 4547938 - DNA, 25 bp, Homo sapien
ccctaagagtttgaatggtggactg

SEQ ID NO: 4547939 - DNA, 25 bp, Homo sapien
tattggaaggctacacattactacc

SEQ ID NO: 4547940 - DNA, 25 bp, Homo sapien
tattgcactggactctattggaagg

SEQ ID NO: 4547941 - DNA, 25 bp, Homo sapien
gaaactgagccacggagagattaag

SEQ ID NO: 4547942 - DNA, 25 bp, Homo sapien
tactcaattgatattacttctagaa

SEQ ID NO: 4547943 - DNA, 25 bp, Homo sapien
gtttctctactcaattgatattact

SEQ ID NO: 4547944 - DNA, 25 bp, Homo sapien
caaaacactacatgcatttacaaat

SEQ ID NO: 4547945 - DNA, 25 bp, Homo sapien
tacttctagaataaggaatcaaaca

SEQ ID NO: 4547946 - DNA, 25 bp, Homo sapien
tagtactggctctagagtcacactg

SEQ ID NO: 4547947 - DNA, 25 bp, Homo sapien
taactcaggtaccttgagcaagcaa

SEQ ID NO: 4547948 - DNA, 25 bp, Homo sapien
gatggaccctaacaatcactgtgaa

SEQ ID NO: 4547949 - DNA, 25 bp, Homo sapien
tcacactggttggattcaagtcctg

SEQ ID NO: 4547950 - DNA, 25 bp, Homo sapien
gaatttccatgtcagaaggtatgcc

SEQ ID NO: 4547951 - DNA, 25 bp, Homo sapien
tacagtgtggtttaaagcccttcat

SEQ ID NO: 4547952 - DNA, 25 bp, Homo sapien
ggtaacttgaagacacctagctcaa

SEQ ID NO: 4547953 - DNA, 25 bp, Homo sapien
tgttcttccacctgtaaacctcggc

SEQ ID NO: 4547954 - DNA, 25 bp, Homo sapien
ttcatctgaactcaggctacttgca

SEQ ID NO: 4547955 - DNA, 25 bp, Homo sapien
ctgggtaactgcctcgtgcaccctc

SEQ ID NO: 4547956 - DNA, 25 bp, Homo sapien
gtgagttcatctgaactcaggctac

SEQ ID NO: 4547957 - DNA, 25 bp, Homo sapien
ggtaactgcctcgtgcaccctcaaa

SEQ ID NO: 4547958 - DNA, 25 bp, Homo sapien
actgttcgtttcaccaaaggattca

SEQ ID NO: 4547959 - DNA, 25 bp, Homo sapien
aattacacgaagaatgaccagatgc

SEQ ID NO: 4547960 - DNA, 25 bp, Homo sapien
gacagattcagactacagttcacag

SEQ ID NO: 4547961 - DNA, 25 bp, Homo sapien
cctgttgatggaacagtagagaact

SEQ ID NO: 4547962 - DNA, 25 bp, Homo sapien
taaaccaggcattaaaaagatttgc

SEQ ID NO: 4547963 - DNA, 25 bp, Homo sapien
tccagaggttacatggtgtgctaac

SEQ ID NO: 4547964 - DNA, 25 bp, Homo sapien
caagctgggtgggtctttacatgag

SEQ ID NO: 4547965 - DNA, 25 bp, Homo sapien
tgtgctaaccacaacagtctgacgt

SEQ ID NO: 4547966 - DNA, 25 bp, Homo sapien
ttcagaagtactgtggtctcggccc

SEQ ID NO: 4547967 - DNA, 25 bp, Homo sapien
cagttttcacgatgcacccttgagg

SEQ ID NO: 4547968 - DNA, 25 bp, Homo sapien
cacacttggagagcttcaccgaaac

SEQ ID NO: 4547969 - DNA, 25 bp, Homo sapien
tgaggctaggcacgctgattcaaca

SEQ ID NO: 4547970 - DNA, 25 bp, Homo sapien
tctttggggcagaagtcccgagcct

SEQ ID NO: 4547971 - DNA, 25 bp, Homo sapien
gtgcacccgcagttctcggcggcga

SEQ ID NO: 4547972 - DNA, 25 bp, Homo sapien
gcagtgcacccgcagttctcggcgg

SEQ ID NO: 4547973 - DNA, 25 bp, Homo sapien
tctcggcggcgaagtctttggggca

SEQ ID NO: 4547974 - DNA, 25 bp, Homo sapien
tccagtccccgcggccaaggctgtc

SEQ ID NO: 4547975 - DNA, 25 bp, Homo sapien
gactccagtccccgcggccaaggct

SEQ ID NO: 4547976 - DNA, 25 bp, Homo sapien
actccagtccccgcggccaaggctg

SEQ ID NO: 4547977 - DNA, 25 bp, Homo sapien
ctccagtccccgcggccaaggctgt

SEQ ID NO: 4547978 - DNA, 25 bp, Homo sapien
ggctcttccattaaccctgtctggt

SEQ ID NO: 4547979 - DNA, 25 bp, Homo sapien
gggccgtcaggctgccgagacaaag

SEQ ID NO: 4547980 - DNA, 25 bp, Homo sapien
cgggactggccaggctcttccatta

SEQ ID NO: 4547981 - DNA, 25 bp, Homo sapien
gtaccgcggcgccagaggccgaggc

SEQ ID NO: 4547982 - DNA, 25 bp, Homo sapien
ctccgctgcctcggcgcgaccccat

SEQ ID NO: 4547983 - DNA, 25 bp, Homo sapien
tgcctcggcgcgaccccatcgccac

SEQ ID NO: 4547984 - DNA, 25 bp, Homo sapien
gctgcctcggcgcgaccccatcgcc

SEQ ID NO: 4547985 - DNA, 25 bp, Homo sapien
ccgctgcctcggcgcgaccccatcg

SEQ ID NO: 4547986 - DNA, 25 bp, Homo sapien
ccgggtagccgcgaggcggccgcgg

SEQ ID NO: 4547987 - DNA, 25 bp, Homo sapien
gctcgggaccggcaagccgggtagc

SEQ ID NO: 4547988 - DNA, 25 bp, Homo sapien
gggctgccgctcgggaccggcaagc

SEQ ID NO: 4547989 - DNA, 25 bp, Homo sapien
ccggcaagccgggtagccgcgaggc

SEQ ID NO: 4547990 - DNA, 25 bp, Homo sapien
gccgaggagggggcggcggccgcca

SEQ ID NO: 4547991 - DNA, 25 bp, Homo sapien
aggagggggcggcggccgccaccat

SEQ ID NO: 4547992 - DNA, 25 bp, Homo sapien
gaggagggggcggcggccgccacca

SEQ ID NO: 4547993 - DNA, 25 bp, Homo sapien
aaatcgcggggatgatctgggttcc

SEQ ID NO: 4547994 - DNA, 25 bp, Homo sapien
gcggacaaagcgcagcggcggcgcg

SEQ ID NO: 4547995 - DNA, 25 bp, Homo sapien
caataaacaggaaatcgcggggatg

SEQ ID NO: 4547996 - DNA, 25 bp, Homo sapien
gaaacccggcgccttaatgcaataa

SEQ ID NO: 4547997 - DNA, 25 bp, Homo sapien
ccggtggtaacagggccctacacag

SEQ ID NO: 4547998 - DNA, 25 bp, Homo sapien
cagcgaagagatcaacttccacatc

SEQ ID NO: 4547999 - DNA, 25 bp, Homo sapien
gatcaacttccacatccggtggtaa

SEQ ID NO: 4548000 - DNA, 25 bp, Homo sapien
tccacatccggtggtaacagggccc

SEQ ID NO: 4548001 - DNA, 25 bp, Homo sapien
gccgcgtctggtcggcgcccaaaat

SEQ ID NO: 4548002 - DNA, 25 bp, Homo sapien
tgcacagggcgctattttccgaaaa

SEQ ID NO: 4548003 - DNA, 25 bp, Homo sapien
cacatggtgtgcgagtgagtcaagc

SEQ ID NO: 4548004 - DNA, 25 bp, Homo sapien
acaaagcgcttcagctgcacagggc

SEQ ID NO: 4548005 - DNA, 25 bp, Homo sapien
cagaatcctgggagacggaaggaca

SEQ ID NO: 4548006 - DNA, 25 bp, Homo sapien
tggattactgccacctcagaggtag

SEQ ID NO: 4548007 - DNA, 25 bp, Homo sapien
gcctcatgtttcgtagatcctagta

SEQ ID NO: 4548008 - DNA, 25 bp, Homo sapien
tagattcaactaggcagactgggac

SEQ ID NO: 4548009 - DNA, 25 bp, Homo sapien
gcgagacaggtgcaaaagacactgc

SEQ ID NO: 4548010 - DNA, 25 bp, Homo sapien
tgagcaatgctggatacacactacc

SEQ ID NO: 4548011 - DNA, 25 bp, Homo sapien
caactattacttccctgactgagcc

SEQ ID NO: 4548012 - DNA, 25 bp, Homo sapien
cgtgagccaaataagccgaacattc

SEQ ID NO: 4548013 - DNA, 25 bp, Homo sapien
taagctaggaaacatgttcaggtga

SEQ ID NO: 4548014 - DNA, 25 bp, Homo sapien
caaaagctaaggtttggtactctga

SEQ ID NO: 4548015 - DNA, 25 bp, Homo sapien
gatgatgccagaatatcaaggtaga

SEQ ID NO: 4548016 - DNA, 25 bp, Homo sapien
aagaacttgtggctcctcactccaa

SEQ ID NO: 4548017 - DNA, 25 bp, Homo sapien
gagcatcttaatctttgaggcccag

SEQ ID NO: 4548018 - DNA, 25 bp, Homo sapien
tccatctcagtgcaaaaaggcgaca

SEQ ID NO: 4548019 - DNA, 25 bp, Homo sapien
tagtgacggctactcatcctgaggt

SEQ ID NO: 4548020 - DNA, 25 bp, Homo sapien
tagagaagaccaccagtaagcaagt

SEQ ID NO: 4548021 - DNA, 25 bp, Homo sapien
tgttaagctcataggtaaatctggc

SEQ ID NO: 4548022 - DNA, 25 bp, Homo sapien
aaattgccaattgcgatggctcacg

SEQ ID NO: 4548023 - DNA, 25 bp, Homo sapien
gatgggtaatacacagtctagggca

SEQ ID NO: 4548024 - DNA, 25 bp, Homo sapien
ttaccgggacgtgttggtgagcacc

SEQ ID NO: 4548025 - DNA, 25 bp, Homo sapien
tatacaatagaatgatgaagccaga

SEQ ID NO: 4548026 - DNA, 25 bp, Homo sapien
taaggctactcaagagtctttagtc

SEQ ID NO: 4548027 - DNA, 25 bp, Homo sapien
taccctatgactcagcagttccaat

SEQ ID NO: 4548028 - DNA, 25 bp, Homo sapien
cagctgaacaagtacataccctatg

SEQ ID NO: 4548029 - DNA, 25 bp, Homo sapien
tggggaacggggtctcactatatgc

SEQ ID NO: 4548030 - DNA, 25 bp, Homo sapien
ggggaacggggtctcactatatgcc

SEQ ID NO: 4548031 - DNA, 25 bp, Homo sapien
ttgtggggaacggggtctcactata

SEQ ID NO: 4548032 - DNA, 25 bp, Homo sapien
atgcccaggcaggtctcaaactcct

SEQ ID NO: 4548033 - DNA, 25 bp, Homo sapien
gaaggcccagcatcttatgagttaa

SEQ ID NO: 4548034 - DNA, 25 bp, Homo sapien
ggccaacatgttatcctaaagctga

SEQ ID NO: 4548035 - DNA, 25 bp, Homo sapien
gataatgccaaacttccagggatca

SEQ ID NO: 4548036 - DNA, 25 bp, Homo sapien
tgcagtgcctatgtaacgctccaca

SEQ ID NO: 4548037 - DNA, 25 bp, Homo sapien
taagcattttggtgtagggctacag

SEQ ID NO: 4548038 - DNA, 25 bp, Homo sapien
gaaggccatcgtctaggtgccggca

SEQ ID NO: 4548039 - DNA, 25 bp, Homo sapien
cacctaatcctgttcacccgggagg

SEQ ID NO: 4548040 - DNA, 25 bp, Homo sapien
gcagaacctcgctgtcatgaactgg

SEQ ID NO: 4548041 - DNA, 25 bp, Homo sapien
caggtcaaatttgttggggcataaa

SEQ ID NO: 4548042 - DNA, 25 bp, Homo sapien
gcacaggtcaaatttgttggggcat

SEQ ID NO: 4548043 - DNA, 25 bp, Homo sapien
aatttgttggggcataaaggtgaag

SEQ ID NO: 4548044 - DNA, 25 bp, Homo sapien
tatttgcacaggtcaaatttgttgg

SEQ ID NO: 4548045 - DNA, 25 bp, Homo sapien
tagttattggcgtttgtgacccaca

SEQ ID NO: 4548046 - DNA, 25 bp, Homo sapien
cccttgctgaaagtggaacatgcct

SEQ ID NO: 4548047 - DNA, 25 bp, Homo sapien
ggaagatcaatgaccagtttgcagg

SEQ ID NO: 4548048 - DNA, 25 bp, Homo sapien
gactctttagggttgctcagtagca

SEQ ID NO: 4548049 - DNA, 25 bp, Homo sapien
gagattgcagtgaccactgcactcc

SEQ ID NO: 4548050 - DNA, 25 bp, Homo sapien
gattgcagtgaccactgcactccag

SEQ ID NO: 4548051 - DNA, 25 bp, Homo sapien
attgcagtgaccactgcactccagc

SEQ ID NO: 4548052 - DNA, 25 bp, Homo sapien
cgagattgcagtgaccactgcactc

SEQ ID NO: 4548053 - DNA, 25 bp, Homo sapien
gatcacaagctttgggaaggcagga

SEQ ID NO: 4548054 - DNA, 25 bp, Homo sapien
gattgctgttgaatcactggtgcct

SEQ ID NO: 4548055 - DNA, 25 bp, Homo sapien
taactaaataggtgctctctgacat

SEQ ID NO: 4548056 - DNA, 25 bp, Homo sapien
ggtgcctgcagagtgactaactaaa

SEQ ID NO: 4548057 - DNA, 25 bp, Homo sapien
gaaacctagaactcagaggattgct

SEQ ID NO: 4548058 - DNA, 25 bp, Homo sapien
cacgtggtccttttgtgaaacctag

SEQ ID NO: 4548059 - DNA, 25 bp, Homo sapien
ctttcttagggaaatgacagggcaa

SEQ ID NO: 4548060 - DNA, 25 bp, Homo sapien
gatgtacatagtttaacacgtggtc

SEQ ID NO: 4548061 - DNA, 25 bp, Homo sapien
tcactgactcgtgtgttatcaaagc

SEQ ID NO: 4548062 - DNA, 25 bp, Homo sapien
ggctcttaacgcttttgtattggta

SEQ ID NO: 4548063 - DNA, 25 bp, Homo sapien
gcaaaactctaccaccagatgctga

SEQ ID NO: 4548064 - DNA, 25 bp, Homo sapien
gcagctatagaacaggagatccata

SEQ ID NO: 4548065 - DNA, 25 bp, Homo sapien
gtgtagtggccaccatccaaatcac

SEQ ID NO: 4548066 - DNA, 25 bp, Homo sapien
cctgggtgactgaattcttgcagaa

SEQ ID NO: 4548067 - DNA, 25 bp, Homo sapien
tagtggccaccatccaaatcaccaa

SEQ ID NO: 4548068 - DNA, 25 bp, Homo sapien
ttcttgcagaaagcagtgtagtggc

SEQ ID NO: 4548069 - DNA, 25 bp, Homo sapien
aaaagatcaaggttccgccaggcct

SEQ ID NO: 4548070 - DNA, 25 bp, Homo sapien
ttaaaagatcaaggttccgccaggc

SEQ ID NO: 4548071 - DNA, 25 bp, Homo sapien
aagatcaaggttccgccaggcctgg

SEQ ID NO: 4548072 - DNA, 25 bp, Homo sapien
tcaaggttccgccaggcctggtggc

SEQ ID NO: 4548073 - DNA, 25 bp, Homo sapien
tatgctcgggttttaaaggtcacgc

SEQ ID NO: 4548074 - DNA, 25 bp, Homo sapien
tcacgcaaggacactcgaggtaaag

SEQ ID NO: 4548075 - DNA, 25 bp, Homo sapien
tgagatccacatacaaagccaggac

SEQ ID NO: 4548076 - DNA, 25 bp, Homo sapien
tgcctgggcgtaaagacagtcccta

SEQ ID NO: 4548077 - DNA, 25 bp, Homo sapien
tcatgagttcgagacaagagcgaaa

SEQ ID NO: 4548078 - DNA, 25 bp, Homo sapien
ggatatttccggaaaattgagcaaa

SEQ ID NO: 4548079 - DNA, 25 bp, Homo sapien
tgagcaaatataaggagtgaggtcc

SEQ ID NO: 4548080 - DNA, 25 bp, Homo sapien
tccaagttagtgagtgggtaatgaa

SEQ ID NO: 4548081 - DNA, 25 bp, Homo sapien
cactgcacagaggttgtatttagga

SEQ ID NO: 4548082 - DNA, 25 bp, Homo sapien
caggtctgcgtaggaaaacctgaac

SEQ ID NO: 4548083 - DNA, 25 bp, Homo sapien
tgaattgctagaggctcagtgcaga

SEQ ID NO: 4548084 - DNA, 25 bp, Homo sapien
cagagccaaaactgccgagcagaaa

SEQ ID NO: 4548085 - DNA, 25 bp, Homo sapien
cagaaacctctgagggaacaggtct

SEQ ID NO: 4548086 - DNA, 25 bp, Homo sapien
gtgctttggaaatactggccctcac

SEQ ID NO: 4548087 - DNA, 25 bp, Homo sapien
tgctttggaaatactggccctcaca

SEQ ID NO: 4548088 - DNA, 25 bp, Homo sapien
gctttggaaatactggccctcacag

SEQ ID NO: 4548089 - DNA, 25 bp, Homo sapien
tttggaaatactggccctcacagca

SEQ ID NO: 4548090 - DNA, 25 bp, Homo sapien
cttgttgaaaaaaacattggagaca

SEQ ID NO: 4548091 - DNA, 25 bp, Homo sapien
gagcagtgaatttcgttgttccagg

SEQ ID NO: 4548092 - DNA, 25 bp, Homo sapien
cgttgttccaggtcagtgcgtcttg

SEQ ID NO: 4548093 - DNA, 25 bp, Homo sapien
tcacaaaaggagcagtgaatttcgt

SEQ ID NO: 4548094 - DNA, 25 bp, Homo sapien
aaattagaccccatatccataggag

SEQ ID NO: 4548095 - DNA, 25 bp, Homo sapien
gggtggcccataataaagatagcag

SEQ ID NO: 4548096 - DNA, 25 bp, Homo sapien
aatgatccggtgacaaaaatgactc

SEQ ID NO: 4548097 - DNA, 25 bp, Homo sapien
gcagaggagccactagcaccttact

SEQ ID NO: 4548098 - DNA, 25 bp, Homo sapien
atgtaggaaacagccccgagaaaat

SEQ ID NO: 4548099 - DNA, 25 bp, Homo sapien
ccccgagaaaatccggggctgagag

SEQ ID NO: 4548100 - DNA, 25 bp, Homo sapien
aaagccgtctctcatactaaacaaa

SEQ ID NO: 4548101 - DNA, 25 bp, Homo sapien
attaaagttataaagccgtctctca

SEQ ID NO: 4548102 - DNA, 25 bp, Homo sapien
tcgttcttgtaggtgcatttctcac

SEQ ID NO: 4548103 - DNA, 25 bp, Homo sapien
ctcacactttaaacatacgatgcta

SEQ ID NO: 4548104 - DNA, 25 bp, Homo sapien
ccgaagggagcattcatatttggat

SEQ ID NO: 4548105 - DNA, 25 bp, Homo sapien
taattgagctgctcttcaaacagct

SEQ ID NO: 4548106 - DNA, 25 bp, Homo sapien
ctcatatgatcttctccgggagtag

SEQ ID NO: 4548107 - DNA, 25 bp, Homo sapien
tgcagcatctctgagtagatccttt

SEQ ID NO: 4548108 - DNA, 25 bp, Homo sapien
atatgatcttctccgggagtagtgg

SEQ ID NO: 4548109 - DNA, 25 bp, Homo sapien
gcatctctgagtagatcctttctca

SEQ ID NO: 4548110 - DNA, 25 bp, Homo sapien
cattttgaagatgtgttagctccac

SEQ ID NO: 4548111 - DNA, 25 bp, Homo sapien
cttgctcctttcatcacactctgct

SEQ ID NO: 4548112 - DNA, 25 bp, Homo sapien
tgccaaagtcttccaccctgacagt

SEQ ID NO: 4548113 - DNA, 25 bp, Homo sapien
taagagcctcagtggaatatacatt

SEQ ID NO: 4548114 - DNA, 25 bp, Homo sapien
ggacacaaatcaagaattcctgagc

SEQ ID NO: 4548115 - DNA, 25 bp, Homo sapien
cgtaaatgctgggtagaggttgcca

SEQ ID NO: 4548116 - DNA, 25 bp, Homo sapien
ttttagagcttcatgaagttcattt

SEQ ID NO: 4548117 - DNA, 25 bp, Homo sapien
tttaggacacaaatcaagaattcct

SEQ ID NO: 4548118 - DNA, 25 bp, Homo sapien
tctgtcatcagataggcaaaagcag

SEQ ID NO: 4548119 - DNA, 25 bp, Homo sapien
atcagataggcaaaagcagtggcaa

SEQ ID NO: 4548120 - DNA, 25 bp, Homo sapien
gataggcaaaagcagtggcaacttc

SEQ ID NO: 4548121 - DNA, 25 bp, Homo sapien
gtctgtcatcagataggcaaaagca

SEQ ID NO: 4548122 - DNA, 25 bp, Homo sapien
gcagcatgtgttgcccaagttccac

SEQ ID NO: 4548123 - DNA, 25 bp, Homo sapien
tgagatggcattcacgcagcatgtg

SEQ ID NO: 4548124 - DNA, 25 bp, Homo sapien
gagaaagtattccaccagcggcaag

SEQ ID NO: 4548125 - DNA, 25 bp, Homo sapien
gagcggtgatatacttcccggtgag

SEQ ID NO: 4548126 - DNA, 25 bp, Homo sapien
aagggtatcatagtaatctgtgcac

SEQ ID NO: 4548127 - DNA, 25 bp, Homo sapien
gggtatcatagtaatctgtgcactc

SEQ ID NO: 4548128 - DNA, 25 bp, Homo sapien
gaagggtatcatagtaatctgtgca

SEQ ID NO: 4548129 - DNA, 25 bp, Homo sapien
tatcatagtaatctgtgcactctgc

SEQ ID NO: 4548130 - DNA, 25 bp, Homo sapien
aggacgtggtagatatcgaagtcat

SEQ ID NO: 4548131 - DNA, 25 bp, Homo sapien
cagggagagacggctgagaagtcat

SEQ ID NO: 4548132 - DNA, 25 bp, Homo sapien
tgcagggagagacggctgagaagtc

SEQ ID NO: 4548133 - DNA, 25 bp, Homo sapien
ctgcagggagagacggctgagaagt

SEQ ID NO: 4548134 - DNA, 25 bp, Homo sapien
gcagggagagacggctgagaagtca

SEQ ID NO: 4548135 - DNA, 25 bp, Homo sapien
tagctgcgaactgattttcacctgt

SEQ ID NO: 4548136 - DNA, 25 bp, Homo sapien
taatggaaccacgttggacttttgc

SEQ ID NO: 4548137 - DNA, 25 bp, Homo sapien
tctgagcctgttaacgctggctttt

SEQ ID NO: 4548138 - DNA, 25 bp, Homo sapien
gacttttgcttctattcaggagcta

SEQ ID NO: 4548139 - DNA, 25 bp, Homo sapien
atgcagtggctagcactggtaatcc

SEQ ID NO: 4548140 - DNA, 25 bp, Homo sapien
cagatgcagtggctagcactggtaa

SEQ ID NO: 4548141 - DNA, 25 bp, Homo sapien
gatgcagtggctagcactggtaatc

SEQ ID NO: 4548142 - DNA, 25 bp, Homo sapien
ccagatgcagtggctagcactggta

SEQ ID NO: 4548143 - DNA, 25 bp, Homo sapien
tgtagttgaacacttgtatgattac

SEQ ID NO: 4548144 - DNA, 25 bp, Homo sapien
gcatttgtatgtagttgaacacttg

SEQ ID NO: 4548145 - DNA, 25 bp, Homo sapien
tattaataccttgtaccatcctgcc

SEQ ID NO: 4548146 - DNA, 25 bp, Homo sapien
cgcctggcctcattagtcttcttac

SEQ ID NO: 4548147 - DNA, 25 bp, Homo sapien
caagcaaggtattgggtgctactca

SEQ ID NO: 4548148 - DNA, 25 bp, Homo sapien
tctgtgaagcatataatctagtggg

SEQ ID NO: 4548149 - DNA, 25 bp, Homo sapien
cattacgacccatctcttcaagagg

SEQ ID NO: 4548150 - DNA, 25 bp, Homo sapien
gcatacatatatcgacagactgaag

SEQ ID NO: 4548151 - DNA, 25 bp, Homo sapien
caaaagcacaggtatacaaatggtt

SEQ ID NO: 4548152 - DNA, 25 bp, Homo sapien
tagctactattataatcctgtgaaa

SEQ ID NO: 4548153 - DNA, 25 bp, Homo sapien
aaaaactgatactcaaattgacacc

SEQ ID NO: 4548154 - DNA, 25 bp, Homo sapien
gacagcccatattgcccttttttgg

SEQ ID NO: 4548155 - DNA, 25 bp, Homo sapien
aaggtaacttcccttgacgagtgag

SEQ ID NO: 4548156 - DNA, 25 bp, Homo sapien
taaggttgcactgcaatctgccagt

SEQ ID NO: 4548157 - DNA, 25 bp, Homo sapien
tatgtatcagtttaccatggctttc

SEQ ID NO: 4548158 - DNA, 25 bp, Homo sapien
catggctttcttctacttaacagtg

SEQ ID NO: 4548159 - DNA, 25 bp, Homo sapien
cttcagttcaggcttctcatacctc

SEQ ID NO: 4548160 - DNA, 25 bp, Homo sapien
ataccgtccctcttgaaaatggtct

SEQ ID NO: 4548161 - DNA, 25 bp, Homo sapien
ttcagttcaggcttctcatacctct

SEQ ID NO: 4548162 - DNA, 25 bp, Homo sapien
ctgattcataaataccgtccctctt

SEQ ID NO: 4548163 - DNA, 25 bp, Homo sapien
tctgtgaggtgcaggcaaaaccaat

SEQ ID NO: 4548164 - DNA, 25 bp, Homo sapien
catttaaccaaaaggctgcgtgatt

SEQ ID NO: 4548165 - DNA, 25 bp, Homo sapien
aacaagcatctagttgggaaccagt

SEQ ID NO: 4548166 - DNA, 25 bp, Homo sapien
tgtaccacataagagagagcatcac

SEQ ID NO: 4548167 - DNA, 25 bp, Homo sapien
tttatcaggcgtataatcattcctc

SEQ ID NO: 4548168 - DNA, 25 bp, Homo sapien
tctgaaggctcatcctgaggaaata

SEQ ID NO: 4548169 - DNA, 25 bp, Homo sapien
tctgattctttggtggaatttccag

SEQ ID NO: 4548170 - DNA, 25 bp, Homo sapien
tgattctttggtggaatttccaggc

SEQ ID NO: 4548171 - DNA, 25 bp, Homo sapien
agtttaagctttctacagcaagaat

SEQ ID NO: 4548172 - DNA, 25 bp, Homo sapien
caagaattacagtgatgttttgctc

SEQ ID NO: 4548173 - DNA, 25 bp, Homo sapien
agaattacagtgatgttttgctctg

SEQ ID NO: 4548174 - DNA, 25 bp, Homo sapien
cagcaagaattacagtgatgttttg

SEQ ID NO: 4548175 - DNA, 25 bp, Homo sapien
atcacagatgggtcagtcaaatttt

SEQ ID NO: 4548176 - DNA, 25 bp, Homo sapien
cagatgggtcagtcaaattttcacc

SEQ ID NO: 4548177 - DNA, 25 bp, Homo sapien
gggtcagtcaaattttcaccaacac

SEQ ID NO: 4548178 - DNA, 25 bp, Homo sapien
gatgggtcagtcaaattttcaccaa

SEQ ID NO: 4548179 - DNA, 25 bp, Homo sapien
tgctgtgagcaagcccaagctagct

SEQ ID NO: 4548180 - DNA, 25 bp, Homo sapien
tccagtcttttgaggtgacagcaga

SEQ ID NO: 4548181 - DNA, 25 bp, Homo sapien
gccagctgctatgtaagaagtctaa

SEQ ID NO: 4548182 - DNA, 25 bp, Homo sapien
tagttgacagtgaacagagacctca

SEQ ID NO: 4548183 - DNA, 25 bp, Homo sapien
gtatattcgtaagtccagtggctaa

SEQ ID NO: 4548184 - DNA, 25 bp, Homo sapien
cttgcaaatcaagtaccagtaactc

SEQ ID NO: 4548185 - DNA, 25 bp, Homo sapien
gctgaatggcaatacagcaggaaaa

SEQ ID NO: 4548186 - DNA, 25 bp, Homo sapien
taaaggctagcatgatctcttccag

SEQ ID NO: 4548187 - DNA, 25 bp, Homo sapien
agaatatggtatggatttgggtttc

SEQ ID NO: 4548188 - DNA, 25 bp, Homo sapien
aggcaaacgtaagcttttgtgctgc

SEQ ID NO: 4548189 - DNA, 25 bp, Homo sapien
cttggagaatatggtatggatttgg

SEQ ID NO: 4548190 - DNA, 25 bp, Homo sapien
taaaggcaaacgtaagcttttgtgc

SEQ ID NO: 4548191 - DNA, 25 bp, Homo sapien
tccactattaaatattcactgacac

SEQ ID NO: 4548192 - DNA, 25 bp, Homo sapien
ccactattaaatattcactgacact

SEQ ID NO: 4548193 - DNA, 25 bp, Homo sapien
tccaaacgatacactgtgacaggct

SEQ ID NO: 4548194 - DNA, 25 bp, Homo sapien
aaaactctattttggcacagaggcc

SEQ ID NO: 4548195 - DNA, 25 bp, Homo sapien
cacagaggcctagttgtgaccaaga

SEQ ID NO: 4548196 - DNA, 25 bp, Homo sapien
gatatcatgttctgaccaggtacac

SEQ ID NO: 4548197 - DNA, 25 bp, Homo sapien
ctctgtgataacctcatcaagttat

SEQ ID NO: 4548198 - DNA, 25 bp, Homo sapien
gctctgtgataacctcatcaagtta

SEQ ID NO: 4548199 - DNA, 25 bp, Homo sapien
tctgtgataacctcatcaagttatt

SEQ ID NO: 4548200 - DNA, 25 bp, Homo sapien
taaatctgtaaaggtccaaaatgct

SEQ ID NO: 4548201 - DNA, 25 bp, Homo sapien
tagctggcttaaatggagaagtgag

SEQ ID NO: 4548202 - DNA, 25 bp, Homo sapien
taatttgtatccatagctggcttaa

SEQ ID NO: 4548203 - DNA, 25 bp, Homo sapien
taatagtaatttgtatccatagctg

SEQ ID NO: 4548204 - DNA, 25 bp, Homo sapien
tgtatccatagctggcttaaatgga

SEQ ID NO: 4548205 - DNA, 25 bp, Homo sapien
gcaaataaacaaacgagaccattta

SEQ ID NO: 4548206 - DNA, 25 bp, Homo sapien
agaatggcaaataaacaaacgagac

SEQ ID NO: 4548207 - DNA, 25 bp, Homo sapien
catttaaaaagtactagtacagcaa

SEQ ID NO: 4548208 - DNA, 25 bp, Homo sapien
ccatttaaaaagtactagtacagca

SEQ ID NO: 4548209 - DNA, 25 bp, Homo sapien
caagtgaagagcacattatgctgca

SEQ ID NO: 4548210 - DNA, 25 bp, Homo sapien
tatgctgcacactatcctaactcct

SEQ ID NO: 4548211 - DNA, 25 bp, Homo sapien
gacagctgtgcatttagacacctac

SEQ ID NO: 4548212 - DNA, 25 bp, Homo sapien
tagacacctacaagtgaagagcaca

SEQ ID NO: 4548213 - DNA, 25 bp, Homo sapien
caagtcaaatctgctatgtgctaag

SEQ ID NO: 4548214 - DNA, 25 bp, Homo sapien
caggaaaaggaagttagccaacagt

SEQ ID NO: 4548215 - DNA, 25 bp, Homo sapien
gaaacctactgtcttgcaggaaaag

SEQ ID NO: 4548216 - DNA, 25 bp, Homo sapien
tttagcaggtctaccatgagaagat

SEQ ID NO: 4548217 - DNA, 25 bp, Homo sapien
catttaatgttccttcttcagatgg

SEQ ID NO: 4548218 - DNA, 25 bp, Homo sapien
atttaatgttccttcttcagatggc

SEQ ID NO: 4548219 - DNA, 25 bp, Homo sapien
gaattgatggacaaagaactgagag

SEQ ID NO: 4548220 - DNA, 25 bp, Homo sapien
taacaacatacactggcaccaaatg

SEQ ID NO: 4548221 - DNA, 25 bp, Homo sapien
ttccaaggattccagtgtcaactag

SEQ ID NO: 4548222 - DNA, 25 bp, Homo sapien
gtgtcaactagacacacaggtagag

SEQ ID NO: 4548223 - DNA, 25 bp, Homo sapien
caataacctgtcagattgcctatag

SEQ ID NO: 4548224 - DNA, 25 bp, Homo sapien
catcagctttctagtggatcttcct

SEQ ID NO: 4548225 - DNA, 25 bp, Homo sapien
gatcttcctgtatgcaggctttcta

SEQ ID NO: 4548226 - DNA, 25 bp, Homo sapien
tcatcaaagtgcttaccaaaagcag

SEQ ID NO: 4548227 - DNA, 25 bp, Homo sapien
atttctctgtttgatggtctatctt

SEQ ID NO: 4548228 - DNA, 25 bp, Homo sapien
tctctgtttgatggtctatcttgta

SEQ ID NO: 4548229 - DNA, 25 bp, Homo sapien
ctgtttgatggtctatcttgtaacc

SEQ ID NO: 4548230 - DNA, 25 bp, Homo sapien
tctgtttgatggtctatcttgtaac

SEQ ID NO: 4548231 - DNA, 25 bp, Homo sapien
ttgaatagtatctccttcttttctc

SEQ ID NO: 4548232 - DNA, 25 bp, Homo sapien
tttatgtccatcatcactttaaaca

SEQ ID NO: 4548233 - DNA, 25 bp, Homo sapien
ataattccactatcttatcagaaat

SEQ ID NO: 4548234 - DNA, 25 bp, Homo sapien
ttccactatcttatcagaaatcaaa

SEQ ID NO: 4548235 - DNA, 25 bp, Homo sapien
ggtcaggaagagtccctccagaaag

SEQ ID NO: 4548236 - DNA, 25 bp, Homo sapien
gttgcaaagttgtgcagctcagggt

SEQ ID NO: 4548237 - DNA, 25 bp, Homo sapien
gactcccatgagttctaaattgcca

SEQ ID NO: 4548238 - DNA, 25 bp, Homo sapien
tgaggtcatcttcggttaggcttta

SEQ ID NO: 4548239 - DNA, 25 bp, Homo sapien
taataatatatatctgtttagttga

SEQ ID NO: 4548240 - DNA, 25 bp, Homo sapien
tatatatctgtttagttgaaatcta

SEQ ID NO: 4548241 - DNA, 25 bp, Homo sapien
atatatctgtttagttgaaatctac

SEQ ID NO: 4548242 - DNA, 25 bp, Homo sapien
taatatatatctgtttagttgaaat

SEQ ID NO: 4548243 - DNA, 25 bp, Homo sapien
catgagtgtcttcggtagatggcct

SEQ ID NO: 4548244 - DNA, 25 bp, Homo sapien
aatctacttcatgagtgtcttcggt

SEQ ID NO: 4548245 - DNA, 25 bp, Homo sapien
agctgctttggaatctacttcatga

SEQ ID NO: 4548246 - DNA, 25 bp, Homo sapien
tctacttcatgagtgtcttcggtag

SEQ ID NO: 4548247 - DNA, 25 bp, Homo sapien
agactgggtttctccttgttgttca

SEQ ID NO: 4548248 - DNA, 25 bp, Homo sapien
actgggtttctccttgttgttcagg

SEQ ID NO: 4548249 - DNA, 25 bp, Homo sapien
agagactgggtttctccttgttgtt

SEQ ID NO: 4548250 - DNA, 25 bp, Homo sapien
attttgttttcagtagagactgggt

SEQ ID NO: 4548251 - DNA, 25 bp, Homo sapien
gagatatattagaagactctgggca

SEQ ID NO: 4548252 - DNA, 25 bp, Homo sapien
cagtgccgcaatgaataatcctttt

SEQ ID NO: 4548253 - DNA, 25 bp, Homo sapien
tgtagaggacaaaaagaccagactg

SEQ ID NO: 4548254 - DNA, 25 bp, Homo sapien
tagtggaaggtcaacagatacggcc

SEQ ID NO: 4548255 - DNA, 25 bp, Homo sapien
taagcatgaaactctaaagggtaga

SEQ ID NO: 4548256 - DNA, 25 bp, Homo sapien
gagaaattaatggtacaaggcaaca

SEQ ID NO: 4548257 - DNA, 25 bp, Homo sapien
caaggcaacatgtattgtctgtgac

SEQ ID NO: 4548258 - DNA, 25 bp, Homo sapien
tgctgaattcagtatgccaaaggaa

SEQ ID NO: 4548259 - DNA, 25 bp, Homo sapien
gaagttctgtgacagtcagtaaatc

SEQ ID NO: 4548260 - DNA, 25 bp, Homo sapien
tctgtgacagtcagtaaatccagca

SEQ ID NO: 4548261 - DNA, 25 bp, Homo sapien
gagaactcactcgtttcaaagtgtt

SEQ ID NO: 4548262 - DNA, 25 bp, Homo sapien
agcaagagaactcactcgtttcaaa

SEQ ID NO: 4548263 - DNA, 25 bp, Homo sapien
tgaactaaatttcaacccattactc

SEQ ID NO: 4548264 - DNA, 25 bp, Homo sapien
ttcaacccattactctaagtagtat

SEQ ID NO: 4548265 - DNA, 25 bp, Homo sapien
aacccattactctaagtagtattag

SEQ ID NO: 4548266 - DNA, 25 bp, Homo sapien
aatttcaacccattactctaagtag

SEQ ID NO: 4548267 - DNA, 25 bp, Homo sapien
tgaaggctttactggctcaataaat

SEQ ID NO: 4548268 - DNA, 25 bp, Homo sapien
cagctactgcttttctgctaactca

SEQ ID NO: 4548269 - DNA, 25 bp, Homo sapien
caacaaggttatctatatgctcact

SEQ ID NO: 4548270 - DNA, 25 bp, Homo sapien
tatgagctatttatacaacaaggtt

SEQ ID NO: 4548271 - DNA, 25 bp, Homo sapien
ctcatatttaggcatctctgtatac

SEQ ID NO: 4548272 - DNA, 25 bp, Homo sapien
tatttaggcatctctgtatactcca

SEQ ID NO: 4548273 - DNA, 25 bp, Homo sapien
tctgtatactccataatcacatttc

SEQ ID NO: 4548274 - DNA, 25 bp, Homo sapien
tgtatactccataatcacatttctt

SEQ ID NO: 4548275 - DNA, 25 bp, Homo sapien
aacctctgtaaatccatgctatctc

SEQ ID NO: 4548276 - DNA, 25 bp, Homo sapien
taaacctctgtaaatccatgctatc

SEQ ID NO: 4548277 - DNA, 25 bp, Homo sapien
ctttaaacctctgtaaatccatgct

SEQ ID NO: 4548278 - DNA, 25 bp, Homo sapien
ttctttaaacctctgtaaatccatg

SEQ ID NO: 4548279 - DNA, 25 bp, Homo sapien
ctgcgcctggctacttccaaaaatt

SEQ ID NO: 4548280 - DNA, 25 bp, Homo sapien
cacacaggctatggtgcagttgtgt

SEQ ID NO: 4548281 - DNA, 25 bp, Homo sapien
gcttctgggtgcaagcagttcgcct

SEQ ID NO: 4548282 - DNA, 25 bp, Homo sapien
agctttcagcttctgggtgcaagca

SEQ ID NO: 4548283 - DNA, 25 bp, Homo sapien
tctgtattatctccttctgtagctt

SEQ ID NO: 4548284 - DNA, 25 bp, Homo sapien
tttagagcaaacagtttcttgatct

SEQ ID NO: 4548285 - DNA, 25 bp, Homo sapien
ttctgtattatctccttctgtagct

SEQ ID NO: 4548286 - DNA, 25 bp, Homo sapien
ttagagcaaacagtttcttgatctt

SEQ ID NO: 4548287 - DNA, 25 bp, Homo sapien
gctagtagatgaactgcctaatttt

SEQ ID NO: 4548288 - DNA, 25 bp, Homo sapien
ctgagatggtgtactaacaaaaaat

SEQ ID NO: 4548289 - DNA, 25 bp, Homo sapien
tgtggtatgctagtagatgaactgc

SEQ ID NO: 4548290 - DNA, 25 bp, Homo sapien
ggatgacagatgtggtatgctagta

SEQ ID NO: 4548291 - DNA, 25 bp, Homo sapien
accagcctctggaaaattaaattct

SEQ ID NO: 4548292 - DNA, 25 bp, Homo sapien
ctgcaggtaagtcttgaccaaatat

SEQ ID NO: 4548293 - DNA, 25 bp, Homo sapien
gggtactgcaggtaagtcttgacca

SEQ ID NO: 4548294 - DNA, 25 bp, Homo sapien
gaggaaccagcctctggaaaattaa

SEQ ID NO: 4548295 - DNA, 25 bp, Homo sapien
aaaatattacaatgaaaaggattat

SEQ ID NO: 4548296 - DNA, 25 bp, Homo sapien
atattacaatgaaaaggattattac

SEQ ID NO: 4548297 - DNA, 25 bp, Homo sapien
cattaaaatattacaatgaaaagga

SEQ ID NO: 4548298 - DNA, 25 bp, Homo sapien
taaaatattacaatgaaaaggatta

SEQ ID NO: 4548299 - DNA, 25 bp, Homo sapien
tacagaaggtcttacaggaccatca

SEQ ID NO: 4548300 - DNA, 25 bp, Homo sapien
ttaatgtatctaccgtcagggctga

SEQ ID NO: 4548301 - DNA, 25 bp, Homo sapien
tatgaactttgctagcttccgacgc

SEQ ID NO: 4548302 - DNA, 25 bp, Homo sapien
tcagggctgaaagatcttgcaaatg

SEQ ID NO: 4548303 - DNA, 25 bp, Homo sapien
ctccctccaaacagtaaagaacagt

SEQ ID NO: 4548304 - DNA, 25 bp, Homo sapien
ttctccctccaaacagtaaagaaca

SEQ ID NO: 4548305 - DNA, 25 bp, Homo sapien
tctccctccaaacagtaaagaacag

SEQ ID NO: 4548306 - DNA, 25 bp, Homo sapien
tccctccaaacagtaaagaacagta

SEQ ID NO: 4548307 - DNA, 25 bp, Homo sapien
aaaagtgacacgaattctctcttca

SEQ ID NO: 4548308 - DNA, 25 bp, Homo sapien
gaattctctcttcactcccagaatg

SEQ ID NO: 4548309 - DNA, 25 bp, Homo sapien
acgaattctctcttcactcccagaa

SEQ ID NO: 4548310 - DNA, 25 bp, Homo sapien
ctttcaaaagtgacacgaattctct

SEQ ID NO: 4548311 - DNA, 25 bp, Homo sapien
agaactggtttctcatgataagcca

SEQ ID NO: 4548312 - DNA, 25 bp, Homo sapien
gataacgctggtacttccatacaat

SEQ ID NO: 4548313 - DNA, 25 bp, Homo sapien
tggtccatcggaagtcttatctttc

SEQ ID NO: 4548314 - DNA, 25 bp, Homo sapien
ctaagaatgataagtggaggaggca

SEQ ID NO: 4548315 - DNA, 25 bp, Homo sapien
ccacagatttgagggataacagaat

SEQ ID NO: 4548316 - DNA, 25 bp, Homo sapien
tgcaataagaagattaaccataatg

SEQ ID NO: 4548317 - DNA, 25 bp, Homo sapien
tatactgtacaaagaggtagactgc

SEQ ID NO: 4548318 - DNA, 25 bp, Homo sapien
aaatggagtcaaccacgtcccagga

SEQ ID NO: 4548319 - DNA, 25 bp, Homo sapien
gccagaacatagctaattacaaaca

SEQ ID NO: 4548320 - DNA, 25 bp, Homo sapien
taggcagggcgaggattagaattaa

SEQ ID NO: 4548321 - DNA, 25 bp, Homo sapien
gagtatggttgactcatagcaaaac

SEQ ID NO: 4548322 - DNA, 25 bp, Homo sapien
aagtgcttctcaattataccgtgat

SEQ ID NO: 4548323 - DNA, 25 bp, Homo sapien
ccaagatggtgcttcatgaggataa

SEQ ID NO: 4548324 - DNA, 25 bp, Homo sapien
ccaaaaatcatccagtatgggtgaa

SEQ ID NO: 4548325 - DNA, 25 bp, Homo sapien
taagtaatacaagagccataatcac

SEQ ID NO: 4548326 - DNA, 25 bp, Homo sapien
taaagtattgcctttctgggaacac

SEQ ID NO: 4548327 - DNA, 25 bp, Homo sapien
tgtatcactggttcaaactgaagtg

SEQ ID NO: 4548328 - DNA, 25 bp, Homo sapien
tgttcctagtgatagctttcagaag

SEQ ID NO: 4548329 - DNA, 25 bp, Homo sapien
gctaagcaagtcatgggcatcttta

SEQ ID NO: 4548330 - DNA, 25 bp, Homo sapien
aactgaagtgtacctatctctgtgg

SEQ ID NO: 4548331 - DNA, 25 bp, Homo sapien
gaaaagagcaaaatactgggcatac

SEQ ID NO: 4548332 - DNA, 25 bp, Homo sapien
tcttgcaaagcactaaatgggtata

SEQ ID NO: 4548333 - DNA, 25 bp, Homo sapien
gaattacggcaaggagtagacccaa

SEQ ID NO: 4548334 - DNA, 25 bp, Homo sapien
aaatagcctggatcaagcagggtgt

SEQ ID NO: 4548335 - DNA, 25 bp, Homo sapien
tatcactgatgttgaagtaatcact

SEQ ID NO: 4548336 - DNA, 25 bp, Homo sapien
gaaattatggcaattgtatcactga

SEQ ID NO: 4548337 - DNA, 25 bp, Homo sapien
tcatcattacataaggtcctgcctg

SEQ ID NO: 4548338 - DNA, 25 bp, Homo sapien
tctagcaaacgcacataccaaaata

SEQ ID NO: 4548339 - DNA, 25 bp, Homo sapien
aatactgcaaagcatccgtttcact

SEQ ID NO: 4548340 - DNA, 25 bp, Homo sapien
agaaattccttctggttcgagttgg

SEQ ID NO: 4548341 - DNA, 25 bp, Homo sapien
agtgagagagaagtacaacaccttc

SEQ ID NO: 4548342 - DNA, 25 bp, Homo sapien
catatggatcataacactcagagga

SEQ ID NO: 4548343 - DNA, 25 bp, Homo sapien
cattcttgaactgaaggtaactgtt

SEQ ID NO: 4548344 - DNA, 25 bp, Homo sapien
taagcaataacaatccattcttgaa

SEQ ID NO: 4548345 - DNA, 25 bp, Homo sapien
caagaaccacaaatgtataaagcat

SEQ ID NO: 4548346 - DNA, 25 bp, Homo sapien
agaaccacaaatgtataaagcatca

SEQ ID NO: 4548347 - DNA, 25 bp, Homo sapien
ttacaattggtgcatgataaaaggc

SEQ ID NO: 4548348 - DNA, 25 bp, Homo sapien
cattactatccaaaatccgtacttc

SEQ ID NO: 4548349 - DNA, 25 bp, Homo sapien
gcataaaactttcgcgtaattggaa

SEQ ID NO: 4548350 - DNA, 25 bp, Homo sapien
tccttcattactatccaaaatccgt

SEQ ID NO: 4548351 - DNA, 25 bp, Homo sapien
tgttctgaaagttgttttcgctgtc

SEQ ID NO: 4548352 - DNA, 25 bp, Homo sapien
ctgaaagttgttttcgctgtcatcc

SEQ ID NO: 4548353 - DNA, 25 bp, Homo sapien
gaaagttgttttcgctgtcatccat

SEQ ID NO: 4548354 - DNA, 25 bp, Homo sapien
gatctcttctgttatgttctgaaag

SEQ ID NO: 4548355 - DNA, 25 bp, Homo sapien
tctgatgagcatcttgagattgtgg

SEQ ID NO: 4548356 - DNA, 25 bp, Homo sapien
gagcatcttgagattgtgggatatg

SEQ ID NO: 4548357 - DNA, 25 bp, Homo sapien
gattgtgggatatgggacatttcag

SEQ ID NO: 4548358 - DNA, 25 bp, Homo sapien
gatatgggacatttcagccttagtt

SEQ ID NO: 4548359 - DNA, 25 bp, Homo sapien
cttaaggcaggttgaattactccag

SEQ ID NO: 4548360 - DNA, 25 bp, Homo sapien
atttcatagccatggtttcatcttg

SEQ ID NO: 4548361 - DNA, 25 bp, Homo sapien
tccacatatcagataacaacatttg

SEQ ID NO: 4548362 - DNA, 25 bp, Homo sapien
tgtgagctacaaaaggtctaagtct

SEQ ID NO: 4548363 - DNA, 25 bp, Homo sapien
taattcaacggccaactgaccaaaa

SEQ ID NO: 4548364 - DNA, 25 bp, Homo sapien
ctgttctaataattcaacggccaac

SEQ ID NO: 4548365 - DNA, 25 bp, Homo sapien
ctaataattcaacggccaactgacc

SEQ ID NO: 4548366 - DNA, 25 bp, Homo sapien
gttctaataattcaacggccaactg

SEQ ID NO: 4548367 - DNA, 25 bp, Homo sapien
cattgaacgatagatcttacaggca

SEQ ID NO: 4548368 - DNA, 25 bp, Homo sapien
agtatcatctaccaggtcactctgc

SEQ ID NO: 4548369 - DNA, 25 bp, Homo sapien
gccatgacctgcctcttcataaggc

SEQ ID NO: 4548370 - DNA, 25 bp, Homo sapien
ttaagtggataaggaaagcgcttgg

SEQ ID NO: 4548371 - DNA, 25 bp, Homo sapien
gattcatgactctttcgcaactgag

SEQ ID NO: 4548372 - DNA, 25 bp, Homo sapien
gtcttaatgaaatggttatgcctca

SEQ ID NO: 4548373 - DNA, 25 bp, Homo sapien
tgctggaggtatttcggccagacct

SEQ ID NO: 4548374 - DNA, 25 bp, Homo sapien
tcctttttatctgccctattgccaa

SEQ ID NO: 4548375 - DNA, 25 bp, Homo sapien
gaaaacgtttcctagtataggtgca

SEQ ID NO: 4548376 - DNA, 25 bp, Homo sapien
ccgattatttccaccaagactatta

SEQ ID NO: 4548377 - DNA, 25 bp, Homo sapien
gagtgatcttatatcctggaggaag

SEQ ID NO: 4548378 - DNA, 25 bp, Homo sapien
gtcctatatcaatcagagtgatctt

SEQ ID NO: 4548379 - DNA, 25 bp, Homo sapien
ctttactcctctcttaccacaaatt

SEQ ID NO: 4548380 - DNA, 25 bp, Homo sapien
caaattcagcccatattttatcttg

SEQ ID NO: 4548381 - DNA, 25 bp, Homo sapien
gcccatattttatcttgttctgtaa

SEQ ID NO: 4548382 - DNA, 25 bp, Homo sapien
tactcctctcttaccacaaattcag

SEQ ID NO: 4548383 - DNA, 25 bp, Homo sapien
cagcattggattagttggaccttgt

SEQ ID NO: 4548384 - DNA, 25 bp, Homo sapien
ctgtttgacgtctcgaacaagatga

SEQ ID NO: 4548385 - DNA, 25 bp, Homo sapien
caagatgaaacagcattggattagt

SEQ ID NO: 4548386 - DNA, 25 bp, Homo sapien
tctcgaacaagatgaaacagcattg

SEQ ID NO: 4548387 - DNA, 25 bp, Homo sapien
gcgctgtacaatacctttcttcttg

SEQ ID NO: 4548388 - DNA, 25 bp, Homo sapien
tgtttcacaaaagtcatcactgcaa

SEQ ID NO: 4548389 - DNA, 25 bp, Homo sapien
tcactgcaactttacaattgtatct

SEQ ID NO: 4548390 - DNA, 25 bp, Homo sapien
tttcattgataatggcgctgtacaa

SEQ ID NO: 4548391 - DNA, 25 bp, Homo sapien
tttatatatactgttagagtgggcc

SEQ ID NO: 4548392 - DNA, 25 bp, Homo sapien
tatactgttagagtgggccacctac

SEQ ID NO: 4548393 - DNA, 25 bp, Homo sapien
gagtgggccacctaccattatttct

SEQ ID NO: 4548394 - DNA, 25 bp, Homo sapien
gttagagtgggccacctaccattat

SEQ ID NO: 4548395 - DNA, 25 bp, Homo sapien
taaggaatttatgcatgcttactcc

SEQ ID NO: 4548396 - DNA, 25 bp, Homo sapien
aatgcaactctatccattacaagag

SEQ ID NO: 4548397 - DNA, 25 bp, Homo sapien
catcaagcatagcttgttccaagga

SEQ ID NO: 4548398 - DNA, 25 bp, Homo sapien
tgtaaagttcttccagtctcggaat

SEQ ID NO: 4548399 - DNA, 25 bp, Homo sapien
taggtaacactatgcagaagaaatt

SEQ ID NO: 4548400 - DNA, 25 bp, Homo sapien
gaaaaacaactgtcctgcaaattct

SEQ ID NO: 4548401 - DNA, 25 bp, Homo sapien
tgaactcctggcaagcaagaagaaa

SEQ ID NO: 4548402 - DNA, 25 bp, Homo sapien
ttcatcagacaaaccacatatacac

SEQ ID NO: 4548403 - DNA, 25 bp, Homo sapien
tgtcaactctatcccatgccaatgt

SEQ ID NO: 4548404 - DNA, 25 bp, Homo sapien
tcccatgccaatgtaaggataagct

SEQ ID NO: 4548405 - DNA, 25 bp, Homo sapien
taaggataagctggtcaaatgcaga

SEQ ID NO: 4548406 - DNA, 25 bp, Homo sapien
ttggcaatgtcaactctatcccatg

SEQ ID NO: 4548407 - DNA, 25 bp, Homo sapien
aagtattgctacatctatatcttga

SEQ ID NO: 4548408 - DNA, 25 bp, Homo sapien
cttttagcagtgcagtaagtattgc

SEQ ID NO: 4548409 - DNA, 25 bp, Homo sapien
tgcagtaagtattgctacatctata

SEQ ID NO: 4548410 - DNA, 25 bp, Homo sapien
ttagcagtgcagtaagtattgctac

SEQ ID NO: 4548411 - DNA, 25 bp, Homo sapien
tcagtgtttgaaataaatgaagtgc

SEQ ID NO: 4548412 - DNA, 25 bp, Homo sapien
tttcttttcatgcactccatcagtg

SEQ ID NO: 4548413 - DNA, 25 bp, Homo sapien
tggaaataatatcgggctctgctgc

SEQ ID NO: 4548414 - DNA, 25 bp, Homo sapien
tttgatagtggaaataatatcgggc

SEQ ID NO: 4548415 - DNA, 25 bp, Homo sapien
accctcaaatataagtgccaccaca

SEQ ID NO: 4548416 - DNA, 25 bp, Homo sapien
tgtgaggataacatttggcccaccc

SEQ ID NO: 4548417 - DNA, 25 bp, Homo sapien
gaatatacgctagcagatctgcagc

SEQ ID NO: 4548418 - DNA, 25 bp, Homo sapien
gggctttcctgaaggtattcaagaa

SEQ ID NO: 4548419 - DNA, 25 bp, Homo sapien
aatgggaatgcagattattcaaaac

SEQ ID NO: 4548420 - DNA, 25 bp, Homo sapien
tcatccaccaatatgaaatgggaat

SEQ ID NO: 4548421 - DNA, 25 bp, Homo sapien
tcttctcagtctgacttccgcccca

SEQ ID NO: 4548422 - DNA, 25 bp, Homo sapien
ttccgccccatactttccaacagtg

SEQ ID NO: 4548423 - DNA, 25 bp, Homo sapien
tgagggcatctccaacatgttttgc

SEQ ID NO: 4548424 - DNA, 25 bp, Homo sapien
gcaaatctttcgagatgatctggaa

SEQ ID NO: 4548425 - DNA, 25 bp, Homo sapien
tcaatcactccccatggagctattc

SEQ ID NO: 4548426 - DNA, 25 bp, Homo sapien
ctattccgatagtgcaaatctttcg

SEQ ID NO: 4548427 - DNA, 25 bp, Homo sapien
agcaactgcttgattcgtgggtgaa

SEQ ID NO: 4548428 - DNA, 25 bp, Homo sapien
caagtttgggtaactccatttgcca

SEQ ID NO: 4548429 - DNA, 25 bp, Homo sapien
ttaaaatccaggctccagttgtaac

SEQ ID NO: 4548430 - DNA, 25 bp, Homo sapien
tcaggtttggtgtcatatgatagcc

SEQ ID NO: 4548431 - DNA, 25 bp, Homo sapien
tggcaagacttgcagtaaaacaagc

SEQ ID NO: 4548432 - DNA, 25 bp, Homo sapien
ttagctctgtaggaatgagaacccc

SEQ ID NO: 4548433 - DNA, 25 bp, Homo sapien
caagcatgttgcttgaccaagcgac

SEQ ID NO: 4548434 - DNA, 25 bp, Homo sapien
taagcatccgttgggctctgttctg

SEQ ID NO: 4548435 - DNA, 25 bp, Homo sapien
ttctgcagtttcctgacagaaccat

SEQ ID NO: 4548436 - DNA, 25 bp, Homo sapien
attctgcagtttcctgacagaacca

SEQ ID NO: 4548437 - DNA, 25 bp, Homo sapien
ctgacgagttgctgacaaatttgac

SEQ ID NO: 4548438 - DNA, 25 bp, Homo sapien
gacaaatttgacatcctggaaggca

SEQ ID NO: 4548439 - DNA, 25 bp, Homo sapien
tgacgagttgctgacaaatttgaca

SEQ ID NO: 4548440 - DNA, 25 bp, Homo sapien
gctgacaaatttgacatcctggaag

SEQ ID NO: 4548441 - DNA, 25 bp, Homo sapien
tccttggaacttggtataatatata

SEQ ID NO: 4548442 - DNA, 25 bp, Homo sapien
cttggaacttggtataatatataca

SEQ ID NO: 4548443 - DNA, 25 bp, Homo sapien
ccttggaacttggtataatatatac

SEQ ID NO: 4548444 - DNA, 25 bp, Homo sapien
gacttgaggacactgaagagcaacc

SEQ ID NO: 4548445 - DNA, 25 bp, Homo sapien
caagcagaaaccagacggagtctat

SEQ ID NO: 4548446 - DNA, 25 bp, Homo sapien
cactgacccatgaagatcgtacaca

SEQ ID NO: 4548447 - DNA, 25 bp, Homo sapien
tagtcggcttgggatgccacaacca

SEQ ID NO: 4548448 - DNA, 25 bp, Homo sapien
cctgttatctccagcatactaccaa

SEQ ID NO: 4548449 - DNA, 25 bp, Homo sapien
taacagtaatagtctgcttctcagg

SEQ ID NO: 4548450 - DNA, 25 bp, Homo sapien
gtaactttcctcctgttatctccag

SEQ ID NO: 4548451 - DNA, 25 bp, Homo sapien
ctccagtgtcctcctaacagtaata

SEQ ID NO: 4548452 - DNA, 25 bp, Homo sapien
actgggtttcgccatctttcccagg

SEQ ID NO: 4548453 - DNA, 25 bp, Homo sapien
gagactgggtttcgccatctttccc

SEQ ID NO: 4548454 - DNA, 25 bp, Homo sapien
ctttcccaggctagtcttgtactcc

SEQ ID NO: 4548455 - DNA, 25 bp, Homo sapien
tagagactgggtttcgccatctttc

SEQ ID NO: 4548456 - DNA, 25 bp, Homo sapien
tctccattccgcacctttcggttta

SEQ ID NO: 4548457 - DNA, 25 bp, Homo sapien
tctctccattccgcacctttcggtt

SEQ ID NO: 4548458 - DNA, 25 bp, Homo sapien
atcggaagctgcaatgcaccgcctc

SEQ ID NO: 4548459 - DNA, 25 bp, Homo sapien
ctatcggaagctgcaatgcaccgcc

SEQ ID NO: 4548460 - DNA, 25 bp, Homo sapien
aacttgagcagagcatttggttccc

SEQ ID NO: 4548461 - DNA, 25 bp, Homo sapien
tatccgctgcacagcaaacaaggca

SEQ ID NO: 4548462 - DNA, 25 bp, Homo sapien
tgcacagcaaacaaggcactgctcc

SEQ ID NO: 4548463 - DNA, 25 bp, Homo sapien
gtagagtatccgctgcacagcaaac

SEQ ID NO: 4548464 - DNA, 25 bp, Homo sapien
actggcgccaggaggaccgtgctcc

SEQ ID NO: 4548465 - DNA, 25 bp, Homo sapien
ccaggagatgcggagcttgtaggct

SEQ ID NO: 4548466 - DNA, 25 bp, Homo sapien
agatgcggagcttgtaggctgagcc

SEQ ID NO: 4548467 - DNA, 25 bp, Homo sapien
gccagcaactggcgccaggaggacc

SEQ ID NO: 4548468 - DNA, 25 bp, Homo sapien
gtcccgagaggacaaatccggaagc

SEQ ID NO: 4548469 - DNA, 25 bp, Homo sapien
cggaagcctcaaggcaattcgaggg

SEQ ID NO: 4548470 - DNA, 25 bp, Homo sapien
gtccttcgccgcatggaacgcggct

SEQ ID NO: 4548471 - DNA, 25 bp, Homo sapien
caagtctctcctttaccgcccgcaa

SEQ ID NO: 4548472 - DNA, 25 bp, Homo sapien
agaactaactcagctccggcgctag

SEQ ID NO: 4548473 - DNA, 25 bp, Homo sapien
ctagcagcagaagccgagtctttca

SEQ ID NO: 4548474 - DNA, 25 bp, Homo sapien
cagaggccgccggacaaggaacgcc

SEQ ID NO: 4548475 - DNA, 25 bp, Homo sapien
catctatcgggaagcgtctccggag

SEQ ID NO: 4548476 - DNA, 25 bp, Homo sapien
ttgtgcgaccaactcctccgggtga

SEQ ID NO: 4548477 - DNA, 25 bp, Homo sapien
aattgtgcgaccaactcctccgggt

SEQ ID NO: 4548478 - DNA, 25 bp, Homo sapien
attgtgcgaccaactcctccgggtg

SEQ ID NO: 4548479 - DNA, 25 bp, Homo sapien
tggccacagggacgcgcccgcgccc

SEQ ID NO: 4548480 - DNA, 25 bp, Homo sapien
ggccacagggacgcgcccgcgcccg

SEQ ID NO: 4548481 - DNA, 25 bp, Homo sapien
gccacagggacgcgcccgcgcccgc

SEQ ID NO: 4548482 - DNA, 25 bp, Homo sapien
ctggccacagggacgcgcccgcgcc

SEQ ID NO: 4548483 - DNA, 25 bp, Homo sapien
atacacgcatacaccacaccttctg

SEQ ID NO: 4548484 - DNA, 25 bp, Homo sapien
tgtaatatgtacctatccacctttc

SEQ ID NO: 4548485 - DNA, 25 bp, Homo sapien
tcccttgatgtaatatgtacctatc

SEQ ID NO: 4548486 - DNA, 25 bp, Homo sapien
ttgatgtaatatgtacctatccacc

SEQ ID NO: 4548487 - DNA, 25 bp, Homo sapien
cagtagaggatcaaattccaaaagg

SEQ ID NO: 4548488 - DNA, 25 bp, Homo sapien
cttgtcctactagaaaatgttgcag

SEQ ID NO: 4548489 - DNA, 25 bp, Homo sapien
ttgtgggttgctccttaattgccag

SEQ ID NO: 4548490 - DNA, 25 bp, Homo sapien
tgccagtaatggaggactactataa

SEQ ID NO: 4548491 - DNA, 25 bp, Homo sapien
gctactgaggagatacatctagttg

SEQ ID NO: 4548492 - DNA, 25 bp, Homo sapien
cactattgtcagcttggttgctaca

SEQ ID NO: 4548493 - DNA, 25 bp, Homo sapien
tataaagcttggatgagggtgcaga

SEQ ID NO: 4548494 - DNA, 25 bp, Homo sapien
tgtaccagttactatgctactgagg

SEQ ID NO: 4548495 - DNA, 25 bp, Homo sapien
caggagaatgttcaggccacatcta

SEQ ID NO: 4548496 - DNA, 25 bp, Homo sapien
tattcaaacttgatacaatggaggc

SEQ ID NO: 4548497 - DNA, 25 bp, Homo sapien
catttgccataaacgaaaggaccca

SEQ ID NO: 4548498 - DNA, 25 bp, Homo sapien
cagagtgattagctggtctaaccta

SEQ ID NO: 4548499 - DNA, 25 bp, Homo sapien
gactaacaccaagtctcttgctgtt

SEQ ID NO: 4548500 - DNA, 25 bp, Homo sapien
tctgaaccgcactttgtacatcctc

SEQ ID NO: 4548501 - DNA, 25 bp, Homo sapien
ccttgtattgtaattaaactgagac

SEQ ID NO: 4548502 - DNA, 25 bp, Homo sapien
gcactttgtacatcctccaccaaga

SEQ ID NO: 4548503 - DNA, 25 bp, Homo sapien
gctgtattcaacgatgagccatatg

SEQ ID NO: 4548504 - DNA, 25 bp, Homo sapien
aatgctgtattcaacgatgagccat

SEQ ID NO: 4548505 - DNA, 25 bp, Homo sapien
gaatgtgggataatgttaggaatgc

SEQ ID NO: 4548506 - DNA, 25 bp, Homo sapien
ggataatgttaggaatgctgtattc

SEQ ID NO: 4548507 - DNA, 25 bp, Homo sapien
aacccattcagaaatagtaactact

SEQ ID NO: 4548508 - DNA, 25 bp, Homo sapien
gaaatagtaactacttgtatctacc

SEQ ID NO: 4548509 - DNA, 25 bp, Homo sapien
taactacttgtatctaccatcagag

SEQ ID NO: 4548510 - DNA, 25 bp, Homo sapien
ttgtatctaccatcagagctgaaag

SEQ ID NO: 4548511 - DNA, 25 bp, Homo sapien
tgtgaaggcacaactttaacattaa

SEQ ID NO: 4548512 - DNA, 25 bp, Homo sapien
ttatgatgtaactgtcagtaccagc

SEQ ID NO: 4548513 - DNA, 25 bp, Homo sapien
tttgtagaaaatcaatgacacatta

SEQ ID NO: 4548514 - DNA, 25 bp, Homo sapien
tgacacattatagcagttccacata

SEQ ID NO: 4548515 - DNA, 25 bp, Homo sapien
tgttgcacaatccaaatggtccatc

SEQ ID NO: 4548516 - DNA, 25 bp, Homo sapien
ttgttgcacaatccaaatggtccat

SEQ ID NO: 4548517 - DNA, 25 bp, Homo sapien
tttgttgcacaatccaaatggtcca

SEQ ID NO: 4548518 - DNA, 25 bp, Homo sapien
catttgttgcacaatccaaatggtc

SEQ ID NO: 4548519 - DNA, 25 bp, Homo sapien
tctaaggagatagtcagggtgacac

SEQ ID NO: 4548520 - DNA, 25 bp, Homo sapien
tgaaactgagcactccttctggagc

SEQ ID NO: 4548521 - DNA, 25 bp, Homo sapien
tattccaggacactattccaggcag

SEQ ID NO: 4548522 - DNA, 25 bp, Homo sapien
tccaggcagtgtccaatcatacaaa

SEQ ID NO: 4548523 - DNA, 25 bp, Homo sapien
tctgggtctaagagattagggctgt

SEQ ID NO: 4548524 - DNA, 25 bp, Homo sapien
cattaagcagttcactacatgaaac

SEQ ID NO: 4548525 - DNA, 25 bp, Homo sapien
cagaatggatggtggagaaaccctc

SEQ ID NO: 4548526 - DNA, 25 bp, Homo sapien
gagaaaattgaagcagcctcagcag

SEQ ID NO: 4548527 - DNA, 25 bp, Homo sapien
gtaactggagacttgctgatactaa

SEQ ID NO: 4548528 - DNA, 25 bp, Homo sapien
tactaaagcagagttgttctaactt

SEQ ID NO: 4548529 - DNA, 25 bp, Homo sapien
taacttatctctgtattctgacttg

SEQ ID NO: 4548530 - DNA, 25 bp, Homo sapien
tgacttgtcagttacagcttgtgac

SEQ ID NO: 4548531 - DNA, 25 bp, Homo sapien
caactatttccagtatgagttagca

SEQ ID NO: 4548532 - DNA, 25 bp, Homo sapien
tttccagtatgagttagcacaaaaa

SEQ ID NO: 4548533 - DNA, 25 bp, Homo sapien
tatgagttagcacaaaaagatatgg

SEQ ID NO: 4548534 - DNA, 25 bp, Homo sapien
ccagtatgagttagcacaaaaagat

SEQ ID NO: 4548535 - DNA, 25 bp, Homo sapien
caacgaattttatctttcatgaagt

SEQ ID NO: 4548536 - DNA, 25 bp, Homo sapien
cctggccagagtacactttttatct

SEQ ID NO: 4548537 - DNA, 25 bp, Homo sapien
ggactcttactacaaatagctaatg

SEQ ID NO: 4548538 - DNA, 25 bp, Homo sapien
gcaaaaccttaggactcttactaca

SEQ ID NO: 4548539 - DNA, 25 bp, Homo sapien
agagcaggttgcccctttttcatca

SEQ ID NO: 4548540 - DNA, 25 bp, Homo sapien
tgtaagtatcatgccaatagcatag

SEQ ID NO: 4548541 - DNA, 25 bp, Homo sapien
acaacaaatgtaagtatcatgccaa

SEQ ID NO: 4548542 - DNA, 25 bp, Homo sapien
agcaggttgcccctttttcatcagc

SEQ ID NO: 4548543 - DNA, 25 bp, Homo sapien
gatactaatatgttaaagccctgga

SEQ ID NO: 4548544 - DNA, 25 bp, Homo sapien
taagttgtccaaaggtacacaggag

SEQ ID NO: 4548545 - DNA, 25 bp, Homo sapien
taatgactcagggttttactaggaa

SEQ ID NO: 4548546 - DNA, 25 bp, Homo sapien
aagccctggagagtaccatacttag

SEQ ID NO: 4548547 - DNA, 25 bp, Homo sapien
atcttctacagtatgcaatcaacag

SEQ ID NO: 4548548 - DNA, 25 bp, Homo sapien
gacgaaacatagtatatgtaagaag

SEQ ID NO: 4548549 - DNA, 25 bp, Homo sapien
caactgtagacgaaacatagtatat

SEQ ID NO: 4548550 - DNA, 25 bp, Homo sapien
gtaagaagaaccagtctgaacatca

SEQ ID NO: 4548551 - DNA, 25 bp, Homo sapien
atacacagactggaatactattcag

SEQ ID NO: 4548552 - DNA, 25 bp, Homo sapien
atgtcaaagagatatttgcattccc

SEQ ID NO: 4548553 - DNA, 25 bp, Homo sapien
tgtggtacatacacagactggaata

SEQ ID NO: 4548554 - DNA, 25 bp, Homo sapien
gatatttgcattcccatattcactg

SEQ ID NO: 4548555 - DNA, 25 bp, Homo sapien
ttggtactctgatgactactggcaa

SEQ ID NO: 4548556 - DNA, 25 bp, Homo sapien
tttggtactctgatgactactggca

SEQ ID NO: 4548557 - DNA, 25 bp, Homo sapien
ccccaaagaagagtcttgtctcaga

SEQ ID NO: 4548558 - DNA, 25 bp, Homo sapien
tcttgtctcagagggtatgatttaa

SEQ ID NO: 4548559 - DNA, 25 bp, Homo sapien
aagagtcttgtctcagagggtatga

SEQ ID NO: 4548560 - DNA, 25 bp, Homo sapien
tcagagggtatgatttaaagtccaa

SEQ ID NO: 4548561 - DNA, 25 bp, Homo sapien
accagtggcttccaccaagtttcca

SEQ ID NO: 4548562 - DNA, 25 bp, Homo sapien
gttgaccagtggcttccaccaagtt

SEQ ID NO: 4548563 - DNA, 25 bp, Homo sapien
tctcatggggagctgagggttgacc

SEQ ID NO: 4548564 - DNA, 25 bp, Homo sapien
ctgagggttgaccagtggcttccac

SEQ ID NO: 4548565 - DNA, 25 bp, Homo sapien
tacacaggaaggcaaattattaacc

SEQ ID NO: 4548566 - DNA, 25 bp, Homo sapien
ccttaacatgcactatgtggccagt

SEQ ID NO: 4548567 - DNA, 25 bp, Homo sapien
gatgaaacccaagtcaataggtatt

SEQ ID NO: 4548568 - DNA, 25 bp, Homo sapien
catacatacactggatagccatttc

SEQ ID NO: 4548569 - DNA, 25 bp, Homo sapien
tatttccaaaaggtccagctgcgag

SEQ ID NO: 4548570 - DNA, 25 bp, Homo sapien
tccaaaaggtccagctgcgagttca

SEQ ID NO: 4548571 - DNA, 25 bp, Homo sapien
caaaaggtccagctgcgagttcaac

SEQ ID NO: 4548572 - DNA, 25 bp, Homo sapien
aaaggtccagctgcgagttcaacca

SEQ ID NO: 4548573 - DNA, 25 bp, Homo sapien
aacccgtagctgcagaaatcttctg

SEQ ID NO: 4548574 - DNA, 25 bp, Homo sapien
ggtgcacaggagaaaccacttgagt

SEQ ID NO: 4548575 - DNA, 25 bp, Homo sapien
tagtgtatcagcaaagcaggtacag

SEQ ID NO: 4548576 - DNA, 25 bp, Homo sapien
agcagattcccaggttgtgataaca

SEQ ID NO: 4548577 - DNA, 25 bp, Homo sapien
aatggcgtgtccctgtagtaccagc

SEQ ID NO: 4548578 - DNA, 25 bp, Homo sapien
gctgacccatatgccagcttgggca

SEQ ID NO: 4548579 - DNA, 25 bp, Homo sapien
cattaagtgacagaaaggtgctagt

SEQ ID NO: 4548580 - DNA, 25 bp, Homo sapien
ttggttaggccaggcatatgccagc

SEQ ID NO: 4548581 - DNA, 25 bp, Homo sapien
gttgctcagattctaacttcatgga

SEQ ID NO: 4548582 - DNA, 25 bp, Homo sapien
gagctagcggcagatctgggaatat

SEQ ID NO: 4548583 - DNA, 25 bp, Homo sapien
cattttactgaagagctagcggcag

SEQ ID NO: 4548584 - DNA, 25 bp, Homo sapien
ggaatatatgacctaggagctgcca

SEQ ID NO: 4548585 - DNA, 25 bp, Homo sapien
tctcttgacgccagtcccacactgg

SEQ ID NO: 4548586 - DNA, 25 bp, Homo sapien
gagtatgtggccctgagtctagttt

SEQ ID NO: 4548587 - DNA, 25 bp, Homo sapien
gtggccctgagtctagtttctcttg

SEQ ID NO: 4548588 - DNA, 25 bp, Homo sapien
tatgtggccctgagtctagtttctc

SEQ ID NO: 4548589 - DNA, 25 bp, Homo sapien
acccatttcaaaaatatggtcatac

SEQ ID NO: 4548590 - DNA, 25 bp, Homo sapien
caaaaaatacatcatagaggaggag

SEQ ID NO: 4548591 - DNA, 25 bp, Homo sapien
gaaggcctagaagtatcacacatga

SEQ ID NO: 4548592 - DNA, 25 bp, Homo sapien
atacatcatagaggaggagaaggcc

SEQ ID NO: 4548593 - DNA, 25 bp, Homo sapien
ctttgtgatgaatggtgttatgaaa

SEQ ID NO: 4548594 - DNA, 25 bp, Homo sapien
cttgaagttgggcaacttcagtgtt

SEQ ID NO: 4548595 - DNA, 25 bp, Homo sapien
ttcagacagaaagcaatccccaaga

SEQ ID NO: 4548596 - DNA, 25 bp, Homo sapien
ccccaagatatcctgtaaaatccaa

SEQ ID NO: 4548597 - DNA, 25 bp, Homo sapien
gaagttgggcaacttcagtgtttta

SEQ ID NO: 4548598 - DNA, 25 bp, Homo sapien
ccattgattatcctacctgaagctg

SEQ ID NO: 4548599 - DNA, 25 bp, Homo sapien
gagctatgcaacttactccatcaga

SEQ ID NO: 4548600 - DNA, 25 bp, Homo sapien
taacacgtctcgctctagaaaacag

SEQ ID NO: 4548601 - DNA, 25 bp, Homo sapien
ttgaaaaggctacctcagaagaaca

SEQ ID NO: 4548602 - DNA, 25 bp, Homo sapien
tattcacccattcaaagtttgatgg

SEQ ID NO: 4548603 - DNA, 25 bp, Homo sapien
cacttggcattacgtttgagattca

SEQ ID NO: 4548604 - DNA, 25 bp, Homo sapien
cacgcctctgcatgtggtatatggc

SEQ ID NO: 4548605 - DNA, 25 bp, Homo sapien
aaatataacgtaatgtattcaccca

SEQ ID NO: 4548606 - DNA, 25 bp, Homo sapien
taatctaaaagcaaatacattgagt

SEQ ID NO: 4548607 - DNA, 25 bp, Homo sapien
ctaaaagcaaatacattgagtattc

SEQ ID NO: 4548608 - DNA, 25 bp, Homo sapien
aagcaaatacattgagtattcatac

SEQ ID NO: 4548609 - DNA, 25 bp, Homo sapien
ttaatctaaaagcaaatacattgag

SEQ ID NO: 4548610 - DNA, 25 bp, Homo sapien
ccatgtttttgccacgacatgcaat

SEQ ID NO: 4548611 - DNA, 25 bp, Homo sapien
catgtttttgccacgacatgcaatc

SEQ ID NO: 4548612 - DNA, 25 bp, Homo sapien
gcagaaaattgctatcataacataa

SEQ ID NO: 4548613 - DNA, 25 bp, Homo sapien
cattgctgatgctatgcagaaaatt

SEQ ID NO: 4548614 - DNA, 25 bp, Homo sapien
cagttgtacagactcattgctgatg

SEQ ID NO: 4548615 - DNA, 25 bp, Homo sapien
atggtatcttatgaattagtgcagc

SEQ ID NO: 4548616 - DNA, 25 bp, Homo sapien
gtcactgctcctggcacatattgta

SEQ ID NO: 4548617 - DNA, 25 bp, Homo sapien
gagtcactgctcctggcacatattg

SEQ ID NO: 4548618 - DNA, 25 bp, Homo sapien
gtgagtcactgctcctggcacatat

SEQ ID NO: 4548619 - DNA, 25 bp, Homo sapien
cactgctcctggcacatattgtatt

SEQ ID NO: 4548620 - DNA, 25 bp, Homo sapien
attacaactgtaagaggactaaaag

SEQ ID NO: 4548621 - DNA, 25 bp, Homo sapien
tttctctatcttcagttgtcactgc

SEQ ID NO: 4548622 - DNA, 25 bp, Homo sapien
taaagtaagaccatcataacacagc

SEQ ID NO: 4548623 - DNA, 25 bp, Homo sapien
cagcagatgaccacaaatattacaa

SEQ ID NO: 4548624 - DNA, 25 bp, Homo sapien
acaagagcaaaacctcgactccaaa

SEQ ID NO: 4548625 - DNA, 25 bp, Homo sapien
cttttgcttaaggtacatctctcat

SEQ ID NO: 4548626 - DNA, 25 bp, Homo sapien
tctttctacagaacccaggcatctt

SEQ ID NO: 4548627 - DNA, 25 bp, Homo sapien
tacttgctaaatgatgggccttatg

SEQ ID NO: 4548628 - DNA, 25 bp, Homo sapien
aaaaagcttgccttgctaaactcaa

SEQ ID NO: 4548629 - DNA, 25 bp, Homo sapien
taaaaaagctgatatgtactcccct

SEQ ID NO: 4548630 - DNA, 25 bp, Homo sapien
aagtgtggtccataggccagctaaa

SEQ ID NO: 4548631 - DNA, 25 bp, Homo sapien
tgtcctagcgtgtatataaaaaagc

SEQ ID NO: 4548632 - DNA, 25 bp, Homo sapien
aattcaactagtccactccagtatc

SEQ ID NO: 4548633 - DNA, 25 bp, Homo sapien
ccaccatagtataatcaaagttagg

SEQ ID NO: 4548634 - DNA, 25 bp, Homo sapien
tccagtatccacctaatgccacagt

SEQ ID NO: 4548635 - DNA, 25 bp, Homo sapien
taatcaaagttaggccacgatggag

SEQ ID NO: 4548636 - DNA, 25 bp, Homo sapien
tttctttctactatagtcataacag

SEQ ID NO: 4548637 - DNA, 25 bp, Homo sapien
tctactatagtcataacagcaatag

SEQ ID NO: 4548638 - DNA, 25 bp, Homo sapien
ctatagtcataacagcaatagtcca

SEQ ID NO: 4548639 - DNA, 25 bp, Homo sapien
tagtcataacagcaatagtccacat

SEQ ID NO: 4548640 - DNA, 25 bp, Homo sapien
aaagagatacagtatttataaactt

SEQ ID NO: 4548641 - DNA, 25 bp, Homo sapien
ggagcaaatataacactcaaaatta

SEQ ID NO: 4548642 - DNA, 25 bp, Homo sapien
taaactttatctaatatgtaattgc

SEQ ID NO: 4548643 - DNA, 25 bp, Homo sapien
tgattaaaaataaagagatacagta

SEQ ID NO: 4548644 - DNA, 25 bp, Homo sapien
tcaggaaattcagatctgttacctg

SEQ ID NO: 4548645 - DNA, 25 bp, Homo sapien
taaatgcaatcagtattttcacatc

SEQ ID NO: 4548646 - DNA, 25 bp, Homo sapien
catcaggaaattcagatctgttacc

SEQ ID NO: 4548647 - DNA, 25 bp, Homo sapien
ggaaattcagatctgttacctgagg

SEQ ID NO: 4548648 - DNA, 25 bp, Homo sapien
gcttccccatggaaccacaactgct

SEQ ID NO: 4548649 - DNA, 25 bp, Homo sapien
ccatggaaccacaactgctttgctc

SEQ ID NO: 4548650 - DNA, 25 bp, Homo sapien
cccatggaaccacaactgctttgct

SEQ ID NO: 4548651 - DNA, 25 bp, Homo sapien
tccccatggaaccacaactgctttg

SEQ ID NO: 4548652 - DNA, 25 bp, Homo sapien
gcattttctagggtacttggaagag

SEQ ID NO: 4548653 - DNA, 25 bp, Homo sapien
ttttctagggtacttggaagagctg

SEQ ID NO: 4548654 - DNA, 25 bp, Homo sapien
cattttctagggtacttggaagagc

SEQ ID NO: 4548655 - DNA, 25 bp, Homo sapien
tgcattttctagggtacttggaaga

SEQ ID NO: 4548656 - DNA, 25 bp, Homo sapien
catttccagacgcatgcaagattgc

SEQ ID NO: 4548657 - DNA, 25 bp, Homo sapien
tgccatttccagacgcatgcaagat

SEQ ID NO: 4548658 - DNA, 25 bp, Homo sapien
tgtgccatttccagacgcatgcaag

SEQ ID NO: 4548659 - DNA, 25 bp, Homo sapien
tccagacgcatgcaagattgcttcc

SEQ ID NO: 4548660 - DNA, 25 bp, Homo sapien
ccccagagtagggcggccccggcag

SEQ ID NO: 4548661 - DNA, 25 bp, Homo sapien
cccagagtagggcggccccggcagg

SEQ ID NO: 4548662 - DNA, 25 bp, Homo sapien
gccccagagtagggcggccccggca

SEQ ID NO: 4548663 - DNA, 25 bp, Homo sapien
ggctacgactggaccgccgctgcta

SEQ ID NO: 4548664 - DNA, 25 bp, Homo sapien
tgccgggtgggacggcacggtgcgg

SEQ ID NO: 4548665 - DNA, 25 bp, Homo sapien
ggagagtcccagcgctctcccggta

SEQ ID NO: 4548666 - DNA, 25 bp, Homo sapien
cgctgcgctgcctccgtggccggac

SEQ ID NO: 4548667 - DNA, 25 bp, Homo sapien
ttaactcacaccgaagcctggcggg

SEQ ID NO: 4548668 - DNA, 25 bp, Homo sapien
gaacggatttctcaaggctcggaag

SEQ ID NO: 4548669 - DNA, 25 bp, Homo sapien
tcgctttccggctgcccgactttaa

SEQ ID NO: 4548670 - DNA, 25 bp, Homo sapien
agcgtctgctcggttccccagtaac

SEQ ID NO: 4548671 - DNA, 25 bp, Homo sapien
aactgctgccaccactctatccagg

SEQ ID NO: 4548672 - DNA, 25 bp, Homo sapien
actgctgccaccactctatccaggc

SEQ ID NO: 4548673 - DNA, 25 bp, Homo sapien
tgctgccaccactctatccaggcca

SEQ ID NO: 4548674 - DNA, 25 bp, Homo sapien
ctgccaccactctatccaggccacc

SEQ ID NO: 4548675 - DNA, 25 bp, Homo sapien
aatccattttctggcgagggcactc

SEQ ID NO: 4548676 - DNA, 25 bp, Homo sapien
taagcagtaaggaggcaccaagctg

SEQ ID NO: 4548677 - DNA, 25 bp, Homo sapien
ggagtggtggcctgatgatcttcaa

SEQ ID NO: 4548678 - DNA, 25 bp, Homo sapien
tcctgtaggatctaagaaggctgac

SEQ ID NO: 4548679 - DNA, 25 bp, Homo sapien
aaatcaaggtgccagtgtctgatga

SEQ ID NO: 4548680 - DNA, 25 bp, Homo sapien
tgtctgatgagggtctgcttcttgg

SEQ ID NO: 4548681 - DNA, 25 bp, Homo sapien
ggtttgcagattgctatcttctcat

SEQ ID NO: 4548682 - DNA, 25 bp, Homo sapien
tgagggtctgcttcttggtttgcag

SEQ ID NO: 4548683 - DNA, 25 bp, Homo sapien
cgaaggaaggtctctgtacactgtt

SEQ ID NO: 4548684 - DNA, 25 bp, Homo sapien
aaacttgggagtgatgtgcgttctc

SEQ ID NO: 4548685 - DNA, 25 bp, Homo sapien
taagaaatgtgttttgccgaaggaa

SEQ ID NO: 4548686 - DNA, 25 bp, Homo sapien
ttatgatttattggcattatgcagc

SEQ ID NO: 4548687 - DNA, 25 bp, Homo sapien
actcaacattatgatccagagtaag

SEQ ID NO: 4548688 - DNA, 25 bp, Homo sapien
caacattatgatccagagtaagcct

SEQ ID NO: 4548689 - DNA, 25 bp, Homo sapien
cctgacagccttcactcaacattat

SEQ ID NO: 4548690 - DNA, 25 bp, Homo sapien
tcctgacagccttcactcaacatta

SEQ ID NO: 4548691 - DNA, 25 bp, Homo sapien
ggctgaagctcatatattcttggag

SEQ ID NO: 4548692 - DNA, 25 bp, Homo sapien
tgttttggcacttctggaaaatgga

SEQ ID NO: 4548693 - DNA, 25 bp, Homo sapien
attctgtgtcaagtaaggaacaccc

SEQ ID NO: 4548694 - DNA, 25 bp, Homo sapien
gatgtggcattctgtgtcaagtaag

SEQ ID NO: 4548695 - DNA, 25 bp, Homo sapien
aaatcagggttccaagtggtttgag

SEQ ID NO: 4548696 - DNA, 25 bp, Homo sapien
ggtttgaggccatagccattctcct

SEQ ID NO: 4548697 - DNA, 25 bp, Homo sapien
gtggatattagaggccaagtttagg

SEQ ID NO: 4548698 - DNA, 25 bp, Homo sapien
tgctatgttccatgggggtggatat

SEQ ID NO: 4548699 - DNA, 25 bp, Homo sapien
aaggagaagctcgaattcggtgagg

SEQ ID NO: 4548700 - DNA, 25 bp, Homo sapien
ccagattattgtcggtgaaaagagt

SEQ ID NO: 4548701 - DNA, 25 bp, Homo sapien
cgaggcccaatgttgggcaccagat

SEQ ID NO: 4548702 - DNA, 25 bp, Homo sapien
tgttgggcaccagattattgtcggt

SEQ ID NO: 4548703 - DNA, 25 bp, Homo sapien
aggtgtaatacaaagcagttacttg

SEQ ID NO: 4548704 - DNA, 25 bp, Homo sapien
cctacaggaaatgatggcgtattta

SEQ ID NO: 4548705 - DNA, 25 bp, Homo sapien
gatctcaacatcagagtcctacagg

SEQ ID NO: 4548706 - DNA, 25 bp, Homo sapien
gcctgtcctttacgcaggtgtaata

SEQ ID NO: 4548707 - DNA, 25 bp, Homo sapien
gacacagtctgctggctagcggtca

SEQ ID NO: 4548708 - DNA, 25 bp, Homo sapien
caggagcgggaaaacactgtggaca

SEQ ID NO: 4548709 - DNA, 25 bp, Homo sapien
cagtctgctggctagcggtcaaggc

SEQ ID NO: 4548710 - DNA, 25 bp, Homo sapien
cacaggcaaaagtctgtgtgaaatg

SEQ ID NO: 4548711 - DNA, 25 bp, Homo sapien
tagaatcgctgagttgtatggcaaa

SEQ ID NO: 4548712 - DNA, 25 bp, Homo sapien
aattacttgtgagaatgtgcagtca

SEQ ID NO: 4548713 - DNA, 25 bp, Homo sapien
cctccatcactaggtattgtctgac

SEQ ID NO: 4548714 - DNA, 25 bp, Homo sapien
gatagctttgtgcaaccactgtcac

SEQ ID NO: 4548715 - DNA, 25 bp, Homo sapien
cagcataccaaaacatatgagatgc

SEQ ID NO: 4548716 - DNA, 25 bp, Homo sapien
acagcataccaaaacatatgagatg

SEQ ID NO: 4548717 - DNA, 25 bp, Homo sapien
gcataccaaaacatatgagatgcag

SEQ ID NO: 4548718 - DNA, 25 bp, Homo sapien
cacagcataccaaaacatatgagat

SEQ ID NO: 4548719 - DNA, 25 bp, Homo sapien
aaacctatagttagaatgagattga

SEQ ID NO: 4548720 - DNA, 25 bp, Homo sapien
aacaaagaaaagccccggatgagat

SEQ ID NO: 4548721 - DNA, 25 bp, Homo sapien
gccccggatgagatggcttcactga

SEQ ID NO: 4548722 - DNA, 25 bp, Homo sapien
cctatagttagaatgagattgaatc

SEQ ID NO: 4548723 - DNA, 25 bp, Homo sapien
taagaactgcttaagcagatcctga

SEQ ID NO: 4548724 - DNA, 25 bp, Homo sapien
acattagaatcataaagggtttaag

SEQ ID NO: 4548725 - DNA, 25 bp, Homo sapien
cattagaatcataaagggtttaaga

SEQ ID NO: 4548726 - DNA, 25 bp, Homo sapien
agaactgcttaagcagatcctgaat

SEQ ID NO: 4548727 - DNA, 25 bp, Homo sapien
ctctaccatcttactagcccagagg

SEQ ID NO: 4548728 - DNA, 25 bp, Homo sapien
tcctttactggaggcaactctacca

SEQ ID NO: 4548729 - DNA, 25 bp, Homo sapien
ggcaggaaacactctctctaccctc

SEQ ID NO: 4548730 - DNA, 25 bp, Homo sapien
tgtttaaaggcaggatacaacttcc

SEQ ID NO: 4548731 - DNA, 25 bp, Homo sapien
tagtcaatcgtcatctagccgcttg

SEQ ID NO: 4548732 - DNA, 25 bp, Homo sapien
tgagtataattcagcccaacgacac

SEQ ID NO: 4548733 - DNA, 25 bp, Homo sapien
ttgaagggaggctatcaccacctac

SEQ ID NO: 4548734 - DNA, 25 bp, Homo sapien
cgacactgatcatgggtttctgcgc

SEQ ID NO: 4548735 - DNA, 25 bp, Homo sapien
caactgcgacctgttctaaagtgga

SEQ ID NO: 4548736 - DNA, 25 bp, Homo sapien
gctgtttacgtagtggcaactgcga

SEQ ID NO: 4548737 - DNA, 25 bp, Homo sapien
catttcgagagccattgtaccagac

SEQ ID NO: 4548738 - DNA, 25 bp, Homo sapien
tttcaactgcgacctgctgaggagg

SEQ ID NO: 4548739 - DNA, 25 bp, Homo sapien
aatctcgagcgagcggccttttcca

SEQ ID NO: 4548740 - DNA, 25 bp, Homo sapien
gcaatctcgagcgagcggccttttc

SEQ ID NO: 4548741 - DNA, 25 bp, Homo sapien
gcgcgcaatctcgagcgagcggcct

SEQ ID NO: 4548742 - DNA, 25 bp, Homo sapien
gcgcaatctcgagcgagcggccttt

SEQ ID NO: 4548743 - DNA, 25 bp, Homo sapien
gagtgtcaccacgtctgtctaattt

SEQ ID NO: 4548744 - DNA, 25 bp, Homo sapien
agaggtgaggtttctcaccgtgttg

SEQ ID NO: 4548745 - DNA, 25 bp, Homo sapien
tacaggagagtgtcaccacgtctgt

SEQ ID NO: 4548746 - DNA, 25 bp, Homo sapien
gagagtgtcaccacgtctgtctaat

SEQ ID NO: 4548747 - DNA, 25 bp, Homo sapien
ccagtgaaggccagatgcccctaaa

SEQ ID NO: 4548748 - DNA, 25 bp, Homo sapien
gaagccatatagttggtcacccagt

SEQ ID NO: 4548749 - DNA, 25 bp, Homo sapien
tcagaagtgatctaccaaacagcag

SEQ ID NO: 4548750 - DNA, 25 bp, Homo sapien
gagcttatctaccttccaagacagc

SEQ ID NO: 4548751 - DNA, 25 bp, Homo sapien
tagctgcagttgtcgtgagagacat

SEQ ID NO: 4548752 - DNA, 25 bp, Homo sapien
cagggagatctgttgcttggttaca

SEQ ID NO: 4548753 - DNA, 25 bp, Homo sapien
ggagcatgattttgggtctgcccaa

SEQ ID NO: 4548754 - DNA, 25 bp, Homo sapien
cacatggacagctaccagggagatc

SEQ ID NO: 4548755 - DNA, 25 bp, Homo sapien
agcagattgacaagtcacagcctgt

SEQ ID NO: 4548756 - DNA, 25 bp, Homo sapien
aagcagctggcactttcggagctct

SEQ ID NO: 4548757 - DNA, 25 bp, Homo sapien
caataagagggtgtcataacgtctg

SEQ ID NO: 4548758 - DNA, 25 bp, Homo sapien
gattgacaagtcacagcctgtaaca

SEQ ID NO: 4548759 - DNA, 25 bp, Homo sapien
tatggtgtctcatacatcttgtaga

SEQ ID NO: 4548760 - DNA, 25 bp, Homo sapien
taaataggtttgctatacctttcat

SEQ ID NO: 4548761 - DNA, 25 bp, Homo sapien
ggatttgcgtgtcgagttttctgga

SEQ ID NO: 4548762 - DNA, 25 bp, Homo sapien
cttcatttttgcctgactgggatat

SEQ ID NO: 4548763 - DNA, 25 bp, Homo sapien
cagaaactcttaaggcccggcagtt

SEQ ID NO: 4548764 - DNA, 25 bp, Homo sapien
tgctgcaagaggtgtaggtactcat

SEQ ID NO: 4548765 - DNA, 25 bp, Homo sapien
cccggcagtttttatgttggagcaa

SEQ ID NO: 4548766 - DNA, 25 bp, Homo sapien
gatacagtgagcttacggaacatgg

SEQ ID NO: 4548767 - DNA, 25 bp, Homo sapien
cctggaggcatacaaggtctcctga

SEQ ID NO: 4548768 - DNA, 25 bp, Homo sapien
tgtccagtggtggacactcttgagc

SEQ ID NO: 4548769 - DNA, 25 bp, Homo sapien
ggaacaacctcttgggatcctggag

SEQ ID NO: 4548770 - DNA, 25 bp, Homo sapien
gcctgatttgtccagtggtggacac

SEQ ID NO: 4548771 - DNA, 25 bp, Homo sapien
ctggtttgctgaatcaggcattgct

SEQ ID NO: 4548772 - DNA, 25 bp, Homo sapien
gaatcaggcattgctgtctgaagtc

SEQ ID NO: 4548773 - DNA, 25 bp, Homo sapien
tgaagtctgtgtggggctagatcaa

SEQ ID NO: 4548774 - DNA, 25 bp, Homo sapien
gatcaattgagccatcttgtaccat

SEQ ID NO: 4548775 - DNA, 25 bp, Homo sapien
gagagagattgcaaacccagtccat

SEQ ID NO: 4548776 - DNA, 25 bp, Homo sapien
gatgaaatgtcctttgggcttgcac

SEQ ID NO: 4548777 - DNA, 25 bp, Homo sapien
tgcctggccaaaaagacgactcttg

SEQ ID NO: 4548778 - DNA, 25 bp, Homo sapien
cgtgcatatggaataaagcctccct

SEQ ID NO: 4548779 - DNA, 25 bp, Homo sapien
gagaggaactccacatcggcaaagt

SEQ ID NO: 4548780 - DNA, 25 bp, Homo sapien
tcatcaaagatctcgctgctggtgt

SEQ ID NO: 4548781 - DNA, 25 bp, Homo sapien
aatcctcttgaggttgggcctacag

SEQ ID NO: 4548782 - DNA, 25 bp, Homo sapien
taaagacgtggttgatgcgcccgtg

SEQ ID NO: 4548783 - DNA, 25 bp, Homo sapien
cttcttctgggcttgaagcgcaaga

SEQ ID NO: 4548784 - DNA, 25 bp, Homo sapien
cagttttgctggctattttgctcag

SEQ ID NO: 4548785 - DNA, 25 bp, Homo sapien
ggccacagttttgctggctattttg

SEQ ID NO: 4548786 - DNA, 25 bp, Homo sapien
gcgcaagactctttgaactaaaaac

SEQ ID NO: 4548787 - DNA, 25 bp, Homo sapien
tgtttccaacatgcatacataatgt

SEQ ID NO: 4548788 - DNA, 25 bp, Homo sapien
ctgcacatggaaatcttggccttgc

SEQ ID NO: 4548789 - DNA, 25 bp, Homo sapien
cagggtgcctattggtgacccacca

SEQ ID NO: 4548790 - DNA, 25 bp, Homo sapien
tgagggagcagtcccatttgcaaga

SEQ ID NO: 4548791 - DNA, 25 bp, Homo sapien
ctgtaaaaccttttagctcattatc

SEQ ID NO: 4548792 - DNA, 25 bp, Homo sapien
tcttcctctccattaacatgacatg

SEQ ID NO: 4548793 - DNA, 25 bp, Homo sapien
tctgtgtccttcaattatgtttaca

SEQ ID NO: 4548794 - DNA, 25 bp, Homo sapien
acttctagctaccttacagttttgg

SEQ ID NO: 4548795 - DNA, 25 bp, Homo sapien
cagcctaaactggtatctttatgat

SEQ ID NO: 4548796 - DNA, 25 bp, Homo sapien
ggccctgaggagtgtttggaaacat

SEQ ID NO: 4548797 - DNA, 25 bp, Homo sapien
aataatcttgtaattggccctgagg

SEQ ID NO: 4548798 - DNA, 25 bp, Homo sapien
acagactccttggtaaccgctctca

SEQ ID NO: 4548799 - DNA, 25 bp, Homo sapien
tgtaatcctggaacgctgagggcac

SEQ ID NO: 4548800 - DNA, 25 bp, Homo sapien
tgctgctcctctagaaaaggccttg

SEQ ID NO: 4548801 - DNA, 25 bp, Homo sapien
gctgacagcaggcttcgatgatgct

SEQ ID NO: 4548802 - DNA, 25 bp, Homo sapien
cataaccttcaagacagcccagaca

SEQ ID NO: 4548803 - DNA, 25 bp, Homo sapien
gattcccataaccttcaagacagcc

SEQ ID NO: 4548804 - DNA, 25 bp, Homo sapien
taagcctagggactactatcacgtc

SEQ ID NO: 4548805 - DNA, 25 bp, Homo sapien
tcacccacgggtgcgtttagactgg

SEQ ID NO: 4548806 - DNA, 25 bp, Homo sapien
tagtctctgccgacaaagggtcaag

SEQ ID NO: 4548807 - DNA, 25 bp, Homo sapien
tctggaagcgtgaaaaagcatagtc

SEQ ID NO: 4548808 - DNA, 25 bp, Homo sapien
gctgaaagctgcatgtactcactga

SEQ ID NO: 4548809 - DNA, 25 bp, Homo sapien
tgaaagctgcatgtactcactgaag

SEQ ID NO: 4548810 - DNA, 25 bp, Homo sapien
ctgaaagctgcatgtactcactgaa

SEQ ID NO: 4548811 - DNA, 25 bp, Homo sapien
cagctgaaagctgcatgtactcact

SEQ ID NO: 4548812 - DNA, 25 bp, Homo sapien
tgcctgcgttgtttgactcagcgaa

SEQ ID NO: 4548813 - DNA, 25 bp, Homo sapien
ggcaagagctccatcttaagggaca

SEQ ID NO: 4548814 - DNA, 25 bp, Homo sapien
tgtgggctctctaaaagttgaccct

SEQ ID NO: 4548815 - DNA, 25 bp, Homo sapien
caacgtgctagcgtgggcctgtgct

SEQ ID NO: 4548816 - DNA, 25 bp, Homo sapien
tgtggcaaatgggcccaggatggag

SEQ ID NO: 4548817 - DNA, 25 bp, Homo sapien
ctgtggcaaatgggcccaggatgga

SEQ ID NO: 4548818 - DNA, 25 bp, Homo sapien
tggcaaatgggcccaggatggagaa

SEQ ID NO: 4548819 - DNA, 25 bp, Homo sapien
gcaaatgggcccaggatggagaaac

SEQ ID NO: 4548820 - DNA, 25 bp, Homo sapien
tggcaagaacacagtagaaggtgtc

SEQ ID NO: 4548821 - DNA, 25 bp, Homo sapien
gatctggagtcagccagtccttccc

SEQ ID NO: 4548822 - DNA, 25 bp, Homo sapien
catcccctgatctggatctggagtc

SEQ ID NO: 4548823 - DNA, 25 bp, Homo sapien
tggatctggagtcagccagtccttc

SEQ ID NO: 4548824 - DNA, 25 bp, Homo sapien
tctggatctggagtcagccagtcct

SEQ ID NO: 4548825 - DNA, 25 bp, Homo sapien
gcaaggatcatgccatcttatttct

SEQ ID NO: 4548826 - DNA, 25 bp, Homo sapien
gcagagatccgtgcaaatttcaaca

SEQ ID NO: 4548827 - DNA, 25 bp, Homo sapien
tgcaaggaacctagcaatgagaatc

SEQ ID NO: 4548828 - DNA, 25 bp, Homo sapien
tacagcttactctgtggatgaggca

SEQ ID NO: 4548829 - DNA, 25 bp, Homo sapien
gacaaggtcctgactccgaaagcag

SEQ ID NO: 4548830 - DNA, 25 bp, Homo sapien
gagaacgttacccaacacaacatgt

SEQ ID NO: 4548831 - DNA, 25 bp, Homo sapien
ttccatcttgccttagtgccactac

SEQ ID NO: 4548832 - DNA, 25 bp, Homo sapien
cataccctgggagttgaggtgccaa

SEQ ID NO: 4548833 - DNA, 25 bp, Homo sapien
cactgcttttgtacaatctgtcacc

SEQ ID NO: 4548834 - DNA, 25 bp, Homo sapien
tgcccatgaggtgcagactgaaact

SEQ ID NO: 4548835 - DNA, 25 bp, Homo sapien
tgaatcttcataaacccctgtggta

SEQ ID NO: 4548836 - DNA, 25 bp, Homo sapien
caggtctgttcaattccagagtcca

SEQ ID NO: 4548837 - DNA, 25 bp, Homo sapien
cagagtccagccttttacacttaca

SEQ ID NO: 4548838 - DNA, 25 bp, Homo sapien
acgggctcgccctcgctctgctccc

SEQ ID NO: 4548839 - DNA, 25 bp, Homo sapien
gccctcgctctgctccccggaatcc

SEQ ID NO: 4548840 - DNA, 25 bp, Homo sapien
ccctcgctctgctccccggaatccg

SEQ ID NO: 4548841 - DNA, 25 bp, Homo sapien
ggcggtcacgggctcgccctcgctc

SEQ ID NO: 4548842 - DNA, 25 bp, Homo sapien
tggctgggcgtccacggccacccgc

SEQ ID NO: 4548843 - DNA, 25 bp, Homo sapien
gcgtccacggccacccgcccgtctg

SEQ ID NO: 4548844 - DNA, 25 bp, Homo sapien
tgctggctgggcgtccacggccacc

SEQ ID NO: 4548845 - DNA, 25 bp, Homo sapien
cacccgcccgtctgcggggcgctcg

SEQ ID NO: 4548846 - DNA, 25 bp, Homo sapien
gactgtcactatcaatcttagctag

SEQ ID NO: 4548847 - DNA, 25 bp, Homo sapien
agtggactggttctcctctgaaaca

SEQ ID NO: 4548848 - DNA, 25 bp, Homo sapien
gaactgtggtcttctatccttccaa

SEQ ID NO: 4548849 - DNA, 25 bp, Homo sapien
tcagtcacatagttgtcgaaaaccc

SEQ ID NO: 4548850 - DNA, 25 bp, Homo sapien
ttgatgaaattcgtaagtccaagga

SEQ ID NO: 4548851 - DNA, 25 bp, Homo sapien
tctcttgatgaaattcgtaagtcca

SEQ ID NO: 4548852 - DNA, 25 bp, Homo sapien
cacattcctgtaactcatactttaa

SEQ ID NO: 4548853 - DNA, 25 bp, Homo sapien
gaaattcgtaagtccaaggatcaaa

SEQ ID NO: 4548854 - DNA, 25 bp, Homo sapien
cttgggtccctgcatatccgttgac

SEQ ID NO: 4548855 - DNA, 25 bp, Homo sapien
tcacagagtgtggaaaccagtgtgc

SEQ ID NO: 4548856 - DNA, 25 bp, Homo sapien
cgtggcatcccttgtgccttgggtc

SEQ ID NO: 4548857 - DNA, 25 bp, Homo sapien
gatgagtcttgtttgtaacgtggca

SEQ ID NO: 4548858 - DNA, 25 bp, Homo sapien
gacttcctactgcaaacagctgaag

SEQ ID NO: 4548859 - DNA, 25 bp, Homo sapien
cttcctactgcaaacagctgaaggc

SEQ ID NO: 4548860 - DNA, 25 bp, Homo sapien
acttcctactgcaaacagctgaagg

SEQ ID NO: 4548861 - DNA, 25 bp, Homo sapien
gatggcagcctgagcatgctaatat

SEQ ID NO: 4548862 - DNA, 25 bp, Homo sapien
gactattcatctagtgtttgacacc

SEQ ID NO: 4548863 - DNA, 25 bp, Homo sapien
taccctttaaggatcaaggtctgtc

SEQ ID NO: 4548864 - DNA, 25 bp, Homo sapien
ggctctcaagtgtgctgtataccta

SEQ ID NO: 4548865 - DNA, 25 bp, Homo sapien
tggtttgtaccaaaaggcaggatca

SEQ ID NO: 4548866 - DNA, 25 bp, Homo sapien
ggtgtggtgccctggtttgtaccaa

SEQ ID NO: 4548867 - DNA, 25 bp, Homo sapien
cctggtttgtaccaaaaggcaggat

SEQ ID NO: 4548868 - DNA, 25 bp, Homo sapien
gtgccctggtttgtaccaaaaggca

SEQ ID NO: 4548869 - DNA, 25 bp, Homo sapien
aaataatgagatccttagacaggaa

SEQ ID NO: 4548870 - DNA, 25 bp, Homo sapien
tgcaaggcaacacaatatcatgtag

SEQ ID NO: 4548871 - DNA, 25 bp, Homo sapien
tgactcccaggtacagattttctag

SEQ ID NO: 4548872 - DNA, 25 bp, Homo sapien
tatcatgtagtaagcaaaataatga

SEQ ID NO: 4548873 - DNA, 25 bp, Homo sapien
atgcagatgtgattttcgtggagag

SEQ ID NO: 4548874 - DNA, 25 bp, Homo sapien
ttagtcatggcccagaagaaattca

SEQ ID NO: 4548875 - DNA, 25 bp, Homo sapien
gggtttcgttgtaattagtcatggc

SEQ ID NO: 4548876 - DNA, 25 bp, Homo sapien
cgttgtaattagtcatggcccagaa

SEQ ID NO: 4548877 - DNA, 25 bp, Homo sapien
tgtgggcaagaactccatccaagac

SEQ ID NO: 4548878 - DNA, 25 bp, Homo sapien
agacctaaccacaagctgctgttta

SEQ ID NO: 4548879 - DNA, 25 bp, Homo sapien
ttgggtgagccaaacagctggacac

SEQ ID NO: 4548880 - DNA, 25 bp, Homo sapien
aatgatcttttggttactactggag

SEQ ID NO: 4548881 - DNA, 25 bp, Homo sapien
gacctggatgaggccgtggaaactg

SEQ ID NO: 4548882 - DNA, 25 bp, Homo sapien
gtggaaactgcctgtcgactctctt

SEQ ID NO: 4548883 - DNA, 25 bp, Homo sapien
gcctgtcgactctcttagggctata

SEQ ID NO: 4548884 - DNA, 25 bp, Homo sapien
tcttagggctataaccccatccttc

SEQ ID NO: 4548885 - DNA, 25 bp, Homo sapien
tctatagcctttgattggccacttc

SEQ ID NO: 4548886 - DNA, 25 bp, Homo sapien
ctccctgggatgacctctatagcct

SEQ ID NO: 4548887 - DNA, 25 bp, Homo sapien
ctgggatgacctctatagcctttga

SEQ ID NO: 4548888 - DNA, 25 bp, Homo sapien
gatgacctctatagcctttgattgg

SEQ ID NO: 4548889 - DNA, 25 bp, Homo sapien
tgtggcccttcagctaaaaacccaa

SEQ ID NO: 4548890 - DNA, 25 bp, Homo sapien
tggtccttgtggcccttcagctaaa

SEQ ID NO: 4548891 - DNA, 25 bp, Homo sapien
tccttgtggcccttcagctaaaaac

SEQ ID NO: 4548892 - DNA, 25 bp, Homo sapien
ttgtggcccttcagctaaaaaccca

SEQ ID NO: 4548893 - DNA, 25 bp, Homo sapien
tctaggattctctctgtgttgatca

SEQ ID NO: 4548894 - DNA, 25 bp, Homo sapien
gtctaggattctctctgtgttgatc

SEQ ID NO: 4548895 - DNA, 25 bp, Homo sapien
tgtgttgatcataacagtcaggatt

SEQ ID NO: 4548896 - DNA, 25 bp, Homo sapien
gtgttgatcataacagtcaggattt

SEQ ID NO: 4548897 - DNA, 25 bp, Homo sapien
ggagtcacagctattcctcgatgtc

SEQ ID NO: 4548898 - DNA, 25 bp, Homo sapien
cctggagtcacagctattcctcgat

SEQ ID NO: 4548899 - DNA, 25 bp, Homo sapien
agtcacagctattcctcgatgtctt

SEQ ID NO: 4548900 - DNA, 25 bp, Homo sapien
tggagtcacagctattcctcgatgt

SEQ ID NO: 4548901 - DNA, 25 bp, Homo sapien
caagacaggcatagaacccatgacc

SEQ ID NO: 4548902 - DNA, 25 bp, Homo sapien
tcattgactaccaacaatctgctgc

SEQ ID NO: 4548903 - DNA, 25 bp, Homo sapien
tagaacccatgaccctcaaaatgct

SEQ ID NO: 4548904 - DNA, 25 bp, Homo sapien
aatctgctgctcaagacaggcatag

SEQ ID NO: 4548905 - DNA, 25 bp, Homo sapien
atgggctgtgcagccgtcaacgatg

SEQ ID NO: 4548906 - DNA, 25 bp, Homo sapien
tgctgtctccaaggcatgggctgtg

SEQ ID NO: 4548907 - DNA, 25 bp, Homo sapien
cgtcaacgatgtgttccatcttcta

SEQ ID NO: 4548908 - DNA, 25 bp, Homo sapien
cagcagatatccatgtgctgtctcc

SEQ ID NO: 4548909 - DNA, 25 bp, Homo sapien
gggttaatggctcttgcattaatga

SEQ ID NO: 4548910 - DNA, 25 bp, Homo sapien
ctgctgcgtcaagcttgcctgtcag

SEQ ID NO: 4548911 - DNA, 25 bp, Homo sapien
ggctcttgcattaatgagcacagat

SEQ ID NO: 4548912 - DNA, 25 bp, Homo sapien
tcaagcttgcctgtcagcactttct

SEQ ID NO: 4548913 - DNA, 25 bp, Homo sapien
tgtggtctggcagcgctgagaagcc

SEQ ID NO: 4548914 - DNA, 25 bp, Homo sapien
tgagaagcctgagggctcccacaaa

SEQ ID NO: 4548915 - DNA, 25 bp, Homo sapien
ttgctgttgtctctgtggtctggca

SEQ ID NO: 4548916 - DNA, 25 bp, Homo sapien
ctcccacaaagaaggcaagggtgtg

SEQ ID NO: 4548917 - DNA, 25 bp, Homo sapien
agggagagatgtttgggtcccaaga

SEQ ID NO: 4548918 - DNA, 25 bp, Homo sapien
tggttttggagggagagatgtttgg

SEQ ID NO: 4548919 - DNA, 25 bp, Homo sapien
agagatgtttgggtcccaagaggca

SEQ ID NO: 4548920 - DNA, 25 bp, Homo sapien
tcccaagaggcaaggagtgaaagag

SEQ ID NO: 4548921 - DNA, 25 bp, Homo sapien
catctccggtgggtgtttccataac

SEQ ID NO: 4548922 - DNA, 25 bp, Homo sapien
tgatggtttgggcacacaggcagaa

SEQ ID NO: 4548923 - DNA, 25 bp, Homo sapien
taaccagagagtcctttgtgctgca

SEQ ID NO: 4548924 - DNA, 25 bp, Homo sapien
catttgtcacttggctttggaaccc

SEQ ID NO: 4548925 - DNA, 25 bp, Homo sapien
agcccgggagggagggcgatactgg

SEQ ID NO: 4548926 - DNA, 25 bp, Homo sapien
tgccacgtactatgcctgagcccgg

SEQ ID NO: 4548927 - DNA, 25 bp, Homo sapien
tctcgggtgggcctaggctgcttcc

SEQ ID NO: 4548928 - DNA, 25 bp, Homo sapien
caggtgcccttcacaccctggagtg

SEQ ID NO: 4548929 - DNA, 25 bp, Homo sapien
cccccagcactcgctctcagacaca

SEQ ID NO: 4548930 - DNA, 25 bp, Homo sapien
ccccagcactcgctctcagacacac

SEQ ID NO: 4548931 - DNA, 25 bp, Homo sapien
tggagtaaaagaggtgcttggtgag

SEQ ID NO: 4548932 - DNA, 25 bp, Homo sapien
ggagtaaaagaggtgcttggtgaga

SEQ ID NO: 4548933 - DNA, 25 bp, Homo sapien
ctggtgcctctgaagtgacattgcc

SEQ ID NO: 4548934 - DNA, 25 bp, Homo sapien
cttgctggtgcctctgaagtgacat

SEQ ID NO: 4548935 - DNA, 25 bp, Homo sapien
tgctggtgcctctgaagtgacattg

SEQ ID NO: 4548936 - DNA, 25 bp, Homo sapien
tgcctctgaagtgacattgccaggt

SEQ ID NO: 4548937 - DNA, 25 bp, Homo sapien
aatctctctcgagggcaatgtttaa

SEQ ID NO: 4548938 - DNA, 25 bp, Homo sapien
ccggagagtcgtcaaagctggatta

SEQ ID NO: 4548939 - DNA, 25 bp, Homo sapien
ccctaaatctctctcgagggcaatg

SEQ ID NO: 4548940 - DNA, 25 bp, Homo sapien
taagagtgggaaattatcgggccag

SEQ ID NO: 4548941 - DNA, 25 bp, Homo sapien
gatagactgagatcaaaccctgatg

SEQ ID NO: 4548942 - DNA, 25 bp, Homo sapien
catgatcagtgtggcgagtggattc

SEQ ID NO: 4548943 - DNA, 25 bp, Homo sapien
caaggtagattcacgtgatagactg

SEQ ID NO: 4548944 - DNA, 25 bp, Homo sapien
gagtggattccagaggtagccttgt

SEQ ID NO: 4548945 - DNA, 25 bp, Homo sapien
catccgtgtcatgctgagtgggcta

SEQ ID NO: 4548946 - DNA, 25 bp, Homo sapien
gactttgtggtcaataaacctgcac

SEQ ID NO: 4548947 - DNA, 25 bp, Homo sapien
gagtgggctactcccctggaaagtc

SEQ ID NO: 4548948 - DNA, 25 bp, Homo sapien
ttagcctctgagtttcggccccgac

SEQ ID NO: 4548949 - DNA, 25 bp, Homo sapien
tctgcccgcatgatgggctggccct

SEQ ID NO: 4548950 - DNA, 25 bp, Homo sapien
acttccacatcgtccctttcttttg

SEQ ID NO: 4548951 - DNA, 25 bp, Homo sapien
ggctggcccttggcaaggtctttac

SEQ ID NO: 4548952 - DNA, 25 bp, Homo sapien
gtctccgatcctgtctttctcagag

SEQ ID NO: 4548953 - DNA, 25 bp, Homo sapien
tttctcggcatcactaggactattg

SEQ ID NO: 4548954 - DNA, 25 bp, Homo sapien
aattgagtttctcggcatcactagg

SEQ ID NO: 4548955 - DNA, 25 bp, Homo sapien
gatgaccatggcattctgaggaata

SEQ ID NO: 4548956 - DNA, 25 bp, Homo sapien
ctgaggaataattgagtttctcggc

SEQ ID NO: 4548957 - DNA, 25 bp, Homo sapien
tgaataagaaatagtgttgggctgt

SEQ ID NO: 4548958 - DNA, 25 bp, Homo sapien
gacataccagaacttctacgttaaa

SEQ ID NO: 4548959 - DNA, 25 bp, Homo sapien
aaatgatcctcttgtttggaaacac

SEQ ID NO: 4548960 - DNA, 25 bp, Homo sapien
tgttattctaatgatgctgccactg

SEQ ID NO: 4548961 - DNA, 25 bp, Homo sapien
caccatggtcattccgcatctgctg

SEQ ID NO: 4548962 - DNA, 25 bp, Homo sapien
tccagcttcatccagccattttccc

SEQ ID NO: 4548963 - DNA, 25 bp, Homo sapien
cattttccccaccatggtcattccg

SEQ ID NO: 4548964 - DNA, 25 bp, Homo sapien
tggtcattccgcatctgctgccctg

SEQ ID NO: 4548965 - DNA, 25 bp, Homo sapien
tctggaggagaggtaagggatgatg

SEQ ID NO: 4548966 - DNA, 25 bp, Homo sapien
ctaaaccatgggaagagacaaatct

SEQ ID NO: 4548967 - DNA, 25 bp, Homo sapien
gatggaggcacagatcacagatcta

SEQ ID NO: 4548968 - DNA, 25 bp, Homo sapien
accatgggaagagacaaatctggag

SEQ ID NO: 4548969 - DNA, 25 bp, Homo sapien
cagttgcaggagtcctaaagttcat

SEQ ID NO: 4548970 - DNA, 25 bp, Homo sapien
tggacttgtggaatcttcagttgca

SEQ ID NO: 4548971 - DNA, 25 bp, Homo sapien
cttcagttgcaggagtcctaaagtt

SEQ ID NO: 4548972 - DNA, 25 bp, Homo sapien
agggcacaaacccatggacttgtgg

SEQ ID NO: 4548973 - DNA, 25 bp, Homo sapien
tgatagagcccttatatgcatgcat

SEQ ID NO: 4548974 - DNA, 25 bp, Homo sapien
cacattgcacattcaagagtgacgg

SEQ ID NO: 4548975 - DNA, 25 bp, Homo sapien
ggtgtctagcatgcccaaagatata

SEQ ID NO: 4548976 - DNA, 25 bp, Homo sapien
tgatatagattgaaaagggtccctc

SEQ ID NO: 4548977 - DNA, 25 bp, Homo sapien
cattaaattgcaaatcctggccttg

SEQ ID NO: 4548978 - DNA, 25 bp, Homo sapien
aagttgggcttcttccaccatgcag

SEQ ID NO: 4548979 - DNA, 25 bp, Homo sapien
tattcaggtacacaggcatagtcca

SEQ ID NO: 4548980 - DNA, 25 bp, Homo sapien
gccagaggcaacgtaaacagagtgt

SEQ ID NO: 4548981 - DNA, 25 bp, Homo sapien
aaaagaacagtcaaatgggatggca

SEQ ID NO: 4548982 - DNA, 25 bp, Homo sapien
ctcagcttattactagacagtagga

SEQ ID NO: 4548983 - DNA, 25 bp, Homo sapien
tgggatggcaatggattcaatgaca

SEQ ID NO: 4548984 - DNA, 25 bp, Homo sapien
catcagttgggagtatctctgagca

SEQ ID NO: 4548985 - DNA, 25 bp, Homo sapien
tctttactgatctgttgcccttggc

SEQ ID NO: 4548986 - DNA, 25 bp, Homo sapien
caaggtgtgcaatttatccatgacc

SEQ ID NO: 4548987 - DNA, 25 bp, Homo sapien
ccccttagaagtttgagcccattgg

SEQ ID NO: 4548988 - DNA, 25 bp, Homo sapien
ttagaaagcgaattccaaggtgtgc

SEQ ID NO: 4548989 - DNA, 25 bp, Homo sapien
gacacagggccctaataatacttaa

SEQ ID NO: 4548990 - DNA, 25 bp, Homo sapien
gacagatcatatgtagacaaacagg

SEQ ID NO: 4548991 - DNA, 25 bp, Homo sapien
aggcataaatcgacagactgggaaa

SEQ ID NO: 4548992 - DNA, 25 bp, Homo sapien
taattgggcttaattcacagcaagg

SEQ ID NO: 4548993 - DNA, 25 bp, Homo sapien
gcctggtctttctaatcaacttgag

SEQ ID NO: 4548994 - DNA, 25 bp, Homo sapien
tggcctggtctttctaatcaacttg

SEQ ID NO: 4548995 - DNA, 25 bp, Homo sapien
gccccaggtaccctgacattggcct

SEQ ID NO: 4548996 - DNA, 25 bp, Homo sapien
attggcctggtctttctaatcaact

SEQ ID NO: 4548997 - DNA, 25 bp, Homo sapien
aatgaaggcctatccttctcaaagc

SEQ ID NO: 4548998 - DNA, 25 bp, Homo sapien
cacatttggtggaatcgggtcttta

SEQ ID NO: 4548999 - DNA, 25 bp, Homo sapien
attttgttaatgaaggcctatcctt

SEQ ID NO: 4549000 - DNA, 25 bp, Homo sapien
tggatacggtttcttcaccgactat

SEQ ID NO: 4549001 - DNA, 25 bp, Homo sapien
gctccagagtgggtactgaccagcc

SEQ ID NO: 4549002 - DNA, 25 bp, Homo sapien
cactattggcaaggatggatgattt

SEQ ID NO: 4549003 - DNA, 25 bp, Homo sapien
gatgacaaatagcacctagcttggt

SEQ ID NO: 4549004 - DNA, 25 bp, Homo sapien
gcttggtgacaacccataggaggta

SEQ ID NO: 4549005 - DNA, 25 bp, Homo sapien
tcttggggtaaagatcatttccagc

SEQ ID NO: 4549006 - DNA, 25 bp, Homo sapien
ttcttggggtaaagatcatttccag

SEQ ID NO: 4549007 - DNA, 25 bp, Homo sapien
gcaaggacaagtcgtgtatcttctg

SEQ ID NO: 4549008 - DNA, 25 bp, Homo sapien
gtgcaaggacaagtcgtgtatcttc

SEQ ID NO: 4549009 - DNA, 25 bp, Homo sapien
tgtaacgaggatggctttcatcatc

SEQ ID NO: 4549010 - DNA, 25 bp, Homo sapien
gccaaatggctgaaagtacctataa

SEQ ID NO: 4549011 - DNA, 25 bp, Homo sapien
cacgtggaatcgtctcagaagtgta

SEQ ID NO: 4549012 - DNA, 25 bp, Homo sapien
tcatcatcaccatggcgatgtactt

SEQ ID NO: 4549013 - DNA, 25 bp, Homo sapien
tcaggtagctctgtggaatagccac

SEQ ID NO: 4549014 - DNA, 25 bp, Homo sapien
gaaaatgatcagacagttagccaga

SEQ ID NO: 4549015 - DNA, 25 bp, Homo sapien
gaaaacatgggtcagtcagaacact

SEQ ID NO: 4549016 - DNA, 25 bp, Homo sapien
agagagtccccagttttgcctttca

SEQ ID NO: 4549017 - DNA, 25 bp, Homo sapien
cacactcagttttaaggaagggctc

SEQ ID NO: 4549018 - DNA, 25 bp, Homo sapien
ggcacactcagttttaaggaagggc

SEQ ID NO: 4549019 - DNA, 25 bp, Homo sapien
agagtggcacactcagttttaagga

SEQ ID NO: 4549020 - DNA, 25 bp, Homo sapien
gtggcacactcagttttaaggaagg

SEQ ID NO: 4549021 - DNA, 25 bp, Homo sapien
ccctttttcactgggtagccatcga

SEQ ID NO: 4549022 - DNA, 25 bp, Homo sapien
gcatgaccaagtccacgacaggctg

SEQ ID NO: 4549023 - DNA, 25 bp, Homo sapien
tcttctaaggctttgcgcatgacca

SEQ ID NO: 4549024 - DNA, 25 bp, Homo sapien
ggctggtaccgcatgctctcataaa

SEQ ID NO: 4549025 - DNA, 25 bp, Homo sapien
tattgcctcttcaacattagggtgc

SEQ ID NO: 4549026 - DNA, 25 bp, Homo sapien
caggagctgcgatcagcatttccaa

SEQ ID NO: 4549027 - DNA, 25 bp, Homo sapien
catttccaatatgcactggttcaca

SEQ ID NO: 4549028 - DNA, 25 bp, Homo sapien
aagagacagacatggtgtcaggagc

SEQ ID NO: 4549029 - DNA, 25 bp, Homo sapien
tctgtggaaatcctgcgtctttttt

SEQ ID NO: 4549030 - DNA, 25 bp, Homo sapien
ctctgctaaaatcaactcagtggca

SEQ ID NO: 4549031 - DNA, 25 bp, Homo sapien
gctaaaatcaactcagtggcaaagt

SEQ ID NO: 4549032 - DNA, 25 bp, Homo sapien
gctatcagaacttctatggcatctt

SEQ ID NO: 4549033 - DNA, 25 bp, Homo sapien
atgtctggtttgatgaggagagctt

SEQ ID NO: 4549034 - DNA, 25 bp, Homo sapien
tggattttaaccacgatagcacttt

SEQ ID NO: 4549035 - DNA, 25 bp, Homo sapien
ttgatgaggagagcttgccatgcat

SEQ ID NO: 4549036 - DNA, 25 bp, Homo sapien
accttggattttaaccacgatagca

SEQ ID NO: 4549037 - DNA, 25 bp, Homo sapien
tcctcttgaggcaatgtaaggccaa

SEQ ID NO: 4549038 - DNA, 25 bp, Homo sapien
gggtatattcactactagggttaca

SEQ ID NO: 4549039 - DNA, 25 bp, Homo sapien
tgcacagactactaaaatggagact

SEQ ID NO: 4549040 - DNA, 25 bp, Homo sapien
cacctgaatgggcttgtgaattttt

SEQ ID NO: 4549041 - DNA, 25 bp, Homo sapien
ctatgagtttgacatgagcatgcac

SEQ ID NO: 4549042 - DNA, 25 bp, Homo sapien
gatgctggcccctactttatggaaa

SEQ ID NO: 4549043 - DNA, 25 bp, Homo sapien
cagtgaattccattcctgtcaggtg

SEQ ID NO: 4549044 - DNA, 25 bp, Homo sapien
tacaaaaggctagtagatgctggcc

SEQ ID NO: 4549045 - DNA, 25 bp, Homo sapien
tcaagatgtgagagtgaaaatttca

SEQ ID NO: 4549046 - DNA, 25 bp, Homo sapien
gatgtgagagtgaaaatttcagtac

SEQ ID NO: 4549047 - DNA, 25 bp, Homo sapien
aagatgtgagagtgaaaatttcagt

SEQ ID NO: 4549048 - DNA, 25 bp, Homo sapien
caagatgtgagagtgaaaatttcag

SEQ ID NO: 4549049 - DNA, 25 bp, Homo sapien
tccaaagggatcctcaagaagagcg

SEQ ID NO: 4549050 - DNA, 25 bp, Homo sapien
cagaagggtcaacacgtccacatag

SEQ ID NO: 4549051 - DNA, 25 bp, Homo sapien
gcgtgttagaggtgtccagcatgac

SEQ ID NO: 4549052 - DNA, 25 bp, Homo sapien
cacatagcccgattcattggtcacc

SEQ ID NO: 4549053 - DNA, 25 bp, Homo sapien
gatgtgttttgagggattcagcaca

SEQ ID NO: 4549054 - DNA, 25 bp, Homo sapien
tgtgttttgagggattcagcacaga

SEQ ID NO: 4549055 - DNA, 25 bp, Homo sapien
cagatgtgttttgagggattcagca

SEQ ID NO: 4549056 - DNA, 25 bp, Homo sapien
agatgtgttttgagggattcagcac

SEQ ID NO: 4549057 - DNA, 25 bp, Homo sapien
tgaccatacgaacaaggccggggcc

SEQ ID NO: 4549058 - DNA, 25 bp, Homo sapien
ctgtgaccatacgaacaaggccggg

SEQ ID NO: 4549059 - DNA, 25 bp, Homo sapien
tgtgaccatacgaacaaggccgggg

SEQ ID NO: 4549060 - DNA, 25 bp, Homo sapien
accatacgaacaaggccggggcctg

SEQ ID NO: 4549061 - DNA, 25 bp, Homo sapien
gccaatggcatgacagctaagcaat

SEQ ID NO: 4549062 - DNA, 25 bp, Homo sapien
agctctttaaggacagtgacagcca

SEQ ID NO: 4549063 - DNA, 25 bp, Homo sapien
gacagccactcattagcattgcact

SEQ ID NO: 4549064 - DNA, 25 bp, Homo sapien
tgcacttcaagctgatggtccatgg

SEQ ID NO: 4549065 - DNA, 25 bp, Homo sapien
gatgcctttctcatgcataccgatg

SEQ ID NO: 4549066 - DNA, 25 bp, Homo sapien
agaagggtcgagttgttttccagag

SEQ ID NO: 4549067 - DNA, 25 bp, Homo sapien
cattatgtggaacatacttgaggac

SEQ ID NO: 4549068 - DNA, 25 bp, Homo sapien
gcccaagtttgctgccgaatcgaga

SEQ ID NO: 4549069 - DNA, 25 bp, Homo sapien
gctgataatgagtgtttcctctcca

SEQ ID NO: 4549070 - DNA, 25 bp, Homo sapien
tgctgataatgagtgtttcctctcc

SEQ ID NO: 4549071 - DNA, 25 bp, Homo sapien
ttgctgataatgagtgtttcctctc

SEQ ID NO: 4549072 - DNA, 25 bp, Homo sapien
tgataatgagtgtttcctctccaga

SEQ ID NO: 4549073 - DNA, 25 bp, Homo sapien
agttgcaggcactgccgatccccat

SEQ ID NO: 4549074 - DNA, 25 bp, Homo sapien
tccacaggaatctgccgtgggagat

SEQ ID NO: 4549075 - DNA, 25 bp, Homo sapien
attctccatatacccggttgtagta

SEQ ID NO: 4549076 - DNA, 25 bp, Homo sapien
agatgaggggtccaattcccatgca

SEQ ID NO: 4549077 - DNA, 25 bp, Homo sapien
ctttcactgttcctgagctttcctg

SEQ ID NO: 4549078 - DNA, 25 bp, Homo sapien
cattataagtccctccagctttcac

SEQ ID NO: 4549079 - DNA, 25 bp, Homo sapien
taagggctttaaatcattataagtc

SEQ ID NO: 4549080 - DNA, 25 bp, Homo sapien
agctttcactgttcctgagctttcc

SEQ ID NO: 4549081 - DNA, 25 bp, Homo sapien
aacacagacaaattggaatttagca

SEQ ID NO: 4549082 - DNA, 25 bp, Homo sapien
ggcctgattgtctgctaacacagac

SEQ ID NO: 4549083 - DNA, 25 bp, Homo sapien
gcaatgctgcgtgggcaatgctgga

SEQ ID NO: 4549084 - DNA, 25 bp, Homo sapien
acaaattggaatttagcacctgagc

SEQ ID NO: 4549085 - DNA, 25 bp, Homo sapien
cctgacctagaagcccccttgggag

SEQ ID NO: 4549086 - DNA, 25 bp, Homo sapien
attcactgaccctgacctagaagcc

SEQ ID NO: 4549087 - DNA, 25 bp, Homo sapien
agaccatgaaacagttgtcccttag

SEQ ID NO: 4549088 - DNA, 25 bp, Homo sapien
gaacagagttcaagttaaagaccat

SEQ ID NO: 4549089 - DNA, 25 bp, Homo sapien
aggatgtgccctcataattccacac

SEQ ID NO: 4549090 - DNA, 25 bp, Homo sapien
tattgaggatgtgccctcataattc

SEQ ID NO: 4549091 - DNA, 25 bp, Homo sapien
tgaggatgtgccctcataattccac

SEQ ID NO: 4549092 - DNA, 25 bp, Homo sapien
ctggtattgaggatgtgccctcata

SEQ ID NO: 4549093 - DNA, 25 bp, Homo sapien
tatcgggttcagcatttccaaaacc

SEQ ID NO: 4549094 - DNA, 25 bp, Homo sapien
taatgtatcgggttcagcatttcca

SEQ ID NO: 4549095 - DNA, 25 bp, Homo sapien
ctggtgatgttataatgtatcgggt

SEQ ID NO: 4549096 - DNA, 25 bp, Homo sapien
gatgttataatgtatcgggttcagc

SEQ ID NO: 4549097 - DNA, 25 bp, Homo sapien
cttgtgttccttgacctcagagggg

SEQ ID NO: 4549098 - DNA, 25 bp, Homo sapien
ttgtgttccttgacctcagaggggg

SEQ ID NO: 4549099 - DNA, 25 bp, Homo sapien
tgtgttccttgacctcagagggggc

SEQ ID NO: 4549100 - DNA, 25 bp, Homo sapien
tgtggaaatcaaagggacagaaaaa

SEQ ID NO: 4549101 - DNA, 25 bp, Homo sapien
gacagaaaaattacagaatccccta

SEQ ID NO: 4549102 - DNA, 25 bp, Homo sapien
ctgtggaaatcaaagggacagaaaa

SEQ ID NO: 4549103 - DNA, 25 bp, Homo sapien
aatcaaagggacagaaaaattacag

SEQ ID NO: 4549104 - DNA, 25 bp, Homo sapien
tgctcagcatcccacgttggcctgg

SEQ ID NO: 4549105 - DNA, 25 bp, Homo sapien
gggactctggccacttgatgcacta

SEQ ID NO: 4549106 - DNA, 25 bp, Homo sapien
tgtgcctgtgctacgtggagcctac

SEQ ID NO: 4549107 - DNA, 25 bp, Homo sapien
tatttgcagagtggtctctgcctgc

SEQ ID NO: 4549108 - DNA, 25 bp, Homo sapien
caacctctgcgtaagaaaacgcgag

SEQ ID NO: 4549109 - DNA, 25 bp, Homo sapien
ccaccaacctctgcgtaagaaaacg

SEQ ID NO: 4549110 - DNA, 25 bp, Homo sapien
tgcgtaagaaaacgcgagtcctaca

SEQ ID NO: 4549111 - DNA, 25 bp, Homo sapien
taagaaaacgcgagtcctacaccca

SEQ ID NO: 4549112 - DNA, 25 bp, Homo sapien
tctctccactcaaagtctgactcct

SEQ ID NO: 4549113 - DNA, 25 bp, Homo sapien
caccatgtccgaccccaaattcatc

SEQ ID NO: 4549114 - DNA, 25 bp, Homo sapien
ctgactcctgctttaccacaacatc

SEQ ID NO: 4549115 - DNA, 25 bp, Homo sapien
catgtccgaccccaaattcatcttg

SEQ ID NO: 4549116 - DNA, 25 bp, Homo sapien
ttctctccgacatgggtcttggact

SEQ ID NO: 4549117 - DNA, 25 bp, Homo sapien
catgggtcttggactactactgctt

SEQ ID NO: 4549118 - DNA, 25 bp, Homo sapien
ccatctcttacctggtataaatact

SEQ ID NO: 4549119 - DNA, 25 bp, Homo sapien
tcttacctggtataaatactcctcc

SEQ ID NO: 4549120 - DNA, 25 bp, Homo sapien
tattaggaagcttgtctgagcaggg

SEQ ID NO: 4549121 - DNA, 25 bp, Homo sapien
tctgagcagggtactacattcagac

SEQ ID NO: 4549122 - DNA, 25 bp, Homo sapien
tttattaggaagcttgtctgagcag

SEQ ID NO: 4549123 - DNA, 25 bp, Homo sapien
tgtctgagcagggtactacattcag

SEQ ID NO: 4549124 - DNA, 25 bp, Homo sapien
tctgacctcgccttatggaggaggc

SEQ ID NO: 4549125 - DNA, 25 bp, Homo sapien
cctaatctattgtcttcccagtggg

SEQ ID NO: 4549126 - DNA, 25 bp, Homo sapien
caatagtagtccaagagtgccctta

SEQ ID NO: 4549127 - DNA, 25 bp, Homo sapien
agtttttctcacgaggagtctgacc

SEQ ID NO: 4549128 - DNA, 25 bp, Homo sapien
agataaggtagtggaattttccagc

SEQ ID NO: 4549129 - DNA, 25 bp, Homo sapien
gagtagataaggtagtggaattttc

SEQ ID NO: 4549130 - DNA, 25 bp, Homo sapien
agagtagataaggtagtggaatttt

SEQ ID NO: 4549131 - DNA, 25 bp, Homo sapien
gtagataaggtagtggaattttcca

SEQ ID NO: 4549132 - DNA, 25 bp, Homo sapien
agcacaggagcaggctttagggtca

SEQ ID NO: 4549133 - DNA, 25 bp, Homo sapien
cagcacaggagcaggctttagggtc

SEQ ID NO: 4549134 - DNA, 25 bp, Homo sapien
caacagcacaggagcaggctttagg

SEQ ID NO: 4549135 - DNA, 25 bp, Homo sapien
tgacaacagcacaggagcaggcttt

SEQ ID NO: 4549136 - DNA, 25 bp, Homo sapien
aaggctcatggaatctccaggtttc

SEQ ID NO: 4549137 - DNA, 25 bp, Homo sapien
aggctcatggaatctccaggtttct

SEQ ID NO: 4549138 - DNA, 25 bp, Homo sapien
atatttgaaagcagattacattttc

SEQ ID NO: 4549139 - DNA, 25 bp, Homo sapien
tcaacagaatatttgaaagcagatt

SEQ ID NO: 4549140 - DNA, 25 bp, Homo sapien
tacattttcagtttgttatgcttac

SEQ ID NO: 4549141 - DNA, 25 bp, Homo sapien
acagaatatttgaaagcagattaca

SEQ ID NO: 4549142 - DNA, 25 bp, Homo sapien
catgatgcccaagttcagtggagac

SEQ ID NO: 4549143 - DNA, 25 bp, Homo sapien
tgatattaatcccaagttccacatg

SEQ ID NO: 4549144 - DNA, 25 bp, Homo sapien
gctctctgatgttccactcttcaga

SEQ ID NO: 4549145 - DNA, 25 bp, Homo sapien
caggaagcccttaactgctggaatg

SEQ ID NO: 4549146 - DNA, 25 bp, Homo sapien
ggggcaggcggggaactcagggagc

SEQ ID NO: 4549147 - DNA, 25 bp, Homo sapien
tgcttaatgggcaaggcagagtatc

SEQ ID NO: 4549148 - DNA, 25 bp, Homo sapien
gattacttctgaacaagcaccctgg

SEQ ID NO: 4549149 - DNA, 25 bp, Homo sapien
tagctttgctcacatagaaccagac

SEQ ID NO: 4549150 - DNA, 25 bp, Homo sapien
aaagttgcccaaacagttcagctga

SEQ ID NO: 4549151 - DNA, 25 bp, Homo sapien
tggacattgtgctccagcgcctgag

SEQ ID NO: 4549152 - DNA, 25 bp, Homo sapien
ccatgtcatggcgtaaggaatccaa

SEQ ID NO: 4549153 - DNA, 25 bp, Homo sapien
taacttttcaaggtggcctgtggaa

SEQ ID NO: 4549154 - DNA, 25 bp, Homo sapien
cacagcgctgcttccattgcaatgc

SEQ ID NO: 4549155 - DNA, 25 bp, Homo sapien
taacagaggtgtacgatatgtacct

SEQ ID NO: 4549156 - DNA, 25 bp, Homo sapien
aatgaaggagtcttttagagaagac

SEQ ID NO: 4549157 - DNA, 25 bp, Homo sapien
ggaagaactaacagaggtgtacgat

SEQ ID NO: 4549158 - DNA, 25 bp, Homo sapien
gatatgtacctattgcctgaaattc

SEQ ID NO: 4549159 - DNA, 25 bp, Homo sapien
tcccagaatgagcatgtgtaaaatg

SEQ ID NO: 4549160 - DNA, 25 bp, Homo sapien
cagtttaggcaaatcaggaaatctc

SEQ ID NO: 4549161 - DNA, 25 bp, Homo sapien
taatgacacattcgacaaaagcttg

SEQ ID NO: 4549162 - DNA, 25 bp, Homo sapien
gagactaatgatccttgccctcccg

SEQ ID NO: 4549163 - DNA, 25 bp, Homo sapien
ccaggcattcgagccaggtgtgggc

SEQ ID NO: 4549164 - DNA, 25 bp, Homo sapien
ggctatcccaaagttaagagattgt

SEQ ID NO: 4549165 - DNA, 25 bp, Homo sapien
caatgatcaggctataaaccccagg

SEQ ID NO: 4549166 - DNA, 25 bp, Homo sapien
tggtgtctcaggctatcccaaagtt

SEQ ID NO: 4549167 - DNA, 25 bp, Homo sapien
cgttgagtcgttgtctgactagagg

SEQ ID NO: 4549168 - DNA, 25 bp, Homo sapien
cccttccgctcttttggtgccgttg

SEQ ID NO: 4549169 - DNA, 25 bp, Homo sapien
tccgctcttttggtgccgttgagtc

SEQ ID NO: 4549170 - DNA, 25 bp, Homo sapien
cttttggtgccgttgagtcgttgtc

SEQ ID NO: 4549171 - DNA, 25 bp, Homo sapien
cagatttttgttggacgctttcagg

SEQ ID NO: 4549172 - DNA, 25 bp, Homo sapien
aaccagctcctcgtattgtgtccca

SEQ ID NO: 4549173 - DNA, 25 bp, Homo sapien
tgtcactcccaagcagggcgaatcg

SEQ ID NO: 4549174 - DNA, 25 bp, Homo sapien
tgtgtcccattcacagctggagcag

SEQ ID NO: 4549175 - DNA, 25 bp, Homo sapien
ggggtgcggcgagcggtctccagcc

SEQ ID NO: 4549176 - DNA, 25 bp, Homo sapien
gggtgcggcgagcggtctccagccg

SEQ ID NO: 4549177 - DNA, 25 bp, Homo sapien
ggtgcggcgagcggtctccagccgg

SEQ ID NO: 4549178 - DNA, 25 bp, Homo sapien
tcccttcagttttaacctcagccat

SEQ ID NO: 4549179 - DNA, 25 bp, Homo sapien
gccaggtacatcgtttgagtgcaat

SEQ ID NO: 4549180 - DNA, 25 bp, Homo sapien
tagactagccccaaagagcagaagt

SEQ ID NO: 4549181 - DNA, 25 bp, Homo sapien
cataaatgcatactcggttaggaca

SEQ ID NO: 4549182 - DNA, 25 bp, Homo sapien
ggacaacaggcttcataatgggagg

SEQ ID NO: 4549183 - DNA, 25 bp, Homo sapien
ggggcaacaccataagccagagggg

SEQ ID NO: 4549184 - DNA, 25 bp, Homo sapien
gcaacaccataagccagaggggaca

SEQ ID NO: 4549185 - DNA, 25 bp, Homo sapien
gggcaacaccataagccagagggga

SEQ ID NO: 4549186 - DNA, 25 bp, Homo sapien
caacaccataagccagaggggacag

SEQ ID NO: 4549187 - DNA, 25 bp, Homo sapien
aatcctgcaacgctggggagaaagc

SEQ ID NO: 4549188 - DNA, 25 bp, Homo sapien
cgaaatcctgcaacgctggggagaa

SEQ ID NO: 4549189 - DNA, 25 bp, Homo sapien
tcctgcaacgctggggagaaagctc

SEQ ID NO: 4549190 - DNA, 25 bp, Homo sapien
gcaacgctggggagaaagctctgct

SEQ ID NO: 4549191 - DNA, 25 bp, Homo sapien
cttggtgacatgtcacttggcccat

SEQ ID NO: 4549192 - DNA, 25 bp, Homo sapien
caccttaacttggtgacatgtcact

SEQ ID NO: 4549193 - DNA, 25 bp, Homo sapien
tccctccttcaccttaacttggtga

SEQ ID NO: 4549194 - DNA, 25 bp, Homo sapien
tccttcaccttaacttggtgacatg

SEQ ID NO: 4549195 - DNA, 25 bp, Homo sapien
cacctaactcaagagtgactgctca

SEQ ID NO: 4549196 - DNA, 25 bp, Homo sapien
gaaaggccaaccatgtagttattga

SEQ ID NO: 4549197 - DNA, 25 bp, Homo sapien
agggccgtcaagtttgtctaggact

SEQ ID NO: 4549198 - DNA, 25 bp, Homo sapien
tagttattgaacaagttcctgcctg

SEQ ID NO: 4549199 - DNA, 25 bp, Homo sapien
gttctgaaggacaaacctatatgct

SEQ ID NO: 4549200 - DNA, 25 bp, Homo sapien
cacccaactttctaacttcaagcaa

SEQ ID NO: 4549201 - DNA, 25 bp, Homo sapien
atttcatagtgcattgctttaaaaa

SEQ ID NO: 4549202 - DNA, 25 bp, Homo sapien
ttcttcctgcctgaagtcggtagca

SEQ ID NO: 4549203 - DNA, 25 bp, Homo sapien
taacactgtttccaagctcaattag

SEQ ID NO: 4549204 - DNA, 25 bp, Homo sapien
cactgtttccaagctcaattaggag

SEQ ID NO: 4549205 - DNA, 25 bp, Homo sapien
tttccaagctcaattaggaggattt

SEQ ID NO: 4549206 - DNA, 25 bp, Homo sapien
ccaagctcaattaggaggattttta

SEQ ID NO: 4549207 - DNA, 25 bp, Homo sapien
ttgaaggagtacagatgaagtaaca

SEQ ID NO: 4549208 - DNA, 25 bp, Homo sapien
gagtacagatgaagtaacaattctc

SEQ ID NO: 4549209 - DNA, 25 bp, Homo sapien
gcaatctttattgaaggagtacaga

SEQ ID NO: 4549210 - DNA, 25 bp, Homo sapien
tgggtttataattacgcaatcttta

SEQ ID NO: 4549211 - DNA, 25 bp, Homo sapien
cccaggaaaatgtgcaaatatcaag

SEQ ID NO: 4549212 - DNA, 25 bp, Homo sapien
ttccccaggaaaatgtgcaaatatc

SEQ ID NO: 4549213 - DNA, 25 bp, Homo sapien
caggaaaatgtgcaaatatcaaggt

SEQ ID NO: 4549214 - DNA, 25 bp, Homo sapien
ggaaaatgtgcaaatatcaaggtta

SEQ ID NO: 4549215 - DNA, 25 bp, Homo sapien
ggcttttctggcaatcactcttcgt

SEQ ID NO: 4549216 - DNA, 25 bp, Homo sapien
ctcttgaagatggtgagttttgcta

SEQ ID NO: 4549217 - DNA, 25 bp, Homo sapien
cgtgtgccatcttttataaaggtgc

SEQ ID NO: 4549218 - DNA, 25 bp, Homo sapien
aatgatgcgcggctgtttaagaacc

SEQ ID NO: 4549219 - DNA, 25 bp, Homo sapien
gaaaagatctgtgcgtacgctcctg

SEQ ID NO: 4549220 - DNA, 25 bp, Homo sapien
gggtcctagacatatgccgtaaaaa

SEQ ID NO: 4549221 - DNA, 25 bp, Homo sapien
tagatcgtagcgtaccaagagaagc

SEQ ID NO: 4549222 - DNA, 25 bp, Homo sapien
cactgcttaggaaaatgtatgtcgg

SEQ ID NO: 4549223 - DNA, 25 bp, Homo sapien
tcaggttcagttgtgtacacctggg

SEQ ID NO: 4549224 - DNA, 25 bp, Homo sapien
tatgtgtgaacgtgattgtcactgc

SEQ ID NO: 4549225 - DNA, 25 bp, Homo sapien
tagccagatgttttatgtgtgaacg

SEQ ID NO: 4549226 - DNA, 25 bp, Homo sapien
cgtgattgtcactgcatcaggttca

SEQ ID NO: 4549227 - DNA, 25 bp, Homo sapien
tggatgcgagcctccactggataac

SEQ ID NO: 4549228 - DNA, 25 bp, Homo sapien
taggatgcaagatctttggaggcaa

SEQ ID NO: 4549229 - DNA, 25 bp, Homo sapien
caagcttcttaacaggtaggatgca

SEQ ID NO: 4549230 - DNA, 25 bp, Homo sapien
tactgtcggctaaatactgtcccac

SEQ ID NO: 4549231 - DNA, 25 bp, Homo sapien
tcttcaaggtctctgtgactctgtc

SEQ ID NO: 4549232 - DNA, 25 bp, Homo sapien
tttttctacctcctccattcttcaa

SEQ ID NO: 4549233 - DNA, 25 bp, Homo sapien
tttctacctcctccattcttcaagg

SEQ ID NO: 4549234 - DNA, 25 bp, Homo sapien
tcctccattcttcaaggtctctgtg

SEQ ID NO: 4549235 - DNA, 25 bp, Homo sapien
agagtacctagtgatttaaagattt

SEQ ID NO: 4549236 - DNA, 25 bp, Homo sapien
aagacttggattaaaagcaagatga

SEQ ID NO: 4549237 - DNA, 25 bp, Homo sapien
taagagaccaaagacttggattaaa

SEQ ID NO: 4549238 - DNA, 25 bp, Homo sapien
cccaattccaagtgtttgcatgggg

SEQ ID NO: 4549239 - DNA, 25 bp, Homo sapien
caattccaagtgtttgcatggggct

SEQ ID NO: 4549240 - DNA, 25 bp, Homo sapien
ttagaatgcgattaaatgtttttgt

SEQ ID NO: 4549241 - DNA, 25 bp, Homo sapien
catttagaatgcgattaaatgtttt

SEQ ID NO: 4549242 - DNA, 25 bp, Homo sapien
cttcgaagtcaaaggagaaacagag

SEQ ID NO: 4549243 - DNA, 25 bp, Homo sapien
aggagaaacagagagagaagggatg

SEQ ID NO: 4549244 - DNA, 25 bp, Homo sapien
tcaaaggagaaacagagagagaagg

SEQ ID NO: 4549245 - DNA, 25 bp, Homo sapien
aaaggagaaacagagagagaaggga

SEQ ID NO: 4549246 - DNA, 25 bp, Homo sapien
ttcttcttatctatccatcctggtc

SEQ ID NO: 4549247 - DNA, 25 bp, Homo sapien
tagctttgacctctaggacatgagg

SEQ ID NO: 4549248 - DNA, 25 bp, Homo sapien
tgccttgtggccatttgccttggac

SEQ ID NO: 4549249 - DNA, 25 bp, Homo sapien
gaggtcctacacctcattttggcca

SEQ ID NO: 4549250 - DNA, 25 bp, Homo sapien
gaaactgttcttagaagaggcctga

SEQ ID NO: 4549251 - DNA, 25 bp, Homo sapien
gaagactccagtgtagtgaccacaa

SEQ ID NO: 4549252 - DNA, 25 bp, Homo sapien
tgaccaaccactgctgggaagctgc

SEQ ID NO: 4549253 - DNA, 25 bp, Homo sapien
gaagctcagccagtactacgcaagg

SEQ ID NO: 4549254 - DNA, 25 bp, Homo sapien
tgcctggagaagtcacatccagaca

SEQ ID NO: 4549255 - DNA, 25 bp, Homo sapien
gcctggagaagtcacatccagacat

SEQ ID NO: 4549256 - DNA, 25 bp, Homo sapien
gctcctatggaaaagcaggacttga

SEQ ID NO: 4549257 - DNA, 25 bp, Homo sapien
agggggcagcaaagcacaaccgcct

SEQ ID NO: 4549258 - DNA, 25 bp, Homo sapien
ggcagcaaagcacaaccgccttctt

SEQ ID NO: 4549259 - DNA, 25 bp, Homo sapien
aagcacaaccgccttcttcagctga

SEQ ID NO: 4549260 - DNA, 25 bp, Homo sapien
caagttatgactgaaaactgacaca

SEQ ID NO: 4549261 - DNA, 25 bp, Homo sapien
caagagtaaagggtacactgacttc

SEQ ID NO: 4549262 - DNA, 25 bp, Homo sapien
agaaaagaatgatgccctgggcaag

SEQ ID NO: 4549263 - DNA, 25 bp, Homo sapien
gaggtaatggccaagtttgaatctg

SEQ ID NO: 4549264 - DNA, 25 bp, Homo sapien
tactaatcctgcaggaaaggctgta

SEQ ID NO: 4549265 - DNA, 25 bp, Homo sapien
gaacaggcgactttggtagtactaa

SEQ ID NO: 4549266 - DNA, 25 bp, Homo sapien
gttagaggacgcttaccctcaggaa

SEQ ID NO: 4549267 - DNA, 25 bp, Homo sapien
cagtgccctcacaagcgtacaacaa

SEQ ID NO: 4549268 - DNA, 25 bp, Homo sapien
tcaagaaaaccgcacaggaagctga

SEQ ID NO: 4549269 - DNA, 25 bp, Homo sapien
gaacgaaccgtgtgggtgcaatccc

SEQ ID NO: 4549270 - DNA, 25 bp, Homo sapien
aaaagatcaacccataactgcagtg

SEQ ID NO: 4549271 - DNA, 25 bp, Homo sapien
caaattgaaggtttgagaagcctcc

SEQ ID NO: 4549272 - DNA, 25 bp, Homo sapien
attctgcagatctgttgctttgtac

SEQ ID NO: 4549273 - DNA, 25 bp, Homo sapien
ttttcattctgcagatctgttgctt

SEQ ID NO: 4549274 - DNA, 25 bp, Homo sapien
tgttttcattctgcagatctgttgc

SEQ ID NO: 4549275 - DNA, 25 bp, Homo sapien
ttcattctgcagatctgttgctttg

SEQ ID NO: 4549276 - DNA, 25 bp, Homo sapien
caagtgccacttctgaagctgtgtg

SEQ ID NO: 4549277 - DNA, 25 bp, Homo sapien
ccacagctcagacattggtatcgct

SEQ ID NO: 4549278 - DNA, 25 bp, Homo sapien
ggtctgcttggaattggcccggaaa

SEQ ID NO: 4549279 - DNA, 25 bp, Homo sapien
tctctggcatatcaggcaggtctgc

SEQ ID NO: 4549280 - DNA, 25 bp, Homo sapien
gggccttctgcaatgctacaatggc

SEQ ID NO: 4549281 - DNA, 25 bp, Homo sapien
catgggaggcttttaaaccaacctg

SEQ ID NO: 4549282 - DNA, 25 bp, Homo sapien
caacctgtctcacattggctgggtc

SEQ ID NO: 4549283 - DNA, 25 bp, Homo sapien
ccacagggacgtgaacttggctctg

SEQ ID NO: 4549284 - DNA, 25 bp, Homo sapien
caacagagtacttgacacccaggag

SEQ ID NO: 4549285 - DNA, 25 bp, Homo sapien
cccatgaatctgtgagccctgcaaa

SEQ ID NO: 4549286 - DNA, 25 bp, Homo sapien
caatgccagggtgattcagaaggac

SEQ ID NO: 4549287 - DNA, 25 bp, Homo sapien
gagttactgccagattgccttgcct

SEQ ID NO: 4549288 - DNA, 25 bp, Homo sapien
tgtttctgggagcacatgaacgttc

SEQ ID NO: 4549289 - DNA, 25 bp, Homo sapien
tcaaatgtggccagaccaggaaagg

SEQ ID NO: 4549290 - DNA, 25 bp, Homo sapien
cgttctcaagaacacagacaggttg

SEQ ID NO: 4549291 - DNA, 25 bp, Homo sapien
caaggacagactcctggatttccag

SEQ ID NO: 4549292 - DNA, 25 bp, Homo sapien
tctcccaagtcaaggtggcaggtgg

SEQ ID NO: 4549293 - DNA, 25 bp, Homo sapien
gaaggcactggcacctctaaactgg

SEQ ID NO: 4549294 - DNA, 25 bp, Homo sapien
gacagggttggagaccttcacaatc

SEQ ID NO: 4549295 - DNA, 25 bp, Homo sapien
ggccagtgtacatccgcgggaaact

SEQ ID NO: 4549296 - DNA, 25 bp, Homo sapien
ccagtgtaccagttggattgcgaac

SEQ ID NO: 4549297 - DNA, 25 bp, Homo sapien
cctggttaaaaatgagcaggaggcc

SEQ ID NO: 4549298 - DNA, 25 bp, Homo sapien
taggatcccagacctttagacctgg

SEQ ID NO: 4549299 - DNA, 25 bp, Homo sapien
tgcaaccaactagtggcagagctga

SEQ ID NO: 4549300 - DNA, 25 bp, Homo sapien
ccatgaagttttgctggaaccggca

SEQ ID NO: 4549301 - DNA, 25 bp, Homo sapien
catctgatctcaggtttacatggct

SEQ ID NO: 4549302 - DNA, 25 bp, Homo sapien
ccttccgccaagagagaggaccctt

SEQ ID NO: 4549303 - DNA, 25 bp, Homo sapien
gatgggcatcttctgtctgaagggc

SEQ ID NO: 4549304 - DNA, 25 bp, Homo sapien
tgagcaccctcagtgagaagttcct

SEQ ID NO: 4549305 - DNA, 25 bp, Homo sapien
agagtgaaacggcaaccggtaggca

SEQ ID NO: 4549306 - DNA, 25 bp, Homo sapien
cattgaaggttctacagaggaggcg

SEQ ID NO: 4549307 - DNA, 25 bp, Homo sapien
ccaagaggagaggtaggatttcact

SEQ ID NO: 4549308 - DNA, 25 bp, Homo sapien
cgcagcctattagcttctcagtgag

SEQ ID NO: 4549309 - DNA, 25 bp, Homo sapien
cagtgaggaataagactctcaagaa

SEQ ID NO: 4549310 - DNA, 25 bp, Homo sapien
agggccgcacgcagcctattagctt

SEQ ID NO: 4549311 - DNA, 25 bp, Homo sapien
gcagatgattgggtgtgatagaggt

SEQ ID NO: 4549312 - DNA, 25 bp, Homo sapien
acagaagtgaataggaggctaagaa

SEQ ID NO: 4549313 - DNA, 25 bp, Homo sapien
ggtgactgccacattaagcattaaa

SEQ ID NO: 4549314 - DNA, 25 bp, Homo sapien
caatggaaccagttcacagggtggt

SEQ ID NO: 4549315 - DNA, 25 bp, Homo sapien
aagggaagtcagatccaaaggtgac

SEQ ID NO: 4549316 - DNA, 25 bp, Homo sapien
caaggctagggttactgctggctaa

SEQ ID NO: 4549317 - DNA, 25 bp, Homo sapien
gggtcttctgctcgtcatcctttga

SEQ ID NO: 4549318 - DNA, 25 bp, Homo sapien
tctggccatccaagacgtgctagtg

SEQ ID NO: 4549319 - DNA, 25 bp, Homo sapien
gaatcctcggaaaatactggttatg

SEQ ID NO: 4549320 - DNA, 25 bp, Homo sapien
tgagggaattcgctgaccaagaggc

SEQ ID NO: 4549321 - DNA, 25 bp, Homo sapien
tcctgtgaaggagcattattcccct

SEQ ID NO: 4549322 - DNA, 25 bp, Homo sapien
aagaggccttgcctagtcccaaagg

SEQ ID NO: 4549323 - DNA, 25 bp, Homo sapien
gttggtttaactgccctcagagggc

SEQ ID NO: 4549324 - DNA, 25 bp, Homo sapien
gcttcataactagcaccacctccaa

SEQ ID NO: 4549325 - DNA, 25 bp, Homo sapien
ggcttcataactagcaccacctcca

SEQ ID NO: 4549326 - DNA, 25 bp, Homo sapien
cataactagcaccacctccaatctc

SEQ ID NO: 4549327 - DNA, 25 bp, Homo sapien
ttcataactagcaccacctccaatc

SEQ ID NO: 4549328 - DNA, 25 bp, Homo sapien
ctgaggctagtaatttcccttccct

SEQ ID NO: 4549329 - DNA, 25 bp, Homo sapien
tgaggctagtaatttcccttccctc

SEQ ID NO: 4549330 - DNA, 25 bp, Homo sapien
tcttcagccaactgtcactggggga

SEQ ID NO: 4549331 - DNA, 25 bp, Homo sapien
ctgttaacagtttagaatgtcgctg

SEQ ID NO: 4549332 - DNA, 25 bp, Homo sapien
gaatgtcgctgttcccaggagcctt

SEQ ID NO: 4549333 - DNA, 25 bp, Homo sapien
gaatcctttggaaggcttcagctgt

SEQ ID NO: 4549334 - DNA, 25 bp, Homo sapien
ccagtgacctgcactctgattagag

SEQ ID NO: 4549335 - DNA, 25 bp, Homo sapien
cttccaatcatagccccttagtact

SEQ ID NO: 4549336 - DNA, 25 bp, Homo sapien
ttagagaatttaggcaggacaggct

SEQ ID NO: 4549337 - DNA, 25 bp, Homo sapien
tgagagagctagttcttgacaccct

SEQ ID NO: 4549338 - DNA, 25 bp, Homo sapien
gagccaagttgaaggaacacctgac

SEQ ID NO: 4549339 - DNA, 25 bp, Homo sapien
gcaattgcacgtgtccatgcctcag

SEQ ID NO: 4549340 - DNA, 25 bp, Homo sapien
gagcctgaaaatcccgggctgagga

SEQ ID NO: 4549341 - DNA, 25 bp, Homo sapien
ggaaatgtcttctaggagcctgaaa

SEQ ID NO: 4549342 - DNA, 25 bp, Homo sapien
tgaaattcccagtgacttgaccatg

SEQ ID NO: 4549343 - DNA, 25 bp, Homo sapien
gtgtcactaagctaatacatgctgt

SEQ ID NO: 4549344 - DNA, 25 bp, Homo sapien
gaagggagccagcaatgctttccag

SEQ ID NO: 4549345 - DNA, 25 bp, Homo sapien
gcttgtgcttctccctacagtgtca

SEQ ID NO: 4549346 - DNA, 25 bp, Homo sapien
ttggagccaacgaaagcaaacgtgc

SEQ ID NO: 4549347 - DNA, 25 bp, Homo sapien
tggtgccaaaagtgctgctcgagct

SEQ ID NO: 4549348 - DNA, 25 bp, Homo sapien
tattctgtgaaaaagcacggcactg

SEQ ID NO: 4549349 - DNA, 25 bp, Homo sapien
tcactgaagtgaaggaccggagaca

SEQ ID NO: 4549350 - DNA, 25 bp, Homo sapien
tcattttttgggcatattgtctctt

SEQ ID NO: 4549351 - DNA, 25 bp, Homo sapien
tgagtgtgatgattctgagtcattg

SEQ ID NO: 4549352 - DNA, 25 bp, Homo sapien
tttgggcatattgtctcttcatttg

SEQ ID NO: 4549353 - DNA, 25 bp, Homo sapien
tctgtgagtgtgatgattctgagtc

SEQ ID NO: 4549354 - DNA, 25 bp, Homo sapien
ccttgattcaagaaaggttcaacgc

SEQ ID NO: 4549355 - DNA, 25 bp, Homo sapien
aattggaaccttgattcaagaaagg

SEQ ID NO: 4549356 - DNA, 25 bp, Homo sapien
tcctaccttggaattggaaccttga

SEQ ID NO: 4549357 - DNA, 25 bp, Homo sapien
aagaaaggttcaacgctcacctggc

SEQ ID NO: 4549358 - DNA, 25 bp, Homo sapien
tccctgatgggtttgctggcctcac

SEQ ID NO: 4549359 - DNA, 25 bp, Homo sapien
gaagccagtatctgtggagtctcag

SEQ ID NO: 4549360 - DNA, 25 bp, Homo sapien
tgaggttcctacataggtggcccgg

SEQ ID NO: 4549361 - DNA, 25 bp, Homo sapien
gaagtagtgaagcaacaccctggga

SEQ ID NO: 4549362 - DNA, 25 bp, Homo sapien
ctggtttgatgggctgaccagtgcc

SEQ ID NO: 4549363 - DNA, 25 bp, Homo sapien
agggacctcctgtcaggctccagtt

SEQ ID NO: 4549364 - DNA, 25 bp, Homo sapien
gggacctcctgtcaggctccagttg

SEQ ID NO: 4549365 - DNA, 25 bp, Homo sapien
tttgatgggctgaccagtgccaggg

SEQ ID NO: 4549366 - DNA, 25 bp, Homo sapien
gagttttcccaatctagtttctaga

SEQ ID NO: 4549367 - DNA, 25 bp, Homo sapien
ggctgtcatggttagaatgcattca

SEQ ID NO: 4549368 - DNA, 25 bp, Homo sapien
tagtttctagatttcacagattcca

SEQ ID NO: 4549369 - DNA, 25 bp, Homo sapien
cattcattatgaatcgagctgacat

SEQ ID NO: 4549370 - DNA, 25 bp, Homo sapien
aagttgagtttcattttgtcggtca

SEQ ID NO: 4549371 - DNA, 25 bp, Homo sapien
catttggaaagttgagtttcatttt

SEQ ID NO: 4549372 - DNA, 25 bp, Homo sapien
cagcatttggaaagttgagtttcat

SEQ ID NO: 4549373 - DNA, 25 bp, Homo sapien
agttgagtttcattttgtcggtcat

SEQ ID NO: 4549374 - DNA, 25 bp, Homo sapien
atgtggtatgtccagcattccagca

SEQ ID NO: 4549375 - DNA, 25 bp, Homo sapien
aatgtggtatgtccagcattccagc

SEQ ID NO: 4549376 - DNA, 25 bp, Homo sapien
acaccctgagatgtagcctgcagag

SEQ ID NO: 4549377 - DNA, 25 bp, Homo sapien
gaaacaccctgagatgtagcctgca

SEQ ID NO: 4549378 - DNA, 25 bp, Homo sapien
aacaccctgagatgtagcctgcaga

SEQ ID NO: 4549379 - DNA, 25 bp, Homo sapien
ggaaacaccctgagatgtagcctgc

SEQ ID NO: 4549380 - DNA, 25 bp, Homo sapien
gaagacgacagatgaacctcagccc

SEQ ID NO: 4549381 - DNA, 25 bp, Homo sapien
agacgacagatgaacctcagcccct

SEQ ID NO: 4549382 - DNA, 25 bp, Homo sapien
acgacagatgaacctcagcccctct

SEQ ID NO: 4549383 - DNA, 25 bp, Homo sapien
tgaagacgacagatgaacctcagcc

SEQ ID NO: 4549384 - DNA, 25 bp, Homo sapien
caatcagttgtcaagagccacacac

SEQ ID NO: 4549385 - DNA, 25 bp, Homo sapien
caagctcctcccaatatgaggatgt

SEQ ID NO: 4549386 - DNA, 25 bp, Homo sapien
gctcctcccaatatgaggatgtttg

SEQ ID NO: 4549387 - DNA, 25 bp, Homo sapien
cagccaagctcctcccaatatgagg

SEQ ID NO: 4549388 - DNA, 25 bp, Homo sapien
acaatccaatttccctcatgatgcc

SEQ ID NO: 4549389 - DNA, 25 bp, Homo sapien
caatccaatttccctcatgatgccc

SEQ ID NO: 4549390 - DNA, 25 bp, Homo sapien
gaaattcagtgtctatgcctataaa

SEQ ID NO: 4549391 - DNA, 25 bp, Homo sapien
ggagggatgtacaccggcgctttcc

SEQ ID NO: 4549392 - DNA, 25 bp, Homo sapien
tcagcacagacctcaatgtccatgc

SEQ ID NO: 4549393 - DNA, 25 bp, Homo sapien
ggctatggagtcactgatctacccc

SEQ ID NO: 4549394 - DNA, 25 bp, Homo sapien
cccaagaacactccaaatttctgga

SEQ ID NO: 4549395 - DNA, 25 bp, Homo sapien
tgctttgtgtgtgcggatttttccc

SEQ ID NO: 4549396 - DNA, 25 bp, Homo sapien
aggctgaatttcaccacagggtttc

SEQ ID NO: 4549397 - DNA, 25 bp, Homo sapien
cccccaagaacactccaaatttctg

SEQ ID NO: 4549398 - DNA, 25 bp, Homo sapien
tatgaaaggacaacgggactctgtg

SEQ ID NO: 4549399 - DNA, 25 bp, Homo sapien
gggctattcccacacatgaaggcca

SEQ ID NO: 4549400 - DNA, 25 bp, Homo sapien
cagccccaaaaagagtggacacact

SEQ ID NO: 4549401 - DNA, 25 bp, Homo sapien
ggtccaattttacaatcaagcagca

SEQ ID NO: 4549402 - DNA, 25 bp, Homo sapien
cagacagatgcgtgttcttcacagg

SEQ ID NO: 4549403 - DNA, 25 bp, Homo sapien
caagcgattctcaaggatccagtgt

SEQ ID NO: 4549404 - DNA, 25 bp, Homo sapien
gcacctatgtgtagagtcgccatga

SEQ ID NO: 4549405 - DNA, 25 bp, Homo sapien
cagttgaaatagtggctctctgcca

SEQ ID NO: 4549406 - DNA, 25 bp, Homo sapien
gctggagccacgtgagagtagacta

SEQ ID NO: 4549407 - DNA, 25 bp, Homo sapien
ccacattaaagatggctggttgact

SEQ ID NO: 4549408 - DNA, 25 bp, Homo sapien
gaagaagctacatggccgtgacgtg

SEQ ID NO: 4549409 - DNA, 25 bp, Homo sapien
agcgcagatgaggagtatagccaca

SEQ ID NO: 4549410 - DNA, 25 bp, Homo sapien
aaaccttccaataggcagactcagg

SEQ ID NO: 4549411 - DNA, 25 bp, Homo sapien
gggtcttgctacaggattcttggtg

SEQ ID NO: 4549412 - DNA, 25 bp, Homo sapien
gtaatcttcacacgattggcctcaa

SEQ ID NO: 4549413 - DNA, 25 bp, Homo sapien
cctagtggcttggtttcatgtgagc

SEQ ID NO: 4549414 - DNA, 25 bp, Homo sapien
agaaaatgctaacaacacactgtgt

SEQ ID NO: 4549415 - DNA, 25 bp, Homo sapien
tggaggtcagagatcatacatggtt

SEQ ID NO: 4549416 - DNA, 25 bp, Homo sapien
cccctactagtatcaagattggcta

SEQ ID NO: 4549417 - DNA, 25 bp, Homo sapien
ttaaaggctgaagttggccctggtg

SEQ ID NO: 4549418 - DNA, 25 bp, Homo sapien
cacagtgtaagtctcagccagttca

SEQ ID NO: 4549419 - DNA, 25 bp, Homo sapien
taaagtgtcaactaacagcacaagg

SEQ ID NO: 4549420 - DNA, 25 bp, Homo sapien
tcaagaggcttagggattcacactg

SEQ ID NO: 4549421 - DNA, 25 bp, Homo sapien
gccatggtattcagacgagaaccca

SEQ ID NO: 4549422 - DNA, 25 bp, Homo sapien
aggccttaaagtgggcaacactgaa

SEQ ID NO: 4549423 - DNA, 25 bp, Homo sapien
caacactgaaataggccagtgatgg

SEQ ID NO: 4549424 - DNA, 25 bp, Homo sapien
gatggagataggtcactgtgtggca

SEQ ID NO: 4549425 - DNA, 25 bp, Homo sapien
tgaggaagggtactcggagttaggc

SEQ ID NO: 4549426 - DNA, 25 bp, Homo sapien
agggtgagagatgagtgaagatgtc

SEQ ID NO: 4549427 - DNA, 25 bp, Homo sapien
ggtgagagatgagtgaagatgtcta

SEQ ID NO: 4549428 - DNA, 25 bp, Homo sapien
ttagggtgagagatgagtgaagatg

SEQ ID NO: 4549429 - DNA, 25 bp, Homo sapien
gtgagagatgagtgaagatgtctac

SEQ ID NO: 4549430 - DNA, 25 bp, Homo sapien
atgccatcatcccacacaggaagag

SEQ ID NO: 4549431 - DNA, 25 bp, Homo sapien
agcttcttggcctgaagttgtctaa

SEQ ID NO: 4549432 - DNA, 25 bp, Homo sapien
cacggggtggccatgctacaagcct

SEQ ID NO: 4549433 - DNA, 25 bp, Homo sapien
tctaatagagcctgcctggctccaa

SEQ ID NO: 4549434 - DNA, 25 bp, Homo sapien
tcttgccccagagcaatatcccagg

SEQ ID NO: 4549435 - DNA, 25 bp, Homo sapien
gctctgtctactggatctgggctct

SEQ ID NO: 4549436 - DNA, 25 bp, Homo sapien
ctgtctactggatctgggctctgaa

SEQ ID NO: 4549437 - DNA, 25 bp, Homo sapien
tctgtctactggatctgggctctga

SEQ ID NO: 4549438 - DNA, 25 bp, Homo sapien
ctctgtctactggatctgggctctg

SEQ ID NO: 4549439 - DNA, 25 bp, Homo sapien
ctcagtcagattaagagatacatac

SEQ ID NO: 4549440 - DNA, 25 bp, Homo sapien
ggaaagagtgtctgatcccacaggt

SEQ ID NO: 4549441 - DNA, 25 bp, Homo sapien
ctggaaagagtgtctgatcccacag

SEQ ID NO: 4549442 - DNA, 25 bp, Homo sapien
gttgagggctcagtcagattaagag

SEQ ID NO: 4549443 - DNA, 25 bp, Homo sapien
cgtctggaagatcccgagcacagga

SEQ ID NO: 4549444 - DNA, 25 bp, Homo sapien
cttcctgtttgcctccacgtgttca

SEQ ID NO: 4549445 - DNA, 25 bp, Homo sapien
tgataggataagttcttcttcacct

SEQ ID NO: 4549446 - DNA, 25 bp, Homo sapien
gaccttccgtcctgataggataagt

SEQ ID NO: 4549447 - DNA, 25 bp, Homo sapien
gtgccttagcatctgggcatgctga

SEQ ID NO: 4549448 - DNA, 25 bp, Homo sapien
gaatccggagacttctctccataag

SEQ ID NO: 4549449 - DNA, 25 bp, Homo sapien
gtttgctcagctggcgggactctgg

SEQ ID NO: 4549450 - DNA, 25 bp, Homo sapien
ctctgggagcacgagccctgccagc

SEQ ID NO: 4549451 - DNA, 25 bp, Homo sapien
ttctgatcatgttgatttgtagctg

SEQ ID NO: 4549452 - DNA, 25 bp, Homo sapien
catgttgatttgtagctgtggatca

SEQ ID NO: 4549453 - DNA, 25 bp, Homo sapien
tttgtagctgtggatcatgaacact

SEQ ID NO: 4549454 - DNA, 25 bp, Homo sapien
tgatttgtagctgtggatcatgaac

SEQ ID NO: 4549455 - DNA, 25 bp, Homo sapien
taggcatcttaacagtcacaaggtg

SEQ ID NO: 4549456 - DNA, 25 bp, Homo sapien
taaagtagatagcttcccactggaa

SEQ ID NO: 4549457 - DNA, 25 bp, Homo sapien
tccaagtatcgttaagcacaggtgc

SEQ ID NO: 4549458 - DNA, 25 bp, Homo sapien
cagctgataaggtgtcctcctgaag

SEQ ID NO: 4549459 - DNA, 25 bp, Homo sapien
aatctcaatggtcaaaaacagtatc

SEQ ID NO: 4549460 - DNA, 25 bp, Homo sapien
taaaaatctcaatggtcaaaaacag

SEQ ID NO: 4549461 - DNA, 25 bp, Homo sapien
ttaaaaatctcaatggtcaaaaaca

SEQ ID NO: 4549462 - DNA, 25 bp, Homo sapien
aaaatctcaatggtcaaaaacagta

SEQ ID NO: 4549463 - DNA, 25 bp, Homo sapien
tccaggtggtctagcgctcctaaca

SEQ ID NO: 4549464 - DNA, 25 bp, Homo sapien
ggaaagaatggaaacggcctctcac

SEQ ID NO: 4549465 - DNA, 25 bp, Homo sapien
gctccacagctaagaaagttttcca

SEQ ID NO: 4549466 - DNA, 25 bp, Homo sapien
tgcctagtgatgactgtagtgtgcc

SEQ ID NO: 4549467 - DNA, 25 bp, Homo sapien
ggttttcagcgtgccatctgcacca

SEQ ID NO: 4549468 - DNA, 25 bp, Homo sapien
gaagagccgattgccctggatgatg

SEQ ID NO: 4549469 - DNA, 25 bp, Homo sapien
taaatgaatgaattaggccatggcc

SEQ ID NO: 4549470 - DNA, 25 bp, Homo sapien
gtttcgaaatatggactgcttagca

SEQ ID NO: 4549471 - DNA, 25 bp, Homo sapien
attcctcatagggatccaaggccag

SEQ ID NO: 4549472 - DNA, 25 bp, Homo sapien
caaggccagagccttaatagctgag

SEQ ID NO: 4549473 - DNA, 25 bp, Homo sapien
gcctggaacgtgtgaatgagctgcc

SEQ ID NO: 4549474 - DNA, 25 bp, Homo sapien
ccttctgctgaacctgtggtaaaat

SEQ ID NO: 4549475 - DNA, 25 bp, Homo sapien
ccccgagattaggagttgctgtttg

SEQ ID NO: 4549476 - DNA, 25 bp, Homo sapien
tgcatactgcagtaccgtggcacca

SEQ ID NO: 4549477 - DNA, 25 bp, Homo sapien
tcaaaaatgcagacgtgtcctttcc

SEQ ID NO: 4549478 - DNA, 25 bp, Homo sapien
gcaccatgatcgtggcacgtgaaac

SEQ ID NO: 4549479 - DNA, 25 bp, Homo sapien
cagccaagtgctgtaccgtacaaaa

SEQ ID NO: 4549480 - DNA, 25 bp, Homo sapien
agagcagagaccaaccttctcaaag

SEQ ID NO: 4549481 - DNA, 25 bp, Homo sapien
gaaacaacgacactatgagaaaatg

SEQ ID NO: 4549482 - DNA, 25 bp, Homo sapien
caaagttggtgagtattaacccagc

SEQ ID NO: 4549483 - DNA, 25 bp, Homo sapien
ttgagcatggagcactttttgggtg

SEQ ID NO: 4549484 - DNA, 25 bp, Homo sapien
agcatggagcactttttgggtggta

SEQ ID NO: 4549485 - DNA, 25 bp, Homo sapien
tgagcatggagcactttttgggtgg

SEQ ID NO: 4549486 - DNA, 25 bp, Homo sapien
gagcatggagcactttttgggtggt

SEQ ID NO: 4549487 - DNA, 25 bp, Homo sapien
gccttgttagtagtaccactatcca

SEQ ID NO: 4549488 - DNA, 25 bp, Homo sapien
tattttatggttagggccaggtgtg

SEQ ID NO: 4549489 - DNA, 25 bp, Homo sapien
gacctgcctgagcaatacagcatga

SEQ ID NO: 4549490 - DNA, 25 bp, Homo sapien
gacagagttaggacactaatttggc

SEQ ID NO: 4549491 - DNA, 25 bp, Homo sapien
ctgtttccgggtgatattaatgtgt

SEQ ID NO: 4549492 - DNA, 25 bp, Homo sapien
gtttccgggtgatattaatgtgtcc

SEQ ID NO: 4549493 - DNA, 25 bp, Homo sapien
tgtttccgggtgatattaatgtgtc

SEQ ID NO: 4549494 - DNA, 25 bp, Homo sapien
tttccattgccactccaggaaactg

SEQ ID NO: 4549495 - DNA, 25 bp, Homo sapien
cctttccattgccactccaggaaac

SEQ ID NO: 4549496 - DNA, 25 bp, Homo sapien
cttcctgagtataaggaatgctttt

SEQ ID NO: 4549497 - DNA, 25 bp, Homo sapien
cttttatatccccaggtggtagcca

SEQ ID NO: 4549498 - DNA, 25 bp, Homo sapien
gtccagatgtggcaactagacttga

SEQ ID NO: 4549499 - DNA, 25 bp, Homo sapien
ccagatgtggcaactagacttgaag

SEQ ID NO: 4549500 - DNA, 25 bp, Homo sapien
tccagatgtggcaactagacttgaa

SEQ ID NO: 4549501 - DNA, 25 bp, Homo sapien
cagatgtggcaactagacttgaaga

SEQ ID NO: 4549502 - DNA, 25 bp, Homo sapien
tgggtaatctatctggtcccaggag

SEQ ID NO: 4549503 - DNA, 25 bp, Homo sapien
tcccaggaggttcaaggcgttctga

SEQ ID NO: 4549504 - DNA, 25 bp, Homo sapien
tgaacctccctccatatatgtgaag

SEQ ID NO: 4549505 - DNA, 25 bp, Homo sapien
aatctggtaagcacaattctggaac

SEQ ID NO: 4549506 - DNA, 25 bp, Homo sapien
atgcagtttggttaacttgccagat

SEQ ID NO: 4549507 - DNA, 25 bp, Homo sapien
agaaaaccctctccatccgcaacac

SEQ ID NO: 4549508 - DNA, 25 bp, Homo sapien
ggtttaggatttgatgcagtttggt

SEQ ID NO: 4549509 - DNA, 25 bp, Homo sapien
tggttaacttgccagatactcagaa

SEQ ID NO: 4549510 - DNA, 25 bp, Homo sapien
gaggccgcgtccattcaaacattcg

SEQ ID NO: 4549511 - DNA, 25 bp, Homo sapien
tataatctagtaactcttgcattgc

SEQ ID NO: 4549512 - DNA, 25 bp, Homo sapien
ccagcttgacgaaagcagacaagtt

SEQ ID NO: 4549513 - DNA, 25 bp, Homo sapien
aaacattcgtacactgccgtcctga

SEQ ID NO: 4549514 - DNA, 25 bp, Homo sapien
cattatgtagattccttttcataag

SEQ ID NO: 4549515 - DNA, 25 bp, Homo sapien
aacattatgtagattccttttcata

SEQ ID NO: 4549516 - DNA, 25 bp, Homo sapien
ttctcttaacattatgtagattcct

SEQ ID NO: 4549517 - DNA, 25 bp, Homo sapien
cttaacattatgtagattccttttc

SEQ ID NO: 4549518 - DNA, 25 bp, Homo sapien
cagaacataagaatgggacccctcc

SEQ ID NO: 4549519 - DNA, 25 bp, Homo sapien
ggatgttctgaaccactacatagaa

SEQ ID NO: 4549520 - DNA, 25 bp, Homo sapien
cctgtgaggttaccaaggagcttca

SEQ ID NO: 4549521 - DNA, 25 bp, Homo sapien
catagaacacttgtctgaagagggt

SEQ ID NO: 4549522 - DNA, 25 bp, Homo sapien
tggaaccacgataatcaacatcatc

SEQ ID NO: 4549523 - DNA, 25 bp, Homo sapien
agagatgaaggtggatgcacctgac

SEQ ID NO: 4549524 - DNA, 25 bp, Homo sapien
ggtggatgcacctgacttgctgaat

SEQ ID NO: 4549525 - DNA, 25 bp, Homo sapien
tgcactgggttgataaagagttgta

SEQ ID NO: 4549526 - DNA, 25 bp, Homo sapien
gtatgactgacaggccagtagagaa

SEQ ID NO: 4549527 - DNA, 25 bp, Homo sapien
catatgtatgactgacaggccagta

SEQ ID NO: 4549528 - DNA, 25 bp, Homo sapien
attcttctccgatccatatgtatga

SEQ ID NO: 4549529 - DNA, 25 bp, Homo sapien
ttctccgatccatatgtatgactga

SEQ ID NO: 4549530 - DNA, 25 bp, Homo sapien
ctaaggagaaatacactgtgtataa

SEQ ID NO: 4549531 - DNA, 25 bp, Homo sapien
aaggagaaatacactgtgtataatg

SEQ ID NO: 4549532 - DNA, 25 bp, Homo sapien
agaatcgatgatttaagcaatttca

SEQ ID NO: 4549533 - DNA, 25 bp, Homo sapien
gcagaatcgatgatttaagcaattt

SEQ ID NO: 4549534 - DNA, 25 bp, Homo sapien
atcagattccttatggatgactttc

SEQ ID NO: 4549535 - DNA, 25 bp, Homo sapien
gattccttatggatgactttcgcct

SEQ ID NO: 4549536 - DNA, 25 bp, Homo sapien
tatggatgactttcgcctttccacc

SEQ ID NO: 4549537 - DNA, 25 bp, Homo sapien
gatgactttcgcctttccacctgga

SEQ ID NO: 4549538 - DNA, 25 bp, Homo sapien
gcacagctctatttagagttatgca

SEQ ID NO: 4549539 - DNA, 25 bp, Homo sapien
ctgcagcacagctctatttagagtt

SEQ ID NO: 4549540 - DNA, 25 bp, Homo sapien
acagctctatttagagttatgcaca

SEQ ID NO: 4549541 - DNA, 25 bp, Homo sapien
cagcacagctctatttagagttatg

SEQ ID NO: 4549542 - DNA, 25 bp, Homo sapien
gacctgctccacatgttcttctata

SEQ ID NO: 4549543 - DNA, 25 bp, Homo sapien
acctgctccacatgttcttctatag

SEQ ID NO: 4549544 - DNA, 25 bp, Homo sapien
ttgacctgctccacatgttcttcta

SEQ ID NO: 4549545 - DNA, 25 bp, Homo sapien
tgacctgctccacatgttcttctat

SEQ ID NO: 4549546 - DNA, 25 bp, Homo sapien
tgcatggaatgaaattataaagaca

SEQ ID NO: 4549547 - DNA, 25 bp, Homo sapien
gtgaaatatttcaagctgaaatggc

SEQ ID NO: 4549548 - DNA, 25 bp, Homo sapien
caaaacacatgcatggaatgaaatt

SEQ ID NO: 4549549 - DNA, 25 bp, Homo sapien
tgaaatggccactccaccacttaaa

SEQ ID NO: 4549550 - DNA, 25 bp, Homo sapien
tttcaggtgactgccttcctttcat

SEQ ID NO: 4549551 - DNA, 25 bp, Homo sapien
ttcaggtgactgccttcctttcatc

SEQ ID NO: 4549552 - DNA, 25 bp, Homo sapien
cgaagggccattcaaattttctgcc

SEQ ID NO: 4549553 - DNA, 25 bp, Homo sapien
tggcacagctaactcagtgaaggcc

SEQ ID NO: 4549554 - DNA, 25 bp, Homo sapien
tatttctgagcctaacgacgagttt

SEQ ID NO: 4549555 - DNA, 25 bp, Homo sapien
gacaagtcaaccagtcaagctgcta

SEQ ID NO: 4549556 - DNA, 25 bp, Homo sapien
taacagagcccctaattgaccagaa

SEQ ID NO: 4549557 - DNA, 25 bp, Homo sapien
aaatgactgttcataagggctgacc

SEQ ID NO: 4549558 - DNA, 25 bp, Homo sapien
tcgggaaattgagccgtatggactc

SEQ ID NO: 4549559 - DNA, 25 bp, Homo sapien
gtatggtaggttccactgccctggg

SEQ ID NO: 4549560 - DNA, 25 bp, Homo sapien
gaatttggactcagcatcactatag

SEQ ID NO: 4549561 - DNA, 25 bp, Homo sapien
gaactttgactattacccaaccaga

SEQ ID NO: 4549562 - DNA, 25 bp, Homo sapien
accatgcaatgcagaacctctgtct

SEQ ID NO: 4549563 - DNA, 25 bp, Homo sapien
tcttcttgaaccatgtctgctatta

SEQ ID NO: 4549564 - DNA, 25 bp, Homo sapien
tttataaggaagaggtcacttgcca

SEQ ID NO: 4549565 - DNA, 25 bp, Homo sapien
aatgccaaagtcgtttgactggaaa

SEQ ID NO: 4549566 - DNA, 25 bp, Homo sapien
aatgtctcttgaaggacctcttgtt

SEQ ID NO: 4549567 - DNA, 25 bp, Homo sapien
caaggaaatgccaaagtcgtttgac

SEQ ID NO: 4549568 - DNA, 25 bp, Homo sapien
cctcttgtttaacaaggaaatgcca

SEQ ID NO: 4549569 - DNA, 25 bp, Homo sapien
gaatggggtattttcaggttctagc

SEQ ID NO: 4549570 - DNA, 25 bp, Homo sapien
tgaatggggtattttcaggttctag

SEQ ID NO: 4549571 - DNA, 25 bp, Homo sapien
ctagcattgctttatttcgaagaat

SEQ ID NO: 4549572 - DNA, 25 bp, Homo sapien
cctaatggtgatgttacaggcagct

SEQ ID NO: 4549573 - DNA, 25 bp, Homo sapien
tctcttgcaagatctgttcccagtt

SEQ ID NO: 4549574 - DNA, 25 bp, Homo sapien
ctgaaaggtcagttggatatgtgtt

SEQ ID NO: 4549575 - DNA, 25 bp, Homo sapien
tagggggtggaccttcaaactgatc

SEQ ID NO: 4549576 - DNA, 25 bp, Homo sapien
tcttgacattgtgaagtgctagttt

SEQ ID NO: 4549577 - DNA, 25 bp, Homo sapien
cttgacattgtgaagtgctagttta

SEQ ID NO: 4549578 - DNA, 25 bp, Homo sapien
attcttgacattgtgaagtgctagt

SEQ ID NO: 4549579 - DNA, 25 bp, Homo sapien
tgacattgtgaagtgctagtttaac

SEQ ID NO: 4549580 - DNA, 25 bp, Homo sapien
tggtgctcctgtatttgtgtatctg

SEQ ID NO: 4549581 - DNA, 25 bp, Homo sapien
tttgtgtatctgaaaaaaaggcatc

SEQ ID NO: 4549582 - DNA, 25 bp, Homo sapien
tcatcagaatcatatataacaccac

SEQ ID NO: 4549583 - DNA, 25 bp, Homo sapien
tataggaatttggatcttggtgctc

SEQ ID NO: 4549584 - DNA, 25 bp, Homo sapien
cctacggtgtttatctatgtcttca

SEQ ID NO: 4549585 - DNA, 25 bp, Homo sapien
aaataatcccacatactaagttcgg

SEQ ID NO: 4549586 - DNA, 25 bp, Homo sapien
tctcatgttaaatctcctacggtgt

SEQ ID NO: 4549587 - DNA, 25 bp, Homo sapien
ttttacaggccttccagggacgagc

SEQ ID NO: 4549588 - DNA, 25 bp, Homo sapien
gattgtcttcgaggtttcacaacaa

SEQ ID NO: 4549589 - DNA, 25 bp, Homo sapien
cagcagcccacattcgattatttaa

SEQ ID NO: 4549590 - DNA, 25 bp, Homo sapien
tatttaatgggtgggctgcaagccg

SEQ ID NO: 4549591 - DNA, 25 bp, Homo sapien
tggcaagagcatgtatcaataaact

SEQ ID NO: 4549592 - DNA, 25 bp, Homo sapien
tgctttctgtccttagtcttctacg

SEQ ID NO: 4549593 - DNA, 25 bp, Homo sapien
tggtgttgcgtgttcttcaatgctt

SEQ ID NO: 4549594 - DNA, 25 bp, Homo sapien
ttgagcaggagatgaatttggtgtt

SEQ ID NO: 4549595 - DNA, 25 bp, Homo sapien
tacgatcacttaaaagaagtccttg

SEQ ID NO: 4549596 - DNA, 25 bp, Homo sapien
tgtaaactgatttccttctgtttga

SEQ ID NO: 4549597 - DNA, 25 bp, Homo sapien
ctgtaaactgatttccttctgtttg

SEQ ID NO: 4549598 - DNA, 25 bp, Homo sapien
cctgtaaactgatttccttctgttt

SEQ ID NO: 4549599 - DNA, 25 bp, Homo sapien
tcctgtaaactgatttccttctgtt

SEQ ID NO: 4549600 - DNA, 25 bp, Homo sapien
ctgtcacataatgcttggtaaattg

SEQ ID NO: 4549601 - DNA, 25 bp, Homo sapien
taaattgatgcagaaagtgatgctg

SEQ ID NO: 4549602 - DNA, 25 bp, Homo sapien
gaaagtgatgctgctagtgaatgaa

SEQ ID NO: 4549603 - DNA, 25 bp, Homo sapien
tgctgctagtgaatgaagtgtgtgc

SEQ ID NO: 4549604 - DNA, 25 bp, Homo sapien
cacatcttcaatactgggatgaggt

SEQ ID NO: 4549605 - DNA, 25 bp, Homo sapien
tcacatcttcaatactgggatgagg

SEQ ID NO: 4549606 - DNA, 25 bp, Homo sapien
ttcacatcttcaatactgggatgag

SEQ ID NO: 4549607 - DNA, 25 bp, Homo sapien
cttcacatcttcaatactgggatga

SEQ ID NO: 4549608 - DNA, 25 bp, Homo sapien
tcatggatgtgattatttaagtaca

SEQ ID NO: 4549609 - DNA, 25 bp, Homo sapien
atgactgtttttgttgacgcaatac

SEQ ID NO: 4549610 - DNA, 25 bp, Homo sapien
caatacaggattagctatgactgtt

SEQ ID NO: 4549611 - DNA, 25 bp, Homo sapien
gaacaatagtataaagtatatcatg

SEQ ID NO: 4549612 - DNA, 25 bp, Homo sapien
aaagcagaggtagggtggtaggcag

SEQ ID NO: 4549613 - DNA, 25 bp, Homo sapien
ctgaaagcagaggtagggtggtagg

SEQ ID NO: 4549614 - DNA, 25 bp, Homo sapien
tgaaagcagaggtagggtggtaggc

SEQ ID NO: 4549615 - DNA, 25 bp, Homo sapien
agcagaggtagggtggtaggcagtg

SEQ ID NO: 4549616 - DNA, 25 bp, Homo sapien
gtgattcttgtagcaaaaatttgag

SEQ ID NO: 4549617 - DNA, 25 bp, Homo sapien
tgtgattcttgtagcaaaaatttga

SEQ ID NO: 4549618 - DNA, 25 bp, Homo sapien
tccaaggctaaaacagggcatccaa

SEQ ID NO: 4549619 - DNA, 25 bp, Homo sapien
tgccaccgggttacaagacttgatg

SEQ ID NO: 4549620 - DNA, 25 bp, Homo sapien
ggcgctcataggaaccaatatctgg

SEQ ID NO: 4549621 - DNA, 25 bp, Homo sapien
taataacatgttagggtctgaggcc

SEQ ID NO: 4549622 - DNA, 25 bp, Homo sapien
taaccatggctagctgaatatcttc

SEQ ID NO: 4549623 - DNA, 25 bp, Homo sapien
catataaacgggcaataaccatggc

SEQ ID NO: 4549624 - DNA, 25 bp, Homo sapien
tacccaataggcaagactacgcagg

SEQ ID NO: 4549625 - DNA, 25 bp, Homo sapien
tccagtaatgtgtccaaggctcggg

SEQ ID NO: 4549626 - DNA, 25 bp, Homo sapien
ctatcttcattaaagttgtggctga

SEQ ID NO: 4549627 - DNA, 25 bp, Homo sapien
aaaaagcagccgattgttcaaagcg

SEQ ID NO: 4549628 - DNA, 25 bp, Homo sapien
gaaccagctagcaagaaaaaagcag

SEQ ID NO: 4549629 - DNA, 25 bp, Homo sapien
gcagcttttcgccatctatcttcat

SEQ ID NO: 4549630 - DNA, 25 bp, Homo sapien
ctaaacagaccccacactactgctt

SEQ ID NO: 4549631 - DNA, 25 bp, Homo sapien
gcagcatctaaggcatcattgttcc

SEQ ID NO: 4549632 - DNA, 25 bp, Homo sapien
cttttcaatgcatcttcgaagcgtg

SEQ ID NO: 4549633 - DNA, 25 bp, Homo sapien
tcaatgcatcttcgaagcgtgttaa

SEQ ID NO: 4549634 - DNA, 25 bp, Homo sapien
aatgcatcttcgaagcgtgttaatg

SEQ ID NO: 4549635 - DNA, 25 bp, Homo sapien
aagcgtgttaatgttcctcacccac

SEQ ID NO: 4549636 - DNA, 25 bp, Homo sapien
gaattgctggaatcatattaatcag

SEQ ID NO: 4549637 - DNA, 25 bp, Homo sapien
atagctcttaattcagaccactggg

SEQ ID NO: 4549638 - DNA, 25 bp, Homo sapien
atgaaaagcccaggcaaaatggcat

SEQ ID NO: 4549639 - DNA, 25 bp, Homo sapien
catcctatgcccatagctcttaatt

SEQ ID NO: 4549640 - DNA, 25 bp, Homo sapien
gcactcggtataaaggaggcagcga

SEQ ID NO: 4549641 - DNA, 25 bp, Homo sapien
caaaaggcatgtgtgtaggcgcata

SEQ ID NO: 4549642 - DNA, 25 bp, Homo sapien
cttgatgaagtagctgcactcggta

SEQ ID NO: 4549643 - DNA, 25 bp, Homo sapien
taggcgcatagctaacaagtatctc

SEQ ID NO: 4549644 - DNA, 25 bp, Homo sapien
tataagccactgcaaggcgacctgt

SEQ ID NO: 4549645 - DNA, 25 bp, Homo sapien
gggaaagtacatgtgcagcctcaaa

SEQ ID NO: 4549646 - DNA, 25 bp, Homo sapien
gattactgtcgacgctgacccttga

SEQ ID NO: 4549647 - DNA, 25 bp, Homo sapien
catctgctccaaacgggtaaggcct

SEQ ID NO: 4549648 - DNA, 25 bp, Homo sapien
gataaattgaagaagaactcagatg

SEQ ID NO: 4549649 - DNA, 25 bp, Homo sapien
tggataaattgaagaagaactcaga

SEQ ID NO: 4549650 - DNA, 25 bp, Homo sapien
taaattgaagaagaactcagatggc

SEQ ID NO: 4549651 - DNA, 25 bp, Homo sapien
ctggataaattgaagaagaactcag

SEQ ID NO: 4549652 - DNA, 25 bp, Homo sapien
tcaactgattctgggagatcaaggg

SEQ ID NO: 4549653 - DNA, 25 bp, Homo sapien
taagtttactggcagtttgaagatt

SEQ ID NO: 4549654 - DNA, 25 bp, Homo sapien
ggctatacaccagtctagaactcag

SEQ ID NO: 4549655 - DNA, 25 bp, Homo sapien
tgctgaaggcgttgctcttattact

SEQ ID NO: 4549656 - DNA, 25 bp, Homo sapien
ggctcacactaggagaggtttctgg

SEQ ID NO: 4549657 - DNA, 25 bp, Homo sapien
gctcacactaggagaggtttctgga

SEQ ID NO: 4549658 - DNA, 25 bp, Homo sapien
ggggctcacactaggagaggtttct

SEQ ID NO: 4549659 - DNA, 25 bp, Homo sapien
ctcacactaggagaggtttctggag

SEQ ID NO: 4549660 - DNA, 25 bp, Homo sapien
tgaaagtagactctcagaggaagcc

SEQ ID NO: 4549661 - DNA, 25 bp, Homo sapien
gaaagtagactctcagaggaagccc

SEQ ID NO: 4549662 - DNA, 25 bp, Homo sapien
ttcctgaggccatgtaattagctag

SEQ ID NO: 4549663 - DNA, 25 bp, Homo sapien
gtagatcccagtaaagcagcccagg

SEQ ID NO: 4549664 - DNA, 25 bp, Homo sapien
gaaaccccttatacagtccagtgct

SEQ ID NO: 4549665 - DNA, 25 bp, Homo sapien
catgcaagactgacagggaagaatc

SEQ ID NO: 4549666 - DNA, 25 bp, Homo sapien
gttctgcttataagtctcaggcact

SEQ ID NO: 4549667 - DNA, 25 bp, Homo sapien
taagtctcaggcactcaatcatatt

SEQ ID NO: 4549668 - DNA, 25 bp, Homo sapien
caggcactcaatcatatttcatcaa

SEQ ID NO: 4549669 - DNA, 25 bp, Homo sapien
gcttataagtctcaggcactcaatc

SEQ ID NO: 4549670 - DNA, 25 bp, Homo sapien
catctctgtataaaactataattac

SEQ ID NO: 4549671 - DNA, 25 bp, Homo sapien
tctgtataaaactataattacttac

SEQ ID NO: 4549672 - DNA, 25 bp, Homo sapien
tttgttatgtatcatctctgtataa

SEQ ID NO: 4549673 - DNA, 25 bp, Homo sapien
tctctgtataaaactataattactt

SEQ ID NO: 4549674 - DNA, 25 bp, Homo sapien
acagatttaagatgaaggtgccaca

SEQ ID NO: 4549675 - DNA, 25 bp, Homo sapien
tctgaaaatggtggtgggcggtatc

SEQ ID NO: 4549676 - DNA, 25 bp, Homo sapien
ccacatatgcagaatagagttatta

SEQ ID NO: 4549677 - DNA, 25 bp, Homo sapien
agatgaaggtgccacatatgcagaa

SEQ ID NO: 4549678 - DNA, 25 bp, Homo sapien
ctattacaataatgaggttatgtca

SEQ ID NO: 4549679 - DNA, 25 bp, Homo sapien
aagaattaggagaaagacctaacat

SEQ ID NO: 4549680 - DNA, 25 bp, Homo sapien
ggacagctacaagataaacccagga

SEQ ID NO: 4549681 - DNA, 25 bp, Homo sapien
ttgcaaaggacagctacaagataaa

SEQ ID NO: 4549682 - DNA, 25 bp, Homo sapien
tatgtggtttatatcctataatgaa

SEQ ID NO: 4549683 - DNA, 25 bp, Homo sapien
tccttatgtggtttatatcctataa

SEQ ID NO: 4549684 - DNA, 25 bp, Homo sapien
tggtttatatcctataatgaagtct

SEQ ID NO: 4549685 - DNA, 25 bp, Homo sapien
tatcttccttatgtggtttatatcc

SEQ ID NO: 4549686 - DNA, 25 bp, Homo sapien
gctcacaatattaaacacttctcca

SEQ ID NO: 4549687 - DNA, 25 bp, Homo sapien
caataatgcagccaggtcgagcagt

SEQ ID NO: 4549688 - DNA, 25 bp, Homo sapien
ttggttggttattgcgtcgagttca

SEQ ID NO: 4549689 - DNA, 25 bp, Homo sapien
gtcgagcagtagactgttggctcac

SEQ ID NO: 4549690 - DNA, 25 bp, Homo sapien
gaagattctgggtctgacaattcat

SEQ ID NO: 4549691 - DNA, 25 bp, Homo sapien
aaagcaagcacttgcagaattgcag

SEQ ID NO: 4549692 - DNA, 25 bp, Homo sapien
tccactacagcttgatagagtctca

SEQ ID NO: 4549693 - DNA, 25 bp, Homo sapien
agatttttgccatcagaagcaacaa

SEQ ID NO: 4549694 - DNA, 25 bp, Homo sapien
ggtcctattgggtctacacgccaca

SEQ ID NO: 4549695 - DNA, 25 bp, Homo sapien
gccacattagagaacgctgaggtat

SEQ ID NO: 4549696 - DNA, 25 bp, Homo sapien
cattgaggtgaaatcgatgaccgca

SEQ ID NO: 4549697 - DNA, 25 bp, Homo sapien
tgactgcccactgatttaaagaacc

SEQ ID NO: 4549698 - DNA, 25 bp, Homo sapien
tcaagcagaaccgtaggcagtggca

SEQ ID NO: 4549699 - DNA, 25 bp, Homo sapien
tcacatgccacactagaaaggtacc

SEQ ID NO: 4549700 - DNA, 25 bp, Homo sapien
tattccattcagttagcagcgtttc

SEQ ID NO: 4549701 - DNA, 25 bp, Homo sapien
gcagcgtttcaatcttccgatcaag

SEQ ID NO: 4549702 - DNA, 25 bp, Homo sapien
tgtttaaccaatgaactacaaagcc

SEQ ID NO: 4549703 - DNA, 25 bp, Homo sapien
tatgtaaaccccgttctctatcctc

SEQ ID NO: 4549704 - DNA, 25 bp, Homo sapien
tcctcctgtgaatgttcctcatctt

SEQ ID NO: 4549705 - DNA, 25 bp, Homo sapien
atgcagtgccaaccaagacatttgg

SEQ ID NO: 4549706 - DNA, 25 bp, Homo sapien
aaataaaagccccttcactctgaag

SEQ ID NO: 4549707 - DNA, 25 bp, Homo sapien
taccactgcagatcacccttttaga

SEQ ID NO: 4549708 - DNA, 25 bp, Homo sapien
gaagcaacagacctccagttcaata

SEQ ID NO: 4549709 - DNA, 25 bp, Homo sapien
caagtgctcaaatagctaatacggg

SEQ ID NO: 4549710 - DNA, 25 bp, Homo sapien
ttcatgcattgctgtctggtcgggc

SEQ ID NO: 4549711 - DNA, 25 bp, Homo sapien
tcagcatgagttacaagaacagatg

SEQ ID NO: 4549712 - DNA, 25 bp, Homo sapien
atgacagagtgcatttgcatggtgg

SEQ ID NO: 4549713 - DNA, 25 bp, Homo sapien
tatgaaaatgacagagtgcatttgc

SEQ ID NO: 4549714 - DNA, 25 bp, Homo sapien
gcaatatatcaggtaccatggagga

SEQ ID NO: 4549715 - DNA, 25 bp, Homo sapien
aaaaatagcgcccaatcacagacag

SEQ ID NO: 4549716 - DNA, 25 bp, Homo sapien
tatagtttagatacttgaccctgcc

SEQ ID NO: 4549717 - DNA, 25 bp, Homo sapien
ccatggaggatacaaagatgtctaa

SEQ ID NO: 4549718 - DNA, 25 bp, Homo sapien
catgttagttcatgaatttccacca

SEQ ID NO: 4549719 - DNA, 25 bp, Homo sapien
atgttagttcatgaatttccaccag

SEQ ID NO: 4549720 - DNA, 25 bp, Homo sapien
tgttagttcatgaatttccaccagg

SEQ ID NO: 4549721 - DNA, 25 bp, Homo sapien
gcatgttagttcatgaatttccacc

SEQ ID NO: 4549722 - DNA, 25 bp, Homo sapien
tttgtgtcttccagcatgagaaagg

SEQ ID NO: 4549723 - DNA, 25 bp, Homo sapien
tccagcatgagaaaggctgctggca

SEQ ID NO: 4549724 - DNA, 25 bp, Homo sapien
tggcaatgctggaagtggtagtctc

SEQ ID NO: 4549725 - DNA, 25 bp, Homo sapien
agtggtagtctcacaaatctgctca

SEQ ID NO: 4549726 - DNA, 25 bp, Homo sapien
tctggtaataaagtttctgcccaga

SEQ ID NO: 4549727 - DNA, 25 bp, Homo sapien
tggtaataaagtttctgcccagagc

SEQ ID NO: 4549728 - DNA, 25 bp, Homo sapien
taataaagtttctgcccagagccgg

SEQ ID NO: 4549729 - DNA, 25 bp, Homo sapien
ggtaataaagtttctgcccagagcc

SEQ ID NO: 4549730 - DNA, 25 bp, Homo sapien
catgacatgaagttaacaacacatt

SEQ ID NO: 4549731 - DNA, 25 bp, Homo sapien
acatgaagttaacaacacattacag

SEQ ID NO: 4549732 - DNA, 25 bp, Homo sapien
ttaacaacacattacagacagaacc

SEQ ID NO: 4549733 - DNA, 25 bp, Homo sapien
tgaagttaacaacacattacagaca

SEQ ID NO: 4549734 - DNA, 25 bp, Homo sapien
agagaaataaataaaggttaatgtg

SEQ ID NO: 4549735 - DNA, 25 bp, Homo sapien
gagaaataaataaaggttaatgtga

SEQ ID NO: 4549736 - DNA, 25 bp, Homo sapien
taagcaagcttctgagtgcccaaca

SEQ ID NO: 4549737 - DNA, 25 bp, Homo sapien
gacacaaagtatgtgcaaaggcctg

SEQ ID NO: 4549738 - DNA, 25 bp, Homo sapien
gagcctatgctattaattgccacca

SEQ ID NO: 4549739 - DNA, 25 bp, Homo sapien
taggatctgctagtaccacagctac

SEQ ID NO: 4549740 - DNA, 25 bp, Homo sapien
tgaggtataattgaagacttccaac

SEQ ID NO: 4549741 - DNA, 25 bp, Homo sapien
gaaaattgagtagaggactgtctcc

SEQ ID NO: 4549742 - DNA, 25 bp, Homo sapien
tatacttgctagttttgcgccacga

SEQ ID NO: 4549743 - DNA, 25 bp, Homo sapien
tcataggataccacactttcaaaag

SEQ ID NO: 4549744 - DNA, 25 bp, Homo sapien
gacataaattggtcagtacagaaaa

SEQ ID NO: 4549745 - DNA, 25 bp, Homo sapien
gcagactgatgccaaattctcccat

SEQ ID NO: 4549746 - DNA, 25 bp, Homo sapien
catctaaaaactaatatgtgactta

SEQ ID NO: 4549747 - DNA, 25 bp, Homo sapien
aaagattctgatgctagccccttga

SEQ ID NO: 4549748 - DNA, 25 bp, Homo sapien
aatattcaccatcaggagaccattc

SEQ ID NO: 4549749 - DNA, 25 bp, Homo sapien
catcaaatgtacagatactgaggtt

SEQ ID NO: 4549750 - DNA, 25 bp, Homo sapien
ctttccagcagtagcaaaatattca

SEQ ID NO: 4549751 - DNA, 25 bp, Homo sapien
ttccagcagtagcaaaatattcacc

SEQ ID NO: 4549752 - DNA, 25 bp, Homo sapien
gctattatatgggttttggttagaa

SEQ ID NO: 4549753 - DNA, 25 bp, Homo sapien
atctactttctaggcatctaaatgc

SEQ ID NO: 4549754 - DNA, 25 bp, Homo sapien
gaatataacaatagaaatagacact

SEQ ID NO: 4549755 - DNA, 25 bp, Homo sapien
aaatgcaatggtaccatcaaaaaat

SEQ ID NO: 4549756 - DNA, 25 bp, Homo sapien
gaatatcatctcctggaggagccca

SEQ ID NO: 4549757 - DNA, 25 bp, Homo sapien
ccagaatatcatctcctggaggagc

SEQ ID NO: 4549758 - DNA, 25 bp, Homo sapien
cagaatatcatctcctggaggagcc

SEQ ID NO: 4549759 - DNA, 25 bp, Homo sapien
tatcatctcctggaggagcccacaa

SEQ ID NO: 4549760 - DNA, 25 bp, Homo sapien
taaagggcagtacacattaactagg

SEQ ID NO: 4549761 - DNA, 25 bp, Homo sapien
gcacatgggcttctgtttagatctg

SEQ ID NO: 4549762 - DNA, 25 bp, Homo sapien
taaaatgtcctcgagatataaggca

SEQ ID NO: 4549763 - DNA, 25 bp, Homo sapien
cacaaagcactgtataccaagaagg

SEQ ID NO: 4549764 - DNA, 25 bp, Homo sapien
tcccatgctaagttgtatgtcacag

SEQ ID NO: 4549765 - DNA, 25 bp, Homo sapien
gctaagttgtatgtcacagaactca

SEQ ID NO: 4549766 - DNA, 25 bp, Homo sapien
aactgcccagttttaagccactggc

SEQ ID NO: 4549767 - DNA, 25 bp, Homo sapien
cttgaggatcccatgctaagttgta

SEQ ID NO: 4549768 - DNA, 25 bp, Homo sapien
gacaagaacttacgaggtgagctct

SEQ ID NO: 4549769 - DNA, 25 bp, Homo sapien
ttttcagcactagctcctaaggagc

SEQ ID NO: 4549770 - DNA, 25 bp, Homo sapien
tctaaaagcactagggatgtatccg

SEQ ID NO: 4549771 - DNA, 25 bp, Homo sapien
ccaatgtggccagagtagaaccaga

SEQ ID NO: 4549772 - DNA, 25 bp, Homo sapien
cagcattaccatatgaagctgcaat

SEQ ID NO: 4549773 - DNA, 25 bp, Homo sapien
caaacagcattaccatatgaagctg

SEQ ID NO: 4549774 - DNA, 25 bp, Homo sapien
tatacaaacagcattaccatatgaa

SEQ ID NO: 4549775 - DNA, 25 bp, Homo sapien
tcaaatatacaaacagcattaccat

SEQ ID NO: 4549776 - DNA, 25 bp, Homo sapien
gaataaatacagcattaatatctag

SEQ ID NO: 4549777 - DNA, 25 bp, Homo sapien
aataaatacagcattaatatctaga

SEQ ID NO: 4549778 - DNA, 25 bp, Homo sapien
aataaagatatcttccttttcataa

SEQ ID NO: 4549779 - DNA, 25 bp, Homo sapien
taaatacagcattaatatctagaaa

SEQ ID NO: 4549780 - DNA, 25 bp, Homo sapien
tgtactggagttaagagtctctccc

SEQ ID NO: 4549781 - DNA, 25 bp, Homo sapien
tggagttaagagtctctcccctgtt

SEQ ID NO: 4549782 - DNA, 25 bp, Homo sapien
ctggaagtgtactggagttaagagt

SEQ ID NO: 4549783 - DNA, 25 bp, Homo sapien
gagttaagagtctctcccctgttat

SEQ ID NO: 4549784 - DNA, 25 bp, Homo sapien
ggaacagctctggtctacagctccc

SEQ ID NO: 4549785 - DNA, 25 bp, Homo sapien
atttggatggacagctgccaagatg

SEQ ID NO: 4549786 - DNA, 25 bp, Homo sapien
acagctctggtctacagctcccaac

SEQ ID NO: 4549787 - DNA, 25 bp, Homo sapien
gctgaataggaacagctctggtcta

SEQ ID NO: 4549788 - DNA, 25 bp, Homo sapien
ccacagcctgttttccaataatttc

SEQ ID NO: 4549789 - DNA, 25 bp, Homo sapien
ggctatttctaagttcactctcctc

SEQ ID NO: 4549790 - DNA, 25 bp, Homo sapien
cctctgttcccagaaactaccacag

SEQ ID NO: 4549791 - DNA, 25 bp, Homo sapien
gaaggctatttctaagttcactctc

SEQ ID NO: 4549792 - DNA, 25 bp, Homo sapien
ctccacacagctgacttggatgttt

SEQ ID NO: 4549793 - DNA, 25 bp, Homo sapien
tccacacagctgacttggatgtttc

SEQ ID NO: 4549794 - DNA, 25 bp, Homo sapien
actccacacagctgacttggatgtt

SEQ ID NO: 4549795 - DNA, 25 bp, Homo sapien
ccacacagctgacttggatgtttcc

SEQ ID NO: 4549796 - DNA, 25 bp, Homo sapien
caatatcacagcctgatccatatgc

SEQ ID NO: 4549797 - DNA, 25 bp, Homo sapien
accaggaatgatctgtacacattca

SEQ ID NO: 4549798 - DNA, 25 bp, Homo sapien
gcaccaggaatgatctgtacacatt

SEQ ID NO: 4549799 - DNA, 25 bp, Homo sapien
aacaatatcacagcctgatccatat

SEQ ID NO: 4549800 - DNA, 25 bp, Homo sapien
tcagatgcccaaagacaagaaagac

SEQ ID NO: 4549801 - DNA, 25 bp, Homo sapien
agcaaatagatcagatgcccaaaga

SEQ ID NO: 4549802 - DNA, 25 bp, Homo sapien
aaatagatcagatgcccaaagacaa

SEQ ID NO: 4549803 - DNA, 25 bp, Homo sapien
ttcagaagcaaatagatcagatgcc

SEQ ID NO: 4549804 - DNA, 25 bp, Homo sapien
tgttactctaccatgccaattgtga

SEQ ID NO: 4549805 - DNA, 25 bp, Homo sapien
cagtagtgaatcttccagtccatga

SEQ ID NO: 4549806 - DNA, 25 bp, Homo sapien
cttgcacatctctaatctacttgga

SEQ ID NO: 4549807 - DNA, 25 bp, Homo sapien
tagataacaagatgtcccagcacca

SEQ ID NO: 4549808 - DNA, 25 bp, Homo sapien
gcactaacagttcttacacaggctt

SEQ ID NO: 4549809 - DNA, 25 bp, Homo sapien
cgtttatttagttctacataccaga

SEQ ID NO: 4549810 - DNA, 25 bp, Homo sapien
ctgcacagcactaacagttcttaca

SEQ ID NO: 4549811 - DNA, 25 bp, Homo sapien
ggctgcatctgaacccgtttattta

SEQ ID NO: 4549812 - DNA, 25 bp, Homo sapien
ctaaatctttcgggcgcggaggatg

SEQ ID NO: 4549813 - DNA, 25 bp, Homo sapien
cagagtcaggcttaaagccacagac

SEQ ID NO: 4549814 - DNA, 25 bp, Homo sapien
cgggcgcggaggatgaatttttcta

SEQ ID NO: 4549815 - DNA, 25 bp, Homo sapien
ggaattaagatcctgcattatcagg

SEQ ID NO: 4549816 - DNA, 25 bp, Homo sapien
aagtctcttcgcctccacgccgaga

SEQ ID NO: 4549817 - DNA, 25 bp, Homo sapien
ctcttcgcctccacgccgagagcag

SEQ ID NO: 4549818 - DNA, 25 bp, Homo sapien
agtctcttcacctccacgctccgag

SEQ ID NO: 4549819 - DNA, 25 bp, Homo sapien
accaagtctcttcgcctccacgccg

SEQ ID NO: 4549820 - DNA, 25 bp, Homo sapien
ctaggaggagccttctagtccagtc

SEQ ID NO: 4549821 - DNA, 25 bp, Homo sapien
taggaggagccttctagtccagtca

SEQ ID NO: 4549822 - DNA, 25 bp, Homo sapien
aggaggagccttctagtccagtcac

SEQ ID NO: 4549823 - DNA, 25 bp, Homo sapien
gatttcctacaccagacgcaggacc

SEQ ID NO: 4549824 - DNA, 25 bp, Homo sapien
agtgcggtggattcctaagcctttc

SEQ ID NO: 4549825 - DNA, 25 bp, Homo sapien
gagagtgcggtggattcctaagcct

SEQ ID NO: 4549826 - DNA, 25 bp, Homo sapien
cctaacgggtgatttcctacaccag

SEQ ID NO: 4549827 - DNA, 25 bp, Homo sapien
gccacgggtggggcccaccaacatc

SEQ ID NO: 4549828 - DNA, 25 bp, Homo sapien
acgggtggggcccaccaacatctca

SEQ ID NO: 4549829 - DNA, 25 bp, Homo sapien
cacgggtggggcccaccaacatctc

SEQ ID NO: 4549830 - DNA, 25 bp, Homo sapien
gggtggggcccaccaacatctcaca

SEQ ID NO: 4549831 - DNA, 25 bp, Homo sapien
tgtctccagggttgacagctccggt

SEQ ID NO: 4549832 - DNA, 25 bp, Homo sapien
tgaaggggacatccccgacgctgcc

SEQ ID NO: 4549833 - DNA, 25 bp, Homo sapien
tccggtgaggacctgatgcagatgc

SEQ ID NO: 4549834 - DNA, 25 bp, Homo sapien
tgcccacggagtagcagttgtctcc

SEQ ID NO: 4549835 - DNA, 25 bp, Homo sapien
ggaggctctggcttaactcctcgcc

SEQ ID NO: 4549836 - DNA, 25 bp, Homo sapien
cagaatgcgcgggaggtgcgacaag

SEQ ID NO: 4549837 - DNA, 25 bp, Homo sapien
gaggtgcgacaagctccgcgcctga

SEQ ID NO: 4549838 - DNA, 25 bp, Homo sapien
gcgagagccgtttccctctgtgcct

SEQ ID NO: 4549839 - DNA, 25 bp, Homo sapien
ggcatcttgccctccatagactaga

SEQ ID NO: 4549840 - DNA, 25 bp, Homo sapien
tgcagtgaactgtggtagaaggtcc

SEQ ID NO: 4549841 - DNA, 25 bp, Homo sapien
ccaacgtttgtacatggcagtctca

SEQ ID NO: 4549842 - DNA, 25 bp, Homo sapien
gagccagcacagattcaagaactag

SEQ ID NO: 4549843 - DNA, 25 bp, Homo sapien
gcggtctatttccttcgggtcatgg

SEQ ID NO: 4549844 - DNA, 25 bp, Homo sapien
gtatcatcccttcatggttcaccag

SEQ ID NO: 4549845 - DNA, 25 bp, Homo sapien
gtctatttccttcgggtcatggcct

SEQ ID NO: 4549846 - DNA, 25 bp, Homo sapien
catggcctcctcagtatcatccctt

SEQ ID NO: 4549847 - DNA, 25 bp, Homo sapien
tgcttctccaaggatccttgattcc

SEQ ID NO: 4549848 - DNA, 25 bp, Homo sapien
tctgcccgtcttacaatcacctgct

SEQ ID NO: 4549849 - DNA, 25 bp, Homo sapien
atgctgcagggtcgtcttgtatatc

SEQ ID NO: 4549850 - DNA, 25 bp, Homo sapien
tcgtcttgtatatcttctgcccgtc

SEQ ID NO: 4549851 - DNA, 25 bp, Homo sapien
tgagggtccattctgagccatcttg

SEQ ID NO: 4549852 - DNA, 25 bp, Homo sapien
gagcagcagcgtgatgccaaatact

SEQ ID NO: 4549853 - DNA, 25 bp, Homo sapien
cagggcttgtacatcttgagggtcc

SEQ ID NO: 4549854 - DNA, 25 bp, Homo sapien
ttggcagatgccctactcagaacct

SEQ ID NO: 4549855 - DNA, 25 bp, Homo sapien
gttccaacttcatggaaggatctct

SEQ ID NO: 4549856 - DNA, 25 bp, Homo sapien
tgcaggagattagtctgagactgta

SEQ ID NO: 4549857 - DNA, 25 bp, Homo sapien
gccatgatcagaccggagaatagcc

SEQ ID NO: 4549858 - DNA, 25 bp, Homo sapien
tctcttgagtgcaggagattagtct

SEQ ID NO: 4549859 - DNA, 25 bp, Homo sapien
ttgggtttgcgaattccaccaacag

SEQ ID NO: 4549860 - DNA, 25 bp, Homo sapien
tccctgtgggaacaagatagctggg

SEQ ID NO: 4549861 - DNA, 25 bp, Homo sapien
tataactggagaagtccatggaggg

SEQ ID NO: 4549862 - DNA, 25 bp, Homo sapien
cagcacatcaatcccagtggaaaga

SEQ ID NO: 4549863 - DNA, 25 bp, Homo sapien
cacactgcgtaaataaaagatttgc

SEQ ID NO: 4549864 - DNA, 25 bp, Homo sapien
aaaatagtccagctttccaaagtcg

SEQ ID NO: 4549865 - DNA, 25 bp, Homo sapien
taaggcttgtgctctattacctcag

SEQ ID NO: 4549866 - DNA, 25 bp, Homo sapien
tctgcttcagcctatgttttaaggc

SEQ ID NO: 4549867 - DNA, 25 bp, Homo sapien
tgggtaatgtttgccccacgatggc

SEQ ID NO: 4549868 - DNA, 25 bp, Homo sapien
caagcttcagcatgggcgactagag

SEQ ID NO: 4549869 - DNA, 25 bp, Homo sapien
gagttccctccaaggcatgcactaa

SEQ ID NO: 4549870 - DNA, 25 bp, Homo sapien
ccactgcagggtaggtacatgagca

SEQ ID NO: 4549871 - DNA, 25 bp, Homo sapien
aggactaaaaattgtggatctcttc

SEQ ID NO: 4549872 - DNA, 25 bp, Homo sapien
cctttttgtgtagtagtctctgtgc

SEQ ID NO: 4549873 - DNA, 25 bp, Homo sapien
ttatgtatctgtttattagtagaga

SEQ ID NO: 4549874 - DNA, 25 bp, Homo sapien
ccaactattgaagtaaataaggact

SEQ ID NO: 4549875 - DNA, 25 bp, Homo sapien
ctggaacctcatccgcacctgctct

SEQ ID NO: 4549876 - DNA, 25 bp, Homo sapien
tcctggaacctcatccgcacctgct

SEQ ID NO: 4549877 - DNA, 25 bp, Homo sapien
tcctcctggaacctcatccgcacct

SEQ ID NO: 4549878 - DNA, 25 bp, Homo sapien
ttcctcctggaacctcatccgcacc

SEQ ID NO: 4549879 - DNA, 25 bp, Homo sapien
ctggtgaagcatagaactctggtgc

SEQ ID NO: 4549880 - DNA, 25 bp, Homo sapien
tggtgaagcatagaactctggtgct

SEQ ID NO: 4549881 - DNA, 25 bp, Homo sapien
gtgaagcatagaactctggtgcttg

SEQ ID NO: 4549882 - DNA, 25 bp, Homo sapien
ggtgaagcatagaactctggtgctt

SEQ ID NO: 4549883 - DNA, 25 bp, Homo sapien
taaaagtagacaatcacagggagga

SEQ ID NO: 4549884 - DNA, 25 bp, Homo sapien
caggattctaaaagtagacaatcac

SEQ ID NO: 4549885 - DNA, 25 bp, Homo sapien
gcagcaacctgttcaggtcgcctgc

SEQ ID NO: 4549886 - DNA, 25 bp, Homo sapien
ggtcgcctgccgctgtggaagcttt

SEQ ID NO: 4549887 - DNA, 25 bp, Homo sapien
ctacctggtatcccaccttttggtg

SEQ ID NO: 4549888 - DNA, 25 bp, Homo sapien
taagatggacactataggaatccag

SEQ ID NO: 4549889 - DNA, 25 bp, Homo sapien
tcagcatcacttaaacagcaaccat

SEQ ID NO: 4549890 - DNA, 25 bp, Homo sapien
gccagagggaactaatcacttcagt

SEQ ID NO: 4549891 - DNA, 25 bp, Homo sapien
ttcagtgcaactgcagcaggtagaa

SEQ ID NO: 4549892 - DNA, 25 bp, Homo sapien
gagggaagttgcatagggactttct

SEQ ID NO: 4549893 - DNA, 25 bp, Homo sapien
tagagggaagttgcatagggacttt

SEQ ID NO: 4549894 - DNA, 25 bp, Homo sapien
tgccgctatccagaagtgctagctg

SEQ ID NO: 4549895 - DNA, 25 bp, Homo sapien
ccagaagtgctagctggacagtgac

SEQ ID NO: 4549896 - DNA, 25 bp, Homo sapien
tttattttgccgctatccagaagtg

SEQ ID NO: 4549897 - DNA, 25 bp, Homo sapien
cttgaaagtgtcagtgagagagaca

SEQ ID NO: 4549898 - DNA, 25 bp, Homo sapien
tctggagaatcaatggagttaagtc

SEQ ID NO: 4549899 - DNA, 25 bp, Homo sapien
ggctgcctgtgttgataacttaatc

SEQ ID NO: 4549900 - DNA, 25 bp, Homo sapien
ggcttctctgatataactgggatgt

SEQ ID NO: 4549901 - DNA, 25 bp, Homo sapien
cttaatctgcaagtcaagtctctgc

SEQ ID NO: 4549902 - DNA, 25 bp, Homo sapien
gttttaacatttctattatctgatt

SEQ ID NO: 4549903 - DNA, 25 bp, Homo sapien
gcacttaataaattccattcttgtt

SEQ ID NO: 4549904 - DNA, 25 bp, Homo sapien
ttttagcacttaataaattccattc

SEQ ID NO: 4549905 - DNA, 25 bp, Homo sapien
tccattcttgttttaacatttctat

SEQ ID NO: 4549906 - DNA, 25 bp, Homo sapien
cagtcaactaagtggaccctgttca

SEQ ID NO: 4549907 - DNA, 25 bp, Homo sapien
gaagtgcttcccatgtctctagaac

SEQ ID NO: 4549908 - DNA, 25 bp, Homo sapien
tctggcagtggatggtacttactac

SEQ ID NO: 4549909 - DNA, 25 bp, Homo sapien
tccgaagtccgtacaacatctgaat

SEQ ID NO: 4549910 - DNA, 25 bp, Homo sapien
acaggtgtcacattcgcggttgcca

SEQ ID NO: 4549911 - DNA, 25 bp, Homo sapien
tcatcacggagcttgttttcacaga

SEQ ID NO: 4549912 - DNA, 25 bp, Homo sapien
ggctgctgcttagcgacaggtgtca

SEQ ID NO: 4549913 - DNA, 25 bp, Homo sapien
aaattcacctcagttgggctttgcg

SEQ ID NO: 4549914 - DNA, 25 bp, Homo sapien
agcgcgatgccctgcagcgtgtcgc

SEQ ID NO: 4549915 - DNA, 25 bp, Homo sapien
acatggcgctcgatgacgccggcgc

SEQ ID NO: 4549916 - DNA, 25 bp, Homo sapien
ccggtgctccacatggcgctcgatg

SEQ ID NO: 4549917 - DNA, 25 bp, Homo sapien
cgtgacaccgtacttgagcgcgatg

SEQ ID NO: 4549918 - DNA, 25 bp, Homo sapien
ctgccgtacgagcgggtcttggtgc

SEQ ID NO: 4549919 - DNA, 25 bp, Homo sapien
cagggacagtgcgggcgaggaatcc

SEQ ID NO: 4549920 - DNA, 25 bp, Homo sapien
gccgccttcccgcagggacagtgcg

SEQ ID NO: 4549921 - DNA, 25 bp, Homo sapien
acagtgcgggcgaggaatccgccat

SEQ ID NO: 4549922 - DNA, 25 bp, Homo sapien
gggccgccttcccgcagggacagtg

SEQ ID NO: 4549923 - DNA, 25 bp, Homo sapien
gggagcttgccaagggggcggcgcc

SEQ ID NO: 4549924 - DNA, 25 bp, Homo sapien
ggccgccgggtcggggagcttgcca

SEQ ID NO: 4549925 - DNA, 25 bp, Homo sapien
agcttgccaagggggcggcgcctcc

SEQ ID NO: 4549926 - DNA, 25 bp, Homo sapien
ccgccgggtcggggagcttgccaag

SEQ ID NO: 4549927 - DNA, 25 bp, Homo sapien
gcagcaggccgttccgcgggggcgg

SEQ ID NO: 4549928 - DNA, 25 bp, Homo sapien
tgcagcaggccgttccgcgggggcg

SEQ ID NO: 4549929 - DNA, 25 bp, Homo sapien
cacctgcaaggttaagagcgaaagc

SEQ ID NO: 4549930 - DNA, 25 bp, Homo sapien
gttaagagcgaaagcagctcccgcc

SEQ ID NO: 4549931 - DNA, 25 bp, Homo sapien
tgcaaggttaagagcgaaagcagct

SEQ ID NO: 4549932 - DNA, 25 bp, Homo sapien
aaggttaagagcgaaagcagctccc

SEQ ID NO: 4549933 - DNA, 25 bp, Homo sapien
tccattggcgatagagccctggcag

SEQ ID NO: 4549934 - DNA, 25 bp, Homo sapien
taagagagggctatctgcaggcgtc

SEQ ID NO: 4549935 - DNA, 25 bp, Homo sapien
ggacccctgctccattggcgataga

SEQ ID NO: 4549936 - DNA, 25 bp, Homo sapien
gggagcgctgaagcccgcggccgtt

SEQ ID NO: 4549937 - DNA, 25 bp, Homo sapien
ctttcaacattgcactaggagggat

SEQ ID NO: 4549938 - DNA, 25 bp, Homo sapien
cctttattgattccccagcaggagc

SEQ ID NO: 4549939 - DNA, 25 bp, Homo sapien
taggagggatagtgcttctaaggcc

SEQ ID NO: 4549940 - DNA, 25 bp, Homo sapien
tctgccaatgccaagggtacttccc

SEQ ID NO: 4549941 - DNA, 25 bp, Homo sapien
gctgcctcgaaaggctggccacata

SEQ ID NO: 4549942 - DNA, 25 bp, Homo sapien
cactagtgccaatttaagtcctggc

SEQ ID NO: 4549943 - DNA, 25 bp, Homo sapien
tctcttcgtcagtttattctttgac

SEQ ID NO: 4549944 - DNA, 25 bp, Homo sapien
cagtttattctttgacaccctgaaa

SEQ ID NO: 4549945 - DNA, 25 bp, Homo sapien
cctgggggtttgattcgttggctga

SEQ ID NO: 4549946 - DNA, 25 bp, Homo sapien
agcctgggggtttgattcgttggct

SEQ ID NO: 4549947 - DNA, 25 bp, Homo sapien
cggagcctgggggtttgattcgttg

SEQ ID NO: 4549948 - DNA, 25 bp, Homo sapien
tgggggtttgattcgttggctgaag

SEQ ID NO: 4549949 - DNA, 25 bp, Homo sapien
atagggtcacctttcctaatgtgta

SEQ ID NO: 4549950 - DNA, 25 bp, Homo sapien
taatagggtcacctttcctaatgtg

SEQ ID NO: 4549951 - DNA, 25 bp, Homo sapien
gctaatagggtcacctttcctaatg

SEQ ID NO: 4549952 - DNA, 25 bp, Homo sapien
aatagggtcacctttcctaatgtgt

SEQ ID NO: 4549953 - DNA, 25 bp, Homo sapien
gggctgtaggatagctcttgtatct

SEQ ID NO: 4549954 - DNA, 25 bp, Homo sapien
tttggtgtcagcatcctcctggagc

SEQ ID NO: 4549955 - DNA, 25 bp, Homo sapien
tttattttggtgtcagcatcctcct

SEQ ID NO: 4549956 - DNA, 25 bp, Homo sapien
gatagctcttgtatctctgcttcga

SEQ ID NO: 4549957 - DNA, 25 bp, Homo sapien
gaaaactgctggctcgatccgtaag

SEQ ID NO: 4549958 - DNA, 25 bp, Homo sapien
tactgtacactactgagcacctttg

SEQ ID NO: 4549959 - DNA, 25 bp, Homo sapien
gcagaaccacgggaaaccaaagaga

SEQ ID NO: 4549960 - DNA, 25 bp, Homo sapien
tcaaaggcatcctgtcggttacaca

SEQ ID NO: 4549961 - DNA, 25 bp, Homo sapien
tgtcaggatgctcgctcacaggaat

SEQ ID NO: 4549962 - DNA, 25 bp, Homo sapien
ctctcaacgcggcttccgtgtcagg

SEQ ID NO: 4549963 - DNA, 25 bp, Homo sapien
ggagccccgagcgtctccaaagagc

SEQ ID NO: 4549964 - DNA, 25 bp, Homo sapien
ggaatgctcatcacaggcttgaaag

SEQ ID NO: 4549965 - DNA, 25 bp, Homo sapien
gagaggacacctgtcggggaagggc

SEQ ID NO: 4549966 - DNA, 25 bp, Homo sapien
cgggaactacgcttcccagcctgct

SEQ ID NO: 4549967 - DNA, 25 bp, Homo sapien
ttcagaccccgattccgggagagga

SEQ ID NO: 4549968 - DNA, 25 bp, Homo sapien
gctcagccgggaactacgcttccca

SEQ ID NO: 4549969 - DNA, 25 bp, Homo sapien
cggctccgggatgagcgcacggacg

SEQ ID NO: 4549970 - DNA, 25 bp, Homo sapien
cgcacggacgggtgagcgccccggg

SEQ ID NO: 4549971 - DNA, 25 bp, Homo sapien
ggctgacggactgacggccagcaca

SEQ ID NO: 4549972 - DNA, 25 bp, Homo sapien
ggcctgttctggacagccggtgtct

SEQ ID NO: 4549973 - DNA, 25 bp, Homo sapien
gcataaccttctggacgtttatacg

SEQ ID NO: 4549974 - DNA, 25 bp, Homo sapien
gcatcaaagggtaacgttctgacaa

SEQ ID NO: 4549975 - DNA, 25 bp, Homo sapien
tgtttcctattaacaatctggtgca

SEQ ID NO: 4549976 - DNA, 25 bp, Homo sapien
ggcctttcttgttatgcatatggat

SEQ ID NO: 4549977 - DNA, 25 bp, Homo sapien
actctgggagtaaagagagccggca

SEQ ID NO: 4549978 - DNA, 25 bp, Homo sapien
tccaagtgctagtcaatggtaaagt

SEQ ID NO: 4549979 - DNA, 25 bp, Homo sapien
tgtgcagtccgctgtctcaaactgg

SEQ ID NO: 4549980 - DNA, 25 bp, Homo sapien
tggagtctcccatgggtttgccacc

SEQ ID NO: 4549981 - DNA, 25 bp, Homo sapien
gatttcatccaaacgtgtacatggt

SEQ ID NO: 4549982 - DNA, 25 bp, Homo sapien
gacaacagcccataggttgagatgt

SEQ ID NO: 4549983 - DNA, 25 bp, Homo sapien
tagcaagattctgctgagagacaac

SEQ ID NO: 4549984 - DNA, 25 bp, Homo sapien
catggttcaaaccacaataaagctg

SEQ ID NO: 4549985 - DNA, 25 bp, Homo sapien
caaatgtagcatcaagccagactca

SEQ ID NO: 4549986 - DNA, 25 bp, Homo sapien
tacatgcatagctttgagttaggct

SEQ ID NO: 4549987 - DNA, 25 bp, Homo sapien
aatgcacatgccctgttgattggag

SEQ ID NO: 4549988 - DNA, 25 bp, Homo sapien
gaagtgttctactgaccacataaga

SEQ ID NO: 4549989 - DNA, 25 bp, Homo sapien
catttaggtgtgatgtgttggagtc

SEQ ID NO: 4549990 - DNA, 25 bp, Homo sapien
ggagtcaacttgtacaggcttgcca

SEQ ID NO: 4549991 - DNA, 25 bp, Homo sapien
gtatgctactgaacgtatcctctca

SEQ ID NO: 4549992 - DNA, 25 bp, Homo sapien
aatattctaacacctttggcccctg

SEQ ID NO: 4549993 - DNA, 25 bp, Homo sapien
aaggtggcatttccatgagtgtgca

SEQ ID NO: 4549994 - DNA, 25 bp, Homo sapien
ccctctctgcccaaagtgtggaagt

SEQ ID NO: 4549995 - DNA, 25 bp, Homo sapien
tggtagctctttcatgatcatgggc

SEQ ID NO: 4549996 - DNA, 25 bp, Homo sapien
ttagaaaaacatacacttgaggagc

SEQ ID NO: 4549997 - DNA, 25 bp, Homo sapien
tgaaaatcagacgatagggcctcct

SEQ ID NO: 4549998 - DNA, 25 bp, Homo sapien
aagtcaaattgctgaccgaggtggg

SEQ ID NO: 4549999 - DNA, 25 bp, Homo sapien
gaaaagcgccaagaacttcagggat

SEQ ID NO: 4550000 - DNA, 25 bp, Homo sapien
aatatactagccagagaaaagcgcc

SEQ ID NO: 4550001 - DNA, 25 bp, Homo sapien
tatatactatcttgctcctcagaac

SEQ ID NO: 4550002 - DNA, 25 bp, Homo sapien
tgtttctgagtaagtattgactggg

SEQ ID NO: 4550003 - DNA, 25 bp, Homo sapien
actgagcatagtaaacacagcattt

SEQ ID NO: 4550004 - DNA, 25 bp, Homo sapien
taagtattgactgggaaaaagagag

SEQ ID NO: 4550005 - DNA, 25 bp, Homo sapien
cttctcattagctcagccctggtga

SEQ ID NO: 4550006 - DNA, 25 bp, Homo sapien
ctcattagctcagccctggtgattt

SEQ ID NO: 4550007 - DNA, 25 bp, Homo sapien
attagctcagccctggtgatttccc

SEQ ID NO: 4550008 - DNA, 25 bp, Homo sapien
gctcagccctggtgatttccctcat

SEQ ID NO: 4550009 - DNA, 25 bp, Homo sapien
ctgcaatagctacatcatccccgaa

SEQ ID NO: 4550010 - DNA, 25 bp, Homo sapien
tagctacatcatccccgaaacgcat

SEQ ID NO: 4550011 - DNA, 25 bp, Homo sapien
cctggtgtagagcttgaagatggaa

SEQ ID NO: 4550012 - DNA, 25 bp, Homo sapien
tgggcagaaactgccctgcaatagc

SEQ ID NO: 4550013 - DNA, 25 bp, Homo sapien
tgccatgtgcgcttctttacaaaag

SEQ ID NO: 4550014 - DNA, 25 bp, Homo sapien
gataagggttggtattcgcagtccc

SEQ ID NO: 4550015 - DNA, 25 bp, Homo sapien
tagtaggtacttccacgggtagaga

SEQ ID NO: 4550016 - DNA, 25 bp, Homo sapien
taaagaccagggtcagcgttgagcc

SEQ ID NO: 4550017 - DNA, 25 bp, Homo sapien
tgctgggaaccgagcctcggcttgc

SEQ ID NO: 4550018 - DNA, 25 bp, Homo sapien
tttccaggaagtccgtctgcgggcg

SEQ ID NO: 4550019 - DNA, 25 bp, Homo sapien
cctgcgggcgccagtcaggtaagcc

SEQ ID NO: 4550020 - DNA, 25 bp, Homo sapien
ccggcagtttccgtgggtctgtgaa

SEQ ID NO: 4550021 - DNA, 25 bp, Homo sapien
aaactgggtatgctaagggtgtggc

SEQ ID NO: 4550022 - DNA, 25 bp, Homo sapien
agggtgtggctattttggcatccat

SEQ ID NO: 4550023 - DNA, 25 bp, Homo sapien
gcatccatctttggtatgcacagag

SEQ ID NO: 4550024 - DNA, 25 bp, Homo sapien
tgagaaactgggtatgctaagggtg

SEQ ID NO: 4550025 - DNA, 25 bp, Homo sapien
caaacggccagtctgatacatagca

SEQ ID NO: 4550026 - DNA, 25 bp, Homo sapien
tgttcaccatcttgcaggattcttg

SEQ ID NO: 4550027 - DNA, 25 bp, Homo sapien
gttcaatggttccttgatacaatcc

SEQ ID NO: 4550028 - DNA, 25 bp, Homo sapien
taatattctcttaatgttcaccatc

SEQ ID NO: 4550029 - DNA, 25 bp, Homo sapien
caagaagtccacaatggtagacaaa

SEQ ID NO: 4550030 - DNA, 25 bp, Homo sapien
ctctgccaagaagtccacaatggta

SEQ ID NO: 4550031 - DNA, 25 bp, Homo sapien
tgccaagaagtccacaatggtagac

SEQ ID NO: 4550032 - DNA, 25 bp, Homo sapien
tctgccaagaagtccacaatggtag

SEQ ID NO: 4550033 - DNA, 25 bp, Homo sapien
aagcatggctatgtcagggctcttt

SEQ ID NO: 4550034 - DNA, 25 bp, Homo sapien
caaaaagcatggctatgtcagggct

SEQ ID NO: 4550035 - DNA, 25 bp, Homo sapien
aaaagcatggctatgtcagggctct

SEQ ID NO: 4550036 - DNA, 25 bp, Homo sapien
tcaaaaagcatggctatgtcagggc

SEQ ID NO: 4550037 - DNA, 25 bp, Homo sapien
gagcctgagggtcatcataaatttc

SEQ ID NO: 4550038 - DNA, 25 bp, Homo sapien
gaagatcatctgtgtgtagagcctg

SEQ ID NO: 4550039 - DNA, 25 bp, Homo sapien
ttctatttgtagacctttggcaaag

SEQ ID NO: 4550040 - DNA, 25 bp, Homo sapien
gccgcataatcccaagtgagaagat

SEQ ID NO: 4550041 - DNA, 25 bp, Homo sapien
ccgtgccaatttgcccttaaggatt

SEQ ID NO: 4550042 - DNA, 25 bp, Homo sapien
gatgatccgtgccaatttgccctta

SEQ ID NO: 4550043 - DNA, 25 bp, Homo sapien
gatccgtgccaatttgcccttaagg

SEQ ID NO: 4550044 - DNA, 25 bp, Homo sapien
ttcatagatgatccgtgccaatttg

SEQ ID NO: 4550045 - DNA, 25 bp, Homo sapien
tctggatgaaagtgcagtgcccaaa

SEQ ID NO: 4550046 - DNA, 25 bp, Homo sapien
tgcagtgcccaaagaaatagttgcc

SEQ ID NO: 4550047 - DNA, 25 bp, Homo sapien
tgaaagtgcagtgcccaaagaaata

SEQ ID NO: 4550048 - DNA, 25 bp, Homo sapien
agtgcagtgcccaaagaaatagttg

SEQ ID NO: 4550049 - DNA, 25 bp, Homo sapien
gaataccttgctaagttgagtttta

SEQ ID NO: 4550050 - DNA, 25 bp, Homo sapien
ggccaacatggcagagaataccttg

SEQ ID NO: 4550051 - DNA, 25 bp, Homo sapien
catggcagagaataccttgctaagt

SEQ ID NO: 4550052 - DNA, 25 bp, Homo sapien
cagagaataccttgctaagttgagt

SEQ ID NO: 4550053 - DNA, 25 bp, Homo sapien
ctctttgctgaggcacttcggaaaa

SEQ ID NO: 4550054 - DNA, 25 bp, Homo sapien
cctctttgctgaggcacttcggaaa

SEQ ID NO: 4550055 - DNA, 25 bp, Homo sapien
tctttgctgaggcacttcggaaaac

SEQ ID NO: 4550056 - DNA, 25 bp, Homo sapien
tagcgttaatctctgcatgactgaa

SEQ ID NO: 4550057 - DNA, 25 bp, Homo sapien
gattctgtactgtagatcagaagcc

SEQ ID NO: 4550058 - DNA, 25 bp, Homo sapien
tctctggatctgttcgaaaagatta

SEQ ID NO: 4550059 - DNA, 25 bp, Homo sapien
tgctctagctgttccaattcaggga

SEQ ID NO: 4550060 - DNA, 25 bp, Homo sapien
caagtgcttctgatacagaattgtg

SEQ ID NO: 4550061 - DNA, 25 bp, Homo sapien
aattgtgtgacctcgcaggtatcac

SEQ ID NO: 4550062 - DNA, 25 bp, Homo sapien
cagaaacctgtacagacttttacag

SEQ ID NO: 4550063 - DNA, 25 bp, Homo sapien
gtgtctcttgatccagaattagaag

SEQ ID NO: 4550064 - DNA, 25 bp, Homo sapien
tattataggtgttcgtagacctcca

SEQ ID NO: 4550065 - DNA, 25 bp, Homo sapien
taaagggctcaaggatttcaggtcc

SEQ ID NO: 4550066 - DNA, 25 bp, Homo sapien
cacacatgcatcagagcacagtgat

SEQ ID NO: 4550067 - DNA, 25 bp, Homo sapien
tctgtcgttcacatctgaagcatca

SEQ ID NO: 4550068 - DNA, 25 bp, Homo sapien
ctcttctggttctggttatctgtgt

SEQ ID NO: 4550069 - DNA, 25 bp, Homo sapien
tttattagccccttcttctcaatgg

SEQ ID NO: 4550070 - DNA, 25 bp, Homo sapien
cttgaccatttcttttggcccctgc

SEQ ID NO: 4550071 - DNA, 25 bp, Homo sapien
ccttctgccttgaccatttcttttg

SEQ ID NO: 4550072 - DNA, 25 bp, Homo sapien
aggctctggcaatcactcatccact

SEQ ID NO: 4550073 - DNA, 25 bp, Homo sapien
ggacagcttatatctgtggaatcaa

SEQ ID NO: 4550074 - DNA, 25 bp, Homo sapien
cctattctggacagcttatatctgt

SEQ ID NO: 4550075 - DNA, 25 bp, Homo sapien
tctggcaatcactcatccactttct

SEQ ID NO: 4550076 - DNA, 25 bp, Homo sapien
aaaatctagtcatctgtgtaggagc

SEQ ID NO: 4550077 - DNA, 25 bp, Homo sapien
tcaaaagggatgttgctggtatcag

SEQ ID NO: 4550078 - DNA, 25 bp, Homo sapien
gaataatttgaacattgtgaggacc

SEQ ID NO: 4550079 - DNA, 25 bp, Homo sapien
tgttttcttcactccgtgacctgga

SEQ ID NO: 4550080 - DNA, 25 bp, Homo sapien
tagagggtctggacttgtattcatg

SEQ ID NO: 4550081 - DNA, 25 bp, Homo sapien
gatttgagactgcagagctgatgct

SEQ ID NO: 4550082 - DNA, 25 bp, Homo sapien
tactgtggtcgggagactgatttga

SEQ ID NO: 4550083 - DNA, 25 bp, Homo sapien
ttgtattcatgttctgtctcagggc

SEQ ID NO: 4550084 - DNA, 25 bp, Homo sapien
gattttatagagactgcacagttcc

SEQ ID NO: 4550085 - DNA, 25 bp, Homo sapien
tagactttcagtcaggcatcctcgt

SEQ ID NO: 4550086 - DNA, 25 bp, Homo sapien
cagttccagcaagattgggagtcag

SEQ ID NO: 4550087 - DNA, 25 bp, Homo sapien
gcaggcatctcaggctaccagaaag

SEQ ID NO: 4550088 - DNA, 25 bp, Homo sapien
cgcccaggctggagcgcaatggtgc

SEQ ID NO: 4550089 - DNA, 25 bp, Homo sapien
tttaagatggaggttcactcttgtc

SEQ ID NO: 4550090 - DNA, 25 bp, Homo sapien
atggtgcgatctcagctcactgcaa

SEQ ID NO: 4550091 - DNA, 25 bp, Homo sapien
ttaagatggaggttcactcttgtcg

SEQ ID NO: 4550092 - DNA, 25 bp, Homo sapien
tcttggtgggtgtatatagcagttt

SEQ ID NO: 4550093 - DNA, 25 bp, Homo sapien
tgatgcaaagcaattaattggccta

SEQ ID NO: 4550094 - DNA, 25 bp, Homo sapien
ttacattcgtaagacagacacctct

SEQ ID NO: 4550095 - DNA, 25 bp, Homo sapien
aatatccaacattgtaattgcccta

SEQ ID NO: 4550096 - DNA, 25 bp, Homo sapien
gtgcacattttagggctttatatca

SEQ ID NO: 4550097 - DNA, 25 bp, Homo sapien
ttcacaactaggattatgcaaaagc

SEQ ID NO: 4550098 - DNA, 25 bp, Homo sapien
actattgaatacaatgagtgcacat

SEQ ID NO: 4550099 - DNA, 25 bp, Homo sapien
gcaaaagcaactcaacttcagttaa

SEQ ID NO: 4550100 - DNA, 25 bp, Homo sapien
aaatggttctgacctgacagtgacg

SEQ ID NO: 4550101 - DNA, 25 bp, Homo sapien
cacagacactgcctagatcaggcaa

SEQ ID NO: 4550102 - DNA, 25 bp, Homo sapien
tcaggcaactgaacctaggtttccc

SEQ ID NO: 4550103 - DNA, 25 bp, Homo sapien
acgagccagcccttcacgttagagc

SEQ ID NO: 4550104 - DNA, 25 bp, Homo sapien
gagtcttatcttctgacccctcatc

SEQ ID NO: 4550105 - DNA, 25 bp, Homo sapien
tcactaatctttgagtcttatcttc

SEQ ID NO: 4550106 - DNA, 25 bp, Homo sapien
tttttgctctcactaatctttgagt

SEQ ID NO: 4550107 - DNA, 25 bp, Homo sapien
tactgagtttttttgctctcactaa

SEQ ID NO: 4550108 - DNA, 25 bp, Homo sapien
cagccaggctgaaggtgtgcttgcc

SEQ ID NO: 4550109 - DNA, 25 bp, Homo sapien
gcttctcccgcagatggattccctg

SEQ ID NO: 4550110 - DNA, 25 bp, Homo sapien
gagactcccgttgagtggaagccct

SEQ ID NO: 4550111 - DNA, 25 bp, Homo sapien
caggctgaaggtgtgcttgccttcc

SEQ ID NO: 4550112 - DNA, 25 bp, Homo sapien
cccgccattggtaagattctaattt

SEQ ID NO: 4550113 - DNA, 25 bp, Homo sapien
ttagcaagtggcagggtcatctttc

SEQ ID NO: 4550114 - DNA, 25 bp, Homo sapien
tcttcatcacttgtgtgtgttggcc

SEQ ID NO: 4550115 - DNA, 25 bp, Homo sapien
tctttgaacttctattagcaagtgg

SEQ ID NO: 4550116 - DNA, 25 bp, Homo sapien
cttgaaaaaggtgtatgagaaccag

SEQ ID NO: 4550117 - DNA, 25 bp, Homo sapien
gggctataatcactctcctgggaat

SEQ ID NO: 4550118 - DNA, 25 bp, Homo sapien
tagcagcttggagtaaacttgaaaa

SEQ ID NO: 4550119 - DNA, 25 bp, Homo sapien
tctgataggatgaactggctccctg

SEQ ID NO: 4550120 - DNA, 25 bp, Homo sapien
tggatttaaagacggcttgtccctg

SEQ ID NO: 4550121 - DNA, 25 bp, Homo sapien
ttctcttataaacaggtggatgtaa

SEQ ID NO: 4550122 - DNA, 25 bp, Homo sapien
aggtggatgtaattgcccagcagcg

SEQ ID NO: 4550123 - DNA, 25 bp, Homo sapien
tataaacaggtggatgtaattgccc

SEQ ID NO: 4550124 - DNA, 25 bp, Homo sapien
cgtatcctccatcttatagtatttt

SEQ ID NO: 4550125 - DNA, 25 bp, Homo sapien
cggcgtatcctccatcttatagtat

SEQ ID NO: 4550126 - DNA, 25 bp, Homo sapien
gcgtatcctccatcttatagtattt

SEQ ID NO: 4550127 - DNA, 25 bp, Homo sapien
ggcgtatcctccatcttatagtatt

SEQ ID NO: 4550128 - DNA, 25 bp, Homo sapien
gattctgtcttcctcgtcaagcact

SEQ ID NO: 4550129 - DNA, 25 bp, Homo sapien
tctgtcttcctcgtcaagcactttc

SEQ ID NO: 4550130 - DNA, 25 bp, Homo sapien
tcttcctcgtcaagcactttctcat

SEQ ID NO: 4550131 - DNA, 25 bp, Homo sapien
ttaattttaacctgattctgtcttc

SEQ ID NO: 4550132 - DNA, 25 bp, Homo sapien
ctattatggtttcagaaattggctc

SEQ ID NO: 4550133 - DNA, 25 bp, Homo sapien
tgggttctatactgagaaacttggg

SEQ ID NO: 4550134 - DNA, 25 bp, Homo sapien
tcttcttctattatggtttcagaaa

SEQ ID NO: 4550135 - DNA, 25 bp, Homo sapien
ggtcctgaggcactccatgttcatc

SEQ ID NO: 4550136 - DNA, 25 bp, Homo sapien
attagaaatgtgctagctttactca

SEQ ID NO: 4550137 - DNA, 25 bp, Homo sapien
tcctgcactaggcagatgcaggttt

SEQ ID NO: 4550138 - DNA, 25 bp, Homo sapien
cagaatgtgagagattgaagacatt

SEQ ID NO: 4550139 - DNA, 25 bp, Homo sapien
gctttactcatcctgcactaggcag

SEQ ID NO: 4550140 - DNA, 25 bp, Homo sapien
actctcagaagaaacgtcgtctata

SEQ ID NO: 4550141 - DNA, 25 bp, Homo sapien
gctgtcctggaataggtggttgatt

SEQ ID NO: 4550142 - DNA, 25 bp, Homo sapien
aggtggttgattgccctcatcactc

SEQ ID NO: 4550143 - DNA, 25 bp, Homo sapien
aagaaacgtcgtctatatctccaaa

SEQ ID NO: 4550144 - DNA, 25 bp, Homo sapien
tcaatcaaaataactcatgtttaca

SEQ ID NO: 4550145 - DNA, 25 bp, Homo sapien
ttacacaaaagcaaatcgattcatt

SEQ ID NO: 4550146 - DNA, 25 bp, Homo sapien
agcaaatcgattcatttcaatcaaa

SEQ ID NO: 4550147 - DNA, 25 bp, Homo sapien
catgtttacatatttataactgtac

SEQ ID NO: 4550148 - DNA, 25 bp, Homo sapien
ctcttcatcgctgatcacatacttc

SEQ ID NO: 4550149 - DNA, 25 bp, Homo sapien
tgatcacatacttcttatgcttttt

SEQ ID NO: 4550150 - DNA, 25 bp, Homo sapien
cctcttcatcgctgatcacatactt

SEQ ID NO: 4550151 - DNA, 25 bp, Homo sapien
taatctcagaggcatacctaggctc

SEQ ID NO: 4550152 - DNA, 25 bp, Homo sapien
gagatatgagatgactggcccaagg

SEQ ID NO: 4550153 - DNA, 25 bp, Homo sapien
tctaatatagactggcccttgcccc

SEQ ID NO: 4550154 - DNA, 25 bp, Homo sapien
tacaagtgggaaagggtagcaccaa

SEQ ID NO: 4550155 - DNA, 25 bp, Homo sapien
ctcatcactggtaagtttctttgct

SEQ ID NO: 4550156 - DNA, 25 bp, Homo sapien
tgctttgagtaatctttgagcttta

SEQ ID NO: 4550157 - DNA, 25 bp, Homo sapien
ctttgagtaatctttgagctttatc

SEQ ID NO: 4550158 - DNA, 25 bp, Homo sapien
tttgctttgagtaatctttgagctt

SEQ ID NO: 4550159 - DNA, 25 bp, Homo sapien
tggcagccggattacatctaatgcc

SEQ ID NO: 4550160 - DNA, 25 bp, Homo sapien
ttggcagccggattacatctaatgc

SEQ ID NO: 4550161 - DNA, 25 bp, Homo sapien
ggcagccggattacatctaatgcca

SEQ ID NO: 4550162 - DNA, 25 bp, Homo sapien
catcgtatcgatcaggttccaggta

SEQ ID NO: 4550163 - DNA, 25 bp, Homo sapien
gtttctctctcattcggcgctgctg

SEQ ID NO: 4550164 - DNA, 25 bp, Homo sapien
tgctgagattccctacgtatggaag

SEQ ID NO: 4550165 - DNA, 25 bp, Homo sapien
taatggcagccaagctgatggactc

SEQ ID NO: 4550166 - DNA, 25 bp, Homo sapien
tgtctttgaacacctatctgcaagt

SEQ ID NO: 4550167 - DNA, 25 bp, Homo sapien
tatgtgtggcactgtccgtagagtg

SEQ ID NO: 4550168 - DNA, 25 bp, Homo sapien
catttctgtgcgttggcattcagga

SEQ ID NO: 4550169 - DNA, 25 bp, Homo sapien
tctgcaagtgacagagtcatctttc

SEQ ID NO: 4550170 - DNA, 25 bp, Homo sapien
tataaaaagatgattgtggtcgccc

SEQ ID NO: 4550171 - DNA, 25 bp, Homo sapien
ttccatctgaccacttgactatccg

SEQ ID NO: 4550172 - DNA, 25 bp, Homo sapien
tccatctgaccacttgactatccga

SEQ ID NO: 4550173 - DNA, 25 bp, Homo sapien
ccatctgaccacttgactatccgag

SEQ ID NO: 4550174 - DNA, 25 bp, Homo sapien
ttaacctggttctaccttcttcatc

SEQ ID NO: 4550175 - DNA, 25 bp, Homo sapien
taacctggttctaccttcttcatcc

SEQ ID NO: 4550176 - DNA, 25 bp, Homo sapien
ctagcaaatttcatcgctttcaatt

SEQ ID NO: 4550177 - DNA, 25 bp, Homo sapien
tggacactggcatttctctagcaaa

SEQ ID NO: 4550178 - DNA, 25 bp, Homo sapien
ggcatttctctagcaaatttcatcg

SEQ ID NO: 4550179 - DNA, 25 bp, Homo sapien
aatagctgctacagtggacactggc

SEQ ID NO: 4550180 - DNA, 25 bp, Homo sapien
tataagtcgtttcctaaatcagtgt

SEQ ID NO: 4550181 - DNA, 25 bp, Homo sapien
ggctctacactgagaaagttgggca

SEQ ID NO: 4550182 - DNA, 25 bp, Homo sapien
ttctacttctattctggtctcagga

SEQ ID NO: 4550183 - DNA, 25 bp, Homo sapien
ctgggctctacactgagaaagttgg

SEQ ID NO: 4550184 - DNA, 25 bp, Homo sapien
caggctgtcctggagtaggtggttt

SEQ ID NO: 4550185 - DNA, 25 bp, Homo sapien
gatatcatctgcacctccaaataaa

SEQ ID NO: 4550186 - DNA, 25 bp, Homo sapien
tccctgaagagatatcatctgcacc

SEQ ID NO: 4550187 - DNA, 25 bp, Homo sapien
ccatcactccctgaagagatatcat

SEQ ID NO: 4550188 - DNA, 25 bp, Homo sapien
tcagtttcttcatctaagtcaagaa

SEQ ID NO: 4550189 - DNA, 25 bp, Homo sapien
aatcagtttcttcatctaagtcaag

SEQ ID NO: 4550190 - DNA, 25 bp, Homo sapien
agctcaaagaatcagtttcttcatc

SEQ ID NO: 4550191 - DNA, 25 bp, Homo sapien
agaatcagtttcttcatctaagtca

SEQ ID NO: 4550192 - DNA, 25 bp, Homo sapien
ttcattcgtaaaacttcatcttcac

SEQ ID NO: 4550193 - DNA, 25 bp, Homo sapien
tggcacctcagtgtcactatccgct

SEQ ID NO: 4550194 - DNA, 25 bp, Homo sapien
tgtcactatccgcttctgaatcaga

SEQ ID NO: 4550195 - DNA, 25 bp, Homo sapien
tgaatcagatgcaatcgcattcttg

SEQ ID NO: 4550196 - DNA, 25 bp, Homo sapien
tgtcctcatggtcagaacgctcaga

SEQ ID NO: 4550197 - DNA, 25 bp, Homo sapien
catcattatcagaagctaccggccg

SEQ ID NO: 4550198 - DNA, 25 bp, Homo sapien
tcatcatcggaaagctgaggcctct

SEQ ID NO: 4550199 - DNA, 25 bp, Homo sapien
cagaggcattactgccagaggcagc

SEQ ID NO: 4550200 - DNA, 25 bp, Homo sapien
gcctcgaggcgcagactgtctgact

SEQ ID NO: 4550201 - DNA, 25 bp, Homo sapien
gagtggaggaaacgccacctcttgc

SEQ ID NO: 4550202 - DNA, 25 bp, Homo sapien
ctggagcctccacggttgtccggct

SEQ ID NO: 4550203 - DNA, 25 bp, Homo sapien
ttgtccggctcccacagcggaaggc

SEQ ID NO: 4550204 - DNA, 25 bp, Homo sapien
gctcagcttcgctgtcggcgtcgct

SEQ ID NO: 4550205 - DNA, 25 bp, Homo sapien
tacgctcagcttcgctgtcggcgtc

SEQ ID NO: 4550206 - DNA, 25 bp, Homo sapien
tttacgctcagcttcgctgtcggcg

SEQ ID NO: 4550207 - DNA, 25 bp, Homo sapien
ctttacgctcagcttcgctgtcggc

SEQ ID NO: 4550208 - DNA, 25 bp, Homo sapien
tatcgctcacgtccgctgctgcctc

SEQ ID NO: 4550209 - DNA, 25 bp, Homo sapien
tcacgtccgctgctgcctcggttag

SEQ ID NO: 4550210 - DNA, 25 bp, Homo sapien
gctcacgtccgctgctgcctcggtt

SEQ ID NO: 4550211 - DNA, 25 bp, Homo sapien
acgtccgctgctgcctcggttaggg

SEQ ID NO: 4550212 - DNA, 25 bp, Homo sapien
aggatgaggtcagcgtactcaacac

SEQ ID NO: 4550213 - DNA, 25 bp, Homo sapien
tgaagcttgagggttaccagagagc

SEQ ID NO: 4550214 - DNA, 25 bp, Homo sapien
tgaggtcagcgtactcaacaccaga

SEQ ID NO: 4550215 - DNA, 25 bp, Homo sapien
gagctatgtcctaaaaagacctttg

SEQ ID NO: 4550216 - DNA, 25 bp, Homo sapien
gggtctagggttgccgacatcggca

SEQ ID NO: 4550217 - DNA, 25 bp, Homo sapien
tagggttgccgacatcggcaaaggc

SEQ ID NO: 4550218 - DNA, 25 bp, Homo sapien
tgccgacatcggcaaaggctttagg

SEQ ID NO: 4550219 - DNA, 25 bp, Homo sapien
ctgagggtctagggttgccgacatc

SEQ ID NO: 4550220 - DNA, 25 bp, Homo sapien
ccactgtgccgagccatcacatgtt

SEQ ID NO: 4550221 - DNA, 25 bp, Homo sapien
ttgaacatgcacagtaacgagatac

SEQ ID NO: 4550222 - DNA, 25 bp, Homo sapien
gagatacttgagtcaccctacggga

SEQ ID NO: 4550223 - DNA, 25 bp, Homo sapien
tatagagttcctaagcacagaaggc

SEQ ID NO: 4550224 - DNA, 25 bp, Homo sapien
tacgagctctcgttgcagaagctgg

SEQ ID NO: 4550225 - DNA, 25 bp, Homo sapien
gattctgtcaatttagtggtctccc

SEQ ID NO: 4550226 - DNA, 25 bp, Homo sapien
tcctgaggatcagaggagagcctag

SEQ ID NO: 4550227 - DNA, 25 bp, Homo sapien
aattctgcggttggaacaagtctcc

SEQ ID NO: 4550228 - DNA, 25 bp, Homo sapien
taacgcgtctgtcttgtgctcgggc

SEQ ID NO: 4550229 - DNA, 25 bp, Homo sapien
ggcaggtagtagagcaaacggcccc

SEQ ID NO: 4550230 - DNA, 25 bp, Homo sapien
ggatccagctgaaaggccaccttgg

SEQ ID NO: 4550231 - DNA, 25 bp, Homo sapien
ggattgcccagtgccttgcacgtag

SEQ ID NO: 4550232 - DNA, 25 bp, Homo sapien
tcagctcgttagtcttctgagttgc

SEQ ID NO: 4550233 - DNA, 25 bp, Homo sapien
gatgcatacatggttgctcagctcg

SEQ ID NO: 4550234 - DNA, 25 bp, Homo sapien
taaacgatgcatacacctgggcaac

SEQ ID NO: 4550235 - DNA, 25 bp, Homo sapien
tcagtgcgcattcagtttgagaagc

SEQ ID NO: 4550236 - DNA, 25 bp, Homo sapien
tgggttgaaaccagctgccttcttc

SEQ ID NO: 4550237 - DNA, 25 bp, Homo sapien
ttggcagacctgtgcattcgcatag

SEQ ID NO: 4550238 - DNA, 25 bp, Homo sapien
cattctgagtgggttgaaaccagct

SEQ ID NO: 4550239 - DNA, 25 bp, Homo sapien
gtgcattcgcatagagtgagggtcc

SEQ ID NO: 4550240 - DNA, 25 bp, Homo sapien
tacagatttactgtaagtcatccat

SEQ ID NO: 4550241 - DNA, 25 bp, Homo sapien
agatttactgtaagtcatccatact

SEQ ID NO: 4550242 - DNA, 25 bp, Homo sapien
gttacagatttactgtaagtcatcc

SEQ ID NO: 4550243 - DNA, 25 bp, Homo sapien
ctggttacagatttactgtaagtca

SEQ ID NO: 4550244 - DNA, 25 bp, Homo sapien
tctgtgccagggttaggagatagcc

SEQ ID NO: 4550245 - DNA, 25 bp, Homo sapien
ccttctctgcccgaaaatcttagta

SEQ ID NO: 4550246 - DNA, 25 bp, Homo sapien
agctgtagcacttggccttctctgc

SEQ ID NO: 4550247 - DNA, 25 bp, Homo sapien
ttgatgagagcttgagacatgatct

SEQ ID NO: 4550248 - DNA, 25 bp, Homo sapien
atgggggaagtgctgtgctgtcagt

SEQ ID NO: 4550249 - DNA, 25 bp, Homo sapien
ccagatgacccatgtcagcatttat

SEQ ID NO: 4550250 - DNA, 25 bp, Homo sapien
cagatgacccatgtcagcatttatc

SEQ ID NO: 4550251 - DNA, 25 bp, Homo sapien
taattaaggtgggtctgctttccaa

SEQ ID NO: 4550252 - DNA, 25 bp, Homo sapien
gctttccaagatcctggctgaaaag

SEQ ID NO: 4550253 - DNA, 25 bp, Homo sapien
ggctgaaaaggcactctagcagcat

SEQ ID NO: 4550254 - DNA, 25 bp, Homo sapien
ggtctgctttccaagatcctggctg

SEQ ID NO: 4550255 - DNA, 25 bp, Homo sapien
gatgtttaactggtataatcctcat

SEQ ID NO: 4550256 - DNA, 25 bp, Homo sapien
agatgtttaactggtataatcctca

SEQ ID NO: 4550257 - DNA, 25 bp, Homo sapien
gggaagtggtgtgatagtgattaag

SEQ ID NO: 4550258 - DNA, 25 bp, Homo sapien
tgtgatagtgattaaggcctttttc

SEQ ID NO: 4550259 - DNA, 25 bp, Homo sapien
aagtggtgtgatagtgattaaggcc

SEQ ID NO: 4550260 - DNA, 25 bp, Homo sapien
taaggaatagtaggggtactgaaga

SEQ ID NO: 4550261 - DNA, 25 bp, Homo sapien
tttagttaccacatcgcagccaggg

SEQ ID NO: 4550262 - DNA, 25 bp, Homo sapien
tctcctcgtgttggaagtatcccag

SEQ ID NO: 4550263 - DNA, 25 bp, Homo sapien
tatatccagactcttaacggcttgt

SEQ ID NO: 4550264 - DNA, 25 bp, Homo sapien
tcatgttagcaaaccagtacctcca

SEQ ID NO: 4550265 - DNA, 25 bp, Homo sapien
gaatgatctattccccatcccaagg

SEQ ID NO: 4550266 - DNA, 25 bp, Homo sapien
taggttaaacgtagcatgtggcatc

SEQ ID NO: 4550267 - DNA, 25 bp, Homo sapien
aaaatgcacttctatttagccagcg

SEQ ID NO: 4550268 - DNA, 25 bp, Homo sapien
tacacatgtgttatctacctcaagg

SEQ ID NO: 4550269 - DNA, 25 bp, Homo sapien
tctcggaatatgtaaggctggttgg

SEQ ID NO: 4550270 - DNA, 25 bp, Homo sapien
tatccttaattgcattgtcgcgtgt

SEQ ID NO: 4550271 - DNA, 25 bp, Homo sapien
caagctccaagttgcaatcccaaga

SEQ ID NO: 4550272 - DNA, 25 bp, Homo sapien
taggtgcagtttaggtgaacgattg

SEQ ID NO: 4550273 - DNA, 25 bp, Homo sapien
cacaggtctttgcaccgtacatggg

SEQ ID NO: 4550274 - DNA, 25 bp, Homo sapien
gtctctctggttggatgtgaactcc

SEQ ID NO: 4550275 - DNA, 25 bp, Homo sapien
tctgcatgtattggtctccctgggg

SEQ ID NO: 4550276 - DNA, 25 bp, Homo sapien
cgtacatgggtaaccctgagtctgg

SEQ ID NO: 4550277 - DNA, 25 bp, Homo sapien
cggccatcttgagatgcccaggtgc

SEQ ID NO: 4550278 - DNA, 25 bp, Homo sapien
atgcccaggtgcctctgttctccat

SEQ ID NO: 4550279 - DNA, 25 bp, Homo sapien
ccatcttgagatgcccaggtgcctc

SEQ ID NO: 4550280 - DNA, 25 bp, Homo sapien
gatgcccaggtgcctctgttctcca

SEQ ID NO: 4550281 - DNA, 25 bp, Homo sapien
aggcaagcccatgccggatattcag

SEQ ID NO: 4550282 - DNA, 25 bp, Homo sapien
gcatatttcataaatcagacgcaga

SEQ ID NO: 4550283 - DNA, 25 bp, Homo sapien
ggaggcaagcccatgccggatattc

SEQ ID NO: 4550284 - DNA, 25 bp, Homo sapien
tccttcccacttggcatatttcata

SEQ ID NO: 4550285 - DNA, 25 bp, Homo sapien
tgttctgactcagggatgccttcct

SEQ ID NO: 4550286 - DNA, 25 bp, Homo sapien
taaggatcgcaatgcaatgtggctg

SEQ ID NO: 4550287 - DNA, 25 bp, Homo sapien
tacagcccgtacatcataagcatag

SEQ ID NO: 4550288 - DNA, 25 bp, Homo sapien
ttgcccctctggacaagtttccgaa

SEQ ID NO: 4550289 - DNA, 25 bp, Homo sapien
gtgccagatggaggccttagggtga

SEQ ID NO: 4550290 - DNA, 25 bp, Homo sapien
gctgagtgatgagggttagaagcag

SEQ ID NO: 4550291 - DNA, 25 bp, Homo sapien
aacagtgccagatggaggccttagg

SEQ ID NO: 4550292 - DNA, 25 bp, Homo sapien
tgagtgatgagggttagaagcagca

SEQ ID NO: 4550293 - DNA, 25 bp, Homo sapien
atcctgagagactgacatagtgttg

SEQ ID NO: 4550294 - DNA, 25 bp, Homo sapien
gactgacatagtgttgcacaagtac

SEQ ID NO: 4550295 - DNA, 25 bp, Homo sapien
ctgagagactgacatagtgttgcac

SEQ ID NO: 4550296 - DNA, 25 bp, Homo sapien
gagagactgacatagtgttgcacaa

SEQ ID NO: 4550297 - DNA, 25 bp, Homo sapien
ccaaagtcaactattaaagcctgag

SEQ ID NO: 4550298 - DNA, 25 bp, Homo sapien
ggacctttcaaacgaagacgcagag

SEQ ID NO: 4550299 - DNA, 25 bp, Homo sapien
catttgttgccaggtggacctttca

SEQ ID NO: 4550300 - DNA, 25 bp, Homo sapien
tgagtcattcttctatcggtaacag

SEQ ID NO: 4550301 - DNA, 25 bp, Homo sapien
acatcccagagaggtccggcgagca

SEQ ID NO: 4550302 - DNA, 25 bp, Homo sapien
aaattccatgttgattttgcaaaaa

SEQ ID NO: 4550303 - DNA, 25 bp, Homo sapien
aattccatgttgattttgcaaaaat

SEQ ID NO: 4550304 - DNA, 25 bp, Homo sapien
aaaattccatgttgattttgcaaaa

SEQ ID NO: 4550305 - DNA, 25 bp, Homo sapien
tgatcaatgtgattttgtgcacctg

SEQ ID NO: 4550306 - DNA, 25 bp, Homo sapien
taatgatcaatgtgattttgtgcac

SEQ ID NO: 4550307 - DNA, 25 bp, Homo sapien
tcaatgtgattttgtgcacctgtgg

SEQ ID NO: 4550308 - DNA, 25 bp, Homo sapien
ttatgaactaatgatcaatgtgatt

SEQ ID NO: 4550309 - DNA, 25 bp, Homo sapien
cgaaggtcgttactaagatcattag

SEQ ID NO: 4550310 - DNA, 25 bp, Homo sapien
agtaagtatttgaacaccgaggata

SEQ ID NO: 4550311 - DNA, 25 bp, Homo sapien
cgataacgaaggtcgttactaagat

SEQ ID NO: 4550312 - DNA, 25 bp, Homo sapien
ttagtaagtatttgaacaccgagga

SEQ ID NO: 4550313 - DNA, 25 bp, Homo sapien
aagaatatgtcctgggaatgatcag

SEQ ID NO: 4550314 - DNA, 25 bp, Homo sapien
atggaagacattttgattaacaaag

SEQ ID NO: 4550315 - DNA, 25 bp, Homo sapien
agaaaaagaatatgtcctgggaatg

SEQ ID NO: 4550316 - DNA, 25 bp, Homo sapien
ggaagacattttgattaacaaagaa

SEQ ID NO: 4550317 - DNA, 25 bp, Homo sapien
gtcatttagttggtcacagttgggc

SEQ ID NO: 4550318 - DNA, 25 bp, Homo sapien
tcacacctgagtacttgtcacaagt

SEQ ID NO: 4550319 - DNA, 25 bp, Homo sapien
tcaggactccttgtatgcattcaga

SEQ ID NO: 4550320 - DNA, 25 bp, Homo sapien
taaagaggctctagactccccattt

SEQ ID NO: 4550321 - DNA, 25 bp, Homo sapien
tcataataatcgtgtccagagataa

SEQ ID NO: 4550322 - DNA, 25 bp, Homo sapien
atgaaggctgttgttaacaagcatg

SEQ ID NO: 4550323 - DNA, 25 bp, Homo sapien
gctgttgttaacaagcatgacagaa

SEQ ID NO: 4550324 - DNA, 25 bp, Homo sapien
ataatcgtgtccagagataaatgaa

SEQ ID NO: 4550325 - DNA, 25 bp, Homo sapien
gtcactagattgaaaagttatcacc

SEQ ID NO: 4550326 - DNA, 25 bp, Homo sapien
gagacaagggtgaactatgtttacc

SEQ ID NO: 4550327 - DNA, 25 bp, Homo sapien
tatcacctgacactacagcaagcac

SEQ ID NO: 4550328 - DNA, 25 bp, Homo sapien
ttttgggaaactgtcaagtcactag

SEQ ID NO: 4550329 - DNA, 25 bp, Homo sapien
ccagatgccgtattgagacagggct

SEQ ID NO: 4550330 - DNA, 25 bp, Homo sapien
ttaggcacgcagctgaagggagttc

SEQ ID NO: 4550331 - DNA, 25 bp, Homo sapien
agttcaccggcccagagggttgaag

SEQ ID NO: 4550332 - DNA, 25 bp, Homo sapien
tcttcttcaggtacagagagcccgg

SEQ ID NO: 4550333 - DNA, 25 bp, Homo sapien
aggcatgcagtgggctcatcaccag

SEQ ID NO: 4550334 - DNA, 25 bp, Homo sapien
agaggcatgcagtgggctcatcacc

SEQ ID NO: 4550335 - DNA, 25 bp, Homo sapien
cagaggcatgcagtgggctcatcac

SEQ ID NO: 4550336 - DNA, 25 bp, Homo sapien
cccagaggcatgcagtgggctcatc

SEQ ID NO: 4550337 - DNA, 25 bp, Homo sapien
ttgctgacttcattggttggggatt

SEQ ID NO: 4550338 - DNA, 25 bp, Homo sapien
tgctgacttcattggttggggattt

SEQ ID NO: 4550339 - DNA, 25 bp, Homo sapien
gtgtcccggtgtccgccgcgtgctc

SEQ ID NO: 4550340 - DNA, 25 bp, Homo sapien
ccgtgtcccggtgtccgccgcgtgc

SEQ ID NO: 4550341 - DNA, 25 bp, Homo sapien
gccagcctcgtgggcgcttcccggc

SEQ ID NO: 4550342 - DNA, 25 bp, Homo sapien
gcctcgtgggcgcttcccggctgcc

SEQ ID NO: 4550343 - DNA, 25 bp, Homo sapien
tgaatctgccgtaacctggcggccg

SEQ ID NO: 4550344 - DNA, 25 bp, Homo sapien
tgtcggagagcacggaatccgccat

SEQ ID NO: 4550345 - DNA, 25 bp, Homo sapien
tcctgctcctttagccgcggctgga

SEQ ID NO: 4550346 - DNA, 25 bp, Homo sapien
agcagcgtccctgcgaaggtcacga

SEQ ID NO: 4550347 - DNA, 25 bp, Homo sapien
gtggtgcgctcccgcaactggtcaa

SEQ ID NO: 4550348 - DNA, 25 bp, Homo sapien
tggtgcgctcccgcaactggtcaac

SEQ ID NO: 4550349 - DNA, 25 bp, Homo sapien
tgcgctcccgcaactggtcaaccat

SEQ ID NO: 4550350 - DNA, 25 bp, Homo sapien
ggtgcgctcccgcaactggtcaacc

SEQ ID NO: 4550351 - DNA, 25 bp, Homo sapien
gctggttttcttggcccggccgcgc

SEQ ID NO: 4550352 - DNA, 25 bp, Homo sapien
tgctggggggccgggccttcgctgg

SEQ ID NO: 4550353 - DNA, 25 bp, Homo sapien
cggcctctgctggggggccgggcct

SEQ ID NO: 4550354 - DNA, 25 bp, Homo sapien
tcgctggttttcttggcccggccgc

SEQ ID NO: 4550355 - DNA, 25 bp, Homo sapien
taaatggtaaatcctctggcaacgg

SEQ ID NO: 4550356 - DNA, 25 bp, Homo sapien
ccattggtgtgctggttagataacc

SEQ ID NO: 4550357 - DNA, 25 bp, Homo sapien
taataagactcggtgaaaatcctgt

SEQ ID NO: 4550358 - DNA, 25 bp, Homo sapien
gaggctgccaattaccgtggaaaac

SEQ ID NO: 4550359 - DNA, 25 bp, Homo sapien
gcttgtatgcctaataccaaaaatg

SEQ ID NO: 4550360 - DNA, 25 bp, Homo sapien
catattaatcccttaaatgtctatc

SEQ ID NO: 4550361 - DNA, 25 bp, Homo sapien
aataatgatctttaattgacacata

SEQ ID NO: 4550362 - DNA, 25 bp, Homo sapien
ggctgctgcaacctcacacaaaaat

SEQ ID NO: 4550363 - DNA, 25 bp, Homo sapien
cagagacaagattcactcgcggcct

SEQ ID NO: 4550364 - DNA, 25 bp, Homo sapien
tgggacgattcttctcagcaggcaa

SEQ ID NO: 4550365 - DNA, 25 bp, Homo sapien
ggcaagtggtttagcatggcaatcc

SEQ ID NO: 4550366 - DNA, 25 bp, Homo sapien
gaagagtgacccaattctctccggt

SEQ ID NO: 4550367 - DNA, 25 bp, Homo sapien
tgaaggctttccctagggtggctct

SEQ ID NO: 4550368 - DNA, 25 bp, Homo sapien
caagctcttccaaggcccttagtgg

SEQ ID NO: 4550369 - DNA, 25 bp, Homo sapien
tctctgggacttcctccaccgaccg

SEQ ID NO: 4550370 - DNA, 25 bp, Homo sapien
agcccttccgactgcctctctggga

SEQ ID NO: 4550371 - DNA, 25 bp, Homo sapien
gctaatggaacgtgtgcatctgtat

SEQ ID NO: 4550372 - DNA, 25 bp, Homo sapien
gagaaagatcaccttgatggctaat

SEQ ID NO: 4550373 - DNA, 25 bp, Homo sapien
tccagagactactggcatgggagaa

SEQ ID NO: 4550374 - DNA, 25 bp, Homo sapien
ggatagatacaatccacaatgagca

SEQ ID NO: 4550375 - DNA, 25 bp, Homo sapien
ctggcaactatgagagcccgggaca

SEQ ID NO: 4550376 - DNA, 25 bp, Homo sapien
gcctggcaactatgagagcccggga

SEQ ID NO: 4550377 - DNA, 25 bp, Homo sapien
tggcctggcaactatgagagcccgg

SEQ ID NO: 4550378 - DNA, 25 bp, Homo sapien
ctggcctggcaactatgagagcccg

SEQ ID NO: 4550379 - DNA, 25 bp, Homo sapien
tctcatcagcaaatcccgacagcac

SEQ ID NO: 4550380 - DNA, 25 bp, Homo sapien
cacatgctgtcacatagtccaaatc

SEQ ID NO: 4550381 - DNA, 25 bp, Homo sapien
catagtccaaatcaagtatctcatc

SEQ ID NO: 4550382 - DNA, 25 bp, Homo sapien
gctgtcacatagtccaaatcaagta

SEQ ID NO: 4550383 - DNA, 25 bp, Homo sapien
tctctggaatactttccctgggccc

SEQ ID NO: 4550384 - DNA, 25 bp, Homo sapien
gcattctctggaatactttccctgg

SEQ ID NO: 4550385 - DNA, 25 bp, Homo sapien
ggattggaaagtcacagtctacttt

SEQ ID NO: 4550386 - DNA, 25 bp, Homo sapien
agtctactttgcacatatcctgaag

SEQ ID NO: 4550387 - DNA, 25 bp, Homo sapien
acctgaacaagcagttgtgagggtg

SEQ ID NO: 4550388 - DNA, 25 bp, Homo sapien
agatgatggaaaagatggcctggct

SEQ ID NO: 4550389 - DNA, 25 bp, Homo sapien
cctggctgattttggaccgagtggc

SEQ ID NO: 4550390 - DNA, 25 bp, Homo sapien
tggcccatcacgatacctgaacaag

SEQ ID NO: 4550391 - DNA, 25 bp, Homo sapien
cagtcctgtcttatggctgtgccca

SEQ ID NO: 4550392 - DNA, 25 bp, Homo sapien
gtccagtcctgtcttatggctgtgc

SEQ ID NO: 4550393 - DNA, 25 bp, Homo sapien
gtcctgtcttatggctgtgcccagc

SEQ ID NO: 4550394 - DNA, 25 bp, Homo sapien
agctaccactagaagaagggctggg

SEQ ID NO: 4550395 - DNA, 25 bp, Homo sapien
tgggttgctcccctaagctacactg

SEQ ID NO: 4550396 - DNA, 25 bp, Homo sapien
gagacgcttagtgacctgtgagcca

SEQ ID NO: 4550397 - DNA, 25 bp, Homo sapien
tgaaggtattctcgcagtgctgaag

SEQ ID NO: 4550398 - DNA, 25 bp, Homo sapien
gagaaaacgccctgtccaagtggca

SEQ ID NO: 4550399 - DNA, 25 bp, Homo sapien
ttgtccaatcctaattaagtgcccc

SEQ ID NO: 4550400 - DNA, 25 bp, Homo sapien
taccaattcttgatgttccacactg

SEQ ID NO: 4550401 - DNA, 25 bp, Homo sapien
tccacactgaggtaagcaataaatt

SEQ ID NO: 4550402 - DNA, 25 bp, Homo sapien
tgtctcaggacaatatagagcatca

SEQ ID NO: 4550403 - DNA, 25 bp, Homo sapien
caggaaaacagaaaaccatccctct

SEQ ID NO: 4550404 - DNA, 25 bp, Homo sapien
tcaccagtcctctctcctctcacac

SEQ ID NO: 4550405 - DNA, 25 bp, Homo sapien
ctcctctcacacacaggaaaacaga

SEQ ID NO: 4550406 - DNA, 25 bp, Homo sapien
ctctctcctctcacacacaggaaaa

SEQ ID NO: 4550407 - DNA, 25 bp, Homo sapien
ctcgtagagtgctaacgcggttttc

SEQ ID NO: 4550408 - DNA, 25 bp, Homo sapien
cgtagagtgctaacgcggttttcat

SEQ ID NO: 4550409 - DNA, 25 bp, Homo sapien
gaaactcgtagagtgctaacgcggt

SEQ ID NO: 4550410 - DNA, 25 bp, Homo sapien
cagagcagaaagcagtcccatcggg

SEQ ID NO: 4550411 - DNA, 25 bp, Homo sapien
catcccagacgttgatagtgtaatc

SEQ ID NO: 4550412 - DNA, 25 bp, Homo sapien
ggaccctttgagaacatcccagacg

SEQ ID NO: 4550413 - DNA, 25 bp, Homo sapien
aatcattgtatccagcaaacagcag

SEQ ID NO: 4550414 - DNA, 25 bp, Homo sapien
caggatggagacccgggaccctttg

SEQ ID NO: 4550415 - DNA, 25 bp, Homo sapien
tagctgttaagccagttccttgctt

SEQ ID NO: 4550416 - DNA, 25 bp, Homo sapien
cttgaagcagggtgagatgatagct

SEQ ID NO: 4550417 - DNA, 25 bp, Homo sapien
catgactgttactcactcattcagt

SEQ ID NO: 4550418 - DNA, 25 bp, Homo sapien
cagtaagcagtgattcaggcgcact

SEQ ID NO: 4550419 - DNA, 25 bp, Homo sapien
aggagccatgagcttcaaggcactg

SEQ ID NO: 4550420 - DNA, 25 bp, Homo sapien
ctttttttgacatgatccttctgga

SEQ ID NO: 4550421 - DNA, 25 bp, Homo sapien
ttttttgacatgatccttctggagc

SEQ ID NO: 4550422 - DNA, 25 bp, Homo sapien
caaaggagccatgagcttcaaggca

SEQ ID NO: 4550423 - DNA, 25 bp, Homo sapien
atagatggcaacctccctatctgcc

SEQ ID NO: 4550424 - DNA, 25 bp, Homo sapien
tggaatagatggcaacctccctatc

SEQ ID NO: 4550425 - DNA, 25 bp, Homo sapien
cctatctgcccgcaggtcatagagg

SEQ ID NO: 4550426 - DNA, 25 bp, Homo sapien
ctgcccgcaggtcatagaggcgaca

SEQ ID NO: 4550427 - DNA, 25 bp, Homo sapien
gaccacagagctacaggtaggtgct

SEQ ID NO: 4550428 - DNA, 25 bp, Homo sapien
gagctacaggtaggtgctagtgact

SEQ ID NO: 4550429 - DNA, 25 bp, Homo sapien
caggtaggtgctagtgacttgcgta

SEQ ID NO: 4550430 - DNA, 25 bp, Homo sapien
gtgacttgcgtagtttaaaagatga

SEQ ID NO: 4550431 - DNA, 25 bp, Homo sapien
cgtagcgtcatctgaccctgaagca

SEQ ID NO: 4550432 - DNA, 25 bp, Homo sapien
aaaggcatctccactggggtagtac

SEQ ID NO: 4550433 - DNA, 25 bp, Homo sapien
agcaaaggcatctccactggggtag

SEQ ID NO: 4550434 - DNA, 25 bp, Homo sapien
tctgaccctgaagcaaaggcatctc

SEQ ID NO: 4550435 - DNA, 25 bp, Homo sapien
ggatgcccatcagaaccatgctagg

SEQ ID NO: 4550436 - DNA, 25 bp, Homo sapien
tctagggactcaaggaacatttgca

SEQ ID NO: 4550437 - DNA, 25 bp, Homo sapien
taattcctaagacttggcccagagc

SEQ ID NO: 4550438 - DNA, 25 bp, Homo sapien
tacggttgtgactcctgaccctgga

SEQ ID NO: 4550439 - DNA, 25 bp, Homo sapien
gtttctcctttctcgtaccagtgac

SEQ ID NO: 4550440 - DNA, 25 bp, Homo sapien
tatagttccacaaaagccgcaggag

SEQ ID NO: 4550441 - DNA, 25 bp, Homo sapien
cctaccagcgggaggtgagagtcaa

SEQ ID NO: 4550442 - DNA, 25 bp, Homo sapien
taccagtgacctaccctatagttcc

SEQ ID NO: 4550443 - DNA, 25 bp, Homo sapien
taaaagatgtgggttccctaagctc

SEQ ID NO: 4550444 - DNA, 25 bp, Homo sapien
tcatacgtggcaagtcctgacctct

SEQ ID NO: 4550445 - DNA, 25 bp, Homo sapien
gaactagggctcaagtatgcacaaa

SEQ ID NO: 4550446 - DNA, 25 bp, Homo sapien
gcttgctgccctcgataaaagatgt

SEQ ID NO: 4550447 - DNA, 25 bp, Homo sapien
taggtcccttaacctctcatctctg

SEQ ID NO: 4550448 - DNA, 25 bp, Homo sapien
ttgttaggtcccttaacctctcatc

SEQ ID NO: 4550449 - DNA, 25 bp, Homo sapien
cccaacagagcgatcttttaaaggc

SEQ ID NO: 4550450 - DNA, 25 bp, Homo sapien
gcttcccaacagagcgatcttttaa

SEQ ID NO: 4550451 - DNA, 25 bp, Homo sapien
catgtcccacaccatggctttcttg

SEQ ID NO: 4550452 - DNA, 25 bp, Homo sapien
aaggcctgcacgcactggccggagc

SEQ ID NO: 4550453 - DNA, 25 bp, Homo sapien
tggccggagcgcatgtcccacacca

SEQ ID NO: 4550454 - DNA, 25 bp, Homo sapien
ttcaaaggcctgcacgcactggccg

SEQ ID NO: 4550455 - DNA, 25 bp, Homo sapien
gggacctctctagttgtgacattaa

SEQ ID NO: 4550456 - DNA, 25 bp, Homo sapien
gggcccataagggtgctgccatcga

SEQ ID NO: 4550457 - DNA, 25 bp, Homo sapien
tgcccaaatggagcagccgagagtc

SEQ ID NO: 4550458 - DNA, 25 bp, Homo sapien
attaataaatgggttggcagtgccc

SEQ ID NO: 4550459 - DNA, 25 bp, Homo sapien
acagggcacatgtgccatcgccgct

SEQ ID NO: 4550460 - DNA, 25 bp, Homo sapien
cagaggacgtcagccccatgtccgt

SEQ ID NO: 4550461 - DNA, 25 bp, Homo sapien
gacacgaaggtgtttccagtttctg

SEQ ID NO: 4550462 - DNA, 25 bp, Homo sapien
gcccgctctccacgtcccacagggc

SEQ ID NO: 4550463 - DNA, 25 bp, Homo sapien
ttatgccgggggcagtcaatcagag

SEQ ID NO: 4550464 - DNA, 25 bp, Homo sapien
ttgtggttattgcttatgccggggg

SEQ ID NO: 4550465 - DNA, 25 bp, Homo sapien
gcttatgccgggggcagtcaatcag

SEQ ID NO: 4550466 - DNA, 25 bp, Homo sapien
gttattgcttatgccgggggcagtc

SEQ ID NO: 4550467 - DNA, 25 bp, Homo sapien
aaagactgtgaatcgattagacaac

SEQ ID NO: 4550468 - DNA, 25 bp, Homo sapien
actgtgaatcgattagacaacttac

SEQ ID NO: 4550469 - DNA, 25 bp, Homo sapien
aataacttaactgcttgctgcagaa

SEQ ID NO: 4550470 - DNA, 25 bp, Homo sapien
agaaaagactgtgaatcgattagac

SEQ ID NO: 4550471 - DNA, 25 bp, Homo sapien
tagcttacaagtacaaaggtcagcc

SEQ ID NO: 4550472 - DNA, 25 bp, Homo sapien
tcactgccagtgtgtatgaggcctg

SEQ ID NO: 4550473 - DNA, 25 bp, Homo sapien
aaagactgttcgcttgctgggctca

SEQ ID NO: 4550474 - DNA, 25 bp, Homo sapien
aatgaaaggtgagcccgttcacagg

SEQ ID NO: 4550475 - DNA, 25 bp, Homo sapien
cagctggcggcatcacagagccctg

SEQ ID NO: 4550476 - DNA, 25 bp, Homo sapien
ccagctgggtactgacagcaatgga

SEQ ID NO: 4550477 - DNA, 25 bp, Homo sapien
aaggcagtgaggactcagggttcgg

SEQ ID NO: 4550478 - DNA, 25 bp, Homo sapien
ggttcggggccctcataggcccagc

SEQ ID NO: 4550479 - DNA, 25 bp, Homo sapien
ctgggtgaggtgataagaccgtgga

SEQ ID NO: 4550480 - DNA, 25 bp, Homo sapien
agtggctcttgcagcataagtgtcc

SEQ ID NO: 4550481 - DNA, 25 bp, Homo sapien
gcataagtgtccacaagagagccct

SEQ ID NO: 4550482 - DNA, 25 bp, Homo sapien
gccctttgcggatgattactgatgg

SEQ ID NO: 4550483 - DNA, 25 bp, Homo sapien
acagagcgagtctgatgggtctcca

SEQ ID NO: 4550484 - DNA, 25 bp, Homo sapien
ttcagatgcctgatggtcgtggtag

SEQ ID NO: 4550485 - DNA, 25 bp, Homo sapien
gatgcctgatggtcgtggtagcccc

SEQ ID NO: 4550486 - DNA, 25 bp, Homo sapien
cacagagcgagtctgatgggtctcc

SEQ ID NO: 4550487 - DNA, 25 bp, Homo sapien
gctgcctgcctcccactgtgctccc

SEQ ID NO: 4550488 - DNA, 25 bp, Homo sapien
cctgcctcccactgtgctccctcac

SEQ ID NO: 4550489 - DNA, 25 bp, Homo sapien
tgcctgcctcccactgtgctccctc

SEQ ID NO: 4550490 - DNA, 25 bp, Homo sapien
ctctcggctgcctgcctcccactgt

SEQ ID NO: 4550491 - DNA, 25 bp, Homo sapien
tggcagcggtccctcttcactggca

SEQ ID NO: 4550492 - DNA, 25 bp, Homo sapien
cagagccacgtggtatctggcaata

SEQ ID NO: 4550493 - DNA, 25 bp, Homo sapien
gttttcatgaaggtccctgagggcc

SEQ ID NO: 4550494 - DNA, 25 bp, Homo sapien
caagactgagcttttggccccagag

SEQ ID NO: 4550495 - DNA, 25 bp, Homo sapien
cgtcaaggggtacacagaacactta

SEQ ID NO: 4550496 - DNA, 25 bp, Homo sapien
agctgcaggccgacaggtagttggt

SEQ ID NO: 4550497 - DNA, 25 bp, Homo sapien
ggtagttggtgtgcatagcaacaga

SEQ ID NO: 4550498 - DNA, 25 bp, Homo sapien
tttgtcaaacgtcaaggggtacaca

SEQ ID NO: 4550499 - DNA, 25 bp, Homo sapien
gtatcactgtacacccataaatttg

SEQ ID NO: 4550500 - DNA, 25 bp, Homo sapien
tacaaaggctttacatgattatcct

SEQ ID NO: 4550501 - DNA, 25 bp, Homo sapien
tacatttgatgctcaaattacccca

SEQ ID NO: 4550502 - DNA, 25 bp, Homo sapien
gcttgaatcagatattactttaggg

SEQ ID NO: 4550503 - DNA, 25 bp, Homo sapien
taaatactggcatccatctataaag

SEQ ID NO: 4550504 - DNA, 25 bp, Homo sapien
aatactggcatccatctataaagtg

SEQ ID NO: 4550505 - DNA, 25 bp, Homo sapien
tttatataaatactggcatccatct

SEQ ID NO: 4550506 - DNA, 25 bp, Homo sapien
tatataaatactggcatccatctat

SEQ ID NO: 4550507 - DNA, 25 bp, Homo sapien
tcaaaggctatccatttttcaaggc

SEQ ID NO: 4550508 - DNA, 25 bp, Homo sapien
tgtccatatggcttttctatgtttt

SEQ ID NO: 4550509 - DNA, 25 bp, Homo sapien
ctttcaaatgagttcctggatgtgg

SEQ ID NO: 4550510 - DNA, 25 bp, Homo sapien
gtggagtcaccagatcaaaggctat

SEQ ID NO: 4550511 - DNA, 25 bp, Homo sapien
caccactgtgctggcttatggtttc

SEQ ID NO: 4550512 - DNA, 25 bp, Homo sapien
gtttttgccaagagaacagtattct

SEQ ID NO: 4550513 - DNA, 25 bp, Homo sapien
ttcagggaaggatttagcatactgc

SEQ ID NO: 4550514 - DNA, 25 bp, Homo sapien
tattctatggttaacacaaattctg

SEQ ID NO: 4550515 - DNA, 25 bp, Homo sapien
tcccgatggggcataagcacatgcc

SEQ ID NO: 4550516 - DNA, 25 bp, Homo sapien
acaagcaatggcacatcccgatggg

SEQ ID NO: 4550517 - DNA, 25 bp, Homo sapien
gcacatgccatcacccacgtgcagg

SEQ ID NO: 4550518 - DNA, 25 bp, Homo sapien
cacaagcaatggcacatcccgatgg

SEQ ID NO: 4550519 - DNA, 25 bp, Homo sapien
tccacgtgttcattcccacagggct

SEQ ID NO: 4550520 - DNA, 25 bp, Homo sapien
ccacagggctatggagtctggtcaa

SEQ ID NO: 4550521 - DNA, 25 bp, Homo sapien
agttgagctgtgcatgcccaagcca

SEQ ID NO: 4550522 - DNA, 25 bp, Homo sapien
ggtgttccagcatacctgcacatag

SEQ ID NO: 4550523 - DNA, 25 bp, Homo sapien
catgttggtattggcagcccctatg

SEQ ID NO: 4550524 - DNA, 25 bp, Homo sapien
cccctatggtggctctaattgtcct

SEQ ID NO: 4550525 - DNA, 25 bp, Homo sapien
acaaatagtacatgcagttgcacat

SEQ ID NO: 4550526 - DNA, 25 bp, Homo sapien
gcacatgtggttgcaagttttccat

SEQ ID NO: 4550527 - DNA, 25 bp, Homo sapien
gcgagaggggaataaatgctgcaat

SEQ ID NO: 4550528 - DNA, 25 bp, Homo sapien
tcaaacacggataggccttcttggg

SEQ ID NO: 4550529 - DNA, 25 bp, Homo sapien
cttcttggggtttccatccgtagag

SEQ ID NO: 4550530 - DNA, 25 bp, Homo sapien
cttggggtttccatccgtagaggca

SEQ ID NO: 4550531 - DNA, 25 bp, Homo sapien
ccagagcacctttaagtaggctggg

SEQ ID NO: 4550532 - DNA, 25 bp, Homo sapien
gaagcctctataacgtggctgggaa

SEQ ID NO: 4550533 - DNA, 25 bp, Homo sapien
gattctgaagcctctataacgtggc

SEQ ID NO: 4550534 - DNA, 25 bp, Homo sapien
ctggaccagagcacctttaagtagg

SEQ ID NO: 4550535 - DNA, 25 bp, Homo sapien
gtgaaggaatcccacacgatcacct

SEQ ID NO: 4550536 - DNA, 25 bp, Homo sapien
gaaggaatcccacacgatcaccttc

SEQ ID NO: 4550537 - DNA, 25 bp, Homo sapien
aggaatcccacacgatcaccttccc

SEQ ID NO: 4550538 - DNA, 25 bp, Homo sapien
tgaaggaatcccacacgatcacctt

SEQ ID NO: 4550539 - DNA, 25 bp, Homo sapien
gagcaaacagtttaggggttgtcaa

SEQ ID NO: 4550540 - DNA, 25 bp, Homo sapien
tctggataatcaagaccccctaatc

SEQ ID NO: 4550541 - DNA, 25 bp, Homo sapien
gattactgctgagaattcctcataa

SEQ ID NO: 4550542 - DNA, 25 bp, Homo sapien
caagttcttacagattactgctgag

SEQ ID NO: 4550543 - DNA, 25 bp, Homo sapien
tttggagtccatggtccctgcggca

SEQ ID NO: 4550544 - DNA, 25 bp, Homo sapien
gcccacatcagcgaccacgttaggg

SEQ ID NO: 4550545 - DNA, 25 bp, Homo sapien
gctggggactggttcctagcattgc

SEQ ID NO: 4550546 - DNA, 25 bp, Homo sapien
gcgaccacgttaggggcttcttcca

SEQ ID NO: 4550547 - DNA, 25 bp, Homo sapien
ttcctagcattgcccacatcagcga

SEQ ID NO: 4550548 - DNA, 25 bp, Homo sapien
ctgtcccccatgtgtgctctggagt

SEQ ID NO: 4550549 - DNA, 25 bp, Homo sapien
gtcccccatgtgtgctctggagtcc

SEQ ID NO: 4550550 - DNA, 25 bp, Homo sapien
tgtcccccatgtgtgctctggagtc

SEQ ID NO: 4550551 - DNA, 25 bp, Homo sapien
ttgtctggatttaagaagtcaaaag

SEQ ID NO: 4550552 - DNA, 25 bp, Homo sapien
cttgtctggatttaagaagtcaaaa

SEQ ID NO: 4550553 - DNA, 25 bp, Homo sapien
tgtctggatttaagaagtcaaaagg

SEQ ID NO: 4550554 - DNA, 25 bp, Homo sapien
ctgttatgcagcaggtgtgacatac

SEQ ID NO: 4550555 - DNA, 25 bp, Homo sapien
tgtgacgagctcacgatcctcctct

SEQ ID NO: 4550556 - DNA, 25 bp, Homo sapien
ccatgcacaggactttgttcccgtg

SEQ ID NO: 4550557 - DNA, 25 bp, Homo sapien
ggtcttcatgacaaactgccccagg

SEQ ID NO: 4550558 - DNA, 25 bp, Homo sapien
tcttatctttgcaccagtccatgca

SEQ ID NO: 4550559 - DNA, 25 bp, Homo sapien
gtcagtccccttgctaaggaccagg

SEQ ID NO: 4550560 - DNA, 25 bp, Homo sapien
acaaggccatagtcagtccccttgc

SEQ ID NO: 4550561 - DNA, 25 bp, Homo sapien
gccatagtcagtccccttgctaagg

SEQ ID NO: 4550562 - DNA, 25 bp, Homo sapien
tccccttgctaaggaccaggttctg

SEQ ID NO: 4550563 - DNA, 25 bp, Homo sapien
cagacatatgttccgcagagggagg

SEQ ID NO: 4550564 - DNA, 25 bp, Homo sapien
gcacagacatatgttccgcagaggg

SEQ ID NO: 4550565 - DNA, 25 bp, Homo sapien
cacagcacagacatatgttccgcag

SEQ ID NO: 4550566 - DNA, 25 bp, Homo sapien
ctgacacagcacagacatatgttcc

SEQ ID NO: 4550567 - DNA, 25 bp, Homo sapien
tacaacgtgggacttgctaagctag

SEQ ID NO: 4550568 - DNA, 25 bp, Homo sapien
gagctcatttatcccaccgtgacag

SEQ ID NO: 4550569 - DNA, 25 bp, Homo sapien
catccaggtatatgagagtcagtcc

SEQ ID NO: 4550570 - DNA, 25 bp, Homo sapien
tcctaggtgggtacgctaagctgag

SEQ ID NO: 4550571 - DNA, 25 bp, Homo sapien
cagaagtccaatacggaaaacagat

SEQ ID NO: 4550572 - DNA, 25 bp, Homo sapien
cctaagttccaaatatcacatctac

SEQ ID NO: 4550573 - DNA, 25 bp, Homo sapien
ggagggtgacggccagacaggaagg

SEQ ID NO: 4550574 - DNA, 25 bp, Homo sapien
gtccaatacggaaaacagatgaagg

SEQ ID NO: 4550575 - DNA, 25 bp, Homo sapien
catggccattttagattaaggagtc

SEQ ID NO: 4550576 - DNA, 25 bp, Homo sapien
tacaaataaagtacctgctgccaag

SEQ ID NO: 4550577 - DNA, 25 bp, Homo sapien
tgctgccaaggtacttacattctag

SEQ ID NO: 4550578 - DNA, 25 bp, Homo sapien
cactgttgtaggagggtgatccaca

SEQ ID NO: 4550579 - DNA, 25 bp, Homo sapien
agcgacgccagcgtctcgttctcgt

SEQ ID NO: 4550580 - DNA, 25 bp, Homo sapien
acgccagcgtctcgttctcgtgcag

SEQ ID NO: 4550581 - DNA, 25 bp, Homo sapien
tctcggcctcgctcttcagcgacgc

SEQ ID NO: 4550582 - DNA, 25 bp, Homo sapien
tcgttctcgtgcagcccctcggttg

SEQ ID NO: 4550583 - DNA, 25 bp, Homo sapien
gggacgcagcggagagggaagcgga

SEQ ID NO: 4550584 - DNA, 25 bp, Homo sapien
acgcagcggagagggaagcggagag

SEQ ID NO: 4550585 - DNA, 25 bp, Homo sapien
cttcgcgcggggacgcagcggagag

SEQ ID NO: 4550586 - DNA, 25 bp, Homo sapien
agcggagagggaagcggagagcggg

SEQ ID NO: 4550587 - DNA, 25 bp, Homo sapien
gccgcggcgggcgccgctccagcag

SEQ ID NO: 4550588 - DNA, 25 bp, Homo sapien
agccgcggcgggcgccgctccagca

SEQ ID NO: 4550589 - DNA, 25 bp, Homo sapien
ctgagccgcggcgggcgccgctcca

SEQ ID NO: 4550590 - DNA, 25 bp, Homo sapien
tgagccgcggcgggcgccgctccag

SEQ ID NO: 4550591 - DNA, 25 bp, Homo sapien
agtctctgcggcattaggaggccca

SEQ ID NO: 4550592 - DNA, 25 bp, Homo sapien
tcttcacgcaggaatcaggtccctg

SEQ ID NO: 4550593 - DNA, 25 bp, Homo sapien
cttggccgcaggtagctacggtgct

SEQ ID NO: 4550594 - DNA, 25 bp, Homo sapien
gaaaccctcttcgtttgttgatcta

SEQ ID NO: 4550595 - DNA, 25 bp, Homo sapien
cacatgttgaacagtagctgagttg

SEQ ID NO: 4550596 - DNA, 25 bp, Homo sapien
ttaacgagaaaggtctgatcacaca

SEQ ID NO: 4550597 - DNA, 25 bp, Homo sapien
tgttgagacttcttgaaaactggtc

SEQ ID NO: 4550598 - DNA, 25 bp, Homo sapien
tctcagagctcgttgtttgaaacat

SEQ ID NO: 4550599 - DNA, 25 bp, Homo sapien
gaccgaggggttatgttgccattgc

SEQ ID NO: 4550600 - DNA, 25 bp, Homo sapien
cagtgtggccctgtcaatttggtag

SEQ ID NO: 4550601 - DNA, 25 bp, Homo sapien
gagatgaggacaaagcggttaaggg

SEQ ID NO: 4550602 - DNA, 25 bp, Homo sapien
gtgtggccctgtcaatttggtaggt

SEQ ID NO: 4550603 - DNA, 25 bp, Homo sapien
tgggagccacagagcagatggtgag

SEQ ID NO: 4550604 - DNA, 25 bp, Homo sapien
cttccagagtcagcactgggagcca

SEQ ID NO: 4550605 - DNA, 25 bp, Homo sapien
gccacagagcagatggtgagaggtg

SEQ ID NO: 4550606 - DNA, 25 bp, Homo sapien
ttccagagtcagcactgggagccac

SEQ ID NO: 4550607 - DNA, 25 bp, Homo sapien
gggctcacaggcctacagaggaaat

SEQ ID NO: 4550608 - DNA, 25 bp, Homo sapien
ggggctcacaggcctacagaggaaa

SEQ ID NO: 4550609 - DNA, 25 bp, Homo sapien
tggggctcacaggcctacagaggaa

SEQ ID NO: 4550610 - DNA, 25 bp, Homo sapien
cagaacagatcaagaggcacgtgga

SEQ ID NO: 4550611 - DNA, 25 bp, Homo sapien
tgtgccgggacaaggaatagccagt

SEQ ID NO: 4550612 - DNA, 25 bp, Homo sapien
gaatagcactggatccacaggccag

SEQ ID NO: 4550613 - DNA, 25 bp, Homo sapien
gatttctcaaaagtagggtccgaca

SEQ ID NO: 4550614 - DNA, 25 bp, Homo sapien
gaatcctcccggctatttaggagag

SEQ ID NO: 4550615 - DNA, 25 bp, Homo sapien
gaaagcctagcttgaaactgctggg

SEQ ID NO: 4550616 - DNA, 25 bp, Homo sapien
atcagctgtgatgaatcctcccggc

SEQ ID NO: 4550617 - DNA, 25 bp, Homo sapien
tgaaagagatatttggtatccaaca

SEQ ID NO: 4550618 - DNA, 25 bp, Homo sapien
gcacaattccaaagtctatccaggg

SEQ ID NO: 4550619 - DNA, 25 bp, Homo sapien
tatctctagtggagagctccttgca

SEQ ID NO: 4550620 - DNA, 25 bp, Homo sapien
aatttcccatgggatgagttgacca

SEQ ID NO: 4550621 - DNA, 25 bp, Homo sapien
tttactgctacctgaaagtcaaggc

SEQ ID NO: 4550622 - DNA, 25 bp, Homo sapien
ctgtactttgcgaacaaaggatgga

SEQ ID NO: 4550623 - DNA, 25 bp, Homo sapien
tactttgcgaacaaaggatggagtc

SEQ ID NO: 4550624 - DNA, 25 bp, Homo sapien
ttgcgaacaaaggatggagtcactc

SEQ ID NO: 4550625 - DNA, 25 bp, Homo sapien
ctttgcgaacaaaggatggagtcac

SEQ ID NO: 4550626 - DNA, 25 bp, Homo sapien
ttattagataaaagggtgggccatg

SEQ ID NO: 4550627 - DNA, 25 bp, Homo sapien
taagacctagtgttagtatttaata

SEQ ID NO: 4550628 - DNA, 25 bp, Homo sapien
atttctatgtttttaagacctagtg

SEQ ID NO: 4550629 - DNA, 25 bp, Homo sapien
ctcgcccagcccatttctatgtttt

SEQ ID NO: 4550630 - DNA, 25 bp, Homo sapien
ttaagccattcttctaagtagctga

SEQ ID NO: 4550631 - DNA, 25 bp, Homo sapien
cagcagacagtgaggtgcagcgttc

SEQ ID NO: 4550632 - DNA, 25 bp, Homo sapien
tgagagaggggctccaaagtttcct

SEQ ID NO: 4550633 - DNA, 25 bp, Homo sapien
gcagcgttcgtagatctccttggca

SEQ ID NO: 4550634 - DNA, 25 bp, Homo sapien
tcaattaagagatagtagacacacc

SEQ ID NO: 4550635 - DNA, 25 bp, Homo sapien
cagtgttaattcaaatagtggctca

SEQ ID NO: 4550636 - DNA, 25 bp, Homo sapien
tgtggatccaacctagctctttacc

SEQ ID NO: 4550637 - DNA, 25 bp, Homo sapien
cagggtccatggtgtctcaattaag

SEQ ID NO: 4550638 - DNA, 25 bp, Homo sapien
gacttcaagagcatcctttctgcag

SEQ ID NO: 4550639 - DNA, 25 bp, Homo sapien
ggctcctagggtgactcgaatatcc

SEQ ID NO: 4550640 - DNA, 25 bp, Homo sapien
tgagtgcatgaccaccctagagggc

SEQ ID NO: 4550641 - DNA, 25 bp, Homo sapien
ggttaaagcggctaggccagtccat

SEQ ID NO: 4550642 - DNA, 25 bp, Homo sapien
tcgtctatgctagaggagcgcttcc

SEQ ID NO: 4550643 - DNA, 25 bp, Homo sapien
agtagctcagctgttgcaggacgga

SEQ ID NO: 4550644 - DNA, 25 bp, Homo sapien
aagaggctgttcagcgtgaccgccc

SEQ ID NO: 4550645 - DNA, 25 bp, Homo sapien
catggtgtagccgtccgtgtcgtct

SEQ ID NO: 4550646 - DNA, 25 bp, Homo sapien
caagcaattcttattctgctgtgga

SEQ ID NO: 4550647 - DNA, 25 bp, Homo sapien
gaaaggtcaaaattgttcaagcaat

SEQ ID NO: 4550648 - DNA, 25 bp, Homo sapien
tattatcggttggatattcttttcc

SEQ ID NO: 4550649 - DNA, 25 bp, Homo sapien
tgatatattcgtatagccacatcac

SEQ ID NO: 4550650 - DNA, 25 bp, Homo sapien
ggcaattgagaaaatgacaagtgtt

SEQ ID NO: 4550651 - DNA, 25 bp, Homo sapien
gcaattgagaaaatgacaagtgttg

SEQ ID NO: 4550652 - DNA, 25 bp, Homo sapien
caattgagaaaatgacaagtgttgg

SEQ ID NO: 4550653 - DNA, 25 bp, Homo sapien
tactgcttcaggcaattgagaaaat

SEQ ID NO: 4550654 - DNA, 25 bp, Homo sapien
tctggtcattcccatagatgtgata

SEQ ID NO: 4550655 - DNA, 25 bp, Homo sapien
cattcccatagatgtgataccaggg

SEQ ID NO: 4550656 - DNA, 25 bp, Homo sapien
gatgtgataccaggggccaatgtca

SEQ ID NO: 4550657 - DNA, 25 bp, Homo sapien
tgggcatctggtcattcccatagat

SEQ ID NO: 4550658 - DNA, 25 bp, Homo sapien
gacttcagcatgttggcatcattca

SEQ ID NO: 4550659 - DNA, 25 bp, Homo sapien
cctgcttgatgccattaatggtgct

SEQ ID NO: 4550660 - DNA, 25 bp, Homo sapien
catgaacaggatatgagccggcagc

SEQ ID NO: 4550661 - DNA, 25 bp, Homo sapien
cattcagagagtctgcgtagcgcac

SEQ ID NO: 4550662 - DNA, 25 bp, Homo sapien
gaaagaaactccattccatgcaccc

SEQ ID NO: 4550663 - DNA, 25 bp, Homo sapien
tactccaagcgctttgatgaggatg

SEQ ID NO: 4550664 - DNA, 25 bp, Homo sapien
gatgaggatggcgtacagtgtccac

SEQ ID NO: 4550665 - DNA, 25 bp, Homo sapien
tttcagacccccattgtaagaaaga

SEQ ID NO: 4550666 - DNA, 25 bp, Homo sapien
tctcttgtattgcagcattccaagg

SEQ ID NO: 4550667 - DNA, 25 bp, Homo sapien
ttccaaggtactccttgggtcctga

SEQ ID NO: 4550668 - DNA, 25 bp, Homo sapien
aatgaggttctgaatgagcttggcc

SEQ ID NO: 4550669 - DNA, 25 bp, Homo sapien
gcttggcctcgtcttctctcttgta

SEQ ID NO: 4550670 - DNA, 25 bp, Homo sapien
gtacatcagtgagtacagctgctgc

SEQ ID NO: 4550671 - DNA, 25 bp, Homo sapien
agcagctttcacaggtctcacaatg

SEQ ID NO: 4550672 - DNA, 25 bp, Homo sapien
tcctaccccattctggctggtttgc

SEQ ID NO: 4550673 - DNA, 25 bp, Homo sapien
gctggtttgcacgtaaatgtctgtg

SEQ ID NO: 4550674 - DNA, 25 bp, Homo sapien
cactctgtctttcatgtctaattct

SEQ ID NO: 4550675 - DNA, 25 bp, Homo sapien
agtgtcttgacttgatcttgtagct

SEQ ID NO: 4550676 - DNA, 25 bp, Homo sapien
tcactctgtctttcatgtctaattc

SEQ ID NO: 4550677 - DNA, 25 bp, Homo sapien
ttagtgtcttgacttgatcttgtag

SEQ ID NO: 4550678 - DNA, 25 bp, Homo sapien
tattgaccttagaagtggcggtgtc

SEQ ID NO: 4550679 - DNA, 25 bp, Homo sapien
gctgtttctactctgtgcggccacc

SEQ ID NO: 4550680 - DNA, 25 bp, Homo sapien
ccctggctagacatgttaggaactc

SEQ ID NO: 4550681 - DNA, 25 bp, Homo sapien
tattacataggagtgcccatcatag

SEQ ID NO: 4550682 - DNA, 25 bp, Homo sapien
tttcttcaagtggtcactggcctcc

SEQ ID NO: 4550683 - DNA, 25 bp, Homo sapien
tatttcattttgggcttccaaggcc

SEQ ID NO: 4550684 - DNA, 25 bp, Homo sapien
aaagtgagccgggatgcttcctgcc

SEQ ID NO: 4550685 - DNA, 25 bp, Homo sapien
gcttcctgccggaagttacacttga

SEQ ID NO: 4550686 - DNA, 25 bp, Homo sapien
cctcttgactgcgatgtaactgatt

SEQ ID NO: 4550687 - DNA, 25 bp, Homo sapien
tcctcctcttgactgcgatgtaact

SEQ ID NO: 4550688 - DNA, 25 bp, Homo sapien
gtaactgattagacaattcttctag

SEQ ID NO: 4550689 - DNA, 25 bp, Homo sapien
gactgcgatgtaactgattagacaa

SEQ ID NO: 4550690 - DNA, 25 bp, Homo sapien
gcttgttcattcaggcggatttcaa

SEQ ID NO: 4550691 - DNA, 25 bp, Homo sapien
tcattcaggcggatttcaagatctt

SEQ ID NO: 4550692 - DNA, 25 bp, Homo sapien
ttcattcaggcggatttcaagatct

SEQ ID NO: 4550693 - DNA, 25 bp, Homo sapien
tcagcttgttcattcaggcggattt

SEQ ID NO: 4550694 - DNA, 25 bp, Homo sapien
ttctctgaataacttctgcaggtgg

SEQ ID NO: 4550695 - DNA, 25 bp, Homo sapien
tagcctggtaacttcatgacggatg

SEQ ID NO: 4550696 - DNA, 25 bp, Homo sapien
catgttctctgatgttagcctggta

SEQ ID NO: 4550697 - DNA, 25 bp, Homo sapien
tgatttcttgactgagatgcaccac

SEQ ID NO: 4550698 - DNA, 25 bp, Homo sapien
ttaaatgttccagatcttccacaga

SEQ ID NO: 4550699 - DNA, 25 bp, Homo sapien
aagttctccatcctcatttaaatgt

SEQ ID NO: 4550700 - DNA, 25 bp, Homo sapien
atttaaatgttccagatcttccaca

SEQ ID NO: 4550701 - DNA, 25 bp, Homo sapien
ctttagtccttcataagcaaaccaa

SEQ ID NO: 4550702 - DNA, 25 bp, Homo sapien
aatgtcatagctttcgagaagttgt

SEQ ID NO: 4550703 - DNA, 25 bp, Homo sapien
catagctttcgagaagttgtttggt

SEQ ID NO: 4550704 - DNA, 25 bp, Homo sapien
gtcatagctttcgagaagttgtttg

SEQ ID NO: 4550705 - DNA, 25 bp, Homo sapien
tagctttcgagaagttgtttggtga

SEQ ID NO: 4550706 - DNA, 25 bp, Homo sapien
catttcccgtttttgtgactgcaca

SEQ ID NO: 4550707 - DNA, 25 bp, Homo sapien
gtttctccacatctatcttctgtgc

SEQ ID NO: 4550708 - DNA, 25 bp, Homo sapien
tgtgcctgaagtagttctatctctt

SEQ ID NO: 4550709 - DNA, 25 bp, Homo sapien
tctctttttcgaactcagagattgt

SEQ ID NO: 4550710 - DNA, 25 bp, Homo sapien
catccttgagagctttaatttcttc

SEQ ID NO: 4550711 - DNA, 25 bp, Homo sapien
gaatctgcttctcatagtcttgtgt

SEQ ID NO: 4550712 - DNA, 25 bp, Homo sapien
caagccatcagaagtgacgtgctcc

SEQ ID NO: 4550713 - DNA, 25 bp, Homo sapien
acttccgccttcaagccatcagaag

SEQ ID NO: 4550714 - DNA, 25 bp, Homo sapien
tgacagttccagcaggtaatggcct

SEQ ID NO: 4550715 - DNA, 25 bp, Homo sapien
tttacagtgatcacgcacagggcac

SEQ ID NO: 4550716 - DNA, 25 bp, Homo sapien
tccttcagcgaataccttggcgtgc

SEQ ID NO: 4550717 - DNA, 25 bp, Homo sapien
gcaaatccacgtgcccaaaagtgca

SEQ ID NO: 4550718 - DNA, 25 bp, Homo sapien
tgcacataacctcttttttctacag

SEQ ID NO: 4550719 - DNA, 25 bp, Homo sapien
aaaaaactgcagtgctcccaagaga

SEQ ID NO: 4550720 - DNA, 25 bp, Homo sapien
cagatattaacgaactttgtttcca

SEQ ID NO: 4550721 - DNA, 25 bp, Homo sapien
gctcccaagagaccagtaaaatgcc

SEQ ID NO: 4550722 - DNA, 25 bp, Homo sapien
ccagttaggattgcaaacagcccaa

SEQ ID NO: 4550723 - DNA, 25 bp, Homo sapien
tgagtgctaatgaggaggcagaaca

SEQ ID NO: 4550724 - DNA, 25 bp, Homo sapien
gagttttaatcccttcactggcctg

SEQ ID NO: 4550725 - DNA, 25 bp, Homo sapien
ggctgaccagggactaaaccaagct

SEQ ID NO: 4550726 - DNA, 25 bp, Homo sapien
cttccttttgtacatcatcaaagag

SEQ ID NO: 4550727 - DNA, 25 bp, Homo sapien
ttccttttgtacatcatcaaagagc

SEQ ID NO: 4550728 - DNA, 25 bp, Homo sapien
tccttttgtacatcatcaaagagct

SEQ ID NO: 4550729 - DNA, 25 bp, Homo sapien
cgttcttccttttgtacatcatcaa

SEQ ID NO: 4550730 - DNA, 25 bp, Homo sapien
gggaggcgcacaggataatcagttt

SEQ ID NO: 4550731 - DNA, 25 bp, Homo sapien
cagcatttgatagcatccctgggtc

SEQ ID NO: 4550732 - DNA, 25 bp, Homo sapien
tgcttcagaacgttgtaaggcagcc

SEQ ID NO: 4550733 - DNA, 25 bp, Homo sapien
gcaccgtcgatagcaattctccaaa

SEQ ID NO: 4550734 - DNA, 25 bp, Homo sapien
gaagtgatacctactggttccaggg

SEQ ID NO: 4550735 - DNA, 25 bp, Homo sapien
gctagaggtgcgtgtagaatcccca

SEQ ID NO: 4550736 - DNA, 25 bp, Homo sapien
tccctaggcaagatcactgagagtg

SEQ ID NO: 4550737 - DNA, 25 bp, Homo sapien
tcattcagggcaggacagtagcaga

SEQ ID NO: 4550738 - DNA, 25 bp, Homo sapien
ttccagttctgaattatgcttctga

SEQ ID NO: 4550739 - DNA, 25 bp, Homo sapien
cagttctgaattatgcttctgaagc

SEQ ID NO: 4550740 - DNA, 25 bp, Homo sapien
tgtgtttccagttctgaattatgct

SEQ ID NO: 4550741 - DNA, 25 bp, Homo sapien
tctgtgtttccagttctgaattatg

SEQ ID NO: 4550742 - DNA, 25 bp, Homo sapien
cttttgcagggactcaccataggca

SEQ ID NO: 4550743 - DNA, 25 bp, Homo sapien
cagcagagtggatgataataaagat

SEQ ID NO: 4550744 - DNA, 25 bp, Homo sapien
tagaacacactagctcacacttttg

SEQ ID NO: 4550745 - DNA, 25 bp, Homo sapien
taaagatcaccttcttagaacacac

SEQ ID NO: 4550746 - DNA, 25 bp, Homo sapien
cctagctttgcatcgctgttcaggg

SEQ ID NO: 4550747 - DNA, 25 bp, Homo sapien
agctttgcatcgctgttcaggggaa

SEQ ID NO: 4550748 - DNA, 25 bp, Homo sapien
ctagctttgcatcgctgttcagggg

SEQ ID NO: 4550749 - DNA, 25 bp, Homo sapien
gctttgcatcgctgttcaggggaag

SEQ ID NO: 4550750 - DNA, 25 bp, Homo sapien
taaggacaagtgataggagaccaag

SEQ ID NO: 4550751 - DNA, 25 bp, Homo sapien
acaagtgataggagaccaaggtcat

SEQ ID NO: 4550752 - DNA, 25 bp, Homo sapien
cttaaggacaagtgataggagacca

SEQ ID NO: 4550753 - DNA, 25 bp, Homo sapien
aggacaagtgataggagaccaaggt

SEQ ID NO: 4550754 - DNA, 25 bp, Homo sapien
ccttctcctcgtaatttcgcctgtg

SEQ ID NO: 4550755 - DNA, 25 bp, Homo sapien
atccccagctcgaagagcagccagg

SEQ ID NO: 4550756 - DNA, 25 bp, Homo sapien
tcgtaatttcgcctgtgagtggctg

SEQ ID NO: 4550757 - DNA, 25 bp, Homo sapien
tcttccacagcatccctgtatctct

SEQ ID NO: 4550758 - DNA, 25 bp, Homo sapien
ggatcacagccttatgttcctccag

SEQ ID NO: 4550759 - DNA, 25 bp, Homo sapien
cacgcccgtgcgtatttctgtagga

SEQ ID NO: 4550760 - DNA, 25 bp, Homo sapien
tttctgcaaacgctggaccctgtaa

SEQ ID NO: 4550761 - DNA, 25 bp, Homo sapien
cgaatcgtcggatactctggaatct

SEQ ID NO: 4550762 - DNA, 25 bp, Homo sapien
atacttgtcatattcaacatcaaaa

SEQ ID NO: 4550763 - DNA, 25 bp, Homo sapien
aaagatacttgtcatattcaacatc

SEQ ID NO: 4550764 - DNA, 25 bp, Homo sapien
aaaacagttgcactagggccaggcc

SEQ ID NO: 4550765 - DNA, 25 bp, Homo sapien
gatacttgtcatattcaacatcaaa

SEQ ID NO: 4550766 - DNA, 25 bp, Homo sapien
ggtgtatatcctgtctgttaggtgc

SEQ ID NO: 4550767 - DNA, 25 bp, Homo sapien
tgtctgttaggtgcacattattggc

SEQ ID NO: 4550768 - DNA, 25 bp, Homo sapien
ttaggtgcacattattggcttaaaa

SEQ ID NO: 4550769 - DNA, 25 bp, Homo sapien
ggtctgttaggtgtatatcctgtct

SEQ ID NO: 4550770 - DNA, 25 bp, Homo sapien
gatggtggccatgcgaatcaactga

SEQ ID NO: 4550771 - DNA, 25 bp, Homo sapien
tacaggctgcgaacaagatacccgc

SEQ ID NO: 4550772 - DNA, 25 bp, Homo sapien
tgccaggaatcctcggctgtaggcc

SEQ ID NO: 4550773 - DNA, 25 bp, Homo sapien
tacccgcggcagtgcttctgaatga

SEQ ID NO: 4550774 - DNA, 25 bp, Homo sapien
ctggaagtcccggaatgaccgtggt

SEQ ID NO: 4550775 - DNA, 25 bp, Homo sapien
agagaaacacaaagtttatctaggg

SEQ ID NO: 4550776 - DNA, 25 bp, Homo sapien
ccagcaggtacaccaaagccctgga

SEQ ID NO: 4550777 - DNA, 25 bp, Homo sapien
gggcaccctggtcttgtgctttcca

SEQ ID NO: 4550778 - DNA, 25 bp, Homo sapien
gggccctgggtgtcggctcaccaca

SEQ ID NO: 4550779 - DNA, 25 bp, Homo sapien
cagggccctgggtgtcggctcacca

SEQ ID NO: 4550780 - DNA, 25 bp, Homo sapien
cctgggtgtcggctcaccacacaga

SEQ ID NO: 4550781 - DNA, 25 bp, Homo sapien
tgggtgtcggctcaccacacagaca

SEQ ID NO: 4550782 - DNA, 25 bp, Homo sapien
acaaaggggacccatgcacgtctgc

SEQ ID NO: 4550783 - DNA, 25 bp, Homo sapien
gaccacaaaggggacccatgcacgt

SEQ ID NO: 4550784 - DNA, 25 bp, Homo sapien
aaaggggacccatgcacgtctgcac

SEQ ID NO: 4550785 - DNA, 25 bp, Homo sapien
ccacaaaggggacccatgcacgtct

SEQ ID NO: 4550786 - DNA, 25 bp, Homo sapien
agaaaggtcccttgtccttgatgag

SEQ ID NO: 4550787 - DNA, 25 bp, Homo sapien
gagatgatcagcacagaaagcccca

SEQ ID NO: 4550788 - DNA, 25 bp, Homo sapien
gttccacatgtgttccttgattcca

SEQ ID NO: 4550789 - DNA, 25 bp, Homo sapien
catgtgttccttgattccaacatac

SEQ ID NO: 4550790 - DNA, 25 bp, Homo sapien
tactgctggattatcagggcggctc

SEQ ID NO: 4550791 - DNA, 25 bp, Homo sapien
ggcggctcgtctctctcggaggaat

SEQ ID NO: 4550792 - DNA, 25 bp, Homo sapien
tgctgaccccggaagtactgctgga

SEQ ID NO: 4550793 - DNA, 25 bp, Homo sapien
gagccagccacgcatgtgcttttgt

SEQ ID NO: 4550794 - DNA, 25 bp, Homo sapien
tgtcaatccacacaaggcaccatgc

SEQ ID NO: 4550795 - DNA, 25 bp, Homo sapien
tataagcctggtccacagaggactg

SEQ ID NO: 4550796 - DNA, 25 bp, Homo sapien
agcccatgtggcttggtgacaaccc

SEQ ID NO: 4550797 - DNA, 25 bp, Homo sapien
tcgctgcagcaatgatgtcaatcca

SEQ ID NO: 4550798 - DNA, 25 bp, Homo sapien
ggtcatgagaatgccgtagcgactg

SEQ ID NO: 4550799 - DNA, 25 bp, Homo sapien
gaatgccgtagcgactgtagaactc

SEQ ID NO: 4550800 - DNA, 25 bp, Homo sapien
tggatgagtctgtgtaaaaccacct

SEQ ID NO: 4550801 - DNA, 25 bp, Homo sapien
gcgactgtagaactcgatgtatgtc

SEQ ID NO: 4550802 - DNA, 25 bp, Homo sapien
tagctctgtgcactaatgcgaatcg

SEQ ID NO: 4550803 - DNA, 25 bp, Homo sapien
ggctcgcagctgctgaacaattctt

SEQ ID NO: 4550804 - DNA, 25 bp, Homo sapien
tcgtttctaaaacgccgcaggctcg

SEQ ID NO: 4550805 - DNA, 25 bp, Homo sapien
ctggaagggtagctctgtgcactaa

SEQ ID NO: 4550806 - DNA, 25 bp, Homo sapien
ctcatcatttggcttgatgcatcga

SEQ ID NO: 4550807 - DNA, 25 bp, Homo sapien
catgagcaagtacagagagctgcgg

SEQ ID NO: 4550808 - DNA, 25 bp, Homo sapien
catttggcttgatgcatcgaacgta

SEQ ID NO: 4550809 - DNA, 25 bp, Homo sapien
gcgtcgtcgcattgagggtctccat

SEQ ID NO: 4550810 - DNA, 25 bp, Homo sapien
gatttaactgtaatcattgaaccaa

SEQ ID NO: 4550811 - DNA, 25 bp, Homo sapien
gctttgcagatttaactgtaatcat

SEQ ID NO: 4550812 - DNA, 25 bp, Homo sapien
aactgtggtccggaaatgcttgctg

SEQ ID NO: 4550813 - DNA, 25 bp, Homo sapien
gaaggaggagttggattttcttgaa

SEQ ID NO: 4550814 - DNA, 25 bp, Homo sapien
ttgcttgctctcaggatttcaacca

SEQ ID NO: 4550815 - DNA, 25 bp, Homo sapien
cttgcttgctctcaggatttcaacc

SEQ ID NO: 4550816 - DNA, 25 bp, Homo sapien
acacctgacttaggtctccctttgc

SEQ ID NO: 4550817 - DNA, 25 bp, Homo sapien
tgctccctgcggtatgtgcagttcc

SEQ ID NO: 4550818 - DNA, 25 bp, Homo sapien
gggtccagttgctccctgcggtatg

SEQ ID NO: 4550819 - DNA, 25 bp, Homo sapien
tgtgcagttcctacaagaacacctg

SEQ ID NO: 4550820 - DNA, 25 bp, Homo sapien
aatggtggtgtgagccactaggaca

SEQ ID NO: 4550821 - DNA, 25 bp, Homo sapien
gattgttgtacaaattcttccagaa

SEQ ID NO: 4550822 - DNA, 25 bp, Homo sapien
ctttcctggtctgggcgagcatctg

SEQ ID NO: 4550823 - DNA, 25 bp, Homo sapien
gatagacaaaggtggcaaatacaga

SEQ ID NO: 4550824 - DNA, 25 bp, Homo sapien
tcgggaatgaccagctctgactcac

SEQ ID NO: 4550825 - DNA, 25 bp, Homo sapien
ttttacagtactctgctagcacaca

SEQ ID NO: 4550826 - DNA, 25 bp, Homo sapien
actctgctagcacacaaaggtgatc

SEQ ID NO: 4550827 - DNA, 25 bp, Homo sapien
tcagtcactcgggaatgaccagctc

SEQ ID NO: 4550828 - DNA, 25 bp, Homo sapien
gcacaagccattcctgtgagccctg

SEQ ID NO: 4550829 - DNA, 25 bp, Homo sapien
gataaacatagacaagcacaagcca

SEQ ID NO: 4550830 - DNA, 25 bp, Homo sapien
caaggcaacacccaaccaggacatg

SEQ ID NO: 4550831 - DNA, 25 bp, Homo sapien
gcaccggcctctgcgataaacatag

SEQ ID NO: 4550832 - DNA, 25 bp, Homo sapien
tacatccaaaatcagaagtgtggtc

SEQ ID NO: 4550833 - DNA, 25 bp, Homo sapien
tcagaaacattcctggcctgcctac

SEQ ID NO: 4550834 - DNA, 25 bp, Homo sapien
gacagcattgatggagaccttcacg

SEQ ID NO: 4550835 - DNA, 25 bp, Homo sapien
cagttggaactcatgtatctcgcca

SEQ ID NO: 4550836 - DNA, 25 bp, Homo sapien
ttgaagccagttttcatcagttcca

SEQ ID NO: 4550837 - DNA, 25 bp, Homo sapien
tttgaagccagttttcatcagttcc

SEQ ID NO: 4550838 - DNA, 25 bp, Homo sapien
gcacctgaatagagagtcctcccct

SEQ ID NO: 4550839 - DNA, 25 bp, Homo sapien
tagtgtgggttccattacacgaaca

SEQ ID NO: 4550840 - DNA, 25 bp, Homo sapien
gaaataagggcatacctccttgtac

SEQ ID NO: 4550841 - DNA, 25 bp, Homo sapien
gaatgggaaaagactggcacctgaa

SEQ ID NO: 4550842 - DNA, 25 bp, Homo sapien
gtcataaaaatctatcagcgtccaa

SEQ ID NO: 4550843 - DNA, 25 bp, Homo sapien
caggtcaataactggttgattgtca

SEQ ID NO: 4550844 - DNA, 25 bp, Homo sapien
tatcagcgtccaaggtatatcttcc

SEQ ID NO: 4550845 - DNA, 25 bp, Homo sapien
tccagtaactccagaattcccattt

SEQ ID NO: 4550846 - DNA, 25 bp, Homo sapien
ttcttcttgttccagtttgaagaca

SEQ ID NO: 4550847 - DNA, 25 bp, Homo sapien
gtattcttcttgttccagtttgaag

SEQ ID NO: 4550848 - DNA, 25 bp, Homo sapien
tattcttcttgttccagtttgaaga

SEQ ID NO: 4550849 - DNA, 25 bp, Homo sapien
cttcttgttccagtttgaagacatg

SEQ ID NO: 4550850 - DNA, 25 bp, Homo sapien
ttcattagcgtaattgatgcaaaat

SEQ ID NO: 4550851 - DNA, 25 bp, Homo sapien
agtttttcattagcgtaattgatgc

SEQ ID NO: 4550852 - DNA, 25 bp, Homo sapien
tttttcattagcgtaattgatgcaa

SEQ ID NO: 4550853 - DNA, 25 bp, Homo sapien
gcagtttttcattagcgtaattgat

SEQ ID NO: 4550854 - DNA, 25 bp, Homo sapien
cttaaaagcttaaacgtttgctatg

SEQ ID NO: 4550855 - DNA, 25 bp, Homo sapien
taaaagcttaaacgtttgctatgtc

SEQ ID NO: 4550856 - DNA, 25 bp, Homo sapien
cttaaacgtttgctatgtcttctac

SEQ ID NO: 4550857 - DNA, 25 bp, Homo sapien
aagcttaaacgtttgctatgtcttc

SEQ ID NO: 4550858 - DNA, 25 bp, Homo sapien
gcagagaatgttatctttctaatca

SEQ ID NO: 4550859 - DNA, 25 bp, Homo sapien
aaagacaggctcactgaagagaatc

SEQ ID NO: 4550860 - DNA, 25 bp, Homo sapien
tacaaaagaaccagaacaaaatgat

SEQ ID NO: 4550861 - DNA, 25 bp, Homo sapien
tgatctaaaaaccatgcggctctca

SEQ ID NO: 4550862 - DNA, 25 bp, Homo sapien
ccataaatgtccaaaacaccaataa

SEQ ID NO: 4550863 - DNA, 25 bp, Homo sapien
caaaacaccaataaaagtgtgctgc

SEQ ID NO: 4550864 - DNA, 25 bp, Homo sapien
acaccaataaaagtgtgctgcttgc

SEQ ID NO: 4550865 - DNA, 25 bp, Homo sapien
gtccaaaacaccaataaaagtgtgc

SEQ ID NO: 4550866 - DNA, 25 bp, Homo sapien
gattttgcgattgcacagccactga

SEQ ID NO: 4550867 - DNA, 25 bp, Homo sapien
tgcatccctggcgttgacagcctga

SEQ ID NO: 4550868 - DNA, 25 bp, Homo sapien
cacaatgaagtcgaacaggtgagca

SEQ ID NO: 4550869 - DNA, 25 bp, Homo sapien
ggagctcacagaacaccttcaggtg

SEQ ID NO: 4550870 - DNA, 25 bp, Homo sapien
actaactgaggacctctcgttgccc

SEQ ID NO: 4550871 - DNA, 25 bp, Homo sapien
taactgaggacctctcgttgcccac

SEQ ID NO: 4550872 - DNA, 25 bp, Homo sapien
ctaactgaggacctctcgttgccca

SEQ ID NO: 4550873 - DNA, 25 bp, Homo sapien
ctgcacattgcccagatgtaggatg

SEQ ID NO: 4550874 - DNA, 25 bp, Homo sapien
gcacattgcccagatgtaggatggc

SEQ ID NO: 4550875 - DNA, 25 bp, Homo sapien
aacgtccatctgaaaatcctccttg

SEQ ID NO: 4550876 - DNA, 25 bp, Homo sapien
ccaggattttaaaaacgtccatctg

SEQ ID NO: 4550877 - DNA, 25 bp, Homo sapien
tggtataaaccaaggcgatggcctt

SEQ ID NO: 4550878 - DNA, 25 bp, Homo sapien
gagggattccgtttgcccctccaga

SEQ ID NO: 4550879 - DNA, 25 bp, Homo sapien
gctgcatggcctgactgacagaagg

SEQ ID NO: 4550880 - DNA, 25 bp, Homo sapien
ggagaaggttccgagtgcgtcctcc

SEQ ID NO: 4550881 - DNA, 25 bp, Homo sapien
tccagctgagtccaggcacttgctg

SEQ ID NO: 4550882 - DNA, 25 bp, Homo sapien
gcccagagtctcctctactacaaag

SEQ ID NO: 4550883 - DNA, 25 bp, Homo sapien
catttggaggtaactcctccatccg

SEQ ID NO: 4550884 - DNA, 25 bp, Homo sapien
ccatccgaaggacagatgtgtccaa

SEQ ID NO: 4550885 - DNA, 25 bp, Homo sapien
gagtctctaccatttcagctcgatc

SEQ ID NO: 4550886 - DNA, 25 bp, Homo sapien
agctcgatcattcacaccctcaatg

SEQ ID NO: 4550887 - DNA, 25 bp, Homo sapien
gcgtgaaggtcttttgagtctctac

SEQ ID NO: 4550888 - DNA, 25 bp, Homo sapien
ctcaatgacagtattgcctcccatt

SEQ ID NO: 4550889 - DNA, 25 bp, Homo sapien
atttaagatgtttaaattccgactg

SEQ ID NO: 4550890 - DNA, 25 bp, Homo sapien
taagatgtttaaattccgactgctg

SEQ ID NO: 4550891 - DNA, 25 bp, Homo sapien
agatgtttaaattccgactgctgtg

SEQ ID NO: 4550892 - DNA, 25 bp, Homo sapien
gatgtttaaattccgactgctgtgc

SEQ ID NO: 4550893 - DNA, 25 bp, Homo sapien
ccgactactattgtcattgcgggtg

SEQ ID NO: 4550894 - DNA, 25 bp, Homo sapien
tttcccaaaccgactactattgtca

SEQ ID NO: 4550895 - DNA, 25 bp, Homo sapien
cccaaaccgactactattgtcattg

SEQ ID NO: 4550896 - DNA, 25 bp, Homo sapien
aaccgactactattgtcattgcggg

SEQ ID NO: 4550897 - DNA, 25 bp, Homo sapien
gacggtggcaaagtacctcatggca

SEQ ID NO: 4550898 - DNA, 25 bp, Homo sapien
cgtgagcgttgctgcccgatttgct

SEQ ID NO: 4550899 - DNA, 25 bp, Homo sapien
tcatggcatagcgagccgacactgt

SEQ ID NO: 4550900 - DNA, 25 bp, Homo sapien
cacttacaattatggactggtttct

SEQ ID NO: 4550901 - DNA, 25 bp, Homo sapien
tgttctgcccgctgtaggcgtggat

SEQ ID NO: 4550902 - DNA, 25 bp, Homo sapien
aatatgtgtgggtccatatcgccca

SEQ ID NO: 4550903 - DNA, 25 bp, Homo sapien
caactgcttgtaaggattcatggcc

SEQ ID NO: 4550904 - DNA, 25 bp, Homo sapien
gatgatggcatctccgtatattggc

SEQ ID NO: 4550905 - DNA, 25 bp, Homo sapien
caccgcgggctcgtgaagatagctg

SEQ ID NO: 4550906 - DNA, 25 bp, Homo sapien
tggattctgcaaagcggattctgag

SEQ ID NO: 4550907 - DNA, 25 bp, Homo sapien
cactgtaggtgtaaatgagtttgga

SEQ ID NO: 4550908 - DNA, 25 bp, Homo sapien
gagagccgtgaggtcattctcgccc

SEQ ID NO: 4550909 - DNA, 25 bp, Homo sapien
gtctctttaactctaaggttgttga

SEQ ID NO: 4550910 - DNA, 25 bp, Homo sapien
gctcaaagttgacacacttggtggt

SEQ ID NO: 4550911 - DNA, 25 bp, Homo sapien
aaagccatctgatccctaatcagaa

SEQ ID NO: 4550912 - DNA, 25 bp, Homo sapien
ccaaacaaagccatctgatccctaa

SEQ ID NO: 4550913 - DNA, 25 bp, Homo sapien
ctctgcagccgggtcaaggccggga

SEQ ID NO: 4550914 - DNA, 25 bp, Homo sapien
gaatgtagccacctgaagccctgca

SEQ ID NO: 4550915 - DNA, 25 bp, Homo sapien
cttcaggatcgggaatccagaccct

SEQ ID NO: 4550916 - DNA, 25 bp, Homo sapien
caactctgtagtccttggctatttc

SEQ ID NO: 4550917 - DNA, 25 bp, Homo sapien
tcagcagacttccaaacttcttcag

SEQ ID NO: 4550918 - DNA, 25 bp, Homo sapien
gatcgggaatccagaccctgttgta

SEQ ID NO: 4550919 - DNA, 25 bp, Homo sapien
tggtcaatagtggagacacagagtt

SEQ ID NO: 4550920 - DNA, 25 bp, Homo sapien
gagttcacgagctgttaccaggcaa

SEQ ID NO: 4550921 - DNA, 25 bp, Homo sapien
gacacagagttcacgagctgttacc

SEQ ID NO: 4550922 - DNA, 25 bp, Homo sapien
tgaaagctcttggtcaatagtggag

SEQ ID NO: 4550923 - DNA, 25 bp, Homo sapien
cagacaggtggagttcgtgtgccaa

SEQ ID NO: 4550924 - DNA, 25 bp, Homo sapien
tgaaagcaatgggagcctctagagg

SEQ ID NO: 4550925 - DNA, 25 bp, Homo sapien
tgattttacacctcacctggcagcg

SEQ ID NO: 4550926 - DNA, 25 bp, Homo sapien
gcagtggcaacgtgcaagcaaggca

SEQ ID NO: 4550927 - DNA, 25 bp, Homo sapien
tttctgcttctggaaatactgtcac

SEQ ID NO: 4550928 - DNA, 25 bp, Homo sapien
tgtttctgcttctggaaatactgtc

SEQ ID NO: 4550929 - DNA, 25 bp, Homo sapien
tgtgtttctgcttctggaaatactg

SEQ ID NO: 4550930 - DNA, 25 bp, Homo sapien
ctgtgtgtttctgcttctggaaata

SEQ ID NO: 4550931 - DNA, 25 bp, Homo sapien
ttggctgtctgagggctcacagtct

SEQ ID NO: 4550932 - DNA, 25 bp, Homo sapien
tctgtcctccaaagtatcgtcgaag

SEQ ID NO: 4550933 - DNA, 25 bp, Homo sapien
tcgtcgaagactagtccaagacttt

SEQ ID NO: 4550934 - DNA, 25 bp, Homo sapien
gctgaagaagcgctgttggctgtct

SEQ ID NO: 4550935 - DNA, 25 bp, Homo sapien
gcgtgtacagctcggccaccgccat

SEQ ID NO: 4550936 - DNA, 25 bp, Homo sapien
ctgcgtgtacagctcggccaccgcc

SEQ ID NO: 4550937 - DNA, 25 bp, Homo sapien
tgcgtgtacagctcggccaccgcca

SEQ ID NO: 4550938 - DNA, 25 bp, Homo sapien
ccaggccggggctgccgaacgtgcg

SEQ ID NO: 4550939 - DNA, 25 bp, Homo sapien
caggccggggctgccgaacgtgcga

SEQ ID NO: 4550940 - DNA, 25 bp, Homo sapien
ccggggctgccgaacgtgcgaggct

SEQ ID NO: 4550941 - DNA, 25 bp, Homo sapien
ggctgccgaacgtgcgaggctcggg

SEQ ID NO: 4550942 - DNA, 25 bp, Homo sapien
gaggccgggcgcaggagagaccgcc

SEQ ID NO: 4550943 - DNA, 25 bp, Homo sapien
gagaccgccgcggaaatcaccgccg

SEQ ID NO: 4550944 - DNA, 25 bp, Homo sapien
aggccgggcgcaggagagaccgccg

SEQ ID NO: 4550945 - DNA, 25 bp, Homo sapien
caggagagaccgccgcggaaatcac

SEQ ID NO: 4550946 - DNA, 25 bp, Homo sapien
cccggggcgcgctgccaggcaggaa

SEQ ID NO: 4550947 - DNA, 25 bp, Homo sapien
aacttggtacgcagcacttgctcgg

SEQ ID NO: 4550948 - DNA, 25 bp, Homo sapien
ggtggctccaataaagactctgatg

SEQ ID NO: 4550949 - DNA, 25 bp, Homo sapien
caggaaagcatatctggacccaggt

SEQ ID NO: 4550950 - DNA, 25 bp, Homo sapien
tcatccatgaacagaggtcacggca

SEQ ID NO: 4550951 - DNA, 25 bp, Homo sapien
tacatgagctgtccggagtaaaaaa

SEQ ID NO: 4550952 - DNA, 25 bp, Homo sapien
tggctccagcacttgacaggacaaa

SEQ ID NO: 4550953 - DNA, 25 bp, Homo sapien
ccagcacttgacaggacaaagacag

SEQ ID NO: 4550954 - DNA, 25 bp, Homo sapien
cctttctttcatgacgcttcagtac

SEQ ID NO: 4550955 - DNA, 25 bp, Homo sapien
tgacgcaatatccacccagggaaaa

SEQ ID NO: 4550956 - DNA, 25 bp, Homo sapien
cagaacactgtaccctgacgcaata

SEQ ID NO: 4550957 - DNA, 25 bp, Homo sapien
cacttatagaagctgcaaagcctta

SEQ ID NO: 4550958 - DNA, 25 bp, Homo sapien
gacaatcctctctagatagtgagtg

SEQ ID NO: 4550959 - DNA, 25 bp, Homo sapien
ctttaatatctctatatcatagtga

SEQ ID NO: 4550960 - DNA, 25 bp, Homo sapien
gataacacagcacgaaagagcctat

SEQ ID NO: 4550961 - DNA, 25 bp, Homo sapien
ccattctcctgtttagtgcagagga

SEQ ID NO: 4550962 - DNA, 25 bp, Homo sapien
taacaacagctcatctatggaagtt

SEQ ID NO: 4550963 - DNA, 25 bp, Homo sapien
cagtaactcactggaaataatgggt

SEQ ID NO: 4550964 - DNA, 25 bp, Homo sapien
gctggaatctggatggtttctagtg

SEQ ID NO: 4550965 - DNA, 25 bp, Homo sapien
tgcgagggaagatgggttgaaagga

SEQ ID NO: 4550966 - DNA, 25 bp, Homo sapien
aatctggatggtttctagtgcgagg

SEQ ID NO: 4550967 - DNA, 25 bp, Homo sapien
gtttagcatccatgagcagctgggg

SEQ ID NO: 4550968 - DNA, 25 bp, Homo sapien
gtacgaatgaacgacacagagactc

SEQ ID NO: 4550969 - DNA, 25 bp, Homo sapien
ctgtatagtacgaatgaacgacaca

SEQ ID NO: 4550970 - DNA, 25 bp, Homo sapien
actggagtatacaaattcaacactt

SEQ ID NO: 4550971 - DNA, 25 bp, Homo sapien
tcaaactcattaactggagtataca

SEQ ID NO: 4550972 - DNA, 25 bp, Homo sapien
tgagaggttccagggtttctttagc

SEQ ID NO: 4550973 - DNA, 25 bp, Homo sapien
ctgggcagtagttaaagcattgcac

SEQ ID NO: 4550974 - DNA, 25 bp, Homo sapien
tattcatcagattcttgtcacgcag

SEQ ID NO: 4550975 - DNA, 25 bp, Homo sapien
cattgcacatagaacaaatggcttc

SEQ ID NO: 4550976 - DNA, 25 bp, Homo sapien
catgctgacacatgaccgagtggaa

SEQ ID NO: 4550977 - DNA, 25 bp, Homo sapien
cctcatcggcgatactggaggttcg

SEQ ID NO: 4550978 - DNA, 25 bp, Homo sapien
tgtagaacatctgcttgaccacctg

SEQ ID NO: 4550979 - DNA, 25 bp, Homo sapien
gatcagttcagggtccatgccatgc

SEQ ID NO: 4550980 - DNA, 25 bp, Homo sapien
tgttctctaacacccgcacgagctg

SEQ ID NO: 4550981 - DNA, 25 bp, Homo sapien
cattctggcgagatgtgttgtgctt

SEQ ID NO: 4550982 - DNA, 25 bp, Homo sapien
agcacctgccgatactcagccaggt

SEQ ID NO: 4550983 - DNA, 25 bp, Homo sapien
tcaaaattggtgaggcagtgttcat

SEQ ID NO: 4550984 - DNA, 25 bp, Homo sapien
ttagagagccagaaggagacggttt

SEQ ID NO: 4550985 - DNA, 25 bp, Homo sapien
tgtttcaagcagtgcaaaaatcggc

SEQ ID NO: 4550986 - DNA, 25 bp, Homo sapien
gagagccagaaggagacggtttcaa

SEQ ID NO: 4550987 - DNA, 25 bp, Homo sapien
tttcaagcagtgcaaaaatcggcat

SEQ ID NO: 4550988 - DNA, 25 bp, Homo sapien
taattgttgatgttagcaacgacct

SEQ ID NO: 4550989 - DNA, 25 bp, Homo sapien
tgttaattgttgatgttagcaacga

SEQ ID NO: 4550990 - DNA, 25 bp, Homo sapien
ttgttgatgttagcaacgaccttac

SEQ ID NO: 4550991 - DNA, 25 bp, Homo sapien
ttaattgttgatgttagcaacgacc

SEQ ID NO: 4550992 - DNA, 25 bp, Homo sapien
atcattcaggtagtcagcatgtcga

SEQ ID NO: 4550993 - DNA, 25 bp, Homo sapien
catgaacaggatatatgccggtaat

SEQ ID NO: 4550994 - DNA, 25 bp, Homo sapien
tagtcagcatgtcgaacacacatga

SEQ ID NO: 4550995 - DNA, 25 bp, Homo sapien
acatgaacaggatatatgccggtaa

SEQ ID NO: 4550996 - DNA, 25 bp, Homo sapien
gaatcaaattgactgctacaccacg

SEQ ID NO: 4550997 - DNA, 25 bp, Homo sapien
ctggaatcaaattgactgctacacc

SEQ ID NO: 4550998 - DNA, 25 bp, Homo sapien
atcaaattgactgctacaccacgtg

SEQ ID NO: 4550999 - DNA, 25 bp, Homo sapien
tcaaattgactgctacaccacgtgg

SEQ ID NO: 4551000 - DNA, 25 bp, Homo sapien
ctagagcagttgtgctcaactgtgg

SEQ ID NO: 4551001 - DNA, 25 bp, Homo sapien
tattattacactgccgtccttgacc

SEQ ID NO: 4551002 - DNA, 25 bp, Homo sapien
tgacctatttagttgcaaacctttc

SEQ ID NO: 4551003 - DNA, 25 bp, Homo sapien
ttcaggaacctaaacggcctagagc

SEQ ID NO: 4551004 - DNA, 25 bp, Homo sapien
ggtcagaacactactgcagcactag

SEQ ID NO: 4551005 - DNA, 25 bp, Homo sapien
taatgaaacctacgctgaatatctc

SEQ ID NO: 4551006 - DNA, 25 bp, Homo sapien
caatccttgtaggtgggtctgaggc

SEQ ID NO: 4551007 - DNA, 25 bp, Homo sapien
gagaagacctgatcttgagcaatcc

SEQ ID NO: 4551008 - DNA, 25 bp, Homo sapien
cagaaggaacttttatccaatgcag

SEQ ID NO: 4551009 - DNA, 25 bp, Homo sapien
tgccagaaggaacttttatccaatg

SEQ ID NO: 4551010 - DNA, 25 bp, Homo sapien
tgtgccagaaggaacttttatccaa

SEQ ID NO: 4551011 - DNA, 25 bp, Homo sapien
catgtgccagaaggaacttttatcc

SEQ ID NO: 4551012 - DNA, 25 bp, Homo sapien
ggatgggttcatcaatgatctgtcc

SEQ ID NO: 4551013 - DNA, 25 bp, Homo sapien
aatgttgactggtcggatgggttca

SEQ ID NO: 4551014 - DNA, 25 bp, Homo sapien
caggttcttaacaagtttttgctca

SEQ ID NO: 4551015 - DNA, 25 bp, Homo sapien
atcctccttcttgtattccagcatc

SEQ ID NO: 4551016 - DNA, 25 bp, Homo sapien
agttcgtccccttcagaggatccag

SEQ ID NO: 4551017 - DNA, 25 bp, Homo sapien
taaataaagaggcaactagctaagc

SEQ ID NO: 4551018 - DNA, 25 bp, Homo sapien
catgtaagaacacagagttcgtccc

SEQ ID NO: 4551019 - DNA, 25 bp, Homo sapien
caaagggactgaggagcccaatgat

SEQ ID NO: 4551020 - DNA, 25 bp, Homo sapien
taacgtctgtctgggtaatcaggaa

SEQ ID NO: 4551021 - DNA, 25 bp, Homo sapien
tatgactctggtctcaaaggctgag

SEQ ID NO: 4551022 - DNA, 25 bp, Homo sapien
ggaggaatgaaaaccacacttggag

SEQ ID NO: 4551023 - DNA, 25 bp, Homo sapien
tatgacaagacctggcatgttggag

SEQ ID NO: 4551024 - DNA, 25 bp, Homo sapien
gtttttcaagttgttccatcaaatc

SEQ ID NO: 4551025 - DNA, 25 bp, Homo sapien
cagtttacggaccgtcttatcctgt

SEQ ID NO: 4551026 - DNA, 25 bp, Homo sapien
cctgtttttcaagttgttccatcaa

SEQ ID NO: 4551027 - DNA, 25 bp, Homo sapien
tcagtttacggaccgtcttatcctg

SEQ ID NO: 4551028 - DNA, 25 bp, Homo sapien
atatgattgatacttcttagggtca

SEQ ID NO: 4551029 - DNA, 25 bp, Homo sapien
tgattgatacttcttagggtcatct

SEQ ID NO: 4551030 - DNA, 25 bp, Homo sapien
gggaaatccgatatgattgatactt

SEQ ID NO: 4551031 - DNA, 25 bp, Homo sapien
gaaatccgatatgattgatacttct

SEQ ID NO: 4551032 - DNA, 25 bp, Homo sapien
tcggcctcattctcatggctcctct

SEQ ID NO: 4551033 - DNA, 25 bp, Homo sapien
gctgctgtcggttgttctcctcctt

SEQ ID NO: 4551034 - DNA, 25 bp, Homo sapien
ttggtcagccgggtgatctcgtgct

SEQ ID NO: 4551035 - DNA, 25 bp, Homo sapien
caggctggcctcaatgcgggcctct

SEQ ID NO: 4551036 - DNA, 25 bp, Homo sapien
attccattttgaggagacaaatata

SEQ ID NO: 4551037 - DNA, 25 bp, Homo sapien
ttccattttgaggagacaaatataa

SEQ ID NO: 4551038 - DNA, 25 bp, Homo sapien
tccattttgaggagacaaatataac

SEQ ID NO: 4551039 - DNA, 25 bp, Homo sapien
attcaactcatggtaatccagagca

SEQ ID NO: 4551040 - DNA, 25 bp, Homo sapien
cattcaactcatggtaatccagagc

SEQ ID NO: 4551041 - DNA, 25 bp, Homo sapien
tgtttctttcaaaccaatgtatgct

SEQ ID NO: 4551042 - DNA, 25 bp, Homo sapien
tccaaaagtattgtggaatctgtca

SEQ ID NO: 4551043 - DNA, 25 bp, Homo sapien
ttccaaaagtattgtggaatctgtc

SEQ ID NO: 4551044 - DNA, 25 bp, Homo sapien
gcttgtgctatttcacctttatctt

SEQ ID NO: 4551045 - DNA, 25 bp, Homo sapien
ccaggtagttgagaagaggtacctt

SEQ ID NO: 4551046 - DNA, 25 bp, Homo sapien
ctagcactctgctacaaaggtggga

SEQ ID NO: 4551047 - DNA, 25 bp, Homo sapien
ttctcctgagaaacactagcactct

SEQ ID NO: 4551048 - DNA, 25 bp, Homo sapien
agccccaacctcatgtaactgcaga

SEQ ID NO: 4551049 - DNA, 25 bp, Homo sapien
ttgggatgcttgactgccttgagtc

SEQ ID NO: 4551050 - DNA, 25 bp, Homo sapien
ggatgcttgactgccttgagtcctg

SEQ ID NO: 4551051 - DNA, 25 bp, Homo sapien
tgggatgcttgactgccttgagtcc

SEQ ID NO: 4551052 - DNA, 25 bp, Homo sapien
gatgcttgactgccttgagtcctgt

SEQ ID NO: 4551053 - DNA, 25 bp, Homo sapien
aggacttcctccttgcggacatcaa

SEQ ID NO: 4551054 - DNA, 25 bp, Homo sapien
ggccttgcgcaactcatttagctca

SEQ ID NO: 4551055 - DNA, 25 bp, Homo sapien
caccagttgagaccttaagatgagg

SEQ ID NO: 4551056 - DNA, 25 bp, Homo sapien
ttgcggacatcaagctcctcgctca

SEQ ID NO: 4551057 - DNA, 25 bp, Homo sapien
tgcacctctaatttgtggtctttct

SEQ ID NO: 4551058 - DNA, 25 bp, Homo sapien
ctgcacctctaatttgtggtctttc

SEQ ID NO: 4551059 - DNA, 25 bp, Homo sapien
catcctgcatcacctgcttctcctg

SEQ ID NO: 4551060 - DNA, 25 bp, Homo sapien
ctgctcctccttgcggtccagctca

SEQ ID NO: 4551061 - DNA, 25 bp, Homo sapien
ccagctctgtgacccgcttctggag

SEQ ID NO: 4551062 - DNA, 25 bp, Homo sapien
cttggccttgctgcggagcacctgc

SEQ ID NO: 4551063 - DNA, 25 bp, Homo sapien
gacatgtccagaggtaccttcttct

SEQ ID NO: 4551064 - DNA, 25 bp, Homo sapien
gaacaatgacatgtccagaggtacc

SEQ ID NO: 4551065 - DNA, 25 bp, Homo sapien
cttaaggaacaatgacatgtccaga

SEQ ID NO: 4551066 - DNA, 25 bp, Homo sapien
tccagaggtaccttcttctcacttg

SEQ ID NO: 4551067 - DNA, 25 bp, Homo sapien
caggaatcacaaagatggtcaagac

SEQ ID NO: 4551068 - DNA, 25 bp, Homo sapien
aggaatcacaaagatggtcaagaca

SEQ ID NO: 4551069 - DNA, 25 bp, Homo sapien
ggaatcacaaagatggtcaagacaa

SEQ ID NO: 4551070 - DNA, 25 bp, Homo sapien
ggaaatgttccttgttaacaacagc

SEQ ID NO: 4551071 - DNA, 25 bp, Homo sapien
tggagtctgctttgcaatggaaatg

SEQ ID NO: 4551072 - DNA, 25 bp, Homo sapien
gtttgtatctacaagtcacttatga

SEQ ID NO: 4551073 - DNA, 25 bp, Homo sapien
aaatactatgtttatggccaattgg

SEQ ID NO: 4551074 - DNA, 25 bp, Homo sapien
tcagtgacagatgtctaaactgtac

SEQ ID NO: 4551075 - DNA, 25 bp, Homo sapien
ttcagtgacagatgtctaaactgta

SEQ ID NO: 4551076 - DNA, 25 bp, Homo sapien
atattcagactcgttgctgctgtgg

SEQ ID NO: 4551077 - DNA, 25 bp, Homo sapien
aaagatatattcagactcgttgctg

SEQ ID NO: 4551078 - DNA, 25 bp, Homo sapien
gatatattcagactcgttgctgctg

SEQ ID NO: 4551079 - DNA, 25 bp, Homo sapien
tcttgtgtccaggcttaggcacatg

SEQ ID NO: 4551080 - DNA, 25 bp, Homo sapien
caaggcaaataacccaggtataatt

SEQ ID NO: 4551081 - DNA, 25 bp, Homo sapien
ataacccaggtataattaatgcaac

SEQ ID NO: 4551082 - DNA, 25 bp, Homo sapien
taatgcaacataattagtctaggca

SEQ ID NO: 4551083 - DNA, 25 bp, Homo sapien
ggcatagttaagacagcatccacct

SEQ ID NO: 4551084 - DNA, 25 bp, Homo sapien
gaacagttgcaaaaccaaatgccca

SEQ ID NO: 4551085 - DNA, 25 bp, Homo sapien
tcaccgcttcaaagaaaaaggtaca

SEQ ID NO: 4551086 - DNA, 25 bp, Homo sapien
taattacaaaaaggtcaccgcttca

SEQ ID NO: 4551087 - DNA, 25 bp, Homo sapien
aaggtacactggcatgacaggacaa

SEQ ID NO: 4551088 - DNA, 25 bp, Homo sapien
gcacctctgaaacgatccagaagct

SEQ ID NO: 4551089 - DNA, 25 bp, Homo sapien
ctgcaatgtgaagggaagatccaag

SEQ ID NO: 4551090 - DNA, 25 bp, Homo sapien
ccagcacctctgaaacgatccagaa

SEQ ID NO: 4551091 - DNA, 25 bp, Homo sapien
cctctgaaacgatccagaagctggg

SEQ ID NO: 4551092 - DNA, 25 bp, Homo sapien
tccagttgtttcgtttcttctacta

SEQ ID NO: 4551093 - DNA, 25 bp, Homo sapien
tcagaaggttctgatatctcagcct

SEQ ID NO: 4551094 - DNA, 25 bp, Homo sapien
catatctttcttccaggcgactgaa

SEQ ID NO: 4551095 - DNA, 25 bp, Homo sapien
catcattaaggtcgagttccagttg

SEQ ID NO: 4551096 - DNA, 25 bp, Homo sapien
ctccttagcctgctgcacgatgcgg

SEQ ID NO: 4551097 - DNA, 25 bp, Homo sapien
cgatgcggtgattgagggcttcttt

SEQ ID NO: 4551098 - DNA, 25 bp, Homo sapien
cacgatgcggtgattgagggcttct

SEQ ID NO: 4551099 - DNA, 25 bp, Homo sapien
cctgctgcacgatgcggtgattgag

SEQ ID NO: 4551100 - DNA, 25 bp, Homo sapien
tctgaacgagtttgctccaggtctt

SEQ ID NO: 4551101 - DNA, 25 bp, Homo sapien
tagtttctccacaaggcatttgtag

SEQ ID NO: 4551102 - DNA, 25 bp, Homo sapien
taagtcacttcgtagtttctcagtc

SEQ ID NO: 4551103 - DNA, 25 bp, Homo sapien
caggtctttccggagcttggcaatt

SEQ ID NO: 4551104 - DNA, 25 bp, Homo sapien
gcagcttcttatagcgctccactga

SEQ ID NO: 4551105 - DNA, 25 bp, Homo sapien
ctcttgtagtgtgtgcgggccagcc

SEQ ID NO: 4551106 - DNA, 25 bp, Homo sapien
gccccggactcgcttctgaatgatg

SEQ ID NO: 4551107 - DNA, 25 bp, Homo sapien
tcaactttgcgctgcagctgcatga

SEQ ID NO: 4551108 - DNA, 25 bp, Homo sapien
gataagggcaagcaatgtcaagacc

SEQ ID NO: 4551109 - DNA, 25 bp, Homo sapien
ctgcagaaaaggataagggcaagca

SEQ ID NO: 4551110 - DNA, 25 bp, Homo sapien
aagaccctggactacactcatgatt

SEQ ID NO: 4551111 - DNA, 25 bp, Homo sapien
gattatcaatctatgtcgggctgaa

SEQ ID NO: 4551112 - DNA, 25 bp, Homo sapien
ccttattagatgaatttgttgtcgc

SEQ ID NO: 4551113 - DNA, 25 bp, Homo sapien
tttcaaatgtagcaaggatccactt

SEQ ID NO: 4551114 - DNA, 25 bp, Homo sapien
tcttgtttaccacatttgaggaata

SEQ ID NO: 4551115 - DNA, 25 bp, Homo sapien
taccattctagtgaggattttccat

SEQ ID NO: 4551116 - DNA, 25 bp, Homo sapien
tgcgatacctatttctggccaagaa

SEQ ID NO: 4551117 - DNA, 25 bp, Homo sapien
tgcggaccacatacatgcgccagta

SEQ ID NO: 4551118 - DNA, 25 bp, Homo sapien
caagaagcctcgcaagtaagactga

SEQ ID NO: 4551119 - DNA, 25 bp, Homo sapien
taatcttgtacctcctgcggaccac

SEQ ID NO: 4551120 - DNA, 25 bp, Homo sapien
tgatggctgccttccgcatgcgtag

SEQ ID NO: 4551121 - DNA, 25 bp, Homo sapien
tctggatccggatgcaggcagctct

SEQ ID NO: 4551122 - DNA, 25 bp, Homo sapien
tctagataggccacttgaccggcac

SEQ ID NO: 4551123 - DNA, 25 bp, Homo sapien
tgaccggcacggaaaaagatctttg

SEQ ID NO: 4551124 - DNA, 25 bp, Homo sapien
cggtagcggctgaaaaattcttggt

SEQ ID NO: 4551125 - DNA, 25 bp, Homo sapien
ttctgcttcattaggacacggtagc

SEQ ID NO: 4551126 - DNA, 25 bp, Homo sapien
taggacacggtagcggctgaaaaat

SEQ ID NO: 4551127 - DNA, 25 bp, Homo sapien
tgcttcattaggacacggtagcggc

SEQ ID NO: 4551128 - DNA, 25 bp, Homo sapien
gccgcactgattcggatggtttcca

SEQ ID NO: 4551129 - DNA, 25 bp, Homo sapien
ggaaaccggccgcactgattcggat

SEQ ID NO: 4551130 - DNA, 25 bp, Homo sapien
gatggtttccaggacaccacatgct

SEQ ID NO: 4551131 - DNA, 25 bp, Homo sapien
cactgattcggatggtttccaggac

SEQ ID NO: 4551132 - DNA, 25 bp, Homo sapien
agtgtctccataagcaggtgcaggg

SEQ ID NO: 4551133 - DNA, 25 bp, Homo sapien
gggaacttgaagtcattaggcttga

SEQ ID NO: 4551134 - DNA, 25 bp, Homo sapien
tggcattgagtgtctccataagcag

SEQ ID NO: 4551135 - DNA, 25 bp, Homo sapien
ttaggcttgatacagcgcacatagt

SEQ ID NO: 4551136 - DNA, 25 bp, Homo sapien
gagttcgtgtgaggggtgtgcgccc

SEQ ID NO: 4551137 - DNA, 25 bp, Homo sapien
gggctttgcaggagttcgtgtgagg

SEQ ID NO: 4551138 - DNA, 25 bp, Homo sapien
ggtgtgcgccctgaggaggtggctg

SEQ ID NO: 4551139 - DNA, 25 bp, Homo sapien
ggctgaagttggactgatggccttc

SEQ ID NO: 4551140 - DNA, 25 bp, Homo sapien
cctggattagagtaagcctatccat

SEQ ID NO: 4551141 - DNA, 25 bp, Homo sapien
gcatacatcctggattagagtaagc

SEQ ID NO: 4551142 - DNA, 25 bp, Homo sapien
ggattagagtaagcctatccatagt

SEQ ID NO: 4551143 - DNA, 25 bp, Homo sapien
catcctggattagagtaagcctatc

SEQ ID NO: 4551144 - DNA, 25 bp, Homo sapien
tcttttcgagaaatccttcacactg

SEQ ID NO: 4551145 - DNA, 25 bp, Homo sapien
ttcgagaaatccttcacactggtat

SEQ ID NO: 4551146 - DNA, 25 bp, Homo sapien
gagaaatccttcacactggtattcc

SEQ ID NO: 4551147 - DNA, 25 bp, Homo sapien
tttattcttttcgagaaatccttca

SEQ ID NO: 4551148 - DNA, 25 bp, Homo sapien
tttgatagacgaggcttttcaaaga

SEQ ID NO: 4551149 - DNA, 25 bp, Homo sapien
aatgtgtgttgtacaatttttgggc

SEQ ID NO: 4551150 - DNA, 25 bp, Homo sapien
tgtgttgtacaatttttgggcccag

SEQ ID NO: 4551151 - DNA, 25 bp, Homo sapien
gatgaaagctttgtttgatagacga

SEQ ID NO: 4551152 - DNA, 25 bp, Homo sapien
tatgagtgtccatggaatttgttcc

SEQ ID NO: 4551153 - DNA, 25 bp, Homo sapien
gaatgcctagttttgattctataag

SEQ ID NO: 4551154 - DNA, 25 bp, Homo sapien
cataaaaatctatgagtgtccatgg

SEQ ID NO: 4551155 - DNA, 25 bp, Homo sapien
catccagtaaatctagaatgcctag

SEQ ID NO: 4551156 - DNA, 25 bp, Homo sapien
gttcaaaactatttatctcaaatgt

SEQ ID NO: 4551157 - DNA, 25 bp, Homo sapien
tttaacagctaaagacaggtaccca

SEQ ID NO: 4551158 - DNA, 25 bp, Homo sapien
cggtgttacacacatataggaggga

SEQ ID NO: 4551159 - DNA, 25 bp, Homo sapien
tatgaaacaggcacaaatatgaagg

SEQ ID NO: 4551160 - DNA, 25 bp, Homo sapien
caatatactgactcacggtgttaca

SEQ ID NO: 4551161 - DNA, 25 bp, Homo sapien
tgtctagcacaccaataaaagagtg

SEQ ID NO: 4551162 - DNA, 25 bp, Homo sapien
cctgcagcttggagatgggcttgat

SEQ ID NO: 4551163 - DNA, 25 bp, Homo sapien
gcttggccaaagcatcgcgggcatt

SEQ ID NO: 4551164 - DNA, 25 bp, Homo sapien
tggcagtagccagtttccgatggca

SEQ ID NO: 4551165 - DNA, 25 bp, Homo sapien
aagatgcagagaggttcatgcttgg

SEQ ID NO: 4551166 - DNA, 25 bp, Homo sapien
actttagttctaccttttgtgtgag

SEQ ID NO: 4551167 - DNA, 25 bp, Homo sapien
caatttatcctctgttatccaatac

SEQ ID NO: 4551168 - DNA, 25 bp, Homo sapien
cacattccctttgttggcctaacag

SEQ ID NO: 4551169 - DNA, 25 bp, Homo sapien
tgtaattaagtaacactaactccaa

SEQ ID NO: 4551170 - DNA, 25 bp, Homo sapien
tgcctaagtgaaggatgccagcaag

SEQ ID NO: 4551171 - DNA, 25 bp, Homo sapien
tcgggatgtaaatccaacattgcct

SEQ ID NO: 4551172 - DNA, 25 bp, Homo sapien
ggaaaattcccatttgatgagattc

SEQ ID NO: 4551173 - DNA, 25 bp, Homo sapien
tgccagcaagtattcggaaaattcc

SEQ ID NO: 4551174 - DNA, 25 bp, Homo sapien
tgccatctcctttgcatcatccact

SEQ ID NO: 4551175 - DNA, 25 bp, Homo sapien
ggcctgcctagtatgtgccatctcc

SEQ ID NO: 4551176 - DNA, 25 bp, Homo sapien
atcatccactccttcaatcacagga

SEQ ID NO: 4551177 - DNA, 25 bp, Homo sapien
ctagcaaagtgcaggcctgcctagt

SEQ ID NO: 4551178 - DNA, 25 bp, Homo sapien
catctaaaatcacctccaggccaat

SEQ ID NO: 4551179 - DNA, 25 bp, Homo sapien
gagactaatagaatgagcccctagg

SEQ ID NO: 4551180 - DNA, 25 bp, Homo sapien
ttatccataagtattccaacatgag

SEQ ID NO: 4551181 - DNA, 25 bp, Homo sapien
tccatttatacagccacttactcct

SEQ ID NO: 4551182 - DNA, 25 bp, Homo sapien
ttcaggtaactttgctgaggcacaa

SEQ ID NO: 4551183 - DNA, 25 bp, Homo sapien
acaaagctgatagaagatatgatag

SEQ ID NO: 4551184 - DNA, 25 bp, Homo sapien
aattcaggtaactttgctgaggcac

SEQ ID NO: 4551185 - DNA, 25 bp, Homo sapien
ctgatagaagatatgatagtttctc

SEQ ID NO: 4551186 - DNA, 25 bp, Homo sapien
taagaagagttttcaattacagcat

SEQ ID NO: 4551187 - DNA, 25 bp, Homo sapien
agcattttaatctaaaattcaggga

SEQ ID NO: 4551188 - DNA, 25 bp, Homo sapien
aataagaagagttttcaattacagc

SEQ ID NO: 4551189 - DNA, 25 bp, Homo sapien
gaagagttttcaattacagcatttt

SEQ ID NO: 4551190 - DNA, 25 bp, Homo sapien
ggaataccactctggatttctctaa

SEQ ID NO: 4551191 - DNA, 25 bp, Homo sapien
aaacggctgctattatcattcctgg

SEQ ID NO: 4551192 - DNA, 25 bp, Homo sapien
aatctcaatatacttcccaaaacgg

SEQ ID NO: 4551193 - DNA, 25 bp, Homo sapien
aagataagttctcatattggcacca

SEQ ID NO: 4551194 - DNA, 25 bp, Homo sapien
aaccacttttgccactgcaggcaca

SEQ ID NO: 4551195 - DNA, 25 bp, Homo sapien
gaaacagcagacctgaactcagagg

SEQ ID NO: 4551196 - DNA, 25 bp, Homo sapien
aacaaacgaggatgggagctgccaa

SEQ ID NO: 4551197 - DNA, 25 bp, Homo sapien
gggttatctgaacattcatgccagc

SEQ ID NO: 4551198 - DNA, 25 bp, Homo sapien
gagaatataggaagaaagccgaaga

SEQ ID NO: 4551199 - DNA, 25 bp, Homo sapien
gaaagccgaagactcgctgtcttac

SEQ ID NO: 4551200 - DNA, 25 bp, Homo sapien
tatcaagagaatataggaagaaagc

SEQ ID NO: 4551201 - DNA, 25 bp, Homo sapien
tctgagacatgctgtatcaatcaat

SEQ ID NO: 4551202 - DNA, 25 bp, Homo sapien
gaggccaagaccttttcctccacat

SEQ ID NO: 4551203 - DNA, 25 bp, Homo sapien
cacttacgatgatggactgatttcg

SEQ ID NO: 4551204 - DNA, 25 bp, Homo sapien
cacagttgcaaagtatcgcatggca

SEQ ID NO: 4551205 - DNA, 25 bp, Homo sapien
tcgcatggcatacttagctgagact

SEQ ID NO: 4551206 - DNA, 25 bp, Homo sapien
catagggatttatagctactaggac

SEQ ID NO: 4551207 - DNA, 25 bp, Homo sapien
cagctactgcaaagatatgtggatc

SEQ ID NO: 4551208 - DNA, 25 bp, Homo sapien
ggatccatatcacccatgttctgac

SEQ ID NO: 4551209 - DNA, 25 bp, Homo sapien
atgttctgaccactgtatgcattaa

SEQ ID NO: 4551210 - DNA, 25 bp, Homo sapien
gcggactctgagattatggagcaca

SEQ ID NO: 4551211 - DNA, 25 bp, Homo sapien
tttggaatcaataaagcggactctg

SEQ ID NO: 4551212 - DNA, 25 bp, Homo sapien
ggtcattttcaccaacaagtatgtc

SEQ ID NO: 4551213 - DNA, 25 bp, Homo sapien
caggatttcgtaagtgaggcagctc

SEQ ID NO: 4551214 - DNA, 25 bp, Homo sapien
gacttccagacttcctctggatcag

SEQ ID NO: 4551215 - DNA, 25 bp, Homo sapien
tctggatcaggtatccaaaccctgg

SEQ ID NO: 4551216 - DNA, 25 bp, Homo sapien
gaggactttatctcctggcttataa

SEQ ID NO: 4551217 - DNA, 25 bp, Homo sapien
ttccttcctcgaggtgaagcaggag

SEQ ID NO: 4551218 - DNA, 25 bp, Homo sapien
aaagcagttgcttctgatgccccag

SEQ ID NO: 4551219 - DNA, 25 bp, Homo sapien
tgtctgtcaaggaacactgagggtg

SEQ ID NO: 4551220 - DNA, 25 bp, Homo sapien
gattgatgcagatgactcactggaa

SEQ ID NO: 4551221 - DNA, 25 bp, Homo sapien
tgatgacaacactgaagaggccctt

SEQ ID NO: 4551222 - DNA, 25 bp, Homo sapien
aaatcttctgaaaggctctgtaatt

SEQ ID NO: 4551223 - DNA, 25 bp, Homo sapien
caaacactcccaaaatcttctgaaa

SEQ ID NO: 4551224 - DNA, 25 bp, Homo sapien
atttccagaaacagagaatatgcat

SEQ ID NO: 4551225 - DNA, 25 bp, Homo sapien
aaggctctgtaatttccagaaacag

SEQ ID NO: 4551226 - DNA, 25 bp, Homo sapien
cgggcagaggcactctttatatctc

SEQ ID NO: 4551227 - DNA, 25 bp, Homo sapien
aggggcccccgatctcccagatggg

SEQ ID NO: 4551228 - DNA, 25 bp, Homo sapien
cagaggcactctttatatctcagac

SEQ ID NO: 4551229 - DNA, 25 bp, Homo sapien
aggcactctttatatctcagacggg

SEQ ID NO: 4551230 - DNA, 25 bp, Homo sapien
tccaactgtatacgctgagagggta

SEQ ID NO: 4551231 - DNA, 25 bp, Homo sapien
cttgagtgacaggtactccaactgt

SEQ ID NO: 4551232 - DNA, 25 bp, Homo sapien
gcagcataagcaaacaaagactcta

SEQ ID NO: 4551233 - DNA, 25 bp, Homo sapien
catcctggcagtgacttgaccacac

SEQ ID NO: 4551234 - DNA, 25 bp, Homo sapien
gcctgtagacaggatttatctaata

SEQ ID NO: 4551235 - DNA, 25 bp, Homo sapien
aatgtcatccatattaggcaaatag

SEQ ID NO: 4551236 - DNA, 25 bp, Homo sapien
aaatagagactgtattggccacact

SEQ ID NO: 4551237 - DNA, 25 bp, Homo sapien
tgtattggccacactgggagtcagc

SEQ ID NO: 4551238 - DNA, 25 bp, Homo sapien
gggacatttcactggtattacctca

SEQ ID NO: 4551239 - DNA, 25 bp, Homo sapien
attaatgatgagcactagaagggag

SEQ ID NO: 4551240 - DNA, 25 bp, Homo sapien
tttcactggtattacctcattaatg

SEQ ID NO: 4551241 - DNA, 25 bp, Homo sapien
ctcattaatgatgagcactagaagg

SEQ ID NO: 4551242 - DNA, 25 bp, Homo sapien
tgtcttggggttgttcttctcaagg

SEQ ID NO: 4551243 - DNA, 25 bp, Homo sapien
cttggggttgttcttctcaaggagt

SEQ ID NO: 4551244 - DNA, 25 bp, Homo sapien
aatcactcatatcctttcttccagt

SEQ ID NO: 4551245 - DNA, 25 bp, Homo sapien
caatcactcatatcctttcttccag

SEQ ID NO: 4551246 - DNA, 25 bp, Homo sapien
aaatacgtgagaagcgtgagatcac

SEQ ID NO: 4551247 - DNA, 25 bp, Homo sapien
tgaacagtgccatgtgcagtctatg

SEQ ID NO: 4551248 - DNA, 25 bp, Homo sapien
cacacattttaagggaatactcaca

SEQ ID NO: 4551249 - DNA, 25 bp, Homo sapien
tttagctcactcaagcaacagcaac

SEQ ID NO: 4551250 - DNA, 25 bp, Homo sapien
cctgatccagaagggaatagaactc

SEQ ID NO: 4551251 - DNA, 25 bp, Homo sapien
gaagggaatagaactcatattcctg

SEQ ID NO: 4551252 - DNA, 25 bp, Homo sapien
tagttgttttttgtgagtgggcttg

SEQ ID NO: 4551253 - DNA, 25 bp, Homo sapien
gaaaccctgatccagaagggaatag

SEQ ID NO: 4551254 - DNA, 25 bp, Homo sapien
ctgacaatagcaacataaacactaa

SEQ ID NO: 4551255 - DNA, 25 bp, Homo sapien
ggtgaggcctctgattatctctcat

SEQ ID NO: 4551256 - DNA, 25 bp, Homo sapien
gggtgaggcctctgattatctctca

SEQ ID NO: 4551257 - DNA, 25 bp, Homo sapien
acactaagatgaaagctttctaatt

SEQ ID NO: 4551258 - DNA, 25 bp, Homo sapien
cctaggtgctaggtgccaagctacg

SEQ ID NO: 4551259 - DNA, 25 bp, Homo sapien
tacctgagcacttcaatacataagc

SEQ ID NO: 4551260 - DNA, 25 bp, Homo sapien
caagctacgggcaagtgttaaggat

SEQ ID NO: 4551261 - DNA, 25 bp, Homo sapien
gattccgctgaatttatctacctga

SEQ ID NO: 4551262 - DNA, 25 bp, Homo sapien
gaaacttcaatccttgcctctgtca

SEQ ID NO: 4551263 - DNA, 25 bp, Homo sapien
tttaattgatgtcctccacccactc

SEQ ID NO: 4551264 - DNA, 25 bp, Homo sapien
gaatttgcagataccataaacttgg

SEQ ID NO: 4551265 - DNA, 25 bp, Homo sapien
taaacttgggatatcctagaaacaa

SEQ ID NO: 4551266 - DNA, 25 bp, Homo sapien
acttgaccactcatggtgctcctca

SEQ ID NO: 4551267 - DNA, 25 bp, Homo sapien
gagtaggactatcaatcacagtgcc

SEQ ID NO: 4551268 - DNA, 25 bp, Homo sapien
agcacagacttgaccactcatggtg

SEQ ID NO: 4551269 - DNA, 25 bp, Homo sapien
ttccaatggcgaacagctcacagcc

SEQ ID NO: 4551270 - DNA, 25 bp, Homo sapien
tcacaacatcttttcaattttttct

SEQ ID NO: 4551271 - DNA, 25 bp, Homo sapien
cacaacatcttttcaattttttctc

SEQ ID NO: 4551272 - DNA, 25 bp, Homo sapien
cagaaaggctagctggcggtagaag

SEQ ID NO: 4551273 - DNA, 25 bp, Homo sapien
acagaaaggctagctggcggtagaa

SEQ ID NO: 4551274 - DNA, 25 bp, Homo sapien
cacagaaaggctagctggcggtaga

SEQ ID NO: 4551275 - DNA, 25 bp, Homo sapien
tcacagaaaggctagctggcggtag

SEQ ID NO: 4551276 - DNA, 25 bp, Homo sapien
tttgtgtagagctccgacgcagcca

SEQ ID NO: 4551277 - DNA, 25 bp, Homo sapien
ttgtgtagagctccgacgcagccat

SEQ ID NO: 4551278 - DNA, 25 bp, Homo sapien
ctttgtgtagagctccgacgcagcc

SEQ ID NO: 4551279 - DNA, 25 bp, Homo sapien
gccgcccgagcggactaggaagcgc

SEQ ID NO: 4551280 - DNA, 25 bp, Homo sapien
gagcagccgcgagcgctccacctgc

SEQ ID NO: 4551281 - DNA, 25 bp, Homo sapien
gtgcggaggccgcacctcgcctggg

SEQ ID NO: 4551282 - DNA, 25 bp, Homo sapien
tcactcccgggctcgccgcgagcag

SEQ ID NO: 4551283 - DNA, 25 bp, Homo sapien
cctcagaaatgctagagggaatgtc

SEQ ID NO: 4551284 - DNA, 25 bp, Homo sapien
tgtctactgagtcgaaagtcctaca

SEQ ID NO: 4551285 - DNA, 25 bp, Homo sapien
tcacgaacaactctcatggctgagg

SEQ ID NO: 4551286 - DNA, 25 bp, Homo sapien
gcctgtcatggtaatctggtagacc

SEQ ID NO: 4551287 - DNA, 25 bp, Homo sapien
gctgaaatgtaaagagatcaacttc

SEQ ID NO: 4551288 - DNA, 25 bp, Homo sapien
accactttaataagacaaaactgca

SEQ ID NO: 4551289 - DNA, 25 bp, Homo sapien
ccactttaataagacaaaactgcaa

SEQ ID NO: 4551290 - DNA, 25 bp, Homo sapien
ttttaaatcataagccggccgggca

SEQ ID NO: 4551291 - DNA, 25 bp, Homo sapien
tattaatggctatcaagaccagcag

SEQ ID NO: 4551292 - DNA, 25 bp, Homo sapien
tgttacctgaggcaaccttggtcca

SEQ ID NO: 4551293 - DNA, 25 bp, Homo sapien
tctgcagaatacctagaggcctacc

SEQ ID NO: 4551294 - DNA, 25 bp, Homo sapien
tcttgagccagtattccgaaccgtt

SEQ ID NO: 4551295 - DNA, 25 bp, Homo sapien
tacaactacttgtgagaggagctcc

SEQ ID NO: 4551296 - DNA, 25 bp, Homo sapien
tattacttgtcccaaaccacaggag

SEQ ID NO: 4551297 - DNA, 25 bp, Homo sapien
cctggatccaaaaacgggaggctct

SEQ ID NO: 4551298 - DNA, 25 bp, Homo sapien
gagtattgaagccttttattctagg

SEQ ID NO: 4551299 - DNA, 25 bp, Homo sapien
cagagtattgaagccttttattcta

SEQ ID NO: 4551300 - DNA, 25 bp, Homo sapien
tattgaagccttttattctagggtc

SEQ ID NO: 4551301 - DNA, 25 bp, Homo sapien
tgcagagtattgaagccttttattc

SEQ ID NO: 4551302 - DNA, 25 bp, Homo sapien
tataagcccgagattgtaaactact

SEQ ID NO: 4551303 - DNA, 25 bp, Homo sapien
gagccccatctagttgtgtttgaaa

SEQ ID NO: 4551304 - DNA, 25 bp, Homo sapien
caacggcagctgttaagcactagag

SEQ ID NO: 4551305 - DNA, 25 bp, Homo sapien
catatcgtatttgcacaaggccact

SEQ ID NO: 4551306 - DNA, 25 bp, Homo sapien
ctagcaacaagggacggcttccgtt

SEQ ID NO: 4551307 - DNA, 25 bp, Homo sapien
aaggtcttgcggagtgggaatgtgg

SEQ ID NO: 4551308 - DNA, 25 bp, Homo sapien
gaaggtcttgcggagtgggaatgtg

SEQ ID NO: 4551309 - DNA, 25 bp, Homo sapien
gaggaaggtcttgcggagtgggaat

SEQ ID NO: 4551310 - DNA, 25 bp, Homo sapien
aaaacccagaacctgtgatccagag

SEQ ID NO: 4551311 - DNA, 25 bp, Homo sapien
gacactaagtgatcacctaaagtgg

SEQ ID NO: 4551312 - DNA, 25 bp, Homo sapien
taatgagtacaacacaagaagagac

SEQ ID NO: 4551313 - DNA, 25 bp, Homo sapien
tttatgggccatacttacatcagca

SEQ ID NO: 4551314 - DNA, 25 bp, Homo sapien
ttccttaagaaatctgaacctccag

SEQ ID NO: 4551315 - DNA, 25 bp, Homo sapien
tttccttaagaaatctgaacctcca

SEQ ID NO: 4551316 - DNA, 25 bp, Homo sapien
ttctagttgttaaatgccaagtacc

SEQ ID NO: 4551317 - DNA, 25 bp, Homo sapien
gactgcttaagcatggaaggttgag

SEQ ID NO: 4551318 - DNA, 25 bp, Homo sapien
tacccaggtctagcgagaacttgtc

SEQ ID NO: 4551319 - DNA, 25 bp, Homo sapien
gctgtactgagatagataaaccggg

SEQ ID NO: 4551320 - DNA, 25 bp, Homo sapien
caatatggacaaaacccaacctttg

SEQ ID NO: 4551321 - DNA, 25 bp, Homo sapien
tagtagcagctacacgacaagggag

SEQ ID NO: 4551322 - DNA, 25 bp, Homo sapien
taggttctgtcaacggcatctatgc

SEQ ID NO: 4551323 - DNA, 25 bp, Homo sapien
tccacgtttctggacctcaagggaa

SEQ ID NO: 4551324 - DNA, 25 bp, Homo sapien
ctcctacagagggacatatggcaga

SEQ ID NO: 4551325 - DNA, 25 bp, Homo sapien
tcacttaagcctaccctgggagaca

SEQ ID NO: 4551326 - DNA, 25 bp, Homo sapien
caaaacagagctagtgcagtgcacc

SEQ ID NO: 4551327 - DNA, 25 bp, Homo sapien
aactgacagaactatagggagcaac

SEQ ID NO: 4551328 - DNA, 25 bp, Homo sapien
taggagttctagacctacccgggca

SEQ ID NO: 4551329 - DNA, 25 bp, Homo sapien
tggctattggctacaagctgggaaa

SEQ ID NO: 4551330 - DNA, 25 bp, Homo sapien
cccaggatatggtaacacagataca

SEQ ID NO: 4551331 - DNA, 25 bp, Homo sapien
ttgataatagggtccgcagaaggca

SEQ ID NO: 4551332 - DNA, 25 bp, Homo sapien
tgtgagccaccgtgaagaagtattt

SEQ ID NO: 4551333 - DNA, 25 bp, Homo sapien
caaactgttgtatcgcaaactgcta

SEQ ID NO: 4551334 - DNA, 25 bp, Homo sapien
tactgccaggaaggtaccaatactg

SEQ ID NO: 4551335 - DNA, 25 bp, Homo sapien
aagtctttgtttgcctagtgcctag

SEQ ID NO: 4551336 - DNA, 25 bp, Homo sapien
cagaggagggttatacagcaacgtc

SEQ ID NO: 4551337 - DNA, 25 bp, Homo sapien
gctgttaggaatcgatggttgcaga

SEQ ID NO: 4551338 - DNA, 25 bp, Homo sapien
ttaggaatcgatggttgcagagacc

SEQ ID NO: 4551339 - DNA, 25 bp, Homo sapien
gaccaagggagcatgttgtgttcac

SEQ ID NO: 4551340 - DNA, 25 bp, Homo sapien
ctctaggctgttaggaatcgatggt

SEQ ID NO: 4551341 - DNA, 25 bp, Homo sapien
agaaatagaaaacatggatgaggcg

SEQ ID NO: 4551342 - DNA, 25 bp, Homo sapien
tagaaaacatggatgaggcggttgc

SEQ ID NO: 4551343 - DNA, 25 bp, Homo sapien
aaatagaaaacatggatgaggcggt

SEQ ID NO: 4551344 - DNA, 25 bp, Homo sapien
agaaaacatggatgaggcggttgct

SEQ ID NO: 4551345 - DNA, 25 bp, Homo sapien
ccaagacatattagtttggtgagtc

SEQ ID NO: 4551346 - DNA, 25 bp, Homo sapien
ataacctctagaaaacttgctattg

SEQ ID NO: 4551347 - DNA, 25 bp, Homo sapien
gtttggtgagtcttataacctctag

SEQ ID NO: 4551348 - DNA, 25 bp, Homo sapien
ttccaagacatattagtttggtgag

SEQ ID NO: 4551349 - DNA, 25 bp, Homo sapien
gcaggttactccaactgtccaagaa

SEQ ID NO: 4551350 - DNA, 25 bp, Homo sapien
gaatcaccacgttgcatctaagtag

SEQ ID NO: 4551351 - DNA, 25 bp, Homo sapien
tggtgccatcaaaggtccctgtggt

SEQ ID NO: 4551352 - DNA, 25 bp, Homo sapien
tccaggactagtacacatgccttag

SEQ ID NO: 4551353 - DNA, 25 bp, Homo sapien
tgaaggccggactttactcactgac

SEQ ID NO: 4551354 - DNA, 25 bp, Homo sapien
cgtcctgggctctcgcgtaaatata

SEQ ID NO: 4551355 - DNA, 25 bp, Homo sapien
gcttttggagtgaaccgcacgctca

SEQ ID NO: 4551356 - DNA, 25 bp, Homo sapien
tataagtgactgaggaacaccgcga

SEQ ID NO: 4551357 - DNA, 25 bp, Homo sapien
ctgcctcggggacttccgcagacat

SEQ ID NO: 4551358 - DNA, 25 bp, Homo sapien
ggctgcctcggggacttccgcagac

SEQ ID NO: 4551359 - DNA, 25 bp, Homo sapien
ctccgcggaggctgcctcggggact

SEQ ID NO: 4551360 - DNA, 25 bp, Homo sapien
cttctgctcctccgcggaggctgcc

SEQ ID NO: 4551361 - DNA, 25 bp, Homo sapien
ctgcagacgagacgccgggaaaaga

SEQ ID NO: 4551362 - DNA, 25 bp, Homo sapien
acggagccgcgaaacgctccgctgg

SEQ ID NO: 4551363 - DNA, 25 bp, Homo sapien
aatggccgccgccttatgacgacac

SEQ ID NO: 4551364 - DNA, 25 bp, Homo sapien
aaagatgcaattagcgggtggccga

SEQ ID NO: 4551365 - DNA, 25 bp, Homo sapien
tttccttcaaaggtcgccgctcctg

SEQ ID NO: 4551366 - DNA, 25 bp, Homo sapien
ttctcccgctcgctgtcgtccaaac

SEQ ID NO: 4551367 - DNA, 25 bp, Homo sapien
ccgctcgctgtcgtccaaacacttc

SEQ ID NO: 4551368 - DNA, 25 bp, Homo sapien
ctcgctgtcgtccaaacacttcctt

SEQ ID NO: 4551369 - DNA, 25 bp, Homo sapien
taatctgctgttgcccgctgtctga

SEQ ID NO: 4551370 - DNA, 25 bp, Homo sapien
taagcggtctaatgcctgggtccaa

SEQ ID NO: 4551371 - DNA, 25 bp, Homo sapien
ctgggtctggcctacttgagtggtc

SEQ ID NO: 4551372 - DNA, 25 bp, Homo sapien
tgcttaccaggttctagattcccag

SEQ ID NO: 4551373 - DNA, 25 bp, Homo sapien
gaagcagcttagtccacattgcact

SEQ ID NO: 4551374 - DNA, 25 bp, Homo sapien
gactactatgtgagatagcaacctg

SEQ ID NO: 4551375 - DNA, 25 bp, Homo sapien
gataaggaatcctggctatgaatgg

SEQ ID NO: 4551376 - DNA, 25 bp, Homo sapien
gaaaattatctagcatacgacagta

SEQ ID NO: 4551377 - DNA, 25 bp, Homo sapien
gatttgtgctacattagaacactag

SEQ ID NO: 4551378 - DNA, 25 bp, Homo sapien
caacagtacaaaaaggattaggaca

SEQ ID NO: 4551379 - DNA, 25 bp, Homo sapien
tccaatgaagtggtttcaacagtac

SEQ ID NO: 4551380 - DNA, 25 bp, Homo sapien
tttacttgcaaacttgggtactgag

SEQ ID NO: 4551381 - DNA, 25 bp, Homo sapien
gaacaggagccgtacgtctctatgg

SEQ ID NO: 4551382 - DNA, 25 bp, Homo sapien
ttgagttcatatgcagcaccgctat

SEQ ID NO: 4551383 - DNA, 25 bp, Homo sapien
tctctatggaggtagatctttccag

SEQ ID NO: 4551384 - DNA, 25 bp, Homo sapien
aaactgagggtttgttggtgattca

SEQ ID NO: 4551385 - DNA, 25 bp, Homo sapien
tagctccatagactgacccatttca

SEQ ID NO: 4551386 - DNA, 25 bp, Homo sapien
ggttcacgtggcagttcactcacat

SEQ ID NO: 4551387 - DNA, 25 bp, Homo sapien
cacagcttagcctcccatgatttgg

SEQ ID NO: 4551388 - DNA, 25 bp, Homo sapien
tcttcctgtaaatctgagtgtcaaa

SEQ ID NO: 4551389 - DNA, 25 bp, Homo sapien
agaacattctttgggaagtgtacag

SEQ ID NO: 4551390 - DNA, 25 bp, Homo sapien
aagatgtggtggttacagctctgta

SEQ ID NO: 4551391 - DNA, 25 bp, Homo sapien
ggattttactcctgaactagctgaa

SEQ ID NO: 4551392 - DNA, 25 bp, Homo sapien
cttcccaaactgaaggagaacattc

SEQ ID NO: 4551393 - DNA, 25 bp, Homo sapien
gaatgtctgatgattggctggcata

SEQ ID NO: 4551394 - DNA, 25 bp, Homo sapien
taataaccgttcttctgtgtgtcgg

SEQ ID NO: 4551395 - DNA, 25 bp, Homo sapien
ggctggcatatctcgtaaatcatat

SEQ ID NO: 4551396 - DNA, 25 bp, Homo sapien
gatgtatgaggtagcgtaataaccg

SEQ ID NO: 4551397 - DNA, 25 bp, Homo sapien
gctttgctaaagagtatcaagttca

SEQ ID NO: 4551398 - DNA, 25 bp, Homo sapien
aaataggtgctcaaagaagagactt

SEQ ID NO: 4551399 - DNA, 25 bp, Homo sapien
ggaatagttccagtagcttaagcaa

SEQ ID NO: 4551400 - DNA, 25 bp, Homo sapien
gatgtgattcagaatgattgtgcca

SEQ ID NO: 4551401 - DNA, 25 bp, Homo sapien
ggcagtctccaaacaagaggtgaat

SEQ ID NO: 4551402 - DNA, 25 bp, Homo sapien
tgacagctagctttccactgaccca

SEQ ID NO: 4551403 - DNA, 25 bp, Homo sapien
tagccgaaggcaagagaacactgtc

SEQ ID NO: 4551404 - DNA, 25 bp, Homo sapien
tacagattccttgcagtattggaac

SEQ ID NO: 4551405 - DNA, 25 bp, Homo sapien
tgatgaaggactgttctgagacagc

SEQ ID NO: 4551406 - DNA, 25 bp, Homo sapien
tcctgagccaaaagagatcaatgcc

SEQ ID NO: 4551407 - DNA, 25 bp, Homo sapien
tgcctagaccaaaaggaatgatgcc

SEQ ID NO: 4551408 - DNA, 25 bp, Homo sapien
tgaagagtcctattgaagttatgca

SEQ ID NO: 4551409 - DNA, 25 bp, Homo sapien
gattattgcaattgtaggctataaa

SEQ ID NO: 4551410 - DNA, 25 bp, Homo sapien
caattgtaggctataaaacacatac

SEQ ID NO: 4551411 - DNA, 25 bp, Homo sapien
gtatgtgagagaatgattattgcaa

SEQ ID NO: 4551412 - DNA, 25 bp, Homo sapien
gagagaatgattattgcaattgtag

SEQ ID NO: 4551413 - DNA, 25 bp, Homo sapien
ttcctgaaggaggtactcgataacc

SEQ ID NO: 4551414 - DNA, 25 bp, Homo sapien
ctgaaggaggtactcgataacccct

SEQ ID NO: 4551415 - DNA, 25 bp, Homo sapien
tgttcctgaaggaggtactcgataa

SEQ ID NO: 4551416 - DNA, 25 bp, Homo sapien
tcctgaaggaggtactcgataaccc

SEQ ID NO: 4551417 - DNA, 25 bp, Homo sapien
aataaaagaagacaaattgagtaca

SEQ ID NO: 4551418 - DNA, 25 bp, Homo sapien
taaaagaagacaaattgagtacaaa

SEQ ID NO: 4551419 - DNA, 25 bp, Homo sapien
cttgaaataaaagaagacaaattga

SEQ ID NO: 4551420 - DNA, 25 bp, Homo sapien
tgaaataaaagaagacaaattgagt

SEQ ID NO: 4551421 - DNA, 25 bp, Homo sapien
taggacccttcccatgtatcttgag

SEQ ID NO: 4551422 - DNA, 25 bp, Homo sapien
caagtaatttattggtcttcgggca

SEQ ID NO: 4551423 - DNA, 25 bp, Homo sapien
tcctcctggtgatgtcgctataaag

SEQ ID NO: 4551424 - DNA, 25 bp, Homo sapien
caagtgtaggaaagtaagccttggc

SEQ ID NO: 4551425 - DNA, 25 bp, Homo sapien
tcaggatgttctccttactgcaaaa

SEQ ID NO: 4551426 - DNA, 25 bp, Homo sapien
ggagccctgctctactatatgaagt

SEQ ID NO: 4551427 - DNA, 25 bp, Homo sapien
ccaaatgactatcagtggtaattgt

SEQ ID NO: 4551428 - DNA, 25 bp, Homo sapien
ccaggatgatcaataaccaggataa

SEQ ID NO: 4551429 - DNA, 25 bp, Homo sapien
tgtaagcaatgttaagactagtagc

SEQ ID NO: 4551430 - DNA, 25 bp, Homo sapien
aactggtaaggcaactactaccaag

SEQ ID NO: 4551431 - DNA, 25 bp, Homo sapien
gactagtagcattggcaagttagga

SEQ ID NO: 4551432 - DNA, 25 bp, Homo sapien
aaaccataaagttgaaggcaacaat

SEQ ID NO: 4551433 - DNA, 25 bp, Homo sapien
tcacattctttgaaaacagattcaa

SEQ ID NO: 4551434 - DNA, 25 bp, Homo sapien
atcacattctttgaaaacagattca

SEQ ID NO: 4551435 - DNA, 25 bp, Homo sapien
caaaacataatcacattctttgaaa

SEQ ID NO: 4551436 - DNA, 25 bp, Homo sapien
aacataatcacattctttgaaaaca

SEQ ID NO: 4551437 - DNA, 25 bp, Homo sapien
cagattcttgatgtcctggtaaggc

SEQ ID NO: 4551438 - DNA, 25 bp, Homo sapien
caatcatctgcgtgtacatctctag

SEQ ID NO: 4551439 - DNA, 25 bp, Homo sapien
gaataaataagcagtcaccactctg

SEQ ID NO: 4551440 - DNA, 25 bp, Homo sapien
tcgataataacctatgctgggcatc

SEQ ID NO: 4551441 - DNA, 25 bp, Homo sapien
attttggcatattagtttgtattca

SEQ ID NO: 4551442 - DNA, 25 bp, Homo sapien
gcatattagtttgtattcagctgtt

SEQ ID NO: 4551443 - DNA, 25 bp, Homo sapien
tattttggcatattagtttgtattc

SEQ ID NO: 4551444 - DNA, 25 bp, Homo sapien
catataaggagagggagcattgtca

SEQ ID NO: 4551445 - DNA, 25 bp, Homo sapien
cttcaactggaagagtcaaatgtgt

SEQ ID NO: 4551446 - DNA, 25 bp, Homo sapien
caactggaagagtcaaatgtgtggg

SEQ ID NO: 4551447 - DNA, 25 bp, Homo sapien
gggagcattgtcatctgaaacactg

SEQ ID NO: 4551448 - DNA, 25 bp, Homo sapien
ccgagaggatcgaaacgatagttca

SEQ ID NO: 4551449 - DNA, 25 bp, Homo sapien
atcaacaatgccgagaggatcgaaa

SEQ ID NO: 4551450 - DNA, 25 bp, Homo sapien
caatgccgagaggatcgaaacgata

SEQ ID NO: 4551451 - DNA, 25 bp, Homo sapien
aacaatgccgagaggatcgaaacga

SEQ ID NO: 4551452 - DNA, 25 bp, Homo sapien
tttgtgaccaagctcaaatgacagc

SEQ ID NO: 4551453 - DNA, 25 bp, Homo sapien
caataaacgtctctaaggcaggaac

SEQ ID NO: 4551454 - DNA, 25 bp, Homo sapien
gagtcccatgctctagctccagttg

SEQ ID NO: 4551455 - DNA, 25 bp, Homo sapien
cctgctgtctataggatgaggtcaa

SEQ ID NO: 4551456 - DNA, 25 bp, Homo sapien
gatcatcttcaatgtttaaacatgg

SEQ ID NO: 4551457 - DNA, 25 bp, Homo sapien
cttgttataggtggagcactagaac

SEQ ID NO: 4551458 - DNA, 25 bp, Homo sapien
tcatgaatatctggatcatcttcaa

SEQ ID NO: 4551459 - DNA, 25 bp, Homo sapien
aaatttcctaggagactaagacttg

SEQ ID NO: 4551460 - DNA, 25 bp, Homo sapien
tgaagaatccagatcaaagcaacct

SEQ ID NO: 4551461 - DNA, 25 bp, Homo sapien
agaatccagatcaaagcaacctgat

SEQ ID NO: 4551462 - DNA, 25 bp, Homo sapien
gcttttcagatgtagtaatgaagaa

SEQ ID NO: 4551463 - DNA, 25 bp, Homo sapien
agcttttcagatgtagtaatgaaga

SEQ ID NO: 4551464 - DNA, 25 bp, Homo sapien
ttgaggatgaaaggctctggttgaa

SEQ ID NO: 4551465 - DNA, 25 bp, Homo sapien
aaattatgttttcgccacacatttg

SEQ ID NO: 4551466 - DNA, 25 bp, Homo sapien
gaaaggctctggttgaagttccatc

SEQ ID NO: 4551467 - DNA, 25 bp, Homo sapien
tgaaaattatgttttcgccacacat

SEQ ID NO: 4551468 - DNA, 25 bp, Homo sapien
aatggcatagcacaatgggcacacc

SEQ ID NO: 4551469 - DNA, 25 bp, Homo sapien
gggtctgacctgctaacaaataata

SEQ ID NO: 4551470 - DNA, 25 bp, Homo sapien
ttccctatagacactttgaaagtca

SEQ ID NO: 4551471 - DNA, 25 bp, Homo sapien
tgggcacaccgctaatattgggtct

SEQ ID NO: 4551472 - DNA, 25 bp, Homo sapien
catttgttcttaggagagtgggtta

SEQ ID NO: 4551473 - DNA, 25 bp, Homo sapien
gacctaaataatagacctaacatgt

SEQ ID NO: 4551474 - DNA, 25 bp, Homo sapien
aaagtgttgcaattataggctgtga

SEQ ID NO: 4551475 - DNA, 25 bp, Homo sapien
tgcaaggatgttaatactagttctg

SEQ ID NO: 4551476 - DNA, 25 bp, Homo sapien
gatacgtactttggatgatttcact

SEQ ID NO: 4551477 - DNA, 25 bp, Homo sapien
tcactaggattgttctgacactgat

SEQ ID NO: 4551478 - DNA, 25 bp, Homo sapien
gagtattttgctcacatgtcttagg

SEQ ID NO: 4551479 - DNA, 25 bp, Homo sapien
ggttgctcacatgtagacaaacagt

SEQ ID NO: 4551480 - DNA, 25 bp, Homo sapien
cacactttcaggtgccatggtccaa

SEQ ID NO: 4551481 - DNA, 25 bp, Homo sapien
tctgggcaaggactgaacactgact

SEQ ID NO: 4551482 - DNA, 25 bp, Homo sapien
taaagggttagtctcaccagctgac

SEQ ID NO: 4551483 - DNA, 25 bp, Homo sapien
gcagtatattctggacttgggccac

SEQ ID NO: 4551484 - DNA, 25 bp, Homo sapien
tatttcgtggaatagcaccatgaga

SEQ ID NO: 4551485 - DNA, 25 bp, Homo sapien
gagaaacactcagccatgcacttaa

SEQ ID NO: 4551486 - DNA, 25 bp, Homo sapien
cgtcttctcttcaataaatcggtca

SEQ ID NO: 4551487 - DNA, 25 bp, Homo sapien
acagccaacagaagcgtcttctctt

SEQ ID NO: 4551488 - DNA, 25 bp, Homo sapien
acctagttcgtctggcttggcggca

SEQ ID NO: 4551489 - DNA, 25 bp, Homo sapien
tttagatcaattccctctgtggtgg

SEQ ID NO: 4551490 - DNA, 25 bp, Homo sapien
agtctggtagtagcatcatttccac

SEQ ID NO: 4551491 - DNA, 25 bp, Homo sapien
taatgcatcttgcttaatcgcagga

SEQ ID NO: 4551492 - DNA, 25 bp, Homo sapien
tggagggcaatgaaagctttctgtt

SEQ ID NO: 4551493 - DNA, 25 bp, Homo sapien
ggtgttcgtccttctgttatcagca

SEQ ID NO: 4551494 - DNA, 25 bp, Homo sapien
tatcagcaaggccaaagagaccaag

SEQ ID NO: 4551495 - DNA, 25 bp, Homo sapien
caagaactcctctgcatcatattca

SEQ ID NO: 4551496 - DNA, 25 bp, Homo sapien
ctaagacctcaatgaggattgtgct

SEQ ID NO: 4551497 - DNA, 25 bp, Homo sapien
cgagaaaagtgaacaacttagccat

SEQ ID NO: 4551498 - DNA, 25 bp, Homo sapien
ctgtccatcgagaaaagtgaacaac

SEQ ID NO: 4551499 - DNA, 25 bp, Homo sapien
catcgagaaaagtgaacaacttagc

SEQ ID NO: 4551500 - DNA, 25 bp, Homo sapien
gtccatcgagaaaagtgaacaactt

SEQ ID NO: 4551501 - DNA, 25 bp, Homo sapien
ggagctagccattcaaaaattaggg

SEQ ID NO: 4551502 - DNA, 25 bp, Homo sapien
tcaaaggtaggaacgaatgggtcaa

SEQ ID NO: 4551503 - DNA, 25 bp, Homo sapien
tatggcaatgctttatatcaggtgg

SEQ ID NO: 4551504 - DNA, 25 bp, Homo sapien
tgaagcaggtaacatttcagctgag

SEQ ID NO: 4551505 - DNA, 25 bp, Homo sapien
cttccccagaatttacagaagccat

SEQ ID NO: 4551506 - DNA, 25 bp, Homo sapien
ttgttctcttccccagaatttacag

SEQ ID NO: 4551507 - DNA, 25 bp, Homo sapien
ctcttccccagaatttacagaagcc

SEQ ID NO: 4551508 - DNA, 25 bp, Homo sapien
gttctcttccccagaatttacagaa

SEQ ID NO: 4551509 - DNA, 25 bp, Homo sapien
gaggcaaagttgacattagtgacaa

SEQ ID NO: 4551510 - DNA, 25 bp, Homo sapien
agtcttcaagcagagaataagaggc

SEQ ID NO: 4551511 - DNA, 25 bp, Homo sapien
cctggccatgtgtacctgttttaag

SEQ ID NO: 4551512 - DNA, 25 bp, Homo sapien
ccaggcaatagcaaactagaattca

SEQ ID NO: 4551513 - DNA, 25 bp, Homo sapien
gattatagattgatcacagcaacct

SEQ ID NO: 4551514 - DNA, 25 bp, Homo sapien
cagtgctcgacatgaacaggtaggc

SEQ ID NO: 4551515 - DNA, 25 bp, Homo sapien
gagggcaactcaaactatacaaaga

SEQ ID NO: 4551516 - DNA, 25 bp, Homo sapien
cactaaatctctacatcaagggcaa

SEQ ID NO: 4551517 - DNA, 25 bp, Homo sapien
cacaatttgaggtaggattttcaga

SEQ ID NO: 4551518 - DNA, 25 bp, Homo sapien
tgaactgcacagaactagtcaatgg

SEQ ID NO: 4551519 - DNA, 25 bp, Homo sapien
gaacactacactgactttgcggttg

SEQ ID NO: 4551520 - DNA, 25 bp, Homo sapien
tattacatttaggaggcctacttca

SEQ ID NO: 4551521 - DNA, 25 bp, Homo sapien
ctctgtgaagccctttgtttccact

SEQ ID NO: 4551522 - DNA, 25 bp, Homo sapien
tccactgaaaaccatactggaatcc

SEQ ID NO: 4551523 - DNA, 25 bp, Homo sapien
ctgtgaagccctttgtttccactga

SEQ ID NO: 4551524 - DNA, 25 bp, Homo sapien
gtgaagccctttgtttccactgaaa

SEQ ID NO: 4551525 - DNA, 25 bp, Homo sapien
tctgcagcggttaaaacaaatgttc

SEQ ID NO: 4551526 - DNA, 25 bp, Homo sapien
aatgttcagcgttgggtgctgatcc

SEQ ID NO: 4551527 - DNA, 25 bp, Homo sapien
taactgagggatccagatgtctgca

SEQ ID NO: 4551528 - DNA, 25 bp, Homo sapien
ggctatcaatagctatactatcagt

SEQ ID NO: 4551529 - DNA, 25 bp, Homo sapien
gaaacaggttaccagactgactaga

SEQ ID NO: 4551530 - DNA, 25 bp, Homo sapien
taccaagtgaaaccctctgaaaatg

SEQ ID NO: 4551531 - DNA, 25 bp, Homo sapien
gcattgtcaaccttcatatacctgg

SEQ ID NO: 4551532 - DNA, 25 bp, Homo sapien
gaaatggtctctcctcaaatgcatg

SEQ ID NO: 4551533 - DNA, 25 bp, Homo sapien
caatgggaatgagacaactcttgat

SEQ ID NO: 4551534 - DNA, 25 bp, Homo sapien
tgggaatgagacaactcttgatcaa

SEQ ID NO: 4551535 - DNA, 25 bp, Homo sapien
tgagacaactcttgatcaaagaaag

SEQ ID NO: 4551536 - DNA, 25 bp, Homo sapien
aagatttctgtgaagctgatttttt

SEQ ID NO: 4551537 - DNA, 25 bp, Homo sapien
tagagtcaacctttctgtcaagagc

SEQ ID NO: 4551538 - DNA, 25 bp, Homo sapien
aaatagtcgctagagacgtacagcc

SEQ ID NO: 4551539 - DNA, 25 bp, Homo sapien
gacctagattagttccaggagcagt

SEQ ID NO: 4551540 - DNA, 25 bp, Homo sapien
ttttaactacagcacctaagagagg

SEQ ID NO: 4551541 - DNA, 25 bp, Homo sapien
cctcactgtcctgcctcagtcctag

SEQ ID NO: 4551542 - DNA, 25 bp, Homo sapien
ctgtcctgcctcagtcctagagtag

SEQ ID NO: 4551543 - DNA, 25 bp, Homo sapien
tcactgtcctgcctcagtcctagag

SEQ ID NO: 4551544 - DNA, 25 bp, Homo sapien
tcctgcctcactgtcctgcctcagt

SEQ ID NO: 4551545 - DNA, 25 bp, Homo sapien
gagttatgattagattcccagaaga

SEQ ID NO: 4551546 - DNA, 25 bp, Homo sapien
ccagaagagtctaccaaaggtttct

SEQ ID NO: 4551547 - DNA, 25 bp, Homo sapien
ttaggcttaaatattactgacaagc

SEQ ID NO: 4551548 - DNA, 25 bp, Homo sapien
gggatatgtttaagtctgaccatta

SEQ ID NO: 4551549 - DNA, 25 bp, Homo sapien
caagcactgaatcaatcctaggtaa

SEQ ID NO: 4551550 - DNA, 25 bp, Homo sapien
atgctccaagcactgaatcaatcct

SEQ ID NO: 4551551 - DNA, 25 bp, Homo sapien
gcactgaatcaatcctaggtaatac

SEQ ID NO: 4551552 - DNA, 25 bp, Homo sapien
tccaagcactgaatcaatcctaggt

SEQ ID NO: 4551553 - DNA, 25 bp, Homo sapien
tacccagtgctaggcgtatgttaag

SEQ ID NO: 4551554 - DNA, 25 bp, Homo sapien
gcagttttgggcaacatctcaccac

SEQ ID NO: 4551555 - DNA, 25 bp, Homo sapien
tatagtacgctgctaaaaggaaacc

SEQ ID NO: 4551556 - DNA, 25 bp, Homo sapien
ccacaaggcttaaggttgacggtat

SEQ ID NO: 4551557 - DNA, 25 bp, Homo sapien
gacttaatccaagaatgggtcccaa

SEQ ID NO: 4551558 - DNA, 25 bp, Homo sapien
tcaaatattgctacccagctgctcc

SEQ ID NO: 4551559 - DNA, 25 bp, Homo sapien
ggcagaagttcagctggtatcagta

SEQ ID NO: 4551560 - DNA, 25 bp, Homo sapien
tcagaagcaacacccttagccagct

SEQ ID NO: 4551561 - DNA, 25 bp, Homo sapien
tacgtcaacccctttagtatctgaa

SEQ ID NO: 4551562 - DNA, 25 bp, Homo sapien
gatgaaagaacaacagtagccagct

SEQ ID NO: 4551563 - DNA, 25 bp, Homo sapien
gaatctcagaagttgtatcaagcca

SEQ ID NO: 4551564 - DNA, 25 bp, Homo sapien
tatttgacagctactgatgccaaga

SEQ ID NO: 4551565 - DNA, 25 bp, Homo sapien
tttcgcccagagtgctgtgaaatgc

SEQ ID NO: 4551566 - DNA, 25 bp, Homo sapien
acatccaattttcgcccagagtgct

SEQ ID NO: 4551567 - DNA, 25 bp, Homo sapien
caattttcgcccagagtgctgtgaa

SEQ ID NO: 4551568 - DNA, 25 bp, Homo sapien
tcacatccaattttcgcccagagtg

SEQ ID NO: 4551569 - DNA, 25 bp, Homo sapien
ctgtgggttctttcaacaggctcgc

SEQ ID NO: 4551570 - DNA, 25 bp, Homo sapien
acaggctcgccgctgattctacggc

SEQ ID NO: 4551571 - DNA, 25 bp, Homo sapien
ggttctttcaacaggctcgccgctg

SEQ ID NO: 4551572 - DNA, 25 bp, Homo sapien
ctgattctacggcttctgcttcgct

SEQ ID NO: 4551573 - DNA, 25 bp, Homo sapien
cctcggctggtctgaaaaaagcaaa

SEQ ID NO: 4551574 - DNA, 25 bp, Homo sapien
gacacagtctctgaaccaaaacagg

SEQ ID NO: 4551575 - DNA, 25 bp, Homo sapien
ctgacacagtctctgaaccaaaaca

SEQ ID NO: 4551576 - DNA, 25 bp, Homo sapien
cagtctctgaaccaaaacaggatct

SEQ ID NO: 4551577 - DNA, 25 bp, Homo sapien
tctctgaaccaaaacaggatctatt

SEQ ID NO: 4551578 - DNA, 25 bp, Homo sapien
cccctgcgcctcccgagccctccgc

SEQ ID NO: 4551579 - DNA, 25 bp, Homo sapien
ggaaattcttccacctggtgcctgg

SEQ ID NO: 4551580 - DNA, 25 bp, Homo sapien
ccctgcgcctcccgagccctccgcc

SEQ ID NO: 4551581 - DNA, 25 bp, Homo sapien
atggaaattcttccacctggtgcct

SEQ ID NO: 4551582 - DNA, 25 bp, Homo sapien
ttcctgcggcaaccgcggccaagtt

SEQ ID NO: 4551583 - DNA, 25 bp, Homo sapien
tgtgtaattaccctctggctagcct

SEQ ID NO: 4551584 - DNA, 25 bp, Homo sapien
ggctagccttcctgcggcaaccgcg

SEQ ID NO: 4551585 - DNA, 25 bp, Homo sapien
ctgtgtaattaccctctggctagcc

SEQ ID NO: 4551586 - DNA, 25 bp, Homo sapien
ccgggggaggtgtttacagcctgtg

SEQ ID NO: 4551587 - DNA, 25 bp, Homo sapien
ggggaggtgtttacagcctgtgctc

SEQ ID NO: 4551588 - DNA, 25 bp, Homo sapien
ctccgggggaggtgtttacagcctg

SEQ ID NO: 4551589 - DNA, 25 bp, Homo sapien
gaggtgtttacagcctgtgctcgcc

SEQ ID NO: 4551590 - DNA, 25 bp, Homo sapien
ctctccccgctggagagttgttttc

SEQ ID NO: 4551591 - DNA, 25 bp, Homo sapien
ccctctccccgctggagagttgttt

SEQ ID NO: 4551592 - DNA, 25 bp, Homo sapien
cctctccccgctggagagttgtttt

SEQ ID NO: 4551593 - DNA, 25 bp, Homo sapien
ctctcccgtcccaatcccgcctcct

SEQ ID NO: 4551594 - DNA, 25 bp, Homo sapien
ttctctccaccgctcgcccagcagc

SEQ ID NO: 4551595 - DNA, 25 bp, Homo sapien
tctctccaccgctcgcccagcagct

SEQ ID NO: 4551596 - DNA, 25 bp, Homo sapien
acttctctccaccgctcgcccagca

SEQ ID NO: 4551597 - DNA, 25 bp, Homo sapien
agctccttgcccgcccgctgtctct

SEQ ID NO: 4551598 - DNA, 25 bp, Homo sapien
cctcttttcatctgatttgctttcc

SEQ ID NO: 4551599 - DNA, 25 bp, Homo sapien
ctcttttcatctgatttgctttcca

SEQ ID NO: 4551600 - DNA, 25 bp, Homo sapien
tcttttcatctgatttgctttccat

SEQ ID NO: 4551601 - DNA, 25 bp, Homo sapien
ggttgtgtccgcaccagccaggagc

SEQ ID NO: 4551602 - DNA, 25 bp, Homo sapien
cagcagtagactctgttcgctgtgc

SEQ ID NO: 4551603 - DNA, 25 bp, Homo sapien
atctgaaagtctacaggcagcggca

SEQ ID NO: 4551604 - DNA, 25 bp, Homo sapien
ctattgggttgtgtccgcaccagcc

SEQ ID NO: 4551605 - DNA, 25 bp, Homo sapien
ttctgcagaggggtataatcaagac

SEQ ID NO: 4551606 - DNA, 25 bp, Homo sapien
atcaagactgccctgtagcaccagc

SEQ ID NO: 4551607 - DNA, 25 bp, Homo sapien
gggtataatcaagactgccctgtag

SEQ ID NO: 4551608 - DNA, 25 bp, Homo sapien
tgccctgtagcaccagcatatttat

SEQ ID NO: 4551609 - DNA, 25 bp, Homo sapien
gagacatcagtttgtgccagataac

SEQ ID NO: 4551610 - DNA, 25 bp, Homo sapien
catagccgtgacagctagccaacaa

SEQ ID NO: 4551611 - DNA, 25 bp, Homo sapien
taattattgtggttggaacatagcc

SEQ ID NO: 4551612 - DNA, 25 bp, Homo sapien
tttcattgcttttgtgagacatcag

SEQ ID NO: 4551613 - DNA, 25 bp, Homo sapien
tttgaagctggcccaagtactcagg

SEQ ID NO: 4551614 - DNA, 25 bp, Homo sapien
cgccccttctgaattctgcacctcc

SEQ ID NO: 4551615 - DNA, 25 bp, Homo sapien
cacgccccttctgaattctgcacct

SEQ ID NO: 4551616 - DNA, 25 bp, Homo sapien
ttcacgccccttctgaattctgcac

SEQ ID NO: 4551617 - DNA, 25 bp, Homo sapien
gaactgtcaagttcctcctggttaa

SEQ ID NO: 4551618 - DNA, 25 bp, Homo sapien
tgcctgcagcaattattaatgcggt

SEQ ID NO: 4551619 - DNA, 25 bp, Homo sapien
tatccaagcttaggctttgggagct

SEQ ID NO: 4551620 - DNA, 25 bp, Homo sapien
tctgtctttgtcgagaatactgcca

SEQ ID NO: 4551621 - DNA, 25 bp, Homo sapien
tattgcacggcataaagtgagaaca

SEQ ID NO: 4551622 - DNA, 25 bp, Homo sapien
tgatgattgtcttaggcaccctcct

SEQ ID NO: 4551623 - DNA, 25 bp, Homo sapien
cagggagatatgaagacaactacca

SEQ ID NO: 4551624 - DNA, 25 bp, Homo sapien
tcttctaagcccctcatggttaggg

SEQ ID NO: 4551625 - DNA, 25 bp, Homo sapien
cagagaggcgtggagtacattcacc

SEQ ID NO: 4551626 - DNA, 25 bp, Homo sapien
tagtgggcaccgactcttctgagga

SEQ ID NO: 4551627 - DNA, 25 bp, Homo sapien
gaactgcctccatgaagggagctga

SEQ ID NO: 4551628 - DNA, 25 bp, Homo sapien
gcagaacgtaccacaacaaatcgag

SEQ ID NO: 4551629 - DNA, 25 bp, Homo sapien
gagcaatagagcagttctgccaaga

SEQ ID NO: 4551630 - DNA, 25 bp, Homo sapien
gcatttttacacaacccttaactca

SEQ ID NO: 4551631 - DNA, 25 bp, Homo sapien
ttctacggaacacaaaaacttcata

SEQ ID NO: 4551632 - DNA, 25 bp, Homo sapien
tccagaaactaagtcttccttgagc

SEQ ID NO: 4551633 - DNA, 25 bp, Homo sapien
gaagacaagtttacacactgagtga

SEQ ID NO: 4551634 - DNA, 25 bp, Homo sapien
gcaaggcactcgtcctaggagttta

SEQ ID NO: 4551635 - DNA, 25 bp, Homo sapien
gactgagaccgtgcatgaaaatatc

SEQ ID NO: 4551636 - DNA, 25 bp, Homo sapien
gaggtagcgtctttggttcacacta

SEQ ID NO: 4551637 - DNA, 25 bp, Homo sapien
tgcatttaacctgcaaccacggtca

SEQ ID NO: 4551638 - DNA, 25 bp, Homo sapien
aatgaatccaaaagtagcgtagtgc

SEQ ID NO: 4551639 - DNA, 25 bp, Homo sapien
ccacagtaataacccagaaggccaa

SEQ ID NO: 4551640 - DNA, 25 bp, Homo sapien
gtaaagctaaccacaccacagtaat

SEQ ID NO: 4551641 - DNA, 25 bp, Homo sapien
tcttctcattcgacagcagacatga

SEQ ID NO: 4551642 - DNA, 25 bp, Homo sapien
tacattatgtagctgtatccccggc

SEQ ID NO: 4551643 - DNA, 25 bp, Homo sapien
gtgtgtagacacagcttgaatttcc

SEQ ID NO: 4551644 - DNA, 25 bp, Homo sapien
tagtaaatcttgaagggtggccatt

SEQ ID NO: 4551645 - DNA, 25 bp, Homo sapien
taatctgtccctgttagagagcaaa

SEQ ID NO: 4551646 - DNA, 25 bp, Homo sapien
gatcaaaagtcttgtcgtccaccag

SEQ ID NO: 4551647 - DNA, 25 bp, Homo sapien
gatcctgaaaaggagtgtgccatct

SEQ ID NO: 4551648 - DNA, 25 bp, Homo sapien
tcagctaggaacagattatggaacc

SEQ ID NO: 4551649 - DNA, 25 bp, Homo sapien
aaaagatgtccgctcaatggctcaa

SEQ ID NO: 4551650 - DNA, 25 bp, Homo sapien
ctaaacagccaagcacagcgaggat

SEQ ID NO: 4551651 - DNA, 25 bp, Homo sapien
ccctgctgaagtgtgtgtctccaaa

SEQ ID NO: 4551652 - DNA, 25 bp, Homo sapien
caccttcgtggcatggtagaacaga

SEQ ID NO: 4551653 - DNA, 25 bp, Homo sapien
catgctttggtacaagtgcttgatg

SEQ ID NO: 4551654 - DNA, 25 bp, Homo sapien
ctgaattggagctgccctcgtcctg

SEQ ID NO: 4551655 - DNA, 25 bp, Homo sapien
tagagttcgacgctggacatctgtg

SEQ ID NO: 4551656 - DNA, 25 bp, Homo sapien
gatttgcaattctttggatggacgc

SEQ ID NO: 4551657 - DNA, 25 bp, Homo sapien
tctcatcatgaccatagtggaagat

SEQ ID NO: 4551658 - DNA, 25 bp, Homo sapien
ccatagtggaagatggacggggcat

SEQ ID NO: 4551659 - DNA, 25 bp, Homo sapien
ggctgtactctcatcatgaccatag

SEQ ID NO: 4551660 - DNA, 25 bp, Homo sapien
ctttatatctggctggctgtactct

SEQ ID NO: 4551661 - DNA, 25 bp, Homo sapien
cctgatggttcaccagctctggcta

SEQ ID NO: 4551662 - DNA, 25 bp, Homo sapien
agctctggctagattcagcctctgt

SEQ ID NO: 4551663 - DNA, 25 bp, Homo sapien
tgccttccgcttcactgtatgcctc

SEQ ID NO: 4551664 - DNA, 25 bp, Homo sapien
ggttcaccagctctggctagattca

SEQ ID NO: 4551665 - DNA, 25 bp, Homo sapien
gggccactggtccaaccattagtaa

SEQ ID NO: 4551666 - DNA, 25 bp, Homo sapien
tcttctagagatgcatctgcttgcc

SEQ ID NO: 4551667 - DNA, 25 bp, Homo sapien
tggagtgtattcaccctacttacgg

SEQ ID NO: 4551668 - DNA, 25 bp, Homo sapien
aaagagagatttgtaggcaaggcag

SEQ ID NO: 4551669 - DNA, 25 bp, Homo sapien
tgtgaaccactactgacctgcaacg

SEQ ID NO: 4551670 - DNA, 25 bp, Homo sapien
tttctcagagtgtggttggcagacc

SEQ ID NO: 4551671 - DNA, 25 bp, Homo sapien
aatggtgatccttagaacagtttct

SEQ ID NO: 4551672 - DNA, 25 bp, Homo sapien
tatggcagtttgacattgctgcaac

SEQ ID NO: 4551673 - DNA, 25 bp, Homo sapien
ttctccctcgaaatagctgccctag

SEQ ID NO: 4551674 - DNA, 25 bp, Homo sapien
taacatcatcgcagagaaagtggac

SEQ ID NO: 4551675 - DNA, 25 bp, Homo sapien
tggcattgtcataagggcctgctgg

SEQ ID NO: 4551676 - DNA, 25 bp, Homo sapien
cttgacatctaaggacagcttggca

SEQ ID NO: 4551677 - DNA, 25 bp, Homo sapien
tgccactgagagagacccttttctg

SEQ ID NO: 4551678 - DNA, 25 bp, Homo sapien
ctgccactgagagagacccttttct

SEQ ID NO: 4551679 - DNA, 25 bp, Homo sapien
gccactgagagagacccttttctgg

SEQ ID NO: 4551680 - DNA, 25 bp, Homo sapien
ccactgagagagacccttttctggt

SEQ ID NO: 4551681 - DNA, 25 bp, Homo sapien
gctcagagaacttgcacccaaggtg

SEQ ID NO: 4551682 - DNA, 25 bp, Homo sapien
caagcagcaggccagttgtcagcca

SEQ ID NO: 4551683 - DNA, 25 bp, Homo sapien
aagttgagacaaagggagttctggc

SEQ ID NO: 4551684 - DNA, 25 bp, Homo sapien
gccagatccgtcttgatgtggctga

SEQ ID NO: 4551685 - DNA, 25 bp, Homo sapien
gtgaagctccacagctgcatcccag

SEQ ID NO: 4551686 - DNA, 25 bp, Homo sapien
tgagctaagccccattcatgagtca

SEQ ID NO: 4551687 - DNA, 25 bp, Homo sapien
tgggaaccctggacaaggttgcctg

SEQ ID NO: 4551688 - DNA, 25 bp, Homo sapien
ttaccaggcctcacaataagggcgt

SEQ ID NO: 4551689 - DNA, 25 bp, Homo sapien
tctttgaaatagcaaggcaggcact

SEQ ID NO: 4551690 - DNA, 25 bp, Homo sapien
cgattctgaatatcccgtggcggca

SEQ ID NO: 4551691 - DNA, 25 bp, Homo sapien
tgtccaagtgcagatcagaatgcca

SEQ ID NO: 4551692 - DNA, 25 bp, Homo sapien
tctgcagcgagcacagaggtcacta

SEQ ID NO: 4551693 - DNA, 25 bp, Homo sapien
tctatgttccgatcacagtacccaa

SEQ ID NO: 4551694 - DNA, 25 bp, Homo sapien
taaaggtctctaagtgattccaatg

SEQ ID NO: 4551695 - DNA, 25 bp, Homo sapien
tccaatgcccatgtcacgtcctgta

SEQ ID NO: 4551696 - DNA, 25 bp, Homo sapien
caatgtatagcaagatttgggaacc

SEQ ID NO: 4551697 - DNA, 25 bp, Homo sapien
cggtcgcgccctgctggccctttgt

SEQ ID NO: 4551698 - DNA, 25 bp, Homo sapien
gctggccctttgttcgcgccgcagc

SEQ ID NO: 4551699 - DNA, 25 bp, Homo sapien
ggtcgcgccctgctggccctttgtt

SEQ ID NO: 4551700 - DNA, 25 bp, Homo sapien
gggtccgcggtgctgcgcttgctgt

SEQ ID NO: 4551701 - DNA, 25 bp, Homo sapien
gtcgctgtctctttccgagccggca

SEQ ID NO: 4551702 - DNA, 25 bp, Homo sapien
ggcagggtcggagtgcccaacaccc

SEQ ID NO: 4551703 - DNA, 25 bp, Homo sapien
caggtccttcttaggtcgttctggg

SEQ ID NO: 4551704 - DNA, 25 bp, Homo sapien
cttgatagacgcccacgtcagaggc

SEQ ID NO: 4551705 - DNA, 25 bp, Homo sapien
tgatagacgcccacgtcagaggcgc

SEQ ID NO: 4551706 - DNA, 25 bp, Homo sapien
atagacgcccacgtcagaggcgcgc

SEQ ID NO: 4551707 - DNA, 25 bp, Homo sapien
gcccacgtcagaggcgcgccaccca

SEQ ID NO: 4551708 - DNA, 25 bp, Homo sapien
gagacgcggcgagaaccctgtcgct

SEQ ID NO: 4551709 - DNA, 25 bp, Homo sapien
acgcggcgagaaccctgtcgctctg

SEQ ID NO: 4551710 - DNA, 25 bp, Homo sapien
gcggcgagaaccctgtcgctctgct

SEQ ID NO: 4551711 - DNA, 25 bp, Homo sapien
aggagacgcggcgagaaccctgtcg

SEQ ID NO: 4551712 - DNA, 25 bp, Homo sapien
acaggctgccggcaactggaggaca

SEQ ID NO: 4551713 - DNA, 25 bp, Homo sapien
caaacacagcgccacgtgcaagagg

SEQ ID NO: 4551714 - DNA, 25 bp, Homo sapien
cagcagcaagtagtacatggaggga

SEQ ID NO: 4551715 - DNA, 25 bp, Homo sapien
tgttatttcgtgaccggaaggcgcc

SEQ ID NO: 4551716 - DNA, 25 bp, Homo sapien
gtctctgagcgcaacagcaaggaaa

SEQ ID NO: 4551717 - DNA, 25 bp, Homo sapien
ctcgcaaggtggttggaacgagact

SEQ ID NO: 4551718 - DNA, 25 bp, Homo sapien
ggagggtctctgagcgcaacagcaa

SEQ ID NO: 4551719 - DNA, 25 bp, Homo sapien
agcaaggaaagctgccaggggcacc

SEQ ID NO: 4551720 - DNA, 25 bp, Homo sapien
cactctttggcttcagcgggcactg

SEQ ID NO: 4551721 - DNA, 25 bp, Homo sapien
cactgcctgggtaagaggccctgaa

SEQ ID NO: 4551722 - DNA, 25 bp, Homo sapien
gatattgaagtccagagcaagagcc

SEQ ID NO: 4551723 - DNA, 25 bp, Homo sapien
tctccacgcttggaggtcagagggc

SEQ ID NO: 4551724 - DNA, 25 bp, Homo sapien
tggagatatggtgccggtagcacaa

SEQ ID NO: 4551725 - DNA, 25 bp, Homo sapien
tctggagagacggagcagtcaggac

SEQ ID NO: 4551726 - DNA, 25 bp, Homo sapien
ggaacctcagttgctcgcgggcagc

SEQ ID NO: 4551727 - DNA, 25 bp, Homo sapien
agtcaggacgaggagcagccccttc

SEQ ID NO: 4551728 - DNA, 25 bp, Homo sapien
ggcgcccagcgagcctcttctcccc

SEQ ID NO: 4551729 - DNA, 25 bp, Homo sapien
aaaaccgggggccagcgattcgctg

SEQ ID NO: 4551730 - DNA, 25 bp, Homo sapien
gttcccgggcgcaggctgcaggaac

SEQ ID NO: 4551731 - DNA, 25 bp, Homo sapien
tctcccctgactggttcccgggcgc

SEQ ID NO: 4551732 - DNA, 25 bp, Homo sapien
ttctcttcgccaaggctcaggcctg

SEQ ID NO: 4551733 - DNA, 25 bp, Homo sapien
tcgccaaggctcaggcctgggcgct

SEQ ID NO: 4551734 - DNA, 25 bp, Homo sapien
tcttcgccaaggctcaggcctgggc

SEQ ID NO: 4551735 - DNA, 25 bp, Homo sapien
ttttctcttcgccaaggctcaggcc

SEQ ID NO: 4551736 - DNA, 25 bp, Homo sapien
ggtttcgggcaggagacctctgctc

SEQ ID NO: 4551737 - DNA, 25 bp, Homo sapien
cactgggaccttgggacggtcagcc

SEQ ID NO: 4551738 - DNA, 25 bp, Homo sapien
cccaggacatggctattgctttgca

SEQ ID NO: 4551739 - DNA, 25 bp, Homo sapien
ttctctgcctatccgcggtctcggg

SEQ ID NO: 4551740 - DNA, 25 bp, Homo sapien
gttcggccaaacatcgacgctgctc

SEQ ID NO: 4551741 - DNA, 25 bp, Homo sapien
tactcttagattgaggtcaccccag

SEQ ID NO: 4551742 - DNA, 25 bp, Homo sapien
ccagccagcgccaaaagaatgagcg

SEQ ID NO: 4551743 - DNA, 25 bp, Homo sapien
ccagcgcctgggatgtgtcagaggt

SEQ ID NO: 4551744 - DNA, 25 bp, Homo sapien
tgagccctggagtaggcaatttgct

SEQ ID NO: 4551745 - DNA, 25 bp, Homo sapien
atgagcctcttcagtcgccgaggcc

SEQ ID NO: 4551746 - DNA, 25 bp, Homo sapien
tgtccctgagcgcaaatgagcctct

SEQ ID NO: 4551747 - DNA, 25 bp, Homo sapien
aggcccggccgcttagctctcggag

SEQ ID NO: 4551748 - DNA, 25 bp, Homo sapien
tttcgtgtaccttatctcccgcgcg

SEQ ID NO: 4551749 - DNA, 25 bp, Homo sapien
gtgtaccttatctcccgcgcgccca

SEQ ID NO: 4551750 - DNA, 25 bp, Homo sapien
tcgtgtaccttatctcccgcgcgcc

SEQ ID NO: 4551751 - DNA, 25 bp, Homo sapien
gctttcgtgtaccttatctcccgcg

SEQ ID NO: 4551752 - DNA, 25 bp, Homo sapien
cctgaattacttccattgctgacct

SEQ ID NO: 4551753 - DNA, 25 bp, Homo sapien
accctctgcgcgaagatggcctgtg

SEQ ID NO: 4551754 - DNA, 25 bp, Homo sapien
aaggccgttgatgggcaccatgccg

SEQ ID NO: 4551755 - DNA, 25 bp, Homo sapien
agctcggtggtgatacgctgcgcca

SEQ ID NO: 4551756 - DNA, 25 bp, Homo sapien
ggctctggcccatgccggccacgtc

SEQ ID NO: 4551757 - DNA, 25 bp, Homo sapien
aggctctggcccatgccggccacgt

SEQ ID NO: 4551758 - DNA, 25 bp, Homo sapien
ctgcccagaccggagctggagaggg

SEQ ID NO: 4551759 - DNA, 25 bp, Homo sapien
tgctgggagttgtggatgctgccca

SEQ ID NO: 4551760 - DNA, 25 bp, Homo sapien
tggtagggggtatagaggttattca

SEQ ID NO: 4551761 - DNA, 25 bp, Homo sapien
aggccagcccgcgctcatcccgcat

SEQ ID NO: 4551762 - DNA, 25 bp, Homo sapien
ggaggccagcccgcgctcatcccgc

SEQ ID NO: 4551763 - DNA, 25 bp, Homo sapien
gaggccagcccgcgctcatcccgca

SEQ ID NO: 4551764 - DNA, 25 bp, Homo sapien
ctaccgctcacgttgcccgccaggc

SEQ ID NO: 4551765 - DNA, 25 bp, Homo sapien
ctcacgttgcccgccaggcgctggt

SEQ ID NO: 4551766 - DNA, 25 bp, Homo sapien
accgctcacgttgcccgccaggcgc

SEQ ID NO: 4551767 - DNA, 25 bp, Homo sapien
cgctcacgttgcccgccaggcgctg

SEQ ID NO: 4551768 - DNA, 25 bp, Homo sapien
agaggggtcaaggtggtgtaggtgg

SEQ ID NO: 4551769 - DNA, 25 bp, Homo sapien
tggctgccgcggtgcgccacggagc

SEQ ID NO: 4551770 - DNA, 25 bp, Homo sapien
agtctcgcaggccatggtcatggtg

SEQ ID NO: 4551771 - DNA, 25 bp, Homo sapien
cagggacgccatgcccatggagcgc

SEQ ID NO: 4551772 - DNA, 25 bp, Homo sapien
gtgcgccacggagctgcgcgcgtgg

SEQ ID NO: 4551773 - DNA, 25 bp, Homo sapien
gtgcagctcgccgatcgcttccatg

SEQ ID NO: 4551774 - DNA, 25 bp, Homo sapien
cccgtgcagctcgccgatcgcttcc

SEQ ID NO: 4551775 - DNA, 25 bp, Homo sapien
cgtgcagctcgccgatcgcttccat

SEQ ID NO: 4551776 - DNA, 25 bp, Homo sapien
gcagctcgccgatcgcttccatggt

SEQ ID NO: 4551777 - DNA, 25 bp, Homo sapien
tccggtcttcacatcggctgctggc

SEQ ID NO: 4551778 - DNA, 25 bp, Homo sapien
cacaacatcgatgtggccaggcaga

SEQ ID NO: 4551779 - DNA, 25 bp, Homo sapien
agcaggcggcggacacaacatcgat

SEQ ID NO: 4551780 - DNA, 25 bp, Homo sapien
gggcgcacggagtccggtcttcaca

SEQ ID NO: 4551781 - DNA, 25 bp, Homo sapien
ccttccttcctctcactgtggggct

SEQ ID NO: 4551782 - DNA, 25 bp, Homo sapien
ctgttgccttccttcctctcactgt

SEQ ID NO: 4551783 - DNA, 25 bp, Homo sapien
cttcctctcactgtggggctctgtc

SEQ ID NO: 4551784 - DNA, 25 bp, Homo sapien
tccttcctctcactgtggggctctg

SEQ ID NO: 4551785 - DNA, 25 bp, Homo sapien
tccaaagaggatccgcgccgttggg

SEQ ID NO: 4551786 - DNA, 25 bp, Homo sapien
taaaattctgaggtctccggctccc

SEQ ID NO: 4551787 - DNA, 25 bp, Homo sapien
cacctctcgcccctctctttcttaa

SEQ ID NO: 4551788 - DNA, 25 bp, Homo sapien
ttgggagagcgcagtgccccagccc

SEQ ID NO: 4551789 - DNA, 25 bp, Homo sapien
gaaagattggcgcagagcgcgacct

SEQ ID NO: 4551790 - DNA, 25 bp, Homo sapien
cacccttgaattcacggcctattgg

SEQ ID NO: 4551791 - DNA, 25 bp, Homo sapien
ttggcgtcccggtacaaatgaagga

SEQ ID NO: 4551792 - DNA, 25 bp, Homo sapien
gctcataattaaggctgtgcgtccg

SEQ ID NO: 4551793 - DNA, 25 bp, Homo sapien
tactgacgcagacagggtggacgcc

SEQ ID NO: 4551794 - DNA, 25 bp, Homo sapien
cccgagagacgcctccagatttgaa

SEQ ID NO: 4551795 - DNA, 25 bp, Homo sapien
gaggcggttgctttccagaagtact

SEQ ID NO: 4551796 - DNA, 25 bp, Homo sapien
caatctggaatcgaacctggtcttt

SEQ ID NO: 4551797 - DNA, 25 bp, Homo sapien
gagtaggcctatctctttgcccagg

SEQ ID NO: 4551798 - DNA, 25 bp, Homo sapien
cagggcaacatcctaatccaggtag

SEQ ID NO: 4551799 - DNA, 25 bp, Homo sapien
tcaagttcagtggatacagtcaacg

SEQ ID NO: 4551800 - DNA, 25 bp, Homo sapien
tacagtcaacgtgacttccttgaag

SEQ ID NO: 4551801 - DNA, 25 bp, Homo sapien
tttggggtggcggttaatgctcctc

SEQ ID NO: 4551802 - DNA, 25 bp, Homo sapien
tttcttggacataacttcatatcat

SEQ ID NO: 4551803 - DNA, 25 bp, Homo sapien
cgagggcgttgaattgtccggattt

SEQ ID NO: 4551804 - DNA, 25 bp, Homo sapien
acaccagctcaagccgcgagggcgt

SEQ ID NO: 4551805 - DNA, 25 bp, Homo sapien
gacggatgtagttccaagcgacccg

SEQ ID NO: 4551806 - DNA, 25 bp, Homo sapien
gcaaagtcggcccaggacgatcttc

SEQ ID NO: 4551807 - DNA, 25 bp, Homo sapien
gagaactcttgcaccgacggatgta

SEQ ID NO: 4551808 - DNA, 25 bp, Homo sapien
tccaagcgacccgaaatgaggaaaa

SEQ ID NO: 4551809 - DNA, 25 bp, Homo sapien
gagctcgcggcccacttagctaatg

SEQ ID NO: 4551810 - DNA, 25 bp, Homo sapien
gctaatgccgggtaatgccgacccc

SEQ ID NO: 4551811 - DNA, 25 bp, Homo sapien
cggaagcggagggtggctgtccagc

SEQ ID NO: 4551812 - DNA, 25 bp, Homo sapien
gcctctgatccacggggcttggacc

SEQ ID NO: 4551813 - DNA, 25 bp, Homo sapien
gtcaagtaccgtagatttaacagaa

SEQ ID NO: 4551814 - DNA, 25 bp, Homo sapien
tcaattagtgtttgcgcagtcaagt

SEQ ID NO: 4551815 - DNA, 25 bp, Homo sapien
ttaacagaataatcgttactgccct

SEQ ID NO: 4551816 - DNA, 25 bp, Homo sapien
ttgtctttatttgacccgcagacac

SEQ ID NO: 4551817 - DNA, 25 bp, Homo sapien
gagaaacggcttctgattgtgggac

SEQ ID NO: 4551818 - DNA, 25 bp, Homo sapien
cccgtggctggcacgagaaacggct

SEQ ID NO: 4551819 - DNA, 25 bp, Homo sapien
agccctgtcggccttccgagtctcg

SEQ ID NO: 4551820 - DNA, 25 bp, Homo sapien
tgggcgagcgcacctgccttttggc

SEQ ID NO: 4551821 - DNA, 25 bp, Homo sapien
tcgccaagcgcccagttgtcttttc

SEQ ID NO: 4551822 - DNA, 25 bp, Homo sapien
ttagggactcgccaagcgcccagtt

SEQ ID NO: 4551823 - DNA, 25 bp, Homo sapien
tgtagaattagggactcgccaagcg

SEQ ID NO: 4551824 - DNA, 25 bp, Homo sapien
ctgggtgtagaattagggactcgcc

SEQ ID NO: 4551825 - DNA, 25 bp, Homo sapien
ggaaaagctgagagtatagccttgg

SEQ ID NO: 4551826 - DNA, 25 bp, Homo sapien
tgcctgagtctctcccggtaaatgc

SEQ ID NO: 4551827 - DNA, 25 bp, Homo sapien
atgcagtgacccacggcgcaggacg

SEQ ID NO: 4551828 - DNA, 25 bp, Homo sapien
gagagtatagccttggtccctaaaa

SEQ ID NO: 4551829 - DNA, 25 bp, Homo sapien
gagtctttttcaggcctaacaggtg

SEQ ID NO: 4551830 - DNA, 25 bp, Homo sapien
tgtggacgcctgtgtatgtgtagac

SEQ ID NO: 4551831 - DNA, 25 bp, Homo sapien
tccacagggttggaaggatgcttac

SEQ ID NO: 4551832 - DNA, 25 bp, Homo sapien
tagacagtctggttctgcgccatgc

SEQ ID NO: 4551833 - DNA, 25 bp, Homo sapien
cagggccaagagacctcgaggtggg

SEQ ID NO: 4551834 - DNA, 25 bp, Homo sapien
agggccaagagacctcgaggtgggg

SEQ ID NO: 4551835 - DNA, 25 bp, Homo sapien
taacaatctcccttgtgtgacagcc

SEQ ID NO: 4551836 - DNA, 25 bp, Homo sapien
gccatttgaagacctcgagtttacc

SEQ ID NO: 4551837 - DNA, 25 bp, Homo sapien
gaatctgggacccttcaaatgccat

SEQ ID NO: 4551838 - DNA, 25 bp, Homo sapien
ttttcagccgtgagtggaatctggg

SEQ ID NO: 4551839 - DNA, 25 bp, Homo sapien
actggccccaaatatcgacccactc

SEQ ID NO: 4551840 - DNA, 25 bp, Homo sapien
cactctcggttttcccctagtcaag

SEQ ID NO: 4551841 - DNA, 25 bp, Homo sapien
cccaaatatcgacccactctcggtt

SEQ ID NO: 4551842 - DNA, 25 bp, Homo sapien
caaatatcgacccactctcggtttt

SEQ ID NO: 4551843 - DNA, 25 bp, Homo sapien
ctgagagggaggaggagaaacagag

SEQ ID NO: 4551844 - DNA, 25 bp, Homo sapien
tgagagggaggaggagaaacagagg

SEQ ID NO: 4551845 - DNA, 25 bp, Homo sapien
gagagggaggaggagaaacagaggg

SEQ ID NO: 4551846 - DNA, 25 bp, Homo sapien
agagggaggaggagaaacagagggg

SEQ ID NO: 4551847 - DNA, 25 bp, Homo sapien
tgtacaggcgttaattggtcctccg

SEQ ID NO: 4551848 - DNA, 25 bp, Homo sapien
gaggcccgcgagagtgcaaatagct

SEQ ID NO: 4551849 - DNA, 25 bp, Homo sapien
catgtgcgcagccagggttcctatt

SEQ ID NO: 4551850 - DNA, 25 bp, Homo sapien
caatatgtggccacgctggttcagc

SEQ ID NO: 4551851 - DNA, 25 bp, Homo sapien
gtaaaggtgacaggccccgctggac

SEQ ID NO: 4551852 - DNA, 25 bp, Homo sapien
tggacgccaacgctggactagcagt

SEQ ID NO: 4551853 - DNA, 25 bp, Homo sapien
ccagggcttaaggagaagcggatat

SEQ ID NO: 4551854 - DNA, 25 bp, Homo sapien
cccttgttacttgtaaaggtgacag

SEQ ID NO: 4551855 - DNA, 25 bp, Homo sapien
agatgctggaagggaagtggcaagg

SEQ ID NO: 4551856 - DNA, 25 bp, Homo sapien
gagtcagggcgtcttttccccagat

SEQ ID NO: 4551857 - DNA, 25 bp, Homo sapien
gtcagggcgtcttttccccagatgc

SEQ ID NO: 4551858 - DNA, 25 bp, Homo sapien
ttgagtcagggcgtcttttccccag

SEQ ID NO: 4551859 - DNA, 25 bp, Homo sapien
cagacttcctttccgcttgggctgg

SEQ ID NO: 4551860 - DNA, 25 bp, Homo sapien
tttccagagtgaacaggcgcatacc

SEQ ID NO: 4551861 - DNA, 25 bp, Homo sapien
tagattactccactagcttcctggg

SEQ ID NO: 4551862 - DNA, 25 bp, Homo sapien
ggcgcataccccagagcttaacctt

SEQ ID NO: 4551863 - DNA, 25 bp, Homo sapien
aatgatttctctaagcttaagcaag

SEQ ID NO: 4551864 - DNA, 25 bp, Homo sapien
gcatcatttcattgccccaacctgg

SEQ ID NO: 4551865 - DNA, 25 bp, Homo sapien
gaggaggagtctcccattgcatcat

SEQ ID NO: 4551866 - DNA, 25 bp, Homo sapien
taagcttaagcaagtcaaggtggct

SEQ ID NO: 4551867 - DNA, 25 bp, Homo sapien
gagagcgagagatgtaacaaaccca

SEQ ID NO: 4551868 - DNA, 25 bp, Homo sapien
tgcatgctcatgtggcccaatgtaa

SEQ ID NO: 4551869 - DNA, 25 bp, Homo sapien
cagagcagccgagtagttagaattc

SEQ ID NO: 4551870 - DNA, 25 bp, Homo sapien
tctctctccaacgaaagcgatggtc

SEQ ID NO: 4551871 - DNA, 25 bp, Homo sapien
gcaagtgtcccagagctgatctgtc

SEQ ID NO: 4551872 - DNA, 25 bp, Homo sapien
gcctaggagggcaaaagaatagatt

SEQ ID NO: 4551873 - DNA, 25 bp, Homo sapien
tcccaaacgttttcttacatatctg

SEQ ID NO: 4551874 - DNA, 25 bp, Homo sapien
gcctcaaaatgtgcatctgacccag

SEQ ID NO: 4551875 - DNA, 25 bp, Homo sapien
cgcaggtgcagttcggccgccgcac

SEQ ID NO: 4551876 - DNA, 25 bp, Homo sapien
aggtgcagttcggccgccgcacgct

SEQ ID NO: 4551877 - DNA, 25 bp, Homo sapien
gccgcacgctgcctggcgggagaaa

SEQ ID NO: 4551878 - DNA, 25 bp, Homo sapien
gctgcctggcgggagaaacgcgcac

SEQ ID NO: 4551879 - DNA, 25 bp, Homo sapien
ccgtgttatttacaccctgctcggg

SEQ ID NO: 4551880 - DNA, 25 bp, Homo sapien
gctcctgtagttgccactagctcgg

SEQ ID NO: 4551881 - DNA, 25 bp, Homo sapien
actagctcggggcacgcccgtgtta

SEQ ID NO: 4551882 - DNA, 25 bp, Homo sapien
taaactcatggggaggaactgttag

SEQ ID NO: 4551883 - DNA, 25 bp, Homo sapien
ccccccccaaacgcttgtgagactg

SEQ ID NO: 4551884 - DNA, 25 bp, Homo sapien
ccccaaacgcttgtgagactggctt

SEQ ID NO: 4551885 - DNA, 25 bp, Homo sapien
ccaaacgcttgtgagactggcttac

SEQ ID NO: 4551886 - DNA, 25 bp, Homo sapien
ccccccaaacgcttgtgagactggc

SEQ ID NO: 4551887 - DNA, 25 bp, Homo sapien
cttctgtgacatgagatcaggttcg

SEQ ID NO: 4551888 - DNA, 25 bp, Homo sapien
caggttcgcgttcgaggatttgccc

SEQ ID NO: 4551889 - DNA, 25 bp, Homo sapien
ttcatggcaagttgcttctgtgaca

SEQ ID NO: 4551890 - DNA, 25 bp, Homo sapien
cgagtcgcagcgcattagcggattt

SEQ ID NO: 4551891 - DNA, 25 bp, Homo sapien
tatggacccgggaaagctctgaaag

SEQ ID NO: 4551892 - DNA, 25 bp, Homo sapien
ggattgagaacccaagcgcgagtct

SEQ ID NO: 4551893 - DNA, 25 bp, Homo sapien
ccagctaaatcaggaaccggagagg

SEQ ID NO: 4551894 - DNA, 25 bp, Homo sapien
attcctgcaaggtcgcgaggtgaga

SEQ ID NO: 4551895 - DNA, 25 bp, Homo sapien
taaagaaataggacactagggcgcc

SEQ ID NO: 4551896 - DNA, 25 bp, Homo sapien
taatcccagtaattgtagggctcgc

SEQ ID NO: 4551897 - DNA, 25 bp, Homo sapien
agagctcagaaagctccgggcagcg

SEQ ID NO: 4551898 - DNA, 25 bp, Homo sapien
agaacggttgggctgcggtgcctcc

SEQ ID NO: 4551899 - DNA, 25 bp, Homo sapien
ccgccgggatgtggaggcccactgg

SEQ ID NO: 4551900 - DNA, 25 bp, Homo sapien
ccgggatgtggaggcccactgggtt

SEQ ID NO: 4551901 - DNA, 25 bp, Homo sapien
gcggcccgccgggatgtggaggccc

SEQ ID NO: 4551902 - DNA, 25 bp, Homo sapien
ctggcggcccgccgggatgtggagg

SEQ ID NO: 4551903 - DNA, 25 bp, Homo sapien
cagaccccgacgcgtggggacccag

SEQ ID NO: 4551904 - DNA, 25 bp, Homo sapien
tggcgggaaggccaggtccgggatg

SEQ ID NO: 4551905 - DNA, 25 bp, Homo sapien
cttgggcgccgactgtgggcggtct

SEQ ID NO: 4551906 - DNA, 25 bp, Homo sapien
gatgggcgtcttgggcttgggcgcc

SEQ ID NO: 4551907 - DNA, 25 bp, Homo sapien
cccttgctggcagagtccgggcagg

SEQ ID NO: 4551908 - DNA, 25 bp, Homo sapien
caggtgctcgttgccacgcgttcgc

SEQ ID NO: 4551909 - DNA, 25 bp, Homo sapien
gtcgcgcccgcaggctaggccagct

SEQ ID NO: 4551910 - DNA, 25 bp, Homo sapien
agcttctggcgcccccgaaaatgac

SEQ ID NO: 4551911 - DNA, 25 bp, Homo sapien
agggacagggagtttgtcaccaaag

SEQ ID NO: 4551912 - DNA, 25 bp, Homo sapien
ttctgtatctgagggaagtgacaga

SEQ ID NO: 4551913 - DNA, 25 bp, Homo sapien
cttttctgtatctgagggaagtgac

SEQ ID NO: 4551914 - DNA, 25 bp, Homo sapien
acagggagtttgtcaccaaaggctt

SEQ ID NO: 4551915 - DNA, 25 bp, Homo sapien
gtccttttcagctatcctgctcttc

SEQ ID NO: 4551916 - DNA, 25 bp, Homo sapien
gagagtccttttcagctatcctgct

SEQ ID NO: 4551917 - DNA, 25 bp, Homo sapien
gagtccttttcagctatcctgctct

SEQ ID NO: 4551918 - DNA, 25 bp, Homo sapien
agagtccttttcagctatcctgctc

SEQ ID NO: 4551919 - DNA, 25 bp, Homo sapien
cagggcagtcctgtgggagtgtctc

SEQ ID NO: 4551920 - DNA, 25 bp, Homo sapien
agaagcccatttccccagggcagtc

SEQ ID NO: 4551921 - DNA, 25 bp, Homo sapien
caggtgtagaagcccatttccccag

SEQ ID NO: 4551922 - DNA, 25 bp, Homo sapien
caccagctggatttcttaagcatcc

SEQ ID NO: 4551923 - DNA, 25 bp, Homo sapien
ccaggctgctcactaaggcaggtct

SEQ ID NO: 4551924 - DNA, 25 bp, Homo sapien
ctgctcactaaggcaggtctgcatc

SEQ ID NO: 4551925 - DNA, 25 bp, Homo sapien
cccaggctgctcactaaggcaggtc

SEQ ID NO: 4551926 - DNA, 25 bp, Homo sapien
tcctgagaggttgagtaagtggttt

SEQ ID NO: 4551927 - DNA, 25 bp, Homo sapien
tccaagtcaggtatcgcactcttat

SEQ ID NO: 4551928 - DNA, 25 bp, Homo sapien
cctctggcattgactggagattctt

SEQ ID NO: 4551929 - DNA, 25 bp, Homo sapien
tcttgtactgagaactagtttcctc

SEQ ID NO: 4551930 - DNA, 25 bp, Homo sapien
aagtagtgctcctctcgggcactgg

SEQ ID NO: 4551931 - DNA, 25 bp, Homo sapien
tctgcccccaatgttccgctgaaag

SEQ ID NO: 4551932 - DNA, 25 bp, Homo sapien
ctacagggctaatgtgttaataata

SEQ ID NO: 4551933 - DNA, 25 bp, Homo sapien
gctgctgtgtgggtctccattctgc

SEQ ID NO: 4551934 - DNA, 25 bp, Homo sapien
tctgactgacaacccatttaggata

SEQ ID NO: 4551935 - DNA, 25 bp, Homo sapien
caacaccgttaatttgcagaggaaa

SEQ ID NO: 4551936 - DNA, 25 bp, Homo sapien
tttcaacagagacatgcaacaccgt

SEQ ID NO: 4551937 - DNA, 25 bp, Homo sapien
gagggttggcagctttgtaacatca

SEQ ID NO: 4551938 - DNA, 25 bp, Homo sapien
acatggtgtggggactctgaggaag

SEQ ID NO: 4551939 - DNA, 25 bp, Homo sapien
tctgaggaagtccttctgaaatagc

SEQ ID NO: 4551940 - DNA, 25 bp, Homo sapien
ctctgaggaagtccttctgaaatag

SEQ ID NO: 4551941 - DNA, 25 bp, Homo sapien
catggtgtggggactctgaggaagt

SEQ ID NO: 4551942 - DNA, 25 bp, Homo sapien
tagcaaggaggggatgggaacccac

SEQ ID NO: 4551943 - DNA, 25 bp, Homo sapien
ctagcaaggaggggatgggaaccca

SEQ ID NO: 4551944 - DNA, 25 bp, Homo sapien
gtctgtcccttttcatgaagatgag

SEQ ID NO: 4551945 - DNA, 25 bp, Homo sapien
tgaagatgagggattgacaaacacc

SEQ ID NO: 4551946 - DNA, 25 bp, Homo sapien
ggagcctaggatgcagcatctggat

SEQ ID NO: 4551947 - DNA, 25 bp, Homo sapien
tctggatgcacggtcactggagaat

SEQ ID NO: 4551948 - DNA, 25 bp, Homo sapien
tggagagttagcacaaggaatgtgg

SEQ ID NO: 4551949 - DNA, 25 bp, Homo sapien
agagttagcacaaggaatgtgggaa

SEQ ID NO: 4551950 - DNA, 25 bp, Homo sapien
gaagaccctttagttccagacaata

SEQ ID NO: 4551951 - DNA, 25 bp, Homo sapien
atgtgggaagaccctttagttccag

SEQ ID NO: 4551952 - DNA, 25 bp, Homo sapien
ggtgttgggcagatatccggacccc

SEQ ID NO: 4551953 - DNA, 25 bp, Homo sapien
tggtgtagcgggaataccttcctca

SEQ ID NO: 4551954 - DNA, 25 bp, Homo sapien
gagggcatgatttgaattcactatc

SEQ ID NO: 4551955 - DNA, 25 bp, Homo sapien
tgtggcagttctactgtcaactgga

SEQ ID NO: 4551956 - DNA, 25 bp, Homo sapien
tgaagatactttgcaaaagtaaagc

SEQ ID NO: 4551957 - DNA, 25 bp, Homo sapien
tgctgaggggacaaatgataaaatt

SEQ ID NO: 4551958 - DNA, 25 bp, Homo sapien
taaagctctgcacagatatatcttg

SEQ ID NO: 4551959 - DNA, 25 bp, Homo sapien
aatgataaaatttccgtgaagatac

SEQ ID NO: 4551960 - DNA, 25 bp, Homo sapien
tcttccacaataacattggtcacag

SEQ ID NO: 4551961 - DNA, 25 bp, Homo sapien
cacagtaatatttggcaagtttgcg

SEQ ID NO: 4551962 - DNA, 25 bp, Homo sapien
caagtttgcgatttggcaaagggat

SEQ ID NO: 4551963 - DNA, 25 bp, Homo sapien
cttggtacagagagttataactctc

SEQ ID NO: 4551964 - DNA, 25 bp, Homo sapien
tgccagactcggtgtgatgtagctc

SEQ ID NO: 4551965 - DNA, 25 bp, Homo sapien
tactgagagtcaacactaatagccg

SEQ ID NO: 4551966 - DNA, 25 bp, Homo sapien
gccgacaccaaattaaactgccaga

SEQ ID NO: 4551967 - DNA, 25 bp, Homo sapien
gcttctgcaggaaattcatcagctg

SEQ ID NO: 4551968 - DNA, 25 bp, Homo sapien
agtctcctccgcaggcagagggtga

SEQ ID NO: 4551969 - DNA, 25 bp, Homo sapien
gcagtctcctccgcaggcagagggt

SEQ ID NO: 4551970 - DNA, 25 bp, Homo sapien
ctgcagtctcctccgcaggcagagg

SEQ ID NO: 4551971 - DNA, 25 bp, Homo sapien
gcaggcagagggtgaaagatgacac

SEQ ID NO: 4551972 - DNA, 25 bp, Homo sapien
tcaggtatttcatgtggatgctccg

SEQ ID NO: 4551973 - DNA, 25 bp, Homo sapien
tgtcacctttttaggctgtctcagg

SEQ ID NO: 4551974 - DNA, 25 bp, Homo sapien
gatgctccgtcttccaaatgatgtc

SEQ ID NO: 4551975 - DNA, 25 bp, Homo sapien
gcatcggcattaatcttggtgacaa

SEQ ID NO: 4551976 - DNA, 25 bp, Homo sapien
gatagcagcaacgatgctaatttga

SEQ ID NO: 4551977 - DNA, 25 bp, Homo sapien
gcaacgatgctaatttgaaaatact

SEQ ID NO: 4551978 - DNA, 25 bp, Homo sapien
tttttgtcccttgataatcataaag

SEQ ID NO: 4551979 - DNA, 25 bp, Homo sapien
gggagatagcagcaacgatgctaat

SEQ ID NO: 4551980 - DNA, 25 bp, Homo sapien
tgactgtatttgttcgcatattcat

SEQ ID NO: 4551981 - DNA, 25 bp, Homo sapien
gtatttgttcgcatattcatgttca

SEQ ID NO: 4551982 - DNA, 25 bp, Homo sapien
tgttcgcatattcatgttcaaagac

SEQ ID NO: 4551983 - DNA, 25 bp, Homo sapien
gcatattcatgttcaaagacaccct

SEQ ID NO: 4551984 - DNA, 25 bp, Homo sapien
agcttgctttcctttatagcgggaa

SEQ ID NO: 4551985 - DNA, 25 bp, Homo sapien
ggaaacacagaatcaccctccgctt

SEQ ID NO: 4551986 - DNA, 25 bp, Homo sapien
tttactttgcactctggactcagct

SEQ ID NO: 4551987 - DNA, 25 bp, Homo sapien
ggtacctttttcagcacatgaccac

SEQ ID NO: 4551988 - DNA, 25 bp, Homo sapien
ctttactagacctacttgtctacat

SEQ ID NO: 4551989 - DNA, 25 bp, Homo sapien
tagacctacttgtctacataatttc

SEQ ID NO: 4551990 - DNA, 25 bp, Homo sapien
tttactagacctacttgtctacata

SEQ ID NO: 4551991 - DNA, 25 bp, Homo sapien
tactagacctacttgtctacataat

SEQ ID NO: 4551992 - DNA, 25 bp, Homo sapien
catggtttgagggtccgattgctca

SEQ ID NO: 4551993 - DNA, 25 bp, Homo sapien
tggtggttggttatggccctccaga

SEQ ID NO: 4551994 - DNA, 25 bp, Homo sapien
tttggtggttggttatggccctcca

SEQ ID NO: 4551995 - DNA, 25 bp, Homo sapien
cgattgctcataggttttggtggtt

SEQ ID NO: 4551996 - DNA, 25 bp, Homo sapien
tattgtacgtctttttcaaaggcca

SEQ ID NO: 4551997 - DNA, 25 bp, Homo sapien
ggtggatgttttcatcacgggcatc

SEQ ID NO: 4551998 - DNA, 25 bp, Homo sapien
ctggtggatgttttcatcacgggca

SEQ ID NO: 4551999 - DNA, 25 bp, Homo sapien
gatgttttcatcacgggcatcccat

SEQ ID NO: 4552000 - DNA, 25 bp, Homo sapien
tttcatcacgggcatcccattcagg

SEQ ID NO: 4552001 - DNA, 25 bp, Homo sapien
ctaaagtgtagagggtgtggacagc

SEQ ID NO: 4552002 - DNA, 25 bp, Homo sapien
taacattccaatttttagatggtca

SEQ ID NO: 4552003 - DNA, 25 bp, Homo sapien
ctcttgctcttgtaacattccaatt

SEQ ID NO: 4552004 - DNA, 25 bp, Homo sapien
tccaatttttagatggtcagtcacc

SEQ ID NO: 4552005 - DNA, 25 bp, Homo sapien
caatttttagatggtcagtcaccat

SEQ ID NO: 4552006 - DNA, 25 bp, Homo sapien
tctggtctccctctcagggcagtgt

SEQ ID NO: 4552007 - DNA, 25 bp, Homo sapien
ggcagtgttaatcaaattgctgcag

SEQ ID NO: 4552008 - DNA, 25 bp, Homo sapien
tgctccttagagcttcctctggtct

SEQ ID NO: 4552009 - DNA, 25 bp, Homo sapien
tgcaggttttcggaagccaggtgcc

SEQ ID NO: 4552010 - DNA, 25 bp, Homo sapien
ctccgacccttctccggggactcat

SEQ ID NO: 4552011 - DNA, 25 bp, Homo sapien
ttacaggaaccatgtcaacgatggc

SEQ ID NO: 4552012 - DNA, 25 bp, Homo sapien
tcttaacacacatgggctttacagg

SEQ ID NO: 4552013 - DNA, 25 bp, Homo sapien
aagctcttaacacacatgggcttta

SEQ ID NO: 4552014 - DNA, 25 bp, Homo sapien
gctttacaggaaccatgtcaacgat

SEQ ID NO: 4552015 - DNA, 25 bp, Homo sapien
ttcaagaatttagggccatcttcca

SEQ ID NO: 4552016 - DNA, 25 bp, Homo sapien
tcaagaatttagggccatcttccag

SEQ ID NO: 4552017 - DNA, 25 bp, Homo sapien
cttcaagaatttagggccatcttcc

SEQ ID NO: 4552018 - DNA, 25 bp, Homo sapien
agttgccacgacaaagatccttgac

SEQ ID NO: 4552019 - DNA, 25 bp, Homo sapien
accagcaaagttgccacgacaaaga

SEQ ID NO: 4552020 - DNA, 25 bp, Homo sapien
ggctgattaggcctggacggttcag

SEQ ID NO: 4552021 - DNA, 25 bp, Homo sapien
atccagtacagggacgtagccaggg

SEQ ID NO: 4552022 - DNA, 25 bp, Homo sapien
aatcttcatggtgccttttgacaga

SEQ ID NO: 4552023 - DNA, 25 bp, Homo sapien
tcttcatggtgccttttgacagatt

SEQ ID NO: 4552024 - DNA, 25 bp, Homo sapien
cactcaaatcttcatggtgcctttt

SEQ ID NO: 4552025 - DNA, 25 bp, Homo sapien
ctcaaatcttcatggtgccttttga

SEQ ID NO: 4552026 - DNA, 25 bp, Homo sapien
gcctcaagcagcgtaggtccaatgg

SEQ ID NO: 4552027 - DNA, 25 bp, Homo sapien
cagtagttacaggtgaatttccatc

SEQ ID NO: 4552028 - DNA, 25 bp, Homo sapien
ggtccaatggcgctgcagtagttac

SEQ ID NO: 4552029 - DNA, 25 bp, Homo sapien
cagcgtaggtccaatggcgctgcag

SEQ ID NO: 4552030 - DNA, 25 bp, Homo sapien
tgggacatcagtgatagtcacatag

SEQ ID NO: 4552031 - DNA, 25 bp, Homo sapien
tcctgggacatcagtgatagtcaca

SEQ ID NO: 4552032 - DNA, 25 bp, Homo sapien
ggacatcagtgatagtcacatagta

SEQ ID NO: 4552033 - DNA, 25 bp, Homo sapien
tcacatagtacctgctggtctcaaa

SEQ ID NO: 4552034 - DNA, 25 bp, Homo sapien
aagagtccaggctttgaggtggacc

SEQ ID NO: 4552035 - DNA, 25 bp, Homo sapien
ggtggacccagatcttctcaaaatc

SEQ ID NO: 4552036 - DNA, 25 bp, Homo sapien
tttgaatgggcaggtggcggacagg

SEQ ID NO: 4552037 - DNA, 25 bp, Homo sapien
actggctgctagtttgaatgggcag

SEQ ID NO: 4552038 - DNA, 25 bp, Homo sapien
cttccatcataatgacctttctgac

SEQ ID NO: 4552039 - DNA, 25 bp, Homo sapien
tcataatgacctttctgacagcgga

SEQ ID NO: 4552040 - DNA, 25 bp, Homo sapien
gttttgccctgtgcaattctgtaga

SEQ ID NO: 4552041 - DNA, 25 bp, Homo sapien
tgccctgtgcaattctgtagacaca

SEQ ID NO: 4552042 - DNA, 25 bp, Homo sapien
ggtggcttccacagctgtcaggcca

SEQ ID NO: 4552043 - DNA, 25 bp, Homo sapien
tagtagacggttgctcagttctttg

SEQ ID NO: 4552044 - DNA, 25 bp, Homo sapien
ctgtctggttgtagtagacggttgc

SEQ ID NO: 4552045 - DNA, 25 bp, Homo sapien
cacgtggctcattaagtggctgtaa

SEQ ID NO: 4552046 - DNA, 25 bp, Homo sapien
ctcactgaagttcagatcttccggg

SEQ ID NO: 4552047 - DNA, 25 bp, Homo sapien
taatgaggtagttccaatattttgg

SEQ ID NO: 4552048 - DNA, 25 bp, Homo sapien
tctttgatgaccctggacaccaact

SEQ ID NO: 4552049 - DNA, 25 bp, Homo sapien
cataccactttgcagctctgttaca

SEQ ID NO: 4552050 - DNA, 25 bp, Homo sapien
taattggatcagacacattgcaaag

SEQ ID NO: 4552051 - DNA, 25 bp, Homo sapien
cttttctatgggctcgtataattgg

SEQ ID NO: 4552052 - DNA, 25 bp, Homo sapien
ggctcgtataattggatcagacaca

SEQ ID NO: 4552053 - DNA, 25 bp, Homo sapien
tatgggctcgtataattggatcaga

SEQ ID NO: 4552054 - DNA, 25 bp, Homo sapien
ttttagcaagagaatagatttagct

SEQ ID NO: 4552055 - DNA, 25 bp, Homo sapien
tttagcaagagaatagatttagctt

SEQ ID NO: 4552056 - DNA, 25 bp, Homo sapien
gatgccaccattcacagatggacca

SEQ ID NO: 4552057 - DNA, 25 bp, Homo sapien
gtcaggctggcgaataaaacagtca

SEQ ID NO: 4552058 - DNA, 25 bp, Homo sapien
taaaacagtcatgcacgtaaccaca

SEQ ID NO: 4552059 - DNA, 25 bp, Homo sapien
tagcatcaggcccaagcagtatttt

SEQ ID NO: 4552060 - DNA, 25 bp, Homo sapien
gtaacaacaactgtgcggatcttca

SEQ ID NO: 4552061 - DNA, 25 bp, Homo sapien
taacaacaactgtgcggatcttcat

SEQ ID NO: 4552062 - DNA, 25 bp, Homo sapien
tgtaacaacaactgtgcggatcttc

SEQ ID NO: 4552063 - DNA, 25 bp, Homo sapien
ctgtaacaacaactgtgcggatctt

SEQ ID NO: 4552064 - DNA, 25 bp, Homo sapien
aaatgagggtatagtccttatcctc

SEQ ID NO: 4552065 - DNA, 25 bp, Homo sapien
tcactcatggcagaaatgggtatgc

SEQ ID NO: 4552066 - DNA, 25 bp, Homo sapien
tggtgtctgactaatgaacatttcc

SEQ ID NO: 4552067 - DNA, 25 bp, Homo sapien
aggttcaatgttggtccaagcttca

SEQ ID NO: 4552068 - DNA, 25 bp, Homo sapien
gagtctcgttcaccctgagcagtca

SEQ ID NO: 4552069 - DNA, 25 bp, Homo sapien
gatgctccacgaggccattgtcaca

SEQ ID NO: 4552070 - DNA, 25 bp, Homo sapien
gccccggccattgaggtggatgaaa

SEQ ID NO: 4552071 - DNA, 25 bp, Homo sapien
ctgagccttgctgcgccaacttgag

SEQ ID NO: 4552072 - DNA, 25 bp, Homo sapien
gaaatgtgggcgagcaactctccac

SEQ ID NO: 4552073 - DNA, 25 bp, Homo sapien
ggcgggacccattcatagattcctg

SEQ ID NO: 4552074 - DNA, 25 bp, Homo sapien
acatgtggaagtgttggcgggaccc

SEQ ID NO: 4552075 - DNA, 25 bp, Homo sapien
gaaacacttgcagggacgtggaccc

SEQ ID NO: 4552076 - DNA, 25 bp, Homo sapien
tccaaagcccaaggaattatagagg

SEQ ID NO: 4552077 - DNA, 25 bp, Homo sapien
caaggaattatagaggtttttccag

SEQ ID NO: 4552078 - DNA, 25 bp, Homo sapien
ttccaaagcccaaggaattatagag

SEQ ID NO: 4552079 - DNA, 25 bp, Homo sapien
cactgggtcgtgaattctcttgctg

SEQ ID NO: 4552080 - DNA, 25 bp, Homo sapien
gaagttcctctctgcgtgtaaaaag

SEQ ID NO: 4552081 - DNA, 25 bp, Homo sapien
agataaccctgtgagtgtgtccaga

SEQ ID NO: 4552082 - DNA, 25 bp, Homo sapien
gattttcagggtgactacttctcac

SEQ ID NO: 4552083 - DNA, 25 bp, Homo sapien
tctgcagctgctgttcttctcacat

SEQ ID NO: 4552084 - DNA, 25 bp, Homo sapien
cagctgctgttcttctcacattaat

SEQ ID NO: 4552085 - DNA, 25 bp, Homo sapien
tgcagctgctgttcttctcacatta

SEQ ID NO: 4552086 - DNA, 25 bp, Homo sapien
ctggaggtgttagccactctgcagc

SEQ ID NO: 4552087 - DNA, 25 bp, Homo sapien
tacggcgtctgtataaaagcctttg

SEQ ID NO: 4552088 - DNA, 25 bp, Homo sapien
tatcaatacggcgtctgtataaaag

SEQ ID NO: 4552089 - DNA, 25 bp, Homo sapien
caatacggcgtctgtataaaagcct

SEQ ID NO: 4552090 - DNA, 25 bp, Homo sapien
gcgtctgtataaaagcctttgccca

SEQ ID NO: 4552091 - DNA, 25 bp, Homo sapien
tccctcctcggtaaacgtgtggcca

SEQ ID NO: 4552092 - DNA, 25 bp, Homo sapien
ctcggtaaacgtgtggccaggcatg

SEQ ID NO: 4552093 - DNA, 25 bp, Homo sapien
tcctcggtaaacgtgtggccaggca

SEQ ID NO: 4552094 - DNA, 25 bp, Homo sapien
ggttgataaagcagacagacagaag

SEQ ID NO: 4552095 - DNA, 25 bp, Homo sapien
tccaattctgtgacccctcaggtgc

SEQ ID NO: 4552096 - DNA, 25 bp, Homo sapien
tcggtctacagtgggatctctgctg

SEQ ID NO: 4552097 - DNA, 25 bp, Homo sapien
tttgcatgtggaacctggcggctgc

SEQ ID NO: 4552098 - DNA, 25 bp, Homo sapien
gttgatggacccactggtgaaccct

SEQ ID NO: 4552099 - DNA, 25 bp, Homo sapien
tatttctgcatgacgtttctcctcc

SEQ ID NO: 4552100 - DNA, 25 bp, Homo sapien
ttctgcatgacgtttctcctccaaa

SEQ ID NO: 4552101 - DNA, 25 bp, Homo sapien
tctatttctgcatgacgtttctcct

SEQ ID NO: 4552102 - DNA, 25 bp, Homo sapien
ctgcatgacgtttctcctccaaatc

SEQ ID NO: 4552103 - DNA, 25 bp, Homo sapien
tcagcaatctacctgcacggttcct

SEQ ID NO: 4552104 - DNA, 25 bp, Homo sapien
ctacctgcacggttcctcagtttca

SEQ ID NO: 4552105 - DNA, 25 bp, Homo sapien
gcaatctacctgcacggttcctcag

SEQ ID NO: 4552106 - DNA, 25 bp, Homo sapien
ctttcagcaatctacctgcacggtt

SEQ ID NO: 4552107 - DNA, 25 bp, Homo sapien
tcagataaggatacttgtccttatg

SEQ ID NO: 4552108 - DNA, 25 bp, Homo sapien
ttaggatgactggaaggatagttca

SEQ ID NO: 4552109 - DNA, 25 bp, Homo sapien
ggaaggatagttcagataaggatac

SEQ ID NO: 4552110 - DNA, 25 bp, Homo sapien
taatattttgattaggatgactgga

SEQ ID NO: 4552111 - DNA, 25 bp, Homo sapien
ccgcagtcggagagattcataaatc

SEQ ID NO: 4552112 - DNA, 25 bp, Homo sapien
tttttctaattatccgcagtcggag

SEQ ID NO: 4552113 - DNA, 25 bp, Homo sapien
tcataaatctcatacactgtaactg

SEQ ID NO: 4552114 - DNA, 25 bp, Homo sapien
tgcaaaaactccagctcgtgttctg

SEQ ID NO: 4552115 - DNA, 25 bp, Homo sapien
tgcaggtcaatggactggcttagcc

SEQ ID NO: 4552116 - DNA, 25 bp, Homo sapien
aatgactgtgactccccatggtaag

SEQ ID NO: 4552117 - DNA, 25 bp, Homo sapien
tggcttagcctggtgtcctgccgca

SEQ ID NO: 4552118 - DNA, 25 bp, Homo sapien
gacatctgggcttaaacagttcagc

SEQ ID NO: 4552119 - DNA, 25 bp, Homo sapien
cacttttcttaaccttgctctgcag

SEQ ID NO: 4552120 - DNA, 25 bp, Homo sapien
gctctgcagattaaaaagcttaagg

SEQ ID NO: 4552121 - DNA, 25 bp, Homo sapien
gatttcacggcttctgagtgctcat

SEQ ID NO: 4552122 - DNA, 25 bp, Homo sapien
gaaattccagtaagggtgagtgtgc

SEQ ID NO: 4552123 - DNA, 25 bp, Homo sapien
ttcatgacagtaaattgggctcctg

SEQ ID NO: 4552124 - DNA, 25 bp, Homo sapien
atgggagttgggcacattcatgaca

SEQ ID NO: 4552125 - DNA, 25 bp, Homo sapien
gcacattcatgacagtaaattgggc

SEQ ID NO: 4552126 - DNA, 25 bp, Homo sapien
ggagttgggcacattcatgacagta

SEQ ID NO: 4552127 - DNA, 25 bp, Homo sapien
ctcttggcagagcggacggtttgcc

SEQ ID NO: 4552128 - DNA, 25 bp, Homo sapien
gcagagcggacggtttgccatacag

SEQ ID NO: 4552129 - DNA, 25 bp, Homo sapien
agcggacggtttgccatacagagcc

SEQ ID NO: 4552130 - DNA, 25 bp, Homo sapien
cagagcggacggtttgccatacaga

SEQ ID NO: 4552131 - DNA, 25 bp, Homo sapien
tatgttaacccttgctttcgtggac

SEQ ID NO: 4552132 - DNA, 25 bp, Homo sapien
ggtggctatgatccgtctctctgaa

SEQ ID NO: 4552133 - DNA, 25 bp, Homo sapien
tttcgtggacttaacctaaggctgc

SEQ ID NO: 4552134 - DNA, 25 bp, Homo sapien
tgaagggcctttaggtcaggccagc

SEQ ID NO: 4552135 - DNA, 25 bp, Homo sapien
ttccaacaagtgattccccatttcc

SEQ ID NO: 4552136 - DNA, 25 bp, Homo sapien
attccaacaagtgattccccatttc

SEQ ID NO: 4552137 - DNA, 25 bp, Homo sapien
ctgccctcctcagtatgcccagctg

SEQ ID NO: 4552138 - DNA, 25 bp, Homo sapien
ttttcttgaggaaccatttctccca

SEQ ID NO: 4552139 - DNA, 25 bp, Homo sapien
tttcttgaggaaccatttctcccat

SEQ ID NO: 4552140 - DNA, 25 bp, Homo sapien
cattttcttgaggaaccatttctcc

SEQ ID NO: 4552141 - DNA, 25 bp, Homo sapien
ggtcctgctcaagggcttgtgcatc

SEQ ID NO: 4552142 - DNA, 25 bp, Homo sapien
cctgctcaagggcttgtgcatcaga

SEQ ID NO: 4552143 - DNA, 25 bp, Homo sapien
ctcaagggcttgtgcatcagactct

SEQ ID NO: 4552144 - DNA, 25 bp, Homo sapien
gggcttgtgcatcagactctgtcac

SEQ ID NO: 4552145 - DNA, 25 bp, Homo sapien
caattgtcgttactataaagaattg

SEQ ID NO: 4552146 - DNA, 25 bp, Homo sapien
ggtaagactattctctatgttcacg

SEQ ID NO: 4552147 - DNA, 25 bp, Homo sapien
tattctctatgttcacgagtttctt

SEQ ID NO: 4552148 - DNA, 25 bp, Homo sapien
tattaatcgattggtaagactattc

SEQ ID NO: 4552149 - DNA, 25 bp, Homo sapien
tctgtactttggcttgaagagcgcg

SEQ ID NO: 4552150 - DNA, 25 bp, Homo sapien
tagtctgccgttttatctggacagc

SEQ ID NO: 4552151 - DNA, 25 bp, Homo sapien
ttggtcagttgtaggcacttcagcc

SEQ ID NO: 4552152 - DNA, 25 bp, Homo sapien
gcagatttgatttaccttgttggtc

SEQ ID NO: 4552153 - DNA, 25 bp, Homo sapien
cctcagctgtgcatgttgttgattt

SEQ ID NO: 4552154 - DNA, 25 bp, Homo sapien
ctattggaattaatttgtcttgact

SEQ ID NO: 4552155 - DNA, 25 bp, Homo sapien
gctgtgcatgttgttgatttcctgt

SEQ ID NO: 4552156 - DNA, 25 bp, Homo sapien
tattggaattaatttgtcttgactc

SEQ ID NO: 4552157 - DNA, 25 bp, Homo sapien
tgtgcagttttgcagaatagagttc

SEQ ID NO: 4552158 - DNA, 25 bp, Homo sapien
tatctgggtcaatttttgtgtgcag

SEQ ID NO: 4552159 - DNA, 25 bp, Homo sapien
atagagttcttcgtccctttccttg

SEQ ID NO: 4552160 - DNA, 25 bp, Homo sapien
ttatcttccctaaatgacatgttgg

SEQ ID NO: 4552161 - DNA, 25 bp, Homo sapien
tggcaatttcaggatgcttgcctgg

SEQ ID NO: 4552162 - DNA, 25 bp, Homo sapien
ggatgcttgcctgggtttttcctat

SEQ ID NO: 4552163 - DNA, 25 bp, Homo sapien
cccctggcaatttcaggatgcttgc

SEQ ID NO: 4552164 - DNA, 25 bp, Homo sapien
aggatgcttgcctgggtttttccta

SEQ ID NO: 4552165 - DNA, 25 bp, Homo sapien
tctaccaggcttgtgggaatacagc

SEQ ID NO: 4552166 - DNA, 25 bp, Homo sapien
ggagtcctgacgtctttctctacca

SEQ ID NO: 4552167 - DNA, 25 bp, Homo sapien
gattcacctgaaaaggcttatggca

SEQ ID NO: 4552168 - DNA, 25 bp, Homo sapien
tggaggaggcacacatagttaatgt

SEQ ID NO: 4552169 - DNA, 25 bp, Homo sapien
caagaggcacaagtcagccaatttt

SEQ ID NO: 4552170 - DNA, 25 bp, Homo sapien
agtgattcaagcatgactggtttct

SEQ ID NO: 4552171 - DNA, 25 bp, Homo sapien
gtgattcaagcatgactggtttctt

SEQ ID NO: 4552172 - DNA, 25 bp, Homo sapien
aagaggcacaagtcagccaattttc

SEQ ID NO: 4552173 - DNA, 25 bp, Homo sapien
tatctgcccccctatgttactgttg

SEQ ID NO: 4552174 - DNA, 25 bp, Homo sapien
aaaatagcagatggcgtattacaga

SEQ ID NO: 4552175 - DNA, 25 bp, Homo sapien
tatgtcacattctgccttgggcagc

SEQ ID NO: 4552176 - DNA, 25 bp, Homo sapien
tacagaagccacctatgtcacattc

SEQ ID NO: 4552177 - DNA, 25 bp, Homo sapien
tgtgtgatagttcctccctcccaag

SEQ ID NO: 4552178 - DNA, 25 bp, Homo sapien
ggcttccctttgcaaggagattgct

SEQ ID NO: 4552179 - DNA, 25 bp, Homo sapien
caaggagattgctatttctgagctg

SEQ ID NO: 4552180 - DNA, 25 bp, Homo sapien
tgagctgtgtgatagttcctccctc

SEQ ID NO: 4552181 - DNA, 25 bp, Homo sapien
ctggcagctgcctctgcagctccat

SEQ ID NO: 4552182 - DNA, 25 bp, Homo sapien
cctggacagctcctgggttcaggtc

SEQ ID NO: 4552183 - DNA, 25 bp, Homo sapien
tcctgggttcaggtctcctggcagc

SEQ ID NO: 4552184 - DNA, 25 bp, Homo sapien
tcctggcagctgcctctgcagctcc

SEQ ID NO: 4552185 - DNA, 25 bp, Homo sapien
tgataaaagacagaggaggtctggg

SEQ ID NO: 4552186 - DNA, 25 bp, Homo sapien
cgcaggcaggttgtgtatgtaagga

SEQ ID NO: 4552187 - DNA, 25 bp, Homo sapien
ttgtgtatgtaaggaggtagccaca

SEQ ID NO: 4552188 - DNA, 25 bp, Homo sapien
ctgggcagggcatgctcagtagtcg

SEQ ID NO: 4552189 - DNA, 25 bp, Homo sapien
cagtccaaggctacataaagcaaga

SEQ ID NO: 4552190 - DNA, 25 bp, Homo sapien
caagaagtaatcaggggaacatgct

SEQ ID NO: 4552191 - DNA, 25 bp, Homo sapien
tcaagcaagtttcagcagaatgtag

SEQ ID NO: 4552192 - DNA, 25 bp, Homo sapien
ttttgttttgcctatcccagacagg

SEQ ID NO: 4552193 - DNA, 25 bp, Homo sapien
ggaaggtcccttgttcgcacagaca

SEQ ID NO: 4552194 - DNA, 25 bp, Homo sapien
tgatctccagatagtacagccagac

SEQ ID NO: 4552195 - DNA, 25 bp, Homo sapien
tagctctgtaaagcgctaggctgaa

SEQ ID NO: 4552196 - DNA, 25 bp, Homo sapien
ccaggagccgggtgaacatttctgc

SEQ ID NO: 4552197 - DNA, 25 bp, Homo sapien
caagccgatgaaggttctactaact

SEQ ID NO: 4552198 - DNA, 25 bp, Homo sapien
tactaactggaacagctattaattg

SEQ ID NO: 4552199 - DNA, 25 bp, Homo sapien
tggaacagctattaattgtttcttc

SEQ ID NO: 4552200 - DNA, 25 bp, Homo sapien
tgaaggttctactaactggaacagc

SEQ ID NO: 4552201 - DNA, 25 bp, Homo sapien
gatggctccaacatctaaagatgtc

SEQ ID NO: 4552202 - DNA, 25 bp, Homo sapien
gcctctctgagtggggtcaaagggc

SEQ ID NO: 4552203 - DNA, 25 bp, Homo sapien
ctgggcctctctgagtggggtcaaa

SEQ ID NO: 4552204 - DNA, 25 bp, Homo sapien
gtctctcacctctggatttattact

SEQ ID NO: 4552205 - DNA, 25 bp, Homo sapien
tagactgaattttatcaggtggaga

SEQ ID NO: 4552206 - DNA, 25 bp, Homo sapien
aaggaatagaatttacacatggttc

SEQ ID NO: 4552207 - DNA, 25 bp, Homo sapien
aatgcaggaagagcactaccgaagg

SEQ ID NO: 4552208 - DNA, 25 bp, Homo sapien
taggcctcacataatgtttttatgg

SEQ ID NO: 4552209 - DNA, 25 bp, Homo sapien
tgtgctttcgggaggagaaccttga

SEQ ID NO: 4552210 - DNA, 25 bp, Homo sapien
ggaaactatactgctcctcaggctg

SEQ ID NO: 4552211 - DNA, 25 bp, Homo sapien
gaggagcaccagaacctgggtctta

SEQ ID NO: 4552212 - DNA, 25 bp, Homo sapien
gattggtgacgttctcctgtgagga

SEQ ID NO: 4552213 - DNA, 25 bp, Homo sapien
ctgcatcattcactctccaggattc

SEQ ID NO: 4552214 - DNA, 25 bp, Homo sapien
ctccaggattctgcctgctcttgcc

SEQ ID NO: 4552215 - DNA, 25 bp, Homo sapien
ggagatattagaggctctgggcagt

SEQ ID NO: 4552216 - DNA, 25 bp, Homo sapien
gtggagatattagaggctctgggca

SEQ ID NO: 4552217 - DNA, 25 bp, Homo sapien
tcctgctggattgttcttccggaat

SEQ ID NO: 4552218 - DNA, 25 bp, Homo sapien
cagttgttcccccttacatgtagct

SEQ ID NO: 4552219 - DNA, 25 bp, Homo sapien
tacatgtagctactgcccgttcctg

SEQ ID NO: 4552220 - DNA, 25 bp, Homo sapien
ttccggaatctggttgcaaatacat

SEQ ID NO: 4552221 - DNA, 25 bp, Homo sapien
tggatcccacacaattgaaagaaat

SEQ ID NO: 4552222 - DNA, 25 bp, Homo sapien
ctggatcccacacaattgaaagaaa

SEQ ID NO: 4552223 - DNA, 25 bp, Homo sapien
cagcttgtctgctgacacgctgcat

SEQ ID NO: 4552224 - DNA, 25 bp, Homo sapien
gatcccacacaattgaaagaaatac

SEQ ID NO: 4552225 - DNA, 25 bp, Homo sapien
tttaagattgtagagtcttgtgcaa

SEQ ID NO: 4552226 - DNA, 25 bp, Homo sapien
aaaatttaagattgtagagtcttgt

SEQ ID NO: 4552227 - DNA, 25 bp, Homo sapien
gggtatttatctctagactgtggtt

SEQ ID NO: 4552228 - DNA, 25 bp, Homo sapien
tcaaagtaggggtatttatctctag

SEQ ID NO: 4552229 - DNA, 25 bp, Homo sapien
gccaattctacttaagcattctcca

SEQ ID NO: 4552230 - DNA, 25 bp, Homo sapien
actgctgcctttgatacaggcttga

SEQ ID NO: 4552231 - DNA, 25 bp, Homo sapien
ctgccaattctacttaagcattctc

SEQ ID NO: 4552232 - DNA, 25 bp, Homo sapien
cactgctgcctttgatacaggcttg

SEQ ID NO: 4552233 - DNA, 25 bp, Homo sapien
tttcctcgttggatggtggctgtcc

SEQ ID NO: 4552234 - DNA, 25 bp, Homo sapien
cgagctgtgtaattctgccacggga

SEQ ID NO: 4552235 - DNA, 25 bp, Homo sapien
tgccacgggacagcattgtgtaaac

SEQ ID NO: 4552236 - DNA, 25 bp, Homo sapien
caataataattatctggctgcagcc

SEQ ID NO: 4552237 - DNA, 25 bp, Homo sapien
tagatttcttgaattcacagtgcag

SEQ ID NO: 4552238 - DNA, 25 bp, Homo sapien
ctgaacacttgtaggctctactggt

SEQ ID NO: 4552239 - DNA, 25 bp, Homo sapien
cacttgtaggctctactggttgcat

SEQ ID NO: 4552240 - DNA, 25 bp, Homo sapien
tttagatttcttgaattcacagtgc

SEQ ID NO: 4552241 - DNA, 25 bp, Homo sapien
tgccttgtatataactagaggattc

SEQ ID NO: 4552242 - DNA, 25 bp, Homo sapien
actaactgccttgtatataactaga

SEQ ID NO: 4552243 - DNA, 25 bp, Homo sapien
cttgtatataactagaggattcttt

SEQ ID NO: 4552244 - DNA, 25 bp, Homo sapien
taactgccttgtatataactagagg

SEQ ID NO: 4552245 - DNA, 25 bp, Homo sapien
tggtgaacaagatgcattgtttaca

SEQ ID NO: 4552246 - DNA, 25 bp, Homo sapien
ggtgaacaagatgcattgtttacaa

SEQ ID NO: 4552247 - DNA, 25 bp, Homo sapien
ctggtgaacaagatgcattgtttac

SEQ ID NO: 4552248 - DNA, 25 bp, Homo sapien
ctgtgcacacaatctttcgaatctt

SEQ ID NO: 4552249 - DNA, 25 bp, Homo sapien
tctttcgaatcttgtttggctacat

SEQ ID NO: 4552250 - DNA, 25 bp, Homo sapien
tgtgcacacaatctttcgaatcttg

SEQ ID NO: 4552251 - DNA, 25 bp, Homo sapien
tgtttggctacataagaatgggcca

SEQ ID NO: 4552252 - DNA, 25 bp, Homo sapien
gggctttgacaaccctgtagcagca

SEQ ID NO: 4552253 - DNA, 25 bp, Homo sapien
agcgatggcagcgttgtcaggaacc

SEQ ID NO: 4552254 - DNA, 25 bp, Homo sapien
tagggcttgccccatgttctttgaa

SEQ ID NO: 4552255 - DNA, 25 bp, Homo sapien
gcacaattcagggtccgtgggtatt

SEQ ID NO: 4552256 - DNA, 25 bp, Homo sapien
tgccagctttttctatccccaaatg

SEQ ID NO: 4552257 - DNA, 25 bp, Homo sapien
cttgtgccagctttttctatcccca

SEQ ID NO: 4552258 - DNA, 25 bp, Homo sapien
tagcatgagcatctgagaatgctca

SEQ ID NO: 4552259 - DNA, 25 bp, Homo sapien
ccctgagtagctcctagcatgagca

SEQ ID NO: 4552260 - DNA, 25 bp, Homo sapien
aaaagccttgaaggcactgactaag

SEQ ID NO: 4552261 - DNA, 25 bp, Homo sapien
tgactaagcagaaaaagggggccca

SEQ ID NO: 4552262 - DNA, 25 bp, Homo sapien
ctggctgtagtgaagaccataggcc

SEQ ID NO: 4552263 - DNA, 25 bp, Homo sapien
ggctgtagtgaagaccataggccat

SEQ ID NO: 4552264 - DNA, 25 bp, Homo sapien
agttgctgaccacaaaggggtttgg

SEQ ID NO: 4552265 - DNA, 25 bp, Homo sapien
gcagttgctgaccacaaaggggttt

SEQ ID NO: 4552266 - DNA, 25 bp, Homo sapien
tagggctaaatcagggcagttgctg

SEQ ID NO: 4552267 - DNA, 25 bp, Homo sapien
tgctgaccacaaaggggtttgggaa

SEQ ID NO: 4552268 - DNA, 25 bp, Homo sapien
tttctttgcccacagttcagaatta

SEQ ID NO: 4552269 - DNA, 25 bp, Homo sapien
agcattaccctttctttgcccacag

SEQ ID NO: 4552270 - DNA, 25 bp, Homo sapien
tcagtcagcattaccctttctttgc

SEQ ID NO: 4552271 - DNA, 25 bp, Homo sapien
ctttgcccacagttcagaattatag

SEQ ID NO: 4552272 - DNA, 25 bp, Homo sapien
ttttcatgggattacacagtcgtgg

SEQ ID NO: 4552273 - DNA, 25 bp, Homo sapien
gcagtcctaagtaaaagccactctg

SEQ ID NO: 4552274 - DNA, 25 bp, Homo sapien
tatttcagaattcctggttgtaatg

SEQ ID NO: 4552275 - DNA, 25 bp, Homo sapien
aagaacacaggctgttgatgccttc

SEQ ID NO: 4552276 - DNA, 25 bp, Homo sapien
tgatagtcatagtcctctctgtgtg

SEQ ID NO: 4552277 - DNA, 25 bp, Homo sapien
tgccacatccacgtcgcatacttct

SEQ ID NO: 4552278 - DNA, 25 bp, Homo sapien
ttctctgatagtcatagtcctctct

SEQ ID NO: 4552279 - DNA, 25 bp, Homo sapien
tccacgtcgcatacttctttacact

SEQ ID NO: 4552280 - DNA, 25 bp, Homo sapien
gaaatagacccatgtacatatgaga

SEQ ID NO: 4552281 - DNA, 25 bp, Homo sapien
atgatgtgtgacaaaggcacaaagc

SEQ ID NO: 4552282 - DNA, 25 bp, Homo sapien
tgcattccacaataagtttcagtaa

SEQ ID NO: 4552283 - DNA, 25 bp, Homo sapien
tgagaaaatgatgtgtgacaaaggc

SEQ ID NO: 4552284 - DNA, 25 bp, Homo sapien
ggggaccaaggaagctgccggtcca

SEQ ID NO: 4552285 - DNA, 25 bp, Homo sapien
gggaccaaggaagctgccggtccat

SEQ ID NO: 4552286 - DNA, 25 bp, Homo sapien
cgtgctacttctgacttcggcctca

SEQ ID NO: 4552287 - DNA, 25 bp, Homo sapien
cacagctgatcttgacggtgaaaat

SEQ ID NO: 4552288 - DNA, 25 bp, Homo sapien
gctgtgatggcaaggttaagacttc

SEQ ID NO: 4552289 - DNA, 25 bp, Homo sapien
tctgctgttgctaggatataccgcc

SEQ ID NO: 4552290 - DNA, 25 bp, Homo sapien
gcagagctgtgccaagtgttccgga

SEQ ID NO: 4552291 - DNA, 25 bp, Homo sapien
ttttctgtagcggatgctgccaata

SEQ ID NO: 4552292 - DNA, 25 bp, Homo sapien
aagtgttccggatcagccaaggcat

SEQ ID NO: 4552293 - DNA, 25 bp, Homo sapien
tttctgtagcggatgctgccaataa

SEQ ID NO: 4552294 - DNA, 25 bp, Homo sapien
ggtctggacaaggtttggatcattt

SEQ ID NO: 4552295 - DNA, 25 bp, Homo sapien
cagaaagcttggaatggctctttga

SEQ ID NO: 4552296 - DNA, 25 bp, Homo sapien
attcctgcactctctatcctctgcc

SEQ ID NO: 4552297 - DNA, 25 bp, Homo sapien
tgatctggccttctgcacagttgca

SEQ ID NO: 4552298 - DNA, 25 bp, Homo sapien
tcatctctcccatgtttggtgtact

SEQ ID NO: 4552299 - DNA, 25 bp, Homo sapien
tctggagaacctgttaactgccttg

SEQ ID NO: 4552300 - DNA, 25 bp, Homo sapien
cttctctggagaacctgttaactgc

SEQ ID NO: 4552301 - DNA, 25 bp, Homo sapien
ccttgtgcctgggtttttatcatct

SEQ ID NO: 4552302 - DNA, 25 bp, Homo sapien
atttcatgggcagactgtgcttcct

SEQ ID NO: 4552303 - DNA, 25 bp, Homo sapien
cctgggcatgagtgttcacagtgag

SEQ ID NO: 4552304 - DNA, 25 bp, Homo sapien
gacacgaggtaatgcagccatgctg

SEQ ID NO: 4552305 - DNA, 25 bp, Homo sapien
cttcctggttgcctgacacgaggta

SEQ ID NO: 4552306 - DNA, 25 bp, Homo sapien
gggaagcagaattaggaaggacaca

SEQ ID NO: 4552307 - DNA, 25 bp, Homo sapien
ctgtatctatcctcctttagtagta

SEQ ID NO: 4552308 - DNA, 25 bp, Homo sapien
gaaggacacaataccagctgtatct

SEQ ID NO: 4552309 - DNA, 25 bp, Homo sapien
ttagtagtatagcaaagggtttatc

SEQ ID NO: 4552310 - DNA, 25 bp, Homo sapien
gagagttcttatcaattaacatgcc

SEQ ID NO: 4552311 - DNA, 25 bp, Homo sapien
cgacaatgaaatataggcgaagctt

SEQ ID NO: 4552312 - DNA, 25 bp, Homo sapien
ggtgctttcccttcgctccctgaaa

SEQ ID NO: 4552313 - DNA, 25 bp, Homo sapien
tatttggaaagcatcgctgggaatc

SEQ ID NO: 4552314 - DNA, 25 bp, Homo sapien
catgtggcactaaccggatttagct

SEQ ID NO: 4552315 - DNA, 25 bp, Homo sapien
cacccagaataaaatacatgaggcc

SEQ ID NO: 4552316 - DNA, 25 bp, Homo sapien
tccgcaaggccctgctgacactgca

SEQ ID NO: 4552317 - DNA, 25 bp, Homo sapien
gcccataccctgtgggcacctacag

SEQ ID NO: 4552318 - DNA, 25 bp, Homo sapien
actgtgcagttgggccactctaaga

SEQ ID NO: 4552319 - DNA, 25 bp, Homo sapien
tgtgcagttgggccactctaagagg

SEQ ID NO: 4552320 - DNA, 25 bp, Homo sapien
gggccactctaagagggtggtagag

SEQ ID NO: 4552321 - DNA, 25 bp, Homo sapien
tgcagttgggccactctaagagggt

SEQ ID NO: 4552322 - DNA, 25 bp, Homo sapien
aggcagtggggtaagaatattcact

SEQ ID NO: 4552323 - DNA, 25 bp, Homo sapien
tgaggcagtggggtaagaatattca

SEQ ID NO: 4552324 - DNA, 25 bp, Homo sapien
gaggcagtggggtaagaatattcac

SEQ ID NO: 4552325 - DNA, 25 bp, Homo sapien
gagagttagtacataaagaggcatg

SEQ ID NO: 4552326 - DNA, 25 bp, Homo sapien
gttagtacataaagaggcatgcagg

SEQ ID NO: 4552327 - DNA, 25 bp, Homo sapien
ctggagagttagtacataaagaggc

SEQ ID NO: 4552328 - DNA, 25 bp, Homo sapien
agtacataaagaggcatgcaggaag

SEQ ID NO: 4552329 - DNA, 25 bp, Homo sapien
tgaaattttaggtcctgtgcttgcc

SEQ ID NO: 4552330 - DNA, 25 bp, Homo sapien
ctgaaattttaggtcctgtgcttgc

SEQ ID NO: 4552331 - DNA, 25 bp, Homo sapien
gagaaaattcactgaagctgatttt

SEQ ID NO: 4552332 - DNA, 25 bp, Homo sapien
agagaaaattcactgaagctgattt

SEQ ID NO: 4552333 - DNA, 25 bp, Homo sapien
tcactcctcttcgttatggtccaag

SEQ ID NO: 4552334 - DNA, 25 bp, Homo sapien
actcctcttcgttatggtccaagaa

SEQ ID NO: 4552335 - DNA, 25 bp, Homo sapien
cactcctcttcgttatggtccaaga

SEQ ID NO: 4552336 - DNA, 25 bp, Homo sapien
ctcctcttcgttatggtccaagaaa

SEQ ID NO: 4552337 - DNA, 25 bp, Homo sapien
ccatccaccatgagatgttgtgaca

SEQ ID NO: 4552338 - DNA, 25 bp, Homo sapien
taactgctacagtatcacaacttgt

SEQ ID NO: 4552339 - DNA, 25 bp, Homo sapien
tctttgagtcctagattgtcctgcc

SEQ ID NO: 4552340 - DNA, 25 bp, Homo sapien
agtcctagattgtcctgcccatcca

SEQ ID NO: 4552341 - DNA, 25 bp, Homo sapien
gcccctgtaggtctcgtgggccact

SEQ ID NO: 4552342 - DNA, 25 bp, Homo sapien
ccagaattctggcatgtgctgcaga

SEQ ID NO: 4552343 - DNA, 25 bp, Homo sapien
ctgggcacacgcagcccgtgctggc

SEQ ID NO: 4552344 - DNA, 25 bp, Homo sapien
cctgtaggtctcgtgggccactgcc

SEQ ID NO: 4552345 - DNA, 25 bp, Homo sapien
gaaggaggatgatcacttctggact

SEQ ID NO: 4552346 - DNA, 25 bp, Homo sapien
aaggaggatgatcacttctggactc

SEQ ID NO: 4552347 - DNA, 25 bp, Homo sapien
aggaggatgatcacttctggactct

SEQ ID NO: 4552348 - DNA, 25 bp, Homo sapien
ggaggatgatcacttctggactctg

SEQ ID NO: 4552349 - DNA, 25 bp, Homo sapien
tttctcaggagcatgcattatcaac

SEQ ID NO: 4552350 - DNA, 25 bp, Homo sapien
ggggcagtcccttcagatttctcag

SEQ ID NO: 4552351 - DNA, 25 bp, Homo sapien
gagatttcctgtgtgaggattcctg

SEQ ID NO: 4552352 - DNA, 25 bp, Homo sapien
tgtgtgaggattcctggttcttctc

SEQ ID NO: 4552353 - DNA, 25 bp, Homo sapien
tcctgtgtgaggattcctggttctt

SEQ ID NO: 4552354 - DNA, 25 bp, Homo sapien
cctgtgtgaggattcctggttcttc

SEQ ID NO: 4552355 - DNA, 25 bp, Homo sapien
tctcacaggtcatcaggtagtactt

SEQ ID NO: 4552356 - DNA, 25 bp, Homo sapien
tcacatccaggatgacggtacccga

SEQ ID NO: 4552357 - DNA, 25 bp, Homo sapien
tagagcggcccgctgatgctgccgc

SEQ ID NO: 4552358 - DNA, 25 bp, Homo sapien
cgagatactgctgcattttgccctg

SEQ ID NO: 4552359 - DNA, 25 bp, Homo sapien
aaattttcatcaatgtggaaaaagg

SEQ ID NO: 4552360 - DNA, 25 bp, Homo sapien
gaatggatgagtggctttgaagact

SEQ ID NO: 4552361 - DNA, 25 bp, Homo sapien
caaattaacgggctgtccattaaga

SEQ ID NO: 4552362 - DNA, 25 bp, Homo sapien
tgcagtccccagtggtccctttgga

SEQ ID NO: 4552363 - DNA, 25 bp, Homo sapien
catttatcggttgtcgacagtggtc

SEQ ID NO: 4552364 - DNA, 25 bp, Homo sapien
tcaggctgcccctgttcccaccctc

SEQ ID NO: 4552365 - DNA, 25 bp, Homo sapien
caggctgcccctgttcccaccctca

SEQ ID NO: 4552366 - DNA, 25 bp, Homo sapien
aggctgcccctgttcccaccctcac

SEQ ID NO: 4552367 - DNA, 25 bp, Homo sapien
taagtccctctatctgatgctgagg

SEQ ID NO: 4552368 - DNA, 25 bp, Homo sapien
gaggcccatctaagtctactattag

SEQ ID NO: 4552369 - DNA, 25 bp, Homo sapien
gatgctgaggcccatctaagtctac

SEQ ID NO: 4552370 - DNA, 25 bp, Homo sapien
ttagtatatcatcgtccttctcttg

SEQ ID NO: 4552371 - DNA, 25 bp, Homo sapien
tgtttttaatgctcgcttttttgct

SEQ ID NO: 4552372 - DNA, 25 bp, Homo sapien
ctcgcttttttgctgggtttgactc

SEQ ID NO: 4552373 - DNA, 25 bp, Homo sapien
tgtgtttttaatgctcgcttttttg

SEQ ID NO: 4552374 - DNA, 25 bp, Homo sapien
atgttgtgtttttaatgctcgcttt

SEQ ID NO: 4552375 - DNA, 25 bp, Homo sapien
gatgaaggactctaaagtccatatt

SEQ ID NO: 4552376 - DNA, 25 bp, Homo sapien
tggggatgaaggactctaaagtcca

SEQ ID NO: 4552377 - DNA, 25 bp, Homo sapien
agctggggatgaaggactctaaagt

SEQ ID NO: 4552378 - DNA, 25 bp, Homo sapien
gggatgaaggactctaaagtccata

SEQ ID NO: 4552379 - DNA, 25 bp, Homo sapien
gggggacacaaaggtgctcagtggg

SEQ ID NO: 4552380 - DNA, 25 bp, Homo sapien
aatagtgttgaagtcttgaggcggc

SEQ ID NO: 4552381 - DNA, 25 bp, Homo sapien
gtgggggacacaaaggtgctcagtg

SEQ ID NO: 4552382 - DNA, 25 bp, Homo sapien
tagtgttgaagtcttgaggcggcga

SEQ ID NO: 4552383 - DNA, 25 bp, Homo sapien
tctgctctaatgtacaccagcaggc

SEQ ID NO: 4552384 - DNA, 25 bp, Homo sapien
gatgaacatggccatgttatggatt

SEQ ID NO: 4552385 - DNA, 25 bp, Homo sapien
gccatgttatggatttctgctctaa

SEQ ID NO: 4552386 - DNA, 25 bp, Homo sapien
tctagcctcagattgttttttaaca

SEQ ID NO: 4552387 - DNA, 25 bp, Homo sapien
tgcatctattaaccatggcaccaaa

SEQ ID NO: 4552388 - DNA, 25 bp, Homo sapien
gtgaggcttttgcttagacagtgtt

SEQ ID NO: 4552389 - DNA, 25 bp, Homo sapien
cagtggtttgtactttgcatctatt

SEQ ID NO: 4552390 - DNA, 25 bp, Homo sapien
ggcagaattgtactggcaaatgcat

SEQ ID NO: 4552391 - DNA, 25 bp, Homo sapien
aatcagacaggccagatgtttgtga

SEQ ID NO: 4552392 - DNA, 25 bp, Homo sapien
gaaaactgccgtttccacaatcaaa

SEQ ID NO: 4552393 - DNA, 25 bp, Homo sapien
tcaaagatttcaattcccctcatct

SEQ ID NO: 4552394 - DNA, 25 bp, Homo sapien
gacataaaattatggccctgggaaa

SEQ ID NO: 4552395 - DNA, 25 bp, Homo sapien
gggacgatgcctttgtacctggatg

SEQ ID NO: 4552396 - DNA, 25 bp, Homo sapien
catatgctcgaagtgaaggattctc

SEQ ID NO: 4552397 - DNA, 25 bp, Homo sapien
gcttgcgtaaaaatcgctgactctt

SEQ ID NO: 4552398 - DNA, 25 bp, Homo sapien
ctgactctttctgcacgggacgatg

SEQ ID NO: 4552399 - DNA, 25 bp, Homo sapien
tgccaaaatgatcaacacaaggtcc

SEQ ID NO: 4552400 - DNA, 25 bp, Homo sapien
aaatgatcaacacaaggtcccaaaa

SEQ ID NO: 4552401 - DNA, 25 bp, Homo sapien
ctggatttgtccctccaggatacta

SEQ ID NO: 4552402 - DNA, 25 bp, Homo sapien
tccaggatactactgccaaaatgat

SEQ ID NO: 4552403 - DNA, 25 bp, Homo sapien
catttttctttctgactcagaggca

SEQ ID NO: 4552404 - DNA, 25 bp, Homo sapien
atttttctttctgactcagaggcac

SEQ ID NO: 4552405 - DNA, 25 bp, Homo sapien
tttttctttctgactcagaggcact

SEQ ID NO: 4552406 - DNA, 25 bp, Homo sapien
tgagctctgtatgaacaaacccttt

SEQ ID NO: 4552407 - DNA, 25 bp, Homo sapien
aatgggatgtcagttctgaagaata

SEQ ID NO: 4552408 - DNA, 25 bp, Homo sapien
gaatccagagttataagcacttatt

SEQ ID NO: 4552409 - DNA, 25 bp, Homo sapien
taatgggatgtcagttctgaagaat

SEQ ID NO: 4552410 - DNA, 25 bp, Homo sapien
atccagagttataagcacttatttg

SEQ ID NO: 4552411 - DNA, 25 bp, Homo sapien
atcactgtttccatcaaaaggcaaa

SEQ ID NO: 4552412 - DNA, 25 bp, Homo sapien
aaggcaaagcatatttctctggtgg

SEQ ID NO: 4552413 - DNA, 25 bp, Homo sapien
cactgtttccatcaaaaggcaaagc

SEQ ID NO: 4552414 - DNA, 25 bp, Homo sapien
atttctctggtggagcttgcaacat

SEQ ID NO: 4552415 - DNA, 25 bp, Homo sapien
caattaaatacattggaagggatgc

SEQ ID NO: 4552416 - DNA, 25 bp, Homo sapien
gctttgaccaattaaatacattgga

SEQ ID NO: 4552417 - DNA, 25 bp, Homo sapien
aatacattggaagggatgctgtgac

SEQ ID NO: 4552418 - DNA, 25 bp, Homo sapien
aagggatgctgtgacaattgccaac

SEQ ID NO: 4552419 - DNA, 25 bp, Homo sapien
caaagaagccacaagcttcttattg

SEQ ID NO: 4552420 - DNA, 25 bp, Homo sapien
cccaaagaagccacaagcttcttat

SEQ ID NO: 4552421 - DNA, 25 bp, Homo sapien
aagaagccacaagcttcttattgtc

SEQ ID NO: 4552422 - DNA, 25 bp, Homo sapien
gaagccacaagcttcttattgtctc

SEQ ID NO: 4552423 - DNA, 25 bp, Homo sapien
taatgtcattaatggcgtatctgcc

SEQ ID NO: 4552424 - DNA, 25 bp, Homo sapien
gtattaacataatgggagccttctg

SEQ ID NO: 4552425 - DNA, 25 bp, Homo sapien
aaggcatcagcctattcagtgtctg

SEQ ID NO: 4552426 - DNA, 25 bp, Homo sapien
tactatattcccactacaaatggtg

SEQ ID NO: 4552427 - DNA, 25 bp, Homo sapien
gattctactgttgagggcttctgga

SEQ ID NO: 4552428 - DNA, 25 bp, Homo sapien
cctgttgagattctgaagcaaccaa

SEQ ID NO: 4552429 - DNA, 25 bp, Homo sapien
aaaaaggcatgtaaagagactgctc

SEQ ID NO: 4552430 - DNA, 25 bp, Homo sapien
caggatagaaacagccatcttgcaa

SEQ ID NO: 4552431 - DNA, 25 bp, Homo sapien
taaaggagttgtactaggacaggcc

SEQ ID NO: 4552432 - DNA, 25 bp, Homo sapien
gactattgtacatgaagccatgcag

SEQ ID NO: 4552433 - DNA, 25 bp, Homo sapien
aaactacagtgcgaggtgatctggg

SEQ ID NO: 4552434 - DNA, 25 bp, Homo sapien
ggacaggcctcccattagacacatg

SEQ ID NO: 4552435 - DNA, 25 bp, Homo sapien
ggaagactccggatacaaacacatt

SEQ ID NO: 4552436 - DNA, 25 bp, Homo sapien
aaaggacacccatatctcatcagga

SEQ ID NO: 4552437 - DNA, 25 bp, Homo sapien
ttagagattctaacatgcgatgccg

SEQ ID NO: 4552438 - DNA, 25 bp, Homo sapien
ggtgcagcccacgtcatttcaatta

SEQ ID NO: 4552439 - DNA, 25 bp, Homo sapien
taattcagggactaaaaggatagga

SEQ ID NO: 4552440 - DNA, 25 bp, Homo sapien
gactggcattccctgttggaaatat

SEQ ID NO: 4552441 - DNA, 25 bp, Homo sapien
aagtattagcaaatccactacagcc

SEQ ID NO: 4552442 - DNA, 25 bp, Homo sapien
cactacagcctaataacttgaccaa

SEQ ID NO: 4552443 - DNA, 25 bp, Homo sapien
cagacctttgctatccatgaatgat

SEQ ID NO: 4552444 - DNA, 25 bp, Homo sapien
taagacaccttgcaggggcagacct

SEQ ID NO: 4552445 - DNA, 25 bp, Homo sapien
accttgcaggggcagacctttgcta

SEQ ID NO: 4552446 - DNA, 25 bp, Homo sapien
acctttgctatccatgaatgatgcc

SEQ ID NO: 4552447 - DNA, 25 bp, Homo sapien
ggaagtttgccgagtttgagttgct

SEQ ID NO: 4552448 - DNA, 25 bp, Homo sapien
tccaaggcacatctgtcaggcatgt

SEQ ID NO: 4552449 - DNA, 25 bp, Homo sapien
tgtcatgcttgaccgggctgactgg

SEQ ID NO: 4552450 - DNA, 25 bp, Homo sapien
ccacgtcttggaagtttgccgagtt

SEQ ID NO: 4552451 - DNA, 25 bp, Homo sapien
cttctcatgaccaaaattctatttc

SEQ ID NO: 4552452 - DNA, 25 bp, Homo sapien
cccacccgaatattgagcttttcgg

SEQ ID NO: 4552453 - DNA, 25 bp, Homo sapien
ccgaatattgagcttttcggaccgg

SEQ ID NO: 4552454 - DNA, 25 bp, Homo sapien
cggcgcaccacgagattgtatcccg

SEQ ID NO: 4552455 - DNA, 25 bp, Homo sapien
gcgcaccacgagattgtatcccgca

SEQ ID NO: 4552456 - DNA, 25 bp, Homo sapien
aaagattaggtgaagatcagtctcc

SEQ ID NO: 4552457 - DNA, 25 bp, Homo sapien
aaagagtcctcattcgcaattcaca

SEQ ID NO: 4552458 - DNA, 25 bp, Homo sapien
aatgatgatacacatgtggattttt

SEQ ID NO: 4552459 - DNA, 25 bp, Homo sapien
gaaagaagaaagagtcctcattcgc

SEQ ID NO: 4552460 - DNA, 25 bp, Homo sapien
gaccagagatgaacagctactttat

SEQ ID NO: 4552461 - DNA, 25 bp, Homo sapien
cagattgaggttgtgccttacttca

SEQ ID NO: 4552462 - DNA, 25 bp, Homo sapien
gatgatgaaaagctgtccgatggct

SEQ ID NO: 4552463 - DNA, 25 bp, Homo sapien
gaacagctactttattatggcccag

SEQ ID NO: 4552464 - DNA, 25 bp, Homo sapien
gcagaccaatcacagagtcaaaaaa

SEQ ID NO: 4552465 - DNA, 25 bp, Homo sapien
atacccttgaaatgcagaccaatca

SEQ ID NO: 4552466 - DNA, 25 bp, Homo sapien
tatacccttgaaatgcagaccaatc

SEQ ID NO: 4552467 - DNA, 25 bp, Homo sapien
agaccaatcacagagtcaaaaaata

SEQ ID NO: 4552468 - DNA, 25 bp, Homo sapien
tactaccaggtataaagatgaactg

SEQ ID NO: 4552469 - DNA, 25 bp, Homo sapien
ttttacattacaccaaggagatgct

SEQ ID NO: 4552470 - DNA, 25 bp, Homo sapien
gaactcaacataagggtcactactg

SEQ ID NO: 4552471 - DNA, 25 bp, Homo sapien
cacagaatttttgggctcctcctag

SEQ ID NO: 4552472 - DNA, 25 bp, Homo sapien
cagggaagaaatcgttgcaagagat

SEQ ID NO: 4552473 - DNA, 25 bp, Homo sapien
caagagatataaggctgttagcaag

SEQ ID NO: 4552474 - DNA, 25 bp, Homo sapien
gactaggagagtctataaatgaacc

SEQ ID NO: 4552475 - DNA, 25 bp, Homo sapien
catagatgaactgctggactgttgc

SEQ ID NO: 4552476 - DNA, 25 bp, Homo sapien
aatagagttgctggaataaaacgga

SEQ ID NO: 4552477 - DNA, 25 bp, Homo sapien
tattaatagagttgctggaataaaa

SEQ ID NO: 4552478 - DNA, 25 bp, Homo sapien
tagagttgctggaataaaacggaaa

SEQ ID NO: 4552479 - DNA, 25 bp, Homo sapien
ttaatagagttgctggaataaaacg

SEQ ID NO: 4552480 - DNA, 25 bp, Homo sapien
gtgacagttttatctacaaagcctc

SEQ ID NO: 4552481 - DNA, 25 bp, Homo sapien
ttttaaagcaatgaatctaagcctc

SEQ ID NO: 4552482 - DNA, 25 bp, Homo sapien
aaattcagccaataattccaaggtg

SEQ ID NO: 4552483 - DNA, 25 bp, Homo sapien
tatttgatgcatcgttttcacaacc

SEQ ID NO: 4552484 - DNA, 25 bp, Homo sapien
tcactttattggatttccattgctt

SEQ ID NO: 4552485 - DNA, 25 bp, Homo sapien
tctttattatgagggttgagatggc

SEQ ID NO: 4552486 - DNA, 25 bp, Homo sapien
gctttctagacacatccctacaaat

SEQ ID NO: 4552487 - DNA, 25 bp, Homo sapien
ccctacaaatagttccagacacctg

SEQ ID NO: 4552488 - DNA, 25 bp, Homo sapien
ctctagttcttctgtccattccagc

SEQ ID NO: 4552489 - DNA, 25 bp, Homo sapien
gtaactctagttcttctgtccattc

SEQ ID NO: 4552490 - DNA, 25 bp, Homo sapien
gcaaagtgtttctaacacactgtaa

SEQ ID NO: 4552491 - DNA, 25 bp, Homo sapien
caaagtgtttctaacacactgtaac

SEQ ID NO: 4552492 - DNA, 25 bp, Homo sapien
actggttgactattgacgggtatct

SEQ ID NO: 4552493 - DNA, 25 bp, Homo sapien
gactattgacgggtatctttcccaa

SEQ ID NO: 4552494 - DNA, 25 bp, Homo sapien
gttgactattgacgggtatctttcc

SEQ ID NO: 4552495 - DNA, 25 bp, Homo sapien
ctggttgactattgacgggtatctt

SEQ ID NO: 4552496 - DNA, 25 bp, Homo sapien
ccgccaagagaacagcttgtattgc

SEQ ID NO: 4552497 - DNA, 25 bp, Homo sapien
ttgaacttccgccaagagaacagct

SEQ ID NO: 4552498 - DNA, 25 bp, Homo sapien
acttccgccaagagaacagcttgta

SEQ ID NO: 4552499 - DNA, 25 bp, Homo sapien
gtgttgttgaacttccgccaagaga

SEQ ID NO: 4552500 - DNA, 25 bp, Homo sapien
caacaggaaattagcttcaaaagtg

SEQ ID NO: 4552501 - DNA, 25 bp, Homo sapien
acaggaaattagcttcaaaagtgaa

SEQ ID NO: 4552502 - DNA, 25 bp, Homo sapien
tctccaacaggaaattagcttcaaa

SEQ ID NO: 4552503 - DNA, 25 bp, Homo sapien
ctccaacaggaaattagcttcaaaa

SEQ ID NO: 4552504 - DNA, 25 bp, Homo sapien
attcccagcacctctcatcttatta

SEQ ID NO: 4552505 - DNA, 25 bp, Homo sapien
gcaactgtagaagcttgacatattt

SEQ ID NO: 4552506 - DNA, 25 bp, Homo sapien
agcacctctcatcttattatgtata

SEQ ID NO: 4552507 - DNA, 25 bp, Homo sapien
aagcaactgtagaagcttgacatat

SEQ ID NO: 4552508 - DNA, 25 bp, Homo sapien
taactaaaaatagtctgctcaacaa

SEQ ID NO: 4552509 - DNA, 25 bp, Homo sapien
aataaactatagtatctgactctcg

SEQ ID NO: 4552510 - DNA, 25 bp, Homo sapien
catgccaattctaaaggcatgttaa

SEQ ID NO: 4552511 - DNA, 25 bp, Homo sapien
tctgactctcgcaaagaatcacaat

SEQ ID NO: 4552512 - DNA, 25 bp, Homo sapien
tctaaatctttatccactccccatg

SEQ ID NO: 4552513 - DNA, 25 bp, Homo sapien
tgtctattgtgagactggcatctac

SEQ ID NO: 4552514 - DNA, 25 bp, Homo sapien
tcccaaagaaataggaccctgaagc

SEQ ID NO: 4552515 - DNA, 25 bp, Homo sapien
caacctggcaacatcagtgagaaat

SEQ ID NO: 4552516 - DNA, 25 bp, Homo sapien
tcactgagtggagttggtagcaaaa

SEQ ID NO: 4552517 - DNA, 25 bp, Homo sapien
catagaatgaactggaagagtcaac

SEQ ID NO: 4552518 - DNA, 25 bp, Homo sapien
taataggcttggctagtgcctctgc

SEQ ID NO: 4552519 - DNA, 25 bp, Homo sapien
gaatatgaaagccaacgttactcca

SEQ ID NO: 4552520 - DNA, 25 bp, Homo sapien
ttgggcaaaatttggcatcagtaac

SEQ ID NO: 4552521 - DNA, 25 bp, Homo sapien
cttgggcaaaatttggcatcagtaa

SEQ ID NO: 4552522 - DNA, 25 bp, Homo sapien
ccaatgtcatattgctctaagaaaa

SEQ ID NO: 4552523 - DNA, 25 bp, Homo sapien
gaacaaatgtaagaacgcatgcaaa

SEQ ID NO: 4552524 - DNA, 25 bp, Homo sapien
ggagtaagatggcactagattaaca

SEQ ID NO: 4552525 - DNA, 25 bp, Homo sapien
tattgtcataaagacatacaaggac

SEQ ID NO: 4552526 - DNA, 25 bp, Homo sapien
ctggcacagtgggttcccatactta

SEQ ID NO: 4552527 - DNA, 25 bp, Homo sapien
tctattccctcatatcaacccatta

SEQ ID NO: 4552528 - DNA, 25 bp, Homo sapien
ttatgttcttgctaatttatgaggc

SEQ ID NO: 4552529 - DNA, 25 bp, Homo sapien
tccttgaatactctattccctcata

SEQ ID NO: 4552530 - DNA, 25 bp, Homo sapien
gagtctggggaccttttatcattta

SEQ ID NO: 4552531 - DNA, 25 bp, Homo sapien
tgtggctttccccagaacattttta

SEQ ID NO: 4552532 - DNA, 25 bp, Homo sapien
acttgttgtctgcttcaaacctagg

SEQ ID NO: 4552533 - DNA, 25 bp, Homo sapien
ttattttgcacaacgtttctctcct

SEQ ID NO: 4552534 - DNA, 25 bp, Homo sapien
taagagatgctcaggtccaatatcc

SEQ ID NO: 4552535 - DNA, 25 bp, Homo sapien
ttccaatcataaaacagagggctac

SEQ ID NO: 4552536 - DNA, 25 bp, Homo sapien
tccaatatccaatctagcagggctt

SEQ ID NO: 4552537 - DNA, 25 bp, Homo sapien
actgccagatattccagtgccttag

SEQ ID NO: 4552538 - DNA, 25 bp, Homo sapien
gggccactacgcatcttgggtatca

SEQ ID NO: 4552539 - DNA, 25 bp, Homo sapien
aatagagacaacattaccaagctaa

SEQ ID NO: 4552540 - DNA, 25 bp, Homo sapien
aagctaatggcacgggcaatcatgg

SEQ ID NO: 4552541 - DNA, 25 bp, Homo sapien
actacgcatcttgggtatcagcagg

SEQ ID NO: 4552542 - DNA, 25 bp, Homo sapien
gtgcattatactttctctggaaact

SEQ ID NO: 4552543 - DNA, 25 bp, Homo sapien
tgcattatactttctctggaaacta

SEQ ID NO: 4552544 - DNA, 25 bp, Homo sapien
tctaaacatcatactaacaagctta

SEQ ID NO: 4552545 - DNA, 25 bp, Homo sapien
tttctaaacatcatactaacaagct

SEQ ID NO: 4552546 - DNA, 25 bp, Homo sapien
caaactatgacactgaaatcagcag

SEQ ID NO: 4552547 - DNA, 25 bp, Homo sapien
tgcttcccaaactatgacactgaaa

SEQ ID NO: 4552548 - DNA, 25 bp, Homo sapien
tgagtaaaatcgtgaaaagactccc

SEQ ID NO: 4552549 - DNA, 25 bp, Homo sapien
tccctttaatacttggaagtcaagc

SEQ ID NO: 4552550 - DNA, 25 bp, Homo sapien
aacatattctgtccgtccctcactt

SEQ ID NO: 4552551 - DNA, 25 bp, Homo sapien
tcccctctgaaaggcgggagaatct

SEQ ID NO: 4552552 - DNA, 25 bp, Homo sapien
tgtaaacctgatttggacttaaagc

SEQ ID NO: 4552553 - DNA, 25 bp, Homo sapien
aatcatttctccctaatatgctggg

SEQ ID NO: 4552554 - DNA, 25 bp, Homo sapien
tgcactgtgttggtataataagcca

SEQ ID NO: 4552555 - DNA, 25 bp, Homo sapien
gacttaaagcaattgggtggcgaaa

SEQ ID NO: 4552556 - DNA, 25 bp, Homo sapien
atctgtgggtgttgctatgggcaca

SEQ ID NO: 4552557 - DNA, 25 bp, Homo sapien
gacatgactggctgtcaacatctgt

SEQ ID NO: 4552558 - DNA, 25 bp, Homo sapien
caacatctgtgggtgttgctatggg

SEQ ID NO: 4552559 - DNA, 25 bp, Homo sapien
acactggggacatgactggctgtca

SEQ ID NO: 4552560 - DNA, 25 bp, Homo sapien
gctgacttgatgaataacctatgtc

SEQ ID NO: 4552561 - DNA, 25 bp, Homo sapien
tgtcaatgactaaggccaatataaa

SEQ ID NO: 4552562 - DNA, 25 bp, Homo sapien
tgccacacaaattgctgacttgatg

SEQ ID NO: 4552563 - DNA, 25 bp, Homo sapien
tacattcacacattaagtaagcttt

SEQ ID NO: 4552564 - DNA, 25 bp, Homo sapien
gatccggtgttaactacatttgtca

SEQ ID NO: 4552565 - DNA, 25 bp, Homo sapien
aatacatcgagggaacttgacaaca

SEQ ID NO: 4552566 - DNA, 25 bp, Homo sapien
tgacaacattaatatggatccggtg

SEQ ID NO: 4552567 - DNA, 25 bp, Homo sapien
cgaatgtttagatacaagccaggct

SEQ ID NO: 4552568 - DNA, 25 bp, Homo sapien
cagaccagggcaaggtaatggccca

SEQ ID NO: 4552569 - DNA, 25 bp, Homo sapien
gggctggaggatctctgttctatac

SEQ ID NO: 4552570 - DNA, 25 bp, Homo sapien
tgaagactccacctgcagaccaggg

SEQ ID NO: 4552571 - DNA, 25 bp, Homo sapien
ttttgtgcttaagtgtctctgaggc

SEQ ID NO: 4552572 - DNA, 25 bp, Homo sapien
cagtccactgagtcttgcgtttcca

SEQ ID NO: 4552573 - DNA, 25 bp, Homo sapien
ccactgagtcttgcgtttccaattg

SEQ ID NO: 4552574 - DNA, 25 bp, Homo sapien
tgagtcttgcgtttccaattgtttc

SEQ ID NO: 4552575 - DNA, 25 bp, Homo sapien
tttcccagagaataacaatcattac

SEQ ID NO: 4552576 - DNA, 25 bp, Homo sapien
gcccagttctccaacaggagtcacg

SEQ ID NO: 4552577 - DNA, 25 bp, Homo sapien
caacaggagtcacgggatgtggact

SEQ ID NO: 4552578 - DNA, 25 bp, Homo sapien
ctgtgcagagatctgtaggagcttg

SEQ ID NO: 4552579 - DNA, 25 bp, Homo sapien
gtctgtgcagagatctgtaggagct

SEQ ID NO: 4552580 - DNA, 25 bp, Homo sapien
ccaggcacatccatgagcaagtata

SEQ ID NO: 4552581 - DNA, 25 bp, Homo sapien
tctactgaggtaagggcacttggat

SEQ ID NO: 4552582 - DNA, 25 bp, Homo sapien
tacagttgggcagtcaggatctaag

SEQ ID NO: 4552583 - DNA, 25 bp, Homo sapien
tcatttatcattcgtgtgccaggca

SEQ ID NO: 4552584 - DNA, 25 bp, Homo sapien
gaaaaaggtgcttccgggcatgcag

SEQ ID NO: 4552585 - DNA, 25 bp, Homo sapien
aggagagccacggaatggtcaccgc

SEQ ID NO: 4552586 - DNA, 25 bp, Homo sapien
tctcaaccgggtgccattttatcat

SEQ ID NO: 4552587 - DNA, 25 bp, Homo sapien
aactgagtcatctgcacatccaaca

SEQ ID NO: 4552588 - DNA, 25 bp, Homo sapien
taatttcgaagagagaccatgtgga

SEQ ID NO: 4552589 - DNA, 25 bp, Homo sapien
tcaaaagacttgttactggaccagc

SEQ ID NO: 4552590 - DNA, 25 bp, Homo sapien
caagatcacacatgagtccaggtcc

SEQ ID NO: 4552591 - DNA, 25 bp, Homo sapien
ggtccccagacaacatccaactttg

SEQ ID NO: 4552592 - DNA, 25 bp, Homo sapien
cacagccacatattagtttatcaag

SEQ ID NO: 4552593 - DNA, 25 bp, Homo sapien
ttatcttgaagagtccaggtggcag

SEQ ID NO: 4552594 - DNA, 25 bp, Homo sapien
aagcctgggtaatgataattgtccc

SEQ ID NO: 4552595 - DNA, 25 bp, Homo sapien
tggaatatactctgatgaagtgact

SEQ ID NO: 4552596 - DNA, 25 bp, Homo sapien
aaacttggatacaggaacatcaggg

SEQ ID NO: 4552597 - DNA, 25 bp, Homo sapien
gggatgtgccacaaagtaattcttc

SEQ ID NO: 4552598 - DNA, 25 bp, Homo sapien
gtgccacaaagtaattcttcctgag

SEQ ID NO: 4552599 - DNA, 25 bp, Homo sapien
ctctaggagaaccatcaaacttgga

SEQ ID NO: 4552600 - DNA, 25 bp, Homo sapien
ggttaaattggctactcaaactctc

SEQ ID NO: 4552601 - DNA, 25 bp, Homo sapien
tctggcagctgaagttccctgttgc

SEQ ID NO: 4552602 - DNA, 25 bp, Homo sapien
ggttactcgagttggtggcagcaca

SEQ ID NO: 4552603 - DNA, 25 bp, Homo sapien
ctcccacccttgtatgcacttagaa

SEQ ID NO: 4552604 - DNA, 25 bp, Homo sapien
ggtctctttaagcactcttccatca

SEQ ID NO: 4552605 - DNA, 25 bp, Homo sapien
aagtagagcacagtaaatgaggata

SEQ ID NO: 4552606 - DNA, 25 bp, Homo sapien
tcttccatcagcagggtatatgctt

SEQ ID NO: 4552607 - DNA, 25 bp, Homo sapien
ttttcctgcacagaagtagagcaca

SEQ ID NO: 4552608 - DNA, 25 bp, Homo sapien
tgaatgttttgtatgccgctcccat

SEQ ID NO: 4552609 - DNA, 25 bp, Homo sapien
atgttttgtatgccgctcccatctg

SEQ ID NO: 4552610 - DNA, 25 bp, Homo sapien
ctgaatgttttgtatgccgctccca

SEQ ID NO: 4552611 - DNA, 25 bp, Homo sapien
gaatgttttgtatgccgctcccatc

SEQ ID NO: 4552612 - DNA, 25 bp, Homo sapien
cagctgatagatgtaactgtgacca

SEQ ID NO: 4552613 - DNA, 25 bp, Homo sapien
taacttcagtcagcagaagggaaaa

SEQ ID NO: 4552614 - DNA, 25 bp, Homo sapien
catttctactaacttcagtcagcag

SEQ ID NO: 4552615 - DNA, 25 bp, Homo sapien
tgtccagatgaggattctgtgagca

SEQ ID NO: 4552616 - DNA, 25 bp, Homo sapien
tgcaaaatcgaattgtctggcagtt

SEQ ID NO: 4552617 - DNA, 25 bp, Homo sapien
ctttttcatagacatcttgcttttc

SEQ ID NO: 4552618 - DNA, 25 bp, Homo sapien
caccaatagaagtctctcagtatat

SEQ ID NO: 4552619 - DNA, 25 bp, Homo sapien
cagtatatgtgcaaaatcgaattgt

SEQ ID NO: 4552620 - DNA, 25 bp, Homo sapien
tttagtactagttccaggtaattca

SEQ ID NO: 4552621 - DNA, 25 bp, Homo sapien
gtaattcatacacagccatgagaag

SEQ ID NO: 4552622 - DNA, 25 bp, Homo sapien
ttagtactagttccaggtaattcat

SEQ ID NO: 4552623 - DNA, 25 bp, Homo sapien
ccaggtaattcatacacagccatga

SEQ ID NO: 4552624 - DNA, 25 bp, Homo sapien
atatgcttgaaattgtaaggaaaaa

SEQ ID NO: 4552625 - DNA, 25 bp, Homo sapien
tatgcttgaaattgtaaggaaaaaa

SEQ ID NO: 4552626 - DNA, 25 bp, Homo sapien
tactttgagctcaccagctactgat

SEQ ID NO: 4552627 - DNA, 25 bp, Homo sapien
ggaaagatcccatactttgagctca

SEQ ID NO: 4552628 - DNA, 25 bp, Homo sapien
tcaccagctactgataccaccaaga

SEQ ID NO: 4552629 - DNA, 25 bp, Homo sapien
tgatagatgaggaaagatcccatac

SEQ ID NO: 4552630 - DNA, 25 bp, Homo sapien
cacatgcagttgatccagtcaggaa

SEQ ID NO: 4552631 - DNA, 25 bp, Homo sapien
tcctgtcatccggaatgagcagtgg

SEQ ID NO: 4552632 - DNA, 25 bp, Homo sapien
gatctaaaactgtgaacaacagcca

SEQ ID NO: 4552633 - DNA, 25 bp, Homo sapien
aattctcatggagtgaacaatgcac

SEQ ID NO: 4552634 - DNA, 25 bp, Homo sapien
attgcagtgtgcctgtaaggaagtg

SEQ ID NO: 4552635 - DNA, 25 bp, Homo sapien
taaggaagtgtagccttctccatgc

SEQ ID NO: 4552636 - DNA, 25 bp, Homo sapien
gtccattggtgacattccaaacaca

SEQ ID NO: 4552637 - DNA, 25 bp, Homo sapien
ccatgcactgtccattggtgacatt

SEQ ID NO: 4552638 - DNA, 25 bp, Homo sapien
gaagataactttgtgttattctctg

SEQ ID NO: 4552639 - DNA, 25 bp, Homo sapien
tttcagcagcactaacaatgtaggg

SEQ ID NO: 4552640 - DNA, 25 bp, Homo sapien
gagaagtcccttgctcttgccaaac

SEQ ID NO: 4552641 - DNA, 25 bp, Homo sapien
aatgtagggctgtttagagaagtcc

SEQ ID NO: 4552642 - DNA, 25 bp, Homo sapien
tgttaccgaagctgaatgaccaaat

SEQ ID NO: 4552643 - DNA, 25 bp, Homo sapien
cactcaggggtgcatatccctgtgc

SEQ ID NO: 4552644 - DNA, 25 bp, Homo sapien
acaacatactatctttccctgtcat

SEQ ID NO: 4552645 - DNA, 25 bp, Homo sapien
tccctgtgcatttaatccctttcca

SEQ ID NO: 4552646 - DNA, 25 bp, Homo sapien
gagaacaacatactatctttccctg

SEQ ID NO: 4552647 - DNA, 25 bp, Homo sapien
tcatgtgagagattccagagacaga

SEQ ID NO: 4552648 - DNA, 25 bp, Homo sapien
agtcacaatcgttcgctggtcatca

SEQ ID NO: 4552649 - DNA, 25 bp, Homo sapien
agagacagagctgaccctcttgact

SEQ ID NO: 4552650 - DNA, 25 bp, Homo sapien
agagctgaccctcttgacttccagt

SEQ ID NO: 4552651 - DNA, 25 bp, Homo sapien
aaatgcttacatcccagttcctcaa

SEQ ID NO: 4552652 - DNA, 25 bp, Homo sapien
ggcataacggattattaggcatcac

SEQ ID NO: 4552653 - DNA, 25 bp, Homo sapien
tttaaatgcttacatcccagttcct

SEQ ID NO: 4552654 - DNA, 25 bp, Homo sapien
atctgtgctcctatgtggcataacg

SEQ ID NO: 4552655 - DNA, 25 bp, Homo sapien
aagaaaactatgcaatgcatcacag

SEQ ID NO: 4552656 - DNA, 25 bp, Homo sapien
agcgggcatatagaattagcacagg

SEQ ID NO: 4552657 - DNA, 25 bp, Homo sapien
aaaagcgggcatatagaattagcac

SEQ ID NO: 4552658 - DNA, 25 bp, Homo sapien
gaaaactatgcaatgcatcacagaa

SEQ ID NO: 4552659 - DNA, 25 bp, Homo sapien
gattacgttcactgcttcatgcggt

SEQ ID NO: 4552660 - DNA, 25 bp, Homo sapien
tgttaagttgtagacactgtgctgc

SEQ ID NO: 4552661 - DNA, 25 bp, Homo sapien
tcatgcggtcctcataatatcaata

SEQ ID NO: 4552662 - DNA, 25 bp, Homo sapien
gaaaatgagtcttggagaacataag

SEQ ID NO: 4552663 - DNA, 25 bp, Homo sapien
ccttttcactggtttgtaagtggtg

SEQ ID NO: 4552664 - DNA, 25 bp, Homo sapien
cttttcactggtttgtaagtggtga

SEQ ID NO: 4552665 - DNA, 25 bp, Homo sapien
ttcactggtttgtaagtggtgagag

SEQ ID NO: 4552666 - DNA, 25 bp, Homo sapien
tttcactggtttgtaagtggtgaga

SEQ ID NO: 4552667 - DNA, 25 bp, Homo sapien
tctttattgccgactcagcccaagc

SEQ ID NO: 4552668 - DNA, 25 bp, Homo sapien
agaagtccaattcccaagttccaag

SEQ ID NO: 4552669 - DNA, 25 bp, Homo sapien
gagcaaggaaagtttcgccagcccc

SEQ ID NO: 4552670 - DNA, 25 bp, Homo sapien
caaaaggaagtattcccagtgcatc

SEQ ID NO: 4552671 - DNA, 25 bp, Homo sapien
gatgagcggctttgttcactcctga

SEQ ID NO: 4552672 - DNA, 25 bp, Homo sapien
cataggtagggatactgcgagatga

SEQ ID NO: 4552673 - DNA, 25 bp, Homo sapien
tcctcccaggagcataggtagggat

SEQ ID NO: 4552674 - DNA, 25 bp, Homo sapien
gatactgcgagatgagcggctttgt

SEQ ID NO: 4552675 - DNA, 25 bp, Homo sapien
ctgagccgtggggcggaggagcggc

SEQ ID NO: 4552676 - DNA, 25 bp, Homo sapien
agccgtggggcggaggagcggcaga

SEQ ID NO: 4552677 - DNA, 25 bp, Homo sapien
tgagccgtggggcggaggagcggca

SEQ ID NO: 4552678 - DNA, 25 bp, Homo sapien
ccgtggggcggaggagcggcagagg

SEQ ID NO: 4552679 - DNA, 25 bp, Homo sapien
tagacctagttgctcttgtctgagc

SEQ ID NO: 4552680 - DNA, 25 bp, Homo sapien
caaatgtagaaagaggtctagacct

SEQ ID NO: 4552681 - DNA, 25 bp, Homo sapien
gctagcttagtggtcttagagaccc

SEQ ID NO: 4552682 - DNA, 25 bp, Homo sapien
gcttatccattagggacggtgccca

SEQ ID NO: 4552683 - DNA, 25 bp, Homo sapien
catcactgaaggcaccagggcagtg

SEQ ID NO: 4552684 - DNA, 25 bp, Homo sapien
gctgacagaactgggaccctccact

SEQ ID NO: 4552685 - DNA, 25 bp, Homo sapien
cactgtaggcaagggagccccggct

SEQ ID NO: 4552686 - DNA, 25 bp, Homo sapien
tcggtcgttagtagaacctgtgagg

SEQ ID NO: 4552687 - DNA, 25 bp, Homo sapien
gttaaagggcatatgacacacttca

SEQ ID NO: 4552688 - DNA, 25 bp, Homo sapien
aagtcctactattccatgaagaggg

SEQ ID NO: 4552689 - DNA, 25 bp, Homo sapien
gctctgtagctgaccctaagtccta

SEQ ID NO: 4552690 - DNA, 25 bp, Homo sapien
tctgtagtagatgtaagatggaagc

SEQ ID NO: 4552691 - DNA, 25 bp, Homo sapien
gagtgtttaggctgtgtcttggaaa

SEQ ID NO: 4552692 - DNA, 25 bp, Homo sapien
cagagtgtttaggctgtgtcttgga

SEQ ID NO: 4552693 - DNA, 25 bp, Homo sapien
agagtgtttaggctgtgtcttggaa

SEQ ID NO: 4552694 - DNA, 25 bp, Homo sapien
tgggttgccagaaaggacgcccaaa

SEQ ID NO: 4552695 - DNA, 25 bp, Homo sapien
tacatgctaaatgtccatggtgcac

SEQ ID NO: 4552696 - DNA, 25 bp, Homo sapien
tacaaatagaatgcagaagagaacc

SEQ ID NO: 4552697 - DNA, 25 bp, Homo sapien
gagaacccagaagaatatgcctctg

SEQ ID NO: 4552698 - DNA, 25 bp, Homo sapien
ttctccccagctgttggaatggtcc

SEQ ID NO: 4552699 - DNA, 25 bp, Homo sapien
gcaccatgcagggtggagtcagttc

SEQ ID NO: 4552700 - DNA, 25 bp, Homo sapien
ccatgcagggtggagtcagttccat

SEQ ID NO: 4552701 - DNA, 25 bp, Homo sapien
gtccacgcagcacactgagcaccat

SEQ ID NO: 4552702 - DNA, 25 bp, Homo sapien
tctaaaccactcaataagcaggaaa

SEQ ID NO: 4552703 - DNA, 25 bp, Homo sapien
tgtctaaaccactcaataagcagga

SEQ ID NO: 4552704 - DNA, 25 bp, Homo sapien
aaaccactcaataagcaggaaatac

SEQ ID NO: 4552705 - DNA, 25 bp, Homo sapien
cttgtctaaaccactcaataagcag

SEQ ID NO: 4552706 - DNA, 25 bp, Homo sapien
gagcatcggtggactcacgtctcca

SEQ ID NO: 4552707 - DNA, 25 bp, Homo sapien
tgggagcatcggtggactcacgtct

SEQ ID NO: 4552708 - DNA, 25 bp, Homo sapien
tgagtgagcaatgcctgtccccttt

SEQ ID NO: 4552709 - DNA, 25 bp, Homo sapien
cctgagtgagcaatgcctgtcccct

SEQ ID NO: 4552710 - DNA, 25 bp, Homo sapien
ccatccagcccttcaatgccatgtt

SEQ ID NO: 4552711 - DNA, 25 bp, Homo sapien
tgattagctgaattatgcaaaagca

SEQ ID NO: 4552712 - DNA, 25 bp, Homo sapien
cagcccttcaatgccatgttccctc

SEQ ID NO: 4552713 - DNA, 25 bp, Homo sapien
aaaagcacatcagtgttccacaggg

SEQ ID NO: 4552714 - DNA, 25 bp, Homo sapien
ctaattttgtgatgcgatgttctgt

SEQ ID NO: 4552715 - DNA, 25 bp, Homo sapien
cagaatttctaggtgccagattttg

SEQ ID NO: 4552716 - DNA, 25 bp, Homo sapien
gccagattttgaaatagagagtcag

SEQ ID NO: 4552717 - DNA, 25 bp, Homo sapien
tctgtcagattgatttgggcctgca

SEQ ID NO: 4552718 - DNA, 25 bp, Homo sapien
caagaagtggtcatctgactggcct

SEQ ID NO: 4552719 - DNA, 25 bp, Homo sapien
tacgccttgaatggaggcatgatgg

SEQ ID NO: 4552720 - DNA, 25 bp, Homo sapien
tttcccctcttacgccttgaatgga

SEQ ID NO: 4552721 - DNA, 25 bp, Homo sapien
agttatgggcgaaagtctgctggca

SEQ ID NO: 4552722 - DNA, 25 bp, Homo sapien
ctggaagtaggcttcttggatagtt

SEQ ID NO: 4552723 - DNA, 25 bp, Homo sapien
gctggaagtaggcttcttggatagt

SEQ ID NO: 4552724 - DNA, 25 bp, Homo sapien
aaaaggcttatgtctgccatctaag

SEQ ID NO: 4552725 - DNA, 25 bp, Homo sapien
tctgatagtagcatagtcactcctg

SEQ ID NO: 4552726 - DNA, 25 bp, Homo sapien
tccaggcttcctaattgatgtgtct

SEQ ID NO: 4552727 - DNA, 25 bp, Homo sapien
cacttaagtccatgatctgtttgag

SEQ ID NO: 4552728 - DNA, 25 bp, Homo sapien
ttatctcagctctatttattaagtg

SEQ ID NO: 4552729 - DNA, 25 bp, Homo sapien
taccatagccctgtagaataggttg

SEQ ID NO: 4552730 - DNA, 25 bp, Homo sapien
catagccctgtagaataggttgaag

SEQ ID NO: 4552731 - DNA, 25 bp, Homo sapien
agttatctcagctctatttattaag

SEQ ID NO: 4552732 - DNA, 25 bp, Homo sapien
aaaacttagaccatcatgcctctga

SEQ ID NO: 4552733 - DNA, 25 bp, Homo sapien
gaaagggtcatctgtgtccgttcga

SEQ ID NO: 4552734 - DNA, 25 bp, Homo sapien
tgatcaccttgtacctctcattggt

SEQ ID NO: 4552735 - DNA, 25 bp, Homo sapien
acagtgttttgtatccatcagaggc

SEQ ID NO: 4552736 - DNA, 25 bp, Homo sapien
aaaaatgatactgctttcagaagaa

SEQ ID NO: 4552737 - DNA, 25 bp, Homo sapien
tctgtcataagaaagagctaccggt

SEQ ID NO: 4552738 - DNA, 25 bp, Homo sapien
gaagaaagtactctgttgagaaact

SEQ ID NO: 4552739 - DNA, 25 bp, Homo sapien
gctactcatgtaagaactagctaga

SEQ ID NO: 4552740 - DNA, 25 bp, Homo sapien
gtagtgactggagattgtgccgctg

SEQ ID NO: 4552741 - DNA, 25 bp, Homo sapien
gcagttggcatcaagacttccatgg

SEQ ID NO: 4552742 - DNA, 25 bp, Homo sapien
gttggcatcaagacttccatggtga

SEQ ID NO: 4552743 - DNA, 25 bp, Homo sapien
ggatagatgctacgtgcagttggca

SEQ ID NO: 4552744 - DNA, 25 bp, Homo sapien
acctgcttgttaattggtggataga

SEQ ID NO: 4552745 - DNA, 25 bp, Homo sapien
cccattctgatgcctcttcatgctg

SEQ ID NO: 4552746 - DNA, 25 bp, Homo sapien
ttctgatgcctcttcatgctggcca

SEQ ID NO: 4552747 - DNA, 25 bp, Homo sapien
attctgatgcctcttcatgctggcc

SEQ ID NO: 4552748 - DNA, 25 bp, Homo sapien
ttccccattctgatgcctcttcatg

SEQ ID NO: 4552749 - DNA, 25 bp, Homo sapien
atccgatttcacccatttaagaata

SEQ ID NO: 4552750 - DNA, 25 bp, Homo sapien
ttaatccgatttcacccatttaaga

SEQ ID NO: 4552751 - DNA, 25 bp, Homo sapien
taatccgatttcacccatttaagaa

SEQ ID NO: 4552752 - DNA, 25 bp, Homo sapien
aatccgatttcacccatttaagaat

SEQ ID NO: 4552753 - DNA, 25 bp, Homo sapien
gacttcattacagtatctgagctgg

SEQ ID NO: 4552754 - DNA, 25 bp, Homo sapien
tcttcataaagtggatttctattta

SEQ ID NO: 4552755 - DNA, 25 bp, Homo sapien
ttcatggacttcattacagtatctg

SEQ ID NO: 4552756 - DNA, 25 bp, Homo sapien
cattacagtatctgagctgggtatc

SEQ ID NO: 4552757 - DNA, 25 bp, Homo sapien
agccaatacagcatggcccagcagg

SEQ ID NO: 4552758 - DNA, 25 bp, Homo sapien
gccagtagtcagtgaacaatttccg

SEQ ID NO: 4552759 - DNA, 25 bp, Homo sapien
gttcctaggttttccatccttatgc

SEQ ID NO: 4552760 - DNA, 25 bp, Homo sapien
gatatctgtttctcccaaggcttgc

SEQ ID NO: 4552761 - DNA, 25 bp, Homo sapien
ttgttctcatggttttgcagacttg

SEQ ID NO: 4552762 - DNA, 25 bp, Homo sapien
tgtgtacaatggagaatgtctctga

SEQ ID NO: 4552763 - DNA, 25 bp, Homo sapien
ggtaaagtgttattgttctcatggt

SEQ ID NO: 4552764 - DNA, 25 bp, Homo sapien
agtgttattgttctgatggtaaagt

SEQ ID NO: 4552765 - DNA, 25 bp, Homo sapien
tgattggcatgtgatgttattcaca

SEQ ID NO: 4552766 - DNA, 25 bp, Homo sapien
tcaggaagcttctgtcacggttatt

SEQ ID NO: 4552767 - DNA, 25 bp, Homo sapien
tgcatattgaataactcctgaatga

SEQ ID NO: 4552768 - DNA, 25 bp, Homo sapien
tctgtcacggttattttcactgctc

SEQ ID NO: 4552769 - DNA, 25 bp, Homo sapien
ggttgcatttagcatgtcagcagtg

SEQ ID NO: 4552770 - DNA, 25 bp, Homo sapien
catttgaaagcttgaacatggttag

SEQ ID NO: 4552771 - DNA, 25 bp, Homo sapien
ttctaaaatggctcattcgcatgcc

SEQ ID NO: 4552772 - DNA, 25 bp, Homo sapien
tgaacatggttagagggtcagcttc

SEQ ID NO: 4552773 - DNA, 25 bp, Homo sapien
tgacaggtagcactgcaatagttcg

SEQ ID NO: 4552774 - DNA, 25 bp, Homo sapien
tgctgacaggtagcactgcaatagt

SEQ ID NO: 4552775 - DNA, 25 bp, Homo sapien
ggtagcactgcaatagttcggcatc

SEQ ID NO: 4552776 - DNA, 25 bp, Homo sapien
caggtagcactgcaatagttcggca

SEQ ID NO: 4552777 - DNA, 25 bp, Homo sapien
ctgtcatgataaggaaaccagagga

SEQ ID NO: 4552778 - DNA, 25 bp, Homo sapien
cttcctgtgaccctgtccattattc

SEQ ID NO: 4552779 - DNA, 25 bp, Homo sapien
gagaaaaggtcagcttgtccaaaag

SEQ ID NO: 4552780 - DNA, 25 bp, Homo sapien
gggagaaaaggtcagcttgtccaaa

SEQ ID NO: 4552781 - DNA, 25 bp, Homo sapien
aagggagaaaaggtcagcttgtcca

SEQ ID NO: 4552782 - DNA, 25 bp, Homo sapien
taaagggagaaaaggtcagcttgtc

SEQ ID NO: 4552783 - DNA, 25 bp, Homo sapien
aacagggacctcatgccctttagaa

SEQ ID NO: 4552784 - DNA, 25 bp, Homo sapien
tcacattgtttgctcctcaacaaag

SEQ ID NO: 4552785 - DNA, 25 bp, Homo sapien
catccttacgaggaagaagctttcc

SEQ ID NO: 4552786 - DNA, 25 bp, Homo sapien
ccagagggccgttaactcttgttat

SEQ ID NO: 4552787 - DNA, 25 bp, Homo sapien
ggacattgcatgtatcactccaggc

SEQ ID NO: 4552788 - DNA, 25 bp, Homo sapien
gtgatacactgatgtgaaccagagg

SEQ ID NO: 4552789 - DNA, 25 bp, Homo sapien
ataaagggcccttcatatgaatata

SEQ ID NO: 4552790 - DNA, 25 bp, Homo sapien
atgaatataaatcgatactactaac

SEQ ID NO: 4552791 - DNA, 25 bp, Homo sapien
tatgaatataaatcgatactactaa

SEQ ID NO: 4552792 - DNA, 25 bp, Homo sapien
tggagatgaaataaagggcccttca

SEQ ID NO: 4552793 - DNA, 25 bp, Homo sapien
taacagttccttctttgagatcaaa

SEQ ID NO: 4552794 - DNA, 25 bp, Homo sapien
atcaaatataattggtgtattccag

SEQ ID NO: 4552795 - DNA, 25 bp, Homo sapien
gatcaaatataattggtgtattcca

SEQ ID NO: 4552796 - DNA, 25 bp, Homo sapien
tgtctttctgcctgcaggataaaac

SEQ ID NO: 4552797 - DNA, 25 bp, Homo sapien
ccacataacattgaagagacattga

SEQ ID NO: 4552798 - DNA, 25 bp, Homo sapien
tgcagagttcaaagatactttagtg

SEQ ID NO: 4552799 - DNA, 25 bp, Homo sapien
ctttgtggagaccacataacattga

SEQ ID NO: 4552800 - DNA, 25 bp, Homo sapien
gagttcaaagatactttagtggcca

SEQ ID NO: 4552801 - DNA, 25 bp, Homo sapien
tctgagtgccgtcagttgaccacgc

SEQ ID NO: 4552802 - DNA, 25 bp, Homo sapien
cagcagtctgagtgccgtcagttga

SEQ ID NO: 4552803 - DNA, 25 bp, Homo sapien
agttgaccacgcaatattaaatatg

SEQ ID NO: 4552804 - DNA, 25 bp, Homo sapien
ctgtatggtccttcttttagttaat

SEQ ID NO: 4552805 - DNA, 25 bp, Homo sapien
ttgaatttgtctcttatactcaaac

SEQ ID NO: 4552806 - DNA, 25 bp, Homo sapien
tgcttgaatttgtctcttatactca

SEQ ID NO: 4552807 - DNA, 25 bp, Homo sapien
aaagctttctgcttgaatttgtctc

SEQ ID NO: 4552808 - DNA, 25 bp, Homo sapien
ttatgaggacaaagctttctgcttg

SEQ ID NO: 4552809 - DNA, 25 bp, Homo sapien
ccggtgaagatctatagggtaaata

SEQ ID NO: 4552810 - DNA, 25 bp, Homo sapien
ttggaaaccggtgaagatctatagg

SEQ ID NO: 4552811 - DNA, 25 bp, Homo sapien
gttccactagtgaacaagttcctct

SEQ ID NO: 4552812 - DNA, 25 bp, Homo sapien
tgagttgttccactagtgaacaagt

SEQ ID NO: 4552813 - DNA, 25 bp, Homo sapien
gttctcttaaaagagatatcttcag

SEQ ID NO: 4552814 - DNA, 25 bp, Homo sapien
tctcttaaaagagatatcttcagtc

SEQ ID NO: 4552815 - DNA, 25 bp, Homo sapien
cttgatgctttggttctcttaaaag

SEQ ID NO: 4552816 - DNA, 25 bp, Homo sapien
cttaaaagagatatcttcagtctca

SEQ ID NO: 4552817 - DNA, 25 bp, Homo sapien
gcataatggtacagcaagccctttt

SEQ ID NO: 4552818 - DNA, 25 bp, Homo sapien
aatggtacagcaagcccttttaggc

SEQ ID NO: 4552819 - DNA, 25 bp, Homo sapien
ttgtcagcataatggtacagcaagc

SEQ ID NO: 4552820 - DNA, 25 bp, Homo sapien
tcagcataatggtacagcaagccct

SEQ ID NO: 4552821 - DNA, 25 bp, Homo sapien
tctgcattatacgatctctgctgcc

SEQ ID NO: 4552822 - DNA, 25 bp, Homo sapien
tcctgttagtttttgataatgaacc

SEQ ID NO: 4552823 - DNA, 25 bp, Homo sapien
cactctccgatatgctttttctgca

SEQ ID NO: 4552824 - DNA, 25 bp, Homo sapien
cgtttcctcactgcacccttttata

SEQ ID NO: 4552825 - DNA, 25 bp, Homo sapien
ccagggattctgcagcagttactgg

SEQ ID NO: 4552826 - DNA, 25 bp, Homo sapien
tctgcagcagttactggatctgatt

SEQ ID NO: 4552827 - DNA, 25 bp, Homo sapien
tgcagcagttactggatctgatttt

SEQ ID NO: 4552828 - DNA, 25 bp, Homo sapien
ctccagggattctgcagcagttact

SEQ ID NO: 4552829 - DNA, 25 bp, Homo sapien
caatgtgattatagatgcacttcca

SEQ ID NO: 4552830 - DNA, 25 bp, Homo sapien
caagagatgctttacatcggatggc

SEQ ID NO: 4552831 - DNA, 25 bp, Homo sapien
tgtttttcaccaagtcattattgtt

SEQ ID NO: 4552832 - DNA, 25 bp, Homo sapien
gatggcggttctgctgatccatagg

SEQ ID NO: 4552833 - DNA, 25 bp, Homo sapien
ttcatgcctcctgcatgctcctgct

SEQ ID NO: 4552834 - DNA, 25 bp, Homo sapien
gacatttagaatggtctggctccga

SEQ ID NO: 4552835 - DNA, 25 bp, Homo sapien
tgacatttagaatggtctggctccg

SEQ ID NO: 4552836 - DNA, 25 bp, Homo sapien
acatttagaatggtctggctccgac

SEQ ID NO: 4552837 - DNA, 25 bp, Homo sapien
atacggtagacttccaggccagcag

SEQ ID NO: 4552838 - DNA, 25 bp, Homo sapien
caaccctgtcttgtactcgtcttcc

SEQ ID NO: 4552839 - DNA, 25 bp, Homo sapien
accctgtcttgtactcgtcttcctc

SEQ ID NO: 4552840 - DNA, 25 bp, Homo sapien
ctatacggtagacttccaggccagc

SEQ ID NO: 4552841 - DNA, 25 bp, Homo sapien
gcctgagaatgtactggcataaagt

SEQ ID NO: 4552842 - DNA, 25 bp, Homo sapien
agtctagcctgagaatgtactggca

SEQ ID NO: 4552843 - DNA, 25 bp, Homo sapien
tcaaagatgtcaaagggtgttcaga

SEQ ID NO: 4552844 - DNA, 25 bp, Homo sapien
gatgtcaaagggtgttcagaagtac

SEQ ID NO: 4552845 - DNA, 25 bp, Homo sapien
gacatgcttgtgtatgtcacactct

SEQ ID NO: 4552846 - DNA, 25 bp, Homo sapien
gctgctgtacgacatgcttgtgtat

SEQ ID NO: 4552847 - DNA, 25 bp, Homo sapien
gacttgctgctgtacgacatgcttg

SEQ ID NO: 4552848 - DNA, 25 bp, Homo sapien
tgtacgacatgcttgtgtatgtcac

SEQ ID NO: 4552849 - DNA, 25 bp, Homo sapien
gctgttgccatagttctggtgtcac

SEQ ID NO: 4552850 - DNA, 25 bp, Homo sapien
gttgccatagttctggtgtcactgt

SEQ ID NO: 4552851 - DNA, 25 bp, Homo sapien
aaataagtgatcccttggccagctg

SEQ ID NO: 4552852 - DNA, 25 bp, Homo sapien
tttgattggtcctcctggacagtag

SEQ ID NO: 4552853 - DNA, 25 bp, Homo sapien
tggccgatatagtggaacccagtct

SEQ ID NO: 4552854 - DNA, 25 bp, Homo sapien
tctgtcttcagtgtataaccttgga

SEQ ID NO: 4552855 - DNA, 25 bp, Homo sapien
taccatatagcaataccaatagaga

SEQ ID NO: 4552856 - DNA, 25 bp, Homo sapien
tagatacttcttaacctaatctggg

SEQ ID NO: 4552857 - DNA, 25 bp, Homo sapien
ggatattgaccctttatcagacata

SEQ ID NO: 4552858 - DNA, 25 bp, Homo sapien
tactgctttacttaatggctgtacc

SEQ ID NO: 4552859 - DNA, 25 bp, Homo sapien
gatattgagcacctttttaaatgtg

SEQ ID NO: 4552860 - DNA, 25 bp, Homo sapien
tttgtgcatgccattaccaacacat

SEQ ID NO: 4552861 - DNA, 25 bp, Homo sapien
tggctgtgttctcaacatatatgct

SEQ ID NO: 4552862 - DNA, 25 bp, Homo sapien
tgtggtgggtaagtaccttcatacc

SEQ ID NO: 4552863 - DNA, 25 bp, Homo sapien
catatatgctttgagtgcaagatgc

SEQ ID NO: 4552864 - DNA, 25 bp, Homo sapien
catttaaggctcgaatagtaagtgg

SEQ ID NO: 4552865 - DNA, 25 bp, Homo sapien
gatactctgctagagagaacgtggc

SEQ ID NO: 4552866 - DNA, 25 bp, Homo sapien
agaacgtggcaatgaaggtgccaca

SEQ ID NO: 4552867 - DNA, 25 bp, Homo sapien
taagtatgttttggctgtaaagacc

SEQ ID NO: 4552868 - DNA, 25 bp, Homo sapien
tcagaaggtacgatactctgctaga

SEQ ID NO: 4552869 - DNA, 25 bp, Homo sapien
tttgctgagctcaagcctattgacc

SEQ ID NO: 4552870 - DNA, 25 bp, Homo sapien
cctaagcatgctatcccagtggtag

SEQ ID NO: 4552871 - DNA, 25 bp, Homo sapien
taacctgcgcctttatctttctcaa

SEQ ID NO: 4552872 - DNA, 25 bp, Homo sapien
ttctccttgcactcgcctaagcatg

SEQ ID NO: 4552873 - DNA, 25 bp, Homo sapien
tagggccatgttcagatcaagtttc

SEQ ID NO: 4552874 - DNA, 25 bp, Homo sapien
aaggagagaaatacatgccacaaac

SEQ ID NO: 4552875 - DNA, 25 bp, Homo sapien
tgatgccacttaatacccattttgg

SEQ ID NO: 4552876 - DNA, 25 bp, Homo sapien
agctgcttgattgcggcggcatctt

SEQ ID NO: 4552877 - DNA, 25 bp, Homo sapien
cccctttctcatagaaccaagtatc

SEQ ID NO: 4552878 - DNA, 25 bp, Homo sapien
tatgtgcaagttctccccctttctc

SEQ ID NO: 4552879 - DNA, 25 bp, Homo sapien
ttgaatatgtgcaagttctccccct

SEQ ID NO: 4552880 - DNA, 25 bp, Homo sapien
catagaaccaagtatctgtgaccat

SEQ ID NO: 4552881 - DNA, 25 bp, Homo sapien
tggaaagctcaatttcagttccagc

SEQ ID NO: 4552882 - DNA, 25 bp, Homo sapien
tttggaaagctcaatttcagttcca

SEQ ID NO: 4552883 - DNA, 25 bp, Homo sapien
ttggaaagctcaatttcagttccag

SEQ ID NO: 4552884 - DNA, 25 bp, Homo sapien
ctgacttctgccaggtccgtaggct

SEQ ID NO: 4552885 - DNA, 25 bp, Homo sapien
cttctgccaggtccgtaggcttcca

SEQ ID NO: 4552886 - DNA, 25 bp, Homo sapien
cctctttagtgtgaggtctctgact

SEQ ID NO: 4552887 - DNA, 25 bp, Homo sapien
tagtgtgaggtctctgacttctgcc

SEQ ID NO: 4552888 - DNA, 25 bp, Homo sapien
aggacacgctcccatgacatggtct

SEQ ID NO: 4552889 - DNA, 25 bp, Homo sapien
ggggtcaactcacagcaaggagggg

SEQ ID NO: 4552890 - DNA, 25 bp, Homo sapien
cacgctcccatgacatggtctcagg

SEQ ID NO: 4552891 - DNA, 25 bp, Homo sapien
tgaggacacgctcccatgacatggt

SEQ ID NO: 4552892 - DNA, 25 bp, Homo sapien
tgaagattgaatcctatcattgcca

SEQ ID NO: 4552893 - DNA, 25 bp, Homo sapien
acagtcactaacgtttcctccatga

SEQ ID NO: 4552894 - DNA, 25 bp, Homo sapien
ccaaagccacacagtcactaacgtt

SEQ ID NO: 4552895 - DNA, 25 bp, Homo sapien
cactacttccgaaactgcttccatt

SEQ ID NO: 4552896 - DNA, 25 bp, Homo sapien
cttgcatctgcctttgcggccttgc

SEQ ID NO: 4552897 - DNA, 25 bp, Homo sapien
tctgcctttgcggccttgcgttcat

SEQ ID NO: 4552898 - DNA, 25 bp, Homo sapien
gcatctgcctttgcggccttgcgtt

SEQ ID NO: 4552899 - DNA, 25 bp, Homo sapien
tgcatctgcctttgcggccttgcgt

SEQ ID NO: 4552900 - DNA, 25 bp, Homo sapien
ccctggagtgctgggtatttgggtt

SEQ ID NO: 4552901 - DNA, 25 bp, Homo sapien
agtgctgggtatttgggtttctcat

SEQ ID NO: 4552902 - DNA, 25 bp, Homo sapien
gcccctggagtgctgggtatttggg

SEQ ID NO: 4552903 - DNA, 25 bp, Homo sapien
ctggagtgctgggtatttgggtttc

SEQ ID NO: 4552904 - DNA, 25 bp, Homo sapien
caaacattgcagtctttctgatgac

SEQ ID NO: 4552905 - DNA, 25 bp, Homo sapien
tgaaatatggctcttcaaacattgc

SEQ ID NO: 4552906 - DNA, 25 bp, Homo sapien
cttcagagcagtcaaagagctatgc

SEQ ID NO: 4552907 - DNA, 25 bp, Homo sapien
taagtgtaaaactgaggagaatctg

SEQ ID NO: 4552908 - DNA, 25 bp, Homo sapien
gcgagaatgcccatcttgtggtggc

SEQ ID NO: 4552909 - DNA, 25 bp, Homo sapien
acattccataatggtcgttaccggg

SEQ ID NO: 4552910 - DNA, 25 bp, Homo sapien
tgttgaaagtcttgcctgtcatggg

SEQ ID NO: 4552911 - DNA, 25 bp, Homo sapien
gccacgttgaagctaaatgtgcaca

SEQ ID NO: 4552912 - DNA, 25 bp, Homo sapien
taagtcgtttgatcttctcttggca

SEQ ID NO: 4552913 - DNA, 25 bp, Homo sapien
gatgaggccactaaagttgtgtgaa

SEQ ID NO: 4552914 - DNA, 25 bp, Homo sapien
ttcagacacatcgagacaatcacta

SEQ ID NO: 4552915 - DNA, 25 bp, Homo sapien
acctccatcaagtgagtactcagct

SEQ ID NO: 4552916 - DNA, 25 bp, Homo sapien
gatcaaccgtaagcactgatagagc

SEQ ID NO: 4552917 - DNA, 25 bp, Homo sapien
gccacaaagatcaaccgtaagcact

SEQ ID NO: 4552918 - DNA, 25 bp, Homo sapien
accgtaagcactgatagagcaccat

SEQ ID NO: 4552919 - DNA, 25 bp, Homo sapien
aaagatcaaccgtaagcactgatag

SEQ ID NO: 4552920 - DNA, 25 bp, Homo sapien
gctgagcacaattttcaaaccgcat

SEQ ID NO: 4552921 - DNA, 25 bp, Homo sapien
cttgggcattccacctgtagctggt

SEQ ID NO: 4552922 - DNA, 25 bp, Homo sapien
aagctgctctctcgcacacttgggc

SEQ ID NO: 4552923 - DNA, 25 bp, Homo sapien
ggagccaaccaccatatccattatg

SEQ ID NO: 4552924 - DNA, 25 bp, Homo sapien
gcacaagtacagcaagtagggccat

SEQ ID NO: 4552925 - DNA, 25 bp, Homo sapien
tacacctgaatattcctgtactcca

SEQ ID NO: 4552926 - DNA, 25 bp, Homo sapien
tcatctttacacctgaatattcctg

SEQ ID NO: 4552927 - DNA, 25 bp, Homo sapien
ttcctgtactccatgcacaagtaca

SEQ ID NO: 4552928 - DNA, 25 bp, Homo sapien
cagccagtatgggtctctctgggaa

SEQ ID NO: 4552929 - DNA, 25 bp, Homo sapien
cattcccacagccagtatgggtctc

SEQ ID NO: 4552930 - DNA, 25 bp, Homo sapien
cacagccagtatgggtctctctggg

SEQ ID NO: 4552931 - DNA, 25 bp, Homo sapien
gtgcttttccaactgaaaatctcat

SEQ ID NO: 4552932 - DNA, 25 bp, Homo sapien
cagggatgacaattcctcaaaggaa

SEQ ID NO: 4552933 - DNA, 25 bp, Homo sapien
atgacaattcctcaaaggaaagcat

SEQ ID NO: 4552934 - DNA, 25 bp, Homo sapien
ggatgacaattcctcaaaggaaagc

SEQ ID NO: 4552935 - DNA, 25 bp, Homo sapien
agggatgacaattcctcaaaggaaa

SEQ ID NO: 4552936 - DNA, 25 bp, Homo sapien
tttctgctgctaccagaaggatggg

SEQ ID NO: 4552937 - DNA, 25 bp, Homo sapien
cagtgatgatctgaagccagtctga

SEQ ID NO: 4552938 - DNA, 25 bp, Homo sapien
gctgtcagtagggatctgccccaat

SEQ ID NO: 4552939 - DNA, 25 bp, Homo sapien
gacagtgatgatctgaagccagtct

SEQ ID NO: 4552940 - DNA, 25 bp, Homo sapien
agtctgaataccagagtggctgtca

SEQ ID NO: 4552941 - DNA, 25 bp, Homo sapien
acacacactggcctgcgcccactgt

SEQ ID NO: 4552942 - DNA, 25 bp, Homo sapien
cgcgcacggtgcgcacacacactgg

SEQ ID NO: 4552943 - DNA, 25 bp, Homo sapien
tcttaagccggtctgaaaagcgcaa

SEQ ID NO: 4552944 - DNA, 25 bp, Homo sapien
cgattttccaggtgcgtccatcacc

SEQ ID NO: 4552945 - DNA, 25 bp, Homo sapien
aaagatataaatgctttgatttctg

SEQ ID NO: 4552946 - DNA, 25 bp, Homo sapien
tgtgaaacatccaccctgaaatatg

SEQ ID NO: 4552947 - DNA, 25 bp, Homo sapien
cctataaccataagcatgatgtata

SEQ ID NO: 4552948 - DNA, 25 bp, Homo sapien
gtataagctctgtgcaatttcttcc

SEQ ID NO: 4552949 - DNA, 25 bp, Homo sapien
ctggaaatctcatcacaaactcctt

SEQ ID NO: 4552950 - DNA, 25 bp, Homo sapien
caattttatgactcccaaactgccc

SEQ ID NO: 4552951 - DNA, 25 bp, Homo sapien
aaactccttcctcaccaattttatg

SEQ ID NO: 4552952 - DNA, 25 bp, Homo sapien
actggaaatctcatcacaaactcct

SEQ ID NO: 4552953 - DNA, 25 bp, Homo sapien
gccagaatctacaccgttggcaata

SEQ ID NO: 4552954 - DNA, 25 bp, Homo sapien
taacccactcttagcaaagctgcaa

SEQ ID NO: 4552955 - DNA, 25 bp, Homo sapien
tgcaaaactggcaacatttcttatt

SEQ ID NO: 4552956 - DNA, 25 bp, Homo sapien
ggcaatataacccactcttagcaaa

SEQ ID NO: 4552957 - DNA, 25 bp, Homo sapien
gagtccataccagcattaggaatgg

SEQ ID NO: 4552958 - DNA, 25 bp, Homo sapien
tcccctgcagactgggtccatgtca

SEQ ID NO: 4552959 - DNA, 25 bp, Homo sapien
gcaaggagtaggttatccgagctgc

SEQ ID NO: 4552960 - DNA, 25 bp, Homo sapien
gactgggtccatgtcagcacttgag

SEQ ID NO: 4552961 - DNA, 25 bp, Homo sapien
catggaggtgttcaaattggaaggt

SEQ ID NO: 4552962 - DNA, 25 bp, Homo sapien
ttccgtaaattagaaatgtatccat

SEQ ID NO: 4552963 - DNA, 25 bp, Homo sapien
tgttacaaggtttctcatggaggtg

SEQ ID NO: 4552964 - DNA, 25 bp, Homo sapien
tttccgtaaattagaaatgtatcca

SEQ ID NO: 4552965 - DNA, 25 bp, Homo sapien
tcttcacatatcctctgtacctccc

SEQ ID NO: 4552966 - DNA, 25 bp, Homo sapien
aggctgcccgaacaactcagcactg

SEQ ID NO: 4552967 - DNA, 25 bp, Homo sapien
cctccttgtgctcttcggatatgtt

SEQ ID NO: 4552968 - DNA, 25 bp, Homo sapien
gatatgttccttcccaaaccaccag

SEQ ID NO: 4552969 - DNA, 25 bp, Homo sapien
ggaccccagtgatcgtggaactcat

SEQ ID NO: 4552970 - DNA, 25 bp, Homo sapien
caggaccccagtgatcgtggaactc

SEQ ID NO: 4552971 - DNA, 25 bp, Homo sapien
cttgcaggaccccagtgatcgtgga

SEQ ID NO: 4552972 - DNA, 25 bp, Homo sapien
tgcaggaccccagtgatcgtggaac

SEQ ID NO: 4552973 - DNA, 25 bp, Homo sapien
tctctagctaacagccaaatgtgag

SEQ ID NO: 4552974 - DNA, 25 bp, Homo sapien
gggacatcccgaaattgagcattgg

SEQ ID NO: 4552975 - DNA, 25 bp, Homo sapien
gacttgtttgcaccatctctagcta

SEQ ID NO: 4552976 - DNA, 25 bp, Homo sapien
tagaatgttgccaagccaaccaaag

SEQ ID NO: 4552977 - DNA, 25 bp, Homo sapien
gctgtggaagcaggctcatgtaccc

SEQ ID NO: 4552978 - DNA, 25 bp, Homo sapien
gaaactgcgcaggcagaagctgtgc

SEQ ID NO: 4552979 - DNA, 25 bp, Homo sapien
ccccatcgtgggtcatggctgacag

SEQ ID NO: 4552980 - DNA, 25 bp, Homo sapien
ccctcctactagagttgtgctggca

SEQ ID NO: 4552981 - DNA, 25 bp, Homo sapien
gagaccttccccatggaagtttaga

SEQ ID NO: 4552982 - DNA, 25 bp, Homo sapien
gagacagcaacgtcctgtcccctgt

SEQ ID NO: 4552983 - DNA, 25 bp, Homo sapien
ggaggaaatctgaaccccgatccag

SEQ ID NO: 4552984 - DNA, 25 bp, Homo sapien
cccgatccagaacaaatgcctgaga

SEQ ID NO: 4552985 - DNA, 25 bp, Homo sapien
gatacctgatgataaccaactcttg

SEQ ID NO: 4552986 - DNA, 25 bp, Homo sapien
ctgagcctctaggattggtaggaca

SEQ ID NO: 4552987 - DNA, 25 bp, Homo sapien
gacagcacctttaggagtcctgatt

SEQ ID NO: 4552988 - DNA, 25 bp, Homo sapien
tccttgttgactacgttcccattta

SEQ ID NO: 4552989 - DNA, 25 bp, Homo sapien
tgggtccttgttgactacgttccca

SEQ ID NO: 4552990 - DNA, 25 bp, Homo sapien
ctggcacccagaagcacatacttga

SEQ ID NO: 4552991 - DNA, 25 bp, Homo sapien
ggcacccagaagcacatacttgatc

SEQ ID NO: 4552992 - DNA, 25 bp, Homo sapien
tggcacccagaagcacatacttgat

SEQ ID NO: 4552993 - DNA, 25 bp, Homo sapien
cacccagaagcacatacttgatcat

SEQ ID NO: 4552994 - DNA, 25 bp, Homo sapien
tccacttcagaagagtggttctccc

SEQ ID NO: 4552995 - DNA, 25 bp, Homo sapien
aattatgaaaacacgcctgaaaagg

SEQ ID NO: 4552996 - DNA, 25 bp, Homo sapien
taggacatcctcacatgagatcatt

SEQ ID NO: 4552997 - DNA, 25 bp, Homo sapien
tagactgacgaagctaaattatgaa

SEQ ID NO: 4552998 - DNA, 25 bp, Homo sapien
tgggttccagtgattctcctgcctc

SEQ ID NO: 4552999 - DNA, 25 bp, Homo sapien
tggagcaatctcggctcaacacaat

SEQ ID NO: 4553000 - DNA, 25 bp, Homo sapien
agcaatctcggctcaacacaatctc

SEQ ID NO: 4553001 - DNA, 25 bp, Homo sapien
tgcctcctgggttccagtgattctc

SEQ ID NO: 4553002 - DNA, 25 bp, Homo sapien
gaaaacacatgggagagacagagcc

SEQ ID NO: 4553003 - DNA, 25 bp, Homo sapien
ttatgggagtaaaccaggcccaggc

SEQ ID NO: 4553004 - DNA, 25 bp, Homo sapien
cagtactactgacgttttgagccaa

SEQ ID NO: 4553005 - DNA, 25 bp, Homo sapien
tctctagcacaggatacacaggctg

SEQ ID NO: 4553006 - DNA, 25 bp, Homo sapien
gacagtattcttattggcaataatc

SEQ ID NO: 4553007 - DNA, 25 bp, Homo sapien
tcttattggcaataatctcaacaac

SEQ ID NO: 4553008 - DNA, 25 bp, Homo sapien
acttagcatccaaacgttcatgccc

SEQ ID NO: 4553009 - DNA, 25 bp, Homo sapien
cttagatgaaccctgacacttagca

SEQ ID NO: 4553010 - DNA, 25 bp, Homo sapien
tatactagaattaatatcgttgctg

SEQ ID NO: 4553011 - DNA, 25 bp, Homo sapien
taacaagattagcaggcatttcagc

SEQ ID NO: 4553012 - DNA, 25 bp, Homo sapien
gcaagcaatgcctcacacatagcag

SEQ ID NO: 4553013 - DNA, 25 bp, Homo sapien
ttaaatggtcctaaaagacatgatc

SEQ ID NO: 4553014 - DNA, 25 bp, Homo sapien
catctgctttgggatggcataccct

SEQ ID NO: 4553015 - DNA, 25 bp, Homo sapien
gcctgcattgcgttttctgacacca

SEQ ID NO: 4553016 - DNA, 25 bp, Homo sapien
tctgggactagagggtactatatcc

SEQ ID NO: 4553017 - DNA, 25 bp, Homo sapien
cattggaatctcacaactctgggac

SEQ ID NO: 4553018 - DNA, 25 bp, Homo sapien
catgtatcatttcccctaatcttca

SEQ ID NO: 4553019 - DNA, 25 bp, Homo sapien
tcctaacacttggtccagggactgg

SEQ ID NO: 4553020 - DNA, 25 bp, Homo sapien
ccattatgcaaactgatcgttactt

SEQ ID NO: 4553021 - DNA, 25 bp, Homo sapien
tccagggactggtctacagccttag

SEQ ID NO: 4553022 - DNA, 25 bp, Homo sapien
ttcatatctttgtttagtgccttta

SEQ ID NO: 4553023 - DNA, 25 bp, Homo sapien
tcatatctttgtttagtgcctttaa

SEQ ID NO: 4553024 - DNA, 25 bp, Homo sapien
caaataatgaacatacgttgtaccc

SEQ ID NO: 4553025 - DNA, 25 bp, Homo sapien
cacaagttggaactgagtattctcc

SEQ ID NO: 4553026 - DNA, 25 bp, Homo sapien
aatgctgggctagaaaagtaaagtc

SEQ ID NO: 4553027 - DNA, 25 bp, Homo sapien
ctgcttctagatcaatgctgggcta

SEQ ID NO: 4553028 - DNA, 25 bp, Homo sapien
tagcacaaccattttacgtccacaa

SEQ ID NO: 4553029 - DNA, 25 bp, Homo sapien
agcacaaccattttacgtccacaat

SEQ ID NO: 4553030 - DNA, 25 bp, Homo sapien
aaagatgtcttttaatcgcttttca

SEQ ID NO: 4553031 - DNA, 25 bp, Homo sapien
aagatgtcttttaatcgcttttcat

SEQ ID NO: 4553032 - DNA, 25 bp, Homo sapien
ccatgtccacatcctcttgtaactg

SEQ ID NO: 4553033 - DNA, 25 bp, Homo sapien
ttaaggagcatcttccatgtccaca

SEQ ID NO: 4553034 - DNA, 25 bp, Homo sapien
tcttccatgtccacatcctcttgta

SEQ ID NO: 4553035 - DNA, 25 bp, Homo sapien
ttccatgtccacatcctcttgtaac

SEQ ID NO: 4553036 - DNA, 25 bp, Homo sapien
taccattttctcttccaactgtttc

SEQ ID NO: 4553037 - DNA, 25 bp, Homo sapien
cattttctcttccaactgtttccct

SEQ ID NO: 4553038 - DNA, 25 bp, Homo sapien
ctgtaccattttctcttccaactgt

SEQ ID NO: 4553039 - DNA, 25 bp, Homo sapien
ttctcttccaactgtttccctttgc

SEQ ID NO: 4553040 - DNA, 25 bp, Homo sapien
tgatatcctgaactttctgtagctc

SEQ ID NO: 4553041 - DNA, 25 bp, Homo sapien
ctgcaagaggggctcggataagatg

SEQ ID NO: 4553042 - DNA, 25 bp, Homo sapien
tgttttgcttgacttctttgatatc

SEQ ID NO: 4553043 - DNA, 25 bp, Homo sapien
gcaagaggggctcggataagatgga

SEQ ID NO: 4553044 - DNA, 25 bp, Homo sapien
actaatgcctctaaatatctactag

SEQ ID NO: 4553045 - DNA, 25 bp, Homo sapien
atactaatgcctctaaatatctact

SEQ ID NO: 4553046 - DNA, 25 bp, Homo sapien
gcctctaaatatctactagtaatta

SEQ ID NO: 4553047 - DNA, 25 bp, Homo sapien
taatgcctctaaatatctactagta

SEQ ID NO: 4553048 - DNA, 25 bp, Homo sapien
tagcttggcgcttctgtttgatttc

SEQ ID NO: 4553049 - DNA, 25 bp, Homo sapien
tcttcaactctcttcatcgcatcaa

SEQ ID NO: 4553050 - DNA, 25 bp, Homo sapien
tcattataaatttagcttggcgctt

SEQ ID NO: 4553051 - DNA, 25 bp, Homo sapien
ataaatttagcttggcgcttctgtt

SEQ ID NO: 4553052 - DNA, 25 bp, Homo sapien
cattcaagcggtatgatcaacaact

SEQ ID NO: 4553053 - DNA, 25 bp, Homo sapien
gctgaagaaggtgtatactcctggc

SEQ ID NO: 4553054 - DNA, 25 bp, Homo sapien
tagcaaatgtatgcacattcaagcg

SEQ ID NO: 4553055 - DNA, 25 bp, Homo sapien
caatccctactcaaaaagctgaaga

SEQ ID NO: 4553056 - DNA, 25 bp, Homo sapien
gccatgagggacaaagtgcaaacta

SEQ ID NO: 4553057 - DNA, 25 bp, Homo sapien
acagacatcagtaccttaacaaagg

SEQ ID NO: 4553058 - DNA, 25 bp, Homo sapien
acctgcaacacagacagccatgagg

SEQ ID NO: 4553059 - DNA, 25 bp, Homo sapien
taacatactactgtttctacagaca

SEQ ID NO: 4553060 - DNA, 25 bp, Homo sapien
gataggttcatttctacgtttttca

SEQ ID NO: 4553061 - DNA, 25 bp, Homo sapien
tgataggttcatttctacgtttttc

SEQ ID NO: 4553062 - DNA, 25 bp, Homo sapien
ccatagctctcgctggtatttgata

SEQ ID NO: 4553063 - DNA, 25 bp, Homo sapien
gctctcgctggtatttgataggttc

SEQ ID NO: 4553064 - DNA, 25 bp, Homo sapien
gtttttatgacatttagatttgcaa

SEQ ID NO: 4553065 - DNA, 25 bp, Homo sapien
ctgctttccggaatgctttggtcca

SEQ ID NO: 4553066 - DNA, 25 bp, Homo sapien
tctttaccagctgctttccggaatg

SEQ ID NO: 4553067 - DNA, 25 bp, Homo sapien
acctaactttgcgaggattgcgctt

SEQ ID NO: 4553068 - DNA, 25 bp, Homo sapien
tgatgcttcaacatgtccctgaaat

SEQ ID NO: 4553069 - DNA, 25 bp, Homo sapien
atgatgcttcaacatgtccctgaaa

SEQ ID NO: 4553070 - DNA, 25 bp, Homo sapien
gatgatgcttcaacatgtccctgaa

SEQ ID NO: 4553071 - DNA, 25 bp, Homo sapien
aaggcacaatgaaggatctacagag

SEQ ID NO: 4553072 - DNA, 25 bp, Homo sapien
ggcacaatgaaggatctacagagac

SEQ ID NO: 4553073 - DNA, 25 bp, Homo sapien
aggcacaatgaaggatctacagaga

SEQ ID NO: 4553074 - DNA, 25 bp, Homo sapien
tagtctagcaatgtgataatctcac

SEQ ID NO: 4553075 - DNA, 25 bp, Homo sapien
tgagaagcttagtctagcaatgtga

SEQ ID NO: 4553076 - DNA, 25 bp, Homo sapien
ctcactttgcaatcaagaaagatca

SEQ ID NO: 4553077 - DNA, 25 bp, Homo sapien
gcaatgtgataatctcactttgcaa

SEQ ID NO: 4553078 - DNA, 25 bp, Homo sapien
catccaatggaaaattcagatttgg

SEQ ID NO: 4553079 - DNA, 25 bp, Homo sapien
tgttaggtacatccaatggaaaatt

SEQ ID NO: 4553080 - DNA, 25 bp, Homo sapien
gagatttaggtttggaaatcaagca

SEQ ID NO: 4553081 - DNA, 25 bp, Homo sapien
tttggagctcaggagatttaggttt

SEQ ID NO: 4553082 - DNA, 25 bp, Homo sapien
tctggatccactggtgactcccaac

SEQ ID NO: 4553083 - DNA, 25 bp, Homo sapien
ttccaatatccagccgacaagcatc

SEQ ID NO: 4553084 - DNA, 25 bp, Homo sapien
caaatcaatacccaggtcttgacag

SEQ ID NO: 4553085 - DNA, 25 bp, Homo sapien
taacttccactgtgtctaccaaatc

SEQ ID NO: 4553086 - DNA, 25 bp, Homo sapien
cagttctcacgatctgttgttctaa

SEQ ID NO: 4553087 - DNA, 25 bp, Homo sapien
tccaagattcctggtaggcgctagc

SEQ ID NO: 4553088 - DNA, 25 bp, Homo sapien
gccaacgccacccaagggtggcgtg

SEQ ID NO: 4553089 - DNA, 25 bp, Homo sapien
tcctgaagttcctcgctgccaacgc

SEQ ID NO: 4553090 - DNA, 25 bp, Homo sapien
gctagctgggatcgctcctgaagtt

SEQ ID NO: 4553091 - DNA, 25 bp, Homo sapien
gccgtgtccaggatagatgggcccc

SEQ ID NO: 4553092 - DNA, 25 bp, Homo sapien
gtgtccaggatagatgggccccgaa

SEQ ID NO: 4553093 - DNA, 25 bp, Homo sapien
cgtgtccaggatagatgggccccga

SEQ ID NO: 4553094 - DNA, 25 bp, Homo sapien
ccgtgtccaggatagatgggccccg

SEQ ID NO: 4553095 - DNA, 25 bp, Homo sapien
cttgagaggaagtgatgcaaccccg

SEQ ID NO: 4553096 - DNA, 25 bp, Homo sapien
gatgcaaccccgtcaccggaagtta

SEQ ID NO: 4553097 - DNA, 25 bp, Homo sapien
agaggaagtgatgcaaccccgtcac

SEQ ID NO: 4553098 - DNA, 25 bp, Homo sapien
gaagtgatgcaaccccgtcaccgga

SEQ ID NO: 4553099 - DNA, 25 bp, Homo sapien
acgactgtgcctccggcggccgtgt

SEQ ID NO: 4553100 - DNA, 25 bp, Homo sapien
tgttagaccagatgcgaacacgact

SEQ ID NO: 4553101 - DNA, 25 bp, Homo sapien
aaaaggcaagcgtccttcgttctcg

SEQ ID NO: 4553102 - DNA, 25 bp, Homo sapien
tcgttctcgcgggtctgttagacca

SEQ ID NO: 4553103 - DNA, 25 bp, Homo sapien
ctctgtttgttcctactacttcacc

SEQ ID NO: 4553104 - DNA, 25 bp, Homo sapien
tcccaactctgtttgttcctactac

SEQ ID NO: 4553105 - DNA, 25 bp, Homo sapien
gaggccacatcatttatctgtgttc

SEQ ID NO: 4553106 - DNA, 25 bp, Homo sapien
tatacccttcccatatacatgaaca

SEQ ID NO: 4553107 - DNA, 25 bp, Homo sapien
ttatggcaactatataaggcactgc

SEQ ID NO: 4553108 - DNA, 25 bp, Homo sapien
tgctgtgtgattatgaccctgctct

SEQ ID NO: 4553109 - DNA, 25 bp, Homo sapien
tatgccctgatatgtagctgtaaaa

SEQ ID NO: 4553110 - DNA, 25 bp, Homo sapien
tacacttcacttttacataggcttg

SEQ ID NO: 4553111 - DNA, 25 bp, Homo sapien
gagtagtggaaggacagtggaaaaa

SEQ ID NO: 4553112 - DNA, 25 bp, Homo sapien
tttcctcactagcatatacaattca

SEQ ID NO: 4553113 - DNA, 25 bp, Homo sapien
ccaaccatggataagtttgttatgg

SEQ ID NO: 4553114 - DNA, 25 bp, Homo sapien
tcatttcaaggatagaaatatgtaa

SEQ ID NO: 4553115 - DNA, 25 bp, Homo sapien
tgaagacactttggcaatgcagcgg

SEQ ID NO: 4553116 - DNA, 25 bp, Homo sapien
cagctatgttcaggtgcggccagca

SEQ ID NO: 4553117 - DNA, 25 bp, Homo sapien
gactctgggcctacctacattaagg

SEQ ID NO: 4553118 - DNA, 25 bp, Homo sapien
tacattaaggcaggtgacagtaccc

SEQ ID NO: 4553119 - DNA, 25 bp, Homo sapien
gcatgggccacctgaactactatgt

SEQ ID NO: 4553120 - DNA, 25 bp, Homo sapien
actgtgccatgtatcaatcatagag

SEQ ID NO: 4553121 - DNA, 25 bp, Homo sapien
gagaagcaatttgtacacaatgccc

SEQ ID NO: 4553122 - DNA, 25 bp, Homo sapien
tagaaccggatgctttattcgtagg

SEQ ID NO: 4553123 - DNA, 25 bp, Homo sapien
cccattggcagcactagtttcaaag

SEQ ID NO: 4553124 - DNA, 25 bp, Homo sapien
taactgatccgtagaggcatgacca

SEQ ID NO: 4553125 - DNA, 25 bp, Homo sapien
tttgatcgcaccactccttcaggaa

SEQ ID NO: 4553126 - DNA, 25 bp, Homo sapien
tcaggtccagaagcatctcaattgc

SEQ ID NO: 4553127 - DNA, 25 bp, Homo sapien
tttccacacagcactatatctgggt

SEQ ID NO: 4553128 - DNA, 25 bp, Homo sapien
ctctggtcctccagatcactcttgt

SEQ ID NO: 4553129 - DNA, 25 bp, Homo sapien
tccacacagcactatatctgggttt

SEQ ID NO: 4553130 - DNA, 25 bp, Homo sapien
cacagcactatatctgggttttcac

SEQ ID NO: 4553131 - DNA, 25 bp, Homo sapien
gaacgctgtcgttaagctacgaaac

SEQ ID NO: 4553132 - DNA, 25 bp, Homo sapien
catttgtcagatcaaaaagtagaag

SEQ ID NO: 4553133 - DNA, 25 bp, Homo sapien
gaaactttgctcatttgtcagatca

SEQ ID NO: 4553134 - DNA, 25 bp, Homo sapien
cattgaggaaactttgctcatttgt

SEQ ID NO: 4553135 - DNA, 25 bp, Homo sapien
tctgccagtggctccatccggccca

SEQ ID NO: 4553136 - DNA, 25 bp, Homo sapien
tgcaggtggattctctggcctctgc

SEQ ID NO: 4553137 - DNA, 25 bp, Homo sapien
gctgtgtcccataactgcaggtgga

SEQ ID NO: 4553138 - DNA, 25 bp, Homo sapien
cagtggctccatccggcccactggc

SEQ ID NO: 4553139 - DNA, 25 bp, Homo sapien
tcattcgtatagcaataatggcaca

SEQ ID NO: 4553140 - DNA, 25 bp, Homo sapien
taaagctgtattgatgatggcacac

SEQ ID NO: 4553141 - DNA, 25 bp, Homo sapien
gattaaaatttaactgcaggctggg

SEQ ID NO: 4553142 - DNA, 25 bp, Homo sapien
gatggcacacaatgtagaaagatgt

SEQ ID NO: 4553143 - DNA, 25 bp, Homo sapien
taagcctctctggtagtagaataaa

SEQ ID NO: 4553144 - DNA, 25 bp, Homo sapien
gcttcaggccaacaatggatttttc

SEQ ID NO: 4553145 - DNA, 25 bp, Homo sapien
aatttcctgacaactggtttacctg

SEQ ID NO: 4553146 - DNA, 25 bp, Homo sapien
aactgtgacaccatgaccttctgcc

SEQ ID NO: 4553147 - DNA, 25 bp, Homo sapien
atgcccactgttgtgataaatttgg

SEQ ID NO: 4553148 - DNA, 25 bp, Homo sapien
tccctgaaatcaatgcccactgttg

SEQ ID NO: 4553149 - DNA, 25 bp, Homo sapien
gtatattggtaaagtacactggtct

SEQ ID NO: 4553150 - DNA, 25 bp, Homo sapien
acaccagagtctcccaaagctaaaa

SEQ ID NO: 4553151 - DNA, 25 bp, Homo sapien
tatggctagcccgtggataagggca

SEQ ID NO: 4553152 - DNA, 25 bp, Homo sapien
tctgcaacctcacgtttcaggtatg

SEQ ID NO: 4553153 - DNA, 25 bp, Homo sapien
gccactgcagtgtgtttcctcagag

SEQ ID NO: 4553154 - DNA, 25 bp, Homo sapien
tcagtgcagatctgcaacctcacgt

SEQ ID NO: 4553155 - DNA, 25 bp, Homo sapien
aaatctcccagataccaattacttg

SEQ ID NO: 4553156 - DNA, 25 bp, Homo sapien
cccagataccaattacttggatgtc

SEQ ID NO: 4553157 - DNA, 25 bp, Homo sapien
ggatgtctttgagccttagatttcc

SEQ ID NO: 4553158 - DNA, 25 bp, Homo sapien
gggtttgaatcccaaatctcccaga

SEQ ID NO: 4553159 - DNA, 25 bp, Homo sapien
tatcaagaagcccttcatcctgatg

SEQ ID NO: 4553160 - DNA, 25 bp, Homo sapien
ttgagggatctgtacttctgtgctc

SEQ ID NO: 4553161 - DNA, 25 bp, Homo sapien
ggttgagggatctgtacttctgtgc

SEQ ID NO: 4553162 - DNA, 25 bp, Homo sapien
tgtgctcagagtccctctatcaaga

SEQ ID NO: 4553163 - DNA, 25 bp, Homo sapien
tatgacagattaaggcttaaaccag

SEQ ID NO: 4553164 - DNA, 25 bp, Homo sapien
tgagacttcataaagctatcaaaga

SEQ ID NO: 4553165 - DNA, 25 bp, Homo sapien
gctatcaaagaatggagtggaaata

SEQ ID NO: 4553166 - DNA, 25 bp, Homo sapien
aggcttaaaccaggcttgagcactg

SEQ ID NO: 4553167 - DNA, 25 bp, Homo sapien
tactaagaggcaccaggtatggctt

SEQ ID NO: 4553168 - DNA, 25 bp, Homo sapien
actactaagaggcaccaggtatggc

SEQ ID NO: 4553169 - DNA, 25 bp, Homo sapien
agactactaagaggcaccaggtatg

SEQ ID NO: 4553170 - DNA, 25 bp, Homo sapien
aagactactaagaggcaccaggtat

SEQ ID NO: 4553171 - DNA, 25 bp, Homo sapien
tggacaaggtcaaatcagatatatt

SEQ ID NO: 4553172 - DNA, 25 bp, Homo sapien
atggacaaggtcaaatcagatatat

SEQ ID NO: 4553173 - DNA, 25 bp, Homo sapien
caaagaagcagcatcgaccatggga

SEQ ID NO: 4553174 - DNA, 25 bp, Homo sapien
gaccatgggataggaaactggtgtc

SEQ ID NO: 4553175 - DNA, 25 bp, Homo sapien
tcctggaaaaatcgaggccaaactg

SEQ ID NO: 4553176 - DNA, 25 bp, Homo sapien
aaagggtcctggaaatgagtcctgg

SEQ ID NO: 4553177 - DNA, 25 bp, Homo sapien
gggctgaggtcctattgactgcaca

SEQ ID NO: 4553178 - DNA, 25 bp, Homo sapien
ggaggcagtaccagaaaatccagca

SEQ ID NO: 4553179 - DNA, 25 bp, Homo sapien
tatttatgaactcgggagcagccca

SEQ ID NO: 4553180 - DNA, 25 bp, Homo sapien
caaaatctgcggcttatgtctatgg

SEQ ID NO: 4553181 - DNA, 25 bp, Homo sapien
ttgagacagaggcagagtagccaac

SEQ ID NO: 4553182 - DNA, 25 bp, Homo sapien
gagtagccaacagtgaaagctccaa

SEQ ID NO: 4553183 - DNA, 25 bp, Homo sapien
gtagccaacagtgaaagctccaaaa

SEQ ID NO: 4553184 - DNA, 25 bp, Homo sapien
agacagaggcagagtagccaacagt

SEQ ID NO: 4553185 - DNA, 25 bp, Homo sapien
tgcattgcattgggatcacataaat

SEQ ID NO: 4553186 - DNA, 25 bp, Homo sapien
aaaccatatggggattcttattgga

SEQ ID NO: 4553187 - DNA, 25 bp, Homo sapien
tcaaaaaccatatggggattcttat

SEQ ID NO: 4553188 - DNA, 25 bp, Homo sapien
tatggggattcttattggaattgca

SEQ ID NO: 4553189 - DNA, 25 bp, Homo sapien
caacaagatgttcgtcagtagatga

SEQ ID NO: 4553190 - DNA, 25 bp, Homo sapien
tgtggcattctaggaaaggctaaac

SEQ ID NO: 4553191 - DNA, 25 bp, Homo sapien
gccagaactcagaagcaacaagatg

SEQ ID NO: 4553192 - DNA, 25 bp, Homo sapien
aagaagccaatctgtatgattccaa

SEQ ID NO: 4553193 - DNA, 25 bp, Homo sapien
ccaggctcaggtgactgtcccgccc

SEQ ID NO: 4553194 - DNA, 25 bp, Homo sapien
cgccccagcctcccttgtccaggct

SEQ ID NO: 4553195 - DNA, 25 bp, Homo sapien
aggctcaggtgactgtcccgcccca

SEQ ID NO: 4553196 - DNA, 25 bp, Homo sapien
gctcaggtgactgtcccgccccagc

SEQ ID NO: 4553197 - DNA, 25 bp, Homo sapien
tccttttgcattcgccagggggtag

SEQ ID NO: 4553198 - DNA, 25 bp, Homo sapien
tcatactttctacctagaatttctc

SEQ ID NO: 4553199 - DNA, 25 bp, Homo sapien
tcttccttttgcattcgccaggggg

SEQ ID NO: 4553200 - DNA, 25 bp, Homo sapien
gcaaagggaggtagttctcagggta

SEQ ID NO: 4553201 - DNA, 25 bp, Homo sapien
aagagtctctcaactatagccaggg

SEQ ID NO: 4553202 - DNA, 25 bp, Homo sapien
gaatacaacatttagtccacacctg

SEQ ID NO: 4553203 - DNA, 25 bp, Homo sapien
aactctgtaacagaattctggagtc

SEQ ID NO: 4553204 - DNA, 25 bp, Homo sapien
tgaaaagggcacttacacaaaagaa

SEQ ID NO: 4553205 - DNA, 25 bp, Homo sapien
gtgggaaagggttgtagtgttcaca

SEQ ID NO: 4553206 - DNA, 25 bp, Homo sapien
cataggaggatgtgggaaagggttg

SEQ ID NO: 4553207 - DNA, 25 bp, Homo sapien
tttccaacctctataagctagaata

SEQ ID NO: 4553208 - DNA, 25 bp, Homo sapien
ccaacctctataagctagaatagat

SEQ ID NO: 4553209 - DNA, 25 bp, Homo sapien
tctaaaacgttagagactggagtta

SEQ ID NO: 4553210 - DNA, 25 bp, Homo sapien
cttccaatcacatgtcctcttcagg

SEQ ID NO: 4553211 - DNA, 25 bp, Homo sapien
tgcttcaacaattgacaacttccaa

SEQ ID NO: 4553212 - DNA, 25 bp, Homo sapien
ctttacagggtagagaaccgcttgt

SEQ ID NO: 4553213 - DNA, 25 bp, Homo sapien
ttaaagtcagaatggcctacttaaa

SEQ ID NO: 4553214 - DNA, 25 bp, Homo sapien
taaagtcagaatggcctacttaaaa

SEQ ID NO: 4553215 - DNA, 25 bp, Homo sapien
gtctttggaaaagcagttcgctcca

SEQ ID NO: 4553216 - DNA, 25 bp, Homo sapien
ttggaaaagcagttcgctccatcaa

SEQ ID NO: 4553217 - DNA, 25 bp, Homo sapien
agctggcctccaatttcataagtaa

SEQ ID NO: 4553218 - DNA, 25 bp, Homo sapien
gcagctggcctccaatttcataagt

SEQ ID NO: 4553219 - DNA, 25 bp, Homo sapien
gctggcctccaatttcataagtaaa

SEQ ID NO: 4553220 - DNA, 25 bp, Homo sapien
ctacaagggagtccacccagatatc

SEQ ID NO: 4553221 - DNA, 25 bp, Homo sapien
tccacaaccttgcttcaaacccact

SEQ ID NO: 4553222 - DNA, 25 bp, Homo sapien
cacaaccttgcttcaaacccacttc

SEQ ID NO: 4553223 - DNA, 25 bp, Homo sapien
tttctccacaaccttgcttcaaacc

SEQ ID NO: 4553224 - DNA, 25 bp, Homo sapien
tctccacaaccttgcttcaaaccca

SEQ ID NO: 4553225 - DNA, 25 bp, Homo sapien
agttctaagccaagtcattcactaa

SEQ ID NO: 4553226 - DNA, 25 bp, Homo sapien
tatttagtgaattcagtacgttgac

SEQ ID NO: 4553227 - DNA, 25 bp, Homo sapien
gtacgttgacatggggctgaaaaat

SEQ ID NO: 4553228 - DNA, 25 bp, Homo sapien
cactaattatgtcaattctatccct

SEQ ID NO: 4553229 - DNA, 25 bp, Homo sapien
tggtaggctgttcccaaagggtcca

SEQ ID NO: 4553230 - DNA, 25 bp, Homo sapien
gcagctgcgagcttatcgtgcaaag

SEQ ID NO: 4553231 - DNA, 25 bp, Homo sapien
tgagaacccaagtccctgtgtaacc

SEQ ID NO: 4553232 - DNA, 25 bp, Homo sapien
gaagtagacattcctggcagctgcg

SEQ ID NO: 4553233 - DNA, 25 bp, Homo sapien
tcaagggactggatagtcaaaacaa

SEQ ID NO: 4553234 - DNA, 25 bp, Homo sapien
cattcatggtcaatttatctcaaca

SEQ ID NO: 4553235 - DNA, 25 bp, Homo sapien
taatcaaggtagtatgatactagcc

SEQ ID NO: 4553236 - DNA, 25 bp, Homo sapien
catgcaaaaagttgaagtcagaccc

SEQ ID NO: 4553237 - DNA, 25 bp, Homo sapien
gacaggctttggcaatagttaccaa

SEQ ID NO: 4553238 - DNA, 25 bp, Homo sapien
cctgactttgctgaactggtgatct

SEQ ID NO: 4553239 - DNA, 25 bp, Homo sapien
ctggtgatctattgggacagagaca

SEQ ID NO: 4553240 - DNA, 25 bp, Homo sapien
aaaatgtgagaatccatccagaagg

SEQ ID NO: 4553241 - DNA, 25 bp, Homo sapien
ccagggggacgcctcgctcggccct

SEQ ID NO: 4553242 - DNA, 25 bp, Homo sapien
ggacgcctcgctcggccctcccgga

SEQ ID NO: 4553243 - DNA, 25 bp, Homo sapien
ccggacccgccgcgcgcctcccgct

SEQ ID NO: 4553244 - DNA, 25 bp, Homo sapien
ccgcgcgcctcccgctcctcaggcc

SEQ ID NO: 4553245 - DNA, 25 bp, Homo sapien
cctggctcgggtcctcgcgcgccgc

SEQ ID NO: 4553246 - DNA, 25 bp, Homo sapien
ctgtccccgcctggctcgggtcctc

SEQ ID NO: 4553247 - DNA, 25 bp, Homo sapien
ccgccgtcctgtccccgcctggctc

SEQ ID NO: 4553248 - DNA, 25 bp, Homo sapien
gctcgccccgccgtcctgtccccgc

SEQ ID NO: 4553249 - DNA, 25 bp, Homo sapien
tcctggcttaggtcggcctggacac

SEQ ID NO: 4553250 - DNA, 25 bp, Homo sapien
tgttttccacggcatcagttcgcgg

SEQ ID NO: 4553251 - DNA, 25 bp, Homo sapien
tttgggacacaggagggacatttac

SEQ ID NO: 4553252 - DNA, 25 bp, Homo sapien
gccatgttctaagggtgttttccac

SEQ ID NO: 4553253 - DNA, 25 bp, Homo sapien
agttggccatctcttggtcaagcag

SEQ ID NO: 4553254 - DNA, 25 bp, Homo sapien
tgagagtccagttggtcccaattct

SEQ ID NO: 4553255 - DNA, 25 bp, Homo sapien
gctcccgatagtggcaggctgcttc

SEQ ID NO: 4553256 - DNA, 25 bp, Homo sapien
tggcaagccttcagtccgatcagga

SEQ ID NO: 4553257 - DNA, 25 bp, Homo sapien
tggagccgtaacaaatatggaccag

SEQ ID NO: 4553258 - DNA, 25 bp, Homo sapien
aacctcttacccagcagacatttgg

SEQ ID NO: 4553259 - DNA, 25 bp, Homo sapien
gaaacttacaactgctctccatctc

SEQ ID NO: 4553260 - DNA, 25 bp, Homo sapien
gccacaattgagcagaaacttacaa

SEQ ID NO: 4553261 - DNA, 25 bp, Homo sapien
attccagtctagagctaagcaaagc

SEQ ID NO: 4553262 - DNA, 25 bp, Homo sapien
cctgggcatcacagcgagactgtat

SEQ ID NO: 4553263 - DNA, 25 bp, Homo sapien
gcctgggcatcacagcgagactgta

SEQ ID NO: 4553264 - DNA, 25 bp, Homo sapien
gaaaaccggcataaggatgctctct

SEQ ID NO: 4553265 - DNA, 25 bp, Homo sapien
gaagtactggccagggaatcaggca

SEQ ID NO: 4553266 - DNA, 25 bp, Homo sapien
gctctctgtcactattcatattcaa

SEQ ID NO: 4553267 - DNA, 25 bp, Homo sapien
aagcgttcctatacacccttaacag

SEQ ID NO: 4553268 - DNA, 25 bp, Homo sapien
ttgctgcaacaaatacagctcaagg

SEQ ID NO: 4553269 - DNA, 25 bp, Homo sapien
ttctgattcttgtaccaactgcatc

SEQ ID NO: 4553270 - DNA, 25 bp, Homo sapien
tgcgccaggcctaactccatgtagt

SEQ ID NO: 4553271 - DNA, 25 bp, Homo sapien
gcaaaaagcagttgtgcaaaagtca

SEQ ID NO: 4553272 - DNA, 25 bp, Homo sapien
tgcactggagtgaacaatattttta

SEQ ID NO: 4553273 - DNA, 25 bp, Homo sapien
aaagcaaagccatcacttagtacaa

SEQ ID NO: 4553274 - DNA, 25 bp, Homo sapien
agcaaagccatcacttagtacaatg

SEQ ID NO: 4553275 - DNA, 25 bp, Homo sapien
ttgcactggagtgaacaatattttt

SEQ ID NO: 4553276 - DNA, 25 bp, Homo sapien
caccaacactgacgtctacaattac

SEQ ID NO: 4553277 - DNA, 25 bp, Homo sapien
tgttaacaccaacactgacgtctac

SEQ ID NO: 4553278 - DNA, 25 bp, Homo sapien
gttaacaccaacactgacgtctaca

SEQ ID NO: 4553279 - DNA, 25 bp, Homo sapien
taacaccaacactgacgtctacaat

SEQ ID NO: 4553280 - DNA, 25 bp, Homo sapien
caccacgtcgggtgggagctacgaa

SEQ ID NO: 4553281 - DNA, 25 bp, Homo sapien
gagtagcaatccctcggttcggaaa

SEQ ID NO: 4553282 - DNA, 25 bp, Homo sapien
acagagaccgccaagccaaaggcga

SEQ ID NO: 4553283 - DNA, 25 bp, Homo sapien
aggaaaccgcaaggaggccaccacg

SEQ ID NO: 4553284 - DNA, 25 bp, Homo sapien
ggaatgaactacagcacgcaaaaaa

SEQ ID NO: 4553285 - DNA, 25 bp, Homo sapien
gtggtgctgctaatactctttatcc

SEQ ID NO: 4553286 - DNA, 25 bp, Homo sapien
gacatgagtacatatggtatgatcc

SEQ ID NO: 4553287 - DNA, 25 bp, Homo sapien
tgtatggcaggtacacagttgtgtt

SEQ ID NO: 4553288 - DNA, 25 bp, Homo sapien
cctagctaatattcaggagagtaca

SEQ ID NO: 4553289 - DNA, 25 bp, Homo sapien
tacaaaagacttctaggcatatcct

SEQ ID NO: 4553290 - DNA, 25 bp, Homo sapien
tgtcacattgtaaagtaccacacag

SEQ ID NO: 4553291 - DNA, 25 bp, Homo sapien
taccacacagtccaaaaaatatgtc

SEQ ID NO: 4553292 - DNA, 25 bp, Homo sapien
ggaacacattaatacttaaagaaga

SEQ ID NO: 4553293 - DNA, 25 bp, Homo sapien
acaaggaacacattaatacttaaag

SEQ ID NO: 4553294 - DNA, 25 bp, Homo sapien
tcactttgaatctcaaaaatctagt

SEQ ID NO: 4553295 - DNA, 25 bp, Homo sapien
cactttgaatctcaaaaatctagtt

SEQ ID NO: 4553296 - DNA, 25 bp, Homo sapien
taaccacatacaaacgcaggcacat

SEQ ID NO: 4553297 - DNA, 25 bp, Homo sapien
cagccacttgagtgtgtattataat

SEQ ID NO: 4553298 - DNA, 25 bp, Homo sapien
gaaatcaaagcctcagtctgtcatt

SEQ ID NO: 4553299 - DNA, 25 bp, Homo sapien
tctaacagctatttggcaagcctta

SEQ ID NO: 4553300 - DNA, 25 bp, Homo sapien
tgtgtaaaaggccacctcaaaactg

SEQ ID NO: 4553301 - DNA, 25 bp, Homo sapien
tcaactagctgtaggccaagtcttc

SEQ ID NO: 4553302 - DNA, 25 bp, Homo sapien
tattgacctaggctgggctctcatg

SEQ ID NO: 4553303 - DNA, 25 bp, Homo sapien
cacttacacagctgcagattgggta

SEQ ID NO: 4553304 - DNA, 25 bp, Homo sapien
tagttggggcttgaccatgttgacc

SEQ ID NO: 4553305 - DNA, 25 bp, Homo sapien
tttagttggggcttgaccatgttga

SEQ ID NO: 4553306 - DNA, 25 bp, Homo sapien
ttggggcttgaccatgttgaccagg

SEQ ID NO: 4553307 - DNA, 25 bp, Homo sapien
tatttttagttggggcttgaccatg

SEQ ID NO: 4553308 - DNA, 25 bp, Homo sapien
ggatacacatcatttacgtggtggg

SEQ ID NO: 4553309 - DNA, 25 bp, Homo sapien
tgtttagcatccagttagcaatggg

SEQ ID NO: 4553310 - DNA, 25 bp, Homo sapien
agtgtgtcatcctcaagtcatctag

SEQ ID NO: 4553311 - DNA, 25 bp, Homo sapien
gcccagataacaggagcaaattaag

SEQ ID NO: 4553312 - DNA, 25 bp, Homo sapien
caaaatgtcatgcttactaataagc

SEQ ID NO: 4553313 - DNA, 25 bp, Homo sapien
ttggatgaagaatacccaagttcaa

SEQ ID NO: 4553314 - DNA, 25 bp, Homo sapien
catgaggtatgaactgtggatgata

SEQ ID NO: 4553315 - DNA, 25 bp, Homo sapien
tgtactaacattttgggcaaaccaa

SEQ ID NO: 4553316 - DNA, 25 bp, Homo sapien
ttaacccacctgaaaacatggaaga

SEQ ID NO: 4553317 - DNA, 25 bp, Homo sapien
caaaagattgtcagtgttaaggttc

SEQ ID NO: 4553318 - DNA, 25 bp, Homo sapien
caacgaggtactcttgatgtcatga

SEQ ID NO: 4553319 - DNA, 25 bp, Homo sapien
catataggatactcattaacccacc

SEQ ID NO: 4553320 - DNA, 25 bp, Homo sapien
cagtcaaaattagccccagttctgt

SEQ ID NO: 4553321 - DNA, 25 bp, Homo sapien
ccagacctgactggaaaaagtcatt

SEQ ID NO: 4553322 - DNA, 25 bp, Homo sapien
tgatgcatcattgcctactcacttg

SEQ ID NO: 4553323 - DNA, 25 bp, Homo sapien
tcccatgagatttctccagtgcccg

SEQ ID NO: 4553324 - DNA, 25 bp, Homo sapien
tttatttgcttctaggaaataagcg

SEQ ID NO: 4553325 - DNA, 25 bp, Homo sapien
tatttgcttctaggaaataagcgct

SEQ ID NO: 4553326 - DNA, 25 bp, Homo sapien
tttgcttctaggaaataagcgcttt

SEQ ID NO: 4553327 - DNA, 25 bp, Homo sapien
tgcttctaggaaataagcgctttcc

SEQ ID NO: 4553328 - DNA, 25 bp, Homo sapien
ccagagggtcgaattggaagtcaca

SEQ ID NO: 4553329 - DNA, 25 bp, Homo sapien
gagggtcgaattggaagtcacatat

SEQ ID NO: 4553330 - DNA, 25 bp, Homo sapien
cttgccagagggtcgaattggaagt

SEQ ID NO: 4553331 - DNA, 25 bp, Homo sapien
ggtcgaattggaagtcacatatatg

SEQ ID NO: 4553332 - DNA, 25 bp, Homo sapien
tggaaatattcagatgctgcttaaa

SEQ ID NO: 4553333 - DNA, 25 bp, Homo sapien
tatcactactgaggaaatgtataaa

SEQ ID NO: 4553334 - DNA, 25 bp, Homo sapien
tctgaactttcctagataaattaac

SEQ ID NO: 4553335 - DNA, 25 bp, Homo sapien
aacactgggtaagattcatggaact

SEQ ID NO: 4553336 - DNA, 25 bp, Homo sapien
aaattcaacgaagctaaactacagg

SEQ ID NO: 4553337 - DNA, 25 bp, Homo sapien
tttcttccacgatattcagatgtgc

SEQ ID NO: 4553338 - DNA, 25 bp, Homo sapien
gagggctcttgaacccacaaaaaga

SEQ ID NO: 4553339 - DNA, 25 bp, Homo sapien
caagtcagcaagctcttaagagggc

SEQ ID NO: 4553340 - DNA, 25 bp, Homo sapien
tgtcttccattagtgcgaccatatt

SEQ ID NO: 4553341 - DNA, 25 bp, Homo sapien
gtgcgaccatatttatgccatttac

SEQ ID NO: 4553342 - DNA, 25 bp, Homo sapien
gccccaattctatttcaagatttgc

SEQ ID NO: 4553343 - DNA, 25 bp, Homo sapien
gaggatcaaaaggtaattgccccaa

SEQ ID NO: 4553344 - DNA, 25 bp, Homo sapien
tttcaatatttaccatacgttgctt

SEQ ID NO: 4553345 - DNA, 25 bp, Homo sapien
tcccttttataaggctgtggctgaa

SEQ ID NO: 4553346 - DNA, 25 bp, Homo sapien
tgttttcgatgcctggagttttcaa

SEQ ID NO: 4553347 - DNA, 25 bp, Homo sapien
tttaccatacgttgctttttatcag

SEQ ID NO: 4553348 - DNA, 25 bp, Homo sapien
tacagtctcggcaaaagagatgacc

SEQ ID NO: 4553349 - DNA, 25 bp, Homo sapien
gagatgaccatagaactaactgcca

SEQ ID NO: 4553350 - DNA, 25 bp, Homo sapien
caataactctactggcaaaaaaggg

SEQ ID NO: 4553351 - DNA, 25 bp, Homo sapien
taggactagataccagcttaatgac

SEQ ID NO: 4553352 - DNA, 25 bp, Homo sapien
cggtaaccttacaagaaactcatca

SEQ ID NO: 4553353 - DNA, 25 bp, Homo sapien
aactaagctggtacatggaatggac

SEQ ID NO: 4553354 - DNA, 25 bp, Homo sapien
tcagtggccataaagcacaactctt

SEQ ID NO: 4553355 - DNA, 25 bp, Homo sapien
aaaatttgtgttgctcattcctagc

SEQ ID NO: 4553356 - DNA, 25 bp, Homo sapien
actgtaatgacacggttttatgtaa

SEQ ID NO: 4553357 - DNA, 25 bp, Homo sapien
actactgtaatgacacggttttatg

SEQ ID NO: 4553358 - DNA, 25 bp, Homo sapien
tgtaatgacacggttttatgtaaac

SEQ ID NO: 4553359 - DNA, 25 bp, Homo sapien
caaactactgtaatgacacggtttt

SEQ ID NO: 4553360 - DNA, 25 bp, Homo sapien
tccttcatgtttctaagataatctt

SEQ ID NO: 4553361 - DNA, 25 bp, Homo sapien
gaaaaagtgtgaccaaagaagtgtc

SEQ ID NO: 4553362 - DNA, 25 bp, Homo sapien
tgtgaccaaagaagtgtctatatat

SEQ ID NO: 4553363 - DNA, 25 bp, Homo sapien
catatggaggggaaaaagtgtgacc

SEQ ID NO: 4553364 - DNA, 25 bp, Homo sapien
gatcaagttcgttccagtgacaaaa

SEQ ID NO: 4553365 - DNA, 25 bp, Homo sapien
gaactgatcaagttcgttccagtga

SEQ ID NO: 4553366 - DNA, 25 bp, Homo sapien
aacttattgatgaactgatcaagtt

SEQ ID NO: 4553367 - DNA, 25 bp, Homo sapien
aaacttattgatgaactgatcaagt

SEQ ID NO: 4553368 - DNA, 25 bp, Homo sapien
ccatcattttgcatagtagggcctc

SEQ ID NO: 4553369 - DNA, 25 bp, Homo sapien
catggactcttgttgagcacaatca

SEQ ID NO: 4553370 - DNA, 25 bp, Homo sapien
gattcaccactgtgttaaaaaggct

SEQ ID NO: 4553371 - DNA, 25 bp, Homo sapien
tcaaatacaccagaacaagcctttc

SEQ ID NO: 4553372 - DNA, 25 bp, Homo sapien
gggagaatctgacttgccatgtaac

SEQ ID NO: 4553373 - DNA, 25 bp, Homo sapien
gctgctgttcgaaggttagcttccg

SEQ ID NO: 4553374 - DNA, 25 bp, Homo sapien
tagttactagtcgttctctctccag

SEQ ID NO: 4553375 - DNA, 25 bp, Homo sapien
taactgactaccacttaactgctgg

SEQ ID NO: 4553376 - DNA, 25 bp, Homo sapien
tgattttctttaactaattcagtac

SEQ ID NO: 4553377 - DNA, 25 bp, Homo sapien
taatgaggataaggctttttcttcc

SEQ ID NO: 4553378 - DNA, 25 bp, Homo sapien
agagtctccctttgactaagaaagc

SEQ ID NO: 4553379 - DNA, 25 bp, Homo sapien
tgtccctttatcttccaatattcta

SEQ ID NO: 4553380 - DNA, 25 bp, Homo sapien
tctgtagcaaggttcgttttctgag

SEQ ID NO: 4553381 - DNA, 25 bp, Homo sapien
ctgtagcaaggttcgttttctgagt

SEQ ID NO: 4553382 - DNA, 25 bp, Homo sapien
tgtagcaaggttcgttttctgagtt

SEQ ID NO: 4553383 - DNA, 25 bp, Homo sapien
cagtaagtgtccaacaccttgcaag

SEQ ID NO: 4553384 - DNA, 25 bp, Homo sapien
ctgcttcagtaagtgtccaacacct

SEQ ID NO: 4553385 - DNA, 25 bp, Homo sapien
gcttcagtaagtgtccaacaccttg

SEQ ID NO: 4553386 - DNA, 25 bp, Homo sapien
ttcagtaagtgtccaacaccttgca

SEQ ID NO: 4553387 - DNA, 25 bp, Homo sapien
ttaaaatttaatcacagtcatttca

SEQ ID NO: 4553388 - DNA, 25 bp, Homo sapien
atttaatcacagtcatttcatctgc

SEQ ID NO: 4553389 - DNA, 25 bp, Homo sapien
aaatttaatcacagtcatttcatct

SEQ ID NO: 4553390 - DNA, 25 bp, Homo sapien
ttaatcacagtcatttcatctgctc

SEQ ID NO: 4553391 - DNA, 25 bp, Homo sapien
ctgactaactgttgacgcttctgaa

SEQ ID NO: 4553392 - DNA, 25 bp, Homo sapien
tctgactaactgttgacgcttctga

SEQ ID NO: 4553393 - DNA, 25 bp, Homo sapien
tcatgtatctttctgactaactgtt

SEQ ID NO: 4553394 - DNA, 25 bp, Homo sapien
tgactaactgttgacgcttctgaat

SEQ ID NO: 4553395 - DNA, 25 bp, Homo sapien
aatattggtaatctgcatataagct

SEQ ID NO: 4553396 - DNA, 25 bp, Homo sapien
tgcatataagctatgtagtcttttt

SEQ ID NO: 4553397 - DNA, 25 bp, Homo sapien
gcatataagctatgtagtctttttt

SEQ ID NO: 4553398 - DNA, 25 bp, Homo sapien
catataagctatgtagtcttttttt

SEQ ID NO: 4553399 - DNA, 25 bp, Homo sapien
gaaggcactcagctttgttgttttg

SEQ ID NO: 4553400 - DNA, 25 bp, Homo sapien
attgaaggcactcagctttgttgtt

SEQ ID NO: 4553401 - DNA, 25 bp, Homo sapien
aggcactcagctttgttgttttggg

SEQ ID NO: 4553402 - DNA, 25 bp, Homo sapien
tatattgaaggcactcagctttgtt

SEQ ID NO: 4553403 - DNA, 25 bp, Homo sapien
tacagatcttgtcctaacttctcat

SEQ ID NO: 4553404 - DNA, 25 bp, Homo sapien
acagatcttgtcctaacttctcatc

SEQ ID NO: 4553405 - DNA, 25 bp, Homo sapien
tcatatatgtgaggtccgcagtcaa

SEQ ID NO: 4553406 - DNA, 25 bp, Homo sapien
cgcagtcaagggactttagtacgta

SEQ ID NO: 4553407 - DNA, 25 bp, Homo sapien
tccacaccagcaaaaagttccggca

SEQ ID NO: 4553408 - DNA, 25 bp, Homo sapien
aactccaaaagtgaagcagctagca

SEQ ID NO: 4553409 - DNA, 25 bp, Homo sapien
gaatgactatgggatgcaatgaccg

SEQ ID NO: 4553410 - DNA, 25 bp, Homo sapien
tgaccgactttacggtgaatagaaa

SEQ ID NO: 4553411 - DNA, 25 bp, Homo sapien
tcaactccaaagaatgttgagatca

SEQ ID NO: 4553412 - DNA, 25 bp, Homo sapien
caaaacggctctgaaatcaactcca

SEQ ID NO: 4553413 - DNA, 25 bp, Homo sapien
tattctaacattacgctatgttgaa

SEQ ID NO: 4553414 - DNA, 25 bp, Homo sapien
tctaacattacgctatgttgaataa

SEQ ID NO: 4553415 - DNA, 25 bp, Homo sapien
aacattacgctatgttgaataatat

SEQ ID NO: 4553416 - DNA, 25 bp, Homo sapien
ttattctaacattacgctatgttga

SEQ ID NO: 4553417 - DNA, 25 bp, Homo sapien
ttttcgaatgaactagcaaaacgaa

SEQ ID NO: 4553418 - DNA, 25 bp, Homo sapien
gaaatacatttttcgaatgaactag

SEQ ID NO: 4553419 - DNA, 25 bp, Homo sapien
tacatttttcgaatgaactagcaaa

SEQ ID NO: 4553420 - DNA, 25 bp, Homo sapien
cgaatgaactagcaaaacgaaaagt

SEQ ID NO: 4553421 - DNA, 25 bp, Homo sapien
ctagcacggcgtcgtctaaaggcag

SEQ ID NO: 4553422 - DNA, 25 bp, Homo sapien
tgttcagcaactagccggtcttcag

SEQ ID NO: 4553423 - DNA, 25 bp, Homo sapien
tattgagaccactactgaactgacg

SEQ ID NO: 4553424 - DNA, 25 bp, Homo sapien
gaaacggtcttcttcctagcacggc

SEQ ID NO: 4553425 - DNA, 25 bp, Homo sapien
catactatttggtgctttgagagcc

SEQ ID NO: 4553426 - DNA, 25 bp, Homo sapien
catagcctcaagtttcattgctggc

SEQ ID NO: 4553427 - DNA, 25 bp, Homo sapien
taacataggtttccagaagtcagat

SEQ ID NO: 4553428 - DNA, 25 bp, Homo sapien
gcccatgatcaaggttcaaagcact

SEQ ID NO: 4553429 - DNA, 25 bp, Homo sapien
catccccatatgcactcaggaatct

SEQ ID NO: 4553430 - DNA, 25 bp, Homo sapien
acatggtgtttcagctgatcatccc

SEQ ID NO: 4553431 - DNA, 25 bp, Homo sapien
accttggaaagcgagttggctagga

SEQ ID NO: 4553432 - DNA, 25 bp, Homo sapien
cccatatgcactcaggaatcttcca

SEQ ID NO: 4553433 - DNA, 25 bp, Homo sapien
gtctgtctgtacaacgggcattgat

SEQ ID NO: 4553434 - DNA, 25 bp, Homo sapien
gaagactagctgtattgatagcacc

SEQ ID NO: 4553435 - DNA, 25 bp, Homo sapien
tgtctctgccataactcacgcttag

SEQ ID NO: 4553436 - DNA, 25 bp, Homo sapien
tgaaggtcacgagctttggaagact

SEQ ID NO: 4553437 - DNA, 25 bp, Homo sapien
tcttgagttttacccaaacatattc

SEQ ID NO: 4553438 - DNA, 25 bp, Homo sapien
aaatgtggtcgtacatgtctttaag

SEQ ID NO: 4553439 - DNA, 25 bp, Homo sapien
tcaaaactagagactaaattattag

SEQ ID NO: 4553440 - DNA, 25 bp, Homo sapien
aagtctcttatcagtgtattcttac

SEQ ID NO: 4553441 - DNA, 25 bp, Homo sapien
aagtatactggctgctagaggaaga

SEQ ID NO: 4553442 - DNA, 25 bp, Homo sapien
cagtttctggctgacagaaagtata

SEQ ID NO: 4553443 - DNA, 25 bp, Homo sapien
ctgacagaaagtatactggctgcta

SEQ ID NO: 4553444 - DNA, 25 bp, Homo sapien
tctggctgacagaaagtatactggc

SEQ ID NO: 4553445 - DNA, 25 bp, Homo sapien
actctgtgcttcttcaacaatgaca

SEQ ID NO: 4553446 - DNA, 25 bp, Homo sapien
gaactctgtgcttcttcaacaatga

SEQ ID NO: 4553447 - DNA, 25 bp, Homo sapien
tctgtgcttcttcaacaatgacaac

SEQ ID NO: 4553448 - DNA, 25 bp, Homo sapien
ctgaactctgtgcttcttcaacaat

SEQ ID NO: 4553449 - DNA, 25 bp, Homo sapien
taacttaggtggctcaagggtaaca

SEQ ID NO: 4553450 - DNA, 25 bp, Homo sapien
tccaatttcttctaacttaggtggc

SEQ ID NO: 4553451 - DNA, 25 bp, Homo sapien
cactggcagttccaatatagatact

SEQ ID NO: 4553452 - DNA, 25 bp, Homo sapien
tggctcaagggtaacaatatcagaa

SEQ ID NO: 4553453 - DNA, 25 bp, Homo sapien
cttcgggtatcttttgttcctctgc

SEQ ID NO: 4553454 - DNA, 25 bp, Homo sapien
ggtgtccccacaaatttctacgctg

SEQ ID NO: 4553455 - DNA, 25 bp, Homo sapien
tctacgctggaatgtaatcgccaat

SEQ ID NO: 4553456 - DNA, 25 bp, Homo sapien
gagttccatggttctattcgagcac

SEQ ID NO: 4553457 - DNA, 25 bp, Homo sapien
tggaagcccaaaaaagactcactga

SEQ ID NO: 4553458 - DNA, 25 bp, Homo sapien
ttcctccaaagctggataagcagtt

SEQ ID NO: 4553459 - DNA, 25 bp, Homo sapien
ttgttgagctggtttcctccaaagc

SEQ ID NO: 4553460 - DNA, 25 bp, Homo sapien
ctcaattgttgagctggtttcctcc

SEQ ID NO: 4553461 - DNA, 25 bp, Homo sapien
ttcttccataagcactgtgccattt

SEQ ID NO: 4553462 - DNA, 25 bp, Homo sapien
ctatctgcaatgcttgaagctcctc

SEQ ID NO: 4553463 - DNA, 25 bp, Homo sapien
tctatctgcaatgcttgaagctcct

SEQ ID NO: 4553464 - DNA, 25 bp, Homo sapien
tatctgcaatgcttgaagctcctct

SEQ ID NO: 4553465 - DNA, 25 bp, Homo sapien
ctctatctgcaatgcttgaagctcc

SEQ ID NO: 4553466 - DNA, 25 bp, Homo sapien
aaagatgaacattctggggcgggct

SEQ ID NO: 4553467 - DNA, 25 bp, Homo sapien
taaagatgaacattctggggcgggc

SEQ ID NO: 4553468 - DNA, 25 bp, Homo sapien
aagatgaacattctggggcgggctc

SEQ ID NO: 4553469 - DNA, 25 bp, Homo sapien
agatgaacattctggggcgggctca

SEQ ID NO: 4553470 - DNA, 25 bp, Homo sapien
ctcatgactgatgacagtccaacca

SEQ ID NO: 4553471 - DNA, 25 bp, Homo sapien
acaagatgaatcactgtcactggaa

SEQ ID NO: 4553472 - DNA, 25 bp, Homo sapien
caaccacaagatgaatcactgtcac

SEQ ID NO: 4553473 - DNA, 25 bp, Homo sapien
agtccaaccacaagatgaatcactg

SEQ ID NO: 4553474 - DNA, 25 bp, Homo sapien
aactcaacaaccctagacctgtggg

SEQ ID NO: 4553475 - DNA, 25 bp, Homo sapien
ctagacctgtgggatgcaaggaagc

SEQ ID NO: 4553476 - DNA, 25 bp, Homo sapien
tcaacaaccctagacctgtgggatg

SEQ ID NO: 4553477 - DNA, 25 bp, Homo sapien
caaccctagacctgtgggatgcaag

SEQ ID NO: 4553478 - DNA, 25 bp, Homo sapien
ataagaaaaactggctgaagcctaa

SEQ ID NO: 4553479 - DNA, 25 bp, Homo sapien
tctggtttaagtgactgggtaactg

SEQ ID NO: 4553480 - DNA, 25 bp, Homo sapien
aactggaagaattctatatgaaaca

SEQ ID NO: 4553481 - DNA, 25 bp, Homo sapien
gaaagtgtaggatagctcacaggtt

SEQ ID NO: 4553482 - DNA, 25 bp, Homo sapien
ctctgcttgtctcagctaacggttc

SEQ ID NO: 4553483 - DNA, 25 bp, Homo sapien
tgtctcagctaacggttcatttcct

SEQ ID NO: 4553484 - DNA, 25 bp, Homo sapien
cagctaacggttcatttcctttgag

SEQ ID NO: 4553485 - DNA, 25 bp, Homo sapien
gcttgtctcagctaacggttcattt

SEQ ID NO: 4553486 - DNA, 25 bp, Homo sapien
tgatatgatggtgcccctcatcatt

SEQ ID NO: 4553487 - DNA, 25 bp, Homo sapien
ctgatatgatggtgcccctcatcat

SEQ ID NO: 4553488 - DNA, 25 bp, Homo sapien
gatatgatggtgcccctcatcattc

SEQ ID NO: 4553489 - DNA, 25 bp, Homo sapien
tatgatggtgcccctcatcattcct

SEQ ID NO: 4553490 - DNA, 25 bp, Homo sapien
ctgttaatacttgcatcctttttta

SEQ ID NO: 4553491 - DNA, 25 bp, Homo sapien
tgttaatacttgcatccttttttaa

SEQ ID NO: 4553492 - DNA, 25 bp, Homo sapien
taaaataataccctcaccatctcca

SEQ ID NO: 4553493 - DNA, 25 bp, Homo sapien
aaaataataccctcaccatctccat

SEQ ID NO: 4553494 - DNA, 25 bp, Homo sapien
gacagctgctaatgaggacaaatcg

SEQ ID NO: 4553495 - DNA, 25 bp, Homo sapien
taaacaacgcgtacaaggcactgca

SEQ ID NO: 4553496 - DNA, 25 bp, Homo sapien
tgaggacaaatcgattagggagacc

SEQ ID NO: 4553497 - DNA, 25 bp, Homo sapien
tagggagaccaaagctaaaggaggc

SEQ ID NO: 4553498 - DNA, 25 bp, Homo sapien
acccttggcgcgcagttcggtatag

SEQ ID NO: 4553499 - DNA, 25 bp, Homo sapien
tttcatcagtccagaccgacaagca

SEQ ID NO: 4553500 - DNA, 25 bp, Homo sapien
cctcaaagcctgcccagtgaaggaa

SEQ ID NO: 4553501 - DNA, 25 bp, Homo sapien
cgcgcagttcggtatagcactcggg

SEQ ID NO: 4553502 - DNA, 25 bp, Homo sapien
gggcctccggagctgtgcactcgcg

SEQ ID NO: 4553503 - DNA, 25 bp, Homo sapien
gcacggcccgaggaggtcgcccgtg

SEQ ID NO: 4553504 - DNA, 25 bp, Homo sapien
tccggagctgtgcactcgcgcacgg

SEQ ID NO: 4553505 - DNA, 25 bp, Homo sapien
ggcccgaggaggtcgcccgtgcggc

SEQ ID NO: 4553506 - DNA, 25 bp, Homo sapien
ccaggcgtcaagtccccgcccgagc

SEQ ID NO: 4553507 - DNA, 25 bp, Homo sapien
aggcgtcaagtccccgcccgagcag

SEQ ID NO: 4553508 - DNA, 25 bp, Homo sapien
caggcgtcaagtccccgcccgagca

SEQ ID NO: 4553509 - DNA, 25 bp, Homo sapien
gcgtcaagtccccgcccgagcagcc

SEQ ID NO: 4553510 - DNA, 25 bp, Homo sapien
gcggtcacagctcgggcgccaatga

SEQ ID NO: 4553511 - DNA, 25 bp, Homo sapien
taaaaacaacctgctcgcaggcgtc

SEQ ID NO: 4553512 - DNA, 25 bp, Homo sapien
gccgcagtgcatgccgtgacgcgta

SEQ ID NO: 4553513 - DNA, 25 bp, Homo sapien
gggcgccaatgacgcctcttataaa

SEQ ID NO: 4553514 - DNA, 25 bp, Homo sapien
agaagaactaccactcccgaagtgg

SEQ ID NO: 4553515 - DNA, 25 bp, Homo sapien
actcccgaagtggagcgcaggccgc

SEQ ID NO: 4553516 - DNA, 25 bp, Homo sapien
aggcggccgcagatccccacaacat

SEQ ID NO: 4553517 - DNA, 25 bp, Homo sapien
gcagcggtgaagagaagaactacca

SEQ ID NO: 4553518 - DNA, 25 bp, Homo sapien
aattccagcatttaaggcccagtac

SEQ ID NO: 4553519 - DNA, 25 bp, Homo sapien
ttcgaaaggtcaaagtggtctggct

SEQ ID NO: 4553520 - DNA, 25 bp, Homo sapien
taattacagcttctgcgatgggcat

SEQ ID NO: 4553521 - DNA, 25 bp, Homo sapien
tctagaaccagtagtaaagagggtc

SEQ ID NO: 4553522 - DNA, 25 bp, Homo sapien
tccacaaccataggaactatggcag

SEQ ID NO: 4553523 - DNA, 25 bp, Homo sapien
gcgcacgcctttaagcccagcgatt

SEQ ID NO: 4553524 - DNA, 25 bp, Homo sapien
gatcccattcatatagtgattcacc

SEQ ID NO: 4553525 - DNA, 25 bp, Homo sapien
gagaacctaggtcatagttgctgcc

SEQ ID NO: 4553526 - DNA, 25 bp, Homo sapien
ggcaggggtcacaaggtgctcagtg

SEQ ID NO: 4553527 - DNA, 25 bp, Homo sapien
cagtcaaagggggttattctgtggc

SEQ ID NO: 4553528 - DNA, 25 bp, Homo sapien
agggggttattctgtggcgggcagg

SEQ ID NO: 4553529 - DNA, 25 bp, Homo sapien
gtgggggaggttctgagccaggaga

SEQ ID NO: 4553530 - DNA, 25 bp, Homo sapien
ggcctgacattcaatgccctcaaga

SEQ ID NO: 4553531 - DNA, 25 bp, Homo sapien
caatgccctcaagagaacagaattc

SEQ ID NO: 4553532 - DNA, 25 bp, Homo sapien
tacctatggcagtggtgcactgttc

SEQ ID NO: 4553533 - DNA, 25 bp, Homo sapien
ctaaaattcctacctatggcagtgg

SEQ ID NO: 4553534 - DNA, 25 bp, Homo sapien
tatggcagtggtgcactgttcggtc

SEQ ID NO: 4553535 - DNA, 25 bp, Homo sapien
aattcctacctatggcagtggtgca

SEQ ID NO: 4553536 - DNA, 25 bp, Homo sapien
gaagtcacaagatgggatgagccag

SEQ ID NO: 4553537 - DNA, 25 bp, Homo sapien
tcagactgcccaagcatttgggaat

SEQ ID NO: 4553538 - DNA, 25 bp, Homo sapien
atcaataggaattgaagctgtcctc

SEQ ID NO: 4553539 - DNA, 25 bp, Homo sapien
tgtaacttccaacggcatgactcct

SEQ ID NO: 4553540 - DNA, 25 bp, Homo sapien
cctggtaactataccaaaacatatt

SEQ ID NO: 4553541 - DNA, 25 bp, Homo sapien
tttagatttacttattcagaaatga

SEQ ID NO: 4553542 - DNA, 25 bp, Homo sapien
cagtaagtgtcctggtaactatacc

SEQ ID NO: 4553543 - DNA, 25 bp, Homo sapien
aattaatcagtaagtgtcctggtaa

SEQ ID NO: 4553544 - DNA, 25 bp, Homo sapien
actggccataatatgtacaaagatg

SEQ ID NO: 4553545 - DNA, 25 bp, Homo sapien
taaagtactaaacagaaagcgattc

SEQ ID NO: 4553546 - DNA, 25 bp, Homo sapien
gaaagcgattctgtacaactggcca

SEQ ID NO: 4553547 - DNA, 25 bp, Homo sapien
caaagatgcctccagttgtttttaa

SEQ ID NO: 4553548 - DNA, 25 bp, Homo sapien
ggatcaatcttaagtgccgcttcat

SEQ ID NO: 4553549 - DNA, 25 bp, Homo sapien
aattacattccgaatcttctcagca

SEQ ID NO: 4553550 - DNA, 25 bp, Homo sapien
taagtgccgcttcataatcctgtag

SEQ ID NO: 4553551 - DNA, 25 bp, Homo sapien
ggatggatcaatcttaagtgccgct

SEQ ID NO: 4553552 - DNA, 25 bp, Homo sapien
gttccacgtcgtacatgtgccttca

SEQ ID NO: 4553553 - DNA, 25 bp, Homo sapien
agaatgctgttccacgtcgtacatg

SEQ ID NO: 4553554 - DNA, 25 bp, Homo sapien
attctagttgacagaatgctgttcc

SEQ ID NO: 4553555 - DNA, 25 bp, Homo sapien
gttgacagaatgctgttccacgtcg

SEQ ID NO: 4553556 - DNA, 25 bp, Homo sapien
taacaggtggcatcaataattccag

SEQ ID NO: 4553557 - DNA, 25 bp, Homo sapien
ttttagttttaggtggcaagcagcc

SEQ ID NO: 4553558 - DNA, 25 bp, Homo sapien
aagaatcttcaatagccttgtgtaa

SEQ ID NO: 4553559 - DNA, 25 bp, Homo sapien
gcaagcagcccggttcaaatacaat

SEQ ID NO: 4553560 - DNA, 25 bp, Homo sapien
gccaaatagttttccgttgcaaaca

SEQ ID NO: 4553561 - DNA, 25 bp, Homo sapien
tcagctatgtcagtattcattgctc

SEQ ID NO: 4553562 - DNA, 25 bp, Homo sapien
tattcattgctcttcgtgcctcagc

SEQ ID NO: 4553563 - DNA, 25 bp, Homo sapien
ttttaaatcgcaaagttcagctatg

SEQ ID NO: 4553564 - DNA, 25 bp, Homo sapien
tcctttatccttcaaccattctggg

SEQ ID NO: 4553565 - DNA, 25 bp, Homo sapien
gtcttttacaactgatgttgagatt

SEQ ID NO: 4553566 - DNA, 25 bp, Homo sapien
tcttttacaactgatgttgagattg

SEQ ID NO: 4553567 - DNA, 25 bp, Homo sapien
ataggtcttttacaactgatgttga

SEQ ID NO: 4553568 - DNA, 25 bp, Homo sapien
gggataggtcttttacaactgatgt

SEQ ID NO: 4553569 - DNA, 25 bp, Homo sapien
caatcatggttgcaatggcacctcc

SEQ ID NO: 4553570 - DNA, 25 bp, Homo sapien
tccttctaggtaagggactccttga

SEQ ID NO: 4553571 - DNA, 25 bp, Homo sapien
ggcacctccatgaatcaatccaggt

SEQ ID NO: 4553572 - DNA, 25 bp, Homo sapien
ataccaacagtagcatcaatcatgg

SEQ ID NO: 4553573 - DNA, 25 bp, Homo sapien
gaacatcacgtattcaaagcccagg

SEQ ID NO: 4553574 - DNA, 25 bp, Homo sapien
gagcagtcttaggtccttgttccag

SEQ ID NO: 4553575 - DNA, 25 bp, Homo sapien
taggtgtacgtttatatgaaggcaa

SEQ ID NO: 4553576 - DNA, 25 bp, Homo sapien
aaagcttctggtgaagagctgggcc

SEQ ID NO: 4553577 - DNA, 25 bp, Homo sapien
aggcgcctgcctaccggtggcggct

SEQ ID NO: 4553578 - DNA, 25 bp, Homo sapien
gttgcggctcactacccggcaggcg

SEQ ID NO: 4553579 - DNA, 25 bp, Homo sapien
aaatgacctcagcgcgggttgcggc

SEQ ID NO: 4553580 - DNA, 25 bp, Homo sapien
acctcagcgcgggttgcggctcact

SEQ ID NO: 4553581 - DNA, 25 bp, Homo sapien
acttccaacactatgctgtgttgaa

SEQ ID NO: 4553582 - DNA, 25 bp, Homo sapien
ccaacactatgctgtgttgaatagg

SEQ ID NO: 4553583 - DNA, 25 bp, Homo sapien
cactatgctgtgttgaataggagtg

SEQ ID NO: 4553584 - DNA, 25 bp, Homo sapien
ccgctagtagctgcgatcacaggtg

SEQ ID NO: 4553585 - DNA, 25 bp, Homo sapien
tgtgattcacgaagagctgttggga

SEQ ID NO: 4553586 - DNA, 25 bp, Homo sapien
attcacgaagagctgttgggaatac

SEQ ID NO: 4553587 - DNA, 25 bp, Homo sapien
ggtaaagttgattttaatactgcca

SEQ ID NO: 4553588 - DNA, 25 bp, Homo sapien
ttctgctacttgtgattcacgaaga

SEQ ID NO: 4553589 - DNA, 25 bp, Homo sapien
ctcgtagctttcagtatagaattat

SEQ ID NO: 4553590 - DNA, 25 bp, Homo sapien
catccggcggaaaatgcatccaaaa

SEQ ID NO: 4553591 - DNA, 25 bp, Homo sapien
ctgcatccggcggaaaatgcatcca

SEQ ID NO: 4553592 - DNA, 25 bp, Homo sapien
gataaaaccaaactcgtagctttca

SEQ ID NO: 4553593 - DNA, 25 bp, Homo sapien
gcaggaagagccctataggtacttc

SEQ ID NO: 4553594 - DNA, 25 bp, Homo sapien
attttcctaagcagaaattggtggc

SEQ ID NO: 4553595 - DNA, 25 bp, Homo sapien
gactggtgaggcctaacagccctct

SEQ ID NO: 4553596 - DNA, 25 bp, Homo sapien
tgcctggatataaacgcagtgcggt

SEQ ID NO: 4553597 - DNA, 25 bp, Homo sapien
ttttggagcaagatttctagatgcc

SEQ ID NO: 4553598 - DNA, 25 bp, Homo sapien
cttttggagcaagatttctagatgc

SEQ ID NO: 4553599 - DNA, 25 bp, Homo sapien
tctagatgccaaatttctagtaaga

SEQ ID NO: 4553600 - DNA, 25 bp, Homo sapien
agatgccaaatttctagtaagactc

SEQ ID NO: 4553601 - DNA, 25 bp, Homo sapien
tattctaggagttaagccacttctc

SEQ ID NO: 4553602 - DNA, 25 bp, Homo sapien
ttagtcccagatctaccattagctg

SEQ ID NO: 4553603 - DNA, 25 bp, Homo sapien
agtcttaccctgtcaaccgaagttg

SEQ ID NO: 4553604 - DNA, 25 bp, Homo sapien
tatggtcttaggcaatcactttctc

SEQ ID NO: 4553605 - DNA, 25 bp, Homo sapien
tgcactagtagttgtctgacacttt

SEQ ID NO: 4553606 - DNA, 25 bp, Homo sapien
caaacttccctcacatgggcaagaa

SEQ ID NO: 4553607 - DNA, 25 bp, Homo sapien
gaacaagacggtctgtctctgctgg

SEQ ID NO: 4553608 - DNA, 25 bp, Homo sapien
gaaagcagtatcttgtacaggtgtg

SEQ ID NO: 4553609 - DNA, 25 bp, Homo sapien
caagagcccatcaagagttgcctca

SEQ ID NO: 4553610 - DNA, 25 bp, Homo sapien
cagtggacccagcatgattgattat

SEQ ID NO: 4553611 - DNA, 25 bp, Homo sapien
gcaagttccagacaactagtcatag

SEQ ID NO: 4553612 - DNA, 25 bp, Homo sapien
tctccagcccctatcaaaatgatgg

SEQ ID NO: 4553613 - DNA, 25 bp, Homo sapien
tactactgaggatccctgagtaact

SEQ ID NO: 4553614 - DNA, 25 bp, Homo sapien
cattactactgaggatccctgagta

SEQ ID NO: 4553615 - DNA, 25 bp, Homo sapien
ttactactgaggatccctgagtaac

SEQ ID NO: 4553616 - DNA, 25 bp, Homo sapien
attactactgaggatccctgagtaa

SEQ ID NO: 4553617 - DNA, 25 bp, Homo sapien
gtatatggctcagtgcggtgactca

SEQ ID NO: 4553618 - DNA, 25 bp, Homo sapien
gaccagctgaccagttcaattatta

SEQ ID NO: 4553619 - DNA, 25 bp, Homo sapien
gatggaattaagtatgctaaaggca

SEQ ID NO: 4553620 - DNA, 25 bp, Homo sapien
taaaggcaggaatctttgaccagct

SEQ ID NO: 4553621 - DNA, 25 bp, Homo sapien
cttcatcatgacacttagtgcgtat

SEQ ID NO: 4553622 - DNA, 25 bp, Homo sapien
gatcttcccgctttgctgcagcttt

SEQ ID NO: 4553623 - DNA, 25 bp, Homo sapien
attctttgcatcatctctttgtcaa

SEQ ID NO: 4553624 - DNA, 25 bp, Homo sapien
cacttagtgcgtatttttgatcttc

SEQ ID NO: 4553625 - DNA, 25 bp, Homo sapien
caggaacctgattctttaaaactct

SEQ ID NO: 4553626 - DNA, 25 bp, Homo sapien
gtcacagaaagggtctcccacatgg

SEQ ID NO: 4553627 - DNA, 25 bp, Homo sapien
cttttttatacaaggtgaagacaat

SEQ ID NO: 4553628 - DNA, 25 bp, Homo sapien
tgtcattcccaatctttgctttgct

SEQ ID NO: 4553629 - DNA, 25 bp, Homo sapien
cccacatggccgcttcttttttata

SEQ ID NO: 4553630 - DNA, 25 bp, Homo sapien
ctatgggagcataaagaaatgcctc

SEQ ID NO: 4553631 - DNA, 25 bp, Homo sapien
aagaaatgcctcaaataaaaatgga

SEQ ID NO: 4553632 - DNA, 25 bp, Homo sapien
taaagaaatgcctcaaataaaaatg

SEQ ID NO: 4553633 - DNA, 25 bp, Homo sapien
gcataaagaaatgcctcaaataaaa

SEQ ID NO: 4553634 - DNA, 25 bp, Homo sapien
tagttttccgtgcagaacacgtccg

SEQ ID NO: 4553635 - DNA, 25 bp, Homo sapien
cttcagatagttttccgtgcagaac

SEQ ID NO: 4553636 - DNA, 25 bp, Homo sapien
aacacgtccgtgtctctgacgcaca

SEQ ID NO: 4553637 - DNA, 25 bp, Homo sapien
tttccgtgcagaacacgtccgtgtc

SEQ ID NO: 4553638 - DNA, 25 bp, Homo sapien
gaccgcagtcttcgtctgctgccag

SEQ ID NO: 4553639 - DNA, 25 bp, Homo sapien
acagaaagaccgcagtcttcgtctg

SEQ ID NO: 4553640 - DNA, 25 bp, Homo sapien
cgcagtcttcgtctgctgccagctg

SEQ ID NO: 4553641 - DNA, 25 bp, Homo sapien
gaaagaccgcagtcttcgtctgctg

SEQ ID NO: 4553642 - DNA, 25 bp, Homo sapien
tccggtagcaacgggagcggatagc

SEQ ID NO: 4553643 - DNA, 25 bp, Homo sapien
cgggagcggatagcgcggctggttg

SEQ ID NO: 4553644 - DNA, 25 bp, Homo sapien
gcaacgggagcggatagcgcggctg

SEQ ID NO: 4553645 - DNA, 25 bp, Homo sapien
gtagcaacgggagcggatagcgcgg

SEQ ID NO: 4553646 - DNA, 25 bp, Homo sapien
atgcgtgactatccaggcgcccaga

SEQ ID NO: 4553647 - DNA, 25 bp, Homo sapien
ggttaccttacgatctgagcgaatg

SEQ ID NO: 4553648 - DNA, 25 bp, Homo sapien
ccagagagtgatgccgattcttggg

SEQ ID NO: 4553649 - DNA, 25 bp, Homo sapien
gcgaatgttcaaagaagtagaccca

SEQ ID NO: 4553650 - DNA, 25 bp, Homo sapien
cacaggtttcccccttctcccatca

SEQ ID NO: 4553651 - DNA, 25 bp, Homo sapien
ttctcccatcatcccaaggagcagc

SEQ ID NO: 4553652 - DNA, 25 bp, Homo sapien
cccccttctcccatcatcccaagga

SEQ ID NO: 4553653 - DNA, 25 bp, Homo sapien
cccttctcccatcatcccaaggagc

SEQ ID NO: 4553654 - DNA, 25 bp, Homo sapien
gctggggccagagtagtctgctgga

SEQ ID NO: 4553655 - DNA, 25 bp, Homo sapien
ggtgtgggtttgcataataggagag

SEQ ID NO: 4553656 - DNA, 25 bp, Homo sapien
agtctgctggatccatggtgtgggt

SEQ ID NO: 4553657 - DNA, 25 bp, Homo sapien
tgtgggtttgcataataggagagga

SEQ ID NO: 4553658 - DNA, 25 bp, Homo sapien
cacacctggcctagttatttaatta

SEQ ID NO: 4553659 - DNA, 25 bp, Homo sapien
ttccctagtaactgggagtacaggc

SEQ ID NO: 4553660 - DNA, 25 bp, Homo sapien
gcttccctagtaactgggagtacag

SEQ ID NO: 4553661 - DNA, 25 bp, Homo sapien
caccacacctggcctagttatttaa

SEQ ID NO: 4553662 - DNA, 25 bp, Homo sapien
tgaggatcaacaaactacccacccg

SEQ ID NO: 4553663 - DNA, 25 bp, Homo sapien
gaaacaagagacactagggcctgct

SEQ ID NO: 4553664 - DNA, 25 bp, Homo sapien
taaacattaagtgcatatagacaca

SEQ ID NO: 4553665 - DNA, 25 bp, Homo sapien
aacctagatgctcacgaatggtgaa

SEQ ID NO: 4553666 - DNA, 25 bp, Homo sapien
tgctggctcatgtgaacaaggtgcc

SEQ ID NO: 4553667 - DNA, 25 bp, Homo sapien
gctggctcatgtgaacaaggtgccc

SEQ ID NO: 4553668 - DNA, 25 bp, Homo sapien
tggctcatgtgaacaaggtgcccag

SEQ ID NO: 4553669 - DNA, 25 bp, Homo sapien
ctgctggctcatgtgaacaaggtgc

SEQ ID NO: 4553670 - DNA, 25 bp, Homo sapien
cacttggaagcccttaaagagtcaa

SEQ ID NO: 4553671 - DNA, 25 bp, Homo sapien
tgggatcagaagacgcaaattgtgt

SEQ ID NO: 4553672 - DNA, 25 bp, Homo sapien
gaatggccaacaataacatggactg

SEQ ID NO: 4553673 - DNA, 25 bp, Homo sapien
tcttgacagcagaacgtctacttgt

SEQ ID NO: 4553674 - DNA, 25 bp, Homo sapien
cataaccatgccgaatatgatgcag

SEQ ID NO: 4553675 - DNA, 25 bp, Homo sapien
taggtagtaccaagtaaacagcatt

SEQ ID NO: 4553676 - DNA, 25 bp, Homo sapien
tgtcaccaatgtggaacacactcag

SEQ ID NO: 4553677 - DNA, 25 bp, Homo sapien
gacatcaggccatctattaatccat

SEQ ID NO: 4553678 - DNA, 25 bp, Homo sapien
catcatgataagaagcaggactttc

SEQ ID NO: 4553679 - DNA, 25 bp, Homo sapien
catctacagaacaagaaaggtacag

SEQ ID NO: 4553680 - DNA, 25 bp, Homo sapien
aacaatcatttaagtcacatacatc

SEQ ID NO: 4553681 - DNA, 25 bp, Homo sapien
ctacacatctacagaacaagaaagg

SEQ ID NO: 4553682 - DNA, 25 bp, Homo sapien
agctctgatgtattaacgcctggca

SEQ ID NO: 4553683 - DNA, 25 bp, Homo sapien
tataatgctctactggatggaacaa

SEQ ID NO: 4553684 - DNA, 25 bp, Homo sapien
tgaaaagtcacaacagcctaaagga

SEQ ID NO: 4553685 - DNA, 25 bp, Homo sapien
ggaaactggaagtaccctcagacag

SEQ ID NO: 4553686 - DNA, 25 bp, Homo sapien
gaatcgagtaacacctagaagcatg

SEQ ID NO: 4553687 - DNA, 25 bp, Homo sapien
tgtggaccacaaattctctagtgca

SEQ ID NO: 4553688 - DNA, 25 bp, Homo sapien
gccactaggcagagttgggagtcta

SEQ ID NO: 4553689 - DNA, 25 bp, Homo sapien
cataagaaacctctatacacggcag

SEQ ID NO: 4553690 - DNA, 25 bp, Homo sapien
taaatagcacaactgggaacgtacg

SEQ ID NO: 4553691 - DNA, 25 bp, Homo sapien
gctccaaatgatagacagtagtcca

SEQ ID NO: 4553692 - DNA, 25 bp, Homo sapien
aaatggattttgatctcccctaggg

SEQ ID NO: 4553693 - DNA, 25 bp, Homo sapien
ctcaagagggtactctcaggtccat

SEQ ID NO: 4553694 - DNA, 25 bp, Homo sapien
tggattcggtggtggagcatactca

SEQ ID NO: 4553695 - DNA, 25 bp, Homo sapien
ggtcgattaaaacccatgcccagag

SEQ ID NO: 4553696 - DNA, 25 bp, Homo sapien
cactgggtcagaagacgaatggcca

SEQ ID NO: 4553697 - DNA, 25 bp, Homo sapien
gaaacttggctagcattctgtggag

SEQ ID NO: 4553698 - DNA, 25 bp, Homo sapien
cttatctgggcttcctagttgtaca

SEQ ID NO: 4553699 - DNA, 25 bp, Homo sapien
ttgccttgcgctttttcttatctgg

SEQ ID NO: 4553700 - DNA, 25 bp, Homo sapien
ggcttcctagttgtacacctggtcc

SEQ ID NO: 4553701 - DNA, 25 bp, Homo sapien
tcctaacccatccagtccactatca

SEQ ID NO: 4553702 - DNA, 25 bp, Homo sapien
agattgattccttcaattcatgagc

SEQ ID NO: 4553703 - DNA, 25 bp, Homo sapien
tgagattgattccttcaattcatga

SEQ ID NO: 4553704 - DNA, 25 bp, Homo sapien
tagaaatagtgttcaatgtgtagac

SEQ ID NO: 4553705 - DNA, 25 bp, Homo sapien
tcaatgtgtagactgctttgagcag

SEQ ID NO: 4553706 - DNA, 25 bp, Homo sapien
tctccagctactggaatgattgtat

SEQ ID NO: 4553707 - DNA, 25 bp, Homo sapien
ttatgacaatagaaaccttgtctgt

SEQ ID NO: 4553708 - DNA, 25 bp, Homo sapien
ctactggaatgattgtatagcacat

SEQ ID NO: 4553709 - DNA, 25 bp, Homo sapien
gacaatagaaaccttgtctgtctca

SEQ ID NO: 4553710 - DNA, 25 bp, Homo sapien
cgaactctcttcagcgaaatgggat

SEQ ID NO: 4553711 - DNA, 25 bp, Homo sapien
tccttctcctgttctgctgacatta

SEQ ID NO: 4553712 - DNA, 25 bp, Homo sapien
ttacagaccgcaaagcatgactccc

SEQ ID NO: 4553713 - DNA, 25 bp, Homo sapien
ccaggccgcgggaattcggtctctt

SEQ ID NO: 4553714 - DNA, 25 bp, Homo sapien
cgcggggccgctgcggctgcgaggc

SEQ ID NO: 4553715 - DNA, 25 bp, Homo sapien
gggccgctgcggctgcgaggcaagc

SEQ ID NO: 4553716 - DNA, 25 bp, Homo sapien
cggggccgctgcggctgcgaggcaa

SEQ ID NO: 4553717 - DNA, 25 bp, Homo sapien
ctcgcggggccgctgcggctgcgag

SEQ ID NO: 4553718 - DNA, 25 bp, Homo sapien
tcggagccgaggcacggccgagggc

SEQ ID NO: 4553719 - DNA, 25 bp, Homo sapien
acgcgggccgactttgcaaagtttg

SEQ ID NO: 4553720 - DNA, 25 bp, Homo sapien
tttgcaaagtttgggaggaggacga

SEQ ID NO: 4553721 - DNA, 25 bp, Homo sapien
ggcgtgcgggcaccggcggggctca

SEQ ID NO: 4553722 - DNA, 25 bp, Homo sapien
cgggagctggagagttctcggcggg

SEQ ID NO: 4553723 - DNA, 25 bp, Homo sapien
cgaggaaactttgtaagcgggagct

SEQ ID NO: 4553724 - DNA, 25 bp, Homo sapien
gagctggagagttctcggcgggcat

SEQ ID NO: 4553725 - DNA, 25 bp, Homo sapien
catgcgaggaaactttgtaagcggg

SEQ ID NO: 4553726 - DNA, 25 bp, Homo sapien
gggatccagattccccgactccgtg

SEQ ID NO: 4553727 - DNA, 25 bp, Homo sapien
acacctgtctgtagaatgcctccac

SEQ ID NO: 4553728 - DNA, 25 bp, Homo sapien
cccgactccgtgtccgcgtggccgt

SEQ ID NO: 4553729 - DNA, 25 bp, Homo sapien
cgcgtggccgtggtgtggacacctg

SEQ ID NO: 4553730 - DNA, 25 bp, Homo sapien
tgaaaggatccagaacacccataat

SEQ ID NO: 4553731 - DNA, 25 bp, Homo sapien
tgctgcccttacaagaaaatggtat

SEQ ID NO: 4553732 - DNA, 25 bp, Homo sapien
ttcacagaactgatcccctgagtca

SEQ ID NO: 4553733 - DNA, 25 bp, Homo sapien
cattagcaagtctacaaatgctgcc

SEQ ID NO: 4553734 - DNA, 25 bp, Homo sapien
gagggccagacttgcgatgatccag

SEQ ID NO: 4553735 - DNA, 25 bp, Homo sapien
tatctggtcacactatggaaggcac

SEQ ID NO: 4553736 - DNA, 25 bp, Homo sapien
cagagatgaaccatgtgcttggcac

SEQ ID NO: 4553737 - DNA, 25 bp, Homo sapien
tcatattacttcctagagtcgggag

SEQ ID NO: 4553738 - DNA, 25 bp, Homo sapien
tattaagggactgcctcaagccgtc

SEQ ID NO: 4553739 - DNA, 25 bp, Homo sapien
tatttgcctatatgcggaggtaacc

SEQ ID NO: 4553740 - DNA, 25 bp, Homo sapien
catcgttagaagaaatagccccact

SEQ ID NO: 4553741 - DNA, 25 bp, Homo sapien
caagccgtctgagctaaccaggtaa

SEQ ID NO: 4553742 - DNA, 25 bp, Homo sapien
catggccgtctagattggaaaatca

SEQ ID NO: 4553743 - DNA, 25 bp, Homo sapien
gtgagaatacctgagcatggccgtc

SEQ ID NO: 4553744 - DNA, 25 bp, Homo sapien
cagccagaggtatgaacttatccaa

SEQ ID NO: 4553745 - DNA, 25 bp, Homo sapien
aaagcatagcatggcagatggcggc

SEQ ID NO: 4553746 - DNA, 25 bp, Homo sapien
gggtgtggtacttataactgaggac

SEQ ID NO: 4553747 - DNA, 25 bp, Homo sapien
gcctggctggtaaaagcagaccgct

SEQ ID NO: 4553748 - DNA, 25 bp, Homo sapien
gattaatacagtggtgcctggctgg

SEQ ID NO: 4553749 - DNA, 25 bp, Homo sapien
gaatccccagtctcatggctgcctt

SEQ ID NO: 4553750 - DNA, 25 bp, Homo sapien
ggactcatgagaaaaccgcccagaa

SEQ ID NO: 4553751 - DNA, 25 bp, Homo sapien
catagctattaattatcaggtcagt

SEQ ID NO: 4553752 - DNA, 25 bp, Homo sapien
tataggaccatagctattaattatc

SEQ ID NO: 4553753 - DNA, 25 bp, Homo sapien
ggaccatagctattaattatcaggt

SEQ ID NO: 4553754 - DNA, 25 bp, Homo sapien
tttaattataggaccatagctatta

SEQ ID NO: 4553755 - DNA, 25 bp, Homo sapien
aaagcagatgaggataaacaaacca

SEQ ID NO: 4553756 - DNA, 25 bp, Homo sapien
tcaaatggtatagcaagcaaaaagt

SEQ ID NO: 4553757 - DNA, 25 bp, Homo sapien
taatgaacccacatatgatcaacaa

SEQ ID NO: 4553758 - DNA, 25 bp, Homo sapien
ttagatggagtatcaactctagggc

SEQ ID NO: 4553759 - DNA, 25 bp, Homo sapien
gcccgccttggtctcccaaagcgct

SEQ ID NO: 4553760 - DNA, 25 bp, Homo sapien
cgccttggtctcccaaagcgctggg

SEQ ID NO: 4553761 - DNA, 25 bp, Homo sapien
ctacaggcgcctactaccatgaccg

SEQ ID NO: 4553762 - DNA, 25 bp, Homo sapien
actacaggcgcctactaccatgacc

SEQ ID NO: 4553763 - DNA, 25 bp, Homo sapien
gctagcctgggtgggactgtttgct

SEQ ID NO: 4553764 - DNA, 25 bp, Homo sapien
caataacgtacagtatctaaagttg

SEQ ID NO: 4553765 - DNA, 25 bp, Homo sapien
cacattggttgtgggagctattcca

SEQ ID NO: 4553766 - DNA, 25 bp, Homo sapien
aacagtcttagctcagaaggtagcc

SEQ ID NO: 4553767 - DNA, 25 bp, Homo sapien
ccactagctaaggaggcactggtac

SEQ ID NO: 4553768 - DNA, 25 bp, Homo sapien
ggtacgaggtaactgttgagttcca

SEQ ID NO: 4553769 - DNA, 25 bp, Homo sapien
catgatcattggcattaaagattct

SEQ ID NO: 4553770 - DNA, 25 bp, Homo sapien
caggttctttcctacctcatttcca

SEQ ID NO: 4553771 - DNA, 25 bp, Homo sapien
ctggctttacttcggtatatcaaga

SEQ ID NO: 4553772 - DNA, 25 bp, Homo sapien
tcggtatatcaagatgagaacacag

SEQ ID NO: 4553773 - DNA, 25 bp, Homo sapien
tatgccaacacctacagcaatgcca

SEQ ID NO: 4553774 - DNA, 25 bp, Homo sapien
tttttggtccagatggtaatatcct

SEQ ID NO: 4553775 - DNA, 25 bp, Homo sapien
gaatctaaacgcttgggcctctgat

SEQ ID NO: 4553776 - DNA, 25 bp, Homo sapien
tctagcaaagccatggttattgccc

SEQ ID NO: 4553777 - DNA, 25 bp, Homo sapien
cctcattggatgcagatatcttgac

SEQ ID NO: 4553778 - DNA, 25 bp, Homo sapien
tttggaagtactgccagctccacag

SEQ ID NO: 4553779 - DNA, 25 bp, Homo sapien
ttggctcactgtcagctccgccgcc

SEQ ID NO: 4553780 - DNA, 25 bp, Homo sapien
tggctcactgtcagctccgccgccc

SEQ ID NO: 4553781 - DNA, 25 bp, Homo sapien
aagtaatctgcccacctcggcctcc

SEQ ID NO: 4553782 - DNA, 25 bp, Homo sapien
ctcaagtaatctgcccacctcggcc

SEQ ID NO: 4553783 - DNA, 25 bp, Homo sapien
gtttccaagaaaccagggcagtgtc

SEQ ID NO: 4553784 - DNA, 25 bp, Homo sapien
tttactccaactggtgggcctgctg

SEQ ID NO: 4553785 - DNA, 25 bp, Homo sapien
caggccttcctagatgcatataaga

SEQ ID NO: 4553786 - DNA, 25 bp, Homo sapien
tatagcgggtcacaactgtttctgg

SEQ ID NO: 4553787 - DNA, 25 bp, Homo sapien
ggactggaaagctgatccacatgta

SEQ ID NO: 4553788 - DNA, 25 bp, Homo sapien
atggtagactacagggctccaagga

SEQ ID NO: 4553789 - DNA, 25 bp, Homo sapien
cgaacggcaaattcgtatttggtgt

SEQ ID NO: 4553790 - DNA, 25 bp, Homo sapien
ttctagaccttgaaccaacatgtga

SEQ ID NO: 4553791 - DNA, 25 bp, Homo sapien
tataataacgagtgatgaagttgtt

SEQ ID NO: 4553792 - DNA, 25 bp, Homo sapien
ataacgagtgatgaagttgttaatg

SEQ ID NO: 4553793 - DNA, 25 bp, Homo sapien
taataacgagtgatgaagttgttaa

SEQ ID NO: 4553794 - DNA, 25 bp, Homo sapien
ctataataacgagtgatgaagttgt

SEQ ID NO: 4553795 - DNA, 25 bp, Homo sapien
taatgatttgtgcagcggtgaatgc

SEQ ID NO: 4553796 - DNA, 25 bp, Homo sapien
aggagggaccatgcgatcacgaaca

SEQ ID NO: 4553797 - DNA, 25 bp, Homo sapien
tgcaggccaacaggattacagcgga

SEQ ID NO: 4553798 - DNA, 25 bp, Homo sapien
ttagccttcgcatagagatggtggg

SEQ ID NO: 4553799 - DNA, 25 bp, Homo sapien
ctgcctgatagccatcgtctatgtt

SEQ ID NO: 4553800 - DNA, 25 bp, Homo sapien
gccatcgtctatgttgttgtaagcc

SEQ ID NO: 4553801 - DNA, 25 bp, Homo sapien
gtaagccaggagtctcacatgatat

SEQ ID NO: 4553802 - DNA, 25 bp, Homo sapien
gccaggagtctcacatgatattttc

SEQ ID NO: 4553803 - DNA, 25 bp, Homo sapien
tgctgaggttgggagatattcagaa

SEQ ID NO: 4553804 - DNA, 25 bp, Homo sapien
agtgatgacccactcatccaggtgc

SEQ ID NO: 4553805 - DNA, 25 bp, Homo sapien
ctgttaggagagtgatgacccactc

SEQ ID NO: 4553806 - DNA, 25 bp, Homo sapien
ggagagtgatgacccactcatccag

SEQ ID NO: 4553807 - DNA, 25 bp, Homo sapien
tgctctgacacctgggtcatggcct

SEQ ID NO: 4553808 - DNA, 25 bp, Homo sapien
cagctcaagtctggcccagcagcag

SEQ ID NO: 4553809 - DNA, 25 bp, Homo sapien
ggccagctcaagtctggcccagcag

SEQ ID NO: 4553810 - DNA, 25 bp, Homo sapien
catggcctctgacatagaatctggg

SEQ ID NO: 4553811 - DNA, 25 bp, Homo sapien
cacatcgtgtctccatctagaactg

SEQ ID NO: 4553812 - DNA, 25 bp, Homo sapien
ggcatttccagttgagctgttttgt

SEQ ID NO: 4553813 - DNA, 25 bp, Homo sapien
gaatccaggattacacgctccacat

SEQ ID NO: 4553814 - DNA, 25 bp, Homo sapien
tgtggaatgtctcacaatccggact

SEQ ID NO: 4553815 - DNA, 25 bp, Homo sapien
gatacactgctatacacagcacgca

SEQ ID NO: 4553816 - DNA, 25 bp, Homo sapien
agatgtttttcacagagccctccat

SEQ ID NO: 4553817 - DNA, 25 bp, Homo sapien
catctcatagggtggcattaataca

SEQ ID NO: 4553818 - DNA, 25 bp, Homo sapien
gccctccatgttttagagcatttcg

SEQ ID NO: 4553819 - DNA, 25 bp, Homo sapien
gatgcaaatggctcgctgctacctc

SEQ ID NO: 4553820 - DNA, 25 bp, Homo sapien
cagggtctcacaggccctacttcac

SEQ ID NO: 4553821 - DNA, 25 bp, Homo sapien
tgatgcaaatggctcgctgctacct

SEQ ID NO: 4553822 - DNA, 25 bp, Homo sapien
cagtgatgcaaatggctcgctgcta

SEQ ID NO: 4553823 - DNA, 25 bp, Homo sapien
taaaagattaggtgaacagctagga

SEQ ID NO: 4553824 - DNA, 25 bp, Homo sapien
taaatacattgctctcctgggagga

SEQ ID NO: 4553825 - DNA, 25 bp, Homo sapien
attttaaagctcaagacgcattagc

SEQ ID NO: 4553826 - DNA, 25 bp, Homo sapien
taacaagatctgtgggtaatccata

SEQ ID NO: 4553827 - DNA, 25 bp, Homo sapien
gctgtacagctgagccttttacctc

SEQ ID NO: 4553828 - DNA, 25 bp, Homo sapien
tgtgctaccatgagtccagggaagg

SEQ ID NO: 4553829 - DNA, 25 bp, Homo sapien
aagcccatggctgtacagctgagcc

SEQ ID NO: 4553830 - DNA, 25 bp, Homo sapien
agcctgtgctaccatgagtccaggg

SEQ ID NO: 4553831 - DNA, 25 bp, Homo sapien
tagagtaggtccttggtatccaaga

SEQ ID NO: 4553832 - DNA, 25 bp, Homo sapien
ctaagccactgagagtatagagtag

SEQ ID NO: 4553833 - DNA, 25 bp, Homo sapien
tggtacagttcagaggctccaaatg

SEQ ID NO: 4553834 - DNA, 25 bp, Homo sapien
cttggtatccaagaaaatgggccca

SEQ ID NO: 4553835 - DNA, 25 bp, Homo sapien
ggcagcagtaatccgaaccaggtag

SEQ ID NO: 4553836 - DNA, 25 bp, Homo sapien
gaaagacaagcgatacagcaccact

SEQ ID NO: 4553837 - DNA, 25 bp, Homo sapien
tccaaaaggtactcatgcgtggtcc

SEQ ID NO: 4553838 - DNA, 25 bp, Homo sapien
gaattctcagtacttaggcggaaag

SEQ ID NO: 4553839 - DNA, 25 bp, Homo sapien
gacttgtcaaactaatttcaggagg

SEQ ID NO: 4553840 - DNA, 25 bp, Homo sapien
ttcgacttgtcaaactaatttcagg

SEQ ID NO: 4553841 - DNA, 25 bp, Homo sapien
aatatcagtgggacttcgacttgtc

SEQ ID NO: 4553842 - DNA, 25 bp, Homo sapien
tgggacttcgacttgtcaaactaat

SEQ ID NO: 4553843 - DNA, 25 bp, Homo sapien
ggctggctcccattggcatatatgc

SEQ ID NO: 4553844 - DNA, 25 bp, Homo sapien
catcctctagagtattctgtgtcac

SEQ ID NO: 4553845 - DNA, 25 bp, Homo sapien
tccgatgactacttgatactcttca

SEQ ID NO: 4553846 - DNA, 25 bp, Homo sapien
gctggcaggctctaagtcatcaata

SEQ ID NO: 4553847 - DNA, 25 bp, Homo sapien
gaacaagagcattggcagccactgt

SEQ ID NO: 4553848 - DNA, 25 bp, Homo sapien
gaaagatctcattttgcccctagag

SEQ ID NO: 4553849 - DNA, 25 bp, Homo sapien
tcaaatctctctaaggacggagtcc

SEQ ID NO: 4553850 - DNA, 25 bp, Homo sapien
tacaggcatttcacaacagactggc

SEQ ID NO: 4553851 - DNA, 25 bp, Homo sapien
tctcccaggctaaaagaatggctga

SEQ ID NO: 4553852 - DNA, 25 bp, Homo sapien
aatggctgagcttgacatggtttca

SEQ ID NO: 4553853 - DNA, 25 bp, Homo sapien
gtacattatagggagcactgggtct

SEQ ID NO: 4553854 - DNA, 25 bp, Homo sapien
tgacatcactacagtcagtctggct

SEQ ID NO: 4553855 - DNA, 25 bp, Homo sapien
tttttcaaccatgacatcttgggag

SEQ ID NO: 4553856 - DNA, 25 bp, Homo sapien
cagtgccagctcgaggccttgttaa

SEQ ID NO: 4553857 - DNA, 25 bp, Homo sapien
gacacacaaatcgagcagtgccagc

SEQ ID NO: 4553858 - DNA, 25 bp, Homo sapien
tctaccattcgaatgtatcttcctt

SEQ ID NO: 4553859 - DNA, 25 bp, Homo sapien
tggccattcaacaaatgaaggagga

SEQ ID NO: 4553860 - DNA, 25 bp, Homo sapien
ggccattcaacaaatgaaggaggag

SEQ ID NO: 4553861 - DNA, 25 bp, Homo sapien
ctggccattcaacaaatgaaggagg

SEQ ID NO: 4553862 - DNA, 25 bp, Homo sapien
ttgctcagtgttcacttcctccatg

SEQ ID NO: 4553863 - DNA, 25 bp, Homo sapien
agctcctgtctacatctccatacat

SEQ ID NO: 4553864 - DNA, 25 bp, Homo sapien
tccatgatttccctattcagagcat

SEQ ID NO: 4553865 - DNA, 25 bp, Homo sapien
ccaggtgccttttctcggcattgct

SEQ ID NO: 4553866 - DNA, 25 bp, Homo sapien
ttaaaatatatgtacctatcatcct

SEQ ID NO: 4553867 - DNA, 25 bp, Homo sapien
tatatgtacctatcatccttcttaa

SEQ ID NO: 4553868 - DNA, 25 bp, Homo sapien
aaaatatatgtacctatcatccttc

SEQ ID NO: 4553869 - DNA, 25 bp, Homo sapien
aaatatatgtacctatcatccttct

SEQ ID NO: 4553870 - DNA, 25 bp, Homo sapien
aactgtaaagttgcgtgtgccaggg

SEQ ID NO: 4553871 - DNA, 25 bp, Homo sapien
cagcatgttgtagcctgacatcaga

SEQ ID NO: 4553872 - DNA, 25 bp, Homo sapien
tagtggcccgacaaacatatactcc

SEQ ID NO: 4553873 - DNA, 25 bp, Homo sapien
caagtacccgagtattaaagacatc

SEQ ID NO: 4553874 - DNA, 25 bp, Homo sapien
tctgtggacctgctataattgttgg

SEQ ID NO: 4553875 - DNA, 25 bp, Homo sapien
cctgtggccatgcattccaaaacta

SEQ ID NO: 4553876 - DNA, 25 bp, Homo sapien
ccaaaactacagtctgatgaagaga

SEQ ID NO: 4553877 - DNA, 25 bp, Homo sapien
gattggtttgggatttcctgtggcc

SEQ ID NO: 4553878 - DNA, 25 bp, Homo sapien
gcaatactcctgttggtagggcagt

SEQ ID NO: 4553879 - DNA, 25 bp, Homo sapien
gaatccctttggctgacatcataga

SEQ ID NO: 4553880 - DNA, 25 bp, Homo sapien
gaatcacagttagcgaggcctccat

SEQ ID NO: 4553881 - DNA, 25 bp, Homo sapien
catacttttacgtcggtgggctaca

SEQ ID NO: 4553882 - DNA, 25 bp, Homo sapien
tcttgcatgcaaatcgagcaactcc

SEQ ID NO: 4553883 - DNA, 25 bp, Homo sapien
gagttgtccgattgaactcccatgt

SEQ ID NO: 4553884 - DNA, 25 bp, Homo sapien
catagtcataggtagagttgtccga

SEQ ID NO: 4553885 - DNA, 25 bp, Homo sapien
tcccatgttatgactgcaggagggt

SEQ ID NO: 4553886 - DNA, 25 bp, Homo sapien
cctcagtggaaattggctggacttc

SEQ ID NO: 4553887 - DNA, 25 bp, Homo sapien
attggctggacttcaaatgcagaaa

SEQ ID NO: 4553888 - DNA, 25 bp, Homo sapien
tggacctcagtggaaattggctgga

SEQ ID NO: 4553889 - DNA, 25 bp, Homo sapien
cttcgtggacctcagtggaaattgg

SEQ ID NO: 4553890 - DNA, 25 bp, Homo sapien
ggtgtttcactaacattgagctact

SEQ ID NO: 4553891 - DNA, 25 bp, Homo sapien
taacattgagctacttttcattgct

SEQ ID NO: 4553892 - DNA, 25 bp, Homo sapien
ttgctaggatgtttatctgcaaaca

SEQ ID NO: 4553893 - DNA, 25 bp, Homo sapien
cattgcttctgtacacttgctagga

SEQ ID NO: 4553894 - DNA, 25 bp, Homo sapien
ttttggatctaaacctatggaccat

SEQ ID NO: 4553895 - DNA, 25 bp, Homo sapien
cttatgatcaatggatgcttgattt

SEQ ID NO: 4553896 - DNA, 25 bp, Homo sapien
ttgggtaaacatcacttatgatcaa

SEQ ID NO: 4553897 - DNA, 25 bp, Homo sapien
cacttatgatcaatggatgcttgat

SEQ ID NO: 4553898 - DNA, 25 bp, Homo sapien
tttcttgctaaccagtgccctaaac

SEQ ID NO: 4553899 - DNA, 25 bp, Homo sapien
tcttccttcacttctggttctgagg

SEQ ID NO: 4553900 - DNA, 25 bp, Homo sapien
ctggttctgaggaatcagtaaccat

SEQ ID NO: 4553901 - DNA, 25 bp, Homo sapien
cacttctggttctgaggaatcagta

SEQ ID NO: 4553902 - DNA, 25 bp, Homo sapien
cttctggttctgaggaatcagtaac

SEQ ID NO: 4553903 - DNA, 25 bp, Homo sapien
gctgctgatccagcatatcctgcag

SEQ ID NO: 4553904 - DNA, 25 bp, Homo sapien
tgctgatccagcatatcctgcagac

SEQ ID NO: 4553905 - DNA, 25 bp, Homo sapien
aggctgctgatccagcatatcctgc

SEQ ID NO: 4553906 - DNA, 25 bp, Homo sapien
gctgatccagcatatcctgcagaca

SEQ ID NO: 4553907 - DNA, 25 bp, Homo sapien
tgtcacttagcaacttcatctgtgc

SEQ ID NO: 4553908 - DNA, 25 bp, Homo sapien
gcttaatagctcaactgtgcaggaa

SEQ ID NO: 4553909 - DNA, 25 bp, Homo sapien
attttacactttgcatcggtcacag

SEQ ID NO: 4553910 - DNA, 25 bp, Homo sapien
gattgccttatattgcctaatccaa

SEQ ID NO: 4553911 - DNA, 25 bp, Homo sapien
aatcagcatttgctgacagacagga

SEQ ID NO: 4553912 - DNA, 25 bp, Homo sapien
tgaagtctgatttcccacaatcagc

SEQ ID NO: 4553913 - DNA, 25 bp, Homo sapien
gacagacaggacagtctgtgcacgc

SEQ ID NO: 4553914 - DNA, 25 bp, Homo sapien
gtttgaagtctgatttcccacaatc

SEQ ID NO: 4553915 - DNA, 25 bp, Homo sapien
tgatttatttaaagtagtctgcata

SEQ ID NO: 4553916 - DNA, 25 bp, Homo sapien
tatttaaagtagtctgcataaaaca

SEQ ID NO: 4553917 - DNA, 25 bp, Homo sapien
gtcacactgttctagctaaactcct

SEQ ID NO: 4553918 - DNA, 25 bp, Homo sapien
ttaaaagggtgactctggaggatta

SEQ ID NO: 4553919 - DNA, 25 bp, Homo sapien
tcacaagggtaaacctcatcctggc

SEQ ID NO: 4553920 - DNA, 25 bp, Homo sapien
tgcagaagagctacatgaaagcttt

SEQ ID NO: 4553921 - DNA, 25 bp, Homo sapien
ctttggccaatgaatgagggtcatc

SEQ ID NO: 4553922 - DNA, 25 bp, Homo sapien
ttcatggcaataactaactttgcag

SEQ ID NO: 4553923 - DNA, 25 bp, Homo sapien
cctgctgctatcaatacctaaaaga

SEQ ID NO: 4553924 - DNA, 25 bp, Homo sapien
ttgtaccctgctgctatcaatacct

SEQ ID NO: 4553925 - DNA, 25 bp, Homo sapien
taccctgctgctatcaatacctaaa

SEQ ID NO: 4553926 - DNA, 25 bp, Homo sapien
tgctgctatcaatacctaaaagaga

SEQ ID NO: 4553927 - DNA, 25 bp, Homo sapien
aggtcctggaaacaatgtgtggtca

SEQ ID NO: 4553928 - DNA, 25 bp, Homo sapien
ttctatcaggcttctcaggaggtcc

SEQ ID NO: 4553929 - DNA, 25 bp, Homo sapien
tgtttgttacacctatcacacacca

SEQ ID NO: 4553930 - DNA, 25 bp, Homo sapien
tatctggccacctccactatgtact

SEQ ID NO: 4553931 - DNA, 25 bp, Homo sapien
caagtttacattggacaaaaactga

SEQ ID NO: 4553932 - DNA, 25 bp, Homo sapien
gaatgaacagaatataagcataaaa

SEQ ID NO: 4553933 - DNA, 25 bp, Homo sapien
taacaactctatagaacaagtttac

SEQ ID NO: 4553934 - DNA, 25 bp, Homo sapien
gataagataagttacagttcctgaa

SEQ ID NO: 4553935 - DNA, 25 bp, Homo sapien
taatcttgagagctgcgtgtttcat

SEQ ID NO: 4553936 - DNA, 25 bp, Homo sapien
ttaatcttgagagctgcgtgtttca

SEQ ID NO: 4553937 - DNA, 25 bp, Homo sapien
aatcttgagagctgcgtgtttcatc

SEQ ID NO: 4553938 - DNA, 25 bp, Homo sapien
tcttgagagctgcgtgtttcatcac

SEQ ID NO: 4553939 - DNA, 25 bp, Homo sapien
caaaagacagttcgctaaagcacca

SEQ ID NO: 4553940 - DNA, 25 bp, Homo sapien
agccgttagaaagaacctcgatccg

SEQ ID NO: 4553941 - DNA, 25 bp, Homo sapien
gagcctggcaatctaaaacgactgg

SEQ ID NO: 4553942 - DNA, 25 bp, Homo sapien
taataggaacttctccgtgagcctg

SEQ ID NO: 4553943 - DNA, 25 bp, Homo sapien
ctttccggggcacaaatcggccact

SEQ ID NO: 4553944 - DNA, 25 bp, Homo sapien
tgccgattggggttatgagttcacc

SEQ ID NO: 4553945 - DNA, 25 bp, Homo sapien
atccagatccggcaagctggtgccg

SEQ ID NO: 4553946 - DNA, 25 bp, Homo sapien
tgagttcacctattccctctcgcag

SEQ ID NO: 4553947 - DNA, 25 bp, Homo sapien
cagaggaggcgccattcagcgtagc

SEQ ID NO: 4553948 - DNA, 25 bp, Homo sapien
aggcgccattcagcgtagccgcgcg

SEQ ID NO: 4553949 - DNA, 25 bp, Homo sapien
cccggcggtcgcagccgggcgaggg

SEQ ID NO: 4553950 - DNA, 25 bp, Homo sapien
ccattcagcgtagccgcgcgggcat

SEQ ID NO: 4553951 - DNA, 25 bp, Homo sapien
ccgccccgggcgctctctgctctgc

SEQ ID NO: 4553952 - DNA, 25 bp, Homo sapien
tctgcggctggtcgcacgcagcctg

SEQ ID NO: 4553953 - DNA, 25 bp, Homo sapien
cccagagcccctgtccgtctgcggc

SEQ ID NO: 4553954 - DNA, 25 bp, Homo sapien
gcggctggtcgcacgcagcctggct

SEQ ID NO: 4553955 - DNA, 25 bp, Homo sapien
cctcccgcggctagttgaggattgg

SEQ ID NO: 4553956 - DNA, 25 bp, Homo sapien
gtcaagccccggctgagggtctccg

SEQ ID NO: 4553957 - DNA, 25 bp, Homo sapien
gggtcccgccggacaatgcacctgg

SEQ ID NO: 4553958 - DNA, 25 bp, Homo sapien
gcccggtgcagggaaatctcactct

SEQ ID NO: 4553959 - DNA, 25 bp, Homo sapien
tatcttcctgtaagagctctatttc

SEQ ID NO: 4553960 - DNA, 25 bp, Homo sapien
cttcctgtaagagctctatttccag

SEQ ID NO: 4553961 - DNA, 25 bp, Homo sapien
ttatcttcctgtaagagctctattt

SEQ ID NO: 4553962 - DNA, 25 bp, Homo sapien
tcttcctgtaagagctctatttcca

SEQ ID NO: 4553963 - DNA, 25 bp, Homo sapien
gaggtgcaggttcctacttgtgctc

SEQ ID NO: 4553964 - DNA, 25 bp, Homo sapien
gctgcagatctcctgtccattgagg

SEQ ID NO: 4553965 - DNA, 25 bp, Homo sapien
ttcctacttgtgctctgtttggcgg

SEQ ID NO: 4553966 - DNA, 25 bp, Homo sapien
tgtggacgaagatactggccccaac

SEQ ID NO: 4553967 - DNA, 25 bp, Homo sapien
tgaagaggtaattcagcaggttgtg

SEQ ID NO: 4553968 - DNA, 25 bp, Homo sapien
tctgaagaggtaattcagcaggttg

SEQ ID NO: 4553969 - DNA, 25 bp, Homo sapien
aattcagcaggttgtgggatttctt

SEQ ID NO: 4553970 - DNA, 25 bp, Homo sapien
aggtaattcagcaggttgtgggatt

SEQ ID NO: 4553971 - DNA, 25 bp, Homo sapien
tgcttttccaagtcacacgagtgcc

SEQ ID NO: 4553972 - DNA, 25 bp, Homo sapien
cacacgagtgccctcaggatgttcg

SEQ ID NO: 4553973 - DNA, 25 bp, Homo sapien
gagtgccctcaggatgttcggacat

SEQ ID NO: 4553974 - DNA, 25 bp, Homo sapien
ttccaagtcacacgagtgccctcag

SEQ ID NO: 4553975 - DNA, 25 bp, Homo sapien
ttctttccactattagttctttcag

SEQ ID NO: 4553976 - DNA, 25 bp, Homo sapien
ttgtaaggccttttgcatgtgccag

SEQ ID NO: 4553977 - DNA, 25 bp, Homo sapien
tagttctttcagttggtccatttgt

SEQ ID NO: 4553978 - DNA, 25 bp, Homo sapien
gccttttgcatgtgccagaggctga

SEQ ID NO: 4553979 - DNA, 25 bp, Homo sapien
tattcattagaccaggagaaagcca

SEQ ID NO: 4553980 - DNA, 25 bp, Homo sapien
gagaaagccaaaccttccgcaagga

SEQ ID NO: 4553981 - DNA, 25 bp, Homo sapien
aatgttcttgcccacagtcatctgc

SEQ ID NO: 4553982 - DNA, 25 bp, Homo sapien
accatgataatgttcttgcccacag

SEQ ID NO: 4553983 - DNA, 25 bp, Homo sapien
cccaggaaggtaccagggcttgagt

SEQ ID NO: 4553984 - DNA, 25 bp, Homo sapien
tcccaggaaggtaccagggcttgag

SEQ ID NO: 4553985 - DNA, 25 bp, Homo sapien
ccaggaaggtaccagggcttgagtc

SEQ ID NO: 4553986 - DNA, 25 bp, Homo sapien
aggaagccagatctttcccacctaa

SEQ ID NO: 4553987 - DNA, 25 bp, Homo sapien
tcagctgtagaaggatgctttgggc

SEQ ID NO: 4553988 - DNA, 25 bp, Homo sapien
gaaatgccagagatacaggattatt

SEQ ID NO: 4553989 - DNA, 25 bp, Homo sapien
ttaaaagcctgtagtctgaatgacc

SEQ ID NO: 4553990 - DNA, 25 bp, Homo sapien
tttgcatttcgtttatcaacaccca

SEQ ID NO: 4553991 - DNA, 25 bp, Homo sapien
cattagtccctggatcagggatgga

SEQ ID NO: 4553992 - DNA, 25 bp, Homo sapien
ggtcctactgcccattagtccctgg

SEQ ID NO: 4553993 - DNA, 25 bp, Homo sapien
gatcagggatggacggtttgcattt

SEQ ID NO: 4553994 - DNA, 25 bp, Homo sapien
atgaagtgtgccctatctcctttac

SEQ ID NO: 4553995 - DNA, 25 bp, Homo sapien
tgagaatgatgaagtgtgccctatc

SEQ ID NO: 4553996 - DNA, 25 bp, Homo sapien
aatgatgaagtgtgccctatctcct

SEQ ID NO: 4553997 - DNA, 25 bp, Homo sapien
aatgagaatgatgaagtgtgcccta

SEQ ID NO: 4553998 - DNA, 25 bp, Homo sapien
tggcaaacaggcttcggattgtggc

SEQ ID NO: 4553999 - DNA, 25 bp, Homo sapien
ttgtggccgtcccacattgctggca

SEQ ID NO: 4554000 - DNA, 25 bp, Homo sapien
caggcttcggattgtggccgtccca

SEQ ID NO: 4554001 - DNA, 25 bp, Homo sapien
aagcccccataacttggcaaacagg

SEQ ID NO: 4554002 - DNA, 25 bp, Homo sapien
tcagcagccatcaggctatggttgt

SEQ ID NO: 4554003 - DNA, 25 bp, Homo sapien
tcatcagcagccatcaggctatggt

SEQ ID NO: 4554004 - DNA, 25 bp, Homo sapien
ccatcaggctatggttgtgcacaca

SEQ ID NO: 4554005 - DNA, 25 bp, Homo sapien
gcagccatcaggctatggttgtgca

SEQ ID NO: 4554006 - DNA, 25 bp, Homo sapien
gcaataattctagaacttggaatac

SEQ ID NO: 4554007 - DNA, 25 bp, Homo sapien
ctgagtggaacaggacaccagagaa

SEQ ID NO: 4554008 - DNA, 25 bp, Homo sapien
tgagtggaacaggacaccagagaaa

SEQ ID NO: 4554009 - DNA, 25 bp, Homo sapien
gagaaaactgttggcaataattcta

SEQ ID NO: 4554010 - DNA, 25 bp, Homo sapien
tttagatccacagccgcctgccggc

SEQ ID NO: 4554011 - DNA, 25 bp, Homo sapien
cctgccggcagcctcccttctgatg

SEQ ID NO: 4554012 - DNA, 25 bp, Homo sapien
ccggcagcctcccttctgatgtctc

SEQ ID NO: 4554013 - DNA, 25 bp, Homo sapien
ctttagatccacagccgcctgccgg

SEQ ID NO: 4554014 - DNA, 25 bp, Homo sapien
tatttccgtttcagtggcggcacca

SEQ ID NO: 4554015 - DNA, 25 bp, Homo sapien
atttccgtttcagtggcggcaccag

SEQ ID NO: 4554016 - DNA, 25 bp, Homo sapien
gatcctatttccgtttcagtggcgg

SEQ ID NO: 4554017 - DNA, 25 bp, Homo sapien
tcctatttccgtttcagtggcggca

SEQ ID NO: 4554018 - DNA, 25 bp, Homo sapien
tggtgaagacaaaacgcagggtaca

SEQ ID NO: 4554019 - DNA, 25 bp, Homo sapien
ggcaggcacctaactctaaagacag

SEQ ID NO: 4554020 - DNA, 25 bp, Homo sapien
gaattgcttcccctaaaccatgctg

SEQ ID NO: 4554021 - DNA, 25 bp, Homo sapien
tctgacggtcagcacaaagcacctt

SEQ ID NO: 4554022 - DNA, 25 bp, Homo sapien
tgattcataaggtggcaagtccagg

SEQ ID NO: 4554023 - DNA, 25 bp, Homo sapien
atgattcataaggtggcaagtccag

SEQ ID NO: 4554024 - DNA, 25 bp, Homo sapien
gaagtttatcccataattcttcaaa

SEQ ID NO: 4554025 - DNA, 25 bp, Homo sapien
gttttcaattgccatctgaagttta

SEQ ID NO: 4554026 - DNA, 25 bp, Homo sapien
gctcttggcagcttttcaggagtac

SEQ ID NO: 4554027 - DNA, 25 bp, Homo sapien
tgttcaactgtaaatgactgtggtc

SEQ ID NO: 4554028 - DNA, 25 bp, Homo sapien
ggagtaccccactgttcaactgtaa

SEQ ID NO: 4554029 - DNA, 25 bp, Homo sapien
ggcagcttttcaggagtaccccact

SEQ ID NO: 4554030 - DNA, 25 bp, Homo sapien
cacccgagatgtgccagtgacaaac

SEQ ID NO: 4554031 - DNA, 25 bp, Homo sapien
cgagatgtgccagtgacaaactgaa

SEQ ID NO: 4554032 - DNA, 25 bp, Homo sapien
tccattcataggcacccgagatgtg

SEQ ID NO: 4554033 - DNA, 25 bp, Homo sapien
tcataggcacccgagatgtgccagt

SEQ ID NO: 4554034 - DNA, 25 bp, Homo sapien
aacctgatgatttgcactgtagcca

SEQ ID NO: 4554035 - DNA, 25 bp, Homo sapien
tataacctgatgatttgcactgtag

SEQ ID NO: 4554036 - DNA, 25 bp, Homo sapien
accactgtataacctgatgatttgc

SEQ ID NO: 4554037 - DNA, 25 bp, Homo sapien
aacatctcccagtccacacataaga

SEQ ID NO: 4554038 - DNA, 25 bp, Homo sapien
gagatcctgtggtattagttcaaag

SEQ ID NO: 4554039 - DNA, 25 bp, Homo sapien
gatcctgtggtattagttcaaagaa

SEQ ID NO: 4554040 - DNA, 25 bp, Homo sapien
cctgtggtattagttcaaagaatcc

SEQ ID NO: 4554041 - DNA, 25 bp, Homo sapien
atgagatcctgtggtattagttcaa

SEQ ID NO: 4554042 - DNA, 25 bp, Homo sapien
ttcactctttacatcatacatacct

SEQ ID NO: 4554043 - DNA, 25 bp, Homo sapien
tggtacagcaccatacacatagtac

SEQ ID NO: 4554044 - DNA, 25 bp, Homo sapien
tagcactttatgcttgcctctgttc

SEQ ID NO: 4554045 - DNA, 25 bp, Homo sapien
taccttaataacaggacctatgtct

SEQ ID NO: 4554046 - DNA, 25 bp, Homo sapien
tttgcttctggattcggtttacaaa

SEQ ID NO: 4554047 - DNA, 25 bp, Homo sapien
cttctggattcggtttacaaatcgc

SEQ ID NO: 4554048 - DNA, 25 bp, Homo sapien
tacaaatcgccattgtattacaaga

SEQ ID NO: 4554049 - DNA, 25 bp, Homo sapien
ggattcggtttacaaatcgccattg

SEQ ID NO: 4554050 - DNA, 25 bp, Homo sapien
gacaactatttctgatccaccattt

SEQ ID NO: 4554051 - DNA, 25 bp, Homo sapien
ttgttcttattggtgacaactattt

SEQ ID NO: 4554052 - DNA, 25 bp, Homo sapien
catttttcagctcatgttgatgtgt

SEQ ID NO: 4554053 - DNA, 25 bp, Homo sapien
tccaccatttttcagctcatgttga

SEQ ID NO: 4554054 - DNA, 25 bp, Homo sapien
gaatccatcttagggaattgtaata

SEQ ID NO: 4554055 - DNA, 25 bp, Homo sapien
atccatcttagggaattgtaatatt

SEQ ID NO: 4554056 - DNA, 25 bp, Homo sapien
aagaatccatcttagggaattgtaa

SEQ ID NO: 4554057 - DNA, 25 bp, Homo sapien
ccatcttagggaattgtaatattca

SEQ ID NO: 4554058 - DNA, 25 bp, Homo sapien
agggttattggtttgtgaagcatca

SEQ ID NO: 4554059 - DNA, 25 bp, Homo sapien
gattccatatcatgaagggttattg

SEQ ID NO: 4554060 - DNA, 25 bp, Homo sapien
catcttgtaaaatgggcggatgaaa

SEQ ID NO: 4554061 - DNA, 25 bp, Homo sapien
cacagattccatatcatgaagggtt

SEQ ID NO: 4554062 - DNA, 25 bp, Homo sapien
aacagtttgccatgataaactgcca

SEQ ID NO: 4554063 - DNA, 25 bp, Homo sapien
ccaacagtttgccatgataaactgc

SEQ ID NO: 4554064 - DNA, 25 bp, Homo sapien
cagtttgccatgataaactgccatt

SEQ ID NO: 4554065 - DNA, 25 bp, Homo sapien
catccaacagtttgccatgataaac

SEQ ID NO: 4554066 - DNA, 25 bp, Homo sapien
tcgttacacaatccagagtttggat

SEQ ID NO: 4554067 - DNA, 25 bp, Homo sapien
gtaagagaggtgatcttcgttacac

SEQ ID NO: 4554068 - DNA, 25 bp, Homo sapien
gatttatctgtagggtataattgtc

SEQ ID NO: 4554069 - DNA, 25 bp, Homo sapien
tttggatttatctgtagggtataat

SEQ ID NO: 4554070 - DNA, 25 bp, Homo sapien
ctgccgataatcattgtaaaggtac

SEQ ID NO: 4554071 - DNA, 25 bp, Homo sapien
gccgataatcattgtaaaggtactt

SEQ ID NO: 4554072 - DNA, 25 bp, Homo sapien
tctttttctgccgataatcattgta

SEQ ID NO: 4554073 - DNA, 25 bp, Homo sapien
tttctgccgataatcattgtaaagg

SEQ ID NO: 4554074 - DNA, 25 bp, Homo sapien
gtagcagaatattcaaacaacccat

SEQ ID NO: 4554075 - DNA, 25 bp, Homo sapien
ctcaatccacagtcgagccttcagg

SEQ ID NO: 4554076 - DNA, 25 bp, Homo sapien
gacacccataattctccggtaagag

SEQ ID NO: 4554077 - DNA, 25 bp, Homo sapien
tcaagaacagttgctcggcgaagtt

SEQ ID NO: 4554078 - DNA, 25 bp, Homo sapien
gctatgatgtgtctagatacagatt

SEQ ID NO: 4554079 - DNA, 25 bp, Homo sapien
tatccccttacatacctttgttgca

SEQ ID NO: 4554080 - DNA, 25 bp, Homo sapien
ctgttttggtgttacatgttcttac

SEQ ID NO: 4554081 - DNA, 25 bp, Homo sapien
ggcatgattatagcccagtgcagct

SEQ ID NO: 4554082 - DNA, 25 bp, Homo sapien
caactttcttcggaagaactcatac

SEQ ID NO: 4554083 - DNA, 25 bp, Homo sapien
ttcaactttcttcggaagaactcat

SEQ ID NO: 4554084 - DNA, 25 bp, Homo sapien
tcttcaactttcttcggaagaactc

SEQ ID NO: 4554085 - DNA, 25 bp, Homo sapien
aactttcttcggaagaactcatact

SEQ ID NO: 4554086 - DNA, 25 bp, Homo sapien
aagagacaggtgagcggacagtccc

SEQ ID NO: 4554087 - DNA, 25 bp, Homo sapien
ggttatgcccgtgactatctgctct

SEQ ID NO: 4554088 - DNA, 25 bp, Homo sapien
tctcaatgcctgtagggttatgccc

SEQ ID NO: 4554089 - DNA, 25 bp, Homo sapien
gagagaacggccaatgtgctttcct

SEQ ID NO: 4554090 - DNA, 25 bp, Homo sapien
tacattctccaaccgaggatcttcc

SEQ ID NO: 4554091 - DNA, 25 bp, Homo sapien
tggtccagttattgctacattctcc

SEQ ID NO: 4554092 - DNA, 25 bp, Homo sapien
ttgctacattctccaaccgaggatc

SEQ ID NO: 4554093 - DNA, 25 bp, Homo sapien
gctacattctccaaccgaggatctt

SEQ ID NO: 4554094 - DNA, 25 bp, Homo sapien
tgtagaagattcttccatctgtgtg

SEQ ID NO: 4554095 - DNA, 25 bp, Homo sapien
tgtgatttatgtagaagattcttcc

SEQ ID NO: 4554096 - DNA, 25 bp, Homo sapien
tgatttatgtagaagattcttccat

SEQ ID NO: 4554097 - DNA, 25 bp, Homo sapien
gattcttccatctgtgtgagttctc

SEQ ID NO: 4554098 - DNA, 25 bp, Homo sapien
aggtaaaggccctagatcattggaa

SEQ ID NO: 4554099 - DNA, 25 bp, Homo sapien
tggaagtatcaagtgatgtctttcc

SEQ ID NO: 4554100 - DNA, 25 bp, Homo sapien
ctctcagatgggctggaattttcaa

SEQ ID NO: 4554101 - DNA, 25 bp, Homo sapien
gatgggctggaattttcaatcttgg

SEQ ID NO: 4554102 - DNA, 25 bp, Homo sapien
tctcagggatcaccactaactggtc

SEQ ID NO: 4554103 - DNA, 25 bp, Homo sapien
taatcaaagtcagtctgttaccatg

SEQ ID NO: 4554104 - DNA, 25 bp, Homo sapien
ggaataacgatcagttctcagggat

SEQ ID NO: 4554105 - DNA, 25 bp, Homo sapien
taggaaatgtgtcactatatagggc

SEQ ID NO: 4554106 - DNA, 25 bp, Homo sapien
atggtctcgatctccatctcctgac

SEQ ID NO: 4554107 - DNA, 25 bp, Homo sapien
tgcctgactaattattttgtatttt

SEQ ID NO: 4554108 - DNA, 25 bp, Homo sapien
cctcgtgatctcccccctcggcctc

SEQ ID NO: 4554109 - DNA, 25 bp, Homo sapien
cctgacctcgtgatctcccccctcg

SEQ ID NO: 4554110 - DNA, 25 bp, Homo sapien
taggaaggaatccttgctcaatttc

SEQ ID NO: 4554111 - DNA, 25 bp, Homo sapien
gcttgtgattgagggcctgcagaac

SEQ ID NO: 4554112 - DNA, 25 bp, Homo sapien
cactggtggaggcttgtgattgagg

SEQ ID NO: 4554113 - DNA, 25 bp, Homo sapien
gattgagggcctgcagaactctggc

SEQ ID NO: 4554114 - DNA, 25 bp, Homo sapien
tgctggcctgaatcactggtggagg

SEQ ID NO: 4554115 - DNA, 25 bp, Homo sapien
ctttgtccaagtagtcgttctggaa

SEQ ID NO: 4554116 - DNA, 25 bp, Homo sapien
tgtccaagtagtcgttctggaattg

SEQ ID NO: 4554117 - DNA, 25 bp, Homo sapien
gctttgtccaagtagtcgttctgga

SEQ ID NO: 4554118 - DNA, 25 bp, Homo sapien
ccaagtagtcgttctggaattgtga

SEQ ID NO: 4554119 - DNA, 25 bp, Homo sapien
ggtaatccagatgaagtaggcaaaa

SEQ ID NO: 4554120 - DNA, 25 bp, Homo sapien
gtggtaatccagatgaagtaggcaa

SEQ ID NO: 4554121 - DNA, 25 bp, Homo sapien
ctggtggtaatccagatgaagtagg

SEQ ID NO: 4554122 - DNA, 25 bp, Homo sapien
gtaatccagatgaagtaggcaaaag

SEQ ID NO: 4554123 - DNA, 25 bp, Homo sapien
taccgtgcactaatagaggcatgca

SEQ ID NO: 4554124 - DNA, 25 bp, Homo sapien
cacttactaaatacacgggagtcct

SEQ ID NO: 4554125 - DNA, 25 bp, Homo sapien
tatctctacagtggaataccgtgca

SEQ ID NO: 4554126 - DNA, 25 bp, Homo sapien
aaaaggtcagacacgtaagcccaca

SEQ ID NO: 4554127 - DNA, 25 bp, Homo sapien
caatgatgcataggtgggcgacctc

SEQ ID NO: 4554128 - DNA, 25 bp, Homo sapien
gaggacattataacgtgcagaggga

SEQ ID NO: 4554129 - DNA, 25 bp, Homo sapien
gaatcaggacatgggaacagtctgc

SEQ ID NO: 4554130 - DNA, 25 bp, Homo sapien
gaaaaacaccatggaactcagcttg

SEQ ID NO: 4554131 - DNA, 25 bp, Homo sapien
ttcctcaaaagtataggcttgtaag

SEQ ID NO: 4554132 - DNA, 25 bp, Homo sapien
ctcaaaagtataggcttgtaagctg

SEQ ID NO: 4554133 - DNA, 25 bp, Homo sapien
caggaagtgtaggttgttcctcaaa

SEQ ID NO: 4554134 - DNA, 25 bp, Homo sapien
cacaggaagtgtaggttgttcctca

SEQ ID NO: 4554135 - DNA, 25 bp, Homo sapien
gacaacagaagaataccttgatatt

SEQ ID NO: 4554136 - DNA, 25 bp, Homo sapien
aaacaagacaacagaagaatacctt

SEQ ID NO: 4554137 - DNA, 25 bp, Homo sapien
caagacaacagaagaataccttgat

SEQ ID NO: 4554138 - DNA, 25 bp, Homo sapien
gaagaataccttgatatttgtgatt

SEQ ID NO: 4554139 - DNA, 25 bp, Homo sapien
attctccatgctgcacgctgcaggc

SEQ ID NO: 4554140 - DNA, 25 bp, Homo sapien
tgcacgctgcaggctcagagcatcc

SEQ ID NO: 4554141 - DNA, 25 bp, Homo sapien
gaaggcctggttgctatacatggtg

SEQ ID NO: 4554142 - DNA, 25 bp, Homo sapien
ccaagttacttgacggtggaggtga

SEQ ID NO: 4554143 - DNA, 25 bp, Homo sapien
ggttgctatacatggtggcttcatc

SEQ ID NO: 4554144 - DNA, 25 bp, Homo sapien
gttggaacatccaagttacttgacg

SEQ ID NO: 4554145 - DNA, 25 bp, Homo sapien
attctcagcatctgttaggttgtcc

SEQ ID NO: 4554146 - DNA, 25 bp, Homo sapien
ctcggaagactctcggttgtcaaca

SEQ ID NO: 4554147 - DNA, 25 bp, Homo sapien
gcacgttgtgcttgcagttgaatgt

SEQ ID NO: 4554148 - DNA, 25 bp, Homo sapien
tgtttcctcggatatctgccgcctg

SEQ ID NO: 4554149 - DNA, 25 bp, Homo sapien
attggaagtataaaaagccatcatc

SEQ ID NO: 4554150 - DNA, 25 bp, Homo sapien
ctatattggaagtataaaaagccat

SEQ ID NO: 4554151 - DNA, 25 bp, Homo sapien
ggaagtataaaaagccatcatccat

SEQ ID NO: 4554152 - DNA, 25 bp, Homo sapien
tatattggaagtataaaaagccatc

SEQ ID NO: 4554153 - DNA, 25 bp, Homo sapien
attcgtagttaaagtgtttccagat

SEQ ID NO: 4554154 - DNA, 25 bp, Homo sapien
tcgtagttaaagtgtttccagatta

SEQ ID NO: 4554155 - DNA, 25 bp, Homo sapien
actgtgttcttctagattcatggtt

SEQ ID NO: 4554156 - DNA, 25 bp, Homo sapien
tgttcttctagattcatggtttaca

SEQ ID NO: 4554157 - DNA, 25 bp, Homo sapien
tggtttacataataggtccttccaa

SEQ ID NO: 4554158 - DNA, 25 bp, Homo sapien
taataggtccttccaaggatatcct

SEQ ID NO: 4554159 - DNA, 25 bp, Homo sapien
catctggttggtccaaaacaaccca

SEQ ID NO: 4554160 - DNA, 25 bp, Homo sapien
agcagcatctggttggtccaaaaca

SEQ ID NO: 4554161 - DNA, 25 bp, Homo sapien
tggttggtccaaaacaacccagcca

SEQ ID NO: 4554162 - DNA, 25 bp, Homo sapien
gctgcaaatggcaagcagcatctgg

SEQ ID NO: 4554163 - DNA, 25 bp, Homo sapien
tttccttatatcctcttactttgtc

SEQ ID NO: 4554164 - DNA, 25 bp, Homo sapien
tcttaaattatgataatacaggatc

SEQ ID NO: 4554165 - DNA, 25 bp, Homo sapien
tattgcccaaatttcattctcttct

SEQ ID NO: 4554166 - DNA, 25 bp, Homo sapien
tcttgcatatattgaatcagactgt

SEQ ID NO: 4554167 - DNA, 25 bp, Homo sapien
tcatttttagtctcagataaccttt

SEQ ID NO: 4554168 - DNA, 25 bp, Homo sapien
ggtaaataagtcatttttagtctca

SEQ ID NO: 4554169 - DNA, 25 bp, Homo sapien
catttttagtctcagataaccttta

SEQ ID NO: 4554170 - DNA, 25 bp, Homo sapien
gtagaaaagaaaataaatattcata

SEQ ID NO: 4554171 - DNA, 25 bp, Homo sapien
tgtagaaaagaaaataaatattcat

SEQ ID NO: 4554172 - DNA, 25 bp, Homo sapien
ctgtagaaaagaaaataaatattca

SEQ ID NO: 4554173 - DNA, 25 bp, Homo sapien
ctccatactgaaggagatgtgaaca

SEQ ID NO: 4554174 - DNA, 25 bp, Homo sapien
tcccaaggccgctaatgtggcttgt

SEQ ID NO: 4554175 - DNA, 25 bp, Homo sapien
tgtggcttgtgtctccatactgaag

SEQ ID NO: 4554176 - DNA, 25 bp, Homo sapien
tcatgagtagtcagtgaaatcctga

SEQ ID NO: 4554177 - DNA, 25 bp, Homo sapien
tgtatatggtctctccaatcttgga

SEQ ID NO: 4554178 - DNA, 25 bp, Homo sapien
gtatatggtctctccaatcttggat

SEQ ID NO: 4554179 - DNA, 25 bp, Homo sapien
atgtatatggtctctccaatcttgg

SEQ ID NO: 4554180 - DNA, 25 bp, Homo sapien
aaatgtatatggtctctccaatctt

SEQ ID NO: 4554181 - DNA, 25 bp, Homo sapien
gggtcaatggctggccctccgttct

SEQ ID NO: 4554182 - DNA, 25 bp, Homo sapien
tggccctccgttcttatctctttca

SEQ ID NO: 4554183 - DNA, 25 bp, Homo sapien
gttgactgagggtcaatggctggcc

SEQ ID NO: 4554184 - DNA, 25 bp, Homo sapien
ttatctctttcatcaggagagccca

SEQ ID NO: 4554185 - DNA, 25 bp, Homo sapien
ggaacatccacttgacctaggaaat

SEQ ID NO: 4554186 - DNA, 25 bp, Homo sapien
aagtggaacatccacttgacctagg

SEQ ID NO: 4554187 - DNA, 25 bp, Homo sapien
cttgacctaggaaatcatctcttgt

SEQ ID NO: 4554188 - DNA, 25 bp, Homo sapien
catccacttgacctaggaaatcatc

SEQ ID NO: 4554189 - DNA, 25 bp, Homo sapien
tcaaaattcaccaactgtctgccta

SEQ ID NO: 4554190 - DNA, 25 bp, Homo sapien
tagtccagggtccaattcagactca

SEQ ID NO: 4554191 - DNA, 25 bp, Homo sapien
caaaaatactgcgagagaatcctca

SEQ ID NO: 4554192 - DNA, 25 bp, Homo sapien
ggagtcttgccatcttacgcaggat

SEQ ID NO: 4554193 - DNA, 25 bp, Homo sapien
gcctttgaggttatgtaaatagccc

SEQ ID NO: 4554194 - DNA, 25 bp, Homo sapien
caaggtgcttattactttcaggctc

SEQ ID NO: 4554195 - DNA, 25 bp, Homo sapien
actgtggtgcttgccaaatgttgac

SEQ ID NO: 4554196 - DNA, 25 bp, Homo sapien
tagatataaagatccgggttcaagg

SEQ ID NO: 4554197 - DNA, 25 bp, Homo sapien
tagtacccgccctccagttataaca

SEQ ID NO: 4554198 - DNA, 25 bp, Homo sapien
tacccacttgtgtcagtagtacccg

SEQ ID NO: 4554199 - DNA, 25 bp, Homo sapien
tgaccctgcagtgcttaaaaaacat

SEQ ID NO: 4554200 - DNA, 25 bp, Homo sapien
gcttgggcactactgacaattcgag

SEQ ID NO: 4554201 - DNA, 25 bp, Homo sapien
caatgccaagagtaaacaatttgta

SEQ ID NO: 4554202 - DNA, 25 bp, Homo sapien
cagaatagccagaggcatcctaagc

SEQ ID NO: 4554203 - DNA, 25 bp, Homo sapien
accaaagacgtgaaatatctctatc

SEQ ID NO: 4554204 - DNA, 25 bp, Homo sapien
gcatttctcaatgccaagagtaaac

SEQ ID NO: 4554205 - DNA, 25 bp, Homo sapien
ctgaggaagtactctaggacgtgga

SEQ ID NO: 4554206 - DNA, 25 bp, Homo sapien
ggaaatgctgcaatatcaaaagaag

SEQ ID NO: 4554207 - DNA, 25 bp, Homo sapien
agggtcagtatgttcaacttggagc

SEQ ID NO: 4554208 - DNA, 25 bp, Homo sapien
caataatagtgagggtcgaatgacc

SEQ ID NO: 4554209 - DNA, 25 bp, Homo sapien
ctcaatgcaacttggactcctgggc

SEQ ID NO: 4554210 - DNA, 25 bp, Homo sapien
attagggcaggtaccagtagagaaa

SEQ ID NO: 4554211 - DNA, 25 bp, Homo sapien
ttagggcaggtaccagtagagaaaa

SEQ ID NO: 4554212 - DNA, 25 bp, Homo sapien
tgaaatcgtctccataagtcaaaat

SEQ ID NO: 4554213 - DNA, 25 bp, Homo sapien
gatatcttaactattgagagctctg

SEQ ID NO: 4554214 - DNA, 25 bp, Homo sapien
gttctccttcagtacatccagtgtt

SEQ ID NO: 4554215 - DNA, 25 bp, Homo sapien
gggcttgtggcccacatataggact

SEQ ID NO: 4554216 - DNA, 25 bp, Homo sapien
tctgggcctttctacttatttctaa

SEQ ID NO: 4554217 - DNA, 25 bp, Homo sapien
cataatggagttgcgttttggttga

SEQ ID NO: 4554218 - DNA, 25 bp, Homo sapien
gagtccttttggctagtggtagtag

SEQ ID NO: 4554219 - DNA, 25 bp, Homo sapien
gctttatcctgtaggattctcccag

SEQ ID NO: 4554220 - DNA, 25 bp, Homo sapien
tttgttgtgactcacccatgaatcg

SEQ ID NO: 4554221 - DNA, 25 bp, Homo sapien
ttctttgttgtgactcacccatgaa

SEQ ID NO: 4554222 - DNA, 25 bp, Homo sapien
tctttgttgtgactcacccatgaat

SEQ ID NO: 4554223 - DNA, 25 bp, Homo sapien
tgttgtgactcacccatgaatcgag

SEQ ID NO: 4554224 - DNA, 25 bp, Homo sapien
aagcctcttgtcctggcttctcctg

SEQ ID NO: 4554225 - DNA, 25 bp, Homo sapien
cctggcttctcctggtctgtcttgt

SEQ ID NO: 4554226 - DNA, 25 bp, Homo sapien
ggcttctcctggtctgtcttgtttc

SEQ ID NO: 4554227 - DNA, 25 bp, Homo sapien
tcagcctacaaagcctcttgtcctg

SEQ ID NO: 4554228 - DNA, 25 bp, Homo sapien
gtacactggtaaaataacaaataga

SEQ ID NO: 4554229 - DNA, 25 bp, Homo sapien
tgtacactggtaaaataacaaatag

SEQ ID NO: 4554230 - DNA, 25 bp, Homo sapien
tacaaaatactgctagctaaggacc

SEQ ID NO: 4554231 - DNA, 25 bp, Homo sapien
aactgcttggttacaataaatgttc

SEQ ID NO: 4554232 - DNA, 25 bp, Homo sapien
gctaaggaccaggaaaatatgtaaa

SEQ ID NO: 4554233 - DNA, 25 bp, Homo sapien
tataaattaacatttaccaagacca

SEQ ID NO: 4554234 - DNA, 25 bp, Homo sapien
gatgcaaactttatgagtaactgag

SEQ ID NO: 4554235 - DNA, 25 bp, Homo sapien
gcagatgtcctatgcatgagcttaa

SEQ ID NO: 4554236 - DNA, 25 bp, Homo sapien
tgtgcttaaggctggatagacagga

SEQ ID NO: 4554237 - DNA, 25 bp, Homo sapien
tatttggataagctcctcccaatga

SEQ ID NO: 4554238 - DNA, 25 bp, Homo sapien
cagtctgtctgggagtattattcga

SEQ ID NO: 4554239 - DNA, 25 bp, Homo sapien
tcttctgtaacgagcccttcctgtg

SEQ ID NO: 4554240 - DNA, 25 bp, Homo sapien
ccttcctgtgaagcggccgtatgtc

SEQ ID NO: 4554241 - DNA, 25 bp, Homo sapien
gataaccgaagtccattgacagctg

SEQ ID NO: 4554242 - DNA, 25 bp, Homo sapien
gacactgttagtatatgaacctcca

SEQ ID NO: 4554243 - DNA, 25 bp, Homo sapien
tgctgtcagaaggtaagtttccacc

SEQ ID NO: 4554244 - DNA, 25 bp, Homo sapien
tgacccaaaatcactaccgttgctg

SEQ ID NO: 4554245 - DNA, 25 bp, Homo sapien
tgtttggcacacttctattggaggt

SEQ ID NO: 4554246 - DNA, 25 bp, Homo sapien
tagactgaagatatccactgtacct

SEQ ID NO: 4554247 - DNA, 25 bp, Homo sapien
caaatggctggactgcttacaaggt

SEQ ID NO: 4554248 - DNA, 25 bp, Homo sapien
accttgttggctgtagtgaaatctg

SEQ ID NO: 4554249 - DNA, 25 bp, Homo sapien
ttcattatcgaccacagcactactg

SEQ ID NO: 4554250 - DNA, 25 bp, Homo sapien
tctgggagtcagcttcatttgaaca

SEQ ID NO: 4554251 - DNA, 25 bp, Homo sapien
tgggagtcagcttcatttgaacaac

SEQ ID NO: 4554252 - DNA, 25 bp, Homo sapien
ctgggagtcagcttcatttgaacaa

SEQ ID NO: 4554253 - DNA, 25 bp, Homo sapien
tcttctggctgcaaagtgcaatcgt

SEQ ID NO: 4554254 - DNA, 25 bp, Homo sapien
tccaagtcatctccggaggtttctg

SEQ ID NO: 4554255 - DNA, 25 bp, Homo sapien
tttgaagcacatgtgaacatggcta

SEQ ID NO: 4554256 - DNA, 25 bp, Homo sapien
aagggtaagtattgcttcttctggc

SEQ ID NO: 4554257 - DNA, 25 bp, Homo sapien
tgtccgtagacaggctagaagcagc

SEQ ID NO: 4554258 - DNA, 25 bp, Homo sapien
aaaaagacgacccattccagagact

SEQ ID NO: 4554259 - DNA, 25 bp, Homo sapien
ggcccctgctggtactttgaaacaa

SEQ ID NO: 4554260 - DNA, 25 bp, Homo sapien
gatttccagcgacctttaagctgag

SEQ ID NO: 4554261 - DNA, 25 bp, Homo sapien
ggtggaattactcaccagtgctgat

SEQ ID NO: 4554262 - DNA, 25 bp, Homo sapien
gagctagccctaccctagaggtgga

SEQ ID NO: 4554263 - DNA, 25 bp, Homo sapien
tcaaatgccatagaccaaggttggt

SEQ ID NO: 4554264 - DNA, 25 bp, Homo sapien
gctgataaagctcccacagtagaga

SEQ ID NO: 4554265 - DNA, 25 bp, Homo sapien
ttgtataaaccacctcctttatgat

SEQ ID NO: 4554266 - DNA, 25 bp, Homo sapien
tttgtataaaccacctcctttatga

SEQ ID NO: 4554267 - DNA, 25 bp, Homo sapien
gtgatagtcttctttggcagcaata

SEQ ID NO: 4554268 - DNA, 25 bp, Homo sapien
gatagtcttctttggcagcaataat

SEQ ID NO: 4554269 - DNA, 25 bp, Homo sapien
tgatagtcttctttggcagcaataa

SEQ ID NO: 4554270 - DNA, 25 bp, Homo sapien
tggctgctccactgaaatgtaccct

SEQ ID NO: 4554271 - DNA, 25 bp, Homo sapien
aagccatcactcaaatcccagactg

SEQ ID NO: 4554272 - DNA, 25 bp, Homo sapien
gaccttataatatgttggcaatcag

SEQ ID NO: 4554273 - DNA, 25 bp, Homo sapien
aaagggagcgagtaggaccaggagg

SEQ ID NO: 4554274 - DNA, 25 bp, Homo sapien
caatcggttttcgtcaaacacttca

SEQ ID NO: 4554275 - DNA, 25 bp, Homo sapien
ttcaaaaagaagccggtgctgctga

SEQ ID NO: 4554276 - DNA, 25 bp, Homo sapien
cttcaaaaagaagccggtgctgctg

SEQ ID NO: 4554277 - DNA, 25 bp, Homo sapien
cagtttcttaggtccttccagaatt

SEQ ID NO: 4554278 - DNA, 25 bp, Homo sapien
acagtttcttaggtccttccagaat

SEQ ID NO: 4554279 - DNA, 25 bp, Homo sapien
agagcaaatacagtaaacagtttct

SEQ ID NO: 4554280 - DNA, 25 bp, Homo sapien
catcatgtctttggaactgctgtaa

SEQ ID NO: 4554281 - DNA, 25 bp, Homo sapien
atgtctttggaactgctgtaagtat

SEQ ID NO: 4554282 - DNA, 25 bp, Homo sapien
tcagcctctggacatcatcatgtct

SEQ ID NO: 4554283 - DNA, 25 bp, Homo sapien
ctggacatcatcatgtctttggaac

SEQ ID NO: 4554284 - DNA, 25 bp, Homo sapien
ttaaagctaatcagtgtgcttattg

SEQ ID NO: 4554285 - DNA, 25 bp, Homo sapien
tctatgcttcttatgattaaagcta

SEQ ID NO: 4554286 - DNA, 25 bp, Homo sapien
aatcagtgtgcttattgtgaaggca

SEQ ID NO: 4554287 - DNA, 25 bp, Homo sapien
ctgctgcaatgaccaaccttcttct

SEQ ID NO: 4554288 - DNA, 25 bp, Homo sapien
tttcttcattccactttggattcaa

SEQ ID NO: 4554289 - DNA, 25 bp, Homo sapien
tatttcttcattccactttggattc

SEQ ID NO: 4554290 - DNA, 25 bp, Homo sapien
aataatatttcttcattccactttg

SEQ ID NO: 4554291 - DNA, 25 bp, Homo sapien
tcttcattccactttggattcaaac

SEQ ID NO: 4554292 - DNA, 25 bp, Homo sapien
gaactccattcattgggtcatataa

SEQ ID NO: 4554293 - DNA, 25 bp, Homo sapien
tgggtcatataacgtcactctcacg

SEQ ID NO: 4554294 - DNA, 25 bp, Homo sapien
gtttgcacacttgtaagaactccat

SEQ ID NO: 4554295 - DNA, 25 bp, Homo sapien
taacgtcactctcacgtaaggatca

SEQ ID NO: 4554296 - DNA, 25 bp, Homo sapien
ttcctcgggtatccaaagtactcac

SEQ ID NO: 4554297 - DNA, 25 bp, Homo sapien
tttcctcgggtatccaaagtactca

SEQ ID NO: 4554298 - DNA, 25 bp, Homo sapien
tcctcgggtatccaaagtactcacc

SEQ ID NO: 4554299 - DNA, 25 bp, Homo sapien
tctcctgttttcctcgggtatccaa

SEQ ID NO: 4554300 - DNA, 25 bp, Homo sapien
aagcttcaagagtggcacatcttac

SEQ ID NO: 4554301 - DNA, 25 bp, Homo sapien
gtaatctgcccatgttgtaacaagc

SEQ ID NO: 4554302 - DNA, 25 bp, Homo sapien
tcttacacatgtgcatggacacccc

SEQ ID NO: 4554303 - DNA, 25 bp, Homo sapien
ggacaccccatcatgacacttaaaa

SEQ ID NO: 4554304 - DNA, 25 bp, Homo sapien
gcagagctcaataatgtatcttgtg

SEQ ID NO: 4554305 - DNA, 25 bp, Homo sapien
accaccaactggtaatattattatt

SEQ ID NO: 4554306 - DNA, 25 bp, Homo sapien
ctgctaaaggattagtctgttagaa

SEQ ID NO: 4554307 - DNA, 25 bp, Homo sapien
ttagtaattcagataccaagagatt

SEQ ID NO: 4554308 - DNA, 25 bp, Homo sapien
cttcttggcaaggcctattccggct

SEQ ID NO: 4554309 - DNA, 25 bp, Homo sapien
gcctattccggctataactcttact

SEQ ID NO: 4554310 - DNA, 25 bp, Homo sapien
gcaaggcctattccggctataactc

SEQ ID NO: 4554311 - DNA, 25 bp, Homo sapien
ctcttactctcacaattcgtgaatt

SEQ ID NO: 4554312 - DNA, 25 bp, Homo sapien
caatcaatgtgtccatcgaaggaga

SEQ ID NO: 4554313 - DNA, 25 bp, Homo sapien
cctatagagagtagacgggcagaat

SEQ ID NO: 4554314 - DNA, 25 bp, Homo sapien
agtaatccatggtgacaaaaggctg

SEQ ID NO: 4554315 - DNA, 25 bp, Homo sapien
ggcccaagggagcattctggaatga

SEQ ID NO: 4554316 - DNA, 25 bp, Homo sapien
gctataaaatcggtaaagtatattc

SEQ ID NO: 4554317 - DNA, 25 bp, Homo sapien
attatacctcatgccctgacccacg

SEQ ID NO: 4554318 - DNA, 25 bp, Homo sapien
ccacgtgcctgatacatagtgttca

SEQ ID NO: 4554319 - DNA, 25 bp, Homo sapien
gaagatgtggaaatgagagcataac

SEQ ID NO: 4554320 - DNA, 25 bp, Homo sapien
acggcgttgcacagggatgctgcat

SEQ ID NO: 4554321 - DNA, 25 bp, Homo sapien
atggttggcatgctcgccagcacgg

SEQ ID NO: 4554322 - DNA, 25 bp, Homo sapien
gctgcatagagaatagcaatattcc

SEQ ID NO: 4554323 - DNA, 25 bp, Homo sapien
tcacaggccactacagaaaatgtct

SEQ ID NO: 4554324 - DNA, 25 bp, Homo sapien
tccataccgatagcggagactctga

SEQ ID NO: 4554325 - DNA, 25 bp, Homo sapien
caaactgcactctccataccgatag

SEQ ID NO: 4554326 - DNA, 25 bp, Homo sapien
gccaccaggggcatctattattctg

SEQ ID NO: 4554327 - DNA, 25 bp, Homo sapien
cctgctacttatgcactgttgtggc

SEQ ID NO: 4554328 - DNA, 25 bp, Homo sapien
gaaatctgcaattagcagggcctac

SEQ ID NO: 4554329 - DNA, 25 bp, Homo sapien
tttctttaagatcaactggctctgc

SEQ ID NO: 4554330 - DNA, 25 bp, Homo sapien
ttttctttaagatcaactggctctg

SEQ ID NO: 4554331 - DNA, 25 bp, Homo sapien
tgtgaatatagcagggaaagaaagt

SEQ ID NO: 4554332 - DNA, 25 bp, Homo sapien
ttgaagtcaactgcactgggcagtc

SEQ ID NO: 4554333 - DNA, 25 bp, Homo sapien
tgggttggacaccaccttgaagtca

SEQ ID NO: 4554334 - DNA, 25 bp, Homo sapien
caaggtcagcctgattgggttggac

SEQ ID NO: 4554335 - DNA, 25 bp, Homo sapien
gggtgtggacccgacaagcttgctc

SEQ ID NO: 4554336 - DNA, 25 bp, Homo sapien
gaaactgacaagtaaggcggcggcc

SEQ ID NO: 4554337 - DNA, 25 bp, Homo sapien
tgtggacccgacaagcttgctccct

SEQ ID NO: 4554338 - DNA, 25 bp, Homo sapien
actgacaagtaaggcggcggccgct

SEQ ID NO: 4554339 - DNA, 25 bp, Homo sapien
tgacagcagagcctccggtcgtggc

SEQ ID NO: 4554340 - DNA, 25 bp, Homo sapien
ccccaggctcgcgccgagggaggag

SEQ ID NO: 4554341 - DNA, 25 bp, Homo sapien
acagcagagcctccggtcgtggccg

SEQ ID NO: 4554342 - DNA, 25 bp, Homo sapien
gcgcgctccccaggctcgcgccgag

SEQ ID NO: 4554343 - DNA, 25 bp, Homo sapien
tgctgaataacccgaagggaagccc

SEQ ID NO: 4554344 - DNA, 25 bp, Homo sapien
ctgctgaataacccgaagggaagcc

SEQ ID NO: 4554345 - DNA, 25 bp, Homo sapien
aggagcccgaacacctccaccgcgc

SEQ ID NO: 4554346 - DNA, 25 bp, Homo sapien
cgaacacctccaccgcgcaagttgc

SEQ ID NO: 4554347 - DNA, 25 bp, Homo sapien
tccaggagcccgaacacctccaccg

SEQ ID NO: 4554348 - DNA, 25 bp, Homo sapien
agcccgaacacctccaccgcgcaag

SEQ ID NO: 4554349 - DNA, 25 bp, Homo sapien
gcggcgagcgggcactagcggcacc

SEQ ID NO: 4554350 - DNA, 25 bp, Homo sapien
tccagcaaaccggacgcgctcgccc

SEQ ID NO: 4554351 - DNA, 25 bp, Homo sapien
gagcgggcactagcggcacccggca

SEQ ID NO: 4554352 - DNA, 25 bp, Homo sapien
ggaggcgctccctcagcgacagcag

SEQ ID NO: 4554353 - DNA, 25 bp, Homo sapien
tcggcctctgactagacgcctggga

SEQ ID NO: 4554354 - DNA, 25 bp, Homo sapien
tcccaaacggaaaatcatagcgctt

SEQ ID NO: 4554355 - DNA, 25 bp, Homo sapien
catagcgctttcttgtcggttaagg

SEQ ID NO: 4554356 - DNA, 25 bp, Homo sapien
gggaatccgtgagcttaatccccgc

SEQ ID NO: 4554357 - DNA, 25 bp, Homo sapien
agtaacaatccaatctccaggctga

SEQ ID NO: 4554358 - DNA, 25 bp, Homo sapien
ttagctgggcgttgatccgcagcac

SEQ ID NO: 4554359 - DNA, 25 bp, Homo sapien
ctaggacctcctgtagaataactcc

SEQ ID NO: 4554360 - DNA, 25 bp, Homo sapien
taactcctcctgtggaataactcct

SEQ ID NO: 4554361 - DNA, 25 bp, Homo sapien
tctgtgggatttgtgggttaagaat

SEQ ID NO: 4554362 - DNA, 25 bp, Homo sapien
aaagccatgagagcattaatttgtt

SEQ ID NO: 4554363 - DNA, 25 bp, Homo sapien
atctgaaaatattgtgtgcccttct

SEQ ID NO: 4554364 - DNA, 25 bp, Homo sapien
tgaaaatattgtgtgcccttctatt

SEQ ID NO: 4554365 - DNA, 25 bp, Homo sapien
gctgtttcttattgcatatgactca

SEQ ID NO: 4554366 - DNA, 25 bp, Homo sapien
tatctgtaccattaatatgccatag

SEQ ID NO: 4554367 - DNA, 25 bp, Homo sapien
tatgccatagttcaaaacctttaag

SEQ ID NO: 4554368 - DNA, 25 bp, Homo sapien
tctgcaatagataaaccatatctgt

SEQ ID NO: 4554369 - DNA, 25 bp, Homo sapien
gaggaaaatctgtcatcttaagggt

SEQ ID NO: 4554370 - DNA, 25 bp, Homo sapien
gctagatgttggatacttgaggtat

SEQ ID NO: 4554371 - DNA, 25 bp, Homo sapien
ggtaatcaatttgcatggctagatg

SEQ ID NO: 4554372 - DNA, 25 bp, Homo sapien
tataagaagggaaacctgcatgttg

SEQ ID NO: 4554373 - DNA, 25 bp, Homo sapien
gtgttacatgcttgattatgaaagc

SEQ ID NO: 4554374 - DNA, 25 bp, Homo sapien
ttctgtgggcatcctaaacgtaccg

SEQ ID NO: 4554375 - DNA, 25 bp, Homo sapien
tgttacatgcttgattatgaaagca

SEQ ID NO: 4554376 - DNA, 25 bp, Homo sapien
tgtgggcatcctaaacgtaccgcat

SEQ ID NO: 4554377 - DNA, 25 bp, Homo sapien
ggatggccatacttcactcctacat

SEQ ID NO: 4554378 - DNA, 25 bp, Homo sapien
gatggccatacttcactcctacata

SEQ ID NO: 4554379 - DNA, 25 bp, Homo sapien
aaggatggccatacttcactcctac

SEQ ID NO: 4554380 - DNA, 25 bp, Homo sapien
ttaaggatggccatacttcactcct

SEQ ID NO: 4554381 - DNA, 25 bp, Homo sapien
tacaactgtacaggtccatagcaac

SEQ ID NO: 4554382 - DNA, 25 bp, Homo sapien
tgatttacaactgtacaggtccata

SEQ ID NO: 4554383 - DNA, 25 bp, Homo sapien
ccatagcaacagatccccgtcttgg

SEQ ID NO: 4554384 - DNA, 25 bp, Homo sapien
tgtacaggtccatagcaacagatcc

SEQ ID NO: 4554385 - DNA, 25 bp, Homo sapien
tgttgttctcaaccagccattgagg

SEQ ID NO: 4554386 - DNA, 25 bp, Homo sapien
ggagttcaagttgtgttaacagtga

SEQ ID NO: 4554387 - DNA, 25 bp, Homo sapien
tgaggatctaaaggccccaggacac

SEQ ID NO: 4554388 - DNA, 25 bp, Homo sapien
caccattgacaagaggcaggagtgg

SEQ ID NO: 4554389 - DNA, 25 bp, Homo sapien
taggcgctcttaagttggaagccat

SEQ ID NO: 4554390 - DNA, 25 bp, Homo sapien
tgcacatagcaccagcgggatggaa

SEQ ID NO: 4554391 - DNA, 25 bp, Homo sapien
catgattttggcacgtgactttgga

SEQ ID NO: 4554392 - DNA, 25 bp, Homo sapien
gggcatttgccactataagcagctg

SEQ ID NO: 4554393 - DNA, 25 bp, Homo sapien
cccgtaacaagcaattccccgagat

SEQ ID NO: 4554394 - DNA, 25 bp, Homo sapien
taacaagcaattccccgagatttct

SEQ ID NO: 4554395 - DNA, 25 bp, Homo sapien
acaagcaattccccgagatttctaa

SEQ ID NO: 4554396 - DNA, 25 bp, Homo sapien
cgtaacaagcaattccccgagattt

SEQ ID NO: 4554397 - DNA, 25 bp, Homo sapien
agtgagattttttcccattggctac

SEQ ID NO: 4554398 - DNA, 25 bp, Homo sapien
ccagtgagattttttcccattggct

SEQ ID NO: 4554399 - DNA, 25 bp, Homo sapien
cagtgagattttttcccattggcta

SEQ ID NO: 4554400 - DNA, 25 bp, Homo sapien
cctctgctgacatgatggtataaat

SEQ ID NO: 4554401 - DNA, 25 bp, Homo sapien
tcctctgctgacatgatggtataaa

SEQ ID NO: 4554402 - DNA, 25 bp, Homo sapien
ggtataaattctgcgaggatctgga

SEQ ID NO: 4554403 - DNA, 25 bp, Homo sapien
tgatggtataaattctgcgaggatc

SEQ ID NO: 4554404 - DNA, 25 bp, Homo sapien
ctgttagtctgcattcagcgcgcca

SEQ ID NO: 4554405 - DNA, 25 bp, Homo sapien
tgatttccctatacccgggaggtca

SEQ ID NO: 4554406 - DNA, 25 bp, Homo sapien
ctggtgatttccctatacccgggag

SEQ ID NO: 4554407 - DNA, 25 bp, Homo sapien
ggtatagcctcctatagcctggaac

SEQ ID NO: 4554408 - DNA, 25 bp, Homo sapien
cttagtgtagacctccggttggtat

SEQ ID NO: 4554409 - DNA, 25 bp, Homo sapien
tcacgtgctggcaaagtgttcagat

SEQ ID NO: 4554410 - DNA, 25 bp, Homo sapien
tgacaagccagttacctcattcggc

SEQ ID NO: 4554411 - DNA, 25 bp, Homo sapien
tcggctgatgcaatcctggaatttc

SEQ ID NO: 4554412 - DNA, 25 bp, Homo sapien
ggcaaagtgttcagatgacaagcca

SEQ ID NO: 4554413 - DNA, 25 bp, Homo sapien
tagtgatcagattgtgtgtaagttt

SEQ ID NO: 4554414 - DNA, 25 bp, Homo sapien
aagcccacgactgctgtgagctgtg

SEQ ID NO: 4554415 - DNA, 25 bp, Homo sapien
cactcgtggaaagcccacgactgct

SEQ ID NO: 4554416 - DNA, 25 bp, Homo sapien
gagtcccactcgtggaaagcccacg

SEQ ID NO: 4554417 - DNA, 25 bp, Homo sapien
catgcatttgcagctttcgtattcc

SEQ ID NO: 4554418 - DNA, 25 bp, Homo sapien
cttcatgcatttgcagctttcgtat

SEQ ID NO: 4554419 - DNA, 25 bp, Homo sapien
gcatttgcagctttcgtattccaat

SEQ ID NO: 4554420 - DNA, 25 bp, Homo sapien
gcagctttcgtattccaattcctcc

SEQ ID NO: 4554421 - DNA, 25 bp, Homo sapien
cagtaaatcttttacaactgcctcg

SEQ ID NO: 4554422 - DNA, 25 bp, Homo sapien
aaagtgggcttgattctgcagtaaa

SEQ ID NO: 4554423 - DNA, 25 bp, Homo sapien
gtgggcttgattctgcagtaaatct

SEQ ID NO: 4554424 - DNA, 25 bp, Homo sapien
ctaaaagtgggcttgattctgcagt

SEQ ID NO: 4554425 - DNA, 25 bp, Homo sapien
cagaagggtatagcctaacttccgt

SEQ ID NO: 4554426 - DNA, 25 bp, Homo sapien
gaagacagaagggtatagcctaact

SEQ ID NO: 4554427 - DNA, 25 bp, Homo sapien
tccgaagacagaagggtatagccta

SEQ ID NO: 4554428 - DNA, 25 bp, Homo sapien
tatagcctaacttccgtaaggtata

SEQ ID NO: 4554429 - DNA, 25 bp, Homo sapien
tcagcatgtgtctttaacatgaagt

SEQ ID NO: 4554430 - DNA, 25 bp, Homo sapien
tatcttgttgctcaatcatcctcag

SEQ ID NO: 4554431 - DNA, 25 bp, Homo sapien
cagtcaggactagttgggcatcttc

SEQ ID NO: 4554432 - DNA, 25 bp, Homo sapien
catccagaggtaagcagtcaggact

SEQ ID NO: 4554433 - DNA, 25 bp, Homo sapien
tcacatttgcattccagccagcaga

SEQ ID NO: 4554434 - DNA, 25 bp, Homo sapien
gccagcagagaggaaggacaagaac

SEQ ID NO: 4554435 - DNA, 25 bp, Homo sapien
catttgcattccagccagcagagag

SEQ ID NO: 4554436 - DNA, 25 bp, Homo sapien
ccagcagagaggaaggacaagaaca

SEQ ID NO: 4554437 - DNA, 25 bp, Homo sapien
cagatgcagccttttggtcagatgg

SEQ ID NO: 4554438 - DNA, 25 bp, Homo sapien
tgtgctcagctaaaaatcaaggact

SEQ ID NO: 4554439 - DNA, 25 bp, Homo sapien
gctatagtgacctcattgcatcctg

SEQ ID NO: 4554440 - DNA, 25 bp, Homo sapien
taagtatccgcctctgctatagtga

SEQ ID NO: 4554441 - DNA, 25 bp, Homo sapien
aaacataaatatgactagagtatac

SEQ ID NO: 4554442 - DNA, 25 bp, Homo sapien
gatttaaacataaatatgactagag

SEQ ID NO: 4554443 - DNA, 25 bp, Homo sapien
gtgatttaaacataaatatgactag

SEQ ID NO: 4554444 - DNA, 25 bp, Homo sapien
tttattttgatgacattttaagtga

SEQ ID NO: 4554445 - DNA, 25 bp, Homo sapien
attctcctaatacatcagggtattt

SEQ ID NO: 4554446 - DNA, 25 bp, Homo sapien
tcttcattctcctaatacatcaggg

SEQ ID NO: 4554447 - DNA, 25 bp, Homo sapien
tcattctcctaatacatcagggtat

SEQ ID NO: 4554448 - DNA, 25 bp, Homo sapien
aatcttcattctcctaatacatcag

SEQ ID NO: 4554449 - DNA, 25 bp, Homo sapien
gaaattaagataatcctggctcttc

SEQ ID NO: 4554450 - DNA, 25 bp, Homo sapien
gaagcaaccagatcatacaactgca

SEQ ID NO: 4554451 - DNA, 25 bp, Homo sapien
tacctccaccagttaatctctgaag

SEQ ID NO: 4554452 - DNA, 25 bp, Homo sapien
ctgggtctaatgcaaagaaatactc

SEQ ID NO: 4554453 - DNA, 25 bp, Homo sapien
catgtcattgagcactgaggatcct

SEQ ID NO: 4554454 - DNA, 25 bp, Homo sapien
gtataacatctgagctgtggcagcc

SEQ ID NO: 4554455 - DNA, 25 bp, Homo sapien
cttactggttgactctatgcactgg

SEQ ID NO: 4554456 - DNA, 25 bp, Homo sapien
taattggccttaggatgagcctttg

SEQ ID NO: 4554457 - DNA, 25 bp, Homo sapien
aaagagaactgaaatgctaccgcaa

SEQ ID NO: 4554458 - DNA, 25 bp, Homo sapien
taaacaagggattagaatggcctca

SEQ ID NO: 4554459 - DNA, 25 bp, Homo sapien
taagagatgtgcctaccacaggttc

SEQ ID NO: 4554460 - DNA, 25 bp, Homo sapien
gaaagtttgctggacgaattcaacc

SEQ ID NO: 4554461 - DNA, 25 bp, Homo sapien
taagaactgaggcaagtctaaccat

SEQ ID NO: 4554462 - DNA, 25 bp, Homo sapien
gaagccccagaaagtcctacagaga

SEQ ID NO: 4554463 - DNA, 25 bp, Homo sapien
tagtatttctgctgcgggaggcact

SEQ ID NO: 4554464 - DNA, 25 bp, Homo sapien
gatcgactgctcttgtaacagctgg

SEQ ID NO: 4554465 - DNA, 25 bp, Homo sapien
tcttgtccctgctgacgacctggat

SEQ ID NO: 4554466 - DNA, 25 bp, Homo sapien
cagtattagtgagatcagatgctcc

SEQ ID NO: 4554467 - DNA, 25 bp, Homo sapien
ccaacatttcaacagtaggatggtc

SEQ ID NO: 4554468 - DNA, 25 bp, Homo sapien
gaagacaacctgatatcgctagaga

SEQ ID NO: 4554469 - DNA, 25 bp, Homo sapien
tagatactggatagagggtgcttcc

SEQ ID NO: 4554470 - DNA, 25 bp, Homo sapien
gaaaaattgatctgaccggtgctat

SEQ ID NO: 4554471 - DNA, 25 bp, Homo sapien
tttgcatcggtttcacaggactact

SEQ ID NO: 4554472 - DNA, 25 bp, Homo sapien
tagcttgggagaataccatggccag

SEQ ID NO: 4554473 - DNA, 25 bp, Homo sapien
tgtggagtaccaatgggtgtatgtc

SEQ ID NO: 4554474 - DNA, 25 bp, Homo sapien
ctgctgcagttagaatgtggagtac

SEQ ID NO: 4554475 - DNA, 25 bp, Homo sapien
taccaatgggtgtatgtcggctact

SEQ ID NO: 4554476 - DNA, 25 bp, Homo sapien
tgtatgtcggctacttcctaaagca

SEQ ID NO: 4554477 - DNA, 25 bp, Homo sapien
agcaagggctctcccgtgacagact

SEQ ID NO: 4554478 - DNA, 25 bp, Homo sapien
ttgctgtggattggatgatagaagt

SEQ ID NO: 4554479 - DNA, 25 bp, Homo sapien
ccattgctgtggattggatgataga

SEQ ID NO: 4554480 - DNA, 25 bp, Homo sapien
tgtgggtgtgtggattggagtgcca

SEQ ID NO: 4554481 - DNA, 25 bp, Homo sapien
tccagcaatcatttcagatgtcggg

SEQ ID NO: 4554482 - DNA, 25 bp, Homo sapien
gggtcattcccaaacagttgccgta

SEQ ID NO: 4554483 - DNA, 25 bp, Homo sapien
gataacaagggcagaggaattcaag

SEQ ID NO: 4554484 - DNA, 25 bp, Homo sapien
gacatttactgataccttgctagga

SEQ ID NO: 4554485 - DNA, 25 bp, Homo sapien
tgagcacctgctgttgaaccttctg

SEQ ID NO: 4554486 - DNA, 25 bp, Homo sapien
aactcatgtgtgaagcgggtacaac

SEQ ID NO: 4554487 - DNA, 25 bp, Homo sapien
tttgccgtcagaagaactcattgga

SEQ ID NO: 4554488 - DNA, 25 bp, Homo sapien
catctgatgatgtttcgggttccac

SEQ ID NO: 4554489 - DNA, 25 bp, Homo sapien
gaagttaccaattgcctagtccgct

SEQ ID NO: 4554490 - DNA, 25 bp, Homo sapien
ttaggaagattagtcactccattgc

SEQ ID NO: 4554491 - DNA, 25 bp, Homo sapien
cagctgccacaacgataccaatagg

SEQ ID NO: 4554492 - DNA, 25 bp, Homo sapien
aagtcttcacctgaggctgaaagga

SEQ ID NO: 4554493 - DNA, 25 bp, Homo sapien
ctggattttccgttgcaactgctgt

SEQ ID NO: 4554494 - DNA, 25 bp, Homo sapien
ctgtaggtataaaagcagaaggctg

SEQ ID NO: 4554495 - DNA, 25 bp, Homo sapien
tgactttttacaaggaagcgggcta

SEQ ID NO: 4554496 - DNA, 25 bp, Homo sapien
caagacggcaagcagaagagataac

SEQ ID NO: 4554497 - DNA, 25 bp, Homo sapien
tccaagacggtgtcaaatggttggc

SEQ ID NO: 4554498 - DNA, 25 bp, Homo sapien
gagctgccattgacttggtgcctat

SEQ ID NO: 4554499 - DNA, 25 bp, Homo sapien
gcacagtcgctaggcttaaccaaat

SEQ ID NO: 4554500 - DNA, 25 bp, Homo sapien
gttttgtgaaagtcaaggttgggca

SEQ ID NO: 4554501 - DNA, 25 bp, Homo sapien
ttttgtgaaagtcaaggttgggcag

SEQ ID NO: 4554502 - DNA, 25 bp, Homo sapien
atttagatttgcctcttgtgcccaa

SEQ ID NO: 4554503 - DNA, 25 bp, Homo sapien
ttagatttgcctcttgtgcccaaac

SEQ ID NO: 4554504 - DNA, 25 bp, Homo sapien
tttagatttgcctcttgtgcccaaa

SEQ ID NO: 4554505 - DNA, 25 bp, Homo sapien
caaaatcagcagcacttaatggatg

SEQ ID NO: 4554506 - DNA, 25 bp, Homo sapien
gcacttaatggatggtaaccaagat

SEQ ID NO: 4554507 - DNA, 25 bp, Homo sapien
cgtgccttcatgtttggaaagacgt

SEQ ID NO: 4554508 - DNA, 25 bp, Homo sapien
gacgtgccttcatgtttggaaagac

SEQ ID NO: 4554509 - DNA, 25 bp, Homo sapien
cattaaacgttaaggacttcctcat

SEQ ID NO: 4554510 - DNA, 25 bp, Homo sapien
tacaaaaggatagtaggcaaacatt

SEQ ID NO: 4554511 - DNA, 25 bp, Homo sapien
tgtagaagtctttcgcatccttggt

SEQ ID NO: 4554512 - DNA, 25 bp, Homo sapien
catccttggttaagcgtattctgag

SEQ ID NO: 4554513 - DNA, 25 bp, Homo sapien
tgtgtggtggattccctgaaggacc

SEQ ID NO: 4554514 - DNA, 25 bp, Homo sapien
ggcaaatgtaaaccttactttatca

SEQ ID NO: 4554515 - DNA, 25 bp, Homo sapien
tattcccagtgcagtcttgtgttca

SEQ ID NO: 4554516 - DNA, 25 bp, Homo sapien
ggcaggcataagacatatagaaaac

SEQ ID NO: 4554517 - DNA, 25 bp, Homo sapien
ctgctcctcaaagacattctccatc

SEQ ID NO: 4554518 - DNA, 25 bp, Homo sapien
ttctctctgctcctcaaagacattc

SEQ ID NO: 4554519 - DNA, 25 bp, Homo sapien
tctctgctcctcaaagacattctcc

SEQ ID NO: 4554520 - DNA, 25 bp, Homo sapien
tctgctcctcaaagacattctccat

SEQ ID NO: 4554521 - DNA, 25 bp, Homo sapien
tggatcacatgcactctcagtttta

SEQ ID NO: 4554522 - DNA, 25 bp, Homo sapien
gcactctcagttttaacctttgtaa

SEQ ID NO: 4554523 - DNA, 25 bp, Homo sapien
tctcttgatcatttcagatattttt

SEQ ID NO: 4554524 - DNA, 25 bp, Homo sapien
tctagctccattatgtttcttttgg

SEQ ID NO: 4554525 - DNA, 25 bp, Homo sapien
tttgttgtgcccgactagatgacat

SEQ ID NO: 4554526 - DNA, 25 bp, Homo sapien
ttcctctagggtattccgaatccag

SEQ ID NO: 4554527 - DNA, 25 bp, Homo sapien
tgtttgggcagtgaagtctccggat

SEQ ID NO: 4554528 - DNA, 25 bp, Homo sapien
ccaggaaaaggcatgcatttgttgt

SEQ ID NO: 4554529 - DNA, 25 bp, Homo sapien
gtagagtttctctaggtctgtaaac

SEQ ID NO: 4554530 - DNA, 25 bp, Homo sapien
agagtttctctaggtctgtaaactt

SEQ ID NO: 4554531 - DNA, 25 bp, Homo sapien
tagagtttctctaggtctgtaaact

SEQ ID NO: 4554532 - DNA, 25 bp, Homo sapien
atgcccagcctaaaaactctaattt

SEQ ID NO: 4554533 - DNA, 25 bp, Homo sapien
ctaatttttaacagagatttgcaca

SEQ ID NO: 4554534 - DNA, 25 bp, Homo sapien
aatttttaacagagatttgcacatt

SEQ ID NO: 4554535 - DNA, 25 bp, Homo sapien
ttttaacagagatttgcacatttgg

SEQ ID NO: 4554536 - DNA, 25 bp, Homo sapien
tgagatgcacctgagacagtcgacc

SEQ ID NO: 4554537 - DNA, 25 bp, Homo sapien
tgcacctgagacagtcgaccttggt

SEQ ID NO: 4554538 - DNA, 25 bp, Homo sapien
agcaatctgagatgcacctgagaca

SEQ ID NO: 4554539 - DNA, 25 bp, Homo sapien
cctgagacagtcgaccttggtcggg

SEQ ID NO: 4554540 - DNA, 25 bp, Homo sapien
tatccttaagatggtcatacagcaa

SEQ ID NO: 4554541 - DNA, 25 bp, Homo sapien
gatgtctatatcaagcagtaagcta

SEQ ID NO: 4554542 - DNA, 25 bp, Homo sapien
cacccagtaactgattagcagagta

SEQ ID NO: 4554543 - DNA, 25 bp, Homo sapien
ggttaataagcaagtctcctactga

SEQ ID NO: 4554544 - DNA, 25 bp, Homo sapien
aatacactaataattatgcttgaat

SEQ ID NO: 4554545 - DNA, 25 bp, Homo sapien
tcttcagttgagttaccatatatgg

SEQ ID NO: 4554546 - DNA, 25 bp, Homo sapien
gttgagttaccatatatggagggaa

SEQ ID NO: 4554547 - DNA, 25 bp, Homo sapien
cagttgagttaccatatatggaggg

SEQ ID NO: 4554548 - DNA, 25 bp, Homo sapien
taagggctacctactataaacaatg

SEQ ID NO: 4554549 - DNA, 25 bp, Homo sapien
tataatcaagcctggagaaattcca

SEQ ID NO: 4554550 - DNA, 25 bp, Homo sapien
gctggatgacctagagaatttactg

SEQ ID NO: 4554551 - DNA, 25 bp, Homo sapien
actgtattatcgtgaggatttgccc

SEQ ID NO: 4554552 - DNA, 25 bp, Homo sapien
ttgcctcaggagtacaaacactgtg

SEQ ID NO: 4554553 - DNA, 25 bp, Homo sapien
gacgtaactgttccacttagaccat

SEQ ID NO: 4554554 - DNA, 25 bp, Homo sapien
caagcttttcagtaccagggaccag

SEQ ID NO: 4554555 - DNA, 25 bp, Homo sapien
tttttagagaacacagcttaggctg

SEQ ID NO: 4554556 - DNA, 25 bp, Homo sapien
tcttggatggctttagccaggtgat

SEQ ID NO: 4554557 - DNA, 25 bp, Homo sapien
gatggctttagccaggtgattccaa

SEQ ID NO: 4554558 - DNA, 25 bp, Homo sapien
ggctttagccaggtgattccaaact

SEQ ID NO: 4554559 - DNA, 25 bp, Homo sapien
agccaggtgattccaaactttctcc

SEQ ID NO: 4554560 - DNA, 25 bp, Homo sapien
tgaagaatcttccacaccataaggc

SEQ ID NO: 4554561 - DNA, 25 bp, Homo sapien
caaaaatagagcaaccaaggagtca

SEQ ID NO: 4554562 - DNA, 25 bp, Homo sapien
taaactaagtagagcaggagcaaag

SEQ ID NO: 4554563 - DNA, 25 bp, Homo sapien
ttcaagtattcggtagccacacatg

SEQ ID NO: 4554564 - DNA, 25 bp, Homo sapien
aatgcagtccactttagattgtaca

SEQ ID NO: 4554565 - DNA, 25 bp, Homo sapien
gtccactttagattgtacagttttg

SEQ ID NO: 4554566 - DNA, 25 bp, Homo sapien
gcagtccactttagattgtacagtt

SEQ ID NO: 4554567 - DNA, 25 bp, Homo sapien
caaaatgcagtccactttagattgt

SEQ ID NO: 4554568 - DNA, 25 bp, Homo sapien
ggcttgctcccttacttttctgtgc

SEQ ID NO: 4554569 - DNA, 25 bp, Homo sapien
ttcaaaagtgctatctgcctggctt

SEQ ID NO: 4554570 - DNA, 25 bp, Homo sapien
tgcgcccggacagttctaatagtat

SEQ ID NO: 4554571 - DNA, 25 bp, Homo sapien
gtttgtccaacatccccactagctt

SEQ ID NO: 4554572 - DNA, 25 bp, Homo sapien
gaactaacacctgaatatactttga

SEQ ID NO: 4554573 - DNA, 25 bp, Homo sapien
ccatttagtggatgtttcagtttcc

SEQ ID NO: 4554574 - DNA, 25 bp, Homo sapien
caaaatcatgttctactaagagtct

SEQ ID NO: 4554575 - DNA, 25 bp, Homo sapien
gttctgcttcagataacgacaagtt

SEQ ID NO: 4554576 - DNA, 25 bp, Homo sapien
tcccaaagtgcactagtagaatttt

SEQ ID NO: 4554577 - DNA, 25 bp, Homo sapien
caaagtgcactagtagaatttttat

SEQ ID NO: 4554578 - DNA, 25 bp, Homo sapien
ccaaagtgcactagtagaattttta

SEQ ID NO: 4554579 - DNA, 25 bp, Homo sapien
cccaaagtgcactagtagaattttt

SEQ ID NO: 4554580 - DNA, 25 bp, Homo sapien
caacaatacaccagtaggaggctta

SEQ ID NO: 4554581 - DNA, 25 bp, Homo sapien
taaatcagaccccatcgaaataaga

SEQ ID NO: 4554582 - DNA, 25 bp, Homo sapien
ctccatagtaaagacaggtaactca

SEQ ID NO: 4554583 - DNA, 25 bp, Homo sapien
gatgttcaaggaaccaagccaccaa

SEQ ID NO: 4554584 - DNA, 25 bp, Homo sapien
ccaacaggaatcaaactagatgtcc

SEQ ID NO: 4554585 - DNA, 25 bp, Homo sapien
aatattatactgagccatataaaac

SEQ ID NO: 4554586 - DNA, 25 bp, Homo sapien
aataaacgctttgtggcatagtcac

SEQ ID NO: 4554587 - DNA, 25 bp, Homo sapien
ctttgtggcatagtcacacaatgga

SEQ ID NO: 4554588 - DNA, 25 bp, Homo sapien
catcagctttttcaaggatgggctg

SEQ ID NO: 4554589 - DNA, 25 bp, Homo sapien
cagacttcttgccaagcttcttctc

SEQ ID NO: 4554590 - DNA, 25 bp, Homo sapien
cagcccaacgtaatctagaagctca

SEQ ID NO: 4554591 - DNA, 25 bp, Homo sapien
cagaatccagcccaacgtaatctag

SEQ ID NO: 4554592 - DNA, 25 bp, Homo sapien
ttttgctcaagtttaccaaagattc

SEQ ID NO: 4554593 - DNA, 25 bp, Homo sapien
tcaaatgtctttcgggtggtcactg

SEQ ID NO: 4554594 - DNA, 25 bp, Homo sapien
tgttgaatcctgagacagctgacaa

SEQ ID NO: 4554595 - DNA, 25 bp, Homo sapien
ggttgagtaaatggaggccagcaaa

SEQ ID NO: 4554596 - DNA, 25 bp, Homo sapien
tatgcttgtaatttgcaaagaggaa

SEQ ID NO: 4554597 - DNA, 25 bp, Homo sapien
cttgtaatttgcaaagaggaagtgc

SEQ ID NO: 4554598 - DNA, 25 bp, Homo sapien
tgcttgtaatttgcaaagaggaagt

SEQ ID NO: 4554599 - DNA, 25 bp, Homo sapien
ctatgcttgtaatttgcaaagagga

SEQ ID NO: 4554600 - DNA, 25 bp, Homo sapien
aacactactgtgtggccggtcactg

SEQ ID NO: 4554601 - DNA, 25 bp, Homo sapien
aatggcctctaccactaggtctgtg

SEQ ID NO: 4554602 - DNA, 25 bp, Homo sapien
gatatgctgcttagggttttctcca

SEQ ID NO: 4554603 - DNA, 25 bp, Homo sapien
gactacggatattgcatctgtgctg

SEQ ID NO: 4554604 - DNA, 25 bp, Homo sapien
gcccaaggttgtggacaaggaagac

SEQ ID NO: 4554605 - DNA, 25 bp, Homo sapien
tgatgatttttcttgcccaaggttg

SEQ ID NO: 4554606 - DNA, 25 bp, Homo sapien
gacaaagagtgcatgaactgcctgg

SEQ ID NO: 4554607 - DNA, 25 bp, Homo sapien
tggacaaggaagacaaagagtgcat

SEQ ID NO: 4554608 - DNA, 25 bp, Homo sapien
tagggcagtaaagggttcagtatcc

SEQ ID NO: 4554609 - DNA, 25 bp, Homo sapien
tgtagtcctccacttaaacccaaga

SEQ ID NO: 4554610 - DNA, 25 bp, Homo sapien
ataaagtcgccaagttcaatgtcct

SEQ ID NO: 4554611 - DNA, 25 bp, Homo sapien
taatgggaagactacggactatacc

SEQ ID NO: 4554612 - DNA, 25 bp, Homo sapien
agcctggcctgatcacgaaccttaa

SEQ ID NO: 4554613 - DNA, 25 bp, Homo sapien
catggatcatcttgagaaactatta

SEQ ID NO: 4554614 - DNA, 25 bp, Homo sapien
tgagagtgggttgaagagctatccc

SEQ ID NO: 4554615 - DNA, 25 bp, Homo sapien
gagctatcccatacatcatttccca

SEQ ID NO: 4554616 - DNA, 25 bp, Homo sapien
tcctgtaacagactcaagctggcta

SEQ ID NO: 4554617 - DNA, 25 bp, Homo sapien
tgtagtctgtagataccattcatca

SEQ ID NO: 4554618 - DNA, 25 bp, Homo sapien
gataatcaaataacttgacttccct

SEQ ID NO: 4554619 - DNA, 25 bp, Homo sapien
gattttctaatgaaccgactttgcc

SEQ ID NO: 4554620 - DNA, 25 bp, Homo sapien
agttctgagtttgtataagattaga

SEQ ID NO: 4554621 - DNA, 25 bp, Homo sapien
gaattatttgttcctagaatcttgg

SEQ ID NO: 4554622 - DNA, 25 bp, Homo sapien
gggctccaaaatatcaagagattgt

SEQ ID NO: 4554623 - DNA, 25 bp, Homo sapien
gaatcttgggtagatttcacttaca

SEQ ID NO: 4554624 - DNA, 25 bp, Homo sapien
tccttttcttgacagccttaccagc

SEQ ID NO: 4554625 - DNA, 25 bp, Homo sapien
taccatggattgtcatttaggttga

SEQ ID NO: 4554626 - DNA, 25 bp, Homo sapien
tcttgacagccttaccagcatcttt

SEQ ID NO: 4554627 - DNA, 25 bp, Homo sapien
atatggtagttccgtttacagttct

SEQ ID NO: 4554628 - DNA, 25 bp, Homo sapien
aatttaagttccttacagactctgg

SEQ ID NO: 4554629 - DNA, 25 bp, Homo sapien
ccaccgcacctagccaaatgttttt

SEQ ID NO: 4554630 - DNA, 25 bp, Homo sapien
caccgcacctagccaaatgtttttt

SEQ ID NO: 4554631 - DNA, 25 bp, Homo sapien
ttctgcttaatttaagttccttaca

SEQ ID NO: 4554632 - DNA, 25 bp, Homo sapien
gctgttgtttccctatgtatatcac

SEQ ID NO: 4554633 - DNA, 25 bp, Homo sapien
tgagcctatttaccagagacaacat

SEQ ID NO: 4554634 - DNA, 25 bp, Homo sapien
gtttgctgacctccaatgatatgtg

SEQ ID NO: 4554635 - DNA, 25 bp, Homo sapien
tagagctctactttggctgatattc

SEQ ID NO: 4554636 - DNA, 25 bp, Homo sapien
caggaagccaaagactgggcactta

SEQ ID NO: 4554637 - DNA, 25 bp, Homo sapien
aagccaaagactgggcacttaattt

SEQ ID NO: 4554638 - DNA, 25 bp, Homo sapien
ggaagccaaagactgggcacttaat

SEQ ID NO: 4554639 - DNA, 25 bp, Homo sapien
gaagccaaagactgggcacttaatt

SEQ ID NO: 4554640 - DNA, 25 bp, Homo sapien
cttcaaatagcttgtttattagaac

SEQ ID NO: 4554641 - DNA, 25 bp, Homo sapien
tcaaatagcttgtttattagaacag

SEQ ID NO: 4554642 - DNA, 25 bp, Homo sapien
aaatagcttgtttattagaacagca

SEQ ID NO: 4554643 - DNA, 25 bp, Homo sapien
caaatagcttgtttattagaacagc

SEQ ID NO: 4554644 - DNA, 25 bp, Homo sapien
tgactgcaatcaaattacggaagtg

SEQ ID NO: 4554645 - DNA, 25 bp, Homo sapien
tctaagcaagatgtcactgaagtga

SEQ ID NO: 4554646 - DNA, 25 bp, Homo sapien
tgtagactactgattctgcaagtga

SEQ ID NO: 4554647 - DNA, 25 bp, Homo sapien
gaaaggccagtctaaactactgaaa

SEQ ID NO: 4554648 - DNA, 25 bp, Homo sapien
cgatagatcttatatgaccgtttta

SEQ ID NO: 4554649 - DNA, 25 bp, Homo sapien
ctttccataaagtgggcaaaacgat

SEQ ID NO: 4554650 - DNA, 25 bp, Homo sapien
taaagtgggcaaaacgatagatctt

SEQ ID NO: 4554651 - DNA, 25 bp, Homo sapien
caaaacgatagatcttatatgaccg

SEQ ID NO: 4554652 - DNA, 25 bp, Homo sapien
catgcaagcttgttaacctagagtt

SEQ ID NO: 4554653 - DNA, 25 bp, Homo sapien
cactaaactacgaagacactgagag

SEQ ID NO: 4554654 - DNA, 25 bp, Homo sapien
gagtaagggtaagaaacatgcaagc

SEQ ID NO: 4554655 - DNA, 25 bp, Homo sapien
ggaccttttgtctatggagtaagaa

SEQ ID NO: 4554656 - DNA, 25 bp, Homo sapien
tacgcacagtatctgtttggtgaaa

SEQ ID NO: 4554657 - DNA, 25 bp, Homo sapien
tattaatattcttacgcacagtatc

SEQ ID NO: 4554658 - DNA, 25 bp, Homo sapien
gaaaattcacaatacacttcttcct

SEQ ID NO: 4554659 - DNA, 25 bp, Homo sapien
cagtatctgtttggtgaaaattcac

SEQ ID NO: 4554660 - DNA, 25 bp, Homo sapien
gcggctgttgttgttcctctgccat

SEQ ID NO: 4554661 - DNA, 25 bp, Homo sapien
tcttgtgttgcagcgcgctggcctc

SEQ ID NO: 4554662 - DNA, 25 bp, Homo sapien
ggcggctgttgttgttcctctgcca

SEQ ID NO: 4554663 - DNA, 25 bp, Homo sapien
tgatcttgtgttgcagcgcgctggc

SEQ ID NO: 4554664 - DNA, 25 bp, Homo sapien
ctgccgcctggggaacatcaccggg

SEQ ID NO: 4554665 - DNA, 25 bp, Homo sapien
gctggataagctaggcctttacccc

SEQ ID NO: 4554666 - DNA, 25 bp, Homo sapien
tcgagtgagtcgctttcgcctgccg

SEQ ID NO: 4554667 - DNA, 25 bp, Homo sapien
cttcaccgcgggagaggcatggcgg

SEQ ID NO: 4554668 - DNA, 25 bp, Homo sapien
ggatttggcggccaagccttccttc

SEQ ID NO: 4554669 - DNA, 25 bp, Homo sapien
agaagaacggttgctcagggatttg

SEQ ID NO: 4554670 - DNA, 25 bp, Homo sapien
ttgctcagggatttggcggccaagc

SEQ ID NO: 4554671 - DNA, 25 bp, Homo sapien
gagatgggggcgtttgaagacgaag

SEQ ID NO: 4554672 - DNA, 25 bp, Homo sapien
cgcggccgccgctgccctgccagcc

SEQ ID NO: 4554673 - DNA, 25 bp, Homo sapien
cgccgctcgctcccggccccgccgc

SEQ ID NO: 4554674 - DNA, 25 bp, Homo sapien
cgccgccgctcgctcccggccccgc

SEQ ID NO: 4554675 - DNA, 25 bp, Homo sapien
cacgccactccccacgccgccgccg

SEQ ID NO: 4554676 - DNA, 25 bp, Homo sapien
caattccacccaggctctaaagcat

SEQ ID NO: 4554677 - DNA, 25 bp, Homo sapien
tccttcctttggagcccgttgaaca

SEQ ID NO: 4554678 - DNA, 25 bp, Homo sapien
tgcctgcctctgaaagaaacgcatg

SEQ ID NO: 4554679 - DNA, 25 bp, Homo sapien
tctaaagcatagctcaagtcgcggc

SEQ ID NO: 4554680 - DNA, 25 bp, Homo sapien
cggtgctgaccggagtgtggtggta

SEQ ID NO: 4554681 - DNA, 25 bp, Homo sapien
tgccctctagcggcggtgctgaccg

SEQ ID NO: 4554682 - DNA, 25 bp, Homo sapien
tctagcggcggtgctgaccggagtg

SEQ ID NO: 4554683 - DNA, 25 bp, Homo sapien
cgcgggctgccctctagcggcggtg

SEQ ID NO: 4554684 - DNA, 25 bp, Homo sapien
ttgccagtgaggatgtcaaagtcca

SEQ ID NO: 4554685 - DNA, 25 bp, Homo sapien
gctggattcccttgcctctcttggc

SEQ ID NO: 4554686 - DNA, 25 bp, Homo sapien
taagtggaggaattgccagtgagga

SEQ ID NO: 4554687 - DNA, 25 bp, Homo sapien
tggatgcacaatgccattagggagg

SEQ ID NO: 4554688 - DNA, 25 bp, Homo sapien
attttagtgtatgtactgccaaagt

SEQ ID NO: 4554689 - DNA, 25 bp, Homo sapien
agtgtatgtactgccaaagtgagca

SEQ ID NO: 4554690 - DNA, 25 bp, Homo sapien
tttagtgtatgtactgccaaagtga

SEQ ID NO: 4554691 - DNA, 25 bp, Homo sapien
tagtgtatgtactgccaaagtgagc

SEQ ID NO: 4554692 - DNA, 25 bp, Homo sapien
cctctaggattggagcacaactggg

SEQ ID NO: 4554693 - DNA, 25 bp, Homo sapien
gatgtgggcagactcgatacagcca

SEQ ID NO: 4554694 - DNA, 25 bp, Homo sapien
cacaactgggttcgggagaggtgtc

SEQ ID NO: 4554695 - DNA, 25 bp, Homo sapien
catagtgcctgggtctggagagtgg

SEQ ID NO: 4554696 - DNA, 25 bp, Homo sapien
tctgaactggcggtgaatttgccat

SEQ ID NO: 4554697 - DNA, 25 bp, Homo sapien
tgagccaaatttcaatgcggtctga

SEQ ID NO: 4554698 - DNA, 25 bp, Homo sapien
caatgcggtctgaactggcggtgaa

SEQ ID NO: 4554699 - DNA, 25 bp, Homo sapien
tctgcccactggaatgagccaaatt

SEQ ID NO: 4554700 - DNA, 25 bp, Homo sapien
agtggaagatcatgtctgccaaaga

SEQ ID NO: 4554701 - DNA, 25 bp, Homo sapien
tggcaaaggtggacatgaaaaagta

SEQ ID NO: 4554702 - DNA, 25 bp, Homo sapien
aacttgttgggaggagcacaagaaa

SEQ ID NO: 4554703 - DNA, 25 bp, Homo sapien
gtgctcagagtagtggaagatcatg

SEQ ID NO: 4554704 - DNA, 25 bp, Homo sapien
tgtgcatttaccatttgcacaaggt

SEQ ID NO: 4554705 - DNA, 25 bp, Homo sapien
tttgtgactgtgcatttaccatttg

SEQ ID NO: 4554706 - DNA, 25 bp, Homo sapien
tgtgactgtgcatttaccatttgca

SEQ ID NO: 4554707 - DNA, 25 bp, Homo sapien
ttaccatttgcacaaggtgcttcaa

SEQ ID NO: 4554708 - DNA, 25 bp, Homo sapien
ctgcataaagtccagttcagtacca

SEQ ID NO: 4554709 - DNA, 25 bp, Homo sapien
cagttcagtaccatcatggtctccc

SEQ ID NO: 4554710 - DNA, 25 bp, Homo sapien
ccagttcagtaccatcatggtctcc

SEQ ID NO: 4554711 - DNA, 25 bp, Homo sapien
gcctggctatccatccttttgatta

SEQ ID NO: 4554712 - DNA, 25 bp, Homo sapien
cgcgcctggctatccatccttttga

SEQ ID NO: 4554713 - DNA, 25 bp, Homo sapien
tccatccttttgattatcgccattc

SEQ ID NO: 4554714 - DNA, 25 bp, Homo sapien
ggctatccatccttttgattatcgc

SEQ ID NO: 4554715 - DNA, 25 bp, Homo sapien
caaccgggatgtggaaactctcgcg

SEQ ID NO: 4554716 - DNA, 25 bp, Homo sapien
tgtctcacggtcagttcaactccag

SEQ ID NO: 4554717 - DNA, 25 bp, Homo sapien
aagatgcgtcgttgcctcggtaacc

SEQ ID NO: 4554718 - DNA, 25 bp, Homo sapien
atagagtagcggcaaaggacctgcc

SEQ ID NO: 4554719 - DNA, 25 bp, Homo sapien
atataagtaagaaattcggcggttg

SEQ ID NO: 4554720 - DNA, 25 bp, Homo sapien
tataagtaagaaattcggcggttga

SEQ ID NO: 4554721 - DNA, 25 bp, Homo sapien
ctggatcttcgggaccactcactct

SEQ ID NO: 4554722 - DNA, 25 bp, Homo sapien
agactggctggatcttcgggaccac

SEQ ID NO: 4554723 - DNA, 25 bp, Homo sapien
acttcacatgtcctaaaggaagctc

SEQ ID NO: 4554724 - DNA, 25 bp, Homo sapien
taacctcctagattggcagtaccac

SEQ ID NO: 4554725 - DNA, 25 bp, Homo sapien
tgtcttagtaaaaggcatcacccaa

SEQ ID NO: 4554726 - DNA, 25 bp, Homo sapien
tatatatacgttgatcatcctcaca

SEQ ID NO: 4554727 - DNA, 25 bp, Homo sapien
aatagtatcctgcatgtagtaagtg

SEQ ID NO: 4554728 - DNA, 25 bp, Homo sapien
tgtgtgcccatcatatagaatagta

SEQ ID NO: 4554729 - DNA, 25 bp, Homo sapien
tcttgatagtccttaacactgccag

SEQ ID NO: 4554730 - DNA, 25 bp, Homo sapien
ggaaatgagtctaccacagctggca

SEQ ID NO: 4554731 - DNA, 25 bp, Homo sapien
tcctttgtgtcttctcattagcagc

SEQ ID NO: 4554732 - DNA, 25 bp, Homo sapien
attagcagcatctagttgactttgc

SEQ ID NO: 4554733 - DNA, 25 bp, Homo sapien
cttctcattagcagcatctagttga

SEQ ID NO: 4554734 - DNA, 25 bp, Homo sapien
aaaatccagtctccagagtgtgatg

SEQ ID NO: 4554735 - DNA, 25 bp, Homo sapien
tacagtggtaatgaagttcctcagc

SEQ ID NO: 4554736 - DNA, 25 bp, Homo sapien
cactttgctggatgtagtattcttc

SEQ ID NO: 4554737 - DNA, 25 bp, Homo sapien
gctgataatcttacagatgctccct

SEQ ID NO: 4554738 - DNA, 25 bp, Homo sapien
gaattattgtctagtatccttttgt

SEQ ID NO: 4554739 - DNA, 25 bp, Homo sapien
tatatgtgtcatctaagcaagtgga

SEQ ID NO: 4554740 - DNA, 25 bp, Homo sapien
taagttagtgtagaaaatgggactg

SEQ ID NO: 4554741 - DNA, 25 bp, Homo sapien
ccttgtgtaggacatagcaaatgaa

SEQ ID NO: 4554742 - DNA, 25 bp, Homo sapien
cagtataggtacttctcaactacag

SEQ ID NO: 4554743 - DNA, 25 bp, Homo sapien
gatctacttcagttagtctctatga

SEQ ID NO: 4554744 - DNA, 25 bp, Homo sapien
tatgacagtatgtgatggataccca

SEQ ID NO: 4554745 - DNA, 25 bp, Homo sapien
tagatttaggagattagctattagc

SEQ ID NO: 4554746 - DNA, 25 bp, Homo sapien
taagttcttagcgtgacaattaagc

SEQ ID NO: 4554747 - DNA, 25 bp, Homo sapien
cagacagaaggcagttcactttggg

SEQ ID NO: 4554748 - DNA, 25 bp, Homo sapien
caatggatacctaatgccactgaac

SEQ ID NO: 4554749 - DNA, 25 bp, Homo sapien
taaagttcgtaaacacagacagaag

SEQ ID NO: 4554750 - DNA, 25 bp, Homo sapien
ctgtaaaacaaaagttatgctgaca

SEQ ID NO: 4554751 - DNA, 25 bp, Homo sapien
caaatttcactcctttgttgatata

SEQ ID NO: 4554752 - DNA, 25 bp, Homo sapien
aatttcactcctttgttgatatact

SEQ ID NO: 4554753 - DNA, 25 bp, Homo sapien
atttcactcctttgttgatatactt

SEQ ID NO: 4554754 - DNA, 25 bp, Homo sapien
aaatttcactcctttgttgatatac

SEQ ID NO: 4554755 - DNA, 25 bp, Homo sapien
atatcatcctcttttttaaatactc

SEQ ID NO: 4554756 - DNA, 25 bp, Homo sapien
gatcaatatcatcctcttttttaaa

SEQ ID NO: 4554757 - DNA, 25 bp, Homo sapien
caagcagatcaatatcatcctcttt

SEQ ID NO: 4554758 - DNA, 25 bp, Homo sapien
gcagatcaatatcatcctctttttt

SEQ ID NO: 4554759 - DNA, 25 bp, Homo sapien
tacagttgttctagggtagctttag

SEQ ID NO: 4554760 - DNA, 25 bp, Homo sapien
ctacagttgttctagggtagcttta

SEQ ID NO: 4554761 - DNA, 25 bp, Homo sapien
acagttgttctagggtagctttaga

SEQ ID NO: 4554762 - DNA, 25 bp, Homo sapien
agttgttctagggtagctttagatt

SEQ ID NO: 4554763 - DNA, 25 bp, Homo sapien
aatccttgccgcctttgctgcaact

SEQ ID NO: 4554764 - DNA, 25 bp, Homo sapien
tagggagatagcctagtaagtttgt

SEQ ID NO: 4554765 - DNA, 25 bp, Homo sapien
gtaagtttgtagcatgctctttaag

SEQ ID NO: 4554766 - DNA, 25 bp, Homo sapien
aattgcattaataaatccttgccgc

SEQ ID NO: 4554767 - DNA, 25 bp, Homo sapien
tccaggagctttctcctatccaagt

SEQ ID NO: 4554768 - DNA, 25 bp, Homo sapien
ttttccaggagctttctcctatcca

SEQ ID NO: 4554769 - DNA, 25 bp, Homo sapien
ttagcttctgagaacagatgagctc

SEQ ID NO: 4554770 - DNA, 25 bp, Homo sapien
cttagcttctgagaacagatgagct

SEQ ID NO: 4554771 - DNA, 25 bp, Homo sapien
ggtggatcccttatctatttgcatg

SEQ ID NO: 4554772 - DNA, 25 bp, Homo sapien
agccccatcaattccgtatccttaa

SEQ ID NO: 4554773 - DNA, 25 bp, Homo sapien
cttaacatctctcgggtggatccct

SEQ ID NO: 4554774 - DNA, 25 bp, Homo sapien
gggtagccttaagtcttctctcacc

SEQ ID NO: 4554775 - DNA, 25 bp, Homo sapien
gcagcctgtagcactaattccttca

SEQ ID NO: 4554776 - DNA, 25 bp, Homo sapien
ttccttcaaggccatttgttcttca

SEQ ID NO: 4554777 - DNA, 25 bp, Homo sapien
taattctattcgatcatcctcagca

SEQ ID NO: 4554778 - DNA, 25 bp, Homo sapien
tctgcaaggaattgttggcgacgct

SEQ ID NO: 4554779 - DNA, 25 bp, Homo sapien
cttgttccaaatcttcacgttgccg

SEQ ID NO: 4554780 - DNA, 25 bp, Homo sapien
cacgttgccgcagcatttcttctaa

SEQ ID NO: 4554781 - DNA, 25 bp, Homo sapien
gcttgctcttatatatttcagcttg

SEQ ID NO: 4554782 - DNA, 25 bp, Homo sapien
gttcttcctggtataattcttgtcg

SEQ ID NO: 4554783 - DNA, 25 bp, Homo sapien
ttctatataccttcgcattgcattc

SEQ ID NO: 4554784 - DNA, 25 bp, Homo sapien
tctatataccttcgcattgcattca

SEQ ID NO: 4554785 - DNA, 25 bp, Homo sapien
ttgaacttttgccatccgatcttct

SEQ ID NO: 4554786 - DNA, 25 bp, Homo sapien
cttttgccatccgatcttcttctct

SEQ ID NO: 4554787 - DNA, 25 bp, Homo sapien
gatagtactgtgctttcgctttgtt

SEQ ID NO: 4554788 - DNA, 25 bp, Homo sapien
tccatcatggttttggctatttcag

SEQ ID NO: 4554789 - DNA, 25 bp, Homo sapien
caagttgtttctctaagtcaagata

SEQ ID NO: 4554790 - DNA, 25 bp, Homo sapien
ttttagcagctgctcataagcttcc

SEQ ID NO: 4554791 - DNA, 25 bp, Homo sapien
aaaaacataatgaccagaaacatga

SEQ ID NO: 4554792 - DNA, 25 bp, Homo sapien
acataatgaccagaaacatgattac

SEQ ID NO: 4554793 - DNA, 25 bp, Homo sapien
ttttctaaatgaagctaaaaacata

SEQ ID NO: 4554794 - DNA, 25 bp, Homo sapien
aaaacataatgaccagaaacatgat

SEQ ID NO: 4554795 - DNA, 25 bp, Homo sapien
gcaatctgagctgccctttctttat

SEQ ID NO: 4554796 - DNA, 25 bp, Homo sapien
atctgagctgccctttctttattca

SEQ ID NO: 4554797 - DNA, 25 bp, Homo sapien
ccttttcagcaatctgagctgccct

SEQ ID NO: 4554798 - DNA, 25 bp, Homo sapien
catatttaatggcatccttttcagc

SEQ ID NO: 4554799 - DNA, 25 bp, Homo sapien
gaatgaaaacctcacagaaaactga

SEQ ID NO: 4554800 - DNA, 25 bp, Homo sapien
tactcaaagagggaatacagcgggt

SEQ ID NO: 4554801 - DNA, 25 bp, Homo sapien
tacagcgggtattattttagatcca

SEQ ID NO: 4554802 - DNA, 25 bp, Homo sapien
gggcattagggcttacattttctgg

SEQ ID NO: 4554803 - DNA, 25 bp, Homo sapien
tcttttcgtcctttagactttcatg

SEQ ID NO: 4554804 - DNA, 25 bp, Homo sapien
ctcatcttttcgtcctttagacttt

SEQ ID NO: 4554805 - DNA, 25 bp, Homo sapien
catcttttcgtcctttagactttca

SEQ ID NO: 4554806 - DNA, 25 bp, Homo sapien
tcatcttttcgtcctttagactttc

SEQ ID NO: 4554807 - DNA, 25 bp, Homo sapien
gacgttttttagagcttggacatgt

SEQ ID NO: 4554808 - DNA, 25 bp, Homo sapien
gagaaattgcttgcgctgaacacgg

SEQ ID NO: 4554809 - DNA, 25 bp, Homo sapien
tcctgatttgactgttgacgttttt

SEQ ID NO: 4554810 - DNA, 25 bp, Homo sapien
tgaatggcctcttccatatccaact

SEQ ID NO: 4554811 - DNA, 25 bp, Homo sapien
acagctcaaatttctccttttggaa

SEQ ID NO: 4554812 - DNA, 25 bp, Homo sapien
tacagctcaaatttctccttttgga

SEQ ID NO: 4554813 - DNA, 25 bp, Homo sapien
ctacagctcaaatttctccttttgg

SEQ ID NO: 4554814 - DNA, 25 bp, Homo sapien
cagctcaaatttctccttttggaac

SEQ ID NO: 4554815 - DNA, 25 bp, Homo sapien
ccctctcgtgggaccgcggccacca

SEQ ID NO: 4554816 - DNA, 25 bp, Homo sapien
cctctcgtgggaccgcggccaccac

SEQ ID NO: 4554817 - DNA, 25 bp, Homo sapien
ctgacgaaaaataccccctctcgtg

SEQ ID NO: 4554818 - DNA, 25 bp, Homo sapien
tggctgacgaaaaataccccctctc

SEQ ID NO: 4554819 - DNA, 25 bp, Homo sapien
cgctcgggtgtttacgcggcgtctt

SEQ ID NO: 4554820 - DNA, 25 bp, Homo sapien
ccaaaagtgacccacgcagaacgtg

SEQ ID NO: 4554821 - DNA, 25 bp, Homo sapien
cgataagatacaatcggcattgagc

SEQ ID NO: 4554822 - DNA, 25 bp, Homo sapien
tggcctcccattggacgcgataaga

SEQ ID NO: 4554823 - DNA, 25 bp, Homo sapien
tgccttgtggcaaatctgcatttaa

SEQ ID NO: 4554824 - DNA, 25 bp, Homo sapien
cttgccttgtggcaaatctgcattt

SEQ ID NO: 4554825 - DNA, 25 bp, Homo sapien
ttgccttgtggcaaatctgcattta

SEQ ID NO: 4554826 - DNA, 25 bp, Homo sapien
gagacccctttgatggcagctgtga

SEQ ID NO: 4554827 - DNA, 25 bp, Homo sapien
tgtacagtacccaggagccagtaac

SEQ ID NO: 4554828 - DNA, 25 bp, Homo sapien
gaaggcacttttctagagcccaaag

SEQ ID NO: 4554829 - DNA, 25 bp, Homo sapien
caggaaacagtaccctcaaagtgag

SEQ ID NO: 4554830 - DNA, 25 bp, Homo sapien
ctggaaacaagtagggctggttgat

SEQ ID NO: 4554831 - DNA, 25 bp, Homo sapien
tggaaacaagtagggctggttgatt

SEQ ID NO: 4554832 - DNA, 25 bp, Homo sapien
ggctaggactgattcccacaaagag

SEQ ID NO: 4554833 - DNA, 25 bp, Homo sapien
cagcatagtgaagatgacttcgtgt

SEQ ID NO: 4554834 - DNA, 25 bp, Homo sapien
cttcttgaaggctaggactgattcc

SEQ ID NO: 4554835 - DNA, 25 bp, Homo sapien
acagcatagtgaagatgacttcgtg

SEQ ID NO: 4554836 - DNA, 25 bp, Homo sapien
cctgcaacgtgagagtggagtacct

SEQ ID NO: 4554837 - DNA, 25 bp, Homo sapien
gcctcttaatgtggctgtcatccag

SEQ ID NO: 4554838 - DNA, 25 bp, Homo sapien
gccaccagatagaccagctgctgca

SEQ ID NO: 4554839 - DNA, 25 bp, Homo sapien
ctgcagagcctgcaacgtgagagtg

SEQ ID NO: 4554840 - DNA, 25 bp, Homo sapien
gacacttggggtatcttgttcagag

SEQ ID NO: 4554841 - DNA, 25 bp, Homo sapien
aatctgaggctttacccttgccatg

SEQ ID NO: 4554842 - DNA, 25 bp, Homo sapien
tatggggccacccacaatctgaggc

SEQ ID NO: 4554843 - DNA, 25 bp, Homo sapien
atgaaagctccccacttcttatggg

SEQ ID NO: 4554844 - DNA, 25 bp, Homo sapien
tcgaggtctggtttaataggtaaga

SEQ ID NO: 4554845 - DNA, 25 bp, Homo sapien
cctcagaggtaagtttgtgctttat

SEQ ID NO: 4554846 - DNA, 25 bp, Homo sapien
tgagagattagactttcattcccca

SEQ ID NO: 4554847 - DNA, 25 bp, Homo sapien
agacagaaagccatggatcctcaga

SEQ ID NO: 4554848 - DNA, 25 bp, Homo sapien
tgtccagctcgcagcctgtttatca

SEQ ID NO: 4554849 - DNA, 25 bp, Homo sapien
gctcgcagcctgtttatcaggatga

SEQ ID NO: 4554850 - DNA, 25 bp, Homo sapien
gcagcctgtttatcaggatgaagga

SEQ ID NO: 4554851 - DNA, 25 bp, Homo sapien
ccagctcgcagcctgtttatcagga

SEQ ID NO: 4554852 - DNA, 25 bp, Homo sapien
cattgtattgcaggtttgctggccc

SEQ ID NO: 4554853 - DNA, 25 bp, Homo sapien
gggccactgctcttgagcacagcca

SEQ ID NO: 4554854 - DNA, 25 bp, Homo sapien
ccatgaccgaagtcgtgtgggccac

SEQ ID NO: 4554855 - DNA, 25 bp, Homo sapien
cctggtattttaagatagttggtca

SEQ ID NO: 4554856 - DNA, 25 bp, Homo sapien
ctctaaggacttgctgtgtgaatct

SEQ ID NO: 4554857 - DNA, 25 bp, Homo sapien
gtaggtctctaaggacttgctgtgt

SEQ ID NO: 4554858 - DNA, 25 bp, Homo sapien
tctctaaggacttgctgtgtgaatc

SEQ ID NO: 4554859 - DNA, 25 bp, Homo sapien
ggtctctaaggacttgctgtgtgaa

SEQ ID NO: 4554860 - DNA, 25 bp, Homo sapien
cagatggacctagttggagccctgc

SEQ ID NO: 4554861 - DNA, 25 bp, Homo sapien
gcatacgcacgaagcagggagaagt

SEQ ID NO: 4554862 - DNA, 25 bp, Homo sapien
aaagactggagcttgcttttgttcc

SEQ ID NO: 4554863 - DNA, 25 bp, Homo sapien
ttatgaaaacatccgggtaaactga

SEQ ID NO: 4554864 - DNA, 25 bp, Homo sapien
tcgtggctcttttattgacaaccta

SEQ ID NO: 4554865 - DNA, 25 bp, Homo sapien
gcatttataccttaactgactcaga

SEQ ID NO: 4554866 - DNA, 25 bp, Homo sapien
tctctctctcgtggctcttttattg

SEQ ID NO: 4554867 - DNA, 25 bp, Homo sapien
agattcatcagtgattcagaaagca

SEQ ID NO: 4554868 - DNA, 25 bp, Homo sapien
tcaccatttccatgatctaaatggc

SEQ ID NO: 4554869 - DNA, 25 bp, Homo sapien
tccatgatctaaatggctcctcacc

SEQ ID NO: 4554870 - DNA, 25 bp, Homo sapien
catttccatgatctaaatggctcct

SEQ ID NO: 4554871 - DNA, 25 bp, Homo sapien
tcctcaccatttccatgatctaaat

SEQ ID NO: 4554872 - DNA, 25 bp, Homo sapien
tgtaatccttctttgcaaggtaggt

SEQ ID NO: 4554873 - DNA, 25 bp, Homo sapien
tgatgctccctgttgcttatgcaga

SEQ ID NO: 4554874 - DNA, 25 bp, Homo sapien
caagtttctgacctacaccattttc

SEQ ID NO: 4554875 - DNA, 25 bp, Homo sapien
caaggtaggtctacatcaattcttt

SEQ ID NO: 4554876 - DNA, 25 bp, Homo sapien
cattgctgttagtgtcagcaaacca

SEQ ID NO: 4554877 - DNA, 25 bp, Homo sapien
taaccatgtttatatattgtagcga

SEQ ID NO: 4554878 - DNA, 25 bp, Homo sapien
tatctcaggagggtgtcaaggagca

SEQ ID NO: 4554879 - DNA, 25 bp, Homo sapien
tagaataagaacagcacaaaattgt

SEQ ID NO: 4554880 - DNA, 25 bp, Homo sapien
tataaagcataaggtgatggttact

SEQ ID NO: 4554881 - DNA, 25 bp, Homo sapien
gtttgtaaagtgtctatcacctttc

SEQ ID NO: 4554882 - DNA, 25 bp, Homo sapien
tcttcttaagaagcatgtttgtaaa

SEQ ID NO: 4554883 - DNA, 25 bp, Homo sapien
catcctgccttagaatggggctgtc

SEQ ID NO: 4554884 - DNA, 25 bp, Homo sapien
aaagtgtctatcacctttctgtatc

SEQ ID NO: 4554885 - DNA, 25 bp, Homo sapien
ctcaggaaagttgggcagagccaca

SEQ ID NO: 4554886 - DNA, 25 bp, Homo sapien
tcaggatttcggtgaacagggcaac

SEQ ID NO: 4554887 - DNA, 25 bp, Homo sapien
tatgcgttgggctagagtcctctgt

SEQ ID NO: 4554888 - DNA, 25 bp, Homo sapien
ggctccaggactacctcagtgttgg

SEQ ID NO: 4554889 - DNA, 25 bp, Homo sapien
cagtgccgcgataaacatacatgtg

SEQ ID NO: 4554890 - DNA, 25 bp, Homo sapien
tgaacagtgccgcgataaacataca

SEQ ID NO: 4554891 - DNA, 25 bp, Homo sapien
aacagtgccgcgataaacatacatg

SEQ ID NO: 4554892 - DNA, 25 bp, Homo sapien
gaacagtgccgcgataaacatacat

SEQ ID NO: 4554893 - DNA, 25 bp, Homo sapien
tacaagacacgataaaaggagttct

SEQ ID NO: 4554894 - DNA, 25 bp, Homo sapien
agaatatgttcagcaaaattatcat

SEQ ID NO: 4554895 - DNA, 25 bp, Homo sapien
aaagagctgagggatttttgtcaac

SEQ ID NO: 4554896 - DNA, 25 bp, Homo sapien
caccagacctgttttacaagacacg

SEQ ID NO: 4554897 - DNA, 25 bp, Homo sapien
tgacacattagtgaagtgaagtaac

SEQ ID NO: 4554898 - DNA, 25 bp, Homo sapien
gacacattagtgaagtgaagtaaca

SEQ ID NO: 4554899 - DNA, 25 bp, Homo sapien
acacattagtgaagtgaagtaacaa

SEQ ID NO: 4554900 - DNA, 25 bp, Homo sapien
ttgacacattagtgaagtgaagtaa

SEQ ID NO: 4554901 - DNA, 25 bp, Homo sapien
tgtagttttcagtgtccaggtcttt

SEQ ID NO: 4554902 - DNA, 25 bp, Homo sapien
tctttaacttctgccagcaattttt

SEQ ID NO: 4554903 - DNA, 25 bp, Homo sapien
gtgtccaggtctttcacctcttggt

SEQ ID NO: 4554904 - DNA, 25 bp, Homo sapien
tcctctttaacttctgccagcaatt

SEQ ID NO: 4554905 - DNA, 25 bp, Homo sapien
tgctgaaatcacaaggatctaccct

SEQ ID NO: 4554906 - DNA, 25 bp, Homo sapien
aaaactaattgaaggcagaacccag

SEQ ID NO: 4554907 - DNA, 25 bp, Homo sapien
tcacagccttgtcaacagaagatgg

SEQ ID NO: 4554908 - DNA, 25 bp, Homo sapien
gaaggccatttcgtgctgaatcaag

SEQ ID NO: 4554909 - DNA, 25 bp, Homo sapien
catcggccgcttgtttgagcccact

SEQ ID NO: 4554910 - DNA, 25 bp, Homo sapien
cagtaggaacctcaacaggagtact

SEQ ID NO: 4554911 - DNA, 25 bp, Homo sapien
tgtggagtgctttctctaataaatt

SEQ ID NO: 4554912 - DNA, 25 bp, Homo sapien
tgtaacggggcccatcggccgcttg

SEQ ID NO: 4554913 - DNA, 25 bp, Homo sapien
cagctgagttaatttctttcttaaa

SEQ ID NO: 4554914 - DNA, 25 bp, Homo sapien
tttctcgtttctcagctgagttaat

SEQ ID NO: 4554915 - DNA, 25 bp, Homo sapien
tttctcagctgagttaatttctttc

SEQ ID NO: 4554916 - DNA, 25 bp, Homo sapien
cttttctcgtttctcagctgagtta

SEQ ID NO: 4554917 - DNA, 25 bp, Homo sapien
gcacgaaagtaccttctttatatcc

SEQ ID NO: 4554918 - DNA, 25 bp, Homo sapien
cattttacagctgcacgaaagtacc

SEQ ID NO: 4554919 - DNA, 25 bp, Homo sapien
ttgtagtaacgtttcgctaacaaca

SEQ ID NO: 4554920 - DNA, 25 bp, Homo sapien
gtagtaacgtttcgctaacaacaca

SEQ ID NO: 4554921 - DNA, 25 bp, Homo sapien
aacaataacttaagaatcagatcaa

SEQ ID NO: 4554922 - DNA, 25 bp, Homo sapien
tgctagtaactagatgtaatggaaa

SEQ ID NO: 4554923 - DNA, 25 bp, Homo sapien
tcaaatctaggctttgtaaccctag

SEQ ID NO: 4554924 - DNA, 25 bp, Homo sapien
ctaggctttgtaaccctagccaaat

SEQ ID NO: 4554925 - DNA, 25 bp, Homo sapien
tttcaacaaatgtttagaatagttc

SEQ ID NO: 4554926 - DNA, 25 bp, Homo sapien
ctcttgttagtttctttcaacaaat

SEQ ID NO: 4554927 - DNA, 25 bp, Homo sapien
tctttcaacaaatgtttagaatagt

SEQ ID NO: 4554928 - DNA, 25 bp, Homo sapien
tcaacaaatgtttagaatagttctt

SEQ ID NO: 4554929 - DNA, 25 bp, Homo sapien
ccagtataggttccttttctcatag

SEQ ID NO: 4554930 - DNA, 25 bp, Homo sapien
tataggtacaaacagttcattgacc

SEQ ID NO: 4554931 - DNA, 25 bp, Homo sapien
ggtacaaacagttcattgacctgct

SEQ ID NO: 4554932 - DNA, 25 bp, Homo sapien
tctcatagtatataggtacaaacag

SEQ ID NO: 4554933 - DNA, 25 bp, Homo sapien
ctactatatacagcagagtatttta

SEQ ID NO: 4554934 - DNA, 25 bp, Homo sapien
tcaaaaactactatatacagcagag

SEQ ID NO: 4554935 - DNA, 25 bp, Homo sapien
aactactatatacagcagagtattt

SEQ ID NO: 4554936 - DNA, 25 bp, Homo sapien
aaaactactatatacagcagagtat

SEQ ID NO: 4554937 - DNA, 25 bp, Homo sapien
aatgcccttatcgttggtacactga

SEQ ID NO: 4554938 - DNA, 25 bp, Homo sapien
taattaaggtaagcttacagcctgg

SEQ ID NO: 4554939 - DNA, 25 bp, Homo sapien
gcctggcaggctaacacttgtatgg

SEQ ID NO: 4554940 - DNA, 25 bp, Homo sapien
tacaggagtttcaacaatgggtttc

SEQ ID NO: 4554941 - DNA, 25 bp, Homo sapien
tactgttgcctctgttgtgctaggg

SEQ ID NO: 4554942 - DNA, 25 bp, Homo sapien
aatgaatactgccttgctcgctaac

SEQ ID NO: 4554943 - DNA, 25 bp, Homo sapien
caactgacgatgttttttgagccag

SEQ ID NO: 4554944 - DNA, 25 bp, Homo sapien
tcaagtacctcggatggagtcagag

SEQ ID NO: 4554945 - DNA, 25 bp, Homo sapien
ctgtcaaaataaagacgtgttctaa

SEQ ID NO: 4554946 - DNA, 25 bp, Homo sapien
tgtcaaaataaagacgtgttctaaa

SEQ ID NO: 4554947 - DNA, 25 bp, Homo sapien
actgtcaaaataaagacgtgttcta

SEQ ID NO: 4554948 - DNA, 25 bp, Homo sapien
taatctgacatttagacgtattccc

SEQ ID NO: 4554949 - DNA, 25 bp, Homo sapien
gatttctaagaagatcatcagtcca

SEQ ID NO: 4554950 - DNA, 25 bp, Homo sapien
gggacagtctcactgtgacgtccag

SEQ ID NO: 4554951 - DNA, 25 bp, Homo sapien
accagtagcacccagttttaacaat

SEQ ID NO: 4554952 - DNA, 25 bp, Homo sapien
aaagaactctgcaactggctgtgat

SEQ ID NO: 4554953 - DNA, 25 bp, Homo sapien
gaacaaagaactctgcaactggctg

SEQ ID NO: 4554954 - DNA, 25 bp, Homo sapien
caaagaactctgcaactggctgtga

SEQ ID NO: 4554955 - DNA, 25 bp, Homo sapien
aggaacaaagaactctgcaactggc

SEQ ID NO: 4554956 - DNA, 25 bp, Homo sapien
atgtttctgtttctctttcagccat

SEQ ID NO: 4554957 - DNA, 25 bp, Homo sapien
ctttcagaatttgatgtttctgttt

SEQ ID NO: 4554958 - DNA, 25 bp, Homo sapien
tttcagaatttgatgtttctgtttc

SEQ ID NO: 4554959 - DNA, 25 bp, Homo sapien
ttgatgtttctgtttctctttcagc

SEQ ID NO: 4554960 - DNA, 25 bp, Homo sapien
taaaacctcagtaagccataggcca

SEQ ID NO: 4554961 - DNA, 25 bp, Homo sapien
gaaataagacttgagtgggaaccca

SEQ ID NO: 4554962 - DNA, 25 bp, Homo sapien
ggaacccaaggcaataccacaataa

SEQ ID NO: 4554963 - DNA, 25 bp, Homo sapien
gcttgtaacaattaccagctatgga

SEQ ID NO: 4554964 - DNA, 25 bp, Homo sapien
tagtctagacttatgaacaccagga

SEQ ID NO: 4554965 - DNA, 25 bp, Homo sapien
caatgaatgtctgcagtggaggagt

SEQ ID NO: 4554966 - DNA, 25 bp, Homo sapien
aagtatgacatatggacacctggag

SEQ ID NO: 4554967 - DNA, 25 bp, Homo sapien
cttccagaatgccaacagccagaga

SEQ ID NO: 4554968 - DNA, 25 bp, Homo sapien
tttctactaagcttgacattaaaga

SEQ ID NO: 4554969 - DNA, 25 bp, Homo sapien
aatagtatccgcaggagttctgcag

SEQ ID NO: 4554970 - DNA, 25 bp, Homo sapien
tgttcaacctgaatggctatgcaag

SEQ ID NO: 4554971 - DNA, 25 bp, Homo sapien
attattgaagtactgggtgaggctg

SEQ ID NO: 4554972 - DNA, 25 bp, Homo sapien
aggatgggtgaacatatcatgcgat

SEQ ID NO: 4554973 - DNA, 25 bp, Homo sapien
tgaaaaaaggatgggtgaacatatc

SEQ ID NO: 4554974 - DNA, 25 bp, Homo sapien
tgaacatatcatgcgatttcaaaac

SEQ ID NO: 4554975 - DNA, 25 bp, Homo sapien
tgggtgaacatatcatgcgatttca

SEQ ID NO: 4554976 - DNA, 25 bp, Homo sapien
ctggctcagcataacagtctcaaaa

SEQ ID NO: 4554977 - DNA, 25 bp, Homo sapien
gagagagaaattgcaacgttagaaa

SEQ ID NO: 4554978 - DNA, 25 bp, Homo sapien
agtgctataccaagccatattgaag

SEQ ID NO: 4554979 - DNA, 25 bp, Homo sapien
gatgtaactattctgcaatcagtgc

SEQ ID NO: 4554980 - DNA, 25 bp, Homo sapien
tgtgtgcaaagtgtctcaactgcat

SEQ ID NO: 4554981 - DNA, 25 bp, Homo sapien
taatgtcgtttttagaccagacaag

SEQ ID NO: 4554982 - DNA, 25 bp, Homo sapien
ttgttgtaagcaaagggataggcct

SEQ ID NO: 4554983 - DNA, 25 bp, Homo sapien
tgtttgctcactgaattcccctacc

SEQ ID NO: 4554984 - DNA, 25 bp, Homo sapien
cataaattgacatcaagaaagcaag

SEQ ID NO: 4554985 - DNA, 25 bp, Homo sapien
taaaaacctgcatctgttaaagaaa

SEQ ID NO: 4554986 - DNA, 25 bp, Homo sapien
tatattatgcgccattcaagacaaa

SEQ ID NO: 4554987 - DNA, 25 bp, Homo sapien
ttggaagaaggctgatacttctgcc

SEQ ID NO: 4554988 - DNA, 25 bp, Homo sapien
tcttgttcctttgcgggagcttctt

SEQ ID NO: 4554989 - DNA, 25 bp, Homo sapien
cttgttcctttgcgggagcttcttt

SEQ ID NO: 4554990 - DNA, 25 bp, Homo sapien
ttcttgttcctttgcgggagcttct

SEQ ID NO: 4554991 - DNA, 25 bp, Homo sapien
aaaatgtagatcgaaactaatgtac

SEQ ID NO: 4554992 - DNA, 25 bp, Homo sapien
tatgtacgatggtaaaatatgaaac

SEQ ID NO: 4554993 - DNA, 25 bp, Homo sapien
ttctctgccagcctaaaataattaa

SEQ ID NO: 4554994 - DNA, 25 bp, Homo sapien
gtagatcgaaactaatgtacatttt

SEQ ID NO: 4554995 - DNA, 25 bp, Homo sapien
tcaccttgagaataggtccagattc

SEQ ID NO: 4554996 - DNA, 25 bp, Homo sapien
tttgaacacataagagctacagagt

SEQ ID NO: 4554997 - DNA, 25 bp, Homo sapien
caggttcaatgacagtaagtatctc

SEQ ID NO: 4554998 - DNA, 25 bp, Homo sapien
taatttaggattatgaccagagcca

SEQ ID NO: 4554999 - DNA, 25 bp, Homo sapien
ttaaaaactgggtagagagaggaga

SEQ ID NO: 4555000 - DNA, 25 bp, Homo sapien
ctgggtagagagaggagataacaaa

SEQ ID NO: 4555001 - DNA, 25 bp, Homo sapien
gtagagagaggagataacaaaaatt

SEQ ID NO: 4555002 - DNA, 25 bp, Homo sapien
aaaaactgggtagagagaggagata

SEQ ID NO: 4555003 - DNA, 25 bp, Homo sapien
tatggctattaagatcacaaaaggc

SEQ ID NO: 4555004 - DNA, 25 bp, Homo sapien
ctagatatagcactgtctgcagcca

SEQ ID NO: 4555005 - DNA, 25 bp, Homo sapien
taataggtggtcatctaaaccggct

SEQ ID NO: 4555006 - DNA, 25 bp, Homo sapien
taactggtcatctaaaccggcctgc

SEQ ID NO: 4555007 - DNA, 25 bp, Homo sapien
gccatgtagaaagggagtctcccca

SEQ ID NO: 4555008 - DNA, 25 bp, Homo sapien
tgttccaaggatatgaaagtagcca

SEQ ID NO: 4555009 - DNA, 25 bp, Homo sapien
gctcaatttggtgggccttaaagcc

SEQ ID NO: 4555010 - DNA, 25 bp, Homo sapien
cttgaggccacaacctaagagcagg

SEQ ID NO: 4555011 - DNA, 25 bp, Homo sapien
caggtataccctggatattttttga

SEQ ID NO: 4555012 - DNA, 25 bp, Homo sapien
ggcatcagttgtgtccatcgaaggg

SEQ ID NO: 4555013 - DNA, 25 bp, Homo sapien
gagagaacaggcatcagttgtgtcc

SEQ ID NO: 4555014 - DNA, 25 bp, Homo sapien
gggacactgtccaggtataccctgg

SEQ ID NO: 4555015 - DNA, 25 bp, Homo sapien
catgaacttggctgctcaactgcct

SEQ ID NO: 4555016 - DNA, 25 bp, Homo sapien
gcacaatgacagacaacgaatgaga

SEQ ID NO: 4555017 - DNA, 25 bp, Homo sapien
tatttttagacagcgcaaactggag

SEQ ID NO: 4555018 - DNA, 25 bp, Homo sapien
tgtcttgcaccaggtcacgagctcc

SEQ ID NO: 4555019 - DNA, 25 bp, Homo sapien
ggtgctcagaagttgggatacaaac

SEQ ID NO: 4555020 - DNA, 25 bp, Homo sapien
aaggtgctcagaagttgggatacaa

SEQ ID NO: 4555021 - DNA, 25 bp, Homo sapien
aaaggtgctcagaagttgggataca

SEQ ID NO: 4555022 - DNA, 25 bp, Homo sapien
tgctcagaagttgggatacaaacag

SEQ ID NO: 4555023 - DNA, 25 bp, Homo sapien
taaagagaccatattgtggatgacc

SEQ ID NO: 4555024 - DNA, 25 bp, Homo sapien
tatgatgagtgagaataatgattta

SEQ ID NO: 4555025 - DNA, 25 bp, Homo sapien
gaataatgatttagtaaagagacca

SEQ ID NO: 4555026 - DNA, 25 bp, Homo sapien
ccatattgtggatgaccaaaaatac

SEQ ID NO: 4555027 - DNA, 25 bp, Homo sapien
tatgttgacttaagtgtgtagccat

SEQ ID NO: 4555028 - DNA, 25 bp, Homo sapien
tctgcattacaacttggcaagtatg

SEQ ID NO: 4555029 - DNA, 25 bp, Homo sapien
tggcaagtatgagttttatgttgac

SEQ ID NO: 4555030 - DNA, 25 bp, Homo sapien
tttctgcattacaacttggcaagta

SEQ ID NO: 4555031 - DNA, 25 bp, Homo sapien
attatctaagccagaaacatcactt

SEQ ID NO: 4555032 - DNA, 25 bp, Homo sapien
tctaagccagaaacatcacttagga

SEQ ID NO: 4555033 - DNA, 25 bp, Homo sapien
ctaagccagaaacatcacttaggaa

SEQ ID NO: 4555034 - DNA, 25 bp, Homo sapien
tatctaagccagaaacatcacttag

SEQ ID NO: 4555035 - DNA, 25 bp, Homo sapien
caaccaacttgtgtaacttaggcaa

SEQ ID NO: 4555036 - DNA, 25 bp, Homo sapien
aggcaagtcacattctatttgtcct

SEQ ID NO: 4555037 - DNA, 25 bp, Homo sapien
tgtcataccaattgttaaaagttag

SEQ ID NO: 4555038 - DNA, 25 bp, Homo sapien
agtcagaagacctagagtcagtctt

SEQ ID NO: 4555039 - DNA, 25 bp, Homo sapien
tttgcttggacggttactatgaaag

SEQ ID NO: 4555040 - DNA, 25 bp, Homo sapien
accttttgcttggacggttactatg

SEQ ID NO: 4555041 - DNA, 25 bp, Homo sapien
ccttttgcttggacggttactatga

SEQ ID NO: 4555042 - DNA, 25 bp, Homo sapien
cttttgcttggacggttactatgaa

SEQ ID NO: 4555043 - DNA, 25 bp, Homo sapien
taaataccttcctagtaggtacata

SEQ ID NO: 4555044 - DNA, 25 bp, Homo sapien
tccagacttgtttgattcttcaccc

SEQ ID NO: 4555045 - DNA, 25 bp, Homo sapien
cctcaaagcctaagtgaaatttaca

SEQ ID NO: 4555046 - DNA, 25 bp, Homo sapien
tacagtgaaggttggattcaaatcc

SEQ ID NO: 4555047 - DNA, 25 bp, Homo sapien
gtgagcatgactaaagatgtaaagg

SEQ ID NO: 4555048 - DNA, 25 bp, Homo sapien
aaaaagccacaatcaaaacagatga

SEQ ID NO: 4555049 - DNA, 25 bp, Homo sapien
gacaaaaagccacaatcaaaacaga

SEQ ID NO: 4555050 - DNA, 25 bp, Homo sapien
aaagccacaatcaaaacagatgatc

SEQ ID NO: 4555051 - DNA, 25 bp, Homo sapien
ctaggacaaaaagccacaatcaaaa

SEQ ID NO: 4555052 - DNA, 25 bp, Homo sapien
gacgtacgtaggaaagtggtttgca

SEQ ID NO: 4555053 - DNA, 25 bp, Homo sapien
tacataggctttgctacagctagtg

SEQ ID NO: 4555054 - DNA, 25 bp, Homo sapien
caaaaactacagtggacgtacgtag

SEQ ID NO: 4555055 - DNA, 25 bp, Homo sapien
tacagctagtgttgtatctgcaaaa

SEQ ID NO: 4555056 - DNA, 25 bp, Homo sapien
ttatttcggaacaacactcaatgca

SEQ ID NO: 4555057 - DNA, 25 bp, Homo sapien
atttcggaacaacactcaatgcatt

SEQ ID NO: 4555058 - DNA, 25 bp, Homo sapien
gcatttgtgaatgccccgacgatac

SEQ ID NO: 4555059 - DNA, 25 bp, Homo sapien
tatttcggaacaacactcaatgcat

SEQ ID NO: 4555060 - DNA, 25 bp, Homo sapien
tttttattgctactagccaatgtgc

SEQ ID NO: 4555061 - DNA, 25 bp, Homo sapien
tttgcatattagagatttttggttt

SEQ ID NO: 4555062 - DNA, 25 bp, Homo sapien
tgctactagccaatgtgctttgttt

SEQ ID NO: 4555063 - DNA, 25 bp, Homo sapien
cttaaattcctcaatgctgtattga

SEQ ID NO: 4555064 - DNA, 25 bp, Homo sapien
gagctgaagggtagaagcacttgca

SEQ ID NO: 4555065 - DNA, 25 bp, Homo sapien
gaaggtgtaggtgaagctcctgatt

SEQ ID NO: 4555066 - DNA, 25 bp, Homo sapien
gcacttgcactaatggaaggtgtag

SEQ ID NO: 4555067 - DNA, 25 bp, Homo sapien
ggtttacttgcgttggatttgactg

SEQ ID NO: 4555068 - DNA, 25 bp, Homo sapien
tgtttccctccactggagcaaatat

SEQ ID NO: 4555069 - DNA, 25 bp, Homo sapien
gggaaggatgctggatagcttctct

SEQ ID NO: 4555070 - DNA, 25 bp, Homo sapien
ttagtgttctgcatgtctagtccca

SEQ ID NO: 4555071 - DNA, 25 bp, Homo sapien
aacagacatacccacattcaaagga

SEQ ID NO: 4555072 - DNA, 25 bp, Homo sapien
tcagagtaaactcagtaataacaac

SEQ ID NO: 4555073 - DNA, 25 bp, Homo sapien
cagtagaacttgcttctcagagtaa

SEQ ID NO: 4555074 - DNA, 25 bp, Homo sapien
tctgagaacttatggaactcaaggc

SEQ ID NO: 4555075 - DNA, 25 bp, Homo sapien
tatggaactcaaggcactgtaccag

SEQ ID NO: 4555076 - DNA, 25 bp, Homo sapien
aaaactgcagcctgcattttgtaca

SEQ ID NO: 4555077 - DNA, 25 bp, Homo sapien
cattttgtacaacgatgtattcctt

SEQ ID NO: 4555078 - DNA, 25 bp, Homo sapien
tataaatgttcgatggtgttgagtc

SEQ ID NO: 4555079 - DNA, 25 bp, Homo sapien
gttttataaatgttcgatggtgttg

SEQ ID NO: 4555080 - DNA, 25 bp, Homo sapien
gtccatatcctttgcccgctttcta

SEQ ID NO: 4555081 - DNA, 25 bp, Homo sapien
tccatatcctttgcccgctttctaa

SEQ ID NO: 4555082 - DNA, 25 bp, Homo sapien
tgtccatatcctttgcccgctttct

SEQ ID NO: 4555083 - DNA, 25 bp, Homo sapien
atatgtcgaaccaaccttccaacct

SEQ ID NO: 4555084 - DNA, 25 bp, Homo sapien
atgtcgaaccaaccttccaacctag

SEQ ID NO: 4555085 - DNA, 25 bp, Homo sapien
agatactgacttttatcaaaagcct

SEQ ID NO: 4555086 - DNA, 25 bp, Homo sapien
tgcatatgtcgaaccaaccttccaa

SEQ ID NO: 4555087 - DNA, 25 bp, Homo sapien
cacattagtaaaacctctcagctct

SEQ ID NO: 4555088 - DNA, 25 bp, Homo sapien
tcagtcttccccatatctcagtata

SEQ ID NO: 4555089 - DNA, 25 bp, Homo sapien
cagtatatgaaaactccattcttgc

SEQ ID NO: 4555090 - DNA, 25 bp, Homo sapien
ttctcattacctcgttcaacgattg

SEQ ID NO: 4555091 - DNA, 25 bp, Homo sapien
tcccatggtcacacaactataaaag

SEQ ID NO: 4555092 - DNA, 25 bp, Homo sapien
ggtacaagcactaatattgagttcc

SEQ ID NO: 4555093 - DNA, 25 bp, Homo sapien
gccagagttcatatactgatcagta

SEQ ID NO: 4555094 - DNA, 25 bp, Homo sapien
tccaggtcaatgacaacatgtcttc

SEQ ID NO: 4555095 - DNA, 25 bp, Homo sapien
gttttttcactaagacaacataata

SEQ ID NO: 4555096 - DNA, 25 bp, Homo sapien
agttttttcactaagacaacataat

SEQ ID NO: 4555097 - DNA, 25 bp, Homo sapien
ttttttcactaagacaacataataa

SEQ ID NO: 4555098 - DNA, 25 bp, Homo sapien
cagttttttcactaagacaacataa

SEQ ID NO: 4555099 - DNA, 25 bp, Homo sapien
tgggatgttctaaaatgagtttcta

SEQ ID NO: 4555100 - DNA, 25 bp, Homo sapien
tttcatgggatgttctaaaatgagt

SEQ ID NO: 4555101 - DNA, 25 bp, Homo sapien
ggatgttctaaaatgagtttctaca

SEQ ID NO: 4555102 - DNA, 25 bp, Homo sapien
catgggatgttctaaaatgagtttc

SEQ ID NO: 4555103 - DNA, 25 bp, Homo sapien
gatgcctttgcaaccaagaatctca

SEQ ID NO: 4555104 - DNA, 25 bp, Homo sapien
tgtcaggagaacattatgtactact

SEQ ID NO: 4555105 - DNA, 25 bp, Homo sapien
tacaaaggaacaatgatggataatt

SEQ ID NO: 4555106 - DNA, 25 bp, Homo sapien
gtactactaatctagctctgatgcc

SEQ ID NO: 4555107 - DNA, 25 bp, Homo sapien
aagaacatgttctgtttcaaatgac

SEQ ID NO: 4555108 - DNA, 25 bp, Homo sapien
tgtgggaaactgacggtagcagtgc

SEQ ID NO: 4555109 - DNA, 25 bp, Homo sapien
gcaactgaaatggtgtgggaaactg

SEQ ID NO: 4555110 - DNA, 25 bp, Homo sapien
gggcgtatgtgtactttcgatgtga

SEQ ID NO: 4555111 - DNA, 25 bp, Homo sapien
ttcgatgtgacactgcaactgaaat

SEQ ID NO: 4555112 - DNA, 25 bp, Homo sapien
ctataaatggttgtcaacaggtgca

SEQ ID NO: 4555113 - DNA, 25 bp, Homo sapien
taaatggttgtcaacaggtgcaaaa

SEQ ID NO: 4555114 - DNA, 25 bp, Homo sapien
tataaatggttgtcaacaggtgcaa

SEQ ID NO: 4555115 - DNA, 25 bp, Homo sapien
ataaatggttgtcaacaggtgcaaa

SEQ ID NO: 4555116 - DNA, 25 bp, Homo sapien
ttcagttttacattctgctacttca

SEQ ID NO: 4555117 - DNA, 25 bp, Homo sapien
ctacttcagcttccctaataggctt

SEQ ID NO: 4555118 - DNA, 25 bp, Homo sapien
tttacattctgctacttcagcttcc

SEQ ID NO: 4555119 - DNA, 25 bp, Homo sapien
cagttttacattctgctacttcagc

SEQ ID NO: 4555120 - DNA, 25 bp, Homo sapien
aaagtcattaactaacatgatcaat

SEQ ID NO: 4555121 - DNA, 25 bp, Homo sapien
tcctcctggacatctccttcatgtt

SEQ ID NO: 4555122 - DNA, 25 bp, Homo sapien
tagaattttcaagcaactgaagcat

SEQ ID NO: 4555123 - DNA, 25 bp, Homo sapien
taaaggttgtgtgagtcttctgttc

SEQ ID NO: 4555124 - DNA, 25 bp, Homo sapien
acttgaaaattctgttttagccagt

SEQ ID NO: 4555125 - DNA, 25 bp, Homo sapien
tatttatcatgtctggacaacaata

SEQ ID NO: 4555126 - DNA, 25 bp, Homo sapien
caaaaagttatttatcatgtctgga

SEQ ID NO: 4555127 - DNA, 25 bp, Homo sapien
gaaaattctgttttagccagtccca

SEQ ID NO: 4555128 - DNA, 25 bp, Homo sapien
tctggacaaaccattaattactgta

SEQ ID NO: 4555129 - DNA, 25 bp, Homo sapien
gacaaaccattaattactgtaatca

SEQ ID NO: 4555130 - DNA, 25 bp, Homo sapien
tatttctggacaaaccattaattac

SEQ ID NO: 4555131 - DNA, 25 bp, Homo sapien
ggaatttgagaatctatataatcat

SEQ ID NO: 4555132 - DNA, 25 bp, Homo sapien
tagactgatttgatgaggtatttgt

SEQ ID NO: 4555133 - DNA, 25 bp, Homo sapien
caaaggatccaaaagattgaaatga

SEQ ID NO: 4555134 - DNA, 25 bp, Homo sapien
caagctcttggaaaaggtgttccat

SEQ ID NO: 4555135 - DNA, 25 bp, Homo sapien
gaaatgaatgttgcactttggacaa

SEQ ID NO: 4555136 - DNA, 25 bp, Homo sapien
ggtaatacagctgaggaatttgctc

SEQ ID NO: 4555137 - DNA, 25 bp, Homo sapien
tgctagcatagcctgggaagaagtc

SEQ ID NO: 4555138 - DNA, 25 bp, Homo sapien
acttcagaagtagaaggacgttttg

SEQ ID NO: 4555139 - DNA, 25 bp, Homo sapien
ccagaaacactttcgctgggtttag

SEQ ID NO: 4555140 - DNA, 25 bp, Homo sapien
aggctaaagtcccactcactgaagt

SEQ ID NO: 4555141 - DNA, 25 bp, Homo sapien
tcaggctaaagtcccactcactgaa

SEQ ID NO: 4555142 - DNA, 25 bp, Homo sapien
gctaaagtcccactcactgaagtag

SEQ ID NO: 4555143 - DNA, 25 bp, Homo sapien
tgctcaggctaaagtcccactcact

SEQ ID NO: 4555144 - DNA, 25 bp, Homo sapien
tgccatagaaagtgttggtccccct

SEQ ID NO: 4555145 - DNA, 25 bp, Homo sapien
ccccttggtaatgtgataatcctgt

SEQ ID NO: 4555146 - DNA, 25 bp, Homo sapien
cagtaactctgatgacttattagac

SEQ ID NO: 4555147 - DNA, 25 bp, Homo sapien
gacacaactcgtgatgagtttgtta

SEQ ID NO: 4555148 - DNA, 25 bp, Homo sapien
tacctttcccgctataccttcagga

SEQ ID NO: 4555149 - DNA, 25 bp, Homo sapien
gggaaccatcagctgaggtgctttg

SEQ ID NO: 4555150 - DNA, 25 bp, Homo sapien
tctgagtcagaaaggaatctaattc

SEQ ID NO: 4555151 - DNA, 25 bp, Homo sapien
catcctcggtcaaacgttggaaaga

SEQ ID NO: 4555152 - DNA, 25 bp, Homo sapien
taagggcatcttgctaaggactcac

SEQ ID NO: 4555153 - DNA, 25 bp, Homo sapien
tctgagacagtggtgccctaactct

SEQ ID NO: 4555154 - DNA, 25 bp, Homo sapien
ccttattgggaagacctacgtggca

SEQ ID NO: 4555155 - DNA, 25 bp, Homo sapien
caagattgactaagcgtgtgtggca

SEQ ID NO: 4555156 - DNA, 25 bp, Homo sapien
taatctatacccagttcaaactgtg

SEQ ID NO: 4555157 - DNA, 25 bp, Homo sapien
cagacacagaggtactttatgcaca

SEQ ID NO: 4555158 - DNA, 25 bp, Homo sapien
gagattttgatatgtacttggagag

SEQ ID NO: 4555159 - DNA, 25 bp, Homo sapien
tgtggaaactgaactaacatgactg

SEQ ID NO: 4555160 - DNA, 25 bp, Homo sapien
cttgagctagcgaaaatatggtgac

SEQ ID NO: 4555161 - DNA, 25 bp, Homo sapien
gctaactatgcttctactggatgac

SEQ ID NO: 4555162 - DNA, 25 bp, Homo sapien
tactgtgagtgcacggcaggtgact

SEQ ID NO: 4555163 - DNA, 25 bp, Homo sapien
taagaatacctggtcccgtctgcaa

SEQ ID NO: 4555164 - DNA, 25 bp, Homo sapien
ctgttgatattgataaacaacatcc

SEQ ID NO: 4555165 - DNA, 25 bp, Homo sapien
cctgagctggccgtatagttttaga

SEQ ID NO: 4555166 - DNA, 25 bp, Homo sapien
aacatccaatggatccctgagctgg

SEQ ID NO: 4555167 - DNA, 25 bp, Homo sapien
tgacagtccagaattgtaactgggt

SEQ ID NO: 4555168 - DNA, 25 bp, Homo sapien
ggctgaacaataacagaactatctg

SEQ ID NO: 4555169 - DNA, 25 bp, Homo sapien
aggctgaacaataacagaactatct

SEQ ID NO: 4555170 - DNA, 25 bp, Homo sapien
aaaggctgaacaataacagaactat

SEQ ID NO: 4555171 - DNA, 25 bp, Homo sapien
aaggctgaacaataacagaactatc

SEQ ID NO: 4555172 - DNA, 25 bp, Homo sapien
atgaaaatttattggtgaggcaggc

SEQ ID NO: 4555173 - DNA, 25 bp, Homo sapien
aggcactggatttgatgttggattc

SEQ ID NO: 4555174 - DNA, 25 bp, Homo sapien
tgttggattcgtgtagtgttgactt

SEQ ID NO: 4555175 - DNA, 25 bp, Homo sapien
tgtaggcttgaatgcagcagtaata

SEQ ID NO: 4555176 - DNA, 25 bp, Homo sapien
attctttagtccccttgaatatgag

SEQ ID NO: 4555177 - DNA, 25 bp, Homo sapien
tgaatatgagctggggttaactctg

SEQ ID NO: 4555178 - DNA, 25 bp, Homo sapien
ctttagtccccttgaatatgagctg

SEQ ID NO: 4555179 - DNA, 25 bp, Homo sapien
ccattctttagtccccttgaatatg

SEQ ID NO: 4555180 - DNA, 25 bp, Homo sapien
ttgatatctcgccaacaaagattgg

SEQ ID NO: 4555181 - DNA, 25 bp, Homo sapien
gatatctcgccaacaaagattggct

SEQ ID NO: 4555182 - DNA, 25 bp, Homo sapien
cttgatatctcgccaacaaagattg

SEQ ID NO: 4555183 - DNA, 25 bp, Homo sapien
tatctcgccaacaaagattggctca

SEQ ID NO: 4555184 - DNA, 25 bp, Homo sapien
aattttaaacaatcagggagactcg

SEQ ID NO: 4555185 - DNA, 25 bp, Homo sapien
gggcagtaggcacatggcatataat

SEQ ID NO: 4555186 - DNA, 25 bp, Homo sapien
ccagttggtataggtataggctgaa

SEQ ID NO: 4555187 - DNA, 25 bp, Homo sapien
taatctatggactaggcgaagtcag

SEQ ID NO: 4555188 - DNA, 25 bp, Homo sapien
gagatgactttctgtaaattgtcac

SEQ ID NO: 4555189 - DNA, 25 bp, Homo sapien
tgtgactccagacaagccagcaagt

SEQ ID NO: 4555190 - DNA, 25 bp, Homo sapien
catgtgactccagacaagccagcaa

SEQ ID NO: 4555191 - DNA, 25 bp, Homo sapien
gactccagacaagccagcaagttat

SEQ ID NO: 4555192 - DNA, 25 bp, Homo sapien
gtgactccagacaagccagcaagtt

SEQ ID NO: 4555193 - DNA, 25 bp, Homo sapien
cagtctgtccctggatctaaaaaca

SEQ ID NO: 4555194 - DNA, 25 bp, Homo sapien
tattccagaagtgcacatttggccc

SEQ ID NO: 4555195 - DNA, 25 bp, Homo sapien
ccagaagatctacatgacagaaggt

SEQ ID NO: 4555196 - DNA, 25 bp, Homo sapien
tatccgtggttccacaaccacagat

SEQ ID NO: 4555197 - DNA, 25 bp, Homo sapien
tgtatcaatacaatgtagcattatt

SEQ ID NO: 4555198 - DNA, 25 bp, Homo sapien
gaagtcagtcacacagtttgattct

SEQ ID NO: 4555199 - DNA, 25 bp, Homo sapien
gctgaaaatattatggaattagtgt

SEQ ID NO: 4555200 - DNA, 25 bp, Homo sapien
tcagaataatgggtaacaggtttcc

SEQ ID NO: 4555201 - DNA, 25 bp, Homo sapien
tctaaccacaatgatttctgcacag

SEQ ID NO: 4555202 - DNA, 25 bp, Homo sapien
taaccacaatgatttctgcacagat

SEQ ID NO: 4555203 - DNA, 25 bp, Homo sapien
ctaaccacaatgatttctgcacaga

SEQ ID NO: 4555204 - DNA, 25 bp, Homo sapien
cctctaaccacaatgatttctgcac

SEQ ID NO: 4555205 - DNA, 25 bp, Homo sapien
cctaaacgactgctcccaactgtgt

SEQ ID NO: 4555206 - DNA, 25 bp, Homo sapien
gactggattagtagcctaactggac

SEQ ID NO: 4555207 - DNA, 25 bp, Homo sapien
gatgttccagttgaagcacttgcaa

SEQ ID NO: 4555208 - DNA, 25 bp, Homo sapien
gcattccaagttccctaaagtagat

SEQ ID NO: 4555209 - DNA, 25 bp, Homo sapien
gggcaacataacaaccgcatttcaa

SEQ ID NO: 4555210 - DNA, 25 bp, Homo sapien
aaatatcaacgaaagggcaactgag

SEQ ID NO: 4555211 - DNA, 25 bp, Homo sapien
cgtaatgcactttgaaacgttcaga

SEQ ID NO: 4555212 - DNA, 25 bp, Homo sapien
tatatactagagttgagcaccggag

SEQ ID NO: 4555213 - DNA, 25 bp, Homo sapien
ggcacacagccctaacaatggtata

SEQ ID NO: 4555214 - DNA, 25 bp, Homo sapien
taagtttctgcgtggagacagctgg

SEQ ID NO: 4555215 - DNA, 25 bp, Homo sapien
tataagcaaaccagtgccttccctg

SEQ ID NO: 4555216 - DNA, 25 bp, Homo sapien
caaaggtctcccgtgcttgcagaag

SEQ ID NO: 4555217 - DNA, 25 bp, Homo sapien
gaacgaccggtcatctgggcaaaat

SEQ ID NO: 4555218 - DNA, 25 bp, Homo sapien
aataacgggaattctatggcagagg

SEQ ID NO: 4555219 - DNA, 25 bp, Homo sapien
cttgcgataagttgggaggaattcc

SEQ ID NO: 4555220 - DNA, 25 bp, Homo sapien
tccttccatcgctggagcaggctaa

SEQ ID NO: 4555221 - DNA, 25 bp, Homo sapien
ctgaagagacacgggggtgggctgt

SEQ ID NO: 4555222 - DNA, 25 bp, Homo sapien
gaagagacacgggggtgggctgtgg

SEQ ID NO: 4555223 - DNA, 25 bp, Homo sapien
tgaagagacacgggggtgggctgtg

SEQ ID NO: 4555224 - DNA, 25 bp, Homo sapien
cgtgagcggagcggatcggcctgac

SEQ ID NO: 4555225 - DNA, 25 bp, Homo sapien
tgagcggagcggatcggcctgactg

SEQ ID NO: 4555226 - DNA, 25 bp, Homo sapien
ggagcggatcggcctgactggagcc

SEQ ID NO: 4555227 - DNA, 25 bp, Homo sapien
agcggagcggatcggcctgactgga

SEQ ID NO: 4555228 - DNA, 25 bp, Homo sapien
gcctgtgggtcgaagactaaaccag

SEQ ID NO: 4555229 - DNA, 25 bp, Homo sapien
tacagccgccgttcgaaagaagcaa

SEQ ID NO: 4555230 - DNA, 25 bp, Homo sapien
acgaaaaactacactgcggcgacgg

SEQ ID NO: 4555231 - DNA, 25 bp, Homo sapien
tgaaaaggtcatgggatacagccgc

SEQ ID NO: 4555232 - DNA, 25 bp, Homo sapien
aaatcatcgttaagtgtgacagaga

SEQ ID NO: 4555233 - DNA, 25 bp, Homo sapien
aagtgtgacagagataatgatacat

SEQ ID NO: 4555234 - DNA, 25 bp, Homo sapien
tgtgacagagataatgatacatatt

SEQ ID NO: 4555235 - DNA, 25 bp, Homo sapien
gtgtgacagagataatgatacatat

SEQ ID NO: 4555236 - DNA, 25 bp, Homo sapien
tcaaattctttctagaggtgggttc

SEQ ID NO: 4555237 - DNA, 25 bp, Homo sapien
aattctttctagaggtgggttctcg

SEQ ID NO: 4555238 - DNA, 25 bp, Homo sapien
gatcaagcaatctgcacctcgacct

SEQ ID NO: 4555239 - DNA, 25 bp, Homo sapien
ctttctagaggtgggttctcgctat

SEQ ID NO: 4555240 - DNA, 25 bp, Homo sapien
aggattttcctctaccagtcagaac

SEQ ID NO: 4555241 - DNA, 25 bp, Homo sapien
gattttcctctaccagtcagaacca

SEQ ID NO: 4555242 - DNA, 25 bp, Homo sapien
cctctaccagtcagaaccacattat

SEQ ID NO: 4555243 - DNA, 25 bp, Homo sapien
tttcctctaccagtcagaaccacat

SEQ ID NO: 4555244 - DNA, 25 bp, Homo sapien
aaaggagaaccagtttttgccagca

SEQ ID NO: 4555245 - DNA, 25 bp, Homo sapien
taattgcttctaccaccttatgggt

SEQ ID NO: 4555246 - DNA, 25 bp, Homo sapien
ggcagcgctggtattcttgtcctca

SEQ ID NO: 4555247 - DNA, 25 bp, Homo sapien
gaacatgctgggtcacaaaaatgaa

SEQ ID NO: 4555248 - DNA, 25 bp, Homo sapien
ttccaaagctacttattatccataa

SEQ ID NO: 4555249 - DNA, 25 bp, Homo sapien
ttttgtgtcatgaaagctgaaggta

SEQ ID NO: 4555250 - DNA, 25 bp, Homo sapien
gaaagctgaaggtattaatggttta

SEQ ID NO: 4555251 - DNA, 25 bp, Homo sapien
tcatgaaagctgaaggtattaatgg

SEQ ID NO: 4555252 - DNA, 25 bp, Homo sapien
tacacgtgcagctattggaaaaaag

SEQ ID NO: 4555253 - DNA, 25 bp, Homo sapien
tacaacttacgcagtccatcatggt

SEQ ID NO: 4555254 - DNA, 25 bp, Homo sapien
taaagccatcgtaggaggaattttc

SEQ ID NO: 4555255 - DNA, 25 bp, Homo sapien
tgacagcacaattagagacacctag

SEQ ID NO: 4555256 - DNA, 25 bp, Homo sapien
tcataaaaacccaattgtgtgggcc

SEQ ID NO: 4555257 - DNA, 25 bp, Homo sapien
tctattagtgatggccaggacgggc

SEQ ID NO: 4555258 - DNA, 25 bp, Homo sapien
cagttttatacactgcagctcctgg

SEQ ID NO: 4555259 - DNA, 25 bp, Homo sapien
ttataggagatcttatccagtccca

SEQ ID NO: 4555260 - DNA, 25 bp, Homo sapien
gatcagactctgaaaaataccctgc

SEQ ID NO: 4555261 - DNA, 25 bp, Homo sapien
tctcagctctggtgtagtagactgt

SEQ ID NO: 4555262 - DNA, 25 bp, Homo sapien
ggtacagcatagacaccagccattc

SEQ ID NO: 4555263 - DNA, 25 bp, Homo sapien
gggcactgggtttcaccaattctct

SEQ ID NO: 4555264 - DNA, 25 bp, Homo sapien
tagtgacattgtgccccattctgga

SEQ ID NO: 4555265 - DNA, 25 bp, Homo sapien
tcatcatagccaaacttaggaaagt

SEQ ID NO: 4555266 - DNA, 25 bp, Homo sapien
tgcattcatagtgacattgtgcccc

SEQ ID NO: 4555267 - DNA, 25 bp, Homo sapien
ttgacactactattcaaccaaaatg

SEQ ID NO: 4555268 - DNA, 25 bp, Homo sapien
agatttttgtatgctatcaaagcta

SEQ ID NO: 4555269 - DNA, 25 bp, Homo sapien
tatttttgttaatgggcacacaaca

SEQ ID NO: 4555270 - DNA, 25 bp, Homo sapien
tagagctatagagcagagatttttg

SEQ ID NO: 4555271 - DNA, 25 bp, Homo sapien
caacataaagtatgggcagcgctgt

SEQ ID NO: 4555272 - DNA, 25 bp, Homo sapien
ctccatatcgttttccatagaagtt

SEQ ID NO: 4555273 - DNA, 25 bp, Homo sapien
tgctggacggaatgatggttctgct

SEQ ID NO: 4555274 - DNA, 25 bp, Homo sapien
gaagttgtactggtttgcattccca

SEQ ID NO: 4555275 - DNA, 25 bp, Homo sapien
tttgagagtctccatatcgttttcc

SEQ ID NO: 4555276 - DNA, 25 bp, Homo sapien
gctccagtgagccataattctatca

SEQ ID NO: 4555277 - DNA, 25 bp, Homo sapien
tcccaactgcttgacaggctcaggt

SEQ ID NO: 4555278 - DNA, 25 bp, Homo sapien
ctgtactcccaactgcttgacaggc

SEQ ID NO: 4555279 - DNA, 25 bp, Homo sapien
gagccataattctatcactgcactc

SEQ ID NO: 4555280 - DNA, 25 bp, Homo sapien
cagaaggaaagcttgaggccactct

SEQ ID NO: 4555281 - DNA, 25 bp, Homo sapien
aggcagaaggaaagcttgaggccac

SEQ ID NO: 4555282 - DNA, 25 bp, Homo sapien
gaaggaaagcttgaggccactctgg

SEQ ID NO: 4555283 - DNA, 25 bp, Homo sapien
aggaaagcttgaggccactctgggc

SEQ ID NO: 4555284 - DNA, 25 bp, Homo sapien
tatgaatatagtcgcaaaactcctc

SEQ ID NO: 4555285 - DNA, 25 bp, Homo sapien
tgtccactttcacaggtactatgta

SEQ ID NO: 4555286 - DNA, 25 bp, Homo sapien
cacagtgtgaccaagtgggttttat

SEQ ID NO: 4555287 - DNA, 25 bp, Homo sapien
ggcatttatgaataacccacagcta

SEQ ID NO: 4555288 - DNA, 25 bp, Homo sapien
gcataagaataaacctgtagatcca

SEQ ID NO: 4555289 - DNA, 25 bp, Homo sapien
ataagaataaacctgtagatccatg

SEQ ID NO: 4555290 - DNA, 25 bp, Homo sapien
cataagaataaacctgtagatccat

SEQ ID NO: 4555291 - DNA, 25 bp, Homo sapien
ggcataagaataaacctgtagatcc

SEQ ID NO: 4555292 - DNA, 25 bp, Homo sapien
caaccaatacgagggagaaaagact

SEQ ID NO: 4555293 - DNA, 25 bp, Homo sapien
agagggactccctatatcacagtac

SEQ ID NO: 4555294 - DNA, 25 bp, Homo sapien
tgtccttggacagtggattcttaga

SEQ ID NO: 4555295 - DNA, 25 bp, Homo sapien
aaaacgtttgtacatcaaaggccat

SEQ ID NO: 4555296 - DNA, 25 bp, Homo sapien
cgttcatcatgaacaagccagctcc

SEQ ID NO: 4555297 - DNA, 25 bp, Homo sapien
tatcgtgcacgacagaggtaccacc

SEQ ID NO: 4555298 - DNA, 25 bp, Homo sapien
tgcctgctttcaaggtaccaatatg

SEQ ID NO: 4555299 - DNA, 25 bp, Homo sapien
taccaatggataaagttaacgagcc

SEQ ID NO: 4555300 - DNA, 25 bp, Homo sapien
tagtcaacccactcatcatcaggga

SEQ ID NO: 4555301 - DNA, 25 bp, Homo sapien
gaagagcagaccagacacaaaagaa

SEQ ID NO: 4555302 - DNA, 25 bp, Homo sapien
tgaaatcaatctagggagccaggcg

SEQ ID NO: 4555303 - DNA, 25 bp, Homo sapien
cacttgtgccctgtttgtgggaaca

SEQ ID NO: 4555304 - DNA, 25 bp, Homo sapien
ccaagacaagataggttgacaatac

SEQ ID NO: 4555305 - DNA, 25 bp, Homo sapien
caaatgtctgccatacgtcctttca

SEQ ID NO: 4555306 - DNA, 25 bp, Homo sapien
gacaatactaagagctgacaaagac

SEQ ID NO: 4555307 - DNA, 25 bp, Homo sapien
tctgggtaggagaacaatttgccag

SEQ ID NO: 4555308 - DNA, 25 bp, Homo sapien
tatcagcccctatcacttcaatggt

SEQ ID NO: 4555309 - DNA, 25 bp, Homo sapien
tacacgtcgtggagatatttggcca

SEQ ID NO: 4555310 - DNA, 25 bp, Homo sapien
ggccaatcacatttatcccagcttg

SEQ ID NO: 4555311 - DNA, 25 bp, Homo sapien
tgacagaaagcggacatacacgtcg

SEQ ID NO: 4555312 - DNA, 25 bp, Homo sapien
tctggtgaaatcttttaaattacgc

SEQ ID NO: 4555313 - DNA, 25 bp, Homo sapien
catctggtgaaatcttttaaattac

SEQ ID NO: 4555314 - DNA, 25 bp, Homo sapien
atctggtgaaatcttttaaattacg

SEQ ID NO: 4555315 - DNA, 25 bp, Homo sapien
tcatctggtgaaatcttttaaatta

SEQ ID NO: 4555316 - DNA, 25 bp, Homo sapien
ttgcattcacgtaagcttctgctgc

SEQ ID NO: 4555317 - DNA, 25 bp, Homo sapien
ccgcttgtattttgcattcacgtaa

SEQ ID NO: 4555318 - DNA, 25 bp, Homo sapien
tgtattttgcattcacgtaagcttc

SEQ ID NO: 4555319 - DNA, 25 bp, Homo sapien
ctaataccgcttgtattttgcattc

SEQ ID NO: 4555320 - DNA, 25 bp, Homo sapien
aaggaaaggaggcttttgctgagca

SEQ ID NO: 4555321 - DNA, 25 bp, Homo sapien
aaaattagcacctggcatatggaat

SEQ ID NO: 4555322 - DNA, 25 bp, Homo sapien
tggaatattcagcaggtggctcagc

SEQ ID NO: 4555323 - DNA, 25 bp, Homo sapien
gcagggagagagttactgtttttct

SEQ ID NO: 4555324 - DNA, 25 bp, Homo sapien
catttgctgatatcaccaccacaaa

SEQ ID NO: 4555325 - DNA, 25 bp, Homo sapien
gaagacgttacgccccaggacagtg

SEQ ID NO: 4555326 - DNA, 25 bp, Homo sapien
attatgtagatctcccaagtgttga

SEQ ID NO: 4555327 - DNA, 25 bp, Homo sapien
gccccaggacagtgaatatacattt

SEQ ID NO: 4555328 - DNA, 25 bp, Homo sapien
tagggtaacaactcggatgatacat

SEQ ID NO: 4555329 - DNA, 25 bp, Homo sapien
ctcagctgacaaggcatgttattaa

SEQ ID NO: 4555330 - DNA, 25 bp, Homo sapien
attcccctacatggtgtttatcttg

SEQ ID NO: 4555331 - DNA, 25 bp, Homo sapien
tgctgtaatcatccatccatagcct

SEQ ID NO: 4555332 - DNA, 25 bp, Homo sapien
gtcactttagggagcagcacgcagg

SEQ ID NO: 4555333 - DNA, 25 bp, Homo sapien
tctggaaagtgcgtgtgcgcgtccc

SEQ ID NO: 4555334 - DNA, 25 bp, Homo sapien
catgtatgtcagttgcgttgcggcc

SEQ ID NO: 4555335 - DNA, 25 bp, Homo sapien
tgcggcctcgaaagtctgacaatgt

SEQ ID NO: 4555336 - DNA, 25 bp, Homo sapien
ttctccacttgaacctgcacagagg

SEQ ID NO: 4555337 - DNA, 25 bp, Homo sapien
ttatatcatcaagattcagattctc

SEQ ID NO: 4555338 - DNA, 25 bp, Homo sapien
gttctgttagatatggcttggctga

SEQ ID NO: 4555339 - DNA, 25 bp, Homo sapien
tctgttagatatggcttggctgaag

SEQ ID NO: 4555340 - DNA, 25 bp, Homo sapien
tatgtctcatcaacacgtaatttat

SEQ ID NO: 4555341 - DNA, 25 bp, Homo sapien
tcatcaacacgtaatttattgagag

SEQ ID NO: 4555342 - DNA, 25 bp, Homo sapien
gatatgtctcatcaacacgtaattt

SEQ ID NO: 4555343 - DNA, 25 bp, Homo sapien
tgtctcatcaacacgtaatttattg

SEQ ID NO: 4555344 - DNA, 25 bp, Homo sapien
gtgtcattgcactctaatttgggca

SEQ ID NO: 4555345 - DNA, 25 bp, Homo sapien
tcgtgtcattgcactctaatttggg

SEQ ID NO: 4555346 - DNA, 25 bp, Homo sapien
agatcgtgtcattgcactctaattt

SEQ ID NO: 4555347 - DNA, 25 bp, Homo sapien
gatcgtgtcattgcactctaatttg

SEQ ID NO: 4555348 - DNA, 25 bp, Homo sapien
cagaagactgatctgtgtgaagaga

SEQ ID NO: 4555349 - DNA, 25 bp, Homo sapien
ggtggtcaggaacagaagactgatc

SEQ ID NO: 4555350 - DNA, 25 bp, Homo sapien
tctctgagagaagttaacggatcct

SEQ ID NO: 4555351 - DNA, 25 bp, Homo sapien
gggataagcctatgattttgatttc

SEQ ID NO: 4555352 - DNA, 25 bp, Homo sapien
ggcagttttaatcccaccaagcata

SEQ ID NO: 4555353 - DNA, 25 bp, Homo sapien
ggcattctttcattgtgctactgaa

SEQ ID NO: 4555354 - DNA, 25 bp, Homo sapien
aaatagagtggaagagggtagccaa

SEQ ID NO: 4555355 - DNA, 25 bp, Homo sapien
gaagaatgtcccaatcacaaaaact

SEQ ID NO: 4555356 - DNA, 25 bp, Homo sapien
ggaaactgatcatatgcaactaaga

SEQ ID NO: 4555357 - DNA, 25 bp, Homo sapien
gagaatactgaccatgattttttga

SEQ ID NO: 4555358 - DNA, 25 bp, Homo sapien
cctaagatgccagtgacttgtaaga

SEQ ID NO: 4555359 - DNA, 25 bp, Homo sapien
catttacaagatctgacatgtggtg

SEQ ID NO: 4555360 - DNA, 25 bp, Homo sapien
caatagtctttatctattcaaggta

SEQ ID NO: 4555361 - DNA, 25 bp, Homo sapien
ttttcctgagctgttaaggacctca

SEQ ID NO: 4555362 - DNA, 25 bp, Homo sapien
tctggtagcccgacttaggttcatc

SEQ ID NO: 4555363 - DNA, 25 bp, Homo sapien
cacagggccactactctaaagatat

SEQ ID NO: 4555364 - DNA, 25 bp, Homo sapien
gtaggtcttgaatggagccccaaaa

SEQ ID NO: 4555365 - DNA, 25 bp, Homo sapien
aataggttgctagcccaaccctcag

SEQ ID NO: 4555366 - DNA, 25 bp, Homo sapien
tctggaatggagttctactcactga

SEQ ID NO: 4555367 - DNA, 25 bp, Homo sapien
tcagaagtaagatagttgagatcac

SEQ ID NO: 4555368 - DNA, 25 bp, Homo sapien
gcgggcaatggaacgagactttcaa

SEQ ID NO: 4555369 - DNA, 25 bp, Homo sapien
gacctttaagcttccagacaggaca

SEQ ID NO: 4555370 - DNA, 25 bp, Homo sapien
caacattggaagcaagcgggcaatg

SEQ ID NO: 4555371 - DNA, 25 bp, Homo sapien
caccaaagtctgtgatcaggaaatc

SEQ ID NO: 4555372 - DNA, 25 bp, Homo sapien
catcaatgatggtagtgccatgaac

SEQ ID NO: 4555373 - DNA, 25 bp, Homo sapien
caacagtgggaggttcttgctggct

SEQ ID NO: 4555374 - DNA, 25 bp, Homo sapien
ggaaaagacgaaatctctaccagga

SEQ ID NO: 4555375 - DNA, 25 bp, Homo sapien
tgatattggcaaggagtagagaact

SEQ ID NO: 4555376 - DNA, 25 bp, Homo sapien
cgcacctgtaatccctgctatttgg

SEQ ID NO: 4555377 - DNA, 25 bp, Homo sapien
gccgagatcctgccaccacactcca

SEQ ID NO: 4555378 - DNA, 25 bp, Homo sapien
gagccgagatcctgccaccacactc

SEQ ID NO: 4555379 - DNA, 25 bp, Homo sapien
agtgagccgagatcctgccaccaca

SEQ ID NO: 4555380 - DNA, 25 bp, Homo sapien
gaatgggttacctctgaagcgctct

SEQ ID NO: 4555381 - DNA, 25 bp, Homo sapien
gattgggaccacatgcccctgtaag

SEQ ID NO: 4555382 - DNA, 25 bp, Homo sapien
aaatatgttacgctcattgccagcc

SEQ ID NO: 4555383 - DNA, 25 bp, Homo sapien
taacccggctagacttgtatttgga

SEQ ID NO: 4555384 - DNA, 25 bp, Homo sapien
taagtttcaggtacagccaatgcaa

SEQ ID NO: 4555385 - DNA, 25 bp, Homo sapien
gagtctaggccaccataagtttcag

SEQ ID NO: 4555386 - DNA, 25 bp, Homo sapien
ccaatgcaaagccttggaaatccac

SEQ ID NO: 4555387 - DNA, 25 bp, Homo sapien
ggaaatccacctgacagctccggtt

SEQ ID NO: 4555388 - DNA, 25 bp, Homo sapien
agtaatggcatatggtagctgaatc

SEQ ID NO: 4555389 - DNA, 25 bp, Homo sapien
tactaactacagtaatggcatatgg

SEQ ID NO: 4555390 - DNA, 25 bp, Homo sapien
tatagagacaactgtactaactaca

SEQ ID NO: 4555391 - DNA, 25 bp, Homo sapien
gggaaccaatcccacggatatagag

SEQ ID NO: 4555392 - DNA, 25 bp, Homo sapien
gcagcggatccagatgcttccacag

SEQ ID NO: 4555393 - DNA, 25 bp, Homo sapien
cattcccaagaactagtcccacgtg

SEQ ID NO: 4555394 - DNA, 25 bp, Homo sapien
cccacgtgcagttcggttgctccga

SEQ ID NO: 4555395 - DNA, 25 bp, Homo sapien
tgacctactcgggaatggcagcctt

SEQ ID NO: 4555396 - DNA, 25 bp, Homo sapien
tccctgcaacttgtcagttctattg

SEQ ID NO: 4555397 - DNA, 25 bp, Homo sapien
cgcgttccctgcaacttgtcagttc

SEQ ID NO: 4555398 - DNA, 25 bp, Homo sapien
ctgcaacttgtcagttctattgttg

SEQ ID NO: 4555399 - DNA, 25 bp, Homo sapien
gcctgcgagcggcgcgttccctgca

SEQ ID NO: 4555400 - DNA, 25 bp, Homo sapien
ccatgaatgacaggacttggatctg

SEQ ID NO: 4555401 - DNA, 25 bp, Homo sapien
tacaaagaggaggttatgaaacgct

SEQ ID NO: 4555402 - DNA, 25 bp, Homo sapien
gactttgtgatgaagatgctcctgc

SEQ ID NO: 4555403 - DNA, 25 bp, Homo sapien
gatctgtctgctgatgacgctgctg

SEQ ID NO: 4555404 - DNA, 25 bp, Homo sapien
gagctaaggtcagtatggcagctat

SEQ ID NO: 4555405 - DNA, 25 bp, Homo sapien
tctgatggagacttaccttagccag

SEQ ID NO: 4555406 - DNA, 25 bp, Homo sapien
gttccctgctgggtatcaaaacaat

SEQ ID NO: 4555407 - DNA, 25 bp, Homo sapien
gactcttgggtggaggacagtacta

SEQ ID NO: 4555408 - DNA, 25 bp, Homo sapien
ccaagtagtaaagccatggaggttg

SEQ ID NO: 4555409 - DNA, 25 bp, Homo sapien
taaagccatggaggttgtatgtgaa

SEQ ID NO: 4555410 - DNA, 25 bp, Homo sapien
ccatggaggttgtatgtgaaaacag

SEQ ID NO: 4555411 - DNA, 25 bp, Homo sapien
aagaagtggccaagtagtaaagcca

SEQ ID NO: 4555412 - DNA, 25 bp, Homo sapien
catctagacatgatgtctttagcaa

SEQ ID NO: 4555413 - DNA, 25 bp, Homo sapien
ctgcttttgttgattgtaggaaata

SEQ ID NO: 4555414 - DNA, 25 bp, Homo sapien
tattttgaagttagactgcacatct

SEQ ID NO: 4555415 - DNA, 25 bp, Homo sapien
gattgtaggaaatatgttgtcttca

SEQ ID NO: 4555416 - DNA, 25 bp, Homo sapien
cttgtgtagcctggtagagttggtt

SEQ ID NO: 4555417 - DNA, 25 bp, Homo sapien
tatattttcttgtgtagcctggtag

SEQ ID NO: 4555418 - DNA, 25 bp, Homo sapien
cttttattgattgtaaaacttccag

SEQ ID NO: 4555419 - DNA, 25 bp, Homo sapien
ccagatttctgagatgccgccttac

SEQ ID NO: 4555420 - DNA, 25 bp, Homo sapien
tttttggtactctgaaagtgcccat

SEQ ID NO: 4555421 - DNA, 25 bp, Homo sapien
gaaactgccaaagcggttgtatcat

SEQ ID NO: 4555422 - DNA, 25 bp, Homo sapien
gcaagtctttatgtggacattcata

SEQ ID NO: 4555423 - DNA, 25 bp, Homo sapien
tagtgtatgagaatttcagttcctc

SEQ ID NO: 4555424 - DNA, 25 bp, Homo sapien
tgcgcccggccattatgaccattct

SEQ ID NO: 4555425 - DNA, 25 bp, Homo sapien
ttcatgtatgtatcgtaacttggtt

SEQ ID NO: 4555426 - DNA, 25 bp, Homo sapien
aattggggagattgggcagcgttca

SEQ ID NO: 4555427 - DNA, 25 bp, Homo sapien
cagcgttcatgtatgtatcgtaact

SEQ ID NO: 4555428 - DNA, 25 bp, Homo sapien
ggcagcgttcatgtatgtatcgtaa

SEQ ID NO: 4555429 - DNA, 25 bp, Homo sapien
tcactcctggttttgctctgtggct

SEQ ID NO: 4555430 - DNA, 25 bp, Homo sapien
ttccattctcaatctcaactttcac

SEQ ID NO: 4555431 - DNA, 25 bp, Homo sapien
actcctggttttgctctgtggctgt

SEQ ID NO: 4555432 - DNA, 25 bp, Homo sapien
tctcaatctcaactttcactcctgg

SEQ ID NO: 4555433 - DNA, 25 bp, Homo sapien
gatgttgcaaggtactggcaggaca

SEQ ID NO: 4555434 - DNA, 25 bp, Homo sapien
ttccctgacgcttttggaggacaga

SEQ ID NO: 4555435 - DNA, 25 bp, Homo sapien
tgccctccactctgaacggaattag

SEQ ID NO: 4555436 - DNA, 25 bp, Homo sapien
ttggcaacgtggcagaatcccgtct

SEQ ID NO: 4555437 - DNA, 25 bp, Homo sapien
aacagactgcttgacttcatcctca

SEQ ID NO: 4555438 - DNA, 25 bp, Homo sapien
ggatacttctatagagcttctcaaa

SEQ ID NO: 4555439 - DNA, 25 bp, Homo sapien
atgctactggttgcgggaccactct

SEQ ID NO: 4555440 - DNA, 25 bp, Homo sapien
tactggcttggagatagggcagaca

SEQ ID NO: 4555441 - DNA, 25 bp, Homo sapien
gttttactcccactactgtgacagc

SEQ ID NO: 4555442 - DNA, 25 bp, Homo sapien
tgttttactcccactactgtgacag

SEQ ID NO: 4555443 - DNA, 25 bp, Homo sapien
tttactcccactactgtgacagcca

SEQ ID NO: 4555444 - DNA, 25 bp, Homo sapien
tactcccactactgtgacagccaga

SEQ ID NO: 4555445 - DNA, 25 bp, Homo sapien
gtggctctcttctctcagatttgtg

SEQ ID NO: 4555446 - DNA, 25 bp, Homo sapien
cctgataactgtctgcatcatttac

SEQ ID NO: 4555447 - DNA, 25 bp, Homo sapien
gataactgtctgcatcatttaccat

SEQ ID NO: 4555448 - DNA, 25 bp, Homo sapien
acctgataactgtctgcatcattta

SEQ ID NO: 4555449 - DNA, 25 bp, Homo sapien
tgataactgtctgcatcatttacca

SEQ ID NO: 4555450 - DNA, 25 bp, Homo sapien
caggagaaggattgccactgtcttt

SEQ ID NO: 4555451 - DNA, 25 bp, Homo sapien
taactgtccggattgaaggagagca

SEQ ID NO: 4555452 - DNA, 25 bp, Homo sapien
gtaaaagagtgagtccagatatgga

SEQ ID NO: 4555453 - DNA, 25 bp, Homo sapien
gatatggaaggtgttacaacaaccc

SEQ ID NO: 4555454 - DNA, 25 bp, Homo sapien
ggttggcttcataagcaaacttaaa

SEQ ID NO: 4555455 - DNA, 25 bp, Homo sapien
ctctcctcagtatttggttggcttc

SEQ ID NO: 4555456 - DNA, 25 bp, Homo sapien
tatttggttggcttcataagcaaac

SEQ ID NO: 4555457 - DNA, 25 bp, Homo sapien
tcctcagtatttggttggcttcata

SEQ ID NO: 4555458 - DNA, 25 bp, Homo sapien
actctgtaagtgtggaagtcaggtt

SEQ ID NO: 4555459 - DNA, 25 bp, Homo sapien
tcaggtttacaggtagtgcgttctt

SEQ ID NO: 4555460 - DNA, 25 bp, Homo sapien
taagtgtggaagtcaggtttacagg

SEQ ID NO: 4555461 - DNA, 25 bp, Homo sapien
agcacagggactctgtaagtgtgga

SEQ ID NO: 4555462 - DNA, 25 bp, Homo sapien
cattctaggtctttgcttctacagc

SEQ ID NO: 4555463 - DNA, 25 bp, Homo sapien
agcacattctaggtctttgcttcta

SEQ ID NO: 4555464 - DNA, 25 bp, Homo sapien
accctccacaattagccagaggctt

SEQ ID NO: 4555465 - DNA, 25 bp, Homo sapien
agaagcacattctaggtctttgctt

SEQ ID NO: 4555466 - DNA, 25 bp, Homo sapien
agtcctgtagctcatgaagatccga

SEQ ID NO: 4555467 - DNA, 25 bp, Homo sapien
tgtagaggagataactatagtgtag

SEQ ID NO: 4555468 - DNA, 25 bp, Homo sapien
gatccgagcctgaaacagtgaagta

SEQ ID NO: 4555469 - DNA, 25 bp, Homo sapien
tagaggagataactatagtgtagag

SEQ ID NO: 4555470 - DNA, 25 bp, Homo sapien
aaaggagttccgtaagaattggctg

SEQ ID NO: 4555471 - DNA, 25 bp, Homo sapien
tcaccagtggattcagtatcggaag

SEQ ID NO: 4555472 - DNA, 25 bp, Homo sapien
aatgtcagggaacagatggaaagga

SEQ ID NO: 4555473 - DNA, 25 bp, Homo sapien
ctttggcaagtgcataacctgactg

SEQ ID NO: 4555474 - DNA, 25 bp, Homo sapien
ttcatcagatggacgtggacgaagg

SEQ ID NO: 4555475 - DNA, 25 bp, Homo sapien
tgtggttcatcagatggacgtggac

SEQ ID NO: 4555476 - DNA, 25 bp, Homo sapien
tctggctcatttgtggttcatcaga

SEQ ID NO: 4555477 - DNA, 25 bp, Homo sapien
tcatttgtggttcatcagatggacg

SEQ ID NO: 4555478 - DNA, 25 bp, Homo sapien
tgaagctttggaaagtttattattc

SEQ ID NO: 4555479 - DNA, 25 bp, Homo sapien
ggaaagtttattattcctgtcatat

SEQ ID NO: 4555480 - DNA, 25 bp, Homo sapien
tttggaaagtttattattcctgtca

SEQ ID NO: 4555481 - DNA, 25 bp, Homo sapien
agctttggaaagtttattattcctg

SEQ ID NO: 4555482 - DNA, 25 bp, Homo sapien
ttaagagatacttttccaggctggg

SEQ ID NO: 4555483 - DNA, 25 bp, Homo sapien
tcagccctttgcatcaggaactcaa

SEQ ID NO: 4555484 - DNA, 25 bp, Homo sapien
gactttctctagtaaactgacgagg

SEQ ID NO: 4555485 - DNA, 25 bp, Homo sapien
ataaaagtaagcactctgctcccag

SEQ ID NO: 4555486 - DNA, 25 bp, Homo sapien
gcattcatgtgaactacgttgttta

SEQ ID NO: 4555487 - DNA, 25 bp, Homo sapien
tcagatgcagatatacaaaccatac

SEQ ID NO: 4555488 - DNA, 25 bp, Homo sapien
agtgcggtcgcatgatgatgactca

SEQ ID NO: 4555489 - DNA, 25 bp, Homo sapien
aggtactactttgtatcagatgcag

SEQ ID NO: 4555490 - DNA, 25 bp, Homo sapien
ctgccctcaaaagttaactcttttg

SEQ ID NO: 4555491 - DNA, 25 bp, Homo sapien
tttcagactatcaaagggtaataca

SEQ ID NO: 4555492 - DNA, 25 bp, Homo sapien
cattttcagactatcaaagggtaat

SEQ ID NO: 4555493 - DNA, 25 bp, Homo sapien
ttttcagactatcaaagggtaatac

SEQ ID NO: 4555494 - DNA, 25 bp, Homo sapien
tgagccagatcacttcactgtattc

SEQ ID NO: 4555495 - DNA, 25 bp, Homo sapien
gagccagatcacttcactgtattcc

SEQ ID NO: 4555496 - DNA, 25 bp, Homo sapien
gtgagccagatcacttcactgtatt

SEQ ID NO: 4555497 - DNA, 25 bp, Homo sapien
caacagatccaaccctgtcttaaaa

SEQ ID NO: 4555498 - DNA, 25 bp, Homo sapien
ccatatgaacaagatgctaagcccc

SEQ ID NO: 4555499 - DNA, 25 bp, Homo sapien
actagcctcagcctttcggagtgct

SEQ ID NO: 4555500 - DNA, 25 bp, Homo sapien
ccaaagaaatctaacttcatagtga

SEQ ID NO: 4555501 - DNA, 25 bp, Homo sapien
tagtgatcacaggaatatttctgga

SEQ ID NO: 4555502 - DNA, 25 bp, Homo sapien
tgtttgggtatctttggctccatca

SEQ ID NO: 4555503 - DNA, 25 bp, Homo sapien
aactggttaccatgggtgttccaga

SEQ ID NO: 4555504 - DNA, 25 bp, Homo sapien
gggccttcttcatggatccgattga

SEQ ID NO: 4555505 - DNA, 25 bp, Homo sapien
ccctgtagaattctgggcactctgg

SEQ ID NO: 4555506 - DNA, 25 bp, Homo sapien
tgtgcccgatagactgtgaaatggt

SEQ ID NO: 4555507 - DNA, 25 bp, Homo sapien
tatgaagtcatcaggcatggaccag

SEQ ID NO: 4555508 - DNA, 25 bp, Homo sapien
tccgaggtcctcagggtgccattga

SEQ ID NO: 4555509 - DNA, 25 bp, Homo sapien
gaaatggtgtgttgctacacggctg

SEQ ID NO: 4555510 - DNA, 25 bp, Homo sapien
gctgtgccaggtacgaaaggcttct

SEQ ID NO: 4555511 - DNA, 25 bp, Homo sapien
gccaggtacgaaaggcttctgggag

SEQ ID NO: 4555512 - DNA, 25 bp, Homo sapien
ccaggtacgaaaggcttctgggagc

SEQ ID NO: 4555513 - DNA, 25 bp, Homo sapien
agggctgtgccaggtacgaaaggct

SEQ ID NO: 4555514 - DNA, 25 bp, Homo sapien
aaccaagctatcttggttgttacta

SEQ ID NO: 4555515 - DNA, 25 bp, Homo sapien
acaaccaagctatcttggttgttac

SEQ ID NO: 4555516 - DNA, 25 bp, Homo sapien
caagctatcttggttgttactaaag

SEQ ID NO: 4555517 - DNA, 25 bp, Homo sapien
ccaagctatcttggttgttactaaa

SEQ ID NO: 4555518 - DNA, 25 bp, Homo sapien
gtttatcactaatctcactcacact

SEQ ID NO: 4555519 - DNA, 25 bp, Homo sapien
tggtttatcactaatctcactcaca

SEQ ID NO: 4555520 - DNA, 25 bp, Homo sapien
gtggtttatcactaatctcactcac

SEQ ID NO: 4555521 - DNA, 25 bp, Homo sapien
ggtttatcactaatctcactcacac

SEQ ID NO: 4555522 - DNA, 25 bp, Homo sapien
ccttcactgtgactgccgattgtat

SEQ ID NO: 4555523 - DNA, 25 bp, Homo sapien
gaatgtagaactgtgcctgtccact

SEQ ID NO: 4555524 - DNA, 25 bp, Homo sapien
aaatgtttgatggaatgtatggatc

SEQ ID NO: 4555525 - DNA, 25 bp, Homo sapien
ttagattcttctgtccagtcaatgt

SEQ ID NO: 4555526 - DNA, 25 bp, Homo sapien
gattttatcccataacctagggcag

SEQ ID NO: 4555527 - DNA, 25 bp, Homo sapien
tattgtagattttatcccataacct

SEQ ID NO: 4555528 - DNA, 25 bp, Homo sapien
tgtagattttatcccataacctagg

SEQ ID NO: 4555529 - DNA, 25 bp, Homo sapien
ttatcccataacctagggcagtcat

SEQ ID NO: 4555530 - DNA, 25 bp, Homo sapien
cattcactacattgtgccgctgtca

SEQ ID NO: 4555531 - DNA, 25 bp, Homo sapien
ggtcctcacatgagcaactaagtag

SEQ ID NO: 4555532 - DNA, 25 bp, Homo sapien
gagagttggattcgtgggtatcaca

SEQ ID NO: 4555533 - DNA, 25 bp, Homo sapien
gtaatactcttgcttggtcctcaca

SEQ ID NO: 4555534 - DNA, 25 bp, Homo sapien
gctcatcgaagtatagactgaatgg

SEQ ID NO: 4555535 - DNA, 25 bp, Homo sapien
ggtgccgccagatgagtcagctcat

SEQ ID NO: 4555536 - DNA, 25 bp, Homo sapien
gactgaatggaatatccggcttggc

SEQ ID NO: 4555537 - DNA, 25 bp, Homo sapien
aacccatgggcgcaggtgccgccag

SEQ ID NO: 4555538 - DNA, 25 bp, Homo sapien
aaagtggacttttgtagcagcaaca

SEQ ID NO: 4555539 - DNA, 25 bp, Homo sapien
tagaataatgcttggacaccgagaa

SEQ ID NO: 4555540 - DNA, 25 bp, Homo sapien
tgtggatgaaggtctaactaagctg

SEQ ID NO: 4555541 - DNA, 25 bp, Homo sapien
tgtatagccttagattagtcagccc

SEQ ID NO: 4555542 - DNA, 25 bp, Homo sapien
gatttgaaatcccttcctagaccca

SEQ ID NO: 4555543 - DNA, 25 bp, Homo sapien
ctggagagatttgaaatcccttcct

SEQ ID NO: 4555544 - DNA, 25 bp, Homo sapien
gagagatttgaaatcccttcctaga

SEQ ID NO: 4555545 - DNA, 25 bp, Homo sapien
tgaaatcccttcctagacccaaata

SEQ ID NO: 4555546 - DNA, 25 bp, Homo sapien
tgtaacttgtttgcagtcccgtacg

SEQ ID NO: 4555547 - DNA, 25 bp, Homo sapien
cagtcccgtacgtagcctgatgaca

SEQ ID NO: 4555548 - DNA, 25 bp, Homo sapien
tattcttgttctatggcaattgaaa

SEQ ID NO: 4555549 - DNA, 25 bp, Homo sapien
gcatcaaaatgacgtgtcttacaag

SEQ ID NO: 4555550 - DNA, 25 bp, Homo sapien
taaatcctgagggtgtctaaactga

SEQ ID NO: 4555551 - DNA, 25 bp, Homo sapien
tagagtcgtatggaagtcactagga

SEQ ID NO: 4555552 - DNA, 25 bp, Homo sapien
gagcttgctagccatctgaaccagt

SEQ ID NO: 4555553 - DNA, 25 bp, Homo sapien
ctaggaagccaagataacagagtgt

SEQ ID NO: 4555554 - DNA, 25 bp, Homo sapien
cctgtatctgagacagacgctattt

SEQ ID NO: 4555555 - DNA, 25 bp, Homo sapien
gagtgccacttgagtaaagatcaca

SEQ ID NO: 4555556 - DNA, 25 bp, Homo sapien
tgatgtctgacttaattagcaaggc

SEQ ID NO: 4555557 - DNA, 25 bp, Homo sapien
tagcatatactaccagagaagtctg

SEQ ID NO: 4555558 - DNA, 25 bp, Homo sapien
tcattagcctctggcttattggcac

SEQ ID NO: 4555559 - DNA, 25 bp, Homo sapien
ctaaagcccttttcattagcctctg

SEQ ID NO: 4555560 - DNA, 25 bp, Homo sapien
taaagcccttttcattagcctctgg

SEQ ID NO: 4555561 - DNA, 25 bp, Homo sapien
cctctggcttattggcaccctgctg

SEQ ID NO: 4555562 - DNA, 25 bp, Homo sapien
ccactacctcgccttgtctgtgtag

SEQ ID NO: 4555563 - DNA, 25 bp, Homo sapien
ttcactttctcatccgaggtttcca

SEQ ID NO: 4555564 - DNA, 25 bp, Homo sapien
gaggtttccatatcagcattcccac

SEQ ID NO: 4555565 - DNA, 25 bp, Homo sapien
caatgtcatttttgctacagcttgt

SEQ ID NO: 4555566 - DNA, 25 bp, Homo sapien
ctacatctcttgtttagaaagggcc

SEQ ID NO: 4555567 - DNA, 25 bp, Homo sapien
acatctcttgtttagaaagggcctt

SEQ ID NO: 4555568 - DNA, 25 bp, Homo sapien
ggccttttttacttcacagttatgc

SEQ ID NO: 4555569 - DNA, 25 bp, Homo sapien
cagttatgcccattaatagtgtggc

SEQ ID NO: 4555570 - DNA, 25 bp, Homo sapien
tcagccttgtgtggtctagcacacc

SEQ ID NO: 4555571 - DNA, 25 bp, Homo sapien
cagccttgtgtggtctagcacacct

SEQ ID NO: 4555572 - DNA, 25 bp, Homo sapien
tgtcagccttgtgtggtctagcaca

SEQ ID NO: 4555573 - DNA, 25 bp, Homo sapien
gtcagccttgtgtggtctagcacac

SEQ ID NO: 4555574 - DNA, 25 bp, Homo sapien
ttttgcaaaagctctggttcctttg

SEQ ID NO: 4555575 - DNA, 25 bp, Homo sapien
tgcagttgggcagcggttttacctc

SEQ ID NO: 4555576 - DNA, 25 bp, Homo sapien
aaaagctctggttcctttgaatcat

SEQ ID NO: 4555577 - DNA, 25 bp, Homo sapien
gctgcagttgggcagcggttttacc

SEQ ID NO: 4555578 - DNA, 25 bp, Homo sapien
cacaggcagtaacatgcaggaagct

SEQ ID NO: 4555579 - DNA, 25 bp, Homo sapien
ctgtctctcctaaggtaacaaagcc

SEQ ID NO: 4555580 - DNA, 25 bp, Homo sapien
tctctcctaaggtaacaaagccttc

SEQ ID NO: 4555581 - DNA, 25 bp, Homo sapien
cctgccttgaggtcttgtcgcccag

SEQ ID NO: 4555582 - DNA, 25 bp, Homo sapien
tatgattcttaatgattagcaggtt

SEQ ID NO: 4555583 - DNA, 25 bp, Homo sapien
gtgcagtggacaataacctcaagct

SEQ ID NO: 4555584 - DNA, 25 bp, Homo sapien
gattcttaatgattagcaggttaaa

SEQ ID NO: 4555585 - DNA, 25 bp, Homo sapien
tggacaataacctcaagctgctgga

SEQ ID NO: 4555586 - DNA, 25 bp, Homo sapien
gggagacggaatttgcattactaac

SEQ ID NO: 4555587 - DNA, 25 bp, Homo sapien
catgacaagagctactgggcctaga

SEQ ID NO: 4555588 - DNA, 25 bp, Homo sapien
tgggcctagagagcaactagtccat

SEQ ID NO: 4555589 - DNA, 25 bp, Homo sapien
gataggcatttgttagatctcttgg

SEQ ID NO: 4555590 - DNA, 25 bp, Homo sapien
ggcacatctcacacacactcgtgaa

SEQ ID NO: 4555591 - DNA, 25 bp, Homo sapien
gctgaggtcataacaaggttggagg

SEQ ID NO: 4555592 - DNA, 25 bp, Homo sapien
atctcacacacactcgtgaacaccc

SEQ ID NO: 4555593 - DNA, 25 bp, Homo sapien
gtgctgaggtcataacaaggttgga

SEQ ID NO: 4555594 - DNA, 25 bp, Homo sapien
acagatcccacgcagtcttgtttgc

SEQ ID NO: 4555595 - DNA, 25 bp, Homo sapien
agtagaaaagtaagatgtgctccac

SEQ ID NO: 4555596 - DNA, 25 bp, Homo sapien
gaaaatgcccgtgtcacagatccca

SEQ ID NO: 4555597 - DNA, 25 bp, Homo sapien
taacacctccagcaatagaaagacc

SEQ ID NO: 4555598 - DNA, 25 bp, Homo sapien
tgccttgtgcctaaactgaattgac

SEQ ID NO: 4555599 - DNA, 25 bp, Homo sapien
cacagttccagagttatcagtaggc

SEQ ID NO: 4555600 - DNA, 25 bp, Homo sapien
caagcagtgtgtcgcttctgcacaa

SEQ ID NO: 4555601 - DNA, 25 bp, Homo sapien
tgaagacacaaacctgacaggaggg

SEQ ID NO: 4555602 - DNA, 25 bp, Homo sapien
tgagccagattagcattaaaccagt

SEQ ID NO: 4555603 - DNA, 25 bp, Homo sapien
tggaatacaagagcaatggtcaccc

SEQ ID NO: 4555604 - DNA, 25 bp, Homo sapien
caaaacccagtagtcaccaaggcag

SEQ ID NO: 4555605 - DNA, 25 bp, Homo sapien
tgcccctgtcccaaaatgatgagcc

SEQ ID NO: 4555606 - DNA, 25 bp, Homo sapien
aaccttttcaaccagcagcaagaag

SEQ ID NO: 4555607 - DNA, 25 bp, Homo sapien
catagtaggattctagcataccgtg

SEQ ID NO: 4555608 - DNA, 25 bp, Homo sapien
tattgtaagagctaattgttggaga

SEQ ID NO: 4555609 - DNA, 25 bp, Homo sapien
cataccgtgtagtacctatggagta

SEQ ID NO: 4555610 - DNA, 25 bp, Homo sapien
cacataattagtaacagatcaagac

SEQ ID NO: 4555611 - DNA, 25 bp, Homo sapien
caatgtatggaaagctcttatggtt

SEQ ID NO: 4555612 - DNA, 25 bp, Homo sapien
agctttggcattaaatagtcctcga

SEQ ID NO: 4555613 - DNA, 25 bp, Homo sapien
gattcaaatctaagctcaacatctg

SEQ ID NO: 4555614 - DNA, 25 bp, Homo sapien
aacctggagaggttttctgttctct

SEQ ID NO: 4555615 - DNA, 25 bp, Homo sapien
ggtccccagggtctctgagccattt

SEQ ID NO: 4555616 - DNA, 25 bp, Homo sapien
gcaccatgtgcaagatttccaagtc

SEQ ID NO: 4555617 - DNA, 25 bp, Homo sapien
aactgtcatgtggtacctctgctgt

SEQ ID NO: 4555618 - DNA, 25 bp, Homo sapien
gagggtcagtgttccactacgctgg

SEQ ID NO: 4555619 - DNA, 25 bp, Homo sapien
taaatttggtatagaaggaatgtac

SEQ ID NO: 4555620 - DNA, 25 bp, Homo sapien
tgaaaaaatattacagtgccaaaag

SEQ ID NO: 4555621 - DNA, 25 bp, Homo sapien
actaaattgctgtttaatgtggaac

SEQ ID NO: 4555622 - DNA, 25 bp, Homo sapien
gctaacatcctaactcactggtgaa

SEQ ID NO: 4555623 - DNA, 25 bp, Homo sapien
tcctggatatttggtcgtcgctggg

SEQ ID NO: 4555624 - DNA, 25 bp, Homo sapien
ctactcccagggtgaggtccttcct

SEQ ID NO: 4555625 - DNA, 25 bp, Homo sapien
cagctctatttcctgcaagattgca

SEQ ID NO: 4555626 - DNA, 25 bp, Homo sapien
tttctctcattctccgggccttctg

SEQ ID NO: 4555627 - DNA, 25 bp, Homo sapien
gcttcctgcccattccaaagctggg

SEQ ID NO: 4555628 - DNA, 25 bp, Homo sapien
agcccgtcagcacaaacaacaccga

SEQ ID NO: 4555629 - DNA, 25 bp, Homo sapien
agagtgcttcctgcccattccaaag

SEQ ID NO: 4555630 - DNA, 25 bp, Homo sapien
caacaccgaggacggtgccagtgcc

SEQ ID NO: 4555631 - DNA, 25 bp, Homo sapien
ccaaaggtggagatgccccacatac

SEQ ID NO: 4555632 - DNA, 25 bp, Homo sapien
caaacgttctggacttggtgctggg

SEQ ID NO: 4555633 - DNA, 25 bp, Homo sapien
gcagtttctgatctggaaccaggaa

SEQ ID NO: 4555634 - DNA, 25 bp, Homo sapien
caccagccagcaaacgttctggact

SEQ ID NO: 4555635 - DNA, 25 bp, Homo sapien
cacatctaagctatgcagtgcctca

SEQ ID NO: 4555636 - DNA, 25 bp, Homo sapien
tctaagctatgcagtgcctcatccc

SEQ ID NO: 4555637 - DNA, 25 bp, Homo sapien
accctccacatctaagctatgcagt

SEQ ID NO: 4555638 - DNA, 25 bp, Homo sapien
tccacatctaagctatgcagtgcct

SEQ ID NO: 4555639 - DNA, 25 bp, Homo sapien
gagccagaagtcccacctttccagg

SEQ ID NO: 4555640 - DNA, 25 bp, Homo sapien
gaagtcccacctttccaggctcctc

SEQ ID NO: 4555641 - DNA, 25 bp, Homo sapien
gccagaagtcccacctttccaggct

SEQ ID NO: 4555642 - DNA, 25 bp, Homo sapien
gtcccacctttccaggctcctccat

SEQ ID NO: 4555643 - DNA, 25 bp, Homo sapien
tcatctcatgtttgtcctcagctgc

SEQ ID NO: 4555644 - DNA, 25 bp, Homo sapien
gctgaaagggccacgtttgttttca

SEQ ID NO: 4555645 - DNA, 25 bp, Homo sapien
ttacaaataagaccaccgagtgggc

SEQ ID NO: 4555646 - DNA, 25 bp, Homo sapien
tgtccctgactatgctcatctcatg

SEQ ID NO: 4555647 - DNA, 25 bp, Homo sapien
ggtgctatctgggactctgggttct

SEQ ID NO: 4555648 - DNA, 25 bp, Homo sapien
gcccctcatcaaggaagagccaagg

SEQ ID NO: 4555649 - DNA, 25 bp, Homo sapien
acggccgcttgaccccatctttgag

SEQ ID NO: 4555650 - DNA, 25 bp, Homo sapien
gggcagatgatccatcagaaaagag

SEQ ID NO: 4555651 - DNA, 25 bp, Homo sapien
gcggtgacgggatgctccctagaga

SEQ ID NO: 4555652 - DNA, 25 bp, Homo sapien
gcaacacagctaaaatgcgggtgaa

SEQ ID NO: 4555653 - DNA, 25 bp, Homo sapien
gaagaccagatttcttgcacatggc

SEQ ID NO: 4555654 - DNA, 25 bp, Homo sapien
tggccctggacgggacatcatgctg

SEQ ID NO: 4555655 - DNA, 25 bp, Homo sapien
gctggtacctgctcaaagtagtcat

SEQ ID NO: 4555656 - DNA, 25 bp, Homo sapien
tggctggtacctgctcaaagtagtc

SEQ ID NO: 4555657 - DNA, 25 bp, Homo sapien
atctggctggtacctgctcaaagta

SEQ ID NO: 4555658 - DNA, 25 bp, Homo sapien
gcccccaactttcttgccgtgctca

SEQ ID NO: 4555659 - DNA, 25 bp, Homo sapien
tacagcaggggcatccacagctgcc

SEQ ID NO: 4555660 - DNA, 25 bp, Homo sapien
aagcacagccatacagcaggggcat

SEQ ID NO: 4555661 - DNA, 25 bp, Homo sapien
tcaagcacagccatacagcaggggc

SEQ ID NO: 4555662 - DNA, 25 bp, Homo sapien
gcacagccatacagcaggggcatcc

SEQ ID NO: 4555663 - DNA, 25 bp, Homo sapien
ctgcttgtgtttggcccggcacttc

SEQ ID NO: 4555664 - DNA, 25 bp, Homo sapien
gtgaatgctccacttccttggccca

SEQ ID NO: 4555665 - DNA, 25 bp, Homo sapien
ctgatagcggtcctggtaagccttg

SEQ ID NO: 4555666 - DNA, 25 bp, Homo sapien
aagccttggccacctgggtgaatgc

SEQ ID NO: 4555667 - DNA, 25 bp, Homo sapien
ccccaggtcctgatagcggtcctgg

SEQ ID NO: 4555668 - DNA, 25 bp, Homo sapien
actactgacaggtcttgagccgctc

SEQ ID NO: 4555669 - DNA, 25 bp, Homo sapien
cactactgacaggtcttgagccgct

SEQ ID NO: 4555670 - DNA, 25 bp, Homo sapien
tcccactactgacaggtcttgagcc

SEQ ID NO: 4555671 - DNA, 25 bp, Homo sapien
ccactactgacaggtcttgagccgc

SEQ ID NO: 4555672 - DNA, 25 bp, Homo sapien
cagtgatgcccagcacgcggcagta

SEQ ID NO: 4555673 - DNA, 25 bp, Homo sapien
cagtactgccggtggtagtagtaat

SEQ ID NO: 4555674 - DNA, 25 bp, Homo sapien
tgatgcccagcacgcggcagtactg

SEQ ID NO: 4555675 - DNA, 25 bp, Homo sapien
gcagtactgccggtggtagtagtaa

SEQ ID NO: 4555676 - DNA, 25 bp, Homo sapien
tttgcgtgctgccactctataaact

SEQ ID NO: 4555677 - DNA, 25 bp, Homo sapien
gttctttgcgtgctgccactctata

SEQ ID NO: 4555678 - DNA, 25 bp, Homo sapien
cgtgctgccactctataaactctca

SEQ ID NO: 4555679 - DNA, 25 bp, Homo sapien
ctgttctttgcgtgctgccactcta

SEQ ID NO: 4555680 - DNA, 25 bp, Homo sapien
cggtccactaggaggtcgaaggcct

SEQ ID NO: 4555681 - DNA, 25 bp, Homo sapien
aggccttcatcaggtagacgacggg

SEQ ID NO: 4555682 - DNA, 25 bp, Homo sapien
gaaggccttcatcaggtagacgacg

SEQ ID NO: 4555683 - DNA, 25 bp, Homo sapien
tcgccggtcggtccactaggaggtc

SEQ ID NO: 4555684 - DNA, 25 bp, Homo sapien
agctgcacggaggagagcttgaccg

SEQ ID NO: 4555685 - DNA, 25 bp, Homo sapien
cacggaggagagcttgaccgagcat

SEQ ID NO: 4555686 - DNA, 25 bp, Homo sapien
ttgaccgagcatgcgggagggaggg

SEQ ID NO: 4555687 - DNA, 25 bp, Homo sapien
agccacacgtggccatgagacagct

SEQ ID NO: 4555688 - DNA, 25 bp, Homo sapien
gggaggggacagctctggcaggaat

SEQ ID NO: 4555689 - DNA, 25 bp, Homo sapien
ctgggaggggacagctctggcagga

SEQ ID NO: 4555690 - DNA, 25 bp, Homo sapien
tgggaggggacagctctggcaggaa

SEQ ID NO: 4555691 - DNA, 25 bp, Homo sapien
ggaggggacagctctggcaggaatc

SEQ ID NO: 4555692 - DNA, 25 bp, Homo sapien
tgtcagcttccttctgaaacagccc

SEQ ID NO: 4555693 - DNA, 25 bp, Homo sapien
ctctgctgtgtctcccgggtcttct

SEQ ID NO: 4555694 - DNA, 25 bp, Homo sapien
ctcagacaccggggaagccaggatc

SEQ ID NO: 4555695 - DNA, 25 bp, Homo sapien
tgtgtctcccgggtcttctcacaga

SEQ ID NO: 4555696 - DNA, 25 bp, Homo sapien
tgcaaaggaggtccagaaagcagac

SEQ ID NO: 4555697 - DNA, 25 bp, Homo sapien
ttccctgcaaaggaggtccagaaag

SEQ ID NO: 4555698 - DNA, 25 bp, Homo sapien
tccctgcaaaggaggtccagaaagc

SEQ ID NO: 4555699 - DNA, 25 bp, Homo sapien
cctgcaaaggaggtccagaaagcag

SEQ ID NO: 4555700 - DNA, 25 bp, Homo sapien
gagtccacgtctctgggatggcatg

SEQ ID NO: 4555701 - DNA, 25 bp, Homo sapien
ccttctggggtcacttgagctattt

SEQ ID NO: 4555702 - DNA, 25 bp, Homo sapien
ggatggcatggcctgtcagccacac

SEQ ID NO: 4555703 - DNA, 25 bp, Homo sapien
agccacacccgtttctctcctgttg

SEQ ID NO: 4555704 - DNA, 25 bp, Homo sapien
gatgctcggaatgcccaacctgtcc

SEQ ID NO: 4555705 - DNA, 25 bp, Homo sapien
cagggatgctcggaatgcccaacct

SEQ ID NO: 4555706 - DNA, 25 bp, Homo sapien
gggatgctcggaatgcccaacctgt

SEQ ID NO: 4555707 - DNA, 25 bp, Homo sapien
gcagcagggatgctcggaatgccca

SEQ ID NO: 4555708 - DNA, 25 bp, Homo sapien
tctggtttctgggtgcactgacggc

SEQ ID NO: 4555709 - DNA, 25 bp, Homo sapien
tcgcgacctcctctgagggtgaatg

SEQ ID NO: 4555710 - DNA, 25 bp, Homo sapien
ctggggtggaagtcgcgacctcctc

SEQ ID NO: 4555711 - DNA, 25 bp, Homo sapien
gacctcctctgagggtgaatgggca

SEQ ID NO: 4555712 - DNA, 25 bp, Homo sapien
ggaagtcgcgacctcctctgagggt

SEQ ID NO: 4555713 - DNA, 25 bp, Homo sapien
cttttaggccaagggggctgcaaat

SEQ ID NO: 4555714 - DNA, 25 bp, Homo sapien
tggtgtcctctccataaaacaattc

SEQ ID NO: 4555715 - DNA, 25 bp, Homo sapien
tgaggctgttaggtcttcagggcca

SEQ ID NO: 4555716 - DNA, 25 bp, Homo sapien
tctccataaaacaattcccaaagcc

SEQ ID NO: 4555717 - DNA, 25 bp, Homo sapien
caggcctagaggatgtgtgttgact

SEQ ID NO: 4555718 - DNA, 25 bp, Homo sapien
gagtcagaatttcttgctgtgaaaa

SEQ ID NO: 4555719 - DNA, 25 bp, Homo sapien
tctcttcttgtgtggggtctctata

SEQ ID NO: 4555720 - DNA, 25 bp, Homo sapien
tgaccatgttcctgctaaaaatatg

SEQ ID NO: 4555721 - DNA, 25 bp, Homo sapien
tcttcaactaaagctgccaatctca

SEQ ID NO: 4555722 - DNA, 25 bp, Homo sapien
tcaactaaagctgccaatctcacgc

SEQ ID NO: 4555723 - DNA, 25 bp, Homo sapien
gcctcttcaactaaagctgccaatc

SEQ ID NO: 4555724 - DNA, 25 bp, Homo sapien
cagcctcttcaactaaagctgccaa

SEQ ID NO: 4555725 - DNA, 25 bp, Homo sapien
atcagggtgggcactgccctgcaca

SEQ ID NO: 4555726 - DNA, 25 bp, Homo sapien
ttccacagggctaggagctggggaa

SEQ ID NO: 4555727 - DNA, 25 bp, Homo sapien
cctgggccagtgactttgtcctcac

SEQ ID NO: 4555728 - DNA, 25 bp, Homo sapien
tcctgcttttctcggattcatccag

SEQ ID NO: 4555729 - DNA, 25 bp, Homo sapien
ctgtcctgcttttctcggattcatc

SEQ ID NO: 4555730 - DNA, 25 bp, Homo sapien
cttgagcttgggtaggcaatgattc

SEQ ID NO: 4555731 - DNA, 25 bp, Homo sapien
tgagcttgggtaggcaatgattcaa

SEQ ID NO: 4555732 - DNA, 25 bp, Homo sapien
aatactgtgtatttgagctatactc

SEQ ID NO: 4555733 - DNA, 25 bp, Homo sapien
tactcttgtgcgtgcgcagcttgag

SEQ ID NO: 4555734 - DNA, 25 bp, Homo sapien
tattctcagccatgaagtgtgggag

SEQ ID NO: 4555735 - DNA, 25 bp, Homo sapien
tacaggttcactgcggaggtcatgg

SEQ ID NO: 4555736 - DNA, 25 bp, Homo sapien
catggtagacgttgctgcccagaac

SEQ ID NO: 4555737 - DNA, 25 bp, Homo sapien
tgcccagaacctccaaccgtaggaa

SEQ ID NO: 4555738 - DNA, 25 bp, Homo sapien
cctcccagctggtaaccaggtgatg

SEQ ID NO: 4555739 - DNA, 25 bp, Homo sapien
tcagtgcgaggtatccagagctcca

SEQ ID NO: 4555740 - DNA, 25 bp, Homo sapien
gaggtatccagagctccactctctt

SEQ ID NO: 4555741 - DNA, 25 bp, Homo sapien
ccagctggtaaccaggtgatgggct

SEQ ID NO: 4555742 - DNA, 25 bp, Homo sapien
caggcaggaaagaacaggtcaatac

SEQ ID NO: 4555743 - DNA, 25 bp, Homo sapien
tcaggcaggaaagaacaggtcaata

SEQ ID NO: 4555744 - DNA, 25 bp, Homo sapien
tcattccaccggcaccgggtggggc

SEQ ID NO: 4555745 - DNA, 25 bp, Homo sapien
ggtggggcttggaaaagccagtcac

SEQ ID NO: 4555746 - DNA, 25 bp, Homo sapien
gggtggggcttggaaaagccagtca

SEQ ID NO: 4555747 - DNA, 25 bp, Homo sapien
cattccaccggcaccgggtggggct

SEQ ID NO: 4555748 - DNA, 25 bp, Homo sapien
ctaaagcacacagatggagactcac

SEQ ID NO: 4555749 - DNA, 25 bp, Homo sapien
gatgtcccttggctccgggtaggag

SEQ ID NO: 4555750 - DNA, 25 bp, Homo sapien
tgatgtcccttggctccgggtagga

SEQ ID NO: 4555751 - DNA, 25 bp, Homo sapien
tctgatgtcccttggctccgggtag

SEQ ID NO: 4555752 - DNA, 25 bp, Homo sapien
ctgatgtcccttggctccgggtagg

SEQ ID NO: 4555753 - DNA, 25 bp, Homo sapien
ctgtcaaggagaaagccaactgtgg

SEQ ID NO: 4555754 - DNA, 25 bp, Homo sapien
tgtcaaggagaaagccaactgtggt

SEQ ID NO: 4555755 - DNA, 25 bp, Homo sapien
agtgcaataccgcttcctccaaaaa

SEQ ID NO: 4555756 - DNA, 25 bp, Homo sapien
taactctggaatagtgcaataccgc

SEQ ID NO: 4555757 - DNA, 25 bp, Homo sapien
tccccaacctagacctgctaactct

SEQ ID NO: 4555758 - DNA, 25 bp, Homo sapien
gaatagtgcaataccgcttcctcca

SEQ ID NO: 4555759 - DNA, 25 bp, Homo sapien
gagactcacacgaagcagtttctga

SEQ ID NO: 4555760 - DNA, 25 bp, Homo sapien
cctccggctctagtgacagctggga

SEQ ID NO: 4555761 - DNA, 25 bp, Homo sapien
tgtcgtacacaagtcctcggcgtgc

SEQ ID NO: 4555762 - DNA, 25 bp, Homo sapien
gggcgtgtgacctttctctccccga

SEQ ID NO: 4555763 - DNA, 25 bp, Homo sapien
tccaactttagacagtagatggtgc

SEQ ID NO: 4555764 - DNA, 25 bp, Homo sapien
gaacctgttgattggtgctttccaa

SEQ ID NO: 4555765 - DNA, 25 bp, Homo sapien
tacagtcaatactgccagggcactt

SEQ ID NO: 4555766 - DNA, 25 bp, Homo sapien
tagatggtgcctttactgaagatcc

SEQ ID NO: 4555767 - DNA, 25 bp, Homo sapien
tgacccatagggctaataacctcat

SEQ ID NO: 4555768 - DNA, 25 bp, Homo sapien
ggtttccaaatagctgacccatagg

SEQ ID NO: 4555769 - DNA, 25 bp, Homo sapien
tagctgacccatagggctaataacc

SEQ ID NO: 4555770 - DNA, 25 bp, Homo sapien
tgggtaggtggtttccaaatagctg

SEQ ID NO: 4555771 - DNA, 25 bp, Homo sapien
gagagttgccagacactttccagga

SEQ ID NO: 4555772 - DNA, 25 bp, Homo sapien
tcataatagcaaatgctcccatagc

SEQ ID NO: 4555773 - DNA, 25 bp, Homo sapien
cagttagctgattctccaggcctgg

SEQ ID NO: 4555774 - DNA, 25 bp, Homo sapien
ctttccaggagacctgcccaagatc

SEQ ID NO: 4555775 - DNA, 25 bp, Homo sapien
cctttgtgctggacgaagacaggag

SEQ ID NO: 4555776 - DNA, 25 bp, Homo sapien
cagttagcagtctggattctgggcc

SEQ ID NO: 4555777 - DNA, 25 bp, Homo sapien
tgggcctggactgcccggatctgaa

SEQ ID NO: 4555778 - DNA, 25 bp, Homo sapien
tccggagttgtcattagaggagtcc

SEQ ID NO: 4555779 - DNA, 25 bp, Homo sapien
agtccatgggacagggtgatgttac

SEQ ID NO: 4555780 - DNA, 25 bp, Homo sapien
gcagccttgtgcagtccatgggaca

SEQ ID NO: 4555781 - DNA, 25 bp, Homo sapien
ctggcagccttgtgcagtccatggg

SEQ ID NO: 4555782 - DNA, 25 bp, Homo sapien
gtccatgggacagggtgatgttact

SEQ ID NO: 4555783 - DNA, 25 bp, Homo sapien
ttgatcatatcctttcactgcgatg

SEQ ID NO: 4555784 - DNA, 25 bp, Homo sapien
ctggcatgcgctgcctctcggctgg

SEQ ID NO: 4555785 - DNA, 25 bp, Homo sapien
gatcatatcctttcactgcgatggg

SEQ ID NO: 4555786 - DNA, 25 bp, Homo sapien
gcatttcctgtacattcgctggcat

SEQ ID NO: 4555787 - DNA, 25 bp, Homo sapien
gcctgattttcttcgggttagccat

SEQ ID NO: 4555788 - DNA, 25 bp, Homo sapien
ctgactcccagaaaagtagacgctg

SEQ ID NO: 4555789 - DNA, 25 bp, Homo sapien
actcccagaaaagtagacgctggca

SEQ ID NO: 4555790 - DNA, 25 bp, Homo sapien
tcccagaaaagtagacgctggcact

SEQ ID NO: 4555791 - DNA, 25 bp, Homo sapien
ccagaaaagtagacgctggcactgt

SEQ ID NO: 4555792 - DNA, 25 bp, Homo sapien
gggacatgctaatctctattgtttt

SEQ ID NO: 4555793 - DNA, 25 bp, Homo sapien
gcaagggacatgctaatctctattg

SEQ ID NO: 4555794 - DNA, 25 bp, Homo sapien
tatcatctttgtgcaagggacatgc

SEQ ID NO: 4555795 - DNA, 25 bp, Homo sapien
gtgcaagggacatgctaatctctat

SEQ ID NO: 4555796 - DNA, 25 bp, Homo sapien
tctggcattgactctgggctaccct

SEQ ID NO: 4555797 - DNA, 25 bp, Homo sapien
cttaggtgctgctcccgatttggga

SEQ ID NO: 4555798 - DNA, 25 bp, Homo sapien
tccaaacctttgtgctgtgatactg

SEQ ID NO: 4555799 - DNA, 25 bp, Homo sapien
tgactcgggtgtctgatttctccca

SEQ ID NO: 4555800 - DNA, 25 bp, Homo sapien
tttgtgttggcatcagacgggtgct

SEQ ID NO: 4555801 - DNA, 25 bp, Homo sapien
tgcctgaaagtcactcctgagattc

SEQ ID NO: 4555802 - DNA, 25 bp, Homo sapien
cttttgggacaggtttggattgact

SEQ ID NO: 4555803 - DNA, 25 bp, Homo sapien
tgttgtgtgacattcgcaggtttcc

SEQ ID NO: 4555804 - DNA, 25 bp, Homo sapien
ggtgtgattatcttgatgttctctg

SEQ ID NO: 4555805 - DNA, 25 bp, Homo sapien
tgtctgagtaaatatgagatggcat

SEQ ID NO: 4555806 - DNA, 25 bp, Homo sapien
taagggatgattgttgtctgagtaa

SEQ ID NO: 4555807 - DNA, 25 bp, Homo sapien
gttctctgtatctgttaagggatga

SEQ ID NO: 4555808 - DNA, 25 bp, Homo sapien
atcgggcacgcttggctgccacagg

SEQ ID NO: 4555809 - DNA, 25 bp, Homo sapien
tgggagttctctaccatcgggcacg

SEQ ID NO: 4555810 - DNA, 25 bp, Homo sapien
gacaacaatgttgctgggtagattt

SEQ ID NO: 4555811 - DNA, 25 bp, Homo sapien
cagtgtcggcatcagttttacaggg

SEQ ID NO: 4555812 - DNA, 25 bp, Homo sapien
gcacgggcccaacgtagagcatgtt

SEQ ID NO: 4555813 - DNA, 25 bp, Homo sapien
caagagtccttatatgggagacagg

SEQ ID NO: 4555814 - DNA, 25 bp, Homo sapien
tcttgcagtaatgagctccccacct

SEQ ID NO: 4555815 - DNA, 25 bp, Homo sapien
gccctgttgccccttgattatttga

SEQ ID NO: 4555816 - DNA, 25 bp, Homo sapien
taagtggctcagagctttgacagca

SEQ ID NO: 4555817 - DNA, 25 bp, Homo sapien
ttcctgggtatttgatggatctctg

SEQ ID NO: 4555818 - DNA, 25 bp, Homo sapien
cattgggtggcagacactgtcttca

SEQ ID NO: 4555819 - DNA, 25 bp, Homo sapien
ggatctctggattggttctttgtca

SEQ ID NO: 4555820 - DNA, 25 bp, Homo sapien
agggagatgtttgccctgttcttcc

SEQ ID NO: 4555821 - DNA, 25 bp, Homo sapien
tgctgtgtgttcacgggcccaggga

SEQ ID NO: 4555822 - DNA, 25 bp, Homo sapien
tggccgtccgacatgccagagctgg

SEQ ID NO: 4555823 - DNA, 25 bp, Homo sapien
catgtgtgcccggtgacctattgaa

SEQ ID NO: 4555824 - DNA, 25 bp, Homo sapien
tggtgacgtcagtggccctggatct

SEQ ID NO: 4555825 - DNA, 25 bp, Homo sapien
aaggaagtagagaatggtgacgtca

SEQ ID NO: 4555826 - DNA, 25 bp, Homo sapien
tcgtgtgctcctgtgtagagtgtca

SEQ ID NO: 4555827 - DNA, 25 bp, Homo sapien
gagctgtcaggcgtcgtgtgctcct

SEQ ID NO: 4555828 - DNA, 25 bp, Homo sapien
gagcaaggcacagcgtgtttggggt

SEQ ID NO: 4555829 - DNA, 25 bp, Homo sapien
gagagcaaggcacagcgtgtttggg

SEQ ID NO: 4555830 - DNA, 25 bp, Homo sapien
cacagcgtgtttggggtgactttag

SEQ ID NO: 4555831 - DNA, 25 bp, Homo sapien
caaggcacagcgtgtttggggtgac

SEQ ID NO: 4555832 - DNA, 25 bp, Homo sapien
gaggaaggtcttactggggcatgag

SEQ ID NO: 4555833 - DNA, 25 bp, Homo sapien
ctggtgtcatcaactttgcaggtaa

SEQ ID NO: 4555834 - DNA, 25 bp, Homo sapien
catcaactttgcaggtaacagctgt

SEQ ID NO: 4555835 - DNA, 25 bp, Homo sapien
tcttactggggcatgaggtccctgg

SEQ ID NO: 4555836 - DNA, 25 bp, Homo sapien
tgttgttttgagtgaccgagaagaa

SEQ ID NO: 4555837 - DNA, 25 bp, Homo sapien
ccgagaagaaagagatactttgctg

SEQ ID NO: 4555838 - DNA, 25 bp, Homo sapien
ggctaattttccctgattggatctg

SEQ ID NO: 4555839 - DNA, 25 bp, Homo sapien
aaagcacaacatattccgagggaga

SEQ ID NO: 4555840 - DNA, 25 bp, Homo sapien
ttccgggagccaggcttgttatagc

SEQ ID NO: 4555841 - DNA, 25 bp, Homo sapien
gttccgggagccaggcttgttatag

SEQ ID NO: 4555842 - DNA, 25 bp, Homo sapien
gggagccaggcttgttatagctggc

SEQ ID NO: 4555843 - DNA, 25 bp, Homo sapien
ccgggagccaggcttgttatagctg

SEQ ID NO: 4555844 - DNA, 25 bp, Homo sapien
gctgtggtccacagccctccagtga

SEQ ID NO: 4555845 - DNA, 25 bp, Homo sapien
ggtgacatgctgtggtccacagccc

SEQ ID NO: 4555846 - DNA, 25 bp, Homo sapien
tgtggtccacagccctccagtgacc

SEQ ID NO: 4555847 - DNA, 25 bp, Homo sapien
tggtccacagccctccagtgaccat

SEQ ID NO: 4555848 - DNA, 25 bp, Homo sapien
gggtgctccttatcccagggtctct

SEQ ID NO: 4555849 - DNA, 25 bp, Homo sapien
caagtaaagcgtccaagtcaaggag

SEQ ID NO: 4555850 - DNA, 25 bp, Homo sapien
tgttgatgaccagcttaagtaccct

SEQ ID NO: 4555851 - DNA, 25 bp, Homo sapien
gaaaagttcctgtcttaagctgcta

SEQ ID NO: 4555852 - DNA, 25 bp, Homo sapien
ttcagtgagcatgggccagagatag

SEQ ID NO: 4555853 - DNA, 25 bp, Homo sapien
gctttcagtgagcatgggccagaga

SEQ ID NO: 4555854 - DNA, 25 bp, Homo sapien
ctttcagtgagcatgggccagagat

SEQ ID NO: 4555855 - DNA, 25 bp, Homo sapien
agtgagcatgggccagagataggga

SEQ ID NO: 4555856 - DNA, 25 bp, Homo sapien
cctgtttctcagtgcgcatggtcgt

SEQ ID NO: 4555857 - DNA, 25 bp, Homo sapien
gccgttctcgacatcctggtgcctg

SEQ ID NO: 4555858 - DNA, 25 bp, Homo sapien
tcattttgatgtggcacgctcatgc

SEQ ID NO: 4555859 - DNA, 25 bp, Homo sapien
cgctcatgcacaggtggtgtgtgaa

SEQ ID NO: 4555860 - DNA, 25 bp, Homo sapien
ttctctcagatctccttctacctgt

SEQ ID NO: 4555861 - DNA, 25 bp, Homo sapien
tcttcaggctctggttgcttttctt

SEQ ID NO: 4555862 - DNA, 25 bp, Homo sapien
tctcttcaggctctggttgcttttc

SEQ ID NO: 4555863 - DNA, 25 bp, Homo sapien
tgttcctttttctctcagatctcct

SEQ ID NO: 4555864 - DNA, 25 bp, Homo sapien
ggattgtagcggttcccctggttca

SEQ ID NO: 4555865 - DNA, 25 bp, Homo sapien
gattgtagcggttcccctggttcaa

SEQ ID NO: 4555866 - DNA, 25 bp, Homo sapien
cctgggattgtagcggttcccctgg

SEQ ID NO: 4555867 - DNA, 25 bp, Homo sapien
ctgggattgtagcggttcccctggt

SEQ ID NO: 4555868 - DNA, 25 bp, Homo sapien
aagggcactccggactgaagatgct

SEQ ID NO: 4555869 - DNA, 25 bp, Homo sapien
cactccggactgaagatgctgcgtg

SEQ ID NO: 4555870 - DNA, 25 bp, Homo sapien
ccggactgaagatgctgcgtggatt

SEQ ID NO: 4555871 - DNA, 25 bp, Homo sapien
actgaagatgctgcgtggattgcca

SEQ ID NO: 4555872 - DNA, 25 bp, Homo sapien
tcgtggccatggctggaacccttta

SEQ ID NO: 4555873 - DNA, 25 bp, Homo sapien
ctcaatagggatgtgaatgactgcc

SEQ ID NO: 4555874 - DNA, 25 bp, Homo sapien
ttccttgggttcgtggccatggctg

SEQ ID NO: 4555875 - DNA, 25 bp, Homo sapien
aaatgggcgctcaatagggatgtga

SEQ ID NO: 4555876 - DNA, 25 bp, Homo sapien
cagctggaatggttagaagtagaga

SEQ ID NO: 4555877 - DNA, 25 bp, Homo sapien
agaccccgcagggagcatgaattgg

SEQ ID NO: 4555878 - DNA, 25 bp, Homo sapien
gaggagaccccgcagggagcatgaa

SEQ ID NO: 4555879 - DNA, 25 bp, Homo sapien
tgcagctggaatggttagaagtaga

SEQ ID NO: 4555880 - DNA, 25 bp, Homo sapien
gaatggaaaggctaatgagttcatc

SEQ ID NO: 4555881 - DNA, 25 bp, Homo sapien
agcagggctgccctatccatctggg

SEQ ID NO: 4555882 - DNA, 25 bp, Homo sapien
cctgggagccctctgtgtgaacaat

SEQ ID NO: 4555883 - DNA, 25 bp, Homo sapien
tatccatctgggagtcgttggacgg

SEQ ID NO: 4555884 - DNA, 25 bp, Homo sapien
aggaggaagagaagacacagacaca

SEQ ID NO: 4555885 - DNA, 25 bp, Homo sapien
ctgaggaggaagagaagacacagac

SEQ ID NO: 4555886 - DNA, 25 bp, Homo sapien
gaggaagagaagacacagacacaga

SEQ ID NO: 4555887 - DNA, 25 bp, Homo sapien
tgaggaggaagagaagacacagaca

SEQ ID NO: 4555888 - DNA, 25 bp, Homo sapien
ggtgttttacctgagctgcctagag

SEQ ID NO: 4555889 - DNA, 25 bp, Homo sapien
gcatctctgcaagtcactcctggtg

SEQ ID NO: 4555890 - DNA, 25 bp, Homo sapien
taatggacagatctcttagcgggcc

SEQ ID NO: 4555891 - DNA, 25 bp, Homo sapien
ccatgagggataaacagagcatctc

SEQ ID NO: 4555892 - DNA, 25 bp, Homo sapien
catgaacatgtttaagcaggctggc

SEQ ID NO: 4555893 - DNA, 25 bp, Homo sapien
gcacctcgatgactcaaaatcacag

SEQ ID NO: 4555894 - DNA, 25 bp, Homo sapien
tccaataaggagcagaaggtagggc

SEQ ID NO: 4555895 - DNA, 25 bp, Homo sapien
aattcacaggcagcgtgcggagaaa

SEQ ID NO: 4555896 - DNA, 25 bp, Homo sapien
atggagtgaggagggcccttgcctg

SEQ ID NO: 4555897 - DNA, 25 bp, Homo sapien
gaggagggcccttgcctgtttccca

SEQ ID NO: 4555898 - DNA, 25 bp, Homo sapien
agtgaggagggcccttgcctgtttc

SEQ ID NO: 4555899 - DNA, 25 bp, Homo sapien
cgatggagtgaggagggcccttgcc

SEQ ID NO: 4555900 - DNA, 25 bp, Homo sapien
gggaataggattatgtagggcccca

SEQ ID NO: 4555901 - DNA, 25 bp, Homo sapien
ggaataggattatgtagggccccat

SEQ ID NO: 4555902 - DNA, 25 bp, Homo sapien
ggatgggaataggattatgtagggc

SEQ ID NO: 4555903 - DNA, 25 bp, Homo sapien
atgggaataggattatgtagggccc

SEQ ID NO: 4555904 - DNA, 25 bp, Homo sapien
gcttttacgttaggtgactggtgaa

SEQ ID NO: 4555905 - DNA, 25 bp, Homo sapien
cattgagaaggaacagaggaggtcc

SEQ ID NO: 4555906 - DNA, 25 bp, Homo sapien
gaatctgaccgtgttgagtttgagg

SEQ ID NO: 4555907 - DNA, 25 bp, Homo sapien
aggtccatgtcttggagtggtaagt

SEQ ID NO: 4555908 - DNA, 25 bp, Homo sapien
acagtgccactgctttctccgtggc

SEQ ID NO: 4555909 - DNA, 25 bp, Homo sapien
cgtggcaccagttgcatctctgttc

SEQ ID NO: 4555910 - DNA, 25 bp, Homo sapien
ccactggcactgcagttaacttcct

SEQ ID NO: 4555911 - DNA, 25 bp, Homo sapien
actgctttctccgtggcaccagttg

SEQ ID NO: 4555912 - DNA, 25 bp, Homo sapien
tgagctcagacactggcgtgtttgc

SEQ ID NO: 4555913 - DNA, 25 bp, Homo sapien
ctgtaaagccagaaggtagctcctc

SEQ ID NO: 4555914 - DNA, 25 bp, Homo sapien
caatggtgcacagtgttcagctggc

SEQ ID NO: 4555915 - DNA, 25 bp, Homo sapien
actcgagtgtctaggcatgagctca

SEQ ID NO: 4555916 - DNA, 25 bp, Homo sapien
gacctaggaacaccattaaggagag

SEQ ID NO: 4555917 - DNA, 25 bp, Homo sapien
tagggactctccgtctaggaaaata

SEQ ID NO: 4555918 - DNA, 25 bp, Homo sapien
taataaagcattaggtcccagtgcc

SEQ ID NO: 4555919 - DNA, 25 bp, Homo sapien
catgacttggagtgtgaccagccct

SEQ ID NO: 4555920 - DNA, 25 bp, Homo sapien
cacttcagcaatccaaacagagcag

SEQ ID NO: 4555921 - DNA, 25 bp, Homo sapien
catccacgttgtgtggaagcagcac

SEQ ID NO: 4555922 - DNA, 25 bp, Homo sapien
caatgctgagaaggatggcagttgc

SEQ ID NO: 4555923 - DNA, 25 bp, Homo sapien
tggttgctgagtccggcaatgctga

SEQ ID NO: 4555924 - DNA, 25 bp, Homo sapien
agtgacagcgttggtccaacaggaa

SEQ ID NO: 4555925 - DNA, 25 bp, Homo sapien
gtgacagcgttggtccaacaggaaa

SEQ ID NO: 4555926 - DNA, 25 bp, Homo sapien
tgacagcgttggtccaacaggaaag

SEQ ID NO: 4555927 - DNA, 25 bp, Homo sapien
cagtgacagcgttggtccaacagga

SEQ ID NO: 4555928 - DNA, 25 bp, Homo sapien
tttggcaagagggcctctttgtttg

SEQ ID NO: 4555929 - DNA, 25 bp, Homo sapien
ggcaagagggcctctttgtttgctc

SEQ ID NO: 4555930 - DNA, 25 bp, Homo sapien
tggcaagagggcctctttgtttgct

SEQ ID NO: 4555931 - DNA, 25 bp, Homo sapien
gcaagagggcctctttgtttgctcc

SEQ ID NO: 4555932 - DNA, 25 bp, Homo sapien
ccctgacaggcggaactcactgttt

SEQ ID NO: 4555933 - DNA, 25 bp, Homo sapien
caggcctcgttagattggagtggga

SEQ ID NO: 4555934 - DNA, 25 bp, Homo sapien
ctgccctgacaggcggaactcactg

SEQ ID NO: 4555935 - DNA, 25 bp, Homo sapien
cctgacaggcggaactcactgtttg

SEQ ID NO: 4555936 - DNA, 25 bp, Homo sapien
aagcccagctgttgtatagggaggc

SEQ ID NO: 4555937 - DNA, 25 bp, Homo sapien
gcggcggcctgtaggagtcctgcag

SEQ ID NO: 4555938 - DNA, 25 bp, Homo sapien
ctgttgtatagggaggcatttcttt

SEQ ID NO: 4555939 - DNA, 25 bp, Homo sapien
agggaagaagcccagctgttgtata

SEQ ID NO: 4555940 - DNA, 25 bp, Homo sapien
ctctgtacacttgaggatcagaggt

SEQ ID NO: 4555941 - DNA, 25 bp, Homo sapien
aagacattctctgtacacttgagga

SEQ ID NO: 4555942 - DNA, 25 bp, Homo sapien
tgaaagacattctctgtacacttga

SEQ ID NO: 4555943 - DNA, 25 bp, Homo sapien
acattctctgtacacttgaggatca

SEQ ID NO: 4555944 - DNA, 25 bp, Homo sapien
taagcataaggagacccttgcggcc

SEQ ID NO: 4555945 - DNA, 25 bp, Homo sapien
ctagcagtgactggatgagaacctg

SEQ ID NO: 4555946 - DNA, 25 bp, Homo sapien
gtgtgagatgttttccttcataccc

SEQ ID NO: 4555947 - DNA, 25 bp, Homo sapien
agttgggcagccttgctttctagca

SEQ ID NO: 4555948 - DNA, 25 bp, Homo sapien
gagaatcctaccaagaagcataaag

SEQ ID NO: 4555949 - DNA, 25 bp, Homo sapien
cttgcccaagaaatggtaagtaggc

SEQ ID NO: 4555950 - DNA, 25 bp, Homo sapien
tcagctcaaatctctgcagaaaggc

SEQ ID NO: 4555951 - DNA, 25 bp, Homo sapien
taaaggatttgaccagttaggagct

SEQ ID NO: 4555952 - DNA, 25 bp, Homo sapien
cacagacaccatgctagttaatctc

SEQ ID NO: 4555953 - DNA, 25 bp, Homo sapien
ctcataatagctttagaaggctgat

SEQ ID NO: 4555954 - DNA, 25 bp, Homo sapien
gtagcactaggaagttcaaaagttg

SEQ ID NO: 4555955 - DNA, 25 bp, Homo sapien
ggccctcgtcaaggactctgagtat

SEQ ID NO: 4555956 - DNA, 25 bp, Homo sapien
tcaagcttttccacgggttctccaa

SEQ ID NO: 4555957 - DNA, 25 bp, Homo sapien
ttctcttagaaatgcccagtgctcc

SEQ ID NO: 4555958 - DNA, 25 bp, Homo sapien
cattctgtagcggagatggccattc

SEQ ID NO: 4555959 - DNA, 25 bp, Homo sapien
ccaactccaagagggtaggacactt

SEQ ID NO: 4555960 - DNA, 25 bp, Homo sapien
acctcaaagatgaccgcagcaggct

SEQ ID NO: 4555961 - DNA, 25 bp, Homo sapien
tggaagccaagagtcacctcaaaga

SEQ ID NO: 4555962 - DNA, 25 bp, Homo sapien
cagctcagcctttgggaagtcttgg

SEQ ID NO: 4555963 - DNA, 25 bp, Homo sapien
gacctggagtatgagctggaagcca

SEQ ID NO: 4555964 - DNA, 25 bp, Homo sapien
gagattacagatgaccaccaccact

SEQ ID NO: 4555965 - DNA, 25 bp, Homo sapien
tgagattacagatgaccaccaccac

SEQ ID NO: 4555966 - DNA, 25 bp, Homo sapien
agctgagattacagatgaccaccac

SEQ ID NO: 4555967 - DNA, 25 bp, Homo sapien
attacagatgaccaccaccactcct

SEQ ID NO: 4555968 - DNA, 25 bp, Homo sapien
ttctgaggacgcaacaagcctggtt

SEQ ID NO: 4555969 - DNA, 25 bp, Homo sapien
caaatcgacatggaggttgagcacc

SEQ ID NO: 4555970 - DNA, 25 bp, Homo sapien
gagtgtcgttctacaatgcccgttg

SEQ ID NO: 4555971 - DNA, 25 bp, Homo sapien
caaagtgcagattagtgcccacggt

SEQ ID NO: 4555972 - DNA, 25 bp, Homo sapien
caggaagaatgtgactcaggaggcc

SEQ ID NO: 4555973 - DNA, 25 bp, Homo sapien
aaattcagacgttctaggctttgca

SEQ ID NO: 4555974 - DNA, 25 bp, Homo sapien
tggaagactgtcattagccggaaat

SEQ ID NO: 4555975 - DNA, 25 bp, Homo sapien
aatgacttgacaggttcctctcagg

SEQ ID NO: 4555976 - DNA, 25 bp, Homo sapien
tggtttgctcgcttctctccgtggc

SEQ ID NO: 4555977 - DNA, 25 bp, Homo sapien
tctggcccttctaggatgggcttgt

SEQ ID NO: 4555978 - DNA, 25 bp, Homo sapien
ctgcctcgcctttcatccgtccctg

SEQ ID NO: 4555979 - DNA, 25 bp, Homo sapien
agggtttggagattaagataagcca

SEQ ID NO: 4555980 - DNA, 25 bp, Homo sapien
tgcttgagtacatagacaaatttat

SEQ ID NO: 4555981 - DNA, 25 bp, Homo sapien
tctttttaatcactttattgcttga

SEQ ID NO: 4555982 - DNA, 25 bp, Homo sapien
gcttgagtacatagacaaatttatg

SEQ ID NO: 4555983 - DNA, 25 bp, Homo sapien
ttttaatcactttattgcttgagta

SEQ ID NO: 4555984 - DNA, 25 bp, Homo sapien
cagggcgaagctgtagatggttcat

SEQ ID NO: 4555985 - DNA, 25 bp, Homo sapien
gcgaagctgtagatggttcatattt

SEQ ID NO: 4555986 - DNA, 25 bp, Homo sapien
gggcgaagctgtagatggttcatat

SEQ ID NO: 4555987 - DNA, 25 bp, Homo sapien
agggcgaagctgtagatggttcata

SEQ ID NO: 4555988 - DNA, 25 bp, Homo sapien
tatcgagccagacggtgaatccggc

SEQ ID NO: 4555989 - DNA, 25 bp, Homo sapien
tttataatatcgagccagacggtga

SEQ ID NO: 4555990 - DNA, 25 bp, Homo sapien
cgagccagacggtgaatccggctct

SEQ ID NO: 4555991 - DNA, 25 bp, Homo sapien
gcttggttttataatatcgagccag

SEQ ID NO: 4555992 - DNA, 25 bp, Homo sapien
aaaacgcacttttgcagcaccatgt

SEQ ID NO: 4555993 - DNA, 25 bp, Homo sapien
acgcacttttgcagcaccatgtcag

SEQ ID NO: 4555994 - DNA, 25 bp, Homo sapien
cacaaaacgcacttttgcagcacca

SEQ ID NO: 4555995 - DNA, 25 bp, Homo sapien
tgtcacaaaacgcacttttgcagca

SEQ ID NO: 4555996 - DNA, 25 bp, Homo sapien
aatctgctccttcacattgtcagat

SEQ ID NO: 4555997 - DNA, 25 bp, Homo sapien
cgatttgtggaggagtcaggccctt

SEQ ID NO: 4555998 - DNA, 25 bp, Homo sapien
ttgtggaggagtcaggcccttcttg

SEQ ID NO: 4555999 - DNA, 25 bp, Homo sapien
ttgtcagatgtcaacttcagccaag

SEQ ID NO: 4556000 - DNA, 25 bp, Homo sapien
cccttcccgggcacatgaatgtgac

SEQ ID NO: 4556001 - DNA, 25 bp, Homo sapien
cacatgaatgtgacccgtgacggcg

SEQ ID NO: 4556002 - DNA, 25 bp, Homo sapien
aatgtgacccgtgacggcggcagtc

SEQ ID NO: 4556003 - DNA, 25 bp, Homo sapien
tcccgggcacatgaatgtgacccgt

SEQ ID NO: 4556004 - DNA, 25 bp, Homo sapien
agctggtatcaaactgaactcttcc

SEQ ID NO: 4556005 - DNA, 25 bp, Homo sapien
tactgattgctttatatgccatccg

SEQ ID NO: 4556006 - DNA, 25 bp, Homo sapien
ggcatgacatggtagctggtatcaa

SEQ ID NO: 4556007 - DNA, 25 bp, Homo sapien
tatgccatccgcttcaaaaggagtt

SEQ ID NO: 4556008 - DNA, 25 bp, Homo sapien
taaaatatctcaagtgtaattaggg

SEQ ID NO: 4556009 - DNA, 25 bp, Homo sapien
tctcaagtgtaattaggggtgcatt

SEQ ID NO: 4556010 - DNA, 25 bp, Homo sapien
ctaaaatatctcaagtgtaattagg

SEQ ID NO: 4556011 - DNA, 25 bp, Homo sapien
atatctcaagtgtaattaggggtgc

SEQ ID NO: 4556012 - DNA, 25 bp, Homo sapien
ccaagggctgacctgatcaatggca

SEQ ID NO: 4556013 - DNA, 25 bp, Homo sapien
tgacctgatcaatggcacagtgact

SEQ ID NO: 4556014 - DNA, 25 bp, Homo sapien
ggagtggtaagaccccaagggctga

SEQ ID NO: 4556015 - DNA, 25 bp, Homo sapien
cttagtagccacaccggggagtggt

SEQ ID NO: 4556016 - DNA, 25 bp, Homo sapien
tgccccggaggacttcgttctccat

SEQ ID NO: 4556017 - DNA, 25 bp, Homo sapien
gctgaccaggcctaaacagtaaaag

SEQ ID NO: 4556018 - DNA, 25 bp, Homo sapien
gaggtttggttgagctgggatgtcc

SEQ ID NO: 4556019 - DNA, 25 bp, Homo sapien
atgtccaagtttgggaccagagctg

SEQ ID NO: 4556020 - DNA, 25 bp, Homo sapien
gacccaacgggatcagaaatgtcca

SEQ ID NO: 4556021 - DNA, 25 bp, Homo sapien
gatgagtaaggctcagttctggacc

SEQ ID NO: 4556022 - DNA, 25 bp, Homo sapien
ctagtctgcactggcttatgctgag

SEQ ID NO: 4556023 - DNA, 25 bp, Homo sapien
cagttctggacccaacgggatcaga

SEQ ID NO: 4556024 - DNA, 25 bp, Homo sapien
taaagctggcaaaaaactgtatcgc

SEQ ID NO: 4556025 - DNA, 25 bp, Homo sapien
catagctgtgtacgagctctaggag

SEQ ID NO: 4556026 - DNA, 25 bp, Homo sapien
tatcgccagctgatagcttgagtca

SEQ ID NO: 4556027 - DNA, 25 bp, Homo sapien
gaagtgtccagtcattgttgagagc

SEQ ID NO: 4556028 - DNA, 25 bp, Homo sapien
gagatggcgtcctgccacgcctgct

SEQ ID NO: 4556029 - DNA, 25 bp, Homo sapien
gcctgctccgtcatctgggagatgc

SEQ ID NO: 4556030 - DNA, 25 bp, Homo sapien
ctgagcgagatggcgtcctgccacg

SEQ ID NO: 4556031 - DNA, 25 bp, Homo sapien
cacgcctgctccgtcatctgggaga

SEQ ID NO: 4556032 - DNA, 25 bp, Homo sapien
gaacgtttatgatttcatacatgga

SEQ ID NO: 4556033 - DNA, 25 bp, Homo sapien
ctgaacgtttatgatttcatacatg

SEQ ID NO: 4556034 - DNA, 25 bp, Homo sapien
ttatgatttcatacatggacagcat

SEQ ID NO: 4556035 - DNA, 25 bp, Homo sapien
cgtttatgatttcatacatggacag

SEQ ID NO: 4556036 - DNA, 25 bp, Homo sapien
cgtgactgcacatgttgtttagaca

SEQ ID NO: 4556037 - DNA, 25 bp, Homo sapien
tactgatatccgagttttattggca

SEQ ID NO: 4556038 - DNA, 25 bp, Homo sapien
ggtgacccacagttttcgtactgat

SEQ ID NO: 4556039 - DNA, 25 bp, Homo sapien
taccaggcctgcatgtctcgtgact

SEQ ID NO: 4556040 - DNA, 25 bp, Homo sapien
cctccagggatgtgtcctcgacatg

SEQ ID NO: 4556041 - DNA, 25 bp, Homo sapien
ccagggatgtgtcctcgacatgtcc

SEQ ID NO: 4556042 - DNA, 25 bp, Homo sapien
ttcctccagggatgtgtcctcgaca

SEQ ID NO: 4556043 - DNA, 25 bp, Homo sapien
aattcatagaattttgagatttgga

SEQ ID NO: 4556044 - DNA, 25 bp, Homo sapien
tctgtttggcatgcagaatgggaga

SEQ ID NO: 4556045 - DNA, 25 bp, Homo sapien
tattgtgaaagtttggtctgtttgg

SEQ ID NO: 4556046 - DNA, 25 bp, Homo sapien
atgggagaatatgccaggacttcgg

SEQ ID NO: 4556047 - DNA, 25 bp, Homo sapien
agaatgggagaatatgccaggactt

SEQ ID NO: 4556048 - DNA, 25 bp, Homo sapien
ttcaggactgctcttaggcctatgt

SEQ ID NO: 4556049 - DNA, 25 bp, Homo sapien
caggactgctcttaggcctatgtgg

SEQ ID NO: 4556050 - DNA, 25 bp, Homo sapien
ctgctcttaggcctatgtggctatt

SEQ ID NO: 4556051 - DNA, 25 bp, Homo sapien
ggactgctcttaggcctatgtggct

SEQ ID NO: 4556052 - DNA, 25 bp, Homo sapien
gccaacagccagtcgactgggttgg

SEQ ID NO: 4556053 - DNA, 25 bp, Homo sapien
tcccagtgatacgagggcgtgcaga

SEQ ID NO: 4556054 - DNA, 25 bp, Homo sapien
agactgaatgggcaggtggatctca

SEQ ID NO: 4556055 - DNA, 25 bp, Homo sapien
actgcaaactctccgaggccaacag

SEQ ID NO: 4556056 - DNA, 25 bp, Homo sapien
cgccgctgcgggatgctgcgctcca

SEQ ID NO: 4556057 - DNA, 25 bp, Homo sapien
acggtcaccctgctctcgggcggcg

SEQ ID NO: 4556058 - DNA, 25 bp, Homo sapien
cgtccacggtcaccctgctctcggg

SEQ ID NO: 4556059 - DNA, 25 bp, Homo sapien
ggatgctgcgctccacgtccacggt

SEQ ID NO: 4556060 - DNA, 25 bp, Homo sapien
gccacagccaggggcttggcttgtg

SEQ ID NO: 4556061 - DNA, 25 bp, Homo sapien
cttggcttgtggctttttagttctt

SEQ ID NO: 4556062 - DNA, 25 bp, Homo sapien
ccaggggcttggcttgtggcttttt

SEQ ID NO: 4556063 - DNA, 25 bp, Homo sapien
tagagccacagccaggggcttggct

SEQ ID NO: 4556064 - DNA, 25 bp, Homo sapien
tgctgtgcatccatatctgaacaag

SEQ ID NO: 4556065 - DNA, 25 bp, Homo sapien
tatttcaacccaagatacttctcag

SEQ ID NO: 4556066 - DNA, 25 bp, Homo sapien
tctgaacaagagacctggaggctgg

SEQ ID NO: 4556067 - DNA, 25 bp, Homo sapien
ggcccagggctgactaactagagac

SEQ ID NO: 4556068 - DNA, 25 bp, Homo sapien
actggttggcttctgattcacttaa

SEQ ID NO: 4556069 - DNA, 25 bp, Homo sapien
ggtgtctgtgtcattcttgtatcta

SEQ ID NO: 4556070 - DNA, 25 bp, Homo sapien
gaacaaaacctcatactggttggct

SEQ ID NO: 4556071 - DNA, 25 bp, Homo sapien
tctaatcgttagagaactattgaac

SEQ ID NO: 4556072 - DNA, 25 bp, Homo sapien
atccactcaattgaactgtctccag

SEQ ID NO: 4556073 - DNA, 25 bp, Homo sapien
tggaagatgataagttggtagcctg

SEQ ID NO: 4556074 - DNA, 25 bp, Homo sapien
tccagatcatgtcgcacgagctctt

SEQ ID NO: 4556075 - DNA, 25 bp, Homo sapien
tagtctccggctctttggaagatga

SEQ ID NO: 4556076 - DNA, 25 bp, Homo sapien
gaagcgattcctttattgttcgtga

SEQ ID NO: 4556077 - DNA, 25 bp, Homo sapien
tgggttggaagcgattcctttattg

SEQ ID NO: 4556078 - DNA, 25 bp, Homo sapien
cctttattgttcgtgattagaagaa

SEQ ID NO: 4556079 - DNA, 25 bp, Homo sapien
gattcctttattgttcgtgattaga

SEQ ID NO: 4556080 - DNA, 25 bp, Homo sapien
agaggcagtttggtctctaggccat

SEQ ID NO: 4556081 - DNA, 25 bp, Homo sapien
gaggcagtttggtctctaggccatg

SEQ ID NO: 4556082 - DNA, 25 bp, Homo sapien
cgttttgttgtggccttaattcatt

SEQ ID NO: 4556083 - DNA, 25 bp, Homo sapien
ttcgttttgttgtggccttaattca

SEQ ID NO: 4556084 - DNA, 25 bp, Homo sapien
tcgttttgttgtggccttaattcat

SEQ ID NO: 4556085 - DNA, 25 bp, Homo sapien
aaatatttctgcaaagccgagtggt

SEQ ID NO: 4556086 - DNA, 25 bp, Homo sapien
tatttctgcaaagccgagtggtggc

SEQ ID NO: 4556087 - DNA, 25 bp, Homo sapien
aatatttctgcaaagccgagtggtg

SEQ ID NO: 4556088 - DNA, 25 bp, Homo sapien
tctgtaggaacaggggcattgtgca

SEQ ID NO: 4556089 - DNA, 25 bp, Homo sapien
tctccacctatctccctggtctgtc

SEQ ID NO: 4556090 - DNA, 25 bp, Homo sapien
cctcccatggtagtccacatggctc

SEQ ID NO: 4556091 - DNA, 25 bp, Homo sapien
aagaccctcccatggtagtccacat

SEQ ID NO: 4556092 - DNA, 25 bp, Homo sapien
gaccctcccatggtagtccacatgg

SEQ ID NO: 4556093 - DNA, 25 bp, Homo sapien
agtctcacagcttcacctctcccct

SEQ ID NO: 4556094 - DNA, 25 bp, Homo sapien
gcaaagattacatcaagtctcacag

SEQ ID NO: 4556095 - DNA, 25 bp, Homo sapien
aagtgtgaacctttctcttgaatac

SEQ ID NO: 4556096 - DNA, 25 bp, Homo sapien
gccttctgggcacactcccagctgg

SEQ ID NO: 4556097 - DNA, 25 bp, Homo sapien
acttgccgtttcatggccgagtgcg

SEQ ID NO: 4556098 - DNA, 25 bp, Homo sapien
ccgtttcatggccgagtgcgccatc

SEQ ID NO: 4556099 - DNA, 25 bp, Homo sapien
ttgccgtttcatggccgagtgcgcc

SEQ ID NO: 4556100 - DNA, 25 bp, Homo sapien
tgccgtttcatggccgagtgcgcca

SEQ ID NO: 4556101 - DNA, 25 bp, Homo sapien
tctcctcctcaaattcttcccctcc

SEQ ID NO: 4556102 - DNA, 25 bp, Homo sapien
cccctccttcatctaatctttgttt

SEQ ID NO: 4556103 - DNA, 25 bp, Homo sapien
cttcccctccttcatctaatctttg

SEQ ID NO: 4556104 - DNA, 25 bp, Homo sapien
tcctcaaattcttcccctccttcat

SEQ ID NO: 4556105 - DNA, 25 bp, Homo sapien
tatgtggggtaatagctctgtggct

SEQ ID NO: 4556106 - DNA, 25 bp, Homo sapien
ggagatgacggagatgtggctttca

SEQ ID NO: 4556107 - DNA, 25 bp, Homo sapien
tcatatgtggggtaatagctctgtg

SEQ ID NO: 4556108 - DNA, 25 bp, Homo sapien
tgctggattcatggagatgacggag

SEQ ID NO: 4556109 - DNA, 25 bp, Homo sapien
gaggcctgtccacaagaagcatggg

SEQ ID NO: 4556110 - DNA, 25 bp, Homo sapien
cactgagagacttgtgtgggccaga

SEQ ID NO: 4556111 - DNA, 25 bp, Homo sapien
gggcacccagccaaacttgaacctg

SEQ ID NO: 4556112 - DNA, 25 bp, Homo sapien
tcttggtcccaagcatctgtgcagg

SEQ ID NO: 4556113 - DNA, 25 bp, Homo sapien
cgctagtcccttggtttaatttgtg

SEQ ID NO: 4556114 - DNA, 25 bp, Homo sapien
tctgatgcgctagtcccttggttta

SEQ ID NO: 4556115 - DNA, 25 bp, Homo sapien
tgcgctagtcccttggtttaatttg

SEQ ID NO: 4556116 - DNA, 25 bp, Homo sapien
tgatgcgctagtcccttggtttaat

SEQ ID NO: 4556117 - DNA, 25 bp, Homo sapien
gatgtaatagtctgtctggtgtgtt

SEQ ID NO: 4556118 - DNA, 25 bp, Homo sapien
tgatgtaatagtctgtctggtgtgt

SEQ ID NO: 4556119 - DNA, 25 bp, Homo sapien
aatgctaaggtgatgttttaccggg

SEQ ID NO: 4556120 - DNA, 25 bp, Homo sapien
ggcttgagttccttgctgtcacaga

SEQ ID NO: 4556121 - DNA, 25 bp, Homo sapien
gaagagttcatgtgcctggacacac

SEQ ID NO: 4556122 - DNA, 25 bp, Homo sapien
gaaggcttgtgcatcacctggcttg

SEQ ID NO: 4556123 - DNA, 25 bp, Homo sapien
tatttggtagtacacaggttctccc

SEQ ID NO: 4556124 - DNA, 25 bp, Homo sapien
gaggtcttgccagcactccaaaatc

SEQ ID NO: 4556125 - DNA, 25 bp, Homo sapien
gagctaactatcctgacgtatggta

SEQ ID NO: 4556126 - DNA, 25 bp, Homo sapien
cttaatgggtaaagcaacagctgtg

SEQ ID NO: 4556127 - DNA, 25 bp, Homo sapien
tgtgatattcccatcgccacaggga

SEQ ID NO: 4556128 - DNA, 25 bp, Homo sapien
gaataggataactttagtccacaga

SEQ ID NO: 4556129 - DNA, 25 bp, Homo sapien
tcttttacacaagtccccttgctga

SEQ ID NO: 4556130 - DNA, 25 bp, Homo sapien
atagaataggataactttagtccac

SEQ ID NO: 4556131 - DNA, 25 bp, Homo sapien
tccctgtaactctgcacaaccagca

SEQ ID NO: 4556132 - DNA, 25 bp, Homo sapien
ggtccctgtaactctgcacaaccag

SEQ ID NO: 4556133 - DNA, 25 bp, Homo sapien
gtccctgtaactctgcacaaccagc

SEQ ID NO: 4556134 - DNA, 25 bp, Homo sapien
aatttgttttgtcctgcagattctt

SEQ ID NO: 4556135 - DNA, 25 bp, Homo sapien
gctgacaacccacgacatgatgcct

SEQ ID NO: 4556136 - DNA, 25 bp, Homo sapien
acccacgacatgatgcctcctttgg

SEQ ID NO: 4556137 - DNA, 25 bp, Homo sapien
aaccgctgacaacccacgacatgat

SEQ ID NO: 4556138 - DNA, 25 bp, Homo sapien
aggaaaccgctgacaacccacgaca

SEQ ID NO: 4556139 - DNA, 25 bp, Homo sapien
tgcagagccgtcattcacactcagt

SEQ ID NO: 4556140 - DNA, 25 bp, Homo sapien
caagtgatagtgctccttttgctcc

SEQ ID NO: 4556141 - DNA, 25 bp, Homo sapien
tttgctcctcttggtgggggcatgc

SEQ ID NO: 4556142 - DNA, 25 bp, Homo sapien
cttcccttgggaacccagtgatctg

SEQ ID NO: 4556143 - DNA, 25 bp, Homo sapien
gcaagtcgacctcttcagccatgac

SEQ ID NO: 4556144 - DNA, 25 bp, Homo sapien
tttcattagcacctctttgcagatg

SEQ ID NO: 4556145 - DNA, 25 bp, Homo sapien
ctttgcagatgacgggcaagtcgac

SEQ ID NO: 4556146 - DNA, 25 bp, Homo sapien
gatgacgggcaagtcgacctcttca

SEQ ID NO: 4556147 - DNA, 25 bp, Homo sapien
tgttcgtccctggtcagaaatgctg

SEQ ID NO: 4556148 - DNA, 25 bp, Homo sapien
agagaatctgttcgtccctggtcag

SEQ ID NO: 4556149 - DNA, 25 bp, Homo sapien
tgctgattgcatttacacgtatttt

SEQ ID NO: 4556150 - DNA, 25 bp, Homo sapien
cagaatagagaatctgttcgtccct

SEQ ID NO: 4556151 - DNA, 25 bp, Homo sapien
ggagctagccttcctccggagaagg

SEQ ID NO: 4556152 - DNA, 25 bp, Homo sapien
aggagctagccttcctccggagaag

SEQ ID NO: 4556153 - DNA, 25 bp, Homo sapien
ccactgtcttcaggaggagctagcc

SEQ ID NO: 4556154 - DNA, 25 bp, Homo sapien
gagctagccttcctccggagaaggc

SEQ ID NO: 4556155 - DNA, 25 bp, Homo sapien
gttggctgtcagtataaggcccaat

SEQ ID NO: 4556156 - DNA, 25 bp, Homo sapien
tgttggctgtcagtataaggcccaa

SEQ ID NO: 4556157 - DNA, 25 bp, Homo sapien
tgtgttggctgtcagtataaggccc

SEQ ID NO: 4556158 - DNA, 25 bp, Homo sapien
tggctgtcagtataaggcccaatgt

SEQ ID NO: 4556159 - DNA, 25 bp, Homo sapien
tccactctatgtatatcccaagttg

SEQ ID NO: 4556160 - DNA, 25 bp, Homo sapien
gcctccactctatgtatatcccaag

SEQ ID NO: 4556161 - DNA, 25 bp, Homo sapien
tgcctccactctatgtatatcccaa

SEQ ID NO: 4556162 - DNA, 25 bp, Homo sapien
actctatgtatatcccaagttgtgt

SEQ ID NO: 4556163 - DNA, 25 bp, Homo sapien
ccctgagggatgaaacgttcacttt

SEQ ID NO: 4556164 - DNA, 25 bp, Homo sapien
ctgctgattcccctgagggatgaaa

SEQ ID NO: 4556165 - DNA, 25 bp, Homo sapien
tttctgtaggaaagagtgtcctaaa

SEQ ID NO: 4556166 - DNA, 25 bp, Homo sapien
taaataccaattgcctactcgggtc

SEQ ID NO: 4556167 - DNA, 25 bp, Homo sapien
tcttgcaacgtcttgcaaatcctct

SEQ ID NO: 4556168 - DNA, 25 bp, Homo sapien
cttgcaacgtcttgcaaatcctcta

SEQ ID NO: 4556169 - DNA, 25 bp, Homo sapien
ttgcaacgtcttgcaaatcctctaa

SEQ ID NO: 4556170 - DNA, 25 bp, Homo sapien
ggctgggttcaacgtccgcccatac

SEQ ID NO: 4556171 - DNA, 25 bp, Homo sapien
tctcttggtgctgctttatggggcc

SEQ ID NO: 4556172 - DNA, 25 bp, Homo sapien
gcctgtcccaaaattttcagttctc

SEQ ID NO: 4556173 - DNA, 25 bp, Homo sapien
tgagccgcagagcagtgctgacttg

SEQ ID NO: 4556174 - DNA, 25 bp, Homo sapien
tgcatagtgcctgaatccaccacgg

SEQ ID NO: 4556175 - DNA, 25 bp, Homo sapien
tctgagtcaccatccgccatcttgg

SEQ ID NO: 4556176 - DNA, 25 bp, Homo sapien
cagcagcctcgtcggctgttatcca

SEQ ID NO: 4556177 - DNA, 25 bp, Homo sapien
cctgctgtgaagccatggcagggac

SEQ ID NO: 4556178 - DNA, 25 bp, Homo sapien
cctgaactcgcttcatatttgccat

SEQ ID NO: 4556179 - DNA, 25 bp, Homo sapien
cagccttcctgtcgatgggaattgc

SEQ ID NO: 4556180 - DNA, 25 bp, Homo sapien
tcacttctcctgaactcgcttcata

SEQ ID NO: 4556181 - DNA, 25 bp, Homo sapien
tgctctggcttgcaccgacttctcc

SEQ ID NO: 4556182 - DNA, 25 bp, Homo sapien
ttagactatattgagcagatccatt

SEQ ID NO: 4556183 - DNA, 25 bp, Homo sapien
tattgagcagatccattgaataacc

SEQ ID NO: 4556184 - DNA, 25 bp, Homo sapien
gatccattgaataaccacattcagc

SEQ ID NO: 4556185 - DNA, 25 bp, Homo sapien
gagcagatccattgaataaccacat

SEQ ID NO: 4556186 - DNA, 25 bp, Homo sapien
tggtcttgttgggtcgaatggcttt

SEQ ID NO: 4556187 - DNA, 25 bp, Homo sapien
gatgtgacttcatttgaggcacagc

SEQ ID NO: 4556188 - DNA, 25 bp, Homo sapien
tttgcttggatcctttccatggtct

SEQ ID NO: 4556189 - DNA, 25 bp, Homo sapien
ggcacagcgatatcatttgcttgga

SEQ ID NO: 4556190 - DNA, 25 bp, Homo sapien
tgtttgtgctacagccaatgagtgt

SEQ ID NO: 4556191 - DNA, 25 bp, Homo sapien
atgtgcggctttggaggcttggtcc

SEQ ID NO: 4556192 - DNA, 25 bp, Homo sapien
tgtgctacagccaatgagtgtgagg

SEQ ID NO: 4556193 - DNA, 25 bp, Homo sapien
gaaacaccaggatgtgcggctttgg

SEQ ID NO: 4556194 - DNA, 25 bp, Homo sapien
gcaagaaggcttatggtgccagaac

SEQ ID NO: 4556195 - DNA, 25 bp, Homo sapien
tcctaggagggcagatacatcagtg

SEQ ID NO: 4556196 - DNA, 25 bp, Homo sapien
catcagtggtatgcaagagggatcc

SEQ ID NO: 4556197 - DNA, 25 bp, Homo sapien
gacagtctcccagtatcctaggagg

SEQ ID NO: 4556198 - DNA, 25 bp, Homo sapien
caccaggacacgcatgggtgagagt

SEQ ID NO: 4556199 - DNA, 25 bp, Homo sapien
ctactctggtttatcctcagggacg

SEQ ID NO: 4556200 - DNA, 25 bp, Homo sapien
gggcaccaggacacgcatgggtgag

SEQ ID NO: 4556201 - DNA, 25 bp, Homo sapien
cagggacggcaaatgcatcagtagc

SEQ ID NO: 4556202 - DNA, 25 bp, Homo sapien
acttgagagtggccaaaagccccac

SEQ ID NO: 4556203 - DNA, 25 bp, Homo sapien
aacttgagagtggccaaaagcccca

SEQ ID NO: 4556204 - DNA, 25 bp, Homo sapien
ttgagagtggccaaaagccccactc

SEQ ID NO: 4556205 - DNA, 25 bp, Homo sapien
cttgagagtggccaaaagccccact

SEQ ID NO: 4556206 - DNA, 25 bp, Homo sapien
cagcacatgtagagagggaggaatt

SEQ ID NO: 4556207 - DNA, 25 bp, Homo sapien
gaattcccaaggtacgttgctctga

SEQ ID NO: 4556208 - DNA, 25 bp, Homo sapien
cacttgcccactgattaactgtgag

SEQ ID NO: 4556209 - DNA, 25 bp, Homo sapien
gagactattagtgcagagctggctt

SEQ ID NO: 4556210 - DNA, 25 bp, Homo sapien
aactaggagtatgagttgaaaatac

SEQ ID NO: 4556211 - DNA, 25 bp, Homo sapien
atacaagtgactgaagcattgattc

SEQ ID NO: 4556212 - DNA, 25 bp, Homo sapien
tatgagttgaaaatacaagtgactg

SEQ ID NO: 4556213 - DNA, 25 bp, Homo sapien
gaagaactaggagtatgagttgaaa

SEQ ID NO: 4556214 - DNA, 25 bp, Homo sapien
cttcagacacactttagggacagcg

SEQ ID NO: 4556215 - DNA, 25 bp, Homo sapien
gcaatttcgtacttacagcagtccc

SEQ ID NO: 4556216 - DNA, 25 bp, Homo sapien
actttagggacagcggccaaagagg

SEQ ID NO: 4556217 - DNA, 25 bp, Homo sapien
acttttccttcaatgtatctaccag

SEQ ID NO: 4556218 - DNA, 25 bp, Homo sapien
cagggaccgctggtgtaggggcacc

SEQ ID NO: 4556219 - DNA, 25 bp, Homo sapien
tggcccctgagtggtttgcaggaca

SEQ ID NO: 4556220 - DNA, 25 bp, Homo sapien
aggttcccatttcagatcctactgc

SEQ ID NO: 4556221 - DNA, 25 bp, Homo sapien
tactgcctgtgacaagtggtagtgt

SEQ ID NO: 4556222 - DNA, 25 bp, Homo sapien
tgagtcttcagtggttggcccctga

SEQ ID NO: 4556223 - DNA, 25 bp, Homo sapien
cagcataactaatcagtacagccat

SEQ ID NO: 4556224 - DNA, 25 bp, Homo sapien
ctgcatgtgacacaggcaattgtct

SEQ ID NO: 4556225 - DNA, 25 bp, Homo sapien
tacaagatcaatgatcgtgggatcc

SEQ ID NO: 4556226 - DNA, 25 bp, Homo sapien
gatcctgtaggctaacagcataact

SEQ ID NO: 4556227 - DNA, 25 bp, Homo sapien
tgaggctatgtatccctgactgagc

SEQ ID NO: 4556228 - DNA, 25 bp, Homo sapien
tccaaagtctgcctcaatgtctgtg

SEQ ID NO: 4556229 - DNA, 25 bp, Homo sapien
ggccaacaggcaacattaatattta

SEQ ID NO: 4556230 - DNA, 25 bp, Homo sapien
aaatgattggctcctttgattcagg

SEQ ID NO: 4556231 - DNA, 25 bp, Homo sapien
catccagacattgatggcagaagct

SEQ ID NO: 4556232 - DNA, 25 bp, Homo sapien
gatggtgcacaaagggcagtctaaa

SEQ ID NO: 4556233 - DNA, 25 bp, Homo sapien
tgagacctctaacattgccaatggg

SEQ ID NO: 4556234 - DNA, 25 bp, Homo sapien
cattgcatgacagcgagatagggag

SEQ ID NO: 4556235 - DNA, 25 bp, Homo sapien
actccctggctttgagtgatccgcc

SEQ ID NO: 4556236 - DNA, 25 bp, Homo sapien
gtggccagccaggtttcaatatttt

SEQ ID NO: 4556237 - DNA, 25 bp, Homo sapien
tcagtatacatatcacggacgatgt

SEQ ID NO: 4556238 - DNA, 25 bp, Homo sapien
tcacccctggacagttcagtataca

SEQ ID NO: 4556239 - DNA, 25 bp, Homo sapien
aaccaagtacggctgccgtcccagt

SEQ ID NO: 4556240 - DNA, 25 bp, Homo sapien
ggcactggcccattaatggtttcaa

SEQ ID NO: 4556241 - DNA, 25 bp, Homo sapien
cccattaatggtttcaatgaggtaa

SEQ ID NO: 4556242 - DNA, 25 bp, Homo sapien
ctatgggaaactgaagaggcactgg

SEQ ID NO: 4556243 - DNA, 25 bp, Homo sapien
actgtgtgccttcgaggggaattga

SEQ ID NO: 4556244 - DNA, 25 bp, Homo sapien
gggagtcatctctacatctggcagt

SEQ ID NO: 4556245 - DNA, 25 bp, Homo sapien
cgcagcccagaaacgagcatgaggg

SEQ ID NO: 4556246 - DNA, 25 bp, Homo sapien
gtatgcgcagcccagaaacgagcat

SEQ ID NO: 4556247 - DNA, 25 bp, Homo sapien
taacaccatgcaggagtgaattccc

SEQ ID NO: 4556248 - DNA, 25 bp, Homo sapien
tcattaacaccatgcaggagtgaat

SEQ ID NO: 4556249 - DNA, 25 bp, Homo sapien
catgcaggagtgaattcccttggag

SEQ ID NO: 4556250 - DNA, 25 bp, Homo sapien
tgcagtcattaacaccatgcaggag

SEQ ID NO: 4556251 - DNA, 25 bp, Homo sapien
ctggcctcagctgtcgccctgtgag

SEQ ID NO: 4556252 - DNA, 25 bp, Homo sapien
ggcctcagctgtcgccctgtgagaa

SEQ ID NO: 4556253 - DNA, 25 bp, Homo sapien
cagctgtcgccctgtgagaatcaca

SEQ ID NO: 4556254 - DNA, 25 bp, Homo sapien
ctcagctgtcgccctgtgagaatca

SEQ ID NO: 4556255 - DNA, 25 bp, Homo sapien
gcagagacccagtccgcaacattct

SEQ ID NO: 4556256 - DNA, 25 bp, Homo sapien
aggctttgcttggccactgagcaga

SEQ ID NO: 4556257 - DNA, 25 bp, Homo sapien
gagcagtgttgatgtccccagtctc

SEQ ID NO: 4556258 - DNA, 25 bp, Homo sapien
agagagagcagtgttgatgtcccca

SEQ ID NO: 4556259 - DNA, 25 bp, Homo sapien
tcccatcacaattatgaaaggtgca

SEQ ID NO: 4556260 - DNA, 25 bp, Homo sapien
cacttgccttcgtgggatggagcca

SEQ ID NO: 4556261 - DNA, 25 bp, Homo sapien
tatgtgcatgggacccatttactgc

SEQ ID NO: 4556262 - DNA, 25 bp, Homo sapien
gcagagcatatgtgcatgggaccca

SEQ ID NO: 4556263 - DNA, 25 bp, Homo sapien
gagttacgtaagagctgggtcagcc

SEQ ID NO: 4556264 - DNA, 25 bp, Homo sapien
gtagcctaggattctcgagccacag

SEQ ID NO: 4556265 - DNA, 25 bp, Homo sapien
tcgggctccttccagttccagtagc

SEQ ID NO: 4556266 - DNA, 25 bp, Homo sapien
tctaatcgaggatgccagcgtggag

SEQ ID NO: 4556267 - DNA, 25 bp, Homo sapien
gaggagatcaaaggagggtgagctc

SEQ ID NO: 4556268 - DNA, 25 bp, Homo sapien
tcaaaggagggtgagctcatctgac

SEQ ID NO: 4556269 - DNA, 25 bp, Homo sapien
aaaggagggtgagctcatctgaccc

SEQ ID NO: 4556270 - DNA, 25 bp, Homo sapien
gagatcaaaggagggtgagctcatc

SEQ ID NO: 4556271 - DNA, 25 bp, Homo sapien
cgccctgggagtgacccatcatcat

SEQ ID NO: 4556272 - DNA, 25 bp, Homo sapien
cctctttcccgtcacactgtacctc

SEQ ID NO: 4556273 - DNA, 25 bp, Homo sapien
cagctgcccggttaacctgggtgag

SEQ ID NO: 4556274 - DNA, 25 bp, Homo sapien
gagatattaaactccacccgccctg

SEQ ID NO: 4556275 - DNA, 25 bp, Homo sapien
gtggcgccacacactatccagtttg

SEQ ID NO: 4556276 - DNA, 25 bp, Homo sapien
aaagagtatgggacctgaccgctcc

SEQ ID NO: 4556277 - DNA, 25 bp, Homo sapien
ggaccactgtcaccaggaagctgct

SEQ ID NO: 4556278 - DNA, 25 bp, Homo sapien
gctgcttgtgggattctcttgagga

SEQ ID NO: 4556279 - DNA, 25 bp, Homo sapien
ggtttcaacactatcctccctggtg

SEQ ID NO: 4556280 - DNA, 25 bp, Homo sapien
gctaggattaatttgcctctgaggg

SEQ ID NO: 4556281 - DNA, 25 bp, Homo sapien
tgtattttcagagcccataatgtca

SEQ ID NO: 4556282 - DNA, 25 bp, Homo sapien
taatgtcatgtaatcgggaccatgt

SEQ ID NO: 4556283 - DNA, 25 bp, Homo sapien
tctttcaaatgcattctgcaagtag

SEQ ID NO: 4556284 - DNA, 25 bp, Homo sapien
caaatgcattctgcaagtagctctc

SEQ ID NO: 4556285 - DNA, 25 bp, Homo sapien
ttcaaatgcattctgcaagtagctc

SEQ ID NO: 4556286 - DNA, 25 bp, Homo sapien
tcattctttcaaatgcattctgcaa

SEQ ID NO: 4556287 - DNA, 25 bp, Homo sapien
ctctgttgctgtcttgggtcaggtg

SEQ ID NO: 4556288 - DNA, 25 bp, Homo sapien
ctgttgctgtcttgggtcaggtgcc

SEQ ID NO: 4556289 - DNA, 25 bp, Homo sapien
tctgttgctgtcttgggtcaggtgc

SEQ ID NO: 4556290 - DNA, 25 bp, Homo sapien
tagatgtctttgtcaaagaggcctc

SEQ ID NO: 4556291 - DNA, 25 bp, Homo sapien
ttcacttgggcttcgtcatagatgt

SEQ ID NO: 4556292 - DNA, 25 bp, Homo sapien
gggcttcgtcatagatgtctttgtc

SEQ ID NO: 4556293 - DNA, 25 bp, Homo sapien
gatgtctttgtcaaagaggcctcca

SEQ ID NO: 4556294 - DNA, 25 bp, Homo sapien
tcctgtatactggtgagtgtgctta

SEQ ID NO: 4556295 - DNA, 25 bp, Homo sapien
ttagtcctgtatactggtgagtgtg

SEQ ID NO: 4556296 - DNA, 25 bp, Homo sapien
tgtatactggtgagtgtgcttaccg

SEQ ID NO: 4556297 - DNA, 25 bp, Homo sapien
tatactggtgagtgtgcttaccgtt

SEQ ID NO: 4556298 - DNA, 25 bp, Homo sapien
tctgggtgggctgcactagcaaagc

SEQ ID NO: 4556299 - DNA, 25 bp, Homo sapien
tacagaccctccgatgcagtgaaag

SEQ ID NO: 4556300 - DNA, 25 bp, Homo sapien
tgaaaggaagataggccacgagcac

SEQ ID NO: 4556301 - DNA, 25 bp, Homo sapien
taagagatgataggtctgtaccaca

SEQ ID NO: 4556302 - DNA, 25 bp, Homo sapien
accattactactccttgtggattcc

SEQ ID NO: 4556303 - DNA, 25 bp, Homo sapien
ggttccctcttcgtcaccattacta

SEQ ID NO: 4556304 - DNA, 25 bp, Homo sapien
gtaatgggttccctcttcgtcacca

SEQ ID NO: 4556305 - DNA, 25 bp, Homo sapien
tcttcgtcaccattactactccttg

SEQ ID NO: 4556306 - DNA, 25 bp, Homo sapien
gttcagaggagagcagtacagtcat

SEQ ID NO: 4556307 - DNA, 25 bp, Homo sapien
ctccttgtagattccattcagaagt

SEQ ID NO: 4556308 - DNA, 25 bp, Homo sapien
ttcagaagttcagaggagagcagta

SEQ ID NO: 4556309 - DNA, 25 bp, Homo sapien
tccttgtagattccattcagaagtt

SEQ ID NO: 4556310 - DNA, 25 bp, Homo sapien
actgagctgtgagaggagcactgac

SEQ ID NO: 4556311 - DNA, 25 bp, Homo sapien
gataacgctcactctaacctcactg

SEQ ID NO: 4556312 - DNA, 25 bp, Homo sapien
gatttctgggcctactgcagtccat

SEQ ID NO: 4556313 - DNA, 25 bp, Homo sapien
taagccaagtcatatagttgctgag

SEQ ID NO: 4556314 - DNA, 25 bp, Homo sapien
ggatgactcaaacccatgtaaataa

SEQ ID NO: 4556315 - DNA, 25 bp, Homo sapien
tcagcagaagacctggatggatgac

SEQ ID NO: 4556316 - DNA, 25 bp, Homo sapien
ggctgggaccacacaatttggtggc

SEQ ID NO: 4556317 - DNA, 25 bp, Homo sapien
ttttcctcacaagcattgtgccttc

SEQ ID NO: 4556318 - DNA, 25 bp, Homo sapien
gttgtagaagaaattgggcaactca

SEQ ID NO: 4556319 - DNA, 25 bp, Homo sapien
aagaaattgggcaactcaacagact

SEQ ID NO: 4556320 - DNA, 25 bp, Homo sapien
tgttgtagaagaaattgggcaactc

SEQ ID NO: 4556321 - DNA, 25 bp, Homo sapien
tggtcccacggatgagcagttgctg

SEQ ID NO: 4556322 - DNA, 25 bp, Homo sapien
gtcccacggatgagcagttgctgta

SEQ ID NO: 4556323 - DNA, 25 bp, Homo sapien
gctggtcccacggatgagcagttgc

SEQ ID NO: 4556324 - DNA, 25 bp, Homo sapien
cccgctggtcccacggatgagcagt

SEQ ID NO: 4556325 - DNA, 25 bp, Homo sapien
gagagaaaacaagctcaatcttggt

SEQ ID NO: 4556326 - DNA, 25 bp, Homo sapien
cactcctcaaaagcgcaactctgag

SEQ ID NO: 4556327 - DNA, 25 bp, Homo sapien
agctgtgcggttctaaagggtggga

SEQ ID NO: 4556328 - DNA, 25 bp, Homo sapien
tagtagtacggtcaccatttacaga

SEQ ID NO: 4556329 - DNA, 25 bp, Homo sapien
gaaatacggcatctgtcagggctca

SEQ ID NO: 4556330 - DNA, 25 bp, Homo sapien
caaactggtggagtcactggaaagc

SEQ ID NO: 4556331 - DNA, 25 bp, Homo sapien
tatttggtatgattaaggtggcccc

SEQ ID NO: 4556332 - DNA, 25 bp, Homo sapien
aactttgtattcctgagagctgggc

SEQ ID NO: 4556333 - DNA, 25 bp, Homo sapien
taggagttcttctgggggatcttta

SEQ ID NO: 4556334 - DNA, 25 bp, Homo sapien
taacttctgagtactcccgcaagcc

SEQ ID NO: 4556335 - DNA, 25 bp, Homo sapien
cttctgagtactcccgcaagccaaa

SEQ ID NO: 4556336 - DNA, 25 bp, Homo sapien
gagtactcccgcaagccaaattctc

SEQ ID NO: 4556337 - DNA, 25 bp, Homo sapien
tgagtactcccgcaagccaaattct

SEQ ID NO: 4556338 - DNA, 25 bp, Homo sapien
aaacacagaaatgggccgggtcaga

SEQ ID NO: 4556339 - DNA, 25 bp, Homo sapien
tcacctgcgaacagcaagtcctggg

SEQ ID NO: 4556340 - DNA, 25 bp, Homo sapien
cacttatcacactgggaggacaagg

SEQ ID NO: 4556341 - DNA, 25 bp, Homo sapien
taaaaattcctcacgtatgcgcagc

SEQ ID NO: 4556342 - DNA, 25 bp, Homo sapien
agcccccatggcctacataaggctc

SEQ ID NO: 4556343 - DNA, 25 bp, Homo sapien
agttgacagggacaacagagggcgg

SEQ ID NO: 4556344 - DNA, 25 bp, Homo sapien
ggctgttctcctgtccgtatagttc

SEQ ID NO: 4556345 - DNA, 25 bp, Homo sapien
acagagggcggccaaggagagactg

SEQ ID NO: 4556346 - DNA, 25 bp, Homo sapien
tctcctgtccgtatagttcatttcg

SEQ ID NO: 4556347 - DNA, 25 bp, Homo sapien
cagtttcagaagctctacggaggga

SEQ ID NO: 4556348 - DNA, 25 bp, Homo sapien
tcacatcaggacgaaacagcaaggc

SEQ ID NO: 4556349 - DNA, 25 bp, Homo sapien
gaagctcactgatgcacgaaaggta

SEQ ID NO: 4556350 - DNA, 25 bp, Homo sapien
caatggaaaaccctgctggagcaga

SEQ ID NO: 4556351 - DNA, 25 bp, Homo sapien
cccaaaggggctctgggcatttaag

SEQ ID NO: 4556352 - DNA, 25 bp, Homo sapien
atttccagacatcttgaatccccca

SEQ ID NO: 4556353 - DNA, 25 bp, Homo sapien
gctctgggcatttaaggcattgtaa

SEQ ID NO: 4556354 - DNA, 25 bp, Homo sapien
aggggctctgggcatttaaggcatt

SEQ ID NO: 4556355 - DNA, 25 bp, Homo sapien
agctgctacgagtccaaagtctgag

SEQ ID NO: 4556356 - DNA, 25 bp, Homo sapien
cagaagacactgtgagggccttgtt

SEQ ID NO: 4556357 - DNA, 25 bp, Homo sapien
aaatttcctgaacagggccaaagat

SEQ ID NO: 4556358 - DNA, 25 bp, Homo sapien
tattggctctttcgataacttcatc

SEQ ID NO: 4556359 - DNA, 25 bp, Homo sapien
tatcatcagtgacgttggaaaacac

SEQ ID NO: 4556360 - DNA, 25 bp, Homo sapien
tcagccacaccactctggatgagtt

SEQ ID NO: 4556361 - DNA, 25 bp, Homo sapien
tcctccttggcaatccgcatatcat

SEQ ID NO: 4556362 - DNA, 25 bp, Homo sapien
aacactgtgggctcaatgaaaaacc

SEQ ID NO: 4556363 - DNA, 25 bp, Homo sapien
gagacaagacttaatgactccaaat

SEQ ID NO: 4556364 - DNA, 25 bp, Homo sapien
acaagacttaatgactccaaatata

SEQ ID NO: 4556365 - DNA, 25 bp, Homo sapien
agacaagacttaatgactccaaata

SEQ ID NO: 4556366 - DNA, 25 bp, Homo sapien
gacaagacttaatgactccaaatat

SEQ ID NO: 4556367 - DNA, 25 bp, Homo sapien
gatggactcctccacgaagatgcga

SEQ ID NO: 4556368 - DNA, 25 bp, Homo sapien
agcactgaccttgattgaagaacac

SEQ ID NO: 4556369 - DNA, 25 bp, Homo sapien
gcgagagcctgcagtgcagcactga

SEQ ID NO: 4556370 - DNA, 25 bp, Homo sapien
gtcaaagggactccccactacgcgc

SEQ ID NO: 4556371 - DNA, 25 bp, Homo sapien
ggaaacagccatgttctcaccgctt

SEQ ID NO: 4556372 - DNA, 25 bp, Homo sapien
gaaacagccatgttctcaccgcttt

SEQ ID NO: 4556373 - DNA, 25 bp, Homo sapien
aacagccatgttctcaccgctttgc

SEQ ID NO: 4556374 - DNA, 25 bp, Homo sapien
agaggaaacagccatgttctcaccg

SEQ ID NO: 4556375 - DNA, 25 bp, Homo sapien
caaagccctaggtatagtgtgctca

SEQ ID NO: 4556376 - DNA, 25 bp, Homo sapien
cacagggcttgggagataaggtaca

SEQ ID NO: 4556377 - DNA, 25 bp, Homo sapien
taaccatgaatagccctggattggg

SEQ ID NO: 4556378 - DNA, 25 bp, Homo sapien
gcataaatatgagccccaggttgcc

SEQ ID NO: 4556379 - DNA, 25 bp, Homo sapien
aatattaggacttttgcctccaagt

SEQ ID NO: 4556380 - DNA, 25 bp, Homo sapien
tattaggacttttgcctccaagttc

SEQ ID NO: 4556381 - DNA, 25 bp, Homo sapien
taatattaggacttttgcctccaag

SEQ ID NO: 4556382 - DNA, 25 bp, Homo sapien
ataatattaggacttttgcctccaa

SEQ ID NO: 4556383 - DNA, 25 bp, Homo sapien
aagggaaatggagacaggttttgca

SEQ ID NO: 4556384 - DNA, 25 bp, Homo sapien
gaagggaaatggagacaggttttgc

SEQ ID NO: 4556385 - DNA, 25 bp, Homo sapien
gaaatggagacaggttttgcaaatc

SEQ ID NO: 4556386 - DNA, 25 bp, Homo sapien
gggaaatggagacaggttttgcaaa

SEQ ID NO: 4556387 - DNA, 25 bp, Homo sapien
tgagctgtggccaacctgccagact

SEQ ID NO: 4556388 - DNA, 25 bp, Homo sapien
gaaaatgctaacacctggccctgaa

SEQ ID NO: 4556389 - DNA, 25 bp, Homo sapien
ggaaaatgctaacacctggccctga

SEQ ID NO: 4556390 - DNA, 25 bp, Homo sapien
gggcaactggggaaacagcaatcct

SEQ ID NO: 4556391 - DNA, 25 bp, Homo sapien
gcaactggggaaacagcaatcctct

SEQ ID NO: 4556392 - DNA, 25 bp, Homo sapien
cgaagggcaactggggaaacagcaa

SEQ ID NO: 4556393 - DNA, 25 bp, Homo sapien
ctggggaaacagcaatcctctgact

SEQ ID NO: 4556394 - DNA, 25 bp, Homo sapien
gatgctgtcatctgtgactgtctgc

SEQ ID NO: 4556395 - DNA, 25 bp, Homo sapien
ggatgctgtcatctgtgactgtctg

SEQ ID NO: 4556396 - DNA, 25 bp, Homo sapien
ctgtcatctgtgactgtctgctctt

SEQ ID NO: 4556397 - DNA, 25 bp, Homo sapien
tgtcatctgtgactgtctgctcttc

SEQ ID NO: 4556398 - DNA, 25 bp, Homo sapien
ggtatagaaaccacaaactgatcgg

SEQ ID NO: 4556399 - DNA, 25 bp, Homo sapien
ttaatgcatcctgaaacttttgcgg

SEQ ID NO: 4556400 - DNA, 25 bp, Homo sapien
tcctgaaacttttgcgggtatagaa

SEQ ID NO: 4556401 - DNA, 25 bp, Homo sapien
gcatcctgaaacttttgcgggtata

SEQ ID NO: 4556402 - DNA, 25 bp, Homo sapien
gcagcctggacgtgccagcagggac

SEQ ID NO: 4556403 - DNA, 25 bp, Homo sapien
catattgggatatggccttgacccc

SEQ ID NO: 4556404 - DNA, 25 bp, Homo sapien
catacacatattgggatatggcctt

SEQ ID NO: 4556405 - DNA, 25 bp, Homo sapien
cacatattgggatatggccttgacc

SEQ ID NO: 4556406 - DNA, 25 bp, Homo sapien
tacacatattgggatatggccttga

SEQ ID NO: 4556407 - DNA, 25 bp, Homo sapien
gccctgctgcctgattccacgttgc

SEQ ID NO: 4556408 - DNA, 25 bp, Homo sapien
gccaaagacctggctactatggttg

SEQ ID NO: 4556409 - DNA, 25 bp, Homo sapien
gtacttggggtcacatatatgctgg

SEQ ID NO: 4556410 - DNA, 25 bp, Homo sapien
ggtcacatatatgctggcccaggcc

SEQ ID NO: 4556411 - DNA, 25 bp, Homo sapien
ccaaagacctggctactatggttgg

SEQ ID NO: 4556412 - DNA, 25 bp, Homo sapien
ctgccgcgtcccaggagctgtcatg

SEQ ID NO: 4556413 - DNA, 25 bp, Homo sapien
tgccgcgtcccaggagctgtcatgc

SEQ ID NO: 4556414 - DNA, 25 bp, Homo sapien
gaggccaatgatcgagtggtccatg

SEQ ID NO: 4556415 - DNA, 25 bp, Homo sapien
ggaggccaatgatcgagtggtccat

SEQ ID NO: 4556416 - DNA, 25 bp, Homo sapien
aggccaatgatcgagtggtccatgg

SEQ ID NO: 4556417 - DNA, 25 bp, Homo sapien
ctggaggccaatgatcgagtggtcc

SEQ ID NO: 4556418 - DNA, 25 bp, Homo sapien
catggcggcgtcactgaagttctgc

SEQ ID NO: 4556419 - DNA, 25 bp, Homo sapien
gccagccttcatggcggcgtcactg

SEQ ID NO: 4556420 - DNA, 25 bp, Homo sapien
gctctgcggcctcttagtcttgacc

SEQ ID NO: 4556421 - DNA, 25 bp, Homo sapien
aaaaagagacacctgcatgtgcctc

SEQ ID NO: 4556422 - DNA, 25 bp, Homo sapien
ttctggaagtcaggctcaatggaga

SEQ ID NO: 4556423 - DNA, 25 bp, Homo sapien
gaagtcaggctcaatggagatgcag

SEQ ID NO: 4556424 - DNA, 25 bp, Homo sapien
tcaggctcaatggagatgcaggtga

SEQ ID NO: 4556425 - DNA, 25 bp, Homo sapien
ctggaagtcaggctcaatggagatg

SEQ ID NO: 4556426 - DNA, 25 bp, Homo sapien
gcaaaatatgtatcgagcttttaca

SEQ ID NO: 4556427 - DNA, 25 bp, Homo sapien
tcgagcttttacaaagtgctgattc

SEQ ID NO: 4556428 - DNA, 25 bp, Homo sapien
cttccagcaaaatatgtatcgagct

SEQ ID NO: 4556429 - DNA, 25 bp, Homo sapien
gcttttacaaagtgctgattcttta

SEQ ID NO: 4556430 - DNA, 25 bp, Homo sapien
aaatgccggagatgtaggtactaac

SEQ ID NO: 4556431 - DNA, 25 bp, Homo sapien
caagagtattctatgcagctgttaa

SEQ ID NO: 4556432 - DNA, 25 bp, Homo sapien
aagttacacaataggccggacaccg

SEQ ID NO: 4556433 - DNA, 25 bp, Homo sapien
taacatgacaaggtgttatctcttg

SEQ ID NO: 4556434 - DNA, 25 bp, Homo sapien
ctcagtagaccctgtgaatgcaatc

SEQ ID NO: 4556435 - DNA, 25 bp, Homo sapien
gccgttggcccatatcctggcaaaa

SEQ ID NO: 4556436 - DNA, 25 bp, Homo sapien
caaaatattgatgaccccgggagga

SEQ ID NO: 4556437 - DNA, 25 bp, Homo sapien
tgccaatgtgagaagctattgctgc

SEQ ID NO: 4556438 - DNA, 25 bp, Homo sapien
gcactgagtggtgtttgctctgctg

SEQ ID NO: 4556439 - DNA, 25 bp, Homo sapien
gcttaataactactgtattgccaca

SEQ ID NO: 4556440 - DNA, 25 bp, Homo sapien
tgctctgctggcttaataactactg

SEQ ID NO: 4556441 - DNA, 25 bp, Homo sapien
gatgagggctcccatgtagagtgca

SEQ ID NO: 4556442 - DNA, 25 bp, Homo sapien
agctgcagcgttgagagtctgggca

SEQ ID NO: 4556443 - DNA, 25 bp, Homo sapien
tcttgtcctgtcagtgaagctgcag

SEQ ID NO: 4556444 - DNA, 25 bp, Homo sapien
aatcctacgaggaaggtgacagacc

SEQ ID NO: 4556445 - DNA, 25 bp, Homo sapien
agtaagtttgaatcctacgaggaag

SEQ ID NO: 4556446 - DNA, 25 bp, Homo sapien
ccagagctggtccaagtaggatttc

SEQ ID NO: 4556447 - DNA, 25 bp, Homo sapien
cagagctggtccaagtaggatttcc

SEQ ID NO: 4556448 - DNA, 25 bp, Homo sapien
cccagagctggtccaagtaggattt

SEQ ID NO: 4556449 - DNA, 25 bp, Homo sapien
tgtccacacactccaatgggttcat

SEQ ID NO: 4556450 - DNA, 25 bp, Homo sapien
tcttgtaaaggtaaaatagtctcca

SEQ ID NO: 4556451 - DNA, 25 bp, Homo sapien
cttgtaaaggtaaaatagtctccat

SEQ ID NO: 4556452 - DNA, 25 bp, Homo sapien
tatttcataactcaatccaggtgtc

SEQ ID NO: 4556453 - DNA, 25 bp, Homo sapien
caaatttaaaatgctcggcaactgg

SEQ ID NO: 4556454 - DNA, 25 bp, Homo sapien
catgtccagggctatttaaagaagg

SEQ ID NO: 4556455 - DNA, 25 bp, Homo sapien
tccatcaataatccaaagcgtctgc

SEQ ID NO: 4556456 - DNA, 25 bp, Homo sapien
tgccaaatcacccttcagaaaagtt

SEQ ID NO: 4556457 - DNA, 25 bp, Homo sapien
ggttcaggtggatagtcacagacca

SEQ ID NO: 4556458 - DNA, 25 bp, Homo sapien
aaaaatagcgaagatgttgcaactg

SEQ ID NO: 4556459 - DNA, 25 bp, Homo sapien
taggctggattctgcaactgtatga

SEQ ID NO: 4556460 - DNA, 25 bp, Homo sapien
tccacataaaaagcttgcaggaatg

SEQ ID NO: 4556461 - DNA, 25 bp, Homo sapien
tgccaccatttagggattccatggt

SEQ ID NO: 4556462 - DNA, 25 bp, Homo sapien
aaaggttttgatgacgccctgcaaa

SEQ ID NO: 4556463 - DNA, 25 bp, Homo sapien
agcccagcctgcgtaatatcgaaag

SEQ ID NO: 4556464 - DNA, 25 bp, Homo sapien
cagaatggcaaatgtgggttaaaga

SEQ ID NO: 4556465 - DNA, 25 bp, Homo sapien
agaatggcaaatgtgggttaaagac

SEQ ID NO: 4556466 - DNA, 25 bp, Homo sapien
acagccgaagaatgtaaatttcagc

SEQ ID NO: 4556467 - DNA, 25 bp, Homo sapien
taaaatacagccgaagaatgtaaat

SEQ ID NO: 4556468 - DNA, 25 bp, Homo sapien
tccaacagacgtcccctttctgaag

SEQ ID NO: 4556469 - DNA, 25 bp, Homo sapien
ccctgtcccgttccaccaagtctgc

SEQ ID NO: 4556470 - DNA, 25 bp, Homo sapien
gccctgtcccgttccaccaagtctg

SEQ ID NO: 4556471 - DNA, 25 bp, Homo sapien
ccaacagacgtcccctttctgaagc

SEQ ID NO: 4556472 - DNA, 25 bp, Homo sapien
ggctgcctgcactgctttgtctata

SEQ ID NO: 4556473 - DNA, 25 bp, Homo sapien
ttctccacactgaaccaagagagaa

SEQ ID NO: 4556474 - DNA, 25 bp, Homo sapien
gcctgcactgctttgtctatatctg

SEQ ID NO: 4556475 - DNA, 25 bp, Homo sapien
ccttctccacactgaaccaagagag

SEQ ID NO: 4556476 - DNA, 25 bp, Homo sapien
ttagagaggaagaggcacaactgaa

SEQ ID NO: 4556477 - DNA, 25 bp, Homo sapien
tagagaggaagaggcacaactgaag

SEQ ID NO: 4556478 - DNA, 25 bp, Homo sapien
tgttagagaggaagaggcacaactg

SEQ ID NO: 4556479 - DNA, 25 bp, Homo sapien
ctgttagagaggaagaggcacaact

SEQ ID NO: 4556480 - DNA, 25 bp, Homo sapien
tctgagttctgccactcgttgttta

SEQ ID NO: 4556481 - DNA, 25 bp, Homo sapien
gagttctgccactcgttgtttataa

SEQ ID NO: 4556482 - DNA, 25 bp, Homo sapien
tatagacagggaacactctcccact

SEQ ID NO: 4556483 - DNA, 25 bp, Homo sapien
tctgccactcgttgtttataaagat

SEQ ID NO: 4556484 - DNA, 25 bp, Homo sapien
cacattatattcatgtaacacaaca

SEQ ID NO: 4556485 - DNA, 25 bp, Homo sapien
tccagacttgattaccacattatat

SEQ ID NO: 4556486 - DNA, 25 bp, Homo sapien
tactgtacttaagtgatggacacct

SEQ ID NO: 4556487 - DNA, 25 bp, Homo sapien
tagtagcttcggatgactatactta

SEQ ID NO: 4556488 - DNA, 25 bp, Homo sapien
tctgtgccagtcatcccaagagaca

SEQ ID NO: 4556489 - DNA, 25 bp, Homo sapien
cagacccagttacgtgtaatcaggg

SEQ ID NO: 4556490 - DNA, 25 bp, Homo sapien
taaatggctcccatgagtgatccat

SEQ ID NO: 4556491 - DNA, 25 bp, Homo sapien
tgatcagccttgacagaggcaagct

SEQ ID NO: 4556492 - DNA, 25 bp, Homo sapien
cctgtgtcaggtagtaccattcagc

SEQ ID NO: 4556493 - DNA, 25 bp, Homo sapien
gtgtcaggtagtaccattcagcaga

SEQ ID NO: 4556494 - DNA, 25 bp, Homo sapien
tgtcaggtagtaccattcagcagac

SEQ ID NO: 4556495 - DNA, 25 bp, Homo sapien
tgtgtcaggtagtaccattcagcag

SEQ ID NO: 4556496 - DNA, 25 bp, Homo sapien
gtttacaagacaggatttatgctca

SEQ ID NO: 4556497 - DNA, 25 bp, Homo sapien
attagtctccctgctgtttacaaga

SEQ ID NO: 4556498 - DNA, 25 bp, Homo sapien
ttctctgttggaattcctggtaatg

SEQ ID NO: 4556499 - DNA, 25 bp, Homo sapien
caagacaggatttatgctcaatgtg

SEQ ID NO: 4556500 - DNA, 25 bp, Homo sapien
caggtaaatgagtctaaacgagaaa

SEQ ID NO: 4556501 - DNA, 25 bp, Homo sapien
gagtctaaacgagaaataagagtta

SEQ ID NO: 4556502 - DNA, 25 bp, Homo sapien
catttcatgcaaacaggtaaatgag

SEQ ID NO: 4556503 - DNA, 25 bp, Homo sapien
gcaaacaggtaaatgagtctaaacg

SEQ ID NO: 4556504 - DNA, 25 bp, Homo sapien
gggaaactgccgctgcctacaaaat

SEQ ID NO: 4556505 - DNA, 25 bp, Homo sapien
aaatttgtcaaaccggccagagcgc

SEQ ID NO: 4556506 - DNA, 25 bp, Homo sapien
tgaggatactaagcggttccgacgc

SEQ ID NO: 4556507 - DNA, 25 bp, Homo sapien
gacctgattgggaccaacagccgag

SEQ ID NO: 4556508 - DNA, 25 bp, Homo sapien
cgccccagtcccgaagacaggcagg

SEQ ID NO: 4556509 - DNA, 25 bp, Homo sapien
caaacgccccagtcccgaagacagg

SEQ ID NO: 4556510 - DNA, 25 bp, Homo sapien
aacgccccagtcccgaagacaggca

SEQ ID NO: 4556511 - DNA, 25 bp, Homo sapien
ttcaaacgccccagtcccgaagaca

SEQ ID NO: 4556512 - DNA, 25 bp, Homo sapien
ggtcggccttcacctcgccgggcat

SEQ ID NO: 4556513 - DNA, 25 bp, Homo sapien
ggcatctctatcttgctggaagtca

SEQ ID NO: 4556514 - DNA, 25 bp, Homo sapien
cttaatttcgagattgggcgtgggc

SEQ ID NO: 4556515 - DNA, 25 bp, Homo sapien
ggtgtacttaatttcgagattgggc

SEQ ID NO: 4556516 - DNA, 25 bp, Homo sapien
atttacataaagcccgcgccgcgcg

SEQ ID NO: 4556517 - DNA, 25 bp, Homo sapien
gggctggtccatcctacctaggacg

SEQ ID NO: 4556518 - DNA, 25 bp, Homo sapien
gggcgcgctcgcctgtatataggca

SEQ ID NO: 4556519 - DNA, 25 bp, Homo sapien
tcttcttattggacgtgagggccga

SEQ ID NO: 4556520 - DNA, 25 bp, Homo sapien
tccacagtcctcgacggtgggagcg

SEQ ID NO: 4556521 - DNA, 25 bp, Homo sapien
cctccacagtcctcgacggtgggag

SEQ ID NO: 4556522 - DNA, 25 bp, Homo sapien
cgcctccacagtcctcgacggtggg

SEQ ID NO: 4556523 - DNA, 25 bp, Homo sapien
gccgcctccacagtcctcgacggtg

SEQ ID NO: 4556524 - DNA, 25 bp, Homo sapien
ccgggtccctgggtcagagtcggcg

SEQ ID NO: 4556525 - DNA, 25 bp, Homo sapien
gggcctcggccagccggacttggtc

SEQ ID NO: 4556526 - DNA, 25 bp, Homo sapien
gaagtcgagcgagggtcgtggcccc

SEQ ID NO: 4556527 - DNA, 25 bp, Homo sapien
gggaggcgcacagcggccgaagtcg

SEQ ID NO: 4556528 - DNA, 25 bp, Homo sapien
cttcggagtagagaaaggccaggaa

SEQ ID NO: 4556529 - DNA, 25 bp, Homo sapien
aggctgcggagggcggctcccagct

SEQ ID NO: 4556530 - DNA, 25 bp, Homo sapien
aaaggccaggaaagtccaggctgcg

SEQ ID NO: 4556531 - DNA, 25 bp, Homo sapien
agctcgcccacgttccctcccatcc

SEQ ID NO: 4556532 - DNA, 25 bp, Homo sapien
ggctctcggcagctacgccctctcc

SEQ ID NO: 4556533 - DNA, 25 bp, Homo sapien
caggctctcggcagctacgccctct

SEQ ID NO: 4556534 - DNA, 25 bp, Homo sapien
cccgactcccctcagccgggccgag

SEQ ID NO: 4556535 - DNA, 25 bp, Homo sapien
cgactcccctcagccgggccgaggt

SEQ ID NO: 4556536 - DNA, 25 bp, Homo sapien
cagtgggtgcgagtccccctcgcct

SEQ ID NO: 4556537 - DNA, 25 bp, Homo sapien
gtgggtgcgagtccccctcgcctcg

SEQ ID NO: 4556538 - DNA, 25 bp, Homo sapien
agtgggtgcgagtccccctcgcctc

SEQ ID NO: 4556539 - DNA, 25 bp, Homo sapien
gatttaaagatatgtccagacatac

SEQ ID NO: 4556540 - DNA, 25 bp, Homo sapien
aaagccacgcacttcaggaaaggtg

SEQ ID NO: 4556541 - DNA, 25 bp, Homo sapien
tatgtgatatcttcgacatcaaaac

SEQ ID NO: 4556542 - DNA, 25 bp, Homo sapien
aatgtttagtataccttaggatcac

SEQ ID NO: 4556543 - DNA, 25 bp, Homo sapien
gactgtcctataataaccttcctgc

SEQ ID NO: 4556544 - DNA, 25 bp, Homo sapien
ggaccagtgataccaaaattcatgg

SEQ ID NO: 4556545 - DNA, 25 bp, Homo sapien
tcattgtaggctcaagagactgatg

SEQ ID NO: 4556546 - DNA, 25 bp, Homo sapien
gccaccatgaagctctatttgtcaa

SEQ ID NO: 4556547 - DNA, 25 bp, Homo sapien
gcaggaggagatttgcatagacacc

SEQ ID NO: 4556548 - DNA, 25 bp, Homo sapien
tatggtggcctgtaaaatcctcttg

SEQ ID NO: 4556549 - DNA, 25 bp, Homo sapien
tagacacctggttgaaatatggtgg

SEQ ID NO: 4556550 - DNA, 25 bp, Homo sapien
cctcttgtcttttcggctggattgc

SEQ ID NO: 4556551 - DNA, 25 bp, Homo sapien
gaggccagccattgtttggaaataa

SEQ ID NO: 4556552 - DNA, 25 bp, Homo sapien
ggcatgcctttaacattcaccctaa

SEQ ID NO: 4556553 - DNA, 25 bp, Homo sapien
cttgtaaagagcatcaaagttagcc

SEQ ID NO: 4556554 - DNA, 25 bp, Homo sapien
accagattatctcccctcgtcaata

SEQ ID NO: 4556555 - DNA, 25 bp, Homo sapien
gaaacttatttggtacatgatcaga

SEQ ID NO: 4556556 - DNA, 25 bp, Homo sapien
aaacttatttgcatcaaggcattgg

SEQ ID NO: 4556557 - DNA, 25 bp, Homo sapien
tatcagcatttagtcatgacctgac

SEQ ID NO: 4556558 - DNA, 25 bp, Homo sapien
tcagatagccgattagcagtgggac

SEQ ID NO: 4556559 - DNA, 25 bp, Homo sapien
ctattattagagatgatctgaactt

SEQ ID NO: 4556560 - DNA, 25 bp, Homo sapien
ttagagatgatctgaactttcccag

SEQ ID NO: 4556561 - DNA, 25 bp, Homo sapien
tggatatctgttgactgattcaggg

SEQ ID NO: 4556562 - DNA, 25 bp, Homo sapien
tgttgactgattcagggtttttctc

SEQ ID NO: 4556563 - DNA, 25 bp, Homo sapien
acaaaggttttcgtaccaatggcat

SEQ ID NO: 4556564 - DNA, 25 bp, Homo sapien
aggaatctgtgagccattgtcaaaa

SEQ ID NO: 4556565 - DNA, 25 bp, Homo sapien
tagaaacaggagtcctcagagaagc

SEQ ID NO: 4556566 - DNA, 25 bp, Homo sapien
taggtattggtagaaacaggagtcc

SEQ ID NO: 4556567 - DNA, 25 bp, Homo sapien
aagtgaggaccacaacaggtaggta

SEQ ID NO: 4556568 - DNA, 25 bp, Homo sapien
tgtatgttctggataaagccagtca

SEQ ID NO: 4556569 - DNA, 25 bp, Homo sapien
gaagaacctgtttcataatcccgtg

SEQ ID NO: 4556570 - DNA, 25 bp, Homo sapien
tcagcagttcactgttcaactggcc

SEQ ID NO: 4556571 - DNA, 25 bp, Homo sapien
ggccttgtgtcttccccactatgca

SEQ ID NO: 4556572 - DNA, 25 bp, Homo sapien
ctgaagtgaacaacccagcaagcag

SEQ ID NO: 4556573 - DNA, 25 bp, Homo sapien
caagcttccgcattagaggtctaac

SEQ ID NO: 4556574 - DNA, 25 bp, Homo sapien
gataacatactgtgtagtcggacag

SEQ ID NO: 4556575 - DNA, 25 bp, Homo sapien
tcaggattctttgatacagagctca

SEQ ID NO: 4556576 - DNA, 25 bp, Homo sapien
catgcatcccgggaatcagcccaga

SEQ ID NO: 4556577 - DNA, 25 bp, Homo sapien
atgcatcccgggaatcagcccagag

SEQ ID NO: 4556578 - DNA, 25 bp, Homo sapien
tgcatcccgggaatcagcccagagc

SEQ ID NO: 4556579 - DNA, 25 bp, Homo sapien
tcatgcatcccgggaatcagcccag

SEQ ID NO: 4556580 - DNA, 25 bp, Homo sapien
caaattctcgttcctgtttgaatgt

SEQ ID NO: 4556581 - DNA, 25 bp, Homo sapien
tgttcgcttgtccaaattctcgttc

SEQ ID NO: 4556582 - DNA, 25 bp, Homo sapien
ccttgagcagcacagagtgttcgct

SEQ ID NO: 4556583 - DNA, 25 bp, Homo sapien
actcgcccttggacttccactgtgc

SEQ ID NO: 4556584 - DNA, 25 bp, Homo sapien
tgcttttttctacttggagagcact

SEQ ID NO: 4556585 - DNA, 25 bp, Homo sapien
gcttttttctacttggagagcactg

SEQ ID NO: 4556586 - DNA, 25 bp, Homo sapien
attaatttaatagaactcttcatca

SEQ ID NO: 4556587 - DNA, 25 bp, Homo sapien
ttaatttaatagaactcttcatcac

SEQ ID NO: 4556588 - DNA, 25 bp, Homo sapien
tgactaatggtatgaaaaaccatca

SEQ ID NO: 4556589 - DNA, 25 bp, Homo sapien
ttattcctacatggactataaccat

SEQ ID NO: 4556590 - DNA, 25 bp, Homo sapien
taaccatgactaatggtatgaaaaa

SEQ ID NO: 4556591 - DNA, 25 bp, Homo sapien
atggtatgaaaaaccatcattgtat

SEQ ID NO: 4556592 - DNA, 25 bp, Homo sapien
ctcagggaaaaagcacttctgcttc

SEQ ID NO: 4556593 - DNA, 25 bp, Homo sapien
ttcactgtcaacacccaagctgaaa

SEQ ID NO: 4556594 - DNA, 25 bp, Homo sapien
tgcttcactgtcaacacccaagctg

SEQ ID NO: 4556595 - DNA, 25 bp, Homo sapien
cttctgcttcactgtcaacacccaa

SEQ ID NO: 4556596 - DNA, 25 bp, Homo sapien
ttgctgctgtccacatagtacggag

SEQ ID NO: 4556597 - DNA, 25 bp, Homo sapien
tgtgctctgaactggcaccactgga

SEQ ID NO: 4556598 - DNA, 25 bp, Homo sapien
gggtacaaggtaaagcagtcacaca

SEQ ID NO: 4556599 - DNA, 25 bp, Homo sapien
tcacacagaactcatgttcttgggt

SEQ ID NO: 4556600 - DNA, 25 bp, Homo sapien
gaactgttcaactccctggttagtg

SEQ ID NO: 4556601 - DNA, 25 bp, Homo sapien
aagaacaataatgaatacataccat

SEQ ID NO: 4556602 - DNA, 25 bp, Homo sapien
tccctggttagtgcccccaaatgct

SEQ ID NO: 4556603 - DNA, 25 bp, Homo sapien
aatgaatacataccatctgggtgag

SEQ ID NO: 4556604 - DNA, 25 bp, Homo sapien
gctcatccgtgtggaaaaggcccct

SEQ ID NO: 4556605 - DNA, 25 bp, Homo sapien
tgccacagaaacccatgtggctgtt

SEQ ID NO: 4556606 - DNA, 25 bp, Homo sapien
gctgttgggtgtggctcatccgtgt

SEQ ID NO: 4556607 - DNA, 25 bp, Homo sapien
ttgggtgtggctcatccgtgtggaa

SEQ ID NO: 4556608 - DNA, 25 bp, Homo sapien
gggtgatccattgccttaaatattt

SEQ ID NO: 4556609 - DNA, 25 bp, Homo sapien
gtgtgattgggtgatccattgcctt

SEQ ID NO: 4556610 - DNA, 25 bp, Homo sapien
gggtacatgggacattttaacacat

SEQ ID NO: 4556611 - DNA, 25 bp, Homo sapien
ttactgatctttcaagcactaggtc

SEQ ID NO: 4556612 - DNA, 25 bp, Homo sapien
tcctcgttgcttttcaggctacaat

SEQ ID NO: 4556613 - DNA, 25 bp, Homo sapien
cttctgagtggcgattctgatgagg

SEQ ID NO: 4556614 - DNA, 25 bp, Homo sapien
aatctgggctccaatcttctgagtg

SEQ ID NO: 4556615 - DNA, 25 bp, Homo sapien
cattgattatcctcctaagaaaagc

SEQ ID NO: 4556616 - DNA, 25 bp, Homo sapien
catcactatcaatgttggattttca

SEQ ID NO: 4556617 - DNA, 25 bp, Homo sapien
ccaagctattctcagtcgaggacgt

SEQ ID NO: 4556618 - DNA, 25 bp, Homo sapien
gctattctcagtcgaggacgttttg

SEQ ID NO: 4556619 - DNA, 25 bp, Homo sapien
ttctcagtcgaggacgttttggagg

SEQ ID NO: 4556620 - DNA, 25 bp, Homo sapien
ctgtgtcccaagaaggctgctggtt

SEQ ID NO: 4556621 - DNA, 25 bp, Homo sapien
ctatttggtcagcttatggcaggac

SEQ ID NO: 4556622 - DNA, 25 bp, Homo sapien
ttctagcacccaagcatactgtggt

SEQ ID NO: 4556623 - DNA, 25 bp, Homo sapien
gacttatacagtggagcagatcaga

SEQ ID NO: 4556624 - DNA, 25 bp, Homo sapien
tttggagtagctaggattcccagtg

SEQ ID NO: 4556625 - DNA, 25 bp, Homo sapien
ggagtagctaggattcccagtgtga

SEQ ID NO: 4556626 - DNA, 25 bp, Homo sapien
gagtagctaggattcccagtgtgag

SEQ ID NO: 4556627 - DNA, 25 bp, Homo sapien
gcctttggagtagctaggattccca

SEQ ID NO: 4556628 - DNA, 25 bp, Homo sapien
catcttgacgatagtcccatttggg

SEQ ID NO: 4556629 - DNA, 25 bp, Homo sapien
cagaataacgctgactgtcccctga

SEQ ID NO: 4556630 - DNA, 25 bp, Homo sapien
caaacctagtggtgtagggagcaag

SEQ ID NO: 4556631 - DNA, 25 bp, Homo sapien
ggttaagcttccagttcccgctatg

SEQ ID NO: 4556632 - DNA, 25 bp, Homo sapien
gatgctctacatcaagggatgcacc

SEQ ID NO: 4556633 - DNA, 25 bp, Homo sapien
ccaaaggcattaggtttcccaactg

SEQ ID NO: 4556634 - DNA, 25 bp, Homo sapien
gaaaaacattatgagaaggcctccc

SEQ ID NO: 4556635 - DNA, 25 bp, Homo sapien
cgcctatgagttacaagcaccaggg

SEQ ID NO: 4556636 - DNA, 25 bp, Homo sapien
aaggatgaagaacagccaaaacttt

SEQ ID NO: 4556637 - DNA, 25 bp, Homo sapien
caaaggcagatgactcagacctcct

SEQ ID NO: 4556638 - DNA, 25 bp, Homo sapien
gttttcaacagggttgcctaggcaa

SEQ ID NO: 4556639 - DNA, 25 bp, Homo sapien
aagacagtgtggatacagacagaca

SEQ ID NO: 4556640 - DNA, 25 bp, Homo sapien
aataaagccgtctggatatacaaca

SEQ ID NO: 4556641 - DNA, 25 bp, Homo sapien
ccttgtaaggcatcctgagtgcatg

SEQ ID NO: 4556642 - DNA, 25 bp, Homo sapien
tatacaacagggacttctaagggtg

SEQ ID NO: 4556643 - DNA, 25 bp, Homo sapien
ccatgggagataagcaacgtttaac

SEQ ID NO: 4556644 - DNA, 25 bp, Homo sapien
gagttgatctttctgattaagtagc

SEQ ID NO: 4556645 - DNA, 25 bp, Homo sapien
tctttctgattaagtagctgctgac

SEQ ID NO: 4556646 - DNA, 25 bp, Homo sapien
cgataatctaattgggtcaagggaa

SEQ ID NO: 4556647 - DNA, 25 bp, Homo sapien
ttggagattcgataatctaattggg

SEQ ID NO: 4556648 - DNA, 25 bp, Homo sapien
gtgttctcattgtaaagaatgactt

SEQ ID NO: 4556649 - DNA, 25 bp, Homo sapien
ggtctttgaatcactgccgtagatg

SEQ ID NO: 4556650 - DNA, 25 bp, Homo sapien
tgctggtctttgaatcactgccgta

SEQ ID NO: 4556651 - DNA, 25 bp, Homo sapien
tcactgccgtagatgcacatgatcc

SEQ ID NO: 4556652 - DNA, 25 bp, Homo sapien
tgaatcactgccgtagatgcacatg

SEQ ID NO: 4556653 - DNA, 25 bp, Homo sapien
tactatttgcagcacccaaggtgtc

SEQ ID NO: 4556654 - DNA, 25 bp, Homo sapien
gggcataggcgaggcactcttacta

SEQ ID NO: 4556655 - DNA, 25 bp, Homo sapien
cagaaaggctatcccatcattcagg

SEQ ID NO: 4556656 - DNA, 25 bp, Homo sapien
cagcacccaaggtgtctgagaccat

SEQ ID NO: 4556657 - DNA, 25 bp, Homo sapien
tggcaactagcccaaaatgacaagg

SEQ ID NO: 4556658 - DNA, 25 bp, Homo sapien
acatgctgcgatcccttcactctga

SEQ ID NO: 4556659 - DNA, 25 bp, Homo sapien
ggactctccatagccatggcaacta

SEQ ID NO: 4556660 - DNA, 25 bp, Homo sapien
cactctgacttacacgagacccagg

SEQ ID NO: 4556661 - DNA, 25 bp, Homo sapien
gctgttagatcatctgtttgtcccc

SEQ ID NO: 4556662 - DNA, 25 bp, Homo sapien
ttccatagctttgtctccactgagt

SEQ ID NO: 4556663 - DNA, 25 bp, Homo sapien
gagtcaaaagctgttagatcatctg

SEQ ID NO: 4556664 - DNA, 25 bp, Homo sapien
gtctccactgagtcaaaagctgtta

SEQ ID NO: 4556665 - DNA, 25 bp, Homo sapien
cgatatctctcaacccagaaggcag

SEQ ID NO: 4556666 - DNA, 25 bp, Homo sapien
ggcaaagcagcattcgatatctctc

SEQ ID NO: 4556667 - DNA, 25 bp, Homo sapien
gcaccttgtttagcacagccttctc

SEQ ID NO: 4556668 - DNA, 25 bp, Homo sapien
agtccaaataggagaaccttggagg

SEQ ID NO: 4556669 - DNA, 25 bp, Homo sapien
agagaccccaggagtaatccatgta

SEQ ID NO: 4556670 - DNA, 25 bp, Homo sapien
gaggagcttaaagggccgatttcca

SEQ ID NO: 4556671 - DNA, 25 bp, Homo sapien
gagtgtaacaaggtagcctgcaggc

SEQ ID NO: 4556672 - DNA, 25 bp, Homo sapien
ctggaggagtgtaacaaggtagcct

SEQ ID NO: 4556673 - DNA, 25 bp, Homo sapien
ctggaatgacttcagaagaaagagc

SEQ ID NO: 4556674 - DNA, 25 bp, Homo sapien
aaggaggccttggatgggggtctgc

SEQ ID NO: 4556675 - DNA, 25 bp, Homo sapien
gaggccttggatgggggtctgcagc

SEQ ID NO: 4556676 - DNA, 25 bp, Homo sapien
aagaaagagctggtgaaggaggcct

SEQ ID NO: 4556677 - DNA, 25 bp, Homo sapien
ccgctgccacgcctcctgccatctc

SEQ ID NO: 4556678 - DNA, 25 bp, Homo sapien
ccccgctgccacgcctcctgccatc

SEQ ID NO: 4556679 - DNA, 25 bp, Homo sapien
tgccacgcctcctgccatctctcac

SEQ ID NO: 4556680 - DNA, 25 bp, Homo sapien
gctgccacgcctcctgccatctctc

SEQ ID NO: 4556681 - DNA, 25 bp, Homo sapien
tctagcaggcaaacccgatgtctct

SEQ ID NO: 4556682 - DNA, 25 bp, Homo sapien
cgatgtctcttgcaaaccactaagt

SEQ ID NO: 4556683 - DNA, 25 bp, Homo sapien
aagaagtccctttgcatccttagcc

SEQ ID NO: 4556684 - DNA, 25 bp, Homo sapien
cacagcgattgttgtgcaatgtcac

SEQ ID NO: 4556685 - DNA, 25 bp, Homo sapien
tgctttccccttcagcagcagtttc

SEQ ID NO: 4556686 - DNA, 25 bp, Homo sapien
tggagaaggtgctttccccttcagc

SEQ ID NO: 4556687 - DNA, 25 bp, Homo sapien
gagaaggtgctttccccttcagcag

SEQ ID NO: 4556688 - DNA, 25 bp, Homo sapien
cttggagaaggtgctttccccttca

SEQ ID NO: 4556689 - DNA, 25 bp, Homo sapien
tgagcttcaagcaaacgaacgtgcc

SEQ ID NO: 4556690 - DNA, 25 bp, Homo sapien
caagcaaacgaacgtgcctgggacc

SEQ ID NO: 4556691 - DNA, 25 bp, Homo sapien
gggctgtatccctgcattccttgag

SEQ ID NO: 4556692 - DNA, 25 bp, Homo sapien
gaagggctgtatccctgcattcctt

SEQ ID NO: 4556693 - DNA, 25 bp, Homo sapien
tgactctttctttttgtattcaact

SEQ ID NO: 4556694 - DNA, 25 bp, Homo sapien
ttgactctttctttttgtattcaac

SEQ ID NO: 4556695 - DNA, 25 bp, Homo sapien
tttgactctttctttttgtattcaa

SEQ ID NO: 4556696 - DNA, 25 bp, Homo sapien
gtttttctgtgctggcaggtgtatg

SEQ ID NO: 4556697 - DNA, 25 bp, Homo sapien
tttctgtgctggcaggtgtatgcac

SEQ ID NO: 4556698 - DNA, 25 bp, Homo sapien
tttttctgtgctggcaggtgtatgc

SEQ ID NO: 4556699 - DNA, 25 bp, Homo sapien
tctgtgctggcaggtgtatgcacac

SEQ ID NO: 4556700 - DNA, 25 bp, Homo sapien
ctgctctgacgcttcatcaagaggc

SEQ ID NO: 4556701 - DNA, 25 bp, Homo sapien
tctgacgcttcatcaagaggcaggt

SEQ ID NO: 4556702 - DNA, 25 bp, Homo sapien
ggtaatggctaaagggctgatgcaa

SEQ ID NO: 4556703 - DNA, 25 bp, Homo sapien
tcatcaagaggcaggtaatggctaa

SEQ ID NO: 4556704 - DNA, 25 bp, Homo sapien
ttgcagtgagtcaaaatcatgtcac

SEQ ID NO: 4556705 - DNA, 25 bp, Homo sapien
agaggttgcagtgagtcaaaatcat

SEQ ID NO: 4556706 - DNA, 25 bp, Homo sapien
gttgcagtgagtcaaaatcatgtca

SEQ ID NO: 4556707 - DNA, 25 bp, Homo sapien
aggttgcagtgagtcaaaatcatgt

SEQ ID NO: 4556708 - DNA, 25 bp, Homo sapien
catttcattaaattccttccctgca

SEQ ID NO: 4556709 - DNA, 25 bp, Homo sapien
gcacccttttcagagtagatgaatg

SEQ ID NO: 4556710 - DNA, 25 bp, Homo sapien
tcagagtagatgaatggcttttacc

SEQ ID NO: 4556711 - DNA, 25 bp, Homo sapien
cctgcaactgaaagcacccttttca

SEQ ID NO: 4556712 - DNA, 25 bp, Homo sapien
aaagctcagatggtggctcccacaa

SEQ ID NO: 4556713 - DNA, 25 bp, Homo sapien
aagctcagatggtggctcccacaag

SEQ ID NO: 4556714 - DNA, 25 bp, Homo sapien
tgaaagctcagatggtggctcccac

SEQ ID NO: 4556715 - DNA, 25 bp, Homo sapien
gaaagctcagatggtggctcccaca

SEQ ID NO: 4556716 - DNA, 25 bp, Homo sapien
cactggatctgtagggttgctggtt

SEQ ID NO: 4556717 - DNA, 25 bp, Homo sapien
ttgctgctagcaagagcctcacctt

SEQ ID NO: 4556718 - DNA, 25 bp, Homo sapien
tgttggagataccacctctggtatc

SEQ ID NO: 4556719 - DNA, 25 bp, Homo sapien
gcctcaccttgttgcagtcatcagt

SEQ ID NO: 4556720 - DNA, 25 bp, Homo sapien
catggtcctcctgacacagacttcc

SEQ ID NO: 4556721 - DNA, 25 bp, Homo sapien
gaaggttgtggctcattgtctgcat

SEQ ID NO: 4556722 - DNA, 25 bp, Homo sapien
aagaagggacaacgtcattctcagg

SEQ ID NO: 4556723 - DNA, 25 bp, Homo sapien
actctggcttgaaatagaaccctac

SEQ ID NO: 4556724 - DNA, 25 bp, Homo sapien
gaggtagtaagaagggacaacgtca

SEQ ID NO: 4556725 - DNA, 25 bp, Homo sapien
gaagctgtatgtgcaactccaaagg

SEQ ID NO: 4556726 - DNA, 25 bp, Homo sapien
tccaaaggcatccagacaccaagtg

SEQ ID NO: 4556727 - DNA, 25 bp, Homo sapien
ccaaaggcatccagacaccaagtgc

SEQ ID NO: 4556728 - DNA, 25 bp, Homo sapien
tggagtctgcagctccaatccttgg

SEQ ID NO: 4556729 - DNA, 25 bp, Homo sapien
gtctgcagctccaatccttggcaaa

SEQ ID NO: 4556730 - DNA, 25 bp, Homo sapien
gagtctgcagctccaatccttggca

SEQ ID NO: 4556731 - DNA, 25 bp, Homo sapien
ctctgagcactggagtctgcagctc

SEQ ID NO: 4556732 - DNA, 25 bp, Homo sapien
ttagcacagatgataactgggacgt

SEQ ID NO: 4556733 - DNA, 25 bp, Homo sapien
cttcccagtcccaattagcacagat

SEQ ID NO: 4556734 - DNA, 25 bp, Homo sapien
cccagtcccaattagcacagatgat

SEQ ID NO: 4556735 - DNA, 25 bp, Homo sapien
tcccaattagcacagatgataactg

SEQ ID NO: 4556736 - DNA, 25 bp, Homo sapien
ctcaacaccctatatatgtttgaac

SEQ ID NO: 4556737 - DNA, 25 bp, Homo sapien
ttacacttctcaacaccctatatat

SEQ ID NO: 4556738 - DNA, 25 bp, Homo sapien
cctatatatgtttgaacagaaaggg

SEQ ID NO: 4556739 - DNA, 25 bp, Homo sapien
gaacagaaagggactatttgttaga

SEQ ID NO: 4556740 - DNA, 25 bp, Homo sapien
ctgtcccctgcttgcctgaaacagt

SEQ ID NO: 4556741 - DNA, 25 bp, Homo sapien
aaacagggggcagagtcttagggca

SEQ ID NO: 4556742 - DNA, 25 bp, Homo sapien
gcagctgtcccctgcttgcctgaaa

SEQ ID NO: 4556743 - DNA, 25 bp, Homo sapien
gggcagagtcttagggcagtggaag

SEQ ID NO: 4556744 - DNA, 25 bp, Homo sapien
tgttcacctgaaactctcacctgct

SEQ ID NO: 4556745 - DNA, 25 bp, Homo sapien
gcagttcttacctgctcacctgcag

SEQ ID NO: 4556746 - DNA, 25 bp, Homo sapien
cctgaaactctcacctgctcagctg

SEQ ID NO: 4556747 - DNA, 25 bp, Homo sapien
gaaactctcacctgctcacctgaaa

SEQ ID NO: 4556748 - DNA, 25 bp, Homo sapien
cagttactgctcaaagaccaatggg

SEQ ID NO: 4556749 - DNA, 25 bp, Homo sapien
tgtcaggatggaacaagcaatttca

SEQ ID NO: 4556750 - DNA, 25 bp, Homo sapien
aatgagacctaattctttgccctcc

SEQ ID NO: 4556751 - DNA, 25 bp, Homo sapien
ttgccctccatggtatccacagtta

SEQ ID NO: 4556752 - DNA, 25 bp, Homo sapien
gggcagaagttgctccacaagcagt

SEQ ID NO: 4556753 - DNA, 25 bp, Homo sapien
ttctgagagccgctgagtagctgtg

SEQ ID NO: 4556754 - DNA, 25 bp, Homo sapien
cacgccagaagaatgtggtgagttt

SEQ ID NO: 4556755 - DNA, 25 bp, Homo sapien
cacaagcagttagaaacacgccaga

SEQ ID NO: 4556756 - DNA, 25 bp, Homo sapien
gggtgtcccagtaagattttcaatg

SEQ ID NO: 4556757 - DNA, 25 bp, Homo sapien
aaattcccaaatgcactagtgaact

SEQ ID NO: 4556758 - DNA, 25 bp, Homo sapien
ccaaatggcacagttttcgatcatg

SEQ ID NO: 4556759 - DNA, 25 bp, Homo sapien
tgtcagcctcaccattccagtaaga

SEQ ID NO: 4556760 - DNA, 25 bp, Homo sapien
gtgtctttgctcagtcttggtatca

SEQ ID NO: 4556761 - DNA, 25 bp, Homo sapien
catcaggggtattgggctattgttt

SEQ ID NO: 4556762 - DNA, 25 bp, Homo sapien
tcgatgtgatactggatatggtttg

SEQ ID NO: 4556763 - DNA, 25 bp, Homo sapien
atggtgaattaacttgtcgatgtga

SEQ ID NO: 4556764 - DNA, 25 bp, Homo sapien
caggtgttcatattagtctctgaga

SEQ ID NO: 4556765 - DNA, 25 bp, Homo sapien
tgtgggattagttataatgtcactt

SEQ ID NO: 4556766 - DNA, 25 bp, Homo sapien
tcacttttgttctgtctgattgtgc

SEQ ID NO: 4556767 - DNA, 25 bp, Homo sapien
cttctagatttgtggcatacaggtg

SEQ ID NO: 4556768 - DNA, 25 bp, Homo sapien
tgtaaattctcttttccggatattc

SEQ ID NO: 4556769 - DNA, 25 bp, Homo sapien
tctcttttccggatattctgtcctt

SEQ ID NO: 4556770 - DNA, 25 bp, Homo sapien
aaattctcttttccggatattctgt

SEQ ID NO: 4556771 - DNA, 25 bp, Homo sapien
attctgtcctttggcaatctcaccc

SEQ ID NO: 4556772 - DNA, 25 bp, Homo sapien
ttaaagccaaccaagtccagggaga

SEQ ID NO: 4556773 - DNA, 25 bp, Homo sapien
aacgtgttgcaaggtgtctcctccg

SEQ ID NO: 4556774 - DNA, 25 bp, Homo sapien
gagaattcactgagtcccttcagga

SEQ ID NO: 4556775 - DNA, 25 bp, Homo sapien
gagaaacccctagatttcctgcagg

SEQ ID NO: 4556776 - DNA, 25 bp, Homo sapien
tcctaattggcatcttctattgctt

SEQ ID NO: 4556777 - DNA, 25 bp, Homo sapien
aaaccctcgcttcctatttgcattc

SEQ ID NO: 4556778 - DNA, 25 bp, Homo sapien
ggctccctgcgaagataaccctgtc

SEQ ID NO: 4556779 - DNA, 25 bp, Homo sapien
aagcctgcagccttccggggattgg

SEQ ID NO: 4556780 - DNA, 25 bp, Homo sapien
cgaggtcagtggggggatggaaggc

SEQ ID NO: 4556781 - DNA, 25 bp, Homo sapien
tccgaggtcagtggggggatggaag

SEQ ID NO: 4556782 - DNA, 25 bp, Homo sapien
ggtcagtggggggatggaaggcagg

SEQ ID NO: 4556783 - DNA, 25 bp, Homo sapien
gaggtcagtggggggatggaaggca

SEQ ID NO: 4556784 - DNA, 25 bp, Homo sapien
agctgacaagatctgctgctttgtc

SEQ ID NO: 4556785 - DNA, 25 bp, Homo sapien
ctgctttgtcaccaggccttctgcc

SEQ ID NO: 4556786 - DNA, 25 bp, Homo sapien
tcagctgacaagatctgctgctttg

SEQ ID NO: 4556787 - DNA, 25 bp, Homo sapien
aggccttctgccctcttccatgagg

SEQ ID NO: 4556788 - DNA, 25 bp, Homo sapien
aggaaatgtgagacgccccagagcc

SEQ ID NO: 4556789 - DNA, 25 bp, Homo sapien
ctaggaaatgtgagacgccccagag

SEQ ID NO: 4556790 - DNA, 25 bp, Homo sapien
taggaaatgtgagacgccccagagc

SEQ ID NO: 4556791 - DNA, 25 bp, Homo sapien
gaggctgaacccatctgaggtattc

SEQ ID NO: 4556792 - DNA, 25 bp, Homo sapien
tctataattagcgtctttcttcctc

SEQ ID NO: 4556793 - DNA, 25 bp, Homo sapien
tgatgagtgccaaacctgtccattt

SEQ ID NO: 4556794 - DNA, 25 bp, Homo sapien
caattccggtgaaaggtctgactga

SEQ ID NO: 4556795 - DNA, 25 bp, Homo sapien
cattaaggtagaccaggatattcat

SEQ ID NO: 4556796 - DNA, 25 bp, Homo sapien
cactgagctcatcgaaacctggaga

SEQ ID NO: 4556797 - DNA, 25 bp, Homo sapien
tagaacttccttcggcgctgtgacc

SEQ ID NO: 4556798 - DNA, 25 bp, Homo sapien
gaaaagattccaagcctacagtcag

SEQ ID NO: 4556799 - DNA, 25 bp, Homo sapien
tataagagattcacgcaaggacaga

SEQ ID NO: 4556800 - DNA, 25 bp, Homo sapien
gaaagaaattggaggtccctggctc

SEQ ID NO: 4556801 - DNA, 25 bp, Homo sapien
ttcctgagaaaattgcaaagtagat

SEQ ID NO: 4556802 - DNA, 25 bp, Homo sapien
caaatttcctgagaaaattgcaaag

SEQ ID NO: 4556803 - DNA, 25 bp, Homo sapien
catctcctggggaagattcttcaaa

SEQ ID NO: 4556804 - DNA, 25 bp, Homo sapien
gaatggccacggtcaaagagcttgg

SEQ ID NO: 4556805 - DNA, 25 bp, Homo sapien
gaaagaaggcttgttgctgagaaca

SEQ ID NO: 4556806 - DNA, 25 bp, Homo sapien
gccacggtcaaagagcttggcttac

SEQ ID NO: 4556807 - DNA, 25 bp, Homo sapien
atctggaatggccacggtcaaagag

SEQ ID NO: 4556808 - DNA, 25 bp, Homo sapien
caaaagtctcgaagctcccacaagg

SEQ ID NO: 4556809 - DNA, 25 bp, Homo sapien
aaagtctcgaagctcccacaaggat

SEQ ID NO: 4556810 - DNA, 25 bp, Homo sapien
gaagctcccacaaggatgaagtagg

SEQ ID NO: 4556811 - DNA, 25 bp, Homo sapien
tctcgaagctcccacaaggatgaag

SEQ ID NO: 4556812 - DNA, 25 bp, Homo sapien
tgactcagggcactttatcttggaa

SEQ ID NO: 4556813 - DNA, 25 bp, Homo sapien
gaattatgacctagttagctgggca

SEQ ID NO: 4556814 - DNA, 25 bp, Homo sapien
gaggcgagcctataaaagtcctagg

SEQ ID NO: 4556815 - DNA, 25 bp, Homo sapien
tcagatgagcatgcataaaacttcc

SEQ ID NO: 4556816 - DNA, 25 bp, Homo sapien
gcccgcagtgcatcagcttcatcag

SEQ ID NO: 4556817 - DNA, 25 bp, Homo sapien
tagtggaccctatgatgcagcccca

SEQ ID NO: 4556818 - DNA, 25 bp, Homo sapien
tctaaagaatttgcacccagggaaa

SEQ ID NO: 4556819 - DNA, 25 bp, Homo sapien
caagcgcatattttgtagtggaccc

SEQ ID NO: 4556820 - DNA, 25 bp, Homo sapien
tagggtttacaagttgataccaggc

SEQ ID NO: 4556821 - DNA, 25 bp, Homo sapien
acacagacttccaagccatcggcaa

SEQ ID NO: 4556822 - DNA, 25 bp, Homo sapien
caagccatcggcaattatcttccac

SEQ ID NO: 4556823 - DNA, 25 bp, Homo sapien
ttacaagttgataccaggcttctct

SEQ ID NO: 4556824 - DNA, 25 bp, Homo sapien
gtgagagcagggagtttgagcccac

SEQ ID NO: 4556825 - DNA, 25 bp, Homo sapien
ctggcaatgaagagcgagcactggt

SEQ ID NO: 4556826 - DNA, 25 bp, Homo sapien
caatgaagagcgagcactggtgaga

SEQ ID NO: 4556827 - DNA, 25 bp, Homo sapien
ttagcttctggcaatgaagagcgag

SEQ ID NO: 4556828 - DNA, 25 bp, Homo sapien
tgctggcctcctttcaggttccagg

SEQ ID NO: 4556829 - DNA, 25 bp, Homo sapien
ctcctttcaggttccaggccaccct

SEQ ID NO: 4556830 - DNA, 25 bp, Homo sapien
gcacagtcagccagcaaagacagcg

SEQ ID NO: 4556831 - DNA, 25 bp, Homo sapien
agtcagccagcaaagacagcgggcc

SEQ ID NO: 4556832 - DNA, 25 bp, Homo sapien
tgacaccctaagaggcgggttttgc

SEQ ID NO: 4556833 - DNA, 25 bp, Homo sapien
ctgacaccctaagaggcgggttttg

SEQ ID NO: 4556834 - DNA, 25 bp, Homo sapien
gctccaaagcttcgctgtcttctta

SEQ ID NO: 4556835 - DNA, 25 bp, Homo sapien
tgcatcccacatgagccggaatgtg

SEQ ID NO: 4556836 - DNA, 25 bp, Homo sapien
gggcccacttttcagggccatctga

SEQ ID NO: 4556837 - DNA, 25 bp, Homo sapien
tatttctagctccaaagcttcgctg

SEQ ID NO: 4556838 - DNA, 25 bp, Homo sapien
agcaaggagctagagcagcaggtct

SEQ ID NO: 4556839 - DNA, 25 bp, Homo sapien
tcaatctggatagcctcagaggctc

SEQ ID NO: 4556840 - DNA, 25 bp, Homo sapien
agacatcaatctggatagcctcaga

SEQ ID NO: 4556841 - DNA, 25 bp, Homo sapien
actttgaagcttagcaaggagctag

SEQ ID NO: 4556842 - DNA, 25 bp, Homo sapien
catcgtgctactggagctctttcca

SEQ ID NO: 4556843 - DNA, 25 bp, Homo sapien
gggagctccactgatccacagaggt

SEQ ID NO: 4556844 - DNA, 25 bp, Homo sapien
tgatccacagaggtcccttgccctt

SEQ ID NO: 4556845 - DNA, 25 bp, Homo sapien
ccaacacaggcaatgaacatcgtgc

SEQ ID NO: 4556846 - DNA, 25 bp, Homo sapien
caaggtccagcccagacaggcctct

SEQ ID NO: 4556847 - DNA, 25 bp, Homo sapien
ggtgtatagtcctgcaaggtccagc

SEQ ID NO: 4556848 - DNA, 25 bp, Homo sapien
gtgtatagtcctgcaaggtccagcc

SEQ ID NO: 4556849 - DNA, 25 bp, Homo sapien
ggtccagcccagacaggcctctcat

SEQ ID NO: 4556850 - DNA, 25 bp, Homo sapien
tagaccatcaatatctgcaggaatg

SEQ ID NO: 4556851 - DNA, 25 bp, Homo sapien
tgtagcctttttcctgtacccagcc

SEQ ID NO: 4556852 - DNA, 25 bp, Homo sapien
actgtaatccttgttggcgcatata

SEQ ID NO: 4556853 - DNA, 25 bp, Homo sapien
gttgggtccatcacctttctctggg

SEQ ID NO: 4556854 - DNA, 25 bp, Homo sapien
gattcccaagaggatgataccctta

SEQ ID NO: 4556855 - DNA, 25 bp, Homo sapien
ggattcccaagaggatgataccctt

SEQ ID NO: 4556856 - DNA, 25 bp, Homo sapien
tcccaagaggatgatacccttattc

SEQ ID NO: 4556857 - DNA, 25 bp, Homo sapien
caagaggatgatacccttattctac

SEQ ID NO: 4556858 - DNA, 25 bp, Homo sapien
ttgcaaaacacccgttccccgcagc

SEQ ID NO: 4556859 - DNA, 25 bp, Homo sapien
tgcaaaacacccgttccccgcagcc

SEQ ID NO: 4556860 - DNA, 25 bp, Homo sapien
gaacaggtgaatacactggggactt

SEQ ID NO: 4556861 - DNA, 25 bp, Homo sapien
gatagaacaggtgaatacactgggg

SEQ ID NO: 4556862 - DNA, 25 bp, Homo sapien
acagccttgtaatggcttactcagg

SEQ ID NO: 4556863 - DNA, 25 bp, Homo sapien
atggcttactcagggtctcaagcct

SEQ ID NO: 4556864 - DNA, 25 bp, Homo sapien
cacacagccttgtaatggcttactc

SEQ ID NO: 4556865 - DNA, 25 bp, Homo sapien
ctcagggtctcaagcctccggatac

SEQ ID NO: 4556866 - DNA, 25 bp, Homo sapien
tccagtatttgtgaccttcatagtg

SEQ ID NO: 4556867 - DNA, 25 bp, Homo sapien
ttgtgaccttcatagtgggtgtgtg

SEQ ID NO: 4556868 - DNA, 25 bp, Homo sapien
agcagcaagggtagctaggaaagca

SEQ ID NO: 4556869 - DNA, 25 bp, Homo sapien
taggaaagcaagaatccagtatttg

SEQ ID NO: 4556870 - DNA, 25 bp, Homo sapien
cagacaagagtgtggcttcaaaagc

SEQ ID NO: 4556871 - DNA, 25 bp, Homo sapien
caaggaccttctgtgtagaatcaaa

SEQ ID NO: 4556872 - DNA, 25 bp, Homo sapien
ttcagaagacccatcaatcagtgtc

SEQ ID NO: 4556873 - DNA, 25 bp, Homo sapien
tacacaggccttcgtctctttcaga

SEQ ID NO: 4556874 - DNA, 25 bp, Homo sapien
tttggctggaagattggcgagcaca

SEQ ID NO: 4556875 - DNA, 25 bp, Homo sapien
ggaactagagctaccttcactactg

SEQ ID NO: 4556876 - DNA, 25 bp, Homo sapien
gtaccagaaaattggctgatccttg

SEQ ID NO: 4556877 - DNA, 25 bp, Homo sapien
tctctgccggtacctcttaagggtg

SEQ ID NO: 4556878 - DNA, 25 bp, Homo sapien
taattccaggtttccggcagccatg

SEQ ID NO: 4556879 - DNA, 25 bp, Homo sapien
ggcttgggccgttgcaatctgacca

SEQ ID NO: 4556880 - DNA, 25 bp, Homo sapien
gcaagcctttgtgagatgacgacgt

SEQ ID NO: 4556881 - DNA, 25 bp, Homo sapien
gtgcccctgaacaccccatggttgg

SEQ ID NO: 4556882 - DNA, 25 bp, Homo sapien
tgctctcagacccatagacaaacct

SEQ ID NO: 4556883 - DNA, 25 bp, Homo sapien
tcaagccaggtatatcttttgccca

SEQ ID NO: 4556884 - DNA, 25 bp, Homo sapien
ggaagcaaggtactgtcccctctgc

SEQ ID NO: 4556885 - DNA, 25 bp, Homo sapien
ttttgcccatgtgccaacacagcca

SEQ ID NO: 4556886 - DNA, 25 bp, Homo sapien
ctgcaaagcccaagagaatgtcttt

SEQ ID NO: 4556887 - DNA, 25 bp, Homo sapien
tactctaggatcacctctcaatggg

SEQ ID NO: 4556888 - DNA, 25 bp, Homo sapien
gggttttctgcaccacactttgacc

SEQ ID NO: 4556889 - DNA, 25 bp, Homo sapien
tacacagctggaacattaatgaaca

SEQ ID NO: 4556890 - DNA, 25 bp, Homo sapien
tcttcgtcagctccttttgacacgg

SEQ ID NO: 4556891 - DNA, 25 bp, Homo sapien
ttataaagaatgtcagccgggcgcc

SEQ ID NO: 4556892 - DNA, 25 bp, Homo sapien
tgacattaatctggagaactcccgg

SEQ ID NO: 4556893 - DNA, 25 bp, Homo sapien
ccatagaggaaaagggaggacatcc

SEQ ID NO: 4556894 - DNA, 25 bp, Homo sapien
tcaataaaagagcaaccgtctgtgg

SEQ ID NO: 4556895 - DNA, 25 bp, Homo sapien
tctggtacctggctacccacgatgg

SEQ ID NO: 4556896 - DNA, 25 bp, Homo sapien
aacatgaatcgccaaatgagtgcgc

SEQ ID NO: 4556897 - DNA, 25 bp, Homo sapien
aaatgagtgcgcagccaaaagccaa

SEQ ID NO: 4556898 - DNA, 25 bp, Homo sapien
ggtctgtaagctgacccgaaaacat

SEQ ID NO: 4556899 - DNA, 25 bp, Homo sapien
aggtcacagcgattctcacagccag

SEQ ID NO: 4556900 - DNA, 25 bp, Homo sapien
tccacgtagaacagaggtcacagcg

SEQ ID NO: 4556901 - DNA, 25 bp, Homo sapien
acagccacgggctccacgtagaaca

SEQ ID NO: 4556902 - DNA, 25 bp, Homo sapien
tcatcatgaggggaatgcaaccacc

SEQ ID NO: 4556903 - DNA, 25 bp, Homo sapien
tgaccagtttcgagtggggcgctct

SEQ ID NO: 4556904 - DNA, 25 bp, Homo sapien
accagtttcgagtggggcgctctca

SEQ ID NO: 4556905 - DNA, 25 bp, Homo sapien
caggacagtgaccagtttcgagtgg

SEQ ID NO: 4556906 - DNA, 25 bp, Homo sapien
agtgaccagtttcgagtggggcgct

SEQ ID NO: 4556907 - DNA, 25 bp, Homo sapien
tggggcgagaagaccaaatccagtc

SEQ ID NO: 4556908 - DNA, 25 bp, Homo sapien
tacttggggcgagaagaccaaatcc

SEQ ID NO: 4556909 - DNA, 25 bp, Homo sapien
cgagaagaccaaatccagtcactcc

SEQ ID NO: 4556910 - DNA, 25 bp, Homo sapien
cctacttggggcgagaagaccaaat

SEQ ID NO: 4556911 - DNA, 25 bp, Homo sapien
cggctgccccacagaaggtgcaatt

SEQ ID NO: 4556912 - DNA, 25 bp, Homo sapien
ggctgccccacagaaggtgcaattc

SEQ ID NO: 4556913 - DNA, 25 bp, Homo sapien
ccacttaggggtctatttccagaag

SEQ ID NO: 4556914 - DNA, 25 bp, Homo sapien
aagatgaggctgttggctaacttcc

SEQ ID NO: 4556915 - DNA, 25 bp, Homo sapien
caaagtagcgcagtgacatctcagc

SEQ ID NO: 4556916 - DNA, 25 bp, Homo sapien
tctggctcaggagaatggagtttct

SEQ ID NO: 4556917 - DNA, 25 bp, Homo sapien
ggccccatggtcagtaggaaagtat

SEQ ID NO: 4556918 - DNA, 25 bp, Homo sapien
tactgaaacataacaagatcaacag

SEQ ID NO: 4556919 - DNA, 25 bp, Homo sapien
taaactgtccgctgtgtaccaggcc

SEQ ID NO: 4556920 - DNA, 25 bp, Homo sapien
cagcttccttgtcccaagagaaact

SEQ ID NO: 4556921 - DNA, 25 bp, Homo sapien
tttgtgccgcatagagggactcccc

SEQ ID NO: 4556922 - DNA, 25 bp, Homo sapien
ttgtgccgcatagagggactcccct

SEQ ID NO: 4556923 - DNA, 25 bp, Homo sapien
ctttgtgccgcatagagggactccc

SEQ ID NO: 4556924 - DNA, 25 bp, Homo sapien
gtgccgcatagagggactccccttc

SEQ ID NO: 4556925 - DNA, 25 bp, Homo sapien
ccctgccggagctcatggaaagcat

SEQ ID NO: 4556926 - DNA, 25 bp, Homo sapien
tgtgctcgacatctgtgacaggacc

SEQ ID NO: 4556927 - DNA, 25 bp, Homo sapien
tgaaatcgcttggactctcgactag

SEQ ID NO: 4556928 - DNA, 25 bp, Homo sapien
tgacaggaccatcgactgagaggga

SEQ ID NO: 4556929 - DNA, 25 bp, Homo sapien
cacttccggaccagcaggagtgaga

SEQ ID NO: 4556930 - DNA, 25 bp, Homo sapien
gagaaaggcttgtctaccctgaagg

SEQ ID NO: 4556931 - DNA, 25 bp, Homo sapien
gggactggccacacatgacgagaaa

SEQ ID NO: 4556932 - DNA, 25 bp, Homo sapien
aaaggcttgtctaccctgaaggaca

SEQ ID NO: 4556933 - DNA, 25 bp, Homo sapien
ggactggccacacatgacgagaaaa

SEQ ID NO: 4556934 - DNA, 25 bp, Homo sapien
ggcaattttctagtcaacaggtggg

SEQ ID NO: 4556935 - DNA, 25 bp, Homo sapien
tctgcctatggtgggtggaagttca

SEQ ID NO: 4556936 - DNA, 25 bp, Homo sapien
catggttttactcccacatggtgac

SEQ ID NO: 4556937 - DNA, 25 bp, Homo sapien
gagtacccagcccaggtcaaatggg

SEQ ID NO: 4556938 - DNA, 25 bp, Homo sapien
tccaagcccacggtggttacgtctg

SEQ ID NO: 4556939 - DNA, 25 bp, Homo sapien
ggaaggctgtatgggtcccgtactg

SEQ ID NO: 4556940 - DNA, 25 bp, Homo sapien
tgttcaagccgatgaacatccccaa

SEQ ID NO: 4556941 - DNA, 25 bp, Homo sapien
tctgagcaccctgtagggctctgct

SEQ ID NO: 4556942 - DNA, 25 bp, Homo sapien
cataacggatggagtcccaagtgaa

SEQ ID NO: 4556943 - DNA, 25 bp, Homo sapien
tgaggtgtagattacgggtcagaac

SEQ ID NO: 4556944 - DNA, 25 bp, Homo sapien
gagtcccaagtgaatccaggaagtt

SEQ ID NO: 4556945 - DNA, 25 bp, Homo sapien
gtaagtacttgggttaggcattcac

SEQ ID NO: 4556946 - DNA, 25 bp, Homo sapien
gctcttgttcacagcggccaaaacg

SEQ ID NO: 4556947 - DNA, 25 bp, Homo sapien
gccaaaacgtgcatgtctctcaggg

SEQ ID NO: 4556948 - DNA, 25 bp, Homo sapien
tgtgagctcctcagaaccgctcttg

SEQ ID NO: 4556949 - DNA, 25 bp, Homo sapien
gaacctttgcttgcgggctccttgt

SEQ ID NO: 4556950 - DNA, 25 bp, Homo sapien
cacagcggttgagagcttggactcc

SEQ ID NO: 4556951 - DNA, 25 bp, Homo sapien
ggaactgcttctaacacaaggaccg

SEQ ID NO: 4556952 - DNA, 25 bp, Homo sapien
tgtccgccgcttagaaaaaccacag

SEQ ID NO: 4556953 - DNA, 25 bp, Homo sapien
tcacagggttttcccactgagggtc

SEQ ID NO: 4556954 - DNA, 25 bp, Homo sapien
ccttatctgtcatggtcatggcagc

SEQ ID NO: 4556955 - DNA, 25 bp, Homo sapien
gaagaactctaagattacatcaggc

SEQ ID NO: 4556956 - DNA, 25 bp, Homo sapien
tcaggctaagggtgacagaatgctg

SEQ ID NO: 4556957 - DNA, 25 bp, Homo sapien
cagtctgagtgccatacactgcagt

SEQ ID NO: 4556958 - DNA, 25 bp, Homo sapien
ggagctggacgcctggacagctggg

SEQ ID NO: 4556959 - DNA, 25 bp, Homo sapien
gggagctggacgcctggacagctgg

SEQ ID NO: 4556960 - DNA, 25 bp, Homo sapien
gctaggtcctcgtggattctgggcc

SEQ ID NO: 4556961 - DNA, 25 bp, Homo sapien
tgggcctctgtccagtgaccaaagg

SEQ ID NO: 4556962 - DNA, 25 bp, Homo sapien
aactgctgctaggtcctcgtggatt

SEQ ID NO: 4556963 - DNA, 25 bp, Homo sapien
aaggagaggacacatctccagctac

SEQ ID NO: 4556964 - DNA, 25 bp, Homo sapien
ctgtgctcaggcactcctggagcac

SEQ ID NO: 4556965 - DNA, 25 bp, Homo sapien
ctcaggcactcctggagcactgcat

SEQ ID NO: 4556966 - DNA, 25 bp, Homo sapien
gctcaggcactcctggagcactgca

SEQ ID NO: 4556967 - DNA, 25 bp, Homo sapien
cccctgtgctcaggcactcctggag

SEQ ID NO: 4556968 - DNA, 25 bp, Homo sapien
tctaccagcaaaccactaaaccgtg

SEQ ID NO: 4556969 - DNA, 25 bp, Homo sapien
gagccaggccttgtgcaatgaatgg

SEQ ID NO: 4556970 - DNA, 25 bp, Homo sapien
ccactaaaccgtgaataagtggctt

SEQ ID NO: 4556971 - DNA, 25 bp, Homo sapien
ccaggccttgtgcaatgaatggatt

SEQ ID NO: 4556972 - DNA, 25 bp, Homo sapien
ctctccggttttcagctccactcat

SEQ ID NO: 4556973 - DNA, 25 bp, Homo sapien
agctctccggttttcagctccactc

SEQ ID NO: 4556974 - DNA, 25 bp, Homo sapien
gctctccggttttcagctccactca

SEQ ID NO: 4556975 - DNA, 25 bp, Homo sapien
tggccagccttatagcgtcagtcag

SEQ ID NO: 4556976 - DNA, 25 bp, Homo sapien
taaggagctcatgatcaagaccagt

SEQ ID NO: 4556977 - DNA, 25 bp, Homo sapien
taatcccctgagaagtacatcctgt

SEQ ID NO: 4556978 - DNA, 25 bp, Homo sapien
catatgggtcacttagccacagcca

SEQ ID NO: 4556979 - DNA, 25 bp, Homo sapien
ggatactaattacacccaggtggaa

SEQ ID NO: 4556980 - DNA, 25 bp, Homo sapien
tccggctctgatgaaccactgccag

SEQ ID NO: 4556981 - DNA, 25 bp, Homo sapien
ctgccagccagttattagggaggag

SEQ ID NO: 4556982 - DNA, 25 bp, Homo sapien
ggtcgcttccggctctgatgaacca

SEQ ID NO: 4556983 - DNA, 25 bp, Homo sapien
gaatgcacataaggaatctggagtt

SEQ ID NO: 4556984 - DNA, 25 bp, Homo sapien
tcttcatctgaatgtcctcccttca

SEQ ID NO: 4556985 - DNA, 25 bp, Homo sapien
tttcttcatctgaatgtcctccctt

SEQ ID NO: 4556986 - DNA, 25 bp, Homo sapien
ctgaatgcacataaggaatctggag

SEQ ID NO: 4556987 - DNA, 25 bp, Homo sapien
cctacttggtgcttactccccagca

SEQ ID NO: 4556988 - DNA, 25 bp, Homo sapien
gcctacttggtgcttactccccagc

SEQ ID NO: 4556989 - DNA, 25 bp, Homo sapien
tgcctacttggtgcttactccccag

SEQ ID NO: 4556990 - DNA, 25 bp, Homo sapien
gtgcagtaacaagccacgctcaggg

SEQ ID NO: 4556991 - DNA, 25 bp, Homo sapien
tccatccacgggtccagactggaaa

SEQ ID NO: 4556992 - DNA, 25 bp, Homo sapien
tctcactgagtataaggcacccaat

SEQ ID NO: 4556993 - DNA, 25 bp, Homo sapien
tgggcccaacttgagtttcttccat

SEQ ID NO: 4556994 - DNA, 25 bp, Homo sapien
gtaacttcatgaggtaggtggctct

SEQ ID NO: 4556995 - DNA, 25 bp, Homo sapien
agtaacttcatgaggtaggtggctc

SEQ ID NO: 4556996 - DNA, 25 bp, Homo sapien
gcagtaacttcatgaggtaggtggc

SEQ ID NO: 4556997 - DNA, 25 bp, Homo sapien
cagtaacttcatgaggtaggtggct

SEQ ID NO: 4556998 - DNA, 25 bp, Homo sapien
catgtttcagatagaatgtggctca

SEQ ID NO: 4556999 - DNA, 25 bp, Homo sapien
aaaccggctagacagctttggtcag

SEQ ID NO: 4557000 - DNA, 25 bp, Homo sapien
gatagggagctggtgataacaactc

SEQ ID NO: 4557001 - DNA, 25 bp, Homo sapien
tcgattccatgagtaagcagcgtga

SEQ ID NO: 4557002 - DNA, 25 bp, Homo sapien
atgtacacaaaggagtcaaaagcaa

SEQ ID NO: 4557003 - DNA, 25 bp, Homo sapien
tctgtgaaattctcccagttacatc

SEQ ID NO: 4557004 - DNA, 25 bp, Homo sapien
ctgtgaaattctcccagttacatcc

SEQ ID NO: 4557005 - DNA, 25 bp, Homo sapien
tttacaaagcgtacaacttatccat

SEQ ID NO: 4557006 - DNA, 25 bp, Homo sapien
tccagagattttggtgtctacttca

SEQ ID NO: 4557007 - DNA, 25 bp, Homo sapien
tggtcttggcttagtctgtgccctc

SEQ ID NO: 4557008 - DNA, 25 bp, Homo sapien
agcccacccatgatttcaagcatag

SEQ ID NO: 4557009 - DNA, 25 bp, Homo sapien
tcacaatttgaaccctccagagatt

SEQ ID NO: 4557010 - DNA, 25 bp, Homo sapien
cttttgtattttttgtggagatggg

SEQ ID NO: 4557011 - DNA, 25 bp, Homo sapien
caccatcacacctggctaacttttg

SEQ ID NO: 4557012 - DNA, 25 bp, Homo sapien
tctggagtagctggggctagaggca

SEQ ID NO: 4557013 - DNA, 25 bp, Homo sapien
tcaagcaatccccctgccttggcct

SEQ ID NO: 4557014 - DNA, 25 bp, Homo sapien
cagcttgcccaagcttgggctggtt

SEQ ID NO: 4557015 - DNA, 25 bp, Homo sapien
agttagtggatgtcttggaagctca

SEQ ID NO: 4557016 - DNA, 25 bp, Homo sapien
ttttctcgtcgaaaacagcggcctc

SEQ ID NO: 4557017 - DNA, 25 bp, Homo sapien
tcaaagtgacggaaccaaatgtagg

SEQ ID NO: 4557018 - DNA, 25 bp, Homo sapien
taaaatgctcccacgagcgatcggt

SEQ ID NO: 4557019 - DNA, 25 bp, Homo sapien
ctgagctgcaagaagggccgctgca

SEQ ID NO: 4557020 - DNA, 25 bp, Homo sapien
aagaggctcttcctcgtaacgcgag

SEQ ID NO: 4557021 - DNA, 25 bp, Homo sapien
gcctacccgtgtggtgacatgaaca

SEQ ID NO: 4557022 - DNA, 25 bp, Homo sapien
acagggacgtcaggcatctccaaac

SEQ ID NO: 4557023 - DNA, 25 bp, Homo sapien
tgtacagggacgtcaggcatctcca

SEQ ID NO: 4557024 - DNA, 25 bp, Homo sapien
tctccaaacacatcctagaacccag

SEQ ID NO: 4557025 - DNA, 25 bp, Homo sapien
tccaaacacatcctagaacccagtt

SEQ ID NO: 4557026 - DNA, 25 bp, Homo sapien
tgagggcaggatctttcgggccaaa

SEQ ID NO: 4557027 - DNA, 25 bp, Homo sapien
tggtgtgagggcaggatctttcggg

SEQ ID NO: 4557028 - DNA, 25 bp, Homo sapien
ggtgtgagggcaggatctttcgggc

SEQ ID NO: 4557029 - DNA, 25 bp, Homo sapien
tgtgagggcaggatctttcgggcca

SEQ ID NO: 4557030 - DNA, 25 bp, Homo sapien
gctgggcttgctgtatagctaccaa

SEQ ID NO: 4557031 - DNA, 25 bp, Homo sapien
aatagtaccatttaggagttagtag

SEQ ID NO: 4557032 - DNA, 25 bp, Homo sapien
caacctccggtagaaatagtaccat

SEQ ID NO: 4557033 - DNA, 25 bp, Homo sapien
gagttagtagattgattgatgaaga

SEQ ID NO: 4557034 - DNA, 25 bp, Homo sapien
attattttcacttggagggatgtgt

SEQ ID NO: 4557035 - DNA, 25 bp, Homo sapien
gggatgtgttcatcgacatcacatt

SEQ ID NO: 4557036 - DNA, 25 bp, Homo sapien
caattctgttgtcggtggattattt

SEQ ID NO: 4557037 - DNA, 25 bp, Homo sapien
taactggaacatttgaaactcctct

SEQ ID NO: 4557038 - DNA, 25 bp, Homo sapien
ggaaagataacactagcatcttgcc

SEQ ID NO: 4557039 - DNA, 25 bp, Homo sapien
caggaaagataacactagcatcttg

SEQ ID NO: 4557040 - DNA, 25 bp, Homo sapien
tcttgccttttaggcaaaagcttat

SEQ ID NO: 4557041 - DNA, 25 bp, Homo sapien
cttgccttttaggcaaaagcttatt

SEQ ID NO: 4557042 - DNA, 25 bp, Homo sapien
tcatgtcggccgcaaatactgcaaa

SEQ ID NO: 4557043 - DNA, 25 bp, Homo sapien
gtcatgtcggccgcaaatactgcaa

SEQ ID NO: 4557044 - DNA, 25 bp, Homo sapien
atgtcggccgcaaatactgcaaaag

SEQ ID NO: 4557045 - DNA, 25 bp, Homo sapien
catgtcggccgcaaatactgcaaaa

SEQ ID NO: 4557046 - DNA, 25 bp, Homo sapien
tcttgataactgagtttttggagcc

SEQ ID NO: 4557047 - DNA, 25 bp, Homo sapien
tctataaagacaagggttgcccagg

SEQ ID NO: 4557048 - DNA, 25 bp, Homo sapien
ggcaagtgcttcactagctttaccc

SEQ ID NO: 4557049 - DNA, 25 bp, Homo sapien
tacatttttgcactcaaggcaagtg

SEQ ID NO: 4557050 - DNA, 25 bp, Homo sapien
tcaaacacatcagctatctgaagac

SEQ ID NO: 4557051 - DNA, 25 bp, Homo sapien
caaacacatcagctatctgaagaca

SEQ ID NO: 4557052 - DNA, 25 bp, Homo sapien
tgccgtaccttctcccctcgctttc

SEQ ID NO: 4557053 - DNA, 25 bp, Homo sapien
ccccagcgacccgaagtgaagattg

SEQ ID NO: 4557054 - DNA, 25 bp, Homo sapien
tattccttcgaacatagacaagcat

SEQ ID NO: 4557055 - DNA, 25 bp, Homo sapien
tgaagattggtaacagcctggcaac

SEQ ID NO: 4557056 - DNA, 25 bp, Homo sapien
acagcctggcaacgttattccttcg

SEQ ID NO: 4557057 - DNA, 25 bp, Homo sapien
tcccagtgctcagaaataacttaac

SEQ ID NO: 4557058 - DNA, 25 bp, Homo sapien
gcaggtagcctgcattcttcaatgg

SEQ ID NO: 4557059 - DNA, 25 bp, Homo sapien
ttagaagcaaatacctgcaggtagc

SEQ ID NO: 4557060 - DNA, 25 bp, Homo sapien
cttcaatggttgcagagtgtttcac

SEQ ID NO: 4557061 - DNA, 25 bp, Homo sapien
tgcgatggttcatgccctttgggag

SEQ ID NO: 4557062 - DNA, 25 bp, Homo sapien
acttggagacaagctggatgcgatg

SEQ ID NO: 4557063 - DNA, 25 bp, Homo sapien
agctggatgcgatggttcatgccct

SEQ ID NO: 4557064 - DNA, 25 bp, Homo sapien
gcaaaacagcaagacacccgtttct

SEQ ID NO: 4557065 - DNA, 25 bp, Homo sapien
taataaagcccagtcctgcagagga

SEQ ID NO: 4557066 - DNA, 25 bp, Homo sapien
ccaggtctgaaaagcgaagcgcctt

SEQ ID NO: 4557067 - DNA, 25 bp, Homo sapien
tagtcatgatacagacgcccaggtc

SEQ ID NO: 4557068 - DNA, 25 bp, Homo sapien
taagtgaatgggagctgaagtagcc

SEQ ID NO: 4557069 - DNA, 25 bp, Homo sapien
tagctaagcccttcaacagtgagag

SEQ ID NO: 4557070 - DNA, 25 bp, Homo sapien
taacatttactccaacgtgggacac

SEQ ID NO: 4557071 - DNA, 25 bp, Homo sapien
gatagcttcaagagttcaccctagc

SEQ ID NO: 4557072 - DNA, 25 bp, Homo sapien
taaagatctatttccacctccaggg

SEQ ID NO: 4557073 - DNA, 25 bp, Homo sapien
cagtcactggcgattattgtctaga

SEQ ID NO: 4557074 - DNA, 25 bp, Homo sapien
ggtagttagatcaggaggcttcatc

SEQ ID NO: 4557075 - DNA, 25 bp, Homo sapien
tatatgtacttccattaggaggcac

SEQ ID NO: 4557076 - DNA, 25 bp, Homo sapien
gctaaagttatctcagccttggcca

SEQ ID NO: 4557077 - DNA, 25 bp, Homo sapien
ggtacccaaatcttaccagtgcaaa

SEQ ID NO: 4557078 - DNA, 25 bp, Homo sapien
gacttccctgggtctgcccaatcaa

SEQ ID NO: 4557079 - DNA, 25 bp, Homo sapien
tcccactgctggtttaggatttgac

SEQ ID NO: 4557080 - DNA, 25 bp, Homo sapien
tcttaccagtgcaaactacaccatt

SEQ ID NO: 4557081 - DNA, 25 bp, Homo sapien
tttgaagcagattacctcatgcagg

SEQ ID NO: 4557082 - DNA, 25 bp, Homo sapien
tttctaggtaacactgaaatgtcaa

SEQ ID NO: 4557083 - DNA, 25 bp, Homo sapien
tattctgggcttacaattccttttc

SEQ ID NO: 4557084 - DNA, 25 bp, Homo sapien
gaggtacttagcattcaaaactttg

SEQ ID NO: 4557085 - DNA, 25 bp, Homo sapien
aaaacactgccttgtgggaagcttc

SEQ ID NO: 4557086 - DNA, 25 bp, Homo sapien
gatagttctcagagttcaaagagta

SEQ ID NO: 4557087 - DNA, 25 bp, Homo sapien
tgtacgcagagtatctaactggaaa

SEQ ID NO: 4557088 - DNA, 25 bp, Homo sapien
aaaaggtttattgtgtgtacgcaga

SEQ ID NO: 4557089 - DNA, 25 bp, Homo sapien
ctatttattaatgcatttcaagttt

SEQ ID NO: 4557090 - DNA, 25 bp, Homo sapien
tatagtcacttgtgcccgtagcagc

SEQ ID NO: 4557091 - DNA, 25 bp, Homo sapien
caagtttacaaggaagagatcccgt

SEQ ID NO: 4557092 - DNA, 25 bp, Homo sapien
gctggcttgcgtcacattatgagaa

SEQ ID NO: 4557093 - DNA, 25 bp, Homo sapien
aaatttgcctcctatgtgaagtcag

SEQ ID NO: 4557094 - DNA, 25 bp, Homo sapien
tctccaatgttgaggtggtcgagcc

SEQ ID NO: 4557095 - DNA, 25 bp, Homo sapien
tttacaattgcacacagaagtacag

SEQ ID NO: 4557096 - DNA, 25 bp, Homo sapien
catgtctgcatataacaaggtatgt

SEQ ID NO: 4557097 - DNA, 25 bp, Homo sapien
cagtgtacgtaagaaatacatgtct

SEQ ID NO: 4557098 - DNA, 25 bp, Homo sapien
ttgattggcagttgaaaaaaatata

SEQ ID NO: 4557099 - DNA, 25 bp, Homo sapien
cttgattggcagttgaaaaaaatat

SEQ ID NO: 4557100 - DNA, 25 bp, Homo sapien
aagaacagggaacacggggcacata

SEQ ID NO: 4557101 - DNA, 25 bp, Homo sapien
ttattgagagccaagtttgcctgca

SEQ ID NO: 4557102 - DNA, 25 bp, Homo sapien
tccacctggtctgaggatatgatct

SEQ ID NO: 4557103 - DNA, 25 bp, Homo sapien
tattctaagactttgtgccattaag

SEQ ID NO: 4557104 - DNA, 25 bp, Homo sapien
gatgacttaataggtttctctttgg

SEQ ID NO: 4557105 - DNA, 25 bp, Homo sapien
ttagtttggagatgatgacttaata

SEQ ID NO: 4557106 - DNA, 25 bp, Homo sapien
tggagatgatgacttaataggtttc

SEQ ID NO: 4557107 - DNA, 25 bp, Homo sapien
tgatgacttaataggtttctctttg

SEQ ID NO: 4557108 - DNA, 25 bp, Homo sapien
aggaagaaccaaggcaaaagctgca

SEQ ID NO: 4557109 - DNA, 25 bp, Homo sapien
taggaagaaccaaggcaaaagctgc

SEQ ID NO: 4557110 - DNA, 25 bp, Homo sapien
ggaagaaccaaggcaaaagctgcag

SEQ ID NO: 4557111 - DNA, 25 bp, Homo sapien
ctaggaagaaccaaggcaaaagctg

SEQ ID NO: 4557112 - DNA, 25 bp, Homo sapien
tttgataactctctcggggccgctg

SEQ ID NO: 4557113 - DNA, 25 bp, Homo sapien
ttagcgtctcatgtgtcccatttga

SEQ ID NO: 4557114 - DNA, 25 bp, Homo sapien
tcatgtgtcccatttgataactctc

SEQ ID NO: 4557115 - DNA, 25 bp, Homo sapien
tgtcccatttgataactctctcggg

SEQ ID NO: 4557116 - DNA, 25 bp, Homo sapien
tatttatcatgagctttttaatctt

SEQ ID NO: 4557117 - DNA, 25 bp, Homo sapien
cagccattagcatgatcagagcaat

SEQ ID NO: 4557118 - DNA, 25 bp, Homo sapien
gaggcaactttggattactacttgg

SEQ ID NO: 4557119 - DNA, 25 bp, Homo sapien
cttggagtatgaacactgcatatct

SEQ ID NO: 4557120 - DNA, 25 bp, Homo sapien
ataagtaatactgcccaccaatgag

SEQ ID NO: 4557121 - DNA, 25 bp, Homo sapien
ctcaaatggataatgtgccaatgcc

SEQ ID NO: 4557122 - DNA, 25 bp, Homo sapien
caaatggataatgtgccaatgccct

SEQ ID NO: 4557123 - DNA, 25 bp, Homo sapien
tcaaatggataatgtgccaatgccc

SEQ ID NO: 4557124 - DNA, 25 bp, Homo sapien
aaatggataatgtgccaatgcccta

SEQ ID NO: 4557125 - DNA, 25 bp, Homo sapien
ggaaaattactgtgtctagtcttaa

SEQ ID NO: 4557126 - DNA, 25 bp, Homo sapien
taacctgacctatattaaacaaatc

SEQ ID NO: 4557127 - DNA, 25 bp, Homo sapien
tttagcagcaggcaaagttcatccc

SEQ ID NO: 4557128 - DNA, 25 bp, Homo sapien
tcatcccgtcttagaagaaaccaaa

SEQ ID NO: 4557129 - DNA, 25 bp, Homo sapien
gagctccttgccatgatactgatta

SEQ ID NO: 4557130 - DNA, 25 bp, Homo sapien
tgaatactgcagtgttcaacaacgc

SEQ ID NO: 4557131 - DNA, 25 bp, Homo sapien
gagtgccagggtcttatatcccaga

SEQ ID NO: 4557132 - DNA, 25 bp, Homo sapien
caaattgcccacctgttagtctgaa

SEQ ID NO: 4557133 - DNA, 25 bp, Homo sapien
gaactaaggagcacggtaaaacaga

SEQ ID NO: 4557134 - DNA, 25 bp, Homo sapien
gaacttaccacgcaacaagcacagg

SEQ ID NO: 4557135 - DNA, 25 bp, Homo sapien
aaggcatccatagttctgaacacac

SEQ ID NO: 4557136 - DNA, 25 bp, Homo sapien
taatgtgtcctaggaacggtaaaca

SEQ ID NO: 4557137 - DNA, 25 bp, Homo sapien
gatggttcgaccactgaagtgccta

SEQ ID NO: 4557138 - DNA, 25 bp, Homo sapien
taagcctagctagaggaccatcagc

SEQ ID NO: 4557139 - DNA, 25 bp, Homo sapien
caatgttttcatagagctctggact

SEQ ID NO: 4557140 - DNA, 25 bp, Homo sapien
cagtaacctctaaaatcgttgcaag

SEQ ID NO: 4557141 - DNA, 25 bp, Homo sapien
ctgtactggcacaagttgatgggtc

SEQ ID NO: 4557142 - DNA, 25 bp, Homo sapien
tgtactggcacaagttgatgggtcc

SEQ ID NO: 4557143 - DNA, 25 bp, Homo sapien
gtactggcacaagttgatgggtcca

SEQ ID NO: 4557144 - DNA, 25 bp, Homo sapien
tactgctgtaaagctggcaacgttt

SEQ ID NO: 4557145 - DNA, 25 bp, Homo sapien
aattatctggccaaactgtaggtca

SEQ ID NO: 4557146 - DNA, 25 bp, Homo sapien
tgtaaacaagcaaccagcaagtctt

SEQ ID NO: 4557147 - DNA, 25 bp, Homo sapien
tctctagttaggctgggtaacgcca

SEQ ID NO: 4557148 - DNA, 25 bp, Homo sapien
tcctctaagccatatttctcacaga

SEQ ID NO: 4557149 - DNA, 25 bp, Homo sapien
ttttcttcatacagcatacatggca

SEQ ID NO: 4557150 - DNA, 25 bp, Homo sapien
agaactggcacacgtacactcctct

SEQ ID NO: 4557151 - DNA, 25 bp, Homo sapien
atacatggcataattctttatcatc

SEQ ID NO: 4557152 - DNA, 25 bp, Homo sapien
ggcaagtatgagcttccaatgtcaa

SEQ ID NO: 4557153 - DNA, 25 bp, Homo sapien
ttatagtaacagacaggcaagtatg

SEQ ID NO: 4557154 - DNA, 25 bp, Homo sapien
tattatagacaaatcacatgccgag

SEQ ID NO: 4557155 - DNA, 25 bp, Homo sapien
gagaatatcaaccacatgtacatgg

SEQ ID NO: 4557156 - DNA, 25 bp, Homo sapien
tgtgctgtacaacaaggaccttgac

SEQ ID NO: 4557157 - DNA, 25 bp, Homo sapien
gcacacttgtgtatgcctattacag

SEQ ID NO: 4557158 - DNA, 25 bp, Homo sapien
catcccgacacttctcagactttga

SEQ ID NO: 4557159 - DNA, 25 bp, Homo sapien
gacttgaatgcacactgtgctgtac

SEQ ID NO: 4557160 - DNA, 25 bp, Homo sapien
gaaatagttataacttgccaagtta

SEQ ID NO: 4557161 - DNA, 25 bp, Homo sapien
aagtgaaatagttataacttgccaa

SEQ ID NO: 4557162 - DNA, 25 bp, Homo sapien
aagtattgtgcaaacaattgcttac

SEQ ID NO: 4557163 - DNA, 25 bp, Homo sapien
aatatggaagatagttacattttca

SEQ ID NO: 4557164 - DNA, 25 bp, Homo sapien
aaagtagtccaaacaagcctgggca

SEQ ID NO: 4557165 - DNA, 25 bp, Homo sapien
gcagtgagccgagatcatgccactg

SEQ ID NO: 4557166 - DNA, 25 bp, Homo sapien
ggaggtggaagttgcagtgagccga

SEQ ID NO: 4557167 - DNA, 25 bp, Homo sapien
gatcaattgagcccgggaggtggaa

SEQ ID NO: 4557168 - DNA, 25 bp, Homo sapien
catcgaagcagcattcatctttaca

SEQ ID NO: 4557169 - DNA, 25 bp, Homo sapien
gatttgcatcgaagcagcattcatc

SEQ ID NO: 4557170 - DNA, 25 bp, Homo sapien
tctggttgatttgcatcgaagcagc

SEQ ID NO: 4557171 - DNA, 25 bp, Homo sapien
tcttccctctggttgatttgcatcg

SEQ ID NO: 4557172 - DNA, 25 bp, Homo sapien
tcttgcaaggcattaccatcggagg

SEQ ID NO: 4557173 - DNA, 25 bp, Homo sapien
acaatgagggatccttgtaatgaca

SEQ ID NO: 4557174 - DNA, 25 bp, Homo sapien
tacatatggagaacagggtagcagg

SEQ ID NO: 4557175 - DNA, 25 bp, Homo sapien
caacagaagggaggtaagcatggtt

SEQ ID NO: 4557176 - DNA, 25 bp, Homo sapien
gagagtagatgtacaaactaggaca

SEQ ID NO: 4557177 - DNA, 25 bp, Homo sapien
tatgaagacaaagccaatgtagagt

SEQ ID NO: 4557178 - DNA, 25 bp, Homo sapien
ccttccacagaagggtataaactgt

SEQ ID NO: 4557179 - DNA, 25 bp, Homo sapien
tgtatactgagttaaacagccttcc

SEQ ID NO: 4557180 - DNA, 25 bp, Homo sapien
actacagagtgagaatttattgttg

SEQ ID NO: 4557181 - DNA, 25 bp, Homo sapien
tattgttgttaagtttgtccccaga

SEQ ID NO: 4557182 - DNA, 25 bp, Homo sapien
gatgttgctcttgcatacatgatgt

SEQ ID NO: 4557183 - DNA, 25 bp, Homo sapien
gcttatatttctaatactacagagt

SEQ ID NO: 4557184 - DNA, 25 bp, Homo sapien
tacatgagacccatagttctgaaca

SEQ ID NO: 4557185 - DNA, 25 bp, Homo sapien
gttctgaacagtaataattccagtg

SEQ ID NO: 4557186 - DNA, 25 bp, Homo sapien
aaagttatgtccaacttcgtgagca

SEQ ID NO: 4557187 - DNA, 25 bp, Homo sapien
caaaagtaatgtgagagactttggg

SEQ ID NO: 4557188 - DNA, 25 bp, Homo sapien
tacttttttcacatattcctccaga

SEQ ID NO: 4557189 - DNA, 25 bp, Homo sapien
ggtccattcaaatgtcaggaatcag

SEQ ID NO: 4557190 - DNA, 25 bp, Homo sapien
gatatttccctgtatgcgtttcaaa

SEQ ID NO: 4557191 - DNA, 25 bp, Homo sapien
gagtcttgcctaactcaagtagcat

SEQ ID NO: 4557192 - DNA, 25 bp, Homo sapien
ttacattatgcttatgagtcttgcc

SEQ ID NO: 4557193 - DNA, 25 bp, Homo sapien
caagccagaccaagtacgccatcat

SEQ ID NO: 4557194 - DNA, 25 bp, Homo sapien
gaccaagtacgccatcatcaaaatc

SEQ ID NO: 4557195 - DNA, 25 bp, Homo sapien
ccagaccaagtacgccatcatcaaa

SEQ ID NO: 4557196 - DNA, 25 bp, Homo sapien
agccagaccaagtacgccatcatca

SEQ ID NO: 4557197 - DNA, 25 bp, Homo sapien
tctgctcagaattcaattccagaaa

SEQ ID NO: 4557198 - DNA, 25 bp, Homo sapien
gtagtcatcatgattctgctcagaa

SEQ ID NO: 4557199 - DNA, 25 bp, Homo sapien
aacttctccacaccaatatttggga

SEQ ID NO: 4557200 - DNA, 25 bp, Homo sapien
tgtgaagacataggccaaacagtag

SEQ ID NO: 4557201 - DNA, 25 bp, Homo sapien
aaggcttctaaggttgttcccactg

SEQ ID NO: 4557202 - DNA, 25 bp, Homo sapien
tctgcgtacacctggacaatatgct

SEQ ID NO: 4557203 - DNA, 25 bp, Homo sapien
gattcctgaacactgaacacttggg

SEQ ID NO: 4557204 - DNA, 25 bp, Homo sapien
catccctgagctgatcacagaaggc

SEQ ID NO: 4557205 - DNA, 25 bp, Homo sapien
tatcaatcgctttaacatgactgga

SEQ ID NO: 4557206 - DNA, 25 bp, Homo sapien
ggtctggtaaattgtatcaatcgct

SEQ ID NO: 4557207 - DNA, 25 bp, Homo sapien
tacggattccggagaagtctgtggt

SEQ ID NO: 4557208 - DNA, 25 bp, Homo sapien
catgaaactgatgttacggattccg

SEQ ID NO: 4557209 - DNA, 25 bp, Homo sapien
gctgaagttgtacgttttttcctca

SEQ ID NO: 4557210 - DNA, 25 bp, Homo sapien
tctcgtgttccgtaatatttaaaga

SEQ ID NO: 4557211 - DNA, 25 bp, Homo sapien
caatcacagcttctcgtgttccgta

SEQ ID NO: 4557212 - DNA, 25 bp, Homo sapien
ctcagaagttctggaccattagcag

SEQ ID NO: 4557213 - DNA, 25 bp, Homo sapien
attacagagccaccacccccgccaa

SEQ ID NO: 4557214 - DNA, 25 bp, Homo sapien
acaatcctcccgcctaagcttccca

SEQ ID NO: 4557215 - DNA, 25 bp, Homo sapien
cccgccaagtatttcttttgagagt

SEQ ID NO: 4557216 - DNA, 25 bp, Homo sapien
tacagagccaccacccccgccaagt

SEQ ID NO: 4557217 - DNA, 25 bp, Homo sapien
tatgtgtcccataacatcatgtaat

SEQ ID NO: 4557218 - DNA, 25 bp, Homo sapien
ctactgaaacagtgtaacatttggg

SEQ ID NO: 4557219 - DNA, 25 bp, Homo sapien
caatttgtattatagatgggtacca

SEQ ID NO: 4557220 - DNA, 25 bp, Homo sapien
cattttgactatctatatgtgtccc

SEQ ID NO: 4557221 - DNA, 25 bp, Homo sapien
tctcttcgggtagatgtgcagcagt

SEQ ID NO: 4557222 - DNA, 25 bp, Homo sapien
ccatttttactgaggtgagacggta

SEQ ID NO: 4557223 - DNA, 25 bp, Homo sapien
tctattaacagacacttaggctgct

SEQ ID NO: 4557224 - DNA, 25 bp, Homo sapien
caccaacagtgtgtggcggtttcct

SEQ ID NO: 4557225 - DNA, 25 bp, Homo sapien
tagttgctcaaagtacccactaatg

SEQ ID NO: 4557226 - DNA, 25 bp, Homo sapien
tcagtacaattggtattagttatat

SEQ ID NO: 4557227 - DNA, 25 bp, Homo sapien
tgcttttactgtatcctacgcgttg

SEQ ID NO: 4557228 - DNA, 25 bp, Homo sapien
catctataccacttgtgatgtctcc

SEQ ID NO: 4557229 - DNA, 25 bp, Homo sapien
ggaaggtctatccattgctgaaagt

SEQ ID NO: 4557230 - DNA, 25 bp, Homo sapien
ttttctgtctggaaggtctatccat

SEQ ID NO: 4557231 - DNA, 25 bp, Homo sapien
tgttttacaaccaaacatatggtct

SEQ ID NO: 4557232 - DNA, 25 bp, Homo sapien
caaccaaacatatggtctattcttg

SEQ ID NO: 4557233 - DNA, 25 bp, Homo sapien
tccgcttggcttctagagaggtctc

SEQ ID NO: 4557234 - DNA, 25 bp, Homo sapien
cgcttggcttctagagaggtctcag

SEQ ID NO: 4557235 - DNA, 25 bp, Homo sapien
gcatccgcttggcttctagagaggt

SEQ ID NO: 4557236 - DNA, 25 bp, Homo sapien
ggcttctagagaggtctcaggaagc

SEQ ID NO: 4557237 - DNA, 25 bp, Homo sapien
atgacaacagtgattgcataattat

SEQ ID NO: 4557238 - DNA, 25 bp, Homo sapien
tgatgacaacagtgattgcataatt

SEQ ID NO: 4557239 - DNA, 25 bp, Homo sapien
gatgacaacagtgattgcataatta

SEQ ID NO: 4557240 - DNA, 25 bp, Homo sapien
cctctttaaggacataattcttatg

SEQ ID NO: 4557241 - DNA, 25 bp, Homo sapien
tccctgaatatactgctataggata

SEQ ID NO: 4557242 - DNA, 25 bp, Homo sapien
gcttcataaccttcttacacttgaa

SEQ ID NO: 4557243 - DNA, 25 bp, Homo sapien
gggttaaatacgcttggtgcttcat

SEQ ID NO: 4557244 - DNA, 25 bp, Homo sapien
tttcatagggaatttttgtgccttg

SEQ ID NO: 4557245 - DNA, 25 bp, Homo sapien
ttcatagggaatttttgtgccttga

SEQ ID NO: 4557246 - DNA, 25 bp, Homo sapien
tcagtctgtggcttgttttcctatt

SEQ ID NO: 4557247 - DNA, 25 bp, Homo sapien
tcttttttcaatggttgctccaagg

SEQ ID NO: 4557248 - DNA, 25 bp, Homo sapien
tagatttaaacttaccaccttgcta

SEQ ID NO: 4557249 - DNA, 25 bp, Homo sapien
taatgcagtcatcaatatggttaga

SEQ ID NO: 4557250 - DNA, 25 bp, Homo sapien
tttcttaattaacgtgcttagtcca

SEQ ID NO: 4557251 - DNA, 25 bp, Homo sapien
tacttcctctacaccagtcatctgg

SEQ ID NO: 4557252 - DNA, 25 bp, Homo sapien
tctacaccagtcatctggtatttcc

SEQ ID NO: 4557253 - DNA, 25 bp, Homo sapien
acaccagtcatctggtatttcctca

SEQ ID NO: 4557254 - DNA, 25 bp, Homo sapien
gtgttacttcctctacaccagtcat

SEQ ID NO: 4557255 - DNA, 25 bp, Homo sapien
agcccccctgaggaccgtatttatg

SEQ ID NO: 4557256 - DNA, 25 bp, Homo sapien
tgaggaccgtatttatggggatagt

SEQ ID NO: 4557257 - DNA, 25 bp, Homo sapien
ccctgaggaccgtatttatggggat

SEQ ID NO: 4557258 - DNA, 25 bp, Homo sapien
aatactgaatgatctgcacagcccc

SEQ ID NO: 4557259 - DNA, 25 bp, Homo sapien
ggtaagtgggcataagaaaagcaca

SEQ ID NO: 4557260 - DNA, 25 bp, Homo sapien
aagcacagagtgattgtccctagaa

SEQ ID NO: 4557261 - DNA, 25 bp, Homo sapien
ccagtggatgggaggccgtttctcc

SEQ ID NO: 4557262 - DNA, 25 bp, Homo sapien
ccaatccccatgtctaatttctgtt

SEQ ID NO: 4557263 - DNA, 25 bp, Homo sapien
cagagatgaggaagagggccagaca

SEQ ID NO: 4557264 - DNA, 25 bp, Homo sapien
ggaaacagagatgaggaagagggcc

SEQ ID NO: 4557265 - DNA, 25 bp, Homo sapien
aacactgatctctctggaaacagag

SEQ ID NO: 4557266 - DNA, 25 bp, Homo sapien
aaacagagatgaggaagagggccag

SEQ ID NO: 4557267 - DNA, 25 bp, Homo sapien
gaaagggttactattggcagccaaa

SEQ ID NO: 4557268 - DNA, 25 bp, Homo sapien
ccaaaggataatgggagtcaggtca

SEQ ID NO: 4557269 - DNA, 25 bp, Homo sapien
tgtttaaggcagaacctttgcccta

SEQ ID NO: 4557270 - DNA, 25 bp, Homo sapien
tcaggtcaaccagagaaatgttgct

SEQ ID NO: 4557271 - DNA, 25 bp, Homo sapien
caatacacttgtatgcactgtggga

SEQ ID NO: 4557272 - DNA, 25 bp, Homo sapien
tccagactggacctaagtatagcca

SEQ ID NO: 4557273 - DNA, 25 bp, Homo sapien
tccagttggctacatagtttgtcac

SEQ ID NO: 4557274 - DNA, 25 bp, Homo sapien
tatacttcccaagagattaactcag

SEQ ID NO: 4557275 - DNA, 25 bp, Homo sapien
tcaagtgacataagttttctaagcc

SEQ ID NO: 4557276 - DNA, 25 bp, Homo sapien
gctttcttccatgagtgaagcagaa

SEQ ID NO: 4557277 - DNA, 25 bp, Homo sapien
gaacaggaggtccacaatcaagtga

SEQ ID NO: 4557278 - DNA, 25 bp, Homo sapien
gcagaagagcacagggtaaagaaca

SEQ ID NO: 4557279 - DNA, 25 bp, Homo sapien
taacagacccatggctaaaacttcc

SEQ ID NO: 4557280 - DNA, 25 bp, Homo sapien
taaaatgtgccaccacgagtctgga

SEQ ID NO: 4557281 - DNA, 25 bp, Homo sapien
tctctgctggctcaacataaaatgt

SEQ ID NO: 4557282 - DNA, 25 bp, Homo sapien
ggtctttaatatatctctctgctgg

SEQ ID NO: 4557283 - DNA, 25 bp, Homo sapien
ccctcttcattcgtaggttgaaatg

SEQ ID NO: 4557284 - DNA, 25 bp, Homo sapien
gaagtgtccctcttcattcgtaggt

SEQ ID NO: 4557285 - DNA, 25 bp, Homo sapien
aaagggaagtgtccctcttcattcg

SEQ ID NO: 4557286 - DNA, 25 bp, Homo sapien
ctgaaaagggaagtgtccctcttca

SEQ ID NO: 4557287 - DNA, 25 bp, Homo sapien
aaagtgatgaatgactgccttcaag

SEQ ID NO: 4557288 - DNA, 25 bp, Homo sapien
tttgctgaggaatgccttcaagcac

SEQ ID NO: 4557289 - DNA, 25 bp, Homo sapien
gaatgccttcaagcacaaagtgatg

SEQ ID NO: 4557290 - DNA, 25 bp, Homo sapien
gcacaaagtgatgaatgactgcctt

SEQ ID NO: 4557291 - DNA, 25 bp, Homo sapien
aatgcggcagggtgaagacacaagc

SEQ ID NO: 4557292 - DNA, 25 bp, Homo sapien
ggcagggtgaagacacaagcctact

SEQ ID NO: 4557293 - DNA, 25 bp, Homo sapien
acacaagcctactggagattgtcac

SEQ ID NO: 4557294 - DNA, 25 bp, Homo sapien
tgtaggtgctggtcacaatgcggca

SEQ ID NO: 4557295 - DNA, 25 bp, Homo sapien
aactttacgttgctctcctccatta

SEQ ID NO: 4557296 - DNA, 25 bp, Homo sapien
ctttacgttgctctcctccattatc

SEQ ID NO: 4557297 - DNA, 25 bp, Homo sapien
tttacgttgctctcctccattatct

SEQ ID NO: 4557298 - DNA, 25 bp, Homo sapien
actttacgttgctctcctccattat

SEQ ID NO: 4557299 - DNA, 25 bp, Homo sapien
tcactcatatatattacctcgaagc

SEQ ID NO: 4557300 - DNA, 25 bp, Homo sapien
cactcatatatattacctcgaagcc

SEQ ID NO: 4557301 - DNA, 25 bp, Homo sapien
ctcactcatatatattacctcgaag

SEQ ID NO: 4557302 - DNA, 25 bp, Homo sapien
tgtgcctccttcatgcaagacacat

SEQ ID NO: 4557303 - DNA, 25 bp, Homo sapien
tgcctccttcatgcaagacacatac

SEQ ID NO: 4557304 - DNA, 25 bp, Homo sapien
gcctccttcatgcaagacacatact

SEQ ID NO: 4557305 - DNA, 25 bp, Homo sapien
ggattccaagccacgagattttaga

SEQ ID NO: 4557306 - DNA, 25 bp, Homo sapien
caggtgtcgccagttaatagagtcc

SEQ ID NO: 4557307 - DNA, 25 bp, Homo sapien
gaaggtgtgagaccacagcagttca

SEQ ID NO: 4557308 - DNA, 25 bp, Homo sapien
tccaagccacgagattttagagaat

SEQ ID NO: 4557309 - DNA, 25 bp, Homo sapien
gacagagccttcttctgtcgcccag

SEQ ID NO: 4557310 - DNA, 25 bp, Homo sapien
aacttccgcctcccaggttcaagca

SEQ ID NO: 4557311 - DNA, 25 bp, Homo sapien
cagtggcatgatcttggctcactgc

SEQ ID NO: 4557312 - DNA, 25 bp, Homo sapien
gcttagtgcagtggcatgatcttgg

SEQ ID NO: 4557313 - DNA, 25 bp, Homo sapien
aaagctgtccatgatccacacatga

SEQ ID NO: 4557314 - DNA, 25 bp, Homo sapien
cggacaaagccgacatactctggca

SEQ ID NO: 4557315 - DNA, 25 bp, Homo sapien
cacatgatggacacagagttgttca

SEQ ID NO: 4557316 - DNA, 25 bp, Homo sapien
gacatactctggcatcaaatcatca

SEQ ID NO: 4557317 - DNA, 25 bp, Homo sapien
ttcctgggtgatgtcatcagggttt

SEQ ID NO: 4557318 - DNA, 25 bp, Homo sapien
agggaattgcttgactgccaagtgg

SEQ ID NO: 4557319 - DNA, 25 bp, Homo sapien
caggcactggtgaggctcttgtaga

SEQ ID NO: 4557320 - DNA, 25 bp, Homo sapien
gaattctccacactcttcctgggtg

SEQ ID NO: 4557321 - DNA, 25 bp, Homo sapien
tattattcttatcagtgtcatcctc

SEQ ID NO: 4557322 - DNA, 25 bp, Homo sapien
tctggtttagttcttcccgatcagt

SEQ ID NO: 4557323 - DNA, 25 bp, Homo sapien
tcttcccgatcagtgtatttctcct

SEQ ID NO: 4557324 - DNA, 25 bp, Homo sapien
cctcatcggaacccacatcttcagt

SEQ ID NO: 4557325 - DNA, 25 bp, Homo sapien
tgtctgatcttctttaaggtgaagg

SEQ ID NO: 4557326 - DNA, 25 bp, Homo sapien
ctttggtatccctgtcaatgggctc

SEQ ID NO: 4557327 - DNA, 25 bp, Homo sapien
tgatcttctttaaggtgaaggatca

SEQ ID NO: 4557328 - DNA, 25 bp, Homo sapien
gtgaaggatcactttggtatccctg

SEQ ID NO: 4557329 - DNA, 25 bp, Homo sapien
aaggaactcccagcagaagataccc

SEQ ID NO: 4557330 - DNA, 25 bp, Homo sapien
aaagtgaaggaactcccagcagaag

SEQ ID NO: 4557331 - DNA, 25 bp, Homo sapien
gaatactgttcttcgtcattgtgct

SEQ ID NO: 4557332 - DNA, 25 bp, Homo sapien
ggaatactgttcttcgtcattgtgc

SEQ ID NO: 4557333 - DNA, 25 bp, Homo sapien
caagactgaaaagcctccataaatg

SEQ ID NO: 4557334 - DNA, 25 bp, Homo sapien
ctgcacaagactgaaaagcctccat

SEQ ID NO: 4557335 - DNA, 25 bp, Homo sapien
cacaagactgaaaagcctccataaa

SEQ ID NO: 4557336 - DNA, 25 bp, Homo sapien
tgcacaagactgaaaagcctccata

SEQ ID NO: 4557337 - DNA, 25 bp, Homo sapien
atgcattcccgagggttggggatga

SEQ ID NO: 4557338 - DNA, 25 bp, Homo sapien
tcaggatgcattcccgagggttggg

SEQ ID NO: 4557339 - DNA, 25 bp, Homo sapien
gtgttgaccaaagtcaggatgcatt

SEQ ID NO: 4557340 - DNA, 25 bp, Homo sapien
cctgtgttgaccaaagtcaggatgc

SEQ ID NO: 4557341 - DNA, 25 bp, Homo sapien
agagatcaactcctgaaggaaaatc

SEQ ID NO: 4557342 - DNA, 25 bp, Homo sapien
ttagagatcaactcctgaaggaaaa

SEQ ID NO: 4557343 - DNA, 25 bp, Homo sapien
atagaaggtattgattatgagagac

SEQ ID NO: 4557344 - DNA, 25 bp, Homo sapien
cttgtctaaggcatcagaagcatta

SEQ ID NO: 4557345 - DNA, 25 bp, Homo sapien
tctccatggtacacctctgcaggca

SEQ ID NO: 4557346 - DNA, 25 bp, Homo sapien
ctccatggtacacctctgcaggcat

SEQ ID NO: 4557347 - DNA, 25 bp, Homo sapien
ttctccatggtacacctctgcaggc

SEQ ID NO: 4557348 - DNA, 25 bp, Homo sapien
ccttctccatggtacacctctgcag

SEQ ID NO: 4557349 - DNA, 25 bp, Homo sapien
gcacggtattggtggtaatcccaac

SEQ ID NO: 4557350 - DNA, 25 bp, Homo sapien
ttaatataagacctggccaacagag

SEQ ID NO: 4557351 - DNA, 25 bp, Homo sapien
aacccctgttaaatgaaagcactag

SEQ ID NO: 4557352 - DNA, 25 bp, Homo sapien
agaacgaacattctggcctggcacg

SEQ ID NO: 4557353 - DNA, 25 bp, Homo sapien
aatgagccggttgtgatgatacatg

SEQ ID NO: 4557354 - DNA, 25 bp, Homo sapien
tacaaaatgagccggttgtgatgat

SEQ ID NO: 4557355 - DNA, 25 bp, Homo sapien
gagccggttgtgatgatacatgcct

SEQ ID NO: 4557356 - DNA, 25 bp, Homo sapien
caaaatgagccggttgtgatgatac

SEQ ID NO: 4557357 - DNA, 25 bp, Homo sapien
tcgaatgaacgctggagattaatgg

SEQ ID NO: 4557358 - DNA, 25 bp, Homo sapien
ccagatcagtcgaatgaacgctgga

SEQ ID NO: 4557359 - DNA, 25 bp, Homo sapien
cagtcgaatgaacgctggagattaa

SEQ ID NO: 4557360 - DNA, 25 bp, Homo sapien
gatcagtcgaatgaacgctggagat

SEQ ID NO: 4557361 - DNA, 25 bp, Homo sapien
tagaacctatcctctgcaaacaagg

SEQ ID NO: 4557362 - DNA, 25 bp, Homo sapien
tccaggagtcccagagacaagcagt

SEQ ID NO: 4557363 - DNA, 25 bp, Homo sapien
gaagtacgttgccaatacagagagg

SEQ ID NO: 4557364 - DNA, 25 bp, Homo sapien
gcaaaatccttgcttcgaggtacta

SEQ ID NO: 4557365 - DNA, 25 bp, Homo sapien
cctgacacgaagtaggtactaaata

SEQ ID NO: 4557366 - DNA, 25 bp, Homo sapien
gtatgttgcactatacctgacacga

SEQ ID NO: 4557367 - DNA, 25 bp, Homo sapien
gcggaatcaggcaagaataaagaat

SEQ ID NO: 4557368 - DNA, 25 bp, Homo sapien
ggaagagatttaactaccatcagta

SEQ ID NO: 4557369 - DNA, 25 bp, Homo sapien
ggtgtttcagaaaattcctacaagc

SEQ ID NO: 4557370 - DNA, 25 bp, Homo sapien
cggtgtttcagaaaattcctacaag

SEQ ID NO: 4557371 - DNA, 25 bp, Homo sapien
gtgtttcagaaaattcctacaagct

SEQ ID NO: 4557372 - DNA, 25 bp, Homo sapien
ccatgggcatggaaatctagacgta

SEQ ID NO: 4557373 - DNA, 25 bp, Homo sapien
aattggtcttcatgtgagactgctc

SEQ ID NO: 4557374 - DNA, 25 bp, Homo sapien
tgaatccacattgtaagataatcct

SEQ ID NO: 4557375 - DNA, 25 bp, Homo sapien
gagactgctcttttggcacgctggt

SEQ ID NO: 4557376 - DNA, 25 bp, Homo sapien
agctctgctgaacactacagtggaa

SEQ ID NO: 4557377 - DNA, 25 bp, Homo sapien
caggtagtttccacatatgggctga

SEQ ID NO: 4557378 - DNA, 25 bp, Homo sapien
cagtagtctacccaatgctccatga

SEQ ID NO: 4557379 - DNA, 25 bp, Homo sapien
tatctgagcaccaggtaccgttcaa

SEQ ID NO: 4557380 - DNA, 25 bp, Homo sapien
tgagttgccatagcacaagcttggc

SEQ ID NO: 4557381 - DNA, 25 bp, Homo sapien
caaaggcgtcaagctggtttttatt

SEQ ID NO: 4557382 - DNA, 25 bp, Homo sapien
tcctttttcggcaccaaaggcgtca

SEQ ID NO: 4557383 - DNA, 25 bp, Homo sapien
ctttgcagaactgtggattccactc

SEQ ID NO: 4557384 - DNA, 25 bp, Homo sapien
aatctttgtaattgagatagaacat

SEQ ID NO: 4557385 - DNA, 25 bp, Homo sapien
gaatctttgtaattgagatagaaca

SEQ ID NO: 4557386 - DNA, 25 bp, Homo sapien
gccttcccagtagctcaggctacag

SEQ ID NO: 4557387 - DNA, 25 bp, Homo sapien
ggagtgcagtagcactatcaaggct

SEQ ID NO: 4557388 - DNA, 25 bp, Homo sapien
gtgattctcctacatcagccttccc

SEQ ID NO: 4557389 - DNA, 25 bp, Homo sapien
gtagcactatcaaggctcactgtag

SEQ ID NO: 4557390 - DNA, 25 bp, Homo sapien
catacccagccaaatcagaggattt

SEQ ID NO: 4557391 - DNA, 25 bp, Homo sapien
tacccagccaaatcagaggattttt

SEQ ID NO: 4557392 - DNA, 25 bp, Homo sapien
cataacctaataatataatctttca

SEQ ID NO: 4557393 - DNA, 25 bp, Homo sapien
cccagccaaatcagaggattttttt

SEQ ID NO: 4557394 - DNA, 25 bp, Homo sapien
ggaggactgttcaaggccaagaagt

SEQ ID NO: 4557395 - DNA, 25 bp, Homo sapien
aggactgttcaaggccaagaagttc

SEQ ID NO: 4557396 - DNA, 25 bp, Homo sapien
aggaggactgttcaaggccaagaag

SEQ ID NO: 4557397 - DNA, 25 bp, Homo sapien
actgttcaaggccaagaagttcaag

SEQ ID NO: 4557398 - DNA, 25 bp, Homo sapien
agtaaatgatctaacataacaatta

SEQ ID NO: 4557399 - DNA, 25 bp, Homo sapien
gtaactggaaactggtgcaccacca

SEQ ID NO: 4557400 - DNA, 25 bp, Homo sapien
agtaactggaaactggtgcaccacc

SEQ ID NO: 4557401 - DNA, 25 bp, Homo sapien
cataaacaaggtaagtcaccatatt

SEQ ID NO: 4557402 - DNA, 25 bp, Homo sapien
cttcatcataaacaaggtaagtcac

SEQ ID NO: 4557403 - DNA, 25 bp, Homo sapien
catcataaacaaggtaagtcaccat

SEQ ID NO: 4557404 - DNA, 25 bp, Homo sapien
tcatcataaacaaggtaagtcacca

SEQ ID NO: 4557405 - DNA, 25 bp, Homo sapien
tattagtataaaaccagagtactca

SEQ ID NO: 4557406 - DNA, 25 bp, Homo sapien
aattcacaatttctattcctgtaga

SEQ ID NO: 4557407 - DNA, 25 bp, Homo sapien
gagtatgtttaataccaataatcta

SEQ ID NO: 4557408 - DNA, 25 bp, Homo sapien
ttacagttggacattttagagtatg

SEQ ID NO: 4557409 - DNA, 25 bp, Homo sapien
caaagatcttacaagtgaccaaaaa

SEQ ID NO: 4557410 - DNA, 25 bp, Homo sapien
taatgcaataaaggactctggaaat

SEQ ID NO: 4557411 - DNA, 25 bp, Homo sapien
caatctcaatgtgctgaagtctaca

SEQ ID NO: 4557412 - DNA, 25 bp, Homo sapien
gtatctccaagtacccaaaagctag

SEQ ID NO: 4557413 - DNA, 25 bp, Homo sapien
caaatgtcagatgaaaaaggctcct

SEQ ID NO: 4557414 - DNA, 25 bp, Homo sapien
gagagtctcccgcacataatccttt

SEQ ID NO: 4557415 - DNA, 25 bp, Homo sapien
gaaagccacgtttagaacagaaata

SEQ ID NO: 4557416 - DNA, 25 bp, Homo sapien
tctataatgtgtgtcttgcttgatg

SEQ ID NO: 4557417 - DNA, 25 bp, Homo sapien
taccaccctcggactcggtagaata

SEQ ID NO: 4557418 - DNA, 25 bp, Homo sapien
ctcggactcggtagaatacaggaca

SEQ ID NO: 4557419 - DNA, 25 bp, Homo sapien
caccctcggactcggtagaatacag

SEQ ID NO: 4557420 - DNA, 25 bp, Homo sapien
gactcggtagaatacaggacagaaa

SEQ ID NO: 4557421 - DNA, 25 bp, Homo sapien
gaaacaatacattacatgaaataga

SEQ ID NO: 4557422 - DNA, 25 bp, Homo sapien
ctgcagtcataagtcaaagtggcaa

SEQ ID NO: 4557423 - DNA, 25 bp, Homo sapien
cataagtcaaagtggcaaagaaaaa

SEQ ID NO: 4557424 - DNA, 25 bp, Homo sapien
aaggctacagacactcatccaaagc

SEQ ID NO: 4557425 - DNA, 25 bp, Homo sapien
taactacactgtacatctactccac

SEQ ID NO: 4557426 - DNA, 25 bp, Homo sapien
ttttgacaatccactaactacactg

SEQ ID NO: 4557427 - DNA, 25 bp, Homo sapien
gggaccgaacttctactctaagaga

SEQ ID NO: 4557428 - DNA, 25 bp, Homo sapien
tcaagttgggtcacccagggaccga

SEQ ID NO: 4557429 - DNA, 25 bp, Homo sapien
aaatcaaagaacatccccaaatggt

SEQ ID NO: 4557430 - DNA, 25 bp, Homo sapien
gataagcgggtgatgactgctgcca

SEQ ID NO: 4557431 - DNA, 25 bp, Homo sapien
gaaccgaggccactagtctcagata

SEQ ID NO: 4557432 - DNA, 25 bp, Homo sapien
ggcgcgccgggtaaagaacaataca

SEQ ID NO: 4557433 - DNA, 25 bp, Homo sapien
tgcaaacaacacaacttcccacgag

SEQ ID NO: 4557434 - DNA, 25 bp, Homo sapien
acgaggacggcgagaccgccagcct

SEQ ID NO: 4557435 - DNA, 25 bp, Homo sapien
gaggaatggtgagcaggatgagcgc

SEQ ID NO: 4557436 - DNA, 25 bp, Homo sapien
tgagcaggatgagcgctgaacgagg

SEQ ID NO: 4557437 - DNA, 25 bp, Homo sapien
tgagcgctgaacgaggacggcgaga

SEQ ID NO: 4557438 - DNA, 25 bp, Homo sapien
ccatccccgccgcccaggagaggag

SEQ ID NO: 4557439 - DNA, 25 bp, Homo sapien
gaattaacactctcagcaacaccat

SEQ ID NO: 4557440 - DNA, 25 bp, Homo sapien
ggagcagaattaacactctcagcaa

SEQ ID NO: 4557441 - DNA, 25 bp, Homo sapien
ggagaggagcagaattaacactctc

SEQ ID NO: 4557442 - DNA, 25 bp, Homo sapien
gttaacagcagcacatcgatccgga

SEQ ID NO: 4557443 - DNA, 25 bp, Homo sapien
cacgggttaacagcagcacatcgat

SEQ ID NO: 4557444 - DNA, 25 bp, Homo sapien
cagcacatcgatccggagggagaag

SEQ ID NO: 4557445 - DNA, 25 bp, Homo sapien
gcctcctcacgggttaacagcagca

SEQ ID NO: 4557446 - DNA, 25 bp, Homo sapien
gctcctagctcctccaaaacaggga

SEQ ID NO: 4557447 - DNA, 25 bp, Homo sapien
ttggtccggagcctccacgggaagc

SEQ ID NO: 4557448 - DNA, 25 bp, Homo sapien
aggagaaacggcgaagcacctccct

SEQ ID NO: 4557449 - DNA, 25 bp, Homo sapien
ttcaggggccggcaacgctcctagc

SEQ ID NO: 4557450 - DNA, 25 bp, Homo sapien
ccaggcgcttcaggggcgcgcgcat

SEQ ID NO: 4557451 - DNA, 25 bp, Homo sapien
gggacggttcccgtgctgctaggcc

SEQ ID NO: 4557452 - DNA, 25 bp, Homo sapien
ggttcccgtgctgctaggcctgccg

SEQ ID NO: 4557453 - DNA, 25 bp, Homo sapien
acggttcccgtgctgctaggcctgc

SEQ ID NO: 4557454 - DNA, 25 bp, Homo sapien
ccttgtggtttctggtgttctacac

SEQ ID NO: 4557455 - DNA, 25 bp, Homo sapien
gtgaagcaacaccaggacccggctt

SEQ ID NO: 4557456 - DNA, 25 bp, Homo sapien
aaccattcagactgcatcctttgcc

SEQ ID NO: 4557457 - DNA, 25 bp, Homo sapien
tttgcctcttactctcccaaaggaa

SEQ ID NO: 4557458 - DNA, 25 bp, Homo sapien
ggtgaatacttacatagctctaatg

SEQ ID NO: 4557459 - DNA, 25 bp, Homo sapien
tatgaaaggaaagaactaaatcctc

SEQ ID NO: 4557460 - DNA, 25 bp, Homo sapien
gcaattgttaattccaagacagaca

SEQ ID NO: 4557461 - DNA, 25 bp, Homo sapien
aataactggaagattggagcaatag

SEQ ID NO: 4557462 - DNA, 25 bp, Homo sapien
cctgttgtccaagagtaggatgtgg

SEQ ID NO: 4557463 - DNA, 25 bp, Homo sapien
caacattctgaaaaagctctccatt

SEQ ID NO: 4557464 - DNA, 25 bp, Homo sapien
caaaagcacacacaactcctaaatt

SEQ ID NO: 4557465 - DNA, 25 bp, Homo sapien
ggattgacatggagatcaaaagcac

SEQ ID NO: 4557466 - DNA, 25 bp, Homo sapien
agaaggcccccgccatcctgtaatc

SEQ ID NO: 4557467 - DNA, 25 bp, Homo sapien
gaaggcccccgccatcctgtaatca

SEQ ID NO: 4557468 - DNA, 25 bp, Homo sapien
aaggcccccgccatcctgtaatcac

SEQ ID NO: 4557469 - DNA, 25 bp, Homo sapien
aaagtcaccttttcagaagcaggcg

SEQ ID NO: 4557470 - DNA, 25 bp, Homo sapien
aaagccgtcgagtagatatgcctgc

SEQ ID NO: 4557471 - DNA, 25 bp, Homo sapien
tagggcgaatgtctcaccagtagct

SEQ ID NO: 4557472 - DNA, 25 bp, Homo sapien
tgtgcagtgcagtaatccaaagccg

SEQ ID NO: 4557473 - DNA, 25 bp, Homo sapien
tctgagagggcagtacaaggtgacc

SEQ ID NO: 4557474 - DNA, 25 bp, Homo sapien
gggaatctccgagcctggactctct

SEQ ID NO: 4557475 - DNA, 25 bp, Homo sapien
tcatgagttgggtaccgccggagac

SEQ ID NO: 4557476 - DNA, 25 bp, Homo sapien
gctcctccgcgggtttggacttgaa

SEQ ID NO: 4557477 - DNA, 25 bp, Homo sapien
tagaatataggttttataagggctg

SEQ ID NO: 4557478 - DNA, 25 bp, Homo sapien
tttctttacctggttaactgtcatc

SEQ ID NO: 4557479 - DNA, 25 bp, Homo sapien
ggctggactcagcatagtatttaga

SEQ ID NO: 4557480 - DNA, 25 bp, Homo sapien
ggttaactgtcatctcccactagaa

SEQ ID NO: 4557481 - DNA, 25 bp, Homo sapien
tgggcaatatactaaggtcctggct

SEQ ID NO: 4557482 - DNA, 25 bp, Homo sapien
tattatgacatcactgtacggaggg

SEQ ID NO: 4557483 - DNA, 25 bp, Homo sapien
gtcctggctctacaaacatggaggg

SEQ ID NO: 4557484 - DNA, 25 bp, Homo sapien
taaacatgactaccttaaaactgag

SEQ ID NO: 4557485 - DNA, 25 bp, Homo sapien
agccactatgcccagcctattgatc

SEQ ID NO: 4557486 - DNA, 25 bp, Homo sapien
cattttgaaagaccaagatgggaga

SEQ ID NO: 4557487 - DNA, 25 bp, Homo sapien
tagaggccttgcatggtggctaacg

SEQ ID NO: 4557488 - DNA, 25 bp, Homo sapien
tacattccagcaagagtgacacagt

SEQ ID NO: 4557489 - DNA, 25 bp, Homo sapien
gcctggacaacgtaatgagacctgt

SEQ ID NO: 4557490 - DNA, 25 bp, Homo sapien
atagtgtagtgtgccaattataaac

SEQ ID NO: 4557491 - DNA, 25 bp, Homo sapien
aaagccgagtggatttgaggaagta

SEQ ID NO: 4557492 - DNA, 25 bp, Homo sapien
gaatttcatcttcgacctccttcag

SEQ ID NO: 4557493 - DNA, 25 bp, Homo sapien
tgggaaagcctacacaacgtagatg

SEQ ID NO: 4557494 - DNA, 25 bp, Homo sapien
tttcaagtcacacaatacactcttt

SEQ ID NO: 4557495 - DNA, 25 bp, Homo sapien
tagtgacattcataactcatatcag

SEQ ID NO: 4557496 - DNA, 25 bp, Homo sapien
tactgcacttgtagccagattagca

SEQ ID NO: 4557497 - DNA, 25 bp, Homo sapien
cactctttatgagctggagtttcat

SEQ ID NO: 4557498 - DNA, 25 bp, Homo sapien
cacagtggatgctaggctttgtaaa

SEQ ID NO: 4557499 - DNA, 25 bp, Homo sapien
ggagtctttatcataggtaacctgg

SEQ ID NO: 4557500 - DNA, 25 bp, Homo sapien
ttgtatattggactagttcagccct

SEQ ID NO: 4557501 - DNA, 25 bp, Homo sapien
tgattgagtgtatggaggaaagcac

SEQ ID NO: 4557502 - DNA, 25 bp, Homo sapien
tcttgatatcactctgttggctgaa

SEQ ID NO: 4557503 - DNA, 25 bp, Homo sapien
ttttcccgggacagatagtagtgat

SEQ ID NO: 4557504 - DNA, 25 bp, Homo sapien
tcaaacaggttgacctcaatccaag

SEQ ID NO: 4557505 - DNA, 25 bp, Homo sapien
ttggctgaaggaggtaactcaaacc

SEQ ID NO: 4557506 - DNA, 25 bp, Homo sapien
cttctgttatttgttactatcttct

SEQ ID NO: 4557507 - DNA, 25 bp, Homo sapien
aaaatgctgccatactgcattccct

SEQ ID NO: 4557508 - DNA, 25 bp, Homo sapien
aaatatatgtgtagaagtatttctt

SEQ ID NO: 4557509 - DNA, 25 bp, Homo sapien
gaaaatgctgccatactgcattccc

SEQ ID NO: 4557510 - DNA, 25 bp, Homo sapien
ccaagtcagactttcttacattcct

SEQ ID NO: 4557511 - DNA, 25 bp, Homo sapien
tataaagaatttagatcatgcctgt

SEQ ID NO: 4557512 - DNA, 25 bp, Homo sapien
gctgctatcagataagtagatgtca

SEQ ID NO: 4557513 - DNA, 25 bp, Homo sapien
tagatgtcaatgtatacttacaagg

SEQ ID NO: 4557514 - DNA, 25 bp, Homo sapien
caaaatagcgataatggcatgggag

SEQ ID NO: 4557515 - DNA, 25 bp, Homo sapien
cctctaagattgttgagaaaacatg

SEQ ID NO: 4557516 - DNA, 25 bp, Homo sapien
catgttcttacttaatcctggtgtt

SEQ ID NO: 4557517 - DNA, 25 bp, Homo sapien
ttattaatgatgtccaacacctcta

SEQ ID NO: 4557518 - DNA, 25 bp, Homo sapien
aagctagtgcgtgtgaatcttttcc

SEQ ID NO: 4557519 - DNA, 25 bp, Homo sapien
gaaagtcatttcctaaagctagtgc

SEQ ID NO: 4557520 - DNA, 25 bp, Homo sapien
ccttgaattgtgcagaataattgga

SEQ ID NO: 4557521 - DNA, 25 bp, Homo sapien
tgtgaaacttcagaggtaccctgaa

SEQ ID NO: 4557522 - DNA, 25 bp, Homo sapien
tgtaagtgacaaactcaaggttgac

SEQ ID NO: 4557523 - DNA, 25 bp, Homo sapien
aaggttgacaccacacttaatgatg

SEQ ID NO: 4557524 - DNA, 25 bp, Homo sapien
cagcctcataaagggtgtaagtgac

SEQ ID NO: 4557525 - DNA, 25 bp, Homo sapien
tgtgcaagaatgtctaccctcggca

SEQ ID NO: 4557526 - DNA, 25 bp, Homo sapien
gcacttgactccgtgggatcccacg

SEQ ID NO: 4557527 - DNA, 25 bp, Homo sapien
ggatcccacgagacagacacccttt

SEQ ID NO: 4557528 - DNA, 25 bp, Homo sapien
aggaggccccatggagctgacggtg

SEQ ID NO: 4557529 - DNA, 25 bp, Homo sapien
cagagcctttgtgctgtaggacagg

SEQ ID NO: 4557530 - DNA, 25 bp, Homo sapien
accagctgcaagtcagtagggcccc

SEQ ID NO: 4557531 - DNA, 25 bp, Homo sapien
cacagtcacggcttatcacagagaa

SEQ ID NO: 4557532 - DNA, 25 bp, Homo sapien
tcacagagaaggacgcgctggaagc

SEQ ID NO: 4557533 - DNA, 25 bp, Homo sapien
gctccacggagaccagttatcagct

SEQ ID NO: 4557534 - DNA, 25 bp, Homo sapien
tcatcgtaggtgtgtaccgagtgcc

SEQ ID NO: 4557535 - DNA, 25 bp, Homo sapien
gcatctaggtgaggcaaagcgagca

SEQ ID NO: 4557536 - DNA, 25 bp, Homo sapien
cagagcagtcgggtgttcatcgtag

SEQ ID NO: 4557537 - DNA, 25 bp, Homo sapien
actgtctgggatacagctcgcccct

SEQ ID NO: 4557538 - DNA, 25 bp, Homo sapien
cacaattaaagatggagtaaacctt

SEQ ID NO: 4557539 - DNA, 25 bp, Homo sapien
acacaattaaagatggagtaaacct

SEQ ID NO: 4557540 - DNA, 25 bp, Homo sapien
gcttctgactcattgatgccattgt

SEQ ID NO: 4557541 - DNA, 25 bp, Homo sapien
tgagctgtctgtagcttctgactca

SEQ ID NO: 4557542 - DNA, 25 bp, Homo sapien
tttgcatcatatgagctgtctgtag

SEQ ID NO: 4557543 - DNA, 25 bp, Homo sapien
catcatatgagctgtctgtagcttc

SEQ ID NO: 4557544 - DNA, 25 bp, Homo sapien
agaaagaactggacgactaacacct

SEQ ID NO: 4557545 - DNA, 25 bp, Homo sapien
gaaagaactggacgactaacaccta

SEQ ID NO: 4557546 - DNA, 25 bp, Homo sapien
cagaaagaactggacgactaacacc

SEQ ID NO: 4557547 - DNA, 25 bp, Homo sapien
acagaaagaactggacgactaacac

SEQ ID NO: 4557548 - DNA, 25 bp, Homo sapien
tcttccccacatacaagtatttaca

SEQ ID NO: 4557549 - DNA, 25 bp, Homo sapien
gtcttccccacatacaagtatttac

SEQ ID NO: 4557550 - DNA, 25 bp, Homo sapien
agtgcacttacctgcacaactcggt

SEQ ID NO: 4557551 - DNA, 25 bp, Homo sapien
taccatgcaaacctgaacaagtgtg

SEQ ID NO: 4557552 - DNA, 25 bp, Homo sapien
tacactaaactgaaaatcggttctc

SEQ ID NO: 4557553 - DNA, 25 bp, Homo sapien
caactcggtctaagaaccttgtgaa

SEQ ID NO: 4557554 - DNA, 25 bp, Homo sapien
gaagtaactctagagccagacacca

SEQ ID NO: 4557555 - DNA, 25 bp, Homo sapien
tttttaaaccaggatacacagatgc

SEQ ID NO: 4557556 - DNA, 25 bp, Homo sapien
tattcacacagcgttaaacaaaacg

SEQ ID NO: 4557557 - DNA, 25 bp, Homo sapien
taagacttcttaagtgtagacagcc

SEQ ID NO: 4557558 - DNA, 25 bp, Homo sapien
gaaaagtctgacagaactctcaagc

SEQ ID NO: 4557559 - DNA, 25 bp, Homo sapien
tcaagcaagtcagaggtcctcttca

SEQ ID NO: 4557560 - DNA, 25 bp, Homo sapien
tcataagtagtcaagtaaagtttac

SEQ ID NO: 4557561 - DNA, 25 bp, Homo sapien
aaaagttgaatgatacacaaaacta

SEQ ID NO: 4557562 - DNA, 25 bp, Homo sapien
cttaaatggcttaaatccggagcca

SEQ ID NO: 4557563 - DNA, 25 bp, Homo sapien
tacaattctattaattggggatgcg

SEQ ID NO: 4557564 - DNA, 25 bp, Homo sapien
gcttaaatccggagccacttcctct

SEQ ID NO: 4557565 - DNA, 25 bp, Homo sapien
tcgcggaggtccacccttaaatggc

SEQ ID NO: 4557566 - DNA, 25 bp, Homo sapien
ctgttcttggtactttatccaaaat

SEQ ID NO: 4557567 - DNA, 25 bp, Homo sapien
tgttcttggtactttatccaaaata

SEQ ID NO: 4557568 - DNA, 25 bp, Homo sapien
aacaaagaacaaatcatcactgcaa

SEQ ID NO: 4557569 - DNA, 25 bp, Homo sapien
gaacaaagaacaaatcatcactgca

SEQ ID NO: 4557570 - DNA, 25 bp, Homo sapien
tcactgagtcaagccaataactctc

SEQ ID NO: 4557571 - DNA, 25 bp, Homo sapien
cagtagttgcaattcagtctctcag

SEQ ID NO: 4557572 - DNA, 25 bp, Homo sapien
tcaggcagatctagggttttcagta

SEQ ID NO: 4557573 - DNA, 25 bp, Homo sapien
tgctggcagaaaaactggttagtta

SEQ ID NO: 4557574 - DNA, 25 bp, Homo sapien
ataaagtgttggttgtgtgctggca

SEQ ID NO: 4557575 - DNA, 25 bp, Homo sapien
cgtatcatgatagctaggcccttga

SEQ ID NO: 4557576 - DNA, 25 bp, Homo sapien
aatgttgggttatcatgcctgctcc

SEQ ID NO: 4557577 - DNA, 25 bp, Homo sapien
gcttgtgtcccgtccatggcgttca

SEQ ID NO: 4557578 - DNA, 25 bp, Homo sapien
aaccacatgtcgctcctcaggatag

SEQ ID NO: 4557579 - DNA, 25 bp, Homo sapien
cagggggagcgcctctcacactgtg

SEQ ID NO: 4557580 - DNA, 25 bp, Homo sapien
cacactgtgccctgatacttctctc

SEQ ID NO: 4557581 - DNA, 25 bp, Homo sapien
cgaagcgctgctacgattcccaggg

SEQ ID NO: 4557582 - DNA, 25 bp, Homo sapien
ggtctgtgatgactcctctgtctcc

SEQ ID NO: 4557583 - DNA, 25 bp, Homo sapien
tgcagtaggtcgtgcttttttcccc

SEQ ID NO: 4557584 - DNA, 25 bp, Homo sapien
tcaggcctgtcatgaataatcaccg

SEQ ID NO: 4557585 - DNA, 25 bp, Homo sapien
tctaggatgagtgatatcaggcctg

SEQ ID NO: 4557586 - DNA, 25 bp, Homo sapien
gaagcttggatcttcccttcgtgca

SEQ ID NO: 4557587 - DNA, 25 bp, Homo sapien
cgagagtagtcggatccatggccaa

SEQ ID NO: 4557588 - DNA, 25 bp, Homo sapien
gcccctctctcggtgatcaaagtca

SEQ ID NO: 4557589 - DNA, 25 bp, Homo sapien
aaatctgttctgttggcgagagtag

SEQ ID NO: 4557590 - DNA, 25 bp, Homo sapien
tattctcgctccagtaaggatcatc

SEQ ID NO: 4557591 - DNA, 25 bp, Homo sapien
cttcccatccctgttgatcatgact

SEQ ID NO: 4557592 - DNA, 25 bp, Homo sapien
tgttcccacttgctagtgcactggg

SEQ ID NO: 4557593 - DNA, 25 bp, Homo sapien
tattgaagcctactatgacaatgta

SEQ ID NO: 4557594 - DNA, 25 bp, Homo sapien
tgggtctaccccagtactgtaatcc

SEQ ID NO: 4557595 - DNA, 25 bp, Homo sapien
cttgttcataacgaagctgctgttg

SEQ ID NO: 4557596 - DNA, 25 bp, Homo sapien
ctatgatctacatcacgtgggcgtt

SEQ ID NO: 4557597 - DNA, 25 bp, Homo sapien
tctttctcgagcaatccgttcagct

SEQ ID NO: 4557598 - DNA, 25 bp, Homo sapien
catcacgtgggcgtttcaaggaatt

SEQ ID NO: 4557599 - DNA, 25 bp, Homo sapien
gagcctggattacaactactctgga

SEQ ID NO: 4557600 - DNA, 25 bp, Homo sapien
aagtgccttaaaaccctgaggtgca

SEQ ID NO: 4557601 - DNA, 25 bp, Homo sapien
ttaatatgcatggagactaagtgcc

SEQ ID NO: 4557602 - DNA, 25 bp, Homo sapien
taagactgggatagtgacagagcct

SEQ ID NO: 4557603 - DNA, 25 bp, Homo sapien
tctctctctgtaagcgttcccgttc

SEQ ID NO: 4557604 - DNA, 25 bp, Homo sapien
caagcgttcgcgttccattctctct

SEQ ID NO: 4557605 - DNA, 25 bp, Homo sapien
tgttcaatacgaatgcgttcccttt

SEQ ID NO: 4557606 - DNA, 25 bp, Homo sapien
ttctaatgcgttctcgctctcgacg

SEQ ID NO: 4557607 - DNA, 25 bp, Homo sapien
cagaaatatggcttacaactagtgt

SEQ ID NO: 4557608 - DNA, 25 bp, Homo sapien
cttgttagccatgtggccattggaa

SEQ ID NO: 4557609 - DNA, 25 bp, Homo sapien
gcataactagccttacagaactgtt

SEQ ID NO: 4557610 - DNA, 25 bp, Homo sapien
tgagtcccgactctgccacttgtta

SEQ ID NO: 4557611 - DNA, 25 bp, Homo sapien
ttttatctagactagctctctcctt

SEQ ID NO: 4557612 - DNA, 25 bp, Homo sapien
cttcgaagttccattgctcgtcgca

SEQ ID NO: 4557613 - DNA, 25 bp, Homo sapien
gctcgtcgcagcctttcaaaacgaa

SEQ ID NO: 4557614 - DNA, 25 bp, Homo sapien
cgaactaaatgttctctcaaccttt

SEQ ID NO: 4557615 - DNA, 25 bp, Homo sapien
tagtatacaaccatcctgatcagag

SEQ ID NO: 4557616 - DNA, 25 bp, Homo sapien
gttcaaatgactagtaacatttcct

SEQ ID NO: 4557617 - DNA, 25 bp, Homo sapien
tacgcaaagatggttatggaaaaac

SEQ ID NO: 4557618 - DNA, 25 bp, Homo sapien
tgggtttgctagcatgcaagtacgc

SEQ ID NO: 4557619 - DNA, 25 bp, Homo sapien
tggtctacaatgatctcctttagtt

SEQ ID NO: 4557620 - DNA, 25 bp, Homo sapien
tgatggtctacaatgatctccttta

SEQ ID NO: 4557621 - DNA, 25 bp, Homo sapien
ctttagtttggtctagtattaccat

SEQ ID NO: 4557622 - DNA, 25 bp, Homo sapien
tctacaatgatctcctttagtttgg

SEQ ID NO: 4557623 - DNA, 25 bp, Homo sapien
atgtttggccacttgctccattatc

SEQ ID NO: 4557624 - DNA, 25 bp, Homo sapien
tgtttggccacttgctccattatca

SEQ ID NO: 4557625 - DNA, 25 bp, Homo sapien
gtttggccacttgctccattatcat

SEQ ID NO: 4557626 - DNA, 25 bp, Homo sapien
attttcttagtatccttgctttctt

SEQ ID NO: 4557627 - DNA, 25 bp, Homo sapien
tattttcttagtatccttgctttct

SEQ ID NO: 4557628 - DNA, 25 bp, Homo sapien
tctattttcttagtatccttgcttt

SEQ ID NO: 4557629 - DNA, 25 bp, Homo sapien
cttctattttcttagtatccttgct

SEQ ID NO: 4557630 - DNA, 25 bp, Homo sapien
gatttctcagacgatcttttctctt

SEQ ID NO: 4557631 - DNA, 25 bp, Homo sapien
tttctcagacgatcttttctcttct

SEQ ID NO: 4557632 - DNA, 25 bp, Homo sapien
agatttctcagacgatcttttctct

SEQ ID NO: 4557633 - DNA, 25 bp, Homo sapien
atttctcagacgatcttttctcttc

SEQ ID NO: 4557634 - DNA, 25 bp, Homo sapien
aaagtctatctgcttatcaaaataa

SEQ ID NO: 4557635 - DNA, 25 bp, Homo sapien
aaaaaacagaatgagtacttcataa

SEQ ID NO: 4557636 - DNA, 25 bp, Homo sapien
aaacagaatgagtacttcataatgt

SEQ ID NO: 4557637 - DNA, 25 bp, Homo sapien
aaaagtctatctgcttatcaaaata

SEQ ID NO: 4557638 - DNA, 25 bp, Homo sapien
aacttcttgaactactcttttcatc

SEQ ID NO: 4557639 - DNA, 25 bp, Homo sapien
gaacttcttgaactactcttttcat

SEQ ID NO: 4557640 - DNA, 25 bp, Homo sapien
tataagaagtgtgctaatggcagaa

SEQ ID NO: 4557641 - DNA, 25 bp, Homo sapien
ttgataaacagttagggaagcttac

SEQ ID NO: 4557642 - DNA, 25 bp, Homo sapien
acagctatgagttgagaactagcca

SEQ ID NO: 4557643 - DNA, 25 bp, Homo sapien
gaactagccatcaaattagacttgc

SEQ ID NO: 4557644 - DNA, 25 bp, Homo sapien
cagctcagtgcgatgaagatgtgca

SEQ ID NO: 4557645 - DNA, 25 bp, Homo sapien
gccccaggacttcgagcatttgtaa

SEQ ID NO: 4557646 - DNA, 25 bp, Homo sapien
tgtgcaatacacctggacacctctg

SEQ ID NO: 4557647 - DNA, 25 bp, Homo sapien
aatgccatagcattttgccccagga

SEQ ID NO: 4557648 - DNA, 25 bp, Homo sapien
tgaagtacactaaataaggtccctg

SEQ ID NO: 4557649 - DNA, 25 bp, Homo sapien
gaaaggctgatttgctccatagcca

SEQ ID NO: 4557650 - DNA, 25 bp, Homo sapien
caggcaactcactaattgaagcagg

SEQ ID NO: 4557651 - DNA, 25 bp, Homo sapien
gaacgattcggtgctgaacaaagaa

SEQ ID NO: 4557652 - DNA, 25 bp, Homo sapien
ggtattagatgaaagtccactaacc

SEQ ID NO: 4557653 - DNA, 25 bp, Homo sapien
tgccaaagaggttcttcaaatcagc

SEQ ID NO: 4557654 - DNA, 25 bp, Homo sapien
actgctaccactagtactacttgta

SEQ ID NO: 4557655 - DNA, 25 bp, Homo sapien
gctttggtattagatgaaagtccac

SEQ ID NO: 4557656 - DNA, 25 bp, Homo sapien
caaacagacaacatgactagtgagg

SEQ ID NO: 4557657 - DNA, 25 bp, Homo sapien
gggaaaaaatctgaacgtatgtaca

SEQ ID NO: 4557658 - DNA, 25 bp, Homo sapien
tatagtctaccactgcactgaatag

SEQ ID NO: 4557659 - DNA, 25 bp, Homo sapien
gacgttactatatcaaaatcctgtg

SEQ ID NO: 4557660 - DNA, 25 bp, Homo sapien
tgatgtcttgctgtctttagattcc

SEQ ID NO: 4557661 - DNA, 25 bp, Homo sapien
atgtcttgctgtctttagattcctt

SEQ ID NO: 4557662 - DNA, 25 bp, Homo sapien
atgatgtcttgctgtctttagattc

SEQ ID NO: 4557663 - DNA, 25 bp, Homo sapien
gatgtcttgctgtctttagattcct

SEQ ID NO: 4557664 - DNA, 25 bp, Homo sapien
caaattaacaattccaaaggcctag

SEQ ID NO: 4557665 - DNA, 25 bp, Homo sapien
ggcctagattaggttatttgaacaa

SEQ ID NO: 4557666 - DNA, 25 bp, Homo sapien
ctatatttcaaactagtgctattca

SEQ ID NO: 4557667 - DNA, 25 bp, Homo sapien
gactccctgaggattcttgcactga

SEQ ID NO: 4557668 - DNA, 25 bp, Homo sapien
gagtgatcttattgaatgctggaat

SEQ ID NO: 4557669 - DNA, 25 bp, Homo sapien
gctggaattcagtatcgtaaagaac

SEQ ID NO: 4557670 - DNA, 25 bp, Homo sapien
cgtaaagaactgacatagaaaaaca

SEQ ID NO: 4557671 - DNA, 25 bp, Homo sapien
tattataggcaggatcataagacac

SEQ ID NO: 4557672 - DNA, 25 bp, Homo sapien
catctcataatccttgctttccttc

SEQ ID NO: 4557673 - DNA, 25 bp, Homo sapien
ccttcttaccatctttatggttcgc

SEQ ID NO: 4557674 - DNA, 25 bp, Homo sapien
ggtcacccttcacgcagtcttcctt

SEQ ID NO: 4557675 - DNA, 25 bp, Homo sapien
ccagaggccccagtagacgagggcc

SEQ ID NO: 4557676 - DNA, 25 bp, Homo sapien
tcagcttctttcacagtcgtatgag

SEQ ID NO: 4557677 - DNA, 25 bp, Homo sapien
tacctgtttctaggaggtcatcacc

SEQ ID NO: 4557678 - DNA, 25 bp, Homo sapien
catcttcagcctggattgtgaccga

SEQ ID NO: 4557679 - DNA, 25 bp, Homo sapien
ttgtgaccgagatgttgtcatcctc

SEQ ID NO: 4557680 - DNA, 25 bp, Homo sapien
ctgaaggaagaggtttagatacttc

SEQ ID NO: 4557681 - DNA, 25 bp, Homo sapien
ggaagaggtttagatacttcttgtg

SEQ ID NO: 4557682 - DNA, 25 bp, Homo sapien
agatacttcttgtgtaccatcacca

SEQ ID NO: 4557683 - DNA, 25 bp, Homo sapien
aggtttagatacttcttgtgtacca

SEQ ID NO: 4557684 - DNA, 25 bp, Homo sapien
gtcttcagagtatttcagagcccca

SEQ ID NO: 4557685 - DNA, 25 bp, Homo sapien
tcaatgcttgagtagtccggattcg

SEQ ID NO: 4557686 - DNA, 25 bp, Homo sapien
catggtgacttcttgacaggtaaca

SEQ ID NO: 4557687 - DNA, 25 bp, Homo sapien
tgggattgaaccctagtgaccttca

SEQ ID NO: 4557688 - DNA, 25 bp, Homo sapien
cagctcgtctaaactaaaattgtca

SEQ ID NO: 4557689 - DNA, 25 bp, Homo sapien
ttgtattgaatgagacagctcgtct

SEQ ID NO: 4557690 - DNA, 25 bp, Homo sapien
cactgtgagttatgcactaggactc

SEQ ID NO: 4557691 - DNA, 25 bp, Homo sapien
taagcacacatgagttactgcagtg

SEQ ID NO: 4557692 - DNA, 25 bp, Homo sapien
tttctcattttcttcttcctcacca

SEQ ID NO: 4557693 - DNA, 25 bp, Homo sapien
ctttctcattttcttcttcctcacc

SEQ ID NO: 4557694 - DNA, 25 bp, Homo sapien
tctcattttcttcttcctcaccatc

SEQ ID NO: 4557695 - DNA, 25 bp, Homo sapien
ttctcattttcttcttcctcaccat

SEQ ID NO: 4557696 - DNA, 25 bp, Homo sapien
gcagaagtacgctgtttaaagtcag

SEQ ID NO: 4557697 - DNA, 25 bp, Homo sapien
tacaagctgagccaccgtacacagc

SEQ ID NO: 4557698 - DNA, 25 bp, Homo sapien
cactgtgccctaccaaatgttttaa

SEQ ID NO: 4557699 - DNA, 25 bp, Homo sapien
gaggcttaagaatgtgcatctgacg

SEQ ID NO: 4557700 - DNA, 25 bp, Homo sapien
taagaccattatactgtgctctaag

SEQ ID NO: 4557701 - DNA, 25 bp, Homo sapien
gctcggccataagctaagaagtaaa

SEQ ID NO: 4557702 - DNA, 25 bp, Homo sapien
tatttggactaagttaaagtgtgcc

SEQ ID NO: 4557703 - DNA, 25 bp, Homo sapien
tagtccagaacaagtaaatgatcaa

SEQ ID NO: 4557704 - DNA, 25 bp, Homo sapien
actgcatccagccagattaaatttt

SEQ ID NO: 4557705 - DNA, 25 bp, Homo sapien
gcatccagccagattaaattttcta

SEQ ID NO: 4557706 - DNA, 25 bp, Homo sapien
tcccacctcggtctacctcctgagt

SEQ ID NO: 4557707 - DNA, 25 bp, Homo sapien
ccagccagattaaattttctactgt

SEQ ID NO: 4557708 - DNA, 25 bp, Homo sapien
gccaacccttgctctatgggataag

SEQ ID NO: 4557709 - DNA, 25 bp, Homo sapien
ttaacgctgaatctgagagcaagcc

SEQ ID NO: 4557710 - DNA, 25 bp, Homo sapien
taaggataataactgcgatggacca

SEQ ID NO: 4557711 - DNA, 25 bp, Homo sapien
gcagcaactggcaaactacatgaga

SEQ ID NO: 4557712 - DNA, 25 bp, Homo sapien
gctgttagaaaggtatcatcttcac

SEQ ID NO: 4557713 - DNA, 25 bp, Homo sapien
tgtactaacatacttcaaggcagga

SEQ ID NO: 4557714 - DNA, 25 bp, Homo sapien
tagccatgtcgctagagaattagaa

SEQ ID NO: 4557715 - DNA, 25 bp, Homo sapien
caccaagtaatgttggcaatgccag

SEQ ID NO: 4557716 - DNA, 25 bp, Homo sapien
tgtataatatctgcgataccatggg

SEQ ID NO: 4557717 - DNA, 25 bp, Homo sapien
ttctgcagagagtaactccttggaa

SEQ ID NO: 4557718 - DNA, 25 bp, Homo sapien
tctgcctctattaattcatgagctc

SEQ ID NO: 4557719 - DNA, 25 bp, Homo sapien
gagagtaactccttggaatgcacat

SEQ ID NO: 4557720 - DNA, 25 bp, Homo sapien
gcctctattaattcatgagctctct

SEQ ID NO: 4557721 - DNA, 25 bp, Homo sapien
caactagaggcaaagtagtgtgggc

SEQ ID NO: 4557722 - DNA, 25 bp, Homo sapien
ggaaatttctatcgagaggtgggca

SEQ ID NO: 4557723 - DNA, 25 bp, Homo sapien
tagtgtgggctatccaccaaacgtt

SEQ ID NO: 4557724 - DNA, 25 bp, Homo sapien
gaggcagaggcatgactactaatca

SEQ ID NO: 4557725 - DNA, 25 bp, Homo sapien
gctttctacctaaaggcctggagag

SEQ ID NO: 4557726 - DNA, 25 bp, Homo sapien
catgatgcaaaatactaggcttaaa

SEQ ID NO: 4557727 - DNA, 25 bp, Homo sapien
aattgtctcgtagctattcccctgg

SEQ ID NO: 4557728 - DNA, 25 bp, Homo sapien
caaattaccaatatccttccctgtg

SEQ ID NO: 4557729 - DNA, 25 bp, Homo sapien
acagaagcatctccactcaactcat

SEQ ID NO: 4557730 - DNA, 25 bp, Homo sapien
cagaagcatctccactcaactcatc

SEQ ID NO: 4557731 - DNA, 25 bp, Homo sapien
agaagcatctccactcaactcatct

SEQ ID NO: 4557732 - DNA, 25 bp, Homo sapien
gacagtgctactacctagttcaagc

SEQ ID NO: 4557733 - DNA, 25 bp, Homo sapien
tagtctcctcggtagctcctatctg

SEQ ID NO: 4557734 - DNA, 25 bp, Homo sapien
tctttcctaagaccaacgaatgaac

SEQ ID NO: 4557735 - DNA, 25 bp, Homo sapien
ttgcctacaactggcacagacagtg

SEQ ID NO: 4557736 - DNA, 25 bp, Homo sapien
ttggagacactgtctcgctcttctt

SEQ ID NO: 4557737 - DNA, 25 bp, Homo sapien
tttggagacactgtctcgctcttct

SEQ ID NO: 4557738 - DNA, 25 bp, Homo sapien
caggccatgccttgtattgtttgca

SEQ ID NO: 4557739 - DNA, 25 bp, Homo sapien
ggagtatcttaatcacaggccatgc

SEQ ID NO: 4557740 - DNA, 25 bp, Homo sapien
cagtcatacaataggtcactctgag

SEQ ID NO: 4557741 - DNA, 25 bp, Homo sapien
catttttctgaaaggccttgcacat

SEQ ID NO: 4557742 - DNA, 25 bp, Homo sapien
aaaatacatactgatgcctgggccc

SEQ ID NO: 4557743 - DNA, 25 bp, Homo sapien
ttcaaatgactaacgcagagtgcag

SEQ ID NO: 4557744 - DNA, 25 bp, Homo sapien
taaacctcctgtaagtacttgcaca

SEQ ID NO: 4557745 - DNA, 25 bp, Homo sapien
cagatcatgagccactaagacaagt

SEQ ID NO: 4557746 - DNA, 25 bp, Homo sapien
tattacgtgccatgctctacaccag

SEQ ID NO: 4557747 - DNA, 25 bp, Homo sapien
tctacaccaggcattacagagacag

SEQ ID NO: 4557748 - DNA, 25 bp, Homo sapien
taaatgaaaaactatgtcctggcct

SEQ ID NO: 4557749 - DNA, 25 bp, Homo sapien
acatctgaacatactacagctggag

SEQ ID NO: 4557750 - DNA, 25 bp, Homo sapien
gatatatatacctgtcataaaatgt

SEQ ID NO: 4557751 - DNA, 25 bp, Homo sapien
caacctgggactatgattaatacac

SEQ ID NO: 4557752 - DNA, 25 bp, Homo sapien
aaatgatgttcctagtcaaaactga

SEQ ID NO: 4557753 - DNA, 25 bp, Homo sapien
taatagtcaactcaaacaacctggg

SEQ ID NO: 4557754 - DNA, 25 bp, Homo sapien
gccactgtccttataggagggagaa

SEQ ID NO: 4557755 - DNA, 25 bp, Homo sapien
tccggaagcaataaagaactgttct

SEQ ID NO: 4557756 - DNA, 25 bp, Homo sapien
tcagcttcagccgaatcttaagggc

SEQ ID NO: 4557757 - DNA, 25 bp, Homo sapien
gatatatcatgtccaccctctgcca

SEQ ID NO: 4557758 - DNA, 25 bp, Homo sapien
gagtatcagttgaaacagttaattc

SEQ ID NO: 4557759 - DNA, 25 bp, Homo sapien
gttggtttcttgtttggagtatcag

SEQ ID NO: 4557760 - DNA, 25 bp, Homo sapien
tattatctggatcgcctccttcctc

SEQ ID NO: 4557761 - DNA, 25 bp, Homo sapien
ttaattcaatattatctggatcgcc

SEQ ID NO: 4557762 - DNA, 25 bp, Homo sapien
tgccgttccgcaggtcccagcggct

SEQ ID NO: 4557763 - DNA, 25 bp, Homo sapien
ccgttccgcaggtcccagcggctgc

SEQ ID NO: 4557764 - DNA, 25 bp, Homo sapien
catgccgttccgcaggtcccagcgg

SEQ ID NO: 4557765 - DNA, 25 bp, Homo sapien
atgccgttccgcaggtcccagcggc

SEQ ID NO: 4557766 - DNA, 25 bp, Homo sapien
agctcggacttcagatcgatgaccc

SEQ ID NO: 4557767 - DNA, 25 bp, Homo sapien
tcgatgacccgcagatcggtgatct

SEQ ID NO: 4557768 - DNA, 25 bp, Homo sapien
tgatgtctaagttccgccgcttcag

SEQ ID NO: 4557769 - DNA, 25 bp, Homo sapien
cttgagtcgggagatgagcacggtc

SEQ ID NO: 4557770 - DNA, 25 bp, Homo sapien
tgcagggcggcggcagcagcgccaa

SEQ ID NO: 4557771 - DNA, 25 bp, Homo sapien
ccgaggcagcgagtgggctgcaggg

SEQ ID NO: 4557772 - DNA, 25 bp, Homo sapien
ctgcagggcggcggcagcagcgcca

SEQ ID NO: 4557773 - DNA, 25 bp, Homo sapien
ctgccgaggcagcgagtgggctgca

SEQ ID NO: 4557774 - DNA, 25 bp, Homo sapien
ccggcgccgcgcagcgctgcgcaca

SEQ ID NO: 4557775 - DNA, 25 bp, Homo sapien
cttccacccaggcctcggcggccgc

SEQ ID NO: 4557776 - DNA, 25 bp, Homo sapien
ttccacccaggcctcggcggccgcc

SEQ ID NO: 4557777 - DNA, 25 bp, Homo sapien
ccgccggcgccgcgcagcgctgcgc

SEQ ID NO: 4557778 - DNA, 25 bp, Homo sapien
tcccccggtccgccaccctagcgca

SEQ ID NO: 4557779 - DNA, 25 bp, Homo sapien
ccgcgcgtgcgcgttggcgcaggga

SEQ ID NO: 4557780 - DNA, 25 bp, Homo sapien
tgtggactgggaggtcgggcacgtc

SEQ ID NO: 4557781 - DNA, 25 bp, Homo sapien
cacttgggcggtgcgctcccttgtg

SEQ ID NO: 4557782 - DNA, 25 bp, Homo sapien
gcagcggcgcgctcggtcgagcggg

SEQ ID NO: 4557783 - DNA, 25 bp, Homo sapien
gatgtgcgggcactgaatgacatag

SEQ ID NO: 4557784 - DNA, 25 bp, Homo sapien
cgcgttactcaacacaaaccgaggg

SEQ ID NO: 4557785 - DNA, 25 bp, Homo sapien
gcaacgtcttgagtcttgagcaaca

SEQ ID NO: 4557786 - DNA, 25 bp, Homo sapien
cgccgttctctcgtcgcttcgttag

SEQ ID NO: 4557787 - DNA, 25 bp, Homo sapien
ttgaagtttcagagcgtcagaccca

SEQ ID NO: 4557788 - DNA, 25 bp, Homo sapien
gaccgaacctgtacgaaagcagtga

SEQ ID NO: 4557789 - DNA, 25 bp, Homo sapien
caaaggccgacagtctgagatgccc

SEQ ID NO: 4557790 - DNA, 25 bp, Homo sapien
tcatggtggtacacccaaaggccga

SEQ ID NO: 4557791 - DNA, 25 bp, Homo sapien
cagtggtgcattaaactaatggccc

SEQ ID NO: 4557792 - DNA, 25 bp, Homo sapien
gttcttcatgactacacatttgcag

SEQ ID NO: 4557793 - DNA, 25 bp, Homo sapien
gttgactcttgaggtagctcttcca

SEQ ID NO: 4557794 - DNA, 25 bp, Homo sapien
ggtctaccaggttgaaactatttca

SEQ ID NO: 4557795 - DNA, 25 bp, Homo sapien
gtgctgaaccattagaaattgccca

SEQ ID NO: 4557796 - DNA, 25 bp, Homo sapien
ccattagaaattgcccagataatcc

SEQ ID NO: 4557797 - DNA, 25 bp, Homo sapien
tagaaattgcccagataatccagtc

SEQ ID NO: 4557798 - DNA, 25 bp, Homo sapien
gaaccattagaaattgcccagataa

SEQ ID NO: 4557799 - DNA, 25 bp, Homo sapien
tgcagtctctggaagtctagcactt

SEQ ID NO: 4557800 - DNA, 25 bp, Homo sapien
agagacacttgggaagtgagaccca

SEQ ID NO: 4557801 - DNA, 25 bp, Homo sapien
tcaaagataaccttggaaatcccta

SEQ ID NO: 4557802 - DNA, 25 bp, Homo sapien
cactgtctgaatatactgatccaag

SEQ ID NO: 4557803 - DNA, 25 bp, Homo sapien
tgcgccctgcccgattttcttttat

SEQ ID NO: 4557804 - DNA, 25 bp, Homo sapien
agttctcatgcaagtcggccacagg

SEQ ID NO: 4557805 - DNA, 25 bp, Homo sapien
tagaaactcctcctgcttactggta

SEQ ID NO: 4557806 - DNA, 25 bp, Homo sapien
tgcagcagaagttgtggaccttacc

SEQ ID NO: 4557807 - DNA, 25 bp, Homo sapien
tactgttatacagcccttgaggcag

SEQ ID NO: 4557808 - DNA, 25 bp, Homo sapien
gtagccaaccttccacagtgtcaga

SEQ ID NO: 4557809 - DNA, 25 bp, Homo sapien
gtaccactggcacttctataggagg

SEQ ID NO: 4557810 - DNA, 25 bp, Homo sapien
caaatccatctacctctgagcaggc

SEQ ID NO: 4557811 - DNA, 25 bp, Homo sapien
gaatggaatcacaagctactagcgc

SEQ ID NO: 4557812 - DNA, 25 bp, Homo sapien
cgtgatagccacgttggtctcaatc

SEQ ID NO: 4557813 - DNA, 25 bp, Homo sapien
tgacctcgtgatctgcctgcctcag

SEQ ID NO: 4557814 - DNA, 25 bp, Homo sapien
caccgtgatagccacgttggtctca

SEQ ID NO: 4557815 - DNA, 25 bp, Homo sapien
gacctcgtgatctgcctgcctcagc

SEQ ID NO: 4557816 - DNA, 25 bp, Homo sapien
ctgctcgcgaggctgaggtaagata

SEQ ID NO: 4557817 - DNA, 25 bp, Homo sapien
gaggtaagataattgcctgaacctg

SEQ ID NO: 4557818 - DNA, 25 bp, Homo sapien
gctcgcgaggctgaggtaagataat

SEQ ID NO: 4557819 - DNA, 25 bp, Homo sapien
cgaggctgaggtaagataattgcct

SEQ ID NO: 4557820 - DNA, 25 bp, Homo sapien
tcggctatagcatcttttataaact

SEQ ID NO: 4557821 - DNA, 25 bp, Homo sapien
tcctctaaactagtaggactattcc

SEQ ID NO: 4557822 - DNA, 25 bp, Homo sapien
taggactattcccttcttgcacctt

SEQ ID NO: 4557823 - DNA, 25 bp, Homo sapien
ctgcactcggctatagcatctttta

SEQ ID NO: 4557824 - DNA, 25 bp, Homo sapien
gcttgtgaccctaaacttgcaggca

SEQ ID NO: 4557825 - DNA, 25 bp, Homo sapien
taccatccttaatactgggaacaga

SEQ ID NO: 4557826 - DNA, 25 bp, Homo sapien
tcagatgcaggtggtagtcacatca

SEQ ID NO: 4557827 - DNA, 25 bp, Homo sapien
caggcaaggttagctgctttagtaa

SEQ ID NO: 4557828 - DNA, 25 bp, Homo sapien
gatactttcatatacaggatagcct

SEQ ID NO: 4557829 - DNA, 25 bp, Homo sapien
taagccacctgctttgtaagtggat

SEQ ID NO: 4557830 - DNA, 25 bp, Homo sapien
tctgcagatactgtgaggcacaaat

SEQ ID NO: 4557831 - DNA, 25 bp, Homo sapien
tacattaccaagagtcgatcactga

SEQ ID NO: 4557832 - DNA, 25 bp, Homo sapien
cagttgtgataaactgatcgtttga

SEQ ID NO: 4557833 - DNA, 25 bp, Homo sapien
agtgataaactgataatttgaaaca

SEQ ID NO: 4557834 - DNA, 25 bp, Homo sapien
gaaccataacagttgacttagagaa

SEQ ID NO: 4557835 - DNA, 25 bp, Homo sapien
ttgttaacatgcaagtgataaactg

SEQ ID NO: 4557836 - DNA, 25 bp, Homo sapien
tactcgaggtggtgaactaggttcc

SEQ ID NO: 4557837 - DNA, 25 bp, Homo sapien
gttggtctacaagtcatctgagggc

SEQ ID NO: 4557838 - DNA, 25 bp, Homo sapien
cactggctactgagagagttcactt

SEQ ID NO: 4557839 - DNA, 25 bp, Homo sapien
taactaagggcaggctatactcgag

SEQ ID NO: 4557840 - DNA, 25 bp, Homo sapien
gcaagcgacgcggtatttgaatcct

SEQ ID NO: 4557841 - DNA, 25 bp, Homo sapien
tcaaaattcagaggcgtcctacgtc

SEQ ID NO: 4557842 - DNA, 25 bp, Homo sapien
tcagccaatgagagtgcgagagtgc

SEQ ID NO: 4557843 - DNA, 25 bp, Homo sapien
tgaatcctggaacaaggctacagcg

SEQ ID NO: 4557844 - DNA, 25 bp, Homo sapien
tgtgggcttgaattgtaccgggacc

SEQ ID NO: 4557845 - DNA, 25 bp, Homo sapien
tcctttgccgaaagctagagggccc

SEQ ID NO: 4557846 - DNA, 25 bp, Homo sapien
tgtacggcgtgtttcatcaggcaac

SEQ ID NO: 4557847 - DNA, 25 bp, Homo sapien
caactaagggacctgtgatggcggc

SEQ ID NO: 4557848 - DNA, 25 bp, Homo sapien
gcccatccgtggtagatttttaata

SEQ ID NO: 4557849 - DNA, 25 bp, Homo sapien
caataatgaccctgagatactacaa

SEQ ID NO: 4557850 - DNA, 25 bp, Homo sapien
aaatcccaggtagcatgcattcctc

SEQ ID NO: 4557851 - DNA, 25 bp, Homo sapien
tcctctttgggcaggaaagcacaac

SEQ ID NO: 4557852 - DNA, 25 bp, Homo sapien
tatctactggcaactagggctgttt

SEQ ID NO: 4557853 - DNA, 25 bp, Homo sapien
cagtgacaactcagtagtagtgagc

SEQ ID NO: 4557854 - DNA, 25 bp, Homo sapien
aaggtgagcctagaacaatttgtgc

SEQ ID NO: 4557855 - DNA, 25 bp, Homo sapien
tagtcctcacgtaggaaatagcaaa

SEQ ID NO: 4557856 - DNA, 25 bp, Homo sapien
tgtgccccgccaatttatatatctt

SEQ ID NO: 4557857 - DNA, 25 bp, Homo sapien
tcttattatcaattgacagctgttc

SEQ ID NO: 4557858 - DNA, 25 bp, Homo sapien
gtgcaatggcgttaatatcgctcat

SEQ ID NO: 4557859 - DNA, 25 bp, Homo sapien
gcgttaatatcgctcattacctcaa

SEQ ID NO: 4557860 - DNA, 25 bp, Homo sapien
gaagtattggaagtcatgcagcaca

SEQ ID NO: 4557861 - DNA, 25 bp, Homo sapien
gaaggactcttacctgtgcaacgtc

SEQ ID NO: 4557862 - DNA, 25 bp, Homo sapien
ggctcttgagctcataacagggaca

SEQ ID NO: 4557863 - DNA, 25 bp, Homo sapien
gatcgtatgggacctttggcacttg

SEQ ID NO: 4557864 - DNA, 25 bp, Homo sapien
gctgctctctaattcctgcatagga

SEQ ID NO: 4557865 - DNA, 25 bp, Homo sapien
tggcttgggcaagacctttttacca

SEQ ID NO: 4557866 - DNA, 25 bp, Homo sapien
gggcccgtggcatcctgttcaaggt

SEQ ID NO: 4557867 - DNA, 25 bp, Homo sapien
tgggaggataaccatgacactttcc

SEQ ID NO: 4557868 - DNA, 25 bp, Homo sapien
ttgtggcctctggatagtagccctg

SEQ ID NO: 4557869 - DNA, 25 bp, Homo sapien
accagtataagggatcccgtttcag

SEQ ID NO: 4557870 - DNA, 25 bp, Homo sapien
cagtataagggatcccgtttcagct

SEQ ID NO: 4557871 - DNA, 25 bp, Homo sapien
gcctctggatagtagccctgtgtca

SEQ ID NO: 4557872 - DNA, 25 bp, Homo sapien
ctgctaatcagtcgggtcctggact

SEQ ID NO: 4557873 - DNA, 25 bp, Homo sapien
ggctgctaatcagtcgggtcctgga

SEQ ID NO: 4557874 - DNA, 25 bp, Homo sapien
tttggctgctaatcagtcgggtcct

SEQ ID NO: 4557875 - DNA, 25 bp, Homo sapien
gaatttggctgctaatcagtcgggt

SEQ ID NO: 4557876 - DNA, 25 bp, Homo sapien
tctggctagcggtctttgaaatttt

SEQ ID NO: 4557877 - DNA, 25 bp, Homo sapien
gattttggatcattcctgctttcac

SEQ ID NO: 4557878 - DNA, 25 bp, Homo sapien
ctggctagcggtctttgaaattttg

SEQ ID NO: 4557879 - DNA, 25 bp, Homo sapien
cgattttggatcattcctgctttca

SEQ ID NO: 4557880 - DNA, 25 bp, Homo sapien
cagcgcaatgatgggtcttgagtct

SEQ ID NO: 4557881 - DNA, 25 bp, Homo sapien
cgcaatgatgggtcttgagtcttta

SEQ ID NO: 4557882 - DNA, 25 bp, Homo sapien
catacagcgcaatgatgggtcttga

SEQ ID NO: 4557883 - DNA, 25 bp, Homo sapien
tcctgcatacagcgcaatgatgggt

SEQ ID NO: 4557884 - DNA, 25 bp, Homo sapien
cagcaggcaccccaaactaaaatgt

SEQ ID NO: 4557885 - DNA, 25 bp, Homo sapien
tccctcatagggtggtgctaagtaa

SEQ ID NO: 4557886 - DNA, 25 bp, Homo sapien
tactttcttagatggcacagcaggc

SEQ ID NO: 4557887 - DNA, 25 bp, Homo sapien
taactctgaacgtgggtgctttggg

SEQ ID NO: 4557888 - DNA, 25 bp, Homo sapien
gatggttcccagttacacacaagtg

SEQ ID NO: 4557889 - DNA, 25 bp, Homo sapien
tgttttgtgacctagagcccgatgg

SEQ ID NO: 4557890 - DNA, 25 bp, Homo sapien
catttgttgggcatctccttgagcc

SEQ ID NO: 4557891 - DNA, 25 bp, Homo sapien
tcagcatttcagcatctctacgcag

SEQ ID NO: 4557892 - DNA, 25 bp, Homo sapien
aggcctctgtccagggcttgtgaat

SEQ ID NO: 4557893 - DNA, 25 bp, Homo sapien
tggtctttcctctggcatgttggtc

SEQ ID NO: 4557894 - DNA, 25 bp, Homo sapien
agggcttgtgaatggctgtcttctc

SEQ ID NO: 4557895 - DNA, 25 bp, Homo sapien
agggctggttccttgtgagggtgtg

SEQ ID NO: 4557896 - DNA, 25 bp, Homo sapien
gtcatattgtgaggtactggtggct

SEQ ID NO: 4557897 - DNA, 25 bp, Homo sapien
ggtcatattgtgaggtactggtggc

SEQ ID NO: 4557898 - DNA, 25 bp, Homo sapien
gtggctgggactccaacatcttctt

SEQ ID NO: 4557899 - DNA, 25 bp, Homo sapien
aggtcatattgtgaggtactggtgg

SEQ ID NO: 4557900 - DNA, 25 bp, Homo sapien
gccacattctaattgaagacccaga

SEQ ID NO: 4557901 - DNA, 25 bp, Homo sapien
tctgcagggactgacctagaaagca

SEQ ID NO: 4557902 - DNA, 25 bp, Homo sapien
taaacacaaaccaatatgggccagc

SEQ ID NO: 4557903 - DNA, 25 bp, Homo sapien
cactccgtagttggaaaaaagcaga

SEQ ID NO: 4557904 - DNA, 25 bp, Homo sapien
taatgcatggtggttttgtcctcct

SEQ ID NO: 4557905 - DNA, 25 bp, Homo sapien
gaaatgtgctcttcaactaaaggca

SEQ ID NO: 4557906 - DNA, 25 bp, Homo sapien
tgggaagtgcctgctcacgctaagc

SEQ ID NO: 4557907 - DNA, 25 bp, Homo sapien
tgatggtcccggcaaagtgtaaacc

SEQ ID NO: 4557908 - DNA, 25 bp, Homo sapien
cagatcttggtcacatagttgttgg

SEQ ID NO: 4557909 - DNA, 25 bp, Homo sapien
ttgttggggaacaggccctgcttgc

SEQ ID NO: 4557910 - DNA, 25 bp, Homo sapien
tgcctcgtagtcgacccgtccacca

SEQ ID NO: 4557911 - DNA, 25 bp, Homo sapien
ggaacaggccctgcttgcctcgtag

SEQ ID NO: 4557912 - DNA, 25 bp, Homo sapien
cataggcatacaaagccttgcactg

SEQ ID NO: 4557913 - DNA, 25 bp, Homo sapien
cattggcattaaagctgagttcgtc

SEQ ID NO: 4557914 - DNA, 25 bp, Homo sapien
tgtcattggcattaaagctgagttc

SEQ ID NO: 4557915 - DNA, 25 bp, Homo sapien
gagttcgtctgtgtcctgagcgtca

SEQ ID NO: 4557916 - DNA, 25 bp, Homo sapien
gaggccgactggttgtttgtctcct

SEQ ID NO: 4557917 - DNA, 25 bp, Homo sapien
ggccgactggttgtttgtctcctga

SEQ ID NO: 4557918 - DNA, 25 bp, Homo sapien
ccgactggttgtttgtctcctgacc

SEQ ID NO: 4557919 - DNA, 25 bp, Homo sapien
ggaggccgactggttgtttgtctcc

SEQ ID NO: 4557920 - DNA, 25 bp, Homo sapien
ttgtgaccacaaagaggcacagctg

SEQ ID NO: 4557921 - DNA, 25 bp, Homo sapien
cactttgcattaggaagggcaacac

SEQ ID NO: 4557922 - DNA, 25 bp, Homo sapien
tattcccaaagcgagccacagtgag

SEQ ID NO: 4557923 - DNA, 25 bp, Homo sapien
gcaacactgatgctgccaccattgg

SEQ ID NO: 4557924 - DNA, 25 bp, Homo sapien
agatctttgacctgaattaagactt

SEQ ID NO: 4557925 - DNA, 25 bp, Homo sapien
caggaaagatctttgacctgaatta

SEQ ID NO: 4557926 - DNA, 25 bp, Homo sapien
ctggatgaactgttaataggattct

SEQ ID NO: 4557927 - DNA, 25 bp, Homo sapien
taataggattcttgcctaacctctt

SEQ ID NO: 4557928 - DNA, 25 bp, Homo sapien
tggcgtctgtgacactcggtctgaa

SEQ ID NO: 4557929 - DNA, 25 bp, Homo sapien
gaaatccaggctctctggcgtctgt

SEQ ID NO: 4557930 - DNA, 25 bp, Homo sapien
tctgatgactccgttctgatggtat

SEQ ID NO: 4557931 - DNA, 25 bp, Homo sapien
tggtccgggaccttgaggaaatcca

SEQ ID NO: 4557932 - DNA, 25 bp, Homo sapien
gccgtcagaccagatcagaactaga

SEQ ID NO: 4557933 - DNA, 25 bp, Homo sapien
tactttggccaacctagctgaggcc

SEQ ID NO: 4557934 - DNA, 25 bp, Homo sapien
catcttaggagtgtgacatgccctc

SEQ ID NO: 4557935 - DNA, 25 bp, Homo sapien
ggagccctgctcaaggtcggaaact

SEQ ID NO: 4557936 - DNA, 25 bp, Homo sapien
tagttggcattttgagtcccactgg

SEQ ID NO: 4557937 - DNA, 25 bp, Homo sapien
ggcagctctcactgggtagttggca

SEQ ID NO: 4557938 - DNA, 25 bp, Homo sapien
cactgggtagttggcattttgagtc

SEQ ID NO: 4557939 - DNA, 25 bp, Homo sapien
tgagtcccactggaataacctgtat

SEQ ID NO: 4557940 - DNA, 25 bp, Homo sapien
caggtccgatgctgacctgcagcac

SEQ ID NO: 4557941 - DNA, 25 bp, Homo sapien
ctgacctgcagcactttgttactgg

SEQ ID NO: 4557942 - DNA, 25 bp, Homo sapien
gacctgcagcactttgttactgggc

SEQ ID NO: 4557943 - DNA, 25 bp, Homo sapien
ttgggcagtccaggtccgatgctga

SEQ ID NO: 4557944 - DNA, 25 bp, Homo sapien
gagaacggacaatctacaccaggag

SEQ ID NO: 4557945 - DNA, 25 bp, Homo sapien
gcataaacatgaggcgagaacggac

SEQ ID NO: 4557946 - DNA, 25 bp, Homo sapien
aaaacggtgctcagagatcccgcca

SEQ ID NO: 4557947 - DNA, 25 bp, Homo sapien
tcgaaggacgcagtgagaaaacggt

SEQ ID NO: 4557948 - DNA, 25 bp, Homo sapien
tttgaagacagattcaagcaaactg

SEQ ID NO: 4557949 - DNA, 25 bp, Homo sapien
taagaggcttaggaattcagttttg

SEQ ID NO: 4557950 - DNA, 25 bp, Homo sapien
cagaggtagttgcttctgggtcttc

SEQ ID NO: 4557951 - DNA, 25 bp, Homo sapien
gtcttctcctcgtaacgctttgcta

SEQ ID NO: 4557952 - DNA, 25 bp, Homo sapien
tcaaagaaggtttatagtccaacaa

SEQ ID NO: 4557953 - DNA, 25 bp, Homo sapien
acaaaagcatgatcaaagtactttt

SEQ ID NO: 4557954 - DNA, 25 bp, Homo sapien
ttcaaagaaggtttatagtccaaca

SEQ ID NO: 4557955 - DNA, 25 bp, Homo sapien
gctttcaaagaaggtttatagtcca

SEQ ID NO: 4557956 - DNA, 25 bp, Homo sapien
agtcaagatgccagtaatgcttcag

SEQ ID NO: 4557957 - DNA, 25 bp, Homo sapien
taggtgctcaatcccatgatgttga

SEQ ID NO: 4557958 - DNA, 25 bp, Homo sapien
gaagcgggctgtttttattgccaga

SEQ ID NO: 4557959 - DNA, 25 bp, Homo sapien
tcccaatgcttacagaccatagcaa

SEQ ID NO: 4557960 - DNA, 25 bp, Homo sapien
tgtttttccaattggagataagtac

SEQ ID NO: 4557961 - DNA, 25 bp, Homo sapien
gagctggagcctctgtctaaaagca

SEQ ID NO: 4557962 - DNA, 25 bp, Homo sapien
ctgtctaaaagcaccgtcttacggg

SEQ ID NO: 4557963 - DNA, 25 bp, Homo sapien
ccaattggagataagtactggaaaa

SEQ ID NO: 4557964 - DNA, 25 bp, Homo sapien
tacaagtgtagctcaaggccaggca

SEQ ID NO: 4557965 - DNA, 25 bp, Homo sapien
ggctaagtacctcattttactacag

SEQ ID NO: 4557966 - DNA, 25 bp, Homo sapien
gctcccatgacagattatatcccca

SEQ ID NO: 4557967 - DNA, 25 bp, Homo sapien
aataagatagtaagtgtcaaagtgc

SEQ ID NO: 4557968 - DNA, 25 bp, Homo sapien
gaggagatgctgacggccggcagag

SEQ ID NO: 4557969 - DNA, 25 bp, Homo sapien
ggaggagatgctgacggccggcaga

SEQ ID NO: 4557970 - DNA, 25 bp, Homo sapien
gaagccaaggtgctgccgggaggag

SEQ ID NO: 4557971 - DNA, 25 bp, Homo sapien
ggaagccaaggtgctgccgggagga

SEQ ID NO: 4557972 - DNA, 25 bp, Homo sapien
gggacacagacaagatccgttctat

SEQ ID NO: 4557973 - DNA, 25 bp, Homo sapien
tttctcgtccgattaagtacaagca

SEQ ID NO: 4557974 - DNA, 25 bp, Homo sapien
gattttccgcttcaggacttctttc

SEQ ID NO: 4557975 - DNA, 25 bp, Homo sapien
aggcccttgtctgggccctgtttga

SEQ ID NO: 4557976 - DNA, 25 bp, Homo sapien
gtaaggagcaggtctcgctttacac

SEQ ID NO: 4557977 - DNA, 25 bp, Homo sapien
taaggagcaggtctcgctttacacc

SEQ ID NO: 4557978 - DNA, 25 bp, Homo sapien
caaaagctcttaacgggtccatgag

SEQ ID NO: 4557979 - DNA, 25 bp, Homo sapien
gccaaaagctcttaacgggtccatg

SEQ ID NO: 4557980 - DNA, 25 bp, Homo sapien
aagctcttaacgggtccatgagctt

SEQ ID NO: 4557981 - DNA, 25 bp, Homo sapien
ttctattaggaccaagactttatca

SEQ ID NO: 4557982 - DNA, 25 bp, Homo sapien
gagttctgggtgctcttccatccca

SEQ ID NO: 4557983 - DNA, 25 bp, Homo sapien
ttgaacctcctgtcatacttggtga

SEQ ID NO: 4557984 - DNA, 25 bp, Homo sapien
ccctataaagttcctgttaatactg

SEQ ID NO: 4557985 - DNA, 25 bp, Homo sapien
tacttggtgactgtgtctgcgaaat

SEQ ID NO: 4557986 - DNA, 25 bp, Homo sapien
cactcgagcatacccatcatacttt

SEQ ID NO: 4557987 - DNA, 25 bp, Homo sapien
tttctgtatcactcgagcataccca

SEQ ID NO: 4557988 - DNA, 25 bp, Homo sapien
tcttccgggccacgaatttcctcca

SEQ ID NO: 4557989 - DNA, 25 bp, Homo sapien
tcatttgaacgtatttcttccgggc

SEQ ID NO: 4557990 - DNA, 25 bp, Homo sapien
gagtgtattcagttagaccttgtcc

SEQ ID NO: 4557991 - DNA, 25 bp, Homo sapien
tcatgaacgaatatgtgaaacgctt

SEQ ID NO: 4557992 - DNA, 25 bp, Homo sapien
tgtcctgccttgctacagtctctgt

SEQ ID NO: 4557993 - DNA, 25 bp, Homo sapien
cagtctctgtgagaatcgaatgagc

SEQ ID NO: 4557994 - DNA, 25 bp, Homo sapien
cacaagttgaaaagtaacagcgggt

SEQ ID NO: 4557995 - DNA, 25 bp, Homo sapien
gggttgcttaatggcgaatgacaca

SEQ ID NO: 4557996 - DNA, 25 bp, Homo sapien
agtctcaggctgatcctacgaggca

SEQ ID NO: 4557997 - DNA, 25 bp, Homo sapien
ctacgaggcaggcagaaacagtggc

SEQ ID NO: 4557998 - DNA, 25 bp, Homo sapien
gaatgtctttattccgcagccctgg

SEQ ID NO: 4557999 - DNA, 25 bp, Homo sapien
tgagaaacgatgatgctgagcctcg

SEQ ID NO: 4558000 - DNA, 25 bp, Homo sapien
caagactgggatctgcctgaagtca

SEQ ID NO: 4558001 - DNA, 25 bp, Homo sapien
tgagttcccatatgatttccccttg

SEQ ID NO: 4558002 - DNA, 25 bp, Homo sapien
gaaagaagtgtctctaaatgaagct

SEQ ID NO: 4558003 - DNA, 25 bp, Homo sapien
gtggacattcatggggctcactgac

SEQ ID NO: 4558004 - DNA, 25 bp, Homo sapien
aaagaaagaagtgtctctaaatgaa

SEQ ID NO: 4558005 - DNA, 25 bp, Homo sapien
ctgtggacattcatggggctcactg

SEQ ID NO: 4558006 - DNA, 25 bp, Homo sapien
tgatgaacactttactcctccccag

SEQ ID NO: 4558007 - DNA, 25 bp, Homo sapien
tcgctgtccatgttgaccgactgca

SEQ ID NO: 4558008 - DNA, 25 bp, Homo sapien
cccagctggaactggtcgctgtcca

SEQ ID NO: 4558009 - DNA, 25 bp, Homo sapien
gcaggtgcaggacgccttgcttctc

SEQ ID NO: 4558010 - DNA, 25 bp, Homo sapien
aggtggctttggtcagaatggcata

SEQ ID NO: 4558011 - DNA, 25 bp, Homo sapien
ccaggtggctttggtcagaatggca

SEQ ID NO: 4558012 - DNA, 25 bp, Homo sapien
caggtggctttggtcagaatggcat

SEQ ID NO: 4558013 - DNA, 25 bp, Homo sapien
ggccaggtggctttggtcagaatgg

SEQ ID NO: 4558014 - DNA, 25 bp, Homo sapien
cacttgggcgggaccgcactggttt

SEQ ID NO: 4558015 - DNA, 25 bp, Homo sapien
gggacattggggagaagagaatcac

SEQ ID NO: 4558016 - DNA, 25 bp, Homo sapien
gaatcacacttgggcgggaccgcac

SEQ ID NO: 4558017 - DNA, 25 bp, Homo sapien
tgggcgggaccgcactggttttcta

SEQ ID NO: 4558018 - DNA, 25 bp, Homo sapien
tatactcatgggaacaggttgcaca

SEQ ID NO: 4558019 - DNA, 25 bp, Homo sapien
tcctgacaaggcctccagtgttgag

SEQ ID NO: 4558020 - DNA, 25 bp, Homo sapien
tgttctcctaccaagtgtacccagg

SEQ ID NO: 4558021 - DNA, 25 bp, Homo sapien
ggagaccagggcataaaccaacaac

SEQ ID NO: 4558022 - DNA, 25 bp, Homo sapien
gaagtggaacgcctttgctgatgag

SEQ ID NO: 4558023 - DNA, 25 bp, Homo sapien
tctctcttgcccgtgaagtggaacg

SEQ ID NO: 4558024 - DNA, 25 bp, Homo sapien
tgctgatgaggcatccctttatcat

SEQ ID NO: 4558025 - DNA, 25 bp, Homo sapien
gatgaggcatccctttatcatcccc

SEQ ID NO: 4558026 - DNA, 25 bp, Homo sapien
aaggaaaagcttacagcaggagagc

SEQ ID NO: 4558027 - DNA, 25 bp, Homo sapien
cagccccagtattctcaaaccaaga

SEQ ID NO: 4558028 - DNA, 25 bp, Homo sapien
caaggctatttgtctgttctgaaag

SEQ ID NO: 4558029 - DNA, 25 bp, Homo sapien
gctaagggaggcatccaaggataca

SEQ ID NO: 4558030 - DNA, 25 bp, Homo sapien
ccttagacgggaaaaaagagtgcat

SEQ ID NO: 4558031 - DNA, 25 bp, Homo sapien
atgaagctggcatggcactcgagac

SEQ ID NO: 4558032 - DNA, 25 bp, Homo sapien
gatggcagcactctcagcattgttt

SEQ ID NO: 4558033 - DNA, 25 bp, Homo sapien
tccggataatcaacagagtcagttc

SEQ ID NO: 4558034 - DNA, 25 bp, Homo sapien
cctggatacgcttttggatgtcaca

SEQ ID NO: 4558035 - DNA, 25 bp, Homo sapien
cagaggaaggtacactactggcatc

SEQ ID NO: 4558036 - DNA, 25 bp, Homo sapien
taacatctcagttgtgtgtcagcaa

SEQ ID NO: 4558037 - DNA, 25 bp, Homo sapien
aagttcctcaactgactgtgccctg

SEQ ID NO: 4558038 - DNA, 25 bp, Homo sapien
tacaaaatgtgaagtggtgcagcca

SEQ ID NO: 4558039 - DNA, 25 bp, Homo sapien
gacaacaaagggaagcgtgatttct

SEQ ID NO: 4558040 - DNA, 25 bp, Homo sapien
taaaaaatggcaaagggcctcacag

SEQ ID NO: 4558041 - DNA, 25 bp, Homo sapien
taaaagccattgactcgtacgcttg

SEQ ID NO: 4558042 - DNA, 25 bp, Homo sapien
gaatttttggaagatgcgccgatag

SEQ ID NO: 4558043 - DNA, 25 bp, Homo sapien
tgcgccgataggcatagccagctct

SEQ ID NO: 4558044 - DNA, 25 bp, Homo sapien
cagacccaaatattcgacttgatgc

SEQ ID NO: 4558045 - DNA, 25 bp, Homo sapien
gctcttctcactcgaatgttctctt

SEQ ID NO: 4558046 - DNA, 25 bp, Homo sapien
tatgccaactccgtcttgcagaggg

SEQ ID NO: 4558047 - DNA, 25 bp, Homo sapien
tagcatcagggttggtgaacttcca

SEQ ID NO: 4558048 - DNA, 25 bp, Homo sapien
cccagttgttccctaggctatgcca

SEQ ID NO: 4558049 - DNA, 25 bp, Homo sapien
caaaatgcatttgtagggcaagtga

SEQ ID NO: 4558050 - DNA, 25 bp, Homo sapien
ctgggcttcttggtttcgtttggct

SEQ ID NO: 4558051 - DNA, 25 bp, Homo sapien
cagggtgctcacaaggtcattggct

SEQ ID NO: 4558052 - DNA, 25 bp, Homo sapien
gggcgtacatttcatcagggtgctc

SEQ ID NO: 4558053 - DNA, 25 bp, Homo sapien
ggtttcgtttggcttgatgcagcga

SEQ ID NO: 4558054 - DNA, 25 bp, Homo sapien
cataacctggatgatctgggcccct

SEQ ID NO: 4558055 - DNA, 25 bp, Homo sapien
gagtcagacacttcacgcagacatt

SEQ ID NO: 4558056 - DNA, 25 bp, Homo sapien
cagcccagagttaatccttatccag

SEQ ID NO: 4558057 - DNA, 25 bp, Homo sapien
tatgactcgattttccagcccagag

SEQ ID NO: 4558058 - DNA, 25 bp, Homo sapien
cggcagtagttgggcgccctttctt

SEQ ID NO: 4558059 - DNA, 25 bp, Homo sapien
cctgcagattttccggaaataaaga

SEQ ID NO: 4558060 - DNA, 25 bp, Homo sapien
tttattttgcttccggcagtagttg

SEQ ID NO: 4558061 - DNA, 25 bp, Homo sapien
tcttgtcagcctgcagattttccgg

SEQ ID NO: 4558062 - DNA, 25 bp, Homo sapien
ggcacataaccttggctacagaaaa

SEQ ID NO: 4558063 - DNA, 25 bp, Homo sapien
aacaatgcctttccaacgtccctag

SEQ ID NO: 4558064 - DNA, 25 bp, Homo sapien
cagaacataacagagggaggtcagt

SEQ ID NO: 4558065 - DNA, 25 bp, Homo sapien
cgtccctagtcacaggaattgaggt

SEQ ID NO: 4558066 - DNA, 25 bp, Homo sapien
taagctcgatgagatccataaaaag

SEQ ID NO: 4558067 - DNA, 25 bp, Homo sapien
gctcgctgctctgcataagctcgat

SEQ ID NO: 4558068 - DNA, 25 bp, Homo sapien
ccataaaaagcacatcccggttcct

SEQ ID NO: 4558069 - DNA, 25 bp, Homo sapien
cataaaaagcacatcccggttcctt

SEQ ID NO: 4558070 - DNA, 25 bp, Homo sapien
acagatagacattaaaatggatatt

SEQ ID NO: 4558071 - DNA, 25 bp, Homo sapien
gatagacattaaaatggatattggc

SEQ ID NO: 4558072 - DNA, 25 bp, Homo sapien
ggcttaaaacagatagacattaaaa

SEQ ID NO: 4558073 - DNA, 25 bp, Homo sapien
atagacattaaaatggatattggcc

SEQ ID NO: 4558074 - DNA, 25 bp, Homo sapien
ctcacccaccgcatgcatcgtggcg

SEQ ID NO: 4558075 - DNA, 25 bp, Homo sapien
atgatgaatgatgaagccttggttc

SEQ ID NO: 4558076 - DNA, 25 bp, Homo sapien
atcgtggcgcacacgtcatccagga

SEQ ID NO: 4558077 - DNA, 25 bp, Homo sapien
ttgaagtgctcatgactcccaatct

SEQ ID NO: 4558078 - DNA, 25 bp, Homo sapien
caagaaggcaaggccctagtcactg

SEQ ID NO: 4558079 - DNA, 25 bp, Homo sapien
aaggcaaggccctagtcactgacct

SEQ ID NO: 4558080 - DNA, 25 bp, Homo sapien
gcaagaaggcaaggccctagtcact

SEQ ID NO: 4558081 - DNA, 25 bp, Homo sapien
gagcaagaaggcaaggccctagtca

SEQ ID NO: 4558082 - DNA, 25 bp, Homo sapien
ttattccctcttgaacatattcttc

SEQ ID NO: 4558083 - DNA, 25 bp, Homo sapien
ttattaaagtactcaatgggtgtcc

SEQ ID NO: 4558084 - DNA, 25 bp, Homo sapien
gtcacatacgattttattattaaag

SEQ ID NO: 4558085 - DNA, 25 bp, Homo sapien
ctatgaggtcacatacgattttatt

SEQ ID NO: 4558086 - DNA, 25 bp, Homo sapien
ttgtcaatgctgactgtatttccag

SEQ ID NO: 4558087 - DNA, 25 bp, Homo sapien
gtcaatgctgactgtatttccagtc

SEQ ID NO: 4558088 - DNA, 25 bp, Homo sapien
tgtcaatgctgactgtatttccagt

SEQ ID NO: 4558089 - DNA, 25 bp, Homo sapien
aattgtcaatgctgactgtatttcc

SEQ ID NO: 4558090 - DNA, 25 bp, Homo sapien
aatggtgtcttcatgaaagagacgg

SEQ ID NO: 4558091 - DNA, 25 bp, Homo sapien
atggtgtcttcatgaaagagacgga

SEQ ID NO: 4558092 - DNA, 25 bp, Homo sapien
aaatggtgtcttcatgaaagagacg

SEQ ID NO: 4558093 - DNA, 25 bp, Homo sapien
gatacaaaactgttcaaagccattt

SEQ ID NO: 4558094 - DNA, 25 bp, Homo sapien
ctgttctgcctttaatgtcagttca

SEQ ID NO: 4558095 - DNA, 25 bp, Homo sapien
gcctttaatgtcagttcaataaaaa

SEQ ID NO: 4558096 - DNA, 25 bp, Homo sapien
tctgctgcagtttttcattaacaaa

SEQ ID NO: 4558097 - DNA, 25 bp, Homo sapien
tctaggacgccaatgttgtattctt

SEQ ID NO: 4558098 - DNA, 25 bp, Homo sapien
ccatagatgtctaggacgccaatgt

SEQ ID NO: 4558099 - DNA, 25 bp, Homo sapien
atgtctaggacgccaatgttgtatt

SEQ ID NO: 4558100 - DNA, 25 bp, Homo sapien
catagatgtctaggacgccaatgtt

SEQ ID NO: 4558101 - DNA, 25 bp, Homo sapien
caggattcagaaaagcgagtacagt

SEQ ID NO: 4558102 - DNA, 25 bp, Homo sapien
gaagctggattctacacggcaaaca

SEQ ID NO: 4558103 - DNA, 25 bp, Homo sapien
tcatactaaaaacgggcatgcactg

SEQ ID NO: 4558104 - DNA, 25 bp, Homo sapien
tgttcctaggcgcttatagagaggg

SEQ ID NO: 4558105 - DNA, 25 bp, Homo sapien
ccaagaaatcaaagacccgggcgtg

SEQ ID NO: 4558106 - DNA, 25 bp, Homo sapien
ccgggtgtaacaggcctgctctacg

SEQ ID NO: 4558107 - DNA, 25 bp, Homo sapien
tgctatccatctgccggcttgttag

SEQ ID NO: 4558108 - DNA, 25 bp, Homo sapien
tcacgtggatggattcggatttgcc

SEQ ID NO: 4558109 - DNA, 25 bp, Homo sapien
ctagcagatatgcaggaaaagctaa

SEQ ID NO: 4558110 - DNA, 25 bp, Homo sapien
gcttatcagtaatcccatacacatc

SEQ ID NO: 4558111 - DNA, 25 bp, Homo sapien
gaaggctgcttatcagtaatcccat

SEQ ID NO: 4558112 - DNA, 25 bp, Homo sapien
ggctgcttatcagtaatcccataca

SEQ ID NO: 4558113 - DNA, 25 bp, Homo sapien
ttctagtgaaggctgcttatcagta

SEQ ID NO: 4558114 - DNA, 25 bp, Homo sapien
tagcactggctacaggtgaaagttc

SEQ ID NO: 4558115 - DNA, 25 bp, Homo sapien
cggtctacagtgtgtggactagcac

SEQ ID NO: 4558116 - DNA, 25 bp, Homo sapien
gaaaaacggagacttccatagctca

SEQ ID NO: 4558117 - DNA, 25 bp, Homo sapien
tgggagacatgatcaagacgagacg

SEQ ID NO: 4558118 - DNA, 25 bp, Homo sapien
tgttgaggctccaggtatacagatg

SEQ ID NO: 4558119 - DNA, 25 bp, Homo sapien
caagctgttgatgcctaagaggcta

SEQ ID NO: 4558120 - DNA, 25 bp, Homo sapien
ttttgggcacatgtaaccagcagca

SEQ ID NO: 4558121 - DNA, 25 bp, Homo sapien
tctgagagcagcctgcaagctgttg

SEQ ID NO: 4558122 - DNA, 25 bp, Homo sapien
cgtagttgccaacttctttgaagct

SEQ ID NO: 4558123 - DNA, 25 bp, Homo sapien
ttcactctccacagccgcgtagttg

SEQ ID NO: 4558124 - DNA, 25 bp, Homo sapien
tcccaggtggagaatacccgccact

SEQ ID NO: 4558125 - DNA, 25 bp, Homo sapien
gccactatctgcaacaccagcgttt

SEQ ID NO: 4558126 - DNA, 25 bp, Homo sapien
cccgagaggctcaggtagtaataat

SEQ ID NO: 4558127 - DNA, 25 bp, Homo sapien
tagtaataatagtccatgctggtga

SEQ ID NO: 4558128 - DNA, 25 bp, Homo sapien
tgtcgtcaatgtcatcaaccttgta

SEQ ID NO: 4558129 - DNA, 25 bp, Homo sapien
agtttcctgaaactcccgcctgtcg

SEQ ID NO: 4558130 - DNA, 25 bp, Homo sapien
tccttgccatgacataaccacttgc

SEQ ID NO: 4558131 - DNA, 25 bp, Homo sapien
ttaaaaaactgccatgcagcttcct

SEQ ID NO: 4558132 - DNA, 25 bp, Homo sapien
cttgccatgacataaccacttgcat

SEQ ID NO: 4558133 - DNA, 25 bp, Homo sapien
tgccttctttagaagcttttccttg

SEQ ID NO: 4558134 - DNA, 25 bp, Homo sapien
aaatatgtgaaaactccgctctcct

SEQ ID NO: 4558135 - DNA, 25 bp, Homo sapien
tctggttccccacctggactgaact

SEQ ID NO: 4558136 - DNA, 25 bp, Homo sapien
tttccaccatctggttccccacctg

SEQ ID NO: 4558137 - DNA, 25 bp, Homo sapien
ggttcctcatcaccaccctagattt

SEQ ID NO: 4558138 - DNA, 25 bp, Homo sapien
gcaaactgcagcttggcggcatgct

SEQ ID NO: 4558139 - DNA, 25 bp, Homo sapien
ctcctgatgatatgtgaaaggctcc

SEQ ID NO: 4558140 - DNA, 25 bp, Homo sapien
ggaaagatcgaagaggtggcctcct

SEQ ID NO: 4558141 - DNA, 25 bp, Homo sapien
tagtaaggcaactgatgtggaaaat

SEQ ID NO: 4558142 - DNA, 25 bp, Homo sapien
tagacttcagtcagaagcatcaaca

SEQ ID NO: 4558143 - DNA, 25 bp, Homo sapien
cagtcagaagcatcaacatcatcaa

SEQ ID NO: 4558144 - DNA, 25 bp, Homo sapien
ctgtgggatactagacttcagtcag

SEQ ID NO: 4558145 - DNA, 25 bp, Homo sapien
ggatactagacttcagtcagaagca

SEQ ID NO: 4558146 - DNA, 25 bp, Homo sapien
agcgacactctctgaaacagggaag

SEQ ID NO: 4558147 - DNA, 25 bp, Homo sapien
acactctctgaaacagggaagggac

SEQ ID NO: 4558148 - DNA, 25 bp, Homo sapien
tcaagcgacactctctgaaacaggg

SEQ ID NO: 4558149 - DNA, 25 bp, Homo sapien
actctctgaaacagggaagggactt

SEQ ID NO: 4558150 - DNA, 25 bp, Homo sapien
ctggagttgttgttccggacggtct

SEQ ID NO: 4558151 - DNA, 25 bp, Homo sapien
aatcggctggagttgttgttccgga

SEQ ID NO: 4558152 - DNA, 25 bp, Homo sapien
gcgggttggactgcaggataatgtc

SEQ ID NO: 4558153 - DNA, 25 bp, Homo sapien
gcctccagcagcgggttggactgca

SEQ ID NO: 4558154 - DNA, 25 bp, Homo sapien
catgacagacctcaacctgtttgtg

SEQ ID NO: 4558155 - DNA, 25 bp, Homo sapien
gaaggtgtgaacacctaccacacag

SEQ ID NO: 4558156 - DNA, 25 bp, Homo sapien
tgtcccagcaaatagaccggaggtt

SEQ ID NO: 4558157 - DNA, 25 bp, Homo sapien
tgtacgccaaactttctctaaggac

SEQ ID NO: 4558158 - DNA, 25 bp, Homo sapien
tatacaggaagggtaggcccttctc

SEQ ID NO: 4558159 - DNA, 25 bp, Homo sapien
gtacaatcggtacatgaagcctcat

SEQ ID NO: 4558160 - DNA, 25 bp, Homo sapien
aattggcaagtggttcacatagctc

SEQ ID NO: 4558161 - DNA, 25 bp, Homo sapien
ccatgcaagtttctaaagggtatac

SEQ ID NO: 4558162 - DNA, 25 bp, Homo sapien
tcccataacataaggtatcataatg

SEQ ID NO: 4558163 - DNA, 25 bp, Homo sapien
cataaggtatcataatgggccactg

SEQ ID NO: 4558164 - DNA, 25 bp, Homo sapien
cataacataaggtatcataatgggc

SEQ ID NO: 4558165 - DNA, 25 bp, Homo sapien
atttcccataacataaggtatcata

SEQ ID NO: 4558166 - DNA, 25 bp, Homo sapien
cactctggagatgtagctcatgata

SEQ ID NO: 4558167 - DNA, 25 bp, Homo sapien
tcctccagacactctggagatgtag

SEQ ID NO: 4558168 - DNA, 25 bp, Homo sapien
atatttggcagccactgtttttcca

SEQ ID NO: 4558169 - DNA, 25 bp, Homo sapien
catgatatatttggcagccactgtt

SEQ ID NO: 4558170 - DNA, 25 bp, Homo sapien
ctgagaagtggattgcgaccagctc

SEQ ID NO: 4558171 - DNA, 25 bp, Homo sapien
agtggattgcgaccagctcccttcc

SEQ ID NO: 4558172 - DNA, 25 bp, Homo sapien
gaagtggattgcgaccagctccctt

SEQ ID NO: 4558173 - DNA, 25 bp, Homo sapien
gagaagtggattgcgaccagctccc

SEQ ID NO: 4558174 - DNA, 25 bp, Homo sapien
tactgctcagaggacggtaaacctt

SEQ ID NO: 4558175 - DNA, 25 bp, Homo sapien
cataagagtcctgtgtggtaggtgc

SEQ ID NO: 4558176 - DNA, 25 bp, Homo sapien
gaaacttgctgaaggacacttagct

SEQ ID NO: 4558177 - DNA, 25 bp, Homo sapien
ccaaaggaggcttgaaaggaacaca

SEQ ID NO: 4558178 - DNA, 25 bp, Homo sapien
tgatgcagtcagaggaacccaatgt

SEQ ID NO: 4558179 - DNA, 25 bp, Homo sapien
tatgaagaccaagtttgagtcccag

SEQ ID NO: 4558180 - DNA, 25 bp, Homo sapien
tgccaagaatatggatggccccatg

SEQ ID NO: 4558181 - DNA, 25 bp, Homo sapien
aacagaaacaagtcggaggtgaagc

SEQ ID NO: 4558182 - DNA, 25 bp, Homo sapien
tcttcagatttacagccagcggcag

SEQ ID NO: 4558183 - DNA, 25 bp, Homo sapien
gagagacccacgagccaaatatgag

SEQ ID NO: 4558184 - DNA, 25 bp, Homo sapien
ttgagaatccggagacacctgatgg

SEQ ID NO: 4558185 - DNA, 25 bp, Homo sapien
tcaaaggccggtgctgctgggataa

SEQ ID NO: 4558186 - DNA, 25 bp, Homo sapien
tagaaataggccatagagaaccatg

SEQ ID NO: 4558187 - DNA, 25 bp, Homo sapien
tactgaaagtcatacgtcggcttcc

SEQ ID NO: 4558188 - DNA, 25 bp, Homo sapien
tatcctccgttgatgacaagcccaa

SEQ ID NO: 4558189 - DNA, 25 bp, Homo sapien
gaaactgcccaggtatggccatttg

SEQ ID NO: 4558190 - DNA, 25 bp, Homo sapien
ctggaaacaaggatctgaagtgggc

SEQ ID NO: 4558191 - DNA, 25 bp, Homo sapien
tcatcccgcttcagtgcaggtggac

SEQ ID NO: 4558192 - DNA, 25 bp, Homo sapien
gacctccgcttagtatcaaacagaa

SEQ ID NO: 4558193 - DNA, 25 bp, Homo sapien
actagcaagctcatgtaagaagacc

SEQ ID NO: 4558194 - DNA, 25 bp, Homo sapien
tatgaaacccagtattttgactgca

SEQ ID NO: 4558195 - DNA, 25 bp, Homo sapien
gaaaacacagggcagtgagcactct

SEQ ID NO: 4558196 - DNA, 25 bp, Homo sapien
tacttttaaagaactataggcactg

SEQ ID NO: 4558197 - DNA, 25 bp, Homo sapien
caactgtaggtcaggttgacataga

SEQ ID NO: 4558198 - DNA, 25 bp, Homo sapien
ggatgcttatactttctagtgtttg

SEQ ID NO: 4558199 - DNA, 25 bp, Homo sapien
ctgataatgacgcactggttctctc

SEQ ID NO: 4558200 - DNA, 25 bp, Homo sapien
tggttctctctgtcaatgatcatgt

SEQ ID NO: 4558201 - DNA, 25 bp, Homo sapien
taatgacgcactggttctctctgtc

SEQ ID NO: 4558202 - DNA, 25 bp, Homo sapien
ggttctctctgtcaatgatcatgtt

SEQ ID NO: 4558203 - DNA, 25 bp, Homo sapien
caagggcatagatatgtggtgggtt

SEQ ID NO: 4558204 - DNA, 25 bp, Homo sapien
ctgcaagggcatagatatgtggtgg

SEQ ID NO: 4558205 - DNA, 25 bp, Homo sapien
gggcatagatatgtggtgggttttc

SEQ ID NO: 4558206 - DNA, 25 bp, Homo sapien
atagatatgtggtgggttttcatac

SEQ ID NO: 4558207 - DNA, 25 bp, Homo sapien
tgccccgtgtctttagacactccaa

SEQ ID NO: 4558208 - DNA, 25 bp, Homo sapien
gcagtctcccgtaggcatatccatg

SEQ ID NO: 4558209 - DNA, 25 bp, Homo sapien
ccatacacgcctctgcaggtgacag

SEQ ID NO: 4558210 - DNA, 25 bp, Homo sapien
ccttccggatgtgccccgtgtcttt

SEQ ID NO: 4558211 - DNA, 25 bp, Homo sapien
gatgagggggctttgtatccgatac

SEQ ID NO: 4558212 - DNA, 25 bp, Homo sapien
tgccatgctctggaagatgagagtt

SEQ ID NO: 4558213 - DNA, 25 bp, Homo sapien
catgctctggaagatgagagtttgg

SEQ ID NO: 4558214 - DNA, 25 bp, Homo sapien
ttgtatccgatacccagtgttcttc

SEQ ID NO: 4558215 - DNA, 25 bp, Homo sapien
tattaaggagaattacagcttccat

SEQ ID NO: 4558216 - DNA, 25 bp, Homo sapien
caggattaatgaatactcttgtgct

SEQ ID NO: 4558217 - DNA, 25 bp, Homo sapien
tcttgctctgggtaaattgccttcc

SEQ ID NO: 4558218 - DNA, 25 bp, Homo sapien
tcaactgatgaatttgtgtgggctc

SEQ ID NO: 4558219 - DNA, 25 bp, Homo sapien
tgagcggagatcatgcccagcctgg

SEQ ID NO: 4558220 - DNA, 25 bp, Homo sapien
aacaagagcaaaattctgtctcaaa

SEQ ID NO: 4558221 - DNA, 25 bp, Homo sapien
agtgagcggagatcatgcccagcct

SEQ ID NO: 4558222 - DNA, 25 bp, Homo sapien
agcggagatcatgcccagcctgggc

SEQ ID NO: 4558223 - DNA, 25 bp, Homo sapien
tatggcatctgcttgaaagggttga

SEQ ID NO: 4558224 - DNA, 25 bp, Homo sapien
gcatctgcttgaaagggttgactga

SEQ ID NO: 4558225 - DNA, 25 bp, Homo sapien
aaaatatggcatctgcttgaaaggg

SEQ ID NO: 4558226 - DNA, 25 bp, Homo sapien
tgactgagattaatacagatcctat

SEQ ID NO: 4558227 - DNA, 25 bp, Homo sapien
ttaagccaagcaggtcgaggttgca

SEQ ID NO: 4558228 - DNA, 25 bp, Homo sapien
gcttaagccaagcaggtcgaggttg

SEQ ID NO: 4558229 - DNA, 25 bp, Homo sapien
cttaagccaagcaggtcgaggttgc

SEQ ID NO: 4558230 - DNA, 25 bp, Homo sapien
ttgcttaagccaagcaggtcgaggt

SEQ ID NO: 4558231 - DNA, 25 bp, Homo sapien
ctgctgctttgggaactccaggtaa

SEQ ID NO: 4558232 - DNA, 25 bp, Homo sapien
tcccactcctgttgcataattcagg

SEQ ID NO: 4558233 - DNA, 25 bp, Homo sapien
tgcagagaccttagctattttccgg

SEQ ID NO: 4558234 - DNA, 25 bp, Homo sapien
tgtgcctctgggaaaagccgttcgg

SEQ ID NO: 4558235 - DNA, 25 bp, Homo sapien
gaagccctgcacaggtatctggagc

SEQ ID NO: 4558236 - DNA, 25 bp, Homo sapien
tatgaaggactgactacggacatca

SEQ ID NO: 4558237 - DNA, 25 bp, Homo sapien
tgggaagcacttacacacctgcatg

SEQ ID NO: 4558238 - DNA, 25 bp, Homo sapien
gcaaggcacagaggtcacaaaacgt

SEQ ID NO: 4558239 - DNA, 25 bp, Homo sapien
ttattactgcaaaggttcccgtgct

SEQ ID NO: 4558240 - DNA, 25 bp, Homo sapien
cagtgatgggataggcagccgctgc

SEQ ID NO: 4558241 - DNA, 25 bp, Homo sapien
actgcaaaggttcccgtgcttttag

SEQ ID NO: 4558242 - DNA, 25 bp, Homo sapien
gatgggataggcagccgctgcaaaa

SEQ ID NO: 4558243 - DNA, 25 bp, Homo sapien
tcagaaggcactattggcatcaaag

SEQ ID NO: 4558244 - DNA, 25 bp, Homo sapien
taactctcacaatagttccaccagg

SEQ ID NO: 4558245 - DNA, 25 bp, Homo sapien
catgataccatactttcagaaggca

SEQ ID NO: 4558246 - DNA, 25 bp, Homo sapien
cataaaaaatggcatccggcaagct

SEQ ID NO: 4558247 - DNA, 25 bp, Homo sapien
ccagcataaagccacaatttaactg

SEQ ID NO: 4558248 - DNA, 25 bp, Homo sapien
gcacccagcataaagccacaattta

SEQ ID NO: 4558249 - DNA, 25 bp, Homo sapien
cacccagcataaagccacaatttaa

SEQ ID NO: 4558250 - DNA, 25 bp, Homo sapien
gcataaagccacaatttaactgtgg

SEQ ID NO: 4558251 - DNA, 25 bp, Homo sapien
tagaaatgtccaaagcagccaataa

SEQ ID NO: 4558252 - DNA, 25 bp, Homo sapien
ttagaaatgtccaaagcagccaata

SEQ ID NO: 4558253 - DNA, 25 bp, Homo sapien
ggtactggtagacacctttgcttcc

SEQ ID NO: 4558254 - DNA, 25 bp, Homo sapien
ttgtggctttgccagtggtactggt

SEQ ID NO: 4558255 - DNA, 25 bp, Homo sapien
ctctgtgatcttggacagtagcacc

SEQ ID NO: 4558256 - DNA, 25 bp, Homo sapien
tgtgatcttggacagtagcaccatg

SEQ ID NO: 4558257 - DNA, 25 bp, Homo sapien
ggagacagacccatttcacaacgct

SEQ ID NO: 4558258 - DNA, 25 bp, Homo sapien
caacacacggttgacagtctcggat

SEQ ID NO: 4558259 - DNA, 25 bp, Homo sapien
aagttccagctttgctacctacaga

SEQ ID NO: 4558260 - DNA, 25 bp, Homo sapien
tgtcacacggtcataatttctcaag

SEQ ID NO: 4558261 - DNA, 25 bp, Homo sapien
tacgtgacaagttcttatggcacac

SEQ ID NO: 4558262 - DNA, 25 bp, Homo sapien
tcagctacgtgacaagttcttatgg

SEQ ID NO: 4558263 - DNA, 25 bp, Homo sapien
ccatgtgttcagctacgtgacaagt

SEQ ID NO: 4558264 - DNA, 25 bp, Homo sapien
tgacaagttcttatggcacacttgg

SEQ ID NO: 4558265 - DNA, 25 bp, Homo sapien
cttcttcctcttgtggcaaagcaga

SEQ ID NO: 4558266 - DNA, 25 bp, Homo sapien
ccttcttcctcttgtggcaaagcag

SEQ ID NO: 4558267 - DNA, 25 bp, Homo sapien
tagatttccattgaatgcccatggt

SEQ ID NO: 4558268 - DNA, 25 bp, Homo sapien
tgcccatggtctacttccagccaga

SEQ ID NO: 4558269 - DNA, 25 bp, Homo sapien
agctttctgggcacccacggttact

SEQ ID NO: 4558270 - DNA, 25 bp, Homo sapien
cagctttctgggcacccacggttac

SEQ ID NO: 4558271 - DNA, 25 bp, Homo sapien
tgcagattggttggttggtttttaa

SEQ ID NO: 4558272 - DNA, 25 bp, Homo sapien
ctgcagattggttggttggttttta

SEQ ID NO: 4558273 - DNA, 25 bp, Homo sapien
tttggctgccatgtgtgctgggaga

SEQ ID NO: 4558274 - DNA, 25 bp, Homo sapien
aggaaggattattctctcctgaaag

SEQ ID NO: 4558275 - DNA, 25 bp, Homo sapien
gcaaaggtgagtcagcatacacagg

SEQ ID NO: 4558276 - DNA, 25 bp, Homo sapien
agcaaaggtgagtcagcatacacag

SEQ ID NO: 4558277 - DNA, 25 bp, Homo sapien
caaaggtgagtcagcatacacagga

SEQ ID NO: 4558278 - DNA, 25 bp, Homo sapien
gtgcgatgagggctcactgccacct

SEQ ID NO: 4558279 - DNA, 25 bp, Homo sapien
agacagggtcgtgctcttgtggcct

SEQ ID NO: 4558280 - DNA, 25 bp, Homo sapien
tcccaccgtgggctttgaaagtgct

SEQ ID NO: 4558281 - DNA, 25 bp, Homo sapien
ctgggataaaaagccaccatgtctg

SEQ ID NO: 4558282 - DNA, 25 bp, Homo sapien
tcctgagtgagctatgaagaaaaag

SEQ ID NO: 4558283 - DNA, 25 bp, Homo sapien
ttgacaactgaatcctaacctgatg

SEQ ID NO: 4558284 - DNA, 25 bp, Homo sapien
tggctaccaggtaagctgagaagac

SEQ ID NO: 4558285 - DNA, 25 bp, Homo sapien
cgaagtgtgaaatattacccctggc

SEQ ID NO: 4558286 - DNA, 25 bp, Homo sapien
tcagaaatgccctcattcccaggaa

SEQ ID NO: 4558287 - DNA, 25 bp, Homo sapien
ccaggaaattttaccccagtctgct

SEQ ID NO: 4558288 - DNA, 25 bp, Homo sapien
aacagccctgccttaagtgaaagca

SEQ ID NO: 4558289 - DNA, 25 bp, Homo sapien
aatcctgaaagccagccttcttttg

SEQ ID NO: 4558290 - DNA, 25 bp, Homo sapien
tagatgtcagcttgataaaatccat

SEQ ID NO: 4558291 - DNA, 25 bp, Homo sapien
tgattgttagaattagatgtcagct

SEQ ID NO: 4558292 - DNA, 25 bp, Homo sapien
cagcttcagaccctcatcaagtcta

SEQ ID NO: 4558293 - DNA, 25 bp, Homo sapien
cagtgagacgggattgtgccatagt

SEQ ID NO: 4558294 - DNA, 25 bp, Homo sapien
caaggtcacatataaagcaaaaggc

SEQ ID NO: 4558295 - DNA, 25 bp, Homo sapien
taaccttggattaactggagctgaa

SEQ ID NO: 4558296 - DNA, 25 bp, Homo sapien
gaaatgcccgggaatcaggctcttg

SEQ ID NO: 4558297 - DNA, 25 bp, Homo sapien
gatcaagcgggacctaagactgcaa

SEQ ID NO: 4558298 - DNA, 25 bp, Homo sapien
gaaccgctggtcagagacttgagaa

SEQ ID NO: 4558299 - DNA, 25 bp, Homo sapien
caaaaacctggtgtgtgaatggccc

SEQ ID NO: 4558300 - DNA, 25 bp, Homo sapien
cctgttatgagcagcgttgcagcaa

SEQ ID NO: 4558301 - DNA, 25 bp, Homo sapien
gatggacttcaaagtggaaccgctg

SEQ ID NO: 4558302 - DNA, 25 bp, Homo sapien
tgggcattggaactctccgggcatc

SEQ ID NO: 4558303 - DNA, 25 bp, Homo sapien
tccagtggcacatgagcataggcta

SEQ ID NO: 4558304 - DNA, 25 bp, Homo sapien
ggcaggcctaacgagatcatcattt

SEQ ID NO: 4558305 - DNA, 25 bp, Homo sapien
gcttcagagtgaaactaagtccaag

SEQ ID NO: 4558306 - DNA, 25 bp, Homo sapien
ggatgaggttccgcacagtcgtttt

SEQ ID NO: 4558307 - DNA, 25 bp, Homo sapien
cggggaggatgaggttccgcacagt

SEQ ID NO: 4558308 - DNA, 25 bp, Homo sapien
gggaggatgaggttccgcacagtcg

SEQ ID NO: 4558309 - DNA, 25 bp, Homo sapien
gaggatgaggttccgcacagtcgtt

SEQ ID NO: 4558310 - DNA, 25 bp, Homo sapien
aggagaacacgcaggagctttggct

SEQ ID NO: 4558311 - DNA, 25 bp, Homo sapien
ctattggaaggagaacacgcaggag

SEQ ID NO: 4558312 - DNA, 25 bp, Homo sapien
caggagctttggcttacagacaaca

SEQ ID NO: 4558313 - DNA, 25 bp, Homo sapien
tggaaggagaacacgcaggagcttt

SEQ ID NO: 4558314 - DNA, 25 bp, Homo sapien
gatacctattgagttgcctgccctg

SEQ ID NO: 4558315 - DNA, 25 bp, Homo sapien
ttaggcagccacttaaaccattctg

SEQ ID NO: 4558316 - DNA, 25 bp, Homo sapien
catgatggttaatgccaccctgcca

SEQ ID NO: 4558317 - DNA, 25 bp, Homo sapien
cccacatactgtgagggatacctat

SEQ ID NO: 4558318 - DNA, 25 bp, Homo sapien
tacctggatgacagtaccccaaacc

SEQ ID NO: 4558319 - DNA, 25 bp, Homo sapien
actgtcaccatgaaactgtatctat

SEQ ID NO: 4558320 - DNA, 25 bp, Homo sapien
taatcagggctgtccagtgaatcag

SEQ ID NO: 4558321 - DNA, 25 bp, Homo sapien
cagtgtctgacctgtcaaatgcggg

SEQ ID NO: 4558322 - DNA, 25 bp, Homo sapien
tcagaatgtggaggcatcaagaatc

SEQ ID NO: 4558323 - DNA, 25 bp, Homo sapien
catctgtagtgctcaatgtcagccc

SEQ ID NO: 4558324 - DNA, 25 bp, Homo sapien
gggcaaagctgtcagattcgatgta

SEQ ID NO: 4558325 - DNA, 25 bp, Homo sapien
taaatcatcctgaccgagaattgcc

SEQ ID NO: 4558326 - DNA, 25 bp, Homo sapien
tctccagctcgctgaattaggaggg

SEQ ID NO: 4558327 - DNA, 25 bp, Homo sapien
cactgttaagtggacagtgcaggag

SEQ ID NO: 4558328 - DNA, 25 bp, Homo sapien
gcagaagtgtggaggcttaccctgc

SEQ ID NO: 4558329 - DNA, 25 bp, Homo sapien
gcaaacgggcttgcaaaatgtggcc

SEQ ID NO: 4558330 - DNA, 25 bp, Homo sapien
ggaacgtttgccacattgacaccct

SEQ ID NO: 4558331 - DNA, 25 bp, Homo sapien
tcaccctgacagattaactgggcag

SEQ ID NO: 4558332 - DNA, 25 bp, Homo sapien
tctttgtcaagattggctccatgct

SEQ ID NO: 4558333 - DNA, 25 bp, Homo sapien
ggattggccatacacagtaatctca

SEQ ID NO: 4558334 - DNA, 25 bp, Homo sapien
acgaccggccctgggattctattgg

SEQ ID NO: 4558335 - DNA, 25 bp, Homo sapien
tgtgtagacaaacctaacagctctc

SEQ ID NO: 4558336 - DNA, 25 bp, Homo sapien
aaactgctaggctataggtgagagc

SEQ ID NO: 4558337 - DNA, 25 bp, Homo sapien
gagagcgaggtatctacttttgaat

SEQ ID NO: 4558338 - DNA, 25 bp, Homo sapien
ctataggtgagagcgaggtatctac

SEQ ID NO: 4558339 - DNA, 25 bp, Homo sapien
acctcccacacccattgtgaaatta

SEQ ID NO: 4558340 - DNA, 25 bp, Homo sapien
ccatgaagggatatcacctgctgaa

SEQ ID NO: 4558341 - DNA, 25 bp, Homo sapien
gactcccagatctgtgctgagcaaa

SEQ ID NO: 4558342 - DNA, 25 bp, Homo sapien
taagctcgctccataaaacactcag

SEQ ID NO: 4558343 - DNA, 25 bp, Homo sapien
ccaggactgtctctatgggctctca

SEQ ID NO: 4558344 - DNA, 25 bp, Homo sapien
ggtgtgcaacctataatcgagaagc

SEQ ID NO: 4558345 - DNA, 25 bp, Homo sapien
caacctataatcgagaagcatgagg

SEQ ID NO: 4558346 - DNA, 25 bp, Homo sapien
ggtggtgtgcaacctataatcgaga

SEQ ID NO: 4558347 - DNA, 25 bp, Homo sapien
tgtgcaacctataatcgagaagcat

SEQ ID NO: 4558348 - DNA, 25 bp, Homo sapien
attttagtatacgtgttactgtgag

SEQ ID NO: 4558349 - DNA, 25 bp, Homo sapien
gtatacgtgttactgtgagcatgca

SEQ ID NO: 4558350 - DNA, 25 bp, Homo sapien
tagtatacgtgttactgtgagcatg

SEQ ID NO: 4558351 - DNA, 25 bp, Homo sapien
tttagtatacgtgttactgtgagca

SEQ ID NO: 4558352 - DNA, 25 bp, Homo sapien
ccttcttgtacttaaactttgatat

SEQ ID NO: 4558353 - DNA, 25 bp, Homo sapien
ccaataattcttggatttgcccttc

SEQ ID NO: 4558354 - DNA, 25 bp, Homo sapien
caataattcttggatttgcccttct

SEQ ID NO: 4558355 - DNA, 25 bp, Homo sapien
tcttgtacttaaactttgatatctt

SEQ ID NO: 4558356 - DNA, 25 bp, Homo sapien
tgcccaaggcctgtataattatctg

SEQ ID NO: 4558357 - DNA, 25 bp, Homo sapien
tccagagatgctatcagggaaccag

SEQ ID NO: 4558358 - DNA, 25 bp, Homo sapien
catcaagtagtgaagccagctaggc

SEQ ID NO: 4558359 - DNA, 25 bp, Homo sapien
gatattcatggatgtctaggcactg

SEQ ID NO: 4558360 - DNA, 25 bp, Homo sapien
agaagcacgaactgcaggctgtgtc

SEQ ID NO: 4558361 - DNA, 25 bp, Homo sapien
tcagaagcacgaactgcaggctgtg

SEQ ID NO: 4558362 - DNA, 25 bp, Homo sapien
cagaagcacgaactgcaggctgtgt

SEQ ID NO: 4558363 - DNA, 25 bp, Homo sapien
ttctgcaaccctgccaaagagccta

SEQ ID NO: 4558364 - DNA, 25 bp, Homo sapien
tgccaaagagcctacgaatgacggc

SEQ ID NO: 4558365 - DNA, 25 bp, Homo sapien
agcctacgaatgacggccccatagc

SEQ ID NO: 4558366 - DNA, 25 bp, Homo sapien
caaccctgccaaagagcctacgaat

SEQ ID NO: 4558367 - DNA, 25 bp, Homo sapien
taaagggtctaacacaaggcagaac

SEQ ID NO: 4558368 - DNA, 25 bp, Homo sapien
gcacgcagccgagttcaatatctta

SEQ ID NO: 4558369 - DNA, 25 bp, Homo sapien
cttggacatgatggaaggacaccca

SEQ ID NO: 4558370 - DNA, 25 bp, Homo sapien
gaacatttcaaactaggtgccatgg

SEQ ID NO: 4558371 - DNA, 25 bp, Homo sapien
gatctccacgagttaaatcagaggc

SEQ ID NO: 4558372 - DNA, 25 bp, Homo sapien
caggagaatgtagtgtctgccctca

SEQ ID NO: 4558373 - DNA, 25 bp, Homo sapien
taaccagggaatgtcgagagtgtac

SEQ ID NO: 4558374 - DNA, 25 bp, Homo sapien
taaataactctatggtaagggccac

SEQ ID NO: 4558375 - DNA, 25 bp, Homo sapien
taaattcacggaagcatacccagcc

SEQ ID NO: 4558376 - DNA, 25 bp, Homo sapien
taggttttccaagcatgctgtcggc

SEQ ID NO: 4558377 - DNA, 25 bp, Homo sapien
tactcacaggacgttggaaatggca

SEQ ID NO: 4558378 - DNA, 25 bp, Homo sapien
aaaggtaaggtgcagttctccagcg

SEQ ID NO: 4558379 - DNA, 25 bp, Homo sapien
cattcactggcggctgccttgctgc

SEQ ID NO: 4558380 - DNA, 25 bp, Homo sapien
attcactggcggctgccttgctgcc

SEQ ID NO: 4558381 - DNA, 25 bp, Homo sapien
tcattcactggcggctgccttgctg

SEQ ID NO: 4558382 - DNA, 25 bp, Homo sapien
gttgggcacagtagctgtcacctat

SEQ ID NO: 4558383 - DNA, 25 bp, Homo sapien
catcgagcccagcatggtttggcat

SEQ ID NO: 4558384 - DNA, 25 bp, Homo sapien
ccatcgagcccagcatggtttggca

SEQ ID NO: 4558385 - DNA, 25 bp, Homo sapien
tctcccacctcagcctcctgagtag

SEQ ID NO: 4558386 - DNA, 25 bp, Homo sapien
tcccaggctcacgccattctcccac

SEQ ID NO: 4558387 - DNA, 25 bp, Homo sapien
ctgggactactggtgcccaccacca

SEQ ID NO: 4558388 - DNA, 25 bp, Homo sapien
tgcctggctaattttttttgcattg

SEQ ID NO: 4558389 - DNA, 25 bp, Homo sapien
ggtaagaccactcatatttgccaag

SEQ ID NO: 4558390 - DNA, 25 bp, Homo sapien
agctctaattcaccaagcctgtatg

SEQ ID NO: 4558391 - DNA, 25 bp, Homo sapien
catccactcccgttctctggtaaga

SEQ ID NO: 4558392 - DNA, 25 bp, Homo sapien
tgtatgctaacctcctttgccatgg

SEQ ID NO: 4558393 - DNA, 25 bp, Homo sapien
tagactgggatctaataaggttaga

SEQ ID NO: 4558394 - DNA, 25 bp, Homo sapien
cacctacaagcagactttcttgaaa

SEQ ID NO: 4558395 - DNA, 25 bp, Homo sapien
taaggttagatctgcactggatcag

SEQ ID NO: 4558396 - DNA, 25 bp, Homo sapien
agtacagtaaccttccacctacaag

SEQ ID NO: 4558397 - DNA, 25 bp, Homo sapien
gatgataagcccagattctacgaag

SEQ ID NO: 4558398 - DNA, 25 bp, Homo sapien
ttctggatccaaagcacatagcgga

SEQ ID NO: 4558399 - DNA, 25 bp, Homo sapien
caaactggtcatggccacaaaagca

SEQ ID NO: 4558400 - DNA, 25 bp, Homo sapien
cagccatgggtttcagtctatcaga

SEQ ID NO: 4558401 - DNA, 25 bp, Homo sapien
aagcggcaggaaatcagagctcgcg

SEQ ID NO: 4558402 - DNA, 25 bp, Homo sapien
cggccacagaaagtttcgcgacgca

SEQ ID NO: 4558403 - DNA, 25 bp, Homo sapien
atcagagctcgcgacgtgccggctc

SEQ ID NO: 4558404 - DNA, 25 bp, Homo sapien
cgcagaaaccgacttggaataaagt

SEQ ID NO: 4558405 - DNA, 25 bp, Homo sapien
gtcgcgtcttcgccgggtcccgctg

SEQ ID NO: 4558406 - DNA, 25 bp, Homo sapien
gggctggaacgcagtcttctgggcg

SEQ ID NO: 4558407 - DNA, 25 bp, Homo sapien
tggaacgcagtcttctgggcgaact

SEQ ID NO: 4558408 - DNA, 25 bp, Homo sapien
gaactggggctggaacgcagtcttc

SEQ ID NO: 4558409 - DNA, 25 bp, Homo sapien
tggcggtgctaggtgagggcgagac

SEQ ID NO: 4558410 - DNA, 25 bp, Homo sapien
aagagtccactcgtactcgccggtc

SEQ ID NO: 4558411 - DNA, 25 bp, Homo sapien
ccggcccaggtgagtccgatgcgct

SEQ ID NO: 4558412 - DNA, 25 bp, Homo sapien
tctttcttcggccacttaatccgta

SEQ ID NO: 4558413 - DNA, 25 bp, Homo sapien
tctcttgatgattgcagacatgtat

SEQ ID NO: 4558414 - DNA, 25 bp, Homo sapien
ggtgcgtagtcctcaataattatat

SEQ ID NO: 4558415 - DNA, 25 bp, Homo sapien
tttttcaattggtgcgtagtcctca

SEQ ID NO: 4558416 - DNA, 25 bp, Homo sapien
gaaattgctgtcgaaccagtaagac

SEQ ID NO: 4558417 - DNA, 25 bp, Homo sapien
ccaaataactgccgccttgcatcac

SEQ ID NO: 4558418 - DNA, 25 bp, Homo sapien
tttccccaaataactgccgccttgc

SEQ ID NO: 4558419 - DNA, 25 bp, Homo sapien
ttccccaaataactgccgccttgca

SEQ ID NO: 4558420 - DNA, 25 bp, Homo sapien
aataactgccgccttgcatcacaag

SEQ ID NO: 4558421 - DNA, 25 bp, Homo sapien
atcttgaacaaagcagacattagta

SEQ ID NO: 4558422 - DNA, 25 bp, Homo sapien
caaatattggtaggcaaaaggtgac

SEQ ID NO: 4558423 - DNA, 25 bp, Homo sapien
cttaggtggtattcttgtaaagcca

SEQ ID NO: 4558424 - DNA, 25 bp, Homo sapien
gacattagtaaccaccctcttccat

SEQ ID NO: 4558425 - DNA, 25 bp, Homo sapien
aagtactttagctcgagattgtccc

SEQ ID NO: 4558426 - DNA, 25 bp, Homo sapien
ggaaagtactttagctcgagattgt

SEQ ID NO: 4558427 - DNA, 25 bp, Homo sapien
aaagtactttagctcgagattgtcc

SEQ ID NO: 4558428 - DNA, 25 bp, Homo sapien
actggaaagtactttagctcgagat

SEQ ID NO: 4558429 - DNA, 25 bp, Homo sapien
agcatggccctgtttatggtaaggc

SEQ ID NO: 4558430 - DNA, 25 bp, Homo sapien
cagcatggccctgtttatggtaagg

SEQ ID NO: 4558431 - DNA, 25 bp, Homo sapien
catggccctgtttatggtaaggctt

SEQ ID NO: 4558432 - DNA, 25 bp, Homo sapien
ctcagcatggccctgtttatggtaa

SEQ ID NO: 4558433 - DNA, 25 bp, Homo sapien
tttgttctgtggcatgttgacgccg

SEQ ID NO: 4558434 - DNA, 25 bp, Homo sapien
tatttgttctgtggcatgttgacgc

SEQ ID NO: 4558435 - DNA, 25 bp, Homo sapien
tgttctgtggcatgttgacgccgca

SEQ ID NO: 4558436 - DNA, 25 bp, Homo sapien
tctgtggcatgttgacgccgcagag

SEQ ID NO: 4558437 - DNA, 25 bp, Homo sapien
tgtcccgattatgtctgccttagag

SEQ ID NO: 4558438 - DNA, 25 bp, Homo sapien
catgttgcacattcagttgtcccga

SEQ ID NO: 4558439 - DNA, 25 bp, Homo sapien
tgtctgccttagagcgtctcctagg

SEQ ID NO: 4558440 - DNA, 25 bp, Homo sapien
ttcagttgtcccgattatgtctgcc

SEQ ID NO: 4558441 - DNA, 25 bp, Homo sapien
caactcgacccagaaagaggtggct

SEQ ID NO: 4558442 - DNA, 25 bp, Homo sapien
tccttctgcctgataacaaatacta

SEQ ID NO: 4558443 - DNA, 25 bp, Homo sapien
ttttatccttgcaactcgacccaga

SEQ ID NO: 4558444 - DNA, 25 bp, Homo sapien
tattccttttatccttgcaactcga

SEQ ID NO: 4558445 - DNA, 25 bp, Homo sapien
ttccccttgataatgcagtcagtga

SEQ ID NO: 4558446 - DNA, 25 bp, Homo sapien
tccccttgataatgcagtcagtgac

SEQ ID NO: 4558447 - DNA, 25 bp, Homo sapien
cttccccttgataatgcagtcagtg

SEQ ID NO: 4558448 - DNA, 25 bp, Homo sapien
ccactttccagatgaggcggctgag

SEQ ID NO: 4558449 - DNA, 25 bp, Homo sapien
ccggcctatcatcacccactttcca

SEQ ID NO: 4558450 - DNA, 25 bp, Homo sapien
actttccagatgaggcggctgaggc

SEQ ID NO: 4558451 - DNA, 25 bp, Homo sapien
cacccggcctatcatcacccacttt

SEQ ID NO: 4558452 - DNA, 25 bp, Homo sapien
atgggatccacatcatgtccagtca

SEQ ID NO: 4558453 - DNA, 25 bp, Homo sapien
gctcgatgggatccacatcatgtcc

SEQ ID NO: 4558454 - DNA, 25 bp, Homo sapien
cgatgggatccacatcatgtccagt

SEQ ID NO: 4558455 - DNA, 25 bp, Homo sapien
tcgatgggatccacatcatgtccag

SEQ ID NO: 4558456 - DNA, 25 bp, Homo sapien
gataactcctgctcgaaaaacaggt

SEQ ID NO: 4558457 - DNA, 25 bp, Homo sapien
ccaaggtggcaatggtgataactcc

SEQ ID NO: 4558458 - DNA, 25 bp, Homo sapien
tggcaatggtgataactcctgctcg

SEQ ID NO: 4558459 - DNA, 25 bp, Homo sapien
tttcttctcagtccaggccagcagc

SEQ ID NO: 4558460 - DNA, 25 bp, Homo sapien
gtattacagttgagtagctctttgg

SEQ ID NO: 4558461 - DNA, 25 bp, Homo sapien
gccatgtttagaggatcgctctttg

SEQ ID NO: 4558462 - DNA, 25 bp, Homo sapien
tattacagttgagtagctctttggg

SEQ ID NO: 4558463 - DNA, 25 bp, Homo sapien
ttagaggatcgctctttgcctctgc

SEQ ID NO: 4558464 - DNA, 25 bp, Homo sapien
cctgcttcttcgcgacagcagcagc

SEQ ID NO: 4558465 - DNA, 25 bp, Homo sapien
tgcttcttcgcgacagcagcagctg

SEQ ID NO: 4558466 - DNA, 25 bp, Homo sapien
gcttcttcgcgacagcagcagctgg

SEQ ID NO: 4558467 - DNA, 25 bp, Homo sapien
ctgcttcttcgcgacagcagcagct

SEQ ID NO: 4558468 - DNA, 25 bp, Homo sapien
ccagcctgggcgacaagagtgaaac

SEQ ID NO: 4558469 - DNA, 25 bp, Homo sapien
gagactctcttgaacctgagaggcg

SEQ ID NO: 4558470 - DNA, 25 bp, Homo sapien
tgagctgagatcacgccattgcact

SEQ ID NO: 4558471 - DNA, 25 bp, Homo sapien
gaggttgcagtgagctgagatcacg

SEQ ID NO: 4558472 - DNA, 25 bp, Homo sapien
ggactctccattatgcccgaagatg

SEQ ID NO: 4558473 - DNA, 25 bp, Homo sapien
tctccgggacagtcagaagttaccg

SEQ ID NO: 4558474 - DNA, 25 bp, Homo sapien
gaggtagtgcccagactccttgaag

SEQ ID NO: 4558475 - DNA, 25 bp, Homo sapien
tcatgcttcatgaccatgtggttca

SEQ ID NO: 4558476 - DNA, 25 bp, Homo sapien
caagtttctgtaggtgcaaaggctt

SEQ ID NO: 4558477 - DNA, 25 bp, Homo sapien
tacaagacagacgtgaaaaaaagcc

SEQ ID NO: 4558478 - DNA, 25 bp, Homo sapien
tttctttacaagtttctgtaggtgc

SEQ ID NO: 4558479 - DNA, 25 bp, Homo sapien
caagacagacgtgaaaaaaagccag

SEQ ID NO: 4558480 - DNA, 25 bp, Homo sapien
ctctggcttcctccctgggatgagt

SEQ ID NO: 4558481 - DNA, 25 bp, Homo sapien
tctggcttcctccctgggatgagtg

SEQ ID NO: 4558482 - DNA, 25 bp, Homo sapien
ctgtgaggtagttgtgaggctgtga

SEQ ID NO: 4558483 - DNA, 25 bp, Homo sapien
acagtgcaagcacattgagggcacg

SEQ ID NO: 4558484 - DNA, 25 bp, Homo sapien
acattgagggcacgatgtgagctgt

SEQ ID NO: 4558485 - DNA, 25 bp, Homo sapien
aaatacggtagcattctcttcacag

SEQ ID NO: 4558486 - DNA, 25 bp, Homo sapien
tacactgccgaacttctctaaagag

SEQ ID NO: 4558487 - DNA, 25 bp, Homo sapien
ttctttacactgccgaacttctcta

SEQ ID NO: 4558488 - DNA, 25 bp, Homo sapien
actgccgaacttctctaaagagtga

SEQ ID NO: 4558489 - DNA, 25 bp, Homo sapien
tttacactgccgaacttctctaaag

SEQ ID NO: 4558490 - DNA, 25 bp, Homo sapien
tcgggctcttctaccatgtcgggct

SEQ ID NO: 4558491 - DNA, 25 bp, Homo sapien
cgctcagccgaatccacagttcggg

SEQ ID NO: 4558492 - DNA, 25 bp, Homo sapien
taatgctgccggagagagaattcca

SEQ ID NO: 4558493 - DNA, 25 bp, Homo sapien
gagaattccaaaaccgctcagccga

SEQ ID NO: 4558494 - DNA, 25 bp, Homo sapien
agtgaatgggcttgtgcgtcctgat

SEQ ID NO: 4558495 - DNA, 25 bp, Homo sapien
gcgtcctgatgagaatccaaaatcg

SEQ ID NO: 4558496 - DNA, 25 bp, Homo sapien
tgtctgctgcgatgagacacgatcc

SEQ ID NO: 4558497 - DNA, 25 bp, Homo sapien
gggttcttcttctcgtcgtgtctgc

SEQ ID NO: 4558498 - DNA, 25 bp, Homo sapien
taataacctttaatgtgttacatgt

SEQ ID NO: 4558499 - DNA, 25 bp, Homo sapien
ttaataacctttaatgtgttacatg

SEQ ID NO: 4558500 - DNA, 25 bp, Homo sapien
caccgtctcaccagagtagggatgc

SEQ ID NO: 4558501 - DNA, 25 bp, Homo sapien
gagcctgagtgaacaacttgccgca

SEQ ID NO: 4558502 - DNA, 25 bp, Homo sapien
cttccgcttctccttagtgctgcct

SEQ ID NO: 4558503 - DNA, 25 bp, Homo sapien
agaagagccttctctagtgtcctcc

SEQ ID NO: 4558504 - DNA, 25 bp, Homo sapien
agtagctggcagatagacttgggct

SEQ ID NO: 4558505 - DNA, 25 bp, Homo sapien
tagctggcagatagacttgggcttg

SEQ ID NO: 4558506 - DNA, 25 bp, Homo sapien
gacttgggcttgtgtttgccgattc

SEQ ID NO: 4558507 - DNA, 25 bp, Homo sapien
gtttgccgattcctgtgtactctcc

SEQ ID NO: 4558508 - DNA, 25 bp, Homo sapien
tgcctgaattcccagtctagtcacc

SEQ ID NO: 4558509 - DNA, 25 bp, Homo sapien
ctgaattcccagtctagtcaccagg

SEQ ID NO: 4558510 - DNA, 25 bp, Homo sapien
aattcccagtctagtcaccagggcc

SEQ ID NO: 4558511 - DNA, 25 bp, Homo sapien
cccagtctagtcaccagggccttgg

SEQ ID NO: 4558512 - DNA, 25 bp, Homo sapien
gggaatatattaatgaagccccaaa

SEQ ID NO: 4558513 - DNA, 25 bp, Homo sapien
taaacctggttgtgagggtgccatg

SEQ ID NO: 4558514 - DNA, 25 bp, Homo sapien
gctttggccataaaatccagtggta

SEQ ID NO: 4558515 - DNA, 25 bp, Homo sapien
tccggtttgggagatcttcgaggaa

SEQ ID NO: 4558516 - DNA, 25 bp, Homo sapien
tgcgttgaccacctagatattacag

SEQ ID NO: 4558517 - DNA, 25 bp, Homo sapien
gaatgtgttgctcctcaccctaaat

SEQ ID NO: 4558518 - DNA, 25 bp, Homo sapien
gataacgtaaggctcaatatctgcg

SEQ ID NO: 4558519 - DNA, 25 bp, Homo sapien
taaaaattgctaactgccatgtgga

SEQ ID NO: 4558520 - DNA, 25 bp, Homo sapien
gcatctctgtcttgtggggtctttg

SEQ ID NO: 4558521 - DNA, 25 bp, Homo sapien
gtctttgaggagaaggaatcagaac

SEQ ID NO: 4558522 - DNA, 25 bp, Homo sapien
ggagaaggaatcagaacatcgacac

SEQ ID NO: 4558523 - DNA, 25 bp, Homo sapien
aagcacaaaccacagcacaggaagc

SEQ ID NO: 4558524 - DNA, 25 bp, Homo sapien
tggtgcttcagcggaacccaggtac

SEQ ID NO: 4558525 - DNA, 25 bp, Homo sapien
cgtagagcaggctggtgcttcagcg

SEQ ID NO: 4558526 - DNA, 25 bp, Homo sapien
agcaggctggtgcttcagcggaacc

SEQ ID NO: 4558527 - DNA, 25 bp, Homo sapien
caggctggtgcttcagcggaaccca

SEQ ID NO: 4558528 - DNA, 25 bp, Homo sapien
gaggagctctccacagcactaccag

SEQ ID NO: 4558529 - DNA, 25 bp, Homo sapien
ggtgtgactcctctgagacatggag

SEQ ID NO: 4558530 - DNA, 25 bp, Homo sapien
cagccgccagagaagtgcgaggagc

SEQ ID NO: 4558531 - DNA, 25 bp, Homo sapien
agatttccagcacttaactgccagc

SEQ ID NO: 4558532 - DNA, 25 bp, Homo sapien
gctgctgtgctgctgcccaaaccat

SEQ ID NO: 4558533 - DNA, 25 bp, Homo sapien
agcagctgctgtgctgctgcccaaa

SEQ ID NO: 4558534 - DNA, 25 bp, Homo sapien
gcagctgctgtgctgctgcccaaac

SEQ ID NO: 4558535 - DNA, 25 bp, Homo sapien
ctgtctagcagctgctgtgctgctg

SEQ ID NO: 4558536 - DNA, 25 bp, Homo sapien
tctgcttcagtggttgtggacattc

SEQ ID NO: 4558537 - DNA, 25 bp, Homo sapien
tgaaaaattccgctctggatgaaga

SEQ ID NO: 4558538 - DNA, 25 bp, Homo sapien
gagtctgactcaggtcgtccttgga

SEQ ID NO: 4558539 - DNA, 25 bp, Homo sapien
tgtttagaatctaccccatgaagat

SEQ ID NO: 4558540 - DNA, 25 bp, Homo sapien
tgggagtcccagtcgcttaaaggag

SEQ ID NO: 4558541 - DNA, 25 bp, Homo sapien
ctttaaggcaagaaccgagcagcat

SEQ ID NO: 4558542 - DNA, 25 bp, Homo sapien
ccaagatggcaggatcatcccgctt

SEQ ID NO: 4558543 - DNA, 25 bp, Homo sapien
cattcttaggtgtgacagcgtgaac

SEQ ID NO: 4558544 - DNA, 25 bp, Homo sapien
tcagagctgtgtgttcggtgcacag

SEQ ID NO: 4558545 - DNA, 25 bp, Homo sapien
gctgtgtgttcggtgcacagctgaa

SEQ ID NO: 4558546 - DNA, 25 bp, Homo sapien
tgtgtgttcggtgcacagctgaaaa

SEQ ID NO: 4558547 - DNA, 25 bp, Homo sapien
agagctgtgtgttcggtgcacagct

SEQ ID NO: 4558548 - DNA, 25 bp, Homo sapien
cggccaacagttgctgtagccctgc

SEQ ID NO: 4558549 - DNA, 25 bp, Homo sapien
caggggatgccctgtccaggtttta

SEQ ID NO: 4558550 - DNA, 25 bp, Homo sapien
ggatgccctgtccaggttttactta

SEQ ID NO: 4558551 - DNA, 25 bp, Homo sapien
tgcttgaatgttttccggccaacag

SEQ ID NO: 4558552 - DNA, 25 bp, Homo sapien
tttctgatcatttttcttcacatgt

SEQ ID NO: 4558553 - DNA, 25 bp, Homo sapien
tgatcatttttcttcacatgtttca

SEQ ID NO: 4558554 - DNA, 25 bp, Homo sapien
catttttcttcacatgtttcaggaa

SEQ ID NO: 4558555 - DNA, 25 bp, Homo sapien
ttttctgatcatttttcttcacatg

SEQ ID NO: 4558556 - DNA, 25 bp, Homo sapien
tttgtttacaacaatgccaacagca

SEQ ID NO: 4558557 - DNA, 25 bp, Homo sapien
tgtttgtttacaacaatgccaacag

SEQ ID NO: 4558558 - DNA, 25 bp, Homo sapien
tgtttacaacaatgccaacagcatg

SEQ ID NO: 4558559 - DNA, 25 bp, Homo sapien
ctgtttgtttacaacaatgccaaca

SEQ ID NO: 4558560 - DNA, 25 bp, Homo sapien
ccctttgtgttggtcattttggcga

SEQ ID NO: 4558561 - DNA, 25 bp, Homo sapien
ctgggggacacggcagactcttcca

SEQ ID NO: 4558562 - DNA, 25 bp, Homo sapien
gggggacacggcagactcttccagt

SEQ ID NO: 4558563 - DNA, 25 bp, Homo sapien
ctttgtgttggtcattttggcgaat

SEQ ID NO: 4558564 - DNA, 25 bp, Homo sapien
agttaagatgcagctctgaagggcc

SEQ ID NO: 4558565 - DNA, 25 bp, Homo sapien
gggccacaaccaaaatcacataaga

SEQ ID NO: 4558566 - DNA, 25 bp, Homo sapien
cggtcctggaagcttatctctggtg

SEQ ID NO: 4558567 - DNA, 25 bp, Homo sapien
aaacattgatcagagtctctacttt

SEQ ID NO: 4558568 - DNA, 25 bp, Homo sapien
gcccattctttatcggacagttgca

SEQ ID NO: 4558569 - DNA, 25 bp, Homo sapien
tgaaatcctgtaacttgaggaaaac

SEQ ID NO: 4558570 - DNA, 25 bp, Homo sapien
tacttcgactcagaaaatgggccct

SEQ ID NO: 4558571 - DNA, 25 bp, Homo sapien
gccctttgggtagggagcataatgc

SEQ ID NO: 4558572 - DNA, 25 bp, Homo sapien
ggtctcttccagatgccctgggcat

SEQ ID NO: 4558573 - DNA, 25 bp, Homo sapien
caggtctcttccagatgccctgggc

SEQ ID NO: 4558574 - DNA, 25 bp, Homo sapien
caccgcctccaggtctcttccagat

SEQ ID NO: 4558575 - DNA, 25 bp, Homo sapien
tccaggtctcttccagatgccctgg

SEQ ID NO: 4558576 - DNA, 25 bp, Homo sapien
tcctgcttagtttcggagattagac

SEQ ID NO: 4558577 - DNA, 25 bp, Homo sapien
gtatcccactgaagtactaaccagg

SEQ ID NO: 4558578 - DNA, 25 bp, Homo sapien
cccaggcagtatcccactgaagtac

SEQ ID NO: 4558579 - DNA, 25 bp, Homo sapien
tagacagagattgagtgcgttcagg

SEQ ID NO: 4558580 - DNA, 25 bp, Homo sapien
aatggggcacgcatttaaatggctc

SEQ ID NO: 4558581 - DNA, 25 bp, Homo sapien
cagggattcctttctcggcctttgt

SEQ ID NO: 4558582 - DNA, 25 bp, Homo sapien
ttgctggaccctcaactgggtccag

SEQ ID NO: 4558583 - DNA, 25 bp, Homo sapien
tcttccttgcctcttttgctggacc

SEQ ID NO: 4558584 - DNA, 25 bp, Homo sapien
atgttctgataacccattaccagtg

SEQ ID NO: 4558585 - DNA, 25 bp, Homo sapien
cagtgacactaatattaatatgttc

SEQ ID NO: 4558586 - DNA, 25 bp, Homo sapien
cagtagggggttgtatagcaacttc

SEQ ID NO: 4558587 - DNA, 25 bp, Homo sapien
attaatatgttctgataacccatta

SEQ ID NO: 4558588 - DNA, 25 bp, Homo sapien
ggacattatcttacaaaagccatct

SEQ ID NO: 4558589 - DNA, 25 bp, Homo sapien
ggctcctctcatcctgctaatgtgg

SEQ ID NO: 4558590 - DNA, 25 bp, Homo sapien
taatggctggcaatcatttacgcct

SEQ ID NO: 4558591 - DNA, 25 bp, Homo sapien
aaattcttgggtcttgggtcatcag

SEQ ID NO: 4558592 - DNA, 25 bp, Homo sapien
taagtcacgggaactgcccttgcta

SEQ ID NO: 4558593 - DNA, 25 bp, Homo sapien
tcttctctctaagtcacgggaactg

SEQ ID NO: 4558594 - DNA, 25 bp, Homo sapien
aactgcccttgctacttgtgacctg

SEQ ID NO: 4558595 - DNA, 25 bp, Homo sapien
gctacttgtgacctgccctttactc

SEQ ID NO: 4558596 - DNA, 25 bp, Homo sapien
tctccctcttgccaagtgtcctgta

SEQ ID NO: 4558597 - DNA, 25 bp, Homo sapien
ctgtatgttcttcagggctagcatg

SEQ ID NO: 4558598 - DNA, 25 bp, Homo sapien
tagcatggaattaaggtgaggaagc

SEQ ID NO: 4558599 - DNA, 25 bp, Homo sapien
tgccttgaaatgtgcccgggatccc

SEQ ID NO: 4558600 - DNA, 25 bp, Homo sapien
cacttgatttcagttgaatgcctgc

SEQ ID NO: 4558601 - DNA, 25 bp, Homo sapien
gaatgcctgctggtagcttttccat

SEQ ID NO: 4558602 - DNA, 25 bp, Homo sapien
gatggaaagagaaccttcccttctg

SEQ ID NO: 4558603 - DNA, 25 bp, Homo sapien
ccattctgtggagctgccgttccta

SEQ ID NO: 4558604 - DNA, 25 bp, Homo sapien
ctgttgccagcagtggtgatcgatc

SEQ ID NO: 4558605 - DNA, 25 bp, Homo sapien
tatacacagtgggtgtgccctgaga

SEQ ID NO: 4558606 - DNA, 25 bp, Homo sapien
gctgatgtgatggtccttggtcctc

SEQ ID NO: 4558607 - DNA, 25 bp, Homo sapien
cagtggtgatcgatcacggcctccc

SEQ ID NO: 4558608 - DNA, 25 bp, Homo sapien
caggagcatcgaggtaacagcaaaa

SEQ ID NO: 4558609 - DNA, 25 bp, Homo sapien
agtggcatgctgaggtaacaactgc

SEQ ID NO: 4558610 - DNA, 25 bp, Homo sapien
gggtcaatccagttaaccatgtaag

SEQ ID NO: 4558611 - DNA, 25 bp, Homo sapien
gtagggacagtctatattggccagg

SEQ ID NO: 4558612 - DNA, 25 bp, Homo sapien
atattgctaccttaatagcttcacc

SEQ ID NO: 4558613 - DNA, 25 bp, Homo sapien
tgttccttgcaaaggaaatgggaaa

SEQ ID NO: 4558614 - DNA, 25 bp, Homo sapien
tgactttattgaaataagcattctg

SEQ ID NO: 4558615 - DNA, 25 bp, Homo sapien
ggcatcatgttccttgcaaaggaaa

SEQ ID NO: 4558616 - DNA, 25 bp, Homo sapien
cagaagatggtgtaaaaaagtcata

SEQ ID NO: 4558617 - DNA, 25 bp, Homo sapien
aagaggctacagagttacaagtttc

SEQ ID NO: 4558618 - DNA, 25 bp, Homo sapien
tactggaattctctggtatagcaca

SEQ ID NO: 4558619 - DNA, 25 bp, Homo sapien
taataaaggtgatgtaagaggctac

SEQ ID NO: 4558620 - DNA, 25 bp, Homo sapien
cattctgtagtattggagccagtat

SEQ ID NO: 4558621 - DNA, 25 bp, Homo sapien
tcattctgtagtattggagccagta

SEQ ID NO: 4558622 - DNA, 25 bp, Homo sapien
caagggttacgaggatgctgttacc

SEQ ID NO: 4558623 - DNA, 25 bp, Homo sapien
caacagaacatgtccgtgctaaaaa

SEQ ID NO: 4558624 - DNA, 25 bp, Homo sapien
tggctattggaaaatgcaacagaac

SEQ ID NO: 4558625 - DNA, 25 bp, Homo sapien
ttcaagtacaacagccatgagtggc

SEQ ID NO: 4558626 - DNA, 25 bp, Homo sapien
gattattcctaggtaaccttctgaa

SEQ ID NO: 4558627 - DNA, 25 bp, Homo sapien
ccttctgaactataacaagtcccca

SEQ ID NO: 4558628 - DNA, 25 bp, Homo sapien
cgctgctaggttcagagactttctg

SEQ ID NO: 4558629 - DNA, 25 bp, Homo sapien
aagtccccaacaataacgctgctag

SEQ ID NO: 4558630 - DNA, 25 bp, Homo sapien
cctaggtctggtgtgaaaagttcac

SEQ ID NO: 4558631 - DNA, 25 bp, Homo sapien
cccgttaggcttttcatatggatgc

SEQ ID NO: 4558632 - DNA, 25 bp, Homo sapien
tatctgggaattgatcatagggcca

SEQ ID NO: 4558633 - DNA, 25 bp, Homo sapien
aaatccgactcaaacagggaaatgg

SEQ ID NO: 4558634 - DNA, 25 bp, Homo sapien
ccatcacaggctacaattttcactt

SEQ ID NO: 4558635 - DNA, 25 bp, Homo sapien
tcacctctctgaattcaacatcatt

SEQ ID NO: 4558636 - DNA, 25 bp, Homo sapien
caaaagtccacacattatcgcagaa

SEQ ID NO: 4558637 - DNA, 25 bp, Homo sapien
ccactttaataagttctgtcacctc

SEQ ID NO: 4558638 - DNA, 25 bp, Homo sapien
tgcatcggtcactaagactacaaca

SEQ ID NO: 4558639 - DNA, 25 bp, Homo sapien
gactacaacattcattgtcttgtgc

SEQ ID NO: 4558640 - DNA, 25 bp, Homo sapien
cttggctcagatgcattactgcatc

SEQ ID NO: 4558641 - DNA, 25 bp, Homo sapien
gcagggatttcttagaaacactaaa

SEQ ID NO: 4558642 - DNA, 25 bp, Homo sapien
catctctgtatctcacattaagtgg

SEQ ID NO: 4558643 - DNA, 25 bp, Homo sapien
catacaaaggctgatttgtgaaaca

SEQ ID NO: 4558644 - DNA, 25 bp, Homo sapien
tggaatctcagtaactcttcaggga

SEQ ID NO: 4558645 - DNA, 25 bp, Homo sapien
tcttcagggaaggtagccaaacata

SEQ ID NO: 4558646 - DNA, 25 bp, Homo sapien
tccaaaaattgactaagccacctct

SEQ ID NO: 4558647 - DNA, 25 bp, Homo sapien
ccacctcttcctcttatgattaata

SEQ ID NO: 4558648 - DNA, 25 bp, Homo sapien
caaaaattgactaagccacctcttc

SEQ ID NO: 4558649 - DNA, 25 bp, Homo sapien
ttccaaaaattgactaagccacctc

SEQ ID NO: 4558650 - DNA, 25 bp, Homo sapien
attggtacaggcttctagattcagg

SEQ ID NO: 4558651 - DNA, 25 bp, Homo sapien
ttggtacaggcttctagattcagga

SEQ ID NO: 4558652 - DNA, 25 bp, Homo sapien
tggtacaggcttctagattcaggaa

SEQ ID NO: 4558653 - DNA, 25 bp, Homo sapien
cagtgctgcatttatagccttatca

SEQ ID NO: 4558654 - DNA, 25 bp, Homo sapien
tctgagccagtgctgcatttatagc

SEQ ID NO: 4558655 - DNA, 25 bp, Homo sapien
aactgaagtagaacttgaagggcaa

SEQ ID NO: 4558656 - DNA, 25 bp, Homo sapien
gaagtagaacttgaagggcaagttg

SEQ ID NO: 4558657 - DNA, 25 bp, Homo sapien
gacatcttttgtactatcttgacac

SEQ ID NO: 4558658 - DNA, 25 bp, Homo sapien
gatgatgaagcaccaagcttgaaga

SEQ ID NO: 4558659 - DNA, 25 bp, Homo sapien
tttgtactatcttgacacaaacaat

SEQ ID NO: 4558660 - DNA, 25 bp, Homo sapien
ccaagcttgaagacatcttttgtac

SEQ ID NO: 4558661 - DNA, 25 bp, Homo sapien
gcatgaaacactgcatgtacccaga

SEQ ID NO: 4558662 - DNA, 25 bp, Homo sapien
ggtaccatcatagtgcacttaagcc

SEQ ID NO: 4558663 - DNA, 25 bp, Homo sapien
gcatgcgcccacaccgaactaattt

SEQ ID NO: 4558664 - DNA, 25 bp, Homo sapien
cagtgttactgacttgctgggtcaa

SEQ ID NO: 4558665 - DNA, 25 bp, Homo sapien
tcatctaggctctcctgaagactgt

SEQ ID NO: 4558666 - DNA, 25 bp, Homo sapien
tgtttcccaaagtagtatttctgta

SEQ ID NO: 4558667 - DNA, 25 bp, Homo sapien
ctgtatgagctcatctaggctctcc

SEQ ID NO: 4558668 - DNA, 25 bp, Homo sapien
ggctctcctgaagactgtttcccaa

SEQ ID NO: 4558669 - DNA, 25 bp, Homo sapien
tttcttattcaagcttgcattgatg

SEQ ID NO: 4558670 - DNA, 25 bp, Homo sapien
tcttattcaagcttgcattgatgtc

SEQ ID NO: 4558671 - DNA, 25 bp, Homo sapien
tttttcttattcaagcttgcattga

SEQ ID NO: 4558672 - DNA, 25 bp, Homo sapien
gtttttcttattcaagcttgcattg

SEQ ID NO: 4558673 - DNA, 25 bp, Homo sapien
agctagactttagccaagcagagga

SEQ ID NO: 4558674 - DNA, 25 bp, Homo sapien
gctgcctgtagaagtgagctggctc

SEQ ID NO: 4558675 - DNA, 25 bp, Homo sapien
gcctgtagaagtgagctggctcaga

SEQ ID NO: 4558676 - DNA, 25 bp, Homo sapien
ccaggttctttaagctagactttag

SEQ ID NO: 4558677 - DNA, 25 bp, Homo sapien
cactgcccttttcggattgtcctaa

SEQ ID NO: 4558678 - DNA, 25 bp, Homo sapien
ttaagtaccactgctgatgatcccc

SEQ ID NO: 4558679 - DNA, 25 bp, Homo sapien
tttcgtacaggatcttaccttggct

SEQ ID NO: 4558680 - DNA, 25 bp, Homo sapien
aaactcttaatatcacaggacacag

SEQ ID NO: 4558681 - DNA, 25 bp, Homo sapien
aaatgaggctcaaactgaccaccgt

SEQ ID NO: 4558682 - DNA, 25 bp, Homo sapien
ggcaagaagtcccaataggtagata

SEQ ID NO: 4558683 - DNA, 25 bp, Homo sapien
gaatcgtgcatcgtgtcccatttga

SEQ ID NO: 4558684 - DNA, 25 bp, Homo sapien
taaaataggcgtctagaacagtacc

SEQ ID NO: 4558685 - DNA, 25 bp, Homo sapien
agtaactcgtcctagcattttttga

SEQ ID NO: 4558686 - DNA, 25 bp, Homo sapien
tagaagtcaaattcggaagtaactc

SEQ ID NO: 4558687 - DNA, 25 bp, Homo sapien
taatcttttagatgtggtatcagcc

SEQ ID NO: 4558688 - DNA, 25 bp, Homo sapien
cgttccttttgtcggagttcgcacg

SEQ ID NO: 4558689 - DNA, 25 bp, Homo sapien
aaaaaatgctctccgaaattcggca

SEQ ID NO: 4558690 - DNA, 25 bp, Homo sapien
aaaatgctctccgaaattcggcaaa

SEQ ID NO: 4558691 - DNA, 25 bp, Homo sapien
aatgctctccgaaattcggcaaaac

SEQ ID NO: 4558692 - DNA, 25 bp, Homo sapien
taaaaaatgctctccgaaattcggc

SEQ ID NO: 4558693 - DNA, 25 bp, Homo sapien
gcgctagtggatgctttaagacatt

SEQ ID NO: 4558694 - DNA, 25 bp, Homo sapien
gggcgctagtggatgctttaagaca

SEQ ID NO: 4558695 - DNA, 25 bp, Homo sapien
gctagtggatgctttaagacattca

SEQ ID NO: 4558696 - DNA, 25 bp, Homo sapien
agggcgctagtggatgctttaagac

SEQ ID NO: 4558697 - DNA, 25 bp, Homo sapien
ctggctgaaaatacggtggtgggct

SEQ ID NO: 4558698 - DNA, 25 bp, Homo sapien
gtgggctgaagacctcccctaggtg

SEQ ID NO: 4558699 - DNA, 25 bp, Homo sapien
tgggcgccccgtgaacgacgagcct

SEQ ID NO: 4558700 - DNA, 25 bp, Homo sapien
ggtgggttctgtgggcgccccgtga

SEQ ID NO: 4558701 - DNA, 25 bp, Homo sapien
ctgcttccctccctaaccctgccct

SEQ ID NO: 4558702 - DNA, 25 bp, Homo sapien
cccaccaacgcactccgactccggg

SEQ ID NO: 4558703 - DNA, 25 bp, Homo sapien
ggcggcagggagcgcggccctgctt

SEQ ID NO: 4558704 - DNA, 25 bp, Homo sapien
caccaacgcactccgactccggggg

SEQ ID NO: 4558705 - DNA, 25 bp, Homo sapien
gagcggacagaagccgccacgagcc

SEQ ID NO: 4558706 - DNA, 25 bp, Homo sapien
ttccctccgcggagcggacagaagc

SEQ ID NO: 4558707 - DNA, 25 bp, Homo sapien
caggaggttcctacttctccgacca

SEQ ID NO: 4558708 - DNA, 25 bp, Homo sapien
ccacgagcccggcaggaggttccta

SEQ ID NO: 4558709 - DNA, 25 bp, Homo sapien
gaacatttgagtagataatacccca

SEQ ID NO: 4558710 - DNA, 25 bp, Homo sapien
tatgacctataacaagaccagacct

SEQ ID NO: 4558711 - DNA, 25 bp, Homo sapien
gaatagtgctccaagggctgtgcaa

SEQ ID NO: 4558712 - DNA, 25 bp, Homo sapien
atttctgacagtactcggctgggca

SEQ ID NO: 4558713 - DNA, 25 bp, Homo sapien
ccttcaatccacagtctttattcac

SEQ ID NO: 4558714 - DNA, 25 bp, Homo sapien
tcaacttttcccccttcaatccaca

SEQ ID NO: 4558715 - DNA, 25 bp, Homo sapien
tatgaattcttatcatgggtatgta

SEQ ID NO: 4558716 - DNA, 25 bp, Homo sapien
catgggtatgtattatcaacttttc

SEQ ID NO: 4558717 - DNA, 25 bp, Homo sapien
taccatcagcagtcacatatggtac

SEQ ID NO: 4558718 - DNA, 25 bp, Homo sapien
tgttaccatcagcagtcacatatgg

SEQ ID NO: 4558719 - DNA, 25 bp, Homo sapien
atcagcagtcacatatggtacttcc

SEQ ID NO: 4558720 - DNA, 25 bp, Homo sapien
cttgcgtatagcctgcaggttttcc

SEQ ID NO: 4558721 - DNA, 25 bp, Homo sapien
ggtgcaggttaaagcaggtatccct

SEQ ID NO: 4558722 - DNA, 25 bp, Homo sapien
ttaggagtatgatcaagcagaacac

SEQ ID NO: 4558723 - DNA, 25 bp, Homo sapien
tacagtggcatcttaggtaacaact

SEQ ID NO: 4558724 - DNA, 25 bp, Homo sapien
cacttagagcctagtgacagaagca

SEQ ID NO: 4558725 - DNA, 25 bp, Homo sapien
tacatgagaatggtcacagccacat

SEQ ID NO: 4558726 - DNA, 25 bp, Homo sapien
gaagggttgaagagtagccatgacc

SEQ ID NO: 4558727 - DNA, 25 bp, Homo sapien
tcttgaaaggttagctcacatccac

SEQ ID NO: 4558728 - DNA, 25 bp, Homo sapien
tatgcttaccagctgtgtatgagcc

SEQ ID NO: 4558729 - DNA, 25 bp, Homo sapien
gaaaatcgtggtcttatatacctgc

SEQ ID NO: 4558730 - DNA, 25 bp, Homo sapien
taaagttctgactttgggccagaag

SEQ ID NO: 4558731 - DNA, 25 bp, Homo sapien
gggagcaataccctggacacatagc

SEQ ID NO: 4558732 - DNA, 25 bp, Homo sapien
tactcagcactcatatacactcagg

SEQ ID NO: 4558733 - DNA, 25 bp, Homo sapien
gttcatcttgttttccattaagttc

SEQ ID NO: 4558734 - DNA, 25 bp, Homo sapien
tgttcatttttcggttcatcttgtt

SEQ ID NO: 4558735 - DNA, 25 bp, Homo sapien
tcttgttttccattaagttcttgat

SEQ ID NO: 4558736 - DNA, 25 bp, Homo sapien
tcatcttgttttccattaagttctt

SEQ ID NO: 4558737 - DNA, 25 bp, Homo sapien
aaaataatgactattttagcataga

SEQ ID NO: 4558738 - DNA, 25 bp, Homo sapien
ctgttaaagacaaagctttgcaaag

SEQ ID NO: 4558739 - DNA, 25 bp, Homo sapien
ggcgggcggactgcttgaccaggag

SEQ ID NO: 4558740 - DNA, 25 bp, Homo sapien
ccgaggcgggcggactgcttgacca

SEQ ID NO: 4558741 - DNA, 25 bp, Homo sapien
gccgaggcgggcggactgcttgacc

SEQ ID NO: 4558742 - DNA, 25 bp, Homo sapien
gaggcgggcggactgcttgaccagg

SEQ ID NO: 4558743 - DNA, 25 bp, Homo sapien
cctagaaaggaatgtgaaatcagca

SEQ ID NO: 4558744 - DNA, 25 bp, Homo sapien
gaaatcagcatgatctaaaatcact

SEQ ID NO: 4558745 - DNA, 25 bp, Homo sapien
gaagtgtaaaactgattctatcaca

SEQ ID NO: 4558746 - DNA, 25 bp, Homo sapien
gaatgcacagcaatgcctagaaagg

SEQ ID NO: 4558747 - DNA, 25 bp, Homo sapien
caacccagtcaaggtgtgcatatac

SEQ ID NO: 4558748 - DNA, 25 bp, Homo sapien
gcaacccagtcaaggtgtgcatata

SEQ ID NO: 4558749 - DNA, 25 bp, Homo sapien
tgcaacccagtcaaggtgtgcatat

SEQ ID NO: 4558750 - DNA, 25 bp, Homo sapien
ttaacagccttctaccaagtccaag

SEQ ID NO: 4558751 - DNA, 25 bp, Homo sapien
tcaggtgagcagaacaaagaaactt

SEQ ID NO: 4558752 - DNA, 25 bp, Homo sapien
cagaacagaatttcagtcactggaa

SEQ ID NO: 4558753 - DNA, 25 bp, Homo sapien
tagttcttcaactgacagcctgaag

SEQ ID NO: 4558754 - DNA, 25 bp, Homo sapien
atcaaaatgttaagatccaatacaa

SEQ ID NO: 4558755 - DNA, 25 bp, Homo sapien
ttatccattgcacatcaaaatgtta

SEQ ID NO: 4558756 - DNA, 25 bp, Homo sapien
tgttaagatccaatacaattaagga

SEQ ID NO: 4558757 - DNA, 25 bp, Homo sapien
gtattatccattgcacatcaaaatg

SEQ ID NO: 4558758 - DNA, 25 bp, Homo sapien
tgttttatgcattctggtatgccaa

SEQ ID NO: 4558759 - DNA, 25 bp, Homo sapien
ctggtatgccaacgtattccatggg

SEQ ID NO: 4558760 - DNA, 25 bp, Homo sapien
gctagttctgccaaattaaacacgt

SEQ ID NO: 4558761 - DNA, 25 bp, Homo sapien
catggggacaagttctgctagttct

SEQ ID NO: 4558762 - DNA, 25 bp, Homo sapien
tgtacaatgattagggattttagat

SEQ ID NO: 4558763 - DNA, 25 bp, Homo sapien
caagaaggatgtacaatgattaggg

SEQ ID NO: 4558764 - DNA, 25 bp, Homo sapien
gtaacagccagaagtgttctgataa

SEQ ID NO: 4558765 - DNA, 25 bp, Homo sapien
ctaataaatggtcttgtaacagcca

SEQ ID NO: 4558766 - DNA, 25 bp, Homo sapien
cagactgggcatttttcttcgagtt

SEQ ID NO: 4558767 - DNA, 25 bp, Homo sapien
tcttcgagttgttgcaccatttaaa

SEQ ID NO: 4558768 - DNA, 25 bp, Homo sapien
tagctccaaagtgccaataacatat

SEQ ID NO: 4558769 - DNA, 25 bp, Homo sapien
tagttttctgctactaatagctcca

SEQ ID NO: 4558770 - DNA, 25 bp, Homo sapien
caggtatctatagttaggctgacta

SEQ ID NO: 4558771 - DNA, 25 bp, Homo sapien
aaaagattgtccatcaggtatctat

SEQ ID NO: 4558772 - DNA, 25 bp, Homo sapien
atagttaggctgactactttcaggc

SEQ ID NO: 4558773 - DNA, 25 bp, Homo sapien
ccatcaggtatctatagttaggctg

SEQ ID NO: 4558774 - DNA, 25 bp, Homo sapien
caatgtgcctaggttaacttctata

SEQ ID NO: 4558775 - DNA, 25 bp, Homo sapien
tcatctgagtacgattaaattaggc

SEQ ID NO: 4558776 - DNA, 25 bp, Homo sapien
gacttcctgatgcagattacgccat

SEQ ID NO: 4558777 - DNA, 25 bp, Homo sapien
catatgccctccgtcctgtgttagg

SEQ ID NO: 4558778 - DNA, 25 bp, Homo sapien
gaactgcacacttaagatcagagca

SEQ ID NO: 4558779 - DNA, 25 bp, Homo sapien
cactgtttataaattagggagactg

SEQ ID NO: 4558780 - DNA, 25 bp, Homo sapien
taagatcagagcatttcactgttta

SEQ ID NO: 4558781 - DNA, 25 bp, Homo sapien
atttcactgtttataaattagggag

SEQ ID NO: 4558782 - DNA, 25 bp, Homo sapien
ttttcggatatctgcggtggccgcc

SEQ ID NO: 4558783 - DNA, 25 bp, Homo sapien
acggactcttcaccctctgcgagaa

SEQ ID NO: 4558784 - DNA, 25 bp, Homo sapien
tgatattgcatgaaacggctagggc

SEQ ID NO: 4558785 - DNA, 25 bp, Homo sapien
tcttattgaaggatccagtggaacc

SEQ ID NO: 4558786 - DNA, 25 bp, Homo sapien
acaccagaaagccacatcaacaagc

SEQ ID NO: 4558787 - DNA, 25 bp, Homo sapien
gcacaccagaaagccacatcaacaa

SEQ ID NO: 4558788 - DNA, 25 bp, Homo sapien
tggcacaccagaaagccacatcaac

SEQ ID NO: 4558789 - DNA, 25 bp, Homo sapien
caccagaaagccacatcaacaagcc

SEQ ID NO: 4558790 - DNA, 25 bp, Homo sapien
tctgatattgcattaaacaatctga

SEQ ID NO: 4558791 - DNA, 25 bp, Homo sapien
ctgatattgcattaaacaatctgaa

SEQ ID NO: 4558792 - DNA, 25 bp, Homo sapien
tagggttcaattgccttcatatcaa

SEQ ID NO: 4558793 - DNA, 25 bp, Homo sapien
gaacatacgccagcgtcgtccatct

SEQ ID NO: 4558794 - DNA, 25 bp, Homo sapien
gtattcagtaattgagcctttccta

SEQ ID NO: 4558795 - DNA, 25 bp, Homo sapien
tccaatcctgaacatacgccagcgt

SEQ ID NO: 4558796 - DNA, 25 bp, Homo sapien
taatcatagtgaaacgtgtatccac

SEQ ID NO: 4558797 - DNA, 25 bp, Homo sapien
cagataggaagtggttaactactca

SEQ ID NO: 4558798 - DNA, 25 bp, Homo sapien
tacttcaagtagctatctgggagcc

SEQ ID NO: 4558799 - DNA, 25 bp, Homo sapien
tctccctggcagttatgactatagg

SEQ ID NO: 4558800 - DNA, 25 bp, Homo sapien
tagccaaagcataagcaccaatgat

SEQ ID NO: 4558801 - DNA, 25 bp, Homo sapien
gagattgcagtttagctgattttca

SEQ ID NO: 4558802 - DNA, 25 bp, Homo sapien
tatgttttgagattgcagtttagct

SEQ ID NO: 4558803 - DNA, 25 bp, Homo sapien
catgcagaagtctatttaaattagc

SEQ ID NO: 4558804 - DNA, 25 bp, Homo sapien
gctgttaacggaaaatatccttcca

SEQ ID NO: 4558805 - DNA, 25 bp, Homo sapien
tttccaagacaaagctgttaacgga

SEQ ID NO: 4558806 - DNA, 25 bp, Homo sapien
actgcatgttagttgtttccaagac

SEQ ID NO: 4558807 - DNA, 25 bp, Homo sapien
gggaaacctactgcatgttagttgt

SEQ ID NO: 4558808 - DNA, 25 bp, Homo sapien
ctgtttattgaaccagtaaaacagg

SEQ ID NO: 4558809 - DNA, 25 bp, Homo sapien
attgcttactactggactgtttatt

SEQ ID NO: 4558810 - DNA, 25 bp, Homo sapien
actggactgtttattgaaccagtaa

SEQ ID NO: 4558811 - DNA, 25 bp, Homo sapien
tattgaaccagtaaaacagggaaga

SEQ ID NO: 4558812 - DNA, 25 bp, Homo sapien
gggttagcacaatttcctatcttag

SEQ ID NO: 4558813 - DNA, 25 bp, Homo sapien
taaaatactgaatgctaaacactac

SEQ ID NO: 4558814 - DNA, 25 bp, Homo sapien
tcaggcaaacctacttaaaaagtca

SEQ ID NO: 4558815 - DNA, 25 bp, Homo sapien
catttcacaaagtagagcaatgtca

SEQ ID NO: 4558816 - DNA, 25 bp, Homo sapien
tattctctgacggtgtgtctaagcc

SEQ ID NO: 4558817 - DNA, 25 bp, Homo sapien
tgtctaagccatctaagtcaatctc

SEQ ID NO: 4558818 - DNA, 25 bp, Homo sapien
catccaaatcatctgacaatacaga

SEQ ID NO: 4558819 - DNA, 25 bp, Homo sapien
gccatcactaggatccagtgtcagg

SEQ ID NO: 4558820 - DNA, 25 bp, Homo sapien
cagttatagctagtatatctgcttc

SEQ ID NO: 4558821 - DNA, 25 bp, Homo sapien
gtatatctgcttcaatactatcatc

SEQ ID NO: 4558822 - DNA, 25 bp, Homo sapien
cctctggtccagttatagctagtat

SEQ ID NO: 4558823 - DNA, 25 bp, Homo sapien
aggctggtcctctggtccagttata

SEQ ID NO: 4558824 - DNA, 25 bp, Homo sapien
atcggaaaatcttcatcttgccatt

SEQ ID NO: 4558825 - DNA, 25 bp, Homo sapien
tcggaaaatcttcatcttgccattc

SEQ ID NO: 4558826 - DNA, 25 bp, Homo sapien
cttgccattcttctttaagttccac

SEQ ID NO: 4558827 - DNA, 25 bp, Homo sapien
cttctttaagttccacaccttccat

SEQ ID NO: 4558828 - DNA, 25 bp, Homo sapien
caaactcttgataatccagggagcc

SEQ ID NO: 4558829 - DNA, 25 bp, Homo sapien
tacaaactcttgataatccagggag

SEQ ID NO: 4558830 - DNA, 25 bp, Homo sapien
tcttgataatccagggagccaatgt

SEQ ID NO: 4558831 - DNA, 25 bp, Homo sapien
aactcttgataatccagggagccaa

SEQ ID NO: 4558832 - DNA, 25 bp, Homo sapien
catagtaagtccgtctataccattt

SEQ ID NO: 4558833 - DNA, 25 bp, Homo sapien
gcagaaaatgactaatgcttttcat

SEQ ID NO: 4558834 - DNA, 25 bp, Homo sapien
agaaaatgactaatgcttttcatag

SEQ ID NO: 4558835 - DNA, 25 bp, Homo sapien
tcatagtaagtccgtctataccatt

SEQ ID NO: 4558836 - DNA, 25 bp, Homo sapien
gtaatccaagcgatcagggaggctg

SEQ ID NO: 4558837 - DNA, 25 bp, Homo sapien
gcggaacacacttgaaaatgctgag

SEQ ID NO: 4558838 - DNA, 25 bp, Homo sapien
gctgagttctctcgaaattgtgaaa

SEQ ID NO: 4558839 - DNA, 25 bp, Homo sapien
caaaagatgactgtgccacctacaa

SEQ ID NO: 4558840 - DNA, 25 bp, Homo sapien
ctattccccgcggttacgaggcata

SEQ ID NO: 4558841 - DNA, 25 bp, Homo sapien
gacaagtaactctccagcggcatga

SEQ ID NO: 4558842 - DNA, 25 bp, Homo sapien
tcttgatgcaacaccggaaaagctg

SEQ ID NO: 4558843 - DNA, 25 bp, Homo sapien
gaaagggttgtgtctagattcacgc

SEQ ID NO: 4558844 - DNA, 25 bp, Homo sapien
gggcaaggttccatcccgagcacaa

SEQ ID NO: 4558845 - DNA, 25 bp, Homo sapien
tctttgttctgtaccaggacggacg

SEQ ID NO: 4558846 - DNA, 25 bp, Homo sapien
gacggacgctggtcataaatactga

SEQ ID NO: 4558847 - DNA, 25 bp, Homo sapien
aatactgaaccatcgtagcccagcc

SEQ ID NO: 4558848 - DNA, 25 bp, Homo sapien
gcagctgacccggacacagtgagaa

SEQ ID NO: 4558849 - DNA, 25 bp, Homo sapien
gaagtgataacatcccgacctcctc

SEQ ID NO: 4558850 - DNA, 25 bp, Homo sapien
acacagtgagaagccccggcggaag

SEQ ID NO: 4558851 - DNA, 25 bp, Homo sapien
caggtcgcaaaaagcagggccgagc

SEQ ID NO: 4558852 - DNA, 25 bp, Homo sapien
cattacaataggtgcaattatcagc

SEQ ID NO: 4558853 - DNA, 25 bp, Homo sapien
caataggtgcaattatcaatatcaa

SEQ ID NO: 4558854 - DNA, 25 bp, Homo sapien
ggtgcaattatcagtatcattacaa

SEQ ID NO: 4558855 - DNA, 25 bp, Homo sapien
tatcaatattattacaacaggtgca

SEQ ID NO: 4558856 - DNA, 25 bp, Homo sapien
tctatgtgcttatatgtacatggaa

SEQ ID NO: 4558857 - DNA, 25 bp, Homo sapien
ttgtatgtgctgctttgttaatgga

SEQ ID NO: 4558858 - DNA, 25 bp, Homo sapien
ataatttatttagctggtgagtttt

SEQ ID NO: 4558859 - DNA, 25 bp, Homo sapien
tatgtgctgctttgttaatggattt

SEQ ID NO: 4558860 - DNA, 25 bp, Homo sapien
ctgtgtcatccgttggattcccagg

SEQ ID NO: 4558861 - DNA, 25 bp, Homo sapien
ctcttgagcgccacttcaggtcttc

SEQ ID NO: 4558862 - DNA, 25 bp, Homo sapien
gcctgcagcgtgagcctctttgctt

SEQ ID NO: 4558863 - DNA, 25 bp, Homo sapien
tccctgcagacttcaacaaagctcc

SEQ ID NO: 4558864 - DNA, 25 bp, Homo sapien
aataatcaggtaactggaataccgt

SEQ ID NO: 4558865 - DNA, 25 bp, Homo sapien
taccgttcaataagtcctgcaattg

SEQ ID NO: 4558866 - DNA, 25 bp, Homo sapien
tcaggtaactggaataccgttcaat

SEQ ID NO: 4558867 - DNA, 25 bp, Homo sapien
tggaataccgttcaataagtcctgc

SEQ ID NO: 4558868 - DNA, 25 bp, Homo sapien
taactggaggtatctaaggcagctc

SEQ ID NO: 4558869 - DNA, 25 bp, Homo sapien
gtatctaaggcagctcatgagaccc

SEQ ID NO: 4558870 - DNA, 25 bp, Homo sapien
cagaccagattcctacttaactgga

SEQ ID NO: 4558871 - DNA, 25 bp, Homo sapien
cagattcctacttaactggaggtat

SEQ ID NO: 4558872 - DNA, 25 bp, Homo sapien
gacccgtatgctctcctgatgagga

SEQ ID NO: 4558873 - DNA, 25 bp, Homo sapien
cagggccagatatcgtagacccgta

SEQ ID NO: 4558874 - DNA, 25 bp, Homo sapien
tttgcccaatagagaatagacctct

SEQ ID NO: 4558875 - DNA, 25 bp, Homo sapien
tatccttcatgcataaaccagaaac

SEQ ID NO: 4558876 - DNA, 25 bp, Homo sapien
ccgttatactatagatctcttgaac

SEQ ID NO: 4558877 - DNA, 25 bp, Homo sapien
taaatcaggctaattcacatactca

SEQ ID NO: 4558878 - DNA, 25 bp, Homo sapien
tatgctgacaaatacaagtcgtaca

SEQ ID NO: 4558879 - DNA, 25 bp, Homo sapien
ggtgagaatgcaaaagctactcttg

SEQ ID NO: 4558880 - DNA, 25 bp, Homo sapien
gttggcaagaacaagcgccttacga

SEQ ID NO: 4558881 - DNA, 25 bp, Homo sapien
aggcggcaaaaagggagccaagaag

SEQ ID NO: 4558882 - DNA, 25 bp, Homo sapien
aaatattggaaagacgctcgtcacc

SEQ ID NO: 4558883 - DNA, 25 bp, Homo sapien
gccaagaagaaagtggttgatccat

SEQ ID NO: 4558884 - DNA, 25 bp, Homo sapien
caagccttaactctcaagtacacac

SEQ ID NO: 4558885 - DNA, 25 bp, Homo sapien
ttgtttagaggttctcctagcggct

SEQ ID NO: 4558886 - DNA, 25 bp, Homo sapien
tagaggttctcctagcggctgtgtc

SEQ ID NO: 4558887 - DNA, 25 bp, Homo sapien
tagcggctgtgtcattccctctcac

SEQ ID NO: 4558888 - DNA, 25 bp, Homo sapien
tctgtgtttacaagaacggccctga

SEQ ID NO: 4558889 - DNA, 25 bp, Homo sapien
cactattcctgggatttaggtcctc

SEQ ID NO: 4558890 - DNA, 25 bp, Homo sapien
tctgctcataaatgcgtcttgcaag

SEQ ID NO: 4558891 - DNA, 25 bp, Homo sapien
taggtcctcagagacaattaacacc

SEQ ID NO: 4558892 - DNA, 25 bp, Homo sapien
gactgggactgatgccggaagatca

SEQ ID NO: 4558893 - DNA, 25 bp, Homo sapien
gactgatgccggaagatcatctcca

SEQ ID NO: 4558894 - DNA, 25 bp, Homo sapien
ggcccaaaccttggactgggactga

SEQ ID NO: 4558895 - DNA, 25 bp, Homo sapien
aaaccttggactgggactgatgccg

SEQ ID NO: 4558896 - DNA, 25 bp, Homo sapien
agccagctgccattacactgtctga

SEQ ID NO: 4558897 - DNA, 25 bp, Homo sapien
agacatctcatcagcagataagtgt

SEQ ID NO: 4558898 - DNA, 25 bp, Homo sapien
gtgtctgtacttctgccctgcaaag

SEQ ID NO: 4558899 - DNA, 25 bp, Homo sapien
tgcaaagccagctgccattacactg

SEQ ID NO: 4558900 - DNA, 25 bp, Homo sapien
ggtctctcactatgtcccgtatttg

SEQ ID NO: 4558901 - DNA, 25 bp, Homo sapien
gtctctcactatgtcccgtatttga

SEQ ID NO: 4558902 - DNA, 25 bp, Homo sapien
attagcaggaatttttattactgca

SEQ ID NO: 4558903 - DNA, 25 bp, Homo sapien
tgactcagtgactttaggcgtatcc

SEQ ID NO: 4558904 - DNA, 25 bp, Homo sapien
ctgactcagtgactttaggcgtatc

SEQ ID NO: 4558905 - DNA, 25 bp, Homo sapien
agattttattagcaggaatttttat

SEQ ID NO: 4558906 - DNA, 25 bp, Homo sapien
cttcataattaagcccgtagggctg

SEQ ID NO: 4558907 - DNA, 25 bp, Homo sapien
tcataattaagcccgtagggctggc

SEQ ID NO: 4558908 - DNA, 25 bp, Homo sapien
ataattaagcccgtagggctggccg

SEQ ID NO: 4558909 - DNA, 25 bp, Homo sapien
ccttcataattaagcccgtagggct

SEQ ID NO: 4558910 - DNA, 25 bp, Homo sapien
gtccagatcttgttttgccattaac

SEQ ID NO: 4558911 - DNA, 25 bp, Homo sapien
acgaaacattacaagggcaggccgg

SEQ ID NO: 4558912 - DNA, 25 bp, Homo sapien
tgccattaactcaggaagaaaagag

SEQ ID NO: 4558913 - DNA, 25 bp, Homo sapien
tgcctcctgcatttcacacgaaaca

SEQ ID NO: 4558914 - DNA, 25 bp, Homo sapien
tctgatctgcagctttgtacatctg

SEQ ID NO: 4558915 - DNA, 25 bp, Homo sapien
gcctcttaaacttctgtgggcacat

SEQ ID NO: 4558916 - DNA, 25 bp, Homo sapien
ctgttagatggtgacatattgtgcc

SEQ ID NO: 4558917 - DNA, 25 bp, Homo sapien
tgtaatcttcctcgcatgccgacag

SEQ ID NO: 4558918 - DNA, 25 bp, Homo sapien
gccaacgagacatttgggactgtga

SEQ ID NO: 4558919 - DNA, 25 bp, Homo sapien
ctgtgaagcgccaaagttatgaata

SEQ ID NO: 4558920 - DNA, 25 bp, Homo sapien
gaagctttgagatagaatgaaagcc

SEQ ID NO: 4558921 - DNA, 25 bp, Homo sapien
aagacccaggaccttcggctgctga

SEQ ID NO: 4558922 - DNA, 25 bp, Homo sapien
ccatagtacgcaggcaggattcggt

SEQ ID NO: 4558923 - DNA, 25 bp, Homo sapien
tagtacccatagtacgcaggcagga

SEQ ID NO: 4558924 - DNA, 25 bp, Homo sapien
tcagggaagtctccttcacagaacc

SEQ ID NO: 4558925 - DNA, 25 bp, Homo sapien
tgtgctcatagtacccatagtacgc

SEQ ID NO: 4558926 - DNA, 25 bp, Homo sapien
atgccctccaggctaacaggtgtgg

SEQ ID NO: 4558927 - DNA, 25 bp, Homo sapien
gatgtggattaaagaagatgccatt

SEQ ID NO: 4558928 - DNA, 25 bp, Homo sapien
ctccaggctaacaggtgtgggacgt

SEQ ID NO: 4558929 - DNA, 25 bp, Homo sapien
gacgtggccagaagggatgtggatt

SEQ ID NO: 4558930 - DNA, 25 bp, Homo sapien
ccttttcattttagtgcggtaggca

SEQ ID NO: 4558931 - DNA, 25 bp, Homo sapien
gagcccttctgatccctgcataaaa

SEQ ID NO: 4558932 - DNA, 25 bp, Homo sapien
gcggtaggcaattgtgtcttctgcc

SEQ ID NO: 4558933 - DNA, 25 bp, Homo sapien
ctgccatatgaagggcagtcatttc

SEQ ID NO: 4558934 - DNA, 25 bp, Homo sapien
ggatcaccacctctactcgaagaca

SEQ ID NO: 4558935 - DNA, 25 bp, Homo sapien
tcaccacctctactcgaagacatag

SEQ ID NO: 4558936 - DNA, 25 bp, Homo sapien
aacaggatcaccacctctactcgaa

SEQ ID NO: 4558937 - DNA, 25 bp, Homo sapien
ccacctctactcgaagacatagcat

SEQ ID NO: 4558938 - DNA, 25 bp, Homo sapien
ggagccaacagtccgttctcaacac

SEQ ID NO: 4558939 - DNA, 25 bp, Homo sapien
ctcaacacattgagaaaggacaatc

SEQ ID NO: 4558940 - DNA, 25 bp, Homo sapien
gctccttagcgaagattccatcttg

SEQ ID NO: 4558941 - DNA, 25 bp, Homo sapien
aaacaaatctgagaacggagccaac

SEQ ID NO: 4558942 - DNA, 25 bp, Homo sapien
taacacacgatgaagcattttccct

SEQ ID NO: 4558943 - DNA, 25 bp, Homo sapien
ctataacacacgatgaagcattttc

SEQ ID NO: 4558944 - DNA, 25 bp, Homo sapien
ataacacacgatgaagcattttccc

SEQ ID NO: 4558945 - DNA, 25 bp, Homo sapien
tataacacacgatgaagcattttcc

SEQ ID NO: 4558946 - DNA, 25 bp, Homo sapien
acaacaatttgagtcggaatgtgcc

SEQ ID NO: 4558947 - DNA, 25 bp, Homo sapien
gagtcggaatgtgccacagccaaag

SEQ ID NO: 4558948 - DNA, 25 bp, Homo sapien
aatttgagtcggaatgtgccacagc

SEQ ID NO: 4558949 - DNA, 25 bp, Homo sapien
tttgagtcggaatgtgccacagcca

SEQ ID NO: 4558950 - DNA, 25 bp, Homo sapien
cttccatacactgttcacacttaac

SEQ ID NO: 4558951 - DNA, 25 bp, Homo sapien
aatgaccatgacaaacgacatgtca

SEQ ID NO: 4558952 - DNA, 25 bp, Homo sapien
tccttttaatgcagtcgcagttcag

SEQ ID NO: 4558953 - DNA, 25 bp, Homo sapien
ccttgggctccactctgaaatgtga

SEQ ID NO: 4558954 - DNA, 25 bp, Homo sapien
aagtccaaggtagttggcggccttg

SEQ ID NO: 4558955 - DNA, 25 bp, Homo sapien
gtgctgggcactatctgatggcttg

SEQ ID NO: 4558956 - DNA, 25 bp, Homo sapien
tgctgggcactatctgatggcttgg

SEQ ID NO: 4558957 - DNA, 25 bp, Homo sapien
tggctttaagtccaaggtagttggc

SEQ ID NO: 4558958 - DNA, 25 bp, Homo sapien
tggtagccaaattcaccactgcctc

SEQ ID NO: 4558959 - DNA, 25 bp, Homo sapien
gagaactgtctgctgtcagatgatt

SEQ ID NO: 4558960 - DNA, 25 bp, Homo sapien
ttctggtagccaaattcaccactgc

SEQ ID NO: 4558961 - DNA, 25 bp, Homo sapien
gatgatttcttgctaacgtgtttaa

SEQ ID NO: 4558962 - DNA, 25 bp, Homo sapien
caattaatttctcaagctgagactg

SEQ ID NO: 4558963 - DNA, 25 bp, Homo sapien
tgggctgccttatgaagaaagcagt

SEQ ID NO: 4558964 - DNA, 25 bp, Homo sapien
ctaggctcgtgtgtatgacttatat

SEQ ID NO: 4558965 - DNA, 25 bp, Homo sapien
atgacttatatgcttcctgggctgc

SEQ ID NO: 4558966 - DNA, 25 bp, Homo sapien
ttctgggcacaaaatgagcaagaca

SEQ ID NO: 4558967 - DNA, 25 bp, Homo sapien
tgaaggaaccccatttcttctgggc

SEQ ID NO: 4558968 - DNA, 25 bp, Homo sapien
gattgtttcaagtagtgaaggaacc

SEQ ID NO: 4558969 - DNA, 25 bp, Homo sapien
ggaaccccatttcttctgggcacaa

SEQ ID NO: 4558970 - DNA, 25 bp, Homo sapien
taatttagcaactcatagtgatatt

SEQ ID NO: 4558971 - DNA, 25 bp, Homo sapien
catgtaatttagcaactcatagtga

SEQ ID NO: 4558972 - DNA, 25 bp, Homo sapien
ctggctgttctgcttacacgatgaa

SEQ ID NO: 4558973 - DNA, 25 bp, Homo sapien
tggctgttctgcttacacgatgaat

SEQ ID NO: 4558974 - DNA, 25 bp, Homo sapien
gttgcattagctttaccatcatcgc

SEQ ID NO: 4558975 - DNA, 25 bp, Homo sapien
ggcagaaggaatcttttttcagagg

SEQ ID NO: 4558976 - DNA, 25 bp, Homo sapien
cattagctttaccatcatcgccaac

SEQ ID NO: 4558977 - DNA, 25 bp, Homo sapien
agagggacaaacaacgtatccctgc

SEQ ID NO: 4558978 - DNA, 25 bp, Homo sapien
ccttttttcagagaaatccttgcca

SEQ ID NO: 4558979 - DNA, 25 bp, Homo sapien
cagagaaatccttgccaggtcttca

SEQ ID NO: 4558980 - DNA, 25 bp, Homo sapien
gagaaatccttgccaggtcttcaac

SEQ ID NO: 4558981 - DNA, 25 bp, Homo sapien
ctccttttttcagagaaatccttgc

SEQ ID NO: 4558982 - DNA, 25 bp, Homo sapien
tattctgcatatagtcaagcagatg

SEQ ID NO: 4558983 - DNA, 25 bp, Homo sapien
ctggtgtattctgcatatagtcaag

SEQ ID NO: 4558984 - DNA, 25 bp, Homo sapien
ggtgtattctgcatatagtcaagca

SEQ ID NO: 4558985 - DNA, 25 bp, Homo sapien
ggcagataagagcatagtgtgtctg

SEQ ID NO: 4558986 - DNA, 25 bp, Homo sapien
atgtgttatcgccacccattatcaa

SEQ ID NO: 4558987 - DNA, 25 bp, Homo sapien
tgtgcttcagcagatgtgttatcgc

SEQ ID NO: 4558988 - DNA, 25 bp, Homo sapien
gcttcagcagatgtgttatcgccac

SEQ ID NO: 4558989 - DNA, 25 bp, Homo sapien
gcagatgtgttatcgccacccatta

SEQ ID NO: 4558990 - DNA, 25 bp, Homo sapien
tgagagaataaagacccctggtcta

SEQ ID NO: 4558991 - DNA, 25 bp, Homo sapien
aagacccctggtctattcgtgggca

SEQ ID NO: 4558992 - DNA, 25 bp, Homo sapien
aataaagacccctggtctattcgtg

SEQ ID NO: 4558993 - DNA, 25 bp, Homo sapien
tggtctattcgtgggcatgaacttt

SEQ ID NO: 4558994 - DNA, 25 bp, Homo sapien
tgccttccaggagtgatctgatggt

SEQ ID NO: 4558995 - DNA, 25 bp, Homo sapien
tcagtcatgttcataaagctcattt

SEQ ID NO: 4558996 - DNA, 25 bp, Homo sapien
gggcacctcacggttatcttcctca

SEQ ID NO: 4558997 - DNA, 25 bp, Homo sapien
ccttccaggagtgatctgatggttt

SEQ ID NO: 4558998 - DNA, 25 bp, Homo sapien
ttttttacatcaggcccagcatcat

SEQ ID NO: 4558999 - DNA, 25 bp, Homo sapien
ttttacatcaggcccagcatcattc

SEQ ID NO: 4559000 - DNA, 25 bp, Homo sapien
ttacatcaggcccagcatcattcac

SEQ ID NO: 4559001 - DNA, 25 bp, Homo sapien
cttttttttacatcaggcccagcat

SEQ ID NO: 4559002 - DNA, 25 bp, Homo sapien
tcttgagcttctgataaccccacat

SEQ ID NO: 4559003 - DNA, 25 bp, Homo sapien
cgtttcttcagacacacctccgttt

SEQ ID NO: 4559004 - DNA, 25 bp, Homo sapien
caactttaggttccggtgtgcattt

SEQ ID NO: 4559005 - DNA, 25 bp, Homo sapien
tgcattgctgtctctccgtttgtta

SEQ ID NO: 4559006 - DNA, 25 bp, Homo sapien
ttttcccacctatctatcaccagta

SEQ ID NO: 4559007 - DNA, 25 bp, Homo sapien
cttttcccacctatctatcaccagt

SEQ ID NO: 4559008 - DNA, 25 bp, Homo sapien
cttcatctgctgtaagccttaaaat

SEQ ID NO: 4559009 - DNA, 25 bp, Homo sapien
cttgccagattgtagaggaaacagt

SEQ ID NO: 4559010 - DNA, 25 bp, Homo sapien
ctccgctactctgaagcaattcatt

SEQ ID NO: 4559011 - DNA, 25 bp, Homo sapien
gcatgccttgccagattgtagagga

SEQ ID NO: 4559012 - DNA, 25 bp, Homo sapien
catcaggcttttggcccttctttac

SEQ ID NO: 4559013 - DNA, 25 bp, Homo sapien
tcctttgattgcatcaggcttttgg

SEQ ID NO: 4559014 - DNA, 25 bp, Homo sapien
taacttgcactggatgtcaagtatc

SEQ ID NO: 4559015 - DNA, 25 bp, Homo sapien
tactgccaataacttgcactggatg

SEQ ID NO: 4559016 - DNA, 25 bp, Homo sapien
ctaccagtccggacagctcatgctg

SEQ ID NO: 4559017 - DNA, 25 bp, Homo sapien
tttcctccagcagacgtgccaaaca

SEQ ID NO: 4559018 - DNA, 25 bp, Homo sapien
caaacagtggctgtgcaccgaaggt

SEQ ID NO: 4559019 - DNA, 25 bp, Homo sapien
aggttgccggcaagccgctaccagt

SEQ ID NO: 4559020 - DNA, 25 bp, Homo sapien
aatttcacattaaggttctactccg

SEQ ID NO: 4559021 - DNA, 25 bp, Homo sapien
cggagtagaaccttaatgtgaaatt

SEQ ID NO: 4559022 - DNA, 25 bp, Homo sapien
tagctgtgccactaggatattgaca

SEQ ID NO: 4559023 - DNA, 25 bp, Homo sapien
cagactccacgctggccaggtggtc

SEQ ID NO: 4559024 - DNA, 25 bp, Homo sapien
caaggagtccgagcaatggaacagg

SEQ ID NO: 4559025 - DNA, 25 bp, Homo sapien
gccttgtggcaactgagctggtaga

SEQ ID NO: 4559026 - DNA, 25 bp, Homo sapien
ccccttgacccatcccctaatctag

SEQ ID NO: 4559027 - DNA, 25 bp, Homo sapien
ccttgacccatcccctaatctagat

SEQ ID NO: 4559028 - DNA, 25 bp, Homo sapien
cttgacccatcccctaatctagatc

SEQ ID NO: 4559029 - DNA, 25 bp, Homo sapien
cccttgacccatcccctaatctaga

SEQ ID NO: 4559030 - DNA, 25 bp, Homo sapien
gcctacacgcatgcctttgacaaat

SEQ ID NO: 4559031 - DNA, 25 bp, Homo sapien
ttctccctgcctacacgcatgcctt

SEQ ID NO: 4559032 - DNA, 25 bp, Homo sapien
cacgcatgcctttgacaaattgatt

SEQ ID NO: 4559033 - DNA, 25 bp, Homo sapien
ctgcctacacgcatgcctttgacaa

SEQ ID NO: 4559034 - DNA, 25 bp, Homo sapien
gcaggtctcaagtctggctcagtca

SEQ ID NO: 4559035 - DNA, 25 bp, Homo sapien
gaccacagttcccatgaggactcga

SEQ ID NO: 4559036 - DNA, 25 bp, Homo sapien
aaaagctcccctctgggactagagg

SEQ ID NO: 4559037 - DNA, 25 bp, Homo sapien
tctgagtctgtcatagtgaccacag

SEQ ID NO: 4559038 - DNA, 25 bp, Homo sapien
gttcaacacattctaaacctctgct

SEQ ID NO: 4559039 - DNA, 25 bp, Homo sapien
cacgtcttccatcaaactgcagtaa

SEQ ID NO: 4559040 - DNA, 25 bp, Homo sapien
aattgtgtcctttgataccacgtct

SEQ ID NO: 4559041 - DNA, 25 bp, Homo sapien
gcagtaatccagttcaacacattct

SEQ ID NO: 4559042 - DNA, 25 bp, Homo sapien
gtcagggtagccttgtaattaagac

SEQ ID NO: 4559043 - DNA, 25 bp, Homo sapien
ttggctaattctaacttcagtcagg

SEQ ID NO: 4559044 - DNA, 25 bp, Homo sapien
aactacttccagcatgtttcttaaa

SEQ ID NO: 4559045 - DNA, 25 bp, Homo sapien
tacattagcataactacttccagca

SEQ ID NO: 4559046 - DNA, 25 bp, Homo sapien
aaatgcaaattgtatactttgaaaa

SEQ ID NO: 4559047 - DNA, 25 bp, Homo sapien
ttgtatactttgaaaagggatccca

SEQ ID NO: 4559048 - DNA, 25 bp, Homo sapien
gaaaagggatcccagatgaggtcac

SEQ ID NO: 4559049 - DNA, 25 bp, Homo sapien
ttgaaaagggatcccagatgaggtc

SEQ ID NO: 4559050 - DNA, 25 bp, Homo sapien
tcaccaaatccttaaggcgagttat

SEQ ID NO: 4559051 - DNA, 25 bp, Homo sapien
tctgtaacagggtcatataagagaa

SEQ ID NO: 4559052 - DNA, 25 bp, Homo sapien
gagaataccagataagagaatcaga

SEQ ID NO: 4559053 - DNA, 25 bp, Homo sapien
taaggcgagttatgttccagtcccc

SEQ ID NO: 4559054 - DNA, 25 bp, Homo sapien
caccccaggacgatgttgaggttaa

SEQ ID NO: 4559055 - DNA, 25 bp, Homo sapien
gttaaattacataaggcccaggtgc

SEQ ID NO: 4559056 - DNA, 25 bp, Homo sapien
tcatgtagaaaagacggagaccacc

SEQ ID NO: 4559057 - DNA, 25 bp, Homo sapien
gaaatctcctttcggcatgaggact

SEQ ID NO: 4559058 - DNA, 25 bp, Homo sapien
tcttttctttttcctggatgtacat

SEQ ID NO: 4559059 - DNA, 25 bp, Homo sapien
tgtcttttctttttcctggatgtac

SEQ ID NO: 4559060 - DNA, 25 bp, Homo sapien
gtcttttctttttcctggatgtaca

SEQ ID NO: 4559061 - DNA, 25 bp, Homo sapien
ctgtcttttctttttcctggatgta

SEQ ID NO: 4559062 - DNA, 25 bp, Homo sapien
cttggctgtctttcttttccaagca

SEQ ID NO: 4559063 - DNA, 25 bp, Homo sapien
ctgtctttcttttccaagcagcctc

SEQ ID NO: 4559064 - DNA, 25 bp, Homo sapien
ctgttaactcctggttcttggctgt

SEQ ID NO: 4559065 - DNA, 25 bp, Homo sapien
ttcttttccaagcagcctcagccgt

SEQ ID NO: 4559066 - DNA, 25 bp, Homo sapien
ctgctgtcaagggaaagcgcacggg

SEQ ID NO: 4559067 - DNA, 25 bp, Homo sapien
ggacccccaatatctgaccaacgga

SEQ ID NO: 4559068 - DNA, 25 bp, Homo sapien
ccaatatctgaccaacggactaggg

SEQ ID NO: 4559069 - DNA, 25 bp, Homo sapien
ctgaggacccccaatatctgaccaa

SEQ ID NO: 4559070 - DNA, 25 bp, Homo sapien
aaagtcacacttgcagttctgagcg

SEQ ID NO: 4559071 - DNA, 25 bp, Homo sapien
cagagtctaggtgagacctggagca

SEQ ID NO: 4559072 - DNA, 25 bp, Homo sapien
tgtgagctccataagagatcctgtc

SEQ ID NO: 4559073 - DNA, 25 bp, Homo sapien
gttctgagcgaaccaggatgatggt

SEQ ID NO: 4559074 - DNA, 25 bp, Homo sapien
caaatctgtggtcaaatagcttgtg

SEQ ID NO: 4559075 - DNA, 25 bp, Homo sapien
gcttgtgaaactttgcactgaacac

SEQ ID NO: 4559076 - DNA, 25 bp, Homo sapien
gaatgacttgtgtggattcaggcct

SEQ ID NO: 4559077 - DNA, 25 bp, Homo sapien
taaatgaagaatgagcctgttcaac

SEQ ID NO: 4559078 - DNA, 25 bp, Homo sapien
caagggtcacgttactggtcagaaa

SEQ ID NO: 4559079 - DNA, 25 bp, Homo sapien
tgagtcctatctacctttacagatg

SEQ ID NO: 4559080 - DNA, 25 bp, Homo sapien
caatattgcaaaaagactaagtgac

SEQ ID NO: 4559081 - DNA, 25 bp, Homo sapien
gaattcgcatcttctgatatccaag

SEQ ID NO: 4559082 - DNA, 25 bp, Homo sapien
agtgtcttatctggatcctcatgga

SEQ ID NO: 4559083 - DNA, 25 bp, Homo sapien
catataaggtgttcaagaatgctgc

SEQ ID NO: 4559084 - DNA, 25 bp, Homo sapien
tcaaggagcaacattgtggagtcac

SEQ ID NO: 4559085 - DNA, 25 bp, Homo sapien
tcaacaccctaagatccaaggtcat

SEQ ID NO: 4559086 - DNA, 25 bp, Homo sapien
gattctgtgatgctagttcacatcc

SEQ ID NO: 4559087 - DNA, 25 bp, Homo sapien
caccagattctgtgatgctagttca

SEQ ID NO: 4559088 - DNA, 25 bp, Homo sapien
acccaccagattctgtgatgctagt

SEQ ID NO: 4559089 - DNA, 25 bp, Homo sapien
gatgctagttcacatccagactggg

SEQ ID NO: 4559090 - DNA, 25 bp, Homo sapien
tgattaactttcaggcagcttgtca

SEQ ID NO: 4559091 - DNA, 25 bp, Homo sapien
gagtgacctgtttctaacgtaaagc

SEQ ID NO: 4559092 - DNA, 25 bp, Homo sapien
catatttgcactctctagcccctgg

SEQ ID NO: 4559093 - DNA, 25 bp, Homo sapien
gccacgctattgttcttgcaccaga

SEQ ID NO: 4559094 - DNA, 25 bp, Homo sapien
catcagggaatgtaatgacagcttg

SEQ ID NO: 4559095 - DNA, 25 bp, Homo sapien
caggcattgctactgaaagtgggtc

SEQ ID NO: 4559096 - DNA, 25 bp, Homo sapien
tgcatcagttgttgccgaggctacc

SEQ ID NO: 4559097 - DNA, 25 bp, Homo sapien
gataaggacccatcagtaggagcca

SEQ ID NO: 4559098 - DNA, 25 bp, Homo sapien
caacagtctgcttcaatgtatgtgc

SEQ ID NO: 4559099 - DNA, 25 bp, Homo sapien
gttcaacagtctgcttcaatgtatg

SEQ ID NO: 4559100 - DNA, 25 bp, Homo sapien
gtctgcttcaatgtatgtgcttgtt

SEQ ID NO: 4559101 - DNA, 25 bp, Homo sapien
taactgttcaacagtctgcttcaat

SEQ ID NO: 4559102 - DNA, 25 bp, Homo sapien
cataatattgctccttgcttacaga

SEQ ID NO: 4559103 - DNA, 25 bp, Homo sapien
tattgctccttgcttacagaagttg

SEQ ID NO: 4559104 - DNA, 25 bp, Homo sapien
tccttgcttacagaagttgcttcac

SEQ ID NO: 4559105 - DNA, 25 bp, Homo sapien
atgtccatatcataatattgctcct

SEQ ID NO: 4559106 - DNA, 25 bp, Homo sapien
tgaataagtggaaatcgaataggct

SEQ ID NO: 4559107 - DNA, 25 bp, Homo sapien
caagcgtagtgcaagcaaatactgt

SEQ ID NO: 4559108 - DNA, 25 bp, Homo sapien
caaatactgtaagagttggaaccct

SEQ ID NO: 4559109 - DNA, 25 bp, Homo sapien
tccacagcggtgtgccgctgccagg

SEQ ID NO: 4559110 - DNA, 25 bp, Homo sapien
agggattaaggcaccttgtgaatat

SEQ ID NO: 4559111 - DNA, 25 bp, Homo sapien
aaggcaccttgtgaatatgcattac

SEQ ID NO: 4559112 - DNA, 25 bp, Homo sapien
ttaaggcaccttgtgaatatgcatt

SEQ ID NO: 4559113 - DNA, 25 bp, Homo sapien
gattaaggcaccttgtgaatatgca

SEQ ID NO: 4559114 - DNA, 25 bp, Homo sapien
ggctgcctgctgtgtcggcgggcat

SEQ ID NO: 4559115 - DNA, 25 bp, Homo sapien
cggctgcctgctgtgtcggcgggca

SEQ ID NO: 4559116 - DNA, 25 bp, Homo sapien
ggccatcagcattcgctaaagcaat

SEQ ID NO: 4559117 - DNA, 25 bp, Homo sapien
tcccaatgctcttgggaacacgttg

SEQ ID NO: 4559118 - DNA, 25 bp, Homo sapien
taaagcaatgctggcagtatcactc

SEQ ID NO: 4559119 - DNA, 25 bp, Homo sapien
gaacacgttggccatctaacaaaga

SEQ ID NO: 4559120 - DNA, 25 bp, Homo sapien
taaatgggcaaggatatttgcctct

SEQ ID NO: 4559121 - DNA, 25 bp, Homo sapien
tttgcctctattgcgagaggtgggc

SEQ ID NO: 4559122 - DNA, 25 bp, Homo sapien
cagtgtaccagttttgtctctaagt

SEQ ID NO: 4559123 - DNA, 25 bp, Homo sapien
tggtaactccatataagtcacattc

SEQ ID NO: 4559124 - DNA, 25 bp, Homo sapien
tattgcctgtgctgtaaccagagag

SEQ ID NO: 4559125 - DNA, 25 bp, Homo sapien
aagaccagtctctctcgagctattg

SEQ ID NO: 4559126 - DNA, 25 bp, Homo sapien
tggaggaagccaaaactcatggctg

SEQ ID NO: 4559127 - DNA, 25 bp, Homo sapien
ggaactgcagaccaaatgcgcttag

SEQ ID NO: 4559128 - DNA, 25 bp, Homo sapien
ctgagctctgcagtgggcagctgca

SEQ ID NO: 4559129 - DNA, 25 bp, Homo sapien
tgagctctgcagtgggcagctgcat

SEQ ID NO: 4559130 - DNA, 25 bp, Homo sapien
tgttcccattagttaacttactgcc

SEQ ID NO: 4559131 - DNA, 25 bp, Homo sapien
agctgcttcaagtgttcccattagt

SEQ ID NO: 4559132 - DNA, 25 bp, Homo sapien
tgcttcaagtgttcccattagttaa

SEQ ID NO: 4559133 - DNA, 25 bp, Homo sapien
agttaacttactgcctctggtatca

SEQ ID NO: 4559134 - DNA, 25 bp, Homo sapien
caatctaactgcacataattgattt

SEQ ID NO: 4559135 - DNA, 25 bp, Homo sapien
tttctttgccgtccggcctgcgcga

SEQ ID NO: 4559136 - DNA, 25 bp, Homo sapien
ctgcgggtgctgatctgcgtctttc

SEQ ID NO: 4559137 - DNA, 25 bp, Homo sapien
tcttcgtattaacgattgcccgtgg

SEQ ID NO: 4559138 - DNA, 25 bp, Homo sapien
taaccaacttcaacgcacagcttcg

SEQ ID NO: 4559139 - DNA, 25 bp, Homo sapien
ctcggagtcatcaacaggtcgcggg

SEQ ID NO: 4559140 - DNA, 25 bp, Homo sapien
tccagacagcgcgatgataatgtga

SEQ ID NO: 4559141 - DNA, 25 bp, Homo sapien
ttacaccgccagcagttgctggttg

SEQ ID NO: 4559142 - DNA, 25 bp, Homo sapien
gcctcgctacttcactttgagatgc

SEQ ID NO: 4559143 - DNA, 25 bp, Homo sapien
tgagatgctcgagaaagtggctttg

SEQ ID NO: 4559144 - DNA, 25 bp, Homo sapien
ctgggaatgtcacgcctcgctactt

SEQ ID NO: 4559145 - DNA, 25 bp, Homo sapien
actttgagatgctcgagaaagtggc

SEQ ID NO: 4559146 - DNA, 25 bp, Homo sapien
cgcttcctcataccttcacacggcg

SEQ ID NO: 4559147 - DNA, 25 bp, Homo sapien
cataccttcacacggcgcacaccgg

SEQ ID NO: 4559148 - DNA, 25 bp, Homo sapien
cggccgcttcctcataccttcacac

SEQ ID NO: 4559149 - DNA, 25 bp, Homo sapien
ttcctcataccttcacacggcgcac

SEQ ID NO: 4559150 - DNA, 25 bp, Homo sapien
agccccacgtcctcgcaaacagcca

SEQ ID NO: 4559151 - DNA, 25 bp, Homo sapien
accttgctctcgaactcgccgccct

SEQ ID NO: 4559152 - DNA, 25 bp, Homo sapien
cccgccatccccgtgcccattaagc

SEQ ID NO: 4559153 - DNA, 25 bp, Homo sapien
cgtgcccattaagcccacgccggcc

SEQ ID NO: 4559154 - DNA, 25 bp, Homo sapien
caagagaactttgttttggacccag

SEQ ID NO: 4559155 - DNA, 25 bp, Homo sapien
tcttcgccgagaaaagcgcgtcttc

SEQ ID NO: 4559156 - DNA, 25 bp, Homo sapien
aacacaaacttgcagatgggccgag

SEQ ID NO: 4559157 - DNA, 25 bp, Homo sapien
gaactctgcgcagtttcaagactag

SEQ ID NO: 4559158 - DNA, 25 bp, Homo sapien
cagtgaaagaaaaggttctctgaaa

SEQ ID NO: 4559159 - DNA, 25 bp, Homo sapien
tcagtgaaagaaaaggttctctgaa

SEQ ID NO: 4559160 - DNA, 25 bp, Homo sapien
agtgaaagaaaaggttctctgaaag

SEQ ID NO: 4559161 - DNA, 25 bp, Homo sapien
gatgtagcccaatcttgtaggtgtc

SEQ ID NO: 4559162 - DNA, 25 bp, Homo sapien
aacaaagatgtagcccaatcttgta

SEQ ID NO: 4559163 - DNA, 25 bp, Homo sapien
caatcttgtaggtgtccagccgtaa

SEQ ID NO: 4559164 - DNA, 25 bp, Homo sapien
tgtaggtgtccagccgtaacctgaa

SEQ ID NO: 4559165 - DNA, 25 bp, Homo sapien
tctcttttgtgatcttaacggtgtc

SEQ ID NO: 4559166 - DNA, 25 bp, Homo sapien
aaaatcctatttgctgtttgtcagc

SEQ ID NO: 4559167 - DNA, 25 bp, Homo sapien
cagagttagttcctgaggcacgaaa

SEQ ID NO: 4559168 - DNA, 25 bp, Homo sapien
tgtcagccagagttagttcctgagg

SEQ ID NO: 4559169 - DNA, 25 bp, Homo sapien
tatgattacaccaaagcaaggggcc

SEQ ID NO: 4559170 - DNA, 25 bp, Homo sapien
gctttgggttcagactacagctgca

SEQ ID NO: 4559171 - DNA, 25 bp, Homo sapien
agcatgggctttgggttcagactac

SEQ ID NO: 4559172 - DNA, 25 bp, Homo sapien
gattaactgcaaggccttggacaag

SEQ ID NO: 4559173 - DNA, 25 bp, Homo sapien
ccagtttcaaagttgttatacttga

SEQ ID NO: 4559174 - DNA, 25 bp, Homo sapien
gatagaaaataaacacttattccag

SEQ ID NO: 4559175 - DNA, 25 bp, Homo sapien
aagttgttatacttgaagttgctat

SEQ ID NO: 4559176 - DNA, 25 bp, Homo sapien
ttgatagaaaataaacacttattcc

SEQ ID NO: 4559177 - DNA, 25 bp, Homo sapien
cctgctttcactaagacagtaaaat

SEQ ID NO: 4559178 - DNA, 25 bp, Homo sapien
atcctgctttcactaagacagtaaa

SEQ ID NO: 4559179 - DNA, 25 bp, Homo sapien
tcctgctttcactaagacagtaaaa

SEQ ID NO: 4559180 - DNA, 25 bp, Homo sapien
aatcctgctttcactaagacagtaa

SEQ ID NO: 4559181 - DNA, 25 bp, Homo sapien
tgccaatatatgcattagagaagcc

SEQ ID NO: 4559182 - DNA, 25 bp, Homo sapien
gccaatatatgcattagagaagccc

SEQ ID NO: 4559183 - DNA, 25 bp, Homo sapien
ccaatatatgcattagagaagccca

SEQ ID NO: 4559184 - DNA, 25 bp, Homo sapien
ataggccatcccttataagtgaaaa

SEQ ID NO: 4559185 - DNA, 25 bp, Homo sapien
tcttggtagaagataggccatccct

SEQ ID NO: 4559186 - DNA, 25 bp, Homo sapien
atcctgattcaggttaagacctggg

SEQ ID NO: 4559187 - DNA, 25 bp, Homo sapien
catcctgattcaggttaagacctgg

SEQ ID NO: 4559188 - DNA, 25 bp, Homo sapien
gcagctttagctagattcactcacc

SEQ ID NO: 4559189 - DNA, 25 bp, Homo sapien
cagccctcatgttttagctatggga

SEQ ID NO: 4559190 - DNA, 25 bp, Homo sapien
caaactgggcttgggatatgagcac

SEQ ID NO: 4559191 - DNA, 25 bp, Homo sapien
tcacagtggctcagatggatatcat

SEQ ID NO: 4559192 - DNA, 25 bp, Homo sapien
cactggacaaaagcatgcagatgag

SEQ ID NO: 4559193 - DNA, 25 bp, Homo sapien
gagcctatgtcgtataatcttccag

SEQ ID NO: 4559194 - DNA, 25 bp, Homo sapien
gtcaggagacaagattgcagagctg

SEQ ID NO: 4559195 - DNA, 25 bp, Homo sapien
aaattggagcaaaaacactggacaa

SEQ ID NO: 4559196 - DNA, 25 bp, Homo sapien
tctggaacgccttggtaggatttcc

SEQ ID NO: 4559197 - DNA, 25 bp, Homo sapien
agaaatctggaacgccttggtagga

SEQ ID NO: 4559198 - DNA, 25 bp, Homo sapien
ctgagaaatctggaacgccttggta

SEQ ID NO: 4559199 - DNA, 25 bp, Homo sapien
tcactttgctgctaccaggttccac

SEQ ID NO: 4559200 - DNA, 25 bp, Homo sapien
agctgccactgatagcccagagcct

SEQ ID NO: 4559201 - DNA, 25 bp, Homo sapien
gctgccactgatagcccagagcctc

SEQ ID NO: 4559202 - DNA, 25 bp, Homo sapien
cactgatagcccagagcctccaaaa

SEQ ID NO: 4559203 - DNA, 25 bp, Homo sapien
tgccactgatagcccagagcctcca

SEQ ID NO: 4559204 - DNA, 25 bp, Homo sapien
agcaggaaatgagacacgaccttcc

SEQ ID NO: 4559205 - DNA, 25 bp, Homo sapien
agacacgaccttccacaaaccattc

SEQ ID NO: 4559206 - DNA, 25 bp, Homo sapien
gagatacaaatcctagcaagcggga

SEQ ID NO: 4559207 - DNA, 25 bp, Homo sapien
tccttgccctacgtgaaagatggag

SEQ ID NO: 4559208 - DNA, 25 bp, Homo sapien
ccgtcagagtcgagagaggccattc

SEQ ID NO: 4559209 - DNA, 25 bp, Homo sapien
gaagtggtgacctgatcctggaaag

SEQ ID NO: 4559210 - DNA, 25 bp, Homo sapien
tgtcccctcgcataaaaggcgtttg

SEQ ID NO: 4559211 - DNA, 25 bp, Homo sapien
tttgtactggtgtccttcagcagaa

SEQ ID NO: 4559212 - DNA, 25 bp, Homo sapien
aatttgaagtatttccatgtcccct

SEQ ID NO: 4559213 - DNA, 25 bp, Homo sapien
cagcttttgaaggtagataatttga

SEQ ID NO: 4559214 - DNA, 25 bp, Homo sapien
tcatcggcaccccagaacacacaga

SEQ ID NO: 4559215 - DNA, 25 bp, Homo sapien
tctgctcatcggcaccccagaacac

SEQ ID NO: 4559216 - DNA, 25 bp, Homo sapien
agcttctgctcatcggcaccccaga

SEQ ID NO: 4559217 - DNA, 25 bp, Homo sapien
agccagcttctgctcatcggcaccc

SEQ ID NO: 4559218 - DNA, 25 bp, Homo sapien
gcctccatgtggtagattatcggga

SEQ ID NO: 4559219 - DNA, 25 bp, Homo sapien
gcttggcccctgatgctggtttgca

SEQ ID NO: 4559220 - DNA, 25 bp, Homo sapien
aaattcctgacagtctcacccagag

SEQ ID NO: 4559221 - DNA, 25 bp, Homo sapien
agtgggacatctctgctgggcagaa

SEQ ID NO: 4559222 - DNA, 25 bp, Homo sapien
gatttcaatgcagagtcagatcgct

SEQ ID NO: 4559223 - DNA, 25 bp, Homo sapien
gttctattccctgccaagtactgtg

SEQ ID NO: 4559224 - DNA, 25 bp, Homo sapien
gacttagaacagatgccctcaaggg

SEQ ID NO: 4559225 - DNA, 25 bp, Homo sapien
agcaagcaacgctgagggtcccagt

SEQ ID NO: 4559226 - DNA, 25 bp, Homo sapien
aaggggagcactggaaaaaccactg

SEQ ID NO: 4559227 - DNA, 25 bp, Homo sapien
atgttaatcccctcgccattgccag

SEQ ID NO: 4559228 - DNA, 25 bp, Homo sapien
tgttattcatgttaatcccctcgcc

SEQ ID NO: 4559229 - DNA, 25 bp, Homo sapien
cctcgccattgccagccacatcaat

SEQ ID NO: 4559230 - DNA, 25 bp, Homo sapien
ggtagaccgcttccttcaatcactg

SEQ ID NO: 4559231 - DNA, 25 bp, Homo sapien
cactgcttgaggaatcactggagga

SEQ ID NO: 4559232 - DNA, 25 bp, Homo sapien
gatccagtagtctgtatggcctaca

SEQ ID NO: 4559233 - DNA, 25 bp, Homo sapien
tcctgggtgctttttgatccagtag

SEQ ID NO: 4559234 - DNA, 25 bp, Homo sapien
ggatgattttcccattaggaatcct

SEQ ID NO: 4559235 - DNA, 25 bp, Homo sapien
ctaacaaaagtttgtctgggatgat

SEQ ID NO: 4559236 - DNA, 25 bp, Homo sapien
aagtttgtctgggatgattttccca

SEQ ID NO: 4559237 - DNA, 25 bp, Homo sapien
ttttcccattaggaatcctgcccat

SEQ ID NO: 4559238 - DNA, 25 bp, Homo sapien
gaagccatgtggtgattcctacaaa

SEQ ID NO: 4559239 - DNA, 25 bp, Homo sapien
ccttgaggactaagtcagcacggta

SEQ ID NO: 4559240 - DNA, 25 bp, Homo sapien
ttattcatagccatccactgccttg

SEQ ID NO: 4559241 - DNA, 25 bp, Homo sapien
tggttcgcagagcacagttttgttt

SEQ ID NO: 4559242 - DNA, 25 bp, Homo sapien
ggaagtgttcactaggagctctact

SEQ ID NO: 4559243 - DNA, 25 bp, Homo sapien
tgatcctcaagcatcccatgttcct

SEQ ID NO: 4559244 - DNA, 25 bp, Homo sapien
tctttcggcactgaaacgtttgtgc

SEQ ID NO: 4559245 - DNA, 25 bp, Homo sapien
tttgtgcttcccaggacttactcca

SEQ ID NO: 4559246 - DNA, 25 bp, Homo sapien
agccatctgtactagctgtcttagg

SEQ ID NO: 4559247 - DNA, 25 bp, Homo sapien
ctacagccatctgtactagctgtct

SEQ ID NO: 4559248 - DNA, 25 bp, Homo sapien
aactacagccatctgtactagctgt

SEQ ID NO: 4559249 - DNA, 25 bp, Homo sapien
tctgtactagctgtcttaggaaagc

SEQ ID NO: 4559250 - DNA, 25 bp, Homo sapien
caatgtgcactttaatcagatgttc

SEQ ID NO: 4559251 - DNA, 25 bp, Homo sapien
tcagatgttcaaccttgcccagctc

SEQ ID NO: 4559252 - DNA, 25 bp, Homo sapien
tcatgcagtagaaaactgtgagcaa

SEQ ID NO: 4559253 - DNA, 25 bp, Homo sapien
taggcaccacttggaactcatgcag

SEQ ID NO: 4559254 - DNA, 25 bp, Homo sapien
tccaacagcttcattacaatggcct

SEQ ID NO: 4559255 - DNA, 25 bp, Homo sapien
taaatggatccaaagtccaacagct

SEQ ID NO: 4559256 - DNA, 25 bp, Homo sapien
cttcattacaatggcctgactcagg

SEQ ID NO: 4559257 - DNA, 25 bp, Homo sapien
ggagcaggagctttgaaatatcgca

SEQ ID NO: 4559258 - DNA, 25 bp, Homo sapien
caacacacttcataagacatgatcg

SEQ ID NO: 4559259 - DNA, 25 bp, Homo sapien
gacatgatcgtcttgtcttctcttt

SEQ ID NO: 4559260 - DNA, 25 bp, Homo sapien
tcatcaacagtgataggaattactg

SEQ ID NO: 4559261 - DNA, 25 bp, Homo sapien
ttcatcaacagtgataggaattact

SEQ ID NO: 4559262 - DNA, 25 bp, Homo sapien
gtttgccagcggacaaggacagtgc

SEQ ID NO: 4559263 - DNA, 25 bp, Homo sapien
caatctctcagaggcccagtcaata

SEQ ID NO: 4559264 - DNA, 25 bp, Homo sapien
ccagtcaatactgaactgggcctcc

SEQ ID NO: 4559265 - DNA, 25 bp, Homo sapien
cattgcatctgcagggtactcggca

SEQ ID NO: 4559266 - DNA, 25 bp, Homo sapien
aagaagaatggcaagacgacagctt

SEQ ID NO: 4559267 - DNA, 25 bp, Homo sapien
gaagaatggcaagacgacagctttt

SEQ ID NO: 4559268 - DNA, 25 bp, Homo sapien
agaatggcaagacgacagctttttg

SEQ ID NO: 4559269 - DNA, 25 bp, Homo sapien
agaagaatggcaagacgacagcttt

SEQ ID NO: 4559270 - DNA, 25 bp, Homo sapien
gcaccagaaatagtgactcattaga

SEQ ID NO: 4559271 - DNA, 25 bp, Homo sapien
tttgatttgatccagcatatggctc

SEQ ID NO: 4559272 - DNA, 25 bp, Homo sapien
actcattagaaactgatagaacaag

SEQ ID NO: 4559273 - DNA, 25 bp, Homo sapien
gaaactgatagaacaagatgacaga

SEQ ID NO: 4559274 - DNA, 25 bp, Homo sapien
cattcaaatgccataatcaacagtg

SEQ ID NO: 4559275 - DNA, 25 bp, Homo sapien
gagagaacattgagctaatatttgg

SEQ ID NO: 4559276 - DNA, 25 bp, Homo sapien
tgattgggtaaagacagtccattca

SEQ ID NO: 4559277 - DNA, 25 bp, Homo sapien
acagtgcatagtcaagggccagcca

SEQ ID NO: 4559278 - DNA, 25 bp, Homo sapien
ttttctgacagccttaagcagttga

SEQ ID NO: 4559279 - DNA, 25 bp, Homo sapien
ggctctttatctttactggcgccat

SEQ ID NO: 4559280 - DNA, 25 bp, Homo sapien
cattatcaatgtccactaggctctt

SEQ ID NO: 4559281 - DNA, 25 bp, Homo sapien
taagcagttgatcatgcctaaagac

SEQ ID NO: 4559282 - DNA, 25 bp, Homo sapien
ctgcaaatgggtgggtgtcctccta

SEQ ID NO: 4559283 - DNA, 25 bp, Homo sapien
caaatgggtgggtgtcctcctatac

SEQ ID NO: 4559284 - DNA, 25 bp, Homo sapien
atctgcaaatgggtgggtgtcctcc

SEQ ID NO: 4559285 - DNA, 25 bp, Homo sapien
ttatctgcaaatgggtgggtgtcct

SEQ ID NO: 4559286 - DNA, 25 bp, Homo sapien
cacagttatgttaaatacatgacca

SEQ ID NO: 4559287 - DNA, 25 bp, Homo sapien
catctgttgtaattggcaactggct

SEQ ID NO: 4559288 - DNA, 25 bp, Homo sapien
ctgtgtacagtaaatagtactgcct

SEQ ID NO: 4559289 - DNA, 25 bp, Homo sapien
tactagagcaatggcctgacccaca

SEQ ID NO: 4559290 - DNA, 25 bp, Homo sapien
ttcagggaagaattgagtttggaaa

SEQ ID NO: 4559291 - DNA, 25 bp, Homo sapien
tacaaagtccccccatgtcattcag

SEQ ID NO: 4559292 - DNA, 25 bp, Homo sapien
tccagcggtaggcactgttacagag

SEQ ID NO: 4559293 - DNA, 25 bp, Homo sapien
acatgtttagctcggcacaaccagc

SEQ ID NO: 4559294 - DNA, 25 bp, Homo sapien
gcactgttacagaggaagacacact

SEQ ID NO: 4559295 - DNA, 25 bp, Homo sapien
cacactcttcccatagggtaacatg

SEQ ID NO: 4559296 - DNA, 25 bp, Homo sapien
ttgagggtgggagttcagggaacaa

SEQ ID NO: 4559297 - DNA, 25 bp, Homo sapien
gttgagggtgggagttcagggaaca

SEQ ID NO: 4559298 - DNA, 25 bp, Homo sapien
tgttgagggtgggagttcagggaac

SEQ ID NO: 4559299 - DNA, 25 bp, Homo sapien
ctgttgagggtgggagttcagggaa

SEQ ID NO: 4559300 - DNA, 25 bp, Homo sapien
ccaggatccgatgcctggtgttccg

SEQ ID NO: 4559301 - DNA, 25 bp, Homo sapien
gatccgatgcctggtgttccgacat

SEQ ID NO: 4559302 - DNA, 25 bp, Homo sapien
ccggtgggcccaggatccgatgcct

SEQ ID NO: 4559303 - DNA, 25 bp, Homo sapien
ggcccaggatccgatgcctggtgtt

SEQ ID NO: 4559304 - DNA, 25 bp, Homo sapien
gaagacattgcagtatagtatattt

SEQ ID NO: 4559305 - DNA, 25 bp, Homo sapien
ttgaagacattgcagtatagtatat

SEQ ID NO: 4559306 - DNA, 25 bp, Homo sapien
tttgaagacattgcagtatagtata

SEQ ID NO: 4559307 - DNA, 25 bp, Homo sapien
tgaagacattgcagtatagtatatt

SEQ ID NO: 4559308 - DNA, 25 bp, Homo sapien
atcccacagccctctctttcactaa

SEQ ID NO: 4559309 - DNA, 25 bp, Homo sapien
tagatcccacagccctctctttcac

SEQ ID NO: 4559310 - DNA, 25 bp, Homo sapien
gatcccacagccctctctttcacta

SEQ ID NO: 4559311 - DNA, 25 bp, Homo sapien
ctagatcccacagccctctctttca

SEQ ID NO: 4559312 - DNA, 25 bp, Homo sapien
tcacaagagtagtattgcatcaccg

SEQ ID NO: 4559313 - DNA, 25 bp, Homo sapien
gctagcaaggcagagtcttctaaaa

SEQ ID NO: 4559314 - DNA, 25 bp, Homo sapien
tgaacaccaacaccatagtcaaatg

SEQ ID NO: 4559315 - DNA, 25 bp, Homo sapien
ttcttgcaggcataggactcacggc

SEQ ID NO: 4559316 - DNA, 25 bp, Homo sapien
tggatacttcatcttccgtgatgtg

SEQ ID NO: 4559317 - DNA, 25 bp, Homo sapien
ggatacttcatcttccgtgatgtga

SEQ ID NO: 4559318 - DNA, 25 bp, Homo sapien
gatacttcatcttccgtgatgtgat

SEQ ID NO: 4559319 - DNA, 25 bp, Homo sapien
tatagctttaatccacgatcttggc

SEQ ID NO: 4559320 - DNA, 25 bp, Homo sapien
gatcttggctataccccttggaaaa

SEQ ID NO: 4559321 - DNA, 25 bp, Homo sapien
tgtgtttcacatctggtctatcccc

SEQ ID NO: 4559322 - DNA, 25 bp, Homo sapien
cctgaaatgagttgtagcctgaaaa

SEQ ID NO: 4559323 - DNA, 25 bp, Homo sapien
agatccaccctggggctaacagtaa

SEQ ID NO: 4559324 - DNA, 25 bp, Homo sapien
tcagatccaccctggggctaacagt

SEQ ID NO: 4559325 - DNA, 25 bp, Homo sapien
cagatccaccctggggctaacagta

SEQ ID NO: 4559326 - DNA, 25 bp, Homo sapien
acagagcttgaaagaggagctgact

SEQ ID NO: 4559327 - DNA, 25 bp, Homo sapien
ttgaaagaggagctgactaataaag

SEQ ID NO: 4559328 - DNA, 25 bp, Homo sapien
gagcttgaaagaggagctgactaat

SEQ ID NO: 4559329 - DNA, 25 bp, Homo sapien
gcttgaaagaggagctgactaataa

SEQ ID NO: 4559330 - DNA, 25 bp, Homo sapien
ccaactttcagacgtttgctaaata

SEQ ID NO: 4559331 - DNA, 25 bp, Homo sapien
caactttcagacgtttgctaaatag

SEQ ID NO: 4559332 - DNA, 25 bp, Homo sapien
accaactttcagacgtttgctaaat

SEQ ID NO: 4559333 - DNA, 25 bp, Homo sapien
caccaactttcagacgtttgctaaa

SEQ ID NO: 4559334 - DNA, 25 bp, Homo sapien
tagtcatctgcagcaaagggcttgc

SEQ ID NO: 4559335 - DNA, 25 bp, Homo sapien
gtagtcatctgcagcaaagggcttg

SEQ ID NO: 4559336 - DNA, 25 bp, Homo sapien
ctgtagtcatctgcagcaaagggct

SEQ ID NO: 4559337 - DNA, 25 bp, Homo sapien
tgtagtcatctgcagcaaagggctt

SEQ ID NO: 4559338 - DNA, 25 bp, Homo sapien
taggaaagtccagtagtccagctag

SEQ ID NO: 4559339 - DNA, 25 bp, Homo sapien
accatcaatcaggacacccacagaa

SEQ ID NO: 4559340 - DNA, 25 bp, Homo sapien
aaagtgtcgaggacagtgtggcctt

SEQ ID NO: 4559341 - DNA, 25 bp, Homo sapien
ggtgctgaagtcaaatctaggaaag

SEQ ID NO: 4559342 - DNA, 25 bp, Homo sapien
gggttatcaggcctacacaagtctg

SEQ ID NO: 4559343 - DNA, 25 bp, Homo sapien
gaattaagccaagtgttcacagtcc

SEQ ID NO: 4559344 - DNA, 25 bp, Homo sapien
gccacagccagagctatacattagc

SEQ ID NO: 4559345 - DNA, 25 bp, Homo sapien
tacatcttctggaatctagcagagg

SEQ ID NO: 4559346 - DNA, 25 bp, Homo sapien
gactgcacgcaggtccacaatgagg

SEQ ID NO: 4559347 - DNA, 25 bp, Homo sapien
agaagtcagctctcggcacagggag

SEQ ID NO: 4559348 - DNA, 25 bp, Homo sapien
aacaaagtgtgaggccaaccaagca

SEQ ID NO: 4559349 - DNA, 25 bp, Homo sapien
acagggagtctcagtgtcttcgaca

SEQ ID NO: 4559350 - DNA, 25 bp, Homo sapien
gcccctgtgacgttgagtgcaccca

SEQ ID NO: 4559351 - DNA, 25 bp, Homo sapien
caatagcatgagatgtagtggctgc

SEQ ID NO: 4559352 - DNA, 25 bp, Homo sapien
ctgcaggctgggtggatcatgtcac

SEQ ID NO: 4559353 - DNA, 25 bp, Homo sapien
catgggagggacagttttttcccat

SEQ ID NO: 4559354 - DNA, 25 bp, Homo sapien
tagctctctcttctgatatagatgg

SEQ ID NO: 4559355 - DNA, 25 bp, Homo sapien
gatatagatggatcgggcattccct

SEQ ID NO: 4559356 - DNA, 25 bp, Homo sapien
ctctcttctgatatagatggatcgg

SEQ ID NO: 4559357 - DNA, 25 bp, Homo sapien
gatggatcgggcattccctgtttca

SEQ ID NO: 4559358 - DNA, 25 bp, Homo sapien
cccatattcaccccatggccttgtc

SEQ ID NO: 4559359 - DNA, 25 bp, Homo sapien
tgggagcgtaagtttccccatattc

SEQ ID NO: 4559360 - DNA, 25 bp, Homo sapien
cacagtgggagcgtaagtttcccca

SEQ ID NO: 4559361 - DNA, 25 bp, Homo sapien
tgggcacagtgggagcgtaagtttc

SEQ ID NO: 4559362 - DNA, 25 bp, Homo sapien
caaaaatgagtagttgacacaccct

SEQ ID NO: 4559363 - DNA, 25 bp, Homo sapien
aaatgagtagttgacacaccctcca

SEQ ID NO: 4559364 - DNA, 25 bp, Homo sapien
gccctgcatcagccaggtgccaaaa

SEQ ID NO: 4559365 - DNA, 25 bp, Homo sapien
gccaaaaatgagtagttgacacacc

SEQ ID NO: 4559366 - DNA, 25 bp, Homo sapien
gggcaaccatactgtacagctcagt

SEQ ID NO: 4559367 - DNA, 25 bp, Homo sapien
aacaattcagttgaaagcagggcca

SEQ ID NO: 4559368 - DNA, 25 bp, Homo sapien
cagagctttcttcctacagggacag

SEQ ID NO: 4559369 - DNA, 25 bp, Homo sapien
cttaaatagcgacacttggataggg

SEQ ID NO: 4559370 - DNA, 25 bp, Homo sapien
tcagtttattcatctgtttatgaca

SEQ ID NO: 4559371 - DNA, 25 bp, Homo sapien
attcagtttattcatctgtttatga

SEQ ID NO: 4559372 - DNA, 25 bp, Homo sapien
agtttattcatctgtttatgacaca

SEQ ID NO: 4559373 - DNA, 25 bp, Homo sapien
cagtttattcatctgtttatgacac

SEQ ID NO: 4559374 - DNA, 25 bp, Homo sapien
acaggaggcaaagtgtttcacatca

SEQ ID NO: 4559375 - DNA, 25 bp, Homo sapien
acacaggaggcaaagtgtttcacat

SEQ ID NO: 4559376 - DNA, 25 bp, Homo sapien
gtacacaggaggcaaagtgtttcac

SEQ ID NO: 4559377 - DNA, 25 bp, Homo sapien
aggaggcaaagtgtttcacatcata

SEQ ID NO: 4559378 - DNA, 25 bp, Homo sapien
ggagagactagacaggaaggccagg

SEQ ID NO: 4559379 - DNA, 25 bp, Homo sapien
tgggggtaatgctaacgtcaccctc

SEQ ID NO: 4559380 - DNA, 25 bp, Homo sapien
ggggtaatgctaacgtcaccctcac

SEQ ID NO: 4559381 - DNA, 25 bp, Homo sapien
ggccaggcaatgcttaggcaactaa

SEQ ID NO: 4559382 - DNA, 25 bp, Homo sapien
gggactgttattcgcaagctggttt

SEQ ID NO: 4559383 - DNA, 25 bp, Homo sapien
cacggggactgttattcgcaagctg

SEQ ID NO: 4559384 - DNA, 25 bp, Homo sapien
gccacggggactgttattcgcaagc

SEQ ID NO: 4559385 - DNA, 25 bp, Homo sapien
ctgttattcgcaagctggttttcta

SEQ ID NO: 4559386 - DNA, 25 bp, Homo sapien
catggtgagcaccatttctggacgc

SEQ ID NO: 4559387 - DNA, 25 bp, Homo sapien
ctggaagcatggtgagcaccatttc

SEQ ID NO: 4559388 - DNA, 25 bp, Homo sapien
tttctggacgctcaggccgtgtcgg

SEQ ID NO: 4559389 - DNA, 25 bp, Homo sapien
agcaccatttctggacgctcaggcc

SEQ ID NO: 4559390 - DNA, 25 bp, Homo sapien
cagcgctttctggtagtcgccctta

SEQ ID NO: 4559391 - DNA, 25 bp, Homo sapien
ctttctggtagtcgcccttagtgtc

SEQ ID NO: 4559392 - DNA, 25 bp, Homo sapien
cgctttctggtagtcgcccttagtg

SEQ ID NO: 4559393 - DNA, 25 bp, Homo sapien
agcagcgctttctggtagtcgccct

SEQ ID NO: 4559394 - DNA, 25 bp, Homo sapien
taaacatgtgccctaataaacctgg

SEQ ID NO: 4559395 - DNA, 25 bp, Homo sapien
tcttcgggatgtcagcaagccttgc

SEQ ID NO: 4559396 - DNA, 25 bp, Homo sapien
gcaagggctgtctgaaatctacaca

SEQ ID NO: 4559397 - DNA, 25 bp, Homo sapien
gacctgccctgatacaaaggcctgg

SEQ ID NO: 4559398 - DNA, 25 bp, Homo sapien
tataatagtacagggacttgccgta

SEQ ID NO: 4559399 - DNA, 25 bp, Homo sapien
ggatataatagtacagggacttgcc

SEQ ID NO: 4559400 - DNA, 25 bp, Homo sapien
ctggatataatagtacagggacttg

SEQ ID NO: 4559401 - DNA, 25 bp, Homo sapien
gatataatagtacagggacttgccg

SEQ ID NO: 4559402 - DNA, 25 bp, Homo sapien
ttctcttgaattcagacctaatttt

SEQ ID NO: 4559403 - DNA, 25 bp, Homo sapien
atatttgttacattcgctgagaatg

SEQ ID NO: 4559404 - DNA, 25 bp, Homo sapien
cgctgagaatgttatcgttaaagaa

SEQ ID NO: 4559405 - DNA, 25 bp, Homo sapien
gttacattcgctgagaatgttatcg

SEQ ID NO: 4559406 - DNA, 25 bp, Homo sapien
gagaatgttatcgttaaagaaagcg

SEQ ID NO: 4559407 - DNA, 25 bp, Homo sapien
catacagccgatcagcaaaatacag

SEQ ID NO: 4559408 - DNA, 25 bp, Homo sapien
cctgatgctttccaacatgtcataa

SEQ ID NO: 4559409 - DNA, 25 bp, Homo sapien
gctttccaacatgtcataagggctg

SEQ ID NO: 4559410 - DNA, 25 bp, Homo sapien
cataagggctgtaactcttgtacct

SEQ ID NO: 4559411 - DNA, 25 bp, Homo sapien
caacatgtcataagggctgtaactc

SEQ ID NO: 4559412 - DNA, 25 bp, Homo sapien
caacaaagagttatcagatccgagc

SEQ ID NO: 4559413 - DNA, 25 bp, Homo sapien
gagttatcagatccgagccactagt

SEQ ID NO: 4559414 - DNA, 25 bp, Homo sapien
caaagagttatcagatccgagccac

SEQ ID NO: 4559415 - DNA, 25 bp, Homo sapien
tatcagatccgagccactagtcaaa

SEQ ID NO: 4559416 - DNA, 25 bp, Homo sapien
tgagtggaacccattccatccgaaa

SEQ ID NO: 4559417 - DNA, 25 bp, Homo sapien
cattggccaagtttgtcgtggaaca

SEQ ID NO: 4559418 - DNA, 25 bp, Homo sapien
ggtgaccagagccaacattggccaa

SEQ ID NO: 4559419 - DNA, 25 bp, Homo sapien
tacagagcatgcaccaaagtccact

SEQ ID NO: 4559420 - DNA, 25 bp, Homo sapien
aggtggggcacgctccgctcggtca

SEQ ID NO: 4559421 - DNA, 25 bp, Homo sapien
ggtggggcacgctccgctcggtcat

SEQ ID NO: 4559422 - DNA, 25 bp, Homo sapien
gactgcagccatgcaacattttgtc

SEQ ID NO: 4559423 - DNA, 25 bp, Homo sapien
ttggaagcagattcccttgacccag

SEQ ID NO: 4559424 - DNA, 25 bp, Homo sapien
gaacaattgggctaatctactcctc

SEQ ID NO: 4559425 - DNA, 25 bp, Homo sapien
tgtctgcaacctcagaaaagaccct

SEQ ID NO: 4559426 - DNA, 25 bp, Homo sapien
aaaactcaaagcaaaaagctcagca

SEQ ID NO: 4559427 - DNA, 25 bp, Homo sapien
aactcaaagcaaaaagctcagcact

SEQ ID NO: 4559428 - DNA, 25 bp, Homo sapien
acaaaaactcaaagcaaaaagctca

SEQ ID NO: 4559429 - DNA, 25 bp, Homo sapien
ctcaaagcaaaaagctcagcactta

SEQ ID NO: 4559430 - DNA, 25 bp, Homo sapien
cataatcaatgacagagccatcctc

SEQ ID NO: 4559431 - DNA, 25 bp, Homo sapien
tcaatcagttcataatcaatgacag

SEQ ID NO: 4559432 - DNA, 25 bp, Homo sapien
ccgagcatcttggtcaatcagttca

SEQ ID NO: 4559433 - DNA, 25 bp, Homo sapien
ttcataatcaatgacagagccatcc

SEQ ID NO: 4559434 - DNA, 25 bp, Homo sapien
tcacagagagcttgcaatgcagatg

SEQ ID NO: 4559435 - DNA, 25 bp, Homo sapien
ccagccaaggagtggtaaaatcatt

SEQ ID NO: 4559436 - DNA, 25 bp, Homo sapien
aaatgcgggcggaggaagaactctc

SEQ ID NO: 4559437 - DNA, 25 bp, Homo sapien
gaaacaaatgtaaagcagcccggga

SEQ ID NO: 4559438 - DNA, 25 bp, Homo sapien
cagatagaggcaaagtgaccttccc

SEQ ID NO: 4559439 - DNA, 25 bp, Homo sapien
tgggccggacgcactatctgtcatt

SEQ ID NO: 4559440 - DNA, 25 bp, Homo sapien
cacgctggccagaactagggattca

SEQ ID NO: 4559441 - DNA, 25 bp, Homo sapien
tcttccatgagaagtaaacgcagtg

SEQ ID NO: 4559442 - DNA, 25 bp, Homo sapien
aggcacaggggatttagttaattca

SEQ ID NO: 4559443 - DNA, 25 bp, Homo sapien
ggcacaggggatttagttaattcac

SEQ ID NO: 4559444 - DNA, 25 bp, Homo sapien
caggcacaggggatttagttaattc

SEQ ID NO: 4559445 - DNA, 25 bp, Homo sapien
ccaagtataaaatgaggtatgtgac

SEQ ID NO: 4559446 - DNA, 25 bp, Homo sapien
tccaagtataaaatgaggtatgtga

SEQ ID NO: 4559447 - DNA, 25 bp, Homo sapien
ccttgggaggaagcaagggcaaaga

SEQ ID NO: 4559448 - DNA, 25 bp, Homo sapien
gccttgggaggaagcaagggcaaag

SEQ ID NO: 4559449 - DNA, 25 bp, Homo sapien
atgtgtccgaaataatgtccttctc

SEQ ID NO: 4559450 - DNA, 25 bp, Homo sapien
tgtgtccgaaataatgtccttctcc

SEQ ID NO: 4559451 - DNA, 25 bp, Homo sapien
gtgtccgaaataatgtccttctcca

SEQ ID NO: 4559452 - DNA, 25 bp, Homo sapien
tgtccgaaataatgtccttctccag

SEQ ID NO: 4559453 - DNA, 25 bp, Homo sapien
tctcaatgagagagtcctcgtcggt

SEQ ID NO: 4559454 - DNA, 25 bp, Homo sapien
caatgagagagtcctcgtcggttcc

SEQ ID NO: 4559455 - DNA, 25 bp, Homo sapien
tcaatgagagagtcctcgtcggttc

SEQ ID NO: 4559456 - DNA, 25 bp, Homo sapien
tgatctcaatgagagagtcctcgtc

SEQ ID NO: 4559457 - DNA, 25 bp, Homo sapien
acttattagcgtttatatgccccga

SEQ ID NO: 4559458 - DNA, 25 bp, Homo sapien
tacccacatgaaaagcgtgtcagct

SEQ ID NO: 4559459 - DNA, 25 bp, Homo sapien
gataattatgcactcttcaggcact

SEQ ID NO: 4559460 - DNA, 25 bp, Homo sapien
tcaggcactttagggaagcaaaaag

SEQ ID NO: 4559461 - DNA, 25 bp, Homo sapien
cagtgtcggactgttcaaatgctgc

SEQ ID NO: 4559462 - DNA, 25 bp, Homo sapien
cataattcaggaacagtggcatcag

SEQ ID NO: 4559463 - DNA, 25 bp, Homo sapien
tctacagcgcagactttacccatgt

SEQ ID NO: 4559464 - DNA, 25 bp, Homo sapien
ggtgacaggcttacagctcagactg

SEQ ID NO: 4559465 - DNA, 25 bp, Homo sapien
aaaatcaccgtctccaggtggccag

SEQ ID NO: 4559466 - DNA, 25 bp, Homo sapien
cagaagcgtcatactgagcaggtgt

SEQ ID NO: 4559467 - DNA, 25 bp, Homo sapien
catggaagcttttagctcagaagcg

SEQ ID NO: 4559468 - DNA, 25 bp, Homo sapien
gtgtcttcaataggcccaaaatcac

SEQ ID NO: 4559469 - DNA, 25 bp, Homo sapien
tacaggtacttgcaggctacgagag

SEQ ID NO: 4559470 - DNA, 25 bp, Homo sapien
catctggcgtctgctagaacatgaa

SEQ ID NO: 4559471 - DNA, 25 bp, Homo sapien
taaggagaagcctcgcatctggcgt

SEQ ID NO: 4559472 - DNA, 25 bp, Homo sapien
tataacaccagtctcccagtttgga

SEQ ID NO: 4559473 - DNA, 25 bp, Homo sapien
gcaaagcctgtgagatcttgggacc

SEQ ID NO: 4559474 - DNA, 25 bp, Homo sapien
cataattctggtaatatcttccctc

SEQ ID NO: 4559475 - DNA, 25 bp, Homo sapien
ataattctccttggcctaaggctga

SEQ ID NO: 4559476 - DNA, 25 bp, Homo sapien
aacagccgattgtttcacttgaaac

SEQ ID NO: 4559477 - DNA, 25 bp, Homo sapien
gctacaagtgaaagccataagtcaa

SEQ ID NO: 4559478 - DNA, 25 bp, Homo sapien
ctgtggctacaagtgaaagccataa

SEQ ID NO: 4559479 - DNA, 25 bp, Homo sapien
gccataagtcaaacgggagctgcag

SEQ ID NO: 4559480 - DNA, 25 bp, Homo sapien
ccataagtcaaacgggagctgcagg

SEQ ID NO: 4559481 - DNA, 25 bp, Homo sapien
gcccactcgttgcaaaaagcttaag

SEQ ID NO: 4559482 - DNA, 25 bp, Homo sapien
tgaactaacaactaagcccactcgt

SEQ ID NO: 4559483 - DNA, 25 bp, Homo sapien
gagaggagcttgttaggatcaacac

SEQ ID NO: 4559484 - DNA, 25 bp, Homo sapien
acactcagtggaggctagtatccta

SEQ ID NO: 4559485 - DNA, 25 bp, Homo sapien
tctgtgcattgctgcggttggtcaa

SEQ ID NO: 4559486 - DNA, 25 bp, Homo sapien
ctgcggttggtcaaaatgttgacaa

SEQ ID NO: 4559487 - DNA, 25 bp, Homo sapien
tccttctctggtaggcgaaggcaat

SEQ ID NO: 4559488 - DNA, 25 bp, Homo sapien
ggtaggcgaaggcaatatcctgtct

SEQ ID NO: 4559489 - DNA, 25 bp, Homo sapien
gagagcctcaaacctcaagcttaaa

SEQ ID NO: 4559490 - DNA, 25 bp, Homo sapien
tagaaggtgtcaagcagactttttc

SEQ ID NO: 4559491 - DNA, 25 bp, Homo sapien
gatttgttctatctctttcgtcagc

SEQ ID NO: 4559492 - DNA, 25 bp, Homo sapien
cataaattggtttctggaatcaaca

SEQ ID NO: 4559493 - DNA, 25 bp, Homo sapien
aagagttcactccacaagccgcaat

SEQ ID NO: 4559494 - DNA, 25 bp, Homo sapien
gcctgggtggttaacgtgaatctta

SEQ ID NO: 4559495 - DNA, 25 bp, Homo sapien
tcggagatccccataaagagcctgg

SEQ ID NO: 4559496 - DNA, 25 bp, Homo sapien
caacccaggtaagaagtaacatcta

SEQ ID NO: 4559497 - DNA, 25 bp, Homo sapien
taccactgtctgcatgtttcaaatt

SEQ ID NO: 4559498 - DNA, 25 bp, Homo sapien
gctatttctcccataccactgtctg

SEQ ID NO: 4559499 - DNA, 25 bp, Homo sapien
ccactgtctgcatgtttcaaattga

SEQ ID NO: 4559500 - DNA, 25 bp, Homo sapien
tgcatcagctatttctcccatacca

SEQ ID NO: 4559501 - DNA, 25 bp, Homo sapien
tccagtgcttaaggaagtgtttgct

SEQ ID NO: 4559502 - DNA, 25 bp, Homo sapien
ggcggaagggcacagggtctaaaga

SEQ ID NO: 4559503 - DNA, 25 bp, Homo sapien
cgtgttccagtgcttaaggaagtgt

SEQ ID NO: 4559504 - DNA, 25 bp, Homo sapien
gaagtgtttgctgggcggaagggca

SEQ ID NO: 4559505 - DNA, 25 bp, Homo sapien
taatctgtagataatgatttgccac

SEQ ID NO: 4559506 - DNA, 25 bp, Homo sapien
tttggtaatctgtagataatgattt

SEQ ID NO: 4559507 - DNA, 25 bp, Homo sapien
tggtaatctgtagataatgatttgc

SEQ ID NO: 4559508 - DNA, 25 bp, Homo sapien
ggtaatctgtagataatgatttgcc

SEQ ID NO: 4559509 - DNA, 25 bp, Homo sapien
cactaaagggataacccagttgagg

SEQ ID NO: 4559510 - DNA, 25 bp, Homo sapien
tggtaataatgcatggccactaaag

SEQ ID NO: 4559511 - DNA, 25 bp, Homo sapien
catggccactaaagggataacccag

SEQ ID NO: 4559512 - DNA, 25 bp, Homo sapien
taatgcatggccactaaagggataa

SEQ ID NO: 4559513 - DNA, 25 bp, Homo sapien
tcctcagggaaaagagctaactgtt

SEQ ID NO: 4559514 - DNA, 25 bp, Homo sapien
tgacaccagattagaatctggttac

SEQ ID NO: 4559515 - DNA, 25 bp, Homo sapien
cctgggtgaaactggtatttggatt

SEQ ID NO: 4559516 - DNA, 25 bp, Homo sapien
tagaatctggttactgccattgtcc

SEQ ID NO: 4559517 - DNA, 25 bp, Homo sapien
aggcaggtgatgaaagctgatgctt

SEQ ID NO: 4559518 - DNA, 25 bp, Homo sapien
gcaggtgatgaaagctgatgcttac

SEQ ID NO: 4559519 - DNA, 25 bp, Homo sapien
ctgaagagaggcaggtgatgaaagc

SEQ ID NO: 4559520 - DNA, 25 bp, Homo sapien
aagagaggcaggtgatgaaagctga

SEQ ID NO: 4559521 - DNA, 25 bp, Homo sapien
gtgtttgatagctacgtggctcagg

SEQ ID NO: 4559522 - DNA, 25 bp, Homo sapien
ttgatagctacgtggctcaggtctg

SEQ ID NO: 4559523 - DNA, 25 bp, Homo sapien
tgatagctacgtggctcaggtctgg

SEQ ID NO: 4559524 - DNA, 25 bp, Homo sapien
gtttgatagctacgtggctcaggtc

SEQ ID NO: 4559525 - DNA, 25 bp, Homo sapien
tattggcacttacactaactctggg

SEQ ID NO: 4559526 - DNA, 25 bp, Homo sapien
gaaggccctgggctacgtgagtcac

SEQ ID NO: 4559527 - DNA, 25 bp, Homo sapien
caaatgaatatacctggcgtgcagg

SEQ ID NO: 4559528 - DNA, 25 bp, Homo sapien
gagagagaccaaagctgtaccagtt

SEQ ID NO: 4559529 - DNA, 25 bp, Homo sapien
gggaaatcaatggaacattacatgg

SEQ ID NO: 4559530 - DNA, 25 bp, Homo sapien
catccgtgtactcgacagcagctga

SEQ ID NO: 4559531 - DNA, 25 bp, Homo sapien
gcagctgattaagcctcctccaagg

SEQ ID NO: 4559532 - DNA, 25 bp, Homo sapien
cattacatggagtgggtagcgtccc

SEQ ID NO: 4559533 - DNA, 25 bp, Homo sapien
atcccgctcagcatcaaagttagta

SEQ ID NO: 4559534 - DNA, 25 bp, Homo sapien
tagtataggctttgacagacccata

SEQ ID NO: 4559535 - DNA, 25 bp, Homo sapien
tcttgatggctgtttcaatgttcaa

SEQ ID NO: 4559536 - DNA, 25 bp, Homo sapien
gctcagcatcaaagttagtataggc

SEQ ID NO: 4559537 - DNA, 25 bp, Homo sapien
cttttaacaattcagatcattctca

SEQ ID NO: 4559538 - DNA, 25 bp, Homo sapien
tcctcttgttgaaataacaatgcct

SEQ ID NO: 4559539 - DNA, 25 bp, Homo sapien
caatgcctaatatgttttcctattg

SEQ ID NO: 4559540 - DNA, 25 bp, Homo sapien
gataaacatactcaaatgacacaca

SEQ ID NO: 4559541 - DNA, 25 bp, Homo sapien
gcacttgtgaggactatcttggcca

SEQ ID NO: 4559542 - DNA, 25 bp, Homo sapien
gagtgaaaaggccaagatccgtgag

SEQ ID NO: 4559543 - DNA, 25 bp, Homo sapien
tgaagccagcatttactcaggatgg

SEQ ID NO: 4559544 - DNA, 25 bp, Homo sapien
tatatctagatgactcccaggagag

SEQ ID NO: 4559545 - DNA, 25 bp, Homo sapien
taaagtataggtcctcgagccaggc

SEQ ID NO: 4559546 - DNA, 25 bp, Homo sapien
gttctaaattccctaatagccacag

SEQ ID NO: 4559547 - DNA, 25 bp, Homo sapien
tctgtcggatatggctacaaaccag

SEQ ID NO: 4559548 - DNA, 25 bp, Homo sapien
tcagtgctgagtctgcgtaaaagcc

SEQ ID NO: 4559549 - DNA, 25 bp, Homo sapien
tccaattttaatgtgaggccaagaa

SEQ ID NO: 4559550 - DNA, 25 bp, Homo sapien
cagagagatgtccaacttgcaaaaa

SEQ ID NO: 4559551 - DNA, 25 bp, Homo sapien
tgccaaccagtaataaaatcccagg

SEQ ID NO: 4559552 - DNA, 25 bp, Homo sapien
caaattgaactactaggaacagctg

SEQ ID NO: 4559553 - DNA, 25 bp, Homo sapien
cacaggatttcgtgaacagtagaca

SEQ ID NO: 4559554 - DNA, 25 bp, Homo sapien
acaggatttcgtgaacagtagacat

SEQ ID NO: 4559555 - DNA, 25 bp, Homo sapien
gcacaggatttcgtgaacagtagac

SEQ ID NO: 4559556 - DNA, 25 bp, Homo sapien
caaaatgttccccatggctaatgca

SEQ ID NO: 4559557 - DNA, 25 bp, Homo sapien
caatccctgccaataaggagtgctc

SEQ ID NO: 4559558 - DNA, 25 bp, Homo sapien
tttatgcacagcgaaaagtcagtca

SEQ ID NO: 4559559 - DNA, 25 bp, Homo sapien
tagagctgcgtcctgaaatagacag

SEQ ID NO: 4559560 - DNA, 25 bp, Homo sapien
gaaatctctaacttcaacatggacc

SEQ ID NO: 4559561 - DNA, 25 bp, Homo sapien
gaaacattctagagggtctcatcag

SEQ ID NO: 4559562 - DNA, 25 bp, Homo sapien
tcatcagtatccctcagcccgagaa

SEQ ID NO: 4559563 - DNA, 25 bp, Homo sapien
gataatgtcgcgttaccttgcccag

SEQ ID NO: 4559564 - DNA, 25 bp, Homo sapien
caccttgaggagactgttaaaagcc

SEQ ID NO: 4559565 - DNA, 25 bp, Homo sapien
gctctgagctttgtagactgctgcc

SEQ ID NO: 4559566 - DNA, 25 bp, Homo sapien
tgggactccccagtactgtgcagat

SEQ ID NO: 4559567 - DNA, 25 bp, Homo sapien
tagaggcacggtaacttttcattgt

SEQ ID NO: 4559568 - DNA, 25 bp, Homo sapien
caggtgccttttgtatccatataaa

SEQ ID NO: 4559569 - DNA, 25 bp, Homo sapien
tcatgtgagtttaatggcaaacatt

SEQ ID NO: 4559570 - DNA, 25 bp, Homo sapien
ataaatatttcctacttcatgtgag

SEQ ID NO: 4559571 - DNA, 25 bp, Homo sapien
tgacattatcccatgcaggtgcctt

SEQ ID NO: 4559572 - DNA, 25 bp, Homo sapien
agcatacgctgagcctgcactatat

SEQ ID NO: 4559573 - DNA, 25 bp, Homo sapien
atacgctgagcctgcactatattaa

SEQ ID NO: 4559574 - DNA, 25 bp, Homo sapien
caagcatacgctgagcctgcactat

SEQ ID NO: 4559575 - DNA, 25 bp, Homo sapien
catacgctgagcctgcactatatta

SEQ ID NO: 4559576 - DNA, 25 bp, Homo sapien
ttctttattccaagtgattaagaca

SEQ ID NO: 4559577 - DNA, 25 bp, Homo sapien
atggttctttattccaagtgattaa

SEQ ID NO: 4559578 - DNA, 25 bp, Homo sapien
ctttattccaagtgattaagacaca

SEQ ID NO: 4559579 - DNA, 25 bp, Homo sapien
ggttctttattccaagtgattaaga

SEQ ID NO: 4559580 - DNA, 25 bp, Homo sapien
gactcactgataagagccataccca

SEQ ID NO: 4559581 - DNA, 25 bp, Homo sapien
taaactagaggtacagggagactca

SEQ ID NO: 4559582 - DNA, 25 bp, Homo sapien
gaaccactactccttttctggcaga

SEQ ID NO: 4559583 - DNA, 25 bp, Homo sapien
cttgggtaggaaaacaggtcacttg

SEQ ID NO: 4559584 - DNA, 25 bp, Homo sapien
gaccggcaggaagaatgatgtcact

SEQ ID NO: 4559585 - DNA, 25 bp, Homo sapien
tcttctgtggcctgatctgaatcaa

SEQ ID NO: 4559586 - DNA, 25 bp, Homo sapien
tgtttgctccctactgacttgttgc

SEQ ID NO: 4559587 - DNA, 25 bp, Homo sapien
gaattcctggaattcggcccagtga

SEQ ID NO: 4559588 - DNA, 25 bp, Homo sapien
tgtcagcattcaagaccttccacac

SEQ ID NO: 4559589 - DNA, 25 bp, Homo sapien
acagaaaaaagtctaatgtcagcat

SEQ ID NO: 4559590 - DNA, 25 bp, Homo sapien
agcattcaagaccttccacactgtg

SEQ ID NO: 4559591 - DNA, 25 bp, Homo sapien
tctaatgtcagcattcaagaccttc

SEQ ID NO: 4559592 - DNA, 25 bp, Homo sapien
cacagaagagttaactggactgtta

SEQ ID NO: 4559593 - DNA, 25 bp, Homo sapien
catgcatacacgcatcctgcacaga

SEQ ID NO: 4559594 - DNA, 25 bp, Homo sapien
ggaacctcaatcttaattagctgac

SEQ ID NO: 4559595 - DNA, 25 bp, Homo sapien
tccaaacacgctcagcactttctaa

SEQ ID NO: 4559596 - DNA, 25 bp, Homo sapien
tgaggagagatcgtgcgactacact

SEQ ID NO: 4559597 - DNA, 25 bp, Homo sapien
tacagtgaggagagatcgtgcgact

SEQ ID NO: 4559598 - DNA, 25 bp, Homo sapien
cagtgaggagagatcgtgcgactac

SEQ ID NO: 4559599 - DNA, 25 bp, Homo sapien
ctacagtgaggagagatcgtgcgac

SEQ ID NO: 4559600 - DNA, 25 bp, Homo sapien
gagaaagtagatgaggactgcctct

SEQ ID NO: 4559601 - DNA, 25 bp, Homo sapien
tctggaaggcagcttaagacaccat

SEQ ID NO: 4559602 - DNA, 25 bp, Homo sapien
gcaccagggcaagtgaagaggattc

SEQ ID NO: 4559603 - DNA, 25 bp, Homo sapien
tacaactagaatagggtgtggcacc

SEQ ID NO: 4559604 - DNA, 25 bp, Homo sapien
tcctaatcaaagtcagtgagtcagc

SEQ ID NO: 4559605 - DNA, 25 bp, Homo sapien
gggcatttaccacaggcagtctagt

SEQ ID NO: 4559606 - DNA, 25 bp, Homo sapien
actgtgttaacactcctggcccttg

SEQ ID NO: 4559607 - DNA, 25 bp, Homo sapien
tctagttggcactgcgggaaattac

SEQ ID NO: 4559608 - DNA, 25 bp, Homo sapien
taaataacaagactcctctcggttg

SEQ ID NO: 4559609 - DNA, 25 bp, Homo sapien
cacgaccacgcccagtatcgttgtt

SEQ ID NO: 4559610 - DNA, 25 bp, Homo sapien
caagactcctctcggttgctgaggc

SEQ ID NO: 4559611 - DNA, 25 bp, Homo sapien
cgaccacgcccagtatcgttgtttt

SEQ ID NO: 4559612 - DNA, 25 bp, Homo sapien
gaatatcgattcaatctgctagtct

SEQ ID NO: 4559613 - DNA, 25 bp, Homo sapien
ttaatgaatatcgattcaatctgct

SEQ ID NO: 4559614 - DNA, 25 bp, Homo sapien
agctggatgcaggtccgccgaaatg

SEQ ID NO: 4559615 - DNA, 25 bp, Homo sapien
aatctgctagtctctagctggatgc

SEQ ID NO: 4559616 - DNA, 25 bp, Homo sapien
aatgcgtcacggaagagccagaaga

SEQ ID NO: 4559617 - DNA, 25 bp, Homo sapien
tgtaatgcgtcacggaagagccaga

SEQ ID NO: 4559618 - DNA, 25 bp, Homo sapien
tgttgtaatgcgtcacggaagagcc

SEQ ID NO: 4559619 - DNA, 25 bp, Homo sapien
tggctgttgtaatgcgtcacggaag

SEQ ID NO: 4559620 - DNA, 25 bp, Homo sapien
ttttgaaatctccaataactctggg

SEQ ID NO: 4559621 - DNA, 25 bp, Homo sapien
tgggtggtggtaagaataggcatcc

SEQ ID NO: 4559622 - DNA, 25 bp, Homo sapien
aatctccaataactctgggtggtgg

SEQ ID NO: 4559623 - DNA, 25 bp, Homo sapien
ggtggtggtaagaataggcatcctt

SEQ ID NO: 4559624 - DNA, 25 bp, Homo sapien
cccctccttcttctcaacagccggc

SEQ ID NO: 4559625 - DNA, 25 bp, Homo sapien
agccggctgatggaacccaagccct

SEQ ID NO: 4559626 - DNA, 25 bp, Homo sapien
tcaacagccggctgatggaacccaa

SEQ ID NO: 4559627 - DNA, 25 bp, Homo sapien
aacttatctgtgttcccctccttct

SEQ ID NO: 4559628 - DNA, 25 bp, Homo sapien
gccaatgtgttcaaccaagcgggaa

SEQ ID NO: 4559629 - DNA, 25 bp, Homo sapien
tcctgaggccaatgtgttcaaccaa

SEQ ID NO: 4559630 - DNA, 25 bp, Homo sapien
tccgaagttgctatgctacaagata

SEQ ID NO: 4559631 - DNA, 25 bp, Homo sapien
caagcgggaaactctccgggtagag

SEQ ID NO: 4559632 - DNA, 25 bp, Homo sapien
cacaccccgctagctggcggcccat

SEQ ID NO: 4559633 - DNA, 25 bp, Homo sapien
tcccagcgtctccacaccccgctag

SEQ ID NO: 4559634 - DNA, 25 bp, Homo sapien
agcgtctccacaccccgctagctgg

SEQ ID NO: 4559635 - DNA, 25 bp, Homo sapien
ctccacaccccgctagctggcggcc

SEQ ID NO: 4559636 - DNA, 25 bp, Homo sapien
cgggcgggcagggcgcgccccgctt

SEQ ID NO: 4559637 - DNA, 25 bp, Homo sapien
cgcgggcgggcagggcgcgccccgc

SEQ ID NO: 4559638 - DNA, 25 bp, Homo sapien
gggcgggcagggcgcgccccgctta

SEQ ID NO: 4559639 - DNA, 25 bp, Homo sapien
ggcgggcagggcgcgccccgcttac

SEQ ID NO: 4559640 - DNA, 25 bp, Homo sapien
gccgtgcgccgagagctgagagcgt

SEQ ID NO: 4559641 - DNA, 25 bp, Homo sapien
tccccaaatgctgagcagagccggc

SEQ ID NO: 4559642 - DNA, 25 bp, Homo sapien
tgagagcgtccccaaatgctgagca

SEQ ID NO: 4559643 - DNA, 25 bp, Homo sapien
aatgctgagcagagccggctggcct

SEQ ID NO: 4559644 - DNA, 25 bp, Homo sapien
tgctccgcttctctccgcgcctggg

SEQ ID NO: 4559645 - DNA, 25 bp, Homo sapien
cccctgtccctagcacggctgtgct

SEQ ID NO: 4559646 - DNA, 25 bp, Homo sapien
agggtggcgcccctgtccctagcac

SEQ ID NO: 4559647 - DNA, 25 bp, Homo sapien
tccctagcacggctgtgctccgctt

SEQ ID NO: 4559648 - DNA, 25 bp, Homo sapien
gccaggctcattcatgctttgtacc

SEQ ID NO: 4559649 - DNA, 25 bp, Homo sapien
tcattcatgctttgtaccttcctcc

SEQ ID NO: 4559650 - DNA, 25 bp, Homo sapien
cattcatgctttgtaccttcctcca

SEQ ID NO: 4559651 - DNA, 25 bp, Homo sapien
ggctcattcatgctttgtaccttcc

SEQ ID NO: 4559652 - DNA, 25 bp, Homo sapien
gacttactaatccttcagatgactg

SEQ ID NO: 4559653 - DNA, 25 bp, Homo sapien
tcccttcaagggtggagcttaagtg

SEQ ID NO: 4559654 - DNA, 25 bp, Homo sapien
tgcagccctagccaagagcctgact

SEQ ID NO: 4559655 - DNA, 25 bp, Homo sapien
tctttacaacatgcccattaggaac

SEQ ID NO: 4559656 - DNA, 25 bp, Homo sapien
gagtacatttcaagggaatccctgc

SEQ ID NO: 4559657 - DNA, 25 bp, Homo sapien
tagaggcatctgtcatcaaacatgt

SEQ ID NO: 4559658 - DNA, 25 bp, Homo sapien
ccttggctcgctggcaaatgattca

SEQ ID NO: 4559659 - DNA, 25 bp, Homo sapien
ctgcaggcccggaaaatttaaatca

SEQ ID NO: 4559660 - DNA, 25 bp, Homo sapien
caagaagtcagtaatctgacttttc

SEQ ID NO: 4559661 - DNA, 25 bp, Homo sapien
aaacaagaagtcagtaatctgactt

SEQ ID NO: 4559662 - DNA, 25 bp, Homo sapien
aacaagaagtcagtaatctgacttt

SEQ ID NO: 4559663 - DNA, 25 bp, Homo sapien
agaagtcagtaatctgacttttcag

SEQ ID NO: 4559664 - DNA, 25 bp, Homo sapien
gaaacaaagtttgcgatgctcataa

SEQ ID NO: 4559665 - DNA, 25 bp, Homo sapien
caatacataacgataagtgttgttc

SEQ ID NO: 4559666 - DNA, 25 bp, Homo sapien
aacagactggcaatataactaacac

SEQ ID NO: 4559667 - DNA, 25 bp, Homo sapien
aactttttgagtcagtcgcaacaga

SEQ ID NO: 4559668 - DNA, 25 bp, Homo sapien
ggcactctagctactacaggaaaaa

SEQ ID NO: 4559669 - DNA, 25 bp, Homo sapien
aaaaatgttcctcttgcctactgat

SEQ ID NO: 4559670 - DNA, 25 bp, Homo sapien
tgttaaaacatatcaagatcctcct

SEQ ID NO: 4559671 - DNA, 25 bp, Homo sapien
ttttttcaaggcactctagctacta

SEQ ID NO: 4559672 - DNA, 25 bp, Homo sapien
gattcctgtggctgcgtgtaggcat

SEQ ID NO: 4559673 - DNA, 25 bp, Homo sapien
gtgtaggcattctcgttccaccaat

SEQ ID NO: 4559674 - DNA, 25 bp, Homo sapien
ttcttttatgtggagccactccttc

SEQ ID NO: 4559675 - DNA, 25 bp, Homo sapien
tgcgtgtaggcattctcgttccacc

SEQ ID NO: 4559676 - DNA, 25 bp, Homo sapien
attaaccaccttgcaaataagctct

SEQ ID NO: 4559677 - DNA, 25 bp, Homo sapien
acagaatagcttaatgtatctacaa

SEQ ID NO: 4559678 - DNA, 25 bp, Homo sapien
catacctatatacagtcaactctgt

SEQ ID NO: 4559679 - DNA, 25 bp, Homo sapien
cagtcaactctgtagtatttataca

SEQ ID NO: 4559680 - DNA, 25 bp, Homo sapien
tgtagactacctaacagcaataggc

SEQ ID NO: 4559681 - DNA, 25 bp, Homo sapien
taacagtgcaatgtattaccttgtc

SEQ ID NO: 4559682 - DNA, 25 bp, Homo sapien
gatgtcacagctgttacaacataac

SEQ ID NO: 4559683 - DNA, 25 bp, Homo sapien
ccagtgtattacaacggcatacagt

SEQ ID NO: 4559684 - DNA, 25 bp, Homo sapien
gtgtgcaccatgatgccaggctaat

SEQ ID NO: 4559685 - DNA, 25 bp, Homo sapien
ctctccagtagctggaaatgattac

SEQ ID NO: 4559686 - DNA, 25 bp, Homo sapien
acaggtgtgcaccatgatgccaggc

SEQ ID NO: 4559687 - DNA, 25 bp, Homo sapien
aggctaatttttggtagagatgggg

SEQ ID NO: 4559688 - DNA, 25 bp, Homo sapien
ccttcctatggatatagcttttaga

SEQ ID NO: 4559689 - DNA, 25 bp, Homo sapien
aaagttccactaccacgaagactgg

SEQ ID NO: 4559690 - DNA, 25 bp, Homo sapien
catcagggtgaaatacggtaaagtc

SEQ ID NO: 4559691 - DNA, 25 bp, Homo sapien
cactgtgcaagctaagagagttttc

SEQ ID NO: 4559692 - DNA, 25 bp, Homo sapien
tggtatccagtgatttcggtggaaa

SEQ ID NO: 4559693 - DNA, 25 bp, Homo sapien
tgtggtatccagtgatttcggtgga

SEQ ID NO: 4559694 - DNA, 25 bp, Homo sapien
ttgtggtatccagtgatttcggtgg

SEQ ID NO: 4559695 - DNA, 25 bp, Homo sapien
gtgttgtggtatccagtgatttcgg

SEQ ID NO: 4559696 - DNA, 25 bp, Homo sapien
acccagggaactgagagactggaag

SEQ ID NO: 4559697 - DNA, 25 bp, Homo sapien
caggagtgaagaatcttctgctgca

SEQ ID NO: 4559698 - DNA, 25 bp, Homo sapien
ccaggaaggccgcaatgtgttttat

SEQ ID NO: 4559699 - DNA, 25 bp, Homo sapien
tatgatatggtaataacaggctggg

SEQ ID NO: 4559700 - DNA, 25 bp, Homo sapien
caagtcaacgaatacaggtggtcac

SEQ ID NO: 4559701 - DNA, 25 bp, Homo sapien
agagaaggcaatgtgatgcgacgca

SEQ ID NO: 4559702 - DNA, 25 bp, Homo sapien
gaagatattaccacaaaaggagaga

SEQ ID NO: 4559703 - DNA, 25 bp, Homo sapien
tgcgacgcagagatccaagtgacat

SEQ ID NO: 4559704 - DNA, 25 bp, Homo sapien
gaatgtgttggaggatgttaaataa

SEQ ID NO: 4559705 - DNA, 25 bp, Homo sapien
ctttagaatgtgttggaggatgtta

SEQ ID NO: 4559706 - DNA, 25 bp, Homo sapien
tttctttagaatgtgttggaggatg

SEQ ID NO: 4559707 - DNA, 25 bp, Homo sapien
tagaatgtgttggaggatgttaaat

SEQ ID NO: 4559708 - DNA, 25 bp, Homo sapien
tgataggtacgttaaacctgtgatg

SEQ ID NO: 4559709 - DNA, 25 bp, Homo sapien
aattgataggtacgttaaacctgtg

SEQ ID NO: 4559710 - DNA, 25 bp, Homo sapien
gctaatatgccgaagagtttgtctt

SEQ ID NO: 4559711 - DNA, 25 bp, Homo sapien
tttagtaaagctaatatgccgaaga

SEQ ID NO: 4559712 - DNA, 25 bp, Homo sapien
tctgaggtaatttcttccagtagaa

SEQ ID NO: 4559713 - DNA, 25 bp, Homo sapien
tttgaagtaaatgcatcgatatgcc

SEQ ID NO: 4559714 - DNA, 25 bp, Homo sapien
aagttttgaagtaaatgcatcgata

SEQ ID NO: 4559715 - DNA, 25 bp, Homo sapien
taattcttctgaggtaatttcttcc

SEQ ID NO: 4559716 - DNA, 25 bp, Homo sapien
aagaagcaattgcagtatttagaaa

SEQ ID NO: 4559717 - DNA, 25 bp, Homo sapien
gaagcaattgcagtatttagaaaaa

SEQ ID NO: 4559718 - DNA, 25 bp, Homo sapien
tacgaaatcatttcaaagcctacaa

SEQ ID NO: 4559719 - DNA, 25 bp, Homo sapien
catacgaaatcatttcaaagcctac

SEQ ID NO: 4559720 - DNA, 25 bp, Homo sapien
gttgagagctaacaccaaggtcctg

SEQ ID NO: 4559721 - DNA, 25 bp, Homo sapien
cattggagctttctaacctgtgggc

SEQ ID NO: 4559722 - DNA, 25 bp, Homo sapien
gattagaagcttgaggcaccgtacc

SEQ ID NO: 4559723 - DNA, 25 bp, Homo sapien
tatcacatgggtttatcaccgggag

SEQ ID NO: 4559724 - DNA, 25 bp, Homo sapien
tcagactctgaccttaagctgttta

SEQ ID NO: 4559725 - DNA, 25 bp, Homo sapien
gactctgaccttaagctgtttattg

SEQ ID NO: 4559726 - DNA, 25 bp, Homo sapien
actctgaccttaagctgtttattgt

SEQ ID NO: 4559727 - DNA, 25 bp, Homo sapien
cagactctgaccttaagctgtttat

SEQ ID NO: 4559728 - DNA, 25 bp, Homo sapien
gcaaaagactacacagaggagcagt

SEQ ID NO: 4559729 - DNA, 25 bp, Homo sapien
cattccagtgggaggaaatactacc

SEQ ID NO: 4559730 - DNA, 25 bp, Homo sapien
gagccaatgcaaattgaacttcagc

SEQ ID NO: 4559731 - DNA, 25 bp, Homo sapien
aataggtcagcatggtaggtcatcc

SEQ ID NO: 4559732 - DNA, 25 bp, Homo sapien
gctgttggaatgcaataaactttca

SEQ ID NO: 4559733 - DNA, 25 bp, Homo sapien
ttcagtccataagcgacaaagttca

SEQ ID NO: 4559734 - DNA, 25 bp, Homo sapien
cataacaagcttgatactctacttt

SEQ ID NO: 4559735 - DNA, 25 bp, Homo sapien
aagcttgatactctacttttggtag

SEQ ID NO: 4559736 - DNA, 25 bp, Homo sapien
tgacagcagactccttgcaacaaag

SEQ ID NO: 4559737 - DNA, 25 bp, Homo sapien
cctccccacataggcaaggtttgat

SEQ ID NO: 4559738 - DNA, 25 bp, Homo sapien
tctgagcagctcgtttcattctaca

SEQ ID NO: 4559739 - DNA, 25 bp, Homo sapien
tagttgcccaaaggctcaaagccag

SEQ ID NO: 4559740 - DNA, 25 bp, Homo sapien
tatcttgtggtccaaattagcctct

SEQ ID NO: 4559741 - DNA, 25 bp, Homo sapien
gatacttggttcattgagacagaca

SEQ ID NO: 4559742 - DNA, 25 bp, Homo sapien
tatgaaatcatccaaagttcctggg

SEQ ID NO: 4559743 - DNA, 25 bp, Homo sapien
tttcccttgataaatggctccccaa

SEQ ID NO: 4559744 - DNA, 25 bp, Homo sapien
tatccaaaatttccctaggctattc

SEQ ID NO: 4559745 - DNA, 25 bp, Homo sapien
cttacttaagagataccggccatca

SEQ ID NO: 4559746 - DNA, 25 bp, Homo sapien
tcaacaatttctaagtgctgtaagc

SEQ ID NO: 4559747 - DNA, 25 bp, Homo sapien
tgaattacaatgtccttaccaagct

SEQ ID NO: 4559748 - DNA, 25 bp, Homo sapien
tagggctgctcaatctgtatattcc

SEQ ID NO: 4559749 - DNA, 25 bp, Homo sapien
tctaaagtaagtcaacaagagcccc

SEQ ID NO: 4559750 - DNA, 25 bp, Homo sapien
caccatatacatagagcctgagagt

SEQ ID NO: 4559751 - DNA, 25 bp, Homo sapien
cacttgtgataccatgccggagctt

SEQ ID NO: 4559752 - DNA, 25 bp, Homo sapien
gacactgcagcgtacgagtaacaac

SEQ ID NO: 4559753 - DNA, 25 bp, Homo sapien
ctgcagcgtacgagtaacaacaggt

SEQ ID NO: 4559754 - DNA, 25 bp, Homo sapien
tgcagcgtacgagtaacaacaggtc

SEQ ID NO: 4559755 - DNA, 25 bp, Homo sapien
tctggacactgcagcgtacgagtaa

SEQ ID NO: 4559756 - DNA, 25 bp, Homo sapien
gggcaattctggtacttttctggaa

SEQ ID NO: 4559757 - DNA, 25 bp, Homo sapien
ccagatttcggccaactagaggagt

SEQ ID NO: 4559758 - DNA, 25 bp, Homo sapien
gacaattgctcagaaacagaaggct

SEQ ID NO: 4559759 - DNA, 25 bp, Homo sapien
tagaggagtctgaaggaccagacaa

SEQ ID NO: 4559760 - DNA, 25 bp, Homo sapien
taagttagaacccacaacagctgtc

SEQ ID NO: 4559761 - DNA, 25 bp, Homo sapien
aagaatttggactagctggtctgga

SEQ ID NO: 4559762 - DNA, 25 bp, Homo sapien
gactcttcaggactacaagcagtat

SEQ ID NO: 4559763 - DNA, 25 bp, Homo sapien
gcagtattagtctggtttcctacag

SEQ ID NO: 4559764 - DNA, 25 bp, Homo sapien
tctgtatcaatgattaaacactcct

SEQ ID NO: 4559765 - DNA, 25 bp, Homo sapien
gattaaacactcctcatctgtatca

SEQ ID NO: 4559766 - DNA, 25 bp, Homo sapien
tgtatcaatgattaaacactcctca

SEQ ID NO: 4559767 - DNA, 25 bp, Homo sapien
tacattctgtatcaatgattaaaca

SEQ ID NO: 4559768 - DNA, 25 bp, Homo sapien
caagtcactatcttgtatcaaaggc

SEQ ID NO: 4559769 - DNA, 25 bp, Homo sapien
ggacttggtgattttgatactttgg

SEQ ID NO: 4559770 - DNA, 25 bp, Homo sapien
tgtatcaaaggcttgtcagaatttg

SEQ ID NO: 4559771 - DNA, 25 bp, Homo sapien
gaacattaggtctttcaccatcagc

SEQ ID NO: 4559772 - DNA, 25 bp, Homo sapien
aaagtttcaagttctgtgacatcat

SEQ ID NO: 4559773 - DNA, 25 bp, Homo sapien
ctctcaatttttcggcactcgttga

SEQ ID NO: 4559774 - DNA, 25 bp, Homo sapien
gtttcaagttctgtgacatcatcat

SEQ ID NO: 4559775 - DNA, 25 bp, Homo sapien
ttttcaagactctcaatttttcggc

SEQ ID NO: 4559776 - DNA, 25 bp, Homo sapien
gagaaaggttctaacagtcaccagc

SEQ ID NO: 4559777 - DNA, 25 bp, Homo sapien
catccactagccttacagttgagga

SEQ ID NO: 4559778 - DNA, 25 bp, Homo sapien
tgtcacatagtaagtagcctctcag

SEQ ID NO: 4559779 - DNA, 25 bp, Homo sapien
aaatctcttggcatagtggctgtca

SEQ ID NO: 4559780 - DNA, 25 bp, Homo sapien
tgacagagacacaattatactaagt

SEQ ID NO: 4559781 - DNA, 25 bp, Homo sapien
gaaaatctcaatatagaccaaagca

SEQ ID NO: 4559782 - DNA, 25 bp, Homo sapien
ccaaagcagaatctgataaagtctt

SEQ ID NO: 4559783 - DNA, 25 bp, Homo sapien
ccaagaatccaaagggcatttcaaa

SEQ ID NO: 4559784 - DNA, 25 bp, Homo sapien
tcataaattttaatggaacttcatg

SEQ ID NO: 4559785 - DNA, 25 bp, Homo sapien
tccatttcagatataaactcttcag

SEQ ID NO: 4559786 - DNA, 25 bp, Homo sapien
catcataaattttaatggaacttca

SEQ ID NO: 4559787 - DNA, 25 bp, Homo sapien
gtccatttcagatataaactcttca

SEQ ID NO: 4559788 - DNA, 25 bp, Homo sapien
agagctatctgagggtgatatctgg

SEQ ID NO: 4559789 - DNA, 25 bp, Homo sapien
ctgttccttgtacgttggtccatga

SEQ ID NO: 4559790 - DNA, 25 bp, Homo sapien
gatatctggaaacaagcttctctgc

SEQ ID NO: 4559791 - DNA, 25 bp, Homo sapien
tcccactgttccttgtacgttggtc

SEQ ID NO: 4559792 - DNA, 25 bp, Homo sapien
cgtttcaatggtagctatatcgtcc

SEQ ID NO: 4559793 - DNA, 25 bp, Homo sapien
tataggcattgagggaaatactgtt

SEQ ID NO: 4559794 - DNA, 25 bp, Homo sapien
gctgtttgttctgacgtttcaatgg

SEQ ID NO: 4559795 - DNA, 25 bp, Homo sapien
ctttgacagctgcaactttataggc

SEQ ID NO: 4559796 - DNA, 25 bp, Homo sapien
caatgcgagaagagttttttctaac

SEQ ID NO: 4559797 - DNA, 25 bp, Homo sapien
tttctaactttaatcccatctctac

SEQ ID NO: 4559798 - DNA, 25 bp, Homo sapien
tgacctcgtggagagtatagaattc

SEQ ID NO: 4559799 - DNA, 25 bp, Homo sapien
tctgaatgggaagaatcccattaag

SEQ ID NO: 4559800 - DNA, 25 bp, Homo sapien
cagaaattaagaaaaattcatttgt

SEQ ID NO: 4559801 - DNA, 25 bp, Homo sapien
ctgagaaacagaaattaagaaaaat

SEQ ID NO: 4559802 - DNA, 25 bp, Homo sapien
acagaaattaagaaaaattcatttg

SEQ ID NO: 4559803 - DNA, 25 bp, Homo sapien
catagtgcccagattgtagtcttga

SEQ ID NO: 4559804 - DNA, 25 bp, Homo sapien
tcaaaacaatgatcaacccaggagc

SEQ ID NO: 4559805 - DNA, 25 bp, Homo sapien
tgagtgtaatgtgggataaagcaaa

SEQ ID NO: 4559806 - DNA, 25 bp, Homo sapien
cagtaatcgtattgatcactagtat

SEQ ID NO: 4559807 - DNA, 25 bp, Homo sapien
ataatcctgcgcacatttctttgca

SEQ ID NO: 4559808 - DNA, 25 bp, Homo sapien
catattataatcctgcgcacatttc

SEQ ID NO: 4559809 - DNA, 25 bp, Homo sapien
tgcaaaaactttaggaactcagtaa

SEQ ID NO: 4559810 - DNA, 25 bp, Homo sapien
tattataatcctgcgcacatttctt

SEQ ID NO: 4559811 - DNA, 25 bp, Homo sapien
gctcagaagtagagcaaaatgcttg

SEQ ID NO: 4559812 - DNA, 25 bp, Homo sapien
gatgaactggagtgagtcatgctca

SEQ ID NO: 4559813 - DNA, 25 bp, Homo sapien
tactgctagtacttaagatgaactg

SEQ ID NO: 4559814 - DNA, 25 bp, Homo sapien
aaaatgcttgaactacaatggaacc

SEQ ID NO: 4559815 - DNA, 25 bp, Homo sapien
aatctttgcgtatttaaccaacaag

SEQ ID NO: 4559816 - DNA, 25 bp, Homo sapien
ttgcaggaatctttgcgtatttaac

SEQ ID NO: 4559817 - DNA, 25 bp, Homo sapien
taaccaacaagtccacataactcct

SEQ ID NO: 4559818 - DNA, 25 bp, Homo sapien
cagctttggaatttgcaggaatctt

SEQ ID NO: 4559819 - DNA, 25 bp, Homo sapien
gagaaacgaggataaggaactcttg

SEQ ID NO: 4559820 - DNA, 25 bp, Homo sapien
cgaggataaggaactcttggttttg

SEQ ID NO: 4559821 - DNA, 25 bp, Homo sapien
ctgtgagaaacgagagaaacgagga

SEQ ID NO: 4559822 - DNA, 25 bp, Homo sapien
gaaacgagagaaacgaggataagga

SEQ ID NO: 4559823 - DNA, 25 bp, Homo sapien
tgctgaactaactgccggctcattt

SEQ ID NO: 4559824 - DNA, 25 bp, Homo sapien
ggcattcaaattttctcctatacgt

SEQ ID NO: 4559825 - DNA, 25 bp, Homo sapien
agaacttgctgaggcattcaaattt

SEQ ID NO: 4559826 - DNA, 25 bp, Homo sapien
gagttgctgaactaactgccggctc

SEQ ID NO: 4559827 - DNA, 25 bp, Homo sapien
ggaaaatcgttcttgccaattacac

SEQ ID NO: 4559828 - DNA, 25 bp, Homo sapien
tcactctggtacatggctgagttca

SEQ ID NO: 4559829 - DNA, 25 bp, Homo sapien
gttgtacaatcctctatcactctgg

SEQ ID NO: 4559830 - DNA, 25 bp, Homo sapien
ccaaagaaaaatcctggcgtatcgt

SEQ ID NO: 4559831 - DNA, 25 bp, Homo sapien
tcatcagggtgtaaaccaaaagcat

SEQ ID NO: 4559832 - DNA, 25 bp, Homo sapien
aagatcatttccttgtgcagtgctg

SEQ ID NO: 4559833 - DNA, 25 bp, Homo sapien
cagtgctgtcaagaacttcatcagg

SEQ ID NO: 4559834 - DNA, 25 bp, Homo sapien
ccaaaagcatctgacagggtttctc

SEQ ID NO: 4559835 - DNA, 25 bp, Homo sapien
ctgttggataaaacacgtagttctt

SEQ ID NO: 4559836 - DNA, 25 bp, Homo sapien
tggagccatggaatgatctttataa

SEQ ID NO: 4559837 - DNA, 25 bp, Homo sapien
tctttataattttctcgagagaaaa

SEQ ID NO: 4559838 - DNA, 25 bp, Homo sapien
ataattttctcgagagaaaaatgtc

SEQ ID NO: 4559839 - DNA, 25 bp, Homo sapien
gctttaaacccaggcccattatgga

SEQ ID NO: 4559840 - DNA, 25 bp, Homo sapien
cccagacaatctcttcttactatgt

SEQ ID NO: 4559841 - DNA, 25 bp, Homo sapien
tataccagatctgtgggcttagaag

SEQ ID NO: 4559842 - DNA, 25 bp, Homo sapien
aattctccagctccaataatcagct

SEQ ID NO: 4559843 - DNA, 25 bp, Homo sapien
caattcagtcctggttcacttatga

SEQ ID NO: 4559844 - DNA, 25 bp, Homo sapien
cctggttcacttatgaccatcttgg

SEQ ID NO: 4559845 - DNA, 25 bp, Homo sapien
ttcacttatgaccatcttggagctc

SEQ ID NO: 4559846 - DNA, 25 bp, Homo sapien
agtcctggttcacttatgaccatct

SEQ ID NO: 4559847 - DNA, 25 bp, Homo sapien
atttctgcttcactctagctcacag

SEQ ID NO: 4559848 - DNA, 25 bp, Homo sapien
tgcctggctgcgaaggctccaagag

SEQ ID NO: 4559849 - DNA, 25 bp, Homo sapien
tccaagaggcaggatccctccagaa

SEQ ID NO: 4559850 - DNA, 25 bp, Homo sapien
cagctgcctggctgcgaaggctcca

SEQ ID NO: 4559851 - DNA, 25 bp, Homo sapien
gagtcggtctctcgacaccgaacgg

SEQ ID NO: 4559852 - DNA, 25 bp, Homo sapien
caggcttgatctctcatgttcagta

SEQ ID NO: 4559853 - DNA, 25 bp, Homo sapien
gacctgcgagaacctaatcaaattt

SEQ ID NO: 4559854 - DNA, 25 bp, Homo sapien
cagactgataaagtgacctgcgaga

SEQ ID NO: 4559855 - DNA, 25 bp, Homo sapien
tctcacacttcgacccagtgtggag

SEQ ID NO: 4559856 - DNA, 25 bp, Homo sapien
aaagcaggggtaggagccgcgcaga

SEQ ID NO: 4559857 - DNA, 25 bp, Homo sapien
ggaatagtcgaggaaggcaaaagaa

SEQ ID NO: 4559858 - DNA, 25 bp, Homo sapien
tgagggaaaggggacgcaaagagag

SEQ ID NO: 4559859 - DNA, 25 bp, Homo sapien
tttaaaggatgtggccgcgccgact

SEQ ID NO: 4559860 - DNA, 25 bp, Homo sapien
gtcgcgcgcgcccaaaaaagaccat

SEQ ID NO: 4559861 - DNA, 25 bp, Homo sapien
atggtccgcggcggctcttgcccag

SEQ ID NO: 4559862 - DNA, 25 bp, Homo sapien
aagaccatatttaaaggatgtggcc

SEQ ID NO: 4559863 - DNA, 25 bp, Homo sapien
cagtaggggagccatcagtgtgaat

SEQ ID NO: 4559864 - DNA, 25 bp, Homo sapien
caagttcccgaaatccctttagcat

SEQ ID NO: 4559865 - DNA, 25 bp, Homo sapien
taatctcctagagtgacgcttctgc

SEQ ID NO: 4559866 - DNA, 25 bp, Homo sapien
tctaggggggttctcttgaccagat

SEQ ID NO: 4559867 - DNA, 25 bp, Homo sapien
tctttccaagagaggcagttaagga

SEQ ID NO: 4559868 - DNA, 25 bp, Homo sapien
taagtgaaaagttggacgatcctct

SEQ ID NO: 4559869 - DNA, 25 bp, Homo sapien
ccatgttatggcagaggacgtctcc

SEQ ID NO: 4559870 - DNA, 25 bp, Homo sapien
gctagccattgtgcagacgcaaaaa

SEQ ID NO: 4559871 - DNA, 25 bp, Homo sapien
tattctgagagcctgacaacactga

SEQ ID NO: 4559872 - DNA, 25 bp, Homo sapien
taggagatccctgagcacattgttt

SEQ ID NO: 4559873 - DNA, 25 bp, Homo sapien
tttgaaacacaagactgacgagcac

SEQ ID NO: 4559874 - DNA, 25 bp, Homo sapien
taaatgttggctcgagttgctgctg

SEQ ID NO: 4559875 - DNA, 25 bp, Homo sapien
tctttaatgcgctagcacctgaggc

SEQ ID NO: 4559876 - DNA, 25 bp, Homo sapien
ggatcaaggtacacccgcaagtgct

SEQ ID NO: 4559877 - DNA, 25 bp, Homo sapien
ttagtagcctagaagcggtccgacg

SEQ ID NO: 4559878 - DNA, 25 bp, Homo sapien
cataaagggctgcatggaaactcct

SEQ ID NO: 4559879 - DNA, 25 bp, Homo sapien
ggagtgtgcatttgctcaggatata

SEQ ID NO: 4559880 - DNA, 25 bp, Homo sapien
tgtttgcagctagcatcaacttcac

SEQ ID NO: 4559881 - DNA, 25 bp, Homo sapien
aattccaagttgagaccgagtccat

SEQ ID NO: 4559882 - DNA, 25 bp, Homo sapien
ggttcaacattgtatgcttccctca

SEQ ID NO: 4559883 - DNA, 25 bp, Homo sapien
cagcagcataaatacctcccaacgt

SEQ ID NO: 4559884 - DNA, 25 bp, Homo sapien
gcagcataaatacctcccaacgtac

SEQ ID NO: 4559885 - DNA, 25 bp, Homo sapien
agcagcataaatacctcccaacgta

SEQ ID NO: 4559886 - DNA, 25 bp, Homo sapien
tccaagccttctcagttaaacttgt

SEQ ID NO: 4559887 - DNA, 25 bp, Homo sapien
aagccttctcagttaaacttgtgtt

SEQ ID NO: 4559888 - DNA, 25 bp, Homo sapien
cttccaagccttctcagttaaactt

SEQ ID NO: 4559889 - DNA, 25 bp, Homo sapien
caagccttctcagttaaacttgtgt

SEQ ID NO: 4559890 - DNA, 25 bp, Homo sapien
tgcggactggcaataatcggtgaaa

SEQ ID NO: 4559891 - DNA, 25 bp, Homo sapien
gctagttgtgcaaagtaatgccgca

SEQ ID NO: 4559892 - DNA, 25 bp, Homo sapien
tatgcacaccagtcaccgattattg

SEQ ID NO: 4559893 - DNA, 25 bp, Homo sapien
gaaaaagggtccatatctgtaggca

SEQ ID NO: 4559894 - DNA, 25 bp, Homo sapien
gtacttcagacattctagaagtgct

SEQ ID NO: 4559895 - DNA, 25 bp, Homo sapien
tttgcctgaccccgatcaccaaaag

SEQ ID NO: 4559896 - DNA, 25 bp, Homo sapien
attctagaagtgcttaggtgataac

SEQ ID NO: 4559897 - DNA, 25 bp, Homo sapien
gtgcagggccatataaagtgtctcg

SEQ ID NO: 4559898 - DNA, 25 bp, Homo sapien
gctcttaaggtagacaccttgcata

SEQ ID NO: 4559899 - DNA, 25 bp, Homo sapien
gaggaaaatgaagtcgcacaatgtc

SEQ ID NO: 4559900 - DNA, 25 bp, Homo sapien
tgtcgtccacataaggctcttaagg

SEQ ID NO: 4559901 - DNA, 25 bp, Homo sapien
gaacaactccttgtataatggagga

SEQ ID NO: 4559902 - DNA, 25 bp, Homo sapien
gagctagctgaattttctgttgcag

SEQ ID NO: 4559903 - DNA, 25 bp, Homo sapien
taccttttcttgcagccatgagcga

SEQ ID NO: 4559904 - DNA, 25 bp, Homo sapien
gattcttctgtaggacgtgttgaag

SEQ ID NO: 4559905 - DNA, 25 bp, Homo sapien
ctttgttagtattccatcttctcgg

SEQ ID NO: 4559906 - DNA, 25 bp, Homo sapien
cttcagtcaggtgcatagaacataa

SEQ ID NO: 4559907 - DNA, 25 bp, Homo sapien
gtcaggtgcatagaacataaactct

SEQ ID NO: 4559908 - DNA, 25 bp, Homo sapien
ggtgcatagaacataaactctttcc

SEQ ID NO: 4559909 - DNA, 25 bp, Homo sapien
tcagtcaggtgcatagaacataaac

SEQ ID NO: 4559910 - DNA, 25 bp, Homo sapien
tggaaggacacgtcatataaatccc

SEQ ID NO: 4559911 - DNA, 25 bp, Homo sapien
gtcatccgaataatatatcaccagc

SEQ ID NO: 4559912 - DNA, 25 bp, Homo sapien
tgacttttctacagtgactaactag

SEQ ID NO: 4559913 - DNA, 25 bp, Homo sapien
gctcacatcctaaaggtcatccgaa

SEQ ID NO: 4559914 - DNA, 25 bp, Homo sapien
gacgtcggggctggcatacttccca

SEQ ID NO: 4559915 - DNA, 25 bp, Homo sapien
caaagtacacggtgttgttctgaga

SEQ ID NO: 4559916 - DNA, 25 bp, Homo sapien
ctaaggatttgaagacgtcggggct

SEQ ID NO: 4559917 - DNA, 25 bp, Homo sapien
atacttcccatcaaagtacacggtg

SEQ ID NO: 4559918 - DNA, 25 bp, Homo sapien
catcaatgcgtttggcaaactccac

SEQ ID NO: 4559919 - DNA, 25 bp, Homo sapien
agttccataaatccatcaatgcgtt

SEQ ID NO: 4559920 - DNA, 25 bp, Homo sapien
cattttgacacagttccataaatcc

SEQ ID NO: 4559921 - DNA, 25 bp, Homo sapien
gatggcacacaattgccacatcacc

SEQ ID NO: 4559922 - DNA, 25 bp, Homo sapien
caagtattggcaggtttccagatgc

SEQ ID NO: 4559923 - DNA, 25 bp, Homo sapien
gctggagctcttctctcaagtattg

SEQ ID NO: 4559924 - DNA, 25 bp, Homo sapien
tcttcctgtaaaaaggtctgccacg

SEQ ID NO: 4559925 - DNA, 25 bp, Homo sapien
ttccagatgcgatttagatatattc

SEQ ID NO: 4559926 - DNA, 25 bp, Homo sapien
ttgccccatttctaatgctgagagg

SEQ ID NO: 4559927 - DNA, 25 bp, Homo sapien
tattggataaaccatgggaaacagc

SEQ ID NO: 4559928 - DNA, 25 bp, Homo sapien
tcattagaggaaagtcagacatacc

SEQ ID NO: 4559929 - DNA, 25 bp, Homo sapien
aagggcatgaatagagcatcccagg

SEQ ID NO: 4559930 - DNA, 25 bp, Homo sapien
tactgaggtcgtcgtgaagttccgt

SEQ ID NO: 4559931 - DNA, 25 bp, Homo sapien
ggtgtgcccgtcaatgtagttactg

SEQ ID NO: 4559932 - DNA, 25 bp, Homo sapien
tccgtcagcccgttggccgagatgt

SEQ ID NO: 4559933 - DNA, 25 bp, Homo sapien
gaagtctcgccgttggtgaacgaac

SEQ ID NO: 4559934 - DNA, 25 bp, Homo sapien
gcctcaagtaatcacagcatcagga

SEQ ID NO: 4559935 - DNA, 25 bp, Homo sapien
ctgtttgtaatgcttctctttggga

SEQ ID NO: 4559936 - DNA, 25 bp, Homo sapien
cactcccagtaggacccatctttaa

SEQ ID NO: 4559937 - DNA, 25 bp, Homo sapien
taatgtatgatccttgttgggcaga

SEQ ID NO: 4559938 - DNA, 25 bp, Homo sapien
agcaagtaacagttgtggttcacat

SEQ ID NO: 4559939 - DNA, 25 bp, Homo sapien
caagtaacagttgtggttcacattt

SEQ ID NO: 4559940 - DNA, 25 bp, Homo sapien
gcaagtaacagttgtggttcacatt

SEQ ID NO: 4559941 - DNA, 25 bp, Homo sapien
ggtttctactggttcgatcaatcaa

SEQ ID NO: 4559942 - DNA, 25 bp, Homo sapien
caaggcatttctgtaatcgacagtg

SEQ ID NO: 4559943 - DNA, 25 bp, Homo sapien
gacagtgttggcagcggtttctact

SEQ ID NO: 4559944 - DNA, 25 bp, Homo sapien
tcgagacatccctacggcaaggcat

SEQ ID NO: 4559945 - DNA, 25 bp, Homo sapien
gacgaggacaggagtaggtggcatt

SEQ ID NO: 4559946 - DNA, 25 bp, Homo sapien
tgacgaggacaggagtaggtggcat

SEQ ID NO: 4559947 - DNA, 25 bp, Homo sapien
acgaggacaggagtaggtggcattg

SEQ ID NO: 4559948 - DNA, 25 bp, Homo sapien
ctgacgaggacaggagtaggtggca

SEQ ID NO: 4559949 - DNA, 25 bp, Homo sapien
ggcttctgatgatcaaaagcaatgt

SEQ ID NO: 4559950 - DNA, 25 bp, Homo sapien
ctttaacttcaacagacagttgccc

SEQ ID NO: 4559951 - DNA, 25 bp, Homo sapien
caacagacagttgcccatgtaaaaa

SEQ ID NO: 4559952 - DNA, 25 bp, Homo sapien
gacagttgcccatgtaaaaaggcac

SEQ ID NO: 4559953 - DNA, 25 bp, Homo sapien
tgggaagttatggtgggcagcttga

SEQ ID NO: 4559954 - DNA, 25 bp, Homo sapien
gcagatgggaagttatggtgggcag

SEQ ID NO: 4559955 - DNA, 25 bp, Homo sapien
acaataggcagatgggaagttatgg

SEQ ID NO: 4559956 - DNA, 25 bp, Homo sapien
caataggcagatgggaagttatggt

SEQ ID NO: 4559957 - DNA, 25 bp, Homo sapien
cctagcgccgtctgtaatgattcag

SEQ ID NO: 4559958 - DNA, 25 bp, Homo sapien
tacaagacaattagggacagcccct

SEQ ID NO: 4559959 - DNA, 25 bp, Homo sapien
tcttcgggctttgcagacactggag

SEQ ID NO: 4559960 - DNA, 25 bp, Homo sapien
caagtgcgagcccatgtatctggca

SEQ ID NO: 4559961 - DNA, 25 bp, Homo sapien
gggaagcacaaaactagggcatgga

SEQ ID NO: 4559962 - DNA, 25 bp, Homo sapien
tgagctgagagatgaattccaggga

SEQ ID NO: 4559963 - DNA, 25 bp, Homo sapien
cctcaaggtagaagtagtgtgtttc

SEQ ID NO: 4559964 - DNA, 25 bp, Homo sapien
tgtggtaggtaccttcctacctcaa

SEQ ID NO: 4559965 - DNA, 25 bp, Homo sapien
ggcataggcccaatctgttaataaa

SEQ ID NO: 4559966 - DNA, 25 bp, Homo sapien
tgggatttcaactcggacagtctgg

SEQ ID NO: 4559967 - DNA, 25 bp, Homo sapien
gccagaaatgacagaaagagctact

SEQ ID NO: 4559968 - DNA, 25 bp, Homo sapien
tcaagtccctggctaggcataggcc

SEQ ID NO: 4559969 - DNA, 25 bp, Homo sapien
ccatcagttttttgggcagaatgaa

SEQ ID NO: 4559970 - DNA, 25 bp, Homo sapien
gtgaactggtatccgggatgctgcc

SEQ ID NO: 4559971 - DNA, 25 bp, Homo sapien
tcctagataatcacttgccttactg

SEQ ID NO: 4559972 - DNA, 25 bp, Homo sapien
gataatcacttctgtcaattcctag

SEQ ID NO: 4559973 - DNA, 25 bp, Homo sapien
tagcaatcggctgtctcaaaggcct

SEQ ID NO: 4559974 - DNA, 25 bp, Homo sapien
caactaattttgagggagggcagat

SEQ ID NO: 4559975 - DNA, 25 bp, Homo sapien
gactcaagtgataaacctgcagctg

SEQ ID NO: 4559976 - DNA, 25 bp, Homo sapien
tatcctgtaagctgtctcgaggccc

SEQ ID NO: 4559977 - DNA, 25 bp, Homo sapien
tctccacagatcttgcatggaataa

SEQ ID NO: 4559978 - DNA, 25 bp, Homo sapien
gtctccacagatcttgcatggaata

SEQ ID NO: 4559979 - DNA, 25 bp, Homo sapien
cacatgtaatgacaccataatggat

SEQ ID NO: 4559980 - DNA, 25 bp, Homo sapien
gaagcacgcaaccagttaattacat

SEQ ID NO: 4559981 - DNA, 25 bp, Homo sapien
aagcacgcaaccagttaattacatt

SEQ ID NO: 4559982 - DNA, 25 bp, Homo sapien
agaagcacgcaaccagttaattaca

SEQ ID NO: 4559983 - DNA, 25 bp, Homo sapien
taggcaccatgaagtccttgaacca

SEQ ID NO: 4559984 - DNA, 25 bp, Homo sapien
aggaatgtaataattaggcaccatg

SEQ ID NO: 4559985 - DNA, 25 bp, Homo sapien
gtaataattaggcaccatgaagtcc

SEQ ID NO: 4559986 - DNA, 25 bp, Homo sapien
taattaggcaccatgaagtccttga

SEQ ID NO: 4559987 - DNA, 25 bp, Homo sapien
caaatgcagtttcaaggagctgaca

SEQ ID NO: 4559988 - DNA, 25 bp, Homo sapien
tgcagtttcaaggagctgacaacaa

SEQ ID NO: 4559989 - DNA, 25 bp, Homo sapien
tttcaaggagctgacaacaagtggc

SEQ ID NO: 4559990 - DNA, 25 bp, Homo sapien
tcaaggagctgacaacaagtggcag

SEQ ID NO: 4559991 - DNA, 25 bp, Homo sapien
tagactatgctcaagggaaattcct

SEQ ID NO: 4559992 - DNA, 25 bp, Homo sapien
aatggtgtcccttacataattctgg

SEQ ID NO: 4559993 - DNA, 25 bp, Homo sapien
tggttctcagttggcgtaaggtccc

SEQ ID NO: 4559994 - DNA, 25 bp, Homo sapien
ctgtgcggtcacaaaacccagctgc

SEQ ID NO: 4559995 - DNA, 25 bp, Homo sapien
cattctgaagatctgctactgctca

SEQ ID NO: 4559996 - DNA, 25 bp, Homo sapien
gctactgctcattgaatagatgtca

SEQ ID NO: 4559997 - DNA, 25 bp, Homo sapien
tctttccatgagctccgatggcatt

SEQ ID NO: 4559998 - DNA, 25 bp, Homo sapien
caggcaaaggaacccatcatttctt

SEQ ID NO: 4559999 - DNA, 25 bp, Homo sapien
caggcaaattatttaggcttgccag

SEQ ID NO: 4560000 - DNA, 25 bp, Homo sapien
gtgtcatgacaccaaaacttccttg

SEQ ID NO: 4560001 - DNA, 25 bp, Homo sapien
ttacatccctctatagcaagcccag

SEQ ID NO: 4560002 - DNA, 25 bp, Homo sapien
gttaagagaattagcccacagcctg

SEQ ID NO: 4560003 - DNA, 25 bp, Homo sapien
gaaacaacactaaccagggcacgat

SEQ ID NO: 4560004 - DNA, 25 bp, Homo sapien
gaactacagggttcggaggctctca

SEQ ID NO: 4560005 - DNA, 25 bp, Homo sapien
gaggctctcacaactgcctgtgcag

SEQ ID NO: 4560006 - DNA, 25 bp, Homo sapien
taaagtgcctgtagcatcagtgccc

SEQ ID NO: 4560007 - DNA, 25 bp, Homo sapien
aaagcccacagcagatagtgtcagt

SEQ ID NO: 4560008 - DNA, 25 bp, Homo sapien
ttaaatcaatagaggcaaagcccac

SEQ ID NO: 4560009 - DNA, 25 bp, Homo sapien
tctggcagctagaacaccgttttta

SEQ ID NO: 4560010 - DNA, 25 bp, Homo sapien
ttaattgaacgtgctaggacagagt

SEQ ID NO: 4560011 - DNA, 25 bp, Homo sapien
ttgagcaggattttccctcgtgttg

SEQ ID NO: 4560012 - DNA, 25 bp, Homo sapien
gagcaggattttccctcgtgttgtc

SEQ ID NO: 4560013 - DNA, 25 bp, Homo sapien
caggattttccctcgtgttgtccct

SEQ ID NO: 4560014 - DNA, 25 bp, Homo sapien
tccctcgtgttgtccctcccttcag

SEQ ID NO: 4560015 - DNA, 25 bp, Homo sapien
tcctatgttgtggtggatgatagcc

SEQ ID NO: 4560016 - DNA, 25 bp, Homo sapien
gataactgacacgtactgtgggcgt

SEQ ID NO: 4560017 - DNA, 25 bp, Homo sapien
gatgatagccttcgaatgctctttg

SEQ ID NO: 4560018 - DNA, 25 bp, Homo sapien
caaagatgtgtacgatcaacagtgg

SEQ ID NO: 4560019 - DNA, 25 bp, Homo sapien
tgtcagccaagcgaaaacactgtct

SEQ ID NO: 4560020 - DNA, 25 bp, Homo sapien
gaaaacactcagtgagcacatagca

SEQ ID NO: 4560021 - DNA, 25 bp, Homo sapien
gaagacgacttgaaaggactcagtg

SEQ ID NO: 4560022 - DNA, 25 bp, Homo sapien
cgtcggcatggtttctggtttcaca

SEQ ID NO: 4560023 - DNA, 25 bp, Homo sapien
cagtttaacatggtcttgtggaaga

SEQ ID NO: 4560024 - DNA, 25 bp, Homo sapien
ttgctctctgcaatcaagctgggca

SEQ ID NO: 4560025 - DNA, 25 bp, Homo sapien
ggaaaaatctctggcattctcgata

SEQ ID NO: 4560026 - DNA, 25 bp, Homo sapien
catcccaaagttacgagaaacaagg

SEQ ID NO: 4560027 - DNA, 25 bp, Homo sapien
ggttccaaagcccttgagagctcaa

SEQ ID NO: 4560028 - DNA, 25 bp, Homo sapien
tctgtatgtcagtatcctgggagca

SEQ ID NO: 4560029 - DNA, 25 bp, Homo sapien
tagacatgccttgtagttgccttgc

SEQ ID NO: 4560030 - DNA, 25 bp, Homo sapien
tacactgtactactcgaggaaccct

SEQ ID NO: 4560031 - DNA, 25 bp, Homo sapien
tttgtgaatatggtggcttgccatt

SEQ ID NO: 4560032 - DNA, 25 bp, Homo sapien
gaatatggtggcttgccattctgcc

SEQ ID NO: 4560033 - DNA, 25 bp, Homo sapien
tgtgaatatggtggcttgccattct

SEQ ID NO: 4560034 - DNA, 25 bp, Homo sapien
tgaatatggtggcttgccattctgc

SEQ ID NO: 4560035 - DNA, 25 bp, Homo sapien
gaggacaggtcaggaggcctttgga

SEQ ID NO: 4560036 - DNA, 25 bp, Homo sapien
tcacctgaagacaggatacactgat

SEQ ID NO: 4560037 - DNA, 25 bp, Homo sapien
cagcagctgctaatgtttaagtgta

SEQ ID NO: 4560038 - DNA, 25 bp, Homo sapien
aaaagttacaccagcttattgaagc

SEQ ID NO: 4560039 - DNA, 25 bp, Homo sapien
tgctgaataactgtactcagccagc

SEQ ID NO: 4560040 - DNA, 25 bp, Homo sapien
actcatgtgacataaacagggccag

SEQ ID NO: 4560041 - DNA, 25 bp, Homo sapien
actgcgccctgccagtttacaaaaa

SEQ ID NO: 4560042 - DNA, 25 bp, Homo sapien
cactgcgccctgccagtttacaaaa

SEQ ID NO: 4560043 - DNA, 25 bp, Homo sapien
ccactgcgccctgccagtttacaaa

SEQ ID NO: 4560044 - DNA, 25 bp, Homo sapien
gacggatttatgaatgtcactcacc

SEQ ID NO: 4560045 - DNA, 25 bp, Homo sapien
tctgcaaatgcgactcacagtgtgc

SEQ ID NO: 4560046 - DNA, 25 bp, Homo sapien
gatgcaaggccaggtatttgacgga

SEQ ID NO: 4560047 - DNA, 25 bp, Homo sapien
cacctcctggcttgaacagaagtga

SEQ ID NO: 4560048 - DNA, 25 bp, Homo sapien
ttgggccacagagaatgaatatcgc

SEQ ID NO: 4560049 - DNA, 25 bp, Homo sapien
ggagaggtcccagcatgaacatgcg

SEQ ID NO: 4560050 - DNA, 25 bp, Homo sapien
tgaatatcgcacttccctaggcagt

SEQ ID NO: 4560051 - DNA, 25 bp, Homo sapien
cactgtgtctcaagggcagggtaga

SEQ ID NO: 4560052 - DNA, 25 bp, Homo sapien
ggcatcatccctcatatttgcaaag

SEQ ID NO: 4560053 - DNA, 25 bp, Homo sapien
gaagcgcttattgatgggccaacca

SEQ ID NO: 4560054 - DNA, 25 bp, Homo sapien
gatgtggtcctgcatttcacatggc

SEQ ID NO: 4560055 - DNA, 25 bp, Homo sapien
catgctttgaatttgggagccttac

SEQ ID NO: 4560056 - DNA, 25 bp, Homo sapien
cttcccatttgactagcaggtcatt

SEQ ID NO: 4560057 - DNA, 25 bp, Homo sapien
cacatcgtctgattcactttttcct

SEQ ID NO: 4560058 - DNA, 25 bp, Homo sapien
tagcaggtcattcaaaagccaatgg

SEQ ID NO: 4560059 - DNA, 25 bp, Homo sapien
tcaccacatcgtctgattcactttt

SEQ ID NO: 4560060 - DNA, 25 bp, Homo sapien
ctccaagaacagagcgtggcttgcc

SEQ ID NO: 4560061 - DNA, 25 bp, Homo sapien
aagaacagagcgtggcttgccttgc

SEQ ID NO: 4560062 - DNA, 25 bp, Homo sapien
tccaagaacagagcgtggcttgcct

SEQ ID NO: 4560063 - DNA, 25 bp, Homo sapien
acagagcgtggcttgccttgctttc

SEQ ID NO: 4560064 - DNA, 25 bp, Homo sapien
gcaaattaatgctcccctaaagagg

SEQ ID NO: 4560065 - DNA, 25 bp, Homo sapien
ggaaatatgacatgctcagtgcccc

SEQ ID NO: 4560066 - DNA, 25 bp, Homo sapien
tccctagagccttgagaaagctgct

SEQ ID NO: 4560067 - DNA, 25 bp, Homo sapien
cattaggtgaagttagagttgccca

SEQ ID NO: 4560068 - DNA, 25 bp, Homo sapien
taaacaccctgaggcatcttcagat

SEQ ID NO: 4560069 - DNA, 25 bp, Homo sapien
tctgtaaacaccctgaggcatcttc

SEQ ID NO: 4560070 - DNA, 25 bp, Homo sapien
tgtaaacaccctgaggcatcttcag

SEQ ID NO: 4560071 - DNA, 25 bp, Homo sapien
tttctgtaaacaccctgaggcatct

SEQ ID NO: 4560072 - DNA, 25 bp, Homo sapien
gaaattgcatagaaacttccaggcc

SEQ ID NO: 4560073 - DNA, 25 bp, Homo sapien
aatatttcccctaagcagccactga

SEQ ID NO: 4560074 - DNA, 25 bp, Homo sapien
cttccaggccacttcaaaagggatt

SEQ ID NO: 4560075 - DNA, 25 bp, Homo sapien
cagtcgaaatgagcagtttagccaa

SEQ ID NO: 4560076 - DNA, 25 bp, Homo sapien
gcagggggcttagaaagactgccaa

SEQ ID NO: 4560077 - DNA, 25 bp, Homo sapien
ctgaacgtaacagcagcagggggct

SEQ ID NO: 4560078 - DNA, 25 bp, Homo sapien
cagggggcttagaaagactgccaaa

SEQ ID NO: 4560079 - DNA, 25 bp, Homo sapien
tacggatgcaacttaagaggaggag

SEQ ID NO: 4560080 - DNA, 25 bp, Homo sapien
ttgtgtctagggcaaacgtggctgt

SEQ ID NO: 4560081 - DNA, 25 bp, Homo sapien
aaacaactttgtttctctgcaatag

SEQ ID NO: 4560082 - DNA, 25 bp, Homo sapien
ctgttttacgagattttgcttgtgg

SEQ ID NO: 4560083 - DNA, 25 bp, Homo sapien
gcttccagggcactgaaacctttac

SEQ ID NO: 4560084 - DNA, 25 bp, Homo sapien
cagtgaaggctaaaatacattgtgt

SEQ ID NO: 4560085 - DNA, 25 bp, Homo sapien
tagcctgctcctgctaagtggtcac

SEQ ID NO: 4560086 - DNA, 25 bp, Homo sapien
tgtcgctgaataaagcaaccttgaa

SEQ ID NO: 4560087 - DNA, 25 bp, Homo sapien
gctttatgacgaaaaggagtacagt

SEQ ID NO: 4560088 - DNA, 25 bp, Homo sapien
ggcttctggacaaggctttatgacg

SEQ ID NO: 4560089 - DNA, 25 bp, Homo sapien
tgagggaacagtctgcccacttgct

SEQ ID NO: 4560090 - DNA, 25 bp, Homo sapien
cagggttctctcctgtttgggccac

SEQ ID NO: 4560091 - DNA, 25 bp, Homo sapien
attatcctttacaagcctggtgatt

SEQ ID NO: 4560092 - DNA, 25 bp, Homo sapien
tcctttacaagcctggtgattattt

SEQ ID NO: 4560093 - DNA, 25 bp, Homo sapien
gaacacgtaagcactattatccttt

SEQ ID NO: 4560094 - DNA, 25 bp, Homo sapien
tctttctaataggaacacgtaagca

SEQ ID NO: 4560095 - DNA, 25 bp, Homo sapien
tgcaaaattcatataaacgtgcatt

SEQ ID NO: 4560096 - DNA, 25 bp, Homo sapien
caaaattcatataaacgtgcattct

SEQ ID NO: 4560097 - DNA, 25 bp, Homo sapien
tagctcagatcagctttgacttctt

SEQ ID NO: 4560098 - DNA, 25 bp, Homo sapien
catataaacgtgcattcttatacct

SEQ ID NO: 4560099 - DNA, 25 bp, Homo sapien
gaatgcttgtcgctacctcatgcag

SEQ ID NO: 4560100 - DNA, 25 bp, Homo sapien
ggaagatctatattcattcctcaga

SEQ ID NO: 4560101 - DNA, 25 bp, Homo sapien
gattccgacacagaaatcagattgt

SEQ ID NO: 4560102 - DNA, 25 bp, Homo sapien
catgcagagtttctgacatatcctc

SEQ ID NO: 4560103 - DNA, 25 bp, Homo sapien
tttgaccttcccactagcctgatgg

SEQ ID NO: 4560104 - DNA, 25 bp, Homo sapien
gcaccattatgggtttagccgtcca

SEQ ID NO: 4560105 - DNA, 25 bp, Homo sapien
gagggcagccttatctcatatctga

SEQ ID NO: 4560106 - DNA, 25 bp, Homo sapien
catgtgcaagtaaccactagagggc

SEQ ID NO: 4560107 - DNA, 25 bp, Homo sapien
aaactgaccaagattgtgggaaggc

SEQ ID NO: 4560108 - DNA, 25 bp, Homo sapien
gggaaggcagaaccacacttacagc

SEQ ID NO: 4560109 - DNA, 25 bp, Homo sapien
ggtccaaatcccagtgagacattca

SEQ ID NO: 4560110 - DNA, 25 bp, Homo sapien
cctttaaagatagtgagttccccat

SEQ ID NO: 4560111 - DNA, 25 bp, Homo sapien
tccagcagtcattaaggccattccc

SEQ ID NO: 4560112 - DNA, 25 bp, Homo sapien
ttaatccagcagtcattaaggccat

SEQ ID NO: 4560113 - DNA, 25 bp, Homo sapien
aaggccattccccactaagtgagaa

SEQ ID NO: 4560114 - DNA, 25 bp, Homo sapien
tccccactaagtgagaaatgagatt

SEQ ID NO: 4560115 - DNA, 25 bp, Homo sapien
cgttatcagatggaaaagctaggct

SEQ ID NO: 4560116 - DNA, 25 bp, Homo sapien
tcataatggcgattggttacacagg

SEQ ID NO: 4560117 - DNA, 25 bp, Homo sapien
tatatccaggacgtttttcacagct

SEQ ID NO: 4560118 - DNA, 25 bp, Homo sapien
taggctataacgcaacctctgtgag

SEQ ID NO: 4560119 - DNA, 25 bp, Homo sapien
cattatttcatgactgggcagcatt

SEQ ID NO: 4560120 - DNA, 25 bp, Homo sapien
ggcaaaagggtttacttgtgcatgc

SEQ ID NO: 4560121 - DNA, 25 bp, Homo sapien
tattttcctagataccccagagcaa

SEQ ID NO: 4560122 - DNA, 25 bp, Homo sapien
tatggttctcaattcaaatcgtggg

SEQ ID NO: 4560123 - DNA, 25 bp, Homo sapien
ccatttgcacaaacacaggctgagc

SEQ ID NO: 4560124 - DNA, 25 bp, Homo sapien
gacatctggccaatgcacttttatg

SEQ ID NO: 4560125 - DNA, 25 bp, Homo sapien
caggctgagcactcatatgaagcaa

SEQ ID NO: 4560126 - DNA, 25 bp, Homo sapien
gacgaagaatctacgggccagaaat

SEQ ID NO: 4560127 - DNA, 25 bp, Homo sapien
tgctgcgcattagggaagccgcgtc

SEQ ID NO: 4560128 - DNA, 25 bp, Homo sapien
tgcgaagcagctcgggcagattatc

SEQ ID NO: 4560129 - DNA, 25 bp, Homo sapien
ctaggacccgcaggacagtctgggt

SEQ ID NO: 4560130 - DNA, 25 bp, Homo sapien
gggcagattatccacggcgaggaac

SEQ ID NO: 4560131 - DNA, 25 bp, Homo sapien
gagtttctccggagctgtttgcaac

SEQ ID NO: 4560132 - DNA, 25 bp, Homo sapien
gtttgcaaccgtcccaagagcgagt

SEQ ID NO: 4560133 - DNA, 25 bp, Homo sapien
gagcgagtctcggtttctccggcag

SEQ ID NO: 4560134 - DNA, 25 bp, Homo sapien
agttccctgacttgccacggtttct

SEQ ID NO: 4560135 - DNA, 25 bp, Homo sapien
gggacacagcgcgggacacagcgcg

SEQ ID NO: 4560136 - DNA, 25 bp, Homo sapien
tccggcccgcgcgctttcggaagtg

SEQ ID NO: 4560137 - DNA, 25 bp, Homo sapien
ctcgaggcgcccgtctcgctccggc

SEQ ID NO: 4560138 - DNA, 25 bp, Homo sapien
gctttcggaagtggccgcggcggga

SEQ ID NO: 4560139 - DNA, 25 bp, Homo sapien
cgctgaggcgctcggggacgcaggg

SEQ ID NO: 4560140 - DNA, 25 bp, Homo sapien
gccgctgaggcgctcggggacgcag

SEQ ID NO: 4560141 - DNA, 25 bp, Homo sapien
acgcaggggcagggcgcaaggcctg

SEQ ID NO: 4560142 - DNA, 25 bp, Homo sapien
gcagggcgcaaggcctggggcgctg

SEQ ID NO: 4560143 - DNA, 25 bp, Homo sapien
cagtccccggggatgacatcgcgac

SEQ ID NO: 4560144 - DNA, 25 bp, Homo sapien
tccccggggatgacatcgcgacaac

SEQ ID NO: 4560145 - DNA, 25 bp, Homo sapien
atgacatcgcgacaacgcgcacgca

SEQ ID NO: 4560146 - DNA, 25 bp, Homo sapien
cggggatgacatcgcgacaacgcgc

SEQ ID NO: 4560147 - DNA, 25 bp, Homo sapien
tttcatcgctgcgatcacaaaatac

SEQ ID NO: 4560148 - DNA, 25 bp, Homo sapien
catcgctgcgatcacaaaatacatc

SEQ ID NO: 4560149 - DNA, 25 bp, Homo sapien
tcgctgcgatcacaaaatacatcat

SEQ ID NO: 4560150 - DNA, 25 bp, Homo sapien
tcatcgctgcgatcacaaaatacat

SEQ ID NO: 4560151 - DNA, 25 bp, Homo sapien
ccgcggtgcggagagcgcagggaga

SEQ ID NO: 4560152 - DNA, 25 bp, Homo sapien
agagcggatggtccgaccccggagc

SEQ ID NO: 4560153 - DNA, 25 bp, Homo sapien
gcagggagagcggatggtccgaccc

SEQ ID NO: 4560154 - DNA, 25 bp, Homo sapien
ttaagccgcggtgcggagagcgcag

SEQ ID NO: 4560155 - DNA, 25 bp, Homo sapien
atgtgaccggctgacatcacggccg

SEQ ID NO: 4560156 - DNA, 25 bp, Homo sapien
gccgagagccatcccgagccataag

SEQ ID NO: 4560157 - DNA, 25 bp, Homo sapien
cataagaggctccatgtgaccggct

SEQ ID NO: 4560158 - DNA, 25 bp, Homo sapien
acggccgccgctctgtttacaccgc

SEQ ID NO: 4560159 - DNA, 25 bp, Homo sapien
cgcccccgcgggcaggtgagtagca

SEQ ID NO: 4560160 - DNA, 25 bp, Homo sapien
gggcaggtgagtagcagcggcggct

SEQ ID NO: 4560161 - DNA, 25 bp, Homo sapien
cgcgggcaggtgagtagcagcggcg

SEQ ID NO: 4560162 - DNA, 25 bp, Homo sapien
caggtgagtagcagcggcggctctg

SEQ ID NO: 4560163 - DNA, 25 bp, Homo sapien
gataaatgcgccagctcgttggtgg

SEQ ID NO: 4560164 - DNA, 25 bp, Homo sapien
ggaacgcgcctctgaccactttctg

SEQ ID NO: 4560165 - DNA, 25 bp, Homo sapien
gccggtcgcttttctgcacgcagcg

SEQ ID NO: 4560166 - DNA, 25 bp, Homo sapien
gggcaagaggctcgcaacccgacgc

SEQ ID NO: 4560167 - DNA, 25 bp, Homo sapien
agagtctcccaggatggtcacagcc

SEQ ID NO: 4560168 - DNA, 25 bp, Homo sapien
tgtgctgggttccacactgagtctg

SEQ ID NO: 4560169 - DNA, 25 bp, Homo sapien
atgtaactcatctcagagtctccca

SEQ ID NO: 4560170 - DNA, 25 bp, Homo sapien
gagacacttctaatgccaagttgtt

SEQ ID NO: 4560171 - DNA, 25 bp, Homo sapien
gcgtctgcttgctaattcaattaat

SEQ ID NO: 4560172 - DNA, 25 bp, Homo sapien
caggccctgcgtctctctctccagt

SEQ ID NO: 4560173 - DNA, 25 bp, Homo sapien
agtgtgcgtctgcttgctaattcaa

SEQ ID NO: 4560174 - DNA, 25 bp, Homo sapien
ctccagtgtgcgtctgcttgctaat

SEQ ID NO: 4560175 - DNA, 25 bp, Homo sapien
taagacagtagccctgattttgaga

SEQ ID NO: 4560176 - DNA, 25 bp, Homo sapien
gattttgagaaggtcacaaatcagc

SEQ ID NO: 4560177 - DNA, 25 bp, Homo sapien
tgacctgtgctctgaaaactgtaga

SEQ ID NO: 4560178 - DNA, 25 bp, Homo sapien
cactgtgatggataatcaaacaaga

SEQ ID NO: 4560179 - DNA, 25 bp, Homo sapien
gaagctgctaaagagatttaataca

SEQ ID NO: 4560180 - DNA, 25 bp, Homo sapien
aatagaacagaagggccaccaagag

SEQ ID NO: 4560181 - DNA, 25 bp, Homo sapien
tcagcacccacatgctaaaattgca

SEQ ID NO: 4560182 - DNA, 25 bp, Homo sapien
taaaattgcagctcgagagagccgt

SEQ ID NO: 4560183 - DNA, 25 bp, Homo sapien
caggggtgaccttctgagtgaactt

SEQ ID NO: 4560184 - DNA, 25 bp, Homo sapien
gtgaccttctgagtgaactttggga

SEQ ID NO: 4560185 - DNA, 25 bp, Homo sapien
ggtgaccttctgagtgaactttggg

SEQ ID NO: 4560186 - DNA, 25 bp, Homo sapien
ggggtgaccttctgagtgaactttg

SEQ ID NO: 4560187 - DNA, 25 bp, Homo sapien
tttcctctgactggactaactgagt

SEQ ID NO: 4560188 - DNA, 25 bp, Homo sapien
gtcacgcagcggaaggccaaaggac

SEQ ID NO: 4560189 - DNA, 25 bp, Homo sapien
acttcagaatcctgtcacgcagcgg

SEQ ID NO: 4560190 - DNA, 25 bp, Homo sapien
agtctactctgctcactagctgcca

SEQ ID NO: 4560191 - DNA, 25 bp, Homo sapien
cccagtttatgtgctcaagttgaga

SEQ ID NO: 4560192 - DNA, 25 bp, Homo sapien
ttggctgtggctccatcccagttta

SEQ ID NO: 4560193 - DNA, 25 bp, Homo sapien
tgtgctcaagttgagaccagaacag

SEQ ID NO: 4560194 - DNA, 25 bp, Homo sapien
ggctccatcccagtttatgtgctca

SEQ ID NO: 4560195 - DNA, 25 bp, Homo sapien
tgcttctaagtcctgaaggtttgcc

SEQ ID NO: 4560196 - DNA, 25 bp, Homo sapien
tgaatcctgtaatagcccatgctga

SEQ ID NO: 4560197 - DNA, 25 bp, Homo sapien
tccacggagccttgagatcgagtgc

SEQ ID NO: 4560198 - DNA, 25 bp, Homo sapien
tagaacctggtggtggatcagctgc

SEQ ID NO: 4560199 - DNA, 25 bp, Homo sapien
ctgccagcctagctcataaggaagt

SEQ ID NO: 4560200 - DNA, 25 bp, Homo sapien
cagcctagctcataaggaagttgtt

SEQ ID NO: 4560201 - DNA, 25 bp, Homo sapien
aacctttgtgcgctgctgaaacctg

SEQ ID NO: 4560202 - DNA, 25 bp, Homo sapien
tctgtttgccaaaaaacctttgtgc

SEQ ID NO: 4560203 - DNA, 25 bp, Homo sapien
gttttgaaggcagcaaggtctgagg

SEQ ID NO: 4560204 - DNA, 25 bp, Homo sapien
gaacgtgacagtgagaattcctctt

SEQ ID NO: 4560205 - DNA, 25 bp, Homo sapien
gaagcaactgcgcaaaaggcagaac

SEQ ID NO: 4560206 - DNA, 25 bp, Homo sapien
ttggagaacatcctatccatagact

SEQ ID NO: 4560207 - DNA, 25 bp, Homo sapien
tgtgttcagtattgcaccccaggca

SEQ ID NO: 4560208 - DNA, 25 bp, Homo sapien
ttctccaggagctttataagaggca

SEQ ID NO: 4560209 - DNA, 25 bp, Homo sapien
ggtggtgacacagatcccatacacg

SEQ ID NO: 4560210 - DNA, 25 bp, Homo sapien
gactcaatcaactttggccaaggcc

SEQ ID NO: 4560211 - DNA, 25 bp, Homo sapien
ttctctgacgtcttccccagtcatt

SEQ ID NO: 4560212 - DNA, 25 bp, Homo sapien
cattcctgcccctaagattcttcct

SEQ ID NO: 4560213 - DNA, 25 bp, Homo sapien
attcctgcccctaagattcttcctg

SEQ ID NO: 4560214 - DNA, 25 bp, Homo sapien
cttctctgacgtcttccccagtcat

SEQ ID NO: 4560215 - DNA, 25 bp, Homo sapien
tccagttcgaagacaatgacccatg

SEQ ID NO: 4560216 - DNA, 25 bp, Homo sapien
gattgaccacggcactcttgcctca

SEQ ID NO: 4560217 - DNA, 25 bp, Homo sapien
gacaatgacccatgattgaccacgg

SEQ ID NO: 4560218 - DNA, 25 bp, Homo sapien
tggcctgtccagttcgaagacaatg

SEQ ID NO: 4560219 - DNA, 25 bp, Homo sapien
tttgccccagtgtactatggagtcc

SEQ ID NO: 4560220 - DNA, 25 bp, Homo sapien
cagacagatggctccaacagctggg

SEQ ID NO: 4560221 - DNA, 25 bp, Homo sapien
tatgggggataatgctcagaggccc

SEQ ID NO: 4560222 - DNA, 25 bp, Homo sapien
tggttacccatctgcctccagaaac

SEQ ID NO: 4560223 - DNA, 25 bp, Homo sapien
tctggcagagcacatagtggttctc

SEQ ID NO: 4560224 - DNA, 25 bp, Homo sapien
ggagttgctgtaagaggccctgaaa

SEQ ID NO: 4560225 - DNA, 25 bp, Homo sapien
catcagactgatcacaatggtgtca

SEQ ID NO: 4560226 - DNA, 25 bp, Homo sapien
caatgtactaggtgtgggctgcaca

SEQ ID NO: 4560227 - DNA, 25 bp, Homo sapien
ttcttttcccaatcttaagcagccc

SEQ ID NO: 4560228 - DNA, 25 bp, Homo sapien
cagcagcatgagactttctaaccca

SEQ ID NO: 4560229 - DNA, 25 bp, Homo sapien
ggccagcagcatgagactttctaac

SEQ ID NO: 4560230 - DNA, 25 bp, Homo sapien
agcatgagactttctaacccagctt

SEQ ID NO: 4560231 - DNA, 25 bp, Homo sapien
gcccggcctcactacctatgtattt

SEQ ID NO: 4560232 - DNA, 25 bp, Homo sapien
gcgcccggcctcactacctatgtat

SEQ ID NO: 4560233 - DNA, 25 bp, Homo sapien
ccggcctcactacctatgtattttc

SEQ ID NO: 4560234 - DNA, 25 bp, Homo sapien
cgcccggcctcactacctatgtatt

SEQ ID NO: 4560235 - DNA, 25 bp, Homo sapien
caggctggagcactgagacacaatc

SEQ ID NO: 4560236 - DNA, 25 bp, Homo sapien
gacacgctgaagatcgttagggtaa

SEQ ID NO: 4560237 - DNA, 25 bp, Homo sapien
aaaaatgctgcactcttgtcttggc

SEQ ID NO: 4560238 - DNA, 25 bp, Homo sapien
ttccttagaaacagagacacgctga

SEQ ID NO: 4560239 - DNA, 25 bp, Homo sapien
tgagtgggacaaagtacactctgca

SEQ ID NO: 4560240 - DNA, 25 bp, Homo sapien
cgtttggcatgtcaagtctctgctc

SEQ ID NO: 4560241 - DNA, 25 bp, Homo sapien
tacatgtcaattaaaggcataaaca

SEQ ID NO: 4560242 - DNA, 25 bp, Homo sapien
aaagccatcgaagcttcaacgggac

SEQ ID NO: 4560243 - DNA, 25 bp, Homo sapien
aagcttcaacgggaccagtgtctcc

SEQ ID NO: 4560244 - DNA, 25 bp, Homo sapien
gggaaaatttccttccgctcagata

SEQ ID NO: 4560245 - DNA, 25 bp, Homo sapien
tgtctgagagatttcgaacattgaa

SEQ ID NO: 4560246 - DNA, 25 bp, Homo sapien
tcaaggccaatgtgcctttcaggag

SEQ ID NO: 4560247 - DNA, 25 bp, Homo sapien
ttccgctcagatactgtcaaggcca

SEQ ID NO: 4560248 - DNA, 25 bp, Homo sapien
atatagaaaagttgtcatcgggttg

SEQ ID NO: 4560249 - DNA, 25 bp, Homo sapien
aaatatagaaaagttgtcatcgggt

SEQ ID NO: 4560250 - DNA, 25 bp, Homo sapien
aatatagaaaagttgtcatcgggtt

SEQ ID NO: 4560251 - DNA, 25 bp, Homo sapien
tatagaaaagttgtcatcgggttgc

SEQ ID NO: 4560252 - DNA, 25 bp, Homo sapien
tgaggagtaaagtacatggcactac

SEQ ID NO: 4560253 - DNA, 25 bp, Homo sapien
cccaggagtctgtgctcagagtttc

SEQ ID NO: 4560254 - DNA, 25 bp, Homo sapien
acactgttgtatcgtggagggagac

SEQ ID NO: 4560255 - DNA, 25 bp, Homo sapien
gagactgtgagatatggagccaaac

SEQ ID NO: 4560256 - DNA, 25 bp, Homo sapien
ggtgaccaatttccttacagatcaa

SEQ ID NO: 4560257 - DNA, 25 bp, Homo sapien
cagatcaattagaagtcatttgtgt

SEQ ID NO: 4560258 - DNA, 25 bp, Homo sapien
aatgtgaaggaagcccattatttac

SEQ ID NO: 4560259 - DNA, 25 bp, Homo sapien
catcagccaaggtgaccaatttcct

SEQ ID NO: 4560260 - DNA, 25 bp, Homo sapien
cagttcttaaaaagctatgccagcg

SEQ ID NO: 4560261 - DNA, 25 bp, Homo sapien
tatgccagcgtgcagaccctttaga

SEQ ID NO: 4560262 - DNA, 25 bp, Homo sapien
tgtgtagacaacagagccagttctt

SEQ ID NO: 4560263 - DNA, 25 bp, Homo sapien
tccttgggagcctgaaatggaaaca

SEQ ID NO: 4560264 - DNA, 25 bp, Homo sapien
tcctgacctccagtgatctgtgtgc

SEQ ID NO: 4560265 - DNA, 25 bp, Homo sapien
tgacctccagtgatctgtgtgcctt

SEQ ID NO: 4560266 - DNA, 25 bp, Homo sapien
acctccagtgatctgtgtgccttgg

SEQ ID NO: 4560267 - DNA, 25 bp, Homo sapien
cctgacctccagtgatctgtgtgcc

SEQ ID NO: 4560268 - DNA, 25 bp, Homo sapien
cctgagcccgaatgacaagttgaac

SEQ ID NO: 4560269 - DNA, 25 bp, Homo sapien
aatcagccggagagggacttgtgtc

SEQ ID NO: 4560270 - DNA, 25 bp, Homo sapien
tagatcagttcgattcctgagcccg

SEQ ID NO: 4560271 - DNA, 25 bp, Homo sapien
tgtttgaagcgacataatcagccgg

SEQ ID NO: 4560272 - DNA, 25 bp, Homo sapien
gaatactcttgtggagaaaccctcc

SEQ ID NO: 4560273 - DNA, 25 bp, Homo sapien
taggaagtttcacacaagggaccaa

SEQ ID NO: 4560274 - DNA, 25 bp, Homo sapien
aaacagctatttcattggcctcggg

SEQ ID NO: 4560275 - DNA, 25 bp, Homo sapien
gaggctgcccagttaagttattagg

SEQ ID NO: 4560276 - DNA, 25 bp, Homo sapien
tctttgtgctgatgaaaaagtaata

SEQ ID NO: 4560277 - DNA, 25 bp, Homo sapien
ccagctacatgagggaaataattct

SEQ ID NO: 4560278 - DNA, 25 bp, Homo sapien
cataattgtccagctacatgaggga

SEQ ID NO: 4560279 - DNA, 25 bp, Homo sapien
tttgtgctgatgaaaaagtaatagt

SEQ ID NO: 4560280 - DNA, 25 bp, Homo sapien
tctcagcttactgccgcttcggcat

SEQ ID NO: 4560281 - DNA, 25 bp, Homo sapien
ttactgccgcttcggcatcccaggt

SEQ ID NO: 4560282 - DNA, 25 bp, Homo sapien
cagcttactgccgcttcggcatccc

SEQ ID NO: 4560283 - DNA, 25 bp, Homo sapien
gcttactgccgcttcggcatcccag

SEQ ID NO: 4560284 - DNA, 25 bp, Homo sapien
actcttcatgtccagtggagctgaa

SEQ ID NO: 4560285 - DNA, 25 bp, Homo sapien
ttatcttattagttgggatgtactc

SEQ ID NO: 4560286 - DNA, 25 bp, Homo sapien
atgtactcttcatgtccagtggagc

SEQ ID NO: 4560287 - DNA, 25 bp, Homo sapien
tattagttgggatgtactcttcatg

SEQ ID NO: 4560288 - DNA, 25 bp, Homo sapien
cagtagctttctgtacattgccagg

SEQ ID NO: 4560289 - DNA, 25 bp, Homo sapien
tcagtagctttctgtacattgccag

SEQ ID NO: 4560290 - DNA, 25 bp, Homo sapien
tagctttctgtacattgccaggtgg

SEQ ID NO: 4560291 - DNA, 25 bp, Homo sapien
gctttctgtacattgccaggtggcc

SEQ ID NO: 4560292 - DNA, 25 bp, Homo sapien
cccaggactgagctagcagaaagac

SEQ ID NO: 4560293 - DNA, 25 bp, Homo sapien
ctagcagaaagactgaattacttac

SEQ ID NO: 4560294 - DNA, 25 bp, Homo sapien
acagtaggcacaatcatcagcccct

SEQ ID NO: 4560295 - DNA, 25 bp, Homo sapien
ataaacagtaggcacaatcatcagc

SEQ ID NO: 4560296 - DNA, 25 bp, Homo sapien
cacctctagagtgggtccctccggg

SEQ ID NO: 4560297 - DNA, 25 bp, Homo sapien
ggccagggacgagctcatgggcaag

SEQ ID NO: 4560298 - DNA, 25 bp, Homo sapien
tccgggccagggacgagctcatggg

SEQ ID NO: 4560299 - DNA, 25 bp, Homo sapien
tctagagtgggtccctccgggccag

SEQ ID NO: 4560300 - DNA, 25 bp, Homo sapien
tgacgtgagtttgtaacttatggtg

SEQ ID NO: 4560301 - DNA, 25 bp, Homo sapien
agtttgtaacttatggtgtagttca

SEQ ID NO: 4560302 - DNA, 25 bp, Homo sapien
cgtgagtttgtaacttatggtgtag

SEQ ID NO: 4560303 - DNA, 25 bp, Homo sapien
attgacgtgagtttgtaacttatgg

SEQ ID NO: 4560304 - DNA, 25 bp, Homo sapien
tatgtgtcttcttcgttactgagat

SEQ ID NO: 4560305 - DNA, 25 bp, Homo sapien
atgtatgtgtcttcttcgttactga

SEQ ID NO: 4560306 - DNA, 25 bp, Homo sapien
tgtgtcttcttcgttactgagatac

SEQ ID NO: 4560307 - DNA, 25 bp, Homo sapien
gtatgtgtcttcttcgttactgaga

SEQ ID NO: 4560308 - DNA, 25 bp, Homo sapien
ttaggccttcattcgcagcaggcat

SEQ ID NO: 4560309 - DNA, 25 bp, Homo sapien
cttaggccttcattcgcagcaggca

SEQ ID NO: 4560310 - DNA, 25 bp, Homo sapien
tagcaagtggctgcattatccaagt

SEQ ID NO: 4560311 - DNA, 25 bp, Homo sapien
gttgtgcaggttttgattcacttcc

SEQ ID NO: 4560312 - DNA, 25 bp, Homo sapien
ttggtccccactaccgaagggcatc

SEQ ID NO: 4560313 - DNA, 25 bp, Homo sapien
gaaccaagtccagctgttgtgcagg

SEQ ID NO: 4560314 - DNA, 25 bp, Homo sapien
ggatcctggtcagcataccaagtca

SEQ ID NO: 4560315 - DNA, 25 bp, Homo sapien
agtcaaggcaagtaaagactgaaga

SEQ ID NO: 4560316 - DNA, 25 bp, Homo sapien
tcctggtcagcataccaagtcaagg

SEQ ID NO: 4560317 - DNA, 25 bp, Homo sapien
ctggtcagcataccaagtcaaggca

SEQ ID NO: 4560318 - DNA, 25 bp, Homo sapien
actgatggcagaagcatagatagac

SEQ ID NO: 4560319 - DNA, 25 bp, Homo sapien
gcatagatagaccaagggtatcact

SEQ ID NO: 4560320 - DNA, 25 bp, Homo sapien
gaaaaaccccatgcattcactcatg

SEQ ID NO: 4560321 - DNA, 25 bp, Homo sapien
ccagaacgaagtctgctactgatgg

SEQ ID NO: 4560322 - DNA, 25 bp, Homo sapien
ttttcagccagcgcaacattctcat

SEQ ID NO: 4560323 - DNA, 25 bp, Homo sapien
tcagccagcgcaacattctcatttt

SEQ ID NO: 4560324 - DNA, 25 bp, Homo sapien
agccagcgcaacattctcatttttc

SEQ ID NO: 4560325 - DNA, 25 bp, Homo sapien
tttcagccagcgcaacattctcatt

SEQ ID NO: 4560326 - DNA, 25 bp, Homo sapien
acttaatgagtgtgagatggcctgc

SEQ ID NO: 4560327 - DNA, 25 bp, Homo sapien
tatattctcggaggacacagtcctg

SEQ ID NO: 4560328 - DNA, 25 bp, Homo sapien
tacacagggcgagagatttttaagc

SEQ ID NO: 4560329 - DNA, 25 bp, Homo sapien
tcaccgtgaaacacttgcggagcca

SEQ ID NO: 4560330 - DNA, 25 bp, Homo sapien
acagcagggtagttgaccttcgatc

SEQ ID NO: 4560331 - DNA, 25 bp, Homo sapien
gttgaccttcgatcctgtctgacca

SEQ ID NO: 4560332 - DNA, 25 bp, Homo sapien
ggtagttgaccttcgatcctgtctg

SEQ ID NO: 4560333 - DNA, 25 bp, Homo sapien
ttcagcagcaatgcattccttaaag

SEQ ID NO: 4560334 - DNA, 25 bp, Homo sapien
gcgggcccatgctgtttctatagga

SEQ ID NO: 4560335 - DNA, 25 bp, Homo sapien
tccccgactcggtctgctgtgattt

SEQ ID NO: 4560336 - DNA, 25 bp, Homo sapien
tctccttccgtattgcaaacatgct

SEQ ID NO: 4560337 - DNA, 25 bp, Homo sapien
aaacatgctcaccagtgacctcaga

SEQ ID NO: 4560338 - DNA, 25 bp, Homo sapien
gcacacaaattatgatcatcccact

SEQ ID NO: 4560339 - DNA, 25 bp, Homo sapien
cacacaaattatgatcatcccactg

SEQ ID NO: 4560340 - DNA, 25 bp, Homo sapien
gcaatatattgccagatacctcatc

SEQ ID NO: 4560341 - DNA, 25 bp, Homo sapien
tctgattagagcaatatattgccag

SEQ ID NO: 4560342 - DNA, 25 bp, Homo sapien
cctgtgttctgattagagcaatata

SEQ ID NO: 4560343 - DNA, 25 bp, Homo sapien
acatcctgtgttctgattagagcaa

SEQ ID NO: 4560344 - DNA, 25 bp, Homo sapien
tggtttggaggtgagttgtaggagg

SEQ ID NO: 4560345 - DNA, 25 bp, Homo sapien
caatattggcttgaagtgctccacg

SEQ ID NO: 4560346 - DNA, 25 bp, Homo sapien
catattgctctggatggtaaatgag

SEQ ID NO: 4560347 - DNA, 25 bp, Homo sapien
gaagtgctccacgtttgcacccctg

SEQ ID NO: 4560348 - DNA, 25 bp, Homo sapien
tgagcttgcacacgacatcacattg

SEQ ID NO: 4560349 - DNA, 25 bp, Homo sapien
tgggtagtacggattgcttcagttt

SEQ ID NO: 4560350 - DNA, 25 bp, Homo sapien
tcagaaggacagcatgggtagtacg

SEQ ID NO: 4560351 - DNA, 25 bp, Homo sapien
ccagcctggtggcttcttcagaagg

SEQ ID NO: 4560352 - DNA, 25 bp, Homo sapien
ttccagcctggtggcttcttcagaa

SEQ ID NO: 4560353 - DNA, 25 bp, Homo sapien
gcttttgtgactgctggtgctcagc

SEQ ID NO: 4560354 - DNA, 25 bp, Homo sapien
tcccgaggccagaagacaagccttt

SEQ ID NO: 4560355 - DNA, 25 bp, Homo sapien
caagctctggtacttgttcccgagg

SEQ ID NO: 4560356 - DNA, 25 bp, Homo sapien
gaaccaatgacaccacttggtgaga

SEQ ID NO: 4560357 - DNA, 25 bp, Homo sapien
tgtgaggtgccatattccctgtgaa

SEQ ID NO: 4560358 - DNA, 25 bp, Homo sapien
tctgaatgcacttgcagttgcaaac

SEQ ID NO: 4560359 - DNA, 25 bp, Homo sapien
tatggctaggatggtagacttctgt

SEQ ID NO: 4560360 - DNA, 25 bp, Homo sapien
cctccttcagagataccgccttttg

SEQ ID NO: 4560361 - DNA, 25 bp, Homo sapien
tcttttcaagtatcatgccccaagt

SEQ ID NO: 4560362 - DNA, 25 bp, Homo sapien
ttcaagtatcatgccccaagtcagt

SEQ ID NO: 4560363 - DNA, 25 bp, Homo sapien
tttcttttcaagtatcatgccccaa

SEQ ID NO: 4560364 - DNA, 25 bp, Homo sapien
ttttcaagtatcatgccccaagtca

SEQ ID NO: 4560365 - DNA, 25 bp, Homo sapien
ggaaagacttgagggcatagcttgt

SEQ ID NO: 4560366 - DNA, 25 bp, Homo sapien
aagacttgagggcatagcttgtaat

SEQ ID NO: 4560367 - DNA, 25 bp, Homo sapien
gacttgagggcatagcttgtaatac

SEQ ID NO: 4560368 - DNA, 25 bp, Homo sapien
gaaagacttgagggcatagcttgta

SEQ ID NO: 4560369 - DNA, 25 bp, Homo sapien
caaagctcgggtaacaaggaattca

SEQ ID NO: 4560370 - DNA, 25 bp, Homo sapien
tttccacaattgacacagagctctg

SEQ ID NO: 4560371 - DNA, 25 bp, Homo sapien
caaagtacaaaacttggcaggaagc

SEQ ID NO: 4560372 - DNA, 25 bp, Homo sapien
tctggttagtacaggctcccgtgcc

SEQ ID NO: 4560373 - DNA, 25 bp, Homo sapien
tgaatacatgggctgtgatacggga

SEQ ID NO: 4560374 - DNA, 25 bp, Homo sapien
tcaccccacaagatgtagtcctcgc

SEQ ID NO: 4560375 - DNA, 25 bp, Homo sapien
gtgatacgggagctagcctgatgcc

SEQ ID NO: 4560376 - DNA, 25 bp, Homo sapien
tacatgggctgtgatacgggagcta

SEQ ID NO: 4560377 - DNA, 25 bp, Homo sapien
tgacggcaagacggcatgcgagagt

SEQ ID NO: 4560378 - DNA, 25 bp, Homo sapien
gacggcaagacggcatgcgagagtc

SEQ ID NO: 4560379 - DNA, 25 bp, Homo sapien
ctgacggcaagacggcatgcgagag

SEQ ID NO: 4560380 - DNA, 25 bp, Homo sapien
tagcccctgagggacgtggatcacc

SEQ ID NO: 4560381 - DNA, 25 bp, Homo sapien
tgagggacgtggatcacccacatgc

SEQ ID NO: 4560382 - DNA, 25 bp, Homo sapien
tcacccacatgcaacaggctgctga

SEQ ID NO: 4560383 - DNA, 25 bp, Homo sapien
tctggctctgattagcccctgaggg

SEQ ID NO: 4560384 - DNA, 25 bp, Homo sapien
caacaaaagcccattgacgctcaga

SEQ ID NO: 4560385 - DNA, 25 bp, Homo sapien
ccttcccgatggcacaaatggaagc

SEQ ID NO: 4560386 - DNA, 25 bp, Homo sapien
aaagcccattgacgctcagacacct

SEQ ID NO: 4560387 - DNA, 25 bp, Homo sapien
cttcccgatggcacaaatggaagct

SEQ ID NO: 4560388 - DNA, 25 bp, Homo sapien
gactacttttgatactatgagacac

SEQ ID NO: 4560389 - DNA, 25 bp, Homo sapien
aaaacaaccgtccttctcagcactg

SEQ ID NO: 4560390 - DNA, 25 bp, Homo sapien
gttgccaaactaagcacactaatag

SEQ ID NO: 4560391 - DNA, 25 bp, Homo sapien
ggaacgctgttctagactctttata

SEQ ID NO: 4560392 - DNA, 25 bp, Homo sapien
tctgcagattccatgggcgacattg

SEQ ID NO: 4560393 - DNA, 25 bp, Homo sapien
gcctcttcgaagcagcaggatggag

SEQ ID NO: 4560394 - DNA, 25 bp, Homo sapien
ctcaccagttgtggctgtgtgctct

SEQ ID NO: 4560395 - DNA, 25 bp, Homo sapien
tcacagagaccaacttctgcagatt

SEQ ID NO: 4560396 - DNA, 25 bp, Homo sapien
caattatcttatggtaaatgtgtag

SEQ ID NO: 4560397 - DNA, 25 bp, Homo sapien
tttaggatcctgtagtgccttaggg

SEQ ID NO: 4560398 - DNA, 25 bp, Homo sapien
aagaaaaccacccagaacgcaatga

SEQ ID NO: 4560399 - DNA, 25 bp, Homo sapien
ccttaggggcagcattacaaacatc

SEQ ID NO: 4560400 - DNA, 25 bp, Homo sapien
tatggtgtgcctgagtaagtaaaac

SEQ ID NO: 4560401 - DNA, 25 bp, Homo sapien
cctatggtgtgcctgagtaagtaaa

SEQ ID NO: 4560402 - DNA, 25 bp, Homo sapien
cttggagaagtacctctcctatggt

SEQ ID NO: 4560403 - DNA, 25 bp, Homo sapien
gaagtacctctcctatggtgtgcct

SEQ ID NO: 4560404 - DNA, 25 bp, Homo sapien
cagatggtgaaaactgagttgggaa

SEQ ID NO: 4560405 - DNA, 25 bp, Homo sapien
taccaaagcaaaggcaggctgcaga

SEQ ID NO: 4560406 - DNA, 25 bp, Homo sapien
gccattctgggtagccgagaggaaa

SEQ ID NO: 4560407 - DNA, 25 bp, Homo sapien
gaaaactgcacagatattttcccaa

SEQ ID NO: 4560408 - DNA, 25 bp, Homo sapien
gggtaggagtgttcattactgtggg

SEQ ID NO: 4560409 - DNA, 25 bp, Homo sapien
gtaggagtgttcattactgtgggta

SEQ ID NO: 4560410 - DNA, 25 bp, Homo sapien
tttcatattttgattgggtaggagt

SEQ ID NO: 4560411 - DNA, 25 bp, Homo sapien
catattttgattgggtaggagtgtt

SEQ ID NO: 4560412 - DNA, 25 bp, Homo sapien
taggatgagtgaggtttcgtgctcc

SEQ ID NO: 4560413 - DNA, 25 bp, Homo sapien
taactgaccagcacatacaggcagg

SEQ ID NO: 4560414 - DNA, 25 bp, Homo sapien
gagactacgtgaatgcttcaccatg

SEQ ID NO: 4560415 - DNA, 25 bp, Homo sapien
cctggctagttttcacggctcttga

SEQ ID NO: 4560416 - DNA, 25 bp, Homo sapien
tcctgagaggccatcaacagagact

SEQ ID NO: 4560417 - DNA, 25 bp, Homo sapien
gaatctgtcctaatccaagagccaa

SEQ ID NO: 4560418 - DNA, 25 bp, Homo sapien
ttttcaatgtcaaggccagtcatga

SEQ ID NO: 4560419 - DNA, 25 bp, Homo sapien
tattcatcgtcaaatctgtggcgcc

SEQ ID NO: 4560420 - DNA, 25 bp, Homo sapien
tgagttccaaagagccgttgcccct

SEQ ID NO: 4560421 - DNA, 25 bp, Homo sapien
gttacctcggtgcagacaactggct

SEQ ID NO: 4560422 - DNA, 25 bp, Homo sapien
caacaggatggattagcagggctag

SEQ ID NO: 4560423 - DNA, 25 bp, Homo sapien
tacgggtctgatggctctctaaagg

SEQ ID NO: 4560424 - DNA, 25 bp, Homo sapien
ccgcagctttcagggttggtgttga

SEQ ID NO: 4560425 - DNA, 25 bp, Homo sapien
ggcttaatttggtacctgagagtca

SEQ ID NO: 4560426 - DNA, 25 bp, Homo sapien
tttgaggccacacacataagcgagg

SEQ ID NO: 4560427 - DNA, 25 bp, Homo sapien
gaaaacataaccagcccagagtcct

SEQ ID NO: 4560428 - DNA, 25 bp, Homo sapien
cagcccacagagttaagcgcagctg

SEQ ID NO: 4560429 - DNA, 25 bp, Homo sapien
ccacagagttaagcgcagctgatct

SEQ ID NO: 4560430 - DNA, 25 bp, Homo sapien
agtgtttcagcagcacggaggggac

SEQ ID NO: 4560431 - DNA, 25 bp, Homo sapien
gcccacagagttaagcgcagctgat

SEQ ID NO: 4560432 - DNA, 25 bp, Homo sapien
ttgagtctcacctttgcagaggacc

SEQ ID NO: 4560433 - DNA, 25 bp, Homo sapien
tcacgctggatacaggaagaaggct

SEQ ID NO: 4560434 - DNA, 25 bp, Homo sapien
tacagagggtcaccaagatcacgct

SEQ ID NO: 4560435 - DNA, 25 bp, Homo sapien
aaacgtcgcatccttgagtctctgg

SEQ ID NO: 4560436 - DNA, 25 bp, Homo sapien
gggagatggagattctggacattcc

SEQ ID NO: 4560437 - DNA, 25 bp, Homo sapien
ggtcactccaaactgtgtggcaaaa

SEQ ID NO: 4560438 - DNA, 25 bp, Homo sapien
gacattccaattgggtcactccaaa

SEQ ID NO: 4560439 - DNA, 25 bp, Homo sapien
tgtgctgcacaaccattatagagct

SEQ ID NO: 4560440 - DNA, 25 bp, Homo sapien
tcccctgcaactgcggtcaaggtgg

SEQ ID NO: 4560441 - DNA, 25 bp, Homo sapien
tggagggatggccacaaccagtcat

SEQ ID NO: 4560442 - DNA, 25 bp, Homo sapien
cacaaccagtcatcttttctgagtg

SEQ ID NO: 4560443 - DNA, 25 bp, Homo sapien
tttcccctgcaactgcggtcaaggt

SEQ ID NO: 4560444 - DNA, 25 bp, Homo sapien
cacagtggctgcgaagcaaataagc

SEQ ID NO: 4560445 - DNA, 25 bp, Homo sapien
tttgcaaggctgacagtaaagaagg

SEQ ID NO: 4560446 - DNA, 25 bp, Homo sapien
ttgcaaggctgacagtaaagaaggg

SEQ ID NO: 4560447 - DNA, 25 bp, Homo sapien
agtggctgcgaagcaaataagcaga

SEQ ID NO: 4560448 - DNA, 25 bp, Homo sapien
caggctttctctcccgcctcagtgc

SEQ ID NO: 4560449 - DNA, 25 bp, Homo sapien
tgtgacatttgagccgtgcaggctt

SEQ ID NO: 4560450 - DNA, 25 bp, Homo sapien
ttctctcccgcctcagtgcctctgt

SEQ ID NO: 4560451 - DNA, 25 bp, Homo sapien
tgatgctctgtgacatttgagccgt

SEQ ID NO: 4560452 - DNA, 25 bp, Homo sapien
ggtttccgacagcaaaatccaatac

SEQ ID NO: 4560453 - DNA, 25 bp, Homo sapien
aggtttccgacagcaaaatccaata

SEQ ID NO: 4560454 - DNA, 25 bp, Homo sapien
ttctaaacgattggccactgtttgt

SEQ ID NO: 4560455 - DNA, 25 bp, Homo sapien
aatggcaatcattaatttctaaacg

SEQ ID NO: 4560456 - DNA, 25 bp, Homo sapien
ctctgaagaaccaacctgaagtttg

SEQ ID NO: 4560457 - DNA, 25 bp, Homo sapien
tgtggttggtggtggagacagccat

SEQ ID NO: 4560458 - DNA, 25 bp, Homo sapien
tttgtggttggtggtggagacagcc

SEQ ID NO: 4560459 - DNA, 25 bp, Homo sapien
tgaagaaccaacctgaagtttgtgg

SEQ ID NO: 4560460 - DNA, 25 bp, Homo sapien
taaattgtgtggtaccagtggcctg

SEQ ID NO: 4560461 - DNA, 25 bp, Homo sapien
agttgtacctgcacgttaaagagac

SEQ ID NO: 4560462 - DNA, 25 bp, Homo sapien
catatttcttatcgccaagggcaac

SEQ ID NO: 4560463 - DNA, 25 bp, Homo sapien
tggccaggtggatatcaaacttgaa

SEQ ID NO: 4560464 - DNA, 25 bp, Homo sapien
ggaagaattgctatagcctaggagt

SEQ ID NO: 4560465 - DNA, 25 bp, Homo sapien
gatttaacctcagtggaaacgctcc

SEQ ID NO: 4560466 - DNA, 25 bp, Homo sapien
tcagtggaaacgctccacactggag

SEQ ID NO: 4560467 - DNA, 25 bp, Homo sapien
aatgcaaggcaagcaggtccatcca

SEQ ID NO: 4560468 - DNA, 25 bp, Homo sapien
cgtccatgatttaacctcagtggaa

SEQ ID NO: 4560469 - DNA, 25 bp, Homo sapien
ttccctctctttctctctccctccc

SEQ ID NO: 4560470 - DNA, 25 bp, Homo sapien
cttccttccttccctctctttctct

SEQ ID NO: 4560471 - DNA, 25 bp, Homo sapien
tccttccttccctctctttctctct

SEQ ID NO: 4560472 - DNA, 25 bp, Homo sapien
ccttccctctctttctctctccctc

SEQ ID NO: 4560473 - DNA, 25 bp, Homo sapien
tcataacacttagcaggatgtgaaa

SEQ ID NO: 4560474 - DNA, 25 bp, Homo sapien
cataacacttagcaggatgtgaaat

SEQ ID NO: 4560475 - DNA, 25 bp, Homo sapien
ataaaccaaaacttgtccacaatct

SEQ ID NO: 4560476 - DNA, 25 bp, Homo sapien
cattatatcgtgagcattttaccac

SEQ ID NO: 4560477 - DNA, 25 bp, Homo sapien
ggtgctctctagtttggcagattac

SEQ ID NO: 4560478 - DNA, 25 bp, Homo sapien
gttgctattttcaggtgctctctag

SEQ ID NO: 4560479 - DNA, 25 bp, Homo sapien
aaagagagttgctattttcaggtgc

SEQ ID NO: 4560480 - DNA, 25 bp, Homo sapien
tattttcaggtgctctctagtttgg

SEQ ID NO: 4560481 - DNA, 25 bp, Homo sapien
taaaaagcatcacaaagcccatggg

SEQ ID NO: 4560482 - DNA, 25 bp, Homo sapien
tcagatgcagatttgcccagcagcc

SEQ ID NO: 4560483 - DNA, 25 bp, Homo sapien
ggccacttaagcaaacaccaactga

SEQ ID NO: 4560484 - DNA, 25 bp, Homo sapien
taagactgcctgttaatggaatgat

SEQ ID NO: 4560485 - DNA, 25 bp, Homo sapien
aagtcattttgttcgcatctgagag

SEQ ID NO: 4560486 - DNA, 25 bp, Homo sapien
ctgagagtgacacagcgacccctcg

SEQ ID NO: 4560487 - DNA, 25 bp, Homo sapien
taggcccaatgcctcgagttttcct

SEQ ID NO: 4560488 - DNA, 25 bp, Homo sapien
acaatgctgagacctaggcccaatg

SEQ ID NO: 4560489 - DNA, 25 bp, Homo sapien
tctctgtgcaagatgagacttgacc

SEQ ID NO: 4560490 - DNA, 25 bp, Homo sapien
tgaaacctccagactgaaagacccc

SEQ ID NO: 4560491 - DNA, 25 bp, Homo sapien
tatcaaaaagtgtggccagttcaag

SEQ ID NO: 4560492 - DNA, 25 bp, Homo sapien
cactgagggtatgctgtccaagcag

SEQ ID NO: 4560493 - DNA, 25 bp, Homo sapien
ctccccaaactgatgacaggtgaag

SEQ ID NO: 4560494 - DNA, 25 bp, Homo sapien
cactttgcttggatactgacagagc

SEQ ID NO: 4560495 - DNA, 25 bp, Homo sapien
tggatactgacagagcctccttgcc

SEQ ID NO: 4560496 - DNA, 25 bp, Homo sapien
tgacaggtgaagatttccccaaaca

SEQ ID NO: 4560497 - DNA, 25 bp, Homo sapien
gatgccctgtgctgctgtcacaccc

SEQ ID NO: 4560498 - DNA, 25 bp, Homo sapien
tgaacggatgccctgtgctgctgtc

SEQ ID NO: 4560499 - DNA, 25 bp, Homo sapien
acggatgccctgtgctgctgtcaca

SEQ ID NO: 4560500 - DNA, 25 bp, Homo sapien
gaacggatgccctgtgctgctgtca

SEQ ID NO: 4560501 - DNA, 25 bp, Homo sapien
caagctgctgccacgagcaagcctc

SEQ ID NO: 4560502 - DNA, 25 bp, Homo sapien
tccacgcatgtcgaatgcacacttg

SEQ ID NO: 4560503 - DNA, 25 bp, Homo sapien
cacacacataggagctagaaggagc

SEQ ID NO: 4560504 - DNA, 25 bp, Homo sapien
ggagctggttgctctatggcaagaa

SEQ ID NO: 4560505 - DNA, 25 bp, Homo sapien
ggaggcatcttgcacacaaagggaa

SEQ ID NO: 4560506 - DNA, 25 bp, Homo sapien
tgtggatggcctgagaatagaggag

SEQ ID NO: 4560507 - DNA, 25 bp, Homo sapien
tcttcagggctagtgaggtgcgtct

SEQ ID NO: 4560508 - DNA, 25 bp, Homo sapien
gtgcgtctcaaaggcccctgtggct

SEQ ID NO: 4560509 - DNA, 25 bp, Homo sapien
gtcagccgcttccacaatcttatgt

SEQ ID NO: 4560510 - DNA, 25 bp, Homo sapien
aatcttatgtgtggatcctgccacc

SEQ ID NO: 4560511 - DNA, 25 bp, Homo sapien
tccacaatcttatgtgtggatcctg

SEQ ID NO: 4560512 - DNA, 25 bp, Homo sapien
gccgcttccacaatcttatgtgtgg

SEQ ID NO: 4560513 - DNA, 25 bp, Homo sapien
cttcctccagcttttgtcaaaaagc

SEQ ID NO: 4560514 - DNA, 25 bp, Homo sapien
tcttcctccagcttttgtcaaaaag

SEQ ID NO: 4560515 - DNA, 25 bp, Homo sapien
tcctccagcttttgtcaaaaagctt

SEQ ID NO: 4560516 - DNA, 25 bp, Homo sapien
ctccagcttttgtcaaaaagcttac

SEQ ID NO: 4560517 - DNA, 25 bp, Homo sapien
catgttccccatcaagtctccaagg

SEQ ID NO: 4560518 - DNA, 25 bp, Homo sapien
aagggcaggattccccggccatgtt

SEQ ID NO: 4560519 - DNA, 25 bp, Homo sapien
tctccaaggtatccatgtgtgccca

SEQ ID NO: 4560520 - DNA, 25 bp, Homo sapien
gcttgaacctcagtgcagggcctgt

SEQ ID NO: 4560521 - DNA, 25 bp, Homo sapien
tggcgtggtcgggtgggtgacacaa

SEQ ID NO: 4560522 - DNA, 25 bp, Homo sapien
taccaacgatgtgtctggcgtggtc

SEQ ID NO: 4560523 - DNA, 25 bp, Homo sapien
taaggtagtccatgtttggaggctt

SEQ ID NO: 4560524 - DNA, 25 bp, Homo sapien
ttggaggcttataggagctaacatc

SEQ ID NO: 4560525 - DNA, 25 bp, Homo sapien
caatttcttaggtgtctgctccaca

SEQ ID NO: 4560526 - DNA, 25 bp, Homo sapien
tggcttccttacttgctcacctgct

SEQ ID NO: 4560527 - DNA, 25 bp, Homo sapien
gaaagacgttgagcttacatttggt

SEQ ID NO: 4560528 - DNA, 25 bp, Homo sapien
tgcctgaaatactcttggtctggct

SEQ ID NO: 4560529 - DNA, 25 bp, Homo sapien
aatgtcaggagtcttccctctcgag

SEQ ID NO: 4560530 - DNA, 25 bp, Homo sapien
tatgctgtccctttacgatggctga

SEQ ID NO: 4560531 - DNA, 25 bp, Homo sapien
cagaactggacgtgccaaaatgcct

SEQ ID NO: 4560532 - DNA, 25 bp, Homo sapien
gacccaacgtttagcataagcaagc

SEQ ID NO: 4560533 - DNA, 25 bp, Homo sapien
tgtagatcaaatcccactagaggaa

SEQ ID NO: 4560534 - DNA, 25 bp, Homo sapien
aaacgaccttttggctgttactgag

SEQ ID NO: 4560535 - DNA, 25 bp, Homo sapien
gctgggagtgacagatacatcaacc

SEQ ID NO: 4560536 - DNA, 25 bp, Homo sapien
tgtaggtcccaactgataaagcatt

SEQ ID NO: 4560537 - DNA, 25 bp, Homo sapien
gaggaggcggacaactggggtggca

SEQ ID NO: 4560538 - DNA, 25 bp, Homo sapien
ggaggcggacaactggggtggcatg

SEQ ID NO: 4560539 - DNA, 25 bp, Homo sapien
tgtgcccagccctcagaatcatttt

SEQ ID NO: 4560540 - DNA, 25 bp, Homo sapien
ttatattttgtaggaggaggcggac

SEQ ID NO: 4560541 - DNA, 25 bp, Homo sapien
tgtcccaaggccagtagaagtttcc

SEQ ID NO: 4560542 - DNA, 25 bp, Homo sapien
cggtctagtgaagctttaggttcca

SEQ ID NO: 4560543 - DNA, 25 bp, Homo sapien
tcacttagtaattgcaacggtctag

SEQ ID NO: 4560544 - DNA, 25 bp, Homo sapien
ttctgcaagctgacttacccagtgg

SEQ ID NO: 4560545 - DNA, 25 bp, Homo sapien
caagggtgagcgtcctctgtagaca

SEQ ID NO: 4560546 - DNA, 25 bp, Homo sapien
tatgagactcactttaagcattggt

SEQ ID NO: 4560547 - DNA, 25 bp, Homo sapien
tctttgtgctctggtaagtagaagc

SEQ ID NO: 4560548 - DNA, 25 bp, Homo sapien
gttacactttccaggtggtgccaag

SEQ ID NO: 4560549 - DNA, 25 bp, Homo sapien
tactgcttgatttatagggagacac

SEQ ID NO: 4560550 - DNA, 25 bp, Homo sapien
gatggttctgttgggctagcaagcc

SEQ ID NO: 4560551 - DNA, 25 bp, Homo sapien
tagcaagccctcagtcatcagaaga

SEQ ID NO: 4560552 - DNA, 25 bp, Homo sapien
gagaagaactgcatggtccctgtca

SEQ ID NO: 4560553 - DNA, 25 bp, Homo sapien
tagaagtgagatgaaaacaatgctc

SEQ ID NO: 4560554 - DNA, 25 bp, Homo sapien
aaaggtgaggcaggtactaatctac

SEQ ID NO: 4560555 - DNA, 25 bp, Homo sapien
tcaaggcctcttctgtagaccccat

SEQ ID NO: 4560556 - DNA, 25 bp, Homo sapien
ggactcctcaatggttagacaaatg

SEQ ID NO: 4560557 - DNA, 25 bp, Homo sapien
tggctcagagcattgtcttcccgcg

SEQ ID NO: 4560558 - DNA, 25 bp, Homo sapien
tgcccgtgctagttaacccaggtgg

SEQ ID NO: 4560559 - DNA, 25 bp, Homo sapien
tgtccttgaagcagagagaccactc

SEQ ID NO: 4560560 - DNA, 25 bp, Homo sapien
gaactgtccccagtatgctgcccgt

SEQ ID NO: 4560561 - DNA, 25 bp, Homo sapien
tacagtggaagtgatgccatgccca

SEQ ID NO: 4560562 - DNA, 25 bp, Homo sapien
cagaacagaagaattgcccggccta

SEQ ID NO: 4560563 - DNA, 25 bp, Homo sapien
tagtttggaccatagcaagccctgt

SEQ ID NO: 4560564 - DNA, 25 bp, Homo sapien
aacatggagtgtgcagttgaacccc

SEQ ID NO: 4560565 - DNA, 25 bp, Homo sapien
tagacttggaagacgactgagaact

SEQ ID NO: 4560566 - DNA, 25 bp, Homo sapien
gaaatggtttggcacacctgctaag

SEQ ID NO: 4560567 - DNA, 25 bp, Homo sapien
tctccatctgaggtgggtctaacag

SEQ ID NO: 4560568 - DNA, 25 bp, Homo sapien
ttgaaatccctaccctttgcaagga

SEQ ID NO: 4560569 - DNA, 25 bp, Homo sapien
taataaatagaggatgacccctgtg

SEQ ID NO: 4560570 - DNA, 25 bp, Homo sapien
actgcagagtggaggcaagagccat

SEQ ID NO: 4560571 - DNA, 25 bp, Homo sapien
cacaggcctgagtggaaattcaaga

SEQ ID NO: 4560572 - DNA, 25 bp, Homo sapien
tacacagcgaaggagctaagtctca

SEQ ID NO: 4560573 - DNA, 25 bp, Homo sapien
tacttatggaggcaaagagcagcag

SEQ ID NO: 4560574 - DNA, 25 bp, Homo sapien
gacagggcagccaataggtaatcat

SEQ ID NO: 4560575 - DNA, 25 bp, Homo sapien
gagaccatggtagatattcccttga

SEQ ID NO: 4560576 - DNA, 25 bp, Homo sapien
ttcaggaagcggatatgagggcaca

SEQ ID NO: 4560577 - DNA, 25 bp, Homo sapien
catttagaatccaggcctagagaag

SEQ ID NO: 4560578 - DNA, 25 bp, Homo sapien
gaaaggaactctccatttacacgtg

SEQ ID NO: 4560579 - DNA, 25 bp, Homo sapien
gagtaacccaaagcttaccaggtga

SEQ ID NO: 4560580 - DNA, 25 bp, Homo sapien
aatggctcagccctaagaatgctgc

SEQ ID NO: 4560581 - DNA, 25 bp, Homo sapien
tctgccccggttctgtcaggaaaat

SEQ ID NO: 4560582 - DNA, 25 bp, Homo sapien
tagtgacatgttcctataccctagg

SEQ ID NO: 4560583 - DNA, 25 bp, Homo sapien
gataaagccctcaagagcgtctgta

SEQ ID NO: 4560584 - DNA, 25 bp, Homo sapien
caagtagggtcacctgtgctgagca

SEQ ID NO: 4560585 - DNA, 25 bp, Homo sapien
tcaagagggctatgcaaagtcacca

SEQ ID NO: 4560586 - DNA, 25 bp, Homo sapien
aaggctgccccgcttgtcaagaggg

SEQ ID NO: 4560587 - DNA, 25 bp, Homo sapien
gagaaaccttgctcccaggtgcaca

SEQ ID NO: 4560588 - DNA, 25 bp, Homo sapien
gggtcagctccaatgctcggaacgt

SEQ ID NO: 4560589 - DNA, 25 bp, Homo sapien
taccaagaattgaggcgattatgcc

SEQ ID NO: 4560590 - DNA, 25 bp, Homo sapien
tattcagactgcaaggacactggct

SEQ ID NO: 4560591 - DNA, 25 bp, Homo sapien
ccagcggtgagcataacagagttac

SEQ ID NO: 4560592 - DNA, 25 bp, Homo sapien
ggacagctccgcctgactagagaaa

SEQ ID NO: 4560593 - DNA, 25 bp, Homo sapien
gaaagggcacaacaggcatattaga

SEQ ID NO: 4560594 - DNA, 25 bp, Homo sapien
aaggcaatgcctgttaaactctctg

SEQ ID NO: 4560595 - DNA, 25 bp, Homo sapien
gggctgcatctgtcgttctagctac

SEQ ID NO: 4560596 - DNA, 25 bp, Homo sapien
agtactttgggcgacccatgtggga

SEQ ID NO: 4560597 - DNA, 25 bp, Homo sapien
catgcttggtgttcaaccatgcagg

SEQ ID NO: 4560598 - DNA, 25 bp, Homo sapien
ctggatgcaggtagggctgtcaact

SEQ ID NO: 4560599 - DNA, 25 bp, Homo sapien
cttatagaacgtacagaagagccag

SEQ ID NO: 4560600 - DNA, 25 bp, Homo sapien
tgctaactgcatacgaaggagaagg

SEQ ID NO: 4560601 - DNA, 25 bp, Homo sapien
tggaactgtcagtaggccacccatt

SEQ ID NO: 4560602 - DNA, 25 bp, Homo sapien
caggctgggcactaagatatgacag

SEQ ID NO: 4560603 - DNA, 25 bp, Homo sapien
tatgcccatttgtatgtgaagccca

SEQ ID NO: 4560604 - DNA, 25 bp, Homo sapien
tggattaccacataccccagggaga

SEQ ID NO: 4560605 - DNA, 25 bp, Homo sapien
tactgagatgcgcacttagctgtca

SEQ ID NO: 4560606 - DNA, 25 bp, Homo sapien
ttttggatcaacacgtgctgcttag

SEQ ID NO: 4560607 - DNA, 25 bp, Homo sapien
ggcaagcgctcattcacagtctggt

SEQ ID NO: 4560608 - DNA, 25 bp, Homo sapien
tcctggttctgcaaaaggcgagaag

SEQ ID NO: 4560609 - DNA, 25 bp, Homo sapien
accacagctcctgcaaatgactcag

SEQ ID NO: 4560610 - DNA, 25 bp, Homo sapien
tgcaagctaccagcgatttggcggg

SEQ ID NO: 4560611 - DNA, 25 bp, Homo sapien
cagtaggtggttccgacttctctga

SEQ ID NO: 4560612 - DNA, 25 bp, Homo sapien
ttctctgagtcagaaccaagcccat

SEQ ID NO: 4560613 - DNA, 25 bp, Homo sapien
tcgcaggcatttgtgtggatgactt

SEQ ID NO: 4560614 - DNA, 25 bp, Homo sapien
aatcgcaggcatttgtgtggatgac

SEQ ID NO: 4560615 - DNA, 25 bp, Homo sapien
tgaatcgcaggcatttgtgtggatg

SEQ ID NO: 4560616 - DNA, 25 bp, Homo sapien
cgcaggcatttgtgtggatgacttc

SEQ ID NO: 4560617 - DNA, 25 bp, Homo sapien
aactttaggaccagtgtaggcactc

SEQ ID NO: 4560618 - DNA, 25 bp, Homo sapien
aaccgaggcatacagctggcaagtg

SEQ ID NO: 4560619 - DNA, 25 bp, Homo sapien
gaaactttcatggagctcagtgaga

SEQ ID NO: 4560620 - DNA, 25 bp, Homo sapien
gaattcttctagatagcactgagct

SEQ ID NO: 4560621 - DNA, 25 bp, Homo sapien
cctgacctccactttggccttagtg

SEQ ID NO: 4560622 - DNA, 25 bp, Homo sapien
gctccctcggagacttcttgtcatt

SEQ ID NO: 4560623 - DNA, 25 bp, Homo sapien
ttccctcggcatcgcagctcctgac

SEQ ID NO: 4560624 - DNA, 25 bp, Homo sapien
tctctcagacctcttccctcggcat

SEQ ID NO: 4560625 - DNA, 25 bp, Homo sapien
ctcagccagctatttcgcaaaagtg

SEQ ID NO: 4560626 - DNA, 25 bp, Homo sapien
cgcaaaagtgagtaatgggtcggct

SEQ ID NO: 4560627 - DNA, 25 bp, Homo sapien
ggatgacatctttaacctcagccag

SEQ ID NO: 4560628 - DNA, 25 bp, Homo sapien
tcttgtagtcactcttctgaggcac

SEQ ID NO: 4560629 - DNA, 25 bp, Homo sapien
tggccacctgtgggcatctataggg

SEQ ID NO: 4560630 - DNA, 25 bp, Homo sapien
acagacaacaacaccacccctatgg

SEQ ID NO: 4560631 - DNA, 25 bp, Homo sapien
ggcatcagaagtggcattagtgcta

SEQ ID NO: 4560632 - DNA, 25 bp, Homo sapien
gatttccttggatgtcatggctaag

SEQ ID NO: 4560633 - DNA, 25 bp, Homo sapien
tcgtagcctcgtctgaactctgagc

SEQ ID NO: 4560634 - DNA, 25 bp, Homo sapien
agccctggacccgagcagcagagca

SEQ ID NO: 4560635 - DNA, 25 bp, Homo sapien
cacttctgctccaattgtcgtagcc

SEQ ID NO: 4560636 - DNA, 25 bp, Homo sapien
ccaattgtcgtagcctcgtctgaac

SEQ ID NO: 4560637 - DNA, 25 bp, Homo sapien
gatacagagcatgaattgagagaaa

SEQ ID NO: 4560638 - DNA, 25 bp, Homo sapien
gcaggatacagagcatgaattgaga

SEQ ID NO: 4560639 - DNA, 25 bp, Homo sapien
caggatacagagcatgaattgagag

SEQ ID NO: 4560640 - DNA, 25 bp, Homo sapien
ctgcaggatacagagcatgaattga

SEQ ID NO: 4560641 - DNA, 25 bp, Homo sapien
tgctgcatttgccacagatcccata

SEQ ID NO: 4560642 - DNA, 25 bp, Homo sapien
acagatcccatagtgtggtgttaga

SEQ ID NO: 4560643 - DNA, 25 bp, Homo sapien
cactcccacatatctttagcattac

SEQ ID NO: 4560644 - DNA, 25 bp, Homo sapien
cccatagtgtggtgttagaaatggt

SEQ ID NO: 4560645 - DNA, 25 bp, Homo sapien
ctttatctgcacttggtttataagt

SEQ ID NO: 4560646 - DNA, 25 bp, Homo sapien
cacttggtttataagtgaaatcaac

SEQ ID NO: 4560647 - DNA, 25 bp, Homo sapien
tatctgcacttggtttataagtgaa

SEQ ID NO: 4560648 - DNA, 25 bp, Homo sapien
ctgcacttggtttataagtgaaatc

SEQ ID NO: 4560649 - DNA, 25 bp, Homo sapien
ttcataccatctgttatgtgtcacc

SEQ ID NO: 4560650 - DNA, 25 bp, Homo sapien
taccatctgttatgtgtcaccaacg

SEQ ID NO: 4560651 - DNA, 25 bp, Homo sapien
cataccatctgttatgtgtcaccaa

SEQ ID NO: 4560652 - DNA, 25 bp, Homo sapien
ataccatctgttatgtgtcaccaac

SEQ ID NO: 4560653 - DNA, 25 bp, Homo sapien
agcctttgcgtgcatggagcatcaa

SEQ ID NO: 4560654 - DNA, 25 bp, Homo sapien
ctgagcctttgcgtgcatggagcat

SEQ ID NO: 4560655 - DNA, 25 bp, Homo sapien
gcctttgcgtgcatggagcatcaaa

SEQ ID NO: 4560656 - DNA, 25 bp, Homo sapien
gagcctttgcgtgcatggagcatca

SEQ ID NO: 4560657 - DNA, 25 bp, Homo sapien
agaactgcgatttaagccaaagcca

SEQ ID NO: 4560658 - DNA, 25 bp, Homo sapien
ccaaatgacttctacgggcctccaa

SEQ ID NO: 4560659 - DNA, 25 bp, Homo sapien
caagagaccgacaccattgttatca

SEQ ID NO: 4560660 - DNA, 25 bp, Homo sapien
caaaggctggcttcacttgatcgcc

SEQ ID NO: 4560661 - DNA, 25 bp, Homo sapien
gccgttccatttgctacacttcccc

SEQ ID NO: 4560662 - DNA, 25 bp, Homo sapien
tggccgttccatttgctacacttcc

SEQ ID NO: 4560663 - DNA, 25 bp, Homo sapien
ctggccgttccatttgctacacttc

SEQ ID NO: 4560664 - DNA, 25 bp, Homo sapien
ctacacttccccacataacatttct

SEQ ID NO: 4560665 - DNA, 25 bp, Homo sapien
gggaccaaataaagcataactccta

SEQ ID NO: 4560666 - DNA, 25 bp, Homo sapien
tcctatatctgctacaatgccctgc

SEQ ID NO: 4560667 - DNA, 25 bp, Homo sapien
ggactgttagtcacctgaagctggg

SEQ ID NO: 4560668 - DNA, 25 bp, Homo sapien
tgtgcatggattctgattggactgt

SEQ ID NO: 4560669 - DNA, 25 bp, Homo sapien
tccccaggagccaagggttgtaaca

SEQ ID NO: 4560670 - DNA, 25 bp, Homo sapien
ttcactgaaaatcatggtccccagg

SEQ ID NO: 4560671 - DNA, 25 bp, Homo sapien
cttagagttctagtcgaggctggac

SEQ ID NO: 4560672 - DNA, 25 bp, Homo sapien
tgaaagggctgacaatcaaactggg

SEQ ID NO: 4560673 - DNA, 25 bp, Homo sapien
gaaacagtttatcaggcctcccttg

SEQ ID NO: 4560674 - DNA, 25 bp, Homo sapien
tcctcgtgattagatgcagctgtac

SEQ ID NO: 4560675 - DNA, 25 bp, Homo sapien
tcttactgtaccctatgaagtggcc

SEQ ID NO: 4560676 - DNA, 25 bp, Homo sapien
tagttcaggatcacaagctgccttt

SEQ ID NO: 4560677 - DNA, 25 bp, Homo sapien
atcatgccatgtgttagaggaaact

SEQ ID NO: 4560678 - DNA, 25 bp, Homo sapien
tctggactcccctaacactgcattt

SEQ ID NO: 4560679 - DNA, 25 bp, Homo sapien
tggacacttttacagaagccgccct

SEQ ID NO: 4560680 - DNA, 25 bp, Homo sapien
gaaactcagctttggcttggacact

SEQ ID NO: 4560681 - DNA, 25 bp, Homo sapien
tcagttcacaggcagaacttgctca

SEQ ID NO: 4560682 - DNA, 25 bp, Homo sapien
cagttcacaggcagaacttgctcac

SEQ ID NO: 4560683 - DNA, 25 bp, Homo sapien
ccagagagagggtgtggagctcctg

SEQ ID NO: 4560684 - DNA, 25 bp, Homo sapien
tgtggagctcctgacactggccctc

SEQ ID NO: 4560685 - DNA, 25 bp, Homo sapien
agggtgtggagctcctgacactggc

SEQ ID NO: 4560686 - DNA, 25 bp, Homo sapien
gccagagagagggtgtggagctcct

SEQ ID NO: 4560687 - DNA, 25 bp, Homo sapien
tggttcccaagctgcattccctgaa

SEQ ID NO: 4560688 - DNA, 25 bp, Homo sapien
gaaacctgaagcttccttggccctc

SEQ ID NO: 4560689 - DNA, 25 bp, Homo sapien
gttcccaagctgcattccctgaaac

SEQ ID NO: 4560690 - DNA, 25 bp, Homo sapien
ccctgaaacctgaagcttccttggc

SEQ ID NO: 4560691 - DNA, 25 bp, Homo sapien
tctggactcgccaattaggcccagc

SEQ ID NO: 4560692 - DNA, 25 bp, Homo sapien
aacggctggtggctcgatcaggctc

SEQ ID NO: 4560693 - DNA, 25 bp, Homo sapien
tgggtcggagacatgaatgctgcct

SEQ ID NO: 4560694 - DNA, 25 bp, Homo sapien
cactcccttctgtaaccgtgggtcg

SEQ ID NO: 4560695 - DNA, 25 bp, Homo sapien
gccagtttgatcagaccacgtggat

SEQ ID NO: 4560696 - DNA, 25 bp, Homo sapien
gcggcgacatttcaattctgccagt

SEQ ID NO: 4560697 - DNA, 25 bp, Homo sapien
catcagcggcgacatttcaattctg

SEQ ID NO: 4560698 - DNA, 25 bp, Homo sapien
gatcagaccacgtggattttctctc

SEQ ID NO: 4560699 - DNA, 25 bp, Homo sapien
acctgcagcagcaacagcagcagcc

SEQ ID NO: 4560700 - DNA, 25 bp, Homo sapien
ccaccacctgcagcagcaacagcag

SEQ ID NO: 4560701 - DNA, 25 bp, Homo sapien
ctgcagcagcaacagcagcagccat

SEQ ID NO: 4560702 - DNA, 25 bp, Homo sapien
ccacctgcagcagcaacagcagcag

SEQ ID NO: 4560703 - DNA, 25 bp, Homo sapien
tctctgagacgctctttatgggtgt

SEQ ID NO: 4560704 - DNA, 25 bp, Homo sapien
taggtcaggtgtcatagtgacaaac

SEQ ID NO: 4560705 - DNA, 25 bp, Homo sapien
cactatttggtgaggtattgctctc

SEQ ID NO: 4560706 - DNA, 25 bp, Homo sapien
ggcttaatgtcctccggtctcctag

SEQ ID NO: 4560707 - DNA, 25 bp, Homo sapien
tgtttagaccgtgctcccttgggag

SEQ ID NO: 4560708 - DNA, 25 bp, Homo sapien
taaatcatccactcctagccaaggg

SEQ ID NO: 4560709 - DNA, 25 bp, Homo sapien
tatagaccttgaagaagactggcgg

SEQ ID NO: 4560710 - DNA, 25 bp, Homo sapien
tattttcataaaggcgaggcacctc

SEQ ID NO: 4560711 - DNA, 25 bp, Homo sapien
gactagagtggtttgagcaggattt

SEQ ID NO: 4560712 - DNA, 25 bp, Homo sapien
acagagagattactagggactagag

SEQ ID NO: 4560713 - DNA, 25 bp, Homo sapien
tgggaaatgaaaggtttgggctaca

SEQ ID NO: 4560714 - DNA, 25 bp, Homo sapien
gaaagcgtaaattaaatgtcgtctc

SEQ ID NO: 4560715 - DNA, 25 bp, Homo sapien
tccacagtatttgaaggctgtggga

SEQ ID NO: 4560716 - DNA, 25 bp, Homo sapien
caacggatccgaatcaagttactta

SEQ ID NO: 4560717 - DNA, 25 bp, Homo sapien
ggaaccacaacggatccgaatcaag

SEQ ID NO: 4560718 - DNA, 25 bp, Homo sapien
aaggctgtgggaaccacaacggatc

SEQ ID NO: 4560719 - DNA, 25 bp, Homo sapien
cacaaggttatcagggacagggtga

SEQ ID NO: 4560720 - DNA, 25 bp, Homo sapien
ccggctaggtgagaagctggtaact

SEQ ID NO: 4560721 - DNA, 25 bp, Homo sapien
catgggagctttagacatgggctca

SEQ ID NO: 4560722 - DNA, 25 bp, Homo sapien
tttctttcaagttcacagtgcccag

SEQ ID NO: 4560723 - DNA, 25 bp, Homo sapien
gagcttcccgagtgttctcaaatga

SEQ ID NO: 4560724 - DNA, 25 bp, Homo sapien
tgtccccagacgtttgagcacagat

SEQ ID NO: 4560725 - DNA, 25 bp, Homo sapien
tggttgttagcactccgggtacaga

SEQ ID NO: 4560726 - DNA, 25 bp, Homo sapien
cacattctgataggcgtgaccttgg

SEQ ID NO: 4560727 - DNA, 25 bp, Homo sapien
gtgaagggacatcaggatcacaggt

SEQ ID NO: 4560728 - DNA, 25 bp, Homo sapien
tgaacatcccataatcgaaacggat

SEQ ID NO: 4560729 - DNA, 25 bp, Homo sapien
aatgacacactggtgagtgaaggga

SEQ ID NO: 4560730 - DNA, 25 bp, Homo sapien
aaccaagactgggaatgatatcaga

SEQ ID NO: 4560731 - DNA, 25 bp, Homo sapien
cttattattgggcaaatgtctaacc

SEQ ID NO: 4560732 - DNA, 25 bp, Homo sapien
tattgggcaaatgtctaacccactg

SEQ ID NO: 4560733 - DNA, 25 bp, Homo sapien
ggcaaatgtctaacccactggtttc

SEQ ID NO: 4560734 - DNA, 25 bp, Homo sapien
tgggcaaatgtctaacccactggtt

SEQ ID NO: 4560735 - DNA, 25 bp, Homo sapien
tgtgataaacacaatagttaccaat

SEQ ID NO: 4560736 - DNA, 25 bp, Homo sapien
cactgtgataaacacaatagttacc

SEQ ID NO: 4560737 - DNA, 25 bp, Homo sapien
gataaacacaatagttaccaatcca

SEQ ID NO: 4560738 - DNA, 25 bp, Homo sapien
caccactgtgataaacacaatagtt

SEQ ID NO: 4560739 - DNA, 25 bp, Homo sapien
tatgaaccaataaagctacctctga

SEQ ID NO: 4560740 - DNA, 25 bp, Homo sapien
gcaaggtaggaaggcaaaaaccaca

SEQ ID NO: 4560741 - DNA, 25 bp, Homo sapien
tgttgaagctgcagcatatgaacca

SEQ ID NO: 4560742 - DNA, 25 bp, Homo sapien
ctcccaagggatgcagcgtcagtgt

SEQ ID NO: 4560743 - DNA, 25 bp, Homo sapien
cacacacaatggctagagaccaaac

SEQ ID NO: 4560744 - DNA, 25 bp, Homo sapien
gctgggagatgccaacttttgaaat

SEQ ID NO: 4560745 - DNA, 25 bp, Homo sapien
aatgcaggcccactcaaggattcca

SEQ ID NO: 4560746 - DNA, 25 bp, Homo sapien
gactgaagagactatgtaatctgct

SEQ ID NO: 4560747 - DNA, 25 bp, Homo sapien
tgtgccctgggaaaggtcacttgac

SEQ ID NO: 4560748 - DNA, 25 bp, Homo sapien
ggaaatgaccttgctctaatgaaac

SEQ ID NO: 4560749 - DNA, 25 bp, Homo sapien
actcgttggaactcagaaggtgtca

SEQ ID NO: 4560750 - DNA, 25 bp, Homo sapien
tgtccagggctatgaacaccattgg

SEQ ID NO: 4560751 - DNA, 25 bp, Homo sapien
cagccacttaccacctctgatagga

SEQ ID NO: 4560752 - DNA, 25 bp, Homo sapien
gaaaaattgcaggaacaggcatact

SEQ ID NO: 4560753 - DNA, 25 bp, Homo sapien
gataaacatcctatcagagtctcgg

SEQ ID NO: 4560754 - DNA, 25 bp, Homo sapien
tctgaccaagggcaactccaaggat

SEQ ID NO: 4560755 - DNA, 25 bp, Homo sapien
tttccagagagcttgcgctctgttt

SEQ ID NO: 4560756 - DNA, 25 bp, Homo sapien
tccagagagcttgcgctctgttttc

SEQ ID NO: 4560757 - DNA, 25 bp, Homo sapien
agtaatgaggcactcatttccagag

SEQ ID NO: 4560758 - DNA, 25 bp, Homo sapien
tcaagcttcactagtaatgaggcac

SEQ ID NO: 4560759 - DNA, 25 bp, Homo sapien
tacacagctttgagagttactgttg

SEQ ID NO: 4560760 - DNA, 25 bp, Homo sapien
taaatcactaactgtgaacatttga

SEQ ID NO: 4560761 - DNA, 25 bp, Homo sapien
cagctctgtaatgaagtactcttgg

SEQ ID NO: 4560762 - DNA, 25 bp, Homo sapien
ctcttggtcaagtagatacagcagg

SEQ ID NO: 4560763 - DNA, 25 bp, Homo sapien
tgccatgcacaggtaccggatgcct

SEQ ID NO: 4560764 - DNA, 25 bp, Homo sapien
catttacagcaagcaccggatctct

SEQ ID NO: 4560765 - DNA, 25 bp, Homo sapien
cagaagacaaggaaagccctggcgg

SEQ ID NO: 4560766 - DNA, 25 bp, Homo sapien
tgctaacacagacgaagccaaaggg

SEQ ID NO: 4560767 - DNA, 25 bp, Homo sapien
tcatgatatcggagagatgactgca

SEQ ID NO: 4560768 - DNA, 25 bp, Homo sapien
tacgtggaatatggataaaccaggg

SEQ ID NO: 4560769 - DNA, 25 bp, Homo sapien
caagacgaccggagggcttgagtca

SEQ ID NO: 4560770 - DNA, 25 bp, Homo sapien
cagtcttaggttgcattaattgaag

SEQ ID NO: 4560771 - DNA, 25 bp, Homo sapien
cataaaaagcattgcagcatgcctg

SEQ ID NO: 4560772 - DNA, 25 bp, Homo sapien
tcctatgtgatactttgttagcccc

SEQ ID NO: 4560773 - DNA, 25 bp, Homo sapien
tcctccaaaagaatgctcctatgtg

SEQ ID NO: 4560774 - DNA, 25 bp, Homo sapien
gaaaaatgatgacgtgccacaaagc

SEQ ID NO: 4560775 - DNA, 25 bp, Homo sapien
catctgtacttatccatgggtaccg

SEQ ID NO: 4560776 - DNA, 25 bp, Homo sapien
tctcacatctgtacttatccatggg

SEQ ID NO: 4560777 - DNA, 25 bp, Homo sapien
tcacatctgtacttatccatgggta

SEQ ID NO: 4560778 - DNA, 25 bp, Homo sapien
ctgtacttatccatgggtaccgtac

SEQ ID NO: 4560779 - DNA, 25 bp, Homo sapien
ttcacctccaaagtacagcatgctc

SEQ ID NO: 4560780 - DNA, 25 bp, Homo sapien
tctgatttctgctccgacaccaact

SEQ ID NO: 4560781 - DNA, 25 bp, Homo sapien
cacctctccaatggctggtcactga

SEQ ID NO: 4560782 - DNA, 25 bp, Homo sapien
ggttcctgatgtcggcctgaccacc

SEQ ID NO: 4560783 - DNA, 25 bp, Homo sapien
tctagcaatcgtacaagtgaggaca

SEQ ID NO: 4560784 - DNA, 25 bp, Homo sapien
ttgtacaaggtcagggatccgggcc

SEQ ID NO: 4560785 - DNA, 25 bp, Homo sapien
cgatgtttcagcctctatagtggga

SEQ ID NO: 4560786 - DNA, 25 bp, Homo sapien
cataaatgggtcacatggctacagg

SEQ ID NO: 4560787 - DNA, 25 bp, Homo sapien
tacttacccacacaacgttaggaga

SEQ ID NO: 4560788 - DNA, 25 bp, Homo sapien
gaactaagcggcagcaaaatgtact

SEQ ID NO: 4560789 - DNA, 25 bp, Homo sapien
tctgctcattttggagggccccggc

SEQ ID NO: 4560790 - DNA, 25 bp, Homo sapien
cacgtggagaccttcaagcttctag

SEQ ID NO: 4560791 - DNA, 25 bp, Homo sapien
gaaaagaggatacagcgaaaaatct

SEQ ID NO: 4560792 - DNA, 25 bp, Homo sapien
taacccataggcattcattaattct

SEQ ID NO: 4560793 - DNA, 25 bp, Homo sapien
tcaagagacagtctatgcctttcag

SEQ ID NO: 4560794 - DNA, 25 bp, Homo sapien
taaatgctaagagggaatggtatgt

SEQ ID NO: 4560795 - DNA, 25 bp, Homo sapien
gcaagatgccaaagacacagcactg

SEQ ID NO: 4560796 - DNA, 25 bp, Homo sapien
tacactgtggtagcggaagattcta

SEQ ID NO: 4560797 - DNA, 25 bp, Homo sapien
cttgctatagcaggttatggtctcc

SEQ ID NO: 4560798 - DNA, 25 bp, Homo sapien
gccgttatcagccaatcagtcatta

SEQ ID NO: 4560799 - DNA, 25 bp, Homo sapien
tccttggtaaaacagatggttggga

SEQ ID NO: 4560800 - DNA, 25 bp, Homo sapien
tggtaaaacagatggttgggaggcc

SEQ ID NO: 4560801 - DNA, 25 bp, Homo sapien
ccttggtaaaacagatggttgggag

SEQ ID NO: 4560802 - DNA, 25 bp, Homo sapien
ggtcatgagttcgaggcaggcagat

SEQ ID NO: 4560803 - DNA, 25 bp, Homo sapien
taggtgttgttgaccccacagaaac

SEQ ID NO: 4560804 - DNA, 25 bp, Homo sapien
cctgaacgtgtcacagtacctggca

SEQ ID NO: 4560805 - DNA, 25 bp, Homo sapien
gtagaccgtacaccctatgaggaca

SEQ ID NO: 4560806 - DNA, 25 bp, Homo sapien
tgatgtgtacactaggtagaccgta

SEQ ID NO: 4560807 - DNA, 25 bp, Homo sapien
gaagcttaacttatctcactggtag

SEQ ID NO: 4560808 - DNA, 25 bp, Homo sapien
tcatgcagatgacagaggtaaccct

SEQ ID NO: 4560809 - DNA, 25 bp, Homo sapien
gcctcatgccagtgacgtcacagaa

SEQ ID NO: 4560810 - DNA, 25 bp, Homo sapien
tcgagcatccattgacaaccaggcg

SEQ ID NO: 4560811 - DNA, 25 bp, Homo sapien
tgtaacctgggtgttcaaaactgta

SEQ ID NO: 4560812 - DNA, 25 bp, Homo sapien
aacgttaaaactccccagaatgcag

SEQ ID NO: 4560813 - DNA, 25 bp, Homo sapien
tgcggacccattttccacgacagaa

SEQ ID NO: 4560814 - DNA, 25 bp, Homo sapien
aagacacttcttcctattgtggcaa

SEQ ID NO: 4560815 - DNA, 25 bp, Homo sapien
tcaagagtcacacggcagagaggac

SEQ ID NO: 4560816 - DNA, 25 bp, Homo sapien
gaaacgagacctgaacactgtgtcc

SEQ ID NO: 4560817 - DNA, 25 bp, Homo sapien
cattagcggctcagcaagaccatgg

SEQ ID NO: 4560818 - DNA, 25 bp, Homo sapien
tgagtacccactttatcccaggaaa

SEQ ID NO: 4560819 - DNA, 25 bp, Homo sapien
tttacggctcttcaagtgccggcca

SEQ ID NO: 4560820 - DNA, 25 bp, Homo sapien
gagtcaagacttacttttggcctca

SEQ ID NO: 4560821 - DNA, 25 bp, Homo sapien
ggttttccgctatgcctttgtactg

SEQ ID NO: 4560822 - DNA, 25 bp, Homo sapien
gggacaaagactatccacgaatcct

SEQ ID NO: 4560823 - DNA, 25 bp, Homo sapien
gcttgctttcttgtgcagcctggaa

SEQ ID NO: 4560824 - DNA, 25 bp, Homo sapien
tctgcagcacgaattaccaaggaac

SEQ ID NO: 4560825 - DNA, 25 bp, Homo sapien
gaaatgctatcgtctgcagtcagaa

SEQ ID NO: 4560826 - DNA, 25 bp, Homo sapien
ggaagtcttatgcacacagcacctg

SEQ ID NO: 4560827 - DNA, 25 bp, Homo sapien
tactgtttgcatacagctgtcagct

SEQ ID NO: 4560828 - DNA, 25 bp, Homo sapien
gagctactcaatcacttggtcctga

SEQ ID NO: 4560829 - DNA, 25 bp, Homo sapien
aaccagacctgatcggagctactca

SEQ ID NO: 4560830 - DNA, 25 bp, Homo sapien
tgtccctgtaacaaccaatgctgtg

SEQ ID NO: 4560831 - DNA, 25 bp, Homo sapien
ctcaaggaaaaggagttagggacag

SEQ ID NO: 4560832 - DNA, 25 bp, Homo sapien
aaaggtgccacttgaccatcctaag

SEQ ID NO: 4560833 - DNA, 25 bp, Homo sapien
tggcttcactaagggaccgaggcca

SEQ ID NO: 4560834 - DNA, 25 bp, Homo sapien
cagttcctggagtaagcatggcttc

SEQ ID NO: 4560835 - DNA, 25 bp, Homo sapien
tctggttaagtacaaggtgctaaag

SEQ ID NO: 4560836 - DNA, 25 bp, Homo sapien
ttatgaaagccaaagataccagatg

SEQ ID NO: 4560837 - DNA, 25 bp, Homo sapien
aaacccaggattattcagaagtacg

SEQ ID NO: 4560838 - DNA, 25 bp, Homo sapien
tattcacagtgcctctcaaacagaa

SEQ ID NO: 4560839 - DNA, 25 bp, Homo sapien
tccagccattggatcaaccatgatg

SEQ ID NO: 4560840 - DNA, 25 bp, Homo sapien
gacatgtcatagtgaaagtaacaac

SEQ ID NO: 4560841 - DNA, 25 bp, Homo sapien
aacatttgacttttatgccccacac

SEQ ID NO: 4560842 - DNA, 25 bp, Homo sapien
tcacacgtgatctttctgccagcat

SEQ ID NO: 4560843 - DNA, 25 bp, Homo sapien
ggagtcagctcataacactgacatg

SEQ ID NO: 4560844 - DNA, 25 bp, Homo sapien
cctgtgggactaaggattttgcgag

SEQ ID NO: 4560845 - DNA, 25 bp, Homo sapien
gaggagataagaacccgcaaggtgt

SEQ ID NO: 4560846 - DNA, 25 bp, Homo sapien
tcgccccttacaggcttgagtagtt

SEQ ID NO: 4560847 - DNA, 25 bp, Homo sapien
gaaatatagatcagaaaggcagggt

SEQ ID NO: 4560848 - DNA, 25 bp, Homo sapien
gcaaggaacttagcccaagtaggag

SEQ ID NO: 4560849 - DNA, 25 bp, Homo sapien
tgtatcataacgtggcagtgctgct

SEQ ID NO: 4560850 - DNA, 25 bp, Homo sapien
gacaacgtctctatgttatcggcct

SEQ ID NO: 4560851 - DNA, 25 bp, Homo sapien
caagtaggaggtattaaggccctgg

SEQ ID NO: 4560852 - DNA, 25 bp, Homo sapien
tatctgaacccttcacggcgtggag

SEQ ID NO: 4560853 - DNA, 25 bp, Homo sapien
tgagatcccaccacataaagaaaag

SEQ ID NO: 4560854 - DNA, 25 bp, Homo sapien
tgtgaagcccacaaatcaggacacg

SEQ ID NO: 4560855 - DNA, 25 bp, Homo sapien
gacccggcgtattcaccagtgtgct

SEQ ID NO: 4560856 - DNA, 25 bp, Homo sapien
ggtaaaacatgagccagcattgcag

SEQ ID NO: 4560857 - DNA, 25 bp, Homo sapien
tggcctagctactgaaactgggaaa

SEQ ID NO: 4560858 - DNA, 25 bp, Homo sapien
gaatagagagcacgtttggcctagc

SEQ ID NO: 4560859 - DNA, 25 bp, Homo sapien
cattccagagtcaacctcgagggca

SEQ ID NO: 4560860 - DNA, 25 bp, Homo sapien
caaaaggtttagtgacctgcccagg

SEQ ID NO: 4560861 - DNA, 25 bp, Homo sapien
cagggccatctaactagtaggtgtt

SEQ ID NO: 4560862 - DNA, 25 bp, Homo sapien
gcttctacctggagatgcattccaa

SEQ ID NO: 4560863 - DNA, 25 bp, Homo sapien
taatctaacggactcctctgctgaa

SEQ ID NO: 4560864 - DNA, 25 bp, Homo sapien
tggcattgatgagcccataagtaca

SEQ ID NO: 4560865 - DNA, 25 bp, Homo sapien
taagcctacaaggacaatagtgagt

SEQ ID NO: 4560866 - DNA, 25 bp, Homo sapien
tgtcccaagaactacacccatatga

SEQ ID NO: 4560867 - DNA, 25 bp, Homo sapien
ccagagtgatggaggtaaaactatt

SEQ ID NO: 4560868 - DNA, 25 bp, Homo sapien
ggcatggcccataataaaagtgttg

SEQ ID NO: 4560869 - DNA, 25 bp, Homo sapien
tgaagtacaactggccaagggccgg

SEQ ID NO: 4560870 - DNA, 25 bp, Homo sapien
gagtaaagcccatgtacagtgctca

SEQ ID NO: 4560871 - DNA, 25 bp, Homo sapien
tctgtgctgtaaacggctcctctga

SEQ ID NO: 4560872 - DNA, 25 bp, Homo sapien
gcgtccctctcaaaaaggtgtggaa

SEQ ID NO: 4560873 - DNA, 25 bp, Homo sapien
caagggctgcgcctgactgttcact

SEQ ID NO: 4560874 - DNA, 25 bp, Homo sapien
gatgttccgttgtcccgaggctgac

SEQ ID NO: 4560875 - DNA, 25 bp, Homo sapien
caaatgggtcacactggcttcacta

SEQ ID NO: 4560876 - DNA, 25 bp, Homo sapien
aggaagttcacagcagggtcaccag

SEQ ID NO: 4560877 - DNA, 25 bp, Homo sapien
gacatcagtcccaagtcgtcactct

SEQ ID NO: 4560878 - DNA, 25 bp, Homo sapien
ggtcaccaggcttttaaacagagag

SEQ ID NO: 4560879 - DNA, 25 bp, Homo sapien
tgttgctaagctcagccaaggatgc

SEQ ID NO: 4560880 - DNA, 25 bp, Homo sapien
tgttataacagactcgtgggcccgc

SEQ ID NO: 4560881 - DNA, 25 bp, Homo sapien
gaactcagagtaatgtcactaggcc

SEQ ID NO: 4560882 - DNA, 25 bp, Homo sapien
tgccaacagttgctacccctgggag

SEQ ID NO: 4560883 - DNA, 25 bp, Homo sapien
tatctggcctggtgcgaaagagcaa

SEQ ID NO: 4560884 - DNA, 25 bp, Homo sapien
tatggcacttctattgtacaacagc

SEQ ID NO: 4560885 - DNA, 25 bp, Homo sapien
cctacaaaaagcatatgggcagggt

SEQ ID NO: 4560886 - DNA, 25 bp, Homo sapien
gcctggaatctcaatgcttttgtag

SEQ ID NO: 4560887 - DNA, 25 bp, Homo sapien
aaactatggcccactgcctattttt

SEQ ID NO: 4560888 - DNA, 25 bp, Homo sapien
gcaataatggaaaagccagtcctct

SEQ ID NO: 4560889 - DNA, 25 bp, Homo sapien
ctttgaaacacttgatggtggcccc

SEQ ID NO: 4560890 - DNA, 25 bp, Homo sapien
tatgaaactcacttaaaggctggca

SEQ ID NO: 4560891 - DNA, 25 bp, Homo sapien
gtttccagaagccaacaccgtagtc

SEQ ID NO: 4560892 - DNA, 25 bp, Homo sapien
ctctctggtgcagcgctttgggaaa

SEQ ID NO: 4560893 - DNA, 25 bp, Homo sapien
gcttccagggatgagacaagagctg

SEQ ID NO: 4560894 - DNA, 25 bp, Homo sapien
tccccatgagagaggttataatccc

SEQ ID NO: 4560895 - DNA, 25 bp, Homo sapien
cacagtcagcaaaatgtaggctcct

SEQ ID NO: 4560896 - DNA, 25 bp, Homo sapien
gaaactatgtactcagaccaccctg

SEQ ID NO: 4560897 - DNA, 25 bp, Homo sapien
ggaatggttaatcacatccccggta

SEQ ID NO: 4560898 - DNA, 25 bp, Homo sapien
gttacaattaactagagcacggctt

SEQ ID NO: 4560899 - DNA, 25 bp, Homo sapien
cacctgtggctagagagctgggacc

SEQ ID NO: 4560900 - DNA, 25 bp, Homo sapien
cataagctggcaaggagattctcaa

SEQ ID NO: 4560901 - DNA, 25 bp, Homo sapien
ccttgatgaggtgagaccatacaga

SEQ ID NO: 4560902 - DNA, 25 bp, Homo sapien
gagaaagagtttaggcagcatctgc

SEQ ID NO: 4560903 - DNA, 25 bp, Homo sapien
ggtaggtctgctcttcctggtagca

SEQ ID NO: 4560904 - DNA, 25 bp, Homo sapien
tacctgagtaactgtgccagtgcag

SEQ ID NO: 4560905 - DNA, 25 bp, Homo sapien
tgcagatgggaataacgtaaactcc

SEQ ID NO: 4560906 - DNA, 25 bp, Homo sapien
aaagtgtgctccacgaactgctgcc

SEQ ID NO: 4560907 - DNA, 25 bp, Homo sapien
agcaaccctgtgtataagcctcctg

SEQ ID NO: 4560908 - DNA, 25 bp, Homo sapien
tgaaatttcagctttacccctcagc

SEQ ID NO: 4560909 - DNA, 25 bp, Homo sapien
tcagctagcaggcacttccaaactc

SEQ ID NO: 4560910 - DNA, 25 bp, Homo sapien
gttaggcctggtttctcatacagat

SEQ ID NO: 4560911 - DNA, 25 bp, Homo sapien
gcagtgagtgacaaacggctgaaat

SEQ ID NO: 4560912 - DNA, 25 bp, Homo sapien
gggatcaacaatgtgggcaccagaa

SEQ ID NO: 4560913 - DNA, 25 bp, Homo sapien
gctccagagggcttcctttaggagg

SEQ ID NO: 4560914 - DNA, 25 bp, Homo sapien
gggactcaagctgtctccaaaaagc

SEQ ID NO: 4560915 - DNA, 25 bp, Homo sapien
caaaagccatgatgtaatgaacaag

SEQ ID NO: 4560916 - DNA, 25 bp, Homo sapien
tagcgctaacttctcgtgtgatcag

SEQ ID NO: 4560917 - DNA, 25 bp, Homo sapien
tctggtttacgctcacttaagggag

SEQ ID NO: 4560918 - DNA, 25 bp, Homo sapien
tggtgtgctgtcaaaatacatcagc

SEQ ID NO: 4560919 - DNA, 25 bp, Homo sapien
gctcctaggtccctgctagcgctaa

SEQ ID NO: 4560920 - DNA, 25 bp, Homo sapien
tcggtttgacaccaaggtactgtgc

SEQ ID NO: 4560921 - DNA, 25 bp, Homo sapien
gaagaaacagccatgcaaacagata

SEQ ID NO: 4560922 - DNA, 25 bp, Homo sapien
cagatattcctacagtgtggtggga

SEQ ID NO: 4560923 - DNA, 25 bp, Homo sapien
gcttgggctcaagatacctgggttc

SEQ ID NO: 4560924 - DNA, 25 bp, Homo sapien
ctggggttacagacgtgggccacca

SEQ ID NO: 4560925 - DNA, 25 bp, Homo sapien
tcgagtctcgctttgtctcccagga

SEQ ID NO: 4560926 - DNA, 25 bp, Homo sapien
gatggagtgcagtggtgtgatctcg

SEQ ID NO: 4560927 - DNA, 25 bp, Homo sapien
gggttacagacgtgggccaccatgc

SEQ ID NO: 4560928 - DNA, 25 bp, Homo sapien
atcctcaaagcccttagcaatgtaa

SEQ ID NO: 4560929 - DNA, 25 bp, Homo sapien
aatcctcaaagcccttagcaatgta

SEQ ID NO: 4560930 - DNA, 25 bp, Homo sapien
gaaatcctcaaagcccttagcaatg

SEQ ID NO: 4560931 - DNA, 25 bp, Homo sapien
gaagcgtttgatgccgattcagcac

SEQ ID NO: 4560932 - DNA, 25 bp, Homo sapien
gagggacgcactggaacatggcttt

SEQ ID NO: 4560933 - DNA, 25 bp, Homo sapien
aggagaccaacagcaagagggacgc

SEQ ID NO: 4560934 - DNA, 25 bp, Homo sapien
ggagtctcacaagtgttgcttctca

SEQ ID NO: 4560935 - DNA, 25 bp, Homo sapien
cacattccacggcaaagcatttgaa

SEQ ID NO: 4560936 - DNA, 25 bp, Homo sapien
gagacgcagtcgaaagagctgtcct

SEQ ID NO: 4560937 - DNA, 25 bp, Homo sapien
gactcatgaaccaactcaaggcttg

SEQ ID NO: 4560938 - DNA, 25 bp, Homo sapien
tgagcacatgttaccacaagacaga

SEQ ID NO: 4560939 - DNA, 25 bp, Homo sapien
cacaccagaaaagttctgtgagatg

SEQ ID NO: 4560940 - DNA, 25 bp, Homo sapien
aggacaccatttggcacttcccaga

SEQ ID NO: 4560941 - DNA, 25 bp, Homo sapien
gaggacaccatttggcacttcccag

SEQ ID NO: 4560942 - DNA, 25 bp, Homo sapien
ctcacaccagaaaagttctgtgaga

SEQ ID NO: 4560943 - DNA, 25 bp, Homo sapien
ctgtgctatctcctacagaaaaggc

SEQ ID NO: 4560944 - DNA, 25 bp, Homo sapien
tgttcgtgttactgaaggtctgcag

SEQ ID NO: 4560945 - DNA, 25 bp, Homo sapien
atgtgagccaggtgttagagacttc

SEQ ID NO: 4560946 - DNA, 25 bp, Homo sapien
tcccagacctattgtgattgttcgt

SEQ ID NO: 4560947 - DNA, 25 bp, Homo sapien
caaagagggcccactgtgctctaga

SEQ ID NO: 4560948 - DNA, 25 bp, Homo sapien
cattctccgcagctcaatagcttct

SEQ ID NO: 4560949 - DNA, 25 bp, Homo sapien
aattccagtgcgatttcattctccg

SEQ ID NO: 4560950 - DNA, 25 bp, Homo sapien
gctgtcagtcagagtagtttgggaa

SEQ ID NO: 4560951 - DNA, 25 bp, Homo sapien
gagacgagctcccattaaaagccaa

SEQ ID NO: 4560952 - DNA, 25 bp, Homo sapien
caagcacggatgtttggagacgagc

SEQ ID NO: 4560953 - DNA, 25 bp, Homo sapien
ggcaagtaccaatctatcaaaccca

SEQ ID NO: 4560954 - DNA, 25 bp, Homo sapien
gacccaaccaatcatttgcccaatg

SEQ ID NO: 4560955 - DNA, 25 bp, Homo sapien
cagttatcacaaattctgcatcagt

SEQ ID NO: 4560956 - DNA, 25 bp, Homo sapien
gatgaacttgctccagcaaagccct

SEQ ID NO: 4560957 - DNA, 25 bp, Homo sapien
gcatcagtaaggtctaaattaacac

SEQ ID NO: 4560958 - DNA, 25 bp, Homo sapien
tgttctgtaccagatctgcagatta

SEQ ID NO: 4560959 - DNA, 25 bp, Homo sapien
gggcataagccagttttccacgaga

SEQ ID NO: 4560960 - DNA, 25 bp, Homo sapien
tattgtggctgcaactccaactgtc

SEQ ID NO: 4560961 - DNA, 25 bp, Homo sapien
cagggagtatcttccccacgtcaac

SEQ ID NO: 4560962 - DNA, 25 bp, Homo sapien
tctctctgtaggttcccctagcaaa

SEQ ID NO: 4560963 - DNA, 25 bp, Homo sapien
actttcaatctggagcttggctctt

SEQ ID NO: 4560964 - DNA, 25 bp, Homo sapien
ggtatcctctgcctacagcttctct

SEQ ID NO: 4560965 - DNA, 25 bp, Homo sapien
tctgcctggtatcctctgcctacag

SEQ ID NO: 4560966 - DNA, 25 bp, Homo sapien
gtcccgatgatacctctctgcctgg

SEQ ID NO: 4560967 - DNA, 25 bp, Homo sapien
atcatcaaaactacaccagacctgc

SEQ ID NO: 4560968 - DNA, 25 bp, Homo sapien
gttcttgcttctccggtgtcctcca

SEQ ID NO: 4560969 - DNA, 25 bp, Homo sapien
agaaatcaagttcttgcttctccgg

SEQ ID NO: 4560970 - DNA, 25 bp, Homo sapien
gctggcacacttggctttcagggca

SEQ ID NO: 4560971 - DNA, 25 bp, Homo sapien
acggtgggtgggctatgccatcctt

SEQ ID NO: 4560972 - DNA, 25 bp, Homo sapien
cggtgggtgggctatgccatccttg

SEQ ID NO: 4560973 - DNA, 25 bp, Homo sapien
ggtgggtgggctatgccatccttgt

SEQ ID NO: 4560974 - DNA, 25 bp, Homo sapien
cacggtgggtgggctatgccatcct

SEQ ID NO: 4560975 - DNA, 25 bp, Homo sapien
tatttggtgttccttctgcgaaccg

SEQ ID NO: 4560976 - DNA, 25 bp, Homo sapien
aaaatcctggtctcctaaatgggtg

SEQ ID NO: 4560977 - DNA, 25 bp, Homo sapien
catcagatggtcagccctttaagca

SEQ ID NO: 4560978 - DNA, 25 bp, Homo sapien
gcgaaccgccctactgtcatttaag

SEQ ID NO: 4560979 - DNA, 25 bp, Homo sapien
gggaacatccatggtgtgtgagttt

SEQ ID NO: 4560980 - DNA, 25 bp, Homo sapien
ctgggaacatccatggtgtgtgagt

SEQ ID NO: 4560981 - DNA, 25 bp, Homo sapien
ggtgtgtgagtttattccctggagc

SEQ ID NO: 4560982 - DNA, 25 bp, Homo sapien
tgtgtgagtttattccctggagcca

SEQ ID NO: 4560983 - DNA, 25 bp, Homo sapien
acacagagccatctcctatcaaagc

SEQ ID NO: 4560984 - DNA, 25 bp, Homo sapien
agatgagttccacgcattgcactgc

SEQ ID NO: 4560985 - DNA, 25 bp, Homo sapien
tgatgtgagaatgtacttgcttccc

SEQ ID NO: 4560986 - DNA, 25 bp, Homo sapien
tgtccacagaactcaaaaacacatc

SEQ ID NO: 4560987 - DNA, 25 bp, Homo sapien
tctcctcaggagaaggtcgtcggca

SEQ ID NO: 4560988 - DNA, 25 bp, Homo sapien
tctgtggcaggactcaagttccagc

SEQ ID NO: 4560989 - DNA, 25 bp, Homo sapien
gatctcttatcacacaggcaccatg

SEQ ID NO: 4560990 - DNA, 25 bp, Homo sapien
cagaccgagacctgcattgctgcca

SEQ ID NO: 4560991 - DNA, 25 bp, Homo sapien
tcaggtagctctcgagaggaaaatc

SEQ ID NO: 4560992 - DNA, 25 bp, Homo sapien
ccaccaattttaattatcaaggagg

SEQ ID NO: 4560993 - DNA, 25 bp, Homo sapien
tctcgagaggaaaatccaccaattt

SEQ ID NO: 4560994 - DNA, 25 bp, Homo sapien
taattatcaaggaggaagagcctcc

SEQ ID NO: 4560995 - DNA, 25 bp, Homo sapien
ctccttctttctgcaccagaaattc

SEQ ID NO: 4560996 - DNA, 25 bp, Homo sapien
taatgtttctccttctttctgcacc

SEQ ID NO: 4560997 - DNA, 25 bp, Homo sapien
atgtttctccttctttctgcaccag

SEQ ID NO: 4560998 - DNA, 25 bp, Homo sapien
tttctccttctttctgcaccagaaa

SEQ ID NO: 4560999 - DNA, 25 bp, Homo sapien
caccgttacggatttgggcaaagct

SEQ ID NO: 4561000 - DNA, 25 bp, Homo sapien
gagaactgacatatcacccagtggg

SEQ ID NO: 4561001 - DNA, 25 bp, Homo sapien
tgtattgaaaggctggctccaccgt

SEQ ID NO: 4561002 - DNA, 25 bp, Homo sapien
ggaaacactacacatgaagcctctg

SEQ ID NO: 4561003 - DNA, 25 bp, Homo sapien
tgcccacagggatcagaacttttat

SEQ ID NO: 4561004 - DNA, 25 bp, Homo sapien
tgaagtatactgatgatcttacact

SEQ ID NO: 4561005 - DNA, 25 bp, Homo sapien
gacaatgcccagtactgtttcctat

SEQ ID NO: 4561006 - DNA, 25 bp, Homo sapien
gctcagaattgaagtatactgatga

SEQ ID NO: 4561007 - DNA, 25 bp, Homo sapien
taaagaccagctcctctacgtctgc

SEQ ID NO: 4561008 - DNA, 25 bp, Homo sapien
aaatctacctgtcccactgggagca

SEQ ID NO: 4561009 - DNA, 25 bp, Homo sapien
gccagctatgcctctactccttgaa

SEQ ID NO: 4561010 - DNA, 25 bp, Homo sapien
tctgctcttagggttcatgtgtgac

SEQ ID NO: 4561011 - DNA, 25 bp, Homo sapien
gagttgctcaagactagagtaggcc

SEQ ID NO: 4561012 - DNA, 25 bp, Homo sapien
tgggaataaggtagcaaccccagcc

SEQ ID NO: 4561013 - DNA, 25 bp, Homo sapien
gagtaggcctgatcgtgcaattgag

SEQ ID NO: 4561014 - DNA, 25 bp, Homo sapien
taacgtcaggaaagctcaacaagtg

SEQ ID NO: 4561015 - DNA, 25 bp, Homo sapien
gaccaagtggtagcatcatgagtga

SEQ ID NO: 4561016 - DNA, 25 bp, Homo sapien
ctggaagggcggaatcacatctggt

SEQ ID NO: 4561017 - DNA, 25 bp, Homo sapien
tgctagggaacctcaccaatccttg

SEQ ID NO: 4561018 - DNA, 25 bp, Homo sapien
tctatagaaattgcccgggttccca

SEQ ID NO: 4561019 - DNA, 25 bp, Homo sapien
gtctgggtctagagattgtaaagtc

SEQ ID NO: 4561020 - DNA, 25 bp, Homo sapien
ccacttcagagagaaatgtctgggt

SEQ ID NO: 4561021 - DNA, 25 bp, Homo sapien
gagagaaatgtctgggtctagagat

SEQ ID NO: 4561022 - DNA, 25 bp, Homo sapien
cttcactccacttcagagagaaatg

SEQ ID NO: 4561023 - DNA, 25 bp, Homo sapien
aatgtggttatgcatttggcttcca

SEQ ID NO: 4561024 - DNA, 25 bp, Homo sapien
tggcttccacagaagtgtaagctaa

SEQ ID NO: 4561025 - DNA, 25 bp, Homo sapien
gggaaatgtggttatgcatttggct

SEQ ID NO: 4561026 - DNA, 25 bp, Homo sapien
taagaagctcaattcatcaagtagc

SEQ ID NO: 4561027 - DNA, 25 bp, Homo sapien
gagaggccacgcactttcaaagtca

SEQ ID NO: 4561028 - DNA, 25 bp, Homo sapien
catttgttcactgtggcgagccggg

SEQ ID NO: 4561029 - DNA, 25 bp, Homo sapien
tcagggctacacataaactacaggc

SEQ ID NO: 4561030 - DNA, 25 bp, Homo sapien
ggtctgccggccctaaaagccttca

SEQ ID NO: 4561031 - DNA, 25 bp, Homo sapien
ctctttcattgtgttgttaagatgg

SEQ ID NO: 4561032 - DNA, 25 bp, Homo sapien
gagtgacaccagctatcattaatat

SEQ ID NO: 4561033 - DNA, 25 bp, Homo sapien
tcgctgtggttttttttccgcttca

SEQ ID NO: 4561034 - DNA, 25 bp, Homo sapien
ttcattcctacttcccttgtcgctt

SEQ ID NO: 4561035 - DNA, 25 bp, Homo sapien
ttacggatttgctagtcggctctgc

SEQ ID NO: 4561036 - DNA, 25 bp, Homo sapien
gcttgcaagaacaccttctggcaag

SEQ ID NO: 4561037 - DNA, 25 bp, Homo sapien
ctgccaccctgatcgcttgcaagaa

SEQ ID NO: 4561038 - DNA, 25 bp, Homo sapien
cggatttgctagtcggctctgcagc

SEQ ID NO: 4561039 - DNA, 25 bp, Homo sapien
cgctgaaaccgcggttcgccgcggt

SEQ ID NO: 4561040 - DNA, 25 bp, Homo sapien
tgaaaccgcggttcgccgcggtcac

SEQ ID NO: 4561041 - DNA, 25 bp, Homo sapien
tcccttttgtcccagccctcgccgc

SEQ ID NO: 4561042 - DNA, 25 bp, Homo sapien
ctcccgctgaaaccgcggttcgccg

SEQ ID NO: 4561043 - DNA, 25 bp, Homo sapien
tcctgatggcttttactgtactcga

SEQ ID NO: 4561044 - DNA, 25 bp, Homo sapien
tcgaattccgtgaatgggaaagcgc

SEQ ID NO: 4561045 - DNA, 25 bp, Homo sapien
aattaaatgtttttcgcgtgtgtca

SEQ ID NO: 4561046 - DNA, 25 bp, Homo sapien
gcgtgtgtcatcctgatggctttta

SEQ ID NO: 4561047 - DNA, 25 bp, Homo sapien
ggggggatactgtaaaacagccagc

SEQ ID NO: 4561048 - DNA, 25 bp, Homo sapien
gggatactgtaaaacagccagcaca

SEQ ID NO: 4561049 - DNA, 25 bp, Homo sapien
tgatcagccatattcctacctccaa

SEQ ID NO: 4561050 - DNA, 25 bp, Homo sapien
cagccagcacatgatcagccatatt

SEQ ID NO: 4561051 - DNA, 25 bp, Homo sapien
gcagacacagaccaaacaccaaaat

SEQ ID NO: 4561052 - DNA, 25 bp, Homo sapien
aaaacattgcttgcactatccaacc

SEQ ID NO: 4561053 - DNA, 25 bp, Homo sapien
tatccaaccagcatacaacttgcac

SEQ ID NO: 4561054 - DNA, 25 bp, Homo sapien
tgaagagtaaaaatcgccaggggag

SEQ ID NO: 4561055 - DNA, 25 bp, Homo sapien
ttgcttttgtagacgctccctccgg

SEQ ID NO: 4561056 - DNA, 25 bp, Homo sapien
gaaatgcttggaacctccgagaggg

SEQ ID NO: 4561057 - DNA, 25 bp, Homo sapien
tccgagagggaaggattcccagagc

SEQ ID NO: 4561058 - DNA, 25 bp, Homo sapien
gcagaaataagtttcggtgcttgct

SEQ ID NO: 4561059 - DNA, 25 bp, Homo sapien
atctgagagggaccgaaaacacacc

SEQ ID NO: 4561060 - DNA, 25 bp, Homo sapien
gctccaaagaaggtgtccacgtcgc

SEQ ID NO: 4561061 - DNA, 25 bp, Homo sapien
ccagatctgagagggaccgaaaaca

SEQ ID NO: 4561062 - DNA, 25 bp, Homo sapien
gggacttcccaggtcgctcactcct

SEQ ID NO: 4561063 - DNA, 25 bp, Homo sapien
gattcctggttcagcggggtctccc

SEQ ID NO: 4561064 - DNA, 25 bp, Homo sapien
gcaggcggctcgctcttgcgggcgg

SEQ ID NO: 4561065 - DNA, 25 bp, Homo sapien
ctggaatagctctgtctgcgcaccg

SEQ ID NO: 4561066 - DNA, 25 bp, Homo sapien
ggaatagctctgtctgcgcaccggg

SEQ ID NO: 4561067 - DNA, 25 bp, Homo sapien
caggcagcgctagcgagagcttctc

SEQ ID NO: 4561068 - DNA, 25 bp, Homo sapien
cagagcaactctatggtaccaaaaa

SEQ ID NO: 4561069 - DNA, 25 bp, Homo sapien
caatgtagagatcgctggagatggc

SEQ ID NO: 4561070 - DNA, 25 bp, Homo sapien
tggagatggcgagctccgagactcc

SEQ ID NO: 4561071 - DNA, 25 bp, Homo sapien
tggattggggaagcatttgaaacct

SEQ ID NO: 4561072 - DNA, 25 bp, Homo sapien
gggaagcatttgaaacctgaaaagc

SEQ ID NO: 4561073 - DNA, 25 bp, Homo sapien
agcacagtgattaggtttatatttc

SEQ ID NO: 4561074 - DNA, 25 bp, Homo sapien
catttgaaacctgaaaagcacagtg

SEQ ID NO: 4561075 - DNA, 25 bp, Homo sapien
tcttaaccaagcgttcaggctggat

SEQ ID NO: 4561076 - DNA, 25 bp, Homo sapien
ggaccgaagtatggccagtctttca

SEQ ID NO: 4561077 - DNA, 25 bp, Homo sapien
tgtacttccttgatccatttgggca

SEQ ID NO: 4561078 - DNA, 25 bp, Homo sapien
ccaaatgatcgtacaaggtcagcaa

SEQ ID NO: 4561079 - DNA, 25 bp, Homo sapien
ttggtggcagtagctaacttttaga

SEQ ID NO: 4561080 - DNA, 25 bp, Homo sapien
gctgctgcttaatgcagacttggtg

SEQ ID NO: 4561081 - DNA, 25 bp, Homo sapien
gaataccgaagggtccactccagcc

SEQ ID NO: 4561082 - DNA, 25 bp, Homo sapien
ccagaataccgaagggtccactcca

SEQ ID NO: 4561083 - DNA, 25 bp, Homo sapien
gtagttagagcatctttggccagga

SEQ ID NO: 4561084 - DNA, 25 bp, Homo sapien
gagctgtagttagagcatctttggc

SEQ ID NO: 4561085 - DNA, 25 bp, Homo sapien
gagtgagctgtagttagagcatctt

SEQ ID NO: 4561086 - DNA, 25 bp, Homo sapien
tagagtgagctgtagttagagcatc

SEQ ID NO: 4561087 - DNA, 25 bp, Homo sapien
gaacattagagtggccacatagtac

SEQ ID NO: 4561088 - DNA, 25 bp, Homo sapien
aaaaagtcccctatgtcagcttcca

SEQ ID NO: 4561089 - DNA, 25 bp, Homo sapien
caacctcatcgcagttccatttggc

SEQ ID NO: 4561090 - DNA, 25 bp, Homo sapien
tccatttggctgaatgatacagaca

SEQ ID NO: 4561091 - DNA, 25 bp, Homo sapien
gagagccttcttcgttcccacatga

SEQ ID NO: 4561092 - DNA, 25 bp, Homo sapien
ggtactgaaaggcttcattccggaa

SEQ ID NO: 4561093 - DNA, 25 bp, Homo sapien
gacaacttggctgggtctatcctta

SEQ ID NO: 4561094 - DNA, 25 bp, Homo sapien
cccttgtggtttcagttgtaggaga

SEQ ID NO: 4561095 - DNA, 25 bp, Homo sapien
tcatcaggcaaccagtagtttctga

SEQ ID NO: 4561096 - DNA, 25 bp, Homo sapien
ggcaaccagtagtttctgagttggt

SEQ ID NO: 4561097 - DNA, 25 bp, Homo sapien
gtttcatcaggcaaccagtagtttc

SEQ ID NO: 4561098 - DNA, 25 bp, Homo sapien
ggcagtttcatcaggcaaccagtag

SEQ ID NO: 4561099 - DNA, 25 bp, Homo sapien
tcccacactgcgaatgagaagcatt

SEQ ID NO: 4561100 - DNA, 25 bp, Homo sapien
ggtggcacacagtcatcccacactg

SEQ ID NO: 4561101 - DNA, 25 bp, Homo sapien
aactggttcctggcctgagaaactc

SEQ ID NO: 4561102 - DNA, 25 bp, Homo sapien
cagaaagaaactggaatcccatgct

SEQ ID NO: 4561103 - DNA, 25 bp, Homo sapien
ttcagacggattttgaccttgcagc

SEQ ID NO: 4561104 - DNA, 25 bp, Homo sapien
tgtagtcaaacagcgagcagatatg

SEQ ID NO: 4561105 - DNA, 25 bp, Homo sapien
cattggttcctgcttgggaaaggcc

SEQ ID NO: 4561106 - DNA, 25 bp, Homo sapien
gactgatcttgggtggcagacacag

SEQ ID NO: 4561107 - DNA, 25 bp, Homo sapien
aagatgtcctgatatccttcagtag

SEQ ID NO: 4561108 - DNA, 25 bp, Homo sapien
cagcgaccacactccttggagttac

SEQ ID NO: 4561109 - DNA, 25 bp, Homo sapien
aaactcagaggcaactaagatgtcc

SEQ ID NO: 4561110 - DNA, 25 bp, Homo sapien
aaggcaacactgtggatacagtgaa

SEQ ID NO: 4561111 - DNA, 25 bp, Homo sapien
taaggtcacatgctaaggttccagg

SEQ ID NO: 4561112 - DNA, 25 bp, Homo sapien
tataaagtgactgccaagactctgc

SEQ ID NO: 4561113 - DNA, 25 bp, Homo sapien
tccttggtgggtagctgtatctctc

SEQ ID NO: 4561114 - DNA, 25 bp, Homo sapien
cacttacgtgactcaagggagcatc

SEQ ID NO: 4561115 - DNA, 25 bp, Homo sapien
gggtcccctactcggagtatcatga

SEQ ID NO: 4561116 - DNA, 25 bp, Homo sapien
tgatgctcccagtctgtttccaaag

SEQ ID NO: 4561117 - DNA, 25 bp, Homo sapien
tgggccagttcctactgttacaagt

SEQ ID NO: 4561118 - DNA, 25 bp, Homo sapien
ccaaagtgcaggtactggagctctc

SEQ ID NO: 4561119 - DNA, 25 bp, Homo sapien
gctccctctgtcattttggcagctg

SEQ ID NO: 4561120 - DNA, 25 bp, Homo sapien
tcacagtgccttctgcagggcccat

SEQ ID NO: 4561121 - DNA, 25 bp, Homo sapien
actagcacctcctccaagaacagct

SEQ ID NO: 4561122 - DNA, 25 bp, Homo sapien
tccaagaacagctccctctgtcatt

SEQ ID NO: 4561123 - DNA, 25 bp, Homo sapien
gaacacttctggagaattgagctag

SEQ ID NO: 4561124 - DNA, 25 bp, Homo sapien
cttgtttggaaagacgtagacagga

SEQ ID NO: 4561125 - DNA, 25 bp, Homo sapien
ccaatgagacaggagggcttgtttg

SEQ ID NO: 4561126 - DNA, 25 bp, Homo sapien
aagacgtagacaggaccccagatgg

SEQ ID NO: 4561127 - DNA, 25 bp, Homo sapien
cataatcaaccttaggatagtcctc

SEQ ID NO: 4561128 - DNA, 25 bp, Homo sapien
tttgtccacagcgtagacctttgct

SEQ ID NO: 4561129 - DNA, 25 bp, Homo sapien
cacaatcgagggtactaaagcttga

SEQ ID NO: 4561130 - DNA, 25 bp, Homo sapien
catttaaggacattatctgccttgg

SEQ ID NO: 4561131 - DNA, 25 bp, Homo sapien
tcaccagagagaggctaggtatttt

SEQ ID NO: 4561132 - DNA, 25 bp, Homo sapien
tggtgacacttaacttggacagccc

SEQ ID NO: 4561133 - DNA, 25 bp, Homo sapien
tggagtcctccaatgggtaatgtct

SEQ ID NO: 4561134 - DNA, 25 bp, Homo sapien
gtctgcactcatgcatcaccagaga

SEQ ID NO: 4561135 - DNA, 25 bp, Homo sapien
tcctcggtgacaggttctcggcctc

SEQ ID NO: 4561136 - DNA, 25 bp, Homo sapien
cctgctgttcgctcctcggtgacag

SEQ ID NO: 4561137 - DNA, 25 bp, Homo sapien
ctcctcggtgacaggttctcggcct

SEQ ID NO: 4561138 - DNA, 25 bp, Homo sapien
cagagggtcattgtcagccagtgag

SEQ ID NO: 4561139 - DNA, 25 bp, Homo sapien
ttgtcagccagtgagtggaaccagg

SEQ ID NO: 4561140 - DNA, 25 bp, Homo sapien
gctgctgagatcctcactggtgaaa

SEQ ID NO: 4561141 - DNA, 25 bp, Homo sapien
agtctctgaatttggtcttcagagg

SEQ ID NO: 4561142 - DNA, 25 bp, Homo sapien
agtgctggcagagtgctccatgatg

SEQ ID NO: 4561143 - DNA, 25 bp, Homo sapien
ccatgatgccagtctcgtttttccc

SEQ ID NO: 4561144 - DNA, 25 bp, Homo sapien
tgccagtctcgtttttcccccctca

SEQ ID NO: 4561145 - DNA, 25 bp, Homo sapien
gagtgctccatgatgccagtctcgt

SEQ ID NO: 4561146 - DNA, 25 bp, Homo sapien
cctatcgctggatctcagtgactgc

SEQ ID NO: 4561147 - DNA, 25 bp, Homo sapien
atggcccagggacgtgcaactcttc

SEQ ID NO: 4561148 - DNA, 25 bp, Homo sapien
cctcagcatcgtagaacttggggag

SEQ ID NO: 4561149 - DNA, 25 bp, Homo sapien
gctttctgccggcaaacatggccca

SEQ ID NO: 4561150 - DNA, 25 bp, Homo sapien
ttgggactatcctccttgctgcctg

SEQ ID NO: 4561151 - DNA, 25 bp, Homo sapien
cgtttgtgctcgcttgatacgtaat

SEQ ID NO: 4561152 - DNA, 25 bp, Homo sapien
tgtaaacctcctcaccattgggact

SEQ ID NO: 4561153 - DNA, 25 bp, Homo sapien
gatacgtaatattgttaagagcttg

SEQ ID NO: 4561154 - DNA, 25 bp, Homo sapien
cttgcaacctttccgccttgggtct

SEQ ID NO: 4561155 - DNA, 25 bp, Homo sapien
gctgcatgcaaagaagagactccgc

SEQ ID NO: 4561156 - DNA, 25 bp, Homo sapien
ctttctgtcccagatgcactcaggg

SEQ ID NO: 4561157 - DNA, 25 bp, Homo sapien
ccagaaagttatcgaagtctctacc

SEQ ID NO: 4561158 - DNA, 25 bp, Homo sapien
gaagagcacgtctgcagccatagag

SEQ ID NO: 4561159 - DNA, 25 bp, Homo sapien
tgcagccatagagaattgccagctt

SEQ ID NO: 4561160 - DNA, 25 bp, Homo sapien
tctcttttccagtgcggtggttttc

SEQ ID NO: 4561161 - DNA, 25 bp, Homo sapien
tatcactgaacgacttgtgccagcc

SEQ ID NO: 4561162 - DNA, 25 bp, Homo sapien
agcattgcctaagtcttctggaaaa

SEQ ID NO: 4561163 - DNA, 25 bp, Homo sapien
ccttcctagcattgcctaagtcttc

SEQ ID NO: 4561164 - DNA, 25 bp, Homo sapien
tagcattgcctaagtcttctggaaa

SEQ ID NO: 4561165 - DNA, 25 bp, Homo sapien
tcctagcattgcctaagtcttctgg

SEQ ID NO: 4561166 - DNA, 25 bp, Homo sapien
tggttagactgctggtgtatttggt

SEQ ID NO: 4561167 - DNA, 25 bp, Homo sapien
tagactgctggtgtatttggtggca

SEQ ID NO: 4561168 - DNA, 25 bp, Homo sapien
actgtggttagactgctggtgtatt

SEQ ID NO: 4561169 - DNA, 25 bp, Homo sapien
actgctggtgtatttggtggcagat

SEQ ID NO: 4561170 - DNA, 25 bp, Homo sapien
aacagagaagtgttcgagaggtggg

SEQ ID NO: 4561171 - DNA, 25 bp, Homo sapien
agagaagtgttcgagaggtgggaag

SEQ ID NO: 4561172 - DNA, 25 bp, Homo sapien
agaagtgttcgagaggtgggaaggt

SEQ ID NO: 4561173 - DNA, 25 bp, Homo sapien
cagagaagtgttcgagaggtgggaa

SEQ ID NO: 4561174 - DNA, 25 bp, Homo sapien
tgtccttgctcctgcttaaacagaa

SEQ ID NO: 4561175 - DNA, 25 bp, Homo sapien
tccttgctcctgcttaaacagaagc

SEQ ID NO: 4561176 - DNA, 25 bp, Homo sapien
cttgctcctgcttaaacagaagcat

SEQ ID NO: 4561177 - DNA, 25 bp, Homo sapien
ctgtccttgctcctgcttaaacaga

SEQ ID NO: 4561178 - DNA, 25 bp, Homo sapien
gggcttcgtctattccctgatgtct

SEQ ID NO: 4561179 - DNA, 25 bp, Homo sapien
cagaacactgctgttcgcccaatgt

SEQ ID NO: 4561180 - DNA, 25 bp, Homo sapien
agcaggctgatctacttgcatccca

SEQ ID NO: 4561181 - DNA, 25 bp, Homo sapien
tgttcgttcatcaagggcctctgcc

SEQ ID NO: 4561182 - DNA, 25 bp, Homo sapien
cagatacactctccctaaggaagcc

SEQ ID NO: 4561183 - DNA, 25 bp, Homo sapien
gtcagatacactctccctaaggaag

SEQ ID NO: 4561184 - DNA, 25 bp, Homo sapien
tcagatacactctccctaaggaagc

SEQ ID NO: 4561185 - DNA, 25 bp, Homo sapien
tattctctttcaattcctctgtcaa

SEQ ID NO: 4561186 - DNA, 25 bp, Homo sapien
tcaaaatgagtttaatattctcttt

SEQ ID NO: 4561187 - DNA, 25 bp, Homo sapien
ggaagaagttctggggtcatgatta

SEQ ID NO: 4561188 - DNA, 25 bp, Homo sapien
cagcagagaatcttcttctaccaaa

SEQ ID NO: 4561189 - DNA, 25 bp, Homo sapien
aagttatctggcagccctgacactg

SEQ ID NO: 4561190 - DNA, 25 bp, Homo sapien
tgacggatggctttttgtaatgtgc

SEQ ID NO: 4561191 - DNA, 25 bp, Homo sapien
gtgcctggtacttctcttgaagtta

SEQ ID NO: 4561192 - DNA, 25 bp, Homo sapien
tttatgggagcagtgttttgacgga

SEQ ID NO: 4561193 - DNA, 25 bp, Homo sapien
cagaactggcagtcaatggtcaaac

SEQ ID NO: 4561194 - DNA, 25 bp, Homo sapien
aggcagaactggcagtcaatggtca

SEQ ID NO: 4561195 - DNA, 25 bp, Homo sapien
ggcagtcaatggtcaaacctgacag

SEQ ID NO: 4561196 - DNA, 25 bp, Homo sapien
actggcagtcaatggtcaaacctga

SEQ ID NO: 4561197 - DNA, 25 bp, Homo sapien
ctggtcacttcatttgtgcaagcaa

SEQ ID NO: 4561198 - DNA, 25 bp, Homo sapien
ttatctggtcacttcatttgtgcaa

SEQ ID NO: 4561199 - DNA, 25 bp, Homo sapien
ggagtccggatgtctgactcatcca

SEQ ID NO: 4561200 - DNA, 25 bp, Homo sapien
tatggagtccggatgtctgactcat

SEQ ID NO: 4561201 - DNA, 25 bp, Homo sapien
ccaactgcttacactgaggatgggt

SEQ ID NO: 4561202 - DNA, 25 bp, Homo sapien
acccaactgcttacactgaggatgg

SEQ ID NO: 4561203 - DNA, 25 bp, Homo sapien
aaatggaaagctctgaacttttgcc

SEQ ID NO: 4561204 - DNA, 25 bp, Homo sapien
tgaacttttgccaaaatctgaaacc

SEQ ID NO: 4561205 - DNA, 25 bp, Homo sapien
aaatgtagccccatgaatgttttgc

SEQ ID NO: 4561206 - DNA, 25 bp, Homo sapien
gaatgttttgcattatgatcaacca

SEQ ID NO: 4561207 - DNA, 25 bp, Homo sapien
gaggaagttgagtgtaagagcaaaa

SEQ ID NO: 4561208 - DNA, 25 bp, Homo sapien
aagaggaagttgagtgtaagagcaa

SEQ ID NO: 4561209 - DNA, 25 bp, Homo sapien
gcagcccctgacaagatggagctag

SEQ ID NO: 4561210 - DNA, 25 bp, Homo sapien
ggagctagaaataagcctgctcagg

SEQ ID NO: 4561211 - DNA, 25 bp, Homo sapien
ccctaacttagaggtcctggctcca

SEQ ID NO: 4561212 - DNA, 25 bp, Homo sapien
cactgatcacgaatgacggaggcgc

SEQ ID NO: 4561213 - DNA, 25 bp, Homo sapien
ggcctgcaataggaaagacctccca

SEQ ID NO: 4561214 - DNA, 25 bp, Homo sapien
cagacttcagaggttgcttagcacg

SEQ ID NO: 4561215 - DNA, 25 bp, Homo sapien
cttagcacggagttgtggagtccca

SEQ ID NO: 4561216 - DNA, 25 bp, Homo sapien
gaaagacggtgagactctgaagtcc

SEQ ID NO: 4561217 - DNA, 25 bp, Homo sapien
agaggccttgcaaaatccggtacat

SEQ ID NO: 4561218 - DNA, 25 bp, Homo sapien
catgggttggggaattgccagcttc

SEQ ID NO: 4561219 - DNA, 25 bp, Homo sapien
gcttctgtcttaacggtgttacata

SEQ ID NO: 4561220 - DNA, 25 bp, Homo sapien
ttaaatgtctactgtaggcatgtgc

SEQ ID NO: 4561221 - DNA, 25 bp, Homo sapien
gacaggcgtgctgatcgcagcagcc

SEQ ID NO: 4561222 - DNA, 25 bp, Homo sapien
acaggcgtgctgatcgcagcagcca

SEQ ID NO: 4561223 - DNA, 25 bp, Homo sapien
caggcgtgctgatcgcagcagccat

SEQ ID NO: 4561224 - DNA, 25 bp, Homo sapien
ggacaggcgtgctgatcgcagcagc

SEQ ID NO: 4561225 - DNA, 25 bp, Homo sapien
gagaggcataaaaaccttcactggg

SEQ ID NO: 4561226 - DNA, 25 bp, Homo sapien
gaggcataaaaaccttcactgggcc

SEQ ID NO: 4561227 - DNA, 25 bp, Homo sapien
agaccaaagtgggagaggcataaaa

SEQ ID NO: 4561228 - DNA, 25 bp, Homo sapien
gtgggagaggcataaaaaccttcac

SEQ ID NO: 4561229 - DNA, 25 bp, Homo sapien
gataccttcaggagacaaagaagtc

SEQ ID NO: 4561230 - DNA, 25 bp, Homo sapien
cccaagacaagggaagactgaagtc

SEQ ID NO: 4561231 - DNA, 25 bp, Homo sapien
cagggtcaccagttgataccttcag

SEQ ID NO: 4561232 - DNA, 25 bp, Homo sapien
tgacgctcaggttctcagggtcacc

SEQ ID NO: 4561233 - DNA, 25 bp, Homo sapien
ctggcttcaatagaagaaagtggga

SEQ ID NO: 4561234 - DNA, 25 bp, Homo sapien
ggctgtggaatatctacactccctt

SEQ ID NO: 4561235 - DNA, 25 bp, Homo sapien
tacactcccttgctgtaacgctgtt

SEQ ID NO: 4561236 - DNA, 25 bp, Homo sapien
gtgctgattctcagtactggcttca

SEQ ID NO: 4561237 - DNA, 25 bp, Homo sapien
aatttcaatagcagacgatccagtc

SEQ ID NO: 4561238 - DNA, 25 bp, Homo sapien
gaacctttaagggatcctgtagcaa

SEQ ID NO: 4561239 - DNA, 25 bp, Homo sapien
cctgtagcaaaatttcaatagcaga

SEQ ID NO: 4561240 - DNA, 25 bp, Homo sapien
ctcagatgaacctttaagggatcct

SEQ ID NO: 4561241 - DNA, 25 bp, Homo sapien
catatcaggatagttttcaatgaca

SEQ ID NO: 4561242 - DNA, 25 bp, Homo sapien
tgctgtggagcatctcatatcagga

SEQ ID NO: 4561243 - DNA, 25 bp, Homo sapien
agaacttgaatccagatagagtccc

SEQ ID NO: 4561244 - DNA, 25 bp, Homo sapien
aattagaatgcaatcagtcaacaag

SEQ ID NO: 4561245 - DNA, 25 bp, Homo sapien
tattgaatacagaaggtttactttc

SEQ ID NO: 4561246 - DNA, 25 bp, Homo sapien
cagctgctgcgatgtcacatttgca

SEQ ID NO: 4561247 - DNA, 25 bp, Homo sapien
gtgctgtctttacttgtctgtgatg

SEQ ID NO: 4561248 - DNA, 25 bp, Homo sapien
aatacagaaggtttactttcaccag

SEQ ID NO: 4561249 - DNA, 25 bp, Homo sapien
caacagaaggtcttatctgggaggc

SEQ ID NO: 4561250 - DNA, 25 bp, Homo sapien
ggaggctacctcctttgtgcatgcc

SEQ ID NO: 4561251 - DNA, 25 bp, Homo sapien
tatctgggaggctacctcctttgtg

SEQ ID NO: 4561252 - DNA, 25 bp, Homo sapien
cccgggagaggcatcacaacagaag

SEQ ID NO: 4561253 - DNA, 25 bp, Homo sapien
ttcctttcctgtcacggagattgcc

SEQ ID NO: 4561254 - DNA, 25 bp, Homo sapien
tgttcctttcctgtcacggagattg

SEQ ID NO: 4561255 - DNA, 25 bp, Homo sapien
gttcctttcctgtcacggagattgc

SEQ ID NO: 4561256 - DNA, 25 bp, Homo sapien
agcactgctagcaccaatcccaaga

SEQ ID NO: 4561257 - DNA, 25 bp, Homo sapien
aacagtccgtgcagcatttctcagc

SEQ ID NO: 4561258 - DNA, 25 bp, Homo sapien
atgtaaatcccaaaacagtccgtgc

SEQ ID NO: 4561259 - DNA, 25 bp, Homo sapien
caccaatcccaagaagtggttcttc

SEQ ID NO: 4561260 - DNA, 25 bp, Homo sapien
gctttagccgcatgttatcagtcgc

SEQ ID NO: 4561261 - DNA, 25 bp, Homo sapien
gatacggttgcagttctccccgcaa

SEQ ID NO: 4561262 - DNA, 25 bp, Homo sapien
gaaatagaacgatgcctttcggtcc

SEQ ID NO: 4561263 - DNA, 25 bp, Homo sapien
gaacgtgacagtggacactccctga

SEQ ID NO: 4561264 - DNA, 25 bp, Homo sapien
cagaatcacagcttggtggtaaagc

SEQ ID NO: 4561265 - DNA, 25 bp, Homo sapien
tggtaaagctgaaagccagtggctg

SEQ ID NO: 4561266 - DNA, 25 bp, Homo sapien
tgcagtttcttgacccctgggaggt

SEQ ID NO: 4561267 - DNA, 25 bp, Homo sapien
cttgtttcaacttatccagctggtc

SEQ ID NO: 4561268 - DNA, 25 bp, Homo sapien
aaatatgtattgaccatctgctatg

SEQ ID NO: 4561269 - DNA, 25 bp, Homo sapien
aggcgctgtactaggcaccagagat

SEQ ID NO: 4561270 - DNA, 25 bp, Homo sapien
caggcgctgtactaggcaccagaga

SEQ ID NO: 4561271 - DNA, 25 bp, Homo sapien
ataaatatgtattgaccatctgcta

SEQ ID NO: 4561272 - DNA, 25 bp, Homo sapien
aatgacaaattagaacagtgctgag

SEQ ID NO: 4561273 - DNA, 25 bp, Homo sapien
agtgtgtgcaaagactctgtagcag

SEQ ID NO: 4561274 - DNA, 25 bp, Homo sapien
tactcctagggaacagaaagagacc

SEQ ID NO: 4561275 - DNA, 25 bp, Homo sapien
gaccaaagtgttaatggcatagctt

SEQ ID NO: 4561276 - DNA, 25 bp, Homo sapien
taacatttgacagtggccaacttca

SEQ ID NO: 4561277 - DNA, 25 bp, Homo sapien
caaggtaccctaaagaagatgctgg

SEQ ID NO: 4561278 - DNA, 25 bp, Homo sapien
gctggctataaacaggtagaggaga

SEQ ID NO: 4561279 - DNA, 25 bp, Homo sapien
tcatcgatgcttcctgaagggaact

SEQ ID NO: 4561280 - DNA, 25 bp, Homo sapien
tctttcttctagttcacagatactt

SEQ ID NO: 4561281 - DNA, 25 bp, Homo sapien
ctttcttctagttcacagatactta

SEQ ID NO: 4561282 - DNA, 25 bp, Homo sapien
ttctttcttctagttcacagatact

SEQ ID NO: 4561283 - DNA, 25 bp, Homo sapien
tttcttctagttcacagatacttac

SEQ ID NO: 4561284 - DNA, 25 bp, Homo sapien
caaactcaagactgtggaaatctgt

SEQ ID NO: 4561285 - DNA, 25 bp, Homo sapien
cagatattttaagggagagtgggtt

SEQ ID NO: 4561286 - DNA, 25 bp, Homo sapien
ccaagcagtaaactcagtgagtctg

SEQ ID NO: 4561287 - DNA, 25 bp, Homo sapien
gagtctgcaactgtgtggcgcatct

SEQ ID NO: 4561288 - DNA, 25 bp, Homo sapien
gaaggttcccactgtggcagagctt

SEQ ID NO: 4561289 - DNA, 25 bp, Homo sapien
aggcacgagggaaggttcccactgt

SEQ ID NO: 4561290 - DNA, 25 bp, Homo sapien
ctgtggcagagcttccaaagtccat

SEQ ID NO: 4561291 - DNA, 25 bp, Homo sapien
cgacaaagaggcacgagggaaggtt

SEQ ID NO: 4561292 - DNA, 25 bp, Homo sapien
tagagctcacgaaacaggctttcca

SEQ ID NO: 4561293 - DNA, 25 bp, Homo sapien
cttagatgtggccttgaatgaagtg

SEQ ID NO: 4561294 - DNA, 25 bp, Homo sapien
agatgtggccttgaatgaagtgcag

SEQ ID NO: 4561295 - DNA, 25 bp, Homo sapien
aagtgcagtagagctcacgaaacag

SEQ ID NO: 4561296 - DNA, 25 bp, Homo sapien
ttgaagagactccaaggggggtcgc

SEQ ID NO: 4561297 - DNA, 25 bp, Homo sapien
tctaacacaaagcgcatcacactgc

SEQ ID NO: 4561298 - DNA, 25 bp, Homo sapien
caaagcgcatcacactgccagtgag

SEQ ID NO: 4561299 - DNA, 25 bp, Homo sapien
tccaaggggggtcgcctctaacaca

SEQ ID NO: 4561300 - DNA, 25 bp, Homo sapien
agtgacattgcttgctaaagctttg

SEQ ID NO: 4561301 - DNA, 25 bp, Homo sapien
gccgctggagaagttagtgacattg

SEQ ID NO: 4561302 - DNA, 25 bp, Homo sapien
cactatgcagagttttttccgactg

SEQ ID NO: 4561303 - DNA, 25 bp, Homo sapien
taagtttgccgctggagaagttagt

SEQ ID NO: 4561304 - DNA, 25 bp, Homo sapien
ccaggtgtggaatctgtgaggttcc

SEQ ID NO: 4561305 - DNA, 25 bp, Homo sapien
tgaagtagtatcctgtatcccaggt

SEQ ID NO: 4561306 - DNA, 25 bp, Homo sapien
ctccagttctgcagatgtgagagcc

SEQ ID NO: 4561307 - DNA, 25 bp, Homo sapien
agcctgaagtagtatcctgtatccc

SEQ ID NO: 4561308 - DNA, 25 bp, Homo sapien
cagagagccacaggcggcactgttt

SEQ ID NO: 4561309 - DNA, 25 bp, Homo sapien
tactgctatggtatttccgcccaag

SEQ ID NO: 4561310 - DNA, 25 bp, Homo sapien
ggcaccctgtaatgacacctttgga

SEQ ID NO: 4561311 - DNA, 25 bp, Homo sapien
tttccaatctaacaacacaactggg

SEQ ID NO: 4561312 - DNA, 25 bp, Homo sapien
ctgctggccacagtcgctggagtgc

SEQ ID NO: 4561313 - DNA, 25 bp, Homo sapien
tgctggccacagtcgctggagtgcc

SEQ ID NO: 4561314 - DNA, 25 bp, Homo sapien
gccacagtcgctggagtgccatcct

SEQ ID NO: 4561315 - DNA, 25 bp, Homo sapien
agtcgctggagtgccatccttgtcc

SEQ ID NO: 4561316 - DNA, 25 bp, Homo sapien
cccaagctcgtttatcttgtgtcag

SEQ ID NO: 4561317 - DNA, 25 bp, Homo sapien
cagccagagtgaatcgccgaaggcc

SEQ ID NO: 4561318 - DNA, 25 bp, Homo sapien
tgctattttggaaccccctggcagc

SEQ ID NO: 4561319 - DNA, 25 bp, Homo sapien
tcacgttgctgttatgaaaaatagt

SEQ ID NO: 4561320 - DNA, 25 bp, Homo sapien
tctgatactgaagcacctgaactac

SEQ ID NO: 4561321 - DNA, 25 bp, Homo sapien
tgttactatagtgaatactgcagac

SEQ ID NO: 4561322 - DNA, 25 bp, Homo sapien
ggttcatttgcaccaagccttttgt

SEQ ID NO: 4561323 - DNA, 25 bp, Homo sapien
tggcctatggctattcttccaccgt

SEQ ID NO: 4561324 - DNA, 25 bp, Homo sapien
gggatttgcctgcaatcattttctg

SEQ ID NO: 4561325 - DNA, 25 bp, Homo sapien
gatgaaccaggatagatttcatgct

SEQ ID NO: 4561326 - DNA, 25 bp, Homo sapien
ccccttatagtgactttatgtggga

SEQ ID NO: 4561327 - DNA, 25 bp, Homo sapien
tctgatttctttgattgtctatatg

SEQ ID NO: 4561328 - DNA, 25 bp, Homo sapien
ttcgttgtgaaagcgtttcaaagcc

SEQ ID NO: 4561329 - DNA, 25 bp, Homo sapien
cgttgtgaaagcgtttcaaagccat

SEQ ID NO: 4561330 - DNA, 25 bp, Homo sapien
gttgtgaaagcgtttcaaagccatc

SEQ ID NO: 4561331 - DNA, 25 bp, Homo sapien
cttcgttgtgaaagcgtttcaaagc

SEQ ID NO: 4561332 - DNA, 25 bp, Homo sapien
catattagggttattggcatactct

SEQ ID NO: 4561333 - DNA, 25 bp, Homo sapien
tatgattctcggcagccatttggcg

SEQ ID NO: 4561334 - DNA, 25 bp, Homo sapien
tgacatccagaatatacgagtaact

SEQ ID NO: 4561335 - DNA, 25 bp, Homo sapien
aaaagtataacctcactggccttga

SEQ ID NO: 4561336 - DNA, 25 bp, Homo sapien
ccagaacaggaggtattcaaggcaa

SEQ ID NO: 4561337 - DNA, 25 bp, Homo sapien
cagaagaggttacccagcaggcttg

SEQ ID NO: 4561338 - DNA, 25 bp, Homo sapien
caaagtcagttaggcaattagttca

SEQ ID NO: 4561339 - DNA, 25 bp, Homo sapien
tgagaggcctattccaatctagtgc

SEQ ID NO: 4561340 - DNA, 25 bp, Homo sapien
ttatagatgaaaccatgaagaggag

SEQ ID NO: 4561341 - DNA, 25 bp, Homo sapien
taaattatcctattccaagatcaca

SEQ ID NO: 4561342 - DNA, 25 bp, Homo sapien
ttctatctatttcatgggtctaaaa

SEQ ID NO: 4561343 - DNA, 25 bp, Homo sapien
taaacagttgagagattgtacccat

SEQ ID NO: 4561344 - DNA, 25 bp, Homo sapien
taacgctgtgaatggccttgtgatc

SEQ ID NO: 4561345 - DNA, 25 bp, Homo sapien
gcgctatagatgtaacgctgtgaat

SEQ ID NO: 4561346 - DNA, 25 bp, Homo sapien
ttaacaagcgctatagatgtaacgc

SEQ ID NO: 4561347 - DNA, 25 bp, Homo sapien
taaataattaacaagcgctatagat

SEQ ID NO: 4561348 - DNA, 25 bp, Homo sapien
aattagcagcagatggacgactttt

SEQ ID NO: 4561349 - DNA, 25 bp, Homo sapien
tggagatctttagcaaataaactga

SEQ ID NO: 4561350 - DNA, 25 bp, Homo sapien
ctgccataattagcagcagatggac

SEQ ID NO: 4561351 - DNA, 25 bp, Homo sapien
aataaactgaaaactcggctctgtg

SEQ ID NO: 4561352 - DNA, 25 bp, Homo sapien
tgacaggattcaagaggcagccact

SEQ ID NO: 4561353 - DNA, 25 bp, Homo sapien
aagtactcttaagggtcccagatgt

SEQ ID NO: 4561354 - DNA, 25 bp, Homo sapien
gcaggattaaaatagaccagcgccg

SEQ ID NO: 4561355 - DNA, 25 bp, Homo sapien
tcggatctgccggagactgacagga

SEQ ID NO: 4561356 - DNA, 25 bp, Homo sapien
ggcccgcagagggtatgccaccatg

SEQ ID NO: 4561357 - DNA, 25 bp, Homo sapien
ggtatgccaccatgttgttttgggc

SEQ ID NO: 4561358 - DNA, 25 bp, Homo sapien
ctgcaaggcccgcagagggtatgcc

SEQ ID NO: 4561359 - DNA, 25 bp, Homo sapien
aaggcccgcagagggtatgccacca

SEQ ID NO: 4561360 - DNA, 25 bp, Homo sapien
cagagcccagatgtattgaggagct

SEQ ID NO: 4561361 - DNA, 25 bp, Homo sapien
caaagtagtgccaactccaggctca

SEQ ID NO: 4561362 - DNA, 25 bp, Homo sapien
tttgaccaaggccactcgttagtga

SEQ ID NO: 4561363 - DNA, 25 bp, Homo sapien
ttcaagcccagatcagccatcacag

SEQ ID NO: 4561364 - DNA, 25 bp, Homo sapien
cctttttcaagtaggtgagctttgg

SEQ ID NO: 4561365 - DNA, 25 bp, Homo sapien
tttcaagtaggtgagctttggtgtc

SEQ ID NO: 4561366 - DNA, 25 bp, Homo sapien
tttttcaagtaggtgagctttggtg

SEQ ID NO: 4561367 - DNA, 25 bp, Homo sapien
ccctttttcaagtaggtgagctttg

SEQ ID NO: 4561368 - DNA, 25 bp, Homo sapien
catttgccgctaatggatctgaaag

SEQ ID NO: 4561369 - DNA, 25 bp, Homo sapien
gccctgaccaaaggtccagcttcag

SEQ ID NO: 4561370 - DNA, 25 bp, Homo sapien
tagctggcccctataccatttgccg

SEQ ID NO: 4561371 - DNA, 25 bp, Homo sapien
gatctgaaagtgatggccctgacca

SEQ ID NO: 4561372 - DNA, 25 bp, Homo sapien
tccagactttgaagtgacattgcat

SEQ ID NO: 4561373 - DNA, 25 bp, Homo sapien
cagactttgaagtgacattgcattg

SEQ ID NO: 4561374 - DNA, 25 bp, Homo sapien
gaagatcgtggatggaactctttca

SEQ ID NO: 4561375 - DNA, 25 bp, Homo sapien
ttcttccctgcatcttagaagatcg

SEQ ID NO: 4561376 - DNA, 25 bp, Homo sapien
catggttttggccaacttagatctc

SEQ ID NO: 4561377 - DNA, 25 bp, Homo sapien
aaatttccgctatgcttccaaaagg

SEQ ID NO: 4561378 - DNA, 25 bp, Homo sapien
cattggcaaatttccgctatgcttc

SEQ ID NO: 4561379 - DNA, 25 bp, Homo sapien
ggtcttgaaaagctggtcggcttct

SEQ ID NO: 4561380 - DNA, 25 bp, Homo sapien
gccgatgaaggagagctcaagtaac

SEQ ID NO: 4561381 - DNA, 25 bp, Homo sapien
taactcacatgagctagatgagagg

SEQ ID NO: 4561382 - DNA, 25 bp, Homo sapien
tgccgctaccaacctggactctgag

SEQ ID NO: 4561383 - DNA, 25 bp, Homo sapien
tatgtgcaccttgtaaagaaggctc

SEQ ID NO: 4561384 - DNA, 25 bp, Homo sapien
caggcaccgtgcatgccttcgttct

SEQ ID NO: 4561385 - DNA, 25 bp, Homo sapien
gcatgccttcgttcttctgtgtttt

SEQ ID NO: 4561386 - DNA, 25 bp, Homo sapien
caccgtgcatgccttcgttcttctg

SEQ ID NO: 4561387 - DNA, 25 bp, Homo sapien
tgttttccatcttcggcggttccca

SEQ ID NO: 4561388 - DNA, 25 bp, Homo sapien
cagatccattcatggccctgacagc

SEQ ID NO: 4561389 - DNA, 25 bp, Homo sapien
ccaagaatttctccacaataacaca

SEQ ID NO: 4561390 - DNA, 25 bp, Homo sapien
tctccacaataacacacttcgcagt

SEQ ID NO: 4561391 - DNA, 25 bp, Homo sapien
tgacagccccaagaatttctccaca

SEQ ID NO: 4561392 - DNA, 25 bp, Homo sapien
tctctccagtgaacctcctgtctac

SEQ ID NO: 4561393 - DNA, 25 bp, Homo sapien
tcctgtctacatcaaaacttgctga

SEQ ID NO: 4561394 - DNA, 25 bp, Homo sapien
agcccatttgttccaaatatctctc

SEQ ID NO: 4561395 - DNA, 25 bp, Homo sapien
cttgctgaaattcccacgcagtgtc

SEQ ID NO: 4561396 - DNA, 25 bp, Homo sapien
atttctgaagggcaaaataagctcc

SEQ ID NO: 4561397 - DNA, 25 bp, Homo sapien
tgaagggcaaaataagctcccaagt

SEQ ID NO: 4561398 - DNA, 25 bp, Homo sapien
tctgaagggcaaaataagctcccaa

SEQ ID NO: 4561399 - DNA, 25 bp, Homo sapien
aagatatttctgaagggcaaaataa

SEQ ID NO: 4561400 - DNA, 25 bp, Homo sapien
ccggccaggaagatgtcacgaattc

SEQ ID NO: 4561401 - DNA, 25 bp, Homo sapien
tgtcccaagacagtgcatgaatagg

SEQ ID NO: 4561402 - DNA, 25 bp, Homo sapien
catggctgatatagaggacaatcct

SEQ ID NO: 4561403 - DNA, 25 bp, Homo sapien
aattctcaaggctagctgtcccaag

SEQ ID NO: 4561404 - DNA, 25 bp, Homo sapien
ttaacacggagttatctagcttcat

SEQ ID NO: 4561405 - DNA, 25 bp, Homo sapien
tgcacatccttccttaacacggagt

SEQ ID NO: 4561406 - DNA, 25 bp, Homo sapien
gtcagtcaagcgctgctgcacatcc

SEQ ID NO: 4561407 - DNA, 25 bp, Homo sapien
cagtcaagcgctgctgcacatcctt

SEQ ID NO: 4561408 - DNA, 25 bp, Homo sapien
ttttccatatgtgaggagctgtcac

SEQ ID NO: 4561409 - DNA, 25 bp, Homo sapien
acctctgtcaacttcagcacatctc

SEQ ID NO: 4561410 - DNA, 25 bp, Homo sapien
tttccatatgtgaggagctgtcacc

SEQ ID NO: 4561411 - DNA, 25 bp, Homo sapien
tcacctctgtcaacttcagcacatc

SEQ ID NO: 4561412 - DNA, 25 bp, Homo sapien
taatgcaccaacagccccactgatc

SEQ ID NO: 4561413 - DNA, 25 bp, Homo sapien
atttctctcctaatgcaccaacagc

SEQ ID NO: 4561414 - DNA, 25 bp, Homo sapien
tcaagtgaagaggtaatttctctcc

SEQ ID NO: 4561415 - DNA, 25 bp, Homo sapien
tgaacacacgctgtgcatctcaagt

SEQ ID NO: 4561416 - DNA, 25 bp, Homo sapien
gccgagtccttcattagttctgcta

SEQ ID NO: 4561417 - DNA, 25 bp, Homo sapien
tttgtgcgccgagtccttcattagt

SEQ ID NO: 4561418 - DNA, 25 bp, Homo sapien
gagtccttcattagttctgctatat

SEQ ID NO: 4561419 - DNA, 25 bp, Homo sapien
tgcgccgagtccttcattagttctg

SEQ ID NO: 4561420 - DNA, 25 bp, Homo sapien
tgtgaaccaatgagcgagggaacta

SEQ ID NO: 4561421 - DNA, 25 bp, Homo sapien
gataccaaaacccatgaattcccaa

SEQ ID NO: 4561422 - DNA, 25 bp, Homo sapien
cacacacggttgtccattggtatcc

SEQ ID NO: 4561423 - DNA, 25 bp, Homo sapien
gactggttctaagacccttcacaga

SEQ ID NO: 4561424 - DNA, 25 bp, Homo sapien
tattacaactaaatcgggcaccacc

SEQ ID NO: 4561425 - DNA, 25 bp, Homo sapien
cctgaagcagtgttgtgaattatta

SEQ ID NO: 4561426 - DNA, 25 bp, Homo sapien
gagcaacatggaagccctgaagcag

SEQ ID NO: 4561427 - DNA, 25 bp, Homo sapien
tgccaaaatatacgccattgcttgt

SEQ ID NO: 4561428 - DNA, 25 bp, Homo sapien
gctgctctccctaagatatctaggg

SEQ ID NO: 4561429 - DNA, 25 bp, Homo sapien
ctagggattccagggaagacacaat

SEQ ID NO: 4561430 - DNA, 25 bp, Homo sapien
aagatatctagggattccagggaag

SEQ ID NO: 4561431 - DNA, 25 bp, Homo sapien
ggaagacacaatctgcgatgtcagc

SEQ ID NO: 4561432 - DNA, 25 bp, Homo sapien
tcacctgcaataggtgctctaagca

SEQ ID NO: 4561433 - DNA, 25 bp, Homo sapien
ctggccccagaggtgcagttgctgc

SEQ ID NO: 4561434 - DNA, 25 bp, Homo sapien
ccagaggtgcagttgctgcttgtca

SEQ ID NO: 4561435 - DNA, 25 bp, Homo sapien
tgcttgtcacctgcaataggtgctc

SEQ ID NO: 4561436 - DNA, 25 bp, Homo sapien
ttttatctactcctgtcccaggcca

SEQ ID NO: 4561437 - DNA, 25 bp, Homo sapien
ggctgccttttatctactcctgtcc

SEQ ID NO: 4561438 - DNA, 25 bp, Homo sapien
gccttttatctactcctgtcccagg

SEQ ID NO: 4561439 - DNA, 25 bp, Homo sapien
tgccttttatctactcctgtcccag

SEQ ID NO: 4561440 - DNA, 25 bp, Homo sapien
taggtcagtcttgaggaataaatct

SEQ ID NO: 4561441 - DNA, 25 bp, Homo sapien
aattcagatacatacgtccatgtag

SEQ ID NO: 4561442 - DNA, 25 bp, Homo sapien
ccatgtaggtcagtcttgaggaata

SEQ ID NO: 4561443 - DNA, 25 bp, Homo sapien
tacatacgtccatgtaggtcagtct

SEQ ID NO: 4561444 - DNA, 25 bp, Homo sapien
ggtgttggagcccattccttggcct

SEQ ID NO: 4561445 - DNA, 25 bp, Homo sapien
tttggtgtcggttcctccctgcaca

SEQ ID NO: 4561446 - DNA, 25 bp, Homo sapien
cccatttgttaggatgctgacgata

SEQ ID NO: 4561447 - DNA, 25 bp, Homo sapien
catgtgaccaagtggccactcggtc

SEQ ID NO: 4561448 - DNA, 25 bp, Homo sapien
gagatggcagccctggcagaaggaa

SEQ ID NO: 4561449 - DNA, 25 bp, Homo sapien
ccaaaggagtggaagtgtatgaaaa

SEQ ID NO: 4561450 - DNA, 25 bp, Homo sapien
aagtgtatgaaaagcgagccaaggg

SEQ ID NO: 4561451 - DNA, 25 bp, Homo sapien
taggttcgaagggagatggcagccc

SEQ ID NO: 4561452 - DNA, 25 bp, Homo sapien
aggagatacccaacaggcccaaagg

SEQ ID NO: 4561453 - DNA, 25 bp, Homo sapien
caaggtggttaaacactcaggacag

SEQ ID NO: 4561454 - DNA, 25 bp, Homo sapien
cgattatcctctatcttcactttaa

SEQ ID NO: 4561455 - DNA, 25 bp, Homo sapien
ggacagtgaggagatacccaacagg

SEQ ID NO: 4561456 - DNA, 25 bp, Homo sapien
caggagcatgcagcagatcagccaa

SEQ ID NO: 4561457 - DNA, 25 bp, Homo sapien
gcagatcagccaatctcctcctagg

SEQ ID NO: 4561458 - DNA, 25 bp, Homo sapien
gatcagccaatctcctcctagggcc

SEQ ID NO: 4561459 - DNA, 25 bp, Homo sapien
aacaacttcatcaggagcatgcagc

SEQ ID NO: 4561460 - DNA, 25 bp, Homo sapien
cacttttggcgatacacatatggga

SEQ ID NO: 4561461 - DNA, 25 bp, Homo sapien
cgatacacatatgggaggttggaaa

SEQ ID NO: 4561462 - DNA, 25 bp, Homo sapien
caaaattcacttttggcgatacaca

SEQ ID NO: 4561463 - DNA, 25 bp, Homo sapien
ggaggttggaaatagctagaaatta

SEQ ID NO: 4561464 - DNA, 25 bp, Homo sapien
tgccacttgcaaagaaaatttggaa

SEQ ID NO: 4561465 - DNA, 25 bp, Homo sapien
gctgccacttgcaaagaaaatttgg

SEQ ID NO: 4561466 - DNA, 25 bp, Homo sapien
ctgccacttgcaaagaaaatttgga

SEQ ID NO: 4561467 - DNA, 25 bp, Homo sapien
gccacttgcaaagaaaatttggaat

SEQ ID NO: 4561468 - DNA, 25 bp, Homo sapien
tgtagcttcctaggggcagatattt

SEQ ID NO: 4561469 - DNA, 25 bp, Homo sapien
tttgtagcttcctaggggcagatat

SEQ ID NO: 4561470 - DNA, 25 bp, Homo sapien
tgatgaacaggtataaacctctttt

SEQ ID NO: 4561471 - DNA, 25 bp, Homo sapien
gcttcctaggggcagatatttccat

SEQ ID NO: 4561472 - DNA, 25 bp, Homo sapien
gagggcttcagccactcagcatatg

SEQ ID NO: 4561473 - DNA, 25 bp, Homo sapien
ccttctggacagaatactgttattt

SEQ ID NO: 4561474 - DNA, 25 bp, Homo sapien
tgtcccattatcacccacgtggctt

SEQ ID NO: 4561475 - DNA, 25 bp, Homo sapien
tattttttgtcccattatcacccac

SEQ ID NO: 4561476 - DNA, 25 bp, Homo sapien
cagcccaatgtcagccagtgagacc

SEQ ID NO: 4561477 - DNA, 25 bp, Homo sapien
agcccaatgtcagccagtgagacca

SEQ ID NO: 4561478 - DNA, 25 bp, Homo sapien
acagcccaatgtcagccagtgagac

SEQ ID NO: 4561479 - DNA, 25 bp, Homo sapien
gcccaatgtcagccagtgagaccag

SEQ ID NO: 4561480 - DNA, 25 bp, Homo sapien
cagagtttgttgatgcatgtagaag

SEQ ID NO: 4561481 - DNA, 25 bp, Homo sapien
gttgatgcatgtagaagagcatttt

SEQ ID NO: 4561482 - DNA, 25 bp, Homo sapien
attctgcagccagcaaaagaacaat

SEQ ID NO: 4561483 - DNA, 25 bp, Homo sapien
ctcttgacttggcagagtttgttga

SEQ ID NO: 4561484 - DNA, 25 bp, Homo sapien
gaacagagacgctgtgaagctcttc

SEQ ID NO: 4561485 - DNA, 25 bp, Homo sapien
tctgtgaaacacataagtggcaggc

SEQ ID NO: 4561486 - DNA, 25 bp, Homo sapien
gaagctcttccccagcgaatcagcg

SEQ ID NO: 4561487 - DNA, 25 bp, Homo sapien
gagcgttgccaatgttcctgataac

SEQ ID NO: 4561488 - DNA, 25 bp, Homo sapien
tgctctctgggacttgatcttttca

SEQ ID NO: 4561489 - DNA, 25 bp, Homo sapien
ttgctccacccatgagtcctggtgc

SEQ ID NO: 4561490 - DNA, 25 bp, Homo sapien
tccttgctccacccatgagtcctgg

SEQ ID NO: 4561491 - DNA, 25 bp, Homo sapien
gtgctctctgggacttgatcttttc

SEQ ID NO: 4561492 - DNA, 25 bp, Homo sapien
tctctccaggcaacgtgacataaaa

SEQ ID NO: 4561493 - DNA, 25 bp, Homo sapien
tctccaggcaacgtgacataaaact

SEQ ID NO: 4561494 - DNA, 25 bp, Homo sapien
ctctccaggcaacgtgacataaaac

SEQ ID NO: 4561495 - DNA, 25 bp, Homo sapien
gtctgtccccaacacctagagcatg

SEQ ID NO: 4561496 - DNA, 25 bp, Homo sapien
ctagagcatgctcgtcccttggcca

SEQ ID NO: 4561497 - DNA, 25 bp, Homo sapien
tgctacttcccacagatcaggccct

SEQ ID NO: 4561498 - DNA, 25 bp, Homo sapien
ttgggtggcaccaggtttgtccagt

SEQ ID NO: 4561499 - DNA, 25 bp, Homo sapien
gatggatgatccatgtggggaactt

SEQ ID NO: 4561500 - DNA, 25 bp, Homo sapien
ggggaacttcggaagtcccatgatg

SEQ ID NO: 4561501 - DNA, 25 bp, Homo sapien
gatgatccatgtggggaacttcgga

SEQ ID NO: 4561502 - DNA, 25 bp, Homo sapien
catgtggggaacttcggaagtccca

SEQ ID NO: 4561503 - DNA, 25 bp, Homo sapien
tcctgccacgtcttctttcttgagt

SEQ ID NO: 4561504 - DNA, 25 bp, Homo sapien
cctgccacgtcttctttcttgagtg

SEQ ID NO: 4561505 - DNA, 25 bp, Homo sapien
gaacaaagtcctggtaagctggacc

SEQ ID NO: 4561506 - DNA, 25 bp, Homo sapien
ggaacaaagtcctggtaagctggac

SEQ ID NO: 4561507 - DNA, 25 bp, Homo sapien
caaagtcctggtaagctggaccagc

SEQ ID NO: 4561508 - DNA, 25 bp, Homo sapien
aacaaagtcctggtaagctggacca

SEQ ID NO: 4561509 - DNA, 25 bp, Homo sapien
cccctactcctgacttactatgcat

SEQ ID NO: 4561510 - DNA, 25 bp, Homo sapien
tgatggcttcgcagggcagcatagc

SEQ ID NO: 4561511 - DNA, 25 bp, Homo sapien
tgaccaatagccaggcccactgatg

SEQ ID NO: 4561512 - DNA, 25 bp, Homo sapien
gtctgccatccaggagaccgcaggg

SEQ ID NO: 4561513 - DNA, 25 bp, Homo sapien
aattttaaaataatcgtactgtatg

SEQ ID NO: 4561514 - DNA, 25 bp, Homo sapien
tttaaaataatcgtactgtatgcta

SEQ ID NO: 4561515 - DNA, 25 bp, Homo sapien
agcatgctcgtagtttgctgatgaa

SEQ ID NO: 4561516 - DNA, 25 bp, Homo sapien
aaaataatcgtactgtatgctaaac

SEQ ID NO: 4561517 - DNA, 25 bp, Homo sapien
tatttgatacccgattgatttcaga

SEQ ID NO: 4561518 - DNA, 25 bp, Homo sapien
tgcctctgtcgtgagctgctgagct

SEQ ID NO: 4561519 - DNA, 25 bp, Homo sapien
tcaagtcaactgcagcaaaataatg

SEQ ID NO: 4561520 - DNA, 25 bp, Homo sapien
actgaatatttgatacccgattgat

SEQ ID NO: 4561521 - DNA, 25 bp, Homo sapien
caagggtgcgcaattgcttgctcaa

SEQ ID NO: 4561522 - DNA, 25 bp, Homo sapien
cacaatgtgaatgggcctcgtccaa

SEQ ID NO: 4561523 - DNA, 25 bp, Homo sapien
tgtgtgtcaactcggctaggcaagg

SEQ ID NO: 4561524 - DNA, 25 bp, Homo sapien
gagtttacagcctactgccctgtgg

SEQ ID NO: 4561525 - DNA, 25 bp, Homo sapien
ggatttgcagcagcggcactgctgg

SEQ ID NO: 4561526 - DNA, 25 bp, Homo sapien
tggatttgcagcagcggcactgctg

SEQ ID NO: 4561527 - DNA, 25 bp, Homo sapien
tttgcagcagcggcactgctgggca

SEQ ID NO: 4561528 - DNA, 25 bp, Homo sapien
atttgcagcagcggcactgctgggc

SEQ ID NO: 4561529 - DNA, 25 bp, Homo sapien
ctgccctgctgtgattcgtcttagt

SEQ ID NO: 4561530 - DNA, 25 bp, Homo sapien
cctgctgtgattcgtcttagtggag

SEQ ID NO: 4561531 - DNA, 25 bp, Homo sapien
ctgtgattcgtcttagtggagatgc

SEQ ID NO: 4561532 - DNA, 25 bp, Homo sapien
tgtgattcgtcttagtggagatgcc

SEQ ID NO: 4561533 - DNA, 25 bp, Homo sapien
caaggcaaagctttgagcagcacaa

SEQ ID NO: 4561534 - DNA, 25 bp, Homo sapien
aaggaagcaggaggagtcgtggccc

SEQ ID NO: 4561535 - DNA, 25 bp, Homo sapien
ccaatggagaacactgagagtgaac

SEQ ID NO: 4561536 - DNA, 25 bp, Homo sapien
gcaaagctttgagcagcacaaggaa

SEQ ID NO: 4561537 - DNA, 25 bp, Homo sapien
agggtgccccgttgtggagggcaca

SEQ ID NO: 4561538 - DNA, 25 bp, Homo sapien
gggcacaagctgggcactgcgaaca

SEQ ID NO: 4561539 - DNA, 25 bp, Homo sapien
ggtgccccgttgtggagggcacaag

SEQ ID NO: 4561540 - DNA, 25 bp, Homo sapien
gggtgccccgttgtggagggcacaa

SEQ ID NO: 4561541 - DNA, 25 bp, Homo sapien
tttcggggttggagctggaatcctc

SEQ ID NO: 4561542 - DNA, 25 bp, Homo sapien
ggttggagctggaatcctcccgagt

SEQ ID NO: 4561543 - DNA, 25 bp, Homo sapien
atcctcccgagtctgtgattggcca

SEQ ID NO: 4561544 - DNA, 25 bp, Homo sapien
gaggcttccttggagcacgggcaca

SEQ ID NO: 4561545 - DNA, 25 bp, Homo sapien
gggtgacccaggcaaacattgcagc

SEQ ID NO: 4561546 - DNA, 25 bp, Homo sapien
ccattggaggtgagctcggagtccc

SEQ ID NO: 4561547 - DNA, 25 bp, Homo sapien
gaggtgagctcggagtccctcctcc

SEQ ID NO: 4561548 - DNA, 25 bp, Homo sapien
aatgctgtgggcctcgcttgatgcc

SEQ ID NO: 4561549 - DNA, 25 bp, Homo sapien
tgttgttgacatctcatccaccgcg

SEQ ID NO: 4561550 - DNA, 25 bp, Homo sapien
tgggttccagctttatccggtttgc

SEQ ID NO: 4561551 - DNA, 25 bp, Homo sapien
taagtcaattgcagtcgttcctccc

SEQ ID NO: 4561552 - DNA, 25 bp, Homo sapien
gatgcctccagggtggaattcctta

SEQ ID NO: 4561553 - DNA, 25 bp, Homo sapien
gaaaccacggaaggcatgggctcaa

SEQ ID NO: 4561554 - DNA, 25 bp, Homo sapien
cagccagtcgctgagagaaaccacg

SEQ ID NO: 4561555 - DNA, 25 bp, Homo sapien
gacagcggtatggtagaacatccca

SEQ ID NO: 4561556 - DNA, 25 bp, Homo sapien
gaagagtcttcaagccaaagtcggc

SEQ ID NO: 4561557 - DNA, 25 bp, Homo sapien
ccaagcgtgtccacatctccatgaa

SEQ ID NO: 4561558 - DNA, 25 bp, Homo sapien
tgaccaggccttaaaaaacatgaat

SEQ ID NO: 4561559 - DNA, 25 bp, Homo sapien
caaacagagatcaaacatttagggc

SEQ ID NO: 4561560 - DNA, 25 bp, Homo sapien
gagcaaatctaaaggttcaaccaaa

SEQ ID NO: 4561561 - DNA, 25 bp, Homo sapien
gactgctagcatatacatggttaca

SEQ ID NO: 4561562 - DNA, 25 bp, Homo sapien
gaatgctacattacagagggcagag

SEQ ID NO: 4561563 - DNA, 25 bp, Homo sapien
cattctaggcgtgcattaggagtaa

SEQ ID NO: 4561564 - DNA, 25 bp, Homo sapien
caacatttgttcatgggttaaagcc

SEQ ID NO: 4561565 - DNA, 25 bp, Homo sapien
taagatggcaattggggtctgagaa

SEQ ID NO: 4561566 - DNA, 25 bp, Homo sapien
atggcaattggggtctgagaagtct

SEQ ID NO: 4561567 - DNA, 25 bp, Homo sapien
gcaattggggtctgagaagtctcac

SEQ ID NO: 4561568 - DNA, 25 bp, Homo sapien
ttaagatggcaattggggtctgaga

SEQ ID NO: 4561569 - DNA, 25 bp, Homo sapien
tttgctgctgtctcgttgactgtgc

SEQ ID NO: 4561570 - DNA, 25 bp, Homo sapien
gctgctgtctcgttgactgtgcatc

SEQ ID NO: 4561571 - DNA, 25 bp, Homo sapien
ctgtctcgttgactgtgcatcctca

SEQ ID NO: 4561572 - DNA, 25 bp, Homo sapien
tgctgtctcgttgactgtgcatcct

SEQ ID NO: 4561573 - DNA, 25 bp, Homo sapien
gctcatttggttgaagggaaaggta

SEQ ID NO: 4561574 - DNA, 25 bp, Homo sapien
ggaaaggtatgaaagcaagggctga

SEQ ID NO: 4561575 - DNA, 25 bp, Homo sapien
tttaaagacaagtataggctcattt

SEQ ID NO: 4561576 - DNA, 25 bp, Homo sapien
caagtataggctcatttggttgaag

SEQ ID NO: 4561577 - DNA, 25 bp, Homo sapien
caggtaaacttttcgaacacagcct

SEQ ID NO: 4561578 - DNA, 25 bp, Homo sapien
tcaggtaaacttttcgaacacagcc

SEQ ID NO: 4561579 - DNA, 25 bp, Homo sapien
gtaaacttttcgaacacagccttga

SEQ ID NO: 4561580 - DNA, 25 bp, Homo sapien
ccttgattggcactgtcttttttgt

SEQ ID NO: 4561581 - DNA, 25 bp, Homo sapien
attttgtgtagttaactgcaaaaca

SEQ ID NO: 4561582 - DNA, 25 bp, Homo sapien
gctctaaaggtgtgacatgttttct

SEQ ID NO: 4561583 - DNA, 25 bp, Homo sapien
taaaagcaatgaactcttagctcta

SEQ ID NO: 4561584 - DNA, 25 bp, Homo sapien
actgcaaaacagtctaaaagcaatg

SEQ ID NO: 4561585 - DNA, 25 bp, Homo sapien
ataaggcccaggatttcaacttcct

SEQ ID NO: 4561586 - DNA, 25 bp, Homo sapien
cacataaggcccaggatttcaactt

SEQ ID NO: 4561587 - DNA, 25 bp, Homo sapien
acacataaggcccaggatttcaact

SEQ ID NO: 4561588 - DNA, 25 bp, Homo sapien
cataaggcccaggatttcaacttcc

SEQ ID NO: 4561589 - DNA, 25 bp, Homo sapien
gacagtttattcttgccaatatttc

SEQ ID NO: 4561590 - DNA, 25 bp, Homo sapien
aagacagtttattcttgccaatatt

SEQ ID NO: 4561591 - DNA, 25 bp, Homo sapien
acagtttattcttgccaatatttca

SEQ ID NO: 4561592 - DNA, 25 bp, Homo sapien
cagtttattcttgccaatatttcac

SEQ ID NO: 4561593 - DNA, 25 bp, Homo sapien
tgctcactggctagaggagaaacaa

SEQ ID NO: 4561594 - DNA, 25 bp, Homo sapien
tatgccttccagtcaagaacgaacg

SEQ ID NO: 4561595 - DNA, 25 bp, Homo sapien
ttaactgaccaaaaagctgataggg

SEQ ID NO: 4561596 - DNA, 25 bp, Homo sapien
cacttgaggcctactaataaagatc

SEQ ID NO: 4561597 - DNA, 25 bp, Homo sapien
tagccccagcctagtaagtggcagt

SEQ ID NO: 4561598 - DNA, 25 bp, Homo sapien
tctctatgtgggtaagggaaatgac

SEQ ID NO: 4561599 - DNA, 25 bp, Homo sapien
tgagcttagcgccagaccttgaagg

SEQ ID NO: 4561600 - DNA, 25 bp, Homo sapien
gataccatggtgaagctgcgagaaa

SEQ ID NO: 4561601 - DNA, 25 bp, Homo sapien
atcccaataatactaccgttctcct

SEQ ID NO: 4561602 - DNA, 25 bp, Homo sapien
catcccaataatactaccgttctcc

SEQ ID NO: 4561603 - DNA, 25 bp, Homo sapien
tactcacacactccctcagaatggt

SEQ ID NO: 4561604 - DNA, 25 bp, Homo sapien
tcaaatcttggtcttctactcacac

SEQ ID NO: 4561605 - DNA, 25 bp, Homo sapien
tctcaactcgagatttttatccaaa

SEQ ID NO: 4561606 - DNA, 25 bp, Homo sapien
tcagaatggtctctcagatctcaac

SEQ ID NO: 4561607 - DNA, 25 bp, Homo sapien
gagattcaaagcacccttgttgggt

SEQ ID NO: 4561608 - DNA, 25 bp, Homo sapien
cagtataacatccaaaccgccaagg

SEQ ID NO: 4561609 - DNA, 25 bp, Homo sapien
tatatctctgtatagtgccctggac

SEQ ID NO: 4561610 - DNA, 25 bp, Homo sapien
tctgcgtaagagaccaagaagtcag

SEQ ID NO: 4561611 - DNA, 25 bp, Homo sapien
tatgagctgctacctatgactgatc

SEQ ID NO: 4561612 - DNA, 25 bp, Homo sapien
ggtaccaagtatgcaagaggccaag

SEQ ID NO: 4561613 - DNA, 25 bp, Homo sapien
tctagtttacctatgcaagagctac

SEQ ID NO: 4561614 - DNA, 25 bp, Homo sapien
gatcttactggtcaaagtgccatac

SEQ ID NO: 4561615 - DNA, 25 bp, Homo sapien
taattacatagggacaaaacgtgca

SEQ ID NO: 4561616 - DNA, 25 bp, Homo sapien
gcaaatctactatgtcctaggcaaa

SEQ ID NO: 4561617 - DNA, 25 bp, Homo sapien
tgctgacattgctggtaaaggatat

SEQ ID NO: 4561618 - DNA, 25 bp, Homo sapien
taggcaaactagaacgcatgtatgg

SEQ ID NO: 4561619 - DNA, 25 bp, Homo sapien
acagctatgtcattcttgtacatac

SEQ ID NO: 4561620 - DNA, 25 bp, Homo sapien
tactggggtggccaaactgtgccct

SEQ ID NO: 4561621 - DNA, 25 bp, Homo sapien
gaaacacagtatggcccttaaagtc

SEQ ID NO: 4561622 - DNA, 25 bp, Homo sapien
gcccaagacctgttttaatatataa

SEQ ID NO: 4561623 - DNA, 25 bp, Homo sapien
gcagtcatgaggaatctaatgcaga

SEQ ID NO: 4561624 - DNA, 25 bp, Homo sapien
tggagaatcctctcttacatgagga

SEQ ID NO: 4561625 - DNA, 25 bp, Homo sapien
ctaatgagcaaatcacatgactgga

SEQ ID NO: 4561626 - DNA, 25 bp, Homo sapien
gaggattctgacatgactggttaac

SEQ ID NO: 4561627 - DNA, 25 bp, Homo sapien
tggtatcggtaagtctctccttcca

SEQ ID NO: 4561628 - DNA, 25 bp, Homo sapien
ggaatagcacagtggtatcggtaag

SEQ ID NO: 4561629 - DNA, 25 bp, Homo sapien
ctatttgtaaccataaggattgtct

SEQ ID NO: 4561630 - DNA, 25 bp, Homo sapien
tgtaaccataaggattgtcttcttg

SEQ ID NO: 4561631 - DNA, 25 bp, Homo sapien
ccactggtttacatagaggtattag

SEQ ID NO: 4561632 - DNA, 25 bp, Homo sapien
taacttccactgttgccttaaaaga

SEQ ID NO: 4561633 - DNA, 25 bp, Homo sapien
tgggtctctgaaccacctaacataa

SEQ ID NO: 4561634 - DNA, 25 bp, Homo sapien
gatcttatacgttaaacatgcgtgg

SEQ ID NO: 4561635 - DNA, 25 bp, Homo sapien
tgtaatgtcacctcaatagatggca

SEQ ID NO: 4561636 - DNA, 25 bp, Homo sapien
tattcagtcactaatggcagcaggg

SEQ ID NO: 4561637 - DNA, 25 bp, Homo sapien
gagaggagtgcagatttcacagcaa

SEQ ID NO: 4561638 - DNA, 25 bp, Homo sapien
gaagaggaatccacaaagaactggg

SEQ ID NO: 4561639 - DNA, 25 bp, Homo sapien
tatctaggcacaagaaaggtttgtc

SEQ ID NO: 4561640 - DNA, 25 bp, Homo sapien
cctttgtatatctagcacacgctgg

SEQ ID NO: 4561641 - DNA, 25 bp, Homo sapien
gaatctcaggaagggtaactattgg

SEQ ID NO: 4561642 - DNA, 25 bp, Homo sapien
ctcggtcccttaaggacagaaggct

SEQ ID NO: 4561643 - DNA, 25 bp, Homo sapien
tttattattttgataactgcaatcc

SEQ ID NO: 4561644 - DNA, 25 bp, Homo sapien
cttaaaatacataatccaactgaac

SEQ ID NO: 4561645 - DNA, 25 bp, Homo sapien
taatccaactgaacaattatatgtt

SEQ ID NO: 4561646 - DNA, 25 bp, Homo sapien
tattattttgataactgcaatcctt

SEQ ID NO: 4561647 - DNA, 25 bp, Homo sapien
caggctcagagcaactgacaattca

SEQ ID NO: 4561648 - DNA, 25 bp, Homo sapien
gcttctgagctcaataaaggctttc

SEQ ID NO: 4561649 - DNA, 25 bp, Homo sapien
tattacttgaggtctaagggcaggc

SEQ ID NO: 4561650 - DNA, 25 bp, Homo sapien
tctattaaacgcagaagagagctga

SEQ ID NO: 4561651 - DNA, 25 bp, Homo sapien
taaaattgacaatggaattcacaca

SEQ ID NO: 4561652 - DNA, 25 bp, Homo sapien
tgtagtcaatcccactactatgaaa

SEQ ID NO: 4561653 - DNA, 25 bp, Homo sapien
cacacacagtcaattaacaccacag

SEQ ID NO: 4561654 - DNA, 25 bp, Homo sapien
atgaaaagttcagatggaggtgaga

SEQ ID NO: 4561655 - DNA, 25 bp, Homo sapien
ttcctgtctgtcataaggacgaatg

SEQ ID NO: 4561656 - DNA, 25 bp, Homo sapien
gccatcttcatggatcaggcgaggg

SEQ ID NO: 4561657 - DNA, 25 bp, Homo sapien
gggacggaggctagatacttcctca

SEQ ID NO: 4561658 - DNA, 25 bp, Homo sapien
tcataaggacgaatgatgccatctt

SEQ ID NO: 4561659 - DNA, 25 bp, Homo sapien
tactactggccatatctacgattcc

SEQ ID NO: 4561660 - DNA, 25 bp, Homo sapien
tctacgattccaccagttggacggg

SEQ ID NO: 4561661 - DNA, 25 bp, Homo sapien
caattcctttaaagaatccagcagc

SEQ ID NO: 4561662 - DNA, 25 bp, Homo sapien
gccttggaaggtactactggccata

SEQ ID NO: 4561663 - DNA, 25 bp, Homo sapien
gagctcaaccaaaacctgggccaga

SEQ ID NO: 4561664 - DNA, 25 bp, Homo sapien
caaccaaaacctgggccagatactg

SEQ ID NO: 4561665 - DNA, 25 bp, Homo sapien
cagaaaaccaatgaccatgaatgga

SEQ ID NO: 4561666 - DNA, 25 bp, Homo sapien
gagcaagtttgagctcaaccaaaac

SEQ ID NO: 4561667 - DNA, 25 bp, Homo sapien
ggttttgttattattccagtcactc

SEQ ID NO: 4561668 - DNA, 25 bp, Homo sapien
acaggttttgttattattccagtca

SEQ ID NO: 4561669 - DNA, 25 bp, Homo sapien
tattattccagtcactccaccaaca

SEQ ID NO: 4561670 - DNA, 25 bp, Homo sapien
ttgttattattccagtcactccacc

SEQ ID NO: 4561671 - DNA, 25 bp, Homo sapien
ggcagttcctggattatcaacaatt

SEQ ID NO: 4561672 - DNA, 25 bp, Homo sapien
cataggtaccatgtatctctgcttc

SEQ ID NO: 4561673 - DNA, 25 bp, Homo sapien
ctcccagggacaggtaataacctgg

SEQ ID NO: 4561674 - DNA, 25 bp, Homo sapien
aacagtcaattgctgatgacctgca

SEQ ID NO: 4561675 - DNA, 25 bp, Homo sapien
tgtccattgtaattgctgccaaacc

SEQ ID NO: 4561676 - DNA, 25 bp, Homo sapien
gggctgtcgactcaactcttctctt

SEQ ID NO: 4561677 - DNA, 25 bp, Homo sapien
aggctgtctccaaaatctctgggct

SEQ ID NO: 4561678 - DNA, 25 bp, Homo sapien
ttcccaacagaaccggtgattcgag

SEQ ID NO: 4561679 - DNA, 25 bp, Homo sapien
gtccaaagaggcttctcactccaat

SEQ ID NO: 4561680 - DNA, 25 bp, Homo sapien
aatcactaacccctctgcaaattct

SEQ ID NO: 4561681 - DNA, 25 bp, Homo sapien
tccaatcactaacccctctgcaaat

SEQ ID NO: 4561682 - DNA, 25 bp, Homo sapien
caaagaggcttctcactccaatcac

SEQ ID NO: 4561683 - DNA, 25 bp, Homo sapien
ctggaagggttcatagaataaagct

SEQ ID NO: 4561684 - DNA, 25 bp, Homo sapien
gaagggttcatagaataaagcttca

SEQ ID NO: 4561685 - DNA, 25 bp, Homo sapien
taaagcttcaactccttcagacaga

SEQ ID NO: 4561686 - DNA, 25 bp, Homo sapien
aaagcttcaactccttcagacagac

SEQ ID NO: 4561687 - DNA, 25 bp, Homo sapien
tctaattaatccaaatgggtttcca

SEQ ID NO: 4561688 - DNA, 25 bp, Homo sapien
caaggacatacatctgtttcaagaa

SEQ ID NO: 4561689 - DNA, 25 bp, Homo sapien
tacatctaaccccaatacaaggaca

SEQ ID NO: 4561690 - DNA, 25 bp, Homo sapien
tttccaagtacatctaaccccaata

SEQ ID NO: 4561691 - DNA, 25 bp, Homo sapien
gatatcgaatttcataataagcaag

SEQ ID NO: 4561692 - DNA, 25 bp, Homo sapien
tctctcttgtagaactgatatcgaa

SEQ ID NO: 4561693 - DNA, 25 bp, Homo sapien
tgttcactgtaatgcctaacaacac

SEQ ID NO: 4561694 - DNA, 25 bp, Homo sapien
caacactccatataagctgatctct

SEQ ID NO: 4561695 - DNA, 25 bp, Homo sapien
tcagtcagagtagcacctatgcttt

SEQ ID NO: 4561696 - DNA, 25 bp, Homo sapien
cagagtagcacctatgcttttcaac

SEQ ID NO: 4561697 - DNA, 25 bp, Homo sapien
catcagtcagagtagcacctatgct

SEQ ID NO: 4561698 - DNA, 25 bp, Homo sapien
ccacatcagtcagagtagcacctat

SEQ ID NO: 4561699 - DNA, 25 bp, Homo sapien
aactaagaattgacatatcagtcat

SEQ ID NO: 4561700 - DNA, 25 bp, Homo sapien
tatcagtcattgaagtctccattaa

SEQ ID NO: 4561701 - DNA, 25 bp, Homo sapien
catatcagtcattgaagtctccatt

SEQ ID NO: 4561702 - DNA, 25 bp, Homo sapien
aaactaagaattgacatatcagtca

SEQ ID NO: 4561703 - DNA, 25 bp, Homo sapien
ttgatcaatttttaaggccatttcc

SEQ ID NO: 4561704 - DNA, 25 bp, Homo sapien
tcttctttcagcttcagggtctgtt

SEQ ID NO: 4561705 - DNA, 25 bp, Homo sapien
ctcctagaaacccttgatcaatttt

SEQ ID NO: 4561706 - DNA, 25 bp, Homo sapien
gggtaaacagtgcaataatagctcc

SEQ ID NO: 4561707 - DNA, 25 bp, Homo sapien
tcttgtgatgacactcacatcaatg

SEQ ID NO: 4561708 - DNA, 25 bp, Homo sapien
ttgaactgtaagactttactgtact

SEQ ID NO: 4561709 - DNA, 25 bp, Homo sapien
tgaactgtaagactttactgtactc

SEQ ID NO: 4561710 - DNA, 25 bp, Homo sapien
atctaaagcaatagattttggaggg

SEQ ID NO: 4561711 - DNA, 25 bp, Homo sapien
ttgcacctggtaactgattatcaac

SEQ ID NO: 4561712 - DNA, 25 bp, Homo sapien
ctgaatctaaagcaatagattttgg

SEQ ID NO: 4561713 - DNA, 25 bp, Homo sapien
acaggatgaaatacaacagggaaca

SEQ ID NO: 4561714 - DNA, 25 bp, Homo sapien
tagggaggcgcatttccattggatc

SEQ ID NO: 4561715 - DNA, 25 bp, Homo sapien
gctacgaatagggaggcgcatttcc

SEQ ID NO: 4561716 - DNA, 25 bp, Homo sapien
gtctcgtttaatagggctacgaata

SEQ ID NO: 4561717 - DNA, 25 bp, Homo sapien
gaagccagtacaacctggcccttaa

SEQ ID NO: 4561718 - DNA, 25 bp, Homo sapien
ctgcttttgactaaatggcttccat

SEQ ID NO: 4561719 - DNA, 25 bp, Homo sapien
gtttcacctcccaaacaacaccaga

SEQ ID NO: 4561720 - DNA, 25 bp, Homo sapien
tccagccatggtctcttgatatttg

SEQ ID NO: 4561721 - DNA, 25 bp, Homo sapien
ggattgttccaataagattatctgc

SEQ ID NO: 4561722 - DNA, 25 bp, Homo sapien
tgatagatcctatcctggttatatt

SEQ ID NO: 4561723 - DNA, 25 bp, Homo sapien
tatattaatggtatgtatgatacca

SEQ ID NO: 4561724 - DNA, 25 bp, Homo sapien
ccattagtttctcaggtgttgtgca

SEQ ID NO: 4561725 - DNA, 25 bp, Homo sapien
caaacgtgtgcttcttgatagatcc

SEQ ID NO: 4561726 - DNA, 25 bp, Homo sapien
cggctattatgaacttaatgccttt

SEQ ID NO: 4561727 - DNA, 25 bp, Homo sapien
tttcttcaaatcggctattatgaac

SEQ ID NO: 4561728 - DNA, 25 bp, Homo sapien
atcggctattatgaacttaatgcct

SEQ ID NO: 4561729 - DNA, 25 bp, Homo sapien
gctattatgaacttaatgcctttta

SEQ ID NO: 4561730 - DNA, 25 bp, Homo sapien
ggaaaccaaggcaacatcatcggtg

SEQ ID NO: 4561731 - DNA, 25 bp, Homo sapien
tatcccaatataggaaacttcctgc

SEQ ID NO: 4561732 - DNA, 25 bp, Homo sapien
tctctggcgcccatccagaaatgat

SEQ ID NO: 4561733 - DNA, 25 bp, Homo sapien
ccaagactgtggagagacaaggtta

SEQ ID NO: 4561734 - DNA, 25 bp, Homo sapien
tcattaaacccacacatagtaactt

SEQ ID NO: 4561735 - DNA, 25 bp, Homo sapien
taaacccacacatagtaacttgtta

SEQ ID NO: 4561736 - DNA, 25 bp, Homo sapien
cattaaacccacacatagtaacttg

SEQ ID NO: 4561737 - DNA, 25 bp, Homo sapien
attaaacccacacatagtaacttgt

SEQ ID NO: 4561738 - DNA, 25 bp, Homo sapien
gatggtatatgaattctttgggccc

SEQ ID NO: 4561739 - DNA, 25 bp, Homo sapien
tacataggcaagataaagcaggtct

SEQ ID NO: 4561740 - DNA, 25 bp, Homo sapien
ttagttcaattaggacaaggagtca

SEQ ID NO: 4561741 - DNA, 25 bp, Homo sapien
ggagcaattcctatatcagatggga

SEQ ID NO: 4561742 - DNA, 25 bp, Homo sapien
tgtcaggtaactcatatagcactca

SEQ ID NO: 4561743 - DNA, 25 bp, Homo sapien
ggtaactcatatagcactcattcac

SEQ ID NO: 4561744 - DNA, 25 bp, Homo sapien
tcatatagcactcattcacatcaaa

SEQ ID NO: 4561745 - DNA, 25 bp, Homo sapien
ttccttcactgtcaggtaactcata

SEQ ID NO: 4561746 - DNA, 25 bp, Homo sapien
gcatatgtccatgtaagttttctgg

SEQ ID NO: 4561747 - DNA, 25 bp, Homo sapien
aagtcgagcctgtcttggcagcaag

SEQ ID NO: 4561748 - DNA, 25 bp, Homo sapien
taccagtaggatctgcccaggcaaa

SEQ ID NO: 4561749 - DNA, 25 bp, Homo sapien
tttaacagatcatgttccccaacat

SEQ ID NO: 4561750 - DNA, 25 bp, Homo sapien
cagttgaatgttcggcagtgtttac

SEQ ID NO: 4561751 - DNA, 25 bp, Homo sapien
gatccctcatggtaatcagaaaaag

SEQ ID NO: 4561752 - DNA, 25 bp, Homo sapien
ctctgtttgtatgtgaggatgtccc

SEQ ID NO: 4561753 - DNA, 25 bp, Homo sapien
tatcaaggcaggtgcagatccctca

SEQ ID NO: 4561754 - DNA, 25 bp, Homo sapien
tcaataaagtgccattatcctgtcg

SEQ ID NO: 4561755 - DNA, 25 bp, Homo sapien
ggtttggaagatccttcacagccca

SEQ ID NO: 4561756 - DNA, 25 bp, Homo sapien
tatcctgtcggttataaaagaatgg

SEQ ID NO: 4561757 - DNA, 25 bp, Homo sapien
gcccaccactctcacacaaagtttg

SEQ ID NO: 4561758 - DNA, 25 bp, Homo sapien
atattttaggaatcagttgtaacaa

SEQ ID NO: 4561759 - DNA, 25 bp, Homo sapien
gtatattttaggaatcagttgtaac

SEQ ID NO: 4561760 - DNA, 25 bp, Homo sapien
tattttaggaatcagttgtaacaaa

SEQ ID NO: 4561761 - DNA, 25 bp, Homo sapien
tatattttaggaatcagttgtaaca

SEQ ID NO: 4561762 - DNA, 25 bp, Homo sapien
tattcgtgaaaggttgaaactgctc

SEQ ID NO: 4561763 - DNA, 25 bp, Homo sapien
caatggtacaaaagggagtcagggt

SEQ ID NO: 4561764 - DNA, 25 bp, Homo sapien
tagttggcattgagccatcagatgc

SEQ ID NO: 4561765 - DNA, 25 bp, Homo sapien
cagatgcaatctcgccaacttctag

SEQ ID NO: 4561766 - DNA, 25 bp, Homo sapien
gctcaactggatggattaaactcaa

SEQ ID NO: 4561767 - DNA, 25 bp, Homo sapien
taactaacgacttacaatgacagat

SEQ ID NO: 4561768 - DNA, 25 bp, Homo sapien
aaatttgtagtgataacagccctcc

SEQ ID NO: 4561769 - DNA, 25 bp, Homo sapien
gaataaggattctagcatactgtga

SEQ ID NO: 4561770 - DNA, 25 bp, Homo sapien
ccataacttcccactgtatccaatg

SEQ ID NO: 4561771 - DNA, 25 bp, Homo sapien
aacttcccactgtatccaatgagaa

SEQ ID NO: 4561772 - DNA, 25 bp, Homo sapien
acttcacacacccataacttcccac

SEQ ID NO: 4561773 - DNA, 25 bp, Homo sapien
ataacttcccactgtatccaatgag

SEQ ID NO: 4561774 - DNA, 25 bp, Homo sapien
tctgaacgatactggagaacccggg

SEQ ID NO: 4561775 - DNA, 25 bp, Homo sapien
tgtatcacgtatgcggaaatgtcca

SEQ ID NO: 4561776 - DNA, 25 bp, Homo sapien
tcctgacgtggactgacaggtcgac

SEQ ID NO: 4561777 - DNA, 25 bp, Homo sapien
caatagggactaaagacagacagca

SEQ ID NO: 4561778 - DNA, 25 bp, Homo sapien
tcactatgagaggtaagaagctgac

SEQ ID NO: 4561779 - DNA, 25 bp, Homo sapien
gcagagcaactgtattcactatgag

SEQ ID NO: 4561780 - DNA, 25 bp, Homo sapien
tatgtagctcaattcatcaggcaga

SEQ ID NO: 4561781 - DNA, 25 bp, Homo sapien
cagctggctggataaacaattgaca

SEQ ID NO: 4561782 - DNA, 25 bp, Homo sapien
gcgctccaatagcttaacattctta

SEQ ID NO: 4561783 - DNA, 25 bp, Homo sapien
tggctatcccaatgcgctccaatag

SEQ ID NO: 4561784 - DNA, 25 bp, Homo sapien
tatgaatctaaaggaacatggaact

SEQ ID NO: 4561785 - DNA, 25 bp, Homo sapien
atgcaatggagaaatggtttttgat

SEQ ID NO: 4561786 - DNA, 25 bp, Homo sapien
tagaggagagcgaagggtaattact

SEQ ID NO: 4561787 - DNA, 25 bp, Homo sapien
aatgactggcattgggattccgtac

SEQ ID NO: 4561788 - DNA, 25 bp, Homo sapien
tgtaccaagacagagtcagaatgac

SEQ ID NO: 4561789 - DNA, 25 bp, Homo sapien
tatacaatcgccgtccaggtctggc

SEQ ID NO: 4561790 - DNA, 25 bp, Homo sapien
gagattacaattgggcttcacctta

SEQ ID NO: 4561791 - DNA, 25 bp, Homo sapien
gacggctcaatatagataggttccc

SEQ ID NO: 4561792 - DNA, 25 bp, Homo sapien
tcaccttaatgggaacacctacagc

SEQ ID NO: 4561793 - DNA, 25 bp, Homo sapien
cttgacttgaaggtaccatgctggc

SEQ ID NO: 4561794 - DNA, 25 bp, Homo sapien
gaagaaatatgaattgccatttgtg

SEQ ID NO: 4561795 - DNA, 25 bp, Homo sapien
tttcctgaagaaatatgaattgcca

SEQ ID NO: 4561796 - DNA, 25 bp, Homo sapien
gaaatatgaattgccatttgtggct

SEQ ID NO: 4561797 - DNA, 25 bp, Homo sapien
tcctgaagaaatatgaattgccatt

SEQ ID NO: 4561798 - DNA, 25 bp, Homo sapien
agcatggatctcattgtaatagtgc

SEQ ID NO: 4561799 - DNA, 25 bp, Homo sapien
gacagcatggatctcattgtaatag

SEQ ID NO: 4561800 - DNA, 25 bp, Homo sapien
cctccactctctcaatcagtggctc

SEQ ID NO: 4561801 - DNA, 25 bp, Homo sapien
tgtctcttcccctccactctctcaa

SEQ ID NO: 4561802 - DNA, 25 bp, Homo sapien
aagctttccgttatttctgttgccg

SEQ ID NO: 4561803 - DNA, 25 bp, Homo sapien
aaaggtacagttcgatgtccaaggc

SEQ ID NO: 4561804 - DNA, 25 bp, Homo sapien
tagactctgccaataataaaggtac

SEQ ID NO: 4561805 - DNA, 25 bp, Homo sapien
tgtagtgtcacgtcagcaacagcag

SEQ ID NO: 4561806 - DNA, 25 bp, Homo sapien
ttcctgaagcccacgtacatttttc

SEQ ID NO: 4561807 - DNA, 25 bp, Homo sapien
tcctgaagcccacgtacatttttcc

SEQ ID NO: 4561808 - DNA, 25 bp, Homo sapien
tgaagcccacgtacatttttccata

SEQ ID NO: 4561809 - DNA, 25 bp, Homo sapien
cctgaagcccacgtacatttttcca

SEQ ID NO: 4561810 - DNA, 25 bp, Homo sapien
aaaagggcaagcgagcactttcaga

SEQ ID NO: 4561811 - DNA, 25 bp, Homo sapien
gagaaaagggcaagcgagcactttc

SEQ ID NO: 4561812 - DNA, 25 bp, Homo sapien
ctctgagaaaagggcaagcgagcac

SEQ ID NO: 4561813 - DNA, 25 bp, Homo sapien
aagggcaagcgagcactttcagatc

SEQ ID NO: 4561814 - DNA, 25 bp, Homo sapien
gtcaggctggcaacaaataccactt

SEQ ID NO: 4561815 - DNA, 25 bp, Homo sapien
gaaaggttgcactgaaacgaggctg

SEQ ID NO: 4561816 - DNA, 25 bp, Homo sapien
agaagcttccatcatctgttcgagt

SEQ ID NO: 4561817 - DNA, 25 bp, Homo sapien
ggagcatcagcctttgtcaggctgg

SEQ ID NO: 4561818 - DNA, 25 bp, Homo sapien
tggactctgaggcacagctttgata

SEQ ID NO: 4561819 - DNA, 25 bp, Homo sapien
tcaagaacagcatcaatttgacttc

SEQ ID NO: 4561820 - DNA, 25 bp, Homo sapien
catagaactgttgttatcttggtca

SEQ ID NO: 4561821 - DNA, 25 bp, Homo sapien
ctttctctatcttgaccttccctgt

SEQ ID NO: 4561822 - DNA, 25 bp, Homo sapien
catgctattcattattttattcttg

SEQ ID NO: 4561823 - DNA, 25 bp, Homo sapien
aacatgctattcattattttattct

SEQ ID NO: 4561824 - DNA, 25 bp, Homo sapien
ctgaaaaaaaacatgctattcatta

SEQ ID NO: 4561825 - DNA, 25 bp, Homo sapien
gaaaaaaaacatgctattcattatt

SEQ ID NO: 4561826 - DNA, 25 bp, Homo sapien
tgcatgtcttaagtttaacgctgac

SEQ ID NO: 4561827 - DNA, 25 bp, Homo sapien
taagtttaacgctgacattcattga

SEQ ID NO: 4561828 - DNA, 25 bp, Homo sapien
tcgatgttgctctctcaattccttc

SEQ ID NO: 4561829 - DNA, 25 bp, Homo sapien
tcatcaagggtgcatgtcttaagtt

SEQ ID NO: 4561830 - DNA, 25 bp, Homo sapien
gatgtagtctgagttcaccaagttg

SEQ ID NO: 4561831 - DNA, 25 bp, Homo sapien
actgtcattatgaaatgcaactcca

SEQ ID NO: 4561832 - DNA, 25 bp, Homo sapien
ccataagatgtagtctgagttcacc

SEQ ID NO: 4561833 - DNA, 25 bp, Homo sapien
ctgaggaggccataagatgtagtct

SEQ ID NO: 4561834 - DNA, 25 bp, Homo sapien
gatatcattgttataaaggataatg

SEQ ID NO: 4561835 - DNA, 25 bp, Homo sapien
cattgttataaaggataatggaaag

SEQ ID NO: 4561836 - DNA, 25 bp, Homo sapien
gtgaaagtcaaattggagactgaca

SEQ ID NO: 4561837 - DNA, 25 bp, Homo sapien
ctggttcatagagagctttgagtct

SEQ ID NO: 4561838 - DNA, 25 bp, Homo sapien
cacagactgtgtagggcttggttgt

SEQ ID NO: 4561839 - DNA, 25 bp, Homo sapien
tggtcaggtacacttgaaacatcaa

SEQ ID NO: 4561840 - DNA, 25 bp, Homo sapien
ttttctcactcttacagtctcctgc

SEQ ID NO: 4561841 - DNA, 25 bp, Homo sapien
tttgagatggtcaggtacacttgaa

SEQ ID NO: 4561842 - DNA, 25 bp, Homo sapien
tgagctgatatgcaaccttctagct

SEQ ID NO: 4561843 - DNA, 25 bp, Homo sapien
cataggcacacaagaatcacaggat

SEQ ID NO: 4561844 - DNA, 25 bp, Homo sapien
taaaaataacgctgtggccggagca

SEQ ID NO: 4561845 - DNA, 25 bp, Homo sapien
cacaggattcctatacttccacgac

SEQ ID NO: 4561846 - DNA, 25 bp, Homo sapien
gctgctaagtttcgctgtatggaca

SEQ ID NO: 4561847 - DNA, 25 bp, Homo sapien
catgctgctgctaagtttcgctgta

SEQ ID NO: 4561848 - DNA, 25 bp, Homo sapien
ggaatttgcacataccatgctgctg

SEQ ID NO: 4561849 - DNA, 25 bp, Homo sapien
tttatctccatccctggaatttgca

SEQ ID NO: 4561850 - DNA, 25 bp, Homo sapien
ttgtggcaagctagcctgcaaaata

SEQ ID NO: 4561851 - DNA, 25 bp, Homo sapien
tttgtggcaagctagcctgcaaaat

SEQ ID NO: 4561852 - DNA, 25 bp, Homo sapien
gacagcttcaactgagtgagttcga

SEQ ID NO: 4561853 - DNA, 25 bp, Homo sapien
tgttccataggaaccaagctaaact

SEQ ID NO: 4561854 - DNA, 25 bp, Homo sapien
tatccatcaaaaggcggaaactctt

SEQ ID NO: 4561855 - DNA, 25 bp, Homo sapien
gcattaggtgatactgaagactgag

SEQ ID NO: 4561856 - DNA, 25 bp, Homo sapien
cacgtgttcttcagagcacaattca

SEQ ID NO: 4561857 - DNA, 25 bp, Homo sapien
attaacgcacgaacagaaaccaaat

SEQ ID NO: 4561858 - DNA, 25 bp, Homo sapien
gtggactagataaaggaaacgtggc

SEQ ID NO: 4561859 - DNA, 25 bp, Homo sapien
cactgcggactactacagagaggga

SEQ ID NO: 4561860 - DNA, 25 bp, Homo sapien
ggataaagagtcagttggaacctaa

SEQ ID NO: 4561861 - DNA, 25 bp, Homo sapien
ctaagtttgccgtctactttggaca

SEQ ID NO: 4561862 - DNA, 25 bp, Homo sapien
tttggacatatcagcataggcctct

SEQ ID NO: 4561863 - DNA, 25 bp, Homo sapien
cttcatctcccaaaatagagacagc

SEQ ID NO: 4561864 - DNA, 25 bp, Homo sapien
tttaagtctggcaaacacatcagtc

SEQ ID NO: 4561865 - DNA, 25 bp, Homo sapien
cacatcagtctgcttaggcttcaca

SEQ ID NO: 4561866 - DNA, 25 bp, Homo sapien
tggactgcaaatctacattcataac

SEQ ID NO: 4561867 - DNA, 25 bp, Homo sapien
taactataatatctttaagtctggc

SEQ ID NO: 4561868 - DNA, 25 bp, Homo sapien
cattaaatgcatttaattcagctgt

SEQ ID NO: 4561869 - DNA, 25 bp, Homo sapien
gcaatgttacacttctgatcacaga

SEQ ID NO: 4561870 - DNA, 25 bp, Homo sapien
attttaatatctgcaatgttacact

SEQ ID NO: 4561871 - DNA, 25 bp, Homo sapien
taaatgcatttaattcagctgtgat

SEQ ID NO: 4561872 - DNA, 25 bp, Homo sapien
ctttaaatcaaacacatccttttgg

SEQ ID NO: 4561873 - DNA, 25 bp, Homo sapien
cacatccttttgggaaatgttgctg

SEQ ID NO: 4561874 - DNA, 25 bp, Homo sapien
tccttttgggaaatgttgctggata

SEQ ID NO: 4561875 - DNA, 25 bp, Homo sapien
ttaaatcaaacacatccttttggga

SEQ ID NO: 4561876 - DNA, 25 bp, Homo sapien
aatgaagtactaagtctaaggatgc

SEQ ID NO: 4561877 - DNA, 25 bp, Homo sapien
ccccacaagtggtttcagctcggat

SEQ ID NO: 4561878 - DNA, 25 bp, Homo sapien
taaagcttccaaatgaagtactaag

SEQ ID NO: 4561879 - DNA, 25 bp, Homo sapien
agctttgacagcgatacttctggac

SEQ ID NO: 4561880 - DNA, 25 bp, Homo sapien
gtctctgtttggtactgtcatgaat

SEQ ID NO: 4561881 - DNA, 25 bp, Homo sapien
ctctgtttggtactgtcatgaatag

SEQ ID NO: 4561882 - DNA, 25 bp, Homo sapien
atagttttaaattctggtccatcac

SEQ ID NO: 4561883 - DNA, 25 bp, Homo sapien
tgaatagttttaaattctggtccat

SEQ ID NO: 4561884 - DNA, 25 bp, Homo sapien
aatgtgaagaggttcccctttagag

SEQ ID NO: 4561885 - DNA, 25 bp, Homo sapien
taacattttcagaaggggttcgtca

SEQ ID NO: 4561886 - DNA, 25 bp, Homo sapien
cagaaggggttcgtcagtcacatta

SEQ ID NO: 4561887 - DNA, 25 bp, Homo sapien
taatgtgaagaggttcccctttaga

SEQ ID NO: 4561888 - DNA, 25 bp, Homo sapien
tttagctcatgtaaaggccttcctt

SEQ ID NO: 4561889 - DNA, 25 bp, Homo sapien
gattttttcatcaaagtaaccacaa

SEQ ID NO: 4561890 - DNA, 25 bp, Homo sapien
ccaagttgcaggacatttagctcat

SEQ ID NO: 4561891 - DNA, 25 bp, Homo sapien
taagctttagcagtcatgtcatagg

SEQ ID NO: 4561892 - DNA, 25 bp, Homo sapien
caaaattcagcagcatattaatgat

SEQ ID NO: 4561893 - DNA, 25 bp, Homo sapien
ctttaatttcaaaattcagcagcat

SEQ ID NO: 4561894 - DNA, 25 bp, Homo sapien
ttcaaaattcagcagcatattaatg

SEQ ID NO: 4561895 - DNA, 25 bp, Homo sapien
aaattcagcagcatattaatgatgt

SEQ ID NO: 4561896 - DNA, 25 bp, Homo sapien
catgtacatcttgtgatatagagat

SEQ ID NO: 4561897 - DNA, 25 bp, Homo sapien
tttttgaatcatgtacatcttgtga

SEQ ID NO: 4561898 - DNA, 25 bp, Homo sapien
gaatcatgtacatcttgtgatatag

SEQ ID NO: 4561899 - DNA, 25 bp, Homo sapien
tattttttgaatcatgtacatcttg

SEQ ID NO: 4561900 - DNA, 25 bp, Homo sapien
cactttatccaagtcttcagtaccc

SEQ ID NO: 4561901 - DNA, 25 bp, Homo sapien
tttatccaagtcttcagtaccctca

SEQ ID NO: 4561902 - DNA, 25 bp, Homo sapien
ttggtttcactttatccaagtcttc

SEQ ID NO: 4561903 - DNA, 25 bp, Homo sapien
cttgtactcttggtttcactttatc

SEQ ID NO: 4561904 - DNA, 25 bp, Homo sapien
tagattccgatttacaagaaattcc

SEQ ID NO: 4561905 - DNA, 25 bp, Homo sapien
attcattgaatcaagatgtccttta

SEQ ID NO: 4561906 - DNA, 25 bp, Homo sapien
ggtaccaagatgcagctagattccg

SEQ ID NO: 4561907 - DNA, 25 bp, Homo sapien
aatatcaggatggtagatgcctggc

SEQ ID NO: 4561908 - DNA, 25 bp, Homo sapien
gatctaccactactgcattggtgga

SEQ ID NO: 4561909 - DNA, 25 bp, Homo sapien
ggcagcactcagagactctttggct

SEQ ID NO: 4561910 - DNA, 25 bp, Homo sapien
ctgtgggatgactataaccggtgct

SEQ ID NO: 4561911 - DNA, 25 bp, Homo sapien
gatggaaacacgaaaactcctctgg

SEQ ID NO: 4561912 - DNA, 25 bp, Homo sapien
tggacatgtcagtatacaaatcccc

SEQ ID NO: 4561913 - DNA, 25 bp, Homo sapien
gatagacaatctgaatacagccaac

SEQ ID NO: 4561914 - DNA, 25 bp, Homo sapien
cacaccatccactttggacatgtca

SEQ ID NO: 4561915 - DNA, 25 bp, Homo sapien
cagtagcatctggatacaaatccaa

SEQ ID NO: 4561916 - DNA, 25 bp, Homo sapien
tgaaaaacagagacttgaatgtact

SEQ ID NO: 4561917 - DNA, 25 bp, Homo sapien
ctgaaaaacagagacttgaatgtac

SEQ ID NO: 4561918 - DNA, 25 bp, Homo sapien
tcttatgaactgtctttggatcaac

SEQ ID NO: 4561919 - DNA, 25 bp, Homo sapien
aacatctgtgacaataatattttct

SEQ ID NO: 4561920 - DNA, 25 bp, Homo sapien
aaagtgactgctttcttgactggag

SEQ ID NO: 4561921 - DNA, 25 bp, Homo sapien
tttctagtcgggcaaaaagtgactg

SEQ ID NO: 4561922 - DNA, 25 bp, Homo sapien
ttgaatcttgatttcggcgatattg

SEQ ID NO: 4561923 - DNA, 25 bp, Homo sapien
tcttttcgttgcaaacaatgacaca

SEQ ID NO: 4561924 - DNA, 25 bp, Homo sapien
ttggcaaatagcctgaaatcaataa

SEQ ID NO: 4561925 - DNA, 25 bp, Homo sapien
ggcgatattgttcttttcgttgcaa

SEQ ID NO: 4561926 - DNA, 25 bp, Homo sapien
gcaacacttatgctttgatcatcag

SEQ ID NO: 4561927 - DNA, 25 bp, Homo sapien
caacagatttaaagatgaaaaggcc

SEQ ID NO: 4561928 - DNA, 25 bp, Homo sapien
cgacaagagcttgtgtttgcagcaa

SEQ ID NO: 4561929 - DNA, 25 bp, Homo sapien
ggtaattaatagaagcgacaagagc

SEQ ID NO: 4561930 - DNA, 25 bp, Homo sapien
cagtttgaaaactaggtccattctt

SEQ ID NO: 4561931 - DNA, 25 bp, Homo sapien
agcagtttgaaaactaggtccattc

SEQ ID NO: 4561932 - DNA, 25 bp, Homo sapien
tttgaaaactaggtccattcttatc

SEQ ID NO: 4561933 - DNA, 25 bp, Homo sapien
gaaaactaggtccattcttatcagc

SEQ ID NO: 4561934 - DNA, 25 bp, Homo sapien
aaaagatctaatccaggtttgtcag

SEQ ID NO: 4561935 - DNA, 25 bp, Homo sapien
aaagatctaatccaggtttgtcaga

SEQ ID NO: 4561936 - DNA, 25 bp, Homo sapien
aagagctaatcaagtgaaggggctt

SEQ ID NO: 4561937 - DNA, 25 bp, Homo sapien
tcagaagagctaatcaagtgaaggg

SEQ ID NO: 4561938 - DNA, 25 bp, Homo sapien
ctttctgctgtttagtaaattccaa

SEQ ID NO: 4561939 - DNA, 25 bp, Homo sapien
aatgttctcattgtggcctctgttc

SEQ ID NO: 4561940 - DNA, 25 bp, Homo sapien
tgttcctaactgagtaacattaaat

SEQ ID NO: 4561941 - DNA, 25 bp, Homo sapien
gcctctgttcctaactgagtaacat

SEQ ID NO: 4561942 - DNA, 25 bp, Homo sapien
tcatttgggacctctgcagcttttt

SEQ ID NO: 4561943 - DNA, 25 bp, Homo sapien
ttcaaacttgagtagaagattgatg

SEQ ID NO: 4561944 - DNA, 25 bp, Homo sapien
ttttaagttctgatcctttcatact

SEQ ID NO: 4561945 - DNA, 25 bp, Homo sapien
gagtagaagattgatgagctcctca

SEQ ID NO: 4561946 - DNA, 25 bp, Homo sapien
cagtgtctagcaatagtgaagtacc

SEQ ID NO: 4561947 - DNA, 25 bp, Homo sapien
gattccacagtgtctagcaatagtg

SEQ ID NO: 4561948 - DNA, 25 bp, Homo sapien
agtgaagtaccaagtagaccttttg

SEQ ID NO: 4561949 - DNA, 25 bp, Homo sapien
caatagtgaagtaccaagtagacct

SEQ ID NO: 4561950 - DNA, 25 bp, Homo sapien
ctgaaataataggaattgaggatac

SEQ ID NO: 4561951 - DNA, 25 bp, Homo sapien
tggcaaaggtatactgttcatcaaa

SEQ ID NO: 4561952 - DNA, 25 bp, Homo sapien
tcaaatatagcacatctttcatctt

SEQ ID NO: 4561953 - DNA, 25 bp, Homo sapien
tcatcaaatatagcacatctttcat

SEQ ID NO: 4561954 - DNA, 25 bp, Homo sapien
gtggcaaaggtatactgttcatcaa

SEQ ID NO: 4561955 - DNA, 25 bp, Homo sapien
catgcatcaaaggaagtcctcctga

SEQ ID NO: 4561956 - DNA, 25 bp, Homo sapien
cagaaattctcacatgcatcaaagg

SEQ ID NO: 4561957 - DNA, 25 bp, Homo sapien
ttctcacatgcatcaaaggaagtcc

SEQ ID NO: 4561958 - DNA, 25 bp, Homo sapien
atcaaaggaagtcctcctgacactt

SEQ ID NO: 4561959 - DNA, 25 bp, Homo sapien
gttgatggatgctgaaatcgacact

SEQ ID NO: 4561960 - DNA, 25 bp, Homo sapien
aatatccatgggttgcaatatatgc

SEQ ID NO: 4561961 - DNA, 25 bp, Homo sapien
ctaatgtctttttctaccatggcct

SEQ ID NO: 4561962 - DNA, 25 bp, Homo sapien
taccatggccttagccaactcaaca

SEQ ID NO: 4561963 - DNA, 25 bp, Homo sapien
gtcatatgccttatccattatttct

SEQ ID NO: 4561964 - DNA, 25 bp, Homo sapien
ctgctcttgcaaaaagtagttgtac

SEQ ID NO: 4561965 - DNA, 25 bp, Homo sapien
tcaaacttgtcatatgccttatcca

SEQ ID NO: 4561966 - DNA, 25 bp, Homo sapien
ccagagatgaattagtagtcttctg

SEQ ID NO: 4561967 - DNA, 25 bp, Homo sapien
tggaaacccgtctgtggaactacta

SEQ ID NO: 4561968 - DNA, 25 bp, Homo sapien
cttttcgagtttcaataatatgtgt

SEQ ID NO: 4561969 - DNA, 25 bp, Homo sapien
tcaaggacttttcgagtttcaataa

SEQ ID NO: 4561970 - DNA, 25 bp, Homo sapien
ctactagataagaaggcttcagatt

SEQ ID NO: 4561971 - DNA, 25 bp, Homo sapien
catcaatgttgctgatgttatttgc

SEQ ID NO: 4561972 - DNA, 25 bp, Homo sapien
tgctcaagatccaatcccttatttg

SEQ ID NO: 4561973 - DNA, 25 bp, Homo sapien
gctgatgttatttgctcaagatcca

SEQ ID NO: 4561974 - DNA, 25 bp, Homo sapien
ccaatcccttatttgattgaaagaa

SEQ ID NO: 4561975 - DNA, 25 bp, Homo sapien
taaagagttactttctccttgcact

SEQ ID NO: 4561976 - DNA, 25 bp, Homo sapien
tatgtcagaagcataagatgattta

SEQ ID NO: 4561977 - DNA, 25 bp, Homo sapien
taagaaaacagtatgtcagaagcat

SEQ ID NO: 4561978 - DNA, 25 bp, Homo sapien
ataaagagttactttctccttgcac

SEQ ID NO: 4561979 - DNA, 25 bp, Homo sapien
gatggcacaatatcctgctgtctca

SEQ ID NO: 4561980 - DNA, 25 bp, Homo sapien
tctggtcagcaggactatcctccgg

SEQ ID NO: 4561981 - DNA, 25 bp, Homo sapien
ctgggactgaacaatcagagtctgg

SEQ ID NO: 4561982 - DNA, 25 bp, Homo sapien
atcatagatgacctccacaggctgg

SEQ ID NO: 4561983 - DNA, 25 bp, Homo sapien
cctggtcgctgagatacttgagtgc

SEQ ID NO: 4561984 - DNA, 25 bp, Homo sapien
ggtgcttactaacttcagggtcata

SEQ ID NO: 4561985 - DNA, 25 bp, Homo sapien
tcagggtcataatatgggcaacata

SEQ ID NO: 4561986 - DNA, 25 bp, Homo sapien
tttctcttatcgtaacagaggtgct

SEQ ID NO: 4561987 - DNA, 25 bp, Homo sapien
ctgcttaggtaaagttaggttgtgg

SEQ ID NO: 4561988 - DNA, 25 bp, Homo sapien
gtactctcactataaccaatggcag

SEQ ID NO: 4561989 - DNA, 25 bp, Homo sapien
tctggagtcataaggtcatcaatag

SEQ ID NO: 4561990 - DNA, 25 bp, Homo sapien
taaagttaggttgtgggtactctca

SEQ ID NO: 4561991 - DNA, 25 bp, Homo sapien
acgtttctcgcctgtgtcagcagac

SEQ ID NO: 4561992 - DNA, 25 bp, Homo sapien
actaaaccagcctccacgtttctcg

SEQ ID NO: 4561993 - DNA, 25 bp, Homo sapien
aatgattcttcgtcctttttcttag

SEQ ID NO: 4561994 - DNA, 25 bp, Homo sapien
ggaatcaatgattcttcgtcctttt

SEQ ID NO: 4561995 - DNA, 25 bp, Homo sapien
ctcgtgaaacttcaatttcttgatc

SEQ ID NO: 4561996 - DNA, 25 bp, Homo sapien
gttaaaaacatctagagtcttctcc

SEQ ID NO: 4561997 - DNA, 25 bp, Homo sapien
taaaaacatctagagtcttctccaa

SEQ ID NO: 4561998 - DNA, 25 bp, Homo sapien
aaaacatctagagtcttctccaagt

SEQ ID NO: 4561999 - DNA, 25 bp, Homo sapien
aaaaacatctagagtcttctccaag

SEQ ID NO: 4562000 - DNA, 25 bp, Homo sapien
tgttactccatgaccacatctgtgt

SEQ ID NO: 4562001 - DNA, 25 bp, Homo sapien
ataactcttgagtaactgcctgtgc

SEQ ID NO: 4562002 - DNA, 25 bp, Homo sapien
tataccttcttatatgaacttcaag

SEQ ID NO: 4562003 - DNA, 25 bp, Homo sapien
gcttttttatgttactccatgacca

SEQ ID NO: 4562004 - DNA, 25 bp, Homo sapien
ttgtatttcctataaggcgcattcc

SEQ ID NO: 4562005 - DNA, 25 bp, Homo sapien
catcgtcgaccattggtatgaagtg

SEQ ID NO: 4562006 - DNA, 25 bp, Homo sapien
ccactgactccaaaaggtcaatcat

SEQ ID NO: 4562007 - DNA, 25 bp, Homo sapien
ggcgcattcctaaccatataatcca

SEQ ID NO: 4562008 - DNA, 25 bp, Homo sapien
gattcatgtagagttttgcagaggc

SEQ ID NO: 4562009 - DNA, 25 bp, Homo sapien
ccagtttgggcgttttgagctctga

SEQ ID NO: 4562010 - DNA, 25 bp, Homo sapien
ttctgcataaggattcatgtagagt

SEQ ID NO: 4562011 - DNA, 25 bp, Homo sapien
tttgtatttctatgttgcaatccag

SEQ ID NO: 4562012 - DNA, 25 bp, Homo sapien
atatttccacttgtaagaatttcat

SEQ ID NO: 4562013 - DNA, 25 bp, Homo sapien
tatttccacttgtaagaatttcatt

SEQ ID NO: 4562014 - DNA, 25 bp, Homo sapien
ctgttcccttgatctctggtaagac

SEQ ID NO: 4562015 - DNA, 25 bp, Homo sapien
tacattccagtaggcgctaagacta

SEQ ID NO: 4562016 - DNA, 25 bp, Homo sapien
ggcgctaagactatcaagtcgtata

SEQ ID NO: 4562017 - DNA, 25 bp, Homo sapien
ctctggtaagacatgctgcaattta

SEQ ID NO: 4562018 - DNA, 25 bp, Homo sapien
catggagtccagtgttcatttgcag

SEQ ID NO: 4562019 - DNA, 25 bp, Homo sapien
aatatgcatggagtccagtgttcat

SEQ ID NO: 4562020 - DNA, 25 bp, Homo sapien
tgtatataattttgtctgcttcatt

SEQ ID NO: 4562021 - DNA, 25 bp, Homo sapien
gcttcatttaatatgcatggagtcc

SEQ ID NO: 4562022 - DNA, 25 bp, Homo sapien
tctcctttactagtcttactagcag

SEQ ID NO: 4562023 - DNA, 25 bp, Homo sapien
ttctcctttactagtcttactagca

SEQ ID NO: 4562024 - DNA, 25 bp, Homo sapien
tgacaccaaatgaaagaggccgctt

SEQ ID NO: 4562025 - DNA, 25 bp, Homo sapien
tgaaagaggccgctttggatcagtg

SEQ ID NO: 4562026 - DNA, 25 bp, Homo sapien
ccaaatgaaagaggccgctttggat

SEQ ID NO: 4562027 - DNA, 25 bp, Homo sapien
caccaaatgaaagaggccgctttgg

SEQ ID NO: 4562028 - DNA, 25 bp, Homo sapien
ttgagttgccaatttttccacaaat

SEQ ID NO: 4562029 - DNA, 25 bp, Homo sapien
acttgagttgccaatttttccacaa

SEQ ID NO: 4562030 - DNA, 25 bp, Homo sapien
catatttaatgtgaatatctgtgat

SEQ ID NO: 4562031 - DNA, 25 bp, Homo sapien
catcttcatatttaatgtgaatatc

SEQ ID NO: 4562032 - DNA, 25 bp, Homo sapien
ttctccaagccatatatgaactccc

SEQ ID NO: 4562033 - DNA, 25 bp, Homo sapien
caagccatatatgaactcccctgaa

SEQ ID NO: 4562034 - DNA, 25 bp, Homo sapien
gtaaacaaagttctccaagccatat

SEQ ID NO: 4562035 - DNA, 25 bp, Homo sapien
caaagttctccaagccatatatgaa

SEQ ID NO: 4562036 - DNA, 25 bp, Homo sapien
ccaaaatgcaaagcaatttaaagac

SEQ ID NO: 4562037 - DNA, 25 bp, Homo sapien
aaaatgcaaagcaatttaaagacac

SEQ ID NO: 4562038 - DNA, 25 bp, Homo sapien
caaaatgcaaagcaatttaaagaca

SEQ ID NO: 4562039 - DNA, 25 bp, Homo sapien
accaaaatgcaaagcaatttaaaga

SEQ ID NO: 4562040 - DNA, 25 bp, Homo sapien
ttttcatcatatccttgttcttgct

SEQ ID NO: 4562041 - DNA, 25 bp, Homo sapien
tactctttttcatcatatccttgtt

SEQ ID NO: 4562042 - DNA, 25 bp, Homo sapien
ctactctttttcatcatatccttgt

SEQ ID NO: 4562043 - DNA, 25 bp, Homo sapien
tctttttcatcatatccttgttctt

SEQ ID NO: 4562044 - DNA, 25 bp, Homo sapien
tctgtttaacatcctgcaaggattt

SEQ ID NO: 4562045 - DNA, 25 bp, Homo sapien
tcttttacagcatcatacttaatac

SEQ ID NO: 4562046 - DNA, 25 bp, Homo sapien
ttcaattcgggatagctctttctgt

SEQ ID NO: 4562047 - DNA, 25 bp, Homo sapien
gggcttcttcaattcgggatagctc

SEQ ID NO: 4562048 - DNA, 25 bp, Homo sapien
tataatccttccagggtcgcaacaa

SEQ ID NO: 4562049 - DNA, 25 bp, Homo sapien
ctccagggacaacaagcaggtataa

SEQ ID NO: 4562050 - DNA, 25 bp, Homo sapien
tctccataaaggttcttccaaggaa

SEQ ID NO: 4562051 - DNA, 25 bp, Homo sapien
gcaacaactgcttctccataaaggt

SEQ ID NO: 4562052 - DNA, 25 bp, Homo sapien
caatttggccagccttgactttaaa

SEQ ID NO: 4562053 - DNA, 25 bp, Homo sapien
ctttaaaaggaacatccaattcact

SEQ ID NO: 4562054 - DNA, 25 bp, Homo sapien
tgactttaaaaggaacatccaattc

SEQ ID NO: 4562055 - DNA, 25 bp, Homo sapien
ttggccagccttgactttaaaagga

SEQ ID NO: 4562056 - DNA, 25 bp, Homo sapien
ttcttttatctgtagattatctaaa

SEQ ID NO: 4562057 - DNA, 25 bp, Homo sapien
tcttttatctgtagattatctaaag

SEQ ID NO: 4562058 - DNA, 25 bp, Homo sapien
ttttatctgtagattatctaaagcc

SEQ ID NO: 4562059 - DNA, 25 bp, Homo sapien
cttttatctgtagattatctaaagc

SEQ ID NO: 4562060 - DNA, 25 bp, Homo sapien
tataaagttaatgttggccactggc

SEQ ID NO: 4562061 - DNA, 25 bp, Homo sapien
tactcctcaatgtcatggtaaaacc

SEQ ID NO: 4562062 - DNA, 25 bp, Homo sapien
ggatgttcactagacacaatatgtg

SEQ ID NO: 4562063 - DNA, 25 bp, Homo sapien
tgagctgataaagctaggagaatcc

SEQ ID NO: 4562064 - DNA, 25 bp, Homo sapien
ctccacgcgataccgaaacagaaag

SEQ ID NO: 4562065 - DNA, 25 bp, Homo sapien
ttttatgctgtagggccaaaggggc

SEQ ID NO: 4562066 - DNA, 25 bp, Homo sapien
ccacgcgataccgaaacagaaaggg

SEQ ID NO: 4562067 - DNA, 25 bp, Homo sapien
tcactccacgcgataccgaaacaga

SEQ ID NO: 4562068 - DNA, 25 bp, Homo sapien
atagtcccccaggaagcggttcagc

SEQ ID NO: 4562069 - DNA, 25 bp, Homo sapien
ggttcagcaagtccgcgaccaccga

SEQ ID NO: 4562070 - DNA, 25 bp, Homo sapien
ccccaggaagcggttcagcaagtcc

SEQ ID NO: 4562071 - DNA, 25 bp, Homo sapien
aagcggttcagcaagtccgcgacca

SEQ ID NO: 4562072 - DNA, 25 bp, Homo sapien
gctgagggctgcgaccagcgctgca

SEQ ID NO: 4562073 - DNA, 25 bp, Homo sapien
aaccgcccggcgcagctgagggctg

SEQ ID NO: 4562074 - DNA, 25 bp, Homo sapien
cggaaccgcccggcgcagctgaggg

SEQ ID NO: 4562075 - DNA, 25 bp, Homo sapien
ggaggagccggaaccgcccggcgca

SEQ ID NO: 4562076 - DNA, 25 bp, Homo sapien
tttcttaaacaacctaggcttgcac

SEQ ID NO: 4562077 - DNA, 25 bp, Homo sapien
gctttgctacgaggaagtgtctgag

SEQ ID NO: 4562078 - DNA, 25 bp, Homo sapien
aagtgtctgagaaactattcgtgta

SEQ ID NO: 4562079 - DNA, 25 bp, Homo sapien
tgtagtcacaagcattaataagtgc

SEQ ID NO: 4562080 - DNA, 25 bp, Homo sapien
gggattcgtctgaggctctttgcct

SEQ ID NO: 4562081 - DNA, 25 bp, Homo sapien
tccctgggggattcgtctgaggctc

SEQ ID NO: 4562082 - DNA, 25 bp, Homo sapien
ctgggggattcgtctgaggctcttt

SEQ ID NO: 4562083 - DNA, 25 bp, Homo sapien
ggggattcgtctgaggctctttgcc

SEQ ID NO: 4562084 - DNA, 25 bp, Homo sapien
aatagcggcaagcaagagcagtttg

SEQ ID NO: 4562085 - DNA, 25 bp, Homo sapien
gagcagtttgccttgtttcgggaaa

SEQ ID NO: 4562086 - DNA, 25 bp, Homo sapien
aaaaatagtttgcaatagcggcaag

SEQ ID NO: 4562087 - DNA, 25 bp, Homo sapien
agcagtttgccttgtttcgggaaag

SEQ ID NO: 4562088 - DNA, 25 bp, Homo sapien
ttgcgggactcgctctgacgatcct

SEQ ID NO: 4562089 - DNA, 25 bp, Homo sapien
ggtagacaagctccagcagagagtg

SEQ ID NO: 4562090 - DNA, 25 bp, Homo sapien
gcaggtagacaagctccagcagaga

SEQ ID NO: 4562091 - DNA, 25 bp, Homo sapien
cttgtgcctttgtgcactgcaggta

SEQ ID NO: 4562092 - DNA, 25 bp, Homo sapien
cgtgcgcaaatgtgctcactccgga

SEQ ID NO: 4562093 - DNA, 25 bp, Homo sapien
ttcggcggagcggagactggcttct

SEQ ID NO: 4562094 - DNA, 25 bp, Homo sapien
cagatgtggtgcctggagcgactcc

SEQ ID NO: 4562095 - DNA, 25 bp, Homo sapien
ttgggtcctgagtgccttcggcgga

SEQ ID NO: 4562096 - DNA, 25 bp, Homo sapien
tatgtaccacacacgcctaggaaat

SEQ ID NO: 4562097 - DNA, 25 bp, Homo sapien
gatgattctagattaactatcccag

SEQ ID NO: 4562098 - DNA, 25 bp, Homo sapien
gttgttcttatcagtcccgtttcag

SEQ ID NO: 4562099 - DNA, 25 bp, Homo sapien
cgcgtggtacaaaataaacgtgtat

SEQ ID NO: 4562100 - DNA, 25 bp, Homo sapien
agaaaaccacctttatctattcttg

SEQ ID NO: 4562101 - DNA, 25 bp, Homo sapien
gaaaaccacctttatctattcttgc

SEQ ID NO: 4562102 - DNA, 25 bp, Homo sapien
tgaaatacctcctgtagttttcttc

SEQ ID NO: 4562103 - DNA, 25 bp, Homo sapien
atgcaccggccctgaaacatatttc

SEQ ID NO: 4562104 - DNA, 25 bp, Homo sapien
ttgtccactcatatgcaccggccct

SEQ ID NO: 4562105 - DNA, 25 bp, Homo sapien
agctcctaagtgttgtccactcata

SEQ ID NO: 4562106 - DNA, 25 bp, Homo sapien
cactcatatgcaccggccctgaaac

SEQ ID NO: 4562107 - DNA, 25 bp, Homo sapien
tatacagatgttttcaaagttgcca

SEQ ID NO: 4562108 - DNA, 25 bp, Homo sapien
ctatacagatgttttcaaagttgcc

SEQ ID NO: 4562109 - DNA, 25 bp, Homo sapien
atgttttcaaagttgccagtgttac

SEQ ID NO: 4562110 - DNA, 25 bp, Homo sapien
cagatgttttcaaagttgccagtgt

SEQ ID NO: 4562111 - DNA, 25 bp, Homo sapien
cctttagctcgcaactgagaagata

SEQ ID NO: 4562112 - DNA, 25 bp, Homo sapien
cctgaactggtggttcttaaagata

SEQ ID NO: 4562113 - DNA, 25 bp, Homo sapien
ccttaggaggcttaagtacatgtcc

SEQ ID NO: 4562114 - DNA, 25 bp, Homo sapien
tgtatcattatccatctgaaagtga

SEQ ID NO: 4562115 - DNA, 25 bp, Homo sapien
ggtgatgataaaggattgctgctcc

SEQ ID NO: 4562116 - DNA, 25 bp, Homo sapien
gtgggtgatgataaaggattgctgc

SEQ ID NO: 4562117 - DNA, 25 bp, Homo sapien
tgataaaggattgctgctccagaga

SEQ ID NO: 4562118 - DNA, 25 bp, Homo sapien
ggaggtgggtgatgataaaggattg

SEQ ID NO: 4562119 - DNA, 25 bp, Homo sapien
cagagtggcctgttgagactgggtg

SEQ ID NO: 4562120 - DNA, 25 bp, Homo sapien
atctgaagacgggtttaatggcgca

SEQ ID NO: 4562121 - DNA, 25 bp, Homo sapien
gactgggtgctcattgcaaagagat

SEQ ID NO: 4562122 - DNA, 25 bp, Homo sapien
gactggcaagtttccatgcatttgg

SEQ ID NO: 4562123 - DNA, 25 bp, Homo sapien
gggtaggtgattaagtgcgctgtta

SEQ ID NO: 4562124 - DNA, 25 bp, Homo sapien
taggtgattaagtgcgctgttaagg

SEQ ID NO: 4562125 - DNA, 25 bp, Homo sapien
aggtgattaagtgcgctgttaagga

SEQ ID NO: 4562126 - DNA, 25 bp, Homo sapien
gagggggtaggtgattaagtgcgct

SEQ ID NO: 4562127 - DNA, 25 bp, Homo sapien
gtcacgtcccaggaaagccatatca

SEQ ID NO: 4562128 - DNA, 25 bp, Homo sapien
cccagggcaacagccatcagctcag

SEQ ID NO: 4562129 - DNA, 25 bp, Homo sapien
ggaaagccatatcagcaaggcccag

SEQ ID NO: 4562130 - DNA, 25 bp, Homo sapien
acagcagcagagtcacgtcccagga

SEQ ID NO: 4562131 - DNA, 25 bp, Homo sapien
tgtgctgtgatgatgtgttccctca

SEQ ID NO: 4562132 - DNA, 25 bp, Homo sapien
gtgctgtgatgatgtgttccctcat

SEQ ID NO: 4562133 - DNA, 25 bp, Homo sapien
ctgtgctgtgatgatgtgttccctc

SEQ ID NO: 4562134 - DNA, 25 bp, Homo sapien
gacttcagcttggtccgtgtctctg

SEQ ID NO: 4562135 - DNA, 25 bp, Homo sapien
tcagcttggtccgtgtctctggtct

SEQ ID NO: 4562136 - DNA, 25 bp, Homo sapien
agcttggtccgtgtctctggtcttt

SEQ ID NO: 4562137 - DNA, 25 bp, Homo sapien
cagcaaacccctccaaatttggtat

SEQ ID NO: 4562138 - DNA, 25 bp, Homo sapien
agtcgttatgccacagctgtgctct

SEQ ID NO: 4562139 - DNA, 25 bp, Homo sapien
tgccacagctgtgctctgccataac

SEQ ID NO: 4562140 - DNA, 25 bp, Homo sapien
ctagtcgttatgccacagctgtgct

SEQ ID NO: 4562141 - DNA, 25 bp, Homo sapien
tatgccacagctgtgctctgccata

SEQ ID NO: 4562142 - DNA, 25 bp, Homo sapien
tcttccaacctgccacacagctgtg

SEQ ID NO: 4562143 - DNA, 25 bp, Homo sapien
cttccaacctgccacacagctgtgg

SEQ ID NO: 4562144 - DNA, 25 bp, Homo sapien
cataagttgtaagcctgatcctgca

SEQ ID NO: 4562145 - DNA, 25 bp, Homo sapien
aagccaagagtggttctgctctgga

SEQ ID NO: 4562146 - DNA, 25 bp, Homo sapien
ttcagaggacctcaattccagaggc

SEQ ID NO: 4562147 - DNA, 25 bp, Homo sapien
aaatcttcggcctttgtcacatggg

SEQ ID NO: 4562148 - DNA, 25 bp, Homo sapien
accagtgtatgagttcctccattac

SEQ ID NO: 4562149 - DNA, 25 bp, Homo sapien
cagtgtatgagttcctccattacaa

SEQ ID NO: 4562150 - DNA, 25 bp, Homo sapien
gaaactagctcataccagtgtatga

SEQ ID NO: 4562151 - DNA, 25 bp, Homo sapien
ctggggagaaactagctcataccag

SEQ ID NO: 4562152 - DNA, 25 bp, Homo sapien
tagcacagctcactcgagtgaggac

SEQ ID NO: 4562153 - DNA, 25 bp, Homo sapien
cctgcagaagacagctgatagcaca

SEQ ID NO: 4562154 - DNA, 25 bp, Homo sapien
gcagattcactgcctgcagaagaca

SEQ ID NO: 4562155 - DNA, 25 bp, Homo sapien
tggccccaaaatcccaccgagagat

SEQ ID NO: 4562156 - DNA, 25 bp, Homo sapien
gagatccagaatgactctaatttaa

SEQ ID NO: 4562157 - DNA, 25 bp, Homo sapien
gatgatgagagagatccagaatgac

SEQ ID NO: 4562158 - DNA, 25 bp, Homo sapien
agagtgatgatgagagagatccaga

SEQ ID NO: 4562159 - DNA, 25 bp, Homo sapien
gagagagatccagaatgactctaat

SEQ ID NO: 4562160 - DNA, 25 bp, Homo sapien
tggttcaggattgggattgcaaccc

SEQ ID NO: 4562161 - DNA, 25 bp, Homo sapien
tatatcaggttaattagcatagcca

SEQ ID NO: 4562162 - DNA, 25 bp, Homo sapien
caagctggccattaaaacacataca

SEQ ID NO: 4562163 - DNA, 25 bp, Homo sapien
taaggtccataaattacaatcaatt

SEQ ID NO: 4562164 - DNA, 25 bp, Homo sapien
tatatgtatccaacaacggagcacc

SEQ ID NO: 4562165 - DNA, 25 bp, Homo sapien
tagcatttgacagaccattgagaca

SEQ ID NO: 4562166 - DNA, 25 bp, Homo sapien
tgaaaattaaacaaccatgctactg

SEQ ID NO: 4562167 - DNA, 25 bp, Homo sapien
aatggcactgtagagcaaatggacc

SEQ ID NO: 4562168 - DNA, 25 bp, Homo sapien
ttgttaaaatgcccacactgtccaa

SEQ ID NO: 4562169 - DNA, 25 bp, Homo sapien
taacaaccgaaacatcatagtattg

SEQ ID NO: 4562170 - DNA, 25 bp, Homo sapien
ccaatggagcagaacaggcaatcga

SEQ ID NO: 4562171 - DNA, 25 bp, Homo sapien
tttgaggcaacaggataaagctgaa

SEQ ID NO: 4562172 - DNA, 25 bp, Homo sapien
ggaatacttccctccaacacactgg

SEQ ID NO: 4562173 - DNA, 25 bp, Homo sapien
gaatttctgatgtagaatgacggca

SEQ ID NO: 4562174 - DNA, 25 bp, Homo sapien
gtttgaattcagctatgcacattag

SEQ ID NO: 4562175 - DNA, 25 bp, Homo sapien
tttagtctgatcaaatttgtaccca

SEQ ID NO: 4562176 - DNA, 25 bp, Homo sapien
cttttccaagctccactccaggagc

SEQ ID NO: 4562177 - DNA, 25 bp, Homo sapien
gctccactccaggagcagggagaaa

SEQ ID NO: 4562178 - DNA, 25 bp, Homo sapien
ttttccaagctccactccaggagca

SEQ ID NO: 4562179 - DNA, 25 bp, Homo sapien
caagctccactccaggagcagggag

SEQ ID NO: 4562180 - DNA, 25 bp, Homo sapien
accaatagacgatgacaaatgtgga

SEQ ID NO: 4562181 - DNA, 25 bp, Homo sapien
aataacgtttattctgtaccacgcg

SEQ ID NO: 4562182 - DNA, 25 bp, Homo sapien
tggatggtgaggaagtaaaacgtca

SEQ ID NO: 4562183 - DNA, 25 bp, Homo sapien
aatgcagatgggtgtacttcctttc

SEQ ID NO: 4562184 - DNA, 25 bp, Homo sapien
tcagagcagcaggagggcgcccagg

SEQ ID NO: 4562185 - DNA, 25 bp, Homo sapien
gcaggagggcgcccagggacagctc

SEQ ID NO: 4562186 - DNA, 25 bp, Homo sapien
agcagcaggagggcgcccagggaca

SEQ ID NO: 4562187 - DNA, 25 bp, Homo sapien
agcaggagggcgcccagggacagct

SEQ ID NO: 4562188 - DNA, 25 bp, Homo sapien
tcatcccgggccttgacgcgaacgg

SEQ ID NO: 4562189 - DNA, 25 bp, Homo sapien
aggcggcgcacctcgtcttccgaga

SEQ ID NO: 4562190 - DNA, 25 bp, Homo sapien
tccgagaggccgtcgaagcaaaagt

SEQ ID NO: 4562191 - DNA, 25 bp, Homo sapien
gcgaccctcatcccgggccttgacg

SEQ ID NO: 4562192 - DNA, 25 bp, Homo sapien
attgccaacgcgcagtgcccggcgg

SEQ ID NO: 4562193 - DNA, 25 bp, Homo sapien
ctgcattgccaacgcgcagtgcccg

SEQ ID NO: 4562194 - DNA, 25 bp, Homo sapien
ccaacgcgcagtgcccggcggccgc

SEQ ID NO: 4562195 - DNA, 25 bp, Homo sapien
gcattgccaacgcgcagtgcccggc

SEQ ID NO: 4562196 - DNA, 25 bp, Homo sapien
tgaggcggcagcggacggcgcgggg

SEQ ID NO: 4562197 - DNA, 25 bp, Homo sapien
ctgaggcggcagcggacggcgcggg

SEQ ID NO: 4562198 - DNA, 25 bp, Homo sapien
aggcggcagcggacggcgcggggcc

SEQ ID NO: 4562199 - DNA, 25 bp, Homo sapien
gaggcggcagcggacggcgcggggc

SEQ ID NO: 4562200 - DNA, 25 bp, Homo sapien
gccgggttcccggacagtactcagc

SEQ ID NO: 4562201 - DNA, 25 bp, Homo sapien
agcagccaggcgcagggcgtcgccg

SEQ ID NO: 4562202 - DNA, 25 bp, Homo sapien
ggttcccggacagtactcagcagcc

SEQ ID NO: 4562203 - DNA, 25 bp, Homo sapien
tctccgcgcggagcagccggaggcg

SEQ ID NO: 4562204 - DNA, 25 bp, Homo sapien
ggatgacagcgggctcgaggagggg

SEQ ID NO: 4562205 - DNA, 25 bp, Homo sapien
ctggatgacagcgggctcgaggagg

SEQ ID NO: 4562206 - DNA, 25 bp, Homo sapien
gatgacagcgggctcgaggaggggg

SEQ ID NO: 4562207 - DNA, 25 bp, Homo sapien
tggatgacagcgggctcgaggaggg

SEQ ID NO: 4562208 - DNA, 25 bp, Homo sapien
agcccgcagcgcgcgactcagcagc

SEQ ID NO: 4562209 - DNA, 25 bp, Homo sapien
tcagcagcccgtcggggacgcgcag

SEQ ID NO: 4562210 - DNA, 25 bp, Homo sapien
gggcgggcccccgagcaggagcgac

SEQ ID NO: 4562211 - DNA, 25 bp, Homo sapien
gcgggcgggcccccgagcaggagcg

SEQ ID NO: 4562212 - DNA, 25 bp, Homo sapien
ccggacctcgcgggccgcacagggt

SEQ ID NO: 4562213 - DNA, 25 bp, Homo sapien
gggcccggacctcgcgggccgcaca

SEQ ID NO: 4562214 - DNA, 25 bp, Homo sapien
cgcagaagccgtaggtggtgcgcac

SEQ ID NO: 4562215 - DNA, 25 bp, Homo sapien
agcagcgcgcagaagccgtaggtgg

SEQ ID NO: 4562216 - DNA, 25 bp, Homo sapien
gtgtgcgggctctcgagcagcgcgc

SEQ ID NO: 4562217 - DNA, 25 bp, Homo sapien
tccttgcggcgcgtgtgcgggctct

SEQ ID NO: 4562218 - DNA, 25 bp, Homo sapien
cggggcaggtgcggcagtgacagcg

SEQ ID NO: 4562219 - DNA, 25 bp, Homo sapien
acggggcaggtgcggcagtgacagc

SEQ ID NO: 4562220 - DNA, 25 bp, Homo sapien
ggggcaggtgcggcagtgacagcgc

SEQ ID NO: 4562221 - DNA, 25 bp, Homo sapien
cgtgcggccggcgtcctcgtctgcc

SEQ ID NO: 4562222 - DNA, 25 bp, Homo sapien
tgcggccggcgtcctcgtctgccgc

SEQ ID NO: 4562223 - DNA, 25 bp, Homo sapien
cggccggcgtcctcgtctgccgcgc

SEQ ID NO: 4562224 - DNA, 25 bp, Homo sapien
gtccgtgcggccggcgtcctcgtct

SEQ ID NO: 4562225 - DNA, 25 bp, Homo sapien
agccgcggcgggatgcagaattcgg

SEQ ID NO: 4562226 - DNA, 25 bp, Homo sapien
cccggattggagactcgagcgtgca

SEQ ID NO: 4562227 - DNA, 25 bp, Homo sapien
gatgcgattcggcgtgagcactttg

SEQ ID NO: 4562228 - DNA, 25 bp, Homo sapien
ccacaggtcgctttcagcggcgcag

SEQ ID NO: 4562229 - DNA, 25 bp, Homo sapien
gaggaacagagtttctcgaggagcc

SEQ ID NO: 4562230 - DNA, 25 bp, Homo sapien
ggaacagagtttctcgaggagccgc

SEQ ID NO: 4562231 - DNA, 25 bp, Homo sapien
ctgcggccgaggaacagagtttctc

SEQ ID NO: 4562232 - DNA, 25 bp, Homo sapien
aacagagtttctcgaggagccgcat

SEQ ID NO: 4562233 - DNA, 25 bp, Homo sapien
gctggggctaggagtggcgggaaga

SEQ ID NO: 4562234 - DNA, 25 bp, Homo sapien
ctgagtttgggcgcctggagctgct

SEQ ID NO: 4562235 - DNA, 25 bp, Homo sapien
tcccctgcacccacaacaaatcagc

SEQ ID NO: 4562236 - DNA, 25 bp, Homo sapien
cctcgacgcggctggatccctcccc

SEQ ID NO: 4562237 - DNA, 25 bp, Homo sapien
gcagcccctcgacgcggctggatcc

SEQ ID NO: 4562238 - DNA, 25 bp, Homo sapien
tctggatctggttgcaagctcagtg

SEQ ID NO: 4562239 - DNA, 25 bp, Homo sapien
tggatctggttgcaagctcagtgcc

SEQ ID NO: 4562240 - DNA, 25 bp, Homo sapien
ctctggatctggttgcaagctcagt

SEQ ID NO: 4562241 - DNA, 25 bp, Homo sapien
tttgcagtgagtgcgtggagcccca

SEQ ID NO: 4562242 - DNA, 25 bp, Homo sapien
ccacgacgccgggaggtctgcatgc

SEQ ID NO: 4562243 - DNA, 25 bp, Homo sapien
aagctgtcgcgggagcaggcacctt

SEQ ID NO: 4562244 - DNA, 25 bp, Homo sapien
tcttataccgtaggctgagtcccgc

SEQ ID NO: 4562245 - DNA, 25 bp, Homo sapien
ctgggaaaggttgcaggtgaagaga

SEQ ID NO: 4562246 - DNA, 25 bp, Homo sapien
ggtgaagagagggcaccctgtcgtc

SEQ ID NO: 4562247 - DNA, 25 bp, Homo sapien
caggtgaagagagggcaccctgtcg

SEQ ID NO: 4562248 - DNA, 25 bp, Homo sapien
gggaaaggttgcaggtgaagagagg

SEQ ID NO: 4562249 - DNA, 25 bp, Homo sapien
aggaaaaattggcggctgaaaatgt

SEQ ID NO: 4562250 - DNA, 25 bp, Homo sapien
caaggaaaaattggcggctgaaaat

SEQ ID NO: 4562251 - DNA, 25 bp, Homo sapien
aaaattggcggctgaaaatgtttct

SEQ ID NO: 4562252 - DNA, 25 bp, Homo sapien
aaggaaaaattggcggctgaaaatg

SEQ ID NO: 4562253 - DNA, 25 bp, Homo sapien
gatgcagctcgtttcaaatgaaacc

SEQ ID NO: 4562254 - DNA, 25 bp, Homo sapien
gcagtagatgcagctcgtttcaaat

SEQ ID NO: 4562255 - DNA, 25 bp, Homo sapien
tggccttggtgacaatgaacactca

SEQ ID NO: 4562256 - DNA, 25 bp, Homo sapien
ctcagacatcatatcggtgggtgaa

SEQ ID NO: 4562257 - DNA, 25 bp, Homo sapien
ccttggaaggccatggaagaaccag

SEQ ID NO: 4562258 - DNA, 25 bp, Homo sapien
atatgtcaacacctatgccccgagg

SEQ ID NO: 4562259 - DNA, 25 bp, Homo sapien
taaaggcagttaaagagtctctagt

SEQ ID NO: 4562260 - DNA, 25 bp, Homo sapien
taaaggagcctcatggtccactagc

SEQ ID NO: 4562261 - DNA, 25 bp, Homo sapien
ttggcctataaccacagagctggga

SEQ ID NO: 4562262 - DNA, 25 bp, Homo sapien
cagttcaaacaagttgccaggccca

SEQ ID NO: 4562263 - DNA, 25 bp, Homo sapien
gaaagacaactaaccttaatgggca

SEQ ID NO: 4562264 - DNA, 25 bp, Homo sapien
gagcggcttcctgactttgtgcaac

SEQ ID NO: 4562265 - DNA, 25 bp, Homo sapien
gaggggtgcgctttaacaagcattt

SEQ ID NO: 4562266 - DNA, 25 bp, Homo sapien
tctccagatattgaggggtgcgctt

SEQ ID NO: 4562267 - DNA, 25 bp, Homo sapien
cagatctccagatattgaggggtgc

SEQ ID NO: 4562268 - DNA, 25 bp, Homo sapien
gatattgaggggtgcgctttaacaa

SEQ ID NO: 4562269 - DNA, 25 bp, Homo sapien
gagcagcagtgaagtacgttcactg

SEQ ID NO: 4562270 - DNA, 25 bp, Homo sapien
agtacgttcactgtagccagcccag

SEQ ID NO: 4562271 - DNA, 25 bp, Homo sapien
tggccgtgcacagaactactgagag

SEQ ID NO: 4562272 - DNA, 25 bp, Homo sapien
aagcatcatgatccagtgagtaggc

SEQ ID NO: 4562273 - DNA, 25 bp, Homo sapien
taatagcaccactagttacataagt

SEQ ID NO: 4562274 - DNA, 25 bp, Homo sapien
gaagaaaactcctcatgatactaca

SEQ ID NO: 4562275 - DNA, 25 bp, Homo sapien
aacatttacataccttcgtgctggg

SEQ ID NO: 4562276 - DNA, 25 bp, Homo sapien
ggctgagaagcaatatcctccacat

SEQ ID NO: 4562277 - DNA, 25 bp, Homo sapien
aaatgtcacactgtggggcccttgc

SEQ ID NO: 4562278 - DNA, 25 bp, Homo sapien
cactgtggggcccttgctccagtgt

SEQ ID NO: 4562279 - DNA, 25 bp, Homo sapien
tggtgtccactcatcttctatatga

SEQ ID NO: 4562280 - DNA, 25 bp, Homo sapien
tcccccatcaagagacaaccaaatg

SEQ ID NO: 4562281 - DNA, 25 bp, Homo sapien
tgggattagaggtgattctaatatt

SEQ ID NO: 4562282 - DNA, 25 bp, Homo sapien
cagcaagttaactccggatgactgg

SEQ ID NO: 4562283 - DNA, 25 bp, Homo sapien
gacaccagcaagttaactccggatg

SEQ ID NO: 4562284 - DNA, 25 bp, Homo sapien
atgacaccagcaagttaactccgga

SEQ ID NO: 4562285 - DNA, 25 bp, Homo sapien
tggtaggttatattgcatgagttct

SEQ ID NO: 4562286 - DNA, 25 bp, Homo sapien
aagcacaagtgtgggtaaaggcggt

SEQ ID NO: 4562287 - DNA, 25 bp, Homo sapien
tgggtaaaggcggtttagatgcttg

SEQ ID NO: 4562288 - DNA, 25 bp, Homo sapien
ttggtaggttatattgcatgagttc

SEQ ID NO: 4562289 - DNA, 25 bp, Homo sapien
tgcttctaaaccaaggagccaagtt

SEQ ID NO: 4562290 - DNA, 25 bp, Homo sapien
gaacaaattgatagactggacttta

SEQ ID NO: 4562291 - DNA, 25 bp, Homo sapien
gcatggcaacagatttgatcagaca

SEQ ID NO: 4562292 - DNA, 25 bp, Homo sapien
gaaacccttgtgatcttcagttagg

SEQ ID NO: 4562293 - DNA, 25 bp, Homo sapien
tatgatatacttgataaagggcttg

SEQ ID NO: 4562294 - DNA, 25 bp, Homo sapien
tgatgtggaaagtgggaagacccaa

SEQ ID NO: 4562295 - DNA, 25 bp, Homo sapien
caggcgagatggtgtattcactcac

SEQ ID NO: 4562296 - DNA, 25 bp, Homo sapien
cagaagttcttagtgcaggcgagat

SEQ ID NO: 4562297 - DNA, 25 bp, Homo sapien
ttgtgccttcaggcacttggagagc

SEQ ID NO: 4562298 - DNA, 25 bp, Homo sapien
cagtcccagggtgaaaagtagaggt

SEQ ID NO: 4562299 - DNA, 25 bp, Homo sapien
tcatcctgccctgattacactggct

SEQ ID NO: 4562300 - DNA, 25 bp, Homo sapien
aagtgtcacagtagccctcatcctg

SEQ ID NO: 4562301 - DNA, 25 bp, Homo sapien
tgtgttctggcaagtcagtcccagg

SEQ ID NO: 4562302 - DNA, 25 bp, Homo sapien
ttctgccacaaaagggctccatcca

SEQ ID NO: 4562303 - DNA, 25 bp, Homo sapien
gacatattaagagaacccttttgga

SEQ ID NO: 4562304 - DNA, 25 bp, Homo sapien
aaggtgactttcttagggccatgca

SEQ ID NO: 4562305 - DNA, 25 bp, Homo sapien
gaagcacagcaattactattcagac

SEQ ID NO: 4562306 - DNA, 25 bp, Homo sapien
gaggtaacagatcccatgagataag

SEQ ID NO: 4562307 - DNA, 25 bp, Homo sapien
cacattgggcgccatgaacgttggg

SEQ ID NO: 4562308 - DNA, 25 bp, Homo sapien
gctacatctgtgacaacttagcatt

SEQ ID NO: 4562309 - DNA, 25 bp, Homo sapien
caaaggccacgaggagttttacctg

SEQ ID NO: 4562310 - DNA, 25 bp, Homo sapien
caaacatccttgtttggaaggcagc

SEQ ID NO: 4562311 - DNA, 25 bp, Homo sapien
cacaagggtcattttcaaggcgtag

SEQ ID NO: 4562312 - DNA, 25 bp, Homo sapien
tattgttagagtgcgtagctaggca

SEQ ID NO: 4562313 - DNA, 25 bp, Homo sapien
tccaacgcaagtatgggcacacagg

SEQ ID NO: 4562314 - DNA, 25 bp, Homo sapien
tatagttgttcccagttacgaggct

SEQ ID NO: 4562315 - DNA, 25 bp, Homo sapien
aaaatatacacactacacaatccag

SEQ ID NO: 4562316 - DNA, 25 bp, Homo sapien
aaatatacacactacacaatccagc

SEQ ID NO: 4562317 - DNA, 25 bp, Homo sapien
actcaggccgggtagggttgctcac

SEQ ID NO: 4562318 - DNA, 25 bp, Homo sapien
aaaaatatacacactacacaatcca

SEQ ID NO: 4562319 - DNA, 25 bp, Homo sapien
cagatgcagccagaaaagcgaggtt

SEQ ID NO: 4562320 - DNA, 25 bp, Homo sapien
tgggaactcacacattaccaggagg

SEQ ID NO: 4562321 - DNA, 25 bp, Homo sapien
tttggctgccactactaaaggagac

SEQ ID NO: 4562322 - DNA, 25 bp, Homo sapien
ggctcaagccctctctaggattggg

SEQ ID NO: 4562323 - DNA, 25 bp, Homo sapien
ccagcagcaaaaaggtcacgtggat

SEQ ID NO: 4562324 - DNA, 25 bp, Homo sapien
cagacacaccctcagcaagatacag

SEQ ID NO: 4562325 - DNA, 25 bp, Homo sapien
gaaagagtaacctgagaagagtcca

SEQ ID NO: 4562326 - DNA, 25 bp, Homo sapien
gcagcaaaaaggtcacgtggatggt

SEQ ID NO: 4562327 - DNA, 25 bp, Homo sapien
cttggcagaccagtcctctccctcc

SEQ ID NO: 4562328 - DNA, 25 bp, Homo sapien
cttagggttggctctcttggcagac

SEQ ID NO: 4562329 - DNA, 25 bp, Homo sapien
tcttggcagaccagtcctctccctc

SEQ ID NO: 4562330 - DNA, 25 bp, Homo sapien
cagaataagtcccagtcagaagggt

SEQ ID NO: 4562331 - DNA, 25 bp, Homo sapien
gaagggaagaaagacgtctgcaagt

SEQ ID NO: 4562332 - DNA, 25 bp, Homo sapien
tgcaagtgttcgtgttttcagaggg

SEQ ID NO: 4562333 - DNA, 25 bp, Homo sapien
ggaaacagaataagtcccagtcaga

SEQ ID NO: 4562334 - DNA, 25 bp, Homo sapien
ctagtgccgctccacagtgggtttt

SEQ ID NO: 4562335 - DNA, 25 bp, Homo sapien
agaacgcaacagatggtggcagccc

SEQ ID NO: 4562336 - DNA, 25 bp, Homo sapien
gaccataagactaactgctgcgcag

SEQ ID NO: 4562337 - DNA, 25 bp, Homo sapien
gaaagatgaactctgagctgttcca

SEQ ID NO: 4562338 - DNA, 25 bp, Homo sapien
cccacgatgagctctagaggtgagc

SEQ ID NO: 4562339 - DNA, 25 bp, Homo sapien
tcttgggtactcagggctatccctt

SEQ ID NO: 4562340 - DNA, 25 bp, Homo sapien
agaggtgagcttccacctgcagtcc

SEQ ID NO: 4562341 - DNA, 25 bp, Homo sapien
caagcttgaaaacgatatgaatagt

SEQ ID NO: 4562342 - DNA, 25 bp, Homo sapien
ctgaagatcacactgatggagtggg

SEQ ID NO: 4562343 - DNA, 25 bp, Homo sapien
tgaagatcacactgatggagtggga

SEQ ID NO: 4562344 - DNA, 25 bp, Homo sapien
ctggagggatgaatgttcattctcc

SEQ ID NO: 4562345 - DNA, 25 bp, Homo sapien
ggagggatgaatgttcattctcctg

SEQ ID NO: 4562346 - DNA, 25 bp, Homo sapien
tggagggatgaatgttcattctcct

SEQ ID NO: 4562347 - DNA, 25 bp, Homo sapien
gggcagatctaattgtcagcagctc

SEQ ID NO: 4562348 - DNA, 25 bp, Homo sapien
gccatcatggcatttatcgctggag

SEQ ID NO: 4562349 - DNA, 25 bp, Homo sapien
ccttggggcagatctaattgtcagc

SEQ ID NO: 4562350 - DNA, 25 bp, Homo sapien
gcatttatcgctggagtcatccttg

SEQ ID NO: 4562351 - DNA, 25 bp, Homo sapien
cctgatgctccttaaattcccaaaa

SEQ ID NO: 4562352 - DNA, 25 bp, Homo sapien
tgatgctccttaaattcccaaaatg

SEQ ID NO: 4562353 - DNA, 25 bp, Homo sapien
tcctgatgctccttaaattcccaaa

SEQ ID NO: 4562354 - DNA, 25 bp, Homo sapien
tttcctgatgctccttaaattccca

SEQ ID NO: 4562355 - DNA, 25 bp, Homo sapien
gccatacaagcagggtcaattgatt

SEQ ID NO: 4562356 - DNA, 25 bp, Homo sapien
attgtgcttggacaactagatagcc

SEQ ID NO: 4562357 - DNA, 25 bp, Homo sapien
ccaatagattcattccgtacaggaa

SEQ ID NO: 4562358 - DNA, 25 bp, Homo sapien
gtgtggtactagcacaagattgaca

SEQ ID NO: 4562359 - DNA, 25 bp, Homo sapien
catcctgtgaagccggttctggcca

SEQ ID NO: 4562360 - DNA, 25 bp, Homo sapien
tcatcctgtgaagccggttctggcc

SEQ ID NO: 4562361 - DNA, 25 bp, Homo sapien
ataggcaccacggcagtccccgtgg

SEQ ID NO: 4562362 - DNA, 25 bp, Homo sapien
ggcaccacggcagtccccgtggaat

SEQ ID NO: 4562363 - DNA, 25 bp, Homo sapien
caccacggcagtccccgtggaatcc

SEQ ID NO: 4562364 - DNA, 25 bp, Homo sapien
taggcaccacggcagtccccgtgga

SEQ ID NO: 4562365 - DNA, 25 bp, Homo sapien
ggagccagtgaaggaaataggaaca

SEQ ID NO: 4562366 - DNA, 25 bp, Homo sapien
agccagtgaaggaaataggaacaca

SEQ ID NO: 4562367 - DNA, 25 bp, Homo sapien
ggggctccccattcagtggcacaaa

SEQ ID NO: 4562368 - DNA, 25 bp, Homo sapien
tggggctccccattcagtggcacaa

SEQ ID NO: 4562369 - DNA, 25 bp, Homo sapien
tggctggcttttagatgattgttac

SEQ ID NO: 4562370 - DNA, 25 bp, Homo sapien
cctcactagataggggtcttatttt

SEQ ID NO: 4562371 - DNA, 25 bp, Homo sapien
ggcagggacgtggtaggggcagact

SEQ ID NO: 4562372 - DNA, 25 bp, Homo sapien
ctccctcactagataggggtcttat

SEQ ID NO: 4562373 - DNA, 25 bp, Homo sapien
ctcagtaaaaaatggggatgcaggg

SEQ ID NO: 4562374 - DNA, 25 bp, Homo sapien
tgccgtggggctgtcgtggggaaaa

SEQ ID NO: 4562375 - DNA, 25 bp, Homo sapien
gagctcagtaaaaaatggggatgca

SEQ ID NO: 4562376 - DNA, 25 bp, Homo sapien
cctgagctcagtaaaaaatggggat

SEQ ID NO: 4562377 - DNA, 25 bp, Homo sapien
gccacttgttgcagtcgcccacaag

SEQ ID NO: 4562378 - DNA, 25 bp, Homo sapien
accctgcttgttggcagccccaatc

SEQ ID NO: 4562379 - DNA, 25 bp, Homo sapien
tgggtcccatggagcaggctcatca

SEQ ID NO: 4562380 - DNA, 25 bp, Homo sapien
acttgttgcagtcgcccacaagctg

SEQ ID NO: 4562381 - DNA, 25 bp, Homo sapien
gagccagcctgcttatgtactcatt

SEQ ID NO: 4562382 - DNA, 25 bp, Homo sapien
gctctggtatgatgtgacgtacttt

SEQ ID NO: 4562383 - DNA, 25 bp, Homo sapien
ggctctggtatgatgtgacgtactt

SEQ ID NO: 4562384 - DNA, 25 bp, Homo sapien
tggctctggtatgatgtgacgtact

SEQ ID NO: 4562385 - DNA, 25 bp, Homo sapien
ctctggtatgatgtgacgtactttc

SEQ ID NO: 4562386 - DNA, 25 bp, Homo sapien
aatgcagcgacattccagtttctcc

SEQ ID NO: 4562387 - DNA, 25 bp, Homo sapien
atggtgtctgtttgtccagacagct

SEQ ID NO: 4562388 - DNA, 25 bp, Homo sapien
tttctccacccgctcattctcctgc

SEQ ID NO: 4562389 - DNA, 25 bp, Homo sapien
gtgtctgtttgtccagacagctgaa

SEQ ID NO: 4562390 - DNA, 25 bp, Homo sapien
agctgcccatgtagctgtgcctgct

SEQ ID NO: 4562391 - DNA, 25 bp, Homo sapien
ttcagctgcccatgtagctgtgcct

SEQ ID NO: 4562392 - DNA, 25 bp, Homo sapien
cagctgcccatgtagctgtgcctgc

SEQ ID NO: 4562393 - DNA, 25 bp, Homo sapien
tcagctgcccatgtagctgtgcctg

SEQ ID NO: 4562394 - DNA, 25 bp, Homo sapien
ttgtagggggatacacaggatgaac

SEQ ID NO: 4562395 - DNA, 25 bp, Homo sapien
cgggcaggaggtgcccattcttgta

SEQ ID NO: 4562396 - DNA, 25 bp, Homo sapien
gcacctattggtctcaggtgaaatg

SEQ ID NO: 4562397 - DNA, 25 bp, Homo sapien
cctcagagggtgcacctattggtct

SEQ ID NO: 4562398 - DNA, 25 bp, Homo sapien
ggagtcaggctcatcatggtctccc

SEQ ID NO: 4562399 - DNA, 25 bp, Homo sapien
ggggagtcaggctcatcatggtctc

SEQ ID NO: 4562400 - DNA, 25 bp, Homo sapien
gggagtcaggctcatcatggtctcc

SEQ ID NO: 4562401 - DNA, 25 bp, Homo sapien
gagtcaggctcatcatggtctccca

SEQ ID NO: 4562402 - DNA, 25 bp, Homo sapien
taccactacctatctacctgggagt

SEQ ID NO: 4562403 - DNA, 25 bp, Homo sapien
gtaccactacctatctacctgggag

SEQ ID NO: 4562404 - DNA, 25 bp, Homo sapien
acagtaccactacctatctacctgg

SEQ ID NO: 4562405 - DNA, 25 bp, Homo sapien
actacctatctacctgggagttctg

SEQ ID NO: 4562406 - DNA, 25 bp, Homo sapien
tccccagggagagccatgagactca

SEQ ID NO: 4562407 - DNA, 25 bp, Homo sapien
cccagggagagccatgagactcaac

SEQ ID NO: 4562408 - DNA, 25 bp, Homo sapien
ttccccagggagagccatgagactc

SEQ ID NO: 4562409 - DNA, 25 bp, Homo sapien
cttccccagggagagccatgagact

SEQ ID NO: 4562410 - DNA, 25 bp, Homo sapien
ctactggttctgcttccaggcgctc

SEQ ID NO: 4562411 - DNA, 25 bp, Homo sapien
aatgagaaggcatggatgttgccag

SEQ ID NO: 4562412 - DNA, 25 bp, Homo sapien
catggatgttgccaggtctcatccc

SEQ ID NO: 4562413 - DNA, 25 bp, Homo sapien
aggcatggatgttgccaggtctcat

SEQ ID NO: 4562414 - DNA, 25 bp, Homo sapien
aagagaatgagaaggcatggatgtt

SEQ ID NO: 4562415 - DNA, 25 bp, Homo sapien
ccctcagcaactccctttcctgggt

SEQ ID NO: 4562416 - DNA, 25 bp, Homo sapien
agatcagctgctgatagtactgctg

SEQ ID NO: 4562417 - DNA, 25 bp, Homo sapien
agctgctgatagtactgctgcagaa

SEQ ID NO: 4562418 - DNA, 25 bp, Homo sapien
cagagatcagctgctgatagtactg

SEQ ID NO: 4562419 - DNA, 25 bp, Homo sapien
gatagtactgctgcagaagacctca

SEQ ID NO: 4562420 - DNA, 25 bp, Homo sapien
tccccgctgcggcaggctctgagcc

SEQ ID NO: 4562421 - DNA, 25 bp, Homo sapien
tcagttcgtgtttctgggagagcgc

SEQ ID NO: 4562422 - DNA, 25 bp, Homo sapien
gcacatgggcttaaagctgtcctgt

SEQ ID NO: 4562423 - DNA, 25 bp, Homo sapien
tggtacggtcgttccgcacggtatg

SEQ ID NO: 4562424 - DNA, 25 bp, Homo sapien
caaggctcggctttccactcaagct

SEQ ID NO: 4562425 - DNA, 25 bp, Homo sapien
tcggagggccctgctgggggctccg

SEQ ID NO: 4562426 - DNA, 25 bp, Homo sapien
ctcggagggccctgctgggggctcc

SEQ ID NO: 4562427 - DNA, 25 bp, Homo sapien
ttccgcttctgctctagcaggctct

SEQ ID NO: 4562428 - DNA, 25 bp, Homo sapien
tcttcctgctcttggttcaggtgac

SEQ ID NO: 4562429 - DNA, 25 bp, Homo sapien
gagcaacctcttcctgctcttggtt

SEQ ID NO: 4562430 - DNA, 25 bp, Homo sapien
ctgagcaacctcttcctgctcttgg

SEQ ID NO: 4562431 - DNA, 25 bp, Homo sapien
caacctcttcctgctcttggttcag

SEQ ID NO: 4562432 - DNA, 25 bp, Homo sapien
aagctgtcctgccagattctccagc

SEQ ID NO: 4562433 - DNA, 25 bp, Homo sapien
gcttctgctccacttcggagggccc

SEQ ID NO: 4562434 - DNA, 25 bp, Homo sapien
ttctgctccacttcggagggccctg

SEQ ID NO: 4562435 - DNA, 25 bp, Homo sapien
ctgcttgtagcttctgctccacttc

SEQ ID NO: 4562436 - DNA, 25 bp, Homo sapien
cgactcatgctgtgcactctctcct

SEQ ID NO: 4562437 - DNA, 25 bp, Homo sapien
tgtactcgactcatgctgtgcactc

SEQ ID NO: 4562438 - DNA, 25 bp, Homo sapien
agctcctgtactcgactcatgctgt

SEQ ID NO: 4562439 - DNA, 25 bp, Homo sapien
actcgactcatgctgtgcactctct

SEQ ID NO: 4562440 - DNA, 25 bp, Homo sapien
tggcagctggacaagctaccatctc

SEQ ID NO: 4562441 - DNA, 25 bp, Homo sapien
ctggcagctggacaagctaccatct

SEQ ID NO: 4562442 - DNA, 25 bp, Homo sapien
acagatgcctggaacaatcaagtga

SEQ ID NO: 4562443 - DNA, 25 bp, Homo sapien
cacagatgcctggaacaatcaagtg

SEQ ID NO: 4562444 - DNA, 25 bp, Homo sapien
catgcagatactcggcatactgctc

SEQ ID NO: 4562445 - DNA, 25 bp, Homo sapien
gcagatactcggcatactgctctct

SEQ ID NO: 4562446 - DNA, 25 bp, Homo sapien
gatactcggcatactgctctctctc

SEQ ID NO: 4562447 - DNA, 25 bp, Homo sapien
tccatgcagatactcggcatactgc

SEQ ID NO: 4562448 - DNA, 25 bp, Homo sapien
ccgttcgtctgtgggctgctgtaac

SEQ ID NO: 4562449 - DNA, 25 bp, Homo sapien
cagctgtgcccgttcgtctgtgggc

SEQ ID NO: 4562450 - DNA, 25 bp, Homo sapien
caggggcttcacaccagctagataa

SEQ ID NO: 4562451 - DNA, 25 bp, Homo sapien
ttccagctgtgcccgttcgtctgtg

SEQ ID NO: 4562452 - DNA, 25 bp, Homo sapien
tgaagcgtgagctcagtgagttcca

SEQ ID NO: 4562453 - DNA, 25 bp, Homo sapien
tgcatccctgccttgtcaatcagta

SEQ ID NO: 4562454 - DNA, 25 bp, Homo sapien
ctgttgaagcgtgagctcagtgagt

SEQ ID NO: 4562455 - DNA, 25 bp, Homo sapien
tacaacttgaagctgctctgccaaa

SEQ ID NO: 4562456 - DNA, 25 bp, Homo sapien
agggcatcgctgtctctggttaact

SEQ ID NO: 4562457 - DNA, 25 bp, Homo sapien
catcgctgtctctggttaactggtt

SEQ ID NO: 4562458 - DNA, 25 bp, Homo sapien
tgagggcatcgctgtctctggttaa

SEQ ID NO: 4562459 - DNA, 25 bp, Homo sapien
gctgtctctggttaactggttgttg

SEQ ID NO: 4562460 - DNA, 25 bp, Homo sapien
actctcccacatgctgccaggaata

SEQ ID NO: 4562461 - DNA, 25 bp, Homo sapien
ctcccacatgctgccaggaatacag

SEQ ID NO: 4562462 - DNA, 25 bp, Homo sapien
gctgccaggaatacagcagatggct

SEQ ID NO: 4562463 - DNA, 25 bp, Homo sapien
caggaatacagcagatggctggcca

SEQ ID NO: 4562464 - DNA, 25 bp, Homo sapien
agaggttgagatggggcccaaagga

SEQ ID NO: 4562465 - DNA, 25 bp, Homo sapien
gaatgagagaggttgagatggggcc

SEQ ID NO: 4562466 - DNA, 25 bp, Homo sapien
tgagagaggttgagatggggcccaa

SEQ ID NO: 4562467 - DNA, 25 bp, Homo sapien
gaggttgagatggggcccaaaggac

SEQ ID NO: 4562468 - DNA, 25 bp, Homo sapien
cattgtgatacagtgttgtcttcaa

SEQ ID NO: 4562469 - DNA, 25 bp, Homo sapien
ctcaaacatcaagactctaattatc

SEQ ID NO: 4562470 - DNA, 25 bp, Homo sapien
tatctgaattgaacctttaggagaa

SEQ ID NO: 4562471 - DNA, 25 bp, Homo sapien
gactctaattatctgaattgaacct

SEQ ID NO: 4562472 - DNA, 25 bp, Homo sapien
ctccccggttttgctggctttcttg

SEQ ID NO: 4562473 - DNA, 25 bp, Homo sapien
tgtaattgcctctttagggctcccc

SEQ ID NO: 4562474 - DNA, 25 bp, Homo sapien
cccggttttgctggctttcttgctt

SEQ ID NO: 4562475 - DNA, 25 bp, Homo sapien
ctgtaattgcctctttagggctccc

SEQ ID NO: 4562476 - DNA, 25 bp, Homo sapien
caatgactcgatggttttattccgt

SEQ ID NO: 4562477 - DNA, 25 bp, Homo sapien
ccagggcgactgttacctcttggta

SEQ ID NO: 4562478 - DNA, 25 bp, Homo sapien
ccgtcgactgattgttatataactc

SEQ ID NO: 4562479 - DNA, 25 bp, Homo sapien
aactcgagtccagggcgactgttac

SEQ ID NO: 4562480 - DNA, 25 bp, Homo sapien
tcagggtagcggatgatccagagcc

SEQ ID NO: 4562481 - DNA, 25 bp, Homo sapien
atgatccagagccctccgcacagat

SEQ ID NO: 4562482 - DNA, 25 bp, Homo sapien
gagccctccgcacagatacctgttg

SEQ ID NO: 4562483 - DNA, 25 bp, Homo sapien
cagagccctccgcacagatacctgt

SEQ ID NO: 4562484 - DNA, 25 bp, Homo sapien
tcaacatggcccagcaaatcggcca

SEQ ID NO: 4562485 - DNA, 25 bp, Homo sapien
acatggcccagcaaatcggccagtc

SEQ ID NO: 4562486 - DNA, 25 bp, Homo sapien
ccagcaaatcggccagtcccaggat

SEQ ID NO: 4562487 - DNA, 25 bp, Homo sapien
ttcctcaacatggcccagcaaatcg

SEQ ID NO: 4562488 - DNA, 25 bp, Homo sapien
cctcagaaacaacgccattgagctg

SEQ ID NO: 4562489 - DNA, 25 bp, Homo sapien
cagaaacaacgccattgagctgttg

SEQ ID NO: 4562490 - DNA, 25 bp, Homo sapien
tgcaggctctcggttaatgagaagg

SEQ ID NO: 4562491 - DNA, 25 bp, Homo sapien
gttcctcagaaacaacgccattgag

SEQ ID NO: 4562492 - DNA, 25 bp, Homo sapien
tgagattggggctagcatgatgatt

SEQ ID NO: 4562493 - DNA, 25 bp, Homo sapien
ccatgagattggggctagcatgatg

SEQ ID NO: 4562494 - DNA, 25 bp, Homo sapien
atccatgagattggggctagcatga

SEQ ID NO: 4562495 - DNA, 25 bp, Homo sapien
atgagattggggctagcatgatgat

SEQ ID NO: 4562496 - DNA, 25 bp, Homo sapien
cctcattgtcttgcatgtgggccca

SEQ ID NO: 4562497 - DNA, 25 bp, Homo sapien
agtcctcattgtcttgcatgtgggc

SEQ ID NO: 4562498 - DNA, 25 bp, Homo sapien
tcccagttcaggcatttcaagtcct

SEQ ID NO: 4562499 - DNA, 25 bp, Homo sapien
cattgtcttgcatgtgggcccactg

SEQ ID NO: 4562500 - DNA, 25 bp, Homo sapien
cctgtactcgactcatgctatgcac

SEQ ID NO: 4562501 - DNA, 25 bp, Homo sapien
actcgactcatgctatgcaccgtct

SEQ ID NO: 4562502 - DNA, 25 bp, Homo sapien
tgtactcgactcatgctatgcaccg

SEQ ID NO: 4562503 - DNA, 25 bp, Homo sapien
accgtctcctccctcaacgcgtgca

SEQ ID NO: 4562504 - DNA, 25 bp, Homo sapien
tggcagctggacaagctaccatctc

SEQ ID NO: 4562505 - DNA, 25 bp, Homo sapien
ctggcagctggacaagctaccatct

SEQ ID NO: 4562506 - DNA, 25 bp, Homo sapien
acagatgcctggaacaatcaagtga

SEQ ID NO: 4562507 - DNA, 25 bp, Homo sapien
cacagatgcctggaacaatcaagtg

SEQ ID NO: 4562508 - DNA, 25 bp, Homo sapien
accacaaggcgctctctcctttcag

SEQ ID NO: 4562509 - DNA, 25 bp, Homo sapien
tccatctgtagttgtttcagtgacc

SEQ ID NO: 4562510 - DNA, 25 bp, Homo sapien
tttcagattctcagcgtgttgatct

SEQ ID NO: 4562511 - DNA, 25 bp, Homo sapien
gattctcagcgtgttgatctttctc

SEQ ID NO: 4562512 - DNA, 25 bp, Homo sapien
tcataaccagcttcaactcctccat

SEQ ID NO: 4562513 - DNA, 25 bp, Homo sapien
cataaccagcttcaactcctccatc

SEQ ID NO: 4562514 - DNA, 25 bp, Homo sapien
gcatcaagggcttcataaccagctt

SEQ ID NO: 4562515 - DNA, 25 bp, Homo sapien
ccaggggatgagggaggctgtagga

SEQ ID NO: 4562516 - DNA, 25 bp, Homo sapien
aggggatgagggaggctgtaggact

SEQ ID NO: 4562517 - DNA, 25 bp, Homo sapien
ctgccaggggatgagggaggctgta

SEQ ID NO: 4562518 - DNA, 25 bp, Homo sapien
ggatgagggaggctgtaggactcac

SEQ ID NO: 4562519 - DNA, 25 bp, Homo sapien
tcgttccaattctcccgtaaactgc

SEQ ID NO: 4562520 - DNA, 25 bp, Homo sapien
gagcaaagagagttcgttccaattc

SEQ ID NO: 4562521 - DNA, 25 bp, Homo sapien
caattctcccgtaaactgctgggaa

SEQ ID NO: 4562522 - DNA, 25 bp, Homo sapien
ggagagagcaaagagagttcgttcc

SEQ ID NO: 4562523 - DNA, 25 bp, Homo sapien
aaacatcaagattccaattgtctga

SEQ ID NO: 4562524 - DNA, 25 bp, Homo sapien
tccaattgtctgatttgaacttttg

SEQ ID NO: 4562525 - DNA, 25 bp, Homo sapien
ttctgctttctcaaacatcaagatt

SEQ ID NO: 4562526 - DNA, 25 bp, Homo sapien
ttctcaaacatcaagattccaattg

SEQ ID NO: 4562527 - DNA, 25 bp, Homo sapien
ccagaggacaggagggaacttcaca

SEQ ID NO: 4562528 - DNA, 25 bp, Homo sapien
agaaggaaagcaacattctccagag

SEQ ID NO: 4562529 - DNA, 25 bp, Homo sapien
attctccagaggacaggagggaact

SEQ ID NO: 4562530 - DNA, 25 bp, Homo sapien
ctgaaagagaaggaaagcaacattc

SEQ ID NO: 4562531 - DNA, 25 bp, Homo sapien
ctctccctggttttgctggctttct

SEQ ID NO: 4562532 - DNA, 25 bp, Homo sapien
ctctaactgcctctttagggctctc

SEQ ID NO: 4562533 - DNA, 25 bp, Homo sapien
taactgcctctttagggctctccct

SEQ ID NO: 4562534 - DNA, 25 bp, Homo sapien
actgcctctttagggctctccctgg

SEQ ID NO: 4562535 - DNA, 25 bp, Homo sapien
taggaagaggaagacacagctctta

SEQ ID NO: 4562536 - DNA, 25 bp, Homo sapien
ataggaagaggaagacacagctctt

SEQ ID NO: 4562537 - DNA, 25 bp, Homo sapien
tataggaagaggaagacacagctct

SEQ ID NO: 4562538 - DNA, 25 bp, Homo sapien
ctataggaagaggaagacacagctc

SEQ ID NO: 4562539 - DNA, 25 bp, Homo sapien
catgatccctagaccatgtccccag

SEQ ID NO: 4562540 - DNA, 25 bp, Homo sapien
tgatccctagaccatgtccccagct

SEQ ID NO: 4562541 - DNA, 25 bp, Homo sapien
gcatgatccctagaccatgtcccca

SEQ ID NO: 4562542 - DNA, 25 bp, Homo sapien
ctgcatgatccctagaccatgtccc

SEQ ID NO: 4562543 - DNA, 25 bp, Homo sapien
gcttcagattgagtcgaaatcttcg

SEQ ID NO: 4562544 - DNA, 25 bp, Homo sapien
tcagattgagtcgaaatcttcggtc

SEQ ID NO: 4562545 - DNA, 25 bp, Homo sapien
agattgagtcgaaatcttcggtcac

SEQ ID NO: 4562546 - DNA, 25 bp, Homo sapien
gttgcttcagattgagtcgaaatct

SEQ ID NO: 4562547 - DNA, 25 bp, Homo sapien
tctgcttccggtcctcgttgttttg

SEQ ID NO: 4562548 - DNA, 25 bp, Homo sapien
ctgcttccggtcctcgttgttttgg

SEQ ID NO: 4562549 - DNA, 25 bp, Homo sapien
ctcttctagttctgagttcttctgc

SEQ ID NO: 4562550 - DNA, 25 bp, Homo sapien
tcttctagttctgagttcttctgct

SEQ ID NO: 4562551 - DNA, 25 bp, Homo sapien
tctctgtctttggttacctccttga

SEQ ID NO: 4562552 - DNA, 25 bp, Homo sapien
tgtctttggttacctccttgatata

SEQ ID NO: 4562553 - DNA, 25 bp, Homo sapien
atctctgtctttggttacctccttg

SEQ ID NO: 4562554 - DNA, 25 bp, Homo sapien
ctgggctgccaagggatggggcagg

SEQ ID NO: 4562555 - DNA, 25 bp, Homo sapien
agggatggggcaggcggtaggactc

SEQ ID NO: 4562556 - DNA, 25 bp, Homo sapien
tgggaagctgggctgccaagggatg

SEQ ID NO: 4562557 - DNA, 25 bp, Homo sapien
caagggatggggcaggcggtaggac

SEQ ID NO: 4562558 - DNA, 25 bp, Homo sapien
caaagagtccattacaactctccca

SEQ ID NO: 4562559 - DNA, 25 bp, Homo sapien
gcaaagagtccattacaactctccc

SEQ ID NO: 4562560 - DNA, 25 bp, Homo sapien
aaagagtccattacaactctcccac

SEQ ID NO: 4562561 - DNA, 25 bp, Homo sapien
cagcaaagagtccattacaactctc

SEQ ID NO: 4562562 - DNA, 25 bp, Homo sapien
ctgctgggaatactgcaggccgctg

SEQ ID NO: 4562563 - DNA, 25 bp, Homo sapien
tgctgggaatactgcaggccgctgg

SEQ ID NO: 4562564 - DNA, 25 bp, Homo sapien
actgctgggaatactgcaggccgct

SEQ ID NO: 4562565 - DNA, 25 bp, Homo sapien
aaggatgacagggtgcccagattcc

SEQ ID NO: 4562566 - DNA, 25 bp, Homo sapien
caggttgaaggatgacagggtgccc

SEQ ID NO: 4562567 - DNA, 25 bp, Homo sapien
ggatgacagggtgcccagattccca

SEQ ID NO: 4562568 - DNA, 25 bp, Homo sapien
ttgaaggatgacagggtgcccagat

SEQ ID NO: 4562569 - DNA, 25 bp, Homo sapien
tttctcagacatcagtttgttggtt

SEQ ID NO: 4562570 - DNA, 25 bp, Homo sapien
gacatcagtttgttggttctctgaa

SEQ ID NO: 4562571 - DNA, 25 bp, Homo sapien
caaagtgcctggcagcacgttgcat

SEQ ID NO: 4562572 - DNA, 25 bp, Homo sapien
aaagtgcctggcagcacgttgcata

SEQ ID NO: 4562573 - DNA, 25 bp, Homo sapien
cctggttttgctggctttcttgctt

SEQ ID NO: 4562574 - DNA, 25 bp, Homo sapien
ggttttgctggctttcttgcttttc

SEQ ID NO: 4562575 - DNA, 25 bp, Homo sapien
ctaactgcctctttagggttccctg

SEQ ID NO: 4562576 - DNA, 25 bp, Homo sapien
ttccctggttttgctggctttcttg

SEQ ID NO: 4562577 - DNA, 25 bp, Homo sapien
ccatgggaccaggttatcagggacc

SEQ ID NO: 4562578 - DNA, 25 bp, Homo sapien
ctgaaatgcacgcagagaggaggag

SEQ ID NO: 4562579 - DNA, 25 bp, Homo sapien
tctgaaatgcacgcagagaggagga

SEQ ID NO: 4562580 - DNA, 25 bp, Homo sapien
ttagggctgggagctgttgggatgt

SEQ ID NO: 4562581 - DNA, 25 bp, Homo sapien
tgggatgtcttagcgggcagagggt

SEQ ID NO: 4562582 - DNA, 25 bp, Homo sapien
tagggctgggagctgttgggatgtc

SEQ ID NO: 4562583 - DNA, 25 bp, Homo sapien
ctgttgggatgtcttagcgggcaga

SEQ ID NO: 4562584 - DNA, 25 bp, Homo sapien
agcaaaaaatgatgcaaccagtcat

SEQ ID NO: 4562585 - DNA, 25 bp, Homo sapien
aaaaatgatgcaaccagtcatgtgg

SEQ ID NO: 4562586 - DNA, 25 bp, Homo sapien
atctggtgcttctgcagcaaaaaat

SEQ ID NO: 4562587 - DNA, 25 bp, Homo sapien
ctggtgcttctgcagcaaaaaatga

SEQ ID NO: 4562588 - DNA, 25 bp, Homo sapien
ctgtaagattagggccattgtcagc

SEQ ID NO: 4562589 - DNA, 25 bp, Homo sapien
ccatttgtccaatgtggggaacgca

SEQ ID NO: 4562590 - DNA, 25 bp, Homo sapien
catttgtccaatgtggggaacgcag

SEQ ID NO: 4562591 - DNA, 25 bp, Homo sapien
atttgtccaatgtggggaacgcagc

SEQ ID NO: 4562592 - DNA, 25 bp, Homo sapien
tttgtccaatgtggggaacgcagca

SEQ ID NO: 4562593 - DNA, 25 bp, Homo sapien
acaagggcagggggagaaagagtcg

SEQ ID NO: 4562594 - DNA, 25 bp, Homo sapien
gagcaatgtgcgaccttgaacagtg

SEQ ID NO: 4562595 - DNA, 25 bp, Homo sapien
ctcccttgattgctcgtgggctcct

SEQ ID NO: 4562596 - DNA, 25 bp, Homo sapien
ccttgattgctcgtgggctccttga

SEQ ID NO: 4562597 - DNA, 25 bp, Homo sapien
tcgtgggctccttgagcaatgtgcg

SEQ ID NO: 4562598 - DNA, 25 bp, Homo sapien
tgtccattataccatgcccgttaaa

SEQ ID NO: 4562599 - DNA, 25 bp, Homo sapien
ggacttgcttctataacccttagag

SEQ ID NO: 4562600 - DNA, 25 bp, Homo sapien
tttgatactaaagctacatcacttg

SEQ ID NO: 4562601 - DNA, 25 bp, Homo sapien
ctctaaatatgataatggacttgtc

SEQ ID NO: 4562602 - DNA, 25 bp, Homo sapien
gatgggctttcctaagagcttttct

SEQ ID NO: 4562603 - DNA, 25 bp, Homo sapien
gtgttgatgggctttcctaagagct

SEQ ID NO: 4562604 - DNA, 25 bp, Homo sapien
tcctttgtgttgatgggctttccta

SEQ ID NO: 4562605 - DNA, 25 bp, Homo sapien
cctttgtgttgatgggctttcctaa

SEQ ID NO: 4562606 - DNA, 25 bp, Homo sapien
ctcttcggtgctcttcatgctctac

SEQ ID NO: 4562607 - DNA, 25 bp, Homo sapien
ggaatgtggccgtcatttgcagccc

SEQ ID NO: 4562608 - DNA, 25 bp, Homo sapien
ttgcagcccattgattggttcccag

SEQ ID NO: 4562609 - DNA, 25 bp, Homo sapien
ggctcctcgcatttttcctattccg

SEQ ID NO: 4562610 - DNA, 25 bp, Homo sapien
tttcactgagactgataacattttg

SEQ ID NO: 4562611 - DNA, 25 bp, Homo sapien
ggaagaaaaagcacccctgagctct

SEQ ID NO: 4562612 - DNA, 25 bp, Homo sapien
tcagtatttccagatgtaatgaaag

SEQ ID NO: 4562613 - DNA, 25 bp, Homo sapien
aatgaaagaggacctctttctgcac

SEQ ID NO: 4562614 - DNA, 25 bp, Homo sapien
gcagaggagttctgatagtgctgat

SEQ ID NO: 4562615 - DNA, 25 bp, Homo sapien
gaaaacatccctgccgacttgagca

SEQ ID NO: 4562616 - DNA, 25 bp, Homo sapien
caaatgaagcggatccaaggagtga

SEQ ID NO: 4562617 - DNA, 25 bp, Homo sapien
tatgatggccatagcgaagcagagt

SEQ ID NO: 4562618 - DNA, 25 bp, Homo sapien
caaggagtgatgacaagcgctgcac

SEQ ID NO: 4562619 - DNA, 25 bp, Homo sapien
gcttcgcaggaaacgggtcttgcca

SEQ ID NO: 4562620 - DNA, 25 bp, Homo sapien
aacgggtcttgccagatttcagggc

SEQ ID NO: 4562621 - DNA, 25 bp, Homo sapien
cgggtcttgccagatttcagggcct

SEQ ID NO: 4562622 - DNA, 25 bp, Homo sapien
ctagtggcttcgcaggaaacgggtc

SEQ ID NO: 4562623 - DNA, 25 bp, Homo sapien
ttctctgagccagggatgtacttgg

SEQ ID NO: 4562624 - DNA, 25 bp, Homo sapien
tgcagataattgacagagccccttc

SEQ ID NO: 4562625 - DNA, 25 bp, Homo sapien
gtttccggagagtgccctacaccaa

SEQ ID NO: 4562626 - DNA, 25 bp, Homo sapien
tccgatccataaagccctaagagcc

SEQ ID NO: 4562627 - DNA, 25 bp, Homo sapien
catcatcacgtggatccccagaggt

SEQ ID NO: 4562628 - DNA, 25 bp, Homo sapien
ggaggggcacatcatcacgtggatc

SEQ ID NO: 4562629 - DNA, 25 bp, Homo sapien
acgtggatccccagaggtgtcccac

SEQ ID NO: 4562630 - DNA, 25 bp, Homo sapien
gggcacatcatcacgtggatcccca

SEQ ID NO: 4562631 - DNA, 25 bp, Homo sapien
ctttcctctgccgccaactccccgt

SEQ ID NO: 4562632 - DNA, 25 bp, Homo sapien
cctcagcgacgatggcagctgctga

SEQ ID NO: 4562633 - DNA, 25 bp, Homo sapien
cactgagacctcagcgacgatggca

SEQ ID NO: 4562634 - DNA, 25 bp, Homo sapien
acaaaacacggccttcttgccatcc

SEQ ID NO: 4562635 - DNA, 25 bp, Homo sapien
cttgccatcccttgtagtctgtgga

SEQ ID NO: 4562636 - DNA, 25 bp, Homo sapien
cgtagtgtagggtattaatcagact

SEQ ID NO: 4562637 - DNA, 25 bp, Homo sapien
gaagacgtagtgtagggtattaatc

SEQ ID NO: 4562638 - DNA, 25 bp, Homo sapien
ctgagaagacgtagtgtagggtatt

SEQ ID NO: 4562639 - DNA, 25 bp, Homo sapien
gaccactgagaagacgtagtgtagg

SEQ ID NO: 4562640 - DNA, 25 bp, Homo sapien
ggtttagctgacaaactcgccgatg

SEQ ID NO: 4562641 - DNA, 25 bp, Homo sapien
caaactcgccgatgtcctcttgggc

SEQ ID NO: 4562642 - DNA, 25 bp, Homo sapien
tagctgacaaactcgccgatgtcct

SEQ ID NO: 4562643 - DNA, 25 bp, Homo sapien
gacaaactcgccgatgtcctcttgg

SEQ ID NO: 4562644 - DNA, 25 bp, Homo sapien
gcgcaccgagagccttcacgaagct

SEQ ID NO: 4562645 - DNA, 25 bp, Homo sapien
ggcgcaccgagagccttcacgaagc

SEQ ID NO: 4562646 - DNA, 25 bp, Homo sapien
cggcgcaccgagagccttcacgaag

SEQ ID NO: 4562647 - DNA, 25 bp, Homo sapien
tgccctgagattgccgaacactttt

SEQ ID NO: 4562648 - DNA, 25 bp, Homo sapien
cacttttatgtcctggctttacaga

SEQ ID NO: 4562649 - DNA, 25 bp, Homo sapien
catggggtacaattgtgccctgaga

SEQ ID NO: 4562650 - DNA, 25 bp, Homo sapien
caataatggatctgtcatggggtac

SEQ ID NO: 4562651 - DNA, 25 bp, Homo sapien
tggagatttccctctcagagaggat

SEQ ID NO: 4562652 - DNA, 25 bp, Homo sapien
ggagatttccctctcagagaggatt

SEQ ID NO: 4562653 - DNA, 25 bp, Homo sapien
ctggagatttccctctcagagagga

SEQ ID NO: 4562654 - DNA, 25 bp, Homo sapien
gaatatctggtgtggccgctctaat

SEQ ID NO: 4562655 - DNA, 25 bp, Homo sapien
taactctgagggaagtgataagatg

SEQ ID NO: 4562656 - DNA, 25 bp, Homo sapien
tatcaacagaatcaatttgaatatc

SEQ ID NO: 4562657 - DNA, 25 bp, Homo sapien
gttttctaaactcctggagcttgta

SEQ ID NO: 4562658 - DNA, 25 bp, Homo sapien
tgctctcaggaaaggatacaaacat

SEQ ID NO: 4562659 - DNA, 25 bp, Homo sapien
tgatcactctgaataaagacagcga

SEQ ID NO: 4562660 - DNA, 25 bp, Homo sapien
tctgctgggtagagacgaagcccca

SEQ ID NO: 4562661 - DNA, 25 bp, Homo sapien
tttaattgaccttggaaagccacag

SEQ ID NO: 4562662 - DNA, 25 bp, Homo sapien
tattgggccctatgaacggaggact

SEQ ID NO: 4562663 - DNA, 25 bp, Homo sapien
catcccgctgatgggtagtggaaaa

SEQ ID NO: 4562664 - DNA, 25 bp, Homo sapien
tgcttgataggaagctattgggccc

SEQ ID NO: 4562665 - DNA, 25 bp, Homo sapien
tgtaaacctggcatttggaccataa

SEQ ID NO: 4562666 - DNA, 25 bp, Homo sapien
ctccggggctctcgctgggtttccg

SEQ ID NO: 4562667 - DNA, 25 bp, Homo sapien
cagtcggcgccagagagcggattcc

SEQ ID NO: 4562668 - DNA, 25 bp, Homo sapien
agagcggattcctggccgtgggcag

SEQ ID NO: 4562669 - DNA, 25 bp, Homo sapien
tttgcaaacagcctcgcagtcggcg

SEQ ID NO: 4562670 - DNA, 25 bp, Homo sapien
cgccagtgcggagttccttctccgg

SEQ ID NO: 4562671 - DNA, 25 bp, Homo sapien
acagcccgccagtgcggagttcctt

SEQ ID NO: 4562672 - DNA, 25 bp, Homo sapien
cagtgcggagttccttctccggtgc

SEQ ID NO: 4562673 - DNA, 25 bp, Homo sapien
gtgcggagttccttctccggtgccg

SEQ ID NO: 4562674 - DNA, 25 bp, Homo sapien
gatcccacgactgccctttacttgg

SEQ ID NO: 4562675 - DNA, 25 bp, Homo sapien
ccacgggcgaactgctggccgctga

SEQ ID NO: 4562676 - DNA, 25 bp, Homo sapien
tacttggcaatctcgccacgggcga

SEQ ID NO: 4562677 - DNA, 25 bp, Homo sapien
cggggccaggctttgcatccagtgc

SEQ ID NO: 4562678 - DNA, 25 bp, Homo sapien
tcggtcccacgagctgaaattttgc

SEQ ID NO: 4562679 - DNA, 25 bp, Homo sapien
gaggaacgactttcgagggcgccat

SEQ ID NO: 4562680 - DNA, 25 bp, Homo sapien
cgcccattggaagctggagggacct

SEQ ID NO: 4562681 - DNA, 25 bp, Homo sapien
gagacgagtatttcgggatccctga

SEQ ID NO: 4562682 - DNA, 25 bp, Homo sapien
tcacggacagcgtgctgggcttgcc

SEQ ID NO: 4562683 - DNA, 25 bp, Homo sapien
gcttgggaacgagagccgccgtcac

SEQ ID NO: 4562684 - DNA, 25 bp, Homo sapien
aagggcgcgcggactacagcgcgtc

SEQ ID NO: 4562685 - DNA, 25 bp, Homo sapien
gagtgtagagcgttctcccggtgcc

SEQ ID NO: 4562686 - DNA, 25 bp, Homo sapien
aggcgccttggttcgtggatcagga

SEQ ID NO: 4562687 - DNA, 25 bp, Homo sapien
ggcgccttggttcgtggatcaggac

SEQ ID NO: 4562688 - DNA, 25 bp, Homo sapien
gaggcgccttggttcgtggatcagg

SEQ ID NO: 4562689 - DNA, 25 bp, Homo sapien
tgcgtgttctgctctcgcagctcgt

SEQ ID NO: 4562690 - DNA, 25 bp, Homo sapien
tttagcggcgacagcagtagcgccc

SEQ ID NO: 4562691 - DNA, 25 bp, Homo sapien
tgagcttccagtcgcctctttggct

SEQ ID NO: 4562692 - DNA, 25 bp, Homo sapien
gaggccgccgaacagcctgagcttc

SEQ ID NO: 4562693 - DNA, 25 bp, Homo sapien
gccctggtgctgtaagtaccactta

SEQ ID NO: 4562694 - DNA, 25 bp, Homo sapien
tgagagaggaatgaactgaagtgtt

SEQ ID NO: 4562695 - DNA, 25 bp, Homo sapien
ccaaaatacacgtaaattgccctgg

SEQ ID NO: 4562696 - DNA, 25 bp, Homo sapien
gaactgaagtgttggcgttgtcaaa

SEQ ID NO: 4562697 - DNA, 25 bp, Homo sapien
gatgtcatagtattgaggttttgtc

SEQ ID NO: 4562698 - DNA, 25 bp, Homo sapien
tattgaggttttgtcggcacttccg

SEQ ID NO: 4562699 - DNA, 25 bp, Homo sapien
gaggctagaagggaccacagaaacc

SEQ ID NO: 4562700 - DNA, 25 bp, Homo sapien
tttgtcggcacttccggtcttcttc

SEQ ID NO: 4562701 - DNA, 25 bp, Homo sapien
tgtaaaggatagcttcagaaaaact

SEQ ID NO: 4562702 - DNA, 25 bp, Homo sapien
tacaagcactctcctttatcttaac

SEQ ID NO: 4562703 - DNA, 25 bp, Homo sapien
gaggtggtgaaagtaagagctcagg

SEQ ID NO: 4562704 - DNA, 25 bp, Homo sapien
ggtgaaagtaagagctcaggaaagc

SEQ ID NO: 4562705 - DNA, 25 bp, Homo sapien
tgccccgatcttgtgacagtagcta

SEQ ID NO: 4562706 - DNA, 25 bp, Homo sapien
gctgagctggctctttgatgaacct

SEQ ID NO: 4562707 - DNA, 25 bp, Homo sapien
tagatggagctttatgaatgtgcct

SEQ ID NO: 4562708 - DNA, 25 bp, Homo sapien
gagcctgcagcaatgccttgtcggg

SEQ ID NO: 4562709 - DNA, 25 bp, Homo sapien
aggccttgcacattgattactatca

SEQ ID NO: 4562710 - DNA, 25 bp, Homo sapien
ggccttgcacattgattactatcat

SEQ ID NO: 4562711 - DNA, 25 bp, Homo sapien
taacggtaaatgtgaccatactgct

SEQ ID NO: 4562712 - DNA, 25 bp, Homo sapien
gaacaggtaacggtaaatgtgacca

SEQ ID NO: 4562713 - DNA, 25 bp, Homo sapien
gtaaatgtgaccatactgcttgttt

SEQ ID NO: 4562714 - DNA, 25 bp, Homo sapien
caggtaacggtaaatgtgaccatac

SEQ ID NO: 4562715 - DNA, 25 bp, Homo sapien
gactaatcgattcctggtccaggag

SEQ ID NO: 4562716 - DNA, 25 bp, Homo sapien
gaggacaaatccctgtaccacctga

SEQ ID NO: 4562717 - DNA, 25 bp, Homo sapien
agttctgaaactccatagggcctgc

SEQ ID NO: 4562718 - DNA, 25 bp, Homo sapien
agtcaactctaaggctgtggtatcc

SEQ ID NO: 4562719 - DNA, 25 bp, Homo sapien
tgctctagaaagtccacaacatggc

SEQ ID NO: 4562720 - DNA, 25 bp, Homo sapien
aagtccacaacatggcctaatccag

SEQ ID NO: 4562721 - DNA, 25 bp, Homo sapien
cctaatccagtagtggttatttaag

SEQ ID NO: 4562722 - DNA, 25 bp, Homo sapien
ccatcagttgctgctctagaaagtc

SEQ ID NO: 4562723 - DNA, 25 bp, Homo sapien
ttttgtatgagtcaacggtagagcc

SEQ ID NO: 4562724 - DNA, 25 bp, Homo sapien
catccacagttgttgggccttggcg

SEQ ID NO: 4562725 - DNA, 25 bp, Homo sapien
tgagggcttatgtagcgatgaccag

SEQ ID NO: 4562726 - DNA, 25 bp, Homo sapien
gtcaggtctggtcaatggtccctca

SEQ ID NO: 4562727 - DNA, 25 bp, Homo sapien
ttcacacacttatcaccaggcagag

SEQ ID NO: 4562728 - DNA, 25 bp, Homo sapien
caggcctcattttggtgtgggaccc

SEQ ID NO: 4562729 - DNA, 25 bp, Homo sapien
cacatccttggcatagtcttgggta

SEQ ID NO: 4562730 - DNA, 25 bp, Homo sapien
taaattggaaagctgttgcgaaggc

SEQ ID NO: 4562731 - DNA, 25 bp, Homo sapien
gctgtcccaggtggaatccttgacg

SEQ ID NO: 4562732 - DNA, 25 bp, Homo sapien
ttgcagcctttgactgttctctgaa

SEQ ID NO: 4562733 - DNA, 25 bp, Homo sapien
gaaatctgcatctcactctcttgac

SEQ ID NO: 4562734 - DNA, 25 bp, Homo sapien
tccttgacgatgctgtgggtggcct

SEQ ID NO: 4562735 - DNA, 25 bp, Homo sapien
tcaacttgttgaagaccatgagtaa

SEQ ID NO: 4562736 - DNA, 25 bp, Homo sapien
ctcggatgctcggctgcccagaagt

SEQ ID NO: 4562737 - DNA, 25 bp, Homo sapien
gcagggtgacatctggactggcctc

SEQ ID NO: 4562738 - DNA, 25 bp, Homo sapien
gaagtttctggatcaacttgttgaa

SEQ ID NO: 4562739 - DNA, 25 bp, Homo sapien
agaactctgggctcacacgatcctc

SEQ ID NO: 4562740 - DNA, 25 bp, Homo sapien
ttggtctagaactctgggctcacac

SEQ ID NO: 4562741 - DNA, 25 bp, Homo sapien
ctagaactctgggctcacacgatcc

SEQ ID NO: 4562742 - DNA, 25 bp, Homo sapien
ggtctagaactctgggctcacacga

SEQ ID NO: 4562743 - DNA, 25 bp, Homo sapien
cttgaactggggaggcagagttgtg

SEQ ID NO: 4562744 - DNA, 25 bp, Homo sapien
actggggaggcagagttgtggtgag

SEQ ID NO: 4562745 - DNA, 25 bp, Homo sapien
ccgagatcgtgccatcgcactccag

SEQ ID NO: 4562746 - DNA, 25 bp, Homo sapien
ccatcgcactccagcctggacaaca

SEQ ID NO: 4562747 - DNA, 25 bp, Homo sapien
catttgaggactcggagagttgttg

SEQ ID NO: 4562748 - DNA, 25 bp, Homo sapien
tcactgacatttgaggactcggaga

SEQ ID NO: 4562749 - DNA, 25 bp, Homo sapien
tgacatttgaggactcggagagttg

SEQ ID NO: 4562750 - DNA, 25 bp, Homo sapien
ggactcggagagttgttgtggcctt

SEQ ID NO: 4562751 - DNA, 25 bp, Homo sapien
attgcatttgtgttccctctggcct

SEQ ID NO: 4562752 - DNA, 25 bp, Homo sapien
taattgcatttgtgttccctctggc

SEQ ID NO: 4562753 - DNA, 25 bp, Homo sapien
tgggggtgcttggtcggatgttcat

SEQ ID NO: 4562754 - DNA, 25 bp, Homo sapien
cttctttgggggtgcttggtcggat

SEQ ID NO: 4562755 - DNA, 25 bp, Homo sapien
tgaagtcccgccagggcacttctgg

SEQ ID NO: 4562756 - DNA, 25 bp, Homo sapien
ggtcctcacaaatagtgccactgaa

SEQ ID NO: 4562757 - DNA, 25 bp, Homo sapien
tctggtcctcacaaatagtgccact

SEQ ID NO: 4562758 - DNA, 25 bp, Homo sapien
ctaagggggcttgaagtcccgccag

SEQ ID NO: 4562759 - DNA, 25 bp, Homo sapien
agattgaacttctgacacagcagtg

SEQ ID NO: 4562760 - DNA, 25 bp, Homo sapien
ggtgtcttctagcagaatctagatt

SEQ ID NO: 4562761 - DNA, 25 bp, Homo sapien
gtgtcttctagcagaatctagattc

SEQ ID NO: 4562762 - DNA, 25 bp, Homo sapien
agcccagccttgagattgaacttct

SEQ ID NO: 4562763 - DNA, 25 bp, Homo sapien
gcttgctgtgcctgtctacctgttg

SEQ ID NO: 4562764 - DNA, 25 bp, Homo sapien
gctgtgcctgtctacctgttgccag

SEQ ID NO: 4562765 - DNA, 25 bp, Homo sapien
tgtgcctgtctacctgttgccagat

SEQ ID NO: 4562766 - DNA, 25 bp, Homo sapien
tgcctgtctacctgttgccagatgt

SEQ ID NO: 4562767 - DNA, 25 bp, Homo sapien
tgtcccgctgtgcagtagctcgctg

SEQ ID NO: 4562768 - DNA, 25 bp, Homo sapien
tgggcttgccccatagcagctgtgg

SEQ ID NO: 4562769 - DNA, 25 bp, Homo sapien
tgcagtagctcgctgctgctgaacc

SEQ ID NO: 4562770 - DNA, 25 bp, Homo sapien
agctgtggttgctggcatgtcccgc

SEQ ID NO: 4562771 - DNA, 25 bp, Homo sapien
tcctttagcctctttgtccagtctt

SEQ ID NO: 4562772 - DNA, 25 bp, Homo sapien
ctttgtccagtctttactactcctt

SEQ ID NO: 4562773 - DNA, 25 bp, Homo sapien
ctttactactccttaggctcaccct

SEQ ID NO: 4562774 - DNA, 25 bp, Homo sapien
atcctttagcctctttgtccagtct

SEQ ID NO: 4562775 - DNA, 25 bp, Homo sapien
ggattgttatgtggttcccagaccc

SEQ ID NO: 4562776 - DNA, 25 bp, Homo sapien
agagccctttacgacatgctgccca

SEQ ID NO: 4562777 - DNA, 25 bp, Homo sapien
tctccagagccctttacgacatgct

SEQ ID NO: 4562778 - DNA, 25 bp, Homo sapien
tcaggccagtggattgttatgtggt

SEQ ID NO: 4562779 - DNA, 25 bp, Homo sapien
cagtggaatcctgccgatcttgaca

SEQ ID NO: 4562780 - DNA, 25 bp, Homo sapien
cagcacgtgtgttttgtctgtcctc

SEQ ID NO: 4562781 - DNA, 25 bp, Homo sapien
tgccatctgtgcgatgtgatatcat

SEQ ID NO: 4562782 - DNA, 25 bp, Homo sapien
taatagtgtagatggtagatgtgcc

SEQ ID NO: 4562783 - DNA, 25 bp, Homo sapien
tccacccttagccaaattagaagca

SEQ ID NO: 4562784 - DNA, 25 bp, Homo sapien
ccttagccaaattagaagcagacat

SEQ ID NO: 4562785 - DNA, 25 bp, Homo sapien
cttctccacccttagccaaattaga

SEQ ID NO: 4562786 - DNA, 25 bp, Homo sapien
ctgccggcaaagatttgatgacttt

SEQ ID NO: 4562787 - DNA, 25 bp, Homo sapien
tgtgggttgctcatggattcctaga

SEQ ID NO: 4562788 - DNA, 25 bp, Homo sapien
ttaaaggttctaaattgaggcgtgc

SEQ ID NO: 4562789 - DNA, 25 bp, Homo sapien
cctggagaccgcttctggcttatct

SEQ ID NO: 4562790 - DNA, 25 bp, Homo sapien
tctgggttcgccaacactcgtggtc

SEQ ID NO: 4562791 - DNA, 25 bp, Homo sapien
agggaggtcggcactgatttctgtc

SEQ ID NO: 4562792 - DNA, 25 bp, Homo sapien
cttggaaacttgatgaagtgggagc

SEQ ID NO: 4562793 - DNA, 25 bp, Homo sapien
ggttctatgaagcagtagagccaga

SEQ ID NO: 4562794 - DNA, 25 bp, Homo sapien
tcctctgctttgacacagtgaggct

SEQ ID NO: 4562795 - DNA, 25 bp, Homo sapien
gtttaatagtgccactcagaggcct

SEQ ID NO: 4562796 - DNA, 25 bp, Homo sapien
gaagtttaatagtgccactcagagg

SEQ ID NO: 4562797 - DNA, 25 bp, Homo sapien
cactttaattgaggctggtttctaa

SEQ ID NO: 4562798 - DNA, 25 bp, Homo sapien
aatacctgtacccaagcagtccttc

SEQ ID NO: 4562799 - DNA, 25 bp, Homo sapien
gctagagctacagaacataacacag

SEQ ID NO: 4562800 - DNA, 25 bp, Homo sapien
caatgaaaacgctactgggaaagag

SEQ ID NO: 4562801 - DNA, 25 bp, Homo sapien
caaggactcaattttcaggtagata

SEQ ID NO: 4562802 - DNA, 25 bp, Homo sapien
agtgagaccttgtaccagctgttga

SEQ ID NO: 4562803 - DNA, 25 bp, Homo sapien
accacaccagtattagatccctggc

SEQ ID NO: 4562804 - DNA, 25 bp, Homo sapien
aagaattccactggccagaattggc

SEQ ID NO: 4562805 - DNA, 25 bp, Homo sapien
tatttgaccgagaccacaccagtat

SEQ ID NO: 4562806 - DNA, 25 bp, Homo sapien
gccagaattggcctatttgaccgag

SEQ ID NO: 4562807 - DNA, 25 bp, Homo sapien
ctgtctggacgatgcccctgccctg

SEQ ID NO: 4562808 - DNA, 25 bp, Homo sapien
attgcataatgaaggctgtcagaga

SEQ ID NO: 4562809 - DNA, 25 bp, Homo sapien
gagacttgaggacagtgtgtcaccc

SEQ ID NO: 4562810 - DNA, 25 bp, Homo sapien
cagggtggactctgcctgaattgca

SEQ ID NO: 4562811 - DNA, 25 bp, Homo sapien
gctgcagacacagcctaaagagtgg

SEQ ID NO: 4562812 - DNA, 25 bp, Homo sapien
ttgtacagaatgtcgctgcttccca

SEQ ID NO: 4562813 - DNA, 25 bp, Homo sapien
gcccacttgcgtggctctttccaga

SEQ ID NO: 4562814 - DNA, 25 bp, Homo sapien
gcctttccatttgtacagaatgtcg

SEQ ID NO: 4562815 - DNA, 25 bp, Homo sapien
cctgagtctgttagatccctggagc

SEQ ID NO: 4562816 - DNA, 25 bp, Homo sapien
gagcaccctgcgttcacgttttgag

SEQ ID NO: 4562817 - DNA, 25 bp, Homo sapien
gctcctcgaagtctagaactgtcca

SEQ ID NO: 4562818 - DNA, 25 bp, Homo sapien
cgttttgagttgttatctcacctag

SEQ ID NO: 4562819 - DNA, 25 bp, Homo sapien
taagattcaaggagcccagtaactg

SEQ ID NO: 4562820 - DNA, 25 bp, Homo sapien
gttgtggccctcgtccttcactggg

SEQ ID NO: 4562821 - DNA, 25 bp, Homo sapien
cccagtaactgtgcggcaaggcatc

SEQ ID NO: 4562822 - DNA, 25 bp, Homo sapien
tcgtgggacagttgcctgacacctg

SEQ ID NO: 4562823 - DNA, 25 bp, Homo sapien
ttgtctctctcccgttgggcacagt

SEQ ID NO: 4562824 - DNA, 25 bp, Homo sapien
cacagtgacctgtcatcctgcgagg

SEQ ID NO: 4562825 - DNA, 25 bp, Homo sapien
gccttctgtgattccttcagcttcc

SEQ ID NO: 4562826 - DNA, 25 bp, Homo sapien
ctgtcatcctgcgagggttggcttc

SEQ ID NO: 4562827 - DNA, 25 bp, Homo sapien
ccagacaagctgttaataagtgtta

SEQ ID NO: 4562828 - DNA, 25 bp, Homo sapien
agcagcaaacccagacaagctgtta

SEQ ID NO: 4562829 - DNA, 25 bp, Homo sapien
gcaaacccagacaagctgttaataa

SEQ ID NO: 4562830 - DNA, 25 bp, Homo sapien
caagctgttaataagtgttaaacac

SEQ ID NO: 4562831 - DNA, 25 bp, Homo sapien
cttcttgtgtaagccggtgaactca

SEQ ID NO: 4562832 - DNA, 25 bp, Homo sapien
catgaggttggtgcaatctggagtc

SEQ ID NO: 4562833 - DNA, 25 bp, Homo sapien
gcaatctggagtcggatatctctct

SEQ ID NO: 4562834 - DNA, 25 bp, Homo sapien
actttctggaagcatggcactttca

SEQ ID NO: 4562835 - DNA, 25 bp, Homo sapien
caaggtgacgtgctctttgggtgaa

SEQ ID NO: 4562836 - DNA, 25 bp, Homo sapien
gggtgaatatagttcctggactttc

SEQ ID NO: 4562837 - DNA, 25 bp, Homo sapien
aaactgtaatgtcaaggtgacgtgc

SEQ ID NO: 4562838 - DNA, 25 bp, Homo sapien
gggacggtgccaaactgtaatgtca

SEQ ID NO: 4562839 - DNA, 25 bp, Homo sapien
ctgcactttttacagccagccagtc

SEQ ID NO: 4562840 - DNA, 25 bp, Homo sapien
gactgcactttttacagccagccag

SEQ ID NO: 4562841 - DNA, 25 bp, Homo sapien
gcactttttacagccagccagtctt

SEQ ID NO: 4562842 - DNA, 25 bp, Homo sapien
tttttacagccagccagtcttgctt

SEQ ID NO: 4562843 - DNA, 25 bp, Homo sapien
ctgcctttccttgctgttgcccctg

SEQ ID NO: 4562844 - DNA, 25 bp, Homo sapien
ggagaggctttgtcctctcacaccc

SEQ ID NO: 4562845 - DNA, 25 bp, Homo sapien
ctttccttgctgttgcccctgcagg

SEQ ID NO: 4562846 - DNA, 25 bp, Homo sapien
ggcctctctggagaggctttgtcct

SEQ ID NO: 4562847 - DNA, 25 bp, Homo sapien
acctggctccactgagagacctgag

SEQ ID NO: 4562848 - DNA, 25 bp, Homo sapien
aaaagccttcccttccaatcagcat

SEQ ID NO: 4562849 - DNA, 25 bp, Homo sapien
caggtgtggtttccccagaaatgct

SEQ ID NO: 4562850 - DNA, 25 bp, Homo sapien
cggtgtttataaccacatcctgagc

SEQ ID NO: 4562851 - DNA, 25 bp, Homo sapien
gggaatgcaggtgttgtgcccccct

SEQ ID NO: 4562852 - DNA, 25 bp, Homo sapien
acccactaccttggctcggccctct

SEQ ID NO: 4562853 - DNA, 25 bp, Homo sapien
cccagcccttggatgcatcattaga

SEQ ID NO: 4562854 - DNA, 25 bp, Homo sapien
agctcacatgaggacccactacctt

SEQ ID NO: 4562855 - DNA, 25 bp, Homo sapien
gcctattttcatagcggctttgagc

SEQ ID NO: 4562856 - DNA, 25 bp, Homo sapien
cctattttcatagcggctttgagct

SEQ ID NO: 4562857 - DNA, 25 bp, Homo sapien
tgcctattttcatagcggctttgag

SEQ ID NO: 4562858 - DNA, 25 bp, Homo sapien
ttgcctattttcatagcggctttga

SEQ ID NO: 4562859 - DNA, 25 bp, Homo sapien
ctgggcgatgggacccgtgcacagt

SEQ ID NO: 4562860 - DNA, 25 bp, Homo sapien
tcactagacagaactagaggaagcc

SEQ ID NO: 4562861 - DNA, 25 bp, Homo sapien
gaggaagccttgaccatggaaccag

SEQ ID NO: 4562862 - DNA, 25 bp, Homo sapien
ctcctatggtagtgaccggatggat

SEQ ID NO: 4562863 - DNA, 25 bp, Homo sapien
ttggagaggttgttgccggcacaga

SEQ ID NO: 4562864 - DNA, 25 bp, Homo sapien
cacccaggtggtccggatgcttggt

SEQ ID NO: 4562865 - DNA, 25 bp, Homo sapien
ggttgttgccggcacagagggtgag

SEQ ID NO: 4562866 - DNA, 25 bp, Homo sapien
ggttcatttgccttccctttggaga

SEQ ID NO: 4562867 - DNA, 25 bp, Homo sapien
tgttgaattgagaatccggtacttg

SEQ ID NO: 4562868 - DNA, 25 bp, Homo sapien
ctgctgctatgagaggctgttgaat

SEQ ID NO: 4562869 - DNA, 25 bp, Homo sapien
ttgagaatccggtacttgacctgcc

SEQ ID NO: 4562870 - DNA, 25 bp, Homo sapien
gaatccggtacttgacctgccagct

SEQ ID NO: 4562871 - DNA, 25 bp, Homo sapien
gctacactgaatggctctcttttgg

SEQ ID NO: 4562872 - DNA, 25 bp, Homo sapien
tgtttgaagtgtctgctacactgaa

SEQ ID NO: 4562873 - DNA, 25 bp, Homo sapien
gctaaatcaggtgccgtgacagcat

SEQ ID NO: 4562874 - DNA, 25 bp, Homo sapien
tcaaatgcatagaggagaaggatgt

SEQ ID NO: 4562875 - DNA, 25 bp, Homo sapien
tcttccacgacagaaagtctgcctg

SEQ ID NO: 4562876 - DNA, 25 bp, Homo sapien
ggaggacacctgcacttgttaccct

SEQ ID NO: 4562877 - DNA, 25 bp, Homo sapien
tgattcctgaaacttcggacccctg

SEQ ID NO: 4562878 - DNA, 25 bp, Homo sapien
tattaacagaggactcagtgggagc

SEQ ID NO: 4562879 - DNA, 25 bp, Homo sapien
cttcattagatccaggaagatccat

SEQ ID NO: 4562880 - DNA, 25 bp, Homo sapien
tgttagaacacgatgctgctccaga

SEQ ID NO: 4562881 - DNA, 25 bp, Homo sapien
aagcatgggttgatgccgatgggca

SEQ ID NO: 4562882 - DNA, 25 bp, Homo sapien
gggaggacgggaactcccgcagcat

SEQ ID NO: 4562883 - DNA, 25 bp, Homo sapien
gaacagttaggctactgcacgcagg

SEQ ID NO: 4562884 - DNA, 25 bp, Homo sapien
ggagacttaacctatttgacagcat

SEQ ID NO: 4562885 - DNA, 25 bp, Homo sapien
cctggagacttaacctatttgacag

SEQ ID NO: 4562886 - DNA, 25 bp, Homo sapien
ctggagacttaacctatttgacagc

SEQ ID NO: 4562887 - DNA, 25 bp, Homo sapien
tggagacttaacctatttgacagca

SEQ ID NO: 4562888 - DNA, 25 bp, Homo sapien
tctgtagtaaagtctagtccaatcc

SEQ ID NO: 4562889 - DNA, 25 bp, Homo sapien
tggctttctgtagtaaagtctagtc

SEQ ID NO: 4562890 - DNA, 25 bp, Homo sapien
gtagtaaagtctagtccaatccttc

SEQ ID NO: 4562891 - DNA, 25 bp, Homo sapien
gtaaagtctagtccaatccttcttc

SEQ ID NO: 4562892 - DNA, 25 bp, Homo sapien
gacacagccttcttacggttcgaca

SEQ ID NO: 4562893 - DNA, 25 bp, Homo sapien
gactgaaaggtagactccaagagga

SEQ ID NO: 4562894 - DNA, 25 bp, Homo sapien
caagatatacatggaagcgccctgg

SEQ ID NO: 4562895 - DNA, 25 bp, Homo sapien
gattgctcgagagctgacacagcct

SEQ ID NO: 4562896 - DNA, 25 bp, Homo sapien
aagcaaagccggatgctgggctgac

SEQ ID NO: 4562897 - DNA, 25 bp, Homo sapien
atgctgggctgacgggtaacggagg

SEQ ID NO: 4562898 - DNA, 25 bp, Homo sapien
ttatggaagcaaagccggatgctgg

SEQ ID NO: 4562899 - DNA, 25 bp, Homo sapien
ccggatgctgggctgacgggtaacg

SEQ ID NO: 4562900 - DNA, 25 bp, Homo sapien
gggtggtaacatttcagacacacag

SEQ ID NO: 4562901 - DNA, 25 bp, Homo sapien
ctggagcagagggtggtaacatttc

SEQ ID NO: 4562902 - DNA, 25 bp, Homo sapien
agagggtggtaacatttcagacaca

SEQ ID NO: 4562903 - DNA, 25 bp, Homo sapien
gagggtggtaacatttcagacacac

SEQ ID NO: 4562904 - DNA, 25 bp, Homo sapien
agtatcgaggattcttatgatgtgc

SEQ ID NO: 4562905 - DNA, 25 bp, Homo sapien
tagtatcgaggattcttatgatgtg

SEQ ID NO: 4562906 - DNA, 25 bp, Homo sapien
ttagtatcgaggattcttatgatgt

SEQ ID NO: 4562907 - DNA, 25 bp, Homo sapien
catctttaataaagggcagcactca

SEQ ID NO: 4562908 - DNA, 25 bp, Homo sapien
tgtccattaaagatcagctctaggc

SEQ ID NO: 4562909 - DNA, 25 bp, Homo sapien
tgtgagaacataggcgtcggctccc

SEQ ID NO: 4562910 - DNA, 25 bp, Homo sapien
ctcagctcagttgcccggagggttc

SEQ ID NO: 4562911 - DNA, 25 bp, Homo sapien
catttttatagcaaagtttaactgg

SEQ ID NO: 4562912 - DNA, 25 bp, Homo sapien
aatctttatgaccaacaatatactt

SEQ ID NO: 4562913 - DNA, 25 bp, Homo sapien
gcaaatgcacatatccatttttata

SEQ ID NO: 4562914 - DNA, 25 bp, Homo sapien
tatgaccaacaatatacttaatgat

SEQ ID NO: 4562915 - DNA, 25 bp, Homo sapien
tggttgtgcttttctagcagtgtga

SEQ ID NO: 4562916 - DNA, 25 bp, Homo sapien
tcctgggaggactctaatgaaccgt

SEQ ID NO: 4562917 - DNA, 25 bp, Homo sapien
actttgggaaggtctcttgacttca

SEQ ID NO: 4562918 - DNA, 25 bp, Homo sapien
gtgcataccctctctgttcactgtg

SEQ ID NO: 4562919 - DNA, 25 bp, Homo sapien
gcagaggagctacttctcttcctct

SEQ ID NO: 4562920 - DNA, 25 bp, Homo sapien
ctgcagaggagctacttctcttcct

SEQ ID NO: 4562921 - DNA, 25 bp, Homo sapien
tgcagaggagctacttctcttcctc

SEQ ID NO: 4562922 - DNA, 25 bp, Homo sapien
caggaggtcacggtggagagtgagt

SEQ ID NO: 4562923 - DNA, 25 bp, Homo sapien
gtttctttgagagagctgaatcatt

SEQ ID NO: 4562924 - DNA, 25 bp, Homo sapien
cttgtagaagacaggtagggagtgg

SEQ ID NO: 4562925 - DNA, 25 bp, Homo sapien
tgtttctttgagagagctgaatcat

SEQ ID NO: 4562926 - DNA, 25 bp, Homo sapien
agagtagacgccaggaccagttgca

SEQ ID NO: 4562927 - DNA, 25 bp, Homo sapien
gtctgcaccatgaaaagcccggaga

SEQ ID NO: 4562928 - DNA, 25 bp, Homo sapien
ttcgggtgcagaagagtagacgcca

SEQ ID NO: 4562929 - DNA, 25 bp, Homo sapien
tgcaccatgaaaagcccggagaggg

SEQ ID NO: 4562930 - DNA, 25 bp, Homo sapien
aggagactgaggatccaacgggtat

SEQ ID NO: 4562931 - DNA, 25 bp, Homo sapien
cctgccccctcttgagatgtaagga

SEQ ID NO: 4562932 - DNA, 25 bp, Homo sapien
caacgggtatagttggccaagcatt

SEQ ID NO: 4562933 - DNA, 25 bp, Homo sapien
tgagtatctatcaggaagctccttc

SEQ ID NO: 4562934 - DNA, 25 bp, Homo sapien
ttccgtgaacccagacttagccact

SEQ ID NO: 4562935 - DNA, 25 bp, Homo sapien
ttgagcctgcacctcagactctgca

SEQ ID NO: 4562936 - DNA, 25 bp, Homo sapien
tgcacccagggtcctttccgtgaac

SEQ ID NO: 4562937 - DNA, 25 bp, Homo sapien
accttctccgcaatagacccgggca

SEQ ID NO: 4562938 - DNA, 25 bp, Homo sapien
ttccttcatgtcctcctgtttctgc

SEQ ID NO: 4562939 - DNA, 25 bp, Homo sapien
ctccaaatctttgtccccagcagcc

SEQ ID NO: 4562940 - DNA, 25 bp, Homo sapien
gacagaggttttccttcatgtcctc

SEQ ID NO: 4562941 - DNA, 25 bp, Homo sapien
cagcagcctttcttgacagaggttt

SEQ ID NO: 4562942 - DNA, 25 bp, Homo sapien
ggaatctctctctgcatggttaggg

SEQ ID NO: 4562943 - DNA, 25 bp, Homo sapien
gaaagctcagtttttagcctgggaa

SEQ ID NO: 4562944 - DNA, 25 bp, Homo sapien
gacagactagcccacggaatgatct

SEQ ID NO: 4562945 - DNA, 25 bp, Homo sapien
gattttagcaattgttgccagcccc

SEQ ID NO: 4562946 - DNA, 25 bp, Homo sapien
catcagcctgaggattatggccacg

SEQ ID NO: 4562947 - DNA, 25 bp, Homo sapien
gaatgtagattcgagagaccccgtg

SEQ ID NO: 4562948 - DNA, 25 bp, Homo sapien
tccagtagggccaaggtgtgaacgc

SEQ ID NO: 4562949 - DNA, 25 bp, Homo sapien
ccaaatgagtcatactgccgggtgt

SEQ ID NO: 4562950 - DNA, 25 bp, Homo sapien
caaaaagatcctctggcattcaggt

SEQ ID NO: 4562951 - DNA, 25 bp, Homo sapien
cattcgtgtcatgatagaggttgaa

SEQ ID NO: 4562952 - DNA, 25 bp, Homo sapien
gcactgggctatgggactcattcat

SEQ ID NO: 4562953 - DNA, 25 bp, Homo sapien
gatggctggtcataagttccctaga

SEQ ID NO: 4562954 - DNA, 25 bp, Homo sapien
gacacaaagtccagttgcaaagcca

SEQ ID NO: 4562955 - DNA, 25 bp, Homo sapien
ccttgttggtttctctaagagccca

SEQ ID NO: 4562956 - DNA, 25 bp, Homo sapien
ccagggctcctcttaatggtggcag

SEQ ID NO: 4562957 - DNA, 25 bp, Homo sapien
cacctgggccttgatgctaagttga

SEQ ID NO: 4562958 - DNA, 25 bp, Homo sapien
ggagcctgtgtccaacttgcactat

SEQ ID NO: 4562959 - DNA, 25 bp, Homo sapien
agtaaaagtcctgtgcttaagccag

SEQ ID NO: 4562960 - DNA, 25 bp, Homo sapien
tgcagttgcctggtatcagcctaag

SEQ ID NO: 4562961 - DNA, 25 bp, Homo sapien
gctgtgcagtgagacgttgccaacc

SEQ ID NO: 4562962 - DNA, 25 bp, Homo sapien
tacccacattgtgttcagacccaga

SEQ ID NO: 4562963 - DNA, 25 bp, Homo sapien
tgcagcctgtgcctcaataaggaga

SEQ ID NO: 4562964 - DNA, 25 bp, Homo sapien
tacagaatagcttaagggcctactc

SEQ ID NO: 4562965 - DNA, 25 bp, Homo sapien
tgcaaattcttcaaggacggttggc

SEQ ID NO: 4562966 - DNA, 25 bp, Homo sapien
aaaaagccgctactttgcctctgca

SEQ ID NO: 4562967 - DNA, 25 bp, Homo sapien
gctgtttgctcgtttatcatagagg

SEQ ID NO: 4562968 - DNA, 25 bp, Homo sapien
cgctgccccgagagctgctttatga

SEQ ID NO: 4562969 - DNA, 25 bp, Homo sapien
tgcctctgcaactatcacagttcaa

SEQ ID NO: 4562970 - DNA, 25 bp, Homo sapien
tcctacagagtagtgtgtaaccacc

SEQ ID NO: 4562971 - DNA, 25 bp, Homo sapien
cagggaagaggtcaactacagggta

SEQ ID NO: 4562972 - DNA, 25 bp, Homo sapien
ccaggtagggataaatctgtcctca

SEQ ID NO: 4562973 - DNA, 25 bp, Homo sapien
aagagggatctcaccagaccactga

SEQ ID NO: 4562974 - DNA, 25 bp, Homo sapien
tgggcagtgcgtcttagtcataaac

SEQ ID NO: 4562975 - DNA, 25 bp, Homo sapien
gtaacatctcagctaaagagggcct

SEQ ID NO: 4562976 - DNA, 25 bp, Homo sapien
cacagcagtcagaaggcaggtttca

SEQ ID NO: 4562977 - DNA, 25 bp, Homo sapien
gaaacacccagaagcgaggattccg

SEQ ID NO: 4562978 - DNA, 25 bp, Homo sapien
tctgtgctgaccgactgaaaactac

SEQ ID NO: 4562979 - DNA, 25 bp, Homo sapien
taggactgtcgagctgaatactggc

SEQ ID NO: 4562980 - DNA, 25 bp, Homo sapien
gatgagaccctggactttgaggaac

SEQ ID NO: 4562981 - DNA, 25 bp, Homo sapien
tgcgggacactcaacgtacgagagc

SEQ ID NO: 4562982 - DNA, 25 bp, Homo sapien
ttttcagggtcagtaatcgggagag

SEQ ID NO: 4562983 - DNA, 25 bp, Homo sapien
tcatctgccagaaacgcagtgtggt

SEQ ID NO: 4562984 - DNA, 25 bp, Homo sapien
ggcacgtcccacaagcttcaaggta

SEQ ID NO: 4562985 - DNA, 25 bp, Homo sapien
caattgtaccagagggagttccacc

SEQ ID NO: 4562986 - DNA, 25 bp, Homo sapien
taggacactgacagtgtgtgggcac

SEQ ID NO: 4562987 - DNA, 25 bp, Homo sapien
ctgacagcttcccatatttataagt

SEQ ID NO: 4562988 - DNA, 25 bp, Homo sapien
taaagttagagaaaagacgctgtaa

SEQ ID NO: 4562989 - DNA, 25 bp, Homo sapien
taagtgctgcacgtattagaatttt

SEQ ID NO: 4562990 - DNA, 25 bp, Homo sapien
tcacaatgtgttcatggcctcctgt

SEQ ID NO: 4562991 - DNA, 25 bp, Homo sapien
gactctggggatcccctctgtggcc

SEQ ID NO: 4562992 - DNA, 25 bp, Homo sapien
gctcttctatgctgtgcccagggca

SEQ ID NO: 4562993 - DNA, 25 bp, Homo sapien
atggcctcctgtaacaggactctgg

SEQ ID NO: 4562994 - DNA, 25 bp, Homo sapien
tatcacctggtatggtcccagtttc

SEQ ID NO: 4562995 - DNA, 25 bp, Homo sapien
tttctggagtcgtccagtgctggga

SEQ ID NO: 4562996 - DNA, 25 bp, Homo sapien
tcatccaccctgcacatgtgtatgt

SEQ ID NO: 4562997 - DNA, 25 bp, Homo sapien
gggagtttggttctcagttatcacc

SEQ ID NO: 4562998 - DNA, 25 bp, Homo sapien
gaaaacaggaacgttcagctctgcc

SEQ ID NO: 4562999 - DNA, 25 bp, Homo sapien
gctgggtctcattcagcggcctctc

SEQ ID NO: 4563000 - DNA, 25 bp, Homo sapien
gctctgccctgtgtcgtatctaatc

SEQ ID NO: 4563001 - DNA, 25 bp, Homo sapien
tacctgagtcactttgtctgcatct

SEQ ID NO: 4563002 - DNA, 25 bp, Homo sapien
gaatacagaagtgcatatgggatca

SEQ ID NO: 4563003 - DNA, 25 bp, Homo sapien
cagaagaccgcacagctgaatacag

SEQ ID NO: 4563004 - DNA, 25 bp, Homo sapien
tcctgtttggactgggaattgctgg

SEQ ID NO: 4563005 - DNA, 25 bp, Homo sapien
taggttcacttctgacagctgaggc

SEQ ID NO: 4563006 - DNA, 25 bp, Homo sapien
gcaagccacataacagtcctgttcc

SEQ ID NO: 4563007 - DNA, 25 bp, Homo sapien
ctgttccctggtttgcatcctagag

SEQ ID NO: 4563008 - DNA, 25 bp, Homo sapien
cagcaagccacataacagtcctgtt

SEQ ID NO: 4563009 - DNA, 25 bp, Homo sapien
cacataacagtcctgttccctggtt

SEQ ID NO: 4563010 - DNA, 25 bp, Homo sapien
ctatgtttgctgattcgatggatcc

SEQ ID NO: 4563011 - DNA, 25 bp, Homo sapien
ctgattcgatggatcctgacagagc

SEQ ID NO: 4563012 - DNA, 25 bp, Homo sapien
tgattcgatggatcctgacagagca

SEQ ID NO: 4563013 - DNA, 25 bp, Homo sapien
atgtttgctgattcgatggatcctg

SEQ ID NO: 4563014 - DNA, 25 bp, Homo sapien
gttccataggacaccgatagatcgg

SEQ ID NO: 4563015 - DNA, 25 bp, Homo sapien
aagccctctgcacccaagtttgcag

SEQ ID NO: 4563016 - DNA, 25 bp, Homo sapien
ccgatagatcgggtagccctgtttc

SEQ ID NO: 4563017 - DNA, 25 bp, Homo sapien
ggcagtgtggttccataggacaccg

SEQ ID NO: 4563018 - DNA, 25 bp, Homo sapien
tgtcttcttcctcctccccacctcc

SEQ ID NO: 4563019 - DNA, 25 bp, Homo sapien
cacccaccacagctgtcttcttcct

SEQ ID NO: 4563020 - DNA, 25 bp, Homo sapien
tccccacctccccgtggccttgcca

SEQ ID NO: 4563021 - DNA, 25 bp, Homo sapien
ccccacctccccgtggccttgccat

SEQ ID NO: 4563022 - DNA, 25 bp, Homo sapien
aaagctacagagacgagtctggcag

SEQ ID NO: 4563023 - DNA, 25 bp, Homo sapien
cgttgatttcgaagcagcagtagca

SEQ ID NO: 4563024 - DNA, 25 bp, Homo sapien
gtggccccacaaaagcgttgatttc

SEQ ID NO: 4563025 - DNA, 25 bp, Homo sapien
ctgaaagctacagagacgagtctgg

SEQ ID NO: 4563026 - DNA, 25 bp, Homo sapien
gaacacggactctgtggtacctaga

SEQ ID NO: 4563027 - DNA, 25 bp, Homo sapien
cacacgggttgtgttgtcccatgag

SEQ ID NO: 4563028 - DNA, 25 bp, Homo sapien
agtgtcctaaattcccacagatggc

SEQ ID NO: 4563029 - DNA, 25 bp, Homo sapien
cggtcactgctcgagcgatcacata

SEQ ID NO: 4563030 - DNA, 25 bp, Homo sapien
tgggttccctgatgtggtaagggcc

SEQ ID NO: 4563031 - DNA, 25 bp, Homo sapien
ttatccttcactcttggccgtttgg

SEQ ID NO: 4563032 - DNA, 25 bp, Homo sapien
catttgtgaatcaggggctgatggc

SEQ ID NO: 4563033 - DNA, 25 bp, Homo sapien
gtaaactgcttcctgcgtcaccatt

SEQ ID NO: 4563034 - DNA, 25 bp, Homo sapien
tcactcttggccgtttgggtgctgg

SEQ ID NO: 4563035 - DNA, 25 bp, Homo sapien
catctgctttaggcctgggaggctc

SEQ ID NO: 4563036 - DNA, 25 bp, Homo sapien
gtgatccgagatgcctgttccttgg

SEQ ID NO: 4563037 - DNA, 25 bp, Homo sapien
caatgaatgctttgcaggagtcaac

SEQ ID NO: 4563038 - DNA, 25 bp, Homo sapien
cagggctataaaaggcaaagctttc

SEQ ID NO: 4563039 - DNA, 25 bp, Homo sapien
ttcgtcttttgaagccactgccgga

SEQ ID NO: 4563040 - DNA, 25 bp, Homo sapien
aagccactgccggagaaaatcagct

SEQ ID NO: 4563041 - DNA, 25 bp, Homo sapien
tatgctgagcttcgtcttttgaagc

SEQ ID NO: 4563042 - DNA, 25 bp, Homo sapien
cactgccggagaaaatcagctcggc

SEQ ID NO: 4563043 - DNA, 25 bp, Homo sapien
ggtacaaactaaagcgagtttcagc

SEQ ID NO: 4563044 - DNA, 25 bp, Homo sapien
taaagcgagtttcagcgtcagctgc

SEQ ID NO: 4563045 - DNA, 25 bp, Homo sapien
gagtttcagcgtcagctgctgcctt

SEQ ID NO: 4563046 - DNA, 25 bp, Homo sapien
ccatctaaagtggtacaaactaaag

SEQ ID NO: 4563047 - DNA, 25 bp, Homo sapien
ggtgggtctgcttgaccaggagcat

SEQ ID NO: 4563048 - DNA, 25 bp, Homo sapien
aggtgggtctgcttgaccaggagca

SEQ ID NO: 4563049 - DNA, 25 bp, Homo sapien
gagactgagctactagacaccaagc

SEQ ID NO: 4563050 - DNA, 25 bp, Homo sapien
cgcacccttgtcagtcctcaaatag

SEQ ID NO: 4563051 - DNA, 25 bp, Homo sapien
cctcaaataggggtgcaactgttcc

SEQ ID NO: 4563052 - DNA, 25 bp, Homo sapien
tgagttgcagggtcacccctcatcg

SEQ ID NO: 4563053 - DNA, 25 bp, Homo sapien
tagagctacaggtcatgattgcgag

SEQ ID NO: 4563054 - DNA, 25 bp, Homo sapien
caaatattagcgagtgccagcgtct

SEQ ID NO: 4563055 - DNA, 25 bp, Homo sapien
taagtgccttatacgcaagtatgca

SEQ ID NO: 4563056 - DNA, 25 bp, Homo sapien
tcgtcatccaaactggtagaggccc

SEQ ID NO: 4563057 - DNA, 25 bp, Homo sapien
gaagcaggtgcgtgctgacacctcc

SEQ ID NO: 4563058 - DNA, 25 bp, Homo sapien
acgcgaagcaggtgcgtgctgacac

SEQ ID NO: 4563059 - DNA, 25 bp, Homo sapien
tcatttggcacactcctaggctgtt

SEQ ID NO: 4563060 - DNA, 25 bp, Homo sapien
tccggggccacgctcatttggcaca

SEQ ID NO: 4563061 - DNA, 25 bp, Homo sapien
ttgccttgatagcaagacagctgct

SEQ ID NO: 4563062 - DNA, 25 bp, Homo sapien
cctgctgcctctagccgacgatgtt

SEQ ID NO: 4563063 - DNA, 25 bp, Homo sapien
gcgaaccacctgtcctccacagtaa

SEQ ID NO: 4563064 - DNA, 25 bp, Homo sapien
aatgatgagagtggccctcagggta

SEQ ID NO: 4563065 - DNA, 25 bp, Homo sapien
gaagtcacgctaatcggatgcccat

SEQ ID NO: 4563066 - DNA, 25 bp, Homo sapien
agagacagccttcgcacctggaaaa

SEQ ID NO: 4563067 - DNA, 25 bp, Homo sapien
tggaaaatgaagtcacgctaatcgg

SEQ ID NO: 4563068 - DNA, 25 bp, Homo sapien
cgctaatcggatgcccatttagagg

SEQ ID NO: 4563069 - DNA, 25 bp, Homo sapien
ctgagatcccccaggcgtcagtgct

SEQ ID NO: 4563070 - DNA, 25 bp, Homo sapien
cgtcagtgctggaccaacaggactg

SEQ ID NO: 4563071 - DNA, 25 bp, Homo sapien
ctggaccaacaggactgtgtgcgtg

SEQ ID NO: 4563072 - DNA, 25 bp, Homo sapien
tcagtgctggaccaacaggactgtg

SEQ ID NO: 4563073 - DNA, 25 bp, Homo sapien
aagccagaaagaagcgatttcactg

SEQ ID NO: 4563074 - DNA, 25 bp, Homo sapien
ggttccaaattggagctctcaaaat

SEQ ID NO: 4563075 - DNA, 25 bp, Homo sapien
agctggttccaaattggagctctca

SEQ ID NO: 4563076 - DNA, 25 bp, Homo sapien
agccagaaagaagcgatttcactgc

SEQ ID NO: 4563077 - DNA, 25 bp, Homo sapien
tctggtatcatcaggcctttccagc

SEQ ID NO: 4563078 - DNA, 25 bp, Homo sapien
tttggtcagcagacctctgaacctc

SEQ ID NO: 4563079 - DNA, 25 bp, Homo sapien
atagccagactctggtatcatcagg

SEQ ID NO: 4563080 - DNA, 25 bp, Homo sapien
gcatttggtcagcagacctctgaac

SEQ ID NO: 4563081 - DNA, 25 bp, Homo sapien
gctcggatctttgggctgatgtaat

SEQ ID NO: 4563082 - DNA, 25 bp, Homo sapien
gctgctctccatagaaagcacaggt

SEQ ID NO: 4563083 - DNA, 25 bp, Homo sapien
ccaagtgagaagagttcctagctcg

SEQ ID NO: 4563084 - DNA, 25 bp, Homo sapien
gcacaggtttcaatcattacaaggt

SEQ ID NO: 4563085 - DNA, 25 bp, Homo sapien
atctcgtctttgtttcttgtgactt

SEQ ID NO: 4563086 - DNA, 25 bp, Homo sapien
tgtcaacttcagatctcttttccaa

SEQ ID NO: 4563087 - DNA, 25 bp, Homo sapien
gggactgagggacccttgagagatg

SEQ ID NO: 4563088 - DNA, 25 bp, Homo sapien
ttcaggaatgcctcagcatctcgtc

SEQ ID NO: 4563089 - DNA, 25 bp, Homo sapien
gatcctcctgacctatgtctctcct

SEQ ID NO: 4563090 - DNA, 25 bp, Homo sapien
ccaggtccctcatcagtagctctga

SEQ ID NO: 4563091 - DNA, 25 bp, Homo sapien
ctgcaggcctgcccgaccttgtggg

SEQ ID NO: 4563092 - DNA, 25 bp, Homo sapien
cgaccttgtggggtggtgtccacct

SEQ ID NO: 4563093 - DNA, 25 bp, Homo sapien
ttgttaggtgtgcaaggcccttcct

SEQ ID NO: 4563094 - DNA, 25 bp, Homo sapien
gcatgtggcattggcccagggatcc

SEQ ID NO: 4563095 - DNA, 25 bp, Homo sapien
tgacagcccagaaccaatgcatgtg

SEQ ID NO: 4563096 - DNA, 25 bp, Homo sapien
cccaggccagctagagtggtgttga

SEQ ID NO: 4563097 - DNA, 25 bp, Homo sapien
ctgaagaatttggtgaacacagctt

SEQ ID NO: 4563098 - DNA, 25 bp, Homo sapien
acaccaaggtgtaaaagggcacaag

SEQ ID NO: 4563099 - DNA, 25 bp, Homo sapien
ggtctggcacctgaatatccctgag

SEQ ID NO: 4563100 - DNA, 25 bp, Homo sapien
agacaccaaggtgtaaaagggcaca

SEQ ID NO: 4563101 - DNA, 25 bp, Homo sapien
agtctggaaatgtagaggtttggcc

SEQ ID NO: 4563102 - DNA, 25 bp, Homo sapien
aattggtgttcacctgcttttgcag

SEQ ID NO: 4563103 - DNA, 25 bp, Homo sapien
gcttttgcagaaaggagtaagattt

SEQ ID NO: 4563104 - DNA, 25 bp, Homo sapien
tggcctgaatcctgtctggaaattg

SEQ ID NO: 4563105 - DNA, 25 bp, Homo sapien
tccagctagggccttccaaaacctc

SEQ ID NO: 4563106 - DNA, 25 bp, Homo sapien
cctggctctgggcagtaatctgaga

SEQ ID NO: 4563107 - DNA, 25 bp, Homo sapien
gctgggtgtttcttttagaggacaa

SEQ ID NO: 4563108 - DNA, 25 bp, Homo sapien
ttcaagtactgccagggcagtgatg

SEQ ID NO: 4563109 - DNA, 25 bp, Homo sapien
catctaaggtctcggtagccggatg

SEQ ID NO: 4563110 - DNA, 25 bp, Homo sapien
tctaaggtctcggtagccggatgag

SEQ ID NO: 4563111 - DNA, 25 bp, Homo sapien
tcatctaaggtctcggtagccggat

SEQ ID NO: 4563112 - DNA, 25 bp, Homo sapien
aaggtctcggtagccggatgaggat

SEQ ID NO: 4563113 - DNA, 25 bp, Homo sapien
tggacggcaagccacactctaagac

SEQ ID NO: 4563114 - DNA, 25 bp, Homo sapien
gagatacatcctggacggcaagcca

SEQ ID NO: 4563115 - DNA, 25 bp, Homo sapien
aactactagagatacatcctggacg

SEQ ID NO: 4563116 - DNA, 25 bp, Homo sapien
cacactctaagacactgtgctccag

SEQ ID NO: 4563117 - DNA, 25 bp, Homo sapien
cccaagaatatacagagaatggcct

SEQ ID NO: 4563118 - DNA, 25 bp, Homo sapien
ccactccccaagaatatacagagaa

SEQ ID NO: 4563119 - DNA, 25 bp, Homo sapien
agaatatacagagaatggccttctt

SEQ ID NO: 4563120 - DNA, 25 bp, Homo sapien
ctccccaagaatatacagagaatgg

SEQ ID NO: 4563121 - DNA, 25 bp, Homo sapien
cgtgccggccgcccgcgcccgcccg

SEQ ID NO: 4563122 - DNA, 25 bp, Homo sapien
gtgccggccgcccgcgcccgcccgc

SEQ ID NO: 4563123 - DNA, 25 bp, Homo sapien
gtccgtgccggccgcccgcgcccgc

SEQ ID NO: 4563124 - DNA, 25 bp, Homo sapien
tccgtgccggccgcccgcgcccgcc

SEQ ID NO: 4563125 - DNA, 25 bp, Homo sapien
gagaagctcccacctacaggatgca

SEQ ID NO: 4563126 - DNA, 25 bp, Homo sapien
tattcccacacataagggagctggc

SEQ ID NO: 4563127 - DNA, 25 bp, Homo sapien
tattctggaagtgggctctacctag

SEQ ID NO: 4563128 - DNA, 25 bp, Homo sapien
ggtaatgtgtccgaagtcacgcagc

SEQ ID NO: 4563129 - DNA, 25 bp, Homo sapien
gcgctgctggcttgctttactctga

SEQ ID NO: 4563130 - DNA, 25 bp, Homo sapien
tttcagtcgtgtctgtgcgtccccg

SEQ ID NO: 4563131 - DNA, 25 bp, Homo sapien
tgatccaaagtaaacgctcccaggg

SEQ ID NO: 4563132 - DNA, 25 bp, Homo sapien
acattgacagcttgacagcgccgcg

SEQ ID NO: 4563133 - DNA, 25 bp, Homo sapien
tgaggttctacagaatgcccctggg

SEQ ID NO: 4563134 - DNA, 25 bp, Homo sapien
caaactggcacctagaaactggtct

SEQ ID NO: 4563135 - DNA, 25 bp, Homo sapien
tgctgatctggacaatgcctaggga

SEQ ID NO: 4563136 - DNA, 25 bp, Homo sapien
gatttacagggcctcctcaggaagg

SEQ ID NO: 4563137 - DNA, 25 bp, Homo sapien
tggaccacgctctcaacgatatgac

SEQ ID NO: 4563138 - DNA, 25 bp, Homo sapien
ctggaccacgctctcaacgatatga

SEQ ID NO: 4563139 - DNA, 25 bp, Homo sapien
gctggaccacgctctcaacgatatg

SEQ ID NO: 4563140 - DNA, 25 bp, Homo sapien
cagaagctcttcgtttcagtgtcaa

SEQ ID NO: 4563141 - DNA, 25 bp, Homo sapien
acccttgccgaaaggcggcctgtga

SEQ ID NO: 4563142 - DNA, 25 bp, Homo sapien
caagactccctcgtcgagctggatg

SEQ ID NO: 4563143 - DNA, 25 bp, Homo sapien
tgtctgtgtttcaagtgctctcatc

SEQ ID NO: 4563144 - DNA, 25 bp, Homo sapien
tgttataattcccaacatttctcct

SEQ ID NO: 4563145 - DNA, 25 bp, Homo sapien
cctcaacaatctagctatatatttc

SEQ ID NO: 4563146 - DNA, 25 bp, Homo sapien
actttaactaatatggactttagtg

SEQ ID NO: 4563147 - DNA, 25 bp, Homo sapien
tccttcctcaacaatctagctatat

SEQ ID NO: 4563148 - DNA, 25 bp, Homo sapien
tgcttcctgatgtagacaaaatgcc

SEQ ID NO: 4563149 - DNA, 25 bp, Homo sapien
ggaaatccttccagagactttcgca

SEQ ID NO: 4563150 - DNA, 25 bp, Homo sapien
tgtacccttctctgagtaaatcctg

SEQ ID NO: 4563151 - DNA, 25 bp, Homo sapien
gctgagcagatgttcatgtaattct

SEQ ID NO: 4563152 - DNA, 25 bp, Homo sapien
gctctggtgggccaaaccaaaagca

SEQ ID NO: 4563153 - DNA, 25 bp, Homo sapien
caaagggccaggccatagctacagc

SEQ ID NO: 4563154 - DNA, 25 bp, Homo sapien
agctgctctggtgggccaaaccaaa

SEQ ID NO: 4563155 - DNA, 25 bp, Homo sapien
aagggccaggccatagctacagctg

SEQ ID NO: 4563156 - DNA, 25 bp, Homo sapien
aagtttcagacagctgggagtctcc

SEQ ID NO: 4563157 - DNA, 25 bp, Homo sapien
ctgagtttgggcacttgaagtttca

SEQ ID NO: 4563158 - DNA, 25 bp, Homo sapien
gagtctccatagaaccggaagggaa

SEQ ID NO: 4563159 - DNA, 25 bp, Homo sapien
cacttccaaggatatgagcatgtct

SEQ ID NO: 4563160 - DNA, 25 bp, Homo sapien
atccagaggaggctgtcggagggac

SEQ ID NO: 4563161 - DNA, 25 bp, Homo sapien
gaggctgtcggagggaccactgtcc

SEQ ID NO: 4563162 - DNA, 25 bp, Homo sapien
tcatactgaccctctggattctcca

SEQ ID NO: 4563163 - DNA, 25 bp, Homo sapien
cagattttctccaaagttcttccat

SEQ ID NO: 4563164 - DNA, 25 bp, Homo sapien
gttcccacggcacaccgtcagtgaa

SEQ ID NO: 4563165 - DNA, 25 bp, Homo sapien
tctccctgttcccacggcacaccgt

SEQ ID NO: 4563166 - DNA, 25 bp, Homo sapien
acggcacaccgtcagtgaaccttca

SEQ ID NO: 4563167 - DNA, 25 bp, Homo sapien
acaccgtcagtgaaccttcaccaaa

SEQ ID NO: 4563168 - DNA, 25 bp, Homo sapien
caaatgtgccatttcccgggttgat

SEQ ID NO: 4563169 - DNA, 25 bp, Homo sapien
tacaagatgagactatggatcccgc

SEQ ID NO: 4563170 - DNA, 25 bp, Homo sapien
taaagccaagggtctgtaagccacg

SEQ ID NO: 4563171 - DNA, 25 bp, Homo sapien
gcttagtcagcgtaggaatcctcac

SEQ ID NO: 4563172 - DNA, 25 bp, Homo sapien
ttacattcttgactgagagcccagg

SEQ ID NO: 4563173 - DNA, 25 bp, Homo sapien
tagcgggcactccagaaattaacct

SEQ ID NO: 4563174 - DNA, 25 bp, Homo sapien
gatttcaggaatagggcaggacaca

SEQ ID NO: 4563175 - DNA, 25 bp, Homo sapien
taaaagccaagcgtctactccatgc

SEQ ID NO: 4563176 - DNA, 25 bp, Homo sapien
ccaggtggaggagtcactgccacct

SEQ ID NO: 4563177 - DNA, 25 bp, Homo sapien
caggtggaggagtcactgccacctc

SEQ ID NO: 4563178 - DNA, 25 bp, Homo sapien
aacaaggacattcagggccgggtgc

SEQ ID NO: 4563179 - DNA, 25 bp, Homo sapien
accaaaattgcacccaccatgagca

SEQ ID NO: 4563180 - DNA, 25 bp, Homo sapien
gaccctttgatgaaagatagcaata

SEQ ID NO: 4563181 - DNA, 25 bp, Homo sapien
gattcacatatcctctttactcaga

SEQ ID NO: 4563182 - DNA, 25 bp, Homo sapien
cagtaagtgaacatcacaaaggagc

SEQ ID NO: 4563183 - DNA, 25 bp, Homo sapien
gggaatcctcagtcaatgcctcggc

SEQ ID NO: 4563184 - DNA, 25 bp, Homo sapien
cctcggcttattattagaacttggc

SEQ ID NO: 4563185 - DNA, 25 bp, Homo sapien
cacacttagctgtaagggaggcaag

SEQ ID NO: 4563186 - DNA, 25 bp, Homo sapien
tagctgacagactctctactggtag

SEQ ID NO: 4563187 - DNA, 25 bp, Homo sapien
tcaactttggctgtattttgacagt

SEQ ID NO: 4563188 - DNA, 25 bp, Homo sapien
taccaagtgatgaatattgtctcta

SEQ ID NO: 4563189 - DNA, 25 bp, Homo sapien
tgacagtataaatatggcctttacc

SEQ ID NO: 4563190 - DNA, 25 bp, Homo sapien
ctgaagaactggatacagagactat

SEQ ID NO: 4563191 - DNA, 25 bp, Homo sapien
taaagagggtaaatatgcaatggcg

SEQ ID NO: 4563192 - DNA, 25 bp, Homo sapien
tgtggaccccagtccctaacacaga

SEQ ID NO: 4563193 - DNA, 25 bp, Homo sapien
tatggttcgtgtagaaagcaacggc

SEQ ID NO: 4563194 - DNA, 25 bp, Homo sapien
gacaaggtgttatgatcatctgaag

SEQ ID NO: 4563195 - DNA, 25 bp, Homo sapien
tctggcgcggtctctaatgaggttg

SEQ ID NO: 4563196 - DNA, 25 bp, Homo sapien
gagcaatatagtcacgtgggtctgg

SEQ ID NO: 4563197 - DNA, 25 bp, Homo sapien
aggaatcgggaaatcaggagcaata

SEQ ID NO: 4563198 - DNA, 25 bp, Homo sapien
tggcccacacaaactattaacagag

SEQ ID NO: 4563199 - DNA, 25 bp, Homo sapien
ccttcaacataactctattaagtag

SEQ ID NO: 4563200 - DNA, 25 bp, Homo sapien
ctattaacagagcacttactgtggg

SEQ ID NO: 4563201 - DNA, 25 bp, Homo sapien
tatgctatctcattataccttcaac

SEQ ID NO: 4563202 - DNA, 25 bp, Homo sapien
tttattgatgcagtcttcagtttaa

SEQ ID NO: 4563203 - DNA, 25 bp, Homo sapien
gtcttcagtttaaaagtttgtcaca

SEQ ID NO: 4563204 - DNA, 25 bp, Homo sapien
aaagtttgtcacataaaaatgaata

SEQ ID NO: 4563205 - DNA, 25 bp, Homo sapien
tcagtttaaaagtttgtcacataaa

SEQ ID NO: 4563206 - DNA, 25 bp, Homo sapien
caaaggctatttaagtgtcgatcaa

SEQ ID NO: 4563207 - DNA, 25 bp, Homo sapien
tctgccgggctctggttcaaaaggc

SEQ ID NO: 4563208 - DNA, 25 bp, Homo sapien
gcgagccagaatcagtaggacacaa

SEQ ID NO: 4563209 - DNA, 25 bp, Homo sapien
ctaggtgtgaaagtgagagtagccc

SEQ ID NO: 4563210 - DNA, 25 bp, Homo sapien
aaatgtatggcatactcaaatatat

SEQ ID NO: 4563211 - DNA, 25 bp, Homo sapien
gcaggacgtgcaaaatatgtacttc

SEQ ID NO: 4563212 - DNA, 25 bp, Homo sapien
ggtacacgtgcaggacgtgcaaaat

SEQ ID NO: 4563213 - DNA, 25 bp, Homo sapien
tcccattcatagcaatttggaaaag

SEQ ID NO: 4563214 - DNA, 25 bp, Homo sapien
cattatcttggtaaattaattagaa

SEQ ID NO: 4563215 - DNA, 25 bp, Homo sapien
ccaaaataggagattactgctgtat

SEQ ID NO: 4563216 - DNA, 25 bp, Homo sapien
aggagattactgctgtataccttac

SEQ ID NO: 4563217 - DNA, 25 bp, Homo sapien
aaataggagattactgctgtatacc

SEQ ID NO: 4563218 - DNA, 25 bp, Homo sapien
tgttgctttcttctaaatgaacacc

SEQ ID NO: 4563219 - DNA, 25 bp, Homo sapien
tagtgttgctttcttctaaatgaac

SEQ ID NO: 4563220 - DNA, 25 bp, Homo sapien
ttagtgttgctttcttctaaatgaa

SEQ ID NO: 4563221 - DNA, 25 bp, Homo sapien
agtgttgctttcttctaaatgaaca

SEQ ID NO: 4563222 - DNA, 25 bp, Homo sapien
caatggagttcactgcaaggtcaag

SEQ ID NO: 4563223 - DNA, 25 bp, Homo sapien
caggtcacaccaaatagatctcaga

SEQ ID NO: 4563224 - DNA, 25 bp, Homo sapien
tgaactcttccagtgagagcatgga

SEQ ID NO: 4563225 - DNA, 25 bp, Homo sapien
aatctgtatgtcctggccggcgagg

SEQ ID NO: 4563226 - DNA, 25 bp, Homo sapien
ttataatcatcaatctcatcactgg

SEQ ID NO: 4563227 - DNA, 25 bp, Homo sapien
aatctcatcactgggttggagaatg

SEQ ID NO: 4563228 - DNA, 25 bp, Homo sapien
catcactgggttggagaatgccaaa

SEQ ID NO: 4563229 - DNA, 25 bp, Homo sapien
aagatagagacatttataatcatca

SEQ ID NO: 4563230 - DNA, 25 bp, Homo sapien
tcctgtaggctggcacaacactgtt

SEQ ID NO: 4563231 - DNA, 25 bp, Homo sapien
tctgagcatggctgaaaaccgtggt

SEQ ID NO: 4563232 - DNA, 25 bp, Homo sapien
aagaatttggactttgtactaggcg

SEQ ID NO: 4563233 - DNA, 25 bp, Homo sapien
catccataaagtaagaatttggact

SEQ ID NO: 4563234 - DNA, 25 bp, Homo sapien
taagaatttggactttgtactaggc

SEQ ID NO: 4563235 - DNA, 25 bp, Homo sapien
ctggacattttacatccataaagta

SEQ ID NO: 4563236 - DNA, 25 bp, Homo sapien
tccaaggacggatgtagtaaatctc

SEQ ID NO: 4563237 - DNA, 25 bp, Homo sapien
ctcttccaaggacggatgtagtaaa

SEQ ID NO: 4563238 - DNA, 25 bp, Homo sapien
ggacggatgtagtaaatctctagcc

SEQ ID NO: 4563239 - DNA, 25 bp, Homo sapien
acggatgtagtaaatctctagccaa

SEQ ID NO: 4563240 - DNA, 25 bp, Homo sapien
gaaaagggctttcgcacgatcagga

SEQ ID NO: 4563241 - DNA, 25 bp, Homo sapien
taaaccacaacgctggcacatttaa

SEQ ID NO: 4563242 - DNA, 25 bp, Homo sapien
gcagaagcaacacgtcagatagtaa

SEQ ID NO: 4563243 - DNA, 25 bp, Homo sapien
gaataacggtcatcctcggcagaag

SEQ ID NO: 4563244 - DNA, 25 bp, Homo sapien
gaccccgactgtggactcgcttaga

SEQ ID NO: 4563245 - DNA, 25 bp, Homo sapien
tatataaggcaacaacgaggacagt

SEQ ID NO: 4563246 - DNA, 25 bp, Homo sapien
gacaggaattcttgctgagcgaccg

SEQ ID NO: 4563247 - DNA, 25 bp, Homo sapien
aactgtcttcgatgaaaactgcgcg

SEQ ID NO: 4563248 - DNA, 25 bp, Homo sapien
tcaacttccgggatagaagctgctg

SEQ ID NO: 4563249 - DNA, 25 bp, Homo sapien
tagcaagctgcaagcgatctgcgct

SEQ ID NO: 4563250 - DNA, 25 bp, Homo sapien
cagggtgccaagtcccgtgggtcta

SEQ ID NO: 4563251 - DNA, 25 bp, Homo sapien
tctaacgggcttgttggcgagcgcc

SEQ ID NO: 4563252 - DNA, 25 bp, Homo sapien
agaggctcgtatccttttggcttcc

SEQ ID NO: 4563253 - DNA, 25 bp, Homo sapien
tttcaaggcgcagatttcgaagttt

SEQ ID NO: 4563254 - DNA, 25 bp, Homo sapien
tcgaagttttctgcggggtatggct

SEQ ID NO: 4563255 - DNA, 25 bp, Homo sapien
ggcttcccttttcaaggcgcagatt

SEQ ID NO: 4563256 - DNA, 25 bp, Homo sapien
ccttgggtttccagtaacagaggca

SEQ ID NO: 4563257 - DNA, 25 bp, Homo sapien
tgaatggagacagccatgctcttgc

SEQ ID NO: 4563258 - DNA, 25 bp, Homo sapien
tttctgtgcaaccagaatctctggc

SEQ ID NO: 4563259 - DNA, 25 bp, Homo sapien
tgaacaggcagacactttctgtgca

SEQ ID NO: 4563260 - DNA, 25 bp, Homo sapien
aggccagccccccagtataagctgt

SEQ ID NO: 4563261 - DNA, 25 bp, Homo sapien
tcaggttagtacaacatctgccagt

SEQ ID NO: 4563262 - DNA, 25 bp, Homo sapien
gttagtacaacatctgccagtcccc

SEQ ID NO: 4563263 - DNA, 25 bp, Homo sapien
gagagagagccatcacagcgcccca

SEQ ID NO: 4563264 - DNA, 25 bp, Homo sapien
ggttagtacaacatctgccagtccc

SEQ ID NO: 4563265 - DNA, 25 bp, Homo sapien
gagactcacagctgcgcctctgcat

SEQ ID NO: 4563266 - DNA, 25 bp, Homo sapien
gcggtggagactcacagctgcgcct

SEQ ID NO: 4563267 - DNA, 25 bp, Homo sapien
tggagactcacagctgcgcctctgc

SEQ ID NO: 4563268 - DNA, 25 bp, Homo sapien
cttgcggtggagactcacagctgcg

SEQ ID NO: 4563269 - DNA, 25 bp, Homo sapien
gtgctgggacccacgatgaattcct

SEQ ID NO: 4563270 - DNA, 25 bp, Homo sapien
gctgggacccacgatgaattccttt

SEQ ID NO: 4563271 - DNA, 25 bp, Homo sapien
ctgggacccacgatgaattccttta

SEQ ID NO: 4563272 - DNA, 25 bp, Homo sapien
tgctgggacccacgatgaattcctt

SEQ ID NO: 4563273 - DNA, 25 bp, Homo sapien
aacgtggcagggtttctgacatgga

SEQ ID NO: 4563274 - DNA, 25 bp, Homo sapien
ccttctgtggatcatttttcaattt

SEQ ID NO: 4563275 - DNA, 25 bp, Homo sapien
tgctgtctgcacaagggaacctttg

SEQ ID NO: 4563276 - DNA, 25 bp, Homo sapien
aattttttcacaccaaagcactgag

SEQ ID NO: 4563277 - DNA, 25 bp, Homo sapien
taaggtacatgaagatttttgcagc

SEQ ID NO: 4563278 - DNA, 25 bp, Homo sapien
atttgtagatgaatttaatgacaga

SEQ ID NO: 4563279 - DNA, 25 bp, Homo sapien
taattgtctgttccccgctgaaact

SEQ ID NO: 4563280 - DNA, 25 bp, Homo sapien
tattccactttgcttaataatgtac

SEQ ID NO: 4563281 - DNA, 25 bp, Homo sapien
gaccttttcaaatagagtctgaggg

SEQ ID NO: 4563282 - DNA, 25 bp, Homo sapien
tacctgtgcatcagttagtaggtgc

SEQ ID NO: 4563283 - DNA, 25 bp, Homo sapien
ttttgacagtgattggactagacct

SEQ ID NO: 4563284 - DNA, 25 bp, Homo sapien
tgattgtaaaacgtttcgctgggaa

SEQ ID NO: 4563285 - DNA, 25 bp, Homo sapien
tcacacggatgaatggctaggctct

SEQ ID NO: 4563286 - DNA, 25 bp, Homo sapien
tgaaagaatgacatgggctgcggct

SEQ ID NO: 4563287 - DNA, 25 bp, Homo sapien
tctaggtatgtttcaggccacactg

SEQ ID NO: 4563288 - DNA, 25 bp, Homo sapien
cctttcggcgcagttgaatgacttg

SEQ ID NO: 4563289 - DNA, 25 bp, Homo sapien
ccagttgctggactagttgaggtga

SEQ ID NO: 4563290 - DNA, 25 bp, Homo sapien
tttttatgcaatgtctataagcctg

SEQ ID NO: 4563291 - DNA, 25 bp, Homo sapien
tctataagcctgtttaaagctttcc

SEQ ID NO: 4563292 - DNA, 25 bp, Homo sapien
gctgcagcgttcaccatctgagtgc

SEQ ID NO: 4563293 - DNA, 25 bp, Homo sapien
tgcctgactggctgtataatagcag

SEQ ID NO: 4563294 - DNA, 25 bp, Homo sapien
tctgcttggagggaaatatgttgac

SEQ ID NO: 4563295 - DNA, 25 bp, Homo sapien
tgcagactgcgtagaaaatggcttt

SEQ ID NO: 4563296 - DNA, 25 bp, Homo sapien
cccagacaggcgttagcattcagtg

SEQ ID NO: 4563297 - DNA, 25 bp, Homo sapien
ggctgttgcaggctatgttgatgac

SEQ ID NO: 4563298 - DNA, 25 bp, Homo sapien
ggcccttgccatcagacaggataca

SEQ ID NO: 4563299 - DNA, 25 bp, Homo sapien
tctggcttgaaatgaggctgttgca

SEQ ID NO: 4563300 - DNA, 25 bp, Homo sapien
tgattctgagtagcctatagagtcc

SEQ ID NO: 4563301 - DNA, 25 bp, Homo sapien
tatagtctaaaggaggagagctttt

SEQ ID NO: 4563302 - DNA, 25 bp, Homo sapien
catacaactttaaaactgcagtgca

SEQ ID NO: 4563303 - DNA, 25 bp, Homo sapien
ttcacttaggctacaaactacaaag

SEQ ID NO: 4563304 - DNA, 25 bp, Homo sapien
gtgcaaaagacattctaaacaaaga

SEQ ID NO: 4563305 - DNA, 25 bp, Homo sapien
gtcatagccaaccatgcgaatagag

SEQ ID NO: 4563306 - DNA, 25 bp, Homo sapien
gccaaccatgcgaatagagcatgct

SEQ ID NO: 4563307 - DNA, 25 bp, Homo sapien
accatgcgaatagagcatgctcctt

SEQ ID NO: 4563308 - DNA, 25 bp, Homo sapien
aatactgagaggtcatagccaacca

SEQ ID NO: 4563309 - DNA, 25 bp, Homo sapien
gactcgccctatgggtgggagccca

SEQ ID NO: 4563310 - DNA, 25 bp, Homo sapien
ccacagggcgagtccaagggaagta

SEQ ID NO: 4563311 - DNA, 25 bp, Homo sapien
ggtgcattagaccagcctttgctga

SEQ ID NO: 4563312 - DNA, 25 bp, Homo sapien
caggaaggtgcattagaccagcctt

SEQ ID NO: 4563313 - DNA, 25 bp, Homo sapien
gatacattgttaagcggtgtgtgac

SEQ ID NO: 4563314 - DNA, 25 bp, Homo sapien
tatgcactatatagagagacacact

SEQ ID NO: 4563315 - DNA, 25 bp, Homo sapien
gcaggtttgttcacacgacgatgaa

SEQ ID NO: 4563316 - DNA, 25 bp, Homo sapien
gctccattcatggtggaccattttt

SEQ ID NO: 4563317 - DNA, 25 bp, Homo sapien
cttatctctgcccagtcattctata

SEQ ID NO: 4563318 - DNA, 25 bp, Homo sapien
agcccggggacaccctcggtggcat

SEQ ID NO: 4563319 - DNA, 25 bp, Homo sapien
tctgcccagtcattctataatgaag

SEQ ID NO: 4563320 - DNA, 25 bp, Homo sapien
caccctcggtggcattgtcgggcca

SEQ ID NO: 4563321 - DNA, 25 bp, Homo sapien
cagcccggctggaacgcactggcag

SEQ ID NO: 4563322 - DNA, 25 bp, Homo sapien
cagtgtggatggcagcccggctgga

SEQ ID NO: 4563323 - DNA, 25 bp, Homo sapien
atccgagcccgaggaccacgtgcgg

SEQ ID NO: 4563324 - DNA, 25 bp, Homo sapien
tcacatcctgcgacagctgaatccg

SEQ ID NO: 4563325 - DNA, 25 bp, Homo sapien
ggtcctgcagttcaccaggtgccca

SEQ ID NO: 4563326 - DNA, 25 bp, Homo sapien
cagggtcctgcagttcaccaggtgc

SEQ ID NO: 4563327 - DNA, 25 bp, Homo sapien
gccagggtcctgcagttcaccaggt

SEQ ID NO: 4563328 - DNA, 25 bp, Homo sapien
gcggtgccagggtcctgcagttcac

SEQ ID NO: 4563329 - DNA, 25 bp, Homo sapien
cctcagtctctgaaagtcgggttcg

SEQ ID NO: 4563330 - DNA, 25 bp, Homo sapien
ccactgcggcgaggcgaggagatgt

SEQ ID NO: 4563331 - DNA, 25 bp, Homo sapien
gagctctctaggcagaaccctcagt

SEQ ID NO: 4563332 - DNA, 25 bp, Homo sapien
gaagagcggcgtccacgatgtgctc

SEQ ID NO: 4563333 - DNA, 25 bp, Homo sapien
tcttgagcgcttggaatgtgactta

SEQ ID NO: 4563334 - DNA, 25 bp, Homo sapien
ctgcgcagggcatggatcttgagcg

SEQ ID NO: 4563335 - DNA, 25 bp, Homo sapien
ggcatggatcttgagcgcttggaat

SEQ ID NO: 4563336 - DNA, 25 bp, Homo sapien
ggatcttgagcgcttggaatgtgac

SEQ ID NO: 4563337 - DNA, 25 bp, Homo sapien
aaatctagcatctgaatcgagtgtg

SEQ ID NO: 4563338 - DNA, 25 bp, Homo sapien
gagatgaggtgatggccatcctaaa

SEQ ID NO: 4563339 - DNA, 25 bp, Homo sapien
tctagtgtggctaccggaaagttta

SEQ ID NO: 4563340 - DNA, 25 bp, Homo sapien
catcctaaaggagggcctgagttcc

SEQ ID NO: 4563341 - DNA, 25 bp, Homo sapien
ggctgtcttcatgcctgtgcgtggc

SEQ ID NO: 4563342 - DNA, 25 bp, Homo sapien
ccaggagtgctctccccagtggggt

SEQ ID NO: 4563343 - DNA, 25 bp, Homo sapien
tatgcctccctgatcattcagccag

SEQ ID NO: 4563344 - DNA, 25 bp, Homo sapien
tgagtgcttcgtgggaactctggct

SEQ ID NO: 4563345 - DNA, 25 bp, Homo sapien
ggtactgtcacccactggagccaaa

SEQ ID NO: 4563346 - DNA, 25 bp, Homo sapien
cccataacagggagctacagagtgc

SEQ ID NO: 4563347 - DNA, 25 bp, Homo sapien
tatttgttcaaggtgcagctccgat

SEQ ID NO: 4563348 - DNA, 25 bp, Homo sapien
tgttctagcagagtacagaccatca

SEQ ID NO: 4563349 - DNA, 25 bp, Homo sapien
gctggccaggacaccttcagagagg

SEQ ID NO: 4563350 - DNA, 25 bp, Homo sapien
ggctggccaggacaccttcagagag

SEQ ID NO: 4563351 - DNA, 25 bp, Homo sapien
tagagtcaatgcagcacatgctaga

SEQ ID NO: 4563352 - DNA, 25 bp, Homo sapien
gaaagagattcaagatctcacatga

SEQ ID NO: 4563353 - DNA, 25 bp, Homo sapien
tgccatgcagcagagttaggagcgt

SEQ ID NO: 4563354 - DNA, 25 bp, Homo sapien
gctatttccacctaggcatctgcca

SEQ ID NO: 4563355 - DNA, 25 bp, Homo sapien
agtggaatgagtgcggatccgaaga

SEQ ID NO: 4563356 - DNA, 25 bp, Homo sapien
aatgagtgcggatccgaagaaaggt

SEQ ID NO: 4563357 - DNA, 25 bp, Homo sapien
tgcggatccgaagaaaggtttccca

SEQ ID NO: 4563358 - DNA, 25 bp, Homo sapien
gagtgcggatccgaagaaaggtttc

SEQ ID NO: 4563359 - DNA, 25 bp, Homo sapien
cttttcatgaacagcccttgtgcca

SEQ ID NO: 4563360 - DNA, 25 bp, Homo sapien
gcctcccgggctttgtctggtctca

SEQ ID NO: 4563361 - DNA, 25 bp, Homo sapien
tgtgccaggtacaatggtctctctg

SEQ ID NO: 4563362 - DNA, 25 bp, Homo sapien
cagagtcttttgacagacagtccca

SEQ ID NO: 4563363 - DNA, 25 bp, Homo sapien
taaggcttgccatcgttgtgaaaag

SEQ ID NO: 4563364 - DNA, 25 bp, Homo sapien
gaactgcaaggtgctctcaactagg

SEQ ID NO: 4563365 - DNA, 25 bp, Homo sapien
aaaacaggctcccaagacataaggc

SEQ ID NO: 4563366 - DNA, 25 bp, Homo sapien
catgaggcatgctaatggcaaggcc

SEQ ID NO: 4563367 - DNA, 25 bp, Homo sapien
gagatgccccgtctccagaggaaag

SEQ ID NO: 4563368 - DNA, 25 bp, Homo sapien
gaaggaaatcagagggagatgcccc

SEQ ID NO: 4563369 - DNA, 25 bp, Homo sapien
ggacacttgaaagcacgctctggca

SEQ ID NO: 4563370 - DNA, 25 bp, Homo sapien
catttgtccccgagttgtaaggtgc

SEQ ID NO: 4563371 - DNA, 25 bp, Homo sapien
gagtgcatcccatccatcgatcgga

SEQ ID NO: 4563372 - DNA, 25 bp, Homo sapien
caccttgaggtgtcgcaagtgtcca

SEQ ID NO: 4563373 - DNA, 25 bp, Homo sapien
caagtgtccagagagccgaagtgtg

SEQ ID NO: 4563374 - DNA, 25 bp, Homo sapien
tgtagggtccaaagcaaggtccttc

SEQ ID NO: 4563375 - DNA, 25 bp, Homo sapien
aatgactcccttgttatcacctttt

SEQ ID NO: 4563376 - DNA, 25 bp, Homo sapien
gcttgtaaatgactcccttgttatc

SEQ ID NO: 4563377 - DNA, 25 bp, Homo sapien
ttgtaaatgactcccttgttatcac

SEQ ID NO: 4563378 - DNA, 25 bp, Homo sapien
gtaaatgactcccttgttatcacct

SEQ ID NO: 4563379 - DNA, 25 bp, Homo sapien
cttgataagaagacagcctggctgc

SEQ ID NO: 4563380 - DNA, 25 bp, Homo sapien
catgtgcgtctcatgcaaaggaggc

SEQ ID NO: 4563381 - DNA, 25 bp, Homo sapien
cctcctagggtaagtggtggtccag

SEQ ID NO: 4563382 - DNA, 25 bp, Homo sapien
tcgtccaaggccatgcaatagcagc

SEQ ID NO: 4563383 - DNA, 25 bp, Homo sapien
agatgccaagaatgccagccagggc

SEQ ID NO: 4563384 - DNA, 25 bp, Homo sapien
tagtccattgccaaggtcatgcggc

SEQ ID NO: 4563385 - DNA, 25 bp, Homo sapien
cagagcgacttgagggtaagaccca

SEQ ID NO: 4563386 - DNA, 25 bp, Homo sapien
taagacccatagcaaggagagggcc

SEQ ID NO: 4563387 - DNA, 25 bp, Homo sapien
taagcagtcccagatgaccagtagt

SEQ ID NO: 4563388 - DNA, 25 bp, Homo sapien
cagtcctgccgcagtacagacttgc

SEQ ID NO: 4563389 - DNA, 25 bp, Homo sapien
tcagtcctgccgcagtacagacttg

SEQ ID NO: 4563390 - DNA, 25 bp, Homo sapien
agtcctgccgcagtacagacttgca

SEQ ID NO: 4563391 - DNA, 25 bp, Homo sapien
aaaccacactggatttgagcagcgt

SEQ ID NO: 4563392 - DNA, 25 bp, Homo sapien
taggctgacagacctctagggatgt

SEQ ID NO: 4563393 - DNA, 25 bp, Homo sapien
gaagtacaggaaattgcccatctag

SEQ ID NO: 4563394 - DNA, 25 bp, Homo sapien
gagagacgctctaccatttgtttgg

SEQ ID NO: 4563395 - DNA, 25 bp, Homo sapien
gatgctcctttatcacaacagtttc

SEQ ID NO: 4563396 - DNA, 25 bp, Homo sapien
cccgatgctcctttatcacaacagt

SEQ ID NO: 4563397 - DNA, 25 bp, Homo sapien
tgctcctttatcacaacagtttcct

SEQ ID NO: 4563398 - DNA, 25 bp, Homo sapien
cggccccgatgctcctttatcacaa

SEQ ID NO: 4563399 - DNA, 25 bp, Homo sapien
tggtcaagtgtaagatgccagcagg

SEQ ID NO: 4563400 - DNA, 25 bp, Homo sapien
ggccctgggagagccctggtcaagt

SEQ ID NO: 4563401 - DNA, 25 bp, Homo sapien
ggctgcagggtgaggttttgctcac

SEQ ID NO: 4563402 - DNA, 25 bp, Homo sapien
tgtgcccatagaacccacagtggtg

SEQ ID NO: 4563403 - DNA, 25 bp, Homo sapien
caatctcacattgaacctgcagagc

SEQ ID NO: 4563404 - DNA, 25 bp, Homo sapien
caggagccatcagccgtgtgctttt

SEQ ID NO: 4563405 - DNA, 25 bp, Homo sapien
catcagccgtgtgcttttccgattg

SEQ ID NO: 4563406 - DNA, 25 bp, Homo sapien
tgtcgtatggcccaagtctagctga

SEQ ID NO: 4563407 - DNA, 25 bp, Homo sapien
ccaaggacagggaagcctattctcc

SEQ ID NO: 4563408 - DNA, 25 bp, Homo sapien
ttcgtgtaacctgaacacaaggacc

SEQ ID NO: 4563409 - DNA, 25 bp, Homo sapien
gggaagcctattctccctactctgc

SEQ ID NO: 4563410 - DNA, 25 bp, Homo sapien
tcttcgtgtaacctgaacacaagga

SEQ ID NO: 4563411 - DNA, 25 bp, Homo sapien
tgtggcctctgcacagtggaacttg

SEQ ID NO: 4563412 - DNA, 25 bp, Homo sapien
cacagtggaacttggtattagggtt

SEQ ID NO: 4563413 - DNA, 25 bp, Homo sapien
cagtgtttgtacagcacaagctctg

SEQ ID NO: 4563414 - DNA, 25 bp, Homo sapien
ttaaatgtaaccagagaccatggtc

SEQ ID NO: 4563415 - DNA, 25 bp, Homo sapien
ttttctcagggcacatgccctgcgt

SEQ ID NO: 4563416 - DNA, 25 bp, Homo sapien
catgccctgcgtggtggcttctctg

SEQ ID NO: 4563417 - DNA, 25 bp, Homo sapien
aagtctatggagagcaaggccccag

SEQ ID NO: 4563418 - DNA, 25 bp, Homo sapien
cccagcaagggtggggcttttctca

SEQ ID NO: 4563419 - DNA, 25 bp, Homo sapien
tgctacctgttctggcaggcccagg

SEQ ID NO: 4563420 - DNA, 25 bp, Homo sapien
agaaggtcggtgagctgcttgccac

SEQ ID NO: 4563421 - DNA, 25 bp, Homo sapien
caggagctgcgtcttccaccggcat

SEQ ID NO: 4563422 - DNA, 25 bp, Homo sapien
tgcttgccacaagggccttgctacc

SEQ ID NO: 4563423 - DNA, 25 bp, Homo sapien
gaggcatctgcacccctgataaagg

SEQ ID NO: 4563424 - DNA, 25 bp, Homo sapien
aatggaaaaaagtgcctgacatgac

SEQ ID NO: 4563425 - DNA, 25 bp, Homo sapien
tgcacagttctctctcacgctacgt

SEQ ID NO: 4563426 - DNA, 25 bp, Homo sapien
ggatttgtacactcctaagggtgca

SEQ ID NO: 4563427 - DNA, 25 bp, Homo sapien
taagaaaggcctcgtgaatgcagcc

SEQ ID NO: 4563428 - DNA, 25 bp, Homo sapien
tgccatagtccatcgttacaagcgg

SEQ ID NO: 4563429 - DNA, 25 bp, Homo sapien
tactgggtagagaccaacggtgctg

SEQ ID NO: 4563430 - DNA, 25 bp, Homo sapien
gggagaatctactgaagcgcttggc

SEQ ID NO: 4563431 - DNA, 25 bp, Homo sapien
tcagagtcaagctcctgcccggttt

SEQ ID NO: 4563432 - DNA, 25 bp, Homo sapien
gatcctctgtaactgccctcaaaca

SEQ ID NO: 4563433 - DNA, 25 bp, Homo sapien
gatgtcagagtcaagctcctgcccg

SEQ ID NO: 4563434 - DNA, 25 bp, Homo sapien
ttctgatcctctgtaactgccctca

SEQ ID NO: 4563435 - DNA, 25 bp, Homo sapien
taacagatacattccatgcactcag

SEQ ID NO: 4563436 - DNA, 25 bp, Homo sapien
gatacattccatgcactcagttcat

SEQ ID NO: 4563437 - DNA, 25 bp, Homo sapien
catttaacccttggatactacattc

SEQ ID NO: 4563438 - DNA, 25 bp, Homo sapien
tacattctccacttagaagaatgag

SEQ ID NO: 4563439 - DNA, 25 bp, Homo sapien
cagattctgttttccaactgagaaa

SEQ ID NO: 4563440 - DNA, 25 bp, Homo sapien
gttcacagattctgttttccaactg

SEQ ID NO: 4563441 - DNA, 25 bp, Homo sapien
cacagattctgttttccaactgaga

SEQ ID NO: 4563442 - DNA, 25 bp, Homo sapien
ctactgttcacagattctgttttcc

SEQ ID NO: 4563443 - DNA, 25 bp, Homo sapien
gtataccagcctctcatcgaacttc

SEQ ID NO: 4563444 - DNA, 25 bp, Homo sapien
tcatcgaacttctggacctgccgga

SEQ ID NO: 4563445 - DNA, 25 bp, Homo sapien
ccatgtgtgtgcagtacagggctgt

SEQ ID NO: 4563446 - DNA, 25 bp, Homo sapien
cctgccggaagttgttgatcatttc

SEQ ID NO: 4563447 - DNA, 25 bp, Homo sapien
ccccggtagcggtaatattcagcgg

SEQ ID NO: 4563448 - DNA, 25 bp, Homo sapien
tattcagcggtcctctccggaagca

SEQ ID NO: 4563449 - DNA, 25 bp, Homo sapien
tgaatcccgggacgaatgcttcctg

SEQ ID NO: 4563450 - DNA, 25 bp, Homo sapien
cagctcttcaatgttgaatcccggg

SEQ ID NO: 4563451 - DNA, 25 bp, Homo sapien
gaatatgcatgcaaggacccctcac

SEQ ID NO: 4563452 - DNA, 25 bp, Homo sapien
tgaatatgcatgcaaggacccctca

SEQ ID NO: 4563453 - DNA, 25 bp, Homo sapien
cataggacggattgaaggagcccat

SEQ ID NO: 4563454 - DNA, 25 bp, Homo sapien
gactgaagatcttgtcataggacgg

SEQ ID NO: 4563455 - DNA, 25 bp, Homo sapien
gaaggtgactgaagatcttgtcata

SEQ ID NO: 4563456 - DNA, 25 bp, Homo sapien
tttgtactttacatgttgaaggtga

SEQ ID NO: 4563457 - DNA, 25 bp, Homo sapien
tctgagttataatggacaatgtgca

SEQ ID NO: 4563458 - DNA, 25 bp, Homo sapien
cagcgaggccttctgacttgttgct

SEQ ID NO: 4563459 - DNA, 25 bp, Homo sapien
cagtgctggcgtcaggataaaggtc

SEQ ID NO: 4563460 - DNA, 25 bp, Homo sapien
ctggcagtgctggcgtcaggataaa

SEQ ID NO: 4563461 - DNA, 25 bp, Homo sapien
aagtgctgtccgctgacggtgtgct

SEQ ID NO: 4563462 - DNA, 25 bp, Homo sapien
cagctgcgtggcactgtagcgagac

SEQ ID NO: 4563463 - DNA, 25 bp, Homo sapien
tgctcagagccgtgcgggtcattcg

SEQ ID NO: 4563464 - DNA, 25 bp, Homo sapien
ccctggatgtgcatgtccgagggca

SEQ ID NO: 4563465 - DNA, 25 bp, Homo sapien
gaaagtgatgccagaaacgctaaca

SEQ ID NO: 4563466 - DNA, 25 bp, Homo sapien
gggtacttcttggaccagctattct

SEQ ID NO: 4563467 - DNA, 25 bp, Homo sapien
gctggcgtcatactggaggatgtca

SEQ ID NO: 4563468 - DNA, 25 bp, Homo sapien
tggccattgttggtcaggagaaact

SEQ ID NO: 4563469 - DNA, 25 bp, Homo sapien
cagattgtagccttggaactcgagg

SEQ ID NO: 4563470 - DNA, 25 bp, Homo sapien
actgcacagtgctggccttatgctg

SEQ ID NO: 4563471 - DNA, 25 bp, Homo sapien
gacatgtgactgcacagtgctggcc

SEQ ID NO: 4563472 - DNA, 25 bp, Homo sapien
cttatgctggccgctacaccctggg

SEQ ID NO: 4563473 - DNA, 25 bp, Homo sapien
aaccaatatcagaggtgacaacagc

SEQ ID NO: 4563474 - DNA, 25 bp, Homo sapien
gaggcacagtcataaaccccaatgt

SEQ ID NO: 4563475 - DNA, 25 bp, Homo sapien
ggagaggcacagtcataaaccccaa

SEQ ID NO: 4563476 - DNA, 25 bp, Homo sapien
gcggagaggcacagtcataaacccc

SEQ ID NO: 4563477 - DNA, 25 bp, Homo sapien
ttcctgctgggtaggcggagaggca

SEQ ID NO: 4563478 - DNA, 25 bp, Homo sapien
cctgaggatgtctgatttccagatg

SEQ ID NO: 4563479 - DNA, 25 bp, Homo sapien
gttctctgtggctctagtcacaggg

SEQ ID NO: 4563480 - DNA, 25 bp, Homo sapien
gcaggactgatggatgtattaacac

SEQ ID NO: 4563481 - DNA, 25 bp, Homo sapien
ctctgagtcttgtggcttagctgtg

SEQ ID NO: 4563482 - DNA, 25 bp, Homo sapien
gaaagtgttaagtccacagccctgt

SEQ ID NO: 4563483 - DNA, 25 bp, Homo sapien
gcccattcatgtgaggaatcgtgct

SEQ ID NO: 4563484 - DNA, 25 bp, Homo sapien
gccctcgcaagacatcctgctctgt

SEQ ID NO: 4563485 - DNA, 25 bp, Homo sapien
tgctagatgtgaaagtgttaagtcc

SEQ ID NO: 4563486 - DNA, 25 bp, Homo sapien
gagagcgaatactgtgggcagaggc

SEQ ID NO: 4563487 - DNA, 25 bp, Homo sapien
aaccagtgggagagcgaatactgtg

SEQ ID NO: 4563488 - DNA, 25 bp, Homo sapien
ggaaaccagtgggagagcgaatact

SEQ ID NO: 4563489 - DNA, 25 bp, Homo sapien
tgggagagcgaatactgtgggcaga

SEQ ID NO: 4563490 - DNA, 25 bp, Homo sapien
tgttgttggccccttctccttctta

SEQ ID NO: 4563491 - DNA, 25 bp, Homo sapien
ccccctttggataatccatgggatc

SEQ ID NO: 4563492 - DNA, 25 bp, Homo sapien
ctggctaccccctttggataatcca

SEQ ID NO: 4563493 - DNA, 25 bp, Homo sapien
ccctcccatggcttcaacaccagct

SEQ ID NO: 4563494 - DNA, 25 bp, Homo sapien
ctcccatggcttcaacaccagctct

SEQ ID NO: 4563495 - DNA, 25 bp, Homo sapien
cagatccagacagttctctgctgaa

SEQ ID NO: 4563496 - DNA, 25 bp, Homo sapien
cacaccagatccagacagttctctg

SEQ ID NO: 4563497 - DNA, 25 bp, Homo sapien
accagatccagacagttctctgctg

SEQ ID NO: 4563498 - DNA, 25 bp, Homo sapien
agatccagacagttctctgctgaaa

SEQ ID NO: 4563499 - DNA, 25 bp, Homo sapien
ctgacccctaagctgtgcagacaca

SEQ ID NO: 4563500 - DNA, 25 bp, Homo sapien
gggccaggctatgtgcatctatctg

SEQ ID NO: 4563501 - DNA, 25 bp, Homo sapien
gaaatccgaccatcccagatcaatg

SEQ ID NO: 4563502 - DNA, 25 bp, Homo sapien
gtgatgtggcatttcctttcaggcc

SEQ ID NO: 4563503 - DNA, 25 bp, Homo sapien
gccccacttgccaatgccagcatga

SEQ ID NO: 4563504 - DNA, 25 bp, Homo sapien
ttccacgacattgagagttccatct

SEQ ID NO: 4563505 - DNA, 25 bp, Homo sapien
ccagaaaagtggtgtgccaatgagg

SEQ ID NO: 4563506 - DNA, 25 bp, Homo sapien
aaacactgcctcatacttgcttcaa

SEQ ID NO: 4563507 - DNA, 25 bp, Homo sapien
gcctgcacccttcgcccagcagttg

SEQ ID NO: 4563508 - DNA, 25 bp, Homo sapien
tgcctgcgctccaccgtggtgcctg

SEQ ID NO: 4563509 - DNA, 25 bp, Homo sapien
gtggtgcctgcacccttcgcccagc

SEQ ID NO: 4563510 - DNA, 25 bp, Homo sapien
accgtggtgcctgcacccttcgccc

SEQ ID NO: 4563511 - DNA, 25 bp, Homo sapien
gtcaagtcggagcacagccagaggc

SEQ ID NO: 4563512 - DNA, 25 bp, Homo sapien
tagcagaatggtcaagtcggagcac

SEQ ID NO: 4563513 - DNA, 25 bp, Homo sapien
cgctgcacctgcggttccaaggctt

SEQ ID NO: 4563514 - DNA, 25 bp, Homo sapien
ccagcaggtagcagaatggtcaagt

SEQ ID NO: 4563515 - DNA, 25 bp, Homo sapien
gattgatgcgggactgatttccggc

SEQ ID NO: 4563516 - DNA, 25 bp, Homo sapien
aaggtccatgtcacatcatccccag

SEQ ID NO: 4563517 - DNA, 25 bp, Homo sapien
agcaagtgaagctgccgggctcagc

SEQ ID NO: 4563518 - DNA, 25 bp, Homo sapien
agctgtcctcagttcacagcaagtg

SEQ ID NO: 4563519 - DNA, 25 bp, Homo sapien
gaggagtttgcctccttagctgtct

SEQ ID NO: 4563520 - DNA, 25 bp, Homo sapien
cgtcccctctgagggctgactccac

SEQ ID NO: 4563521 - DNA, 25 bp, Homo sapien
acctaaggaggagctagccaagacc

SEQ ID NO: 4563522 - DNA, 25 bp, Homo sapien
caagacctcaggaggagtttgcctc

SEQ ID NO: 4563523 - DNA, 25 bp, Homo sapien
ccatcgctagcttacaatcacggca

SEQ ID NO: 4563524 - DNA, 25 bp, Homo sapien
ccaggacccttgcagtccggaggtg

SEQ ID NO: 4563525 - DNA, 25 bp, Homo sapien
tactgacagcttaagttctgggacc

SEQ ID NO: 4563526 - DNA, 25 bp, Homo sapien
tcttggagaccgtcccacagaaagc

SEQ ID NO: 4563527 - DNA, 25 bp, Homo sapien
tggttctcgacccacaagggtacag

SEQ ID NO: 4563528 - DNA, 25 bp, Homo sapien
aagggaccctgagtagagaagcatc

SEQ ID NO: 4563529 - DNA, 25 bp, Homo sapien
agatggaaaagcgtacccttgtggg

SEQ ID NO: 4563530 - DNA, 25 bp, Homo sapien
aatctggtcacttatcactcctggc

SEQ ID NO: 4563531 - DNA, 25 bp, Homo sapien
gggctggaaggctgttcctttaaga

SEQ ID NO: 4563532 - DNA, 25 bp, Homo sapien
gcaggagcacggccgccgcgtgcag

SEQ ID NO: 4563533 - DNA, 25 bp, Homo sapien
caggagcacggccgccgcgtgcagg

SEQ ID NO: 4563534 - DNA, 25 bp, Homo sapien
cagcaggagcacggccgccgcgtgc

SEQ ID NO: 4563535 - DNA, 25 bp, Homo sapien
agcaggagcacggccgccgcgtgca

SEQ ID NO: 4563536 - DNA, 25 bp, Homo sapien
tggcgccccagatcctaggtgagtt

SEQ ID NO: 4563537 - DNA, 25 bp, Homo sapien
caaacacttgatgtcatcgtgcggg

SEQ ID NO: 4563538 - DNA, 25 bp, Homo sapien
gcttttatggagcaactcaacgcca

SEQ ID NO: 4563539 - DNA, 25 bp, Homo sapien
gaacacagttctccgaggagctgct

SEQ ID NO: 4563540 - DNA, 25 bp, Homo sapien
ttcgccagtttaaggctggccttaa

SEQ ID NO: 4563541 - DNA, 25 bp, Homo sapien
ctccccaagcattccgggagttgtt

SEQ ID NO: 4563542 - DNA, 25 bp, Homo sapien
tcgccagtttaaggctggccttaaa

SEQ ID NO: 4563543 - DNA, 25 bp, Homo sapien
tcacatgcccaaggctgctttgtcc

SEQ ID NO: 4563544 - DNA, 25 bp, Homo sapien
tcctgatgcccaccccggtgaggag

SEQ ID NO: 4563545 - DNA, 25 bp, Homo sapien
cagagatccctttcagacatttggg

SEQ ID NO: 4563546 - DNA, 25 bp, Homo sapien
gtccagccagatctgcagaccagag

SEQ ID NO: 4563547 - DNA, 25 bp, Homo sapien
cacatctgtagatttagtaagtgga

SEQ ID NO: 4563548 - DNA, 25 bp, Homo sapien
tccggactcattggccatgagagtt

SEQ ID NO: 4563549 - DNA, 25 bp, Homo sapien
tggagaaatatgaagtccggactca

SEQ ID NO: 4563550 - DNA, 25 bp, Homo sapien
gagggacctatcatgtagagggaca

SEQ ID NO: 4563551 - DNA, 25 bp, Homo sapien
tgccaactccccagatctcttgtgg

SEQ ID NO: 4563552 - DNA, 25 bp, Homo sapien
tgtctgacacatctgatctctctgt

SEQ ID NO: 4563553 - DNA, 25 bp, Homo sapien
aactaccgtctacttcctgcaactg

SEQ ID NO: 4563554 - DNA, 25 bp, Homo sapien
ttcagtagagctccaactaccgtct

SEQ ID NO: 4563555 - DNA, 25 bp, Homo sapien
aagcagccctcctctttcatggcct

SEQ ID NO: 4563556 - DNA, 25 bp, Homo sapien
acagaagaaagcagccctcctcttt

SEQ ID NO: 4563557 - DNA, 25 bp, Homo sapien
gaagaaagcagccctcctctttcat

SEQ ID NO: 4563558 - DNA, 25 bp, Homo sapien
gaaagcagccctcctctttcatggc

SEQ ID NO: 4563559 - DNA, 25 bp, Homo sapien
acaaaacaaaagcttgagtcccagc

SEQ ID NO: 4563560 - DNA, 25 bp, Homo sapien
aacaaaacaaaagcttgagtcccag

SEQ ID NO: 4563561 - DNA, 25 bp, Homo sapien
caaaacaaaagcttgagtcccagcc

SEQ ID NO: 4563562 - DNA, 25 bp, Homo sapien
aaaacaaaagcttgagtcccagcct

SEQ ID NO: 4563563 - DNA, 25 bp, Homo sapien
gaggctggccctgagcccagtaata

SEQ ID NO: 4563564 - DNA, 25 bp, Homo sapien
tggccctgagcccagtaataggaca

SEQ ID NO: 4563565 - DNA, 25 bp, Homo sapien
caattgttgaaattcccttcccagg

SEQ ID NO: 4563566 - DNA, 25 bp, Homo sapien
agcccagtaataggacaccaagggg

SEQ ID NO: 4563567 - DNA, 25 bp, Homo sapien
cacgagggatcttgggtgaatgccc

SEQ ID NO: 4563568 - DNA, 25 bp, Homo sapien
ttggccaagggtaagcacagcagca

SEQ ID NO: 4563569 - DNA, 25 bp, Homo sapien
ccatgcagggcaagagtataaacag

SEQ ID NO: 4563570 - DNA, 25 bp, Homo sapien
tactttcataacgagatggaatgcc

SEQ ID NO: 4563571 - DNA, 25 bp, Homo sapien
cccagtagggattcacatagagtca

SEQ ID NO: 4563572 - DNA, 25 bp, Homo sapien
tttggaccaacaagtgaggccaggc

SEQ ID NO: 4563573 - DNA, 25 bp, Homo sapien
taaggtgaggttcaagagcgagcac

SEQ ID NO: 4563574 - DNA, 25 bp, Homo sapien
tgatcaccggccatgtgaaggcacc

SEQ ID NO: 4563575 - DNA, 25 bp, Homo sapien
ggacatgatagtgggattttcctca

SEQ ID NO: 4563576 - DNA, 25 bp, Homo sapien
aaactttctgaaaggcacagcgcca

SEQ ID NO: 4563577 - DNA, 25 bp, Homo sapien
aaacgtccttggtgtagcactcgcc

SEQ ID NO: 4563578 - DNA, 25 bp, Homo sapien
tctgcagcgccagtacctcatttct

SEQ ID NO: 4563579 - DNA, 25 bp, Homo sapien
tgaatttgaccagaacccaggaaag

SEQ ID NO: 4563580 - DNA, 25 bp, Homo sapien
caagaagttgtatctggctgtgatc

SEQ ID NO: 4563581 - DNA, 25 bp, Homo sapien
ctgtgtagatgcagcagagtaggca

SEQ ID NO: 4563582 - DNA, 25 bp, Homo sapien
ggaaagccaattgcctaacagcctg

SEQ ID NO: 4563583 - DNA, 25 bp, Homo sapien
tcttatgctcatggtagttatgtgc

SEQ ID NO: 4563584 - DNA, 25 bp, Homo sapien
tgcttttctggtgtagatattcagt

SEQ ID NO: 4563585 - DNA, 25 bp, Homo sapien
gtagttatgtgcttttctggtgtag

SEQ ID NO: 4563586 - DNA, 25 bp, Homo sapien
ggcactcccacgtcttatgctcatg

SEQ ID NO: 4563587 - DNA, 25 bp, Homo sapien
caggcagagtctgagatcccaggga

SEQ ID NO: 4563588 - DNA, 25 bp, Homo sapien
gactgcatcatgtaggcatccagct

SEQ ID NO: 4563589 - DNA, 25 bp, Homo sapien
actgtggactgcatcatgtaggcat

SEQ ID NO: 4563590 - DNA, 25 bp, Homo sapien
tgtggactgcatcatgtaggcatcc

SEQ ID NO: 4563591 - DNA, 25 bp, Homo sapien
ctgcaaaaatgagaatgggattcac

SEQ ID NO: 4563592 - DNA, 25 bp, Homo sapien
tgtggctccctagtgtctgatcctt

SEQ ID NO: 4563593 - DNA, 25 bp, Homo sapien
cagtttgggataggttgaaacctca

SEQ ID NO: 4563594 - DNA, 25 bp, Homo sapien
gacccataaaagaatgttactgcgg

SEQ ID NO: 4563595 - DNA, 25 bp, Homo sapien
tcgtcagttacatcctgcaacagtt

SEQ ID NO: 4563596 - DNA, 25 bp, Homo sapien
tttttcataaacagtgagaaataat

SEQ ID NO: 4563597 - DNA, 25 bp, Homo sapien
ctagactggtgtccaactctttttc

SEQ ID NO: 4563598 - DNA, 25 bp, Homo sapien
tgtaacctagactggtgtccaactc

SEQ ID NO: 4563599 - DNA, 25 bp, Homo sapien
ttattgtaacctagactggtgtcca

SEQ ID NO: 4563600 - DNA, 25 bp, Homo sapien
gtcaagtgttcttaggcaaattatt

SEQ ID NO: 4563601 - DNA, 25 bp, Homo sapien
cagtcaagtgttcttaggcaaatta

SEQ ID NO: 4563602 - DNA, 25 bp, Homo sapien
ttaggcaaattattcatcttcactg

SEQ ID NO: 4563603 - DNA, 25 bp, Homo sapien
aggcaaattattcatcttcactgag

SEQ ID NO: 4563604 - DNA, 25 bp, Homo sapien
tccaacattctaagtactcaggtac

SEQ ID NO: 4563605 - DNA, 25 bp, Homo sapien
cttccaacattctaagtactcaggt

SEQ ID NO: 4563606 - DNA, 25 bp, Homo sapien
aacattctaagtactcaggtaccat

SEQ ID NO: 4563607 - DNA, 25 bp, Homo sapien
caacattctaagtactcaggtacca

SEQ ID NO: 4563608 - DNA, 25 bp, Homo sapien
aggtcatgctccagggccgaacaag

SEQ ID NO: 4563609 - DNA, 25 bp, Homo sapien
tacataccagtatgaagcatggcct

SEQ ID NO: 4563610 - DNA, 25 bp, Homo sapien
gctctcatctagtgtcagtaaaaac

SEQ ID NO: 4563611 - DNA, 25 bp, Homo sapien
ggccttaaagacaaataggttgaca

SEQ ID NO: 4563612 - DNA, 25 bp, Homo sapien
cccggtgggtggataccattaggca

SEQ ID NO: 4563613 - DNA, 25 bp, Homo sapien
tcaagtgccccagtgagatcgcagg

SEQ ID NO: 4563614 - DNA, 25 bp, Homo sapien
taagatttgaaagcatgccggcctg

SEQ ID NO: 4563615 - DNA, 25 bp, Homo sapien
cttggaacggctagagacgcttgct

SEQ ID NO: 4563616 - DNA, 25 bp, Homo sapien
agcgcccggctagaagcgacaccag

SEQ ID NO: 4563617 - DNA, 25 bp, Homo sapien
cggcgtccggaagcccgtgctttct

SEQ ID NO: 4563618 - DNA, 25 bp, Homo sapien
gacaccagacggagcctccggagtt

SEQ ID NO: 4563619 - DNA, 25 bp, Homo sapien
ttctttgacgcaagggctcgagacg

SEQ ID NO: 4563620 - DNA, 25 bp, Homo sapien
cgacggccgggccagcgaaggagag

SEQ ID NO: 4563621 - DNA, 25 bp, Homo sapien
gggagggtacgcgatgaggcgggcg

SEQ ID NO: 4563622 - DNA, 25 bp, Homo sapien
ccagcgaaggagagggccgcgaggg

SEQ ID NO: 4563623 - DNA, 25 bp, Homo sapien
tgaggcgggcgcgtgcgggagcggc

SEQ ID NO: 4563624 - DNA, 25 bp, Homo sapien
agggcgggaagagcgccgctctccg

SEQ ID NO: 4563625 - DNA, 25 bp, Homo sapien
gacagggcgggaagagcgccgctct

SEQ ID NO: 4563626 - DNA, 25 bp, Homo sapien
ggaagagcgccgctctccgggcgca

SEQ ID NO: 4563627 - DNA, 25 bp, Homo sapien
cgcagacagggcgggaagagcgccg

SEQ ID NO: 4563628 - DNA, 25 bp, Homo sapien
ccgaaaatgcgttgggattcccagt

SEQ ID NO: 4563629 - DNA, 25 bp, Homo sapien
tctttcatccgtcagggatggtgaa

SEQ ID NO: 4563630 - DNA, 25 bp, Homo sapien
gtagcttaagcgttttaactcctgc

SEQ ID NO: 4563631 - DNA, 25 bp, Homo sapien
ctcgaaaccccgagaggcgctggga

SEQ ID NO: 4563632 - DNA, 25 bp, Homo sapien
tgcaagcctgggtctagtcacttac

SEQ ID NO: 4563633 - DNA, 25 bp, Homo sapien
tagaaccaataaagcgagtttcgca

SEQ ID NO: 4563634 - DNA, 25 bp, Homo sapien
gcgtgcctgtcgtttcagtgattaa

SEQ ID NO: 4563635 - DNA, 25 bp, Homo sapien
taaaatggagcataacgagatgtgc

SEQ ID NO: 4563636 - DNA, 25 bp, Homo sapien
aatttgcagttgtcttaagtgtttg

SEQ ID NO: 4563637 - DNA, 25 bp, Homo sapien
tggatgtatacaatgcagatgaatt

SEQ ID NO: 4563638 - DNA, 25 bp, Homo sapien
tcagtgtgtgctctttatggatgta

SEQ ID NO: 4563639 - DNA, 25 bp, Homo sapien
ttaagtgtttgcattagttagatgc

SEQ ID NO: 4563640 - DNA, 25 bp, Homo sapien
ggcgtttagtacatccacaattgtt

SEQ ID NO: 4563641 - DNA, 25 bp, Homo sapien
gggaaaaggagatcaccaaattgtg

SEQ ID NO: 4563642 - DNA, 25 bp, Homo sapien
ccttatcattacgtatctgtctgtc

SEQ ID NO: 4563643 - DNA, 25 bp, Homo sapien
tataataccctgttctaaatgcagg

SEQ ID NO: 4563644 - DNA, 25 bp, Homo sapien
gatgctcactgcttgtagagtccag

SEQ ID NO: 4563645 - DNA, 25 bp, Homo sapien
tttaacttgattaggaagctgatga

SEQ ID NO: 4563646 - DNA, 25 bp, Homo sapien
cttttgtaaccaaatgcaggtctgg

SEQ ID NO: 4563647 - DNA, 25 bp, Homo sapien
aacttgattaggaagctgatgaaaa

SEQ ID NO: 4563648 - DNA, 25 bp, Homo sapien
gattccctacattagcagtgttata

SEQ ID NO: 4563649 - DNA, 25 bp, Homo sapien
ggtagtatcttagattccctacatt

SEQ ID NO: 4563650 - DNA, 25 bp, Homo sapien
tatcagaaatactgtgtcaacatgt

SEQ ID NO: 4563651 - DNA, 25 bp, Homo sapien
cacgcccgactataaaattgagttc

SEQ ID NO: 4563652 - DNA, 25 bp, Homo sapien
atttgattctttctcagcagtatac

SEQ ID NO: 4563653 - DNA, 25 bp, Homo sapien
ttcatttgattctttctcagcagta

SEQ ID NO: 4563654 - DNA, 25 bp, Homo sapien
catttgattctttctcagcagtata

SEQ ID NO: 4563655 - DNA, 25 bp, Homo sapien
ttttcatttgattctttctcagcag

SEQ ID NO: 4563656 - DNA, 25 bp, Homo sapien
ggtgataaaagggtagagaggcaaa

SEQ ID NO: 4563657 - DNA, 25 bp, Homo sapien
tggtgataaaagggtagagaggcaa

SEQ ID NO: 4563658 - DNA, 25 bp, Homo sapien
tgataaaagggtagagaggcaaagc

SEQ ID NO: 4563659 - DNA, 25 bp, Homo sapien
ataaaagggtagagaggcaaagctg

SEQ ID NO: 4563660 - DNA, 25 bp, Homo sapien
cagtcagtcagactgtgagagtggt

SEQ ID NO: 4563661 - DNA, 25 bp, Homo sapien
gggagtgtcccacgggctgcatctt

SEQ ID NO: 4563662 - DNA, 25 bp, Homo sapien
tcagaacagtagtatcagaccaggg

SEQ ID NO: 4563663 - DNA, 25 bp, Homo sapien
tggtctgtgaagcttcgcagtcagt

SEQ ID NO: 4563664 - DNA, 25 bp, Homo sapien
ttggaaaactcaacactaaacagca

SEQ ID NO: 4563665 - DNA, 25 bp, Homo sapien
tttggaaaactcaacactaaacagc

SEQ ID NO: 4563666 - DNA, 25 bp, Homo sapien
gtgtcttggatttggagtattttac

SEQ ID NO: 4563667 - DNA, 25 bp, Homo sapien
gaccccagtgagtccatctgtcagc

SEQ ID NO: 4563668 - DNA, 25 bp, Homo sapien
gccacctgtactgtcgattgttgcc

SEQ ID NO: 4563669 - DNA, 25 bp, Homo sapien
tcccatcagcgttactgctgtgctc

SEQ ID NO: 4563670 - DNA, 25 bp, Homo sapien
catgcgtgtagaagtagaaacatct

SEQ ID NO: 4563671 - DNA, 25 bp, Homo sapien
aactaaaagccagttacctagcagg

SEQ ID NO: 4563672 - DNA, 25 bp, Homo sapien
tgtctagagaacttgatcctttggg

SEQ ID NO: 4563673 - DNA, 25 bp, Homo sapien
tggaagcaaccatagttactagagt

SEQ ID NO: 4563674 - DNA, 25 bp, Homo sapien
ccattggttagggagattgttttca

SEQ ID NO: 4563675 - DNA, 25 bp, Homo sapien
gatgacaccagaaaaacttaatgat

SEQ ID NO: 4563676 - DNA, 25 bp, Homo sapien
tatggaaccgttgcctggaagagta

SEQ ID NO: 4563677 - DNA, 25 bp, Homo sapien
tatatattgacagaaactctggttg

SEQ ID NO: 4563678 - DNA, 25 bp, Homo sapien
cctcatatgtgggacagaatctaga

SEQ ID NO: 4563679 - DNA, 25 bp, Homo sapien
gaaggagtcatgttgccctgtgcag

SEQ ID NO: 4563680 - DNA, 25 bp, Homo sapien
gcaaagattccaatacaaggcagtt

SEQ ID NO: 4563681 - DNA, 25 bp, Homo sapien
tgttgtcacggctatattcggaggc

SEQ ID NO: 4563682 - DNA, 25 bp, Homo sapien
ggcccagaccatcccaagtagttta

SEQ ID NO: 4563683 - DNA, 25 bp, Homo sapien
taaaaagtcgatgacagggtctggt

SEQ ID NO: 4563684 - DNA, 25 bp, Homo sapien
cagctggctttcgtttgaatcctca

SEQ ID NO: 4563685 - DNA, 25 bp, Homo sapien
tgccttgcatcccacggagtatttt

SEQ ID NO: 4563686 - DNA, 25 bp, Homo sapien
agagtaattttgtcaccatccacaa

SEQ ID NO: 4563687 - DNA, 25 bp, Homo sapien
gatgaagttgacatcaatatagaat

SEQ ID NO: 4563688 - DNA, 25 bp, Homo sapien
ggtcttttgccattccataataaac

SEQ ID NO: 4563689 - DNA, 25 bp, Homo sapien
aatgttgtatttgctattcttggtc

SEQ ID NO: 4563690 - DNA, 25 bp, Homo sapien
cgttgcttcacataaggtcacaatt

SEQ ID NO: 4563691 - DNA, 25 bp, Homo sapien
agtttggtgtagtgtaaaagcagcc

SEQ ID NO: 4563692 - DNA, 25 bp, Homo sapien
taggctttgcaccacataaggtctc

SEQ ID NO: 4563693 - DNA, 25 bp, Homo sapien
aataatgtaaacaagtgggcatggc

SEQ ID NO: 4563694 - DNA, 25 bp, Homo sapien
gaactgagagtacagcgtctggaca

SEQ ID NO: 4563695 - DNA, 25 bp, Homo sapien
tttccactgagaggcctagacatga

SEQ ID NO: 4563696 - DNA, 25 bp, Homo sapien
ggcatgatgccaggtgctctacaca

SEQ ID NO: 4563697 - DNA, 25 bp, Homo sapien
gacatgaaatgctacttactagagg

SEQ ID NO: 4563698 - DNA, 25 bp, Homo sapien
ggagagctgcctgtatgacctcgcc

SEQ ID NO: 4563699 - DNA, 25 bp, Homo sapien
tttagcatggtgaaaaaatggctct

SEQ ID NO: 4563700 - DNA, 25 bp, Homo sapien
gatgtcattgaccactgctccttct

SEQ ID NO: 4563701 - DNA, 25 bp, Homo sapien
tccgggtgagtacaacagccagctt

SEQ ID NO: 4563702 - DNA, 25 bp, Homo sapien
tgaagagcgacacaactgcctgctg

SEQ ID NO: 4563703 - DNA, 25 bp, Homo sapien
ttccacagctataatggacatcagg

SEQ ID NO: 4563704 - DNA, 25 bp, Homo sapien
taaatcaaggatcatgtgtgcacaa

SEQ ID NO: 4563705 - DNA, 25 bp, Homo sapien
gacatcaggttgactctaaatcaag

SEQ ID NO: 4563706 - DNA, 25 bp, Homo sapien
tatcagcactaactaaataaatttg

SEQ ID NO: 4563707 - DNA, 25 bp, Homo sapien
gggcatcattaagtagaccaggtaa

SEQ ID NO: 4563708 - DNA, 25 bp, Homo sapien
gaccaggtaattactgcttgtctct

SEQ ID NO: 4563709 - DNA, 25 bp, Homo sapien
tgcttgtctctcaaggctgctgtct

SEQ ID NO: 4563710 - DNA, 25 bp, Homo sapien
gaccctctgggatttacttggatca

SEQ ID NO: 4563711 - DNA, 25 bp, Homo sapien
tgtaccactggaagtcacgacatgt

SEQ ID NO: 4563712 - DNA, 25 bp, Homo sapien
ccagtgaggtaaagccatggcgtct

SEQ ID NO: 4563713 - DNA, 25 bp, Homo sapien
tcttcgctgctctgggttttaacac

SEQ ID NO: 4563714 - DNA, 25 bp, Homo sapien
gatatctgaagttgtgggagcagat

SEQ ID NO: 4563715 - DNA, 25 bp, Homo sapien
ggtggctttccctcaggttggatat

SEQ ID NO: 4563716 - DNA, 25 bp, Homo sapien
cagtctggtggctttccctcaggtt

SEQ ID NO: 4563717 - DNA, 25 bp, Homo sapien
tttccctcaggttggatatctgaag

SEQ ID NO: 4563718 - DNA, 25 bp, Homo sapien
ttttaactgtgcagccttaccacac

SEQ ID NO: 4563719 - DNA, 25 bp, Homo sapien
ttgaacagcagtgatgtaaatgtgc

SEQ ID NO: 4563720 - DNA, 25 bp, Homo sapien
aaacgtttgaatggtgtgaagattc

SEQ ID NO: 4563721 - DNA, 25 bp, Homo sapien
tggatccatctcaattgtgcacttg

SEQ ID NO: 4563722 - DNA, 25 bp, Homo sapien
tttcccttgtgccatgttgtctcca

SEQ ID NO: 4563723 - DNA, 25 bp, Homo sapien
tgccatgttgtctccagcaatatat

SEQ ID NO: 4563724 - DNA, 25 bp, Homo sapien
gaaagctgatcttttgtcctcttca

SEQ ID NO: 4563725 - DNA, 25 bp, Homo sapien
agggcctcgcgctgagtcacatggc

SEQ ID NO: 4563726 - DNA, 25 bp, Homo sapien
tccccacacgggtgggtgacagaaa

SEQ ID NO: 4563727 - DNA, 25 bp, Homo sapien
cccacacgggtgggtgacagaaaca

SEQ ID NO: 4563728 - DNA, 25 bp, Homo sapien
gtccccacacgggtgggtgacagaa

SEQ ID NO: 4563729 - DNA, 25 bp, Homo sapien
aagtccccacacgggtgggtgacag

SEQ ID NO: 4563730 - DNA, 25 bp, Homo sapien
acgatttggagctgcagtacctggg

SEQ ID NO: 4563731 - DNA, 25 bp, Homo sapien
gcaagctcttacagaatccccacga

SEQ ID NO: 4563732 - DNA, 25 bp, Homo sapien
gggcctcctcagtcaacaggtagca

SEQ ID NO: 4563733 - DNA, 25 bp, Homo sapien
tacagaatccccacgatttggagct

SEQ ID NO: 4563734 - DNA, 25 bp, Homo sapien
tatcgtgaagcctcgggtactcagg

SEQ ID NO: 4563735 - DNA, 25 bp, Homo sapien
gaacgtggcctatacagctgcacca

SEQ ID NO: 4563736 - DNA, 25 bp, Homo sapien
gagcttcacggatagtacctccagg

SEQ ID NO: 4563737 - DNA, 25 bp, Homo sapien
cagcatgaggaaacgggtctgccat

SEQ ID NO: 4563738 - DNA, 25 bp, Homo sapien
tagctctccacacgcaacaggtttc

SEQ ID NO: 4563739 - DNA, 25 bp, Homo sapien
gcaaaagattcacactgatgtacta

SEQ ID NO: 4563740 - DNA, 25 bp, Homo sapien
tactctatggcacaaaaataacagg

SEQ ID NO: 4563741 - DNA, 25 bp, Homo sapien
cagcctagcctggagacaattactc

SEQ ID NO: 4563742 - DNA, 25 bp, Homo sapien
ataacccagctcaaccgggagtgcc

SEQ ID NO: 4563743 - DNA, 25 bp, Homo sapien
atgcacataacccagctcaaccggg

SEQ ID NO: 4563744 - DNA, 25 bp, Homo sapien
cagctcaaccgggagtgcctgctgc

SEQ ID NO: 4563745 - DNA, 25 bp, Homo sapien
actgctcaccatgcacataacccag

SEQ ID NO: 4563746 - DNA, 25 bp, Homo sapien
caggaagagccttgccaggacctgc

SEQ ID NO: 4563747 - DNA, 25 bp, Homo sapien
ccagctccacgacgtgtttgaggac

SEQ ID NO: 4563748 - DNA, 25 bp, Homo sapien
tcccagctccacgacgtgtttgagg

SEQ ID NO: 4563749 - DNA, 25 bp, Homo sapien
tgctcccagctccacgacgtgtttg

SEQ ID NO: 4563750 - DNA, 25 bp, Homo sapien
gctcaagagtgccttccagagaagc

SEQ ID NO: 4563751 - DNA, 25 bp, Homo sapien
cactgaactccagaaggacaacttc

SEQ ID NO: 4563752 - DNA, 25 bp, Homo sapien
aatgatttcctcctccgggtgtgcg

SEQ ID NO: 4563753 - DNA, 25 bp, Homo sapien
ggcacgagagcctggtcaatgattt

SEQ ID NO: 4563754 - DNA, 25 bp, Homo sapien
tcattaagtgctgggtgggtccagc

SEQ ID NO: 4563755 - DNA, 25 bp, Homo sapien
gcttccagatgcagcaatcagctca

SEQ ID NO: 4563756 - DNA, 25 bp, Homo sapien
gtagtcattaagtgctgggtgggtc

SEQ ID NO: 4563757 - DNA, 25 bp, Homo sapien
actggtagtcattaagtgctgggtg

SEQ ID NO: 4563758 - DNA, 25 bp, Homo sapien
tagcaagcagccctcaaggcctggg

SEQ ID NO: 4563759 - DNA, 25 bp, Homo sapien
tccattaggcctagcaagcagccct

SEQ ID NO: 4563760 - DNA, 25 bp, Homo sapien
aggcctagcaagcagccctcaaggc

SEQ ID NO: 4563761 - DNA, 25 bp, Homo sapien
cctccattaggcctagcaagcagcc

SEQ ID NO: 4563762 - DNA, 25 bp, Homo sapien
ggtggtatgatttgcccagtctagg

SEQ ID NO: 4563763 - DNA, 25 bp, Homo sapien
caggtcagctgagccaaaccagact

SEQ ID NO: 4563764 - DNA, 25 bp, Homo sapien
aactgatgctccacgaggtggtatg

SEQ ID NO: 4563765 - DNA, 25 bp, Homo sapien
tattcctaaggagggtggcttagcc

SEQ ID NO: 4563766 - DNA, 25 bp, Homo sapien
gaaggtaacaattcctcccacttga

SEQ ID NO: 4563767 - DNA, 25 bp, Homo sapien
gacgcccagcaaggttcagacatct

SEQ ID NO: 4563768 - DNA, 25 bp, Homo sapien
gacatctgtcctgggtctgacagca

SEQ ID NO: 4563769 - DNA, 25 bp, Homo sapien
gacagcaaataagtcaccagccagt

SEQ ID NO: 4563770 - DNA, 25 bp, Homo sapien
tggcacaaaggagccgagctggcac

SEQ ID NO: 4563771 - DNA, 25 bp, Homo sapien
gaagcaggctggtcccgtttgtttc

SEQ ID NO: 4563772 - DNA, 25 bp, Homo sapien
tagtcggtccttctggactggaagc

SEQ ID NO: 4563773 - DNA, 25 bp, Homo sapien
tggctgcacccaacatatttaagtt

SEQ ID NO: 4563774 - DNA, 25 bp, Homo sapien
agactggagcaatcgccaagcaccg

SEQ ID NO: 4563775 - DNA, 25 bp, Homo sapien
ccgccgggacattcaggggcctcag

SEQ ID NO: 4563776 - DNA, 25 bp, Homo sapien
tcagcttgaagctagactggagcaa

SEQ ID NO: 4563777 - DNA, 25 bp, Homo sapien
tcaggggcctcagcttgaagctaga

SEQ ID NO: 4563778 - DNA, 25 bp, Homo sapien
cagagcgaaacaaagagtcaagggt

SEQ ID NO: 4563779 - DNA, 25 bp, Homo sapien
gtggctcctggaaccggcattccct

SEQ ID NO: 4563780 - DNA, 25 bp, Homo sapien
cacatccagagcgaaacaaagagtc

SEQ ID NO: 4563781 - DNA, 25 bp, Homo sapien
agagtcaagggttgtggctcctgga

SEQ ID NO: 4563782 - DNA, 25 bp, Homo sapien
aagaacccacgcagatgaaggtacg

SEQ ID NO: 4563783 - DNA, 25 bp, Homo sapien
tgtcatcgcagccaagtgtcttcac

SEQ ID NO: 4563784 - DNA, 25 bp, Homo sapien
agaaagccgacttggaaccctgcag

SEQ ID NO: 4563785 - DNA, 25 bp, Homo sapien
aaatgggccggccagaaagccgact

SEQ ID NO: 4563786 - DNA, 25 bp, Homo sapien
ctcggtaaatgagtccactcggtcc

SEQ ID NO: 4563787 - DNA, 25 bp, Homo sapien
gcggttgggtagctttaacaagcca

SEQ ID NO: 4563788 - DNA, 25 bp, Homo sapien
gttgggtagctttaacaagccagtg

SEQ ID NO: 4563789 - DNA, 25 bp, Homo sapien
tcctcggtaaatgagtccactcggt

SEQ ID NO: 4563790 - DNA, 25 bp, Homo sapien
gcgcgcgtcaccaaccgcacgttgg

SEQ ID NO: 4563791 - DNA, 25 bp, Homo sapien
tggcgtccgtcacgctctcgggctg

SEQ ID NO: 4563792 - DNA, 25 bp, Homo sapien
gctgcggccacgttaccgacgactg

SEQ ID NO: 4563793 - DNA, 25 bp, Homo sapien
cgcctggagaactgcgcgcgcgtca

SEQ ID NO: 4563794 - DNA, 25 bp, Homo sapien
actccgatcgccgttggaccgaaat

SEQ ID NO: 4563795 - DNA, 25 bp, Homo sapien
tcggagttcgccgacttgcgctcgg

SEQ ID NO: 4563796 - DNA, 25 bp, Homo sapien
cgttggaccgaaatcacctcggtgg

SEQ ID NO: 4563797 - DNA, 25 bp, Homo sapien
gggaggacctgaccactcggagttc

SEQ ID NO: 4563798 - DNA, 25 bp, Homo sapien
ccaggagccccggtggtgatctcgg

SEQ ID NO: 4563799 - DNA, 25 bp, Homo sapien
gccggctcccggagtgtcctgggga

SEQ ID NO: 4563800 - DNA, 25 bp, Homo sapien
gcgacccagcgagaccccgccggct

SEQ ID NO: 4563801 - DNA, 25 bp, Homo sapien
ccccggtggtgatctcggtgaagca

SEQ ID NO: 4563802 - DNA, 25 bp, Homo sapien
ccaccgagccgctcctccttgcggt

SEQ ID NO: 4563803 - DNA, 25 bp, Homo sapien
ggttttgcccgcacgcgcgtctgcc

SEQ ID NO: 4563804 - DNA, 25 bp, Homo sapien
gaaggagccaccgagccgctcctcc

SEQ ID NO: 4563805 - DNA, 25 bp, Homo sapien
tcctccttgcggttttgcccgcacg

SEQ ID NO: 4563806 - DNA, 25 bp, Homo sapien
cgcgattgtagaaaattcgctccca

SEQ ID NO: 4563807 - DNA, 25 bp, Homo sapien
gatgcgttcccgcagtgaccgcact

SEQ ID NO: 4563808 - DNA, 25 bp, Homo sapien
cagtgaccgcactcgcgattgtaga

SEQ ID NO: 4563809 - DNA, 25 bp, Homo sapien
tcgctcccaattgttgaatgcttac

SEQ ID NO: 4563810 - DNA, 25 bp, Homo sapien
ttttctcccattactctgaacactg

SEQ ID NO: 4563811 - DNA, 25 bp, Homo sapien
acactgttgaaagcaagctcaggct

SEQ ID NO: 4563812 - DNA, 25 bp, Homo sapien
gcactctggagaggcgttgttggga

SEQ ID NO: 4563813 - DNA, 25 bp, Homo sapien
gaatgtttgtctacaacagagccac

SEQ ID NO: 4563814 - DNA, 25 bp, Homo sapien
tacaatttcatgttcactgggtgga

SEQ ID NO: 4563815 - DNA, 25 bp, Homo sapien
ttatcaaaagtgaccaaaaatatgg

SEQ ID NO: 4563816 - DNA, 25 bp, Homo sapien
tctctgcataaggaaccctgaacag

SEQ ID NO: 4563817 - DNA, 25 bp, Homo sapien
cctgactgagagcacttcgtttttg

SEQ ID NO: 4563818 - DNA, 25 bp, Homo sapien
tcagtagtcagtgtcggagccctcg

SEQ ID NO: 4563819 - DNA, 25 bp, Homo sapien
tagttgtccatgtcgattgagcggc

SEQ ID NO: 4563820 - DNA, 25 bp, Homo sapien
gcgttgtccacgtttctcgagagca

SEQ ID NO: 4563821 - DNA, 25 bp, Homo sapien
tgttgatggcatagcgcaggcgctc

SEQ ID NO: 4563822 - DNA, 25 bp, Homo sapien
gtgaggtaggcagactgtcgtaagg

SEQ ID NO: 4563823 - DNA, 25 bp, Homo sapien
ctgtgaggtaggcagactgtcgtaa

SEQ ID NO: 4563824 - DNA, 25 bp, Homo sapien
tgtgaggtaggcagactgtcgtaag

SEQ ID NO: 4563825 - DNA, 25 bp, Homo sapien
tgagagaatacactacgcacagcgc

SEQ ID NO: 4563826 - DNA, 25 bp, Homo sapien
accaagagggtgcagactggaagcc

SEQ ID NO: 4563827 - DNA, 25 bp, Homo sapien
gactgggccagatagaatgagctga

SEQ ID NO: 4563828 - DNA, 25 bp, Homo sapien
gagtgtagtaagagggcacctgtcc

SEQ ID NO: 4563829 - DNA, 25 bp, Homo sapien
tctaaaagccacagaggaaccgacc

SEQ ID NO: 4563830 - DNA, 25 bp, Homo sapien
cagtgatgacacagctcaacgcaga

SEQ ID NO: 4563831 - DNA, 25 bp, Homo sapien
tcctagaacggcaggagtagcccag

SEQ ID NO: 4563832 - DNA, 25 bp, Homo sapien
tgacaaccctgagaccggagattag

SEQ ID NO: 4563833 - DNA, 25 bp, Homo sapien
agccagacacttaaactggcaggaa

SEQ ID NO: 4563834 - DNA, 25 bp, Homo sapien
gatttacaacttacagttcttggca

SEQ ID NO: 4563835 - DNA, 25 bp, Homo sapien
aacaaacatcatgggccctgctcag

SEQ ID NO: 4563836 - DNA, 25 bp, Homo sapien
cacagggaggaatagctttggctac

SEQ ID NO: 4563837 - DNA, 25 bp, Homo sapien
aagacttccacagagatctcgggca

SEQ ID NO: 4563838 - DNA, 25 bp, Homo sapien
tgttggctggtagtcgagatcttcc

SEQ ID NO: 4563839 - DNA, 25 bp, Homo sapien
gaaaagcacccgctcctcattggag

SEQ ID NO: 4563840 - DNA, 25 bp, Homo sapien
caggacatcccttctcggactgcag

SEQ ID NO: 4563841 - DNA, 25 bp, Homo sapien
catcagcactctggccaacaaaaga

SEQ ID NO: 4563842 - DNA, 25 bp, Homo sapien
ttccaccagggattataggaaccat

SEQ ID NO: 4563843 - DNA, 25 bp, Homo sapien
ctgttggaaaatgtgagtgggatac

SEQ ID NO: 4563844 - DNA, 25 bp, Homo sapien
aagtcgatattcaatggccctctcc

SEQ ID NO: 4563845 - DNA, 25 bp, Homo sapien
agtagaaacatagactggccaggat

SEQ ID NO: 4563846 - DNA, 25 bp, Homo sapien
gtagaaacatagactggccaggatt

SEQ ID NO: 4563847 - DNA, 25 bp, Homo sapien
tgagagtctgcacgtagagcagatc

SEQ ID NO: 4563848 - DNA, 25 bp, Homo sapien
gcattaagtgttcatcgaggcaggc

SEQ ID NO: 4563849 - DNA, 25 bp, Homo sapien
gcttctttgtgcgaatggcaacccc

SEQ ID NO: 4563850 - DNA, 25 bp, Homo sapien
tggaaactctcctcggtaatcccac

SEQ ID NO: 4563851 - DNA, 25 bp, Homo sapien
tacctgtactgttcaatatggcatc

SEQ ID NO: 4563852 - DNA, 25 bp, Homo sapien
ttagaaataagttagcaacaacagc

SEQ ID NO: 4563853 - DNA, 25 bp, Homo sapien
caatatggcatccattagccacata

SEQ ID NO: 4563854 - DNA, 25 bp, Homo sapien
gctatagcgttagtctatacctgta

SEQ ID NO: 4563855 - DNA, 25 bp, Homo sapien
atttctatcctgttttatttccttg

SEQ ID NO: 4563856 - DNA, 25 bp, Homo sapien
ttcttccatttatttctatcctgtt

SEQ ID NO: 4563857 - DNA, 25 bp, Homo sapien
ccatttgtttctgtcaggtttgtca

SEQ ID NO: 4563858 - DNA, 25 bp, Homo sapien
catttgtttctgtcaggtttgtcaa

SEQ ID NO: 4563859 - DNA, 25 bp, Homo sapien
gtcactaaggacttggtttatcaat

SEQ ID NO: 4563860 - DNA, 25 bp, Homo sapien
actaaggacttggtttatcaatctg

SEQ ID NO: 4563861 - DNA, 25 bp, Homo sapien
taggtcactaaggacttggtttatc

SEQ ID NO: 4563862 - DNA, 25 bp, Homo sapien
cactaaggacttggtttatcaatct

SEQ ID NO: 4563863 - DNA, 25 bp, Homo sapien
gccatgtgggccttcagaaacataa

SEQ ID NO: 4563864 - DNA, 25 bp, Homo sapien
taccaagtcttgatggaagtgcctg

SEQ ID NO: 4563865 - DNA, 25 bp, Homo sapien
gacttgctagcataataacactttt

SEQ ID NO: 4563866 - DNA, 25 bp, Homo sapien
tgaggagctgcgtaatcattctgtt

SEQ ID NO: 4563867 - DNA, 25 bp, Homo sapien
gtataagaaggtcaacaataccagt

SEQ ID NO: 4563868 - DNA, 25 bp, Homo sapien
ggtataagaaggtcaacaataccag

SEQ ID NO: 4563869 - DNA, 25 bp, Homo sapien
gggtataagaaggtcaacaatacca

SEQ ID NO: 4563870 - DNA, 25 bp, Homo sapien
tataagaaggtcaacaataccagtt

SEQ ID NO: 4563871 - DNA, 25 bp, Homo sapien
tggcagagtgatcactggaaacagc

SEQ ID NO: 4563872 - DNA, 25 bp, Homo sapien
gcatcactttatatgaggctcacaa

SEQ ID NO: 4563873 - DNA, 25 bp, Homo sapien
ctagcagactagataactcagcagg

SEQ ID NO: 4563874 - DNA, 25 bp, Homo sapien
cctgatactaggtaatgctggaaag

SEQ ID NO: 4563875 - DNA, 25 bp, Homo sapien
ggaaggcaggcggaggtctgaagca

SEQ ID NO: 4563876 - DNA, 25 bp, Homo sapien
ggcacatctctgtgatggtgtcatc

SEQ ID NO: 4563877 - DNA, 25 bp, Homo sapien
gcattcagcttaactacttgtctcg

SEQ ID NO: 4563878 - DNA, 25 bp, Homo sapien
cagcttaaccttccacgctcgggaa

SEQ ID NO: 4563879 - DNA, 25 bp, Homo sapien
ctatttggacaaaaataggcttaca

SEQ ID NO: 4563880 - DNA, 25 bp, Homo sapien
ttggacaaaaataggcttacacttc

SEQ ID NO: 4563881 - DNA, 25 bp, Homo sapien
atttggacaaaaataggcttacact

SEQ ID NO: 4563882 - DNA, 25 bp, Homo sapien
tggacaaaaataggcttacacttcc

SEQ ID NO: 4563883 - DNA, 25 bp, Homo sapien
agttgtccctgtacaatgccccaag

SEQ ID NO: 4563884 - DNA, 25 bp, Homo sapien
ggtttttcctatggagcgcaccatt

SEQ ID NO: 4563885 - DNA, 25 bp, Homo sapien
cgcaccattggcagagtgtagactc

SEQ ID NO: 4563886 - DNA, 25 bp, Homo sapien
gccccaagttccagcattataatgg

SEQ ID NO: 4563887 - DNA, 25 bp, Homo sapien
caagccagtctgtgcctggctgctt

SEQ ID NO: 4563888 - DNA, 25 bp, Homo sapien
aagccagtctgtgcctggctgctta

SEQ ID NO: 4563889 - DNA, 25 bp, Homo sapien
agccagtctgtgcctggctgcttac

SEQ ID NO: 4563890 - DNA, 25 bp, Homo sapien
ctggttgttggggctaaggttcagc

SEQ ID NO: 4563891 - DNA, 25 bp, Homo sapien
aggtcagagaagtggtagagcagcc

SEQ ID NO: 4563892 - DNA, 25 bp, Homo sapien
tggcccgcaccgtgtgaatgctgac

SEQ ID NO: 4563893 - DNA, 25 bp, Homo sapien
tgacttctctcagcgccccatactg

SEQ ID NO: 4563894 - DNA, 25 bp, Homo sapien
tagagcagccggagcctggcccgca

SEQ ID NO: 4563895 - DNA, 25 bp, Homo sapien
ttaccagggttggttctcgaacatg

SEQ ID NO: 4563896 - DNA, 25 bp, Homo sapien
tttcccttgcagacctgttaccagg

SEQ ID NO: 4563897 - DNA, 25 bp, Homo sapien
gccagccgagatctgccgaacattt

SEQ ID NO: 4563898 - DNA, 25 bp, Homo sapien
acatggttggtatggcctaagccga

SEQ ID NO: 4563899 - DNA, 25 bp, Homo sapien
acagggatttgttgcggtcgattgt

SEQ ID NO: 4563900 - DNA, 25 bp, Homo sapien
caaagcaagtgtgtgttcagctcca

SEQ ID NO: 4563901 - DNA, 25 bp, Homo sapien
tcgattgtgattgcgagcacgcccc

SEQ ID NO: 4563902 - DNA, 25 bp, Homo sapien
ttctgaattgctcccccaggcatac

SEQ ID NO: 4563903 - DNA, 25 bp, Homo sapien
tatttagggcaaatgggtccattca

SEQ ID NO: 4563904 - DNA, 25 bp, Homo sapien
tcagaggcatcgatgttctcccaca

SEQ ID NO: 4563905 - DNA, 25 bp, Homo sapien
tcctactgtgaatgcctgggttacg

SEQ ID NO: 4563906 - DNA, 25 bp, Homo sapien
tatgcagctaatgtcctaaacctac

SEQ ID NO: 4563907 - DNA, 25 bp, Homo sapien
tgcagccccagtccctagaagggat

SEQ ID NO: 4563908 - DNA, 25 bp, Homo sapien
tatttgtggcagcatgtcaagggca

SEQ ID NO: 4563909 - DNA, 25 bp, Homo sapien
gatttgaacccagagtgcctatgaa

SEQ ID NO: 4563910 - DNA, 25 bp, Homo sapien
ttctagcaagagtgctggctctggc

SEQ ID NO: 4563911 - DNA, 25 bp, Homo sapien
cacatgaccatctttggtcaaagca

SEQ ID NO: 4563912 - DNA, 25 bp, Homo sapien
attccaattccacaaaggacgtcaa

SEQ ID NO: 4563913 - DNA, 25 bp, Homo sapien
cagaaaactgagttccacaagcaac

SEQ ID NO: 4563914 - DNA, 25 bp, Homo sapien
ctgagttccacaagcaacctttttt

SEQ ID NO: 4563915 - DNA, 25 bp, Homo sapien
gggcagaggcagtttgactaaagtc

SEQ ID NO: 4563916 - DNA, 25 bp, Homo sapien
gaggcagtttgactaaagtccccag

SEQ ID NO: 4563917 - DNA, 25 bp, Homo sapien
gcagtttgactaaagtccccagggc

SEQ ID NO: 4563918 - DNA, 25 bp, Homo sapien
cagaggcagtttgactaaagtcccc

SEQ ID NO: 4563919 - DNA, 25 bp, Homo sapien
actgccaaagtgtggtttaatccac

SEQ ID NO: 4563920 - DNA, 25 bp, Homo sapien
cactgccaaagtgtggtttaatcca

SEQ ID NO: 4563921 - DNA, 25 bp, Homo sapien
gcctagttttccatagtctccatct

SEQ ID NO: 4563922 - DNA, 25 bp, Homo sapien
tccaatctgatatccctccagtgca

SEQ ID NO: 4563923 - DNA, 25 bp, Homo sapien
ttgttagaggtatttccaagaccca

SEQ ID NO: 4563924 - DNA, 25 bp, Homo sapien
cccaaaggtgaacagtttgccatct

SEQ ID NO: 4563925 - DNA, 25 bp, Homo sapien
cgaccatagtcaccattcccaaagg

SEQ ID NO: 4563926 - DNA, 25 bp, Homo sapien
cagtttgccatctgaagtgaccact

SEQ ID NO: 4563927 - DNA, 25 bp, Homo sapien
taccacacctggctatttatttcta

SEQ ID NO: 4563928 - DNA, 25 bp, Homo sapien
tgtgctaccacacctggctatttat

SEQ ID NO: 4563929 - DNA, 25 bp, Homo sapien
gctaccacacctggctatttatttc

SEQ ID NO: 4563930 - DNA, 25 bp, Homo sapien
gtgctaccacacctggctatttatt

SEQ ID NO: 4563931 - DNA, 25 bp, Homo sapien
aaccaatactaacaagaccaatact

SEQ ID NO: 4563932 - DNA, 25 bp, Homo sapien
caaaaccaatggatctcttataatt

SEQ ID NO: 4563933 - DNA, 25 bp, Homo sapien
gaccaatactaacaccaaagcctat

SEQ ID NO: 4563934 - DNA, 25 bp, Homo sapien
taagaaacctattcaacaactagta

SEQ ID NO: 4563935 - DNA, 25 bp, Homo sapien
accactttcagttagggccatagag

SEQ ID NO: 4563936 - DNA, 25 bp, Homo sapien
tgtaaggcctcgatctgcctgggcc

SEQ ID NO: 4563937 - DNA, 25 bp, Homo sapien
ggccaagtttaccatagtcaccatc

SEQ ID NO: 4563938 - DNA, 25 bp, Homo sapien
catagagtgcccatcagaaccacag

SEQ ID NO: 4563939 - DNA, 25 bp, Homo sapien
tgaataccctcaatcaaaaaccacc

SEQ ID NO: 4563940 - DNA, 25 bp, Homo sapien
caccgaattggtactatgaaaataa

SEQ ID NO: 4563941 - DNA, 25 bp, Homo sapien
tcctctttacttgcagctgctactg

SEQ ID NO: 4563942 - DNA, 25 bp, Homo sapien
gagtcactggatgttaaaactctcc

SEQ ID NO: 4563943 - DNA, 25 bp, Homo sapien
tgacaaggaaaacgaggatgacagc

SEQ ID NO: 4563944 - DNA, 25 bp, Homo sapien
gcaaaactgcgaatagtcacctaaa

SEQ ID NO: 4563945 - DNA, 25 bp, Homo sapien
gagccacagtaaccggcctaatttc

SEQ ID NO: 4563946 - DNA, 25 bp, Homo sapien
tgtagccataacctagcaaaactgc

SEQ ID NO: 4563947 - DNA, 25 bp, Homo sapien
cttgtcctaatctgccataacttcc

SEQ ID NO: 4563948 - DNA, 25 bp, Homo sapien
ctgtcagcacatgaaggtcatctga

SEQ ID NO: 4563949 - DNA, 25 bp, Homo sapien
tttccttgtcctaatctgccataac

SEQ ID NO: 4563950 - DNA, 25 bp, Homo sapien
catgaaggtcatctgaatttccttg

SEQ ID NO: 4563951 - DNA, 25 bp, Homo sapien
atgcctaccagcaccccataagtag

SEQ ID NO: 4563952 - DNA, 25 bp, Homo sapien
gctgctgcaggtaccattacatttc

SEQ ID NO: 4563953 - DNA, 25 bp, Homo sapien
cagcaccccataagtagacatcaca

SEQ ID NO: 4563954 - DNA, 25 bp, Homo sapien
gagctgctgcaggtaccattacatt

SEQ ID NO: 4563955 - DNA, 25 bp, Homo sapien
gagaaccatcatacagttatcttca

SEQ ID NO: 4563956 - DNA, 25 bp, Homo sapien
tttagaatcaaaacattgactgaga

SEQ ID NO: 4563957 - DNA, 25 bp, Homo sapien
tccatgccgttaatccatttactgt

SEQ ID NO: 4563958 - DNA, 25 bp, Homo sapien
catgccgttaatccatttactgtta

SEQ ID NO: 4563959 - DNA, 25 bp, Homo sapien
tgccgttaatccatttactgttatc

SEQ ID NO: 4563960 - DNA, 25 bp, Homo sapien
catccatgccgttaatccatttact

SEQ ID NO: 4563961 - DNA, 25 bp, Homo sapien
cagctgatccagatgaagtcccaca

SEQ ID NO: 4563962 - DNA, 25 bp, Homo sapien
cacagcaagggaagccaagcattgc

SEQ ID NO: 4563963 - DNA, 25 bp, Homo sapien
tggagggttacacaacagctgatcc

SEQ ID NO: 4563964 - DNA, 25 bp, Homo sapien
gctccattggtcagggcttcggcag

SEQ ID NO: 4563965 - DNA, 25 bp, Homo sapien
tatgaacaagttggtcaccacaaac

SEQ ID NO: 4563966 - DNA, 25 bp, Homo sapien
gggagccatgttcaatcccagaaca

SEQ ID NO: 4563967 - DNA, 25 bp, Homo sapien
tcataggcatactgctcctgaagca

SEQ ID NO: 4563968 - DNA, 25 bp, Homo sapien
tccaaaaatgctctcatgcagggag

SEQ ID NO: 4563969 - DNA, 25 bp, Homo sapien
tgtcctacaggttgccaaaacatga

SEQ ID NO: 4563970 - DNA, 25 bp, Homo sapien
ggaatccatactgtggtctgaatag

SEQ ID NO: 4563971 - DNA, 25 bp, Homo sapien
catactgtggtctgaatagctccag

SEQ ID NO: 4563972 - DNA, 25 bp, Homo sapien
agctccagagcctatcacaacagtt

SEQ ID NO: 4563973 - DNA, 25 bp, Homo sapien
cagagcctatcacaacagtttgcaa

SEQ ID NO: 4563974 - DNA, 25 bp, Homo sapien
acttggctcctgatgatttcctata

SEQ ID NO: 4563975 - DNA, 25 bp, Homo sapien
cagggccaacccatcagaactaaag

SEQ ID NO: 4563976 - DNA, 25 bp, Homo sapien
gaactaaaggcaacagtccgaacag

SEQ ID NO: 4563977 - DNA, 25 bp, Homo sapien
gatgtgtccccgcagctgataaaca

SEQ ID NO: 4563978 - DNA, 25 bp, Homo sapien
gaaattcattatttttaacatgcat

SEQ ID NO: 4563979 - DNA, 25 bp, Homo sapien
ctgaaattcattatttttaacatgc

SEQ ID NO: 4563980 - DNA, 25 bp, Homo sapien
tgaaattcattatttttaacatgca

SEQ ID NO: 4563981 - DNA, 25 bp, Homo sapien
ccaatggatcttgccctttgggata

SEQ ID NO: 4563982 - DNA, 25 bp, Homo sapien
tgaatttatgttactcgcctagagg

SEQ ID NO: 4563983 - DNA, 25 bp, Homo sapien
tgtactaacaacttatgactcgtct

SEQ ID NO: 4563984 - DNA, 25 bp, Homo sapien
tttccatagtttcagacagtcttca

SEQ ID NO: 4563985 - DNA, 25 bp, Homo sapien
tagtatcttgaggaatgcgccaaac

SEQ ID NO: 4563986 - DNA, 25 bp, Homo sapien
ggaatgcgccaaacacatactaagc

SEQ ID NO: 4563987 - DNA, 25 bp, Homo sapien
tagtcacattggtctgtgtagtatc

SEQ ID NO: 4563988 - DNA, 25 bp, Homo sapien
acatactaagccactctgacagcca

SEQ ID NO: 4563989 - DNA, 25 bp, Homo sapien
aatagagccccagagtttcacactg

SEQ ID NO: 4563990 - DNA, 25 bp, Homo sapien
taagaatatgacctgtagggtccca

SEQ ID NO: 4563991 - DNA, 25 bp, Homo sapien
tggcagagtgaatgtagacagcacc

SEQ ID NO: 4563992 - DNA, 25 bp, Homo sapien
acagcaccagcatcccgaaatagag

SEQ ID NO: 4563993 - DNA, 25 bp, Homo sapien
aatatcccactgcaaatggtctgtc

SEQ ID NO: 4563994 - DNA, 25 bp, Homo sapien
tgttcccagtaacagttttccatca

SEQ ID NO: 4563995 - DNA, 25 bp, Homo sapien
gaaccatgcaatgcaagtaacagac

SEQ ID NO: 4563996 - DNA, 25 bp, Homo sapien
tatgtgcatcaattagaacaatgcc

SEQ ID NO: 4563997 - DNA, 25 bp, Homo sapien
aacttcaatcagtcccagagatcca

SEQ ID NO: 4563998 - DNA, 25 bp, Homo sapien
tagcaatgctccaattctcgacggt

SEQ ID NO: 4563999 - DNA, 25 bp, Homo sapien
tctcgacggtgcatggtggacacat

SEQ ID NO: 4564000 - DNA, 25 bp, Homo sapien
gggcagatacccaatgaggctgaat

SEQ ID NO: 4564001 - DNA, 25 bp, Homo sapien
aaacttggatcactgggtgatccca

SEQ ID NO: 4564002 - DNA, 25 bp, Homo sapien
gcctgctagatatttgccactgata

SEQ ID NO: 4564003 - DNA, 25 bp, Homo sapien
catcttttccaaagcgcctgctaga

SEQ ID NO: 4564004 - DNA, 25 bp, Homo sapien
cattaacttgccagatattcaccat

SEQ ID NO: 4564005 - DNA, 25 bp, Homo sapien
cagtgaatattgcttcttggtaaca

SEQ ID NO: 4564006 - DNA, 25 bp, Homo sapien
tggtgccatcattgccacttgtagc

SEQ ID NO: 4564007 - DNA, 25 bp, Homo sapien
cttggtaacattccatacgcggatg

SEQ ID NO: 4564008 - DNA, 25 bp, Homo sapien
acaggtctgttgcagtgaatattgc

SEQ ID NO: 4564009 - DNA, 25 bp, Homo sapien
caagagtgcgcacgagttgctgagc

SEQ ID NO: 4564010 - DNA, 25 bp, Homo sapien
gatgagcctccaatttgataaagga

SEQ ID NO: 4564011 - DNA, 25 bp, Homo sapien
tgtcacggtcgtgtgcagcaagagt

SEQ ID NO: 4564012 - DNA, 25 bp, Homo sapien
cccattgccgatgctgtgaggacag

SEQ ID NO: 4564013 - DNA, 25 bp, Homo sapien
aaggatgggcatacaattgggcaat

SEQ ID NO: 4564014 - DNA, 25 bp, Homo sapien
cataggaaggatgggcatacaattg

SEQ ID NO: 4564015 - DNA, 25 bp, Homo sapien
gaaggatgggcatacaattgggcaa

SEQ ID NO: 4564016 - DNA, 25 bp, Homo sapien
gatgggcatacaattgggcaattaa

SEQ ID NO: 4564017 - DNA, 25 bp, Homo sapien
tcatagttaggtcttagtttggccc

SEQ ID NO: 4564018 - DNA, 25 bp, Homo sapien
gcaattcctcggagaaagctgggta

SEQ ID NO: 4564019 - DNA, 25 bp, Homo sapien
tgctagcaatgccacaagggcctgt

SEQ ID NO: 4564020 - DNA, 25 bp, Homo sapien
catcaactgtggttagatttacacc

SEQ ID NO: 4564021 - DNA, 25 bp, Homo sapien
gccaagcacattaatcgaactagcg

SEQ ID NO: 4564022 - DNA, 25 bp, Homo sapien
cgtgatcgttctgaggtgctagcca

SEQ ID NO: 4564023 - DNA, 25 bp, Homo sapien
gcagcactaggagcatttgatgcca

SEQ ID NO: 4564024 - DNA, 25 bp, Homo sapien
tagcgttcggatatctgttagcccc

SEQ ID NO: 4564025 - DNA, 25 bp, Homo sapien
tcctaacgttattctcccagaggag

SEQ ID NO: 4564026 - DNA, 25 bp, Homo sapien
gcagcagtcactctccttaaagcca

SEQ ID NO: 4564027 - DNA, 25 bp, Homo sapien
gaagagacagcgctctcatgaccat

SEQ ID NO: 4564028 - DNA, 25 bp, Homo sapien
ttaaagccaccacacggtcatgagg

SEQ ID NO: 4564029 - DNA, 25 bp, Homo sapien
cattgctactgatgctcccagtgga

SEQ ID NO: 4564030 - DNA, 25 bp, Homo sapien
tgcgccggtcatttaaaccaagcgg

SEQ ID NO: 4564031 - DNA, 25 bp, Homo sapien
gaactggttctggtacaatgcgccg

SEQ ID NO: 4564032 - DNA, 25 bp, Homo sapien
ccaagcggtccagcaagtaattcaa

SEQ ID NO: 4564033 - DNA, 25 bp, Homo sapien
ttgccaattagatctggagcttgtc

SEQ ID NO: 4564034 - DNA, 25 bp, Homo sapien
tcttgcttgccaattagatctggag

SEQ ID NO: 4564035 - DNA, 25 bp, Homo sapien
gcttgccaattagatctggagcttg

SEQ ID NO: 4564036 - DNA, 25 bp, Homo sapien
cttgcttgccaattagatctggagc

SEQ ID NO: 4564037 - DNA, 25 bp, Homo sapien
gctgattgaagctgacgacgctgca

SEQ ID NO: 4564038 - DNA, 25 bp, Homo sapien
tagccctggcggtttgcactgcgcc

SEQ ID NO: 4564039 - DNA, 25 bp, Homo sapien
taacaggtagtacggatttccactc

SEQ ID NO: 4564040 - DNA, 25 bp, Homo sapien
cataggaaccattgctgcgatagcc

SEQ ID NO: 4564041 - DNA, 25 bp, Homo sapien
ttcctgtgggcctgcacagagcggt

SEQ ID NO: 4564042 - DNA, 25 bp, Homo sapien
tcactggtcaggtcttgtccaaaca

SEQ ID NO: 4564043 - DNA, 25 bp, Homo sapien
attaaagtcatacaacgcccctggg

SEQ ID NO: 4564044 - DNA, 25 bp, Homo sapien
tgtccaaacatagcttccatcgcct

SEQ ID NO: 4564045 - DNA, 25 bp, Homo sapien
ctgatgctaaacattaaacatgcat

SEQ ID NO: 4564046 - DNA, 25 bp, Homo sapien
gctaaacattaaacatgcatcatca

SEQ ID NO: 4564047 - DNA, 25 bp, Homo sapien
cattaaacatgcatcatcacttctt

SEQ ID NO: 4564048 - DNA, 25 bp, Homo sapien
aacattaaacatgcatcatcacttc

SEQ ID NO: 4564049 - DNA, 25 bp, Homo sapien
agcagtgtgcgagcagctaagtcaa

SEQ ID NO: 4564050 - DNA, 25 bp, Homo sapien
gtgtcttcttgttaccgctgagcga

SEQ ID NO: 4564051 - DNA, 25 bp, Homo sapien
gctaagtcaaacttgtgtcttcttg

SEQ ID NO: 4564052 - DNA, 25 bp, Homo sapien
gagcgacctctagctgatggtccac

SEQ ID NO: 4564053 - DNA, 25 bp, Homo sapien
ctgctccaggcctagagtctgctgt

SEQ ID NO: 4564054 - DNA, 25 bp, Homo sapien
ggtgactgcaaataacagggatcat

SEQ ID NO: 4564055 - DNA, 25 bp, Homo sapien
gcatcagctgatggtatgtctccag

SEQ ID NO: 4564056 - DNA, 25 bp, Homo sapien
ggtgctctatcatccacatggcaag

SEQ ID NO: 4564057 - DNA, 25 bp, Homo sapien
gtctttaataagctaggacttctca

SEQ ID NO: 4564058 - DNA, 25 bp, Homo sapien
gaattaggtctttatgttataagag

SEQ ID NO: 4564059 - DNA, 25 bp, Homo sapien
ccaagtttcatagcctcttaaaagt

SEQ ID NO: 4564060 - DNA, 25 bp, Homo sapien
atatagtgttaaaaatcttaccaag

SEQ ID NO: 4564061 - DNA, 25 bp, Homo sapien
aatctgccgaagagagaaccccatt

SEQ ID NO: 4564062 - DNA, 25 bp, Homo sapien
gccgaagagagaaccccatttccag

SEQ ID NO: 4564063 - DNA, 25 bp, Homo sapien
ggcaatctgccgaagagagaacccc

SEQ ID NO: 4564064 - DNA, 25 bp, Homo sapien
tctgccgaagagagaaccccatttc

SEQ ID NO: 4564065 - DNA, 25 bp, Homo sapien
agtctactgcttgggtctgacaagg

SEQ ID NO: 4564066 - DNA, 25 bp, Homo sapien
tgaaagtctactgcttgggtctgac

SEQ ID NO: 4564067 - DNA, 25 bp, Homo sapien
aagttgaaagtctactgcttgggtc

SEQ ID NO: 4564068 - DNA, 25 bp, Homo sapien
aaagtctactgcttgggtctgacaa

SEQ ID NO: 4564069 - DNA, 25 bp, Homo sapien
tcctctactcagaatatgtggctgg

SEQ ID NO: 4564070 - DNA, 25 bp, Homo sapien
cctagtattgtccaagtttaatgaa

SEQ ID NO: 4564071 - DNA, 25 bp, Homo sapien
gataccgtgagtaaaaagtgtcttc

SEQ ID NO: 4564072 - DNA, 25 bp, Homo sapien
gaaataagaacctaaatatcactag

SEQ ID NO: 4564073 - DNA, 25 bp, Homo sapien
cgaagatattggaggagtctgtgcc

SEQ ID NO: 4564074 - DNA, 25 bp, Homo sapien
cctacttcatcagaaggagaggttg

SEQ ID NO: 4564075 - DNA, 25 bp, Homo sapien
agaggttggtaacgaagatattgga

SEQ ID NO: 4564076 - DNA, 25 bp, Homo sapien
ctgtgcggttagctggccttgctga

SEQ ID NO: 4564077 - DNA, 25 bp, Homo sapien
cacagtgaaaatcgtaatgccttct

SEQ ID NO: 4564078 - DNA, 25 bp, Homo sapien
aaagggaggctaaccattctgcttc

SEQ ID NO: 4564079 - DNA, 25 bp, Homo sapien
gtggccttgggcacaccaaaaattg

SEQ ID NO: 4564080 - DNA, 25 bp, Homo sapien
tttaagatgtcagtctacacagtga

SEQ ID NO: 4564081 - DNA, 25 bp, Homo sapien
cttgaggctgatgggctagtagtaa

SEQ ID NO: 4564082 - DNA, 25 bp, Homo sapien
cataaaggaggtcgtgcttgaggct

SEQ ID NO: 4564083 - DNA, 25 bp, Homo sapien
tagtaactggtgtctgtgcctgctg

SEQ ID NO: 4564084 - DNA, 25 bp, Homo sapien
gactaagaggcatcactcccgggga

SEQ ID NO: 4564085 - DNA, 25 bp, Homo sapien
tgaaaataatctcaacagcacaaaa

SEQ ID NO: 4564086 - DNA, 25 bp, Homo sapien
gaaaataatctcaacagcacaaaag

SEQ ID NO: 4564087 - DNA, 25 bp, Homo sapien
tatgggtgaccgcatgactgctcgc

SEQ ID NO: 4564088 - DNA, 25 bp, Homo sapien
catatttactacagccaagaagggc

SEQ ID NO: 4564089 - DNA, 25 bp, Homo sapien
caaacggcaatggttcacagggttc

SEQ ID NO: 4564090 - DNA, 25 bp, Homo sapien
tgtgtcgcatcaagaactgcagggc

SEQ ID NO: 4564091 - DNA, 25 bp, Homo sapien
caaatgagtctacttatcaaggaag

SEQ ID NO: 4564092 - DNA, 25 bp, Homo sapien
gatattgttctatgtcataccaaca

SEQ ID NO: 4564093 - DNA, 25 bp, Homo sapien
taactttacaggaatcacaatgggc

SEQ ID NO: 4564094 - DNA, 25 bp, Homo sapien
caaggaagatacttgacaggatgag

SEQ ID NO: 4564095 - DNA, 25 bp, Homo sapien
cagtccgtcaaacgttcatatccaa

SEQ ID NO: 4564096 - DNA, 25 bp, Homo sapien
taatgcaaagcctaatttcagtccg

SEQ ID NO: 4564097 - DNA, 25 bp, Homo sapien
tcatatccaatattcagagccttgc

SEQ ID NO: 4564098 - DNA, 25 bp, Homo sapien
tactatgccagtgtgtaacagaaat

SEQ ID NO: 4564099 - DNA, 25 bp, Homo sapien
caacggtctgttcggtgaaggatac

SEQ ID NO: 4564100 - DNA, 25 bp, Homo sapien
gctactggactacaaatagggtctc

SEQ ID NO: 4564101 - DNA, 25 bp, Homo sapien
gatacggatgagctgaatagtggcc

SEQ ID NO: 4564102 - DNA, 25 bp, Homo sapien
tatgcaaagagtcctcagctgcagc

SEQ ID NO: 4564103 - DNA, 25 bp, Homo sapien
tcggggtgtgccacgcatctgcata

SEQ ID NO: 4564104 - DNA, 25 bp, Homo sapien
cacgcatctgcatatcacaaatttt

SEQ ID NO: 4564105 - DNA, 25 bp, Homo sapien
gcatctgcatatcacaaattttcac

SEQ ID NO: 4564106 - DNA, 25 bp, Homo sapien
tgtgccacgcatctgcatatcacaa

SEQ ID NO: 4564107 - DNA, 25 bp, Homo sapien
tcaaggctccagaatgatgagtcct

SEQ ID NO: 4564108 - DNA, 25 bp, Homo sapien
catgttgaactagtatttgggtctc

SEQ ID NO: 4564109 - DNA, 25 bp, Homo sapien
ctgaagttagtagtggtatggtcca

SEQ ID NO: 4564110 - DNA, 25 bp, Homo sapien
gagaccaagccgtatatgactgact

SEQ ID NO: 4564111 - DNA, 25 bp, Homo sapien
gattgctactatagaacatcacaca

SEQ ID NO: 4564112 - DNA, 25 bp, Homo sapien
catcacacatgggtacaactctgct

SEQ ID NO: 4564113 - DNA, 25 bp, Homo sapien
ttttcccctggattgctactataga

SEQ ID NO: 4564114 - DNA, 25 bp, Homo sapien
cacacatgggtacaactctgctgca

SEQ ID NO: 4564115 - DNA, 25 bp, Homo sapien
tgatagaggttaccactgtaggccc

SEQ ID NO: 4564116 - DNA, 25 bp, Homo sapien
ccacatatccgaggtagtgcggtga

SEQ ID NO: 4564117 - DNA, 25 bp, Homo sapien
gattaaagtcatgtactggccagcg

SEQ ID NO: 4564118 - DNA, 25 bp, Homo sapien
tctccttgagtaaagctggacaatg

SEQ ID NO: 4564119 - DNA, 25 bp, Homo sapien
gggttctctagaaacatcacacaca

SEQ ID NO: 4564120 - DNA, 25 bp, Homo sapien
gcaacactggcctttggctaggacc

SEQ ID NO: 4564121 - DNA, 25 bp, Homo sapien
ttgaaggtgtctacgtgaccagccc

SEQ ID NO: 4564122 - DNA, 25 bp, Homo sapien
gataaaggtggctcactgacctaga

SEQ ID NO: 4564123 - DNA, 25 bp, Homo sapien
tagaacaaccctgatgcattagaat

SEQ ID NO: 4564124 - DNA, 25 bp, Homo sapien
gataaaactctggtacctaggtggc

SEQ ID NO: 4564125 - DNA, 25 bp, Homo sapien
gaaggtggactgctatctgttgtga

SEQ ID NO: 4564126 - DNA, 25 bp, Homo sapien
taaatccaatcacaagagagttggt

SEQ ID NO: 4564127 - DNA, 25 bp, Homo sapien
actgagctttctccgggtcaaagga

SEQ ID NO: 4564128 - DNA, 25 bp, Homo sapien
ttccactgatagcacccagaagtta

SEQ ID NO: 4564129 - DNA, 25 bp, Homo sapien
ccagaagttactcctgtagatgcca

SEQ ID NO: 4564130 - DNA, 25 bp, Homo sapien
cactgccgtgagttaaaatctgtcc

SEQ ID NO: 4564131 - DNA, 25 bp, Homo sapien
gataaatagagcatggtcccttccc

SEQ ID NO: 4564132 - DNA, 25 bp, Homo sapien
gaatcagttactgtgcagggcaaca

SEQ ID NO: 4564133 - DNA, 25 bp, Homo sapien
ttagggagacctacacagaatgatg

SEQ ID NO: 4564134 - DNA, 25 bp, Homo sapien
gtctaaccatgcttgagaaggacaa

SEQ ID NO: 4564135 - DNA, 25 bp, Homo sapien
ggcctgagcaatgggtgtctcccac

SEQ ID NO: 4564136 - DNA, 25 bp, Homo sapien
aatagcatgtttggcctgagcaatg

SEQ ID NO: 4564137 - DNA, 25 bp, Homo sapien
gcctgagcaatgggtgtctcccaca

SEQ ID NO: 4564138 - DNA, 25 bp, Homo sapien
gaatagcatgtttggcctgagcaat

SEQ ID NO: 4564139 - DNA, 25 bp, Homo sapien
agagagaagggaaaataagcgctca

SEQ ID NO: 4564140 - DNA, 25 bp, Homo sapien
gagaagggaaaataagcgctcaaca

SEQ ID NO: 4564141 - DNA, 25 bp, Homo sapien
gaagggaaaataagcgctcaacaat

SEQ ID NO: 4564142 - DNA, 25 bp, Homo sapien
gagagaagggaaaataagcgctcaa

SEQ ID NO: 4564143 - DNA, 25 bp, Homo sapien
agcagtcctaaaagtaaacgttatg

SEQ ID NO: 4564144 - DNA, 25 bp, Homo sapien
cgttatgctattgaataaaagacac

SEQ ID NO: 4564145 - DNA, 25 bp, Homo sapien
ctaaaagtaaacgttatgctattga

SEQ ID NO: 4564146 - DNA, 25 bp, Homo sapien
taaacgttatgctattgaataaaag

SEQ ID NO: 4564147 - DNA, 25 bp, Homo sapien
tcttaagttaccaaccagagggata

SEQ ID NO: 4564148 - DNA, 25 bp, Homo sapien
cttgttcttaagttaccaaccagag

SEQ ID NO: 4564149 - DNA, 25 bp, Homo sapien
ttcaaggacatgaagtgcaaggagc

SEQ ID NO: 4564150 - DNA, 25 bp, Homo sapien
aggacatgaagtgcaaggagccttg

SEQ ID NO: 4564151 - DNA, 25 bp, Homo sapien
ttagaagcacttcggtccactttgg

SEQ ID NO: 4564152 - DNA, 25 bp, Homo sapien
ggctgcatgttgtttcctaagagca

SEQ ID NO: 4564153 - DNA, 25 bp, Homo sapien
gaagatacaactctgcgaagaaaaa

SEQ ID NO: 4564154 - DNA, 25 bp, Homo sapien
aaaatcccctagatggagttcggct

SEQ ID NO: 4564155 - DNA, 25 bp, Homo sapien
ccgaaagaggccatatgtagtacac

SEQ ID NO: 4564156 - DNA, 25 bp, Homo sapien
tccccttctccgaaagaggccatat

SEQ ID NO: 4564157 - DNA, 25 bp, Homo sapien
ttcttcaccgtcttcttgctcccct

SEQ ID NO: 4564158 - DNA, 25 bp, Homo sapien
ttctccgaaagaggccatatgtagt

SEQ ID NO: 4564159 - DNA, 25 bp, Homo sapien
ttgggacaataaattcttcaactga

SEQ ID NO: 4564160 - DNA, 25 bp, Homo sapien
cagtttgggacaataaattcttcaa

SEQ ID NO: 4564161 - DNA, 25 bp, Homo sapien
tgggacaataaattcttcaactgac

SEQ ID NO: 4564162 - DNA, 25 bp, Homo sapien
tttgggacaataaattcttcaactg

SEQ ID NO: 4564163 - DNA, 25 bp, Homo sapien
tacagagtagatccaacaaggattg

SEQ ID NO: 4564164 - DNA, 25 bp, Homo sapien
acagagtagatccaacaaggattga

SEQ ID NO: 4564165 - DNA, 25 bp, Homo sapien
cagagtagatccaacaaggattgaa

SEQ ID NO: 4564166 - DNA, 25 bp, Homo sapien
agagtagatccaacaaggattgaac

SEQ ID NO: 4564167 - DNA, 25 bp, Homo sapien
tttgggactcagtttatcagcatag

SEQ ID NO: 4564168 - DNA, 25 bp, Homo sapien
gggactcagtttatcagcataggtc

SEQ ID NO: 4564169 - DNA, 25 bp, Homo sapien
ttgggactcagtttatcagcatagg

SEQ ID NO: 4564170 - DNA, 25 bp, Homo sapien
tgggactcagtttatcagcataggt

SEQ ID NO: 4564171 - DNA, 25 bp, Homo sapien
gctgtgctaagctgggaaacacccg

SEQ ID NO: 4564172 - DNA, 25 bp, Homo sapien
tgtgacaatacgtttagcagaccag

SEQ ID NO: 4564173 - DNA, 25 bp, Homo sapien
ggtgtctgtaccacacaactgtgac

SEQ ID NO: 4564174 - DNA, 25 bp, Homo sapien
gaatctggagcaaccttgtactggc

SEQ ID NO: 4564175 - DNA, 25 bp, Homo sapien
ctttccagggtagcagacaactgtt

SEQ ID NO: 4564176 - DNA, 25 bp, Homo sapien
gcacagctacctggatttcaatctg

SEQ ID NO: 4564177 - DNA, 25 bp, Homo sapien
tttcaatctgaatatttctcttagc

SEQ ID NO: 4564178 - DNA, 25 bp, Homo sapien
aactgttgataaattttatgcacag

SEQ ID NO: 4564179 - DNA, 25 bp, Homo sapien
aacgtaagctcttgaaacccatcct

SEQ ID NO: 4564180 - DNA, 25 bp, Homo sapien
cacaaactaggtaaacgatcaaatc

SEQ ID NO: 4564181 - DNA, 25 bp, Homo sapien
ggattaataaaaccgagccagcaaa

SEQ ID NO: 4564182 - DNA, 25 bp, Homo sapien
cgcccggccgagtctgtataatcta

SEQ ID NO: 4564183 - DNA, 25 bp, Homo sapien
tagaacgaggatctgatgaagtgcc

SEQ ID NO: 4564184 - DNA, 25 bp, Homo sapien
ttccatcccagacaatagaacgagg

SEQ ID NO: 4564185 - DNA, 25 bp, Homo sapien
tcctgccagtgagatgctacctttt

SEQ ID NO: 4564186 - DNA, 25 bp, Homo sapien
tgtgtgtccaacagtgcctaaacca

SEQ ID NO: 4564187 - DNA, 25 bp, Homo sapien
aactataaggtagtactgctactgc

SEQ ID NO: 4564188 - DNA, 25 bp, Homo sapien
cacacagctattgtgaagctcacaa

SEQ ID NO: 4564189 - DNA, 25 bp, Homo sapien
taggagacatggtttcaaggacaga

SEQ ID NO: 4564190 - DNA, 25 bp, Homo sapien
tctgcccctatcttccctaggaaga

SEQ ID NO: 4564191 - DNA, 25 bp, Homo sapien
ggagttgcataaccagtctctgcta

SEQ ID NO: 4564192 - DNA, 25 bp, Homo sapien
cagggattccaattgactgtgcata

SEQ ID NO: 4564193 - DNA, 25 bp, Homo sapien
tatgtttcaggcgagcccaagagtc

SEQ ID NO: 4564194 - DNA, 25 bp, Homo sapien
gacttgtagacatactttcctctgg

SEQ ID NO: 4564195 - DNA, 25 bp, Homo sapien
gtcagaatcagaatactcaacagtt

SEQ ID NO: 4564196 - DNA, 25 bp, Homo sapien
gtttgtccttcatggctcaagtcag

SEQ ID NO: 4564197 - DNA, 25 bp, Homo sapien
gcaggttcaactgcccaactgaaga

SEQ ID NO: 4564198 - DNA, 25 bp, Homo sapien
ttgaatggctcccaaacagttctca

SEQ ID NO: 4564199 - DNA, 25 bp, Homo sapien
tctttctgtgagatgctgccaaatc

SEQ ID NO: 4564200 - DNA, 25 bp, Homo sapien
gccaaatccaaatcaacatttcgtc

SEQ ID NO: 4564201 - DNA, 25 bp, Homo sapien
atccaaatcaacatttcgtctgcca

SEQ ID NO: 4564202 - DNA, 25 bp, Homo sapien
tctctttctgtgagatgctgccaaa

SEQ ID NO: 4564203 - DNA, 25 bp, Homo sapien
aaagccttgaagtagtgccttattt

SEQ ID NO: 4564204 - DNA, 25 bp, Homo sapien
gacacagtatgatcttattagcacc

SEQ ID NO: 4564205 - DNA, 25 bp, Homo sapien
tgaagtagtgccttattttccaaaa

SEQ ID NO: 4564206 - DNA, 25 bp, Homo sapien
caccttccggatgcctaaagccttg

SEQ ID NO: 4564207 - DNA, 25 bp, Homo sapien
tagaagaagaaaatctgatagtctc

SEQ ID NO: 4564208 - DNA, 25 bp, Homo sapien
agaagaaaatctgatagtctccgta

SEQ ID NO: 4564209 - DNA, 25 bp, Homo sapien
ctaggtgtttagaagaagaaaatct

SEQ ID NO: 4564210 - DNA, 25 bp, Homo sapien
gaagaagaaaatctgatagtctccg

SEQ ID NO: 4564211 - DNA, 25 bp, Homo sapien
caatcttaacaattaaatctaagct

SEQ ID NO: 4564212 - DNA, 25 bp, Homo sapien
tgttgtccccatttataattttcca

SEQ ID NO: 4564213 - DNA, 25 bp, Homo sapien
atctaagctcaatcctcctccattg

SEQ ID NO: 4564214 - DNA, 25 bp, Homo sapien
tgtccccatttataattttccagat

SEQ ID NO: 4564215 - DNA, 25 bp, Homo sapien
taatttcctgactacctaccacgtg

SEQ ID NO: 4564216 - DNA, 25 bp, Homo sapien
tatacagtaagtgatcggtgcccca

SEQ ID NO: 4564217 - DNA, 25 bp, Homo sapien
taatgtagactaagactaactgatc

SEQ ID NO: 4564218 - DNA, 25 bp, Homo sapien
gctattataggtgcttgggatacag

SEQ ID NO: 4564219 - DNA, 25 bp, Homo sapien
cagattcactcctcgatttgatcag

SEQ ID NO: 4564220 - DNA, 25 bp, Homo sapien
ctgattcaggctgagacaaatcaga

SEQ ID NO: 4564221 - DNA, 25 bp, Homo sapien
aatcagattcactcctcgatttgat

SEQ ID NO: 4564222 - DNA, 25 bp, Homo sapien
tcaggctgagacaaatcagattcac

SEQ ID NO: 4564223 - DNA, 25 bp, Homo sapien
gctctctgcagtaagactttcactc

SEQ ID NO: 4564224 - DNA, 25 bp, Homo sapien
tataatttgggcttgtgtggactag

SEQ ID NO: 4564225 - DNA, 25 bp, Homo sapien
ggcttgtgtggactagccggctctc

SEQ ID NO: 4564226 - DNA, 25 bp, Homo sapien
ttgtgtggactagccggctctctgc

SEQ ID NO: 4564227 - DNA, 25 bp, Homo sapien
tattaacagggcacaccgatggatc

SEQ ID NO: 4564228 - DNA, 25 bp, Homo sapien
tgtgctgacccttcgctcttgctga

SEQ ID NO: 4564229 - DNA, 25 bp, Homo sapien
tacgagctacttcacgggctgagag

SEQ ID NO: 4564230 - DNA, 25 bp, Homo sapien
gatggatcacggagttgcatgcagc

SEQ ID NO: 4564231 - DNA, 25 bp, Homo sapien
ctgtaacatgcaacacaaaaacaag

SEQ ID NO: 4564232 - DNA, 25 bp, Homo sapien
tgtaacatgcaacacaaaaacaagg

SEQ ID NO: 4564233 - DNA, 25 bp, Homo sapien
gtaacatgcaacacaaaaacaaggt

SEQ ID NO: 4564234 - DNA, 25 bp, Homo sapien
ctaaattcatcagttaatatggaag

SEQ ID NO: 4564235 - DNA, 25 bp, Homo sapien
aatactaaattcatcagttaatatg

SEQ ID NO: 4564236 - DNA, 25 bp, Homo sapien
tactaaattcatcagttaatatgga

SEQ ID NO: 4564237 - DNA, 25 bp, Homo sapien
ctggcccaaagacggtattcttaat

SEQ ID NO: 4564238 - DNA, 25 bp, Homo sapien
cgctcagacgtcttcgaggctggtg

SEQ ID NO: 4564239 - DNA, 25 bp, Homo sapien
tcatttcatgatgaggctcagtgaa

SEQ ID NO: 4564240 - DNA, 25 bp, Homo sapien
gaatggccctatctgatgactcatg

SEQ ID NO: 4564241 - DNA, 25 bp, Homo sapien
ggacaacttgttgccccagaggaca

SEQ ID NO: 4564242 - DNA, 25 bp, Homo sapien
caatagttcgagtaaatgaatgctc

SEQ ID NO: 4564243 - DNA, 25 bp, Homo sapien
gctgtcatcacttcatgttcccgtt

SEQ ID NO: 4564244 - DNA, 25 bp, Homo sapien
taaatgaatgctcctgaggatcaac

SEQ ID NO: 4564245 - DNA, 25 bp, Homo sapien
cagcttcttcatcaatagttcgagt

SEQ ID NO: 4564246 - DNA, 25 bp, Homo sapien
cttaaagaaattatcagaaactaca

SEQ ID NO: 4564247 - DNA, 25 bp, Homo sapien
gctattcagctataaattcctacag

SEQ ID NO: 4564248 - DNA, 25 bp, Homo sapien
gaaatctgctaaggacaatgttaac

SEQ ID NO: 4564249 - DNA, 25 bp, Homo sapien
gcataaaaggtaattaaggcagaga

SEQ ID NO: 4564250 - DNA, 25 bp, Homo sapien
tagacacatatatgctcttccttcc

SEQ ID NO: 4564251 - DNA, 25 bp, Homo sapien
tgtattgaacatatgcaataaccaa

SEQ ID NO: 4564252 - DNA, 25 bp, Homo sapien
ccaatttagagctagctctcacagc

SEQ ID NO: 4564253 - DNA, 25 bp, Homo sapien
ataaaccaatttagagctagctctc

SEQ ID NO: 4564254 - DNA, 25 bp, Homo sapien
ttgaacatatgcaataaccaaggca

SEQ ID NO: 4564255 - DNA, 25 bp, Homo sapien
tcttgcaagcaagtaaacgacttcg

SEQ ID NO: 4564256 - DNA, 25 bp, Homo sapien
tttgtatacacaacggtacacttct
